United States Patent Application Publication US 2021/0260178 A1 - sequence listing, part 9

SEQ ID NO: 15353 - RNA, 1745 nt, Artificial Sequence
  mRNA product Design a-1 (hSL-A100) comprising derived and/or modified sequence from LASV(LASV221-NIG-2010;Clade II)__AIT17624__GPCmut1 (opt1)
aggagagucccgcagucggcguccagcggcucugcuuguucgugugugugucguugcaggccuuauucaagcuuaccaugggccagaucaucaccuucuuccaggaggugccccacgucaucgaggaggugaugaacaucgugcugaucgcccucagccugcuggccauccucaaggggaucuacaacgucgcgaccugcggccuguucgggcugguguccuuccuccugcugugcggccgcagcugcuccacgaccuacaaggggguguacgagcuccagacccuggagcuggacauggccagccucaacaugaccaugccgcuguccugcacgaagaacaacagccaccacuacaucauggucggcaacgagaccggccuggagcucacccugaccaacacguccaucaucaaccacaaguucugcaaccugagcgacgcccacaagaagaaccucuacgaccacgcccugauguccaucaucagcaccuuccaccuguccauccccaacuucaaccaguacgaggccaugagcugcgacuucaacgggggcaagaucuccgugcaguacaaccucagccacaccuacgcgaucgacgccgccaaccacugcgggaccaucgccaacggcgugcugcagacguucaugcggauggcguggggcggguccuacaucgcccuggacagcggcugcggguccugggacugcaucaugaccagcuaccaguaccucaucauccagaacaccaccugggaggaccacugccaguucucccgccccagccccaucggcuaccuggggcugcucagccagcggacgcgcgacaucuacaucucccggcgccgccggggcaccuucaccuggacccucagcgacuccgagggcaacgagacgcccgggggcuacugccugacccgguggaugcugaucgaggccgagcucaagugcuucgggaacaccgccgucgccaagugcaacgagaagcacgacgaggaguucugcgacaugcugcgccuguucgacuucaacaagcaggcgauccggcgccucaagacccccgcccagaugagcauccagcugaucaacaaggccgugaacgcccugaucaacgaccagcucaucaugaagaaccaccuccgggacaucaugugcauccccuacugcaacuacuccaaguacugguaccugaaccacacggugaccgggaagaccagccugccccgcugcuggcuggucuccaacggcagcuaccugaacgagacccacuucuccgacgacaucgagcagcaggccgacaacaugaucacggagaugcuccagaaggaguacauggaccggcagggcaagaccccgcuggggcugguggaccucuucguguucagcaccuccuucuaccugaucagcaucuuccugcaccuggucaagaucccgacccaccgccacgugaucggcaagcccugccccaagccccaccggcucaaccacauggggaucugcuccugcggccuguacaagcacccgggggugcccgucaaguggaagcgcugaggacuagucccuguucccagagcccacuuuuuuuucuuuuuuugaaauaaaauagccugucuuucagaucucaaaggcucuuuucagagccaccaaaaaaaaaaaaaaaaaaaaaaaaaaaaaaaaaaaaaaaaaaaaaaaaaaaaaaaaaaaaaaaaaaaaaaaaaaaaaaaaaaaaaaaaaaaaaaaaaaaaa

SEQ ID NO: 15354 - RNA, 1745 nt, Artificial Sequence
  mRNA product Design a-1 (hSL-A100) comprising derived and/or modified sequence from LASV(LASV237-NIG-2010;Clade II)__AIT17638__GPCmut1 (opt1)
aggagagucccgcagucggcguccagcggcucugcuuguucgugugugugucguugcaggccuuauucaagcuuaccaugggccagaucaucaccuucuuccaggaggugccccacgucaucgaggaggugaugaacaucgugcugaucgcccucagccugcuggccauccucaaggggaucuacaacgucgcgaccugcggccuguucgggcugguguccuuccuccugcugugcggccgcagcugcuccacgaccuacaaggggguguacgagcuccagacccuggagcuggacauggccagccucaacaugaccaugccgcuguccugcacgaagaacaacagccaccacuacaucauggucggcaacgagaccggccuggagcucacccugaccaacacguccaucaucaaccacaaguucugcaaccugagcgacgcccacaagaaggaccucuacgaccacgcccugauguccaucaucagcaccuuccaccuguccauccccaacuucaaccaguacgaggccaugagcugcgacuucaacgggggcaagaucuccgugcaguacaaccucagccacaccuacgcgguggacgccgccaaccacugcgggaccaucgccaacggcguccugcagacguucaugcggauggcguggggcggguccuacaucgcccuggacagcggcugcggguccugggacugcaucaugaccagcuaccaguaccucaucauccagaacaccaccugggaggaccacugccaguucucccgccccagccccaucggcuaccuggggcugcucagccagcggacgcgcgacaucuacaucucccggcgccgccggggcaccuucaccuggacccucagcgacuccgagggcaacgagacgcccgggggcuacugccugacccgguggaugcugaucgaggccgagcucaagugcuucgggaacaccgccguggccaagugcaacgagaagcacgacgaggaguucugcgacaugcugcgccuguucgacuucaacaagcaggcgauccggcgccucaagacccccgcccagaugagcauccagcugaucaacaaggccgugaacgcccugaucaacgaccagcucaucaugaagaaccaccuccgggacaucaugugcauccccuacugcaacuacuccaaguacugguaccugaaccacacggucaccgggaagaccagccugccccgcugcuggcugguguccaacggcagcuaccugaacgagacccacuucuccgacgacaucgagcagcaggccgacaacaugaucacggagcuccugcagaaggaguacauggaccggcagggcaagaccccgcuggggcucguggaccuguucgucuucagcaccuccuucuaccugaucagcaucuuccugcaccucaucaagaucccgacccaccgccacaucacgggcaagcccugccccaagccccaccggcugaaccacauggggaucugcuccugcggccuguacaagcacccgggggugcccgugaaguggaagcgcugaggacuagucccuguucccagagcccacuuuuuuuucuuuuuuugaaauaaaauagccugucuuucagaucucaaaggcucuuuucagagccaccaaaaaaaaaaaaaaaaaaaaaaaaaaaaaaaaaaaaaaaaaaaaaaaaaaaaaaaaaaaaaaaaaaaaaaaaaaaaaaaaaaaaaaaaaaaaaaaaaaaaa

SEQ ID NO: 15355 - RNA, 1745 nt, Artificial Sequence
  mRNA product Design a-1 (hSL-A100) comprising derived and/or modified sequence from LASV(LASV253-NIG-2011;Clade II)__AIT17670__GPCmut1 (opt1)
aggagagucccgcagucggcguccagcggcucugcuuguucgugugugugucguugcaggccuuauucaagcuuaccaugggccagaucaucaccuucuuccaggaggugccccacgucaucgaggaggugaugaacaucgugcugaucgcccucagccugcuggccauccucaaggggaucuacaacgucgcgaccugcggccuguucgggcugguguccuuccuccugcugugcggccgcagcugcuccacgaccuacaaggggguguacgagcuccagacccuggagcuggacauggccagccucaacaugaccaugccgcuguccugcacgaagaacaacagccaccacuacaucauggucggcaacgagaccggccuggagcucacccugaccaacacguccaucaucaaccacaaguucugcaaccugagcgacgcccacaagaagaaccucuacgaccacgcccugauguccaucaucagcaccuuccaccuguccauccccaacuucaaccaguacgaggccaugagcugcgacuucaacgggggcaagaucuccgugcaguacaaccucagccacaccuacgcgguggacgccgccaaccacugcgggaccaucgccaacggcguccugcagacguucaugcggauggcguggggcggguccuacaucgcccuggacagcggcugcggguccugggacugcaucaugaccagcuaccaguaccucaucauccagaacaccaccugggaggaccacugccaguucucccgccccagccccaucggcuaccuggggcugcucagccagcggacgcgcgacaucuacaucucccggcgccgccggggcaccuucaccuggacccucagcgacuccgagggcaacgagacgcccgggggcuacugccugacccgguggaugcugaucgaggccgagcucaagugcuucgggaacaccgccguggccaagugcaacgagaagcacgacgaggaguucugcgacaugcugcgccuguucgacuucaacaagcaggcgauccggcgccucaaggcccccgcccagaugagcauccagcugaucaacaaggccgugaacgcccugaucaacgaccagcucaucaugaagaaccaccuccgggacaucaugugcaucccguacugcaacuacuccaaguacugguaccugaaccacaccgucacggggcgcaccagccugccccggugcuggcugguguccaacggcagcuaccugaacgagacccacuucuccgacgacaucgagcagcaggcggacaacaugaucaccgagcuccugcagaaggaguacaucgaccgccagggcaagacgccccuggggcucguggaccuguucgucuucagcaccuccuucuaccugaucagcaucuuccugcaccucgugaagaucccgacccaccggcacaucaucggcaagcccugccccaagccccaccgccugaaccacauggggaucugcuccugcggccuguacaagcacccgggggugcccgucaaguggaagcggugaggacuagucccuguucccagagcccacuuuuuuuucuuuuuuugaaauaaaauagccugucuuucagaucucaaaggcucuuuucagagccaccaaaaaaaaaaaaaaaaaaaaaaaaaaaaaaaaaaaaaaaaaaaaaaaaaaaaaaaaaaaaaaaaaaaaaaaaaaaaaaaaaaaaaaaaaaaaaaaaaaaaa

SEQ ID NO: 15356 - RNA, 1745 nt, Artificial Sequence
  mRNA product Design a-1 (hSL-A100) comprising derived and/or modified sequence from LASV(LASV254-NIG-2011;Clade II)__AIT17674__GPCmut1 (opt1)
aggagagucccgcagucggcguccagcggcucugcuuguucgugugugugucguugcaggccuuauucaagcuuaccaugggccagaucaucaccuucuuccaggaggugccccacgucaucgaggaggugaugaacaucgugcugaucgcccucagccugcuggccauccucaaggggaucuacaacgucgcgaccugcggccuguucgggcugguguccuuccuccugcugugcggccgcagcugcuccacgaccuacaaggggguguacgagcuccagacccuggagcuggacaugaccaaccucaacaugacgaugccgcugagcugcaccaagaacaacucccaccacuacaucauggucggcaacgagaccggccuggagcucacccugacgaacaccagcaucaucaaccacaaguucugcaaccuguccgacgcccacaagaagaaccucuacaaccacgcccugaugagcaucaucuccaccuuccaccugagcauccccaacuucaaccaguacgaggccauguccugcgacuucaacgggggcaagaucagcgugcaguacaaccucucccacagcuacgccguggacgcggccaaccacugcgggaccaucgccaacggcguccugcagacguucaugcggauggccuggggcggguccuacaucgcgcuggacagcggcugcgggaacugggacugcaucaugaccuccuaccaguaccucaucauccagaacaccaccugggaggaccacugccaguucagccgccccucccccaucggcuaccuggggcugcucagccagcggacgcgcgacaucuacaucagccggcgccgccggggcaccuucaccuggacccucuccgacagcgagggcaacgagacgcccgggggcuacugccugacccgguggaugcugaucgaggccgagcucaagugcuucgggaacaccgccguggccaagugcaacgagaagcacgacgaggaguucugcgacaugcugcgccuguucgacuucaacaagcaggccauccggcgccucaagacccccgcgcaggccaacauccagcugaucaacaaggccgugaacgcccugaucaacgaccagcucaucaugaagaaccaccuccgggacaucaugugcauccccuacugcaacuacuccaaguacugguaccugaaccacacggucaccgggaagaccagccugccccgcugcuggcugguguccaacggcagcuaccugaacgagacccacuucuccgacgacaucgagcagcaggccgacaacaugaucacggagcuccugcagaaggaguacauggaccggcagggcaagaccccgcuggggcucguggaccuguucgucuucagcaccuccuucuaccugaucagcaucuuccugcaccucgugaagaucccgacccaccgccacgugaucggcaagcccugccccaagccccaccggcugaaccacauggggaucugcuccugcggccuguacaagcacccggggguccccgugaaguggaagcgcugaggacuagucccuguucccagagcccacuuuuuuuucuuuuuuugaaauaaaauagccugucuuucagaucucaaaggcucuuuucagagccaccaaaaaaaaaaaaaaaaaaaaaaaaaaaaaaaaaaaaaaaaaaaaaaaaaaaaaaaaaaaaaaaaaaaaaaaaaaaaaaaaaaaaaaaaaaaaaaaaaaaaa

SEQ ID NO: 15357 - RNA, 1745 nt, Artificial Sequence
  mRNA product Design a-1 (hSL-A100) comprising derived and/or modified sequence from LASV(Nig08-A19;Clade III)__ADU56618__GPCmut1 (opt1)
aggagagucccgcagucggcguccagcggcucugcuuguucgugugugugucguugcaggccuuauucaagcuuaccaugggccagaucgugaccuucuuccaggaggucccccacgugaucgaggaggugaugaacaucguccugaucgcccucagcauccuggccauccugaaggggcucuacaacaucgcgaccugcggccugaucgggcuggugacguuccuccugcuguccggccgcagcugcuccaugaccuacaaggggguguacgagcuccagacccuggagcugaacaugaacacccucaacaugacgaugccgcugagcugcaccaagaacaacucccaccacuacaucauggucggcaacgagaccggccuggagcucacccugacgaacaccagccugcuccaccacaaguucugcaaccuguccgacgcccacaagaagaaccuguacgaccacacccucaugagcaucaucuccaccuuccaccugagcauccccaacuucaaccaguacgaggccauguccugcgacuucaacgggggcaagaucacggugcaguacaaccugagccacuccuacgccaucgacgccgcgaaccacugcgggaccguggccaacggcguccuccagaccuucaugcggauggccuggggcgggagcuacaucgcccuggacuccggcugcgggaagugggacugcaucaugaccagcuaccaguaccugaucauccagaacacgaccugggaggaccacugccaguucucccggcccagccccaucggcuaccucgggcugcugucccagcgcacccgggacaucuacaucagccgccggcgccggggcaccuucacguggacccugagcgacuccgagggcaacgagacccccgggggcuacugccucacccgcuggaugcugaucgaggcggagcugaagugcuucgggaacacggccguggccaagugcaacgagaagcacgacgaggaguucugcgacaugcuccggcuguucgacuucaacaagcaggccauccgccggcugaaggcccccgcgcagaugagcauccagcucaucaacaaggccgugaacgcccugaucaacgaccagcugaucaugaagaaccaccuccgcgacaucaugugcauccccuacugcaacuacuccaaguacugguaccugaaccacaccagcaccgggcggaccucccugccccgcugcuggcucgucagcaacggcuccuaccugaacgagacgcacuucagcgacgacaucgagcagcaggccgacaacaugaucaccgagaugcugcagaaggaguaccucgaccggcagggcaagaccccgcuggggcugguggaccuguucguguucuccaccagcuucuaccucaucuccaucuuccugcaccuggucaagaucccgacgcaccgccacaucgugggcaagcccugccccaagccccaccggcucaaccacauggggaucugcagcugcggccuguacaagcagccgggggugcccguccgcuggaagcggugaggacuagucccuguucccagagcccacuuuuuuuucuuuuuuugaaauaaaauagccugucuuucagaucucaaaggcucuuuucagagccaccaaaaaaaaaaaaaaaaaaaaaaaaaaaaaaaaaaaaaaaaaaaaaaaaaaaaaaaaaaaaaaaaaaaaaaaaaaaaaaaaaaaaaaaaaaaaaaaaaaaaa

SEQ ID NO: 15358 - RNA, 1748 nt, Artificial Sequence
  mRNA product Design a-1 (hSL-A100) comprising derived and/or modified sequence from LASV(G1180-SLE-2010;Clade IV)__AIT17168__GPCmut1 (opt1)
aggagagucccgcagucggcguccagcggcucugcuuguucgugugugugucguugcaggccuuauucaagcuuaccaugggccagaucgugaccuucuuccaggaggucccccacgugaucgaggaggugaugaacaucguccugaucgcccucagcauccuggccgugcugaaggggcucuacaacuucgcgaccugcggccugguggggcugcucaccuuccugcugcucugcggccgcuccugcaccgccagccgguacaagggggucuacgagcugcagacccuggagcucaacauggagacccugaacaugacgaugccgcuguccugcaccaagaacaacagccaccacuacaucauggugggcaacgagaccggccucgagcugacccugacgaacaccuccaucaucaaccacaaguucugcaaccucagcgacgcccacaagaagaaccuguacgaccacgcccugauguccaucaucagcaccuuccaccucuccauccccaacuucaaccaguacgaggccaugagcugcgacuucaacgggggcaagaucuccgugcaguacaaccugagccacuccuacgcgggggacgccgccaaccacugcggcaccgucgccaacggggugcugcagacguucaugcgcauggcguggggcggcagcuacaucgcccucgacuccgggugcggcagcugggacugcaucaugaccuccuaccaguaccugaucauccagaacaccaccugggaggaccacugccaguucagccggcccucccccaucggguaccugggccuccugagccagcgcacgcgggacaucuacaucagccgccggcgccggggcaccuucaccuggacccuguccgacagcgaggggaaggacacgccgggcggguacugccugacccgcuggaugcucaucgaggccgagcugaagugcuucggcaacaccgccguggccaagugcaacgagaagcacgacgaggaguucugcgacaugcugcggcuguucgacuucaacaagcaggcgauccagcgccugaaggcccccgcccagauguccauccagcugaucaacaaggccgucaacgcccucaucaacgaccagcugaucaugaagaaccaccuccgggacaucaugugcauccccuacugcaacuacagcaaguacugguaccucaaccacaccacgaccggcaagaccucccugcccaagugcuggcuggugagcaacggcuccuaccucaacgagacccacuucagcgacgacaucgagcagcaggcggacaacaugaucacggagaugcugcagaaggaguacauggagcgccaggggaagacgccccugggccucguggaccuguucgucuucuccaccagcuucuaccugaucuccaucuuccugcaccucgugaagaucccgacccaccggcacaucgugggcaagagcugccccaagccccaccgccugaaccacauggggaucugcuccugcgggcuguacaagcagcccggcgucccggugaaguggaagcggugaggacuagucccuguucccagagcccacuuuuuuuucuuuuuuugaaauaaaauagccugucuuucagaucucaaaggcucuuuucagagccaccaaaaaaaaaaaaaaaaaaaaaaaaaaaaaaaaaaaaaaaaaaaaaaaaaaaaaaaaaaaaaaaaaaaaaaaaaaaaaaaaaaaaaaaaaaaaaaaaaaaaa

SEQ ID NO: 15359 - RNA, 1748 nt, Artificial Sequence
  mRNA product Design a-1 (hSL-A100) comprising derived and/or modified sequence from LASV(G1442-SLE-2011;Clade IV)__AIT17180__GPCmut1 (opt1)
aggagagucccgcagucggcguccagcggcucugcuuguucgugugugugucguugcaggccuuauucaagcuuaccaugggccagaucgugaccuucuuccaggaggucccccacgugaucgaggaggugaugaacaucguccugaucgcccucagcauccuggccgugcugaaggggcucuacaacguggcgaccugcggccugaucgggcuggucacguuccuccugcugugcggccgcuccugcaccaccacccucuacaaggggguguacgagcugcagacgcuggagcucaacauggagacccugaacaugaccaugccgcugagcugcaccaagaacaacucccaccacuacauccgggugggcaacgagacgggccucgagcugacccugaccaacaccagcaucaucaaccacaaguucugcaaccucuccgacgcccacaagaagaaccuguacgaccacgcccugaugagcaucaucuccacguuccaccucagcauccccaacuucaaccaguacgaggccauguccugcgacuucaacgggggcaagaucagcguccaguacaaccugucccacagcuacgccggggacgcggccaaccacugcggcaccguggccaacggggugcugcagaccuucaugcgcauggccuggggcggcuccuacaucgcgcucgacagcgggugcggcaacugggacugcaucaugaccuccuaccaguaccugaucauccagaacacgaccugggacgaccacugccaguucagccgccccucccccaucggguaccugggccuccugagccagcggacccgcgacgucuacaucucccggcgccgccggggcaccuucacguggacccugagcgacagcgaggggaaggacaccccgggcggguacugccugacccgguggaugcucaucgaggccgagcugaagugcuucggcaacacggccguggccaagugcaacgagaagcacgacgaggaguucugcgacaugcugcgccucuucgacuucaacaagcaggccauccagcggcugaaggcgcccgcccagauguccauccagcugaucaacaaggccgugaacgcccucaucaacgaccagcugaucaugaagaaccaccuccgcgacaucaugugcauccccuacugcaacuacagcaaguacugguaccugaacaacaccgccaccggcaagaccucccugcccaagugcuggcugaucagcaacggcuccuaccucaacgagacgcacuucagcgacgacaucgagcaggaggcggacaacaugaucaccgagaugcugcagaaggaguacauggagcggcaggggaagacgccccugggccucgucgaccuguucguguucuccaccagcuucuaccugaucuccaucuuccugcaccucgugaagaucccgacccaccgccacaucgucggcaagagcugccccaagccccaccggcugaaccacauggggaucugcuccugcgggcuguacaagcagcccggcgugccggugcgcuggaagcggugaggacuagucccuguucccagagcccacuuuuuuuucuuuuuuugaaauaaaauagccugucuuucagaucucaaaggcucuuuucagagccaccaaaaaaaaaaaaaaaaaaaaaaaaaaaaaaaaaaaaaaaaaaaaaaaaaaaaaaaaaaaaaaaaaaaaaaaaaaaaaaaaaaaaaaaaaaaaaaaaaaaaa

SEQ ID NO: 15360 - RNA, 1748 nt, Artificial Sequence
  mRNA product Design a-1 (hSL-A100) comprising derived and/or modified sequence from LASV(G3010-SLE-2013;Clade IV)__AIT17344__GPCmut1 (opt1)
aggagagucccgcagucggcguccagcggcucugcuuguucgugugugugucguugcaggccuuauucaagcuuaccaugggccagaucgugaccuucuuccaggaggucccccacgugaucgaggaggugaugaacaucguccugaucgcccucagcauccuggccgugcugaaggggcucuacaacuucgcgaccugcggccugguggggcuggucacguuccuccugcugugcggccgcuccugcaccaccagccucuacaaggggguguacgagcugcagacccuggagcucaacauggagacgcugaacaugaccaugccgcuguccugcaccaagaacaacagccaccacuacaucauggugggcaacgagaccggccucgagcugacgcugaccaacaccuccaucaucaaccacaaguucugcaaccucagcgacgcccacaagaagaaccuguacaaccacgcccugauguccaucaucagcaccuuccaccucuccauccccaacuucaaccaguacgaggccaugagcugcgacuucaacgggggcaagaucuccguccaguacaaccugagccacuccuacgccggggacgcggccagccacugcggcacgguggccaacggggugcugcagaccuucaugcggauggccuggggcggcuccuacaucgcgcucgacagcgggugcggcaagugggacugcaucaugaccuccuaccaguaccugaucauccagaacaccacgugggaggaccacugccaguucagccgccccucccccaucggguaccugggccuccugagccagcggacccgcgacaucuacaucagccggcgccgccggggcaccuucaccuggacgcuguccgacagcgaggggaaggacaccccgggcggguacugccugacccgguggaugcucaucgaggccgagcugaagugcuucggcaacaccgccgucgccaagugcaacgagaagcacgacgaggaguucugcgacaugcugcgccucuucgacuucaacaagcaggccauccagcggcugaagacgcccgcgcagauguccauccagcugaucaacaaggccgugaacgcccucaucaacgaccagcugaucaugaagaaccaccuccgcgacaucaugugcauccccuacugcaacuacagcaaguacugguaccugaaccacaccaccaccggcaagacgucccugcccaagugcuggcuggugagcaacggcuccuaccucaacgagacccacuucagcgacgacaucgagcagcaggccgacaacaugaucaccgagaugcugcagaaggaguacauggagcggcaggggaagacgccccugggccucgucgaccuguucguguucuccaccagcuucuaccugaucuccaucuuccugcaccucgugaagaucccgacccaccgccacaucgucggcaagagcugccccaagccccaccggcugaaccacauggggaucugcuccugcgggcuguacaagcagcccggcgugccggugcgcuggaagcggugaggacuagucccuguucccagagcccacuuuuuuuucuuuuuuugaaauaaaauagccugucuuucagaucucaaaggcucuuuucagagccaccaaaaaaaaaaaaaaaaaaaaaaaaaaaaaaaaaaaaaaaaaaaaaaaaaaaaaaaaaaaaaaaaaaaaaaaaaaaaaaaaaaaaaaaaaaaaaaaaaaaaa

SEQ ID NO: 15361 - RNA, 1748 nt, Artificial Sequence
  mRNA product Design a-1 (hSL-A100) comprising derived and/or modified sequence from LASV(G502-SLE-2009;Clade IV)__AIT17126__GPCmut1 (opt1)
aggagagucccgcagucggcguccagcggcucugcuuguucgugugugugucguugcaggccuuauucaagcuuaccaugggccagaucgugaccuucuuccaggaggucccccacgugaucgaggaggugaugaacaucguccugaucgcccucagcauccuggccgugcugaaggggcucuacaacuucgcgaccugcggccugguggggcugcucacguuccugcugcucugcggccgcuccugcaccaccgggcuguacaagggcgucuacgagcugcagacccucgagcugaacauggagacgcugaacaugaccaugccgcucagcugcaccaagaacaacucccaccacuacaucauggugggcaacgagaccgggcuggagcugacgcucaccaacaccagcaucaucaaccacaaguucugcaaccuguccgacgcccacaagaagaaccuguacgaccacgcccucaugagcaucaucuccaccuuccaccugagcauccccaacuucaaccaguacgaggccauguccugcgacuucaacggcgggaagaucagcgugcaguacaaccugucccacagcuacgccggcgacgcggccgaccacugcgggacggucgccaacggcgugcuccagaccuucaugcggauggccuggggcggguccuacaucgcgcuggacagcggcugcgggcggugggacugcaucaugaccuccuaccaguaccugaucauccagaacaccacgugggaggaccacugccaguucagccgccccucccccaucggcuaccucggccugcugagccagcggacccgcgacaucuacaucucccggcgccgccgggggaccuucaccuggacgcugagcgacagcgagggcaaggacacccccgggggcuacugccucacccgguggaugcugaucgaggccgagcugaagugcuucgggaacaccgccguggccaagugcaacgagaagcacgacgaggaguucugcgacaugcuccgccuguucgacuucaacaagcaggccauccagcggcugaaggcgcccgcccagauguccauccagcucaucaacaaggccgucaacgcccugaucaacgaccagcuggugaugaagaaccaccuccgcgacaucaugugcauccccuacugcaacuacagccgguacugguaccugaaccacacgaccaccggccgcaccucccugcccaagugcuggcucgugagcaacggguccuaccugaacgagacgcacuucagcgacgacaucgagcagcaggccgacaacaugaucaccgagaugcugcagaaggaguacauggagcggcagggcaagaccccgcucgggcuggucgaccuguucguguucuccaccagcuucuaccugaucuccaucuuccuccaccuggugaagaucccgacgcaccgccacaucgucggcaagagcugccccaagccccaccggcugaaccacauggggaucugcuccugcggccucuacaagcagcccggcgugccggugaaguggaagcgcugaggacuagucccuguucccagagcccacuuuuuuuucuuuuuuugaaauaaaauagccugucuuucagaucucaaaggcucuuuucagagccaccaaaaaaaaaaaaaaaaaaaaaaaaaaaaaaaaaaaaaaaaaaaaaaaaaaaaaaaaaaaaaaaaaaaaaaaaaaaaaaaaaaaaaaaaaaaaaaaaaaaaa

SEQ ID NO: 15362 - RNA, 1748 nt, Artificial Sequence
  mRNA product Design a-1 (hSL-A100) comprising derived and/or modified sequence from LASV(G733-SLE-2010;Clade IV)__AIT17154__GPCmut1 (opt1)
aggagagucccgcagucggcguccagcggcucugcuuguucgugugugugucguugcaggccuuauucaagcuuaccaugggccagaucgugaccuucuuccaggaggucccccacgugaucgaggaggugaugaacaucguccugaucgcccucagcauccuggccgugcugaaggggcucuacaacuucgcgaccugcggcaucguggggcuggucuccuuccugcuccugugcggccgcagcugcacgaccucccuguacaaggggguguacgagcuccagacccuggagcugaacauggagacccucaacaugacgaugccgcugagcugcaccaagaacaacucccaccacuacaucauggugggcaacgagaccggccuggagcucacccugacgaacaccagcaucaucaaccacaaguucugcaaccuguccgacgcccacaagaagaaccucuacgaccacgcccugaugagcaucaucuccaccuuccaccugagcauccccaacuucaaccaguacgaggccauguccugcgacuucaacgggggcaagaucagcguccaguacaaccucucccacagcuacgccggggacgcggccaaccacugcggcaccaucgccaacggggugcugcagacguucaugcggauggccuggggcggcuccuacaucgcgcuggacagcgggugcgaccggugggacugcaucaugaccuccuaccaguaccucaucauccagaacaccaccugggaggaccacugccaguucagccgccccucccccaucggcuaccuggggcugcucagccagcggacgcgcgacaucuacaucagccggcgccgccggggcaccuucaccuggacccucuccgacagcgagggcaaggacacgcccgggggcuacugccugacccgguggaugcugaucgaggccgagcucaagugcuucgggaacaccgccguggccaagugcaacgagaagcacgacgaggaguucugcgacaugcugcgccuguucgacuucaacaagcaggccauccagcggcucaaggcgcccgcccagauguccauccagcugaucaacaaggccgucaacgcccugaucaacgaccagcucaucaugaagaaccaccuccgcgacaucaugugcauccccuacugcaacuacagcaaguacugguaccugaaccacaccacgaccgggaagaccucccugcccaagugcuggcuggugagcaacggcuccuaccugaacgagacccacuucagcgacgacaucgagcagcaggccgacaacaugaucacggagaugcuccagaaggaguacauggagcggcagggcaagaccccgcuggggcugguggaccucuucgucuucuccaccagcuucuaccugaucuccaucuuccugcaccuggugaagaucccgacccaccgccacguggucggcaagagcugccccaagccccaccggcucaaccacauggggaucugcuccugcggccuguacgggcagcccggcgugccggugaaguggaagcgcugaggacuagucccuguucccagagcccacuuuuuuuucuuuuuuugaaauaaaauagccugucuuucagaucucaaaggcucuuuucagagccaccaaaaaaaaaaaaaaaaaaaaaaaaaaaaaaaaaaaaaaaaaaaaaaaaaaaaaaaaaaaaaaaaaaaaaaaaaaaaaaaaaaaaaaaaaaaaaaaaaaaaa

SEQ ID NO: 15363 - RNA, 1748 nt, Artificial Sequence
  mRNA product Design a-1 (hSL-A100) comprising derived and/or modified sequence from MOPV/LASV reassortant(IGS-1;Clade IV)__AFY05576__GPCmut1 (opt1)
aggagagucccgcagucggcguccagcggcucugcuuguucgugugugugucguugcaggccuuauucaagcuuaccaugggccagaucgugaccuucuuccaggaggucccccacgugaucgaggaggugaugaacaucguccugaucgcccucagcgugcuggccgugcugaaggggcucuacaacuucgcgaccugcggccuggucgggcuggugacguuccuccugcugugcggccgcuccugcaccaccagccucuacaaggggguguacgagcugcagacccuggagcucaacauggagacgcugaacaugaccaugccgcuguccugcaccaagaacaacagccaccacuacaucauggucggcaacgagaccggccucgagcugacgcugaccaacaccuccaucaucaaccacaaguucugcaaccucagcgacgcccacaagaagaaccuguacgaccacgcccugauguccaucaucagcaccuuccaccucuccauccccaacuucaaccaguacgaggccaugagcugcgacuucaacgggggcaagaucuccgugcaguacaaccugagccacuccuacgccggggacgcggccaaccacugcggcacgguggccaacgggguccugcagaccuucaugcggauggccuggggcggcagcuacaucgcgcucgacuccgggugcggcaacugggacugcaucaugaccagcuaccaguaccugaucauccagaacaccacgugggaggaccacugccaguucucccggcccagccccaucggguaccugggccuccugucccagcgcacccgggacaucuacaucagccgccggcgccggggcaccuucaccuggacgcugagcgacuccgagggggaggacaccccgggcggguacugccugacccgcuggaugcucaucgaggccgagcugaagugcuucggcaacaccgccguggccaagugcaacgagaagcacgacgaggaguucugcgacaugcugcggcuguucgacuucaacaagcaggccauccagcgccugaaggcgcccgcccagaugagcauccagcugaucaacaaggccgugaacgcccucaucaacgaccagcugaucaugaagaaccaccuccgggacaucaugugcauccccuacugcaacuacuccaaguacugguaccucaaccacacgaccaccggccgcaccagccugcccaagugcuggcuggucuccaacggcagcuaccucaacgagacgcacuucuccgacgacaucgagcagcaggccgacaacaugaucaccgagaugcugcagaaggaguacauggagcggcaggggaagacgccccugggccucguggaccuguucguguucagcaccuccuucuaccugaucagcaucuuccugcaccucgucaagaucccgacccaccgccacaucguggggaaguccugccccaagccccaccggcugaaccacaugggcaucugcagcugcgggcuguacaagcagcccggcgugccggucaaguggaagcgcugaggacuagucccuguucccagagcccacuuuuuuuucuuuuuuugaaauaaaauagccugucuuucagaucucaaaggcucuuuucagagccaccaaaaaaaaaaaaaaaaaaaaaaaaaaaaaaaaaaaaaaaaaaaaaaaaaaaaaaaaaaaaaaaaaaaaaaaaaaaaaaaaaaaaaaaaaaaaaaaaaaaaa

SEQ ID NO: 15364 - RNA, 1748 nt, Artificial Sequence
  mRNA product Design a-1 (hSL-A100) comprising derived and/or modified sequence from LASV(LM765-SLE-2012;Clade IV)__AIT17814__GPCmut1 (opt1)
aggagagucccgcagucggcguccagcggcucugcuuguucgugugugugucguugcaggccuuauucaagcuuaccaugggccagaucgugaccuucuuccaggaggucccccacgugaucgaggaggugaugaacaucguccugaucgcccucagcauccuggccgugcugaaggggcucuacaacuucgcgaccugcggccugguggggcuggucacguuccuccugcugugcggccgcuccugcaccaccagccucuacaaggggguguacgagcugcagacccuggagcucaacauggagacgcugaacaugaccaugccgcuguccugcaccaagaacaacagccaccacuacaucauggugggcaacgagaccggccucgagcugacgcugaccaacaccuccaucaucgaccacaaguucugcaaccucagcgacgcccaccggaagaaccuguacgaccacgcccugauguccaucaucagcaccuuccaccucuccauccccaacuucaaccaguacgaggccaugagcugcgacuucaacgggggcaagaucuccguccaguacaaccugagccacuccuacgccaaggacgcggccgaccacugcgggacgguggccaacggcgugcugcagaccuucaugcgcauggccuggggcgggagcuacaucgcgcucgacuccggcugcgggcgcugggacugcaucaugaccagcuaccaguaccugaucauccagaacaccacgugggaggaccacugccaguucucccggcccagccccaucggcuaccuggggcuccugucccagcgcacccgggacaucuacaucagccgccggcgccggggcaccuucaccuggacgcugagcgacuccgagggcaaggacacccccgggggcuacugccugacccgcuggaugcucaucgaggccgagcugaagugcuucgggaacaccgccgucgccaagugcaacgagaagcacgacgaggaguucugcgacaugcugcggcuguucgacuucaacaagcaggccauccagcgccugaaggcgcccgcccagaugagcauccagcugaucaacaaggccgugaacgcccucaucaacgaccagcugaucaugaagaaccaccuccgggacaucaugugcauccccuacugcaacuacuccaaguacugguaccucaaccacacgaccaccgggaagaccagccugcccaagugcuggcugguguccaacggcagcuaccucaacgagacgcacuucuccgacgacaucgagcagcaggccgacaacaugaucaccgagaugcugcagaaggaguacauggagcgccagggcaagaccccgcuggggcucgucgaccuguucguguucagcaccuccuucuaccugaucagcaucuuccugcaccucgugaagaucccgacgcaccggcacaucgucggcaagcccugccccaagccccaccgccugaaccacauggggaucugcuccugcggccuguacaagcagccgggggugcccgugaaguggaagcggugaggacuagucccuguucccagagcccacuuuuuuuucuuuuuuugaaauaaaauagccugucuuucagaucucaaaggcucuuuucagagccaccaaaaaaaaaaaaaaaaaaaaaaaaaaaaaaaaaaaaaaaaaaaaaaaaaaaaaaaaaaaaaaaaaaaaaaaaaaaaaaaaaaaaaaaaaaaaaaaaaaaaa

SEQ ID NO: 15365 - RNA, 1748 nt, Artificial Sequence
  mRNA product Design a-1 (hSL-A100) comprising derived and/or modified sequence from LASV(LM776-SLE-2012;Clade IV)__AIT17824__GPCmut1 (opt1)
aggagagucccgcagucggcguccagcggcucugcuuguucgugugugugucguugcaggccuuauucaagcuuaccaugggccagaucgugaccuucuuccaggaggucccccacgugaucgaggaggugaugaacaucguccugaucgcccucagcauccuggccgugcugaaggggcucuacaacuucgcgaccugcggccugguggggcuggucacguuccuccugcugugcggccgcuccugcaccaccagcguguacaaggggguguacgagcuccagacccuggagcugaacauggagacgcucaacaugaccaugccgcuguccugcaccaagaacaacagccaccacuacaucauggucggcaacgagaccggccuggagcucacgcugaccaacaccuccaucaucaaccacaaguucugcaaccugagcgacgcccacaagaagaaccucuacgaccacgcccugauguccaucaucagcaccuuccaccuguccauccccaacuucaaccaguacgaggccaugagcugcgacuucaacgggggcaagaucuccgugcaguacaaccucagccacuccuacgccggggacgcggccaaccacugcggcacgguggccaacgggguccugcagaccuucaugcggauggccuggggcggcagcuacaucgcgcuggacuccgggugcggcaagugggacugcaucaugaccagcuaccaguaccucaucauccagaacaccacgugggaggaccacugccaguucucccgccccagccccaucggguaccugggccugcucucccagcggacccgcgacaucuacaucagccggcgccgccggggcaccuucaccuggacgcucagcgacuccgaggggaaggacaccccgggcggguacugccugacccgguggaugcugaucgaggccgagcucaagugcuucggcaacaccgccguggccaagugcaacgagaagcacgacgaggaguucugcgacaugcugcgccuguucgacuucaacaagcaggccauccagcggcucaaggcgcccgcccagaugagcauccagcugaucaacaaggccgugaacgcccugaucaacgaccagcucaucaugaagaaccaccuccgcgacaucaugugcauccccuacugcaacuacuccaaguacugguaccugaaccacacgaccaccggcaagaccagccugcccaagugcuggcuggucuccaacggcagcuaccugaacgagacgcacuucuccgacgacaucgagcagcaggccgacaacaugaucaccgagaugcuccagaaggaguacauggagcggcaggggaagacgccccugggccugguggaccucuucguguucagcaccuccuucuaccugaucagcaucuuccugcaccuggucaagaucccgacccaccgccacaucguggggaaguccugccccaagccccaccggcucaaccacaugggcaucugcagcugcgggcuguacaagcagcccggcgugccgguccgcuggaagcggugaggacuagucccuguucccagagcccacuuuuuuuucuuuuuuugaaauaaaauagccugucuuucagaucucaaaggcucuuuucagagccaccaaaaaaaaaaaaaaaaaaaaaaaaaaaaaaaaaaaaaaaaaaaaaaaaaaaaaaaaaaaaaaaaaaaaaaaaaaaaaaaaaaaaaaaaaaaaaaaaaaaaa

SEQ ID NO: 15366 - RNA, 1748 nt, Artificial Sequence
  mRNA product Design a-1 (hSL-A100) comprising derived and/or modified sequence from LASV(Mad39;Clade IV)__ANH09722__GPCmut1 (opt1)
aggagagucccgcagucggcguccagcggcucugcuuguucgugugugugucguugcaggccuuauucaagcuuaccaugggccagaucgugaccuucuuccaggaggucccccacgugaucgaggaggugaugaacaucguccugaucgcccucagcauccuggccgugcugaaggggcucuacaacguggcgaccugcggccugaucgggcuggucacguuccuccugcugugcggccgcuccugcaccaccacccucuacaaggggguguacgagcugcaggcccuggagcucaacauggagacgcugaacaugaccaugccgcugagcugcaccaagaacaacucccaccacuacauccgggugggcaacgagaccggccucgagcugacgcugaccaacaccagccucaucaaccacaaguucugcaaccuguccgacgcccacaagaagaaccuguacgaccacgcccucaugagcaucaucuccaccuuccaccugagcauccccaacuucaaccaguacgaggccauguccugcgacuucaacgacgggaagaucagcguccaguacaaccugucccacacguacgcgggcgacaccgccaaccacugcgggaccguggccaacggcgugcuccagaccuucaugcgcauggccuggggcgggagcuacaucgcgcuggacuccggcugcgggggcugggacugcaucaugacgagcuaccaguaccugaucauccagaacaccaccugggaggaccacugccaguucucccggcccagccccaucggguaccucggccugcugucccagcggacccgcgacaucuacaucagccggcgccgccggggcacguucaccuggacccuguccgacagcgaggggaaggacaccccgggcggguacugccucacgcgguggaugcugaucgaggccgagcugaagugcuucggcaacaccgccgucgccaagugcaacgagaagcacgacgaggaguucugcgacaugcuccgccuguucgacuucaacaagcaggccauccagcggcugaaggcgcccgcccagaugagcauccagcucaucaacaaggccgugaacgcccugaucaacgaccagcugaucaugaagaaccaccuccgcgacaucaugugcauccccuacugcaacuacuccaaguacugguaccugaaccacaccgugaccggcaagacgagccugcccaagugcuggcucgucuccaacggcagcuaccugaacgagacccacuucuccgacgacaucgagcagcaggccgacaacaugaucaccgagaugcugcagaaggaguacauggagcggcaggggaagacgccccucggccugguggaccuguucguguucagcaccuccuucuaccugaucagcaucuuccuccaccuggucaagaucccgacccaccgccacgugguggggaagcccugccccaagccccaccggcugaaccacaugggcaucugcuccugcggguucuacaagcagccgggcguccccgugcgcuggaagcggugaggacuagucccuguucccagagcccacuuuuuuuucuuuuuuugaaauaaaauagccugucuuucagaucucaaaggcucuuuucagagccaccaaaaaaaaaaaaaaaaaaaaaaaaaaaaaaaaaaaaaaaaaaaaaaaaaaaaaaaaaaaaaaaaaaaaaaaaaaaaaaaaaaaaaaaaaaaaaaaaaaaaa

SEQ ID NO: 15367 - RNA, 1748 nt, Artificial Sequence
  mRNA product Design a-1 (hSL-A100) comprising derived and/or modified sequence from LASV(Z0947-SLE-2011;Clade IV)__AIT17840__GPCmut1 (opt1)
aggagagucccgcagucggcguccagcggcucugcuuguucgugugugugucguugcaggccuuauucaagcuuaccaugggccagaucgugaccuucuuccaggaggucccccacgugaucgaggaggugaugaacaucguccugaucgcccucagcauccuggccgugcugaaggggcucuacaacuucgcgaccugcggccugguggggcuggucacguuccuccugcugugcggccgcuccugcaccaucagccucuacaaggggguguacgagcugcagacccuggagcucaacauggagacccugaacaugacgaugccgcuguccugcaccaagaacaacagccaccacuacaucauggugggcaacgagaccggccucgagcugacccugacgaacaccuccaucaucaaccacaaguucugcaaccucagcgacgcccacaagaagaaccuguacgaccacgcccugauguccaucaucagcaccuuccaccucuccauccccaacuucaaccaguacgaggccaugagcugcgacuucaacgggggcaagaucuccguccaguacaaccugagccacuccuacgccggggacgcggccaaccacugcggcaccguggccaacggggugcugcagacguucaugcggauggccuggggcggcagcuacaucgcgcucgacuccgggugcgaccggugggacugcaucaugaccagcuaccaguaccugaucauccagaacaccaccugggaggaccacugccaguucucccgccccagccccaucggcuaccuggggcuccugucccagcggacgcgcgacaucuacaucagccggcgccgccggggcaccuucaccuggacccugagcgacuccgagggcaaggacacgcccgggggcuacugccugacccgguggaugcucaucgaggccgagcugaagugcuucgggaacaccgccgucgccaagugcaacgagaagcacgacgaggaguucugcgacaugcugcgccucuucgacuucaacaagcaggccauccagcggcugaaggcgcccgcccagaugagcauccagcugaucaacaaggccgugaacgcccucaucaacgaccagcugaucaugaagaaccaccuccgcgacaucaugugcauccccuacugcaacuacuccaaguacugguaccugaaccacaccacgaccgggaagaccagccugcccaagugcuggcugguguccaacggcagcuaccucaacgagacccacuucuccgacgacaucgagcagcaggccgacaacaugaucacggagaugcugcagaaggaguacauggagcggcagggcaagaccccgcuggggcucgucgaccuguucguguucagcaccuccuucuaccugaucagcaucuuccugcaccucgugaagaucccgacccaccgccacaucgucggcaagcccugccccaagccccaccggcugaaccacauggggaucugcuccugcggccuguacaagcagccgggggugcccgugaaguggaagcgcugaggacuagucccuguucccagagcccacuuuuuuuucuuuuuuugaaauaaaauagccugucuuucagaucucaaaggcucuuuucagagccaccaaaaaaaaaaaaaaaaaaaaaaaaaaaaaaaaaaaaaaaaaaaaaaaaaaaaaaaaaaaaaaaaaaaaaaaaaaaaaaaaaaaaaaaaaaaaaaaaaaaaa

SEQ ID NO: 15368 - RNA, 1748 nt, Artificial Sequence
  mRNA product Design a-1 (hSL-A100) comprising derived and/or modified sequence from LASV(Josiah;Clade IV)__NP_694870__GPCmut1 (opt1)
aggagagucccgcagucggcguccagcggcucugcuuguucgugugugugucguugcaggccuuauucaagcuuaccaugggccagaucgugaccuucuuccaggaggucccccacgugaucgaggaggugaugaacaucguccugaucgcccucagcgugcuggccgugcugaaggggcucuacaacuucgcgaccugcggccuggucgggcuggugacguuccuccugcugugcggccgcuccugcaccaccagccucuacaaggggguguacgagcugcagacccuggagcucaacauggagacgcugaacaugaccaugccgcuguccugcaccaagaacaacagccaccacuacaucauggucggcaacgagaccggccucgagcugacgcugaccaacaccuccaucaucaaccacaaguucugcaaccucagcgacgcccacaagaagaaccuguacgaccacgcccugauguccaucaucagcaccuuccaccucuccauccccaacuucaaccaguacgaggccaugagcugcgacuucaacgggggcaagaucuccgugcaguacaaccugagccacuccuacgccggggacgcggccaaccacugcggcacgguggccaacgggguccugcagaccuucaugcggauggccuggggcggcagcuacaucgcgcucgacuccgggugcggcaacugggacugcaucaugaccagcuaccaguaccugaucauccagaacaccacgugggaggaccacugccaguucucccgccccagccccaucggguaccugggccuccugucccagcggacccgcgacaucuacaucagccggcgccggcgcggcaccuucaccuggacgcugagcgacuccgaggggaaggacaccccgggcggguacugccucacccgguggaugcugaucgaggccgagcugaagugcuucggcaacaccgccguggccaagugcaacgagaagcacgacgaggaguucugcgacaugcuccgccuguucgacuucaacaagcaggccauccagcggcugaaggcgcccgcccagaugagcauccagcucaucaacaaggccgugaacgcccugaucaacgaccagcugaucaugaagaaccaccuccgcgacaucaugugcauccccuacugcaacuacuccaaguacugguaccugaaccacacgaccaccgggcggaccagccugcccaagugcuggcucgucuccaacggcagcuaccugaacgagacgcacuucuccgacgacaucgagcagcaggccgacaacaugaucaccgagaugcugcagaaggaguacauggagcgccagggcaagaccccgcucgggcugguggaccuguucguguucagcaccuccuucuaccucaucagcaucuuccugcaccuggucaagauccccacgcaccggcacaucgugggcaaguccugccccaagccccaccgccugaaccacauggggaucugcagcugcggccucuacaagcagccgggggugcccgucaaguggaagcggugaggacuagucccuguucccagagcccacuuuuuuuucuuuuuuugaaauaaaauagccugucuuucagaucucaaaggcucuuuucagagccaccaaaaaaaaaaaaaaaaaaaaaaaaaaaaaaaaaaaaaaaaaaaaaaaaaaaaaaaaaaaaaaaaaaaaaaaaaaaaaaaaaaaaaaaaaaaaaaaaaaaaa

SEQ ID NO: 15369 - RNA, 1745 nt, Artificial Sequence
  mRNA product Design a-1 (hSL-A100) comprising derived and/or modified sequence from LASV(LP;Clade I)__AAF86701__GPCmut1 (opt1)
aggagagucccgcagucggcguccagcggcucugcuuguucgugugugugucguugcaggccuuauucaagcuuaccaugggccagaucaucaccuucuuccaggaggugccccacgucaucgaggaggugaugaacaucgugcugaucgcccucagccugcuggccauccucaaggggcuguacaacaucgcgaccugcggcaucaucgggcuggucgccuuccucuuccugugcggcaaguccugcagccugacgcucaagggcggguacgagcugcagacccuggagcucaacauggagacccugaacaugaccaugccgcuguccugcacgaagaacagcucccaccacuacauccgcgugggcaacgagaccgggcucgagcugacccugaccaacacgagcaucaucaaccacaaguucugcaaccucuccgacgcccacaagaagaaccuguacgaccacgcccugaugagcaucaucuccaccuuccaccucagcauccccaacuucaaccaguacgaggccauguccugcgacuucaacggcgggaagaucagcgugcaguacaaccugucccacagcuacgcgggcgacgccgccgagcacugcgggaccgucgccaacggcgugcugcagaccuucaugcggauggcguggggcgggcgcuacaucgcccucgacuccggcugcgggaacugggacugcaucaugacgagcuaccaguaccugaucauccagaacaccaccugggaggaccacugccaguucucccggcccagccccaucggcuaccugggccuccugucccagcgcacccgggacaucuacaucagccgccggcgccgggggacguucaccuggacccugagcgacuccgagggcaacgagacccccgggggcuacugccucacgcgcuggaugcugaucgaggccgagcugaagugcuucgggaacaccgccguggccaagugcaacgagaagcacgacgaggaguucugcgacaugcuccggcuguucgacuucaacaagcaggcgauccgccggcugaaggccccggcccagaugagcauccagcucaucaacaaggccgucaacgcccugaucaacgaccagcugaucaugaagaaccaccuccgcgacaucaugugcauccccuacugcaacuacuccaaguacugguaccugaaccacaccagcuccggccggaccagccugcccaagugcuggcucaucuccaacggcagcuaccugaacgagacgcaguucuccgacgacaucgagcagcaggcggacaacaugaucaccgagaugcugcagaaggaguacaucgagcgccaggggaagaccccgcucggccugguggacaucuucaucuucagcaccuccuucuaccugaucagcaucuuccuccaccugaucaagauccccacgcaccggcacaucguggggaagcccugccccaagccgcaccgccugaaccacaugggcgucugcuccugcgggcuguacaagcaccccggcgugcccaccaaguggaagcggugaggacuagucccuguucccagagcccacuuuuuuuucuuuuuuugaaauaaaauagccugucuuucagaucucaaaggcucuuuucagagccaccaaaaaaaaaaaaaaaaaaaaaaaaaaaaaaaaaaaaaaaaaaaaaaaaaaaaaaaaaaaaaaaaaaaaaaaaaaaaaaaaaaaaaaaaaaaaaaaaaaaaa

SEQ ID NO: 15370 - RNA, 1745 nt, Artificial Sequence
  mRNA product Design a-1 (hSL-A100) comprising derived and/or modified sequence from LASV(803213;Clade II)__AAF86703__GPCmut1 (opt1)
aggagagucccgcagucggcguccagcggcucugcuuguucgugugugugucguugcaggccuuauucaagcuuaccaugggccagaucaucaccuucuuccaggaggugccccacgucaucgaggaggugaugaacaucgugcugaucgcccucagccugcuggccauccucaaggggaucuacaacgucgcgaccugcggccuguucgggcugaucuccuuccuccugcugugcggccgcagcugcuccgugacguacaaggggguguacgagcuccagacccuggagcugaacauggccaaccucaacaugaccaugccgcugagcugcaccaagaacaacucccaccacuacaucauggucggcaacgagacgggccuggagcucacccugaccaacaccagcaucaucaaccacaaguucugcaaccuguccgacgcccacaagaagaaccucuacgaccacgcccugaugagcaucaucuccacguuccaccugagcauccccaacuucaaccaguacgaggccauguccugcgacuucaacgggggcaagaucagcgugcaguacaaccucucccacagcuucgcgguggacgccgccaaccacugcgggaccaucgccaacggcguccugcagaccuucaugcggauggcguggggcggguccuacaucgcccuggacagcggcugcgggaacugggacugcaucaugaccuccuaccaguaccucaucauccagaacacgaccugggaggaccacugccaguucagccgccccucccccaucggcuaccuggggcugcucagccagcggacccgcgacaucuacaucagccggcgccggcgcggcaccuucacguggacccuguccgacagcgagggcaacgaggcccccgggggcuacugccugacccgguggaugcucaucgaggccgagcugaagugcuucgggaacaccgccguggcgaagugcaacgagaagcacgacgaggaguucugcgacaugcugcgccucuucgacuucaacaagcaggccaucaagcggcugaagacgccggcccagauguccauccagcugaucaacaaggccgugaacgcccucaucaacgaccagcugaucaugaagaaccaccuccgcgacaucaugugcauccccuacugcaacuacagccgguacugguaccugaaccacaccgucaccggcaagaccucccugccccgcugcuggcuggugagcaacggguccuaccucaacgagacgcacuucagcgacgacaucgagcagcaggcggacaacaugaucaccgagaugcugcagaaggaguacauggaccggcagggcaagaccccgcugggccucguggaccuguucgucuucuccaccagcuucuaccugaucuccaucuuccuccaccuggugaagauccccacgcaccgccacaucguggggaagcccugccccaagccgcaccggcugaaccacaugggcaucugcagcugcgggcuguacaagcaccccggcguccccgugaaguggaagcgcugaggacuagucccuguucccagagcccacuuuuuuuucuuuuuuugaaauaaaauagccugucuuucagaucucaaaggcucuuuucagagccaccaaaaaaaaaaaaaaaaaaaaaaaaaaaaaaaaaaaaaaaaaaaaaaaaaaaaaaaaaaaaaaaaaaaaaaaaaaaaaaaaaaaaaaaaaaaaaaaaaaaaa

SEQ ID NO: 15371 - RNA, 1745 nt, Artificial Sequence
  mRNA product Design a-1 (hSL-A100) comprising derived and/or modified sequence from LASV(GA391;Clade III)__CAA36645__GPCmut1 (opt1)
aggagagucccgcagucggcguccagcggcucugcuuguucgugugugugucguugcaggccuuauucaagcuuaccaugggccagaucgugaccuucuuccaggaggucccccacgugaucgaggaggugaugaacaucguccugaucgcccucagcauccuggccauccugaaggggcucuacaacguggcgaccugcggccugaucgggcuggugacguuccuccugcuguccggccgcagcugcucccucaucuacaaggggaccuacgagcugcagacccuggagcucaacauggagacccugaacaugacgaugccgcugagcugcaccaagaacaacucccaccacuacauccgggucggcaacgagaccggccucgagcugacccugacgaacaccagcauccucaaccacaaguucugcaaccuguccgacgcccacaagcgcaaccuguacgaccacagccucauguccaucaucagcaccuuccaccuguccauccccaacuucaaccaguacgaggccaugagcugcgacuucaacgggggcaagaucaccgugcaguacaaccugucccacagcuucgccguggacgccgcggggcacugcggcacgcucgccaacgggguccugcagaccuucaugcggauggccuggggcggcuccuacaucgcccuggacagcgggugcggcaacugggacugcaucaugaccuccuaccaguaccucaucauccagaacaccacgugggacgaccacugccaguucagccgccccucccccaucggguaccugggccugcucagccagcggacccgcgacaucuacaucagccggcgccggcgcggcaccuucaccuggacgcuguccgacagcgaggggaacgagaccccgggcggguacugccugacccgguggaugcucaucgaggcggagcugaagugcuucggcaacaccgccguggccaagugcaacgagaagcacgacgaggaguucugcgacaugcugcgccucuucgacuucaacaagcaggccauccggcgccugaagacgcccgcccagauguccauccagcugaucaacaaggcggugaacgcccucaucaacgaccagcugaucaugaagaaccaccuccgggacaucaugugcauccccuacugcaacuacagccgcuacugguaccugaaccacaccuccaccgggaagaccagccugccccggugcuggcugaucuccaacggcagcuaccucaacgagacgaaguucuccgacgacaucgagcagcaggccgacaacaugaucaccgagaugcugcagaaggaguacaucgaccgccagggcaagaccccgcuggggcucgucgaccuguucguguucagcaccuccuucuaccugaucagcaucuuccugcaccucgugaagauccccacgcaccggcacaucgucggcaagcccugccccaagccgcaccgccugaaccacauggggaucugcuccugcggccuguacaagcagcccggggugcccgugcgguggaagcgcugaggacuagucccuguucccagagcccacuuuuuuuucuuuuuuugaaauaaaauagccugucuuucagaucucaaaggcucuuuucagagccaccaaaaaaaaaaaaaaaaaaaaaaaaaaaaaaaaaaaaaaaaaaaaaaaaaaaaaaaaaaaaaaaaaaaaaaaaaaaaaaaaaaaaaaaaaaaaaaaaaaaaa

SEQ ID NO: 15372 - RNA, 1748 nt, Artificial Sequence
  mRNA product Design a-1 (hSL-A100) comprising derived and/or modified sequence from LASV(AV;Clade V)__CCA30314__GPCmut1 (opt1)
aggagagucccgcagucggcguccagcggcucugcuuguucgugugugugucguugcaggccuuauucaagcuuaccaugggccagaucgugaccuucuuccaggaggucccccacgugaucgaggaggugaugaacaucguccugaucgcccucagcauccuggccgugcugaaggggcucuacaacaucgcgaccugcggccugaucgggcugaucacguuccuccugcugugcggccgcuccugcagcuccaaccucuacaaggggguguacgagcugcagagccuggaccucaacauggagacccugaacaugaccaugccgcuguccugcaccaagaacaacagccaccacuacauccgggucggcaacgacacgggccucgagcugacccugaccaacaccuccauccucaaccacaaguucugcaaccugagcgacgcccacaagaaggaccuguacgaccacgcccucauguccaucaucagcacguuccaccuguccauccccaacuucaaccaguacgaggccaugagcugcgacuucaacgggggcaagaucuccgugcaguacaaccugagccacuccuacgccaucgacgcggccaaccacugcgggaccguggccaacggcauccuccagaccuucaugcgcauggccuggggcgggagcuacaucgcgcuggacuccggcugcgggaacugggacugcaucaugaccagcuaccaguaccugaucauccagaacacgaccugggagaaccacugccaguucucccggcccagccccaucggcuaccucgggcugcugagccagcgcacccgggacaucuacaucucccgccggcgccggggcaccuucacguggacccucagcgacuccgagggcaacgccacccccgggggcuacugccugacccgcuggaugcugaucgaggccgagcucaagugcuucgggaacacggccgucgccaagugcaacgagaagcacgacgaggaguucugcgacaugcugcggcuguucgacuucaacaagcaggcgaucagccgccucaaguccccggcccagaugagcauccagcugaucaacaaggccgugaacgcccugaucaacgaccagcucaucaugaagaaccaccuccgggacaucaugugcauccccuacugcaacuacuccaaguacugguaccugaaccacaccaucaccggcaagaccagccugcccaagugcuggcugguguccaacgggagcuaccugaacgagacgcacuucuccgacgacaucgagcagcaggccgacaacaugaucaccgagaugcuccagaaggaguacauggagcgccagggcaagaccccgcugggccuggucgaccucuucguguucagcaccuccuucuaccugaucagcaucuuccugcggcuggugaagauccccacgcaccgccacaucgucgggaagcccugccccaagccgcaccggcucaaccacaugggcaucugcuccugcgggcuguacaagcagcccggcgugcccgugcgcuggaagcggugaggacuagucccuguucccagagcccacuuuuuuuucuuuuuuugaaauaaaauagccugucuuucagaucucaaaggcucuuuucagagccaccaaaaaaaaaaaaaaaaaaaaaaaaaaaaaaaaaaaaaaaaaaaaaaaaaaaaaaaaaaaaaaaaaaaaaaaaaaaaaaaaaaaaaaaaaaaaaaaaaaaaa

SEQ ID NO: 15373 - RNA, 1745 nt, Artificial Sequence
  mRNA product Design a-1 (hSL-A100) comprising derived and/or modified sequence from LASV(Togo/2016/7082;Clade VI)__AMR44577__GPCmut1 (opt1)
aggagagucccgcagucggcguccagcggcucugcuuguucgugugugugucguugcaggccuuauucaagcuuaccaugggccagaucaucaccuucuuccaggaggugccccacgucaucgaggaggugaugaacaucgugcugaucgcccucagccugcuggccauccucaagggggucuacaacguggcgaccugcggcaucaucgggcuggugacguuccuguuccucugcggccgcuccugcagccugaucuacaagggguccuacgagcugcagacccucgagcugaacauggagacccugaacaugaccaugccgcucagcugcacgaagaacuccagccaccacuacauccgggucggcaacgagaccggccuggagcugacccucaccaacacguccaucaucaaccacaaguucugcaaccugagcgacgcccacaagcgcaaccuguacgaccacgcccucauguccauccugagcaccuuccaccuguccauccccaacuucaaccaguacgaggccaugagcugcgacuucaacgggggcaagaucuccgugcaguacaaccucagccacgccuacgcgguggacgccgccgagcacugcgggaccgucgccaacggcgugcugcagaccuucaugcggauggcguggggcggguccuacaucgcccuggacagcggcugcgggaacugggacugcaucaugacguccuaccaguaccucaucauccagaacaccaccugggaggaccacugccaguucagccgccccucccccaucggcuaccuggggcugcucagccagcggacccgcgacaucuacaucagccggcgccggcgcggcacguucaccuggacccuguccgacagcgagggcaacgagacccccgggggcuacugccugacgcgguggaugcucaucgaggccgagcugaagugcuucgggaacaccgccguggccaagugcaacgagaagcacgacgaggaguucugcgacaugcugcgccucuucgacuucaacaagcaggcgauccagcggcugaaguccccggcccagaugagcauccagcugaucaacaaggccgucaacgcccucaucaacgaccagcugaucaugaagaaccaccuccgcgacaugaugugcauccccuacugcaacuacuccaaguacugguaccugaaccacaccagcuccggccggaccagccugcccaagugcuggcugguguccaacgggagcuaccucaacgagacgcacuucuccgacgacaucgagcagcaggccgacaacaugaucaccgagaugcugcagaaggaguacaucgaccgccagggcaagaccccgcugggccucguggaccuguucgucuucagcaccuccuucuaccugaucagcaucuuccuccaccugaucaagauccccacgcaccggcacaucguggggaagcccugccccaagccgcaccgccugaaccacaugggcaucugcuccugcgggcuguacaagcagcccggcgugcccacccgguggaagcgcugaggacuagucccuguucccagagcccacuuuuuuuucuuuuuuugaaauaaaauagccugucuuucagaucucaaaggcucuuuucagagccaccaaaaaaaaaaaaaaaaaaaaaaaaaaaaaaaaaaaaaaaaaaaaaaaaaaaaaaaaaaaaaaaaaaaaaaaaaaaaaaaaaaaaaaaaaaaaaaaaaaaaa

SEQ ID NO: 15374 - RNA, 1745 nt, Artificial Sequence
  mRNA product Design a-1 (hSL-A100) comprising derived and/or modified sequence from LASV(KAK-428;Clade n.d. (VII))__ANH09740__GPCmut1 (opt1)
aggagagucccgcagucggcguccagcggcucugcuuguucgugugugugucguugcaggccuuauucaagcuuaccaugggccagaucgugaccuucuuccaggaggucccccacgugaucgaggaggugaugaacaucguccugaucgcccucagccugcuggccauccucaaggggcuguacaacuucgcgaccugcggcgugaucgggcugaucacguuccuccugcugugcggccgcuccugcagcgccaccuacaaggggcaguacgagcuccagacccuggagcugaacauggagucccucaacaugaccaugccgcugagcugcacgaagaacaacucccaccacuacauccgggccggcaacaacaccggccuggagcucacccugaccaacacgagcaucaucucccacaaguucugcaaccugagcgacgcccacaagaagaaccucuacgaccacacccugauguccaucaucaccaccuuccaccugagcauccccaacuucaaccaguacgaggccauguccugcgacuucaacgggggcaagaucagcauccaguacaaccucucccacagcuacgcgggggacgccgcccagcacugcggcacgguggccaacgggguccugcagaccuucaugcgcauggcguggggcggcuccuaccuggcccucgacagcgggugccggggcugggacugcaucaucuccagcuaccaguaccugaucauccagaacaccaccugggacgaccacugccaguucucccgccccagccccaucggguaccugggcuucgugagccagaagacgcgggacaucuacaucucccgccggcgccggggcaccuucaccuggacccucagcgacuccgaggggcacgacaugccgggcggguacugccugacgcgcuggaugcugaucgaggccgaccucaagugcuucggcaacaccgccguggccaagugcaacgagaagcacgacgaggaguucugcgacauguggcggcuguucgacuucaacaagcaggcgauccagcgccugaaggcccccgcccagaugaacauccagcucaucaacaaggccgucaacgcccugaucaacgaccagcugaugaugaagaaccaccuccgggacaucaugugcauccccuacugcaacuacagcaaguucugguaccugaacaacaccaccacggggcgcaccucccugccccggugcuggcucaucagcaacggcuccuaccugaacgagacccacuucagcgacgacaucgagcagcaggcggacaacaugaucaccgagaugcugcagaaggaguacauggaccgccagggcaagacgccgcucgggcugguggaccuguucguguucuccaccagcuucuaccucaucaccaucuuccugcaccuggucaagauccccacccaccggcacaucgugggcaagcccugccccaagccgcaccgccucaaccacauggggaucugcuccugcggccuguacaagcagcccggggugcccguccgguggaagcgcugaggacuagucccuguucccagagcccacuuuuuuuucuuuuuuugaaauaaaauagccugucuuucagaucucaaaggcucuuuucagagccaccaaaaaaaaaaaaaaaaaaaaaaaaaaaaaaaaaaaaaaaaaaaaaaaaaaaaaaaaaaaaaaaaaaaaaaaaaaaaaaaaaaaaaaaaaaaaaaaaaaaaa

SEQ ID NO: 15375 - RNA, 1745 nt, Artificial Sequence; identical to SEQ ID NO: 15369
  mRNA product Design a-1 (hSL-A100) comprising derived and/or modified sequence from LASV(Pinneo-NIG-1969;Clade I)__AIT17836__GPCmut1 (opt1)

SEQ ID NO: 15376 - RNA, 1745 nt, Artificial Sequence
  mRNA product Design a-1 (hSL-A100) comprising derived and/or modified sequence from LASV(ISTH0009-NIG-2011;Clade II)__AIT17404__GPCmut1 (opt1)
aggagagucccgcagucggcguccagcggcucugcuuguucgugugugugucguugcaggccuuauucaagcuuaccaugggccagaucaucaccuucuuccaggaggugccccacgucaucgaggaggugaugaacaucgugcugaucgcccucagccugcuggccauccucaaggggaucuacaacgucgcgaccugcggccuguucgggcugguguccuuccuccugcugugcggccgcagcugcuccacgaccuacaaggggguguacgagcuccagacccuggagcuggacauggccagccucaacaugaccaugccgcuguccugcacgaagaacaacagccaccacuacaucauggucggcaacgagaccggccuggagcucacccugaccaacacguccaucaucaaccacaaguucugcaaccugagcgacgcccacaagaagaaccucuacgaccacgcccugauguccaucaucagcaccuuccaccuguccauccccaacuucaaccaguacgaggccaugagcugcgacuucaacgggggcaagaucuccgugcaguacaaccucagccacgcguacgccguggacgccgccaaccacugcgggaccaucgcgaacggcguccugcagaccuucaugcggauggccuggggcggguccuacaucgcccuggacagcggcugcggguccugggacugcaucaugacgagcuaccaguaccucaucauccagaacaccaccugggaggaccacugccaguucucccgccccagccccaucggcuaccuggggcugcucagccagcggacccgcgacaucuacaucucccggcgccggcgcggcacguucaccuggacccugagcgacuccgagggcaacgagacccccgggggcuacugccugacgcgguggaugcucaucgaggccgagcugaagugcuucgggaacaccgccguggcgaagugcaacgagaagcacgacgaggaguucugcgacaugcugcgccucuucgacuucaacaagcaggccauccggcgccugaagaccccggcccagaugagcauccagcugaucaacaaggccgugaacgcccucaucaacgaccagcugaucaugaagaaccaccuccgggacaucaugugcauccccuacugcaacuacuccaaguacugguaccugaaccacaccgucacgggcaagaccagccugccccgcugcuggcugguguccaacgggagcuaccucaacgagacccacuucuccgacgacaucgagcagcaggcggacaacaugaucaccgagcugcugcagaaggaguacauggaccggcagggcaagacgccgcucggccugguggaccuguucgucuucagcaccuccuucuaccucaucagcaucuuccugcaccugaucaagauccccacccaccgccacaucaccgggaagcccugccccaagccgcaccggcugaaccacaugggcaucugcuccugcgggcucuacaagcaccccggcgugcccgugaaguggaagcgcugaggacuagucccuguucccagagcccacuuuuuuuucuuuuuuugaaauaaaauagccugucuuucagaucucaaaggcucuuuucagagccaccaaaaaaaaaaaaaaaaaaaaaaaaaaaaaaaaaaaaaaaaaaaaaaaaaaaaaaaaaaaaaaaaaaaaaaaaaaaaaaaaaaaaaaaaaaaaaaaaaaaaa

SEQ ID NO: 15377 - RNA, 1745 nt, Artificial Sequence
  mRNA product Design a-1 (hSL-A100) comprising derived and/or modified sequence from LASV(ISTH2010-NIG-2012;Clade II)__AIT17482__GPCmut1 (opt1)
aggagagucccgcagucggcguccagcggcucugcuuguucgugugugugucguugcaggccuuauucaagcuuaccaugggccagaucaucaccuucuuccaggaggugccccacgucaucgaggaggugaugaacaucgugcugaucgcccucagccugcuggccauccucaaggggaucuacaacgucgcgaccugcggccuguucgggcugguguccuuccuccugcugugcggccgcagcugcuccacgaccuacaaggggguguacgagcuccagacccuggagcuggacauggccagccucaacaugaccaugccgcuguccugcacgaagaacaacagccaccacuacaucauggucggcaacgagaccggccuggagcucacccugaccaacacguccaucaucaaccacaaguucugcaaccugagcgacgcccacaagaagaaccucuacgaccacgcccugauguccaucaucagcaccuuccaccuguccauccccaacuucaaccaguacgaggccaugagcugcgacuucaacgggggcaagaucuccgugcaguacaaccucagccacgcguacgccguggacgccgccaaccacugcgggaccaucgcgaacggcguccugcagaccuucaugcggauggccuggggcggguccuacaucgcccuggacagcggcugcggguccugggacugcaucaugacgagcuaccaguaccucaucauccagaacaucaccugggaggaccacugccaguucucccgccccagccccaucggcuaccuggggcugcucagccagcggacccgcgacaucuacaucucccggcgccggcgcggcaccuucacguggacccugagcgacuccgagggcaacgagacccccgggggcuacugccugacccgguggaugcucaucgaggccgagcugaagugcuucgggaacacggccguggcgaagugcaacgagaagcacgacgaggaguucugcgacaugcugcgccucuucgacuucaacaagcaggccauccggcgccugaagaccccggcccagaugagcauccagcugaucaacaaggccgugaacgcccucaucaacgaccagcugaucaugaagaaccaccuccgggacaucaugugcauccccuacugcaacuacuccaaguacugguaccugaaccacaccgucaccggcaagacgagccugccccgcugcuggcugguguccaacgggagcuaccucaacgagacccacuucuccgacgacaucgagcagcaggcggacaacaugaucaccgagcugcugcagaaggaguacaucgaccggcagggcaagaccccgcucggccugguggaccuguucgucuucagcacguccuucuaccucaucagcaucuuccugcaccuggugaagauccccacccaccgccacguggucgggaagcccugccccaagccgcaccggcugaaccacaugggcaucugcuccugcgggcucuacaagcaccccggcgugcccgugaaguggaagcgcugaggacuagucccuguucccagagcccacuuuuuuuucuuuuuuugaaauaaaauagccugucuuucagaucucaaaggcucuuuucagagccaccaaaaaaaaaaaaaaaaaaaaaaaaaaaaaaaaaaaaaaaaaaaaaaaaaaaaaaaaaaaaaaaaaaaaaaaaaaaaaaaaaaaaaaaaaaaaaaaaaaaaa

SEQ ID NO: 15378 - RNA, 1745 nt, Artificial Sequence
  mRNA product Design a-1 (hSL-A100) comprising derived and/or modified sequence from LASV(Lassa virus/H.sapiens-wt/NGA/2015/ISTH_0543;Clade II)__AVO03639__GPCmut1 (opt1)
aggagagucccgcagucggcguccagcggcucugcuuguucgugugugugucguugcaggccuuauucaagcuuaccaugggccagaucaucaccuucuuccaggaggugccccacgucaucgaggaggugaugaacaucgugcugaucgcccucagccugcuggccauccucaaggggaucuacaacgucgcgaccugcggccuguucgggcugguguccuuccuccugcugugcggccgcagcugcuccacgaccuacaaggggguguacgagcuccagacccuggagcuggacauggccaaccucaacaugaccaugccgcugagcugcacgaagaacaacucccaccacuacaucauggucggcaacgagaccggccuggagcucacccugaccaacacgagcaucaucaaccacaaguucugcaaccuguccgacgcccacaagaagaaccucuacgaccacgcccugaugagcaucaucuccaccuuccaccugagcauccccaacuucaaccaguacgaggccauguccugcgacuucaacgggggcaagaucagcgugcaguacaaccucucccacaccuacgcgguggacgccgccaaccacugcgggaccaucgccaacggcguccugcagacguucaugcggauggcguggggcgggagcuacaucgcccuggacuccggcugcgggagcugggacugcaucaugaccuccuaccaguaccucgugauccagaacaccaccugggaggaccacugccaguucagccgccccucccccaucggcuaccuggggcugcucagccagcggacgcgcgacaucuacaucagccggcgccggcgcggcaccuucaccuggacccuguccgacagcgagggcaacgagacgcccgggggcuacugccugacccgguggaugcucaucgaggccgagcugaagugcuucgggaacaccgccguggccaagugcaacgagaagcacgacgaggaguucugcgacaugcugcgccucuucgacuucaacaagcaggcgauccggcgccugaagaccccggcccagauguccauccagcugaucaacaaggccgucaacgcccucaucaacgaccagcugaucaugaagaaccaccuccgggacaucaugugcauccccuacugcaacuacagcaaguacugguaccugaaccacacggugaccggcaagaccucccugccccgcugcuggcuggugagcaacggguccuaccucaacgagacccacuucagcgacgacaucgagcagcaggccgacaacaugaucacggagcugcugcagaaggaguacaucgaccggcagggcaagaccccgcucggccuggucgaccuguucguguucuccaccagcuucuaccucaucuccaucuuccugcaccuggugaagauccccacccaccgccacaucacggggaagcccugccccaagccgcaccggcugaaccacaugggcaucugcagcugcgggcucuacaagcaccccggcguccccgugaaguggaagcgcugaggacuagucccuguucccagagcccacuuuuuuuucuuuuuuugaaauaaaauagccugucuuucagaucucaaaggcucuuuucagagccaccaaaaaaaaaaaaaaaaaaaaaaaaaaaaaaaaaaaaaaaaaaaaaaaaaaaaaaaaaaaaaaaaaaaaaaaaaaaaaaaaaaaaaaaaaaaaaaaaaaaaa

SEQ ID NO: 15379 - RNA, 1745 nt, Artificial Sequence
  mRNA product Design a-1 (hSL-A100) comprising derived and/or modified sequence from LASV(Lassa virus/H.sapiens-wt/NGA/2016/ISTH_0009;Clade II)__AVO03571__GPCmut1 (opt1)
aggagagucccgcagucggcguccagcggcucugcuuguucgugugugugucguugcaggccuuauucaagcuuaccaugggccagaucaucaccuucuuccaggaggugccccacgucaucgaggaggugaugaacaucgugcugaucgcccucagccugcuggccauccucaaggggaucuacaacgucgcgaccugcggccugcuggggcucguguccuuccugcugcucugcggccgcagcugcuccacgaccuacaaggggguguacgagcugcagacccuggagcucgacauggccagccugaacaugaccaugccgcuguccugcacgaagaacaacagccaccacuacaucauggucggcaacgagaccggccucgagcugacccugaccaacacguccaucaucaaccacaaguucugcaaccucagcgacgcccacaagaagaaccuguacgaccacgcccugauguccaucaucagcaccuuccaccucuccauccccaacuucaaccaguacgaggccaugagcugcgacuucaacgggggccggaucuccgugcaguacaaccugagccacuccuacgcgguggacgccgccaaccacugcgggaccaucgccaacggcguccugcagaccuucaugcgcauggcguggggcgggagcuacaucgcccucgacuccggcugcgggagcugggacugcaucaugacguccuaccaguaccugaucauccagaacaccaccugggaggaccacugccaguucagccggcccagccccaucggcuaccuggggcuccugucccagcgcacccgggacaucuacaucagccgccggcgccggggcacguucaccuggacccuguccgacagcgagggcaacgagacccccgggggcuacugccucacgcgcuggaugcugaucgaggccgagcugaagugcuucgggaacaccgccguggccaagugcaacgagaagcacgacgaggaguucugcgacaugcuccggcuguucgacuucaacaagcaggcgauccgccggcugaagaccccggcccagauguccauccagcucaucaacaaggccgugaacgcccugaucaacgaccagcugaucaugaagaaccaccuccgcgacaucaugugcauccccuacugcaacuacagcaaguacugguaccugaaccacaccgucacgggcaagaccucccugccccggugcuggcucgugagcaacggguccuaccugaacgagacccacuucagcgacgacaucgagcagcaggccgacaacaugaucaccgagcugcuccagaaggaguacaucgaccgccagggcaagacgccgcugggccugguggaccucuucgucuucuccaccagcuucuaccugaucuccaucuuccugcaccuggugaagauccccacccaccggcacaucaccgggaagcccugccccaagccgcaccgccucaaccacaugggcaucugcagcugcgggcuguacaaccaccccggcgugcccgucaaguggaagcggugaggacuagucccuguucccagagcccacuuuuuuuucuuuuuuugaaauaaaauagccugucuuucagaucucaaaggcucuuuucagagccaccaaaaaaaaaaaaaaaaaaaaaaaaaaaaaaaaaaaaaaaaaaaaaaaaaaaaaaaaaaaaaaaaaaaaaaaaaaaaaaaaaaaaaaaaaaaaaaaaaaaaa

SEQ ID NO: 15380 - RNA, 1745 nt, Artificial Sequence
  mRNA product Design a-1 (hSL-A100) comprising derived and/or modified sequence from LASV(Lassa virus/H.sapiens-wt/NGA/2016/ISTH_0017;Clade II)__AVO03567__GPCmut1 (opt1)
aggagagucccgcagucggcguccagcggcucugcuuguucgugugugugucguugcaggccuuauucaagcuuaccaugggccagaucaucaccuucuuccaggaggugccccacgucaucgaggaggugaugaacaucgugcugaucgcccucagccugcuggccauccucaaggggaucuacaacgucgcgaccugcggccuguucgggcugguguccuuccuccugcugugcggccgcagcugcuccacgaccuacaaggggguguacgagcuccagacccuggagcuggacauggccagccucaacaugaccaugccgcuguccugcacgaagaacaacagccaccacuacaucauggucggcaacgagaccggccuggagcucacccugaccaacacguccaucaucaaccacaaguucugcaaccugagcgacgcccacaagaagaaccucuacgaccacgcccugauguccaucaucagcaccuuccaccuguccauccccaacuucaaccaguacgaggccaugagcugcgacuucaacgggggcaagaucuccgugcaguacaaccucagccacaccuacgcgaucgacgccgccaaccacugcgggaccaucgccaacggcgugcugcagacguucaugcggauggcguggggcggguccuacaucgcccuggacagcggcugcggguccugggacugcaucaugaccagcuaccaguaccucaucauccagaacaccaccugggaggaccacugccaguucucccgccccagccccaucggcuaccuggggcugcucagccagcggacgcgcgacaucuacaucucccggcgccggcgcggcaccuucaccuggacccugagcgacuccgagggcaacgagacgcccgggggcuacugccugacccgguggaugcucaucgaggccgagcugaagugcuucgggaacaccgccgucgccaagugcaacgagaagcacgacgaggaguucugcgacaugcugcgccucuucgacuucaacaagcaggcgauccggcgccugaagaccccggcccagaugagcauccagcugaucaacaaggccgugaacgcccucaucaacgaccagcugaucaugaagaaccaccuccgggacaucaugugcauccccuacugcaacuacuccaaguacugguaccugaaccacacggugaccggcaagaccagccugccccgcugcuggcuggucuccaacgggagcuaccucaacgagacccacuucuccgacgacaucgagcagcaggccgacaacaugaucacggagcugcugcagaaggaguacauggaccggcagggcaagaccccgcucggccugguggaccuguucguguucagcaccuccuucuaccucaucagcaucuuccugcaccugguccgcauccccacccaccggcacgugaucgggaagcccugccccaagccgcaccgccugaaccacaugggcaucugcuccugcgggcucuacaagcaccccggcgugcccgucaaguggaagcggugaggacuagucccuguucccagagcccacuuuuuuuucuuuuuuugaaauaaaauagccugucuuucagaucucaaaggcucuuuucagagccaccaaaaaaaaaaaaaaaaaaaaaaaaaaaaaaaaaaaaaaaaaaaaaaaaaaaaaaaaaaaaaaaaaaaaaaaaaaaaaaaaaaaaaaaaaaaaaaaaaaaaa

SEQ ID NO: 15381 - RNA, 1745 nt, Artificial Sequence
  mRNA product Design a-1 (hSL-A100) comprising derived and/or modified sequence from LASV(Lassa virus/H.sapiens-wt/NGA/2018/ISTH_0959;Clade II)__AVV65099__GPCmut1 (opt1)
aggagagucccgcagucggcguccagcggcucugcuuguucgugugugugucguugcaggccuuauucaagcuuaccaugggccagaucaucaccuucuuccaggaggugccccacgucaucgaggaggugaugaacaucgugcugaucgcccucagccugcuggccauccucaaggggaucuacaacgucgugaccugcggccuguucgggcugguguccuuccuccugcugugcggccgcagcugcuccacgaccuacaagggggucuacgagcuccagacccuggagcuggacauggcgagccucaacaugaccaugccgcuguccugcacgaagaacaacagccaccacuacaucauggugggcaacgagaccggccuggagcucacccugaccaacacguccaucaucaaccacaaguucugcaaccugagcgacgcccacaagaagaaccucuacgaccacgcccugauguccaucaucagcaccuuccaccuguccauccccaacuucaaccaguacgaggccaugagcugcgacuucaacgggggcaagaucuccgugcaguacaaccucagccacgccuacgcgaucgacgccgccaaccacugcgggaccaucgccaacggcguccugcagaccuucaugcggauggcguggggcggguccuacaucgcccuggacagcggcugcggguccugggacugcaucaugacgagcuaccaguaccucaucauccagaacaccaccugggaggaccacugccaguucucccgccccagccccaucggcuaccuggggcugcucagccagcggacccgcgacaucuacaucucccggcgccggcgcggcacguucaccuggacccugagcgacuccgagggcaacgagacccccgggggcuacugccugacgcgguggaugcucaucgaggccgagcugaagugcuucgggaacaccgccguggccaagugcaacgagaagcacgacgaggaguucugcgacaugcugcgccucuucgacuucaacaagcaggcgauccggcgccugaagaccccggcccagaugagcauccagcugaucaacaaggccgugaacgcccucaucaacgaccagcugaucaugaagaaccaccuccgggacaucaugugcauccccuacugcaacuacuccaaguacugguaccugaaccacaccgucacgggcaagaccagccugccccgcugcuggcugguguccaacgggagcuaccucaacgagacccacuucuccgacgacaucgagcagcaggccgacaacaugaucaccgagcugcugcagaaggaguacaucgaccggcagggcaagacgccgcucggccugguggaccuguucgucuucagcaccuccuucuaccucaucagcaucuuccugcaccuggugaagauccccacccaccgccacgugaucgggaagcccugccccaagccgcaccggcugaaccacaugggcaucugcuccugcgggcucuacaagcaccccggcguccccgugaaguggaagcgcugaggacuagucccuguucccagagcccacuuuuuuuucuuuuuuugaaauaaaauagccugucuuucagaucucaaaggcucuuuucagagccaccaaaaaaaaaaaaaaaaaaaaaaaaaaaaaaaaaaaaaaaaaaaaaaaaaaaaaaaaaaaaaaaaaaaaaaaaaaaaaaaaaaaaaaaaaaaaaaaaaaaaa

SEQ ID NO: 15382 - RNA, 1745 nt, Artificial Sequence
  mRNA product Design a-1 (hSL-A100) comprising derived and/or modified sequence from LASV(LASV003-NIG-2008;Clade II)__AIT17580__GPCmut1 (opt1)
aggagagucccgcagucggcguccagcggcucugcuuguucgugugugugucguugcaggccuuauucaagcuuaccaugggccagaucaucaccuucuuccaggaggugccccacgucaucgaggaggugaugaacaucgugcugaucgcccucagccugcuggccauccucaaggggaucuacaacgucgcgaccugcggccuguucgggcugguguccuuccuccugcugugcggccgcagcugcuccacgaccuacaaggggguguacgagcuccagacccuggagcuggacauggccagccucaacaugaccaugccgcuguccugcacgaagaacaacagccaccacuacaucauggucggcaacgagaccggccuggagcucacccugaccaacacguccaucaucaaccacaaguucugcaaccugagcgacgcccacaagaagaaccucuacgaccacgcccugauguccaucaucagcaccuuccaccuguccauccccaacuucaaccaguacgaggccaugagcugcgacuucaacgggggcaagaucuccgugcaguacaaccucagccacaccuacgcgguggacgccgccaaccacugcgggaccaucgccaacggcguccugcagacguucaugcggauggcguggggcggguccuacaucgcccuggacagcggcugcggguccugggacugcaucaugaccagcuaccaguaccucaucauccagaacaccaccugggaggaccacugccaguucucccgccccagccccaucggcuaccuggggcugcucagccagcggacgcgcgacaucuacaucucccggcgccggcgcggcaccuucaccuggacccugagcgacuccgagagcaacgagacgccgggcggguacugccugacccgguggaugcucaucgaggccgagcugaagugcuucggcaacaccgccguggccaagugcaacgagaagcacgacgaggaguucugcgacaugcugcgccucuucgacuucaacaagcaggcgauccggcgccugaaggcccccgcccagauguccauccagcugaucaacaaggccgugaacgcccucaucaacgaccagcugaucaugaagaaccaccuccgggacaucaugugcauccccuacugcaacuacagcaaguacugguaccugaaccacaccgucacggggcgcaccucccugccccggugcuggcuggugagcaacggcuccuaccucaacgagacccacuucagcgacgacaucgagcagcaggcggacaacaugaucaccgagcugcugcagaaggaguacauggaccgccaggggaagacgccgcucggccugguggaccuguucgucuucuccaccagcuucuaccucaucuccaucuuccugcaccuggugaagauccccacccaccggcacgugaucggcaagcccugccccaagccgcaccgccugaaccacauggggaucugcagcugcggccucuacaagcaccccgggguccccgugaaguggaagcggugaggacuagucccuguucccagagcccacuuuuuuuucuuuuuuugaaauaaaauagccugucuuucagaucucaaaggcucuuuucagagccaccaaaaaaaaaaaaaaaaaaaaaaaaaaaaaaaaaaaaaaaaaaaaaaaaaaaaaaaaaaaaaaaaaaaaaaaaaaaaaaaaaaaaaaaaaaaaaaaaaaaaa

SEQ ID NO: 15383 - RNA, 1745 nt, Artificial Sequence
  mRNA product Design a-1 (hSL-A100) comprising derived and/or modified sequence from LASV(LASV035-NIG-2009;Clade II)__AIT17588__GPCmut1 (opt1)
aggagagucccgcagucggcguccagcggcucugcuuguucgugugugugucguugcaggccuuauucaagcuuaccaugggccagaucaucaccuucuuccaggaggugccccacgucaucgaggaggugaugaacaucgugcugaucgcccucagccugcuggccauccucaaggggaucuacaacgucgcgaccugcggccuguucgggcugguguccuuccuccugcugugcggccgcagcugcuccacgaccuacaaggggguguacgagcuccagacccuggagcuggacauggccagccucaacaugaccaugccgcuguccugcacgaagaacaacagccaccacuacaucauggucggcaacgagaccggccuggagcucacccugaccaacacguccaucaucaaccacaaguucugcaaccugagcgacgcccacaagaagaaccucuacgaccacgcccugauguccaucaucagcaccuuccaccuguccauccccaacuucaaccaguacgaggccaugagcugcgacuucaacgggggcaagaucuccgugcaguacaaccucagccacgcguacgccguggacgccgccaaccacugcgggaccaucgcgaacggcguccugcagaccuucaugcggauggccuggggcggguccuacaucgcccuggacagcggcugcggguccugggacugcaucaugacgagcuaccaguaccucaucauccagaacaccaccugggaggaccacugccaguucucccgccccagccccaucggcuaccuggggcugcucagccagcggacccgcgacaucuacaucucccggcgccggcgcggcacguucaccuggacccugagcgacuccgagggcaacgagacccccgggggcuacugccugacgcgguggaugcucaucgaggccgagcugaagugcuucgggaacaccgccguggcgaagugcaacgagaagcacgacgaggaguucugcgacaugcugcgccucuucgacuucaacaagcaggccauccggcgccugaaggccccggcccagaugagcauccagcugaucaacaaggccgugaacgcgcucaucaacgaccagcugaucaugaagaaccaccuccgggacaucaugugcauccccuacugcaacuacuccaaguacugguaccugaaccacaccgucaccggcaagacgagccugccccgcugcuggcugguguccaacgggagcuaccucaacgagacccacuucuccgacgacaucgagcagcaggccgacaacaugaucaccgagcugcugcagaaggaguacaucgaccggcagggcaagaccccgcucggccugguggaccuguucgucuucagcacguccuucuaccucaucagcaucuuccugcaccuggugaagauccccacccaccgccacgugaucgggaagcccugccccaagccgcaccggcugaaccacaugggcaucugcuccugcgggcucuacaagcaccccggcguccccgugaaguggaagcgcugaggacuagucccuguucccagagcccacuuuuuuuucuuuuuuugaaauaaaauagccugucuuucagaucucaaaggcucuuuucagagccaccaaaaaaaaaaaaaaaaaaaaaaaaaaaaaaaaaaaaaaaaaaaaaaaaaaaaaaaaaaaaaaaaaaaaaaaaaaaaaaaaaaaaaaaaaaaaaaaaaaaaa

SEQ ID NO: 15384 - RNA, 1745 nt, Artificial Sequence
  mRNA product Design a-1 (hSL-A100) comprising derived and/or modified sequence from LASV(LASV1000-NIG-2009;Clade II)__AIT17782__GPCmut1 (opt1)
aggagagucccgcagucggcguccagcggcucugcuuguucgugugugugucguugcaggccuuauucaagcuuaccaugggccagaucaucaccuucuuccaggaggugccccacgucaucgaggaggugaugaacaucgugcugaucgcccucagccugcuggccauccucaaggggaucuacaacgucgcgaccugcggccuguucgggcugguguccuuccuccugcugugcggccgcagcugcuccacgaccuacaaggggguguacgagcuccagacccuggagcuggacauggccagccucaacaugaccaugccgcuguccugcacgaagaacaacagccaccacuacaucauggucggcaacgagaccggccuggagcucacccugaccaacacguccaucaucaaccacaaguucugcaaccugagcgacgcccacaagaagaaccucuacgaccacgcccugauguccaucaucagcaccuuccaccuguccauccccaacuucaaccaguacgaggccaugagcugcgacuucaacgggggcaagaucuccgugcaguacaaccucagccacaccuacgcgguggacgccgccaaccacugcgggaccaucgccaacggcguccugcagacguucaugcggauggcguggggcggguccuacaucgcccuggacagcggcugcggguccugggacugcaucaugaccagcuaccaguaccucaucauccagaacaccaccugggaggaccacugccaguucucccgccccagccccaucggcuaccuggggcugcucagccagcggacgcgcgacaucuacaucucccggcgccggcgcggcaccuucaccuggacccugagcgacuccgagggcaacgagacgcccgggggcuacugccugacccgguggaugcucaucgaggccgagcugaagugcuucgggaacaccgccguggccaagugcaacgagaagcacgacgaggaguucugcgacaugcugcgccucuucgacuucaacaagcaggcgaucaagcggcugaagaccccggcccagaugagcauccagcugaucaacaaggccgugaacgcccucaucaacgaccagcugaucaugaagaaccaccuccgcgacaucaugugcauccccuacugcaacuacuccaaguacugguaccugaaccacacggucaccggcaagaccagccugccccggugcuggcugguguccaacgggagcuaccucaacgagacccacuucuccgacgacaucgagcagcaggccgacaacaugaucacggagcugcugcagaaggaguacaucgaccgccagggcaagaccccgcucggccugguggaccuguucgucuucagcaccuccuucuaccucaucagcaucuuccugcaccuggugaagauccccacccaccggcacguggucgggaagcccugccccaagccgcaccgccugaaccacaugggcaucugcuccugcgggcucuacaagcaccccggcgugcccgugaaguggaagcggugaggacuagucccuguucccagagcccacuuuuuuuucuuuuuuugaaauaaaauagccugucuuucagaucucaaaggcucuuuucagagccaccaaaaaaaaaaaaaaaaaaaaaaaaaaaaaaaaaaaaaaaaaaaaaaaaaaaaaaaaaaaaaaaaaaaaaaaaaaaaaaaaaaaaaaaaaaaaaaaaaaaaa

SEQ ID NO: 15385 - RNA, 1745 nt, Artificial Sequence
  mRNA product Design a-1 (hSL-A100) comprising derived and/or modified sequence from LASV(LASV221-NIG-2010;Clade II)__AIT17624__GPCmut1 (opt1)
aggagagucccgcagucggcguccagcggcucugcuuguucgugugugugucguugcaggccuuauucaagcuuaccaugggccagaucaucaccuucuuccaggaggugccccacgucaucgaggaggugaugaacaucgugcugaucgcccucagccugcuggccauccucaaggggaucuacaacgucgcgaccugcggccuguucgggcugguguccuuccuccugcugugcggccgcagcugcuccacgaccuacaaggggguguacgagcuccagacccuggagcuggacauggccagccucaacaugaccaugccgcuguccugcacgaagaacaacagccaccacuacaucauggucggcaacgagaccggccuggagcucacccugaccaacacguccaucaucaaccacaaguucugcaaccugagcgacgcccacaagaagaaccucuacgaccacgcccugauguccaucaucagcaccuuccaccuguccauccccaacuucaaccaguacgaggccaugagcugcgacuucaacgggggcaagaucuccgugcaguacaaccucagccacaccuacgcgaucgacgccgccaaccacugcgggaccaucgccaacggcgugcugcagacguucaugcggauggcguggggcggguccuacaucgcccuggacagcggcugcggguccugggacugcaucaugaccagcuaccaguaccucaucauccagaacaccaccugggaggaccacugccaguucucccgccccagccccaucggcuaccuggggcugcucagccagcggacgcgcgacaucuacaucucccggcgccggcgcggcaccuucaccuggacccugagcgacuccgagggcaacgagacgcccgggggcuacugccugacccgguggaugcucaucgaggccgagcugaagugcuucgggaacaccgccgucgccaagugcaacgagaagcacgacgaggaguucugcgacaugcugcgccucuucgacuucaacaagcaggcgauccggcgccugaagaccccggcccagaugagcauccagcugaucaacaaggccgugaacgcccucaucaacgaccagcugaucaugaagaaccaccuccgggacaucaugugcauccccuacugcaacuacuccaaguacugguaccugaaccacacggugaccggcaagaccagccugccccgcugcuggcuggucuccaacgggagcuaccucaacgagacccacuucuccgacgacaucgagcagcaggccgacaacaugaucacggagaugcugcagaaggaguacauggaccggcagggcaagaccccgcugggccucguggaccuguucguguucagcaccuccuucuaccugaucagcaucuuccuccaccuggucaagauccccacccaccgccacgugaucgggaagcccugccccaagccgcaccggcugaaccacaugggcaucugcuccugcgggcuguacaagcaccccggcgugcccgucaaguggaagcgcugaggacuagucccuguucccagagcccacuuuuuuuucuuuuuuugaaauaaaauagccugucuuucagaucucaaaggcucuuuucagagccaccaaaaaaaaaaaaaaaaaaaaaaaaaaaaaaaaaaaaaaaaaaaaaaaaaaaaaaaaaaaaaaaaaaaaaaaaaaaaaaaaaaaaaaaaaaaaaaaaaaaaa

SEQ ID NO: 15386 - RNA, 1745 nt, Artificial Sequence
  mRNA product Design a-1 (hSL-A100) comprising derived and/or modified sequence from LASV(LASV237-NIG-2010;Clade II)__AIT17638__GPCmut1 (opt1)
aggagagucccgcagucggcguccagcggcucugcuuguucgugugugugucguugcaggccuuauucaagcuuaccaugggccagaucaucaccuucuuccaggaggugccccacgucaucgaggaggugaugaacaucgugcugaucgcccucagccugcuggccauccucaaggggaucuacaacgucgcgaccugcggccuguucgggcugguguccuuccuccugcugugcggccgcagcugcuccacgaccuacaaggggguguacgagcuccagacccuggagcuggacauggccagccucaacaugaccaugccgcuguccugcacgaagaacaacagccaccacuacaucauggucggcaacgagaccggccuggagcucacccugaccaacacguccaucaucaaccacaaguucugcaaccugagcgacgcccacaagaaggaccucuacgaccacgcccugauguccaucaucagcaccuuccaccuguccauccccaacuucaaccaguacgaggccaugagcugcgacuucaacgggggcaagaucuccgugcaguacaaccucagccacaccuacgcgguggacgccgccaaccacugcgggaccaucgccaacggcguccugcagacguucaugcggauggcguggggcggguccuacaucgcccuggacagcggcugcggguccugggacugcaucaugaccagcuaccaguaccucaucauccagaacaccaccugggaggaccacugccaguucucccgccccagccccaucggcuaccuggggcugcucagccagcggacgcgcgacaucuacaucucccggcgccggcgcggcaccuucaccuggacccugagcgacuccgagggcaacgagacgcccgggggcuacugccugacccgguggaugcucaucgaggccgagcugaagugcuucgggaacaccgccguggccaagugcaacgagaagcacgacgaggaguucugcgacaugcugcgccucuucgacuucaacaagcaggcgauccggcgccugaagaccccggcccagaugagcauccagcugaucaacaaggccgugaacgcccucaucaacgaccagcugaucaugaagaaccaccuccgggacaucaugugcauccccuacugcaacuacuccaaguacugguaccugaaccacacggucaccggcaagaccagccugccccgcugcuggcugguguccaacgggagcuaccucaacgagacccacuucuccgacgacaucgagcagcaggccgacaacaugaucacggagcugcugcagaaggaguacauggaccggcagggcaagaccccgcucggccugguggaccuguucgucuucagcaccuccuucuaccucaucagcaucuuccugcaccugaucaagauccccacccaccgccacaucacggggaagcccugccccaagccgcaccggcugaaccacaugggcaucugcuccugcgggcucuacaagcaccccggcgugcccgugaaguggaagcgcugaggacuagucccuguucccagagcccacuuuuuuuucuuuuuuugaaauaaaauagccugucuuucagaucucaaaggcucuuuucagagccaccaaaaaaaaaaaaaaaaaaaaaaaaaaaaaaaaaaaaaaaaaaaaaaaaaaaaaaaaaaaaaaaaaaaaaaaaaaaaaaaaaaaaaaaaaaaaaaaaaaaaa

SEQ ID NO: 15387 - RNA, 1745 nt, Artificial Sequence
  mRNA product Design a-1 (hSL-A100) comprising derived and/or modified sequence from LASV(LASV253-NIG-2011;Clade II)__AIT17670__GPCmut1 (opt1)
aggagagucccgcagucggcguccagcggcucugcuuguucgugugugugucguugcaggccuuauucaagcuuaccaugggccagaucaucaccuucuuccaggaggugccccacgucaucgaggaggugaugaacaucgugcugaucgcccucagccugcuggccauccucaaggggaucuacaacgucgcgaccugcggccuguucgggcugguguccuuccuccugcugugcggccgcagcugcuccacgaccuacaaggggguguacgagcuccagacccuggagcuggacauggccagccucaacaugaccaugccgcuguccugcacgaagaacaacagccaccacuacaucauggucggcaacgagaccggccuggagcucacccugaccaacacguccaucaucaaccacaaguucugcaaccugagcgacgcccacaagaagaaccucuacgaccacgcccugauguccaucaucagcaccuuccaccuguccauccccaacuucaaccaguacgaggccaugagcugcgacuucaacgggggcaagaucuccgugcaguacaaccucagccacaccuacgcgguggacgccgccaaccacugcgggaccaucgccaacggcguccugcagacguucaugcggauggcguggggcggguccuacaucgcccuggacagcggcugcggguccugggacugcaucaugaccagcuaccaguaccucaucauccagaacaccaccugggaggaccacugccaguucucccgccccagccccaucggcuaccuggggcugcucagccagcggacgcgcgacaucuacaucucccggcgccggcgcggcaccuucaccuggacccugagcgacuccgagggcaacgagacgcccgggggcuacugccugacccgguggaugcucaucgaggccgagcugaagugcuucgggaacaccgccguggccaagugcaacgagaagcacgacgaggaguucugcgacaugcugcgccucuucgacuucaacaagcaggcgauccggcgccugaaggccccggcccagaugagcauccagcugaucaacaaggccgugaacgcccucaucaacgaccagcugaucaugaagaaccaccuccgggacaucaugugcauccccuacugcaacuacuccaaguacugguaccugaaccacaccgucacgggccgcaccagccugccccggugcuggcugguguccaacgggagcuaccucaacgagacccacuucuccgacgacaucgagcagcaggcggacaacaugaucaccgagcugcugcagaaggaguacaucgaccgccagggcaagacgccgcucggccugguggaccuguucgucuucagcaccuccuucuaccucaucagcaucuuccugcaccuggugaagauccccacccaccggcacaucaucgggaagcccugccccaagccgcaccgccugaaccacaugggcaucugcuccugcgggcucuacaagcaccccggcgugcccgucaaguggaagcggugaggacuagucccuguucccagagcccacuuuuuuuucuuuuuuugaaauaaaauagccugucuuucagaucucaaaggcucuuuucagagccaccaaaaaaaaaaaaaaaaaaaaaaaaaaaaaaaaaaaaaaaaaaaaaaaaaaaaaaaaaaaaaaaaaaaaaaaaaaaaaaaaaaaaaaaaaaaaaaaaaaaaa

SEQ ID NO: 15388 - RNA, 1745 nt, Artificial Sequence
  mRNA product Design a-1 (hSL-A100) comprising derived and/or modified sequence from LASV(LASV254-NIG-2011;Clade II)__AIT17674__GPCmut1 (opt1)
aggagagucccgcagucggcguccagcggcucugcuuguucgugugugugucguugcaggccuuauucaagcuuaccaugggccagaucaucaccuucuuccaggaggugccccacgucaucgaggaggugaugaacaucgugcugaucgcccucagccugcuggccauccucaaggggaucuacaacgucgcgaccugcggccuguucgggcugguguccuuccuccugcugugcggccgcagcugcuccacgaccuacaaggggguguacgagcuccagacccuggagcuggacaugaccaaccucaacaugacgaugccgcugagcugcaccaagaacaacucccaccacuacaucauggucggcaacgagaccggccuggagcucacccugacgaacaccagcaucaucaaccacaaguucugcaaccuguccgacgcccacaagaagaaccucuacaaccacgcccugaugagcaucaucuccaccuuccaccugagcauccccaacuucaaccaguacgaggccauguccugcgacuucaacgggggcaagaucagcgugcaguacaaccucucccacagcuacgccguggacgcggccaaccacugcgggaccaucgccaacggcguccugcagacguucaugcggauggccuggggcggguccuacaucgcgcuggacagcggcugcgggaacugggacugcaucaugaccuccuaccaguaccucaucauccagaacaccaccugggaggaccacugccaguucagccgccccucccccaucggcuaccuggggcugcucagccagcggacgcgcgacaucuacaucagccggcgccggcgcggcaccuucaccuggacccuguccgacagcgagggcaacgagacgcccgggggcuacugccugacccgguggaugcucaucgaggccgagcugaagugcuucgggaacaccgccguggccaagugcaacgagaagcacgacgaggaguucugcgacaugcugcgccucuucgacuucaacaagcaggccauccggcgccugaagaccccggcgcaggccaacauccagcugaucaacaaggccgugaacgcccucaucaacgaccagcugaucaugaagaaccaccuccgggacaucaugugcauccccuacugcaacuacuccaaguacugguaccugaaccacacggucaccggcaagaccagccugccccgcugcuggcugguguccaacgggagcuaccucaacgagacccacuucuccgacgacaucgagcagcaggccgacaacaugaucacggagcugcugcagaaggaguacauggaccggcagggcaagaccccgcucggccugguggaccuguucgucuucagcaccuccuucuaccucaucagcaucuuccugcaccuggugaagauccccacccaccgccacgugaucgggaagcccugccccaagccgcaccggcugaaccacaugggcaucugcuccugcgggcucuacaagcaccccggcguccccgugaaguggaagcgcugaggacuagucccuguucccagagcccacuuuuuuuucuuuuuuugaaauaaaauagccugucuuucagaucucaaaggcucuuuucagagccaccaaaaaaaaaaaaaaaaaaaaaaaaaaaaaaaaaaaaaaaaaaaaaaaaaaaaaaaaaaaaaaaaaaaaaaaaaaaaaaaaaaaaaaaaaaaaaaaaaaaaa

SEQ ID NO: 15389 - RNA, 1745 nt, Artificial Sequence
  mRNA product Design a-1 (hSL-A100) comprising derived and/or modified sequence from LASV(Nig08-A19;Clade III)__ADU56618__GPCmut1 (opt1)
aggagagucccgcagucggcguccagcggcucugcuuguucgugugugugucguugcaggccuuauucaagcuuaccaugggccagaucgugaccuucuuccaggaggucccccacgugaucgaggaggugaugaacaucguccugaucgcccucagcauccuggccauccugaaggggcucuacaacaucgcgaccugcggccugaucgggcuggugacguuccuccugcuguccggccgcagcugcuccaugaccuacaaggggguguacgagcuccagacccuggagcugaacaugaacacccucaacaugacgaugccgcugagcugcaccaagaacaacucccaccacuacaucauggucggcaacgagaccggccuggagcucacccugacgaacaccagccugcuccaccacaaguucugcaaccuguccgacgcccacaagaagaaccuguacgaccacacccucaugagcaucaucuccaccuuccaccugagcauccccaacuucaaccaguacgaggccauguccugcgacuucaacgggggcaagaucacggugcaguacaaccugagccacuccuacgccaucgacgccgcgaaccacugcgggaccguggccaacggcguccuccagaccuucaugcggauggccuggggcgggagcuacaucgcccuggacuccggcugcgggaagugggacugcaucaugaccagcuaccaguaccugaucauccagaacacgaccugggaggaccacugccaguucucccgccccagccccaucggcuaccucgggcugcugucccagcggacccgcgacaucuacaucagccggcgccggcgcggcaccuucacguggacccucagcgacuccgagggcaacgagacccccgggggcuacugccugacccgguggaugcugaucgaggcggagcucaagugcuucgggaacacggccguggccaagugcaacgagaagcacgacgaggaguucugcgacaugcugcgccuguucgacuucaacaagcaggccauccggcgccucaaggccccggcgcagaugagcauccagcugaucaacaaggccgugaacgcccugaucaacgaccagcucaucaugaagaaccaccuccgggacaucaugugcauccccuacugcaacuacuccaaguacugguaccugaaccacaccagcaccggccgcaccucccugccccggugcuggcuggucagcaacggguccuaccugaacgagacgcacuucagcgacgacaucgagcagcaggccgacaacaugaucaccgagaugcuccagaaggaguaccuggaccgccagggcaagaccccgcugggccucguggaccuguucguguucuccaccagcuucuaccugaucuccaucuuccugcaccucgucaagauccccacgcaccggcacaucguggggaagcccugccccaagccgcaccgccugaaccacaugggcaucugcagcugcgggcuguacaagcagcccggcgugcccguccgguggaagcgcugaggacuagucccuguucccagagcccacuuuuuuuucuuuuuuugaaauaaaauagccugucuuucagaucucaaaggcucuuuucagagccaccaaaaaaaaaaaaaaaaaaaaaaaaaaaaaaaaaaaaaaaaaaaaaaaaaaaaaaaaaaaaaaaaaaaaaaaaaaaaaaaaaaaaaaaaaaaaaaaaaaaaa

SEQ ID NO: 15390 - RNA, 1748 nt, Artificial Sequence
  mRNA product Design a-1 (hSL-A100) comprising derived and/or modified sequence from LASV(G1180-SLE-2010;Clade IV)__AIT17168__GPCmut1 (opt1)
aggagagucccgcagucggcguccagcggcucugcuuguucgugugugugucguugcaggccuuauucaagcuuaccaugggccagaucgugaccuucuuccaggaggucccccacgugaucgaggaggugaugaacaucguccugaucgcccucagcauccuggccgugcugaaggggcucuacaacuucgcgaccugcggccugguggggcugcucacguuccugcugcucugcggccgcuccugcaccgccagccgguacaagggggucuacgagcugcagacccuggagcucaacauggagacccugaacaugacgaugccgcuguccugcaccaagaacaacagccaccacuacaucauggugggcaacgagaccggccucgagcugacccugacgaacaccuccaucaucaaccacaaguucugcaaccucagcgacgcccacaagaagaaccuguacgaccacgcccugauguccaucaucagcaccuuccaccucuccauccccaacuucaaccaguacgaggccaugagcugcgacuucaacgggggcaagaucuccgugcaguacaaccugagccacuccuacgcgggggacgccgccaaccacugcggcaccgucgccaacggggugcugcagacguucaugcgcauggcguggggcggcagcuacaucgcccucgacuccgggugcggcagcugggacugcaucaugaccuccuaccaguaccugaucauccagaacaccaccugggaggaccacugccaguucagccggcccucccccaucggguaccugggccuccugagccagcgcacgcgggacaucuacaucagccgccggcgccggggcaccuucaccuggacccuguccgacagcgaggggaaggacacgccgggcggguacugccucacccgcuggaugcugaucgaggccgagcugaagugcuucggcaacaccgccguggccaagugcaacgagaagcacgacgaggaguucugcgacaugcuccggcuguucgacuucaacaagcaggcgauccagcgccugaaggcccccgcccagauguccauccagcucaucaacaaggccgucaacgcccugaucaacgaccagcugaucaugaagaaccaccuccgggacaucaugugcauccccuacugcaacuacagcaaguacugguaccugaaccacaccacgaccgggaagaccucccugcccaagugcuggcucgugagcaacggcuccuaccugaacgagacccacuucagcgacgacaucgagcagcaggcggacaacaugaucacggagaugcugcagaaggaguacauggagcgccagggcaagaccccgcucgggcugguggaccuguucgucuucuccaccagcuucuaccucaucuccaucuuccugcaccuggugaagauccccacccaccggcacaucgugggcaagagcugccccaagccccaccgccugaaccacauggggaucugcuccugcggccucuacaagcagccggggguccccgugaaguggaagcggugaggacuagucccuguucccagagcccacuuuuuuuucuuuuuuugaaauaaaauagccugucuuucagaucucaaaggcucuuuucagagccaccaaaaaaaaaaaaaaaaaaaaaaaaaaaaaaaaaaaaaaaaaaaaaaaaaaaaaaaaaaaaaaaaaaaaaaaaaaaaaaaaaaaaaaaaaaaaaaaaaaaaa

SEQ ID NO: 15391 - RNA, 1748 nt, Artificial Sequence
  mRNA product Design a-1 (hSL-A100) comprising derived and/or modified sequence from LASV(G1442-SLE-2011;Clade IV)__AIT17180__GPCmut1 (opt1)
aggagagucccgcagucggcguccagcggcucugcuuguucgugugugugucguugcaggccuuauucaagcuuaccaugggccagaucgugaccuucuuccaggaggucccccacgugaucgaggaggugaugaacaucguccugaucgcccucagcauccuggccgugcugaaggggcucuacaacguggcgaccugcggccugaucgggcuggucacguuccuccugcugugcggccgcuccugcaccaccacccucuacaaggggguguacgagcugcagacgcuggagcucaacauggagacccugaacaugaccaugccgcugagcugcaccaagaacaacucccaccacuacauccgggugggcaacgagacgggccucgagcugacccugaccaacaccagcaucaucaaccacaaguucugcaaccucuccgacgcccacaagaagaaccuguacgaccacgcccugaugagcaucaucuccacguuccaccucagcauccccaacuucaaccaguacgaggccauguccugcgacuucaacgggggcaagaucagcguccaguacaaccugucccacagcuacgccggggacgcggccaaccacugcggcaccguggccaacggggugcugcagaccuucaugcgcauggccuggggcggcuccuacaucgcgcucgacagcgggugcggcaacugggacugcaucaugaccuccuaccaguaccugaucauccagaacacgaccugggacgaccacugccaguucagccggcccucccccaucggguaccugggccuccugagccagcgcacccgggacgucuacaucucccgccggcgccggggcaccuucacguggacccugagcgacagcgaggggaaggacaccccgggcggguacugccucacccgcuggaugcugaucgaggccgagcugaagugcuucggcaacacggccguggccaagugcaacgagaagcacgacgaggaguucugcgacaugcuccggcuguucgacuucaacaagcaggccauccagcgccugaaggcgcccgcccagauguccauccagcucaucaacaaggccgugaacgcccugaucaacgaccagcugaucaugaagaaccaccuccgggacaucaugugcauccccuacugcaacuacagcaaguacugguaccugaacaacaccgccaccgggaagaccucccugcccaagugcuggcucaucagcaacggcuccuaccugaacgagacgcacuucagcgacgacaucgagcaggaggcggacaacaugaucaccgagaugcugcagaaggaguacauggagcgccagggcaagaccccgcucgggcuggucgaccuguucguguucuccaccagcuucuaccucaucuccaucuuccugcaccuggugaagauccccacgcaccggcacaucgucggcaagagcugccccaagccccaccgccugaaccacauggggaucugcuccugcggccucuacaagcagccgggggugcccgugcgguggaagcgcugaggacuagucccuguucccagagcccacuuuuuuuucuuuuuuugaaauaaaauagccugucuuucagaucucaaaggcucuuuucagagccaccaaaaaaaaaaaaaaaaaaaaaaaaaaaaaaaaaaaaaaaaaaaaaaaaaaaaaaaaaaaaaaaaaaaaaaaaaaaaaaaaaaaaaaaaaaaaaaaaaaaaa

SEQ ID NO: 15392 - RNA, 1748 nt, Artificial Sequence
  mRNA product Design a-1 (hSL-A100) comprising derived and/or modified sequence from LASV(G3010-SLE-2013;Clade IV)__AIT17344__GPCmut1 (opt1)
aggagagucccgcagucggcguccagcggcucugcuuguucgugugugugucguugcaggccuuauucaagcuuaccaugggccagaucgugaccuucuuccaggaggucccccacgugaucgaggaggugaugaacaucguccugaucgcccucagcauccuggccgugcugaaggggcucuacaacuucgcgaccugcggccugguggggcuggucacguuccuccugcugugcggccgcuccugcaccaccagccucuacaaggggguguacgagcugcagacccuggagcucaacauggagacgcugaacaugaccaugccgcuguccugcaccaagaacaacagccaccacuacaucauggugggcaacgagaccggccucgagcugacgcugaccaacaccuccaucaucaaccacaaguucugcaaccucagcgacgcccacaagaagaaccuguacaaccacgcccugauguccaucaucagcaccuuccaccucuccauccccaacuucaaccaguacgaggccaugagcugcgacuucaacgggggcaagaucuccguccaguacaaccugagccacuccuacgccggggacgcggccagccacugcggcacgguggccaacggggugcugcagaccuucaugcggauggccuggggcggcuccuacaucgcgcucgacagcgggugcggcaagugggacugcaucaugaccuccuaccaguaccugaucauccagaacaccacgugggaggaccacugccaguucagccgccccucccccaucggguaccugggccuccugagccagcggacccgcgacaucuacaucagccggcgccggcgcggcaccuucaccuggacgcuguccgacagcgaggggaaggacaccccgggcggguacugccucacccgguggaugcugaucgaggccgagcugaagugcuucggcaacaccgccgucgccaagugcaacgagaagcacgacgaggaguucugcgacaugcuccgccuguucgacuucaacaagcaggccauccagcggcugaagacgcccgcgcagauguccauccagcucaucaacaaggccgugaacgcccugaucaacgaccagcugaucaugaagaaccaccuccgcgacaucaugugcauccccuacugcaacuacagcaaguacugguaccugaaccacaccaccaccgggaagacgucccugcccaagugcuggcucgugagcaacggcuccuaccugaacgagacccacuucagcgacgacaucgagcagcaggccgacaacaugaucaccgagaugcugcagaaggaguacauggagcggcagggcaagaccccgcucgggcuggucgaccuguucguguucuccacgagcuucuaccucaucuccaucuuccugcaccuggugaagauccccacccaccgccacaucgucggcaagagcugccccaagccccaccggcugaaccacauggggaucugcuccugcggccucuacaagcagccgggggugcccgugcgcuggaagcggugaggacuagucccuguucccagagcccacuuuuuuuucuuuuuuugaaauaaaauagccugucuuucagaucucaaaggcucuuuucagagccaccaaaaaaaaaaaaaaaaaaaaaaaaaaaaaaaaaaaaaaaaaaaaaaaaaaaaaaaaaaaaaaaaaaaaaaaaaaaaaaaaaaaaaaaaaaaaaaaaaaaaa

SEQ ID NO: 15393 - RNA, 1748 nt, Artificial Sequence
  mRNA product Design a-1 (hSL-A100) comprising derived and/or modified sequence from LASV(G502-SLE-2009;Clade IV)__AIT17126__GPCmut1 (opt1)
aggagagucccgcagucggcguccagcggcucugcuuguucgugugugugucguugcaggccuuauucaagcuuaccaugggccagaucgugaccuucuuccaggaggucccccacgugaucgaggaggugaugaacaucguccugaucgcccucagcauccuggccgugcugaaggggcucuacaacuucgcgaccugcggccugguggggcugcucacguuccugcugcucugcggccgcuccugcaccaccgggcuguacaagggcgucuacgagcugcagacccucgagcugaacauggagacgcugaacaugaccaugccgcucagcugcaccaagaacaacucccaccacuacaucauggugggcaacgagaccgggcuggagcugacgcucaccaacaccagcaucaucaaccacaaguucugcaaccuguccgacgcccacaagaagaaccuguacgaccacgcccucaugagcaucaucuccaccuuccaccugagcauccccaacuucaaccaguacgaggccauguccugcgacuucaacggcgggaagaucagcgugcaguacaaccugucccacagcuacgccggcgacgcggccgaccacugcgggacggucgccaacggcgugcuccagaccuucaugcggauggccuggggcggguccuacaucgcgcuggacagcggcugcgggcgcugggacugcaucaugaccuccuaccaguaccugaucauccagaacaccacgugggaggaccacugccaguucagccggcccucccccaucggcuaccucggccugcugagccagcgcacccgggacaucuacaucucccgccggcgccgggggaccuucaccuggacgcucagcgacagcgagggcaaggacacccccgggggcuacugccugacccgcuggaugcugaucgaggccgagcucaagugcuucgggaacaccgccguggccaagugcaacgagaagcacgacgaggaguucugcgacaugcugcggcuguucgacuucaacaagcaggccauccagcgccucaaggcgccggcccagauguccauccagcugaucaacaaggccgucaacgcccugaucaacgaccagcucgugaugaagaaccaccuccgggacaucaugugcauccccuacugcaacuacagccgcuacugguaccugaaccacacgaccaccggccggaccucccugcccaagugcuggcuggugagcaacggcuccuaccugaacgagacgcacuucagcgacgacaucgagcagcaggccgacaacaugaucaccgagaugcuccagaaggaguacauggagcgccaggggaagaccccgcugggccuggucgaccucuucguguucuccaccagcuucuaccugaucuccaucuuccugcaccuggugaagauccccacgcaccggcacaucgucggcaagagcugccccaagccccaccgccucaaccacauggggaucugcuccugcgggcuguacaagcagccgggcgugcccgugaaguggaagcggugaggacuagucccuguucccagagcccacuuuuuuuucuuuuuuugaaauaaaauagccugucuuucagaucucaaaggcucuuuucagagccaccaaaaaaaaaaaaaaaaaaaaaaaaaaaaaaaaaaaaaaaaaaaaaaaaaaaaaaaaaaaaaaaaaaaaaaaaaaaaaaaaaaaaaaaaaaaaaaaaaaaaa

SEQ ID NO: 15394 - RNA, 1748 nt, Artificial Sequence
  mRNA product Design a-1 (hSL-A100) comprising derived and/or modified sequence from LASV(G733-SLE-2010;Clade IV)__AIT17154__GPCmut1 (opt1)
aggagagucccgcagucggcguccagcggcucugcuuguucgugugugugucguugcaggccuuauucaagcuuaccaugggccagaucgugaccuucuuccaggaggucccccacgugaucgaggaggugaugaacaucguccugaucgcccucagcauccuggccgugcugaaggggcucuacaacuucgcgaccugcggcaucguggggcuggucuccuuccugcuccugugcggccgcagcugcacgaccucccuguacaaggggguguacgagcuccagacccuggagcugaacauggagacccucaacaugacgaugccgcugagcugcaccaagaacaacucccaccacuacaucauggugggcaacgagaccggccuggagcucacccugacgaacaccagcaucaucaaccacaaguucugcaaccuguccgacgcccacaagaagaaccucuacgaccacgcccugaugagcaucaucuccaccuuccaccugagcauccccaacuucaaccaguacgaggccauguccugcgacuucaacgggggcaagaucagcguccaguacaaccucucccacagcuacgccggggacgcggccaaccacugcggcaccaucgccaacggggugcugcagacguucaugcggauggccuggggcggcuccuacaucgcgcuggacagcgggugcgaccgcugggacugcaucaugaccuccuaccaguaccucaucauccagaacaccaccugggaggaccacugccaguucagccggcccucccccaucggcuaccuggggcugcucagccagcgcacgcgggacaucuacaucagccgccggcgccggggcaccuucaccuggacccuguccgacagcgagggcaaggacacgcccgggggcuacugccugacccgcuggaugcucaucgaggccgagcugaagugcuucgggaacaccgccguggccaagugcaacgagaagcacgacgaggaguucugcgacaugcugcggcuguucgacuucaacaagcaggccauccagcgccugaaggcgccggcccagauguccauccagcugaucaacaaggccgucaacgcccucaucaacgaccagcugaucaugaagaaccaccuccgggacaucaugugcauccccuacugcaacuacagcaaguacugguaccucaaccacaccacgaccggcaagaccucccugcccaagugcuggcuggugagcaacggguccuaccucaacgagacccacuucagcgacgacaucgagcagcaggccgacaacaugaucacggagaugcugcagaaggaguacauggagcgccagggcaagaccccgcugggccucguggaccuguucgucuucuccaccagcuucuaccugaucuccaucuuccuccaccuggugaagauccccacccaccggcacguggucggcaagagcugccccaagccccaccgccugaaccacauggggaucugcuccugcgggcuguacggccagccgggggugcccgugaaguggaagcggugaggacuagucccuguucccagagcccacuuuuuuuucuuuuuuugaaauaaaauagccugucuuucagaucucaaaggcucuuuucagagccaccaaaaaaaaaaaaaaaaaaaaaaaaaaaaaaaaaaaaaaaaaaaaaaaaaaaaaaaaaaaaaaaaaaaaaaaaaaaaaaaaaaaaaaaaaaaaaaaaaaaaa

SEQ ID NO: 15395 - RNA, 1748 nt, Artificial Sequence
  mRNA product Design a-1 (hSL-A100) comprising derived and/or modified sequence from MOPV/LASV reassortant(IGS-1;Clade IV)__AFY05576__GPCmut1 (opt1)
aggagagucccgcagucggcguccagcggcucugcuuguucgugugugugucguugcaggccuuauucaagcuuaccaugggccagaucgugaccuucuuccaggaggucccccacgugaucgaggaggugaugaacaucguccugaucgcccucagcgugcuggccgugcugaaggggcucuacaacuucgcgaccugcggccuggucgggcuggugacguuccuccugcugugcggccgcuccugcaccaccagccucuacaaggggguguacgagcugcagacccuggagcucaacauggagacgcugaacaugaccaugccgcuguccugcaccaagaacaacagccaccacuacaucauggucggcaacgagaccggccucgagcugacgcugaccaacaccuccaucaucaaccacaaguucugcaaccucagcgacgcccacaagaagaaccuguacgaccacgcccugauguccaucaucagcaccuuccaccucuccauccccaacuucaaccaguacgaggccaugagcugcgacuucaacgggggcaagaucuccgugcaguacaaccugagccacuccuacgccggggacgcggccaaccacugcggcacgguggccaacgggguccugcagaccuucaugcggauggccuggggcggcagcuacaucgcgcucgacuccgggugcggcaacugggacugcaucaugaccagcuaccaguaccugaucauccagaacaccacgugggaggaccacugccaguucucccgccccagccccaucggguaccugggccuccugucccagcggacccgcgacaucuacaucagccggcgccggcgcggcaccuucaccuggacgcugagcgacuccgagggggaggacaccccgggcggguacugccucacccgguggaugcugaucgaggccgagcugaagugcuucggcaacaccgccguggccaagugcaacgagaagcacgacgaggaguucugcgacaugcuccgccuguucgacuucaacaagcaggccauccagcggcugaaggcgcccgcccagaugagcauccagcucaucaacaaggccgugaacgcccugaucaacgaccagcugaucaugaagaaccaccuccgcgacaucaugugcauccccuacugcaacuacuccaaguacugguaccugaaccacacgaccaccgggcggaccagccugcccaagugcuggcucgucuccaacggcagcuaccugaacgagacgcacuucuccgacgacaucgagcagcaggccgacaacaugaucaccgagaugcugcagaaggaguacauggagcgccagggcaagaccccgcucgggcugguggaccuguucguguucagcaccuccuucuaccucaucagcaucuuccugcaccuggucaagauccccacgcaccggcacaucgugggcaaguccugccccaagccccaccgccugaaccacauggggaucugcagcugcggccucuacaagcagccgggggugcccgucaaguggaagcggugaggacuagucccuguucccagagcccacuuuuuuuucuuuuuuugaaauaaaauagccugucuuucagaucucaaaggcucuuuucagagccaccaaaaaaaaaaaaaaaaaaaaaaaaaaaaaaaaaaaaaaaaaaaaaaaaaaaaaaaaaaaaaaaaaaaaaaaaaaaaaaaaaaaaaaaaaaaaaaaaaaaaa

SEQ ID NO: 15396 - RNA, 1748 nt, Artificial Sequence
  mRNA product Design a-1 (hSL-A100) comprising derived and/or modified sequence from LASV(LM765-SLE-2012;Clade IV)__AIT17814__GPCmut1 (opt1)
aggagagucccgcagucggcguccagcggcucugcuuguucgugugugugucguugcaggccuuauucaagcuuaccaugggccagaucgugaccuucuuccaggaggucccccacgugaucgaggaggugaugaacaucguccugaucgcccucagcauccuggccgugcugaaggggcucuacaacuucgcgaccugcggccugguggggcuggucacguuccuccugcugugcggccgcuccugcaccaccagccucuacaaggggguguacgagcugcagacccuggagcucaacauggagacgcugaacaugaccaugccgcuguccugcaccaagaacaacagccaccacuacaucauggugggcaacgagaccggccucgagcugacgcugaccaacaccuccaucaucgaccacaaguucugcaaccucagcgacgcccaccggaagaaccuguacgaccacgcccugauguccaucaucagcaccuuccaccucuccauccccaacuucaaccaguacgaggccaugagcugcgacuucaacgggggcaagaucuccguccaguacaaccugagccacuccuacgccaaggacgcggccgaccacugcgggacgguggccaacggcgugcugcagaccuucaugcgcauggccuggggcgggagcuacaucgcgcucgacuccggcugcgggcggugggacugcaucaugaccagcuaccaguaccugaucauccagaacaccacgugggaggaccacugccaguucucccgccccagccccaucggcuaccuggggcuccugucccagcggacccgcgacaucuacaucagccggcgccggcgcggcaccuucaccuggacgcugagcgacuccgagggcaaggacacccccgggggcuacugccucacccgguggaugcugaucgaggccgagcugaagugcuucgggaacaccgccgucgccaagugcaacgagaagcacgacgaggaguucugcgacaugcuccgccuguucgacuucaacaagcaggccauccagcggcugaaggcgccggcccagaugagcauccagcucaucaacaaggccgugaacgcccugaucaacgaccagcugaucaugaagaaccaccuccgcgacaucaugugcauccccuacugcaacuacuccaaguacugguaccugaaccacacgaccaccggcaagaccagccugcccaagugcuggcucguguccaacgggagcuaccugaacgagacgcacuucuccgacgacaucgagcagcaggccgacaacaugaucaccgagaugcugcagaaggaguacauggagcggcagggcaagaccccgcucggccuggucgaccuguucguguucagcaccuccuucuaccucaucagcaucuuccugcaccuggugaagauccccacgcaccgccacaucgucgggaagcccugccccaagccgcaccggcugaaccacaugggcaucugcuccugcgggcucuacaagcagcccggcgugcccgugaaguggaagcgcugaggacuagucccuguucccagagcccacuuuuuuuucuuuuuuugaaauaaaauagccugucuuucagaucucaaaggcucuuuucagagccaccaaaaaaaaaaaaaaaaaaaaaaaaaaaaaaaaaaaaaaaaaaaaaaaaaaaaaaaaaaaaaaaaaaaaaaaaaaaaaaaaaaaaaaaaaaaaaaaaaaaaa

SEQ ID NO: 15397 - RNA, 1748 nt, Artificial Sequence
  mRNA product Design a-1 (hSL-A100) comprising derived and/or modified sequence from LASV(LM776-SLE-2012;Clade IV)__AIT17824__GPCmut1 (opt1)
aggagagucccgcagucggcguccagcggcucugcuuguucgugugugugucguugcaggccuuauucaagcuuaccaugggccagaucgugaccuucuuccaggaggucccccacgugaucgaggaggugaugaacaucguccugaucgcccucagcauccuggccgugcugaaggggcucuacaacuucgcgaccugcggccugguggggcuggucacguuccuccugcugugcggccgcuccugcaccaccagcguguacaaggggguguacgagcuccagacccuggagcugaacauggagacgcucaacaugaccaugccgcuguccugcaccaagaacaacagccaccacuacaucauggucggcaacgagaccggccuggagcucacgcugaccaacaccuccaucaucaaccacaaguucugcaaccugagcgacgcccacaagaagaaccucuacgaccacgcccugauguccaucaucagcaccuuccaccuguccauccccaacuucaaccaguacgaggccaugagcugcgacuucaacgggggcaagaucuccgugcaguacaaccucagccacuccuacgccggggacgcggccaaccacugcggcacgguggccaacgggguccugcagaccuucaugcggauggccuggggcggcagcuacaucgcgcuggacuccgggugcggcaagugggacugcaucaugaccagcuaccaguaccucaucauccagaacaccacgugggaggaccacugccaguucucccgccccagccccaucggguaccugggccugcucucccagcggacccgcgacaucuacaucagccggcgccggcgcggcaccuucaccuggacgcugagcgacuccgaggggaaggacaccccgggcggguacugccugacccgguggaugcucaucgaggccgagcugaagugcuucggcaacaccgccguggccaagugcaacgagaagcacgacgaggaguucugcgacaugcugcgccucuucgacuucaacaagcaggccauccagcggcugaaggcgcccgcccagaugagcauccagcugaucaacaaggccgugaacgcccucaucaacgaccagcugaucaugaagaaccaccuccgcgacaucaugugcauccccuacugcaacuacuccaaguacugguaccugaaccacacgaccaccgggaagaccagccugcccaagugcuggcuggucuccaacggcagcuaccucaacgagacgcacuucuccgacgacaucgagcagcaggccgacaacaugaucaccgagaugcugcagaaggaguacauggagcggcagggcaagaccccgcuggggcucguggaccuguucguguucagcaccuccuucuaccugaucagcaucuuccuccaccuggucaagauccccacgcaccgccacaucgugggcaaguccugccccaagccccaccggcugaaccacauggggaucugcagcugcggccuguacaagcagccgggggugcccguccgcuggaagcggugaggacuagucccuguucccagagcccacuuuuuuuucuuuuuuugaaauaaaauagccugucuuucagaucucaaaggcucuuuucagagccaccaaaaaaaaaaaaaaaaaaaaaaaaaaaaaaaaaaaaaaaaaaaaaaaaaaaaaaaaaaaaaaaaaaaaaaaaaaaaaaaaaaaaaaaaaaaaaaaaaaaaa

SEQ ID NO: 15398 - RNA, 1748 nt, Artificial Sequence
  mRNA product Design a-1 (hSL-A100) comprising derived and/or modified sequence from LASV(Mad39;Clade IV)__ANH09722__GPCmut1 (opt1)
aggagagucccgcagucggcguccagcggcucugcuuguucgugugugugucguugcaggccuuauucaagcuuaccaugggccagaucgugaccuucuuccaggaggucccccacgugaucgaggaggugaugaacaucguccugaucgcccucagcauccuggccgugcugaaggggcucuacaacguggcgaccugcggccugaucgggcuggucacguuccuccugcugugcggccgcuccugcaccaccacccucuacaaggggguguacgagcugcaggcccuggagcucaacauggagacgcugaacaugaccaugccgcugagcugcaccaagaacaacucccaccacuacauccgggugggcaacgagaccggccucgagcugacgcugaccaacaccagccucaucaaccacaaguucugcaaccuguccgacgcccacaagaagaaccuguacgaccacgcccucaugagcaucaucuccaccuuccaccugagcauccccaacuucaaccaguacgaggccauguccugcgacuucaacgacgggaagaucagcguccaguacaaccugucccacacguacgcgggcgacaccgccaaccacugcgggaccguggccaacggcgugcuccagaccuucaugcgcauggccuggggcgggagcuacaucgcgcuggacuccggcugcgggggcugggacugcaucaugacgagcuaccaguaccugaucauccagaacaccaccugggaggaccacugccaguucucccggcccagccccaucggguaccucggccugcugucccagcgcacccgggacaucuacaucagccgccggcgccggggcacguucaccuggacccucuccgacagcgaggggaaggacaccccgggcggguacugccugacgcgcuggaugcugaucgaggccgagcucaagugcuucggcaacaccgccgucgccaagugcaacgagaagcacgacgaggaguucugcgacaugcugcggcuguucgacuucaacaagcaggccauccagcgccucaaggcgcccgcccagaugagcauccagcugaucaacaaggccgugaacgcccugaucaacgaccagcucaucaugaagaaccaccuccgggacaucaugugcauccccuacugcaacuacuccaaguacugguaccugaaccacaccgugaccgggaagacgagccugcccaagugcuggcuggucuccaacggcagcuaccugaacgagacccacuucuccgacgacaucgagcagcaggccgacaacaugaucaccgagaugcuccagaaggaguacauggagcgccagggcaagaccccgcuggggcugguggaccucuucguguucagcacguccuucuaccugaucagcaucuuccugcaccuggucaagauccccacccaccggcacguggugggcaagcccugccccaagccgcaccgccucaaccacauggggaucugcuccugcggcuucuacaagcagcccgggguccccgugcgguggaagcgcugaggacuagucccuguucccagagcccacuuuuuuuucuuuuuuugaaauaaaauagccugucuuucagaucucaaaggcucuuuucagagccaccaaaaaaaaaaaaaaaaaaaaaaaaaaaaaaaaaaaaaaaaaaaaaaaaaaaaaaaaaaaaaaaaaaaaaaaaaaaaaaaaaaaaaaaaaaaaaaaaaaaaa

SEQ ID NO: 15399 - RNA, 1748 nt, Artificial Sequence
  mRNA product Design a-1 (hSL-A100) comprising derived and/or modified sequence from LASV(Z0947-SLE-2011;Clade IV)__AIT17840__GPCmut1 (opt1)
aggagagucccgcagucggcguccagcggcucugcuuguucgugugugugucguugcaggccuuauucaagcuuaccaugggccagaucgugaccuucuuccaggaggucccccacgugaucgaggaggugaugaacaucguccugaucgcccucagcauccuggccgugcugaaggggcucuacaacuucgcgaccugcggccugguggggcuggucacguuccuccugcugugcggccgcuccugcaccaucagccucuacaaggggguguacgagcugcagacccuggagcucaacauggagacccugaacaugacgaugccgcuguccugcaccaagaacaacagccaccacuacaucauggugggcaacgagaccggccucgagcugacccugacgaacaccuccaucaucaaccacaaguucugcaaccucagcgacgcccacaagaagaaccuguacgaccacgcccugauguccaucaucagcaccuuccaccucuccauccccaacuucaaccaguacgaggccaugagcugcgacuucaacgggggcaagaucuccguccaguacaaccugagccacuccuacgccggggacgcggccaaccacugcggcaccguggccaacggggugcugcagacguucaugcggauggccuggggcggcagcuacaucgcgcucgacuccgggugcgaccgcugggacugcaucaugaccagcuaccaguaccugaucauccagaacaccaccugggaggaccacugccaguucucccggcccagccccaucggcuaccuggggcuccugucccagcgcacgcgggacaucuacaucagccgccggcgccggggcaccuucaccuggacccugagcgacuccgagggcaaggacacgcccgggggcuacugccucacccgcuggaugcugaucgaggccgagcugaagugcuucgggaacaccgccgucgccaagugcaacgagaagcacgacgaggaguucugcgacaugcuccggcuguucgacuucaacaagcaggccauccagcgccugaaggcgccggcccagaugagcauccagcucaucaacaaggccgugaacgcccugaucaacgaccagcugaucaugaagaaccaccuccgggacaucaugugcauccccuacugcaacuacuccaaguacugguaccugaaccacaccacgaccggcaagaccagccugcccaagugcuggcucguguccaacgggagcuaccugaacgagacccacuucuccgacgacaucgagcagcaggccgacaacaugaucacggagaugcugcagaaggaguacauggagcgccagggcaagaccccgcucggccuggucgaccuguucguguucagcaccuccuucuaccucaucagcaucuuccugcaccuggugaagauccccacccaccggcacaucgucgggaagcccugccccaagccgcaccgccugaaccacaugggcaucugcuccugcgggcucuacaagcagcccggcgugcccgugaaguggaagcggugaggacuagucccuguucccagagcccacuuuuuuuucuuuuuuugaaauaaaauagccugucuuucagaucucaaaggcucuuuucagagccaccaaaaaaaaaaaaaaaaaaaaaaaaaaaaaaaaaaaaaaaaaaaaaaaaaaaaaaaaaaaaaaaaaaaaaaaaaaaaaaaaaaaaaaaaaaaaaaaaaaaaa

SEQ ID NO: 15400 - RNA, 1748 nt, Artificial Sequence
  mRNA product Design a-1 (hSL-A100) comprising derived and/or modified sequence from LASV(Josiah;Clade IV)__NP_694870__GPCmut1 (opt4)
aggagagucccgcagucggcguccagcggcucugcuuguucgugugugugucguugcaggccuuauucaagcuuaccaugggccagaucgugaccuucuuccaggaggugccccacgugaucgaggaggugaugaacaucgugcugaucgcccugagcgugcuggccgugcugaagggccuguacaacuucgccaccugcggccuggugggccuggugaccuuccugcugcugugcggcagaagcugcaccaccagccuguacaagggcguguacgagcugcagacccuggagcugaacauggagacccugaacaugaccaugccccugagcugcaccaagaacaacagccaccacuacaucauggugggcaacgagaccggccuggagcugacccugaccaacaccagcaucaucaaccacaaguucugcaaccugagcgacgcccacaagaagaaccuguacgaccacgcccugaugagcaucaucagcaccuuccaccugagcauccccaacuucaaccaguacgaggccaugagcugcgacuucaacggcggcaagaucagcgugcaguacaaccugagccacagcuacgccggcgacgccgccaaccacugcggcaccguggccaacggcgugcugcagaccuucaugagaauggccuggggcggcagcuacaucgcccuggacagcggcugcggcaacugggacugcaucaugaccagcuaccaguaccugaucauccagaacaccaccugggaggaccacugccaguucagcagacccagccccaucggcuaccugggccugcugagccagagaaccagagacaucuacaucagcagaagacgccggggcaccuucaccuggacccugagcgacagcgagggcaaggacacccccggcggcuacugccugaccagauggaugcugaucgaggccgagcugaagugcuucggcaacaccgccguggccaagugcaacgagaagcacgacgaggaguucugcgacaugcugagacuguucgacuucaacaagcaggccauccagagacugaaggcccccgcccagaugagcauccagcugaucaacaaggccgugaacgcccugaucaacgaccagcugaucaugaagaaccaccugagagacaucaugugcauccccuacugcaacuacagcaaguacugguaccugaaccacaccaccaccggcagaaccagccugcccaagugcuggcuggugagcaacggcagcuaccugaacgagacccacuucagcgacgacaucgagcagcaggccgacaacaugaucaccgagaugcugcagaaggaguacauggagagacagggcaagaccccccugggccugguggaccuguucguguucagcaccagcuucuaccugaucagcaucuuccugcaccuggugaagauccccacccacagacacaucgugggcaagagcugccccaagccccacagacugaaccacaugggcaucugcagcugcggccuguacaagcagcccggcgugcccgugaaguggaagagaugaggacuagucccuguucccagagcccacuuuuuuuucuuuuuuugaaauaaaauagccugucuuucagaucucaaaggcucuuuucagagccaccaaaaaaaaaaaaaaaaaaaaaaaaaaaaaaaaaaaaaaaaaaaaaaaaaaaaaaaaaaaaaaaaaaaaaaaaaaaaaaaaaaaaaaaaaaaaaaaaaaaaa

SEQ ID NO: 15401 - RNA, 1745 nt, Artificial Sequence
  mRNA product Design a-1 (hSL-A100) comprising derived and/or modified sequence from LASV(LP;Clade I)__AAF86701__GPCmut1 (opt4)
aggagagucccgcagucggcguccagcggcucugcuuguucgugugugugucguugcaggccuuauucaagcuuaccaugggccagaucaucaccuucuuccaggaggugccccacgugaucgaggaggugaugaacaucgugcugaucgcccugagccugcuggccauccugaagggccuguacaacaucgccaccugcggcaucaucggccugguggccuuccuguuccugugcggcaagagcugcagccugacccugaagggcggcuacgagcugcagacccuggagcugaacauggagacccugaacaugaccaugccccugagcugcaccaagaacagcagccaccacuacaucagagugggcaacgagaccggccuggagcugacccugaccaacaccagcaucaucaaccacaaguucugcaaccugagcgacgcccacaagaagaaccuguacgaccacgcccugaugagcaucaucagcaccuuccaccugagcauccccaacuucaaccaguacgaggccaugagcugcgacuucaacggcggcaagaucagcgugcaguacaaccugagccacagcuacgccggcgacgccgccgagcacugcggcaccguggccaacggcgugcugcagaccuucaugagaauggccuggggcggcagauacaucgcccuggacagcggcugcggcaacugggacugcaucaugaccagcuaccaguaccugaucauccagaacaccaccugggaggaccacugccaguucagcagacccagccccaucggcuaccugggccugcugagccagagaaccagagacaucuacaucagcagaagacgccggggcaccuucaccuggacccugagcgacagcgagggcaacgagacccccggcggcuacugccugaccagauggaugcugaucgaggccgagcugaagugcuucggcaacaccgccguggccaagugcaacgagaagcacgacgaggaguucugcgacaugcugagacuguucgacuucaacaagcaggccaucagaagacugaaggcccccgcccagaugagcauccagcugaucaacaaggccgugaacgcccugaucaacgaccagcugaucaugaagaaccaccugagagacaucaugugcauccccuacugcaacuacagcaaguacugguaccugaaccacaccagcagcggcagaaccagccugcccaagugcuggcugaucagcaacggcagcuaccugaacgagacccaguucagcgacgacaucgagcagcaggccgacaacaugaucaccgagaugcugcagaaggaguacaucgagagacagggcaagaccccccugggccugguggacaucuucaucuucagcaccagcuucuaccugaucagcaucuuccugcaccugaucaagauccccacccacagacacaucgugggcaagcccugccccaagccccacagacugaaccacaugggcgugugcagcugcggccuguacaagcaccccggcgugcccaccaaguggaagagaugaggacuagucccuguucccagagcccacuuuuuuuucuuuuuuugaaauaaaauagccugucuuucagaucucaaaggcucuuuucagagccaccaaaaaaaaaaaaaaaaaaaaaaaaaaaaaaaaaaaaaaaaaaaaaaaaaaaaaaaaaaaaaaaaaaaaaaaaaaaaaaaaaaaaaaaaaaaaaaaaaaaaa

SEQ ID NO: 15402 - RNA, 1745 nt, Artificial Sequence
  mRNA product Design a-1 (hSL-A100) comprising derived and/or modified sequence from LASV(803213;Clade II)__AAF86703__GPCmut1 (opt4)
aggagagucccgcagucggcguccagcggcucugcuuguucgugugugugucguugcaggccuuauucaagcuuaccaugggccagaucaucaccuucuuccaggaggugccccacgugaucgaggaggugaugaacaucgugcugaucgcccugagccugcuggccauccugaagggcaucuacaacguggccaccugcggccuguucggccugaucagcuuccugcugcugugcggcagaagcugcagcgugaccuacaagggcguguacgagcugcagacccuggagcugaacauggccaaccugaacaugaccaugccccugagcugcaccaagaacaacagccaccacuacaucauggugggcaacgagaccggccuggagcugacccugaccaacaccagcaucaucaaccacaaguucugcaaccugagcgacgcccacaagaagaaccuguacgaccacgcccugaugagcaucaucagcaccuuccaccugagcauccccaacuucaaccaguacgaggccaugagcugcgacuucaacggcggcaagaucagcgugcaguacaaccugagccacagcuucgccguggacgccgccaaccacugcggcaccaucgccaacggcgugcugcagaccuucaugagaauggccuggggcggcagcuacaucgcccuggacagcggcugcggcaacugggacugcaucaugaccagcuaccaguaccugaucauccagaacaccaccugggaggaccacugccaguucagcagacccagccccaucggcuaccugggccugcugagccagagaaccagagacaucuacaucagcagaagacgccggggcaccuucaccuggacccugagcgacagcgagggcaacgaggcccccggcggcuacugccugaccagauggaugcugaucgaggccgagcugaagugcuucggcaacaccgccguggccaagugcaacgagaagcacgacgaggaguucugcgacaugcugagacuguucgacuucaacaagcaggccaucaagagacugaagacccccgcccagaugagcauccagcugaucaacaaggccgugaacgcccugaucaacgaccagcugaucaugaagaaccaccugagagacaucaugugcauccccuacugcaacuacagcagauacugguaccugaaccacaccgugaccggcaagaccagccugcccagaugcuggcuggugagcaacggcagcuaccugaacgagacccacuucagcgacgacaucgagcagcaggccgacaacaugaucaccgagaugcugcagaaggaguacauggacagacagggcaagaccccccugggccugguggaccuguucguguucagcaccagcuucuaccugaucagcaucuuccugcaccuggugaagauccccacccacagacacaucgugggcaagcccugccccaagccccacagacugaaccacaugggcaucugcagcugcggccuguacaagcaccccggcgugcccgugaaguggaagagaugaggacuagucccuguucccagagcccacuuuuuuuucuuuuuuugaaauaaaauagccugucuuucagaucucaaaggcucuuuucagagccaccaaaaaaaaaaaaaaaaaaaaaaaaaaaaaaaaaaaaaaaaaaaaaaaaaaaaaaaaaaaaaaaaaaaaaaaaaaaaaaaaaaaaaaaaaaaaaaaaaaaaa

SEQ ID NO: 15403 - RNA, 1745 nt, Artificial Sequence
  mRNA product Design a-1 (hSL-A100) comprising derived and/or modified sequence from LASV(GA391;Clade III)__CAA36645__GPCmut1 (opt4)
aggagagucccgcagucggcguccagcggcucugcuuguucgugugugugucguugcaggccuuauucaagcuuaccaugggccagaucgugaccuucuuccaggaggugccccacgugaucgaggaggugaugaacaucgugcugaucgcccugagcauccuggccauccugaagggccuguacaacguggccaccugcggccugaucggccuggugaccuuccugcugcugagcggcagaagcugcagccugaucuacaagggcaccuacgagcugcagacccuggagcugaacauggagacccugaacaugaccaugccccugagcugcaccaagaacaacagccaccacuacaucagagugggcaacgagaccggccuggagcugacccugaccaacaccagcauccugaaccacaaguucugcaaccugagcgacgcccacaagagaaaccuguacgaccacagccugaugagcaucaucagcaccuuccaccugagcauccccaacuucaaccaguacgaggccaugagcugcgacuucaacggcggcaagaucaccgugcaguacaaccugagccacagcuucgccguggacgccgccggccacugcggcacccuggccaacggcgugcugcagaccuucaugagaauggccuggggcggcagcuacaucgcccuggacagcggcugcggcaacugggacugcaucaugaccagcuaccaguaccugaucauccagaacaccaccugggacgaccacugccaguucagcagacccagccccaucggcuaccugggccugcugagccagagaaccagagacaucuacaucagcagaagacgccggggcaccuucaccuggacccugagcgacagcgagggcaacgagacccccggcggcuacugccugaccagauggaugcugaucgaggccgagcugaagugcuucggcaacaccgccguggccaagugcaacgagaagcacgacgaggaguucugcgacaugcugagacuguucgacuucaacaagcaggccaucagaagacugaagacccccgcccagaugagcauccagcugaucaacaaggccgugaacgcccugaucaacgaccagcugaucaugaagaaccaccugagagacaucaugugcauccccuacugcaacuacagcagauacugguaccugaaccacaccagcaccggcaagaccagccugcccagaugcuggcugaucagcaacggcagcuaccugaacgagaccaaguucagcgacgacaucgagcagcaggccgacaacaugaucaccgagaugcugcagaaggaguacaucgacagacagggcaagaccccccugggccugguggaccuguucguguucagcaccagcuucuaccugaucagcaucuuccugcaccuggugaagauccccacccacagacacaucgugggcaagcccugccccaagccccacagacugaaccacaugggcaucugcagcugcggccuguacaagcagcccggcgugcccgugagauggaagagaugaggacuagucccuguucccagagcccacuuuuuuuucuuuuuuugaaauaaaauagccugucuuucagaucucaaaggcucuuuucagagccaccaaaaaaaaaaaaaaaaaaaaaaaaaaaaaaaaaaaaaaaaaaaaaaaaaaaaaaaaaaaaaaaaaaaaaaaaaaaaaaaaaaaaaaaaaaaaaaaaaaaaa

SEQ ID NO: 15404 - RNA, 1748 nt, Artificial Sequence
  mRNA product Design a-1 (hSL-A100) comprising derived and/or modified sequence from LASV(AV;Clade V)__CCA30314__GPCmut1 (opt4)
aggagagucccgcagucggcguccagcggcucugcuuguucgugugugugucguugcaggccuuauucaagcuuaccaugggccagaucgugaccuucuuccaggaggugccccacgugaucgaggaggugaugaacaucgugcugaucgcccugagcauccuggccgugcugaagggccuguacaacaucgccaccugcggccugaucggccugaucaccuuccugcugcugugcggcagaagcugcagcagcaaccuguacaagggcguguacgagcugcagagccuggaccugaacauggagacccugaacaugaccaugccccugagcugcaccaagaacaacagccaccacuacaucagagugggcaacgacaccggccuggagcugacccugaccaacaccagcauccugaaccacaaguucugcaaccugagcgacgcccacaagaaggaccuguacgaccacgcccugaugagcaucaucagcaccuuccaccugagcauccccaacuucaaccaguacgaggccaugagcugcgacuucaacggcggcaagaucagcgugcaguacaaccugagccacagcuacgccaucgacgccgccaaccacugcggcaccguggccaacggcauccugcagaccuucaugagaauggccuggggcggcagcuacaucgcccuggacagcggcugcggcaacugggacugcaucaugaccagcuaccaguaccugaucauccagaacaccaccugggagaaccacugccaguucagcagacccagccccaucggcuaccugggccugcugagccagagaaccagagacaucuacaucagcagaagacgccggggcaccuucaccuggacccugagcgacagcgagggcaacgccacccccggcggcuacugccugaccagauggaugcugaucgaggccgagcugaagugcuucggcaacaccgccguggccaagugcaacgagaagcacgacgaggaguucugcgacaugcugagacuguucgacuucaacaagcaggccaucagcagacugaagagccccgcccagaugagcauccagcugaucaacaaggccgugaacgcccugaucaacgaccagcugaucaugaagaaccaccugagagacaucaugugcauccccuacugcaacuacagcaaguacugguaccugaaccacaccaucaccggcaagaccagccugcccaagugcuggcuggugagcaacggcagcuaccugaacgagacccacuucagcgacgacaucgagcagcaggccgacaacaugaucaccgagaugcugcagaaggaguacauggagagacagggcaagaccccccugggccugguggaccuguucguguucagcaccagcuucuaccugaucagcaucuuccugagacuggugaagauccccacccacagacacaucgugggcaagcccugccccaagccccacagacugaaccacaugggcaucugcagcugcggccuguacaagcagcccggcgugcccgugagauggaagagaugaggacuagucccuguucccagagcccacuuuuuuuucuuuuuuugaaauaaaauagccugucuuucagaucucaaaggcucuuuucagagccaccaaaaaaaaaaaaaaaaaaaaaaaaaaaaaaaaaaaaaaaaaaaaaaaaaaaaaaaaaaaaaaaaaaaaaaaaaaaaaaaaaaaaaaaaaaaaaaaaaaaaa

SEQ ID NO: 15405 - RNA, 1745 nt, Artificial Sequence
  mRNA product Design a-1 (hSL-A100) comprising derived and/or modified sequence from LASV(Togo/2016/7082;Clade VI)__AMR44577__GPCmut1 (opt4)
aggagagucccgcagucggcguccagcggcucugcuuguucgugugugugucguugcaggccuuauucaagcuuaccaugggccagaucaucaccuucuuccaggaggugccccacgugaucgaggaggugaugaacaucgugcugaucgcccugagccugcuggccauccugaagggcguguacaacguggccaccugcggcaucaucggccuggugaccuuccuguuccugugcggcagaagcugcagccugaucuacaagggcagcuacgagcugcagacccuggagcugaacauggagacccugaacaugaccaugccccugagcugcaccaagaacagcagccaccacuacaucagagugggcaacgagaccggccuggagcugacccugaccaacaccagcaucaucaaccacaaguucugcaaccugagcgacgcccacaagagaaaccuguacgaccacgcccugaugagcauccugagcaccuuccaccugagcauccccaacuucaaccaguacgaggccaugagcugcgacuucaacggcggcaagaucagcgugcaguacaaccugagccacgccuacgccguggacgccgccgagcacugcggcaccguggccaacggcgugcugcagaccuucaugagaauggccuggggcggcagcuacaucgcccuggacagcggcugcggcaacugggacugcaucaugaccagcuaccaguaccugaucauccagaacaccaccugggaggaccacugccaguucagcagacccagccccaucggcuaccugggccugcugagccagagaaccagagacaucuacaucagcagaagacgccggggcaccuucaccuggacccugagcgacagcgagggcaacgagacccccggcggcuacugccugaccagauggaugcugaucgaggccgagcugaagugcuucggcaacaccgccguggccaagugcaacgagaagcacgacgaggaguucugcgacaugcugagacuguucgacuucaacaagcaggccauccagagacugaagagccccgcccagaugagcauccagcugaucaacaaggccgugaacgcccugaucaacgaccagcugaucaugaagaaccaccugagagacaugaugugcauccccuacugcaacuacagcaaguacugguaccugaaccacaccagcagcggcagaaccagccugcccaagugcuggcuggugagcaacggcagcuaccugaacgagacccacuucagcgacgacaucgagcagcaggccgacaacaugaucaccgagaugcugcagaaggaguacaucgacagacagggcaagaccccccugggccugguggaccuguucguguucagcaccagcuucuaccugaucagcaucuuccugcaccugaucaagauccccacccacagacacaucgugggcaagcccugccccaagccccacagacugaaccacaugggcaucugcagcugcggccuguacaagcagcccggcgugcccaccagauggaagagaugaggacuagucccuguucccagagcccacuuuuuuuucuuuuuuugaaauaaaauagccugucuuucagaucucaaaggcucuuuucagagccaccaaaaaaaaaaaaaaaaaaaaaaaaaaaaaaaaaaaaaaaaaaaaaaaaaaaaaaaaaaaaaaaaaaaaaaaaaaaaaaaaaaaaaaaaaaaaaaaaaaaaa

SEQ ID NO: 15406 - RNA, 1745 nt, Artificial Sequence
  mRNA product Design a-1 (hSL-A100) comprising derived and/or modified sequence from LASV(KAK-428;Clade n.d. (VII))__ANH09740__GPCmut1 (opt4)
aggagagucccgcagucggcguccagcggcucugcuuguucgugugugugucguugcaggccuuauucaagcuuaccaugggccagaucgugaccuucuuccaggaggugccccacgugaucgaggaggugaugaacaucgugcugaucgcccugagccugcuggccauccugaagggccuguacaacuucgccaccugcggcgugaucggccugaucaccuuccugcugcugugcggcagaagcugcagcgccaccuacaagggccaguacgagcugcagacccuggagcugaacauggagagccugaacaugaccaugccccugagcugcaccaagaacaacagccaccacuacaucagagccggcaacaacaccggccuggagcugacccugaccaacaccagcaucaucagccacaaguucugcaaccugagcgacgcccacaagaagaaccuguacgaccacacccugaugagcaucaucaccaccuuccaccugagcauccccaacuucaaccaguacgaggccaugagcugcgacuucaacggcggcaagaucagcauccaguacaaccugagccacagcuacgccggcgacgccgcccagcacugcggcaccguggccaacggcgugcugcagaccuucaugagaauggccuggggcggcagcuaccuggcccuggacagcggcugcagaggcugggacugcaucaucagcagcuaccaguaccugaucauccagaacaccaccugggacgaccacugccaguucagcagacccagccccaucggcuaccugggcuucgugagccagaagaccagagacaucuacaucagcagaagacgccggggcaccuucaccuggacccugagcgacagcgagggccacgacaugcccggcggcuacugccugaccagauggaugcugaucgaggccgaccugaagugcuucggcaacaccgccguggccaagugcaacgagaagcacgacgaggaguucugcgacauguggagacuguucgacuucaacaagcaggccauccagagacugaaggcccccgcccagaugaacauccagcugaucaacaaggccgugaacgcccugaucaacgaccagcugaugaugaagaaccaccugagagacaucaugugcauccccuacugcaacuacagcaaguucugguaccugaacaacaccaccaccggcagaaccagccugcccagaugcuggcugaucagcaacggcagcuaccugaacgagacccacuucagcgacgacaucgagcagcaggccgacaacaugaucaccgagaugcugcagaaggaguacauggacagacagggcaagaccccccugggccugguggaccuguucguguucagcaccagcuucuaccugaucaccaucuuccugcaccuggugaagauccccacccacagacacaucgugggcaagcccugccccaagccccacagacugaaccacaugggcaucugcagcugcggccuguacaagcagcccggcgugcccgugagauggaagagaugaggacuagucccuguucccagagcccacuuuuuuuucuuuuuuugaaauaaaauagccugucuuucagaucucaaaggcucuuuucagagccaccaaaaaaaaaaaaaaaaaaaaaaaaaaaaaaaaaaaaaaaaaaaaaaaaaaaaaaaaaaaaaaaaaaaaaaaaaaaaaaaaaaaaaaaaaaaaaaaaaaaaa

SEQ ID NO: 15407 - RNA, 1745 nt, Artificial Sequence; identical to SEQ ID NO: 15401
  mRNA product Design a-1 (hSL-A100) comprising derived and/or modified sequence from LASV(Pinneo-NIG-1969;Clade I)__AIT17836__GPCmut1 (opt4)

SEQ ID NO: 15408 - RNA, 1745 nt, Artificial Sequence
  mRNA product Design a-1 (hSL-A100) comprising derived and/or modified sequence from LASV(ISTH0009-NIG-2011;Clade II)__AIT17404__GPCmut1 (opt4)
aggagagucccgcagucggcguccagcggcucugcuuguucgugugugugucguugcaggccuuauucaagcuuaccaugggccagaucaucaccuucuuccaggaggugccccacgugaucgaggaggugaugaacaucgugcugaucgcccugagccugcuggccauccugaagggcaucuacaacguggccaccugcggccuguucggccuggugagcuuccugcugcugugcggcagaagcugcagcaccaccuacaagggcguguacgagcugcagacccuggagcuggacauggccagccugaacaugaccaugccccugagcugcaccaagaacaacagccaccacuacaucauggugggcaacgagaccggccuggagcugacccugaccaacaccagcaucaucaaccacaaguucugcaaccugagcgacgcccacaagaagaaccuguacgaccacgcccugaugagcaucaucagcaccuuccaccugagcauccccaacuucaaccaguacgaggccaugagcugcgacuucaacggcggcaagaucagcgugcaguacaaccugagccacgccuacgccguggacgccgccaaccacugcggcaccaucgccaacggcgugcugcagaccuucaugagaauggccuggggcggcagcuacaucgcccuggacagcggcugcggcagcugggacugcaucaugaccagcuaccaguaccugaucauccagaacaccaccugggaggaccacugccaguucagcagacccagccccaucggcuaccugggccugcugagccagagaaccagagacaucuacaucagcagaagacgccggggcaccuucaccuggacccugagcgacagcgagggcaacgagacccccggcggcuacugccugaccagauggaugcugaucgaggccgagcugaagugcuucggcaacaccgccguggccaagugcaacgagaagcacgacgaggaguucugcgacaugcugagacuguucgacuucaacaagcaggccaucagaagacugaagacccccgcccagaugagcauccagcugaucaacaaggccgugaacgcccugaucaacgaccagcugaucaugaagaaccaccugagagacaucaugugcauccccuacugcaacuacagcaaguacugguaccugaaccacaccgugaccggcaagaccagccugcccagaugcuggcuggugagcaacggcagcuaccugaacgagacccacuucagcgacgacaucgagcagcaggccgacaacaugaucaccgagcugcugcagaaggaguacauggacagacagggcaagaccccccugggccugguggaccuguucguguucagcaccagcuucuaccugaucagcaucuuccugcaccugaucaagauccccacccacagacacaucaccggcaagcccugccccaagccccacagacugaaccacaugggcaucugcagcugcggccuguacaagcaccccggcgugcccgugaaguggaagagaugaggacuagucccuguucccagagcccacuuuuuuuucuuuuuuugaaauaaaauagccugucuuucagaucucaaaggcucuuuucagagccaccaaaaaaaaaaaaaaaaaaaaaaaaaaaaaaaaaaaaaaaaaaaaaaaaaaaaaaaaaaaaaaaaaaaaaaaaaaaaaaaaaaaaaaaaaaaaaaaaaaaaa

SEQ ID NO: 15409 - RNA, 1745 nt, Artificial Sequence
  mRNA product Design a-1 (hSL-A100) comprising derived and/or modified sequence from LASV(ISTH2010-NIG-2012;Clade II)__AIT17482__GPCmut1 (opt4)
aggagagucccgcagucggcguccagcggcucugcuuguucgugugugugucguugcaggccuuauucaagcuuaccaugggccagaucaucaccuucuuccaggaggugccccacgugaucgaggaggugaugaacaucgugcugaucgcccugagccugcuggccauccugaagggcaucuacaacguggccaccugcggccuguucggccuggugagcuuccugcugcugugcggcagaagcugcagcaccaccuacaagggcguguacgagcugcagacccuggagcuggacauggccagccugaacaugaccaugccccugagcugcaccaagaacaacagccaccacuacaucauggugggcaacgagaccggccuggagcugacccugaccaacaccagcaucaucaaccacaaguucugcaaccugagcgacgcccacaagaagaaccuguacgaccacgcccugaugagcaucaucagcaccuuccaccugagcauccccaacuucaaccaguacgaggccaugagcugcgacuucaacggcggcaagaucagcgugcaguacaaccugagccacgccuacgccguggacgccgccaaccacugcggcaccaucgccaacggcgugcugcagaccuucaugagaauggccuggggcggcagcuacaucgcccuggacagcggcugcggcagcugggacugcaucaugaccagcuaccaguaccugaucauccagaacaucaccugggaggaccacugccaguucagcagacccagccccaucggcuaccugggccugcugagccagagaaccagagacaucuacaucagcagaagacgccggggcaccuucaccuggacccugagcgacagcgagggcaacgagacccccggcggcuacugccugaccagauggaugcugaucgaggccgagcugaagugcuucggcaacaccgccguggccaagugcaacgagaagcacgacgaggaguucugcgacaugcugagacuguucgacuucaacaagcaggccaucagaagacugaagacccccgcccagaugagcauccagcugaucaacaaggccgugaacgcccugaucaacgaccagcugaucaugaagaaccaccugagagacaucaugugcauccccuacugcaacuacagcaaguacugguaccugaaccacaccgugaccggcaagaccagccugcccagaugcuggcuggugagcaacggcagcuaccugaacgagacccacuucagcgacgacaucgagcagcaggccgacaacaugaucaccgagcugcugcagaaggaguacaucgacagacagggcaagaccccccugggccugguggaccuguucguguucagcaccagcuucuaccugaucagcaucuuccugcaccuggugaagauccccacccacagacacguggugggcaagcccugccccaagccccacagacugaaccacaugggcaucugcagcugcggccuguacaagcaccccggcgugcccgugaaguggaagagaugaggacuagucccuguucccagagcccacuuuuuuuucuuuuuuugaaauaaaauagccugucuuucagaucucaaaggcucuuuucagagccaccaaaaaaaaaaaaaaaaaaaaaaaaaaaaaaaaaaaaaaaaaaaaaaaaaaaaaaaaaaaaaaaaaaaaaaaaaaaaaaaaaaaaaaaaaaaaaaaaaaaaa

SEQ ID NO: 15410 - RNA, 1745 nt, Artificial Sequence
  mRNA product Design a-1 (hSL-A100) comprising derived and/or modified sequence from LASV(Lassa virus/H.sapiens-wt/NGA/2015/ISTH_0543;Clade II)__AVO03639__GPCmut1 (opt4)
aggagagucccgcagucggcguccagcggcucugcuuguucgugugugugucguugcaggccuuauucaagcuuaccaugggccagaucaucaccuucuuccaggaggugccccacgugaucgaggaggugaugaacaucgugcugaucgcccugagccugcuggccauccugaagggcaucuacaacguggccaccugcggccuguucggccuggugagcuuccugcugcugugcggcagaagcugcagcaccaccuacaagggcguguacgagcugcagacccuggagcuggacauggccaaccugaacaugaccaugccccugagcugcaccaagaacaacagccaccacuacaucauggugggcaacgagaccggccuggagcugacccugaccaacaccagcaucaucaaccacaaguucugcaaccugagcgacgcccacaagaagaaccuguacgaccacgcccugaugagcaucaucagcaccuuccaccugagcauccccaacuucaaccaguacgaggccaugagcugcgacuucaacggcggcaagaucagcgugcaguacaaccugagccacaccuacgccguggacgccgccaaccacugcggcaccaucgccaacggcgugcugcagaccuucaugagaauggccuggggcggcagcuacaucgcccuggacagcggcugcggcagcugggacugcaucaugaccagcuaccaguaccuggugauccagaacaccaccugggaggaccacugccaguucagcagacccagccccaucggcuaccugggccugcugagccagagaaccagagacaucuacaucagcagaagacgccggggcaccuucaccuggacccugagcgacagcgagggcaacgagacccccggcggcuacugccugaccagauggaugcugaucgaggccgagcugaagugcuucggcaacaccgccguggccaagugcaacgagaagcacgacgaggaguucugcgacaugcugagacuguucgacuucaacaagcaggccaucagaagacugaagacccccgcccagaugagcauccagcugaucaacaaggccgugaacgcccugaucaacgaccagcugaucaugaagaaccaccugagagacaucaugugcauccccuacugcaacuacagcaaguacugguaccugaaccacaccgugaccggcaagaccagccugcccagaugcuggcuggugagcaacggcagcuaccugaacgagacccacuucagcgacgacaucgagcagcaggccgacaacaugaucaccgagcugcugcagaaggaguacaucgacagacagggcaagaccccccugggccugguggaccuguucguguucagcaccagcuucuaccugaucagcaucuuccugcaccuggugaagauccccacccacagacacaucaccggcaagcccugccccaagccccacagacugaaccacaugggcaucugcagcugcggccuguacaagcaccccggcgugcccgugaaguggaagagaugaggacuagucccuguucccagagcccacuuuuuuuucuuuuuuugaaauaaaauagccugucuuucagaucucaaaggcucuuuucagagccaccaaaaaaaaaaaaaaaaaaaaaaaaaaaaaaaaaaaaaaaaaaaaaaaaaaaaaaaaaaaaaaaaaaaaaaaaaaaaaaaaaaaaaaaaaaaaaaaaaaaaa

SEQ ID NO: 15411 - RNA, 1745 nt, Artificial Sequence
  mRNA product Design a-1 (hSL-A100) comprising derived and/or modified sequence from LASV(Lassa virus/H.sapiens-wt/NGA/2016/ISTH_0009;Clade II)__AVO03571__GPCmut1 (opt4)
aggagagucccgcagucggcguccagcggcucugcuuguucgugugugugucguugcaggccuuauucaagcuuaccaugggccagaucaucaccuucuuccaggaggugccccacgugaucgaggaggugaugaacaucgugcugaucgcccugagccugcuggccauccugaagggcaucuacaacguggccaccugcggccugcugggccuggugagcuuccugcugcugugcggcagaagcugcagcaccaccuacaagggcguguacgagcugcagacccuggagcuggacauggccagccugaacaugaccaugccccugagcugcaccaagaacaacagccaccacuacaucauggugggcaacgagaccggccuggagcugacccugaccaacaccagcaucaucaaccacaaguucugcaaccugagcgacgcccacaagaagaaccuguacgaccacgcccugaugagcaucaucagcaccuuccaccugagcauccccaacuucaaccaguacgaggccaugagcugcgacuucaacggcggcagaaucagcgugcaguacaaccugagccacagcuacgccguggacgccgccaaccacugcggcaccaucgccaacggcgugcugcagaccuucaugagaauggccuggggcggcagcuacaucgcccuggacagcggcugcggcagcugggacugcaucaugaccagcuaccaguaccugaucauccagaacaccaccugggaggaccacugccaguucagcagacccagccccaucggcuaccugggccugcugagccagagaaccagagacaucuacaucagcagaagacgccggggcaccuucaccuggacccugagcgacagcgagggcaacgagacccccggcggcuacugccugaccagauggaugcugaucgaggccgagcugaagugcuucggcaacaccgccguggccaagugcaacgagaagcacgacgaggaguucugcgacaugcugagacuguucgacuucaacaagcaggccaucagaagacugaagacccccgcccagaugagcauccagcugaucaacaaggccgugaacgcccugaucaacgaccagcugaucaugaagaaccaccugagagacaucaugugcauccccuacugcaacuacagcaaguacugguaccugaaccacaccgugaccggcaagaccagccugcccagaugcuggcuggugagcaacggcagcuaccugaacgagacccacuucagcgacgacaucgagcagcaggccgacaacaugaucaccgagcugcugcagaaggaguacaucgacagacagggcaagaccccccugggccugguggaccuguucguguucagcaccagcuucuaccugaucagcaucuuccugcaccuggugaagauccccacccacagacacaucaccggcaagcccugccccaagccccacagacugaaccacaugggcaucugcagcugcggccuguacaaccaccccggcgugcccgugaaguggaagagaugaggacuagucccuguucccagagcccacuuuuuuuucuuuuuuugaaauaaaauagccugucuuucagaucucaaaggcucuuuucagagccaccaaaaaaaaaaaaaaaaaaaaaaaaaaaaaaaaaaaaaaaaaaaaaaaaaaaaaaaaaaaaaaaaaaaaaaaaaaaaaaaaaaaaaaaaaaaaaaaaaaaaa

SEQ ID NO: 15412 - RNA, 1745 nt, Artificial Sequence
  mRNA product Design a-1 (hSL-A100) comprising derived and/or modified sequence from LASV(Lassa virus/H.sapiens-wt/NGA/2016/ISTH_0017;Clade II)__AVO03567__GPCmut1 (opt4)
aggagagucccgcagucggcguccagcggcucugcuuguucgugugugugucguugcaggccuuauucaagcuuaccaugggccagaucaucaccuucuuccaggaggugccccacgugaucgaggaggugaugaacaucgugcugaucgcccugagccugcuggccauccugaagggcaucuacaacguggccaccugcggccuguucggccuggugagcuuccugcugcugugcggcagaagcugcagcaccaccuacaagggcguguacgagcugcagacccuggagcuggacauggccagccugaacaugaccaugccccugagcugcaccaagaacaacagccaccacuacaucauggugggcaacgagaccggccuggagcugacccugaccaacaccagcaucaucaaccacaaguucugcaaccugagcgacgcccacaagaagaaccuguacgaccacgcccugaugagcaucaucagcaccuuccaccugagcauccccaacuucaaccaguacgaggccaugagcugcgacuucaacggcggcaagaucagcgugcaguacaaccugagccacaccuacgccaucgacgccgccaaccacugcggcaccaucgccaacggcgugcugcagaccuucaugagaauggccuggggcggcagcuacaucgcccuggacagcggcugcggcagcugggacugcaucaugaccagcuaccaguaccugaucauccagaacaccaccugggaggaccacugccaguucagcagacccagccccaucggcuaccugggccugcugagccagagaaccagagacaucuacaucagcagaagacgccggggcaccuucaccuggacccugagcgacagcgagggcaacgagacccccggcggcuacugccugaccagauggaugcugaucgaggccgagcugaagugcuucggcaacaccgccguggccaagugcaacgagaagcacgacgaggaguucugcgacaugcugagacuguucgacuucaacaagcaggccaucagaagacugaagacccccgcccagaugagcauccagcugaucaacaaggccgugaacgcccugaucaacgaccagcugaucaugaagaaccaccugagagacaucaugugcauccccuacugcaacuacagcaaguacugguaccugaaccacaccgugaccggcaagaccagccugcccagaugcuggcuggugagcaacggcagcuaccugaacgagacccacuucagcgacgacaucgagcagcaggccgacaacaugaucaccgagcugcugcagaaggaguacauggacagacagggcaagaccccccugggccugguggaccuguucguguucagcaccagcuucuaccugaucagcaucuuccugcaccuggugagaauccccacccacagacacgugaucggcaagcccugccccaagccccacagacugaaccacaugggcaucugcagcugcggccuguacaagcaccccggcgugcccgugaaguggaagagaugaggacuagucccuguucccagagcccacuuuuuuuucuuuuuuugaaauaaaauagccugucuuucagaucucaaaggcucuuuucagagccaccaaaaaaaaaaaaaaaaaaaaaaaaaaaaaaaaaaaaaaaaaaaaaaaaaaaaaaaaaaaaaaaaaaaaaaaaaaaaaaaaaaaaaaaaaaaaaaaaaaaaa

SEQ ID NO: 15413 - RNA, 1745 nt, Artificial Sequence
  mRNA product Design a-1 (hSL-A100) comprising derived and/or modified sequence from LASV(Lassa virus/H.sapiens-wt/NGA/2018/ISTH_0959;Clade II)__AVV65099__GPCmut1 (opt4)
aggagagucccgcagucggcguccagcggcucugcuuguucgugugugugucguugcaggccuuauucaagcuuaccaugggccagaucaucaccuucuuccaggaggugccccacgugaucgaggaggugaugaacaucgugcugaucgcccugagccugcuggccauccugaagggcaucuacaacguggugaccugcggccuguucggccuggugagcuuccugcugcugugcggcagaagcugcagcaccaccuacaagggcguguacgagcugcagacccuggagcuggacauggccagccugaacaugaccaugccccugagcugcaccaagaacaacagccaccacuacaucauggugggcaacgagaccggccuggagcugacccugaccaacaccagcaucaucaaccacaaguucugcaaccugagcgacgcccacaagaagaaccuguacgaccacgcccugaugagcaucaucagcaccuuccaccugagcauccccaacuucaaccaguacgaggccaugagcugcgacuucaacggcggcaagaucagcgugcaguacaaccugagccacgccuacgccaucgacgccgccaaccacugcggcaccaucgccaacggcgugcugcagaccuucaugagaauggccuggggcggcagcuacaucgcccuggacagcggcugcggcagcugggacugcaucaugaccagcuaccaguaccugaucauccagaacaccaccugggaggaccacugccaguucagcagacccagccccaucggcuaccugggccugcugagccagagaaccagagacaucuacaucagcagaagacgccggggcaccuucaccuggacccugagcgacagcgagggcaacgagacccccggcggcuacugccugaccagauggaugcugaucgaggccgagcugaagugcuucggcaacaccgccguggccaagugcaacgagaagcacgacgaggaguucugcgacaugcugagacuguucgacuucaacaagcaggccaucagaagacugaagacccccgcccagaugagcauccagcugaucaacaaggccgugaacgcccugaucaacgaccagcugaucaugaagaaccaccugagagacaucaugugcauccccuacugcaacuacagcaaguacugguaccugaaccacaccgugaccggcaagaccagccugcccagaugcuggcuggugagcaacggcagcuaccugaacgagacccacuucagcgacgacaucgagcagcaggccgacaacaugaucaccgagcugcugcagaaggaguacaucgacagacagggcaagaccccccugggccugguggaccuguucguguucagcaccagcuucuaccugaucagcaucuuccugcaccuggugaagauccccacccacagacacgugaucggcaagcccugccccaagccccacagacugaaccacaugggcaucugcagcugcggccuguacaagcaccccggcgugcccgugaaguggaagagaugaggacuagucccuguucccagagcccacuuuuuuuucuuuuuuugaaauaaaauagccugucuuucagaucucaaaggcucuuuucagagccaccaaaaaaaaaaaaaaaaaaaaaaaaaaaaaaaaaaaaaaaaaaaaaaaaaaaaaaaaaaaaaaaaaaaaaaaaaaaaaaaaaaaaaaaaaaaaaaaaaaaaa

SEQ ID NO: 15414 - RNA, 1745 nt, Artificial Sequence
  mRNA product Design a-1 (hSL-A100) comprising derived and/or modified sequence from LASV(LASV003-NIG-2008;Clade II)__AIT17580__GPCmut1 (opt4)
aggagagucccgcagucggcguccagcggcucugcuuguucgugugugugucguugcaggccuuauucaagcuuaccaugggccagaucaucaccuucuuccaggaggugccccacgugaucgaggaggugaugaacaucgugcugaucgcccugagccugcuggccauccugaagggcaucuacaacguggccaccugcggccuguucggccuggugagcuuccugcugcugugcggcagaagcugcagcaccaccuacaagggcguguacgagcugcagacccuggagcuggacauggccagccugaacaugaccaugccccugagcugcaccaagaacaacagccaccacuacaucauggugggcaacgagaccggccuggagcugacccugaccaacaccagcaucaucaaccacaaguucugcaaccugagcgacgcccacaagaagaaccuguacgaccacgcccugaugagcaucaucagcaccuuccaccugagcauccccaacuucaaccaguacgaggccaugagcugcgacuucaacggcggcaagaucagcgugcaguacaaccugagccacaccuacgccguggacgccgccaaccacugcggcaccaucgccaacggcgugcugcagaccuucaugagaauggccuggggcggcagcuacaucgcccuggacagcggcugcggcagcugggacugcaucaugaccagcuaccaguaccugaucauccagaacaccaccugggaggaccacugccaguucagcagacccagccccaucggcuaccugggccugcugagccagagaaccagagacaucuacaucagcagaagacgccggggcaccuucaccuggacccugagcgacagcgagagcaacgagacccccggcggcuacugccugaccagauggaugcugaucgaggccgagcugaagugcuucggcaacaccgccguggccaagugcaacgagaagcacgacgaggaguucugcgacaugcugagacuguucgacuucaacaagcaggccaucagaagacugaaggcccccgcccagaugagcauccagcugaucaacaaggccgugaacgcccugaucaacgaccagcugaucaugaagaaccaccugagagacaucaugugcauccccuacugcaacuacagcaaguacugguaccugaaccacaccgugaccggcagaaccagccugcccagaugcuggcuggugagcaacggcagcuaccugaacgagacccacuucagcgacgacaucgagcagcaggccgacaacaugaucaccgagcugcugcagaaggaguacauggacagacagggcaagaccccccugggccugguggaccuguucguguucagcaccagcuucuaccugaucagcaucuuccugcaccuggugaagauccccacccacagacacgugaucggcaagcccugccccaagccccacagacugaaccacaugggcaucugcagcugcggccuguacaagcaccccggcgugcccgugaaguggaagagaugaggacuagucccuguucccagagcccacuuuuuuuucuuuuuuugaaauaaaauagccugucuuucagaucucaaaggcucuuuucagagccaccaaaaaaaaaaaaaaaaaaaaaaaaaaaaaaaaaaaaaaaaaaaaaaaaaaaaaaaaaaaaaaaaaaaaaaaaaaaaaaaaaaaaaaaaaaaaaaaaaaaaa

SEQ ID NO: 15415 - RNA, 1745 nt, Artificial Sequence
  mRNA product Design a-1 (hSL-A100) comprising derived and/or modified sequence from LASV(LASV035-NIG-2009;Clade II)__AIT17588__GPCmut1 (opt4)
aggagagucccgcagucggcguccagcggcucugcuuguucgugugugugucguugcaggccuuauucaagcuuaccaugggccagaucaucaccuucuuccaggaggugccccacgugaucgaggaggugaugaacaucgugcugaucgcccugagccugcuggccauccugaagggcaucuacaacguggccaccugcggccuguucggccuggugagcuuccugcugcugugcggcagaagcugcagcaccaccuacaagggcguguacgagcugcagacccuggagcuggacauggccagccugaacaugaccaugccccugagcugcaccaagaacaacagccaccacuacaucauggugggcaacgagaccggccuggagcugacccugaccaacaccagcaucaucaaccacaaguucugcaaccugagcgacgcccacaagaagaaccuguacgaccacgcccugaugagcaucaucagcaccuuccaccugagcauccccaacuucaaccaguacgaggccaugagcugcgacuucaacggcggcaagaucagcgugcaguacaaccugagccacgccuacgccguggacgccgccaaccacugcggcaccaucgccaacggcgugcugcagaccuucaugagaauggccuggggcggcagcuacaucgcccuggacagcggcugcggcagcugggacugcaucaugaccagcuaccaguaccugaucauccagaacaccaccugggaggaccacugccaguucagcagacccagccccaucggcuaccugggccugcugagccagagaaccagagacaucuacaucagcagaagacgccggggcaccuucaccuggacccugagcgacagcgagggcaacgagacccccggcggcuacugccugaccagauggaugcugaucgaggccgagcugaagugcuucggcaacaccgccguggccaagugcaacgagaagcacgacgaggaguucugcgacaugcugagacuguucgacuucaacaagcaggccaucagaagacugaaggcccccgcccagaugagcauccagcugaucaacaaggccgugaacgcccugaucaacgaccagcugaucaugaagaaccaccugagagacaucaugugcauccccuacugcaacuacagcaaguacugguaccugaaccacaccgugaccggcaagaccagccugcccagaugcuggcuggugagcaacggcagcuaccugaacgagacccacuucagcgacgacaucgagcagcaggccgacaacaugaucaccgagcugcugcagaaggaguacaucgacagacagggcaagaccccccugggccugguggaccuguucguguucagcaccagcuucuaccugaucagcaucuuccugcaccuggugaagauccccacccacagacacgugaucggcaagcccugccccaagccccacagacugaaccacaugggcaucugcagcugcggccuguacaagcaccccggcgugcccgugaaguggaagagaugaggacuagucccuguucccagagcccacuuuuuuuucuuuuuuugaaauaaaauagccugucuuucagaucucaaaggcucuuuucagagccaccaaaaaaaaaaaaaaaaaaaaaaaaaaaaaaaaaaaaaaaaaaaaaaaaaaaaaaaaaaaaaaaaaaaaaaaaaaaaaaaaaaaaaaaaaaaaaaaaaaaaa

SEQ ID NO: 15416 - RNA, 1745 nt, Artificial Sequence
  mRNA product Design a-1 (hSL-A100) comprising derived and/or modified sequence from LASV(LASV1000-NIG-2009;Clade II)__AIT17782__GPCmut1 (opt4)
aggagagucccgcagucggcguccagcggcucugcuuguucgugugugugucguugcaggccuuauucaagcuuaccaugggccagaucaucaccuucuuccaggaggugccccacgugaucgaggaggugaugaacaucgugcugaucgcccugagccugcuggccauccugaagggcaucuacaacguggccaccugcggccuguucggccuggugagcuuccugcugcugugcggcagaagcugcagcaccaccuacaagggcguguacgagcugcagacccuggagcuggacauggccagccugaacaugaccaugccccugagcugcaccaagaacaacagccaccacuacaucauggugggcaacgagaccggccuggagcugacccugaccaacaccagcaucaucaaccacaaguucugcaaccugagcgacgcccacaagaagaaccuguacgaccacgcccugaugagcaucaucagcaccuuccaccugagcauccccaacuucaaccaguacgaggccaugagcugcgacuucaacggcggcaagaucagcgugcaguacaaccugagccacaccuacgccguggacgccgccaaccacugcggcaccaucgccaacggcgugcugcagaccuucaugagaauggccuggggcggcagcuacaucgcccuggacagcggcugcggcagcugggacugcaucaugaccagcuaccaguaccugaucauccagaacaccaccugggaggaccacugccaguucagcagacccagccccaucggcuaccugggccugcugagccagagaaccagagacaucuacaucagcagaagacgccggggcaccuucaccuggacccugagcgacagcgagggcaacgagacccccggcggcuacugccugaccagauggaugcugaucgaggccgagcugaagugcuucggcaacaccgccguggccaagugcaacgagaagcacgacgaggaguucugcgacaugcugagacuguucgacuucaacaagcaggccaucaagagacugaagacccccgcccagaugagcauccagcugaucaacaaggccgugaacgcccugaucaacgaccagcugaucaugaagaaccaccugagagacaucaugugcauccccuacugcaacuacagcaaguacugguaccugaaccacaccgugaccggcaagaccagccugcccagaugcuggcuggugagcaacggcagcuaccugaacgagacccacuucagcgacgacaucgagcagcaggccgacaacaugaucaccgagcugcugcagaaggaguacaucgacagacagggcaagaccccccugggccugguggaccuguucguguucagcaccagcuucuaccugaucagcaucuuccugcaccuggugaagauccccacccacagacacguggugggcaagcccugccccaagccccacagacugaaccacaugggcaucugcagcugcggccuguacaagcaccccggcgugcccgugaaguggaagagaugaggacuagucccuguucccagagcccacuuuuuuuucuuuuuuugaaauaaaauagccugucuuucagaucucaaaggcucuuuucagagccaccaaaaaaaaaaaaaaaaaaaaaaaaaaaaaaaaaaaaaaaaaaaaaaaaaaaaaaaaaaaaaaaaaaaaaaaaaaaaaaaaaaaaaaaaaaaaaaaaaaaaa

SEQ ID NO: 15417 - RNA, 1745 nt, Artificial Sequence
  mRNA product Design a-1 (hSL-A100) comprising derived and/or modified sequence from LASV(LASV221-NIG-2010;Clade II)__AIT17624__GPCmut1 (opt4)
aggagagucccgcagucggcguccagcggcucugcuuguucgugugugugucguugcaggccuuauucaagcuuaccaugggccagaucaucaccuucuuccaggaggugccccacgugaucgaggaggugaugaacaucgugcugaucgcccugagccugcuggccauccugaagggcaucuacaacguggccaccugcggccuguucggccuggugagcuuccugcugcugugcggcagaagcugcagcaccaccuacaagggcguguacgagcugcagacccuggagcuggacauggccagccugaacaugaccaugccccugagcugcaccaagaacaacagccaccacuacaucauggugggcaacgagaccggccuggagcugacccugaccaacaccagcaucaucaaccacaaguucugcaaccugagcgacgcccacaagaagaaccuguacgaccacgcccugaugagcaucaucagcaccuuccaccugagcauccccaacuucaaccaguacgaggccaugagcugcgacuucaacggcggcaagaucagcgugcaguacaaccugagccacaccuacgccaucgacgccgccaaccacugcggcaccaucgccaacggcgugcugcagaccuucaugagaauggccuggggcggcagcuacaucgcccuggacagcggcugcggcagcugggacugcaucaugaccagcuaccaguaccugaucauccagaacaccaccugggaggaccacugccaguucagcagacccagccccaucggcuaccugggccugcugagccagagaaccagagacaucuacaucagcagaagacgccggggcaccuucaccuggacccugagcgacagcgagggcaacgagacccccggcggcuacugccugaccagauggaugcugaucgaggccgagcugaagugcuucggcaacaccgccguggccaagugcaacgagaagcacgacgaggaguucugcgacaugcugagacuguucgacuucaacaagcaggccaucagaagacugaagacccccgcccagaugagcauccagcugaucaacaaggccgugaacgcccugaucaacgaccagcugaucaugaagaaccaccugagagacaucaugugcauccccuacugcaacuacagcaaguacugguaccugaaccacaccgugaccggcaagaccagccugcccagaugcuggcuggugagcaacggcagcuaccugaacgagacccacuucagcgacgacaucgagcagcaggccgacaacaugaucaccgagaugcugcagaaggaguacauggacagacagggcaagaccccccugggccugguggaccuguucguguucagcaccagcuucuaccugaucagcaucuuccugcaccuggugaagauccccacccacagacacgugaucggcaagcccugccccaagccccacagacugaaccacaugggcaucugcagcugcggccuguacaagcaccccggcgugcccgugaaguggaagagaugaggacuagucccuguucccagagcccacuuuuuuuucuuuuuuugaaauaaaauagccugucuuucagaucucaaaggcucuuuucagagccaccaaaaaaaaaaaaaaaaaaaaaaaaaaaaaaaaaaaaaaaaaaaaaaaaaaaaaaaaaaaaaaaaaaaaaaaaaaaaaaaaaaaaaaaaaaaaaaaaaaaaa

SEQ ID NO: 15418 - RNA, 1745 nt, Artificial Sequence
  mRNA product Design a-1 (hSL-A100) comprising derived and/or modified sequence from LASV(LASV237-NIG-2010;Clade II)__AIT17638__GPCmut1 (opt4)
aggagagucccgcagucggcguccagcggcucugcuuguucgugugugugucguugcaggccuuauucaagcuuaccaugggccagaucaucaccuucuuccaggaggugccccacgugaucgaggaggugaugaacaucgugcugaucgcccugagccugcuggccauccugaagggcaucuacaacguggccaccugcggccuguucggccuggugagcuuccugcugcugugcggcagaagcugcagcaccaccuacaagggcguguacgagcugcagacccuggagcuggacauggccagccugaacaugaccaugccccugagcugcaccaagaacaacagccaccacuacaucauggugggcaacgagaccggccuggagcugacccugaccaacaccagcaucaucaaccacaaguucugcaaccugagcgacgcccacaagaaggaccuguacgaccacgcccugaugagcaucaucagcaccuuccaccugagcauccccaacuucaaccaguacgaggccaugagcugcgacuucaacggcggcaagaucagcgugcaguacaaccugagccacaccuacgccguggacgccgccaaccacugcggcaccaucgccaacggcgugcugcagaccuucaugagaauggccuggggcggcagcuacaucgcccuggacagcggcugcggcagcugggacugcaucaugaccagcuaccaguaccugaucauccagaacaccaccugggaggaccacugccaguucagcagacccagccccaucggcuaccugggccugcugagccagagaaccagagacaucuacaucagcagaagacgccggggcaccuucaccuggacccugagcgacagcgagggcaacgagacccccggcggcuacugccugaccagauggaugcugaucgaggccgagcugaagugcuucggcaacaccgccguggccaagugcaacgagaagcacgacgaggaguucugcgacaugcugagacuguucgacuucaacaagcaggccaucagaagacugaagacccccgcccagaugagcauccagcugaucaacaaggccgugaacgcccugaucaacgaccagcugaucaugaagaaccaccugagagacaucaugugcauccccuacugcaacuacagcaaguacugguaccugaaccacaccgugaccggcaagaccagccugcccagaugcuggcuggugagcaacggcagcuaccugaacgagacccacuucagcgacgacaucgagcagcaggccgacaacaugaucaccgagcugcugcagaaggaguacauggacagacagggcaagaccccccugggccugguggaccuguucguguucagcaccagcuucuaccugaucagcaucuuccugcaccugaucaagauccccacccacagacacaucaccggcaagcccugccccaagccccacagacugaaccacaugggcaucugcagcugcggccuguacaagcaccccggcgugcccgugaaguggaagagaugaggacuagucccuguucccagagcccacuuuuuuuucuuuuuuugaaauaaaauagccugucuuucagaucucaaaggcucuuuucagagccaccaaaaaaaaaaaaaaaaaaaaaaaaaaaaaaaaaaaaaaaaaaaaaaaaaaaaaaaaaaaaaaaaaaaaaaaaaaaaaaaaaaaaaaaaaaaaaaaaaaaaa

SEQ ID NO: 15419 - RNA, 1745 nt, Artificial Sequence
  mRNA product Design a-1 (hSL-A100) comprising derived and/or modified sequence from LASV(LASV253-NIG-2011;Clade II)__AIT17670__GPCmut1 (opt4)
aggagagucccgcagucggcguccagcggcucugcuuguucgugugugugucguugcaggccuuauucaagcuuaccaugggccagaucaucaccuucuuccaggaggugccccacgugaucgaggaggugaugaacaucgugcugaucgcccugagccugcuggccauccugaagggcaucuacaacguggccaccugcggccuguucggccuggugagcuuccugcugcugugcggcagaagcugcagcaccaccuacaagggcguguacgagcugcagacccuggagcuggacauggccagccugaacaugaccaugccccugagcugcaccaagaacaacagccaccacuacaucauggugggcaacgagaccggccuggagcugacccugaccaacaccagcaucaucaaccacaaguucugcaaccugagcgacgcccacaagaagaaccuguacgaccacgcccugaugagcaucaucagcaccuuccaccugagcauccccaacuucaaccaguacgaggccaugagcugcgacuucaacggcggcaagaucagcgugcaguacaaccugagccacaccuacgccguggacgccgccaaccacugcggcaccaucgccaacggcgugcugcagaccuucaugagaauggccuggggcggcagcuacaucgcccuggacagcggcugcggcagcugggacugcaucaugaccagcuaccaguaccugaucauccagaacaccaccugggaggaccacugccaguucagcagacccagccccaucggcuaccugggccugcugagccagagaaccagagacaucuacaucagcagaagacgccggggcaccuucaccuggacccugagcgacagcgagggcaacgagacccccggcggcuacugccugaccagauggaugcugaucgaggccgagcugaagugcuucggcaacaccgccguggccaagugcaacgagaagcacgacgaggaguucugcgacaugcugagacuguucgacuucaacaagcaggccaucagaagacugaaggcccccgcccagaugagcauccagcugaucaacaaggccgugaacgcccugaucaacgaccagcugaucaugaagaaccaccugagagacaucaugugcauccccuacugcaacuacagcaaguacugguaccugaaccacaccgugaccggcagaaccagccugcccagaugcuggcuggugagcaacggcagcuaccugaacgagacccacuucagcgacgacaucgagcagcaggccgacaacaugaucaccgagcugcugcagaaggaguacaucgacagacagggcaagaccccccugggccugguggaccuguucguguucagcaccagcuucuaccugaucagcaucuuccugcaccuggugaagauccccacccacagacacaucaucggcaagcccugccccaagccccacagacugaaccacaugggcaucugcagcugcggccuguacaagcaccccggcgugcccgugaaguggaagagaugaggacuagucccuguucccagagcccacuuuuuuuucuuuuuuugaaauaaaauagccugucuuucagaucucaaaggcucuuuucagagccaccaaaaaaaaaaaaaaaaaaaaaaaaaaaaaaaaaaaaaaaaaaaaaaaaaaaaaaaaaaaaaaaaaaaaaaaaaaaaaaaaaaaaaaaaaaaaaaaaaaaaa

SEQ ID NO: 15420 - RNA, 1745 nt, Artificial Sequence
  mRNA product Design a-1 (hSL-A100) comprising derived and/or modified sequence from LASV(LASV254-NIG-2011;Clade II)__AIT17674__GPCmut1 (opt4)
aggagagucccgcagucggcguccagcggcucugcuuguucgugugugugucguugcaggccuuauucaagcuuaccaugggccagaucaucaccuucuuccaggaggugccccacgugaucgaggaggugaugaacaucgugcugaucgcccugagccugcuggccauccugaagggcaucuacaacguggccaccugcggccuguucggccuggugagcuuccugcugcugugcggcagaagcugcagcaccaccuacaagggcguguacgagcugcagacccuggagcuggacaugaccaaccugaacaugaccaugccccugagcugcaccaagaacaacagccaccacuacaucauggugggcaacgagaccggccuggagcugacccugaccaacaccagcaucaucaaccacaaguucugcaaccugagcgacgcccacaagaagaaccuguacaaccacgcccugaugagcaucaucagcaccuuccaccugagcauccccaacuucaaccaguacgaggccaugagcugcgacuucaacggcggcaagaucagcgugcaguacaaccugagccacagcuacgccguggacgccgccaaccacugcggcaccaucgccaacggcgugcugcagaccuucaugagaauggccuggggcggcagcuacaucgcccuggacagcggcugcggcaacugggacugcaucaugaccagcuaccaguaccugaucauccagaacaccaccugggaggaccacugccaguucagcagacccagccccaucggcuaccugggccugcugagccagagaaccagagacaucuacaucagcagaagacgccggggcaccuucaccuggacccugagcgacagcgagggcaacgagacccccggcggcuacugccugaccagauggaugcugaucgaggccgagcugaagugcuucggcaacaccgccguggccaagugcaacgagaagcacgacgaggaguucugcgacaugcugagacuguucgacuucaacaagcaggccaucagaagacugaagacccccgcccaggccaacauccagcugaucaacaaggccgugaacgcccugaucaacgaccagcugaucaugaagaaccaccugagagacaucaugugcauccccuacugcaacuacagcaaguacugguaccugaaccacaccgugaccggcaagaccagccugcccagaugcuggcuggugagcaacggcagcuaccugaacgagacccacuucagcgacgacaucgagcagcaggccgacaacaugaucaccgagcugcugcagaaggaguacauggacagacagggcaagaccccccugggccugguggaccuguucguguucagcaccagcuucuaccugaucagcaucuuccugcaccuggugaagauccccacccacagacacgugaucggcaagcccugccccaagccccacagacugaaccacaugggcaucugcagcugcggccuguacaagcaccccggcgugcccgugaaguggaagagaugaggacuagucccuguucccagagcccacuuuuuuuucuuuuuuugaaauaaaauagccugucuuucagaucucaaaggcucuuuucagagccaccaaaaaaaaaaaaaaaaaaaaaaaaaaaaaaaaaaaaaaaaaaaaaaaaaaaaaaaaaaaaaaaaaaaaaaaaaaaaaaaaaaaaaaaaaaaaaaaaaaaaa

SEQ ID NO: 15421 - RNA, 1745 nt, Artificial Sequence
  mRNA product Design a-1 (hSL-A100) comprising derived and/or modified sequence from LASV(Nig08-A19;Clade III)__ADU56618__GPCmut1 (opt4)
aggagagucccgcagucggcguccagcggcucugcuuguucgugugugugucguugcaggccuuauucaagcuuaccaugggccagaucgugaccuucuuccaggaggugccccacgugaucgaggaggugaugaacaucgugcugaucgcccugagcauccuggccauccugaagggccuguacaacaucgccaccugcggccugaucggccuggugaccuuccugcugcugagcggcagaagcugcagcaugaccuacaagggcguguacgagcugcagacccuggagcugaacaugaacacccugaacaugaccaugccccugagcugcaccaagaacaacagccaccacuacaucauggugggcaacgagaccggccuggagcugacccugaccaacaccagccugcugcaccacaaguucugcaaccugagcgacgcccacaagaagaaccuguacgaccacacccugaugagcaucaucagcaccuuccaccugagcauccccaacuucaaccaguacgaggccaugagcugcgacuucaacggcggcaagaucaccgugcaguacaaccugagccacagcuacgccaucgacgccgccaaccacugcggcaccguggccaacggcgugcugcagaccuucaugagaauggccuggggcggcagcuacaucgcccuggacagcggcugcggcaagugggacugcaucaugaccagcuaccaguaccugaucauccagaacaccaccugggaggaccacugccaguucagcagacccagccccaucggcuaccugggccugcugagccagagaaccagagacaucuacaucagcagaagacgccggggcaccuucaccuggacccugagcgacagcgagggcaacgagacccccggcggcuacugccugaccagauggaugcugaucgaggccgagcugaagugcuucggcaacaccgccguggccaagugcaacgagaagcacgacgaggaguucugcgacaugcugagacuguucgacuucaacaagcaggccaucagaagacugaaggcccccgcccagaugagcauccagcugaucaacaaggccgugaacgcccugaucaacgaccagcugaucaugaagaaccaccugagagacaucaugugcauccccuacugcaacuacagcaaguacugguaccugaaccacaccagcaccggcagaaccagccugcccagaugcuggcuggugagcaacggcagcuaccugaacgagacccacuucagcgacgacaucgagcagcaggccgacaacaugaucaccgagaugcugcagaaggaguaccuggacagacagggcaagaccccccugggccugguggaccuguucguguucagcaccagcuucuaccugaucagcaucuuccugcaccuggugaagauccccacccacagacacaucgugggcaagcccugccccaagccccacagacugaaccacaugggcaucugcagcugcggccuguacaagcagcccggcgugcccgugagauggaagagaugaggacuagucccuguucccagagcccacuuuuuuuucuuuuuuugaaauaaaauagccugucuuucagaucucaaaggcucuuuucagagccaccaaaaaaaaaaaaaaaaaaaaaaaaaaaaaaaaaaaaaaaaaaaaaaaaaaaaaaaaaaaaaaaaaaaaaaaaaaaaaaaaaaaaaaaaaaaaaaaaaaaaa

SEQ ID NO: 15422 - RNA, 1748 nt, Artificial Sequence
  mRNA product Design a-1 (hSL-A100) comprising derived and/or modified sequence from LASV(G1180-SLE-2010;Clade IV)__AIT17168__GPCmut1 (opt4)
aggagagucccgcagucggcguccagcggcucugcuuguucgugugugugucguugcaggccuuauucaagcuuaccaugggccagaucgugaccuucuuccaggaggugccccacgugaucgaggaggugaugaacaucgugcugaucgcccugagcauccuggccgugcugaagggccuguacaacuucgccaccugcggccuggugggccugcugaccuuccugcugcugugcggcagaagcugcaccgccagcagauacaagggcguguacgagcugcagacccuggagcugaacauggagacccugaacaugaccaugccccugagcugcaccaagaacaacagccaccacuacaucauggugggcaacgagaccggccuggagcugacccugaccaacaccagcaucaucaaccacaaguucugcaaccugagcgacgcccacaagaagaaccuguacgaccacgcccugaugagcaucaucagcaccuuccaccugagcauccccaacuucaaccaguacgaggccaugagcugcgacuucaacggcggcaagaucagcgugcaguacaaccugagccacagcuacgccggcgacgccgccaaccacugcggcaccguggccaacggcgugcugcagaccuucaugagaauggccuggggcggcagcuacaucgcccuggacagcggcugcggcagcugggacugcaucaugaccagcuaccaguaccugaucauccagaacaccaccugggaggaccacugccaguucagcagacccagccccaucggcuaccugggccugcugagccagagaaccagagacaucuacaucagcagaagacgccggggcaccuucaccuggacccugagcgacagcgagggcaaggacacccccggcggcuacugccugaccagauggaugcugaucgaggccgagcugaagugcuucggcaacaccgccguggccaagugcaacgagaagcacgacgaggaguucugcgacaugcugagacuguucgacuucaacaagcaggccauccagagacugaaggcccccgcccagaugagcauccagcugaucaacaaggccgugaacgcccugaucaacgaccagcugaucaugaagaaccaccugagagacaucaugugcauccccuacugcaacuacagcaaguacugguaccugaaccacaccaccaccggcaagaccagccugcccaagugcuggcuggugagcaacggcagcuaccugaacgagacccacuucagcgacgacaucgagcagcaggccgacaacaugaucaccgagaugcugcagaaggaguacauggagagacagggcaagaccccccugggccugguggaccuguucguguucagcaccagcuucuaccugaucagcaucuuccugcaccuggugaagauccccacccacagacacaucgugggcaagagcugccccaagccccacagacugaaccacaugggcaucugcagcugcggccuguacaagcagcccggcgugcccgugaaguggaagagaugaggacuagucccuguucccagagcccacuuuuuuuucuuuuuuugaaauaaaauagccugucuuucagaucucaaaggcucuuuucagagccaccaaaaaaaaaaaaaaaaaaaaaaaaaaaaaaaaaaaaaaaaaaaaaaaaaaaaaaaaaaaaaaaaaaaaaaaaaaaaaaaaaaaaaaaaaaaaaaaaaaaaa

SEQ ID NO: 15423 - RNA, 1748 nt, Artificial Sequence
  mRNA product Design a-1 (hSL-A100) comprising derived and/or modified sequence from LASV(G1442-SLE-2011;Clade IV)__AIT17180__GPCmut1 (opt4)
aggagagucccgcagucggcguccagcggcucugcuuguucgugugugugucguugcaggccuuauucaagcuuaccaugggccagaucgugaccuucuuccaggaggugccccacgugaucgaggaggugaugaacaucgugcugaucgcccugagcauccuggccgugcugaagggccuguacaacguggccaccugcggccugaucggccuggugaccuuccugcugcugugcggcagaagcugcaccaccacccuguacaagggcguguacgagcugcagacccuggagcugaacauggagacccugaacaugaccaugccccugagcugcaccaagaacaacagccaccacuacaucagagugggcaacgagaccggccuggagcugacccugaccaacaccagcaucaucaaccacaaguucugcaaccugagcgacgcccacaagaagaaccuguacgaccacgcccugaugagcaucaucagcaccuuccaccugagcauccccaacuucaaccaguacgaggccaugagcugcgacuucaacggcggcaagaucagcgugcaguacaaccugagccacagcuacgccggcgacgccgccaaccacugcggcaccguggccaacggcgugcugcagaccuucaugagaauggccuggggcggcagcuacaucgcccuggacagcggcugcggcaacugggacugcaucaugaccagcuaccaguaccugaucauccagaacaccaccugggacgaccacugccaguucagcagacccagccccaucggcuaccugggccugcugagccagagaaccagagacguguacaucagcagaagacgccggggcaccuucaccuggacccugagcgacagcgagggcaaggacacccccggcggcuacugccugaccagauggaugcugaucgaggccgagcugaagugcuucggcaacaccgccguggccaagugcaacgagaagcacgacgaggaguucugcgacaugcugagacuguucgacuucaacaagcaggccauccagagacugaaggcccccgcccagaugagcauccagcugaucaacaaggccgugaacgcccugaucaacgaccagcugaucaugaagaaccaccugagagacaucaugugcauccccuacugcaacuacagcaaguacugguaccugaacaacaccgccaccggcaagaccagccugcccaagugcuggcugaucagcaacggcagcuaccugaacgagacccacuucagcgacgacaucgagcaggaggccgacaacaugaucaccgagaugcugcagaaggaguacauggagagacagggcaagaccccccugggccugguggaccuguucguguucagcaccagcuucuaccugaucagcaucuuccugcaccuggugaagauccccacccacagacacaucgugggcaagagcugccccaagccccacagacugaaccacaugggcaucugcagcugcggccuguacaagcagcccggcgugcccgugagauggaagagaugaggacuagucccuguucccagagcccacuuuuuuuucuuuuuuugaaauaaaauagccugucuuucagaucucaaaggcucuuuucagagccaccaaaaaaaaaaaaaaaaaaaaaaaaaaaaaaaaaaaaaaaaaaaaaaaaaaaaaaaaaaaaaaaaaaaaaaaaaaaaaaaaaaaaaaaaaaaaaaaaaaaaa

SEQ ID NO: 15424 - RNA, 1748 nt, Artificial Sequence
  mRNA product Design a-1 (hSL-A100) comprising derived and/or modified sequence from LASV(G3010-SLE-2013;Clade IV)__AIT17344__GPCmut1 (opt4)
aggagagucccgcagucggcguccagcggcucugcuuguucgugugugugucguugcaggccuuauucaagcuuaccaugggccagaucgugaccuucuuccaggaggugccccacgugaucgaggaggugaugaacaucgugcugaucgcccugagcauccuggccgugcugaagggccuguacaacuucgccaccugcggccuggugggccuggugaccuuccugcugcugugcggcagaagcugcaccaccagccuguacaagggcguguacgagcugcagacccuggagcugaacauggagacccugaacaugaccaugccccugagcugcaccaagaacaacagccaccacuacaucauggugggcaacgagaccggccuggagcugacccugaccaacaccagcaucaucaaccacaaguucugcaaccugagcgacgcccacaagaagaaccuguacaaccacgcccugaugagcaucaucagcaccuuccaccugagcauccccaacuucaaccaguacgaggccaugagcugcgacuucaacggcggcaagaucagcgugcaguacaaccugagccacagcuacgccggcgacgccgccagccacugcggcaccguggccaacggcgugcugcagaccuucaugagaauggccuggggcggcagcuacaucgcccuggacagcggcugcggcaagugggacugcaucaugaccagcuaccaguaccugaucauccagaacaccaccugggaggaccacugccaguucagcagacccagccccaucggcuaccugggccugcugagccagagaaccagagacaucuacaucagcagaagacgccggggcaccuucaccuggacccugagcgacagcgagggcaaggacacccccggcggcuacugccugaccagauggaugcugaucgaggccgagcugaagugcuucggcaacaccgccguggccaagugcaacgagaagcacgacgaggaguucugcgacaugcugagacuguucgacuucaacaagcaggccauccagagacugaagacccccgcccagaugagcauccagcugaucaacaaggccgugaacgcccugaucaacgaccagcugaucaugaagaaccaccugagagacaucaugugcauccccuacugcaacuacagcaaguacugguaccugaaccacaccaccaccggcaagaccagccugcccaagugcuggcuggugagcaacggcagcuaccugaacgagacccacuucagcgacgacaucgagcagcaggccgacaacaugaucaccgagaugcugcagaaggaguacauggagagacagggcaagaccccccugggccugguggaccuguucguguucagcaccagcuucuaccugaucagcaucuuccugcaccuggugaagauccccacccacagacacaucgugggcaagagcugccccaagccccacagacugaaccacaugggcaucugcagcugcggccuguacaagcagcccggcgugcccgugagauggaagagaugaggacuagucccuguucccagagcccacuuuuuuuucuuuuuuugaaauaaaauagccugucuuucagaucucaaaggcucuuuucagagccaccaaaaaaaaaaaaaaaaaaaaaaaaaaaaaaaaaaaaaaaaaaaaaaaaaaaaaaaaaaaaaaaaaaaaaaaaaaaaaaaaaaaaaaaaaaaaaaaaaaaaa

SEQ ID NO: 15425 - RNA, 1748 nt, Artificial Sequence
  mRNA product Design a-1 (hSL-A100) comprising derived and/or modified sequence from LASV(G502-SLE-2009;Clade IV)__AIT17126__GPCmut1 (opt4)
aggagagucccgcagucggcguccagcggcucugcuuguucgugugugugucguugcaggccuuauucaagcuuaccaugggccagaucgugaccuucuuccaggaggugccccacgugaucgaggaggugaugaacaucgugcugaucgcccugagcauccuggccgugcugaagggccuguacaacuucgccaccugcggccuggugggccugcugaccuuccugcugcugugcggcagaagcugcaccaccggccuguacaagggcguguacgagcugcagacccuggagcugaacauggagacccugaacaugaccaugccccugagcugcaccaagaacaacagccaccacuacaucauggugggcaacgagaccggccuggagcugacccugaccaacaccagcaucaucaaccacaaguucugcaaccugagcgacgcccacaagaagaaccuguacgaccacgcccugaugagcaucaucagcaccuuccaccugagcauccccaacuucaaccaguacgaggccaugagcugcgacuucaacggcggcaagaucagcgugcaguacaaccugagccacagcuacgccggcgacgccgccgaccacugcggcaccguggccaacggcgugcugcagaccuucaugagaauggccuggggcggcagcuacaucgcccuggacagcggcugcggcagaugggacugcaucaugaccagcuaccaguaccugaucauccagaacaccaccugggaggaccacugccaguucagcagacccagccccaucggcuaccugggccugcugagccagagaaccagagacaucuacaucagcagaagacgccggggcaccuucaccuggacccugagcgacagcgagggcaaggacacccccggcggcuacugccugaccagauggaugcugaucgaggccgagcugaagugcuucggcaacaccgccguggccaagugcaacgagaagcacgacgaggaguucugcgacaugcugagacuguucgacuucaacaagcaggccauccagagacugaaggcccccgcccagaugagcauccagcugaucaacaaggccgugaacgcccugaucaacgaccagcuggugaugaagaaccaccugagagacaucaugugcauccccuacugcaacuacagcagauacugguaccugaaccacaccaccaccggcagaaccagccugcccaagugcuggcuggugagcaacggcagcuaccugaacgagacccacuucagcgacgacaucgagcagcaggccgacaacaugaucaccgagaugcugcagaaggaguacauggagagacagggcaagaccccccugggccugguggaccuguucguguucagcaccagcuucuaccugaucagcaucuuccugcaccuggugaagauccccacccacagacacaucgugggcaagagcugccccaagccccacagacugaaccacaugggcaucugcagcugcggccuguacaagcagcccggcgugcccgugaaguggaagagaugaggacuagucccuguucccagagcccacuuuuuuuucuuuuuuugaaauaaaauagccugucuuucagaucucaaaggcucuuuucagagccaccaaaaaaaaaaaaaaaaaaaaaaaaaaaaaaaaaaaaaaaaaaaaaaaaaaaaaaaaaaaaaaaaaaaaaaaaaaaaaaaaaaaaaaaaaaaaaaaaaaaaa

SEQ ID NO: 15426 - RNA, 1748 nt, Artificial Sequence
  mRNA product Design a-1 (hSL-A100) comprising derived and/or modified sequence from LASV(G733-SLE-2010;Clade IV)__AIT17154__GPCmut1 (opt4)
aggagagucccgcagucggcguccagcggcucugcuuguucgugugugugucguugcaggccuuauucaagcuuaccaugggccagaucgugaccuucuuccaggaggugccccacgugaucgaggaggugaugaacaucgugcugaucgcccugagcauccuggccgugcugaagggccuguacaacuucgccaccugcggcaucgugggccuggugagcuuccugcugcugugcggcagaagcugcaccaccagccuguacaagggcguguacgagcugcagacccuggagcugaacauggagacccugaacaugaccaugccccugagcugcaccaagaacaacagccaccacuacaucauggugggcaacgagaccggccuggagcugacccugaccaacaccagcaucaucaaccacaaguucugcaaccugagcgacgcccacaagaagaaccuguacgaccacgcccugaugagcaucaucagcaccuuccaccugagcauccccaacuucaaccaguacgaggccaugagcugcgacuucaacggcggcaagaucagcgugcaguacaaccugagccacagcuacgccggcgacgccgccaaccacugcggcaccaucgccaacggcgugcugcagaccuucaugagaauggccuggggcggcagcuacaucgcccuggacagcggcugcgacagaugggacugcaucaugaccagcuaccaguaccugaucauccagaacaccaccugggaggaccacugccaguucagcagacccagccccaucggcuaccugggccugcugagccagagaaccagagacaucuacaucagcagaagacgccggggcaccuucaccuggacccugagcgacagcgagggcaaggacacccccggcggcuacugccugaccagauggaugcugaucgaggccgagcugaagugcuucggcaacaccgccguggccaagugcaacgagaagcacgacgaggaguucugcgacaugcugagacuguucgacuucaacaagcaggccauccagagacugaaggcccccgcccagaugagcauccagcugaucaacaaggccgugaacgcccugaucaacgaccagcugaucaugaagaaccaccugagagacaucaugugcauccccuacugcaacuacagcaaguacugguaccugaaccacaccaccaccggcaagaccagccugcccaagugcuggcuggugagcaacggcagcuaccugaacgagacccacuucagcgacgacaucgagcagcaggccgacaacaugaucaccgagaugcugcagaaggaguacauggagagacagggcaagaccccccugggccugguggaccuguucguguucagcaccagcuucuaccugaucagcaucuuccugcaccuggugaagauccccacccacagacacguggugggcaagagcugccccaagccccacagacugaaccacaugggcaucugcagcugcggccuguacggccagcccggcgugcccgugaaguggaagagaugaggacuagucccuguucccagagcccacuuuuuuuucuuuuuuugaaauaaaauagccugucuuucagaucucaaaggcucuuuucagagccaccaaaaaaaaaaaaaaaaaaaaaaaaaaaaaaaaaaaaaaaaaaaaaaaaaaaaaaaaaaaaaaaaaaaaaaaaaaaaaaaaaaaaaaaaaaaaaaaaaaaaa

SEQ ID NO: 15427 - RNA, 1748 nt, Artificial Sequence
  mRNA product Design a-1 (hSL-A100) comprising derived and/or modified sequence from MOPV/LASV reassortant(IGS-1;Clade IV)__AFY05576__GPCmut1 (opt4)
aggagagucccgcagucggcguccagcggcucugcuuguucgugugugugucguugcaggccuuauucaagcuuaccaugggccagaucgugaccuucuuccaggaggugccccacgugaucgaggaggugaugaacaucgugcugaucgcccugagcgugcuggccgugcugaagggccuguacaacuucgccaccugcggccuggugggccuggugaccuuccugcugcugugcggcagaagcugcaccaccagccuguacaagggcguguacgagcugcagacccuggagcugaacauggagacccugaacaugaccaugccccugagcugcaccaagaacaacagccaccacuacaucauggugggcaacgagaccggccuggagcugacccugaccaacaccagcaucaucaaccacaaguucugcaaccugagcgacgcccacaagaagaaccuguacgaccacgcccugaugagcaucaucagcaccuuccaccugagcauccccaacuucaaccaguacgaggccaugagcugcgacuucaacggcggcaagaucagcgugcaguacaaccugagccacagcuacgccggcgacgccgccaaccacugcggcaccguggccaacggcgugcugcagaccuucaugagaauggccuggggcggcagcuacaucgcccuggacagcggcugcggcaacugggacugcaucaugaccagcuaccaguaccugaucauccagaacaccaccugggaggaccacugccaguucagcagacccagccccaucggcuaccugggccugcugagccagagaaccagagacaucuacaucagcagaagacgccggggcaccuucaccuggacccugagcgacagcgagggcgaggacacccccggcggcuacugccugaccagauggaugcugaucgaggccgagcugaagugcuucggcaacaccgccguggccaagugcaacgagaagcacgacgaggaguucugcgacaugcugagacuguucgacuucaacaagcaggccauccagagacugaaggcccccgcccagaugagcauccagcugaucaacaaggccgugaacgcccugaucaacgaccagcugaucaugaagaaccaccugagagacaucaugugcauccccuacugcaacuacagcaaguacugguaccugaaccacaccaccaccggcagaaccagccugcccaagugcuggcuggugagcaacggcagcuaccugaacgagacccacuucagcgacgacaucgagcagcaggccgacaacaugaucaccgagaugcugcagaaggaguacauggagagacagggcaagaccccccugggccugguggaccuguucguguucagcaccagcuucuaccugaucagcaucuuccugcaccuggugaagauccccacccacagacacaucgugggcaagagcugccccaagccccacagacugaaccacaugggcaucugcagcugcggccuguacaagcagcccggcgugcccgugaaguggaagagaugaggacuagucccuguucccagagcccacuuuuuuuucuuuuuuugaaauaaaauagccugucuuucagaucucaaaggcucuuuucagagccaccaaaaaaaaaaaaaaaaaaaaaaaaaaaaaaaaaaaaaaaaaaaaaaaaaaaaaaaaaaaaaaaaaaaaaaaaaaaaaaaaaaaaaaaaaaaaaaaaaaaaa

SEQ ID NO: 15428 - RNA, 1748 nt, Artificial Sequence
  mRNA product Design a-1 (hSL-A100) comprising derived and/or modified sequence from LASV(LM765-SLE-2012;Clade IV)__AIT17814__GPCmut1 (opt4)
aggagagucccgcagucggcguccagcggcucugcuuguucgugugugugucguugcaggccuuauucaagcuuaccaugggccagaucgugaccuucuuccaggaggugccccacgugaucgaggaggugaugaacaucgugcugaucgcccugagcauccuggccgugcugaagggccuguacaacuucgccaccugcggccuggugggccuggugaccuuccugcugcugugcggcagaagcugcaccaccagccuguacaagggcguguacgagcugcagacccuggagcugaacauggagacccugaacaugaccaugccccugagcugcaccaagaacaacagccaccacuacaucauggugggcaacgagaccggccuggagcugacccugaccaacaccagcaucaucgaccacaaguucugcaaccugagcgacgcccacagaaagaaccuguacgaccacgcccugaugagcaucaucagcaccuuccaccugagcauccccaacuucaaccaguacgaggccaugagcugcgacuucaacggcggcaagaucagcgugcaguacaaccugagccacagcuacgccaaggacgccgccgaccacugcggcaccguggccaacggcgugcugcagaccuucaugagaauggccuggggcggcagcuacaucgcccuggacagcggcugcggcagaugggacugcaucaugaccagcuaccaguaccugaucauccagaacaccaccugggaggaccacugccaguucagcagacccagccccaucggcuaccugggccugcugagccagagaaccagagacaucuacaucagcagaagacgccggggcaccuucaccuggacccugagcgacagcgagggcaaggacacccccggcggcuacugccugaccagauggaugcugaucgaggccgagcugaagugcuucggcaacaccgccguggccaagugcaacgagaagcacgacgaggaguucugcgacaugcugagacuguucgacuucaacaagcaggccauccagagacugaaggcccccgcccagaugagcauccagcugaucaacaaggccgugaacgcccugaucaacgaccagcugaucaugaagaaccaccugagagacaucaugugcauccccuacugcaacuacagcaaguacugguaccugaaccacaccaccaccggcaagaccagccugcccaagugcuggcuggugagcaacggcagcuaccugaacgagacccacuucagcgacgacaucgagcagcaggccgacaacaugaucaccgagaugcugcagaaggaguacauggagagacagggcaagaccccccugggccugguggaccuguucguguucagcaccagcuucuaccugaucagcaucuuccugcaccuggugaagauccccacccacagacacaucgugggcaagcccugccccaagccccacagacugaaccacaugggcaucugcagcugcggccuguacaagcagcccggcgugcccgugaaguggaagagaugaggacuagucccuguucccagagcccacuuuuuuuucuuuuuuugaaauaaaauagccugucuuucagaucucaaaggcucuuuucagagccaccaaaaaaaaaaaaaaaaaaaaaaaaaaaaaaaaaaaaaaaaaaaaaaaaaaaaaaaaaaaaaaaaaaaaaaaaaaaaaaaaaaaaaaaaaaaaaaaaaaaaa

SEQ ID NO: 15429 - RNA, 1748 nt, Artificial Sequence
  mRNA product Design a-1 (hSL-A100) comprising derived and/or modified sequence from LASV(LM776-SLE-2012;Clade IV)__AIT17824__GPCmut1 (opt4)
aggagagucccgcagucggcguccagcggcucugcuuguucgugugugugucguugcaggccuuauucaagcuuaccaugggccagaucgugaccuucuuccaggaggugccccacgugaucgaggaggugaugaacaucgugcugaucgcccugagcauccuggccgugcugaagggccuguacaacuucgccaccugcggccuggugggccuggugaccuuccugcugcugugcggcagaagcugcaccaccagcguguacaagggcguguacgagcugcagacccuggagcugaacauggagacccugaacaugaccaugccccugagcugcaccaagaacaacagccaccacuacaucauggugggcaacgagaccggccuggagcugacccugaccaacaccagcaucaucaaccacaaguucugcaaccugagcgacgcccacaagaagaaccuguacgaccacgcccugaugagcaucaucagcaccuuccaccugagcauccccaacuucaaccaguacgaggccaugagcugcgacuucaacggcggcaagaucagcgugcaguacaaccugagccacagcuacgccggcgacgccgccaaccacugcggcaccguggccaacggcgugcugcagaccuucaugagaauggccuggggcggcagcuacaucgcccuggacagcggcugcggcaagugggacugcaucaugaccagcuaccaguaccugaucauccagaacaccaccugggaggaccacugccaguucagcagacccagccccaucggcuaccugggccugcugagccagagaaccagagacaucuacaucagcagaagacgccggggcaccuucaccuggacccugagcgacagcgagggcaaggacacccccggcggcuacugccugaccagauggaugcugaucgaggccgagcugaagugcuucggcaacaccgccguggccaagugcaacgagaagcacgacgaggaguucugcgacaugcugagacuguucgacuucaacaagcaggccauccagagacugaaggcccccgcccagaugagcauccagcugaucaacaaggccgugaacgcccugaucaacgaccagcugaucaugaagaaccaccugagagacaucaugugcauccccuacugcaacuacagcaaguacugguaccugaaccacaccaccaccggcaagaccagccugcccaagugcuggcuggugagcaacggcagcuaccugaacgagacccacuucagcgacgacaucgagcagcaggccgacaacaugaucaccgagaugcugcagaaggaguacauggagagacagggcaagaccccccugggccugguggaccuguucguguucagcaccagcuucuaccugaucagcaucuuccugcaccuggugaagauccccacccacagacacaucgugggcaagagcugccccaagccccacagacugaaccacaugggcaucugcagcugcggccuguacaagcagcccggcgugcccgugagauggaagagaugaggacuagucccuguucccagagcccacuuuuuuuucuuuuuuugaaauaaaauagccugucuuucagaucucaaaggcucuuuucagagccaccaaaaaaaaaaaaaaaaaaaaaaaaaaaaaaaaaaaaaaaaaaaaaaaaaaaaaaaaaaaaaaaaaaaaaaaaaaaaaaaaaaaaaaaaaaaaaaaaaaaaa

SEQ ID NO: 15430 - RNA, 1748 nt, Artificial Sequence
  mRNA product Design a-1 (hSL-A100) comprising derived and/or modified sequence from LASV(Mad39;Clade IV)__ANH09722__GPCmut1 (opt4)
aggagagucccgcagucggcguccagcggcucugcuuguucgugugugugucguugcaggccuuauucaagcuuaccaugggccagaucgugaccuucuuccaggaggugccccacgugaucgaggaggugaugaacaucgugcugaucgcccugagcauccuggccgugcugaagggccuguacaacguggccaccugcggccugaucggccuggugaccuuccugcugcugugcggcagaagcugcaccaccacccuguacaagggcguguacgagcugcaggcccuggagcugaacauggagacccugaacaugaccaugccccugagcugcaccaagaacaacagccaccacuacaucagagugggcaacgagaccggccuggagcugacccugaccaacaccagccugaucaaccacaaguucugcaaccugagcgacgcccacaagaagaaccuguacgaccacgcccugaugagcaucaucagcaccuuccaccugagcauccccaacuucaaccaguacgaggccaugagcugcgacuucaacgacggcaagaucagcgugcaguacaaccugagccacaccuacgccggcgacaccgccaaccacugcggcaccguggccaacggcgugcugcagaccuucaugagaauggccuggggcggcagcuacaucgcccuggacagcggcugcggcggcugggacugcaucaugaccagcuaccaguaccugaucauccagaacaccaccugggaggaccacugccaguucagcagacccagccccaucggcuaccugggccugcugagccagagaaccagagacaucuacaucagcagaagacgccggggcaccuucaccuggacccugagcgacagcgagggcaaggacacccccggcggcuacugccugaccagauggaugcugaucgaggccgagcugaagugcuucggcaacaccgccguggccaagugcaacgagaagcacgacgaggaguucugcgacaugcugagacuguucgacuucaacaagcaggccauccagagacugaaggcccccgcccagaugagcauccagcugaucaacaaggccgugaacgcccugaucaacgaccagcugaucaugaagaaccaccugagagacaucaugugcauccccuacugcaacuacagcaaguacugguaccugaaccacaccgugaccggcaagaccagccugcccaagugcuggcuggugagcaacggcagcuaccugaacgagacccacuucagcgacgacaucgagcagcaggccgacaacaugaucaccgagaugcugcagaaggaguacauggagagacagggcaagaccccccugggccugguggaccuguucguguucagcaccagcuucuaccugaucagcaucuuccugcaccuggugaagauccccacccacagacacguggugggcaagcccugccccaagccccacagacugaaccacaugggcaucugcagcugcggcuucuacaagcagcccggcgugcccgugagauggaagagaugaggacuagucccuguucccagagcccacuuuuuuuucuuuuuuugaaauaaaauagccugucuuucagaucucaaaggcucuuuucagagccaccaaaaaaaaaaaaaaaaaaaaaaaaaaaaaaaaaaaaaaaaaaaaaaaaaaaaaaaaaaaaaaaaaaaaaaaaaaaaaaaaaaaaaaaaaaaaaaaaaaaaa

SEQ ID NO: 15431 - RNA, 1748 nt, Artificial Sequence
  mRNA product Design a-1 (hSL-A100) comprising derived and/or modified sequence from LASV(Z0947-SLE-2011;Clade IV)__AIT17840__GPCmut1 (opt4)
aggagagucccgcagucggcguccagcggcucugcuuguucgugugugugucguugcaggccuuauucaagcuuaccaugggccagaucgugaccuucuuccaggaggugccccacgugaucgaggaggugaugaacaucgugcugaucgcccugagcauccuggccgugcugaagggccuguacaacuucgccaccugcggccuggugggccuggugaccuuccugcugcugugcggcagaagcugcaccaucagccuguacaagggcguguacgagcugcagacccuggagcugaacauggagacccugaacaugaccaugccccugagcugcaccaagaacaacagccaccacuacaucauggugggcaacgagaccggccuggagcugacccugaccaacaccagcaucaucaaccacaaguucugcaaccugagcgacgcccacaagaagaaccuguacgaccacgcccugaugagcaucaucagcaccuuccaccugagcauccccaacuucaaccaguacgaggccaugagcugcgacuucaacggcggcaagaucagcgugcaguacaaccugagccacagcuacgccggcgacgccgccaaccacugcggcaccguggccaacggcgugcugcagaccuucaugagaauggccuggggcggcagcuacaucgcccuggacagcggcugcgacagaugggacugcaucaugaccagcuaccaguaccugaucauccagaacaccaccugggaggaccacugccaguucagcagacccagccccaucggcuaccugggccugcugagccagagaaccagagacaucuacaucagcagaagacgccggggcaccuucaccuggacccugagcgacagcgagggcaaggacacccccggcggcuacugccugaccagauggaugcugaucgaggccgagcugaagugcuucggcaacaccgccguggccaagugcaacgagaagcacgacgaggaguucugcgacaugcugagacuguucgacuucaacaagcaggccauccagagacugaaggcccccgcccagaugagcauccagcugaucaacaaggccgugaacgcccugaucaacgaccagcugaucaugaagaaccaccugagagacaucaugugcauccccuacugcaacuacagcaaguacugguaccugaaccacaccaccaccggcaagaccagccugcccaagugcuggcuggugagcaacggcagcuaccugaacgagacccacuucagcgacgacaucgagcagcaggccgacaacaugaucaccgagaugcugcagaaggaguacauggagagacagggcaagaccccccugggccugguggaccuguucguguucagcaccagcuucuaccugaucagcaucuuccugcaccuggugaagauccccacccacagacacaucgugggcaagcccugccccaagccccacagacugaaccacaugggcaucugcagcugcggccuguacaagcagcccggcgugcccgugaaguggaagagaugaggacuagucccuguucccagagcccacuuuuuuuucuuuuuuugaaauaaaauagccugucuuucagaucucaaaggcucuuuucagagccaccaaaaaaaaaaaaaaaaaaaaaaaaaaaaaaaaaaaaaaaaaaaaaaaaaaaaaaaaaaaaaaaaaaaaaaaaaaaaaaaaaaaaaaaaaaaaaaaaaaaaa

SEQ ID NO: 15432 - RNA, 1748 nt, Artificial Sequence
  mRNA product Design a-1 (hSL-A100) comprising derived and/or modified sequence from LASV(Josiah;Clade IV)__NP_694870__GPCmut1 (opt5)
aggagagucccgcagucggcguccagcggcucugcuuguucgugugugugucguugcaggccuuauucaagcuuaccaugggccagaucgugaccuucuuucaagaggucccccacguuauugaagaggugaugaacaucgugcugauugcccucagcguccuggcugugcuuaaggggcuguacaauuucgccacaugcggacucguuggccuggugacguuucuucugcucugugggagauccugcaccacaucucuguauaaaggagucuacgaacugcagacccucgagcugaacauggaaacacuuaauaugaccaugccucugagcuguacaaagaacaauucccaucacuauaucauggugggcaacgagaccgggcucgagcugacgcuuaccaauacaucuauuaucaaccauaaauucugcaaucugagcgacgcgcacaagaaaaaccucuacgaucaugcucugauguccaucauuucuaccuuucaccugagcaucccgaauuucaaccaguaugaagccauguccugugacuuuaauggaggcaagauuagcguucaguacaaccucucucacuccuaugccggcgaugcugccaaucauugcgggacaguggcuaacggaguccugcaaaccuucaugcggauggccuggggcgggagcuacaucgcgcuugacucuggaugcggcaacugggauuguauuaugacguccuaccaguaucugaucauucagaauacaaccugggaggaccacugccaguuuagcagacccucuccuaucggguaccucggacugcuuucccaacggacacgcgauaucuauauuagcagacggcgccggggcaccuucaccuggacacuguccgacucugaaggcaaggauacgcccgggggauacugucugacccgcuggaugcucaucgaggccgagcugaaaugcuuuggcaacacagcuguggccaaguguaaugaaaaacaugacgaggaguucugcgauaugcuuagacuguuugacuucaacaagcaggcuauucagcggcucaaagcccccgcgcagaugagcauccaacugauuaauaaggccgugaacgcucuuaucaaugaucagcugaucaugaagaaccaccuccgcgacauuaugugcaucccuuauugcaauuacuccaaauauugguaccugaaccacaccacaaccggaagaacgagccugcccaaguguuggcucgucucuaauggcuccuaccugaacgaaacacauuucagcgacgauauugagcagcaagccgacaauaugaucaccgagaugcuucagaaagaauauauggagcggcaggggaagaccccucugggacucguugaucuguuuguguucucuaccagcuuuuaccugauuuccaucuuccuucaccucgugaaaaucccgacacaucgccacauugucggcaagucuugccccaaaccucauagacugaaccacaugggcaucuguagcugcgggcuguauaagcagcccggagugccuguuaaguggaaacggugaggacuagucccuguucccagagcccacuuuuuuuucuuuuuuugaaauaaaauagccugucuuucagaucucaaaggcucuuuucagagccaccaaaaaaaaaaaaaaaaaaaaaaaaaaaaaaaaaaaaaaaaaaaaaaaaaaaaaaaaaaaaaaaaaaaaaaaaaaaaaaaaaaaaaaaaaaaaaaaaaaaaa

SEQ ID NO: 15433 - RNA, 1745 nt, Artificial Sequence
  mRNA product Design a-1 (hSL-A100) comprising derived and/or modified sequence from LASV(LP;Clade I)__AAF86701__GPCmut1 (opt5)
aggagagucccgcagucggcguccagcggcucugcuuguucgugugugugucguugcaggccuuauucaagcuuaccaugggccagaucauuaccuucuuucaagaggugccccacgucaucgaagagguuaugaacauugugcugaucgcccucagccugcuugcuauucugaaggggcucuacaauaucgccacaugcggaaucauuggccugguggcguuccuuuuucugugugggaaauccugcucucucacgcugaagggaggcuaugaacugcagacccucgagcugaacauggaaacacuuaauaugaccaugccucugagcuguaccaaaaacuccucucaucacuacaucagagucgggaaugagacaggacucgagcugacacuuaccaacacgagcauuaucaaucauaaguucugcaaccuguccgacgcucacaaaaagaaucucuaugaucaugcccugaugucuauuaucagcaccuuucaccuguccauuccgaacuucaaucaguacgaagccaugagcugugacuuuaacggcggcaagaucucugugcaguauaaucucucccacagcuacgcuggggaugccgcugagcauugcggaacaguugccaacggcgugcugcaaaccuucaugcggauggcguggggagggcgcuauaucgcccuugacucuggcugcgggaauugggauuguauuaugacauccuaccaguaccugaucauucagaacaccacgugggaagaccacugccaguuuagcagacccucuccuaucggauaucucggccugcuuucccaacggacacgcgauauuuacaucagcagacggcgccggggcaccuucacauggacccuguccgacucugaggggaacgagacccccggaggcuauugucugacacgcuggaugcucaucgaagcugagcugaagugcuuugggaauacggccgucgcuaaauguaacgaaaagcaugaugaggaguucugcgacaugcuuagacuguuugauuucaauaaacaggccauucggcgccucaaggcgcccgcccagaugagcauccagcugauuaacaaggcugugaaugcccuuaucaacgaccaacugauuaugaaaaaucaccucagagauaucaugugcaucccuuacugcaacuauuccaaguacugguaucugaaucacaccagcucuggccggacaucccugcccaaauguuggcucauuagcaacgggucuuaccugaaugagacccaguucagcgacgacaucgaacagcaagcugauaacaugauuacagagaugcuucagaaggaauacaucgagcgccagggaaaaaccccucugggccucguugacauuuuuaucuucuccacgucuuuuuaucugauuagcaucuuccugcaucuuaucaagauuccgacacacagacauaucgugggcaaacccugcccuaagccccaccggcucaaucauaugggggucuguuccugcggacuguacaagcacccuggcgugcccaccaaauggaagcgcugaggacuagucccuguucccagagcccacuuuuuuuucuuuuuuugaaauaaaauagccugucuuucagaucucaaaggcucuuuucagagccaccaaaaaaaaaaaaaaaaaaaaaaaaaaaaaaaaaaaaaaaaaaaaaaaaaaaaaaaaaaaaaaaaaaaaaaaaaaaaaaaaaaaaaaaaaaaaaaaaaaaaa

SEQ ID NO: 15434 - RNA, 1745 nt, Artificial Sequence
  mRNA product Design a-1 (hSL-A100) comprising derived and/or modified sequence from LASV(803213;Clade II)__AAF86703__GPCmut1 (opt5)
aggagagucccgcagucggcguccagcggcucugcuuguucgugugugugucguugcaggccuuauucaagcuuaccaugggccagaucauuaccuucuuucaagaggugccccacgucaucgaagagguuaugaacauugugcugaucgcccucagccugcuugcuauucugaaggggaucuacaauguggccacaugcggacucuucggccugaucuccuuucuucugcucugugggagaucuugcagcgucacguauaaaggaguguacgaacugcagacccuggagcucaacauggcgaaucugaacaugacaaugccucuuuccuguaccaagaauaacucucaucacuauauuaugguuggcaaugaaacagggcuggagcucacccugacaaacaccagcaucauuaaucauaaauucugcaaccuuuccgacgcucacaagaaaaaucuguacgaucaugcccucaugucuaucauuagcacguuucaccuguccaucccgaacuucaaucaguaugaggccaugagcugugacuuuaacggaggcaagauuucugugcaguacaaucugucccacagcuucgcugucgaugccgcuaaccauugcggcaccaucgccaacggggugcuccaaacauuuaugcggauggcguggggaggcucuuauaucgcccuggacuccgggugcggaaauugggauuguauuaugaccagcuaccaguaccuuaucauucagaacacaaccugggaagaccacugccaguucucucgccccuccccuaucggcuaucuggggcuccugagccaaagaacgcgggauauuuacaucucccgcagacgccggggaacauuuaccuggacacucucugacagcgagggcaaugaagcucccggcggguauugucugacccgguggaugcugaucgaggccgagcucaaaugcuucggaaacaccgcuguugccaaguguaaugaaaaacaugaugaggaauuuugcgacaugcugcgccuuuucgauuucaacaagcaggcgauuaaaagacugaagacacccgcccagauguccauccagcucauuaauaaggcugugaacgcccugaucaaugaccaacuuauuaugaaaaaccaucugcgggauaucaugugcaucccuuacugcaauuauagccgcuacugguaucucaaccacacggucaccgggaagacaucucugcccagauguuggcugguguccaauggaagcuaccucaacgaaacccacuuuucugacgacauugagcagcaggcugauaauaugaucacagagaugcugcaaaaagaauacauggaccggcagggcaagaccccucuugggcugguggaucucuucgucuuuagcacguccuucuaucugauuucuaucuuucugcaccuuguuaaaauuccgacacaucgccacaucgugggaaagcccugcccuaaaccccauagacucaaccacaugggcauuuguagcugcggccuguacaagcacccuggggugcccgucaaguggaaacggugaggacuagucccuguucccagagcccacuuuuuuuucuuuuuuugaaauaaaauagccugucuuucagaucucaaaggcucuuuucagagccaccaaaaaaaaaaaaaaaaaaaaaaaaaaaaaaaaaaaaaaaaaaaaaaaaaaaaaaaaaaaaaaaaaaaaaaaaaaaaaaaaaaaaaaaaaaaaaaaaaaaaa

SEQ ID NO: 15435 - RNA, 1745 nt, Artificial Sequence
  mRNA product Design a-1 (hSL-A100) comprising derived and/or modified sequence from LASV(GA391;Clade III)__CAA36645__GPCmut1 (opt5)
aggagagucccgcagucggcguccagcggcucugcuuguucgugugugugucguugcaggccuuauucaagcuuaccaugggccagaucgugaccuucuuucaagaggucccccacguuauugaagaggugaugaacaucgugcugauugcccucagcauccuggcuauucuuaaggggcuguacaaugucgccacaugcggacucaucggccuggugacguuccuucugcucuccgggagaucuuguagccugaucuauaaaggaaccuacgaacugcagacacucgagcugaacauggaaacccuuaauaugacaaugccucuguccugcaccaagaacaauucucaucacuauauucggguuggcaacgagacagggcucgagcugacccuuacgaauaccagcauccugaaccauaaauuuuguaaucucuccgacgcgcacaagcgcaaccuguacgaucauucucugaugagcauuaucuccacauuccaccucagcauuccgaauuuuaaccaguaugaagcuaugucuugcgacuucaauggaggcaaaaucaccgugcaguacaaccugucccacagcuuugccgucgaugccgcuggccauugugggacacuugccaauggagugcugcaaaccuucaugagaauggcuuggggcgggucuuauauugcccucgacuccggaugcggcaacugggauugcaucaugacgagcuaccaguaccugaucauucagaacacaaccugggacgaucacugucaguuuucucgccccuccccuaucggguaucuuggacugcucagccaaagaacacgggacauuuacaucucccgcagacgccggggcaccuucaccuggacacucucugauagcgagggcaaugaaacgcccgggggauauugccugacccgguggaugcuuauugaggcggagcugaaguguuuuggcaacacagccguugcuaagugcaaugaaaaacaugacgaggaguucugugauaugcuccgccuguuugacuucaacaagcaggccaucagacggcuuaaaacccccgcucagauguccauccagcugauuaauaaggccgugaacgcgcucaucaaugaucaacugauuaugaaaaaccaucugcgcgacaucaugugcauuccuuacugcaauuauagcagauacugguaucucaaccacacaucuaccggaaagacgucccugccccggugcuggcuuaucagcaauggcucuuaccugaacgaaacaaaguucagcgacgauaucgagcagcaggccgacaauaugauuaccgagaugcuccaaaaagaauacaucgaucgccaggggaagaccccucugggacuggucgaccuuuuuguguucuccacaucuuuuuaucucauuagcaucuuccugcaccuggugaaaauuccgacccacagacauaucgucggcaagcccuguccuaaaccccaccggcucaaccauaugggcauuugcuccugugggcuguacaagcagccuggaguucccgugagauggaaacgcugaggacuagucccuguucccagagcccacuuuuuuuucuuuuuuugaaauaaaauagccugucuuucagaucucaaaggcucuuuucagagccaccaaaaaaaaaaaaaaaaaaaaaaaaaaaaaaaaaaaaaaaaaaaaaaaaaaaaaaaaaaaaaaaaaaaaaaaaaaaaaaaaaaaaaaaaaaaaaaaaaaaaa

SEQ ID NO: 15436 - RNA, 1748 nt, Artificial Sequence
  mRNA product Design a-1 (hSL-A100) comprising derived and/or modified sequence from LASV(AV;Clade V)__CCA30314__GPCmut1 (opt5)
aggagagucccgcagucggcguccagcggcucugcuuguucgugugugugucguugcaggccuuauucaagcuuaccaugggccagaucgugaccuucuuucaagaggucccccacguuauugaagaggugaugaacaucgugcugauugcccucagcauccuggcuguccuuaaggggcuguacaauauugccacaugcggacucaucggccugaucacguuccuucugcucugugggagauccugcucuagcaaccuguauaaaggaguguacgaacugcagucccucgaccugaauauggagacccuuaacaugacaaugccucugucuuguaccaagaauaacagccaucacuauauucggguuggcaaugauacagggcucgaacugacccuuacaaacaccuccauccugaaucauaaauuuugcaaccucucugacgcgcacaagaaagaucuguacgaccaugcucugaugagcauuaucuccacguuccaccucagcauuccgaauuuuaaccaguaugaggccaugucuugugauuucaauggaggcaagaucuccgugcaguacaaccugagccacucuuaugccauugacgcugccaaucauugcggcaccgucgcuaacgggauccuucaaacauuuaugcgcauggccuggggaggcuccuacaucgcgcuggauagcgggugcggaaacugggacuguauuaugaccucuuaccaguaucucaucauucagaauacaaccugggagaaccacugccaguucucccggcccagcccuaucggcuaccuggggcuucugucccaacgcacgagagauauuuauaucucucggcgccgccggggaacauuuaccuggacacugagcgacuccgaaggcaaugccacccccggcggguacugucucaccagauggaugcugaucgaggcugaacuuaagugcuucggaaacacagccguggcuaaauguaaugagaagcaugaugaggaauuuugcgacaugcugcgccucuucgauuuuaacaaacaggccauuagccggcugaagucucccgcgcagauguccauccagcuuauuaauaaagccguuaacgcucugaucaaugaccaacucauuaugaagaaccaccugagagacaucaugugcaucccuuauugcaauuacagcaaguauugguaccugaaccacacgauuaccgggaaaacaucucuccccaaguguuggcuggugagcaauggauccuaccuuaacgaaacccauuucucugaugacaucgagcagcaggccgauaauaugauuacagaaaugcugcaaaaagaguauauggagcggcagggcaagaccccucucgggcuggucgaccuguucguguuuagcacguccuucuaccuuaucagcauuuuucuccgccuggugaaaaucccgacacacagacauauugucggaaagcccugcccuaaaccccaccggcugaaccauaugggcaucuguucuugcggccucuauaagcagccugggguucccgugcgcuggaagagaugaggacuagucccuguucccagagcccacuuuuuuuucuuuuuuugaaauaaaauagccugucuuucagaucucaaaggcucuuuucagagccaccaaaaaaaaaaaaaaaaaaaaaaaaaaaaaaaaaaaaaaaaaaaaaaaaaaaaaaaaaaaaaaaaaaaaaaaaaaaaaaaaaaaaaaaaaaaaaaaaaaaaa

SEQ ID NO: 15437 - RNA, 1745 nt, Artificial Sequence
  mRNA product Design a-1 (hSL-A100) comprising derived and/or modified sequence from LASV(Togo/2016/7082;Clade VI)__AMR44577__GPCmut1 (opt5)
aggagagucccgcagucggcguccagcggcucugcuuguucgugugugugucguugcaggccuuauucaagcuuaccaugggccagaucauuaccuucuuucaagaggugccccacgucaucgaagagguuaugaacauugugcugaucgcccucagccugcuugcuauucugaaggggguguacaaugucgccacaugcggaaucaucggccucgugacguuccuguuucuuugugggagauccugcucucugauuuauaaaggaagcuacgaacuccagacccuggagcugaacauggaaacacucaauaugaccaugccucuguccuguacaaagaacucuagccaucacuauauccggguuggcaaugagaccgggcuugagcugacacucaccaacacguccauuaucaaucauaaauucugcaaccugucugacgcgcacaagcgcaaucuuuacgaucaugcucugaugagcauucucuccaccuuucaccugagcaucccgaacuucaaucaguaugaagccaugucuugugacuuuaacggaggcaaaauuuccgugcaguacaaucugagccacgccuaugcugucgaugccgcugagcauugcggcacaguggccaacgggguucuccaaaccuucaugagaauggcguggggaggcucuuacaucgcccuggacuccgggugcggaaauugggauuguaucaugacaagcuaccaguaucuuauuauccagaacaccacgugggaagaccacugccaguuuucucgccccuccccuauuggcuaccuggggcuccugagccaaagaacacgggauaucuauauuucccgcagacgccggggaaccuucacauggacccucucugacagcgagggcaacgagacccccggcggguacugucugacacgguggaugcugaucgaagcugagcucaagugcuuuggaaauacggccguggcuaaguguaacgaaaaacaugaugaggaguucugcgacaugcugcgccuuuuugauuucaauaagcaggccauccagagacugaaaucccccgcgcagaugagcauucaacucaucaacaaggccgucaaugcucugauuaacgaccagcuuaucaugaaaaaucaucugcgggauaugaugugcauuccuuauugcaacuacucuaaguauugguaccucaaucacaccuccagcgggcgcacaucucugcccaaguguuggcuggugagcaacggauccuaccucaaugagacccacuucucugacgacaucgaacagcaagccgauaacaugaucacagagaugcugcagaaagaauauauugacagacagggcaagaccccucuugggcugguggaucucuuugucuucagcacguccuuuuaccugaucagcauuuuccugcaccuuaucaaaauuccgacacaucggcacaucguuggaaagcccugcccuaaaccccaucgccucaaucacaugggcauuuguucuugcggccuguauaagcagccuggggugcccaccagauggaaacggugaggacuagucccuguucccagagcccacuuuuuuuucuuuuuuugaaauaaaauagccugucuuucagaucucaaaggcucuuuucagagccaccaaaaaaaaaaaaaaaaaaaaaaaaaaaaaaaaaaaaaaaaaaaaaaaaaaaaaaaaaaaaaaaaaaaaaaaaaaaaaaaaaaaaaaaaaaaaaaaaaaaaa

SEQ ID NO: 15438 - RNA, 1745 nt, Artificial Sequence
  mRNA product Design a-1 (hSL-A100) comprising derived and/or modified sequence from LASV(KAK-428;Clade n.d. (VII))__ANH09740__GPCmut1 (opt5)
aggagagucccgcagucggcguccagcggcucugcuuguucgugugugugucguugcaggccuuauucaagcuuaccaugggccagaucgugaccuucuuucaagaggucccccacguuauugaagaggugaugaacaucgugcugauugcccucagccugcuugcuauccugaaggggcucuacaauuucgccacaugcggagucauuggccugaucacguuucuucugcucugugggagauccugcucugcgaccuauaaaggacaguacgaacugcagacacuggagcucaacauggaaagccugaauaugaccaugccucuuuccuguacaaagaacaauucucaucacuauauccgggcuggcaacaauaccgggcuggagcucacacugaccaacacgagcauuaucucccauaaauucugcaaucuuucugacgcccacaagaaaaaccuguacgaucauacccucaugagcauuaucacaaccuuucaccuguccauuccgaauuucaaccaguaugaggccaugagcugugacuuuaauggaggcaagaucucuauucaauacaaccugucccacagcuaugcuggcgaugccgcucagcauugcgggacaguggccaauggaguucuccagaccuucaugcgcauggcguggggcgggucuuaccuggcccuugacuccggaugccggggcugggauuguaucaucagcucuuaccaguaucugauuauccaaaacacgacaugggacgaucacugccaguuuucccgccccagcccuauuggguaccucggauucgugucccagaagaccagagacaucuauauuucucggcgccgccggggcacauuuaccuggacccugagcgauuccgaaggccaugacaugcccgggggauacugucucacaagauggaugcugaucgaggcugaucugaaaugcuucggcaacacggccgucgcuaaguguaaugaaaaacacgacgaggaguuuugcgauauguggcgccucuucgacuucaacaagcaggccauccaacggcugaaagcgcccgcccagaugaauauucagcuuaucaacaaggcugugaaugcccugauuaacgaccaacucaugaugaagaaucaccugagagauaucaugugcauuccuuauugcaacuacagcaaauuuugguaucuuaauaacaccacaaccggacggacaucucugccccgcuguuggcucaucuccaauggcagcuaccugaacgagacccauuucucugacgauaucgaacagcaggcugacaauaugauuacggagaugcugcagaaggaauacauggauagacaagggaaaacaccucucggacugguugaccuuuuuguguucagcaccuccuuuuaucugaucaccauuuuccuccaccuggucaagaucccgacacaucggcacauugugggcaaacccugcccuaagccccaucgccugaaccacaugggcaucuguucuugcgggcuuuacaaacagccuggagugcccgucagauggaagcggugaggacuagucccuguucccagagcccacuuuuuuuucuuuuuuugaaauaaaauagccugucuuucagaucucaaaggcucuuuucagagccaccaaaaaaaaaaaaaaaaaaaaaaaaaaaaaaaaaaaaaaaaaaaaaaaaaaaaaaaaaaaaaaaaaaaaaaaaaaaaaaaaaaaaaaaaaaaaaaaaaaaaa

SEQ ID NO: 15439 - RNA, 1745 nt, Artificial Sequence; identical to SEQ ID NO: 15433
  mRNA product Design a-1 (hSL-A100) comprising derived and/or modified sequence from LASV(Pinneo-NIG-1969;Clade I)__AIT17836__GPCmut1 (opt5)

SEQ ID NO: 15440 - RNA, 1745 nt, Artificial Sequence
  mRNA product Design a-1 (hSL-A100) comprising derived and/or modified sequence from LASV(ISTH0009-NIG-2011;Clade II)__AIT17404__GPCmut1 (opt5)
aggagagucccgcagucggcguccagcggcucugcuuguucgugugugugucguugcaggccuuauucaagcuuaccaugggccagaucauuaccuucuuucaagaggugccccacgucaucgaagagguuaugaacauugugcugaucgcccucagccugcuugcuauucugaaggggaucuacaauguggccacaugcggacucuucggccuggucuccuuucuucugcucugugggagaucuugcagcacgaccuauaaaggaguguacgaacugcagacacuggagcucgacauggcgucccugaacaugaccaugccucuuucuuguacaaagaauaacagccaucacuauaucaugguuggcaaugaaaccgggcuggagcucacacugaccaacacguccauuaucaaucauaaauucugcaaccuuucugaugcucacaagaaaaaucuguacgaccaugcccucaugagcauuaucuccaccuuucaccugagcauuccgaacuucaaucaguaugaggccaugucuugugauuuuaacggaggcaagaucuccgugcaguacaaucugagccacgcuuaugccgucgacgcugccaaccauugcggcacaauugcgaauggggugcuccaaaccuucaugcggauggccuggggaggcucuuacaucgcucuggauuccgggugcggaagcugggacuguaucaugacaucuuaccaguaucuuauuauccagaacaccacgugggaagaucacugccaguuuucccgccccagcccuauuggcuaccuggggcuccugucccaaagaacacgggacaucuauauuucucgcagacgccggggaaccuucacauggacccucagcgauuccgagggcaacgaaacccccggcggguacugucugacacgguggaugcugaucgaggccgagcucaaaugcuuuggaaauacggcuguugccaaguguaacgaaaaacaugacgaggaguucugcgauaugcugcgccuuuuugacuucaauaagcaggcgaucagacggcugaaaacccccgcccagaugagcauucagcucaucaacaaggcugugaaugcccugauuaacgaucaacuuaucaugaagaaucaucugcgcgacauuaugugcaucccuuauugcaacuacucuaaauauugguaccucaaucacacagucaccgggaagacaucccugcccagauguuggcuggugagcaacggaucuuaccucaaugaaacccacuucagcgacgauaucgagcagcaggcugacaacaugauuacggagcugcuucaaaaagaauauauggaucggcagggcaagacaccucuggggcucguggaccuguuugucuucuccaccucuuuuuaccugaucagcauuuuccuucaccucaucaaaauuccgacccaucgccacaucacaggaaagcccugcccuaaaccccauagacugaaucacaugggcauuuguuccugcggccuguauaagcacccugggguucccgugaaguggaaacggugaggacuagucccuguucccagagcccacuuuuuuuucuuuuuuugaaauaaaauagccugucuuucagaucucaaaggcucuuuucagagccaccaaaaaaaaaaaaaaaaaaaaaaaaaaaaaaaaaaaaaaaaaaaaaaaaaaaaaaaaaaaaaaaaaaaaaaaaaaaaaaaaaaaaaaaaaaaaaaaaaaaaa

SEQ ID NO: 15441 - RNA, 1745 nt, Artificial Sequence
  mRNA product Design a-1 (hSL-A100) comprising derived and/or modified sequence from LASV(ISTH2010-NIG-2012;Clade II)__AIT17482__GPCmut1 (opt5)
aggagagucccgcagucggcguccagcggcucugcuuguucgugugugugucguugcaggccuuauucaagcuuaccaugggccagaucauuaccuucuuucaagaggugccccacgucaucgaagagguuaugaacauugugcugaucgcccucagccugcuugcuauucugaaggggaucuacaauguggccacaugcggacucuucggccuggucuccuuucuucugcucugugggagaucuugcagcacgaccuauaaaggaguguacgaacugcagacacuggagcucgacauggcgucccugaacaugaccaugccucuuucuuguacaaagaauaacagccaucacuauaucaugguuggcaaugaaaccgggcuggagcucacacugaccaacacguccauuaucaaucauaaauucugcaaccuuucugaugcucacaagaaaaaucuguacgaccaugcccucaugagcauuaucuccaccuuucaccugagcauuccgaacuucaaucaguaugaggccaugucuugugauuuuaacggaggcaagaucuccgugcaguacaaucugagccacgcuuaugccgucgacgcugccaaccauugcggcacaauugcgaauggggugcuccaaaccuucaugcggauggccuggggaggcucuuacaucgcucuggauuccgggugcggaagcugggacuguaucaugacaucuuaccaguaucuuauuauccagaacauuaccugggaagaucacugccaguuuucccgccccagcccuaucggcuaccuggggcuccugucccaaagaacgcgggacauuuauaucucucgcagacgccggggaacauucaccuggacacucagcgauuccgagggcaacgaaacccccggcggguacugucugacccgguggaugcugaucgaggccgagcucaaaugcuuuggaaauacagcuguugccaaguguaacgaaaaacaugacgaggaguucugcgauaugcugcgccuuuuugacuucaauaagcaggcgauuagacggcugaaaacgcccgcccagaugagcauccagcucauuaacaaggcugugaaugcccugaucaacgaucaacuuauuaugaagaaucaucugcgcgacaucaugugcaucccuuauugcaacuacucuaaauauugguaccucaaucacaccgucacagggaagaccucccugcccagauguuggcuggugagcaacggaucuuaccucaaugaaacacacuucagcgacgauauugagcagcaggcugacaacaugaucaccgagcugcuucaaaaagaauauauugaucggcagggcaagacgccucuggggcucguggaccuguuugucuucuccacaucuuuuuaccugaucagcauuuuccuucaccucguuaaaaucccgacccaucgccacguggugggaaagcccugcccuaaaccccauagacugaaucacaugggcauuuguuccugcggccuguauaagcacccugggguccccgugaaguggaaacggugaggacuagucccuguucccagagcccacuuuuuuuucuuuuuuugaaauaaaauagccugucuuucagaucucaaaggcucuuuucagagccaccaaaaaaaaaaaaaaaaaaaaaaaaaaaaaaaaaaaaaaaaaaaaaaaaaaaaaaaaaaaaaaaaaaaaaaaaaaaaaaaaaaaaaaaaaaaaaaaaaaaaa

SEQ ID NO: 15442 - RNA, 1745 nt, Artificial Sequence
  mRNA product Design a-1 (hSL-A100) comprising derived and/or modified sequence from LASV(Lassa virus/H.sapiens-wt/NGA/2015/ISTH_0543;Clade II)__AVO03639__GPCmut1 (opt5)
aggagagucccgcagucggcguccagcggcucugcuuguucgugugugugucguugcaggccuuauucaagcuuaccaugggccagaucauuaccuucuuucaagaggugccccacgucaucgaagagguuaugaacauugugcugaucgcccucagccugcuugcuauucugaaggggaucuacaauguggccacaugcggacucuucggccuggucuccuuucuucugcucugugggagaucuugcagcacgaccuauaaaggaguguacgaacugcagacacuggagcucgacauggcgaaccugaauaugaccaugccucuuuccuguacaaagaacaauucucaucacuauaucaugguuggcaacgaaaccgggcuggagcucacacugaccaauacgagcauuaucaaccauaaauucugcaaucuuuccgaugcucacaagaaaaaccuguacgaccaugcccucaugucuauuaucagcaccuuucaccuguccauuccgaauuucaaccaguaugaggccaugagcugugauuuuaauggaggcaagaucucugugcaguacaaccugucccacacauaugcugucgacgccgcuaaucauugcggcaccauugccaacggggugcuccaaacauucaugcggauggcguggggaggcagcuacaucgcccuggauucugggugcggauccugggacuguaucaugaccagcuaccaguaucuuguuauucagaacacgacaugggaagaucacugccaguuuucucgccccuccccuaucggcuaccuggggcuccugagccaaagaacccgggacauuuauaucucccgcagacgccggggaacauucaccuggacccucucugauagcgagggcaaugaaacacccggcggguacugucugacgcgguggaugcugauugaggcugagcucaaaugcuuuggaaacaccgccguggcuaaguguaaugaaaaacaugacgaggaguucugcgauaugcugcgccuuuuugacuucaacaagcaggccaucagacggcugaaaacacccgcgcagauguccauccagcucauuaauaaggccgucaacgcucugaucaaugaucaacuuauuaugaagaaccaucugcgcgacaucaugugcauuccuuauugcaauuacagcaaauauugguaccucaaccacaccgugacagggaagaccucucugcccagauguuggcugguguccaauggaagcuaccucaacgaaacgcacuucucugacgauaucgagcagcaggccgacaauaugaucacagagcugcuucaaaaagaauauauugaucggcagggcaagaccccucuggggcucgucgaccuguuuguuuucagcaccuccuuuuaccugaucucuauuuuccuucaccucgugaaaaucccgacacaucgccacauuaccggaaagcccugcccuaaaccccauagacugaaccacaugggcaucuguagcugcggccuguauaagcacccuggggugcccgucaaguggaaacggugaggacuagucccuguucccagagcccacuuuuuuuucuuuuuuugaaauaaaauagccugucuuucagaucucaaaggcucuuuucagagccaccaaaaaaaaaaaaaaaaaaaaaaaaaaaaaaaaaaaaaaaaaaaaaaaaaaaaaaaaaaaaaaaaaaaaaaaaaaaaaaaaaaaaaaaaaaaaaaaaaaaaa

SEQ ID NO: 15443 - RNA, 1745 nt, Artificial Sequence
  mRNA product Design a-1 (hSL-A100) comprising derived and/or modified sequence from LASV(Lassa virus/H.sapiens-wt/NGA/2016/ISTH_0009;Clade II)__AVO03571__GPCmut1 (opt5)
aggagagucccgcagucggcguccagcggcucugcuuguucgugugugugucguugcaggccuuauucaagcuuaccaugggccagaucauuaccuucuuucaagaggugccccacgucaucgaagagguuaugaacauugugcugaucgcccucagccugcuugcuauucugaaggggaucuacaauguggccacaugcggacuccugggccuugucuccuuccugcuccugugugggagaucuugcagcacgaccuauaaaggaguguacgaacugcagacacucgagcuggacauggcgucccuuaacaugaccaugccucugucuuguacaaagaauaacagccaucacuauaucaugguuggcaaugaaaccgggcucgagcugacacuuaccaacacguccauuaucaaucauaaauuuugcaaccugucugaugcucacaagaaaaaucucuacgaccaugcccugaugagcauuaucuccaccuuccaccugagcauuccgaacuuuaaucaguaugaggccaugucuugugauuucaacggaggccggaucuccgugcaguacaaucucagccacucuuaugcugucgacgccgcuaaccauugcggcacaauugccaauggggugcugcaaaccuuuaugcgcauggcguggggaggcuccuacaucgcccuugauagcgggugcggaucuugggacuguaucaugacauccuaccaguaucugauuauccagaacaccacgugggaagaucacugccaguucagcagacccuccccuauuggcuaccucgggcugcuuucucaacggacacgcgacaucuauauuagcagacggcgccggggaaccuuuacauggacccuguccgauagcgagggcaacgaaacccccggcggguacugucugacacgcuggaugcucaucgaggcugagcugaagugcuucggaaauacggccguugcuaaauguaacgaaaagcaugacgaggaauuuugcgauaugcuuagacuguucgacuuuaauaaacaggccauccggcgccucaagacccccgcgcagaugucuauucagcugaucaacaaagccgugaaugcucuuauuaacgaucaacugaucaugaagaaucaccucagagacauuaugugcaucccuuauugcaacuacuccaaguauugguaccugaaucacacagucaccgggaaaacaagccugccccgguguuggcucgugucuaacggaagcuaccugaaugaaacccauuucuccgacgauaucgagcagcaggccgacaacaugauuacggagcuucugcaaaaggaauauaucgaucgccagggcaaaacaccucucgggcugguggaccuguucgucuuuucuaccagcuucuaccuuauuuccaucuuucuccaccugguuaagauuccgacccauagacacaucacaggaaaacccugcccuaagccccaucggcugaaucacaugggcauuuguagcugcggccucuauaaccacccuggggugcccgugaaauggaagcgcugaggacuagucccuguucccagagcccacuuuuuuuucuuuuuuugaaauaaaauagccugucuuucagaucucaaaggcucuuuucagagccaccaaaaaaaaaaaaaaaaaaaaaaaaaaaaaaaaaaaaaaaaaaaaaaaaaaaaaaaaaaaaaaaaaaaaaaaaaaaaaaaaaaaaaaaaaaaaaaaaaaaaa

SEQ ID NO: 15444 - RNA, 1745 nt, Artificial Sequence
  mRNA product Design a-1 (hSL-A100) comprising derived and/or modified sequence from LASV(Lassa virus/H.sapiens-wt/NGA/2016/ISTH_0017;Clade II)__AVO03567__GPCmut1 (opt5)
aggagagucccgcagucggcguccagcggcucugcuuguucgugugugugucguugcaggccuuauucaagcuuaccaugggccagaucauuaccuucuuucaagaggugccccacgucaucgaagagguuaugaacauugugcugaucgcccucagccugcuugcuauucugaaggggaucuacaauguggccacaugcggacucuucggccuggucuccuuucuucugcucugugggagaucuugcagcacgaccuauaaaggaguguacgaacugcagacacuggagcucgacauggcgucccugaacaugaccaugccucuuucuuguacaaagaauaacagccaucacuauaucaugguuggcaaugaaaccgggcuggagcucacacugaccaacacguccauuaucaaucauaaauucugcaaccuuucugaugcucacaagaaaaaucuguacgaccaugcccucaugagcauuaucuccaccuuucaccugagcauuccgaacuucaaucaguaugaggccaugucuugugauuuuaacggaggcaagaucuccgugcaguacaaucugagccacacauaugcuauugacgccgcuaaccauugcggcaccaucgccaaugggguccuccaaacauucaugcggauggcguggggaggcucuuacaucgcccuggauuccgggugcggaagcugggacuguauuaugaccucuuaccaguaucuuaucauucagaacacgacaugggaagaucacugccaguuuucccgccccagcccuaucggcuaccuggggcuccugucccaaagaacccgggacauuuauaucucucgcagacgccggggaacauucaccuggacccucagcgauuccgagggcaacgaaacacccggcggguacugucugacgcgguggaugcugaucgaggcugagcucaaaugcuuuggaaauaccgccguggcuaaguguaacgaaaaacaugacgaggaguucugcgauaugcugcgccuuuuugacuucaauaagcaggccauuagacggcugaaaacacccgcgcagaugagcauccagcucauuaacaaggccguuaaugcucugaucaacgaucaacuuauuaugaagaaucaucugcgcgacaucaugugcaucccuuauugcaacuacucuaaauauugguaccucaaucacaccgugacagggaagaccucccugcccagauguuggcuggucagcaacggaucuuaccucaaugaaacgcacuucagcgacgauauugagcagcaggccgacaacaugaucacagagcugcuucaaaaagaauauauggaucggcagggcaagaccccucuggggcucguggaccuguuuguguucuccaccucuuuuuaccugauuagcaucuuccuucaccucguccgcauuccgacacauagacacguuaucggaaaacccugcccuaagccccaucggcugaaucacaugggcauuuguuccugcggccuguauaaacacccuggggugcccgugaaguggaagcgcugaggacuagucccuguucccagagcccacuuuuuuuucuuuuuuugaaauaaaauagccugucuuucagaucucaaaggcucuuuucagagccaccaaaaaaaaaaaaaaaaaaaaaaaaaaaaaaaaaaaaaaaaaaaaaaaaaaaaaaaaaaaaaaaaaaaaaaaaaaaaaaaaaaaaaaaaaaaaaaaaaaaaa

SEQ ID NO: 15445 - RNA, 1745 nt, Artificial Sequence
  mRNA product Design a-1 (hSL-A100) comprising derived and/or modified sequence from LASV(Lassa virus/H.sapiens-wt/NGA/2018/ISTH_0959;Clade II)__AVV65099__GPCmut1 (opt5)
aggagagucccgcagucggcguccagcggcucugcuuguucgugugugugucguugcaggccuuauucaagcuuaccaugggccagaucauuaccuucuuucaagaggugccccacgucaucgaagagguuaugaacauugugcugaucgcccucagccugcuugcuauucugaaggggaucuacaauguggucacaugcggacucuucggccugguguccuuucuucugcucugugggagaucuugcagcacgaccuauaaaggaguuuacgaacugcagacacuggagcucgacauggccucccugaacaugaccaugccucuuucuuguacaaagaauaacagccaucacuauaucauggugggcaaugaaaccgggcuggagcucacacugaccaacacguccauuaucaaucauaaauucugcaaccuuucugaugcgcacaagaaaaaucuguacgaccaugcucucaugagcauuaucuccaccuuucaccugagcauuccgaacuucaaucaguaugaggccaugucuugugauuuuaacggaggcaagaucuccguccaguacaaucugagccacgccuaugcuauugacgccgcuaaccauugcggcacaaucgccaauggggugcuccaaaccuucaugcggauggcguggggaggcucuuacaucgcccuggauuccgggugcggaagcugggacuguauuaugacaucuuaccaguaucuuaucauucagaacaccacgugggaagaucacugccaguuuucccgccccagcccuaucggcuaccuggggcuccugucccaaagaacacgggacauuuauaucucucgcagacgccggggaaccuucacauggacccucagcgauuccgagggcaacgaaacccccggcggguacugucugacacgguggaugcugaucgaggcugagcucaaaugcuuuggaaauacggccguugcuaaguguaacgaaaaacaugacgaggaguucugcgauaugcugcgccuuuuugacuucaauaagcaggccauuagacggcugaaaacccccgcgcagaugagcauccagcucauuaacaaggccgugaaugcucugaucaacgaucaacuuauuaugaagaaucaucugcgcgacaucaugugcaucccuuauugcaacuacucuaaauauugguaccucaaucacacagucaccgggaagacaucccugcccagauguuggcuggugagcaacggaucuuaccucaaugaaacccacuucagcgacgauauugagcagcaggccgacaacaugaucacggagcugcuucaaaaagaauauauugaucggcagggcaagacaccucuggggcucguggaccuguuugucuucuccaccucuuuuuaccugaucagcauuuuccuucaccucguuaaaaucccgacccaucgccacgugauuggaaagcccugcccuaaaccccauagacugaaucacaugggcaucuguuccugcggccuguauaagcacccuggggugcccgucaaguggaaacggugaggacuagucccuguucccagagcccacuuuuuuuucuuuuuuugaaauaaaauagccugucuuucagaucucaaaggcucuuuucagagccaccaaaaaaaaaaaaaaaaaaaaaaaaaaaaaaaaaaaaaaaaaaaaaaaaaaaaaaaaaaaaaaaaaaaaaaaaaaaaaaaaaaaaaaaaaaaaaaaaaaaaa

SEQ ID NO: 15446 - RNA, 1745 nt, Artificial Sequence
  mRNA product Design a-1 (hSL-A100) comprising derived and/or modified sequence from LASV(LASV003-NIG-2008;Clade II)__AIT17580__GPCmut1 (opt5)
aggagagucccgcagucggcguccagcggcucugcuuguucgugugugugucguugcaggccuuauucaagcuuaccaugggccagaucauuaccuucuuucaagaggugccccacgucaucgaagagguuaugaacauugugcugaucgcccucagccugcuugcuauucugaaggggaucuacaauguggccacaugcggacucuucggccuggucuccuuucuucugcucugugggagaucuugcagcacgaccuauaaaggaguguacgaacugcagacacuggagcucgacauggcgucccugaacaugaccaugccucuuucuuguacaaagaauaacagccaucacuauaucaugguuggcaaugaaaccgggcuggagcucacacugaccaacacguccauuaucaaucauaaauucugcaaccuuucugaugcucacaagaaaaaucuguacgaccaugcccucaugagcauuaucuccaccuuucaccugagcauuccgaacuucaaucaguaugaggccaugucuugugauuuuaacggaggcaagaucuccgugcaguacaaucugagccacacauaugcugucgacgccgcuaaccauugcggcaccauugccaauggggugcuccaaacauucaugcggauggcguggggaggcucuuacaucgcccuggauuccgggugcggaagcugggacuguaucaugaccucuuaccaguaucuuauuauccagaacacgacaugggaagaucacugccaguuuucccgccccagcccuauuggcuaccuggggcuccugucccaaagaacccgggacaucuauauuucucgcagacgccggggaacauucaccuggacccucagcgauuccgagagcaacgaaacacccggcggcuacugucugacgcgguggaugcugaucgaggcugagcucaaaugcuuugggaauaccgccguugcuaaguguaacgaaaaacaugacgaggaguucugcgauaugcugcgccuuuuugacuucaauaagcaggccaucagacggcugaaagcgcccgcccagaugucuauucagcucaucaacaaggcugugaaugcccugauuaacgaucaacuuaucaugaagaaucaucugcgcgacauuaugugcaucccuuauugcaacuacuccaaauauugguaccucaaucacacagucaccggcagaacaagccugccccgguguuggcuggugucuaacgggagcuaccucaaugaaacccacuucuccgacgauaucgagcagcaggcugacaacaugauuacggagcugcuucaaaaggaauauauggaucgccagggaaaaacaccucugggccucguggaccuguuugucuucucuaccagcuuuuaccugaucuccauuuuccuucaccucguuaagaucccgacccauagacacgugauugggaaacccugcccuaagccccaucggcugaaucacaugggaaucuguagcugcggccuguauaaacacccuggcgugcccgucaaguggaagcgcugaggacuagucccuguucccagagcccacuuuuuuuucuuuuuuugaaauaaaauagccugucuuucagaucucaaaggcucuuuucagagccaccaaaaaaaaaaaaaaaaaaaaaaaaaaaaaaaaaaaaaaaaaaaaaaaaaaaaaaaaaaaaaaaaaaaaaaaaaaaaaaaaaaaaaaaaaaaaaaaaaaaaa

SEQ ID NO: 15447 - RNA, 1745 nt, Artificial Sequence
  mRNA product Design a-1 (hSL-A100) comprising derived and/or modified sequence from LASV(LASV035-NIG-2009;Clade II)__AIT17588__GPCmut1 (opt5)
aggagagucccgcagucggcguccagcggcucugcuuguucgugugugugucguugcaggccuuauucaagcuuaccaugggccagaucauuaccuucuuucaagaggugccccacgucaucgaagagguuaugaacauugugcugaucgcccucagccugcuugcuauucugaaggggaucuacaauguggccacaugcggacucuucggccuggucuccuuucuucugcucugugggagaucuugcagcacgaccuauaaaggaguguacgaacugcagacacuggagcucgacauggcgucccugaacaugaccaugccucuuucuuguacaaagaauaacagccaucacuauaucaugguuggcaaugaaaccgggcuggagcucacacugaccaacacguccauuaucaaucauaaauucugcaaccuuucugaugcucacaagaaaaaucuguacgaccaugcccucaugagcauuaucuccaccuuucaccugagcauuccgaacuucaaucaguaugaggccaugucuugugauuuuaacggaggcaagaucuccgugcaguacaaucugagccacgcuuaugccgucgacgcugccaaccauugcggcacaauugcgaauggggugcuccaaaccuucaugcggauggccuggggaggcucuuacaucgcucuggauuccgggugcggaagcugggacuguaucaugacaucuuaccaguaucuuauuauccagaacaccacgugggaagaucacugccaguuuucccgccccagcccuauuggcuaccuggggcuccugucccaaagaacacgggacaucuauauuucucgcagacgccggggaaccuucacauggacccucagcgauuccgagggcaacgaaacccccggcggguacugucugacacgguggaugcugaucgaggccgagcucaaaugcuuuggaaauacggcuguugccaaguguaacgaaaaacaugacgaggaguucugcgauaugcugcgccuuuuugacuucaauaagcaggcgaucagacggcugaaagcccccgcucagaugagcauucagcucaucaacaaggccgugaaugcucugauuaacgaucaacuuaucaugaagaaucaucugcgcgacauuaugugcaucccuuauugcaacuacucuaaauauugguaccucaaucacaccgucacagggaagaccucccugcccagauguuggcuggugagcaacggaucuuaccucaaugaaacacacuucagcgacgauaucgagcagcaggccgacaacaugauuaccgagcugcuucaaaaagaauauaucgaucggcagggcaagacgccucuggggcucguggaccuguuugucuucuccacaucuuuuuaccugauuagcaucuuccuucaccucguuaaaauuccgacccaucgccacgugaucggaaagcccugcccuaaaccccauagacugaaucacaugggcauuuguuccugcggccuguauaagcacccuggggugcccgucaaguggaaacggugaggacuagucccuguucccagagcccacuuuuuuuucuuuuuuugaaauaaaauagccugucuuucagaucucaaaggcucuuuucagagccaccaaaaaaaaaaaaaaaaaaaaaaaaaaaaaaaaaaaaaaaaaaaaaaaaaaaaaaaaaaaaaaaaaaaaaaaaaaaaaaaaaaaaaaaaaaaaaaaaaaaaa

SEQ ID NO: 15448 - RNA, 1745 nt, Artificial Sequence
  mRNA product Design a-1 (hSL-A100) comprising derived and/or modified sequence from LASV(LASV1000-NIG-2009;Clade II)__AIT17782__GPCmut1 (opt5)
aggagagucccgcagucggcguccagcggcucugcuuguucgugugugugucguugcaggccuuauucaagcuuaccaugggccagaucauuaccuucuuucaagaggugccccacgucaucgaagagguuaugaacauugugcugaucgcccucagccugcuugcuauucugaaggggaucuacaauguggccacaugcggacucuucggccuggucuccuuucuucugcucugugggagaucuugcagcacgaccuauaaaggaguguacgaacugcagacacuggagcucgacauggcgucccugaacaugaccaugccucuuucuuguacaaagaauaacagccaucacuauaucaugguuggcaaugaaaccgggcuggagcucacacugaccaacacguccauuaucaaucauaaauucugcaaccuuucugaugcucacaagaaaaaucuguacgaccaugcccucaugagcauuaucuccaccuuucaccugagcauuccgaacuucaaucaguaugaggccaugucuugugauuuuaacggaggcaagaucuccgugcaguacaaucugagccacacauaugcugucgacgccgcuaaccauugcggcaccauugccaauggggugcuccaaacauucaugcggauggcguggggaggcucuuacaucgcccuggauuccgggugcggaagcugggacuguaucaugaccucuuaccaguaucuuauuauccagaacacgacaugggaagaucacugccaguuuucccgccccagcccuauuggcuaccuggggcuccugucccaaagaacccgggacaucuauauuucucgcagacgccggggaacauucaccuggacccucagcgauuccgagggcaacgaaacacccggcggguacugucugacgcgguggaugcugaucgaggcugagcucaaaugcuuuggaaauaccgccguugcuaaguguaacgaaaaacaugacgaggaguucugcgauaugcugcgccuuuuugacuucaauaagcaggccaucaaaagacugaagacacccgcgcagaugagcauucagcucaucaacaaggccgugaaugcucugauuaacgaucaacuuaucaugaaaaaucaucugcgggacauuaugugcaucccuuauugcaacuacucuaaguauugguaccucaaucacaccgucacagggaaaaccucccugccccgcuguuggcuggugagcaacggaucuuaccucaaugaaacgcacuucagcgacgauaucgagcagcaggccgacaacaugauuacagagcugcuucaaaaggaauauaucgauagacagggcaaaaccccucuggggcucguggaccuguuugucuucuccaccucuuuuuaccugauuagcaucuuccuucaccucguuaagauuccgacacaucggcacguggugggaaaacccugcccuaagccccaucgccugaaucacaugggcaucuguuccugcggccuguauaagcacccugggguccccgugaaauggaagagaugaggacuagucccuguucccagagcccacuuuuuuuucuuuuuuugaaauaaaauagccugucuuucagaucucaaaggcucuuuucagagccaccaaaaaaaaaaaaaaaaaaaaaaaaaaaaaaaaaaaaaaaaaaaaaaaaaaaaaaaaaaaaaaaaaaaaaaaaaaaaaaaaaaaaaaaaaaaaaaaaaaaaa

SEQ ID NO: 15449 - RNA, 1745 nt, Artificial Sequence
  mRNA product Design a-1 (hSL-A100) comprising derived and/or modified sequence from LASV(LASV221-NIG-2010;Clade II)__AIT17624__GPCmut1 (opt5)
aggagagucccgcagucggcguccagcggcucugcuuguucgugugugugucguugcaggccuuauucaagcuuaccaugggccagaucauuaccuucuuucaagaggugccccacgucaucgaagagguuaugaacauugugcugaucgcccucagccugcuugcuauucugaaggggaucuacaauguggccacaugcggacucuucggccuggucuccuuucuucugcucugugggagaucuugcagcacgaccuauaaaggaguguacgaacugcagacacuggagcucgacauggcgucccugaacaugaccaugccucuuucuuguacaaagaauaacagccaucacuauaucaugguuggcaaugaaaccgggcuggagcucacacugaccaacacguccauuaucaaucauaaauucugcaaccuuucugaugcucacaagaaaaaucuguacgaccaugcccucaugagcauuaucuccaccuuucaccugagcauuccgaacuucaaucaguaugaggccaugucuugugauuuuaacggaggcaagaucuccgugcaguacaaucugagccacacauaugcuauugacgccgcuaaccauugcggcaccaucgccaaugggguccuccaaacauucaugcggauggcguggggaggcucuuacaucgcccuggauuccgggugcggaagcugggacuguauuaugaccucuuaccaguaucuuaucauucagaacacgacaugggaagaucacugccaguuuucccgccccagcccuaucggcuaccuggggcuccugucccaaagaacccgggacauuuauaucucucgcagacgccggggaacauucaccuggacccucagcgauuccgagggcaacgaaacacccggcggguacugucugacgcgguggaugcugaucgaggcugagcucaaaugcuuuggaaauaccgccguggcuaaguguaacgaaaaacaugacgaggaguucugcgauaugcugcgccuuuuugacuucaauaagcaggccauuagacggcugaaaacacccgcgcagaugagcauccagcucauuaacaaggccguuaaugcucugaucaacgaucaacuuauuaugaagaaucaucugcgcgacaucaugugcaucccuuauugcaacuacucuaaauauugguaccucaaucacaccgugacagggaagaccucccugcccagauguuggcuggucagcaacggaucuuaccucaaugaaacgcacuucagcgacgauauugagcagcaggccgacaacaugaucacagagaugcugcaaaaagaauauauggaucggcagggcaagaccccucuugggcugguggaccucuuuguguucuccaccucuuuuuaccugauuagcaucuuccugcaccuugucaaaauuccgacacaucgccacguuaucggaaagcccugcccuaaaccccauagacucaaucacaugggcauuuguuccugcggccuguauaagcacccuggggugcccgugaaguggaaacggugaggacuagucccuguucccagagcccacuuuuuuuucuuuuuuugaaauaaaauagccugucuuucagaucucaaaggcucuuuucagagccaccaaaaaaaaaaaaaaaaaaaaaaaaaaaaaaaaaaaaaaaaaaaaaaaaaaaaaaaaaaaaaaaaaaaaaaaaaaaaaaaaaaaaaaaaaaaaaaaaaaaaa

SEQ ID NO: 15450 - RNA, 1745 nt, Artificial Sequence
  mRNA product Design a-1 (hSL-A100) comprising derived and/or modified sequence from LASV(LASV237-NIG-2010;Clade II)__AIT17638__GPCmut1 (opt5)
aggagagucccgcagucggcguccagcggcucugcuuguucgugugugugucguugcaggccuuauucaagcuuaccaugggccagaucauuaccuucuuucaagaggugccccacgucaucgaagagguuaugaacauugugcugaucgcccucagccugcuugcuauucugaaggggaucuacaauguggccacaugcggacucuucggccuggucuccuuucuucugcucugugggagaucuugcagcacgaccuauaaaggaguguacgaacugcagacacuggagcucgacauggcgucccugaacaugaccaugccucuuucuuguacaaagaauaacagccaucacuauaucaugguuggcaaugaaaccgggcuggagcucacacugaccaacacguccauuaucaaucauaaauucugcaaccuuucugaugcucacaagaaagaccuguacgaucaugcccucaugagcauuaucuccaccuuucaccugagcauuccgaauuucaaccaguaugaggccaugucuugugacuuuaauggaggcaagaucuccgugcaguacaaccugagccacacauaugcugucgaugccgcuaaucauugcggcaccauugccaacggggugcuccaaacauucaugcggauggcguggggaggcucuuacaucgcccuggacuccgggugcggaagcugggauuguaucaugaccucuuaccaguaucuuauuauccagaauacgacaugggaagaccacugccaguuuucccgccccagcccuauuggcuaccuggggcuccugucccaaagaacccgggauaucuauauuucucgcagacgccggggaacauucaccuggacccucagcgacuccgagggcaacgaaacacccggcggguacugucugacgcgguggaugcugaucgaggcugagcucaaaugcuuuggaaacaccgccguugcuaaguguaaugaaaaacaugaugaggaguucugcgacaugcugcgccuuuuugauuucaacaagcaggccaucagacggcugaaaacacccgcgcagaugagcauucagcucaucaauaaggccgugaacgcucugauuaaugaccaacuuaucaugaagaaccaucugcgcgacauuaugugcaucccuuauugcaauuacucuaaauauugguaccucaaccacaccgucacagggaagaccucccugcccagauguuggcuggugagcaauggaucuuaccucaacgaaacgcacuucagcgaugacaucgagcagcaggccgauaauaugauuacagagcugcuucaaaaagaauauauggaccggcagggcaagaccccucuggggcucguggaucuguuugucuucuccaccucuuuuuaccugaucagcauuuuccuucaccucaucaaaauuccgacacaucgccacaucaccggaaagcccugcccuaaaccccauagacugaaccacaugggcauuuguuccugcggccuguauaagcacccugggguucccgugaaguggaaacggugaggacuagucccuguucccagagcccacuuuuuuuucuuuuuuugaaauaaaauagccugucuuucagaucucaaaggcucuuuucagagccaccaaaaaaaaaaaaaaaaaaaaaaaaaaaaaaaaaaaaaaaaaaaaaaaaaaaaaaaaaaaaaaaaaaaaaaaaaaaaaaaaaaaaaaaaaaaaaaaaaaaaa

SEQ ID NO: 15451 - RNA, 1745 nt, Artificial Sequence
  mRNA product Design a-1 (hSL-A100) comprising derived and/or modified sequence from LASV(LASV253-NIG-2011;Clade II)__AIT17670__GPCmut1 (opt5)
aggagagucccgcagucggcguccagcggcucugcuuguucgugugugugucguugcaggccuuauucaagcuuaccaugggccagaucauuaccuucuuucaagaggugccccacgucaucgaagagguuaugaacauugugcugaucgcccucagccugcuugcuauucugaaggggaucuacaauguggccacaugcggacucuucggccuggucuccuuucuucugcucugugggagaucuugcagcacgaccuauaaaggaguguacgaacugcagacacuggagcucgacauggcgucccugaacaugaccaugccucuuucuuguacaaagaauaacagccaucacuauaucaugguuggcaaugaaaccgggcuggagcucacacugaccaacacguccauuaucaaucauaaauucugcaaccuuucugaugcucacaagaaaaaucuguacgaccaugcccucaugagcauuaucuccaccuuucaccugagcauuccgaacuucaaucaguaugaggccaugucuugugauuuuaacggaggcaagaucuccgugcaguacaaucugagccacacauaugcugucgacgccgcuaaccauugcggcaccauugccaauggggugcuccaaacauucaugcggauggcguggggaggcucuuacaucgcccuggauuccgggugcggaagcugggacuguaucaugaccucuuaccaguaucuuauuauccagaacacgacaugggaagaucacugccaguuuucccgccccagcccuauuggcuaccuggggcuccugucccaaagaacccgggacaucuauauuucucgcagacgccggggaacauucaccuggacccucagcgauuccgagggcaacgaaacacccggcggguacugucugacgcgguggaugcugaucgaggcugagcucaaaugcuuuggaaauaccgccguugcuaaguguaacgaaaaacaugacgaggaguucugcgauaugcugcgccuuuuugacuucaauaagcaggccaucagacggcugaaagcgcccgcccagaugagcauucagcucaucaacaaggcugugaaugcccugauuaacgaucaacuuaucaugaagaaucaucugcgcgacauuaugugcaucccuuauugcaacuacucuaaauauugguaccucaaucacacagucaccgggagaacaucccugccccgguguuggcuggugagcaacggaucuuaccucaaugaaacccacuucagcgacgauaucgagcagcaggcugacaacaugauuacggagcugcuucaaaaggaauauaucgaucgccagggcaaaacaccucuggggcucguggaccuguuugucuucuccaccucuuuuuaccugauuagcaucuuccuucaccucguuaagauuccgacccauagacacaucauuggaaaacccugcccuaagccccaucggcugaaucacaugggcaucuguuccugcggccuguauaaacacccuggggugcccgugaaguggaagcgcugaggacuagucccuguucccagagcccacuuuuuuuucuuuuuuugaaauaaaauagccugucuuucagaucucaaaggcucuuuucagagccaccaaaaaaaaaaaaaaaaaaaaaaaaaaaaaaaaaaaaaaaaaaaaaaaaaaaaaaaaaaaaaaaaaaaaaaaaaaaaaaaaaaaaaaaaaaaaaaaaaaaaa

SEQ ID NO: 15452 - RNA, 1745 nt, Artificial Sequence
  mRNA product Design a-1 (hSL-A100) comprising derived and/or modified sequence from LASV(LASV254-NIG-2011;Clade II)__AIT17674__GPCmut1 (opt5)
aggagagucccgcagucggcguccagcggcucugcuuguucgugugugugucguugcaggccuuauucaagcuuaccaugggccagaucauuaccuucuuucaagaggugccccacgucaucgaagagguuaugaacauugugcugaucgcccucagccugcuugcuauucugaaggggaucuacaauguggccacaugcggacucuucggccuggucuccuuucuucugcucugugggagaucuugcagcacgaccuauaaaggaguguacgaacugcagacacuggagcucgacaugaccaaccugaauaugacaaugccucuuuccuguaccaagaacaauucucaucacuauaucaugguuggcaacgaaacagggcuggagcucacccugacgaauaccagcauuaucaaccauaaauucugcaaucuuuccgaugcgcacaagaaaaaccuguacaaucaugcucucaugucuauuaucagcacauuucaccuguccauuccgaacuucaaucaguaugaggccaugagcugugacuuuaacggaggcaagaucucugugcaguacaaucugucccacagcuaugccgucgaugcugccaaccauugcggcaccauugcuaacggggugcuccaaacauucaugcggauggccuggggaggcucuuacaucgcgcuggacuccgggugcggaaauugggauuguaucaugaccagcuaccaguaucuuauuauccagaacacgacaugggaagaccacugccaguuuucucgccccuccccuauuggcuaccuggggcuccugagccaaagaacccgggauaucuauauuucccgcagacgccggggaacauucaccuggacccucucugacagcgagggcaaugaaacacccggcggguacugucugacgcgguggaugcugaucgaggccgagcucaaaugcuuuggaaacaccgcuguugccaaguguaaugaaaaacaugaugaggaguucugcgacaugcugcgccuuuuugauuucaacaagcaggcuaucagacggcugaaaacacccgcccaggcgaauauucagcucaucaacaaggccgugaaugcucugauuaacgaccaacuuaucaugaagaaucaucugcgcgauauuaugugcaucccuuauugcaacuacuccaaauauugguaccucaaucacaccgucacagggaagaccagccugcccagauguuggcuggugucuaacggauccuaccucaaugaaacgcacuucagcgacgacaucgagcagcaggccgauaacaugauuacagagcugcuucaaaaagaauauauggaccggcagggcaagaccccucuggggcucguggaucuguuugucuucucuaccagcuuuuaccugaucuccauuuuccuucaccucguuaaaaucccgacacaucgccacgugauuggaaagcccugcccuaaaccccauagacugaaccacaugggcaucuguucuugcggccuguauaagcacccuggggugcccgucaaguggaaacggugaggacuagucccuguucccagagcccacuuuuuuuucuuuuuuugaaauaaaauagccugucuuucagaucucaaaggcucuuuucagagccaccaaaaaaaaaaaaaaaaaaaaaaaaaaaaaaaaaaaaaaaaaaaaaaaaaaaaaaaaaaaaaaaaaaaaaaaaaaaaaaaaaaaaaaaaaaaaaaaaaaaaa

SEQ ID NO: 15453 - RNA, 1745 nt, Artificial Sequence
  mRNA product Design a-1 (hSL-A100) comprising derived and/or modified sequence from LASV(Nig08-A19;Clade III)__ADU56618__GPCmut1 (opt5)
aggagagucccgcagucggcguccagcggcucugcuuguucgugugugugucguugcaggccuuauucaagcuuaccaugggccagaucgugaccuucuuucaagaggucccccacguuauugaagaggugaugaacaucgugcugauugcccucagcauccuggcuauucuuaaggggcuguacaauaucgccacaugcggacucaucggccuggucacguuccuucugcucuccgggagaucuuguagcaugaccuauaaaggaguguacgaacugcagacacuggagcucaacaugaauacccugaacaugacaaugccucuuuccugcaccaagaauaacucucaucacuauauuaugguuggcaaugaaacagggcuggagcucacccugacgaacaccagccuucugcaucacaaauuuuguaaucucuccgacgcgcauaagaaaaaccuguacgaucacacacugaugucuaucauuagcaccuuccaccucuccaucccgaauuuuaaccaguaugaggcuaugagcugcgacuucaauggaggcaagauuacagugcaguacaaccugucucauuccuaugccaucgaugccgcuaaucacuguggcaccgucgccaacggggugcuucaaacguuuaugcggauggcuuggggaggcagcuacauugcccuggacucugggugcggaaagugggauugcaucaugacauccuaccaguaucucaucauucagaacaccacaugggaagaccauugucaguucagcagacccucuccuaucggcuaccuggggcuucugucccaacggacccgcgauauuuauaucagcagacggcgccggggaaccuuuacauggacgcuguccgacucugagggcaaugaaacccccggcggguacugccucacacgcuggaugcugauugaggcggagcuuaaauguuucggaaacaccgccguugcuaagugcaaugaaaaacacgaugaggaauuuugugacaugcugagacucuucgauuuuaacaagcaggccauccggcgccugaaagcucccgcccagaugagcauccagcuuauuaauaaggcggugaacgcccugaucaaugaccaacucauuaugaagaaccaccugagagauaucaugugcauuccuuauugcaauuacuccaaauauugguaccugaaccauacaagcaccgggcggacgucucucccccgcugcuggcuggucuccaauggaagcuaccuuaacgaaacacacuucucugacgacaucgagcagcaggcugauaauaugaucaccgagaugcugcaaaaggaauaucucgacagacagggcaaaaccccucuggggcugguggaucuuuucguguuuagcacauccuucuaccucauuucuaucuuucugcaucuggucaagauuccgacccaccggcauaucguuggaaaacccuguccuaagccccaccgccucaaccacaugggcauuugcagcuguggccuguauaaacagccuggggugcccgugagauggaagcggugaggacuagucccuguucccagagcccacuuuuuuuucuuuuuuugaaauaaaauagccugucuuucagaucucaaaggcucuuuucagagccaccaaaaaaaaaaaaaaaaaaaaaaaaaaaaaaaaaaaaaaaaaaaaaaaaaaaaaaaaaaaaaaaaaaaaaaaaaaaaaaaaaaaaaaaaaaaaaaaaaaaaa

SEQ ID NO: 15454 - RNA, 1748 nt, Artificial Sequence
  mRNA product Design a-1 (hSL-A100) comprising derived and/or modified sequence from LASV(G1180-SLE-2010;Clade IV)__AIT17168__GPCmut1 (opt5)
aggagagucccgcagucggcguccagcggcucugcuuguucgugugugugucguugcaggccuuauucaagcuuaccaugggccagaucgugaccuucuuucaagaggucccccacguuauugaagaggugaugaacaucgugcugauugcccucagcauccuggcuguccuuaaggggcuguacaauuucgccacaugcggacucgugggccugcuuacguuucugcuccugugugggagauccugcaccgcgucucgguauaaaggaguuuacgaacugcagacacucgagcugaacauggaaacccuuaauaugacaaugccucugagcuguaccaagaacaauucccaucacuauauuauggugggcaacgagacagggcucgagcugacccuuacgaauaccucuaucaucaaccauaaauucugcaaucugagcgacgcucacaagaaaaaccucuacgaucaugcccugauguccauuaucucuacauuucaccugagcauuccgaauuucaaccaguaugaagccauguccugugacuuuaauggaggcaagaucagcguccaguacaaccucucucacuccuaugcuggcgaugccgcuaaucauugcgggaccguggccaacggaguucugcaaacauucaugcgcauggcguggggcgggagcuacauugcccuugacucuggaugcggcuccugggauuguaucaugaccagcuaccaguaucugauuauccagaacacgacaugggaggaccauugccaguuuucuagacccuccccuaucggguaccucggacugcuuagccaacggacccgcgauauuuauaucuccagacggcgccggggcacauucaccuggacccugucugacagcgaaggcaaggauacacccgggggauacugucugacgcgcuggaugcucauugaggcugagcugaaaugcuuuggcaauaccgccguggcuaaguguaacgaaaaacacgacgaggaguucugcgauaugcuuagacuguuugacuucaauaagcaggccauccagcggcucaaagcgcccgcccagauguccauucaacugaucaacaaggcugucaaugcccuuaucaacgaucagcugauuaugaagaaucaccuccgcgacaucaugugcauuccuuauugcaacuacagcaaauauugguaccugaaucauacaaccacaggaaagaccucucugcccaaauguuggcucguguccaacggcagcuaccugaaugaaacgcacuucucugacgauaucgagcagcaagcugacaacaugauuacagagaugcuucagaaggaauauauggagagacaggggaaaaccccucugggacucguggaucuguuugucuucagcaccuccuuuuaccugaucucuaucuuccuucaucucguuaagauuccgacacaccggcauaucgugggcaaaagcugccccaagccucaccgccugaaucacaugggcauuuguuccugcgggcuguauaagcagcccggagugccugucaaauggaagagaugaggacuagucccuguucccagagcccacuuuuuuuucuuuuuuugaaauaaaauagccugucuuucagaucucaaaggcucuuuucagagccaccaaaaaaaaaaaaaaaaaaaaaaaaaaaaaaaaaaaaaaaaaaaaaaaaaaaaaaaaaaaaaaaaaaaaaaaaaaaaaaaaaaaaaaaaaaaaaaaaaaaaa

SEQ ID NO: 15455 - RNA, 1748 nt, Artificial Sequence
  mRNA product Design a-1 (hSL-A100) comprising derived and/or modified sequence from LASV(G1442-SLE-2011;Clade IV)__AIT17180__GPCmut1 (opt5)
aggagagucccgcagucggcguccagcggcucugcuuguucgugugugugucguugcaggccuuauucaagcuuaccaugggccagaucgugaccuucuuucaagaggucccccacguuauugaagaggugaugaacaucgugcugauugcccucagcauccuggcuguccuuaaggggcuguacaauguggccacaugcggacucauuggccugguuacguuccuucugcucugugggagauccugcaccacaacccuguauaaaggaguguacgaacugcagacacucgagcugaacauggaaacccuuaauaugacaaugccucugucuuguaccaagaacaauagccaucacuauauccgggucggcaacgagacggggcucgagcugacccuuacaaauaccuccaucauuaaccauaaauuuugcaaucugucugacgcgcacaagaaaaaccucuacgaucaugcucugaugagcaucauuuccacauuccaccugucuaucccgaauuuuaaccaguaugaagccaugagcugugacuucaauggaggcaagauuuccgugcaguacaaccucagccacucuuaugccggcgaugcugccaaucauugcgggaccguugcuaacggagugcugcaaacguuuaugcgcauggccuggggcggguccuacaucgcgcuugacagcggaugcggcaacugggauuguauuaugacaucuuaccaguaucugaucauccagaauaccacaugggacgaucacugccaguucucccggcccagcccuauuggguaccucggacugcuuucucaacgcaccagagacgucuauaucucccggcgccgccggggcaccuuuacauggacgcugagcgauuccgagggcaaggacacccccgggggauacugucugacaagauggaugcucauugaagccgagcugaaaugcuucggcaacaccgcuguggccaaguguaaugagaaacaugaugaagaguuuugcgacaugcuucggcuguucgauuuuaacaagcaggcuauccagcgccucaaagcccccgcgcagaugucuauucaacugaucaauaaggccgugaacgcucuuaucaaugaccagcugauuaugaagaaccaccucagagacaucaugugcauuccuuauugcaauuacagcaaauauugguaccugaacaauacagccaccggaaagacgucccugcccaaauguuggcucaucagcaacggcucuuaccugaaugagacacacuucuccgaugacauugaacaggaggcugauaacaugaucaccgagaugcuucaaaaggaauauauggagcggcaggggaaaaccccucugggacucgucgaccuguucguuuuuagcacaucuuucuaccugaucagcauuuuucuucaucucgugaagaucccgacccaccgccauauugugggcaaauccugccccaagccucacagacugaaucauaugggcaucuguucuugcgggcuguauaagcagcccggagucccugugcgguggaaacgcugaggacuagucccuguucccagagcccacuuuuuuuucuuuuuuugaaauaaaauagccugucuuucagaucucaaaggcucuuuucagagccaccaaaaaaaaaaaaaaaaaaaaaaaaaaaaaaaaaaaaaaaaaaaaaaaaaaaaaaaaaaaaaaaaaaaaaaaaaaaaaaaaaaaaaaaaaaaaaaaaaaaaa

SEQ ID NO: 15456 - RNA, 1748 nt, Artificial Sequence
  mRNA product Design a-1 (hSL-A100) comprising derived and/or modified sequence from LASV(G3010-SLE-2013;Clade IV)__AIT17344__GPCmut1 (opt5)
aggagagucccgcagucggcguccagcggcucugcuuguucgugugugugucguugcaggccuuauucaagcuuaccaugggccagaucgugaccuucuuucaagaggucccccacguuauugaagaggugaugaacaucgugcugauugcccucagcauccuggcuguccuuaaggggcuguacaauuucgccacaugcggacucgugggccugguuacguuucuucugcucugugggagauccugcaccacaucucuguauaaaggaguguacgaacugcagacccucgagcugaacauggaaacacuuaauaugaccaugccucugagcuguacaaagaacaauucccaucacuauauuauggucggcaacgagaccgggcucgagcugacgcuuaccaauacaucuaucaucaaccauaaauucugcaaucugagcgacgcgcacaagaaaaaccucuacaaucaugcucugauguccauuaucucuaccuuucaccugagcauuccgaacuucaaucaguaugaagccauguccugugauuuuaacggaggcaagaucagcgugcaguacaaucucucucacuccuaugccggcgacgcugccagccauugcgggacaguugcuaacggagugcugcaaaccuucaugcggauggccuggggcgggucuuacauugcgcuugauuccggaugcggcaagugggacuguaucaugacgagcuaucaguaccugauuauccagaacacaaccugggaggaucacugccaguuuucucgccccuccccuaucggguaucucggacugcuuagccaaagaacacgggacauuuacaucucccgcagacgccggggcaccuucaccuggacacugucugauagcgaaggcaaagacacgcccgggggauauugucugacccgguggaugcucauugaggccgagcugaagugcuuuggcaauacagcugucgccaaauguaacgaaaagcaugaugaggaguucugcgacaugcuucgccuguuugauuucaauaaacaggcuauccagagacucaagacccccgcccagauguccauucaacugaucaacaaggcggugaaugcccuuaucaacgaccagcugauuaugaaaaaucaccuccgggauaucaugugcauuccuuacugcaacuauagcaaguacugguaccugaaucacacaaccacgggaaaaacaucucugcccaaguguuggcucguguccaacggcagcuaucugaaugaaacccauuucucugacgacaucgagcagcaagcugauaacaugauuaccgagaugcuucagaaagaauacauggagcgccaggggaagacaccucugggacucgucgaccuguuuguuuucagcaccuccuuuuaucugaucucuaucuuccuucaccucgugaaaauuccgacacauagacacaucgugggcaagagcugccccaagccucaucggcugaaucacaugggcauuuguuccugcgggcuguacaaacagcccggagucccugugcgcuggaagagaugaggacuagucccuguucccagagcccacuuuuuuuucuuuuuuugaaauaaaauagccugucuuucagaucucaaaggcucuuuucagagccaccaaaaaaaaaaaaaaaaaaaaaaaaaaaaaaaaaaaaaaaaaaaaaaaaaaaaaaaaaaaaaaaaaaaaaaaaaaaaaaaaaaaaaaaaaaaaaaaaaaaaa

SEQ ID NO: 15457 - RNA, 1748 nt, Artificial Sequence
  mRNA product Design a-1 (hSL-A100) comprising derived and/or modified sequence from LASV(G502-SLE-2009;Clade IV)__AIT17126__GPCmut1 (opt5)
aggagagucccgcagucggcguccagcggcucugcuuguucgugugugugucguugcaggccuuauucaagcuuaccaugggccagaucgugaccuucuuucaagaggucccccacguuauugaagaggugaugaacaucgugcugauugcccucagcauccuggcuguccuuaaggggcuguacaauuucgccacaugcggacucgugggccugcuuacguuucugcuccugugugggagauccugcaccacaggacuguauaaaggcguuuacgaacuccagacccuggagcuuaacauggaaacacugaauaugaccaugccucucucuuguacaaagaacaauagccaucacuauauuaugguggggaacgagaccggacuggagcuuacgcugaccaauacauccaucaucaaccauaaauucugcaaucucucugacgcgcacaagaaaaaccuguacgaucaugcucugaugagcauuaucuccaccuuucaccucucuauuccgaauuucaaccaguaugaagccaugagcugugacuuuaauggcggcaagaucuccguccaguacaaccugagccacucuuaugccggggaugcugccgaccauugcggaacaguggcuaauggcguucuucaaaccuucaugcggauggccuggggaggguccuacauugcgcuggauagcggcugcgggagaugggacuguaucaugacgucuuaccaguaucucauuauccagaacacaaccugggaggaucacugccaguuuucccggcccagcccuaucggauaccugggccuucugucucaacgcacaagagacauuuauaucucccggcgccgccggggcaccuucaccuggacacugagcgauuccgaagggaaggacacgcccggaggcuacugucucaccagauggaugcugauugaggccgagcuuaaaugcuuugggaacacagcuguggccaaguguaaugaaaaacaugaugaggaguucugcgacaugcugcggcucuuugauuucaacaagcaggcuauccagcgccugaaagcccccgcgcagaugucuauucaacuuaucaauaaggccgucaacgcucugaucaaugaccagcucgugaugaagaaccaccugagagacauuaugugcaucccuuauugcaauuacagccgguauugguaccugaaccacaccacaaccggccgcacgucccuccccaaauguuggcuggugagcaaugggucuuaccuuaacgaaacacauuucuccgaugacauugagcagcaagccgauaauaugaucaccgagaugcugcagaaggaauauauggagagacagggaaaaaccccucucggccuggucgaccuguuuguuuucagcacaucuuuuuaccuuauuagcaucuuccuccaccuggugaagaucccgacccaucggcacauugugggcaaauccugccccaagccucaucgccugaaccacauggggaucuguucuugcggacucuauaaacagcccggcgucccugugaaguggaagagaugaggacuagucccuguucccagagcccacuuuuuuuucuuuuuuugaaauaaaauagccugucuuucagaucucaaaggcucuuuucagagccaccaaaaaaaaaaaaaaaaaaaaaaaaaaaaaaaaaaaaaaaaaaaaaaaaaaaaaaaaaaaaaaaaaaaaaaaaaaaaaaaaaaaaaaaaaaaaaaaaaaaaa

SEQ ID NO: 15458 - RNA, 1748 nt, Artificial Sequence
  mRNA product Design a-1 (hSL-A100) comprising derived and/or modified sequence from LASV(G733-SLE-2010;Clade IV)__AIT17154__GPCmut1 (opt5)
aggagagucccgcagucggcguccagcggcucugcuuguucgugugugugucguugcaggccuuauucaagcuuaccaugggccagaucgugaccuucuuucaagaggucccccacguuauugaagaggugaugaacaucgugcugauugcccucagcauccuggcuguccuuaaggggcuguacaauuucgccacaugcggaauugugggccucguuuccuuucugcuucugugugggagaucuugcacgaccagccucuauaaaggaguguacgaacugcagacacuggagcucaacauggaaacccugaauaugacaaugccucuuuccuguaccaagaacaauucucaucacuauaucauggucggcaacgagacagggcuggagcucacccugacgaauaccagcaucauuaaccauaaauucugcaaucuuuccgacgcgcacaagaaaaaccuguacgaucaugcucucaugucuaucauuagcacauuucaccuguccaucccgaauuucaaccaguaugaagccaugagcugugacuuuaauggaggcaagauuucugugcaguacaaccugucccacagcuaugccggcgaugcugccaaucauugcgggaccaucgcuaacggaguucuccaaacauucaugcggauggccuggggcgggucuuacauugcgcuggacuccggaugcgauagaugggacuguaucaugaccagcuaccaguaucuuaucauucagaacacgacaugggaggaucacugccaguuuucucggcccuccccuaucggcuaccuggggcuccugagccaacgcaccagagacauuuauaucucccggcgccgccggggaacauucaccuggacccucucugauagcgaaggcaaggacacacccggcggguacugucugacgagauggaugcugauugaggccgagcucaaaugcuuuggaaauaccgcuguggccaaguguaacgaaaaacaugaugaggaguucugcgacaugcugcggcuuuuugauuucaauaagcaggcuauccagcgccugaaagcccccgcgcagauguccauccaacucauuaacaaggccgucaaugcucugaucaacgaccagcuuauuaugaagaaucaccugagagacaucaugugcauuccuuauugcaacuacagcaaauauugguaccucaaucacacaaccacagggaagaccucucugcccaaauguuggcugguguccaacggaagcuaccucaaugaaacgcauuucucugaugacaucgagcagcaagccgauaacaugaucacagagaugcugcagaaggaauauauggagcggcagggcaaaaccccucuugggcugguggaccucuuugucuucagcaccuccuuuuaccugauuucuaucuuccugcaccuuguuaagauuccgacacaucgccacguggugggaaaaagcugccccaagccucauagacucaaucacaugggcaucuguuccugcggccuguaugggcagcccggagucccugugaaguggaaacggugaggacuagucccuguucccagagcccacuuuuuuuucuuuuuuugaaauaaaauagccugucuuucagaucucaaaggcucuuuucagagccaccaaaaaaaaaaaaaaaaaaaaaaaaaaaaaaaaaaaaaaaaaaaaaaaaaaaaaaaaaaaaaaaaaaaaaaaaaaaaaaaaaaaaaaaaaaaaaaaaaaaaa

SEQ ID NO: 15459 - RNA, 1748 nt, Artificial Sequence
  mRNA product Design a-1 (hSL-A100) comprising derived and/or modified sequence from MOPV/LASV reassortant(IGS-1;Clade IV)__AFY05576__GPCmut1 (opt5)
aggagagucccgcagucggcguccagcggcucugcuuguucgugugugugucguugcaggccuuauucaagcuuaccaugggccagaucgugaccuucuuucaagaggucccccacguuauugaagaggugaugaacaucgugcugauugcccucagcguccuggcugugcuuaaggggcuguacaauuucgccacaugcggacucguuggccuggugacguuucuucugcucugugggagauccugcaccacaucucuguauaaaggagucuacgaacugcagacccucgagcugaacauggaaacacuuaauaugaccaugccucugagcuguacaaagaacaauucccaucacuauaucauggugggcaacgagaccgggcucgagcugacgcuuaccaauacaucuauuaucaaccauaaauucugcaaucugagcgacgcgcacaagaaaaaccucuacgaucaugcucugauguccaucauuucuaccuuucaccugagcaucccgaauuucaaccaguaugaagccauguccugugacuuuaauggaggcaagauuagcguucaguacaaccucucucacuccuaugccggcgaugcugccaaucauugcgggacaguggcuaacggaguccugcaaaccuucaugcggauggccuggggcgggagcuacaucgcgcuugacucuggaugcggcaacugggauuguauuaugacguccuaccaguaucugaucauucagaauacaaccugggaggaccacugccaguuuagcagacccucuccuaucggguaccucggacugcuuucccaacggacacgcgauaucuauauuagcagacggcgccggggcaccuucaccuggacacuguccgacucugaaggcgaggauacgcccgggggauacugucugacccgcuggaugcucaucgaggccgaacugaagugcuuuggcaacacagcuguggccaaauguaaugagaagcaugacgaagaguucugcgauaugcuuagacuguuugacuucaacaaacaggcuauucagcggcucaaggcccccgcgcagaugagcauccaacugauuaauaaagccgugaacgcucuuaucaaugaucagcugaucaugaagaaccaccuccgcgacauuaugugcaucccuuauugcaauuacuccaaguauugguaccugaaccacaccacaaccggaagaacgagccugcccaaauguuggcucgucucuaauggcuccuaccugaacgagacacauuucagcgacgauauugagcagcaagccgacaauaugaucaccgaaaugcuucagaaggaguauauggaacggcaggggaaaaccccucugggacucguugaucuguuuguguucucuaccagcuuuuaccugauuuccaucuuccuucaccucgugaagaucccgacacaucgccacauugucggcaaaucuugccccaagccucauagacugaaccacaugggcaucuguagcugcgggcuguauaaacagcccggagugccuguuaaguggaagcggugaggacuagucccuguucccagagcccacuuuuuuuucuuuuuuugaaauaaaauagccugucuuucagaucucaaaggcucuuuucagagccaccaaaaaaaaaaaaaaaaaaaaaaaaaaaaaaaaaaaaaaaaaaaaaaaaaaaaaaaaaaaaaaaaaaaaaaaaaaaaaaaaaaaaaaaaaaaaaaaaaaaaa

SEQ ID NO: 15460 - RNA, 1748 nt, Artificial Sequence
  mRNA product Design a-1 (hSL-A100) comprising derived and/or modified sequence from LASV(LM765-SLE-2012;Clade IV)__AIT17814__GPCmut1 (opt5)
aggagagucccgcagucggcguccagcggcucugcuuguucgugugugugucguugcaggccuuauucaagcuuaccaugggccagaucgugaccuucuuucaagaggucccccacguuauugaagaggugaugaacaucgugcugauugcccucagcauccuggcuguccuuaaggggcuguacaauuucgccacaugcggacucgugggccugguuacguuucuucugcucugugggagauccugcaccacaucucuguauaaaggaguguacgaacugcagacccucgagcugaacauggaaacacuuaauaugaccaugccucugagcuguacaaagaacaauucccaucacuauauuauggucggcaacgagaccgggcucgagcugacgcuuaccaauacaucuaucaucgaccauaaauucugcaaccugagcgaugcgcaccggaagaaucucuacgaccaugcucugauguccauuaucucuaccuuucaccugagcauuccgaacuucaaucaguaugaagccauguccugugauuuuaacggaggcaaaaucagcgugcaguacaaucucucucacuccuaugccaaggacgcugccgaucauugcggcacaguugcuaacggggugcugcaaaccuucaugcgcauggccuggggaggcagcuacauugcgcuugacucugggugcggacggugggauuguaucaugacguccuaccaguaucugauuauccagaauacaaccugggaggaccacugccaguuuagccgccccucuccuaucggcuaccucgggcugcuuucccaaagaacacgggauauuuauaucagccgcagacgccggggaaccuucaccuggacacuguccgacucugaaggcaaggauacgcccggcggguacugucugacccgguggaugcucauugaggccgagcugaaaugcuuuggaaacacagcugucgccaaguguaacgaaaaacaugacgaggaguucugcgauaugcuucgccuguuugacuucaauaagcaggcuauccagagacucaaagcccccgcgcagaugagcauucaacugaucaacaaggccgugaaugcucuuaucaacgaccagcugauuaugaagaaucaccuccgggauaucaugugcauuccuuauugcaacuacuccaaauauugguaccugaaucacaccacaaccgggaagacgagccugcccaaauguuggcucgugucuaacggauccuaccugaaugaaacacauuucagcgacgauaucgagcagcaagccgacaacaugauuaccgagaugcuucagaaggaauauauggagcgccagggcaaaaccccucuggggcucgucgaucuguuuguuuucucuaccagcuuuuaccugaucuccaucuuccuucaccucgugaagauuccgacacauagacacaucgugggaaaacccugcccuaagccccaucggcugaaucacaugggcauuuguucuugcggccuguauaagcagccugggguccccgugaaauggaagcgcugaggacuagucccuguucccagagcccacuuuuuuuucuuuuuuugaaauaaaauagccugucuuucagaucucaaaggcucuuuucagagccaccaaaaaaaaaaaaaaaaaaaaaaaaaaaaaaaaaaaaaaaaaaaaaaaaaaaaaaaaaaaaaaaaaaaaaaaaaaaaaaaaaaaaaaaaaaaaaaaaaaaaa

SEQ ID NO: 15461 - RNA, 1748 nt, Artificial Sequence
  mRNA product Design a-1 (hSL-A100) comprising derived and/or modified sequence from LASV(LM776-SLE-2012;Clade IV)__AIT17824__GPCmut1 (opt5)
aggagagucccgcagucggcguccagcggcucugcuuguucgugugugugucguugcaggccuuauucaagcuuaccaugggccagaucgugaccuucuuucaagaggucccccacguuauugaagaggugaugaacaucgugcugauugcccucagcauccuggcuguccuuaaggggcuguacaauuucgccacaugcggacucgugggccugguuacguuucuucugcucugugggagauccugcaccacaucuguguauaaaggagucuacgaacugcagacccuggagcucaacauggaaacacugaauaugaccaugccucuuagcuguacaaagaacaauucccaucacuauauuauggugggcaacgagaccgggcuggagcucacgcugaccaauacaucuaucaucaaccauaaauucugcaaucuuagcgacgcgcacaagaaaaaccuguacgaucaugcucucauguccauuaucucuaccuuucaccugagcauuccgaauuucaaccaguaugaagccauguccugugacuuuaauggaggcaagaucagcguucaguacaaccugucucacuccuaugccggcgaugcugccaaucauugcgggacaguggcuaacggaguccuccaaaccuucaugcggauggccuggggcgggagcuacauugcgcuggacucuggaugcggcaagugggauuguaucaugacguccuaccaguaucuuauuauccagaacacaaccugggaggaccauugccaguuuagccgccccucuccuaucggguaccugggacuccugucccaaagaacacgggauauuuauaucagccgcagacgccggggcaccuucaccuggacacucuccgacucugaaggcaaagauacgcccgggggauacugucugacccgguggaugcugauugaggccgagcucaagugcuuuggcaauacagcuguggccaaauguaacgaaaagcacgacgaggaguucugcgauaugcugcgccuuuuugacuucaauaaacaggcuauccagagacugaaggcccccgcgcagaugagcauucaacucaucaacaaggccgugaaugcucugaucaacgaucagcuuauuaugaaaaaucaucugcgggacaucaugugcauuccuuauugcaacuacuccaaguauugguaccucaaucacaccacaaccggaaaaacgagccugcccaaguguuggcuggucucuaacggcuccuaccucaaugaaacacacuucagcgacgauaucgagcagcaagccgacaacaugauuaccgagaugcugcagaaagaauauauggagcgccaggggaagaccccucuuggacugguugaucucuuuguguucucuaccagcuuuuaccugaucuccaucuuccugcaucuugugaaaauuccgacacacagacauaucgucggcaagucuugccccaagccucaccggcucaaucacaugggcauuuguagcugcgggcuguauaaacagcccggagugccuguucgcuggaagagaugaggacuagucccuguucccagagcccacuuuuuuuucuuuuuuugaaauaaaauagccugucuuucagaucucaaaggcucuuuucagagccaccaaaaaaaaaaaaaaaaaaaaaaaaaaaaaaaaaaaaaaaaaaaaaaaaaaaaaaaaaaaaaaaaaaaaaaaaaaaaaaaaaaaaaaaaaaaaaaaaaaaaa

SEQ ID NO: 15462 - RNA, 1748 nt, Artificial Sequence
  mRNA product Design a-1 (hSL-A100) comprising derived and/or modified sequence from LASV(Mad39;Clade IV)__ANH09722__GPCmut1 (opt5)
aggagagucccgcagucggcguccagcggcucugcuuguucgugugugugucguugcaggccuuauucaagcuuaccaugggccagaucgugaccuucuuucaagaggucccccacguuauugaagaggugaugaacaucgugcugauugcccucagcauccuggcuguccuuaaggggcuguacaauguggccacaugcggacucauuggccugguuacguuccuucugcucugugggagauccugcaccacaacccuguauaaaggaguguacgaacugcaggcgcucgagcugaacauggaaacacuuaauaugaccaugccucugucuuguacaaagaacaauagccaucacuauauccgggucggcaacgagaccgggcucgagcugacgcuuaccaauacaucccugaucaaccauaaauuuugcaaucucucugacgcucacaagaaaaaccuguacgaucaugcccugaugagcauuaucuccaccuuccaccucucuauuccgaauuuuaaccaguaugaagccaugagcugugacuucaaugauggaaagaucuccgugcaguacaaccugagccacacauaugcuggcgacaccgccaaucauugcggcacgguugcuaacggggugcuucaaacauuuaugcgcauggccuggggaggcucuuacauugcgcuggauuccgggugcggaggcugggacuguaucaugaccagcuaccaguaucucauuauccagaacacaaccugggaggaucacugccaguucucucggcccuccccuaucggguaccugggacuucugagccaacgcaccagagacauuuauaucucucggcgccgccggggcacauuuacguggacccuguccgauagcgaaggcaaggacacacccgggggauacugucucaccagauggaugcugauugaggccgagcuuaaaugcuucggcaauacagcugucgccaaguguaacgaaaaacaugaugaggaauuuugcgacaugcugcgccucuucgauuuuaauaagcaggcuauccagcggcugaaagcccccgcgcagauguccauucaacuuaucaacaaggccgugaaugcucugaucaacgaccagcucauuaugaagaaucaccugagagacaucaugugcauuccuuauugcaacuacucuaaauauugguaccugaaucacaccgugacgggaaagacaagccuccccaaauguuggcuggucuccaacggcagcuaccuuaaugaaacccauuucucugaugacaucgagcagcaagccgauaacaugauuaccgagaugcugcagaaggaauauauggagcggcaggggaaaacaccucucggacugguugaccuguucguguuuuccaccagcuucuaccuuaucucuaucuuucuccaccuggugaagauuccgacacaucgccacgucgugggcaaacccugcccuaagccccauagacugaaucacaugggcaucuguagcugcggguucuauaagcagccuggaguucccgugcgguggaaacgcugaggacuagucccuguucccagagcccacuuuuuuuucuuuuuuugaaauaaaauagccugucuuucagaucucaaaggcucuuuucagagccaccaaaaaaaaaaaaaaaaaaaaaaaaaaaaaaaaaaaaaaaaaaaaaaaaaaaaaaaaaaaaaaaaaaaaaaaaaaaaaaaaaaaaaaaaaaaaaaaaaaaaa

SEQ ID NO: 15463 - RNA, 1748 nt, Artificial Sequence
  mRNA product Design a-1 (hSL-A100) comprising derived and/or modified sequence from LASV(Z0947-SLE-2011;Clade IV)__AIT17840__GPCmut1 (opt5)
aggagagucccgcagucggcguccagcggcucugcuuguucgugugugugucguugcaggccuuauucaagcuuaccaugggccagaucgugaccuucuuucaagaggucccccacguuauugaagaggugaugaacaucgugcugauugcccucagcauccuggcuguccuuaaggggcuguacaauuucgccacaugcggacucgugggccugguuacguuucuucugcucugugggagauccugcaccauuucucuguauaaaggaguguacgaacugcagacacucgagcugaacauggaaacccuuaauaugacaaugccucugagcuguaccaagaacaauucccaucacuauaucauggucggcaacgagacagggcucgagcugacccuuacgaauaccucuaucauuaaccauaaauucugcaaucugagcgacgcgcacaagaaaaaccucuacgaucaugcucugauguccaucauuucuacauuucaccugagcaucccgaauuucaaccaguaugaagccauguccugugacuuuaauggaggcaagauuagcgugcaguacaaccucucucacuccuaugccggcgaugcugccaaucauugcgggaccguugcuaacggagugcugcaaacauucaugcggauggccuggggcgggagcuacaucgcgcuugacucuggaugcgauagaugggacuguauuaugaccuccuaccaguaucugaucauccagaacacgacaugggaggaucacugccaguuuagccggcccucuccuauuggcuaccucgggcugcuuucccaacgcaccagagacaucuauauuagccggcgccgccggggaacauucaccuggacccuguccgauucugaaggcaaggacacacccggcggguacugucugacgagauggaugcucaucgaggccgagcugaaaugcuuuggaaauaccgcugucgccaaguguaacgaaaaacaugaugaggaguucugcgacaugcuucggcuguuugauuucaauaagcaggcuauucagcgccucaaagcccccgcgcagaugagcauccaacugaucaacaaggccgugaaugcucuuauuaacgaccagcugaucaugaagaaucaccucagagacauuaugugcaucccuuauugcaacuacuccaaauauugguaccugaaucacacaaccacagggaagaccagccugcccaaauguuggcucgugucuaacggauccuaccugaaugaaacgcauuucagcgaugacauugagcagcaagccgauaacaugaucacagagaugcuucagaaggaauauauggagcggcagggcaaaaccccucuggggcucgucgaccuguuuguuuucucuaccagcuuuuaccugaucuccauuuuccuucaccucgugaagaucccgacacaucgccacauugugggaaaacccugcccuaagccccauagacugaaucacaugggcaucuguucuugcggccuguauaagcagccugggguccccgugaaauggaagcggugaggacuagucccuguucccagagcccacuuuuuuuucuuuuuuugaaauaaaauagccugucuuucagaucucaaaggcucuuuucagagccaccaaaaaaaaaaaaaaaaaaaaaaaaaaaaaaaaaaaaaaaaaaaaaaaaaaaaaaaaaaaaaaaaaaaaaaaaaaaaaaaaaaaaaaaaaaaaaaaaaaaaa

SEQ ID NO: 15464 - RNA, 1724 nt, Artificial Sequence
  mRNA product Design a-1 (A100) comprising derived and/or modified sequence from LASV(Josiah;Clade IV)__NP_694870__GPCmut1 (opt1)
aggagagucccgcagucggcguccagcggcucugcuuguucgugugugugucguugcaggccuuauucaagcuuaccaugggccagaucgugaccuucuuccaggaggucccccacgugaucgaggaggugaugaacaucguccugaucgcccucagcgugcuggccgugcugaaggggcucuacaacuucgcgaccugcggccuggucgggcuggugacguuccuccugcugugcggccgcuccugcaccaccagccucuacaaggggguguacgagcugcagacccuggagcucaacauggagacgcugaacaugaccaugccgcuguccugcaccaagaacaacagccaccacuacaucauggucggcaacgagaccggccucgagcugacgcugaccaacaccuccaucaucaaccacaaguucugcaaccucagcgacgcccacaagaagaaccuguacgaccacgcccugauguccaucaucagcaccuuccaccucuccauccccaacuucaaccaguacgaggccaugagcugcgacuucaacgggggcaagaucuccgugcaguacaaccugagccacuccuacgccggggacgcggccaaccacugcggcacgguggccaacgggguccugcagaccuucaugcggauggccuggggcggcagcuacaucgcgcucgacuccgggugcggcaacugggacugcaucaugaccagcuaccaguaccugaucauccagaacaccacgugggaggaccacugccaguucucccggcccagccccaucggguaccugggccuccugucccagcgcacccgggacaucuacaucagccgccggcgccggggcaccuucaccuggacgcugagcgacuccgaggggaaggacaccccgggcggguacugccugacccgcuggaugcucaucgaggccgagcugaagugcuucggcaacaccgccguggccaagugcaacgagaagcacgacgaggaguucugcgacaugcugcggcuguucgacuucaacaagcaggccauccagcgccugaaggcgcccgcccagaugagcauccagcugaucaacaaggccgugaacgcccucaucaacgaccagcugaucaugaagaaccaccuccgggacaucaugugcauccccuacugcaacuacuccaaguacugguaccucaaccacacgaccaccggccgcaccagccugcccaagugcuggcuggucuccaacggcagcuaccucaacgagacgcacuucuccgacgacaucgagcagcaggccgacaacaugaucaccgagaugcugcagaaggaguacauggagcggcaggggaagacgccccugggccucguggaccuguucguguucagcaccuccuucuaccugaucagcaucuuccugcaccucgucaagaucccgacccaccgccacaucguggggaaguccugccccaagccccaccggcugaaccacaugggcaucugcagcugcgggcuguacaagcagcccggcgugccggucaaguggaagcgcugaggacuagucccuguucccagagcccacuuuuuuuucuuuuuuugaaauaaaauagccugucuuucagaucuaaaaaaaaaaaaaaaaaaaaaaaaaaaaaaaaaaaaaaaaaaaaaaaaaaaaaaaaaaaaaaaaaaaaaaaaaaaaaaaaaaaaaaaaaaaaaaaaaaaa

SEQ ID NO: 15465 - RNA, 1721 nt, Artificial Sequence
  mRNA product Design a-1 (A100) comprising derived and/or modified sequence from LASV(LP;Clade I)__AAF86701__GPCmut1 (opt1)
aggagagucccgcagucggcguccagcggcucugcuuguucgugugugugucguugcaggccuuauucaagcuuaccaugggccagaucaucaccuucuuccaggaggugccccacgucaucgaggaggugaugaacaucgugcugaucgcccucagccugcuggccauccucaaggggcuguacaacaucgcgaccugcggcaucaucgggcuggucgccuuccucuuccugugcggcaaguccugcagccugacgcucaagggcggguacgagcugcagacccuggagcucaacauggagacccugaacaugaccaugccgcuguccugcacgaagaacagcucccaccacuacauccgcgugggcaacgagaccgggcucgagcugacccugaccaacacgagcaucaucaaccacaaguucugcaaccucuccgacgcccacaagaagaaccuguacgaccacgcccugaugagcaucaucuccaccuuccaccucagcauccccaacuucaaccaguacgaggccauguccugcgacuucaacggcgggaagaucagcgugcaguacaaccugucccacagcuacgcgggcgacgccgccgagcacugcgggaccgucgccaacggcgugcugcagaccuucaugcggauggcguggggcgggcgcuacaucgcccucgacuccggcugcgggaacugggacugcaucaugacgagcuaccaguaccugaucauccagaacaccaccugggaggaccacugccaguucucccggcccagccccaucggcuaccugggccuccugucccagcgcacccgggacaucuacaucagccgccggcgccgggggacguucaccuggacccugagcgacuccgagggcaacgagacccccgggggcuacugccugacgcgcuggaugcucaucgaggccgagcugaagugcuucgggaacaccgccguggccaagugcaacgagaagcacgacgaggaguucugcgacaugcugcggcuguucgacuucaacaagcaggcgauccgccggcugaaggcccccgcccagaugagcauccagcugaucaacaaggccgucaacgcccucaucaacgaccagcugaucaugaagaaccaccuccgcgacaucaugugcauccccuacugcaacuacuccaaguacugguaccucaaccacaccagcuccggccggaccagccugcccaagugcuggcugaucuccaacgggagcuaccucaacgagacgcaguucuccgacgacaucgagcagcaggcggacaacaugaucaccgagaugcugcagaaggaguacaucgagcgccagggcaagaccccgcuggggcucguggacaucuucaucuucagcaccuccuucuaccugaucagcaucuuccugcaccugaucaagaucccgacgcaccggcacaucgugggcaagcccugccccaagccccaccgccucaaccacaugggggucugcuccugcggccuguacaagcacccgggcgugcccaccaaguggaagcggugaggacuagucccuguucccagagcccacuuuuuuuucuuuuuuugaaauaaaauagccugucuuucagaucuaaaaaaaaaaaaaaaaaaaaaaaaaaaaaaaaaaaaaaaaaaaaaaaaaaaaaaaaaaaaaaaaaaaaaaaaaaaaaaaaaaaaaaaaaaaaaaaaaaaa

SEQ ID NO: 15466 - RNA, 1721 nt, Artificial Sequence
  mRNA product Design a-1 (A100) comprising derived and/or modified sequence from LASV(803213;Clade II)__AAF86703__GPCmut1 (opt1)
aggagagucccgcagucggcguccagcggcucugcuuguucgugugugugucguugcaggccuuauucaagcuuaccaugggccagaucaucaccuucuuccaggaggugccccacgucaucgaggaggugaugaacaucgugcugaucgcccucagccugcuggccauccucaaggggaucuacaacgucgcgaccugcggccuguucgggcugaucuccuuccuccugcugugcggccgcagcugcuccgugacguacaaggggguguacgagcuccagacccuggagcugaacauggccaaccucaacaugaccaugccgcugagcugcaccaagaacaacucccaccacuacaucauggucggcaacgagacgggccuggagcucacccugaccaacaccagcaucaucaaccacaaguucugcaaccuguccgacgcccacaagaagaaccucuacgaccacgcccugaugagcaucaucuccacguuccaccugagcauccccaacuucaaccaguacgaggccauguccugcgacuucaacgggggcaagaucagcgugcaguacaaccucucccacagcuucgcgguggacgccgccaaccacugcgggaccaucgccaacggcguccugcagaccuucaugcggauggcguggggcggguccuacaucgcccuggacagcggcugcgggaacugggacugcaucaugaccuccuaccaguaccucaucauccagaacacgaccugggaggaccacugccaguucagccgccccucccccaucggcuaccuggggcugcucagccagcggacccgcgacaucuacaucagccggcgccgccggggcaccuucacguggacccucuccgacagcgagggcaacgaggcccccgggggcuacugccugacccgguggaugcugaucgaggccgagcucaagugcuucgggaacaccgccguggcgaagugcaacgagaagcacgacgaggaguucugcgacaugcugcgccuguucgacuucaacaagcaggccaucaagcggcucaagacgcccgcccagauguccauccagcugaucaacaaggccgugaacgcccugaucaacgaccagcucaucaugaagaaccaccuccgcgacaucaugugcauccccuacugcaacuacagccgguacugguaccugaaccacaccgucaccgggaagaccucccugccccgcugcuggcuggugagcaacggcuccuaccugaacgagacgcacuucagcgacgacaucgagcagcaggcggacaacaugaucaccgagaugcuccagaaggaguacauggaccggcagggcaagaccccgcuggggcugguggaccucuucgucuucuccaccagcuucuaccugaucuccaucuuccugcaccuggugaagaucccgacgcaccgccacaucgugggcaagcccugccccaagccccaccggcucaaccacauggggaucugcagcugcggccuguacaagcacccggggguccccgugaaguggaagcgcugaggacuagucccuguucccagagcccacuuuuuuuucuuuuuuugaaauaaaauagccugucuuucagaucuaaaaaaaaaaaaaaaaaaaaaaaaaaaaaaaaaaaaaaaaaaaaaaaaaaaaaaaaaaaaaaaaaaaaaaaaaaaaaaaaaaaaaaaaaaaaaaaaaaaa

SEQ ID NO: 15467 - RNA, 1721 nt, Artificial Sequence
  mRNA product Design a-1 (A100) comprising derived and/or modified sequence from LASV(GA391;Clade III)__CAA36645__GPCmut1 (opt1)
aggagagucccgcagucggcguccagcggcucugcuuguucgugugugugucguugcaggccuuauucaagcuuaccaugggccagaucgugaccuucuuccaggaggucccccacgugaucgaggaggugaugaacaucguccugaucgcccucagcauccuggccauccugaaggggcucuacaacguggcgaccugcggccugaucgggcuggugacguuccuccugcuguccggccgcagcugcucccucaucuacaaggggaccuacgagcugcagacccuggagcucaacauggagacccugaacaugacgaugccgcugagcugcaccaagaacaacucccaccacuacauccgggucggcaacgagaccggccucgagcugacccugacgaacaccagcauccucaaccacaaguucugcaaccuguccgacgcccacaagcgcaaccuguacgaccacagccucauguccaucaucagcaccuuccaccuguccauccccaacuucaaccaguacgaggccaugagcugcgacuucaacgggggcaagaucaccgugcaguacaaccugucccacagcuucgccguggacgccgcggggcacugcggcacgcucgccaacgggguccugcagaccuucaugcggauggccuggggcggcuccuacaucgcccuggacagcgggugcggcaacugggacugcaucaugaccuccuaccaguaccucaucauccagaacaccacgugggacgaccacugccaguucagccggcccucccccaucggguaccugggccugcucagccagcgcacccgggacaucuacaucagccgccggcgccggggcaccuucaccuggacgcucuccgacagcgaggggaacgagaccccgggcggguacugccugacccgcuggaugcugaucgaggcggagcucaagugcuucggcaacaccgccguggccaagugcaacgagaagcacgacgaggaguucugcgacaugcugcggcuguucgacuucaacaagcaggccauccgccggcucaagacgcccgcccagauguccauccagcugaucaacaaggcggugaacgcccugaucaacgaccagcucaucaugaagaaccaccuccgcgacaucaugugcauccccuacugcaacuacagccgguacugguaccugaaccacaccuccaccggcaagaccagccugccccgcugcuggcugaucuccaacggcagcuaccugaacgagacgaaguucuccgacgacaucgagcagcaggccgacaacaugaucaccgagaugcuccagaaggaguacaucgaccggcaggggaagacgccccugggccuggucgaccuguucguguucagcaccuccuucuaccucaucagcaucuuccugcaccuggugaagaucccgacccaccgccacaucgucgggaagcccugccccaagccccaccggcucaaccacaugggcaucugcuccugcgggcuguacaagcagccgggcgugcccgugcgcuggaagcggugaggacuagucccuguucccagagcccacuuuuuuuucuuuuuuugaaauaaaauagccugucuuucagaucuaaaaaaaaaaaaaaaaaaaaaaaaaaaaaaaaaaaaaaaaaaaaaaaaaaaaaaaaaaaaaaaaaaaaaaaaaaaaaaaaaaaaaaaaaaaaaaaaaaaa

SEQ ID NO: 15468 - RNA, 1724 nt, Artificial Sequence
  mRNA product Design a-1 (A100) comprising derived and/or modified sequence from LASV(AV;Clade V)__CCA30314__GPCmut1 (opt1)
aggagagucccgcagucggcguccagcggcucugcuuguucgugugugugucguugcaggccuuauucaagcuuaccaugggccagaucgugaccuucuuccaggaggucccccacgugaucgaggaggugaugaacaucguccugaucgcccucagcauccuggccgugcugaaggggcucuacaacaucgcgaccugcggccugaucgggcugaucacguuccuccugcugugcggccgcuccugcagcuccaaccucuacaaggggguguacgagcugcagagccuggaccucaacauggagacccugaacaugaccaugccgcuguccugcaccaagaacaacagccaccacuacauccgggucggcaacgacacgggccucgagcugacccugaccaacaccuccauccucaaccacaaguucugcaaccugagcgacgcccacaagaaggaccuguacgaccacgcccucauguccaucaucagcacguuccaccuguccauccccaacuucaaccaguacgaggccaugagcugcgacuucaacgggggcaagaucuccgugcaguacaaccugagccacuccuacgccaucgacgcggccaaccacugcgggaccguggccaacggcauccuccagaccuucaugcgcauggccuggggcgggagcuacaucgcgcuggacuccggcugcgggaacugggacugcaucaugaccagcuaccaguaccugaucauccagaacacgaccugggagaaccacugccaguucucccgccccagccccaucggcuaccucgggcugcugagccagcggacccgcgacaucuacaucucccggcgccgccggggcaccuucacguggacccugagcgacuccgagggcaacgccacccccgggggcuacugccucacccgguggaugcugaucgaggccgagcugaagugcuucgggaacacggccgucgccaagugcaacgagaagcacgacgaggaguucugcgacaugcuccgccuguucgacuucaacaagcaggcgaucagccggcugaagucccccgcccagaugagcauccagcucaucaacaaggccgugaacgcccugaucaacgaccagcugaucaugaagaaccaccuccgcgacaucaugugcauccccuacugcaacuacuccaaguacugguaccugaaccacaccaucaccgggaagaccagccugcccaagugcuggcucguguccaacggcagcuaccugaacgagacgcacuucuccgacgacaucgagcagcaggccgacaacaugaucaccgagaugcugcagaaggaguacauggagcggcagggcaagaccccgcucgggcuggucgaccuguucguguucagcaccuccuucuaccugaucagcaucuuccuccgccuggugaagaucccgacgcaccggcacaucgucggcaagcccugccccaagccccaccgccugaaccacauggggaucugcuccugcggccucuacaagcagccgggggugcccgugcgguggaagcgcugaggacuagucccuguucccagagcccacuuuuuuuucuuuuuuugaaauaaaauagccugucuuucagaucuaaaaaaaaaaaaaaaaaaaaaaaaaaaaaaaaaaaaaaaaaaaaaaaaaaaaaaaaaaaaaaaaaaaaaaaaaaaaaaaaaaaaaaaaaaaaaaaaaaaa

SEQ ID NO: 15469 - RNA, 1721 nt, Artificial Sequence
  mRNA product Design a-1 (A100) comprising derived and/or modified sequence from LASV(Togo/2016/7082;Clade VI)__AMR44577__GPCmut1 (opt1)
aggagagucccgcagucggcguccagcggcucugcuuguucgugugugugucguugcaggccuuauucaagcuuaccaugggccagaucaucaccuucuuccaggaggugccccacgucaucgaggaggugaugaacaucgugcugaucgcccucagccugcuggccauccucaagggggucuacaacguggcgaccugcggcaucaucgggcuggugacguuccuguuccucugcggccgcuccugcagccugaucuacaagggguccuacgagcugcagacccucgagcugaacauggagacccugaacaugaccaugccgcucagcugcacgaagaacuccagccaccacuacauccgggucggcaacgagaccggccuggagcugacccucaccaacacguccaucaucaaccacaaguucugcaaccugagcgacgcccacaagcgcaaccuguacgaccacgcccucauguccauccugagcaccuuccaccuguccauccccaacuucaaccaguacgaggccaugagcugcgacuucaacgggggcaagaucuccgugcaguacaaccucagccacgccuacgcgguggacgccgccgagcacugcgggaccgucgccaacggcgugcugcagaccuucaugcggauggcguggggcggguccuacaucgcccuggacagcggcugcgggaacugggacugcaucaugacguccuaccaguaccucaucauccagaacaccaccugggaggaccacugccaguucagccggcccucccccaucggcuaccuggggcugcucagccagcgcacccgggacaucuacaucagccgccggcgccggggcacguucaccuggacccucuccgacagcgagggcaacgagacccccgggggcuacugccugacgcgcuggaugcugaucgaggccgagcucaagugcuucgggaacaccgccguggccaagugcaacgagaagcacgacgaggaguucugcgacaugcugcggcuguucgacuucaacaagcaggcgauccagcgccucaagucccccgcccagaugagcauccagcugaucaacaaggccgucaacgcccugaucaacgaccagcucaucaugaagaaccaccuccgggacaugaugugcauccccuacugcaacuacuccaaguacugguaccugaaccacaccagcuccgggcgcaccagccugcccaagugcuggcugguguccaacggcagcuaccugaacgagacgcacuucuccgacgacaucgagcagcaggccgacaacaugaucaccgagaugcuccagaaggaguacaucgaccggcagggcaagaccccgcuggggcugguggaccucuucgucuucagcaccuccuucuaccugaucagcaucuuccugcaccugaucaagaucccgacgcaccgccacaucgugggcaagcccugccccaagccccaccggcucaaccacauggggaucugcuccugcggccuguacaagcagccgggggugcccacccgcuggaagcggugaggacuagucccuguucccagagcccacuuuuuuuucuuuuuuugaaauaaaauagccugucuuucagaucuaaaaaaaaaaaaaaaaaaaaaaaaaaaaaaaaaaaaaaaaaaaaaaaaaaaaaaaaaaaaaaaaaaaaaaaaaaaaaaaaaaaaaaaaaaaaaaaaaaaa

SEQ ID NO: 15470 - RNA, 1721 nt, Artificial Sequence
  mRNA product Design a-1 (A100) comprising derived and/or modified sequence from LASV(KAK-428;Clade n.d. (VII))__ANH09740__GPCmut1 (opt1)
aggagagucccgcagucggcguccagcggcucugcuuguucgugugugugucguugcaggccuuauucaagcuuaccaugggccagaucgugaccuucuuccaggaggucccccacgugaucgaggaggugaugaacaucguccugaucgcccucagccugcuggccauccucaaggggcuguacaacuucgcgaccugcggcgugaucgggcugaucacguuccuccugcugugcggccgcuccugcagcgccaccuacaaggggcaguacgagcuccagacccuggagcugaacauggagucccucaacaugaccaugccgcugagcugcacgaagaacaacucccaccacuacauccgggccggcaacaacaccggccuggagcucacccugaccaacacgagcaucaucucccacaaguucugcaaccugagcgacgcccacaagaagaaccucuacgaccacacccugauguccaucaucaccaccuuccaccugagcauccccaacuucaaccaguacgaggccauguccugcgacuucaacgggggcaagaucagcauccaguacaaccucucccacagcuacgcgggggacgccgcccagcacugcggcacgguggccaacgggguccugcagaccuucaugcgcauggcguggggcggcuccuaccuggcccucgacagcgggugccgcggcugggacugcaucaucuccagcuaccaguaccugaucauccagaacaccaccugggacgaccacugccaguucucccggcccagccccaucggguaccugggcuucgugagccagaagacgcgcgacaucuacaucucccggcgccgccggggcaccuucaccuggacccugagcgacuccgaggggcacgacaugccgggcggguacugccucacgcgguggaugcugaucgaggccgaccugaagugcuucggcaacaccgccguggccaagugcaacgagaagcacgacgaggaguucugcgacauguggcgccucuucgacuucaacaagcaggcgauccagcggcugaaggcccccgcccagaugaacauccagcugaucaacaaggccgucaacgcccucaucaacgaccagcugaugaugaagaaccaccuccgcgacaucaugugcauccccuacugcaacuacagcaaguucugguaccugaacaacaccaccacgggccggaccucccugccccgcugcuggcugaucagcaacggcuccuaccucaacgagacccacuucagcgacgacaucgagcagcaggcggacaacaugaucaccgagaugcugcagaaggaguacauggaccggcaggggaagacgccccugggccucguggaccuguucguguucuccaccagcuucuaccugaucaccaucuuccuccaccuggucaagaucccgacccaccgccacaucguggggaagcccugccccaagccccaccggcugaaccacaugggcaucugcuccugcgggcuguacaagcagccgggcgugcccguccgcuggaagcggugaggacuagucccuguucccagagcccacuuuuuuuucuuuuuuugaaauaaaauagccugucuuucagaucuaaaaaaaaaaaaaaaaaaaaaaaaaaaaaaaaaaaaaaaaaaaaaaaaaaaaaaaaaaaaaaaaaaaaaaaaaaaaaaaaaaaaaaaaaaaaaaaaaaaa

SEQ ID NO: 15471 - RNA, 1721 nt, Artificial Sequence; identical to SEQ ID NO: 15465
  mRNA product Design a-1 (A100) comprising derived and/or modified sequence from LASV(Pinneo-NIG-1969;Clade I)__AIT17836__GPCmut1 (opt1)

SEQ ID NO: 15472 - RNA, 1721 nt, Artificial Sequence
  mRNA product Design a-1 (A100) comprising derived and/or modified sequence from LASV(ISTH0009-NIG-2011;Clade II)__AIT17404__GPCmut1 (opt1)
aggagagucccgcagucggcguccagcggcucugcuuguucgugugugugucguugcaggccuuauucaagcuuaccaugggccagaucaucaccuucuuccaggaggugccccacgucaucgaggaggugaugaacaucgugcugaucgcccucagccugcuggccauccucaaggggaucuacaacgucgcgaccugcggccuguucgggcugguguccuuccuccugcugugcggccgcagcugcuccacgaccuacaaggggguguacgagcuccagacccuggagcuggacauggccagccucaacaugaccaugccgcuguccugcacgaagaacaacagccaccacuacaucauggucggcaacgagaccggccuggagcucacccugaccaacacguccaucaucaaccacaaguucugcaaccugagcgacgcccacaagaagaaccucuacgaccacgcccugauguccaucaucagcaccuuccaccuguccauccccaacuucaaccaguacgaggccaugagcugcgacuucaacgggggcaagaucuccgugcaguacaaccucagccacgcguacgccguggacgccgccaaccacugcgggaccaucgcgaacggcguccugcagaccuucaugcggauggccuggggcggguccuacaucgcccuggacagcggcugcggguccugggacugcaucaugacgagcuaccaguaccucaucauccagaacaccaccugggaggaccacugccaguucucccgccccagccccaucggcuaccuggggcugcucagccagcggacccgcgacaucuacaucucccggcgccgccggggcacguucaccuggacccucagcgacuccgagggcaacgagacccccgggggcuacugccugacgcgguggaugcugaucgaggccgagcucaagugcuucgggaacaccgccguggcgaagugcaacgagaagcacgacgaggaguucugcgacaugcugcgccuguucgacuucaacaagcaggccauccggcgccucaagacccccgcccagaugagcauccagcugaucaacaaggccgugaacgcccugaucaacgaccagcucaucaugaagaaccaccuccgggacaucaugugcaucccguacugcaacuacuccaaguacugguaccugaaccacaccgucacggggaagaccagccugccccgcugcuggcugguguccaacggcagcuaccugaacgagacccacuucuccgacgacaucgagcagcaggcggacaacaugaucaccgagcuccugcagaaggaguacauggaccggcagggcaagacgccccuggggcucguggaccuguucgucuucagcaccuccuucuaccugaucagcaucuuccugcaccucaucaagaucccgacccaccgccacaucaccggcaagcccugccccaagccccaccggcugaaccacauggggaucugcuccugcggccuguacaagcacccgggggugcccgugaaguggaagcgcugaggacuagucccuguucccagagcccacuuuuuuuucuuuuuuugaaauaaaauagccugucuuucagaucuaaaaaaaaaaaaaaaaaaaaaaaaaaaaaaaaaaaaaaaaaaaaaaaaaaaaaaaaaaaaaaaaaaaaaaaaaaaaaaaaaaaaaaaaaaaaaaaaaaaa

SEQ ID NO: 15473 - RNA, 1721 nt, Artificial Sequence
  mRNA product Design a-1 (A100) comprising derived and/or modified sequence from LASV(ISTH2010-NIG-2012;Clade II)__AIT17482__GPCmut1 (opt1)
aggagagucccgcagucggcguccagcggcucugcuuguucgugugugugucguugcaggccuuauucaagcuuaccaugggccagaucaucaccuucuuccaggaggugccccacgucaucgaggaggugaugaacaucgugcugaucgcccucagccugcuggccauccucaaggggaucuacaacgucgcgaccugcggccuguucgggcugguguccuuccuccugcugugcggccgcagcugcuccacgaccuacaaggggguguacgagcuccagacccuggagcuggacauggccagccucaacaugaccaugccgcuguccugcacgaagaacaacagccaccacuacaucauggucggcaacgagaccggccuggagcucacccugaccaacacguccaucaucaaccacaaguucugcaaccugagcgacgcccacaagaagaaccucuacgaccacgcccugauguccaucaucagcaccuuccaccuguccauccccaacuucaaccaguacgaggccaugagcugcgacuucaacgggggcaagaucuccgugcaguacaaccucagccacgcguacgccguggacgccgccaaccacugcgggaccaucgcgaacggcguccugcagaccuucaugcggauggccuggggcggguccuacaucgcccuggacagcggcugcggguccugggacugcaucaugacgagcuaccaguaccucaucauccagaacaucaccugggaggaccacugccaguucucccgccccagccccaucggcuaccuggggcugcucagccagcggacccgcgacaucuacaucucccggcgccgccggggcaccuucacguggacccucagcgacuccgagggcaacgagacccccgggggcuacugccugacccgguggaugcugaucgaggccgagcucaagugcuucgggaacacggccguggcgaagugcaacgagaagcacgacgaggaguucugcgacaugcugcgccuguucgacuucaacaagcaggccauccggcgccucaagacccccgcccagaugagcauccagcugaucaacaaggccgugaacgcccugaucaacgaccagcucaucaugaagaaccaccuccgggacaucaugugcauccccuacugcaacuacuccaaguacugguaccugaaccacaccgucaccgggaagacgagccugccccgcugcuggcugguguccaacggcagcuaccugaacgagacccacuucuccgacgacaucgagcagcaggcggacaacaugaucaccgagcuccugcagaaggaguacaucgaccggcagggcaagaccccgcuggggcucguggaccuguucgucuucagcacguccuucuaccugaucagcaucuuccugcaccucgugaagaucccgacccaccgccacguggucggcaagcccugccccaagccccaccggcugaaccacauggggaucugcuccugcggccuguacaagcacccgggggugcccgugaaguggaagcgcugaggacuagucccuguucccagagcccacuuuuuuuucuuuuuuugaaauaaaauagccugucuuucagaucuaaaaaaaaaaaaaaaaaaaaaaaaaaaaaaaaaaaaaaaaaaaaaaaaaaaaaaaaaaaaaaaaaaaaaaaaaaaaaaaaaaaaaaaaaaaaaaaaaaaa

SEQ ID NO: 15474 - RNA, 1721 nt, Artificial Sequence
  mRNA product Design a-1 (A100) comprising derived and/or modified sequence from LASV(Lassa virus/H.sapiens-wt/NGA/2015/ISTH_0543;Clade II)__AVO03639__GPCmut1 (opt1)
aggagagucccgcagucggcguccagcggcucugcuuguucgugugugugucguugcaggccuuauucaagcuuaccaugggccagaucaucaccuucuuccaggaggugccccacgucaucgaggaggugaugaacaucgugcugaucgcccucagccugcuggccauccucaaggggaucuacaacgucgcgaccugcggccuguucgggcugguguccuuccuccugcugugcggccgcagcugcuccacgaccuacaaggggguguacgagcuccagacccuggagcuggacauggccaaccucaacaugaccaugccgcugagcugcacgaagaacaacucccaccacuacaucauggucggcaacgagaccggccuggagcucacccugaccaacacgagcaucaucaaccacaaguucugcaaccuguccgacgcccacaagaagaaccucuacgaccacgcccugaugagcaucaucuccaccuuccaccugagcauccccaacuucaaccaguacgaggccauguccugcgacuucaacgggggcaagaucagcgugcaguacaaccucucccacaccuacgcgguggacgccgccaaccacugcgggaccaucgccaacggcguccugcagacguucaugcggauggcguggggcgggagcuacaucgcccuggacuccggcugcgggagcugggacugcaucaugaccuccuaccaguaccucgugauccagaacaccaccugggaggaccacugccaguucagccgccccucccccaucggcuaccuggggcugcucagccagcggacgcgcgacaucuacaucagccggcgccgccggggcaccuucaccuggacccucuccgacagcgagggcaacgagacgcccgggggcuacugccugacccgguggaugcugaucgaggccgagcucaagugcuucgggaacaccgccguggccaagugcaacgagaagcacgacgaggaguucugcgacaugcugcgccuguucgacuucaacaagcaggcgauccggcgccucaagacccccgcccagauguccauccagcugaucaacaaggccgucaacgcccugaucaacgaccagcucaucaugaagaaccaccuccgggacaucaugugcauccccuacugcaacuacagcaaguacugguaccugaaccacacggugaccgggaagaccucccugccccgcugcuggcuggugagcaacggcuccuaccugaacgagacccacuucagcgacgacaucgagcagcaggccgacaacaugaucacggagcuccugcagaaggaguacaucgaccggcagggcaagaccccgcuggggcucgucgaccuguucguguucuccaccagcuucuaccugaucuccaucuuccugcaccucgugaagaucccgacccaccgccacaucacgggcaagcccugccccaagccccaccggcugaaccacauggggaucugcagcugcggccuguacaagcacccggggguccccgugaaguggaagcgcugaggacuagucccuguucccagagcccacuuuuuuuucuuuuuuugaaauaaaauagccugucuuucagaucuaaaaaaaaaaaaaaaaaaaaaaaaaaaaaaaaaaaaaaaaaaaaaaaaaaaaaaaaaaaaaaaaaaaaaaaaaaaaaaaaaaaaaaaaaaaaaaaaaaaa

SEQ ID NO: 15475 - RNA, 1721 nt, Artificial Sequence
  mRNA product Design a-1 (A100) comprising derived and/or modified sequence from LASV(Lassa virus/H.sapiens-wt/NGA/2016/ISTH_0009;Clade II)__AVO03571__GPCmut1 (opt1)
aggagagucccgcagucggcguccagcggcucugcuuguucgugugugugucguugcaggccuuauucaagcuuaccaugggccagaucaucaccuucuuccaggaggugccccacgucaucgaggaggugaugaacaucgugcugaucgcccucagccugcuggccauccucaaggggaucuacaacgucgcgaccugcggccugcuggggcucguguccuuccugcugcucugcggccgcagcugcuccacgaccuacaaggggguguacgagcugcagacccuggagcucgacauggccagccugaacaugaccaugccgcuguccugcacgaagaacaacagccaccacuacaucauggucggcaacgagaccggccucgagcugacccugaccaacacguccaucaucaaccacaaguucugcaaccucagcgacgcccacaagaagaaccuguacgaccacgcccugauguccaucaucagcaccuuccaccucuccauccccaacuucaaccaguacgaggccaugagcugcgacuucaacgggggccggaucuccgugcaguacaaccugagccacuccuacgcgguggacgccgccaaccacugcgggaccaucgccaacggcguccugcagaccuucaugcgcauggcguggggcgggagcuacaucgcccucgacuccggcugcgggagcugggacugcaucaugacguccuaccaguaccugaucauccagaacaccaccugggaggaccacugccaguucagccggcccagccccaucggcuaccuggggcuccugucccagcgcacccgggacaucuacaucagccgccggcgccggggcacguucaccuggacccuguccgacagcgagggcaacgagacccccgggggcuacugccugacgcgcuggaugcucaucgaggccgagcugaagugcuucgggaacaccgccguggccaagugcaacgagaagcacgacgaggaguucugcgacaugcugcggcuguucgacuucaacaagcaggcgauccgccggcugaagacccccgcccagauguccauccagcugaucaacaaggccgugaacgcccucaucaacgaccagcugaucaugaagaaccaccuccgcgacaucaugugcaucccguacugcaacuacagcaaguacugguaccucaaccacaccgucacggggaagaccucccugccccggugcuggcuggugagcaacggcuccuaccucaacgagacccacuucagcgacgacaucgagcagcaggccgacaacaugaucaccgagcugcugcagaaggaguacaucgaccgccagggcaagacgccccucgggcugguggaccuguucgucuucuccaccagcuucuaccugaucuccaucuuccuccaccuggugaagaucccgacccaccggcacaucaccggcaagcccugccccaagccccaccgccugaaccacauggggaucugcagcugcggccucuacaaccacccgggggugcccgucaaguggaagcggugaggacuagucccuguucccagagcccacuuuuuuuucuuuuuuugaaauaaaauagccugucuuucagaucuaaaaaaaaaaaaaaaaaaaaaaaaaaaaaaaaaaaaaaaaaaaaaaaaaaaaaaaaaaaaaaaaaaaaaaaaaaaaaaaaaaaaaaaaaaaaaaaaaaaa

SEQ ID NO: 15476 - RNA, 1721 nt, Artificial Sequence
  mRNA product Design a-1 (A100) comprising derived and/or modified sequence from LASV(Lassa virus/H.sapiens-wt/NGA/2016/ISTH_0017;Clade II)__AVO03567__GPCmut1 (opt1)
aggagagucccgcagucggcguccagcggcucugcuuguucgugugugugucguugcaggccuuauucaagcuuaccaugggccagaucaucaccuucuuccaggaggugccccacgucaucgaggaggugaugaacaucgugcugaucgcccucagccugcuggccauccucaaggggaucuacaacgucgcgaccugcggccuguucgggcugguguccuuccuccugcugugcggccgcagcugcuccacgaccuacaaggggguguacgagcuccagacccuggagcuggacauggccagccucaacaugaccaugccgcuguccugcacgaagaacaacagccaccacuacaucauggucggcaacgagaccggccuggagcucacccugaccaacacguccaucaucaaccacaaguucugcaaccugagcgacgcccacaagaagaaccucuacgaccacgcccugauguccaucaucagcaccuuccaccuguccauccccaacuucaaccaguacgaggccaugagcugcgacuucaacgggggcaagaucuccgugcaguacaaccucagccacaccuacgcgaucgacgccgccaaccacugcgggaccaucgccaacggcgugcugcagacguucaugcggauggcguggggcggguccuacaucgcccuggacagcggcugcggguccugggacugcaucaugaccagcuaccaguaccucaucauccagaacaccaccugggaggaccacugccaguucucccgccccagccccaucggcuaccuggggcugcucagccagcggacgcgcgacaucuacaucucccggcgccgccggggcaccuucaccuggacccucagcgacuccgagggcaacgagacgcccgggggcuacugccugacccgguggaugcugaucgaggccgagcucaagugcuucgggaacaccgccgucgccaagugcaacgagaagcacgacgaggaguucugcgacaugcugcgccuguucgacuucaacaagcaggcgauccggcgccucaagacccccgcccagaugagcauccagcugaucaacaaggccgugaacgcccugaucaacgaccagcucaucaugaagaaccaccuccgggacaucaugugcauccccuacugcaacuacuccaaguacugguaccugaaccacacggugaccgggaagaccagccugccccgcugcuggcuggucuccaacggcagcuaccugaacgagacccacuucuccgacgacaucgagcagcaggccgacaacaugaucacggagcuccugcagaaggaguacauggaccggcagggcaagaccccgcuggggcucguggaccuguucguguucagcaccuccuucuaccugaucagcaucuuccugcaccucguccgcaucccgacccaccggcacgugaucggcaagcccugccccaagccccaccgccugaaccacauggggaucugcuccugcggccuguacaagcacccgggggugcccgucaaguggaagcggugaggacuagucccuguucccagagcccacuuuuuuuucuuuuuuugaaauaaaauagccugucuuucagaucuaaaaaaaaaaaaaaaaaaaaaaaaaaaaaaaaaaaaaaaaaaaaaaaaaaaaaaaaaaaaaaaaaaaaaaaaaaaaaaaaaaaaaaaaaaaaaaaaaaaa

SEQ ID NO: 15477 - RNA, 1721 nt, Artificial Sequence
  mRNA product Design a-1 (A100) comprising derived and/or modified sequence from LASV(Lassa virus/H.sapiens-wt/NGA/2018/ISTH_0959;Clade II)__AVV65099__GPCmut1 (opt1)
aggagagucccgcagucggcguccagcggcucugcuuguucgugugugugucguugcaggccuuauucaagcuuaccaugggccagaucaucaccuucuuccaggaggugccccacgucaucgaggaggugaugaacaucgugcugaucgcccucagccugcuggccauccucaaggggaucuacaacgucgugaccugcggccuguucgggcugguguccuuccuccugcugugcggccgcagcugcuccacgaccuacaagggggucuacgagcuccagacccuggagcuggacauggcgagccucaacaugaccaugccgcuguccugcacgaagaacaacagccaccacuacaucauggugggcaacgagaccggccuggagcucacccugaccaacacguccaucaucaaccacaaguucugcaaccugagcgacgcccacaagaagaaccucuacgaccacgcccugauguccaucaucagcaccuuccaccuguccauccccaacuucaaccaguacgaggccaugagcugcgacuucaacgggggcaagaucuccgugcaguacaaccucagccacgccuacgcgaucgacgccgccaaccacugcgggaccaucgccaacggcguccugcagaccuucaugcggauggcguggggcggguccuacaucgcccuggacagcggcugcggguccugggacugcaucaugacgagcuaccaguaccucaucauccagaacaccaccugggaggaccacugccaguucucccgccccagccccaucggcuaccuggggcugcucagccagcggacccgcgacaucuacaucucccggcgccgccggggcacguucaccuggacccucagcgacuccgagggcaacgagacccccgggggcuacugccugacgcgguggaugcugaucgaggccgagcucaagugcuucgggaacaccgccguggccaagugcaacgagaagcacgacgaggaguucugcgacaugcugcgccuguucgacuucaacaagcaggcgauccggcgccucaagacccccgcccagaugagcauccagcugaucaacaaggccgugaacgcccugaucaacgaccagcucaucaugaagaaccaccuccgggacaucaugugcaucccguacugcaacuacuccaaguacugguaccugaaccacaccgucacggggaagaccagccugccccgcugcuggcugguguccaacggcagcuaccugaacgagacccacuucuccgacgacaucgagcagcaggccgacaacaugaucaccgagcuccugcagaaggaguacaucgaccggcagggcaagacgccccuggggcucguggaccuguucgucuucagcaccuccuucuaccugaucagcaucuuccugcaccucgugaagaucccgacccaccgccacgugaucggcaagcccugccccaagccccaccggcugaaccacauggggaucugcuccugcggccuguacaagcacccggggguccccgugaaguggaagcgcugaggacuagucccuguucccagagcccacuuuuuuuucuuuuuuugaaauaaaauagccugucuuucagaucuaaaaaaaaaaaaaaaaaaaaaaaaaaaaaaaaaaaaaaaaaaaaaaaaaaaaaaaaaaaaaaaaaaaaaaaaaaaaaaaaaaaaaaaaaaaaaaaaaaaa

SEQ ID NO: 15478 - RNA, 1721 nt, Artificial Sequence
  mRNA product Design a-1 (A100) comprising derived and/or modified sequence from LASV(LASV003-NIG-2008;Clade II)__AIT17580__GPCmut1 (opt1)
aggagagucccgcagucggcguccagcggcucugcuuguucgugugugugucguugcaggccuuauucaagcuuaccaugggccagaucaucaccuucuuccaggaggugccccacgucaucgaggaggugaugaacaucgugcugaucgcccucagccugcuggccauccucaaggggaucuacaacgucgcgaccugcggccuguucgggcugguguccuuccuccugcugugcggccgcagcugcuccacgaccuacaaggggguguacgagcuccagacccuggagcuggacauggccagccucaacaugaccaugccgcuguccugcacgaagaacaacagccaccacuacaucauggucggcaacgagaccggccuggagcucacccugaccaacacguccaucaucaaccacaaguucugcaaccugagcgacgcccacaagaagaaccucuacgaccacgcccugauguccaucaucagcaccuuccaccuguccauccccaacuucaaccaguacgaggccaugagcugcgacuucaacgggggcaagaucuccgugcaguacaaccucagccacaccuacgcgguggacgccgccaaccacugcgggaccaucgccaacggcguccugcagacguucaugcggauggcguggggcggguccuacaucgcccuggacagcggcugcggguccugggacugcaucaugaccagcuaccaguaccucaucauccagaacaccaccugggaggaccacugccaguucucccgccccagccccaucggcuaccuggggcugcucagccagcggacgcgcgacaucuacaucucccggcgccgccggggcaccuucaccuggacccucagcgacuccgagagcaacgagacgccgggcggguacugccugacccgguggaugcugaucgaggccgagcucaagugcuucggcaacaccgccguggccaagugcaacgagaagcacgacgaggaguucugcgacaugcugcgccuguucgacuucaacaagcaggcgauccggcgccucaaggcccccgcccagauguccauccagcugaucaacaaggccgugaacgcccugaucaacgaccagcucaucaugaagaaccaccuccgggacaucaugugcauccccuacugcaacuacagcaaguacugguaccugaaccacaccgucacgggccgcaccucccugccccggugcuggcuggugagcaacggguccuaccugaacgagacccacuucagcgacgacaucgagcagcaggcggacaacaugaucaccgagcuccugcagaaggaguacauggaccgccagggcaagacgccccugggccucguggaccuguucgucuucuccaccagcuucuaccugaucuccaucuuccugcaccucgugaagaucccgacccaccggcacgugaucgggaagcccugccccaagccccaccgccugaaccacaugggcaucugcagcugcgggcuguacaagcacccgggcguccccgugaaguggaagcggugaggacuagucccuguucccagagcccacuuuuuuuucuuuuuuugaaauaaaauagccugucuuucagaucuaaaaaaaaaaaaaaaaaaaaaaaaaaaaaaaaaaaaaaaaaaaaaaaaaaaaaaaaaaaaaaaaaaaaaaaaaaaaaaaaaaaaaaaaaaaaaaaaaaaa

SEQ ID NO: 15479 - RNA, 1721 nt, Artificial Sequence
  mRNA product Design a-1 (A100) comprising derived and/or modified sequence from LASV(LASV035-NIG-2009;Clade II)__AIT17588__GPCmut1 (opt1)
aggagagucccgcagucggcguccagcggcucugcuuguucgugugugugucguugcaggccuuauucaagcuuaccaugggccagaucaucaccuucuuccaggaggugccccacgucaucgaggaggugaugaacaucgugcugaucgcccucagccugcuggccauccucaaggggaucuacaacgucgcgaccugcggccuguucgggcugguguccuuccuccugcugugcggccgcagcugcuccacgaccuacaaggggguguacgagcuccagacccuggagcuggacauggccagccucaacaugaccaugccgcuguccugcacgaagaacaacagccaccacuacaucauggucggcaacgagaccggccuggagcucacccugaccaacacguccaucaucaaccacaaguucugcaaccugagcgacgcccacaagaagaaccucuacgaccacgcccugauguccaucaucagcaccuuccaccuguccauccccaacuucaaccaguacgaggccaugagcugcgacuucaacgggggcaagaucuccgugcaguacaaccucagccacgcguacgccguggacgccgccaaccacugcgggaccaucgcgaacggcguccugcagaccuucaugcggauggccuggggcggguccuacaucgcccuggacagcggcugcggguccugggacugcaucaugacgagcuaccaguaccucaucauccagaacaccaccugggaggaccacugccaguucucccgccccagccccaucggcuaccuggggcugcucagccagcggacccgcgacaucuacaucucccggcgccgccggggcacguucaccuggacccucagcgacuccgagggcaacgagacccccgggggcuacugccugacgcgguggaugcugaucgaggccgagcucaagugcuucgggaacaccgccguggcgaagugcaacgagaagcacgacgaggaguucugcgacaugcugcgccuguucgacuucaacaagcaggccauccggcgccucaaggcccccgcccagaugagcauccagcugaucaacaaggccgugaacgcgcugaucaacgaccagcucaucaugaagaaccaccuccgggacaucaugugcauccccuacugcaacuacuccaaguacugguaccugaaccacaccgucaccgggaagacgagccugccccgcugcuggcugguguccaacggcagcuaccugaacgagacccacuucuccgacgacaucgagcagcaggccgacaacaugaucaccgagcuccugcagaaggaguacaucgaccggcagggcaagaccccgcuggggcucguggaccuguucgucuucagcacguccuucuaccugaucagcaucuuccugcaccucgugaagaucccgacccaccgccacgugaucggcaagcccugccccaagccccaccggcugaaccacauggggaucugcuccugcggccuguacaagcacccggggguccccgugaaguggaagcgcugaggacuagucccuguucccagagcccacuuuuuuuucuuuuuuugaaauaaaauagccugucuuucagaucuaaaaaaaaaaaaaaaaaaaaaaaaaaaaaaaaaaaaaaaaaaaaaaaaaaaaaaaaaaaaaaaaaaaaaaaaaaaaaaaaaaaaaaaaaaaaaaaaaaaa

SEQ ID NO: 15480 - RNA, 1721 nt, Artificial Sequence
  mRNA product Design a-1 (A100) comprising derived and/or modified sequence from LASV(LASV1000-NIG-2009;Clade II)__AIT17782__GPCmut1 (opt1)
aggagagucccgcagucggcguccagcggcucugcuuguucgugugugugucguugcaggccuuauucaagcuuaccaugggccagaucaucaccuucuuccaggaggugccccacgucaucgaggaggugaugaacaucgugcugaucgcccucagccugcuggccauccucaaggggaucuacaacgucgcgaccugcggccuguucgggcugguguccuuccuccugcugugcggccgcagcugcuccacgaccuacaaggggguguacgagcuccagacccuggagcuggacauggccagccucaacaugaccaugccgcuguccugcacgaagaacaacagccaccacuacaucauggucggcaacgagaccggccuggagcucacccugaccaacacguccaucaucaaccacaaguucugcaaccugagcgacgcccacaagaagaaccucuacgaccacgcccugauguccaucaucagcaccuuccaccuguccauccccaacuucaaccaguacgaggccaugagcugcgacuucaacgggggcaagaucuccgugcaguacaaccucagccacaccuacgcgguggacgccgccaaccacugcgggaccaucgccaacggcguccugcagacguucaugcggauggcguggggcggguccuacaucgcccuggacagcggcugcggguccugggacugcaucaugaccagcuaccaguaccucaucauccagaacaccaccugggaggaccacugccaguucucccgccccagccccaucggcuaccuggggcugcucagccagcggacgcgcgacaucuacaucucccggcgccgccggggcaccuucaccuggacccucagcgacuccgagggcaacgagacgcccgggggcuacugccugacccgguggaugcugaucgaggccgagcucaagugcuucgggaacaccgccguggccaagugcaacgagaagcacgacgaggaguucugcgacaugcugcgccuguucgacuucaacaagcaggcgaucaagcggcucaagacccccgcccagaugagcauccagcugaucaacaaggccgugaacgcccugaucaacgaccagcucaucaugaagaaccaccuccgcgacaucaugugcauccccuacugcaacuacuccaaguacugguaccugaaccacacggucaccgggaagaccagccugccccggugcuggcugguguccaacggcagcuaccugaacgagacccacuucuccgacgacaucgagcagcaggccgacaacaugaucacggagcuccugcagaaggaguacaucgaccgccagggcaagaccccgcuggggcucguggaccuguucgucuucagcaccuccuucuaccugaucagcaucuuccugcaccucgugaagaucccgacccaccggcacguggucggcaagcccugccccaagccccaccgccugaaccacauggggaucugcuccugcggccuguacaagcacccgggggugcccgugaaguggaagcggugaggacuagucccuguucccagagcccacuuuuuuuucuuuuuuugaaauaaaauagccugucuuucagaucuaaaaaaaaaaaaaaaaaaaaaaaaaaaaaaaaaaaaaaaaaaaaaaaaaaaaaaaaaaaaaaaaaaaaaaaaaaaaaaaaaaaaaaaaaaaaaaaaaaaa

SEQ ID NO: 15481 - RNA, 1721 nt, Artificial Sequence
  mRNA product Design a-1 (A100) comprising derived and/or modified sequence from LASV(LASV221-NIG-2010;Clade II)__AIT17624__GPCmut1 (opt1)
aggagagucccgcagucggcguccagcggcucugcuuguucgugugugugucguugcaggccuuauucaagcuuaccaugggccagaucaucaccuucuuccaggaggugccccacgucaucgaggaggugaugaacaucgugcugaucgcccucagccugcuggccauccucaaggggaucuacaacgucgcgaccugcggccuguucgggcugguguccuuccuccugcugugcggccgcagcugcuccacgaccuacaaggggguguacgagcuccagacccuggagcuggacauggccagccucaacaugaccaugccgcuguccugcacgaagaacaacagccaccacuacaucauggucggcaacgagaccggccuggagcucacccugaccaacacguccaucaucaaccacaaguucugcaaccugagcgacgcccacaagaagaaccucuacgaccacgcccugauguccaucaucagcaccuuccaccuguccauccccaacuucaaccaguacgaggccaugagcugcgacuucaacgggggcaagaucuccgugcaguacaaccucagccacaccuacgcgaucgacgccgccaaccacugcgggaccaucgccaacggcgugcugcagacguucaugcggauggcguggggcggguccuacaucgcccuggacagcggcugcggguccugggacugcaucaugaccagcuaccaguaccucaucauccagaacaccaccugggaggaccacugccaguucucccgccccagccccaucggcuaccuggggcugcucagccagcggacgcgcgacaucuacaucucccggcgccgccggggcaccuucaccuggacccucagcgacuccgagggcaacgagacgcccgggggcuacugccugacccgguggaugcugaucgaggccgagcucaagugcuucgggaacaccgccgucgccaagugcaacgagaagcacgacgaggaguucugcgacaugcugcgccuguucgacuucaacaagcaggcgauccggcgccucaagacccccgcccagaugagcauccagcugaucaacaaggccgugaacgcccugaucaacgaccagcucaucaugaagaaccaccuccgggacaucaugugcauccccuacugcaacuacuccaaguacugguaccugaaccacacggugaccgggaagaccagccugccccgcugcuggcuggucuccaacggcagcuaccugaacgagacccacuucuccgacgacaucgagcagcaggccgacaacaugaucacggagaugcuccagaaggaguacauggaccggcagggcaagaccccgcuggggcugguggaccucuucguguucagcaccuccuucuaccugaucagcaucuuccugcaccuggucaagaucccgacccaccgccacgugaucggcaagcccugccccaagccccaccggcucaaccacauggggaucugcuccugcggccuguacaagcacccgggggugcccgucaaguggaagcgcugaggacuagucccuguucccagagcccacuuuuuuuucuuuuuuugaaauaaaauagccugucuuucagaucuaaaaaaaaaaaaaaaaaaaaaaaaaaaaaaaaaaaaaaaaaaaaaaaaaaaaaaaaaaaaaaaaaaaaaaaaaaaaaaaaaaaaaaaaaaaaaaaaaaaa

SEQ ID NO: 15482 - RNA, 1721 nt, Artificial Sequence
  mRNA product Design a-1 (A100) comprising derived and/or modified sequence from LASV(LASV237-NIG-2010;Clade II)__AIT17638__GPCmut1 (opt1)
aggagagucccgcagucggcguccagcggcucugcuuguucgugugugugucguugcaggccuuauucaagcuuaccaugggccagaucaucaccuucuuccaggaggugccccacgucaucgaggaggugaugaacaucgugcugaucgcccucagccugcuggccauccucaaggggaucuacaacgucgcgaccugcggccuguucgggcugguguccuuccuccugcugugcggccgcagcugcuccacgaccuacaaggggguguacgagcuccagacccuggagcuggacauggccagccucaacaugaccaugccgcuguccugcacgaagaacaacagccaccacuacaucauggucggcaacgagaccggccuggagcucacccugaccaacacguccaucaucaaccacaaguucugcaaccugagcgacgcccacaagaaggaccucuacgaccacgcccugauguccaucaucagcaccuuccaccuguccauccccaacuucaaccaguacgaggccaugagcugcgacuucaacgggggcaagaucuccgugcaguacaaccucagccacaccuacgcgguggacgccgccaaccacugcgggaccaucgccaacggcguccugcagacguucaugcggauggcguggggcggguccuacaucgcccuggacagcggcugcggguccugggacugcaucaugaccagcuaccaguaccucaucauccagaacaccaccugggaggaccacugccaguucucccgccccagccccaucggcuaccuggggcugcucagccagcggacgcgcgacaucuacaucucccggcgccgccggggcaccuucaccuggacccucagcgacuccgagggcaacgagacgcccgggggcuacugccugacccgguggaugcugaucgaggccgagcucaagugcuucgggaacaccgccguggccaagugcaacgagaagcacgacgaggaguucugcgacaugcugcgccuguucgacuucaacaagcaggcgauccggcgccucaagacccccgcccagaugagcauccagcugaucaacaaggccgugaacgcccugaucaacgaccagcucaucaugaagaaccaccuccgggacaucaugugcauccccuacugcaacuacuccaaguacugguaccugaaccacacggucaccgggaagaccagccugccccgcugcuggcugguguccaacggcagcuaccugaacgagacccacuucuccgacgacaucgagcagcaggccgacaacaugaucacggagcuccugcagaaggaguacauggaccggcagggcaagaccccgcuggggcucguggaccuguucgucuucagcaccuccuucuaccugaucagcaucuuccugcaccucaucaagaucccgacccaccgccacaucacgggcaagcccugccccaagccccaccggcugaaccacauggggaucugcuccugcggccuguacaagcacccgggggugcccgugaaguggaagcgcugaggacuagucccuguucccagagcccacuuuuuuuucuuuuuuugaaauaaaauagccugucuuucagaucuaaaaaaaaaaaaaaaaaaaaaaaaaaaaaaaaaaaaaaaaaaaaaaaaaaaaaaaaaaaaaaaaaaaaaaaaaaaaaaaaaaaaaaaaaaaaaaaaaaaa

SEQ ID NO: 15483 - RNA, 1721 nt, Artificial Sequence
  mRNA product Design a-1 (A100) comprising derived and/or modified sequence from LASV(LASV253-NIG-2011;Clade II)__AIT17670__GPCmut1 (opt1)
aggagagucccgcagucggcguccagcggcucugcuuguucgugugugugucguugcaggccuuauucaagcuuaccaugggccagaucaucaccuucuuccaggaggugccccacgucaucgaggaggugaugaacaucgugcugaucgcccucagccugcuggccauccucaaggggaucuacaacgucgcgaccugcggccuguucgggcugguguccuuccuccugcugugcggccgcagcugcuccacgaccuacaaggggguguacgagcuccagacccuggagcuggacauggccagccucaacaugaccaugccgcuguccugcacgaagaacaacagccaccacuacaucauggucggcaacgagaccggccuggagcucacccugaccaacacguccaucaucaaccacaaguucugcaaccugagcgacgcccacaagaagaaccucuacgaccacgcccugauguccaucaucagcaccuuccaccuguccauccccaacuucaaccaguacgaggccaugagcugcgacuucaacgggggcaagaucuccgugcaguacaaccucagccacaccuacgcgguggacgccgccaaccacugcgggaccaucgccaacggcguccugcagacguucaugcggauggcguggggcggguccuacaucgcccuggacagcggcugcggguccugggacugcaucaugaccagcuaccaguaccucaucauccagaacaccaccugggaggaccacugccaguucucccgccccagccccaucggcuaccuggggcugcucagccagcggacgcgcgacaucuacaucucccggcgccgccggggcaccuucaccuggacccucagcgacuccgagggcaacgagacgcccgggggcuacugccugacccgguggaugcugaucgaggccgagcucaagugcuucgggaacaccgccguggccaagugcaacgagaagcacgacgaggaguucugcgacaugcugcgccuguucgacuucaacaagcaggcgauccggcgccucaaggcccccgcccagaugagcauccagcugaucaacaaggccgugaacgcccugaucaacgaccagcucaucaugaagaaccaccuccgggacaucaugugcaucccguacugcaacuacuccaaguacugguaccugaaccacaccgucacggggcgcaccagccugccccggugcuggcugguguccaacggcagcuaccugaacgagacccacuucuccgacgacaucgagcagcaggcggacaacaugaucaccgagcuccugcagaaggaguacaucgaccgccagggcaagacgccccuggggcucguggaccuguucgucuucagcaccuccuucuaccugaucagcaucuuccugcaccucgugaagaucccgacccaccggcacaucaucggcaagcccugccccaagccccaccgccugaaccacauggggaucugcuccugcggccuguacaagcacccgggggugcccgucaaguggaagcggugaggacuagucccuguucccagagcccacuuuuuuuucuuuuuuugaaauaaaauagccugucuuucagaucuaaaaaaaaaaaaaaaaaaaaaaaaaaaaaaaaaaaaaaaaaaaaaaaaaaaaaaaaaaaaaaaaaaaaaaaaaaaaaaaaaaaaaaaaaaaaaaaaaaaa

SEQ ID NO: 15484 - RNA, 1721 nt, Artificial Sequence
  mRNA product Design a-1 (A100) comprising derived and/or modified sequence from LASV(LASV254-NIG-2011;Clade II)__AIT17674__GPCmut1 (opt1)
aggagagucccgcagucggcguccagcggcucugcuuguucgugugugugucguugcaggccuuauucaagcuuaccaugggccagaucaucaccuucuuccaggaggugccccacgucaucgaggaggugaugaacaucgugcugaucgcccucagccugcuggccauccucaaggggaucuacaacgucgcgaccugcggccuguucgggcugguguccuuccuccugcugugcggccgcagcugcuccacgaccuacaaggggguguacgagcuccagacccuggagcuggacaugaccaaccucaacaugacgaugccgcugagcugcaccaagaacaacucccaccacuacaucauggucggcaacgagaccggccuggagcucacccugacgaacaccagcaucaucaaccacaaguucugcaaccuguccgacgcccacaagaagaaccucuacaaccacgcccugaugagcaucaucuccaccuuccaccugagcauccccaacuucaaccaguacgaggccauguccugcgacuucaacgggggcaagaucagcgugcaguacaaccucucccacagcuacgccguggacgcggccaaccacugcgggaccaucgccaacggcguccugcagacguucaugcggauggccuggggcggguccuacaucgcgcuggacagcggcugcgggaacugggacugcaucaugaccuccuaccaguaccucaucauccagaacaccaccugggaggaccacugccaguucagccgccccucccccaucggcuaccuggggcugcucagccagcggacgcgcgacaucuacaucagccggcgccgccggggcaccuucaccuggacccucuccgacagcgagggcaacgagacgcccgggggcuacugccugacccgguggaugcugaucgaggccgagcucaagugcuucgggaacaccgccguggccaagugcaacgagaagcacgacgaggaguucugcgacaugcugcgccuguucgacuucaacaagcaggccauccggcgccucaagacccccgcgcaggccaacauccagcugaucaacaaggccgugaacgcccugaucaacgaccagcucaucaugaagaaccaccuccgggacaucaugugcauccccuacugcaacuacuccaaguacugguaccugaaccacacggucaccgggaagaccagccugccccgcugcuggcugguguccaacggcagcuaccugaacgagacccacuucuccgacgacaucgagcagcaggccgacaacaugaucacggagcuccugcagaaggaguacauggaccggcagggcaagaccccgcuggggcucguggaccuguucgucuucagcaccuccuucuaccugaucagcaucuuccugcaccucgugaagaucccgacccaccgccacgugaucggcaagcccugccccaagccccaccggcugaaccacauggggaucugcuccugcggccuguacaagcacccggggguccccgugaaguggaagcgcugaggacuagucccuguucccagagcccacuuuuuuuucuuuuuuugaaauaaaauagccugucuuucagaucuaaaaaaaaaaaaaaaaaaaaaaaaaaaaaaaaaaaaaaaaaaaaaaaaaaaaaaaaaaaaaaaaaaaaaaaaaaaaaaaaaaaaaaaaaaaaaaaaaaaa

SEQ ID NO: 15485 - RNA, 1721 nt, Artificial Sequence
  mRNA product Design a-1 (A100) comprising derived and/or modified sequence from LASV(Nig08-A19;Clade III)__ADU56618__GPCmut1 (opt1)
aggagagucccgcagucggcguccagcggcucugcuuguucgugugugugucguugcaggccuuauucaagcuuaccaugggccagaucgugaccuucuuccaggaggucccccacgugaucgaggaggugaugaacaucguccugaucgcccucagcauccuggccauccugaaggggcucuacaacaucgcgaccugcggccugaucgggcuggugacguuccuccugcuguccggccgcagcugcuccaugaccuacaaggggguguacgagcuccagacccuggagcugaacaugaacacccucaacaugacgaugccgcugagcugcaccaagaacaacucccaccacuacaucauggucggcaacgagaccggccuggagcucacccugacgaacaccagccugcuccaccacaaguucugcaaccuguccgacgcccacaagaagaaccuguacgaccacacccucaugagcaucaucuccaccuuccaccugagcauccccaacuucaaccaguacgaggccauguccugcgacuucaacgggggcaagaucacggugcaguacaaccugagccacuccuacgccaucgacgccgcgaaccacugcgggaccguggccaacggcguccuccagaccuucaugcggauggccuggggcgggagcuacaucgcccuggacuccggcugcgggaagugggacugcaucaugaccagcuaccaguaccugaucauccagaacacgaccugggaggaccacugccaguucucccggcccagccccaucggcuaccucgggcugcugucccagcgcacccgggacaucuacaucagccgccggcgccggggcaccuucacguggacccugagcgacuccgagggcaacgagacccccgggggcuacugccucacccgcuggaugcugaucgaggcggagcugaagugcuucgggaacacggccguggccaagugcaacgagaagcacgacgaggaguucugcgacaugcuccggcuguucgacuucaacaagcaggccauccgccggcugaaggcccccgcgcagaugagcauccagcucaucaacaaggccgugaacgcccugaucaacgaccagcugaucaugaagaaccaccuccgcgacaucaugugcauccccuacugcaacuacuccaaguacugguaccugaaccacaccagcaccgggcggaccucccugccccgcugcuggcucgucagcaacggcuccuaccugaacgagacgcacuucagcgacgacaucgagcagcaggccgacaacaugaucaccgagaugcugcagaaggaguaccucgaccggcagggcaagaccccgcuggggcugguggaccuguucguguucuccaccagcuucuaccucaucuccaucuuccugcaccuggucaagaucccgacgcaccgccacaucgugggcaagcccugccccaagccccaccggcucaaccacauggggaucugcagcugcggccuguacaagcagccgggggugcccguccgcuggaagcggugaggacuagucccuguucccagagcccacuuuuuuuucuuuuuuugaaauaaaauagccugucuuucagaucuaaaaaaaaaaaaaaaaaaaaaaaaaaaaaaaaaaaaaaaaaaaaaaaaaaaaaaaaaaaaaaaaaaaaaaaaaaaaaaaaaaaaaaaaaaaaaaaaaaaa

SEQ ID NO: 15486 - RNA, 1724 nt, Artificial Sequence
  mRNA product Design a-1 (A100) comprising derived and/or modified sequence from LASV(G1180-SLE-2010;Clade IV)__AIT17168__GPCmut1 (opt1)
aggagagucccgcagucggcguccagcggcucugcuuguucgugugugugucguugcaggccuuauucaagcuuaccaugggccagaucgugaccuucuuccaggaggucccccacgugaucgaggaggugaugaacaucguccugaucgcccucagcauccuggccgugcugaaggggcucuacaacuucgcgaccugcggccugguggggcugcucaccuuccugcugcucugcggccgcuccugcaccgccagccgguacaagggggucuacgagcugcagacccuggagcucaacauggagacccugaacaugacgaugccgcuguccugcaccaagaacaacagccaccacuacaucauggugggcaacgagaccggccucgagcugacccugacgaacaccuccaucaucaaccacaaguucugcaaccucagcgacgcccacaagaagaaccuguacgaccacgcccugauguccaucaucagcaccuuccaccucuccauccccaacuucaaccaguacgaggccaugagcugcgacuucaacgggggcaagaucuccgugcaguacaaccugagccacuccuacgcgggggacgccgccaaccacugcggcaccgucgccaacggggugcugcagacguucaugcgcauggcguggggcggcagcuacaucgcccucgacuccgggugcggcagcugggacugcaucaugaccuccuaccaguaccugaucauccagaacaccaccugggaggaccacugccaguucagccggcccucccccaucggguaccugggccuccugagccagcgcacgcgggacaucuacaucagccgccggcgccggggcaccuucaccuggacccuguccgacagcgaggggaaggacacgccgggcggguacugccugacccgcuggaugcucaucgaggccgagcugaagugcuucggcaacaccgccguggccaagugcaacgagaagcacgacgaggaguucugcgacaugcugcggcuguucgacuucaacaagcaggcgauccagcgccugaaggcccccgcccagauguccauccagcugaucaacaaggccgucaacgcccucaucaacgaccagcugaucaugaagaaccaccuccgggacaucaugugcauccccuacugcaacuacagcaaguacugguaccucaaccacaccacgaccggcaagaccucccugcccaagugcuggcuggugagcaacggcuccuaccucaacgagacccacuucagcgacgacaucgagcagcaggcggacaacaugaucacggagaugcugcagaaggaguacauggagcgccaggggaagacgccccugggccucguggaccuguucgucuucuccaccagcuucuaccugaucuccaucuuccugcaccucgugaagaucccgacccaccggcacaucgugggcaagagcugccccaagccccaccgccugaaccacauggggaucugcuccugcgggcuguacaagcagcccggcgucccggugaaguggaagcggugaggacuagucccuguucccagagcccacuuuuuuuucuuuuuuugaaauaaaauagccugucuuucagaucuaaaaaaaaaaaaaaaaaaaaaaaaaaaaaaaaaaaaaaaaaaaaaaaaaaaaaaaaaaaaaaaaaaaaaaaaaaaaaaaaaaaaaaaaaaaaaaaaaaaa

SEQ ID NO: 15487 - RNA, 1724 nt, Artificial Sequence
  mRNA product Design a-1 (A100) comprising derived and/or modified sequence from LASV(G1442-SLE-2011;Clade IV)__AIT17180__GPCmut1 (opt1)
aggagagucccgcagucggcguccagcggcucugcuuguucgugugugugucguugcaggccuuauucaagcuuaccaugggccagaucgugaccuucuuccaggaggucccccacgugaucgaggaggugaugaacaucguccugaucgcccucagcauccuggccgugcugaaggggcucuacaacguggcgaccugcggccugaucgggcuggucacguuccuccugcugugcggccgcuccugcaccaccacccucuacaaggggguguacgagcugcagacgcuggagcucaacauggagacccugaacaugaccaugccgcugagcugcaccaagaacaacucccaccacuacauccgggugggcaacgagacgggccucgagcugacccugaccaacaccagcaucaucaaccacaaguucugcaaccucuccgacgcccacaagaagaaccuguacgaccacgcccugaugagcaucaucuccacguuccaccucagcauccccaacuucaaccaguacgaggccauguccugcgacuucaacgggggcaagaucagcguccaguacaaccugucccacagcuacgccggggacgcggccaaccacugcggcaccguggccaacggggugcugcagaccuucaugcgcauggccuggggcggcuccuacaucgcgcucgacagcgggugcggcaacugggacugcaucaugaccuccuaccaguaccugaucauccagaacacgaccugggacgaccacugccaguucagccgccccucccccaucggguaccugggccuccugagccagcggacccgcgacgucuacaucucccggcgccgccggggcaccuucacguggacccugagcgacagcgaggggaaggacaccccgggcggguacugccugacccgguggaugcucaucgaggccgagcugaagugcuucggcaacacggccguggccaagugcaacgagaagcacgacgaggaguucugcgacaugcugcgccucuucgacuucaacaagcaggccauccagcggcugaaggcgcccgcccagauguccauccagcugaucaacaaggccgugaacgcccucaucaacgaccagcugaucaugaagaaccaccuccgcgacaucaugugcauccccuacugcaacuacagcaaguacugguaccugaacaacaccgccaccggcaagaccucccugcccaagugcuggcugaucagcaacggcuccuaccucaacgagacgcacuucagcgacgacaucgagcaggaggcggacaacaugaucaccgagaugcugcagaaggaguacauggagcggcaggggaagacgccccugggccucgucgaccuguucguguucuccaccagcuucuaccugaucuccaucuuccugcaccucgugaagaucccgacccaccgccacaucgucggcaagagcugccccaagccccaccggcugaaccacauggggaucugcuccugcgggcuguacaagcagcccggcgugccggugcgcuggaagcggugaggacuagucccuguucccagagcccacuuuuuuuucuuuuuuugaaauaaaauagccugucuuucagaucuaaaaaaaaaaaaaaaaaaaaaaaaaaaaaaaaaaaaaaaaaaaaaaaaaaaaaaaaaaaaaaaaaaaaaaaaaaaaaaaaaaaaaaaaaaaaaaaaaaaa

SEQ ID NO: 15488 - RNA, 1724 nt, Artificial Sequence
  mRNA product Design a-1 (A100) comprising derived and/or modified sequence from LASV(G3010-SLE-2013;Clade IV)__AIT17344__GPCmut1 (opt1)
aggagagucccgcagucggcguccagcggcucugcuuguucgugugugugucguugcaggccuuauucaagcuuaccaugggccagaucgugaccuucuuccaggaggucccccacgugaucgaggaggugaugaacaucguccugaucgcccucagcauccuggccgugcugaaggggcucuacaacuucgcgaccugcggccugguggggcuggucacguuccuccugcugugcggccgcuccugcaccaccagccucuacaaggggguguacgagcugcagacccuggagcucaacauggagacgcugaacaugaccaugccgcuguccugcaccaagaacaacagccaccacuacaucauggugggcaacgagaccggccucgagcugacgcugaccaacaccuccaucaucaaccacaaguucugcaaccucagcgacgcccacaagaagaaccuguacaaccacgcccugauguccaucaucagcaccuuccaccucuccauccccaacuucaaccaguacgaggccaugagcugcgacuucaacgggggcaagaucuccguccaguacaaccugagccacuccuacgccggggacgcggccagccacugcggcacgguggccaacggggugcugcagaccuucaugcggauggccuggggcggcuccuacaucgcgcucgacagcgggugcggcaagugggacugcaucaugaccuccuaccaguaccugaucauccagaacaccacgugggaggaccacugccaguucagccgccccucccccaucggguaccugggccuccugagccagcggacccgcgacaucuacaucagccggcgccgccggggcaccuucaccuggacgcuguccgacagcgaggggaaggacaccccgggcggguacugccugacccgguggaugcucaucgaggccgagcugaagugcuucggcaacaccgccgucgccaagugcaacgagaagcacgacgaggaguucugcgacaugcugcgccucuucgacuucaacaagcaggccauccagcggcugaagacgcccgcgcagauguccauccagcugaucaacaaggccgugaacgcccucaucaacgaccagcugaucaugaagaaccaccuccgcgacaucaugugcauccccuacugcaacuacagcaaguacugguaccugaaccacaccaccaccggcaagacgucccugcccaagugcuggcuggugagcaacggcuccuaccucaacgagacccacuucagcgacgacaucgagcagcaggccgacaacaugaucaccgagaugcugcagaaggaguacauggagcggcaggggaagacgccccugggccucgucgaccuguucguguucuccaccagcuucuaccugaucuccaucuuccugcaccucgugaagaucccgacccaccgccacaucgucggcaagagcugccccaagccccaccggcugaaccacauggggaucugcuccugcgggcuguacaagcagcccggcgugccggugcgcuggaagcggugaggacuagucccuguucccagagcccacuuuuuuuucuuuuuuugaaauaaaauagccugucuuucagaucuaaaaaaaaaaaaaaaaaaaaaaaaaaaaaaaaaaaaaaaaaaaaaaaaaaaaaaaaaaaaaaaaaaaaaaaaaaaaaaaaaaaaaaaaaaaaaaaaaaaa

SEQ ID NO: 15489 - RNA, 1724 nt, Artificial Sequence
  mRNA product Design a-1 (A100) comprising derived and/or modified sequence from LASV(G502-SLE-2009;Clade IV)__AIT17126__GPCmut1 (opt1)
aggagagucccgcagucggcguccagcggcucugcuuguucgugugugugucguugcaggccuuauucaagcuuaccaugggccagaucgugaccuucuuccaggaggucccccacgugaucgaggaggugaugaacaucguccugaucgcccucagcauccuggccgugcugaaggggcucuacaacuucgcgaccugcggccugguggggcugcucacguuccugcugcucugcggccgcuccugcaccaccgggcuguacaagggcgucuacgagcugcagacccucgagcugaacauggagacgcugaacaugaccaugccgcucagcugcaccaagaacaacucccaccacuacaucauggugggcaacgagaccgggcuggagcugacgcucaccaacaccagcaucaucaaccacaaguucugcaaccuguccgacgcccacaagaagaaccuguacgaccacgcccucaugagcaucaucuccaccuuccaccugagcauccccaacuucaaccaguacgaggccauguccugcgacuucaacggcgggaagaucagcgugcaguacaaccugucccacagcuacgccggcgacgcggccgaccacugcgggacggucgccaacggcgugcuccagaccuucaugcggauggccuggggcggguccuacaucgcgcuggacagcggcugcgggcggugggacugcaucaugaccuccuaccaguaccugaucauccagaacaccacgugggaggaccacugccaguucagccgccccucccccaucggcuaccucggccugcugagccagcggacccgcgacaucuacaucucccggcgccgccgggggaccuucaccuggacgcugagcgacagcgagggcaaggacacccccgggggcuacugccucacccgguggaugcugaucgaggccgagcugaagugcuucgggaacaccgccguggccaagugcaacgagaagcacgacgaggaguucugcgacaugcuccgccuguucgacuucaacaagcaggccauccagcggcugaaggcgcccgcccagauguccauccagcucaucaacaaggccgucaacgcccugaucaacgaccagcuggugaugaagaaccaccuccgcgacaucaugugcauccccuacugcaacuacagccgguacugguaccugaaccacacgaccaccggccgcaccucccugcccaagugcuggcucgugagcaacggguccuaccugaacgagacgcacuucagcgacgacaucgagcagcaggccgacaacaugaucaccgagaugcugcagaaggaguacauggagcggcagggcaagaccccgcucgggcuggucgaccuguucguguucuccaccagcuucuaccugaucuccaucuuccuccaccuggugaagaucccgacgcaccgccacaucgucggcaagagcugccccaagccccaccggcugaaccacauggggaucugcuccugcggccucuacaagcagcccggcgugccggugaaguggaagcgcugaggacuagucccuguucccagagcccacuuuuuuuucuuuuuuugaaauaaaauagccugucuuucagaucuaaaaaaaaaaaaaaaaaaaaaaaaaaaaaaaaaaaaaaaaaaaaaaaaaaaaaaaaaaaaaaaaaaaaaaaaaaaaaaaaaaaaaaaaaaaaaaaaaaaa

SEQ ID NO: 15490 - RNA, 1724 nt, Artificial Sequence
  mRNA product Design a-1 (A100) comprising derived and/or modified sequence from LASV(G733-SLE-2010;Clade IV)__AIT17154__GPCmut1 (opt1)
aggagagucccgcagucggcguccagcggcucugcuuguucgugugugugucguugcaggccuuauucaagcuuaccaugggccagaucgugaccuucuuccaggaggucccccacgugaucgaggaggugaugaacaucguccugaucgcccucagcauccuggccgugcugaaggggcucuacaacuucgcgaccugcggcaucguggggcuggucuccuuccugcuccugugcggccgcagcugcacgaccucccuguacaaggggguguacgagcuccagacccuggagcugaacauggagacccucaacaugacgaugccgcugagcugcaccaagaacaacucccaccacuacaucauggugggcaacgagaccggccuggagcucacccugacgaacaccagcaucaucaaccacaaguucugcaaccuguccgacgcccacaagaagaaccucuacgaccacgcccugaugagcaucaucuccaccuuccaccugagcauccccaacuucaaccaguacgaggccauguccugcgacuucaacgggggcaagaucagcguccaguacaaccucucccacagcuacgccggggacgcggccaaccacugcggcaccaucgccaacggggugcugcagacguucaugcggauggccuggggcggcuccuacaucgcgcuggacagcgggugcgaccggugggacugcaucaugaccuccuaccaguaccucaucauccagaacaccaccugggaggaccacugccaguucagccgccccucccccaucggcuaccuggggcugcucagccagcggacgcgcgacaucuacaucagccggcgccgccggggcaccuucaccuggacccucuccgacagcgagggcaaggacacgcccgggggcuacugccugacccgguggaugcugaucgaggccgagcucaagugcuucgggaacaccgccguggccaagugcaacgagaagcacgacgaggaguucugcgacaugcugcgccuguucgacuucaacaagcaggccauccagcggcucaaggcgcccgcccagauguccauccagcugaucaacaaggccgucaacgcccugaucaacgaccagcucaucaugaagaaccaccuccgcgacaucaugugcauccccuacugcaacuacagcaaguacugguaccugaaccacaccacgaccgggaagaccucccugcccaagugcuggcuggugagcaacggcuccuaccugaacgagacccacuucagcgacgacaucgagcagcaggccgacaacaugaucacggagaugcuccagaaggaguacauggagcggcagggcaagaccccgcuggggcugguggaccucuucgucuucuccaccagcuucuaccugaucuccaucuuccugcaccuggugaagaucccgacccaccgccacguggucggcaagagcugccccaagccccaccggcucaaccacauggggaucugcuccugcggccuguacgggcagcccggcgugccggugaaguggaagcgcugaggacuagucccuguucccagagcccacuuuuuuuucuuuuuuugaaauaaaauagccugucuuucagaucuaaaaaaaaaaaaaaaaaaaaaaaaaaaaaaaaaaaaaaaaaaaaaaaaaaaaaaaaaaaaaaaaaaaaaaaaaaaaaaaaaaaaaaaaaaaaaaaaaaaa

SEQ ID NO: 15491 - RNA, 1724 nt, Artificial Sequence
  mRNA product Design a-1 (A100) comprising derived and/or modified sequence from MOPV/LASV reassortant(IGS-1;Clade IV)__AFY05576__GPCmut1 (opt1)
aggagagucccgcagucggcguccagcggcucugcuuguucgugugugugucguugcaggccuuauucaagcuuaccaugggccagaucgugaccuucuuccaggaggucccccacgugaucgaggaggugaugaacaucguccugaucgcccucagcgugcuggccgugcugaaggggcucuacaacuucgcgaccugcggccuggucgggcuggugacguuccuccugcugugcggccgcuccugcaccaccagccucuacaaggggguguacgagcugcagacccuggagcucaacauggagacgcugaacaugaccaugccgcuguccugcaccaagaacaacagccaccacuacaucauggucggcaacgagaccggccucgagcugacgcugaccaacaccuccaucaucaaccacaaguucugcaaccucagcgacgcccacaagaagaaccuguacgaccacgcccugauguccaucaucagcaccuuccaccucuccauccccaacuucaaccaguacgaggccaugagcugcgacuucaacgggggcaagaucuccgugcaguacaaccugagccacuccuacgccggggacgcggccaaccacugcggcacgguggccaacgggguccugcagaccuucaugcggauggccuggggcggcagcuacaucgcgcucgacuccgggugcggcaacugggacugcaucaugaccagcuaccaguaccugaucauccagaacaccacgugggaggaccacugccaguucucccggcccagccccaucggguaccugggccuccugucccagcgcacccgggacaucuacaucagccgccggcgccggggcaccuucaccuggacgcugagcgacuccgagggggaggacaccccgggcggguacugccugacccgcuggaugcucaucgaggccgagcugaagugcuucggcaacaccgccguggccaagugcaacgagaagcacgacgaggaguucugcgacaugcugcggcuguucgacuucaacaagcaggccauccagcgccugaaggcgcccgcccagaugagcauccagcugaucaacaaggccgugaacgcccucaucaacgaccagcugaucaugaagaaccaccuccgggacaucaugugcauccccuacugcaacuacuccaaguacugguaccucaaccacacgaccaccggccgcaccagccugcccaagugcuggcuggucuccaacggcagcuaccucaacgagacgcacuucuccgacgacaucgagcagcaggccgacaacaugaucaccgagaugcugcagaaggaguacauggagcggcaggggaagacgccccugggccucguggaccuguucguguucagcaccuccuucuaccugaucagcaucuuccugcaccucgucaagaucccgacccaccgccacaucguggggaaguccugccccaagccccaccggcugaaccacaugggcaucugcagcugcgggcuguacaagcagcccggcgugccggucaaguggaagcgcugaggacuagucccuguucccagagcccacuuuuuuuucuuuuuuugaaauaaaauagccugucuuucagaucuaaaaaaaaaaaaaaaaaaaaaaaaaaaaaaaaaaaaaaaaaaaaaaaaaaaaaaaaaaaaaaaaaaaaaaaaaaaaaaaaaaaaaaaaaaaaaaaaaaaa

SEQ ID NO: 15492 - RNA, 1724 nt, Artificial Sequence
  mRNA product Design a-1 (A100) comprising derived and/or modified sequence from LASV(LM765-SLE-2012;Clade IV)__AIT17814__GPCmut1 (opt1)
aggagagucccgcagucggcguccagcggcucugcuuguucgugugugugucguugcaggccuuauucaagcuuaccaugggccagaucgugaccuucuuccaggaggucccccacgugaucgaggaggugaugaacaucguccugaucgcccucagcauccuggccgugcugaaggggcucuacaacuucgcgaccugcggccugguggggcuggucacguuccuccugcugugcggccgcuccugcaccaccagccucuacaaggggguguacgagcugcagacccuggagcucaacauggagacgcugaacaugaccaugccgcuguccugcaccaagaacaacagccaccacuacaucauggugggcaacgagaccggccucgagcugacgcugaccaacaccuccaucaucgaccacaaguucugcaaccucagcgacgcccaccggaagaaccuguacgaccacgcccugauguccaucaucagcaccuuccaccucuccauccccaacuucaaccaguacgaggccaugagcugcgacuucaacgggggcaagaucuccguccaguacaaccugagccacuccuacgccaaggacgcggccgaccacugcgggacgguggccaacggcgugcugcagaccuucaugcgcauggccuggggcgggagcuacaucgcgcucgacuccggcugcgggcgcugggacugcaucaugaccagcuaccaguaccugaucauccagaacaccacgugggaggaccacugccaguucucccggcccagccccaucggcuaccuggggcuccugucccagcgcacccgggacaucuacaucagccgccggcgccggggcaccuucaccuggacgcugagcgacuccgagggcaaggacacccccgggggcuacugccugacccgcuggaugcucaucgaggccgagcugaagugcuucgggaacaccgccgucgccaagugcaacgagaagcacgacgaggaguucugcgacaugcugcggcuguucgacuucaacaagcaggccauccagcgccugaaggcgcccgcccagaugagcauccagcugaucaacaaggccgugaacgcccucaucaacgaccagcugaucaugaagaaccaccuccgggacaucaugugcauccccuacugcaacuacuccaaguacugguaccucaaccacacgaccaccgggaagaccagccugcccaagugcuggcugguguccaacggcagcuaccucaacgagacgcacuucuccgacgacaucgagcagcaggccgacaacaugaucaccgagaugcugcagaaggaguacauggagcgccagggcaagaccccgcuggggcucgucgaccuguucguguucagcaccuccuucuaccugaucagcaucuuccugcaccucgugaagaucccgacgcaccggcacaucgucggcaagcccugccccaagccccaccgccugaaccacauggggaucugcuccugcggccuguacaagcagccgggggugcccgugaaguggaagcggugaggacuagucccuguucccagagcccacuuuuuuuucuuuuuuugaaauaaaauagccugucuuucagaucuaaaaaaaaaaaaaaaaaaaaaaaaaaaaaaaaaaaaaaaaaaaaaaaaaaaaaaaaaaaaaaaaaaaaaaaaaaaaaaaaaaaaaaaaaaaaaaaaaaaa

SEQ ID NO: 15493 - RNA, 1724 nt, Artificial Sequence
  mRNA product Design a-1 (A100) comprising derived and/or modified sequence from LASV(LM776-SLE-2012;Clade IV)__AIT17824__GPCmut1 (opt1)
aggagagucccgcagucggcguccagcggcucugcuuguucgugugugugucguugcaggccuuauucaagcuuaccaugggccagaucgugaccuucuuccaggaggucccccacgugaucgaggaggugaugaacaucguccugaucgcccucagcauccuggccgugcugaaggggcucuacaacuucgcgaccugcggccugguggggcuggucacguuccuccugcugugcggccgcuccugcaccaccagcguguacaaggggguguacgagcuccagacccuggagcugaacauggagacgcucaacaugaccaugccgcuguccugcaccaagaacaacagccaccacuacaucauggucggcaacgagaccggccuggagcucacgcugaccaacaccuccaucaucaaccacaaguucugcaaccugagcgacgcccacaagaagaaccucuacgaccacgcccugauguccaucaucagcaccuuccaccuguccauccccaacuucaaccaguacgaggccaugagcugcgacuucaacgggggcaagaucuccgugcaguacaaccucagccacuccuacgccggggacgcggccaaccacugcggcacgguggccaacgggguccugcagaccuucaugcggauggccuggggcggcagcuacaucgcgcuggacuccgggugcggcaagugggacugcaucaugaccagcuaccaguaccucaucauccagaacaccacgugggaggaccacugccaguucucccgccccagccccaucggguaccugggccugcucucccagcggacccgcgacaucuacaucagccggcgccgccggggcaccuucaccuggacgcucagcgacuccgaggggaaggacaccccgggcggguacugccugacccgguggaugcugaucgaggccgagcucaagugcuucggcaacaccgccguggccaagugcaacgagaagcacgacgaggaguucugcgacaugcugcgccuguucgacuucaacaagcaggccauccagcggcucaaggcgcccgcccagaugagcauccagcugaucaacaaggccgugaacgcccugaucaacgaccagcucaucaugaagaaccaccuccgcgacaucaugugcauccccuacugcaacuacuccaaguacugguaccugaaccacacgaccaccggcaagaccagccugcccaagugcuggcuggucuccaacggcagcuaccugaacgagacgcacuucuccgacgacaucgagcagcaggccgacaacaugaucaccgagaugcuccagaaggaguacauggagcggcaggggaagacgccccugggccugguggaccucuucguguucagcaccuccuucuaccugaucagcaucuuccugcaccuggucaagaucccgacccaccgccacaucguggggaaguccugccccaagccccaccggcucaaccacaugggcaucugcagcugcgggcuguacaagcagcccggcgugccgguccgcuggaagcggugaggacuagucccuguucccagagcccacuuuuuuuucuuuuuuugaaauaaaauagccugucuuucagaucuaaaaaaaaaaaaaaaaaaaaaaaaaaaaaaaaaaaaaaaaaaaaaaaaaaaaaaaaaaaaaaaaaaaaaaaaaaaaaaaaaaaaaaaaaaaaaaaaaaaa

SEQ ID NO: 15494 - RNA, 1724 nt, Artificial Sequence
  mRNA product Design a-1 (A100) comprising derived and/or modified sequence from LASV(Mad39;Clade IV)__ANH09722__GPCmut1 (opt1)
aggagagucccgcagucggcguccagcggcucugcuuguucgugugugugucguugcaggccuuauucaagcuuaccaugggccagaucgugaccuucuuccaggaggucccccacgugaucgaggaggugaugaacaucguccugaucgcccucagcauccuggccgugcugaaggggcucuacaacguggcgaccugcggccugaucgggcuggucacguuccuccugcugugcggccgcuccugcaccaccacccucuacaaggggguguacgagcugcaggcccuggagcucaacauggagacgcugaacaugaccaugccgcugagcugcaccaagaacaacucccaccacuacauccgggugggcaacgagaccggccucgagcugacgcugaccaacaccagccucaucaaccacaaguucugcaaccuguccgacgcccacaagaagaaccuguacgaccacgcccucaugagcaucaucuccaccuuccaccugagcauccccaacuucaaccaguacgaggccauguccugcgacuucaacgacgggaagaucagcguccaguacaaccugucccacacguacgcgggcgacaccgccaaccacugcgggaccguggccaacggcgugcuccagaccuucaugcgcauggccuggggcgggagcuacaucgcgcuggacuccggcugcgggggcugggacugcaucaugacgagcuaccaguaccugaucauccagaacaccaccugggaggaccacugccaguucucccggcccagccccaucggguaccucggccugcugucccagcggacccgcgacaucuacaucagccggcgccgccggggcacguucaccuggacccuguccgacagcgaggggaaggacaccccgggcggguacugccucacgcgguggaugcugaucgaggccgagcugaagugcuucggcaacaccgccgucgccaagugcaacgagaagcacgacgaggaguucugcgacaugcuccgccuguucgacuucaacaagcaggccauccagcggcugaaggcgcccgcccagaugagcauccagcucaucaacaaggccgugaacgcccugaucaacgaccagcugaucaugaagaaccaccuccgcgacaucaugugcauccccuacugcaacuacuccaaguacugguaccugaaccacaccgugaccggcaagacgagccugcccaagugcuggcucgucuccaacggcagcuaccugaacgagacccacuucuccgacgacaucgagcagcaggccgacaacaugaucaccgagaugcugcagaaggaguacauggagcggcaggggaagacgccccucggccugguggaccuguucguguucagcaccuccuucuaccugaucagcaucuuccuccaccuggucaagaucccgacccaccgccacgugguggggaagcccugccccaagccccaccggcugaaccacaugggcaucugcuccugcggguucuacaagcagccgggcguccccgugcgcuggaagcggugaggacuagucccuguucccagagcccacuuuuuuuucuuuuuuugaaauaaaauagccugucuuucagaucuaaaaaaaaaaaaaaaaaaaaaaaaaaaaaaaaaaaaaaaaaaaaaaaaaaaaaaaaaaaaaaaaaaaaaaaaaaaaaaaaaaaaaaaaaaaaaaaaaaaa

SEQ ID NO: 15495 - RNA, 1724 nt, Artificial Sequence
  mRNA product Design a-1 (A100) comprising derived and/or modified sequence from LASV(Z0947-SLE-2011;Clade IV)__AIT17840__GPCmut1 (opt1)
aggagagucccgcagucggcguccagcggcucugcuuguucgugugugugucguugcaggccuuauucaagcuuaccaugggccagaucgugaccuucuuccaggaggucccccacgugaucgaggaggugaugaacaucguccugaucgcccucagcauccuggccgugcugaaggggcucuacaacuucgcgaccugcggccugguggggcuggucacguuccuccugcugugcggccgcuccugcaccaucagccucuacaaggggguguacgagcugcagacccuggagcucaacauggagacccugaacaugacgaugccgcuguccugcaccaagaacaacagccaccacuacaucauggugggcaacgagaccggccucgagcugacccugacgaacaccuccaucaucaaccacaaguucugcaaccucagcgacgcccacaagaagaaccuguacgaccacgcccugauguccaucaucagcaccuuccaccucuccauccccaacuucaaccaguacgaggccaugagcugcgacuucaacgggggcaagaucuccguccaguacaaccugagccacuccuacgccggggacgcggccaaccacugcggcaccguggccaacggggugcugcagacguucaugcggauggccuggggcggcagcuacaucgcgcucgacuccgggugcgaccggugggacugcaucaugaccagcuaccaguaccugaucauccagaacaccaccugggaggaccacugccaguucucccgccccagccccaucggcuaccuggggcuccugucccagcggacgcgcgacaucuacaucagccggcgccgccggggcaccuucaccuggacccugagcgacuccgagggcaaggacacgcccgggggcuacugccugacccgguggaugcucaucgaggccgagcugaagugcuucgggaacaccgccgucgccaagugcaacgagaagcacgacgaggaguucugcgacaugcugcgccucuucgacuucaacaagcaggccauccagcggcugaaggcgcccgcccagaugagcauccagcugaucaacaaggccgugaacgcccucaucaacgaccagcugaucaugaagaaccaccuccgcgacaucaugugcauccccuacugcaacuacuccaaguacugguaccugaaccacaccacgaccgggaagaccagccugcccaagugcuggcugguguccaacggcagcuaccucaacgagacccacuucuccgacgacaucgagcagcaggccgacaacaugaucacggagaugcugcagaaggaguacauggagcggcagggcaagaccccgcuggggcucgucgaccuguucguguucagcaccuccuucuaccugaucagcaucuuccugcaccucgugaagaucccgacccaccgccacaucgucggcaagcccugccccaagccccaccggcugaaccacauggggaucugcuccugcggccuguacaagcagccgggggugcccgugaaguggaagcgcugaggacuagucccuguucccagagcccacuuuuuuuucuuuuuuugaaauaaaauagccugucuuucagaucuaaaaaaaaaaaaaaaaaaaaaaaaaaaaaaaaaaaaaaaaaaaaaaaaaaaaaaaaaaaaaaaaaaaaaaaaaaaaaaaaaaaaaaaaaaaaaaaaaaaa

SEQ ID NO: 15496 - RNA, 1724 nt, Artificial Sequence
  mRNA product Design a-1 (A100) comprising derived and/or modified sequence from LASV(Josiah;Clade IV)__NP_694870__GPCmut1 (opt1)
aggagagucccgcagucggcguccagcggcucugcuuguucgugugugugucguugcaggccuuauucaagcuuaccaugggccagaucgugaccuucuuccaggaggucccccacgugaucgaggaggugaugaacaucguccugaucgcccucagcgugcuggccgugcugaaggggcucuacaacuucgcgaccugcggccuggucgggcuggugacguuccuccugcugugcggccgcuccugcaccaccagccucuacaaggggguguacgagcugcagacccuggagcucaacauggagacgcugaacaugaccaugccgcuguccugcaccaagaacaacagccaccacuacaucauggucggcaacgagaccggccucgagcugacgcugaccaacaccuccaucaucaaccacaaguucugcaaccucagcgacgcccacaagaagaaccuguacgaccacgcccugauguccaucaucagcaccuuccaccucuccauccccaacuucaaccaguacgaggccaugagcugcgacuucaacgggggcaagaucuccgugcaguacaaccugagccacuccuacgccggggacgcggccaaccacugcggcacgguggccaacgggguccugcagaccuucaugcggauggccuggggcggcagcuacaucgcgcucgacuccgggugcggcaacugggacugcaucaugaccagcuaccaguaccugaucauccagaacaccacgugggaggaccacugccaguucucccgccccagccccaucggguaccugggccuccugucccagcggacccgcgacaucuacaucagccggcgccggcgcggcaccuucaccuggacgcugagcgacuccgaggggaaggacaccccgggcggguacugccucacccgguggaugcugaucgaggccgagcugaagugcuucggcaacaccgccguggccaagugcaacgagaagcacgacgaggaguucugcgacaugcuccgccuguucgacuucaacaagcaggccauccagcggcugaaggcgcccgcccagaugagcauccagcucaucaacaaggccgugaacgcccugaucaacgaccagcugaucaugaagaaccaccuccgcgacaucaugugcauccccuacugcaacuacuccaaguacugguaccugaaccacacgaccaccgggcggaccagccugcccaagugcuggcucgucuccaacggcagcuaccugaacgagacgcacuucuccgacgacaucgagcagcaggccgacaacaugaucaccgagaugcugcagaaggaguacauggagcgccagggcaagaccccgcucgggcugguggaccuguucguguucagcaccuccuucuaccucaucagcaucuuccugcaccuggucaagauccccacgcaccggcacaucgugggcaaguccugccccaagccccaccgccugaaccacauggggaucugcagcugcggccucuacaagcagccgggggugcccgucaaguggaagcggugaggacuagucccuguucccagagcccacuuuuuuuucuuuuuuugaaauaaaauagccugucuuucagaucuaaaaaaaaaaaaaaaaaaaaaaaaaaaaaaaaaaaaaaaaaaaaaaaaaaaaaaaaaaaaaaaaaaaaaaaaaaaaaaaaaaaaaaaaaaaaaaaaaaaa

SEQ ID NO: 15497 - RNA, 1721 nt, Artificial Sequence
  mRNA product Design a-1 (A100) comprising derived and/or modified sequence from LASV(LP;Clade I)__AAF86701__GPCmut1 (opt1)
aggagagucccgcagucggcguccagcggcucugcuuguucgugugugugucguugcaggccuuauucaagcuuaccaugggccagaucaucaccuucuuccaggaggugccccacgucaucgaggaggugaugaacaucgugcugaucgcccucagccugcuggccauccucaaggggcuguacaacaucgcgaccugcggcaucaucgggcuggucgccuuccucuuccugugcggcaaguccugcagccugacgcucaagggcggguacgagcugcagacccuggagcucaacauggagacccugaacaugaccaugccgcuguccugcacgaagaacagcucccaccacuacauccgcgugggcaacgagaccgggcucgagcugacccugaccaacacgagcaucaucaaccacaaguucugcaaccucuccgacgcccacaagaagaaccuguacgaccacgcccugaugagcaucaucuccaccuuccaccucagcauccccaacuucaaccaguacgaggccauguccugcgacuucaacggcgggaagaucagcgugcaguacaaccugucccacagcuacgcgggcgacgccgccgagcacugcgggaccgucgccaacggcgugcugcagaccuucaugcggauggcguggggcgggcgcuacaucgcccucgacuccggcugcgggaacugggacugcaucaugacgagcuaccaguaccugaucauccagaacaccaccugggaggaccacugccaguucucccggcccagccccaucggcuaccugggccuccugucccagcgcacccgggacaucuacaucagccgccggcgccgggggacguucaccuggacccugagcgacuccgagggcaacgagacccccgggggcuacugccucacgcgcuggaugcugaucgaggccgagcugaagugcuucgggaacaccgccguggccaagugcaacgagaagcacgacgaggaguucugcgacaugcuccggcuguucgacuucaacaagcaggcgauccgccggcugaaggccccggcccagaugagcauccagcucaucaacaaggccgucaacgcccugaucaacgaccagcugaucaugaagaaccaccuccgcgacaucaugugcauccccuacugcaacuacuccaaguacugguaccugaaccacaccagcuccggccggaccagccugcccaagugcuggcucaucuccaacggcagcuaccugaacgagacgcaguucuccgacgacaucgagcagcaggcggacaacaugaucaccgagaugcugcagaaggaguacaucgagcgccaggggaagaccccgcucggccugguggacaucuucaucuucagcaccuccuucuaccugaucagcaucuuccuccaccugaucaagauccccacgcaccggcacaucguggggaagcccugccccaagccgcaccgccugaaccacaugggcgucugcuccugcgggcuguacaagcaccccggcgugcccaccaaguggaagcggugaggacuagucccuguucccagagcccacuuuuuuuucuuuuuuugaaauaaaauagccugucuuucagaucuaaaaaaaaaaaaaaaaaaaaaaaaaaaaaaaaaaaaaaaaaaaaaaaaaaaaaaaaaaaaaaaaaaaaaaaaaaaaaaaaaaaaaaaaaaaaaaaaaaaa

SEQ ID NO: 15498 - RNA, 1721 nt, Artificial Sequence
  mRNA product Design a-1 (A100) comprising derived and/or modified sequence from LASV(803213;Clade II)__AAF86703__GPCmut1 (opt1)
aggagagucccgcagucggcguccagcggcucugcuuguucgugugugugucguugcaggccuuauucaagcuuaccaugggccagaucaucaccuucuuccaggaggugccccacgucaucgaggaggugaugaacaucgugcugaucgcccucagccugcuggccauccucaaggggaucuacaacgucgcgaccugcggccuguucgggcugaucuccuuccuccugcugugcggccgcagcugcuccgugacguacaaggggguguacgagcuccagacccuggagcugaacauggccaaccucaacaugaccaugccgcugagcugcaccaagaacaacucccaccacuacaucauggucggcaacgagacgggccuggagcucacccugaccaacaccagcaucaucaaccacaaguucugcaaccuguccgacgcccacaagaagaaccucuacgaccacgcccugaugagcaucaucuccacguuccaccugagcauccccaacuucaaccaguacgaggccauguccugcgacuucaacgggggcaagaucagcgugcaguacaaccucucccacagcuucgcgguggacgccgccaaccacugcgggaccaucgccaacggcguccugcagaccuucaugcggauggcguggggcggguccuacaucgcccuggacagcggcugcgggaacugggacugcaucaugaccuccuaccaguaccucaucauccagaacacgaccugggaggaccacugccaguucagccgccccucccccaucggcuaccuggggcugcucagccagcggacccgcgacaucuacaucagccggcgccggcgcggcaccuucacguggacccuguccgacagcgagggcaacgaggcccccgggggcuacugccugacccgguggaugcucaucgaggccgagcugaagugcuucgggaacaccgccguggcgaagugcaacgagaagcacgacgaggaguucugcgacaugcugcgccucuucgacuucaacaagcaggccaucaagcggcugaagacgccggcccagauguccauccagcugaucaacaaggccgugaacgcccucaucaacgaccagcugaucaugaagaaccaccuccgcgacaucaugugcauccccuacugcaacuacagccgguacugguaccugaaccacaccgucaccggcaagaccucccugccccgcugcuggcuggugagcaacggguccuaccucaacgagacgcacuucagcgacgacaucgagcagcaggcggacaacaugaucaccgagaugcugcagaaggaguacauggaccggcagggcaagaccccgcugggccucguggaccuguucgucuucuccaccagcuucuaccugaucuccaucuuccuccaccuggugaagauccccacgcaccgccacaucguggggaagcccugccccaagccgcaccggcugaaccacaugggcaucugcagcugcgggcuguacaagcaccccggcguccccgugaaguggaagcgcugaggacuagucccuguucccagagcccacuuuuuuuucuuuuuuugaaauaaaauagccugucuuucagaucuaaaaaaaaaaaaaaaaaaaaaaaaaaaaaaaaaaaaaaaaaaaaaaaaaaaaaaaaaaaaaaaaaaaaaaaaaaaaaaaaaaaaaaaaaaaaaaaaaaaa

SEQ ID NO: 15499 - RNA, 1721 nt, Artificial Sequence
  mRNA product Design a-1 (A100) comprising derived and/or modified sequence from LASV(GA391;Clade III)__CAA36645__GPCmut1 (opt1)
aggagagucccgcagucggcguccagcggcucugcuuguucgugugugugucguugcaggccuuauucaagcuuaccaugggccagaucgugaccuucuuccaggaggucccccacgugaucgaggaggugaugaacaucguccugaucgcccucagcauccuggccauccugaaggggcucuacaacguggcgaccugcggccugaucgggcuggugacguuccuccugcuguccggccgcagcugcucccucaucuacaaggggaccuacgagcugcagacccuggagcucaacauggagacccugaacaugacgaugccgcugagcugcaccaagaacaacucccaccacuacauccgggucggcaacgagaccggccucgagcugacccugacgaacaccagcauccucaaccacaaguucugcaaccuguccgacgcccacaagcgcaaccuguacgaccacagccucauguccaucaucagcaccuuccaccuguccauccccaacuucaaccaguacgaggccaugagcugcgacuucaacgggggcaagaucaccgugcaguacaaccugucccacagcuucgccguggacgccgcggggcacugcggcacgcucgccaacgggguccugcagaccuucaugcggauggccuggggcggcuccuacaucgcccuggacagcgggugcggcaacugggacugcaucaugaccuccuaccaguaccucaucauccagaacaccacgugggacgaccacugccaguucagccgccccucccccaucggguaccugggccugcucagccagcggacccgcgacaucuacaucagccggcgccggcgcggcaccuucaccuggacgcuguccgacagcgaggggaacgagaccccgggcggguacugccugacccgguggaugcucaucgaggcggagcugaagugcuucggcaacaccgccguggccaagugcaacgagaagcacgacgaggaguucugcgacaugcugcgccucuucgacuucaacaagcaggccauccggcgccugaagacgcccgcccagauguccauccagcugaucaacaaggcggugaacgcccucaucaacgaccagcugaucaugaagaaccaccuccgggacaucaugugcauccccuacugcaacuacagccgcuacugguaccugaaccacaccuccaccgggaagaccagccugccccggugcuggcugaucuccaacggcagcuaccucaacgagacgaaguucuccgacgacaucgagcagcaggccgacaacaugaucaccgagaugcugcagaaggaguacaucgaccgccagggcaagaccccgcuggggcucgucgaccuguucguguucagcaccuccuucuaccugaucagcaucuuccugcaccucgugaagauccccacgcaccggcacaucgucggcaagcccugccccaagccgcaccgccugaaccacauggggaucugcuccugcggccuguacaagcagcccggggugcccgugcgguggaagcgcugaggacuagucccuguucccagagcccacuuuuuuuucuuuuuuugaaauaaaauagccugucuuucagaucuaaaaaaaaaaaaaaaaaaaaaaaaaaaaaaaaaaaaaaaaaaaaaaaaaaaaaaaaaaaaaaaaaaaaaaaaaaaaaaaaaaaaaaaaaaaaaaaaaaaa

SEQ ID NO: 15500 - RNA, 1724 nt, Artificial Sequence
  mRNA product Design a-1 (A100) comprising derived and/or modified sequence from LASV(AV;Clade V)__CCA30314__GPCmut1 (opt1)
aggagagucccgcagucggcguccagcggcucugcuuguucgugugugugucguugcaggccuuauucaagcuuaccaugggccagaucgugaccuucuuccaggaggucccccacgugaucgaggaggugaugaacaucguccugaucgcccucagcauccuggccgugcugaaggggcucuacaacaucgcgaccugcggccugaucgggcugaucacguuccuccugcugugcggccgcuccugcagcuccaaccucuacaaggggguguacgagcugcagagccuggaccucaacauggagacccugaacaugaccaugccgcuguccugcaccaagaacaacagccaccacuacauccgggucggcaacgacacgggccucgagcugacccugaccaacaccuccauccucaaccacaaguucugcaaccugagcgacgcccacaagaaggaccuguacgaccacgcccucauguccaucaucagcacguuccaccuguccauccccaacuucaaccaguacgaggccaugagcugcgacuucaacgggggcaagaucuccgugcaguacaaccugagccacuccuacgccaucgacgcggccaaccacugcgggaccguggccaacggcauccuccagaccuucaugcgcauggccuggggcgggagcuacaucgcgcuggacuccggcugcgggaacugggacugcaucaugaccagcuaccaguaccugaucauccagaacacgaccugggagaaccacugccaguucucccggcccagccccaucggcuaccucgggcugcugagccagcgcacccgggacaucuacaucucccgccggcgccggggcaccuucacguggacccucagcgacuccgagggcaacgccacccccgggggcuacugccugacccgcuggaugcugaucgaggccgagcucaagugcuucgggaacacggccgucgccaagugcaacgagaagcacgacgaggaguucugcgacaugcugcggcuguucgacuucaacaagcaggcgaucagccgccucaaguccccggcccagaugagcauccagcugaucaacaaggccgugaacgcccugaucaacgaccagcucaucaugaagaaccaccuccgggacaucaugugcauccccuacugcaacuacuccaaguacugguaccugaaccacaccaucaccggcaagaccagccugcccaagugcuggcugguguccaacgggagcuaccugaacgagacgcacuucuccgacgacaucgagcagcaggccgacaacaugaucaccgagaugcuccagaaggaguacauggagcgccagggcaagaccccgcugggccuggucgaccucuucguguucagcaccuccuucuaccugaucagcaucuuccugcggcuggugaagauccccacgcaccgccacaucgucgggaagcccugccccaagccgcaccggcucaaccacaugggcaucugcuccugcgggcuguacaagcagcccggcgugcccgugcgcuggaagcggugaggacuagucccuguucccagagcccacuuuuuuuucuuuuuuugaaauaaaauagccugucuuucagaucuaaaaaaaaaaaaaaaaaaaaaaaaaaaaaaaaaaaaaaaaaaaaaaaaaaaaaaaaaaaaaaaaaaaaaaaaaaaaaaaaaaaaaaaaaaaaaaaaaaaa

SEQ ID NO: 15501 - RNA, 1721 nt, Artificial Sequence
  mRNA product Design a-1 (A100) comprising derived and/or modified sequence from LASV(Togo/2016/7082;Clade VI)__AMR44577__GPCmut1 (opt1)
aggagagucccgcagucggcguccagcggcucugcuuguucgugugugugucguugcaggccuuauucaagcuuaccaugggccagaucaucaccuucuuccaggaggugccccacgucaucgaggaggugaugaacaucgugcugaucgcccucagccugcuggccauccucaagggggucuacaacguggcgaccugcggcaucaucgggcuggugacguuccuguuccucugcggccgcuccugcagccugaucuacaagggguccuacgagcugcagacccucgagcugaacauggagacccugaacaugaccaugccgcucagcugcacgaagaacuccagccaccacuacauccgggucggcaacgagaccggccuggagcugacccucaccaacacguccaucaucaaccacaaguucugcaaccugagcgacgcccacaagcgcaaccuguacgaccacgcccucauguccauccugagcaccuuccaccuguccauccccaacuucaaccaguacgaggccaugagcugcgacuucaacgggggcaagaucuccgugcaguacaaccucagccacgccuacgcgguggacgccgccgagcacugcgggaccgucgccaacggcgugcugcagaccuucaugcggauggcguggggcggguccuacaucgcccuggacagcggcugcgggaacugggacugcaucaugacguccuaccaguaccucaucauccagaacaccaccugggaggaccacugccaguucagccgccccucccccaucggcuaccuggggcugcucagccagcggacccgcgacaucuacaucagccggcgccggcgcggcacguucaccuggacccuguccgacagcgagggcaacgagacccccgggggcuacugccugacgcgguggaugcucaucgaggccgagcugaagugcuucgggaacaccgccguggccaagugcaacgagaagcacgacgaggaguucugcgacaugcugcgccucuucgacuucaacaagcaggcgauccagcggcugaaguccccggcccagaugagcauccagcugaucaacaaggccgucaacgcccucaucaacgaccagcugaucaugaagaaccaccuccgcgacaugaugugcauccccuacugcaacuacuccaaguacugguaccugaaccacaccagcuccggccggaccagccugcccaagugcuggcugguguccaacgggagcuaccucaacgagacgcacuucuccgacgacaucgagcagcaggccgacaacaugaucaccgagaugcugcagaaggaguacaucgaccgccagggcaagaccccgcugggccucguggaccuguucgucuucagcaccuccuucuaccugaucagcaucuuccuccaccugaucaagauccccacgcaccggcacaucguggggaagcccugccccaagccgcaccgccugaaccacaugggcaucugcuccugcgggcuguacaagcagcccggcgugcccacccgguggaagcgcugaggacuagucccuguucccagagcccacuuuuuuuucuuuuuuugaaauaaaauagccugucuuucagaucuaaaaaaaaaaaaaaaaaaaaaaaaaaaaaaaaaaaaaaaaaaaaaaaaaaaaaaaaaaaaaaaaaaaaaaaaaaaaaaaaaaaaaaaaaaaaaaaaaaaa

SEQ ID NO: 15502 - RNA, 1721 nt, Artificial Sequence
  mRNA product Design a-1 (A100) comprising derived and/or modified sequence from LASV(KAK-428;Clade n.d. (VII))__ANH09740__GPCmut1 (opt1)
aggagagucccgcagucggcguccagcggcucugcuuguucgugugugugucguugcaggccuuauucaagcuuaccaugggccagaucgugaccuucuuccaggaggucccccacgugaucgaggaggugaugaacaucguccugaucgcccucagccugcuggccauccucaaggggcuguacaacuucgcgaccugcggcgugaucgggcugaucacguuccuccugcugugcggccgcuccugcagcgccaccuacaaggggcaguacgagcuccagacccuggagcugaacauggagucccucaacaugaccaugccgcugagcugcacgaagaacaacucccaccacuacauccgggccggcaacaacaccggccuggagcucacccugaccaacacgagcaucaucucccacaaguucugcaaccugagcgacgcccacaagaagaaccucuacgaccacacccugauguccaucaucaccaccuuccaccugagcauccccaacuucaaccaguacgaggccauguccugcgacuucaacgggggcaagaucagcauccaguacaaccucucccacagcuacgcgggggacgccgcccagcacugcggcacgguggccaacgggguccugcagaccuucaugcgcauggcguggggcggcuccuaccuggcccucgacagcgggugccggggcugggacugcaucaucuccagcuaccaguaccugaucauccagaacaccaccugggacgaccacugccaguucucccgccccagccccaucggguaccugggcuucgugagccagaagacgcgggacaucuacaucucccgccggcgccggggcaccuucaccuggacccucagcgacuccgaggggcacgacaugccgggcggguacugccugacgcgcuggaugcugaucgaggccgaccucaagugcuucggcaacaccgccguggccaagugcaacgagaagcacgacgaggaguucugcgacauguggcggcuguucgacuucaacaagcaggcgauccagcgccugaaggcccccgcccagaugaacauccagcucaucaacaaggccgucaacgcccugaucaacgaccagcugaugaugaagaaccaccuccgggacaucaugugcauccccuacugcaacuacagcaaguucugguaccugaacaacaccaccacggggcgcaccucccugccccggugcuggcucaucagcaacggcuccuaccugaacgagacccacuucagcgacgacaucgagcagcaggcggacaacaugaucaccgagaugcugcagaaggaguacauggaccgccagggcaagacgccgcucgggcugguggaccuguucguguucuccaccagcuucuaccucaucaccaucuuccugcaccuggucaagauccccacccaccggcacaucgugggcaagcccugccccaagccgcaccgccucaaccacauggggaucugcuccugcggccuguacaagcagcccggggugcccguccgguggaagcgcugaggacuagucccuguucccagagcccacuuuuuuuucuuuuuuugaaauaaaauagccugucuuucagaucuaaaaaaaaaaaaaaaaaaaaaaaaaaaaaaaaaaaaaaaaaaaaaaaaaaaaaaaaaaaaaaaaaaaaaaaaaaaaaaaaaaaaaaaaaaaaaaaaaaaa

SEQ ID NO: 15503 - RNA, 1721 nt, Artificial Sequence; identical to SEQ ID NO: 15497
  mRNA product Design a-1 (A100) comprising derived and/or modified sequence from LASV(Pinneo-NIG-1969;Clade I)__AIT17836__GPCmut1 (opt1)

SEQ ID NO: 15504 - RNA, 1721 nt, Artificial Sequence
  mRNA product Design a-1 (A100) comprising derived and/or modified sequence from LASV(ISTH0009-NIG-2011;Clade II)__AIT17404__GPCmut1 (opt1)
aggagagucccgcagucggcguccagcggcucugcuuguucgugugugugucguugcaggccuuauucaagcuuaccaugggccagaucaucaccuucuuccaggaggugccccacgucaucgaggaggugaugaacaucgugcugaucgcccucagccugcuggccauccucaaggggaucuacaacgucgcgaccugcggccuguucgggcugguguccuuccuccugcugugcggccgcagcugcuccacgaccuacaaggggguguacgagcuccagacccuggagcuggacauggccagccucaacaugaccaugccgcuguccugcacgaagaacaacagccaccacuacaucauggucggcaacgagaccggccuggagcucacccugaccaacacguccaucaucaaccacaaguucugcaaccugagcgacgcccacaagaagaaccucuacgaccacgcccugauguccaucaucagcaccuuccaccuguccauccccaacuucaaccaguacgaggccaugagcugcgacuucaacgggggcaagaucuccgugcaguacaaccucagccacgcguacgccguggacgccgccaaccacugcgggaccaucgcgaacggcguccugcagaccuucaugcggauggccuggggcggguccuacaucgcccuggacagcggcugcggguccugggacugcaucaugacgagcuaccaguaccucaucauccagaacaccaccugggaggaccacugccaguucucccgccccagccccaucggcuaccuggggcugcucagccagcggacccgcgacaucuacaucucccggcgccggcgcggcacguucaccuggacccugagcgacuccgagggcaacgagacccccgggggcuacugccugacgcgguggaugcucaucgaggccgagcugaagugcuucgggaacaccgccguggcgaagugcaacgagaagcacgacgaggaguucugcgacaugcugcgccucuucgacuucaacaagcaggccauccggcgccugaagaccccggcccagaugagcauccagcugaucaacaaggccgugaacgcccucaucaacgaccagcugaucaugaagaaccaccuccgggacaucaugugcauccccuacugcaacuacuccaaguacugguaccugaaccacaccgucacgggcaagaccagccugccccgcugcuggcugguguccaacgggagcuaccucaacgagacccacuucuccgacgacaucgagcagcaggcggacaacaugaucaccgagcugcugcagaaggaguacauggaccggcagggcaagacgccgcucggccugguggaccuguucgucuucagcaccuccuucuaccucaucagcaucuuccugcaccugaucaagauccccacccaccgccacaucaccgggaagcccugccccaagccgcaccggcugaaccacaugggcaucugcuccugcgggcucuacaagcaccccggcgugcccgugaaguggaagcgcugaggacuagucccuguucccagagcccacuuuuuuuucuuuuuuugaaauaaaauagccugucuuucagaucuaaaaaaaaaaaaaaaaaaaaaaaaaaaaaaaaaaaaaaaaaaaaaaaaaaaaaaaaaaaaaaaaaaaaaaaaaaaaaaaaaaaaaaaaaaaaaaaaaaaa

SEQ ID NO: 15505 - RNA, 1721 nt, Artificial Sequence
  mRNA product Design a-1 (A100) comprising derived and/or modified sequence from LASV(ISTH2010-NIG-2012;Clade II)__AIT17482__GPCmut1 (opt1)
aggagagucccgcagucggcguccagcggcucugcuuguucgugugugugucguugcaggccuuauucaagcuuaccaugggccagaucaucaccuucuuccaggaggugccccacgucaucgaggaggugaugaacaucgugcugaucgcccucagccugcuggccauccucaaggggaucuacaacgucgcgaccugcggccuguucgggcugguguccuuccuccugcugugcggccgcagcugcuccacgaccuacaaggggguguacgagcuccagacccuggagcuggacauggccagccucaacaugaccaugccgcuguccugcacgaagaacaacagccaccacuacaucauggucggcaacgagaccggccuggagcucacccugaccaacacguccaucaucaaccacaaguucugcaaccugagcgacgcccacaagaagaaccucuacgaccacgcccugauguccaucaucagcaccuuccaccuguccauccccaacuucaaccaguacgaggccaugagcugcgacuucaacgggggcaagaucuccgugcaguacaaccucagccacgcguacgccguggacgccgccaaccacugcgggaccaucgcgaacggcguccugcagaccuucaugcggauggccuggggcggguccuacaucgcccuggacagcggcugcggguccugggacugcaucaugacgagcuaccaguaccucaucauccagaacaucaccugggaggaccacugccaguucucccgccccagccccaucggcuaccuggggcugcucagccagcggacccgcgacaucuacaucucccggcgccggcgcggcaccuucacguggacccugagcgacuccgagggcaacgagacccccgggggcuacugccugacccgguggaugcucaucgaggccgagcugaagugcuucgggaacacggccguggcgaagugcaacgagaagcacgacgaggaguucugcgacaugcugcgccucuucgacuucaacaagcaggccauccggcgccugaagaccccggcccagaugagcauccagcugaucaacaaggccgugaacgcccucaucaacgaccagcugaucaugaagaaccaccuccgggacaucaugugcauccccuacugcaacuacuccaaguacugguaccugaaccacaccgucaccggcaagacgagccugccccgcugcuggcugguguccaacgggagcuaccucaacgagacccacuucuccgacgacaucgagcagcaggcggacaacaugaucaccgagcugcugcagaaggaguacaucgaccggcagggcaagaccccgcucggccugguggaccuguucgucuucagcacguccuucuaccucaucagcaucuuccugcaccuggugaagauccccacccaccgccacguggucgggaagcccugccccaagccgcaccggcugaaccacaugggcaucugcuccugcgggcucuacaagcaccccggcgugcccgugaaguggaagcgcugaggacuagucccuguucccagagcccacuuuuuuuucuuuuuuugaaauaaaauagccugucuuucagaucuaaaaaaaaaaaaaaaaaaaaaaaaaaaaaaaaaaaaaaaaaaaaaaaaaaaaaaaaaaaaaaaaaaaaaaaaaaaaaaaaaaaaaaaaaaaaaaaaaaaa

SEQ ID NO: 15506 - RNA, 1721 nt, Artificial Sequence
  mRNA product Design a-1 (A100) comprising derived and/or modified sequence from LASV(Lassa virus/H.sapiens-wt/NGA/2015/ISTH_0543;Clade II)__AVO03639__GPCmut1 (opt1)
aggagagucccgcagucggcguccagcggcucugcuuguucgugugugugucguugcaggccuuauucaagcuuaccaugggccagaucaucaccuucuuccaggaggugccccacgucaucgaggaggugaugaacaucgugcugaucgcccucagccugcuggccauccucaaggggaucuacaacgucgcgaccugcggccuguucgggcugguguccuuccuccugcugugcggccgcagcugcuccacgaccuacaaggggguguacgagcuccagacccuggagcuggacauggccaaccucaacaugaccaugccgcugagcugcacgaagaacaacucccaccacuacaucauggucggcaacgagaccggccuggagcucacccugaccaacacgagcaucaucaaccacaaguucugcaaccuguccgacgcccacaagaagaaccucuacgaccacgcccugaugagcaucaucuccaccuuccaccugagcauccccaacuucaaccaguacgaggccauguccugcgacuucaacgggggcaagaucagcgugcaguacaaccucucccacaccuacgcgguggacgccgccaaccacugcgggaccaucgccaacggcguccugcagacguucaugcggauggcguggggcgggagcuacaucgcccuggacuccggcugcgggagcugggacugcaucaugaccuccuaccaguaccucgugauccagaacaccaccugggaggaccacugccaguucagccgccccucccccaucggcuaccuggggcugcucagccagcggacgcgcgacaucuacaucagccggcgccggcgcggcaccuucaccuggacccuguccgacagcgagggcaacgagacgcccgggggcuacugccugacccgguggaugcucaucgaggccgagcugaagugcuucgggaacaccgccguggccaagugcaacgagaagcacgacgaggaguucugcgacaugcugcgccucuucgacuucaacaagcaggcgauccggcgccugaagaccccggcccagauguccauccagcugaucaacaaggccgucaacgcccucaucaacgaccagcugaucaugaagaaccaccuccgggacaucaugugcauccccuacugcaacuacagcaaguacugguaccugaaccacacggugaccggcaagaccucccugccccgcugcuggcuggugagcaacggguccuaccucaacgagacccacuucagcgacgacaucgagcagcaggccgacaacaugaucacggagcugcugcagaaggaguacaucgaccggcagggcaagaccccgcucggccuggucgaccuguucguguucuccaccagcuucuaccucaucuccaucuuccugcaccuggugaagauccccacccaccgccacaucacggggaagcccugccccaagccgcaccggcugaaccacaugggcaucugcagcugcgggcucuacaagcaccccggcguccccgugaaguggaagcgcugaggacuagucccuguucccagagcccacuuuuuuuucuuuuuuugaaauaaaauagccugucuuucagaucuaaaaaaaaaaaaaaaaaaaaaaaaaaaaaaaaaaaaaaaaaaaaaaaaaaaaaaaaaaaaaaaaaaaaaaaaaaaaaaaaaaaaaaaaaaaaaaaaaaaa

SEQ ID NO: 15507 - RNA, 1721 nt, Artificial Sequence
  mRNA product Design a-1 (A100) comprising derived and/or modified sequence from LASV(Lassa virus/H.sapiens-wt/NGA/2016/ISTH_0009;Clade II)__AVO03571__GPCmut1 (opt1)
aggagagucccgcagucggcguccagcggcucugcuuguucgugugugugucguugcaggccuuauucaagcuuaccaugggccagaucaucaccuucuuccaggaggugccccacgucaucgaggaggugaugaacaucgugcugaucgcccucagccugcuggccauccucaaggggaucuacaacgucgcgaccugcggccugcuggggcucguguccuuccugcugcucugcggccgcagcugcuccacgaccuacaaggggguguacgagcugcagacccuggagcucgacauggccagccugaacaugaccaugccgcuguccugcacgaagaacaacagccaccacuacaucauggucggcaacgagaccggccucgagcugacccugaccaacacguccaucaucaaccacaaguucugcaaccucagcgacgcccacaagaagaaccuguacgaccacgcccugauguccaucaucagcaccuuccaccucuccauccccaacuucaaccaguacgaggccaugagcugcgacuucaacgggggccggaucuccgugcaguacaaccugagccacuccuacgcgguggacgccgccaaccacugcgggaccaucgccaacggcguccugcagaccuucaugcgcauggcguggggcgggagcuacaucgcccucgacuccggcugcgggagcugggacugcaucaugacguccuaccaguaccugaucauccagaacaccaccugggaggaccacugccaguucagccggcccagccccaucggcuaccuggggcuccugucccagcgcacccgggacaucuacaucagccgccggcgccggggcacguucaccuggacccuguccgacagcgagggcaacgagacccccgggggcuacugccucacgcgcuggaugcugaucgaggccgagcugaagugcuucgggaacaccgccguggccaagugcaacgagaagcacgacgaggaguucugcgacaugcuccggcuguucgacuucaacaagcaggcgauccgccggcugaagaccccggcccagauguccauccagcucaucaacaaggccgugaacgcccugaucaacgaccagcugaucaugaagaaccaccuccgcgacaucaugugcauccccuacugcaacuacagcaaguacugguaccugaaccacaccgucacgggcaagaccucccugccccggugcuggcucgugagcaacggguccuaccugaacgagacccacuucagcgacgacaucgagcagcaggccgacaacaugaucaccgagcugcuccagaaggaguacaucgaccgccagggcaagacgccgcugggccugguggaccucuucgucuucuccaccagcuucuaccugaucuccaucuuccugcaccuggugaagauccccacccaccggcacaucaccgggaagcccugccccaagccgcaccgccucaaccacaugggcaucugcagcugcgggcuguacaaccaccccggcgugcccgucaaguggaagcggugaggacuagucccuguucccagagcccacuuuuuuuucuuuuuuugaaauaaaauagccugucuuucagaucuaaaaaaaaaaaaaaaaaaaaaaaaaaaaaaaaaaaaaaaaaaaaaaaaaaaaaaaaaaaaaaaaaaaaaaaaaaaaaaaaaaaaaaaaaaaaaaaaaaaa

SEQ ID NO: 15508 - RNA, 1721 nt, Artificial Sequence
  mRNA product Design a-1 (A100) comprising derived and/or modified sequence from LASV(Lassa virus/H.sapiens-wt/NGA/2016/ISTH_0017;Clade II)__AVO03567__GPCmut1 (opt1)
aggagagucccgcagucggcguccagcggcucugcuuguucgugugugugucguugcaggccuuauucaagcuuaccaugggccagaucaucaccuucuuccaggaggugccccacgucaucgaggaggugaugaacaucgugcugaucgcccucagccugcuggccauccucaaggggaucuacaacgucgcgaccugcggccuguucgggcugguguccuuccuccugcugugcggccgcagcugcuccacgaccuacaaggggguguacgagcuccagacccuggagcuggacauggccagccucaacaugaccaugccgcuguccugcacgaagaacaacagccaccacuacaucauggucggcaacgagaccggccuggagcucacccugaccaacacguccaucaucaaccacaaguucugcaaccugagcgacgcccacaagaagaaccucuacgaccacgcccugauguccaucaucagcaccuuccaccuguccauccccaacuucaaccaguacgaggccaugagcugcgacuucaacgggggcaagaucuccgugcaguacaaccucagccacaccuacgcgaucgacgccgccaaccacugcgggaccaucgccaacggcgugcugcagacguucaugcggauggcguggggcggguccuacaucgcccuggacagcggcugcggguccugggacugcaucaugaccagcuaccaguaccucaucauccagaacaccaccugggaggaccacugccaguucucccgccccagccccaucggcuaccuggggcugcucagccagcggacgcgcgacaucuacaucucccggcgccggcgcggcaccuucaccuggacccugagcgacuccgagggcaacgagacgcccgggggcuacugccugacccgguggaugcucaucgaggccgagcugaagugcuucgggaacaccgccgucgccaagugcaacgagaagcacgacgaggaguucugcgacaugcugcgccucuucgacuucaacaagcaggcgauccggcgccugaagaccccggcccagaugagcauccagcugaucaacaaggccgugaacgcccucaucaacgaccagcugaucaugaagaaccaccuccgggacaucaugugcauccccuacugcaacuacuccaaguacugguaccugaaccacacggugaccggcaagaccagccugccccgcugcuggcuggucuccaacgggagcuaccucaacgagacccacuucuccgacgacaucgagcagcaggccgacaacaugaucacggagcugcugcagaaggaguacauggaccggcagggcaagaccccgcucggccugguggaccuguucguguucagcaccuccuucuaccucaucagcaucuuccugcaccugguccgcauccccacccaccggcacgugaucgggaagcccugccccaagccgcaccgccugaaccacaugggcaucugcuccugcgggcucuacaagcaccccggcgugcccgucaaguggaagcggugaggacuagucccuguucccagagcccacuuuuuuuucuuuuuuugaaauaaaauagccugucuuucagaucuaaaaaaaaaaaaaaaaaaaaaaaaaaaaaaaaaaaaaaaaaaaaaaaaaaaaaaaaaaaaaaaaaaaaaaaaaaaaaaaaaaaaaaaaaaaaaaaaaaaa

SEQ ID NO: 15509 - RNA, 1721 nt, Artificial Sequence
  mRNA product Design a-1 (A100) comprising derived and/or modified sequence from LASV(Lassa virus/H.sapiens-wt/NGA/2018/ISTH_0959;Clade II)__AVV65099__GPCmut1 (opt1)
aggagagucccgcagucggcguccagcggcucugcuuguucgugugugugucguugcaggccuuauucaagcuuaccaugggccagaucaucaccuucuuccaggaggugccccacgucaucgaggaggugaugaacaucgugcugaucgcccucagccugcuggccauccucaaggggaucuacaacgucgugaccugcggccuguucgggcugguguccuuccuccugcugugcggccgcagcugcuccacgaccuacaagggggucuacgagcuccagacccuggagcuggacauggcgagccucaacaugaccaugccgcuguccugcacgaagaacaacagccaccacuacaucauggugggcaacgagaccggccuggagcucacccugaccaacacguccaucaucaaccacaaguucugcaaccugagcgacgcccacaagaagaaccucuacgaccacgcccugauguccaucaucagcaccuuccaccuguccauccccaacuucaaccaguacgaggccaugagcugcgacuucaacgggggcaagaucuccgugcaguacaaccucagccacgccuacgcgaucgacgccgccaaccacugcgggaccaucgccaacggcguccugcagaccuucaugcggauggcguggggcggguccuacaucgcccuggacagcggcugcggguccugggacugcaucaugacgagcuaccaguaccucaucauccagaacaccaccugggaggaccacugccaguucucccgccccagccccaucggcuaccuggggcugcucagccagcggacccgcgacaucuacaucucccggcgccggcgcggcacguucaccuggacccugagcgacuccgagggcaacgagacccccgggggcuacugccugacgcgguggaugcucaucgaggccgagcugaagugcuucgggaacaccgccguggccaagugcaacgagaagcacgacgaggaguucugcgacaugcugcgccucuucgacuucaacaagcaggcgauccggcgccugaagaccccggcccagaugagcauccagcugaucaacaaggccgugaacgcccucaucaacgaccagcugaucaugaagaaccaccuccgggacaucaugugcauccccuacugcaacuacuccaaguacugguaccugaaccacaccgucacgggcaagaccagccugccccgcugcuggcugguguccaacgggagcuaccucaacgagacccacuucuccgacgacaucgagcagcaggccgacaacaugaucaccgagcugcugcagaaggaguacaucgaccggcagggcaagacgccgcucggccugguggaccuguucgucuucagcaccuccuucuaccucaucagcaucuuccugcaccuggugaagauccccacccaccgccacgugaucgggaagcccugccccaagccgcaccggcugaaccacaugggcaucugcuccugcgggcucuacaagcaccccggcguccccgugaaguggaagcgcugaggacuagucccuguucccagagcccacuuuuuuuucuuuuuuugaaauaaaauagccugucuuucagaucuaaaaaaaaaaaaaaaaaaaaaaaaaaaaaaaaaaaaaaaaaaaaaaaaaaaaaaaaaaaaaaaaaaaaaaaaaaaaaaaaaaaaaaaaaaaaaaaaaaaa

SEQ ID NO: 15510 - RNA, 1721 nt, Artificial Sequence
  mRNA product Design a-1 (A100) comprising derived and/or modified sequence from LASV(LASV003-NIG-2008;Clade II)__AIT17580__GPCmut1 (opt1)
aggagagucccgcagucggcguccagcggcucugcuuguucgugugugugucguugcaggccuuauucaagcuuaccaugggccagaucaucaccuucuuccaggaggugccccacgucaucgaggaggugaugaacaucgugcugaucgcccucagccugcuggccauccucaaggggaucuacaacgucgcgaccugcggccuguucgggcugguguccuuccuccugcugugcggccgcagcugcuccacgaccuacaaggggguguacgagcuccagacccuggagcuggacauggccagccucaacaugaccaugccgcuguccugcacgaagaacaacagccaccacuacaucauggucggcaacgagaccggccuggagcucacccugaccaacacguccaucaucaaccacaaguucugcaaccugagcgacgcccacaagaagaaccucuacgaccacgcccugauguccaucaucagcaccuuccaccuguccauccccaacuucaaccaguacgaggccaugagcugcgacuucaacgggggcaagaucuccgugcaguacaaccucagccacaccuacgcgguggacgccgccaaccacugcgggaccaucgccaacggcguccugcagacguucaugcggauggcguggggcggguccuacaucgcccuggacagcggcugcggguccugggacugcaucaugaccagcuaccaguaccucaucauccagaacaccaccugggaggaccacugccaguucucccgccccagccccaucggcuaccuggggcugcucagccagcggacgcgcgacaucuacaucucccggcgccggcgcggcaccuucaccuggacccugagcgacuccgagagcaacgagacgccgggcggguacugccugacccgguggaugcucaucgaggccgagcugaagugcuucggcaacaccgccguggccaagugcaacgagaagcacgacgaggaguucugcgacaugcugcgccucuucgacuucaacaagcaggcgauccggcgccugaaggcccccgcccagauguccauccagcugaucaacaaggccgugaacgcccucaucaacgaccagcugaucaugaagaaccaccuccgggacaucaugugcauccccuacugcaacuacagcaaguacugguaccugaaccacaccgucacggggcgcaccucccugccccggugcuggcuggugagcaacggcuccuaccucaacgagacccacuucagcgacgacaucgagcagcaggcggacaacaugaucaccgagcugcugcagaaggaguacauggaccgccaggggaagacgccgcucggccugguggaccuguucgucuucuccaccagcuucuaccucaucuccaucuuccugcaccuggugaagauccccacccaccggcacgugaucggcaagcccugccccaagccgcaccgccugaaccacauggggaucugcagcugcggccucuacaagcaccccgggguccccgugaaguggaagcggugaggacuagucccuguucccagagcccacuuuuuuuucuuuuuuugaaauaaaauagccugucuuucagaucuaaaaaaaaaaaaaaaaaaaaaaaaaaaaaaaaaaaaaaaaaaaaaaaaaaaaaaaaaaaaaaaaaaaaaaaaaaaaaaaaaaaaaaaaaaaaaaaaaaaa

SEQ ID NO: 15511 - RNA, 1721 nt, Artificial Sequence
  mRNA product Design a-1 (A100) comprising derived and/or modified sequence from LASV(LASV035-NIG-2009;Clade II)__AIT17588__GPCmut1 (opt1)
aggagagucccgcagucggcguccagcggcucugcuuguucgugugugugucguugcaggccuuauucaagcuuaccaugggccagaucaucaccuucuuccaggaggugccccacgucaucgaggaggugaugaacaucgugcugaucgcccucagccugcuggccauccucaaggggaucuacaacgucgcgaccugcggccuguucgggcugguguccuuccuccugcugugcggccgcagcugcuccacgaccuacaaggggguguacgagcuccagacccuggagcuggacauggccagccucaacaugaccaugccgcuguccugcacgaagaacaacagccaccacuacaucauggucggcaacgagaccggccuggagcucacccugaccaacacguccaucaucaaccacaaguucugcaaccugagcgacgcccacaagaagaaccucuacgaccacgcccugauguccaucaucagcaccuuccaccuguccauccccaacuucaaccaguacgaggccaugagcugcgacuucaacgggggcaagaucuccgugcaguacaaccucagccacgcguacgccguggacgccgccaaccacugcgggaccaucgcgaacggcguccugcagaccuucaugcggauggccuggggcggguccuacaucgcccuggacagcggcugcggguccugggacugcaucaugacgagcuaccaguaccucaucauccagaacaccaccugggaggaccacugccaguucucccgccccagccccaucggcuaccuggggcugcucagccagcggacccgcgacaucuacaucucccggcgccggcgcggcacguucaccuggacccugagcgacuccgagggcaacgagacccccgggggcuacugccugacgcgguggaugcucaucgaggccgagcugaagugcuucgggaacaccgccguggcgaagugcaacgagaagcacgacgaggaguucugcgacaugcugcgccucuucgacuucaacaagcaggccauccggcgccugaaggccccggcccagaugagcauccagcugaucaacaaggccgugaacgcgcucaucaacgaccagcugaucaugaagaaccaccuccgggacaucaugugcauccccuacugcaacuacuccaaguacugguaccugaaccacaccgucaccggcaagacgagccugccccgcugcuggcugguguccaacgggagcuaccucaacgagacccacuucuccgacgacaucgagcagcaggccgacaacaugaucaccgagcugcugcagaaggaguacaucgaccggcagggcaagaccccgcucggccugguggaccuguucgucuucagcacguccuucuaccucaucagcaucuuccugcaccuggugaagauccccacccaccgccacgugaucgggaagcccugccccaagccgcaccggcugaaccacaugggcaucugcuccugcgggcucuacaagcaccccggcguccccgugaaguggaagcgcugaggacuagucccuguucccagagcccacuuuuuuuucuuuuuuugaaauaaaauagccugucuuucagaucuaaaaaaaaaaaaaaaaaaaaaaaaaaaaaaaaaaaaaaaaaaaaaaaaaaaaaaaaaaaaaaaaaaaaaaaaaaaaaaaaaaaaaaaaaaaaaaaaaaaa

SEQ ID NO: 15512 - RNA, 1721 nt, Artificial Sequence
  mRNA product Design a-1 (A100) comprising derived and/or modified sequence from LASV(LASV1000-NIG-2009;Clade II)__AIT17782__GPCmut1 (opt1)
aggagagucccgcagucggcguccagcggcucugcuuguucgugugugugucguugcaggccuuauucaagcuuaccaugggccagaucaucaccuucuuccaggaggugccccacgucaucgaggaggugaugaacaucgugcugaucgcccucagccugcuggccauccucaaggggaucuacaacgucgcgaccugcggccuguucgggcugguguccuuccuccugcugugcggccgcagcugcuccacgaccuacaaggggguguacgagcuccagacccuggagcuggacauggccagccucaacaugaccaugccgcuguccugcacgaagaacaacagccaccacuacaucauggucggcaacgagaccggccuggagcucacccugaccaacacguccaucaucaaccacaaguucugcaaccugagcgacgcccacaagaagaaccucuacgaccacgcccugauguccaucaucagcaccuuccaccuguccauccccaacuucaaccaguacgaggccaugagcugcgacuucaacgggggcaagaucuccgugcaguacaaccucagccacaccuacgcgguggacgccgccaaccacugcgggaccaucgccaacggcguccugcagacguucaugcggauggcguggggcggguccuacaucgcccuggacagcggcugcggguccugggacugcaucaugaccagcuaccaguaccucaucauccagaacaccaccugggaggaccacugccaguucucccgccccagccccaucggcuaccuggggcugcucagccagcggacgcgcgacaucuacaucucccggcgccggcgcggcaccuucaccuggacccugagcgacuccgagggcaacgagacgcccgggggcuacugccugacccgguggaugcucaucgaggccgagcugaagugcuucgggaacaccgccguggccaagugcaacgagaagcacgacgaggaguucugcgacaugcugcgccucuucgacuucaacaagcaggcgaucaagcggcugaagaccccggcccagaugagcauccagcugaucaacaaggccgugaacgcccucaucaacgaccagcugaucaugaagaaccaccuccgcgacaucaugugcauccccuacugcaacuacuccaaguacugguaccugaaccacacggucaccggcaagaccagccugccccggugcuggcugguguccaacgggagcuaccucaacgagacccacuucuccgacgacaucgagcagcaggccgacaacaugaucacggagcugcugcagaaggaguacaucgaccgccagggcaagaccccgcucggccugguggaccuguucgucuucagcaccuccuucuaccucaucagcaucuuccugcaccuggugaagauccccacccaccggcacguggucgggaagcccugccccaagccgcaccgccugaaccacaugggcaucugcuccugcgggcucuacaagcaccccggcgugcccgugaaguggaagcggugaggacuagucccuguucccagagcccacuuuuuuuucuuuuuuugaaauaaaauagccugucuuucagaucuaaaaaaaaaaaaaaaaaaaaaaaaaaaaaaaaaaaaaaaaaaaaaaaaaaaaaaaaaaaaaaaaaaaaaaaaaaaaaaaaaaaaaaaaaaaaaaaaaaaa

SEQ ID NO: 15513 - RNA, 1721 nt, Artificial Sequence
  mRNA product Design a-1 (A100) comprising derived and/or modified sequence from LASV(LASV221-NIG-2010;Clade II)__AIT17624__GPCmut1 (opt1)
aggagagucccgcagucggcguccagcggcucugcuuguucgugugugugucguugcaggccuuauucaagcuuaccaugggccagaucaucaccuucuuccaggaggugccccacgucaucgaggaggugaugaacaucgugcugaucgcccucagccugcuggccauccucaaggggaucuacaacgucgcgaccugcggccuguucgggcugguguccuuccuccugcugugcggccgcagcugcuccacgaccuacaaggggguguacgagcuccagacccuggagcuggacauggccagccucaacaugaccaugccgcuguccugcacgaagaacaacagccaccacuacaucauggucggcaacgagaccggccuggagcucacccugaccaacacguccaucaucaaccacaaguucugcaaccugagcgacgcccacaagaagaaccucuacgaccacgcccugauguccaucaucagcaccuuccaccuguccauccccaacuucaaccaguacgaggccaugagcugcgacuucaacgggggcaagaucuccgugcaguacaaccucagccacaccuacgcgaucgacgccgccaaccacugcgggaccaucgccaacggcgugcugcagacguucaugcggauggcguggggcggguccuacaucgcccuggacagcggcugcggguccugggacugcaucaugaccagcuaccaguaccucaucauccagaacaccaccugggaggaccacugccaguucucccgccccagccccaucggcuaccuggggcugcucagccagcggacgcgcgacaucuacaucucccggcgccggcgcggcaccuucaccuggacccugagcgacuccgagggcaacgagacgcccgggggcuacugccugacccgguggaugcucaucgaggccgagcugaagugcuucgggaacaccgccgucgccaagugcaacgagaagcacgacgaggaguucugcgacaugcugcgccucuucgacuucaacaagcaggcgauccggcgccugaagaccccggcccagaugagcauccagcugaucaacaaggccgugaacgcccucaucaacgaccagcugaucaugaagaaccaccuccgggacaucaugugcauccccuacugcaacuacuccaaguacugguaccugaaccacacggugaccggcaagaccagccugccccgcugcuggcuggucuccaacgggagcuaccucaacgagacccacuucuccgacgacaucgagcagcaggccgacaacaugaucacggagaugcugcagaaggaguacauggaccggcagggcaagaccccgcugggccucguggaccuguucguguucagcaccuccuucuaccugaucagcaucuuccuccaccuggucaagauccccacccaccgccacgugaucgggaagcccugccccaagccgcaccggcugaaccacaugggcaucugcuccugcgggcuguacaagcaccccggcgugcccgucaaguggaagcgcugaggacuagucccuguucccagagcccacuuuuuuuucuuuuuuugaaauaaaauagccugucuuucagaucuaaaaaaaaaaaaaaaaaaaaaaaaaaaaaaaaaaaaaaaaaaaaaaaaaaaaaaaaaaaaaaaaaaaaaaaaaaaaaaaaaaaaaaaaaaaaaaaaaaaa

SEQ ID NO: 15514 - RNA, 1721 nt, Artificial Sequence
  mRNA product Design a-1 (A100) comprising derived and/or modified sequence from LASV(LASV237-NIG-2010;Clade II)__AIT17638__GPCmut1 (opt1)
aggagagucccgcagucggcguccagcggcucugcuuguucgugugugugucguugcaggccuuauucaagcuuaccaugggccagaucaucaccuucuuccaggaggugccccacgucaucgaggaggugaugaacaucgugcugaucgcccucagccugcuggccauccucaaggggaucuacaacgucgcgaccugcggccuguucgggcugguguccuuccuccugcugugcggccgcagcugcuccacgaccuacaaggggguguacgagcuccagacccuggagcuggacauggccagccucaacaugaccaugccgcuguccugcacgaagaacaacagccaccacuacaucauggucggcaacgagaccggccuggagcucacccugaccaacacguccaucaucaaccacaaguucugcaaccugagcgacgcccacaagaaggaccucuacgaccacgcccugauguccaucaucagcaccuuccaccuguccauccccaacuucaaccaguacgaggccaugagcugcgacuucaacgggggcaagaucuccgugcaguacaaccucagccacaccuacgcgguggacgccgccaaccacugcgggaccaucgccaacggcguccugcagacguucaugcggauggcguggggcggguccuacaucgcccuggacagcggcugcggguccugggacugcaucaugaccagcuaccaguaccucaucauccagaacaccaccugggaggaccacugccaguucucccgccccagccccaucggcuaccuggggcugcucagccagcggacgcgcgacaucuacaucucccggcgccggcgcggcaccuucaccuggacccugagcgacuccgagggcaacgagacgcccgggggcuacugccugacccgguggaugcucaucgaggccgagcugaagugcuucgggaacaccgccguggccaagugcaacgagaagcacgacgaggaguucugcgacaugcugcgccucuucgacuucaacaagcaggcgauccggcgccugaagaccccggcccagaugagcauccagcugaucaacaaggccgugaacgcccucaucaacgaccagcugaucaugaagaaccaccuccgggacaucaugugcauccccuacugcaacuacuccaaguacugguaccugaaccacacggucaccggcaagaccagccugccccgcugcuggcugguguccaacgggagcuaccucaacgagacccacuucuccgacgacaucgagcagcaggccgacaacaugaucacggagcugcugcagaaggaguacauggaccggcagggcaagaccccgcucggccugguggaccuguucgucuucagcaccuccuucuaccucaucagcaucuuccugcaccugaucaagauccccacccaccgccacaucacggggaagcccugccccaagccgcaccggcugaaccacaugggcaucugcuccugcgggcucuacaagcaccccggcgugcccgugaaguggaagcgcugaggacuagucccuguucccagagcccacuuuuuuuucuuuuuuugaaauaaaauagccugucuuucagaucuaaaaaaaaaaaaaaaaaaaaaaaaaaaaaaaaaaaaaaaaaaaaaaaaaaaaaaaaaaaaaaaaaaaaaaaaaaaaaaaaaaaaaaaaaaaaaaaaaaaa

SEQ ID NO: 15515 - RNA, 1721 nt, Artificial Sequence
  mRNA product Design a-1 (A100) comprising derived and/or modified sequence from LASV(LASV253-NIG-2011;Clade II)__AIT17670__GPCmut1 (opt1)
aggagagucccgcagucggcguccagcggcucugcuuguucgugugugugucguugcaggccuuauucaagcuuaccaugggccagaucaucaccuucuuccaggaggugccccacgucaucgaggaggugaugaacaucgugcugaucgcccucagccugcuggccauccucaaggggaucuacaacgucgcgaccugcggccuguucgggcugguguccuuccuccugcugugcggccgcagcugcuccacgaccuacaaggggguguacgagcuccagacccuggagcuggacauggccagccucaacaugaccaugccgcuguccugcacgaagaacaacagccaccacuacaucauggucggcaacgagaccggccuggagcucacccugaccaacacguccaucaucaaccacaaguucugcaaccugagcgacgcccacaagaagaaccucuacgaccacgcccugauguccaucaucagcaccuuccaccuguccauccccaacuucaaccaguacgaggccaugagcugcgacuucaacgggggcaagaucuccgugcaguacaaccucagccacaccuacgcgguggacgccgccaaccacugcgggaccaucgccaacggcguccugcagacguucaugcggauggcguggggcggguccuacaucgcccuggacagcggcugcggguccugggacugcaucaugaccagcuaccaguaccucaucauccagaacaccaccugggaggaccacugccaguucucccgccccagccccaucggcuaccuggggcugcucagccagcggacgcgcgacaucuacaucucccggcgccggcgcggcaccuucaccuggacccugagcgacuccgagggcaacgagacgcccgggggcuacugccugacccgguggaugcucaucgaggccgagcugaagugcuucgggaacaccgccguggccaagugcaacgagaagcacgacgaggaguucugcgacaugcugcgccucuucgacuucaacaagcaggcgauccggcgccugaaggccccggcccagaugagcauccagcugaucaacaaggccgugaacgcccucaucaacgaccagcugaucaugaagaaccaccuccgggacaucaugugcauccccuacugcaacuacuccaaguacugguaccugaaccacaccgucacgggccgcaccagccugccccggugcuggcugguguccaacgggagcuaccucaacgagacccacuucuccgacgacaucgagcagcaggcggacaacaugaucaccgagcugcugcagaaggaguacaucgaccgccagggcaagacgccgcucggccugguggaccuguucgucuucagcaccuccuucuaccucaucagcaucuuccugcaccuggugaagauccccacccaccggcacaucaucgggaagcccugccccaagccgcaccgccugaaccacaugggcaucugcuccugcgggcucuacaagcaccccggcgugcccgucaaguggaagcggugaggacuagucccuguucccagagcccacuuuuuuuucuuuuuuugaaauaaaauagccugucuuucagaucuaaaaaaaaaaaaaaaaaaaaaaaaaaaaaaaaaaaaaaaaaaaaaaaaaaaaaaaaaaaaaaaaaaaaaaaaaaaaaaaaaaaaaaaaaaaaaaaaaaaa

SEQ ID NO: 15516 - RNA, 1721 nt, Artificial Sequence
  mRNA product Design a-1 (A100) comprising derived and/or modified sequence from LASV(LASV254-NIG-2011;Clade II)__AIT17674__GPCmut1 (opt1)
aggagagucccgcagucggcguccagcggcucugcuuguucgugugugugucguugcaggccuuauucaagcuuaccaugggccagaucaucaccuucuuccaggaggugccccacgucaucgaggaggugaugaacaucgugcugaucgcccucagccugcuggccauccucaaggggaucuacaacgucgcgaccugcggccuguucgggcugguguccuuccuccugcugugcggccgcagcugcuccacgaccuacaaggggguguacgagcuccagacccuggagcuggacaugaccaaccucaacaugacgaugccgcugagcugcaccaagaacaacucccaccacuacaucauggucggcaacgagaccggccuggagcucacccugacgaacaccagcaucaucaaccacaaguucugcaaccuguccgacgcccacaagaagaaccucuacaaccacgcccugaugagcaucaucuccaccuuccaccugagcauccccaacuucaaccaguacgaggccauguccugcgacuucaacgggggcaagaucagcgugcaguacaaccucucccacagcuacgccguggacgcggccaaccacugcgggaccaucgccaacggcguccugcagacguucaugcggauggccuggggcggguccuacaucgcgcuggacagcggcugcgggaacugggacugcaucaugaccuccuaccaguaccucaucauccagaacaccaccugggaggaccacugccaguucagccgccccucccccaucggcuaccuggggcugcucagccagcggacgcgcgacaucuacaucagccggcgccggcgcggcaccuucaccuggacccuguccgacagcgagggcaacgagacgcccgggggcuacugccugacccgguggaugcucaucgaggccgagcugaagugcuucgggaacaccgccguggccaagugcaacgagaagcacgacgaggaguucugcgacaugcugcgccucuucgacuucaacaagcaggccauccggcgccugaagaccccggcgcaggccaacauccagcugaucaacaaggccgugaacgcccucaucaacgaccagcugaucaugaagaaccaccuccgggacaucaugugcauccccuacugcaacuacuccaaguacugguaccugaaccacacggucaccggcaagaccagccugccccgcugcuggcugguguccaacgggagcuaccucaacgagacccacuucuccgacgacaucgagcagcaggccgacaacaugaucacggagcugcugcagaaggaguacauggaccggcagggcaagaccccgcucggccugguggaccuguucgucuucagcaccuccuucuaccucaucagcaucuuccugcaccuggugaagauccccacccaccgccacgugaucgggaagcccugccccaagccgcaccggcugaaccacaugggcaucugcuccugcgggcucuacaagcaccccggcguccccgugaaguggaagcgcugaggacuagucccuguucccagagcccacuuuuuuuucuuuuuuugaaauaaaauagccugucuuucagaucuaaaaaaaaaaaaaaaaaaaaaaaaaaaaaaaaaaaaaaaaaaaaaaaaaaaaaaaaaaaaaaaaaaaaaaaaaaaaaaaaaaaaaaaaaaaaaaaaaaaa

SEQ ID NO: 15517 - RNA, 1721 nt, Artificial Sequence
  mRNA product Design a-1 (A100) comprising derived and/or modified sequence from LASV(Nig08-A19;Clade III)__ADU56618__GPCmut1 (opt1)
aggagagucccgcagucggcguccagcggcucugcuuguucgugugugugucguugcaggccuuauucaagcuuaccaugggccagaucgugaccuucuuccaggaggucccccacgugaucgaggaggugaugaacaucguccugaucgcccucagcauccuggccauccugaaggggcucuacaacaucgcgaccugcggccugaucgggcuggugacguuccuccugcuguccggccgcagcugcuccaugaccuacaaggggguguacgagcuccagacccuggagcugaacaugaacacccucaacaugacgaugccgcugagcugcaccaagaacaacucccaccacuacaucauggucggcaacgagaccggccuggagcucacccugacgaacaccagccugcuccaccacaaguucugcaaccuguccgacgcccacaagaagaaccuguacgaccacacccucaugagcaucaucuccaccuuccaccugagcauccccaacuucaaccaguacgaggccauguccugcgacuucaacgggggcaagaucacggugcaguacaaccugagccacuccuacgccaucgacgccgcgaaccacugcgggaccguggccaacggcguccuccagaccuucaugcggauggccuggggcgggagcuacaucgcccuggacuccggcugcgggaagugggacugcaucaugaccagcuaccaguaccugaucauccagaacacgaccugggaggaccacugccaguucucccgccccagccccaucggcuaccucgggcugcugucccagcggacccgcgacaucuacaucagccggcgccggcgcggcaccuucacguggacccucagcgacuccgagggcaacgagacccccgggggcuacugccugacccgguggaugcugaucgaggcggagcucaagugcuucgggaacacggccguggccaagugcaacgagaagcacgacgaggaguucugcgacaugcugcgccuguucgacuucaacaagcaggccauccggcgccucaaggccccggcgcagaugagcauccagcugaucaacaaggccgugaacgcccugaucaacgaccagcucaucaugaagaaccaccuccgggacaucaugugcauccccuacugcaacuacuccaaguacugguaccugaaccacaccagcaccggccgcaccucccugccccggugcuggcuggucagcaacggguccuaccugaacgagacgcacuucagcgacgacaucgagcagcaggccgacaacaugaucaccgagaugcuccagaaggaguaccuggaccgccagggcaagaccccgcugggccucguggaccuguucguguucuccaccagcuucuaccugaucuccaucuuccugcaccucgucaagauccccacgcaccggcacaucguggggaagcccugccccaagccgcaccgccugaaccacaugggcaucugcagcugcgggcuguacaagcagcccggcgugcccguccgguggaagcgcugaggacuagucccuguucccagagcccacuuuuuuuucuuuuuuugaaauaaaauagccugucuuucagaucuaaaaaaaaaaaaaaaaaaaaaaaaaaaaaaaaaaaaaaaaaaaaaaaaaaaaaaaaaaaaaaaaaaaaaaaaaaaaaaaaaaaaaaaaaaaaaaaaaaaa

SEQ ID NO: 15518 - RNA, 1724 nt, Artificial Sequence
  mRNA product Design a-1 (A100) comprising derived and/or modified sequence from LASV(G1180-SLE-2010;Clade IV)__AIT17168__GPCmut1 (opt1)
aggagagucccgcagucggcguccagcggcucugcuuguucgugugugugucguugcaggccuuauucaagcuuaccaugggccagaucgugaccuucuuccaggaggucccccacgugaucgaggaggugaugaacaucguccugaucgcccucagcauccuggccgugcugaaggggcucuacaacuucgcgaccugcggccugguggggcugcucacguuccugcugcucugcggccgcuccugcaccgccagccgguacaagggggucuacgagcugcagacccuggagcucaacauggagacccugaacaugacgaugccgcuguccugcaccaagaacaacagccaccacuacaucauggugggcaacgagaccggccucgagcugacccugacgaacaccuccaucaucaaccacaaguucugcaaccucagcgacgcccacaagaagaaccuguacgaccacgcccugauguccaucaucagcaccuuccaccucuccauccccaacuucaaccaguacgaggccaugagcugcgacuucaacgggggcaagaucuccgugcaguacaaccugagccacuccuacgcgggggacgccgccaaccacugcggcaccgucgccaacggggugcugcagacguucaugcgcauggcguggggcggcagcuacaucgcccucgacuccgggugcggcagcugggacugcaucaugaccuccuaccaguaccugaucauccagaacaccaccugggaggaccacugccaguucagccggcccucccccaucggguaccugggccuccugagccagcgcacgcgggacaucuacaucagccgccggcgccggggcaccuucaccuggacccuguccgacagcgaggggaaggacacgccgggcggguacugccucacccgcuggaugcugaucgaggccgagcugaagugcuucggcaacaccgccguggccaagugcaacgagaagcacgacgaggaguucugcgacaugcuccggcuguucgacuucaacaagcaggcgauccagcgccugaaggcccccgcccagauguccauccagcucaucaacaaggccgucaacgcccugaucaacgaccagcugaucaugaagaaccaccuccgggacaucaugugcauccccuacugcaacuacagcaaguacugguaccugaaccacaccacgaccgggaagaccucccugcccaagugcuggcucgugagcaacggcuccuaccugaacgagacccacuucagcgacgacaucgagcagcaggcggacaacaugaucacggagaugcugcagaaggaguacauggagcgccagggcaagaccccgcucgggcugguggaccuguucgucuucuccaccagcuucuaccucaucuccaucuuccugcaccuggugaagauccccacccaccggcacaucgugggcaagagcugccccaagccccaccgccugaaccacauggggaucugcuccugcggccucuacaagcagccggggguccccgugaaguggaagcggugaggacuagucccuguucccagagcccacuuuuuuuucuuuuuuugaaauaaaauagccugucuuucagaucuaaaaaaaaaaaaaaaaaaaaaaaaaaaaaaaaaaaaaaaaaaaaaaaaaaaaaaaaaaaaaaaaaaaaaaaaaaaaaaaaaaaaaaaaaaaaaaaaaaaa

SEQ ID NO: 15519 - RNA, 1724 nt, Artificial Sequence
  mRNA product Design a-1 (A100) comprising derived and/or modified sequence from LASV(G1442-SLE-2011;Clade IV)__AIT17180__GPCmut1 (opt1)
aggagagucccgcagucggcguccagcggcucugcuuguucgugugugugucguugcaggccuuauucaagcuuaccaugggccagaucgugaccuucuuccaggaggucccccacgugaucgaggaggugaugaacaucguccugaucgcccucagcauccuggccgugcugaaggggcucuacaacguggcgaccugcggccugaucgggcuggucacguuccuccugcugugcggccgcuccugcaccaccacccucuacaaggggguguacgagcugcagacgcuggagcucaacauggagacccugaacaugaccaugccgcugagcugcaccaagaacaacucccaccacuacauccgggugggcaacgagacgggccucgagcugacccugaccaacaccagcaucaucaaccacaaguucugcaaccucuccgacgcccacaagaagaaccuguacgaccacgcccugaugagcaucaucuccacguuccaccucagcauccccaacuucaaccaguacgaggccauguccugcgacuucaacgggggcaagaucagcguccaguacaaccugucccacagcuacgccggggacgcggccaaccacugcggcaccguggccaacggggugcugcagaccuucaugcgcauggccuggggcggcuccuacaucgcgcucgacagcgggugcggcaacugggacugcaucaugaccuccuaccaguaccugaucauccagaacacgaccugggacgaccacugccaguucagccggcccucccccaucggguaccugggccuccugagccagcgcacccgggacgucuacaucucccgccggcgccggggcaccuucacguggacccugagcgacagcgaggggaaggacaccccgggcggguacugccucacccgcuggaugcugaucgaggccgagcugaagugcuucggcaacacggccguggccaagugcaacgagaagcacgacgaggaguucugcgacaugcuccggcuguucgacuucaacaagcaggccauccagcgccugaaggcgcccgcccagauguccauccagcucaucaacaaggccgugaacgcccugaucaacgaccagcugaucaugaagaaccaccuccgggacaucaugugcauccccuacugcaacuacagcaaguacugguaccugaacaacaccgccaccgggaagaccucccugcccaagugcuggcucaucagcaacggcuccuaccugaacgagacgcacuucagcgacgacaucgagcaggaggcggacaacaugaucaccgagaugcugcagaaggaguacauggagcgccagggcaagaccccgcucgggcuggucgaccuguucguguucuccaccagcuucuaccucaucuccaucuuccugcaccuggugaagauccccacgcaccggcacaucgucggcaagagcugccccaagccccaccgccugaaccacauggggaucugcuccugcggccucuacaagcagccgggggugcccgugcgguggaagcgcugaggacuagucccuguucccagagcccacuuuuuuuucuuuuuuugaaauaaaauagccugucuuucagaucuaaaaaaaaaaaaaaaaaaaaaaaaaaaaaaaaaaaaaaaaaaaaaaaaaaaaaaaaaaaaaaaaaaaaaaaaaaaaaaaaaaaaaaaaaaaaaaaaaaaa

SEQ ID NO: 15520 - RNA, 1724 nt, Artificial Sequence
  mRNA product Design a-1 (A100) comprising derived and/or modified sequence from LASV(G3010-SLE-2013;Clade IV)__AIT17344__GPCmut1 (opt1)
aggagagucccgcagucggcguccagcggcucugcuuguucgugugugugucguugcaggccuuauucaagcuuaccaugggccagaucgugaccuucuuccaggaggucccccacgugaucgaggaggugaugaacaucguccugaucgcccucagcauccuggccgugcugaaggggcucuacaacuucgcgaccugcggccugguggggcuggucacguuccuccugcugugcggccgcuccugcaccaccagccucuacaaggggguguacgagcugcagacccuggagcucaacauggagacgcugaacaugaccaugccgcuguccugcaccaagaacaacagccaccacuacaucauggugggcaacgagaccggccucgagcugacgcugaccaacaccuccaucaucaaccacaaguucugcaaccucagcgacgcccacaagaagaaccuguacaaccacgcccugauguccaucaucagcaccuuccaccucuccauccccaacuucaaccaguacgaggccaugagcugcgacuucaacgggggcaagaucuccguccaguacaaccugagccacuccuacgccggggacgcggccagccacugcggcacgguggccaacggggugcugcagaccuucaugcggauggccuggggcggcuccuacaucgcgcucgacagcgggugcggcaagugggacugcaucaugaccuccuaccaguaccugaucauccagaacaccacgugggaggaccacugccaguucagccgccccucccccaucggguaccugggccuccugagccagcggacccgcgacaucuacaucagccggcgccggcgcggcaccuucaccuggacgcuguccgacagcgaggggaaggacaccccgggcggguacugccucacccgguggaugcugaucgaggccgagcugaagugcuucggcaacaccgccgucgccaagugcaacgagaagcacgacgaggaguucugcgacaugcuccgccuguucgacuucaacaagcaggccauccagcggcugaagacgcccgcgcagauguccauccagcucaucaacaaggccgugaacgcccugaucaacgaccagcugaucaugaagaaccaccuccgcgacaucaugugcauccccuacugcaacuacagcaaguacugguaccugaaccacaccaccaccgggaagacgucccugcccaagugcuggcucgugagcaacggcuccuaccugaacgagacccacuucagcgacgacaucgagcagcaggccgacaacaugaucaccgagaugcugcagaaggaguacauggagcggcagggcaagaccccgcucgggcuggucgaccuguucguguucuccacgagcuucuaccucaucuccaucuuccugcaccuggugaagauccccacccaccgccacaucgucggcaagagcugccccaagccccaccggcugaaccacauggggaucugcuccugcggccucuacaagcagccgggggugcccgugcgcuggaagcggugaggacuagucccuguucccagagcccacuuuuuuuucuuuuuuugaaauaaaauagccugucuuucagaucuaaaaaaaaaaaaaaaaaaaaaaaaaaaaaaaaaaaaaaaaaaaaaaaaaaaaaaaaaaaaaaaaaaaaaaaaaaaaaaaaaaaaaaaaaaaaaaaaaaaa

SEQ ID NO: 15521 - RNA, 1724 nt, Artificial Sequence
  mRNA product Design a-1 (A100) comprising derived and/or modified sequence from LASV(G502-SLE-2009;Clade IV)__AIT17126__GPCmut1 (opt1)
aggagagucccgcagucggcguccagcggcucugcuuguucgugugugugucguugcaggccuuauucaagcuuaccaugggccagaucgugaccuucuuccaggaggucccccacgugaucgaggaggugaugaacaucguccugaucgcccucagcauccuggccgugcugaaggggcucuacaacuucgcgaccugcggccugguggggcugcucacguuccugcugcucugcggccgcuccugcaccaccgggcuguacaagggcgucuacgagcugcagacccucgagcugaacauggagacgcugaacaugaccaugccgcucagcugcaccaagaacaacucccaccacuacaucauggugggcaacgagaccgggcuggagcugacgcucaccaacaccagcaucaucaaccacaaguucugcaaccuguccgacgcccacaagaagaaccuguacgaccacgcccucaugagcaucaucuccaccuuccaccugagcauccccaacuucaaccaguacgaggccauguccugcgacuucaacggcgggaagaucagcgugcaguacaaccugucccacagcuacgccggcgacgcggccgaccacugcgggacggucgccaacggcgugcuccagaccuucaugcggauggccuggggcggguccuacaucgcgcuggacagcggcugcgggcgcugggacugcaucaugaccuccuaccaguaccugaucauccagaacaccacgugggaggaccacugccaguucagccggcccucccccaucggcuaccucggccugcugagccagcgcacccgggacaucuacaucucccgccggcgccgggggaccuucaccuggacgcucagcgacagcgagggcaaggacacccccgggggcuacugccugacccgcuggaugcugaucgaggccgagcucaagugcuucgggaacaccgccguggccaagugcaacgagaagcacgacgaggaguucugcgacaugcugcggcuguucgacuucaacaagcaggccauccagcgccucaaggcgccggcccagauguccauccagcugaucaacaaggccgucaacgcccugaucaacgaccagcucgugaugaagaaccaccuccgggacaucaugugcauccccuacugcaacuacagccgcuacugguaccugaaccacacgaccaccggccggaccucccugcccaagugcuggcuggugagcaacggcuccuaccugaacgagacgcacuucagcgacgacaucgagcagcaggccgacaacaugaucaccgagaugcuccagaaggaguacauggagcgccaggggaagaccccgcugggccuggucgaccucuucguguucuccaccagcuucuaccugaucuccaucuuccugcaccuggugaagauccccacgcaccggcacaucgucggcaagagcugccccaagccccaccgccucaaccacauggggaucugcuccugcgggcuguacaagcagccgggcgugcccgugaaguggaagcggugaggacuagucccuguucccagagcccacuuuuuuuucuuuuuuugaaauaaaauagccugucuuucagaucuaaaaaaaaaaaaaaaaaaaaaaaaaaaaaaaaaaaaaaaaaaaaaaaaaaaaaaaaaaaaaaaaaaaaaaaaaaaaaaaaaaaaaaaaaaaaaaaaaaaa

SEQ ID NO: 15522 - RNA, 1724 nt, Artificial Sequence
  mRNA product Design a-1 (A100) comprising derived and/or modified sequence from LASV(G733-SLE-2010;Clade IV)__AIT17154__GPCmut1 (opt1)
aggagagucccgcagucggcguccagcggcucugcuuguucgugugugugucguugcaggccuuauucaagcuuaccaugggccagaucgugaccuucuuccaggaggucccccacgugaucgaggaggugaugaacaucguccugaucgcccucagcauccuggccgugcugaaggggcucuacaacuucgcgaccugcggcaucguggggcuggucuccuuccugcuccugugcggccgcagcugcacgaccucccuguacaaggggguguacgagcuccagacccuggagcugaacauggagacccucaacaugacgaugccgcugagcugcaccaagaacaacucccaccacuacaucauggugggcaacgagaccggccuggagcucacccugacgaacaccagcaucaucaaccacaaguucugcaaccuguccgacgcccacaagaagaaccucuacgaccacgcccugaugagcaucaucuccaccuuccaccugagcauccccaacuucaaccaguacgaggccauguccugcgacuucaacgggggcaagaucagcguccaguacaaccucucccacagcuacgccggggacgcggccaaccacugcggcaccaucgccaacggggugcugcagacguucaugcggauggccuggggcggcuccuacaucgcgcuggacagcgggugcgaccgcugggacugcaucaugaccuccuaccaguaccucaucauccagaacaccaccugggaggaccacugccaguucagccggcccucccccaucggcuaccuggggcugcucagccagcgcacgcgggacaucuacaucagccgccggcgccggggcaccuucaccuggacccuguccgacagcgagggcaaggacacgcccgggggcuacugccugacccgcuggaugcucaucgaggccgagcugaagugcuucgggaacaccgccguggccaagugcaacgagaagcacgacgaggaguucugcgacaugcugcggcuguucgacuucaacaagcaggccauccagcgccugaaggcgccggcccagauguccauccagcugaucaacaaggccgucaacgcccucaucaacgaccagcugaucaugaagaaccaccuccgggacaucaugugcauccccuacugcaacuacagcaaguacugguaccucaaccacaccacgaccggcaagaccucccugcccaagugcuggcuggugagcaacggguccuaccucaacgagacccacuucagcgacgacaucgagcagcaggccgacaacaugaucacggagaugcugcagaaggaguacauggagcgccagggcaagaccccgcugggccucguggaccuguucgucuucuccaccagcuucuaccugaucuccaucuuccuccaccuggugaagauccccacccaccggcacguggucggcaagagcugccccaagccccaccgccugaaccacauggggaucugcuccugcgggcuguacggccagccgggggugcccgugaaguggaagcggugaggacuagucccuguucccagagcccacuuuuuuuucuuuuuuugaaauaaaauagccugucuuucagaucuaaaaaaaaaaaaaaaaaaaaaaaaaaaaaaaaaaaaaaaaaaaaaaaaaaaaaaaaaaaaaaaaaaaaaaaaaaaaaaaaaaaaaaaaaaaaaaaaaaaa

SEQ ID NO: 15523 - RNA, 1724 nt, Artificial Sequence
  mRNA product Design a-1 (A100) comprising derived and/or modified sequence from MOPV/LASV reassortant(IGS-1;Clade IV)__AFY05576__GPCmut1 (opt1)
aggagagucccgcagucggcguccagcggcucugcuuguucgugugugugucguugcaggccuuauucaagcuuaccaugggccagaucgugaccuucuuccaggaggucccccacgugaucgaggaggugaugaacaucguccugaucgcccucagcgugcuggccgugcugaaggggcucuacaacuucgcgaccugcggccuggucgggcuggugacguuccuccugcugugcggccgcuccugcaccaccagccucuacaaggggguguacgagcugcagacccuggagcucaacauggagacgcugaacaugaccaugccgcuguccugcaccaagaacaacagccaccacuacaucauggucggcaacgagaccggccucgagcugacgcugaccaacaccuccaucaucaaccacaaguucugcaaccucagcgacgcccacaagaagaaccuguacgaccacgcccugauguccaucaucagcaccuuccaccucuccauccccaacuucaaccaguacgaggccaugagcugcgacuucaacgggggcaagaucuccgugcaguacaaccugagccacuccuacgccggggacgcggccaaccacugcggcacgguggccaacgggguccugcagaccuucaugcggauggccuggggcggcagcuacaucgcgcucgacuccgggugcggcaacugggacugcaucaugaccagcuaccaguaccugaucauccagaacaccacgugggaggaccacugccaguucucccgccccagccccaucggguaccugggccuccugucccagcggacccgcgacaucuacaucagccggcgccggcgcggcaccuucaccuggacgcugagcgacuccgagggggaggacaccccgggcggguacugccucacccgguggaugcugaucgaggccgagcugaagugcuucggcaacaccgccguggccaagugcaacgagaagcacgacgaggaguucugcgacaugcuccgccuguucgacuucaacaagcaggccauccagcggcugaaggcgcccgcccagaugagcauccagcucaucaacaaggccgugaacgcccugaucaacgaccagcugaucaugaagaaccaccuccgcgacaucaugugcauccccuacugcaacuacuccaaguacugguaccugaaccacacgaccaccgggcggaccagccugcccaagugcuggcucgucuccaacggcagcuaccugaacgagacgcacuucuccgacgacaucgagcagcaggccgacaacaugaucaccgagaugcugcagaaggaguacauggagcgccagggcaagaccccgcucgggcugguggaccuguucguguucagcaccuccuucuaccucaucagcaucuuccugcaccuggucaagauccccacgcaccggcacaucgugggcaaguccugccccaagccccaccgccugaaccacauggggaucugcagcugcggccucuacaagcagccgggggugcccgucaaguggaagcggugaggacuagucccuguucccagagcccacuuuuuuuucuuuuuuugaaauaaaauagccugucuuucagaucuaaaaaaaaaaaaaaaaaaaaaaaaaaaaaaaaaaaaaaaaaaaaaaaaaaaaaaaaaaaaaaaaaaaaaaaaaaaaaaaaaaaaaaaaaaaaaaaaaaaa

SEQ ID NO: 15524 - RNA, 1724 nt, Artificial Sequence
  mRNA product Design a-1 (A100) comprising derived and/or modified sequence from LASV(LM765-SLE-2012;Clade IV)__AIT17814__GPCmut1 (opt1)
aggagagucccgcagucggcguccagcggcucugcuuguucgugugugugucguugcaggccuuauucaagcuuaccaugggccagaucgugaccuucuuccaggaggucccccacgugaucgaggaggugaugaacaucguccugaucgcccucagcauccuggccgugcugaaggggcucuacaacuucgcgaccugcggccugguggggcuggucacguuccuccugcugugcggccgcuccugcaccaccagccucuacaaggggguguacgagcugcagacccuggagcucaacauggagacgcugaacaugaccaugccgcuguccugcaccaagaacaacagccaccacuacaucauggugggcaacgagaccggccucgagcugacgcugaccaacaccuccaucaucgaccacaaguucugcaaccucagcgacgcccaccggaagaaccuguacgaccacgcccugauguccaucaucagcaccuuccaccucuccauccccaacuucaaccaguacgaggccaugagcugcgacuucaacgggggcaagaucuccguccaguacaaccugagccacuccuacgccaaggacgcggccgaccacugcgggacgguggccaacggcgugcugcagaccuucaugcgcauggccuggggcgggagcuacaucgcgcucgacuccggcugcgggcggugggacugcaucaugaccagcuaccaguaccugaucauccagaacaccacgugggaggaccacugccaguucucccgccccagccccaucggcuaccuggggcuccugucccagcggacccgcgacaucuacaucagccggcgccggcgcggcaccuucaccuggacgcugagcgacuccgagggcaaggacacccccgggggcuacugccucacccgguggaugcugaucgaggccgagcugaagugcuucgggaacaccgccgucgccaagugcaacgagaagcacgacgaggaguucugcgacaugcuccgccuguucgacuucaacaagcaggccauccagcggcugaaggcgccggcccagaugagcauccagcucaucaacaaggccgugaacgcccugaucaacgaccagcugaucaugaagaaccaccuccgcgacaucaugugcauccccuacugcaacuacuccaaguacugguaccugaaccacacgaccaccggcaagaccagccugcccaagugcuggcucguguccaacgggagcuaccugaacgagacgcacuucuccgacgacaucgagcagcaggccgacaacaugaucaccgagaugcugcagaaggaguacauggagcggcagggcaagaccccgcucggccuggucgaccuguucguguucagcaccuccuucuaccucaucagcaucuuccugcaccuggugaagauccccacgcaccgccacaucgucgggaagcccugccccaagccgcaccggcugaaccacaugggcaucugcuccugcgggcucuacaagcagcccggcgugcccgugaaguggaagcgcugaggacuagucccuguucccagagcccacuuuuuuuucuuuuuuugaaauaaaauagccugucuuucagaucuaaaaaaaaaaaaaaaaaaaaaaaaaaaaaaaaaaaaaaaaaaaaaaaaaaaaaaaaaaaaaaaaaaaaaaaaaaaaaaaaaaaaaaaaaaaaaaaaaaaa

SEQ ID NO: 15525 - RNA, 1724 nt, Artificial Sequence
  mRNA product Design a-1 (A100) comprising derived and/or modified sequence from LASV(LM776-SLE-2012;Clade IV)__AIT17824__GPCmut1 (opt1)
aggagagucccgcagucggcguccagcggcucugcuuguucgugugugugucguugcaggccuuauucaagcuuaccaugggccagaucgugaccuucuuccaggaggucccccacgugaucgaggaggugaugaacaucguccugaucgcccucagcauccuggccgugcugaaggggcucuacaacuucgcgaccugcggccugguggggcuggucacguuccuccugcugugcggccgcuccugcaccaccagcguguacaaggggguguacgagcuccagacccuggagcugaacauggagacgcucaacaugaccaugccgcuguccugcaccaagaacaacagccaccacuacaucauggucggcaacgagaccggccuggagcucacgcugaccaacaccuccaucaucaaccacaaguucugcaaccugagcgacgcccacaagaagaaccucuacgaccacgcccugauguccaucaucagcaccuuccaccuguccauccccaacuucaaccaguacgaggccaugagcugcgacuucaacgggggcaagaucuccgugcaguacaaccucagccacuccuacgccggggacgcggccaaccacugcggcacgguggccaacgggguccugcagaccuucaugcggauggccuggggcggcagcuacaucgcgcuggacuccgggugcggcaagugggacugcaucaugaccagcuaccaguaccucaucauccagaacaccacgugggaggaccacugccaguucucccgccccagccccaucggguaccugggccugcucucccagcggacccgcgacaucuacaucagccggcgccggcgcggcaccuucaccuggacgcugagcgacuccgaggggaaggacaccccgggcggguacugccugacccgguggaugcucaucgaggccgagcugaagugcuucggcaacaccgccguggccaagugcaacgagaagcacgacgaggaguucugcgacaugcugcgccucuucgacuucaacaagcaggccauccagcggcugaaggcgcccgcccagaugagcauccagcugaucaacaaggccgugaacgcccucaucaacgaccagcugaucaugaagaaccaccuccgcgacaucaugugcauccccuacugcaacuacuccaaguacugguaccugaaccacacgaccaccgggaagaccagccugcccaagugcuggcuggucuccaacggcagcuaccucaacgagacgcacuucuccgacgacaucgagcagcaggccgacaacaugaucaccgagaugcugcagaaggaguacauggagcggcagggcaagaccccgcuggggcucguggaccuguucguguucagcaccuccuucuaccugaucagcaucuuccuccaccuggucaagauccccacgcaccgccacaucgugggcaaguccugccccaagccccaccggcugaaccacauggggaucugcagcugcggccuguacaagcagccgggggugcccguccgcuggaagcggugaggacuagucccuguucccagagcccacuuuuuuuucuuuuuuugaaauaaaauagccugucuuucagaucuaaaaaaaaaaaaaaaaaaaaaaaaaaaaaaaaaaaaaaaaaaaaaaaaaaaaaaaaaaaaaaaaaaaaaaaaaaaaaaaaaaaaaaaaaaaaaaaaaaaa

SEQ ID NO: 15526 - RNA, 1724 nt, Artificial Sequence
  mRNA product Design a-1 (A100) comprising derived and/or modified sequence from LASV(Mad39;Clade IV)__ANH09722__GPCmut1 (opt1)
aggagagucccgcagucggcguccagcggcucugcuuguucgugugugugucguugcaggccuuauucaagcuuaccaugggccagaucgugaccuucuuccaggaggucccccacgugaucgaggaggugaugaacaucguccugaucgcccucagcauccuggccgugcugaaggggcucuacaacguggcgaccugcggccugaucgggcuggucacguuccuccugcugugcggccgcuccugcaccaccacccucuacaaggggguguacgagcugcaggcccuggagcucaacauggagacgcugaacaugaccaugccgcugagcugcaccaagaacaacucccaccacuacauccgggugggcaacgagaccggccucgagcugacgcugaccaacaccagccucaucaaccacaaguucugcaaccuguccgacgcccacaagaagaaccuguacgaccacgcccucaugagcaucaucuccaccuuccaccugagcauccccaacuucaaccaguacgaggccauguccugcgacuucaacgacgggaagaucagcguccaguacaaccugucccacacguacgcgggcgacaccgccaaccacugcgggaccguggccaacggcgugcuccagaccuucaugcgcauggccuggggcgggagcuacaucgcgcuggacuccggcugcgggggcugggacugcaucaugacgagcuaccaguaccugaucauccagaacaccaccugggaggaccacugccaguucucccggcccagccccaucggguaccucggccugcugucccagcgcacccgggacaucuacaucagccgccggcgccggggcacguucaccuggacccucuccgacagcgaggggaaggacaccccgggcggguacugccugacgcgcuggaugcugaucgaggccgagcucaagugcuucggcaacaccgccgucgccaagugcaacgagaagcacgacgaggaguucugcgacaugcugcggcuguucgacuucaacaagcaggccauccagcgccucaaggcgcccgcccagaugagcauccagcugaucaacaaggccgugaacgcccugaucaacgaccagcucaucaugaagaaccaccuccgggacaucaugugcauccccuacugcaacuacuccaaguacugguaccugaaccacaccgugaccgggaagacgagccugcccaagugcuggcuggucuccaacggcagcuaccugaacgagacccacuucuccgacgacaucgagcagcaggccgacaacaugaucaccgagaugcuccagaaggaguacauggagcgccagggcaagaccccgcuggggcugguggaccucuucguguucagcacguccuucuaccugaucagcaucuuccugcaccuggucaagauccccacccaccggcacguggugggcaagcccugccccaagccgcaccgccucaaccacauggggaucugcuccugcggcuucuacaagcagcccgggguccccgugcgguggaagcgcugaggacuagucccuguucccagagcccacuuuuuuuucuuuuuuugaaauaaaauagccugucuuucagaucuaaaaaaaaaaaaaaaaaaaaaaaaaaaaaaaaaaaaaaaaaaaaaaaaaaaaaaaaaaaaaaaaaaaaaaaaaaaaaaaaaaaaaaaaaaaaaaaaaaaa

SEQ ID NO: 15527 - RNA, 1724 nt, Artificial Sequence
  mRNA product Design a-1 (A100) comprising derived and/or modified sequence from LASV(Z0947-SLE-2011;Clade IV)__AIT17840__GPCmut1 (opt1)
aggagagucccgcagucggcguccagcggcucugcuuguucgugugugugucguugcaggccuuauucaagcuuaccaugggccagaucgugaccuucuuccaggaggucccccacgugaucgaggaggugaugaacaucguccugaucgcccucagcauccuggccgugcugaaggggcucuacaacuucgcgaccugcggccugguggggcuggucacguuccuccugcugugcggccgcuccugcaccaucagccucuacaaggggguguacgagcugcagacccuggagcucaacauggagacccugaacaugacgaugccgcuguccugcaccaagaacaacagccaccacuacaucauggugggcaacgagaccggccucgagcugacccugacgaacaccuccaucaucaaccacaaguucugcaaccucagcgacgcccacaagaagaaccuguacgaccacgcccugauguccaucaucagcaccuuccaccucuccauccccaacuucaaccaguacgaggccaugagcugcgacuucaacgggggcaagaucuccguccaguacaaccugagccacuccuacgccggggacgcggccaaccacugcggcaccguggccaacggggugcugcagacguucaugcggauggccuggggcggcagcuacaucgcgcucgacuccgggugcgaccgcugggacugcaucaugaccagcuaccaguaccugaucauccagaacaccaccugggaggaccacugccaguucucccggcccagccccaucggcuaccuggggcuccugucccagcgcacgcgggacaucuacaucagccgccggcgccggggcaccuucaccuggacccugagcgacuccgagggcaaggacacgcccgggggcuacugccucacccgcuggaugcugaucgaggccgagcugaagugcuucgggaacaccgccgucgccaagugcaacgagaagcacgacgaggaguucugcgacaugcuccggcuguucgacuucaacaagcaggccauccagcgccugaaggcgccggcccagaugagcauccagcucaucaacaaggccgugaacgcccugaucaacgaccagcugaucaugaagaaccaccuccgggacaucaugugcauccccuacugcaacuacuccaaguacugguaccugaaccacaccacgaccggcaagaccagccugcccaagugcuggcucguguccaacgggagcuaccugaacgagacccacuucuccgacgacaucgagcagcaggccgacaacaugaucacggagaugcugcagaaggaguacauggagcgccagggcaagaccccgcucggccuggucgaccuguucguguucagcaccuccuucuaccucaucagcaucuuccugcaccuggugaagauccccacccaccggcacaucgucgggaagcccugccccaagccgcaccgccugaaccacaugggcaucugcuccugcgggcucuacaagcagcccggcgugcccgugaaguggaagcggugaggacuagucccuguucccagagcccacuuuuuuuucuuuuuuugaaauaaaauagccugucuuucagaucuaaaaaaaaaaaaaaaaaaaaaaaaaaaaaaaaaaaaaaaaaaaaaaaaaaaaaaaaaaaaaaaaaaaaaaaaaaaaaaaaaaaaaaaaaaaaaaaaaaaa

SEQ ID NO: 15528 - RNA, 1724 nt, Artificial Sequence
  mRNA product Design a-1 (A100) comprising derived and/or modified sequence from LASV(Josiah;Clade IV)__NP_694870__GPCmut1 (opt4)
aggagagucccgcagucggcguccagcggcucugcuuguucgugugugugucguugcaggccuuauucaagcuuaccaugggccagaucgugaccuucuuccaggaggugccccacgugaucgaggaggugaugaacaucgugcugaucgcccugagcgugcuggccgugcugaagggccuguacaacuucgccaccugcggccuggugggccuggugaccuuccugcugcugugcggcagaagcugcaccaccagccuguacaagggcguguacgagcugcagacccuggagcugaacauggagacccugaacaugaccaugccccugagcugcaccaagaacaacagccaccacuacaucauggugggcaacgagaccggccuggagcugacccugaccaacaccagcaucaucaaccacaaguucugcaaccugagcgacgcccacaagaagaaccuguacgaccacgcccugaugagcaucaucagcaccuuccaccugagcauccccaacuucaaccaguacgaggccaugagcugcgacuucaacggcggcaagaucagcgugcaguacaaccugagccacagcuacgccggcgacgccgccaaccacugcggcaccguggccaacggcgugcugcagaccuucaugagaauggccuggggcggcagcuacaucgcccuggacagcggcugcggcaacugggacugcaucaugaccagcuaccaguaccugaucauccagaacaccaccugggaggaccacugccaguucagcagacccagccccaucggcuaccugggccugcugagccagagaaccagagacaucuacaucagcagaagacgccggggcaccuucaccuggacccugagcgacagcgagggcaaggacacccccggcggcuacugccugaccagauggaugcugaucgaggccgagcugaagugcuucggcaacaccgccguggccaagugcaacgagaagcacgacgaggaguucugcgacaugcugagacuguucgacuucaacaagcaggccauccagagacugaaggcccccgcccagaugagcauccagcugaucaacaaggccgugaacgcccugaucaacgaccagcugaucaugaagaaccaccugagagacaucaugugcauccccuacugcaacuacagcaaguacugguaccugaaccacaccaccaccggcagaaccagccugcccaagugcuggcuggugagcaacggcagcuaccugaacgagacccacuucagcgacgacaucgagcagcaggccgacaacaugaucaccgagaugcugcagaaggaguacauggagagacagggcaagaccccccugggccugguggaccuguucguguucagcaccagcuucuaccugaucagcaucuuccugcaccuggugaagauccccacccacagacacaucgugggcaagagcugccccaagccccacagacugaaccacaugggcaucugcagcugcggccuguacaagcagcccggcgugcccgugaaguggaagagaugaggacuagucccuguucccagagcccacuuuuuuuucuuuuuuugaaauaaaauagccugucuuucagaucuaaaaaaaaaaaaaaaaaaaaaaaaaaaaaaaaaaaaaaaaaaaaaaaaaaaaaaaaaaaaaaaaaaaaaaaaaaaaaaaaaaaaaaaaaaaaaaaaaaaa

SEQ ID NO: 15529 - RNA, 1721 nt, Artificial Sequence
  mRNA product Design a-1 (A100) comprising derived and/or modified sequence from LASV(LP;Clade I)__AAF86701__GPCmut1 (opt4)
aggagagucccgcagucggcguccagcggcucugcuuguucgugugugugucguugcaggccuuauucaagcuuaccaugggccagaucaucaccuucuuccaggaggugccccacgugaucgaggaggugaugaacaucgugcugaucgcccugagccugcuggccauccugaagggccuguacaacaucgccaccugcggcaucaucggccugguggccuuccuguuccugugcggcaagagcugcagccugacccugaagggcggcuacgagcugcagacccuggagcugaacauggagacccugaacaugaccaugccccugagcugcaccaagaacagcagccaccacuacaucagagugggcaacgagaccggccuggagcugacccugaccaacaccagcaucaucaaccacaaguucugcaaccugagcgacgcccacaagaagaaccuguacgaccacgcccugaugagcaucaucagcaccuuccaccugagcauccccaacuucaaccaguacgaggccaugagcugcgacuucaacggcggcaagaucagcgugcaguacaaccugagccacagcuacgccggcgacgccgccgagcacugcggcaccguggccaacggcgugcugcagaccuucaugagaauggccuggggcggcagauacaucgcccuggacagcggcugcggcaacugggacugcaucaugaccagcuaccaguaccugaucauccagaacaccaccugggaggaccacugccaguucagcagacccagccccaucggcuaccugggccugcugagccagagaaccagagacaucuacaucagcagaagacgccggggcaccuucaccuggacccugagcgacagcgagggcaacgagacccccggcggcuacugccugaccagauggaugcugaucgaggccgagcugaagugcuucggcaacaccgccguggccaagugcaacgagaagcacgacgaggaguucugcgacaugcugagacuguucgacuucaacaagcaggccaucagaagacugaaggcccccgcccagaugagcauccagcugaucaacaaggccgugaacgcccugaucaacgaccagcugaucaugaagaaccaccugagagacaucaugugcauccccuacugcaacuacagcaaguacugguaccugaaccacaccagcagcggcagaaccagccugcccaagugcuggcugaucagcaacggcagcuaccugaacgagacccaguucagcgacgacaucgagcagcaggccgacaacaugaucaccgagaugcugcagaaggaguacaucgagagacagggcaagaccccccugggccugguggacaucuucaucuucagcaccagcuucuaccugaucagcaucuuccugcaccugaucaagauccccacccacagacacaucgugggcaagcccugccccaagccccacagacugaaccacaugggcgugugcagcugcggccuguacaagcaccccggcgugcccaccaaguggaagagaugaggacuagucccuguucccagagcccacuuuuuuuucuuuuuuugaaauaaaauagccugucuuucagaucuaaaaaaaaaaaaaaaaaaaaaaaaaaaaaaaaaaaaaaaaaaaaaaaaaaaaaaaaaaaaaaaaaaaaaaaaaaaaaaaaaaaaaaaaaaaaaaaaaaaa

SEQ ID NO: 15530 - RNA, 1721 nt, Artificial Sequence
  mRNA product Design a-1 (A100) comprising derived and/or modified sequence from LASV(803213;Clade II)__AAF86703__GPCmut1 (opt4)
aggagagucccgcagucggcguccagcggcucugcuuguucgugugugugucguugcaggccuuauucaagcuuaccaugggccagaucaucaccuucuuccaggaggugccccacgugaucgaggaggugaugaacaucgugcugaucgcccugagccugcuggccauccugaagggcaucuacaacguggccaccugcggccuguucggccugaucagcuuccugcugcugugcggcagaagcugcagcgugaccuacaagggcguguacgagcugcagacccuggagcugaacauggccaaccugaacaugaccaugccccugagcugcaccaagaacaacagccaccacuacaucauggugggcaacgagaccggccuggagcugacccugaccaacaccagcaucaucaaccacaaguucugcaaccugagcgacgcccacaagaagaaccuguacgaccacgcccugaugagcaucaucagcaccuuccaccugagcauccccaacuucaaccaguacgaggccaugagcugcgacuucaacggcggcaagaucagcgugcaguacaaccugagccacagcuucgccguggacgccgccaaccacugcggcaccaucgccaacggcgugcugcagaccuucaugagaauggccuggggcggcagcuacaucgcccuggacagcggcugcggcaacugggacugcaucaugaccagcuaccaguaccugaucauccagaacaccaccugggaggaccacugccaguucagcagacccagccccaucggcuaccugggccugcugagccagagaaccagagacaucuacaucagcagaagacgccggggcaccuucaccuggacccugagcgacagcgagggcaacgaggcccccggcggcuacugccugaccagauggaugcugaucgaggccgagcugaagugcuucggcaacaccgccguggccaagugcaacgagaagcacgacgaggaguucugcgacaugcugagacuguucgacuucaacaagcaggccaucaagagacugaagacccccgcccagaugagcauccagcugaucaacaaggccgugaacgcccugaucaacgaccagcugaucaugaagaaccaccugagagacaucaugugcauccccuacugcaacuacagcagauacugguaccugaaccacaccgugaccggcaagaccagccugcccagaugcuggcuggugagcaacggcagcuaccugaacgagacccacuucagcgacgacaucgagcagcaggccgacaacaugaucaccgagaugcugcagaaggaguacauggacagacagggcaagaccccccugggccugguggaccuguucguguucagcaccagcuucuaccugaucagcaucuuccugcaccuggugaagauccccacccacagacacaucgugggcaagcccugccccaagccccacagacugaaccacaugggcaucugcagcugcggccuguacaagcaccccggcgugcccgugaaguggaagagaugaggacuagucccuguucccagagcccacuuuuuuuucuuuuuuugaaauaaaauagccugucuuucagaucuaaaaaaaaaaaaaaaaaaaaaaaaaaaaaaaaaaaaaaaaaaaaaaaaaaaaaaaaaaaaaaaaaaaaaaaaaaaaaaaaaaaaaaaaaaaaaaaaaaaa

SEQ ID NO: 15531 - RNA, 1721 nt, Artificial Sequence
  mRNA product Design a-1 (A100) comprising derived and/or modified sequence from LASV(GA391;Clade III)__CAA36645__GPCmut1 (opt4)
aggagagucccgcagucggcguccagcggcucugcuuguucgugugugugucguugcaggccuuauucaagcuuaccaugggccagaucgugaccuucuuccaggaggugccccacgugaucgaggaggugaugaacaucgugcugaucgcccugagcauccuggccauccugaagggccuguacaacguggccaccugcggccugaucggccuggugaccuuccugcugcugagcggcagaagcugcagccugaucuacaagggcaccuacgagcugcagacccuggagcugaacauggagacccugaacaugaccaugccccugagcugcaccaagaacaacagccaccacuacaucagagugggcaacgagaccggccuggagcugacccugaccaacaccagcauccugaaccacaaguucugcaaccugagcgacgcccacaagagaaaccuguacgaccacagccugaugagcaucaucagcaccuuccaccugagcauccccaacuucaaccaguacgaggccaugagcugcgacuucaacggcggcaagaucaccgugcaguacaaccugagccacagcuucgccguggacgccgccggccacugcggcacccuggccaacggcgugcugcagaccuucaugagaauggccuggggcggcagcuacaucgcccuggacagcggcugcggcaacugggacugcaucaugaccagcuaccaguaccugaucauccagaacaccaccugggacgaccacugccaguucagcagacccagccccaucggcuaccugggccugcugagccagagaaccagagacaucuacaucagcagaagacgccggggcaccuucaccuggacccugagcgacagcgagggcaacgagacccccggcggcuacugccugaccagauggaugcugaucgaggccgagcugaagugcuucggcaacaccgccguggccaagugcaacgagaagcacgacgaggaguucugcgacaugcugagacuguucgacuucaacaagcaggccaucagaagacugaagacccccgcccagaugagcauccagcugaucaacaaggccgugaacgcccugaucaacgaccagcugaucaugaagaaccaccugagagacaucaugugcauccccuacugcaacuacagcagauacugguaccugaaccacaccagcaccggcaagaccagccugcccagaugcuggcugaucagcaacggcagcuaccugaacgagaccaaguucagcgacgacaucgagcagcaggccgacaacaugaucaccgagaugcugcagaaggaguacaucgacagacagggcaagaccccccugggccugguggaccuguucguguucagcaccagcuucuaccugaucagcaucuuccugcaccuggugaagauccccacccacagacacaucgugggcaagcccugccccaagccccacagacugaaccacaugggcaucugcagcugcggccuguacaagcagcccggcgugcccgugagauggaagagaugaggacuagucccuguucccagagcccacuuuuuuuucuuuuuuugaaauaaaauagccugucuuucagaucuaaaaaaaaaaaaaaaaaaaaaaaaaaaaaaaaaaaaaaaaaaaaaaaaaaaaaaaaaaaaaaaaaaaaaaaaaaaaaaaaaaaaaaaaaaaaaaaaaaaa

SEQ ID NO: 15532 - RNA, 1724 nt, Artificial Sequence
  mRNA product Design a-1 (A100) comprising derived and/or modified sequence from LASV(AV;Clade V)__CCA30314__GPCmut1 (opt4)
aggagagucccgcagucggcguccagcggcucugcuuguucgugugugugucguugcaggccuuauucaagcuuaccaugggccagaucgugaccuucuuccaggaggugccccacgugaucgaggaggugaugaacaucgugcugaucgcccugagcauccuggccgugcugaagggccuguacaacaucgccaccugcggccugaucggccugaucaccuuccugcugcugugcggcagaagcugcagcagcaaccuguacaagggcguguacgagcugcagagccuggaccugaacauggagacccugaacaugaccaugccccugagcugcaccaagaacaacagccaccacuacaucagagugggcaacgacaccggccuggagcugacccugaccaacaccagcauccugaaccacaaguucugcaaccugagcgacgcccacaagaaggaccuguacgaccacgcccugaugagcaucaucagcaccuuccaccugagcauccccaacuucaaccaguacgaggccaugagcugcgacuucaacggcggcaagaucagcgugcaguacaaccugagccacagcuacgccaucgacgccgccaaccacugcggcaccguggccaacggcauccugcagaccuucaugagaauggccuggggcggcagcuacaucgcccuggacagcggcugcggcaacugggacugcaucaugaccagcuaccaguaccugaucauccagaacaccaccugggagaaccacugccaguucagcagacccagccccaucggcuaccugggccugcugagccagagaaccagagacaucuacaucagcagaagacgccggggcaccuucaccuggacccugagcgacagcgagggcaacgccacccccggcggcuacugccugaccagauggaugcugaucgaggccgagcugaagugcuucggcaacaccgccguggccaagugcaacgagaagcacgacgaggaguucugcgacaugcugagacuguucgacuucaacaagcaggccaucagcagacugaagagccccgcccagaugagcauccagcugaucaacaaggccgugaacgcccugaucaacgaccagcugaucaugaagaaccaccugagagacaucaugugcauccccuacugcaacuacagcaaguacugguaccugaaccacaccaucaccggcaagaccagccugcccaagugcuggcuggugagcaacggcagcuaccugaacgagacccacuucagcgacgacaucgagcagcaggccgacaacaugaucaccgagaugcugcagaaggaguacauggagagacagggcaagaccccccugggccugguggaccuguucguguucagcaccagcuucuaccugaucagcaucuuccugagacuggugaagauccccacccacagacacaucgugggcaagcccugccccaagccccacagacugaaccacaugggcaucugcagcugcggccuguacaagcagcccggcgugcccgugagauggaagagaugaggacuagucccuguucccagagcccacuuuuuuuucuuuuuuugaaauaaaauagccugucuuucagaucuaaaaaaaaaaaaaaaaaaaaaaaaaaaaaaaaaaaaaaaaaaaaaaaaaaaaaaaaaaaaaaaaaaaaaaaaaaaaaaaaaaaaaaaaaaaaaaaaaaaa

SEQ ID NO: 15533 - RNA, 1721 nt, Artificial Sequence
  mRNA product Design a-1 (A100) comprising derived and/or modified sequence from LASV(Togo/2016/7082;Clade VI)__AMR44577__GPCmut1 (opt4)
aggagagucccgcagucggcguccagcggcucugcuuguucgugugugugucguugcaggccuuauucaagcuuaccaugggccagaucaucaccuucuuccaggaggugccccacgugaucgaggaggugaugaacaucgugcugaucgcccugagccugcuggccauccugaagggcguguacaacguggccaccugcggcaucaucggccuggugaccuuccuguuccugugcggcagaagcugcagccugaucuacaagggcagcuacgagcugcagacccuggagcugaacauggagacccugaacaugaccaugccccugagcugcaccaagaacagcagccaccacuacaucagagugggcaacgagaccggccuggagcugacccugaccaacaccagcaucaucaaccacaaguucugcaaccugagcgacgcccacaagagaaaccuguacgaccacgcccugaugagcauccugagcaccuuccaccugagcauccccaacuucaaccaguacgaggccaugagcugcgacuucaacggcggcaagaucagcgugcaguacaaccugagccacgccuacgccguggacgccgccgagcacugcggcaccguggccaacggcgugcugcagaccuucaugagaauggccuggggcggcagcuacaucgcccuggacagcggcugcggcaacugggacugcaucaugaccagcuaccaguaccugaucauccagaacaccaccugggaggaccacugccaguucagcagacccagccccaucggcuaccugggccugcugagccagagaaccagagacaucuacaucagcagaagacgccggggcaccuucaccuggacccugagcgacagcgagggcaacgagacccccggcggcuacugccugaccagauggaugcugaucgaggccgagcugaagugcuucggcaacaccgccguggccaagugcaacgagaagcacgacgaggaguucugcgacaugcugagacuguucgacuucaacaagcaggccauccagagacugaagagccccgcccagaugagcauccagcugaucaacaaggccgugaacgcccugaucaacgaccagcugaucaugaagaaccaccugagagacaugaugugcauccccuacugcaacuacagcaaguacugguaccugaaccacaccagcagcggcagaaccagccugcccaagugcuggcuggugagcaacggcagcuaccugaacgagacccacuucagcgacgacaucgagcagcaggccgacaacaugaucaccgagaugcugcagaaggaguacaucgacagacagggcaagaccccccugggccugguggaccuguucguguucagcaccagcuucuaccugaucagcaucuuccugcaccugaucaagauccccacccacagacacaucgugggcaagcccugccccaagccccacagacugaaccacaugggcaucugcagcugcggccuguacaagcagcccggcgugcccaccagauggaagagaugaggacuagucccuguucccagagcccacuuuuuuuucuuuuuuugaaauaaaauagccugucuuucagaucuaaaaaaaaaaaaaaaaaaaaaaaaaaaaaaaaaaaaaaaaaaaaaaaaaaaaaaaaaaaaaaaaaaaaaaaaaaaaaaaaaaaaaaaaaaaaaaaaaaaa

SEQ ID NO: 15534 - RNA, 1721 nt, Artificial Sequence
  mRNA product Design a-1 (A100) comprising derived and/or modified sequence from LASV(KAK-428;Clade n.d. (VII))__ANH09740__GPCmut1 (opt4)
aggagagucccgcagucggcguccagcggcucugcuuguucgugugugugucguugcaggccuuauucaagcuuaccaugggccagaucgugaccuucuuccaggaggugccccacgugaucgaggaggugaugaacaucgugcugaucgcccugagccugcuggccauccugaagggccuguacaacuucgccaccugcggcgugaucggccugaucaccuuccugcugcugugcggcagaagcugcagcgccaccuacaagggccaguacgagcugcagacccuggagcugaacauggagagccugaacaugaccaugccccugagcugcaccaagaacaacagccaccacuacaucagagccggcaacaacaccggccuggagcugacccugaccaacaccagcaucaucagccacaaguucugcaaccugagcgacgcccacaagaagaaccuguacgaccacacccugaugagcaucaucaccaccuuccaccugagcauccccaacuucaaccaguacgaggccaugagcugcgacuucaacggcggcaagaucagcauccaguacaaccugagccacagcuacgccggcgacgccgcccagcacugcggcaccguggccaacggcgugcugcagaccuucaugagaauggccuggggcggcagcuaccuggcccuggacagcggcugcagaggcugggacugcaucaucagcagcuaccaguaccugaucauccagaacaccaccugggacgaccacugccaguucagcagacccagccccaucggcuaccugggcuucgugagccagaagaccagagacaucuacaucagcagaagacgccggggcaccuucaccuggacccugagcgacagcgagggccacgacaugcccggcggcuacugccugaccagauggaugcugaucgaggccgaccugaagugcuucggcaacaccgccguggccaagugcaacgagaagcacgacgaggaguucugcgacauguggagacuguucgacuucaacaagcaggccauccagagacugaaggcccccgcccagaugaacauccagcugaucaacaaggccgugaacgcccugaucaacgaccagcugaugaugaagaaccaccugagagacaucaugugcauccccuacugcaacuacagcaaguucugguaccugaacaacaccaccaccggcagaaccagccugcccagaugcuggcugaucagcaacggcagcuaccugaacgagacccacuucagcgacgacaucgagcagcaggccgacaacaugaucaccgagaugcugcagaaggaguacauggacagacagggcaagaccccccugggccugguggaccuguucguguucagcaccagcuucuaccugaucaccaucuuccugcaccuggugaagauccccacccacagacacaucgugggcaagcccugccccaagccccacagacugaaccacaugggcaucugcagcugcggccuguacaagcagcccggcgugcccgugagauggaagagaugaggacuagucccuguucccagagcccacuuuuuuuucuuuuuuugaaauaaaauagccugucuuucagaucuaaaaaaaaaaaaaaaaaaaaaaaaaaaaaaaaaaaaaaaaaaaaaaaaaaaaaaaaaaaaaaaaaaaaaaaaaaaaaaaaaaaaaaaaaaaaaaaaaaaa

SEQ ID NO: 15535 - RNA, 1721 nt, Artificial Sequence; identical to SEQ ID NO: 15529
  mRNA product Design a-1 (A100) comprising derived and/or modified sequence from LASV(Pinneo-NIG-1969;Clade I)__AIT17836__GPCmut1 (opt4)

SEQ ID NO: 15536 - RNA, 1721 nt, Artificial Sequence
  mRNA product Design a-1 (A100) comprising derived and/or modified sequence from LASV(ISTH0009-NIG-2011;Clade II)__AIT17404__GPCmut1 (opt4)
aggagagucccgcagucggcguccagcggcucugcuuguucgugugugugucguugcaggccuuauucaagcuuaccaugggccagaucaucaccuucuuccaggaggugccccacgugaucgaggaggugaugaacaucgugcugaucgcccugagccugcuggccauccugaagggcaucuacaacguggccaccugcggccuguucggccuggugagcuuccugcugcugugcggcagaagcugcagcaccaccuacaagggcguguacgagcugcagacccuggagcuggacauggccagccugaacaugaccaugccccugagcugcaccaagaacaacagccaccacuacaucauggugggcaacgagaccggccuggagcugacccugaccaacaccagcaucaucaaccacaaguucugcaaccugagcgacgcccacaagaagaaccuguacgaccacgcccugaugagcaucaucagcaccuuccaccugagcauccccaacuucaaccaguacgaggccaugagcugcgacuucaacggcggcaagaucagcgugcaguacaaccugagccacgccuacgccguggacgccgccaaccacugcggcaccaucgccaacggcgugcugcagaccuucaugagaauggccuggggcggcagcuacaucgcccuggacagcggcugcggcagcugggacugcaucaugaccagcuaccaguaccugaucauccagaacaccaccugggaggaccacugccaguucagcagacccagccccaucggcuaccugggccugcugagccagagaaccagagacaucuacaucagcagaagacgccggggcaccuucaccuggacccugagcgacagcgagggcaacgagacccccggcggcuacugccugaccagauggaugcugaucgaggccgagcugaagugcuucggcaacaccgccguggccaagugcaacgagaagcacgacgaggaguucugcgacaugcugagacuguucgacuucaacaagcaggccaucagaagacugaagacccccgcccagaugagcauccagcugaucaacaaggccgugaacgcccugaucaacgaccagcugaucaugaagaaccaccugagagacaucaugugcauccccuacugcaacuacagcaaguacugguaccugaaccacaccgugaccggcaagaccagccugcccagaugcuggcuggugagcaacggcagcuaccugaacgagacccacuucagcgacgacaucgagcagcaggccgacaacaugaucaccgagcugcugcagaaggaguacauggacagacagggcaagaccccccugggccugguggaccuguucguguucagcaccagcuucuaccugaucagcaucuuccugcaccugaucaagauccccacccacagacacaucaccggcaagcccugccccaagccccacagacugaaccacaugggcaucugcagcugcggccuguacaagcaccccggcgugcccgugaaguggaagagaugaggacuagucccuguucccagagcccacuuuuuuuucuuuuuuugaaauaaaauagccugucuuucagaucuaaaaaaaaaaaaaaaaaaaaaaaaaaaaaaaaaaaaaaaaaaaaaaaaaaaaaaaaaaaaaaaaaaaaaaaaaaaaaaaaaaaaaaaaaaaaaaaaaaaa

SEQ ID NO: 15537 - RNA, 1721 nt, Artificial Sequence
  mRNA product Design a-1 (A100) comprising derived and/or modified sequence from LASV(ISTH2010-NIG-2012;Clade II)__AIT17482__GPCmut1 (opt4)
aggagagucccgcagucggcguccagcggcucugcuuguucgugugugugucguugcaggccuuauucaagcuuaccaugggccagaucaucaccuucuuccaggaggugccccacgugaucgaggaggugaugaacaucgugcugaucgcccugagccugcuggccauccugaagggcaucuacaacguggccaccugcggccuguucggccuggugagcuuccugcugcugugcggcagaagcugcagcaccaccuacaagggcguguacgagcugcagacccuggagcuggacauggccagccugaacaugaccaugccccugagcugcaccaagaacaacagccaccacuacaucauggugggcaacgagaccggccuggagcugacccugaccaacaccagcaucaucaaccacaaguucugcaaccugagcgacgcccacaagaagaaccuguacgaccacgcccugaugagcaucaucagcaccuuccaccugagcauccccaacuucaaccaguacgaggccaugagcugcgacuucaacggcggcaagaucagcgugcaguacaaccugagccacgccuacgccguggacgccgccaaccacugcggcaccaucgccaacggcgugcugcagaccuucaugagaauggccuggggcggcagcuacaucgcccuggacagcggcugcggcagcugggacugcaucaugaccagcuaccaguaccugaucauccagaacaucaccugggaggaccacugccaguucagcagacccagccccaucggcuaccugggccugcugagccagagaaccagagacaucuacaucagcagaagacgccggggcaccuucaccuggacccugagcgacagcgagggcaacgagacccccggcggcuacugccugaccagauggaugcugaucgaggccgagcugaagugcuucggcaacaccgccguggccaagugcaacgagaagcacgacgaggaguucugcgacaugcugagacuguucgacuucaacaagcaggccaucagaagacugaagacccccgcccagaugagcauccagcugaucaacaaggccgugaacgcccugaucaacgaccagcugaucaugaagaaccaccugagagacaucaugugcauccccuacugcaacuacagcaaguacugguaccugaaccacaccgugaccggcaagaccagccugcccagaugcuggcuggugagcaacggcagcuaccugaacgagacccacuucagcgacgacaucgagcagcaggccgacaacaugaucaccgagcugcugcagaaggaguacaucgacagacagggcaagaccccccugggccugguggaccuguucguguucagcaccagcuucuaccugaucagcaucuuccugcaccuggugaagauccccacccacagacacguggugggcaagcccugccccaagccccacagacugaaccacaugggcaucugcagcugcggccuguacaagcaccccggcgugcccgugaaguggaagagaugaggacuagucccuguucccagagcccacuuuuuuuucuuuuuuugaaauaaaauagccugucuuucagaucuaaaaaaaaaaaaaaaaaaaaaaaaaaaaaaaaaaaaaaaaaaaaaaaaaaaaaaaaaaaaaaaaaaaaaaaaaaaaaaaaaaaaaaaaaaaaaaaaaaaa

SEQ ID NO: 15538 - RNA, 1721 nt, Artificial Sequence
  mRNA product Design a-1 (A100) comprising derived and/or modified sequence from LASV(Lassa virus/H.sapiens-wt/NGA/2015/ISTH_0543;Clade II)__AVO03639__GPCmut1 (opt4)
aggagagucccgcagucggcguccagcggcucugcuuguucgugugugugucguugcaggccuuauucaagcuuaccaugggccagaucaucaccuucuuccaggaggugccccacgugaucgaggaggugaugaacaucgugcugaucgcccugagccugcuggccauccugaagggcaucuacaacguggccaccugcggccuguucggccuggugagcuuccugcugcugugcggcagaagcugcagcaccaccuacaagggcguguacgagcugcagacccuggagcuggacauggccaaccugaacaugaccaugccccugagcugcaccaagaacaacagccaccacuacaucauggugggcaacgagaccggccuggagcugacccugaccaacaccagcaucaucaaccacaaguucugcaaccugagcgacgcccacaagaagaaccuguacgaccacgcccugaugagcaucaucagcaccuuccaccugagcauccccaacuucaaccaguacgaggccaugagcugcgacuucaacggcggcaagaucagcgugcaguacaaccugagccacaccuacgccguggacgccgccaaccacugcggcaccaucgccaacggcgugcugcagaccuucaugagaauggccuggggcggcagcuacaucgcccuggacagcggcugcggcagcugggacugcaucaugaccagcuaccaguaccuggugauccagaacaccaccugggaggaccacugccaguucagcagacccagccccaucggcuaccugggccugcugagccagagaaccagagacaucuacaucagcagaagacgccggggcaccuucaccuggacccugagcgacagcgagggcaacgagacccccggcggcuacugccugaccagauggaugcugaucgaggccgagcugaagugcuucggcaacaccgccguggccaagugcaacgagaagcacgacgaggaguucugcgacaugcugagacuguucgacuucaacaagcaggccaucagaagacugaagacccccgcccagaugagcauccagcugaucaacaaggccgugaacgcccugaucaacgaccagcugaucaugaagaaccaccugagagacaucaugugcauccccuacugcaacuacagcaaguacugguaccugaaccacaccgugaccggcaagaccagccugcccagaugcuggcuggugagcaacggcagcuaccugaacgagacccacuucagcgacgacaucgagcagcaggccgacaacaugaucaccgagcugcugcagaaggaguacaucgacagacagggcaagaccccccugggccugguggaccuguucguguucagcaccagcuucuaccugaucagcaucuuccugcaccuggugaagauccccacccacagacacaucaccggcaagcccugccccaagccccacagacugaaccacaugggcaucugcagcugcggccuguacaagcaccccggcgugcccgugaaguggaagagaugaggacuagucccuguucccagagcccacuuuuuuuucuuuuuuugaaauaaaauagccugucuuucagaucuaaaaaaaaaaaaaaaaaaaaaaaaaaaaaaaaaaaaaaaaaaaaaaaaaaaaaaaaaaaaaaaaaaaaaaaaaaaaaaaaaaaaaaaaaaaaaaaaaaaa

SEQ ID NO: 15539 - RNA, 1721 nt, Artificial Sequence
  mRNA product Design a-1 (A100) comprising derived and/or modified sequence from LASV(Lassa virus/H.sapiens-wt/NGA/2016/ISTH_0009;Clade II)__AVO03571__GPCmut1 (opt4)
aggagagucccgcagucggcguccagcggcucugcuuguucgugugugugucguugcaggccuuauucaagcuuaccaugggccagaucaucaccuucuuccaggaggugccccacgugaucgaggaggugaugaacaucgugcugaucgcccugagccugcuggccauccugaagggcaucuacaacguggccaccugcggccugcugggccuggugagcuuccugcugcugugcggcagaagcugcagcaccaccuacaagggcguguacgagcugcagacccuggagcuggacauggccagccugaacaugaccaugccccugagcugcaccaagaacaacagccaccacuacaucauggugggcaacgagaccggccuggagcugacccugaccaacaccagcaucaucaaccacaaguucugcaaccugagcgacgcccacaagaagaaccuguacgaccacgcccugaugagcaucaucagcaccuuccaccugagcauccccaacuucaaccaguacgaggccaugagcugcgacuucaacggcggcagaaucagcgugcaguacaaccugagccacagcuacgccguggacgccgccaaccacugcggcaccaucgccaacggcgugcugcagaccuucaugagaauggccuggggcggcagcuacaucgcccuggacagcggcugcggcagcugggacugcaucaugaccagcuaccaguaccugaucauccagaacaccaccugggaggaccacugccaguucagcagacccagccccaucggcuaccugggccugcugagccagagaaccagagacaucuacaucagcagaagacgccggggcaccuucaccuggacccugagcgacagcgagggcaacgagacccccggcggcuacugccugaccagauggaugcugaucgaggccgagcugaagugcuucggcaacaccgccguggccaagugcaacgagaagcacgacgaggaguucugcgacaugcugagacuguucgacuucaacaagcaggccaucagaagacugaagacccccgcccagaugagcauccagcugaucaacaaggccgugaacgcccugaucaacgaccagcugaucaugaagaaccaccugagagacaucaugugcauccccuacugcaacuacagcaaguacugguaccugaaccacaccgugaccggcaagaccagccugcccagaugcuggcuggugagcaacggcagcuaccugaacgagacccacuucagcgacgacaucgagcagcaggccgacaacaugaucaccgagcugcugcagaaggaguacaucgacagacagggcaagaccccccugggccugguggaccuguucguguucagcaccagcuucuaccugaucagcaucuuccugcaccuggugaagauccccacccacagacacaucaccggcaagcccugccccaagccccacagacugaaccacaugggcaucugcagcugcggccuguacaaccaccccggcgugcccgugaaguggaagagaugaggacuagucccuguucccagagcccacuuuuuuuucuuuuuuugaaauaaaauagccugucuuucagaucuaaaaaaaaaaaaaaaaaaaaaaaaaaaaaaaaaaaaaaaaaaaaaaaaaaaaaaaaaaaaaaaaaaaaaaaaaaaaaaaaaaaaaaaaaaaaaaaaaaaa

SEQ ID NO: 15540 - RNA, 1721 nt, Artificial Sequence
  mRNA product Design a-1 (A100) comprising derived and/or modified sequence from LASV(Lassa virus/H.sapiens-wt/NGA/2016/ISTH_0017;Clade II)__AVO03567__GPCmut1 (opt4)
aggagagucccgcagucggcguccagcggcucugcuuguucgugugugugucguugcaggccuuauucaagcuuaccaugggccagaucaucaccuucuuccaggaggugccccacgugaucgaggaggugaugaacaucgugcugaucgcccugagccugcuggccauccugaagggcaucuacaacguggccaccugcggccuguucggccuggugagcuuccugcugcugugcggcagaagcugcagcaccaccuacaagggcguguacgagcugcagacccuggagcuggacauggccagccugaacaugaccaugccccugagcugcaccaagaacaacagccaccacuacaucauggugggcaacgagaccggccuggagcugacccugaccaacaccagcaucaucaaccacaaguucugcaaccugagcgacgcccacaagaagaaccuguacgaccacgcccugaugagcaucaucagcaccuuccaccugagcauccccaacuucaaccaguacgaggccaugagcugcgacuucaacggcggcaagaucagcgugcaguacaaccugagccacaccuacgccaucgacgccgccaaccacugcggcaccaucgccaacggcgugcugcagaccuucaugagaauggccuggggcggcagcuacaucgcccuggacagcggcugcggcagcugggacugcaucaugaccagcuaccaguaccugaucauccagaacaccaccugggaggaccacugccaguucagcagacccagccccaucggcuaccugggccugcugagccagagaaccagagacaucuacaucagcagaagacgccggggcaccuucaccuggacccugagcgacagcgagggcaacgagacccccggcggcuacugccugaccagauggaugcugaucgaggccgagcugaagugcuucggcaacaccgccguggccaagugcaacgagaagcacgacgaggaguucugcgacaugcugagacuguucgacuucaacaagcaggccaucagaagacugaagacccccgcccagaugagcauccagcugaucaacaaggccgugaacgcccugaucaacgaccagcugaucaugaagaaccaccugagagacaucaugugcauccccuacugcaacuacagcaaguacugguaccugaaccacaccgugaccggcaagaccagccugcccagaugcuggcuggugagcaacggcagcuaccugaacgagacccacuucagcgacgacaucgagcagcaggccgacaacaugaucaccgagcugcugcagaaggaguacauggacagacagggcaagaccccccugggccugguggaccuguucguguucagcaccagcuucuaccugaucagcaucuuccugcaccuggugagaauccccacccacagacacgugaucggcaagcccugccccaagccccacagacugaaccacaugggcaucugcagcugcggccuguacaagcaccccggcgugcccgugaaguggaagagaugaggacuagucccuguucccagagcccacuuuuuuuucuuuuuuugaaauaaaauagccugucuuucagaucuaaaaaaaaaaaaaaaaaaaaaaaaaaaaaaaaaaaaaaaaaaaaaaaaaaaaaaaaaaaaaaaaaaaaaaaaaaaaaaaaaaaaaaaaaaaaaaaaaaaa

SEQ ID NO: 15541 - RNA, 1721 nt, Artificial Sequence
  mRNA product Design a-1 (A100) comprising derived and/or modified sequence from LASV(Lassa virus/H.sapiens-wt/NGA/2018/ISTH_0959;Clade II)__AVV65099__GPCmut1 (opt4)
aggagagucccgcagucggcguccagcggcucugcuuguucgugugugugucguugcaggccuuauucaagcuuaccaugggccagaucaucaccuucuuccaggaggugccccacgugaucgaggaggugaugaacaucgugcugaucgcccugagccugcuggccauccugaagggcaucuacaacguggugaccugcggccuguucggccuggugagcuuccugcugcugugcggcagaagcugcagcaccaccuacaagggcguguacgagcugcagacccuggagcuggacauggccagccugaacaugaccaugccccugagcugcaccaagaacaacagccaccacuacaucauggugggcaacgagaccggccuggagcugacccugaccaacaccagcaucaucaaccacaaguucugcaaccugagcgacgcccacaagaagaaccuguacgaccacgcccugaugagcaucaucagcaccuuccaccugagcauccccaacuucaaccaguacgaggccaugagcugcgacuucaacggcggcaagaucagcgugcaguacaaccugagccacgccuacgccaucgacgccgccaaccacugcggcaccaucgccaacggcgugcugcagaccuucaugagaauggccuggggcggcagcuacaucgcccuggacagcggcugcggcagcugggacugcaucaugaccagcuaccaguaccugaucauccagaacaccaccugggaggaccacugccaguucagcagacccagccccaucggcuaccugggccugcugagccagagaaccagagacaucuacaucagcagaagacgccggggcaccuucaccuggacccugagcgacagcgagggcaacgagacccccggcggcuacugccugaccagauggaugcugaucgaggccgagcugaagugcuucggcaacaccgccguggccaagugcaacgagaagcacgacgaggaguucugcgacaugcugagacuguucgacuucaacaagcaggccaucagaagacugaagacccccgcccagaugagcauccagcugaucaacaaggccgugaacgcccugaucaacgaccagcugaucaugaagaaccaccugagagacaucaugugcauccccuacugcaacuacagcaaguacugguaccugaaccacaccgugaccggcaagaccagccugcccagaugcuggcuggugagcaacggcagcuaccugaacgagacccacuucagcgacgacaucgagcagcaggccgacaacaugaucaccgagcugcugcagaaggaguacaucgacagacagggcaagaccccccugggccugguggaccuguucguguucagcaccagcuucuaccugaucagcaucuuccugcaccuggugaagauccccacccacagacacgugaucggcaagcccugccccaagccccacagacugaaccacaugggcaucugcagcugcggccuguacaagcaccccggcgugcccgugaaguggaagagaugaggacuagucccuguucccagagcccacuuuuuuuucuuuuuuugaaauaaaauagccugucuuucagaucuaaaaaaaaaaaaaaaaaaaaaaaaaaaaaaaaaaaaaaaaaaaaaaaaaaaaaaaaaaaaaaaaaaaaaaaaaaaaaaaaaaaaaaaaaaaaaaaaaaaa

SEQ ID NO: 15542 - RNA, 1721 nt, Artificial Sequence
  mRNA product Design a-1 (A100) comprising derived and/or modified sequence from LASV(LASV003-NIG-2008;Clade II)__AIT17580__GPCmut1 (opt4)
aggagagucccgcagucggcguccagcggcucugcuuguucgugugugugucguugcaggccuuauucaagcuuaccaugggccagaucaucaccuucuuccaggaggugccccacgugaucgaggaggugaugaacaucgugcugaucgcccugagccugcuggccauccugaagggcaucuacaacguggccaccugcggccuguucggccuggugagcuuccugcugcugugcggcagaagcugcagcaccaccuacaagggcguguacgagcugcagacccuggagcuggacauggccagccugaacaugaccaugccccugagcugcaccaagaacaacagccaccacuacaucauggugggcaacgagaccggccuggagcugacccugaccaacaccagcaucaucaaccacaaguucugcaaccugagcgacgcccacaagaagaaccuguacgaccacgcccugaugagcaucaucagcaccuuccaccugagcauccccaacuucaaccaguacgaggccaugagcugcgacuucaacggcggcaagaucagcgugcaguacaaccugagccacaccuacgccguggacgccgccaaccacugcggcaccaucgccaacggcgugcugcagaccuucaugagaauggccuggggcggcagcuacaucgcccuggacagcggcugcggcagcugggacugcaucaugaccagcuaccaguaccugaucauccagaacaccaccugggaggaccacugccaguucagcagacccagccccaucggcuaccugggccugcugagccagagaaccagagacaucuacaucagcagaagacgccggggcaccuucaccuggacccugagcgacagcgagagcaacgagacccccggcggcuacugccugaccagauggaugcugaucgaggccgagcugaagugcuucggcaacaccgccguggccaagugcaacgagaagcacgacgaggaguucugcgacaugcugagacuguucgacuucaacaagcaggccaucagaagacugaaggcccccgcccagaugagcauccagcugaucaacaaggccgugaacgcccugaucaacgaccagcugaucaugaagaaccaccugagagacaucaugugcauccccuacugcaacuacagcaaguacugguaccugaaccacaccgugaccggcagaaccagccugcccagaugcuggcuggugagcaacggcagcuaccugaacgagacccacuucagcgacgacaucgagcagcaggccgacaacaugaucaccgagcugcugcagaaggaguacauggacagacagggcaagaccccccugggccugguggaccuguucguguucagcaccagcuucuaccugaucagcaucuuccugcaccuggugaagauccccacccacagacacgugaucggcaagcccugccccaagccccacagacugaaccacaugggcaucugcagcugcggccuguacaagcaccccggcgugcccgugaaguggaagagaugaggacuagucccuguucccagagcccacuuuuuuuucuuuuuuugaaauaaaauagccugucuuucagaucuaaaaaaaaaaaaaaaaaaaaaaaaaaaaaaaaaaaaaaaaaaaaaaaaaaaaaaaaaaaaaaaaaaaaaaaaaaaaaaaaaaaaaaaaaaaaaaaaaaaa

SEQ ID NO: 15543 - RNA, 1721 nt, Artificial Sequence
  mRNA product Design a-1 (A100) comprising derived and/or modified sequence from LASV(LASV035-NIG-2009;Clade II)__AIT17588__GPCmut1 (opt4)
aggagagucccgcagucggcguccagcggcucugcuuguucgugugugugucguugcaggccuuauucaagcuuaccaugggccagaucaucaccuucuuccaggaggugccccacgugaucgaggaggugaugaacaucgugcugaucgcccugagccugcuggccauccugaagggcaucuacaacguggccaccugcggccuguucggccuggugagcuuccugcugcugugcggcagaagcugcagcaccaccuacaagggcguguacgagcugcagacccuggagcuggacauggccagccugaacaugaccaugccccugagcugcaccaagaacaacagccaccacuacaucauggugggcaacgagaccggccuggagcugacccugaccaacaccagcaucaucaaccacaaguucugcaaccugagcgacgcccacaagaagaaccuguacgaccacgcccugaugagcaucaucagcaccuuccaccugagcauccccaacuucaaccaguacgaggccaugagcugcgacuucaacggcggcaagaucagcgugcaguacaaccugagccacgccuacgccguggacgccgccaaccacugcggcaccaucgccaacggcgugcugcagaccuucaugagaauggccuggggcggcagcuacaucgcccuggacagcggcugcggcagcugggacugcaucaugaccagcuaccaguaccugaucauccagaacaccaccugggaggaccacugccaguucagcagacccagccccaucggcuaccugggccugcugagccagagaaccagagacaucuacaucagcagaagacgccggggcaccuucaccuggacccugagcgacagcgagggcaacgagacccccggcggcuacugccugaccagauggaugcugaucgaggccgagcugaagugcuucggcaacaccgccguggccaagugcaacgagaagcacgacgaggaguucugcgacaugcugagacuguucgacuucaacaagcaggccaucagaagacugaaggcccccgcccagaugagcauccagcugaucaacaaggccgugaacgcccugaucaacgaccagcugaucaugaagaaccaccugagagacaucaugugcauccccuacugcaacuacagcaaguacugguaccugaaccacaccgugaccggcaagaccagccugcccagaugcuggcuggugagcaacggcagcuaccugaacgagacccacuucagcgacgacaucgagcagcaggccgacaacaugaucaccgagcugcugcagaaggaguacaucgacagacagggcaagaccccccugggccugguggaccuguucguguucagcaccagcuucuaccugaucagcaucuuccugcaccuggugaagauccccacccacagacacgugaucggcaagcccugccccaagccccacagacugaaccacaugggcaucugcagcugcggccuguacaagcaccccggcgugcccgugaaguggaagagaugaggacuagucccuguucccagagcccacuuuuuuuucuuuuuuugaaauaaaauagccugucuuucagaucuaaaaaaaaaaaaaaaaaaaaaaaaaaaaaaaaaaaaaaaaaaaaaaaaaaaaaaaaaaaaaaaaaaaaaaaaaaaaaaaaaaaaaaaaaaaaaaaaaaaa

SEQ ID NO: 15544 - RNA, 1721 nt, Artificial Sequence
  mRNA product Design a-1 (A100) comprising derived and/or modified sequence from LASV(LASV1000-NIG-2009;Clade II)__AIT17782__GPCmut1 (opt4)
aggagagucccgcagucggcguccagcggcucugcuuguucgugugugugucguugcaggccuuauucaagcuuaccaugggccagaucaucaccuucuuccaggaggugccccacgugaucgaggaggugaugaacaucgugcugaucgcccugagccugcuggccauccugaagggcaucuacaacguggccaccugcggccuguucggccuggugagcuuccugcugcugugcggcagaagcugcagcaccaccuacaagggcguguacgagcugcagacccuggagcuggacauggccagccugaacaugaccaugccccugagcugcaccaagaacaacagccaccacuacaucauggugggcaacgagaccggccuggagcugacccugaccaacaccagcaucaucaaccacaaguucugcaaccugagcgacgcccacaagaagaaccuguacgaccacgcccugaugagcaucaucagcaccuuccaccugagcauccccaacuucaaccaguacgaggccaugagcugcgacuucaacggcggcaagaucagcgugcaguacaaccugagccacaccuacgccguggacgccgccaaccacugcggcaccaucgccaacggcgugcugcagaccuucaugagaauggccuggggcggcagcuacaucgcccuggacagcggcugcggcagcugggacugcaucaugaccagcuaccaguaccugaucauccagaacaccaccugggaggaccacugccaguucagcagacccagccccaucggcuaccugggccugcugagccagagaaccagagacaucuacaucagcagaagacgccggggcaccuucaccuggacccugagcgacagcgagggcaacgagacccccggcggcuacugccugaccagauggaugcugaucgaggccgagcugaagugcuucggcaacaccgccguggccaagugcaacgagaagcacgacgaggaguucugcgacaugcugagacuguucgacuucaacaagcaggccaucaagagacugaagacccccgcccagaugagcauccagcugaucaacaaggccgugaacgcccugaucaacgaccagcugaucaugaagaaccaccugagagacaucaugugcauccccuacugcaacuacagcaaguacugguaccugaaccacaccgugaccggcaagaccagccugcccagaugcuggcuggugagcaacggcagcuaccugaacgagacccacuucagcgacgacaucgagcagcaggccgacaacaugaucaccgagcugcugcagaaggaguacaucgacagacagggcaagaccccccugggccugguggaccuguucguguucagcaccagcuucuaccugaucagcaucuuccugcaccuggugaagauccccacccacagacacguggugggcaagcccugccccaagccccacagacugaaccacaugggcaucugcagcugcggccuguacaagcaccccggcgugcccgugaaguggaagagaugaggacuagucccuguucccagagcccacuuuuuuuucuuuuuuugaaauaaaauagccugucuuucagaucuaaaaaaaaaaaaaaaaaaaaaaaaaaaaaaaaaaaaaaaaaaaaaaaaaaaaaaaaaaaaaaaaaaaaaaaaaaaaaaaaaaaaaaaaaaaaaaaaaaaa

SEQ ID NO: 15545 - RNA, 1721 nt, Artificial Sequence
  mRNA product Design a-1 (A100) comprising derived and/or modified sequence from LASV(LASV221-NIG-2010;Clade II)__AIT17624__GPCmut1 (opt4)
aggagagucccgcagucggcguccagcggcucugcuuguucgugugugugucguugcaggccuuauucaagcuuaccaugggccagaucaucaccuucuuccaggaggugccccacgugaucgaggaggugaugaacaucgugcugaucgcccugagccugcuggccauccugaagggcaucuacaacguggccaccugcggccuguucggccuggugagcuuccugcugcugugcggcagaagcugcagcaccaccuacaagggcguguacgagcugcagacccuggagcuggacauggccagccugaacaugaccaugccccugagcugcaccaagaacaacagccaccacuacaucauggugggcaacgagaccggccuggagcugacccugaccaacaccagcaucaucaaccacaaguucugcaaccugagcgacgcccacaagaagaaccuguacgaccacgcccugaugagcaucaucagcaccuuccaccugagcauccccaacuucaaccaguacgaggccaugagcugcgacuucaacggcggcaagaucagcgugcaguacaaccugagccacaccuacgccaucgacgccgccaaccacugcggcaccaucgccaacggcgugcugcagaccuucaugagaauggccuggggcggcagcuacaucgcccuggacagcggcugcggcagcugggacugcaucaugaccagcuaccaguaccugaucauccagaacaccaccugggaggaccacugccaguucagcagacccagccccaucggcuaccugggccugcugagccagagaaccagagacaucuacaucagcagaagacgccggggcaccuucaccuggacccugagcgacagcgagggcaacgagacccccggcggcuacugccugaccagauggaugcugaucgaggccgagcugaagugcuucggcaacaccgccguggccaagugcaacgagaagcacgacgaggaguucugcgacaugcugagacuguucgacuucaacaagcaggccaucagaagacugaagacccccgcccagaugagcauccagcugaucaacaaggccgugaacgcccugaucaacgaccagcugaucaugaagaaccaccugagagacaucaugugcauccccuacugcaacuacagcaaguacugguaccugaaccacaccgugaccggcaagaccagccugcccagaugcuggcuggugagcaacggcagcuaccugaacgagacccacuucagcgacgacaucgagcagcaggccgacaacaugaucaccgagaugcugcagaaggaguacauggacagacagggcaagaccccccugggccugguggaccuguucguguucagcaccagcuucuaccugaucagcaucuuccugcaccuggugaagauccccacccacagacacgugaucggcaagcccugccccaagccccacagacugaaccacaugggcaucugcagcugcggccuguacaagcaccccggcgugcccgugaaguggaagagaugaggacuagucccuguucccagagcccacuuuuuuuucuuuuuuugaaauaaaauagccugucuuucagaucuaaaaaaaaaaaaaaaaaaaaaaaaaaaaaaaaaaaaaaaaaaaaaaaaaaaaaaaaaaaaaaaaaaaaaaaaaaaaaaaaaaaaaaaaaaaaaaaaaaaa

SEQ ID NO: 15546 - RNA, 1721 nt, Artificial Sequence
  mRNA product Design a-1 (A100) comprising derived and/or modified sequence from LASV(LASV237-NIG-2010;Clade II)__AIT17638__GPCmut1 (opt4)
aggagagucccgcagucggcguccagcggcucugcuuguucgugugugugucguugcaggccuuauucaagcuuaccaugggccagaucaucaccuucuuccaggaggugccccacgugaucgaggaggugaugaacaucgugcugaucgcccugagccugcuggccauccugaagggcaucuacaacguggccaccugcggccuguucggccuggugagcuuccugcugcugugcggcagaagcugcagcaccaccuacaagggcguguacgagcugcagacccuggagcuggacauggccagccugaacaugaccaugccccugagcugcaccaagaacaacagccaccacuacaucauggugggcaacgagaccggccuggagcugacccugaccaacaccagcaucaucaaccacaaguucugcaaccugagcgacgcccacaagaaggaccuguacgaccacgcccugaugagcaucaucagcaccuuccaccugagcauccccaacuucaaccaguacgaggccaugagcugcgacuucaacggcggcaagaucagcgugcaguacaaccugagccacaccuacgccguggacgccgccaaccacugcggcaccaucgccaacggcgugcugcagaccuucaugagaauggccuggggcggcagcuacaucgcccuggacagcggcugcggcagcugggacugcaucaugaccagcuaccaguaccugaucauccagaacaccaccugggaggaccacugccaguucagcagacccagccccaucggcuaccugggccugcugagccagagaaccagagacaucuacaucagcagaagacgccggggcaccuucaccuggacccugagcgacagcgagggcaacgagacccccggcggcuacugccugaccagauggaugcugaucgaggccgagcugaagugcuucggcaacaccgccguggccaagugcaacgagaagcacgacgaggaguucugcgacaugcugagacuguucgacuucaacaagcaggccaucagaagacugaagacccccgcccagaugagcauccagcugaucaacaaggccgugaacgcccugaucaacgaccagcugaucaugaagaaccaccugagagacaucaugugcauccccuacugcaacuacagcaaguacugguaccugaaccacaccgugaccggcaagaccagccugcccagaugcuggcuggugagcaacggcagcuaccugaacgagacccacuucagcgacgacaucgagcagcaggccgacaacaugaucaccgagcugcugcagaaggaguacauggacagacagggcaagaccccccugggccugguggaccuguucguguucagcaccagcuucuaccugaucagcaucuuccugcaccugaucaagauccccacccacagacacaucaccggcaagcccugccccaagccccacagacugaaccacaugggcaucugcagcugcggccuguacaagcaccccggcgugcccgugaaguggaagagaugaggacuagucccuguucccagagcccacuuuuuuuucuuuuuuugaaauaaaauagccugucuuucagaucuaaaaaaaaaaaaaaaaaaaaaaaaaaaaaaaaaaaaaaaaaaaaaaaaaaaaaaaaaaaaaaaaaaaaaaaaaaaaaaaaaaaaaaaaaaaaaaaaaaaa

SEQ ID NO: 15547 - RNA, 1721 nt, Artificial Sequence
  mRNA product Design a-1 (A100) comprising derived and/or modified sequence from LASV(LASV253-NIG-2011;Clade II)__AIT17670__GPCmut1 (opt4)
aggagagucccgcagucggcguccagcggcucugcuuguucgugugugugucguugcaggccuuauucaagcuuaccaugggccagaucaucaccuucuuccaggaggugccccacgugaucgaggaggugaugaacaucgugcugaucgcccugagccugcuggccauccugaagggcaucuacaacguggccaccugcggccuguucggccuggugagcuuccugcugcugugcggcagaagcugcagcaccaccuacaagggcguguacgagcugcagacccuggagcuggacauggccagccugaacaugaccaugccccugagcugcaccaagaacaacagccaccacuacaucauggugggcaacgagaccggccuggagcugacccugaccaacaccagcaucaucaaccacaaguucugcaaccugagcgacgcccacaagaagaaccuguacgaccacgcccugaugagcaucaucagcaccuuccaccugagcauccccaacuucaaccaguacgaggccaugagcugcgacuucaacggcggcaagaucagcgugcaguacaaccugagccacaccuacgccguggacgccgccaaccacugcggcaccaucgccaacggcgugcugcagaccuucaugagaauggccuggggcggcagcuacaucgcccuggacagcggcugcggcagcugggacugcaucaugaccagcuaccaguaccugaucauccagaacaccaccugggaggaccacugccaguucagcagacccagccccaucggcuaccugggccugcugagccagagaaccagagacaucuacaucagcagaagacgccggggcaccuucaccuggacccugagcgacagcgagggcaacgagacccccggcggcuacugccugaccagauggaugcugaucgaggccgagcugaagugcuucggcaacaccgccguggccaagugcaacgagaagcacgacgaggaguucugcgacaugcugagacuguucgacuucaacaagcaggccaucagaagacugaaggcccccgcccagaugagcauccagcugaucaacaaggccgugaacgcccugaucaacgaccagcugaucaugaagaaccaccugagagacaucaugugcauccccuacugcaacuacagcaaguacugguaccugaaccacaccgugaccggcagaaccagccugcccagaugcuggcuggugagcaacggcagcuaccugaacgagacccacuucagcgacgacaucgagcagcaggccgacaacaugaucaccgagcugcugcagaaggaguacaucgacagacagggcaagaccccccugggccugguggaccuguucguguucagcaccagcuucuaccugaucagcaucuuccugcaccuggugaagauccccacccacagacacaucaucggcaagcccugccccaagccccacagacugaaccacaugggcaucugcagcugcggccuguacaagcaccccggcgugcccgugaaguggaagagaugaggacuagucccuguucccagagcccacuuuuuuuucuuuuuuugaaauaaaauagccugucuuucagaucuaaaaaaaaaaaaaaaaaaaaaaaaaaaaaaaaaaaaaaaaaaaaaaaaaaaaaaaaaaaaaaaaaaaaaaaaaaaaaaaaaaaaaaaaaaaaaaaaaaaa

SEQ ID NO: 15548 - RNA, 1721 nt, Artificial Sequence
  mRNA product Design a-1 (A100) comprising derived and/or modified sequence from LASV(LASV254-NIG-2011;Clade II)__AIT17674__GPCmut1 (opt4)
aggagagucccgcagucggcguccagcggcucugcuuguucgugugugugucguugcaggccuuauucaagcuuaccaugggccagaucaucaccuucuuccaggaggugccccacgugaucgaggaggugaugaacaucgugcugaucgcccugagccugcuggccauccugaagggcaucuacaacguggccaccugcggccuguucggccuggugagcuuccugcugcugugcggcagaagcugcagcaccaccuacaagggcguguacgagcugcagacccuggagcuggacaugaccaaccugaacaugaccaugccccugagcugcaccaagaacaacagccaccacuacaucauggugggcaacgagaccggccuggagcugacccugaccaacaccagcaucaucaaccacaaguucugcaaccugagcgacgcccacaagaagaaccuguacaaccacgcccugaugagcaucaucagcaccuuccaccugagcauccccaacuucaaccaguacgaggccaugagcugcgacuucaacggcggcaagaucagcgugcaguacaaccugagccacagcuacgccguggacgccgccaaccacugcggcaccaucgccaacggcgugcugcagaccuucaugagaauggccuggggcggcagcuacaucgcccuggacagcggcugcggcaacugggacugcaucaugaccagcuaccaguaccugaucauccagaacaccaccugggaggaccacugccaguucagcagacccagccccaucggcuaccugggccugcugagccagagaaccagagacaucuacaucagcagaagacgccggggcaccuucaccuggacccugagcgacagcgagggcaacgagacccccggcggcuacugccugaccagauggaugcugaucgaggccgagcugaagugcuucggcaacaccgccguggccaagugcaacgagaagcacgacgaggaguucugcgacaugcugagacuguucgacuucaacaagcaggccaucagaagacugaagacccccgcccaggccaacauccagcugaucaacaaggccgugaacgcccugaucaacgaccagcugaucaugaagaaccaccugagagacaucaugugcauccccuacugcaacuacagcaaguacugguaccugaaccacaccgugaccggcaagaccagccugcccagaugcuggcuggugagcaacggcagcuaccugaacgagacccacuucagcgacgacaucgagcagcaggccgacaacaugaucaccgagcugcugcagaaggaguacauggacagacagggcaagaccccccugggccugguggaccuguucguguucagcaccagcuucuaccugaucagcaucuuccugcaccuggugaagauccccacccacagacacgugaucggcaagcccugccccaagccccacagacugaaccacaugggcaucugcagcugcggccuguacaagcaccccggcgugcccgugaaguggaagagaugaggacuagucccuguucccagagcccacuuuuuuuucuuuuuuugaaauaaaauagccugucuuucagaucuaaaaaaaaaaaaaaaaaaaaaaaaaaaaaaaaaaaaaaaaaaaaaaaaaaaaaaaaaaaaaaaaaaaaaaaaaaaaaaaaaaaaaaaaaaaaaaaaaaaa

SEQ ID NO: 15549 - RNA, 1721 nt, Artificial Sequence
  mRNA product Design a-1 (A100) comprising derived and/or modified sequence from LASV(Nig08-A19;Clade III)__ADU56618__GPCmut1 (opt4)
aggagagucccgcagucggcguccagcggcucugcuuguucgugugugugucguugcaggccuuauucaagcuuaccaugggccagaucgugaccuucuuccaggaggugccccacgugaucgaggaggugaugaacaucgugcugaucgcccugagcauccuggccauccugaagggccuguacaacaucgccaccugcggccugaucggccuggugaccuuccugcugcugagcggcagaagcugcagcaugaccuacaagggcguguacgagcugcagacccuggagcugaacaugaacacccugaacaugaccaugccccugagcugcaccaagaacaacagccaccacuacaucauggugggcaacgagaccggccuggagcugacccugaccaacaccagccugcugcaccacaaguucugcaaccugagcgacgcccacaagaagaaccuguacgaccacacccugaugagcaucaucagcaccuuccaccugagcauccccaacuucaaccaguacgaggccaugagcugcgacuucaacggcggcaagaucaccgugcaguacaaccugagccacagcuacgccaucgacgccgccaaccacugcggcaccguggccaacggcgugcugcagaccuucaugagaauggccuggggcggcagcuacaucgcccuggacagcggcugcggcaagugggacugcaucaugaccagcuaccaguaccugaucauccagaacaccaccugggaggaccacugccaguucagcagacccagccccaucggcuaccugggccugcugagccagagaaccagagacaucuacaucagcagaagacgccggggcaccuucaccuggacccugagcgacagcgagggcaacgagacccccggcggcuacugccugaccagauggaugcugaucgaggccgagcugaagugcuucggcaacaccgccguggccaagugcaacgagaagcacgacgaggaguucugcgacaugcugagacuguucgacuucaacaagcaggccaucagaagacugaaggcccccgcccagaugagcauccagcugaucaacaaggccgugaacgcccugaucaacgaccagcugaucaugaagaaccaccugagagacaucaugugcauccccuacugcaacuacagcaaguacugguaccugaaccacaccagcaccggcagaaccagccugcccagaugcuggcuggugagcaacggcagcuaccugaacgagacccacuucagcgacgacaucgagcagcaggccgacaacaugaucaccgagaugcugcagaaggaguaccuggacagacagggcaagaccccccugggccugguggaccuguucguguucagcaccagcuucuaccugaucagcaucuuccugcaccuggugaagauccccacccacagacacaucgugggcaagcccugccccaagccccacagacugaaccacaugggcaucugcagcugcggccuguacaagcagcccggcgugcccgugagauggaagagaugaggacuagucccuguucccagagcccacuuuuuuuucuuuuuuugaaauaaaauagccugucuuucagaucuaaaaaaaaaaaaaaaaaaaaaaaaaaaaaaaaaaaaaaaaaaaaaaaaaaaaaaaaaaaaaaaaaaaaaaaaaaaaaaaaaaaaaaaaaaaaaaaaaaaa

SEQ ID NO: 15550 - RNA, 1724 nt, Artificial Sequence
  mRNA product Design a-1 (A100) comprising derived and/or modified sequence from LASV(G1180-SLE-2010;Clade IV)__AIT17168__GPCmut1 (opt4)
aggagagucccgcagucggcguccagcggcucugcuuguucgugugugugucguugcaggccuuauucaagcuuaccaugggccagaucgugaccuucuuccaggaggugccccacgugaucgaggaggugaugaacaucgugcugaucgcccugagcauccuggccgugcugaagggccuguacaacuucgccaccugcggccuggugggccugcugaccuuccugcugcugugcggcagaagcugcaccgccagcagauacaagggcguguacgagcugcagacccuggagcugaacauggagacccugaacaugaccaugccccugagcugcaccaagaacaacagccaccacuacaucauggugggcaacgagaccggccuggagcugacccugaccaacaccagcaucaucaaccacaaguucugcaaccugagcgacgcccacaagaagaaccuguacgaccacgcccugaugagcaucaucagcaccuuccaccugagcauccccaacuucaaccaguacgaggccaugagcugcgacuucaacggcggcaagaucagcgugcaguacaaccugagccacagcuacgccggcgacgccgccaaccacugcggcaccguggccaacggcgugcugcagaccuucaugagaauggccuggggcggcagcuacaucgcccuggacagcggcugcggcagcugggacugcaucaugaccagcuaccaguaccugaucauccagaacaccaccugggaggaccacugccaguucagcagacccagccccaucggcuaccugggccugcugagccagagaaccagagacaucuacaucagcagaagacgccggggcaccuucaccuggacccugagcgacagcgagggcaaggacacccccggcggcuacugccugaccagauggaugcugaucgaggccgagcugaagugcuucggcaacaccgccguggccaagugcaacgagaagcacgacgaggaguucugcgacaugcugagacuguucgacuucaacaagcaggccauccagagacugaaggcccccgcccagaugagcauccagcugaucaacaaggccgugaacgcccugaucaacgaccagcugaucaugaagaaccaccugagagacaucaugugcauccccuacugcaacuacagcaaguacugguaccugaaccacaccaccaccggcaagaccagccugcccaagugcuggcuggugagcaacggcagcuaccugaacgagacccacuucagcgacgacaucgagcagcaggccgacaacaugaucaccgagaugcugcagaaggaguacauggagagacagggcaagaccccccugggccugguggaccuguucguguucagcaccagcuucuaccugaucagcaucuuccugcaccuggugaagauccccacccacagacacaucgugggcaagagcugccccaagccccacagacugaaccacaugggcaucugcagcugcggccuguacaagcagcccggcgugcccgugaaguggaagagaugaggacuagucccuguucccagagcccacuuuuuuuucuuuuuuugaaauaaaauagccugucuuucagaucuaaaaaaaaaaaaaaaaaaaaaaaaaaaaaaaaaaaaaaaaaaaaaaaaaaaaaaaaaaaaaaaaaaaaaaaaaaaaaaaaaaaaaaaaaaaaaaaaaaaa

SEQ ID NO: 15551 - RNA, 1724 nt, Artificial Sequence
  mRNA product Design a-1 (A100) comprising derived and/or modified sequence from LASV(G1442-SLE-2011;Clade IV)__AIT17180__GPCmut1 (opt4)
aggagagucccgcagucggcguccagcggcucugcuuguucgugugugugucguugcaggccuuauucaagcuuaccaugggccagaucgugaccuucuuccaggaggugccccacgugaucgaggaggugaugaacaucgugcugaucgcccugagcauccuggccgugcugaagggccuguacaacguggccaccugcggccugaucggccuggugaccuuccugcugcugugcggcagaagcugcaccaccacccuguacaagggcguguacgagcugcagacccuggagcugaacauggagacccugaacaugaccaugccccugagcugcaccaagaacaacagccaccacuacaucagagugggcaacgagaccggccuggagcugacccugaccaacaccagcaucaucaaccacaaguucugcaaccugagcgacgcccacaagaagaaccuguacgaccacgcccugaugagcaucaucagcaccuuccaccugagcauccccaacuucaaccaguacgaggccaugagcugcgacuucaacggcggcaagaucagcgugcaguacaaccugagccacagcuacgccggcgacgccgccaaccacugcggcaccguggccaacggcgugcugcagaccuucaugagaauggccuggggcggcagcuacaucgcccuggacagcggcugcggcaacugggacugcaucaugaccagcuaccaguaccugaucauccagaacaccaccugggacgaccacugccaguucagcagacccagccccaucggcuaccugggccugcugagccagagaaccagagacguguacaucagcagaagacgccggggcaccuucaccuggacccugagcgacagcgagggcaaggacacccccggcggcuacugccugaccagauggaugcugaucgaggccgagcugaagugcuucggcaacaccgccguggccaagugcaacgagaagcacgacgaggaguucugcgacaugcugagacuguucgacuucaacaagcaggccauccagagacugaaggcccccgcccagaugagcauccagcugaucaacaaggccgugaacgcccugaucaacgaccagcugaucaugaagaaccaccugagagacaucaugugcauccccuacugcaacuacagcaaguacugguaccugaacaacaccgccaccggcaagaccagccugcccaagugcuggcugaucagcaacggcagcuaccugaacgagacccacuucagcgacgacaucgagcaggaggccgacaacaugaucaccgagaugcugcagaaggaguacauggagagacagggcaagaccccccugggccugguggaccuguucguguucagcaccagcuucuaccugaucagcaucuuccugcaccuggugaagauccccacccacagacacaucgugggcaagagcugccccaagccccacagacugaaccacaugggcaucugcagcugcggccuguacaagcagcccggcgugcccgugagauggaagagaugaggacuagucccuguucccagagcccacuuuuuuuucuuuuuuugaaauaaaauagccugucuuucagaucuaaaaaaaaaaaaaaaaaaaaaaaaaaaaaaaaaaaaaaaaaaaaaaaaaaaaaaaaaaaaaaaaaaaaaaaaaaaaaaaaaaaaaaaaaaaaaaaaaaaa

SEQ ID NO: 15552 - RNA, 1724 nt, Artificial Sequence
  mRNA product Design a-1 (A100) comprising derived and/or modified sequence from LASV(G3010-SLE-2013;Clade IV)__AIT17344__GPCmut1 (opt4)
aggagagucccgcagucggcguccagcggcucugcuuguucgugugugugucguugcaggccuuauucaagcuuaccaugggccagaucgugaccuucuuccaggaggugccccacgugaucgaggaggugaugaacaucgugcugaucgcccugagcauccuggccgugcugaagggccuguacaacuucgccaccugcggccuggugggccuggugaccuuccugcugcugugcggcagaagcugcaccaccagccuguacaagggcguguacgagcugcagacccuggagcugaacauggagacccugaacaugaccaugccccugagcugcaccaagaacaacagccaccacuacaucauggugggcaacgagaccggccuggagcugacccugaccaacaccagcaucaucaaccacaaguucugcaaccugagcgacgcccacaagaagaaccuguacaaccacgcccugaugagcaucaucagcaccuuccaccugagcauccccaacuucaaccaguacgaggccaugagcugcgacuucaacggcggcaagaucagcgugcaguacaaccugagccacagcuacgccggcgacgccgccagccacugcggcaccguggccaacggcgugcugcagaccuucaugagaauggccuggggcggcagcuacaucgcccuggacagcggcugcggcaagugggacugcaucaugaccagcuaccaguaccugaucauccagaacaccaccugggaggaccacugccaguucagcagacccagccccaucggcuaccugggccugcugagccagagaaccagagacaucuacaucagcagaagacgccggggcaccuucaccuggacccugagcgacagcgagggcaaggacacccccggcggcuacugccugaccagauggaugcugaucgaggccgagcugaagugcuucggcaacaccgccguggccaagugcaacgagaagcacgacgaggaguucugcgacaugcugagacuguucgacuucaacaagcaggccauccagagacugaagacccccgcccagaugagcauccagcugaucaacaaggccgugaacgcccugaucaacgaccagcugaucaugaagaaccaccugagagacaucaugugcauccccuacugcaacuacagcaaguacugguaccugaaccacaccaccaccggcaagaccagccugcccaagugcuggcuggugagcaacggcagcuaccugaacgagacccacuucagcgacgacaucgagcagcaggccgacaacaugaucaccgagaugcugcagaaggaguacauggagagacagggcaagaccccccugggccugguggaccuguucguguucagcaccagcuucuaccugaucagcaucuuccugcaccuggugaagauccccacccacagacacaucgugggcaagagcugccccaagccccacagacugaaccacaugggcaucugcagcugcggccuguacaagcagcccggcgugcccgugagauggaagagaugaggacuagucccuguucccagagcccacuuuuuuuucuuuuuuugaaauaaaauagccugucuuucagaucuaaaaaaaaaaaaaaaaaaaaaaaaaaaaaaaaaaaaaaaaaaaaaaaaaaaaaaaaaaaaaaaaaaaaaaaaaaaaaaaaaaaaaaaaaaaaaaaaaaaa

SEQ ID NO: 15553 - RNA, 1724 nt, Artificial Sequence
  mRNA product Design a-1 (A100) comprising derived and/or modified sequence from LASV(G502-SLE-2009;Clade IV)__AIT17126__GPCmut1 (opt4)
aggagagucccgcagucggcguccagcggcucugcuuguucgugugugugucguugcaggccuuauucaagcuuaccaugggccagaucgugaccuucuuccaggaggugccccacgugaucgaggaggugaugaacaucgugcugaucgcccugagcauccuggccgugcugaagggccuguacaacuucgccaccugcggccuggugggccugcugaccuuccugcugcugugcggcagaagcugcaccaccggccuguacaagggcguguacgagcugcagacccuggagcugaacauggagacccugaacaugaccaugccccugagcugcaccaagaacaacagccaccacuacaucauggugggcaacgagaccggccuggagcugacccugaccaacaccagcaucaucaaccacaaguucugcaaccugagcgacgcccacaagaagaaccuguacgaccacgcccugaugagcaucaucagcaccuuccaccugagcauccccaacuucaaccaguacgaggccaugagcugcgacuucaacggcggcaagaucagcgugcaguacaaccugagccacagcuacgccggcgacgccgccgaccacugcggcaccguggccaacggcgugcugcagaccuucaugagaauggccuggggcggcagcuacaucgcccuggacagcggcugcggcagaugggacugcaucaugaccagcuaccaguaccugaucauccagaacaccaccugggaggaccacugccaguucagcagacccagccccaucggcuaccugggccugcugagccagagaaccagagacaucuacaucagcagaagacgccggggcaccuucaccuggacccugagcgacagcgagggcaaggacacccccggcggcuacugccugaccagauggaugcugaucgaggccgagcugaagugcuucggcaacaccgccguggccaagugcaacgagaagcacgacgaggaguucugcgacaugcugagacuguucgacuucaacaagcaggccauccagagacugaaggcccccgcccagaugagcauccagcugaucaacaaggccgugaacgcccugaucaacgaccagcuggugaugaagaaccaccugagagacaucaugugcauccccuacugcaacuacagcagauacugguaccugaaccacaccaccaccggcagaaccagccugcccaagugcuggcuggugagcaacggcagcuaccugaacgagacccacuucagcgacgacaucgagcagcaggccgacaacaugaucaccgagaugcugcagaaggaguacauggagagacagggcaagaccccccugggccugguggaccuguucguguucagcaccagcuucuaccugaucagcaucuuccugcaccuggugaagauccccacccacagacacaucgugggcaagagcugccccaagccccacagacugaaccacaugggcaucugcagcugcggccuguacaagcagcccggcgugcccgugaaguggaagagaugaggacuagucccuguucccagagcccacuuuuuuuucuuuuuuugaaauaaaauagccugucuuucagaucuaaaaaaaaaaaaaaaaaaaaaaaaaaaaaaaaaaaaaaaaaaaaaaaaaaaaaaaaaaaaaaaaaaaaaaaaaaaaaaaaaaaaaaaaaaaaaaaaaaaa

SEQ ID NO: 15554 - RNA, 1724 nt, Artificial Sequence
  mRNA product Design a-1 (A100) comprising derived and/or modified sequence from LASV(G733-SLE-2010;Clade IV)__AIT17154__GPCmut1 (opt4)
aggagagucccgcagucggcguccagcggcucugcuuguucgugugugugucguugcaggccuuauucaagcuuaccaugggccagaucgugaccuucuuccaggaggugccccacgugaucgaggaggugaugaacaucgugcugaucgcccugagcauccuggccgugcugaagggccuguacaacuucgccaccugcggcaucgugggccuggugagcuuccugcugcugugcggcagaagcugcaccaccagccuguacaagggcguguacgagcugcagacccuggagcugaacauggagacccugaacaugaccaugccccugagcugcaccaagaacaacagccaccacuacaucauggugggcaacgagaccggccuggagcugacccugaccaacaccagcaucaucaaccacaaguucugcaaccugagcgacgcccacaagaagaaccuguacgaccacgcccugaugagcaucaucagcaccuuccaccugagcauccccaacuucaaccaguacgaggccaugagcugcgacuucaacggcggcaagaucagcgugcaguacaaccugagccacagcuacgccggcgacgccgccaaccacugcggcaccaucgccaacggcgugcugcagaccuucaugagaauggccuggggcggcagcuacaucgcccuggacagcggcugcgacagaugggacugcaucaugaccagcuaccaguaccugaucauccagaacaccaccugggaggaccacugccaguucagcagacccagccccaucggcuaccugggccugcugagccagagaaccagagacaucuacaucagcagaagacgccggggcaccuucaccuggacccugagcgacagcgagggcaaggacacccccggcggcuacugccugaccagauggaugcugaucgaggccgagcugaagugcuucggcaacaccgccguggccaagugcaacgagaagcacgacgaggaguucugcgacaugcugagacuguucgacuucaacaagcaggccauccagagacugaaggcccccgcccagaugagcauccagcugaucaacaaggccgugaacgcccugaucaacgaccagcugaucaugaagaaccaccugagagacaucaugugcauccccuacugcaacuacagcaaguacugguaccugaaccacaccaccaccggcaagaccagccugcccaagugcuggcuggugagcaacggcagcuaccugaacgagacccacuucagcgacgacaucgagcagcaggccgacaacaugaucaccgagaugcugcagaaggaguacauggagagacagggcaagaccccccugggccugguggaccuguucguguucagcaccagcuucuaccugaucagcaucuuccugcaccuggugaagauccccacccacagacacguggugggcaagagcugccccaagccccacagacugaaccacaugggcaucugcagcugcggccuguacggccagcccggcgugcccgugaaguggaagagaugaggacuagucccuguucccagagcccacuuuuuuuucuuuuuuugaaauaaaauagccugucuuucagaucuaaaaaaaaaaaaaaaaaaaaaaaaaaaaaaaaaaaaaaaaaaaaaaaaaaaaaaaaaaaaaaaaaaaaaaaaaaaaaaaaaaaaaaaaaaaaaaaaaaaa

SEQ ID NO: 15555 - RNA, 1724 nt, Artificial Sequence
  mRNA product Design a-1 (A100) comprising derived and/or modified sequence from MOPV/LASV reassortant(IGS-1;Clade IV)__AFY05576__GPCmut1 (opt4)
aggagagucccgcagucggcguccagcggcucugcuuguucgugugugugucguugcaggccuuauucaagcuuaccaugggccagaucgugaccuucuuccaggaggugccccacgugaucgaggaggugaugaacaucgugcugaucgcccugagcgugcuggccgugcugaagggccuguacaacuucgccaccugcggccuggugggccuggugaccuuccugcugcugugcggcagaagcugcaccaccagccuguacaagggcguguacgagcugcagacccuggagcugaacauggagacccugaacaugaccaugccccugagcugcaccaagaacaacagccaccacuacaucauggugggcaacgagaccggccuggagcugacccugaccaacaccagcaucaucaaccacaaguucugcaaccugagcgacgcccacaagaagaaccuguacgaccacgcccugaugagcaucaucagcaccuuccaccugagcauccccaacuucaaccaguacgaggccaugagcugcgacuucaacggcggcaagaucagcgugcaguacaaccugagccacagcuacgccggcgacgccgccaaccacugcggcaccguggccaacggcgugcugcagaccuucaugagaauggccuggggcggcagcuacaucgcccuggacagcggcugcggcaacugggacugcaucaugaccagcuaccaguaccugaucauccagaacaccaccugggaggaccacugccaguucagcagacccagccccaucggcuaccugggccugcugagccagagaaccagagacaucuacaucagcagaagacgccggggcaccuucaccuggacccugagcgacagcgagggcgaggacacccccggcggcuacugccugaccagauggaugcugaucgaggccgagcugaagugcuucggcaacaccgccguggccaagugcaacgagaagcacgacgaggaguucugcgacaugcugagacuguucgacuucaacaagcaggccauccagagacugaaggcccccgcccagaugagcauccagcugaucaacaaggccgugaacgcccugaucaacgaccagcugaucaugaagaaccaccugagagacaucaugugcauccccuacugcaacuacagcaaguacugguaccugaaccacaccaccaccggcagaaccagccugcccaagugcuggcuggugagcaacggcagcuaccugaacgagacccacuucagcgacgacaucgagcagcaggccgacaacaugaucaccgagaugcugcagaaggaguacauggagagacagggcaagaccccccugggccugguggaccuguucguguucagcaccagcuucuaccugaucagcaucuuccugcaccuggugaagauccccacccacagacacaucgugggcaagagcugccccaagccccacagacugaaccacaugggcaucugcagcugcggccuguacaagcagcccggcgugcccgugaaguggaagagaugaggacuagucccuguucccagagcccacuuuuuuuucuuuuuuugaaauaaaauagccugucuuucagaucuaaaaaaaaaaaaaaaaaaaaaaaaaaaaaaaaaaaaaaaaaaaaaaaaaaaaaaaaaaaaaaaaaaaaaaaaaaaaaaaaaaaaaaaaaaaaaaaaaaaa

SEQ ID NO: 15556 - RNA, 1724 nt, Artificial Sequence
  mRNA product Design a-1 (A100) comprising derived and/or modified sequence from LASV(LM765-SLE-2012;Clade IV)__AIT17814__GPCmut1 (opt4)
aggagagucccgcagucggcguccagcggcucugcuuguucgugugugugucguugcaggccuuauucaagcuuaccaugggccagaucgugaccuucuuccaggaggugccccacgugaucgaggaggugaugaacaucgugcugaucgcccugagcauccuggccgugcugaagggccuguacaacuucgccaccugcggccuggugggccuggugaccuuccugcugcugugcggcagaagcugcaccaccagccuguacaagggcguguacgagcugcagacccuggagcugaacauggagacccugaacaugaccaugccccugagcugcaccaagaacaacagccaccacuacaucauggugggcaacgagaccggccuggagcugacccugaccaacaccagcaucaucgaccacaaguucugcaaccugagcgacgcccacagaaagaaccuguacgaccacgcccugaugagcaucaucagcaccuuccaccugagcauccccaacuucaaccaguacgaggccaugagcugcgacuucaacggcggcaagaucagcgugcaguacaaccugagccacagcuacgccaaggacgccgccgaccacugcggcaccguggccaacggcgugcugcagaccuucaugagaauggccuggggcggcagcuacaucgcccuggacagcggcugcggcagaugggacugcaucaugaccagcuaccaguaccugaucauccagaacaccaccugggaggaccacugccaguucagcagacccagccccaucggcuaccugggccugcugagccagagaaccagagacaucuacaucagcagaagacgccggggcaccuucaccuggacccugagcgacagcgagggcaaggacacccccggcggcuacugccugaccagauggaugcugaucgaggccgagcugaagugcuucggcaacaccgccguggccaagugcaacgagaagcacgacgaggaguucugcgacaugcugagacuguucgacuucaacaagcaggccauccagagacugaaggcccccgcccagaugagcauccagcugaucaacaaggccgugaacgcccugaucaacgaccagcugaucaugaagaaccaccugagagacaucaugugcauccccuacugcaacuacagcaaguacugguaccugaaccacaccaccaccggcaagaccagccugcccaagugcuggcuggugagcaacggcagcuaccugaacgagacccacuucagcgacgacaucgagcagcaggccgacaacaugaucaccgagaugcugcagaaggaguacauggagagacagggcaagaccccccugggccugguggaccuguucguguucagcaccagcuucuaccugaucagcaucuuccugcaccuggugaagauccccacccacagacacaucgugggcaagcccugccccaagccccacagacugaaccacaugggcaucugcagcugcggccuguacaagcagcccggcgugcccgugaaguggaagagaugaggacuagucccuguucccagagcccacuuuuuuuucuuuuuuugaaauaaaauagccugucuuucagaucuaaaaaaaaaaaaaaaaaaaaaaaaaaaaaaaaaaaaaaaaaaaaaaaaaaaaaaaaaaaaaaaaaaaaaaaaaaaaaaaaaaaaaaaaaaaaaaaaaaaa

SEQ ID NO: 15557 - RNA, 1724 nt, Artificial Sequence
  mRNA product Design a-1 (A100) comprising derived and/or modified sequence from LASV(LM776-SLE-2012;Clade IV)__AIT17824__GPCmut1 (opt4)
aggagagucccgcagucggcguccagcggcucugcuuguucgugugugugucguugcaggccuuauucaagcuuaccaugggccagaucgugaccuucuuccaggaggugccccacgugaucgaggaggugaugaacaucgugcugaucgcccugagcauccuggccgugcugaagggccuguacaacuucgccaccugcggccuggugggccuggugaccuuccugcugcugugcggcagaagcugcaccaccagcguguacaagggcguguacgagcugcagacccuggagcugaacauggagacccugaacaugaccaugccccugagcugcaccaagaacaacagccaccacuacaucauggugggcaacgagaccggccuggagcugacccugaccaacaccagcaucaucaaccacaaguucugcaaccugagcgacgcccacaagaagaaccuguacgaccacgcccugaugagcaucaucagcaccuuccaccugagcauccccaacuucaaccaguacgaggccaugagcugcgacuucaacggcggcaagaucagcgugcaguacaaccugagccacagcuacgccggcgacgccgccaaccacugcggcaccguggccaacggcgugcugcagaccuucaugagaauggccuggggcggcagcuacaucgcccuggacagcggcugcggcaagugggacugcaucaugaccagcuaccaguaccugaucauccagaacaccaccugggaggaccacugccaguucagcagacccagccccaucggcuaccugggccugcugagccagagaaccagagacaucuacaucagcagaagacgccggggcaccuucaccuggacccugagcgacagcgagggcaaggacacccccggcggcuacugccugaccagauggaugcugaucgaggccgagcugaagugcuucggcaacaccgccguggccaagugcaacgagaagcacgacgaggaguucugcgacaugcugagacuguucgacuucaacaagcaggccauccagagacugaaggcccccgcccagaugagcauccagcugaucaacaaggccgugaacgcccugaucaacgaccagcugaucaugaagaaccaccugagagacaucaugugcauccccuacugcaacuacagcaaguacugguaccugaaccacaccaccaccggcaagaccagccugcccaagugcuggcuggugagcaacggcagcuaccugaacgagacccacuucagcgacgacaucgagcagcaggccgacaacaugaucaccgagaugcugcagaaggaguacauggagagacagggcaagaccccccugggccugguggaccuguucguguucagcaccagcuucuaccugaucagcaucuuccugcaccuggugaagauccccacccacagacacaucgugggcaagagcugccccaagccccacagacugaaccacaugggcaucugcagcugcggccuguacaagcagcccggcgugcccgugagauggaagagaugaggacuagucccuguucccagagcccacuuuuuuuucuuuuuuugaaauaaaauagccugucuuucagaucuaaaaaaaaaaaaaaaaaaaaaaaaaaaaaaaaaaaaaaaaaaaaaaaaaaaaaaaaaaaaaaaaaaaaaaaaaaaaaaaaaaaaaaaaaaaaaaaaaaaa

SEQ ID NO: 15558 - RNA, 1724 nt, Artificial Sequence
  mRNA product Design a-1 (A100) comprising derived and/or modified sequence from LASV(Mad39;Clade IV)__ANH09722__GPCmut1 (opt4)
aggagagucccgcagucggcguccagcggcucugcuuguucgugugugugucguugcaggccuuauucaagcuuaccaugggccagaucgugaccuucuuccaggaggugccccacgugaucgaggaggugaugaacaucgugcugaucgcccugagcauccuggccgugcugaagggccuguacaacguggccaccugcggccugaucggccuggugaccuuccugcugcugugcggcagaagcugcaccaccacccuguacaagggcguguacgagcugcaggcccuggagcugaacauggagacccugaacaugaccaugccccugagcugcaccaagaacaacagccaccacuacaucagagugggcaacgagaccggccuggagcugacccugaccaacaccagccugaucaaccacaaguucugcaaccugagcgacgcccacaagaagaaccuguacgaccacgcccugaugagcaucaucagcaccuuccaccugagcauccccaacuucaaccaguacgaggccaugagcugcgacuucaacgacggcaagaucagcgugcaguacaaccugagccacaccuacgccggcgacaccgccaaccacugcggcaccguggccaacggcgugcugcagaccuucaugagaauggccuggggcggcagcuacaucgcccuggacagcggcugcggcggcugggacugcaucaugaccagcuaccaguaccugaucauccagaacaccaccugggaggaccacugccaguucagcagacccagccccaucggcuaccugggccugcugagccagagaaccagagacaucuacaucagcagaagacgccggggcaccuucaccuggacccugagcgacagcgagggcaaggacacccccggcggcuacugccugaccagauggaugcugaucgaggccgagcugaagugcuucggcaacaccgccguggccaagugcaacgagaagcacgacgaggaguucugcgacaugcugagacuguucgacuucaacaagcaggccauccagagacugaaggcccccgcccagaugagcauccagcugaucaacaaggccgugaacgcccugaucaacgaccagcugaucaugaagaaccaccugagagacaucaugugcauccccuacugcaacuacagcaaguacugguaccugaaccacaccgugaccggcaagaccagccugcccaagugcuggcuggugagcaacggcagcuaccugaacgagacccacuucagcgacgacaucgagcagcaggccgacaacaugaucaccgagaugcugcagaaggaguacauggagagacagggcaagaccccccugggccugguggaccuguucguguucagcaccagcuucuaccugaucagcaucuuccugcaccuggugaagauccccacccacagacacguggugggcaagcccugccccaagccccacagacugaaccacaugggcaucugcagcugcggcuucuacaagcagcccggcgugcccgugagauggaagagaugaggacuagucccuguucccagagcccacuuuuuuuucuuuuuuugaaauaaaauagccugucuuucagaucuaaaaaaaaaaaaaaaaaaaaaaaaaaaaaaaaaaaaaaaaaaaaaaaaaaaaaaaaaaaaaaaaaaaaaaaaaaaaaaaaaaaaaaaaaaaaaaaaaaaa

SEQ ID NO: 15559 - RNA, 1724 nt, Artificial Sequence
  mRNA product Design a-1 (A100) comprising derived and/or modified sequence from LASV(Z0947-SLE-2011;Clade IV)__AIT17840__GPCmut1 (opt4)
aggagagucccgcagucggcguccagcggcucugcuuguucgugugugugucguugcaggccuuauucaagcuuaccaugggccagaucgugaccuucuuccaggaggugccccacgugaucgaggaggugaugaacaucgugcugaucgcccugagcauccuggccgugcugaagggccuguacaacuucgccaccugcggccuggugggccuggugaccuuccugcugcugugcggcagaagcugcaccaucagccuguacaagggcguguacgagcugcagacccuggagcugaacauggagacccugaacaugaccaugccccugagcugcaccaagaacaacagccaccacuacaucauggugggcaacgagaccggccuggagcugacccugaccaacaccagcaucaucaaccacaaguucugcaaccugagcgacgcccacaagaagaaccuguacgaccacgcccugaugagcaucaucagcaccuuccaccugagcauccccaacuucaaccaguacgaggccaugagcugcgacuucaacggcggcaagaucagcgugcaguacaaccugagccacagcuacgccggcgacgccgccaaccacugcggcaccguggccaacggcgugcugcagaccuucaugagaauggccuggggcggcagcuacaucgcccuggacagcggcugcgacagaugggacugcaucaugaccagcuaccaguaccugaucauccagaacaccaccugggaggaccacugccaguucagcagacccagccccaucggcuaccugggccugcugagccagagaaccagagacaucuacaucagcagaagacgccggggcaccuucaccuggacccugagcgacagcgagggcaaggacacccccggcggcuacugccugaccagauggaugcugaucgaggccgagcugaagugcuucggcaacaccgccguggccaagugcaacgagaagcacgacgaggaguucugcgacaugcugagacuguucgacuucaacaagcaggccauccagagacugaaggcccccgcccagaugagcauccagcugaucaacaaggccgugaacgcccugaucaacgaccagcugaucaugaagaaccaccugagagacaucaugugcauccccuacugcaacuacagcaaguacugguaccugaaccacaccaccaccggcaagaccagccugcccaagugcuggcuggugagcaacggcagcuaccugaacgagacccacuucagcgacgacaucgagcagcaggccgacaacaugaucaccgagaugcugcagaaggaguacauggagagacagggcaagaccccccugggccugguggaccuguucguguucagcaccagcuucuaccugaucagcaucuuccugcaccuggugaagauccccacccacagacacaucgugggcaagcccugccccaagccccacagacugaaccacaugggcaucugcagcugcggccuguacaagcagcccggcgugcccgugaaguggaagagaugaggacuagucccuguucccagagcccacuuuuuuuucuuuuuuugaaauaaaauagccugucuuucagaucuaaaaaaaaaaaaaaaaaaaaaaaaaaaaaaaaaaaaaaaaaaaaaaaaaaaaaaaaaaaaaaaaaaaaaaaaaaaaaaaaaaaaaaaaaaaaaaaaaaaa

SEQ ID NO: 15560 - RNA, 1724 nt, Artificial Sequence
  mRNA product Design a-1 (A100) comprising derived and/or modified sequence from LASV(Josiah;Clade IV)__NP_694870__GPCmut1 (opt5)
aggagagucccgcagucggcguccagcggcucugcuuguucgugugugugucguugcaggccuuauucaagcuuaccaugggccagaucgugaccuucuuucaagaggucccccacguuauugaagaggugaugaacaucgugcugauugcccucagcguccuggcugugcuuaaggggcuguacaauuucgccacaugcggacucguuggccuggugacguuucuucugcucugugggagauccugcaccacaucucuguauaaaggagucuacgaacugcagacccucgagcugaacauggaaacacuuaauaugaccaugccucugagcuguacaaagaacaauucccaucacuauaucauggugggcaacgagaccgggcucgagcugacgcuuaccaauacaucuauuaucaaccauaaauucugcaaucugagcgacgcgcacaagaaaaaccucuacgaucaugcucugauguccaucauuucuaccuuucaccugagcaucccgaauuucaaccaguaugaagccauguccugugacuuuaauggaggcaagauuagcguucaguacaaccucucucacuccuaugccggcgaugcugccaaucauugcgggacaguggcuaacggaguccugcaaaccuucaugcggauggccuggggcgggagcuacaucgcgcuugacucuggaugcggcaacugggauuguauuaugacguccuaccaguaucugaucauucagaauacaaccugggaggaccacugccaguuuagcagacccucuccuaucggguaccucggacugcuuucccaacggacacgcgauaucuauauuagcagacggcgccggggcaccuucaccuggacacuguccgacucugaaggcaaggauacgcccgggggauacugucugacccgcuggaugcucaucgaggccgagcugaaaugcuuuggcaacacagcuguggccaaguguaaugaaaaacaugacgaggaguucugcgauaugcuuagacuguuugacuucaacaagcaggcuauucagcggcucaaagcccccgcgcagaugagcauccaacugauuaauaaggccgugaacgcucuuaucaaugaucagcugaucaugaagaaccaccuccgcgacauuaugugcaucccuuauugcaauuacuccaaauauugguaccugaaccacaccacaaccggaagaacgagccugcccaaguguuggcucgucucuaauggcuccuaccugaacgaaacacauuucagcgacgauauugagcagcaagccgacaauaugaucaccgagaugcuucagaaagaauauauggagcggcaggggaagaccccucugggacucguugaucuguuuguguucucuaccagcuuuuaccugauuuccaucuuccuucaccucgugaaaaucccgacacaucgccacauugucggcaagucuugccccaaaccucauagacugaaccacaugggcaucuguagcugcgggcuguauaagcagcccggagugccuguuaaguggaaacggugaggacuagucccuguucccagagcccacuuuuuuuucuuuuuuugaaauaaaauagccugucuuucagaucuaaaaaaaaaaaaaaaaaaaaaaaaaaaaaaaaaaaaaaaaaaaaaaaaaaaaaaaaaaaaaaaaaaaaaaaaaaaaaaaaaaaaaaaaaaaaaaaaaaaa

SEQ ID NO: 15561 - RNA, 1721 nt, Artificial Sequence
  mRNA product Design a-1 (A100) comprising derived and/or modified sequence from LASV(LP;Clade I)__AAF86701__GPCmut1 (opt5)
aggagagucccgcagucggcguccagcggcucugcuuguucgugugugugucguugcaggccuuauucaagcuuaccaugggccagaucauuaccuucuuucaagaggugccccacgucaucgaagagguuaugaacauugugcugaucgcccucagccugcuugcuauucugaaggggcucuacaauaucgccacaugcggaaucauuggccugguggcguuccuuuuucugugugggaaauccugcucucucacgcugaagggaggcuaugaacugcagacccucgagcugaacauggaaacacuuaauaugaccaugccucugagcuguaccaaaaacuccucucaucacuacaucagagucgggaaugagacaggacucgagcugacacuuaccaacacgagcauuaucaaucauaaguucugcaaccuguccgacgcucacaaaaagaaucucuaugaucaugcccugaugucuauuaucagcaccuuucaccuguccauuccgaacuucaaucaguacgaagccaugagcugugacuuuaacggcggcaagaucucugugcaguauaaucucucccacagcuacgcuggggaugccgcugagcauugcggaacaguugccaacggcgugcugcaaaccuucaugcggauggcguggggagggcgcuauaucgcccuugacucuggcugcgggaauugggauuguauuaugacauccuaccaguaccugaucauucagaacaccacgugggaagaccacugccaguuuagcagacccucuccuaucggauaucucggccugcuuucccaacggacacgcgauauuuacaucagcagacggcgccggggcaccuucacauggacccuguccgacucugaggggaacgagacccccggaggcuauugucugacacgcuggaugcucaucgaagcugagcugaagugcuuugggaauacggccgucgcuaaauguaacgaaaagcaugaugaggaguucugcgacaugcuuagacuguuugauuucaauaaacaggccauucggcgccucaaggcgcccgcccagaugagcauccagcugauuaacaaggcugugaaugcccuuaucaacgaccaacugauuaugaaaaaucaccucagagauaucaugugcaucccuuacugcaacuauuccaaguacugguaucugaaucacaccagcucuggccggacaucccugcccaaauguuggcucauuagcaacgggucuuaccugaaugagacccaguucagcgacgacaucgaacagcaagcugauaacaugauuacagagaugcuucagaaggaauacaucgagcgccagggaaaaaccccucugggccucguugacauuuuuaucuucuccacgucuuuuuaucugauuagcaucuuccugcaucuuaucaagauuccgacacacagacauaucgugggcaaacccugcccuaagccccaccggcucaaucauaugggggucuguuccugcggacuguacaagcacccuggcgugcccaccaaauggaagcgcugaggacuagucccuguucccagagcccacuuuuuuuucuuuuuuugaaauaaaauagccugucuuucagaucuaaaaaaaaaaaaaaaaaaaaaaaaaaaaaaaaaaaaaaaaaaaaaaaaaaaaaaaaaaaaaaaaaaaaaaaaaaaaaaaaaaaaaaaaaaaaaaaaaaaa

SEQ ID NO: 15562 - RNA, 1721 nt, Artificial Sequence
  mRNA product Design a-1 (A100) comprising derived and/or modified sequence from LASV(803213;Clade II)__AAF86703__GPCmut1 (opt5)
aggagagucccgcagucggcguccagcggcucugcuuguucgugugugugucguugcaggccuuauucaagcuuaccaugggccagaucauuaccuucuuucaagaggugccccacgucaucgaagagguuaugaacauugugcugaucgcccucagccugcuugcuauucugaaggggaucuacaauguggccacaugcggacucuucggccugaucuccuuucuucugcucugugggagaucuugcagcgucacguauaaaggaguguacgaacugcagacccuggagcucaacauggcgaaucugaacaugacaaugccucuuuccuguaccaagaauaacucucaucacuauauuaugguuggcaaugaaacagggcuggagcucacccugacaaacaccagcaucauuaaucauaaauucugcaaccuuuccgacgcucacaagaaaaaucuguacgaucaugcccucaugucuaucauuagcacguuucaccuguccaucccgaacuucaaucaguaugaggccaugagcugugacuuuaacggaggcaagauuucugugcaguacaaucugucccacagcuucgcugucgaugccgcuaaccauugcggcaccaucgccaacggggugcuccaaacauuuaugcggauggcguggggaggcucuuauaucgcccuggacuccgggugcggaaauugggauuguauuaugaccagcuaccaguaccuuaucauucagaacacaaccugggaagaccacugccaguucucucgccccuccccuaucggcuaucuggggcuccugagccaaagaacgcgggauauuuacaucucccgcagacgccggggaacauuuaccuggacacucucugacagcgagggcaaugaagcucccggcggguauugucugacccgguggaugcugaucgaggccgagcucaaaugcuucggaaacaccgcuguugccaaguguaaugaaaaacaugaugaggaauuuugcgacaugcugcgccuuuucgauuucaacaagcaggcgauuaaaagacugaagacacccgcccagauguccauccagcucauuaauaaggcugugaacgcccugaucaaugaccaacuuauuaugaaaaaccaucugcgggauaucaugugcaucccuuacugcaauuauagccgcuacugguaucucaaccacacggucaccgggaagacaucucugcccagauguuggcugguguccaauggaagcuaccucaacgaaacccacuuuucugacgacauugagcagcaggcugauaauaugaucacagagaugcugcaaaaagaauacauggaccggcagggcaagaccccucuugggcugguggaucucuucgucuuuagcacguccuucuaucugauuucuaucuuucugcaccuuguuaaaauuccgacacaucgccacaucgugggaaagcccugcccuaaaccccauagacucaaccacaugggcauuuguagcugcggccuguacaagcacccuggggugcccgucaaguggaaacggugaggacuagucccuguucccagagcccacuuuuuuuucuuuuuuugaaauaaaauagccugucuuucagaucuaaaaaaaaaaaaaaaaaaaaaaaaaaaaaaaaaaaaaaaaaaaaaaaaaaaaaaaaaaaaaaaaaaaaaaaaaaaaaaaaaaaaaaaaaaaaaaaaaaaa

SEQ ID NO: 15563 - RNA, 1721 nt, Artificial Sequence
  mRNA product Design a-1 (A100) comprising derived and/or modified sequence from LASV(GA391;Clade III)__CAA36645__GPCmut1 (opt5)
aggagagucccgcagucggcguccagcggcucugcuuguucgugugugugucguugcaggccuuauucaagcuuaccaugggccagaucgugaccuucuuucaagaggucccccacguuauugaagaggugaugaacaucgugcugauugcccucagcauccuggcuauucuuaaggggcuguacaaugucgccacaugcggacucaucggccuggugacguuccuucugcucuccgggagaucuuguagccugaucuauaaaggaaccuacgaacugcagacacucgagcugaacauggaaacccuuaauaugacaaugccucuguccugcaccaagaacaauucucaucacuauauucggguuggcaacgagacagggcucgagcugacccuuacgaauaccagcauccugaaccauaaauuuuguaaucucuccgacgcgcacaagcgcaaccuguacgaucauucucugaugagcauuaucuccacauuccaccucagcauuccgaauuuuaaccaguaugaagcuaugucuugcgacuucaauggaggcaaaaucaccgugcaguacaaccugucccacagcuuugccgucgaugccgcuggccauugugggacacuugccaauggagugcugcaaaccuucaugagaauggcuuggggcgggucuuauauugcccucgacuccggaugcggcaacugggauugcaucaugacgagcuaccaguaccugaucauucagaacacaaccugggacgaucacugucaguuuucucgccccuccccuaucggguaucuuggacugcucagccaaagaacacgggacauuuacaucucccgcagacgccggggcaccuucaccuggacacucucugauagcgagggcaaugaaacgcccgggggauauugccugacccgguggaugcuuauugaggcggagcugaaguguuuuggcaacacagccguugcuaagugcaaugaaaaacaugacgaggaguucugugauaugcuccgccuguuugacuucaacaagcaggccaucagacggcuuaaaacccccgcucagauguccauccagcugauuaauaaggccgugaacgcgcucaucaaugaucaacugauuaugaaaaaccaucugcgcgacaucaugugcauuccuuacugcaauuauagcagauacugguaucucaaccacacaucuaccggaaagacgucccugccccggugcuggcuuaucagcaauggcucuuaccugaacgaaacaaaguucagcgacgauaucgagcagcaggccgacaauaugauuaccgagaugcuccaaaaagaauacaucgaucgccaggggaagaccccucugggacuggucgaccuuuuuguguucuccacaucuuuuuaucucauuagcaucuuccugcaccuggugaaaauuccgacccacagacauaucgucggcaagcccuguccuaaaccccaccggcucaaccauaugggcauuugcuccugugggcuguacaagcagccuggaguucccgugagauggaaacgcugaggacuagucccuguucccagagcccacuuuuuuuucuuuuuuugaaauaaaauagccugucuuucagaucuaaaaaaaaaaaaaaaaaaaaaaaaaaaaaaaaaaaaaaaaaaaaaaaaaaaaaaaaaaaaaaaaaaaaaaaaaaaaaaaaaaaaaaaaaaaaaaaaaaaa

SEQ ID NO: 15564 - RNA, 1724 nt, Artificial Sequence
  mRNA product Design a-1 (A100) comprising derived and/or modified sequence from LASV(AV;Clade V)__CCA30314__GPCmut1 (opt5)
aggagagucccgcagucggcguccagcggcucugcuuguucgugugugugucguugcaggccuuauucaagcuuaccaugggccagaucgugaccuucuuucaagaggucccccacguuauugaagaggugaugaacaucgugcugauugcccucagcauccuggcuguccuuaaggggcuguacaauauugccacaugcggacucaucggccugaucacguuccuucugcucugugggagauccugcucuagcaaccuguauaaaggaguguacgaacugcagucccucgaccugaauauggagacccuuaacaugacaaugccucugucuuguaccaagaauaacagccaucacuauauucggguuggcaaugauacagggcucgaacugacccuuacaaacaccuccauccugaaucauaaauuuugcaaccucucugacgcgcacaagaaagaucuguacgaccaugcucugaugagcauuaucuccacguuccaccucagcauuccgaauuuuaaccaguaugaggccaugucuugugauuucaauggaggcaagaucuccgugcaguacaaccugagccacucuuaugccauugacgcugccaaucauugcggcaccgucgcuaacgggauccuucaaacauuuaugcgcauggccuggggaggcuccuacaucgcgcuggauagcgggugcggaaacugggacuguauuaugaccucuuaccaguaucucaucauucagaauacaaccugggagaaccacugccaguucucccggcccagcccuaucggcuaccuggggcuucugucccaacgcacgagagauauuuauaucucucggcgccgccggggaacauuuaccuggacacugagcgacuccgaaggcaaugccacccccggcggguacugucucaccagauggaugcugaucgaggcugaacuuaagugcuucggaaacacagccguggcuaaauguaaugagaagcaugaugaggaauuuugcgacaugcugcgccucuucgauuuuaacaaacaggccauuagccggcugaagucucccgcgcagauguccauccagcuuauuaauaaagccguuaacgcucugaucaaugaccaacucauuaugaagaaccaccugagagacaucaugugcaucccuuauugcaauuacagcaaguauugguaccugaaccacacgauuaccgggaaaacaucucuccccaaguguuggcuggugagcaauggauccuaccuuaacgaaacccauuucucugaugacaucgagcagcaggccgauaauaugauuacagaaaugcugcaaaaagaguauauggagcggcagggcaagaccccucucgggcuggucgaccuguucguguuuagcacguccuucuaccuuaucagcauuuuucuccgccuggugaaaaucccgacacacagacauauugucggaaagcccugcccuaaaccccaccggcugaaccauaugggcaucuguucuugcggccucuauaagcagccugggguucccgugcgcuggaagagaugaggacuagucccuguucccagagcccacuuuuuuuucuuuuuuugaaauaaaauagccugucuuucagaucuaaaaaaaaaaaaaaaaaaaaaaaaaaaaaaaaaaaaaaaaaaaaaaaaaaaaaaaaaaaaaaaaaaaaaaaaaaaaaaaaaaaaaaaaaaaaaaaaaaaa

SEQ ID NO: 15565 - RNA, 1721 nt, Artificial Sequence
  mRNA product Design a-1 (A100) comprising derived and/or modified sequence from LASV(Togo/2016/7082;Clade VI)__AMR44577__GPCmut1 (opt5)
aggagagucccgcagucggcguccagcggcucugcuuguucgugugugugucguugcaggccuuauucaagcuuaccaugggccagaucauuaccuucuuucaagaggugccccacgucaucgaagagguuaugaacauugugcugaucgcccucagccugcuugcuauucugaaggggguguacaaugucgccacaugcggaaucaucggccucgugacguuccuguuucuuugugggagauccugcucucugauuuauaaaggaagcuacgaacuccagacccuggagcugaacauggaaacacucaauaugaccaugccucuguccuguacaaagaacucuagccaucacuauauccggguuggcaaugagaccgggcuugagcugacacucaccaacacguccauuaucaaucauaaauucugcaaccugucugacgcgcacaagcgcaaucuuuacgaucaugcucugaugagcauucucuccaccuuucaccugagcaucccgaacuucaaucaguaugaagccaugucuugugacuuuaacggaggcaaaauuuccgugcaguacaaucugagccacgccuaugcugucgaugccgcugagcauugcggcacaguggccaacgggguucuccaaaccuucaugagaauggcguggggaggcucuuacaucgcccuggacuccgggugcggaaauugggauuguaucaugacaagcuaccaguaucuuauuauccagaacaccacgugggaagaccacugccaguuuucucgccccuccccuauuggcuaccuggggcuccugagccaaagaacacgggauaucuauauuucccgcagacgccggggaaccuucacauggacccucucugacagcgagggcaacgagacccccggcggguacugucugacacgguggaugcugaucgaagcugagcucaagugcuuuggaaauacggccguggcuaaguguaacgaaaaacaugaugaggaguucugcgacaugcugcgccuuuuugauuucaauaagcaggccauccagagacugaaaucccccgcgcagaugagcauucaacucaucaacaaggccgucaaugcucugauuaacgaccagcuuaucaugaaaaaucaucugcgggauaugaugugcauuccuuauugcaacuacucuaaguauugguaccucaaucacaccuccagcgggcgcacaucucugcccaaguguuggcuggugagcaacggauccuaccucaaugagacccacuucucugacgacaucgaacagcaagccgauaacaugaucacagagaugcugcagaaagaauauauugacagacagggcaagaccccucuugggcugguggaucucuuugucuucagcacguccuuuuaccugaucagcauuuuccugcaccuuaucaaaauuccgacacaucggcacaucguuggaaagcccugcccuaaaccccaucgccucaaucacaugggcauuuguucuugcggccuguauaagcagccuggggugcccaccagauggaaacggugaggacuagucccuguucccagagcccacuuuuuuuucuuuuuuugaaauaaaauagccugucuuucagaucuaaaaaaaaaaaaaaaaaaaaaaaaaaaaaaaaaaaaaaaaaaaaaaaaaaaaaaaaaaaaaaaaaaaaaaaaaaaaaaaaaaaaaaaaaaaaaaaaaaaa

SEQ ID NO: 15566 - RNA, 1721 nt, Artificial Sequence
  mRNA product Design a-1 (A100) comprising derived and/or modified sequence from LASV(KAK-428;Clade n.d. (VII))__ANH09740__GPCmut1 (opt5)
aggagagucccgcagucggcguccagcggcucugcuuguucgugugugugucguugcaggccuuauucaagcuuaccaugggccagaucgugaccuucuuucaagaggucccccacguuauugaagaggugaugaacaucgugcugauugcccucagccugcuugcuauccugaaggggcucuacaauuucgccacaugcggagucauuggccugaucacguuucuucugcucugugggagauccugcucugcgaccuauaaaggacaguacgaacugcagacacuggagcucaacauggaaagccugaauaugaccaugccucuuuccuguacaaagaacaauucucaucacuauauccgggcuggcaacaauaccgggcuggagcucacacugaccaacacgagcauuaucucccauaaauucugcaaucuuucugacgcccacaagaaaaaccuguacgaucauacccucaugagcauuaucacaaccuuucaccuguccauuccgaauuucaaccaguaugaggccaugagcugugacuuuaauggaggcaagaucucuauucaauacaaccugucccacagcuaugcuggcgaugccgcucagcauugcgggacaguggccaauggaguucuccagaccuucaugcgcauggcguggggcgggucuuaccuggcccuugacuccggaugccggggcugggauuguaucaucagcucuuaccaguaucugauuauccaaaacacgacaugggacgaucacugccaguuuucccgccccagcccuauuggguaccucggauucgugucccagaagaccagagacaucuauauuucucggcgccgccggggcacauuuaccuggacccugagcgauuccgaaggccaugacaugcccgggggauacugucucacaagauggaugcugaucgaggcugaucugaaaugcuucggcaacacggccgucgcuaaguguaaugaaaaacacgacgaggaguuuugcgauauguggcgccucuucgacuucaacaagcaggccauccaacggcugaaagcgcccgcccagaugaauauucagcuuaucaacaaggcugugaaugcccugauuaacgaccaacucaugaugaagaaucaccugagagauaucaugugcauuccuuauugcaacuacagcaaauuuugguaucuuaauaacaccacaaccggacggacaucucugccccgcuguuggcucaucuccaauggcagcuaccugaacgagacccauuucucugacgauaucgaacagcaggcugacaauaugauuacggagaugcugcagaaggaauacauggauagacaagggaaaacaccucucggacugguugaccuuuuuguguucagcaccuccuuuuaucugaucaccauuuuccuccaccuggucaagaucccgacacaucggcacauugugggcaaacccugcccuaagccccaucgccugaaccacaugggcaucuguucuugcgggcuuuacaaacagccuggagugcccgucagauggaagcggugaggacuagucccuguucccagagcccacuuuuuuuucuuuuuuugaaauaaaauagccugucuuucagaucuaaaaaaaaaaaaaaaaaaaaaaaaaaaaaaaaaaaaaaaaaaaaaaaaaaaaaaaaaaaaaaaaaaaaaaaaaaaaaaaaaaaaaaaaaaaaaaaaaaaa

SEQ ID NO: 15567 - RNA, 1721 nt, Artificial Sequence; identical to SEQ ID NO: 15561
  mRNA product Design a-1 (A100) comprising derived and/or modified sequence from LASV(Pinneo-NIG-1969;Clade I)__AIT17836__GPCmut1 (opt5)

SEQ ID NO: 15568 - RNA, 1721 nt, Artificial Sequence
  mRNA product Design a-1 (A100) comprising derived and/or modified sequence from LASV(ISTH0009-NIG-2011;Clade II)__AIT17404__GPCmut1 (opt5)
aggagagucccgcagucggcguccagcggcucugcuuguucgugugugugucguugcaggccuuauucaagcuuaccaugggccagaucauuaccuucuuucaagaggugccccacgucaucgaagagguuaugaacauugugcugaucgcccucagccugcuugcuauucugaaggggaucuacaauguggccacaugcggacucuucggccuggucuccuuucuucugcucugugggagaucuugcagcacgaccuauaaaggaguguacgaacugcagacacuggagcucgacauggcgucccugaacaugaccaugccucuuucuuguacaaagaauaacagccaucacuauaucaugguuggcaaugaaaccgggcuggagcucacacugaccaacacguccauuaucaaucauaaauucugcaaccuuucugaugcucacaagaaaaaucuguacgaccaugcccucaugagcauuaucuccaccuuucaccugagcauuccgaacuucaaucaguaugaggccaugucuugugauuuuaacggaggcaagaucuccgugcaguacaaucugagccacgcuuaugccgucgacgcugccaaccauugcggcacaauugcgaauggggugcuccaaaccuucaugcggauggccuggggaggcucuuacaucgcucuggauuccgggugcggaagcugggacuguaucaugacaucuuaccaguaucuuauuauccagaacaccacgugggaagaucacugccaguuuucccgccccagcccuauuggcuaccuggggcuccugucccaaagaacacgggacaucuauauuucucgcagacgccggggaaccuucacauggacccucagcgauuccgagggcaacgaaacccccggcggguacugucugacacgguggaugcugaucgaggccgagcucaaaugcuuuggaaauacggcuguugccaaguguaacgaaaaacaugacgaggaguucugcgauaugcugcgccuuuuugacuucaauaagcaggcgaucagacggcugaaaacccccgcccagaugagcauucagcucaucaacaaggcugugaaugcccugauuaacgaucaacuuaucaugaagaaucaucugcgcgacauuaugugcaucccuuauugcaacuacucuaaauauugguaccucaaucacacagucaccgggaagacaucccugcccagauguuggcuggugagcaacggaucuuaccucaaugaaacccacuucagcgacgauaucgagcagcaggcugacaacaugauuacggagcugcuucaaaaagaauauauggaucggcagggcaagacaccucuggggcucguggaccuguuugucuucuccaccucuuuuuaccugaucagcauuuuccuucaccucaucaaaauuccgacccaucgccacaucacaggaaagcccugcccuaaaccccauagacugaaucacaugggcauuuguuccugcggccuguauaagcacccugggguucccgugaaguggaaacggugaggacuagucccuguucccagagcccacuuuuuuuucuuuuuuugaaauaaaauagccugucuuucagaucuaaaaaaaaaaaaaaaaaaaaaaaaaaaaaaaaaaaaaaaaaaaaaaaaaaaaaaaaaaaaaaaaaaaaaaaaaaaaaaaaaaaaaaaaaaaaaaaaaaaa

SEQ ID NO: 15569 - RNA, 1721 nt, Artificial Sequence
  mRNA product Design a-1 (A100) comprising derived and/or modified sequence from LASV(ISTH2010-NIG-2012;Clade II)__AIT17482__GPCmut1 (opt5)
aggagagucccgcagucggcguccagcggcucugcuuguucgugugugugucguugcaggccuuauucaagcuuaccaugggccagaucauuaccuucuuucaagaggugccccacgucaucgaagagguuaugaacauugugcugaucgcccucagccugcuugcuauucugaaggggaucuacaauguggccacaugcggacucuucggccuggucuccuuucuucugcucugugggagaucuugcagcacgaccuauaaaggaguguacgaacugcagacacuggagcucgacauggcgucccugaacaugaccaugccucuuucuuguacaaagaauaacagccaucacuauaucaugguuggcaaugaaaccgggcuggagcucacacugaccaacacguccauuaucaaucauaaauucugcaaccuuucugaugcucacaagaaaaaucuguacgaccaugcccucaugagcauuaucuccaccuuucaccugagcauuccgaacuucaaucaguaugaggccaugucuugugauuuuaacggaggcaagaucuccgugcaguacaaucugagccacgcuuaugccgucgacgcugccaaccauugcggcacaauugcgaauggggugcuccaaaccuucaugcggauggccuggggaggcucuuacaucgcucuggauuccgggugcggaagcugggacuguaucaugacaucuuaccaguaucuuauuauccagaacauuaccugggaagaucacugccaguuuucccgccccagcccuaucggcuaccuggggcuccugucccaaagaacgcgggacauuuauaucucucgcagacgccggggaacauucaccuggacacucagcgauuccgagggcaacgaaacccccggcggguacugucugacccgguggaugcugaucgaggccgagcucaaaugcuuuggaaauacagcuguugccaaguguaacgaaaaacaugacgaggaguucugcgauaugcugcgccuuuuugacuucaauaagcaggcgauuagacggcugaaaacgcccgcccagaugagcauccagcucauuaacaaggcugugaaugcccugaucaacgaucaacuuauuaugaagaaucaucugcgcgacaucaugugcaucccuuauugcaacuacucuaaauauugguaccucaaucacaccgucacagggaagaccucccugcccagauguuggcuggugagcaacggaucuuaccucaaugaaacacacuucagcgacgauauugagcagcaggcugacaacaugaucaccgagcugcuucaaaaagaauauauugaucggcagggcaagacgccucuggggcucguggaccuguuugucuucuccacaucuuuuuaccugaucagcauuuuccuucaccucguuaaaaucccgacccaucgccacguggugggaaagcccugcccuaaaccccauagacugaaucacaugggcauuuguuccugcggccuguauaagcacccugggguccccgugaaguggaaacggugaggacuagucccuguucccagagcccacuuuuuuuucuuuuuuugaaauaaaauagccugucuuucagaucuaaaaaaaaaaaaaaaaaaaaaaaaaaaaaaaaaaaaaaaaaaaaaaaaaaaaaaaaaaaaaaaaaaaaaaaaaaaaaaaaaaaaaaaaaaaaaaaaaaaa

SEQ ID NO: 15570 - RNA, 1721 nt, Artificial Sequence
  mRNA product Design a-1 (A100) comprising derived and/or modified sequence from LASV(Lassa virus/H.sapiens-wt/NGA/2015/ISTH_0543;Clade II)__AVO03639__GPCmut1 (opt5)
aggagagucccgcagucggcguccagcggcucugcuuguucgugugugugucguugcaggccuuauucaagcuuaccaugggccagaucauuaccuucuuucaagaggugccccacgucaucgaagagguuaugaacauugugcugaucgcccucagccugcuugcuauucugaaggggaucuacaauguggccacaugcggacucuucggccuggucuccuuucuucugcucugugggagaucuugcagcacgaccuauaaaggaguguacgaacugcagacacuggagcucgacauggcgaaccugaauaugaccaugccucuuuccuguacaaagaacaauucucaucacuauaucaugguuggcaacgaaaccgggcuggagcucacacugaccaauacgagcauuaucaaccauaaauucugcaaucuuuccgaugcucacaagaaaaaccuguacgaccaugcccucaugucuauuaucagcaccuuucaccuguccauuccgaauuucaaccaguaugaggccaugagcugugauuuuaauggaggcaagaucucugugcaguacaaccugucccacacauaugcugucgacgccgcuaaucauugcggcaccauugccaacggggugcuccaaacauucaugcggauggcguggggaggcagcuacaucgcccuggauucugggugcggauccugggacuguaucaugaccagcuaccaguaucuuguuauucagaacacgacaugggaagaucacugccaguuuucucgccccuccccuaucggcuaccuggggcuccugagccaaagaacccgggacauuuauaucucccgcagacgccggggaacauucaccuggacccucucugauagcgagggcaaugaaacacccggcggguacugucugacgcgguggaugcugauugaggcugagcucaaaugcuuuggaaacaccgccguggcuaaguguaaugaaaaacaugacgaggaguucugcgauaugcugcgccuuuuugacuucaacaagcaggccaucagacggcugaaaacacccgcgcagauguccauccagcucauuaauaaggccgucaacgcucugaucaaugaucaacuuauuaugaagaaccaucugcgcgacaucaugugcauuccuuauugcaauuacagcaaauauugguaccucaaccacaccgugacagggaagaccucucugcccagauguuggcugguguccaauggaagcuaccucaacgaaacgcacuucucugacgauaucgagcagcaggccgacaauaugaucacagagcugcuucaaaaagaauauauugaucggcagggcaagaccccucuggggcucgucgaccuguuuguuuucagcaccuccuuuuaccugaucucuauuuuccuucaccucgugaaaaucccgacacaucgccacauuaccggaaagcccugcccuaaaccccauagacugaaccacaugggcaucuguagcugcggccuguauaagcacccuggggugcccgucaaguggaaacggugaggacuagucccuguucccagagcccacuuuuuuuucuuuuuuugaaauaaaauagccugucuuucagaucuaaaaaaaaaaaaaaaaaaaaaaaaaaaaaaaaaaaaaaaaaaaaaaaaaaaaaaaaaaaaaaaaaaaaaaaaaaaaaaaaaaaaaaaaaaaaaaaaaaaa

SEQ ID NO: 15571 - RNA, 1721 nt, Artificial Sequence
  mRNA product Design a-1 (A100) comprising derived and/or modified sequence from LASV(Lassa virus/H.sapiens-wt/NGA/2016/ISTH_0009;Clade II)__AVO03571__GPCmut1 (opt5)
aggagagucccgcagucggcguccagcggcucugcuuguucgugugugugucguugcaggccuuauucaagcuuaccaugggccagaucauuaccuucuuucaagaggugccccacgucaucgaagagguuaugaacauugugcugaucgcccucagccugcuugcuauucugaaggggaucuacaauguggccacaugcggacuccugggccuugucuccuuccugcuccugugugggagaucuugcagcacgaccuauaaaggaguguacgaacugcagacacucgagcuggacauggcgucccuuaacaugaccaugccucugucuuguacaaagaauaacagccaucacuauaucaugguuggcaaugaaaccgggcucgagcugacacuuaccaacacguccauuaucaaucauaaauuuugcaaccugucugaugcucacaagaaaaaucucuacgaccaugcccugaugagcauuaucuccaccuuccaccugagcauuccgaacuuuaaucaguaugaggccaugucuugugauuucaacggaggccggaucuccgugcaguacaaucucagccacucuuaugcugucgacgccgcuaaccauugcggcacaauugccaauggggugcugcaaaccuuuaugcgcauggcguggggaggcuccuacaucgcccuugauagcgggugcggaucuugggacuguaucaugacauccuaccaguaucugauuauccagaacaccacgugggaagaucacugccaguucagcagacccuccccuauuggcuaccucgggcugcuuucucaacggacacgcgacaucuauauuagcagacggcgccggggaaccuuuacauggacccuguccgauagcgagggcaacgaaacccccggcggguacugucugacacgcuggaugcucaucgaggcugagcugaagugcuucggaaauacggccguugcuaaauguaacgaaaagcaugacgaggaauuuugcgauaugcuuagacuguucgacuuuaauaaacaggccauccggcgccucaagacccccgcgcagaugucuauucagcugaucaacaaagccgugaaugcucuuauuaacgaucaacugaucaugaagaaucaccucagagacauuaugugcaucccuuauugcaacuacuccaaguauugguaccugaaucacacagucaccgggaaaacaagccugccccgguguuggcucgugucuaacggaagcuaccugaaugaaacccauuucuccgacgauaucgagcagcaggccgacaacaugauuacggagcuucugcaaaaggaauauaucgaucgccagggcaaaacaccucucgggcugguggaccuguucgucuuuucuaccagcuucuaccuuauuuccaucuuucuccaccugguuaagauuccgacccauagacacaucacaggaaaacccugcccuaagccccaucggcugaaucacaugggcauuuguagcugcggccucuauaaccacccuggggugcccgugaaauggaagcgcugaggacuagucccuguucccagagcccacuuuuuuuucuuuuuuugaaauaaaauagccugucuuucagaucuaaaaaaaaaaaaaaaaaaaaaaaaaaaaaaaaaaaaaaaaaaaaaaaaaaaaaaaaaaaaaaaaaaaaaaaaaaaaaaaaaaaaaaaaaaaaaaaaaaaa

SEQ ID NO: 15572 - RNA, 1721 nt, Artificial Sequence
  mRNA product Design a-1 (A100) comprising derived and/or modified sequence from LASV(Lassa virus/H.sapiens-wt/NGA/2016/ISTH_0017;Clade II)__AVO03567__GPCmut1 (opt5)
aggagagucccgcagucggcguccagcggcucugcuuguucgugugugugucguugcaggccuuauucaagcuuaccaugggccagaucauuaccuucuuucaagaggugccccacgucaucgaagagguuaugaacauugugcugaucgcccucagccugcuugcuauucugaaggggaucuacaauguggccacaugcggacucuucggccuggucuccuuucuucugcucugugggagaucuugcagcacgaccuauaaaggaguguacgaacugcagacacuggagcucgacauggcgucccugaacaugaccaugccucuuucuuguacaaagaauaacagccaucacuauaucaugguuggcaaugaaaccgggcuggagcucacacugaccaacacguccauuaucaaucauaaauucugcaaccuuucugaugcucacaagaaaaaucuguacgaccaugcccucaugagcauuaucuccaccuuucaccugagcauuccgaacuucaaucaguaugaggccaugucuugugauuuuaacggaggcaagaucuccgugcaguacaaucugagccacacauaugcuauugacgccgcuaaccauugcggcaccaucgccaaugggguccuccaaacauucaugcggauggcguggggaggcucuuacaucgcccuggauuccgggugcggaagcugggacuguauuaugaccucuuaccaguaucuuaucauucagaacacgacaugggaagaucacugccaguuuucccgccccagcccuaucggcuaccuggggcuccugucccaaagaacccgggacauuuauaucucucgcagacgccggggaacauucaccuggacccucagcgauuccgagggcaacgaaacacccggcggguacugucugacgcgguggaugcugaucgaggcugagcucaaaugcuuuggaaauaccgccguggcuaaguguaacgaaaaacaugacgaggaguucugcgauaugcugcgccuuuuugacuucaauaagcaggccauuagacggcugaaaacacccgcgcagaugagcauccagcucauuaacaaggccguuaaugcucugaucaacgaucaacuuauuaugaagaaucaucugcgcgacaucaugugcaucccuuauugcaacuacucuaaauauugguaccucaaucacaccgugacagggaagaccucccugcccagauguuggcuggucagcaacggaucuuaccucaaugaaacgcacuucagcgacgauauugagcagcaggccgacaacaugaucacagagcugcuucaaaaagaauauauggaucggcagggcaagaccccucuggggcucguggaccuguuuguguucuccaccucuuuuuaccugauuagcaucuuccuucaccucguccgcauuccgacacauagacacguuaucggaaaacccugcccuaagccccaucggcugaaucacaugggcauuuguuccugcggccuguauaaacacccuggggugcccgugaaguggaagcgcugaggacuagucccuguucccagagcccacuuuuuuuucuuuuuuugaaauaaaauagccugucuuucagaucuaaaaaaaaaaaaaaaaaaaaaaaaaaaaaaaaaaaaaaaaaaaaaaaaaaaaaaaaaaaaaaaaaaaaaaaaaaaaaaaaaaaaaaaaaaaaaaaaaaaa

SEQ ID NO: 15573 - RNA, 1721 nt, Artificial Sequence
  mRNA product Design a-1 (A100) comprising derived and/or modified sequence from LASV(Lassa virus/H.sapiens-wt/NGA/2018/ISTH_0959;Clade II)__AVV65099__GPCmut1 (opt5)
aggagagucccgcagucggcguccagcggcucugcuuguucgugugugugucguugcaggccuuauucaagcuuaccaugggccagaucauuaccuucuuucaagaggugccccacgucaucgaagagguuaugaacauugugcugaucgcccucagccugcuugcuauucugaaggggaucuacaauguggucacaugcggacucuucggccugguguccuuucuucugcucugugggagaucuugcagcacgaccuauaaaggaguuuacgaacugcagacacuggagcucgacauggccucccugaacaugaccaugccucuuucuuguacaaagaauaacagccaucacuauaucauggugggcaaugaaaccgggcuggagcucacacugaccaacacguccauuaucaaucauaaauucugcaaccuuucugaugcgcacaagaaaaaucuguacgaccaugcucucaugagcauuaucuccaccuuucaccugagcauuccgaacuucaaucaguaugaggccaugucuugugauuuuaacggaggcaagaucuccguccaguacaaucugagccacgccuaugcuauugacgccgcuaaccauugcggcacaaucgccaauggggugcuccaaaccuucaugcggauggcguggggaggcucuuacaucgcccuggauuccgggugcggaagcugggacuguauuaugacaucuuaccaguaucuuaucauucagaacaccacgugggaagaucacugccaguuuucccgccccagcccuaucggcuaccuggggcuccugucccaaagaacacgggacauuuauaucucucgcagacgccggggaaccuucacauggacccucagcgauuccgagggcaacgaaacccccggcggguacugucugacacgguggaugcugaucgaggcugagcucaaaugcuuuggaaauacggccguugcuaaguguaacgaaaaacaugacgaggaguucugcgauaugcugcgccuuuuugacuucaauaagcaggccauuagacggcugaaaacccccgcgcagaugagcauccagcucauuaacaaggccgugaaugcucugaucaacgaucaacuuauuaugaagaaucaucugcgcgacaucaugugcaucccuuauugcaacuacucuaaauauugguaccucaaucacacagucaccgggaagacaucccugcccagauguuggcuggugagcaacggaucuuaccucaaugaaacccacuucagcgacgauauugagcagcaggccgacaacaugaucacggagcugcuucaaaaagaauauauugaucggcagggcaagacaccucuggggcucguggaccuguuugucuucuccaccucuuuuuaccugaucagcauuuuccuucaccucguuaaaaucccgacccaucgccacgugauuggaaagcccugcccuaaaccccauagacugaaucacaugggcaucuguuccugcggccuguauaagcacccuggggugcccgucaaguggaaacggugaggacuagucccuguucccagagcccacuuuuuuuucuuuuuuugaaauaaaauagccugucuuucagaucuaaaaaaaaaaaaaaaaaaaaaaaaaaaaaaaaaaaaaaaaaaaaaaaaaaaaaaaaaaaaaaaaaaaaaaaaaaaaaaaaaaaaaaaaaaaaaaaaaaaa

SEQ ID NO: 15574 - RNA, 1721 nt, Artificial Sequence
  mRNA product Design a-1 (A100) comprising derived and/or modified sequence from LASV(LASV003-NIG-2008;Clade II)__AIT17580__GPCmut1 (opt5)
aggagagucccgcagucggcguccagcggcucugcuuguucgugugugugucguugcaggccuuauucaagcuuaccaugggccagaucauuaccuucuuucaagaggugccccacgucaucgaagagguuaugaacauugugcugaucgcccucagccugcuugcuauucugaaggggaucuacaauguggccacaugcggacucuucggccuggucuccuuucuucugcucugugggagaucuugcagcacgaccuauaaaggaguguacgaacugcagacacuggagcucgacauggcgucccugaacaugaccaugccucuuucuuguacaaagaauaacagccaucacuauaucaugguuggcaaugaaaccgggcuggagcucacacugaccaacacguccauuaucaaucauaaauucugcaaccuuucugaugcucacaagaaaaaucuguacgaccaugcccucaugagcauuaucuccaccuuucaccugagcauuccgaacuucaaucaguaugaggccaugucuugugauuuuaacggaggcaagaucuccgugcaguacaaucugagccacacauaugcugucgacgccgcuaaccauugcggcaccauugccaauggggugcuccaaacauucaugcggauggcguggggaggcucuuacaucgcccuggauuccgggugcggaagcugggacuguaucaugaccucuuaccaguaucuuauuauccagaacacgacaugggaagaucacugccaguuuucccgccccagcccuauuggcuaccuggggcuccugucccaaagaacccgggacaucuauauuucucgcagacgccggggaacauucaccuggacccucagcgauuccgagagcaacgaaacacccggcggcuacugucugacgcgguggaugcugaucgaggcugagcucaaaugcuuugggaauaccgccguugcuaaguguaacgaaaaacaugacgaggaguucugcgauaugcugcgccuuuuugacuucaauaagcaggccaucagacggcugaaagcgcccgcccagaugucuauucagcucaucaacaaggcugugaaugcccugauuaacgaucaacuuaucaugaagaaucaucugcgcgacauuaugugcaucccuuauugcaacuacuccaaauauugguaccucaaucacacagucaccggcagaacaagccugccccgguguuggcuggugucuaacgggagcuaccucaaugaaacccacuucuccgacgauaucgagcagcaggcugacaacaugauuacggagcugcuucaaaaggaauauauggaucgccagggaaaaacaccucugggccucguggaccuguuugucuucucuaccagcuuuuaccugaucuccauuuuccuucaccucguuaagaucccgacccauagacacgugauugggaaacccugcccuaagccccaucggcugaaucacaugggaaucuguagcugcggccuguauaaacacccuggcgugcccgucaaguggaagcgcugaggacuagucccuguucccagagcccacuuuuuuuucuuuuuuugaaauaaaauagccugucuuucagaucuaaaaaaaaaaaaaaaaaaaaaaaaaaaaaaaaaaaaaaaaaaaaaaaaaaaaaaaaaaaaaaaaaaaaaaaaaaaaaaaaaaaaaaaaaaaaaaaaaaaa

SEQ ID NO: 15575 - RNA, 1721 nt, Artificial Sequence
  mRNA product Design a-1 (A100) comprising derived and/or modified sequence from LASV(LASV035-NIG-2009;Clade II)__AIT17588__GPCmut1 (opt5)
aggagagucccgcagucggcguccagcggcucugcuuguucgugugugugucguugcaggccuuauucaagcuuaccaugggccagaucauuaccuucuuucaagaggugccccacgucaucgaagagguuaugaacauugugcugaucgcccucagccugcuugcuauucugaaggggaucuacaauguggccacaugcggacucuucggccuggucuccuuucuucugcucugugggagaucuugcagcacgaccuauaaaggaguguacgaacugcagacacuggagcucgacauggcgucccugaacaugaccaugccucuuucuuguacaaagaauaacagccaucacuauaucaugguuggcaaugaaaccgggcuggagcucacacugaccaacacguccauuaucaaucauaaauucugcaaccuuucugaugcucacaagaaaaaucuguacgaccaugcccucaugagcauuaucuccaccuuucaccugagcauuccgaacuucaaucaguaugaggccaugucuugugauuuuaacggaggcaagaucuccgugcaguacaaucugagccacgcuuaugccgucgacgcugccaaccauugcggcacaauugcgaauggggugcuccaaaccuucaugcggauggccuggggaggcucuuacaucgcucuggauuccgggugcggaagcugggacuguaucaugacaucuuaccaguaucuuauuauccagaacaccacgugggaagaucacugccaguuuucccgccccagcccuauuggcuaccuggggcuccugucccaaagaacacgggacaucuauauuucucgcagacgccggggaaccuucacauggacccucagcgauuccgagggcaacgaaacccccggcggguacugucugacacgguggaugcugaucgaggccgagcucaaaugcuuuggaaauacggcuguugccaaguguaacgaaaaacaugacgaggaguucugcgauaugcugcgccuuuuugacuucaauaagcaggcgaucagacggcugaaagcccccgcucagaugagcauucagcucaucaacaaggccgugaaugcucugauuaacgaucaacuuaucaugaagaaucaucugcgcgacauuaugugcaucccuuauugcaacuacucuaaauauugguaccucaaucacaccgucacagggaagaccucccugcccagauguuggcuggugagcaacggaucuuaccucaaugaaacacacuucagcgacgauaucgagcagcaggccgacaacaugauuaccgagcugcuucaaaaagaauauaucgaucggcagggcaagacgccucuggggcucguggaccuguuugucuucuccacaucuuuuuaccugauuagcaucuuccuucaccucguuaaaauuccgacccaucgccacgugaucggaaagcccugcccuaaaccccauagacugaaucacaugggcauuuguuccugcggccuguauaagcacccuggggugcccgucaaguggaaacggugaggacuagucccuguucccagagcccacuuuuuuuucuuuuuuugaaauaaaauagccugucuuucagaucuaaaaaaaaaaaaaaaaaaaaaaaaaaaaaaaaaaaaaaaaaaaaaaaaaaaaaaaaaaaaaaaaaaaaaaaaaaaaaaaaaaaaaaaaaaaaaaaaaaaa

SEQ ID NO: 15576 - RNA, 1721 nt, Artificial Sequence
  mRNA product Design a-1 (A100) comprising derived and/or modified sequence from LASV(LASV1000-NIG-2009;Clade II)__AIT17782__GPCmut1 (opt5)
aggagagucccgcagucggcguccagcggcucugcuuguucgugugugugucguugcaggccuuauucaagcuuaccaugggccagaucauuaccuucuuucaagaggugccccacgucaucgaagagguuaugaacauugugcugaucgcccucagccugcuugcuauucugaaggggaucuacaauguggccacaugcggacucuucggccuggucuccuuucuucugcucugugggagaucuugcagcacgaccuauaaaggaguguacgaacugcagacacuggagcucgacauggcgucccugaacaugaccaugccucuuucuuguacaaagaauaacagccaucacuauaucaugguuggcaaugaaaccgggcuggagcucacacugaccaacacguccauuaucaaucauaaauucugcaaccuuucugaugcucacaagaaaaaucuguacgaccaugcccucaugagcauuaucuccaccuuucaccugagcauuccgaacuucaaucaguaugaggccaugucuugugauuuuaacggaggcaagaucuccgugcaguacaaucugagccacacauaugcugucgacgccgcuaaccauugcggcaccauugccaauggggugcuccaaacauucaugcggauggcguggggaggcucuuacaucgcccuggauuccgggugcggaagcugggacuguaucaugaccucuuaccaguaucuuauuauccagaacacgacaugggaagaucacugccaguuuucccgccccagcccuauuggcuaccuggggcuccugucccaaagaacccgggacaucuauauuucucgcagacgccggggaacauucaccuggacccucagcgauuccgagggcaacgaaacacccggcggguacugucugacgcgguggaugcugaucgaggcugagcucaaaugcuuuggaaauaccgccguugcuaaguguaacgaaaaacaugacgaggaguucugcgauaugcugcgccuuuuugacuucaauaagcaggccaucaaaagacugaagacacccgcgcagaugagcauucagcucaucaacaaggccgugaaugcucugauuaacgaucaacuuaucaugaaaaaucaucugcgggacauuaugugcaucccuuauugcaacuacucuaaguauugguaccucaaucacaccgucacagggaaaaccucccugccccgcuguuggcuggugagcaacggaucuuaccucaaugaaacgcacuucagcgacgauaucgagcagcaggccgacaacaugauuacagagcugcuucaaaaggaauauaucgauagacagggcaaaaccccucuggggcucguggaccuguuugucuucuccaccucuuuuuaccugauuagcaucuuccuucaccucguuaagauuccgacacaucggcacguggugggaaaacccugcccuaagccccaucgccugaaucacaugggcaucuguuccugcggccuguauaagcacccugggguccccgugaaauggaagagaugaggacuagucccuguucccagagcccacuuuuuuuucuuuuuuugaaauaaaauagccugucuuucagaucuaaaaaaaaaaaaaaaaaaaaaaaaaaaaaaaaaaaaaaaaaaaaaaaaaaaaaaaaaaaaaaaaaaaaaaaaaaaaaaaaaaaaaaaaaaaaaaaaaaaa

SEQ ID NO: 15577 - RNA, 1721 nt, Artificial Sequence
  mRNA product Design a-1 (A100) comprising derived and/or modified sequence from LASV(LASV221-NIG-2010;Clade II)__AIT17624__GPCmut1 (opt5)
aggagagucccgcagucggcguccagcggcucugcuuguucgugugugugucguugcaggccuuauucaagcuuaccaugggccagaucauuaccuucuuucaagaggugccccacgucaucgaagagguuaugaacauugugcugaucgcccucagccugcuugcuauucugaaggggaucuacaauguggccacaugcggacucuucggccuggucuccuuucuucugcucugugggagaucuugcagcacgaccuauaaaggaguguacgaacugcagacacuggagcucgacauggcgucccugaacaugaccaugccucuuucuuguacaaagaauaacagccaucacuauaucaugguuggcaaugaaaccgggcuggagcucacacugaccaacacguccauuaucaaucauaaauucugcaaccuuucugaugcucacaagaaaaaucuguacgaccaugcccucaugagcauuaucuccaccuuucaccugagcauuccgaacuucaaucaguaugaggccaugucuugugauuuuaacggaggcaagaucuccgugcaguacaaucugagccacacauaugcuauugacgccgcuaaccauugcggcaccaucgccaaugggguccuccaaacauucaugcggauggcguggggaggcucuuacaucgcccuggauuccgggugcggaagcugggacuguauuaugaccucuuaccaguaucuuaucauucagaacacgacaugggaagaucacugccaguuuucccgccccagcccuaucggcuaccuggggcuccugucccaaagaacccgggacauuuauaucucucgcagacgccggggaacauucaccuggacccucagcgauuccgagggcaacgaaacacccggcggguacugucugacgcgguggaugcugaucgaggcugagcucaaaugcuuuggaaauaccgccguggcuaaguguaacgaaaaacaugacgaggaguucugcgauaugcugcgccuuuuugacuucaauaagcaggccauuagacggcugaaaacacccgcgcagaugagcauccagcucauuaacaaggccguuaaugcucugaucaacgaucaacuuauuaugaagaaucaucugcgcgacaucaugugcaucccuuauugcaacuacucuaaauauugguaccucaaucacaccgugacagggaagaccucccugcccagauguuggcuggucagcaacggaucuuaccucaaugaaacgcacuucagcgacgauauugagcagcaggccgacaacaugaucacagagaugcugcaaaaagaauauauggaucggcagggcaagaccccucuugggcugguggaccucuuuguguucuccaccucuuuuuaccugauuagcaucuuccugcaccuugucaaaauuccgacacaucgccacguuaucggaaagcccugcccuaaaccccauagacucaaucacaugggcauuuguuccugcggccuguauaagcacccuggggugcccgugaaguggaaacggugaggacuagucccuguucccagagcccacuuuuuuuucuuuuuuugaaauaaaauagccugucuuucagaucuaaaaaaaaaaaaaaaaaaaaaaaaaaaaaaaaaaaaaaaaaaaaaaaaaaaaaaaaaaaaaaaaaaaaaaaaaaaaaaaaaaaaaaaaaaaaaaaaaaaa

SEQ ID NO: 15578 - RNA, 1721 nt, Artificial Sequence
  mRNA product Design a-1 (A100) comprising derived and/or modified sequence from LASV(LASV237-NIG-2010;Clade II)__AIT17638__GPCmut1 (opt5)
aggagagucccgcagucggcguccagcggcucugcuuguucgugugugugucguugcaggccuuauucaagcuuaccaugggccagaucauuaccuucuuucaagaggugccccacgucaucgaagagguuaugaacauugugcugaucgcccucagccugcuugcuauucugaaggggaucuacaauguggccacaugcggacucuucggccuggucuccuuucuucugcucugugggagaucuugcagcacgaccuauaaaggaguguacgaacugcagacacuggagcucgacauggcgucccugaacaugaccaugccucuuucuuguacaaagaauaacagccaucacuauaucaugguuggcaaugaaaccgggcuggagcucacacugaccaacacguccauuaucaaucauaaauucugcaaccuuucugaugcucacaagaaagaccuguacgaucaugcccucaugagcauuaucuccaccuuucaccugagcauuccgaauuucaaccaguaugaggccaugucuugugacuuuaauggaggcaagaucuccgugcaguacaaccugagccacacauaugcugucgaugccgcuaaucauugcggcaccauugccaacggggugcuccaaacauucaugcggauggcguggggaggcucuuacaucgcccuggacuccgggugcggaagcugggauuguaucaugaccucuuaccaguaucuuauuauccagaauacgacaugggaagaccacugccaguuuucccgccccagcccuauuggcuaccuggggcuccugucccaaagaacccgggauaucuauauuucucgcagacgccggggaacauucaccuggacccucagcgacuccgagggcaacgaaacacccggcggguacugucugacgcgguggaugcugaucgaggcugagcucaaaugcuuuggaaacaccgccguugcuaaguguaaugaaaaacaugaugaggaguucugcgacaugcugcgccuuuuugauuucaacaagcaggccaucagacggcugaaaacacccgcgcagaugagcauucagcucaucaauaaggccgugaacgcucugauuaaugaccaacuuaucaugaagaaccaucugcgcgacauuaugugcaucccuuauugcaauuacucuaaauauugguaccucaaccacaccgucacagggaagaccucccugcccagauguuggcuggugagcaauggaucuuaccucaacgaaacgcacuucagcgaugacaucgagcagcaggccgauaauaugauuacagagcugcuucaaaaagaauauauggaccggcagggcaagaccccucuggggcucguggaucuguuugucuucuccaccucuuuuuaccugaucagcauuuuccuucaccucaucaaaauuccgacacaucgccacaucaccggaaagcccugcccuaaaccccauagacugaaccacaugggcauuuguuccugcggccuguauaagcacccugggguucccgugaaguggaaacggugaggacuagucccuguucccagagcccacuuuuuuuucuuuuuuugaaauaaaauagccugucuuucagaucuaaaaaaaaaaaaaaaaaaaaaaaaaaaaaaaaaaaaaaaaaaaaaaaaaaaaaaaaaaaaaaaaaaaaaaaaaaaaaaaaaaaaaaaaaaaaaaaaaaaa

SEQ ID NO: 15579 - RNA, 1721 nt, Artificial Sequence
  mRNA product Design a-1 (A100) comprising derived and/or modified sequence from LASV(LASV253-NIG-2011;Clade II)__AIT17670__GPCmut1 (opt5)
aggagagucccgcagucggcguccagcggcucugcuuguucgugugugugucguugcaggccuuauucaagcuuaccaugggccagaucauuaccuucuuucaagaggugccccacgucaucgaagagguuaugaacauugugcugaucgcccucagccugcuugcuauucugaaggggaucuacaauguggccacaugcggacucuucggccuggucuccuuucuucugcucugugggagaucuugcagcacgaccuauaaaggaguguacgaacugcagacacuggagcucgacauggcgucccugaacaugaccaugccucuuucuuguacaaagaauaacagccaucacuauaucaugguuggcaaugaaaccgggcuggagcucacacugaccaacacguccauuaucaaucauaaauucugcaaccuuucugaugcucacaagaaaaaucuguacgaccaugcccucaugagcauuaucuccaccuuucaccugagcauuccgaacuucaaucaguaugaggccaugucuugugauuuuaacggaggcaagaucuccgugcaguacaaucugagccacacauaugcugucgacgccgcuaaccauugcggcaccauugccaauggggugcuccaaacauucaugcggauggcguggggaggcucuuacaucgcccuggauuccgggugcggaagcugggacuguaucaugaccucuuaccaguaucuuauuauccagaacacgacaugggaagaucacugccaguuuucccgccccagcccuauuggcuaccuggggcuccugucccaaagaacccgggacaucuauauuucucgcagacgccggggaacauucaccuggacccucagcgauuccgagggcaacgaaacacccggcggguacugucugacgcgguggaugcugaucgaggcugagcucaaaugcuuuggaaauaccgccguugcuaaguguaacgaaaaacaugacgaggaguucugcgauaugcugcgccuuuuugacuucaauaagcaggccaucagacggcugaaagcgcccgcccagaugagcauucagcucaucaacaaggcugugaaugcccugauuaacgaucaacuuaucaugaagaaucaucugcgcgacauuaugugcaucccuuauugcaacuacucuaaauauugguaccucaaucacacagucaccgggagaacaucccugccccgguguuggcuggugagcaacggaucuuaccucaaugaaacccacuucagcgacgauaucgagcagcaggcugacaacaugauuacggagcugcuucaaaaggaauauaucgaucgccagggcaaaacaccucuggggcucguggaccuguuugucuucuccaccucuuuuuaccugauuagcaucuuccuucaccucguuaagauuccgacccauagacacaucauuggaaaacccugcccuaagccccaucggcugaaucacaugggcaucuguuccugcggccuguauaaacacccuggggugcccgugaaguggaagcgcugaggacuagucccuguucccagagcccacuuuuuuuucuuuuuuugaaauaaaauagccugucuuucagaucuaaaaaaaaaaaaaaaaaaaaaaaaaaaaaaaaaaaaaaaaaaaaaaaaaaaaaaaaaaaaaaaaaaaaaaaaaaaaaaaaaaaaaaaaaaaaaaaaaaaa

SEQ ID NO: 15580 - RNA, 1721 nt, Artificial Sequence
  mRNA product Design a-1 (A100) comprising derived and/or modified sequence from LASV(LASV254-NIG-2011;Clade II)__AIT17674__GPCmut1 (opt5)
aggagagucccgcagucggcguccagcggcucugcuuguucgugugugugucguugcaggccuuauucaagcuuaccaugggccagaucauuaccuucuuucaagaggugccccacgucaucgaagagguuaugaacauugugcugaucgcccucagccugcuugcuauucugaaggggaucuacaauguggccacaugcggacucuucggccuggucuccuuucuucugcucugugggagaucuugcagcacgaccuauaaaggaguguacgaacugcagacacuggagcucgacaugaccaaccugaauaugacaaugccucuuuccuguaccaagaacaauucucaucacuauaucaugguuggcaacgaaacagggcuggagcucacccugacgaauaccagcauuaucaaccauaaauucugcaaucuuuccgaugcgcacaagaaaaaccuguacaaucaugcucucaugucuauuaucagcacauuucaccuguccauuccgaacuucaaucaguaugaggccaugagcugugacuuuaacggaggcaagaucucugugcaguacaaucugucccacagcuaugccgucgaugcugccaaccauugcggcaccauugcuaacggggugcuccaaacauucaugcggauggccuggggaggcucuuacaucgcgcuggacuccgggugcggaaauugggauuguaucaugaccagcuaccaguaucuuauuauccagaacacgacaugggaagaccacugccaguuuucucgccccuccccuauuggcuaccuggggcuccugagccaaagaacccgggauaucuauauuucccgcagacgccggggaacauucaccuggacccucucugacagcgagggcaaugaaacacccggcggguacugucugacgcgguggaugcugaucgaggccgagcucaaaugcuuuggaaacaccgcuguugccaaguguaaugaaaaacaugaugaggaguucugcgacaugcugcgccuuuuugauuucaacaagcaggcuaucagacggcugaaaacacccgcccaggcgaauauucagcucaucaacaaggccgugaaugcucugauuaacgaccaacuuaucaugaagaaucaucugcgcgauauuaugugcaucccuuauugcaacuacuccaaauauugguaccucaaucacaccgucacagggaagaccagccugcccagauguuggcuggugucuaacggauccuaccucaaugaaacgcacuucagcgacgacaucgagcagcaggccgauaacaugauuacagagcugcuucaaaaagaauauauggaccggcagggcaagaccccucuggggcucguggaucuguuugucuucucuaccagcuuuuaccugaucuccauuuuccuucaccucguuaaaaucccgacacaucgccacgugauuggaaagcccugcccuaaaccccauagacugaaccacaugggcaucuguucuugcggccuguauaagcacccuggggugcccgucaaguggaaacggugaggacuagucccuguucccagagcccacuuuuuuuucuuuuuuugaaauaaaauagccugucuuucagaucuaaaaaaaaaaaaaaaaaaaaaaaaaaaaaaaaaaaaaaaaaaaaaaaaaaaaaaaaaaaaaaaaaaaaaaaaaaaaaaaaaaaaaaaaaaaaaaaaaaaa

SEQ ID NO: 15581 - RNA, 1721 nt, Artificial Sequence
  mRNA product Design a-1 (A100) comprising derived and/or modified sequence from LASV(Nig08-A19;Clade III)__ADU56618__GPCmut1 (opt5)
aggagagucccgcagucggcguccagcggcucugcuuguucgugugugugucguugcaggccuuauucaagcuuaccaugggccagaucgugaccuucuuucaagaggucccccacguuauugaagaggugaugaacaucgugcugauugcccucagcauccuggcuauucuuaaggggcuguacaauaucgccacaugcggacucaucggccuggucacguuccuucugcucuccgggagaucuuguagcaugaccuauaaaggaguguacgaacugcagacacuggagcucaacaugaauacccugaacaugacaaugccucuuuccugcaccaagaauaacucucaucacuauauuaugguuggcaaugaaacagggcuggagcucacccugacgaacaccagccuucugcaucacaaauuuuguaaucucuccgacgcgcauaagaaaaaccuguacgaucacacacugaugucuaucauuagcaccuuccaccucuccaucccgaauuuuaaccaguaugaggcuaugagcugcgacuucaauggaggcaagauuacagugcaguacaaccugucucauuccuaugccaucgaugccgcuaaucacuguggcaccgucgccaacggggugcuucaaacguuuaugcggauggcuuggggaggcagcuacauugcccuggacucugggugcggaaagugggauugcaucaugacauccuaccaguaucucaucauucagaacaccacaugggaagaccauugucaguucagcagacccucuccuaucggcuaccuggggcuucugucccaacggacccgcgauauuuauaucagcagacggcgccggggaaccuuuacauggacgcuguccgacucugagggcaaugaaacccccggcggguacugccucacacgcuggaugcugauugaggcggagcuuaaauguuucggaaacaccgccguugcuaagugcaaugaaaaacacgaugaggaauuuugugacaugcugagacucuucgauuuuaacaagcaggccauccggcgccugaaagcucccgcccagaugagcauccagcuuauuaauaaggcggugaacgcccugaucaaugaccaacucauuaugaagaaccaccugagagauaucaugugcauuccuuauugcaauuacuccaaauauugguaccugaaccauacaagcaccgggcggacgucucucccccgcugcuggcuggucuccaauggaagcuaccuuaacgaaacacacuucucugacgacaucgagcagcaggcugauaauaugaucaccgagaugcugcaaaaggaauaucucgacagacagggcaaaaccccucuggggcugguggaucuuuucguguuuagcacauccuucuaccucauuucuaucuuucugcaucuggucaagauuccgacccaccggcauaucguuggaaaacccuguccuaagccccaccgccucaaccacaugggcauuugcagcuguggccuguauaaacagccuggggugcccgugagauggaagcggugaggacuagucccuguucccagagcccacuuuuuuuucuuuuuuugaaauaaaauagccugucuuucagaucuaaaaaaaaaaaaaaaaaaaaaaaaaaaaaaaaaaaaaaaaaaaaaaaaaaaaaaaaaaaaaaaaaaaaaaaaaaaaaaaaaaaaaaaaaaaaaaaaaaaa

SEQ ID NO: 15582 - RNA, 1724 nt, Artificial Sequence
  mRNA product Design a-1 (A100) comprising derived and/or modified sequence from LASV(G1180-SLE-2010;Clade IV)__AIT17168__GPCmut1 (opt5)
aggagagucccgcagucggcguccagcggcucugcuuguucgugugugugucguugcaggccuuauucaagcuuaccaugggccagaucgugaccuucuuucaagaggucccccacguuauugaagaggugaugaacaucgugcugauugcccucagcauccuggcuguccuuaaggggcuguacaauuucgccacaugcggacucgugggccugcuuacguuucugcuccugugugggagauccugcaccgcgucucgguauaaaggaguuuacgaacugcagacacucgagcugaacauggaaacccuuaauaugacaaugccucugagcuguaccaagaacaauucccaucacuauauuauggugggcaacgagacagggcucgagcugacccuuacgaauaccucuaucaucaaccauaaauucugcaaucugagcgacgcucacaagaaaaaccucuacgaucaugcccugauguccauuaucucuacauuucaccugagcauuccgaauuucaaccaguaugaagccauguccugugacuuuaauggaggcaagaucagcguccaguacaaccucucucacuccuaugcuggcgaugccgcuaaucauugcgggaccguggccaacggaguucugcaaacauucaugcgcauggcguggggcgggagcuacauugcccuugacucuggaugcggcuccugggauuguaucaugaccagcuaccaguaucugauuauccagaacacgacaugggaggaccauugccaguuuucuagacccuccccuaucggguaccucggacugcuuagccaacggacccgcgauauuuauaucuccagacggcgccggggcacauucaccuggacccugucugacagcgaaggcaaggauacacccgggggauacugucugacgcgcuggaugcucauugaggcugagcugaaaugcuuuggcaauaccgccguggcuaaguguaacgaaaaacacgacgaggaguucugcgauaugcuuagacuguuugacuucaauaagcaggccauccagcggcucaaagcgcccgcccagauguccauucaacugaucaacaaggcugucaaugcccuuaucaacgaucagcugauuaugaagaaucaccuccgcgacaucaugugcauuccuuauugcaacuacagcaaauauugguaccugaaucauacaaccacaggaaagaccucucugcccaaauguuggcucguguccaacggcagcuaccugaaugaaacgcacuucucugacgauaucgagcagcaagcugacaacaugauuacagagaugcuucagaaggaauauauggagagacaggggaaaaccccucugggacucguggaucuguuugucuucagcaccuccuuuuaccugaucucuaucuuccuucaucucguuaagauuccgacacaccggcauaucgugggcaaaagcugccccaagccucaccgccugaaucacaugggcauuuguuccugcgggcuguauaagcagcccggagugccugucaaauggaagagaugaggacuagucccuguucccagagcccacuuuuuuuucuuuuuuugaaauaaaauagccugucuuucagaucuaaaaaaaaaaaaaaaaaaaaaaaaaaaaaaaaaaaaaaaaaaaaaaaaaaaaaaaaaaaaaaaaaaaaaaaaaaaaaaaaaaaaaaaaaaaaaaaaaaaa

SEQ ID NO: 15583 - RNA, 1724 nt, Artificial Sequence
  mRNA product Design a-1 (A100) comprising derived and/or modified sequence from LASV(G1442-SLE-2011;Clade IV)__AIT17180__GPCmut1 (opt5)
aggagagucccgcagucggcguccagcggcucugcuuguucgugugugugucguugcaggccuuauucaagcuuaccaugggccagaucgugaccuucuuucaagaggucccccacguuauugaagaggugaugaacaucgugcugauugcccucagcauccuggcuguccuuaaggggcuguacaauguggccacaugcggacucauuggccugguuacguuccuucugcucugugggagauccugcaccacaacccuguauaaaggaguguacgaacugcagacacucgagcugaacauggaaacccuuaauaugacaaugccucugucuuguaccaagaacaauagccaucacuauauccgggucggcaacgagacggggcucgagcugacccuuacaaauaccuccaucauuaaccauaaauuuugcaaucugucugacgcgcacaagaaaaaccucuacgaucaugcucugaugagcaucauuuccacauuccaccugucuaucccgaauuuuaaccaguaugaagccaugagcugugacuucaauggaggcaagauuuccgugcaguacaaccucagccacucuuaugccggcgaugcugccaaucauugcgggaccguugcuaacggagugcugcaaacguuuaugcgcauggccuggggcggguccuacaucgcgcuugacagcggaugcggcaacugggauuguauuaugacaucuuaccaguaucugaucauccagaauaccacaugggacgaucacugccaguucucccggcccagcccuauuggguaccucggacugcuuucucaacgcaccagagacgucuauaucucccggcgccgccggggcaccuuuacauggacgcugagcgauuccgagggcaaggacacccccgggggauacugucugacaagauggaugcucauugaagccgagcugaaaugcuucggcaacaccgcuguggccaaguguaaugagaaacaugaugaagaguuuugcgacaugcuucggcuguucgauuuuaacaagcaggcuauccagcgccucaaagcccccgcgcagaugucuauucaacugaucaauaaggccgugaacgcucuuaucaaugaccagcugauuaugaagaaccaccucagagacaucaugugcauuccuuauugcaauuacagcaaauauugguaccugaacaauacagccaccggaaagacgucccugcccaaauguuggcucaucagcaacggcucuuaccugaaugagacacacuucuccgaugacauugaacaggaggcugauaacaugaucaccgagaugcuucaaaaggaauauauggagcggcaggggaaaaccccucugggacucgucgaccuguucguuuuuagcacaucuuucuaccugaucagcauuuuucuucaucucgugaagaucccgacccaccgccauauugugggcaaauccugccccaagccucacagacugaaucauaugggcaucuguucuugcgggcuguauaagcagcccggagucccugugcgguggaaacgcugaggacuagucccuguucccagagcccacuuuuuuuucuuuuuuugaaauaaaauagccugucuuucagaucuaaaaaaaaaaaaaaaaaaaaaaaaaaaaaaaaaaaaaaaaaaaaaaaaaaaaaaaaaaaaaaaaaaaaaaaaaaaaaaaaaaaaaaaaaaaaaaaaaaaa

SEQ ID NO: 15584 - RNA, 1724 nt, Artificial Sequence
  mRNA product Design a-1 (A100) comprising derived and/or modified sequence from LASV(G3010-SLE-2013;Clade IV)__AIT17344__GPCmut1 (opt5)
aggagagucccgcagucggcguccagcggcucugcuuguucgugugugugucguugcaggccuuauucaagcuuaccaugggccagaucgugaccuucuuucaagaggucccccacguuauugaagaggugaugaacaucgugcugauugcccucagcauccuggcuguccuuaaggggcuguacaauuucgccacaugcggacucgugggccugguuacguuucuucugcucugugggagauccugcaccacaucucuguauaaaggaguguacgaacugcagacccucgagcugaacauggaaacacuuaauaugaccaugccucugagcuguacaaagaacaauucccaucacuauauuauggucggcaacgagaccgggcucgagcugacgcuuaccaauacaucuaucaucaaccauaaauucugcaaucugagcgacgcgcacaagaaaaaccucuacaaucaugcucugauguccauuaucucuaccuuucaccugagcauuccgaacuucaaucaguaugaagccauguccugugauuuuaacggaggcaagaucagcgugcaguacaaucucucucacuccuaugccggcgacgcugccagccauugcgggacaguugcuaacggagugcugcaaaccuucaugcggauggccuggggcgggucuuacauugcgcuugauuccggaugcggcaagugggacuguaucaugacgagcuaucaguaccugauuauccagaacacaaccugggaggaucacugccaguuuucucgccccuccccuaucggguaucucggacugcuuagccaaagaacacgggacauuuacaucucccgcagacgccggggcaccuucaccuggacacugucugauagcgaaggcaaagacacgcccgggggauauugucugacccgguggaugcucauugaggccgagcugaagugcuuuggcaauacagcugucgccaaauguaacgaaaagcaugaugaggaguucugcgacaugcuucgccuguuugauuucaauaaacaggcuauccagagacucaagacccccgcccagauguccauucaacugaucaacaaggcggugaaugcccuuaucaacgaccagcugauuaugaaaaaucaccuccgggauaucaugugcauuccuuacugcaacuauagcaaguacugguaccugaaucacacaaccacgggaaaaacaucucugcccaaguguuggcucguguccaacggcagcuaucugaaugaaacccauuucucugacgacaucgagcagcaagcugauaacaugauuaccgagaugcuucagaaagaauacauggagcgccaggggaagacaccucugggacucgucgaccuguuuguuuucagcaccuccuuuuaucugaucucuaucuuccuucaccucgugaaaauuccgacacauagacacaucgugggcaagagcugccccaagccucaucggcugaaucacaugggcauuuguuccugcgggcuguacaaacagcccggagucccugugcgcuggaagagaugaggacuagucccuguucccagagcccacuuuuuuuucuuuuuuugaaauaaaauagccugucuuucagaucuaaaaaaaaaaaaaaaaaaaaaaaaaaaaaaaaaaaaaaaaaaaaaaaaaaaaaaaaaaaaaaaaaaaaaaaaaaaaaaaaaaaaaaaaaaaaaaaaaaaa

SEQ ID NO: 15585 - RNA, 1724 nt, Artificial Sequence
  mRNA product Design a-1 (A100) comprising derived and/or modified sequence from LASV(G502-SLE-2009;Clade IV)__AIT17126__GPCmut1 (opt5)
aggagagucccgcagucggcguccagcggcucugcuuguucgugugugugucguugcaggccuuauucaagcuuaccaugggccagaucgugaccuucuuucaagaggucccccacguuauugaagaggugaugaacaucgugcugauugcccucagcauccuggcuguccuuaaggggcuguacaauuucgccacaugcggacucgugggccugcuuacguuucugcuccugugugggagauccugcaccacaggacuguauaaaggcguuuacgaacuccagacccuggagcuuaacauggaaacacugaauaugaccaugccucucucuuguacaaagaacaauagccaucacuauauuaugguggggaacgagaccggacuggagcuuacgcugaccaauacauccaucaucaaccauaaauucugcaaucucucugacgcgcacaagaaaaaccuguacgaucaugcucugaugagcauuaucuccaccuuucaccucucuauuccgaauuucaaccaguaugaagccaugagcugugacuuuaauggcggcaagaucuccguccaguacaaccugagccacucuuaugccggggaugcugccgaccauugcggaacaguggcuaauggcguucuucaaaccuucaugcggauggccuggggaggguccuacauugcgcuggauagcggcugcgggagaugggacuguaucaugacgucuuaccaguaucucauuauccagaacacaaccugggaggaucacugccaguuuucccggcccagcccuaucggauaccugggccuucugucucaacgcacaagagacauuuauaucucccggcgccgccggggcaccuucaccuggacacugagcgauuccgaagggaaggacacgcccggaggcuacugucucaccagauggaugcugauugaggccgagcuuaaaugcuuugggaacacagcuguggccaaguguaaugaaaaacaugaugaggaguucugcgacaugcugcggcucuuugauuucaacaagcaggcuauccagcgccugaaagcccccgcgcagaugucuauucaacuuaucaauaaggccgucaacgcucugaucaaugaccagcucgugaugaagaaccaccugagagacauuaugugcaucccuuauugcaauuacagccgguauugguaccugaaccacaccacaaccggccgcacgucccuccccaaauguuggcuggugagcaaugggucuuaccuuaacgaaacacauuucuccgaugacauugagcagcaagccgauaauaugaucaccgagaugcugcagaaggaauauauggagagacagggaaaaaccccucucggccuggucgaccuguuuguuuucagcacaucuuuuuaccuuauuagcaucuuccuccaccuggugaagaucccgacccaucggcacauugugggcaaauccugccccaagccucaucgccugaaccacauggggaucuguucuugcggacucuauaaacagcccggcgucccugugaaguggaagagaugaggacuagucccuguucccagagcccacuuuuuuuucuuuuuuugaaauaaaauagccugucuuucagaucuaaaaaaaaaaaaaaaaaaaaaaaaaaaaaaaaaaaaaaaaaaaaaaaaaaaaaaaaaaaaaaaaaaaaaaaaaaaaaaaaaaaaaaaaaaaaaaaaaaaa

SEQ ID NO: 15586 - RNA, 1724 nt, Artificial Sequence
  mRNA product Design a-1 (A100) comprising derived and/or modified sequence from LASV(G733-SLE-2010;Clade IV)__AIT17154__GPCmut1 (opt5)
aggagagucccgcagucggcguccagcggcucugcuuguucgugugugugucguugcaggccuuauucaagcuuaccaugggccagaucgugaccuucuuucaagaggucccccacguuauugaagaggugaugaacaucgugcugauugcccucagcauccuggcuguccuuaaggggcuguacaauuucgccacaugcggaauugugggccucguuuccuuucugcuucugugugggagaucuugcacgaccagccucuauaaaggaguguacgaacugcagacacuggagcucaacauggaaacccugaauaugacaaugccucuuuccuguaccaagaacaauucucaucacuauaucauggucggcaacgagacagggcuggagcucacccugacgaauaccagcaucauuaaccauaaauucugcaaucuuuccgacgcgcacaagaaaaaccuguacgaucaugcucucaugucuaucauuagcacauuucaccuguccaucccgaauuucaaccaguaugaagccaugagcugugacuuuaauggaggcaagauuucugugcaguacaaccugucccacagcuaugccggcgaugcugccaaucauugcgggaccaucgcuaacggaguucuccaaacauucaugcggauggccuggggcgggucuuacauugcgcuggacuccggaugcgauagaugggacuguaucaugaccagcuaccaguaucuuaucauucagaacacgacaugggaggaucacugccaguuuucucggcccuccccuaucggcuaccuggggcuccugagccaacgcaccagagacauuuauaucucccggcgccgccggggaacauucaccuggacccucucugauagcgaaggcaaggacacacccggcggguacugucugacgagauggaugcugauugaggccgagcucaaaugcuuuggaaauaccgcuguggccaaguguaacgaaaaacaugaugaggaguucugcgacaugcugcggcuuuuugauuucaauaagcaggcuauccagcgccugaaagcccccgcgcagauguccauccaacucauuaacaaggccgucaaugcucugaucaacgaccagcuuauuaugaagaaucaccugagagacaucaugugcauuccuuauugcaacuacagcaaauauugguaccucaaucacacaaccacagggaagaccucucugcccaaauguuggcugguguccaacggaagcuaccucaaugaaacgcauuucucugaugacaucgagcagcaagccgauaacaugaucacagagaugcugcagaaggaauauauggagcggcagggcaaaaccccucuugggcugguggaccucuuugucuucagcaccuccuuuuaccugauuucuaucuuccugcaccuuguuaagauuccgacacaucgccacguggugggaaaaagcugccccaagccucauagacucaaucacaugggcaucuguuccugcggccuguaugggcagcccggagucccugugaaguggaaacggugaggacuagucccuguucccagagcccacuuuuuuuucuuuuuuugaaauaaaauagccugucuuucagaucuaaaaaaaaaaaaaaaaaaaaaaaaaaaaaaaaaaaaaaaaaaaaaaaaaaaaaaaaaaaaaaaaaaaaaaaaaaaaaaaaaaaaaaaaaaaaaaaaaaaa

SEQ ID NO: 15587 - RNA, 1724 nt, Artificial Sequence
  mRNA product Design a-1 (A100) comprising derived and/or modified sequence from MOPV/LASV reassortant(IGS-1;Clade IV)__AFY05576__GPCmut1 (opt5)
aggagagucccgcagucggcguccagcggcucugcuuguucgugugugugucguugcaggccuuauucaagcuuaccaugggccagaucgugaccuucuuucaagaggucccccacguuauugaagaggugaugaacaucgugcugauugcccucagcguccuggcugugcuuaaggggcuguacaauuucgccacaugcggacucguuggccuggugacguuucuucugcucugugggagauccugcaccacaucucuguauaaaggagucuacgaacugcagacccucgagcugaacauggaaacacuuaauaugaccaugccucugagcuguacaaagaacaauucccaucacuauaucauggugggcaacgagaccgggcucgagcugacgcuuaccaauacaucuauuaucaaccauaaauucugcaaucugagcgacgcgcacaagaaaaaccucuacgaucaugcucugauguccaucauuucuaccuuucaccugagcaucccgaauuucaaccaguaugaagccauguccugugacuuuaauggaggcaagauuagcguucaguacaaccucucucacuccuaugccggcgaugcugccaaucauugcgggacaguggcuaacggaguccugcaaaccuucaugcggauggccuggggcgggagcuacaucgcgcuugacucuggaugcggcaacugggauuguauuaugacguccuaccaguaucugaucauucagaauacaaccugggaggaccacugccaguuuagcagacccucuccuaucggguaccucggacugcuuucccaacggacacgcgauaucuauauuagcagacggcgccggggcaccuucaccuggacacuguccgacucugaaggcgaggauacgcccgggggauacugucugacccgcuggaugcucaucgaggccgaacugaagugcuuuggcaacacagcuguggccaaauguaaugagaagcaugacgaagaguucugcgauaugcuuagacuguuugacuucaacaaacaggcuauucagcggcucaaggcccccgcgcagaugagcauccaacugauuaauaaagccgugaacgcucuuaucaaugaucagcugaucaugaagaaccaccuccgcgacauuaugugcaucccuuauugcaauuacuccaaguauugguaccugaaccacaccacaaccggaagaacgagccugcccaaauguuggcucgucucuaauggcuccuaccugaacgagacacauuucagcgacgauauugagcagcaagccgacaauaugaucaccgaaaugcuucagaaggaguauauggaacggcaggggaaaaccccucugggacucguugaucuguuuguguucucuaccagcuuuuaccugauuuccaucuuccuucaccucgugaagaucccgacacaucgccacauugucggcaaaucuugccccaagccucauagacugaaccacaugggcaucuguagcugcgggcuguauaaacagcccggagugccuguuaaguggaagcggugaggacuagucccuguucccagagcccacuuuuuuuucuuuuuuugaaauaaaauagccugucuuucagaucuaaaaaaaaaaaaaaaaaaaaaaaaaaaaaaaaaaaaaaaaaaaaaaaaaaaaaaaaaaaaaaaaaaaaaaaaaaaaaaaaaaaaaaaaaaaaaaaaaaaa

SEQ ID NO: 15588 - RNA, 1724 nt, Artificial Sequence
  mRNA product Design a-1 (A100) comprising derived and/or modified sequence from LASV(LM765-SLE-2012;Clade IV)__AIT17814__GPCmut1 (opt5)
aggagagucccgcagucggcguccagcggcucugcuuguucgugugugugucguugcaggccuuauucaagcuuaccaugggccagaucgugaccuucuuucaagaggucccccacguuauugaagaggugaugaacaucgugcugauugcccucagcauccuggcuguccuuaaggggcuguacaauuucgccacaugcggacucgugggccugguuacguuucuucugcucugugggagauccugcaccacaucucuguauaaaggaguguacgaacugcagacccucgagcugaacauggaaacacuuaauaugaccaugccucugagcuguacaaagaacaauucccaucacuauauuauggucggcaacgagaccgggcucgagcugacgcuuaccaauacaucuaucaucgaccauaaauucugcaaccugagcgaugcgcaccggaagaaucucuacgaccaugcucugauguccauuaucucuaccuuucaccugagcauuccgaacuucaaucaguaugaagccauguccugugauuuuaacggaggcaaaaucagcgugcaguacaaucucucucacuccuaugccaaggacgcugccgaucauugcggcacaguugcuaacggggugcugcaaaccuucaugcgcauggccuggggaggcagcuacauugcgcuugacucugggugcggacggugggauuguaucaugacguccuaccaguaucugauuauccagaauacaaccugggaggaccacugccaguuuagccgccccucuccuaucggcuaccucgggcugcuuucccaaagaacacgggauauuuauaucagccgcagacgccggggaaccuucaccuggacacuguccgacucugaaggcaaggauacgcccggcggguacugucugacccgguggaugcucauugaggccgagcugaaaugcuuuggaaacacagcugucgccaaguguaacgaaaaacaugacgaggaguucugcgauaugcuucgccuguuugacuucaauaagcaggcuauccagagacucaaagcccccgcgcagaugagcauucaacugaucaacaaggccgugaaugcucuuaucaacgaccagcugauuaugaagaaucaccuccgggauaucaugugcauuccuuauugcaacuacuccaaauauugguaccugaaucacaccacaaccgggaagacgagccugcccaaauguuggcucgugucuaacggauccuaccugaaugaaacacauuucagcgacgauaucgagcagcaagccgacaacaugauuaccgagaugcuucagaaggaauauauggagcgccagggcaaaaccccucuggggcucgucgaucuguuuguuuucucuaccagcuuuuaccugaucuccaucuuccuucaccucgugaagauuccgacacauagacacaucgugggaaaacccugcccuaagccccaucggcugaaucacaugggcauuuguucuugcggccuguauaagcagccugggguccccgugaaauggaagcgcugaggacuagucccuguucccagagcccacuuuuuuuucuuuuuuugaaauaaaauagccugucuuucagaucuaaaaaaaaaaaaaaaaaaaaaaaaaaaaaaaaaaaaaaaaaaaaaaaaaaaaaaaaaaaaaaaaaaaaaaaaaaaaaaaaaaaaaaaaaaaaaaaaaaaa

SEQ ID NO: 15589 - RNA, 1724 nt, Artificial Sequence
  mRNA product Design a-1 (A100) comprising derived and/or modified sequence from LASV(LM776-SLE-2012;Clade IV)__AIT17824__GPCmut1 (opt5)
aggagagucccgcagucggcguccagcggcucugcuuguucgugugugugucguugcaggccuuauucaagcuuaccaugggccagaucgugaccuucuuucaagaggucccccacguuauugaagaggugaugaacaucgugcugauugcccucagcauccuggcuguccuuaaggggcuguacaauuucgccacaugcggacucgugggccugguuacguuucuucugcucugugggagauccugcaccacaucuguguauaaaggagucuacgaacugcagacccuggagcucaacauggaaacacugaauaugaccaugccucuuagcuguacaaagaacaauucccaucacuauauuauggugggcaacgagaccgggcuggagcucacgcugaccaauacaucuaucaucaaccauaaauucugcaaucuuagcgacgcgcacaagaaaaaccuguacgaucaugcucucauguccauuaucucuaccuuucaccugagcauuccgaauuucaaccaguaugaagccauguccugugacuuuaauggaggcaagaucagcguucaguacaaccugucucacuccuaugccggcgaugcugccaaucauugcgggacaguggcuaacggaguccuccaaaccuucaugcggauggccuggggcgggagcuacauugcgcuggacucuggaugcggcaagugggauuguaucaugacguccuaccaguaucuuauuauccagaacacaaccugggaggaccauugccaguuuagccgccccucuccuaucggguaccugggacuccugucccaaagaacacgggauauuuauaucagccgcagacgccggggcaccuucaccuggacacucuccgacucugaaggcaaagauacgcccgggggauacugucugacccgguggaugcugauugaggccgagcucaagugcuuuggcaauacagcuguggccaaauguaacgaaaagcacgacgaggaguucugcgauaugcugcgccuuuuugacuucaauaaacaggcuauccagagacugaaggcccccgcgcagaugagcauucaacucaucaacaaggccgugaaugcucugaucaacgaucagcuuauuaugaaaaaucaucugcgggacaucaugugcauuccuuauugcaacuacuccaaguauugguaccucaaucacaccacaaccggaaaaacgagccugcccaaguguuggcuggucucuaacggcuccuaccucaaugaaacacacuucagcgacgauaucgagcagcaagccgacaacaugauuaccgagaugcugcagaaagaauauauggagcgccaggggaagaccccucuuggacugguugaucucuuuguguucucuaccagcuuuuaccugaucuccaucuuccugcaucuugugaaaauuccgacacacagacauaucgucggcaagucuugccccaagccucaccggcucaaucacaugggcauuuguagcugcgggcuguauaaacagcccggagugccuguucgcuggaagagaugaggacuagucccuguucccagagcccacuuuuuuuucuuuuuuugaaauaaaauagccugucuuucagaucuaaaaaaaaaaaaaaaaaaaaaaaaaaaaaaaaaaaaaaaaaaaaaaaaaaaaaaaaaaaaaaaaaaaaaaaaaaaaaaaaaaaaaaaaaaaaaaaaaaaa

SEQ ID NO: 15590 - RNA, 1724 nt, Artificial Sequence
  mRNA product Design a-1 (A100) comprising derived and/or modified sequence from LASV(Mad39;Clade IV)__ANH09722__GPCmut1 (opt5)
aggagagucccgcagucggcguccagcggcucugcuuguucgugugugugucguugcaggccuuauucaagcuuaccaugggccagaucgugaccuucuuucaagaggucccccacguuauugaagaggugaugaacaucgugcugauugcccucagcauccuggcuguccuuaaggggcuguacaauguggccacaugcggacucauuggccugguuacguuccuucugcucugugggagauccugcaccacaacccuguauaaaggaguguacgaacugcaggcgcucgagcugaacauggaaacacuuaauaugaccaugccucugucuuguacaaagaacaauagccaucacuauauccgggucggcaacgagaccgggcucgagcugacgcuuaccaauacaucccugaucaaccauaaauuuugcaaucucucugacgcucacaagaaaaaccuguacgaucaugcccugaugagcauuaucuccaccuuccaccucucuauuccgaauuuuaaccaguaugaagccaugagcugugacuucaaugauggaaagaucuccgugcaguacaaccugagccacacauaugcuggcgacaccgccaaucauugcggcacgguugcuaacggggugcuucaaacauuuaugcgcauggccuggggaggcucuuacauugcgcuggauuccgggugcggaggcugggacuguaucaugaccagcuaccaguaucucauuauccagaacacaaccugggaggaucacugccaguucucucggcccuccccuaucggguaccugggacuucugagccaacgcaccagagacauuuauaucucucggcgccgccggggcacauuuacguggacccuguccgauagcgaaggcaaggacacacccgggggauacugucucaccagauggaugcugauugaggccgagcuuaaaugcuucggcaauacagcugucgccaaguguaacgaaaaacaugaugaggaauuuugcgacaugcugcgccucuucgauuuuaauaagcaggcuauccagcggcugaaagcccccgcgcagauguccauucaacuuaucaacaaggccgugaaugcucugaucaacgaccagcucauuaugaagaaucaccugagagacaucaugugcauuccuuauugcaacuacucuaaauauugguaccugaaucacaccgugacgggaaagacaagccuccccaaauguuggcuggucuccaacggcagcuaccuuaaugaaacccauuucucugaugacaucgagcagcaagccgauaacaugauuaccgagaugcugcagaaggaauauauggagcggcaggggaaaacaccucucggacugguugaccuguucguguuuuccaccagcuucuaccuuaucucuaucuuucuccaccuggugaagauuccgacacaucgccacgucgugggcaaacccugcccuaagccccauagacugaaucacaugggcaucuguagcugcggguucuauaagcagccuggaguucccgugcgguggaaacgcugaggacuagucccuguucccagagcccacuuuuuuuucuuuuuuugaaauaaaauagccugucuuucagaucuaaaaaaaaaaaaaaaaaaaaaaaaaaaaaaaaaaaaaaaaaaaaaaaaaaaaaaaaaaaaaaaaaaaaaaaaaaaaaaaaaaaaaaaaaaaaaaaaaaaa

SEQ ID NO: 15591 - RNA, 1724 nt, Artificial Sequence
  mRNA product Design a-1 (A100) comprising derived and/or modified sequence from LASV(Z0947-SLE-2011;Clade IV)__AIT17840__GPCmut1 (opt5)
aggagagucccgcagucggcguccagcggcucugcuuguucgugugugugucguugcaggccuuauucaagcuuaccaugggccagaucgugaccuucuuucaagaggucccccacguuauugaagaggugaugaacaucgugcugauugcccucagcauccuggcuguccuuaaggggcuguacaauuucgccacaugcggacucgugggccugguuacguuucuucugcucugugggagauccugcaccauuucucuguauaaaggaguguacgaacugcagacacucgagcugaacauggaaacccuuaauaugacaaugccucugagcuguaccaagaacaauucccaucacuauaucauggucggcaacgagacagggcucgagcugacccuuacgaauaccucuaucauuaaccauaaauucugcaaucugagcgacgcgcacaagaaaaaccucuacgaucaugcucugauguccaucauuucuacauuucaccugagcaucccgaauuucaaccaguaugaagccauguccugugacuuuaauggaggcaagauuagcgugcaguacaaccucucucacuccuaugccggcgaugcugccaaucauugcgggaccguugcuaacggagugcugcaaacauucaugcggauggccuggggcgggagcuacaucgcgcuugacucuggaugcgauagaugggacuguauuaugaccuccuaccaguaucugaucauccagaacacgacaugggaggaucacugccaguuuagccggcccucuccuauuggcuaccucgggcugcuuucccaacgcaccagagacaucuauauuagccggcgccgccggggaacauucaccuggacccuguccgauucugaaggcaaggacacacccggcggguacugucugacgagauggaugcucaucgaggccgagcugaaaugcuuuggaaauaccgcugucgccaaguguaacgaaaaacaugaugaggaguucugcgacaugcuucggcuguuugauuucaauaagcaggcuauucagcgccucaaagcccccgcgcagaugagcauccaacugaucaacaaggccgugaaugcucuuauuaacgaccagcugaucaugaagaaucaccucagagacauuaugugcaucccuuauugcaacuacuccaaauauugguaccugaaucacacaaccacagggaagaccagccugcccaaauguuggcucgugucuaacggauccuaccugaaugaaacgcauuucagcgaugacauugagcagcaagccgauaacaugaucacagagaugcuucagaaggaauauauggagcggcagggcaaaaccccucuggggcucgucgaccuguuuguuuucucuaccagcuuuuaccugaucuccauuuuccuucaccucgugaagaucccgacacaucgccacauugugggaaaacccugcccuaagccccauagacugaaucacaugggcaucuguucuugcggccuguauaagcagccugggguccccgugaaauggaagcggugaggacuagucccuguucccagagcccacuuuuuuuucuuuuuuugaaauaaaauagccugucuuucagaucuaaaaaaaaaaaaaaaaaaaaaaaaaaaaaaaaaaaaaaaaaaaaaaaaaaaaaaaaaaaaaaaaaaaaaaaaaaaaaaaaaaaaaaaaaaaaaaaaaaaa

SEQ ID NO: 15592 - RNA, 1736 nt, Artificial Sequence
  mRNA product Design a-2 (hSL-A64-N5) comprising derived and/or modified sequence from LASV(Josiah;Clade IV)__NP_694870__GPCmut1 (opt1)
aggagaguccgcucagccagguugcagaagcggcuuagcguguguccuaaucuucucucugcguguagguaggccugugccgcaaacaagcuuaccaugggccagaucgugaccuucuuccaggaggucccccacgugaucgaggaggugaugaacaucguccugaucgcccucagcgugcuggccgugcugaaggggcucuacaacuucgcgaccugcggccuggucgggcuggugacguuccuccugcugugcggccgcuccugcaccaccagccucuacaaggggguguacgagcugcagacccuggagcucaacauggagacgcugaacaugaccaugccgcuguccugcaccaagaacaacagccaccacuacaucauggucggcaacgagaccggccucgagcugacgcugaccaacaccuccaucaucaaccacaaguucugcaaccucagcgacgcccacaagaagaaccuguacgaccacgcccugauguccaucaucagcaccuuccaccucuccauccccaacuucaaccaguacgaggccaugagcugcgacuucaacgggggcaagaucuccgugcaguacaaccugagccacuccuacgccggggacgcggccaaccacugcggcacgguggccaacgggguccugcagaccuucaugcggauggccuggggcggcagcuacaucgcgcucgacuccgggugcggcaacugggacugcaucaugaccagcuaccaguaccugaucauccagaacaccacgugggaggaccacugccaguucucccggcccagccccaucggguaccugggccuccugucccagcgcacccgggacaucuacaucagccgccggcgccggggcaccuucaccuggacgcugagcgacuccgaggggaaggacaccccgggcggguacugccugacccgcuggaugcucaucgaggccgagcugaagugcuucggcaacaccgccguggccaagugcaacgagaagcacgacgaggaguucugcgacaugcugcggcuguucgacuucaacaagcaggccauccagcgccugaaggcgcccgcccagaugagcauccagcugaucaacaaggccgugaacgcccucaucaacgaccagcugaucaugaagaaccaccuccgggacaucaugugcauccccuacugcaacuacuccaaguacugguaccucaaccacacgaccaccggccgcaccagccugcccaagugcuggcuggucuccaacggcagcuaccucaacgagacgcacuucuccgacgacaucgagcagcaggccgacaacaugaucaccgagaugcugcagaaggaguacauggagcggcaggggaagacgccccugggccucguggaccuguucguguucagcaccuccuucuaccugaucagcaucuuccugcaccucgucaagaucccgacccaccgccacaucguggggaaguccugccccaagccccaccggcugaaccacaugggcaucugcagcugcgggcuguacaagcagcccggcgugccggucaaguggaagcgcugaggacuagucccuguucccagagcccacuuuuuuuucuuuuuuugaaauaaaauagccugucuuucagaucucaaaggcucuuuucagagccaccaaaaaaaaaaaaaaaaaaaaaaaaaaaaaaaaaaaaaaaaaaaaaaaaaaaaaaaaaaaaaaaaagaauu

SEQ ID NO: 15593 - RNA, 1733 nt, Artificial Sequence
  mRNA product Design a-2 (hSL-A64-N5) comprising derived and/or modified sequence from LASV(LP;Clade I)__AAF86701__GPCmut1 (opt1)
aggagaguccgcucagccagguugcagaagcggcuuagcguguguccuaaucuucucucugcguguagguaggccugugccgcaaacaagcuuaccaugggccagaucaucaccuucuuccaggaggugccccacgucaucgaggaggugaugaacaucgugcugaucgcccucagccugcuggccauccucaaggggcuguacaacaucgcgaccugcggcaucaucgggcuggucgccuuccucuuccugugcggcaaguccugcagccugacgcucaagggcggguacgagcugcagacccuggagcucaacauggagacccugaacaugaccaugccgcuguccugcacgaagaacagcucccaccacuacauccgcgugggcaacgagaccgggcucgagcugacccugaccaacacgagcaucaucaaccacaaguucugcaaccucuccgacgcccacaagaagaaccuguacgaccacgcccugaugagcaucaucuccaccuuccaccucagcauccccaacuucaaccaguacgaggccauguccugcgacuucaacggcgggaagaucagcgugcaguacaaccugucccacagcuacgcgggcgacgccgccgagcacugcgggaccgucgccaacggcgugcugcagaccuucaugcggauggcguggggcgggcgcuacaucgcccucgacuccggcugcgggaacugggacugcaucaugacgagcuaccaguaccugaucauccagaacaccaccugggaggaccacugccaguucucccggcccagccccaucggcuaccugggccuccugucccagcgcacccgggacaucuacaucagccgccggcgccgggggacguucaccuggacccugagcgacuccgagggcaacgagacccccgggggcuacugccugacgcgcuggaugcucaucgaggccgagcugaagugcuucgggaacaccgccguggccaagugcaacgagaagcacgacgaggaguucugcgacaugcugcggcuguucgacuucaacaagcaggcgauccgccggcugaaggcccccgcccagaugagcauccagcugaucaacaaggccgucaacgcccucaucaacgaccagcugaucaugaagaaccaccuccgcgacaucaugugcauccccuacugcaacuacuccaaguacugguaccucaaccacaccagcuccggccggaccagccugcccaagugcuggcugaucuccaacgggagcuaccucaacgagacgcaguucuccgacgacaucgagcagcaggcggacaacaugaucaccgagaugcugcagaaggaguacaucgagcgccagggcaagaccccgcuggggcucguggacaucuucaucuucagcaccuccuucuaccugaucagcaucuuccugcaccugaucaagaucccgacgcaccggcacaucgugggcaagcccugccccaagccccaccgccucaaccacaugggggucugcuccugcggccuguacaagcacccgggcgugcccaccaaguggaagcggugaggacuagucccuguucccagagcccacuuuuuuuucuuuuuuugaaauaaaauagccugucuuucagaucucaaaggcucuuuucagagccaccaaaaaaaaaaaaaaaaaaaaaaaaaaaaaaaaaaaaaaaaaaaaaaaaaaaaaaaaaaaaaaaaagaauu

SEQ ID NO: 15594 - RNA, 1733 nt, Artificial Sequence
  mRNA product Design a-2 (hSL-A64-N5) comprising derived and/or modified sequence from LASV(803213;Clade II)__AAF86703__GPCmut1 (opt1)
aggagaguccgcucagccagguugcagaagcggcuuagcguguguccuaaucuucucucugcguguagguaggccugugccgcaaacaagcuuaccaugggccagaucaucaccuucuuccaggaggugccccacgucaucgaggaggugaugaacaucgugcugaucgcccucagccugcuggccauccucaaggggaucuacaacgucgcgaccugcggccuguucgggcugaucuccuuccuccugcugugcggccgcagcugcuccgugacguacaaggggguguacgagcuccagacccuggagcugaacauggccaaccucaacaugaccaugccgcugagcugcaccaagaacaacucccaccacuacaucauggucggcaacgagacgggccuggagcucacccugaccaacaccagcaucaucaaccacaaguucugcaaccuguccgacgcccacaagaagaaccucuacgaccacgcccugaugagcaucaucuccacguuccaccugagcauccccaacuucaaccaguacgaggccauguccugcgacuucaacgggggcaagaucagcgugcaguacaaccucucccacagcuucgcgguggacgccgccaaccacugcgggaccaucgccaacggcguccugcagaccuucaugcggauggcguggggcggguccuacaucgcccuggacagcggcugcgggaacugggacugcaucaugaccuccuaccaguaccucaucauccagaacacgaccugggaggaccacugccaguucagccgccccucccccaucggcuaccuggggcugcucagccagcggacccgcgacaucuacaucagccggcgccgccggggcaccuucacguggacccucuccgacagcgagggcaacgaggcccccgggggcuacugccugacccgguggaugcugaucgaggccgagcucaagugcuucgggaacaccgccguggcgaagugcaacgagaagcacgacgaggaguucugcgacaugcugcgccuguucgacuucaacaagcaggccaucaagcggcucaagacgcccgcccagauguccauccagcugaucaacaaggccgugaacgcccugaucaacgaccagcucaucaugaagaaccaccuccgcgacaucaugugcauccccuacugcaacuacagccgguacugguaccugaaccacaccgucaccgggaagaccucccugccccgcugcuggcuggugagcaacggcuccuaccugaacgagacgcacuucagcgacgacaucgagcagcaggcggacaacaugaucaccgagaugcuccagaaggaguacauggaccggcagggcaagaccccgcuggggcugguggaccucuucgucuucuccaccagcuucuaccugaucuccaucuuccugcaccuggugaagaucccgacgcaccgccacaucgugggcaagcccugccccaagccccaccggcucaaccacauggggaucugcagcugcggccuguacaagcacccggggguccccgugaaguggaagcgcugaggacuagucccuguucccagagcccacuuuuuuuucuuuuuuugaaauaaaauagccugucuuucagaucucaaaggcucuuuucagagccaccaaaaaaaaaaaaaaaaaaaaaaaaaaaaaaaaaaaaaaaaaaaaaaaaaaaaaaaaaaaaaaaaagaauu

SEQ ID NO: 15595 - RNA, 1733 nt, Artificial Sequence
  mRNA product Design a-2 (hSL-A64-N5) comprising derived and/or modified sequence from LASV(GA391;Clade III)__CAA36645__GPCmut1 (opt1)
aggagaguccgcucagccagguugcagaagcggcuuagcguguguccuaaucuucucucugcguguagguaggccugugccgcaaacaagcuuaccaugggccagaucgugaccuucuuccaggaggucccccacgugaucgaggaggugaugaacaucguccugaucgcccucagcauccuggccauccugaaggggcucuacaacguggcgaccugcggccugaucgggcuggugacguuccuccugcuguccggccgcagcugcucccucaucuacaaggggaccuacgagcugcagacccuggagcucaacauggagacccugaacaugacgaugccgcugagcugcaccaagaacaacucccaccacuacauccgggucggcaacgagaccggccucgagcugacccugacgaacaccagcauccucaaccacaaguucugcaaccuguccgacgcccacaagcgcaaccuguacgaccacagccucauguccaucaucagcaccuuccaccuguccauccccaacuucaaccaguacgaggccaugagcugcgacuucaacgggggcaagaucaccgugcaguacaaccugucccacagcuucgccguggacgccgcggggcacugcggcacgcucgccaacgggguccugcagaccuucaugcggauggccuggggcggcuccuacaucgcccuggacagcgggugcggcaacugggacugcaucaugaccuccuaccaguaccucaucauccagaacaccacgugggacgaccacugccaguucagccggcccucccccaucggguaccugggccugcucagccagcgcacccgggacaucuacaucagccgccggcgccggggcaccuucaccuggacgcucuccgacagcgaggggaacgagaccccgggcggguacugccugacccgcuggaugcugaucgaggcggagcucaagugcuucggcaacaccgccguggccaagugcaacgagaagcacgacgaggaguucugcgacaugcugcggcuguucgacuucaacaagcaggccauccgccggcucaagacgcccgcccagauguccauccagcugaucaacaaggcggugaacgcccugaucaacgaccagcucaucaugaagaaccaccuccgcgacaucaugugcauccccuacugcaacuacagccgguacugguaccugaaccacaccuccaccggcaagaccagccugccccgcugcuggcugaucuccaacggcagcuaccugaacgagacgaaguucuccgacgacaucgagcagcaggccgacaacaugaucaccgagaugcuccagaaggaguacaucgaccggcaggggaagacgccccugggccuggucgaccuguucguguucagcaccuccuucuaccucaucagcaucuuccugcaccuggugaagaucccgacccaccgccacaucgucgggaagcccugccccaagccccaccggcucaaccacaugggcaucugcuccugcgggcuguacaagcagccgggcgugcccgugcgcuggaagcggugaggacuagucccuguucccagagcccacuuuuuuuucuuuuuuugaaauaaaauagccugucuuucagaucucaaaggcucuuuucagagccaccaaaaaaaaaaaaaaaaaaaaaaaaaaaaaaaaaaaaaaaaaaaaaaaaaaaaaaaaaaaaaaaaagaauu

SEQ ID NO: 15596 - RNA, 1736 nt, Artificial Sequence
  mRNA product Design a-2 (hSL-A64-N5) comprising derived and/or modified sequence from LASV(AV;Clade V)__CCA30314__GPCmut1 (opt1)
aggagaguccgcucagccagguugcagaagcggcuuagcguguguccuaaucuucucucugcguguagguaggccugugccgcaaacaagcuuaccaugggccagaucgugaccuucuuccaggaggucccccacgugaucgaggaggugaugaacaucguccugaucgcccucagcauccuggccgugcugaaggggcucuacaacaucgcgaccugcggccugaucgggcugaucacguuccuccugcugugcggccgcuccugcagcuccaaccucuacaaggggguguacgagcugcagagccuggaccucaacauggagacccugaacaugaccaugccgcuguccugcaccaagaacaacagccaccacuacauccgggucggcaacgacacgggccucgagcugacccugaccaacaccuccauccucaaccacaaguucugcaaccugagcgacgcccacaagaaggaccuguacgaccacgcccucauguccaucaucagcacguuccaccuguccauccccaacuucaaccaguacgaggccaugagcugcgacuucaacgggggcaagaucuccgugcaguacaaccugagccacuccuacgccaucgacgcggccaaccacugcgggaccguggccaacggcauccuccagaccuucaugcgcauggccuggggcgggagcuacaucgcgcuggacuccggcugcgggaacugggacugcaucaugaccagcuaccaguaccugaucauccagaacacgaccugggagaaccacugccaguucucccgccccagccccaucggcuaccucgggcugcugagccagcggacccgcgacaucuacaucucccggcgccgccggggcaccuucacguggacccugagcgacuccgagggcaacgccacccccgggggcuacugccucacccgguggaugcugaucgaggccgagcugaagugcuucgggaacacggccgucgccaagugcaacgagaagcacgacgaggaguucugcgacaugcuccgccuguucgacuucaacaagcaggcgaucagccggcugaagucccccgcccagaugagcauccagcucaucaacaaggccgugaacgcccugaucaacgaccagcugaucaugaagaaccaccuccgcgacaucaugugcauccccuacugcaacuacuccaaguacugguaccugaaccacaccaucaccgggaagaccagccugcccaagugcuggcucguguccaacggcagcuaccugaacgagacgcacuucuccgacgacaucgagcagcaggccgacaacaugaucaccgagaugcugcagaaggaguacauggagcggcagggcaagaccccgcucgggcuggucgaccuguucguguucagcaccuccuucuaccugaucagcaucuuccuccgccuggugaagaucccgacgcaccggcacaucgucggcaagcccugccccaagccccaccgccugaaccacauggggaucugcuccugcggccucuacaagcagccgggggugcccgugcgguggaagcgcugaggacuagucccuguucccagagcccacuuuuuuuucuuuuuuugaaauaaaauagccugucuuucagaucucaaaggcucuuuucagagccaccaaaaaaaaaaaaaaaaaaaaaaaaaaaaaaaaaaaaaaaaaaaaaaaaaaaaaaaaaaaaaaaaagaauu

SEQ ID NO: 15597 - RNA, 1733 nt, Artificial Sequence
  mRNA product Design a-2 (hSL-A64-N5) comprising derived and/or modified sequence from LASV(Togo/2016/7082;Clade VI)__AMR44577__GPCmut1 (opt1)
aggagaguccgcucagccagguugcagaagcggcuuagcguguguccuaaucuucucucugcguguagguaggccugugccgcaaacaagcuuaccaugggccagaucaucaccuucuuccaggaggugccccacgucaucgaggaggugaugaacaucgugcugaucgcccucagccugcuggccauccucaagggggucuacaacguggcgaccugcggcaucaucgggcuggugacguuccuguuccucugcggccgcuccugcagccugaucuacaagggguccuacgagcugcagacccucgagcugaacauggagacccugaacaugaccaugccgcucagcugcacgaagaacuccagccaccacuacauccgggucggcaacgagaccggccuggagcugacccucaccaacacguccaucaucaaccacaaguucugcaaccugagcgacgcccacaagcgcaaccuguacgaccacgcccucauguccauccugagcaccuuccaccuguccauccccaacuucaaccaguacgaggccaugagcugcgacuucaacgggggcaagaucuccgugcaguacaaccucagccacgccuacgcgguggacgccgccgagcacugcgggaccgucgccaacggcgugcugcagaccuucaugcggauggcguggggcggguccuacaucgcccuggacagcggcugcgggaacugggacugcaucaugacguccuaccaguaccucaucauccagaacaccaccugggaggaccacugccaguucagccggcccucccccaucggcuaccuggggcugcucagccagcgcacccgggacaucuacaucagccgccggcgccggggcacguucaccuggacccucuccgacagcgagggcaacgagacccccgggggcuacugccugacgcgcuggaugcugaucgaggccgagcucaagugcuucgggaacaccgccguggccaagugcaacgagaagcacgacgaggaguucugcgacaugcugcggcuguucgacuucaacaagcaggcgauccagcgccucaagucccccgcccagaugagcauccagcugaucaacaaggccgucaacgcccugaucaacgaccagcucaucaugaagaaccaccuccgggacaugaugugcauccccuacugcaacuacuccaaguacugguaccugaaccacaccagcuccgggcgcaccagccugcccaagugcuggcugguguccaacggcagcuaccugaacgagacgcacuucuccgacgacaucgagcagcaggccgacaacaugaucaccgagaugcuccagaaggaguacaucgaccggcagggcaagaccccgcuggggcugguggaccucuucgucuucagcaccuccuucuaccugaucagcaucuuccugcaccugaucaagaucccgacgcaccgccacaucgugggcaagcccugccccaagccccaccggcucaaccacauggggaucugcuccugcggccuguacaagcagccgggggugcccacccgcuggaagcggugaggacuagucccuguucccagagcccacuuuuuuuucuuuuuuugaaauaaaauagccugucuuucagaucucaaaggcucuuuucagagccaccaaaaaaaaaaaaaaaaaaaaaaaaaaaaaaaaaaaaaaaaaaaaaaaaaaaaaaaaaaaaaaaaagaauu

SEQ ID NO: 15598 - RNA, 1733 nt, Artificial Sequence
  mRNA product Design a-2 (hSL-A64-N5) comprising derived and/or modified sequence from LASV(KAK-428;Clade n.d. (VII))__ANH09740__GPCmut1 (opt1)
aggagaguccgcucagccagguugcagaagcggcuuagcguguguccuaaucuucucucugcguguagguaggccugugccgcaaacaagcuuaccaugggccagaucgugaccuucuuccaggaggucccccacgugaucgaggaggugaugaacaucguccugaucgcccucagccugcuggccauccucaaggggcuguacaacuucgcgaccugcggcgugaucgggcugaucacguuccuccugcugugcggccgcuccugcagcgccaccuacaaggggcaguacgagcuccagacccuggagcugaacauggagucccucaacaugaccaugccgcugagcugcacgaagaacaacucccaccacuacauccgggccggcaacaacaccggccuggagcucacccugaccaacacgagcaucaucucccacaaguucugcaaccugagcgacgcccacaagaagaaccucuacgaccacacccugauguccaucaucaccaccuuccaccugagcauccccaacuucaaccaguacgaggccauguccugcgacuucaacgggggcaagaucagcauccaguacaaccucucccacagcuacgcgggggacgccgcccagcacugcggcacgguggccaacgggguccugcagaccuucaugcgcauggcguggggcggcuccuaccuggcccucgacagcgggugccgcggcugggacugcaucaucuccagcuaccaguaccugaucauccagaacaccaccugggacgaccacugccaguucucccggcccagccccaucggguaccugggcuucgugagccagaagacgcgcgacaucuacaucucccggcgccgccggggcaccuucaccuggacccugagcgacuccgaggggcacgacaugccgggcggguacugccucacgcgguggaugcugaucgaggccgaccugaagugcuucggcaacaccgccguggccaagugcaacgagaagcacgacgaggaguucugcgacauguggcgccucuucgacuucaacaagcaggcgauccagcggcugaaggcccccgcccagaugaacauccagcugaucaacaaggccgucaacgcccucaucaacgaccagcugaugaugaagaaccaccuccgcgacaucaugugcauccccuacugcaacuacagcaaguucugguaccugaacaacaccaccacgggccggaccucccugccccgcugcuggcugaucagcaacggcuccuaccucaacgagacccacuucagcgacgacaucgagcagcaggcggacaacaugaucaccgagaugcugcagaaggaguacauggaccggcaggggaagacgccccugggccucguggaccuguucguguucuccaccagcuucuaccugaucaccaucuuccuccaccuggucaagaucccgacccaccgccacaucguggggaagcccugccccaagccccaccggcugaaccacaugggcaucugcuccugcgggcuguacaagcagccgggcgugcccguccgcuggaagcggugaggacuagucccuguucccagagcccacuuuuuuuucuuuuuuugaaauaaaauagccugucuuucagaucucaaaggcucuuuucagagccaccaaaaaaaaaaaaaaaaaaaaaaaaaaaaaaaaaaaaaaaaaaaaaaaaaaaaaaaaaaaaaaaaagaauu

SEQ ID NO: 15599 - RNA, 1733 nt, Artificial Sequence; identical to SEQ ID NO: 15593
  mRNA product Design a-2 (hSL-A64-N5) comprising derived and/or modified sequence from LASV(Pinneo-NIG-1969;Clade I)__AIT17836__GPCmut1 (opt1)

SEQ ID NO: 15600 - RNA, 1733 nt, Artificial Sequence
  mRNA product Design a-2 (hSL-A64-N5) comprising derived and/or modified sequence from LASV(ISTH0009-NIG-2011;Clade II)__AIT17404__GPCmut1 (opt1)
aggagaguccgcucagccagguugcagaagcggcuuagcguguguccuaaucuucucucugcguguagguaggccugugccgcaaacaagcuuaccaugggccagaucaucaccuucuuccaggaggugccccacgucaucgaggaggugaugaacaucgugcugaucgcccucagccugcuggccauccucaaggggaucuacaacgucgcgaccugcggccuguucgggcugguguccuuccuccugcugugcggccgcagcugcuccacgaccuacaaggggguguacgagcuccagacccuggagcuggacauggccagccucaacaugaccaugccgcuguccugcacgaagaacaacagccaccacuacaucauggucggcaacgagaccggccuggagcucacccugaccaacacguccaucaucaaccacaaguucugcaaccugagcgacgcccacaagaagaaccucuacgaccacgcccugauguccaucaucagcaccuuccaccuguccauccccaacuucaaccaguacgaggccaugagcugcgacuucaacgggggcaagaucuccgugcaguacaaccucagccacgcguacgccguggacgccgccaaccacugcgggaccaucgcgaacggcguccugcagaccuucaugcggauggccuggggcggguccuacaucgcccuggacagcggcugcggguccugggacugcaucaugacgagcuaccaguaccucaucauccagaacaccaccugggaggaccacugccaguucucccgccccagccccaucggcuaccuggggcugcucagccagcggacccgcgacaucuacaucucccggcgccgccggggcacguucaccuggacccucagcgacuccgagggcaacgagacccccgggggcuacugccugacgcgguggaugcugaucgaggccgagcucaagugcuucgggaacaccgccguggcgaagugcaacgagaagcacgacgaggaguucugcgacaugcugcgccuguucgacuucaacaagcaggccauccggcgccucaagacccccgcccagaugagcauccagcugaucaacaaggccgugaacgcccugaucaacgaccagcucaucaugaagaaccaccuccgggacaucaugugcaucccguacugcaacuacuccaaguacugguaccugaaccacaccgucacggggaagaccagccugccccgcugcuggcugguguccaacggcagcuaccugaacgagacccacuucuccgacgacaucgagcagcaggcggacaacaugaucaccgagcuccugcagaaggaguacauggaccggcagggcaagacgccccuggggcucguggaccuguucgucuucagcaccuccuucuaccugaucagcaucuuccugcaccucaucaagaucccgacccaccgccacaucaccggcaagcccugccccaagccccaccggcugaaccacauggggaucugcuccugcggccuguacaagcacccgggggugcccgugaaguggaagcgcugaggacuagucccuguucccagagcccacuuuuuuuucuuuuuuugaaauaaaauagccugucuuucagaucucaaaggcucuuuucagagccaccaaaaaaaaaaaaaaaaaaaaaaaaaaaaaaaaaaaaaaaaaaaaaaaaaaaaaaaaaaaaaaaaagaauu

SEQ ID NO: 15601 - RNA, 1733 nt, Artificial Sequence
  mRNA product Design a-2 (hSL-A64-N5) comprising derived and/or modified sequence from LASV(ISTH2010-NIG-2012;Clade II)__AIT17482__GPCmut1 (opt1)
aggagaguccgcucagccagguugcagaagcggcuuagcguguguccuaaucuucucucugcguguagguaggccugugccgcaaacaagcuuaccaugggccagaucaucaccuucuuccaggaggugccccacgucaucgaggaggugaugaacaucgugcugaucgcccucagccugcuggccauccucaaggggaucuacaacgucgcgaccugcggccuguucgggcugguguccuuccuccugcugugcggccgcagcugcuccacgaccuacaaggggguguacgagcuccagacccuggagcuggacauggccagccucaacaugaccaugccgcuguccugcacgaagaacaacagccaccacuacaucauggucggcaacgagaccggccuggagcucacccugaccaacacguccaucaucaaccacaaguucugcaaccugagcgacgcccacaagaagaaccucuacgaccacgcccugauguccaucaucagcaccuuccaccuguccauccccaacuucaaccaguacgaggccaugagcugcgacuucaacgggggcaagaucuccgugcaguacaaccucagccacgcguacgccguggacgccgccaaccacugcgggaccaucgcgaacggcguccugcagaccuucaugcggauggccuggggcggguccuacaucgcccuggacagcggcugcggguccugggacugcaucaugacgagcuaccaguaccucaucauccagaacaucaccugggaggaccacugccaguucucccgccccagccccaucggcuaccuggggcugcucagccagcggacccgcgacaucuacaucucccggcgccgccggggcaccuucacguggacccucagcgacuccgagggcaacgagacccccgggggcuacugccugacccgguggaugcugaucgaggccgagcucaagugcuucgggaacacggccguggcgaagugcaacgagaagcacgacgaggaguucugcgacaugcugcgccuguucgacuucaacaagcaggccauccggcgccucaagacccccgcccagaugagcauccagcugaucaacaaggccgugaacgcccugaucaacgaccagcucaucaugaagaaccaccuccgggacaucaugugcauccccuacugcaacuacuccaaguacugguaccugaaccacaccgucaccgggaagacgagccugccccgcugcuggcugguguccaacggcagcuaccugaacgagacccacuucuccgacgacaucgagcagcaggcggacaacaugaucaccgagcuccugcagaaggaguacaucgaccggcagggcaagaccccgcuggggcucguggaccuguucgucuucagcacguccuucuaccugaucagcaucuuccugcaccucgugaagaucccgacccaccgccacguggucggcaagcccugccccaagccccaccggcugaaccacauggggaucugcuccugcggccuguacaagcacccgggggugcccgugaaguggaagcgcugaggacuagucccuguucccagagcccacuuuuuuuucuuuuuuugaaauaaaauagccugucuuucagaucucaaaggcucuuuucagagccaccaaaaaaaaaaaaaaaaaaaaaaaaaaaaaaaaaaaaaaaaaaaaaaaaaaaaaaaaaaaaaaaaagaauu

SEQ ID NO: 15602 - RNA, 1733 nt, Artificial Sequence
  mRNA product Design a-2 (hSL-A64-N5) comprising derived and/or modified sequence from LASV(Lassa virus/H.sapiens-wt/NGA/2015/ISTH_0543;Clade II)__AVO03639__GPCmut1 (opt1)
aggagaguccgcucagccagguugcagaagcggcuuagcguguguccuaaucuucucucugcguguagguaggccugugccgcaaacaagcuuaccaugggccagaucaucaccuucuuccaggaggugccccacgucaucgaggaggugaugaacaucgugcugaucgcccucagccugcuggccauccucaaggggaucuacaacgucgcgaccugcggccuguucgggcugguguccuuccuccugcugugcggccgcagcugcuccacgaccuacaaggggguguacgagcuccagacccuggagcuggacauggccaaccucaacaugaccaugccgcugagcugcacgaagaacaacucccaccacuacaucauggucggcaacgagaccggccuggagcucacccugaccaacacgagcaucaucaaccacaaguucugcaaccuguccgacgcccacaagaagaaccucuacgaccacgcccugaugagcaucaucuccaccuuccaccugagcauccccaacuucaaccaguacgaggccauguccugcgacuucaacgggggcaagaucagcgugcaguacaaccucucccacaccuacgcgguggacgccgccaaccacugcgggaccaucgccaacggcguccugcagacguucaugcggauggcguggggcgggagcuacaucgcccuggacuccggcugcgggagcugggacugcaucaugaccuccuaccaguaccucgugauccagaacaccaccugggaggaccacugccaguucagccgccccucccccaucggcuaccuggggcugcucagccagcggacgcgcgacaucuacaucagccggcgccgccggggcaccuucaccuggacccucuccgacagcgagggcaacgagacgcccgggggcuacugccugacccgguggaugcugaucgaggccgagcucaagugcuucgggaacaccgccguggccaagugcaacgagaagcacgacgaggaguucugcgacaugcugcgccuguucgacuucaacaagcaggcgauccggcgccucaagacccccgcccagauguccauccagcugaucaacaaggccgucaacgcccugaucaacgaccagcucaucaugaagaaccaccuccgggacaucaugugcauccccuacugcaacuacagcaaguacugguaccugaaccacacggugaccgggaagaccucccugccccgcugcuggcuggugagcaacggcuccuaccugaacgagacccacuucagcgacgacaucgagcagcaggccgacaacaugaucacggagcuccugcagaaggaguacaucgaccggcagggcaagaccccgcuggggcucgucgaccuguucguguucuccaccagcuucuaccugaucuccaucuuccugcaccucgugaagaucccgacccaccgccacaucacgggcaagcccugccccaagccccaccggcugaaccacauggggaucugcagcugcggccuguacaagcacccggggguccccgugaaguggaagcgcugaggacuagucccuguucccagagcccacuuuuuuuucuuuuuuugaaauaaaauagccugucuuucagaucucaaaggcucuuuucagagccaccaaaaaaaaaaaaaaaaaaaaaaaaaaaaaaaaaaaaaaaaaaaaaaaaaaaaaaaaaaaaaaaaagaauu

SEQ ID NO: 15603 - RNA, 1733 nt, Artificial Sequence
  mRNA product Design a-2 (hSL-A64-N5) comprising derived and/or modified sequence from LASV(Lassa virus/H.sapiens-wt/NGA/2016/ISTH_0009;Clade II)__AVO03571__GPCmut1 (opt1)
aggagaguccgcucagccagguugcagaagcggcuuagcguguguccuaaucuucucucugcguguagguaggccugugccgcaaacaagcuuaccaugggccagaucaucaccuucuuccaggaggugccccacgucaucgaggaggugaugaacaucgugcugaucgcccucagccugcuggccauccucaaggggaucuacaacgucgcgaccugcggccugcuggggcucguguccuuccugcugcucugcggccgcagcugcuccacgaccuacaaggggguguacgagcugcagacccuggagcucgacauggccagccugaacaugaccaugccgcuguccugcacgaagaacaacagccaccacuacaucauggucggcaacgagaccggccucgagcugacccugaccaacacguccaucaucaaccacaaguucugcaaccucagcgacgcccacaagaagaaccuguacgaccacgcccugauguccaucaucagcaccuuccaccucuccauccccaacuucaaccaguacgaggccaugagcugcgacuucaacgggggccggaucuccgugcaguacaaccugagccacuccuacgcgguggacgccgccaaccacugcgggaccaucgccaacggcguccugcagaccuucaugcgcauggcguggggcgggagcuacaucgcccucgacuccggcugcgggagcugggacugcaucaugacguccuaccaguaccugaucauccagaacaccaccugggaggaccacugccaguucagccggcccagccccaucggcuaccuggggcuccugucccagcgcacccgggacaucuacaucagccgccggcgccggggcacguucaccuggacccuguccgacagcgagggcaacgagacccccgggggcuacugccugacgcgcuggaugcucaucgaggccgagcugaagugcuucgggaacaccgccguggccaagugcaacgagaagcacgacgaggaguucugcgacaugcugcggcuguucgacuucaacaagcaggcgauccgccggcugaagacccccgcccagauguccauccagcugaucaacaaggccgugaacgcccucaucaacgaccagcugaucaugaagaaccaccuccgcgacaucaugugcaucccguacugcaacuacagcaaguacugguaccucaaccacaccgucacggggaagaccucccugccccggugcuggcuggugagcaacggcuccuaccucaacgagacccacuucagcgacgacaucgagcagcaggccgacaacaugaucaccgagcugcugcagaaggaguacaucgaccgccagggcaagacgccccucgggcugguggaccuguucgucuucuccaccagcuucuaccugaucuccaucuuccuccaccuggugaagaucccgacccaccggcacaucaccggcaagcccugccccaagccccaccgccugaaccacauggggaucugcagcugcggccucuacaaccacccgggggugcccgucaaguggaagcggugaggacuagucccuguucccagagcccacuuuuuuuucuuuuuuugaaauaaaauagccugucuuucagaucucaaaggcucuuuucagagccaccaaaaaaaaaaaaaaaaaaaaaaaaaaaaaaaaaaaaaaaaaaaaaaaaaaaaaaaaaaaaaaaaagaauu

SEQ ID NO: 15604 - RNA, 1733 nt, Artificial Sequence
  mRNA product Design a-2 (hSL-A64-N5) comprising derived and/or modified sequence from LASV(Lassa virus/H.sapiens-wt/NGA/2016/ISTH_0017;Clade II)__AVO03567__GPCmut1 (opt1)
aggagaguccgcucagccagguugcagaagcggcuuagcguguguccuaaucuucucucugcguguagguaggccugugccgcaaacaagcuuaccaugggccagaucaucaccuucuuccaggaggugccccacgucaucgaggaggugaugaacaucgugcugaucgcccucagccugcuggccauccucaaggggaucuacaacgucgcgaccugcggccuguucgggcugguguccuuccuccugcugugcggccgcagcugcuccacgaccuacaaggggguguacgagcuccagacccuggagcuggacauggccagccucaacaugaccaugccgcuguccugcacgaagaacaacagccaccacuacaucauggucggcaacgagaccggccuggagcucacccugaccaacacguccaucaucaaccacaaguucugcaaccugagcgacgcccacaagaagaaccucuacgaccacgcccugauguccaucaucagcaccuuccaccuguccauccccaacuucaaccaguacgaggccaugagcugcgacuucaacgggggcaagaucuccgugcaguacaaccucagccacaccuacgcgaucgacgccgccaaccacugcgggaccaucgccaacggcgugcugcagacguucaugcggauggcguggggcggguccuacaucgcccuggacagcggcugcggguccugggacugcaucaugaccagcuaccaguaccucaucauccagaacaccaccugggaggaccacugccaguucucccgccccagccccaucggcuaccuggggcugcucagccagcggacgcgcgacaucuacaucucccggcgccgccggggcaccuucaccuggacccucagcgacuccgagggcaacgagacgcccgggggcuacugccugacccgguggaugcugaucgaggccgagcucaagugcuucgggaacaccgccgucgccaagugcaacgagaagcacgacgaggaguucugcgacaugcugcgccuguucgacuucaacaagcaggcgauccggcgccucaagacccccgcccagaugagcauccagcugaucaacaaggccgugaacgcccugaucaacgaccagcucaucaugaagaaccaccuccgggacaucaugugcauccccuacugcaacuacuccaaguacugguaccugaaccacacggugaccgggaagaccagccugccccgcugcuggcuggucuccaacggcagcuaccugaacgagacccacuucuccgacgacaucgagcagcaggccgacaacaugaucacggagcuccugcagaaggaguacauggaccggcagggcaagaccccgcuggggcucguggaccuguucguguucagcaccuccuucuaccugaucagcaucuuccugcaccucguccgcaucccgacccaccggcacgugaucggcaagcccugccccaagccccaccgccugaaccacauggggaucugcuccugcggccuguacaagcacccgggggugcccgucaaguggaagcggugaggacuagucccuguucccagagcccacuuuuuuuucuuuuuuugaaauaaaauagccugucuuucagaucucaaaggcucuuuucagagccaccaaaaaaaaaaaaaaaaaaaaaaaaaaaaaaaaaaaaaaaaaaaaaaaaaaaaaaaaaaaaaaaaagaauu

SEQ ID NO: 15605 - RNA, 1733 nt, Artificial Sequence
  mRNA product Design a-2 (hSL-A64-N5) comprising derived and/or modified sequence from LASV(Lassa virus/H.sapiens-wt/NGA/2018/ISTH_0959;Clade II)__AVV65099__GPCmut1 (opt1)
aggagaguccgcucagccagguugcagaagcggcuuagcguguguccuaaucuucucucugcguguagguaggccugugccgcaaacaagcuuaccaugggccagaucaucaccuucuuccaggaggugccccacgucaucgaggaggugaugaacaucgugcugaucgcccucagccugcuggccauccucaaggggaucuacaacgucgugaccugcggccuguucgggcugguguccuuccuccugcugugcggccgcagcugcuccacgaccuacaagggggucuacgagcuccagacccuggagcuggacauggcgagccucaacaugaccaugccgcuguccugcacgaagaacaacagccaccacuacaucauggugggcaacgagaccggccuggagcucacccugaccaacacguccaucaucaaccacaaguucugcaaccugagcgacgcccacaagaagaaccucuacgaccacgcccugauguccaucaucagcaccuuccaccuguccauccccaacuucaaccaguacgaggccaugagcugcgacuucaacgggggcaagaucuccgugcaguacaaccucagccacgccuacgcgaucgacgccgccaaccacugcgggaccaucgccaacggcguccugcagaccuucaugcggauggcguggggcggguccuacaucgcccuggacagcggcugcggguccugggacugcaucaugacgagcuaccaguaccucaucauccagaacaccaccugggaggaccacugccaguucucccgccccagccccaucggcuaccuggggcugcucagccagcggacccgcgacaucuacaucucccggcgccgccggggcacguucaccuggacccucagcgacuccgagggcaacgagacccccgggggcuacugccugacgcgguggaugcugaucgaggccgagcucaagugcuucgggaacaccgccguggccaagugcaacgagaagcacgacgaggaguucugcgacaugcugcgccuguucgacuucaacaagcaggcgauccggcgccucaagacccccgcccagaugagcauccagcugaucaacaaggccgugaacgcccugaucaacgaccagcucaucaugaagaaccaccuccgggacaucaugugcaucccguacugcaacuacuccaaguacugguaccugaaccacaccgucacggggaagaccagccugccccgcugcuggcugguguccaacggcagcuaccugaacgagacccacuucuccgacgacaucgagcagcaggccgacaacaugaucaccgagcuccugcagaaggaguacaucgaccggcagggcaagacgccccuggggcucguggaccuguucgucuucagcaccuccuucuaccugaucagcaucuuccugcaccucgugaagaucccgacccaccgccacgugaucggcaagcccugccccaagccccaccggcugaaccacauggggaucugcuccugcggccuguacaagcacccggggguccccgugaaguggaagcgcugaggacuagucccuguucccagagcccacuuuuuuuucuuuuuuugaaauaaaauagccugucuuucagaucucaaaggcucuuuucagagccaccaaaaaaaaaaaaaaaaaaaaaaaaaaaaaaaaaaaaaaaaaaaaaaaaaaaaaaaaaaaaaaaaagaauu

SEQ ID NO: 15606 - RNA, 1733 nt, Artificial Sequence
  mRNA product Design a-2 (hSL-A64-N5) comprising derived and/or modified sequence from LASV(LASV003-NIG-2008;Clade II)__AIT17580__GPCmut1 (opt1)
aggagaguccgcucagccagguugcagaagcggcuuagcguguguccuaaucuucucucugcguguagguaggccugugccgcaaacaagcuuaccaugggccagaucaucaccuucuuccaggaggugccccacgucaucgaggaggugaugaacaucgugcugaucgcccucagccugcuggccauccucaaggggaucuacaacgucgcgaccugcggccuguucgggcugguguccuuccuccugcugugcggccgcagcugcuccacgaccuacaaggggguguacgagcuccagacccuggagcuggacauggccagccucaacaugaccaugccgcuguccugcacgaagaacaacagccaccacuacaucauggucggcaacgagaccggccuggagcucacccugaccaacacguccaucaucaaccacaaguucugcaaccugagcgacgcccacaagaagaaccucuacgaccacgcccugauguccaucaucagcaccuuccaccuguccauccccaacuucaaccaguacgaggccaugagcugcgacuucaacgggggcaagaucuccgugcaguacaaccucagccacaccuacgcgguggacgccgccaaccacugcgggaccaucgccaacggcguccugcagacguucaugcggauggcguggggcggguccuacaucgcccuggacagcggcugcggguccugggacugcaucaugaccagcuaccaguaccucaucauccagaacaccaccugggaggaccacugccaguucucccgccccagccccaucggcuaccuggggcugcucagccagcggacgcgcgacaucuacaucucccggcgccgccggggcaccuucaccuggacccucagcgacuccgagagcaacgagacgccgggcggguacugccugacccgguggaugcugaucgaggccgagcucaagugcuucggcaacaccgccguggccaagugcaacgagaagcacgacgaggaguucugcgacaugcugcgccuguucgacuucaacaagcaggcgauccggcgccucaaggcccccgcccagauguccauccagcugaucaacaaggccgugaacgcccugaucaacgaccagcucaucaugaagaaccaccuccgggacaucaugugcauccccuacugcaacuacagcaaguacugguaccugaaccacaccgucacgggccgcaccucccugccccggugcuggcuggugagcaacggguccuaccugaacgagacccacuucagcgacgacaucgagcagcaggcggacaacaugaucaccgagcuccugcagaaggaguacauggaccgccagggcaagacgccccugggccucguggaccuguucgucuucuccaccagcuucuaccugaucuccaucuuccugcaccucgugaagaucccgacccaccggcacgugaucgggaagcccugccccaagccccaccgccugaaccacaugggcaucugcagcugcgggcuguacaagcacccgggcguccccgugaaguggaagcggugaggacuagucccuguucccagagcccacuuuuuuuucuuuuuuugaaauaaaauagccugucuuucagaucucaaaggcucuuuucagagccaccaaaaaaaaaaaaaaaaaaaaaaaaaaaaaaaaaaaaaaaaaaaaaaaaaaaaaaaaaaaaaaaaagaauu

SEQ ID NO: 15607 - RNA, 1733 nt, Artificial Sequence
  mRNA product Design a-2 (hSL-A64-N5) comprising derived and/or modified sequence from LASV(LASV035-NIG-2009;Clade II)__AIT17588__GPCmut1 (opt1)
aggagaguccgcucagccagguugcagaagcggcuuagcguguguccuaaucuucucucugcguguagguaggccugugccgcaaacaagcuuaccaugggccagaucaucaccuucuuccaggaggugccccacgucaucgaggaggugaugaacaucgugcugaucgcccucagccugcuggccauccucaaggggaucuacaacgucgcgaccugcggccuguucgggcugguguccuuccuccugcugugcggccgcagcugcuccacgaccuacaaggggguguacgagcuccagacccuggagcuggacauggccagccucaacaugaccaugccgcuguccugcacgaagaacaacagccaccacuacaucauggucggcaacgagaccggccuggagcucacccugaccaacacguccaucaucaaccacaaguucugcaaccugagcgacgcccacaagaagaaccucuacgaccacgcccugauguccaucaucagcaccuuccaccuguccauccccaacuucaaccaguacgaggccaugagcugcgacuucaacgggggcaagaucuccgugcaguacaaccucagccacgcguacgccguggacgccgccaaccacugcgggaccaucgcgaacggcguccugcagaccuucaugcggauggccuggggcggguccuacaucgcccuggacagcggcugcggguccugggacugcaucaugacgagcuaccaguaccucaucauccagaacaccaccugggaggaccacugccaguucucccgccccagccccaucggcuaccuggggcugcucagccagcggacccgcgacaucuacaucucccggcgccgccggggcacguucaccuggacccucagcgacuccgagggcaacgagacccccgggggcuacugccugacgcgguggaugcugaucgaggccgagcucaagugcuucgggaacaccgccguggcgaagugcaacgagaagcacgacgaggaguucugcgacaugcugcgccuguucgacuucaacaagcaggccauccggcgccucaaggcccccgcccagaugagcauccagcugaucaacaaggccgugaacgcgcugaucaacgaccagcucaucaugaagaaccaccuccgggacaucaugugcauccccuacugcaacuacuccaaguacugguaccugaaccacaccgucaccgggaagacgagccugccccgcugcuggcugguguccaacggcagcuaccugaacgagacccacuucuccgacgacaucgagcagcaggccgacaacaugaucaccgagcuccugcagaaggaguacaucgaccggcagggcaagaccccgcuggggcucguggaccuguucgucuucagcacguccuucuaccugaucagcaucuuccugcaccucgugaagaucccgacccaccgccacgugaucggcaagcccugccccaagccccaccggcugaaccacauggggaucugcuccugcggccuguacaagcacccggggguccccgugaaguggaagcgcugaggacuagucccuguucccagagcccacuuuuuuuucuuuuuuugaaauaaaauagccugucuuucagaucucaaaggcucuuuucagagccaccaaaaaaaaaaaaaaaaaaaaaaaaaaaaaaaaaaaaaaaaaaaaaaaaaaaaaaaaaaaaaaaaagaauu

SEQ ID NO: 15608 - RNA, 1733 nt, Artificial Sequence
  mRNA product Design a-2 (hSL-A64-N5) comprising derived and/or modified sequence from LASV(LASV1000-NIG-2009;Clade II)__AIT17782__GPCmut1 (opt1)
aggagaguccgcucagccagguugcagaagcggcuuagcguguguccuaaucuucucucugcguguagguaggccugugccgcaaacaagcuuaccaugggccagaucaucaccuucuuccaggaggugccccacgucaucgaggaggugaugaacaucgugcugaucgcccucagccugcuggccauccucaaggggaucuacaacgucgcgaccugcggccuguucgggcugguguccuuccuccugcugugcggccgcagcugcuccacgaccuacaaggggguguacgagcuccagacccuggagcuggacauggccagccucaacaugaccaugccgcuguccugcacgaagaacaacagccaccacuacaucauggucggcaacgagaccggccuggagcucacccugaccaacacguccaucaucaaccacaaguucugcaaccugagcgacgcccacaagaagaaccucuacgaccacgcccugauguccaucaucagcaccuuccaccuguccauccccaacuucaaccaguacgaggccaugagcugcgacuucaacgggggcaagaucuccgugcaguacaaccucagccacaccuacgcgguggacgccgccaaccacugcgggaccaucgccaacggcguccugcagacguucaugcggauggcguggggcggguccuacaucgcccuggacagcggcugcggguccugggacugcaucaugaccagcuaccaguaccucaucauccagaacaccaccugggaggaccacugccaguucucccgccccagccccaucggcuaccuggggcugcucagccagcggacgcgcgacaucuacaucucccggcgccgccggggcaccuucaccuggacccucagcgacuccgagggcaacgagacgcccgggggcuacugccugacccgguggaugcugaucgaggccgagcucaagugcuucgggaacaccgccguggccaagugcaacgagaagcacgacgaggaguucugcgacaugcugcgccuguucgacuucaacaagcaggcgaucaagcggcucaagacccccgcccagaugagcauccagcugaucaacaaggccgugaacgcccugaucaacgaccagcucaucaugaagaaccaccuccgcgacaucaugugcauccccuacugcaacuacuccaaguacugguaccugaaccacacggucaccgggaagaccagccugccccggugcuggcugguguccaacggcagcuaccugaacgagacccacuucuccgacgacaucgagcagcaggccgacaacaugaucacggagcuccugcagaaggaguacaucgaccgccagggcaagaccccgcuggggcucguggaccuguucgucuucagcaccuccuucuaccugaucagcaucuuccugcaccucgugaagaucccgacccaccggcacguggucggcaagcccugccccaagccccaccgccugaaccacauggggaucugcuccugcggccuguacaagcacccgggggugcccgugaaguggaagcggugaggacuagucccuguucccagagcccacuuuuuuuucuuuuuuugaaauaaaauagccugucuuucagaucucaaaggcucuuuucagagccaccaaaaaaaaaaaaaaaaaaaaaaaaaaaaaaaaaaaaaaaaaaaaaaaaaaaaaaaaaaaaaaaaagaauu

SEQ ID NO: 15609 - RNA, 1733 nt, Artificial Sequence
  mRNA product Design a-2 (hSL-A64-N5) comprising derived and/or modified sequence from LASV(LASV221-NIG-2010;Clade II)__AIT17624__GPCmut1 (opt1)
aggagaguccgcucagccagguugcagaagcggcuuagcguguguccuaaucuucucucugcguguagguaggccugugccgcaaacaagcuuaccaugggccagaucaucaccuucuuccaggaggugccccacgucaucgaggaggugaugaacaucgugcugaucgcccucagccugcuggccauccucaaggggaucuacaacgucgcgaccugcggccuguucgggcugguguccuuccuccugcugugcggccgcagcugcuccacgaccuacaaggggguguacgagcuccagacccuggagcuggacauggccagccucaacaugaccaugccgcuguccugcacgaagaacaacagccaccacuacaucauggucggcaacgagaccggccuggagcucacccugaccaacacguccaucaucaaccacaaguucugcaaccugagcgacgcccacaagaagaaccucuacgaccacgcccugauguccaucaucagcaccuuccaccuguccauccccaacuucaaccaguacgaggccaugagcugcgacuucaacgggggcaagaucuccgugcaguacaaccucagccacaccuacgcgaucgacgccgccaaccacugcgggaccaucgccaacggcgugcugcagacguucaugcggauggcguggggcggguccuacaucgcccuggacagcggcugcggguccugggacugcaucaugaccagcuaccaguaccucaucauccagaacaccaccugggaggaccacugccaguucucccgccccagccccaucggcuaccuggggcugcucagccagcggacgcgcgacaucuacaucucccggcgccgccggggcaccuucaccuggacccucagcgacuccgagggcaacgagacgcccgggggcuacugccugacccgguggaugcugaucgaggccgagcucaagugcuucgggaacaccgccgucgccaagugcaacgagaagcacgacgaggaguucugcgacaugcugcgccuguucgacuucaacaagcaggcgauccggcgccucaagacccccgcccagaugagcauccagcugaucaacaaggccgugaacgcccugaucaacgaccagcucaucaugaagaaccaccuccgggacaucaugugcauccccuacugcaacuacuccaaguacugguaccugaaccacacggugaccgggaagaccagccugccccgcugcuggcuggucuccaacggcagcuaccugaacgagacccacuucuccgacgacaucgagcagcaggccgacaacaugaucacggagaugcuccagaaggaguacauggaccggcagggcaagaccccgcuggggcugguggaccucuucguguucagcaccuccuucuaccugaucagcaucuuccugcaccuggucaagaucccgacccaccgccacgugaucggcaagcccugccccaagccccaccggcucaaccacauggggaucugcuccugcggccuguacaagcacccgggggugcccgucaaguggaagcgcugaggacuagucccuguucccagagcccacuuuuuuuucuuuuuuugaaauaaaauagccugucuuucagaucucaaaggcucuuuucagagccaccaaaaaaaaaaaaaaaaaaaaaaaaaaaaaaaaaaaaaaaaaaaaaaaaaaaaaaaaaaaaaaaaagaauu

SEQ ID NO: 15610 - RNA, 1733 nt, Artificial Sequence
  mRNA product Design a-2 (hSL-A64-N5) comprising derived and/or modified sequence from LASV(LASV237-NIG-2010;Clade II)__AIT17638__GPCmut1 (opt1)
aggagaguccgcucagccagguugcagaagcggcuuagcguguguccuaaucuucucucugcguguagguaggccugugccgcaaacaagcuuaccaugggccagaucaucaccuucuuccaggaggugccccacgucaucgaggaggugaugaacaucgugcugaucgcccucagccugcuggccauccucaaggggaucuacaacgucgcgaccugcggccuguucgggcugguguccuuccuccugcugugcggccgcagcugcuccacgaccuacaaggggguguacgagcuccagacccuggagcuggacauggccagccucaacaugaccaugccgcuguccugcacgaagaacaacagccaccacuacaucauggucggcaacgagaccggccuggagcucacccugaccaacacguccaucaucaaccacaaguucugcaaccugagcgacgcccacaagaaggaccucuacgaccacgcccugauguccaucaucagcaccuuccaccuguccauccccaacuucaaccaguacgaggccaugagcugcgacuucaacgggggcaagaucuccgugcaguacaaccucagccacaccuacgcgguggacgccgccaaccacugcgggaccaucgccaacggcguccugcagacguucaugcggauggcguggggcggguccuacaucgcccuggacagcggcugcggguccugggacugcaucaugaccagcuaccaguaccucaucauccagaacaccaccugggaggaccacugccaguucucccgccccagccccaucggcuaccuggggcugcucagccagcggacgcgcgacaucuacaucucccggcgccgccggggcaccuucaccuggacccucagcgacuccgagggcaacgagacgcccgggggcuacugccugacccgguggaugcugaucgaggccgagcucaagugcuucgggaacaccgccguggccaagugcaacgagaagcacgacgaggaguucugcgacaugcugcgccuguucgacuucaacaagcaggcgauccggcgccucaagacccccgcccagaugagcauccagcugaucaacaaggccgugaacgcccugaucaacgaccagcucaucaugaagaaccaccuccgggacaucaugugcauccccuacugcaacuacuccaaguacugguaccugaaccacacggucaccgggaagaccagccugccccgcugcuggcugguguccaacggcagcuaccugaacgagacccacuucuccgacgacaucgagcagcaggccgacaacaugaucacggagcuccugcagaaggaguacauggaccggcagggcaagaccccgcuggggcucguggaccuguucgucuucagcaccuccuucuaccugaucagcaucuuccugcaccucaucaagaucccgacccaccgccacaucacgggcaagcccugccccaagccccaccggcugaaccacauggggaucugcuccugcggccuguacaagcacccgggggugcccgugaaguggaagcgcugaggacuagucccuguucccagagcccacuuuuuuuucuuuuuuugaaauaaaauagccugucuuucagaucucaaaggcucuuuucagagccaccaaaaaaaaaaaaaaaaaaaaaaaaaaaaaaaaaaaaaaaaaaaaaaaaaaaaaaaaaaaaaaaaagaauu

SEQ ID NO: 15611 - RNA, 1733 nt, Artificial Sequence
  mRNA product Design a-2 (hSL-A64-N5) comprising derived and/or modified sequence from LASV(LASV253-NIG-2011;Clade II)__AIT17670__GPCmut1 (opt1)
aggagaguccgcucagccagguugcagaagcggcuuagcguguguccuaaucuucucucugcguguagguaggccugugccgcaaacaagcuuaccaugggccagaucaucaccuucuuccaggaggugccccacgucaucgaggaggugaugaacaucgugcugaucgcccucagccugcuggccauccucaaggggaucuacaacgucgcgaccugcggccuguucgggcugguguccuuccuccugcugugcggccgcagcugcuccacgaccuacaaggggguguacgagcuccagacccuggagcuggacauggccagccucaacaugaccaugccgcuguccugcacgaagaacaacagccaccacuacaucauggucggcaacgagaccggccuggagcucacccugaccaacacguccaucaucaaccacaaguucugcaaccugagcgacgcccacaagaagaaccucuacgaccacgcccugauguccaucaucagcaccuuccaccuguccauccccaacuucaaccaguacgaggccaugagcugcgacuucaacgggggcaagaucuccgugcaguacaaccucagccacaccuacgcgguggacgccgccaaccacugcgggaccaucgccaacggcguccugcagacguucaugcggauggcguggggcggguccuacaucgcccuggacagcggcugcggguccugggacugcaucaugaccagcuaccaguaccucaucauccagaacaccaccugggaggaccacugccaguucucccgccccagccccaucggcuaccuggggcugcucagccagcggacgcgcgacaucuacaucucccggcgccgccggggcaccuucaccuggacccucagcgacuccgagggcaacgagacgcccgggggcuacugccugacccgguggaugcugaucgaggccgagcucaagugcuucgggaacaccgccguggccaagugcaacgagaagcacgacgaggaguucugcgacaugcugcgccuguucgacuucaacaagcaggcgauccggcgccucaaggcccccgcccagaugagcauccagcugaucaacaaggccgugaacgcccugaucaacgaccagcucaucaugaagaaccaccuccgggacaucaugugcaucccguacugcaacuacuccaaguacugguaccugaaccacaccgucacggggcgcaccagccugccccggugcuggcugguguccaacggcagcuaccugaacgagacccacuucuccgacgacaucgagcagcaggcggacaacaugaucaccgagcuccugcagaaggaguacaucgaccgccagggcaagacgccccuggggcucguggaccuguucgucuucagcaccuccuucuaccugaucagcaucuuccugcaccucgugaagaucccgacccaccggcacaucaucggcaagcccugccccaagccccaccgccugaaccacauggggaucugcuccugcggccuguacaagcacccgggggugcccgucaaguggaagcggugaggacuagucccuguucccagagcccacuuuuuuuucuuuuuuugaaauaaaauagccugucuuucagaucucaaaggcucuuuucagagccaccaaaaaaaaaaaaaaaaaaaaaaaaaaaaaaaaaaaaaaaaaaaaaaaaaaaaaaaaaaaaaaaaagaauu

SEQ ID NO: 15612 - RNA, 1733 nt, Artificial Sequence
  mRNA product Design a-2 (hSL-A64-N5) comprising derived and/or modified sequence from LASV(LASV254-NIG-2011;Clade II)__AIT17674__GPCmut1 (opt1)
aggagaguccgcucagccagguugcagaagcggcuuagcguguguccuaaucuucucucugcguguagguaggccugugccgcaaacaagcuuaccaugggccagaucaucaccuucuuccaggaggugccccacgucaucgaggaggugaugaacaucgugcugaucgcccucagccugcuggccauccucaaggggaucuacaacgucgcgaccugcggccuguucgggcugguguccuuccuccugcugugcggccgcagcugcuccacgaccuacaaggggguguacgagcuccagacccuggagcuggacaugaccaaccucaacaugacgaugccgcugagcugcaccaagaacaacucccaccacuacaucauggucggcaacgagaccggccuggagcucacccugacgaacaccagcaucaucaaccacaaguucugcaaccuguccgacgcccacaagaagaaccucuacaaccacgcccugaugagcaucaucuccaccuuccaccugagcauccccaacuucaaccaguacgaggccauguccugcgacuucaacgggggcaagaucagcgugcaguacaaccucucccacagcuacgccguggacgcggccaaccacugcgggaccaucgccaacggcguccugcagacguucaugcggauggccuggggcggguccuacaucgcgcuggacagcggcugcgggaacugggacugcaucaugaccuccuaccaguaccucaucauccagaacaccaccugggaggaccacugccaguucagccgccccucccccaucggcuaccuggggcugcucagccagcggacgcgcgacaucuacaucagccggcgccgccggggcaccuucaccuggacccucuccgacagcgagggcaacgagacgcccgggggcuacugccugacccgguggaugcugaucgaggccgagcucaagugcuucgggaacaccgccguggccaagugcaacgagaagcacgacgaggaguucugcgacaugcugcgccuguucgacuucaacaagcaggccauccggcgccucaagacccccgcgcaggccaacauccagcugaucaacaaggccgugaacgcccugaucaacgaccagcucaucaugaagaaccaccuccgggacaucaugugcauccccuacugcaacuacuccaaguacugguaccugaaccacacggucaccgggaagaccagccugccccgcugcuggcugguguccaacggcagcuaccugaacgagacccacuucuccgacgacaucgagcagcaggccgacaacaugaucacggagcuccugcagaaggaguacauggaccggcagggcaagaccccgcuggggcucguggaccuguucgucuucagcaccuccuucuaccugaucagcaucuuccugcaccucgugaagaucccgacccaccgccacgugaucggcaagcccugccccaagccccaccggcugaaccacauggggaucugcuccugcggccuguacaagcacccggggguccccgugaaguggaagcgcugaggacuagucccuguucccagagcccacuuuuuuuucuuuuuuugaaauaaaauagccugucuuucagaucucaaaggcucuuuucagagccaccaaaaaaaaaaaaaaaaaaaaaaaaaaaaaaaaaaaaaaaaaaaaaaaaaaaaaaaaaaaaaaaaagaauu

SEQ ID NO: 15613 - RNA, 1733 nt, Artificial Sequence
  mRNA product Design a-2 (hSL-A64-N5) comprising derived and/or modified sequence from LASV(Nig08-A19;Clade III)__ADU56618__GPCmut1 (opt1)
aggagaguccgcucagccagguugcagaagcggcuuagcguguguccuaaucuucucucugcguguagguaggccugugccgcaaacaagcuuaccaugggccagaucgugaccuucuuccaggaggucccccacgugaucgaggaggugaugaacaucguccugaucgcccucagcauccuggccauccugaaggggcucuacaacaucgcgaccugcggccugaucgggcuggugacguuccuccugcuguccggccgcagcugcuccaugaccuacaaggggguguacgagcuccagacccuggagcugaacaugaacacccucaacaugacgaugccgcugagcugcaccaagaacaacucccaccacuacaucauggucggcaacgagaccggccuggagcucacccugacgaacaccagccugcuccaccacaaguucugcaaccuguccgacgcccacaagaagaaccuguacgaccacacccucaugagcaucaucuccaccuuccaccugagcauccccaacuucaaccaguacgaggccauguccugcgacuucaacgggggcaagaucacggugcaguacaaccugagccacuccuacgccaucgacgccgcgaaccacugcgggaccguggccaacggcguccuccagaccuucaugcggauggccuggggcgggagcuacaucgcccuggacuccggcugcgggaagugggacugcaucaugaccagcuaccaguaccugaucauccagaacacgaccugggaggaccacugccaguucucccggcccagccccaucggcuaccucgggcugcugucccagcgcacccgggacaucuacaucagccgccggcgccggggcaccuucacguggacccugagcgacuccgagggcaacgagacccccgggggcuacugccucacccgcuggaugcugaucgaggcggagcugaagugcuucgggaacacggccguggccaagugcaacgagaagcacgacgaggaguucugcgacaugcuccggcuguucgacuucaacaagcaggccauccgccggcugaaggcccccgcgcagaugagcauccagcucaucaacaaggccgugaacgcccugaucaacgaccagcugaucaugaagaaccaccuccgcgacaucaugugcauccccuacugcaacuacuccaaguacugguaccugaaccacaccagcaccgggcggaccucccugccccgcugcuggcucgucagcaacggcuccuaccugaacgagacgcacuucagcgacgacaucgagcagcaggccgacaacaugaucaccgagaugcugcagaaggaguaccucgaccggcagggcaagaccccgcuggggcugguggaccuguucguguucuccaccagcuucuaccucaucuccaucuuccugcaccuggucaagaucccgacgcaccgccacaucgugggcaagcccugccccaagccccaccggcucaaccacauggggaucugcagcugcggccuguacaagcagccgggggugcccguccgcuggaagcggugaggacuagucccuguucccagagcccacuuuuuuuucuuuuuuugaaauaaaauagccugucuuucagaucucaaaggcucuuuucagagccaccaaaaaaaaaaaaaaaaaaaaaaaaaaaaaaaaaaaaaaaaaaaaaaaaaaaaaaaaaaaaaaaaagaauu

SEQ ID NO: 15614 - RNA, 1736 nt, Artificial Sequence
  mRNA product Design a-2 (hSL-A64-N5) comprising derived and/or modified sequence from LASV(G1180-SLE-2010;Clade IV)__AIT17168__GPCmut1 (opt1)
aggagaguccgcucagccagguugcagaagcggcuuagcguguguccuaaucuucucucugcguguagguaggccugugccgcaaacaagcuuaccaugggccagaucgugaccuucuuccaggaggucccccacgugaucgaggaggugaugaacaucguccugaucgcccucagcauccuggccgugcugaaggggcucuacaacuucgcgaccugcggccugguggggcugcucaccuuccugcugcucugcggccgcuccugcaccgccagccgguacaagggggucuacgagcugcagacccuggagcucaacauggagacccugaacaugacgaugccgcuguccugcaccaagaacaacagccaccacuacaucauggugggcaacgagaccggccucgagcugacccugacgaacaccuccaucaucaaccacaaguucugcaaccucagcgacgcccacaagaagaaccuguacgaccacgcccugauguccaucaucagcaccuuccaccucuccauccccaacuucaaccaguacgaggccaugagcugcgacuucaacgggggcaagaucuccgugcaguacaaccugagccacuccuacgcgggggacgccgccaaccacugcggcaccgucgccaacggggugcugcagacguucaugcgcauggcguggggcggcagcuacaucgcccucgacuccgggugcggcagcugggacugcaucaugaccuccuaccaguaccugaucauccagaacaccaccugggaggaccacugccaguucagccggcccucccccaucggguaccugggccuccugagccagcgcacgcgggacaucuacaucagccgccggcgccggggcaccuucaccuggacccuguccgacagcgaggggaaggacacgccgggcggguacugccugacccgcuggaugcucaucgaggccgagcugaagugcuucggcaacaccgccguggccaagugcaacgagaagcacgacgaggaguucugcgacaugcugcggcuguucgacuucaacaagcaggcgauccagcgccugaaggcccccgcccagauguccauccagcugaucaacaaggccgucaacgcccucaucaacgaccagcugaucaugaagaaccaccuccgggacaucaugugcauccccuacugcaacuacagcaaguacugguaccucaaccacaccacgaccggcaagaccucccugcccaagugcuggcuggugagcaacggcuccuaccucaacgagacccacuucagcgacgacaucgagcagcaggcggacaacaugaucacggagaugcugcagaaggaguacauggagcgccaggggaagacgccccugggccucguggaccuguucgucuucuccaccagcuucuaccugaucuccaucuuccugcaccucgugaagaucccgacccaccggcacaucgugggcaagagcugccccaagccccaccgccugaaccacauggggaucugcuccugcgggcuguacaagcagcccggcgucccggugaaguggaagcggugaggacuagucccuguucccagagcccacuuuuuuuucuuuuuuugaaauaaaauagccugucuuucagaucucaaaggcucuuuucagagccaccaaaaaaaaaaaaaaaaaaaaaaaaaaaaaaaaaaaaaaaaaaaaaaaaaaaaaaaaaaaaaaaaagaauu

SEQ ID NO: 15615 - RNA, 1736 nt, Artificial Sequence
  mRNA product Design a-2 (hSL-A64-N5) comprising derived and/or modified sequence from LASV(G1442-SLE-2011;Clade IV)__AIT17180__GPCmut1 (opt1)
aggagaguccgcucagccagguugcagaagcggcuuagcguguguccuaaucuucucucugcguguagguaggccugugccgcaaacaagcuuaccaugggccagaucgugaccuucuuccaggaggucccccacgugaucgaggaggugaugaacaucguccugaucgcccucagcauccuggccgugcugaaggggcucuacaacguggcgaccugcggccugaucgggcuggucacguuccuccugcugugcggccgcuccugcaccaccacccucuacaaggggguguacgagcugcagacgcuggagcucaacauggagacccugaacaugaccaugccgcugagcugcaccaagaacaacucccaccacuacauccgggugggcaacgagacgggccucgagcugacccugaccaacaccagcaucaucaaccacaaguucugcaaccucuccgacgcccacaagaagaaccuguacgaccacgcccugaugagcaucaucuccacguuccaccucagcauccccaacuucaaccaguacgaggccauguccugcgacuucaacgggggcaagaucagcguccaguacaaccugucccacagcuacgccggggacgcggccaaccacugcggcaccguggccaacggggugcugcagaccuucaugcgcauggccuggggcggcuccuacaucgcgcucgacagcgggugcggcaacugggacugcaucaugaccuccuaccaguaccugaucauccagaacacgaccugggacgaccacugccaguucagccgccccucccccaucggguaccugggccuccugagccagcggacccgcgacgucuacaucucccggcgccgccggggcaccuucacguggacccugagcgacagcgaggggaaggacaccccgggcggguacugccugacccgguggaugcucaucgaggccgagcugaagugcuucggcaacacggccguggccaagugcaacgagaagcacgacgaggaguucugcgacaugcugcgccucuucgacuucaacaagcaggccauccagcggcugaaggcgcccgcccagauguccauccagcugaucaacaaggccgugaacgcccucaucaacgaccagcugaucaugaagaaccaccuccgcgacaucaugugcauccccuacugcaacuacagcaaguacugguaccugaacaacaccgccaccggcaagaccucccugcccaagugcuggcugaucagcaacggcuccuaccucaacgagacgcacuucagcgacgacaucgagcaggaggcggacaacaugaucaccgagaugcugcagaaggaguacauggagcggcaggggaagacgccccugggccucgucgaccuguucguguucuccaccagcuucuaccugaucuccaucuuccugcaccucgugaagaucccgacccaccgccacaucgucggcaagagcugccccaagccccaccggcugaaccacauggggaucugcuccugcgggcuguacaagcagcccggcgugccggugcgcuggaagcggugaggacuagucccuguucccagagcccacuuuuuuuucuuuuuuugaaauaaaauagccugucuuucagaucucaaaggcucuuuucagagccaccaaaaaaaaaaaaaaaaaaaaaaaaaaaaaaaaaaaaaaaaaaaaaaaaaaaaaaaaaaaaaaaaagaauu

SEQ ID NO: 15616 - RNA, 1736 nt, Artificial Sequence
  mRNA product Design a-2 (hSL-A64-N5) comprising derived and/or modified sequence from LASV(G3010-SLE-2013;Clade IV)__AIT17344__GPCmut1 (opt1)
aggagaguccgcucagccagguugcagaagcggcuuagcguguguccuaaucuucucucugcguguagguaggccugugccgcaaacaagcuuaccaugggccagaucgugaccuucuuccaggaggucccccacgugaucgaggaggugaugaacaucguccugaucgcccucagcauccuggccgugcugaaggggcucuacaacuucgcgaccugcggccugguggggcuggucacguuccuccugcugugcggccgcuccugcaccaccagccucuacaaggggguguacgagcugcagacccuggagcucaacauggagacgcugaacaugaccaugccgcuguccugcaccaagaacaacagccaccacuacaucauggugggcaacgagaccggccucgagcugacgcugaccaacaccuccaucaucaaccacaaguucugcaaccucagcgacgcccacaagaagaaccuguacaaccacgcccugauguccaucaucagcaccuuccaccucuccauccccaacuucaaccaguacgaggccaugagcugcgacuucaacgggggcaagaucuccguccaguacaaccugagccacuccuacgccggggacgcggccagccacugcggcacgguggccaacggggugcugcagaccuucaugcggauggccuggggcggcuccuacaucgcgcucgacagcgggugcggcaagugggacugcaucaugaccuccuaccaguaccugaucauccagaacaccacgugggaggaccacugccaguucagccgccccucccccaucggguaccugggccuccugagccagcggacccgcgacaucuacaucagccggcgccgccggggcaccuucaccuggacgcuguccgacagcgaggggaaggacaccccgggcggguacugccugacccgguggaugcucaucgaggccgagcugaagugcuucggcaacaccgccgucgccaagugcaacgagaagcacgacgaggaguucugcgacaugcugcgccucuucgacuucaacaagcaggccauccagcggcugaagacgcccgcgcagauguccauccagcugaucaacaaggccgugaacgcccucaucaacgaccagcugaucaugaagaaccaccuccgcgacaucaugugcauccccuacugcaacuacagcaaguacugguaccugaaccacaccaccaccggcaagacgucccugcccaagugcuggcuggugagcaacggcuccuaccucaacgagacccacuucagcgacgacaucgagcagcaggccgacaacaugaucaccgagaugcugcagaaggaguacauggagcggcaggggaagacgccccugggccucgucgaccuguucguguucuccaccagcuucuaccugaucuccaucuuccugcaccucgugaagaucccgacccaccgccacaucgucggcaagagcugccccaagccccaccggcugaaccacauggggaucugcuccugcgggcuguacaagcagcccggcgugccggugcgcuggaagcggugaggacuagucccuguucccagagcccacuuuuuuuucuuuuuuugaaauaaaauagccugucuuucagaucucaaaggcucuuuucagagccaccaaaaaaaaaaaaaaaaaaaaaaaaaaaaaaaaaaaaaaaaaaaaaaaaaaaaaaaaaaaaaaaaagaauu

SEQ ID NO: 15617 - RNA, 1736 nt, Artificial Sequence
  mRNA product Design a-2 (hSL-A64-N5) comprising derived and/or modified sequence from LASV(G502-SLE-2009;Clade IV)__AIT17126__GPCmut1 (opt1)
aggagaguccgcucagccagguugcagaagcggcuuagcguguguccuaaucuucucucugcguguagguaggccugugccgcaaacaagcuuaccaugggccagaucgugaccuucuuccaggaggucccccacgugaucgaggaggugaugaacaucguccugaucgcccucagcauccuggccgugcugaaggggcucuacaacuucgcgaccugcggccugguggggcugcucacguuccugcugcucugcggccgcuccugcaccaccgggcuguacaagggcgucuacgagcugcagacccucgagcugaacauggagacgcugaacaugaccaugccgcucagcugcaccaagaacaacucccaccacuacaucauggugggcaacgagaccgggcuggagcugacgcucaccaacaccagcaucaucaaccacaaguucugcaaccuguccgacgcccacaagaagaaccuguacgaccacgcccucaugagcaucaucuccaccuuccaccugagcauccccaacuucaaccaguacgaggccauguccugcgacuucaacggcgggaagaucagcgugcaguacaaccugucccacagcuacgccggcgacgcggccgaccacugcgggacggucgccaacggcgugcuccagaccuucaugcggauggccuggggcggguccuacaucgcgcuggacagcggcugcgggcggugggacugcaucaugaccuccuaccaguaccugaucauccagaacaccacgugggaggaccacugccaguucagccgccccucccccaucggcuaccucggccugcugagccagcggacccgcgacaucuacaucucccggcgccgccgggggaccuucaccuggacgcugagcgacagcgagggcaaggacacccccgggggcuacugccucacccgguggaugcugaucgaggccgagcugaagugcuucgggaacaccgccguggccaagugcaacgagaagcacgacgaggaguucugcgacaugcuccgccuguucgacuucaacaagcaggccauccagcggcugaaggcgcccgcccagauguccauccagcucaucaacaaggccgucaacgcccugaucaacgaccagcuggugaugaagaaccaccuccgcgacaucaugugcauccccuacugcaacuacagccgguacugguaccugaaccacacgaccaccggccgcaccucccugcccaagugcuggcucgugagcaacggguccuaccugaacgagacgcacuucagcgacgacaucgagcagcaggccgacaacaugaucaccgagaugcugcagaaggaguacauggagcggcagggcaagaccccgcucgggcuggucgaccuguucguguucuccaccagcuucuaccugaucuccaucuuccuccaccuggugaagaucccgacgcaccgccacaucgucggcaagagcugccccaagccccaccggcugaaccacauggggaucugcuccugcggccucuacaagcagcccggcgugccggugaaguggaagcgcugaggacuagucccuguucccagagcccacuuuuuuuucuuuuuuugaaauaaaauagccugucuuucagaucucaaaggcucuuuucagagccaccaaaaaaaaaaaaaaaaaaaaaaaaaaaaaaaaaaaaaaaaaaaaaaaaaaaaaaaaaaaaaaaaagaauu

SEQ ID NO: 15618 - RNA, 1736 nt, Artificial Sequence
  mRNA product Design a-2 (hSL-A64-N5) comprising derived and/or modified sequence from LASV(G733-SLE-2010;Clade IV)__AIT17154__GPCmut1 (opt1)
aggagaguccgcucagccagguugcagaagcggcuuagcguguguccuaaucuucucucugcguguagguaggccugugccgcaaacaagcuuaccaugggccagaucgugaccuucuuccaggaggucccccacgugaucgaggaggugaugaacaucguccugaucgcccucagcauccuggccgugcugaaggggcucuacaacuucgcgaccugcggcaucguggggcuggucuccuuccugcuccugugcggccgcagcugcacgaccucccuguacaaggggguguacgagcuccagacccuggagcugaacauggagacccucaacaugacgaugccgcugagcugcaccaagaacaacucccaccacuacaucauggugggcaacgagaccggccuggagcucacccugacgaacaccagcaucaucaaccacaaguucugcaaccuguccgacgcccacaagaagaaccucuacgaccacgcccugaugagcaucaucuccaccuuccaccugagcauccccaacuucaaccaguacgaggccauguccugcgacuucaacgggggcaagaucagcguccaguacaaccucucccacagcuacgccggggacgcggccaaccacugcggcaccaucgccaacggggugcugcagacguucaugcggauggccuggggcggcuccuacaucgcgcuggacagcgggugcgaccggugggacugcaucaugaccuccuaccaguaccucaucauccagaacaccaccugggaggaccacugccaguucagccgccccucccccaucggcuaccuggggcugcucagccagcggacgcgcgacaucuacaucagccggcgccgccggggcaccuucaccuggacccucuccgacagcgagggcaaggacacgcccgggggcuacugccugacccgguggaugcugaucgaggccgagcucaagugcuucgggaacaccgccguggccaagugcaacgagaagcacgacgaggaguucugcgacaugcugcgccuguucgacuucaacaagcaggccauccagcggcucaaggcgcccgcccagauguccauccagcugaucaacaaggccgucaacgcccugaucaacgaccagcucaucaugaagaaccaccuccgcgacaucaugugcauccccuacugcaacuacagcaaguacugguaccugaaccacaccacgaccgggaagaccucccugcccaagugcuggcuggugagcaacggcuccuaccugaacgagacccacuucagcgacgacaucgagcagcaggccgacaacaugaucacggagaugcuccagaaggaguacauggagcggcagggcaagaccccgcuggggcugguggaccucuucgucuucuccaccagcuucuaccugaucuccaucuuccugcaccuggugaagaucccgacccaccgccacguggucggcaagagcugccccaagccccaccggcucaaccacauggggaucugcuccugcggccuguacgggcagcccggcgugccggugaaguggaagcgcugaggacuagucccuguucccagagcccacuuuuuuuucuuuuuuugaaauaaaauagccugucuuucagaucucaaaggcucuuuucagagccaccaaaaaaaaaaaaaaaaaaaaaaaaaaaaaaaaaaaaaaaaaaaaaaaaaaaaaaaaaaaaaaaaagaauu

SEQ ID NO: 15619 - RNA, 1736 nt, Artificial Sequence
  mRNA product Design a-2 (hSL-A64-N5) comprising derived and/or modified sequence from MOPV/LASV reassortant(IGS-1;Clade IV)__AFY05576__GPCmut1 (opt1)
aggagaguccgcucagccagguugcagaagcggcuuagcguguguccuaaucuucucucugcguguagguaggccugugccgcaaacaagcuuaccaugggccagaucgugaccuucuuccaggaggucccccacgugaucgaggaggugaugaacaucguccugaucgcccucagcgugcuggccgugcugaaggggcucuacaacuucgcgaccugcggccuggucgggcuggugacguuccuccugcugugcggccgcuccugcaccaccagccucuacaaggggguguacgagcugcagacccuggagcucaacauggagacgcugaacaugaccaugccgcuguccugcaccaagaacaacagccaccacuacaucauggucggcaacgagaccggccucgagcugacgcugaccaacaccuccaucaucaaccacaaguucugcaaccucagcgacgcccacaagaagaaccuguacgaccacgcccugauguccaucaucagcaccuuccaccucuccauccccaacuucaaccaguacgaggccaugagcugcgacuucaacgggggcaagaucuccgugcaguacaaccugagccacuccuacgccggggacgcggccaaccacugcggcacgguggccaacgggguccugcagaccuucaugcggauggccuggggcggcagcuacaucgcgcucgacuccgggugcggcaacugggacugcaucaugaccagcuaccaguaccugaucauccagaacaccacgugggaggaccacugccaguucucccggcccagccccaucggguaccugggccuccugucccagcgcacccgggacaucuacaucagccgccggcgccggggcaccuucaccuggacgcugagcgacuccgagggggaggacaccccgggcggguacugccugacccgcuggaugcucaucgaggccgagcugaagugcuucggcaacaccgccguggccaagugcaacgagaagcacgacgaggaguucugcgacaugcugcggcuguucgacuucaacaagcaggccauccagcgccugaaggcgcccgcccagaugagcauccagcugaucaacaaggccgugaacgcccucaucaacgaccagcugaucaugaagaaccaccuccgggacaucaugugcauccccuacugcaacuacuccaaguacugguaccucaaccacacgaccaccggccgcaccagccugcccaagugcuggcuggucuccaacggcagcuaccucaacgagacgcacuucuccgacgacaucgagcagcaggccgacaacaugaucaccgagaugcugcagaaggaguacauggagcggcaggggaagacgccccugggccucguggaccuguucguguucagcaccuccuucuaccugaucagcaucuuccugcaccucgucaagaucccgacccaccgccacaucguggggaaguccugccccaagccccaccggcugaaccacaugggcaucugcagcugcgggcuguacaagcagcccggcgugccggucaaguggaagcgcugaggacuagucccuguucccagagcccacuuuuuuuucuuuuuuugaaauaaaauagccugucuuucagaucucaaaggcucuuuucagagccaccaaaaaaaaaaaaaaaaaaaaaaaaaaaaaaaaaaaaaaaaaaaaaaaaaaaaaaaaaaaaaaaaagaauu

SEQ ID NO: 15620 - RNA, 1736 nt, Artificial Sequence
  mRNA product Design a-2 (hSL-A64-N5) comprising derived and/or modified sequence from LASV(LM765-SLE-2012;Clade IV)__AIT17814__GPCmut1 (opt1)
aggagaguccgcucagccagguugcagaagcggcuuagcguguguccuaaucuucucucugcguguagguaggccugugccgcaaacaagcuuaccaugggccagaucgugaccuucuuccaggaggucccccacgugaucgaggaggugaugaacaucguccugaucgcccucagcauccuggccgugcugaaggggcucuacaacuucgcgaccugcggccugguggggcuggucacguuccuccugcugugcggccgcuccugcaccaccagccucuacaaggggguguacgagcugcagacccuggagcucaacauggagacgcugaacaugaccaugccgcuguccugcaccaagaacaacagccaccacuacaucauggugggcaacgagaccggccucgagcugacgcugaccaacaccuccaucaucgaccacaaguucugcaaccucagcgacgcccaccggaagaaccuguacgaccacgcccugauguccaucaucagcaccuuccaccucuccauccccaacuucaaccaguacgaggccaugagcugcgacuucaacgggggcaagaucuccguccaguacaaccugagccacuccuacgccaaggacgcggccgaccacugcgggacgguggccaacggcgugcugcagaccuucaugcgcauggccuggggcgggagcuacaucgcgcucgacuccggcugcgggcgcugggacugcaucaugaccagcuaccaguaccugaucauccagaacaccacgugggaggaccacugccaguucucccggcccagccccaucggcuaccuggggcuccugucccagcgcacccgggacaucuacaucagccgccggcgccggggcaccuucaccuggacgcugagcgacuccgagggcaaggacacccccgggggcuacugccugacccgcuggaugcucaucgaggccgagcugaagugcuucgggaacaccgccgucgccaagugcaacgagaagcacgacgaggaguucugcgacaugcugcggcuguucgacuucaacaagcaggccauccagcgccugaaggcgcccgcccagaugagcauccagcugaucaacaaggccgugaacgcccucaucaacgaccagcugaucaugaagaaccaccuccgggacaucaugugcauccccuacugcaacuacuccaaguacugguaccucaaccacacgaccaccgggaagaccagccugcccaagugcuggcugguguccaacggcagcuaccucaacgagacgcacuucuccgacgacaucgagcagcaggccgacaacaugaucaccgagaugcugcagaaggaguacauggagcgccagggcaagaccccgcuggggcucgucgaccuguucguguucagcaccuccuucuaccugaucagcaucuuccugcaccucgugaagaucccgacgcaccggcacaucgucggcaagcccugccccaagccccaccgccugaaccacauggggaucugcuccugcggccuguacaagcagccgggggugcccgugaaguggaagcggugaggacuagucccuguucccagagcccacuuuuuuuucuuuuuuugaaauaaaauagccugucuuucagaucucaaaggcucuuuucagagccaccaaaaaaaaaaaaaaaaaaaaaaaaaaaaaaaaaaaaaaaaaaaaaaaaaaaaaaaaaaaaaaaaagaauu

SEQ ID NO: 15621 - RNA, 1736 nt, Artificial Sequence
  mRNA product Design a-2 (hSL-A64-N5) comprising derived and/or modified sequence from LASV(LM776-SLE-2012;Clade IV)__AIT17824__GPCmut1 (opt1)
aggagaguccgcucagccagguugcagaagcggcuuagcguguguccuaaucuucucucugcguguagguaggccugugccgcaaacaagcuuaccaugggccagaucgugaccuucuuccaggaggucccccacgugaucgaggaggugaugaacaucguccugaucgcccucagcauccuggccgugcugaaggggcucuacaacuucgcgaccugcggccugguggggcuggucacguuccuccugcugugcggccgcuccugcaccaccagcguguacaaggggguguacgagcuccagacccuggagcugaacauggagacgcucaacaugaccaugccgcuguccugcaccaagaacaacagccaccacuacaucauggucggcaacgagaccggccuggagcucacgcugaccaacaccuccaucaucaaccacaaguucugcaaccugagcgacgcccacaagaagaaccucuacgaccacgcccugauguccaucaucagcaccuuccaccuguccauccccaacuucaaccaguacgaggccaugagcugcgacuucaacgggggcaagaucuccgugcaguacaaccucagccacuccuacgccggggacgcggccaaccacugcggcacgguggccaacgggguccugcagaccuucaugcggauggccuggggcggcagcuacaucgcgcuggacuccgggugcggcaagugggacugcaucaugaccagcuaccaguaccucaucauccagaacaccacgugggaggaccacugccaguucucccgccccagccccaucggguaccugggccugcucucccagcggacccgcgacaucuacaucagccggcgccgccggggcaccuucaccuggacgcucagcgacuccgaggggaaggacaccccgggcggguacugccugacccgguggaugcugaucgaggccgagcucaagugcuucggcaacaccgccguggccaagugcaacgagaagcacgacgaggaguucugcgacaugcugcgccuguucgacuucaacaagcaggccauccagcggcucaaggcgcccgcccagaugagcauccagcugaucaacaaggccgugaacgcccugaucaacgaccagcucaucaugaagaaccaccuccgcgacaucaugugcauccccuacugcaacuacuccaaguacugguaccugaaccacacgaccaccggcaagaccagccugcccaagugcuggcuggucuccaacggcagcuaccugaacgagacgcacuucuccgacgacaucgagcagcaggccgacaacaugaucaccgagaugcuccagaaggaguacauggagcggcaggggaagacgccccugggccugguggaccucuucguguucagcaccuccuucuaccugaucagcaucuuccugcaccuggucaagaucccgacccaccgccacaucguggggaaguccugccccaagccccaccggcucaaccacaugggcaucugcagcugcgggcuguacaagcagcccggcgugccgguccgcuggaagcggugaggacuagucccuguucccagagcccacuuuuuuuucuuuuuuugaaauaaaauagccugucuuucagaucucaaaggcucuuuucagagccaccaaaaaaaaaaaaaaaaaaaaaaaaaaaaaaaaaaaaaaaaaaaaaaaaaaaaaaaaaaaaaaaaagaauu

SEQ ID NO: 15622 - RNA, 1736 nt, Artificial Sequence
  mRNA product Design a-2 (hSL-A64-N5) comprising derived and/or modified sequence from LASV(Mad39;Clade IV)__ANH09722__GPCmut1 (opt1)
aggagaguccgcucagccagguugcagaagcggcuuagcguguguccuaaucuucucucugcguguagguaggccugugccgcaaacaagcuuaccaugggccagaucgugaccuucuuccaggaggucccccacgugaucgaggaggugaugaacaucguccugaucgcccucagcauccuggccgugcugaaggggcucuacaacguggcgaccugcggccugaucgggcuggucacguuccuccugcugugcggccgcuccugcaccaccacccucuacaaggggguguacgagcugcaggcccuggagcucaacauggagacgcugaacaugaccaugccgcugagcugcaccaagaacaacucccaccacuacauccgggugggcaacgagaccggccucgagcugacgcugaccaacaccagccucaucaaccacaaguucugcaaccuguccgacgcccacaagaagaaccuguacgaccacgcccucaugagcaucaucuccaccuuccaccugagcauccccaacuucaaccaguacgaggccauguccugcgacuucaacgacgggaagaucagcguccaguacaaccugucccacacguacgcgggcgacaccgccaaccacugcgggaccguggccaacggcgugcuccagaccuucaugcgcauggccuggggcgggagcuacaucgcgcuggacuccggcugcgggggcugggacugcaucaugacgagcuaccaguaccugaucauccagaacaccaccugggaggaccacugccaguucucccggcccagccccaucggguaccucggccugcugucccagcggacccgcgacaucuacaucagccggcgccgccggggcacguucaccuggacccuguccgacagcgaggggaaggacaccccgggcggguacugccucacgcgguggaugcugaucgaggccgagcugaagugcuucggcaacaccgccgucgccaagugcaacgagaagcacgacgaggaguucugcgacaugcuccgccuguucgacuucaacaagcaggccauccagcggcugaaggcgcccgcccagaugagcauccagcucaucaacaaggccgugaacgcccugaucaacgaccagcugaucaugaagaaccaccuccgcgacaucaugugcauccccuacugcaacuacuccaaguacugguaccugaaccacaccgugaccggcaagacgagccugcccaagugcuggcucgucuccaacggcagcuaccugaacgagacccacuucuccgacgacaucgagcagcaggccgacaacaugaucaccgagaugcugcagaaggaguacauggagcggcaggggaagacgccccucggccugguggaccuguucguguucagcaccuccuucuaccugaucagcaucuuccuccaccuggucaagaucccgacccaccgccacgugguggggaagcccugccccaagccccaccggcugaaccacaugggcaucugcuccugcggguucuacaagcagccgggcguccccgugcgcuggaagcggugaggacuagucccuguucccagagcccacuuuuuuuucuuuuuuugaaauaaaauagccugucuuucagaucucaaaggcucuuuucagagccaccaaaaaaaaaaaaaaaaaaaaaaaaaaaaaaaaaaaaaaaaaaaaaaaaaaaaaaaaaaaaaaaaagaauu

SEQ ID NO: 15623 - RNA, 1736 nt, Artificial Sequence
  mRNA product Design a-2 (hSL-A64-N5) comprising derived and/or modified sequence from LASV(Z0947-SLE-2011;Clade IV)__AIT17840__GPCmut1 (opt1)
aggagaguccgcucagccagguugcagaagcggcuuagcguguguccuaaucuucucucugcguguagguaggccugugccgcaaacaagcuuaccaugggccagaucgugaccuucuuccaggaggucccccacgugaucgaggaggugaugaacaucguccugaucgcccucagcauccuggccgugcugaaggggcucuacaacuucgcgaccugcggccugguggggcuggucacguuccuccugcugugcggccgcuccugcaccaucagccucuacaaggggguguacgagcugcagacccuggagcucaacauggagacccugaacaugacgaugccgcuguccugcaccaagaacaacagccaccacuacaucauggugggcaacgagaccggccucgagcugacccugacgaacaccuccaucaucaaccacaaguucugcaaccucagcgacgcccacaagaagaaccuguacgaccacgcccugauguccaucaucagcaccuuccaccucuccauccccaacuucaaccaguacgaggccaugagcugcgacuucaacgggggcaagaucuccguccaguacaaccugagccacuccuacgccggggacgcggccaaccacugcggcaccguggccaacggggugcugcagacguucaugcggauggccuggggcggcagcuacaucgcgcucgacuccgggugcgaccggugggacugcaucaugaccagcuaccaguaccugaucauccagaacaccaccugggaggaccacugccaguucucccgccccagccccaucggcuaccuggggcuccugucccagcggacgcgcgacaucuacaucagccggcgccgccggggcaccuucaccuggacccugagcgacuccgagggcaaggacacgcccgggggcuacugccugacccgguggaugcucaucgaggccgagcugaagugcuucgggaacaccgccgucgccaagugcaacgagaagcacgacgaggaguucugcgacaugcugcgccucuucgacuucaacaagcaggccauccagcggcugaaggcgcccgcccagaugagcauccagcugaucaacaaggccgugaacgcccucaucaacgaccagcugaucaugaagaaccaccuccgcgacaucaugugcauccccuacugcaacuacuccaaguacugguaccugaaccacaccacgaccgggaagaccagccugcccaagugcuggcugguguccaacggcagcuaccucaacgagacccacuucuccgacgacaucgagcagcaggccgacaacaugaucacggagaugcugcagaaggaguacauggagcggcagggcaagaccccgcuggggcucgucgaccuguucguguucagcaccuccuucuaccugaucagcaucuuccugcaccucgugaagaucccgacccaccgccacaucgucggcaagcccugccccaagccccaccggcugaaccacauggggaucugcuccugcggccuguacaagcagccgggggugcccgugaaguggaagcgcugaggacuagucccuguucccagagcccacuuuuuuuucuuuuuuugaaauaaaauagccugucuuucagaucucaaaggcucuuuucagagccaccaaaaaaaaaaaaaaaaaaaaaaaaaaaaaaaaaaaaaaaaaaaaaaaaaaaaaaaaaaaaaaaaagaauu

SEQ ID NO: 15624 - RNA, 1736 nt, Artificial Sequence
  mRNA product Design a-2 (hSL-A64-N5) comprising derived and/or modified sequence from LASV(Josiah;Clade IV)__NP_694870__GPCmut1 (opt1)
aggagaguccgcucagccagguugcagaagcggcuuagcguguguccuaaucuucucucugcguguagguaggccugugccgcaaacaagcuuaccaugggccagaucgugaccuucuuccaggaggucccccacgugaucgaggaggugaugaacaucguccugaucgcccucagcgugcuggccgugcugaaggggcucuacaacuucgcgaccugcggccuggucgggcuggugacguuccuccugcugugcggccgcuccugcaccaccagccucuacaaggggguguacgagcugcagacccuggagcucaacauggagacgcugaacaugaccaugccgcuguccugcaccaagaacaacagccaccacuacaucauggucggcaacgagaccggccucgagcugacgcugaccaacaccuccaucaucaaccacaaguucugcaaccucagcgacgcccacaagaagaaccuguacgaccacgcccugauguccaucaucagcaccuuccaccucuccauccccaacuucaaccaguacgaggccaugagcugcgacuucaacgggggcaagaucuccgugcaguacaaccugagccacuccuacgccggggacgcggccaaccacugcggcacgguggccaacgggguccugcagaccuucaugcggauggccuggggcggcagcuacaucgcgcucgacuccgggugcggcaacugggacugcaucaugaccagcuaccaguaccugaucauccagaacaccacgugggaggaccacugccaguucucccgccccagccccaucggguaccugggccuccugucccagcggacccgcgacaucuacaucagccggcgccggcgcggcaccuucaccuggacgcugagcgacuccgaggggaaggacaccccgggcggguacugccucacccgguggaugcugaucgaggccgagcugaagugcuucggcaacaccgccguggccaagugcaacgagaagcacgacgaggaguucugcgacaugcuccgccuguucgacuucaacaagcaggccauccagcggcugaaggcgcccgcccagaugagcauccagcucaucaacaaggccgugaacgcccugaucaacgaccagcugaucaugaagaaccaccuccgcgacaucaugugcauccccuacugcaacuacuccaaguacugguaccugaaccacacgaccaccgggcggaccagccugcccaagugcuggcucgucuccaacggcagcuaccugaacgagacgcacuucuccgacgacaucgagcagcaggccgacaacaugaucaccgagaugcugcagaaggaguacauggagcgccagggcaagaccccgcucgggcugguggaccuguucguguucagcaccuccuucuaccucaucagcaucuuccugcaccuggucaagauccccacgcaccggcacaucgugggcaaguccugccccaagccccaccgccugaaccacauggggaucugcagcugcggccucuacaagcagccgggggugcccgucaaguggaagcggugaggacuagucccuguucccagagcccacuuuuuuuucuuuuuuugaaauaaaauagccugucuuucagaucucaaaggcucuuuucagagccaccaaaaaaaaaaaaaaaaaaaaaaaaaaaaaaaaaaaaaaaaaaaaaaaaaaaaaaaaaaaaaaaaagaauu

SEQ ID NO: 15625 - RNA, 1733 nt, Artificial Sequence
  mRNA product Design a-2 (hSL-A64-N5) comprising derived and/or modified sequence from LASV(LP;Clade I)__AAF86701__GPCmut1 (opt1)
aggagaguccgcucagccagguugcagaagcggcuuagcguguguccuaaucuucucucugcguguagguaggccugugccgcaaacaagcuuaccaugggccagaucaucaccuucuuccaggaggugccccacgucaucgaggaggugaugaacaucgugcugaucgcccucagccugcuggccauccucaaggggcuguacaacaucgcgaccugcggcaucaucgggcuggucgccuuccucuuccugugcggcaaguccugcagccugacgcucaagggcggguacgagcugcagacccuggagcucaacauggagacccugaacaugaccaugccgcuguccugcacgaagaacagcucccaccacuacauccgcgugggcaacgagaccgggcucgagcugacccugaccaacacgagcaucaucaaccacaaguucugcaaccucuccgacgcccacaagaagaaccuguacgaccacgcccugaugagcaucaucuccaccuuccaccucagcauccccaacuucaaccaguacgaggccauguccugcgacuucaacggcgggaagaucagcgugcaguacaaccugucccacagcuacgcgggcgacgccgccgagcacugcgggaccgucgccaacggcgugcugcagaccuucaugcggauggcguggggcgggcgcuacaucgcccucgacuccggcugcgggaacugggacugcaucaugacgagcuaccaguaccugaucauccagaacaccaccugggaggaccacugccaguucucccggcccagccccaucggcuaccugggccuccugucccagcgcacccgggacaucuacaucagccgccggcgccgggggacguucaccuggacccugagcgacuccgagggcaacgagacccccgggggcuacugccucacgcgcuggaugcugaucgaggccgagcugaagugcuucgggaacaccgccguggccaagugcaacgagaagcacgacgaggaguucugcgacaugcuccggcuguucgacuucaacaagcaggcgauccgccggcugaaggccccggcccagaugagcauccagcucaucaacaaggccgucaacgcccugaucaacgaccagcugaucaugaagaaccaccuccgcgacaucaugugcauccccuacugcaacuacuccaaguacugguaccugaaccacaccagcuccggccggaccagccugcccaagugcuggcucaucuccaacggcagcuaccugaacgagacgcaguucuccgacgacaucgagcagcaggcggacaacaugaucaccgagaugcugcagaaggaguacaucgagcgccaggggaagaccccgcucggccugguggacaucuucaucuucagcaccuccuucuaccugaucagcaucuuccuccaccugaucaagauccccacgcaccggcacaucguggggaagcccugccccaagccgcaccgccugaaccacaugggcgucugcuccugcgggcuguacaagcaccccggcgugcccaccaaguggaagcggugaggacuagucccuguucccagagcccacuuuuuuuucuuuuuuugaaauaaaauagccugucuuucagaucucaaaggcucuuuucagagccaccaaaaaaaaaaaaaaaaaaaaaaaaaaaaaaaaaaaaaaaaaaaaaaaaaaaaaaaaaaaaaaaaagaauu

SEQ ID NO: 15626 - RNA, 1733 nt, Artificial Sequence
  mRNA product Design a-2 (hSL-A64-N5) comprising derived and/or modified sequence from LASV(803213;Clade II)__AAF86703__GPCmut1 (opt1)
aggagaguccgcucagccagguugcagaagcggcuuagcguguguccuaaucuucucucugcguguagguaggccugugccgcaaacaagcuuaccaugggccagaucaucaccuucuuccaggaggugccccacgucaucgaggaggugaugaacaucgugcugaucgcccucagccugcuggccauccucaaggggaucuacaacgucgcgaccugcggccuguucgggcugaucuccuuccuccugcugugcggccgcagcugcuccgugacguacaaggggguguacgagcuccagacccuggagcugaacauggccaaccucaacaugaccaugccgcugagcugcaccaagaacaacucccaccacuacaucauggucggcaacgagacgggccuggagcucacccugaccaacaccagcaucaucaaccacaaguucugcaaccuguccgacgcccacaagaagaaccucuacgaccacgcccugaugagcaucaucuccacguuccaccugagcauccccaacuucaaccaguacgaggccauguccugcgacuucaacgggggcaagaucagcgugcaguacaaccucucccacagcuucgcgguggacgccgccaaccacugcgggaccaucgccaacggcguccugcagaccuucaugcggauggcguggggcggguccuacaucgcccuggacagcggcugcgggaacugggacugcaucaugaccuccuaccaguaccucaucauccagaacacgaccugggaggaccacugccaguucagccgccccucccccaucggcuaccuggggcugcucagccagcggacccgcgacaucuacaucagccggcgccggcgcggcaccuucacguggacccuguccgacagcgagggcaacgaggcccccgggggcuacugccugacccgguggaugcucaucgaggccgagcugaagugcuucgggaacaccgccguggcgaagugcaacgagaagcacgacgaggaguucugcgacaugcugcgccucuucgacuucaacaagcaggccaucaagcggcugaagacgccggcccagauguccauccagcugaucaacaaggccgugaacgcccucaucaacgaccagcugaucaugaagaaccaccuccgcgacaucaugugcauccccuacugcaacuacagccgguacugguaccugaaccacaccgucaccggcaagaccucccugccccgcugcuggcuggugagcaacggguccuaccucaacgagacgcacuucagcgacgacaucgagcagcaggcggacaacaugaucaccgagaugcugcagaaggaguacauggaccggcagggcaagaccccgcugggccucguggaccuguucgucuucuccaccagcuucuaccugaucuccaucuuccuccaccuggugaagauccccacgcaccgccacaucguggggaagcccugccccaagccgcaccggcugaaccacaugggcaucugcagcugcgggcuguacaagcaccccggcguccccgugaaguggaagcgcugaggacuagucccuguucccagagcccacuuuuuuuucuuuuuuugaaauaaaauagccugucuuucagaucucaaaggcucuuuucagagccaccaaaaaaaaaaaaaaaaaaaaaaaaaaaaaaaaaaaaaaaaaaaaaaaaaaaaaaaaaaaaaaaaagaauu

SEQ ID NO: 15627 - RNA, 1733 nt, Artificial Sequence
  mRNA product Design a-2 (hSL-A64-N5) comprising derived and/or modified sequence from LASV(GA391;Clade III)__CAA36645__GPCmut1 (opt1)
aggagaguccgcucagccagguugcagaagcggcuuagcguguguccuaaucuucucucugcguguagguaggccugugccgcaaacaagcuuaccaugggccagaucgugaccuucuuccaggaggucccccacgugaucgaggaggugaugaacaucguccugaucgcccucagcauccuggccauccugaaggggcucuacaacguggcgaccugcggccugaucgggcuggugacguuccuccugcuguccggccgcagcugcucccucaucuacaaggggaccuacgagcugcagacccuggagcucaacauggagacccugaacaugacgaugccgcugagcugcaccaagaacaacucccaccacuacauccgggucggcaacgagaccggccucgagcugacccugacgaacaccagcauccucaaccacaaguucugcaaccuguccgacgcccacaagcgcaaccuguacgaccacagccucauguccaucaucagcaccuuccaccuguccauccccaacuucaaccaguacgaggccaugagcugcgacuucaacgggggcaagaucaccgugcaguacaaccugucccacagcuucgccguggacgccgcggggcacugcggcacgcucgccaacgggguccugcagaccuucaugcggauggccuggggcggcuccuacaucgcccuggacagcgggugcggcaacugggacugcaucaugaccuccuaccaguaccucaucauccagaacaccacgugggacgaccacugccaguucagccgccccucccccaucggguaccugggccugcucagccagcggacccgcgacaucuacaucagccggcgccggcgcggcaccuucaccuggacgcuguccgacagcgaggggaacgagaccccgggcggguacugccugacccgguggaugcucaucgaggcggagcugaagugcuucggcaacaccgccguggccaagugcaacgagaagcacgacgaggaguucugcgacaugcugcgccucuucgacuucaacaagcaggccauccggcgccugaagacgcccgcccagauguccauccagcugaucaacaaggcggugaacgcccucaucaacgaccagcugaucaugaagaaccaccuccgggacaucaugugcauccccuacugcaacuacagccgcuacugguaccugaaccacaccuccaccgggaagaccagccugccccggugcuggcugaucuccaacggcagcuaccucaacgagacgaaguucuccgacgacaucgagcagcaggccgacaacaugaucaccgagaugcugcagaaggaguacaucgaccgccagggcaagaccccgcuggggcucgucgaccuguucguguucagcaccuccuucuaccugaucagcaucuuccugcaccucgugaagauccccacgcaccggcacaucgucggcaagcccugccccaagccgcaccgccugaaccacauggggaucugcuccugcggccuguacaagcagcccggggugcccgugcgguggaagcgcugaggacuagucccuguucccagagcccacuuuuuuuucuuuuuuugaaauaaaauagccugucuuucagaucucaaaggcucuuuucagagccaccaaaaaaaaaaaaaaaaaaaaaaaaaaaaaaaaaaaaaaaaaaaaaaaaaaaaaaaaaaaaaaaaagaauu

SEQ ID NO: 15628 - RNA, 1736 nt, Artificial Sequence
  mRNA product Design a-2 (hSL-A64-N5) comprising derived and/or modified sequence from LASV(AV;Clade V)__CCA30314__GPCmut1 (opt1)
aggagaguccgcucagccagguugcagaagcggcuuagcguguguccuaaucuucucucugcguguagguaggccugugccgcaaacaagcuuaccaugggccagaucgugaccuucuuccaggaggucccccacgugaucgaggaggugaugaacaucguccugaucgcccucagcauccuggccgugcugaaggggcucuacaacaucgcgaccugcggccugaucgggcugaucacguuccuccugcugugcggccgcuccugcagcuccaaccucuacaaggggguguacgagcugcagagccuggaccucaacauggagacccugaacaugaccaugccgcuguccugcaccaagaacaacagccaccacuacauccgggucggcaacgacacgggccucgagcugacccugaccaacaccuccauccucaaccacaaguucugcaaccugagcgacgcccacaagaaggaccuguacgaccacgcccucauguccaucaucagcacguuccaccuguccauccccaacuucaaccaguacgaggccaugagcugcgacuucaacgggggcaagaucuccgugcaguacaaccugagccacuccuacgccaucgacgcggccaaccacugcgggaccguggccaacggcauccuccagaccuucaugcgcauggccuggggcgggagcuacaucgcgcuggacuccggcugcgggaacugggacugcaucaugaccagcuaccaguaccugaucauccagaacacgaccugggagaaccacugccaguucucccggcccagccccaucggcuaccucgggcugcugagccagcgcacccgggacaucuacaucucccgccggcgccggggcaccuucacguggacccucagcgacuccgagggcaacgccacccccgggggcuacugccugacccgcuggaugcugaucgaggccgagcucaagugcuucgggaacacggccgucgccaagugcaacgagaagcacgacgaggaguucugcgacaugcugcggcuguucgacuucaacaagcaggcgaucagccgccucaaguccccggcccagaugagcauccagcugaucaacaaggccgugaacgcccugaucaacgaccagcucaucaugaagaaccaccuccgggacaucaugugcauccccuacugcaacuacuccaaguacugguaccugaaccacaccaucaccggcaagaccagccugcccaagugcuggcugguguccaacgggagcuaccugaacgagacgcacuucuccgacgacaucgagcagcaggccgacaacaugaucaccgagaugcuccagaaggaguacauggagcgccagggcaagaccccgcugggccuggucgaccucuucguguucagcaccuccuucuaccugaucagcaucuuccugcggcuggugaagauccccacgcaccgccacaucgucgggaagcccugccccaagccgcaccggcucaaccacaugggcaucugcuccugcgggcuguacaagcagcccggcgugcccgugcgcuggaagcggugaggacuagucccuguucccagagcccacuuuuuuuucuuuuuuugaaauaaaauagccugucuuucagaucucaaaggcucuuuucagagccaccaaaaaaaaaaaaaaaaaaaaaaaaaaaaaaaaaaaaaaaaaaaaaaaaaaaaaaaaaaaaaaaaagaauu

SEQ ID NO: 15629 - RNA, 1733 nt, Artificial Sequence
  mRNA product Design a-2 (hSL-A64-N5) comprising derived and/or modified sequence from LASV(Togo/2016/7082;Clade VI)__AMR44577__GPCmut1 (opt1)
aggagaguccgcucagccagguugcagaagcggcuuagcguguguccuaaucuucucucugcguguagguaggccugugccgcaaacaagcuuaccaugggccagaucaucaccuucuuccaggaggugccccacgucaucgaggaggugaugaacaucgugcugaucgcccucagccugcuggccauccucaagggggucuacaacguggcgaccugcggcaucaucgggcuggugacguuccuguuccucugcggccgcuccugcagccugaucuacaagggguccuacgagcugcagacccucgagcugaacauggagacccugaacaugaccaugccgcucagcugcacgaagaacuccagccaccacuacauccgggucggcaacgagaccggccuggagcugacccucaccaacacguccaucaucaaccacaaguucugcaaccugagcgacgcccacaagcgcaaccuguacgaccacgcccucauguccauccugagcaccuuccaccuguccauccccaacuucaaccaguacgaggccaugagcugcgacuucaacgggggcaagaucuccgugcaguacaaccucagccacgccuacgcgguggacgccgccgagcacugcgggaccgucgccaacggcgugcugcagaccuucaugcggauggcguggggcggguccuacaucgcccuggacagcggcugcgggaacugggacugcaucaugacguccuaccaguaccucaucauccagaacaccaccugggaggaccacugccaguucagccgccccucccccaucggcuaccuggggcugcucagccagcggacccgcgacaucuacaucagccggcgccggcgcggcacguucaccuggacccuguccgacagcgagggcaacgagacccccgggggcuacugccugacgcgguggaugcucaucgaggccgagcugaagugcuucgggaacaccgccguggccaagugcaacgagaagcacgacgaggaguucugcgacaugcugcgccucuucgacuucaacaagcaggcgauccagcggcugaaguccccggcccagaugagcauccagcugaucaacaaggccgucaacgcccucaucaacgaccagcugaucaugaagaaccaccuccgcgacaugaugugcauccccuacugcaacuacuccaaguacugguaccugaaccacaccagcuccggccggaccagccugcccaagugcuggcugguguccaacgggagcuaccucaacgagacgcacuucuccgacgacaucgagcagcaggccgacaacaugaucaccgagaugcugcagaaggaguacaucgaccgccagggcaagaccccgcugggccucguggaccuguucgucuucagcaccuccuucuaccugaucagcaucuuccuccaccugaucaagauccccacgcaccggcacaucguggggaagcccugccccaagccgcaccgccugaaccacaugggcaucugcuccugcgggcuguacaagcagcccggcgugcccacccgguggaagcgcugaggacuagucccuguucccagagcccacuuuuuuuucuuuuuuugaaauaaaauagccugucuuucagaucucaaaggcucuuuucagagccaccaaaaaaaaaaaaaaaaaaaaaaaaaaaaaaaaaaaaaaaaaaaaaaaaaaaaaaaaaaaaaaaaagaauu

SEQ ID NO: 15630 - RNA, 1733 nt, Artificial Sequence
  mRNA product Design a-2 (hSL-A64-N5) comprising derived and/or modified sequence from LASV(KAK-428;Clade n.d. (VII))__ANH09740__GPCmut1 (opt1)
aggagaguccgcucagccagguugcagaagcggcuuagcguguguccuaaucuucucucugcguguagguaggccugugccgcaaacaagcuuaccaugggccagaucgugaccuucuuccaggaggucccccacgugaucgaggaggugaugaacaucguccugaucgcccucagccugcuggccauccucaaggggcuguacaacuucgcgaccugcggcgugaucgggcugaucacguuccuccugcugugcggccgcuccugcagcgccaccuacaaggggcaguacgagcuccagacccuggagcugaacauggagucccucaacaugaccaugccgcugagcugcacgaagaacaacucccaccacuacauccgggccggcaacaacaccggccuggagcucacccugaccaacacgagcaucaucucccacaaguucugcaaccugagcgacgcccacaagaagaaccucuacgaccacacccugauguccaucaucaccaccuuccaccugagcauccccaacuucaaccaguacgaggccauguccugcgacuucaacgggggcaagaucagcauccaguacaaccucucccacagcuacgcgggggacgccgcccagcacugcggcacgguggccaacgggguccugcagaccuucaugcgcauggcguggggcggcuccuaccuggcccucgacagcgggugccggggcugggacugcaucaucuccagcuaccaguaccugaucauccagaacaccaccugggacgaccacugccaguucucccgccccagccccaucggguaccugggcuucgugagccagaagacgcgggacaucuacaucucccgccggcgccggggcaccuucaccuggacccucagcgacuccgaggggcacgacaugccgggcggguacugccugacgcgcuggaugcugaucgaggccgaccucaagugcuucggcaacaccgccguggccaagugcaacgagaagcacgacgaggaguucugcgacauguggcggcuguucgacuucaacaagcaggcgauccagcgccugaaggcccccgcccagaugaacauccagcucaucaacaaggccgucaacgcccugaucaacgaccagcugaugaugaagaaccaccuccgggacaucaugugcauccccuacugcaacuacagcaaguucugguaccugaacaacaccaccacggggcgcaccucccugccccggugcuggcucaucagcaacggcuccuaccugaacgagacccacuucagcgacgacaucgagcagcaggcggacaacaugaucaccgagaugcugcagaaggaguacauggaccgccagggcaagacgccgcucgggcugguggaccuguucguguucuccaccagcuucuaccucaucaccaucuuccugcaccuggucaagauccccacccaccggcacaucgugggcaagcccugccccaagccgcaccgccucaaccacauggggaucugcuccugcggccuguacaagcagcccggggugcccguccgguggaagcgcugaggacuagucccuguucccagagcccacuuuuuuuucuuuuuuugaaauaaaauagccugucuuucagaucucaaaggcucuuuucagagccaccaaaaaaaaaaaaaaaaaaaaaaaaaaaaaaaaaaaaaaaaaaaaaaaaaaaaaaaaaaaaaaaaagaauu

SEQ ID NO: 15631 - RNA, 1733 nt, Artificial Sequence; identical to SEQ ID NO: 15625
  mRNA product Design a-2 (hSL-A64-N5) comprising derived and/or modified sequence from LASV(Pinneo-NIG-1969;Clade I)__AIT17836__GPCmut1 (opt1)

SEQ ID NO: 15632 - RNA, 1733 nt, Artificial Sequence
  mRNA product Design a-2 (hSL-A64-N5) comprising derived and/or modified sequence from LASV(ISTH0009-NIG-2011;Clade II)__AIT17404__GPCmut1 (opt1)
aggagaguccgcucagccagguugcagaagcggcuuagcguguguccuaaucuucucucugcguguagguaggccugugccgcaaacaagcuuaccaugggccagaucaucaccuucuuccaggaggugccccacgucaucgaggaggugaugaacaucgugcugaucgcccucagccugcuggccauccucaaggggaucuacaacgucgcgaccugcggccuguucgggcugguguccuuccuccugcugugcggccgcagcugcuccacgaccuacaaggggguguacgagcuccagacccuggagcuggacauggccagccucaacaugaccaugccgcuguccugcacgaagaacaacagccaccacuacaucauggucggcaacgagaccggccuggagcucacccugaccaacacguccaucaucaaccacaaguucugcaaccugagcgacgcccacaagaagaaccucuacgaccacgcccugauguccaucaucagcaccuuccaccuguccauccccaacuucaaccaguacgaggccaugagcugcgacuucaacgggggcaagaucuccgugcaguacaaccucagccacgcguacgccguggacgccgccaaccacugcgggaccaucgcgaacggcguccugcagaccuucaugcggauggccuggggcggguccuacaucgcccuggacagcggcugcggguccugggacugcaucaugacgagcuaccaguaccucaucauccagaacaccaccugggaggaccacugccaguucucccgccccagccccaucggcuaccuggggcugcucagccagcggacccgcgacaucuacaucucccggcgccggcgcggcacguucaccuggacccugagcgacuccgagggcaacgagacccccgggggcuacugccugacgcgguggaugcucaucgaggccgagcugaagugcuucgggaacaccgccguggcgaagugcaacgagaagcacgacgaggaguucugcgacaugcugcgccucuucgacuucaacaagcaggccauccggcgccugaagaccccggcccagaugagcauccagcugaucaacaaggccgugaacgcccucaucaacgaccagcugaucaugaagaaccaccuccgggacaucaugugcauccccuacugcaacuacuccaaguacugguaccugaaccacaccgucacgggcaagaccagccugccccgcugcuggcugguguccaacgggagcuaccucaacgagacccacuucuccgacgacaucgagcagcaggcggacaacaugaucaccgagcugcugcagaaggaguacauggaccggcagggcaagacgccgcucggccugguggaccuguucgucuucagcaccuccuucuaccucaucagcaucuuccugcaccugaucaagauccccacccaccgccacaucaccgggaagcccugccccaagccgcaccggcugaaccacaugggcaucugcuccugcgggcucuacaagcaccccggcgugcccgugaaguggaagcgcugaggacuagucccuguucccagagcccacuuuuuuuucuuuuuuugaaauaaaauagccugucuuucagaucucaaaggcucuuuucagagccaccaaaaaaaaaaaaaaaaaaaaaaaaaaaaaaaaaaaaaaaaaaaaaaaaaaaaaaaaaaaaaaaaagaauu

SEQ ID NO: 15633 - RNA, 1733 nt, Artificial Sequence
  mRNA product Design a-2 (hSL-A64-N5) comprising derived and/or modified sequence from LASV(ISTH2010-NIG-2012;Clade II)__AIT17482__GPCmut1 (opt1)
aggagaguccgcucagccagguugcagaagcggcuuagcguguguccuaaucuucucucugcguguagguaggccugugccgcaaacaagcuuaccaugggccagaucaucaccuucuuccaggaggugccccacgucaucgaggaggugaugaacaucgugcugaucgcccucagccugcuggccauccucaaggggaucuacaacgucgcgaccugcggccuguucgggcugguguccuuccuccugcugugcggccgcagcugcuccacgaccuacaaggggguguacgagcuccagacccuggagcuggacauggccagccucaacaugaccaugccgcuguccugcacgaagaacaacagccaccacuacaucauggucggcaacgagaccggccuggagcucacccugaccaacacguccaucaucaaccacaaguucugcaaccugagcgacgcccacaagaagaaccucuacgaccacgcccugauguccaucaucagcaccuuccaccuguccauccccaacuucaaccaguacgaggccaugagcugcgacuucaacgggggcaagaucuccgugcaguacaaccucagccacgcguacgccguggacgccgccaaccacugcgggaccaucgcgaacggcguccugcagaccuucaugcggauggccuggggcggguccuacaucgcccuggacagcggcugcggguccugggacugcaucaugacgagcuaccaguaccucaucauccagaacaucaccugggaggaccacugccaguucucccgccccagccccaucggcuaccuggggcugcucagccagcggacccgcgacaucuacaucucccggcgccggcgcggcaccuucacguggacccugagcgacuccgagggcaacgagacccccgggggcuacugccugacccgguggaugcucaucgaggccgagcugaagugcuucgggaacacggccguggcgaagugcaacgagaagcacgacgaggaguucugcgacaugcugcgccucuucgacuucaacaagcaggccauccggcgccugaagaccccggcccagaugagcauccagcugaucaacaaggccgugaacgcccucaucaacgaccagcugaucaugaagaaccaccuccgggacaucaugugcauccccuacugcaacuacuccaaguacugguaccugaaccacaccgucaccggcaagacgagccugccccgcugcuggcugguguccaacgggagcuaccucaacgagacccacuucuccgacgacaucgagcagcaggcggacaacaugaucaccgagcugcugcagaaggaguacaucgaccggcagggcaagaccccgcucggccugguggaccuguucgucuucagcacguccuucuaccucaucagcaucuuccugcaccuggugaagauccccacccaccgccacguggucgggaagcccugccccaagccgcaccggcugaaccacaugggcaucugcuccugcgggcucuacaagcaccccggcgugcccgugaaguggaagcgcugaggacuagucccuguucccagagcccacuuuuuuuucuuuuuuugaaauaaaauagccugucuuucagaucucaaaggcucuuuucagagccaccaaaaaaaaaaaaaaaaaaaaaaaaaaaaaaaaaaaaaaaaaaaaaaaaaaaaaaaaaaaaaaaaagaauu

SEQ ID NO: 15634 - RNA, 1733 nt, Artificial Sequence
  mRNA product Design a-2 (hSL-A64-N5) comprising derived and/or modified sequence from LASV(Lassa virus/H.sapiens-wt/NGA/2015/ISTH_0543;Clade II)__AVO03639__GPCmut1 (opt1)
aggagaguccgcucagccagguugcagaagcggcuuagcguguguccuaaucuucucucugcguguagguaggccugugccgcaaacaagcuuaccaugggccagaucaucaccuucuuccaggaggugccccacgucaucgaggaggugaugaacaucgugcugaucgcccucagccugcuggccauccucaaggggaucuacaacgucgcgaccugcggccuguucgggcugguguccuuccuccugcugugcggccgcagcugcuccacgaccuacaaggggguguacgagcuccagacccuggagcuggacauggccaaccucaacaugaccaugccgcugagcugcacgaagaacaacucccaccacuacaucauggucggcaacgagaccggccuggagcucacccugaccaacacgagcaucaucaaccacaaguucugcaaccuguccgacgcccacaagaagaaccucuacgaccacgcccugaugagcaucaucuccaccuuccaccugagcauccccaacuucaaccaguacgaggccauguccugcgacuucaacgggggcaagaucagcgugcaguacaaccucucccacaccuacgcgguggacgccgccaaccacugcgggaccaucgccaacggcguccugcagacguucaugcggauggcguggggcgggagcuacaucgcccuggacuccggcugcgggagcugggacugcaucaugaccuccuaccaguaccucgugauccagaacaccaccugggaggaccacugccaguucagccgccccucccccaucggcuaccuggggcugcucagccagcggacgcgcgacaucuacaucagccggcgccggcgcggcaccuucaccuggacccuguccgacagcgagggcaacgagacgcccgggggcuacugccugacccgguggaugcucaucgaggccgagcugaagugcuucgggaacaccgccguggccaagugcaacgagaagcacgacgaggaguucugcgacaugcugcgccucuucgacuucaacaagcaggcgauccggcgccugaagaccccggcccagauguccauccagcugaucaacaaggccgucaacgcccucaucaacgaccagcugaucaugaagaaccaccuccgggacaucaugugcauccccuacugcaacuacagcaaguacugguaccugaaccacacggugaccggcaagaccucccugccccgcugcuggcuggugagcaacggguccuaccucaacgagacccacuucagcgacgacaucgagcagcaggccgacaacaugaucacggagcugcugcagaaggaguacaucgaccggcagggcaagaccccgcucggccuggucgaccuguucguguucuccaccagcuucuaccucaucuccaucuuccugcaccuggugaagauccccacccaccgccacaucacggggaagcccugccccaagccgcaccggcugaaccacaugggcaucugcagcugcgggcucuacaagcaccccggcguccccgugaaguggaagcgcugaggacuagucccuguucccagagcccacuuuuuuuucuuuuuuugaaauaaaauagccugucuuucagaucucaaaggcucuuuucagagccaccaaaaaaaaaaaaaaaaaaaaaaaaaaaaaaaaaaaaaaaaaaaaaaaaaaaaaaaaaaaaaaaaagaauu

SEQ ID NO: 15635 - RNA, 1733 nt, Artificial Sequence
  mRNA product Design a-2 (hSL-A64-N5) comprising derived and/or modified sequence from LASV(Lassa virus/H.sapiens-wt/NGA/2016/ISTH_0009;Clade II)__AVO03571__GPCmut1 (opt1)
aggagaguccgcucagccagguugcagaagcggcuuagcguguguccuaaucuucucucugcguguagguaggccugugccgcaaacaagcuuaccaugggccagaucaucaccuucuuccaggaggugccccacgucaucgaggaggugaugaacaucgugcugaucgcccucagccugcuggccauccucaaggggaucuacaacgucgcgaccugcggccugcuggggcucguguccuuccugcugcucugcggccgcagcugcuccacgaccuacaaggggguguacgagcugcagacccuggagcucgacauggccagccugaacaugaccaugccgcuguccugcacgaagaacaacagccaccacuacaucauggucggcaacgagaccggccucgagcugacccugaccaacacguccaucaucaaccacaaguucugcaaccucagcgacgcccacaagaagaaccuguacgaccacgcccugauguccaucaucagcaccuuccaccucuccauccccaacuucaaccaguacgaggccaugagcugcgacuucaacgggggccggaucuccgugcaguacaaccugagccacuccuacgcgguggacgccgccaaccacugcgggaccaucgccaacggcguccugcagaccuucaugcgcauggcguggggcgggagcuacaucgcccucgacuccggcugcgggagcugggacugcaucaugacguccuaccaguaccugaucauccagaacaccaccugggaggaccacugccaguucagccggcccagccccaucggcuaccuggggcuccugucccagcgcacccgggacaucuacaucagccgccggcgccggggcacguucaccuggacccuguccgacagcgagggcaacgagacccccgggggcuacugccucacgcgcuggaugcugaucgaggccgagcugaagugcuucgggaacaccgccguggccaagugcaacgagaagcacgacgaggaguucugcgacaugcuccggcuguucgacuucaacaagcaggcgauccgccggcugaagaccccggcccagauguccauccagcucaucaacaaggccgugaacgcccugaucaacgaccagcugaucaugaagaaccaccuccgcgacaucaugugcauccccuacugcaacuacagcaaguacugguaccugaaccacaccgucacgggcaagaccucccugccccggugcuggcucgugagcaacggguccuaccugaacgagacccacuucagcgacgacaucgagcagcaggccgacaacaugaucaccgagcugcuccagaaggaguacaucgaccgccagggcaagacgccgcugggccugguggaccucuucgucuucuccaccagcuucuaccugaucuccaucuuccugcaccuggugaagauccccacccaccggcacaucaccgggaagcccugccccaagccgcaccgccucaaccacaugggcaucugcagcugcgggcuguacaaccaccccggcgugcccgucaaguggaagcggugaggacuagucccuguucccagagcccacuuuuuuuucuuuuuuugaaauaaaauagccugucuuucagaucucaaaggcucuuuucagagccaccaaaaaaaaaaaaaaaaaaaaaaaaaaaaaaaaaaaaaaaaaaaaaaaaaaaaaaaaaaaaaaaaagaauu

SEQ ID NO: 15636 - RNA, 1733 nt, Artificial Sequence
  mRNA product Design a-2 (hSL-A64-N5) comprising derived and/or modified sequence from LASV(Lassa virus/H.sapiens-wt/NGA/2016/ISTH_0017;Clade II)__AVO03567__GPCmut1 (opt1)
aggagaguccgcucagccagguugcagaagcggcuuagcguguguccuaaucuucucucugcguguagguaggccugugccgcaaacaagcuuaccaugggccagaucaucaccuucuuccaggaggugccccacgucaucgaggaggugaugaacaucgugcugaucgcccucagccugcuggccauccucaaggggaucuacaacgucgcgaccugcggccuguucgggcugguguccuuccuccugcugugcggccgcagcugcuccacgaccuacaaggggguguacgagcuccagacccuggagcuggacauggccagccucaacaugaccaugccgcuguccugcacgaagaacaacagccaccacuacaucauggucggcaacgagaccggccuggagcucacccugaccaacacguccaucaucaaccacaaguucugcaaccugagcgacgcccacaagaagaaccucuacgaccacgcccugauguccaucaucagcaccuuccaccuguccauccccaacuucaaccaguacgaggccaugagcugcgacuucaacgggggcaagaucuccgugcaguacaaccucagccacaccuacgcgaucgacgccgccaaccacugcgggaccaucgccaacggcgugcugcagacguucaugcggauggcguggggcggguccuacaucgcccuggacagcggcugcggguccugggacugcaucaugaccagcuaccaguaccucaucauccagaacaccaccugggaggaccacugccaguucucccgccccagccccaucggcuaccuggggcugcucagccagcggacgcgcgacaucuacaucucccggcgccggcgcggcaccuucaccuggacccugagcgacuccgagggcaacgagacgcccgggggcuacugccugacccgguggaugcucaucgaggccgagcugaagugcuucgggaacaccgccgucgccaagugcaacgagaagcacgacgaggaguucugcgacaugcugcgccucuucgacuucaacaagcaggcgauccggcgccugaagaccccggcccagaugagcauccagcugaucaacaaggccgugaacgcccucaucaacgaccagcugaucaugaagaaccaccuccgggacaucaugugcauccccuacugcaacuacuccaaguacugguaccugaaccacacggugaccggcaagaccagccugccccgcugcuggcuggucuccaacgggagcuaccucaacgagacccacuucuccgacgacaucgagcagcaggccgacaacaugaucacggagcugcugcagaaggaguacauggaccggcagggcaagaccccgcucggccugguggaccuguucguguucagcaccuccuucuaccucaucagcaucuuccugcaccugguccgcauccccacccaccggcacgugaucgggaagcccugccccaagccgcaccgccugaaccacaugggcaucugcuccugcgggcucuacaagcaccccggcgugcccgucaaguggaagcggugaggacuagucccuguucccagagcccacuuuuuuuucuuuuuuugaaauaaaauagccugucuuucagaucucaaaggcucuuuucagagccaccaaaaaaaaaaaaaaaaaaaaaaaaaaaaaaaaaaaaaaaaaaaaaaaaaaaaaaaaaaaaaaaaagaauu

SEQ ID NO: 15637 - RNA, 1733 nt, Artificial Sequence
  mRNA product Design a-2 (hSL-A64-N5) comprising derived and/or modified sequence from LASV(Lassa virus/H.sapiens-wt/NGA/2018/ISTH_0959;Clade II)__AVV65099__GPCmut1 (opt1)
aggagaguccgcucagccagguugcagaagcggcuuagcguguguccuaaucuucucucugcguguagguaggccugugccgcaaacaagcuuaccaugggccagaucaucaccuucuuccaggaggugccccacgucaucgaggaggugaugaacaucgugcugaucgcccucagccugcuggccauccucaaggggaucuacaacgucgugaccugcggccuguucgggcugguguccuuccuccugcugugcggccgcagcugcuccacgaccuacaagggggucuacgagcuccagacccuggagcuggacauggcgagccucaacaugaccaugccgcuguccugcacgaagaacaacagccaccacuacaucauggugggcaacgagaccggccuggagcucacccugaccaacacguccaucaucaaccacaaguucugcaaccugagcgacgcccacaagaagaaccucuacgaccacgcccugauguccaucaucagcaccuuccaccuguccauccccaacuucaaccaguacgaggccaugagcugcgacuucaacgggggcaagaucuccgugcaguacaaccucagccacgccuacgcgaucgacgccgccaaccacugcgggaccaucgccaacggcguccugcagaccuucaugcggauggcguggggcggguccuacaucgcccuggacagcggcugcggguccugggacugcaucaugacgagcuaccaguaccucaucauccagaacaccaccugggaggaccacugccaguucucccgccccagccccaucggcuaccuggggcugcucagccagcggacccgcgacaucuacaucucccggcgccggcgcggcacguucaccuggacccugagcgacuccgagggcaacgagacccccgggggcuacugccugacgcgguggaugcucaucgaggccgagcugaagugcuucgggaacaccgccguggccaagugcaacgagaagcacgacgaggaguucugcgacaugcugcgccucuucgacuucaacaagcaggcgauccggcgccugaagaccccggcccagaugagcauccagcugaucaacaaggccgugaacgcccucaucaacgaccagcugaucaugaagaaccaccuccgggacaucaugugcauccccuacugcaacuacuccaaguacugguaccugaaccacaccgucacgggcaagaccagccugccccgcugcuggcugguguccaacgggagcuaccucaacgagacccacuucuccgacgacaucgagcagcaggccgacaacaugaucaccgagcugcugcagaaggaguacaucgaccggcagggcaagacgccgcucggccugguggaccuguucgucuucagcaccuccuucuaccucaucagcaucuuccugcaccuggugaagauccccacccaccgccacgugaucgggaagcccugccccaagccgcaccggcugaaccacaugggcaucugcuccugcgggcucuacaagcaccccggcguccccgugaaguggaagcgcugaggacuagucccuguucccagagcccacuuuuuuuucuuuuuuugaaauaaaauagccugucuuucagaucucaaaggcucuuuucagagccaccaaaaaaaaaaaaaaaaaaaaaaaaaaaaaaaaaaaaaaaaaaaaaaaaaaaaaaaaaaaaaaaaagaauu

SEQ ID NO: 15638 - RNA, 1733 nt, Artificial Sequence
  mRNA product Design a-2 (hSL-A64-N5) comprising derived and/or modified sequence from LASV(LASV003-NIG-2008;Clade II)__AIT17580__GPCmut1 (opt1)
aggagaguccgcucagccagguugcagaagcggcuuagcguguguccuaaucuucucucugcguguagguaggccugugccgcaaacaagcuuaccaugggccagaucaucaccuucuuccaggaggugccccacgucaucgaggaggugaugaacaucgugcugaucgcccucagccugcuggccauccucaaggggaucuacaacgucgcgaccugcggccuguucgggcugguguccuuccuccugcugugcggccgcagcugcuccacgaccuacaaggggguguacgagcuccagacccuggagcuggacauggccagccucaacaugaccaugccgcuguccugcacgaagaacaacagccaccacuacaucauggucggcaacgagaccggccuggagcucacccugaccaacacguccaucaucaaccacaaguucugcaaccugagcgacgcccacaagaagaaccucuacgaccacgcccugauguccaucaucagcaccuuccaccuguccauccccaacuucaaccaguacgaggccaugagcugcgacuucaacgggggcaagaucuccgugcaguacaaccucagccacaccuacgcgguggacgccgccaaccacugcgggaccaucgccaacggcguccugcagacguucaugcggauggcguggggcggguccuacaucgcccuggacagcggcugcggguccugggacugcaucaugaccagcuaccaguaccucaucauccagaacaccaccugggaggaccacugccaguucucccgccccagccccaucggcuaccuggggcugcucagccagcggacgcgcgacaucuacaucucccggcgccggcgcggcaccuucaccuggacccugagcgacuccgagagcaacgagacgccgggcggguacugccugacccgguggaugcucaucgaggccgagcugaagugcuucggcaacaccgccguggccaagugcaacgagaagcacgacgaggaguucugcgacaugcugcgccucuucgacuucaacaagcaggcgauccggcgccugaaggcccccgcccagauguccauccagcugaucaacaaggccgugaacgcccucaucaacgaccagcugaucaugaagaaccaccuccgggacaucaugugcauccccuacugcaacuacagcaaguacugguaccugaaccacaccgucacggggcgcaccucccugccccggugcuggcuggugagcaacggcuccuaccucaacgagacccacuucagcgacgacaucgagcagcaggcggacaacaugaucaccgagcugcugcagaaggaguacauggaccgccaggggaagacgccgcucggccugguggaccuguucgucuucuccaccagcuucuaccucaucuccaucuuccugcaccuggugaagauccccacccaccggcacgugaucggcaagcccugccccaagccgcaccgccugaaccacauggggaucugcagcugcggccucuacaagcaccccgggguccccgugaaguggaagcggugaggacuagucccuguucccagagcccacuuuuuuuucuuuuuuugaaauaaaauagccugucuuucagaucucaaaggcucuuuucagagccaccaaaaaaaaaaaaaaaaaaaaaaaaaaaaaaaaaaaaaaaaaaaaaaaaaaaaaaaaaaaaaaaaagaauu

SEQ ID NO: 15639 - RNA, 1733 nt, Artificial Sequence
  mRNA product Design a-2 (hSL-A64-N5) comprising derived and/or modified sequence from LASV(LASV035-NIG-2009;Clade II)__AIT17588__GPCmut1 (opt1)
aggagaguccgcucagccagguugcagaagcggcuuagcguguguccuaaucuucucucugcguguagguaggccugugccgcaaacaagcuuaccaugggccagaucaucaccuucuuccaggaggugccccacgucaucgaggaggugaugaacaucgugcugaucgcccucagccugcuggccauccucaaggggaucuacaacgucgcgaccugcggccuguucgggcugguguccuuccuccugcugugcggccgcagcugcuccacgaccuacaaggggguguacgagcuccagacccuggagcuggacauggccagccucaacaugaccaugccgcuguccugcacgaagaacaacagccaccacuacaucauggucggcaacgagaccggccuggagcucacccugaccaacacguccaucaucaaccacaaguucugcaaccugagcgacgcccacaagaagaaccucuacgaccacgcccugauguccaucaucagcaccuuccaccuguccauccccaacuucaaccaguacgaggccaugagcugcgacuucaacgggggcaagaucuccgugcaguacaaccucagccacgcguacgccguggacgccgccaaccacugcgggaccaucgcgaacggcguccugcagaccuucaugcggauggccuggggcggguccuacaucgcccuggacagcggcugcggguccugggacugcaucaugacgagcuaccaguaccucaucauccagaacaccaccugggaggaccacugccaguucucccgccccagccccaucggcuaccuggggcugcucagccagcggacccgcgacaucuacaucucccggcgccggcgcggcacguucaccuggacccugagcgacuccgagggcaacgagacccccgggggcuacugccugacgcgguggaugcucaucgaggccgagcugaagugcuucgggaacaccgccguggcgaagugcaacgagaagcacgacgaggaguucugcgacaugcugcgccucuucgacuucaacaagcaggccauccggcgccugaaggccccggcccagaugagcauccagcugaucaacaaggccgugaacgcgcucaucaacgaccagcugaucaugaagaaccaccuccgggacaucaugugcauccccuacugcaacuacuccaaguacugguaccugaaccacaccgucaccggcaagacgagccugccccgcugcuggcugguguccaacgggagcuaccucaacgagacccacuucuccgacgacaucgagcagcaggccgacaacaugaucaccgagcugcugcagaaggaguacaucgaccggcagggcaagaccccgcucggccugguggaccuguucgucuucagcacguccuucuaccucaucagcaucuuccugcaccuggugaagauccccacccaccgccacgugaucgggaagcccugccccaagccgcaccggcugaaccacaugggcaucugcuccugcgggcucuacaagcaccccggcguccccgugaaguggaagcgcugaggacuagucccuguucccagagcccacuuuuuuuucuuuuuuugaaauaaaauagccugucuuucagaucucaaaggcucuuuucagagccaccaaaaaaaaaaaaaaaaaaaaaaaaaaaaaaaaaaaaaaaaaaaaaaaaaaaaaaaaaaaaaaaaagaauu

SEQ ID NO: 15640 - RNA, 1733 nt, Artificial Sequence
  mRNA product Design a-2 (hSL-A64-N5) comprising derived and/or modified sequence from LASV(LASV1000-NIG-2009;Clade II)__AIT17782__GPCmut1 (opt1)
aggagaguccgcucagccagguugcagaagcggcuuagcguguguccuaaucuucucucugcguguagguaggccugugccgcaaacaagcuuaccaugggccagaucaucaccuucuuccaggaggugccccacgucaucgaggaggugaugaacaucgugcugaucgcccucagccugcuggccauccucaaggggaucuacaacgucgcgaccugcggccuguucgggcugguguccuuccuccugcugugcggccgcagcugcuccacgaccuacaaggggguguacgagcuccagacccuggagcuggacauggccagccucaacaugaccaugccgcuguccugcacgaagaacaacagccaccacuacaucauggucggcaacgagaccggccuggagcucacccugaccaacacguccaucaucaaccacaaguucugcaaccugagcgacgcccacaagaagaaccucuacgaccacgcccugauguccaucaucagcaccuuccaccuguccauccccaacuucaaccaguacgaggccaugagcugcgacuucaacgggggcaagaucuccgugcaguacaaccucagccacaccuacgcgguggacgccgccaaccacugcgggaccaucgccaacggcguccugcagacguucaugcggauggcguggggcggguccuacaucgcccuggacagcggcugcggguccugggacugcaucaugaccagcuaccaguaccucaucauccagaacaccaccugggaggaccacugccaguucucccgccccagccccaucggcuaccuggggcugcucagccagcggacgcgcgacaucuacaucucccggcgccggcgcggcaccuucaccuggacccugagcgacuccgagggcaacgagacgcccgggggcuacugccugacccgguggaugcucaucgaggccgagcugaagugcuucgggaacaccgccguggccaagugcaacgagaagcacgacgaggaguucugcgacaugcugcgccucuucgacuucaacaagcaggcgaucaagcggcugaagaccccggcccagaugagcauccagcugaucaacaaggccgugaacgcccucaucaacgaccagcugaucaugaagaaccaccuccgcgacaucaugugcauccccuacugcaacuacuccaaguacugguaccugaaccacacggucaccggcaagaccagccugccccggugcuggcugguguccaacgggagcuaccucaacgagacccacuucuccgacgacaucgagcagcaggccgacaacaugaucacggagcugcugcagaaggaguacaucgaccgccagggcaagaccccgcucggccugguggaccuguucgucuucagcaccuccuucuaccucaucagcaucuuccugcaccuggugaagauccccacccaccggcacguggucgggaagcccugccccaagccgcaccgccugaaccacaugggcaucugcuccugcgggcucuacaagcaccccggcgugcccgugaaguggaagcggugaggacuagucccuguucccagagcccacuuuuuuuucuuuuuuugaaauaaaauagccugucuuucagaucucaaaggcucuuuucagagccaccaaaaaaaaaaaaaaaaaaaaaaaaaaaaaaaaaaaaaaaaaaaaaaaaaaaaaaaaaaaaaaaaagaauu

SEQ ID NO: 15641 - RNA, 1733 nt, Artificial Sequence
  mRNA product Design a-2 (hSL-A64-N5) comprising derived and/or modified sequence from LASV(LASV221-NIG-2010;Clade II)__AIT17624__GPCmut1 (opt1)
aggagaguccgcucagccagguugcagaagcggcuuagcguguguccuaaucuucucucugcguguagguaggccugugccgcaaacaagcuuaccaugggccagaucaucaccuucuuccaggaggugccccacgucaucgaggaggugaugaacaucgugcugaucgcccucagccugcuggccauccucaaggggaucuacaacgucgcgaccugcggccuguucgggcugguguccuuccuccugcugugcggccgcagcugcuccacgaccuacaaggggguguacgagcuccagacccuggagcuggacauggccagccucaacaugaccaugccgcuguccugcacgaagaacaacagccaccacuacaucauggucggcaacgagaccggccuggagcucacccugaccaacacguccaucaucaaccacaaguucugcaaccugagcgacgcccacaagaagaaccucuacgaccacgcccugauguccaucaucagcaccuuccaccuguccauccccaacuucaaccaguacgaggccaugagcugcgacuucaacgggggcaagaucuccgugcaguacaaccucagccacaccuacgcgaucgacgccgccaaccacugcgggaccaucgccaacggcgugcugcagacguucaugcggauggcguggggcggguccuacaucgcccuggacagcggcugcggguccugggacugcaucaugaccagcuaccaguaccucaucauccagaacaccaccugggaggaccacugccaguucucccgccccagccccaucggcuaccuggggcugcucagccagcggacgcgcgacaucuacaucucccggcgccggcgcggcaccuucaccuggacccugagcgacuccgagggcaacgagacgcccgggggcuacugccugacccgguggaugcucaucgaggccgagcugaagugcuucgggaacaccgccgucgccaagugcaacgagaagcacgacgaggaguucugcgacaugcugcgccucuucgacuucaacaagcaggcgauccggcgccugaagaccccggcccagaugagcauccagcugaucaacaaggccgugaacgcccucaucaacgaccagcugaucaugaagaaccaccuccgggacaucaugugcauccccuacugcaacuacuccaaguacugguaccugaaccacacggugaccggcaagaccagccugccccgcugcuggcuggucuccaacgggagcuaccucaacgagacccacuucuccgacgacaucgagcagcaggccgacaacaugaucacggagaugcugcagaaggaguacauggaccggcagggcaagaccccgcugggccucguggaccuguucguguucagcaccuccuucuaccugaucagcaucuuccuccaccuggucaagauccccacccaccgccacgugaucgggaagcccugccccaagccgcaccggcugaaccacaugggcaucugcuccugcgggcuguacaagcaccccggcgugcccgucaaguggaagcgcugaggacuagucccuguucccagagcccacuuuuuuuucuuuuuuugaaauaaaauagccugucuuucagaucucaaaggcucuuuucagagccaccaaaaaaaaaaaaaaaaaaaaaaaaaaaaaaaaaaaaaaaaaaaaaaaaaaaaaaaaaaaaaaaaagaauu

SEQ ID NO: 15642 - RNA, 1733 nt, Artificial Sequence
  mRNA product Design a-2 (hSL-A64-N5) comprising derived and/or modified sequence from LASV(LASV237-NIG-2010;Clade II)__AIT17638__GPCmut1 (opt1)
aggagaguccgcucagccagguugcagaagcggcuuagcguguguccuaaucuucucucugcguguagguaggccugugccgcaaacaagcuuaccaugggccagaucaucaccuucuuccaggaggugccccacgucaucgaggaggugaugaacaucgugcugaucgcccucagccugcuggccauccucaaggggaucuacaacgucgcgaccugcggccuguucgggcugguguccuuccuccugcugugcggccgcagcugcuccacgaccuacaaggggguguacgagcuccagacccuggagcuggacauggccagccucaacaugaccaugccgcuguccugcacgaagaacaacagccaccacuacaucauggucggcaacgagaccggccuggagcucacccugaccaacacguccaucaucaaccacaaguucugcaaccugagcgacgcccacaagaaggaccucuacgaccacgcccugauguccaucaucagcaccuuccaccuguccauccccaacuucaaccaguacgaggccaugagcugcgacuucaacgggggcaagaucuccgugcaguacaaccucagccacaccuacgcgguggacgccgccaaccacugcgggaccaucgccaacggcguccugcagacguucaugcggauggcguggggcggguccuacaucgcccuggacagcggcugcggguccugggacugcaucaugaccagcuaccaguaccucaucauccagaacaccaccugggaggaccacugccaguucucccgccccagccccaucggcuaccuggggcugcucagccagcggacgcgcgacaucuacaucucccggcgccggcgcggcaccuucaccuggacccugagcgacuccgagggcaacgagacgcccgggggcuacugccugacccgguggaugcucaucgaggccgagcugaagugcuucgggaacaccgccguggccaagugcaacgagaagcacgacgaggaguucugcgacaugcugcgccucuucgacuucaacaagcaggcgauccggcgccugaagaccccggcccagaugagcauccagcugaucaacaaggccgugaacgcccucaucaacgaccagcugaucaugaagaaccaccuccgggacaucaugugcauccccuacugcaacuacuccaaguacugguaccugaaccacacggucaccggcaagaccagccugccccgcugcuggcugguguccaacgggagcuaccucaacgagacccacuucuccgacgacaucgagcagcaggccgacaacaugaucacggagcugcugcagaaggaguacauggaccggcagggcaagaccccgcucggccugguggaccuguucgucuucagcaccuccuucuaccucaucagcaucuuccugcaccugaucaagauccccacccaccgccacaucacggggaagcccugccccaagccgcaccggcugaaccacaugggcaucugcuccugcgggcucuacaagcaccccggcgugcccgugaaguggaagcgcugaggacuagucccuguucccagagcccacuuuuuuuucuuuuuuugaaauaaaauagccugucuuucagaucucaaaggcucuuuucagagccaccaaaaaaaaaaaaaaaaaaaaaaaaaaaaaaaaaaaaaaaaaaaaaaaaaaaaaaaaaaaaaaaaagaauu

SEQ ID NO: 15643 - RNA, 1733 nt, Artificial Sequence
  mRNA product Design a-2 (hSL-A64-N5) comprising derived and/or modified sequence from LASV(LASV253-NIG-2011;Clade II)__AIT17670__GPCmut1 (opt1)
aggagaguccgcucagccagguugcagaagcggcuuagcguguguccuaaucuucucucugcguguagguaggccugugccgcaaacaagcuuaccaugggccagaucaucaccuucuuccaggaggugccccacgucaucgaggaggugaugaacaucgugcugaucgcccucagccugcuggccauccucaaggggaucuacaacgucgcgaccugcggccuguucgggcugguguccuuccuccugcugugcggccgcagcugcuccacgaccuacaaggggguguacgagcuccagacccuggagcuggacauggccagccucaacaugaccaugccgcuguccugcacgaagaacaacagccaccacuacaucauggucggcaacgagaccggccuggagcucacccugaccaacacguccaucaucaaccacaaguucugcaaccugagcgacgcccacaagaagaaccucuacgaccacgcccugauguccaucaucagcaccuuccaccuguccauccccaacuucaaccaguacgaggccaugagcugcgacuucaacgggggcaagaucuccgugcaguacaaccucagccacaccuacgcgguggacgccgccaaccacugcgggaccaucgccaacggcguccugcagacguucaugcggauggcguggggcggguccuacaucgcccuggacagcggcugcggguccugggacugcaucaugaccagcuaccaguaccucaucauccagaacaccaccugggaggaccacugccaguucucccgccccagccccaucggcuaccuggggcugcucagccagcggacgcgcgacaucuacaucucccggcgccggcgcggcaccuucaccuggacccugagcgacuccgagggcaacgagacgcccgggggcuacugccugacccgguggaugcucaucgaggccgagcugaagugcuucgggaacaccgccguggccaagugcaacgagaagcacgacgaggaguucugcgacaugcugcgccucuucgacuucaacaagcaggcgauccggcgccugaaggccccggcccagaugagcauccagcugaucaacaaggccgugaacgcccucaucaacgaccagcugaucaugaagaaccaccuccgggacaucaugugcauccccuacugcaacuacuccaaguacugguaccugaaccacaccgucacgggccgcaccagccugccccggugcuggcugguguccaacgggagcuaccucaacgagacccacuucuccgacgacaucgagcagcaggcggacaacaugaucaccgagcugcugcagaaggaguacaucgaccgccagggcaagacgccgcucggccugguggaccuguucgucuucagcaccuccuucuaccucaucagcaucuuccugcaccuggugaagauccccacccaccggcacaucaucgggaagcccugccccaagccgcaccgccugaaccacaugggcaucugcuccugcgggcucuacaagcaccccggcgugcccgucaaguggaagcggugaggacuagucccuguucccagagcccacuuuuuuuucuuuuuuugaaauaaaauagccugucuuucagaucucaaaggcucuuuucagagccaccaaaaaaaaaaaaaaaaaaaaaaaaaaaaaaaaaaaaaaaaaaaaaaaaaaaaaaaaaaaaaaaaagaauu

SEQ ID NO: 15644 - RNA, 1733 nt, Artificial Sequence
  mRNA product Design a-2 (hSL-A64-N5) comprising derived and/or modified sequence from LASV(LASV254-NIG-2011;Clade II)__AIT17674__GPCmut1 (opt1)
aggagaguccgcucagccagguugcagaagcggcuuagcguguguccuaaucuucucucugcguguagguaggccugugccgcaaacaagcuuaccaugggccagaucaucaccuucuuccaggaggugccccacgucaucgaggaggugaugaacaucgugcugaucgcccucagccugcuggccauccucaaggggaucuacaacgucgcgaccugcggccuguucgggcugguguccuuccuccugcugugcggccgcagcugcuccacgaccuacaaggggguguacgagcuccagacccuggagcuggacaugaccaaccucaacaugacgaugccgcugagcugcaccaagaacaacucccaccacuacaucauggucggcaacgagaccggccuggagcucacccugacgaacaccagcaucaucaaccacaaguucugcaaccuguccgacgcccacaagaagaaccucuacaaccacgcccugaugagcaucaucuccaccuuccaccugagcauccccaacuucaaccaguacgaggccauguccugcgacuucaacgggggcaagaucagcgugcaguacaaccucucccacagcuacgccguggacgcggccaaccacugcgggaccaucgccaacggcguccugcagacguucaugcggauggccuggggcggguccuacaucgcgcuggacagcggcugcgggaacugggacugcaucaugaccuccuaccaguaccucaucauccagaacaccaccugggaggaccacugccaguucagccgccccucccccaucggcuaccuggggcugcucagccagcggacgcgcgacaucuacaucagccggcgccggcgcggcaccuucaccuggacccuguccgacagcgagggcaacgagacgcccgggggcuacugccugacccgguggaugcucaucgaggccgagcugaagugcuucgggaacaccgccguggccaagugcaacgagaagcacgacgaggaguucugcgacaugcugcgccucuucgacuucaacaagcaggccauccggcgccugaagaccccggcgcaggccaacauccagcugaucaacaaggccgugaacgcccucaucaacgaccagcugaucaugaagaaccaccuccgggacaucaugugcauccccuacugcaacuacuccaaguacugguaccugaaccacacggucaccggcaagaccagccugccccgcugcuggcugguguccaacgggagcuaccucaacgagacccacuucuccgacgacaucgagcagcaggccgacaacaugaucacggagcugcugcagaaggaguacauggaccggcagggcaagaccccgcucggccugguggaccuguucgucuucagcaccuccuucuaccucaucagcaucuuccugcaccuggugaagauccccacccaccgccacgugaucgggaagcccugccccaagccgcaccggcugaaccacaugggcaucugcuccugcgggcucuacaagcaccccggcguccccgugaaguggaagcgcugaggacuagucccuguucccagagcccacuuuuuuuucuuuuuuugaaauaaaauagccugucuuucagaucucaaaggcucuuuucagagccaccaaaaaaaaaaaaaaaaaaaaaaaaaaaaaaaaaaaaaaaaaaaaaaaaaaaaaaaaaaaaaaaaagaauu

SEQ ID NO: 15645 - RNA, 1733 nt, Artificial Sequence
  mRNA product Design a-2 (hSL-A64-N5) comprising derived and/or modified sequence from LASV(Nig08-A19;Clade III)__ADU56618__GPCmut1 (opt1)
aggagaguccgcucagccagguugcagaagcggcuuagcguguguccuaaucuucucucugcguguagguaggccugugccgcaaacaagcuuaccaugggccagaucgugaccuucuuccaggaggucccccacgugaucgaggaggugaugaacaucguccugaucgcccucagcauccuggccauccugaaggggcucuacaacaucgcgaccugcggccugaucgggcuggugacguuccuccugcuguccggccgcagcugcuccaugaccuacaaggggguguacgagcuccagacccuggagcugaacaugaacacccucaacaugacgaugccgcugagcugcaccaagaacaacucccaccacuacaucauggucggcaacgagaccggccuggagcucacccugacgaacaccagccugcuccaccacaaguucugcaaccuguccgacgcccacaagaagaaccuguacgaccacacccucaugagcaucaucuccaccuuccaccugagcauccccaacuucaaccaguacgaggccauguccugcgacuucaacgggggcaagaucacggugcaguacaaccugagccacuccuacgccaucgacgccgcgaaccacugcgggaccguggccaacggcguccuccagaccuucaugcggauggccuggggcgggagcuacaucgcccuggacuccggcugcgggaagugggacugcaucaugaccagcuaccaguaccugaucauccagaacacgaccugggaggaccacugccaguucucccgccccagccccaucggcuaccucgggcugcugucccagcggacccgcgacaucuacaucagccggcgccggcgcggcaccuucacguggacccucagcgacuccgagggcaacgagacccccgggggcuacugccugacccgguggaugcugaucgaggcggagcucaagugcuucgggaacacggccguggccaagugcaacgagaagcacgacgaggaguucugcgacaugcugcgccuguucgacuucaacaagcaggccauccggcgccucaaggccccggcgcagaugagcauccagcugaucaacaaggccgugaacgcccugaucaacgaccagcucaucaugaagaaccaccuccgggacaucaugugcauccccuacugcaacuacuccaaguacugguaccugaaccacaccagcaccggccgcaccucccugccccggugcuggcuggucagcaacggguccuaccugaacgagacgcacuucagcgacgacaucgagcagcaggccgacaacaugaucaccgagaugcuccagaaggaguaccuggaccgccagggcaagaccccgcugggccucguggaccuguucguguucuccaccagcuucuaccugaucuccaucuuccugcaccucgucaagauccccacgcaccggcacaucguggggaagcccugccccaagccgcaccgccugaaccacaugggcaucugcagcugcgggcuguacaagcagcccggcgugcccguccgguggaagcgcugaggacuagucccuguucccagagcccacuuuuuuuucuuuuuuugaaauaaaauagccugucuuucagaucucaaaggcucuuuucagagccaccaaaaaaaaaaaaaaaaaaaaaaaaaaaaaaaaaaaaaaaaaaaaaaaaaaaaaaaaaaaaaaaaagaauu

SEQ ID NO: 15646 - RNA, 1736 nt, Artificial Sequence
  mRNA product Design a-2 (hSL-A64-N5) comprising derived and/or modified sequence from LASV(G1180-SLE-2010;Clade IV)__AIT17168__GPCmut1 (opt1)
aggagaguccgcucagccagguugcagaagcggcuuagcguguguccuaaucuucucucugcguguagguaggccugugccgcaaacaagcuuaccaugggccagaucgugaccuucuuccaggaggucccccacgugaucgaggaggugaugaacaucguccugaucgcccucagcauccuggccgugcugaaggggcucuacaacuucgcgaccugcggccugguggggcugcucacguuccugcugcucugcggccgcuccugcaccgccagccgguacaagggggucuacgagcugcagacccuggagcucaacauggagacccugaacaugacgaugccgcuguccugcaccaagaacaacagccaccacuacaucauggugggcaacgagaccggccucgagcugacccugacgaacaccuccaucaucaaccacaaguucugcaaccucagcgacgcccacaagaagaaccuguacgaccacgcccugauguccaucaucagcaccuuccaccucuccauccccaacuucaaccaguacgaggccaugagcugcgacuucaacgggggcaagaucuccgugcaguacaaccugagccacuccuacgcgggggacgccgccaaccacugcggcaccgucgccaacggggugcugcagacguucaugcgcauggcguggggcggcagcuacaucgcccucgacuccgggugcggcagcugggacugcaucaugaccuccuaccaguaccugaucauccagaacaccaccugggaggaccacugccaguucagccggcccucccccaucggguaccugggccuccugagccagcgcacgcgggacaucuacaucagccgccggcgccggggcaccuucaccuggacccuguccgacagcgaggggaaggacacgccgggcggguacugccucacccgcuggaugcugaucgaggccgagcugaagugcuucggcaacaccgccguggccaagugcaacgagaagcacgacgaggaguucugcgacaugcuccggcuguucgacuucaacaagcaggcgauccagcgccugaaggcccccgcccagauguccauccagcucaucaacaaggccgucaacgcccugaucaacgaccagcugaucaugaagaaccaccuccgggacaucaugugcauccccuacugcaacuacagcaaguacugguaccugaaccacaccacgaccgggaagaccucccugcccaagugcuggcucgugagcaacggcuccuaccugaacgagacccacuucagcgacgacaucgagcagcaggcggacaacaugaucacggagaugcugcagaaggaguacauggagcgccagggcaagaccccgcucgggcugguggaccuguucgucuucuccaccagcuucuaccucaucuccaucuuccugcaccuggugaagauccccacccaccggcacaucgugggcaagagcugccccaagccccaccgccugaaccacauggggaucugcuccugcggccucuacaagcagccggggguccccgugaaguggaagcggugaggacuagucccuguucccagagcccacuuuuuuuucuuuuuuugaaauaaaauagccugucuuucagaucucaaaggcucuuuucagagccaccaaaaaaaaaaaaaaaaaaaaaaaaaaaaaaaaaaaaaaaaaaaaaaaaaaaaaaaaaaaaaaaaagaauu

SEQ ID NO: 15647 - RNA, 1736 nt, Artificial Sequence
  mRNA product Design a-2 (hSL-A64-N5) comprising derived and/or modified sequence from LASV(G1442-SLE-2011;Clade IV)__AIT17180__GPCmut1 (opt1)
aggagaguccgcucagccagguugcagaagcggcuuagcguguguccuaaucuucucucugcguguagguaggccugugccgcaaacaagcuuaccaugggccagaucgugaccuucuuccaggaggucccccacgugaucgaggaggugaugaacaucguccugaucgcccucagcauccuggccgugcugaaggggcucuacaacguggcgaccugcggccugaucgggcuggucacguuccuccugcugugcggccgcuccugcaccaccacccucuacaaggggguguacgagcugcagacgcuggagcucaacauggagacccugaacaugaccaugccgcugagcugcaccaagaacaacucccaccacuacauccgggugggcaacgagacgggccucgagcugacccugaccaacaccagcaucaucaaccacaaguucugcaaccucuccgacgcccacaagaagaaccuguacgaccacgcccugaugagcaucaucuccacguuccaccucagcauccccaacuucaaccaguacgaggccauguccugcgacuucaacgggggcaagaucagcguccaguacaaccugucccacagcuacgccggggacgcggccaaccacugcggcaccguggccaacggggugcugcagaccuucaugcgcauggccuggggcggcuccuacaucgcgcucgacagcgggugcggcaacugggacugcaucaugaccuccuaccaguaccugaucauccagaacacgaccugggacgaccacugccaguucagccggcccucccccaucggguaccugggccuccugagccagcgcacccgggacgucuacaucucccgccggcgccggggcaccuucacguggacccugagcgacagcgaggggaaggacaccccgggcggguacugccucacccgcuggaugcugaucgaggccgagcugaagugcuucggcaacacggccguggccaagugcaacgagaagcacgacgaggaguucugcgacaugcuccggcuguucgacuucaacaagcaggccauccagcgccugaaggcgcccgcccagauguccauccagcucaucaacaaggccgugaacgcccugaucaacgaccagcugaucaugaagaaccaccuccgggacaucaugugcauccccuacugcaacuacagcaaguacugguaccugaacaacaccgccaccgggaagaccucccugcccaagugcuggcucaucagcaacggcuccuaccugaacgagacgcacuucagcgacgacaucgagcaggaggcggacaacaugaucaccgagaugcugcagaaggaguacauggagcgccagggcaagaccccgcucgggcuggucgaccuguucguguucuccaccagcuucuaccucaucuccaucuuccugcaccuggugaagauccccacgcaccggcacaucgucggcaagagcugccccaagccccaccgccugaaccacauggggaucugcuccugcggccucuacaagcagccgggggugcccgugcgguggaagcgcugaggacuagucccuguucccagagcccacuuuuuuuucuuuuuuugaaauaaaauagccugucuuucagaucucaaaggcucuuuucagagccaccaaaaaaaaaaaaaaaaaaaaaaaaaaaaaaaaaaaaaaaaaaaaaaaaaaaaaaaaaaaaaaaaagaauu

SEQ ID NO: 15648 - RNA, 1736 nt, Artificial Sequence
  mRNA product Design a-2 (hSL-A64-N5) comprising derived and/or modified sequence from LASV(G3010-SLE-2013;Clade IV)__AIT17344__GPCmut1 (opt1)
aggagaguccgcucagccagguugcagaagcggcuuagcguguguccuaaucuucucucugcguguagguaggccugugccgcaaacaagcuuaccaugggccagaucgugaccuucuuccaggaggucccccacgugaucgaggaggugaugaacaucguccugaucgcccucagcauccuggccgugcugaaggggcucuacaacuucgcgaccugcggccugguggggcuggucacguuccuccugcugugcggccgcuccugcaccaccagccucuacaaggggguguacgagcugcagacccuggagcucaacauggagacgcugaacaugaccaugccgcuguccugcaccaagaacaacagccaccacuacaucauggugggcaacgagaccggccucgagcugacgcugaccaacaccuccaucaucaaccacaaguucugcaaccucagcgacgcccacaagaagaaccuguacaaccacgcccugauguccaucaucagcaccuuccaccucuccauccccaacuucaaccaguacgaggccaugagcugcgacuucaacgggggcaagaucuccguccaguacaaccugagccacuccuacgccggggacgcggccagccacugcggcacgguggccaacggggugcugcagaccuucaugcggauggccuggggcggcuccuacaucgcgcucgacagcgggugcggcaagugggacugcaucaugaccuccuaccaguaccugaucauccagaacaccacgugggaggaccacugccaguucagccgccccucccccaucggguaccugggccuccugagccagcggacccgcgacaucuacaucagccggcgccggcgcggcaccuucaccuggacgcuguccgacagcgaggggaaggacaccccgggcggguacugccucacccgguggaugcugaucgaggccgagcugaagugcuucggcaacaccgccgucgccaagugcaacgagaagcacgacgaggaguucugcgacaugcuccgccuguucgacuucaacaagcaggccauccagcggcugaagacgcccgcgcagauguccauccagcucaucaacaaggccgugaacgcccugaucaacgaccagcugaucaugaagaaccaccuccgcgacaucaugugcauccccuacugcaacuacagcaaguacugguaccugaaccacaccaccaccgggaagacgucccugcccaagugcuggcucgugagcaacggcuccuaccugaacgagacccacuucagcgacgacaucgagcagcaggccgacaacaugaucaccgagaugcugcagaaggaguacauggagcggcagggcaagaccccgcucgggcuggucgaccuguucguguucuccacgagcuucuaccucaucuccaucuuccugcaccuggugaagauccccacccaccgccacaucgucggcaagagcugccccaagccccaccggcugaaccacauggggaucugcuccugcggccucuacaagcagccgggggugcccgugcgcuggaagcggugaggacuagucccuguucccagagcccacuuuuuuuucuuuuuuugaaauaaaauagccugucuuucagaucucaaaggcucuuuucagagccaccaaaaaaaaaaaaaaaaaaaaaaaaaaaaaaaaaaaaaaaaaaaaaaaaaaaaaaaaaaaaaaaaagaauu

SEQ ID NO: 15649 - RNA, 1736 nt, Artificial Sequence
  mRNA product Design a-2 (hSL-A64-N5) comprising derived and/or modified sequence from LASV(G502-SLE-2009;Clade IV)__AIT17126__GPCmut1 (opt1)
aggagaguccgcucagccagguugcagaagcggcuuagcguguguccuaaucuucucucugcguguagguaggccugugccgcaaacaagcuuaccaugggccagaucgugaccuucuuccaggaggucccccacgugaucgaggaggugaugaacaucguccugaucgcccucagcauccuggccgugcugaaggggcucuacaacuucgcgaccugcggccugguggggcugcucacguuccugcugcucugcggccgcuccugcaccaccgggcuguacaagggcgucuacgagcugcagacccucgagcugaacauggagacgcugaacaugaccaugccgcucagcugcaccaagaacaacucccaccacuacaucauggugggcaacgagaccgggcuggagcugacgcucaccaacaccagcaucaucaaccacaaguucugcaaccuguccgacgcccacaagaagaaccuguacgaccacgcccucaugagcaucaucuccaccuuccaccugagcauccccaacuucaaccaguacgaggccauguccugcgacuucaacggcgggaagaucagcgugcaguacaaccugucccacagcuacgccggcgacgcggccgaccacugcgggacggucgccaacggcgugcuccagaccuucaugcggauggccuggggcggguccuacaucgcgcuggacagcggcugcgggcgcugggacugcaucaugaccuccuaccaguaccugaucauccagaacaccacgugggaggaccacugccaguucagccggcccucccccaucggcuaccucggccugcugagccagcgcacccgggacaucuacaucucccgccggcgccgggggaccuucaccuggacgcucagcgacagcgagggcaaggacacccccgggggcuacugccugacccgcuggaugcugaucgaggccgagcucaagugcuucgggaacaccgccguggccaagugcaacgagaagcacgacgaggaguucugcgacaugcugcggcuguucgacuucaacaagcaggccauccagcgccucaaggcgccggcccagauguccauccagcugaucaacaaggccgucaacgcccugaucaacgaccagcucgugaugaagaaccaccuccgggacaucaugugcauccccuacugcaacuacagccgcuacugguaccugaaccacacgaccaccggccggaccucccugcccaagugcuggcuggugagcaacggcuccuaccugaacgagacgcacuucagcgacgacaucgagcagcaggccgacaacaugaucaccgagaugcuccagaaggaguacauggagcgccaggggaagaccccgcugggccuggucgaccucuucguguucuccaccagcuucuaccugaucuccaucuuccugcaccuggugaagauccccacgcaccggcacaucgucggcaagagcugccccaagccccaccgccucaaccacauggggaucugcuccugcgggcuguacaagcagccgggcgugcccgugaaguggaagcggugaggacuagucccuguucccagagcccacuuuuuuuucuuuuuuugaaauaaaauagccugucuuucagaucucaaaggcucuuuucagagccaccaaaaaaaaaaaaaaaaaaaaaaaaaaaaaaaaaaaaaaaaaaaaaaaaaaaaaaaaaaaaaaaaagaauu

SEQ ID NO: 15650 - RNA, 1736 nt, Artificial Sequence
  mRNA product Design a-2 (hSL-A64-N5) comprising derived and/or modified sequence from LASV(G733-SLE-2010;Clade IV)__AIT17154__GPCmut1 (opt1)
aggagaguccgcucagccagguugcagaagcggcuuagcguguguccuaaucuucucucugcguguagguaggccugugccgcaaacaagcuuaccaugggccagaucgugaccuucuuccaggaggucccccacgugaucgaggaggugaugaacaucguccugaucgcccucagcauccuggccgugcugaaggggcucuacaacuucgcgaccugcggcaucguggggcuggucuccuuccugcuccugugcggccgcagcugcacgaccucccuguacaaggggguguacgagcuccagacccuggagcugaacauggagacccucaacaugacgaugccgcugagcugcaccaagaacaacucccaccacuacaucauggugggcaacgagaccggccuggagcucacccugacgaacaccagcaucaucaaccacaaguucugcaaccuguccgacgcccacaagaagaaccucuacgaccacgcccugaugagcaucaucuccaccuuccaccugagcauccccaacuucaaccaguacgaggccauguccugcgacuucaacgggggcaagaucagcguccaguacaaccucucccacagcuacgccggggacgcggccaaccacugcggcaccaucgccaacggggugcugcagacguucaugcggauggccuggggcggcuccuacaucgcgcuggacagcgggugcgaccgcugggacugcaucaugaccuccuaccaguaccucaucauccagaacaccaccugggaggaccacugccaguucagccggcccucccccaucggcuaccuggggcugcucagccagcgcacgcgggacaucuacaucagccgccggcgccggggcaccuucaccuggacccuguccgacagcgagggcaaggacacgcccgggggcuacugccugacccgcuggaugcucaucgaggccgagcugaagugcuucgggaacaccgccguggccaagugcaacgagaagcacgacgaggaguucugcgacaugcugcggcuguucgacuucaacaagcaggccauccagcgccugaaggcgccggcccagauguccauccagcugaucaacaaggccgucaacgcccucaucaacgaccagcugaucaugaagaaccaccuccgggacaucaugugcauccccuacugcaacuacagcaaguacugguaccucaaccacaccacgaccggcaagaccucccugcccaagugcuggcuggugagcaacggguccuaccucaacgagacccacuucagcgacgacaucgagcagcaggccgacaacaugaucacggagaugcugcagaaggaguacauggagcgccagggcaagaccccgcugggccucguggaccuguucgucuucuccaccagcuucuaccugaucuccaucuuccuccaccuggugaagauccccacccaccggcacguggucggcaagagcugccccaagccccaccgccugaaccacauggggaucugcuccugcgggcuguacggccagccgggggugcccgugaaguggaagcggugaggacuagucccuguucccagagcccacuuuuuuuucuuuuuuugaaauaaaauagccugucuuucagaucucaaaggcucuuuucagagccaccaaaaaaaaaaaaaaaaaaaaaaaaaaaaaaaaaaaaaaaaaaaaaaaaaaaaaaaaaaaaaaaaagaauu

SEQ ID NO: 15651 - RNA, 1736 nt, Artificial Sequence
  mRNA product Design a-2 (hSL-A64-N5) comprising derived and/or modified sequence from MOPV/LASV reassortant(IGS-1;Clade IV)__AFY05576__GPCmut1 (opt1)
aggagaguccgcucagccagguugcagaagcggcuuagcguguguccuaaucuucucucugcguguagguaggccugugccgcaaacaagcuuaccaugggccagaucgugaccuucuuccaggaggucccccacgugaucgaggaggugaugaacaucguccugaucgcccucagcgugcuggccgugcugaaggggcucuacaacuucgcgaccugcggccuggucgggcuggugacguuccuccugcugugcggccgcuccugcaccaccagccucuacaaggggguguacgagcugcagacccuggagcucaacauggagacgcugaacaugaccaugccgcuguccugcaccaagaacaacagccaccacuacaucauggucggcaacgagaccggccucgagcugacgcugaccaacaccuccaucaucaaccacaaguucugcaaccucagcgacgcccacaagaagaaccuguacgaccacgcccugauguccaucaucagcaccuuccaccucuccauccccaacuucaaccaguacgaggccaugagcugcgacuucaacgggggcaagaucuccgugcaguacaaccugagccacuccuacgccggggacgcggccaaccacugcggcacgguggccaacgggguccugcagaccuucaugcggauggccuggggcggcagcuacaucgcgcucgacuccgggugcggcaacugggacugcaucaugaccagcuaccaguaccugaucauccagaacaccacgugggaggaccacugccaguucucccgccccagccccaucggguaccugggccuccugucccagcggacccgcgacaucuacaucagccggcgccggcgcggcaccuucaccuggacgcugagcgacuccgagggggaggacaccccgggcggguacugccucacccgguggaugcugaucgaggccgagcugaagugcuucggcaacaccgccguggccaagugcaacgagaagcacgacgaggaguucugcgacaugcuccgccuguucgacuucaacaagcaggccauccagcggcugaaggcgcccgcccagaugagcauccagcucaucaacaaggccgugaacgcccugaucaacgaccagcugaucaugaagaaccaccuccgcgacaucaugugcauccccuacugcaacuacuccaaguacugguaccugaaccacacgaccaccgggcggaccagccugcccaagugcuggcucgucuccaacggcagcuaccugaacgagacgcacuucuccgacgacaucgagcagcaggccgacaacaugaucaccgagaugcugcagaaggaguacauggagcgccagggcaagaccccgcucgggcugguggaccuguucguguucagcaccuccuucuaccucaucagcaucuuccugcaccuggucaagauccccacgcaccggcacaucgugggcaaguccugccccaagccccaccgccugaaccacauggggaucugcagcugcggccucuacaagcagccgggggugcccgucaaguggaagcggugaggacuagucccuguucccagagcccacuuuuuuuucuuuuuuugaaauaaaauagccugucuuucagaucucaaaggcucuuuucagagccaccaaaaaaaaaaaaaaaaaaaaaaaaaaaaaaaaaaaaaaaaaaaaaaaaaaaaaaaaaaaaaaaaagaauu

SEQ ID NO: 15652 - RNA, 1736 nt, Artificial Sequence
  mRNA product Design a-2 (hSL-A64-N5) comprising derived and/or modified sequence from LASV(LM765-SLE-2012;Clade IV)__AIT17814__GPCmut1 (opt1)
aggagaguccgcucagccagguugcagaagcggcuuagcguguguccuaaucuucucucugcguguagguaggccugugccgcaaacaagcuuaccaugggccagaucgugaccuucuuccaggaggucccccacgugaucgaggaggugaugaacaucguccugaucgcccucagcauccuggccgugcugaaggggcucuacaacuucgcgaccugcggccugguggggcuggucacguuccuccugcugugcggccgcuccugcaccaccagccucuacaaggggguguacgagcugcagacccuggagcucaacauggagacgcugaacaugaccaugccgcuguccugcaccaagaacaacagccaccacuacaucauggugggcaacgagaccggccucgagcugacgcugaccaacaccuccaucaucgaccacaaguucugcaaccucagcgacgcccaccggaagaaccuguacgaccacgcccugauguccaucaucagcaccuuccaccucuccauccccaacuucaaccaguacgaggccaugagcugcgacuucaacgggggcaagaucuccguccaguacaaccugagccacuccuacgccaaggacgcggccgaccacugcgggacgguggccaacggcgugcugcagaccuucaugcgcauggccuggggcgggagcuacaucgcgcucgacuccggcugcgggcggugggacugcaucaugaccagcuaccaguaccugaucauccagaacaccacgugggaggaccacugccaguucucccgccccagccccaucggcuaccuggggcuccugucccagcggacccgcgacaucuacaucagccggcgccggcgcggcaccuucaccuggacgcugagcgacuccgagggcaaggacacccccgggggcuacugccucacccgguggaugcugaucgaggccgagcugaagugcuucgggaacaccgccgucgccaagugcaacgagaagcacgacgaggaguucugcgacaugcuccgccuguucgacuucaacaagcaggccauccagcggcugaaggcgccggcccagaugagcauccagcucaucaacaaggccgugaacgcccugaucaacgaccagcugaucaugaagaaccaccuccgcgacaucaugugcauccccuacugcaacuacuccaaguacugguaccugaaccacacgaccaccggcaagaccagccugcccaagugcuggcucguguccaacgggagcuaccugaacgagacgcacuucuccgacgacaucgagcagcaggccgacaacaugaucaccgagaugcugcagaaggaguacauggagcggcagggcaagaccccgcucggccuggucgaccuguucguguucagcaccuccuucuaccucaucagcaucuuccugcaccuggugaagauccccacgcaccgccacaucgucgggaagcccugccccaagccgcaccggcugaaccacaugggcaucugcuccugcgggcucuacaagcagcccggcgugcccgugaaguggaagcgcugaggacuagucccuguucccagagcccacuuuuuuuucuuuuuuugaaauaaaauagccugucuuucagaucucaaaggcucuuuucagagccaccaaaaaaaaaaaaaaaaaaaaaaaaaaaaaaaaaaaaaaaaaaaaaaaaaaaaaaaaaaaaaaaaagaauu

SEQ ID NO: 15653 - RNA, 1736 nt, Artificial Sequence
  mRNA product Design a-2 (hSL-A64-N5) comprising derived and/or modified sequence from LASV(LM776-SLE-2012;Clade IV)__AIT17824__GPCmut1 (opt1)
aggagaguccgcucagccagguugcagaagcggcuuagcguguguccuaaucuucucucugcguguagguaggccugugccgcaaacaagcuuaccaugggccagaucgugaccuucuuccaggaggucccccacgugaucgaggaggugaugaacaucguccugaucgcccucagcauccuggccgugcugaaggggcucuacaacuucgcgaccugcggccugguggggcuggucacguuccuccugcugugcggccgcuccugcaccaccagcguguacaaggggguguacgagcuccagacccuggagcugaacauggagacgcucaacaugaccaugccgcuguccugcaccaagaacaacagccaccacuacaucauggucggcaacgagaccggccuggagcucacgcugaccaacaccuccaucaucaaccacaaguucugcaaccugagcgacgcccacaagaagaaccucuacgaccacgcccugauguccaucaucagcaccuuccaccuguccauccccaacuucaaccaguacgaggccaugagcugcgacuucaacgggggcaagaucuccgugcaguacaaccucagccacuccuacgccggggacgcggccaaccacugcggcacgguggccaacgggguccugcagaccuucaugcggauggccuggggcggcagcuacaucgcgcuggacuccgggugcggcaagugggacugcaucaugaccagcuaccaguaccucaucauccagaacaccacgugggaggaccacugccaguucucccgccccagccccaucggguaccugggccugcucucccagcggacccgcgacaucuacaucagccggcgccggcgcggcaccuucaccuggacgcugagcgacuccgaggggaaggacaccccgggcggguacugccugacccgguggaugcucaucgaggccgagcugaagugcuucggcaacaccgccguggccaagugcaacgagaagcacgacgaggaguucugcgacaugcugcgccucuucgacuucaacaagcaggccauccagcggcugaaggcgcccgcccagaugagcauccagcugaucaacaaggccgugaacgcccucaucaacgaccagcugaucaugaagaaccaccuccgcgacaucaugugcauccccuacugcaacuacuccaaguacugguaccugaaccacacgaccaccgggaagaccagccugcccaagugcuggcuggucuccaacggcagcuaccucaacgagacgcacuucuccgacgacaucgagcagcaggccgacaacaugaucaccgagaugcugcagaaggaguacauggagcggcagggcaagaccccgcuggggcucguggaccuguucguguucagcaccuccuucuaccugaucagcaucuuccuccaccuggucaagauccccacgcaccgccacaucgugggcaaguccugccccaagccccaccggcugaaccacauggggaucugcagcugcggccuguacaagcagccgggggugcccguccgcuggaagcggugaggacuagucccuguucccagagcccacuuuuuuuucuuuuuuugaaauaaaauagccugucuuucagaucucaaaggcucuuuucagagccaccaaaaaaaaaaaaaaaaaaaaaaaaaaaaaaaaaaaaaaaaaaaaaaaaaaaaaaaaaaaaaaaaagaauu

SEQ ID NO: 15654 - RNA, 1736 nt, Artificial Sequence
  mRNA product Design a-2 (hSL-A64-N5) comprising derived and/or modified sequence from LASV(Mad39;Clade IV)__ANH09722__GPCmut1 (opt1)
aggagaguccgcucagccagguugcagaagcggcuuagcguguguccuaaucuucucucugcguguagguaggccugugccgcaaacaagcuuaccaugggccagaucgugaccuucuuccaggaggucccccacgugaucgaggaggugaugaacaucguccugaucgcccucagcauccuggccgugcugaaggggcucuacaacguggcgaccugcggccugaucgggcuggucacguuccuccugcugugcggccgcuccugcaccaccacccucuacaaggggguguacgagcugcaggcccuggagcucaacauggagacgcugaacaugaccaugccgcugagcugcaccaagaacaacucccaccacuacauccgggugggcaacgagaccggccucgagcugacgcugaccaacaccagccucaucaaccacaaguucugcaaccuguccgacgcccacaagaagaaccuguacgaccacgcccucaugagcaucaucuccaccuuccaccugagcauccccaacuucaaccaguacgaggccauguccugcgacuucaacgacgggaagaucagcguccaguacaaccugucccacacguacgcgggcgacaccgccaaccacugcgggaccguggccaacggcgugcuccagaccuucaugcgcauggccuggggcgggagcuacaucgcgcuggacuccggcugcgggggcugggacugcaucaugacgagcuaccaguaccugaucauccagaacaccaccugggaggaccacugccaguucucccggcccagccccaucggguaccucggccugcugucccagcgcacccgggacaucuacaucagccgccggcgccggggcacguucaccuggacccucuccgacagcgaggggaaggacaccccgggcggguacugccugacgcgcuggaugcugaucgaggccgagcucaagugcuucggcaacaccgccgucgccaagugcaacgagaagcacgacgaggaguucugcgacaugcugcggcuguucgacuucaacaagcaggccauccagcgccucaaggcgcccgcccagaugagcauccagcugaucaacaaggccgugaacgcccugaucaacgaccagcucaucaugaagaaccaccuccgggacaucaugugcauccccuacugcaacuacuccaaguacugguaccugaaccacaccgugaccgggaagacgagccugcccaagugcuggcuggucuccaacggcagcuaccugaacgagacccacuucuccgacgacaucgagcagcaggccgacaacaugaucaccgagaugcuccagaaggaguacauggagcgccagggcaagaccccgcuggggcugguggaccucuucguguucagcacguccuucuaccugaucagcaucuuccugcaccuggucaagauccccacccaccggcacguggugggcaagcccugccccaagccgcaccgccucaaccacauggggaucugcuccugcggcuucuacaagcagcccgggguccccgugcgguggaagcgcugaggacuagucccuguucccagagcccacuuuuuuuucuuuuuuugaaauaaaauagccugucuuucagaucucaaaggcucuuuucagagccaccaaaaaaaaaaaaaaaaaaaaaaaaaaaaaaaaaaaaaaaaaaaaaaaaaaaaaaaaaaaaaaaaagaauu

SEQ ID NO: 15655 - RNA, 1736 nt, Artificial Sequence
  mRNA product Design a-2 (hSL-A64-N5) comprising derived and/or modified sequence from LASV(Z0947-SLE-2011;Clade IV)__AIT17840__GPCmut1 (opt1)
aggagaguccgcucagccagguugcagaagcggcuuagcguguguccuaaucuucucucugcguguagguaggccugugccgcaaacaagcuuaccaugggccagaucgugaccuucuuccaggaggucccccacgugaucgaggaggugaugaacaucguccugaucgcccucagcauccuggccgugcugaaggggcucuacaacuucgcgaccugcggccugguggggcuggucacguuccuccugcugugcggccgcuccugcaccaucagccucuacaaggggguguacgagcugcagacccuggagcucaacauggagacccugaacaugacgaugccgcuguccugcaccaagaacaacagccaccacuacaucauggugggcaacgagaccggccucgagcugacccugacgaacaccuccaucaucaaccacaaguucugcaaccucagcgacgcccacaagaagaaccuguacgaccacgcccugauguccaucaucagcaccuuccaccucuccauccccaacuucaaccaguacgaggccaugagcugcgacuucaacgggggcaagaucuccguccaguacaaccugagccacuccuacgccggggacgcggccaaccacugcggcaccguggccaacggggugcugcagacguucaugcggauggccuggggcggcagcuacaucgcgcucgacuccgggugcgaccgcugggacugcaucaugaccagcuaccaguaccugaucauccagaacaccaccugggaggaccacugccaguucucccggcccagccccaucggcuaccuggggcuccugucccagcgcacgcgggacaucuacaucagccgccggcgccggggcaccuucaccuggacccugagcgacuccgagggcaaggacacgcccgggggcuacugccucacccgcuggaugcugaucgaggccgagcugaagugcuucgggaacaccgccgucgccaagugcaacgagaagcacgacgaggaguucugcgacaugcuccggcuguucgacuucaacaagcaggccauccagcgccugaaggcgccggcccagaugagcauccagcucaucaacaaggccgugaacgcccugaucaacgaccagcugaucaugaagaaccaccuccgggacaucaugugcauccccuacugcaacuacuccaaguacugguaccugaaccacaccacgaccggcaagaccagccugcccaagugcuggcucguguccaacgggagcuaccugaacgagacccacuucuccgacgacaucgagcagcaggccgacaacaugaucacggagaugcugcagaaggaguacauggagcgccagggcaagaccccgcucggccuggucgaccuguucguguucagcaccuccuucuaccucaucagcaucuuccugcaccuggugaagauccccacccaccggcacaucgucgggaagcccugccccaagccgcaccgccugaaccacaugggcaucugcuccugcgggcucuacaagcagcccggcgugcccgugaaguggaagcggugaggacuagucccuguucccagagcccacuuuuuuuucuuuuuuugaaauaaaauagccugucuuucagaucucaaaggcucuuuucagagccaccaaaaaaaaaaaaaaaaaaaaaaaaaaaaaaaaaaaaaaaaaaaaaaaaaaaaaaaaaaaaaaaaagaauu

SEQ ID NO: 15656 - RNA, 1736 nt, Artificial Sequence
  mRNA product Design a-2 (hSL-A64-N5) comprising derived and/or modified sequence from LASV(Josiah;Clade IV)__NP_694870__GPCmut1 (opt4)
aggagaguccgcucagccagguugcagaagcggcuuagcguguguccuaaucuucucucugcguguagguaggccugugccgcaaacaagcuuaccaugggccagaucgugaccuucuuccaggaggugccccacgugaucgaggaggugaugaacaucgugcugaucgcccugagcgugcuggccgugcugaagggccuguacaacuucgccaccugcggccuggugggccuggugaccuuccugcugcugugcggcagaagcugcaccaccagccuguacaagggcguguacgagcugcagacccuggagcugaacauggagacccugaacaugaccaugccccugagcugcaccaagaacaacagccaccacuacaucauggugggcaacgagaccggccuggagcugacccugaccaacaccagcaucaucaaccacaaguucugcaaccugagcgacgcccacaagaagaaccuguacgaccacgcccugaugagcaucaucagcaccuuccaccugagcauccccaacuucaaccaguacgaggccaugagcugcgacuucaacggcggcaagaucagcgugcaguacaaccugagccacagcuacgccggcgacgccgccaaccacugcggcaccguggccaacggcgugcugcagaccuucaugagaauggccuggggcggcagcuacaucgcccuggacagcggcugcggcaacugggacugcaucaugaccagcuaccaguaccugaucauccagaacaccaccugggaggaccacugccaguucagcagacccagccccaucggcuaccugggccugcugagccagagaaccagagacaucuacaucagcagaagacgccggggcaccuucaccuggacccugagcgacagcgagggcaaggacacccccggcggcuacugccugaccagauggaugcugaucgaggccgagcugaagugcuucggcaacaccgccguggccaagugcaacgagaagcacgacgaggaguucugcgacaugcugagacuguucgacuucaacaagcaggccauccagagacugaaggcccccgcccagaugagcauccagcugaucaacaaggccgugaacgcccugaucaacgaccagcugaucaugaagaaccaccugagagacaucaugugcauccccuacugcaacuacagcaaguacugguaccugaaccacaccaccaccggcagaaccagccugcccaagugcuggcuggugagcaacggcagcuaccugaacgagacccacuucagcgacgacaucgagcagcaggccgacaacaugaucaccgagaugcugcagaaggaguacauggagagacagggcaagaccccccugggccugguggaccuguucguguucagcaccagcuucuaccugaucagcaucuuccugcaccuggugaagauccccacccacagacacaucgugggcaagagcugccccaagccccacagacugaaccacaugggcaucugcagcugcggccuguacaagcagcccggcgugcccgugaaguggaagagaugaggacuagucccuguucccagagcccacuuuuuuuucuuuuuuugaaauaaaauagccugucuuucagaucucaaaggcucuuuucagagccaccaaaaaaaaaaaaaaaaaaaaaaaaaaaaaaaaaaaaaaaaaaaaaaaaaaaaaaaaaaaaaaaaagaauu

SEQ ID NO: 15657 - RNA, 1733 nt, Artificial Sequence
  mRNA product Design a-2 (hSL-A64-N5) comprising derived and/or modified sequence from LASV(LP;Clade I)__AAF86701__GPCmut1 (opt4)
aggagaguccgcucagccagguugcagaagcggcuuagcguguguccuaaucuucucucugcguguagguaggccugugccgcaaacaagcuuaccaugggccagaucaucaccuucuuccaggaggugccccacgugaucgaggaggugaugaacaucgugcugaucgcccugagccugcuggccauccugaagggccuguacaacaucgccaccugcggcaucaucggccugguggccuuccuguuccugugcggcaagagcugcagccugacccugaagggcggcuacgagcugcagacccuggagcugaacauggagacccugaacaugaccaugccccugagcugcaccaagaacagcagccaccacuacaucagagugggcaacgagaccggccuggagcugacccugaccaacaccagcaucaucaaccacaaguucugcaaccugagcgacgcccacaagaagaaccuguacgaccacgcccugaugagcaucaucagcaccuuccaccugagcauccccaacuucaaccaguacgaggccaugagcugcgacuucaacggcggcaagaucagcgugcaguacaaccugagccacagcuacgccggcgacgccgccgagcacugcggcaccguggccaacggcgugcugcagaccuucaugagaauggccuggggcggcagauacaucgcccuggacagcggcugcggcaacugggacugcaucaugaccagcuaccaguaccugaucauccagaacaccaccugggaggaccacugccaguucagcagacccagccccaucggcuaccugggccugcugagccagagaaccagagacaucuacaucagcagaagacgccggggcaccuucaccuggacccugagcgacagcgagggcaacgagacccccggcggcuacugccugaccagauggaugcugaucgaggccgagcugaagugcuucggcaacaccgccguggccaagugcaacgagaagcacgacgaggaguucugcgacaugcugagacuguucgacuucaacaagcaggccaucagaagacugaaggcccccgcccagaugagcauccagcugaucaacaaggccgugaacgcccugaucaacgaccagcugaucaugaagaaccaccugagagacaucaugugcauccccuacugcaacuacagcaaguacugguaccugaaccacaccagcagcggcagaaccagccugcccaagugcuggcugaucagcaacggcagcuaccugaacgagacccaguucagcgacgacaucgagcagcaggccgacaacaugaucaccgagaugcugcagaaggaguacaucgagagacagggcaagaccccccugggccugguggacaucuucaucuucagcaccagcuucuaccugaucagcaucuuccugcaccugaucaagauccccacccacagacacaucgugggcaagcccugccccaagccccacagacugaaccacaugggcgugugcagcugcggccuguacaagcaccccggcgugcccaccaaguggaagagaugaggacuagucccuguucccagagcccacuuuuuuuucuuuuuuugaaauaaaauagccugucuuucagaucucaaaggcucuuuucagagccaccaaaaaaaaaaaaaaaaaaaaaaaaaaaaaaaaaaaaaaaaaaaaaaaaaaaaaaaaaaaaaaaaagaauu

SEQ ID NO: 15658 - RNA, 1733 nt, Artificial Sequence
  mRNA product Design a-2 (hSL-A64-N5) comprising derived and/or modified sequence from LASV(803213;Clade II)__AAF86703__GPCmut1 (opt4)
aggagaguccgcucagccagguugcagaagcggcuuagcguguguccuaaucuucucucugcguguagguaggccugugccgcaaacaagcuuaccaugggccagaucaucaccuucuuccaggaggugccccacgugaucgaggaggugaugaacaucgugcugaucgcccugagccugcuggccauccugaagggcaucuacaacguggccaccugcggccuguucggccugaucagcuuccugcugcugugcggcagaagcugcagcgugaccuacaagggcguguacgagcugcagacccuggagcugaacauggccaaccugaacaugaccaugccccugagcugcaccaagaacaacagccaccacuacaucauggugggcaacgagaccggccuggagcugacccugaccaacaccagcaucaucaaccacaaguucugcaaccugagcgacgcccacaagaagaaccuguacgaccacgcccugaugagcaucaucagcaccuuccaccugagcauccccaacuucaaccaguacgaggccaugagcugcgacuucaacggcggcaagaucagcgugcaguacaaccugagccacagcuucgccguggacgccgccaaccacugcggcaccaucgccaacggcgugcugcagaccuucaugagaauggccuggggcggcagcuacaucgcccuggacagcggcugcggcaacugggacugcaucaugaccagcuaccaguaccugaucauccagaacaccaccugggaggaccacugccaguucagcagacccagccccaucggcuaccugggccugcugagccagagaaccagagacaucuacaucagcagaagacgccggggcaccuucaccuggacccugagcgacagcgagggcaacgaggcccccggcggcuacugccugaccagauggaugcugaucgaggccgagcugaagugcuucggcaacaccgccguggccaagugcaacgagaagcacgacgaggaguucugcgacaugcugagacuguucgacuucaacaagcaggccaucaagagacugaagacccccgcccagaugagcauccagcugaucaacaaggccgugaacgcccugaucaacgaccagcugaucaugaagaaccaccugagagacaucaugugcauccccuacugcaacuacagcagauacugguaccugaaccacaccgugaccggcaagaccagccugcccagaugcuggcuggugagcaacggcagcuaccugaacgagacccacuucagcgacgacaucgagcagcaggccgacaacaugaucaccgagaugcugcagaaggaguacauggacagacagggcaagaccccccugggccugguggaccuguucguguucagcaccagcuucuaccugaucagcaucuuccugcaccuggugaagauccccacccacagacacaucgugggcaagcccugccccaagccccacagacugaaccacaugggcaucugcagcugcggccuguacaagcaccccggcgugcccgugaaguggaagagaugaggacuagucccuguucccagagcccacuuuuuuuucuuuuuuugaaauaaaauagccugucuuucagaucucaaaggcucuuuucagagccaccaaaaaaaaaaaaaaaaaaaaaaaaaaaaaaaaaaaaaaaaaaaaaaaaaaaaaaaaaaaaaaaaagaauu

SEQ ID NO: 15659 - RNA, 1733 nt, Artificial Sequence
  mRNA product Design a-2 (hSL-A64-N5) comprising derived and/or modified sequence from LASV(GA391;Clade III)__CAA36645__GPCmut1 (opt4)
aggagaguccgcucagccagguugcagaagcggcuuagcguguguccuaaucuucucucugcguguagguaggccugugccgcaaacaagcuuaccaugggccagaucgugaccuucuuccaggaggugccccacgugaucgaggaggugaugaacaucgugcugaucgcccugagcauccuggccauccugaagggccuguacaacguggccaccugcggccugaucggccuggugaccuuccugcugcugagcggcagaagcugcagccugaucuacaagggcaccuacgagcugcagacccuggagcugaacauggagacccugaacaugaccaugccccugagcugcaccaagaacaacagccaccacuacaucagagugggcaacgagaccggccuggagcugacccugaccaacaccagcauccugaaccacaaguucugcaaccugagcgacgcccacaagagaaaccuguacgaccacagccugaugagcaucaucagcaccuuccaccugagcauccccaacuucaaccaguacgaggccaugagcugcgacuucaacggcggcaagaucaccgugcaguacaaccugagccacagcuucgccguggacgccgccggccacugcggcacccuggccaacggcgugcugcagaccuucaugagaauggccuggggcggcagcuacaucgcccuggacagcggcugcggcaacugggacugcaucaugaccagcuaccaguaccugaucauccagaacaccaccugggacgaccacugccaguucagcagacccagccccaucggcuaccugggccugcugagccagagaaccagagacaucuacaucagcagaagacgccggggcaccuucaccuggacccugagcgacagcgagggcaacgagacccccggcggcuacugccugaccagauggaugcugaucgaggccgagcugaagugcuucggcaacaccgccguggccaagugcaacgagaagcacgacgaggaguucugcgacaugcugagacuguucgacuucaacaagcaggccaucagaagacugaagacccccgcccagaugagcauccagcugaucaacaaggccgugaacgcccugaucaacgaccagcugaucaugaagaaccaccugagagacaucaugugcauccccuacugcaacuacagcagauacugguaccugaaccacaccagcaccggcaagaccagccugcccagaugcuggcugaucagcaacggcagcuaccugaacgagaccaaguucagcgacgacaucgagcagcaggccgacaacaugaucaccgagaugcugcagaaggaguacaucgacagacagggcaagaccccccugggccugguggaccuguucguguucagcaccagcuucuaccugaucagcaucuuccugcaccuggugaagauccccacccacagacacaucgugggcaagcccugccccaagccccacagacugaaccacaugggcaucugcagcugcggccuguacaagcagcccggcgugcccgugagauggaagagaugaggacuagucccuguucccagagcccacuuuuuuuucuuuuuuugaaauaaaauagccugucuuucagaucucaaaggcucuuuucagagccaccaaaaaaaaaaaaaaaaaaaaaaaaaaaaaaaaaaaaaaaaaaaaaaaaaaaaaaaaaaaaaaaaagaauu

SEQ ID NO: 15660 - RNA, 1736 nt, Artificial Sequence
  mRNA product Design a-2 (hSL-A64-N5) comprising derived and/or modified sequence from LASV(AV;Clade V)__CCA30314__GPCmut1 (opt4)
aggagaguccgcucagccagguugcagaagcggcuuagcguguguccuaaucuucucucugcguguagguaggccugugccgcaaacaagcuuaccaugggccagaucgugaccuucuuccaggaggugccccacgugaucgaggaggugaugaacaucgugcugaucgcccugagcauccuggccgugcugaagggccuguacaacaucgccaccugcggccugaucggccugaucaccuuccugcugcugugcggcagaagcugcagcagcaaccuguacaagggcguguacgagcugcagagccuggaccugaacauggagacccugaacaugaccaugccccugagcugcaccaagaacaacagccaccacuacaucagagugggcaacgacaccggccuggagcugacccugaccaacaccagcauccugaaccacaaguucugcaaccugagcgacgcccacaagaaggaccuguacgaccacgcccugaugagcaucaucagcaccuuccaccugagcauccccaacuucaaccaguacgaggccaugagcugcgacuucaacggcggcaagaucagcgugcaguacaaccugagccacagcuacgccaucgacgccgccaaccacugcggcaccguggccaacggcauccugcagaccuucaugagaauggccuggggcggcagcuacaucgcccuggacagcggcugcggcaacugggacugcaucaugaccagcuaccaguaccugaucauccagaacaccaccugggagaaccacugccaguucagcagacccagccccaucggcuaccugggccugcugagccagagaaccagagacaucuacaucagcagaagacgccggggcaccuucaccuggacccugagcgacagcgagggcaacgccacccccggcggcuacugccugaccagauggaugcugaucgaggccgagcugaagugcuucggcaacaccgccguggccaagugcaacgagaagcacgacgaggaguucugcgacaugcugagacuguucgacuucaacaagcaggccaucagcagacugaagagccccgcccagaugagcauccagcugaucaacaaggccgugaacgcccugaucaacgaccagcugaucaugaagaaccaccugagagacaucaugugcauccccuacugcaacuacagcaaguacugguaccugaaccacaccaucaccggcaagaccagccugcccaagugcuggcuggugagcaacggcagcuaccugaacgagacccacuucagcgacgacaucgagcagcaggccgacaacaugaucaccgagaugcugcagaaggaguacauggagagacagggcaagaccccccugggccugguggaccuguucguguucagcaccagcuucuaccugaucagcaucuuccugagacuggugaagauccccacccacagacacaucgugggcaagcccugccccaagccccacagacugaaccacaugggcaucugcagcugcggccuguacaagcagcccggcgugcccgugagauggaagagaugaggacuagucccuguucccagagcccacuuuuuuuucuuuuuuugaaauaaaauagccugucuuucagaucucaaaggcucuuuucagagccaccaaaaaaaaaaaaaaaaaaaaaaaaaaaaaaaaaaaaaaaaaaaaaaaaaaaaaaaaaaaaaaaaagaauu

SEQ ID NO: 15661 - RNA, 1733 nt, Artificial Sequence
  mRNA product Design a-2 (hSL-A64-N5) comprising derived and/or modified sequence from LASV(Togo/2016/7082;Clade VI)__AMR44577__GPCmut1 (opt4)
aggagaguccgcucagccagguugcagaagcggcuuagcguguguccuaaucuucucucugcguguagguaggccugugccgcaaacaagcuuaccaugggccagaucaucaccuucuuccaggaggugccccacgugaucgaggaggugaugaacaucgugcugaucgcccugagccugcuggccauccugaagggcguguacaacguggccaccugcggcaucaucggccuggugaccuuccuguuccugugcggcagaagcugcagccugaucuacaagggcagcuacgagcugcagacccuggagcugaacauggagacccugaacaugaccaugccccugagcugcaccaagaacagcagccaccacuacaucagagugggcaacgagaccggccuggagcugacccugaccaacaccagcaucaucaaccacaaguucugcaaccugagcgacgcccacaagagaaaccuguacgaccacgcccugaugagcauccugagcaccuuccaccugagcauccccaacuucaaccaguacgaggccaugagcugcgacuucaacggcggcaagaucagcgugcaguacaaccugagccacgccuacgccguggacgccgccgagcacugcggcaccguggccaacggcgugcugcagaccuucaugagaauggccuggggcggcagcuacaucgcccuggacagcggcugcggcaacugggacugcaucaugaccagcuaccaguaccugaucauccagaacaccaccugggaggaccacugccaguucagcagacccagccccaucggcuaccugggccugcugagccagagaaccagagacaucuacaucagcagaagacgccggggcaccuucaccuggacccugagcgacagcgagggcaacgagacccccggcggcuacugccugaccagauggaugcugaucgaggccgagcugaagugcuucggcaacaccgccguggccaagugcaacgagaagcacgacgaggaguucugcgacaugcugagacuguucgacuucaacaagcaggccauccagagacugaagagccccgcccagaugagcauccagcugaucaacaaggccgugaacgcccugaucaacgaccagcugaucaugaagaaccaccugagagacaugaugugcauccccuacugcaacuacagcaaguacugguaccugaaccacaccagcagcggcagaaccagccugcccaagugcuggcuggugagcaacggcagcuaccugaacgagacccacuucagcgacgacaucgagcagcaggccgacaacaugaucaccgagaugcugcagaaggaguacaucgacagacagggcaagaccccccugggccugguggaccuguucguguucagcaccagcuucuaccugaucagcaucuuccugcaccugaucaagauccccacccacagacacaucgugggcaagcccugccccaagccccacagacugaaccacaugggcaucugcagcugcggccuguacaagcagcccggcgugcccaccagauggaagagaugaggacuagucccuguucccagagcccacuuuuuuuucuuuuuuugaaauaaaauagccugucuuucagaucucaaaggcucuuuucagagccaccaaaaaaaaaaaaaaaaaaaaaaaaaaaaaaaaaaaaaaaaaaaaaaaaaaaaaaaaaaaaaaaaagaauu

SEQ ID NO: 15662 - RNA, 1733 nt, Artificial Sequence
  mRNA product Design a-2 (hSL-A64-N5) comprising derived and/or modified sequence from LASV(KAK-428;Clade n.d. (VII))__ANH09740__GPCmut1 (opt4)
aggagaguccgcucagccagguugcagaagcggcuuagcguguguccuaaucuucucucugcguguagguaggccugugccgcaaacaagcuuaccaugggccagaucgugaccuucuuccaggaggugccccacgugaucgaggaggugaugaacaucgugcugaucgcccugagccugcuggccauccugaagggccuguacaacuucgccaccugcggcgugaucggccugaucaccuuccugcugcugugcggcagaagcugcagcgccaccuacaagggccaguacgagcugcagacccuggagcugaacauggagagccugaacaugaccaugccccugagcugcaccaagaacaacagccaccacuacaucagagccggcaacaacaccggccuggagcugacccugaccaacaccagcaucaucagccacaaguucugcaaccugagcgacgcccacaagaagaaccuguacgaccacacccugaugagcaucaucaccaccuuccaccugagcauccccaacuucaaccaguacgaggccaugagcugcgacuucaacggcggcaagaucagcauccaguacaaccugagccacagcuacgccggcgacgccgcccagcacugcggcaccguggccaacggcgugcugcagaccuucaugagaauggccuggggcggcagcuaccuggcccuggacagcggcugcagaggcugggacugcaucaucagcagcuaccaguaccugaucauccagaacaccaccugggacgaccacugccaguucagcagacccagccccaucggcuaccugggcuucgugagccagaagaccagagacaucuacaucagcagaagacgccggggcaccuucaccuggacccugagcgacagcgagggccacgacaugcccggcggcuacugccugaccagauggaugcugaucgaggccgaccugaagugcuucggcaacaccgccguggccaagugcaacgagaagcacgacgaggaguucugcgacauguggagacuguucgacuucaacaagcaggccauccagagacugaaggcccccgcccagaugaacauccagcugaucaacaaggccgugaacgcccugaucaacgaccagcugaugaugaagaaccaccugagagacaucaugugcauccccuacugcaacuacagcaaguucugguaccugaacaacaccaccaccggcagaaccagccugcccagaugcuggcugaucagcaacggcagcuaccugaacgagacccacuucagcgacgacaucgagcagcaggccgacaacaugaucaccgagaugcugcagaaggaguacauggacagacagggcaagaccccccugggccugguggaccuguucguguucagcaccagcuucuaccugaucaccaucuuccugcaccuggugaagauccccacccacagacacaucgugggcaagcccugccccaagccccacagacugaaccacaugggcaucugcagcugcggccuguacaagcagcccggcgugcccgugagauggaagagaugaggacuagucccuguucccagagcccacuuuuuuuucuuuuuuugaaauaaaauagccugucuuucagaucucaaaggcucuuuucagagccaccaaaaaaaaaaaaaaaaaaaaaaaaaaaaaaaaaaaaaaaaaaaaaaaaaaaaaaaaaaaaaaaaagaauu

SEQ ID NO: 15663 - RNA, 1733 nt, Artificial Sequence; identical to SEQ ID NO: 15657
  mRNA product Design a-2 (hSL-A64-N5) comprising derived and/or modified sequence from LASV(Pinneo-NIG-1969;Clade I)__AIT17836__GPCmut1 (opt4)

SEQ ID NO: 15664 - RNA, 1733 nt, Artificial Sequence
  mRNA product Design a-2 (hSL-A64-N5) comprising derived and/or modified sequence from LASV(ISTH0009-NIG-2011;Clade II)__AIT17404__GPCmut1 (opt4)
aggagaguccgcucagccagguugcagaagcggcuuagcguguguccuaaucuucucucugcguguagguaggccugugccgcaaacaagcuuaccaugggccagaucaucaccuucuuccaggaggugccccacgugaucgaggaggugaugaacaucgugcugaucgcccugagccugcuggccauccugaagggcaucuacaacguggccaccugcggccuguucggccuggugagcuuccugcugcugugcggcagaagcugcagcaccaccuacaagggcguguacgagcugcagacccuggagcuggacauggccagccugaacaugaccaugccccugagcugcaccaagaacaacagccaccacuacaucauggugggcaacgagaccggccuggagcugacccugaccaacaccagcaucaucaaccacaaguucugcaaccugagcgacgcccacaagaagaaccuguacgaccacgcccugaugagcaucaucagcaccuuccaccugagcauccccaacuucaaccaguacgaggccaugagcugcgacuucaacggcggcaagaucagcgugcaguacaaccugagccacgccuacgccguggacgccgccaaccacugcggcaccaucgccaacggcgugcugcagaccuucaugagaauggccuggggcggcagcuacaucgcccuggacagcggcugcggcagcugggacugcaucaugaccagcuaccaguaccugaucauccagaacaccaccugggaggaccacugccaguucagcagacccagccccaucggcuaccugggccugcugagccagagaaccagagacaucuacaucagcagaagacgccggggcaccuucaccuggacccugagcgacagcgagggcaacgagacccccggcggcuacugccugaccagauggaugcugaucgaggccgagcugaagugcuucggcaacaccgccguggccaagugcaacgagaagcacgacgaggaguucugcgacaugcugagacuguucgacuucaacaagcaggccaucagaagacugaagacccccgcccagaugagcauccagcugaucaacaaggccgugaacgcccugaucaacgaccagcugaucaugaagaaccaccugagagacaucaugugcauccccuacugcaacuacagcaaguacugguaccugaaccacaccgugaccggcaagaccagccugcccagaugcuggcuggugagcaacggcagcuaccugaacgagacccacuucagcgacgacaucgagcagcaggccgacaacaugaucaccgagcugcugcagaaggaguacauggacagacagggcaagaccccccugggccugguggaccuguucguguucagcaccagcuucuaccugaucagcaucuuccugcaccugaucaagauccccacccacagacacaucaccggcaagcccugccccaagccccacagacugaaccacaugggcaucugcagcugcggccuguacaagcaccccggcgugcccgugaaguggaagagaugaggacuagucccuguucccagagcccacuuuuuuuucuuuuuuugaaauaaaauagccugucuuucagaucucaaaggcucuuuucagagccaccaaaaaaaaaaaaaaaaaaaaaaaaaaaaaaaaaaaaaaaaaaaaaaaaaaaaaaaaaaaaaaaaagaauu

SEQ ID NO: 15665 - RNA, 1733 nt, Artificial Sequence
  mRNA product Design a-2 (hSL-A64-N5) comprising derived and/or modified sequence from LASV(ISTH2010-NIG-2012;Clade II)__AIT17482__GPCmut1 (opt4)
aggagaguccgcucagccagguugcagaagcggcuuagcguguguccuaaucuucucucugcguguagguaggccugugccgcaaacaagcuuaccaugggccagaucaucaccuucuuccaggaggugccccacgugaucgaggaggugaugaacaucgugcugaucgcccugagccugcuggccauccugaagggcaucuacaacguggccaccugcggccuguucggccuggugagcuuccugcugcugugcggcagaagcugcagcaccaccuacaagggcguguacgagcugcagacccuggagcuggacauggccagccugaacaugaccaugccccugagcugcaccaagaacaacagccaccacuacaucauggugggcaacgagaccggccuggagcugacccugaccaacaccagcaucaucaaccacaaguucugcaaccugagcgacgcccacaagaagaaccuguacgaccacgcccugaugagcaucaucagcaccuuccaccugagcauccccaacuucaaccaguacgaggccaugagcugcgacuucaacggcggcaagaucagcgugcaguacaaccugagccacgccuacgccguggacgccgccaaccacugcggcaccaucgccaacggcgugcugcagaccuucaugagaauggccuggggcggcagcuacaucgcccuggacagcggcugcggcagcugggacugcaucaugaccagcuaccaguaccugaucauccagaacaucaccugggaggaccacugccaguucagcagacccagccccaucggcuaccugggccugcugagccagagaaccagagacaucuacaucagcagaagacgccggggcaccuucaccuggacccugagcgacagcgagggcaacgagacccccggcggcuacugccugaccagauggaugcugaucgaggccgagcugaagugcuucggcaacaccgccguggccaagugcaacgagaagcacgacgaggaguucugcgacaugcugagacuguucgacuucaacaagcaggccaucagaagacugaagacccccgcccagaugagcauccagcugaucaacaaggccgugaacgcccugaucaacgaccagcugaucaugaagaaccaccugagagacaucaugugcauccccuacugcaacuacagcaaguacugguaccugaaccacaccgugaccggcaagaccagccugcccagaugcuggcuggugagcaacggcagcuaccugaacgagacccacuucagcgacgacaucgagcagcaggccgacaacaugaucaccgagcugcugcagaaggaguacaucgacagacagggcaagaccccccugggccugguggaccuguucguguucagcaccagcuucuaccugaucagcaucuuccugcaccuggugaagauccccacccacagacacguggugggcaagcccugccccaagccccacagacugaaccacaugggcaucugcagcugcggccuguacaagcaccccggcgugcccgugaaguggaagagaugaggacuagucccuguucccagagcccacuuuuuuuucuuuuuuugaaauaaaauagccugucuuucagaucucaaaggcucuuuucagagccaccaaaaaaaaaaaaaaaaaaaaaaaaaaaaaaaaaaaaaaaaaaaaaaaaaaaaaaaaaaaaaaaaagaauu

SEQ ID NO: 15666 - RNA, 1733 nt, Artificial Sequence
  mRNA product Design a-2 (hSL-A64-N5) comprising derived and/or modified sequence from LASV(Lassa virus/H.sapiens-wt/NGA/2015/ISTH_0543;Clade II)__AVO03639__GPCmut1 (opt4)
aggagaguccgcucagccagguugcagaagcggcuuagcguguguccuaaucuucucucugcguguagguaggccugugccgcaaacaagcuuaccaugggccagaucaucaccuucuuccaggaggugccccacgugaucgaggaggugaugaacaucgugcugaucgcccugagccugcuggccauccugaagggcaucuacaacguggccaccugcggccuguucggccuggugagcuuccugcugcugugcggcagaagcugcagcaccaccuacaagggcguguacgagcugcagacccuggagcuggacauggccaaccugaacaugaccaugccccugagcugcaccaagaacaacagccaccacuacaucauggugggcaacgagaccggccuggagcugacccugaccaacaccagcaucaucaaccacaaguucugcaaccugagcgacgcccacaagaagaaccuguacgaccacgcccugaugagcaucaucagcaccuuccaccugagcauccccaacuucaaccaguacgaggccaugagcugcgacuucaacggcggcaagaucagcgugcaguacaaccugagccacaccuacgccguggacgccgccaaccacugcggcaccaucgccaacggcgugcugcagaccuucaugagaauggccuggggcggcagcuacaucgcccuggacagcggcugcggcagcugggacugcaucaugaccagcuaccaguaccuggugauccagaacaccaccugggaggaccacugccaguucagcagacccagccccaucggcuaccugggccugcugagccagagaaccagagacaucuacaucagcagaagacgccggggcaccuucaccuggacccugagcgacagcgagggcaacgagacccccggcggcuacugccugaccagauggaugcugaucgaggccgagcugaagugcuucggcaacaccgccguggccaagugcaacgagaagcacgacgaggaguucugcgacaugcugagacuguucgacuucaacaagcaggccaucagaagacugaagacccccgcccagaugagcauccagcugaucaacaaggccgugaacgcccugaucaacgaccagcugaucaugaagaaccaccugagagacaucaugugcauccccuacugcaacuacagcaaguacugguaccugaaccacaccgugaccggcaagaccagccugcccagaugcuggcuggugagcaacggcagcuaccugaacgagacccacuucagcgacgacaucgagcagcaggccgacaacaugaucaccgagcugcugcagaaggaguacaucgacagacagggcaagaccccccugggccugguggaccuguucguguucagcaccagcuucuaccugaucagcaucuuccugcaccuggugaagauccccacccacagacacaucaccggcaagcccugccccaagccccacagacugaaccacaugggcaucugcagcugcggccuguacaagcaccccggcgugcccgugaaguggaagagaugaggacuagucccuguucccagagcccacuuuuuuuucuuuuuuugaaauaaaauagccugucuuucagaucucaaaggcucuuuucagagccaccaaaaaaaaaaaaaaaaaaaaaaaaaaaaaaaaaaaaaaaaaaaaaaaaaaaaaaaaaaaaaaaaagaauu

SEQ ID NO: 15667 - RNA, 1733 nt, Artificial Sequence
  mRNA product Design a-2 (hSL-A64-N5) comprising derived and/or modified sequence from LASV(Lassa virus/H.sapiens-wt/NGA/2016/ISTH_0009;Clade II)__AVO03571__GPCmut1 (opt4)
aggagaguccgcucagccagguugcagaagcggcuuagcguguguccuaaucuucucucugcguguagguaggccugugccgcaaacaagcuuaccaugggccagaucaucaccuucuuccaggaggugccccacgugaucgaggaggugaugaacaucgugcugaucgcccugagccugcuggccauccugaagggcaucuacaacguggccaccugcggccugcugggccuggugagcuuccugcugcugugcggcagaagcugcagcaccaccuacaagggcguguacgagcugcagacccuggagcuggacauggccagccugaacaugaccaugccccugagcugcaccaagaacaacagccaccacuacaucauggugggcaacgagaccggccuggagcugacccugaccaacaccagcaucaucaaccacaaguucugcaaccugagcgacgcccacaagaagaaccuguacgaccacgcccugaugagcaucaucagcaccuuccaccugagcauccccaacuucaaccaguacgaggccaugagcugcgacuucaacggcggcagaaucagcgugcaguacaaccugagccacagcuacgccguggacgccgccaaccacugcggcaccaucgccaacggcgugcugcagaccuucaugagaauggccuggggcggcagcuacaucgcccuggacagcggcugcggcagcugggacugcaucaugaccagcuaccaguaccugaucauccagaacaccaccugggaggaccacugccaguucagcagacccagccccaucggcuaccugggccugcugagccagagaaccagagacaucuacaucagcagaagacgccggggcaccuucaccuggacccugagcgacagcgagggcaacgagacccccggcggcuacugccugaccagauggaugcugaucgaggccgagcugaagugcuucggcaacaccgccguggccaagugcaacgagaagcacgacgaggaguucugcgacaugcugagacuguucgacuucaacaagcaggccaucagaagacugaagacccccgcccagaugagcauccagcugaucaacaaggccgugaacgcccugaucaacgaccagcugaucaugaagaaccaccugagagacaucaugugcauccccuacugcaacuacagcaaguacugguaccugaaccacaccgugaccggcaagaccagccugcccagaugcuggcuggugagcaacggcagcuaccugaacgagacccacuucagcgacgacaucgagcagcaggccgacaacaugaucaccgagcugcugcagaaggaguacaucgacagacagggcaagaccccccugggccugguggaccuguucguguucagcaccagcuucuaccugaucagcaucuuccugcaccuggugaagauccccacccacagacacaucaccggcaagcccugccccaagccccacagacugaaccacaugggcaucugcagcugcggccuguacaaccaccccggcgugcccgugaaguggaagagaugaggacuagucccuguucccagagcccacuuuuuuuucuuuuuuugaaauaaaauagccugucuuucagaucucaaaggcucuuuucagagccaccaaaaaaaaaaaaaaaaaaaaaaaaaaaaaaaaaaaaaaaaaaaaaaaaaaaaaaaaaaaaaaaaagaauu

SEQ ID NO: 15668 - RNA, 1733 nt, Artificial Sequence
  mRNA product Design a-2 (hSL-A64-N5) comprising derived and/or modified sequence from LASV(Lassa virus/H.sapiens-wt/NGA/2016/ISTH_0017;Clade II)__AVO03567__GPCmut1 (opt4)
aggagaguccgcucagccagguugcagaagcggcuuagcguguguccuaaucuucucucugcguguagguaggccugugccgcaaacaagcuuaccaugggccagaucaucaccuucuuccaggaggugccccacgugaucgaggaggugaugaacaucgugcugaucgcccugagccugcuggccauccugaagggcaucuacaacguggccaccugcggccuguucggccuggugagcuuccugcugcugugcggcagaagcugcagcaccaccuacaagggcguguacgagcugcagacccuggagcuggacauggccagccugaacaugaccaugccccugagcugcaccaagaacaacagccaccacuacaucauggugggcaacgagaccggccuggagcugacccugaccaacaccagcaucaucaaccacaaguucugcaaccugagcgacgcccacaagaagaaccuguacgaccacgcccugaugagcaucaucagcaccuuccaccugagcauccccaacuucaaccaguacgaggccaugagcugcgacuucaacggcggcaagaucagcgugcaguacaaccugagccacaccuacgccaucgacgccgccaaccacugcggcaccaucgccaacggcgugcugcagaccuucaugagaauggccuggggcggcagcuacaucgcccuggacagcggcugcggcagcugggacugcaucaugaccagcuaccaguaccugaucauccagaacaccaccugggaggaccacugccaguucagcagacccagccccaucggcuaccugggccugcugagccagagaaccagagacaucuacaucagcagaagacgccggggcaccuucaccuggacccugagcgacagcgagggcaacgagacccccggcggcuacugccugaccagauggaugcugaucgaggccgagcugaagugcuucggcaacaccgccguggccaagugcaacgagaagcacgacgaggaguucugcgacaugcugagacuguucgacuucaacaagcaggccaucagaagacugaagacccccgcccagaugagcauccagcugaucaacaaggccgugaacgcccugaucaacgaccagcugaucaugaagaaccaccugagagacaucaugugcauccccuacugcaacuacagcaaguacugguaccugaaccacaccgugaccggcaagaccagccugcccagaugcuggcuggugagcaacggcagcuaccugaacgagacccacuucagcgacgacaucgagcagcaggccgacaacaugaucaccgagcugcugcagaaggaguacauggacagacagggcaagaccccccugggccugguggaccuguucguguucagcaccagcuucuaccugaucagcaucuuccugcaccuggugagaauccccacccacagacacgugaucggcaagcccugccccaagccccacagacugaaccacaugggcaucugcagcugcggccuguacaagcaccccggcgugcccgugaaguggaagagaugaggacuagucccuguucccagagcccacuuuuuuuucuuuuuuugaaauaaaauagccugucuuucagaucucaaaggcucuuuucagagccaccaaaaaaaaaaaaaaaaaaaaaaaaaaaaaaaaaaaaaaaaaaaaaaaaaaaaaaaaaaaaaaaaagaauu

SEQ ID NO: 15669 - RNA, 1733 nt, Artificial Sequence
  mRNA product Design a-2 (hSL-A64-N5) comprising derived and/or modified sequence from LASV(Lassa virus/H.sapiens-wt/NGA/2018/ISTH_0959;Clade II)__AVV65099__GPCmut1 (opt4)
aggagaguccgcucagccagguugcagaagcggcuuagcguguguccuaaucuucucucugcguguagguaggccugugccgcaaacaagcuuaccaugggccagaucaucaccuucuuccaggaggugccccacgugaucgaggaggugaugaacaucgugcugaucgcccugagccugcuggccauccugaagggcaucuacaacguggugaccugcggccuguucggccuggugagcuuccugcugcugugcggcagaagcugcagcaccaccuacaagggcguguacgagcugcagacccuggagcuggacauggccagccugaacaugaccaugccccugagcugcaccaagaacaacagccaccacuacaucauggugggcaacgagaccggccuggagcugacccugaccaacaccagcaucaucaaccacaaguucugcaaccugagcgacgcccacaagaagaaccuguacgaccacgcccugaugagcaucaucagcaccuuccaccugagcauccccaacuucaaccaguacgaggccaugagcugcgacuucaacggcggcaagaucagcgugcaguacaaccugagccacgccuacgccaucgacgccgccaaccacugcggcaccaucgccaacggcgugcugcagaccuucaugagaauggccuggggcggcagcuacaucgcccuggacagcggcugcggcagcugggacugcaucaugaccagcuaccaguaccugaucauccagaacaccaccugggaggaccacugccaguucagcagacccagccccaucggcuaccugggccugcugagccagagaaccagagacaucuacaucagcagaagacgccggggcaccuucaccuggacccugagcgacagcgagggcaacgagacccccggcggcuacugccugaccagauggaugcugaucgaggccgagcugaagugcuucggcaacaccgccguggccaagugcaacgagaagcacgacgaggaguucugcgacaugcugagacuguucgacuucaacaagcaggccaucagaagacugaagacccccgcccagaugagcauccagcugaucaacaaggccgugaacgcccugaucaacgaccagcugaucaugaagaaccaccugagagacaucaugugcauccccuacugcaacuacagcaaguacugguaccugaaccacaccgugaccggcaagaccagccugcccagaugcuggcuggugagcaacggcagcuaccugaacgagacccacuucagcgacgacaucgagcagcaggccgacaacaugaucaccgagcugcugcagaaggaguacaucgacagacagggcaagaccccccugggccugguggaccuguucguguucagcaccagcuucuaccugaucagcaucuuccugcaccuggugaagauccccacccacagacacgugaucggcaagcccugccccaagccccacagacugaaccacaugggcaucugcagcugcggccuguacaagcaccccggcgugcccgugaaguggaagagaugaggacuagucccuguucccagagcccacuuuuuuuucuuuuuuugaaauaaaauagccugucuuucagaucucaaaggcucuuuucagagccaccaaaaaaaaaaaaaaaaaaaaaaaaaaaaaaaaaaaaaaaaaaaaaaaaaaaaaaaaaaaaaaaaagaauu

SEQ ID NO: 15670 - RNA, 1733 nt, Artificial Sequence
  mRNA product Design a-2 (hSL-A64-N5) comprising derived and/or modified sequence from LASV(LASV003-NIG-2008;Clade II)__AIT17580__GPCmut1 (opt4)
aggagaguccgcucagccagguugcagaagcggcuuagcguguguccuaaucuucucucugcguguagguaggccugugccgcaaacaagcuuaccaugggccagaucaucaccuucuuccaggaggugccccacgugaucgaggaggugaugaacaucgugcugaucgcccugagccugcuggccauccugaagggcaucuacaacguggccaccugcggccuguucggccuggugagcuuccugcugcugugcggcagaagcugcagcaccaccuacaagggcguguacgagcugcagacccuggagcuggacauggccagccugaacaugaccaugccccugagcugcaccaagaacaacagccaccacuacaucauggugggcaacgagaccggccuggagcugacccugaccaacaccagcaucaucaaccacaaguucugcaaccugagcgacgcccacaagaagaaccuguacgaccacgcccugaugagcaucaucagcaccuuccaccugagcauccccaacuucaaccaguacgaggccaugagcugcgacuucaacggcggcaagaucagcgugcaguacaaccugagccacaccuacgccguggacgccgccaaccacugcggcaccaucgccaacggcgugcugcagaccuucaugagaauggccuggggcggcagcuacaucgcccuggacagcggcugcggcagcugggacugcaucaugaccagcuaccaguaccugaucauccagaacaccaccugggaggaccacugccaguucagcagacccagccccaucggcuaccugggccugcugagccagagaaccagagacaucuacaucagcagaagacgccggggcaccuucaccuggacccugagcgacagcgagagcaacgagacccccggcggcuacugccugaccagauggaugcugaucgaggccgagcugaagugcuucggcaacaccgccguggccaagugcaacgagaagcacgacgaggaguucugcgacaugcugagacuguucgacuucaacaagcaggccaucagaagacugaaggcccccgcccagaugagcauccagcugaucaacaaggccgugaacgcccugaucaacgaccagcugaucaugaagaaccaccugagagacaucaugugcauccccuacugcaacuacagcaaguacugguaccugaaccacaccgugaccggcagaaccagccugcccagaugcuggcuggugagcaacggcagcuaccugaacgagacccacuucagcgacgacaucgagcagcaggccgacaacaugaucaccgagcugcugcagaaggaguacauggacagacagggcaagaccccccugggccugguggaccuguucguguucagcaccagcuucuaccugaucagcaucuuccugcaccuggugaagauccccacccacagacacgugaucggcaagcccugccccaagccccacagacugaaccacaugggcaucugcagcugcggccuguacaagcaccccggcgugcccgugaaguggaagagaugaggacuagucccuguucccagagcccacuuuuuuuucuuuuuuugaaauaaaauagccugucuuucagaucucaaaggcucuuuucagagccaccaaaaaaaaaaaaaaaaaaaaaaaaaaaaaaaaaaaaaaaaaaaaaaaaaaaaaaaaaaaaaaaaagaauu

SEQ ID NO: 15671 - RNA, 1733 nt, Artificial Sequence
  mRNA product Design a-2 (hSL-A64-N5) comprising derived and/or modified sequence from LASV(LASV035-NIG-2009;Clade II)__AIT17588__GPCmut1 (opt4)
aggagaguccgcucagccagguugcagaagcggcuuagcguguguccuaaucuucucucugcguguagguaggccugugccgcaaacaagcuuaccaugggccagaucaucaccuucuuccaggaggugccccacgugaucgaggaggugaugaacaucgugcugaucgcccugagccugcuggccauccugaagggcaucuacaacguggccaccugcggccuguucggccuggugagcuuccugcugcugugcggcagaagcugcagcaccaccuacaagggcguguacgagcugcagacccuggagcuggacauggccagccugaacaugaccaugccccugagcugcaccaagaacaacagccaccacuacaucauggugggcaacgagaccggccuggagcugacccugaccaacaccagcaucaucaaccacaaguucugcaaccugagcgacgcccacaagaagaaccuguacgaccacgcccugaugagcaucaucagcaccuuccaccugagcauccccaacuucaaccaguacgaggccaugagcugcgacuucaacggcggcaagaucagcgugcaguacaaccugagccacgccuacgccguggacgccgccaaccacugcggcaccaucgccaacggcgugcugcagaccuucaugagaauggccuggggcggcagcuacaucgcccuggacagcggcugcggcagcugggacugcaucaugaccagcuaccaguaccugaucauccagaacaccaccugggaggaccacugccaguucagcagacccagccccaucggcuaccugggccugcugagccagagaaccagagacaucuacaucagcagaagacgccggggcaccuucaccuggacccugagcgacagcgagggcaacgagacccccggcggcuacugccugaccagauggaugcugaucgaggccgagcugaagugcuucggcaacaccgccguggccaagugcaacgagaagcacgacgaggaguucugcgacaugcugagacuguucgacuucaacaagcaggccaucagaagacugaaggcccccgcccagaugagcauccagcugaucaacaaggccgugaacgcccugaucaacgaccagcugaucaugaagaaccaccugagagacaucaugugcauccccuacugcaacuacagcaaguacugguaccugaaccacaccgugaccggcaagaccagccugcccagaugcuggcuggugagcaacggcagcuaccugaacgagacccacuucagcgacgacaucgagcagcaggccgacaacaugaucaccgagcugcugcagaaggaguacaucgacagacagggcaagaccccccugggccugguggaccuguucguguucagcaccagcuucuaccugaucagcaucuuccugcaccuggugaagauccccacccacagacacgugaucggcaagcccugccccaagccccacagacugaaccacaugggcaucugcagcugcggccuguacaagcaccccggcgugcccgugaaguggaagagaugaggacuagucccuguucccagagcccacuuuuuuuucuuuuuuugaaauaaaauagccugucuuucagaucucaaaggcucuuuucagagccaccaaaaaaaaaaaaaaaaaaaaaaaaaaaaaaaaaaaaaaaaaaaaaaaaaaaaaaaaaaaaaaaaagaauu

SEQ ID NO: 15672 - RNA, 1733 nt, Artificial Sequence
  mRNA product Design a-2 (hSL-A64-N5) comprising derived and/or modified sequence from LASV(LASV1000-NIG-2009;Clade II)__AIT17782__GPCmut1 (opt4)
aggagaguccgcucagccagguugcagaagcggcuuagcguguguccuaaucuucucucugcguguagguaggccugugccgcaaacaagcuuaccaugggccagaucaucaccuucuuccaggaggugccccacgugaucgaggaggugaugaacaucgugcugaucgcccugagccugcuggccauccugaagggcaucuacaacguggccaccugcggccuguucggccuggugagcuuccugcugcugugcggcagaagcugcagcaccaccuacaagggcguguacgagcugcagacccuggagcuggacauggccagccugaacaugaccaugccccugagcugcaccaagaacaacagccaccacuacaucauggugggcaacgagaccggccuggagcugacccugaccaacaccagcaucaucaaccacaaguucugcaaccugagcgacgcccacaagaagaaccuguacgaccacgcccugaugagcaucaucagcaccuuccaccugagcauccccaacuucaaccaguacgaggccaugagcugcgacuucaacggcggcaagaucagcgugcaguacaaccugagccacaccuacgccguggacgccgccaaccacugcggcaccaucgccaacggcgugcugcagaccuucaugagaauggccuggggcggcagcuacaucgcccuggacagcggcugcggcagcugggacugcaucaugaccagcuaccaguaccugaucauccagaacaccaccugggaggaccacugccaguucagcagacccagccccaucggcuaccugggccugcugagccagagaaccagagacaucuacaucagcagaagacgccggggcaccuucaccuggacccugagcgacagcgagggcaacgagacccccggcggcuacugccugaccagauggaugcugaucgaggccgagcugaagugcuucggcaacaccgccguggccaagugcaacgagaagcacgacgaggaguucugcgacaugcugagacuguucgacuucaacaagcaggccaucaagagacugaagacccccgcccagaugagcauccagcugaucaacaaggccgugaacgcccugaucaacgaccagcugaucaugaagaaccaccugagagacaucaugugcauccccuacugcaacuacagcaaguacugguaccugaaccacaccgugaccggcaagaccagccugcccagaugcuggcuggugagcaacggcagcuaccugaacgagacccacuucagcgacgacaucgagcagcaggccgacaacaugaucaccgagcugcugcagaaggaguacaucgacagacagggcaagaccccccugggccugguggaccuguucguguucagcaccagcuucuaccugaucagcaucuuccugcaccuggugaagauccccacccacagacacguggugggcaagcccugccccaagccccacagacugaaccacaugggcaucugcagcugcggccuguacaagcaccccggcgugcccgugaaguggaagagaugaggacuagucccuguucccagagcccacuuuuuuuucuuuuuuugaaauaaaauagccugucuuucagaucucaaaggcucuuuucagagccaccaaaaaaaaaaaaaaaaaaaaaaaaaaaaaaaaaaaaaaaaaaaaaaaaaaaaaaaaaaaaaaaaagaauu

SEQ ID NO: 15673 - RNA, 1733 nt, Artificial Sequence
  mRNA product Design a-2 (hSL-A64-N5) comprising derived and/or modified sequence from LASV(LASV221-NIG-2010;Clade II)__AIT17624__GPCmut1 (opt4)
aggagaguccgcucagccagguugcagaagcggcuuagcguguguccuaaucuucucucugcguguagguaggccugugccgcaaacaagcuuaccaugggccagaucaucaccuucuuccaggaggugccccacgugaucgaggaggugaugaacaucgugcugaucgcccugagccugcuggccauccugaagggcaucuacaacguggccaccugcggccuguucggccuggugagcuuccugcugcugugcggcagaagcugcagcaccaccuacaagggcguguacgagcugcagacccuggagcuggacauggccagccugaacaugaccaugccccugagcugcaccaagaacaacagccaccacuacaucauggugggcaacgagaccggccuggagcugacccugaccaacaccagcaucaucaaccacaaguucugcaaccugagcgacgcccacaagaagaaccuguacgaccacgcccugaugagcaucaucagcaccuuccaccugagcauccccaacuucaaccaguacgaggccaugagcugcgacuucaacggcggcaagaucagcgugcaguacaaccugagccacaccuacgccaucgacgccgccaaccacugcggcaccaucgccaacggcgugcugcagaccuucaugagaauggccuggggcggcagcuacaucgcccuggacagcggcugcggcagcugggacugcaucaugaccagcuaccaguaccugaucauccagaacaccaccugggaggaccacugccaguucagcagacccagccccaucggcuaccugggccugcugagccagagaaccagagacaucuacaucagcagaagacgccggggcaccuucaccuggacccugagcgacagcgagggcaacgagacccccggcggcuacugccugaccagauggaugcugaucgaggccgagcugaagugcuucggcaacaccgccguggccaagugcaacgagaagcacgacgaggaguucugcgacaugcugagacuguucgacuucaacaagcaggccaucagaagacugaagacccccgcccagaugagcauccagcugaucaacaaggccgugaacgcccugaucaacgaccagcugaucaugaagaaccaccugagagacaucaugugcauccccuacugcaacuacagcaaguacugguaccugaaccacaccgugaccggcaagaccagccugcccagaugcuggcuggugagcaacggcagcuaccugaacgagacccacuucagcgacgacaucgagcagcaggccgacaacaugaucaccgagaugcugcagaaggaguacauggacagacagggcaagaccccccugggccugguggaccuguucguguucagcaccagcuucuaccugaucagcaucuuccugcaccuggugaagauccccacccacagacacgugaucggcaagcccugccccaagccccacagacugaaccacaugggcaucugcagcugcggccuguacaagcaccccggcgugcccgugaaguggaagagaugaggacuagucccuguucccagagcccacuuuuuuuucuuuuuuugaaauaaaauagccugucuuucagaucucaaaggcucuuuucagagccaccaaaaaaaaaaaaaaaaaaaaaaaaaaaaaaaaaaaaaaaaaaaaaaaaaaaaaaaaaaaaaaaaagaauu

SEQ ID NO: 15674 - RNA, 1733 nt, Artificial Sequence
  mRNA product Design a-2 (hSL-A64-N5) comprising derived and/or modified sequence from LASV(LASV237-NIG-2010;Clade II)__AIT17638__GPCmut1 (opt4)
aggagaguccgcucagccagguugcagaagcggcuuagcguguguccuaaucuucucucugcguguagguaggccugugccgcaaacaagcuuaccaugggccagaucaucaccuucuuccaggaggugccccacgugaucgaggaggugaugaacaucgugcugaucgcccugagccugcuggccauccugaagggcaucuacaacguggccaccugcggccuguucggccuggugagcuuccugcugcugugcggcagaagcugcagcaccaccuacaagggcguguacgagcugcagacccuggagcuggacauggccagccugaacaugaccaugccccugagcugcaccaagaacaacagccaccacuacaucauggugggcaacgagaccggccuggagcugacccugaccaacaccagcaucaucaaccacaaguucugcaaccugagcgacgcccacaagaaggaccuguacgaccacgcccugaugagcaucaucagcaccuuccaccugagcauccccaacuucaaccaguacgaggccaugagcugcgacuucaacggcggcaagaucagcgugcaguacaaccugagccacaccuacgccguggacgccgccaaccacugcggcaccaucgccaacggcgugcugcagaccuucaugagaauggccuggggcggcagcuacaucgcccuggacagcggcugcggcagcugggacugcaucaugaccagcuaccaguaccugaucauccagaacaccaccugggaggaccacugccaguucagcagacccagccccaucggcuaccugggccugcugagccagagaaccagagacaucuacaucagcagaagacgccggggcaccuucaccuggacccugagcgacagcgagggcaacgagacccccggcggcuacugccugaccagauggaugcugaucgaggccgagcugaagugcuucggcaacaccgccguggccaagugcaacgagaagcacgacgaggaguucugcgacaugcugagacuguucgacuucaacaagcaggccaucagaagacugaagacccccgcccagaugagcauccagcugaucaacaaggccgugaacgcccugaucaacgaccagcugaucaugaagaaccaccugagagacaucaugugcauccccuacugcaacuacagcaaguacugguaccugaaccacaccgugaccggcaagaccagccugcccagaugcuggcuggugagcaacggcagcuaccugaacgagacccacuucagcgacgacaucgagcagcaggccgacaacaugaucaccgagcugcugcagaaggaguacauggacagacagggcaagaccccccugggccugguggaccuguucguguucagcaccagcuucuaccugaucagcaucuuccugcaccugaucaagauccccacccacagacacaucaccggcaagcccugccccaagccccacagacugaaccacaugggcaucugcagcugcggccuguacaagcaccccggcgugcccgugaaguggaagagaugaggacuagucccuguucccagagcccacuuuuuuuucuuuuuuugaaauaaaauagccugucuuucagaucucaaaggcucuuuucagagccaccaaaaaaaaaaaaaaaaaaaaaaaaaaaaaaaaaaaaaaaaaaaaaaaaaaaaaaaaaaaaaaaaagaauu

SEQ ID NO: 15675 - RNA, 1733 nt, Artificial Sequence
  mRNA product Design a-2 (hSL-A64-N5) comprising derived and/or modified sequence from LASV(LASV253-NIG-2011;Clade II)__AIT17670__GPCmut1 (opt4)
aggagaguccgcucagccagguugcagaagcggcuuagcguguguccuaaucuucucucugcguguagguaggccugugccgcaaacaagcuuaccaugggccagaucaucaccuucuuccaggaggugccccacgugaucgaggaggugaugaacaucgugcugaucgcccugagccugcuggccauccugaagggcaucuacaacguggccaccugcggccuguucggccuggugagcuuccugcugcugugcggcagaagcugcagcaccaccuacaagggcguguacgagcugcagacccuggagcuggacauggccagccugaacaugaccaugccccugagcugcaccaagaacaacagccaccacuacaucauggugggcaacgagaccggccuggagcugacccugaccaacaccagcaucaucaaccacaaguucugcaaccugagcgacgcccacaagaagaaccuguacgaccacgcccugaugagcaucaucagcaccuuccaccugagcauccccaacuucaaccaguacgaggccaugagcugcgacuucaacggcggcaagaucagcgugcaguacaaccugagccacaccuacgccguggacgccgccaaccacugcggcaccaucgccaacggcgugcugcagaccuucaugagaauggccuggggcggcagcuacaucgcccuggacagcggcugcggcagcugggacugcaucaugaccagcuaccaguaccugaucauccagaacaccaccugggaggaccacugccaguucagcagacccagccccaucggcuaccugggccugcugagccagagaaccagagacaucuacaucagcagaagacgccggggcaccuucaccuggacccugagcgacagcgagggcaacgagacccccggcggcuacugccugaccagauggaugcugaucgaggccgagcugaagugcuucggcaacaccgccguggccaagugcaacgagaagcacgacgaggaguucugcgacaugcugagacuguucgacuucaacaagcaggccaucagaagacugaaggcccccgcccagaugagcauccagcugaucaacaaggccgugaacgcccugaucaacgaccagcugaucaugaagaaccaccugagagacaucaugugcauccccuacugcaacuacagcaaguacugguaccugaaccacaccgugaccggcagaaccagccugcccagaugcuggcuggugagcaacggcagcuaccugaacgagacccacuucagcgacgacaucgagcagcaggccgacaacaugaucaccgagcugcugcagaaggaguacaucgacagacagggcaagaccccccugggccugguggaccuguucguguucagcaccagcuucuaccugaucagcaucuuccugcaccuggugaagauccccacccacagacacaucaucggcaagcccugccccaagccccacagacugaaccacaugggcaucugcagcugcggccuguacaagcaccccggcgugcccgugaaguggaagagaugaggacuagucccuguucccagagcccacuuuuuuuucuuuuuuugaaauaaaauagccugucuuucagaucucaaaggcucuuuucagagccaccaaaaaaaaaaaaaaaaaaaaaaaaaaaaaaaaaaaaaaaaaaaaaaaaaaaaaaaaaaaaaaaaagaauu

SEQ ID NO: 15676 - RNA, 1733 nt, Artificial Sequence
  mRNA product Design a-2 (hSL-A64-N5) comprising derived and/or modified sequence from LASV(LASV254-NIG-2011;Clade II)__AIT17674__GPCmut1 (opt4)
aggagaguccgcucagccagguugcagaagcggcuuagcguguguccuaaucuucucucugcguguagguaggccugugccgcaaacaagcuuaccaugggccagaucaucaccuucuuccaggaggugccccacgugaucgaggaggugaugaacaucgugcugaucgcccugagccugcuggccauccugaagggcaucuacaacguggccaccugcggccuguucggccuggugagcuuccugcugcugugcggcagaagcugcagcaccaccuacaagggcguguacgagcugcagacccuggagcuggacaugaccaaccugaacaugaccaugccccugagcugcaccaagaacaacagccaccacuacaucauggugggcaacgagaccggccuggagcugacccugaccaacaccagcaucaucaaccacaaguucugcaaccugagcgacgcccacaagaagaaccuguacaaccacgcccugaugagcaucaucagcaccuuccaccugagcauccccaacuucaaccaguacgaggccaugagcugcgacuucaacggcggcaagaucagcgugcaguacaaccugagccacagcuacgccguggacgccgccaaccacugcggcaccaucgccaacggcgugcugcagaccuucaugagaauggccuggggcggcagcuacaucgcccuggacagcggcugcggcaacugggacugcaucaugaccagcuaccaguaccugaucauccagaacaccaccugggaggaccacugccaguucagcagacccagccccaucggcuaccugggccugcugagccagagaaccagagacaucuacaucagcagaagacgccggggcaccuucaccuggacccugagcgacagcgagggcaacgagacccccggcggcuacugccugaccagauggaugcugaucgaggccgagcugaagugcuucggcaacaccgccguggccaagugcaacgagaagcacgacgaggaguucugcgacaugcugagacuguucgacuucaacaagcaggccaucagaagacugaagacccccgcccaggccaacauccagcugaucaacaaggccgugaacgcccugaucaacgaccagcugaucaugaagaaccaccugagagacaucaugugcauccccuacugcaacuacagcaaguacugguaccugaaccacaccgugaccggcaagaccagccugcccagaugcuggcuggugagcaacggcagcuaccugaacgagacccacuucagcgacgacaucgagcagcaggccgacaacaugaucaccgagcugcugcagaaggaguacauggacagacagggcaagaccccccugggccugguggaccuguucguguucagcaccagcuucuaccugaucagcaucuuccugcaccuggugaagauccccacccacagacacgugaucggcaagcccugccccaagccccacagacugaaccacaugggcaucugcagcugcggccuguacaagcaccccggcgugcccgugaaguggaagagaugaggacuagucccuguucccagagcccacuuuuuuuucuuuuuuugaaauaaaauagccugucuuucagaucucaaaggcucuuuucagagccaccaaaaaaaaaaaaaaaaaaaaaaaaaaaaaaaaaaaaaaaaaaaaaaaaaaaaaaaaaaaaaaaaagaauu

SEQ ID NO: 15677 - RNA, 1733 nt, Artificial Sequence
  mRNA product Design a-2 (hSL-A64-N5) comprising derived and/or modified sequence from LASV(Nig08-A19;Clade III)__ADU56618__GPCmut1 (opt4)
aggagaguccgcucagccagguugcagaagcggcuuagcguguguccuaaucuucucucugcguguagguaggccugugccgcaaacaagcuuaccaugggccagaucgugaccuucuuccaggaggugccccacgugaucgaggaggugaugaacaucgugcugaucgcccugagcauccuggccauccugaagggccuguacaacaucgccaccugcggccugaucggccuggugaccuuccugcugcugagcggcagaagcugcagcaugaccuacaagggcguguacgagcugcagacccuggagcugaacaugaacacccugaacaugaccaugccccugagcugcaccaagaacaacagccaccacuacaucauggugggcaacgagaccggccuggagcugacccugaccaacaccagccugcugcaccacaaguucugcaaccugagcgacgcccacaagaagaaccuguacgaccacacccugaugagcaucaucagcaccuuccaccugagcauccccaacuucaaccaguacgaggccaugagcugcgacuucaacggcggcaagaucaccgugcaguacaaccugagccacagcuacgccaucgacgccgccaaccacugcggcaccguggccaacggcgugcugcagaccuucaugagaauggccuggggcggcagcuacaucgcccuggacagcggcugcggcaagugggacugcaucaugaccagcuaccaguaccugaucauccagaacaccaccugggaggaccacugccaguucagcagacccagccccaucggcuaccugggccugcugagccagagaaccagagacaucuacaucagcagaagacgccggggcaccuucaccuggacccugagcgacagcgagggcaacgagacccccggcggcuacugccugaccagauggaugcugaucgaggccgagcugaagugcuucggcaacaccgccguggccaagugcaacgagaagcacgacgaggaguucugcgacaugcugagacuguucgacuucaacaagcaggccaucagaagacugaaggcccccgcccagaugagcauccagcugaucaacaaggccgugaacgcccugaucaacgaccagcugaucaugaagaaccaccugagagacaucaugugcauccccuacugcaacuacagcaaguacugguaccugaaccacaccagcaccggcagaaccagccugcccagaugcuggcuggugagcaacggcagcuaccugaacgagacccacuucagcgacgacaucgagcagcaggccgacaacaugaucaccgagaugcugcagaaggaguaccuggacagacagggcaagaccccccugggccugguggaccuguucguguucagcaccagcuucuaccugaucagcaucuuccugcaccuggugaagauccccacccacagacacaucgugggcaagcccugccccaagccccacagacugaaccacaugggcaucugcagcugcggccuguacaagcagcccggcgugcccgugagauggaagagaugaggacuagucccuguucccagagcccacuuuuuuuucuuuuuuugaaauaaaauagccugucuuucagaucucaaaggcucuuuucagagccaccaaaaaaaaaaaaaaaaaaaaaaaaaaaaaaaaaaaaaaaaaaaaaaaaaaaaaaaaaaaaaaaaagaauu

SEQ ID NO: 15678 - RNA, 1736 nt, Artificial Sequence
  mRNA product Design a-2 (hSL-A64-N5) comprising derived and/or modified sequence from LASV(G1180-SLE-2010;Clade IV)__AIT17168__GPCmut1 (opt4)
aggagaguccgcucagccagguugcagaagcggcuuagcguguguccuaaucuucucucugcguguagguaggccugugccgcaaacaagcuuaccaugggccagaucgugaccuucuuccaggaggugccccacgugaucgaggaggugaugaacaucgugcugaucgcccugagcauccuggccgugcugaagggccuguacaacuucgccaccugcggccuggugggccugcugaccuuccugcugcugugcggcagaagcugcaccgccagcagauacaagggcguguacgagcugcagacccuggagcugaacauggagacccugaacaugaccaugccccugagcugcaccaagaacaacagccaccacuacaucauggugggcaacgagaccggccuggagcugacccugaccaacaccagcaucaucaaccacaaguucugcaaccugagcgacgcccacaagaagaaccuguacgaccacgcccugaugagcaucaucagcaccuuccaccugagcauccccaacuucaaccaguacgaggccaugagcugcgacuucaacggcggcaagaucagcgugcaguacaaccugagccacagcuacgccggcgacgccgccaaccacugcggcaccguggccaacggcgugcugcagaccuucaugagaauggccuggggcggcagcuacaucgcccuggacagcggcugcggcagcugggacugcaucaugaccagcuaccaguaccugaucauccagaacaccaccugggaggaccacugccaguucagcagacccagccccaucggcuaccugggccugcugagccagagaaccagagacaucuacaucagcagaagacgccggggcaccuucaccuggacccugagcgacagcgagggcaaggacacccccggcggcuacugccugaccagauggaugcugaucgaggccgagcugaagugcuucggcaacaccgccguggccaagugcaacgagaagcacgacgaggaguucugcgacaugcugagacuguucgacuucaacaagcaggccauccagagacugaaggcccccgcccagaugagcauccagcugaucaacaaggccgugaacgcccugaucaacgaccagcugaucaugaagaaccaccugagagacaucaugugcauccccuacugcaacuacagcaaguacugguaccugaaccacaccaccaccggcaagaccagccugcccaagugcuggcuggugagcaacggcagcuaccugaacgagacccacuucagcgacgacaucgagcagcaggccgacaacaugaucaccgagaugcugcagaaggaguacauggagagacagggcaagaccccccugggccugguggaccuguucguguucagcaccagcuucuaccugaucagcaucuuccugcaccuggugaagauccccacccacagacacaucgugggcaagagcugccccaagccccacagacugaaccacaugggcaucugcagcugcggccuguacaagcagcccggcgugcccgugaaguggaagagaugaggacuagucccuguucccagagcccacuuuuuuuucuuuuuuugaaauaaaauagccugucuuucagaucucaaaggcucuuuucagagccaccaaaaaaaaaaaaaaaaaaaaaaaaaaaaaaaaaaaaaaaaaaaaaaaaaaaaaaaaaaaaaaaaagaauu

SEQ ID NO: 15679 - RNA, 1736 nt, Artificial Sequence
  mRNA product Design a-2 (hSL-A64-N5) comprising derived and/or modified sequence from LASV(G1442-SLE-2011;Clade IV)__AIT17180__GPCmut1 (opt4)
aggagaguccgcucagccagguugcagaagcggcuuagcguguguccuaaucuucucucugcguguagguaggccugugccgcaaacaagcuuaccaugggccagaucgugaccuucuuccaggaggugccccacgugaucgaggaggugaugaacaucgugcugaucgcccugagcauccuggccgugcugaagggccuguacaacguggccaccugcggccugaucggccuggugaccuuccugcugcugugcggcagaagcugcaccaccacccuguacaagggcguguacgagcugcagacccuggagcugaacauggagacccugaacaugaccaugccccugagcugcaccaagaacaacagccaccacuacaucagagugggcaacgagaccggccuggagcugacccugaccaacaccagcaucaucaaccacaaguucugcaaccugagcgacgcccacaagaagaaccuguacgaccacgcccugaugagcaucaucagcaccuuccaccugagcauccccaacuucaaccaguacgaggccaugagcugcgacuucaacggcggcaagaucagcgugcaguacaaccugagccacagcuacgccggcgacgccgccaaccacugcggcaccguggccaacggcgugcugcagaccuucaugagaauggccuggggcggcagcuacaucgcccuggacagcggcugcggcaacugggacugcaucaugaccagcuaccaguaccugaucauccagaacaccaccugggacgaccacugccaguucagcagacccagccccaucggcuaccugggccugcugagccagagaaccagagacguguacaucagcagaagacgccggggcaccuucaccuggacccugagcgacagcgagggcaaggacacccccggcggcuacugccugaccagauggaugcugaucgaggccgagcugaagugcuucggcaacaccgccguggccaagugcaacgagaagcacgacgaggaguucugcgacaugcugagacuguucgacuucaacaagcaggccauccagagacugaaggcccccgcccagaugagcauccagcugaucaacaaggccgugaacgcccugaucaacgaccagcugaucaugaagaaccaccugagagacaucaugugcauccccuacugcaacuacagcaaguacugguaccugaacaacaccgccaccggcaagaccagccugcccaagugcuggcugaucagcaacggcagcuaccugaacgagacccacuucagcgacgacaucgagcaggaggccgacaacaugaucaccgagaugcugcagaaggaguacauggagagacagggcaagaccccccugggccugguggaccuguucguguucagcaccagcuucuaccugaucagcaucuuccugcaccuggugaagauccccacccacagacacaucgugggcaagagcugccccaagccccacagacugaaccacaugggcaucugcagcugcggccuguacaagcagcccggcgugcccgugagauggaagagaugaggacuagucccuguucccagagcccacuuuuuuuucuuuuuuugaaauaaaauagccugucuuucagaucucaaaggcucuuuucagagccaccaaaaaaaaaaaaaaaaaaaaaaaaaaaaaaaaaaaaaaaaaaaaaaaaaaaaaaaaaaaaaaaaagaauu

SEQ ID NO: 15680 - RNA, 1736 nt, Artificial Sequence
  mRNA product Design a-2 (hSL-A64-N5) comprising derived and/or modified sequence from LASV(G3010-SLE-2013;Clade IV)__AIT17344__GPCmut1 (opt4)
aggagaguccgcucagccagguugcagaagcggcuuagcguguguccuaaucuucucucugcguguagguaggccugugccgcaaacaagcuuaccaugggccagaucgugaccuucuuccaggaggugccccacgugaucgaggaggugaugaacaucgugcugaucgcccugagcauccuggccgugcugaagggccuguacaacuucgccaccugcggccuggugggccuggugaccuuccugcugcugugcggcagaagcugcaccaccagccuguacaagggcguguacgagcugcagacccuggagcugaacauggagacccugaacaugaccaugccccugagcugcaccaagaacaacagccaccacuacaucauggugggcaacgagaccggccuggagcugacccugaccaacaccagcaucaucaaccacaaguucugcaaccugagcgacgcccacaagaagaaccuguacaaccacgcccugaugagcaucaucagcaccuuccaccugagcauccccaacuucaaccaguacgaggccaugagcugcgacuucaacggcggcaagaucagcgugcaguacaaccugagccacagcuacgccggcgacgccgccagccacugcggcaccguggccaacggcgugcugcagaccuucaugagaauggccuggggcggcagcuacaucgcccuggacagcggcugcggcaagugggacugcaucaugaccagcuaccaguaccugaucauccagaacaccaccugggaggaccacugccaguucagcagacccagccccaucggcuaccugggccugcugagccagagaaccagagacaucuacaucagcagaagacgccggggcaccuucaccuggacccugagcgacagcgagggcaaggacacccccggcggcuacugccugaccagauggaugcugaucgaggccgagcugaagugcuucggcaacaccgccguggccaagugcaacgagaagcacgacgaggaguucugcgacaugcugagacuguucgacuucaacaagcaggccauccagagacugaagacccccgcccagaugagcauccagcugaucaacaaggccgugaacgcccugaucaacgaccagcugaucaugaagaaccaccugagagacaucaugugcauccccuacugcaacuacagcaaguacugguaccugaaccacaccaccaccggcaagaccagccugcccaagugcuggcuggugagcaacggcagcuaccugaacgagacccacuucagcgacgacaucgagcagcaggccgacaacaugaucaccgagaugcugcagaaggaguacauggagagacagggcaagaccccccugggccugguggaccuguucguguucagcaccagcuucuaccugaucagcaucuuccugcaccuggugaagauccccacccacagacacaucgugggcaagagcugccccaagccccacagacugaaccacaugggcaucugcagcugcggccuguacaagcagcccggcgugcccgugagauggaagagaugaggacuagucccuguucccagagcccacuuuuuuuucuuuuuuugaaauaaaauagccugucuuucagaucucaaaggcucuuuucagagccaccaaaaaaaaaaaaaaaaaaaaaaaaaaaaaaaaaaaaaaaaaaaaaaaaaaaaaaaaaaaaaaaaagaauu

SEQ ID NO: 15681 - RNA, 1736 nt, Artificial Sequence
  mRNA product Design a-2 (hSL-A64-N5) comprising derived and/or modified sequence from LASV(G502-SLE-2009;Clade IV)__AIT17126__GPCmut1 (opt4)
aggagaguccgcucagccagguugcagaagcggcuuagcguguguccuaaucuucucucugcguguagguaggccugugccgcaaacaagcuuaccaugggccagaucgugaccuucuuccaggaggugccccacgugaucgaggaggugaugaacaucgugcugaucgcccugagcauccuggccgugcugaagggccuguacaacuucgccaccugcggccuggugggccugcugaccuuccugcugcugugcggcagaagcugcaccaccggccuguacaagggcguguacgagcugcagacccuggagcugaacauggagacccugaacaugaccaugccccugagcugcaccaagaacaacagccaccacuacaucauggugggcaacgagaccggccuggagcugacccugaccaacaccagcaucaucaaccacaaguucugcaaccugagcgacgcccacaagaagaaccuguacgaccacgcccugaugagcaucaucagcaccuuccaccugagcauccccaacuucaaccaguacgaggccaugagcugcgacuucaacggcggcaagaucagcgugcaguacaaccugagccacagcuacgccggcgacgccgccgaccacugcggcaccguggccaacggcgugcugcagaccuucaugagaauggccuggggcggcagcuacaucgcccuggacagcggcugcggcagaugggacugcaucaugaccagcuaccaguaccugaucauccagaacaccaccugggaggaccacugccaguucagcagacccagccccaucggcuaccugggccugcugagccagagaaccagagacaucuacaucagcagaagacgccggggcaccuucaccuggacccugagcgacagcgagggcaaggacacccccggcggcuacugccugaccagauggaugcugaucgaggccgagcugaagugcuucggcaacaccgccguggccaagugcaacgagaagcacgacgaggaguucugcgacaugcugagacuguucgacuucaacaagcaggccauccagagacugaaggcccccgcccagaugagcauccagcugaucaacaaggccgugaacgcccugaucaacgaccagcuggugaugaagaaccaccugagagacaucaugugcauccccuacugcaacuacagcagauacugguaccugaaccacaccaccaccggcagaaccagccugcccaagugcuggcuggugagcaacggcagcuaccugaacgagacccacuucagcgacgacaucgagcagcaggccgacaacaugaucaccgagaugcugcagaaggaguacauggagagacagggcaagaccccccugggccugguggaccuguucguguucagcaccagcuucuaccugaucagcaucuuccugcaccuggugaagauccccacccacagacacaucgugggcaagagcugccccaagccccacagacugaaccacaugggcaucugcagcugcggccuguacaagcagcccggcgugcccgugaaguggaagagaugaggacuagucccuguucccagagcccacuuuuuuuucuuuuuuugaaauaaaauagccugucuuucagaucucaaaggcucuuuucagagccaccaaaaaaaaaaaaaaaaaaaaaaaaaaaaaaaaaaaaaaaaaaaaaaaaaaaaaaaaaaaaaaaaagaauu

SEQ ID NO: 15682 - RNA, 1736 nt, Artificial Sequence
  mRNA product Design a-2 (hSL-A64-N5) comprising derived and/or modified sequence from LASV(G733-SLE-2010;Clade IV)__AIT17154__GPCmut1 (opt4)
aggagaguccgcucagccagguugcagaagcggcuuagcguguguccuaaucuucucucugcguguagguaggccugugccgcaaacaagcuuaccaugggccagaucgugaccuucuuccaggaggugccccacgugaucgaggaggugaugaacaucgugcugaucgcccugagcauccuggccgugcugaagggccuguacaacuucgccaccugcggcaucgugggccuggugagcuuccugcugcugugcggcagaagcugcaccaccagccuguacaagggcguguacgagcugcagacccuggagcugaacauggagacccugaacaugaccaugccccugagcugcaccaagaacaacagccaccacuacaucauggugggcaacgagaccggccuggagcugacccugaccaacaccagcaucaucaaccacaaguucugcaaccugagcgacgcccacaagaagaaccuguacgaccacgcccugaugagcaucaucagcaccuuccaccugagcauccccaacuucaaccaguacgaggccaugagcugcgacuucaacggcggcaagaucagcgugcaguacaaccugagccacagcuacgccggcgacgccgccaaccacugcggcaccaucgccaacggcgugcugcagaccuucaugagaauggccuggggcggcagcuacaucgcccuggacagcggcugcgacagaugggacugcaucaugaccagcuaccaguaccugaucauccagaacaccaccugggaggaccacugccaguucagcagacccagccccaucggcuaccugggccugcugagccagagaaccagagacaucuacaucagcagaagacgccggggcaccuucaccuggacccugagcgacagcgagggcaaggacacccccggcggcuacugccugaccagauggaugcugaucgaggccgagcugaagugcuucggcaacaccgccguggccaagugcaacgagaagcacgacgaggaguucugcgacaugcugagacuguucgacuucaacaagcaggccauccagagacugaaggcccccgcccagaugagcauccagcugaucaacaaggccgugaacgcccugaucaacgaccagcugaucaugaagaaccaccugagagacaucaugugcauccccuacugcaacuacagcaaguacugguaccugaaccacaccaccaccggcaagaccagccugcccaagugcuggcuggugagcaacggcagcuaccugaacgagacccacuucagcgacgacaucgagcagcaggccgacaacaugaucaccgagaugcugcagaaggaguacauggagagacagggcaagaccccccugggccugguggaccuguucguguucagcaccagcuucuaccugaucagcaucuuccugcaccuggugaagauccccacccacagacacguggugggcaagagcugccccaagccccacagacugaaccacaugggcaucugcagcugcggccuguacggccagcccggcgugcccgugaaguggaagagaugaggacuagucccuguucccagagcccacuuuuuuuucuuuuuuugaaauaaaauagccugucuuucagaucucaaaggcucuuuucagagccaccaaaaaaaaaaaaaaaaaaaaaaaaaaaaaaaaaaaaaaaaaaaaaaaaaaaaaaaaaaaaaaaaagaauu

SEQ ID NO: 15683 - RNA, 1736 nt, Artificial Sequence
  mRNA product Design a-2 (hSL-A64-N5) comprising derived and/or modified sequence from MOPV/LASV reassortant(IGS-1;Clade IV)__AFY05576__GPCmut1 (opt4)
aggagaguccgcucagccagguugcagaagcggcuuagcguguguccuaaucuucucucugcguguagguaggccugugccgcaaacaagcuuaccaugggccagaucgugaccuucuuccaggaggugccccacgugaucgaggaggugaugaacaucgugcugaucgcccugagcgugcuggccgugcugaagggccuguacaacuucgccaccugcggccuggugggccuggugaccuuccugcugcugugcggcagaagcugcaccaccagccuguacaagggcguguacgagcugcagacccuggagcugaacauggagacccugaacaugaccaugccccugagcugcaccaagaacaacagccaccacuacaucauggugggcaacgagaccggccuggagcugacccugaccaacaccagcaucaucaaccacaaguucugcaaccugagcgacgcccacaagaagaaccuguacgaccacgcccugaugagcaucaucagcaccuuccaccugagcauccccaacuucaaccaguacgaggccaugagcugcgacuucaacggcggcaagaucagcgugcaguacaaccugagccacagcuacgccggcgacgccgccaaccacugcggcaccguggccaacggcgugcugcagaccuucaugagaauggccuggggcggcagcuacaucgcccuggacagcggcugcggcaacugggacugcaucaugaccagcuaccaguaccugaucauccagaacaccaccugggaggaccacugccaguucagcagacccagccccaucggcuaccugggccugcugagccagagaaccagagacaucuacaucagcagaagacgccggggcaccuucaccuggacccugagcgacagcgagggcgaggacacccccggcggcuacugccugaccagauggaugcugaucgaggccgagcugaagugcuucggcaacaccgccguggccaagugcaacgagaagcacgacgaggaguucugcgacaugcugagacuguucgacuucaacaagcaggccauccagagacugaaggcccccgcccagaugagcauccagcugaucaacaaggccgugaacgcccugaucaacgaccagcugaucaugaagaaccaccugagagacaucaugugcauccccuacugcaacuacagcaaguacugguaccugaaccacaccaccaccggcagaaccagccugcccaagugcuggcuggugagcaacggcagcuaccugaacgagacccacuucagcgacgacaucgagcagcaggccgacaacaugaucaccgagaugcugcagaaggaguacauggagagacagggcaagaccccccugggccugguggaccuguucguguucagcaccagcuucuaccugaucagcaucuuccugcaccuggugaagauccccacccacagacacaucgugggcaagagcugccccaagccccacagacugaaccacaugggcaucugcagcugcggccuguacaagcagcccggcgugcccgugaaguggaagagaugaggacuagucccuguucccagagcccacuuuuuuuucuuuuuuugaaauaaaauagccugucuuucagaucucaaaggcucuuuucagagccaccaaaaaaaaaaaaaaaaaaaaaaaaaaaaaaaaaaaaaaaaaaaaaaaaaaaaaaaaaaaaaaaaagaauu

SEQ ID NO: 15684 - RNA, 1736 nt, Artificial Sequence
  mRNA product Design a-2 (hSL-A64-N5) comprising derived and/or modified sequence from LASV(LM765-SLE-2012;Clade IV)__AIT17814__GPCmut1 (opt4)
aggagaguccgcucagccagguugcagaagcggcuuagcguguguccuaaucuucucucugcguguagguaggccugugccgcaaacaagcuuaccaugggccagaucgugaccuucuuccaggaggugccccacgugaucgaggaggugaugaacaucgugcugaucgcccugagcauccuggccgugcugaagggccuguacaacuucgccaccugcggccuggugggccuggugaccuuccugcugcugugcggcagaagcugcaccaccagccuguacaagggcguguacgagcugcagacccuggagcugaacauggagacccugaacaugaccaugccccugagcugcaccaagaacaacagccaccacuacaucauggugggcaacgagaccggccuggagcugacccugaccaacaccagcaucaucgaccacaaguucugcaaccugagcgacgcccacagaaagaaccuguacgaccacgcccugaugagcaucaucagcaccuuccaccugagcauccccaacuucaaccaguacgaggccaugagcugcgacuucaacggcggcaagaucagcgugcaguacaaccugagccacagcuacgccaaggacgccgccgaccacugcggcaccguggccaacggcgugcugcagaccuucaugagaauggccuggggcggcagcuacaucgcccuggacagcggcugcggcagaugggacugcaucaugaccagcuaccaguaccugaucauccagaacaccaccugggaggaccacugccaguucagcagacccagccccaucggcuaccugggccugcugagccagagaaccagagacaucuacaucagcagaagacgccggggcaccuucaccuggacccugagcgacagcgagggcaaggacacccccggcggcuacugccugaccagauggaugcugaucgaggccgagcugaagugcuucggcaacaccgccguggccaagugcaacgagaagcacgacgaggaguucugcgacaugcugagacuguucgacuucaacaagcaggccauccagagacugaaggcccccgcccagaugagcauccagcugaucaacaaggccgugaacgcccugaucaacgaccagcugaucaugaagaaccaccugagagacaucaugugcauccccuacugcaacuacagcaaguacugguaccugaaccacaccaccaccggcaagaccagccugcccaagugcuggcuggugagcaacggcagcuaccugaacgagacccacuucagcgacgacaucgagcagcaggccgacaacaugaucaccgagaugcugcagaaggaguacauggagagacagggcaagaccccccugggccugguggaccuguucguguucagcaccagcuucuaccugaucagcaucuuccugcaccuggugaagauccccacccacagacacaucgugggcaagcccugccccaagccccacagacugaaccacaugggcaucugcagcugcggccuguacaagcagcccggcgugcccgugaaguggaagagaugaggacuagucccuguucccagagcccacuuuuuuuucuuuuuuugaaauaaaauagccugucuuucagaucucaaaggcucuuuucagagccaccaaaaaaaaaaaaaaaaaaaaaaaaaaaaaaaaaaaaaaaaaaaaaaaaaaaaaaaaaaaaaaaaagaauu

SEQ ID NO: 15685 - RNA, 1736 nt, Artificial Sequence
  mRNA product Design a-2 (hSL-A64-N5) comprising derived and/or modified sequence from LASV(LM776-SLE-2012;Clade IV)__AIT17824__GPCmut1 (opt4)
aggagaguccgcucagccagguugcagaagcggcuuagcguguguccuaaucuucucucugcguguagguaggccugugccgcaaacaagcuuaccaugggccagaucgugaccuucuuccaggaggugccccacgugaucgaggaggugaugaacaucgugcugaucgcccugagcauccuggccgugcugaagggccuguacaacuucgccaccugcggccuggugggccuggugaccuuccugcugcugugcggcagaagcugcaccaccagcguguacaagggcguguacgagcugcagacccuggagcugaacauggagacccugaacaugaccaugccccugagcugcaccaagaacaacagccaccacuacaucauggugggcaacgagaccggccuggagcugacccugaccaacaccagcaucaucaaccacaaguucugcaaccugagcgacgcccacaagaagaaccuguacgaccacgcccugaugagcaucaucagcaccuuccaccugagcauccccaacuucaaccaguacgaggccaugagcugcgacuucaacggcggcaagaucagcgugcaguacaaccugagccacagcuacgccggcgacgccgccaaccacugcggcaccguggccaacggcgugcugcagaccuucaugagaauggccuggggcggcagcuacaucgcccuggacagcggcugcggcaagugggacugcaucaugaccagcuaccaguaccugaucauccagaacaccaccugggaggaccacugccaguucagcagacccagccccaucggcuaccugggccugcugagccagagaaccagagacaucuacaucagcagaagacgccggggcaccuucaccuggacccugagcgacagcgagggcaaggacacccccggcggcuacugccugaccagauggaugcugaucgaggccgagcugaagugcuucggcaacaccgccguggccaagugcaacgagaagcacgacgaggaguucugcgacaugcugagacuguucgacuucaacaagcaggccauccagagacugaaggcccccgcccagaugagcauccagcugaucaacaaggccgugaacgcccugaucaacgaccagcugaucaugaagaaccaccugagagacaucaugugcauccccuacugcaacuacagcaaguacugguaccugaaccacaccaccaccggcaagaccagccugcccaagugcuggcuggugagcaacggcagcuaccugaacgagacccacuucagcgacgacaucgagcagcaggccgacaacaugaucaccgagaugcugcagaaggaguacauggagagacagggcaagaccccccugggccugguggaccuguucguguucagcaccagcuucuaccugaucagcaucuuccugcaccuggugaagauccccacccacagacacaucgugggcaagagcugccccaagccccacagacugaaccacaugggcaucugcagcugcggccuguacaagcagcccggcgugcccgugagauggaagagaugaggacuagucccuguucccagagcccacuuuuuuuucuuuuuuugaaauaaaauagccugucuuucagaucucaaaggcucuuuucagagccaccaaaaaaaaaaaaaaaaaaaaaaaaaaaaaaaaaaaaaaaaaaaaaaaaaaaaaaaaaaaaaaaaagaauu

SEQ ID NO: 15686 - RNA, 1736 nt, Artificial Sequence
  mRNA product Design a-2 (hSL-A64-N5) comprising derived and/or modified sequence from LASV(Mad39;Clade IV)__ANH09722__GPCmut1 (opt4)
aggagaguccgcucagccagguugcagaagcggcuuagcguguguccuaaucuucucucugcguguagguaggccugugccgcaaacaagcuuaccaugggccagaucgugaccuucuuccaggaggugccccacgugaucgaggaggugaugaacaucgugcugaucgcccugagcauccuggccgugcugaagggccuguacaacguggccaccugcggccugaucggccuggugaccuuccugcugcugugcggcagaagcugcaccaccacccuguacaagggcguguacgagcugcaggcccuggagcugaacauggagacccugaacaugaccaugccccugagcugcaccaagaacaacagccaccacuacaucagagugggcaacgagaccggccuggagcugacccugaccaacaccagccugaucaaccacaaguucugcaaccugagcgacgcccacaagaagaaccuguacgaccacgcccugaugagcaucaucagcaccuuccaccugagcauccccaacuucaaccaguacgaggccaugagcugcgacuucaacgacggcaagaucagcgugcaguacaaccugagccacaccuacgccggcgacaccgccaaccacugcggcaccguggccaacggcgugcugcagaccuucaugagaauggccuggggcggcagcuacaucgcccuggacagcggcugcggcggcugggacugcaucaugaccagcuaccaguaccugaucauccagaacaccaccugggaggaccacugccaguucagcagacccagccccaucggcuaccugggccugcugagccagagaaccagagacaucuacaucagcagaagacgccggggcaccuucaccuggacccugagcgacagcgagggcaaggacacccccggcggcuacugccugaccagauggaugcugaucgaggccgagcugaagugcuucggcaacaccgccguggccaagugcaacgagaagcacgacgaggaguucugcgacaugcugagacuguucgacuucaacaagcaggccauccagagacugaaggcccccgcccagaugagcauccagcugaucaacaaggccgugaacgcccugaucaacgaccagcugaucaugaagaaccaccugagagacaucaugugcauccccuacugcaacuacagcaaguacugguaccugaaccacaccgugaccggcaagaccagccugcccaagugcuggcuggugagcaacggcagcuaccugaacgagacccacuucagcgacgacaucgagcagcaggccgacaacaugaucaccgagaugcugcagaaggaguacauggagagacagggcaagaccccccugggccugguggaccuguucguguucagcaccagcuucuaccugaucagcaucuuccugcaccuggugaagauccccacccacagacacguggugggcaagcccugccccaagccccacagacugaaccacaugggcaucugcagcugcggcuucuacaagcagcccggcgugcccgugagauggaagagaugaggacuagucccuguucccagagcccacuuuuuuuucuuuuuuugaaauaaaauagccugucuuucagaucucaaaggcucuuuucagagccaccaaaaaaaaaaaaaaaaaaaaaaaaaaaaaaaaaaaaaaaaaaaaaaaaaaaaaaaaaaaaaaaaagaauu

SEQ ID NO: 15687 - RNA, 1736 nt, Artificial Sequence
  mRNA product Design a-2 (hSL-A64-N5) comprising derived and/or modified sequence from LASV(Z0947-SLE-2011;Clade IV)__AIT17840__GPCmut1 (opt4)
aggagaguccgcucagccagguugcagaagcggcuuagcguguguccuaaucuucucucugcguguagguaggccugugccgcaaacaagcuuaccaugggccagaucgugaccuucuuccaggaggugccccacgugaucgaggaggugaugaacaucgugcugaucgcccugagcauccuggccgugcugaagggccuguacaacuucgccaccugcggccuggugggccuggugaccuuccugcugcugugcggcagaagcugcaccaucagccuguacaagggcguguacgagcugcagacccuggagcugaacauggagacccugaacaugaccaugccccugagcugcaccaagaacaacagccaccacuacaucauggugggcaacgagaccggccuggagcugacccugaccaacaccagcaucaucaaccacaaguucugcaaccugagcgacgcccacaagaagaaccuguacgaccacgcccugaugagcaucaucagcaccuuccaccugagcauccccaacuucaaccaguacgaggccaugagcugcgacuucaacggcggcaagaucagcgugcaguacaaccugagccacagcuacgccggcgacgccgccaaccacugcggcaccguggccaacggcgugcugcagaccuucaugagaauggccuggggcggcagcuacaucgcccuggacagcggcugcgacagaugggacugcaucaugaccagcuaccaguaccugaucauccagaacaccaccugggaggaccacugccaguucagcagacccagccccaucggcuaccugggccugcugagccagagaaccagagacaucuacaucagcagaagacgccggggcaccuucaccuggacccugagcgacagcgagggcaaggacacccccggcggcuacugccugaccagauggaugcugaucgaggccgagcugaagugcuucggcaacaccgccguggccaagugcaacgagaagcacgacgaggaguucugcgacaugcugagacuguucgacuucaacaagcaggccauccagagacugaaggcccccgcccagaugagcauccagcugaucaacaaggccgugaacgcccugaucaacgaccagcugaucaugaagaaccaccugagagacaucaugugcauccccuacugcaacuacagcaaguacugguaccugaaccacaccaccaccggcaagaccagccugcccaagugcuggcuggugagcaacggcagcuaccugaacgagacccacuucagcgacgacaucgagcagcaggccgacaacaugaucaccgagaugcugcagaaggaguacauggagagacagggcaagaccccccugggccugguggaccuguucguguucagcaccagcuucuaccugaucagcaucuuccugcaccuggugaagauccccacccacagacacaucgugggcaagcccugccccaagccccacagacugaaccacaugggcaucugcagcugcggccuguacaagcagcccggcgugcccgugaaguggaagagaugaggacuagucccuguucccagagcccacuuuuuuuucuuuuuuugaaauaaaauagccugucuuucagaucucaaaggcucuuuucagagccaccaaaaaaaaaaaaaaaaaaaaaaaaaaaaaaaaaaaaaaaaaaaaaaaaaaaaaaaaaaaaaaaaagaauu

SEQ ID NO: 15688 - RNA, 1736 nt, Artificial Sequence
  mRNA product Design a-2 (hSL-A64-N5) comprising derived and/or modified sequence from LASV(Josiah;Clade IV)__NP_694870__GPCmut1 (opt5)
aggagaguccgcucagccagguugcagaagcggcuuagcguguguccuaaucuucucucugcguguagguaggccugugccgcaaacaagcuuaccaugggccagaucgugaccuucuuucaagaggucccccacguuauugaagaggugaugaacaucgugcugauugcccucagcguccuggcugugcuuaaggggcuguacaauuucgccacaugcggacucguuggccuggugacguuucuucugcucugugggagauccugcaccacaucucuguauaaaggagucuacgaacugcagacccucgagcugaacauggaaacacuuaauaugaccaugccucugagcuguacaaagaacaauucccaucacuauaucauggugggcaacgagaccgggcucgagcugacgcuuaccaauacaucuauuaucaaccauaaauucugcaaucugagcgacgcgcacaagaaaaaccucuacgaucaugcucugauguccaucauuucuaccuuucaccugagcaucccgaauuucaaccaguaugaagccauguccugugacuuuaauggaggcaagauuagcguucaguacaaccucucucacuccuaugccggcgaugcugccaaucauugcgggacaguggcuaacggaguccugcaaaccuucaugcggauggccuggggcgggagcuacaucgcgcuugacucuggaugcggcaacugggauuguauuaugacguccuaccaguaucugaucauucagaauacaaccugggaggaccacugccaguuuagcagacccucuccuaucggguaccucggacugcuuucccaacggacacgcgauaucuauauuagcagacggcgccggggcaccuucaccuggacacuguccgacucugaaggcaaggauacgcccgggggauacugucugacccgcuggaugcucaucgaggccgagcugaaaugcuuuggcaacacagcuguggccaaguguaaugaaaaacaugacgaggaguucugcgauaugcuuagacuguuugacuucaacaagcaggcuauucagcggcucaaagcccccgcgcagaugagcauccaacugauuaauaaggccgugaacgcucuuaucaaugaucagcugaucaugaagaaccaccuccgcgacauuaugugcaucccuuauugcaauuacuccaaauauugguaccugaaccacaccacaaccggaagaacgagccugcccaaguguuggcucgucucuaauggcuccuaccugaacgaaacacauuucagcgacgauauugagcagcaagccgacaauaugaucaccgagaugcuucagaaagaauauauggagcggcaggggaagaccccucugggacucguugaucuguuuguguucucuaccagcuuuuaccugauuuccaucuuccuucaccucgugaaaaucccgacacaucgccacauugucggcaagucuugccccaaaccucauagacugaaccacaugggcaucuguagcugcgggcuguauaagcagcccggagugccuguuaaguggaaacggugaggacuagucccuguucccagagcccacuuuuuuuucuuuuuuugaaauaaaauagccugucuuucagaucucaaaggcucuuuucagagccaccaaaaaaaaaaaaaaaaaaaaaaaaaaaaaaaaaaaaaaaaaaaaaaaaaaaaaaaaaaaaaaaaagaauu

SEQ ID NO: 15689 - RNA, 1733 nt, Artificial Sequence
  mRNA product Design a-2 (hSL-A64-N5) comprising derived and/or modified sequence from LASV(LP;Clade I)__AAF86701__GPCmut1 (opt5)
aggagaguccgcucagccagguugcagaagcggcuuagcguguguccuaaucuucucucugcguguagguaggccugugccgcaaacaagcuuaccaugggccagaucauuaccuucuuucaagaggugccccacgucaucgaagagguuaugaacauugugcugaucgcccucagccugcuugcuauucugaaggggcucuacaauaucgccacaugcggaaucauuggccugguggcguuccuuuuucugugugggaaauccugcucucucacgcugaagggaggcuaugaacugcagacccucgagcugaacauggaaacacuuaauaugaccaugccucugagcuguaccaaaaacuccucucaucacuacaucagagucgggaaugagacaggacucgagcugacacuuaccaacacgagcauuaucaaucauaaguucugcaaccuguccgacgcucacaaaaagaaucucuaugaucaugcccugaugucuauuaucagcaccuuucaccuguccauuccgaacuucaaucaguacgaagccaugagcugugacuuuaacggcggcaagaucucugugcaguauaaucucucccacagcuacgcuggggaugccgcugagcauugcggaacaguugccaacggcgugcugcaaaccuucaugcggauggcguggggagggcgcuauaucgcccuugacucuggcugcgggaauugggauuguauuaugacauccuaccaguaccugaucauucagaacaccacgugggaagaccacugccaguuuagcagacccucuccuaucggauaucucggccugcuuucccaacggacacgcgauauuuacaucagcagacggcgccggggcaccuucacauggacccuguccgacucugaggggaacgagacccccggaggcuauugucugacacgcuggaugcucaucgaagcugagcugaagugcuuugggaauacggccgucgcuaaauguaacgaaaagcaugaugaggaguucugcgacaugcuuagacuguuugauuucaauaaacaggccauucggcgccucaaggcgcccgcccagaugagcauccagcugauuaacaaggcugugaaugcccuuaucaacgaccaacugauuaugaaaaaucaccucagagauaucaugugcaucccuuacugcaacuauuccaaguacugguaucugaaucacaccagcucuggccggacaucccugcccaaauguuggcucauuagcaacgggucuuaccugaaugagacccaguucagcgacgacaucgaacagcaagcugauaacaugauuacagagaugcuucagaaggaauacaucgagcgccagggaaaaaccccucugggccucguugacauuuuuaucuucuccacgucuuuuuaucugauuagcaucuuccugcaucuuaucaagauuccgacacacagacauaucgugggcaaacccugcccuaagccccaccggcucaaucauaugggggucuguuccugcggacuguacaagcacccuggcgugcccaccaaauggaagcgcugaggacuagucccuguucccagagcccacuuuuuuuucuuuuuuugaaauaaaauagccugucuuucagaucucaaaggcucuuuucagagccaccaaaaaaaaaaaaaaaaaaaaaaaaaaaaaaaaaaaaaaaaaaaaaaaaaaaaaaaaaaaaaaaaagaauu

SEQ ID NO: 15690 - RNA, 1733 nt, Artificial Sequence
  mRNA product Design a-2 (hSL-A64-N5) comprising derived and/or modified sequence from LASV(803213;Clade II)__AAF86703__GPCmut1 (opt5)
aggagaguccgcucagccagguugcagaagcggcuuagcguguguccuaaucuucucucugcguguagguaggccugugccgcaaacaagcuuaccaugggccagaucauuaccuucuuucaagaggugccccacgucaucgaagagguuaugaacauugugcugaucgcccucagccugcuugcuauucugaaggggaucuacaauguggccacaugcggacucuucggccugaucuccuuucuucugcucugugggagaucuugcagcgucacguauaaaggaguguacgaacugcagacccuggagcucaacauggcgaaucugaacaugacaaugccucuuuccuguaccaagaauaacucucaucacuauauuaugguuggcaaugaaacagggcuggagcucacccugacaaacaccagcaucauuaaucauaaauucugcaaccuuuccgacgcucacaagaaaaaucuguacgaucaugcccucaugucuaucauuagcacguuucaccuguccaucccgaacuucaaucaguaugaggccaugagcugugacuuuaacggaggcaagauuucugugcaguacaaucugucccacagcuucgcugucgaugccgcuaaccauugcggcaccaucgccaacggggugcuccaaacauuuaugcggauggcguggggaggcucuuauaucgcccuggacuccgggugcggaaauugggauuguauuaugaccagcuaccaguaccuuaucauucagaacacaaccugggaagaccacugccaguucucucgccccuccccuaucggcuaucuggggcuccugagccaaagaacgcgggauauuuacaucucccgcagacgccggggaacauuuaccuggacacucucugacagcgagggcaaugaagcucccggcggguauugucugacccgguggaugcugaucgaggccgagcucaaaugcuucggaaacaccgcuguugccaaguguaaugaaaaacaugaugaggaauuuugcgacaugcugcgccuuuucgauuucaacaagcaggcgauuaaaagacugaagacacccgcccagauguccauccagcucauuaauaaggcugugaacgcccugaucaaugaccaacuuauuaugaaaaaccaucugcgggauaucaugugcaucccuuacugcaauuauagccgcuacugguaucucaaccacacggucaccgggaagacaucucugcccagauguuggcugguguccaauggaagcuaccucaacgaaacccacuuuucugacgacauugagcagcaggcugauaauaugaucacagagaugcugcaaaaagaauacauggaccggcagggcaagaccccucuugggcugguggaucucuucgucuuuagcacguccuucuaucugauuucuaucuuucugcaccuuguuaaaauuccgacacaucgccacaucgugggaaagcccugcccuaaaccccauagacucaaccacaugggcauuuguagcugcggccuguacaagcacccuggggugcccgucaaguggaaacggugaggacuagucccuguucccagagcccacuuuuuuuucuuuuuuugaaauaaaauagccugucuuucagaucucaaaggcucuuuucagagccaccaaaaaaaaaaaaaaaaaaaaaaaaaaaaaaaaaaaaaaaaaaaaaaaaaaaaaaaaaaaaaaaaagaauu

SEQ ID NO: 15691 - RNA, 1733 nt, Artificial Sequence
  mRNA product Design a-2 (hSL-A64-N5) comprising derived and/or modified sequence from LASV(GA391;Clade III)__CAA36645__GPCmut1 (opt5)
aggagaguccgcucagccagguugcagaagcggcuuagcguguguccuaaucuucucucugcguguagguaggccugugccgcaaacaagcuuaccaugggccagaucgugaccuucuuucaagaggucccccacguuauugaagaggugaugaacaucgugcugauugcccucagcauccuggcuauucuuaaggggcuguacaaugucgccacaugcggacucaucggccuggugacguuccuucugcucuccgggagaucuuguagccugaucuauaaaggaaccuacgaacugcagacacucgagcugaacauggaaacccuuaauaugacaaugccucuguccugcaccaagaacaauucucaucacuauauucggguuggcaacgagacagggcucgagcugacccuuacgaauaccagcauccugaaccauaaauuuuguaaucucuccgacgcgcacaagcgcaaccuguacgaucauucucugaugagcauuaucuccacauuccaccucagcauuccgaauuuuaaccaguaugaagcuaugucuugcgacuucaauggaggcaaaaucaccgugcaguacaaccugucccacagcuuugccgucgaugccgcuggccauugugggacacuugccaauggagugcugcaaaccuucaugagaauggcuuggggcgggucuuauauugcccucgacuccggaugcggcaacugggauugcaucaugacgagcuaccaguaccugaucauucagaacacaaccugggacgaucacugucaguuuucucgccccuccccuaucggguaucuuggacugcucagccaaagaacacgggacauuuacaucucccgcagacgccggggcaccuucaccuggacacucucugauagcgagggcaaugaaacgcccgggggauauugccugacccgguggaugcuuauugaggcggagcugaaguguuuuggcaacacagccguugcuaagugcaaugaaaaacaugacgaggaguucugugauaugcuccgccuguuugacuucaacaagcaggccaucagacggcuuaaaacccccgcucagauguccauccagcugauuaauaaggccgugaacgcgcucaucaaugaucaacugauuaugaaaaaccaucugcgcgacaucaugugcauuccuuacugcaauuauagcagauacugguaucucaaccacacaucuaccggaaagacgucccugccccggugcuggcuuaucagcaauggcucuuaccugaacgaaacaaaguucagcgacgauaucgagcagcaggccgacaauaugauuaccgagaugcuccaaaaagaauacaucgaucgccaggggaagaccccucugggacuggucgaccuuuuuguguucuccacaucuuuuuaucucauuagcaucuuccugcaccuggugaaaauuccgacccacagacauaucgucggcaagcccuguccuaaaccccaccggcucaaccauaugggcauuugcuccugugggcuguacaagcagccuggaguucccgugagauggaaacgcugaggacuagucccuguucccagagcccacuuuuuuuucuuuuuuugaaauaaaauagccugucuuucagaucucaaaggcucuuuucagagccaccaaaaaaaaaaaaaaaaaaaaaaaaaaaaaaaaaaaaaaaaaaaaaaaaaaaaaaaaaaaaaaaaagaauu

SEQ ID NO: 15692 - RNA, 1736 nt, Artificial Sequence
  mRNA product Design a-2 (hSL-A64-N5) comprising derived and/or modified sequence from LASV(AV;Clade V)__CCA30314__GPCmut1 (opt5)
aggagaguccgcucagccagguugcagaagcggcuuagcguguguccuaaucuucucucugcguguagguaggccugugccgcaaacaagcuuaccaugggccagaucgugaccuucuuucaagaggucccccacguuauugaagaggugaugaacaucgugcugauugcccucagcauccuggcuguccuuaaggggcuguacaauauugccacaugcggacucaucggccugaucacguuccuucugcucugugggagauccugcucuagcaaccuguauaaaggaguguacgaacugcagucccucgaccugaauauggagacccuuaacaugacaaugccucugucuuguaccaagaauaacagccaucacuauauucggguuggcaaugauacagggcucgaacugacccuuacaaacaccuccauccugaaucauaaauuuugcaaccucucugacgcgcacaagaaagaucuguacgaccaugcucugaugagcauuaucuccacguuccaccucagcauuccgaauuuuaaccaguaugaggccaugucuugugauuucaauggaggcaagaucuccgugcaguacaaccugagccacucuuaugccauugacgcugccaaucauugcggcaccgucgcuaacgggauccuucaaacauuuaugcgcauggccuggggaggcuccuacaucgcgcuggauagcgggugcggaaacugggacuguauuaugaccucuuaccaguaucucaucauucagaauacaaccugggagaaccacugccaguucucccggcccagcccuaucggcuaccuggggcuucugucccaacgcacgagagauauuuauaucucucggcgccgccggggaacauuuaccuggacacugagcgacuccgaaggcaaugccacccccggcggguacugucucaccagauggaugcugaucgaggcugaacuuaagugcuucggaaacacagccguggcuaaauguaaugagaagcaugaugaggaauuuugcgacaugcugcgccucuucgauuuuaacaaacaggccauuagccggcugaagucucccgcgcagauguccauccagcuuauuaauaaagccguuaacgcucugaucaaugaccaacucauuaugaagaaccaccugagagacaucaugugcaucccuuauugcaauuacagcaaguauugguaccugaaccacacgauuaccgggaaaacaucucuccccaaguguuggcuggugagcaauggauccuaccuuaacgaaacccauuucucugaugacaucgagcagcaggccgauaauaugauuacagaaaugcugcaaaaagaguauauggagcggcagggcaagaccccucucgggcuggucgaccuguucguguuuagcacguccuucuaccuuaucagcauuuuucuccgccuggugaaaaucccgacacacagacauauugucggaaagcccugcccuaaaccccaccggcugaaccauaugggcaucuguucuugcggccucuauaagcagccugggguucccgugcgcuggaagagaugaggacuagucccuguucccagagcccacuuuuuuuucuuuuuuugaaauaaaauagccugucuuucagaucucaaaggcucuuuucagagccaccaaaaaaaaaaaaaaaaaaaaaaaaaaaaaaaaaaaaaaaaaaaaaaaaaaaaaaaaaaaaaaaaagaauu

SEQ ID NO: 15693 - RNA, 1733 nt, Artificial Sequence
  mRNA product Design a-2 (hSL-A64-N5) comprising derived and/or modified sequence from LASV(Togo/2016/7082;Clade VI)__AMR44577__GPCmut1 (opt5)
aggagaguccgcucagccagguugcagaagcggcuuagcguguguccuaaucuucucucugcguguagguaggccugugccgcaaacaagcuuaccaugggccagaucauuaccuucuuucaagaggugccccacgucaucgaagagguuaugaacauugugcugaucgcccucagccugcuugcuauucugaaggggguguacaaugucgccacaugcggaaucaucggccucgugacguuccuguuucuuugugggagauccugcucucugauuuauaaaggaagcuacgaacuccagacccuggagcugaacauggaaacacucaauaugaccaugccucuguccuguacaaagaacucuagccaucacuauauccggguuggcaaugagaccgggcuugagcugacacucaccaacacguccauuaucaaucauaaauucugcaaccugucugacgcgcacaagcgcaaucuuuacgaucaugcucugaugagcauucucuccaccuuucaccugagcaucccgaacuucaaucaguaugaagccaugucuugugacuuuaacggaggcaaaauuuccgugcaguacaaucugagccacgccuaugcugucgaugccgcugagcauugcggcacaguggccaacgggguucuccaaaccuucaugagaauggcguggggaggcucuuacaucgcccuggacuccgggugcggaaauugggauuguaucaugacaagcuaccaguaucuuauuauccagaacaccacgugggaagaccacugccaguuuucucgccccuccccuauuggcuaccuggggcuccugagccaaagaacacgggauaucuauauuucccgcagacgccggggaaccuucacauggacccucucugacagcgagggcaacgagacccccggcggguacugucugacacgguggaugcugaucgaagcugagcucaagugcuuuggaaauacggccguggcuaaguguaacgaaaaacaugaugaggaguucugcgacaugcugcgccuuuuugauuucaauaagcaggccauccagagacugaaaucccccgcgcagaugagcauucaacucaucaacaaggccgucaaugcucugauuaacgaccagcuuaucaugaaaaaucaucugcgggauaugaugugcauuccuuauugcaacuacucuaaguauugguaccucaaucacaccuccagcgggcgcacaucucugcccaaguguuggcuggugagcaacggauccuaccucaaugagacccacuucucugacgacaucgaacagcaagccgauaacaugaucacagagaugcugcagaaagaauauauugacagacagggcaagaccccucuugggcugguggaucucuuugucuucagcacguccuuuuaccugaucagcauuuuccugcaccuuaucaaaauuccgacacaucggcacaucguuggaaagcccugcccuaaaccccaucgccucaaucacaugggcauuuguucuugcggccuguauaagcagccuggggugcccaccagauggaaacggugaggacuagucccuguucccagagcccacuuuuuuuucuuuuuuugaaauaaaauagccugucuuucagaucucaaaggcucuuuucagagccaccaaaaaaaaaaaaaaaaaaaaaaaaaaaaaaaaaaaaaaaaaaaaaaaaaaaaaaaaaaaaaaaaagaauu

SEQ ID NO: 15694 - RNA, 1733 nt, Artificial Sequence
  mRNA product Design a-2 (hSL-A64-N5) comprising derived and/or modified sequence from LASV(KAK-428;Clade n.d. (VII))__ANH09740__GPCmut1 (opt5)
aggagaguccgcucagccagguugcagaagcggcuuagcguguguccuaaucuucucucugcguguagguaggccugugccgcaaacaagcuuaccaugggccagaucgugaccuucuuucaagaggucccccacguuauugaagaggugaugaacaucgugcugauugcccucagccugcuugcuauccugaaggggcucuacaauuucgccacaugcggagucauuggccugaucacguuucuucugcucugugggagauccugcucugcgaccuauaaaggacaguacgaacugcagacacuggagcucaacauggaaagccugaauaugaccaugccucuuuccuguacaaagaacaauucucaucacuauauccgggcuggcaacaauaccgggcuggagcucacacugaccaacacgagcauuaucucccauaaauucugcaaucuuucugacgcccacaagaaaaaccuguacgaucauacccucaugagcauuaucacaaccuuucaccuguccauuccgaauuucaaccaguaugaggccaugagcugugacuuuaauggaggcaagaucucuauucaauacaaccugucccacagcuaugcuggcgaugccgcucagcauugcgggacaguggccaauggaguucuccagaccuucaugcgcauggcguggggcgggucuuaccuggcccuugacuccggaugccggggcugggauuguaucaucagcucuuaccaguaucugauuauccaaaacacgacaugggacgaucacugccaguuuucccgccccagcccuauuggguaccucggauucgugucccagaagaccagagacaucuauauuucucggcgccgccggggcacauuuaccuggacccugagcgauuccgaaggccaugacaugcccgggggauacugucucacaagauggaugcugaucgaggcugaucugaaaugcuucggcaacacggccgucgcuaaguguaaugaaaaacacgacgaggaguuuugcgauauguggcgccucuucgacuucaacaagcaggccauccaacggcugaaagcgcccgcccagaugaauauucagcuuaucaacaaggcugugaaugcccugauuaacgaccaacucaugaugaagaaucaccugagagauaucaugugcauuccuuauugcaacuacagcaaauuuugguaucuuaauaacaccacaaccggacggacaucucugccccgcuguuggcucaucuccaauggcagcuaccugaacgagacccauuucucugacgauaucgaacagcaggcugacaauaugauuacggagaugcugcagaaggaauacauggauagacaagggaaaacaccucucggacugguugaccuuuuuguguucagcaccuccuuuuaucugaucaccauuuuccuccaccuggucaagaucccgacacaucggcacauugugggcaaacccugcccuaagccccaucgccugaaccacaugggcaucuguucuugcgggcuuuacaaacagccuggagugcccgucagauggaagcggugaggacuagucccuguucccagagcccacuuuuuuuucuuuuuuugaaauaaaauagccugucuuucagaucucaaaggcucuuuucagagccaccaaaaaaaaaaaaaaaaaaaaaaaaaaaaaaaaaaaaaaaaaaaaaaaaaaaaaaaaaaaaaaaaagaauu

SEQ ID NO: 15695 - RNA, 1733 nt, Artificial Sequence; identical to SEQ ID NO: 15689
  mRNA product Design a-2 (hSL-A64-N5) comprising derived and/or modified sequence from LASV(Pinneo-NIG-1969;Clade I)__AIT17836__GPCmut1 (opt5)

SEQ ID NO: 15696 - RNA, 1733 nt, Artificial Sequence
  mRNA product Design a-2 (hSL-A64-N5) comprising derived and/or modified sequence from LASV(ISTH0009-NIG-2011;Clade II)__AIT17404__GPCmut1 (opt5)
aggagaguccgcucagccagguugcagaagcggcuuagcguguguccuaaucuucucucugcguguagguaggccugugccgcaaacaagcuuaccaugggccagaucauuaccuucuuucaagaggugccccacgucaucgaagagguuaugaacauugugcugaucgcccucagccugcuugcuauucugaaggggaucuacaauguggccacaugcggacucuucggccuggucuccuuucuucugcucugugggagaucuugcagcacgaccuauaaaggaguguacgaacugcagacacuggagcucgacauggcgucccugaacaugaccaugccucuuucuuguacaaagaauaacagccaucacuauaucaugguuggcaaugaaaccgggcuggagcucacacugaccaacacguccauuaucaaucauaaauucugcaaccuuucugaugcucacaagaaaaaucuguacgaccaugcccucaugagcauuaucuccaccuuucaccugagcauuccgaacuucaaucaguaugaggccaugucuugugauuuuaacggaggcaagaucuccgugcaguacaaucugagccacgcuuaugccgucgacgcugccaaccauugcggcacaauugcgaauggggugcuccaaaccuucaugcggauggccuggggaggcucuuacaucgcucuggauuccgggugcggaagcugggacuguaucaugacaucuuaccaguaucuuauuauccagaacaccacgugggaagaucacugccaguuuucccgccccagcccuauuggcuaccuggggcuccugucccaaagaacacgggacaucuauauuucucgcagacgccggggaaccuucacauggacccucagcgauuccgagggcaacgaaacccccggcggguacugucugacacgguggaugcugaucgaggccgagcucaaaugcuuuggaaauacggcuguugccaaguguaacgaaaaacaugacgaggaguucugcgauaugcugcgccuuuuugacuucaauaagcaggcgaucagacggcugaaaacccccgcccagaugagcauucagcucaucaacaaggcugugaaugcccugauuaacgaucaacuuaucaugaagaaucaucugcgcgacauuaugugcaucccuuauugcaacuacucuaaauauugguaccucaaucacacagucaccgggaagacaucccugcccagauguuggcuggugagcaacggaucuuaccucaaugaaacccacuucagcgacgauaucgagcagcaggcugacaacaugauuacggagcugcuucaaaaagaauauauggaucggcagggcaagacaccucuggggcucguggaccuguuugucuucuccaccucuuuuuaccugaucagcauuuuccuucaccucaucaaaauuccgacccaucgccacaucacaggaaagcccugcccuaaaccccauagacugaaucacaugggcauuuguuccugcggccuguauaagcacccugggguucccgugaaguggaaacggugaggacuagucccuguucccagagcccacuuuuuuuucuuuuuuugaaauaaaauagccugucuuucagaucucaaaggcucuuuucagagccaccaaaaaaaaaaaaaaaaaaaaaaaaaaaaaaaaaaaaaaaaaaaaaaaaaaaaaaaaaaaaaaaaagaauu

SEQ ID NO: 15697 - RNA, 1733 nt, Artificial Sequence
  mRNA product Design a-2 (hSL-A64-N5) comprising derived and/or modified sequence from LASV(ISTH2010-NIG-2012;Clade II)__AIT17482__GPCmut1 (opt5)
aggagaguccgcucagccagguugcagaagcggcuuagcguguguccuaaucuucucucugcguguagguaggccugugccgcaaacaagcuuaccaugggccagaucauuaccuucuuucaagaggugccccacgucaucgaagagguuaugaacauugugcugaucgcccucagccugcuugcuauucugaaggggaucuacaauguggccacaugcggacucuucggccuggucuccuuucuucugcucugugggagaucuugcagcacgaccuauaaaggaguguacgaacugcagacacuggagcucgacauggcgucccugaacaugaccaugccucuuucuuguacaaagaauaacagccaucacuauaucaugguuggcaaugaaaccgggcuggagcucacacugaccaacacguccauuaucaaucauaaauucugcaaccuuucugaugcucacaagaaaaaucuguacgaccaugcccucaugagcauuaucuccaccuuucaccugagcauuccgaacuucaaucaguaugaggccaugucuugugauuuuaacggaggcaagaucuccgugcaguacaaucugagccacgcuuaugccgucgacgcugccaaccauugcggcacaauugcgaauggggugcuccaaaccuucaugcggauggccuggggaggcucuuacaucgcucuggauuccgggugcggaagcugggacuguaucaugacaucuuaccaguaucuuauuauccagaacauuaccugggaagaucacugccaguuuucccgccccagcccuaucggcuaccuggggcuccugucccaaagaacgcgggacauuuauaucucucgcagacgccggggaacauucaccuggacacucagcgauuccgagggcaacgaaacccccggcggguacugucugacccgguggaugcugaucgaggccgagcucaaaugcuuuggaaauacagcuguugccaaguguaacgaaaaacaugacgaggaguucugcgauaugcugcgccuuuuugacuucaauaagcaggcgauuagacggcugaaaacgcccgcccagaugagcauccagcucauuaacaaggcugugaaugcccugaucaacgaucaacuuauuaugaagaaucaucugcgcgacaucaugugcaucccuuauugcaacuacucuaaauauugguaccucaaucacaccgucacagggaagaccucccugcccagauguuggcuggugagcaacggaucuuaccucaaugaaacacacuucagcgacgauauugagcagcaggcugacaacaugaucaccgagcugcuucaaaaagaauauauugaucggcagggcaagacgccucuggggcucguggaccuguuugucuucuccacaucuuuuuaccugaucagcauuuuccuucaccucguuaaaaucccgacccaucgccacguggugggaaagcccugcccuaaaccccauagacugaaucacaugggcauuuguuccugcggccuguauaagcacccugggguccccgugaaguggaaacggugaggacuagucccuguucccagagcccacuuuuuuuucuuuuuuugaaauaaaauagccugucuuucagaucucaaaggcucuuuucagagccaccaaaaaaaaaaaaaaaaaaaaaaaaaaaaaaaaaaaaaaaaaaaaaaaaaaaaaaaaaaaaaaaaagaauu

SEQ ID NO: 15698 - RNA, 1733 nt, Artificial Sequence
  mRNA product Design a-2 (hSL-A64-N5) comprising derived and/or modified sequence from LASV(Lassa virus/H.sapiens-wt/NGA/2015/ISTH_0543;Clade II)__AVO03639__GPCmut1 (opt5)
aggagaguccgcucagccagguugcagaagcggcuuagcguguguccuaaucuucucucugcguguagguaggccugugccgcaaacaagcuuaccaugggccagaucauuaccuucuuucaagaggugccccacgucaucgaagagguuaugaacauugugcugaucgcccucagccugcuugcuauucugaaggggaucuacaauguggccacaugcggacucuucggccuggucuccuuucuucugcucugugggagaucuugcagcacgaccuauaaaggaguguacgaacugcagacacuggagcucgacauggcgaaccugaauaugaccaugccucuuuccuguacaaagaacaauucucaucacuauaucaugguuggcaacgaaaccgggcuggagcucacacugaccaauacgagcauuaucaaccauaaauucugcaaucuuuccgaugcucacaagaaaaaccuguacgaccaugcccucaugucuauuaucagcaccuuucaccuguccauuccgaauuucaaccaguaugaggccaugagcugugauuuuaauggaggcaagaucucugugcaguacaaccugucccacacauaugcugucgacgccgcuaaucauugcggcaccauugccaacggggugcuccaaacauucaugcggauggcguggggaggcagcuacaucgcccuggauucugggugcggauccugggacuguaucaugaccagcuaccaguaucuuguuauucagaacacgacaugggaagaucacugccaguuuucucgccccuccccuaucggcuaccuggggcuccugagccaaagaacccgggacauuuauaucucccgcagacgccggggaacauucaccuggacccucucugauagcgagggcaaugaaacacccggcggguacugucugacgcgguggaugcugauugaggcugagcucaaaugcuuuggaaacaccgccguggcuaaguguaaugaaaaacaugacgaggaguucugcgauaugcugcgccuuuuugacuucaacaagcaggccaucagacggcugaaaacacccgcgcagauguccauccagcucauuaauaaggccgucaacgcucugaucaaugaucaacuuauuaugaagaaccaucugcgcgacaucaugugcauuccuuauugcaauuacagcaaauauugguaccucaaccacaccgugacagggaagaccucucugcccagauguuggcugguguccaauggaagcuaccucaacgaaacgcacuucucugacgauaucgagcagcaggccgacaauaugaucacagagcugcuucaaaaagaauauauugaucggcagggcaagaccccucuggggcucgucgaccuguuuguuuucagcaccuccuuuuaccugaucucuauuuuccuucaccucgugaaaaucccgacacaucgccacauuaccggaaagcccugcccuaaaccccauagacugaaccacaugggcaucuguagcugcggccuguauaagcacccuggggugcccgucaaguggaaacggugaggacuagucccuguucccagagcccacuuuuuuuucuuuuuuugaaauaaaauagccugucuuucagaucucaaaggcucuuuucagagccaccaaaaaaaaaaaaaaaaaaaaaaaaaaaaaaaaaaaaaaaaaaaaaaaaaaaaaaaaaaaaaaaaagaauu

SEQ ID NO: 15699 - RNA, 1733 nt, Artificial Sequence
  mRNA product Design a-2 (hSL-A64-N5) comprising derived and/or modified sequence from LASV(Lassa virus/H.sapiens-wt/NGA/2016/ISTH_0009;Clade II)__AVO03571__GPCmut1 (opt5)
aggagaguccgcucagccagguugcagaagcggcuuagcguguguccuaaucuucucucugcguguagguaggccugugccgcaaacaagcuuaccaugggccagaucauuaccuucuuucaagaggugccccacgucaucgaagagguuaugaacauugugcugaucgcccucagccugcuugcuauucugaaggggaucuacaauguggccacaugcggacuccugggccuugucuccuuccugcuccugugugggagaucuugcagcacgaccuauaaaggaguguacgaacugcagacacucgagcuggacauggcgucccuuaacaugaccaugccucugucuuguacaaagaauaacagccaucacuauaucaugguuggcaaugaaaccgggcucgagcugacacuuaccaacacguccauuaucaaucauaaauuuugcaaccugucugaugcucacaagaaaaaucucuacgaccaugcccugaugagcauuaucuccaccuuccaccugagcauuccgaacuuuaaucaguaugaggccaugucuugugauuucaacggaggccggaucuccgugcaguacaaucucagccacucuuaugcugucgacgccgcuaaccauugcggcacaauugccaauggggugcugcaaaccuuuaugcgcauggcguggggaggcuccuacaucgcccuugauagcgggugcggaucuugggacuguaucaugacauccuaccaguaucugauuauccagaacaccacgugggaagaucacugccaguucagcagacccuccccuauuggcuaccucgggcugcuuucucaacggacacgcgacaucuauauuagcagacggcgccggggaaccuuuacauggacccuguccgauagcgagggcaacgaaacccccggcggguacugucugacacgcuggaugcucaucgaggcugagcugaagugcuucggaaauacggccguugcuaaauguaacgaaaagcaugacgaggaauuuugcgauaugcuuagacuguucgacuuuaauaaacaggccauccggcgccucaagacccccgcgcagaugucuauucagcugaucaacaaagccgugaaugcucuuauuaacgaucaacugaucaugaagaaucaccucagagacauuaugugcaucccuuauugcaacuacuccaaguauugguaccugaaucacacagucaccgggaaaacaagccugccccgguguuggcucgugucuaacggaagcuaccugaaugaaacccauuucuccgacgauaucgagcagcaggccgacaacaugauuacggagcuucugcaaaaggaauauaucgaucgccagggcaaaacaccucucgggcugguggaccuguucgucuuuucuaccagcuucuaccuuauuuccaucuuucuccaccugguuaagauuccgacccauagacacaucacaggaaaacccugcccuaagccccaucggcugaaucacaugggcauuuguagcugcggccucuauaaccacccuggggugcccgugaaauggaagcgcugaggacuagucccuguucccagagcccacuuuuuuuucuuuuuuugaaauaaaauagccugucuuucagaucucaaaggcucuuuucagagccaccaaaaaaaaaaaaaaaaaaaaaaaaaaaaaaaaaaaaaaaaaaaaaaaaaaaaaaaaaaaaaaaaagaauu

SEQ ID NO: 15700 - RNA, 1733 nt, Artificial Sequence
  mRNA product Design a-2 (hSL-A64-N5) comprising derived and/or modified sequence from LASV(Lassa virus/H.sapiens-wt/NGA/2016/ISTH_0017;Clade II)__AVO03567__GPCmut1 (opt5)
aggagaguccgcucagccagguugcagaagcggcuuagcguguguccuaaucuucucucugcguguagguaggccugugccgcaaacaagcuuaccaugggccagaucauuaccuucuuucaagaggugccccacgucaucgaagagguuaugaacauugugcugaucgcccucagccugcuugcuauucugaaggggaucuacaauguggccacaugcggacucuucggccuggucuccuuucuucugcucugugggagaucuugcagcacgaccuauaaaggaguguacgaacugcagacacuggagcucgacauggcgucccugaacaugaccaugccucuuucuuguacaaagaauaacagccaucacuauaucaugguuggcaaugaaaccgggcuggagcucacacugaccaacacguccauuaucaaucauaaauucugcaaccuuucugaugcucacaagaaaaaucuguacgaccaugcccucaugagcauuaucuccaccuuucaccugagcauuccgaacuucaaucaguaugaggccaugucuugugauuuuaacggaggcaagaucuccgugcaguacaaucugagccacacauaugcuauugacgccgcuaaccauugcggcaccaucgccaaugggguccuccaaacauucaugcggauggcguggggaggcucuuacaucgcccuggauuccgggugcggaagcugggacuguauuaugaccucuuaccaguaucuuaucauucagaacacgacaugggaagaucacugccaguuuucccgccccagcccuaucggcuaccuggggcuccugucccaaagaacccgggacauuuauaucucucgcagacgccggggaacauucaccuggacccucagcgauuccgagggcaacgaaacacccggcggguacugucugacgcgguggaugcugaucgaggcugagcucaaaugcuuuggaaauaccgccguggcuaaguguaacgaaaaacaugacgaggaguucugcgauaugcugcgccuuuuugacuucaauaagcaggccauuagacggcugaaaacacccgcgcagaugagcauccagcucauuaacaaggccguuaaugcucugaucaacgaucaacuuauuaugaagaaucaucugcgcgacaucaugugcaucccuuauugcaacuacucuaaauauugguaccucaaucacaccgugacagggaagaccucccugcccagauguuggcuggucagcaacggaucuuaccucaaugaaacgcacuucagcgacgauauugagcagcaggccgacaacaugaucacagagcugcuucaaaaagaauauauggaucggcagggcaagaccccucuggggcucguggaccuguuuguguucuccaccucuuuuuaccugauuagcaucuuccuucaccucguccgcauuccgacacauagacacguuaucggaaaacccugcccuaagccccaucggcugaaucacaugggcauuuguuccugcggccuguauaaacacccuggggugcccgugaaguggaagcgcugaggacuagucccuguucccagagcccacuuuuuuuucuuuuuuugaaauaaaauagccugucuuucagaucucaaaggcucuuuucagagccaccaaaaaaaaaaaaaaaaaaaaaaaaaaaaaaaaaaaaaaaaaaaaaaaaaaaaaaaaaaaaaaaaagaauu

SEQ ID NO: 15701 - RNA, 1733 nt, Artificial Sequence
  mRNA product Design a-2 (hSL-A64-N5) comprising derived and/or modified sequence from LASV(Lassa virus/H.sapiens-wt/NGA/2018/ISTH_0959;Clade II)__AVV65099__GPCmut1 (opt5)
aggagaguccgcucagccagguugcagaagcggcuuagcguguguccuaaucuucucucugcguguagguaggccugugccgcaaacaagcuuaccaugggccagaucauuaccuucuuucaagaggugccccacgucaucgaagagguuaugaacauugugcugaucgcccucagccugcuugcuauucugaaggggaucuacaauguggucacaugcggacucuucggccugguguccuuucuucugcucugugggagaucuugcagcacgaccuauaaaggaguuuacgaacugcagacacuggagcucgacauggccucccugaacaugaccaugccucuuucuuguacaaagaauaacagccaucacuauaucauggugggcaaugaaaccgggcuggagcucacacugaccaacacguccauuaucaaucauaaauucugcaaccuuucugaugcgcacaagaaaaaucuguacgaccaugcucucaugagcauuaucuccaccuuucaccugagcauuccgaacuucaaucaguaugaggccaugucuugugauuuuaacggaggcaagaucuccguccaguacaaucugagccacgccuaugcuauugacgccgcuaaccauugcggcacaaucgccaauggggugcuccaaaccuucaugcggauggcguggggaggcucuuacaucgcccuggauuccgggugcggaagcugggacuguauuaugacaucuuaccaguaucuuaucauucagaacaccacgugggaagaucacugccaguuuucccgccccagcccuaucggcuaccuggggcuccugucccaaagaacacgggacauuuauaucucucgcagacgccggggaaccuucacauggacccucagcgauuccgagggcaacgaaacccccggcggguacugucugacacgguggaugcugaucgaggcugagcucaaaugcuuuggaaauacggccguugcuaaguguaacgaaaaacaugacgaggaguucugcgauaugcugcgccuuuuugacuucaauaagcaggccauuagacggcugaaaacccccgcgcagaugagcauccagcucauuaacaaggccgugaaugcucugaucaacgaucaacuuauuaugaagaaucaucugcgcgacaucaugugcaucccuuauugcaacuacucuaaauauugguaccucaaucacacagucaccgggaagacaucccugcccagauguuggcuggugagcaacggaucuuaccucaaugaaacccacuucagcgacgauauugagcagcaggccgacaacaugaucacggagcugcuucaaaaagaauauauugaucggcagggcaagacaccucuggggcucguggaccuguuugucuucuccaccucuuuuuaccugaucagcauuuuccuucaccucguuaaaaucccgacccaucgccacgugauuggaaagcccugcccuaaaccccauagacugaaucacaugggcaucuguuccugcggccuguauaagcacccuggggugcccgucaaguggaaacggugaggacuagucccuguucccagagcccacuuuuuuuucuuuuuuugaaauaaaauagccugucuuucagaucucaaaggcucuuuucagagccaccaaaaaaaaaaaaaaaaaaaaaaaaaaaaaaaaaaaaaaaaaaaaaaaaaaaaaaaaaaaaaaaaagaauu

SEQ ID NO: 15702 - RNA, 1733 nt, Artificial Sequence
  mRNA product Design a-2 (hSL-A64-N5) comprising derived and/or modified sequence from LASV(LASV003-NIG-2008;Clade II)__AIT17580__GPCmut1 (opt5)
aggagaguccgcucagccagguugcagaagcggcuuagcguguguccuaaucuucucucugcguguagguaggccugugccgcaaacaagcuuaccaugggccagaucauuaccuucuuucaagaggugccccacgucaucgaagagguuaugaacauugugcugaucgcccucagccugcuugcuauucugaaggggaucuacaauguggccacaugcggacucuucggccuggucuccuuucuucugcucugugggagaucuugcagcacgaccuauaaaggaguguacgaacugcagacacuggagcucgacauggcgucccugaacaugaccaugccucuuucuuguacaaagaauaacagccaucacuauaucaugguuggcaaugaaaccgggcuggagcucacacugaccaacacguccauuaucaaucauaaauucugcaaccuuucugaugcucacaagaaaaaucuguacgaccaugcccucaugagcauuaucuccaccuuucaccugagcauuccgaacuucaaucaguaugaggccaugucuugugauuuuaacggaggcaagaucuccgugcaguacaaucugagccacacauaugcugucgacgccgcuaaccauugcggcaccauugccaauggggugcuccaaacauucaugcggauggcguggggaggcucuuacaucgcccuggauuccgggugcggaagcugggacuguaucaugaccucuuaccaguaucuuauuauccagaacacgacaugggaagaucacugccaguuuucccgccccagcccuauuggcuaccuggggcuccugucccaaagaacccgggacaucuauauuucucgcagacgccggggaacauucaccuggacccucagcgauuccgagagcaacgaaacacccggcggcuacugucugacgcgguggaugcugaucgaggcugagcucaaaugcuuugggaauaccgccguugcuaaguguaacgaaaaacaugacgaggaguucugcgauaugcugcgccuuuuugacuucaauaagcaggccaucagacggcugaaagcgcccgcccagaugucuauucagcucaucaacaaggcugugaaugcccugauuaacgaucaacuuaucaugaagaaucaucugcgcgacauuaugugcaucccuuauugcaacuacuccaaauauugguaccucaaucacacagucaccggcagaacaagccugccccgguguuggcuggugucuaacgggagcuaccucaaugaaacccacuucuccgacgauaucgagcagcaggcugacaacaugauuacggagcugcuucaaaaggaauauauggaucgccagggaaaaacaccucugggccucguggaccuguuugucuucucuaccagcuuuuaccugaucuccauuuuccuucaccucguuaagaucccgacccauagacacgugauugggaaacccugcccuaagccccaucggcugaaucacaugggaaucuguagcugcggccuguauaaacacccuggcgugcccgucaaguggaagcgcugaggacuagucccuguucccagagcccacuuuuuuuucuuuuuuugaaauaaaauagccugucuuucagaucucaaaggcucuuuucagagccaccaaaaaaaaaaaaaaaaaaaaaaaaaaaaaaaaaaaaaaaaaaaaaaaaaaaaaaaaaaaaaaaaagaauu

SEQ ID NO: 15703 - RNA, 1733 nt, Artificial Sequence
  mRNA product Design a-2 (hSL-A64-N5) comprising derived and/or modified sequence from LASV(LASV035-NIG-2009;Clade II)__AIT17588__GPCmut1 (opt5)
aggagaguccgcucagccagguugcagaagcggcuuagcguguguccuaaucuucucucugcguguagguaggccugugccgcaaacaagcuuaccaugggccagaucauuaccuucuuucaagaggugccccacgucaucgaagagguuaugaacauugugcugaucgcccucagccugcuugcuauucugaaggggaucuacaauguggccacaugcggacucuucggccuggucuccuuucuucugcucugugggagaucuugcagcacgaccuauaaaggaguguacgaacugcagacacuggagcucgacauggcgucccugaacaugaccaugccucuuucuuguacaaagaauaacagccaucacuauaucaugguuggcaaugaaaccgggcuggagcucacacugaccaacacguccauuaucaaucauaaauucugcaaccuuucugaugcucacaagaaaaaucuguacgaccaugcccucaugagcauuaucuccaccuuucaccugagcauuccgaacuucaaucaguaugaggccaugucuugugauuuuaacggaggcaagaucuccgugcaguacaaucugagccacgcuuaugccgucgacgcugccaaccauugcggcacaauugcgaauggggugcuccaaaccuucaugcggauggccuggggaggcucuuacaucgcucuggauuccgggugcggaagcugggacuguaucaugacaucuuaccaguaucuuauuauccagaacaccacgugggaagaucacugccaguuuucccgccccagcccuauuggcuaccuggggcuccugucccaaagaacacgggacaucuauauuucucgcagacgccggggaaccuucacauggacccucagcgauuccgagggcaacgaaacccccggcggguacugucugacacgguggaugcugaucgaggccgagcucaaaugcuuuggaaauacggcuguugccaaguguaacgaaaaacaugacgaggaguucugcgauaugcugcgccuuuuugacuucaauaagcaggcgaucagacggcugaaagcccccgcucagaugagcauucagcucaucaacaaggccgugaaugcucugauuaacgaucaacuuaucaugaagaaucaucugcgcgacauuaugugcaucccuuauugcaacuacucuaaauauugguaccucaaucacaccgucacagggaagaccucccugcccagauguuggcuggugagcaacggaucuuaccucaaugaaacacacuucagcgacgauaucgagcagcaggccgacaacaugauuaccgagcugcuucaaaaagaauauaucgaucggcagggcaagacgccucuggggcucguggaccuguuugucuucuccacaucuuuuuaccugauuagcaucuuccuucaccucguuaaaauuccgacccaucgccacgugaucggaaagcccugcccuaaaccccauagacugaaucacaugggcauuuguuccugcggccuguauaagcacccuggggugcccgucaaguggaaacggugaggacuagucccuguucccagagcccacuuuuuuuucuuuuuuugaaauaaaauagccugucuuucagaucucaaaggcucuuuucagagccaccaaaaaaaaaaaaaaaaaaaaaaaaaaaaaaaaaaaaaaaaaaaaaaaaaaaaaaaaaaaaaaaaagaauu

SEQ ID NO: 15704 - RNA, 1733 nt, Artificial Sequence
  mRNA product Design a-2 (hSL-A64-N5) comprising derived and/or modified sequence from LASV(LASV1000-NIG-2009;Clade II)__AIT17782__GPCmut1 (opt5)
aggagaguccgcucagccagguugcagaagcggcuuagcguguguccuaaucuucucucugcguguagguaggccugugccgcaaacaagcuuaccaugggccagaucauuaccuucuuucaagaggugccccacgucaucgaagagguuaugaacauugugcugaucgcccucagccugcuugcuauucugaaggggaucuacaauguggccacaugcggacucuucggccuggucuccuuucuucugcucugugggagaucuugcagcacgaccuauaaaggaguguacgaacugcagacacuggagcucgacauggcgucccugaacaugaccaugccucuuucuuguacaaagaauaacagccaucacuauaucaugguuggcaaugaaaccgggcuggagcucacacugaccaacacguccauuaucaaucauaaauucugcaaccuuucugaugcucacaagaaaaaucuguacgaccaugcccucaugagcauuaucuccaccuuucaccugagcauuccgaacuucaaucaguaugaggccaugucuugugauuuuaacggaggcaagaucuccgugcaguacaaucugagccacacauaugcugucgacgccgcuaaccauugcggcaccauugccaauggggugcuccaaacauucaugcggauggcguggggaggcucuuacaucgcccuggauuccgggugcggaagcugggacuguaucaugaccucuuaccaguaucuuauuauccagaacacgacaugggaagaucacugccaguuuucccgccccagcccuauuggcuaccuggggcuccugucccaaagaacccgggacaucuauauuucucgcagacgccggggaacauucaccuggacccucagcgauuccgagggcaacgaaacacccggcggguacugucugacgcgguggaugcugaucgaggcugagcucaaaugcuuuggaaauaccgccguugcuaaguguaacgaaaaacaugacgaggaguucugcgauaugcugcgccuuuuugacuucaauaagcaggccaucaaaagacugaagacacccgcgcagaugagcauucagcucaucaacaaggccgugaaugcucugauuaacgaucaacuuaucaugaaaaaucaucugcgggacauuaugugcaucccuuauugcaacuacucuaaguauugguaccucaaucacaccgucacagggaaaaccucccugccccgcuguuggcuggugagcaacggaucuuaccucaaugaaacgcacuucagcgacgauaucgagcagcaggccgacaacaugauuacagagcugcuucaaaaggaauauaucgauagacagggcaaaaccccucuggggcucguggaccuguuugucuucuccaccucuuuuuaccugauuagcaucuuccuucaccucguuaagauuccgacacaucggcacguggugggaaaacccugcccuaagccccaucgccugaaucacaugggcaucuguuccugcggccuguauaagcacccugggguccccgugaaauggaagagaugaggacuagucccuguucccagagcccacuuuuuuuucuuuuuuugaaauaaaauagccugucuuucagaucucaaaggcucuuuucagagccaccaaaaaaaaaaaaaaaaaaaaaaaaaaaaaaaaaaaaaaaaaaaaaaaaaaaaaaaaaaaaaaaaagaauu

SEQ ID NO: 15705 - RNA, 1733 nt, Artificial Sequence
  mRNA product Design a-2 (hSL-A64-N5) comprising derived and/or modified sequence from LASV(LASV221-NIG-2010;Clade II)__AIT17624__GPCmut1 (opt5)
aggagaguccgcucagccagguugcagaagcggcuuagcguguguccuaaucuucucucugcguguagguaggccugugccgcaaacaagcuuaccaugggccagaucauuaccuucuuucaagaggugccccacgucaucgaagagguuaugaacauugugcugaucgcccucagccugcuugcuauucugaaggggaucuacaauguggccacaugcggacucuucggccuggucuccuuucuucugcucugugggagaucuugcagcacgaccuauaaaggaguguacgaacugcagacacuggagcucgacauggcgucccugaacaugaccaugccucuuucuuguacaaagaauaacagccaucacuauaucaugguuggcaaugaaaccgggcuggagcucacacugaccaacacguccauuaucaaucauaaauucugcaaccuuucugaugcucacaagaaaaaucuguacgaccaugcccucaugagcauuaucuccaccuuucaccugagcauuccgaacuucaaucaguaugaggccaugucuugugauuuuaacggaggcaagaucuccgugcaguacaaucugagccacacauaugcuauugacgccgcuaaccauugcggcaccaucgccaaugggguccuccaaacauucaugcggauggcguggggaggcucuuacaucgcccuggauuccgggugcggaagcugggacuguauuaugaccucuuaccaguaucuuaucauucagaacacgacaugggaagaucacugccaguuuucccgccccagcccuaucggcuaccuggggcuccugucccaaagaacccgggacauuuauaucucucgcagacgccggggaacauucaccuggacccucagcgauuccgagggcaacgaaacacccggcggguacugucugacgcgguggaugcugaucgaggcugagcucaaaugcuuuggaaauaccgccguggcuaaguguaacgaaaaacaugacgaggaguucugcgauaugcugcgccuuuuugacuucaauaagcaggccauuagacggcugaaaacacccgcgcagaugagcauccagcucauuaacaaggccguuaaugcucugaucaacgaucaacuuauuaugaagaaucaucugcgcgacaucaugugcaucccuuauugcaacuacucuaaauauugguaccucaaucacaccgugacagggaagaccucccugcccagauguuggcuggucagcaacggaucuuaccucaaugaaacgcacuucagcgacgauauugagcagcaggccgacaacaugaucacagagaugcugcaaaaagaauauauggaucggcagggcaagaccccucuugggcugguggaccucuuuguguucuccaccucuuuuuaccugauuagcaucuuccugcaccuugucaaaauuccgacacaucgccacguuaucggaaagcccugcccuaaaccccauagacucaaucacaugggcauuuguuccugcggccuguauaagcacccuggggugcccgugaaguggaaacggugaggacuagucccuguucccagagcccacuuuuuuuucuuuuuuugaaauaaaauagccugucuuucagaucucaaaggcucuuuucagagccaccaaaaaaaaaaaaaaaaaaaaaaaaaaaaaaaaaaaaaaaaaaaaaaaaaaaaaaaaaaaaaaaaagaauu

SEQ ID NO: 15706 - RNA, 1733 nt, Artificial Sequence
  mRNA product Design a-2 (hSL-A64-N5) comprising derived and/or modified sequence from LASV(LASV237-NIG-2010;Clade II)__AIT17638__GPCmut1 (opt5)
aggagaguccgcucagccagguugcagaagcggcuuagcguguguccuaaucuucucucugcguguagguaggccugugccgcaaacaagcuuaccaugggccagaucauuaccuucuuucaagaggugccccacgucaucgaagagguuaugaacauugugcugaucgcccucagccugcuugcuauucugaaggggaucuacaauguggccacaugcggacucuucggccuggucuccuuucuucugcucugugggagaucuugcagcacgaccuauaaaggaguguacgaacugcagacacuggagcucgacauggcgucccugaacaugaccaugccucuuucuuguacaaagaauaacagccaucacuauaucaugguuggcaaugaaaccgggcuggagcucacacugaccaacacguccauuaucaaucauaaauucugcaaccuuucugaugcucacaagaaagaccuguacgaucaugcccucaugagcauuaucuccaccuuucaccugagcauuccgaauuucaaccaguaugaggccaugucuugugacuuuaauggaggcaagaucuccgugcaguacaaccugagccacacauaugcugucgaugccgcuaaucauugcggcaccauugccaacggggugcuccaaacauucaugcggauggcguggggaggcucuuacaucgcccuggacuccgggugcggaagcugggauuguaucaugaccucuuaccaguaucuuauuauccagaauacgacaugggaagaccacugccaguuuucccgccccagcccuauuggcuaccuggggcuccugucccaaagaacccgggauaucuauauuucucgcagacgccggggaacauucaccuggacccucagcgacuccgagggcaacgaaacacccggcggguacugucugacgcgguggaugcugaucgaggcugagcucaaaugcuuuggaaacaccgccguugcuaaguguaaugaaaaacaugaugaggaguucugcgacaugcugcgccuuuuugauuucaacaagcaggccaucagacggcugaaaacacccgcgcagaugagcauucagcucaucaauaaggccgugaacgcucugauuaaugaccaacuuaucaugaagaaccaucugcgcgacauuaugugcaucccuuauugcaauuacucuaaauauugguaccucaaccacaccgucacagggaagaccucccugcccagauguuggcuggugagcaauggaucuuaccucaacgaaacgcacuucagcgaugacaucgagcagcaggccgauaauaugauuacagagcugcuucaaaaagaauauauggaccggcagggcaagaccccucuggggcucguggaucuguuugucuucuccaccucuuuuuaccugaucagcauuuuccuucaccucaucaaaauuccgacacaucgccacaucaccggaaagcccugcccuaaaccccauagacugaaccacaugggcauuuguuccugcggccuguauaagcacccugggguucccgugaaguggaaacggugaggacuagucccuguucccagagcccacuuuuuuuucuuuuuuugaaauaaaauagccugucuuucagaucucaaaggcucuuuucagagccaccaaaaaaaaaaaaaaaaaaaaaaaaaaaaaaaaaaaaaaaaaaaaaaaaaaaaaaaaaaaaaaaaagaauu

SEQ ID NO: 15707 - RNA, 1733 nt, Artificial Sequence
  mRNA product Design a-2 (hSL-A64-N5) comprising derived and/or modified sequence from LASV(LASV253-NIG-2011;Clade II)__AIT17670__GPCmut1 (opt5)
aggagaguccgcucagccagguugcagaagcggcuuagcguguguccuaaucuucucucugcguguagguaggccugugccgcaaacaagcuuaccaugggccagaucauuaccuucuuucaagaggugccccacgucaucgaagagguuaugaacauugugcugaucgcccucagccugcuugcuauucugaaggggaucuacaauguggccacaugcggacucuucggccuggucuccuuucuucugcucugugggagaucuugcagcacgaccuauaaaggaguguacgaacugcagacacuggagcucgacauggcgucccugaacaugaccaugccucuuucuuguacaaagaauaacagccaucacuauaucaugguuggcaaugaaaccgggcuggagcucacacugaccaacacguccauuaucaaucauaaauucugcaaccuuucugaugcucacaagaaaaaucuguacgaccaugcccucaugagcauuaucuccaccuuucaccugagcauuccgaacuucaaucaguaugaggccaugucuugugauuuuaacggaggcaagaucuccgugcaguacaaucugagccacacauaugcugucgacgccgcuaaccauugcggcaccauugccaauggggugcuccaaacauucaugcggauggcguggggaggcucuuacaucgcccuggauuccgggugcggaagcugggacuguaucaugaccucuuaccaguaucuuauuauccagaacacgacaugggaagaucacugccaguuuucccgccccagcccuauuggcuaccuggggcuccugucccaaagaacccgggacaucuauauuucucgcagacgccggggaacauucaccuggacccucagcgauuccgagggcaacgaaacacccggcggguacugucugacgcgguggaugcugaucgaggcugagcucaaaugcuuuggaaauaccgccguugcuaaguguaacgaaaaacaugacgaggaguucugcgauaugcugcgccuuuuugacuucaauaagcaggccaucagacggcugaaagcgcccgcccagaugagcauucagcucaucaacaaggcugugaaugcccugauuaacgaucaacuuaucaugaagaaucaucugcgcgacauuaugugcaucccuuauugcaacuacucuaaauauugguaccucaaucacacagucaccgggagaacaucccugccccgguguuggcuggugagcaacggaucuuaccucaaugaaacccacuucagcgacgauaucgagcagcaggcugacaacaugauuacggagcugcuucaaaaggaauauaucgaucgccagggcaaaacaccucuggggcucguggaccuguuugucuucuccaccucuuuuuaccugauuagcaucuuccuucaccucguuaagauuccgacccauagacacaucauuggaaaacccugcccuaagccccaucggcugaaucacaugggcaucuguuccugcggccuguauaaacacccuggggugcccgugaaguggaagcgcugaggacuagucccuguucccagagcccacuuuuuuuucuuuuuuugaaauaaaauagccugucuuucagaucucaaaggcucuuuucagagccaccaaaaaaaaaaaaaaaaaaaaaaaaaaaaaaaaaaaaaaaaaaaaaaaaaaaaaaaaaaaaaaaaagaauu

SEQ ID NO: 15708 - RNA, 1733 nt, Artificial Sequence
  mRNA product Design a-2 (hSL-A64-N5) comprising derived and/or modified sequence from LASV(LASV254-NIG-2011;Clade II)__AIT17674__GPCmut1 (opt5)
aggagaguccgcucagccagguugcagaagcggcuuagcguguguccuaaucuucucucugcguguagguaggccugugccgcaaacaagcuuaccaugggccagaucauuaccuucuuucaagaggugccccacgucaucgaagagguuaugaacauugugcugaucgcccucagccugcuugcuauucugaaggggaucuacaauguggccacaugcggacucuucggccuggucuccuuucuucugcucugugggagaucuugcagcacgaccuauaaaggaguguacgaacugcagacacuggagcucgacaugaccaaccugaauaugacaaugccucuuuccuguaccaagaacaauucucaucacuauaucaugguuggcaacgaaacagggcuggagcucacccugacgaauaccagcauuaucaaccauaaauucugcaaucuuuccgaugcgcacaagaaaaaccuguacaaucaugcucucaugucuauuaucagcacauuucaccuguccauuccgaacuucaaucaguaugaggccaugagcugugacuuuaacggaggcaagaucucugugcaguacaaucugucccacagcuaugccgucgaugcugccaaccauugcggcaccauugcuaacggggugcuccaaacauucaugcggauggccuggggaggcucuuacaucgcgcuggacuccgggugcggaaauugggauuguaucaugaccagcuaccaguaucuuauuauccagaacacgacaugggaagaccacugccaguuuucucgccccuccccuauuggcuaccuggggcuccugagccaaagaacccgggauaucuauauuucccgcagacgccggggaacauucaccuggacccucucugacagcgagggcaaugaaacacccggcggguacugucugacgcgguggaugcugaucgaggccgagcucaaaugcuuuggaaacaccgcuguugccaaguguaaugaaaaacaugaugaggaguucugcgacaugcugcgccuuuuugauuucaacaagcaggcuaucagacggcugaaaacacccgcccaggcgaauauucagcucaucaacaaggccgugaaugcucugauuaacgaccaacuuaucaugaagaaucaucugcgcgauauuaugugcaucccuuauugcaacuacuccaaauauugguaccucaaucacaccgucacagggaagaccagccugcccagauguuggcuggugucuaacggauccuaccucaaugaaacgcacuucagcgacgacaucgagcagcaggccgauaacaugauuacagagcugcuucaaaaagaauauauggaccggcagggcaagaccccucuggggcucguggaucuguuugucuucucuaccagcuuuuaccugaucuccauuuuccuucaccucguuaaaaucccgacacaucgccacgugauuggaaagcccugcccuaaaccccauagacugaaccacaugggcaucuguucuugcggccuguauaagcacccuggggugcccgucaaguggaaacggugaggacuagucccuguucccagagcccacuuuuuuuucuuuuuuugaaauaaaauagccugucuuucagaucucaaaggcucuuuucagagccaccaaaaaaaaaaaaaaaaaaaaaaaaaaaaaaaaaaaaaaaaaaaaaaaaaaaaaaaaaaaaaaaaagaauu

SEQ ID NO: 15709 - RNA, 1733 nt, Artificial Sequence
  mRNA product Design a-2 (hSL-A64-N5) comprising derived and/or modified sequence from LASV(Nig08-A19;Clade III)__ADU56618__GPCmut1 (opt5)
aggagaguccgcucagccagguugcagaagcggcuuagcguguguccuaaucuucucucugcguguagguaggccugugccgcaaacaagcuuaccaugggccagaucgugaccuucuuucaagaggucccccacguuauugaagaggugaugaacaucgugcugauugcccucagcauccuggcuauucuuaaggggcuguacaauaucgccacaugcggacucaucggccuggucacguuccuucugcucuccgggagaucuuguagcaugaccuauaaaggaguguacgaacugcagacacuggagcucaacaugaauacccugaacaugacaaugccucuuuccugcaccaagaauaacucucaucacuauauuaugguuggcaaugaaacagggcuggagcucacccugacgaacaccagccuucugcaucacaaauuuuguaaucucuccgacgcgcauaagaaaaaccuguacgaucacacacugaugucuaucauuagcaccuuccaccucuccaucccgaauuuuaaccaguaugaggcuaugagcugcgacuucaauggaggcaagauuacagugcaguacaaccugucucauuccuaugccaucgaugccgcuaaucacuguggcaccgucgccaacggggugcuucaaacguuuaugcggauggcuuggggaggcagcuacauugcccuggacucugggugcggaaagugggauugcaucaugacauccuaccaguaucucaucauucagaacaccacaugggaagaccauugucaguucagcagacccucuccuaucggcuaccuggggcuucugucccaacggacccgcgauauuuauaucagcagacggcgccggggaaccuuuacauggacgcuguccgacucugagggcaaugaaacccccggcggguacugccucacacgcuggaugcugauugaggcggagcuuaaauguuucggaaacaccgccguugcuaagugcaaugaaaaacacgaugaggaauuuugugacaugcugagacucuucgauuuuaacaagcaggccauccggcgccugaaagcucccgcccagaugagcauccagcuuauuaauaaggcggugaacgcccugaucaaugaccaacucauuaugaagaaccaccugagagauaucaugugcauuccuuauugcaauuacuccaaauauugguaccugaaccauacaagcaccgggcggacgucucucccccgcugcuggcuggucuccaauggaagcuaccuuaacgaaacacacuucucugacgacaucgagcagcaggcugauaauaugaucaccgagaugcugcaaaaggaauaucucgacagacagggcaaaaccccucuggggcugguggaucuuuucguguuuagcacauccuucuaccucauuucuaucuuucugcaucuggucaagauuccgacccaccggcauaucguuggaaaacccuguccuaagccccaccgccucaaccacaugggcauuugcagcuguggccuguauaaacagccuggggugcccgugagauggaagcggugaggacuagucccuguucccagagcccacuuuuuuuucuuuuuuugaaauaaaauagccugucuuucagaucucaaaggcucuuuucagagccaccaaaaaaaaaaaaaaaaaaaaaaaaaaaaaaaaaaaaaaaaaaaaaaaaaaaaaaaaaaaaaaaaagaauu

SEQ ID NO: 15710 - RNA, 1736 nt, Artificial Sequence
  mRNA product Design a-2 (hSL-A64-N5) comprising derived and/or modified sequence from LASV(G1180-SLE-2010;Clade IV)__AIT17168__GPCmut1 (opt5)
aggagaguccgcucagccagguugcagaagcggcuuagcguguguccuaaucuucucucugcguguagguaggccugugccgcaaacaagcuuaccaugggccagaucgugaccuucuuucaagaggucccccacguuauugaagaggugaugaacaucgugcugauugcccucagcauccuggcuguccuuaaggggcuguacaauuucgccacaugcggacucgugggccugcuuacguuucugcuccugugugggagauccugcaccgcgucucgguauaaaggaguuuacgaacugcagacacucgagcugaacauggaaacccuuaauaugacaaugccucugagcuguaccaagaacaauucccaucacuauauuauggugggcaacgagacagggcucgagcugacccuuacgaauaccucuaucaucaaccauaaauucugcaaucugagcgacgcucacaagaaaaaccucuacgaucaugcccugauguccauuaucucuacauuucaccugagcauuccgaauuucaaccaguaugaagccauguccugugacuuuaauggaggcaagaucagcguccaguacaaccucucucacuccuaugcuggcgaugccgcuaaucauugcgggaccguggccaacggaguucugcaaacauucaugcgcauggcguggggcgggagcuacauugcccuugacucuggaugcggcuccugggauuguaucaugaccagcuaccaguaucugauuauccagaacacgacaugggaggaccauugccaguuuucuagacccuccccuaucggguaccucggacugcuuagccaacggacccgcgauauuuauaucuccagacggcgccggggcacauucaccuggacccugucugacagcgaaggcaaggauacacccgggggauacugucugacgcgcuggaugcucauugaggcugagcugaaaugcuuuggcaauaccgccguggcuaaguguaacgaaaaacacgacgaggaguucugcgauaugcuuagacuguuugacuucaauaagcaggccauccagcggcucaaagcgcccgcccagauguccauucaacugaucaacaaggcugucaaugcccuuaucaacgaucagcugauuaugaagaaucaccuccgcgacaucaugugcauuccuuauugcaacuacagcaaauauugguaccugaaucauacaaccacaggaaagaccucucugcccaaauguuggcucguguccaacggcagcuaccugaaugaaacgcacuucucugacgauaucgagcagcaagcugacaacaugauuacagagaugcuucagaaggaauauauggagagacaggggaaaaccccucugggacucguggaucuguuugucuucagcaccuccuuuuaccugaucucuaucuuccuucaucucguuaagauuccgacacaccggcauaucgugggcaaaagcugccccaagccucaccgccugaaucacaugggcauuuguuccugcgggcuguauaagcagcccggagugccugucaaauggaagagaugaggacuagucccuguucccagagcccacuuuuuuuucuuuuuuugaaauaaaauagccugucuuucagaucucaaaggcucuuuucagagccaccaaaaaaaaaaaaaaaaaaaaaaaaaaaaaaaaaaaaaaaaaaaaaaaaaaaaaaaaaaaaaaaaagaauu

SEQ ID NO: 15711 - RNA, 1736 nt, Artificial Sequence
  mRNA product Design a-2 (hSL-A64-N5) comprising derived and/or modified sequence from LASV(G1442-SLE-2011;Clade IV)__AIT17180__GPCmut1 (opt5)
aggagaguccgcucagccagguugcagaagcggcuuagcguguguccuaaucuucucucugcguguagguaggccugugccgcaaacaagcuuaccaugggccagaucgugaccuucuuucaagaggucccccacguuauugaagaggugaugaacaucgugcugauugcccucagcauccuggcuguccuuaaggggcuguacaauguggccacaugcggacucauuggccugguuacguuccuucugcucugugggagauccugcaccacaacccuguauaaaggaguguacgaacugcagacacucgagcugaacauggaaacccuuaauaugacaaugccucugucuuguaccaagaacaauagccaucacuauauccgggucggcaacgagacggggcucgagcugacccuuacaaauaccuccaucauuaaccauaaauuuugcaaucugucugacgcgcacaagaaaaaccucuacgaucaugcucugaugagcaucauuuccacauuccaccugucuaucccgaauuuuaaccaguaugaagccaugagcugugacuucaauggaggcaagauuuccgugcaguacaaccucagccacucuuaugccggcgaugcugccaaucauugcgggaccguugcuaacggagugcugcaaacguuuaugcgcauggccuggggcggguccuacaucgcgcuugacagcggaugcggcaacugggauuguauuaugacaucuuaccaguaucugaucauccagaauaccacaugggacgaucacugccaguucucccggcccagcccuauuggguaccucggacugcuuucucaacgcaccagagacgucuauaucucccggcgccgccggggcaccuuuacauggacgcugagcgauuccgagggcaaggacacccccgggggauacugucugacaagauggaugcucauugaagccgagcugaaaugcuucggcaacaccgcuguggccaaguguaaugagaaacaugaugaagaguuuugcgacaugcuucggcuguucgauuuuaacaagcaggcuauccagcgccucaaagcccccgcgcagaugucuauucaacugaucaauaaggccgugaacgcucuuaucaaugaccagcugauuaugaagaaccaccucagagacaucaugugcauuccuuauugcaauuacagcaaauauugguaccugaacaauacagccaccggaaagacgucccugcccaaauguuggcucaucagcaacggcucuuaccugaaugagacacacuucuccgaugacauugaacaggaggcugauaacaugaucaccgagaugcuucaaaaggaauauauggagcggcaggggaaaaccccucugggacucgucgaccuguucguuuuuagcacaucuuucuaccugaucagcauuuuucuucaucucgugaagaucccgacccaccgccauauugugggcaaauccugccccaagccucacagacugaaucauaugggcaucuguucuugcgggcuguauaagcagcccggagucccugugcgguggaaacgcugaggacuagucccuguucccagagcccacuuuuuuuucuuuuuuugaaauaaaauagccugucuuucagaucucaaaggcucuuuucagagccaccaaaaaaaaaaaaaaaaaaaaaaaaaaaaaaaaaaaaaaaaaaaaaaaaaaaaaaaaaaaaaaaaagaauu

SEQ ID NO: 15712 - RNA, 1736 nt, Artificial Sequence
  mRNA product Design a-2 (hSL-A64-N5) comprising derived and/or modified sequence from LASV(G3010-SLE-2013;Clade IV)__AIT17344__GPCmut1 (opt5)
aggagaguccgcucagccagguugcagaagcggcuuagcguguguccuaaucuucucucugcguguagguaggccugugccgcaaacaagcuuaccaugggccagaucgugaccuucuuucaagaggucccccacguuauugaagaggugaugaacaucgugcugauugcccucagcauccuggcuguccuuaaggggcuguacaauuucgccacaugcggacucgugggccugguuacguuucuucugcucugugggagauccugcaccacaucucuguauaaaggaguguacgaacugcagacccucgagcugaacauggaaacacuuaauaugaccaugccucugagcuguacaaagaacaauucccaucacuauauuauggucggcaacgagaccgggcucgagcugacgcuuaccaauacaucuaucaucaaccauaaauucugcaaucugagcgacgcgcacaagaaaaaccucuacaaucaugcucugauguccauuaucucuaccuuucaccugagcauuccgaacuucaaucaguaugaagccauguccugugauuuuaacggaggcaagaucagcgugcaguacaaucucucucacuccuaugccggcgacgcugccagccauugcgggacaguugcuaacggagugcugcaaaccuucaugcggauggccuggggcgggucuuacauugcgcuugauuccggaugcggcaagugggacuguaucaugacgagcuaucaguaccugauuauccagaacacaaccugggaggaucacugccaguuuucucgccccuccccuaucggguaucucggacugcuuagccaaagaacacgggacauuuacaucucccgcagacgccggggcaccuucaccuggacacugucugauagcgaaggcaaagacacgcccgggggauauugucugacccgguggaugcucauugaggccgagcugaagugcuuuggcaauacagcugucgccaaauguaacgaaaagcaugaugaggaguucugcgacaugcuucgccuguuugauuucaauaaacaggcuauccagagacucaagacccccgcccagauguccauucaacugaucaacaaggcggugaaugcccuuaucaacgaccagcugauuaugaaaaaucaccuccgggauaucaugugcauuccuuacugcaacuauagcaaguacugguaccugaaucacacaaccacgggaaaaacaucucugcccaaguguuggcucguguccaacggcagcuaucugaaugaaacccauuucucugacgacaucgagcagcaagcugauaacaugauuaccgagaugcuucagaaagaauacauggagcgccaggggaagacaccucugggacucgucgaccuguuuguuuucagcaccuccuuuuaucugaucucuaucuuccuucaccucgugaaaauuccgacacauagacacaucgugggcaagagcugccccaagccucaucggcugaaucacaugggcauuuguuccugcgggcuguacaaacagcccggagucccugugcgcuggaagagaugaggacuagucccuguucccagagcccacuuuuuuuucuuuuuuugaaauaaaauagccugucuuucagaucucaaaggcucuuuucagagccaccaaaaaaaaaaaaaaaaaaaaaaaaaaaaaaaaaaaaaaaaaaaaaaaaaaaaaaaaaaaaaaaaagaauu

SEQ ID NO: 15713 - RNA, 1736 nt, Artificial Sequence
  mRNA product Design a-2 (hSL-A64-N5) comprising derived and/or modified sequence from LASV(G502-SLE-2009;Clade IV)__AIT17126__GPCmut1 (opt5)
aggagaguccgcucagccagguugcagaagcggcuuagcguguguccuaaucuucucucugcguguagguaggccugugccgcaaacaagcuuaccaugggccagaucgugaccuucuuucaagaggucccccacguuauugaagaggugaugaacaucgugcugauugcccucagcauccuggcuguccuuaaggggcuguacaauuucgccacaugcggacucgugggccugcuuacguuucugcuccugugugggagauccugcaccacaggacuguauaaaggcguuuacgaacuccagacccuggagcuuaacauggaaacacugaauaugaccaugccucucucuuguacaaagaacaauagccaucacuauauuaugguggggaacgagaccggacuggagcuuacgcugaccaauacauccaucaucaaccauaaauucugcaaucucucugacgcgcacaagaaaaaccuguacgaucaugcucugaugagcauuaucuccaccuuucaccucucuauuccgaauuucaaccaguaugaagccaugagcugugacuuuaauggcggcaagaucuccguccaguacaaccugagccacucuuaugccggggaugcugccgaccauugcggaacaguggcuaauggcguucuucaaaccuucaugcggauggccuggggaggguccuacauugcgcuggauagcggcugcgggagaugggacuguaucaugacgucuuaccaguaucucauuauccagaacacaaccugggaggaucacugccaguuuucccggcccagcccuaucggauaccugggccuucugucucaacgcacaagagacauuuauaucucccggcgccgccggggcaccuucaccuggacacugagcgauuccgaagggaaggacacgcccggaggcuacugucucaccagauggaugcugauugaggccgagcuuaaaugcuuugggaacacagcuguggccaaguguaaugaaaaacaugaugaggaguucugcgacaugcugcggcucuuugauuucaacaagcaggcuauccagcgccugaaagcccccgcgcagaugucuauucaacuuaucaauaaggccgucaacgcucugaucaaugaccagcucgugaugaagaaccaccugagagacauuaugugcaucccuuauugcaauuacagccgguauugguaccugaaccacaccacaaccggccgcacgucccuccccaaauguuggcuggugagcaaugggucuuaccuuaacgaaacacauuucuccgaugacauugagcagcaagccgauaauaugaucaccgagaugcugcagaaggaauauauggagagacagggaaaaaccccucucggccuggucgaccuguuuguuuucagcacaucuuuuuaccuuauuagcaucuuccuccaccuggugaagaucccgacccaucggcacauugugggcaaauccugccccaagccucaucgccugaaccacauggggaucuguucuugcggacucuauaaacagcccggcgucccugugaaguggaagagaugaggacuagucccuguucccagagcccacuuuuuuuucuuuuuuugaaauaaaauagccugucuuucagaucucaaaggcucuuuucagagccaccaaaaaaaaaaaaaaaaaaaaaaaaaaaaaaaaaaaaaaaaaaaaaaaaaaaaaaaaaaaaaaaaagaauu

SEQ ID NO: 15714 - RNA, 1736 nt, Artificial Sequence
  mRNA product Design a-2 (hSL-A64-N5) comprising derived and/or modified sequence from LASV(G733-SLE-2010;Clade IV)__AIT17154__GPCmut1 (opt5)
aggagaguccgcucagccagguugcagaagcggcuuagcguguguccuaaucuucucucugcguguagguaggccugugccgcaaacaagcuuaccaugggccagaucgugaccuucuuucaagaggucccccacguuauugaagaggugaugaacaucgugcugauugcccucagcauccuggcuguccuuaaggggcuguacaauuucgccacaugcggaauugugggccucguuuccuuucugcuucugugugggagaucuugcacgaccagccucuauaaaggaguguacgaacugcagacacuggagcucaacauggaaacccugaauaugacaaugccucuuuccuguaccaagaacaauucucaucacuauaucauggucggcaacgagacagggcuggagcucacccugacgaauaccagcaucauuaaccauaaauucugcaaucuuuccgacgcgcacaagaaaaaccuguacgaucaugcucucaugucuaucauuagcacauuucaccuguccaucccgaauuucaaccaguaugaagccaugagcugugacuuuaauggaggcaagauuucugugcaguacaaccugucccacagcuaugccggcgaugcugccaaucauugcgggaccaucgcuaacggaguucuccaaacauucaugcggauggccuggggcgggucuuacauugcgcuggacuccggaugcgauagaugggacuguaucaugaccagcuaccaguaucuuaucauucagaacacgacaugggaggaucacugccaguuuucucggcccuccccuaucggcuaccuggggcuccugagccaacgcaccagagacauuuauaucucccggcgccgccggggaacauucaccuggacccucucugauagcgaaggcaaggacacacccggcggguacugucugacgagauggaugcugauugaggccgagcucaaaugcuuuggaaauaccgcuguggccaaguguaacgaaaaacaugaugaggaguucugcgacaugcugcggcuuuuugauuucaauaagcaggcuauccagcgccugaaagcccccgcgcagauguccauccaacucauuaacaaggccgucaaugcucugaucaacgaccagcuuauuaugaagaaucaccugagagacaucaugugcauuccuuauugcaacuacagcaaauauugguaccucaaucacacaaccacagggaagaccucucugcccaaauguuggcugguguccaacggaagcuaccucaaugaaacgcauuucucugaugacaucgagcagcaagccgauaacaugaucacagagaugcugcagaaggaauauauggagcggcagggcaaaaccccucuugggcugguggaccucuuugucuucagcaccuccuuuuaccugauuucuaucuuccugcaccuuguuaagauuccgacacaucgccacguggugggaaaaagcugccccaagccucauagacucaaucacaugggcaucuguuccugcggccuguaugggcagcccggagucccugugaaguggaaacggugaggacuagucccuguucccagagcccacuuuuuuuucuuuuuuugaaauaaaauagccugucuuucagaucucaaaggcucuuuucagagccaccaaaaaaaaaaaaaaaaaaaaaaaaaaaaaaaaaaaaaaaaaaaaaaaaaaaaaaaaaaaaaaaaagaauu

SEQ ID NO: 15715 - RNA, 1736 nt, Artificial Sequence
  mRNA product Design a-2 (hSL-A64-N5) comprising derived and/or modified sequence from MOPV/LASV reassortant(IGS-1;Clade IV)__AFY05576__GPCmut1 (opt5)
aggagaguccgcucagccagguugcagaagcggcuuagcguguguccuaaucuucucucugcguguagguaggccugugccgcaaacaagcuuaccaugggccagaucgugaccuucuuucaagaggucccccacguuauugaagaggugaugaacaucgugcugauugcccucagcguccuggcugugcuuaaggggcuguacaauuucgccacaugcggacucguuggccuggugacguuucuucugcucugugggagauccugcaccacaucucuguauaaaggagucuacgaacugcagacccucgagcugaacauggaaacacuuaauaugaccaugccucugagcuguacaaagaacaauucccaucacuauaucauggugggcaacgagaccgggcucgagcugacgcuuaccaauacaucuauuaucaaccauaaauucugcaaucugagcgacgcgcacaagaaaaaccucuacgaucaugcucugauguccaucauuucuaccuuucaccugagcaucccgaauuucaaccaguaugaagccauguccugugacuuuaauggaggcaagauuagcguucaguacaaccucucucacuccuaugccggcgaugcugccaaucauugcgggacaguggcuaacggaguccugcaaaccuucaugcggauggccuggggcgggagcuacaucgcgcuugacucuggaugcggcaacugggauuguauuaugacguccuaccaguaucugaucauucagaauacaaccugggaggaccacugccaguuuagcagacccucuccuaucggguaccucggacugcuuucccaacggacacgcgauaucuauauuagcagacggcgccggggcaccuucaccuggacacuguccgacucugaaggcgaggauacgcccgggggauacugucugacccgcuggaugcucaucgaggccgaacugaagugcuuuggcaacacagcuguggccaaauguaaugagaagcaugacgaagaguucugcgauaugcuuagacuguuugacuucaacaaacaggcuauucagcggcucaaggcccccgcgcagaugagcauccaacugauuaauaaagccgugaacgcucuuaucaaugaucagcugaucaugaagaaccaccuccgcgacauuaugugcaucccuuauugcaauuacuccaaguauugguaccugaaccacaccacaaccggaagaacgagccugcccaaauguuggcucgucucuaauggcuccuaccugaacgagacacauuucagcgacgauauugagcagcaagccgacaauaugaucaccgaaaugcuucagaaggaguauauggaacggcaggggaaaaccccucugggacucguugaucuguuuguguucucuaccagcuuuuaccugauuuccaucuuccuucaccucgugaagaucccgacacaucgccacauugucggcaaaucuugccccaagccucauagacugaaccacaugggcaucuguagcugcgggcuguauaaacagcccggagugccuguuaaguggaagcggugaggacuagucccuguucccagagcccacuuuuuuuucuuuuuuugaaauaaaauagccugucuuucagaucucaaaggcucuuuucagagccaccaaaaaaaaaaaaaaaaaaaaaaaaaaaaaaaaaaaaaaaaaaaaaaaaaaaaaaaaaaaaaaaaagaauu

SEQ ID NO: 15716 - RNA, 1736 nt, Artificial Sequence
  mRNA product Design a-2 (hSL-A64-N5) comprising derived and/or modified sequence from LASV(LM765-SLE-2012;Clade IV)__AIT17814__GPCmut1 (opt5)
aggagaguccgcucagccagguugcagaagcggcuuagcguguguccuaaucuucucucugcguguagguaggccugugccgcaaacaagcuuaccaugggccagaucgugaccuucuuucaagaggucccccacguuauugaagaggugaugaacaucgugcugauugcccucagcauccuggcuguccuuaaggggcuguacaauuucgccacaugcggacucgugggccugguuacguuucuucugcucugugggagauccugcaccacaucucuguauaaaggaguguacgaacugcagacccucgagcugaacauggaaacacuuaauaugaccaugccucugagcuguacaaagaacaauucccaucacuauauuauggucggcaacgagaccgggcucgagcugacgcuuaccaauacaucuaucaucgaccauaaauucugcaaccugagcgaugcgcaccggaagaaucucuacgaccaugcucugauguccauuaucucuaccuuucaccugagcauuccgaacuucaaucaguaugaagccauguccugugauuuuaacggaggcaaaaucagcgugcaguacaaucucucucacuccuaugccaaggacgcugccgaucauugcggcacaguugcuaacggggugcugcaaaccuucaugcgcauggccuggggaggcagcuacauugcgcuugacucugggugcggacggugggauuguaucaugacguccuaccaguaucugauuauccagaauacaaccugggaggaccacugccaguuuagccgccccucuccuaucggcuaccucgggcugcuuucccaaagaacacgggauauuuauaucagccgcagacgccggggaaccuucaccuggacacuguccgacucugaaggcaaggauacgcccggcggguacugucugacccgguggaugcucauugaggccgagcugaaaugcuuuggaaacacagcugucgccaaguguaacgaaaaacaugacgaggaguucugcgauaugcuucgccuguuugacuucaauaagcaggcuauccagagacucaaagcccccgcgcagaugagcauucaacugaucaacaaggccgugaaugcucuuaucaacgaccagcugauuaugaagaaucaccuccgggauaucaugugcauuccuuauugcaacuacuccaaauauugguaccugaaucacaccacaaccgggaagacgagccugcccaaauguuggcucgugucuaacggauccuaccugaaugaaacacauuucagcgacgauaucgagcagcaagccgacaacaugauuaccgagaugcuucagaaggaauauauggagcgccagggcaaaaccccucuggggcucgucgaucuguuuguuuucucuaccagcuuuuaccugaucuccaucuuccuucaccucgugaagauuccgacacauagacacaucgugggaaaacccugcccuaagccccaucggcugaaucacaugggcauuuguucuugcggccuguauaagcagccugggguccccgugaaauggaagcgcugaggacuagucccuguucccagagcccacuuuuuuuucuuuuuuugaaauaaaauagccugucuuucagaucucaaaggcucuuuucagagccaccaaaaaaaaaaaaaaaaaaaaaaaaaaaaaaaaaaaaaaaaaaaaaaaaaaaaaaaaaaaaaaaaagaauu

SEQ ID NO: 15717 - RNA, 1736 nt, Artificial Sequence
  mRNA product Design a-2 (hSL-A64-N5) comprising derived and/or modified sequence from LASV(LM776-SLE-2012;Clade IV)__AIT17824__GPCmut1 (opt5)
aggagaguccgcucagccagguugcagaagcggcuuagcguguguccuaaucuucucucugcguguagguaggccugugccgcaaacaagcuuaccaugggccagaucgugaccuucuuucaagaggucccccacguuauugaagaggugaugaacaucgugcugauugcccucagcauccuggcuguccuuaaggggcuguacaauuucgccacaugcggacucgugggccugguuacguuucuucugcucugugggagauccugcaccacaucuguguauaaaggagucuacgaacugcagacccuggagcucaacauggaaacacugaauaugaccaugccucuuagcuguacaaagaacaauucccaucacuauauuauggugggcaacgagaccgggcuggagcucacgcugaccaauacaucuaucaucaaccauaaauucugcaaucuuagcgacgcgcacaagaaaaaccuguacgaucaugcucucauguccauuaucucuaccuuucaccugagcauuccgaauuucaaccaguaugaagccauguccugugacuuuaauggaggcaagaucagcguucaguacaaccugucucacuccuaugccggcgaugcugccaaucauugcgggacaguggcuaacggaguccuccaaaccuucaugcggauggccuggggcgggagcuacauugcgcuggacucuggaugcggcaagugggauuguaucaugacguccuaccaguaucuuauuauccagaacacaaccugggaggaccauugccaguuuagccgccccucuccuaucggguaccugggacuccugucccaaagaacacgggauauuuauaucagccgcagacgccggggcaccuucaccuggacacucuccgacucugaaggcaaagauacgcccgggggauacugucugacccgguggaugcugauugaggccgagcucaagugcuuuggcaauacagcuguggccaaauguaacgaaaagcacgacgaggaguucugcgauaugcugcgccuuuuugacuucaauaaacaggcuauccagagacugaaggcccccgcgcagaugagcauucaacucaucaacaaggccgugaaugcucugaucaacgaucagcuuauuaugaaaaaucaucugcgggacaucaugugcauuccuuauugcaacuacuccaaguauugguaccucaaucacaccacaaccggaaaaacgagccugcccaaguguuggcuggucucuaacggcuccuaccucaaugaaacacacuucagcgacgauaucgagcagcaagccgacaacaugauuaccgagaugcugcagaaagaauauauggagcgccaggggaagaccccucuuggacugguugaucucuuuguguucucuaccagcuuuuaccugaucuccaucuuccugcaucuugugaaaauuccgacacacagacauaucgucggcaagucuugccccaagccucaccggcucaaucacaugggcauuuguagcugcgggcuguauaaacagcccggagugccuguucgcuggaagagaugaggacuagucccuguucccagagcccacuuuuuuuucuuuuuuugaaauaaaauagccugucuuucagaucucaaaggcucuuuucagagccaccaaaaaaaaaaaaaaaaaaaaaaaaaaaaaaaaaaaaaaaaaaaaaaaaaaaaaaaaaaaaaaaaagaauu

SEQ ID NO: 15718 - RNA, 1736 nt, Artificial Sequence
  mRNA product Design a-2 (hSL-A64-N5) comprising derived and/or modified sequence from LASV(Mad39;Clade IV)__ANH09722__GPCmut1 (opt5)
aggagaguccgcucagccagguugcagaagcggcuuagcguguguccuaaucuucucucugcguguagguaggccugugccgcaaacaagcuuaccaugggccagaucgugaccuucuuucaagaggucccccacguuauugaagaggugaugaacaucgugcugauugcccucagcauccuggcuguccuuaaggggcuguacaauguggccacaugcggacucauuggccugguuacguuccuucugcucugugggagauccugcaccacaacccuguauaaaggaguguacgaacugcaggcgcucgagcugaacauggaaacacuuaauaugaccaugccucugucuuguacaaagaacaauagccaucacuauauccgggucggcaacgagaccgggcucgagcugacgcuuaccaauacaucccugaucaaccauaaauuuugcaaucucucugacgcucacaagaaaaaccuguacgaucaugcccugaugagcauuaucuccaccuuccaccucucuauuccgaauuuuaaccaguaugaagccaugagcugugacuucaaugauggaaagaucuccgugcaguacaaccugagccacacauaugcuggcgacaccgccaaucauugcggcacgguugcuaacggggugcuucaaacauuuaugcgcauggccuggggaggcucuuacauugcgcuggauuccgggugcggaggcugggacuguaucaugaccagcuaccaguaucucauuauccagaacacaaccugggaggaucacugccaguucucucggcccuccccuaucggguaccugggacuucugagccaacgcaccagagacauuuauaucucucggcgccgccggggcacauuuacguggacccuguccgauagcgaaggcaaggacacacccgggggauacugucucaccagauggaugcugauugaggccgagcuuaaaugcuucggcaauacagcugucgccaaguguaacgaaaaacaugaugaggaauuuugcgacaugcugcgccucuucgauuuuaauaagcaggcuauccagcggcugaaagcccccgcgcagauguccauucaacuuaucaacaaggccgugaaugcucugaucaacgaccagcucauuaugaagaaucaccugagagacaucaugugcauuccuuauugcaacuacucuaaauauugguaccugaaucacaccgugacgggaaagacaagccuccccaaauguuggcuggucuccaacggcagcuaccuuaaugaaacccauuucucugaugacaucgagcagcaagccgauaacaugauuaccgagaugcugcagaaggaauauauggagcggcaggggaaaacaccucucggacugguugaccuguucguguuuuccaccagcuucuaccuuaucucuaucuuucuccaccuggugaagauuccgacacaucgccacgucgugggcaaacccugcccuaagccccauagacugaaucacaugggcaucuguagcugcggguucuauaagcagccuggaguucccgugcgguggaaacgcugaggacuagucccuguucccagagcccacuuuuuuuucuuuuuuugaaauaaaauagccugucuuucagaucucaaaggcucuuuucagagccaccaaaaaaaaaaaaaaaaaaaaaaaaaaaaaaaaaaaaaaaaaaaaaaaaaaaaaaaaaaaaaaaaagaauu

SEQ ID NO: 15719 - RNA, 1736 nt, Artificial Sequence
  mRNA product Design a-2 (hSL-A64-N5) comprising derived and/or modified sequence from LASV(Z0947-SLE-2011;Clade IV)__AIT17840__GPCmut1 (opt5)
aggagaguccgcucagccagguugcagaagcggcuuagcguguguccuaaucuucucucugcguguagguaggccugugccgcaaacaagcuuaccaugggccagaucgugaccuucuuucaagaggucccccacguuauugaagaggugaugaacaucgugcugauugcccucagcauccuggcuguccuuaaggggcuguacaauuucgccacaugcggacucgugggccugguuacguuucuucugcucugugggagauccugcaccauuucucuguauaaaggaguguacgaacugcagacacucgagcugaacauggaaacccuuaauaugacaaugccucugagcuguaccaagaacaauucccaucacuauaucauggucggcaacgagacagggcucgagcugacccuuacgaauaccucuaucauuaaccauaaauucugcaaucugagcgacgcgcacaagaaaaaccucuacgaucaugcucugauguccaucauuucuacauuucaccugagcaucccgaauuucaaccaguaugaagccauguccugugacuuuaauggaggcaagauuagcgugcaguacaaccucucucacuccuaugccggcgaugcugccaaucauugcgggaccguugcuaacggagugcugcaaacauucaugcggauggccuggggcgggagcuacaucgcgcuugacucuggaugcgauagaugggacuguauuaugaccuccuaccaguaucugaucauccagaacacgacaugggaggaucacugccaguuuagccggcccucuccuauuggcuaccucgggcugcuuucccaacgcaccagagacaucuauauuagccggcgccgccggggaacauucaccuggacccuguccgauucugaaggcaaggacacacccggcggguacugucugacgagauggaugcucaucgaggccgagcugaaaugcuuuggaaauaccgcugucgccaaguguaacgaaaaacaugaugaggaguucugcgacaugcuucggcuguuugauuucaauaagcaggcuauucagcgccucaaagcccccgcgcagaugagcauccaacugaucaacaaggccgugaaugcucuuauuaacgaccagcugaucaugaagaaucaccucagagacauuaugugcaucccuuauugcaacuacuccaaauauugguaccugaaucacacaaccacagggaagaccagccugcccaaauguuggcucgugucuaacggauccuaccugaaugaaacgcauuucagcgaugacauugagcagcaagccgauaacaugaucacagagaugcuucagaaggaauauauggagcggcagggcaaaaccccucuggggcucgucgaccuguuuguuuucucuaccagcuuuuaccugaucuccauuuuccuucaccucgugaagaucccgacacaucgccacauugugggaaaacccugcccuaagccccauagacugaaucacaugggcaucuguucuugcggccuguauaagcagccugggguccccgugaaauggaagcggugaggacuagucccuguucccagagcccacuuuuuuuucuuuuuuugaaauaaaauagccugucuuucagaucucaaaggcucuuuucagagccaccaaaaaaaaaaaaaaaaaaaaaaaaaaaaaaaaaaaaaaaaaaaaaaaaaaaaaaaaaaaaaaaaagaauu

SEQ ID NO: 15720 - RNA, 1767 nt, Artificial Sequence
  mRNA product Design a-2 (hSL-A100) comprising derived and/or modified sequence from LASV(Josiah;Clade IV)__NP_694870__GPCmut1 (opt1)
aggagaguccgcucagccagguugcagaagcggcuuagcguguguccuaaucuucucucugcguguagguaggccugugccgcaaacaagcuuaccaugggccagaucgugaccuucuuccaggaggucccccacgugaucgaggaggugaugaacaucguccugaucgcccucagcgugcuggccgugcugaaggggcucuacaacuucgcgaccugcggccuggucgggcuggugacguuccuccugcugugcggccgcuccugcaccaccagccucuacaaggggguguacgagcugcagacccuggagcucaacauggagacgcugaacaugaccaugccgcuguccugcaccaagaacaacagccaccacuacaucauggucggcaacgagaccggccucgagcugacgcugaccaacaccuccaucaucaaccacaaguucugcaaccucagcgacgcccacaagaagaaccuguacgaccacgcccugauguccaucaucagcaccuuccaccucuccauccccaacuucaaccaguacgaggccaugagcugcgacuucaacgggggcaagaucuccgugcaguacaaccugagccacuccuacgccggggacgcggccaaccacugcggcacgguggccaacgggguccugcagaccuucaugcggauggccuggggcggcagcuacaucgcgcucgacuccgggugcggcaacugggacugcaucaugaccagcuaccaguaccugaucauccagaacaccacgugggaggaccacugccaguucucccggcccagccccaucggguaccugggccuccugucccagcgcacccgggacaucuacaucagccgccggcgccggggcaccuucaccuggacgcugagcgacuccgaggggaaggacaccccgggcggguacugccugacccgcuggaugcucaucgaggccgagcugaagugcuucggcaacaccgccguggccaagugcaacgagaagcacgacgaggaguucugcgacaugcugcggcuguucgacuucaacaagcaggccauccagcgccugaaggcgcccgcccagaugagcauccagcugaucaacaaggccgugaacgcccucaucaacgaccagcugaucaugaagaaccaccuccgggacaucaugugcauccccuacugcaacuacuccaaguacugguaccucaaccacacgaccaccggccgcaccagccugcccaagugcuggcuggucuccaacggcagcuaccucaacgagacgcacuucuccgacgacaucgagcagcaggccgacaacaugaucaccgagaugcugcagaaggaguacauggagcggcaggggaagacgccccugggccucguggaccuguucguguucagcaccuccuucuaccugaucagcaucuuccugcaccucgucaagaucccgacccaccgccacaucguggggaaguccugccccaagccccaccggcugaaccacaugggcaucugcagcugcgggcuguacaagcagcccggcgugccggucaaguggaagcgcugaggacuagucccuguucccagagcccacuuuuuuuucuuuuuuugaaauaaaauagccugucuuucagaucucaaaggcucuuuucagagccaccaaaaaaaaaaaaaaaaaaaaaaaaaaaaaaaaaaaaaaaaaaaaaaaaaaaaaaaaaaaaaaaaaaaaaaaaaaaaaaaaaaaaaaaaaaaaaaaaaaaaa

SEQ ID NO: 15721 - RNA, 1764 nt, Artificial Sequence
  mRNA product Design a-2 (hSL-A100) comprising derived and/or modified sequence from LASV(LP;Clade I)__AAF86701__GPCmut1 (opt1)
aggagaguccgcucagccagguugcagaagcggcuuagcguguguccuaaucuucucucugcguguagguaggccugugccgcaaacaagcuuaccaugggccagaucaucaccuucuuccaggaggugccccacgucaucgaggaggugaugaacaucgugcugaucgcccucagccugcuggccauccucaaggggcuguacaacaucgcgaccugcggcaucaucgggcuggucgccuuccucuuccugugcggcaaguccugcagccugacgcucaagggcggguacgagcugcagacccuggagcucaacauggagacccugaacaugaccaugccgcuguccugcacgaagaacagcucccaccacuacauccgcgugggcaacgagaccgggcucgagcugacccugaccaacacgagcaucaucaaccacaaguucugcaaccucuccgacgcccacaagaagaaccuguacgaccacgcccugaugagcaucaucuccaccuuccaccucagcauccccaacuucaaccaguacgaggccauguccugcgacuucaacggcgggaagaucagcgugcaguacaaccugucccacagcuacgcgggcgacgccgccgagcacugcgggaccgucgccaacggcgugcugcagaccuucaugcggauggcguggggcgggcgcuacaucgcccucgacuccggcugcgggaacugggacugcaucaugacgagcuaccaguaccugaucauccagaacaccaccugggaggaccacugccaguucucccggcccagccccaucggcuaccugggccuccugucccagcgcacccgggacaucuacaucagccgccggcgccgggggacguucaccuggacccugagcgacuccgagggcaacgagacccccgggggcuacugccugacgcgcuggaugcucaucgaggccgagcugaagugcuucgggaacaccgccguggccaagugcaacgagaagcacgacgaggaguucugcgacaugcugcggcuguucgacuucaacaagcaggcgauccgccggcugaaggcccccgcccagaugagcauccagcugaucaacaaggccgucaacgcccucaucaacgaccagcugaucaugaagaaccaccuccgcgacaucaugugcauccccuacugcaacuacuccaaguacugguaccucaaccacaccagcuccggccggaccagccugcccaagugcuggcugaucuccaacgggagcuaccucaacgagacgcaguucuccgacgacaucgagcagcaggcggacaacaugaucaccgagaugcugcagaaggaguacaucgagcgccagggcaagaccccgcuggggcucguggacaucuucaucuucagcaccuccuucuaccugaucagcaucuuccugcaccugaucaagaucccgacgcaccggcacaucgugggcaagcccugccccaagccccaccgccucaaccacaugggggucugcuccugcggccuguacaagcacccgggcgugcccaccaaguggaagcggugaggacuagucccuguucccagagcccacuuuuuuuucuuuuuuugaaauaaaauagccugucuuucagaucucaaaggcucuuuucagagccaccaaaaaaaaaaaaaaaaaaaaaaaaaaaaaaaaaaaaaaaaaaaaaaaaaaaaaaaaaaaaaaaaaaaaaaaaaaaaaaaaaaaaaaaaaaaaaaaaaaaaa

SEQ ID NO: 15722 - RNA, 1764 nt, Artificial Sequence
  mRNA product Design a-2 (hSL-A100) comprising derived and/or modified sequence from LASV(803213;Clade II)__AAF86703__GPCmut1 (opt1)
aggagaguccgcucagccagguugcagaagcggcuuagcguguguccuaaucuucucucugcguguagguaggccugugccgcaaacaagcuuaccaugggccagaucaucaccuucuuccaggaggugccccacgucaucgaggaggugaugaacaucgugcugaucgcccucagccugcuggccauccucaaggggaucuacaacgucgcgaccugcggccuguucgggcugaucuccuuccuccugcugugcggccgcagcugcuccgugacguacaaggggguguacgagcuccagacccuggagcugaacauggccaaccucaacaugaccaugccgcugagcugcaccaagaacaacucccaccacuacaucauggucggcaacgagacgggccuggagcucacccugaccaacaccagcaucaucaaccacaaguucugcaaccuguccgacgcccacaagaagaaccucuacgaccacgcccugaugagcaucaucuccacguuccaccugagcauccccaacuucaaccaguacgaggccauguccugcgacuucaacgggggcaagaucagcgugcaguacaaccucucccacagcuucgcgguggacgccgccaaccacugcgggaccaucgccaacggcguccugcagaccuucaugcggauggcguggggcggguccuacaucgcccuggacagcggcugcgggaacugggacugcaucaugaccuccuaccaguaccucaucauccagaacacgaccugggaggaccacugccaguucagccgccccucccccaucggcuaccuggggcugcucagccagcggacccgcgacaucuacaucagccggcgccgccggggcaccuucacguggacccucuccgacagcgagggcaacgaggcccccgggggcuacugccugacccgguggaugcugaucgaggccgagcucaagugcuucgggaacaccgccguggcgaagugcaacgagaagcacgacgaggaguucugcgacaugcugcgccuguucgacuucaacaagcaggccaucaagcggcucaagacgcccgcccagauguccauccagcugaucaacaaggccgugaacgcccugaucaacgaccagcucaucaugaagaaccaccuccgcgacaucaugugcauccccuacugcaacuacagccgguacugguaccugaaccacaccgucaccgggaagaccucccugccccgcugcuggcuggugagcaacggcuccuaccugaacgagacgcacuucagcgacgacaucgagcagcaggcggacaacaugaucaccgagaugcuccagaaggaguacauggaccggcagggcaagaccccgcuggggcugguggaccucuucgucuucuccaccagcuucuaccugaucuccaucuuccugcaccuggugaagaucccgacgcaccgccacaucgugggcaagcccugccccaagccccaccggcucaaccacauggggaucugcagcugcggccuguacaagcacccggggguccccgugaaguggaagcgcugaggacuagucccuguucccagagcccacuuuuuuuucuuuuuuugaaauaaaauagccugucuuucagaucucaaaggcucuuuucagagccaccaaaaaaaaaaaaaaaaaaaaaaaaaaaaaaaaaaaaaaaaaaaaaaaaaaaaaaaaaaaaaaaaaaaaaaaaaaaaaaaaaaaaaaaaaaaaaaaaaaaaa

SEQ ID NO: 15723 - RNA, 1764 nt, Artificial Sequence
  mRNA product Design a-2 (hSL-A100) comprising derived and/or modified sequence from LASV(GA391;Clade III)__CAA36645__GPCmut1 (opt1)
aggagaguccgcucagccagguugcagaagcggcuuagcguguguccuaaucuucucucugcguguagguaggccugugccgcaaacaagcuuaccaugggccagaucgugaccuucuuccaggaggucccccacgugaucgaggaggugaugaacaucguccugaucgcccucagcauccuggccauccugaaggggcucuacaacguggcgaccugcggccugaucgggcuggugacguuccuccugcuguccggccgcagcugcucccucaucuacaaggggaccuacgagcugcagacccuggagcucaacauggagacccugaacaugacgaugccgcugagcugcaccaagaacaacucccaccacuacauccgggucggcaacgagaccggccucgagcugacccugacgaacaccagcauccucaaccacaaguucugcaaccuguccgacgcccacaagcgcaaccuguacgaccacagccucauguccaucaucagcaccuuccaccuguccauccccaacuucaaccaguacgaggccaugagcugcgacuucaacgggggcaagaucaccgugcaguacaaccugucccacagcuucgccguggacgccgcggggcacugcggcacgcucgccaacgggguccugcagaccuucaugcggauggccuggggcggcuccuacaucgcccuggacagcgggugcggcaacugggacugcaucaugaccuccuaccaguaccucaucauccagaacaccacgugggacgaccacugccaguucagccggcccucccccaucggguaccugggccugcucagccagcgcacccgggacaucuacaucagccgccggcgccggggcaccuucaccuggacgcucuccgacagcgaggggaacgagaccccgggcggguacugccugacccgcuggaugcugaucgaggcggagcucaagugcuucggcaacaccgccguggccaagugcaacgagaagcacgacgaggaguucugcgacaugcugcggcuguucgacuucaacaagcaggccauccgccggcucaagacgcccgcccagauguccauccagcugaucaacaaggcggugaacgcccugaucaacgaccagcucaucaugaagaaccaccuccgcgacaucaugugcauccccuacugcaacuacagccgguacugguaccugaaccacaccuccaccggcaagaccagccugccccgcugcuggcugaucuccaacggcagcuaccugaacgagacgaaguucuccgacgacaucgagcagcaggccgacaacaugaucaccgagaugcuccagaaggaguacaucgaccggcaggggaagacgccccugggccuggucgaccuguucguguucagcaccuccuucuaccucaucagcaucuuccugcaccuggugaagaucccgacccaccgccacaucgucgggaagcccugccccaagccccaccggcucaaccacaugggcaucugcuccugcgggcuguacaagcagccgggcgugcccgugcgcuggaagcggugaggacuagucccuguucccagagcccacuuuuuuuucuuuuuuugaaauaaaauagccugucuuucagaucucaaaggcucuuuucagagccaccaaaaaaaaaaaaaaaaaaaaaaaaaaaaaaaaaaaaaaaaaaaaaaaaaaaaaaaaaaaaaaaaaaaaaaaaaaaaaaaaaaaaaaaaaaaaaaaaaaaaa

SEQ ID NO: 15724 - RNA, 1767 nt, Artificial Sequence
  mRNA product Design a-2 (hSL-A100) comprising derived and/or modified sequence from LASV(AV;Clade V)__CCA30314__GPCmut1 (opt1)
aggagaguccgcucagccagguugcagaagcggcuuagcguguguccuaaucuucucucugcguguagguaggccugugccgcaaacaagcuuaccaugggccagaucgugaccuucuuccaggaggucccccacgugaucgaggaggugaugaacaucguccugaucgcccucagcauccuggccgugcugaaggggcucuacaacaucgcgaccugcggccugaucgggcugaucacguuccuccugcugugcggccgcuccugcagcuccaaccucuacaaggggguguacgagcugcagagccuggaccucaacauggagacccugaacaugaccaugccgcuguccugcaccaagaacaacagccaccacuacauccgggucggcaacgacacgggccucgagcugacccugaccaacaccuccauccucaaccacaaguucugcaaccugagcgacgcccacaagaaggaccuguacgaccacgcccucauguccaucaucagcacguuccaccuguccauccccaacuucaaccaguacgaggccaugagcugcgacuucaacgggggcaagaucuccgugcaguacaaccugagccacuccuacgccaucgacgcggccaaccacugcgggaccguggccaacggcauccuccagaccuucaugcgcauggccuggggcgggagcuacaucgcgcuggacuccggcugcgggaacugggacugcaucaugaccagcuaccaguaccugaucauccagaacacgaccugggagaaccacugccaguucucccgccccagccccaucggcuaccucgggcugcugagccagcggacccgcgacaucuacaucucccggcgccgccggggcaccuucacguggacccugagcgacuccgagggcaacgccacccccgggggcuacugccucacccgguggaugcugaucgaggccgagcugaagugcuucgggaacacggccgucgccaagugcaacgagaagcacgacgaggaguucugcgacaugcuccgccuguucgacuucaacaagcaggcgaucagccggcugaagucccccgcccagaugagcauccagcucaucaacaaggccgugaacgcccugaucaacgaccagcugaucaugaagaaccaccuccgcgacaucaugugcauccccuacugcaacuacuccaaguacugguaccugaaccacaccaucaccgggaagaccagccugcccaagugcuggcucguguccaacggcagcuaccugaacgagacgcacuucuccgacgacaucgagcagcaggccgacaacaugaucaccgagaugcugcagaaggaguacauggagcggcagggcaagaccccgcucgggcuggucgaccuguucguguucagcaccuccuucuaccugaucagcaucuuccuccgccuggugaagaucccgacgcaccggcacaucgucggcaagcccugccccaagccccaccgccugaaccacauggggaucugcuccugcggccucuacaagcagccgggggugcccgugcgguggaagcgcugaggacuagucccuguucccagagcccacuuuuuuuucuuuuuuugaaauaaaauagccugucuuucagaucucaaaggcucuuuucagagccaccaaaaaaaaaaaaaaaaaaaaaaaaaaaaaaaaaaaaaaaaaaaaaaaaaaaaaaaaaaaaaaaaaaaaaaaaaaaaaaaaaaaaaaaaaaaaaaaaaaaaa

SEQ ID NO: 15725 - RNA, 1764 nt, Artificial Sequence
  mRNA product Design a-2 (hSL-A100) comprising derived and/or modified sequence from LASV(Togo/2016/7082;Clade VI)__AMR44577__GPCmut1 (opt1)
aggagaguccgcucagccagguugcagaagcggcuuagcguguguccuaaucuucucucugcguguagguaggccugugccgcaaacaagcuuaccaugggccagaucaucaccuucuuccaggaggugccccacgucaucgaggaggugaugaacaucgugcugaucgcccucagccugcuggccauccucaagggggucuacaacguggcgaccugcggcaucaucgggcuggugacguuccuguuccucugcggccgcuccugcagccugaucuacaagggguccuacgagcugcagacccucgagcugaacauggagacccugaacaugaccaugccgcucagcugcacgaagaacuccagccaccacuacauccgggucggcaacgagaccggccuggagcugacccucaccaacacguccaucaucaaccacaaguucugcaaccugagcgacgcccacaagcgcaaccuguacgaccacgcccucauguccauccugagcaccuuccaccuguccauccccaacuucaaccaguacgaggccaugagcugcgacuucaacgggggcaagaucuccgugcaguacaaccucagccacgccuacgcgguggacgccgccgagcacugcgggaccgucgccaacggcgugcugcagaccuucaugcggauggcguggggcggguccuacaucgcccuggacagcggcugcgggaacugggacugcaucaugacguccuaccaguaccucaucauccagaacaccaccugggaggaccacugccaguucagccggcccucccccaucggcuaccuggggcugcucagccagcgcacccgggacaucuacaucagccgccggcgccggggcacguucaccuggacccucuccgacagcgagggcaacgagacccccgggggcuacugccugacgcgcuggaugcugaucgaggccgagcucaagugcuucgggaacaccgccguggccaagugcaacgagaagcacgacgaggaguucugcgacaugcugcggcuguucgacuucaacaagcaggcgauccagcgccucaagucccccgcccagaugagcauccagcugaucaacaaggccgucaacgcccugaucaacgaccagcucaucaugaagaaccaccuccgggacaugaugugcauccccuacugcaacuacuccaaguacugguaccugaaccacaccagcuccgggcgcaccagccugcccaagugcuggcugguguccaacggcagcuaccugaacgagacgcacuucuccgacgacaucgagcagcaggccgacaacaugaucaccgagaugcuccagaaggaguacaucgaccggcagggcaagaccccgcuggggcugguggaccucuucgucuucagcaccuccuucuaccugaucagcaucuuccugcaccugaucaagaucccgacgcaccgccacaucgugggcaagcccugccccaagccccaccggcucaaccacauggggaucugcuccugcggccuguacaagcagccgggggugcccacccgcuggaagcggugaggacuagucccuguucccagagcccacuuuuuuuucuuuuuuugaaauaaaauagccugucuuucagaucucaaaggcucuuuucagagccaccaaaaaaaaaaaaaaaaaaaaaaaaaaaaaaaaaaaaaaaaaaaaaaaaaaaaaaaaaaaaaaaaaaaaaaaaaaaaaaaaaaaaaaaaaaaaaaaaaaaaa

SEQ ID NO: 15726 - RNA, 1764 nt, Artificial Sequence
  mRNA product Design a-2 (hSL-A100) comprising derived and/or modified sequence from LASV(KAK-428;Clade n.d. (VII))__ANH09740__GPCmut1 (opt1)
aggagaguccgcucagccagguugcagaagcggcuuagcguguguccuaaucuucucucugcguguagguaggccugugccgcaaacaagcuuaccaugggccagaucgugaccuucuuccaggaggucccccacgugaucgaggaggugaugaacaucguccugaucgcccucagccugcuggccauccucaaggggcuguacaacuucgcgaccugcggcgugaucgggcugaucacguuccuccugcugugcggccgcuccugcagcgccaccuacaaggggcaguacgagcuccagacccuggagcugaacauggagucccucaacaugaccaugccgcugagcugcacgaagaacaacucccaccacuacauccgggccggcaacaacaccggccuggagcucacccugaccaacacgagcaucaucucccacaaguucugcaaccugagcgacgcccacaagaagaaccucuacgaccacacccugauguccaucaucaccaccuuccaccugagcauccccaacuucaaccaguacgaggccauguccugcgacuucaacgggggcaagaucagcauccaguacaaccucucccacagcuacgcgggggacgccgcccagcacugcggcacgguggccaacgggguccugcagaccuucaugcgcauggcguggggcggcuccuaccuggcccucgacagcgggugccgcggcugggacugcaucaucuccagcuaccaguaccugaucauccagaacaccaccugggacgaccacugccaguucucccggcccagccccaucggguaccugggcuucgugagccagaagacgcgcgacaucuacaucucccggcgccgccggggcaccuucaccuggacccugagcgacuccgaggggcacgacaugccgggcggguacugccucacgcgguggaugcugaucgaggccgaccugaagugcuucggcaacaccgccguggccaagugcaacgagaagcacgacgaggaguucugcgacauguggcgccucuucgacuucaacaagcaggcgauccagcggcugaaggcccccgcccagaugaacauccagcugaucaacaaggccgucaacgcccucaucaacgaccagcugaugaugaagaaccaccuccgcgacaucaugugcauccccuacugcaacuacagcaaguucugguaccugaacaacaccaccacgggccggaccucccugccccgcugcuggcugaucagcaacggcuccuaccucaacgagacccacuucagcgacgacaucgagcagcaggcggacaacaugaucaccgagaugcugcagaaggaguacauggaccggcaggggaagacgccccugggccucguggaccuguucguguucuccaccagcuucuaccugaucaccaucuuccuccaccuggucaagaucccgacccaccgccacaucguggggaagcccugccccaagccccaccggcugaaccacaugggcaucugcuccugcgggcuguacaagcagccgggcgugcccguccgcuggaagcggugaggacuagucccuguucccagagcccacuuuuuuuucuuuuuuugaaauaaaauagccugucuuucagaucucaaaggcucuuuucagagccaccaaaaaaaaaaaaaaaaaaaaaaaaaaaaaaaaaaaaaaaaaaaaaaaaaaaaaaaaaaaaaaaaaaaaaaaaaaaaaaaaaaaaaaaaaaaaaaaaaaaaa

SEQ ID NO: 15727 - RNA, 1764 nt, Artificial Sequence; identical to SEQ ID NO: 15721
  mRNA product Design a-2 (hSL-A100) comprising derived and/or modified sequence from LASV(Pinneo-NIG-1969;Clade I)__AIT17836__GPCmut1 (opt1)

SEQ ID NO: 15728 - RNA, 1764 nt, Artificial Sequence
  mRNA product Design a-2 (hSL-A100) comprising derived and/or modified sequence from LASV(ISTH0009-NIG-2011;Clade II)__AIT17404__GPCmut1 (opt1)
aggagaguccgcucagccagguugcagaagcggcuuagcguguguccuaaucuucucucugcguguagguaggccugugccgcaaacaagcuuaccaugggccagaucaucaccuucuuccaggaggugccccacgucaucgaggaggugaugaacaucgugcugaucgcccucagccugcuggccauccucaaggggaucuacaacgucgcgaccugcggccuguucgggcugguguccuuccuccugcugugcggccgcagcugcuccacgaccuacaaggggguguacgagcuccagacccuggagcuggacauggccagccucaacaugaccaugccgcuguccugcacgaagaacaacagccaccacuacaucauggucggcaacgagaccggccuggagcucacccugaccaacacguccaucaucaaccacaaguucugcaaccugagcgacgcccacaagaagaaccucuacgaccacgcccugauguccaucaucagcaccuuccaccuguccauccccaacuucaaccaguacgaggccaugagcugcgacuucaacgggggcaagaucuccgugcaguacaaccucagccacgcguacgccguggacgccgccaaccacugcgggaccaucgcgaacggcguccugcagaccuucaugcggauggccuggggcggguccuacaucgcccuggacagcggcugcggguccugggacugcaucaugacgagcuaccaguaccucaucauccagaacaccaccugggaggaccacugccaguucucccgccccagccccaucggcuaccuggggcugcucagccagcggacccgcgacaucuacaucucccggcgccgccggggcacguucaccuggacccucagcgacuccgagggcaacgagacccccgggggcuacugccugacgcgguggaugcugaucgaggccgagcucaagugcuucgggaacaccgccguggcgaagugcaacgagaagcacgacgaggaguucugcgacaugcugcgccuguucgacuucaacaagcaggccauccggcgccucaagacccccgcccagaugagcauccagcugaucaacaaggccgugaacgcccugaucaacgaccagcucaucaugaagaaccaccuccgggacaucaugugcaucccguacugcaacuacuccaaguacugguaccugaaccacaccgucacggggaagaccagccugccccgcugcuggcugguguccaacggcagcuaccugaacgagacccacuucuccgacgacaucgagcagcaggcggacaacaugaucaccgagcuccugcagaaggaguacauggaccggcagggcaagacgccccuggggcucguggaccuguucgucuucagcaccuccuucuaccugaucagcaucuuccugcaccucaucaagaucccgacccaccgccacaucaccggcaagcccugccccaagccccaccggcugaaccacauggggaucugcuccugcggccuguacaagcacccgggggugcccgugaaguggaagcgcugaggacuagucccuguucccagagcccacuuuuuuuucuuuuuuugaaauaaaauagccugucuuucagaucucaaaggcucuuuucagagccaccaaaaaaaaaaaaaaaaaaaaaaaaaaaaaaaaaaaaaaaaaaaaaaaaaaaaaaaaaaaaaaaaaaaaaaaaaaaaaaaaaaaaaaaaaaaaaaaaaaaaa

SEQ ID NO: 15729 - RNA, 1764 nt, Artificial Sequence
  mRNA product Design a-2 (hSL-A100) comprising derived and/or modified sequence from LASV(ISTH2010-NIG-2012;Clade II)__AIT17482__GPCmut1 (opt1)
aggagaguccgcucagccagguugcagaagcggcuuagcguguguccuaaucuucucucugcguguagguaggccugugccgcaaacaagcuuaccaugggccagaucaucaccuucuuccaggaggugccccacgucaucgaggaggugaugaacaucgugcugaucgcccucagccugcuggccauccucaaggggaucuacaacgucgcgaccugcggccuguucgggcugguguccuuccuccugcugugcggccgcagcugcuccacgaccuacaaggggguguacgagcuccagacccuggagcuggacauggccagccucaacaugaccaugccgcuguccugcacgaagaacaacagccaccacuacaucauggucggcaacgagaccggccuggagcucacccugaccaacacguccaucaucaaccacaaguucugcaaccugagcgacgcccacaagaagaaccucuacgaccacgcccugauguccaucaucagcaccuuccaccuguccauccccaacuucaaccaguacgaggccaugagcugcgacuucaacgggggcaagaucuccgugcaguacaaccucagccacgcguacgccguggacgccgccaaccacugcgggaccaucgcgaacggcguccugcagaccuucaugcggauggccuggggcggguccuacaucgcccuggacagcggcugcggguccugggacugcaucaugacgagcuaccaguaccucaucauccagaacaucaccugggaggaccacugccaguucucccgccccagccccaucggcuaccuggggcugcucagccagcggacccgcgacaucuacaucucccggcgccgccggggcaccuucacguggacccucagcgacuccgagggcaacgagacccccgggggcuacugccugacccgguggaugcugaucgaggccgagcucaagugcuucgggaacacggccguggcgaagugcaacgagaagcacgacgaggaguucugcgacaugcugcgccuguucgacuucaacaagcaggccauccggcgccucaagacccccgcccagaugagcauccagcugaucaacaaggccgugaacgcccugaucaacgaccagcucaucaugaagaaccaccuccgggacaucaugugcauccccuacugcaacuacuccaaguacugguaccugaaccacaccgucaccgggaagacgagccugccccgcugcuggcugguguccaacggcagcuaccugaacgagacccacuucuccgacgacaucgagcagcaggcggacaacaugaucaccgagcuccugcagaaggaguacaucgaccggcagggcaagaccccgcuggggcucguggaccuguucgucuucagcacguccuucuaccugaucagcaucuuccugcaccucgugaagaucccgacccaccgccacguggucggcaagcccugccccaagccccaccggcugaaccacauggggaucugcuccugcggccuguacaagcacccgggggugcccgugaaguggaagcgcugaggacuagucccuguucccagagcccacuuuuuuuucuuuuuuugaaauaaaauagccugucuuucagaucucaaaggcucuuuucagagccaccaaaaaaaaaaaaaaaaaaaaaaaaaaaaaaaaaaaaaaaaaaaaaaaaaaaaaaaaaaaaaaaaaaaaaaaaaaaaaaaaaaaaaaaaaaaaaaaaaaaaa

SEQ ID NO: 15730 - RNA, 1764 nt, Artificial Sequence
  mRNA product Design a-2 (hSL-A100) comprising derived and/or modified sequence from LASV(Lassa virus/H.sapiens-wt/NGA/2015/ISTH_0543;Clade II)__AVO03639__GPCmut1 (opt1)
aggagaguccgcucagccagguugcagaagcggcuuagcguguguccuaaucuucucucugcguguagguaggccugugccgcaaacaagcuuaccaugggccagaucaucaccuucuuccaggaggugccccacgucaucgaggaggugaugaacaucgugcugaucgcccucagccugcuggccauccucaaggggaucuacaacgucgcgaccugcggccuguucgggcugguguccuuccuccugcugugcggccgcagcugcuccacgaccuacaaggggguguacgagcuccagacccuggagcuggacauggccaaccucaacaugaccaugccgcugagcugcacgaagaacaacucccaccacuacaucauggucggcaacgagaccggccuggagcucacccugaccaacacgagcaucaucaaccacaaguucugcaaccuguccgacgcccacaagaagaaccucuacgaccacgcccugaugagcaucaucuccaccuuccaccugagcauccccaacuucaaccaguacgaggccauguccugcgacuucaacgggggcaagaucagcgugcaguacaaccucucccacaccuacgcgguggacgccgccaaccacugcgggaccaucgccaacggcguccugcagacguucaugcggauggcguggggcgggagcuacaucgcccuggacuccggcugcgggagcugggacugcaucaugaccuccuaccaguaccucgugauccagaacaccaccugggaggaccacugccaguucagccgccccucccccaucggcuaccuggggcugcucagccagcggacgcgcgacaucuacaucagccggcgccgccggggcaccuucaccuggacccucuccgacagcgagggcaacgagacgcccgggggcuacugccugacccgguggaugcugaucgaggccgagcucaagugcuucgggaacaccgccguggccaagugcaacgagaagcacgacgaggaguucugcgacaugcugcgccuguucgacuucaacaagcaggcgauccggcgccucaagacccccgcccagauguccauccagcugaucaacaaggccgucaacgcccugaucaacgaccagcucaucaugaagaaccaccuccgggacaucaugugcauccccuacugcaacuacagcaaguacugguaccugaaccacacggugaccgggaagaccucccugccccgcugcuggcuggugagcaacggcuccuaccugaacgagacccacuucagcgacgacaucgagcagcaggccgacaacaugaucacggagcuccugcagaaggaguacaucgaccggcagggcaagaccccgcuggggcucgucgaccuguucguguucuccaccagcuucuaccugaucuccaucuuccugcaccucgugaagaucccgacccaccgccacaucacgggcaagcccugccccaagccccaccggcugaaccacauggggaucugcagcugcggccuguacaagcacccggggguccccgugaaguggaagcgcugaggacuagucccuguucccagagcccacuuuuuuuucuuuuuuugaaauaaaauagccugucuuucagaucucaaaggcucuuuucagagccaccaaaaaaaaaaaaaaaaaaaaaaaaaaaaaaaaaaaaaaaaaaaaaaaaaaaaaaaaaaaaaaaaaaaaaaaaaaaaaaaaaaaaaaaaaaaaaaaaaaaaa

SEQ ID NO: 15731 - RNA, 1764 nt, Artificial Sequence
  mRNA product Design a-2 (hSL-A100) comprising derived and/or modified sequence from LASV(Lassa virus/H.sapiens-wt/NGA/2016/ISTH_0009;Clade II)__AVO03571__GPCmut1 (opt1)
aggagaguccgcucagccagguugcagaagcggcuuagcguguguccuaaucuucucucugcguguagguaggccugugccgcaaacaagcuuaccaugggccagaucaucaccuucuuccaggaggugccccacgucaucgaggaggugaugaacaucgugcugaucgcccucagccugcuggccauccucaaggggaucuacaacgucgcgaccugcggccugcuggggcucguguccuuccugcugcucugcggccgcagcugcuccacgaccuacaaggggguguacgagcugcagacccuggagcucgacauggccagccugaacaugaccaugccgcuguccugcacgaagaacaacagccaccacuacaucauggucggcaacgagaccggccucgagcugacccugaccaacacguccaucaucaaccacaaguucugcaaccucagcgacgcccacaagaagaaccuguacgaccacgcccugauguccaucaucagcaccuuccaccucuccauccccaacuucaaccaguacgaggccaugagcugcgacuucaacgggggccggaucuccgugcaguacaaccugagccacuccuacgcgguggacgccgccaaccacugcgggaccaucgccaacggcguccugcagaccuucaugcgcauggcguggggcgggagcuacaucgcccucgacuccggcugcgggagcugggacugcaucaugacguccuaccaguaccugaucauccagaacaccaccugggaggaccacugccaguucagccggcccagccccaucggcuaccuggggcuccugucccagcgcacccgggacaucuacaucagccgccggcgccggggcacguucaccuggacccuguccgacagcgagggcaacgagacccccgggggcuacugccugacgcgcuggaugcucaucgaggccgagcugaagugcuucgggaacaccgccguggccaagugcaacgagaagcacgacgaggaguucugcgacaugcugcggcuguucgacuucaacaagcaggcgauccgccggcugaagacccccgcccagauguccauccagcugaucaacaaggccgugaacgcccucaucaacgaccagcugaucaugaagaaccaccuccgcgacaucaugugcaucccguacugcaacuacagcaaguacugguaccucaaccacaccgucacggggaagaccucccugccccggugcuggcuggugagcaacggcuccuaccucaacgagacccacuucagcgacgacaucgagcagcaggccgacaacaugaucaccgagcugcugcagaaggaguacaucgaccgccagggcaagacgccccucgggcugguggaccuguucgucuucuccaccagcuucuaccugaucuccaucuuccuccaccuggugaagaucccgacccaccggcacaucaccggcaagcccugccccaagccccaccgccugaaccacauggggaucugcagcugcggccucuacaaccacccgggggugcccgucaaguggaagcggugaggacuagucccuguucccagagcccacuuuuuuuucuuuuuuugaaauaaaauagccugucuuucagaucucaaaggcucuuuucagagccaccaaaaaaaaaaaaaaaaaaaaaaaaaaaaaaaaaaaaaaaaaaaaaaaaaaaaaaaaaaaaaaaaaaaaaaaaaaaaaaaaaaaaaaaaaaaaaaaaaaaaa

SEQ ID NO: 15732 - RNA, 1764 nt, Artificial Sequence
  mRNA product Design a-2 (hSL-A100) comprising derived and/or modified sequence from LASV(Lassa virus/H.sapiens-wt/NGA/2016/ISTH_0017;Clade II)__AVO03567__GPCmut1 (opt1)
aggagaguccgcucagccagguugcagaagcggcuuagcguguguccuaaucuucucucugcguguagguaggccugugccgcaaacaagcuuaccaugggccagaucaucaccuucuuccaggaggugccccacgucaucgaggaggugaugaacaucgugcugaucgcccucagccugcuggccauccucaaggggaucuacaacgucgcgaccugcggccuguucgggcugguguccuuccuccugcugugcggccgcagcugcuccacgaccuacaaggggguguacgagcuccagacccuggagcuggacauggccagccucaacaugaccaugccgcuguccugcacgaagaacaacagccaccacuacaucauggucggcaacgagaccggccuggagcucacccugaccaacacguccaucaucaaccacaaguucugcaaccugagcgacgcccacaagaagaaccucuacgaccacgcccugauguccaucaucagcaccuuccaccuguccauccccaacuucaaccaguacgaggccaugagcugcgacuucaacgggggcaagaucuccgugcaguacaaccucagccacaccuacgcgaucgacgccgccaaccacugcgggaccaucgccaacggcgugcugcagacguucaugcggauggcguggggcggguccuacaucgcccuggacagcggcugcggguccugggacugcaucaugaccagcuaccaguaccucaucauccagaacaccaccugggaggaccacugccaguucucccgccccagccccaucggcuaccuggggcugcucagccagcggacgcgcgacaucuacaucucccggcgccgccggggcaccuucaccuggacccucagcgacuccgagggcaacgagacgcccgggggcuacugccugacccgguggaugcugaucgaggccgagcucaagugcuucgggaacaccgccgucgccaagugcaacgagaagcacgacgaggaguucugcgacaugcugcgccuguucgacuucaacaagcaggcgauccggcgccucaagacccccgcccagaugagcauccagcugaucaacaaggccgugaacgcccugaucaacgaccagcucaucaugaagaaccaccuccgggacaucaugugcauccccuacugcaacuacuccaaguacugguaccugaaccacacggugaccgggaagaccagccugccccgcugcuggcuggucuccaacggcagcuaccugaacgagacccacuucuccgacgacaucgagcagcaggccgacaacaugaucacggagcuccugcagaaggaguacauggaccggcagggcaagaccccgcuggggcucguggaccuguucguguucagcaccuccuucuaccugaucagcaucuuccugcaccucguccgcaucccgacccaccggcacgugaucggcaagcccugccccaagccccaccgccugaaccacauggggaucugcuccugcggccuguacaagcacccgggggugcccgucaaguggaagcggugaggacuagucccuguucccagagcccacuuuuuuuucuuuuuuugaaauaaaauagccugucuuucagaucucaaaggcucuuuucagagccaccaaaaaaaaaaaaaaaaaaaaaaaaaaaaaaaaaaaaaaaaaaaaaaaaaaaaaaaaaaaaaaaaaaaaaaaaaaaaaaaaaaaaaaaaaaaaaaaaaaaaa

SEQ ID NO: 15733 - RNA, 1764 nt, Artificial Sequence
  mRNA product Design a-2 (hSL-A100) comprising derived and/or modified sequence from LASV(Lassa virus/H.sapiens-wt/NGA/2018/ISTH_0959;Clade II)__AVV65099__GPCmut1 (opt1)
aggagaguccgcucagccagguugcagaagcggcuuagcguguguccuaaucuucucucugcguguagguaggccugugccgcaaacaagcuuaccaugggccagaucaucaccuucuuccaggaggugccccacgucaucgaggaggugaugaacaucgugcugaucgcccucagccugcuggccauccucaaggggaucuacaacgucgugaccugcggccuguucgggcugguguccuuccuccugcugugcggccgcagcugcuccacgaccuacaagggggucuacgagcuccagacccuggagcuggacauggcgagccucaacaugaccaugccgcuguccugcacgaagaacaacagccaccacuacaucauggugggcaacgagaccggccuggagcucacccugaccaacacguccaucaucaaccacaaguucugcaaccugagcgacgcccacaagaagaaccucuacgaccacgcccugauguccaucaucagcaccuuccaccuguccauccccaacuucaaccaguacgaggccaugagcugcgacuucaacgggggcaagaucuccgugcaguacaaccucagccacgccuacgcgaucgacgccgccaaccacugcgggaccaucgccaacggcguccugcagaccuucaugcggauggcguggggcggguccuacaucgcccuggacagcggcugcggguccugggacugcaucaugacgagcuaccaguaccucaucauccagaacaccaccugggaggaccacugccaguucucccgccccagccccaucggcuaccuggggcugcucagccagcggacccgcgacaucuacaucucccggcgccgccggggcacguucaccuggacccucagcgacuccgagggcaacgagacccccgggggcuacugccugacgcgguggaugcugaucgaggccgagcucaagugcuucgggaacaccgccguggccaagugcaacgagaagcacgacgaggaguucugcgacaugcugcgccuguucgacuucaacaagcaggcgauccggcgccucaagacccccgcccagaugagcauccagcugaucaacaaggccgugaacgcccugaucaacgaccagcucaucaugaagaaccaccuccgggacaucaugugcaucccguacugcaacuacuccaaguacugguaccugaaccacaccgucacggggaagaccagccugccccgcugcuggcugguguccaacggcagcuaccugaacgagacccacuucuccgacgacaucgagcagcaggccgacaacaugaucaccgagcuccugcagaaggaguacaucgaccggcagggcaagacgccccuggggcucguggaccuguucgucuucagcaccuccuucuaccugaucagcaucuuccugcaccucgugaagaucccgacccaccgccacgugaucggcaagcccugccccaagccccaccggcugaaccacauggggaucugcuccugcggccuguacaagcacccggggguccccgugaaguggaagcgcugaggacuagucccuguucccagagcccacuuuuuuuucuuuuuuugaaauaaaauagccugucuuucagaucucaaaggcucuuuucagagccaccaaaaaaaaaaaaaaaaaaaaaaaaaaaaaaaaaaaaaaaaaaaaaaaaaaaaaaaaaaaaaaaaaaaaaaaaaaaaaaaaaaaaaaaaaaaaaaaaaaaaa

SEQ ID NO: 15734 - RNA, 1764 nt, Artificial Sequence
  mRNA product Design a-2 (hSL-A100) comprising derived and/or modified sequence from LASV(LASV003-NIG-2008;Clade II)__AIT17580__GPCmut1 (opt1)
aggagaguccgcucagccagguugcagaagcggcuuagcguguguccuaaucuucucucugcguguagguaggccugugccgcaaacaagcuuaccaugggccagaucaucaccuucuuccaggaggugccccacgucaucgaggaggugaugaacaucgugcugaucgcccucagccugcuggccauccucaaggggaucuacaacgucgcgaccugcggccuguucgggcugguguccuuccuccugcugugcggccgcagcugcuccacgaccuacaaggggguguacgagcuccagacccuggagcuggacauggccagccucaacaugaccaugccgcuguccugcacgaagaacaacagccaccacuacaucauggucggcaacgagaccggccuggagcucacccugaccaacacguccaucaucaaccacaaguucugcaaccugagcgacgcccacaagaagaaccucuacgaccacgcccugauguccaucaucagcaccuuccaccuguccauccccaacuucaaccaguacgaggccaugagcugcgacuucaacgggggcaagaucuccgugcaguacaaccucagccacaccuacgcgguggacgccgccaaccacugcgggaccaucgccaacggcguccugcagacguucaugcggauggcguggggcggguccuacaucgcccuggacagcggcugcggguccugggacugcaucaugaccagcuaccaguaccucaucauccagaacaccaccugggaggaccacugccaguucucccgccccagccccaucggcuaccuggggcugcucagccagcggacgcgcgacaucuacaucucccggcgccgccggggcaccuucaccuggacccucagcgacuccgagagcaacgagacgccgggcggguacugccugacccgguggaugcugaucgaggccgagcucaagugcuucggcaacaccgccguggccaagugcaacgagaagcacgacgaggaguucugcgacaugcugcgccuguucgacuucaacaagcaggcgauccggcgccucaaggcccccgcccagauguccauccagcugaucaacaaggccgugaacgcccugaucaacgaccagcucaucaugaagaaccaccuccgggacaucaugugcauccccuacugcaacuacagcaaguacugguaccugaaccacaccgucacgggccgcaccucccugccccggugcuggcuggugagcaacggguccuaccugaacgagacccacuucagcgacgacaucgagcagcaggcggacaacaugaucaccgagcuccugcagaaggaguacauggaccgccagggcaagacgccccugggccucguggaccuguucgucuucuccaccagcuucuaccugaucuccaucuuccugcaccucgugaagaucccgacccaccggcacgugaucgggaagcccugccccaagccccaccgccugaaccacaugggcaucugcagcugcgggcuguacaagcacccgggcguccccgugaaguggaagcggugaggacuagucccuguucccagagcccacuuuuuuuucuuuuuuugaaauaaaauagccugucuuucagaucucaaaggcucuuuucagagccaccaaaaaaaaaaaaaaaaaaaaaaaaaaaaaaaaaaaaaaaaaaaaaaaaaaaaaaaaaaaaaaaaaaaaaaaaaaaaaaaaaaaaaaaaaaaaaaaaaaaaa

SEQ ID NO: 15735 - RNA, 1764 nt, Artificial Sequence
  mRNA product Design a-2 (hSL-A100) comprising derived and/or modified sequence from LASV(LASV035-NIG-2009;Clade II)__AIT17588__GPCmut1 (opt1)
aggagaguccgcucagccagguugcagaagcggcuuagcguguguccuaaucuucucucugcguguagguaggccugugccgcaaacaagcuuaccaugggccagaucaucaccuucuuccaggaggugccccacgucaucgaggaggugaugaacaucgugcugaucgcccucagccugcuggccauccucaaggggaucuacaacgucgcgaccugcggccuguucgggcugguguccuuccuccugcugugcggccgcagcugcuccacgaccuacaaggggguguacgagcuccagacccuggagcuggacauggccagccucaacaugaccaugccgcuguccugcacgaagaacaacagccaccacuacaucauggucggcaacgagaccggccuggagcucacccugaccaacacguccaucaucaaccacaaguucugcaaccugagcgacgcccacaagaagaaccucuacgaccacgcccugauguccaucaucagcaccuuccaccuguccauccccaacuucaaccaguacgaggccaugagcugcgacuucaacgggggcaagaucuccgugcaguacaaccucagccacgcguacgccguggacgccgccaaccacugcgggaccaucgcgaacggcguccugcagaccuucaugcggauggccuggggcggguccuacaucgcccuggacagcggcugcggguccugggacugcaucaugacgagcuaccaguaccucaucauccagaacaccaccugggaggaccacugccaguucucccgccccagccccaucggcuaccuggggcugcucagccagcggacccgcgacaucuacaucucccggcgccgccggggcacguucaccuggacccucagcgacuccgagggcaacgagacccccgggggcuacugccugacgcgguggaugcugaucgaggccgagcucaagugcuucgggaacaccgccguggcgaagugcaacgagaagcacgacgaggaguucugcgacaugcugcgccuguucgacuucaacaagcaggccauccggcgccucaaggcccccgcccagaugagcauccagcugaucaacaaggccgugaacgcgcugaucaacgaccagcucaucaugaagaaccaccuccgggacaucaugugcauccccuacugcaacuacuccaaguacugguaccugaaccacaccgucaccgggaagacgagccugccccgcugcuggcugguguccaacggcagcuaccugaacgagacccacuucuccgacgacaucgagcagcaggccgacaacaugaucaccgagcuccugcagaaggaguacaucgaccggcagggcaagaccccgcuggggcucguggaccuguucgucuucagcacguccuucuaccugaucagcaucuuccugcaccucgugaagaucccgacccaccgccacgugaucggcaagcccugccccaagccccaccggcugaaccacauggggaucugcuccugcggccuguacaagcacccggggguccccgugaaguggaagcgcugaggacuagucccuguucccagagcccacuuuuuuuucuuuuuuugaaauaaaauagccugucuuucagaucucaaaggcucuuuucagagccaccaaaaaaaaaaaaaaaaaaaaaaaaaaaaaaaaaaaaaaaaaaaaaaaaaaaaaaaaaaaaaaaaaaaaaaaaaaaaaaaaaaaaaaaaaaaaaaaaaaaaa

SEQ ID NO: 15736 - RNA, 1764 nt, Artificial Sequence
  mRNA product Design a-2 (hSL-A100) comprising derived and/or modified sequence from LASV(LASV1000-NIG-2009;Clade II)__AIT17782__GPCmut1 (opt1)
aggagaguccgcucagccagguugcagaagcggcuuagcguguguccuaaucuucucucugcguguagguaggccugugccgcaaacaagcuuaccaugggccagaucaucaccuucuuccaggaggugccccacgucaucgaggaggugaugaacaucgugcugaucgcccucagccugcuggccauccucaaggggaucuacaacgucgcgaccugcggccuguucgggcugguguccuuccuccugcugugcggccgcagcugcuccacgaccuacaaggggguguacgagcuccagacccuggagcuggacauggccagccucaacaugaccaugccgcuguccugcacgaagaacaacagccaccacuacaucauggucggcaacgagaccggccuggagcucacccugaccaacacguccaucaucaaccacaaguucugcaaccugagcgacgcccacaagaagaaccucuacgaccacgcccugauguccaucaucagcaccuuccaccuguccauccccaacuucaaccaguacgaggccaugagcugcgacuucaacgggggcaagaucuccgugcaguacaaccucagccacaccuacgcgguggacgccgccaaccacugcgggaccaucgccaacggcguccugcagacguucaugcggauggcguggggcggguccuacaucgcccuggacagcggcugcggguccugggacugcaucaugaccagcuaccaguaccucaucauccagaacaccaccugggaggaccacugccaguucucccgccccagccccaucggcuaccuggggcugcucagccagcggacgcgcgacaucuacaucucccggcgccgccggggcaccuucaccuggacccucagcgacuccgagggcaacgagacgcccgggggcuacugccugacccgguggaugcugaucgaggccgagcucaagugcuucgggaacaccgccguggccaagugcaacgagaagcacgacgaggaguucugcgacaugcugcgccuguucgacuucaacaagcaggcgaucaagcggcucaagacccccgcccagaugagcauccagcugaucaacaaggccgugaacgcccugaucaacgaccagcucaucaugaagaaccaccuccgcgacaucaugugcauccccuacugcaacuacuccaaguacugguaccugaaccacacggucaccgggaagaccagccugccccggugcuggcugguguccaacggcagcuaccugaacgagacccacuucuccgacgacaucgagcagcaggccgacaacaugaucacggagcuccugcagaaggaguacaucgaccgccagggcaagaccccgcuggggcucguggaccuguucgucuucagcaccuccuucuaccugaucagcaucuuccugcaccucgugaagaucccgacccaccggcacguggucggcaagcccugccccaagccccaccgccugaaccacauggggaucugcuccugcggccuguacaagcacccgggggugcccgugaaguggaagcggugaggacuagucccuguucccagagcccacuuuuuuuucuuuuuuugaaauaaaauagccugucuuucagaucucaaaggcucuuuucagagccaccaaaaaaaaaaaaaaaaaaaaaaaaaaaaaaaaaaaaaaaaaaaaaaaaaaaaaaaaaaaaaaaaaaaaaaaaaaaaaaaaaaaaaaaaaaaaaaaaaaaaa

SEQ ID NO: 15737 - RNA, 1764 nt, Artificial Sequence
  mRNA product Design a-2 (hSL-A100) comprising derived and/or modified sequence from LASV(LASV221-NIG-2010;Clade II)__AIT17624__GPCmut1 (opt1)
aggagaguccgcucagccagguugcagaagcggcuuagcguguguccuaaucuucucucugcguguagguaggccugugccgcaaacaagcuuaccaugggccagaucaucaccuucuuccaggaggugccccacgucaucgaggaggugaugaacaucgugcugaucgcccucagccugcuggccauccucaaggggaucuacaacgucgcgaccugcggccuguucgggcugguguccuuccuccugcugugcggccgcagcugcuccacgaccuacaaggggguguacgagcuccagacccuggagcuggacauggccagccucaacaugaccaugccgcuguccugcacgaagaacaacagccaccacuacaucauggucggcaacgagaccggccuggagcucacccugaccaacacguccaucaucaaccacaaguucugcaaccugagcgacgcccacaagaagaaccucuacgaccacgcccugauguccaucaucagcaccuuccaccuguccauccccaacuucaaccaguacgaggccaugagcugcgacuucaacgggggcaagaucuccgugcaguacaaccucagccacaccuacgcgaucgacgccgccaaccacugcgggaccaucgccaacggcgugcugcagacguucaugcggauggcguggggcggguccuacaucgcccuggacagcggcugcggguccugggacugcaucaugaccagcuaccaguaccucaucauccagaacaccaccugggaggaccacugccaguucucccgccccagccccaucggcuaccuggggcugcucagccagcggacgcgcgacaucuacaucucccggcgccgccggggcaccuucaccuggacccucagcgacuccgagggcaacgagacgcccgggggcuacugccugacccgguggaugcugaucgaggccgagcucaagugcuucgggaacaccgccgucgccaagugcaacgagaagcacgacgaggaguucugcgacaugcugcgccuguucgacuucaacaagcaggcgauccggcgccucaagacccccgcccagaugagcauccagcugaucaacaaggccgugaacgcccugaucaacgaccagcucaucaugaagaaccaccuccgggacaucaugugcauccccuacugcaacuacuccaaguacugguaccugaaccacacggugaccgggaagaccagccugccccgcugcuggcuggucuccaacggcagcuaccugaacgagacccacuucuccgacgacaucgagcagcaggccgacaacaugaucacggagaugcuccagaaggaguacauggaccggcagggcaagaccccgcuggggcugguggaccucuucguguucagcaccuccuucuaccugaucagcaucuuccugcaccuggucaagaucccgacccaccgccacgugaucggcaagcccugccccaagccccaccggcucaaccacauggggaucugcuccugcggccuguacaagcacccgggggugcccgucaaguggaagcgcugaggacuagucccuguucccagagcccacuuuuuuuucuuuuuuugaaauaaaauagccugucuuucagaucucaaaggcucuuuucagagccaccaaaaaaaaaaaaaaaaaaaaaaaaaaaaaaaaaaaaaaaaaaaaaaaaaaaaaaaaaaaaaaaaaaaaaaaaaaaaaaaaaaaaaaaaaaaaaaaaaaaaa

SEQ ID NO: 15738 - RNA, 1764 nt, Artificial Sequence
  mRNA product Design a-2 (hSL-A100) comprising derived and/or modified sequence from LASV(LASV237-NIG-2010;Clade II)__AIT17638__GPCmut1 (opt1)
aggagaguccgcucagccagguugcagaagcggcuuagcguguguccuaaucuucucucugcguguagguaggccugugccgcaaacaagcuuaccaugggccagaucaucaccuucuuccaggaggugccccacgucaucgaggaggugaugaacaucgugcugaucgcccucagccugcuggccauccucaaggggaucuacaacgucgcgaccugcggccuguucgggcugguguccuuccuccugcugugcggccgcagcugcuccacgaccuacaaggggguguacgagcuccagacccuggagcuggacauggccagccucaacaugaccaugccgcuguccugcacgaagaacaacagccaccacuacaucauggucggcaacgagaccggccuggagcucacccugaccaacacguccaucaucaaccacaaguucugcaaccugagcgacgcccacaagaaggaccucuacgaccacgcccugauguccaucaucagcaccuuccaccuguccauccccaacuucaaccaguacgaggccaugagcugcgacuucaacgggggcaagaucuccgugcaguacaaccucagccacaccuacgcgguggacgccgccaaccacugcgggaccaucgccaacggcguccugcagacguucaugcggauggcguggggcggguccuacaucgcccuggacagcggcugcggguccugggacugcaucaugaccagcuaccaguaccucaucauccagaacaccaccugggaggaccacugccaguucucccgccccagccccaucggcuaccuggggcugcucagccagcggacgcgcgacaucuacaucucccggcgccgccggggcaccuucaccuggacccucagcgacuccgagggcaacgagacgcccgggggcuacugccugacccgguggaugcugaucgaggccgagcucaagugcuucgggaacaccgccguggccaagugcaacgagaagcacgacgaggaguucugcgacaugcugcgccuguucgacuucaacaagcaggcgauccggcgccucaagacccccgcccagaugagcauccagcugaucaacaaggccgugaacgcccugaucaacgaccagcucaucaugaagaaccaccuccgggacaucaugugcauccccuacugcaacuacuccaaguacugguaccugaaccacacggucaccgggaagaccagccugccccgcugcuggcugguguccaacggcagcuaccugaacgagacccacuucuccgacgacaucgagcagcaggccgacaacaugaucacggagcuccugcagaaggaguacauggaccggcagggcaagaccccgcuggggcucguggaccuguucgucuucagcaccuccuucuaccugaucagcaucuuccugcaccucaucaagaucccgacccaccgccacaucacgggcaagcccugccccaagccccaccggcugaaccacauggggaucugcuccugcggccuguacaagcacccgggggugcccgugaaguggaagcgcugaggacuagucccuguucccagagcccacuuuuuuuucuuuuuuugaaauaaaauagccugucuuucagaucucaaaggcucuuuucagagccaccaaaaaaaaaaaaaaaaaaaaaaaaaaaaaaaaaaaaaaaaaaaaaaaaaaaaaaaaaaaaaaaaaaaaaaaaaaaaaaaaaaaaaaaaaaaaaaaaaaaaa

SEQ ID NO: 15739 - RNA, 1764 nt, Artificial Sequence
  mRNA product Design a-2 (hSL-A100) comprising derived and/or modified sequence from LASV(LASV253-NIG-2011;Clade II)__AIT17670__GPCmut1 (opt1)
aggagaguccgcucagccagguugcagaagcggcuuagcguguguccuaaucuucucucugcguguagguaggccugugccgcaaacaagcuuaccaugggccagaucaucaccuucuuccaggaggugccccacgucaucgaggaggugaugaacaucgugcugaucgcccucagccugcuggccauccucaaggggaucuacaacgucgcgaccugcggccuguucgggcugguguccuuccuccugcugugcggccgcagcugcuccacgaccuacaaggggguguacgagcuccagacccuggagcuggacauggccagccucaacaugaccaugccgcuguccugcacgaagaacaacagccaccacuacaucauggucggcaacgagaccggccuggagcucacccugaccaacacguccaucaucaaccacaaguucugcaaccugagcgacgcccacaagaagaaccucuacgaccacgcccugauguccaucaucagcaccuuccaccuguccauccccaacuucaaccaguacgaggccaugagcugcgacuucaacgggggcaagaucuccgugcaguacaaccucagccacaccuacgcgguggacgccgccaaccacugcgggaccaucgccaacggcguccugcagacguucaugcggauggcguggggcggguccuacaucgcccuggacagcggcugcggguccugggacugcaucaugaccagcuaccaguaccucaucauccagaacaccaccugggaggaccacugccaguucucccgccccagccccaucggcuaccuggggcugcucagccagcggacgcgcgacaucuacaucucccggcgccgccggggcaccuucaccuggacccucagcgacuccgagggcaacgagacgcccgggggcuacugccugacccgguggaugcugaucgaggccgagcucaagugcuucgggaacaccgccguggccaagugcaacgagaagcacgacgaggaguucugcgacaugcugcgccuguucgacuucaacaagcaggcgauccggcgccucaaggcccccgcccagaugagcauccagcugaucaacaaggccgugaacgcccugaucaacgaccagcucaucaugaagaaccaccuccgggacaucaugugcaucccguacugcaacuacuccaaguacugguaccugaaccacaccgucacggggcgcaccagccugccccggugcuggcugguguccaacggcagcuaccugaacgagacccacuucuccgacgacaucgagcagcaggcggacaacaugaucaccgagcuccugcagaaggaguacaucgaccgccagggcaagacgccccuggggcucguggaccuguucgucuucagcaccuccuucuaccugaucagcaucuuccugcaccucgugaagaucccgacccaccggcacaucaucggcaagcccugccccaagccccaccgccugaaccacauggggaucugcuccugcggccuguacaagcacccgggggugcccgucaaguggaagcggugaggacuagucccuguucccagagcccacuuuuuuuucuuuuuuugaaauaaaauagccugucuuucagaucucaaaggcucuuuucagagccaccaaaaaaaaaaaaaaaaaaaaaaaaaaaaaaaaaaaaaaaaaaaaaaaaaaaaaaaaaaaaaaaaaaaaaaaaaaaaaaaaaaaaaaaaaaaaaaaaaaaaa

SEQ ID NO: 15740 - RNA, 1764 nt, Artificial Sequence
  mRNA product Design a-2 (hSL-A100) comprising derived and/or modified sequence from LASV(LASV254-NIG-2011;Clade II)__AIT17674__GPCmut1 (opt1)
aggagaguccgcucagccagguugcagaagcggcuuagcguguguccuaaucuucucucugcguguagguaggccugugccgcaaacaagcuuaccaugggccagaucaucaccuucuuccaggaggugccccacgucaucgaggaggugaugaacaucgugcugaucgcccucagccugcuggccauccucaaggggaucuacaacgucgcgaccugcggccuguucgggcugguguccuuccuccugcugugcggccgcagcugcuccacgaccuacaaggggguguacgagcuccagacccuggagcuggacaugaccaaccucaacaugacgaugccgcugagcugcaccaagaacaacucccaccacuacaucauggucggcaacgagaccggccuggagcucacccugacgaacaccagcaucaucaaccacaaguucugcaaccuguccgacgcccacaagaagaaccucuacaaccacgcccugaugagcaucaucuccaccuuccaccugagcauccccaacuucaaccaguacgaggccauguccugcgacuucaacgggggcaagaucagcgugcaguacaaccucucccacagcuacgccguggacgcggccaaccacugcgggaccaucgccaacggcguccugcagacguucaugcggauggccuggggcggguccuacaucgcgcuggacagcggcugcgggaacugggacugcaucaugaccuccuaccaguaccucaucauccagaacaccaccugggaggaccacugccaguucagccgccccucccccaucggcuaccuggggcugcucagccagcggacgcgcgacaucuacaucagccggcgccgccggggcaccuucaccuggacccucuccgacagcgagggcaacgagacgcccgggggcuacugccugacccgguggaugcugaucgaggccgagcucaagugcuucgggaacaccgccguggccaagugcaacgagaagcacgacgaggaguucugcgacaugcugcgccuguucgacuucaacaagcaggccauccggcgccucaagacccccgcgcaggccaacauccagcugaucaacaaggccgugaacgcccugaucaacgaccagcucaucaugaagaaccaccuccgggacaucaugugcauccccuacugcaacuacuccaaguacugguaccugaaccacacggucaccgggaagaccagccugccccgcugcuggcugguguccaacggcagcuaccugaacgagacccacuucuccgacgacaucgagcagcaggccgacaacaugaucacggagcuccugcagaaggaguacauggaccggcagggcaagaccccgcuggggcucguggaccuguucgucuucagcaccuccuucuaccugaucagcaucuuccugcaccucgugaagaucccgacccaccgccacgugaucggcaagcccugccccaagccccaccggcugaaccacauggggaucugcuccugcggccuguacaagcacccggggguccccgugaaguggaagcgcugaggacuagucccuguucccagagcccacuuuuuuuucuuuuuuugaaauaaaauagccugucuuucagaucucaaaggcucuuuucagagccaccaaaaaaaaaaaaaaaaaaaaaaaaaaaaaaaaaaaaaaaaaaaaaaaaaaaaaaaaaaaaaaaaaaaaaaaaaaaaaaaaaaaaaaaaaaaaaaaaaaaaa

SEQ ID NO: 15741 - RNA, 1764 nt, Artificial Sequence
  mRNA product Design a-2 (hSL-A100) comprising derived and/or modified sequence from LASV(Nig08-A19;Clade III)__ADU56618__GPCmut1 (opt1)
aggagaguccgcucagccagguugcagaagcggcuuagcguguguccuaaucuucucucugcguguagguaggccugugccgcaaacaagcuuaccaugggccagaucgugaccuucuuccaggaggucccccacgugaucgaggaggugaugaacaucguccugaucgcccucagcauccuggccauccugaaggggcucuacaacaucgcgaccugcggccugaucgggcuggugacguuccuccugcuguccggccgcagcugcuccaugaccuacaaggggguguacgagcuccagacccuggagcugaacaugaacacccucaacaugacgaugccgcugagcugcaccaagaacaacucccaccacuacaucauggucggcaacgagaccggccuggagcucacccugacgaacaccagccugcuccaccacaaguucugcaaccuguccgacgcccacaagaagaaccuguacgaccacacccucaugagcaucaucuccaccuuccaccugagcauccccaacuucaaccaguacgaggccauguccugcgacuucaacgggggcaagaucacggugcaguacaaccugagccacuccuacgccaucgacgccgcgaaccacugcgggaccguggccaacggcguccuccagaccuucaugcggauggccuggggcgggagcuacaucgcccuggacuccggcugcgggaagugggacugcaucaugaccagcuaccaguaccugaucauccagaacacgaccugggaggaccacugccaguucucccggcccagccccaucggcuaccucgggcugcugucccagcgcacccgggacaucuacaucagccgccggcgccggggcaccuucacguggacccugagcgacuccgagggcaacgagacccccgggggcuacugccucacccgcuggaugcugaucgaggcggagcugaagugcuucgggaacacggccguggccaagugcaacgagaagcacgacgaggaguucugcgacaugcuccggcuguucgacuucaacaagcaggccauccgccggcugaaggcccccgcgcagaugagcauccagcucaucaacaaggccgugaacgcccugaucaacgaccagcugaucaugaagaaccaccuccgcgacaucaugugcauccccuacugcaacuacuccaaguacugguaccugaaccacaccagcaccgggcggaccucccugccccgcugcuggcucgucagcaacggcuccuaccugaacgagacgcacuucagcgacgacaucgagcagcaggccgacaacaugaucaccgagaugcugcagaaggaguaccucgaccggcagggcaagaccccgcuggggcugguggaccuguucguguucuccaccagcuucuaccucaucuccaucuuccugcaccuggucaagaucccgacgcaccgccacaucgugggcaagcccugccccaagccccaccggcucaaccacauggggaucugcagcugcggccuguacaagcagccgggggugcccguccgcuggaagcggugaggacuagucccuguucccagagcccacuuuuuuuucuuuuuuugaaauaaaauagccugucuuucagaucucaaaggcucuuuucagagccaccaaaaaaaaaaaaaaaaaaaaaaaaaaaaaaaaaaaaaaaaaaaaaaaaaaaaaaaaaaaaaaaaaaaaaaaaaaaaaaaaaaaaaaaaaaaaaaaaaaaaa

SEQ ID NO: 15742 - RNA, 1767 nt, Artificial Sequence
  mRNA product Design a-2 (hSL-A100) comprising derived and/or modified sequence from LASV(G1180-SLE-2010;Clade IV)__AIT17168__GPCmut1 (opt1)
aggagaguccgcucagccagguugcagaagcggcuuagcguguguccuaaucuucucucugcguguagguaggccugugccgcaaacaagcuuaccaugggccagaucgugaccuucuuccaggaggucccccacgugaucgaggaggugaugaacaucguccugaucgcccucagcauccuggccgugcugaaggggcucuacaacuucgcgaccugcggccugguggggcugcucaccuuccugcugcucugcggccgcuccugcaccgccagccgguacaagggggucuacgagcugcagacccuggagcucaacauggagacccugaacaugacgaugccgcuguccugcaccaagaacaacagccaccacuacaucauggugggcaacgagaccggccucgagcugacccugacgaacaccuccaucaucaaccacaaguucugcaaccucagcgacgcccacaagaagaaccuguacgaccacgcccugauguccaucaucagcaccuuccaccucuccauccccaacuucaaccaguacgaggccaugagcugcgacuucaacgggggcaagaucuccgugcaguacaaccugagccacuccuacgcgggggacgccgccaaccacugcggcaccgucgccaacggggugcugcagacguucaugcgcauggcguggggcggcagcuacaucgcccucgacuccgggugcggcagcugggacugcaucaugaccuccuaccaguaccugaucauccagaacaccaccugggaggaccacugccaguucagccggcccucccccaucggguaccugggccuccugagccagcgcacgcgggacaucuacaucagccgccggcgccggggcaccuucaccuggacccuguccgacagcgaggggaaggacacgccgggcggguacugccugacccgcuggaugcucaucgaggccgagcugaagugcuucggcaacaccgccguggccaagugcaacgagaagcacgacgaggaguucugcgacaugcugcggcuguucgacuucaacaagcaggcgauccagcgccugaaggcccccgcccagauguccauccagcugaucaacaaggccgucaacgcccucaucaacgaccagcugaucaugaagaaccaccuccgggacaucaugugcauccccuacugcaacuacagcaaguacugguaccucaaccacaccacgaccggcaagaccucccugcccaagugcuggcuggugagcaacggcuccuaccucaacgagacccacuucagcgacgacaucgagcagcaggcggacaacaugaucacggagaugcugcagaaggaguacauggagcgccaggggaagacgccccugggccucguggaccuguucgucuucuccaccagcuucuaccugaucuccaucuuccugcaccucgugaagaucccgacccaccggcacaucgugggcaagagcugccccaagccccaccgccugaaccacauggggaucugcuccugcgggcuguacaagcagcccggcgucccggugaaguggaagcggugaggacuagucccuguucccagagcccacuuuuuuuucuuuuuuugaaauaaaauagccugucuuucagaucucaaaggcucuuuucagagccaccaaaaaaaaaaaaaaaaaaaaaaaaaaaaaaaaaaaaaaaaaaaaaaaaaaaaaaaaaaaaaaaaaaaaaaaaaaaaaaaaaaaaaaaaaaaaaaaaaaaaa

SEQ ID NO: 15743 - RNA, 1767 nt, Artificial Sequence
  mRNA product Design a-2 (hSL-A100) comprising derived and/or modified sequence from LASV(G1442-SLE-2011;Clade IV)__AIT17180__GPCmut1 (opt1)
aggagaguccgcucagccagguugcagaagcggcuuagcguguguccuaaucuucucucugcguguagguaggccugugccgcaaacaagcuuaccaugggccagaucgugaccuucuuccaggaggucccccacgugaucgaggaggugaugaacaucguccugaucgcccucagcauccuggccgugcugaaggggcucuacaacguggcgaccugcggccugaucgggcuggucacguuccuccugcugugcggccgcuccugcaccaccacccucuacaaggggguguacgagcugcagacgcuggagcucaacauggagacccugaacaugaccaugccgcugagcugcaccaagaacaacucccaccacuacauccgggugggcaacgagacgggccucgagcugacccugaccaacaccagcaucaucaaccacaaguucugcaaccucuccgacgcccacaagaagaaccuguacgaccacgcccugaugagcaucaucuccacguuccaccucagcauccccaacuucaaccaguacgaggccauguccugcgacuucaacgggggcaagaucagcguccaguacaaccugucccacagcuacgccggggacgcggccaaccacugcggcaccguggccaacggggugcugcagaccuucaugcgcauggccuggggcggcuccuacaucgcgcucgacagcgggugcggcaacugggacugcaucaugaccuccuaccaguaccugaucauccagaacacgaccugggacgaccacugccaguucagccgccccucccccaucggguaccugggccuccugagccagcggacccgcgacgucuacaucucccggcgccgccggggcaccuucacguggacccugagcgacagcgaggggaaggacaccccgggcggguacugccugacccgguggaugcucaucgaggccgagcugaagugcuucggcaacacggccguggccaagugcaacgagaagcacgacgaggaguucugcgacaugcugcgccucuucgacuucaacaagcaggccauccagcggcugaaggcgcccgcccagauguccauccagcugaucaacaaggccgugaacgcccucaucaacgaccagcugaucaugaagaaccaccuccgcgacaucaugugcauccccuacugcaacuacagcaaguacugguaccugaacaacaccgccaccggcaagaccucccugcccaagugcuggcugaucagcaacggcuccuaccucaacgagacgcacuucagcgacgacaucgagcaggaggcggacaacaugaucaccgagaugcugcagaaggaguacauggagcggcaggggaagacgccccugggccucgucgaccuguucguguucuccaccagcuucuaccugaucuccaucuuccugcaccucgugaagaucccgacccaccgccacaucgucggcaagagcugccccaagccccaccggcugaaccacauggggaucugcuccugcgggcuguacaagcagcccggcgugccggugcgcuggaagcggugaggacuagucccuguucccagagcccacuuuuuuuucuuuuuuugaaauaaaauagccugucuuucagaucucaaaggcucuuuucagagccaccaaaaaaaaaaaaaaaaaaaaaaaaaaaaaaaaaaaaaaaaaaaaaaaaaaaaaaaaaaaaaaaaaaaaaaaaaaaaaaaaaaaaaaaaaaaaaaaaaaaaa

SEQ ID NO: 15744 - RNA, 1767 nt, Artificial Sequence
  mRNA product Design a-2 (hSL-A100) comprising derived and/or modified sequence from LASV(G3010-SLE-2013;Clade IV)__AIT17344__GPCmut1 (opt1)
aggagaguccgcucagccagguugcagaagcggcuuagcguguguccuaaucuucucucugcguguagguaggccugugccgcaaacaagcuuaccaugggccagaucgugaccuucuuccaggaggucccccacgugaucgaggaggugaugaacaucguccugaucgcccucagcauccuggccgugcugaaggggcucuacaacuucgcgaccugcggccugguggggcuggucacguuccuccugcugugcggccgcuccugcaccaccagccucuacaaggggguguacgagcugcagacccuggagcucaacauggagacgcugaacaugaccaugccgcuguccugcaccaagaacaacagccaccacuacaucauggugggcaacgagaccggccucgagcugacgcugaccaacaccuccaucaucaaccacaaguucugcaaccucagcgacgcccacaagaagaaccuguacaaccacgcccugauguccaucaucagcaccuuccaccucuccauccccaacuucaaccaguacgaggccaugagcugcgacuucaacgggggcaagaucuccguccaguacaaccugagccacuccuacgccggggacgcggccagccacugcggcacgguggccaacggggugcugcagaccuucaugcggauggccuggggcggcuccuacaucgcgcucgacagcgggugcggcaagugggacugcaucaugaccuccuaccaguaccugaucauccagaacaccacgugggaggaccacugccaguucagccgccccucccccaucggguaccugggccuccugagccagcggacccgcgacaucuacaucagccggcgccgccggggcaccuucaccuggacgcuguccgacagcgaggggaaggacaccccgggcggguacugccugacccgguggaugcucaucgaggccgagcugaagugcuucggcaacaccgccgucgccaagugcaacgagaagcacgacgaggaguucugcgacaugcugcgccucuucgacuucaacaagcaggccauccagcggcugaagacgcccgcgcagauguccauccagcugaucaacaaggccgugaacgcccucaucaacgaccagcugaucaugaagaaccaccuccgcgacaucaugugcauccccuacugcaacuacagcaaguacugguaccugaaccacaccaccaccggcaagacgucccugcccaagugcuggcuggugagcaacggcuccuaccucaacgagacccacuucagcgacgacaucgagcagcaggccgacaacaugaucaccgagaugcugcagaaggaguacauggagcggcaggggaagacgccccugggccucgucgaccuguucguguucuccaccagcuucuaccugaucuccaucuuccugcaccucgugaagaucccgacccaccgccacaucgucggcaagagcugccccaagccccaccggcugaaccacauggggaucugcuccugcgggcuguacaagcagcccggcgugccggugcgcuggaagcggugaggacuagucccuguucccagagcccacuuuuuuuucuuuuuuugaaauaaaauagccugucuuucagaucucaaaggcucuuuucagagccaccaaaaaaaaaaaaaaaaaaaaaaaaaaaaaaaaaaaaaaaaaaaaaaaaaaaaaaaaaaaaaaaaaaaaaaaaaaaaaaaaaaaaaaaaaaaaaaaaaaaaa

SEQ ID NO: 15745 - RNA, 1767 nt, Artificial Sequence
  mRNA product Design a-2 (hSL-A100) comprising derived and/or modified sequence from LASV(G502-SLE-2009;Clade IV)__AIT17126__GPCmut1 (opt1)
aggagaguccgcucagccagguugcagaagcggcuuagcguguguccuaaucuucucucugcguguagguaggccugugccgcaaacaagcuuaccaugggccagaucgugaccuucuuccaggaggucccccacgugaucgaggaggugaugaacaucguccugaucgcccucagcauccuggccgugcugaaggggcucuacaacuucgcgaccugcggccugguggggcugcucacguuccugcugcucugcggccgcuccugcaccaccgggcuguacaagggcgucuacgagcugcagacccucgagcugaacauggagacgcugaacaugaccaugccgcucagcugcaccaagaacaacucccaccacuacaucauggugggcaacgagaccgggcuggagcugacgcucaccaacaccagcaucaucaaccacaaguucugcaaccuguccgacgcccacaagaagaaccuguacgaccacgcccucaugagcaucaucuccaccuuccaccugagcauccccaacuucaaccaguacgaggccauguccugcgacuucaacggcgggaagaucagcgugcaguacaaccugucccacagcuacgccggcgacgcggccgaccacugcgggacggucgccaacggcgugcuccagaccuucaugcggauggccuggggcggguccuacaucgcgcuggacagcggcugcgggcggugggacugcaucaugaccuccuaccaguaccugaucauccagaacaccacgugggaggaccacugccaguucagccgccccucccccaucggcuaccucggccugcugagccagcggacccgcgacaucuacaucucccggcgccgccgggggaccuucaccuggacgcugagcgacagcgagggcaaggacacccccgggggcuacugccucacccgguggaugcugaucgaggccgagcugaagugcuucgggaacaccgccguggccaagugcaacgagaagcacgacgaggaguucugcgacaugcuccgccuguucgacuucaacaagcaggccauccagcggcugaaggcgcccgcccagauguccauccagcucaucaacaaggccgucaacgcccugaucaacgaccagcuggugaugaagaaccaccuccgcgacaucaugugcauccccuacugcaacuacagccgguacugguaccugaaccacacgaccaccggccgcaccucccugcccaagugcuggcucgugagcaacggguccuaccugaacgagacgcacuucagcgacgacaucgagcagcaggccgacaacaugaucaccgagaugcugcagaaggaguacauggagcggcagggcaagaccccgcucgggcuggucgaccuguucguguucuccaccagcuucuaccugaucuccaucuuccuccaccuggugaagaucccgacgcaccgccacaucgucggcaagagcugccccaagccccaccggcugaaccacauggggaucugcuccugcggccucuacaagcagcccggcgugccggugaaguggaagcgcugaggacuagucccuguucccagagcccacuuuuuuuucuuuuuuugaaauaaaauagccugucuuucagaucucaaaggcucuuuucagagccaccaaaaaaaaaaaaaaaaaaaaaaaaaaaaaaaaaaaaaaaaaaaaaaaaaaaaaaaaaaaaaaaaaaaaaaaaaaaaaaaaaaaaaaaaaaaaaaaaaaaaa

SEQ ID NO: 15746 - RNA, 1767 nt, Artificial Sequence
  mRNA product Design a-2 (hSL-A100) comprising derived and/or modified sequence from LASV(G733-SLE-2010;Clade IV)__AIT17154__GPCmut1 (opt1)
aggagaguccgcucagccagguugcagaagcggcuuagcguguguccuaaucuucucucugcguguagguaggccugugccgcaaacaagcuuaccaugggccagaucgugaccuucuuccaggaggucccccacgugaucgaggaggugaugaacaucguccugaucgcccucagcauccuggccgugcugaaggggcucuacaacuucgcgaccugcggcaucguggggcuggucuccuuccugcuccugugcggccgcagcugcacgaccucccuguacaaggggguguacgagcuccagacccuggagcugaacauggagacccucaacaugacgaugccgcugagcugcaccaagaacaacucccaccacuacaucauggugggcaacgagaccggccuggagcucacccugacgaacaccagcaucaucaaccacaaguucugcaaccuguccgacgcccacaagaagaaccucuacgaccacgcccugaugagcaucaucuccaccuuccaccugagcauccccaacuucaaccaguacgaggccauguccugcgacuucaacgggggcaagaucagcguccaguacaaccucucccacagcuacgccggggacgcggccaaccacugcggcaccaucgccaacggggugcugcagacguucaugcggauggccuggggcggcuccuacaucgcgcuggacagcgggugcgaccggugggacugcaucaugaccuccuaccaguaccucaucauccagaacaccaccugggaggaccacugccaguucagccgccccucccccaucggcuaccuggggcugcucagccagcggacgcgcgacaucuacaucagccggcgccgccggggcaccuucaccuggacccucuccgacagcgagggcaaggacacgcccgggggcuacugccugacccgguggaugcugaucgaggccgagcucaagugcuucgggaacaccgccguggccaagugcaacgagaagcacgacgaggaguucugcgacaugcugcgccuguucgacuucaacaagcaggccauccagcggcucaaggcgcccgcccagauguccauccagcugaucaacaaggccgucaacgcccugaucaacgaccagcucaucaugaagaaccaccuccgcgacaucaugugcauccccuacugcaacuacagcaaguacugguaccugaaccacaccacgaccgggaagaccucccugcccaagugcuggcuggugagcaacggcuccuaccugaacgagacccacuucagcgacgacaucgagcagcaggccgacaacaugaucacggagaugcuccagaaggaguacauggagcggcagggcaagaccccgcuggggcugguggaccucuucgucuucuccaccagcuucuaccugaucuccaucuuccugcaccuggugaagaucccgacccaccgccacguggucggcaagagcugccccaagccccaccggcucaaccacauggggaucugcuccugcggccuguacgggcagcccggcgugccggugaaguggaagcgcugaggacuagucccuguucccagagcccacuuuuuuuucuuuuuuugaaauaaaauagccugucuuucagaucucaaaggcucuuuucagagccaccaaaaaaaaaaaaaaaaaaaaaaaaaaaaaaaaaaaaaaaaaaaaaaaaaaaaaaaaaaaaaaaaaaaaaaaaaaaaaaaaaaaaaaaaaaaaaaaaaaaaa

SEQ ID NO: 15747 - RNA, 1767 nt, Artificial Sequence
  mRNA product Design a-2 (hSL-A100) comprising derived and/or modified sequence from MOPV/LASV reassortant(IGS-1;Clade IV)__AFY05576__GPCmut1 (opt1)
aggagaguccgcucagccagguugcagaagcggcuuagcguguguccuaaucuucucucugcguguagguaggccugugccgcaaacaagcuuaccaugggccagaucgugaccuucuuccaggaggucccccacgugaucgaggaggugaugaacaucguccugaucgcccucagcgugcuggccgugcugaaggggcucuacaacuucgcgaccugcggccuggucgggcuggugacguuccuccugcugugcggccgcuccugcaccaccagccucuacaaggggguguacgagcugcagacccuggagcucaacauggagacgcugaacaugaccaugccgcuguccugcaccaagaacaacagccaccacuacaucauggucggcaacgagaccggccucgagcugacgcugaccaacaccuccaucaucaaccacaaguucugcaaccucagcgacgcccacaagaagaaccuguacgaccacgcccugauguccaucaucagcaccuuccaccucuccauccccaacuucaaccaguacgaggccaugagcugcgacuucaacgggggcaagaucuccgugcaguacaaccugagccacuccuacgccggggacgcggccaaccacugcggcacgguggccaacgggguccugcagaccuucaugcggauggccuggggcggcagcuacaucgcgcucgacuccgggugcggcaacugggacugcaucaugaccagcuaccaguaccugaucauccagaacaccacgugggaggaccacugccaguucucccggcccagccccaucggguaccugggccuccugucccagcgcacccgggacaucuacaucagccgccggcgccggggcaccuucaccuggacgcugagcgacuccgagggggaggacaccccgggcggguacugccugacccgcuggaugcucaucgaggccgagcugaagugcuucggcaacaccgccguggccaagugcaacgagaagcacgacgaggaguucugcgacaugcugcggcuguucgacuucaacaagcaggccauccagcgccugaaggcgcccgcccagaugagcauccagcugaucaacaaggccgugaacgcccucaucaacgaccagcugaucaugaagaaccaccuccgggacaucaugugcauccccuacugcaacuacuccaaguacugguaccucaaccacacgaccaccggccgcaccagccugcccaagugcuggcuggucuccaacggcagcuaccucaacgagacgcacuucuccgacgacaucgagcagcaggccgacaacaugaucaccgagaugcugcagaaggaguacauggagcggcaggggaagacgccccugggccucguggaccuguucguguucagcaccuccuucuaccugaucagcaucuuccugcaccucgucaagaucccgacccaccgccacaucguggggaaguccugccccaagccccaccggcugaaccacaugggcaucugcagcugcgggcuguacaagcagcccggcgugccggucaaguggaagcgcugaggacuagucccuguucccagagcccacuuuuuuuucuuuuuuugaaauaaaauagccugucuuucagaucucaaaggcucuuuucagagccaccaaaaaaaaaaaaaaaaaaaaaaaaaaaaaaaaaaaaaaaaaaaaaaaaaaaaaaaaaaaaaaaaaaaaaaaaaaaaaaaaaaaaaaaaaaaaaaaaaaaaa

SEQ ID NO: 15748 - RNA, 1767 nt, Artificial Sequence
  mRNA product Design a-2 (hSL-A100) comprising derived and/or modified sequence from LASV(LM765-SLE-2012;Clade IV)__AIT17814__GPCmut1 (opt1)
aggagaguccgcucagccagguugcagaagcggcuuagcguguguccuaaucuucucucugcguguagguaggccugugccgcaaacaagcuuaccaugggccagaucgugaccuucuuccaggaggucccccacgugaucgaggaggugaugaacaucguccugaucgcccucagcauccuggccgugcugaaggggcucuacaacuucgcgaccugcggccugguggggcuggucacguuccuccugcugugcggccgcuccugcaccaccagccucuacaaggggguguacgagcugcagacccuggagcucaacauggagacgcugaacaugaccaugccgcuguccugcaccaagaacaacagccaccacuacaucauggugggcaacgagaccggccucgagcugacgcugaccaacaccuccaucaucgaccacaaguucugcaaccucagcgacgcccaccggaagaaccuguacgaccacgcccugauguccaucaucagcaccuuccaccucuccauccccaacuucaaccaguacgaggccaugagcugcgacuucaacgggggcaagaucuccguccaguacaaccugagccacuccuacgccaaggacgcggccgaccacugcgggacgguggccaacggcgugcugcagaccuucaugcgcauggccuggggcgggagcuacaucgcgcucgacuccggcugcgggcgcugggacugcaucaugaccagcuaccaguaccugaucauccagaacaccacgugggaggaccacugccaguucucccggcccagccccaucggcuaccuggggcuccugucccagcgcacccgggacaucuacaucagccgccggcgccggggcaccuucaccuggacgcugagcgacuccgagggcaaggacacccccgggggcuacugccugacccgcuggaugcucaucgaggccgagcugaagugcuucgggaacaccgccgucgccaagugcaacgagaagcacgacgaggaguucugcgacaugcugcggcuguucgacuucaacaagcaggccauccagcgccugaaggcgcccgcccagaugagcauccagcugaucaacaaggccgugaacgcccucaucaacgaccagcugaucaugaagaaccaccuccgggacaucaugugcauccccuacugcaacuacuccaaguacugguaccucaaccacacgaccaccgggaagaccagccugcccaagugcuggcugguguccaacggcagcuaccucaacgagacgcacuucuccgacgacaucgagcagcaggccgacaacaugaucaccgagaugcugcagaaggaguacauggagcgccagggcaagaccccgcuggggcucgucgaccuguucguguucagcaccuccuucuaccugaucagcaucuuccugcaccucgugaagaucccgacgcaccggcacaucgucggcaagcccugccccaagccccaccgccugaaccacauggggaucugcuccugcggccuguacaagcagccgggggugcccgugaaguggaagcggugaggacuagucccuguucccagagcccacuuuuuuuucuuuuuuugaaauaaaauagccugucuuucagaucucaaaggcucuuuucagagccaccaaaaaaaaaaaaaaaaaaaaaaaaaaaaaaaaaaaaaaaaaaaaaaaaaaaaaaaaaaaaaaaaaaaaaaaaaaaaaaaaaaaaaaaaaaaaaaaaaaaaa

SEQ ID NO: 15749 - RNA, 1767 nt, Artificial Sequence
  mRNA product Design a-2 (hSL-A100) comprising derived and/or modified sequence from LASV(LM776-SLE-2012;Clade IV)__AIT17824__GPCmut1 (opt1)
aggagaguccgcucagccagguugcagaagcggcuuagcguguguccuaaucuucucucugcguguagguaggccugugccgcaaacaagcuuaccaugggccagaucgugaccuucuuccaggaggucccccacgugaucgaggaggugaugaacaucguccugaucgcccucagcauccuggccgugcugaaggggcucuacaacuucgcgaccugcggccugguggggcuggucacguuccuccugcugugcggccgcuccugcaccaccagcguguacaaggggguguacgagcuccagacccuggagcugaacauggagacgcucaacaugaccaugccgcuguccugcaccaagaacaacagccaccacuacaucauggucggcaacgagaccggccuggagcucacgcugaccaacaccuccaucaucaaccacaaguucugcaaccugagcgacgcccacaagaagaaccucuacgaccacgcccugauguccaucaucagcaccuuccaccuguccauccccaacuucaaccaguacgaggccaugagcugcgacuucaacgggggcaagaucuccgugcaguacaaccucagccacuccuacgccggggacgcggccaaccacugcggcacgguggccaacgggguccugcagaccuucaugcggauggccuggggcggcagcuacaucgcgcuggacuccgggugcggcaagugggacugcaucaugaccagcuaccaguaccucaucauccagaacaccacgugggaggaccacugccaguucucccgccccagccccaucggguaccugggccugcucucccagcggacccgcgacaucuacaucagccggcgccgccggggcaccuucaccuggacgcucagcgacuccgaggggaaggacaccccgggcggguacugccugacccgguggaugcugaucgaggccgagcucaagugcuucggcaacaccgccguggccaagugcaacgagaagcacgacgaggaguucugcgacaugcugcgccuguucgacuucaacaagcaggccauccagcggcucaaggcgcccgcccagaugagcauccagcugaucaacaaggccgugaacgcccugaucaacgaccagcucaucaugaagaaccaccuccgcgacaucaugugcauccccuacugcaacuacuccaaguacugguaccugaaccacacgaccaccggcaagaccagccugcccaagugcuggcuggucuccaacggcagcuaccugaacgagacgcacuucuccgacgacaucgagcagcaggccgacaacaugaucaccgagaugcuccagaaggaguacauggagcggcaggggaagacgccccugggccugguggaccucuucguguucagcaccuccuucuaccugaucagcaucuuccugcaccuggucaagaucccgacccaccgccacaucguggggaaguccugccccaagccccaccggcucaaccacaugggcaucugcagcugcgggcuguacaagcagcccggcgugccgguccgcuggaagcggugaggacuagucccuguucccagagcccacuuuuuuuucuuuuuuugaaauaaaauagccugucuuucagaucucaaaggcucuuuucagagccaccaaaaaaaaaaaaaaaaaaaaaaaaaaaaaaaaaaaaaaaaaaaaaaaaaaaaaaaaaaaaaaaaaaaaaaaaaaaaaaaaaaaaaaaaaaaaaaaaaaaaa

SEQ ID NO: 15750 - RNA, 1767 nt, Artificial Sequence
  mRNA product Design a-2 (hSL-A100) comprising derived and/or modified sequence from LASV(Mad39;Clade IV)__ANH09722__GPCmut1 (opt1)
aggagaguccgcucagccagguugcagaagcggcuuagcguguguccuaaucuucucucugcguguagguaggccugugccgcaaacaagcuuaccaugggccagaucgugaccuucuuccaggaggucccccacgugaucgaggaggugaugaacaucguccugaucgcccucagcauccuggccgugcugaaggggcucuacaacguggcgaccugcggccugaucgggcuggucacguuccuccugcugugcggccgcuccugcaccaccacccucuacaaggggguguacgagcugcaggcccuggagcucaacauggagacgcugaacaugaccaugccgcugagcugcaccaagaacaacucccaccacuacauccgggugggcaacgagaccggccucgagcugacgcugaccaacaccagccucaucaaccacaaguucugcaaccuguccgacgcccacaagaagaaccuguacgaccacgcccucaugagcaucaucuccaccuuccaccugagcauccccaacuucaaccaguacgaggccauguccugcgacuucaacgacgggaagaucagcguccaguacaaccugucccacacguacgcgggcgacaccgccaaccacugcgggaccguggccaacggcgugcuccagaccuucaugcgcauggccuggggcgggagcuacaucgcgcuggacuccggcugcgggggcugggacugcaucaugacgagcuaccaguaccugaucauccagaacaccaccugggaggaccacugccaguucucccggcccagccccaucggguaccucggccugcugucccagcggacccgcgacaucuacaucagccggcgccgccggggcacguucaccuggacccuguccgacagcgaggggaaggacaccccgggcggguacugccucacgcgguggaugcugaucgaggccgagcugaagugcuucggcaacaccgccgucgccaagugcaacgagaagcacgacgaggaguucugcgacaugcuccgccuguucgacuucaacaagcaggccauccagcggcugaaggcgcccgcccagaugagcauccagcucaucaacaaggccgugaacgcccugaucaacgaccagcugaucaugaagaaccaccuccgcgacaucaugugcauccccuacugcaacuacuccaaguacugguaccugaaccacaccgugaccggcaagacgagccugcccaagugcuggcucgucuccaacggcagcuaccugaacgagacccacuucuccgacgacaucgagcagcaggccgacaacaugaucaccgagaugcugcagaaggaguacauggagcggcaggggaagacgccccucggccugguggaccuguucguguucagcaccuccuucuaccugaucagcaucuuccuccaccuggucaagaucccgacccaccgccacgugguggggaagcccugccccaagccccaccggcugaaccacaugggcaucugcuccugcggguucuacaagcagccgggcguccccgugcgcuggaagcggugaggacuagucccuguucccagagcccacuuuuuuuucuuuuuuugaaauaaaauagccugucuuucagaucucaaaggcucuuuucagagccaccaaaaaaaaaaaaaaaaaaaaaaaaaaaaaaaaaaaaaaaaaaaaaaaaaaaaaaaaaaaaaaaaaaaaaaaaaaaaaaaaaaaaaaaaaaaaaaaaaaaaa

SEQ ID NO: 15751 - RNA, 1767 nt, Artificial Sequence
  mRNA product Design a-2 (hSL-A100) comprising derived and/or modified sequence from LASV(Z0947-SLE-2011;Clade IV)__AIT17840__GPCmut1 (opt1)
aggagaguccgcucagccagguugcagaagcggcuuagcguguguccuaaucuucucucugcguguagguaggccugugccgcaaacaagcuuaccaugggccagaucgugaccuucuuccaggaggucccccacgugaucgaggaggugaugaacaucguccugaucgcccucagcauccuggccgugcugaaggggcucuacaacuucgcgaccugcggccugguggggcuggucacguuccuccugcugugcggccgcuccugcaccaucagccucuacaaggggguguacgagcugcagacccuggagcucaacauggagacccugaacaugacgaugccgcuguccugcaccaagaacaacagccaccacuacaucauggugggcaacgagaccggccucgagcugacccugacgaacaccuccaucaucaaccacaaguucugcaaccucagcgacgcccacaagaagaaccuguacgaccacgcccugauguccaucaucagcaccuuccaccucuccauccccaacuucaaccaguacgaggccaugagcugcgacuucaacgggggcaagaucuccguccaguacaaccugagccacuccuacgccggggacgcggccaaccacugcggcaccguggccaacggggugcugcagacguucaugcggauggccuggggcggcagcuacaucgcgcucgacuccgggugcgaccggugggacugcaucaugaccagcuaccaguaccugaucauccagaacaccaccugggaggaccacugccaguucucccgccccagccccaucggcuaccuggggcuccugucccagcggacgcgcgacaucuacaucagccggcgccgccggggcaccuucaccuggacccugagcgacuccgagggcaaggacacgcccgggggcuacugccugacccgguggaugcucaucgaggccgagcugaagugcuucgggaacaccgccgucgccaagugcaacgagaagcacgacgaggaguucugcgacaugcugcgccucuucgacuucaacaagcaggccauccagcggcugaaggcgcccgcccagaugagcauccagcugaucaacaaggccgugaacgcccucaucaacgaccagcugaucaugaagaaccaccuccgcgacaucaugugcauccccuacugcaacuacuccaaguacugguaccugaaccacaccacgaccgggaagaccagccugcccaagugcuggcugguguccaacggcagcuaccucaacgagacccacuucuccgacgacaucgagcagcaggccgacaacaugaucacggagaugcugcagaaggaguacauggagcggcagggcaagaccccgcuggggcucgucgaccuguucguguucagcaccuccuucuaccugaucagcaucuuccugcaccucgugaagaucccgacccaccgccacaucgucggcaagcccugccccaagccccaccggcugaaccacauggggaucugcuccugcggccuguacaagcagccgggggugcccgugaaguggaagcgcugaggacuagucccuguucccagagcccacuuuuuuuucuuuuuuugaaauaaaauagccugucuuucagaucucaaaggcucuuuucagagccaccaaaaaaaaaaaaaaaaaaaaaaaaaaaaaaaaaaaaaaaaaaaaaaaaaaaaaaaaaaaaaaaaaaaaaaaaaaaaaaaaaaaaaaaaaaaaaaaaaaaaa

SEQ ID NO: 15752 - RNA, 1767 nt, Artificial Sequence
  mRNA product Design a-2 (hSL-A100) comprising derived and/or modified sequence from LASV(Josiah;Clade IV)__NP_694870__GPCmut1 (opt1)
aggagaguccgcucagccagguugcagaagcggcuuagcguguguccuaaucuucucucugcguguagguaggccugugccgcaaacaagcuuaccaugggccagaucgugaccuucuuccaggaggucccccacgugaucgaggaggugaugaacaucguccugaucgcccucagcgugcuggccgugcugaaggggcucuacaacuucgcgaccugcggccuggucgggcuggugacguuccuccugcugugcggccgcuccugcaccaccagccucuacaaggggguguacgagcugcagacccuggagcucaacauggagacgcugaacaugaccaugccgcuguccugcaccaagaacaacagccaccacuacaucauggucggcaacgagaccggccucgagcugacgcugaccaacaccuccaucaucaaccacaaguucugcaaccucagcgacgcccacaagaagaaccuguacgaccacgcccugauguccaucaucagcaccuuccaccucuccauccccaacuucaaccaguacgaggccaugagcugcgacuucaacgggggcaagaucuccgugcaguacaaccugagccacuccuacgccggggacgcggccaaccacugcggcacgguggccaacgggguccugcagaccuucaugcggauggccuggggcggcagcuacaucgcgcucgacuccgggugcggcaacugggacugcaucaugaccagcuaccaguaccugaucauccagaacaccacgugggaggaccacugccaguucucccgccccagccccaucggguaccugggccuccugucccagcggacccgcgacaucuacaucagccggcgccggcgcggcaccuucaccuggacgcugagcgacuccgaggggaaggacaccccgggcggguacugccucacccgguggaugcugaucgaggccgagcugaagugcuucggcaacaccgccguggccaagugcaacgagaagcacgacgaggaguucugcgacaugcuccgccuguucgacuucaacaagcaggccauccagcggcugaaggcgcccgcccagaugagcauccagcucaucaacaaggccgugaacgcccugaucaacgaccagcugaucaugaagaaccaccuccgcgacaucaugugcauccccuacugcaacuacuccaaguacugguaccugaaccacacgaccaccgggcggaccagccugcccaagugcuggcucgucuccaacggcagcuaccugaacgagacgcacuucuccgacgacaucgagcagcaggccgacaacaugaucaccgagaugcugcagaaggaguacauggagcgccagggcaagaccccgcucgggcugguggaccuguucguguucagcaccuccuucuaccucaucagcaucuuccugcaccuggucaagauccccacgcaccggcacaucgugggcaaguccugccccaagccccaccgccugaaccacauggggaucugcagcugcggccucuacaagcagccgggggugcccgucaaguggaagcggugaggacuagucccuguucccagagcccacuuuuuuuucuuuuuuugaaauaaaauagccugucuuucagaucucaaaggcucuuuucagagccaccaaaaaaaaaaaaaaaaaaaaaaaaaaaaaaaaaaaaaaaaaaaaaaaaaaaaaaaaaaaaaaaaaaaaaaaaaaaaaaaaaaaaaaaaaaaaaaaaaaaaa

SEQ ID NO: 15753 - RNA, 1764 nt, Artificial Sequence
  mRNA product Design a-2 (hSL-A100) comprising derived and/or modified sequence from LASV(LP;Clade I)__AAF86701__GPCmut1 (opt1)
aggagaguccgcucagccagguugcagaagcggcuuagcguguguccuaaucuucucucugcguguagguaggccugugccgcaaacaagcuuaccaugggccagaucaucaccuucuuccaggaggugccccacgucaucgaggaggugaugaacaucgugcugaucgcccucagccugcuggccauccucaaggggcuguacaacaucgcgaccugcggcaucaucgggcuggucgccuuccucuuccugugcggcaaguccugcagccugacgcucaagggcggguacgagcugcagacccuggagcucaacauggagacccugaacaugaccaugccgcuguccugcacgaagaacagcucccaccacuacauccgcgugggcaacgagaccgggcucgagcugacccugaccaacacgagcaucaucaaccacaaguucugcaaccucuccgacgcccacaagaagaaccuguacgaccacgcccugaugagcaucaucuccaccuuccaccucagcauccccaacuucaaccaguacgaggccauguccugcgacuucaacggcgggaagaucagcgugcaguacaaccugucccacagcuacgcgggcgacgccgccgagcacugcgggaccgucgccaacggcgugcugcagaccuucaugcggauggcguggggcgggcgcuacaucgcccucgacuccggcugcgggaacugggacugcaucaugacgagcuaccaguaccugaucauccagaacaccaccugggaggaccacugccaguucucccggcccagccccaucggcuaccugggccuccugucccagcgcacccgggacaucuacaucagccgccggcgccgggggacguucaccuggacccugagcgacuccgagggcaacgagacccccgggggcuacugccucacgcgcuggaugcugaucgaggccgagcugaagugcuucgggaacaccgccguggccaagugcaacgagaagcacgacgaggaguucugcgacaugcuccggcuguucgacuucaacaagcaggcgauccgccggcugaaggccccggcccagaugagcauccagcucaucaacaaggccgucaacgcccugaucaacgaccagcugaucaugaagaaccaccuccgcgacaucaugugcauccccuacugcaacuacuccaaguacugguaccugaaccacaccagcuccggccggaccagccugcccaagugcuggcucaucuccaacggcagcuaccugaacgagacgcaguucuccgacgacaucgagcagcaggcggacaacaugaucaccgagaugcugcagaaggaguacaucgagcgccaggggaagaccccgcucggccugguggacaucuucaucuucagcaccuccuucuaccugaucagcaucuuccuccaccugaucaagauccccacgcaccggcacaucguggggaagcccugccccaagccgcaccgccugaaccacaugggcgucugcuccugcgggcuguacaagcaccccggcgugcccaccaaguggaagcggugaggacuagucccuguucccagagcccacuuuuuuuucuuuuuuugaaauaaaauagccugucuuucagaucucaaaggcucuuuucagagccaccaaaaaaaaaaaaaaaaaaaaaaaaaaaaaaaaaaaaaaaaaaaaaaaaaaaaaaaaaaaaaaaaaaaaaaaaaaaaaaaaaaaaaaaaaaaaaaaaaaaaa

SEQ ID NO: 15754 - RNA, 1764 nt, Artificial Sequence
  mRNA product Design a-2 (hSL-A100) comprising derived and/or modified sequence from LASV(803213;Clade II)__AAF86703__GPCmut1 (opt1)
aggagaguccgcucagccagguugcagaagcggcuuagcguguguccuaaucuucucucugcguguagguaggccugugccgcaaacaagcuuaccaugggccagaucaucaccuucuuccaggaggugccccacgucaucgaggaggugaugaacaucgugcugaucgcccucagccugcuggccauccucaaggggaucuacaacgucgcgaccugcggccuguucgggcugaucuccuuccuccugcugugcggccgcagcugcuccgugacguacaaggggguguacgagcuccagacccuggagcugaacauggccaaccucaacaugaccaugccgcugagcugcaccaagaacaacucccaccacuacaucauggucggcaacgagacgggccuggagcucacccugaccaacaccagcaucaucaaccacaaguucugcaaccuguccgacgcccacaagaagaaccucuacgaccacgcccugaugagcaucaucuccacguuccaccugagcauccccaacuucaaccaguacgaggccauguccugcgacuucaacgggggcaagaucagcgugcaguacaaccucucccacagcuucgcgguggacgccgccaaccacugcgggaccaucgccaacggcguccugcagaccuucaugcggauggcguggggcggguccuacaucgcccuggacagcggcugcgggaacugggacugcaucaugaccuccuaccaguaccucaucauccagaacacgaccugggaggaccacugccaguucagccgccccucccccaucggcuaccuggggcugcucagccagcggacccgcgacaucuacaucagccggcgccggcgcggcaccuucacguggacccuguccgacagcgagggcaacgaggcccccgggggcuacugccugacccgguggaugcucaucgaggccgagcugaagugcuucgggaacaccgccguggcgaagugcaacgagaagcacgacgaggaguucugcgacaugcugcgccucuucgacuucaacaagcaggccaucaagcggcugaagacgccggcccagauguccauccagcugaucaacaaggccgugaacgcccucaucaacgaccagcugaucaugaagaaccaccuccgcgacaucaugugcauccccuacugcaacuacagccgguacugguaccugaaccacaccgucaccggcaagaccucccugccccgcugcuggcuggugagcaacggguccuaccucaacgagacgcacuucagcgacgacaucgagcagcaggcggacaacaugaucaccgagaugcugcagaaggaguacauggaccggcagggcaagaccccgcugggccucguggaccuguucgucuucuccaccagcuucuaccugaucuccaucuuccuccaccuggugaagauccccacgcaccgccacaucguggggaagcccugccccaagccgcaccggcugaaccacaugggcaucugcagcugcgggcuguacaagcaccccggcguccccgugaaguggaagcgcugaggacuagucccuguucccagagcccacuuuuuuuucuuuuuuugaaauaaaauagccugucuuucagaucucaaaggcucuuuucagagccaccaaaaaaaaaaaaaaaaaaaaaaaaaaaaaaaaaaaaaaaaaaaaaaaaaaaaaaaaaaaaaaaaaaaaaaaaaaaaaaaaaaaaaaaaaaaaaaaaaaaaa

SEQ ID NO: 15755 - RNA, 1764 nt, Artificial Sequence
  mRNA product Design a-2 (hSL-A100) comprising derived and/or modified sequence from LASV(GA391;Clade III)__CAA36645__GPCmut1 (opt1)
aggagaguccgcucagccagguugcagaagcggcuuagcguguguccuaaucuucucucugcguguagguaggccugugccgcaaacaagcuuaccaugggccagaucgugaccuucuuccaggaggucccccacgugaucgaggaggugaugaacaucguccugaucgcccucagcauccuggccauccugaaggggcucuacaacguggcgaccugcggccugaucgggcuggugacguuccuccugcuguccggccgcagcugcucccucaucuacaaggggaccuacgagcugcagacccuggagcucaacauggagacccugaacaugacgaugccgcugagcugcaccaagaacaacucccaccacuacauccgggucggcaacgagaccggccucgagcugacccugacgaacaccagcauccucaaccacaaguucugcaaccuguccgacgcccacaagcgcaaccuguacgaccacagccucauguccaucaucagcaccuuccaccuguccauccccaacuucaaccaguacgaggccaugagcugcgacuucaacgggggcaagaucaccgugcaguacaaccugucccacagcuucgccguggacgccgcggggcacugcggcacgcucgccaacgggguccugcagaccuucaugcggauggccuggggcggcuccuacaucgcccuggacagcgggugcggcaacugggacugcaucaugaccuccuaccaguaccucaucauccagaacaccacgugggacgaccacugccaguucagccgccccucccccaucggguaccugggccugcucagccagcggacccgcgacaucuacaucagccggcgccggcgcggcaccuucaccuggacgcuguccgacagcgaggggaacgagaccccgggcggguacugccugacccgguggaugcucaucgaggcggagcugaagugcuucggcaacaccgccguggccaagugcaacgagaagcacgacgaggaguucugcgacaugcugcgccucuucgacuucaacaagcaggccauccggcgccugaagacgcccgcccagauguccauccagcugaucaacaaggcggugaacgcccucaucaacgaccagcugaucaugaagaaccaccuccgggacaucaugugcauccccuacugcaacuacagccgcuacugguaccugaaccacaccuccaccgggaagaccagccugccccggugcuggcugaucuccaacggcagcuaccucaacgagacgaaguucuccgacgacaucgagcagcaggccgacaacaugaucaccgagaugcugcagaaggaguacaucgaccgccagggcaagaccccgcuggggcucgucgaccuguucguguucagcaccuccuucuaccugaucagcaucuuccugcaccucgugaagauccccacgcaccggcacaucgucggcaagcccugccccaagccgcaccgccugaaccacauggggaucugcuccugcggccuguacaagcagcccggggugcccgugcgguggaagcgcugaggacuagucccuguucccagagcccacuuuuuuuucuuuuuuugaaauaaaauagccugucuuucagaucucaaaggcucuuuucagagccaccaaaaaaaaaaaaaaaaaaaaaaaaaaaaaaaaaaaaaaaaaaaaaaaaaaaaaaaaaaaaaaaaaaaaaaaaaaaaaaaaaaaaaaaaaaaaaaaaaaaaa

SEQ ID NO: 15756 - RNA, 1767 nt, Artificial Sequence
  mRNA product Design a-2 (hSL-A100) comprising derived and/or modified sequence from LASV(AV;Clade V)__CCA30314__GPCmut1 (opt1)
aggagaguccgcucagccagguugcagaagcggcuuagcguguguccuaaucuucucucugcguguagguaggccugugccgcaaacaagcuuaccaugggccagaucgugaccuucuuccaggaggucccccacgugaucgaggaggugaugaacaucguccugaucgcccucagcauccuggccgugcugaaggggcucuacaacaucgcgaccugcggccugaucgggcugaucacguuccuccugcugugcggccgcuccugcagcuccaaccucuacaaggggguguacgagcugcagagccuggaccucaacauggagacccugaacaugaccaugccgcuguccugcaccaagaacaacagccaccacuacauccgggucggcaacgacacgggccucgagcugacccugaccaacaccuccauccucaaccacaaguucugcaaccugagcgacgcccacaagaaggaccuguacgaccacgcccucauguccaucaucagcacguuccaccuguccauccccaacuucaaccaguacgaggccaugagcugcgacuucaacgggggcaagaucuccgugcaguacaaccugagccacuccuacgccaucgacgcggccaaccacugcgggaccguggccaacggcauccuccagaccuucaugcgcauggccuggggcgggagcuacaucgcgcuggacuccggcugcgggaacugggacugcaucaugaccagcuaccaguaccugaucauccagaacacgaccugggagaaccacugccaguucucccggcccagccccaucggcuaccucgggcugcugagccagcgcacccgggacaucuacaucucccgccggcgccggggcaccuucacguggacccucagcgacuccgagggcaacgccacccccgggggcuacugccugacccgcuggaugcugaucgaggccgagcucaagugcuucgggaacacggccgucgccaagugcaacgagaagcacgacgaggaguucugcgacaugcugcggcuguucgacuucaacaagcaggcgaucagccgccucaaguccccggcccagaugagcauccagcugaucaacaaggccgugaacgcccugaucaacgaccagcucaucaugaagaaccaccuccgggacaucaugugcauccccuacugcaacuacuccaaguacugguaccugaaccacaccaucaccggcaagaccagccugcccaagugcuggcugguguccaacgggagcuaccugaacgagacgcacuucuccgacgacaucgagcagcaggccgacaacaugaucaccgagaugcuccagaaggaguacauggagcgccagggcaagaccccgcugggccuggucgaccucuucguguucagcaccuccuucuaccugaucagcaucuuccugcggcuggugaagauccccacgcaccgccacaucgucgggaagcccugccccaagccgcaccggcucaaccacaugggcaucugcuccugcgggcuguacaagcagcccggcgugcccgugcgcuggaagcggugaggacuagucccuguucccagagcccacuuuuuuuucuuuuuuugaaauaaaauagccugucuuucagaucucaaaggcucuuuucagagccaccaaaaaaaaaaaaaaaaaaaaaaaaaaaaaaaaaaaaaaaaaaaaaaaaaaaaaaaaaaaaaaaaaaaaaaaaaaaaaaaaaaaaaaaaaaaaaaaaaaaaa

SEQ ID NO: 15757 - RNA, 1764 nt, Artificial Sequence
  mRNA product Design a-2 (hSL-A100) comprising derived and/or modified sequence from LASV(Togo/2016/7082;Clade VI)__AMR44577__GPCmut1 (opt1)
aggagaguccgcucagccagguugcagaagcggcuuagcguguguccuaaucuucucucugcguguagguaggccugugccgcaaacaagcuuaccaugggccagaucaucaccuucuuccaggaggugccccacgucaucgaggaggugaugaacaucgugcugaucgcccucagccugcuggccauccucaagggggucuacaacguggcgaccugcggcaucaucgggcuggugacguuccuguuccucugcggccgcuccugcagccugaucuacaagggguccuacgagcugcagacccucgagcugaacauggagacccugaacaugaccaugccgcucagcugcacgaagaacuccagccaccacuacauccgggucggcaacgagaccggccuggagcugacccucaccaacacguccaucaucaaccacaaguucugcaaccugagcgacgcccacaagcgcaaccuguacgaccacgcccucauguccauccugagcaccuuccaccuguccauccccaacuucaaccaguacgaggccaugagcugcgacuucaacgggggcaagaucuccgugcaguacaaccucagccacgccuacgcgguggacgccgccgagcacugcgggaccgucgccaacggcgugcugcagaccuucaugcggauggcguggggcggguccuacaucgcccuggacagcggcugcgggaacugggacugcaucaugacguccuaccaguaccucaucauccagaacaccaccugggaggaccacugccaguucagccgccccucccccaucggcuaccuggggcugcucagccagcggacccgcgacaucuacaucagccggcgccggcgcggcacguucaccuggacccuguccgacagcgagggcaacgagacccccgggggcuacugccugacgcgguggaugcucaucgaggccgagcugaagugcuucgggaacaccgccguggccaagugcaacgagaagcacgacgaggaguucugcgacaugcugcgccucuucgacuucaacaagcaggcgauccagcggcugaaguccccggcccagaugagcauccagcugaucaacaaggccgucaacgcccucaucaacgaccagcugaucaugaagaaccaccuccgcgacaugaugugcauccccuacugcaacuacuccaaguacugguaccugaaccacaccagcuccggccggaccagccugcccaagugcuggcugguguccaacgggagcuaccucaacgagacgcacuucuccgacgacaucgagcagcaggccgacaacaugaucaccgagaugcugcagaaggaguacaucgaccgccagggcaagaccccgcugggccucguggaccuguucgucuucagcaccuccuucuaccugaucagcaucuuccuccaccugaucaagauccccacgcaccggcacaucguggggaagcccugccccaagccgcaccgccugaaccacaugggcaucugcuccugcgggcuguacaagcagcccggcgugcccacccgguggaagcgcugaggacuagucccuguucccagagcccacuuuuuuuucuuuuuuugaaauaaaauagccugucuuucagaucucaaaggcucuuuucagagccaccaaaaaaaaaaaaaaaaaaaaaaaaaaaaaaaaaaaaaaaaaaaaaaaaaaaaaaaaaaaaaaaaaaaaaaaaaaaaaaaaaaaaaaaaaaaaaaaaaaaaa

SEQ ID NO: 15758 - RNA, 1764 nt, Artificial Sequence
  mRNA product Design a-2 (hSL-A100) comprising derived and/or modified sequence from LASV(KAK-428;Clade n.d. (VII))__ANH09740__GPCmut1 (opt1)
aggagaguccgcucagccagguugcagaagcggcuuagcguguguccuaaucuucucucugcguguagguaggccugugccgcaaacaagcuuaccaugggccagaucgugaccuucuuccaggaggucccccacgugaucgaggaggugaugaacaucguccugaucgcccucagccugcuggccauccucaaggggcuguacaacuucgcgaccugcggcgugaucgggcugaucacguuccuccugcugugcggccgcuccugcagcgccaccuacaaggggcaguacgagcuccagacccuggagcugaacauggagucccucaacaugaccaugccgcugagcugcacgaagaacaacucccaccacuacauccgggccggcaacaacaccggccuggagcucacccugaccaacacgagcaucaucucccacaaguucugcaaccugagcgacgcccacaagaagaaccucuacgaccacacccugauguccaucaucaccaccuuccaccugagcauccccaacuucaaccaguacgaggccauguccugcgacuucaacgggggcaagaucagcauccaguacaaccucucccacagcuacgcgggggacgccgcccagcacugcggcacgguggccaacgggguccugcagaccuucaugcgcauggcguggggcggcuccuaccuggcccucgacagcgggugccggggcugggacugcaucaucuccagcuaccaguaccugaucauccagaacaccaccugggacgaccacugccaguucucccgccccagccccaucggguaccugggcuucgugagccagaagacgcgggacaucuacaucucccgccggcgccggggcaccuucaccuggacccucagcgacuccgaggggcacgacaugccgggcggguacugccugacgcgcuggaugcugaucgaggccgaccucaagugcuucggcaacaccgccguggccaagugcaacgagaagcacgacgaggaguucugcgacauguggcggcuguucgacuucaacaagcaggcgauccagcgccugaaggcccccgcccagaugaacauccagcucaucaacaaggccgucaacgcccugaucaacgaccagcugaugaugaagaaccaccuccgggacaucaugugcauccccuacugcaacuacagcaaguucugguaccugaacaacaccaccacggggcgcaccucccugccccggugcuggcucaucagcaacggcuccuaccugaacgagacccacuucagcgacgacaucgagcagcaggcggacaacaugaucaccgagaugcugcagaaggaguacauggaccgccagggcaagacgccgcucgggcugguggaccuguucguguucuccaccagcuucuaccucaucaccaucuuccugcaccuggucaagauccccacccaccggcacaucgugggcaagcccugccccaagccgcaccgccucaaccacauggggaucugcuccugcggccuguacaagcagcccggggugcccguccgguggaagcgcugaggacuagucccuguucccagagcccacuuuuuuuucuuuuuuugaaauaaaauagccugucuuucagaucucaaaggcucuuuucagagccaccaaaaaaaaaaaaaaaaaaaaaaaaaaaaaaaaaaaaaaaaaaaaaaaaaaaaaaaaaaaaaaaaaaaaaaaaaaaaaaaaaaaaaaaaaaaaaaaaaaaaa

SEQ ID NO: 15759 - RNA, 1764 nt, Artificial Sequence; identical to SEQ ID NO: 15753
  mRNA product Design a-2 (hSL-A100) comprising derived and/or modified sequence from LASV(Pinneo-NIG-1969;Clade I)__AIT17836__GPCmut1 (opt1)

SEQ ID NO: 15760 - RNA, 1764 nt, Artificial Sequence
  mRNA product Design a-2 (hSL-A100) comprising derived and/or modified sequence from LASV(ISTH0009-NIG-2011;Clade II)__AIT17404__GPCmut1 (opt1)
aggagaguccgcucagccagguugcagaagcggcuuagcguguguccuaaucuucucucugcguguagguaggccugugccgcaaacaagcuuaccaugggccagaucaucaccuucuuccaggaggugccccacgucaucgaggaggugaugaacaucgugcugaucgcccucagccugcuggccauccucaaggggaucuacaacgucgcgaccugcggccuguucgggcugguguccuuccuccugcugugcggccgcagcugcuccacgaccuacaaggggguguacgagcuccagacccuggagcuggacauggccagccucaacaugaccaugccgcuguccugcacgaagaacaacagccaccacuacaucauggucggcaacgagaccggccuggagcucacccugaccaacacguccaucaucaaccacaaguucugcaaccugagcgacgcccacaagaagaaccucuacgaccacgcccugauguccaucaucagcaccuuccaccuguccauccccaacuucaaccaguacgaggccaugagcugcgacuucaacgggggcaagaucuccgugcaguacaaccucagccacgcguacgccguggacgccgccaaccacugcgggaccaucgcgaacggcguccugcagaccuucaugcggauggccuggggcggguccuacaucgcccuggacagcggcugcggguccugggacugcaucaugacgagcuaccaguaccucaucauccagaacaccaccugggaggaccacugccaguucucccgccccagccccaucggcuaccuggggcugcucagccagcggacccgcgacaucuacaucucccggcgccggcgcggcacguucaccuggacccugagcgacuccgagggcaacgagacccccgggggcuacugccugacgcgguggaugcucaucgaggccgagcugaagugcuucgggaacaccgccguggcgaagugcaacgagaagcacgacgaggaguucugcgacaugcugcgccucuucgacuucaacaagcaggccauccggcgccugaagaccccggcccagaugagcauccagcugaucaacaaggccgugaacgcccucaucaacgaccagcugaucaugaagaaccaccuccgggacaucaugugcauccccuacugcaacuacuccaaguacugguaccugaaccacaccgucacgggcaagaccagccugccccgcugcuggcugguguccaacgggagcuaccucaacgagacccacuucuccgacgacaucgagcagcaggcggacaacaugaucaccgagcugcugcagaaggaguacauggaccggcagggcaagacgccgcucggccugguggaccuguucgucuucagcaccuccuucuaccucaucagcaucuuccugcaccugaucaagauccccacccaccgccacaucaccgggaagcccugccccaagccgcaccggcugaaccacaugggcaucugcuccugcgggcucuacaagcaccccggcgugcccgugaaguggaagcgcugaggacuagucccuguucccagagcccacuuuuuuuucuuuuuuugaaauaaaauagccugucuuucagaucucaaaggcucuuuucagagccaccaaaaaaaaaaaaaaaaaaaaaaaaaaaaaaaaaaaaaaaaaaaaaaaaaaaaaaaaaaaaaaaaaaaaaaaaaaaaaaaaaaaaaaaaaaaaaaaaaaaaa

SEQ ID NO: 15761 - RNA, 1764 nt, Artificial Sequence
  mRNA product Design a-2 (hSL-A100) comprising derived and/or modified sequence from LASV(ISTH2010-NIG-2012;Clade II)__AIT17482__GPCmut1 (opt1)
aggagaguccgcucagccagguugcagaagcggcuuagcguguguccuaaucuucucucugcguguagguaggccugugccgcaaacaagcuuaccaugggccagaucaucaccuucuuccaggaggugccccacgucaucgaggaggugaugaacaucgugcugaucgcccucagccugcuggccauccucaaggggaucuacaacgucgcgaccugcggccuguucgggcugguguccuuccuccugcugugcggccgcagcugcuccacgaccuacaaggggguguacgagcuccagacccuggagcuggacauggccagccucaacaugaccaugccgcuguccugcacgaagaacaacagccaccacuacaucauggucggcaacgagaccggccuggagcucacccugaccaacacguccaucaucaaccacaaguucugcaaccugagcgacgcccacaagaagaaccucuacgaccacgcccugauguccaucaucagcaccuuccaccuguccauccccaacuucaaccaguacgaggccaugagcugcgacuucaacgggggcaagaucuccgugcaguacaaccucagccacgcguacgccguggacgccgccaaccacugcgggaccaucgcgaacggcguccugcagaccuucaugcggauggccuggggcggguccuacaucgcccuggacagcggcugcggguccugggacugcaucaugacgagcuaccaguaccucaucauccagaacaucaccugggaggaccacugccaguucucccgccccagccccaucggcuaccuggggcugcucagccagcggacccgcgacaucuacaucucccggcgccggcgcggcaccuucacguggacccugagcgacuccgagggcaacgagacccccgggggcuacugccugacccgguggaugcucaucgaggccgagcugaagugcuucgggaacacggccguggcgaagugcaacgagaagcacgacgaggaguucugcgacaugcugcgccucuucgacuucaacaagcaggccauccggcgccugaagaccccggcccagaugagcauccagcugaucaacaaggccgugaacgcccucaucaacgaccagcugaucaugaagaaccaccuccgggacaucaugugcauccccuacugcaacuacuccaaguacugguaccugaaccacaccgucaccggcaagacgagccugccccgcugcuggcugguguccaacgggagcuaccucaacgagacccacuucuccgacgacaucgagcagcaggcggacaacaugaucaccgagcugcugcagaaggaguacaucgaccggcagggcaagaccccgcucggccugguggaccuguucgucuucagcacguccuucuaccucaucagcaucuuccugcaccuggugaagauccccacccaccgccacguggucgggaagcccugccccaagccgcaccggcugaaccacaugggcaucugcuccugcgggcucuacaagcaccccggcgugcccgugaaguggaagcgcugaggacuagucccuguucccagagcccacuuuuuuuucuuuuuuugaaauaaaauagccugucuuucagaucucaaaggcucuuuucagagccaccaaaaaaaaaaaaaaaaaaaaaaaaaaaaaaaaaaaaaaaaaaaaaaaaaaaaaaaaaaaaaaaaaaaaaaaaaaaaaaaaaaaaaaaaaaaaaaaaaaaaa

SEQ ID NO: 15762 - RNA, 1764 nt, Artificial Sequence
  mRNA product Design a-2 (hSL-A100) comprising derived and/or modified sequence from LASV(Lassa virus/H.sapiens-wt/NGA/2015/ISTH_0543;Clade II)__AVO03639__GPCmut1 (opt1)
aggagaguccgcucagccagguugcagaagcggcuuagcguguguccuaaucuucucucugcguguagguaggccugugccgcaaacaagcuuaccaugggccagaucaucaccuucuuccaggaggugccccacgucaucgaggaggugaugaacaucgugcugaucgcccucagccugcuggccauccucaaggggaucuacaacgucgcgaccugcggccuguucgggcugguguccuuccuccugcugugcggccgcagcugcuccacgaccuacaaggggguguacgagcuccagacccuggagcuggacauggccaaccucaacaugaccaugccgcugagcugcacgaagaacaacucccaccacuacaucauggucggcaacgagaccggccuggagcucacccugaccaacacgagcaucaucaaccacaaguucugcaaccuguccgacgcccacaagaagaaccucuacgaccacgcccugaugagcaucaucuccaccuuccaccugagcauccccaacuucaaccaguacgaggccauguccugcgacuucaacgggggcaagaucagcgugcaguacaaccucucccacaccuacgcgguggacgccgccaaccacugcgggaccaucgccaacggcguccugcagacguucaugcggauggcguggggcgggagcuacaucgcccuggacuccggcugcgggagcugggacugcaucaugaccuccuaccaguaccucgugauccagaacaccaccugggaggaccacugccaguucagccgccccucccccaucggcuaccuggggcugcucagccagcggacgcgcgacaucuacaucagccggcgccggcgcggcaccuucaccuggacccuguccgacagcgagggcaacgagacgcccgggggcuacugccugacccgguggaugcucaucgaggccgagcugaagugcuucgggaacaccgccguggccaagugcaacgagaagcacgacgaggaguucugcgacaugcugcgccucuucgacuucaacaagcaggcgauccggcgccugaagaccccggcccagauguccauccagcugaucaacaaggccgucaacgcccucaucaacgaccagcugaucaugaagaaccaccuccgggacaucaugugcauccccuacugcaacuacagcaaguacugguaccugaaccacacggugaccggcaagaccucccugccccgcugcuggcuggugagcaacggguccuaccucaacgagacccacuucagcgacgacaucgagcagcaggccgacaacaugaucacggagcugcugcagaaggaguacaucgaccggcagggcaagaccccgcucggccuggucgaccuguucguguucuccaccagcuucuaccucaucuccaucuuccugcaccuggugaagauccccacccaccgccacaucacggggaagcccugccccaagccgcaccggcugaaccacaugggcaucugcagcugcgggcucuacaagcaccccggcguccccgugaaguggaagcgcugaggacuagucccuguucccagagcccacuuuuuuuucuuuuuuugaaauaaaauagccugucuuucagaucucaaaggcucuuuucagagccaccaaaaaaaaaaaaaaaaaaaaaaaaaaaaaaaaaaaaaaaaaaaaaaaaaaaaaaaaaaaaaaaaaaaaaaaaaaaaaaaaaaaaaaaaaaaaaaaaaaaaa

SEQ ID NO: 15763 - RNA, 1764 nt, Artificial Sequence
  mRNA product Design a-2 (hSL-A100) comprising derived and/or modified sequence from LASV(Lassa virus/H.sapiens-wt/NGA/2016/ISTH_0009;Clade II)__AVO03571__GPCmut1 (opt1)
aggagaguccgcucagccagguugcagaagcggcuuagcguguguccuaaucuucucucugcguguagguaggccugugccgcaaacaagcuuaccaugggccagaucaucaccuucuuccaggaggugccccacgucaucgaggaggugaugaacaucgugcugaucgcccucagccugcuggccauccucaaggggaucuacaacgucgcgaccugcggccugcuggggcucguguccuuccugcugcucugcggccgcagcugcuccacgaccuacaaggggguguacgagcugcagacccuggagcucgacauggccagccugaacaugaccaugccgcuguccugcacgaagaacaacagccaccacuacaucauggucggcaacgagaccggccucgagcugacccugaccaacacguccaucaucaaccacaaguucugcaaccucagcgacgcccacaagaagaaccuguacgaccacgcccugauguccaucaucagcaccuuccaccucuccauccccaacuucaaccaguacgaggccaugagcugcgacuucaacgggggccggaucuccgugcaguacaaccugagccacuccuacgcgguggacgccgccaaccacugcgggaccaucgccaacggcguccugcagaccuucaugcgcauggcguggggcgggagcuacaucgcccucgacuccggcugcgggagcugggacugcaucaugacguccuaccaguaccugaucauccagaacaccaccugggaggaccacugccaguucagccggcccagccccaucggcuaccuggggcuccugucccagcgcacccgggacaucuacaucagccgccggcgccggggcacguucaccuggacccuguccgacagcgagggcaacgagacccccgggggcuacugccucacgcgcuggaugcugaucgaggccgagcugaagugcuucgggaacaccgccguggccaagugcaacgagaagcacgacgaggaguucugcgacaugcuccggcuguucgacuucaacaagcaggcgauccgccggcugaagaccccggcccagauguccauccagcucaucaacaaggccgugaacgcccugaucaacgaccagcugaucaugaagaaccaccuccgcgacaucaugugcauccccuacugcaacuacagcaaguacugguaccugaaccacaccgucacgggcaagaccucccugccccggugcuggcucgugagcaacggguccuaccugaacgagacccacuucagcgacgacaucgagcagcaggccgacaacaugaucaccgagcugcuccagaaggaguacaucgaccgccagggcaagacgccgcugggccugguggaccucuucgucuucuccaccagcuucuaccugaucuccaucuuccugcaccuggugaagauccccacccaccggcacaucaccgggaagcccugccccaagccgcaccgccucaaccacaugggcaucugcagcugcgggcuguacaaccaccccggcgugcccgucaaguggaagcggugaggacuagucccuguucccagagcccacuuuuuuuucuuuuuuugaaauaaaauagccugucuuucagaucucaaaggcucuuuucagagccaccaaaaaaaaaaaaaaaaaaaaaaaaaaaaaaaaaaaaaaaaaaaaaaaaaaaaaaaaaaaaaaaaaaaaaaaaaaaaaaaaaaaaaaaaaaaaaaaaaaaaa

SEQ ID NO: 15764 - RNA, 1764 nt, Artificial Sequence
  mRNA product Design a-2 (hSL-A100) comprising derived and/or modified sequence from LASV(Lassa virus/H.sapiens-wt/NGA/2016/ISTH_0017;Clade II)__AVO03567__GPCmut1 (opt1)
aggagaguccgcucagccagguugcagaagcggcuuagcguguguccuaaucuucucucugcguguagguaggccugugccgcaaacaagcuuaccaugggccagaucaucaccuucuuccaggaggugccccacgucaucgaggaggugaugaacaucgugcugaucgcccucagccugcuggccauccucaaggggaucuacaacgucgcgaccugcggccuguucgggcugguguccuuccuccugcugugcggccgcagcugcuccacgaccuacaaggggguguacgagcuccagacccuggagcuggacauggccagccucaacaugaccaugccgcuguccugcacgaagaacaacagccaccacuacaucauggucggcaacgagaccggccuggagcucacccugaccaacacguccaucaucaaccacaaguucugcaaccugagcgacgcccacaagaagaaccucuacgaccacgcccugauguccaucaucagcaccuuccaccuguccauccccaacuucaaccaguacgaggccaugagcugcgacuucaacgggggcaagaucuccgugcaguacaaccucagccacaccuacgcgaucgacgccgccaaccacugcgggaccaucgccaacggcgugcugcagacguucaugcggauggcguggggcggguccuacaucgcccuggacagcggcugcggguccugggacugcaucaugaccagcuaccaguaccucaucauccagaacaccaccugggaggaccacugccaguucucccgccccagccccaucggcuaccuggggcugcucagccagcggacgcgcgacaucuacaucucccggcgccggcgcggcaccuucaccuggacccugagcgacuccgagggcaacgagacgcccgggggcuacugccugacccgguggaugcucaucgaggccgagcugaagugcuucgggaacaccgccgucgccaagugcaacgagaagcacgacgaggaguucugcgacaugcugcgccucuucgacuucaacaagcaggcgauccggcgccugaagaccccggcccagaugagcauccagcugaucaacaaggccgugaacgcccucaucaacgaccagcugaucaugaagaaccaccuccgggacaucaugugcauccccuacugcaacuacuccaaguacugguaccugaaccacacggugaccggcaagaccagccugccccgcugcuggcuggucuccaacgggagcuaccucaacgagacccacuucuccgacgacaucgagcagcaggccgacaacaugaucacggagcugcugcagaaggaguacauggaccggcagggcaagaccccgcucggccugguggaccuguucguguucagcaccuccuucuaccucaucagcaucuuccugcaccugguccgcauccccacccaccggcacgugaucgggaagcccugccccaagccgcaccgccugaaccacaugggcaucugcuccugcgggcucuacaagcaccccggcgugcccgucaaguggaagcggugaggacuagucccuguucccagagcccacuuuuuuuucuuuuuuugaaauaaaauagccugucuuucagaucucaaaggcucuuuucagagccaccaaaaaaaaaaaaaaaaaaaaaaaaaaaaaaaaaaaaaaaaaaaaaaaaaaaaaaaaaaaaaaaaaaaaaaaaaaaaaaaaaaaaaaaaaaaaaaaaaaaaa

SEQ ID NO: 15765 - RNA, 1764 nt, Artificial Sequence
  mRNA product Design a-2 (hSL-A100) comprising derived and/or modified sequence from LASV(Lassa virus/H.sapiens-wt/NGA/2018/ISTH_0959;Clade II)__AVV65099__GPCmut1 (opt1)
aggagaguccgcucagccagguugcagaagcggcuuagcguguguccuaaucuucucucugcguguagguaggccugugccgcaaacaagcuuaccaugggccagaucaucaccuucuuccaggaggugccccacgucaucgaggaggugaugaacaucgugcugaucgcccucagccugcuggccauccucaaggggaucuacaacgucgugaccugcggccuguucgggcugguguccuuccuccugcugugcggccgcagcugcuccacgaccuacaagggggucuacgagcuccagacccuggagcuggacauggcgagccucaacaugaccaugccgcuguccugcacgaagaacaacagccaccacuacaucauggugggcaacgagaccggccuggagcucacccugaccaacacguccaucaucaaccacaaguucugcaaccugagcgacgcccacaagaagaaccucuacgaccacgcccugauguccaucaucagcaccuuccaccuguccauccccaacuucaaccaguacgaggccaugagcugcgacuucaacgggggcaagaucuccgugcaguacaaccucagccacgccuacgcgaucgacgccgccaaccacugcgggaccaucgccaacggcguccugcagaccuucaugcggauggcguggggcggguccuacaucgcccuggacagcggcugcggguccugggacugcaucaugacgagcuaccaguaccucaucauccagaacaccaccugggaggaccacugccaguucucccgccccagccccaucggcuaccuggggcugcucagccagcggacccgcgacaucuacaucucccggcgccggcgcggcacguucaccuggacccugagcgacuccgagggcaacgagacccccgggggcuacugccugacgcgguggaugcucaucgaggccgagcugaagugcuucgggaacaccgccguggccaagugcaacgagaagcacgacgaggaguucugcgacaugcugcgccucuucgacuucaacaagcaggcgauccggcgccugaagaccccggcccagaugagcauccagcugaucaacaaggccgugaacgcccucaucaacgaccagcugaucaugaagaaccaccuccgggacaucaugugcauccccuacugcaacuacuccaaguacugguaccugaaccacaccgucacgggcaagaccagccugccccgcugcuggcugguguccaacgggagcuaccucaacgagacccacuucuccgacgacaucgagcagcaggccgacaacaugaucaccgagcugcugcagaaggaguacaucgaccggcagggcaagacgccgcucggccugguggaccuguucgucuucagcaccuccuucuaccucaucagcaucuuccugcaccuggugaagauccccacccaccgccacgugaucgggaagcccugccccaagccgcaccggcugaaccacaugggcaucugcuccugcgggcucuacaagcaccccggcguccccgugaaguggaagcgcugaggacuagucccuguucccagagcccacuuuuuuuucuuuuuuugaaauaaaauagccugucuuucagaucucaaaggcucuuuucagagccaccaaaaaaaaaaaaaaaaaaaaaaaaaaaaaaaaaaaaaaaaaaaaaaaaaaaaaaaaaaaaaaaaaaaaaaaaaaaaaaaaaaaaaaaaaaaaaaaaaaaaa

SEQ ID NO: 15766 - RNA, 1764 nt, Artificial Sequence
  mRNA product Design a-2 (hSL-A100) comprising derived and/or modified sequence from LASV(LASV003-NIG-2008;Clade II)__AIT17580__GPCmut1 (opt1)
aggagaguccgcucagccagguugcagaagcggcuuagcguguguccuaaucuucucucugcguguagguaggccugugccgcaaacaagcuuaccaugggccagaucaucaccuucuuccaggaggugccccacgucaucgaggaggugaugaacaucgugcugaucgcccucagccugcuggccauccucaaggggaucuacaacgucgcgaccugcggccuguucgggcugguguccuuccuccugcugugcggccgcagcugcuccacgaccuacaaggggguguacgagcuccagacccuggagcuggacauggccagccucaacaugaccaugccgcuguccugcacgaagaacaacagccaccacuacaucauggucggcaacgagaccggccuggagcucacccugaccaacacguccaucaucaaccacaaguucugcaaccugagcgacgcccacaagaagaaccucuacgaccacgcccugauguccaucaucagcaccuuccaccuguccauccccaacuucaaccaguacgaggccaugagcugcgacuucaacgggggcaagaucuccgugcaguacaaccucagccacaccuacgcgguggacgccgccaaccacugcgggaccaucgccaacggcguccugcagacguucaugcggauggcguggggcggguccuacaucgcccuggacagcggcugcggguccugggacugcaucaugaccagcuaccaguaccucaucauccagaacaccaccugggaggaccacugccaguucucccgccccagccccaucggcuaccuggggcugcucagccagcggacgcgcgacaucuacaucucccggcgccggcgcggcaccuucaccuggacccugagcgacuccgagagcaacgagacgccgggcggguacugccugacccgguggaugcucaucgaggccgagcugaagugcuucggcaacaccgccguggccaagugcaacgagaagcacgacgaggaguucugcgacaugcugcgccucuucgacuucaacaagcaggcgauccggcgccugaaggcccccgcccagauguccauccagcugaucaacaaggccgugaacgcccucaucaacgaccagcugaucaugaagaaccaccuccgggacaucaugugcauccccuacugcaacuacagcaaguacugguaccugaaccacaccgucacggggcgcaccucccugccccggugcuggcuggugagcaacggcuccuaccucaacgagacccacuucagcgacgacaucgagcagcaggcggacaacaugaucaccgagcugcugcagaaggaguacauggaccgccaggggaagacgccgcucggccugguggaccuguucgucuucuccaccagcuucuaccucaucuccaucuuccugcaccuggugaagauccccacccaccggcacgugaucggcaagcccugccccaagccgcaccgccugaaccacauggggaucugcagcugcggccucuacaagcaccccgggguccccgugaaguggaagcggugaggacuagucccuguucccagagcccacuuuuuuuucuuuuuuugaaauaaaauagccugucuuucagaucucaaaggcucuuuucagagccaccaaaaaaaaaaaaaaaaaaaaaaaaaaaaaaaaaaaaaaaaaaaaaaaaaaaaaaaaaaaaaaaaaaaaaaaaaaaaaaaaaaaaaaaaaaaaaaaaaaaaa

SEQ ID NO: 15767 - RNA, 1764 nt, Artificial Sequence
  mRNA product Design a-2 (hSL-A100) comprising derived and/or modified sequence from LASV(LASV035-NIG-2009;Clade II)__AIT17588__GPCmut1 (opt1)
aggagaguccgcucagccagguugcagaagcggcuuagcguguguccuaaucuucucucugcguguagguaggccugugccgcaaacaagcuuaccaugggccagaucaucaccuucuuccaggaggugccccacgucaucgaggaggugaugaacaucgugcugaucgcccucagccugcuggccauccucaaggggaucuacaacgucgcgaccugcggccuguucgggcugguguccuuccuccugcugugcggccgcagcugcuccacgaccuacaaggggguguacgagcuccagacccuggagcuggacauggccagccucaacaugaccaugccgcuguccugcacgaagaacaacagccaccacuacaucauggucggcaacgagaccggccuggagcucacccugaccaacacguccaucaucaaccacaaguucugcaaccugagcgacgcccacaagaagaaccucuacgaccacgcccugauguccaucaucagcaccuuccaccuguccauccccaacuucaaccaguacgaggccaugagcugcgacuucaacgggggcaagaucuccgugcaguacaaccucagccacgcguacgccguggacgccgccaaccacugcgggaccaucgcgaacggcguccugcagaccuucaugcggauggccuggggcggguccuacaucgcccuggacagcggcugcggguccugggacugcaucaugacgagcuaccaguaccucaucauccagaacaccaccugggaggaccacugccaguucucccgccccagccccaucggcuaccuggggcugcucagccagcggacccgcgacaucuacaucucccggcgccggcgcggcacguucaccuggacccugagcgacuccgagggcaacgagacccccgggggcuacugccugacgcgguggaugcucaucgaggccgagcugaagugcuucgggaacaccgccguggcgaagugcaacgagaagcacgacgaggaguucugcgacaugcugcgccucuucgacuucaacaagcaggccauccggcgccugaaggccccggcccagaugagcauccagcugaucaacaaggccgugaacgcgcucaucaacgaccagcugaucaugaagaaccaccuccgggacaucaugugcauccccuacugcaacuacuccaaguacugguaccugaaccacaccgucaccggcaagacgagccugccccgcugcuggcugguguccaacgggagcuaccucaacgagacccacuucuccgacgacaucgagcagcaggccgacaacaugaucaccgagcugcugcagaaggaguacaucgaccggcagggcaagaccccgcucggccugguggaccuguucgucuucagcacguccuucuaccucaucagcaucuuccugcaccuggugaagauccccacccaccgccacgugaucgggaagcccugccccaagccgcaccggcugaaccacaugggcaucugcuccugcgggcucuacaagcaccccggcguccccgugaaguggaagcgcugaggacuagucccuguucccagagcccacuuuuuuuucuuuuuuugaaauaaaauagccugucuuucagaucucaaaggcucuuuucagagccaccaaaaaaaaaaaaaaaaaaaaaaaaaaaaaaaaaaaaaaaaaaaaaaaaaaaaaaaaaaaaaaaaaaaaaaaaaaaaaaaaaaaaaaaaaaaaaaaaaaaaa

SEQ ID NO: 15768 - RNA, 1764 nt, Artificial Sequence
  mRNA product Design a-2 (hSL-A100) comprising derived and/or modified sequence from LASV(LASV1000-NIG-2009;Clade II)__AIT17782__GPCmut1 (opt1)
aggagaguccgcucagccagguugcagaagcggcuuagcguguguccuaaucuucucucugcguguagguaggccugugccgcaaacaagcuuaccaugggccagaucaucaccuucuuccaggaggugccccacgucaucgaggaggugaugaacaucgugcugaucgcccucagccugcuggccauccucaaggggaucuacaacgucgcgaccugcggccuguucgggcugguguccuuccuccugcugugcggccgcagcugcuccacgaccuacaaggggguguacgagcuccagacccuggagcuggacauggccagccucaacaugaccaugccgcuguccugcacgaagaacaacagccaccacuacaucauggucggcaacgagaccggccuggagcucacccugaccaacacguccaucaucaaccacaaguucugcaaccugagcgacgcccacaagaagaaccucuacgaccacgcccugauguccaucaucagcaccuuccaccuguccauccccaacuucaaccaguacgaggccaugagcugcgacuucaacgggggcaagaucuccgugcaguacaaccucagccacaccuacgcgguggacgccgccaaccacugcgggaccaucgccaacggcguccugcagacguucaugcggauggcguggggcggguccuacaucgcccuggacagcggcugcggguccugggacugcaucaugaccagcuaccaguaccucaucauccagaacaccaccugggaggaccacugccaguucucccgccccagccccaucggcuaccuggggcugcucagccagcggacgcgcgacaucuacaucucccggcgccggcgcggcaccuucaccuggacccugagcgacuccgagggcaacgagacgcccgggggcuacugccugacccgguggaugcucaucgaggccgagcugaagugcuucgggaacaccgccguggccaagugcaacgagaagcacgacgaggaguucugcgacaugcugcgccucuucgacuucaacaagcaggcgaucaagcggcugaagaccccggcccagaugagcauccagcugaucaacaaggccgugaacgcccucaucaacgaccagcugaucaugaagaaccaccuccgcgacaucaugugcauccccuacugcaacuacuccaaguacugguaccugaaccacacggucaccggcaagaccagccugccccggugcuggcugguguccaacgggagcuaccucaacgagacccacuucuccgacgacaucgagcagcaggccgacaacaugaucacggagcugcugcagaaggaguacaucgaccgccagggcaagaccccgcucggccugguggaccuguucgucuucagcaccuccuucuaccucaucagcaucuuccugcaccuggugaagauccccacccaccggcacguggucgggaagcccugccccaagccgcaccgccugaaccacaugggcaucugcuccugcgggcucuacaagcaccccggcgugcccgugaaguggaagcggugaggacuagucccuguucccagagcccacuuuuuuuucuuuuuuugaaauaaaauagccugucuuucagaucucaaaggcucuuuucagagccaccaaaaaaaaaaaaaaaaaaaaaaaaaaaaaaaaaaaaaaaaaaaaaaaaaaaaaaaaaaaaaaaaaaaaaaaaaaaaaaaaaaaaaaaaaaaaaaaaaaaaa

SEQ ID NO: 15769 - RNA, 1764 nt, Artificial Sequence
  mRNA product Design a-2 (hSL-A100) comprising derived and/or modified sequence from LASV(LASV221-NIG-2010;Clade II)__AIT17624__GPCmut1 (opt1)
aggagaguccgcucagccagguugcagaagcggcuuagcguguguccuaaucuucucucugcguguagguaggccugugccgcaaacaagcuuaccaugggccagaucaucaccuucuuccaggaggugccccacgucaucgaggaggugaugaacaucgugcugaucgcccucagccugcuggccauccucaaggggaucuacaacgucgcgaccugcggccuguucgggcugguguccuuccuccugcugugcggccgcagcugcuccacgaccuacaaggggguguacgagcuccagacccuggagcuggacauggccagccucaacaugaccaugccgcuguccugcacgaagaacaacagccaccacuacaucauggucggcaacgagaccggccuggagcucacccugaccaacacguccaucaucaaccacaaguucugcaaccugagcgacgcccacaagaagaaccucuacgaccacgcccugauguccaucaucagcaccuuccaccuguccauccccaacuucaaccaguacgaggccaugagcugcgacuucaacgggggcaagaucuccgugcaguacaaccucagccacaccuacgcgaucgacgccgccaaccacugcgggaccaucgccaacggcgugcugcagacguucaugcggauggcguggggcggguccuacaucgcccuggacagcggcugcggguccugggacugcaucaugaccagcuaccaguaccucaucauccagaacaccaccugggaggaccacugccaguucucccgccccagccccaucggcuaccuggggcugcucagccagcggacgcgcgacaucuacaucucccggcgccggcgcggcaccuucaccuggacccugagcgacuccgagggcaacgagacgcccgggggcuacugccugacccgguggaugcucaucgaggccgagcugaagugcuucgggaacaccgccgucgccaagugcaacgagaagcacgacgaggaguucugcgacaugcugcgccucuucgacuucaacaagcaggcgauccggcgccugaagaccccggcccagaugagcauccagcugaucaacaaggccgugaacgcccucaucaacgaccagcugaucaugaagaaccaccuccgggacaucaugugcauccccuacugcaacuacuccaaguacugguaccugaaccacacggugaccggcaagaccagccugccccgcugcuggcuggucuccaacgggagcuaccucaacgagacccacuucuccgacgacaucgagcagcaggccgacaacaugaucacggagaugcugcagaaggaguacauggaccggcagggcaagaccccgcugggccucguggaccuguucguguucagcaccuccuucuaccugaucagcaucuuccuccaccuggucaagauccccacccaccgccacgugaucgggaagcccugccccaagccgcaccggcugaaccacaugggcaucugcuccugcgggcuguacaagcaccccggcgugcccgucaaguggaagcgcugaggacuagucccuguucccagagcccacuuuuuuuucuuuuuuugaaauaaaauagccugucuuucagaucucaaaggcucuuuucagagccaccaaaaaaaaaaaaaaaaaaaaaaaaaaaaaaaaaaaaaaaaaaaaaaaaaaaaaaaaaaaaaaaaaaaaaaaaaaaaaaaaaaaaaaaaaaaaaaaaaaaaa

SEQ ID NO: 15770 - RNA, 1764 nt, Artificial Sequence
  mRNA product Design a-2 (hSL-A100) comprising derived and/or modified sequence from LASV(LASV237-NIG-2010;Clade II)__AIT17638__GPCmut1 (opt1)
aggagaguccgcucagccagguugcagaagcggcuuagcguguguccuaaucuucucucugcguguagguaggccugugccgcaaacaagcuuaccaugggccagaucaucaccuucuuccaggaggugccccacgucaucgaggaggugaugaacaucgugcugaucgcccucagccugcuggccauccucaaggggaucuacaacgucgcgaccugcggccuguucgggcugguguccuuccuccugcugugcggccgcagcugcuccacgaccuacaaggggguguacgagcuccagacccuggagcuggacauggccagccucaacaugaccaugccgcuguccugcacgaagaacaacagccaccacuacaucauggucggcaacgagaccggccuggagcucacccugaccaacacguccaucaucaaccacaaguucugcaaccugagcgacgcccacaagaaggaccucuacgaccacgcccugauguccaucaucagcaccuuccaccuguccauccccaacuucaaccaguacgaggccaugagcugcgacuucaacgggggcaagaucuccgugcaguacaaccucagccacaccuacgcgguggacgccgccaaccacugcgggaccaucgccaacggcguccugcagacguucaugcggauggcguggggcggguccuacaucgcccuggacagcggcugcggguccugggacugcaucaugaccagcuaccaguaccucaucauccagaacaccaccugggaggaccacugccaguucucccgccccagccccaucggcuaccuggggcugcucagccagcggacgcgcgacaucuacaucucccggcgccggcgcggcaccuucaccuggacccugagcgacuccgagggcaacgagacgcccgggggcuacugccugacccgguggaugcucaucgaggccgagcugaagugcuucgggaacaccgccguggccaagugcaacgagaagcacgacgaggaguucugcgacaugcugcgccucuucgacuucaacaagcaggcgauccggcgccugaagaccccggcccagaugagcauccagcugaucaacaaggccgugaacgcccucaucaacgaccagcugaucaugaagaaccaccuccgggacaucaugugcauccccuacugcaacuacuccaaguacugguaccugaaccacacggucaccggcaagaccagccugccccgcugcuggcugguguccaacgggagcuaccucaacgagacccacuucuccgacgacaucgagcagcaggccgacaacaugaucacggagcugcugcagaaggaguacauggaccggcagggcaagaccccgcucggccugguggaccuguucgucuucagcaccuccuucuaccucaucagcaucuuccugcaccugaucaagauccccacccaccgccacaucacggggaagcccugccccaagccgcaccggcugaaccacaugggcaucugcuccugcgggcucuacaagcaccccggcgugcccgugaaguggaagcgcugaggacuagucccuguucccagagcccacuuuuuuuucuuuuuuugaaauaaaauagccugucuuucagaucucaaaggcucuuuucagagccaccaaaaaaaaaaaaaaaaaaaaaaaaaaaaaaaaaaaaaaaaaaaaaaaaaaaaaaaaaaaaaaaaaaaaaaaaaaaaaaaaaaaaaaaaaaaaaaaaaaaaa

SEQ ID NO: 15771 - RNA, 1764 nt, Artificial Sequence
  mRNA product Design a-2 (hSL-A100) comprising derived and/or modified sequence from LASV(LASV253-NIG-2011;Clade II)__AIT17670__GPCmut1 (opt1)
aggagaguccgcucagccagguugcagaagcggcuuagcguguguccuaaucuucucucugcguguagguaggccugugccgcaaacaagcuuaccaugggccagaucaucaccuucuuccaggaggugccccacgucaucgaggaggugaugaacaucgugcugaucgcccucagccugcuggccauccucaaggggaucuacaacgucgcgaccugcggccuguucgggcugguguccuuccuccugcugugcggccgcagcugcuccacgaccuacaaggggguguacgagcuccagacccuggagcuggacauggccagccucaacaugaccaugccgcuguccugcacgaagaacaacagccaccacuacaucauggucggcaacgagaccggccuggagcucacccugaccaacacguccaucaucaaccacaaguucugcaaccugagcgacgcccacaagaagaaccucuacgaccacgcccugauguccaucaucagcaccuuccaccuguccauccccaacuucaaccaguacgaggccaugagcugcgacuucaacgggggcaagaucuccgugcaguacaaccucagccacaccuacgcgguggacgccgccaaccacugcgggaccaucgccaacggcguccugcagacguucaugcggauggcguggggcggguccuacaucgcccuggacagcggcugcggguccugggacugcaucaugaccagcuaccaguaccucaucauccagaacaccaccugggaggaccacugccaguucucccgccccagccccaucggcuaccuggggcugcucagccagcggacgcgcgacaucuacaucucccggcgccggcgcggcaccuucaccuggacccugagcgacuccgagggcaacgagacgcccgggggcuacugccugacccgguggaugcucaucgaggccgagcugaagugcuucgggaacaccgccguggccaagugcaacgagaagcacgacgaggaguucugcgacaugcugcgccucuucgacuucaacaagcaggcgauccggcgccugaaggccccggcccagaugagcauccagcugaucaacaaggccgugaacgcccucaucaacgaccagcugaucaugaagaaccaccuccgggacaucaugugcauccccuacugcaacuacuccaaguacugguaccugaaccacaccgucacgggccgcaccagccugccccggugcuggcugguguccaacgggagcuaccucaacgagacccacuucuccgacgacaucgagcagcaggcggacaacaugaucaccgagcugcugcagaaggaguacaucgaccgccagggcaagacgccgcucggccugguggaccuguucgucuucagcaccuccuucuaccucaucagcaucuuccugcaccuggugaagauccccacccaccggcacaucaucgggaagcccugccccaagccgcaccgccugaaccacaugggcaucugcuccugcgggcucuacaagcaccccggcgugcccgucaaguggaagcggugaggacuagucccuguucccagagcccacuuuuuuuucuuuuuuugaaauaaaauagccugucuuucagaucucaaaggcucuuuucagagccaccaaaaaaaaaaaaaaaaaaaaaaaaaaaaaaaaaaaaaaaaaaaaaaaaaaaaaaaaaaaaaaaaaaaaaaaaaaaaaaaaaaaaaaaaaaaaaaaaaaaaa

SEQ ID NO: 15772 - RNA, 1764 nt, Artificial Sequence
  mRNA product Design a-2 (hSL-A100) comprising derived and/or modified sequence from LASV(LASV254-NIG-2011;Clade II)__AIT17674__GPCmut1 (opt1)
aggagaguccgcucagccagguugcagaagcggcuuagcguguguccuaaucuucucucugcguguagguaggccugugccgcaaacaagcuuaccaugggccagaucaucaccuucuuccaggaggugccccacgucaucgaggaggugaugaacaucgugcugaucgcccucagccugcuggccauccucaaggggaucuacaacgucgcgaccugcggccuguucgggcugguguccuuccuccugcugugcggccgcagcugcuccacgaccuacaaggggguguacgagcuccagacccuggagcuggacaugaccaaccucaacaugacgaugccgcugagcugcaccaagaacaacucccaccacuacaucauggucggcaacgagaccggccuggagcucacccugacgaacaccagcaucaucaaccacaaguucugcaaccuguccgacgcccacaagaagaaccucuacaaccacgcccugaugagcaucaucuccaccuuccaccugagcauccccaacuucaaccaguacgaggccauguccugcgacuucaacgggggcaagaucagcgugcaguacaaccucucccacagcuacgccguggacgcggccaaccacugcgggaccaucgccaacggcguccugcagacguucaugcggauggccuggggcggguccuacaucgcgcuggacagcggcugcgggaacugggacugcaucaugaccuccuaccaguaccucaucauccagaacaccaccugggaggaccacugccaguucagccgccccucccccaucggcuaccuggggcugcucagccagcggacgcgcgacaucuacaucagccggcgccggcgcggcaccuucaccuggacccuguccgacagcgagggcaacgagacgcccgggggcuacugccugacccgguggaugcucaucgaggccgagcugaagugcuucgggaacaccgccguggccaagugcaacgagaagcacgacgaggaguucugcgacaugcugcgccucuucgacuucaacaagcaggccauccggcgccugaagaccccggcgcaggccaacauccagcugaucaacaaggccgugaacgcccucaucaacgaccagcugaucaugaagaaccaccuccgggacaucaugugcauccccuacugcaacuacuccaaguacugguaccugaaccacacggucaccggcaagaccagccugccccgcugcuggcugguguccaacgggagcuaccucaacgagacccacuucuccgacgacaucgagcagcaggccgacaacaugaucacggagcugcugcagaaggaguacauggaccggcagggcaagaccccgcucggccugguggaccuguucgucuucagcaccuccuucuaccucaucagcaucuuccugcaccuggugaagauccccacccaccgccacgugaucgggaagcccugccccaagccgcaccggcugaaccacaugggcaucugcuccugcgggcucuacaagcaccccggcguccccgugaaguggaagcgcugaggacuagucccuguucccagagcccacuuuuuuuucuuuuuuugaaauaaaauagccugucuuucagaucucaaaggcucuuuucagagccaccaaaaaaaaaaaaaaaaaaaaaaaaaaaaaaaaaaaaaaaaaaaaaaaaaaaaaaaaaaaaaaaaaaaaaaaaaaaaaaaaaaaaaaaaaaaaaaaaaaaaa

SEQ ID NO: 15773 - RNA, 1764 nt, Artificial Sequence
  mRNA product Design a-2 (hSL-A100) comprising derived and/or modified sequence from LASV(Nig08-A19;Clade III)__ADU56618__GPCmut1 (opt1)
aggagaguccgcucagccagguugcagaagcggcuuagcguguguccuaaucuucucucugcguguagguaggccugugccgcaaacaagcuuaccaugggccagaucgugaccuucuuccaggaggucccccacgugaucgaggaggugaugaacaucguccugaucgcccucagcauccuggccauccugaaggggcucuacaacaucgcgaccugcggccugaucgggcuggugacguuccuccugcuguccggccgcagcugcuccaugaccuacaaggggguguacgagcuccagacccuggagcugaacaugaacacccucaacaugacgaugccgcugagcugcaccaagaacaacucccaccacuacaucauggucggcaacgagaccggccuggagcucacccugacgaacaccagccugcuccaccacaaguucugcaaccuguccgacgcccacaagaagaaccuguacgaccacacccucaugagcaucaucuccaccuuccaccugagcauccccaacuucaaccaguacgaggccauguccugcgacuucaacgggggcaagaucacggugcaguacaaccugagccacuccuacgccaucgacgccgcgaaccacugcgggaccguggccaacggcguccuccagaccuucaugcggauggccuggggcgggagcuacaucgcccuggacuccggcugcgggaagugggacugcaucaugaccagcuaccaguaccugaucauccagaacacgaccugggaggaccacugccaguucucccgccccagccccaucggcuaccucgggcugcugucccagcggacccgcgacaucuacaucagccggcgccggcgcggcaccuucacguggacccucagcgacuccgagggcaacgagacccccgggggcuacugccugacccgguggaugcugaucgaggcggagcucaagugcuucgggaacacggccguggccaagugcaacgagaagcacgacgaggaguucugcgacaugcugcgccuguucgacuucaacaagcaggccauccggcgccucaaggccccggcgcagaugagcauccagcugaucaacaaggccgugaacgcccugaucaacgaccagcucaucaugaagaaccaccuccgggacaucaugugcauccccuacugcaacuacuccaaguacugguaccugaaccacaccagcaccggccgcaccucccugccccggugcuggcuggucagcaacggguccuaccugaacgagacgcacuucagcgacgacaucgagcagcaggccgacaacaugaucaccgagaugcuccagaaggaguaccuggaccgccagggcaagaccccgcugggccucguggaccuguucguguucuccaccagcuucuaccugaucuccaucuuccugcaccucgucaagauccccacgcaccggcacaucguggggaagcccugccccaagccgcaccgccugaaccacaugggcaucugcagcugcgggcuguacaagcagcccggcgugcccguccgguggaagcgcugaggacuagucccuguucccagagcccacuuuuuuuucuuuuuuugaaauaaaauagccugucuuucagaucucaaaggcucuuuucagagccaccaaaaaaaaaaaaaaaaaaaaaaaaaaaaaaaaaaaaaaaaaaaaaaaaaaaaaaaaaaaaaaaaaaaaaaaaaaaaaaaaaaaaaaaaaaaaaaaaaaaaa

SEQ ID NO: 15774 - RNA, 1767 nt, Artificial Sequence
  mRNA product Design a-2 (hSL-A100) comprising derived and/or modified sequence from LASV(G1180-SLE-2010;Clade IV)__AIT17168__GPCmut1 (opt1)
aggagaguccgcucagccagguugcagaagcggcuuagcguguguccuaaucuucucucugcguguagguaggccugugccgcaaacaagcuuaccaugggccagaucgugaccuucuuccaggaggucccccacgugaucgaggaggugaugaacaucguccugaucgcccucagcauccuggccgugcugaaggggcucuacaacuucgcgaccugcggccugguggggcugcucacguuccugcugcucugcggccgcuccugcaccgccagccgguacaagggggucuacgagcugcagacccuggagcucaacauggagacccugaacaugacgaugccgcuguccugcaccaagaacaacagccaccacuacaucauggugggcaacgagaccggccucgagcugacccugacgaacaccuccaucaucaaccacaaguucugcaaccucagcgacgcccacaagaagaaccuguacgaccacgcccugauguccaucaucagcaccuuccaccucuccauccccaacuucaaccaguacgaggccaugagcugcgacuucaacgggggcaagaucuccgugcaguacaaccugagccacuccuacgcgggggacgccgccaaccacugcggcaccgucgccaacggggugcugcagacguucaugcgcauggcguggggcggcagcuacaucgcccucgacuccgggugcggcagcugggacugcaucaugaccuccuaccaguaccugaucauccagaacaccaccugggaggaccacugccaguucagccggcccucccccaucggguaccugggccuccugagccagcgcacgcgggacaucuacaucagccgccggcgccggggcaccuucaccuggacccuguccgacagcgaggggaaggacacgccgggcggguacugccucacccgcuggaugcugaucgaggccgagcugaagugcuucggcaacaccgccguggccaagugcaacgagaagcacgacgaggaguucugcgacaugcuccggcuguucgacuucaacaagcaggcgauccagcgccugaaggcccccgcccagauguccauccagcucaucaacaaggccgucaacgcccugaucaacgaccagcugaucaugaagaaccaccuccgggacaucaugugcauccccuacugcaacuacagcaaguacugguaccugaaccacaccacgaccgggaagaccucccugcccaagugcuggcucgugagcaacggcuccuaccugaacgagacccacuucagcgacgacaucgagcagcaggcggacaacaugaucacggagaugcugcagaaggaguacauggagcgccagggcaagaccccgcucgggcugguggaccuguucgucuucuccaccagcuucuaccucaucuccaucuuccugcaccuggugaagauccccacccaccggcacaucgugggcaagagcugccccaagccccaccgccugaaccacauggggaucugcuccugcggccucuacaagcagccggggguccccgugaaguggaagcggugaggacuagucccuguucccagagcccacuuuuuuuucuuuuuuugaaauaaaauagccugucuuucagaucucaaaggcucuuuucagagccaccaaaaaaaaaaaaaaaaaaaaaaaaaaaaaaaaaaaaaaaaaaaaaaaaaaaaaaaaaaaaaaaaaaaaaaaaaaaaaaaaaaaaaaaaaaaaaaaaaaaaa

SEQ ID NO: 15775 - RNA, 1767 nt, Artificial Sequence
  mRNA product Design a-2 (hSL-A100) comprising derived and/or modified sequence from LASV(G1442-SLE-2011;Clade IV)__AIT17180__GPCmut1 (opt1)
aggagaguccgcucagccagguugcagaagcggcuuagcguguguccuaaucuucucucugcguguagguaggccugugccgcaaacaagcuuaccaugggccagaucgugaccuucuuccaggaggucccccacgugaucgaggaggugaugaacaucguccugaucgcccucagcauccuggccgugcugaaggggcucuacaacguggcgaccugcggccugaucgggcuggucacguuccuccugcugugcggccgcuccugcaccaccacccucuacaaggggguguacgagcugcagacgcuggagcucaacauggagacccugaacaugaccaugccgcugagcugcaccaagaacaacucccaccacuacauccgggugggcaacgagacgggccucgagcugacccugaccaacaccagcaucaucaaccacaaguucugcaaccucuccgacgcccacaagaagaaccuguacgaccacgcccugaugagcaucaucuccacguuccaccucagcauccccaacuucaaccaguacgaggccauguccugcgacuucaacgggggcaagaucagcguccaguacaaccugucccacagcuacgccggggacgcggccaaccacugcggcaccguggccaacggggugcugcagaccuucaugcgcauggccuggggcggcuccuacaucgcgcucgacagcgggugcggcaacugggacugcaucaugaccuccuaccaguaccugaucauccagaacacgaccugggacgaccacugccaguucagccggcccucccccaucggguaccugggccuccugagccagcgcacccgggacgucuacaucucccgccggcgccggggcaccuucacguggacccugagcgacagcgaggggaaggacaccccgggcggguacugccucacccgcuggaugcugaucgaggccgagcugaagugcuucggcaacacggccguggccaagugcaacgagaagcacgacgaggaguucugcgacaugcuccggcuguucgacuucaacaagcaggccauccagcgccugaaggcgcccgcccagauguccauccagcucaucaacaaggccgugaacgcccugaucaacgaccagcugaucaugaagaaccaccuccgggacaucaugugcauccccuacugcaacuacagcaaguacugguaccugaacaacaccgccaccgggaagaccucccugcccaagugcuggcucaucagcaacggcuccuaccugaacgagacgcacuucagcgacgacaucgagcaggaggcggacaacaugaucaccgagaugcugcagaaggaguacauggagcgccagggcaagaccccgcucgggcuggucgaccuguucguguucuccaccagcuucuaccucaucuccaucuuccugcaccuggugaagauccccacgcaccggcacaucgucggcaagagcugccccaagccccaccgccugaaccacauggggaucugcuccugcggccucuacaagcagccgggggugcccgugcgguggaagcgcugaggacuagucccuguucccagagcccacuuuuuuuucuuuuuuugaaauaaaauagccugucuuucagaucucaaaggcucuuuucagagccaccaaaaaaaaaaaaaaaaaaaaaaaaaaaaaaaaaaaaaaaaaaaaaaaaaaaaaaaaaaaaaaaaaaaaaaaaaaaaaaaaaaaaaaaaaaaaaaaaaaaaa

SEQ ID NO: 15776 - RNA, 1767 nt, Artificial Sequence
  mRNA product Design a-2 (hSL-A100) comprising derived and/or modified sequence from LASV(G3010-SLE-2013;Clade IV)__AIT17344__GPCmut1 (opt1)
aggagaguccgcucagccagguugcagaagcggcuuagcguguguccuaaucuucucucugcguguagguaggccugugccgcaaacaagcuuaccaugggccagaucgugaccuucuuccaggaggucccccacgugaucgaggaggugaugaacaucguccugaucgcccucagcauccuggccgugcugaaggggcucuacaacuucgcgaccugcggccugguggggcuggucacguuccuccugcugugcggccgcuccugcaccaccagccucuacaaggggguguacgagcugcagacccuggagcucaacauggagacgcugaacaugaccaugccgcuguccugcaccaagaacaacagccaccacuacaucauggugggcaacgagaccggccucgagcugacgcugaccaacaccuccaucaucaaccacaaguucugcaaccucagcgacgcccacaagaagaaccuguacaaccacgcccugauguccaucaucagcaccuuccaccucuccauccccaacuucaaccaguacgaggccaugagcugcgacuucaacgggggcaagaucuccguccaguacaaccugagccacuccuacgccggggacgcggccagccacugcggcacgguggccaacggggugcugcagaccuucaugcggauggccuggggcggcuccuacaucgcgcucgacagcgggugcggcaagugggacugcaucaugaccuccuaccaguaccugaucauccagaacaccacgugggaggaccacugccaguucagccgccccucccccaucggguaccugggccuccugagccagcggacccgcgacaucuacaucagccggcgccggcgcggcaccuucaccuggacgcuguccgacagcgaggggaaggacaccccgggcggguacugccucacccgguggaugcugaucgaggccgagcugaagugcuucggcaacaccgccgucgccaagugcaacgagaagcacgacgaggaguucugcgacaugcuccgccuguucgacuucaacaagcaggccauccagcggcugaagacgcccgcgcagauguccauccagcucaucaacaaggccgugaacgcccugaucaacgaccagcugaucaugaagaaccaccuccgcgacaucaugugcauccccuacugcaacuacagcaaguacugguaccugaaccacaccaccaccgggaagacgucccugcccaagugcuggcucgugagcaacggcuccuaccugaacgagacccacuucagcgacgacaucgagcagcaggccgacaacaugaucaccgagaugcugcagaaggaguacauggagcggcagggcaagaccccgcucgggcuggucgaccuguucguguucuccacgagcuucuaccucaucuccaucuuccugcaccuggugaagauccccacccaccgccacaucgucggcaagagcugccccaagccccaccggcugaaccacauggggaucugcuccugcggccucuacaagcagccgggggugcccgugcgcuggaagcggugaggacuagucccuguucccagagcccacuuuuuuuucuuuuuuugaaauaaaauagccugucuuucagaucucaaaggcucuuuucagagccaccaaaaaaaaaaaaaaaaaaaaaaaaaaaaaaaaaaaaaaaaaaaaaaaaaaaaaaaaaaaaaaaaaaaaaaaaaaaaaaaaaaaaaaaaaaaaaaaaaaaaa

SEQ ID NO: 15777 - RNA, 1767 nt, Artificial Sequence
  mRNA product Design a-2 (hSL-A100) comprising derived and/or modified sequence from LASV(G502-SLE-2009;Clade IV)__AIT17126__GPCmut1 (opt1)
aggagaguccgcucagccagguugcagaagcggcuuagcguguguccuaaucuucucucugcguguagguaggccugugccgcaaacaagcuuaccaugggccagaucgugaccuucuuccaggaggucccccacgugaucgaggaggugaugaacaucguccugaucgcccucagcauccuggccgugcugaaggggcucuacaacuucgcgaccugcggccugguggggcugcucacguuccugcugcucugcggccgcuccugcaccaccgggcuguacaagggcgucuacgagcugcagacccucgagcugaacauggagacgcugaacaugaccaugccgcucagcugcaccaagaacaacucccaccacuacaucauggugggcaacgagaccgggcuggagcugacgcucaccaacaccagcaucaucaaccacaaguucugcaaccuguccgacgcccacaagaagaaccuguacgaccacgcccucaugagcaucaucuccaccuuccaccugagcauccccaacuucaaccaguacgaggccauguccugcgacuucaacggcgggaagaucagcgugcaguacaaccugucccacagcuacgccggcgacgcggccgaccacugcgggacggucgccaacggcgugcuccagaccuucaugcggauggccuggggcggguccuacaucgcgcuggacagcggcugcgggcgcugggacugcaucaugaccuccuaccaguaccugaucauccagaacaccacgugggaggaccacugccaguucagccggcccucccccaucggcuaccucggccugcugagccagcgcacccgggacaucuacaucucccgccggcgccgggggaccuucaccuggacgcucagcgacagcgagggcaaggacacccccgggggcuacugccugacccgcuggaugcugaucgaggccgagcucaagugcuucgggaacaccgccguggccaagugcaacgagaagcacgacgaggaguucugcgacaugcugcggcuguucgacuucaacaagcaggccauccagcgccucaaggcgccggcccagauguccauccagcugaucaacaaggccgucaacgcccugaucaacgaccagcucgugaugaagaaccaccuccgggacaucaugugcauccccuacugcaacuacagccgcuacugguaccugaaccacacgaccaccggccggaccucccugcccaagugcuggcuggugagcaacggcuccuaccugaacgagacgcacuucagcgacgacaucgagcagcaggccgacaacaugaucaccgagaugcuccagaaggaguacauggagcgccaggggaagaccccgcugggccuggucgaccucuucguguucuccaccagcuucuaccugaucuccaucuuccugcaccuggugaagauccccacgcaccggcacaucgucggcaagagcugccccaagccccaccgccucaaccacauggggaucugcuccugcgggcuguacaagcagccgggcgugcccgugaaguggaagcggugaggacuagucccuguucccagagcccacuuuuuuuucuuuuuuugaaauaaaauagccugucuuucagaucucaaaggcucuuuucagagccaccaaaaaaaaaaaaaaaaaaaaaaaaaaaaaaaaaaaaaaaaaaaaaaaaaaaaaaaaaaaaaaaaaaaaaaaaaaaaaaaaaaaaaaaaaaaaaaaaaaaaa

SEQ ID NO: 15778 - RNA, 1767 nt, Artificial Sequence
  mRNA product Design a-2 (hSL-A100) comprising derived and/or modified sequence from LASV(G733-SLE-2010;Clade IV)__AIT17154__GPCmut1 (opt1)
aggagaguccgcucagccagguugcagaagcggcuuagcguguguccuaaucuucucucugcguguagguaggccugugccgcaaacaagcuuaccaugggccagaucgugaccuucuuccaggaggucccccacgugaucgaggaggugaugaacaucguccugaucgcccucagcauccuggccgugcugaaggggcucuacaacuucgcgaccugcggcaucguggggcuggucuccuuccugcuccugugcggccgcagcugcacgaccucccuguacaaggggguguacgagcuccagacccuggagcugaacauggagacccucaacaugacgaugccgcugagcugcaccaagaacaacucccaccacuacaucauggugggcaacgagaccggccuggagcucacccugacgaacaccagcaucaucaaccacaaguucugcaaccuguccgacgcccacaagaagaaccucuacgaccacgcccugaugagcaucaucuccaccuuccaccugagcauccccaacuucaaccaguacgaggccauguccugcgacuucaacgggggcaagaucagcguccaguacaaccucucccacagcuacgccggggacgcggccaaccacugcggcaccaucgccaacggggugcugcagacguucaugcggauggccuggggcggcuccuacaucgcgcuggacagcgggugcgaccgcugggacugcaucaugaccuccuaccaguaccucaucauccagaacaccaccugggaggaccacugccaguucagccggcccucccccaucggcuaccuggggcugcucagccagcgcacgcgggacaucuacaucagccgccggcgccggggcaccuucaccuggacccuguccgacagcgagggcaaggacacgcccgggggcuacugccugacccgcuggaugcucaucgaggccgagcugaagugcuucgggaacaccgccguggccaagugcaacgagaagcacgacgaggaguucugcgacaugcugcggcuguucgacuucaacaagcaggccauccagcgccugaaggcgccggcccagauguccauccagcugaucaacaaggccgucaacgcccucaucaacgaccagcugaucaugaagaaccaccuccgggacaucaugugcauccccuacugcaacuacagcaaguacugguaccucaaccacaccacgaccggcaagaccucccugcccaagugcuggcuggugagcaacggguccuaccucaacgagacccacuucagcgacgacaucgagcagcaggccgacaacaugaucacggagaugcugcagaaggaguacauggagcgccagggcaagaccccgcugggccucguggaccuguucgucuucuccaccagcuucuaccugaucuccaucuuccuccaccuggugaagauccccacccaccggcacguggucggcaagagcugccccaagccccaccgccugaaccacauggggaucugcuccugcgggcuguacggccagccgggggugcccgugaaguggaagcggugaggacuagucccuguucccagagcccacuuuuuuuucuuuuuuugaaauaaaauagccugucuuucagaucucaaaggcucuuuucagagccaccaaaaaaaaaaaaaaaaaaaaaaaaaaaaaaaaaaaaaaaaaaaaaaaaaaaaaaaaaaaaaaaaaaaaaaaaaaaaaaaaaaaaaaaaaaaaaaaaaaaaa

SEQ ID NO: 15779 - RNA, 1767 nt, Artificial Sequence
  mRNA product Design a-2 (hSL-A100) comprising derived and/or modified sequence from MOPV/LASV reassortant(IGS-1;Clade IV)__AFY05576__GPCmut1 (opt1)
aggagaguccgcucagccagguugcagaagcggcuuagcguguguccuaaucuucucucugcguguagguaggccugugccgcaaacaagcuuaccaugggccagaucgugaccuucuuccaggaggucccccacgugaucgaggaggugaugaacaucguccugaucgcccucagcgugcuggccgugcugaaggggcucuacaacuucgcgaccugcggccuggucgggcuggugacguuccuccugcugugcggccgcuccugcaccaccagccucuacaaggggguguacgagcugcagacccuggagcucaacauggagacgcugaacaugaccaugccgcuguccugcaccaagaacaacagccaccacuacaucauggucggcaacgagaccggccucgagcugacgcugaccaacaccuccaucaucaaccacaaguucugcaaccucagcgacgcccacaagaagaaccuguacgaccacgcccugauguccaucaucagcaccuuccaccucuccauccccaacuucaaccaguacgaggccaugagcugcgacuucaacgggggcaagaucuccgugcaguacaaccugagccacuccuacgccggggacgcggccaaccacugcggcacgguggccaacgggguccugcagaccuucaugcggauggccuggggcggcagcuacaucgcgcucgacuccgggugcggcaacugggacugcaucaugaccagcuaccaguaccugaucauccagaacaccacgugggaggaccacugccaguucucccgccccagccccaucggguaccugggccuccugucccagcggacccgcgacaucuacaucagccggcgccggcgcggcaccuucaccuggacgcugagcgacuccgagggggaggacaccccgggcggguacugccucacccgguggaugcugaucgaggccgagcugaagugcuucggcaacaccgccguggccaagugcaacgagaagcacgacgaggaguucugcgacaugcuccgccuguucgacuucaacaagcaggccauccagcggcugaaggcgcccgcccagaugagcauccagcucaucaacaaggccgugaacgcccugaucaacgaccagcugaucaugaagaaccaccuccgcgacaucaugugcauccccuacugcaacuacuccaaguacugguaccugaaccacacgaccaccgggcggaccagccugcccaagugcuggcucgucuccaacggcagcuaccugaacgagacgcacuucuccgacgacaucgagcagcaggccgacaacaugaucaccgagaugcugcagaaggaguacauggagcgccagggcaagaccccgcucgggcugguggaccuguucguguucagcaccuccuucuaccucaucagcaucuuccugcaccuggucaagauccccacgcaccggcacaucgugggcaaguccugccccaagccccaccgccugaaccacauggggaucugcagcugcggccucuacaagcagccgggggugcccgucaaguggaagcggugaggacuagucccuguucccagagcccacuuuuuuuucuuuuuuugaaauaaaauagccugucuuucagaucucaaaggcucuuuucagagccaccaaaaaaaaaaaaaaaaaaaaaaaaaaaaaaaaaaaaaaaaaaaaaaaaaaaaaaaaaaaaaaaaaaaaaaaaaaaaaaaaaaaaaaaaaaaaaaaaaaaaa

SEQ ID NO: 15780 - RNA, 1767 nt, Artificial Sequence
  mRNA product Design a-2 (hSL-A100) comprising derived and/or modified sequence from LASV(LM765-SLE-2012;Clade IV)__AIT17814__GPCmut1 (opt1)
aggagaguccgcucagccagguugcagaagcggcuuagcguguguccuaaucuucucucugcguguagguaggccugugccgcaaacaagcuuaccaugggccagaucgugaccuucuuccaggaggucccccacgugaucgaggaggugaugaacaucguccugaucgcccucagcauccuggccgugcugaaggggcucuacaacuucgcgaccugcggccugguggggcuggucacguuccuccugcugugcggccgcuccugcaccaccagccucuacaaggggguguacgagcugcagacccuggagcucaacauggagacgcugaacaugaccaugccgcuguccugcaccaagaacaacagccaccacuacaucauggugggcaacgagaccggccucgagcugacgcugaccaacaccuccaucaucgaccacaaguucugcaaccucagcgacgcccaccggaagaaccuguacgaccacgcccugauguccaucaucagcaccuuccaccucuccauccccaacuucaaccaguacgaggccaugagcugcgacuucaacgggggcaagaucuccguccaguacaaccugagccacuccuacgccaaggacgcggccgaccacugcgggacgguggccaacggcgugcugcagaccuucaugcgcauggccuggggcgggagcuacaucgcgcucgacuccggcugcgggcggugggacugcaucaugaccagcuaccaguaccugaucauccagaacaccacgugggaggaccacugccaguucucccgccccagccccaucggcuaccuggggcuccugucccagcggacccgcgacaucuacaucagccggcgccggcgcggcaccuucaccuggacgcugagcgacuccgagggcaaggacacccccgggggcuacugccucacccgguggaugcugaucgaggccgagcugaagugcuucgggaacaccgccgucgccaagugcaacgagaagcacgacgaggaguucugcgacaugcuccgccuguucgacuucaacaagcaggccauccagcggcugaaggcgccggcccagaugagcauccagcucaucaacaaggccgugaacgcccugaucaacgaccagcugaucaugaagaaccaccuccgcgacaucaugugcauccccuacugcaacuacuccaaguacugguaccugaaccacacgaccaccggcaagaccagccugcccaagugcuggcucguguccaacgggagcuaccugaacgagacgcacuucuccgacgacaucgagcagcaggccgacaacaugaucaccgagaugcugcagaaggaguacauggagcggcagggcaagaccccgcucggccuggucgaccuguucguguucagcaccuccuucuaccucaucagcaucuuccugcaccuggugaagauccccacgcaccgccacaucgucgggaagcccugccccaagccgcaccggcugaaccacaugggcaucugcuccugcgggcucuacaagcagcccggcgugcccgugaaguggaagcgcugaggacuagucccuguucccagagcccacuuuuuuuucuuuuuuugaaauaaaauagccugucuuucagaucucaaaggcucuuuucagagccaccaaaaaaaaaaaaaaaaaaaaaaaaaaaaaaaaaaaaaaaaaaaaaaaaaaaaaaaaaaaaaaaaaaaaaaaaaaaaaaaaaaaaaaaaaaaaaaaaaaaaa

SEQ ID NO: 15781 - RNA, 1767 nt, Artificial Sequence
  mRNA product Design a-2 (hSL-A100) comprising derived and/or modified sequence from LASV(LM776-SLE-2012;Clade IV)__AIT17824__GPCmut1 (opt1)
aggagaguccgcucagccagguugcagaagcggcuuagcguguguccuaaucuucucucugcguguagguaggccugugccgcaaacaagcuuaccaugggccagaucgugaccuucuuccaggaggucccccacgugaucgaggaggugaugaacaucguccugaucgcccucagcauccuggccgugcugaaggggcucuacaacuucgcgaccugcggccugguggggcuggucacguuccuccugcugugcggccgcuccugcaccaccagcguguacaaggggguguacgagcuccagacccuggagcugaacauggagacgcucaacaugaccaugccgcuguccugcaccaagaacaacagccaccacuacaucauggucggcaacgagaccggccuggagcucacgcugaccaacaccuccaucaucaaccacaaguucugcaaccugagcgacgcccacaagaagaaccucuacgaccacgcccugauguccaucaucagcaccuuccaccuguccauccccaacuucaaccaguacgaggccaugagcugcgacuucaacgggggcaagaucuccgugcaguacaaccucagccacuccuacgccggggacgcggccaaccacugcggcacgguggccaacgggguccugcagaccuucaugcggauggccuggggcggcagcuacaucgcgcuggacuccgggugcggcaagugggacugcaucaugaccagcuaccaguaccucaucauccagaacaccacgugggaggaccacugccaguucucccgccccagccccaucggguaccugggccugcucucccagcggacccgcgacaucuacaucagccggcgccggcgcggcaccuucaccuggacgcugagcgacuccgaggggaaggacaccccgggcggguacugccugacccgguggaugcucaucgaggccgagcugaagugcuucggcaacaccgccguggccaagugcaacgagaagcacgacgaggaguucugcgacaugcugcgccucuucgacuucaacaagcaggccauccagcggcugaaggcgcccgcccagaugagcauccagcugaucaacaaggccgugaacgcccucaucaacgaccagcugaucaugaagaaccaccuccgcgacaucaugugcauccccuacugcaacuacuccaaguacugguaccugaaccacacgaccaccgggaagaccagccugcccaagugcuggcuggucuccaacggcagcuaccucaacgagacgcacuucuccgacgacaucgagcagcaggccgacaacaugaucaccgagaugcugcagaaggaguacauggagcggcagggcaagaccccgcuggggcucguggaccuguucguguucagcaccuccuucuaccugaucagcaucuuccuccaccuggucaagauccccacgcaccgccacaucgugggcaaguccugccccaagccccaccggcugaaccacauggggaucugcagcugcggccuguacaagcagccgggggugcccguccgcuggaagcggugaggacuagucccuguucccagagcccacuuuuuuuucuuuuuuugaaauaaaauagccugucuuucagaucucaaaggcucuuuucagagccaccaaaaaaaaaaaaaaaaaaaaaaaaaaaaaaaaaaaaaaaaaaaaaaaaaaaaaaaaaaaaaaaaaaaaaaaaaaaaaaaaaaaaaaaaaaaaaaaaaaaaa

SEQ ID NO: 15782 - RNA, 1767 nt, Artificial Sequence
  mRNA product Design a-2 (hSL-A100) comprising derived and/or modified sequence from LASV(Mad39;Clade IV)__ANH09722__GPCmut1 (opt1)
aggagaguccgcucagccagguugcagaagcggcuuagcguguguccuaaucuucucucugcguguagguaggccugugccgcaaacaagcuuaccaugggccagaucgugaccuucuuccaggaggucccccacgugaucgaggaggugaugaacaucguccugaucgcccucagcauccuggccgugcugaaggggcucuacaacguggcgaccugcggccugaucgggcuggucacguuccuccugcugugcggccgcuccugcaccaccacccucuacaaggggguguacgagcugcaggcccuggagcucaacauggagacgcugaacaugaccaugccgcugagcugcaccaagaacaacucccaccacuacauccgggugggcaacgagaccggccucgagcugacgcugaccaacaccagccucaucaaccacaaguucugcaaccuguccgacgcccacaagaagaaccuguacgaccacgcccucaugagcaucaucuccaccuuccaccugagcauccccaacuucaaccaguacgaggccauguccugcgacuucaacgacgggaagaucagcguccaguacaaccugucccacacguacgcgggcgacaccgccaaccacugcgggaccguggccaacggcgugcuccagaccuucaugcgcauggccuggggcgggagcuacaucgcgcuggacuccggcugcgggggcugggacugcaucaugacgagcuaccaguaccugaucauccagaacaccaccugggaggaccacugccaguucucccggcccagccccaucggguaccucggccugcugucccagcgcacccgggacaucuacaucagccgccggcgccggggcacguucaccuggacccucuccgacagcgaggggaaggacaccccgggcggguacugccugacgcgcuggaugcugaucgaggccgagcucaagugcuucggcaacaccgccgucgccaagugcaacgagaagcacgacgaggaguucugcgacaugcugcggcuguucgacuucaacaagcaggccauccagcgccucaaggcgcccgcccagaugagcauccagcugaucaacaaggccgugaacgcccugaucaacgaccagcucaucaugaagaaccaccuccgggacaucaugugcauccccuacugcaacuacuccaaguacugguaccugaaccacaccgugaccgggaagacgagccugcccaagugcuggcuggucuccaacggcagcuaccugaacgagacccacuucuccgacgacaucgagcagcaggccgacaacaugaucaccgagaugcuccagaaggaguacauggagcgccagggcaagaccccgcuggggcugguggaccucuucguguucagcacguccuucuaccugaucagcaucuuccugcaccuggucaagauccccacccaccggcacguggugggcaagcccugccccaagccgcaccgccucaaccacauggggaucugcuccugcggcuucuacaagcagcccgggguccccgugcgguggaagcgcugaggacuagucccuguucccagagcccacuuuuuuuucuuuuuuugaaauaaaauagccugucuuucagaucucaaaggcucuuuucagagccaccaaaaaaaaaaaaaaaaaaaaaaaaaaaaaaaaaaaaaaaaaaaaaaaaaaaaaaaaaaaaaaaaaaaaaaaaaaaaaaaaaaaaaaaaaaaaaaaaaaaaa

SEQ ID NO: 15783 - RNA, 1767 nt, Artificial Sequence
  mRNA product Design a-2 (hSL-A100) comprising derived and/or modified sequence from LASV(Z0947-SLE-2011;Clade IV)__AIT17840__GPCmut1 (opt1)
aggagaguccgcucagccagguugcagaagcggcuuagcguguguccuaaucuucucucugcguguagguaggccugugccgcaaacaagcuuaccaugggccagaucgugaccuucuuccaggaggucccccacgugaucgaggaggugaugaacaucguccugaucgcccucagcauccuggccgugcugaaggggcucuacaacuucgcgaccugcggccugguggggcuggucacguuccuccugcugugcggccgcuccugcaccaucagccucuacaaggggguguacgagcugcagacccuggagcucaacauggagacccugaacaugacgaugccgcuguccugcaccaagaacaacagccaccacuacaucauggugggcaacgagaccggccucgagcugacccugacgaacaccuccaucaucaaccacaaguucugcaaccucagcgacgcccacaagaagaaccuguacgaccacgcccugauguccaucaucagcaccuuccaccucuccauccccaacuucaaccaguacgaggccaugagcugcgacuucaacgggggcaagaucuccguccaguacaaccugagccacuccuacgccggggacgcggccaaccacugcggcaccguggccaacggggugcugcagacguucaugcggauggccuggggcggcagcuacaucgcgcucgacuccgggugcgaccgcugggacugcaucaugaccagcuaccaguaccugaucauccagaacaccaccugggaggaccacugccaguucucccggcccagccccaucggcuaccuggggcuccugucccagcgcacgcgggacaucuacaucagccgccggcgccggggcaccuucaccuggacccugagcgacuccgagggcaaggacacgcccgggggcuacugccucacccgcuggaugcugaucgaggccgagcugaagugcuucgggaacaccgccgucgccaagugcaacgagaagcacgacgaggaguucugcgacaugcuccggcuguucgacuucaacaagcaggccauccagcgccugaaggcgccggcccagaugagcauccagcucaucaacaaggccgugaacgcccugaucaacgaccagcugaucaugaagaaccaccuccgggacaucaugugcauccccuacugcaacuacuccaaguacugguaccugaaccacaccacgaccggcaagaccagccugcccaagugcuggcucguguccaacgggagcuaccugaacgagacccacuucuccgacgacaucgagcagcaggccgacaacaugaucacggagaugcugcagaaggaguacauggagcgccagggcaagaccccgcucggccuggucgaccuguucguguucagcaccuccuucuaccucaucagcaucuuccugcaccuggugaagauccccacccaccggcacaucgucgggaagcccugccccaagccgcaccgccugaaccacaugggcaucugcuccugcgggcucuacaagcagcccggcgugcccgugaaguggaagcggugaggacuagucccuguucccagagcccacuuuuuuuucuuuuuuugaaauaaaauagccugucuuucagaucucaaaggcucuuuucagagccaccaaaaaaaaaaaaaaaaaaaaaaaaaaaaaaaaaaaaaaaaaaaaaaaaaaaaaaaaaaaaaaaaaaaaaaaaaaaaaaaaaaaaaaaaaaaaaaaaaaaaa

SEQ ID NO: 15784 - RNA, 1767 nt, Artificial Sequence
  mRNA product Design a-2 (hSL-A100) comprising derived and/or modified sequence from LASV(Josiah;Clade IV)__NP_694870__GPCmut1 (opt4)
aggagaguccgcucagccagguugcagaagcggcuuagcguguguccuaaucuucucucugcguguagguaggccugugccgcaaacaagcuuaccaugggccagaucgugaccuucuuccaggaggugccccacgugaucgaggaggugaugaacaucgugcugaucgcccugagcgugcuggccgugcugaagggccuguacaacuucgccaccugcggccuggugggccuggugaccuuccugcugcugugcggcagaagcugcaccaccagccuguacaagggcguguacgagcugcagacccuggagcugaacauggagacccugaacaugaccaugccccugagcugcaccaagaacaacagccaccacuacaucauggugggcaacgagaccggccuggagcugacccugaccaacaccagcaucaucaaccacaaguucugcaaccugagcgacgcccacaagaagaaccuguacgaccacgcccugaugagcaucaucagcaccuuccaccugagcauccccaacuucaaccaguacgaggccaugagcugcgacuucaacggcggcaagaucagcgugcaguacaaccugagccacagcuacgccggcgacgccgccaaccacugcggcaccguggccaacggcgugcugcagaccuucaugagaauggccuggggcggcagcuacaucgcccuggacagcggcugcggcaacugggacugcaucaugaccagcuaccaguaccugaucauccagaacaccaccugggaggaccacugccaguucagcagacccagccccaucggcuaccugggccugcugagccagagaaccagagacaucuacaucagcagaagacgccggggcaccuucaccuggacccugagcgacagcgagggcaaggacacccccggcggcuacugccugaccagauggaugcugaucgaggccgagcugaagugcuucggcaacaccgccguggccaagugcaacgagaagcacgacgaggaguucugcgacaugcugagacuguucgacuucaacaagcaggccauccagagacugaaggcccccgcccagaugagcauccagcugaucaacaaggccgugaacgcccugaucaacgaccagcugaucaugaagaaccaccugagagacaucaugugcauccccuacugcaacuacagcaaguacugguaccugaaccacaccaccaccggcagaaccagccugcccaagugcuggcuggugagcaacggcagcuaccugaacgagacccacuucagcgacgacaucgagcagcaggccgacaacaugaucaccgagaugcugcagaaggaguacauggagagacagggcaagaccccccugggccugguggaccuguucguguucagcaccagcuucuaccugaucagcaucuuccugcaccuggugaagauccccacccacagacacaucgugggcaagagcugccccaagccccacagacugaaccacaugggcaucugcagcugcggccuguacaagcagcccggcgugcccgugaaguggaagagaugaggacuagucccuguucccagagcccacuuuuuuuucuuuuuuugaaauaaaauagccugucuuucagaucucaaaggcucuuuucagagccaccaaaaaaaaaaaaaaaaaaaaaaaaaaaaaaaaaaaaaaaaaaaaaaaaaaaaaaaaaaaaaaaaaaaaaaaaaaaaaaaaaaaaaaaaaaaaaaaaaaaaa

SEQ ID NO: 15785 - RNA, 1764 nt, Artificial Sequence
  mRNA product Design a-2 (hSL-A100) comprising derived and/or modified sequence from LASV(LP;Clade I)__AAF86701__GPCmut1 (opt4)
aggagaguccgcucagccagguugcagaagcggcuuagcguguguccuaaucuucucucugcguguagguaggccugugccgcaaacaagcuuaccaugggccagaucaucaccuucuuccaggaggugccccacgugaucgaggaggugaugaacaucgugcugaucgcccugagccugcuggccauccugaagggccuguacaacaucgccaccugcggcaucaucggccugguggccuuccuguuccugugcggcaagagcugcagccugacccugaagggcggcuacgagcugcagacccuggagcugaacauggagacccugaacaugaccaugccccugagcugcaccaagaacagcagccaccacuacaucagagugggcaacgagaccggccuggagcugacccugaccaacaccagcaucaucaaccacaaguucugcaaccugagcgacgcccacaagaagaaccuguacgaccacgcccugaugagcaucaucagcaccuuccaccugagcauccccaacuucaaccaguacgaggccaugagcugcgacuucaacggcggcaagaucagcgugcaguacaaccugagccacagcuacgccggcgacgccgccgagcacugcggcaccguggccaacggcgugcugcagaccuucaugagaauggccuggggcggcagauacaucgcccuggacagcggcugcggcaacugggacugcaucaugaccagcuaccaguaccugaucauccagaacaccaccugggaggaccacugccaguucagcagacccagccccaucggcuaccugggccugcugagccagagaaccagagacaucuacaucagcagaagacgccggggcaccuucaccuggacccugagcgacagcgagggcaacgagacccccggcggcuacugccugaccagauggaugcugaucgaggccgagcugaagugcuucggcaacaccgccguggccaagugcaacgagaagcacgacgaggaguucugcgacaugcugagacuguucgacuucaacaagcaggccaucagaagacugaaggcccccgcccagaugagcauccagcugaucaacaaggccgugaacgcccugaucaacgaccagcugaucaugaagaaccaccugagagacaucaugugcauccccuacugcaacuacagcaaguacugguaccugaaccacaccagcagcggcagaaccagccugcccaagugcuggcugaucagcaacggcagcuaccugaacgagacccaguucagcgacgacaucgagcagcaggccgacaacaugaucaccgagaugcugcagaaggaguacaucgagagacagggcaagaccccccugggccugguggacaucuucaucuucagcaccagcuucuaccugaucagcaucuuccugcaccugaucaagauccccacccacagacacaucgugggcaagcccugccccaagccccacagacugaaccacaugggcgugugcagcugcggccuguacaagcaccccggcgugcccaccaaguggaagagaugaggacuagucccuguucccagagcccacuuuuuuuucuuuuuuugaaauaaaauagccugucuuucagaucucaaaggcucuuuucagagccaccaaaaaaaaaaaaaaaaaaaaaaaaaaaaaaaaaaaaaaaaaaaaaaaaaaaaaaaaaaaaaaaaaaaaaaaaaaaaaaaaaaaaaaaaaaaaaaaaaaaaa

SEQ ID NO: 15786 - RNA, 1764 nt, Artificial Sequence
  mRNA product Design a-2 (hSL-A100) comprising derived and/or modified sequence from LASV(803213;Clade II)__AAF86703__GPCmut1 (opt4)
aggagaguccgcucagccagguugcagaagcggcuuagcguguguccuaaucuucucucugcguguagguaggccugugccgcaaacaagcuuaccaugggccagaucaucaccuucuuccaggaggugccccacgugaucgaggaggugaugaacaucgugcugaucgcccugagccugcuggccauccugaagggcaucuacaacguggccaccugcggccuguucggccugaucagcuuccugcugcugugcggcagaagcugcagcgugaccuacaagggcguguacgagcugcagacccuggagcugaacauggccaaccugaacaugaccaugccccugagcugcaccaagaacaacagccaccacuacaucauggugggcaacgagaccggccuggagcugacccugaccaacaccagcaucaucaaccacaaguucugcaaccugagcgacgcccacaagaagaaccuguacgaccacgcccugaugagcaucaucagcaccuuccaccugagcauccccaacuucaaccaguacgaggccaugagcugcgacuucaacggcggcaagaucagcgugcaguacaaccugagccacagcuucgccguggacgccgccaaccacugcggcaccaucgccaacggcgugcugcagaccuucaugagaauggccuggggcggcagcuacaucgcccuggacagcggcugcggcaacugggacugcaucaugaccagcuaccaguaccugaucauccagaacaccaccugggaggaccacugccaguucagcagacccagccccaucggcuaccugggccugcugagccagagaaccagagacaucuacaucagcagaagacgccggggcaccuucaccuggacccugagcgacagcgagggcaacgaggcccccggcggcuacugccugaccagauggaugcugaucgaggccgagcugaagugcuucggcaacaccgccguggccaagugcaacgagaagcacgacgaggaguucugcgacaugcugagacuguucgacuucaacaagcaggccaucaagagacugaagacccccgcccagaugagcauccagcugaucaacaaggccgugaacgcccugaucaacgaccagcugaucaugaagaaccaccugagagacaucaugugcauccccuacugcaacuacagcagauacugguaccugaaccacaccgugaccggcaagaccagccugcccagaugcuggcuggugagcaacggcagcuaccugaacgagacccacuucagcgacgacaucgagcagcaggccgacaacaugaucaccgagaugcugcagaaggaguacauggacagacagggcaagaccccccugggccugguggaccuguucguguucagcaccagcuucuaccugaucagcaucuuccugcaccuggugaagauccccacccacagacacaucgugggcaagcccugccccaagccccacagacugaaccacaugggcaucugcagcugcggccuguacaagcaccccggcgugcccgugaaguggaagagaugaggacuagucccuguucccagagcccacuuuuuuuucuuuuuuugaaauaaaauagccugucuuucagaucucaaaggcucuuuucagagccaccaaaaaaaaaaaaaaaaaaaaaaaaaaaaaaaaaaaaaaaaaaaaaaaaaaaaaaaaaaaaaaaaaaaaaaaaaaaaaaaaaaaaaaaaaaaaaaaaaaaaa

SEQ ID NO: 15787 - RNA, 1764 nt, Artificial Sequence
  mRNA product Design a-2 (hSL-A100) comprising derived and/or modified sequence from LASV(GA391;Clade III)__CAA36645__GPCmut1 (opt4)
aggagaguccgcucagccagguugcagaagcggcuuagcguguguccuaaucuucucucugcguguagguaggccugugccgcaaacaagcuuaccaugggccagaucgugaccuucuuccaggaggugccccacgugaucgaggaggugaugaacaucgugcugaucgcccugagcauccuggccauccugaagggccuguacaacguggccaccugcggccugaucggccuggugaccuuccugcugcugagcggcagaagcugcagccugaucuacaagggcaccuacgagcugcagacccuggagcugaacauggagacccugaacaugaccaugccccugagcugcaccaagaacaacagccaccacuacaucagagugggcaacgagaccggccuggagcugacccugaccaacaccagcauccugaaccacaaguucugcaaccugagcgacgcccacaagagaaaccuguacgaccacagccugaugagcaucaucagcaccuuccaccugagcauccccaacuucaaccaguacgaggccaugagcugcgacuucaacggcggcaagaucaccgugcaguacaaccugagccacagcuucgccguggacgccgccggccacugcggcacccuggccaacggcgugcugcagaccuucaugagaauggccuggggcggcagcuacaucgcccuggacagcggcugcggcaacugggacugcaucaugaccagcuaccaguaccugaucauccagaacaccaccugggacgaccacugccaguucagcagacccagccccaucggcuaccugggccugcugagccagagaaccagagacaucuacaucagcagaagacgccggggcaccuucaccuggacccugagcgacagcgagggcaacgagacccccggcggcuacugccugaccagauggaugcugaucgaggccgagcugaagugcuucggcaacaccgccguggccaagugcaacgagaagcacgacgaggaguucugcgacaugcugagacuguucgacuucaacaagcaggccaucagaagacugaagacccccgcccagaugagcauccagcugaucaacaaggccgugaacgcccugaucaacgaccagcugaucaugaagaaccaccugagagacaucaugugcauccccuacugcaacuacagcagauacugguaccugaaccacaccagcaccggcaagaccagccugcccagaugcuggcugaucagcaacggcagcuaccugaacgagaccaaguucagcgacgacaucgagcagcaggccgacaacaugaucaccgagaugcugcagaaggaguacaucgacagacagggcaagaccccccugggccugguggaccuguucguguucagcaccagcuucuaccugaucagcaucuuccugcaccuggugaagauccccacccacagacacaucgugggcaagcccugccccaagccccacagacugaaccacaugggcaucugcagcugcggccuguacaagcagcccggcgugcccgugagauggaagagaugaggacuagucccuguucccagagcccacuuuuuuuucuuuuuuugaaauaaaauagccugucuuucagaucucaaaggcucuuuucagagccaccaaaaaaaaaaaaaaaaaaaaaaaaaaaaaaaaaaaaaaaaaaaaaaaaaaaaaaaaaaaaaaaaaaaaaaaaaaaaaaaaaaaaaaaaaaaaaaaaaaaaa

SEQ ID NO: 15788 - RNA, 1767 nt, Artificial Sequence
  mRNA product Design a-2 (hSL-A100) comprising derived and/or modified sequence from LASV(AV;Clade V)__CCA30314__GPCmut1 (opt4)
aggagaguccgcucagccagguugcagaagcggcuuagcguguguccuaaucuucucucugcguguagguaggccugugccgcaaacaagcuuaccaugggccagaucgugaccuucuuccaggaggugccccacgugaucgaggaggugaugaacaucgugcugaucgcccugagcauccuggccgugcugaagggccuguacaacaucgccaccugcggccugaucggccugaucaccuuccugcugcugugcggcagaagcugcagcagcaaccuguacaagggcguguacgagcugcagagccuggaccugaacauggagacccugaacaugaccaugccccugagcugcaccaagaacaacagccaccacuacaucagagugggcaacgacaccggccuggagcugacccugaccaacaccagcauccugaaccacaaguucugcaaccugagcgacgcccacaagaaggaccuguacgaccacgcccugaugagcaucaucagcaccuuccaccugagcauccccaacuucaaccaguacgaggccaugagcugcgacuucaacggcggcaagaucagcgugcaguacaaccugagccacagcuacgccaucgacgccgccaaccacugcggcaccguggccaacggcauccugcagaccuucaugagaauggccuggggcggcagcuacaucgcccuggacagcggcugcggcaacugggacugcaucaugaccagcuaccaguaccugaucauccagaacaccaccugggagaaccacugccaguucagcagacccagccccaucggcuaccugggccugcugagccagagaaccagagacaucuacaucagcagaagacgccggggcaccuucaccuggacccugagcgacagcgagggcaacgccacccccggcggcuacugccugaccagauggaugcugaucgaggccgagcugaagugcuucggcaacaccgccguggccaagugcaacgagaagcacgacgaggaguucugcgacaugcugagacuguucgacuucaacaagcaggccaucagcagacugaagagccccgcccagaugagcauccagcugaucaacaaggccgugaacgcccugaucaacgaccagcugaucaugaagaaccaccugagagacaucaugugcauccccuacugcaacuacagcaaguacugguaccugaaccacaccaucaccggcaagaccagccugcccaagugcuggcuggugagcaacggcagcuaccugaacgagacccacuucagcgacgacaucgagcagcaggccgacaacaugaucaccgagaugcugcagaaggaguacauggagagacagggcaagaccccccugggccugguggaccuguucguguucagcaccagcuucuaccugaucagcaucuuccugagacuggugaagauccccacccacagacacaucgugggcaagcccugccccaagccccacagacugaaccacaugggcaucugcagcugcggccuguacaagcagcccggcgugcccgugagauggaagagaugaggacuagucccuguucccagagcccacuuuuuuuucuuuuuuugaaauaaaauagccugucuuucagaucucaaaggcucuuuucagagccaccaaaaaaaaaaaaaaaaaaaaaaaaaaaaaaaaaaaaaaaaaaaaaaaaaaaaaaaaaaaaaaaaaaaaaaaaaaaaaaaaaaaaaaaaaaaaaaaaaaaaa

SEQ ID NO: 15789 - RNA, 1764 nt, Artificial Sequence
  mRNA product Design a-2 (hSL-A100) comprising derived and/or modified sequence from LASV(Togo/2016/7082;Clade VI)__AMR44577__GPCmut1 (opt4)
aggagaguccgcucagccagguugcagaagcggcuuagcguguguccuaaucuucucucugcguguagguaggccugugccgcaaacaagcuuaccaugggccagaucaucaccuucuuccaggaggugccccacgugaucgaggaggugaugaacaucgugcugaucgcccugagccugcuggccauccugaagggcguguacaacguggccaccugcggcaucaucggccuggugaccuuccuguuccugugcggcagaagcugcagccugaucuacaagggcagcuacgagcugcagacccuggagcugaacauggagacccugaacaugaccaugccccugagcugcaccaagaacagcagccaccacuacaucagagugggcaacgagaccggccuggagcugacccugaccaacaccagcaucaucaaccacaaguucugcaaccugagcgacgcccacaagagaaaccuguacgaccacgcccugaugagcauccugagcaccuuccaccugagcauccccaacuucaaccaguacgaggccaugagcugcgacuucaacggcggcaagaucagcgugcaguacaaccugagccacgccuacgccguggacgccgccgagcacugcggcaccguggccaacggcgugcugcagaccuucaugagaauggccuggggcggcagcuacaucgcccuggacagcggcugcggcaacugggacugcaucaugaccagcuaccaguaccugaucauccagaacaccaccugggaggaccacugccaguucagcagacccagccccaucggcuaccugggccugcugagccagagaaccagagacaucuacaucagcagaagacgccggggcaccuucaccuggacccugagcgacagcgagggcaacgagacccccggcggcuacugccugaccagauggaugcugaucgaggccgagcugaagugcuucggcaacaccgccguggccaagugcaacgagaagcacgacgaggaguucugcgacaugcugagacuguucgacuucaacaagcaggccauccagagacugaagagccccgcccagaugagcauccagcugaucaacaaggccgugaacgcccugaucaacgaccagcugaucaugaagaaccaccugagagacaugaugugcauccccuacugcaacuacagcaaguacugguaccugaaccacaccagcagcggcagaaccagccugcccaagugcuggcuggugagcaacggcagcuaccugaacgagacccacuucagcgacgacaucgagcagcaggccgacaacaugaucaccgagaugcugcagaaggaguacaucgacagacagggcaagaccccccugggccugguggaccuguucguguucagcaccagcuucuaccugaucagcaucuuccugcaccugaucaagauccccacccacagacacaucgugggcaagcccugccccaagccccacagacugaaccacaugggcaucugcagcugcggccuguacaagcagcccggcgugcccaccagauggaagagaugaggacuagucccuguucccagagcccacuuuuuuuucuuuuuuugaaauaaaauagccugucuuucagaucucaaaggcucuuuucagagccaccaaaaaaaaaaaaaaaaaaaaaaaaaaaaaaaaaaaaaaaaaaaaaaaaaaaaaaaaaaaaaaaaaaaaaaaaaaaaaaaaaaaaaaaaaaaaaaaaaaaaa

SEQ ID NO: 15790 - RNA, 1764 nt, Artificial Sequence
  mRNA product Design a-2 (hSL-A100) comprising derived and/or modified sequence from LASV(KAK-428;Clade n.d. (VII))__ANH09740__GPCmut1 (opt4)
aggagaguccgcucagccagguugcagaagcggcuuagcguguguccuaaucuucucucugcguguagguaggccugugccgcaaacaagcuuaccaugggccagaucgugaccuucuuccaggaggugccccacgugaucgaggaggugaugaacaucgugcugaucgcccugagccugcuggccauccugaagggccuguacaacuucgccaccugcggcgugaucggccugaucaccuuccugcugcugugcggcagaagcugcagcgccaccuacaagggccaguacgagcugcagacccuggagcugaacauggagagccugaacaugaccaugccccugagcugcaccaagaacaacagccaccacuacaucagagccggcaacaacaccggccuggagcugacccugaccaacaccagcaucaucagccacaaguucugcaaccugagcgacgcccacaagaagaaccuguacgaccacacccugaugagcaucaucaccaccuuccaccugagcauccccaacuucaaccaguacgaggccaugagcugcgacuucaacggcggcaagaucagcauccaguacaaccugagccacagcuacgccggcgacgccgcccagcacugcggcaccguggccaacggcgugcugcagaccuucaugagaauggccuggggcggcagcuaccuggcccuggacagcggcugcagaggcugggacugcaucaucagcagcuaccaguaccugaucauccagaacaccaccugggacgaccacugccaguucagcagacccagccccaucggcuaccugggcuucgugagccagaagaccagagacaucuacaucagcagaagacgccggggcaccuucaccuggacccugagcgacagcgagggccacgacaugcccggcggcuacugccugaccagauggaugcugaucgaggccgaccugaagugcuucggcaacaccgccguggccaagugcaacgagaagcacgacgaggaguucugcgacauguggagacuguucgacuucaacaagcaggccauccagagacugaaggcccccgcccagaugaacauccagcugaucaacaaggccgugaacgcccugaucaacgaccagcugaugaugaagaaccaccugagagacaucaugugcauccccuacugcaacuacagcaaguucugguaccugaacaacaccaccaccggcagaaccagccugcccagaugcuggcugaucagcaacggcagcuaccugaacgagacccacuucagcgacgacaucgagcagcaggccgacaacaugaucaccgagaugcugcagaaggaguacauggacagacagggcaagaccccccugggccugguggaccuguucguguucagcaccagcuucuaccugaucaccaucuuccugcaccuggugaagauccccacccacagacacaucgugggcaagcccugccccaagccccacagacugaaccacaugggcaucugcagcugcggccuguacaagcagcccggcgugcccgugagauggaagagaugaggacuagucccuguucccagagcccacuuuuuuuucuuuuuuugaaauaaaauagccugucuuucagaucucaaaggcucuuuucagagccaccaaaaaaaaaaaaaaaaaaaaaaaaaaaaaaaaaaaaaaaaaaaaaaaaaaaaaaaaaaaaaaaaaaaaaaaaaaaaaaaaaaaaaaaaaaaaaaaaaaaaa

SEQ ID NO: 15791 - RNA, 1764 nt, Artificial Sequence; identical to SEQ ID NO: 15785
  mRNA product Design a-2 (hSL-A100) comprising derived and/or modified sequence from LASV(Pinneo-NIG-1969;Clade I)__AIT17836__GPCmut1 (opt4)

SEQ ID NO: 15792 - RNA, 1764 nt, Artificial Sequence
  mRNA product Design a-2 (hSL-A100) comprising derived and/or modified sequence from LASV(ISTH0009-NIG-2011;Clade II)__AIT17404__GPCmut1 (opt4)
aggagaguccgcucagccagguugcagaagcggcuuagcguguguccuaaucuucucucugcguguagguaggccugugccgcaaacaagcuuaccaugggccagaucaucaccuucuuccaggaggugccccacgugaucgaggaggugaugaacaucgugcugaucgcccugagccugcuggccauccugaagggcaucuacaacguggccaccugcggccuguucggccuggugagcuuccugcugcugugcggcagaagcugcagcaccaccuacaagggcguguacgagcugcagacccuggagcuggacauggccagccugaacaugaccaugccccugagcugcaccaagaacaacagccaccacuacaucauggugggcaacgagaccggccuggagcugacccugaccaacaccagcaucaucaaccacaaguucugcaaccugagcgacgcccacaagaagaaccuguacgaccacgcccugaugagcaucaucagcaccuuccaccugagcauccccaacuucaaccaguacgaggccaugagcugcgacuucaacggcggcaagaucagcgugcaguacaaccugagccacgccuacgccguggacgccgccaaccacugcggcaccaucgccaacggcgugcugcagaccuucaugagaauggccuggggcggcagcuacaucgcccuggacagcggcugcggcagcugggacugcaucaugaccagcuaccaguaccugaucauccagaacaccaccugggaggaccacugccaguucagcagacccagccccaucggcuaccugggccugcugagccagagaaccagagacaucuacaucagcagaagacgccggggcaccuucaccuggacccugagcgacagcgagggcaacgagacccccggcggcuacugccugaccagauggaugcugaucgaggccgagcugaagugcuucggcaacaccgccguggccaagugcaacgagaagcacgacgaggaguucugcgacaugcugagacuguucgacuucaacaagcaggccaucagaagacugaagacccccgcccagaugagcauccagcugaucaacaaggccgugaacgcccugaucaacgaccagcugaucaugaagaaccaccugagagacaucaugugcauccccuacugcaacuacagcaaguacugguaccugaaccacaccgugaccggcaagaccagccugcccagaugcuggcuggugagcaacggcagcuaccugaacgagacccacuucagcgacgacaucgagcagcaggccgacaacaugaucaccgagcugcugcagaaggaguacauggacagacagggcaagaccccccugggccugguggaccuguucguguucagcaccagcuucuaccugaucagcaucuuccugcaccugaucaagauccccacccacagacacaucaccggcaagcccugccccaagccccacagacugaaccacaugggcaucugcagcugcggccuguacaagcaccccggcgugcccgugaaguggaagagaugaggacuagucccuguucccagagcccacuuuuuuuucuuuuuuugaaauaaaauagccugucuuucagaucucaaaggcucuuuucagagccaccaaaaaaaaaaaaaaaaaaaaaaaaaaaaaaaaaaaaaaaaaaaaaaaaaaaaaaaaaaaaaaaaaaaaaaaaaaaaaaaaaaaaaaaaaaaaaaaaaaaaa

SEQ ID NO: 15793 - RNA, 1764 nt, Artificial Sequence
  mRNA product Design a-2 (hSL-A100) comprising derived and/or modified sequence from LASV(ISTH2010-NIG-2012;Clade II)__AIT17482__GPCmut1 (opt4)
aggagaguccgcucagccagguugcagaagcggcuuagcguguguccuaaucuucucucugcguguagguaggccugugccgcaaacaagcuuaccaugggccagaucaucaccuucuuccaggaggugccccacgugaucgaggaggugaugaacaucgugcugaucgcccugagccugcuggccauccugaagggcaucuacaacguggccaccugcggccuguucggccuggugagcuuccugcugcugugcggcagaagcugcagcaccaccuacaagggcguguacgagcugcagacccuggagcuggacauggccagccugaacaugaccaugccccugagcugcaccaagaacaacagccaccacuacaucauggugggcaacgagaccggccuggagcugacccugaccaacaccagcaucaucaaccacaaguucugcaaccugagcgacgcccacaagaagaaccuguacgaccacgcccugaugagcaucaucagcaccuuccaccugagcauccccaacuucaaccaguacgaggccaugagcugcgacuucaacggcggcaagaucagcgugcaguacaaccugagccacgccuacgccguggacgccgccaaccacugcggcaccaucgccaacggcgugcugcagaccuucaugagaauggccuggggcggcagcuacaucgcccuggacagcggcugcggcagcugggacugcaucaugaccagcuaccaguaccugaucauccagaacaucaccugggaggaccacugccaguucagcagacccagccccaucggcuaccugggccugcugagccagagaaccagagacaucuacaucagcagaagacgccggggcaccuucaccuggacccugagcgacagcgagggcaacgagacccccggcggcuacugccugaccagauggaugcugaucgaggccgagcugaagugcuucggcaacaccgccguggccaagugcaacgagaagcacgacgaggaguucugcgacaugcugagacuguucgacuucaacaagcaggccaucagaagacugaagacccccgcccagaugagcauccagcugaucaacaaggccgugaacgcccugaucaacgaccagcugaucaugaagaaccaccugagagacaucaugugcauccccuacugcaacuacagcaaguacugguaccugaaccacaccgugaccggcaagaccagccugcccagaugcuggcuggugagcaacggcagcuaccugaacgagacccacuucagcgacgacaucgagcagcaggccgacaacaugaucaccgagcugcugcagaaggaguacaucgacagacagggcaagaccccccugggccugguggaccuguucguguucagcaccagcuucuaccugaucagcaucuuccugcaccuggugaagauccccacccacagacacguggugggcaagcccugccccaagccccacagacugaaccacaugggcaucugcagcugcggccuguacaagcaccccggcgugcccgugaaguggaagagaugaggacuagucccuguucccagagcccacuuuuuuuucuuuuuuugaaauaaaauagccugucuuucagaucucaaaggcucuuuucagagccaccaaaaaaaaaaaaaaaaaaaaaaaaaaaaaaaaaaaaaaaaaaaaaaaaaaaaaaaaaaaaaaaaaaaaaaaaaaaaaaaaaaaaaaaaaaaaaaaaaaaaa

SEQ ID NO: 15794 - RNA, 1764 nt, Artificial Sequence
  mRNA product Design a-2 (hSL-A100) comprising derived and/or modified sequence from LASV(Lassa virus/H.sapiens-wt/NGA/2015/ISTH_0543;Clade II)__AVO03639__GPCmut1 (opt4)
aggagaguccgcucagccagguugcagaagcggcuuagcguguguccuaaucuucucucugcguguagguaggccugugccgcaaacaagcuuaccaugggccagaucaucaccuucuuccaggaggugccccacgugaucgaggaggugaugaacaucgugcugaucgcccugagccugcuggccauccugaagggcaucuacaacguggccaccugcggccuguucggccuggugagcuuccugcugcugugcggcagaagcugcagcaccaccuacaagggcguguacgagcugcagacccuggagcuggacauggccaaccugaacaugaccaugccccugagcugcaccaagaacaacagccaccacuacaucauggugggcaacgagaccggccuggagcugacccugaccaacaccagcaucaucaaccacaaguucugcaaccugagcgacgcccacaagaagaaccuguacgaccacgcccugaugagcaucaucagcaccuuccaccugagcauccccaacuucaaccaguacgaggccaugagcugcgacuucaacggcggcaagaucagcgugcaguacaaccugagccacaccuacgccguggacgccgccaaccacugcggcaccaucgccaacggcgugcugcagaccuucaugagaauggccuggggcggcagcuacaucgcccuggacagcggcugcggcagcugggacugcaucaugaccagcuaccaguaccuggugauccagaacaccaccugggaggaccacugccaguucagcagacccagccccaucggcuaccugggccugcugagccagagaaccagagacaucuacaucagcagaagacgccggggcaccuucaccuggacccugagcgacagcgagggcaacgagacccccggcggcuacugccugaccagauggaugcugaucgaggccgagcugaagugcuucggcaacaccgccguggccaagugcaacgagaagcacgacgaggaguucugcgacaugcugagacuguucgacuucaacaagcaggccaucagaagacugaagacccccgcccagaugagcauccagcugaucaacaaggccgugaacgcccugaucaacgaccagcugaucaugaagaaccaccugagagacaucaugugcauccccuacugcaacuacagcaaguacugguaccugaaccacaccgugaccggcaagaccagccugcccagaugcuggcuggugagcaacggcagcuaccugaacgagacccacuucagcgacgacaucgagcagcaggccgacaacaugaucaccgagcugcugcagaaggaguacaucgacagacagggcaagaccccccugggccugguggaccuguucguguucagcaccagcuucuaccugaucagcaucuuccugcaccuggugaagauccccacccacagacacaucaccggcaagcccugccccaagccccacagacugaaccacaugggcaucugcagcugcggccuguacaagcaccccggcgugcccgugaaguggaagagaugaggacuagucccuguucccagagcccacuuuuuuuucuuuuuuugaaauaaaauagccugucuuucagaucucaaaggcucuuuucagagccaccaaaaaaaaaaaaaaaaaaaaaaaaaaaaaaaaaaaaaaaaaaaaaaaaaaaaaaaaaaaaaaaaaaaaaaaaaaaaaaaaaaaaaaaaaaaaaaaaaaaaa

SEQ ID NO: 15795 - RNA, 1764 nt, Artificial Sequence
  mRNA product Design a-2 (hSL-A100) comprising derived and/or modified sequence from LASV(Lassa virus/H.sapiens-wt/NGA/2016/ISTH_0009;Clade II)__AVO03571__GPCmut1 (opt4)
aggagaguccgcucagccagguugcagaagcggcuuagcguguguccuaaucuucucucugcguguagguaggccugugccgcaaacaagcuuaccaugggccagaucaucaccuucuuccaggaggugccccacgugaucgaggaggugaugaacaucgugcugaucgcccugagccugcuggccauccugaagggcaucuacaacguggccaccugcggccugcugggccuggugagcuuccugcugcugugcggcagaagcugcagcaccaccuacaagggcguguacgagcugcagacccuggagcuggacauggccagccugaacaugaccaugccccugagcugcaccaagaacaacagccaccacuacaucauggugggcaacgagaccggccuggagcugacccugaccaacaccagcaucaucaaccacaaguucugcaaccugagcgacgcccacaagaagaaccuguacgaccacgcccugaugagcaucaucagcaccuuccaccugagcauccccaacuucaaccaguacgaggccaugagcugcgacuucaacggcggcagaaucagcgugcaguacaaccugagccacagcuacgccguggacgccgccaaccacugcggcaccaucgccaacggcgugcugcagaccuucaugagaauggccuggggcggcagcuacaucgcccuggacagcggcugcggcagcugggacugcaucaugaccagcuaccaguaccugaucauccagaacaccaccugggaggaccacugccaguucagcagacccagccccaucggcuaccugggccugcugagccagagaaccagagacaucuacaucagcagaagacgccggggcaccuucaccuggacccugagcgacagcgagggcaacgagacccccggcggcuacugccugaccagauggaugcugaucgaggccgagcugaagugcuucggcaacaccgccguggccaagugcaacgagaagcacgacgaggaguucugcgacaugcugagacuguucgacuucaacaagcaggccaucagaagacugaagacccccgcccagaugagcauccagcugaucaacaaggccgugaacgcccugaucaacgaccagcugaucaugaagaaccaccugagagacaucaugugcauccccuacugcaacuacagcaaguacugguaccugaaccacaccgugaccggcaagaccagccugcccagaugcuggcuggugagcaacggcagcuaccugaacgagacccacuucagcgacgacaucgagcagcaggccgacaacaugaucaccgagcugcugcagaaggaguacaucgacagacagggcaagaccccccugggccugguggaccuguucguguucagcaccagcuucuaccugaucagcaucuuccugcaccuggugaagauccccacccacagacacaucaccggcaagcccugccccaagccccacagacugaaccacaugggcaucugcagcugcggccuguacaaccaccccggcgugcccgugaaguggaagagaugaggacuagucccuguucccagagcccacuuuuuuuucuuuuuuugaaauaaaauagccugucuuucagaucucaaaggcucuuuucagagccaccaaaaaaaaaaaaaaaaaaaaaaaaaaaaaaaaaaaaaaaaaaaaaaaaaaaaaaaaaaaaaaaaaaaaaaaaaaaaaaaaaaaaaaaaaaaaaaaaaaaaa

SEQ ID NO: 15796 - RNA, 1764 nt, Artificial Sequence
  mRNA product Design a-2 (hSL-A100) comprising derived and/or modified sequence from LASV(Lassa virus/H.sapiens-wt/NGA/2016/ISTH_0017;Clade II)__AVO03567__GPCmut1 (opt4)
aggagaguccgcucagccagguugcagaagcggcuuagcguguguccuaaucuucucucugcguguagguaggccugugccgcaaacaagcuuaccaugggccagaucaucaccuucuuccaggaggugccccacgugaucgaggaggugaugaacaucgugcugaucgcccugagccugcuggccauccugaagggcaucuacaacguggccaccugcggccuguucggccuggugagcuuccugcugcugugcggcagaagcugcagcaccaccuacaagggcguguacgagcugcagacccuggagcuggacauggccagccugaacaugaccaugccccugagcugcaccaagaacaacagccaccacuacaucauggugggcaacgagaccggccuggagcugacccugaccaacaccagcaucaucaaccacaaguucugcaaccugagcgacgcccacaagaagaaccuguacgaccacgcccugaugagcaucaucagcaccuuccaccugagcauccccaacuucaaccaguacgaggccaugagcugcgacuucaacggcggcaagaucagcgugcaguacaaccugagccacaccuacgccaucgacgccgccaaccacugcggcaccaucgccaacggcgugcugcagaccuucaugagaauggccuggggcggcagcuacaucgcccuggacagcggcugcggcagcugggacugcaucaugaccagcuaccaguaccugaucauccagaacaccaccugggaggaccacugccaguucagcagacccagccccaucggcuaccugggccugcugagccagagaaccagagacaucuacaucagcagaagacgccggggcaccuucaccuggacccugagcgacagcgagggcaacgagacccccggcggcuacugccugaccagauggaugcugaucgaggccgagcugaagugcuucggcaacaccgccguggccaagugcaacgagaagcacgacgaggaguucugcgacaugcugagacuguucgacuucaacaagcaggccaucagaagacugaagacccccgcccagaugagcauccagcugaucaacaaggccgugaacgcccugaucaacgaccagcugaucaugaagaaccaccugagagacaucaugugcauccccuacugcaacuacagcaaguacugguaccugaaccacaccgugaccggcaagaccagccugcccagaugcuggcuggugagcaacggcagcuaccugaacgagacccacuucagcgacgacaucgagcagcaggccgacaacaugaucaccgagcugcugcagaaggaguacauggacagacagggcaagaccccccugggccugguggaccuguucguguucagcaccagcuucuaccugaucagcaucuuccugcaccuggugagaauccccacccacagacacgugaucggcaagcccugccccaagccccacagacugaaccacaugggcaucugcagcugcggccuguacaagcaccccggcgugcccgugaaguggaagagaugaggacuagucccuguucccagagcccacuuuuuuuucuuuuuuugaaauaaaauagccugucuuucagaucucaaaggcucuuuucagagccaccaaaaaaaaaaaaaaaaaaaaaaaaaaaaaaaaaaaaaaaaaaaaaaaaaaaaaaaaaaaaaaaaaaaaaaaaaaaaaaaaaaaaaaaaaaaaaaaaaaaaa

SEQ ID NO: 15797 - RNA, 1764 nt, Artificial Sequence
  mRNA product Design a-2 (hSL-A100) comprising derived and/or modified sequence from LASV(Lassa virus/H.sapiens-wt/NGA/2018/ISTH_0959;Clade II)__AVV65099__GPCmut1 (opt4)
aggagaguccgcucagccagguugcagaagcggcuuagcguguguccuaaucuucucucugcguguagguaggccugugccgcaaacaagcuuaccaugggccagaucaucaccuucuuccaggaggugccccacgugaucgaggaggugaugaacaucgugcugaucgcccugagccugcuggccauccugaagggcaucuacaacguggugaccugcggccuguucggccuggugagcuuccugcugcugugcggcagaagcugcagcaccaccuacaagggcguguacgagcugcagacccuggagcuggacauggccagccugaacaugaccaugccccugagcugcaccaagaacaacagccaccacuacaucauggugggcaacgagaccggccuggagcugacccugaccaacaccagcaucaucaaccacaaguucugcaaccugagcgacgcccacaagaagaaccuguacgaccacgcccugaugagcaucaucagcaccuuccaccugagcauccccaacuucaaccaguacgaggccaugagcugcgacuucaacggcggcaagaucagcgugcaguacaaccugagccacgccuacgccaucgacgccgccaaccacugcggcaccaucgccaacggcgugcugcagaccuucaugagaauggccuggggcggcagcuacaucgcccuggacagcggcugcggcagcugggacugcaucaugaccagcuaccaguaccugaucauccagaacaccaccugggaggaccacugccaguucagcagacccagccccaucggcuaccugggccugcugagccagagaaccagagacaucuacaucagcagaagacgccggggcaccuucaccuggacccugagcgacagcgagggcaacgagacccccggcggcuacugccugaccagauggaugcugaucgaggccgagcugaagugcuucggcaacaccgccguggccaagugcaacgagaagcacgacgaggaguucugcgacaugcugagacuguucgacuucaacaagcaggccaucagaagacugaagacccccgcccagaugagcauccagcugaucaacaaggccgugaacgcccugaucaacgaccagcugaucaugaagaaccaccugagagacaucaugugcauccccuacugcaacuacagcaaguacugguaccugaaccacaccgugaccggcaagaccagccugcccagaugcuggcuggugagcaacggcagcuaccugaacgagacccacuucagcgacgacaucgagcagcaggccgacaacaugaucaccgagcugcugcagaaggaguacaucgacagacagggcaagaccccccugggccugguggaccuguucguguucagcaccagcuucuaccugaucagcaucuuccugcaccuggugaagauccccacccacagacacgugaucggcaagcccugccccaagccccacagacugaaccacaugggcaucugcagcugcggccuguacaagcaccccggcgugcccgugaaguggaagagaugaggacuagucccuguucccagagcccacuuuuuuuucuuuuuuugaaauaaaauagccugucuuucagaucucaaaggcucuuuucagagccaccaaaaaaaaaaaaaaaaaaaaaaaaaaaaaaaaaaaaaaaaaaaaaaaaaaaaaaaaaaaaaaaaaaaaaaaaaaaaaaaaaaaaaaaaaaaaaaaaaaaaa

SEQ ID NO: 15798 - RNA, 1764 nt, Artificial Sequence
  mRNA product Design a-2 (hSL-A100) comprising derived and/or modified sequence from LASV(LASV003-NIG-2008;Clade II)__AIT17580__GPCmut1 (opt4)
aggagaguccgcucagccagguugcagaagcggcuuagcguguguccuaaucuucucucugcguguagguaggccugugccgcaaacaagcuuaccaugggccagaucaucaccuucuuccaggaggugccccacgugaucgaggaggugaugaacaucgugcugaucgcccugagccugcuggccauccugaagggcaucuacaacguggccaccugcggccuguucggccuggugagcuuccugcugcugugcggcagaagcugcagcaccaccuacaagggcguguacgagcugcagacccuggagcuggacauggccagccugaacaugaccaugccccugagcugcaccaagaacaacagccaccacuacaucauggugggcaacgagaccggccuggagcugacccugaccaacaccagcaucaucaaccacaaguucugcaaccugagcgacgcccacaagaagaaccuguacgaccacgcccugaugagcaucaucagcaccuuccaccugagcauccccaacuucaaccaguacgaggccaugagcugcgacuucaacggcggcaagaucagcgugcaguacaaccugagccacaccuacgccguggacgccgccaaccacugcggcaccaucgccaacggcgugcugcagaccuucaugagaauggccuggggcggcagcuacaucgcccuggacagcggcugcggcagcugggacugcaucaugaccagcuaccaguaccugaucauccagaacaccaccugggaggaccacugccaguucagcagacccagccccaucggcuaccugggccugcugagccagagaaccagagacaucuacaucagcagaagacgccggggcaccuucaccuggacccugagcgacagcgagagcaacgagacccccggcggcuacugccugaccagauggaugcugaucgaggccgagcugaagugcuucggcaacaccgccguggccaagugcaacgagaagcacgacgaggaguucugcgacaugcugagacuguucgacuucaacaagcaggccaucagaagacugaaggcccccgcccagaugagcauccagcugaucaacaaggccgugaacgcccugaucaacgaccagcugaucaugaagaaccaccugagagacaucaugugcauccccuacugcaacuacagcaaguacugguaccugaaccacaccgugaccggcagaaccagccugcccagaugcuggcuggugagcaacggcagcuaccugaacgagacccacuucagcgacgacaucgagcagcaggccgacaacaugaucaccgagcugcugcagaaggaguacauggacagacagggcaagaccccccugggccugguggaccuguucguguucagcaccagcuucuaccugaucagcaucuuccugcaccuggugaagauccccacccacagacacgugaucggcaagcccugccccaagccccacagacugaaccacaugggcaucugcagcugcggccuguacaagcaccccggcgugcccgugaaguggaagagaugaggacuagucccuguucccagagcccacuuuuuuuucuuuuuuugaaauaaaauagccugucuuucagaucucaaaggcucuuuucagagccaccaaaaaaaaaaaaaaaaaaaaaaaaaaaaaaaaaaaaaaaaaaaaaaaaaaaaaaaaaaaaaaaaaaaaaaaaaaaaaaaaaaaaaaaaaaaaaaaaaaaaa

SEQ ID NO: 15799 - RNA, 1764 nt, Artificial Sequence
  mRNA product Design a-2 (hSL-A100) comprising derived and/or modified sequence from LASV(LASV035-NIG-2009;Clade II)__AIT17588__GPCmut1 (opt4)
aggagaguccgcucagccagguugcagaagcggcuuagcguguguccuaaucuucucucugcguguagguaggccugugccgcaaacaagcuuaccaugggccagaucaucaccuucuuccaggaggugccccacgugaucgaggaggugaugaacaucgugcugaucgcccugagccugcuggccauccugaagggcaucuacaacguggccaccugcggccuguucggccuggugagcuuccugcugcugugcggcagaagcugcagcaccaccuacaagggcguguacgagcugcagacccuggagcuggacauggccagccugaacaugaccaugccccugagcugcaccaagaacaacagccaccacuacaucauggugggcaacgagaccggccuggagcugacccugaccaacaccagcaucaucaaccacaaguucugcaaccugagcgacgcccacaagaagaaccuguacgaccacgcccugaugagcaucaucagcaccuuccaccugagcauccccaacuucaaccaguacgaggccaugagcugcgacuucaacggcggcaagaucagcgugcaguacaaccugagccacgccuacgccguggacgccgccaaccacugcggcaccaucgccaacggcgugcugcagaccuucaugagaauggccuggggcggcagcuacaucgcccuggacagcggcugcggcagcugggacugcaucaugaccagcuaccaguaccugaucauccagaacaccaccugggaggaccacugccaguucagcagacccagccccaucggcuaccugggccugcugagccagagaaccagagacaucuacaucagcagaagacgccggggcaccuucaccuggacccugagcgacagcgagggcaacgagacccccggcggcuacugccugaccagauggaugcugaucgaggccgagcugaagugcuucggcaacaccgccguggccaagugcaacgagaagcacgacgaggaguucugcgacaugcugagacuguucgacuucaacaagcaggccaucagaagacugaaggcccccgcccagaugagcauccagcugaucaacaaggccgugaacgcccugaucaacgaccagcugaucaugaagaaccaccugagagacaucaugugcauccccuacugcaacuacagcaaguacugguaccugaaccacaccgugaccggcaagaccagccugcccagaugcuggcuggugagcaacggcagcuaccugaacgagacccacuucagcgacgacaucgagcagcaggccgacaacaugaucaccgagcugcugcagaaggaguacaucgacagacagggcaagaccccccugggccugguggaccuguucguguucagcaccagcuucuaccugaucagcaucuuccugcaccuggugaagauccccacccacagacacgugaucggcaagcccugccccaagccccacagacugaaccacaugggcaucugcagcugcggccuguacaagcaccccggcgugcccgugaaguggaagagaugaggacuagucccuguucccagagcccacuuuuuuuucuuuuuuugaaauaaaauagccugucuuucagaucucaaaggcucuuuucagagccaccaaaaaaaaaaaaaaaaaaaaaaaaaaaaaaaaaaaaaaaaaaaaaaaaaaaaaaaaaaaaaaaaaaaaaaaaaaaaaaaaaaaaaaaaaaaaaaaaaaaaa

SEQ ID NO: 15800 - RNA, 1764 nt, Artificial Sequence
  mRNA product Design a-2 (hSL-A100) comprising derived and/or modified sequence from LASV(LASV1000-NIG-2009;Clade II)__AIT17782__GPCmut1 (opt4)
aggagaguccgcucagccagguugcagaagcggcuuagcguguguccuaaucuucucucugcguguagguaggccugugccgcaaacaagcuuaccaugggccagaucaucaccuucuuccaggaggugccccacgugaucgaggaggugaugaacaucgugcugaucgcccugagccugcuggccauccugaagggcaucuacaacguggccaccugcggccuguucggccuggugagcuuccugcugcugugcggcagaagcugcagcaccaccuacaagggcguguacgagcugcagacccuggagcuggacauggccagccugaacaugaccaugccccugagcugcaccaagaacaacagccaccacuacaucauggugggcaacgagaccggccuggagcugacccugaccaacaccagcaucaucaaccacaaguucugcaaccugagcgacgcccacaagaagaaccuguacgaccacgcccugaugagcaucaucagcaccuuccaccugagcauccccaacuucaaccaguacgaggccaugagcugcgacuucaacggcggcaagaucagcgugcaguacaaccugagccacaccuacgccguggacgccgccaaccacugcggcaccaucgccaacggcgugcugcagaccuucaugagaauggccuggggcggcagcuacaucgcccuggacagcggcugcggcagcugggacugcaucaugaccagcuaccaguaccugaucauccagaacaccaccugggaggaccacugccaguucagcagacccagccccaucggcuaccugggccugcugagccagagaaccagagacaucuacaucagcagaagacgccggggcaccuucaccuggacccugagcgacagcgagggcaacgagacccccggcggcuacugccugaccagauggaugcugaucgaggccgagcugaagugcuucggcaacaccgccguggccaagugcaacgagaagcacgacgaggaguucugcgacaugcugagacuguucgacuucaacaagcaggccaucaagagacugaagacccccgcccagaugagcauccagcugaucaacaaggccgugaacgcccugaucaacgaccagcugaucaugaagaaccaccugagagacaucaugugcauccccuacugcaacuacagcaaguacugguaccugaaccacaccgugaccggcaagaccagccugcccagaugcuggcuggugagcaacggcagcuaccugaacgagacccacuucagcgacgacaucgagcagcaggccgacaacaugaucaccgagcugcugcagaaggaguacaucgacagacagggcaagaccccccugggccugguggaccuguucguguucagcaccagcuucuaccugaucagcaucuuccugcaccuggugaagauccccacccacagacacguggugggcaagcccugccccaagccccacagacugaaccacaugggcaucugcagcugcggccuguacaagcaccccggcgugcccgugaaguggaagagaugaggacuagucccuguucccagagcccacuuuuuuuucuuuuuuugaaauaaaauagccugucuuucagaucucaaaggcucuuuucagagccaccaaaaaaaaaaaaaaaaaaaaaaaaaaaaaaaaaaaaaaaaaaaaaaaaaaaaaaaaaaaaaaaaaaaaaaaaaaaaaaaaaaaaaaaaaaaaaaaaaaaaa

SEQ ID NO: 15801 - RNA, 1764 nt, Artificial Sequence
  mRNA product Design a-2 (hSL-A100) comprising derived and/or modified sequence from LASV(LASV221-NIG-2010;Clade II)__AIT17624__GPCmut1 (opt4)
aggagaguccgcucagccagguugcagaagcggcuuagcguguguccuaaucuucucucugcguguagguaggccugugccgcaaacaagcuuaccaugggccagaucaucaccuucuuccaggaggugccccacgugaucgaggaggugaugaacaucgugcugaucgcccugagccugcuggccauccugaagggcaucuacaacguggccaccugcggccuguucggccuggugagcuuccugcugcugugcggcagaagcugcagcaccaccuacaagggcguguacgagcugcagacccuggagcuggacauggccagccugaacaugaccaugccccugagcugcaccaagaacaacagccaccacuacaucauggugggcaacgagaccggccuggagcugacccugaccaacaccagcaucaucaaccacaaguucugcaaccugagcgacgcccacaagaagaaccuguacgaccacgcccugaugagcaucaucagcaccuuccaccugagcauccccaacuucaaccaguacgaggccaugagcugcgacuucaacggcggcaagaucagcgugcaguacaaccugagccacaccuacgccaucgacgccgccaaccacugcggcaccaucgccaacggcgugcugcagaccuucaugagaauggccuggggcggcagcuacaucgcccuggacagcggcugcggcagcugggacugcaucaugaccagcuaccaguaccugaucauccagaacaccaccugggaggaccacugccaguucagcagacccagccccaucggcuaccugggccugcugagccagagaaccagagacaucuacaucagcagaagacgccggggcaccuucaccuggacccugagcgacagcgagggcaacgagacccccggcggcuacugccugaccagauggaugcugaucgaggccgagcugaagugcuucggcaacaccgccguggccaagugcaacgagaagcacgacgaggaguucugcgacaugcugagacuguucgacuucaacaagcaggccaucagaagacugaagacccccgcccagaugagcauccagcugaucaacaaggccgugaacgcccugaucaacgaccagcugaucaugaagaaccaccugagagacaucaugugcauccccuacugcaacuacagcaaguacugguaccugaaccacaccgugaccggcaagaccagccugcccagaugcuggcuggugagcaacggcagcuaccugaacgagacccacuucagcgacgacaucgagcagcaggccgacaacaugaucaccgagaugcugcagaaggaguacauggacagacagggcaagaccccccugggccugguggaccuguucguguucagcaccagcuucuaccugaucagcaucuuccugcaccuggugaagauccccacccacagacacgugaucggcaagcccugccccaagccccacagacugaaccacaugggcaucugcagcugcggccuguacaagcaccccggcgugcccgugaaguggaagagaugaggacuagucccuguucccagagcccacuuuuuuuucuuuuuuugaaauaaaauagccugucuuucagaucucaaaggcucuuuucagagccaccaaaaaaaaaaaaaaaaaaaaaaaaaaaaaaaaaaaaaaaaaaaaaaaaaaaaaaaaaaaaaaaaaaaaaaaaaaaaaaaaaaaaaaaaaaaaaaaaaaaaa

SEQ ID NO: 15802 - RNA, 1764 nt, Artificial Sequence
  mRNA product Design a-2 (hSL-A100) comprising derived and/or modified sequence from LASV(LASV237-NIG-2010;Clade II)__AIT17638__GPCmut1 (opt4)
aggagaguccgcucagccagguugcagaagcggcuuagcguguguccuaaucuucucucugcguguagguaggccugugccgcaaacaagcuuaccaugggccagaucaucaccuucuuccaggaggugccccacgugaucgaggaggugaugaacaucgugcugaucgcccugagccugcuggccauccugaagggcaucuacaacguggccaccugcggccuguucggccuggugagcuuccugcugcugugcggcagaagcugcagcaccaccuacaagggcguguacgagcugcagacccuggagcuggacauggccagccugaacaugaccaugccccugagcugcaccaagaacaacagccaccacuacaucauggugggcaacgagaccggccuggagcugacccugaccaacaccagcaucaucaaccacaaguucugcaaccugagcgacgcccacaagaaggaccuguacgaccacgcccugaugagcaucaucagcaccuuccaccugagcauccccaacuucaaccaguacgaggccaugagcugcgacuucaacggcggcaagaucagcgugcaguacaaccugagccacaccuacgccguggacgccgccaaccacugcggcaccaucgccaacggcgugcugcagaccuucaugagaauggccuggggcggcagcuacaucgcccuggacagcggcugcggcagcugggacugcaucaugaccagcuaccaguaccugaucauccagaacaccaccugggaggaccacugccaguucagcagacccagccccaucggcuaccugggccugcugagccagagaaccagagacaucuacaucagcagaagacgccggggcaccuucaccuggacccugagcgacagcgagggcaacgagacccccggcggcuacugccugaccagauggaugcugaucgaggccgagcugaagugcuucggcaacaccgccguggccaagugcaacgagaagcacgacgaggaguucugcgacaugcugagacuguucgacuucaacaagcaggccaucagaagacugaagacccccgcccagaugagcauccagcugaucaacaaggccgugaacgcccugaucaacgaccagcugaucaugaagaaccaccugagagacaucaugugcauccccuacugcaacuacagcaaguacugguaccugaaccacaccgugaccggcaagaccagccugcccagaugcuggcuggugagcaacggcagcuaccugaacgagacccacuucagcgacgacaucgagcagcaggccgacaacaugaucaccgagcugcugcagaaggaguacauggacagacagggcaagaccccccugggccugguggaccuguucguguucagcaccagcuucuaccugaucagcaucuuccugcaccugaucaagauccccacccacagacacaucaccggcaagcccugccccaagccccacagacugaaccacaugggcaucugcagcugcggccuguacaagcaccccggcgugcccgugaaguggaagagaugaggacuagucccuguucccagagcccacuuuuuuuucuuuuuuugaaauaaaauagccugucuuucagaucucaaaggcucuuuucagagccaccaaaaaaaaaaaaaaaaaaaaaaaaaaaaaaaaaaaaaaaaaaaaaaaaaaaaaaaaaaaaaaaaaaaaaaaaaaaaaaaaaaaaaaaaaaaaaaaaaaaaa

SEQ ID NO: 15803 - RNA, 1764 nt, Artificial Sequence
  mRNA product Design a-2 (hSL-A100) comprising derived and/or modified sequence from LASV(LASV253-NIG-2011;Clade II)__AIT17670__GPCmut1 (opt4)
aggagaguccgcucagccagguugcagaagcggcuuagcguguguccuaaucuucucucugcguguagguaggccugugccgcaaacaagcuuaccaugggccagaucaucaccuucuuccaggaggugccccacgugaucgaggaggugaugaacaucgugcugaucgcccugagccugcuggccauccugaagggcaucuacaacguggccaccugcggccuguucggccuggugagcuuccugcugcugugcggcagaagcugcagcaccaccuacaagggcguguacgagcugcagacccuggagcuggacauggccagccugaacaugaccaugccccugagcugcaccaagaacaacagccaccacuacaucauggugggcaacgagaccggccuggagcugacccugaccaacaccagcaucaucaaccacaaguucugcaaccugagcgacgcccacaagaagaaccuguacgaccacgcccugaugagcaucaucagcaccuuccaccugagcauccccaacuucaaccaguacgaggccaugagcugcgacuucaacggcggcaagaucagcgugcaguacaaccugagccacaccuacgccguggacgccgccaaccacugcggcaccaucgccaacggcgugcugcagaccuucaugagaauggccuggggcggcagcuacaucgcccuggacagcggcugcggcagcugggacugcaucaugaccagcuaccaguaccugaucauccagaacaccaccugggaggaccacugccaguucagcagacccagccccaucggcuaccugggccugcugagccagagaaccagagacaucuacaucagcagaagacgccggggcaccuucaccuggacccugagcgacagcgagggcaacgagacccccggcggcuacugccugaccagauggaugcugaucgaggccgagcugaagugcuucggcaacaccgccguggccaagugcaacgagaagcacgacgaggaguucugcgacaugcugagacuguucgacuucaacaagcaggccaucagaagacugaaggcccccgcccagaugagcauccagcugaucaacaaggccgugaacgcccugaucaacgaccagcugaucaugaagaaccaccugagagacaucaugugcauccccuacugcaacuacagcaaguacugguaccugaaccacaccgugaccggcagaaccagccugcccagaugcuggcuggugagcaacggcagcuaccugaacgagacccacuucagcgacgacaucgagcagcaggccgacaacaugaucaccgagcugcugcagaaggaguacaucgacagacagggcaagaccccccugggccugguggaccuguucguguucagcaccagcuucuaccugaucagcaucuuccugcaccuggugaagauccccacccacagacacaucaucggcaagcccugccccaagccccacagacugaaccacaugggcaucugcagcugcggccuguacaagcaccccggcgugcccgugaaguggaagagaugaggacuagucccuguucccagagcccacuuuuuuuucuuuuuuugaaauaaaauagccugucuuucagaucucaaaggcucuuuucagagccaccaaaaaaaaaaaaaaaaaaaaaaaaaaaaaaaaaaaaaaaaaaaaaaaaaaaaaaaaaaaaaaaaaaaaaaaaaaaaaaaaaaaaaaaaaaaaaaaaaaaaa

SEQ ID NO: 15804 - RNA, 1764 nt, Artificial Sequence
  mRNA product Design a-2 (hSL-A100) comprising derived and/or modified sequence from LASV(LASV254-NIG-2011;Clade II)__AIT17674__GPCmut1 (opt4)
aggagaguccgcucagccagguugcagaagcggcuuagcguguguccuaaucuucucucugcguguagguaggccugugccgcaaacaagcuuaccaugggccagaucaucaccuucuuccaggaggugccccacgugaucgaggaggugaugaacaucgugcugaucgcccugagccugcuggccauccugaagggcaucuacaacguggccaccugcggccuguucggccuggugagcuuccugcugcugugcggcagaagcugcagcaccaccuacaagggcguguacgagcugcagacccuggagcuggacaugaccaaccugaacaugaccaugccccugagcugcaccaagaacaacagccaccacuacaucauggugggcaacgagaccggccuggagcugacccugaccaacaccagcaucaucaaccacaaguucugcaaccugagcgacgcccacaagaagaaccuguacaaccacgcccugaugagcaucaucagcaccuuccaccugagcauccccaacuucaaccaguacgaggccaugagcugcgacuucaacggcggcaagaucagcgugcaguacaaccugagccacagcuacgccguggacgccgccaaccacugcggcaccaucgccaacggcgugcugcagaccuucaugagaauggccuggggcggcagcuacaucgcccuggacagcggcugcggcaacugggacugcaucaugaccagcuaccaguaccugaucauccagaacaccaccugggaggaccacugccaguucagcagacccagccccaucggcuaccugggccugcugagccagagaaccagagacaucuacaucagcagaagacgccggggcaccuucaccuggacccugagcgacagcgagggcaacgagacccccggcggcuacugccugaccagauggaugcugaucgaggccgagcugaagugcuucggcaacaccgccguggccaagugcaacgagaagcacgacgaggaguucugcgacaugcugagacuguucgacuucaacaagcaggccaucagaagacugaagacccccgcccaggccaacauccagcugaucaacaaggccgugaacgcccugaucaacgaccagcugaucaugaagaaccaccugagagacaucaugugcauccccuacugcaacuacagcaaguacugguaccugaaccacaccgugaccggcaagaccagccugcccagaugcuggcuggugagcaacggcagcuaccugaacgagacccacuucagcgacgacaucgagcagcaggccgacaacaugaucaccgagcugcugcagaaggaguacauggacagacagggcaagaccccccugggccugguggaccuguucguguucagcaccagcuucuaccugaucagcaucuuccugcaccuggugaagauccccacccacagacacgugaucggcaagcccugccccaagccccacagacugaaccacaugggcaucugcagcugcggccuguacaagcaccccggcgugcccgugaaguggaagagaugaggacuagucccuguucccagagcccacuuuuuuuucuuuuuuugaaauaaaauagccugucuuucagaucucaaaggcucuuuucagagccaccaaaaaaaaaaaaaaaaaaaaaaaaaaaaaaaaaaaaaaaaaaaaaaaaaaaaaaaaaaaaaaaaaaaaaaaaaaaaaaaaaaaaaaaaaaaaaaaaaaaaa

SEQ ID NO: 15805 - RNA, 1764 nt, Artificial Sequence
  mRNA product Design a-2 (hSL-A100) comprising derived and/or modified sequence from LASV(Nig08-A19;Clade III)__ADU56618__GPCmut1 (opt4)
aggagaguccgcucagccagguugcagaagcggcuuagcguguguccuaaucuucucucugcguguagguaggccugugccgcaaacaagcuuaccaugggccagaucgugaccuucuuccaggaggugccccacgugaucgaggaggugaugaacaucgugcugaucgcccugagcauccuggccauccugaagggccuguacaacaucgccaccugcggccugaucggccuggugaccuuccugcugcugagcggcagaagcugcagcaugaccuacaagggcguguacgagcugcagacccuggagcugaacaugaacacccugaacaugaccaugccccugagcugcaccaagaacaacagccaccacuacaucauggugggcaacgagaccggccuggagcugacccugaccaacaccagccugcugcaccacaaguucugcaaccugagcgacgcccacaagaagaaccuguacgaccacacccugaugagcaucaucagcaccuuccaccugagcauccccaacuucaaccaguacgaggccaugagcugcgacuucaacggcggcaagaucaccgugcaguacaaccugagccacagcuacgccaucgacgccgccaaccacugcggcaccguggccaacggcgugcugcagaccuucaugagaauggccuggggcggcagcuacaucgcccuggacagcggcugcggcaagugggacugcaucaugaccagcuaccaguaccugaucauccagaacaccaccugggaggaccacugccaguucagcagacccagccccaucggcuaccugggccugcugagccagagaaccagagacaucuacaucagcagaagacgccggggcaccuucaccuggacccugagcgacagcgagggcaacgagacccccggcggcuacugccugaccagauggaugcugaucgaggccgagcugaagugcuucggcaacaccgccguggccaagugcaacgagaagcacgacgaggaguucugcgacaugcugagacuguucgacuucaacaagcaggccaucagaagacugaaggcccccgcccagaugagcauccagcugaucaacaaggccgugaacgcccugaucaacgaccagcugaucaugaagaaccaccugagagacaucaugugcauccccuacugcaacuacagcaaguacugguaccugaaccacaccagcaccggcagaaccagccugcccagaugcuggcuggugagcaacggcagcuaccugaacgagacccacuucagcgacgacaucgagcagcaggccgacaacaugaucaccgagaugcugcagaaggaguaccuggacagacagggcaagaccccccugggccugguggaccuguucguguucagcaccagcuucuaccugaucagcaucuuccugcaccuggugaagauccccacccacagacacaucgugggcaagcccugccccaagccccacagacugaaccacaugggcaucugcagcugcggccuguacaagcagcccggcgugcccgugagauggaagagaugaggacuagucccuguucccagagcccacuuuuuuuucuuuuuuugaaauaaaauagccugucuuucagaucucaaaggcucuuuucagagccaccaaaaaaaaaaaaaaaaaaaaaaaaaaaaaaaaaaaaaaaaaaaaaaaaaaaaaaaaaaaaaaaaaaaaaaaaaaaaaaaaaaaaaaaaaaaaaaaaaaaaa

SEQ ID NO: 15806 - RNA, 1767 nt, Artificial Sequence
  mRNA product Design a-2 (hSL-A100) comprising derived and/or modified sequence from LASV(G1180-SLE-2010;Clade IV)__AIT17168__GPCmut1 (opt4)
aggagaguccgcucagccagguugcagaagcggcuuagcguguguccuaaucuucucucugcguguagguaggccugugccgcaaacaagcuuaccaugggccagaucgugaccuucuuccaggaggugccccacgugaucgaggaggugaugaacaucgugcugaucgcccugagcauccuggccgugcugaagggccuguacaacuucgccaccugcggccuggugggccugcugaccuuccugcugcugugcggcagaagcugcaccgccagcagauacaagggcguguacgagcugcagacccuggagcugaacauggagacccugaacaugaccaugccccugagcugcaccaagaacaacagccaccacuacaucauggugggcaacgagaccggccuggagcugacccugaccaacaccagcaucaucaaccacaaguucugcaaccugagcgacgcccacaagaagaaccuguacgaccacgcccugaugagcaucaucagcaccuuccaccugagcauccccaacuucaaccaguacgaggccaugagcugcgacuucaacggcggcaagaucagcgugcaguacaaccugagccacagcuacgccggcgacgccgccaaccacugcggcaccguggccaacggcgugcugcagaccuucaugagaauggccuggggcggcagcuacaucgcccuggacagcggcugcggcagcugggacugcaucaugaccagcuaccaguaccugaucauccagaacaccaccugggaggaccacugccaguucagcagacccagccccaucggcuaccugggccugcugagccagagaaccagagacaucuacaucagcagaagacgccggggcaccuucaccuggacccugagcgacagcgagggcaaggacacccccggcggcuacugccugaccagauggaugcugaucgaggccgagcugaagugcuucggcaacaccgccguggccaagugcaacgagaagcacgacgaggaguucugcgacaugcugagacuguucgacuucaacaagcaggccauccagagacugaaggcccccgcccagaugagcauccagcugaucaacaaggccgugaacgcccugaucaacgaccagcugaucaugaagaaccaccugagagacaucaugugcauccccuacugcaacuacagcaaguacugguaccugaaccacaccaccaccggcaagaccagccugcccaagugcuggcuggugagcaacggcagcuaccugaacgagacccacuucagcgacgacaucgagcagcaggccgacaacaugaucaccgagaugcugcagaaggaguacauggagagacagggcaagaccccccugggccugguggaccuguucguguucagcaccagcuucuaccugaucagcaucuuccugcaccuggugaagauccccacccacagacacaucgugggcaagagcugccccaagccccacagacugaaccacaugggcaucugcagcugcggccuguacaagcagcccggcgugcccgugaaguggaagagaugaggacuagucccuguucccagagcccacuuuuuuuucuuuuuuugaaauaaaauagccugucuuucagaucucaaaggcucuuuucagagccaccaaaaaaaaaaaaaaaaaaaaaaaaaaaaaaaaaaaaaaaaaaaaaaaaaaaaaaaaaaaaaaaaaaaaaaaaaaaaaaaaaaaaaaaaaaaaaaaaaaaaa

SEQ ID NO: 15807 - RNA, 1767 nt, Artificial Sequence
  mRNA product Design a-2 (hSL-A100) comprising derived and/or modified sequence from LASV(G1442-SLE-2011;Clade IV)__AIT17180__GPCmut1 (opt4)
aggagaguccgcucagccagguugcagaagcggcuuagcguguguccuaaucuucucucugcguguagguaggccugugccgcaaacaagcuuaccaugggccagaucgugaccuucuuccaggaggugccccacgugaucgaggaggugaugaacaucgugcugaucgcccugagcauccuggccgugcugaagggccuguacaacguggccaccugcggccugaucggccuggugaccuuccugcugcugugcggcagaagcugcaccaccacccuguacaagggcguguacgagcugcagacccuggagcugaacauggagacccugaacaugaccaugccccugagcugcaccaagaacaacagccaccacuacaucagagugggcaacgagaccggccuggagcugacccugaccaacaccagcaucaucaaccacaaguucugcaaccugagcgacgcccacaagaagaaccuguacgaccacgcccugaugagcaucaucagcaccuuccaccugagcauccccaacuucaaccaguacgaggccaugagcugcgacuucaacggcggcaagaucagcgugcaguacaaccugagccacagcuacgccggcgacgccgccaaccacugcggcaccguggccaacggcgugcugcagaccuucaugagaauggccuggggcggcagcuacaucgcccuggacagcggcugcggcaacugggacugcaucaugaccagcuaccaguaccugaucauccagaacaccaccugggacgaccacugccaguucagcagacccagccccaucggcuaccugggccugcugagccagagaaccagagacguguacaucagcagaagacgccggggcaccuucaccuggacccugagcgacagcgagggcaaggacacccccggcggcuacugccugaccagauggaugcugaucgaggccgagcugaagugcuucggcaacaccgccguggccaagugcaacgagaagcacgacgaggaguucugcgacaugcugagacuguucgacuucaacaagcaggccauccagagacugaaggcccccgcccagaugagcauccagcugaucaacaaggccgugaacgcccugaucaacgaccagcugaucaugaagaaccaccugagagacaucaugugcauccccuacugcaacuacagcaaguacugguaccugaacaacaccgccaccggcaagaccagccugcccaagugcuggcugaucagcaacggcagcuaccugaacgagacccacuucagcgacgacaucgagcaggaggccgacaacaugaucaccgagaugcugcagaaggaguacauggagagacagggcaagaccccccugggccugguggaccuguucguguucagcaccagcuucuaccugaucagcaucuuccugcaccuggugaagauccccacccacagacacaucgugggcaagagcugccccaagccccacagacugaaccacaugggcaucugcagcugcggccuguacaagcagcccggcgugcccgugagauggaagagaugaggacuagucccuguucccagagcccacuuuuuuuucuuuuuuugaaauaaaauagccugucuuucagaucucaaaggcucuuuucagagccaccaaaaaaaaaaaaaaaaaaaaaaaaaaaaaaaaaaaaaaaaaaaaaaaaaaaaaaaaaaaaaaaaaaaaaaaaaaaaaaaaaaaaaaaaaaaaaaaaaaaaa

SEQ ID NO: 15808 - RNA, 1767 nt, Artificial Sequence
  mRNA product Design a-2 (hSL-A100) comprising derived and/or modified sequence from LASV(G3010-SLE-2013;Clade IV)__AIT17344__GPCmut1 (opt4)
aggagaguccgcucagccagguugcagaagcggcuuagcguguguccuaaucuucucucugcguguagguaggccugugccgcaaacaagcuuaccaugggccagaucgugaccuucuuccaggaggugccccacgugaucgaggaggugaugaacaucgugcugaucgcccugagcauccuggccgugcugaagggccuguacaacuucgccaccugcggccuggugggccuggugaccuuccugcugcugugcggcagaagcugcaccaccagccuguacaagggcguguacgagcugcagacccuggagcugaacauggagacccugaacaugaccaugccccugagcugcaccaagaacaacagccaccacuacaucauggugggcaacgagaccggccuggagcugacccugaccaacaccagcaucaucaaccacaaguucugcaaccugagcgacgcccacaagaagaaccuguacaaccacgcccugaugagcaucaucagcaccuuccaccugagcauccccaacuucaaccaguacgaggccaugagcugcgacuucaacggcggcaagaucagcgugcaguacaaccugagccacagcuacgccggcgacgccgccagccacugcggcaccguggccaacggcgugcugcagaccuucaugagaauggccuggggcggcagcuacaucgcccuggacagcggcugcggcaagugggacugcaucaugaccagcuaccaguaccugaucauccagaacaccaccugggaggaccacugccaguucagcagacccagccccaucggcuaccugggccugcugagccagagaaccagagacaucuacaucagcagaagacgccggggcaccuucaccuggacccugagcgacagcgagggcaaggacacccccggcggcuacugccugaccagauggaugcugaucgaggccgagcugaagugcuucggcaacaccgccguggccaagugcaacgagaagcacgacgaggaguucugcgacaugcugagacuguucgacuucaacaagcaggccauccagagacugaagacccccgcccagaugagcauccagcugaucaacaaggccgugaacgcccugaucaacgaccagcugaucaugaagaaccaccugagagacaucaugugcauccccuacugcaacuacagcaaguacugguaccugaaccacaccaccaccggcaagaccagccugcccaagugcuggcuggugagcaacggcagcuaccugaacgagacccacuucagcgacgacaucgagcagcaggccgacaacaugaucaccgagaugcugcagaaggaguacauggagagacagggcaagaccccccugggccugguggaccuguucguguucagcaccagcuucuaccugaucagcaucuuccugcaccuggugaagauccccacccacagacacaucgugggcaagagcugccccaagccccacagacugaaccacaugggcaucugcagcugcggccuguacaagcagcccggcgugcccgugagauggaagagaugaggacuagucccuguucccagagcccacuuuuuuuucuuuuuuugaaauaaaauagccugucuuucagaucucaaaggcucuuuucagagccaccaaaaaaaaaaaaaaaaaaaaaaaaaaaaaaaaaaaaaaaaaaaaaaaaaaaaaaaaaaaaaaaaaaaaaaaaaaaaaaaaaaaaaaaaaaaaaaaaaaaaa

SEQ ID NO: 15809 - RNA, 1767 nt, Artificial Sequence
  mRNA product Design a-2 (hSL-A100) comprising derived and/or modified sequence from LASV(G502-SLE-2009;Clade IV)__AIT17126__GPCmut1 (opt4)
aggagaguccgcucagccagguugcagaagcggcuuagcguguguccuaaucuucucucugcguguagguaggccugugccgcaaacaagcuuaccaugggccagaucgugaccuucuuccaggaggugccccacgugaucgaggaggugaugaacaucgugcugaucgcccugagcauccuggccgugcugaagggccuguacaacuucgccaccugcggccuggugggccugcugaccuuccugcugcugugcggcagaagcugcaccaccggccuguacaagggcguguacgagcugcagacccuggagcugaacauggagacccugaacaugaccaugccccugagcugcaccaagaacaacagccaccacuacaucauggugggcaacgagaccggccuggagcugacccugaccaacaccagcaucaucaaccacaaguucugcaaccugagcgacgcccacaagaagaaccuguacgaccacgcccugaugagcaucaucagcaccuuccaccugagcauccccaacuucaaccaguacgaggccaugagcugcgacuucaacggcggcaagaucagcgugcaguacaaccugagccacagcuacgccggcgacgccgccgaccacugcggcaccguggccaacggcgugcugcagaccuucaugagaauggccuggggcggcagcuacaucgcccuggacagcggcugcggcagaugggacugcaucaugaccagcuaccaguaccugaucauccagaacaccaccugggaggaccacugccaguucagcagacccagccccaucggcuaccugggccugcugagccagagaaccagagacaucuacaucagcagaagacgccggggcaccuucaccuggacccugagcgacagcgagggcaaggacacccccggcggcuacugccugaccagauggaugcugaucgaggccgagcugaagugcuucggcaacaccgccguggccaagugcaacgagaagcacgacgaggaguucugcgacaugcugagacuguucgacuucaacaagcaggccauccagagacugaaggcccccgcccagaugagcauccagcugaucaacaaggccgugaacgcccugaucaacgaccagcuggugaugaagaaccaccugagagacaucaugugcauccccuacugcaacuacagcagauacugguaccugaaccacaccaccaccggcagaaccagccugcccaagugcuggcuggugagcaacggcagcuaccugaacgagacccacuucagcgacgacaucgagcagcaggccgacaacaugaucaccgagaugcugcagaaggaguacauggagagacagggcaagaccccccugggccugguggaccuguucguguucagcaccagcuucuaccugaucagcaucuuccugcaccuggugaagauccccacccacagacacaucgugggcaagagcugccccaagccccacagacugaaccacaugggcaucugcagcugcggccuguacaagcagcccggcgugcccgugaaguggaagagaugaggacuagucccuguucccagagcccacuuuuuuuucuuuuuuugaaauaaaauagccugucuuucagaucucaaaggcucuuuucagagccaccaaaaaaaaaaaaaaaaaaaaaaaaaaaaaaaaaaaaaaaaaaaaaaaaaaaaaaaaaaaaaaaaaaaaaaaaaaaaaaaaaaaaaaaaaaaaaaaaaaaaa

SEQ ID NO: 15810 - RNA, 1767 nt, Artificial Sequence
  mRNA product Design a-2 (hSL-A100) comprising derived and/or modified sequence from LASV(G733-SLE-2010;Clade IV)__AIT17154__GPCmut1 (opt4)
aggagaguccgcucagccagguugcagaagcggcuuagcguguguccuaaucuucucucugcguguagguaggccugugccgcaaacaagcuuaccaugggccagaucgugaccuucuuccaggaggugccccacgugaucgaggaggugaugaacaucgugcugaucgcccugagcauccuggccgugcugaagggccuguacaacuucgccaccugcggcaucgugggccuggugagcuuccugcugcugugcggcagaagcugcaccaccagccuguacaagggcguguacgagcugcagacccuggagcugaacauggagacccugaacaugaccaugccccugagcugcaccaagaacaacagccaccacuacaucauggugggcaacgagaccggccuggagcugacccugaccaacaccagcaucaucaaccacaaguucugcaaccugagcgacgcccacaagaagaaccuguacgaccacgcccugaugagcaucaucagcaccuuccaccugagcauccccaacuucaaccaguacgaggccaugagcugcgacuucaacggcggcaagaucagcgugcaguacaaccugagccacagcuacgccggcgacgccgccaaccacugcggcaccaucgccaacggcgugcugcagaccuucaugagaauggccuggggcggcagcuacaucgcccuggacagcggcugcgacagaugggacugcaucaugaccagcuaccaguaccugaucauccagaacaccaccugggaggaccacugccaguucagcagacccagccccaucggcuaccugggccugcugagccagagaaccagagacaucuacaucagcagaagacgccggggcaccuucaccuggacccugagcgacagcgagggcaaggacacccccggcggcuacugccugaccagauggaugcugaucgaggccgagcugaagugcuucggcaacaccgccguggccaagugcaacgagaagcacgacgaggaguucugcgacaugcugagacuguucgacuucaacaagcaggccauccagagacugaaggcccccgcccagaugagcauccagcugaucaacaaggccgugaacgcccugaucaacgaccagcugaucaugaagaaccaccugagagacaucaugugcauccccuacugcaacuacagcaaguacugguaccugaaccacaccaccaccggcaagaccagccugcccaagugcuggcuggugagcaacggcagcuaccugaacgagacccacuucagcgacgacaucgagcagcaggccgacaacaugaucaccgagaugcugcagaaggaguacauggagagacagggcaagaccccccugggccugguggaccuguucguguucagcaccagcuucuaccugaucagcaucuuccugcaccuggugaagauccccacccacagacacguggugggcaagagcugccccaagccccacagacugaaccacaugggcaucugcagcugcggccuguacggccagcccggcgugcccgugaaguggaagagaugaggacuagucccuguucccagagcccacuuuuuuuucuuuuuuugaaauaaaauagccugucuuucagaucucaaaggcucuuuucagagccaccaaaaaaaaaaaaaaaaaaaaaaaaaaaaaaaaaaaaaaaaaaaaaaaaaaaaaaaaaaaaaaaaaaaaaaaaaaaaaaaaaaaaaaaaaaaaaaaaaaaaa

SEQ ID NO: 15811 - RNA, 1767 nt, Artificial Sequence
  mRNA product Design a-2 (hSL-A100) comprising derived and/or modified sequence from MOPV/LASV reassortant(IGS-1;Clade IV)__AFY05576__GPCmut1 (opt4)
aggagaguccgcucagccagguugcagaagcggcuuagcguguguccuaaucuucucucugcguguagguaggccugugccgcaaacaagcuuaccaugggccagaucgugaccuucuuccaggaggugccccacgugaucgaggaggugaugaacaucgugcugaucgcccugagcgugcuggccgugcugaagggccuguacaacuucgccaccugcggccuggugggccuggugaccuuccugcugcugugcggcagaagcugcaccaccagccuguacaagggcguguacgagcugcagacccuggagcugaacauggagacccugaacaugaccaugccccugagcugcaccaagaacaacagccaccacuacaucauggugggcaacgagaccggccuggagcugacccugaccaacaccagcaucaucaaccacaaguucugcaaccugagcgacgcccacaagaagaaccuguacgaccacgcccugaugagcaucaucagcaccuuccaccugagcauccccaacuucaaccaguacgaggccaugagcugcgacuucaacggcggcaagaucagcgugcaguacaaccugagccacagcuacgccggcgacgccgccaaccacugcggcaccguggccaacggcgugcugcagaccuucaugagaauggccuggggcggcagcuacaucgcccuggacagcggcugcggcaacugggacugcaucaugaccagcuaccaguaccugaucauccagaacaccaccugggaggaccacugccaguucagcagacccagccccaucggcuaccugggccugcugagccagagaaccagagacaucuacaucagcagaagacgccggggcaccuucaccuggacccugagcgacagcgagggcgaggacacccccggcggcuacugccugaccagauggaugcugaucgaggccgagcugaagugcuucggcaacaccgccguggccaagugcaacgagaagcacgacgaggaguucugcgacaugcugagacuguucgacuucaacaagcaggccauccagagacugaaggcccccgcccagaugagcauccagcugaucaacaaggccgugaacgcccugaucaacgaccagcugaucaugaagaaccaccugagagacaucaugugcauccccuacugcaacuacagcaaguacugguaccugaaccacaccaccaccggcagaaccagccugcccaagugcuggcuggugagcaacggcagcuaccugaacgagacccacuucagcgacgacaucgagcagcaggccgacaacaugaucaccgagaugcugcagaaggaguacauggagagacagggcaagaccccccugggccugguggaccuguucguguucagcaccagcuucuaccugaucagcaucuuccugcaccuggugaagauccccacccacagacacaucgugggcaagagcugccccaagccccacagacugaaccacaugggcaucugcagcugcggccuguacaagcagcccggcgugcccgugaaguggaagagaugaggacuagucccuguucccagagcccacuuuuuuuucuuuuuuugaaauaaaauagccugucuuucagaucucaaaggcucuuuucagagccaccaaaaaaaaaaaaaaaaaaaaaaaaaaaaaaaaaaaaaaaaaaaaaaaaaaaaaaaaaaaaaaaaaaaaaaaaaaaaaaaaaaaaaaaaaaaaaaaaaaaaa

SEQ ID NO: 15812 - RNA, 1767 nt, Artificial Sequence
  mRNA product Design a-2 (hSL-A100) comprising derived and/or modified sequence from LASV(LM765-SLE-2012;Clade IV)__AIT17814__GPCmut1 (opt4)
aggagaguccgcucagccagguugcagaagcggcuuagcguguguccuaaucuucucucugcguguagguaggccugugccgcaaacaagcuuaccaugggccagaucgugaccuucuuccaggaggugccccacgugaucgaggaggugaugaacaucgugcugaucgcccugagcauccuggccgugcugaagggccuguacaacuucgccaccugcggccuggugggccuggugaccuuccugcugcugugcggcagaagcugcaccaccagccuguacaagggcguguacgagcugcagacccuggagcugaacauggagacccugaacaugaccaugccccugagcugcaccaagaacaacagccaccacuacaucauggugggcaacgagaccggccuggagcugacccugaccaacaccagcaucaucgaccacaaguucugcaaccugagcgacgcccacagaaagaaccuguacgaccacgcccugaugagcaucaucagcaccuuccaccugagcauccccaacuucaaccaguacgaggccaugagcugcgacuucaacggcggcaagaucagcgugcaguacaaccugagccacagcuacgccaaggacgccgccgaccacugcggcaccguggccaacggcgugcugcagaccuucaugagaauggccuggggcggcagcuacaucgcccuggacagcggcugcggcagaugggacugcaucaugaccagcuaccaguaccugaucauccagaacaccaccugggaggaccacugccaguucagcagacccagccccaucggcuaccugggccugcugagccagagaaccagagacaucuacaucagcagaagacgccggggcaccuucaccuggacccugagcgacagcgagggcaaggacacccccggcggcuacugccugaccagauggaugcugaucgaggccgagcugaagugcuucggcaacaccgccguggccaagugcaacgagaagcacgacgaggaguucugcgacaugcugagacuguucgacuucaacaagcaggccauccagagacugaaggcccccgcccagaugagcauccagcugaucaacaaggccgugaacgcccugaucaacgaccagcugaucaugaagaaccaccugagagacaucaugugcauccccuacugcaacuacagcaaguacugguaccugaaccacaccaccaccggcaagaccagccugcccaagugcuggcuggugagcaacggcagcuaccugaacgagacccacuucagcgacgacaucgagcagcaggccgacaacaugaucaccgagaugcugcagaaggaguacauggagagacagggcaagaccccccugggccugguggaccuguucguguucagcaccagcuucuaccugaucagcaucuuccugcaccuggugaagauccccacccacagacacaucgugggcaagcccugccccaagccccacagacugaaccacaugggcaucugcagcugcggccuguacaagcagcccggcgugcccgugaaguggaagagaugaggacuagucccuguucccagagcccacuuuuuuuucuuuuuuugaaauaaaauagccugucuuucagaucucaaaggcucuuuucagagccaccaaaaaaaaaaaaaaaaaaaaaaaaaaaaaaaaaaaaaaaaaaaaaaaaaaaaaaaaaaaaaaaaaaaaaaaaaaaaaaaaaaaaaaaaaaaaaaaaaaaaa

SEQ ID NO: 15813 - RNA, 1767 nt, Artificial Sequence
  mRNA product Design a-2 (hSL-A100) comprising derived and/or modified sequence from LASV(LM776-SLE-2012;Clade IV)__AIT17824__GPCmut1 (opt4)
aggagaguccgcucagccagguugcagaagcggcuuagcguguguccuaaucuucucucugcguguagguaggccugugccgcaaacaagcuuaccaugggccagaucgugaccuucuuccaggaggugccccacgugaucgaggaggugaugaacaucgugcugaucgcccugagcauccuggccgugcugaagggccuguacaacuucgccaccugcggccuggugggccuggugaccuuccugcugcugugcggcagaagcugcaccaccagcguguacaagggcguguacgagcugcagacccuggagcugaacauggagacccugaacaugaccaugccccugagcugcaccaagaacaacagccaccacuacaucauggugggcaacgagaccggccuggagcugacccugaccaacaccagcaucaucaaccacaaguucugcaaccugagcgacgcccacaagaagaaccuguacgaccacgcccugaugagcaucaucagcaccuuccaccugagcauccccaacuucaaccaguacgaggccaugagcugcgacuucaacggcggcaagaucagcgugcaguacaaccugagccacagcuacgccggcgacgccgccaaccacugcggcaccguggccaacggcgugcugcagaccuucaugagaauggccuggggcggcagcuacaucgcccuggacagcggcugcggcaagugggacugcaucaugaccagcuaccaguaccugaucauccagaacaccaccugggaggaccacugccaguucagcagacccagccccaucggcuaccugggccugcugagccagagaaccagagacaucuacaucagcagaagacgccggggcaccuucaccuggacccugagcgacagcgagggcaaggacacccccggcggcuacugccugaccagauggaugcugaucgaggccgagcugaagugcuucggcaacaccgccguggccaagugcaacgagaagcacgacgaggaguucugcgacaugcugagacuguucgacuucaacaagcaggccauccagagacugaaggcccccgcccagaugagcauccagcugaucaacaaggccgugaacgcccugaucaacgaccagcugaucaugaagaaccaccugagagacaucaugugcauccccuacugcaacuacagcaaguacugguaccugaaccacaccaccaccggcaagaccagccugcccaagugcuggcuggugagcaacggcagcuaccugaacgagacccacuucagcgacgacaucgagcagcaggccgacaacaugaucaccgagaugcugcagaaggaguacauggagagacagggcaagaccccccugggccugguggaccuguucguguucagcaccagcuucuaccugaucagcaucuuccugcaccuggugaagauccccacccacagacacaucgugggcaagagcugccccaagccccacagacugaaccacaugggcaucugcagcugcggccuguacaagcagcccggcgugcccgugagauggaagagaugaggacuagucccuguucccagagcccacuuuuuuuucuuuuuuugaaauaaaauagccugucuuucagaucucaaaggcucuuuucagagccaccaaaaaaaaaaaaaaaaaaaaaaaaaaaaaaaaaaaaaaaaaaaaaaaaaaaaaaaaaaaaaaaaaaaaaaaaaaaaaaaaaaaaaaaaaaaaaaaaaaaaa

SEQ ID NO: 15814 - RNA, 1767 nt, Artificial Sequence
  mRNA product Design a-2 (hSL-A100) comprising derived and/or modified sequence from LASV(Mad39;Clade IV)__ANH09722__GPCmut1 (opt4)
aggagaguccgcucagccagguugcagaagcggcuuagcguguguccuaaucuucucucugcguguagguaggccugugccgcaaacaagcuuaccaugggccagaucgugaccuucuuccaggaggugccccacgugaucgaggaggugaugaacaucgugcugaucgcccugagcauccuggccgugcugaagggccuguacaacguggccaccugcggccugaucggccuggugaccuuccugcugcugugcggcagaagcugcaccaccacccuguacaagggcguguacgagcugcaggcccuggagcugaacauggagacccugaacaugaccaugccccugagcugcaccaagaacaacagccaccacuacaucagagugggcaacgagaccggccuggagcugacccugaccaacaccagccugaucaaccacaaguucugcaaccugagcgacgcccacaagaagaaccuguacgaccacgcccugaugagcaucaucagcaccuuccaccugagcauccccaacuucaaccaguacgaggccaugagcugcgacuucaacgacggcaagaucagcgugcaguacaaccugagccacaccuacgccggcgacaccgccaaccacugcggcaccguggccaacggcgugcugcagaccuucaugagaauggccuggggcggcagcuacaucgcccuggacagcggcugcggcggcugggacugcaucaugaccagcuaccaguaccugaucauccagaacaccaccugggaggaccacugccaguucagcagacccagccccaucggcuaccugggccugcugagccagagaaccagagacaucuacaucagcagaagacgccggggcaccuucaccuggacccugagcgacagcgagggcaaggacacccccggcggcuacugccugaccagauggaugcugaucgaggccgagcugaagugcuucggcaacaccgccguggccaagugcaacgagaagcacgacgaggaguucugcgacaugcugagacuguucgacuucaacaagcaggccauccagagacugaaggcccccgcccagaugagcauccagcugaucaacaaggccgugaacgcccugaucaacgaccagcugaucaugaagaaccaccugagagacaucaugugcauccccuacugcaacuacagcaaguacugguaccugaaccacaccgugaccggcaagaccagccugcccaagugcuggcuggugagcaacggcagcuaccugaacgagacccacuucagcgacgacaucgagcagcaggccgacaacaugaucaccgagaugcugcagaaggaguacauggagagacagggcaagaccccccugggccugguggaccuguucguguucagcaccagcuucuaccugaucagcaucuuccugcaccuggugaagauccccacccacagacacguggugggcaagcccugccccaagccccacagacugaaccacaugggcaucugcagcugcggcuucuacaagcagcccggcgugcccgugagauggaagagaugaggacuagucccuguucccagagcccacuuuuuuuucuuuuuuugaaauaaaauagccugucuuucagaucucaaaggcucuuuucagagccaccaaaaaaaaaaaaaaaaaaaaaaaaaaaaaaaaaaaaaaaaaaaaaaaaaaaaaaaaaaaaaaaaaaaaaaaaaaaaaaaaaaaaaaaaaaaaaaaaaaaaa

SEQ ID NO: 15815 - RNA, 1767 nt, Artificial Sequence
  mRNA product Design a-2 (hSL-A100) comprising derived and/or modified sequence from LASV(Z0947-SLE-2011;Clade IV)__AIT17840__GPCmut1 (opt4)
aggagaguccgcucagccagguugcagaagcggcuuagcguguguccuaaucuucucucugcguguagguaggccugugccgcaaacaagcuuaccaugggccagaucgugaccuucuuccaggaggugccccacgugaucgaggaggugaugaacaucgugcugaucgcccugagcauccuggccgugcugaagggccuguacaacuucgccaccugcggccuggugggccuggugaccuuccugcugcugugcggcagaagcugcaccaucagccuguacaagggcguguacgagcugcagacccuggagcugaacauggagacccugaacaugaccaugccccugagcugcaccaagaacaacagccaccacuacaucauggugggcaacgagaccggccuggagcugacccugaccaacaccagcaucaucaaccacaaguucugcaaccugagcgacgcccacaagaagaaccuguacgaccacgcccugaugagcaucaucagcaccuuccaccugagcauccccaacuucaaccaguacgaggccaugagcugcgacuucaacggcggcaagaucagcgugcaguacaaccugagccacagcuacgccggcgacgccgccaaccacugcggcaccguggccaacggcgugcugcagaccuucaugagaauggccuggggcggcagcuacaucgcccuggacagcggcugcgacagaugggacugcaucaugaccagcuaccaguaccugaucauccagaacaccaccugggaggaccacugccaguucagcagacccagccccaucggcuaccugggccugcugagccagagaaccagagacaucuacaucagcagaagacgccggggcaccuucaccuggacccugagcgacagcgagggcaaggacacccccggcggcuacugccugaccagauggaugcugaucgaggccgagcugaagugcuucggcaacaccgccguggccaagugcaacgagaagcacgacgaggaguucugcgacaugcugagacuguucgacuucaacaagcaggccauccagagacugaaggcccccgcccagaugagcauccagcugaucaacaaggccgugaacgcccugaucaacgaccagcugaucaugaagaaccaccugagagacaucaugugcauccccuacugcaacuacagcaaguacugguaccugaaccacaccaccaccggcaagaccagccugcccaagugcuggcuggugagcaacggcagcuaccugaacgagacccacuucagcgacgacaucgagcagcaggccgacaacaugaucaccgagaugcugcagaaggaguacauggagagacagggcaagaccccccugggccugguggaccuguucguguucagcaccagcuucuaccugaucagcaucuuccugcaccuggugaagauccccacccacagacacaucgugggcaagcccugccccaagccccacagacugaaccacaugggcaucugcagcugcggccuguacaagcagcccggcgugcccgugaaguggaagagaugaggacuagucccuguucccagagcccacuuuuuuuucuuuuuuugaaauaaaauagccugucuuucagaucucaaaggcucuuuucagagccaccaaaaaaaaaaaaaaaaaaaaaaaaaaaaaaaaaaaaaaaaaaaaaaaaaaaaaaaaaaaaaaaaaaaaaaaaaaaaaaaaaaaaaaaaaaaaaaaaaaaaa

SEQ ID NO: 15816 - RNA, 1767 nt, Artificial Sequence
  mRNA product Design a-2 (hSL-A100) comprising derived and/or modified sequence from LASV(Josiah;Clade IV)__NP_694870__GPCmut1 (opt5)
aggagaguccgcucagccagguugcagaagcggcuuagcguguguccuaaucuucucucugcguguagguaggccugugccgcaaacaagcuuaccaugggccagaucgugaccuucuuucaagaggucccccacguuauugaagaggugaugaacaucgugcugauugcccucagcguccuggcugugcuuaaggggcuguacaauuucgccacaugcggacucguuggccuggugacguuucuucugcucugugggagauccugcaccacaucucuguauaaaggagucuacgaacugcagacccucgagcugaacauggaaacacuuaauaugaccaugccucugagcuguacaaagaacaauucccaucacuauaucauggugggcaacgagaccgggcucgagcugacgcuuaccaauacaucuauuaucaaccauaaauucugcaaucugagcgacgcgcacaagaaaaaccucuacgaucaugcucugauguccaucauuucuaccuuucaccugagcaucccgaauuucaaccaguaugaagccauguccugugacuuuaauggaggcaagauuagcguucaguacaaccucucucacuccuaugccggcgaugcugccaaucauugcgggacaguggcuaacggaguccugcaaaccuucaugcggauggccuggggcgggagcuacaucgcgcuugacucuggaugcggcaacugggauuguauuaugacguccuaccaguaucugaucauucagaauacaaccugggaggaccacugccaguuuagcagacccucuccuaucggguaccucggacugcuuucccaacggacacgcgauaucuauauuagcagacggcgccggggcaccuucaccuggacacuguccgacucugaaggcaaggauacgcccgggggauacugucugacccgcuggaugcucaucgaggccgagcugaaaugcuuuggcaacacagcuguggccaaguguaaugaaaaacaugacgaggaguucugcgauaugcuuagacuguuugacuucaacaagcaggcuauucagcggcucaaagcccccgcgcagaugagcauccaacugauuaauaaggccgugaacgcucuuaucaaugaucagcugaucaugaagaaccaccuccgcgacauuaugugcaucccuuauugcaauuacuccaaauauugguaccugaaccacaccacaaccggaagaacgagccugcccaaguguuggcucgucucuaauggcuccuaccugaacgaaacacauuucagcgacgauauugagcagcaagccgacaauaugaucaccgagaugcuucagaaagaauauauggagcggcaggggaagaccccucugggacucguugaucuguuuguguucucuaccagcuuuuaccugauuuccaucuuccuucaccucgugaaaaucccgacacaucgccacauugucggcaagucuugccccaaaccucauagacugaaccacaugggcaucuguagcugcgggcuguauaagcagcccggagugccuguuaaguggaaacggugaggacuagucccuguucccagagcccacuuuuuuuucuuuuuuugaaauaaaauagccugucuuucagaucucaaaggcucuuuucagagccaccaaaaaaaaaaaaaaaaaaaaaaaaaaaaaaaaaaaaaaaaaaaaaaaaaaaaaaaaaaaaaaaaaaaaaaaaaaaaaaaaaaaaaaaaaaaaaaaaaaaaa

SEQ ID NO: 15817 - RNA, 1764 nt, Artificial Sequence
  mRNA product Design a-2 (hSL-A100) comprising derived and/or modified sequence from LASV(LP;Clade I)__AAF86701__GPCmut1 (opt5)
aggagaguccgcucagccagguugcagaagcggcuuagcguguguccuaaucuucucucugcguguagguaggccugugccgcaaacaagcuuaccaugggccagaucauuaccuucuuucaagaggugccccacgucaucgaagagguuaugaacauugugcugaucgcccucagccugcuugcuauucugaaggggcucuacaauaucgccacaugcggaaucauuggccugguggcguuccuuuuucugugugggaaauccugcucucucacgcugaagggaggcuaugaacugcagacccucgagcugaacauggaaacacuuaauaugaccaugccucugagcuguaccaaaaacuccucucaucacuacaucagagucgggaaugagacaggacucgagcugacacuuaccaacacgagcauuaucaaucauaaguucugcaaccuguccgacgcucacaaaaagaaucucuaugaucaugcccugaugucuauuaucagcaccuuucaccuguccauuccgaacuucaaucaguacgaagccaugagcugugacuuuaacggcggcaagaucucugugcaguauaaucucucccacagcuacgcuggggaugccgcugagcauugcggaacaguugccaacggcgugcugcaaaccuucaugcggauggcguggggagggcgcuauaucgcccuugacucuggcugcgggaauugggauuguauuaugacauccuaccaguaccugaucauucagaacaccacgugggaagaccacugccaguuuagcagacccucuccuaucggauaucucggccugcuuucccaacggacacgcgauauuuacaucagcagacggcgccggggcaccuucacauggacccuguccgacucugaggggaacgagacccccggaggcuauugucugacacgcuggaugcucaucgaagcugagcugaagugcuuugggaauacggccgucgcuaaauguaacgaaaagcaugaugaggaguucugcgacaugcuuagacuguuugauuucaauaaacaggccauucggcgccucaaggcgcccgcccagaugagcauccagcugauuaacaaggcugugaaugcccuuaucaacgaccaacugauuaugaaaaaucaccucagagauaucaugugcaucccuuacugcaacuauuccaaguacugguaucugaaucacaccagcucuggccggacaucccugcccaaauguuggcucauuagcaacgggucuuaccugaaugagacccaguucagcgacgacaucgaacagcaagcugauaacaugauuacagagaugcuucagaaggaauacaucgagcgccagggaaaaaccccucugggccucguugacauuuuuaucuucuccacgucuuuuuaucugauuagcaucuuccugcaucuuaucaagauuccgacacacagacauaucgugggcaaacccugcccuaagccccaccggcucaaucauaugggggucuguuccugcggacuguacaagcacccuggcgugcccaccaaauggaagcgcugaggacuagucccuguucccagagcccacuuuuuuuucuuuuuuugaaauaaaauagccugucuuucagaucucaaaggcucuuuucagagccaccaaaaaaaaaaaaaaaaaaaaaaaaaaaaaaaaaaaaaaaaaaaaaaaaaaaaaaaaaaaaaaaaaaaaaaaaaaaaaaaaaaaaaaaaaaaaaaaaaaaaa

SEQ ID NO: 15818 - RNA, 1764 nt, Artificial Sequence
  mRNA product Design a-2 (hSL-A100) comprising derived and/or modified sequence from LASV(803213;Clade II)__AAF86703__GPCmut1 (opt5)
aggagaguccgcucagccagguugcagaagcggcuuagcguguguccuaaucuucucucugcguguagguaggccugugccgcaaacaagcuuaccaugggccagaucauuaccuucuuucaagaggugccccacgucaucgaagagguuaugaacauugugcugaucgcccucagccugcuugcuauucugaaggggaucuacaauguggccacaugcggacucuucggccugaucuccuuucuucugcucugugggagaucuugcagcgucacguauaaaggaguguacgaacugcagacccuggagcucaacauggcgaaucugaacaugacaaugccucuuuccuguaccaagaauaacucucaucacuauauuaugguuggcaaugaaacagggcuggagcucacccugacaaacaccagcaucauuaaucauaaauucugcaaccuuuccgacgcucacaagaaaaaucuguacgaucaugcccucaugucuaucauuagcacguuucaccuguccaucccgaacuucaaucaguaugaggccaugagcugugacuuuaacggaggcaagauuucugugcaguacaaucugucccacagcuucgcugucgaugccgcuaaccauugcggcaccaucgccaacggggugcuccaaacauuuaugcggauggcguggggaggcucuuauaucgcccuggacuccgggugcggaaauugggauuguauuaugaccagcuaccaguaccuuaucauucagaacacaaccugggaagaccacugccaguucucucgccccuccccuaucggcuaucuggggcuccugagccaaagaacgcgggauauuuacaucucccgcagacgccggggaacauuuaccuggacacucucugacagcgagggcaaugaagcucccggcggguauugucugacccgguggaugcugaucgaggccgagcucaaaugcuucggaaacaccgcuguugccaaguguaaugaaaaacaugaugaggaauuuugcgacaugcugcgccuuuucgauuucaacaagcaggcgauuaaaagacugaagacacccgcccagauguccauccagcucauuaauaaggcugugaacgcccugaucaaugaccaacuuauuaugaaaaaccaucugcgggauaucaugugcaucccuuacugcaauuauagccgcuacugguaucucaaccacacggucaccgggaagacaucucugcccagauguuggcugguguccaauggaagcuaccucaacgaaacccacuuuucugacgacauugagcagcaggcugauaauaugaucacagagaugcugcaaaaagaauacauggaccggcagggcaagaccccucuugggcugguggaucucuucgucuuuagcacguccuucuaucugauuucuaucuuucugcaccuuguuaaaauuccgacacaucgccacaucgugggaaagcccugcccuaaaccccauagacucaaccacaugggcauuuguagcugcggccuguacaagcacccuggggugcccgucaaguggaaacggugaggacuagucccuguucccagagcccacuuuuuuuucuuuuuuugaaauaaaauagccugucuuucagaucucaaaggcucuuuucagagccaccaaaaaaaaaaaaaaaaaaaaaaaaaaaaaaaaaaaaaaaaaaaaaaaaaaaaaaaaaaaaaaaaaaaaaaaaaaaaaaaaaaaaaaaaaaaaaaaaaaaaa

SEQ ID NO: 15819 - RNA, 1764 nt, Artificial Sequence
  mRNA product Design a-2 (hSL-A100) comprising derived and/or modified sequence from LASV(GA391;Clade III)__CAA36645__GPCmut1 (opt5)
aggagaguccgcucagccagguugcagaagcggcuuagcguguguccuaaucuucucucugcguguagguaggccugugccgcaaacaagcuuaccaugggccagaucgugaccuucuuucaagaggucccccacguuauugaagaggugaugaacaucgugcugauugcccucagcauccuggcuauucuuaaggggcuguacaaugucgccacaugcggacucaucggccuggugacguuccuucugcucuccgggagaucuuguagccugaucuauaaaggaaccuacgaacugcagacacucgagcugaacauggaaacccuuaauaugacaaugccucuguccugcaccaagaacaauucucaucacuauauucggguuggcaacgagacagggcucgagcugacccuuacgaauaccagcauccugaaccauaaauuuuguaaucucuccgacgcgcacaagcgcaaccuguacgaucauucucugaugagcauuaucuccacauuccaccucagcauuccgaauuuuaaccaguaugaagcuaugucuugcgacuucaauggaggcaaaaucaccgugcaguacaaccugucccacagcuuugccgucgaugccgcuggccauugugggacacuugccaauggagugcugcaaaccuucaugagaauggcuuggggcgggucuuauauugcccucgacuccggaugcggcaacugggauugcaucaugacgagcuaccaguaccugaucauucagaacacaaccugggacgaucacugucaguuuucucgccccuccccuaucggguaucuuggacugcucagccaaagaacacgggacauuuacaucucccgcagacgccggggcaccuucaccuggacacucucugauagcgagggcaaugaaacgcccgggggauauugccugacccgguggaugcuuauugaggcggagcugaaguguuuuggcaacacagccguugcuaagugcaaugaaaaacaugacgaggaguucugugauaugcuccgccuguuugacuucaacaagcaggccaucagacggcuuaaaacccccgcucagauguccauccagcugauuaauaaggccgugaacgcgcucaucaaugaucaacugauuaugaaaaaccaucugcgcgacaucaugugcauuccuuacugcaauuauagcagauacugguaucucaaccacacaucuaccggaaagacgucccugccccggugcuggcuuaucagcaauggcucuuaccugaacgaaacaaaguucagcgacgauaucgagcagcaggccgacaauaugauuaccgagaugcuccaaaaagaauacaucgaucgccaggggaagaccccucugggacuggucgaccuuuuuguguucuccacaucuuuuuaucucauuagcaucuuccugcaccuggugaaaauuccgacccacagacauaucgucggcaagcccuguccuaaaccccaccggcucaaccauaugggcauuugcuccugugggcuguacaagcagccuggaguucccgugagauggaaacgcugaggacuagucccuguucccagagcccacuuuuuuuucuuuuuuugaaauaaaauagccugucuuucagaucucaaaggcucuuuucagagccaccaaaaaaaaaaaaaaaaaaaaaaaaaaaaaaaaaaaaaaaaaaaaaaaaaaaaaaaaaaaaaaaaaaaaaaaaaaaaaaaaaaaaaaaaaaaaaaaaaaaaa

SEQ ID NO: 15820 - RNA, 1767 nt, Artificial Sequence
  mRNA product Design a-2 (hSL-A100) comprising derived and/or modified sequence from LASV(AV;Clade V)__CCA30314__GPCmut1 (opt5)
aggagaguccgcucagccagguugcagaagcggcuuagcguguguccuaaucuucucucugcguguagguaggccugugccgcaaacaagcuuaccaugggccagaucgugaccuucuuucaagaggucccccacguuauugaagaggugaugaacaucgugcugauugcccucagcauccuggcuguccuuaaggggcuguacaauauugccacaugcggacucaucggccugaucacguuccuucugcucugugggagauccugcucuagcaaccuguauaaaggaguguacgaacugcagucccucgaccugaauauggagacccuuaacaugacaaugccucugucuuguaccaagaauaacagccaucacuauauucggguuggcaaugauacagggcucgaacugacccuuacaaacaccuccauccugaaucauaaauuuugcaaccucucugacgcgcacaagaaagaucuguacgaccaugcucugaugagcauuaucuccacguuccaccucagcauuccgaauuuuaaccaguaugaggccaugucuugugauuucaauggaggcaagaucuccgugcaguacaaccugagccacucuuaugccauugacgcugccaaucauugcggcaccgucgcuaacgggauccuucaaacauuuaugcgcauggccuggggaggcuccuacaucgcgcuggauagcgggugcggaaacugggacuguauuaugaccucuuaccaguaucucaucauucagaauacaaccugggagaaccacugccaguucucccggcccagcccuaucggcuaccuggggcuucugucccaacgcacgagagauauuuauaucucucggcgccgccggggaacauuuaccuggacacugagcgacuccgaaggcaaugccacccccggcggguacugucucaccagauggaugcugaucgaggcugaacuuaagugcuucggaaacacagccguggcuaaauguaaugagaagcaugaugaggaauuuugcgacaugcugcgccucuucgauuuuaacaaacaggccauuagccggcugaagucucccgcgcagauguccauccagcuuauuaauaaagccguuaacgcucugaucaaugaccaacucauuaugaagaaccaccugagagacaucaugugcaucccuuauugcaauuacagcaaguauugguaccugaaccacacgauuaccgggaaaacaucucuccccaaguguuggcuggugagcaauggauccuaccuuaacgaaacccauuucucugaugacaucgagcagcaggccgauaauaugauuacagaaaugcugcaaaaagaguauauggagcggcagggcaagaccccucucgggcuggucgaccuguucguguuuagcacguccuucuaccuuaucagcauuuuucuccgccuggugaaaaucccgacacacagacauauugucggaaagcccugcccuaaaccccaccggcugaaccauaugggcaucuguucuugcggccucuauaagcagccugggguucccgugcgcuggaagagaugaggacuagucccuguucccagagcccacuuuuuuuucuuuuuuugaaauaaaauagccugucuuucagaucucaaaggcucuuuucagagccaccaaaaaaaaaaaaaaaaaaaaaaaaaaaaaaaaaaaaaaaaaaaaaaaaaaaaaaaaaaaaaaaaaaaaaaaaaaaaaaaaaaaaaaaaaaaaaaaaaaaaa

SEQ ID NO: 15821 - RNA, 1764 nt, Artificial Sequence
  mRNA product Design a-2 (hSL-A100) comprising derived and/or modified sequence from LASV(Togo/2016/7082;Clade VI)__AMR44577__GPCmut1 (opt5)
aggagaguccgcucagccagguugcagaagcggcuuagcguguguccuaaucuucucucugcguguagguaggccugugccgcaaacaagcuuaccaugggccagaucauuaccuucuuucaagaggugccccacgucaucgaagagguuaugaacauugugcugaucgcccucagccugcuugcuauucugaaggggguguacaaugucgccacaugcggaaucaucggccucgugacguuccuguuucuuugugggagauccugcucucugauuuauaaaggaagcuacgaacuccagacccuggagcugaacauggaaacacucaauaugaccaugccucuguccuguacaaagaacucuagccaucacuauauccggguuggcaaugagaccgggcuugagcugacacucaccaacacguccauuaucaaucauaaauucugcaaccugucugacgcgcacaagcgcaaucuuuacgaucaugcucugaugagcauucucuccaccuuucaccugagcaucccgaacuucaaucaguaugaagccaugucuugugacuuuaacggaggcaaaauuuccgugcaguacaaucugagccacgccuaugcugucgaugccgcugagcauugcggcacaguggccaacgggguucuccaaaccuucaugagaauggcguggggaggcucuuacaucgcccuggacuccgggugcggaaauugggauuguaucaugacaagcuaccaguaucuuauuauccagaacaccacgugggaagaccacugccaguuuucucgccccuccccuauuggcuaccuggggcuccugagccaaagaacacgggauaucuauauuucccgcagacgccggggaaccuucacauggacccucucugacagcgagggcaacgagacccccggcggguacugucugacacgguggaugcugaucgaagcugagcucaagugcuuuggaaauacggccguggcuaaguguaacgaaaaacaugaugaggaguucugcgacaugcugcgccuuuuugauuucaauaagcaggccauccagagacugaaaucccccgcgcagaugagcauucaacucaucaacaaggccgucaaugcucugauuaacgaccagcuuaucaugaaaaaucaucugcgggauaugaugugcauuccuuauugcaacuacucuaaguauugguaccucaaucacaccuccagcgggcgcacaucucugcccaaguguuggcuggugagcaacggauccuaccucaaugagacccacuucucugacgacaucgaacagcaagccgauaacaugaucacagagaugcugcagaaagaauauauugacagacagggcaagaccccucuugggcugguggaucucuuugucuucagcacguccuuuuaccugaucagcauuuuccugcaccuuaucaaaauuccgacacaucggcacaucguuggaaagcccugcccuaaaccccaucgccucaaucacaugggcauuuguucuugcggccuguauaagcagccuggggugcccaccagauggaaacggugaggacuagucccuguucccagagcccacuuuuuuuucuuuuuuugaaauaaaauagccugucuuucagaucucaaaggcucuuuucagagccaccaaaaaaaaaaaaaaaaaaaaaaaaaaaaaaaaaaaaaaaaaaaaaaaaaaaaaaaaaaaaaaaaaaaaaaaaaaaaaaaaaaaaaaaaaaaaaaaaaaaaa

SEQ ID NO: 15822 - RNA, 1764 nt, Artificial Sequence
  mRNA product Design a-2 (hSL-A100) comprising derived and/or modified sequence from LASV(KAK-428;Clade n.d. (VII))__ANH09740__GPCmut1 (opt5)
aggagaguccgcucagccagguugcagaagcggcuuagcguguguccuaaucuucucucugcguguagguaggccugugccgcaaacaagcuuaccaugggccagaucgugaccuucuuucaagaggucccccacguuauugaagaggugaugaacaucgugcugauugcccucagccugcuugcuauccugaaggggcucuacaauuucgccacaugcggagucauuggccugaucacguuucuucugcucugugggagauccugcucugcgaccuauaaaggacaguacgaacugcagacacuggagcucaacauggaaagccugaauaugaccaugccucuuuccuguacaaagaacaauucucaucacuauauccgggcuggcaacaauaccgggcuggagcucacacugaccaacacgagcauuaucucccauaaauucugcaaucuuucugacgcccacaagaaaaaccuguacgaucauacccucaugagcauuaucacaaccuuucaccuguccauuccgaauuucaaccaguaugaggccaugagcugugacuuuaauggaggcaagaucucuauucaauacaaccugucccacagcuaugcuggcgaugccgcucagcauugcgggacaguggccaauggaguucuccagaccuucaugcgcauggcguggggcgggucuuaccuggcccuugacuccggaugccggggcugggauuguaucaucagcucuuaccaguaucugauuauccaaaacacgacaugggacgaucacugccaguuuucccgccccagcccuauuggguaccucggauucgugucccagaagaccagagacaucuauauuucucggcgccgccggggcacauuuaccuggacccugagcgauuccgaaggccaugacaugcccgggggauacugucucacaagauggaugcugaucgaggcugaucugaaaugcuucggcaacacggccgucgcuaaguguaaugaaaaacacgacgaggaguuuugcgauauguggcgccucuucgacuucaacaagcaggccauccaacggcugaaagcgcccgcccagaugaauauucagcuuaucaacaaggcugugaaugcccugauuaacgaccaacucaugaugaagaaucaccugagagauaucaugugcauuccuuauugcaacuacagcaaauuuugguaucuuaauaacaccacaaccggacggacaucucugccccgcuguuggcucaucuccaauggcagcuaccugaacgagacccauuucucugacgauaucgaacagcaggcugacaauaugauuacggagaugcugcagaaggaauacauggauagacaagggaaaacaccucucggacugguugaccuuuuuguguucagcaccuccuuuuaucugaucaccauuuuccuccaccuggucaagaucccgacacaucggcacauugugggcaaacccugcccuaagccccaucgccugaaccacaugggcaucuguucuugcgggcuuuacaaacagccuggagugcccgucagauggaagcggugaggacuagucccuguucccagagcccacuuuuuuuucuuuuuuugaaauaaaauagccugucuuucagaucucaaaggcucuuuucagagccaccaaaaaaaaaaaaaaaaaaaaaaaaaaaaaaaaaaaaaaaaaaaaaaaaaaaaaaaaaaaaaaaaaaaaaaaaaaaaaaaaaaaaaaaaaaaaaaaaaaaaa

SEQ ID NO: 15823 - RNA, 1764 nt, Artificial Sequence; identical to SEQ ID NO: 15817
  mRNA product Design a-2 (hSL-A100) comprising derived and/or modified sequence from LASV(Pinneo-NIG-1969;Clade I)__AIT17836__GPCmut1 (opt5)

SEQ ID NO: 15824 - RNA, 1764 nt, Artificial Sequence
  mRNA product Design a-2 (hSL-A100) comprising derived and/or modified sequence from LASV(ISTH0009-NIG-2011;Clade II)__AIT17404__GPCmut1 (opt5)
aggagaguccgcucagccagguugcagaagcggcuuagcguguguccuaaucuucucucugcguguagguaggccugugccgcaaacaagcuuaccaugggccagaucauuaccuucuuucaagaggugccccacgucaucgaagagguuaugaacauugugcugaucgcccucagccugcuugcuauucugaaggggaucuacaauguggccacaugcggacucuucggccuggucuccuuucuucugcucugugggagaucuugcagcacgaccuauaaaggaguguacgaacugcagacacuggagcucgacauggcgucccugaacaugaccaugccucuuucuuguacaaagaauaacagccaucacuauaucaugguuggcaaugaaaccgggcuggagcucacacugaccaacacguccauuaucaaucauaaauucugcaaccuuucugaugcucacaagaaaaaucuguacgaccaugcccucaugagcauuaucuccaccuuucaccugagcauuccgaacuucaaucaguaugaggccaugucuugugauuuuaacggaggcaagaucuccgugcaguacaaucugagccacgcuuaugccgucgacgcugccaaccauugcggcacaauugcgaauggggugcuccaaaccuucaugcggauggccuggggaggcucuuacaucgcucuggauuccgggugcggaagcugggacuguaucaugacaucuuaccaguaucuuauuauccagaacaccacgugggaagaucacugccaguuuucccgccccagcccuauuggcuaccuggggcuccugucccaaagaacacgggacaucuauauuucucgcagacgccggggaaccuucacauggacccucagcgauuccgagggcaacgaaacccccggcggguacugucugacacgguggaugcugaucgaggccgagcucaaaugcuuuggaaauacggcuguugccaaguguaacgaaaaacaugacgaggaguucugcgauaugcugcgccuuuuugacuucaauaagcaggcgaucagacggcugaaaacccccgcccagaugagcauucagcucaucaacaaggcugugaaugcccugauuaacgaucaacuuaucaugaagaaucaucugcgcgacauuaugugcaucccuuauugcaacuacucuaaauauugguaccucaaucacacagucaccgggaagacaucccugcccagauguuggcuggugagcaacggaucuuaccucaaugaaacccacuucagcgacgauaucgagcagcaggcugacaacaugauuacggagcugcuucaaaaagaauauauggaucggcagggcaagacaccucuggggcucguggaccuguuugucuucuccaccucuuuuuaccugaucagcauuuuccuucaccucaucaaaauuccgacccaucgccacaucacaggaaagcccugcccuaaaccccauagacugaaucacaugggcauuuguuccugcggccuguauaagcacccugggguucccgugaaguggaaacggugaggacuagucccuguucccagagcccacuuuuuuuucuuuuuuugaaauaaaauagccugucuuucagaucucaaaggcucuuuucagagccaccaaaaaaaaaaaaaaaaaaaaaaaaaaaaaaaaaaaaaaaaaaaaaaaaaaaaaaaaaaaaaaaaaaaaaaaaaaaaaaaaaaaaaaaaaaaaaaaaaaaaa

SEQ ID NO: 15825 - RNA, 1764 nt, Artificial Sequence
  mRNA product Design a-2 (hSL-A100) comprising derived and/or modified sequence from LASV(ISTH2010-NIG-2012;Clade II)__AIT17482__GPCmut1 (opt5)
aggagaguccgcucagccagguugcagaagcggcuuagcguguguccuaaucuucucucugcguguagguaggccugugccgcaaacaagcuuaccaugggccagaucauuaccuucuuucaagaggugccccacgucaucgaagagguuaugaacauugugcugaucgcccucagccugcuugcuauucugaaggggaucuacaauguggccacaugcggacucuucggccuggucuccuuucuucugcucugugggagaucuugcagcacgaccuauaaaggaguguacgaacugcagacacuggagcucgacauggcgucccugaacaugaccaugccucuuucuuguacaaagaauaacagccaucacuauaucaugguuggcaaugaaaccgggcuggagcucacacugaccaacacguccauuaucaaucauaaauucugcaaccuuucugaugcucacaagaaaaaucuguacgaccaugcccucaugagcauuaucuccaccuuucaccugagcauuccgaacuucaaucaguaugaggccaugucuugugauuuuaacggaggcaagaucuccgugcaguacaaucugagccacgcuuaugccgucgacgcugccaaccauugcggcacaauugcgaauggggugcuccaaaccuucaugcggauggccuggggaggcucuuacaucgcucuggauuccgggugcggaagcugggacuguaucaugacaucuuaccaguaucuuauuauccagaacauuaccugggaagaucacugccaguuuucccgccccagcccuaucggcuaccuggggcuccugucccaaagaacgcgggacauuuauaucucucgcagacgccggggaacauucaccuggacacucagcgauuccgagggcaacgaaacccccggcggguacugucugacccgguggaugcugaucgaggccgagcucaaaugcuuuggaaauacagcuguugccaaguguaacgaaaaacaugacgaggaguucugcgauaugcugcgccuuuuugacuucaauaagcaggcgauuagacggcugaaaacgcccgcccagaugagcauccagcucauuaacaaggcugugaaugcccugaucaacgaucaacuuauuaugaagaaucaucugcgcgacaucaugugcaucccuuauugcaacuacucuaaauauugguaccucaaucacaccgucacagggaagaccucccugcccagauguuggcuggugagcaacggaucuuaccucaaugaaacacacuucagcgacgauauugagcagcaggcugacaacaugaucaccgagcugcuucaaaaagaauauauugaucggcagggcaagacgccucuggggcucguggaccuguuugucuucuccacaucuuuuuaccugaucagcauuuuccuucaccucguuaaaaucccgacccaucgccacguggugggaaagcccugcccuaaaccccauagacugaaucacaugggcauuuguuccugcggccuguauaagcacccugggguccccgugaaguggaaacggugaggacuagucccuguucccagagcccacuuuuuuuucuuuuuuugaaauaaaauagccugucuuucagaucucaaaggcucuuuucagagccaccaaaaaaaaaaaaaaaaaaaaaaaaaaaaaaaaaaaaaaaaaaaaaaaaaaaaaaaaaaaaaaaaaaaaaaaaaaaaaaaaaaaaaaaaaaaaaaaaaaaaa

SEQ ID NO: 15826 - RNA, 1764 nt, Artificial Sequence
  mRNA product Design a-2 (hSL-A100) comprising derived and/or modified sequence from LASV(Lassa virus/H.sapiens-wt/NGA/2015/ISTH_0543;Clade II)__AVO03639__GPCmut1 (opt5)
aggagaguccgcucagccagguugcagaagcggcuuagcguguguccuaaucuucucucugcguguagguaggccugugccgcaaacaagcuuaccaugggccagaucauuaccuucuuucaagaggugccccacgucaucgaagagguuaugaacauugugcugaucgcccucagccugcuugcuauucugaaggggaucuacaauguggccacaugcggacucuucggccuggucuccuuucuucugcucugugggagaucuugcagcacgaccuauaaaggaguguacgaacugcagacacuggagcucgacauggcgaaccugaauaugaccaugccucuuuccuguacaaagaacaauucucaucacuauaucaugguuggcaacgaaaccgggcuggagcucacacugaccaauacgagcauuaucaaccauaaauucugcaaucuuuccgaugcucacaagaaaaaccuguacgaccaugcccucaugucuauuaucagcaccuuucaccuguccauuccgaauuucaaccaguaugaggccaugagcugugauuuuaauggaggcaagaucucugugcaguacaaccugucccacacauaugcugucgacgccgcuaaucauugcggcaccauugccaacggggugcuccaaacauucaugcggauggcguggggaggcagcuacaucgcccuggauucugggugcggauccugggacuguaucaugaccagcuaccaguaucuuguuauucagaacacgacaugggaagaucacugccaguuuucucgccccuccccuaucggcuaccuggggcuccugagccaaagaacccgggacauuuauaucucccgcagacgccggggaacauucaccuggacccucucugauagcgagggcaaugaaacacccggcggguacugucugacgcgguggaugcugauugaggcugagcucaaaugcuuuggaaacaccgccguggcuaaguguaaugaaaaacaugacgaggaguucugcgauaugcugcgccuuuuugacuucaacaagcaggccaucagacggcugaaaacacccgcgcagauguccauccagcucauuaauaaggccgucaacgcucugaucaaugaucaacuuauuaugaagaaccaucugcgcgacaucaugugcauuccuuauugcaauuacagcaaauauugguaccucaaccacaccgugacagggaagaccucucugcccagauguuggcugguguccaauggaagcuaccucaacgaaacgcacuucucugacgauaucgagcagcaggccgacaauaugaucacagagcugcuucaaaaagaauauauugaucggcagggcaagaccccucuggggcucgucgaccuguuuguuuucagcaccuccuuuuaccugaucucuauuuuccuucaccucgugaaaaucccgacacaucgccacauuaccggaaagcccugcccuaaaccccauagacugaaccacaugggcaucuguagcugcggccuguauaagcacccuggggugcccgucaaguggaaacggugaggacuagucccuguucccagagcccacuuuuuuuucuuuuuuugaaauaaaauagccugucuuucagaucucaaaggcucuuuucagagccaccaaaaaaaaaaaaaaaaaaaaaaaaaaaaaaaaaaaaaaaaaaaaaaaaaaaaaaaaaaaaaaaaaaaaaaaaaaaaaaaaaaaaaaaaaaaaaaaaaaaaa

SEQ ID NO: 15827 - RNA, 1764 nt, Artificial Sequence
  mRNA product Design a-2 (hSL-A100) comprising derived and/or modified sequence from LASV(Lassa virus/H.sapiens-wt/NGA/2016/ISTH_0009;Clade II)__AVO03571__GPCmut1 (opt5)
aggagaguccgcucagccagguugcagaagcggcuuagcguguguccuaaucuucucucugcguguagguaggccugugccgcaaacaagcuuaccaugggccagaucauuaccuucuuucaagaggugccccacgucaucgaagagguuaugaacauugugcugaucgcccucagccugcuugcuauucugaaggggaucuacaauguggccacaugcggacuccugggccuugucuccuuccugcuccugugugggagaucuugcagcacgaccuauaaaggaguguacgaacugcagacacucgagcuggacauggcgucccuuaacaugaccaugccucugucuuguacaaagaauaacagccaucacuauaucaugguuggcaaugaaaccgggcucgagcugacacuuaccaacacguccauuaucaaucauaaauuuugcaaccugucugaugcucacaagaaaaaucucuacgaccaugcccugaugagcauuaucuccaccuuccaccugagcauuccgaacuuuaaucaguaugaggccaugucuugugauuucaacggaggccggaucuccgugcaguacaaucucagccacucuuaugcugucgacgccgcuaaccauugcggcacaauugccaauggggugcugcaaaccuuuaugcgcauggcguggggaggcuccuacaucgcccuugauagcgggugcggaucuugggacuguaucaugacauccuaccaguaucugauuauccagaacaccacgugggaagaucacugccaguucagcagacccuccccuauuggcuaccucgggcugcuuucucaacggacacgcgacaucuauauuagcagacggcgccggggaaccuuuacauggacccuguccgauagcgagggcaacgaaacccccggcggguacugucugacacgcuggaugcucaucgaggcugagcugaagugcuucggaaauacggccguugcuaaauguaacgaaaagcaugacgaggaauuuugcgauaugcuuagacuguucgacuuuaauaaacaggccauccggcgccucaagacccccgcgcagaugucuauucagcugaucaacaaagccgugaaugcucuuauuaacgaucaacugaucaugaagaaucaccucagagacauuaugugcaucccuuauugcaacuacuccaaguauugguaccugaaucacacagucaccgggaaaacaagccugccccgguguuggcucgugucuaacggaagcuaccugaaugaaacccauuucuccgacgauaucgagcagcaggccgacaacaugauuacggagcuucugcaaaaggaauauaucgaucgccagggcaaaacaccucucgggcugguggaccuguucgucuuuucuaccagcuucuaccuuauuuccaucuuucuccaccugguuaagauuccgacccauagacacaucacaggaaaacccugcccuaagccccaucggcugaaucacaugggcauuuguagcugcggccucuauaaccacccuggggugcccgugaaauggaagcgcugaggacuagucccuguucccagagcccacuuuuuuuucuuuuuuugaaauaaaauagccugucuuucagaucucaaaggcucuuuucagagccaccaaaaaaaaaaaaaaaaaaaaaaaaaaaaaaaaaaaaaaaaaaaaaaaaaaaaaaaaaaaaaaaaaaaaaaaaaaaaaaaaaaaaaaaaaaaaaaaaaaaaa

SEQ ID NO: 15828 - RNA, 1764 nt, Artificial Sequence
  mRNA product Design a-2 (hSL-A100) comprising derived and/or modified sequence from LASV(Lassa virus/H.sapiens-wt/NGA/2016/ISTH_0017;Clade II)__AVO03567__GPCmut1 (opt5)
aggagaguccgcucagccagguugcagaagcggcuuagcguguguccuaaucuucucucugcguguagguaggccugugccgcaaacaagcuuaccaugggccagaucauuaccuucuuucaagaggugccccacgucaucgaagagguuaugaacauugugcugaucgcccucagccugcuugcuauucugaaggggaucuacaauguggccacaugcggacucuucggccuggucuccuuucuucugcucugugggagaucuugcagcacgaccuauaaaggaguguacgaacugcagacacuggagcucgacauggcgucccugaacaugaccaugccucuuucuuguacaaagaauaacagccaucacuauaucaugguuggcaaugaaaccgggcuggagcucacacugaccaacacguccauuaucaaucauaaauucugcaaccuuucugaugcucacaagaaaaaucuguacgaccaugcccucaugagcauuaucuccaccuuucaccugagcauuccgaacuucaaucaguaugaggccaugucuugugauuuuaacggaggcaagaucuccgugcaguacaaucugagccacacauaugcuauugacgccgcuaaccauugcggcaccaucgccaaugggguccuccaaacauucaugcggauggcguggggaggcucuuacaucgcccuggauuccgggugcggaagcugggacuguauuaugaccucuuaccaguaucuuaucauucagaacacgacaugggaagaucacugccaguuuucccgccccagcccuaucggcuaccuggggcuccugucccaaagaacccgggacauuuauaucucucgcagacgccggggaacauucaccuggacccucagcgauuccgagggcaacgaaacacccggcggguacugucugacgcgguggaugcugaucgaggcugagcucaaaugcuuuggaaauaccgccguggcuaaguguaacgaaaaacaugacgaggaguucugcgauaugcugcgccuuuuugacuucaauaagcaggccauuagacggcugaaaacacccgcgcagaugagcauccagcucauuaacaaggccguuaaugcucugaucaacgaucaacuuauuaugaagaaucaucugcgcgacaucaugugcaucccuuauugcaacuacucuaaauauugguaccucaaucacaccgugacagggaagaccucccugcccagauguuggcuggucagcaacggaucuuaccucaaugaaacgcacuucagcgacgauauugagcagcaggccgacaacaugaucacagagcugcuucaaaaagaauauauggaucggcagggcaagaccccucuggggcucguggaccuguuuguguucuccaccucuuuuuaccugauuagcaucuuccuucaccucguccgcauuccgacacauagacacguuaucggaaaacccugcccuaagccccaucggcugaaucacaugggcauuuguuccugcggccuguauaaacacccuggggugcccgugaaguggaagcgcugaggacuagucccuguucccagagcccacuuuuuuuucuuuuuuugaaauaaaauagccugucuuucagaucucaaaggcucuuuucagagccaccaaaaaaaaaaaaaaaaaaaaaaaaaaaaaaaaaaaaaaaaaaaaaaaaaaaaaaaaaaaaaaaaaaaaaaaaaaaaaaaaaaaaaaaaaaaaaaaaaaaaa

SEQ ID NO: 15829 - RNA, 1764 nt, Artificial Sequence
  mRNA product Design a-2 (hSL-A100) comprising derived and/or modified sequence from LASV(Lassa virus/H.sapiens-wt/NGA/2018/ISTH_0959;Clade II)__AVV65099__GPCmut1 (opt5)
aggagaguccgcucagccagguugcagaagcggcuuagcguguguccuaaucuucucucugcguguagguaggccugugccgcaaacaagcuuaccaugggccagaucauuaccuucuuucaagaggugccccacgucaucgaagagguuaugaacauugugcugaucgcccucagccugcuugcuauucugaaggggaucuacaauguggucacaugcggacucuucggccugguguccuuucuucugcucugugggagaucuugcagcacgaccuauaaaggaguuuacgaacugcagacacuggagcucgacauggccucccugaacaugaccaugccucuuucuuguacaaagaauaacagccaucacuauaucauggugggcaaugaaaccgggcuggagcucacacugaccaacacguccauuaucaaucauaaauucugcaaccuuucugaugcgcacaagaaaaaucuguacgaccaugcucucaugagcauuaucuccaccuuucaccugagcauuccgaacuucaaucaguaugaggccaugucuugugauuuuaacggaggcaagaucuccguccaguacaaucugagccacgccuaugcuauugacgccgcuaaccauugcggcacaaucgccaauggggugcuccaaaccuucaugcggauggcguggggaggcucuuacaucgcccuggauuccgggugcggaagcugggacuguauuaugacaucuuaccaguaucuuaucauucagaacaccacgugggaagaucacugccaguuuucccgccccagcccuaucggcuaccuggggcuccugucccaaagaacacgggacauuuauaucucucgcagacgccggggaaccuucacauggacccucagcgauuccgagggcaacgaaacccccggcggguacugucugacacgguggaugcugaucgaggcugagcucaaaugcuuuggaaauacggccguugcuaaguguaacgaaaaacaugacgaggaguucugcgauaugcugcgccuuuuugacuucaauaagcaggccauuagacggcugaaaacccccgcgcagaugagcauccagcucauuaacaaggccgugaaugcucugaucaacgaucaacuuauuaugaagaaucaucugcgcgacaucaugugcaucccuuauugcaacuacucuaaauauugguaccucaaucacacagucaccgggaagacaucccugcccagauguuggcuggugagcaacggaucuuaccucaaugaaacccacuucagcgacgauauugagcagcaggccgacaacaugaucacggagcugcuucaaaaagaauauauugaucggcagggcaagacaccucuggggcucguggaccuguuugucuucuccaccucuuuuuaccugaucagcauuuuccuucaccucguuaaaaucccgacccaucgccacgugauuggaaagcccugcccuaaaccccauagacugaaucacaugggcaucuguuccugcggccuguauaagcacccuggggugcccgucaaguggaaacggugaggacuagucccuguucccagagcccacuuuuuuuucuuuuuuugaaauaaaauagccugucuuucagaucucaaaggcucuuuucagagccaccaaaaaaaaaaaaaaaaaaaaaaaaaaaaaaaaaaaaaaaaaaaaaaaaaaaaaaaaaaaaaaaaaaaaaaaaaaaaaaaaaaaaaaaaaaaaaaaaaaaaa

SEQ ID NO: 15830 - RNA, 1764 nt, Artificial Sequence
  mRNA product Design a-2 (hSL-A100) comprising derived and/or modified sequence from LASV(LASV003-NIG-2008;Clade II)__AIT17580__GPCmut1 (opt5)
aggagaguccgcucagccagguugcagaagcggcuuagcguguguccuaaucuucucucugcguguagguaggccugugccgcaaacaagcuuaccaugggccagaucauuaccuucuuucaagaggugccccacgucaucgaagagguuaugaacauugugcugaucgcccucagccugcuugcuauucugaaggggaucuacaauguggccacaugcggacucuucggccuggucuccuuucuucugcucugugggagaucuugcagcacgaccuauaaaggaguguacgaacugcagacacuggagcucgacauggcgucccugaacaugaccaugccucuuucuuguacaaagaauaacagccaucacuauaucaugguuggcaaugaaaccgggcuggagcucacacugaccaacacguccauuaucaaucauaaauucugcaaccuuucugaugcucacaagaaaaaucuguacgaccaugcccucaugagcauuaucuccaccuuucaccugagcauuccgaacuucaaucaguaugaggccaugucuugugauuuuaacggaggcaagaucuccgugcaguacaaucugagccacacauaugcugucgacgccgcuaaccauugcggcaccauugccaauggggugcuccaaacauucaugcggauggcguggggaggcucuuacaucgcccuggauuccgggugcggaagcugggacuguaucaugaccucuuaccaguaucuuauuauccagaacacgacaugggaagaucacugccaguuuucccgccccagcccuauuggcuaccuggggcuccugucccaaagaacccgggacaucuauauuucucgcagacgccggggaacauucaccuggacccucagcgauuccgagagcaacgaaacacccggcggcuacugucugacgcgguggaugcugaucgaggcugagcucaaaugcuuugggaauaccgccguugcuaaguguaacgaaaaacaugacgaggaguucugcgauaugcugcgccuuuuugacuucaauaagcaggccaucagacggcugaaagcgcccgcccagaugucuauucagcucaucaacaaggcugugaaugcccugauuaacgaucaacuuaucaugaagaaucaucugcgcgacauuaugugcaucccuuauugcaacuacuccaaauauugguaccucaaucacacagucaccggcagaacaagccugccccgguguuggcuggugucuaacgggagcuaccucaaugaaacccacuucuccgacgauaucgagcagcaggcugacaacaugauuacggagcugcuucaaaaggaauauauggaucgccagggaaaaacaccucugggccucguggaccuguuugucuucucuaccagcuuuuaccugaucuccauuuuccuucaccucguuaagaucccgacccauagacacgugauugggaaacccugcccuaagccccaucggcugaaucacaugggaaucuguagcugcggccuguauaaacacccuggcgugcccgucaaguggaagcgcugaggacuagucccuguucccagagcccacuuuuuuuucuuuuuuugaaauaaaauagccugucuuucagaucucaaaggcucuuuucagagccaccaaaaaaaaaaaaaaaaaaaaaaaaaaaaaaaaaaaaaaaaaaaaaaaaaaaaaaaaaaaaaaaaaaaaaaaaaaaaaaaaaaaaaaaaaaaaaaaaaaaaa

SEQ ID NO: 15831 - RNA, 1764 nt, Artificial Sequence
  mRNA product Design a-2 (hSL-A100) comprising derived and/or modified sequence from LASV(LASV035-NIG-2009;Clade II)__AIT17588__GPCmut1 (opt5)
aggagaguccgcucagccagguugcagaagcggcuuagcguguguccuaaucuucucucugcguguagguaggccugugccgcaaacaagcuuaccaugggccagaucauuaccuucuuucaagaggugccccacgucaucgaagagguuaugaacauugugcugaucgcccucagccugcuugcuauucugaaggggaucuacaauguggccacaugcggacucuucggccuggucuccuuucuucugcucugugggagaucuugcagcacgaccuauaaaggaguguacgaacugcagacacuggagcucgacauggcgucccugaacaugaccaugccucuuucuuguacaaagaauaacagccaucacuauaucaugguuggcaaugaaaccgggcuggagcucacacugaccaacacguccauuaucaaucauaaauucugcaaccuuucugaugcucacaagaaaaaucuguacgaccaugcccucaugagcauuaucuccaccuuucaccugagcauuccgaacuucaaucaguaugaggccaugucuugugauuuuaacggaggcaagaucuccgugcaguacaaucugagccacgcuuaugccgucgacgcugccaaccauugcggcacaauugcgaauggggugcuccaaaccuucaugcggauggccuggggaggcucuuacaucgcucuggauuccgggugcggaagcugggacuguaucaugacaucuuaccaguaucuuauuauccagaacaccacgugggaagaucacugccaguuuucccgccccagcccuauuggcuaccuggggcuccugucccaaagaacacgggacaucuauauuucucgcagacgccggggaaccuucacauggacccucagcgauuccgagggcaacgaaacccccggcggguacugucugacacgguggaugcugaucgaggccgagcucaaaugcuuuggaaauacggcuguugccaaguguaacgaaaaacaugacgaggaguucugcgauaugcugcgccuuuuugacuucaauaagcaggcgaucagacggcugaaagcccccgcucagaugagcauucagcucaucaacaaggccgugaaugcucugauuaacgaucaacuuaucaugaagaaucaucugcgcgacauuaugugcaucccuuauugcaacuacucuaaauauugguaccucaaucacaccgucacagggaagaccucccugcccagauguuggcuggugagcaacggaucuuaccucaaugaaacacacuucagcgacgauaucgagcagcaggccgacaacaugauuaccgagcugcuucaaaaagaauauaucgaucggcagggcaagacgccucuggggcucguggaccuguuugucuucuccacaucuuuuuaccugauuagcaucuuccuucaccucguuaaaauuccgacccaucgccacgugaucggaaagcccugcccuaaaccccauagacugaaucacaugggcauuuguuccugcggccuguauaagcacccuggggugcccgucaaguggaaacggugaggacuagucccuguucccagagcccacuuuuuuuucuuuuuuugaaauaaaauagccugucuuucagaucucaaaggcucuuuucagagccaccaaaaaaaaaaaaaaaaaaaaaaaaaaaaaaaaaaaaaaaaaaaaaaaaaaaaaaaaaaaaaaaaaaaaaaaaaaaaaaaaaaaaaaaaaaaaaaaaaaaaa

SEQ ID NO: 15832 - RNA, 1764 nt, Artificial Sequence
  mRNA product Design a-2 (hSL-A100) comprising derived and/or modified sequence from LASV(LASV1000-NIG-2009;Clade II)__AIT17782__GPCmut1 (opt5)
aggagaguccgcucagccagguugcagaagcggcuuagcguguguccuaaucuucucucugcguguagguaggccugugccgcaaacaagcuuaccaugggccagaucauuaccuucuuucaagaggugccccacgucaucgaagagguuaugaacauugugcugaucgcccucagccugcuugcuauucugaaggggaucuacaauguggccacaugcggacucuucggccuggucuccuuucuucugcucugugggagaucuugcagcacgaccuauaaaggaguguacgaacugcagacacuggagcucgacauggcgucccugaacaugaccaugccucuuucuuguacaaagaauaacagccaucacuauaucaugguuggcaaugaaaccgggcuggagcucacacugaccaacacguccauuaucaaucauaaauucugcaaccuuucugaugcucacaagaaaaaucuguacgaccaugcccucaugagcauuaucuccaccuuucaccugagcauuccgaacuucaaucaguaugaggccaugucuugugauuuuaacggaggcaagaucuccgugcaguacaaucugagccacacauaugcugucgacgccgcuaaccauugcggcaccauugccaauggggugcuccaaacauucaugcggauggcguggggaggcucuuacaucgcccuggauuccgggugcggaagcugggacuguaucaugaccucuuaccaguaucuuauuauccagaacacgacaugggaagaucacugccaguuuucccgccccagcccuauuggcuaccuggggcuccugucccaaagaacccgggacaucuauauuucucgcagacgccggggaacauucaccuggacccucagcgauuccgagggcaacgaaacacccggcggguacugucugacgcgguggaugcugaucgaggcugagcucaaaugcuuuggaaauaccgccguugcuaaguguaacgaaaaacaugacgaggaguucugcgauaugcugcgccuuuuugacuucaauaagcaggccaucaaaagacugaagacacccgcgcagaugagcauucagcucaucaacaaggccgugaaugcucugauuaacgaucaacuuaucaugaaaaaucaucugcgggacauuaugugcaucccuuauugcaacuacucuaaguauugguaccucaaucacaccgucacagggaaaaccucccugccccgcuguuggcuggugagcaacggaucuuaccucaaugaaacgcacuucagcgacgauaucgagcagcaggccgacaacaugauuacagagcugcuucaaaaggaauauaucgauagacagggcaaaaccccucuggggcucguggaccuguuugucuucuccaccucuuuuuaccugauuagcaucuuccuucaccucguuaagauuccgacacaucggcacguggugggaaaacccugcccuaagccccaucgccugaaucacaugggcaucuguuccugcggccuguauaagcacccugggguccccgugaaauggaagagaugaggacuagucccuguucccagagcccacuuuuuuuucuuuuuuugaaauaaaauagccugucuuucagaucucaaaggcucuuuucagagccaccaaaaaaaaaaaaaaaaaaaaaaaaaaaaaaaaaaaaaaaaaaaaaaaaaaaaaaaaaaaaaaaaaaaaaaaaaaaaaaaaaaaaaaaaaaaaaaaaaaaaa

SEQ ID NO: 15833 - RNA, 1764 nt, Artificial Sequence
  mRNA product Design a-2 (hSL-A100) comprising derived and/or modified sequence from LASV(LASV221-NIG-2010;Clade II)__AIT17624__GPCmut1 (opt5)
aggagaguccgcucagccagguugcagaagcggcuuagcguguguccuaaucuucucucugcguguagguaggccugugccgcaaacaagcuuaccaugggccagaucauuaccuucuuucaagaggugccccacgucaucgaagagguuaugaacauugugcugaucgcccucagccugcuugcuauucugaaggggaucuacaauguggccacaugcggacucuucggccuggucuccuuucuucugcucugugggagaucuugcagcacgaccuauaaaggaguguacgaacugcagacacuggagcucgacauggcgucccugaacaugaccaugccucuuucuuguacaaagaauaacagccaucacuauaucaugguuggcaaugaaaccgggcuggagcucacacugaccaacacguccauuaucaaucauaaauucugcaaccuuucugaugcucacaagaaaaaucuguacgaccaugcccucaugagcauuaucuccaccuuucaccugagcauuccgaacuucaaucaguaugaggccaugucuugugauuuuaacggaggcaagaucuccgugcaguacaaucugagccacacauaugcuauugacgccgcuaaccauugcggcaccaucgccaaugggguccuccaaacauucaugcggauggcguggggaggcucuuacaucgcccuggauuccgggugcggaagcugggacuguauuaugaccucuuaccaguaucuuaucauucagaacacgacaugggaagaucacugccaguuuucccgccccagcccuaucggcuaccuggggcuccugucccaaagaacccgggacauuuauaucucucgcagacgccggggaacauucaccuggacccucagcgauuccgagggcaacgaaacacccggcggguacugucugacgcgguggaugcugaucgaggcugagcucaaaugcuuuggaaauaccgccguggcuaaguguaacgaaaaacaugacgaggaguucugcgauaugcugcgccuuuuugacuucaauaagcaggccauuagacggcugaaaacacccgcgcagaugagcauccagcucauuaacaaggccguuaaugcucugaucaacgaucaacuuauuaugaagaaucaucugcgcgacaucaugugcaucccuuauugcaacuacucuaaauauugguaccucaaucacaccgugacagggaagaccucccugcccagauguuggcuggucagcaacggaucuuaccucaaugaaacgcacuucagcgacgauauugagcagcaggccgacaacaugaucacagagaugcugcaaaaagaauauauggaucggcagggcaagaccccucuugggcugguggaccucuuuguguucuccaccucuuuuuaccugauuagcaucuuccugcaccuugucaaaauuccgacacaucgccacguuaucggaaagcccugcccuaaaccccauagacucaaucacaugggcauuuguuccugcggccuguauaagcacccuggggugcccgugaaguggaaacggugaggacuagucccuguucccagagcccacuuuuuuuucuuuuuuugaaauaaaauagccugucuuucagaucucaaaggcucuuuucagagccaccaaaaaaaaaaaaaaaaaaaaaaaaaaaaaaaaaaaaaaaaaaaaaaaaaaaaaaaaaaaaaaaaaaaaaaaaaaaaaaaaaaaaaaaaaaaaaaaaaaaaa

SEQ ID NO: 15834 - RNA, 1764 nt, Artificial Sequence
  mRNA product Design a-2 (hSL-A100) comprising derived and/or modified sequence from LASV(LASV237-NIG-2010;Clade II)__AIT17638__GPCmut1 (opt5)
aggagaguccgcucagccagguugcagaagcggcuuagcguguguccuaaucuucucucugcguguagguaggccugugccgcaaacaagcuuaccaugggccagaucauuaccuucuuucaagaggugccccacgucaucgaagagguuaugaacauugugcugaucgcccucagccugcuugcuauucugaaggggaucuacaauguggccacaugcggacucuucggccuggucuccuuucuucugcucugugggagaucuugcagcacgaccuauaaaggaguguacgaacugcagacacuggagcucgacauggcgucccugaacaugaccaugccucuuucuuguacaaagaauaacagccaucacuauaucaugguuggcaaugaaaccgggcuggagcucacacugaccaacacguccauuaucaaucauaaauucugcaaccuuucugaugcucacaagaaagaccuguacgaucaugcccucaugagcauuaucuccaccuuucaccugagcauuccgaauuucaaccaguaugaggccaugucuugugacuuuaauggaggcaagaucuccgugcaguacaaccugagccacacauaugcugucgaugccgcuaaucauugcggcaccauugccaacggggugcuccaaacauucaugcggauggcguggggaggcucuuacaucgcccuggacuccgggugcggaagcugggauuguaucaugaccucuuaccaguaucuuauuauccagaauacgacaugggaagaccacugccaguuuucccgccccagcccuauuggcuaccuggggcuccugucccaaagaacccgggauaucuauauuucucgcagacgccggggaacauucaccuggacccucagcgacuccgagggcaacgaaacacccggcggguacugucugacgcgguggaugcugaucgaggcugagcucaaaugcuuuggaaacaccgccguugcuaaguguaaugaaaaacaugaugaggaguucugcgacaugcugcgccuuuuugauuucaacaagcaggccaucagacggcugaaaacacccgcgcagaugagcauucagcucaucaauaaggccgugaacgcucugauuaaugaccaacuuaucaugaagaaccaucugcgcgacauuaugugcaucccuuauugcaauuacucuaaauauugguaccucaaccacaccgucacagggaagaccucccugcccagauguuggcuggugagcaauggaucuuaccucaacgaaacgcacuucagcgaugacaucgagcagcaggccgauaauaugauuacagagcugcuucaaaaagaauauauggaccggcagggcaagaccccucuggggcucguggaucuguuugucuucuccaccucuuuuuaccugaucagcauuuuccuucaccucaucaaaauuccgacacaucgccacaucaccggaaagcccugcccuaaaccccauagacugaaccacaugggcauuuguuccugcggccuguauaagcacccugggguucccgugaaguggaaacggugaggacuagucccuguucccagagcccacuuuuuuuucuuuuuuugaaauaaaauagccugucuuucagaucucaaaggcucuuuucagagccaccaaaaaaaaaaaaaaaaaaaaaaaaaaaaaaaaaaaaaaaaaaaaaaaaaaaaaaaaaaaaaaaaaaaaaaaaaaaaaaaaaaaaaaaaaaaaaaaaaaaaa

SEQ ID NO: 15835 - RNA, 1764 nt, Artificial Sequence
  mRNA product Design a-2 (hSL-A100) comprising derived and/or modified sequence from LASV(LASV253-NIG-2011;Clade II)__AIT17670__GPCmut1 (opt5)
aggagaguccgcucagccagguugcagaagcggcuuagcguguguccuaaucuucucucugcguguagguaggccugugccgcaaacaagcuuaccaugggccagaucauuaccuucuuucaagaggugccccacgucaucgaagagguuaugaacauugugcugaucgcccucagccugcuugcuauucugaaggggaucuacaauguggccacaugcggacucuucggccuggucuccuuucuucugcucugugggagaucuugcagcacgaccuauaaaggaguguacgaacugcagacacuggagcucgacauggcgucccugaacaugaccaugccucuuucuuguacaaagaauaacagccaucacuauaucaugguuggcaaugaaaccgggcuggagcucacacugaccaacacguccauuaucaaucauaaauucugcaaccuuucugaugcucacaagaaaaaucuguacgaccaugcccucaugagcauuaucuccaccuuucaccugagcauuccgaacuucaaucaguaugaggccaugucuugugauuuuaacggaggcaagaucuccgugcaguacaaucugagccacacauaugcugucgacgccgcuaaccauugcggcaccauugccaauggggugcuccaaacauucaugcggauggcguggggaggcucuuacaucgcccuggauuccgggugcggaagcugggacuguaucaugaccucuuaccaguaucuuauuauccagaacacgacaugggaagaucacugccaguuuucccgccccagcccuauuggcuaccuggggcuccugucccaaagaacccgggacaucuauauuucucgcagacgccggggaacauucaccuggacccucagcgauuccgagggcaacgaaacacccggcggguacugucugacgcgguggaugcugaucgaggcugagcucaaaugcuuuggaaauaccgccguugcuaaguguaacgaaaaacaugacgaggaguucugcgauaugcugcgccuuuuugacuucaauaagcaggccaucagacggcugaaagcgcccgcccagaugagcauucagcucaucaacaaggcugugaaugcccugauuaacgaucaacuuaucaugaagaaucaucugcgcgacauuaugugcaucccuuauugcaacuacucuaaauauugguaccucaaucacacagucaccgggagaacaucccugccccgguguuggcuggugagcaacggaucuuaccucaaugaaacccacuucagcgacgauaucgagcagcaggcugacaacaugauuacggagcugcuucaaaaggaauauaucgaucgccagggcaaaacaccucuggggcucguggaccuguuugucuucuccaccucuuuuuaccugauuagcaucuuccuucaccucguuaagauuccgacccauagacacaucauuggaaaacccugcccuaagccccaucggcugaaucacaugggcaucuguuccugcggccuguauaaacacccuggggugcccgugaaguggaagcgcugaggacuagucccuguucccagagcccacuuuuuuuucuuuuuuugaaauaaaauagccugucuuucagaucucaaaggcucuuuucagagccaccaaaaaaaaaaaaaaaaaaaaaaaaaaaaaaaaaaaaaaaaaaaaaaaaaaaaaaaaaaaaaaaaaaaaaaaaaaaaaaaaaaaaaaaaaaaaaaaaaaaaa

SEQ ID NO: 15836 - RNA, 1764 nt, Artificial Sequence
  mRNA product Design a-2 (hSL-A100) comprising derived and/or modified sequence from LASV(LASV254-NIG-2011;Clade II)__AIT17674__GPCmut1 (opt5)
aggagaguccgcucagccagguugcagaagcggcuuagcguguguccuaaucuucucucugcguguagguaggccugugccgcaaacaagcuuaccaugggccagaucauuaccuucuuucaagaggugccccacgucaucgaagagguuaugaacauugugcugaucgcccucagccugcuugcuauucugaaggggaucuacaauguggccacaugcggacucuucggccuggucuccuuucuucugcucugugggagaucuugcagcacgaccuauaaaggaguguacgaacugcagacacuggagcucgacaugaccaaccugaauaugacaaugccucuuuccuguaccaagaacaauucucaucacuauaucaugguuggcaacgaaacagggcuggagcucacccugacgaauaccagcauuaucaaccauaaauucugcaaucuuuccgaugcgcacaagaaaaaccuguacaaucaugcucucaugucuauuaucagcacauuucaccuguccauuccgaacuucaaucaguaugaggccaugagcugugacuuuaacggaggcaagaucucugugcaguacaaucugucccacagcuaugccgucgaugcugccaaccauugcggcaccauugcuaacggggugcuccaaacauucaugcggauggccuggggaggcucuuacaucgcgcuggacuccgggugcggaaauugggauuguaucaugaccagcuaccaguaucuuauuauccagaacacgacaugggaagaccacugccaguuuucucgccccuccccuauuggcuaccuggggcuccugagccaaagaacccgggauaucuauauuucccgcagacgccggggaacauucaccuggacccucucugacagcgagggcaaugaaacacccggcggguacugucugacgcgguggaugcugaucgaggccgagcucaaaugcuuuggaaacaccgcuguugccaaguguaaugaaaaacaugaugaggaguucugcgacaugcugcgccuuuuugauuucaacaagcaggcuaucagacggcugaaaacacccgcccaggcgaauauucagcucaucaacaaggccgugaaugcucugauuaacgaccaacuuaucaugaagaaucaucugcgcgauauuaugugcaucccuuauugcaacuacuccaaauauugguaccucaaucacaccgucacagggaagaccagccugcccagauguuggcuggugucuaacggauccuaccucaaugaaacgcacuucagcgacgacaucgagcagcaggccgauaacaugauuacagagcugcuucaaaaagaauauauggaccggcagggcaagaccccucuggggcucguggaucuguuugucuucucuaccagcuuuuaccugaucuccauuuuccuucaccucguuaaaaucccgacacaucgccacgugauuggaaagcccugcccuaaaccccauagacugaaccacaugggcaucuguucuugcggccuguauaagcacccuggggugcccgucaaguggaaacggugaggacuagucccuguucccagagcccacuuuuuuuucuuuuuuugaaauaaaauagccugucuuucagaucucaaaggcucuuuucagagccaccaaaaaaaaaaaaaaaaaaaaaaaaaaaaaaaaaaaaaaaaaaaaaaaaaaaaaaaaaaaaaaaaaaaaaaaaaaaaaaaaaaaaaaaaaaaaaaaaaaaaa

SEQ ID NO: 15837 - RNA, 1764 nt, Artificial Sequence
  mRNA product Design a-2 (hSL-A100) comprising derived and/or modified sequence from LASV(Nig08-A19;Clade III)__ADU56618__GPCmut1 (opt5)
aggagaguccgcucagccagguugcagaagcggcuuagcguguguccuaaucuucucucugcguguagguaggccugugccgcaaacaagcuuaccaugggccagaucgugaccuucuuucaagaggucccccacguuauugaagaggugaugaacaucgugcugauugcccucagcauccuggcuauucuuaaggggcuguacaauaucgccacaugcggacucaucggccuggucacguuccuucugcucuccgggagaucuuguagcaugaccuauaaaggaguguacgaacugcagacacuggagcucaacaugaauacccugaacaugacaaugccucuuuccugcaccaagaauaacucucaucacuauauuaugguuggcaaugaaacagggcuggagcucacccugacgaacaccagccuucugcaucacaaauuuuguaaucucuccgacgcgcauaagaaaaaccuguacgaucacacacugaugucuaucauuagcaccuuccaccucuccaucccgaauuuuaaccaguaugaggcuaugagcugcgacuucaauggaggcaagauuacagugcaguacaaccugucucauuccuaugccaucgaugccgcuaaucacuguggcaccgucgccaacggggugcuucaaacguuuaugcggauggcuuggggaggcagcuacauugcccuggacucugggugcggaaagugggauugcaucaugacauccuaccaguaucucaucauucagaacaccacaugggaagaccauugucaguucagcagacccucuccuaucggcuaccuggggcuucugucccaacggacccgcgauauuuauaucagcagacggcgccggggaaccuuuacauggacgcuguccgacucugagggcaaugaaacccccggcggguacugccucacacgcuggaugcugauugaggcggagcuuaaauguuucggaaacaccgccguugcuaagugcaaugaaaaacacgaugaggaauuuugugacaugcugagacucuucgauuuuaacaagcaggccauccggcgccugaaagcucccgcccagaugagcauccagcuuauuaauaaggcggugaacgcccugaucaaugaccaacucauuaugaagaaccaccugagagauaucaugugcauuccuuauugcaauuacuccaaauauugguaccugaaccauacaagcaccgggcggacgucucucccccgcugcuggcuggucuccaauggaagcuaccuuaacgaaacacacuucucugacgacaucgagcagcaggcugauaauaugaucaccgagaugcugcaaaaggaauaucucgacagacagggcaaaaccccucuggggcugguggaucuuuucguguuuagcacauccuucuaccucauuucuaucuuucugcaucuggucaagauuccgacccaccggcauaucguuggaaaacccuguccuaagccccaccgccucaaccacaugggcauuugcagcuguggccuguauaaacagccuggggugcccgugagauggaagcggugaggacuagucccuguucccagagcccacuuuuuuuucuuuuuuugaaauaaaauagccugucuuucagaucucaaaggcucuuuucagagccaccaaaaaaaaaaaaaaaaaaaaaaaaaaaaaaaaaaaaaaaaaaaaaaaaaaaaaaaaaaaaaaaaaaaaaaaaaaaaaaaaaaaaaaaaaaaaaaaaaaaaa

SEQ ID NO: 15838 - RNA, 1767 nt, Artificial Sequence
  mRNA product Design a-2 (hSL-A100) comprising derived and/or modified sequence from LASV(G1180-SLE-2010;Clade IV)__AIT17168__GPCmut1 (opt5)
aggagaguccgcucagccagguugcagaagcggcuuagcguguguccuaaucuucucucugcguguagguaggccugugccgcaaacaagcuuaccaugggccagaucgugaccuucuuucaagaggucccccacguuauugaagaggugaugaacaucgugcugauugcccucagcauccuggcuguccuuaaggggcuguacaauuucgccacaugcggacucgugggccugcuuacguuucugcuccugugugggagauccugcaccgcgucucgguauaaaggaguuuacgaacugcagacacucgagcugaacauggaaacccuuaauaugacaaugccucugagcuguaccaagaacaauucccaucacuauauuauggugggcaacgagacagggcucgagcugacccuuacgaauaccucuaucaucaaccauaaauucugcaaucugagcgacgcucacaagaaaaaccucuacgaucaugcccugauguccauuaucucuacauuucaccugagcauuccgaauuucaaccaguaugaagccauguccugugacuuuaauggaggcaagaucagcguccaguacaaccucucucacuccuaugcuggcgaugccgcuaaucauugcgggaccguggccaacggaguucugcaaacauucaugcgcauggcguggggcgggagcuacauugcccuugacucuggaugcggcuccugggauuguaucaugaccagcuaccaguaucugauuauccagaacacgacaugggaggaccauugccaguuuucuagacccuccccuaucggguaccucggacugcuuagccaacggacccgcgauauuuauaucuccagacggcgccggggcacauucaccuggacccugucugacagcgaaggcaaggauacacccgggggauacugucugacgcgcuggaugcucauugaggcugagcugaaaugcuuuggcaauaccgccguggcuaaguguaacgaaaaacacgacgaggaguucugcgauaugcuuagacuguuugacuucaauaagcaggccauccagcggcucaaagcgcccgcccagauguccauucaacugaucaacaaggcugucaaugcccuuaucaacgaucagcugauuaugaagaaucaccuccgcgacaucaugugcauuccuuauugcaacuacagcaaauauugguaccugaaucauacaaccacaggaaagaccucucugcccaaauguuggcucguguccaacggcagcuaccugaaugaaacgcacuucucugacgauaucgagcagcaagcugacaacaugauuacagagaugcuucagaaggaauauauggagagacaggggaaaaccccucugggacucguggaucuguuugucuucagcaccuccuuuuaccugaucucuaucuuccuucaucucguuaagauuccgacacaccggcauaucgugggcaaaagcugccccaagccucaccgccugaaucacaugggcauuuguuccugcgggcuguauaagcagcccggagugccugucaaauggaagagaugaggacuagucccuguucccagagcccacuuuuuuuucuuuuuuugaaauaaaauagccugucuuucagaucucaaaggcucuuuucagagccaccaaaaaaaaaaaaaaaaaaaaaaaaaaaaaaaaaaaaaaaaaaaaaaaaaaaaaaaaaaaaaaaaaaaaaaaaaaaaaaaaaaaaaaaaaaaaaaaaaaaaa

SEQ ID NO: 15839 - RNA, 1767 nt, Artificial Sequence
  mRNA product Design a-2 (hSL-A100) comprising derived and/or modified sequence from LASV(G1442-SLE-2011;Clade IV)__AIT17180__GPCmut1 (opt5)
aggagaguccgcucagccagguugcagaagcggcuuagcguguguccuaaucuucucucugcguguagguaggccugugccgcaaacaagcuuaccaugggccagaucgugaccuucuuucaagaggucccccacguuauugaagaggugaugaacaucgugcugauugcccucagcauccuggcuguccuuaaggggcuguacaauguggccacaugcggacucauuggccugguuacguuccuucugcucugugggagauccugcaccacaacccuguauaaaggaguguacgaacugcagacacucgagcugaacauggaaacccuuaauaugacaaugccucugucuuguaccaagaacaauagccaucacuauauccgggucggcaacgagacggggcucgagcugacccuuacaaauaccuccaucauuaaccauaaauuuugcaaucugucugacgcgcacaagaaaaaccucuacgaucaugcucugaugagcaucauuuccacauuccaccugucuaucccgaauuuuaaccaguaugaagccaugagcugugacuucaauggaggcaagauuuccgugcaguacaaccucagccacucuuaugccggcgaugcugccaaucauugcgggaccguugcuaacggagugcugcaaacguuuaugcgcauggccuggggcggguccuacaucgcgcuugacagcggaugcggcaacugggauuguauuaugacaucuuaccaguaucugaucauccagaauaccacaugggacgaucacugccaguucucccggcccagcccuauuggguaccucggacugcuuucucaacgcaccagagacgucuauaucucccggcgccgccggggcaccuuuacauggacgcugagcgauuccgagggcaaggacacccccgggggauacugucugacaagauggaugcucauugaagccgagcugaaaugcuucggcaacaccgcuguggccaaguguaaugagaaacaugaugaagaguuuugcgacaugcuucggcuguucgauuuuaacaagcaggcuauccagcgccucaaagcccccgcgcagaugucuauucaacugaucaauaaggccgugaacgcucuuaucaaugaccagcugauuaugaagaaccaccucagagacaucaugugcauuccuuauugcaauuacagcaaauauugguaccugaacaauacagccaccggaaagacgucccugcccaaauguuggcucaucagcaacggcucuuaccugaaugagacacacuucuccgaugacauugaacaggaggcugauaacaugaucaccgagaugcuucaaaaggaauauauggagcggcaggggaaaaccccucugggacucgucgaccuguucguuuuuagcacaucuuucuaccugaucagcauuuuucuucaucucgugaagaucccgacccaccgccauauugugggcaaauccugccccaagccucacagacugaaucauaugggcaucuguucuugcgggcuguauaagcagcccggagucccugugcgguggaaacgcugaggacuagucccuguucccagagcccacuuuuuuuucuuuuuuugaaauaaaauagccugucuuucagaucucaaaggcucuuuucagagccaccaaaaaaaaaaaaaaaaaaaaaaaaaaaaaaaaaaaaaaaaaaaaaaaaaaaaaaaaaaaaaaaaaaaaaaaaaaaaaaaaaaaaaaaaaaaaaaaaaaaaa

SEQ ID NO: 15840 - RNA, 1767 nt, Artificial Sequence
  mRNA product Design a-2 (hSL-A100) comprising derived and/or modified sequence from LASV(G3010-SLE-2013;Clade IV)__AIT17344__GPCmut1 (opt5)
aggagaguccgcucagccagguugcagaagcggcuuagcguguguccuaaucuucucucugcguguagguaggccugugccgcaaacaagcuuaccaugggccagaucgugaccuucuuucaagaggucccccacguuauugaagaggugaugaacaucgugcugauugcccucagcauccuggcuguccuuaaggggcuguacaauuucgccacaugcggacucgugggccugguuacguuucuucugcucugugggagauccugcaccacaucucuguauaaaggaguguacgaacugcagacccucgagcugaacauggaaacacuuaauaugaccaugccucugagcuguacaaagaacaauucccaucacuauauuauggucggcaacgagaccgggcucgagcugacgcuuaccaauacaucuaucaucaaccauaaauucugcaaucugagcgacgcgcacaagaaaaaccucuacaaucaugcucugauguccauuaucucuaccuuucaccugagcauuccgaacuucaaucaguaugaagccauguccugugauuuuaacggaggcaagaucagcgugcaguacaaucucucucacuccuaugccggcgacgcugccagccauugcgggacaguugcuaacggagugcugcaaaccuucaugcggauggccuggggcgggucuuacauugcgcuugauuccggaugcggcaagugggacuguaucaugacgagcuaucaguaccugauuauccagaacacaaccugggaggaucacugccaguuuucucgccccuccccuaucggguaucucggacugcuuagccaaagaacacgggacauuuacaucucccgcagacgccggggcaccuucaccuggacacugucugauagcgaaggcaaagacacgcccgggggauauugucugacccgguggaugcucauugaggccgagcugaagugcuuuggcaauacagcugucgccaaauguaacgaaaagcaugaugaggaguucugcgacaugcuucgccuguuugauuucaauaaacaggcuauccagagacucaagacccccgcccagauguccauucaacugaucaacaaggcggugaaugcccuuaucaacgaccagcugauuaugaaaaaucaccuccgggauaucaugugcauuccuuacugcaacuauagcaaguacugguaccugaaucacacaaccacgggaaaaacaucucugcccaaguguuggcucguguccaacggcagcuaucugaaugaaacccauuucucugacgacaucgagcagcaagcugauaacaugauuaccgagaugcuucagaaagaauacauggagcgccaggggaagacaccucugggacucgucgaccuguuuguuuucagcaccuccuuuuaucugaucucuaucuuccuucaccucgugaaaauuccgacacauagacacaucgugggcaagagcugccccaagccucaucggcugaaucacaugggcauuuguuccugcgggcuguacaaacagcccggagucccugugcgcuggaagagaugaggacuagucccuguucccagagcccacuuuuuuuucuuuuuuugaaauaaaauagccugucuuucagaucucaaaggcucuuuucagagccaccaaaaaaaaaaaaaaaaaaaaaaaaaaaaaaaaaaaaaaaaaaaaaaaaaaaaaaaaaaaaaaaaaaaaaaaaaaaaaaaaaaaaaaaaaaaaaaaaaaaaa

SEQ ID NO: 15841 - RNA, 1767 nt, Artificial Sequence
  mRNA product Design a-2 (hSL-A100) comprising derived and/or modified sequence from LASV(G502-SLE-2009;Clade IV)__AIT17126__GPCmut1 (opt5)
aggagaguccgcucagccagguugcagaagcggcuuagcguguguccuaaucuucucucugcguguagguaggccugugccgcaaacaagcuuaccaugggccagaucgugaccuucuuucaagaggucccccacguuauugaagaggugaugaacaucgugcugauugcccucagcauccuggcuguccuuaaggggcuguacaauuucgccacaugcggacucgugggccugcuuacguuucugcuccugugugggagauccugcaccacaggacuguauaaaggcguuuacgaacuccagacccuggagcuuaacauggaaacacugaauaugaccaugccucucucuuguacaaagaacaauagccaucacuauauuaugguggggaacgagaccggacuggagcuuacgcugaccaauacauccaucaucaaccauaaauucugcaaucucucugacgcgcacaagaaaaaccuguacgaucaugcucugaugagcauuaucuccaccuuucaccucucuauuccgaauuucaaccaguaugaagccaugagcugugacuuuaauggcggcaagaucuccguccaguacaaccugagccacucuuaugccggggaugcugccgaccauugcggaacaguggcuaauggcguucuucaaaccuucaugcggauggccuggggaggguccuacauugcgcuggauagcggcugcgggagaugggacuguaucaugacgucuuaccaguaucucauuauccagaacacaaccugggaggaucacugccaguuuucccggcccagcccuaucggauaccugggccuucugucucaacgcacaagagacauuuauaucucccggcgccgccggggcaccuucaccuggacacugagcgauuccgaagggaaggacacgcccggaggcuacugucucaccagauggaugcugauugaggccgagcuuaaaugcuuugggaacacagcuguggccaaguguaaugaaaaacaugaugaggaguucugcgacaugcugcggcucuuugauuucaacaagcaggcuauccagcgccugaaagcccccgcgcagaugucuauucaacuuaucaauaaggccgucaacgcucugaucaaugaccagcucgugaugaagaaccaccugagagacauuaugugcaucccuuauugcaauuacagccgguauugguaccugaaccacaccacaaccggccgcacgucccuccccaaauguuggcuggugagcaaugggucuuaccuuaacgaaacacauuucuccgaugacauugagcagcaagccgauaauaugaucaccgagaugcugcagaaggaauauauggagagacagggaaaaaccccucucggccuggucgaccuguuuguuuucagcacaucuuuuuaccuuauuagcaucuuccuccaccuggugaagaucccgacccaucggcacauugugggcaaauccugccccaagccucaucgccugaaccacauggggaucuguucuugcggacucuauaaacagcccggcgucccugugaaguggaagagaugaggacuagucccuguucccagagcccacuuuuuuuucuuuuuuugaaauaaaauagccugucuuucagaucucaaaggcucuuuucagagccaccaaaaaaaaaaaaaaaaaaaaaaaaaaaaaaaaaaaaaaaaaaaaaaaaaaaaaaaaaaaaaaaaaaaaaaaaaaaaaaaaaaaaaaaaaaaaaaaaaaaaa

SEQ ID NO: 15842 - RNA, 1767 nt, Artificial Sequence
  mRNA product Design a-2 (hSL-A100) comprising derived and/or modified sequence from LASV(G733-SLE-2010;Clade IV)__AIT17154__GPCmut1 (opt5)
aggagaguccgcucagccagguugcagaagcggcuuagcguguguccuaaucuucucucugcguguagguaggccugugccgcaaacaagcuuaccaugggccagaucgugaccuucuuucaagaggucccccacguuauugaagaggugaugaacaucgugcugauugcccucagcauccuggcuguccuuaaggggcuguacaauuucgccacaugcggaauugugggccucguuuccuuucugcuucugugugggagaucuugcacgaccagccucuauaaaggaguguacgaacugcagacacuggagcucaacauggaaacccugaauaugacaaugccucuuuccuguaccaagaacaauucucaucacuauaucauggucggcaacgagacagggcuggagcucacccugacgaauaccagcaucauuaaccauaaauucugcaaucuuuccgacgcgcacaagaaaaaccuguacgaucaugcucucaugucuaucauuagcacauuucaccuguccaucccgaauuucaaccaguaugaagccaugagcugugacuuuaauggaggcaagauuucugugcaguacaaccugucccacagcuaugccggcgaugcugccaaucauugcgggaccaucgcuaacggaguucuccaaacauucaugcggauggccuggggcgggucuuacauugcgcuggacuccggaugcgauagaugggacuguaucaugaccagcuaccaguaucuuaucauucagaacacgacaugggaggaucacugccaguuuucucggcccuccccuaucggcuaccuggggcuccugagccaacgcaccagagacauuuauaucucccggcgccgccggggaacauucaccuggacccucucugauagcgaaggcaaggacacacccggcggguacugucugacgagauggaugcugauugaggccgagcucaaaugcuuuggaaauaccgcuguggccaaguguaacgaaaaacaugaugaggaguucugcgacaugcugcggcuuuuugauuucaauaagcaggcuauccagcgccugaaagcccccgcgcagauguccauccaacucauuaacaaggccgucaaugcucugaucaacgaccagcuuauuaugaagaaucaccugagagacaucaugugcauuccuuauugcaacuacagcaaauauugguaccucaaucacacaaccacagggaagaccucucugcccaaauguuggcugguguccaacggaagcuaccucaaugaaacgcauuucucugaugacaucgagcagcaagccgauaacaugaucacagagaugcugcagaaggaauauauggagcggcagggcaaaaccccucuugggcugguggaccucuuugucuucagcaccuccuuuuaccugauuucuaucuuccugcaccuuguuaagauuccgacacaucgccacguggugggaaaaagcugccccaagccucauagacucaaucacaugggcaucuguuccugcggccuguaugggcagcccggagucccugugaaguggaaacggugaggacuagucccuguucccagagcccacuuuuuuuucuuuuuuugaaauaaaauagccugucuuucagaucucaaaggcucuuuucagagccaccaaaaaaaaaaaaaaaaaaaaaaaaaaaaaaaaaaaaaaaaaaaaaaaaaaaaaaaaaaaaaaaaaaaaaaaaaaaaaaaaaaaaaaaaaaaaaaaaaaaaa

SEQ ID NO: 15843 - RNA, 1767 nt, Artificial Sequence
  mRNA product Design a-2 (hSL-A100) comprising derived and/or modified sequence from MOPV/LASV reassortant(IGS-1;Clade IV)__AFY05576__GPCmut1 (opt5)
aggagaguccgcucagccagguugcagaagcggcuuagcguguguccuaaucuucucucugcguguagguaggccugugccgcaaacaagcuuaccaugggccagaucgugaccuucuuucaagaggucccccacguuauugaagaggugaugaacaucgugcugauugcccucagcguccuggcugugcuuaaggggcuguacaauuucgccacaugcggacucguuggccuggugacguuucuucugcucugugggagauccugcaccacaucucuguauaaaggagucuacgaacugcagacccucgagcugaacauggaaacacuuaauaugaccaugccucugagcuguacaaagaacaauucccaucacuauaucauggugggcaacgagaccgggcucgagcugacgcuuaccaauacaucuauuaucaaccauaaauucugcaaucugagcgacgcgcacaagaaaaaccucuacgaucaugcucugauguccaucauuucuaccuuucaccugagcaucccgaauuucaaccaguaugaagccauguccugugacuuuaauggaggcaagauuagcguucaguacaaccucucucacuccuaugccggcgaugcugccaaucauugcgggacaguggcuaacggaguccugcaaaccuucaugcggauggccuggggcgggagcuacaucgcgcuugacucuggaugcggcaacugggauuguauuaugacguccuaccaguaucugaucauucagaauacaaccugggaggaccacugccaguuuagcagacccucuccuaucggguaccucggacugcuuucccaacggacacgcgauaucuauauuagcagacggcgccggggcaccuucaccuggacacuguccgacucugaaggcgaggauacgcccgggggauacugucugacccgcuggaugcucaucgaggccgaacugaagugcuuuggcaacacagcuguggccaaauguaaugagaagcaugacgaagaguucugcgauaugcuuagacuguuugacuucaacaaacaggcuauucagcggcucaaggcccccgcgcagaugagcauccaacugauuaauaaagccgugaacgcucuuaucaaugaucagcugaucaugaagaaccaccuccgcgacauuaugugcaucccuuauugcaauuacuccaaguauugguaccugaaccacaccacaaccggaagaacgagccugcccaaauguuggcucgucucuaauggcuccuaccugaacgagacacauuucagcgacgauauugagcagcaagccgacaauaugaucaccgaaaugcuucagaaggaguauauggaacggcaggggaaaaccccucugggacucguugaucuguuuguguucucuaccagcuuuuaccugauuuccaucuuccuucaccucgugaagaucccgacacaucgccacauugucggcaaaucuugccccaagccucauagacugaaccacaugggcaucuguagcugcgggcuguauaaacagcccggagugccuguuaaguggaagcggugaggacuagucccuguucccagagcccacuuuuuuuucuuuuuuugaaauaaaauagccugucuuucagaucucaaaggcucuuuucagagccaccaaaaaaaaaaaaaaaaaaaaaaaaaaaaaaaaaaaaaaaaaaaaaaaaaaaaaaaaaaaaaaaaaaaaaaaaaaaaaaaaaaaaaaaaaaaaaaaaaaaaa

SEQ ID NO: 15844 - RNA, 1767 nt, Artificial Sequence
  mRNA product Design a-2 (hSL-A100) comprising derived and/or modified sequence from LASV(LM765-SLE-2012;Clade IV)__AIT17814__GPCmut1 (opt5)
aggagaguccgcucagccagguugcagaagcggcuuagcguguguccuaaucuucucucugcguguagguaggccugugccgcaaacaagcuuaccaugggccagaucgugaccuucuuucaagaggucccccacguuauugaagaggugaugaacaucgugcugauugcccucagcauccuggcuguccuuaaggggcuguacaauuucgccacaugcggacucgugggccugguuacguuucuucugcucugugggagauccugcaccacaucucuguauaaaggaguguacgaacugcagacccucgagcugaacauggaaacacuuaauaugaccaugccucugagcuguacaaagaacaauucccaucacuauauuauggucggcaacgagaccgggcucgagcugacgcuuaccaauacaucuaucaucgaccauaaauucugcaaccugagcgaugcgcaccggaagaaucucuacgaccaugcucugauguccauuaucucuaccuuucaccugagcauuccgaacuucaaucaguaugaagccauguccugugauuuuaacggaggcaaaaucagcgugcaguacaaucucucucacuccuaugccaaggacgcugccgaucauugcggcacaguugcuaacggggugcugcaaaccuucaugcgcauggccuggggaggcagcuacauugcgcuugacucugggugcggacggugggauuguaucaugacguccuaccaguaucugauuauccagaauacaaccugggaggaccacugccaguuuagccgccccucuccuaucggcuaccucgggcugcuuucccaaagaacacgggauauuuauaucagccgcagacgccggggaaccuucaccuggacacuguccgacucugaaggcaaggauacgcccggcggguacugucugacccgguggaugcucauugaggccgagcugaaaugcuuuggaaacacagcugucgccaaguguaacgaaaaacaugacgaggaguucugcgauaugcuucgccuguuugacuucaauaagcaggcuauccagagacucaaagcccccgcgcagaugagcauucaacugaucaacaaggccgugaaugcucuuaucaacgaccagcugauuaugaagaaucaccuccgggauaucaugugcauuccuuauugcaacuacuccaaauauugguaccugaaucacaccacaaccgggaagacgagccugcccaaauguuggcucgugucuaacggauccuaccugaaugaaacacauuucagcgacgauaucgagcagcaagccgacaacaugauuaccgagaugcuucagaaggaauauauggagcgccagggcaaaaccccucuggggcucgucgaucuguuuguuuucucuaccagcuuuuaccugaucuccaucuuccuucaccucgugaagauuccgacacauagacacaucgugggaaaacccugcccuaagccccaucggcugaaucacaugggcauuuguucuugcggccuguauaagcagccugggguccccgugaaauggaagcgcugaggacuagucccuguucccagagcccacuuuuuuuucuuuuuuugaaauaaaauagccugucuuucagaucucaaaggcucuuuucagagccaccaaaaaaaaaaaaaaaaaaaaaaaaaaaaaaaaaaaaaaaaaaaaaaaaaaaaaaaaaaaaaaaaaaaaaaaaaaaaaaaaaaaaaaaaaaaaaaaaaaaaa

SEQ ID NO: 15845 - RNA, 1767 nt, Artificial Sequence
  mRNA product Design a-2 (hSL-A100) comprising derived and/or modified sequence from LASV(LM776-SLE-2012;Clade IV)__AIT17824__GPCmut1 (opt5)
aggagaguccgcucagccagguugcagaagcggcuuagcguguguccuaaucuucucucugcguguagguaggccugugccgcaaacaagcuuaccaugggccagaucgugaccuucuuucaagaggucccccacguuauugaagaggugaugaacaucgugcugauugcccucagcauccuggcuguccuuaaggggcuguacaauuucgccacaugcggacucgugggccugguuacguuucuucugcucugugggagauccugcaccacaucuguguauaaaggagucuacgaacugcagacccuggagcucaacauggaaacacugaauaugaccaugccucuuagcuguacaaagaacaauucccaucacuauauuauggugggcaacgagaccgggcuggagcucacgcugaccaauacaucuaucaucaaccauaaauucugcaaucuuagcgacgcgcacaagaaaaaccuguacgaucaugcucucauguccauuaucucuaccuuucaccugagcauuccgaauuucaaccaguaugaagccauguccugugacuuuaauggaggcaagaucagcguucaguacaaccugucucacuccuaugccggcgaugcugccaaucauugcgggacaguggcuaacggaguccuccaaaccuucaugcggauggccuggggcgggagcuacauugcgcuggacucuggaugcggcaagugggauuguaucaugacguccuaccaguaucuuauuauccagaacacaaccugggaggaccauugccaguuuagccgccccucuccuaucggguaccugggacuccugucccaaagaacacgggauauuuauaucagccgcagacgccggggcaccuucaccuggacacucuccgacucugaaggcaaagauacgcccgggggauacugucugacccgguggaugcugauugaggccgagcucaagugcuuuggcaauacagcuguggccaaauguaacgaaaagcacgacgaggaguucugcgauaugcugcgccuuuuugacuucaauaaacaggcuauccagagacugaaggcccccgcgcagaugagcauucaacucaucaacaaggccgugaaugcucugaucaacgaucagcuuauuaugaaaaaucaucugcgggacaucaugugcauuccuuauugcaacuacuccaaguauugguaccucaaucacaccacaaccggaaaaacgagccugcccaaguguuggcuggucucuaacggcuccuaccucaaugaaacacacuucagcgacgauaucgagcagcaagccgacaacaugauuaccgagaugcugcagaaagaauauauggagcgccaggggaagaccccucuuggacugguugaucucuuuguguucucuaccagcuuuuaccugaucuccaucuuccugcaucuugugaaaauuccgacacacagacauaucgucggcaagucuugccccaagccucaccggcucaaucacaugggcauuuguagcugcgggcuguauaaacagcccggagugccuguucgcuggaagagaugaggacuagucccuguucccagagcccacuuuuuuuucuuuuuuugaaauaaaauagccugucuuucagaucucaaaggcucuuuucagagccaccaaaaaaaaaaaaaaaaaaaaaaaaaaaaaaaaaaaaaaaaaaaaaaaaaaaaaaaaaaaaaaaaaaaaaaaaaaaaaaaaaaaaaaaaaaaaaaaaaaaaa

SEQ ID NO: 15846 - RNA, 1767 nt, Artificial Sequence
  mRNA product Design a-2 (hSL-A100) comprising derived and/or modified sequence from LASV(Mad39;Clade IV)__ANH09722__GPCmut1 (opt5)
aggagaguccgcucagccagguugcagaagcggcuuagcguguguccuaaucuucucucugcguguagguaggccugugccgcaaacaagcuuaccaugggccagaucgugaccuucuuucaagaggucccccacguuauugaagaggugaugaacaucgugcugauugcccucagcauccuggcuguccuuaaggggcuguacaauguggccacaugcggacucauuggccugguuacguuccuucugcucugugggagauccugcaccacaacccuguauaaaggaguguacgaacugcaggcgcucgagcugaacauggaaacacuuaauaugaccaugccucugucuuguacaaagaacaauagccaucacuauauccgggucggcaacgagaccgggcucgagcugacgcuuaccaauacaucccugaucaaccauaaauuuugcaaucucucugacgcucacaagaaaaaccuguacgaucaugcccugaugagcauuaucuccaccuuccaccucucuauuccgaauuuuaaccaguaugaagccaugagcugugacuucaaugauggaaagaucuccgugcaguacaaccugagccacacauaugcuggcgacaccgccaaucauugcggcacgguugcuaacggggugcuucaaacauuuaugcgcauggccuggggaggcucuuacauugcgcuggauuccgggugcggaggcugggacuguaucaugaccagcuaccaguaucucauuauccagaacacaaccugggaggaucacugccaguucucucggcccuccccuaucggguaccugggacuucugagccaacgcaccagagacauuuauaucucucggcgccgccggggcacauuuacguggacccuguccgauagcgaaggcaaggacacacccgggggauacugucucaccagauggaugcugauugaggccgagcuuaaaugcuucggcaauacagcugucgccaaguguaacgaaaaacaugaugaggaauuuugcgacaugcugcgccucuucgauuuuaauaagcaggcuauccagcggcugaaagcccccgcgcagauguccauucaacuuaucaacaaggccgugaaugcucugaucaacgaccagcucauuaugaagaaucaccugagagacaucaugugcauuccuuauugcaacuacucuaaauauugguaccugaaucacaccgugacgggaaagacaagccuccccaaauguuggcuggucuccaacggcagcuaccuuaaugaaacccauuucucugaugacaucgagcagcaagccgauaacaugauuaccgagaugcugcagaaggaauauauggagcggcaggggaaaacaccucucggacugguugaccuguucguguuuuccaccagcuucuaccuuaucucuaucuuucuccaccuggugaagauuccgacacaucgccacgucgugggcaaacccugcccuaagccccauagacugaaucacaugggcaucuguagcugcggguucuauaagcagccuggaguucccgugcgguggaaacgcugaggacuagucccuguucccagagcccacuuuuuuuucuuuuuuugaaauaaaauagccugucuuucagaucucaaaggcucuuuucagagccaccaaaaaaaaaaaaaaaaaaaaaaaaaaaaaaaaaaaaaaaaaaaaaaaaaaaaaaaaaaaaaaaaaaaaaaaaaaaaaaaaaaaaaaaaaaaaaaaaaaaaa

SEQ ID NO: 15847 - RNA, 1767 nt, Artificial Sequence
  mRNA product Design a-2 (hSL-A100) comprising derived and/or modified sequence from LASV(Z0947-SLE-2011;Clade IV)__AIT17840__GPCmut1 (opt5)
aggagaguccgcucagccagguugcagaagcggcuuagcguguguccuaaucuucucucugcguguagguaggccugugccgcaaacaagcuuaccaugggccagaucgugaccuucuuucaagaggucccccacguuauugaagaggugaugaacaucgugcugauugcccucagcauccuggcuguccuuaaggggcuguacaauuucgccacaugcggacucgugggccugguuacguuucuucugcucugugggagauccugcaccauuucucuguauaaaggaguguacgaacugcagacacucgagcugaacauggaaacccuuaauaugacaaugccucugagcuguaccaagaacaauucccaucacuauaucauggucggcaacgagacagggcucgagcugacccuuacgaauaccucuaucauuaaccauaaauucugcaaucugagcgacgcgcacaagaaaaaccucuacgaucaugcucugauguccaucauuucuacauuucaccugagcaucccgaauuucaaccaguaugaagccauguccugugacuuuaauggaggcaagauuagcgugcaguacaaccucucucacuccuaugccggcgaugcugccaaucauugcgggaccguugcuaacggagugcugcaaacauucaugcggauggccuggggcgggagcuacaucgcgcuugacucuggaugcgauagaugggacuguauuaugaccuccuaccaguaucugaucauccagaacacgacaugggaggaucacugccaguuuagccggcccucuccuauuggcuaccucgggcugcuuucccaacgcaccagagacaucuauauuagccggcgccgccggggaacauucaccuggacccuguccgauucugaaggcaaggacacacccggcggguacugucugacgagauggaugcucaucgaggccgagcugaaaugcuuuggaaauaccgcugucgccaaguguaacgaaaaacaugaugaggaguucugcgacaugcuucggcuguuugauuucaauaagcaggcuauucagcgccucaaagcccccgcgcagaugagcauccaacugaucaacaaggccgugaaugcucuuauuaacgaccagcugaucaugaagaaucaccucagagacauuaugugcaucccuuauugcaacuacuccaaauauugguaccugaaucacacaaccacagggaagaccagccugcccaaauguuggcucgugucuaacggauccuaccugaaugaaacgcauuucagcgaugacauugagcagcaagccgauaacaugaucacagagaugcuucagaaggaauauauggagcggcagggcaaaaccccucuggggcucgucgaccuguuuguuuucucuaccagcuuuuaccugaucuccauuuuccuucaccucgugaagaucccgacacaucgccacauugugggaaaacccugcccuaagccccauagacugaaucacaugggcaucuguucuugcggccuguauaagcagccugggguccccgugaaauggaagcggugaggacuagucccuguucccagagcccacuuuuuuuucuuuuuuugaaauaaaauagccugucuuucagaucucaaaggcucuuuucagagccaccaaaaaaaaaaaaaaaaaaaaaaaaaaaaaaaaaaaaaaaaaaaaaaaaaaaaaaaaaaaaaaaaaaaaaaaaaaaaaaaaaaaaaaaaaaaaaaaaaaaaa

SEQ ID NO: 15848 - RNA, 1743 nt, Artificial Sequence
  mRNA product Design a-2 (A100) comprising derived and/or modified sequence from LASV(Josiah;Clade IV)__NP_694870__GPCmut1 (opt1)
aggagaguccgcucagccagguugcagaagcggcuuagcguguguccuaaucuucucucugcguguagguaggccugugccgcaaacaagcuuaccaugggccagaucgugaccuucuuccaggaggucccccacgugaucgaggaggugaugaacaucguccugaucgcccucagcgugcuggccgugcugaaggggcucuacaacuucgcgaccugcggccuggucgggcuggugacguuccuccugcugugcggccgcuccugcaccaccagccucuacaaggggguguacgagcugcagacccuggagcucaacauggagacgcugaacaugaccaugccgcuguccugcaccaagaacaacagccaccacuacaucauggucggcaacgagaccggccucgagcugacgcugaccaacaccuccaucaucaaccacaaguucugcaaccucagcgacgcccacaagaagaaccuguacgaccacgcccugauguccaucaucagcaccuuccaccucuccauccccaacuucaaccaguacgaggccaugagcugcgacuucaacgggggcaagaucuccgugcaguacaaccugagccacuccuacgccggggacgcggccaaccacugcggcacgguggccaacgggguccugcagaccuucaugcggauggccuggggcggcagcuacaucgcgcucgacuccgggugcggcaacugggacugcaucaugaccagcuaccaguaccugaucauccagaacaccacgugggaggaccacugccaguucucccggcccagccccaucggguaccugggccuccugucccagcgcacccgggacaucuacaucagccgccggcgccggggcaccuucaccuggacgcugagcgacuccgaggggaaggacaccccgggcggguacugccugacccgcuggaugcucaucgaggccgagcugaagugcuucggcaacaccgccguggccaagugcaacgagaagcacgacgaggaguucugcgacaugcugcggcuguucgacuucaacaagcaggccauccagcgccugaaggcgcccgcccagaugagcauccagcugaucaacaaggccgugaacgcccucaucaacgaccagcugaucaugaagaaccaccuccgggacaucaugugcauccccuacugcaacuacuccaaguacugguaccucaaccacacgaccaccggccgcaccagccugcccaagugcuggcuggucuccaacggcagcuaccucaacgagacgcacuucuccgacgacaucgagcagcaggccgacaacaugaucaccgagaugcugcagaaggaguacauggagcggcaggggaagacgccccugggccucguggaccuguucguguucagcaccuccuucuaccugaucagcaucuuccugcaccucgucaagaucccgacccaccgccacaucguggggaaguccugccccaagccccaccggcugaaccacaugggcaucugcagcugcgggcuguacaagcagcccggcgugccggucaaguggaagcgcugaggacuagucccuguucccagagcccacuuuuuuuucuuuuuuugaaauaaaauagccugucuuucagaucuaaaaaaaaaaaaaaaaaaaaaaaaaaaaaaaaaaaaaaaaaaaaaaaaaaaaaaaaaaaaaaaaaaaaaaaaaaaaaaaaaaaaaaaaaaaaaaaaaaaa

SEQ ID NO: 15849 - RNA, 1740 nt, Artificial Sequence
  mRNA product Design a-2 (A100) comprising derived and/or modified sequence from LASV(LP;Clade I)__AAF86701__GPCmut1 (opt1)
aggagaguccgcucagccagguugcagaagcggcuuagcguguguccuaaucuucucucugcguguagguaggccugugccgcaaacaagcuuaccaugggccagaucaucaccuucuuccaggaggugccccacgucaucgaggaggugaugaacaucgugcugaucgcccucagccugcuggccauccucaaggggcuguacaacaucgcgaccugcggcaucaucgggcuggucgccuuccucuuccugugcggcaaguccugcagccugacgcucaagggcggguacgagcugcagacccuggagcucaacauggagacccugaacaugaccaugccgcuguccugcacgaagaacagcucccaccacuacauccgcgugggcaacgagaccgggcucgagcugacccugaccaacacgagcaucaucaaccacaaguucugcaaccucuccgacgcccacaagaagaaccuguacgaccacgcccugaugagcaucaucuccaccuuccaccucagcauccccaacuucaaccaguacgaggccauguccugcgacuucaacggcgggaagaucagcgugcaguacaaccugucccacagcuacgcgggcgacgccgccgagcacugcgggaccgucgccaacggcgugcugcagaccuucaugcggauggcguggggcgggcgcuacaucgcccucgacuccggcugcgggaacugggacugcaucaugacgagcuaccaguaccugaucauccagaacaccaccugggaggaccacugccaguucucccggcccagccccaucggcuaccugggccuccugucccagcgcacccgggacaucuacaucagccgccggcgccgggggacguucaccuggacccugagcgacuccgagggcaacgagacccccgggggcuacugccugacgcgcuggaugcucaucgaggccgagcugaagugcuucgggaacaccgccguggccaagugcaacgagaagcacgacgaggaguucugcgacaugcugcggcuguucgacuucaacaagcaggcgauccgccggcugaaggcccccgcccagaugagcauccagcugaucaacaaggccgucaacgcccucaucaacgaccagcugaucaugaagaaccaccuccgcgacaucaugugcauccccuacugcaacuacuccaaguacugguaccucaaccacaccagcuccggccggaccagccugcccaagugcuggcugaucuccaacgggagcuaccucaacgagacgcaguucuccgacgacaucgagcagcaggcggacaacaugaucaccgagaugcugcagaaggaguacaucgagcgccagggcaagaccccgcuggggcucguggacaucuucaucuucagcaccuccuucuaccugaucagcaucuuccugcaccugaucaagaucccgacgcaccggcacaucgugggcaagcccugccccaagccccaccgccucaaccacaugggggucugcuccugcggccuguacaagcacccgggcgugcccaccaaguggaagcggugaggacuagucccuguucccagagcccacuuuuuuuucuuuuuuugaaauaaaauagccugucuuucagaucuaaaaaaaaaaaaaaaaaaaaaaaaaaaaaaaaaaaaaaaaaaaaaaaaaaaaaaaaaaaaaaaaaaaaaaaaaaaaaaaaaaaaaaaaaaaaaaaaaaaa

SEQ ID NO: 15850 - RNA, 1740 nt, Artificial Sequence
  mRNA product Design a-2 (A100) comprising derived and/or modified sequence from LASV(803213;Clade II)__AAF86703__GPCmut1 (opt1)
aggagaguccgcucagccagguugcagaagcggcuuagcguguguccuaaucuucucucugcguguagguaggccugugccgcaaacaagcuuaccaugggccagaucaucaccuucuuccaggaggugccccacgucaucgaggaggugaugaacaucgugcugaucgcccucagccugcuggccauccucaaggggaucuacaacgucgcgaccugcggccuguucgggcugaucuccuuccuccugcugugcggccgcagcugcuccgugacguacaaggggguguacgagcuccagacccuggagcugaacauggccaaccucaacaugaccaugccgcugagcugcaccaagaacaacucccaccacuacaucauggucggcaacgagacgggccuggagcucacccugaccaacaccagcaucaucaaccacaaguucugcaaccuguccgacgcccacaagaagaaccucuacgaccacgcccugaugagcaucaucuccacguuccaccugagcauccccaacuucaaccaguacgaggccauguccugcgacuucaacgggggcaagaucagcgugcaguacaaccucucccacagcuucgcgguggacgccgccaaccacugcgggaccaucgccaacggcguccugcagaccuucaugcggauggcguggggcggguccuacaucgcccuggacagcggcugcgggaacugggacugcaucaugaccuccuaccaguaccucaucauccagaacacgaccugggaggaccacugccaguucagccgccccucccccaucggcuaccuggggcugcucagccagcggacccgcgacaucuacaucagccggcgccgccggggcaccuucacguggacccucuccgacagcgagggcaacgaggcccccgggggcuacugccugacccgguggaugcugaucgaggccgagcucaagugcuucgggaacaccgccguggcgaagugcaacgagaagcacgacgaggaguucugcgacaugcugcgccuguucgacuucaacaagcaggccaucaagcggcucaagacgcccgcccagauguccauccagcugaucaacaaggccgugaacgcccugaucaacgaccagcucaucaugaagaaccaccuccgcgacaucaugugcauccccuacugcaacuacagccgguacugguaccugaaccacaccgucaccgggaagaccucccugccccgcugcuggcuggugagcaacggcuccuaccugaacgagacgcacuucagcgacgacaucgagcagcaggcggacaacaugaucaccgagaugcuccagaaggaguacauggaccggcagggcaagaccccgcuggggcugguggaccucuucgucuucuccaccagcuucuaccugaucuccaucuuccugcaccuggugaagaucccgacgcaccgccacaucgugggcaagcccugccccaagccccaccggcucaaccacauggggaucugcagcugcggccuguacaagcacccggggguccccgugaaguggaagcgcugaggacuagucccuguucccagagcccacuuuuuuuucuuuuuuugaaauaaaauagccugucuuucagaucuaaaaaaaaaaaaaaaaaaaaaaaaaaaaaaaaaaaaaaaaaaaaaaaaaaaaaaaaaaaaaaaaaaaaaaaaaaaaaaaaaaaaaaaaaaaaaaaaaaaa

SEQ ID NO: 15851 - RNA, 1740 nt, Artificial Sequence
  mRNA product Design a-2 (A100) comprising derived and/or modified sequence from LASV(GA391;Clade III)__CAA36645__GPCmut1 (opt1)
aggagaguccgcucagccagguugcagaagcggcuuagcguguguccuaaucuucucucugcguguagguaggccugugccgcaaacaagcuuaccaugggccagaucgugaccuucuuccaggaggucccccacgugaucgaggaggugaugaacaucguccugaucgcccucagcauccuggccauccugaaggggcucuacaacguggcgaccugcggccugaucgggcuggugacguuccuccugcuguccggccgcagcugcucccucaucuacaaggggaccuacgagcugcagacccuggagcucaacauggagacccugaacaugacgaugccgcugagcugcaccaagaacaacucccaccacuacauccgggucggcaacgagaccggccucgagcugacccugacgaacaccagcauccucaaccacaaguucugcaaccuguccgacgcccacaagcgcaaccuguacgaccacagccucauguccaucaucagcaccuuccaccuguccauccccaacuucaaccaguacgaggccaugagcugcgacuucaacgggggcaagaucaccgugcaguacaaccugucccacagcuucgccguggacgccgcggggcacugcggcacgcucgccaacgggguccugcagaccuucaugcggauggccuggggcggcuccuacaucgcccuggacagcgggugcggcaacugggacugcaucaugaccuccuaccaguaccucaucauccagaacaccacgugggacgaccacugccaguucagccggcccucccccaucggguaccugggccugcucagccagcgcacccgggacaucuacaucagccgccggcgccggggcaccuucaccuggacgcucuccgacagcgaggggaacgagaccccgggcggguacugccugacccgcuggaugcugaucgaggcggagcucaagugcuucggcaacaccgccguggccaagugcaacgagaagcacgacgaggaguucugcgacaugcugcggcuguucgacuucaacaagcaggccauccgccggcucaagacgcccgcccagauguccauccagcugaucaacaaggcggugaacgcccugaucaacgaccagcucaucaugaagaaccaccuccgcgacaucaugugcauccccuacugcaacuacagccgguacugguaccugaaccacaccuccaccggcaagaccagccugccccgcugcuggcugaucuccaacggcagcuaccugaacgagacgaaguucuccgacgacaucgagcagcaggccgacaacaugaucaccgagaugcuccagaaggaguacaucgaccggcaggggaagacgccccugggccuggucgaccuguucguguucagcaccuccuucuaccucaucagcaucuuccugcaccuggugaagaucccgacccaccgccacaucgucgggaagcccugccccaagccccaccggcucaaccacaugggcaucugcuccugcgggcuguacaagcagccgggcgugcccgugcgcuggaagcggugaggacuagucccuguucccagagcccacuuuuuuuucuuuuuuugaaauaaaauagccugucuuucagaucuaaaaaaaaaaaaaaaaaaaaaaaaaaaaaaaaaaaaaaaaaaaaaaaaaaaaaaaaaaaaaaaaaaaaaaaaaaaaaaaaaaaaaaaaaaaaaaaaaaaa

SEQ ID NO: 15852 - RNA, 1743 nt, Artificial Sequence
  mRNA product Design a-2 (A100) comprising derived and/or modified sequence from LASV(AV;Clade V)__CCA30314__GPCmut1 (opt1)
aggagaguccgcucagccagguugcagaagcggcuuagcguguguccuaaucuucucucugcguguagguaggccugugccgcaaacaagcuuaccaugggccagaucgugaccuucuuccaggaggucccccacgugaucgaggaggugaugaacaucguccugaucgcccucagcauccuggccgugcugaaggggcucuacaacaucgcgaccugcggccugaucgggcugaucacguuccuccugcugugcggccgcuccugcagcuccaaccucuacaaggggguguacgagcugcagagccuggaccucaacauggagacccugaacaugaccaugccgcuguccugcaccaagaacaacagccaccacuacauccgggucggcaacgacacgggccucgagcugacccugaccaacaccuccauccucaaccacaaguucugcaaccugagcgacgcccacaagaaggaccuguacgaccacgcccucauguccaucaucagcacguuccaccuguccauccccaacuucaaccaguacgaggccaugagcugcgacuucaacgggggcaagaucuccgugcaguacaaccugagccacuccuacgccaucgacgcggccaaccacugcgggaccguggccaacggcauccuccagaccuucaugcgcauggccuggggcgggagcuacaucgcgcuggacuccggcugcgggaacugggacugcaucaugaccagcuaccaguaccugaucauccagaacacgaccugggagaaccacugccaguucucccgccccagccccaucggcuaccucgggcugcugagccagcggacccgcgacaucuacaucucccggcgccgccggggcaccuucacguggacccugagcgacuccgagggcaacgccacccccgggggcuacugccucacccgguggaugcugaucgaggccgagcugaagugcuucgggaacacggccgucgccaagugcaacgagaagcacgacgaggaguucugcgacaugcuccgccuguucgacuucaacaagcaggcgaucagccggcugaagucccccgcccagaugagcauccagcucaucaacaaggccgugaacgcccugaucaacgaccagcugaucaugaagaaccaccuccgcgacaucaugugcauccccuacugcaacuacuccaaguacugguaccugaaccacaccaucaccgggaagaccagccugcccaagugcuggcucguguccaacggcagcuaccugaacgagacgcacuucuccgacgacaucgagcagcaggccgacaacaugaucaccgagaugcugcagaaggaguacauggagcggcagggcaagaccccgcucgggcuggucgaccuguucguguucagcaccuccuucuaccugaucagcaucuuccuccgccuggugaagaucccgacgcaccggcacaucgucggcaagcccugccccaagccccaccgccugaaccacauggggaucugcuccugcggccucuacaagcagccgggggugcccgugcgguggaagcgcugaggacuagucccuguucccagagcccacuuuuuuuucuuuuuuugaaauaaaauagccugucuuucagaucuaaaaaaaaaaaaaaaaaaaaaaaaaaaaaaaaaaaaaaaaaaaaaaaaaaaaaaaaaaaaaaaaaaaaaaaaaaaaaaaaaaaaaaaaaaaaaaaaaaaa

SEQ ID NO: 15853 - RNA, 1740 nt, Artificial Sequence
  mRNA product Design a-2 (A100) comprising derived and/or modified sequence from LASV(Togo/2016/7082;Clade VI)__AMR44577__GPCmut1 (opt1)
aggagaguccgcucagccagguugcagaagcggcuuagcguguguccuaaucuucucucugcguguagguaggccugugccgcaaacaagcuuaccaugggccagaucaucaccuucuuccaggaggugccccacgucaucgaggaggugaugaacaucgugcugaucgcccucagccugcuggccauccucaagggggucuacaacguggcgaccugcggcaucaucgggcuggugacguuccuguuccucugcggccgcuccugcagccugaucuacaagggguccuacgagcugcagacccucgagcugaacauggagacccugaacaugaccaugccgcucagcugcacgaagaacuccagccaccacuacauccgggucggcaacgagaccggccuggagcugacccucaccaacacguccaucaucaaccacaaguucugcaaccugagcgacgcccacaagcgcaaccuguacgaccacgcccucauguccauccugagcaccuuccaccuguccauccccaacuucaaccaguacgaggccaugagcugcgacuucaacgggggcaagaucuccgugcaguacaaccucagccacgccuacgcgguggacgccgccgagcacugcgggaccgucgccaacggcgugcugcagaccuucaugcggauggcguggggcggguccuacaucgcccuggacagcggcugcgggaacugggacugcaucaugacguccuaccaguaccucaucauccagaacaccaccugggaggaccacugccaguucagccggcccucccccaucggcuaccuggggcugcucagccagcgcacccgggacaucuacaucagccgccggcgccggggcacguucaccuggacccucuccgacagcgagggcaacgagacccccgggggcuacugccugacgcgcuggaugcugaucgaggccgagcucaagugcuucgggaacaccgccguggccaagugcaacgagaagcacgacgaggaguucugcgacaugcugcggcuguucgacuucaacaagcaggcgauccagcgccucaagucccccgcccagaugagcauccagcugaucaacaaggccgucaacgcccugaucaacgaccagcucaucaugaagaaccaccuccgggacaugaugugcauccccuacugcaacuacuccaaguacugguaccugaaccacaccagcuccgggcgcaccagccugcccaagugcuggcugguguccaacggcagcuaccugaacgagacgcacuucuccgacgacaucgagcagcaggccgacaacaugaucaccgagaugcuccagaaggaguacaucgaccggcagggcaagaccccgcuggggcugguggaccucuucgucuucagcaccuccuucuaccugaucagcaucuuccugcaccugaucaagaucccgacgcaccgccacaucgugggcaagcccugccccaagccccaccggcucaaccacauggggaucugcuccugcggccuguacaagcagccgggggugcccacccgcuggaagcggugaggacuagucccuguucccagagcccacuuuuuuuucuuuuuuugaaauaaaauagccugucuuucagaucuaaaaaaaaaaaaaaaaaaaaaaaaaaaaaaaaaaaaaaaaaaaaaaaaaaaaaaaaaaaaaaaaaaaaaaaaaaaaaaaaaaaaaaaaaaaaaaaaaaaa

SEQ ID NO: 15854 - RNA, 1740 nt, Artificial Sequence
  mRNA product Design a-2 (A100) comprising derived and/or modified sequence from LASV(KAK-428;Clade n.d. (VII))__ANH09740__GPCmut1 (opt1)
aggagaguccgcucagccagguugcagaagcggcuuagcguguguccuaaucuucucucugcguguagguaggccugugccgcaaacaagcuuaccaugggccagaucgugaccuucuuccaggaggucccccacgugaucgaggaggugaugaacaucguccugaucgcccucagccugcuggccauccucaaggggcuguacaacuucgcgaccugcggcgugaucgggcugaucacguuccuccugcugugcggccgcuccugcagcgccaccuacaaggggcaguacgagcuccagacccuggagcugaacauggagucccucaacaugaccaugccgcugagcugcacgaagaacaacucccaccacuacauccgggccggcaacaacaccggccuggagcucacccugaccaacacgagcaucaucucccacaaguucugcaaccugagcgacgcccacaagaagaaccucuacgaccacacccugauguccaucaucaccaccuuccaccugagcauccccaacuucaaccaguacgaggccauguccugcgacuucaacgggggcaagaucagcauccaguacaaccucucccacagcuacgcgggggacgccgcccagcacugcggcacgguggccaacgggguccugcagaccuucaugcgcauggcguggggcggcuccuaccuggcccucgacagcgggugccgcggcugggacugcaucaucuccagcuaccaguaccugaucauccagaacaccaccugggacgaccacugccaguucucccggcccagccccaucggguaccugggcuucgugagccagaagacgcgcgacaucuacaucucccggcgccgccggggcaccuucaccuggacccugagcgacuccgaggggcacgacaugccgggcggguacugccucacgcgguggaugcugaucgaggccgaccugaagugcuucggcaacaccgccguggccaagugcaacgagaagcacgacgaggaguucugcgacauguggcgccucuucgacuucaacaagcaggcgauccagcggcugaaggcccccgcccagaugaacauccagcugaucaacaaggccgucaacgcccucaucaacgaccagcugaugaugaagaaccaccuccgcgacaucaugugcauccccuacugcaacuacagcaaguucugguaccugaacaacaccaccacgggccggaccucccugccccgcugcuggcugaucagcaacggcuccuaccucaacgagacccacuucagcgacgacaucgagcagcaggcggacaacaugaucaccgagaugcugcagaaggaguacauggaccggcaggggaagacgccccugggccucguggaccuguucguguucuccaccagcuucuaccugaucaccaucuuccuccaccuggucaagaucccgacccaccgccacaucguggggaagcccugccccaagccccaccggcugaaccacaugggcaucugcuccugcgggcuguacaagcagccgggcgugcccguccgcuggaagcggugaggacuagucccuguucccagagcccacuuuuuuuucuuuuuuugaaauaaaauagccugucuuucagaucuaaaaaaaaaaaaaaaaaaaaaaaaaaaaaaaaaaaaaaaaaaaaaaaaaaaaaaaaaaaaaaaaaaaaaaaaaaaaaaaaaaaaaaaaaaaaaaaaaaaa

SEQ ID NO: 15855 - RNA, 1740 nt, Artificial Sequence; identical to SEQ ID NO: 15849
  mRNA product Design a-2 (A100) comprising derived and/or modified sequence from LASV(Pinneo-NIG-1969;Clade I)__AIT17836__GPCmut1 (opt1)

SEQ ID NO: 15856 - RNA, 1740 nt, Artificial Sequence
  mRNA product Design a-2 (A100) comprising derived and/or modified sequence from LASV(ISTH0009-NIG-2011;Clade II)__AIT17404__GPCmut1 (opt1)
aggagaguccgcucagccagguugcagaagcggcuuagcguguguccuaaucuucucucugcguguagguaggccugugccgcaaacaagcuuaccaugggccagaucaucaccuucuuccaggaggugccccacgucaucgaggaggugaugaacaucgugcugaucgcccucagccugcuggccauccucaaggggaucuacaacgucgcgaccugcggccuguucgggcugguguccuuccuccugcugugcggccgcagcugcuccacgaccuacaaggggguguacgagcuccagacccuggagcuggacauggccagccucaacaugaccaugccgcuguccugcacgaagaacaacagccaccacuacaucauggucggcaacgagaccggccuggagcucacccugaccaacacguccaucaucaaccacaaguucugcaaccugagcgacgcccacaagaagaaccucuacgaccacgcccugauguccaucaucagcaccuuccaccuguccauccccaacuucaaccaguacgaggccaugagcugcgacuucaacgggggcaagaucuccgugcaguacaaccucagccacgcguacgccguggacgccgccaaccacugcgggaccaucgcgaacggcguccugcagaccuucaugcggauggccuggggcggguccuacaucgcccuggacagcggcugcggguccugggacugcaucaugacgagcuaccaguaccucaucauccagaacaccaccugggaggaccacugccaguucucccgccccagccccaucggcuaccuggggcugcucagccagcggacccgcgacaucuacaucucccggcgccgccggggcacguucaccuggacccucagcgacuccgagggcaacgagacccccgggggcuacugccugacgcgguggaugcugaucgaggccgagcucaagugcuucgggaacaccgccguggcgaagugcaacgagaagcacgacgaggaguucugcgacaugcugcgccuguucgacuucaacaagcaggccauccggcgccucaagacccccgcccagaugagcauccagcugaucaacaaggccgugaacgcccugaucaacgaccagcucaucaugaagaaccaccuccgggacaucaugugcaucccguacugcaacuacuccaaguacugguaccugaaccacaccgucacggggaagaccagccugccccgcugcuggcugguguccaacggcagcuaccugaacgagacccacuucuccgacgacaucgagcagcaggcggacaacaugaucaccgagcuccugcagaaggaguacauggaccggcagggcaagacgccccuggggcucguggaccuguucgucuucagcaccuccuucuaccugaucagcaucuuccugcaccucaucaagaucccgacccaccgccacaucaccggcaagcccugccccaagccccaccggcugaaccacauggggaucugcuccugcggccuguacaagcacccgggggugcccgugaaguggaagcgcugaggacuagucccuguucccagagcccacuuuuuuuucuuuuuuugaaauaaaauagccugucuuucagaucuaaaaaaaaaaaaaaaaaaaaaaaaaaaaaaaaaaaaaaaaaaaaaaaaaaaaaaaaaaaaaaaaaaaaaaaaaaaaaaaaaaaaaaaaaaaaaaaaaaaa

SEQ ID NO: 15857 - RNA, 1740 nt, Artificial Sequence
  mRNA product Design a-2 (A100) comprising derived and/or modified sequence from LASV(ISTH2010-NIG-2012;Clade II)__AIT17482__GPCmut1 (opt1)
aggagaguccgcucagccagguugcagaagcggcuuagcguguguccuaaucuucucucugcguguagguaggccugugccgcaaacaagcuuaccaugggccagaucaucaccuucuuccaggaggugccccacgucaucgaggaggugaugaacaucgugcugaucgcccucagccugcuggccauccucaaggggaucuacaacgucgcgaccugcggccuguucgggcugguguccuuccuccugcugugcggccgcagcugcuccacgaccuacaaggggguguacgagcuccagacccuggagcuggacauggccagccucaacaugaccaugccgcuguccugcacgaagaacaacagccaccacuacaucauggucggcaacgagaccggccuggagcucacccugaccaacacguccaucaucaaccacaaguucugcaaccugagcgacgcccacaagaagaaccucuacgaccacgcccugauguccaucaucagcaccuuccaccuguccauccccaacuucaaccaguacgaggccaugagcugcgacuucaacgggggcaagaucuccgugcaguacaaccucagccacgcguacgccguggacgccgccaaccacugcgggaccaucgcgaacggcguccugcagaccuucaugcggauggccuggggcggguccuacaucgcccuggacagcggcugcggguccugggacugcaucaugacgagcuaccaguaccucaucauccagaacaucaccugggaggaccacugccaguucucccgccccagccccaucggcuaccuggggcugcucagccagcggacccgcgacaucuacaucucccggcgccgccggggcaccuucacguggacccucagcgacuccgagggcaacgagacccccgggggcuacugccugacccgguggaugcugaucgaggccgagcucaagugcuucgggaacacggccguggcgaagugcaacgagaagcacgacgaggaguucugcgacaugcugcgccuguucgacuucaacaagcaggccauccggcgccucaagacccccgcccagaugagcauccagcugaucaacaaggccgugaacgcccugaucaacgaccagcucaucaugaagaaccaccuccgggacaucaugugcauccccuacugcaacuacuccaaguacugguaccugaaccacaccgucaccgggaagacgagccugccccgcugcuggcugguguccaacggcagcuaccugaacgagacccacuucuccgacgacaucgagcagcaggcggacaacaugaucaccgagcuccugcagaaggaguacaucgaccggcagggcaagaccccgcuggggcucguggaccuguucgucuucagcacguccuucuaccugaucagcaucuuccugcaccucgugaagaucccgacccaccgccacguggucggcaagcccugccccaagccccaccggcugaaccacauggggaucugcuccugcggccuguacaagcacccgggggugcccgugaaguggaagcgcugaggacuagucccuguucccagagcccacuuuuuuuucuuuuuuugaaauaaaauagccugucuuucagaucuaaaaaaaaaaaaaaaaaaaaaaaaaaaaaaaaaaaaaaaaaaaaaaaaaaaaaaaaaaaaaaaaaaaaaaaaaaaaaaaaaaaaaaaaaaaaaaaaaaaa

SEQ ID NO: 15858 - RNA, 1740 nt, Artificial Sequence
  mRNA product Design a-2 (A100) comprising derived and/or modified sequence from LASV(Lassa virus/H.sapiens-wt/NGA/2015/ISTH_0543;Clade II)__AVO03639__GPCmut1 (opt1)
aggagaguccgcucagccagguugcagaagcggcuuagcguguguccuaaucuucucucugcguguagguaggccugugccgcaaacaagcuuaccaugggccagaucaucaccuucuuccaggaggugccccacgucaucgaggaggugaugaacaucgugcugaucgcccucagccugcuggccauccucaaggggaucuacaacgucgcgaccugcggccuguucgggcugguguccuuccuccugcugugcggccgcagcugcuccacgaccuacaaggggguguacgagcuccagacccuggagcuggacauggccaaccucaacaugaccaugccgcugagcugcacgaagaacaacucccaccacuacaucauggucggcaacgagaccggccuggagcucacccugaccaacacgagcaucaucaaccacaaguucugcaaccuguccgacgcccacaagaagaaccucuacgaccacgcccugaugagcaucaucuccaccuuccaccugagcauccccaacuucaaccaguacgaggccauguccugcgacuucaacgggggcaagaucagcgugcaguacaaccucucccacaccuacgcgguggacgccgccaaccacugcgggaccaucgccaacggcguccugcagacguucaugcggauggcguggggcgggagcuacaucgcccuggacuccggcugcgggagcugggacugcaucaugaccuccuaccaguaccucgugauccagaacaccaccugggaggaccacugccaguucagccgccccucccccaucggcuaccuggggcugcucagccagcggacgcgcgacaucuacaucagccggcgccgccggggcaccuucaccuggacccucuccgacagcgagggcaacgagacgcccgggggcuacugccugacccgguggaugcugaucgaggccgagcucaagugcuucgggaacaccgccguggccaagugcaacgagaagcacgacgaggaguucugcgacaugcugcgccuguucgacuucaacaagcaggcgauccggcgccucaagacccccgcccagauguccauccagcugaucaacaaggccgucaacgcccugaucaacgaccagcucaucaugaagaaccaccuccgggacaucaugugcauccccuacugcaacuacagcaaguacugguaccugaaccacacggugaccgggaagaccucccugccccgcugcuggcuggugagcaacggcuccuaccugaacgagacccacuucagcgacgacaucgagcagcaggccgacaacaugaucacggagcuccugcagaaggaguacaucgaccggcagggcaagaccccgcuggggcucgucgaccuguucguguucuccaccagcuucuaccugaucuccaucuuccugcaccucgugaagaucccgacccaccgccacaucacgggcaagcccugccccaagccccaccggcugaaccacauggggaucugcagcugcggccuguacaagcacccggggguccccgugaaguggaagcgcugaggacuagucccuguucccagagcccacuuuuuuuucuuuuuuugaaauaaaauagccugucuuucagaucuaaaaaaaaaaaaaaaaaaaaaaaaaaaaaaaaaaaaaaaaaaaaaaaaaaaaaaaaaaaaaaaaaaaaaaaaaaaaaaaaaaaaaaaaaaaaaaaaaaaa

SEQ ID NO: 15859 - RNA, 1740 nt, Artificial Sequence
  mRNA product Design a-2 (A100) comprising derived and/or modified sequence from LASV(Lassa virus/H.sapiens-wt/NGA/2016/ISTH_0009;Clade II)__AVO03571__GPCmut1 (opt1)
aggagaguccgcucagccagguugcagaagcggcuuagcguguguccuaaucuucucucugcguguagguaggccugugccgcaaacaagcuuaccaugggccagaucaucaccuucuuccaggaggugccccacgucaucgaggaggugaugaacaucgugcugaucgcccucagccugcuggccauccucaaggggaucuacaacgucgcgaccugcggccugcuggggcucguguccuuccugcugcucugcggccgcagcugcuccacgaccuacaaggggguguacgagcugcagacccuggagcucgacauggccagccugaacaugaccaugccgcuguccugcacgaagaacaacagccaccacuacaucauggucggcaacgagaccggccucgagcugacccugaccaacacguccaucaucaaccacaaguucugcaaccucagcgacgcccacaagaagaaccuguacgaccacgcccugauguccaucaucagcaccuuccaccucuccauccccaacuucaaccaguacgaggccaugagcugcgacuucaacgggggccggaucuccgugcaguacaaccugagccacuccuacgcgguggacgccgccaaccacugcgggaccaucgccaacggcguccugcagaccuucaugcgcauggcguggggcgggagcuacaucgcccucgacuccggcugcgggagcugggacugcaucaugacguccuaccaguaccugaucauccagaacaccaccugggaggaccacugccaguucagccggcccagccccaucggcuaccuggggcuccugucccagcgcacccgggacaucuacaucagccgccggcgccggggcacguucaccuggacccuguccgacagcgagggcaacgagacccccgggggcuacugccugacgcgcuggaugcucaucgaggccgagcugaagugcuucgggaacaccgccguggccaagugcaacgagaagcacgacgaggaguucugcgacaugcugcggcuguucgacuucaacaagcaggcgauccgccggcugaagacccccgcccagauguccauccagcugaucaacaaggccgugaacgcccucaucaacgaccagcugaucaugaagaaccaccuccgcgacaucaugugcaucccguacugcaacuacagcaaguacugguaccucaaccacaccgucacggggaagaccucccugccccggugcuggcuggugagcaacggcuccuaccucaacgagacccacuucagcgacgacaucgagcagcaggccgacaacaugaucaccgagcugcugcagaaggaguacaucgaccgccagggcaagacgccccucgggcugguggaccuguucgucuucuccaccagcuucuaccugaucuccaucuuccuccaccuggugaagaucccgacccaccggcacaucaccggcaagcccugccccaagccccaccgccugaaccacauggggaucugcagcugcggccucuacaaccacccgggggugcccgucaaguggaagcggugaggacuagucccuguucccagagcccacuuuuuuuucuuuuuuugaaauaaaauagccugucuuucagaucuaaaaaaaaaaaaaaaaaaaaaaaaaaaaaaaaaaaaaaaaaaaaaaaaaaaaaaaaaaaaaaaaaaaaaaaaaaaaaaaaaaaaaaaaaaaaaaaaaaaa

SEQ ID NO: 15860 - RNA, 1740 nt, Artificial Sequence
  mRNA product Design a-2 (A100) comprising derived and/or modified sequence from LASV(Lassa virus/H.sapiens-wt/NGA/2016/ISTH_0017;Clade II)__AVO03567__GPCmut1 (opt1)
aggagaguccgcucagccagguugcagaagcggcuuagcguguguccuaaucuucucucugcguguagguaggccugugccgcaaacaagcuuaccaugggccagaucaucaccuucuuccaggaggugccccacgucaucgaggaggugaugaacaucgugcugaucgcccucagccugcuggccauccucaaggggaucuacaacgucgcgaccugcggccuguucgggcugguguccuuccuccugcugugcggccgcagcugcuccacgaccuacaaggggguguacgagcuccagacccuggagcuggacauggccagccucaacaugaccaugccgcuguccugcacgaagaacaacagccaccacuacaucauggucggcaacgagaccggccuggagcucacccugaccaacacguccaucaucaaccacaaguucugcaaccugagcgacgcccacaagaagaaccucuacgaccacgcccugauguccaucaucagcaccuuccaccuguccauccccaacuucaaccaguacgaggccaugagcugcgacuucaacgggggcaagaucuccgugcaguacaaccucagccacaccuacgcgaucgacgccgccaaccacugcgggaccaucgccaacggcgugcugcagacguucaugcggauggcguggggcggguccuacaucgcccuggacagcggcugcggguccugggacugcaucaugaccagcuaccaguaccucaucauccagaacaccaccugggaggaccacugccaguucucccgccccagccccaucggcuaccuggggcugcucagccagcggacgcgcgacaucuacaucucccggcgccgccggggcaccuucaccuggacccucagcgacuccgagggcaacgagacgcccgggggcuacugccugacccgguggaugcugaucgaggccgagcucaagugcuucgggaacaccgccgucgccaagugcaacgagaagcacgacgaggaguucugcgacaugcugcgccuguucgacuucaacaagcaggcgauccggcgccucaagacccccgcccagaugagcauccagcugaucaacaaggccgugaacgcccugaucaacgaccagcucaucaugaagaaccaccuccgggacaucaugugcauccccuacugcaacuacuccaaguacugguaccugaaccacacggugaccgggaagaccagccugccccgcugcuggcuggucuccaacggcagcuaccugaacgagacccacuucuccgacgacaucgagcagcaggccgacaacaugaucacggagcuccugcagaaggaguacauggaccggcagggcaagaccccgcuggggcucguggaccuguucguguucagcaccuccuucuaccugaucagcaucuuccugcaccucguccgcaucccgacccaccggcacgugaucggcaagcccugccccaagccccaccgccugaaccacauggggaucugcuccugcggccuguacaagcacccgggggugcccgucaaguggaagcggugaggacuagucccuguucccagagcccacuuuuuuuucuuuuuuugaaauaaaauagccugucuuucagaucuaaaaaaaaaaaaaaaaaaaaaaaaaaaaaaaaaaaaaaaaaaaaaaaaaaaaaaaaaaaaaaaaaaaaaaaaaaaaaaaaaaaaaaaaaaaaaaaaaaaa

SEQ ID NO: 15861 - RNA, 1740 nt, Artificial Sequence
  mRNA product Design a-2 (A100) comprising derived and/or modified sequence from LASV(Lassa virus/H.sapiens-wt/NGA/2018/ISTH_0959;Clade II)__AVV65099__GPCmut1 (opt1)
aggagaguccgcucagccagguugcagaagcggcuuagcguguguccuaaucuucucucugcguguagguaggccugugccgcaaacaagcuuaccaugggccagaucaucaccuucuuccaggaggugccccacgucaucgaggaggugaugaacaucgugcugaucgcccucagccugcuggccauccucaaggggaucuacaacgucgugaccugcggccuguucgggcugguguccuuccuccugcugugcggccgcagcugcuccacgaccuacaagggggucuacgagcuccagacccuggagcuggacauggcgagccucaacaugaccaugccgcuguccugcacgaagaacaacagccaccacuacaucauggugggcaacgagaccggccuggagcucacccugaccaacacguccaucaucaaccacaaguucugcaaccugagcgacgcccacaagaagaaccucuacgaccacgcccugauguccaucaucagcaccuuccaccuguccauccccaacuucaaccaguacgaggccaugagcugcgacuucaacgggggcaagaucuccgugcaguacaaccucagccacgccuacgcgaucgacgccgccaaccacugcgggaccaucgccaacggcguccugcagaccuucaugcggauggcguggggcggguccuacaucgcccuggacagcggcugcggguccugggacugcaucaugacgagcuaccaguaccucaucauccagaacaccaccugggaggaccacugccaguucucccgccccagccccaucggcuaccuggggcugcucagccagcggacccgcgacaucuacaucucccggcgccgccggggcacguucaccuggacccucagcgacuccgagggcaacgagacccccgggggcuacugccugacgcgguggaugcugaucgaggccgagcucaagugcuucgggaacaccgccguggccaagugcaacgagaagcacgacgaggaguucugcgacaugcugcgccuguucgacuucaacaagcaggcgauccggcgccucaagacccccgcccagaugagcauccagcugaucaacaaggccgugaacgcccugaucaacgaccagcucaucaugaagaaccaccuccgggacaucaugugcaucccguacugcaacuacuccaaguacugguaccugaaccacaccgucacggggaagaccagccugccccgcugcuggcugguguccaacggcagcuaccugaacgagacccacuucuccgacgacaucgagcagcaggccgacaacaugaucaccgagcuccugcagaaggaguacaucgaccggcagggcaagacgccccuggggcucguggaccuguucgucuucagcaccuccuucuaccugaucagcaucuuccugcaccucgugaagaucccgacccaccgccacgugaucggcaagcccugccccaagccccaccggcugaaccacauggggaucugcuccugcggccuguacaagcacccggggguccccgugaaguggaagcgcugaggacuagucccuguucccagagcccacuuuuuuuucuuuuuuugaaauaaaauagccugucuuucagaucuaaaaaaaaaaaaaaaaaaaaaaaaaaaaaaaaaaaaaaaaaaaaaaaaaaaaaaaaaaaaaaaaaaaaaaaaaaaaaaaaaaaaaaaaaaaaaaaaaaaa

SEQ ID NO: 15862 - RNA, 1740 nt, Artificial Sequence
  mRNA product Design a-2 (A100) comprising derived and/or modified sequence from LASV(LASV003-NIG-2008;Clade II)__AIT17580__GPCmut1 (opt1)
aggagaguccgcucagccagguugcagaagcggcuuagcguguguccuaaucuucucucugcguguagguaggccugugccgcaaacaagcuuaccaugggccagaucaucaccuucuuccaggaggugccccacgucaucgaggaggugaugaacaucgugcugaucgcccucagccugcuggccauccucaaggggaucuacaacgucgcgaccugcggccuguucgggcugguguccuuccuccugcugugcggccgcagcugcuccacgaccuacaaggggguguacgagcuccagacccuggagcuggacauggccagccucaacaugaccaugccgcuguccugcacgaagaacaacagccaccacuacaucauggucggcaacgagaccggccuggagcucacccugaccaacacguccaucaucaaccacaaguucugcaaccugagcgacgcccacaagaagaaccucuacgaccacgcccugauguccaucaucagcaccuuccaccuguccauccccaacuucaaccaguacgaggccaugagcugcgacuucaacgggggcaagaucuccgugcaguacaaccucagccacaccuacgcgguggacgccgccaaccacugcgggaccaucgccaacggcguccugcagacguucaugcggauggcguggggcggguccuacaucgcccuggacagcggcugcggguccugggacugcaucaugaccagcuaccaguaccucaucauccagaacaccaccugggaggaccacugccaguucucccgccccagccccaucggcuaccuggggcugcucagccagcggacgcgcgacaucuacaucucccggcgccgccggggcaccuucaccuggacccucagcgacuccgagagcaacgagacgccgggcggguacugccugacccgguggaugcugaucgaggccgagcucaagugcuucggcaacaccgccguggccaagugcaacgagaagcacgacgaggaguucugcgacaugcugcgccuguucgacuucaacaagcaggcgauccggcgccucaaggcccccgcccagauguccauccagcugaucaacaaggccgugaacgcccugaucaacgaccagcucaucaugaagaaccaccuccgggacaucaugugcauccccuacugcaacuacagcaaguacugguaccugaaccacaccgucacgggccgcaccucccugccccggugcuggcuggugagcaacggguccuaccugaacgagacccacuucagcgacgacaucgagcagcaggcggacaacaugaucaccgagcuccugcagaaggaguacauggaccgccagggcaagacgccccugggccucguggaccuguucgucuucuccaccagcuucuaccugaucuccaucuuccugcaccucgugaagaucccgacccaccggcacgugaucgggaagcccugccccaagccccaccgccugaaccacaugggcaucugcagcugcgggcuguacaagcacccgggcguccccgugaaguggaagcggugaggacuagucccuguucccagagcccacuuuuuuuucuuuuuuugaaauaaaauagccugucuuucagaucuaaaaaaaaaaaaaaaaaaaaaaaaaaaaaaaaaaaaaaaaaaaaaaaaaaaaaaaaaaaaaaaaaaaaaaaaaaaaaaaaaaaaaaaaaaaaaaaaaaaa

SEQ ID NO: 15863 - RNA, 1740 nt, Artificial Sequence
  mRNA product Design a-2 (A100) comprising derived and/or modified sequence from LASV(LASV035-NIG-2009;Clade II)__AIT17588__GPCmut1 (opt1)
aggagaguccgcucagccagguugcagaagcggcuuagcguguguccuaaucuucucucugcguguagguaggccugugccgcaaacaagcuuaccaugggccagaucaucaccuucuuccaggaggugccccacgucaucgaggaggugaugaacaucgugcugaucgcccucagccugcuggccauccucaaggggaucuacaacgucgcgaccugcggccuguucgggcugguguccuuccuccugcugugcggccgcagcugcuccacgaccuacaaggggguguacgagcuccagacccuggagcuggacauggccagccucaacaugaccaugccgcuguccugcacgaagaacaacagccaccacuacaucauggucggcaacgagaccggccuggagcucacccugaccaacacguccaucaucaaccacaaguucugcaaccugagcgacgcccacaagaagaaccucuacgaccacgcccugauguccaucaucagcaccuuccaccuguccauccccaacuucaaccaguacgaggccaugagcugcgacuucaacgggggcaagaucuccgugcaguacaaccucagccacgcguacgccguggacgccgccaaccacugcgggaccaucgcgaacggcguccugcagaccuucaugcggauggccuggggcggguccuacaucgcccuggacagcggcugcggguccugggacugcaucaugacgagcuaccaguaccucaucauccagaacaccaccugggaggaccacugccaguucucccgccccagccccaucggcuaccuggggcugcucagccagcggacccgcgacaucuacaucucccggcgccgccggggcacguucaccuggacccucagcgacuccgagggcaacgagacccccgggggcuacugccugacgcgguggaugcugaucgaggccgagcucaagugcuucgggaacaccgccguggcgaagugcaacgagaagcacgacgaggaguucugcgacaugcugcgccuguucgacuucaacaagcaggccauccggcgccucaaggcccccgcccagaugagcauccagcugaucaacaaggccgugaacgcgcugaucaacgaccagcucaucaugaagaaccaccuccgggacaucaugugcauccccuacugcaacuacuccaaguacugguaccugaaccacaccgucaccgggaagacgagccugccccgcugcuggcugguguccaacggcagcuaccugaacgagacccacuucuccgacgacaucgagcagcaggccgacaacaugaucaccgagcuccugcagaaggaguacaucgaccggcagggcaagaccccgcuggggcucguggaccuguucgucuucagcacguccuucuaccugaucagcaucuuccugcaccucgugaagaucccgacccaccgccacgugaucggcaagcccugccccaagccccaccggcugaaccacauggggaucugcuccugcggccuguacaagcacccggggguccccgugaaguggaagcgcugaggacuagucccuguucccagagcccacuuuuuuuucuuuuuuugaaauaaaauagccugucuuucagaucuaaaaaaaaaaaaaaaaaaaaaaaaaaaaaaaaaaaaaaaaaaaaaaaaaaaaaaaaaaaaaaaaaaaaaaaaaaaaaaaaaaaaaaaaaaaaaaaaaaaa

SEQ ID NO: 15864 - RNA, 1740 nt, Artificial Sequence
  mRNA product Design a-2 (A100) comprising derived and/or modified sequence from LASV(LASV1000-NIG-2009;Clade II)__AIT17782__GPCmut1 (opt1)
aggagaguccgcucagccagguugcagaagcggcuuagcguguguccuaaucuucucucugcguguagguaggccugugccgcaaacaagcuuaccaugggccagaucaucaccuucuuccaggaggugccccacgucaucgaggaggugaugaacaucgugcugaucgcccucagccugcuggccauccucaaggggaucuacaacgucgcgaccugcggccuguucgggcugguguccuuccuccugcugugcggccgcagcugcuccacgaccuacaaggggguguacgagcuccagacccuggagcuggacauggccagccucaacaugaccaugccgcuguccugcacgaagaacaacagccaccacuacaucauggucggcaacgagaccggccuggagcucacccugaccaacacguccaucaucaaccacaaguucugcaaccugagcgacgcccacaagaagaaccucuacgaccacgcccugauguccaucaucagcaccuuccaccuguccauccccaacuucaaccaguacgaggccaugagcugcgacuucaacgggggcaagaucuccgugcaguacaaccucagccacaccuacgcgguggacgccgccaaccacugcgggaccaucgccaacggcguccugcagacguucaugcggauggcguggggcggguccuacaucgcccuggacagcggcugcggguccugggacugcaucaugaccagcuaccaguaccucaucauccagaacaccaccugggaggaccacugccaguucucccgccccagccccaucggcuaccuggggcugcucagccagcggacgcgcgacaucuacaucucccggcgccgccggggcaccuucaccuggacccucagcgacuccgagggcaacgagacgcccgggggcuacugccugacccgguggaugcugaucgaggccgagcucaagugcuucgggaacaccgccguggccaagugcaacgagaagcacgacgaggaguucugcgacaugcugcgccuguucgacuucaacaagcaggcgaucaagcggcucaagacccccgcccagaugagcauccagcugaucaacaaggccgugaacgcccugaucaacgaccagcucaucaugaagaaccaccuccgcgacaucaugugcauccccuacugcaacuacuccaaguacugguaccugaaccacacggucaccgggaagaccagccugccccggugcuggcugguguccaacggcagcuaccugaacgagacccacuucuccgacgacaucgagcagcaggccgacaacaugaucacggagcuccugcagaaggaguacaucgaccgccagggcaagaccccgcuggggcucguggaccuguucgucuucagcaccuccuucuaccugaucagcaucuuccugcaccucgugaagaucccgacccaccggcacguggucggcaagcccugccccaagccccaccgccugaaccacauggggaucugcuccugcggccuguacaagcacccgggggugcccgugaaguggaagcggugaggacuagucccuguucccagagcccacuuuuuuuucuuuuuuugaaauaaaauagccugucuuucagaucuaaaaaaaaaaaaaaaaaaaaaaaaaaaaaaaaaaaaaaaaaaaaaaaaaaaaaaaaaaaaaaaaaaaaaaaaaaaaaaaaaaaaaaaaaaaaaaaaaaaa

SEQ ID NO: 15865 - RNA, 1740 nt, Artificial Sequence
  mRNA product Design a-2 (A100) comprising derived and/or modified sequence from LASV(LASV221-NIG-2010;Clade II)__AIT17624__GPCmut1 (opt1)
aggagaguccgcucagccagguugcagaagcggcuuagcguguguccuaaucuucucucugcguguagguaggccugugccgcaaacaagcuuaccaugggccagaucaucaccuucuuccaggaggugccccacgucaucgaggaggugaugaacaucgugcugaucgcccucagccugcuggccauccucaaggggaucuacaacgucgcgaccugcggccuguucgggcugguguccuuccuccugcugugcggccgcagcugcuccacgaccuacaaggggguguacgagcuccagacccuggagcuggacauggccagccucaacaugaccaugccgcuguccugcacgaagaacaacagccaccacuacaucauggucggcaacgagaccggccuggagcucacccugaccaacacguccaucaucaaccacaaguucugcaaccugagcgacgcccacaagaagaaccucuacgaccacgcccugauguccaucaucagcaccuuccaccuguccauccccaacuucaaccaguacgaggccaugagcugcgacuucaacgggggcaagaucuccgugcaguacaaccucagccacaccuacgcgaucgacgccgccaaccacugcgggaccaucgccaacggcgugcugcagacguucaugcggauggcguggggcggguccuacaucgcccuggacagcggcugcggguccugggacugcaucaugaccagcuaccaguaccucaucauccagaacaccaccugggaggaccacugccaguucucccgccccagccccaucggcuaccuggggcugcucagccagcggacgcgcgacaucuacaucucccggcgccgccggggcaccuucaccuggacccucagcgacuccgagggcaacgagacgcccgggggcuacugccugacccgguggaugcugaucgaggccgagcucaagugcuucgggaacaccgccgucgccaagugcaacgagaagcacgacgaggaguucugcgacaugcugcgccuguucgacuucaacaagcaggcgauccggcgccucaagacccccgcccagaugagcauccagcugaucaacaaggccgugaacgcccugaucaacgaccagcucaucaugaagaaccaccuccgggacaucaugugcauccccuacugcaacuacuccaaguacugguaccugaaccacacggugaccgggaagaccagccugccccgcugcuggcuggucuccaacggcagcuaccugaacgagacccacuucuccgacgacaucgagcagcaggccgacaacaugaucacggagaugcuccagaaggaguacauggaccggcagggcaagaccccgcuggggcugguggaccucuucguguucagcaccuccuucuaccugaucagcaucuuccugcaccuggucaagaucccgacccaccgccacgugaucggcaagcccugccccaagccccaccggcucaaccacauggggaucugcuccugcggccuguacaagcacccgggggugcccgucaaguggaagcgcugaggacuagucccuguucccagagcccacuuuuuuuucuuuuuuugaaauaaaauagccugucuuucagaucuaaaaaaaaaaaaaaaaaaaaaaaaaaaaaaaaaaaaaaaaaaaaaaaaaaaaaaaaaaaaaaaaaaaaaaaaaaaaaaaaaaaaaaaaaaaaaaaaaaaa

SEQ ID NO: 15866 - RNA, 1740 nt, Artificial Sequence
  mRNA product Design a-2 (A100) comprising derived and/or modified sequence from LASV(LASV237-NIG-2010;Clade II)__AIT17638__GPCmut1 (opt1)
aggagaguccgcucagccagguugcagaagcggcuuagcguguguccuaaucuucucucugcguguagguaggccugugccgcaaacaagcuuaccaugggccagaucaucaccuucuuccaggaggugccccacgucaucgaggaggugaugaacaucgugcugaucgcccucagccugcuggccauccucaaggggaucuacaacgucgcgaccugcggccuguucgggcugguguccuuccuccugcugugcggccgcagcugcuccacgaccuacaaggggguguacgagcuccagacccuggagcuggacauggccagccucaacaugaccaugccgcuguccugcacgaagaacaacagccaccacuacaucauggucggcaacgagaccggccuggagcucacccugaccaacacguccaucaucaaccacaaguucugcaaccugagcgacgcccacaagaaggaccucuacgaccacgcccugauguccaucaucagcaccuuccaccuguccauccccaacuucaaccaguacgaggccaugagcugcgacuucaacgggggcaagaucuccgugcaguacaaccucagccacaccuacgcgguggacgccgccaaccacugcgggaccaucgccaacggcguccugcagacguucaugcggauggcguggggcggguccuacaucgcccuggacagcggcugcggguccugggacugcaucaugaccagcuaccaguaccucaucauccagaacaccaccugggaggaccacugccaguucucccgccccagccccaucggcuaccuggggcugcucagccagcggacgcgcgacaucuacaucucccggcgccgccggggcaccuucaccuggacccucagcgacuccgagggcaacgagacgcccgggggcuacugccugacccgguggaugcugaucgaggccgagcucaagugcuucgggaacaccgccguggccaagugcaacgagaagcacgacgaggaguucugcgacaugcugcgccuguucgacuucaacaagcaggcgauccggcgccucaagacccccgcccagaugagcauccagcugaucaacaaggccgugaacgcccugaucaacgaccagcucaucaugaagaaccaccuccgggacaucaugugcauccccuacugcaacuacuccaaguacugguaccugaaccacacggucaccgggaagaccagccugccccgcugcuggcugguguccaacggcagcuaccugaacgagacccacuucuccgacgacaucgagcagcaggccgacaacaugaucacggagcuccugcagaaggaguacauggaccggcagggcaagaccccgcuggggcucguggaccuguucgucuucagcaccuccuucuaccugaucagcaucuuccugcaccucaucaagaucccgacccaccgccacaucacgggcaagcccugccccaagccccaccggcugaaccacauggggaucugcuccugcggccuguacaagcacccgggggugcccgugaaguggaagcgcugaggacuagucccuguucccagagcccacuuuuuuuucuuuuuuugaaauaaaauagccugucuuucagaucuaaaaaaaaaaaaaaaaaaaaaaaaaaaaaaaaaaaaaaaaaaaaaaaaaaaaaaaaaaaaaaaaaaaaaaaaaaaaaaaaaaaaaaaaaaaaaaaaaaaa

SEQ ID NO: 15867 - RNA, 1740 nt, Artificial Sequence
  mRNA product Design a-2 (A100) comprising derived and/or modified sequence from LASV(LASV253-NIG-2011;Clade II)__AIT17670__GPCmut1 (opt1)
aggagaguccgcucagccagguugcagaagcggcuuagcguguguccuaaucuucucucugcguguagguaggccugugccgcaaacaagcuuaccaugggccagaucaucaccuucuuccaggaggugccccacgucaucgaggaggugaugaacaucgugcugaucgcccucagccugcuggccauccucaaggggaucuacaacgucgcgaccugcggccuguucgggcugguguccuuccuccugcugugcggccgcagcugcuccacgaccuacaaggggguguacgagcuccagacccuggagcuggacauggccagccucaacaugaccaugccgcuguccugcacgaagaacaacagccaccacuacaucauggucggcaacgagaccggccuggagcucacccugaccaacacguccaucaucaaccacaaguucugcaaccugagcgacgcccacaagaagaaccucuacgaccacgcccugauguccaucaucagcaccuuccaccuguccauccccaacuucaaccaguacgaggccaugagcugcgacuucaacgggggcaagaucuccgugcaguacaaccucagccacaccuacgcgguggacgccgccaaccacugcgggaccaucgccaacggcguccugcagacguucaugcggauggcguggggcggguccuacaucgcccuggacagcggcugcggguccugggacugcaucaugaccagcuaccaguaccucaucauccagaacaccaccugggaggaccacugccaguucucccgccccagccccaucggcuaccuggggcugcucagccagcggacgcgcgacaucuacaucucccggcgccgccggggcaccuucaccuggacccucagcgacuccgagggcaacgagacgcccgggggcuacugccugacccgguggaugcugaucgaggccgagcucaagugcuucgggaacaccgccguggccaagugcaacgagaagcacgacgaggaguucugcgacaugcugcgccuguucgacuucaacaagcaggcgauccggcgccucaaggcccccgcccagaugagcauccagcugaucaacaaggccgugaacgcccugaucaacgaccagcucaucaugaagaaccaccuccgggacaucaugugcaucccguacugcaacuacuccaaguacugguaccugaaccacaccgucacggggcgcaccagccugccccggugcuggcugguguccaacggcagcuaccugaacgagacccacuucuccgacgacaucgagcagcaggcggacaacaugaucaccgagcuccugcagaaggaguacaucgaccgccagggcaagacgccccuggggcucguggaccuguucgucuucagcaccuccuucuaccugaucagcaucuuccugcaccucgugaagaucccgacccaccggcacaucaucggcaagcccugccccaagccccaccgccugaaccacauggggaucugcuccugcggccuguacaagcacccgggggugcccgucaaguggaagcggugaggacuagucccuguucccagagcccacuuuuuuuucuuuuuuugaaauaaaauagccugucuuucagaucuaaaaaaaaaaaaaaaaaaaaaaaaaaaaaaaaaaaaaaaaaaaaaaaaaaaaaaaaaaaaaaaaaaaaaaaaaaaaaaaaaaaaaaaaaaaaaaaaaaaa

SEQ ID NO: 15868 - RNA, 1740 nt, Artificial Sequence
  mRNA product Design a-2 (A100) comprising derived and/or modified sequence from LASV(LASV254-NIG-2011;Clade II)__AIT17674__GPCmut1 (opt1)
aggagaguccgcucagccagguugcagaagcggcuuagcguguguccuaaucuucucucugcguguagguaggccugugccgcaaacaagcuuaccaugggccagaucaucaccuucuuccaggaggugccccacgucaucgaggaggugaugaacaucgugcugaucgcccucagccugcuggccauccucaaggggaucuacaacgucgcgaccugcggccuguucgggcugguguccuuccuccugcugugcggccgcagcugcuccacgaccuacaaggggguguacgagcuccagacccuggagcuggacaugaccaaccucaacaugacgaugccgcugagcugcaccaagaacaacucccaccacuacaucauggucggcaacgagaccggccuggagcucacccugacgaacaccagcaucaucaaccacaaguucugcaaccuguccgacgcccacaagaagaaccucuacaaccacgcccugaugagcaucaucuccaccuuccaccugagcauccccaacuucaaccaguacgaggccauguccugcgacuucaacgggggcaagaucagcgugcaguacaaccucucccacagcuacgccguggacgcggccaaccacugcgggaccaucgccaacggcguccugcagacguucaugcggauggccuggggcggguccuacaucgcgcuggacagcggcugcgggaacugggacugcaucaugaccuccuaccaguaccucaucauccagaacaccaccugggaggaccacugccaguucagccgccccucccccaucggcuaccuggggcugcucagccagcggacgcgcgacaucuacaucagccggcgccgccggggcaccuucaccuggacccucuccgacagcgagggcaacgagacgcccgggggcuacugccugacccgguggaugcugaucgaggccgagcucaagugcuucgggaacaccgccguggccaagugcaacgagaagcacgacgaggaguucugcgacaugcugcgccuguucgacuucaacaagcaggccauccggcgccucaagacccccgcgcaggccaacauccagcugaucaacaaggccgugaacgcccugaucaacgaccagcucaucaugaagaaccaccuccgggacaucaugugcauccccuacugcaacuacuccaaguacugguaccugaaccacacggucaccgggaagaccagccugccccgcugcuggcugguguccaacggcagcuaccugaacgagacccacuucuccgacgacaucgagcagcaggccgacaacaugaucacggagcuccugcagaaggaguacauggaccggcagggcaagaccccgcuggggcucguggaccuguucgucuucagcaccuccuucuaccugaucagcaucuuccugcaccucgugaagaucccgacccaccgccacgugaucggcaagcccugccccaagccccaccggcugaaccacauggggaucugcuccugcggccuguacaagcacccggggguccccgugaaguggaagcgcugaggacuagucccuguucccagagcccacuuuuuuuucuuuuuuugaaauaaaauagccugucuuucagaucuaaaaaaaaaaaaaaaaaaaaaaaaaaaaaaaaaaaaaaaaaaaaaaaaaaaaaaaaaaaaaaaaaaaaaaaaaaaaaaaaaaaaaaaaaaaaaaaaaaaa

SEQ ID NO: 15869 - RNA, 1740 nt, Artificial Sequence
  mRNA product Design a-2 (A100) comprising derived and/or modified sequence from LASV(Nig08-A19;Clade III)__ADU56618__GPCmut1 (opt1)
aggagaguccgcucagccagguugcagaagcggcuuagcguguguccuaaucuucucucugcguguagguaggccugugccgcaaacaagcuuaccaugggccagaucgugaccuucuuccaggaggucccccacgugaucgaggaggugaugaacaucguccugaucgcccucagcauccuggccauccugaaggggcucuacaacaucgcgaccugcggccugaucgggcuggugacguuccuccugcuguccggccgcagcugcuccaugaccuacaaggggguguacgagcuccagacccuggagcugaacaugaacacccucaacaugacgaugccgcugagcugcaccaagaacaacucccaccacuacaucauggucggcaacgagaccggccuggagcucacccugacgaacaccagccugcuccaccacaaguucugcaaccuguccgacgcccacaagaagaaccuguacgaccacacccucaugagcaucaucuccaccuuccaccugagcauccccaacuucaaccaguacgaggccauguccugcgacuucaacgggggcaagaucacggugcaguacaaccugagccacuccuacgccaucgacgccgcgaaccacugcgggaccguggccaacggcguccuccagaccuucaugcggauggccuggggcgggagcuacaucgcccuggacuccggcugcgggaagugggacugcaucaugaccagcuaccaguaccugaucauccagaacacgaccugggaggaccacugccaguucucccggcccagccccaucggcuaccucgggcugcugucccagcgcacccgggacaucuacaucagccgccggcgccggggcaccuucacguggacccugagcgacuccgagggcaacgagacccccgggggcuacugccucacccgcuggaugcugaucgaggcggagcugaagugcuucgggaacacggccguggccaagugcaacgagaagcacgacgaggaguucugcgacaugcuccggcuguucgacuucaacaagcaggccauccgccggcugaaggcccccgcgcagaugagcauccagcucaucaacaaggccgugaacgcccugaucaacgaccagcugaucaugaagaaccaccuccgcgacaucaugugcauccccuacugcaacuacuccaaguacugguaccugaaccacaccagcaccgggcggaccucccugccccgcugcuggcucgucagcaacggcuccuaccugaacgagacgcacuucagcgacgacaucgagcagcaggccgacaacaugaucaccgagaugcugcagaaggaguaccucgaccggcagggcaagaccccgcuggggcugguggaccuguucguguucuccaccagcuucuaccucaucuccaucuuccugcaccuggucaagaucccgacgcaccgccacaucgugggcaagcccugccccaagccccaccggcucaaccacauggggaucugcagcugcggccuguacaagcagccgggggugcccguccgcuggaagcggugaggacuagucccuguucccagagcccacuuuuuuuucuuuuuuugaaauaaaauagccugucuuucagaucuaaaaaaaaaaaaaaaaaaaaaaaaaaaaaaaaaaaaaaaaaaaaaaaaaaaaaaaaaaaaaaaaaaaaaaaaaaaaaaaaaaaaaaaaaaaaaaaaaaaa

SEQ ID NO: 15870 - RNA, 1743 nt, Artificial Sequence
  mRNA product Design a-2 (A100) comprising derived and/or modified sequence from LASV(G1180-SLE-2010;Clade IV)__AIT17168__GPCmut1 (opt1)
aggagaguccgcucagccagguugcagaagcggcuuagcguguguccuaaucuucucucugcguguagguaggccugugccgcaaacaagcuuaccaugggccagaucgugaccuucuuccaggaggucccccacgugaucgaggaggugaugaacaucguccugaucgcccucagcauccuggccgugcugaaggggcucuacaacuucgcgaccugcggccugguggggcugcucaccuuccugcugcucugcggccgcuccugcaccgccagccgguacaagggggucuacgagcugcagacccuggagcucaacauggagacccugaacaugacgaugccgcuguccugcaccaagaacaacagccaccacuacaucauggugggcaacgagaccggccucgagcugacccugacgaacaccuccaucaucaaccacaaguucugcaaccucagcgacgcccacaagaagaaccuguacgaccacgcccugauguccaucaucagcaccuuccaccucuccauccccaacuucaaccaguacgaggccaugagcugcgacuucaacgggggcaagaucuccgugcaguacaaccugagccacuccuacgcgggggacgccgccaaccacugcggcaccgucgccaacggggugcugcagacguucaugcgcauggcguggggcggcagcuacaucgcccucgacuccgggugcggcagcugggacugcaucaugaccuccuaccaguaccugaucauccagaacaccaccugggaggaccacugccaguucagccggcccucccccaucggguaccugggccuccugagccagcgcacgcgggacaucuacaucagccgccggcgccggggcaccuucaccuggacccuguccgacagcgaggggaaggacacgccgggcggguacugccugacccgcuggaugcucaucgaggccgagcugaagugcuucggcaacaccgccguggccaagugcaacgagaagcacgacgaggaguucugcgacaugcugcggcuguucgacuucaacaagcaggcgauccagcgccugaaggcccccgcccagauguccauccagcugaucaacaaggccgucaacgcccucaucaacgaccagcugaucaugaagaaccaccuccgggacaucaugugcauccccuacugcaacuacagcaaguacugguaccucaaccacaccacgaccggcaagaccucccugcccaagugcuggcuggugagcaacggcuccuaccucaacgagacccacuucagcgacgacaucgagcagcaggcggacaacaugaucacggagaugcugcagaaggaguacauggagcgccaggggaagacgccccugggccucguggaccuguucgucuucuccaccagcuucuaccugaucuccaucuuccugcaccucgugaagaucccgacccaccggcacaucgugggcaagagcugccccaagccccaccgccugaaccacauggggaucugcuccugcgggcuguacaagcagcccggcgucccggugaaguggaagcggugaggacuagucccuguucccagagcccacuuuuuuuucuuuuuuugaaauaaaauagccugucuuucagaucuaaaaaaaaaaaaaaaaaaaaaaaaaaaaaaaaaaaaaaaaaaaaaaaaaaaaaaaaaaaaaaaaaaaaaaaaaaaaaaaaaaaaaaaaaaaaaaaaaaaa

SEQ ID NO: 15871 - RNA, 1743 nt, Artificial Sequence
  mRNA product Design a-2 (A100) comprising derived and/or modified sequence from LASV(G1442-SLE-2011;Clade IV)__AIT17180__GPCmut1 (opt1)
aggagaguccgcucagccagguugcagaagcggcuuagcguguguccuaaucuucucucugcguguagguaggccugugccgcaaacaagcuuaccaugggccagaucgugaccuucuuccaggaggucccccacgugaucgaggaggugaugaacaucguccugaucgcccucagcauccuggccgugcugaaggggcucuacaacguggcgaccugcggccugaucgggcuggucacguuccuccugcugugcggccgcuccugcaccaccacccucuacaaggggguguacgagcugcagacgcuggagcucaacauggagacccugaacaugaccaugccgcugagcugcaccaagaacaacucccaccacuacauccgggugggcaacgagacgggccucgagcugacccugaccaacaccagcaucaucaaccacaaguucugcaaccucuccgacgcccacaagaagaaccuguacgaccacgcccugaugagcaucaucuccacguuccaccucagcauccccaacuucaaccaguacgaggccauguccugcgacuucaacgggggcaagaucagcguccaguacaaccugucccacagcuacgccggggacgcggccaaccacugcggcaccguggccaacggggugcugcagaccuucaugcgcauggccuggggcggcuccuacaucgcgcucgacagcgggugcggcaacugggacugcaucaugaccuccuaccaguaccugaucauccagaacacgaccugggacgaccacugccaguucagccgccccucccccaucggguaccugggccuccugagccagcggacccgcgacgucuacaucucccggcgccgccggggcaccuucacguggacccugagcgacagcgaggggaaggacaccccgggcggguacugccugacccgguggaugcucaucgaggccgagcugaagugcuucggcaacacggccguggccaagugcaacgagaagcacgacgaggaguucugcgacaugcugcgccucuucgacuucaacaagcaggccauccagcggcugaaggcgcccgcccagauguccauccagcugaucaacaaggccgugaacgcccucaucaacgaccagcugaucaugaagaaccaccuccgcgacaucaugugcauccccuacugcaacuacagcaaguacugguaccugaacaacaccgccaccggcaagaccucccugcccaagugcuggcugaucagcaacggcuccuaccucaacgagacgcacuucagcgacgacaucgagcaggaggcggacaacaugaucaccgagaugcugcagaaggaguacauggagcggcaggggaagacgccccugggccucgucgaccuguucguguucuccaccagcuucuaccugaucuccaucuuccugcaccucgugaagaucccgacccaccgccacaucgucggcaagagcugccccaagccccaccggcugaaccacauggggaucugcuccugcgggcuguacaagcagcccggcgugccggugcgcuggaagcggugaggacuagucccuguucccagagcccacuuuuuuuucuuuuuuugaaauaaaauagccugucuuucagaucuaaaaaaaaaaaaaaaaaaaaaaaaaaaaaaaaaaaaaaaaaaaaaaaaaaaaaaaaaaaaaaaaaaaaaaaaaaaaaaaaaaaaaaaaaaaaaaaaaaaa

SEQ ID NO: 15872 - RNA, 1743 nt, Artificial Sequence
  mRNA product Design a-2 (A100) comprising derived and/or modified sequence from LASV(G3010-SLE-2013;Clade IV)__AIT17344__GPCmut1 (opt1)
aggagaguccgcucagccagguugcagaagcggcuuagcguguguccuaaucuucucucugcguguagguaggccugugccgcaaacaagcuuaccaugggccagaucgugaccuucuuccaggaggucccccacgugaucgaggaggugaugaacaucguccugaucgcccucagcauccuggccgugcugaaggggcucuacaacuucgcgaccugcggccugguggggcuggucacguuccuccugcugugcggccgcuccugcaccaccagccucuacaaggggguguacgagcugcagacccuggagcucaacauggagacgcugaacaugaccaugccgcuguccugcaccaagaacaacagccaccacuacaucauggugggcaacgagaccggccucgagcugacgcugaccaacaccuccaucaucaaccacaaguucugcaaccucagcgacgcccacaagaagaaccuguacaaccacgcccugauguccaucaucagcaccuuccaccucuccauccccaacuucaaccaguacgaggccaugagcugcgacuucaacgggggcaagaucuccguccaguacaaccugagccacuccuacgccggggacgcggccagccacugcggcacgguggccaacggggugcugcagaccuucaugcggauggccuggggcggcuccuacaucgcgcucgacagcgggugcggcaagugggacugcaucaugaccuccuaccaguaccugaucauccagaacaccacgugggaggaccacugccaguucagccgccccucccccaucggguaccugggccuccugagccagcggacccgcgacaucuacaucagccggcgccgccggggcaccuucaccuggacgcuguccgacagcgaggggaaggacaccccgggcggguacugccugacccgguggaugcucaucgaggccgagcugaagugcuucggcaacaccgccgucgccaagugcaacgagaagcacgacgaggaguucugcgacaugcugcgccucuucgacuucaacaagcaggccauccagcggcugaagacgcccgcgcagauguccauccagcugaucaacaaggccgugaacgcccucaucaacgaccagcugaucaugaagaaccaccuccgcgacaucaugugcauccccuacugcaacuacagcaaguacugguaccugaaccacaccaccaccggcaagacgucccugcccaagugcuggcuggugagcaacggcuccuaccucaacgagacccacuucagcgacgacaucgagcagcaggccgacaacaugaucaccgagaugcugcagaaggaguacauggagcggcaggggaagacgccccugggccucgucgaccuguucguguucuccaccagcuucuaccugaucuccaucuuccugcaccucgugaagaucccgacccaccgccacaucgucggcaagagcugccccaagccccaccggcugaaccacauggggaucugcuccugcgggcuguacaagcagcccggcgugccggugcgcuggaagcggugaggacuagucccuguucccagagcccacuuuuuuuucuuuuuuugaaauaaaauagccugucuuucagaucuaaaaaaaaaaaaaaaaaaaaaaaaaaaaaaaaaaaaaaaaaaaaaaaaaaaaaaaaaaaaaaaaaaaaaaaaaaaaaaaaaaaaaaaaaaaaaaaaaaaa

SEQ ID NO: 15873 - RNA, 1743 nt, Artificial Sequence
  mRNA product Design a-2 (A100) comprising derived and/or modified sequence from LASV(G502-SLE-2009;Clade IV)__AIT17126__GPCmut1 (opt1)
aggagaguccgcucagccagguugcagaagcggcuuagcguguguccuaaucuucucucugcguguagguaggccugugccgcaaacaagcuuaccaugggccagaucgugaccuucuuccaggaggucccccacgugaucgaggaggugaugaacaucguccugaucgcccucagcauccuggccgugcugaaggggcucuacaacuucgcgaccugcggccugguggggcugcucacguuccugcugcucugcggccgcuccugcaccaccgggcuguacaagggcgucuacgagcugcagacccucgagcugaacauggagacgcugaacaugaccaugccgcucagcugcaccaagaacaacucccaccacuacaucauggugggcaacgagaccgggcuggagcugacgcucaccaacaccagcaucaucaaccacaaguucugcaaccuguccgacgcccacaagaagaaccuguacgaccacgcccucaugagcaucaucuccaccuuccaccugagcauccccaacuucaaccaguacgaggccauguccugcgacuucaacggcgggaagaucagcgugcaguacaaccugucccacagcuacgccggcgacgcggccgaccacugcgggacggucgccaacggcgugcuccagaccuucaugcggauggccuggggcggguccuacaucgcgcuggacagcggcugcgggcggugggacugcaucaugaccuccuaccaguaccugaucauccagaacaccacgugggaggaccacugccaguucagccgccccucccccaucggcuaccucggccugcugagccagcggacccgcgacaucuacaucucccggcgccgccgggggaccuucaccuggacgcugagcgacagcgagggcaaggacacccccgggggcuacugccucacccgguggaugcugaucgaggccgagcugaagugcuucgggaacaccgccguggccaagugcaacgagaagcacgacgaggaguucugcgacaugcuccgccuguucgacuucaacaagcaggccauccagcggcugaaggcgcccgcccagauguccauccagcucaucaacaaggccgucaacgcccugaucaacgaccagcuggugaugaagaaccaccuccgcgacaucaugugcauccccuacugcaacuacagccgguacugguaccugaaccacacgaccaccggccgcaccucccugcccaagugcuggcucgugagcaacggguccuaccugaacgagacgcacuucagcgacgacaucgagcagcaggccgacaacaugaucaccgagaugcugcagaaggaguacauggagcggcagggcaagaccccgcucgggcuggucgaccuguucguguucuccaccagcuucuaccugaucuccaucuuccuccaccuggugaagaucccgacgcaccgccacaucgucggcaagagcugccccaagccccaccggcugaaccacauggggaucugcuccugcggccucuacaagcagcccggcgugccggugaaguggaagcgcugaggacuagucccuguucccagagcccacuuuuuuuucuuuuuuugaaauaaaauagccugucuuucagaucuaaaaaaaaaaaaaaaaaaaaaaaaaaaaaaaaaaaaaaaaaaaaaaaaaaaaaaaaaaaaaaaaaaaaaaaaaaaaaaaaaaaaaaaaaaaaaaaaaaaa

SEQ ID NO: 15874 - RNA, 1743 nt, Artificial Sequence
  mRNA product Design a-2 (A100) comprising derived and/or modified sequence from LASV(G733-SLE-2010;Clade IV)__AIT17154__GPCmut1 (opt1)
aggagaguccgcucagccagguugcagaagcggcuuagcguguguccuaaucuucucucugcguguagguaggccugugccgcaaacaagcuuaccaugggccagaucgugaccuucuuccaggaggucccccacgugaucgaggaggugaugaacaucguccugaucgcccucagcauccuggccgugcugaaggggcucuacaacuucgcgaccugcggcaucguggggcuggucuccuuccugcuccugugcggccgcagcugcacgaccucccuguacaaggggguguacgagcuccagacccuggagcugaacauggagacccucaacaugacgaugccgcugagcugcaccaagaacaacucccaccacuacaucauggugggcaacgagaccggccuggagcucacccugacgaacaccagcaucaucaaccacaaguucugcaaccuguccgacgcccacaagaagaaccucuacgaccacgcccugaugagcaucaucuccaccuuccaccugagcauccccaacuucaaccaguacgaggccauguccugcgacuucaacgggggcaagaucagcguccaguacaaccucucccacagcuacgccggggacgcggccaaccacugcggcaccaucgccaacggggugcugcagacguucaugcggauggccuggggcggcuccuacaucgcgcuggacagcgggugcgaccggugggacugcaucaugaccuccuaccaguaccucaucauccagaacaccaccugggaggaccacugccaguucagccgccccucccccaucggcuaccuggggcugcucagccagcggacgcgcgacaucuacaucagccggcgccgccggggcaccuucaccuggacccucuccgacagcgagggcaaggacacgcccgggggcuacugccugacccgguggaugcugaucgaggccgagcucaagugcuucgggaacaccgccguggccaagugcaacgagaagcacgacgaggaguucugcgacaugcugcgccuguucgacuucaacaagcaggccauccagcggcucaaggcgcccgcccagauguccauccagcugaucaacaaggccgucaacgcccugaucaacgaccagcucaucaugaagaaccaccuccgcgacaucaugugcauccccuacugcaacuacagcaaguacugguaccugaaccacaccacgaccgggaagaccucccugcccaagugcuggcuggugagcaacggcuccuaccugaacgagacccacuucagcgacgacaucgagcagcaggccgacaacaugaucacggagaugcuccagaaggaguacauggagcggcagggcaagaccccgcuggggcugguggaccucuucgucuucuccaccagcuucuaccugaucuccaucuuccugcaccuggugaagaucccgacccaccgccacguggucggcaagagcugccccaagccccaccggcucaaccacauggggaucugcuccugcggccuguacgggcagcccggcgugccggugaaguggaagcgcugaggacuagucccuguucccagagcccacuuuuuuuucuuuuuuugaaauaaaauagccugucuuucagaucuaaaaaaaaaaaaaaaaaaaaaaaaaaaaaaaaaaaaaaaaaaaaaaaaaaaaaaaaaaaaaaaaaaaaaaaaaaaaaaaaaaaaaaaaaaaaaaaaaaaa

SEQ ID NO: 15875 - RNA, 1743 nt, Artificial Sequence
  mRNA product Design a-2 (A100) comprising derived and/or modified sequence from MOPV/LASV reassortant(IGS-1;Clade IV)__AFY05576__GPCmut1 (opt1)
aggagaguccgcucagccagguugcagaagcggcuuagcguguguccuaaucuucucucugcguguagguaggccugugccgcaaacaagcuuaccaugggccagaucgugaccuucuuccaggaggucccccacgugaucgaggaggugaugaacaucguccugaucgcccucagcgugcuggccgugcugaaggggcucuacaacuucgcgaccugcggccuggucgggcuggugacguuccuccugcugugcggccgcuccugcaccaccagccucuacaaggggguguacgagcugcagacccuggagcucaacauggagacgcugaacaugaccaugccgcuguccugcaccaagaacaacagccaccacuacaucauggucggcaacgagaccggccucgagcugacgcugaccaacaccuccaucaucaaccacaaguucugcaaccucagcgacgcccacaagaagaaccuguacgaccacgcccugauguccaucaucagcaccuuccaccucuccauccccaacuucaaccaguacgaggccaugagcugcgacuucaacgggggcaagaucuccgugcaguacaaccugagccacuccuacgccggggacgcggccaaccacugcggcacgguggccaacgggguccugcagaccuucaugcggauggccuggggcggcagcuacaucgcgcucgacuccgggugcggcaacugggacugcaucaugaccagcuaccaguaccugaucauccagaacaccacgugggaggaccacugccaguucucccggcccagccccaucggguaccugggccuccugucccagcgcacccgggacaucuacaucagccgccggcgccggggcaccuucaccuggacgcugagcgacuccgagggggaggacaccccgggcggguacugccugacccgcuggaugcucaucgaggccgagcugaagugcuucggcaacaccgccguggccaagugcaacgagaagcacgacgaggaguucugcgacaugcugcggcuguucgacuucaacaagcaggccauccagcgccugaaggcgcccgcccagaugagcauccagcugaucaacaaggccgugaacgcccucaucaacgaccagcugaucaugaagaaccaccuccgggacaucaugugcauccccuacugcaacuacuccaaguacugguaccucaaccacacgaccaccggccgcaccagccugcccaagugcuggcuggucuccaacggcagcuaccucaacgagacgcacuucuccgacgacaucgagcagcaggccgacaacaugaucaccgagaugcugcagaaggaguacauggagcggcaggggaagacgccccugggccucguggaccuguucguguucagcaccuccuucuaccugaucagcaucuuccugcaccucgucaagaucccgacccaccgccacaucguggggaaguccugccccaagccccaccggcugaaccacaugggcaucugcagcugcgggcuguacaagcagcccggcgugccggucaaguggaagcgcugaggacuagucccuguucccagagcccacuuuuuuuucuuuuuuugaaauaaaauagccugucuuucagaucuaaaaaaaaaaaaaaaaaaaaaaaaaaaaaaaaaaaaaaaaaaaaaaaaaaaaaaaaaaaaaaaaaaaaaaaaaaaaaaaaaaaaaaaaaaaaaaaaaaaa

SEQ ID NO: 15876 - RNA, 1743 nt, Artificial Sequence
  mRNA product Design a-2 (A100) comprising derived and/or modified sequence from LASV(LM765-SLE-2012;Clade IV)__AIT17814__GPCmut1 (opt1)
aggagaguccgcucagccagguugcagaagcggcuuagcguguguccuaaucuucucucugcguguagguaggccugugccgcaaacaagcuuaccaugggccagaucgugaccuucuuccaggaggucccccacgugaucgaggaggugaugaacaucguccugaucgcccucagcauccuggccgugcugaaggggcucuacaacuucgcgaccugcggccugguggggcuggucacguuccuccugcugugcggccgcuccugcaccaccagccucuacaaggggguguacgagcugcagacccuggagcucaacauggagacgcugaacaugaccaugccgcuguccugcaccaagaacaacagccaccacuacaucauggugggcaacgagaccggccucgagcugacgcugaccaacaccuccaucaucgaccacaaguucugcaaccucagcgacgcccaccggaagaaccuguacgaccacgcccugauguccaucaucagcaccuuccaccucuccauccccaacuucaaccaguacgaggccaugagcugcgacuucaacgggggcaagaucuccguccaguacaaccugagccacuccuacgccaaggacgcggccgaccacugcgggacgguggccaacggcgugcugcagaccuucaugcgcauggccuggggcgggagcuacaucgcgcucgacuccggcugcgggcgcugggacugcaucaugaccagcuaccaguaccugaucauccagaacaccacgugggaggaccacugccaguucucccggcccagccccaucggcuaccuggggcuccugucccagcgcacccgggacaucuacaucagccgccggcgccggggcaccuucaccuggacgcugagcgacuccgagggcaaggacacccccgggggcuacugccugacccgcuggaugcucaucgaggccgagcugaagugcuucgggaacaccgccgucgccaagugcaacgagaagcacgacgaggaguucugcgacaugcugcggcuguucgacuucaacaagcaggccauccagcgccugaaggcgcccgcccagaugagcauccagcugaucaacaaggccgugaacgcccucaucaacgaccagcugaucaugaagaaccaccuccgggacaucaugugcauccccuacugcaacuacuccaaguacugguaccucaaccacacgaccaccgggaagaccagccugcccaagugcuggcugguguccaacggcagcuaccucaacgagacgcacuucuccgacgacaucgagcagcaggccgacaacaugaucaccgagaugcugcagaaggaguacauggagcgccagggcaagaccccgcuggggcucgucgaccuguucguguucagcaccuccuucuaccugaucagcaucuuccugcaccucgugaagaucccgacgcaccggcacaucgucggcaagcccugccccaagccccaccgccugaaccacauggggaucugcuccugcggccuguacaagcagccgggggugcccgugaaguggaagcggugaggacuagucccuguucccagagcccacuuuuuuuucuuuuuuugaaauaaaauagccugucuuucagaucuaaaaaaaaaaaaaaaaaaaaaaaaaaaaaaaaaaaaaaaaaaaaaaaaaaaaaaaaaaaaaaaaaaaaaaaaaaaaaaaaaaaaaaaaaaaaaaaaaaaa

SEQ ID NO: 15877 - RNA, 1743 nt, Artificial Sequence
  mRNA product Design a-2 (A100) comprising derived and/or modified sequence from LASV(LM776-SLE-2012;Clade IV)__AIT17824__GPCmut1 (opt1)
aggagaguccgcucagccagguugcagaagcggcuuagcguguguccuaaucuucucucugcguguagguaggccugugccgcaaacaagcuuaccaugggccagaucgugaccuucuuccaggaggucccccacgugaucgaggaggugaugaacaucguccugaucgcccucagcauccuggccgugcugaaggggcucuacaacuucgcgaccugcggccugguggggcuggucacguuccuccugcugugcggccgcuccugcaccaccagcguguacaaggggguguacgagcuccagacccuggagcugaacauggagacgcucaacaugaccaugccgcuguccugcaccaagaacaacagccaccacuacaucauggucggcaacgagaccggccuggagcucacgcugaccaacaccuccaucaucaaccacaaguucugcaaccugagcgacgcccacaagaagaaccucuacgaccacgcccugauguccaucaucagcaccuuccaccuguccauccccaacuucaaccaguacgaggccaugagcugcgacuucaacgggggcaagaucuccgugcaguacaaccucagccacuccuacgccggggacgcggccaaccacugcggcacgguggccaacgggguccugcagaccuucaugcggauggccuggggcggcagcuacaucgcgcuggacuccgggugcggcaagugggacugcaucaugaccagcuaccaguaccucaucauccagaacaccacgugggaggaccacugccaguucucccgccccagccccaucggguaccugggccugcucucccagcggacccgcgacaucuacaucagccggcgccgccggggcaccuucaccuggacgcucagcgacuccgaggggaaggacaccccgggcggguacugccugacccgguggaugcugaucgaggccgagcucaagugcuucggcaacaccgccguggccaagugcaacgagaagcacgacgaggaguucugcgacaugcugcgccuguucgacuucaacaagcaggccauccagcggcucaaggcgcccgcccagaugagcauccagcugaucaacaaggccgugaacgcccugaucaacgaccagcucaucaugaagaaccaccuccgcgacaucaugugcauccccuacugcaacuacuccaaguacugguaccugaaccacacgaccaccggcaagaccagccugcccaagugcuggcuggucuccaacggcagcuaccugaacgagacgcacuucuccgacgacaucgagcagcaggccgacaacaugaucaccgagaugcuccagaaggaguacauggagcggcaggggaagacgccccugggccugguggaccucuucguguucagcaccuccuucuaccugaucagcaucuuccugcaccuggucaagaucccgacccaccgccacaucguggggaaguccugccccaagccccaccggcucaaccacaugggcaucugcagcugcgggcuguacaagcagcccggcgugccgguccgcuggaagcggugaggacuagucccuguucccagagcccacuuuuuuuucuuuuuuugaaauaaaauagccugucuuucagaucuaaaaaaaaaaaaaaaaaaaaaaaaaaaaaaaaaaaaaaaaaaaaaaaaaaaaaaaaaaaaaaaaaaaaaaaaaaaaaaaaaaaaaaaaaaaaaaaaaaaa

SEQ ID NO: 15878 - RNA, 1743 nt, Artificial Sequence
  mRNA product Design a-2 (A100) comprising derived and/or modified sequence from LASV(Mad39;Clade IV)__ANH09722__GPCmut1 (opt1)
aggagaguccgcucagccagguugcagaagcggcuuagcguguguccuaaucuucucucugcguguagguaggccugugccgcaaacaagcuuaccaugggccagaucgugaccuucuuccaggaggucccccacgugaucgaggaggugaugaacaucguccugaucgcccucagcauccuggccgugcugaaggggcucuacaacguggcgaccugcggccugaucgggcuggucacguuccuccugcugugcggccgcuccugcaccaccacccucuacaaggggguguacgagcugcaggcccuggagcucaacauggagacgcugaacaugaccaugccgcugagcugcaccaagaacaacucccaccacuacauccgggugggcaacgagaccggccucgagcugacgcugaccaacaccagccucaucaaccacaaguucugcaaccuguccgacgcccacaagaagaaccuguacgaccacgcccucaugagcaucaucuccaccuuccaccugagcauccccaacuucaaccaguacgaggccauguccugcgacuucaacgacgggaagaucagcguccaguacaaccugucccacacguacgcgggcgacaccgccaaccacugcgggaccguggccaacggcgugcuccagaccuucaugcgcauggccuggggcgggagcuacaucgcgcuggacuccggcugcgggggcugggacugcaucaugacgagcuaccaguaccugaucauccagaacaccaccugggaggaccacugccaguucucccggcccagccccaucggguaccucggccugcugucccagcggacccgcgacaucuacaucagccggcgccgccggggcacguucaccuggacccuguccgacagcgaggggaaggacaccccgggcggguacugccucacgcgguggaugcugaucgaggccgagcugaagugcuucggcaacaccgccgucgccaagugcaacgagaagcacgacgaggaguucugcgacaugcuccgccuguucgacuucaacaagcaggccauccagcggcugaaggcgcccgcccagaugagcauccagcucaucaacaaggccgugaacgcccugaucaacgaccagcugaucaugaagaaccaccuccgcgacaucaugugcauccccuacugcaacuacuccaaguacugguaccugaaccacaccgugaccggcaagacgagccugcccaagugcuggcucgucuccaacggcagcuaccugaacgagacccacuucuccgacgacaucgagcagcaggccgacaacaugaucaccgagaugcugcagaaggaguacauggagcggcaggggaagacgccccucggccugguggaccuguucguguucagcaccuccuucuaccugaucagcaucuuccuccaccuggucaagaucccgacccaccgccacgugguggggaagcccugccccaagccccaccggcugaaccacaugggcaucugcuccugcggguucuacaagcagccgggcguccccgugcgcuggaagcggugaggacuagucccuguucccagagcccacuuuuuuuucuuuuuuugaaauaaaauagccugucuuucagaucuaaaaaaaaaaaaaaaaaaaaaaaaaaaaaaaaaaaaaaaaaaaaaaaaaaaaaaaaaaaaaaaaaaaaaaaaaaaaaaaaaaaaaaaaaaaaaaaaaaaa

SEQ ID NO: 15879 - RNA, 1743 nt, Artificial Sequence
  mRNA product Design a-2 (A100) comprising derived and/or modified sequence from LASV(Z0947-SLE-2011;Clade IV)__AIT17840__GPCmut1 (opt1)
aggagaguccgcucagccagguugcagaagcggcuuagcguguguccuaaucuucucucugcguguagguaggccugugccgcaaacaagcuuaccaugggccagaucgugaccuucuuccaggaggucccccacgugaucgaggaggugaugaacaucguccugaucgcccucagcauccuggccgugcugaaggggcucuacaacuucgcgaccugcggccugguggggcuggucacguuccuccugcugugcggccgcuccugcaccaucagccucuacaaggggguguacgagcugcagacccuggagcucaacauggagacccugaacaugacgaugccgcuguccugcaccaagaacaacagccaccacuacaucauggugggcaacgagaccggccucgagcugacccugacgaacaccuccaucaucaaccacaaguucugcaaccucagcgacgcccacaagaagaaccuguacgaccacgcccugauguccaucaucagcaccuuccaccucuccauccccaacuucaaccaguacgaggccaugagcugcgacuucaacgggggcaagaucuccguccaguacaaccugagccacuccuacgccggggacgcggccaaccacugcggcaccguggccaacggggugcugcagacguucaugcggauggccuggggcggcagcuacaucgcgcucgacuccgggugcgaccggugggacugcaucaugaccagcuaccaguaccugaucauccagaacaccaccugggaggaccacugccaguucucccgccccagccccaucggcuaccuggggcuccugucccagcggacgcgcgacaucuacaucagccggcgccgccggggcaccuucaccuggacccugagcgacuccgagggcaaggacacgcccgggggcuacugccugacccgguggaugcucaucgaggccgagcugaagugcuucgggaacaccgccgucgccaagugcaacgagaagcacgacgaggaguucugcgacaugcugcgccucuucgacuucaacaagcaggccauccagcggcugaaggcgcccgcccagaugagcauccagcugaucaacaaggccgugaacgcccucaucaacgaccagcugaucaugaagaaccaccuccgcgacaucaugugcauccccuacugcaacuacuccaaguacugguaccugaaccacaccacgaccgggaagaccagccugcccaagugcuggcugguguccaacggcagcuaccucaacgagacccacuucuccgacgacaucgagcagcaggccgacaacaugaucacggagaugcugcagaaggaguacauggagcggcagggcaagaccccgcuggggcucgucgaccuguucguguucagcaccuccuucuaccugaucagcaucuuccugcaccucgugaagaucccgacccaccgccacaucgucggcaagcccugccccaagccccaccggcugaaccacauggggaucugcuccugcggccuguacaagcagccgggggugcccgugaaguggaagcgcugaggacuagucccuguucccagagcccacuuuuuuuucuuuuuuugaaauaaaauagccugucuuucagaucuaaaaaaaaaaaaaaaaaaaaaaaaaaaaaaaaaaaaaaaaaaaaaaaaaaaaaaaaaaaaaaaaaaaaaaaaaaaaaaaaaaaaaaaaaaaaaaaaaaaa

SEQ ID NO: 15880 - RNA, 1743 nt, Artificial Sequence
  mRNA product Design a-2 (A100) comprising derived and/or modified sequence from LASV(Josiah;Clade IV)__NP_694870__GPCmut1 (opt1)
aggagaguccgcucagccagguugcagaagcggcuuagcguguguccuaaucuucucucugcguguagguaggccugugccgcaaacaagcuuaccaugggccagaucgugaccuucuuccaggaggucccccacgugaucgaggaggugaugaacaucguccugaucgcccucagcgugcuggccgugcugaaggggcucuacaacuucgcgaccugcggccuggucgggcuggugacguuccuccugcugugcggccgcuccugcaccaccagccucuacaaggggguguacgagcugcagacccuggagcucaacauggagacgcugaacaugaccaugccgcuguccugcaccaagaacaacagccaccacuacaucauggucggcaacgagaccggccucgagcugacgcugaccaacaccuccaucaucaaccacaaguucugcaaccucagcgacgcccacaagaagaaccuguacgaccacgcccugauguccaucaucagcaccuuccaccucuccauccccaacuucaaccaguacgaggccaugagcugcgacuucaacgggggcaagaucuccgugcaguacaaccugagccacuccuacgccggggacgcggccaaccacugcggcacgguggccaacgggguccugcagaccuucaugcggauggccuggggcggcagcuacaucgcgcucgacuccgggugcggcaacugggacugcaucaugaccagcuaccaguaccugaucauccagaacaccacgugggaggaccacugccaguucucccgccccagccccaucggguaccugggccuccugucccagcggacccgcgacaucuacaucagccggcgccggcgcggcaccuucaccuggacgcugagcgacuccgaggggaaggacaccccgggcggguacugccucacccgguggaugcugaucgaggccgagcugaagugcuucggcaacaccgccguggccaagugcaacgagaagcacgacgaggaguucugcgacaugcuccgccuguucgacuucaacaagcaggccauccagcggcugaaggcgcccgcccagaugagcauccagcucaucaacaaggccgugaacgcccugaucaacgaccagcugaucaugaagaaccaccuccgcgacaucaugugcauccccuacugcaacuacuccaaguacugguaccugaaccacacgaccaccgggcggaccagccugcccaagugcuggcucgucuccaacggcagcuaccugaacgagacgcacuucuccgacgacaucgagcagcaggccgacaacaugaucaccgagaugcugcagaaggaguacauggagcgccagggcaagaccccgcucgggcugguggaccuguucguguucagcaccuccuucuaccucaucagcaucuuccugcaccuggucaagauccccacgcaccggcacaucgugggcaaguccugccccaagccccaccgccugaaccacauggggaucugcagcugcggccucuacaagcagccgggggugcccgucaaguggaagcggugaggacuagucccuguucccagagcccacuuuuuuuucuuuuuuugaaauaaaauagccugucuuucagaucuaaaaaaaaaaaaaaaaaaaaaaaaaaaaaaaaaaaaaaaaaaaaaaaaaaaaaaaaaaaaaaaaaaaaaaaaaaaaaaaaaaaaaaaaaaaaaaaaaaaa

SEQ ID NO: 15881 - RNA, 1740 nt, Artificial Sequence
  mRNA product Design a-2 (A100) comprising derived and/or modified sequence from LASV(LP;Clade I)__AAF86701__GPCmut1 (opt1)
aggagaguccgcucagccagguugcagaagcggcuuagcguguguccuaaucuucucucugcguguagguaggccugugccgcaaacaagcuuaccaugggccagaucaucaccuucuuccaggaggugccccacgucaucgaggaggugaugaacaucgugcugaucgcccucagccugcuggccauccucaaggggcuguacaacaucgcgaccugcggcaucaucgggcuggucgccuuccucuuccugugcggcaaguccugcagccugacgcucaagggcggguacgagcugcagacccuggagcucaacauggagacccugaacaugaccaugccgcuguccugcacgaagaacagcucccaccacuacauccgcgugggcaacgagaccgggcucgagcugacccugaccaacacgagcaucaucaaccacaaguucugcaaccucuccgacgcccacaagaagaaccuguacgaccacgcccugaugagcaucaucuccaccuuccaccucagcauccccaacuucaaccaguacgaggccauguccugcgacuucaacggcgggaagaucagcgugcaguacaaccugucccacagcuacgcgggcgacgccgccgagcacugcgggaccgucgccaacggcgugcugcagaccuucaugcggauggcguggggcgggcgcuacaucgcccucgacuccggcugcgggaacugggacugcaucaugacgagcuaccaguaccugaucauccagaacaccaccugggaggaccacugccaguucucccggcccagccccaucggcuaccugggccuccugucccagcgcacccgggacaucuacaucagccgccggcgccgggggacguucaccuggacccugagcgacuccgagggcaacgagacccccgggggcuacugccucacgcgcuggaugcugaucgaggccgagcugaagugcuucgggaacaccgccguggccaagugcaacgagaagcacgacgaggaguucugcgacaugcuccggcuguucgacuucaacaagcaggcgauccgccggcugaaggccccggcccagaugagcauccagcucaucaacaaggccgucaacgcccugaucaacgaccagcugaucaugaagaaccaccuccgcgacaucaugugcauccccuacugcaacuacuccaaguacugguaccugaaccacaccagcuccggccggaccagccugcccaagugcuggcucaucuccaacggcagcuaccugaacgagacgcaguucuccgacgacaucgagcagcaggcggacaacaugaucaccgagaugcugcagaaggaguacaucgagcgccaggggaagaccccgcucggccugguggacaucuucaucuucagcaccuccuucuaccugaucagcaucuuccuccaccugaucaagauccccacgcaccggcacaucguggggaagcccugccccaagccgcaccgccugaaccacaugggcgucugcuccugcgggcuguacaagcaccccggcgugcccaccaaguggaagcggugaggacuagucccuguucccagagcccacuuuuuuuucuuuuuuugaaauaaaauagccugucuuucagaucuaaaaaaaaaaaaaaaaaaaaaaaaaaaaaaaaaaaaaaaaaaaaaaaaaaaaaaaaaaaaaaaaaaaaaaaaaaaaaaaaaaaaaaaaaaaaaaaaaaaa

SEQ ID NO: 15882 - RNA, 1740 nt, Artificial Sequence
  mRNA product Design a-2 (A100) comprising derived and/or modified sequence from LASV(803213;Clade II)__AAF86703__GPCmut1 (opt1)
aggagaguccgcucagccagguugcagaagcggcuuagcguguguccuaaucuucucucugcguguagguaggccugugccgcaaacaagcuuaccaugggccagaucaucaccuucuuccaggaggugccccacgucaucgaggaggugaugaacaucgugcugaucgcccucagccugcuggccauccucaaggggaucuacaacgucgcgaccugcggccuguucgggcugaucuccuuccuccugcugugcggccgcagcugcuccgugacguacaaggggguguacgagcuccagacccuggagcugaacauggccaaccucaacaugaccaugccgcugagcugcaccaagaacaacucccaccacuacaucauggucggcaacgagacgggccuggagcucacccugaccaacaccagcaucaucaaccacaaguucugcaaccuguccgacgcccacaagaagaaccucuacgaccacgcccugaugagcaucaucuccacguuccaccugagcauccccaacuucaaccaguacgaggccauguccugcgacuucaacgggggcaagaucagcgugcaguacaaccucucccacagcuucgcgguggacgccgccaaccacugcgggaccaucgccaacggcguccugcagaccuucaugcggauggcguggggcggguccuacaucgcccuggacagcggcugcgggaacugggacugcaucaugaccuccuaccaguaccucaucauccagaacacgaccugggaggaccacugccaguucagccgccccucccccaucggcuaccuggggcugcucagccagcggacccgcgacaucuacaucagccggcgccggcgcggcaccuucacguggacccuguccgacagcgagggcaacgaggcccccgggggcuacugccugacccgguggaugcucaucgaggccgagcugaagugcuucgggaacaccgccguggcgaagugcaacgagaagcacgacgaggaguucugcgacaugcugcgccucuucgacuucaacaagcaggccaucaagcggcugaagacgccggcccagauguccauccagcugaucaacaaggccgugaacgcccucaucaacgaccagcugaucaugaagaaccaccuccgcgacaucaugugcauccccuacugcaacuacagccgguacugguaccugaaccacaccgucaccggcaagaccucccugccccgcugcuggcuggugagcaacggguccuaccucaacgagacgcacuucagcgacgacaucgagcagcaggcggacaacaugaucaccgagaugcugcagaaggaguacauggaccggcagggcaagaccccgcugggccucguggaccuguucgucuucuccaccagcuucuaccugaucuccaucuuccuccaccuggugaagauccccacgcaccgccacaucguggggaagcccugccccaagccgcaccggcugaaccacaugggcaucugcagcugcgggcuguacaagcaccccggcguccccgugaaguggaagcgcugaggacuagucccuguucccagagcccacuuuuuuuucuuuuuuugaaauaaaauagccugucuuucagaucuaaaaaaaaaaaaaaaaaaaaaaaaaaaaaaaaaaaaaaaaaaaaaaaaaaaaaaaaaaaaaaaaaaaaaaaaaaaaaaaaaaaaaaaaaaaaaaaaaaaa

SEQ ID NO: 15883 - RNA, 1740 nt, Artificial Sequence
  mRNA product Design a-2 (A100) comprising derived and/or modified sequence from LASV(GA391;Clade III)__CAA36645__GPCmut1 (opt1)
aggagaguccgcucagccagguugcagaagcggcuuagcguguguccuaaucuucucucugcguguagguaggccugugccgcaaacaagcuuaccaugggccagaucgugaccuucuuccaggaggucccccacgugaucgaggaggugaugaacaucguccugaucgcccucagcauccuggccauccugaaggggcucuacaacguggcgaccugcggccugaucgggcuggugacguuccuccugcuguccggccgcagcugcucccucaucuacaaggggaccuacgagcugcagacccuggagcucaacauggagacccugaacaugacgaugccgcugagcugcaccaagaacaacucccaccacuacauccgggucggcaacgagaccggccucgagcugacccugacgaacaccagcauccucaaccacaaguucugcaaccuguccgacgcccacaagcgcaaccuguacgaccacagccucauguccaucaucagcaccuuccaccuguccauccccaacuucaaccaguacgaggccaugagcugcgacuucaacgggggcaagaucaccgugcaguacaaccugucccacagcuucgccguggacgccgcggggcacugcggcacgcucgccaacgggguccugcagaccuucaugcggauggccuggggcggcuccuacaucgcccuggacagcgggugcggcaacugggacugcaucaugaccuccuaccaguaccucaucauccagaacaccacgugggacgaccacugccaguucagccgccccucccccaucggguaccugggccugcucagccagcggacccgcgacaucuacaucagccggcgccggcgcggcaccuucaccuggacgcuguccgacagcgaggggaacgagaccccgggcggguacugccugacccgguggaugcucaucgaggcggagcugaagugcuucggcaacaccgccguggccaagugcaacgagaagcacgacgaggaguucugcgacaugcugcgccucuucgacuucaacaagcaggccauccggcgccugaagacgcccgcccagauguccauccagcugaucaacaaggcggugaacgcccucaucaacgaccagcugaucaugaagaaccaccuccgggacaucaugugcauccccuacugcaacuacagccgcuacugguaccugaaccacaccuccaccgggaagaccagccugccccggugcuggcugaucuccaacggcagcuaccucaacgagacgaaguucuccgacgacaucgagcagcaggccgacaacaugaucaccgagaugcugcagaaggaguacaucgaccgccagggcaagaccccgcuggggcucgucgaccuguucguguucagcaccuccuucuaccugaucagcaucuuccugcaccucgugaagauccccacgcaccggcacaucgucggcaagcccugccccaagccgcaccgccugaaccacauggggaucugcuccugcggccuguacaagcagcccggggugcccgugcgguggaagcgcugaggacuagucccuguucccagagcccacuuuuuuuucuuuuuuugaaauaaaauagccugucuuucagaucuaaaaaaaaaaaaaaaaaaaaaaaaaaaaaaaaaaaaaaaaaaaaaaaaaaaaaaaaaaaaaaaaaaaaaaaaaaaaaaaaaaaaaaaaaaaaaaaaaaaa

SEQ ID NO: 15884 - RNA, 1743 nt, Artificial Sequence
  mRNA product Design a-2 (A100) comprising derived and/or modified sequence from LASV(AV;Clade V)__CCA30314__GPCmut1 (opt1)
aggagaguccgcucagccagguugcagaagcggcuuagcguguguccuaaucuucucucugcguguagguaggccugugccgcaaacaagcuuaccaugggccagaucgugaccuucuuccaggaggucccccacgugaucgaggaggugaugaacaucguccugaucgcccucagcauccuggccgugcugaaggggcucuacaacaucgcgaccugcggccugaucgggcugaucacguuccuccugcugugcggccgcuccugcagcuccaaccucuacaaggggguguacgagcugcagagccuggaccucaacauggagacccugaacaugaccaugccgcuguccugcaccaagaacaacagccaccacuacauccgggucggcaacgacacgggccucgagcugacccugaccaacaccuccauccucaaccacaaguucugcaaccugagcgacgcccacaagaaggaccuguacgaccacgcccucauguccaucaucagcacguuccaccuguccauccccaacuucaaccaguacgaggccaugagcugcgacuucaacgggggcaagaucuccgugcaguacaaccugagccacuccuacgccaucgacgcggccaaccacugcgggaccguggccaacggcauccuccagaccuucaugcgcauggccuggggcgggagcuacaucgcgcuggacuccggcugcgggaacugggacugcaucaugaccagcuaccaguaccugaucauccagaacacgaccugggagaaccacugccaguucucccggcccagccccaucggcuaccucgggcugcugagccagcgcacccgggacaucuacaucucccgccggcgccggggcaccuucacguggacccucagcgacuccgagggcaacgccacccccgggggcuacugccugacccgcuggaugcugaucgaggccgagcucaagugcuucgggaacacggccgucgccaagugcaacgagaagcacgacgaggaguucugcgacaugcugcggcuguucgacuucaacaagcaggcgaucagccgccucaaguccccggcccagaugagcauccagcugaucaacaaggccgugaacgcccugaucaacgaccagcucaucaugaagaaccaccuccgggacaucaugugcauccccuacugcaacuacuccaaguacugguaccugaaccacaccaucaccggcaagaccagccugcccaagugcuggcugguguccaacgggagcuaccugaacgagacgcacuucuccgacgacaucgagcagcaggccgacaacaugaucaccgagaugcuccagaaggaguacauggagcgccagggcaagaccccgcugggccuggucgaccucuucguguucagcaccuccuucuaccugaucagcaucuuccugcggcuggugaagauccccacgcaccgccacaucgucgggaagcccugccccaagccgcaccggcucaaccacaugggcaucugcuccugcgggcuguacaagcagcccggcgugcccgugcgcuggaagcggugaggacuagucccuguucccagagcccacuuuuuuuucuuuuuuugaaauaaaauagccugucuuucagaucuaaaaaaaaaaaaaaaaaaaaaaaaaaaaaaaaaaaaaaaaaaaaaaaaaaaaaaaaaaaaaaaaaaaaaaaaaaaaaaaaaaaaaaaaaaaaaaaaaaaa

SEQ ID NO: 15885 - RNA, 1740 nt, Artificial Sequence
  mRNA product Design a-2 (A100) comprising derived and/or modified sequence from LASV(Togo/2016/7082;Clade VI)__AMR44577__GPCmut1 (opt1)
aggagaguccgcucagccagguugcagaagcggcuuagcguguguccuaaucuucucucugcguguagguaggccugugccgcaaacaagcuuaccaugggccagaucaucaccuucuuccaggaggugccccacgucaucgaggaggugaugaacaucgugcugaucgcccucagccugcuggccauccucaagggggucuacaacguggcgaccugcggcaucaucgggcuggugacguuccuguuccucugcggccgcuccugcagccugaucuacaagggguccuacgagcugcagacccucgagcugaacauggagacccugaacaugaccaugccgcucagcugcacgaagaacuccagccaccacuacauccgggucggcaacgagaccggccuggagcugacccucaccaacacguccaucaucaaccacaaguucugcaaccugagcgacgcccacaagcgcaaccuguacgaccacgcccucauguccauccugagcaccuuccaccuguccauccccaacuucaaccaguacgaggccaugagcugcgacuucaacgggggcaagaucuccgugcaguacaaccucagccacgccuacgcgguggacgccgccgagcacugcgggaccgucgccaacggcgugcugcagaccuucaugcggauggcguggggcggguccuacaucgcccuggacagcggcugcgggaacugggacugcaucaugacguccuaccaguaccucaucauccagaacaccaccugggaggaccacugccaguucagccgccccucccccaucggcuaccuggggcugcucagccagcggacccgcgacaucuacaucagccggcgccggcgcggcacguucaccuggacccuguccgacagcgagggcaacgagacccccgggggcuacugccugacgcgguggaugcucaucgaggccgagcugaagugcuucgggaacaccgccguggccaagugcaacgagaagcacgacgaggaguucugcgacaugcugcgccucuucgacuucaacaagcaggcgauccagcggcugaaguccccggcccagaugagcauccagcugaucaacaaggccgucaacgcccucaucaacgaccagcugaucaugaagaaccaccuccgcgacaugaugugcauccccuacugcaacuacuccaaguacugguaccugaaccacaccagcuccggccggaccagccugcccaagugcuggcugguguccaacgggagcuaccucaacgagacgcacuucuccgacgacaucgagcagcaggccgacaacaugaucaccgagaugcugcagaaggaguacaucgaccgccagggcaagaccccgcugggccucguggaccuguucgucuucagcaccuccuucuaccugaucagcaucuuccuccaccugaucaagauccccacgcaccggcacaucguggggaagcccugccccaagccgcaccgccugaaccacaugggcaucugcuccugcgggcuguacaagcagcccggcgugcccacccgguggaagcgcugaggacuagucccuguucccagagcccacuuuuuuuucuuuuuuugaaauaaaauagccugucuuucagaucuaaaaaaaaaaaaaaaaaaaaaaaaaaaaaaaaaaaaaaaaaaaaaaaaaaaaaaaaaaaaaaaaaaaaaaaaaaaaaaaaaaaaaaaaaaaaaaaaaaaa

SEQ ID NO: 15886 - RNA, 1740 nt, Artificial Sequence
  mRNA product Design a-2 (A100) comprising derived and/or modified sequence from LASV(KAK-428;Clade n.d. (VII))__ANH09740__GPCmut1 (opt1)
aggagaguccgcucagccagguugcagaagcggcuuagcguguguccuaaucuucucucugcguguagguaggccugugccgcaaacaagcuuaccaugggccagaucgugaccuucuuccaggaggucccccacgugaucgaggaggugaugaacaucguccugaucgcccucagccugcuggccauccucaaggggcuguacaacuucgcgaccugcggcgugaucgggcugaucacguuccuccugcugugcggccgcuccugcagcgccaccuacaaggggcaguacgagcuccagacccuggagcugaacauggagucccucaacaugaccaugccgcugagcugcacgaagaacaacucccaccacuacauccgggccggcaacaacaccggccuggagcucacccugaccaacacgagcaucaucucccacaaguucugcaaccugagcgacgcccacaagaagaaccucuacgaccacacccugauguccaucaucaccaccuuccaccugagcauccccaacuucaaccaguacgaggccauguccugcgacuucaacgggggcaagaucagcauccaguacaaccucucccacagcuacgcgggggacgccgcccagcacugcggcacgguggccaacgggguccugcagaccuucaugcgcauggcguggggcggcuccuaccuggcccucgacagcgggugccggggcugggacugcaucaucuccagcuaccaguaccugaucauccagaacaccaccugggacgaccacugccaguucucccgccccagccccaucggguaccugggcuucgugagccagaagacgcgggacaucuacaucucccgccggcgccggggcaccuucaccuggacccucagcgacuccgaggggcacgacaugccgggcggguacugccugacgcgcuggaugcugaucgaggccgaccucaagugcuucggcaacaccgccguggccaagugcaacgagaagcacgacgaggaguucugcgacauguggcggcuguucgacuucaacaagcaggcgauccagcgccugaaggcccccgcccagaugaacauccagcucaucaacaaggccgucaacgcccugaucaacgaccagcugaugaugaagaaccaccuccgggacaucaugugcauccccuacugcaacuacagcaaguucugguaccugaacaacaccaccacggggcgcaccucccugccccggugcuggcucaucagcaacggcuccuaccugaacgagacccacuucagcgacgacaucgagcagcaggcggacaacaugaucaccgagaugcugcagaaggaguacauggaccgccagggcaagacgccgcucgggcugguggaccuguucguguucuccaccagcuucuaccucaucaccaucuuccugcaccuggucaagauccccacccaccggcacaucgugggcaagcccugccccaagccgcaccgccucaaccacauggggaucugcuccugcggccuguacaagcagcccggggugcccguccgguggaagcgcugaggacuagucccuguucccagagcccacuuuuuuuucuuuuuuugaaauaaaauagccugucuuucagaucuaaaaaaaaaaaaaaaaaaaaaaaaaaaaaaaaaaaaaaaaaaaaaaaaaaaaaaaaaaaaaaaaaaaaaaaaaaaaaaaaaaaaaaaaaaaaaaaaaaaa

SEQ ID NO: 15887 - RNA, 1740 nt, Artificial Sequence; identical to SEQ ID NO: 15881
  mRNA product Design a-2 (A100) comprising derived and/or modified sequence from LASV(Pinneo-NIG-1969;Clade I)__AIT17836__GPCmut1 (opt1)

SEQ ID NO: 15888 - RNA, 1740 nt, Artificial Sequence
  mRNA product Design a-2 (A100) comprising derived and/or modified sequence from LASV(ISTH0009-NIG-2011;Clade II)__AIT17404__GPCmut1 (opt1)
aggagaguccgcucagccagguugcagaagcggcuuagcguguguccuaaucuucucucugcguguagguaggccugugccgcaaacaagcuuaccaugggccagaucaucaccuucuuccaggaggugccccacgucaucgaggaggugaugaacaucgugcugaucgcccucagccugcuggccauccucaaggggaucuacaacgucgcgaccugcggccuguucgggcugguguccuuccuccugcugugcggccgcagcugcuccacgaccuacaaggggguguacgagcuccagacccuggagcuggacauggccagccucaacaugaccaugccgcuguccugcacgaagaacaacagccaccacuacaucauggucggcaacgagaccggccuggagcucacccugaccaacacguccaucaucaaccacaaguucugcaaccugagcgacgcccacaagaagaaccucuacgaccacgcccugauguccaucaucagcaccuuccaccuguccauccccaacuucaaccaguacgaggccaugagcugcgacuucaacgggggcaagaucuccgugcaguacaaccucagccacgcguacgccguggacgccgccaaccacugcgggaccaucgcgaacggcguccugcagaccuucaugcggauggccuggggcggguccuacaucgcccuggacagcggcugcggguccugggacugcaucaugacgagcuaccaguaccucaucauccagaacaccaccugggaggaccacugccaguucucccgccccagccccaucggcuaccuggggcugcucagccagcggacccgcgacaucuacaucucccggcgccggcgcggcacguucaccuggacccugagcgacuccgagggcaacgagacccccgggggcuacugccugacgcgguggaugcucaucgaggccgagcugaagugcuucgggaacaccgccguggcgaagugcaacgagaagcacgacgaggaguucugcgacaugcugcgccucuucgacuucaacaagcaggccauccggcgccugaagaccccggcccagaugagcauccagcugaucaacaaggccgugaacgcccucaucaacgaccagcugaucaugaagaaccaccuccgggacaucaugugcauccccuacugcaacuacuccaaguacugguaccugaaccacaccgucacgggcaagaccagccugccccgcugcuggcugguguccaacgggagcuaccucaacgagacccacuucuccgacgacaucgagcagcaggcggacaacaugaucaccgagcugcugcagaaggaguacauggaccggcagggcaagacgccgcucggccugguggaccuguucgucuucagcaccuccuucuaccucaucagcaucuuccugcaccugaucaagauccccacccaccgccacaucaccgggaagcccugccccaagccgcaccggcugaaccacaugggcaucugcuccugcgggcucuacaagcaccccggcgugcccgugaaguggaagcgcugaggacuagucccuguucccagagcccacuuuuuuuucuuuuuuugaaauaaaauagccugucuuucagaucuaaaaaaaaaaaaaaaaaaaaaaaaaaaaaaaaaaaaaaaaaaaaaaaaaaaaaaaaaaaaaaaaaaaaaaaaaaaaaaaaaaaaaaaaaaaaaaaaaaaa

SEQ ID NO: 15889 - RNA, 1740 nt, Artificial Sequence
  mRNA product Design a-2 (A100) comprising derived and/or modified sequence from LASV(ISTH2010-NIG-2012;Clade II)__AIT17482__GPCmut1 (opt1)
aggagaguccgcucagccagguugcagaagcggcuuagcguguguccuaaucuucucucugcguguagguaggccugugccgcaaacaagcuuaccaugggccagaucaucaccuucuuccaggaggugccccacgucaucgaggaggugaugaacaucgugcugaucgcccucagccugcuggccauccucaaggggaucuacaacgucgcgaccugcggccuguucgggcugguguccuuccuccugcugugcggccgcagcugcuccacgaccuacaaggggguguacgagcuccagacccuggagcuggacauggccagccucaacaugaccaugccgcuguccugcacgaagaacaacagccaccacuacaucauggucggcaacgagaccggccuggagcucacccugaccaacacguccaucaucaaccacaaguucugcaaccugagcgacgcccacaagaagaaccucuacgaccacgcccugauguccaucaucagcaccuuccaccuguccauccccaacuucaaccaguacgaggccaugagcugcgacuucaacgggggcaagaucuccgugcaguacaaccucagccacgcguacgccguggacgccgccaaccacugcgggaccaucgcgaacggcguccugcagaccuucaugcggauggccuggggcggguccuacaucgcccuggacagcggcugcggguccugggacugcaucaugacgagcuaccaguaccucaucauccagaacaucaccugggaggaccacugccaguucucccgccccagccccaucggcuaccuggggcugcucagccagcggacccgcgacaucuacaucucccggcgccggcgcggcaccuucacguggacccugagcgacuccgagggcaacgagacccccgggggcuacugccugacccgguggaugcucaucgaggccgagcugaagugcuucgggaacacggccguggcgaagugcaacgagaagcacgacgaggaguucugcgacaugcugcgccucuucgacuucaacaagcaggccauccggcgccugaagaccccggcccagaugagcauccagcugaucaacaaggccgugaacgcccucaucaacgaccagcugaucaugaagaaccaccuccgggacaucaugugcauccccuacugcaacuacuccaaguacugguaccugaaccacaccgucaccggcaagacgagccugccccgcugcuggcugguguccaacgggagcuaccucaacgagacccacuucuccgacgacaucgagcagcaggcggacaacaugaucaccgagcugcugcagaaggaguacaucgaccggcagggcaagaccccgcucggccugguggaccuguucgucuucagcacguccuucuaccucaucagcaucuuccugcaccuggugaagauccccacccaccgccacguggucgggaagcccugccccaagccgcaccggcugaaccacaugggcaucugcuccugcgggcucuacaagcaccccggcgugcccgugaaguggaagcgcugaggacuagucccuguucccagagcccacuuuuuuuucuuuuuuugaaauaaaauagccugucuuucagaucuaaaaaaaaaaaaaaaaaaaaaaaaaaaaaaaaaaaaaaaaaaaaaaaaaaaaaaaaaaaaaaaaaaaaaaaaaaaaaaaaaaaaaaaaaaaaaaaaaaaa

SEQ ID NO: 15890 - RNA, 1740 nt, Artificial Sequence
  mRNA product Design a-2 (A100) comprising derived and/or modified sequence from LASV(Lassa virus/H.sapiens-wt/NGA/2015/ISTH_0543;Clade II)__AVO03639__GPCmut1 (opt1)
aggagaguccgcucagccagguugcagaagcggcuuagcguguguccuaaucuucucucugcguguagguaggccugugccgcaaacaagcuuaccaugggccagaucaucaccuucuuccaggaggugccccacgucaucgaggaggugaugaacaucgugcugaucgcccucagccugcuggccauccucaaggggaucuacaacgucgcgaccugcggccuguucgggcugguguccuuccuccugcugugcggccgcagcugcuccacgaccuacaaggggguguacgagcuccagacccuggagcuggacauggccaaccucaacaugaccaugccgcugagcugcacgaagaacaacucccaccacuacaucauggucggcaacgagaccggccuggagcucacccugaccaacacgagcaucaucaaccacaaguucugcaaccuguccgacgcccacaagaagaaccucuacgaccacgcccugaugagcaucaucuccaccuuccaccugagcauccccaacuucaaccaguacgaggccauguccugcgacuucaacgggggcaagaucagcgugcaguacaaccucucccacaccuacgcgguggacgccgccaaccacugcgggaccaucgccaacggcguccugcagacguucaugcggauggcguggggcgggagcuacaucgcccuggacuccggcugcgggagcugggacugcaucaugaccuccuaccaguaccucgugauccagaacaccaccugggaggaccacugccaguucagccgccccucccccaucggcuaccuggggcugcucagccagcggacgcgcgacaucuacaucagccggcgccggcgcggcaccuucaccuggacccuguccgacagcgagggcaacgagacgcccgggggcuacugccugacccgguggaugcucaucgaggccgagcugaagugcuucgggaacaccgccguggccaagugcaacgagaagcacgacgaggaguucugcgacaugcugcgccucuucgacuucaacaagcaggcgauccggcgccugaagaccccggcccagauguccauccagcugaucaacaaggccgucaacgcccucaucaacgaccagcugaucaugaagaaccaccuccgggacaucaugugcauccccuacugcaacuacagcaaguacugguaccugaaccacacggugaccggcaagaccucccugccccgcugcuggcuggugagcaacggguccuaccucaacgagacccacuucagcgacgacaucgagcagcaggccgacaacaugaucacggagcugcugcagaaggaguacaucgaccggcagggcaagaccccgcucggccuggucgaccuguucguguucuccaccagcuucuaccucaucuccaucuuccugcaccuggugaagauccccacccaccgccacaucacggggaagcccugccccaagccgcaccggcugaaccacaugggcaucugcagcugcgggcucuacaagcaccccggcguccccgugaaguggaagcgcugaggacuagucccuguucccagagcccacuuuuuuuucuuuuuuugaaauaaaauagccugucuuucagaucuaaaaaaaaaaaaaaaaaaaaaaaaaaaaaaaaaaaaaaaaaaaaaaaaaaaaaaaaaaaaaaaaaaaaaaaaaaaaaaaaaaaaaaaaaaaaaaaaaaaa

SEQ ID NO: 15891 - RNA, 1740 nt, Artificial Sequence
  mRNA product Design a-2 (A100) comprising derived and/or modified sequence from LASV(Lassa virus/H.sapiens-wt/NGA/2016/ISTH_0009;Clade II)__AVO03571__GPCmut1 (opt1)
aggagaguccgcucagccagguugcagaagcggcuuagcguguguccuaaucuucucucugcguguagguaggccugugccgcaaacaagcuuaccaugggccagaucaucaccuucuuccaggaggugccccacgucaucgaggaggugaugaacaucgugcugaucgcccucagccugcuggccauccucaaggggaucuacaacgucgcgaccugcggccugcuggggcucguguccuuccugcugcucugcggccgcagcugcuccacgaccuacaaggggguguacgagcugcagacccuggagcucgacauggccagccugaacaugaccaugccgcuguccugcacgaagaacaacagccaccacuacaucauggucggcaacgagaccggccucgagcugacccugaccaacacguccaucaucaaccacaaguucugcaaccucagcgacgcccacaagaagaaccuguacgaccacgcccugauguccaucaucagcaccuuccaccucuccauccccaacuucaaccaguacgaggccaugagcugcgacuucaacgggggccggaucuccgugcaguacaaccugagccacuccuacgcgguggacgccgccaaccacugcgggaccaucgccaacggcguccugcagaccuucaugcgcauggcguggggcgggagcuacaucgcccucgacuccggcugcgggagcugggacugcaucaugacguccuaccaguaccugaucauccagaacaccaccugggaggaccacugccaguucagccggcccagccccaucggcuaccuggggcuccugucccagcgcacccgggacaucuacaucagccgccggcgccggggcacguucaccuggacccuguccgacagcgagggcaacgagacccccgggggcuacugccucacgcgcuggaugcugaucgaggccgagcugaagugcuucgggaacaccgccguggccaagugcaacgagaagcacgacgaggaguucugcgacaugcuccggcuguucgacuucaacaagcaggcgauccgccggcugaagaccccggcccagauguccauccagcucaucaacaaggccgugaacgcccugaucaacgaccagcugaucaugaagaaccaccuccgcgacaucaugugcauccccuacugcaacuacagcaaguacugguaccugaaccacaccgucacgggcaagaccucccugccccggugcuggcucgugagcaacggguccuaccugaacgagacccacuucagcgacgacaucgagcagcaggccgacaacaugaucaccgagcugcuccagaaggaguacaucgaccgccagggcaagacgccgcugggccugguggaccucuucgucuucuccaccagcuucuaccugaucuccaucuuccugcaccuggugaagauccccacccaccggcacaucaccgggaagcccugccccaagccgcaccgccucaaccacaugggcaucugcagcugcgggcuguacaaccaccccggcgugcccgucaaguggaagcggugaggacuagucccuguucccagagcccacuuuuuuuucuuuuuuugaaauaaaauagccugucuuucagaucuaaaaaaaaaaaaaaaaaaaaaaaaaaaaaaaaaaaaaaaaaaaaaaaaaaaaaaaaaaaaaaaaaaaaaaaaaaaaaaaaaaaaaaaaaaaaaaaaaaaa

SEQ ID NO: 15892 - RNA, 1740 nt, Artificial Sequence
  mRNA product Design a-2 (A100) comprising derived and/or modified sequence from LASV(Lassa virus/H.sapiens-wt/NGA/2016/ISTH_0017;Clade II)__AVO03567__GPCmut1 (opt1)
aggagaguccgcucagccagguugcagaagcggcuuagcguguguccuaaucuucucucugcguguagguaggccugugccgcaaacaagcuuaccaugggccagaucaucaccuucuuccaggaggugccccacgucaucgaggaggugaugaacaucgugcugaucgcccucagccugcuggccauccucaaggggaucuacaacgucgcgaccugcggccuguucgggcugguguccuuccuccugcugugcggccgcagcugcuccacgaccuacaaggggguguacgagcuccagacccuggagcuggacauggccagccucaacaugaccaugccgcuguccugcacgaagaacaacagccaccacuacaucauggucggcaacgagaccggccuggagcucacccugaccaacacguccaucaucaaccacaaguucugcaaccugagcgacgcccacaagaagaaccucuacgaccacgcccugauguccaucaucagcaccuuccaccuguccauccccaacuucaaccaguacgaggccaugagcugcgacuucaacgggggcaagaucuccgugcaguacaaccucagccacaccuacgcgaucgacgccgccaaccacugcgggaccaucgccaacggcgugcugcagacguucaugcggauggcguggggcggguccuacaucgcccuggacagcggcugcggguccugggacugcaucaugaccagcuaccaguaccucaucauccagaacaccaccugggaggaccacugccaguucucccgccccagccccaucggcuaccuggggcugcucagccagcggacgcgcgacaucuacaucucccggcgccggcgcggcaccuucaccuggacccugagcgacuccgagggcaacgagacgcccgggggcuacugccugacccgguggaugcucaucgaggccgagcugaagugcuucgggaacaccgccgucgccaagugcaacgagaagcacgacgaggaguucugcgacaugcugcgccucuucgacuucaacaagcaggcgauccggcgccugaagaccccggcccagaugagcauccagcugaucaacaaggccgugaacgcccucaucaacgaccagcugaucaugaagaaccaccuccgggacaucaugugcauccccuacugcaacuacuccaaguacugguaccugaaccacacggugaccggcaagaccagccugccccgcugcuggcuggucuccaacgggagcuaccucaacgagacccacuucuccgacgacaucgagcagcaggccgacaacaugaucacggagcugcugcagaaggaguacauggaccggcagggcaagaccccgcucggccugguggaccuguucguguucagcaccuccuucuaccucaucagcaucuuccugcaccugguccgcauccccacccaccggcacgugaucgggaagcccugccccaagccgcaccgccugaaccacaugggcaucugcuccugcgggcucuacaagcaccccggcgugcccgucaaguggaagcggugaggacuagucccuguucccagagcccacuuuuuuuucuuuuuuugaaauaaaauagccugucuuucagaucuaaaaaaaaaaaaaaaaaaaaaaaaaaaaaaaaaaaaaaaaaaaaaaaaaaaaaaaaaaaaaaaaaaaaaaaaaaaaaaaaaaaaaaaaaaaaaaaaaaaa

SEQ ID NO: 15893 - RNA, 1740 nt, Artificial Sequence
  mRNA product Design a-2 (A100) comprising derived and/or modified sequence from LASV(Lassa virus/H.sapiens-wt/NGA/2018/ISTH_0959;Clade II)__AVV65099__GPCmut1 (opt1)
aggagaguccgcucagccagguugcagaagcggcuuagcguguguccuaaucuucucucugcguguagguaggccugugccgcaaacaagcuuaccaugggccagaucaucaccuucuuccaggaggugccccacgucaucgaggaggugaugaacaucgugcugaucgcccucagccugcuggccauccucaaggggaucuacaacgucgugaccugcggccuguucgggcugguguccuuccuccugcugugcggccgcagcugcuccacgaccuacaagggggucuacgagcuccagacccuggagcuggacauggcgagccucaacaugaccaugccgcuguccugcacgaagaacaacagccaccacuacaucauggugggcaacgagaccggccuggagcucacccugaccaacacguccaucaucaaccacaaguucugcaaccugagcgacgcccacaagaagaaccucuacgaccacgcccugauguccaucaucagcaccuuccaccuguccauccccaacuucaaccaguacgaggccaugagcugcgacuucaacgggggcaagaucuccgugcaguacaaccucagccacgccuacgcgaucgacgccgccaaccacugcgggaccaucgccaacggcguccugcagaccuucaugcggauggcguggggcggguccuacaucgcccuggacagcggcugcggguccugggacugcaucaugacgagcuaccaguaccucaucauccagaacaccaccugggaggaccacugccaguucucccgccccagccccaucggcuaccuggggcugcucagccagcggacccgcgacaucuacaucucccggcgccggcgcggcacguucaccuggacccugagcgacuccgagggcaacgagacccccgggggcuacugccugacgcgguggaugcucaucgaggccgagcugaagugcuucgggaacaccgccguggccaagugcaacgagaagcacgacgaggaguucugcgacaugcugcgccucuucgacuucaacaagcaggcgauccggcgccugaagaccccggcccagaugagcauccagcugaucaacaaggccgugaacgcccucaucaacgaccagcugaucaugaagaaccaccuccgggacaucaugugcauccccuacugcaacuacuccaaguacugguaccugaaccacaccgucacgggcaagaccagccugccccgcugcuggcugguguccaacgggagcuaccucaacgagacccacuucuccgacgacaucgagcagcaggccgacaacaugaucaccgagcugcugcagaaggaguacaucgaccggcagggcaagacgccgcucggccugguggaccuguucgucuucagcaccuccuucuaccucaucagcaucuuccugcaccuggugaagauccccacccaccgccacgugaucgggaagcccugccccaagccgcaccggcugaaccacaugggcaucugcuccugcgggcucuacaagcaccccggcguccccgugaaguggaagcgcugaggacuagucccuguucccagagcccacuuuuuuuucuuuuuuugaaauaaaauagccugucuuucagaucuaaaaaaaaaaaaaaaaaaaaaaaaaaaaaaaaaaaaaaaaaaaaaaaaaaaaaaaaaaaaaaaaaaaaaaaaaaaaaaaaaaaaaaaaaaaaaaaaaaaa

SEQ ID NO: 15894 - RNA, 1740 nt, Artificial Sequence
  mRNA product Design a-2 (A100) comprising derived and/or modified sequence from LASV(LASV003-NIG-2008;Clade II)__AIT17580__GPCmut1 (opt1)
aggagaguccgcucagccagguugcagaagcggcuuagcguguguccuaaucuucucucugcguguagguaggccugugccgcaaacaagcuuaccaugggccagaucaucaccuucuuccaggaggugccccacgucaucgaggaggugaugaacaucgugcugaucgcccucagccugcuggccauccucaaggggaucuacaacgucgcgaccugcggccuguucgggcugguguccuuccuccugcugugcggccgcagcugcuccacgaccuacaaggggguguacgagcuccagacccuggagcuggacauggccagccucaacaugaccaugccgcuguccugcacgaagaacaacagccaccacuacaucauggucggcaacgagaccggccuggagcucacccugaccaacacguccaucaucaaccacaaguucugcaaccugagcgacgcccacaagaagaaccucuacgaccacgcccugauguccaucaucagcaccuuccaccuguccauccccaacuucaaccaguacgaggccaugagcugcgacuucaacgggggcaagaucuccgugcaguacaaccucagccacaccuacgcgguggacgccgccaaccacugcgggaccaucgccaacggcguccugcagacguucaugcggauggcguggggcggguccuacaucgcccuggacagcggcugcggguccugggacugcaucaugaccagcuaccaguaccucaucauccagaacaccaccugggaggaccacugccaguucucccgccccagccccaucggcuaccuggggcugcucagccagcggacgcgcgacaucuacaucucccggcgccggcgcggcaccuucaccuggacccugagcgacuccgagagcaacgagacgccgggcggguacugccugacccgguggaugcucaucgaggccgagcugaagugcuucggcaacaccgccguggccaagugcaacgagaagcacgacgaggaguucugcgacaugcugcgccucuucgacuucaacaagcaggcgauccggcgccugaaggcccccgcccagauguccauccagcugaucaacaaggccgugaacgcccucaucaacgaccagcugaucaugaagaaccaccuccgggacaucaugugcauccccuacugcaacuacagcaaguacugguaccugaaccacaccgucacggggcgcaccucccugccccggugcuggcuggugagcaacggcuccuaccucaacgagacccacuucagcgacgacaucgagcagcaggcggacaacaugaucaccgagcugcugcagaaggaguacauggaccgccaggggaagacgccgcucggccugguggaccuguucgucuucuccaccagcuucuaccucaucuccaucuuccugcaccuggugaagauccccacccaccggcacgugaucggcaagcccugccccaagccgcaccgccugaaccacauggggaucugcagcugcggccucuacaagcaccccgggguccccgugaaguggaagcggugaggacuagucccuguucccagagcccacuuuuuuuucuuuuuuugaaauaaaauagccugucuuucagaucuaaaaaaaaaaaaaaaaaaaaaaaaaaaaaaaaaaaaaaaaaaaaaaaaaaaaaaaaaaaaaaaaaaaaaaaaaaaaaaaaaaaaaaaaaaaaaaaaaaaa

SEQ ID NO: 15895 - RNA, 1740 nt, Artificial Sequence
  mRNA product Design a-2 (A100) comprising derived and/or modified sequence from LASV(LASV035-NIG-2009;Clade II)__AIT17588__GPCmut1 (opt1)
aggagaguccgcucagccagguugcagaagcggcuuagcguguguccuaaucuucucucugcguguagguaggccugugccgcaaacaagcuuaccaugggccagaucaucaccuucuuccaggaggugccccacgucaucgaggaggugaugaacaucgugcugaucgcccucagccugcuggccauccucaaggggaucuacaacgucgcgaccugcggccuguucgggcugguguccuuccuccugcugugcggccgcagcugcuccacgaccuacaaggggguguacgagcuccagacccuggagcuggacauggccagccucaacaugaccaugccgcuguccugcacgaagaacaacagccaccacuacaucauggucggcaacgagaccggccuggagcucacccugaccaacacguccaucaucaaccacaaguucugcaaccugagcgacgcccacaagaagaaccucuacgaccacgcccugauguccaucaucagcaccuuccaccuguccauccccaacuucaaccaguacgaggccaugagcugcgacuucaacgggggcaagaucuccgugcaguacaaccucagccacgcguacgccguggacgccgccaaccacugcgggaccaucgcgaacggcguccugcagaccuucaugcggauggccuggggcggguccuacaucgcccuggacagcggcugcggguccugggacugcaucaugacgagcuaccaguaccucaucauccagaacaccaccugggaggaccacugccaguucucccgccccagccccaucggcuaccuggggcugcucagccagcggacccgcgacaucuacaucucccggcgccggcgcggcacguucaccuggacccugagcgacuccgagggcaacgagacccccgggggcuacugccugacgcgguggaugcucaucgaggccgagcugaagugcuucgggaacaccgccguggcgaagugcaacgagaagcacgacgaggaguucugcgacaugcugcgccucuucgacuucaacaagcaggccauccggcgccugaaggccccggcccagaugagcauccagcugaucaacaaggccgugaacgcgcucaucaacgaccagcugaucaugaagaaccaccuccgggacaucaugugcauccccuacugcaacuacuccaaguacugguaccugaaccacaccgucaccggcaagacgagccugccccgcugcuggcugguguccaacgggagcuaccucaacgagacccacuucuccgacgacaucgagcagcaggccgacaacaugaucaccgagcugcugcagaaggaguacaucgaccggcagggcaagaccccgcucggccugguggaccuguucgucuucagcacguccuucuaccucaucagcaucuuccugcaccuggugaagauccccacccaccgccacgugaucgggaagcccugccccaagccgcaccggcugaaccacaugggcaucugcuccugcgggcucuacaagcaccccggcguccccgugaaguggaagcgcugaggacuagucccuguucccagagcccacuuuuuuuucuuuuuuugaaauaaaauagccugucuuucagaucuaaaaaaaaaaaaaaaaaaaaaaaaaaaaaaaaaaaaaaaaaaaaaaaaaaaaaaaaaaaaaaaaaaaaaaaaaaaaaaaaaaaaaaaaaaaaaaaaaaaa

SEQ ID NO: 15896 - RNA, 1740 nt, Artificial Sequence
  mRNA product Design a-2 (A100) comprising derived and/or modified sequence from LASV(LASV1000-NIG-2009;Clade II)__AIT17782__GPCmut1 (opt1)
aggagaguccgcucagccagguugcagaagcggcuuagcguguguccuaaucuucucucugcguguagguaggccugugccgcaaacaagcuuaccaugggccagaucaucaccuucuuccaggaggugccccacgucaucgaggaggugaugaacaucgugcugaucgcccucagccugcuggccauccucaaggggaucuacaacgucgcgaccugcggccuguucgggcugguguccuuccuccugcugugcggccgcagcugcuccacgaccuacaaggggguguacgagcuccagacccuggagcuggacauggccagccucaacaugaccaugccgcuguccugcacgaagaacaacagccaccacuacaucauggucggcaacgagaccggccuggagcucacccugaccaacacguccaucaucaaccacaaguucugcaaccugagcgacgcccacaagaagaaccucuacgaccacgcccugauguccaucaucagcaccuuccaccuguccauccccaacuucaaccaguacgaggccaugagcugcgacuucaacgggggcaagaucuccgugcaguacaaccucagccacaccuacgcgguggacgccgccaaccacugcgggaccaucgccaacggcguccugcagacguucaugcggauggcguggggcggguccuacaucgcccuggacagcggcugcggguccugggacugcaucaugaccagcuaccaguaccucaucauccagaacaccaccugggaggaccacugccaguucucccgccccagccccaucggcuaccuggggcugcucagccagcggacgcgcgacaucuacaucucccggcgccggcgcggcaccuucaccuggacccugagcgacuccgagggcaacgagacgcccgggggcuacugccugacccgguggaugcucaucgaggccgagcugaagugcuucgggaacaccgccguggccaagugcaacgagaagcacgacgaggaguucugcgacaugcugcgccucuucgacuucaacaagcaggcgaucaagcggcugaagaccccggcccagaugagcauccagcugaucaacaaggccgugaacgcccucaucaacgaccagcugaucaugaagaaccaccuccgcgacaucaugugcauccccuacugcaacuacuccaaguacugguaccugaaccacacggucaccggcaagaccagccugccccggugcuggcugguguccaacgggagcuaccucaacgagacccacuucuccgacgacaucgagcagcaggccgacaacaugaucacggagcugcugcagaaggaguacaucgaccgccagggcaagaccccgcucggccugguggaccuguucgucuucagcaccuccuucuaccucaucagcaucuuccugcaccuggugaagauccccacccaccggcacguggucgggaagcccugccccaagccgcaccgccugaaccacaugggcaucugcuccugcgggcucuacaagcaccccggcgugcccgugaaguggaagcggugaggacuagucccuguucccagagcccacuuuuuuuucuuuuuuugaaauaaaauagccugucuuucagaucuaaaaaaaaaaaaaaaaaaaaaaaaaaaaaaaaaaaaaaaaaaaaaaaaaaaaaaaaaaaaaaaaaaaaaaaaaaaaaaaaaaaaaaaaaaaaaaaaaaaa

SEQ ID NO: 15897 - RNA, 1740 nt, Artificial Sequence
  mRNA product Design a-2 (A100) comprising derived and/or modified sequence from LASV(LASV221-NIG-2010;Clade II)__AIT17624__GPCmut1 (opt1)
aggagaguccgcucagccagguugcagaagcggcuuagcguguguccuaaucuucucucugcguguagguaggccugugccgcaaacaagcuuaccaugggccagaucaucaccuucuuccaggaggugccccacgucaucgaggaggugaugaacaucgugcugaucgcccucagccugcuggccauccucaaggggaucuacaacgucgcgaccugcggccuguucgggcugguguccuuccuccugcugugcggccgcagcugcuccacgaccuacaaggggguguacgagcuccagacccuggagcuggacauggccagccucaacaugaccaugccgcuguccugcacgaagaacaacagccaccacuacaucauggucggcaacgagaccggccuggagcucacccugaccaacacguccaucaucaaccacaaguucugcaaccugagcgacgcccacaagaagaaccucuacgaccacgcccugauguccaucaucagcaccuuccaccuguccauccccaacuucaaccaguacgaggccaugagcugcgacuucaacgggggcaagaucuccgugcaguacaaccucagccacaccuacgcgaucgacgccgccaaccacugcgggaccaucgccaacggcgugcugcagacguucaugcggauggcguggggcggguccuacaucgcccuggacagcggcugcggguccugggacugcaucaugaccagcuaccaguaccucaucauccagaacaccaccugggaggaccacugccaguucucccgccccagccccaucggcuaccuggggcugcucagccagcggacgcgcgacaucuacaucucccggcgccggcgcggcaccuucaccuggacccugagcgacuccgagggcaacgagacgcccgggggcuacugccugacccgguggaugcucaucgaggccgagcugaagugcuucgggaacaccgccgucgccaagugcaacgagaagcacgacgaggaguucugcgacaugcugcgccucuucgacuucaacaagcaggcgauccggcgccugaagaccccggcccagaugagcauccagcugaucaacaaggccgugaacgcccucaucaacgaccagcugaucaugaagaaccaccuccgggacaucaugugcauccccuacugcaacuacuccaaguacugguaccugaaccacacggugaccggcaagaccagccugccccgcugcuggcuggucuccaacgggagcuaccucaacgagacccacuucuccgacgacaucgagcagcaggccgacaacaugaucacggagaugcugcagaaggaguacauggaccggcagggcaagaccccgcugggccucguggaccuguucguguucagcaccuccuucuaccugaucagcaucuuccuccaccuggucaagauccccacccaccgccacgugaucgggaagcccugccccaagccgcaccggcugaaccacaugggcaucugcuccugcgggcuguacaagcaccccggcgugcccgucaaguggaagcgcugaggacuagucccuguucccagagcccacuuuuuuuucuuuuuuugaaauaaaauagccugucuuucagaucuaaaaaaaaaaaaaaaaaaaaaaaaaaaaaaaaaaaaaaaaaaaaaaaaaaaaaaaaaaaaaaaaaaaaaaaaaaaaaaaaaaaaaaaaaaaaaaaaaaaa

SEQ ID NO: 15898 - RNA, 1740 nt, Artificial Sequence
  mRNA product Design a-2 (A100) comprising derived and/or modified sequence from LASV(LASV237-NIG-2010;Clade II)__AIT17638__GPCmut1 (opt1)
aggagaguccgcucagccagguugcagaagcggcuuagcguguguccuaaucuucucucugcguguagguaggccugugccgcaaacaagcuuaccaugggccagaucaucaccuucuuccaggaggugccccacgucaucgaggaggugaugaacaucgugcugaucgcccucagccugcuggccauccucaaggggaucuacaacgucgcgaccugcggccuguucgggcugguguccuuccuccugcugugcggccgcagcugcuccacgaccuacaaggggguguacgagcuccagacccuggagcuggacauggccagccucaacaugaccaugccgcuguccugcacgaagaacaacagccaccacuacaucauggucggcaacgagaccggccuggagcucacccugaccaacacguccaucaucaaccacaaguucugcaaccugagcgacgcccacaagaaggaccucuacgaccacgcccugauguccaucaucagcaccuuccaccuguccauccccaacuucaaccaguacgaggccaugagcugcgacuucaacgggggcaagaucuccgugcaguacaaccucagccacaccuacgcgguggacgccgccaaccacugcgggaccaucgccaacggcguccugcagacguucaugcggauggcguggggcggguccuacaucgcccuggacagcggcugcggguccugggacugcaucaugaccagcuaccaguaccucaucauccagaacaccaccugggaggaccacugccaguucucccgccccagccccaucggcuaccuggggcugcucagccagcggacgcgcgacaucuacaucucccggcgccggcgcggcaccuucaccuggacccugagcgacuccgagggcaacgagacgcccgggggcuacugccugacccgguggaugcucaucgaggccgagcugaagugcuucgggaacaccgccguggccaagugcaacgagaagcacgacgaggaguucugcgacaugcugcgccucuucgacuucaacaagcaggcgauccggcgccugaagaccccggcccagaugagcauccagcugaucaacaaggccgugaacgcccucaucaacgaccagcugaucaugaagaaccaccuccgggacaucaugugcauccccuacugcaacuacuccaaguacugguaccugaaccacacggucaccggcaagaccagccugccccgcugcuggcugguguccaacgggagcuaccucaacgagacccacuucuccgacgacaucgagcagcaggccgacaacaugaucacggagcugcugcagaaggaguacauggaccggcagggcaagaccccgcucggccugguggaccuguucgucuucagcaccuccuucuaccucaucagcaucuuccugcaccugaucaagauccccacccaccgccacaucacggggaagcccugccccaagccgcaccggcugaaccacaugggcaucugcuccugcgggcucuacaagcaccccggcgugcccgugaaguggaagcgcugaggacuagucccuguucccagagcccacuuuuuuuucuuuuuuugaaauaaaauagccugucuuucagaucuaaaaaaaaaaaaaaaaaaaaaaaaaaaaaaaaaaaaaaaaaaaaaaaaaaaaaaaaaaaaaaaaaaaaaaaaaaaaaaaaaaaaaaaaaaaaaaaaaaaa

SEQ ID NO: 15899 - RNA, 1740 nt, Artificial Sequence
  mRNA product Design a-2 (A100) comprising derived and/or modified sequence from LASV(LASV253-NIG-2011;Clade II)__AIT17670__GPCmut1 (opt1)
aggagaguccgcucagccagguugcagaagcggcuuagcguguguccuaaucuucucucugcguguagguaggccugugccgcaaacaagcuuaccaugggccagaucaucaccuucuuccaggaggugccccacgucaucgaggaggugaugaacaucgugcugaucgcccucagccugcuggccauccucaaggggaucuacaacgucgcgaccugcggccuguucgggcugguguccuuccuccugcugugcggccgcagcugcuccacgaccuacaaggggguguacgagcuccagacccuggagcuggacauggccagccucaacaugaccaugccgcuguccugcacgaagaacaacagccaccacuacaucauggucggcaacgagaccggccuggagcucacccugaccaacacguccaucaucaaccacaaguucugcaaccugagcgacgcccacaagaagaaccucuacgaccacgcccugauguccaucaucagcaccuuccaccuguccauccccaacuucaaccaguacgaggccaugagcugcgacuucaacgggggcaagaucuccgugcaguacaaccucagccacaccuacgcgguggacgccgccaaccacugcgggaccaucgccaacggcguccugcagacguucaugcggauggcguggggcggguccuacaucgcccuggacagcggcugcggguccugggacugcaucaugaccagcuaccaguaccucaucauccagaacaccaccugggaggaccacugccaguucucccgccccagccccaucggcuaccuggggcugcucagccagcggacgcgcgacaucuacaucucccggcgccggcgcggcaccuucaccuggacccugagcgacuccgagggcaacgagacgcccgggggcuacugccugacccgguggaugcucaucgaggccgagcugaagugcuucgggaacaccgccguggccaagugcaacgagaagcacgacgaggaguucugcgacaugcugcgccucuucgacuucaacaagcaggcgauccggcgccugaaggccccggcccagaugagcauccagcugaucaacaaggccgugaacgcccucaucaacgaccagcugaucaugaagaaccaccuccgggacaucaugugcauccccuacugcaacuacuccaaguacugguaccugaaccacaccgucacgggccgcaccagccugccccggugcuggcugguguccaacgggagcuaccucaacgagacccacuucuccgacgacaucgagcagcaggcggacaacaugaucaccgagcugcugcagaaggaguacaucgaccgccagggcaagacgccgcucggccugguggaccuguucgucuucagcaccuccuucuaccucaucagcaucuuccugcaccuggugaagauccccacccaccggcacaucaucgggaagcccugccccaagccgcaccgccugaaccacaugggcaucugcuccugcgggcucuacaagcaccccggcgugcccgucaaguggaagcggugaggacuagucccuguucccagagcccacuuuuuuuucuuuuuuugaaauaaaauagccugucuuucagaucuaaaaaaaaaaaaaaaaaaaaaaaaaaaaaaaaaaaaaaaaaaaaaaaaaaaaaaaaaaaaaaaaaaaaaaaaaaaaaaaaaaaaaaaaaaaaaaaaaaaa

SEQ ID NO: 15900 - RNA, 1740 nt, Artificial Sequence
  mRNA product Design a-2 (A100) comprising derived and/or modified sequence from LASV(LASV254-NIG-2011;Clade II)__AIT17674__GPCmut1 (opt1)
aggagaguccgcucagccagguugcagaagcggcuuagcguguguccuaaucuucucucugcguguagguaggccugugccgcaaacaagcuuaccaugggccagaucaucaccuucuuccaggaggugccccacgucaucgaggaggugaugaacaucgugcugaucgcccucagccugcuggccauccucaaggggaucuacaacgucgcgaccugcggccuguucgggcugguguccuuccuccugcugugcggccgcagcugcuccacgaccuacaaggggguguacgagcuccagacccuggagcuggacaugaccaaccucaacaugacgaugccgcugagcugcaccaagaacaacucccaccacuacaucauggucggcaacgagaccggccuggagcucacccugacgaacaccagcaucaucaaccacaaguucugcaaccuguccgacgcccacaagaagaaccucuacaaccacgcccugaugagcaucaucuccaccuuccaccugagcauccccaacuucaaccaguacgaggccauguccugcgacuucaacgggggcaagaucagcgugcaguacaaccucucccacagcuacgccguggacgcggccaaccacugcgggaccaucgccaacggcguccugcagacguucaugcggauggccuggggcggguccuacaucgcgcuggacagcggcugcgggaacugggacugcaucaugaccuccuaccaguaccucaucauccagaacaccaccugggaggaccacugccaguucagccgccccucccccaucggcuaccuggggcugcucagccagcggacgcgcgacaucuacaucagccggcgccggcgcggcaccuucaccuggacccuguccgacagcgagggcaacgagacgcccgggggcuacugccugacccgguggaugcucaucgaggccgagcugaagugcuucgggaacaccgccguggccaagugcaacgagaagcacgacgaggaguucugcgacaugcugcgccucuucgacuucaacaagcaggccauccggcgccugaagaccccggcgcaggccaacauccagcugaucaacaaggccgugaacgcccucaucaacgaccagcugaucaugaagaaccaccuccgggacaucaugugcauccccuacugcaacuacuccaaguacugguaccugaaccacacggucaccggcaagaccagccugccccgcugcuggcugguguccaacgggagcuaccucaacgagacccacuucuccgacgacaucgagcagcaggccgacaacaugaucacggagcugcugcagaaggaguacauggaccggcagggcaagaccccgcucggccugguggaccuguucgucuucagcaccuccuucuaccucaucagcaucuuccugcaccuggugaagauccccacccaccgccacgugaucgggaagcccugccccaagccgcaccggcugaaccacaugggcaucugcuccugcgggcucuacaagcaccccggcguccccgugaaguggaagcgcugaggacuagucccuguucccagagcccacuuuuuuuucuuuuuuugaaauaaaauagccugucuuucagaucuaaaaaaaaaaaaaaaaaaaaaaaaaaaaaaaaaaaaaaaaaaaaaaaaaaaaaaaaaaaaaaaaaaaaaaaaaaaaaaaaaaaaaaaaaaaaaaaaaaaa

SEQ ID NO: 15901 - RNA, 1740 nt, Artificial Sequence
  mRNA product Design a-2 (A100) comprising derived and/or modified sequence from LASV(Nig08-A19;Clade III)__ADU56618__GPCmut1 (opt1)
aggagaguccgcucagccagguugcagaagcggcuuagcguguguccuaaucuucucucugcguguagguaggccugugccgcaaacaagcuuaccaugggccagaucgugaccuucuuccaggaggucccccacgugaucgaggaggugaugaacaucguccugaucgcccucagcauccuggccauccugaaggggcucuacaacaucgcgaccugcggccugaucgggcuggugacguuccuccugcuguccggccgcagcugcuccaugaccuacaaggggguguacgagcuccagacccuggagcugaacaugaacacccucaacaugacgaugccgcugagcugcaccaagaacaacucccaccacuacaucauggucggcaacgagaccggccuggagcucacccugacgaacaccagccugcuccaccacaaguucugcaaccuguccgacgcccacaagaagaaccuguacgaccacacccucaugagcaucaucuccaccuuccaccugagcauccccaacuucaaccaguacgaggccauguccugcgacuucaacgggggcaagaucacggugcaguacaaccugagccacuccuacgccaucgacgccgcgaaccacugcgggaccguggccaacggcguccuccagaccuucaugcggauggccuggggcgggagcuacaucgcccuggacuccggcugcgggaagugggacugcaucaugaccagcuaccaguaccugaucauccagaacacgaccugggaggaccacugccaguucucccgccccagccccaucggcuaccucgggcugcugucccagcggacccgcgacaucuacaucagccggcgccggcgcggcaccuucacguggacccucagcgacuccgagggcaacgagacccccgggggcuacugccugacccgguggaugcugaucgaggcggagcucaagugcuucgggaacacggccguggccaagugcaacgagaagcacgacgaggaguucugcgacaugcugcgccuguucgacuucaacaagcaggccauccggcgccucaaggccccggcgcagaugagcauccagcugaucaacaaggccgugaacgcccugaucaacgaccagcucaucaugaagaaccaccuccgggacaucaugugcauccccuacugcaacuacuccaaguacugguaccugaaccacaccagcaccggccgcaccucccugccccggugcuggcuggucagcaacggguccuaccugaacgagacgcacuucagcgacgacaucgagcagcaggccgacaacaugaucaccgagaugcuccagaaggaguaccuggaccgccagggcaagaccccgcugggccucguggaccuguucguguucuccaccagcuucuaccugaucuccaucuuccugcaccucgucaagauccccacgcaccggcacaucguggggaagcccugccccaagccgcaccgccugaaccacaugggcaucugcagcugcgggcuguacaagcagcccggcgugcccguccgguggaagcgcugaggacuagucccuguucccagagcccacuuuuuuuucuuuuuuugaaauaaaauagccugucuuucagaucuaaaaaaaaaaaaaaaaaaaaaaaaaaaaaaaaaaaaaaaaaaaaaaaaaaaaaaaaaaaaaaaaaaaaaaaaaaaaaaaaaaaaaaaaaaaaaaaaaaaa

SEQ ID NO: 15902 - RNA, 1743 nt, Artificial Sequence
  mRNA product Design a-2 (A100) comprising derived and/or modified sequence from LASV(G1180-SLE-2010;Clade IV)__AIT17168__GPCmut1 (opt1)
aggagaguccgcucagccagguugcagaagcggcuuagcguguguccuaaucuucucucugcguguagguaggccugugccgcaaacaagcuuaccaugggccagaucgugaccuucuuccaggaggucccccacgugaucgaggaggugaugaacaucguccugaucgcccucagcauccuggccgugcugaaggggcucuacaacuucgcgaccugcggccugguggggcugcucacguuccugcugcucugcggccgcuccugcaccgccagccgguacaagggggucuacgagcugcagacccuggagcucaacauggagacccugaacaugacgaugccgcuguccugcaccaagaacaacagccaccacuacaucauggugggcaacgagaccggccucgagcugacccugacgaacaccuccaucaucaaccacaaguucugcaaccucagcgacgcccacaagaagaaccuguacgaccacgcccugauguccaucaucagcaccuuccaccucuccauccccaacuucaaccaguacgaggccaugagcugcgacuucaacgggggcaagaucuccgugcaguacaaccugagccacuccuacgcgggggacgccgccaaccacugcggcaccgucgccaacggggugcugcagacguucaugcgcauggcguggggcggcagcuacaucgcccucgacuccgggugcggcagcugggacugcaucaugaccuccuaccaguaccugaucauccagaacaccaccugggaggaccacugccaguucagccggcccucccccaucggguaccugggccuccugagccagcgcacgcgggacaucuacaucagccgccggcgccggggcaccuucaccuggacccuguccgacagcgaggggaaggacacgccgggcggguacugccucacccgcuggaugcugaucgaggccgagcugaagugcuucggcaacaccgccguggccaagugcaacgagaagcacgacgaggaguucugcgacaugcuccggcuguucgacuucaacaagcaggcgauccagcgccugaaggcccccgcccagauguccauccagcucaucaacaaggccgucaacgcccugaucaacgaccagcugaucaugaagaaccaccuccgggacaucaugugcauccccuacugcaacuacagcaaguacugguaccugaaccacaccacgaccgggaagaccucccugcccaagugcuggcucgugagcaacggcuccuaccugaacgagacccacuucagcgacgacaucgagcagcaggcggacaacaugaucacggagaugcugcagaaggaguacauggagcgccagggcaagaccccgcucgggcugguggaccuguucgucuucuccaccagcuucuaccucaucuccaucuuccugcaccuggugaagauccccacccaccggcacaucgugggcaagagcugccccaagccccaccgccugaaccacauggggaucugcuccugcggccucuacaagcagccggggguccccgugaaguggaagcggugaggacuagucccuguucccagagcccacuuuuuuuucuuuuuuugaaauaaaauagccugucuuucagaucuaaaaaaaaaaaaaaaaaaaaaaaaaaaaaaaaaaaaaaaaaaaaaaaaaaaaaaaaaaaaaaaaaaaaaaaaaaaaaaaaaaaaaaaaaaaaaaaaaaaa

SEQ ID NO: 15903 - RNA, 1743 nt, Artificial Sequence
  mRNA product Design a-2 (A100) comprising derived and/or modified sequence from LASV(G1442-SLE-2011;Clade IV)__AIT17180__GPCmut1 (opt1)
aggagaguccgcucagccagguugcagaagcggcuuagcguguguccuaaucuucucucugcguguagguaggccugugccgcaaacaagcuuaccaugggccagaucgugaccuucuuccaggaggucccccacgugaucgaggaggugaugaacaucguccugaucgcccucagcauccuggccgugcugaaggggcucuacaacguggcgaccugcggccugaucgggcuggucacguuccuccugcugugcggccgcuccugcaccaccacccucuacaaggggguguacgagcugcagacgcuggagcucaacauggagacccugaacaugaccaugccgcugagcugcaccaagaacaacucccaccacuacauccgggugggcaacgagacgggccucgagcugacccugaccaacaccagcaucaucaaccacaaguucugcaaccucuccgacgcccacaagaagaaccuguacgaccacgcccugaugagcaucaucuccacguuccaccucagcauccccaacuucaaccaguacgaggccauguccugcgacuucaacgggggcaagaucagcguccaguacaaccugucccacagcuacgccggggacgcggccaaccacugcggcaccguggccaacggggugcugcagaccuucaugcgcauggccuggggcggcuccuacaucgcgcucgacagcgggugcggcaacugggacugcaucaugaccuccuaccaguaccugaucauccagaacacgaccugggacgaccacugccaguucagccggcccucccccaucggguaccugggccuccugagccagcgcacccgggacgucuacaucucccgccggcgccggggcaccuucacguggacccugagcgacagcgaggggaaggacaccccgggcggguacugccucacccgcuggaugcugaucgaggccgagcugaagugcuucggcaacacggccguggccaagugcaacgagaagcacgacgaggaguucugcgacaugcuccggcuguucgacuucaacaagcaggccauccagcgccugaaggcgcccgcccagauguccauccagcucaucaacaaggccgugaacgcccugaucaacgaccagcugaucaugaagaaccaccuccgggacaucaugugcauccccuacugcaacuacagcaaguacugguaccugaacaacaccgccaccgggaagaccucccugcccaagugcuggcucaucagcaacggcuccuaccugaacgagacgcacuucagcgacgacaucgagcaggaggcggacaacaugaucaccgagaugcugcagaaggaguacauggagcgccagggcaagaccccgcucgggcuggucgaccuguucguguucuccaccagcuucuaccucaucuccaucuuccugcaccuggugaagauccccacgcaccggcacaucgucggcaagagcugccccaagccccaccgccugaaccacauggggaucugcuccugcggccucuacaagcagccgggggugcccgugcgguggaagcgcugaggacuagucccuguucccagagcccacuuuuuuuucuuuuuuugaaauaaaauagccugucuuucagaucuaaaaaaaaaaaaaaaaaaaaaaaaaaaaaaaaaaaaaaaaaaaaaaaaaaaaaaaaaaaaaaaaaaaaaaaaaaaaaaaaaaaaaaaaaaaaaaaaaaaa

SEQ ID NO: 15904 - RNA, 1743 nt, Artificial Sequence
  mRNA product Design a-2 (A100) comprising derived and/or modified sequence from LASV(G3010-SLE-2013;Clade IV)__AIT17344__GPCmut1 (opt1)
aggagaguccgcucagccagguugcagaagcggcuuagcguguguccuaaucuucucucugcguguagguaggccugugccgcaaacaagcuuaccaugggccagaucgugaccuucuuccaggaggucccccacgugaucgaggaggugaugaacaucguccugaucgcccucagcauccuggccgugcugaaggggcucuacaacuucgcgaccugcggccugguggggcuggucacguuccuccugcugugcggccgcuccugcaccaccagccucuacaaggggguguacgagcugcagacccuggagcucaacauggagacgcugaacaugaccaugccgcuguccugcaccaagaacaacagccaccacuacaucauggugggcaacgagaccggccucgagcugacgcugaccaacaccuccaucaucaaccacaaguucugcaaccucagcgacgcccacaagaagaaccuguacaaccacgcccugauguccaucaucagcaccuuccaccucuccauccccaacuucaaccaguacgaggccaugagcugcgacuucaacgggggcaagaucuccguccaguacaaccugagccacuccuacgccggggacgcggccagccacugcggcacgguggccaacggggugcugcagaccuucaugcggauggccuggggcggcuccuacaucgcgcucgacagcgggugcggcaagugggacugcaucaugaccuccuaccaguaccugaucauccagaacaccacgugggaggaccacugccaguucagccgccccucccccaucggguaccugggccuccugagccagcggacccgcgacaucuacaucagccggcgccggcgcggcaccuucaccuggacgcuguccgacagcgaggggaaggacaccccgggcggguacugccucacccgguggaugcugaucgaggccgagcugaagugcuucggcaacaccgccgucgccaagugcaacgagaagcacgacgaggaguucugcgacaugcuccgccuguucgacuucaacaagcaggccauccagcggcugaagacgcccgcgcagauguccauccagcucaucaacaaggccgugaacgcccugaucaacgaccagcugaucaugaagaaccaccuccgcgacaucaugugcauccccuacugcaacuacagcaaguacugguaccugaaccacaccaccaccgggaagacgucccugcccaagugcuggcucgugagcaacggcuccuaccugaacgagacccacuucagcgacgacaucgagcagcaggccgacaacaugaucaccgagaugcugcagaaggaguacauggagcggcagggcaagaccccgcucgggcuggucgaccuguucguguucuccacgagcuucuaccucaucuccaucuuccugcaccuggugaagauccccacccaccgccacaucgucggcaagagcugccccaagccccaccggcugaaccacauggggaucugcuccugcggccucuacaagcagccgggggugcccgugcgcuggaagcggugaggacuagucccuguucccagagcccacuuuuuuuucuuuuuuugaaauaaaauagccugucuuucagaucuaaaaaaaaaaaaaaaaaaaaaaaaaaaaaaaaaaaaaaaaaaaaaaaaaaaaaaaaaaaaaaaaaaaaaaaaaaaaaaaaaaaaaaaaaaaaaaaaaaaa

SEQ ID NO: 15905 - RNA, 1743 nt, Artificial Sequence
  mRNA product Design a-2 (A100) comprising derived and/or modified sequence from LASV(G502-SLE-2009;Clade IV)__AIT17126__GPCmut1 (opt1)
aggagaguccgcucagccagguugcagaagcggcuuagcguguguccuaaucuucucucugcguguagguaggccugugccgcaaacaagcuuaccaugggccagaucgugaccuucuuccaggaggucccccacgugaucgaggaggugaugaacaucguccugaucgcccucagcauccuggccgugcugaaggggcucuacaacuucgcgaccugcggccugguggggcugcucacguuccugcugcucugcggccgcuccugcaccaccgggcuguacaagggcgucuacgagcugcagacccucgagcugaacauggagacgcugaacaugaccaugccgcucagcugcaccaagaacaacucccaccacuacaucauggugggcaacgagaccgggcuggagcugacgcucaccaacaccagcaucaucaaccacaaguucugcaaccuguccgacgcccacaagaagaaccuguacgaccacgcccucaugagcaucaucuccaccuuccaccugagcauccccaacuucaaccaguacgaggccauguccugcgacuucaacggcgggaagaucagcgugcaguacaaccugucccacagcuacgccggcgacgcggccgaccacugcgggacggucgccaacggcgugcuccagaccuucaugcggauggccuggggcggguccuacaucgcgcuggacagcggcugcgggcgcugggacugcaucaugaccuccuaccaguaccugaucauccagaacaccacgugggaggaccacugccaguucagccggcccucccccaucggcuaccucggccugcugagccagcgcacccgggacaucuacaucucccgccggcgccgggggaccuucaccuggacgcucagcgacagcgagggcaaggacacccccgggggcuacugccugacccgcuggaugcugaucgaggccgagcucaagugcuucgggaacaccgccguggccaagugcaacgagaagcacgacgaggaguucugcgacaugcugcggcuguucgacuucaacaagcaggccauccagcgccucaaggcgccggcccagauguccauccagcugaucaacaaggccgucaacgcccugaucaacgaccagcucgugaugaagaaccaccuccgggacaucaugugcauccccuacugcaacuacagccgcuacugguaccugaaccacacgaccaccggccggaccucccugcccaagugcuggcuggugagcaacggcuccuaccugaacgagacgcacuucagcgacgacaucgagcagcaggccgacaacaugaucaccgagaugcuccagaaggaguacauggagcgccaggggaagaccccgcugggccuggucgaccucuucguguucuccaccagcuucuaccugaucuccaucuuccugcaccuggugaagauccccacgcaccggcacaucgucggcaagagcugccccaagccccaccgccucaaccacauggggaucugcuccugcgggcuguacaagcagccgggcgugcccgugaaguggaagcggugaggacuagucccuguucccagagcccacuuuuuuuucuuuuuuugaaauaaaauagccugucuuucagaucuaaaaaaaaaaaaaaaaaaaaaaaaaaaaaaaaaaaaaaaaaaaaaaaaaaaaaaaaaaaaaaaaaaaaaaaaaaaaaaaaaaaaaaaaaaaaaaaaaaaa

SEQ ID NO: 15906 - RNA, 1743 nt, Artificial Sequence
  mRNA product Design a-2 (A100) comprising derived and/or modified sequence from LASV(G733-SLE-2010;Clade IV)__AIT17154__GPCmut1 (opt1)
aggagaguccgcucagccagguugcagaagcggcuuagcguguguccuaaucuucucucugcguguagguaggccugugccgcaaacaagcuuaccaugggccagaucgugaccuucuuccaggaggucccccacgugaucgaggaggugaugaacaucguccugaucgcccucagcauccuggccgugcugaaggggcucuacaacuucgcgaccugcggcaucguggggcuggucuccuuccugcuccugugcggccgcagcugcacgaccucccuguacaaggggguguacgagcuccagacccuggagcugaacauggagacccucaacaugacgaugccgcugagcugcaccaagaacaacucccaccacuacaucauggugggcaacgagaccggccuggagcucacccugacgaacaccagcaucaucaaccacaaguucugcaaccuguccgacgcccacaagaagaaccucuacgaccacgcccugaugagcaucaucuccaccuuccaccugagcauccccaacuucaaccaguacgaggccauguccugcgacuucaacgggggcaagaucagcguccaguacaaccucucccacagcuacgccggggacgcggccaaccacugcggcaccaucgccaacggggugcugcagacguucaugcggauggccuggggcggcuccuacaucgcgcuggacagcgggugcgaccgcugggacugcaucaugaccuccuaccaguaccucaucauccagaacaccaccugggaggaccacugccaguucagccggcccucccccaucggcuaccuggggcugcucagccagcgcacgcgggacaucuacaucagccgccggcgccggggcaccuucaccuggacccuguccgacagcgagggcaaggacacgcccgggggcuacugccugacccgcuggaugcucaucgaggccgagcugaagugcuucgggaacaccgccguggccaagugcaacgagaagcacgacgaggaguucugcgacaugcugcggcuguucgacuucaacaagcaggccauccagcgccugaaggcgccggcccagauguccauccagcugaucaacaaggccgucaacgcccucaucaacgaccagcugaucaugaagaaccaccuccgggacaucaugugcauccccuacugcaacuacagcaaguacugguaccucaaccacaccacgaccggcaagaccucccugcccaagugcuggcuggugagcaacggguccuaccucaacgagacccacuucagcgacgacaucgagcagcaggccgacaacaugaucacggagaugcugcagaaggaguacauggagcgccagggcaagaccccgcugggccucguggaccuguucgucuucuccaccagcuucuaccugaucuccaucuuccuccaccuggugaagauccccacccaccggcacguggucggcaagagcugccccaagccccaccgccugaaccacauggggaucugcuccugcgggcuguacggccagccgggggugcccgugaaguggaagcggugaggacuagucccuguucccagagcccacuuuuuuuucuuuuuuugaaauaaaauagccugucuuucagaucuaaaaaaaaaaaaaaaaaaaaaaaaaaaaaaaaaaaaaaaaaaaaaaaaaaaaaaaaaaaaaaaaaaaaaaaaaaaaaaaaaaaaaaaaaaaaaaaaaaaa

SEQ ID NO: 15907 - RNA, 1743 nt, Artificial Sequence
  mRNA product Design a-2 (A100) comprising derived and/or modified sequence from MOPV/LASV reassortant(IGS-1;Clade IV)__AFY05576__GPCmut1 (opt1)
aggagaguccgcucagccagguugcagaagcggcuuagcguguguccuaaucuucucucugcguguagguaggccugugccgcaaacaagcuuaccaugggccagaucgugaccuucuuccaggaggucccccacgugaucgaggaggugaugaacaucguccugaucgcccucagcgugcuggccgugcugaaggggcucuacaacuucgcgaccugcggccuggucgggcuggugacguuccuccugcugugcggccgcuccugcaccaccagccucuacaaggggguguacgagcugcagacccuggagcucaacauggagacgcugaacaugaccaugccgcuguccugcaccaagaacaacagccaccacuacaucauggucggcaacgagaccggccucgagcugacgcugaccaacaccuccaucaucaaccacaaguucugcaaccucagcgacgcccacaagaagaaccuguacgaccacgcccugauguccaucaucagcaccuuccaccucuccauccccaacuucaaccaguacgaggccaugagcugcgacuucaacgggggcaagaucuccgugcaguacaaccugagccacuccuacgccggggacgcggccaaccacugcggcacgguggccaacgggguccugcagaccuucaugcggauggccuggggcggcagcuacaucgcgcucgacuccgggugcggcaacugggacugcaucaugaccagcuaccaguaccugaucauccagaacaccacgugggaggaccacugccaguucucccgccccagccccaucggguaccugggccuccugucccagcggacccgcgacaucuacaucagccggcgccggcgcggcaccuucaccuggacgcugagcgacuccgagggggaggacaccccgggcggguacugccucacccgguggaugcugaucgaggccgagcugaagugcuucggcaacaccgccguggccaagugcaacgagaagcacgacgaggaguucugcgacaugcuccgccuguucgacuucaacaagcaggccauccagcggcugaaggcgcccgcccagaugagcauccagcucaucaacaaggccgugaacgcccugaucaacgaccagcugaucaugaagaaccaccuccgcgacaucaugugcauccccuacugcaacuacuccaaguacugguaccugaaccacacgaccaccgggcggaccagccugcccaagugcuggcucgucuccaacggcagcuaccugaacgagacgcacuucuccgacgacaucgagcagcaggccgacaacaugaucaccgagaugcugcagaaggaguacauggagcgccagggcaagaccccgcucgggcugguggaccuguucguguucagcaccuccuucuaccucaucagcaucuuccugcaccuggucaagauccccacgcaccggcacaucgugggcaaguccugccccaagccccaccgccugaaccacauggggaucugcagcugcggccucuacaagcagccgggggugcccgucaaguggaagcggugaggacuagucccuguucccagagcccacuuuuuuuucuuuuuuugaaauaaaauagccugucuuucagaucuaaaaaaaaaaaaaaaaaaaaaaaaaaaaaaaaaaaaaaaaaaaaaaaaaaaaaaaaaaaaaaaaaaaaaaaaaaaaaaaaaaaaaaaaaaaaaaaaaaaa

SEQ ID NO: 15908 - RNA, 1743 nt, Artificial Sequence
  mRNA product Design a-2 (A100) comprising derived and/or modified sequence from LASV(LM765-SLE-2012;Clade IV)__AIT17814__GPCmut1 (opt1)
aggagaguccgcucagccagguugcagaagcggcuuagcguguguccuaaucuucucucugcguguagguaggccugugccgcaaacaagcuuaccaugggccagaucgugaccuucuuccaggaggucccccacgugaucgaggaggugaugaacaucguccugaucgcccucagcauccuggccgugcugaaggggcucuacaacuucgcgaccugcggccugguggggcuggucacguuccuccugcugugcggccgcuccugcaccaccagccucuacaaggggguguacgagcugcagacccuggagcucaacauggagacgcugaacaugaccaugccgcuguccugcaccaagaacaacagccaccacuacaucauggugggcaacgagaccggccucgagcugacgcugaccaacaccuccaucaucgaccacaaguucugcaaccucagcgacgcccaccggaagaaccuguacgaccacgcccugauguccaucaucagcaccuuccaccucuccauccccaacuucaaccaguacgaggccaugagcugcgacuucaacgggggcaagaucuccguccaguacaaccugagccacuccuacgccaaggacgcggccgaccacugcgggacgguggccaacggcgugcugcagaccuucaugcgcauggccuggggcgggagcuacaucgcgcucgacuccggcugcgggcggugggacugcaucaugaccagcuaccaguaccugaucauccagaacaccacgugggaggaccacugccaguucucccgccccagccccaucggcuaccuggggcuccugucccagcggacccgcgacaucuacaucagccggcgccggcgcggcaccuucaccuggacgcugagcgacuccgagggcaaggacacccccgggggcuacugccucacccgguggaugcugaucgaggccgagcugaagugcuucgggaacaccgccgucgccaagugcaacgagaagcacgacgaggaguucugcgacaugcuccgccuguucgacuucaacaagcaggccauccagcggcugaaggcgccggcccagaugagcauccagcucaucaacaaggccgugaacgcccugaucaacgaccagcugaucaugaagaaccaccuccgcgacaucaugugcauccccuacugcaacuacuccaaguacugguaccugaaccacacgaccaccggcaagaccagccugcccaagugcuggcucguguccaacgggagcuaccugaacgagacgcacuucuccgacgacaucgagcagcaggccgacaacaugaucaccgagaugcugcagaaggaguacauggagcggcagggcaagaccccgcucggccuggucgaccuguucguguucagcaccuccuucuaccucaucagcaucuuccugcaccuggugaagauccccacgcaccgccacaucgucgggaagcccugccccaagccgcaccggcugaaccacaugggcaucugcuccugcgggcucuacaagcagcccggcgugcccgugaaguggaagcgcugaggacuagucccuguucccagagcccacuuuuuuuucuuuuuuugaaauaaaauagccugucuuucagaucuaaaaaaaaaaaaaaaaaaaaaaaaaaaaaaaaaaaaaaaaaaaaaaaaaaaaaaaaaaaaaaaaaaaaaaaaaaaaaaaaaaaaaaaaaaaaaaaaaaaa

SEQ ID NO: 15909 - RNA, 1743 nt, Artificial Sequence
  mRNA product Design a-2 (A100) comprising derived and/or modified sequence from LASV(LM776-SLE-2012;Clade IV)__AIT17824__GPCmut1 (opt1)
aggagaguccgcucagccagguugcagaagcggcuuagcguguguccuaaucuucucucugcguguagguaggccugugccgcaaacaagcuuaccaugggccagaucgugaccuucuuccaggaggucccccacgugaucgaggaggugaugaacaucguccugaucgcccucagcauccuggccgugcugaaggggcucuacaacuucgcgaccugcggccugguggggcuggucacguuccuccugcugugcggccgcuccugcaccaccagcguguacaaggggguguacgagcuccagacccuggagcugaacauggagacgcucaacaugaccaugccgcuguccugcaccaagaacaacagccaccacuacaucauggucggcaacgagaccggccuggagcucacgcugaccaacaccuccaucaucaaccacaaguucugcaaccugagcgacgcccacaagaagaaccucuacgaccacgcccugauguccaucaucagcaccuuccaccuguccauccccaacuucaaccaguacgaggccaugagcugcgacuucaacgggggcaagaucuccgugcaguacaaccucagccacuccuacgccggggacgcggccaaccacugcggcacgguggccaacgggguccugcagaccuucaugcggauggccuggggcggcagcuacaucgcgcuggacuccgggugcggcaagugggacugcaucaugaccagcuaccaguaccucaucauccagaacaccacgugggaggaccacugccaguucucccgccccagccccaucggguaccugggccugcucucccagcggacccgcgacaucuacaucagccggcgccggcgcggcaccuucaccuggacgcugagcgacuccgaggggaaggacaccccgggcggguacugccugacccgguggaugcucaucgaggccgagcugaagugcuucggcaacaccgccguggccaagugcaacgagaagcacgacgaggaguucugcgacaugcugcgccucuucgacuucaacaagcaggccauccagcggcugaaggcgcccgcccagaugagcauccagcugaucaacaaggccgugaacgcccucaucaacgaccagcugaucaugaagaaccaccuccgcgacaucaugugcauccccuacugcaacuacuccaaguacugguaccugaaccacacgaccaccgggaagaccagccugcccaagugcuggcuggucuccaacggcagcuaccucaacgagacgcacuucuccgacgacaucgagcagcaggccgacaacaugaucaccgagaugcugcagaaggaguacauggagcggcagggcaagaccccgcuggggcucguggaccuguucguguucagcaccuccuucuaccugaucagcaucuuccuccaccuggucaagauccccacgcaccgccacaucgugggcaaguccugccccaagccccaccggcugaaccacauggggaucugcagcugcggccuguacaagcagccgggggugcccguccgcuggaagcggugaggacuagucccuguucccagagcccacuuuuuuuucuuuuuuugaaauaaaauagccugucuuucagaucuaaaaaaaaaaaaaaaaaaaaaaaaaaaaaaaaaaaaaaaaaaaaaaaaaaaaaaaaaaaaaaaaaaaaaaaaaaaaaaaaaaaaaaaaaaaaaaaaaaaa

SEQ ID NO: 15910 - RNA, 1743 nt, Artificial Sequence
  mRNA product Design a-2 (A100) comprising derived and/or modified sequence from LASV(Mad39;Clade IV)__ANH09722__GPCmut1 (opt1)
aggagaguccgcucagccagguugcagaagcggcuuagcguguguccuaaucuucucucugcguguagguaggccugugccgcaaacaagcuuaccaugggccagaucgugaccuucuuccaggaggucccccacgugaucgaggaggugaugaacaucguccugaucgcccucagcauccuggccgugcugaaggggcucuacaacguggcgaccugcggccugaucgggcuggucacguuccuccugcugugcggccgcuccugcaccaccacccucuacaaggggguguacgagcugcaggcccuggagcucaacauggagacgcugaacaugaccaugccgcugagcugcaccaagaacaacucccaccacuacauccgggugggcaacgagaccggccucgagcugacgcugaccaacaccagccucaucaaccacaaguucugcaaccuguccgacgcccacaagaagaaccuguacgaccacgcccucaugagcaucaucuccaccuuccaccugagcauccccaacuucaaccaguacgaggccauguccugcgacuucaacgacgggaagaucagcguccaguacaaccugucccacacguacgcgggcgacaccgccaaccacugcgggaccguggccaacggcgugcuccagaccuucaugcgcauggccuggggcgggagcuacaucgcgcuggacuccggcugcgggggcugggacugcaucaugacgagcuaccaguaccugaucauccagaacaccaccugggaggaccacugccaguucucccggcccagccccaucggguaccucggccugcugucccagcgcacccgggacaucuacaucagccgccggcgccggggcacguucaccuggacccucuccgacagcgaggggaaggacaccccgggcggguacugccugacgcgcuggaugcugaucgaggccgagcucaagugcuucggcaacaccgccgucgccaagugcaacgagaagcacgacgaggaguucugcgacaugcugcggcuguucgacuucaacaagcaggccauccagcgccucaaggcgcccgcccagaugagcauccagcugaucaacaaggccgugaacgcccugaucaacgaccagcucaucaugaagaaccaccuccgggacaucaugugcauccccuacugcaacuacuccaaguacugguaccugaaccacaccgugaccgggaagacgagccugcccaagugcuggcuggucuccaacggcagcuaccugaacgagacccacuucuccgacgacaucgagcagcaggccgacaacaugaucaccgagaugcuccagaaggaguacauggagcgccagggcaagaccccgcuggggcugguggaccucuucguguucagcacguccuucuaccugaucagcaucuuccugcaccuggucaagauccccacccaccggcacguggugggcaagcccugccccaagccgcaccgccucaaccacauggggaucugcuccugcggcuucuacaagcagcccgggguccccgugcgguggaagcgcugaggacuagucccuguucccagagcccacuuuuuuuucuuuuuuugaaauaaaauagccugucuuucagaucuaaaaaaaaaaaaaaaaaaaaaaaaaaaaaaaaaaaaaaaaaaaaaaaaaaaaaaaaaaaaaaaaaaaaaaaaaaaaaaaaaaaaaaaaaaaaaaaaaaaa

SEQ ID NO: 15911 - RNA, 1743 nt, Artificial Sequence
  mRNA product Design a-2 (A100) comprising derived and/or modified sequence from LASV(Z0947-SLE-2011;Clade IV)__AIT17840__GPCmut1 (opt1)
aggagaguccgcucagccagguugcagaagcggcuuagcguguguccuaaucuucucucugcguguagguaggccugugccgcaaacaagcuuaccaugggccagaucgugaccuucuuccaggaggucccccacgugaucgaggaggugaugaacaucguccugaucgcccucagcauccuggccgugcugaaggggcucuacaacuucgcgaccugcggccugguggggcuggucacguuccuccugcugugcggccgcuccugcaccaucagccucuacaaggggguguacgagcugcagacccuggagcucaacauggagacccugaacaugacgaugccgcuguccugcaccaagaacaacagccaccacuacaucauggugggcaacgagaccggccucgagcugacccugacgaacaccuccaucaucaaccacaaguucugcaaccucagcgacgcccacaagaagaaccuguacgaccacgcccugauguccaucaucagcaccuuccaccucuccauccccaacuucaaccaguacgaggccaugagcugcgacuucaacgggggcaagaucuccguccaguacaaccugagccacuccuacgccggggacgcggccaaccacugcggcaccguggccaacggggugcugcagacguucaugcggauggccuggggcggcagcuacaucgcgcucgacuccgggugcgaccgcugggacugcaucaugaccagcuaccaguaccugaucauccagaacaccaccugggaggaccacugccaguucucccggcccagccccaucggcuaccuggggcuccugucccagcgcacgcgggacaucuacaucagccgccggcgccggggcaccuucaccuggacccugagcgacuccgagggcaaggacacgcccgggggcuacugccucacccgcuggaugcugaucgaggccgagcugaagugcuucgggaacaccgccgucgccaagugcaacgagaagcacgacgaggaguucugcgacaugcuccggcuguucgacuucaacaagcaggccauccagcgccugaaggcgccggcccagaugagcauccagcucaucaacaaggccgugaacgcccugaucaacgaccagcugaucaugaagaaccaccuccgggacaucaugugcauccccuacugcaacuacuccaaguacugguaccugaaccacaccacgaccggcaagaccagccugcccaagugcuggcucguguccaacgggagcuaccugaacgagacccacuucuccgacgacaucgagcagcaggccgacaacaugaucacggagaugcugcagaaggaguacauggagcgccagggcaagaccccgcucggccuggucgaccuguucguguucagcaccuccuucuaccucaucagcaucuuccugcaccuggugaagauccccacccaccggcacaucgucgggaagcccugccccaagccgcaccgccugaaccacaugggcaucugcuccugcgggcucuacaagcagcccggcgugcccgugaaguggaagcggugaggacuagucccuguucccagagcccacuuuuuuuucuuuuuuugaaauaaaauagccugucuuucagaucuaaaaaaaaaaaaaaaaaaaaaaaaaaaaaaaaaaaaaaaaaaaaaaaaaaaaaaaaaaaaaaaaaaaaaaaaaaaaaaaaaaaaaaaaaaaaaaaaaaaa

SEQ ID NO: 15912 - RNA, 1743 nt, Artificial Sequence
  mRNA product Design a-2 (A100) comprising derived and/or modified sequence from LASV(Josiah;Clade IV)__NP_694870__GPCmut1 (opt4)
aggagaguccgcucagccagguugcagaagcggcuuagcguguguccuaaucuucucucugcguguagguaggccugugccgcaaacaagcuuaccaugggccagaucgugaccuucuuccaggaggugccccacgugaucgaggaggugaugaacaucgugcugaucgcccugagcgugcuggccgugcugaagggccuguacaacuucgccaccugcggccuggugggccuggugaccuuccugcugcugugcggcagaagcugcaccaccagccuguacaagggcguguacgagcugcagacccuggagcugaacauggagacccugaacaugaccaugccccugagcugcaccaagaacaacagccaccacuacaucauggugggcaacgagaccggccuggagcugacccugaccaacaccagcaucaucaaccacaaguucugcaaccugagcgacgcccacaagaagaaccuguacgaccacgcccugaugagcaucaucagcaccuuccaccugagcauccccaacuucaaccaguacgaggccaugagcugcgacuucaacggcggcaagaucagcgugcaguacaaccugagccacagcuacgccggcgacgccgccaaccacugcggcaccguggccaacggcgugcugcagaccuucaugagaauggccuggggcggcagcuacaucgcccuggacagcggcugcggcaacugggacugcaucaugaccagcuaccaguaccugaucauccagaacaccaccugggaggaccacugccaguucagcagacccagccccaucggcuaccugggccugcugagccagagaaccagagacaucuacaucagcagaagacgccggggcaccuucaccuggacccugagcgacagcgagggcaaggacacccccggcggcuacugccugaccagauggaugcugaucgaggccgagcugaagugcuucggcaacaccgccguggccaagugcaacgagaagcacgacgaggaguucugcgacaugcugagacuguucgacuucaacaagcaggccauccagagacugaaggcccccgcccagaugagcauccagcugaucaacaaggccgugaacgcccugaucaacgaccagcugaucaugaagaaccaccugagagacaucaugugcauccccuacugcaacuacagcaaguacugguaccugaaccacaccaccaccggcagaaccagccugcccaagugcuggcuggugagcaacggcagcuaccugaacgagacccacuucagcgacgacaucgagcagcaggccgacaacaugaucaccgagaugcugcagaaggaguacauggagagacagggcaagaccccccugggccugguggaccuguucguguucagcaccagcuucuaccugaucagcaucuuccugcaccuggugaagauccccacccacagacacaucgugggcaagagcugccccaagccccacagacugaaccacaugggcaucugcagcugcggccuguacaagcagcccggcgugcccgugaaguggaagagaugaggacuagucccuguucccagagcccacuuuuuuuucuuuuuuugaaauaaaauagccugucuuucagaucuaaaaaaaaaaaaaaaaaaaaaaaaaaaaaaaaaaaaaaaaaaaaaaaaaaaaaaaaaaaaaaaaaaaaaaaaaaaaaaaaaaaaaaaaaaaaaaaaaaaa

SEQ ID NO: 15913 - RNA, 1740 nt, Artificial Sequence
  mRNA product Design a-2 (A100) comprising derived and/or modified sequence from LASV(LP;Clade I)__AAF86701__GPCmut1 (opt4)
aggagaguccgcucagccagguugcagaagcggcuuagcguguguccuaaucuucucucugcguguagguaggccugugccgcaaacaagcuuaccaugggccagaucaucaccuucuuccaggaggugccccacgugaucgaggaggugaugaacaucgugcugaucgcccugagccugcuggccauccugaagggccuguacaacaucgccaccugcggcaucaucggccugguggccuuccuguuccugugcggcaagagcugcagccugacccugaagggcggcuacgagcugcagacccuggagcugaacauggagacccugaacaugaccaugccccugagcugcaccaagaacagcagccaccacuacaucagagugggcaacgagaccggccuggagcugacccugaccaacaccagcaucaucaaccacaaguucugcaaccugagcgacgcccacaagaagaaccuguacgaccacgcccugaugagcaucaucagcaccuuccaccugagcauccccaacuucaaccaguacgaggccaugagcugcgacuucaacggcggcaagaucagcgugcaguacaaccugagccacagcuacgccggcgacgccgccgagcacugcggcaccguggccaacggcgugcugcagaccuucaugagaauggccuggggcggcagauacaucgcccuggacagcggcugcggcaacugggacugcaucaugaccagcuaccaguaccugaucauccagaacaccaccugggaggaccacugccaguucagcagacccagccccaucggcuaccugggccugcugagccagagaaccagagacaucuacaucagcagaagacgccggggcaccuucaccuggacccugagcgacagcgagggcaacgagacccccggcggcuacugccugaccagauggaugcugaucgaggccgagcugaagugcuucggcaacaccgccguggccaagugcaacgagaagcacgacgaggaguucugcgacaugcugagacuguucgacuucaacaagcaggccaucagaagacugaaggcccccgcccagaugagcauccagcugaucaacaaggccgugaacgcccugaucaacgaccagcugaucaugaagaaccaccugagagacaucaugugcauccccuacugcaacuacagcaaguacugguaccugaaccacaccagcagcggcagaaccagccugcccaagugcuggcugaucagcaacggcagcuaccugaacgagacccaguucagcgacgacaucgagcagcaggccgacaacaugaucaccgagaugcugcagaaggaguacaucgagagacagggcaagaccccccugggccugguggacaucuucaucuucagcaccagcuucuaccugaucagcaucuuccugcaccugaucaagauccccacccacagacacaucgugggcaagcccugccccaagccccacagacugaaccacaugggcgugugcagcugcggccuguacaagcaccccggcgugcccaccaaguggaagagaugaggacuagucccuguucccagagcccacuuuuuuuucuuuuuuugaaauaaaauagccugucuuucagaucuaaaaaaaaaaaaaaaaaaaaaaaaaaaaaaaaaaaaaaaaaaaaaaaaaaaaaaaaaaaaaaaaaaaaaaaaaaaaaaaaaaaaaaaaaaaaaaaaaaaa

SEQ ID NO: 15914 - RNA, 1740 nt, Artificial Sequence
  mRNA product Design a-2 (A100) comprising derived and/or modified sequence from LASV(803213;Clade II)__AAF86703__GPCmut1 (opt4)
aggagaguccgcucagccagguugcagaagcggcuuagcguguguccuaaucuucucucugcguguagguaggccugugccgcaaacaagcuuaccaugggccagaucaucaccuucuuccaggaggugccccacgugaucgaggaggugaugaacaucgugcugaucgcccugagccugcuggccauccugaagggcaucuacaacguggccaccugcggccuguucggccugaucagcuuccugcugcugugcggcagaagcugcagcgugaccuacaagggcguguacgagcugcagacccuggagcugaacauggccaaccugaacaugaccaugccccugagcugcaccaagaacaacagccaccacuacaucauggugggcaacgagaccggccuggagcugacccugaccaacaccagcaucaucaaccacaaguucugcaaccugagcgacgcccacaagaagaaccuguacgaccacgcccugaugagcaucaucagcaccuuccaccugagcauccccaacuucaaccaguacgaggccaugagcugcgacuucaacggcggcaagaucagcgugcaguacaaccugagccacagcuucgccguggacgccgccaaccacugcggcaccaucgccaacggcgugcugcagaccuucaugagaauggccuggggcggcagcuacaucgcccuggacagcggcugcggcaacugggacugcaucaugaccagcuaccaguaccugaucauccagaacaccaccugggaggaccacugccaguucagcagacccagccccaucggcuaccugggccugcugagccagagaaccagagacaucuacaucagcagaagacgccggggcaccuucaccuggacccugagcgacagcgagggcaacgaggcccccggcggcuacugccugaccagauggaugcugaucgaggccgagcugaagugcuucggcaacaccgccguggccaagugcaacgagaagcacgacgaggaguucugcgacaugcugagacuguucgacuucaacaagcaggccaucaagagacugaagacccccgcccagaugagcauccagcugaucaacaaggccgugaacgcccugaucaacgaccagcugaucaugaagaaccaccugagagacaucaugugcauccccuacugcaacuacagcagauacugguaccugaaccacaccgugaccggcaagaccagccugcccagaugcuggcuggugagcaacggcagcuaccugaacgagacccacuucagcgacgacaucgagcagcaggccgacaacaugaucaccgagaugcugcagaaggaguacauggacagacagggcaagaccccccugggccugguggaccuguucguguucagcaccagcuucuaccugaucagcaucuuccugcaccuggugaagauccccacccacagacacaucgugggcaagcccugccccaagccccacagacugaaccacaugggcaucugcagcugcggccuguacaagcaccccggcgugcccgugaaguggaagagaugaggacuagucccuguucccagagcccacuuuuuuuucuuuuuuugaaauaaaauagccugucuuucagaucuaaaaaaaaaaaaaaaaaaaaaaaaaaaaaaaaaaaaaaaaaaaaaaaaaaaaaaaaaaaaaaaaaaaaaaaaaaaaaaaaaaaaaaaaaaaaaaaaaaaa

SEQ ID NO: 15915 - RNA, 1740 nt, Artificial Sequence
  mRNA product Design a-2 (A100) comprising derived and/or modified sequence from LASV(GA391;Clade III)__CAA36645__GPCmut1 (opt4)
aggagaguccgcucagccagguugcagaagcggcuuagcguguguccuaaucuucucucugcguguagguaggccugugccgcaaacaagcuuaccaugggccagaucgugaccuucuuccaggaggugccccacgugaucgaggaggugaugaacaucgugcugaucgcccugagcauccuggccauccugaagggccuguacaacguggccaccugcggccugaucggccuggugaccuuccugcugcugagcggcagaagcugcagccugaucuacaagggcaccuacgagcugcagacccuggagcugaacauggagacccugaacaugaccaugccccugagcugcaccaagaacaacagccaccacuacaucagagugggcaacgagaccggccuggagcugacccugaccaacaccagcauccugaaccacaaguucugcaaccugagcgacgcccacaagagaaaccuguacgaccacagccugaugagcaucaucagcaccuuccaccugagcauccccaacuucaaccaguacgaggccaugagcugcgacuucaacggcggcaagaucaccgugcaguacaaccugagccacagcuucgccguggacgccgccggccacugcggcacccuggccaacggcgugcugcagaccuucaugagaauggccuggggcggcagcuacaucgcccuggacagcggcugcggcaacugggacugcaucaugaccagcuaccaguaccugaucauccagaacaccaccugggacgaccacugccaguucagcagacccagccccaucggcuaccugggccugcugagccagagaaccagagacaucuacaucagcagaagacgccggggcaccuucaccuggacccugagcgacagcgagggcaacgagacccccggcggcuacugccugaccagauggaugcugaucgaggccgagcugaagugcuucggcaacaccgccguggccaagugcaacgagaagcacgacgaggaguucugcgacaugcugagacuguucgacuucaacaagcaggccaucagaagacugaagacccccgcccagaugagcauccagcugaucaacaaggccgugaacgcccugaucaacgaccagcugaucaugaagaaccaccugagagacaucaugugcauccccuacugcaacuacagcagauacugguaccugaaccacaccagcaccggcaagaccagccugcccagaugcuggcugaucagcaacggcagcuaccugaacgagaccaaguucagcgacgacaucgagcagcaggccgacaacaugaucaccgagaugcugcagaaggaguacaucgacagacagggcaagaccccccugggccugguggaccuguucguguucagcaccagcuucuaccugaucagcaucuuccugcaccuggugaagauccccacccacagacacaucgugggcaagcccugccccaagccccacagacugaaccacaugggcaucugcagcugcggccuguacaagcagcccggcgugcccgugagauggaagagaugaggacuagucccuguucccagagcccacuuuuuuuucuuuuuuugaaauaaaauagccugucuuucagaucuaaaaaaaaaaaaaaaaaaaaaaaaaaaaaaaaaaaaaaaaaaaaaaaaaaaaaaaaaaaaaaaaaaaaaaaaaaaaaaaaaaaaaaaaaaaaaaaaaaaa

SEQ ID NO: 15916 - RNA, 1743 nt, Artificial Sequence
  mRNA product Design a-2 (A100) comprising derived and/or modified sequence from LASV(AV;Clade V)__CCA30314__GPCmut1 (opt4)
aggagaguccgcucagccagguugcagaagcggcuuagcguguguccuaaucuucucucugcguguagguaggccugugccgcaaacaagcuuaccaugggccagaucgugaccuucuuccaggaggugccccacgugaucgaggaggugaugaacaucgugcugaucgcccugagcauccuggccgugcugaagggccuguacaacaucgccaccugcggccugaucggccugaucaccuuccugcugcugugcggcagaagcugcagcagcaaccuguacaagggcguguacgagcugcagagccuggaccugaacauggagacccugaacaugaccaugccccugagcugcaccaagaacaacagccaccacuacaucagagugggcaacgacaccggccuggagcugacccugaccaacaccagcauccugaaccacaaguucugcaaccugagcgacgcccacaagaaggaccuguacgaccacgcccugaugagcaucaucagcaccuuccaccugagcauccccaacuucaaccaguacgaggccaugagcugcgacuucaacggcggcaagaucagcgugcaguacaaccugagccacagcuacgccaucgacgccgccaaccacugcggcaccguggccaacggcauccugcagaccuucaugagaauggccuggggcggcagcuacaucgcccuggacagcggcugcggcaacugggacugcaucaugaccagcuaccaguaccugaucauccagaacaccaccugggagaaccacugccaguucagcagacccagccccaucggcuaccugggccugcugagccagagaaccagagacaucuacaucagcagaagacgccggggcaccuucaccuggacccugagcgacagcgagggcaacgccacccccggcggcuacugccugaccagauggaugcugaucgaggccgagcugaagugcuucggcaacaccgccguggccaagugcaacgagaagcacgacgaggaguucugcgacaugcugagacuguucgacuucaacaagcaggccaucagcagacugaagagccccgcccagaugagcauccagcugaucaacaaggccgugaacgcccugaucaacgaccagcugaucaugaagaaccaccugagagacaucaugugcauccccuacugcaacuacagcaaguacugguaccugaaccacaccaucaccggcaagaccagccugcccaagugcuggcuggugagcaacggcagcuaccugaacgagacccacuucagcgacgacaucgagcagcaggccgacaacaugaucaccgagaugcugcagaaggaguacauggagagacagggcaagaccccccugggccugguggaccuguucguguucagcaccagcuucuaccugaucagcaucuuccugagacuggugaagauccccacccacagacacaucgugggcaagcccugccccaagccccacagacugaaccacaugggcaucugcagcugcggccuguacaagcagcccggcgugcccgugagauggaagagaugaggacuagucccuguucccagagcccacuuuuuuuucuuuuuuugaaauaaaauagccugucuuucagaucuaaaaaaaaaaaaaaaaaaaaaaaaaaaaaaaaaaaaaaaaaaaaaaaaaaaaaaaaaaaaaaaaaaaaaaaaaaaaaaaaaaaaaaaaaaaaaaaaaaaa

SEQ ID NO: 15917 - RNA, 1740 nt, Artificial Sequence
  mRNA product Design a-2 (A100) comprising derived and/or modified sequence from LASV(Togo/2016/7082;Clade VI)__AMR44577__GPCmut1 (opt4)
aggagaguccgcucagccagguugcagaagcggcuuagcguguguccuaaucuucucucugcguguagguaggccugugccgcaaacaagcuuaccaugggccagaucaucaccuucuuccaggaggugccccacgugaucgaggaggugaugaacaucgugcugaucgcccugagccugcuggccauccugaagggcguguacaacguggccaccugcggcaucaucggccuggugaccuuccuguuccugugcggcagaagcugcagccugaucuacaagggcagcuacgagcugcagacccuggagcugaacauggagacccugaacaugaccaugccccugagcugcaccaagaacagcagccaccacuacaucagagugggcaacgagaccggccuggagcugacccugaccaacaccagcaucaucaaccacaaguucugcaaccugagcgacgcccacaagagaaaccuguacgaccacgcccugaugagcauccugagcaccuuccaccugagcauccccaacuucaaccaguacgaggccaugagcugcgacuucaacggcggcaagaucagcgugcaguacaaccugagccacgccuacgccguggacgccgccgagcacugcggcaccguggccaacggcgugcugcagaccuucaugagaauggccuggggcggcagcuacaucgcccuggacagcggcugcggcaacugggacugcaucaugaccagcuaccaguaccugaucauccagaacaccaccugggaggaccacugccaguucagcagacccagccccaucggcuaccugggccugcugagccagagaaccagagacaucuacaucagcagaagacgccggggcaccuucaccuggacccugagcgacagcgagggcaacgagacccccggcggcuacugccugaccagauggaugcugaucgaggccgagcugaagugcuucggcaacaccgccguggccaagugcaacgagaagcacgacgaggaguucugcgacaugcugagacuguucgacuucaacaagcaggccauccagagacugaagagccccgcccagaugagcauccagcugaucaacaaggccgugaacgcccugaucaacgaccagcugaucaugaagaaccaccugagagacaugaugugcauccccuacugcaacuacagcaaguacugguaccugaaccacaccagcagcggcagaaccagccugcccaagugcuggcuggugagcaacggcagcuaccugaacgagacccacuucagcgacgacaucgagcagcaggccgacaacaugaucaccgagaugcugcagaaggaguacaucgacagacagggcaagaccccccugggccugguggaccuguucguguucagcaccagcuucuaccugaucagcaucuuccugcaccugaucaagauccccacccacagacacaucgugggcaagcccugccccaagccccacagacugaaccacaugggcaucugcagcugcggccuguacaagcagcccggcgugcccaccagauggaagagaugaggacuagucccuguucccagagcccacuuuuuuuucuuuuuuugaaauaaaauagccugucuuucagaucuaaaaaaaaaaaaaaaaaaaaaaaaaaaaaaaaaaaaaaaaaaaaaaaaaaaaaaaaaaaaaaaaaaaaaaaaaaaaaaaaaaaaaaaaaaaaaaaaaaaa

SEQ ID NO: 15918 - RNA, 1740 nt, Artificial Sequence
  mRNA product Design a-2 (A100) comprising derived and/or modified sequence from LASV(KAK-428;Clade n.d. (VII))__ANH09740__GPCmut1 (opt4)
aggagaguccgcucagccagguugcagaagcggcuuagcguguguccuaaucuucucucugcguguagguaggccugugccgcaaacaagcuuaccaugggccagaucgugaccuucuuccaggaggugccccacgugaucgaggaggugaugaacaucgugcugaucgcccugagccugcuggccauccugaagggccuguacaacuucgccaccugcggcgugaucggccugaucaccuuccugcugcugugcggcagaagcugcagcgccaccuacaagggccaguacgagcugcagacccuggagcugaacauggagagccugaacaugaccaugccccugagcugcaccaagaacaacagccaccacuacaucagagccggcaacaacaccggccuggagcugacccugaccaacaccagcaucaucagccacaaguucugcaaccugagcgacgcccacaagaagaaccuguacgaccacacccugaugagcaucaucaccaccuuccaccugagcauccccaacuucaaccaguacgaggccaugagcugcgacuucaacggcggcaagaucagcauccaguacaaccugagccacagcuacgccggcgacgccgcccagcacugcggcaccguggccaacggcgugcugcagaccuucaugagaauggccuggggcggcagcuaccuggcccuggacagcggcugcagaggcugggacugcaucaucagcagcuaccaguaccugaucauccagaacaccaccugggacgaccacugccaguucagcagacccagccccaucggcuaccugggcuucgugagccagaagaccagagacaucuacaucagcagaagacgccggggcaccuucaccuggacccugagcgacagcgagggccacgacaugcccggcggcuacugccugaccagauggaugcugaucgaggccgaccugaagugcuucggcaacaccgccguggccaagugcaacgagaagcacgacgaggaguucugcgacauguggagacuguucgacuucaacaagcaggccauccagagacugaaggcccccgcccagaugaacauccagcugaucaacaaggccgugaacgcccugaucaacgaccagcugaugaugaagaaccaccugagagacaucaugugcauccccuacugcaacuacagcaaguucugguaccugaacaacaccaccaccggcagaaccagccugcccagaugcuggcugaucagcaacggcagcuaccugaacgagacccacuucagcgacgacaucgagcagcaggccgacaacaugaucaccgagaugcugcagaaggaguacauggacagacagggcaagaccccccugggccugguggaccuguucguguucagcaccagcuucuaccugaucaccaucuuccugcaccuggugaagauccccacccacagacacaucgugggcaagcccugccccaagccccacagacugaaccacaugggcaucugcagcugcggccuguacaagcagcccggcgugcccgugagauggaagagaugaggacuagucccuguucccagagcccacuuuuuuuucuuuuuuugaaauaaaauagccugucuuucagaucuaaaaaaaaaaaaaaaaaaaaaaaaaaaaaaaaaaaaaaaaaaaaaaaaaaaaaaaaaaaaaaaaaaaaaaaaaaaaaaaaaaaaaaaaaaaaaaaaaaaa

SEQ ID NO: 15919 - RNA, 1740 nt, Artificial Sequence; identical to SEQ ID NO: 15913
  mRNA product Design a-2 (A100) comprising derived and/or modified sequence from LASV(Pinneo-NIG-1969;Clade I)__AIT17836__GPCmut1 (opt4)

SEQ ID NO: 15920 - RNA, 1740 nt, Artificial Sequence
  mRNA product Design a-2 (A100) comprising derived and/or modified sequence from LASV(ISTH0009-NIG-2011;Clade II)__AIT17404__GPCmut1 (opt4)
aggagaguccgcucagccagguugcagaagcggcuuagcguguguccuaaucuucucucugcguguagguaggccugugccgcaaacaagcuuaccaugggccagaucaucaccuucuuccaggaggugccccacgugaucgaggaggugaugaacaucgugcugaucgcccugagccugcuggccauccugaagggcaucuacaacguggccaccugcggccuguucggccuggugagcuuccugcugcugugcggcagaagcugcagcaccaccuacaagggcguguacgagcugcagacccuggagcuggacauggccagccugaacaugaccaugccccugagcugcaccaagaacaacagccaccacuacaucauggugggcaacgagaccggccuggagcugacccugaccaacaccagcaucaucaaccacaaguucugcaaccugagcgacgcccacaagaagaaccuguacgaccacgcccugaugagcaucaucagcaccuuccaccugagcauccccaacuucaaccaguacgaggccaugagcugcgacuucaacggcggcaagaucagcgugcaguacaaccugagccacgccuacgccguggacgccgccaaccacugcggcaccaucgccaacggcgugcugcagaccuucaugagaauggccuggggcggcagcuacaucgcccuggacagcggcugcggcagcugggacugcaucaugaccagcuaccaguaccugaucauccagaacaccaccugggaggaccacugccaguucagcagacccagccccaucggcuaccugggccugcugagccagagaaccagagacaucuacaucagcagaagacgccggggcaccuucaccuggacccugagcgacagcgagggcaacgagacccccggcggcuacugccugaccagauggaugcugaucgaggccgagcugaagugcuucggcaacaccgccguggccaagugcaacgagaagcacgacgaggaguucugcgacaugcugagacuguucgacuucaacaagcaggccaucagaagacugaagacccccgcccagaugagcauccagcugaucaacaaggccgugaacgcccugaucaacgaccagcugaucaugaagaaccaccugagagacaucaugugcauccccuacugcaacuacagcaaguacugguaccugaaccacaccgugaccggcaagaccagccugcccagaugcuggcuggugagcaacggcagcuaccugaacgagacccacuucagcgacgacaucgagcagcaggccgacaacaugaucaccgagcugcugcagaaggaguacauggacagacagggcaagaccccccugggccugguggaccuguucguguucagcaccagcuucuaccugaucagcaucuuccugcaccugaucaagauccccacccacagacacaucaccggcaagcccugccccaagccccacagacugaaccacaugggcaucugcagcugcggccuguacaagcaccccggcgugcccgugaaguggaagagaugaggacuagucccuguucccagagcccacuuuuuuuucuuuuuuugaaauaaaauagccugucuuucagaucuaaaaaaaaaaaaaaaaaaaaaaaaaaaaaaaaaaaaaaaaaaaaaaaaaaaaaaaaaaaaaaaaaaaaaaaaaaaaaaaaaaaaaaaaaaaaaaaaaaaa

SEQ ID NO: 15921 - RNA, 1740 nt, Artificial Sequence
  mRNA product Design a-2 (A100) comprising derived and/or modified sequence from LASV(ISTH2010-NIG-2012;Clade II)__AIT17482__GPCmut1 (opt4)
aggagaguccgcucagccagguugcagaagcggcuuagcguguguccuaaucuucucucugcguguagguaggccugugccgcaaacaagcuuaccaugggccagaucaucaccuucuuccaggaggugccccacgugaucgaggaggugaugaacaucgugcugaucgcccugagccugcuggccauccugaagggcaucuacaacguggccaccugcggccuguucggccuggugagcuuccugcugcugugcggcagaagcugcagcaccaccuacaagggcguguacgagcugcagacccuggagcuggacauggccagccugaacaugaccaugccccugagcugcaccaagaacaacagccaccacuacaucauggugggcaacgagaccggccuggagcugacccugaccaacaccagcaucaucaaccacaaguucugcaaccugagcgacgcccacaagaagaaccuguacgaccacgcccugaugagcaucaucagcaccuuccaccugagcauccccaacuucaaccaguacgaggccaugagcugcgacuucaacggcggcaagaucagcgugcaguacaaccugagccacgccuacgccguggacgccgccaaccacugcggcaccaucgccaacggcgugcugcagaccuucaugagaauggccuggggcggcagcuacaucgcccuggacagcggcugcggcagcugggacugcaucaugaccagcuaccaguaccugaucauccagaacaucaccugggaggaccacugccaguucagcagacccagccccaucggcuaccugggccugcugagccagagaaccagagacaucuacaucagcagaagacgccggggcaccuucaccuggacccugagcgacagcgagggcaacgagacccccggcggcuacugccugaccagauggaugcugaucgaggccgagcugaagugcuucggcaacaccgccguggccaagugcaacgagaagcacgacgaggaguucugcgacaugcugagacuguucgacuucaacaagcaggccaucagaagacugaagacccccgcccagaugagcauccagcugaucaacaaggccgugaacgcccugaucaacgaccagcugaucaugaagaaccaccugagagacaucaugugcauccccuacugcaacuacagcaaguacugguaccugaaccacaccgugaccggcaagaccagccugcccagaugcuggcuggugagcaacggcagcuaccugaacgagacccacuucagcgacgacaucgagcagcaggccgacaacaugaucaccgagcugcugcagaaggaguacaucgacagacagggcaagaccccccugggccugguggaccuguucguguucagcaccagcuucuaccugaucagcaucuuccugcaccuggugaagauccccacccacagacacguggugggcaagcccugccccaagccccacagacugaaccacaugggcaucugcagcugcggccuguacaagcaccccggcgugcccgugaaguggaagagaugaggacuagucccuguucccagagcccacuuuuuuuucuuuuuuugaaauaaaauagccugucuuucagaucuaaaaaaaaaaaaaaaaaaaaaaaaaaaaaaaaaaaaaaaaaaaaaaaaaaaaaaaaaaaaaaaaaaaaaaaaaaaaaaaaaaaaaaaaaaaaaaaaaaaa

SEQ ID NO: 15922 - RNA, 1740 nt, Artificial Sequence
  mRNA product Design a-2 (A100) comprising derived and/or modified sequence from LASV(Lassa virus/H.sapiens-wt/NGA/2015/ISTH_0543;Clade II)__AVO03639__GPCmut1 (opt4)
aggagaguccgcucagccagguugcagaagcggcuuagcguguguccuaaucuucucucugcguguagguaggccugugccgcaaacaagcuuaccaugggccagaucaucaccuucuuccaggaggugccccacgugaucgaggaggugaugaacaucgugcugaucgcccugagccugcuggccauccugaagggcaucuacaacguggccaccugcggccuguucggccuggugagcuuccugcugcugugcggcagaagcugcagcaccaccuacaagggcguguacgagcugcagacccuggagcuggacauggccaaccugaacaugaccaugccccugagcugcaccaagaacaacagccaccacuacaucauggugggcaacgagaccggccuggagcugacccugaccaacaccagcaucaucaaccacaaguucugcaaccugagcgacgcccacaagaagaaccuguacgaccacgcccugaugagcaucaucagcaccuuccaccugagcauccccaacuucaaccaguacgaggccaugagcugcgacuucaacggcggcaagaucagcgugcaguacaaccugagccacaccuacgccguggacgccgccaaccacugcggcaccaucgccaacggcgugcugcagaccuucaugagaauggccuggggcggcagcuacaucgcccuggacagcggcugcggcagcugggacugcaucaugaccagcuaccaguaccuggugauccagaacaccaccugggaggaccacugccaguucagcagacccagccccaucggcuaccugggccugcugagccagagaaccagagacaucuacaucagcagaagacgccggggcaccuucaccuggacccugagcgacagcgagggcaacgagacccccggcggcuacugccugaccagauggaugcugaucgaggccgagcugaagugcuucggcaacaccgccguggccaagugcaacgagaagcacgacgaggaguucugcgacaugcugagacuguucgacuucaacaagcaggccaucagaagacugaagacccccgcccagaugagcauccagcugaucaacaaggccgugaacgcccugaucaacgaccagcugaucaugaagaaccaccugagagacaucaugugcauccccuacugcaacuacagcaaguacugguaccugaaccacaccgugaccggcaagaccagccugcccagaugcuggcuggugagcaacggcagcuaccugaacgagacccacuucagcgacgacaucgagcagcaggccgacaacaugaucaccgagcugcugcagaaggaguacaucgacagacagggcaagaccccccugggccugguggaccuguucguguucagcaccagcuucuaccugaucagcaucuuccugcaccuggugaagauccccacccacagacacaucaccggcaagcccugccccaagccccacagacugaaccacaugggcaucugcagcugcggccuguacaagcaccccggcgugcccgugaaguggaagagaugaggacuagucccuguucccagagcccacuuuuuuuucuuuuuuugaaauaaaauagccugucuuucagaucuaaaaaaaaaaaaaaaaaaaaaaaaaaaaaaaaaaaaaaaaaaaaaaaaaaaaaaaaaaaaaaaaaaaaaaaaaaaaaaaaaaaaaaaaaaaaaaaaaaaa

SEQ ID NO: 15923 - RNA, 1740 nt, Artificial Sequence
  mRNA product Design a-2 (A100) comprising derived and/or modified sequence from LASV(Lassa virus/H.sapiens-wt/NGA/2016/ISTH_0009;Clade II)__AVO03571__GPCmut1 (opt4)
aggagaguccgcucagccagguugcagaagcggcuuagcguguguccuaaucuucucucugcguguagguaggccugugccgcaaacaagcuuaccaugggccagaucaucaccuucuuccaggaggugccccacgugaucgaggaggugaugaacaucgugcugaucgcccugagccugcuggccauccugaagggcaucuacaacguggccaccugcggccugcugggccuggugagcuuccugcugcugugcggcagaagcugcagcaccaccuacaagggcguguacgagcugcagacccuggagcuggacauggccagccugaacaugaccaugccccugagcugcaccaagaacaacagccaccacuacaucauggugggcaacgagaccggccuggagcugacccugaccaacaccagcaucaucaaccacaaguucugcaaccugagcgacgcccacaagaagaaccuguacgaccacgcccugaugagcaucaucagcaccuuccaccugagcauccccaacuucaaccaguacgaggccaugagcugcgacuucaacggcggcagaaucagcgugcaguacaaccugagccacagcuacgccguggacgccgccaaccacugcggcaccaucgccaacggcgugcugcagaccuucaugagaauggccuggggcggcagcuacaucgcccuggacagcggcugcggcagcugggacugcaucaugaccagcuaccaguaccugaucauccagaacaccaccugggaggaccacugccaguucagcagacccagccccaucggcuaccugggccugcugagccagagaaccagagacaucuacaucagcagaagacgccggggcaccuucaccuggacccugagcgacagcgagggcaacgagacccccggcggcuacugccugaccagauggaugcugaucgaggccgagcugaagugcuucggcaacaccgccguggccaagugcaacgagaagcacgacgaggaguucugcgacaugcugagacuguucgacuucaacaagcaggccaucagaagacugaagacccccgcccagaugagcauccagcugaucaacaaggccgugaacgcccugaucaacgaccagcugaucaugaagaaccaccugagagacaucaugugcauccccuacugcaacuacagcaaguacugguaccugaaccacaccgugaccggcaagaccagccugcccagaugcuggcuggugagcaacggcagcuaccugaacgagacccacuucagcgacgacaucgagcagcaggccgacaacaugaucaccgagcugcugcagaaggaguacaucgacagacagggcaagaccccccugggccugguggaccuguucguguucagcaccagcuucuaccugaucagcaucuuccugcaccuggugaagauccccacccacagacacaucaccggcaagcccugccccaagccccacagacugaaccacaugggcaucugcagcugcggccuguacaaccaccccggcgugcccgugaaguggaagagaugaggacuagucccuguucccagagcccacuuuuuuuucuuuuuuugaaauaaaauagccugucuuucagaucuaaaaaaaaaaaaaaaaaaaaaaaaaaaaaaaaaaaaaaaaaaaaaaaaaaaaaaaaaaaaaaaaaaaaaaaaaaaaaaaaaaaaaaaaaaaaaaaaaaaa

SEQ ID NO: 15924 - RNA, 1740 nt, Artificial Sequence
  mRNA product Design a-2 (A100) comprising derived and/or modified sequence from LASV(Lassa virus/H.sapiens-wt/NGA/2016/ISTH_0017;Clade II)__AVO03567__GPCmut1 (opt4)
aggagaguccgcucagccagguugcagaagcggcuuagcguguguccuaaucuucucucugcguguagguaggccugugccgcaaacaagcuuaccaugggccagaucaucaccuucuuccaggaggugccccacgugaucgaggaggugaugaacaucgugcugaucgcccugagccugcuggccauccugaagggcaucuacaacguggccaccugcggccuguucggccuggugagcuuccugcugcugugcggcagaagcugcagcaccaccuacaagggcguguacgagcugcagacccuggagcuggacauggccagccugaacaugaccaugccccugagcugcaccaagaacaacagccaccacuacaucauggugggcaacgagaccggccuggagcugacccugaccaacaccagcaucaucaaccacaaguucugcaaccugagcgacgcccacaagaagaaccuguacgaccacgcccugaugagcaucaucagcaccuuccaccugagcauccccaacuucaaccaguacgaggccaugagcugcgacuucaacggcggcaagaucagcgugcaguacaaccugagccacaccuacgccaucgacgccgccaaccacugcggcaccaucgccaacggcgugcugcagaccuucaugagaauggccuggggcggcagcuacaucgcccuggacagcggcugcggcagcugggacugcaucaugaccagcuaccaguaccugaucauccagaacaccaccugggaggaccacugccaguucagcagacccagccccaucggcuaccugggccugcugagccagagaaccagagacaucuacaucagcagaagacgccggggcaccuucaccuggacccugagcgacagcgagggcaacgagacccccggcggcuacugccugaccagauggaugcugaucgaggccgagcugaagugcuucggcaacaccgccguggccaagugcaacgagaagcacgacgaggaguucugcgacaugcugagacuguucgacuucaacaagcaggccaucagaagacugaagacccccgcccagaugagcauccagcugaucaacaaggccgugaacgcccugaucaacgaccagcugaucaugaagaaccaccugagagacaucaugugcauccccuacugcaacuacagcaaguacugguaccugaaccacaccgugaccggcaagaccagccugcccagaugcuggcuggugagcaacggcagcuaccugaacgagacccacuucagcgacgacaucgagcagcaggccgacaacaugaucaccgagcugcugcagaaggaguacauggacagacagggcaagaccccccugggccugguggaccuguucguguucagcaccagcuucuaccugaucagcaucuuccugcaccuggugagaauccccacccacagacacgugaucggcaagcccugccccaagccccacagacugaaccacaugggcaucugcagcugcggccuguacaagcaccccggcgugcccgugaaguggaagagaugaggacuagucccuguucccagagcccacuuuuuuuucuuuuuuugaaauaaaauagccugucuuucagaucuaaaaaaaaaaaaaaaaaaaaaaaaaaaaaaaaaaaaaaaaaaaaaaaaaaaaaaaaaaaaaaaaaaaaaaaaaaaaaaaaaaaaaaaaaaaaaaaaaaaa

SEQ ID NO: 15925 - RNA, 1740 nt, Artificial Sequence
  mRNA product Design a-2 (A100) comprising derived and/or modified sequence from LASV(Lassa virus/H.sapiens-wt/NGA/2018/ISTH_0959;Clade II)__AVV65099__GPCmut1 (opt4)
aggagaguccgcucagccagguugcagaagcggcuuagcguguguccuaaucuucucucugcguguagguaggccugugccgcaaacaagcuuaccaugggccagaucaucaccuucuuccaggaggugccccacgugaucgaggaggugaugaacaucgugcugaucgcccugagccugcuggccauccugaagggcaucuacaacguggugaccugcggccuguucggccuggugagcuuccugcugcugugcggcagaagcugcagcaccaccuacaagggcguguacgagcugcagacccuggagcuggacauggccagccugaacaugaccaugccccugagcugcaccaagaacaacagccaccacuacaucauggugggcaacgagaccggccuggagcugacccugaccaacaccagcaucaucaaccacaaguucugcaaccugagcgacgcccacaagaagaaccuguacgaccacgcccugaugagcaucaucagcaccuuccaccugagcauccccaacuucaaccaguacgaggccaugagcugcgacuucaacggcggcaagaucagcgugcaguacaaccugagccacgccuacgccaucgacgccgccaaccacugcggcaccaucgccaacggcgugcugcagaccuucaugagaauggccuggggcggcagcuacaucgcccuggacagcggcugcggcagcugggacugcaucaugaccagcuaccaguaccugaucauccagaacaccaccugggaggaccacugccaguucagcagacccagccccaucggcuaccugggccugcugagccagagaaccagagacaucuacaucagcagaagacgccggggcaccuucaccuggacccugagcgacagcgagggcaacgagacccccggcggcuacugccugaccagauggaugcugaucgaggccgagcugaagugcuucggcaacaccgccguggccaagugcaacgagaagcacgacgaggaguucugcgacaugcugagacuguucgacuucaacaagcaggccaucagaagacugaagacccccgcccagaugagcauccagcugaucaacaaggccgugaacgcccugaucaacgaccagcugaucaugaagaaccaccugagagacaucaugugcauccccuacugcaacuacagcaaguacugguaccugaaccacaccgugaccggcaagaccagccugcccagaugcuggcuggugagcaacggcagcuaccugaacgagacccacuucagcgacgacaucgagcagcaggccgacaacaugaucaccgagcugcugcagaaggaguacaucgacagacagggcaagaccccccugggccugguggaccuguucguguucagcaccagcuucuaccugaucagcaucuuccugcaccuggugaagauccccacccacagacacgugaucggcaagcccugccccaagccccacagacugaaccacaugggcaucugcagcugcggccuguacaagcaccccggcgugcccgugaaguggaagagaugaggacuagucccuguucccagagcccacuuuuuuuucuuuuuuugaaauaaaauagccugucuuucagaucuaaaaaaaaaaaaaaaaaaaaaaaaaaaaaaaaaaaaaaaaaaaaaaaaaaaaaaaaaaaaaaaaaaaaaaaaaaaaaaaaaaaaaaaaaaaaaaaaaaaa

SEQ ID NO: 15926 - RNA, 1740 nt, Artificial Sequence
  mRNA product Design a-2 (A100) comprising derived and/or modified sequence from LASV(LASV003-NIG-2008;Clade II)__AIT17580__GPCmut1 (opt4)
aggagaguccgcucagccagguugcagaagcggcuuagcguguguccuaaucuucucucugcguguagguaggccugugccgcaaacaagcuuaccaugggccagaucaucaccuucuuccaggaggugccccacgugaucgaggaggugaugaacaucgugcugaucgcccugagccugcuggccauccugaagggcaucuacaacguggccaccugcggccuguucggccuggugagcuuccugcugcugugcggcagaagcugcagcaccaccuacaagggcguguacgagcugcagacccuggagcuggacauggccagccugaacaugaccaugccccugagcugcaccaagaacaacagccaccacuacaucauggugggcaacgagaccggccuggagcugacccugaccaacaccagcaucaucaaccacaaguucugcaaccugagcgacgcccacaagaagaaccuguacgaccacgcccugaugagcaucaucagcaccuuccaccugagcauccccaacuucaaccaguacgaggccaugagcugcgacuucaacggcggcaagaucagcgugcaguacaaccugagccacaccuacgccguggacgccgccaaccacugcggcaccaucgccaacggcgugcugcagaccuucaugagaauggccuggggcggcagcuacaucgcccuggacagcggcugcggcagcugggacugcaucaugaccagcuaccaguaccugaucauccagaacaccaccugggaggaccacugccaguucagcagacccagccccaucggcuaccugggccugcugagccagagaaccagagacaucuacaucagcagaagacgccggggcaccuucaccuggacccugagcgacagcgagagcaacgagacccccggcggcuacugccugaccagauggaugcugaucgaggccgagcugaagugcuucggcaacaccgccguggccaagugcaacgagaagcacgacgaggaguucugcgacaugcugagacuguucgacuucaacaagcaggccaucagaagacugaaggcccccgcccagaugagcauccagcugaucaacaaggccgugaacgcccugaucaacgaccagcugaucaugaagaaccaccugagagacaucaugugcauccccuacugcaacuacagcaaguacugguaccugaaccacaccgugaccggcagaaccagccugcccagaugcuggcuggugagcaacggcagcuaccugaacgagacccacuucagcgacgacaucgagcagcaggccgacaacaugaucaccgagcugcugcagaaggaguacauggacagacagggcaagaccccccugggccugguggaccuguucguguucagcaccagcuucuaccugaucagcaucuuccugcaccuggugaagauccccacccacagacacgugaucggcaagcccugccccaagccccacagacugaaccacaugggcaucugcagcugcggccuguacaagcaccccggcgugcccgugaaguggaagagaugaggacuagucccuguucccagagcccacuuuuuuuucuuuuuuugaaauaaaauagccugucuuucagaucuaaaaaaaaaaaaaaaaaaaaaaaaaaaaaaaaaaaaaaaaaaaaaaaaaaaaaaaaaaaaaaaaaaaaaaaaaaaaaaaaaaaaaaaaaaaaaaaaaaaa

SEQ ID NO: 15927 - RNA, 1740 nt, Artificial Sequence
  mRNA product Design a-2 (A100) comprising derived and/or modified sequence from LASV(LASV035-NIG-2009;Clade II)__AIT17588__GPCmut1 (opt4)
aggagaguccgcucagccagguugcagaagcggcuuagcguguguccuaaucuucucucugcguguagguaggccugugccgcaaacaagcuuaccaugggccagaucaucaccuucuuccaggaggugccccacgugaucgaggaggugaugaacaucgugcugaucgcccugagccugcuggccauccugaagggcaucuacaacguggccaccugcggccuguucggccuggugagcuuccugcugcugugcggcagaagcugcagcaccaccuacaagggcguguacgagcugcagacccuggagcuggacauggccagccugaacaugaccaugccccugagcugcaccaagaacaacagccaccacuacaucauggugggcaacgagaccggccuggagcugacccugaccaacaccagcaucaucaaccacaaguucugcaaccugagcgacgcccacaagaagaaccuguacgaccacgcccugaugagcaucaucagcaccuuccaccugagcauccccaacuucaaccaguacgaggccaugagcugcgacuucaacggcggcaagaucagcgugcaguacaaccugagccacgccuacgccguggacgccgccaaccacugcggcaccaucgccaacggcgugcugcagaccuucaugagaauggccuggggcggcagcuacaucgcccuggacagcggcugcggcagcugggacugcaucaugaccagcuaccaguaccugaucauccagaacaccaccugggaggaccacugccaguucagcagacccagccccaucggcuaccugggccugcugagccagagaaccagagacaucuacaucagcagaagacgccggggcaccuucaccuggacccugagcgacagcgagggcaacgagacccccggcggcuacugccugaccagauggaugcugaucgaggccgagcugaagugcuucggcaacaccgccguggccaagugcaacgagaagcacgacgaggaguucugcgacaugcugagacuguucgacuucaacaagcaggccaucagaagacugaaggcccccgcccagaugagcauccagcugaucaacaaggccgugaacgcccugaucaacgaccagcugaucaugaagaaccaccugagagacaucaugugcauccccuacugcaacuacagcaaguacugguaccugaaccacaccgugaccggcaagaccagccugcccagaugcuggcuggugagcaacggcagcuaccugaacgagacccacuucagcgacgacaucgagcagcaggccgacaacaugaucaccgagcugcugcagaaggaguacaucgacagacagggcaagaccccccugggccugguggaccuguucguguucagcaccagcuucuaccugaucagcaucuuccugcaccuggugaagauccccacccacagacacgugaucggcaagcccugccccaagccccacagacugaaccacaugggcaucugcagcugcggccuguacaagcaccccggcgugcccgugaaguggaagagaugaggacuagucccuguucccagagcccacuuuuuuuucuuuuuuugaaauaaaauagccugucuuucagaucuaaaaaaaaaaaaaaaaaaaaaaaaaaaaaaaaaaaaaaaaaaaaaaaaaaaaaaaaaaaaaaaaaaaaaaaaaaaaaaaaaaaaaaaaaaaaaaaaaaaa

SEQ ID NO: 15928 - RNA, 1740 nt, Artificial Sequence
  mRNA product Design a-2 (A100) comprising derived and/or modified sequence from LASV(LASV1000-NIG-2009;Clade II)__AIT17782__GPCmut1 (opt4)
aggagaguccgcucagccagguugcagaagcggcuuagcguguguccuaaucuucucucugcguguagguaggccugugccgcaaacaagcuuaccaugggccagaucaucaccuucuuccaggaggugccccacgugaucgaggaggugaugaacaucgugcugaucgcccugagccugcuggccauccugaagggcaucuacaacguggccaccugcggccuguucggccuggugagcuuccugcugcugugcggcagaagcugcagcaccaccuacaagggcguguacgagcugcagacccuggagcuggacauggccagccugaacaugaccaugccccugagcugcaccaagaacaacagccaccacuacaucauggugggcaacgagaccggccuggagcugacccugaccaacaccagcaucaucaaccacaaguucugcaaccugagcgacgcccacaagaagaaccuguacgaccacgcccugaugagcaucaucagcaccuuccaccugagcauccccaacuucaaccaguacgaggccaugagcugcgacuucaacggcggcaagaucagcgugcaguacaaccugagccacaccuacgccguggacgccgccaaccacugcggcaccaucgccaacggcgugcugcagaccuucaugagaauggccuggggcggcagcuacaucgcccuggacagcggcugcggcagcugggacugcaucaugaccagcuaccaguaccugaucauccagaacaccaccugggaggaccacugccaguucagcagacccagccccaucggcuaccugggccugcugagccagagaaccagagacaucuacaucagcagaagacgccggggcaccuucaccuggacccugagcgacagcgagggcaacgagacccccggcggcuacugccugaccagauggaugcugaucgaggccgagcugaagugcuucggcaacaccgccguggccaagugcaacgagaagcacgacgaggaguucugcgacaugcugagacuguucgacuucaacaagcaggccaucaagagacugaagacccccgcccagaugagcauccagcugaucaacaaggccgugaacgcccugaucaacgaccagcugaucaugaagaaccaccugagagacaucaugugcauccccuacugcaacuacagcaaguacugguaccugaaccacaccgugaccggcaagaccagccugcccagaugcuggcuggugagcaacggcagcuaccugaacgagacccacuucagcgacgacaucgagcagcaggccgacaacaugaucaccgagcugcugcagaaggaguacaucgacagacagggcaagaccccccugggccugguggaccuguucguguucagcaccagcuucuaccugaucagcaucuuccugcaccuggugaagauccccacccacagacacguggugggcaagcccugccccaagccccacagacugaaccacaugggcaucugcagcugcggccuguacaagcaccccggcgugcccgugaaguggaagagaugaggacuagucccuguucccagagcccacuuuuuuuucuuuuuuugaaauaaaauagccugucuuucagaucuaaaaaaaaaaaaaaaaaaaaaaaaaaaaaaaaaaaaaaaaaaaaaaaaaaaaaaaaaaaaaaaaaaaaaaaaaaaaaaaaaaaaaaaaaaaaaaaaaaaa

SEQ ID NO: 15929 - RNA, 1740 nt, Artificial Sequence
  mRNA product Design a-2 (A100) comprising derived and/or modified sequence from LASV(LASV221-NIG-2010;Clade II)__AIT17624__GPCmut1 (opt4)
aggagaguccgcucagccagguugcagaagcggcuuagcguguguccuaaucuucucucugcguguagguaggccugugccgcaaacaagcuuaccaugggccagaucaucaccuucuuccaggaggugccccacgugaucgaggaggugaugaacaucgugcugaucgcccugagccugcuggccauccugaagggcaucuacaacguggccaccugcggccuguucggccuggugagcuuccugcugcugugcggcagaagcugcagcaccaccuacaagggcguguacgagcugcagacccuggagcuggacauggccagccugaacaugaccaugccccugagcugcaccaagaacaacagccaccacuacaucauggugggcaacgagaccggccuggagcugacccugaccaacaccagcaucaucaaccacaaguucugcaaccugagcgacgcccacaagaagaaccuguacgaccacgcccugaugagcaucaucagcaccuuccaccugagcauccccaacuucaaccaguacgaggccaugagcugcgacuucaacggcggcaagaucagcgugcaguacaaccugagccacaccuacgccaucgacgccgccaaccacugcggcaccaucgccaacggcgugcugcagaccuucaugagaauggccuggggcggcagcuacaucgcccuggacagcggcugcggcagcugggacugcaucaugaccagcuaccaguaccugaucauccagaacaccaccugggaggaccacugccaguucagcagacccagccccaucggcuaccugggccugcugagccagagaaccagagacaucuacaucagcagaagacgccggggcaccuucaccuggacccugagcgacagcgagggcaacgagacccccggcggcuacugccugaccagauggaugcugaucgaggccgagcugaagugcuucggcaacaccgccguggccaagugcaacgagaagcacgacgaggaguucugcgacaugcugagacuguucgacuucaacaagcaggccaucagaagacugaagacccccgcccagaugagcauccagcugaucaacaaggccgugaacgcccugaucaacgaccagcugaucaugaagaaccaccugagagacaucaugugcauccccuacugcaacuacagcaaguacugguaccugaaccacaccgugaccggcaagaccagccugcccagaugcuggcuggugagcaacggcagcuaccugaacgagacccacuucagcgacgacaucgagcagcaggccgacaacaugaucaccgagaugcugcagaaggaguacauggacagacagggcaagaccccccugggccugguggaccuguucguguucagcaccagcuucuaccugaucagcaucuuccugcaccuggugaagauccccacccacagacacgugaucggcaagcccugccccaagccccacagacugaaccacaugggcaucugcagcugcggccuguacaagcaccccggcgugcccgugaaguggaagagaugaggacuagucccuguucccagagcccacuuuuuuuucuuuuuuugaaauaaaauagccugucuuucagaucuaaaaaaaaaaaaaaaaaaaaaaaaaaaaaaaaaaaaaaaaaaaaaaaaaaaaaaaaaaaaaaaaaaaaaaaaaaaaaaaaaaaaaaaaaaaaaaaaaaaa

SEQ ID NO: 15930 - RNA, 1740 nt, Artificial Sequence
  mRNA product Design a-2 (A100) comprising derived and/or modified sequence from LASV(LASV237-NIG-2010;Clade II)__AIT17638__GPCmut1 (opt4)
aggagaguccgcucagccagguugcagaagcggcuuagcguguguccuaaucuucucucugcguguagguaggccugugccgcaaacaagcuuaccaugggccagaucaucaccuucuuccaggaggugccccacgugaucgaggaggugaugaacaucgugcugaucgcccugagccugcuggccauccugaagggcaucuacaacguggccaccugcggccuguucggccuggugagcuuccugcugcugugcggcagaagcugcagcaccaccuacaagggcguguacgagcugcagacccuggagcuggacauggccagccugaacaugaccaugccccugagcugcaccaagaacaacagccaccacuacaucauggugggcaacgagaccggccuggagcugacccugaccaacaccagcaucaucaaccacaaguucugcaaccugagcgacgcccacaagaaggaccuguacgaccacgcccugaugagcaucaucagcaccuuccaccugagcauccccaacuucaaccaguacgaggccaugagcugcgacuucaacggcggcaagaucagcgugcaguacaaccugagccacaccuacgccguggacgccgccaaccacugcggcaccaucgccaacggcgugcugcagaccuucaugagaauggccuggggcggcagcuacaucgcccuggacagcggcugcggcagcugggacugcaucaugaccagcuaccaguaccugaucauccagaacaccaccugggaggaccacugccaguucagcagacccagccccaucggcuaccugggccugcugagccagagaaccagagacaucuacaucagcagaagacgccggggcaccuucaccuggacccugagcgacagcgagggcaacgagacccccggcggcuacugccugaccagauggaugcugaucgaggccgagcugaagugcuucggcaacaccgccguggccaagugcaacgagaagcacgacgaggaguucugcgacaugcugagacuguucgacuucaacaagcaggccaucagaagacugaagacccccgcccagaugagcauccagcugaucaacaaggccgugaacgcccugaucaacgaccagcugaucaugaagaaccaccugagagacaucaugugcauccccuacugcaacuacagcaaguacugguaccugaaccacaccgugaccggcaagaccagccugcccagaugcuggcuggugagcaacggcagcuaccugaacgagacccacuucagcgacgacaucgagcagcaggccgacaacaugaucaccgagcugcugcagaaggaguacauggacagacagggcaagaccccccugggccugguggaccuguucguguucagcaccagcuucuaccugaucagcaucuuccugcaccugaucaagauccccacccacagacacaucaccggcaagcccugccccaagccccacagacugaaccacaugggcaucugcagcugcggccuguacaagcaccccggcgugcccgugaaguggaagagaugaggacuagucccuguucccagagcccacuuuuuuuucuuuuuuugaaauaaaauagccugucuuucagaucuaaaaaaaaaaaaaaaaaaaaaaaaaaaaaaaaaaaaaaaaaaaaaaaaaaaaaaaaaaaaaaaaaaaaaaaaaaaaaaaaaaaaaaaaaaaaaaaaaaaa

SEQ ID NO: 15931 - RNA, 1740 nt, Artificial Sequence
  mRNA product Design a-2 (A100) comprising derived and/or modified sequence from LASV(LASV253-NIG-2011;Clade II)__AIT17670__GPCmut1 (opt4)
aggagaguccgcucagccagguugcagaagcggcuuagcguguguccuaaucuucucucugcguguagguaggccugugccgcaaacaagcuuaccaugggccagaucaucaccuucuuccaggaggugccccacgugaucgaggaggugaugaacaucgugcugaucgcccugagccugcuggccauccugaagggcaucuacaacguggccaccugcggccuguucggccuggugagcuuccugcugcugugcggcagaagcugcagcaccaccuacaagggcguguacgagcugcagacccuggagcuggacauggccagccugaacaugaccaugccccugagcugcaccaagaacaacagccaccacuacaucauggugggcaacgagaccggccuggagcugacccugaccaacaccagcaucaucaaccacaaguucugcaaccugagcgacgcccacaagaagaaccuguacgaccacgcccugaugagcaucaucagcaccuuccaccugagcauccccaacuucaaccaguacgaggccaugagcugcgacuucaacggcggcaagaucagcgugcaguacaaccugagccacaccuacgccguggacgccgccaaccacugcggcaccaucgccaacggcgugcugcagaccuucaugagaauggccuggggcggcagcuacaucgcccuggacagcggcugcggcagcugggacugcaucaugaccagcuaccaguaccugaucauccagaacaccaccugggaggaccacugccaguucagcagacccagccccaucggcuaccugggccugcugagccagagaaccagagacaucuacaucagcagaagacgccggggcaccuucaccuggacccugagcgacagcgagggcaacgagacccccggcggcuacugccugaccagauggaugcugaucgaggccgagcugaagugcuucggcaacaccgccguggccaagugcaacgagaagcacgacgaggaguucugcgacaugcugagacuguucgacuucaacaagcaggccaucagaagacugaaggcccccgcccagaugagcauccagcugaucaacaaggccgugaacgcccugaucaacgaccagcugaucaugaagaaccaccugagagacaucaugugcauccccuacugcaacuacagcaaguacugguaccugaaccacaccgugaccggcagaaccagccugcccagaugcuggcuggugagcaacggcagcuaccugaacgagacccacuucagcgacgacaucgagcagcaggccgacaacaugaucaccgagcugcugcagaaggaguacaucgacagacagggcaagaccccccugggccugguggaccuguucguguucagcaccagcuucuaccugaucagcaucuuccugcaccuggugaagauccccacccacagacacaucaucggcaagcccugccccaagccccacagacugaaccacaugggcaucugcagcugcggccuguacaagcaccccggcgugcccgugaaguggaagagaugaggacuagucccuguucccagagcccacuuuuuuuucuuuuuuugaaauaaaauagccugucuuucagaucuaaaaaaaaaaaaaaaaaaaaaaaaaaaaaaaaaaaaaaaaaaaaaaaaaaaaaaaaaaaaaaaaaaaaaaaaaaaaaaaaaaaaaaaaaaaaaaaaaaaa

SEQ ID NO: 15932 - RNA, 1740 nt, Artificial Sequence
  mRNA product Design a-2 (A100) comprising derived and/or modified sequence from LASV(LASV254-NIG-2011;Clade II)__AIT17674__GPCmut1 (opt4)
aggagaguccgcucagccagguugcagaagcggcuuagcguguguccuaaucuucucucugcguguagguaggccugugccgcaaacaagcuuaccaugggccagaucaucaccuucuuccaggaggugccccacgugaucgaggaggugaugaacaucgugcugaucgcccugagccugcuggccauccugaagggcaucuacaacguggccaccugcggccuguucggccuggugagcuuccugcugcugugcggcagaagcugcagcaccaccuacaagggcguguacgagcugcagacccuggagcuggacaugaccaaccugaacaugaccaugccccugagcugcaccaagaacaacagccaccacuacaucauggugggcaacgagaccggccuggagcugacccugaccaacaccagcaucaucaaccacaaguucugcaaccugagcgacgcccacaagaagaaccuguacaaccacgcccugaugagcaucaucagcaccuuccaccugagcauccccaacuucaaccaguacgaggccaugagcugcgacuucaacggcggcaagaucagcgugcaguacaaccugagccacagcuacgccguggacgccgccaaccacugcggcaccaucgccaacggcgugcugcagaccuucaugagaauggccuggggcggcagcuacaucgcccuggacagcggcugcggcaacugggacugcaucaugaccagcuaccaguaccugaucauccagaacaccaccugggaggaccacugccaguucagcagacccagccccaucggcuaccugggccugcugagccagagaaccagagacaucuacaucagcagaagacgccggggcaccuucaccuggacccugagcgacagcgagggcaacgagacccccggcggcuacugccugaccagauggaugcugaucgaggccgagcugaagugcuucggcaacaccgccguggccaagugcaacgagaagcacgacgaggaguucugcgacaugcugagacuguucgacuucaacaagcaggccaucagaagacugaagacccccgcccaggccaacauccagcugaucaacaaggccgugaacgcccugaucaacgaccagcugaucaugaagaaccaccugagagacaucaugugcauccccuacugcaacuacagcaaguacugguaccugaaccacaccgugaccggcaagaccagccugcccagaugcuggcuggugagcaacggcagcuaccugaacgagacccacuucagcgacgacaucgagcagcaggccgacaacaugaucaccgagcugcugcagaaggaguacauggacagacagggcaagaccccccugggccugguggaccuguucguguucagcaccagcuucuaccugaucagcaucuuccugcaccuggugaagauccccacccacagacacgugaucggcaagcccugccccaagccccacagacugaaccacaugggcaucugcagcugcggccuguacaagcaccccggcgugcccgugaaguggaagagaugaggacuagucccuguucccagagcccacuuuuuuuucuuuuuuugaaauaaaauagccugucuuucagaucuaaaaaaaaaaaaaaaaaaaaaaaaaaaaaaaaaaaaaaaaaaaaaaaaaaaaaaaaaaaaaaaaaaaaaaaaaaaaaaaaaaaaaaaaaaaaaaaaaaaa

SEQ ID NO: 15933 - RNA, 1740 nt, Artificial Sequence
  mRNA product Design a-2 (A100) comprising derived and/or modified sequence from LASV(Nig08-A19;Clade III)__ADU56618__GPCmut1 (opt4)
aggagaguccgcucagccagguugcagaagcggcuuagcguguguccuaaucuucucucugcguguagguaggccugugccgcaaacaagcuuaccaugggccagaucgugaccuucuuccaggaggugccccacgugaucgaggaggugaugaacaucgugcugaucgcccugagcauccuggccauccugaagggccuguacaacaucgccaccugcggccugaucggccuggugaccuuccugcugcugagcggcagaagcugcagcaugaccuacaagggcguguacgagcugcagacccuggagcugaacaugaacacccugaacaugaccaugccccugagcugcaccaagaacaacagccaccacuacaucauggugggcaacgagaccggccuggagcugacccugaccaacaccagccugcugcaccacaaguucugcaaccugagcgacgcccacaagaagaaccuguacgaccacacccugaugagcaucaucagcaccuuccaccugagcauccccaacuucaaccaguacgaggccaugagcugcgacuucaacggcggcaagaucaccgugcaguacaaccugagccacagcuacgccaucgacgccgccaaccacugcggcaccguggccaacggcgugcugcagaccuucaugagaauggccuggggcggcagcuacaucgcccuggacagcggcugcggcaagugggacugcaucaugaccagcuaccaguaccugaucauccagaacaccaccugggaggaccacugccaguucagcagacccagccccaucggcuaccugggccugcugagccagagaaccagagacaucuacaucagcagaagacgccggggcaccuucaccuggacccugagcgacagcgagggcaacgagacccccggcggcuacugccugaccagauggaugcugaucgaggccgagcugaagugcuucggcaacaccgccguggccaagugcaacgagaagcacgacgaggaguucugcgacaugcugagacuguucgacuucaacaagcaggccaucagaagacugaaggcccccgcccagaugagcauccagcugaucaacaaggccgugaacgcccugaucaacgaccagcugaucaugaagaaccaccugagagacaucaugugcauccccuacugcaacuacagcaaguacugguaccugaaccacaccagcaccggcagaaccagccugcccagaugcuggcuggugagcaacggcagcuaccugaacgagacccacuucagcgacgacaucgagcagcaggccgacaacaugaucaccgagaugcugcagaaggaguaccuggacagacagggcaagaccccccugggccugguggaccuguucguguucagcaccagcuucuaccugaucagcaucuuccugcaccuggugaagauccccacccacagacacaucgugggcaagcccugccccaagccccacagacugaaccacaugggcaucugcagcugcggccuguacaagcagcccggcgugcccgugagauggaagagaugaggacuagucccuguucccagagcccacuuuuuuuucuuuuuuugaaauaaaauagccugucuuucagaucuaaaaaaaaaaaaaaaaaaaaaaaaaaaaaaaaaaaaaaaaaaaaaaaaaaaaaaaaaaaaaaaaaaaaaaaaaaaaaaaaaaaaaaaaaaaaaaaaaaaa

SEQ ID NO: 15934 - RNA, 1743 nt, Artificial Sequence
  mRNA product Design a-2 (A100) comprising derived and/or modified sequence from LASV(G1180-SLE-2010;Clade IV)__AIT17168__GPCmut1 (opt4)
aggagaguccgcucagccagguugcagaagcggcuuagcguguguccuaaucuucucucugcguguagguaggccugugccgcaaacaagcuuaccaugggccagaucgugaccuucuuccaggaggugccccacgugaucgaggaggugaugaacaucgugcugaucgcccugagcauccuggccgugcugaagggccuguacaacuucgccaccugcggccuggugggccugcugaccuuccugcugcugugcggcagaagcugcaccgccagcagauacaagggcguguacgagcugcagacccuggagcugaacauggagacccugaacaugaccaugccccugagcugcaccaagaacaacagccaccacuacaucauggugggcaacgagaccggccuggagcugacccugaccaacaccagcaucaucaaccacaaguucugcaaccugagcgacgcccacaagaagaaccuguacgaccacgcccugaugagcaucaucagcaccuuccaccugagcauccccaacuucaaccaguacgaggccaugagcugcgacuucaacggcggcaagaucagcgugcaguacaaccugagccacagcuacgccggcgacgccgccaaccacugcggcaccguggccaacggcgugcugcagaccuucaugagaauggccuggggcggcagcuacaucgcccuggacagcggcugcggcagcugggacugcaucaugaccagcuaccaguaccugaucauccagaacaccaccugggaggaccacugccaguucagcagacccagccccaucggcuaccugggccugcugagccagagaaccagagacaucuacaucagcagaagacgccggggcaccuucaccuggacccugagcgacagcgagggcaaggacacccccggcggcuacugccugaccagauggaugcugaucgaggccgagcugaagugcuucggcaacaccgccguggccaagugcaacgagaagcacgacgaggaguucugcgacaugcugagacuguucgacuucaacaagcaggccauccagagacugaaggcccccgcccagaugagcauccagcugaucaacaaggccgugaacgcccugaucaacgaccagcugaucaugaagaaccaccugagagacaucaugugcauccccuacugcaacuacagcaaguacugguaccugaaccacaccaccaccggcaagaccagccugcccaagugcuggcuggugagcaacggcagcuaccugaacgagacccacuucagcgacgacaucgagcagcaggccgacaacaugaucaccgagaugcugcagaaggaguacauggagagacagggcaagaccccccugggccugguggaccuguucguguucagcaccagcuucuaccugaucagcaucuuccugcaccuggugaagauccccacccacagacacaucgugggcaagagcugccccaagccccacagacugaaccacaugggcaucugcagcugcggccuguacaagcagcccggcgugcccgugaaguggaagagaugaggacuagucccuguucccagagcccacuuuuuuuucuuuuuuugaaauaaaauagccugucuuucagaucuaaaaaaaaaaaaaaaaaaaaaaaaaaaaaaaaaaaaaaaaaaaaaaaaaaaaaaaaaaaaaaaaaaaaaaaaaaaaaaaaaaaaaaaaaaaaaaaaaaaa

SEQ ID NO: 15935 - RNA, 1743 nt, Artificial Sequence
  mRNA product Design a-2 (A100) comprising derived and/or modified sequence from LASV(G1442-SLE-2011;Clade IV)__AIT17180__GPCmut1 (opt4)
aggagaguccgcucagccagguugcagaagcggcuuagcguguguccuaaucuucucucugcguguagguaggccugugccgcaaacaagcuuaccaugggccagaucgugaccuucuuccaggaggugccccacgugaucgaggaggugaugaacaucgugcugaucgcccugagcauccuggccgugcugaagggccuguacaacguggccaccugcggccugaucggccuggugaccuuccugcugcugugcggcagaagcugcaccaccacccuguacaagggcguguacgagcugcagacccuggagcugaacauggagacccugaacaugaccaugccccugagcugcaccaagaacaacagccaccacuacaucagagugggcaacgagaccggccuggagcugacccugaccaacaccagcaucaucaaccacaaguucugcaaccugagcgacgcccacaagaagaaccuguacgaccacgcccugaugagcaucaucagcaccuuccaccugagcauccccaacuucaaccaguacgaggccaugagcugcgacuucaacggcggcaagaucagcgugcaguacaaccugagccacagcuacgccggcgacgccgccaaccacugcggcaccguggccaacggcgugcugcagaccuucaugagaauggccuggggcggcagcuacaucgcccuggacagcggcugcggcaacugggacugcaucaugaccagcuaccaguaccugaucauccagaacaccaccugggacgaccacugccaguucagcagacccagccccaucggcuaccugggccugcugagccagagaaccagagacguguacaucagcagaagacgccggggcaccuucaccuggacccugagcgacagcgagggcaaggacacccccggcggcuacugccugaccagauggaugcugaucgaggccgagcugaagugcuucggcaacaccgccguggccaagugcaacgagaagcacgacgaggaguucugcgacaugcugagacuguucgacuucaacaagcaggccauccagagacugaaggcccccgcccagaugagcauccagcugaucaacaaggccgugaacgcccugaucaacgaccagcugaucaugaagaaccaccugagagacaucaugugcauccccuacugcaacuacagcaaguacugguaccugaacaacaccgccaccggcaagaccagccugcccaagugcuggcugaucagcaacggcagcuaccugaacgagacccacuucagcgacgacaucgagcaggaggccgacaacaugaucaccgagaugcugcagaaggaguacauggagagacagggcaagaccccccugggccugguggaccuguucguguucagcaccagcuucuaccugaucagcaucuuccugcaccuggugaagauccccacccacagacacaucgugggcaagagcugccccaagccccacagacugaaccacaugggcaucugcagcugcggccuguacaagcagcccggcgugcccgugagauggaagagaugaggacuagucccuguucccagagcccacuuuuuuuucuuuuuuugaaauaaaauagccugucuuucagaucuaaaaaaaaaaaaaaaaaaaaaaaaaaaaaaaaaaaaaaaaaaaaaaaaaaaaaaaaaaaaaaaaaaaaaaaaaaaaaaaaaaaaaaaaaaaaaaaaaaaa

SEQ ID NO: 15936 - RNA, 1743 nt, Artificial Sequence
  mRNA product Design a-2 (A100) comprising derived and/or modified sequence from LASV(G3010-SLE-2013;Clade IV)__AIT17344__GPCmut1 (opt4)
aggagaguccgcucagccagguugcagaagcggcuuagcguguguccuaaucuucucucugcguguagguaggccugugccgcaaacaagcuuaccaugggccagaucgugaccuucuuccaggaggugccccacgugaucgaggaggugaugaacaucgugcugaucgcccugagcauccuggccgugcugaagggccuguacaacuucgccaccugcggccuggugggccuggugaccuuccugcugcugugcggcagaagcugcaccaccagccuguacaagggcguguacgagcugcagacccuggagcugaacauggagacccugaacaugaccaugccccugagcugcaccaagaacaacagccaccacuacaucauggugggcaacgagaccggccuggagcugacccugaccaacaccagcaucaucaaccacaaguucugcaaccugagcgacgcccacaagaagaaccuguacaaccacgcccugaugagcaucaucagcaccuuccaccugagcauccccaacuucaaccaguacgaggccaugagcugcgacuucaacggcggcaagaucagcgugcaguacaaccugagccacagcuacgccggcgacgccgccagccacugcggcaccguggccaacggcgugcugcagaccuucaugagaauggccuggggcggcagcuacaucgcccuggacagcggcugcggcaagugggacugcaucaugaccagcuaccaguaccugaucauccagaacaccaccugggaggaccacugccaguucagcagacccagccccaucggcuaccugggccugcugagccagagaaccagagacaucuacaucagcagaagacgccggggcaccuucaccuggacccugagcgacagcgagggcaaggacacccccggcggcuacugccugaccagauggaugcugaucgaggccgagcugaagugcuucggcaacaccgccguggccaagugcaacgagaagcacgacgaggaguucugcgacaugcugagacuguucgacuucaacaagcaggccauccagagacugaagacccccgcccagaugagcauccagcugaucaacaaggccgugaacgcccugaucaacgaccagcugaucaugaagaaccaccugagagacaucaugugcauccccuacugcaacuacagcaaguacugguaccugaaccacaccaccaccggcaagaccagccugcccaagugcuggcuggugagcaacggcagcuaccugaacgagacccacuucagcgacgacaucgagcagcaggccgacaacaugaucaccgagaugcugcagaaggaguacauggagagacagggcaagaccccccugggccugguggaccuguucguguucagcaccagcuucuaccugaucagcaucuuccugcaccuggugaagauccccacccacagacacaucgugggcaagagcugccccaagccccacagacugaaccacaugggcaucugcagcugcggccuguacaagcagcccggcgugcccgugagauggaagagaugaggacuagucccuguucccagagcccacuuuuuuuucuuuuuuugaaauaaaauagccugucuuucagaucuaaaaaaaaaaaaaaaaaaaaaaaaaaaaaaaaaaaaaaaaaaaaaaaaaaaaaaaaaaaaaaaaaaaaaaaaaaaaaaaaaaaaaaaaaaaaaaaaaaaa

SEQ ID NO: 15937 - RNA, 1743 nt, Artificial Sequence
  mRNA product Design a-2 (A100) comprising derived and/or modified sequence from LASV(G502-SLE-2009;Clade IV)__AIT17126__GPCmut1 (opt4)
aggagaguccgcucagccagguugcagaagcggcuuagcguguguccuaaucuucucucugcguguagguaggccugugccgcaaacaagcuuaccaugggccagaucgugaccuucuuccaggaggugccccacgugaucgaggaggugaugaacaucgugcugaucgcccugagcauccuggccgugcugaagggccuguacaacuucgccaccugcggccuggugggccugcugaccuuccugcugcugugcggcagaagcugcaccaccggccuguacaagggcguguacgagcugcagacccuggagcugaacauggagacccugaacaugaccaugccccugagcugcaccaagaacaacagccaccacuacaucauggugggcaacgagaccggccuggagcugacccugaccaacaccagcaucaucaaccacaaguucugcaaccugagcgacgcccacaagaagaaccuguacgaccacgcccugaugagcaucaucagcaccuuccaccugagcauccccaacuucaaccaguacgaggccaugagcugcgacuucaacggcggcaagaucagcgugcaguacaaccugagccacagcuacgccggcgacgccgccgaccacugcggcaccguggccaacggcgugcugcagaccuucaugagaauggccuggggcggcagcuacaucgcccuggacagcggcugcggcagaugggacugcaucaugaccagcuaccaguaccugaucauccagaacaccaccugggaggaccacugccaguucagcagacccagccccaucggcuaccugggccugcugagccagagaaccagagacaucuacaucagcagaagacgccggggcaccuucaccuggacccugagcgacagcgagggcaaggacacccccggcggcuacugccugaccagauggaugcugaucgaggccgagcugaagugcuucggcaacaccgccguggccaagugcaacgagaagcacgacgaggaguucugcgacaugcugagacuguucgacuucaacaagcaggccauccagagacugaaggcccccgcccagaugagcauccagcugaucaacaaggccgugaacgcccugaucaacgaccagcuggugaugaagaaccaccugagagacaucaugugcauccccuacugcaacuacagcagauacugguaccugaaccacaccaccaccggcagaaccagccugcccaagugcuggcuggugagcaacggcagcuaccugaacgagacccacuucagcgacgacaucgagcagcaggccgacaacaugaucaccgagaugcugcagaaggaguacauggagagacagggcaagaccccccugggccugguggaccuguucguguucagcaccagcuucuaccugaucagcaucuuccugcaccuggugaagauccccacccacagacacaucgugggcaagagcugccccaagccccacagacugaaccacaugggcaucugcagcugcggccuguacaagcagcccggcgugcccgugaaguggaagagaugaggacuagucccuguucccagagcccacuuuuuuuucuuuuuuugaaauaaaauagccugucuuucagaucuaaaaaaaaaaaaaaaaaaaaaaaaaaaaaaaaaaaaaaaaaaaaaaaaaaaaaaaaaaaaaaaaaaaaaaaaaaaaaaaaaaaaaaaaaaaaaaaaaaaa

SEQ ID NO: 15938 - RNA, 1743 nt, Artificial Sequence
  mRNA product Design a-2 (A100) comprising derived and/or modified sequence from LASV(G733-SLE-2010;Clade IV)__AIT17154__GPCmut1 (opt4)
aggagaguccgcucagccagguugcagaagcggcuuagcguguguccuaaucuucucucugcguguagguaggccugugccgcaaacaagcuuaccaugggccagaucgugaccuucuuccaggaggugccccacgugaucgaggaggugaugaacaucgugcugaucgcccugagcauccuggccgugcugaagggccuguacaacuucgccaccugcggcaucgugggccuggugagcuuccugcugcugugcggcagaagcugcaccaccagccuguacaagggcguguacgagcugcagacccuggagcugaacauggagacccugaacaugaccaugccccugagcugcaccaagaacaacagccaccacuacaucauggugggcaacgagaccggccuggagcugacccugaccaacaccagcaucaucaaccacaaguucugcaaccugagcgacgcccacaagaagaaccuguacgaccacgcccugaugagcaucaucagcaccuuccaccugagcauccccaacuucaaccaguacgaggccaugagcugcgacuucaacggcggcaagaucagcgugcaguacaaccugagccacagcuacgccggcgacgccgccaaccacugcggcaccaucgccaacggcgugcugcagaccuucaugagaauggccuggggcggcagcuacaucgcccuggacagcggcugcgacagaugggacugcaucaugaccagcuaccaguaccugaucauccagaacaccaccugggaggaccacugccaguucagcagacccagccccaucggcuaccugggccugcugagccagagaaccagagacaucuacaucagcagaagacgccggggcaccuucaccuggacccugagcgacagcgagggcaaggacacccccggcggcuacugccugaccagauggaugcugaucgaggccgagcugaagugcuucggcaacaccgccguggccaagugcaacgagaagcacgacgaggaguucugcgacaugcugagacuguucgacuucaacaagcaggccauccagagacugaaggcccccgcccagaugagcauccagcugaucaacaaggccgugaacgcccugaucaacgaccagcugaucaugaagaaccaccugagagacaucaugugcauccccuacugcaacuacagcaaguacugguaccugaaccacaccaccaccggcaagaccagccugcccaagugcuggcuggugagcaacggcagcuaccugaacgagacccacuucagcgacgacaucgagcagcaggccgacaacaugaucaccgagaugcugcagaaggaguacauggagagacagggcaagaccccccugggccugguggaccuguucguguucagcaccagcuucuaccugaucagcaucuuccugcaccuggugaagauccccacccacagacacguggugggcaagagcugccccaagccccacagacugaaccacaugggcaucugcagcugcggccuguacggccagcccggcgugcccgugaaguggaagagaugaggacuagucccuguucccagagcccacuuuuuuuucuuuuuuugaaauaaaauagccugucuuucagaucuaaaaaaaaaaaaaaaaaaaaaaaaaaaaaaaaaaaaaaaaaaaaaaaaaaaaaaaaaaaaaaaaaaaaaaaaaaaaaaaaaaaaaaaaaaaaaaaaaaaa

SEQ ID NO: 15939 - RNA, 1743 nt, Artificial Sequence
  mRNA product Design a-2 (A100) comprising derived and/or modified sequence from MOPV/LASV reassortant(IGS-1;Clade IV)__AFY05576__GPCmut1 (opt4)
aggagaguccgcucagccagguugcagaagcggcuuagcguguguccuaaucuucucucugcguguagguaggccugugccgcaaacaagcuuaccaugggccagaucgugaccuucuuccaggaggugccccacgugaucgaggaggugaugaacaucgugcugaucgcccugagcgugcuggccgugcugaagggccuguacaacuucgccaccugcggccuggugggccuggugaccuuccugcugcugugcggcagaagcugcaccaccagccuguacaagggcguguacgagcugcagacccuggagcugaacauggagacccugaacaugaccaugccccugagcugcaccaagaacaacagccaccacuacaucauggugggcaacgagaccggccuggagcugacccugaccaacaccagcaucaucaaccacaaguucugcaaccugagcgacgcccacaagaagaaccuguacgaccacgcccugaugagcaucaucagcaccuuccaccugagcauccccaacuucaaccaguacgaggccaugagcugcgacuucaacggcggcaagaucagcgugcaguacaaccugagccacagcuacgccggcgacgccgccaaccacugcggcaccguggccaacggcgugcugcagaccuucaugagaauggccuggggcggcagcuacaucgcccuggacagcggcugcggcaacugggacugcaucaugaccagcuaccaguaccugaucauccagaacaccaccugggaggaccacugccaguucagcagacccagccccaucggcuaccugggccugcugagccagagaaccagagacaucuacaucagcagaagacgccggggcaccuucaccuggacccugagcgacagcgagggcgaggacacccccggcggcuacugccugaccagauggaugcugaucgaggccgagcugaagugcuucggcaacaccgccguggccaagugcaacgagaagcacgacgaggaguucugcgacaugcugagacuguucgacuucaacaagcaggccauccagagacugaaggcccccgcccagaugagcauccagcugaucaacaaggccgugaacgcccugaucaacgaccagcugaucaugaagaaccaccugagagacaucaugugcauccccuacugcaacuacagcaaguacugguaccugaaccacaccaccaccggcagaaccagccugcccaagugcuggcuggugagcaacggcagcuaccugaacgagacccacuucagcgacgacaucgagcagcaggccgacaacaugaucaccgagaugcugcagaaggaguacauggagagacagggcaagaccccccugggccugguggaccuguucguguucagcaccagcuucuaccugaucagcaucuuccugcaccuggugaagauccccacccacagacacaucgugggcaagagcugccccaagccccacagacugaaccacaugggcaucugcagcugcggccuguacaagcagcccggcgugcccgugaaguggaagagaugaggacuagucccuguucccagagcccacuuuuuuuucuuuuuuugaaauaaaauagccugucuuucagaucuaaaaaaaaaaaaaaaaaaaaaaaaaaaaaaaaaaaaaaaaaaaaaaaaaaaaaaaaaaaaaaaaaaaaaaaaaaaaaaaaaaaaaaaaaaaaaaaaaaaa

SEQ ID NO: 15940 - RNA, 1743 nt, Artificial Sequence
  mRNA product Design a-2 (A100) comprising derived and/or modified sequence from LASV(LM765-SLE-2012;Clade IV)__AIT17814__GPCmut1 (opt4)
aggagaguccgcucagccagguugcagaagcggcuuagcguguguccuaaucuucucucugcguguagguaggccugugccgcaaacaagcuuaccaugggccagaucgugaccuucuuccaggaggugccccacgugaucgaggaggugaugaacaucgugcugaucgcccugagcauccuggccgugcugaagggccuguacaacuucgccaccugcggccuggugggccuggugaccuuccugcugcugugcggcagaagcugcaccaccagccuguacaagggcguguacgagcugcagacccuggagcugaacauggagacccugaacaugaccaugccccugagcugcaccaagaacaacagccaccacuacaucauggugggcaacgagaccggccuggagcugacccugaccaacaccagcaucaucgaccacaaguucugcaaccugagcgacgcccacagaaagaaccuguacgaccacgcccugaugagcaucaucagcaccuuccaccugagcauccccaacuucaaccaguacgaggccaugagcugcgacuucaacggcggcaagaucagcgugcaguacaaccugagccacagcuacgccaaggacgccgccgaccacugcggcaccguggccaacggcgugcugcagaccuucaugagaauggccuggggcggcagcuacaucgcccuggacagcggcugcggcagaugggacugcaucaugaccagcuaccaguaccugaucauccagaacaccaccugggaggaccacugccaguucagcagacccagccccaucggcuaccugggccugcugagccagagaaccagagacaucuacaucagcagaagacgccggggcaccuucaccuggacccugagcgacagcgagggcaaggacacccccggcggcuacugccugaccagauggaugcugaucgaggccgagcugaagugcuucggcaacaccgccguggccaagugcaacgagaagcacgacgaggaguucugcgacaugcugagacuguucgacuucaacaagcaggccauccagagacugaaggcccccgcccagaugagcauccagcugaucaacaaggccgugaacgcccugaucaacgaccagcugaucaugaagaaccaccugagagacaucaugugcauccccuacugcaacuacagcaaguacugguaccugaaccacaccaccaccggcaagaccagccugcccaagugcuggcuggugagcaacggcagcuaccugaacgagacccacuucagcgacgacaucgagcagcaggccgacaacaugaucaccgagaugcugcagaaggaguacauggagagacagggcaagaccccccugggccugguggaccuguucguguucagcaccagcuucuaccugaucagcaucuuccugcaccuggugaagauccccacccacagacacaucgugggcaagcccugccccaagccccacagacugaaccacaugggcaucugcagcugcggccuguacaagcagcccggcgugcccgugaaguggaagagaugaggacuagucccuguucccagagcccacuuuuuuuucuuuuuuugaaauaaaauagccugucuuucagaucuaaaaaaaaaaaaaaaaaaaaaaaaaaaaaaaaaaaaaaaaaaaaaaaaaaaaaaaaaaaaaaaaaaaaaaaaaaaaaaaaaaaaaaaaaaaaaaaaaaaa

SEQ ID NO: 15941 - RNA, 1743 nt, Artificial Sequence
  mRNA product Design a-2 (A100) comprising derived and/or modified sequence from LASV(LM776-SLE-2012;Clade IV)__AIT17824__GPCmut1 (opt4)
aggagaguccgcucagccagguugcagaagcggcuuagcguguguccuaaucuucucucugcguguagguaggccugugccgcaaacaagcuuaccaugggccagaucgugaccuucuuccaggaggugccccacgugaucgaggaggugaugaacaucgugcugaucgcccugagcauccuggccgugcugaagggccuguacaacuucgccaccugcggccuggugggccuggugaccuuccugcugcugugcggcagaagcugcaccaccagcguguacaagggcguguacgagcugcagacccuggagcugaacauggagacccugaacaugaccaugccccugagcugcaccaagaacaacagccaccacuacaucauggugggcaacgagaccggccuggagcugacccugaccaacaccagcaucaucaaccacaaguucugcaaccugagcgacgcccacaagaagaaccuguacgaccacgcccugaugagcaucaucagcaccuuccaccugagcauccccaacuucaaccaguacgaggccaugagcugcgacuucaacggcggcaagaucagcgugcaguacaaccugagccacagcuacgccggcgacgccgccaaccacugcggcaccguggccaacggcgugcugcagaccuucaugagaauggccuggggcggcagcuacaucgcccuggacagcggcugcggcaagugggacugcaucaugaccagcuaccaguaccugaucauccagaacaccaccugggaggaccacugccaguucagcagacccagccccaucggcuaccugggccugcugagccagagaaccagagacaucuacaucagcagaagacgccggggcaccuucaccuggacccugagcgacagcgagggcaaggacacccccggcggcuacugccugaccagauggaugcugaucgaggccgagcugaagugcuucggcaacaccgccguggccaagugcaacgagaagcacgacgaggaguucugcgacaugcugagacuguucgacuucaacaagcaggccauccagagacugaaggcccccgcccagaugagcauccagcugaucaacaaggccgugaacgcccugaucaacgaccagcugaucaugaagaaccaccugagagacaucaugugcauccccuacugcaacuacagcaaguacugguaccugaaccacaccaccaccggcaagaccagccugcccaagugcuggcuggugagcaacggcagcuaccugaacgagacccacuucagcgacgacaucgagcagcaggccgacaacaugaucaccgagaugcugcagaaggaguacauggagagacagggcaagaccccccugggccugguggaccuguucguguucagcaccagcuucuaccugaucagcaucuuccugcaccuggugaagauccccacccacagacacaucgugggcaagagcugccccaagccccacagacugaaccacaugggcaucugcagcugcggccuguacaagcagcccggcgugcccgugagauggaagagaugaggacuagucccuguucccagagcccacuuuuuuuucuuuuuuugaaauaaaauagccugucuuucagaucuaaaaaaaaaaaaaaaaaaaaaaaaaaaaaaaaaaaaaaaaaaaaaaaaaaaaaaaaaaaaaaaaaaaaaaaaaaaaaaaaaaaaaaaaaaaaaaaaaaaa

SEQ ID NO: 15942 - RNA, 1743 nt, Artificial Sequence
  mRNA product Design a-2 (A100) comprising derived and/or modified sequence from LASV(Mad39;Clade IV)__ANH09722__GPCmut1 (opt4)
aggagaguccgcucagccagguugcagaagcggcuuagcguguguccuaaucuucucucugcguguagguaggccugugccgcaaacaagcuuaccaugggccagaucgugaccuucuuccaggaggugccccacgugaucgaggaggugaugaacaucgugcugaucgcccugagcauccuggccgugcugaagggccuguacaacguggccaccugcggccugaucggccuggugaccuuccugcugcugugcggcagaagcugcaccaccacccuguacaagggcguguacgagcugcaggcccuggagcugaacauggagacccugaacaugaccaugccccugagcugcaccaagaacaacagccaccacuacaucagagugggcaacgagaccggccuggagcugacccugaccaacaccagccugaucaaccacaaguucugcaaccugagcgacgcccacaagaagaaccuguacgaccacgcccugaugagcaucaucagcaccuuccaccugagcauccccaacuucaaccaguacgaggccaugagcugcgacuucaacgacggcaagaucagcgugcaguacaaccugagccacaccuacgccggcgacaccgccaaccacugcggcaccguggccaacggcgugcugcagaccuucaugagaauggccuggggcggcagcuacaucgcccuggacagcggcugcggcggcugggacugcaucaugaccagcuaccaguaccugaucauccagaacaccaccugggaggaccacugccaguucagcagacccagccccaucggcuaccugggccugcugagccagagaaccagagacaucuacaucagcagaagacgccggggcaccuucaccuggacccugagcgacagcgagggcaaggacacccccggcggcuacugccugaccagauggaugcugaucgaggccgagcugaagugcuucggcaacaccgccguggccaagugcaacgagaagcacgacgaggaguucugcgacaugcugagacuguucgacuucaacaagcaggccauccagagacugaaggcccccgcccagaugagcauccagcugaucaacaaggccgugaacgcccugaucaacgaccagcugaucaugaagaaccaccugagagacaucaugugcauccccuacugcaacuacagcaaguacugguaccugaaccacaccgugaccggcaagaccagccugcccaagugcuggcuggugagcaacggcagcuaccugaacgagacccacuucagcgacgacaucgagcagcaggccgacaacaugaucaccgagaugcugcagaaggaguacauggagagacagggcaagaccccccugggccugguggaccuguucguguucagcaccagcuucuaccugaucagcaucuuccugcaccuggugaagauccccacccacagacacguggugggcaagcccugccccaagccccacagacugaaccacaugggcaucugcagcugcggcuucuacaagcagcccggcgugcccgugagauggaagagaugaggacuagucccuguucccagagcccacuuuuuuuucuuuuuuugaaauaaaauagccugucuuucagaucuaaaaaaaaaaaaaaaaaaaaaaaaaaaaaaaaaaaaaaaaaaaaaaaaaaaaaaaaaaaaaaaaaaaaaaaaaaaaaaaaaaaaaaaaaaaaaaaaaaaa

SEQ ID NO: 15943 - RNA, 1743 nt, Artificial Sequence
  mRNA product Design a-2 (A100) comprising derived and/or modified sequence from LASV(Z0947-SLE-2011;Clade IV)__AIT17840__GPCmut1 (opt4)
aggagaguccgcucagccagguugcagaagcggcuuagcguguguccuaaucuucucucugcguguagguaggccugugccgcaaacaagcuuaccaugggccagaucgugaccuucuuccaggaggugccccacgugaucgaggaggugaugaacaucgugcugaucgcccugagcauccuggccgugcugaagggccuguacaacuucgccaccugcggccuggugggccuggugaccuuccugcugcugugcggcagaagcugcaccaucagccuguacaagggcguguacgagcugcagacccuggagcugaacauggagacccugaacaugaccaugccccugagcugcaccaagaacaacagccaccacuacaucauggugggcaacgagaccggccuggagcugacccugaccaacaccagcaucaucaaccacaaguucugcaaccugagcgacgcccacaagaagaaccuguacgaccacgcccugaugagcaucaucagcaccuuccaccugagcauccccaacuucaaccaguacgaggccaugagcugcgacuucaacggcggcaagaucagcgugcaguacaaccugagccacagcuacgccggcgacgccgccaaccacugcggcaccguggccaacggcgugcugcagaccuucaugagaauggccuggggcggcagcuacaucgcccuggacagcggcugcgacagaugggacugcaucaugaccagcuaccaguaccugaucauccagaacaccaccugggaggaccacugccaguucagcagacccagccccaucggcuaccugggccugcugagccagagaaccagagacaucuacaucagcagaagacgccggggcaccuucaccuggacccugagcgacagcgagggcaaggacacccccggcggcuacugccugaccagauggaugcugaucgaggccgagcugaagugcuucggcaacaccgccguggccaagugcaacgagaagcacgacgaggaguucugcgacaugcugagacuguucgacuucaacaagcaggccauccagagacugaaggcccccgcccagaugagcauccagcugaucaacaaggccgugaacgcccugaucaacgaccagcugaucaugaagaaccaccugagagacaucaugugcauccccuacugcaacuacagcaaguacugguaccugaaccacaccaccaccggcaagaccagccugcccaagugcuggcuggugagcaacggcagcuaccugaacgagacccacuucagcgacgacaucgagcagcaggccgacaacaugaucaccgagaugcugcagaaggaguacauggagagacagggcaagaccccccugggccugguggaccuguucguguucagcaccagcuucuaccugaucagcaucuuccugcaccuggugaagauccccacccacagacacaucgugggcaagcccugccccaagccccacagacugaaccacaugggcaucugcagcugcggccuguacaagcagcccggcgugcccgugaaguggaagagaugaggacuagucccuguucccagagcccacuuuuuuuucuuuuuuugaaauaaaauagccugucuuucagaucuaaaaaaaaaaaaaaaaaaaaaaaaaaaaaaaaaaaaaaaaaaaaaaaaaaaaaaaaaaaaaaaaaaaaaaaaaaaaaaaaaaaaaaaaaaaaaaaaaaaa

SEQ ID NO: 15944 - RNA, 1743 nt, Artificial Sequence
  mRNA product Design a-2 (A100) comprising derived and/or modified sequence from LASV(Josiah;Clade IV)__NP_694870__GPCmut1 (opt5)
aggagaguccgcucagccagguugcagaagcggcuuagcguguguccuaaucuucucucugcguguagguaggccugugccgcaaacaagcuuaccaugggccagaucgugaccuucuuucaagaggucccccacguuauugaagaggugaugaacaucgugcugauugcccucagcguccuggcugugcuuaaggggcuguacaauuucgccacaugcggacucguuggccuggugacguuucuucugcucugugggagauccugcaccacaucucuguauaaaggagucuacgaacugcagacccucgagcugaacauggaaacacuuaauaugaccaugccucugagcuguacaaagaacaauucccaucacuauaucauggugggcaacgagaccgggcucgagcugacgcuuaccaauacaucuauuaucaaccauaaauucugcaaucugagcgacgcgcacaagaaaaaccucuacgaucaugcucugauguccaucauuucuaccuuucaccugagcaucccgaauuucaaccaguaugaagccauguccugugacuuuaauggaggcaagauuagcguucaguacaaccucucucacuccuaugccggcgaugcugccaaucauugcgggacaguggcuaacggaguccugcaaaccuucaugcggauggccuggggcgggagcuacaucgcgcuugacucuggaugcggcaacugggauuguauuaugacguccuaccaguaucugaucauucagaauacaaccugggaggaccacugccaguuuagcagacccucuccuaucggguaccucggacugcuuucccaacggacacgcgauaucuauauuagcagacggcgccggggcaccuucaccuggacacuguccgacucugaaggcaaggauacgcccgggggauacugucugacccgcuggaugcucaucgaggccgagcugaaaugcuuuggcaacacagcuguggccaaguguaaugaaaaacaugacgaggaguucugcgauaugcuuagacuguuugacuucaacaagcaggcuauucagcggcucaaagcccccgcgcagaugagcauccaacugauuaauaaggccgugaacgcucuuaucaaugaucagcugaucaugaagaaccaccuccgcgacauuaugugcaucccuuauugcaauuacuccaaauauugguaccugaaccacaccacaaccggaagaacgagccugcccaaguguuggcucgucucuaauggcuccuaccugaacgaaacacauuucagcgacgauauugagcagcaagccgacaauaugaucaccgagaugcuucagaaagaauauauggagcggcaggggaagaccccucugggacucguugaucuguuuguguucucuaccagcuuuuaccugauuuccaucuuccuucaccucgugaaaaucccgacacaucgccacauugucggcaagucuugccccaaaccucauagacugaaccacaugggcaucuguagcugcgggcuguauaagcagcccggagugccuguuaaguggaaacggugaggacuagucccuguucccagagcccacuuuuuuuucuuuuuuugaaauaaaauagccugucuuucagaucuaaaaaaaaaaaaaaaaaaaaaaaaaaaaaaaaaaaaaaaaaaaaaaaaaaaaaaaaaaaaaaaaaaaaaaaaaaaaaaaaaaaaaaaaaaaaaaaaaaaa

SEQ ID NO: 15945 - RNA, 1740 nt, Artificial Sequence
  mRNA product Design a-2 (A100) comprising derived and/or modified sequence from LASV(LP;Clade I)__AAF86701__GPCmut1 (opt5)
aggagaguccgcucagccagguugcagaagcggcuuagcguguguccuaaucuucucucugcguguagguaggccugugccgcaaacaagcuuaccaugggccagaucauuaccuucuuucaagaggugccccacgucaucgaagagguuaugaacauugugcugaucgcccucagccugcuugcuauucugaaggggcucuacaauaucgccacaugcggaaucauuggccugguggcguuccuuuuucugugugggaaauccugcucucucacgcugaagggaggcuaugaacugcagacccucgagcugaacauggaaacacuuaauaugaccaugccucugagcuguaccaaaaacuccucucaucacuacaucagagucgggaaugagacaggacucgagcugacacuuaccaacacgagcauuaucaaucauaaguucugcaaccuguccgacgcucacaaaaagaaucucuaugaucaugcccugaugucuauuaucagcaccuuucaccuguccauuccgaacuucaaucaguacgaagccaugagcugugacuuuaacggcggcaagaucucugugcaguauaaucucucccacagcuacgcuggggaugccgcugagcauugcggaacaguugccaacggcgugcugcaaaccuucaugcggauggcguggggagggcgcuauaucgcccuugacucuggcugcgggaauugggauuguauuaugacauccuaccaguaccugaucauucagaacaccacgugggaagaccacugccaguuuagcagacccucuccuaucggauaucucggccugcuuucccaacggacacgcgauauuuacaucagcagacggcgccggggcaccuucacauggacccuguccgacucugaggggaacgagacccccggaggcuauugucugacacgcuggaugcucaucgaagcugagcugaagugcuuugggaauacggccgucgcuaaauguaacgaaaagcaugaugaggaguucugcgacaugcuuagacuguuugauuucaauaaacaggccauucggcgccucaaggcgcccgcccagaugagcauccagcugauuaacaaggcugugaaugcccuuaucaacgaccaacugauuaugaaaaaucaccucagagauaucaugugcaucccuuacugcaacuauuccaaguacugguaucugaaucacaccagcucuggccggacaucccugcccaaauguuggcucauuagcaacgggucuuaccugaaugagacccaguucagcgacgacaucgaacagcaagcugauaacaugauuacagagaugcuucagaaggaauacaucgagcgccagggaaaaaccccucugggccucguugacauuuuuaucuucuccacgucuuuuuaucugauuagcaucuuccugcaucuuaucaagauuccgacacacagacauaucgugggcaaacccugcccuaagccccaccggcucaaucauaugggggucuguuccugcggacuguacaagcacccuggcgugcccaccaaauggaagcgcugaggacuagucccuguucccagagcccacuuuuuuuucuuuuuuugaaauaaaauagccugucuuucagaucuaaaaaaaaaaaaaaaaaaaaaaaaaaaaaaaaaaaaaaaaaaaaaaaaaaaaaaaaaaaaaaaaaaaaaaaaaaaaaaaaaaaaaaaaaaaaaaaaaaaa

SEQ ID NO: 15946 - RNA, 1740 nt, Artificial Sequence
  mRNA product Design a-2 (A100) comprising derived and/or modified sequence from LASV(803213;Clade II)__AAF86703__GPCmut1 (opt5)
aggagaguccgcucagccagguugcagaagcggcuuagcguguguccuaaucuucucucugcguguagguaggccugugccgcaaacaagcuuaccaugggccagaucauuaccuucuuucaagaggugccccacgucaucgaagagguuaugaacauugugcugaucgcccucagccugcuugcuauucugaaggggaucuacaauguggccacaugcggacucuucggccugaucuccuuucuucugcucugugggagaucuugcagcgucacguauaaaggaguguacgaacugcagacccuggagcucaacauggcgaaucugaacaugacaaugccucuuuccuguaccaagaauaacucucaucacuauauuaugguuggcaaugaaacagggcuggagcucacccugacaaacaccagcaucauuaaucauaaauucugcaaccuuuccgacgcucacaagaaaaaucuguacgaucaugcccucaugucuaucauuagcacguuucaccuguccaucccgaacuucaaucaguaugaggccaugagcugugacuuuaacggaggcaagauuucugugcaguacaaucugucccacagcuucgcugucgaugccgcuaaccauugcggcaccaucgccaacggggugcuccaaacauuuaugcggauggcguggggaggcucuuauaucgcccuggacuccgggugcggaaauugggauuguauuaugaccagcuaccaguaccuuaucauucagaacacaaccugggaagaccacugccaguucucucgccccuccccuaucggcuaucuggggcuccugagccaaagaacgcgggauauuuacaucucccgcagacgccggggaacauuuaccuggacacucucugacagcgagggcaaugaagcucccggcggguauugucugacccgguggaugcugaucgaggccgagcucaaaugcuucggaaacaccgcuguugccaaguguaaugaaaaacaugaugaggaauuuugcgacaugcugcgccuuuucgauuucaacaagcaggcgauuaaaagacugaagacacccgcccagauguccauccagcucauuaauaaggcugugaacgcccugaucaaugaccaacuuauuaugaaaaaccaucugcgggauaucaugugcaucccuuacugcaauuauagccgcuacugguaucucaaccacacggucaccgggaagacaucucugcccagauguuggcugguguccaauggaagcuaccucaacgaaacccacuuuucugacgacauugagcagcaggcugauaauaugaucacagagaugcugcaaaaagaauacauggaccggcagggcaagaccccucuugggcugguggaucucuucgucuuuagcacguccuucuaucugauuucuaucuuucugcaccuuguuaaaauuccgacacaucgccacaucgugggaaagcccugcccuaaaccccauagacucaaccacaugggcauuuguagcugcggccuguacaagcacccuggggugcccgucaaguggaaacggugaggacuagucccuguucccagagcccacuuuuuuuucuuuuuuugaaauaaaauagccugucuuucagaucuaaaaaaaaaaaaaaaaaaaaaaaaaaaaaaaaaaaaaaaaaaaaaaaaaaaaaaaaaaaaaaaaaaaaaaaaaaaaaaaaaaaaaaaaaaaaaaaaaaaa

SEQ ID NO: 15947 - RNA, 1740 nt, Artificial Sequence
  mRNA product Design a-2 (A100) comprising derived and/or modified sequence from LASV(GA391;Clade III)__CAA36645__GPCmut1 (opt5)
aggagaguccgcucagccagguugcagaagcggcuuagcguguguccuaaucuucucucugcguguagguaggccugugccgcaaacaagcuuaccaugggccagaucgugaccuucuuucaagaggucccccacguuauugaagaggugaugaacaucgugcugauugcccucagcauccuggcuauucuuaaggggcuguacaaugucgccacaugcggacucaucggccuggugacguuccuucugcucuccgggagaucuuguagccugaucuauaaaggaaccuacgaacugcagacacucgagcugaacauggaaacccuuaauaugacaaugccucuguccugcaccaagaacaauucucaucacuauauucggguuggcaacgagacagggcucgagcugacccuuacgaauaccagcauccugaaccauaaauuuuguaaucucuccgacgcgcacaagcgcaaccuguacgaucauucucugaugagcauuaucuccacauuccaccucagcauuccgaauuuuaaccaguaugaagcuaugucuugcgacuucaauggaggcaaaaucaccgugcaguacaaccugucccacagcuuugccgucgaugccgcuggccauugugggacacuugccaauggagugcugcaaaccuucaugagaauggcuuggggcgggucuuauauugcccucgacuccggaugcggcaacugggauugcaucaugacgagcuaccaguaccugaucauucagaacacaaccugggacgaucacugucaguuuucucgccccuccccuaucggguaucuuggacugcucagccaaagaacacgggacauuuacaucucccgcagacgccggggcaccuucaccuggacacucucugauagcgagggcaaugaaacgcccgggggauauugccugacccgguggaugcuuauugaggcggagcugaaguguuuuggcaacacagccguugcuaagugcaaugaaaaacaugacgaggaguucugugauaugcuccgccuguuugacuucaacaagcaggccaucagacggcuuaaaacccccgcucagauguccauccagcugauuaauaaggccgugaacgcgcucaucaaugaucaacugauuaugaaaaaccaucugcgcgacaucaugugcauuccuuacugcaauuauagcagauacugguaucucaaccacacaucuaccggaaagacgucccugccccggugcuggcuuaucagcaauggcucuuaccugaacgaaacaaaguucagcgacgauaucgagcagcaggccgacaauaugauuaccgagaugcuccaaaaagaauacaucgaucgccaggggaagaccccucugggacuggucgaccuuuuuguguucuccacaucuuuuuaucucauuagcaucuuccugcaccuggugaaaauuccgacccacagacauaucgucggcaagcccuguccuaaaccccaccggcucaaccauaugggcauuugcuccugugggcuguacaagcagccuggaguucccgugagauggaaacgcugaggacuagucccuguucccagagcccacuuuuuuuucuuuuuuugaaauaaaauagccugucuuucagaucuaaaaaaaaaaaaaaaaaaaaaaaaaaaaaaaaaaaaaaaaaaaaaaaaaaaaaaaaaaaaaaaaaaaaaaaaaaaaaaaaaaaaaaaaaaaaaaaaaaaa

SEQ ID NO: 15948 - RNA, 1743 nt, Artificial Sequence
  mRNA product Design a-2 (A100) comprising derived and/or modified sequence from LASV(AV;Clade V)__CCA30314__GPCmut1 (opt5)
aggagaguccgcucagccagguugcagaagcggcuuagcguguguccuaaucuucucucugcguguagguaggccugugccgcaaacaagcuuaccaugggccagaucgugaccuucuuucaagaggucccccacguuauugaagaggugaugaacaucgugcugauugcccucagcauccuggcuguccuuaaggggcuguacaauauugccacaugcggacucaucggccugaucacguuccuucugcucugugggagauccugcucuagcaaccuguauaaaggaguguacgaacugcagucccucgaccugaauauggagacccuuaacaugacaaugccucugucuuguaccaagaauaacagccaucacuauauucggguuggcaaugauacagggcucgaacugacccuuacaaacaccuccauccugaaucauaaauuuugcaaccucucugacgcgcacaagaaagaucuguacgaccaugcucugaugagcauuaucuccacguuccaccucagcauuccgaauuuuaaccaguaugaggccaugucuugugauuucaauggaggcaagaucuccgugcaguacaaccugagccacucuuaugccauugacgcugccaaucauugcggcaccgucgcuaacgggauccuucaaacauuuaugcgcauggccuggggaggcuccuacaucgcgcuggauagcgggugcggaaacugggacuguauuaugaccucuuaccaguaucucaucauucagaauacaaccugggagaaccacugccaguucucccggcccagcccuaucggcuaccuggggcuucugucccaacgcacgagagauauuuauaucucucggcgccgccggggaacauuuaccuggacacugagcgacuccgaaggcaaugccacccccggcggguacugucucaccagauggaugcugaucgaggcugaacuuaagugcuucggaaacacagccguggcuaaauguaaugagaagcaugaugaggaauuuugcgacaugcugcgccucuucgauuuuaacaaacaggccauuagccggcugaagucucccgcgcagauguccauccagcuuauuaauaaagccguuaacgcucugaucaaugaccaacucauuaugaagaaccaccugagagacaucaugugcaucccuuauugcaauuacagcaaguauugguaccugaaccacacgauuaccgggaaaacaucucuccccaaguguuggcuggugagcaauggauccuaccuuaacgaaacccauuucucugaugacaucgagcagcaggccgauaauaugauuacagaaaugcugcaaaaagaguauauggagcggcagggcaagaccccucucgggcuggucgaccuguucguguuuagcacguccuucuaccuuaucagcauuuuucuccgccuggugaaaaucccgacacacagacauauugucggaaagcccugcccuaaaccccaccggcugaaccauaugggcaucuguucuugcggccucuauaagcagccugggguucccgugcgcuggaagagaugaggacuagucccuguucccagagcccacuuuuuuuucuuuuuuugaaauaaaauagccugucuuucagaucuaaaaaaaaaaaaaaaaaaaaaaaaaaaaaaaaaaaaaaaaaaaaaaaaaaaaaaaaaaaaaaaaaaaaaaaaaaaaaaaaaaaaaaaaaaaaaaaaaaaa

SEQ ID NO: 15949 - RNA, 1740 nt, Artificial Sequence
  mRNA product Design a-2 (A100) comprising derived and/or modified sequence from LASV(Togo/2016/7082;Clade VI)__AMR44577__GPCmut1 (opt5)
aggagaguccgcucagccagguugcagaagcggcuuagcguguguccuaaucuucucucugcguguagguaggccugugccgcaaacaagcuuaccaugggccagaucauuaccuucuuucaagaggugccccacgucaucgaagagguuaugaacauugugcugaucgcccucagccugcuugcuauucugaaggggguguacaaugucgccacaugcggaaucaucggccucgugacguuccuguuucuuugugggagauccugcucucugauuuauaaaggaagcuacgaacuccagacccuggagcugaacauggaaacacucaauaugaccaugccucuguccuguacaaagaacucuagccaucacuauauccggguuggcaaugagaccgggcuugagcugacacucaccaacacguccauuaucaaucauaaauucugcaaccugucugacgcgcacaagcgcaaucuuuacgaucaugcucugaugagcauucucuccaccuuucaccugagcaucccgaacuucaaucaguaugaagccaugucuugugacuuuaacggaggcaaaauuuccgugcaguacaaucugagccacgccuaugcugucgaugccgcugagcauugcggcacaguggccaacgggguucuccaaaccuucaugagaauggcguggggaggcucuuacaucgcccuggacuccgggugcggaaauugggauuguaucaugacaagcuaccaguaucuuauuauccagaacaccacgugggaagaccacugccaguuuucucgccccuccccuauuggcuaccuggggcuccugagccaaagaacacgggauaucuauauuucccgcagacgccggggaaccuucacauggacccucucugacagcgagggcaacgagacccccggcggguacugucugacacgguggaugcugaucgaagcugagcucaagugcuuuggaaauacggccguggcuaaguguaacgaaaaacaugaugaggaguucugcgacaugcugcgccuuuuugauuucaauaagcaggccauccagagacugaaaucccccgcgcagaugagcauucaacucaucaacaaggccgucaaugcucugauuaacgaccagcuuaucaugaaaaaucaucugcgggauaugaugugcauuccuuauugcaacuacucuaaguauugguaccucaaucacaccuccagcgggcgcacaucucugcccaaguguuggcuggugagcaacggauccuaccucaaugagacccacuucucugacgacaucgaacagcaagccgauaacaugaucacagagaugcugcagaaagaauauauugacagacagggcaagaccccucuugggcugguggaucucuuugucuucagcacguccuuuuaccugaucagcauuuuccugcaccuuaucaaaauuccgacacaucggcacaucguuggaaagcccugcccuaaaccccaucgccucaaucacaugggcauuuguucuugcggccuguauaagcagccuggggugcccaccagauggaaacggugaggacuagucccuguucccagagcccacuuuuuuuucuuuuuuugaaauaaaauagccugucuuucagaucuaaaaaaaaaaaaaaaaaaaaaaaaaaaaaaaaaaaaaaaaaaaaaaaaaaaaaaaaaaaaaaaaaaaaaaaaaaaaaaaaaaaaaaaaaaaaaaaaaaaa

SEQ ID NO: 15950 - RNA, 1740 nt, Artificial Sequence
  mRNA product Design a-2 (A100) comprising derived and/or modified sequence from LASV(KAK-428;Clade n.d. (VII))__ANH09740__GPCmut1 (opt5)
aggagaguccgcucagccagguugcagaagcggcuuagcguguguccuaaucuucucucugcguguagguaggccugugccgcaaacaagcuuaccaugggccagaucgugaccuucuuucaagaggucccccacguuauugaagaggugaugaacaucgugcugauugcccucagccugcuugcuauccugaaggggcucuacaauuucgccacaugcggagucauuggccugaucacguuucuucugcucugugggagauccugcucugcgaccuauaaaggacaguacgaacugcagacacuggagcucaacauggaaagccugaauaugaccaugccucuuuccuguacaaagaacaauucucaucacuauauccgggcuggcaacaauaccgggcuggagcucacacugaccaacacgagcauuaucucccauaaauucugcaaucuuucugacgcccacaagaaaaaccuguacgaucauacccucaugagcauuaucacaaccuuucaccuguccauuccgaauuucaaccaguaugaggccaugagcugugacuuuaauggaggcaagaucucuauucaauacaaccugucccacagcuaugcuggcgaugccgcucagcauugcgggacaguggccaauggaguucuccagaccuucaugcgcauggcguggggcgggucuuaccuggcccuugacuccggaugccggggcugggauuguaucaucagcucuuaccaguaucugauuauccaaaacacgacaugggacgaucacugccaguuuucccgccccagcccuauuggguaccucggauucgugucccagaagaccagagacaucuauauuucucggcgccgccggggcacauuuaccuggacccugagcgauuccgaaggccaugacaugcccgggggauacugucucacaagauggaugcugaucgaggcugaucugaaaugcuucggcaacacggccgucgcuaaguguaaugaaaaacacgacgaggaguuuugcgauauguggcgccucuucgacuucaacaagcaggccauccaacggcugaaagcgcccgcccagaugaauauucagcuuaucaacaaggcugugaaugcccugauuaacgaccaacucaugaugaagaaucaccugagagauaucaugugcauuccuuauugcaacuacagcaaauuuugguaucuuaauaacaccacaaccggacggacaucucugccccgcuguuggcucaucuccaauggcagcuaccugaacgagacccauuucucugacgauaucgaacagcaggcugacaauaugauuacggagaugcugcagaaggaauacauggauagacaagggaaaacaccucucggacugguugaccuuuuuguguucagcaccuccuuuuaucugaucaccauuuuccuccaccuggucaagaucccgacacaucggcacauugugggcaaacccugcccuaagccccaucgccugaaccacaugggcaucuguucuugcgggcuuuacaaacagccuggagugcccgucagauggaagcggugaggacuagucccuguucccagagcccacuuuuuuuucuuuuuuugaaauaaaauagccugucuuucagaucuaaaaaaaaaaaaaaaaaaaaaaaaaaaaaaaaaaaaaaaaaaaaaaaaaaaaaaaaaaaaaaaaaaaaaaaaaaaaaaaaaaaaaaaaaaaaaaaaaaaa

SEQ ID NO: 15951 - RNA, 1740 nt, Artificial Sequence; identical to SEQ ID NO: 15945
  mRNA product Design a-2 (A100) comprising derived and/or modified sequence from LASV(Pinneo-NIG-1969;Clade I)__AIT17836__GPCmut1 (opt5)

SEQ ID NO: 15952 - RNA, 1740 nt, Artificial Sequence
  mRNA product Design a-2 (A100) comprising derived and/or modified sequence from LASV(ISTH0009-NIG-2011;Clade II)__AIT17404__GPCmut1 (opt5)
aggagaguccgcucagccagguugcagaagcggcuuagcguguguccuaaucuucucucugcguguagguaggccugugccgcaaacaagcuuaccaugggccagaucauuaccuucuuucaagaggugccccacgucaucgaagagguuaugaacauugugcugaucgcccucagccugcuugcuauucugaaggggaucuacaauguggccacaugcggacucuucggccuggucuccuuucuucugcucugugggagaucuugcagcacgaccuauaaaggaguguacgaacugcagacacuggagcucgacauggcgucccugaacaugaccaugccucuuucuuguacaaagaauaacagccaucacuauaucaugguuggcaaugaaaccgggcuggagcucacacugaccaacacguccauuaucaaucauaaauucugcaaccuuucugaugcucacaagaaaaaucuguacgaccaugcccucaugagcauuaucuccaccuuucaccugagcauuccgaacuucaaucaguaugaggccaugucuugugauuuuaacggaggcaagaucuccgugcaguacaaucugagccacgcuuaugccgucgacgcugccaaccauugcggcacaauugcgaauggggugcuccaaaccuucaugcggauggccuggggaggcucuuacaucgcucuggauuccgggugcggaagcugggacuguaucaugacaucuuaccaguaucuuauuauccagaacaccacgugggaagaucacugccaguuuucccgccccagcccuauuggcuaccuggggcuccugucccaaagaacacgggacaucuauauuucucgcagacgccggggaaccuucacauggacccucagcgauuccgagggcaacgaaacccccggcggguacugucugacacgguggaugcugaucgaggccgagcucaaaugcuuuggaaauacggcuguugccaaguguaacgaaaaacaugacgaggaguucugcgauaugcugcgccuuuuugacuucaauaagcaggcgaucagacggcugaaaacccccgcccagaugagcauucagcucaucaacaaggcugugaaugcccugauuaacgaucaacuuaucaugaagaaucaucugcgcgacauuaugugcaucccuuauugcaacuacucuaaauauugguaccucaaucacacagucaccgggaagacaucccugcccagauguuggcuggugagcaacggaucuuaccucaaugaaacccacuucagcgacgauaucgagcagcaggcugacaacaugauuacggagcugcuucaaaaagaauauauggaucggcagggcaagacaccucuggggcucguggaccuguuugucuucuccaccucuuuuuaccugaucagcauuuuccuucaccucaucaaaauuccgacccaucgccacaucacaggaaagcccugcccuaaaccccauagacugaaucacaugggcauuuguuccugcggccuguauaagcacccugggguucccgugaaguggaaacggugaggacuagucccuguucccagagcccacuuuuuuuucuuuuuuugaaauaaaauagccugucuuucagaucuaaaaaaaaaaaaaaaaaaaaaaaaaaaaaaaaaaaaaaaaaaaaaaaaaaaaaaaaaaaaaaaaaaaaaaaaaaaaaaaaaaaaaaaaaaaaaaaaaaaa

SEQ ID NO: 15953 - RNA, 1740 nt, Artificial Sequence
  mRNA product Design a-2 (A100) comprising derived and/or modified sequence from LASV(ISTH2010-NIG-2012;Clade II)__AIT17482__GPCmut1 (opt5)
aggagaguccgcucagccagguugcagaagcggcuuagcguguguccuaaucuucucucugcguguagguaggccugugccgcaaacaagcuuaccaugggccagaucauuaccuucuuucaagaggugccccacgucaucgaagagguuaugaacauugugcugaucgcccucagccugcuugcuauucugaaggggaucuacaauguggccacaugcggacucuucggccuggucuccuuucuucugcucugugggagaucuugcagcacgaccuauaaaggaguguacgaacugcagacacuggagcucgacauggcgucccugaacaugaccaugccucuuucuuguacaaagaauaacagccaucacuauaucaugguuggcaaugaaaccgggcuggagcucacacugaccaacacguccauuaucaaucauaaauucugcaaccuuucugaugcucacaagaaaaaucuguacgaccaugcccucaugagcauuaucuccaccuuucaccugagcauuccgaacuucaaucaguaugaggccaugucuugugauuuuaacggaggcaagaucuccgugcaguacaaucugagccacgcuuaugccgucgacgcugccaaccauugcggcacaauugcgaauggggugcuccaaaccuucaugcggauggccuggggaggcucuuacaucgcucuggauuccgggugcggaagcugggacuguaucaugacaucuuaccaguaucuuauuauccagaacauuaccugggaagaucacugccaguuuucccgccccagcccuaucggcuaccuggggcuccugucccaaagaacgcgggacauuuauaucucucgcagacgccggggaacauucaccuggacacucagcgauuccgagggcaacgaaacccccggcggguacugucugacccgguggaugcugaucgaggccgagcucaaaugcuuuggaaauacagcuguugccaaguguaacgaaaaacaugacgaggaguucugcgauaugcugcgccuuuuugacuucaauaagcaggcgauuagacggcugaaaacgcccgcccagaugagcauccagcucauuaacaaggcugugaaugcccugaucaacgaucaacuuauuaugaagaaucaucugcgcgacaucaugugcaucccuuauugcaacuacucuaaauauugguaccucaaucacaccgucacagggaagaccucccugcccagauguuggcuggugagcaacggaucuuaccucaaugaaacacacuucagcgacgauauugagcagcaggcugacaacaugaucaccgagcugcuucaaaaagaauauauugaucggcagggcaagacgccucuggggcucguggaccuguuugucuucuccacaucuuuuuaccugaucagcauuuuccuucaccucguuaaaaucccgacccaucgccacguggugggaaagcccugcccuaaaccccauagacugaaucacaugggcauuuguuccugcggccuguauaagcacccugggguccccgugaaguggaaacggugaggacuagucccuguucccagagcccacuuuuuuuucuuuuuuugaaauaaaauagccugucuuucagaucuaaaaaaaaaaaaaaaaaaaaaaaaaaaaaaaaaaaaaaaaaaaaaaaaaaaaaaaaaaaaaaaaaaaaaaaaaaaaaaaaaaaaaaaaaaaaaaaaaaaa

SEQ ID NO: 15954 - RNA, 1740 nt, Artificial Sequence
  mRNA product Design a-2 (A100) comprising derived and/or modified sequence from LASV(Lassa virus/H.sapiens-wt/NGA/2015/ISTH_0543;Clade II)__AVO03639__GPCmut1 (opt5)
aggagaguccgcucagccagguugcagaagcggcuuagcguguguccuaaucuucucucugcguguagguaggccugugccgcaaacaagcuuaccaugggccagaucauuaccuucuuucaagaggugccccacgucaucgaagagguuaugaacauugugcugaucgcccucagccugcuugcuauucugaaggggaucuacaauguggccacaugcggacucuucggccuggucuccuuucuucugcucugugggagaucuugcagcacgaccuauaaaggaguguacgaacugcagacacuggagcucgacauggcgaaccugaauaugaccaugccucuuuccuguacaaagaacaauucucaucacuauaucaugguuggcaacgaaaccgggcuggagcucacacugaccaauacgagcauuaucaaccauaaauucugcaaucuuuccgaugcucacaagaaaaaccuguacgaccaugcccucaugucuauuaucagcaccuuucaccuguccauuccgaauuucaaccaguaugaggccaugagcugugauuuuaauggaggcaagaucucugugcaguacaaccugucccacacauaugcugucgacgccgcuaaucauugcggcaccauugccaacggggugcuccaaacauucaugcggauggcguggggaggcagcuacaucgcccuggauucugggugcggauccugggacuguaucaugaccagcuaccaguaucuuguuauucagaacacgacaugggaagaucacugccaguuuucucgccccuccccuaucggcuaccuggggcuccugagccaaagaacccgggacauuuauaucucccgcagacgccggggaacauucaccuggacccucucugauagcgagggcaaugaaacacccggcggguacugucugacgcgguggaugcugauugaggcugagcucaaaugcuuuggaaacaccgccguggcuaaguguaaugaaaaacaugacgaggaguucugcgauaugcugcgccuuuuugacuucaacaagcaggccaucagacggcugaaaacacccgcgcagauguccauccagcucauuaauaaggccgucaacgcucugaucaaugaucaacuuauuaugaagaaccaucugcgcgacaucaugugcauuccuuauugcaauuacagcaaauauugguaccucaaccacaccgugacagggaagaccucucugcccagauguuggcugguguccaauggaagcuaccucaacgaaacgcacuucucugacgauaucgagcagcaggccgacaauaugaucacagagcugcuucaaaaagaauauauugaucggcagggcaagaccccucuggggcucgucgaccuguuuguuuucagcaccuccuuuuaccugaucucuauuuuccuucaccucgugaaaaucccgacacaucgccacauuaccggaaagcccugcccuaaaccccauagacugaaccacaugggcaucuguagcugcggccuguauaagcacccuggggugcccgucaaguggaaacggugaggacuagucccuguucccagagcccacuuuuuuuucuuuuuuugaaauaaaauagccugucuuucagaucuaaaaaaaaaaaaaaaaaaaaaaaaaaaaaaaaaaaaaaaaaaaaaaaaaaaaaaaaaaaaaaaaaaaaaaaaaaaaaaaaaaaaaaaaaaaaaaaaaaaa

SEQ ID NO: 15955 - RNA, 1740 nt, Artificial Sequence
  mRNA product Design a-2 (A100) comprising derived and/or modified sequence from LASV(Lassa virus/H.sapiens-wt/NGA/2016/ISTH_0009;Clade II)__AVO03571__GPCmut1 (opt5)
aggagaguccgcucagccagguugcagaagcggcuuagcguguguccuaaucuucucucugcguguagguaggccugugccgcaaacaagcuuaccaugggccagaucauuaccuucuuucaagaggugccccacgucaucgaagagguuaugaacauugugcugaucgcccucagccugcuugcuauucugaaggggaucuacaauguggccacaugcggacuccugggccuugucuccuuccugcuccugugugggagaucuugcagcacgaccuauaaaggaguguacgaacugcagacacucgagcuggacauggcgucccuuaacaugaccaugccucugucuuguacaaagaauaacagccaucacuauaucaugguuggcaaugaaaccgggcucgagcugacacuuaccaacacguccauuaucaaucauaaauuuugcaaccugucugaugcucacaagaaaaaucucuacgaccaugcccugaugagcauuaucuccaccuuccaccugagcauuccgaacuuuaaucaguaugaggccaugucuugugauuucaacggaggccggaucuccgugcaguacaaucucagccacucuuaugcugucgacgccgcuaaccauugcggcacaauugccaauggggugcugcaaaccuuuaugcgcauggcguggggaggcuccuacaucgcccuugauagcgggugcggaucuugggacuguaucaugacauccuaccaguaucugauuauccagaacaccacgugggaagaucacugccaguucagcagacccuccccuauuggcuaccucgggcugcuuucucaacggacacgcgacaucuauauuagcagacggcgccggggaaccuuuacauggacccuguccgauagcgagggcaacgaaacccccggcggguacugucugacacgcuggaugcucaucgaggcugagcugaagugcuucggaaauacggccguugcuaaauguaacgaaaagcaugacgaggaauuuugcgauaugcuuagacuguucgacuuuaauaaacaggccauccggcgccucaagacccccgcgcagaugucuauucagcugaucaacaaagccgugaaugcucuuauuaacgaucaacugaucaugaagaaucaccucagagacauuaugugcaucccuuauugcaacuacuccaaguauugguaccugaaucacacagucaccgggaaaacaagccugccccgguguuggcucgugucuaacggaagcuaccugaaugaaacccauuucuccgacgauaucgagcagcaggccgacaacaugauuacggagcuucugcaaaaggaauauaucgaucgccagggcaaaacaccucucgggcugguggaccuguucgucuuuucuaccagcuucuaccuuauuuccaucuuucuccaccugguuaagauuccgacccauagacacaucacaggaaaacccugcccuaagccccaucggcugaaucacaugggcauuuguagcugcggccucuauaaccacccuggggugcccgugaaauggaagcgcugaggacuagucccuguucccagagcccacuuuuuuuucuuuuuuugaaauaaaauagccugucuuucagaucuaaaaaaaaaaaaaaaaaaaaaaaaaaaaaaaaaaaaaaaaaaaaaaaaaaaaaaaaaaaaaaaaaaaaaaaaaaaaaaaaaaaaaaaaaaaaaaaaaaaa

SEQ ID NO: 15956 - RNA, 1740 nt, Artificial Sequence
  mRNA product Design a-2 (A100) comprising derived and/or modified sequence from LASV(Lassa virus/H.sapiens-wt/NGA/2016/ISTH_0017;Clade II)__AVO03567__GPCmut1 (opt5)
aggagaguccgcucagccagguugcagaagcggcuuagcguguguccuaaucuucucucugcguguagguaggccugugccgcaaacaagcuuaccaugggccagaucauuaccuucuuucaagaggugccccacgucaucgaagagguuaugaacauugugcugaucgcccucagccugcuugcuauucugaaggggaucuacaauguggccacaugcggacucuucggccuggucuccuuucuucugcucugugggagaucuugcagcacgaccuauaaaggaguguacgaacugcagacacuggagcucgacauggcgucccugaacaugaccaugccucuuucuuguacaaagaauaacagccaucacuauaucaugguuggcaaugaaaccgggcuggagcucacacugaccaacacguccauuaucaaucauaaauucugcaaccuuucugaugcucacaagaaaaaucuguacgaccaugcccucaugagcauuaucuccaccuuucaccugagcauuccgaacuucaaucaguaugaggccaugucuugugauuuuaacggaggcaagaucuccgugcaguacaaucugagccacacauaugcuauugacgccgcuaaccauugcggcaccaucgccaaugggguccuccaaacauucaugcggauggcguggggaggcucuuacaucgcccuggauuccgggugcggaagcugggacuguauuaugaccucuuaccaguaucuuaucauucagaacacgacaugggaagaucacugccaguuuucccgccccagcccuaucggcuaccuggggcuccugucccaaagaacccgggacauuuauaucucucgcagacgccggggaacauucaccuggacccucagcgauuccgagggcaacgaaacacccggcggguacugucugacgcgguggaugcugaucgaggcugagcucaaaugcuuuggaaauaccgccguggcuaaguguaacgaaaaacaugacgaggaguucugcgauaugcugcgccuuuuugacuucaauaagcaggccauuagacggcugaaaacacccgcgcagaugagcauccagcucauuaacaaggccguuaaugcucugaucaacgaucaacuuauuaugaagaaucaucugcgcgacaucaugugcaucccuuauugcaacuacucuaaauauugguaccucaaucacaccgugacagggaagaccucccugcccagauguuggcuggucagcaacggaucuuaccucaaugaaacgcacuucagcgacgauauugagcagcaggccgacaacaugaucacagagcugcuucaaaaagaauauauggaucggcagggcaagaccccucuggggcucguggaccuguuuguguucuccaccucuuuuuaccugauuagcaucuuccuucaccucguccgcauuccgacacauagacacguuaucggaaaacccugcccuaagccccaucggcugaaucacaugggcauuuguuccugcggccuguauaaacacccuggggugcccgugaaguggaagcgcugaggacuagucccuguucccagagcccacuuuuuuuucuuuuuuugaaauaaaauagccugucuuucagaucuaaaaaaaaaaaaaaaaaaaaaaaaaaaaaaaaaaaaaaaaaaaaaaaaaaaaaaaaaaaaaaaaaaaaaaaaaaaaaaaaaaaaaaaaaaaaaaaaaaaa

SEQ ID NO: 15957 - RNA, 1740 nt, Artificial Sequence
  mRNA product Design a-2 (A100) comprising derived and/or modified sequence from LASV(Lassa virus/H.sapiens-wt/NGA/2018/ISTH_0959;Clade II)__AVV65099__GPCmut1 (opt5)
aggagaguccgcucagccagguugcagaagcggcuuagcguguguccuaaucuucucucugcguguagguaggccugugccgcaaacaagcuuaccaugggccagaucauuaccuucuuucaagaggugccccacgucaucgaagagguuaugaacauugugcugaucgcccucagccugcuugcuauucugaaggggaucuacaauguggucacaugcggacucuucggccugguguccuuucuucugcucugugggagaucuugcagcacgaccuauaaaggaguuuacgaacugcagacacuggagcucgacauggccucccugaacaugaccaugccucuuucuuguacaaagaauaacagccaucacuauaucauggugggcaaugaaaccgggcuggagcucacacugaccaacacguccauuaucaaucauaaauucugcaaccuuucugaugcgcacaagaaaaaucuguacgaccaugcucucaugagcauuaucuccaccuuucaccugagcauuccgaacuucaaucaguaugaggccaugucuugugauuuuaacggaggcaagaucuccguccaguacaaucugagccacgccuaugcuauugacgccgcuaaccauugcggcacaaucgccaauggggugcuccaaaccuucaugcggauggcguggggaggcucuuacaucgcccuggauuccgggugcggaagcugggacuguauuaugacaucuuaccaguaucuuaucauucagaacaccacgugggaagaucacugccaguuuucccgccccagcccuaucggcuaccuggggcuccugucccaaagaacacgggacauuuauaucucucgcagacgccggggaaccuucacauggacccucagcgauuccgagggcaacgaaacccccggcggguacugucugacacgguggaugcugaucgaggcugagcucaaaugcuuuggaaauacggccguugcuaaguguaacgaaaaacaugacgaggaguucugcgauaugcugcgccuuuuugacuucaauaagcaggccauuagacggcugaaaacccccgcgcagaugagcauccagcucauuaacaaggccgugaaugcucugaucaacgaucaacuuauuaugaagaaucaucugcgcgacaucaugugcaucccuuauugcaacuacucuaaauauugguaccucaaucacacagucaccgggaagacaucccugcccagauguuggcuggugagcaacggaucuuaccucaaugaaacccacuucagcgacgauauugagcagcaggccgacaacaugaucacggagcugcuucaaaaagaauauauugaucggcagggcaagacaccucuggggcucguggaccuguuugucuucuccaccucuuuuuaccugaucagcauuuuccuucaccucguuaaaaucccgacccaucgccacgugauuggaaagcccugcccuaaaccccauagacugaaucacaugggcaucuguuccugcggccuguauaagcacccuggggugcccgucaaguggaaacggugaggacuagucccuguucccagagcccacuuuuuuuucuuuuuuugaaauaaaauagccugucuuucagaucuaaaaaaaaaaaaaaaaaaaaaaaaaaaaaaaaaaaaaaaaaaaaaaaaaaaaaaaaaaaaaaaaaaaaaaaaaaaaaaaaaaaaaaaaaaaaaaaaaaaa

SEQ ID NO: 15958 - RNA, 1740 nt, Artificial Sequence
  mRNA product Design a-2 (A100) comprising derived and/or modified sequence from LASV(LASV003-NIG-2008;Clade II)__AIT17580__GPCmut1 (opt5)
aggagaguccgcucagccagguugcagaagcggcuuagcguguguccuaaucuucucucugcguguagguaggccugugccgcaaacaagcuuaccaugggccagaucauuaccuucuuucaagaggugccccacgucaucgaagagguuaugaacauugugcugaucgcccucagccugcuugcuauucugaaggggaucuacaauguggccacaugcggacucuucggccuggucuccuuucuucugcucugugggagaucuugcagcacgaccuauaaaggaguguacgaacugcagacacuggagcucgacauggcgucccugaacaugaccaugccucuuucuuguacaaagaauaacagccaucacuauaucaugguuggcaaugaaaccgggcuggagcucacacugaccaacacguccauuaucaaucauaaauucugcaaccuuucugaugcucacaagaaaaaucuguacgaccaugcccucaugagcauuaucuccaccuuucaccugagcauuccgaacuucaaucaguaugaggccaugucuugugauuuuaacggaggcaagaucuccgugcaguacaaucugagccacacauaugcugucgacgccgcuaaccauugcggcaccauugccaauggggugcuccaaacauucaugcggauggcguggggaggcucuuacaucgcccuggauuccgggugcggaagcugggacuguaucaugaccucuuaccaguaucuuauuauccagaacacgacaugggaagaucacugccaguuuucccgccccagcccuauuggcuaccuggggcuccugucccaaagaacccgggacaucuauauuucucgcagacgccggggaacauucaccuggacccucagcgauuccgagagcaacgaaacacccggcggcuacugucugacgcgguggaugcugaucgaggcugagcucaaaugcuuugggaauaccgccguugcuaaguguaacgaaaaacaugacgaggaguucugcgauaugcugcgccuuuuugacuucaauaagcaggccaucagacggcugaaagcgcccgcccagaugucuauucagcucaucaacaaggcugugaaugcccugauuaacgaucaacuuaucaugaagaaucaucugcgcgacauuaugugcaucccuuauugcaacuacuccaaauauugguaccucaaucacacagucaccggcagaacaagccugccccgguguuggcuggugucuaacgggagcuaccucaaugaaacccacuucuccgacgauaucgagcagcaggcugacaacaugauuacggagcugcuucaaaaggaauauauggaucgccagggaaaaacaccucugggccucguggaccuguuugucuucucuaccagcuuuuaccugaucuccauuuuccuucaccucguuaagaucccgacccauagacacgugauugggaaacccugcccuaagccccaucggcugaaucacaugggaaucuguagcugcggccuguauaaacacccuggcgugcccgucaaguggaagcgcugaggacuagucccuguucccagagcccacuuuuuuuucuuuuuuugaaauaaaauagccugucuuucagaucuaaaaaaaaaaaaaaaaaaaaaaaaaaaaaaaaaaaaaaaaaaaaaaaaaaaaaaaaaaaaaaaaaaaaaaaaaaaaaaaaaaaaaaaaaaaaaaaaaaaa

SEQ ID NO: 15959 - RNA, 1740 nt, Artificial Sequence
  mRNA product Design a-2 (A100) comprising derived and/or modified sequence from LASV(LASV035-NIG-2009;Clade II)__AIT17588__GPCmut1 (opt5)
aggagaguccgcucagccagguugcagaagcggcuuagcguguguccuaaucuucucucugcguguagguaggccugugccgcaaacaagcuuaccaugggccagaucauuaccuucuuucaagaggugccccacgucaucgaagagguuaugaacauugugcugaucgcccucagccugcuugcuauucugaaggggaucuacaauguggccacaugcggacucuucggccuggucuccuuucuucugcucugugggagaucuugcagcacgaccuauaaaggaguguacgaacugcagacacuggagcucgacauggcgucccugaacaugaccaugccucuuucuuguacaaagaauaacagccaucacuauaucaugguuggcaaugaaaccgggcuggagcucacacugaccaacacguccauuaucaaucauaaauucugcaaccuuucugaugcucacaagaaaaaucuguacgaccaugcccucaugagcauuaucuccaccuuucaccugagcauuccgaacuucaaucaguaugaggccaugucuugugauuuuaacggaggcaagaucuccgugcaguacaaucugagccacgcuuaugccgucgacgcugccaaccauugcggcacaauugcgaauggggugcuccaaaccuucaugcggauggccuggggaggcucuuacaucgcucuggauuccgggugcggaagcugggacuguaucaugacaucuuaccaguaucuuauuauccagaacaccacgugggaagaucacugccaguuuucccgccccagcccuauuggcuaccuggggcuccugucccaaagaacacgggacaucuauauuucucgcagacgccggggaaccuucacauggacccucagcgauuccgagggcaacgaaacccccggcggguacugucugacacgguggaugcugaucgaggccgagcucaaaugcuuuggaaauacggcuguugccaaguguaacgaaaaacaugacgaggaguucugcgauaugcugcgccuuuuugacuucaauaagcaggcgaucagacggcugaaagcccccgcucagaugagcauucagcucaucaacaaggccgugaaugcucugauuaacgaucaacuuaucaugaagaaucaucugcgcgacauuaugugcaucccuuauugcaacuacucuaaauauugguaccucaaucacaccgucacagggaagaccucccugcccagauguuggcuggugagcaacggaucuuaccucaaugaaacacacuucagcgacgauaucgagcagcaggccgacaacaugauuaccgagcugcuucaaaaagaauauaucgaucggcagggcaagacgccucuggggcucguggaccuguuugucuucuccacaucuuuuuaccugauuagcaucuuccuucaccucguuaaaauuccgacccaucgccacgugaucggaaagcccugcccuaaaccccauagacugaaucacaugggcauuuguuccugcggccuguauaagcacccuggggugcccgucaaguggaaacggugaggacuagucccuguucccagagcccacuuuuuuuucuuuuuuugaaauaaaauagccugucuuucagaucuaaaaaaaaaaaaaaaaaaaaaaaaaaaaaaaaaaaaaaaaaaaaaaaaaaaaaaaaaaaaaaaaaaaaaaaaaaaaaaaaaaaaaaaaaaaaaaaaaaaa

SEQ ID NO: 15960 - RNA, 1740 nt, Artificial Sequence
  mRNA product Design a-2 (A100) comprising derived and/or modified sequence from LASV(LASV1000-NIG-2009;Clade II)__AIT17782__GPCmut1 (opt5)
aggagaguccgcucagccagguugcagaagcggcuuagcguguguccuaaucuucucucugcguguagguaggccugugccgcaaacaagcuuaccaugggccagaucauuaccuucuuucaagaggugccccacgucaucgaagagguuaugaacauugugcugaucgcccucagccugcuugcuauucugaaggggaucuacaauguggccacaugcggacucuucggccuggucuccuuucuucugcucugugggagaucuugcagcacgaccuauaaaggaguguacgaacugcagacacuggagcucgacauggcgucccugaacaugaccaugccucuuucuuguacaaagaauaacagccaucacuauaucaugguuggcaaugaaaccgggcuggagcucacacugaccaacacguccauuaucaaucauaaauucugcaaccuuucugaugcucacaagaaaaaucuguacgaccaugcccucaugagcauuaucuccaccuuucaccugagcauuccgaacuucaaucaguaugaggccaugucuugugauuuuaacggaggcaagaucuccgugcaguacaaucugagccacacauaugcugucgacgccgcuaaccauugcggcaccauugccaauggggugcuccaaacauucaugcggauggcguggggaggcucuuacaucgcccuggauuccgggugcggaagcugggacuguaucaugaccucuuaccaguaucuuauuauccagaacacgacaugggaagaucacugccaguuuucccgccccagcccuauuggcuaccuggggcuccugucccaaagaacccgggacaucuauauuucucgcagacgccggggaacauucaccuggacccucagcgauuccgagggcaacgaaacacccggcggguacugucugacgcgguggaugcugaucgaggcugagcucaaaugcuuuggaaauaccgccguugcuaaguguaacgaaaaacaugacgaggaguucugcgauaugcugcgccuuuuugacuucaauaagcaggccaucaaaagacugaagacacccgcgcagaugagcauucagcucaucaacaaggccgugaaugcucugauuaacgaucaacuuaucaugaaaaaucaucugcgggacauuaugugcaucccuuauugcaacuacucuaaguauugguaccucaaucacaccgucacagggaaaaccucccugccccgcuguuggcuggugagcaacggaucuuaccucaaugaaacgcacuucagcgacgauaucgagcagcaggccgacaacaugauuacagagcugcuucaaaaggaauauaucgauagacagggcaaaaccccucuggggcucguggaccuguuugucuucuccaccucuuuuuaccugauuagcaucuuccuucaccucguuaagauuccgacacaucggcacguggugggaaaacccugcccuaagccccaucgccugaaucacaugggcaucuguuccugcggccuguauaagcacccugggguccccgugaaauggaagagaugaggacuagucccuguucccagagcccacuuuuuuuucuuuuuuugaaauaaaauagccugucuuucagaucuaaaaaaaaaaaaaaaaaaaaaaaaaaaaaaaaaaaaaaaaaaaaaaaaaaaaaaaaaaaaaaaaaaaaaaaaaaaaaaaaaaaaaaaaaaaaaaaaaaaa

SEQ ID NO: 15961 - RNA, 1740 nt, Artificial Sequence
  mRNA product Design a-2 (A100) comprising derived and/or modified sequence from LASV(LASV221-NIG-2010;Clade II)__AIT17624__GPCmut1 (opt5)
aggagaguccgcucagccagguugcagaagcggcuuagcguguguccuaaucuucucucugcguguagguaggccugugccgcaaacaagcuuaccaugggccagaucauuaccuucuuucaagaggugccccacgucaucgaagagguuaugaacauugugcugaucgcccucagccugcuugcuauucugaaggggaucuacaauguggccacaugcggacucuucggccuggucuccuuucuucugcucugugggagaucuugcagcacgaccuauaaaggaguguacgaacugcagacacuggagcucgacauggcgucccugaacaugaccaugccucuuucuuguacaaagaauaacagccaucacuauaucaugguuggcaaugaaaccgggcuggagcucacacugaccaacacguccauuaucaaucauaaauucugcaaccuuucugaugcucacaagaaaaaucuguacgaccaugcccucaugagcauuaucuccaccuuucaccugagcauuccgaacuucaaucaguaugaggccaugucuugugauuuuaacggaggcaagaucuccgugcaguacaaucugagccacacauaugcuauugacgccgcuaaccauugcggcaccaucgccaaugggguccuccaaacauucaugcggauggcguggggaggcucuuacaucgcccuggauuccgggugcggaagcugggacuguauuaugaccucuuaccaguaucuuaucauucagaacacgacaugggaagaucacugccaguuuucccgccccagcccuaucggcuaccuggggcuccugucccaaagaacccgggacauuuauaucucucgcagacgccggggaacauucaccuggacccucagcgauuccgagggcaacgaaacacccggcggguacugucugacgcgguggaugcugaucgaggcugagcucaaaugcuuuggaaauaccgccguggcuaaguguaacgaaaaacaugacgaggaguucugcgauaugcugcgccuuuuugacuucaauaagcaggccauuagacggcugaaaacacccgcgcagaugagcauccagcucauuaacaaggccguuaaugcucugaucaacgaucaacuuauuaugaagaaucaucugcgcgacaucaugugcaucccuuauugcaacuacucuaaauauugguaccucaaucacaccgugacagggaagaccucccugcccagauguuggcuggucagcaacggaucuuaccucaaugaaacgcacuucagcgacgauauugagcagcaggccgacaacaugaucacagagaugcugcaaaaagaauauauggaucggcagggcaagaccccucuugggcugguggaccucuuuguguucuccaccucuuuuuaccugauuagcaucuuccugcaccuugucaaaauuccgacacaucgccacguuaucggaaagcccugcccuaaaccccauagacucaaucacaugggcauuuguuccugcggccuguauaagcacccuggggugcccgugaaguggaaacggugaggacuagucccuguucccagagcccacuuuuuuuucuuuuuuugaaauaaaauagccugucuuucagaucuaaaaaaaaaaaaaaaaaaaaaaaaaaaaaaaaaaaaaaaaaaaaaaaaaaaaaaaaaaaaaaaaaaaaaaaaaaaaaaaaaaaaaaaaaaaaaaaaaaaa

SEQ ID NO: 15962 - RNA, 1740 nt, Artificial Sequence
  mRNA product Design a-2 (A100) comprising derived and/or modified sequence from LASV(LASV237-NIG-2010;Clade II)__AIT17638__GPCmut1 (opt5)
aggagaguccgcucagccagguugcagaagcggcuuagcguguguccuaaucuucucucugcguguagguaggccugugccgcaaacaagcuuaccaugggccagaucauuaccuucuuucaagaggugccccacgucaucgaagagguuaugaacauugugcugaucgcccucagccugcuugcuauucugaaggggaucuacaauguggccacaugcggacucuucggccuggucuccuuucuucugcucugugggagaucuugcagcacgaccuauaaaggaguguacgaacugcagacacuggagcucgacauggcgucccugaacaugaccaugccucuuucuuguacaaagaauaacagccaucacuauaucaugguuggcaaugaaaccgggcuggagcucacacugaccaacacguccauuaucaaucauaaauucugcaaccuuucugaugcucacaagaaagaccuguacgaucaugcccucaugagcauuaucuccaccuuucaccugagcauuccgaauuucaaccaguaugaggccaugucuugugacuuuaauggaggcaagaucuccgugcaguacaaccugagccacacauaugcugucgaugccgcuaaucauugcggcaccauugccaacggggugcuccaaacauucaugcggauggcguggggaggcucuuacaucgcccuggacuccgggugcggaagcugggauuguaucaugaccucuuaccaguaucuuauuauccagaauacgacaugggaagaccacugccaguuuucccgccccagcccuauuggcuaccuggggcuccugucccaaagaacccgggauaucuauauuucucgcagacgccggggaacauucaccuggacccucagcgacuccgagggcaacgaaacacccggcggguacugucugacgcgguggaugcugaucgaggcugagcucaaaugcuuuggaaacaccgccguugcuaaguguaaugaaaaacaugaugaggaguucugcgacaugcugcgccuuuuugauuucaacaagcaggccaucagacggcugaaaacacccgcgcagaugagcauucagcucaucaauaaggccgugaacgcucugauuaaugaccaacuuaucaugaagaaccaucugcgcgacauuaugugcaucccuuauugcaauuacucuaaauauugguaccucaaccacaccgucacagggaagaccucccugcccagauguuggcuggugagcaauggaucuuaccucaacgaaacgcacuucagcgaugacaucgagcagcaggccgauaauaugauuacagagcugcuucaaaaagaauauauggaccggcagggcaagaccccucuggggcucguggaucuguuugucuucuccaccucuuuuuaccugaucagcauuuuccuucaccucaucaaaauuccgacacaucgccacaucaccggaaagcccugcccuaaaccccauagacugaaccacaugggcauuuguuccugcggccuguauaagcacccugggguucccgugaaguggaaacggugaggacuagucccuguucccagagcccacuuuuuuuucuuuuuuugaaauaaaauagccugucuuucagaucuaaaaaaaaaaaaaaaaaaaaaaaaaaaaaaaaaaaaaaaaaaaaaaaaaaaaaaaaaaaaaaaaaaaaaaaaaaaaaaaaaaaaaaaaaaaaaaaaaaaa

SEQ ID NO: 15963 - RNA, 1740 nt, Artificial Sequence
  mRNA product Design a-2 (A100) comprising derived and/or modified sequence from LASV(LASV253-NIG-2011;Clade II)__AIT17670__GPCmut1 (opt5)
aggagaguccgcucagccagguugcagaagcggcuuagcguguguccuaaucuucucucugcguguagguaggccugugccgcaaacaagcuuaccaugggccagaucauuaccuucuuucaagaggugccccacgucaucgaagagguuaugaacauugugcugaucgcccucagccugcuugcuauucugaaggggaucuacaauguggccacaugcggacucuucggccuggucuccuuucuucugcucugugggagaucuugcagcacgaccuauaaaggaguguacgaacugcagacacuggagcucgacauggcgucccugaacaugaccaugccucuuucuuguacaaagaauaacagccaucacuauaucaugguuggcaaugaaaccgggcuggagcucacacugaccaacacguccauuaucaaucauaaauucugcaaccuuucugaugcucacaagaaaaaucuguacgaccaugcccucaugagcauuaucuccaccuuucaccugagcauuccgaacuucaaucaguaugaggccaugucuugugauuuuaacggaggcaagaucuccgugcaguacaaucugagccacacauaugcugucgacgccgcuaaccauugcggcaccauugccaauggggugcuccaaacauucaugcggauggcguggggaggcucuuacaucgcccuggauuccgggugcggaagcugggacuguaucaugaccucuuaccaguaucuuauuauccagaacacgacaugggaagaucacugccaguuuucccgccccagcccuauuggcuaccuggggcuccugucccaaagaacccgggacaucuauauuucucgcagacgccggggaacauucaccuggacccucagcgauuccgagggcaacgaaacacccggcggguacugucugacgcgguggaugcugaucgaggcugagcucaaaugcuuuggaaauaccgccguugcuaaguguaacgaaaaacaugacgaggaguucugcgauaugcugcgccuuuuugacuucaauaagcaggccaucagacggcugaaagcgcccgcccagaugagcauucagcucaucaacaaggcugugaaugcccugauuaacgaucaacuuaucaugaagaaucaucugcgcgacauuaugugcaucccuuauugcaacuacucuaaauauugguaccucaaucacacagucaccgggagaacaucccugccccgguguuggcuggugagcaacggaucuuaccucaaugaaacccacuucagcgacgauaucgagcagcaggcugacaacaugauuacggagcugcuucaaaaggaauauaucgaucgccagggcaaaacaccucuggggcucguggaccuguuugucuucuccaccucuuuuuaccugauuagcaucuuccuucaccucguuaagauuccgacccauagacacaucauuggaaaacccugcccuaagccccaucggcugaaucacaugggcaucuguuccugcggccuguauaaacacccuggggugcccgugaaguggaagcgcugaggacuagucccuguucccagagcccacuuuuuuuucuuuuuuugaaauaaaauagccugucuuucagaucuaaaaaaaaaaaaaaaaaaaaaaaaaaaaaaaaaaaaaaaaaaaaaaaaaaaaaaaaaaaaaaaaaaaaaaaaaaaaaaaaaaaaaaaaaaaaaaaaaaaa

SEQ ID NO: 15964 - RNA, 1740 nt, Artificial Sequence
  mRNA product Design a-2 (A100) comprising derived and/or modified sequence from LASV(LASV254-NIG-2011;Clade II)__AIT17674__GPCmut1 (opt5)
aggagaguccgcucagccagguugcagaagcggcuuagcguguguccuaaucuucucucugcguguagguaggccugugccgcaaacaagcuuaccaugggccagaucauuaccuucuuucaagaggugccccacgucaucgaagagguuaugaacauugugcugaucgcccucagccugcuugcuauucugaaggggaucuacaauguggccacaugcggacucuucggccuggucuccuuucuucugcucugugggagaucuugcagcacgaccuauaaaggaguguacgaacugcagacacuggagcucgacaugaccaaccugaauaugacaaugccucuuuccuguaccaagaacaauucucaucacuauaucaugguuggcaacgaaacagggcuggagcucacccugacgaauaccagcauuaucaaccauaaauucugcaaucuuuccgaugcgcacaagaaaaaccuguacaaucaugcucucaugucuauuaucagcacauuucaccuguccauuccgaacuucaaucaguaugaggccaugagcugugacuuuaacggaggcaagaucucugugcaguacaaucugucccacagcuaugccgucgaugcugccaaccauugcggcaccauugcuaacggggugcuccaaacauucaugcggauggccuggggaggcucuuacaucgcgcuggacuccgggugcggaaauugggauuguaucaugaccagcuaccaguaucuuauuauccagaacacgacaugggaagaccacugccaguuuucucgccccuccccuauuggcuaccuggggcuccugagccaaagaacccgggauaucuauauuucccgcagacgccggggaacauucaccuggacccucucugacagcgagggcaaugaaacacccggcggguacugucugacgcgguggaugcugaucgaggccgagcucaaaugcuuuggaaacaccgcuguugccaaguguaaugaaaaacaugaugaggaguucugcgacaugcugcgccuuuuugauuucaacaagcaggcuaucagacggcugaaaacacccgcccaggcgaauauucagcucaucaacaaggccgugaaugcucugauuaacgaccaacuuaucaugaagaaucaucugcgcgauauuaugugcaucccuuauugcaacuacuccaaauauugguaccucaaucacaccgucacagggaagaccagccugcccagauguuggcuggugucuaacggauccuaccucaaugaaacgcacuucagcgacgacaucgagcagcaggccgauaacaugauuacagagcugcuucaaaaagaauauauggaccggcagggcaagaccccucuggggcucguggaucuguuugucuucucuaccagcuuuuaccugaucuccauuuuccuucaccucguuaaaaucccgacacaucgccacgugauuggaaagcccugcccuaaaccccauagacugaaccacaugggcaucuguucuugcggccuguauaagcacccuggggugcccgucaaguggaaacggugaggacuagucccuguucccagagcccacuuuuuuuucuuuuuuugaaauaaaauagccugucuuucagaucuaaaaaaaaaaaaaaaaaaaaaaaaaaaaaaaaaaaaaaaaaaaaaaaaaaaaaaaaaaaaaaaaaaaaaaaaaaaaaaaaaaaaaaaaaaaaaaaaaaaa

SEQ ID NO: 15965 - RNA, 1740 nt, Artificial Sequence
  mRNA product Design a-2 (A100) comprising derived and/or modified sequence from LASV(Nig08-A19;Clade III)__ADU56618__GPCmut1 (opt5)
aggagaguccgcucagccagguugcagaagcggcuuagcguguguccuaaucuucucucugcguguagguaggccugugccgcaaacaagcuuaccaugggccagaucgugaccuucuuucaagaggucccccacguuauugaagaggugaugaacaucgugcugauugcccucagcauccuggcuauucuuaaggggcuguacaauaucgccacaugcggacucaucggccuggucacguuccuucugcucuccgggagaucuuguagcaugaccuauaaaggaguguacgaacugcagacacuggagcucaacaugaauacccugaacaugacaaugccucuuuccugcaccaagaauaacucucaucacuauauuaugguuggcaaugaaacagggcuggagcucacccugacgaacaccagccuucugcaucacaaauuuuguaaucucuccgacgcgcauaagaaaaaccuguacgaucacacacugaugucuaucauuagcaccuuccaccucuccaucccgaauuuuaaccaguaugaggcuaugagcugcgacuucaauggaggcaagauuacagugcaguacaaccugucucauuccuaugccaucgaugccgcuaaucacuguggcaccgucgccaacggggugcuucaaacguuuaugcggauggcuuggggaggcagcuacauugcccuggacucugggugcggaaagugggauugcaucaugacauccuaccaguaucucaucauucagaacaccacaugggaagaccauugucaguucagcagacccucuccuaucggcuaccuggggcuucugucccaacggacccgcgauauuuauaucagcagacggcgccggggaaccuuuacauggacgcuguccgacucugagggcaaugaaacccccggcggguacugccucacacgcuggaugcugauugaggcggagcuuaaauguuucggaaacaccgccguugcuaagugcaaugaaaaacacgaugaggaauuuugugacaugcugagacucuucgauuuuaacaagcaggccauccggcgccugaaagcucccgcccagaugagcauccagcuuauuaauaaggcggugaacgcccugaucaaugaccaacucauuaugaagaaccaccugagagauaucaugugcauuccuuauugcaauuacuccaaauauugguaccugaaccauacaagcaccgggcggacgucucucccccgcugcuggcuggucuccaauggaagcuaccuuaacgaaacacacuucucugacgacaucgagcagcaggcugauaauaugaucaccgagaugcugcaaaaggaauaucucgacagacagggcaaaaccccucuggggcugguggaucuuuucguguuuagcacauccuucuaccucauuucuaucuuucugcaucuggucaagauuccgacccaccggcauaucguuggaaaacccuguccuaagccccaccgccucaaccacaugggcauuugcagcuguggccuguauaaacagccuggggugcccgugagauggaagcggugaggacuagucccuguucccagagcccacuuuuuuuucuuuuuuugaaauaaaauagccugucuuucagaucuaaaaaaaaaaaaaaaaaaaaaaaaaaaaaaaaaaaaaaaaaaaaaaaaaaaaaaaaaaaaaaaaaaaaaaaaaaaaaaaaaaaaaaaaaaaaaaaaaaaa

SEQ ID NO: 15966 - RNA, 1743 nt, Artificial Sequence
  mRNA product Design a-2 (A100) comprising derived and/or modified sequence from LASV(G1180-SLE-2010;Clade IV)__AIT17168__GPCmut1 (opt5)
aggagaguccgcucagccagguugcagaagcggcuuagcguguguccuaaucuucucucugcguguagguaggccugugccgcaaacaagcuuaccaugggccagaucgugaccuucuuucaagaggucccccacguuauugaagaggugaugaacaucgugcugauugcccucagcauccuggcuguccuuaaggggcuguacaauuucgccacaugcggacucgugggccugcuuacguuucugcuccugugugggagauccugcaccgcgucucgguauaaaggaguuuacgaacugcagacacucgagcugaacauggaaacccuuaauaugacaaugccucugagcuguaccaagaacaauucccaucacuauauuauggugggcaacgagacagggcucgagcugacccuuacgaauaccucuaucaucaaccauaaauucugcaaucugagcgacgcucacaagaaaaaccucuacgaucaugcccugauguccauuaucucuacauuucaccugagcauuccgaauuucaaccaguaugaagccauguccugugacuuuaauggaggcaagaucagcguccaguacaaccucucucacuccuaugcuggcgaugccgcuaaucauugcgggaccguggccaacggaguucugcaaacauucaugcgcauggcguggggcgggagcuacauugcccuugacucuggaugcggcuccugggauuguaucaugaccagcuaccaguaucugauuauccagaacacgacaugggaggaccauugccaguuuucuagacccuccccuaucggguaccucggacugcuuagccaacggacccgcgauauuuauaucuccagacggcgccggggcacauucaccuggacccugucugacagcgaaggcaaggauacacccgggggauacugucugacgcgcuggaugcucauugaggcugagcugaaaugcuuuggcaauaccgccguggcuaaguguaacgaaaaacacgacgaggaguucugcgauaugcuuagacuguuugacuucaauaagcaggccauccagcggcucaaagcgcccgcccagauguccauucaacugaucaacaaggcugucaaugcccuuaucaacgaucagcugauuaugaagaaucaccuccgcgacaucaugugcauuccuuauugcaacuacagcaaauauugguaccugaaucauacaaccacaggaaagaccucucugcccaaauguuggcucguguccaacggcagcuaccugaaugaaacgcacuucucugacgauaucgagcagcaagcugacaacaugauuacagagaugcuucagaaggaauauauggagagacaggggaaaaccccucugggacucguggaucuguuugucuucagcaccuccuuuuaccugaucucuaucuuccuucaucucguuaagauuccgacacaccggcauaucgugggcaaaagcugccccaagccucaccgccugaaucacaugggcauuuguuccugcgggcuguauaagcagcccggagugccugucaaauggaagagaugaggacuagucccuguucccagagcccacuuuuuuuucuuuuuuugaaauaaaauagccugucuuucagaucuaaaaaaaaaaaaaaaaaaaaaaaaaaaaaaaaaaaaaaaaaaaaaaaaaaaaaaaaaaaaaaaaaaaaaaaaaaaaaaaaaaaaaaaaaaaaaaaaaaaa

SEQ ID NO: 15967 - RNA, 1743 nt, Artificial Sequence
  mRNA product Design a-2 (A100) comprising derived and/or modified sequence from LASV(G1442-SLE-2011;Clade IV)__AIT17180__GPCmut1 (opt5)
aggagaguccgcucagccagguugcagaagcggcuuagcguguguccuaaucuucucucugcguguagguaggccugugccgcaaacaagcuuaccaugggccagaucgugaccuucuuucaagaggucccccacguuauugaagaggugaugaacaucgugcugauugcccucagcauccuggcuguccuuaaggggcuguacaauguggccacaugcggacucauuggccugguuacguuccuucugcucugugggagauccugcaccacaacccuguauaaaggaguguacgaacugcagacacucgagcugaacauggaaacccuuaauaugacaaugccucugucuuguaccaagaacaauagccaucacuauauccgggucggcaacgagacggggcucgagcugacccuuacaaauaccuccaucauuaaccauaaauuuugcaaucugucugacgcgcacaagaaaaaccucuacgaucaugcucugaugagcaucauuuccacauuccaccugucuaucccgaauuuuaaccaguaugaagccaugagcugugacuucaauggaggcaagauuuccgugcaguacaaccucagccacucuuaugccggcgaugcugccaaucauugcgggaccguugcuaacggagugcugcaaacguuuaugcgcauggccuggggcggguccuacaucgcgcuugacagcggaugcggcaacugggauuguauuaugacaucuuaccaguaucugaucauccagaauaccacaugggacgaucacugccaguucucccggcccagcccuauuggguaccucggacugcuuucucaacgcaccagagacgucuauaucucccggcgccgccggggcaccuuuacauggacgcugagcgauuccgagggcaaggacacccccgggggauacugucugacaagauggaugcucauugaagccgagcugaaaugcuucggcaacaccgcuguggccaaguguaaugagaaacaugaugaagaguuuugcgacaugcuucggcuguucgauuuuaacaagcaggcuauccagcgccucaaagcccccgcgcagaugucuauucaacugaucaauaaggccgugaacgcucuuaucaaugaccagcugauuaugaagaaccaccucagagacaucaugugcauuccuuauugcaauuacagcaaauauugguaccugaacaauacagccaccggaaagacgucccugcccaaauguuggcucaucagcaacggcucuuaccugaaugagacacacuucuccgaugacauugaacaggaggcugauaacaugaucaccgagaugcuucaaaaggaauauauggagcggcaggggaaaaccccucugggacucgucgaccuguucguuuuuagcacaucuuucuaccugaucagcauuuuucuucaucucgugaagaucccgacccaccgccauauugugggcaaauccugccccaagccucacagacugaaucauaugggcaucuguucuugcgggcuguauaagcagcccggagucccugugcgguggaaacgcugaggacuagucccuguucccagagcccacuuuuuuuucuuuuuuugaaauaaaauagccugucuuucagaucuaaaaaaaaaaaaaaaaaaaaaaaaaaaaaaaaaaaaaaaaaaaaaaaaaaaaaaaaaaaaaaaaaaaaaaaaaaaaaaaaaaaaaaaaaaaaaaaaaaaa

SEQ ID NO: 15968 - RNA, 1743 nt, Artificial Sequence
  mRNA product Design a-2 (A100) comprising derived and/or modified sequence from LASV(G3010-SLE-2013;Clade IV)__AIT17344__GPCmut1 (opt5)
aggagaguccgcucagccagguugcagaagcggcuuagcguguguccuaaucuucucucugcguguagguaggccugugccgcaaacaagcuuaccaugggccagaucgugaccuucuuucaagaggucccccacguuauugaagaggugaugaacaucgugcugauugcccucagcauccuggcuguccuuaaggggcuguacaauuucgccacaugcggacucgugggccugguuacguuucuucugcucugugggagauccugcaccacaucucuguauaaaggaguguacgaacugcagacccucgagcugaacauggaaacacuuaauaugaccaugccucugagcuguacaaagaacaauucccaucacuauauuauggucggcaacgagaccgggcucgagcugacgcuuaccaauacaucuaucaucaaccauaaauucugcaaucugagcgacgcgcacaagaaaaaccucuacaaucaugcucugauguccauuaucucuaccuuucaccugagcauuccgaacuucaaucaguaugaagccauguccugugauuuuaacggaggcaagaucagcgugcaguacaaucucucucacuccuaugccggcgacgcugccagccauugcgggacaguugcuaacggagugcugcaaaccuucaugcggauggccuggggcgggucuuacauugcgcuugauuccggaugcggcaagugggacuguaucaugacgagcuaucaguaccugauuauccagaacacaaccugggaggaucacugccaguuuucucgccccuccccuaucggguaucucggacugcuuagccaaagaacacgggacauuuacaucucccgcagacgccggggcaccuucaccuggacacugucugauagcgaaggcaaagacacgcccgggggauauugucugacccgguggaugcucauugaggccgagcugaagugcuuuggcaauacagcugucgccaaauguaacgaaaagcaugaugaggaguucugcgacaugcuucgccuguuugauuucaauaaacaggcuauccagagacucaagacccccgcccagauguccauucaacugaucaacaaggcggugaaugcccuuaucaacgaccagcugauuaugaaaaaucaccuccgggauaucaugugcauuccuuacugcaacuauagcaaguacugguaccugaaucacacaaccacgggaaaaacaucucugcccaaguguuggcucguguccaacggcagcuaucugaaugaaacccauuucucugacgacaucgagcagcaagcugauaacaugauuaccgagaugcuucagaaagaauacauggagcgccaggggaagacaccucugggacucgucgaccuguuuguuuucagcaccuccuuuuaucugaucucuaucuuccuucaccucgugaaaauuccgacacauagacacaucgugggcaagagcugccccaagccucaucggcugaaucacaugggcauuuguuccugcgggcuguacaaacagcccggagucccugugcgcuggaagagaugaggacuagucccuguucccagagcccacuuuuuuuucuuuuuuugaaauaaaauagccugucuuucagaucuaaaaaaaaaaaaaaaaaaaaaaaaaaaaaaaaaaaaaaaaaaaaaaaaaaaaaaaaaaaaaaaaaaaaaaaaaaaaaaaaaaaaaaaaaaaaaaaaaaaa

SEQ ID NO: 15969 - RNA, 1743 nt, Artificial Sequence
  mRNA product Design a-2 (A100) comprising derived and/or modified sequence from LASV(G502-SLE-2009;Clade IV)__AIT17126__GPCmut1 (opt5)
aggagaguccgcucagccagguugcagaagcggcuuagcguguguccuaaucuucucucugcguguagguaggccugugccgcaaacaagcuuaccaugggccagaucgugaccuucuuucaagaggucccccacguuauugaagaggugaugaacaucgugcugauugcccucagcauccuggcuguccuuaaggggcuguacaauuucgccacaugcggacucgugggccugcuuacguuucugcuccugugugggagauccugcaccacaggacuguauaaaggcguuuacgaacuccagacccuggagcuuaacauggaaacacugaauaugaccaugccucucucuuguacaaagaacaauagccaucacuauauuaugguggggaacgagaccggacuggagcuuacgcugaccaauacauccaucaucaaccauaaauucugcaaucucucugacgcgcacaagaaaaaccuguacgaucaugcucugaugagcauuaucuccaccuuucaccucucuauuccgaauuucaaccaguaugaagccaugagcugugacuuuaauggcggcaagaucuccguccaguacaaccugagccacucuuaugccggggaugcugccgaccauugcggaacaguggcuaauggcguucuucaaaccuucaugcggauggccuggggaggguccuacauugcgcuggauagcggcugcgggagaugggacuguaucaugacgucuuaccaguaucucauuauccagaacacaaccugggaggaucacugccaguuuucccggcccagcccuaucggauaccugggccuucugucucaacgcacaagagacauuuauaucucccggcgccgccggggcaccuucaccuggacacugagcgauuccgaagggaaggacacgcccggaggcuacugucucaccagauggaugcugauugaggccgagcuuaaaugcuuugggaacacagcuguggccaaguguaaugaaaaacaugaugaggaguucugcgacaugcugcggcucuuugauuucaacaagcaggcuauccagcgccugaaagcccccgcgcagaugucuauucaacuuaucaauaaggccgucaacgcucugaucaaugaccagcucgugaugaagaaccaccugagagacauuaugugcaucccuuauugcaauuacagccgguauugguaccugaaccacaccacaaccggccgcacgucccuccccaaauguuggcuggugagcaaugggucuuaccuuaacgaaacacauuucuccgaugacauugagcagcaagccgauaauaugaucaccgagaugcugcagaaggaauauauggagagacagggaaaaaccccucucggccuggucgaccuguuuguuuucagcacaucuuuuuaccuuauuagcaucuuccuccaccuggugaagaucccgacccaucggcacauugugggcaaauccugccccaagccucaucgccugaaccacauggggaucuguucuugcggacucuauaaacagcccggcgucccugugaaguggaagagaugaggacuagucccuguucccagagcccacuuuuuuuucuuuuuuugaaauaaaauagccugucuuucagaucuaaaaaaaaaaaaaaaaaaaaaaaaaaaaaaaaaaaaaaaaaaaaaaaaaaaaaaaaaaaaaaaaaaaaaaaaaaaaaaaaaaaaaaaaaaaaaaaaaaaa

SEQ ID NO: 15970 - RNA, 1743 nt, Artificial Sequence
  mRNA product Design a-2 (A100) comprising derived and/or modified sequence from LASV(G733-SLE-2010;Clade IV)__AIT17154__GPCmut1 (opt5)
aggagaguccgcucagccagguugcagaagcggcuuagcguguguccuaaucuucucucugcguguagguaggccugugccgcaaacaagcuuaccaugggccagaucgugaccuucuuucaagaggucccccacguuauugaagaggugaugaacaucgugcugauugcccucagcauccuggcuguccuuaaggggcuguacaauuucgccacaugcggaauugugggccucguuuccuuucugcuucugugugggagaucuugcacgaccagccucuauaaaggaguguacgaacugcagacacuggagcucaacauggaaacccugaauaugacaaugccucuuuccuguaccaagaacaauucucaucacuauaucauggucggcaacgagacagggcuggagcucacccugacgaauaccagcaucauuaaccauaaauucugcaaucuuuccgacgcgcacaagaaaaaccuguacgaucaugcucucaugucuaucauuagcacauuucaccuguccaucccgaauuucaaccaguaugaagccaugagcugugacuuuaauggaggcaagauuucugugcaguacaaccugucccacagcuaugccggcgaugcugccaaucauugcgggaccaucgcuaacggaguucuccaaacauucaugcggauggccuggggcgggucuuacauugcgcuggacuccggaugcgauagaugggacuguaucaugaccagcuaccaguaucuuaucauucagaacacgacaugggaggaucacugccaguuuucucggcccuccccuaucggcuaccuggggcuccugagccaacgcaccagagacauuuauaucucccggcgccgccggggaacauucaccuggacccucucugauagcgaaggcaaggacacacccggcggguacugucugacgagauggaugcugauugaggccgagcucaaaugcuuuggaaauaccgcuguggccaaguguaacgaaaaacaugaugaggaguucugcgacaugcugcggcuuuuugauuucaauaagcaggcuauccagcgccugaaagcccccgcgcagauguccauccaacucauuaacaaggccgucaaugcucugaucaacgaccagcuuauuaugaagaaucaccugagagacaucaugugcauuccuuauugcaacuacagcaaauauugguaccucaaucacacaaccacagggaagaccucucugcccaaauguuggcugguguccaacggaagcuaccucaaugaaacgcauuucucugaugacaucgagcagcaagccgauaacaugaucacagagaugcugcagaaggaauauauggagcggcagggcaaaaccccucuugggcugguggaccucuuugucuucagcaccuccuuuuaccugauuucuaucuuccugcaccuuguuaagauuccgacacaucgccacguggugggaaaaagcugccccaagccucauagacucaaucacaugggcaucuguuccugcggccuguaugggcagcccggagucccugugaaguggaaacggugaggacuagucccuguucccagagcccacuuuuuuuucuuuuuuugaaauaaaauagccugucuuucagaucuaaaaaaaaaaaaaaaaaaaaaaaaaaaaaaaaaaaaaaaaaaaaaaaaaaaaaaaaaaaaaaaaaaaaaaaaaaaaaaaaaaaaaaaaaaaaaaaaaaaa

SEQ ID NO: 15971 - RNA, 1743 nt, Artificial Sequence
  mRNA product Design a-2 (A100) comprising derived and/or modified sequence from MOPV/LASV reassortant(IGS-1;Clade IV)__AFY05576__GPCmut1 (opt5)
aggagaguccgcucagccagguugcagaagcggcuuagcguguguccuaaucuucucucugcguguagguaggccugugccgcaaacaagcuuaccaugggccagaucgugaccuucuuucaagaggucccccacguuauugaagaggugaugaacaucgugcugauugcccucagcguccuggcugugcuuaaggggcuguacaauuucgccacaugcggacucguuggccuggugacguuucuucugcucugugggagauccugcaccacaucucuguauaaaggagucuacgaacugcagacccucgagcugaacauggaaacacuuaauaugaccaugccucugagcuguacaaagaacaauucccaucacuauaucauggugggcaacgagaccgggcucgagcugacgcuuaccaauacaucuauuaucaaccauaaauucugcaaucugagcgacgcgcacaagaaaaaccucuacgaucaugcucugauguccaucauuucuaccuuucaccugagcaucccgaauuucaaccaguaugaagccauguccugugacuuuaauggaggcaagauuagcguucaguacaaccucucucacuccuaugccggcgaugcugccaaucauugcgggacaguggcuaacggaguccugcaaaccuucaugcggauggccuggggcgggagcuacaucgcgcuugacucuggaugcggcaacugggauuguauuaugacguccuaccaguaucugaucauucagaauacaaccugggaggaccacugccaguuuagcagacccucuccuaucggguaccucggacugcuuucccaacggacacgcgauaucuauauuagcagacggcgccggggcaccuucaccuggacacuguccgacucugaaggcgaggauacgcccgggggauacugucugacccgcuggaugcucaucgaggccgaacugaagugcuuuggcaacacagcuguggccaaauguaaugagaagcaugacgaagaguucugcgauaugcuuagacuguuugacuucaacaaacaggcuauucagcggcucaaggcccccgcgcagaugagcauccaacugauuaauaaagccgugaacgcucuuaucaaugaucagcugaucaugaagaaccaccuccgcgacauuaugugcaucccuuauugcaauuacuccaaguauugguaccugaaccacaccacaaccggaagaacgagccugcccaaauguuggcucgucucuaauggcuccuaccugaacgagacacauuucagcgacgauauugagcagcaagccgacaauaugaucaccgaaaugcuucagaaggaguauauggaacggcaggggaaaaccccucugggacucguugaucuguuuguguucucuaccagcuuuuaccugauuuccaucuuccuucaccucgugaagaucccgacacaucgccacauugucggcaaaucuugccccaagccucauagacugaaccacaugggcaucuguagcugcgggcuguauaaacagcccggagugccuguuaaguggaagcggugaggacuagucccuguucccagagcccacuuuuuuuucuuuuuuugaaauaaaauagccugucuuucagaucuaaaaaaaaaaaaaaaaaaaaaaaaaaaaaaaaaaaaaaaaaaaaaaaaaaaaaaaaaaaaaaaaaaaaaaaaaaaaaaaaaaaaaaaaaaaaaaaaaaaa

SEQ ID NO: 15972 - RNA, 1743 nt, Artificial Sequence
  mRNA product Design a-2 (A100) comprising derived and/or modified sequence from LASV(LM765-SLE-2012;Clade IV)__AIT17814__GPCmut1 (opt5)
aggagaguccgcucagccagguugcagaagcggcuuagcguguguccuaaucuucucucugcguguagguaggccugugccgcaaacaagcuuaccaugggccagaucgugaccuucuuucaagaggucccccacguuauugaagaggugaugaacaucgugcugauugcccucagcauccuggcuguccuuaaggggcuguacaauuucgccacaugcggacucgugggccugguuacguuucuucugcucugugggagauccugcaccacaucucuguauaaaggaguguacgaacugcagacccucgagcugaacauggaaacacuuaauaugaccaugccucugagcuguacaaagaacaauucccaucacuauauuauggucggcaacgagaccgggcucgagcugacgcuuaccaauacaucuaucaucgaccauaaauucugcaaccugagcgaugcgcaccggaagaaucucuacgaccaugcucugauguccauuaucucuaccuuucaccugagcauuccgaacuucaaucaguaugaagccauguccugugauuuuaacggaggcaaaaucagcgugcaguacaaucucucucacuccuaugccaaggacgcugccgaucauugcggcacaguugcuaacggggugcugcaaaccuucaugcgcauggccuggggaggcagcuacauugcgcuugacucugggugcggacggugggauuguaucaugacguccuaccaguaucugauuauccagaauacaaccugggaggaccacugccaguuuagccgccccucuccuaucggcuaccucgggcugcuuucccaaagaacacgggauauuuauaucagccgcagacgccggggaaccuucaccuggacacuguccgacucugaaggcaaggauacgcccggcggguacugucugacccgguggaugcucauugaggccgagcugaaaugcuuuggaaacacagcugucgccaaguguaacgaaaaacaugacgaggaguucugcgauaugcuucgccuguuugacuucaauaagcaggcuauccagagacucaaagcccccgcgcagaugagcauucaacugaucaacaaggccgugaaugcucuuaucaacgaccagcugauuaugaagaaucaccuccgggauaucaugugcauuccuuauugcaacuacuccaaauauugguaccugaaucacaccacaaccgggaagacgagccugcccaaauguuggcucgugucuaacggauccuaccugaaugaaacacauuucagcgacgauaucgagcagcaagccgacaacaugauuaccgagaugcuucagaaggaauauauggagcgccagggcaaaaccccucuggggcucgucgaucuguuuguuuucucuaccagcuuuuaccugaucuccaucuuccuucaccucgugaagauuccgacacauagacacaucgugggaaaacccugcccuaagccccaucggcugaaucacaugggcauuuguucuugcggccuguauaagcagccugggguccccgugaaauggaagcgcugaggacuagucccuguucccagagcccacuuuuuuuucuuuuuuugaaauaaaauagccugucuuucagaucuaaaaaaaaaaaaaaaaaaaaaaaaaaaaaaaaaaaaaaaaaaaaaaaaaaaaaaaaaaaaaaaaaaaaaaaaaaaaaaaaaaaaaaaaaaaaaaaaaaaa

SEQ ID NO: 15973 - RNA, 1743 nt, Artificial Sequence
  mRNA product Design a-2 (A100) comprising derived and/or modified sequence from LASV(LM776-SLE-2012;Clade IV)__AIT17824__GPCmut1 (opt5)
aggagaguccgcucagccagguugcagaagcggcuuagcguguguccuaaucuucucucugcguguagguaggccugugccgcaaacaagcuuaccaugggccagaucgugaccuucuuucaagaggucccccacguuauugaagaggugaugaacaucgugcugauugcccucagcauccuggcuguccuuaaggggcuguacaauuucgccacaugcggacucgugggccugguuacguuucuucugcucugugggagauccugcaccacaucuguguauaaaggagucuacgaacugcagacccuggagcucaacauggaaacacugaauaugaccaugccucuuagcuguacaaagaacaauucccaucacuauauuauggugggcaacgagaccgggcuggagcucacgcugaccaauacaucuaucaucaaccauaaauucugcaaucuuagcgacgcgcacaagaaaaaccuguacgaucaugcucucauguccauuaucucuaccuuucaccugagcauuccgaauuucaaccaguaugaagccauguccugugacuuuaauggaggcaagaucagcguucaguacaaccugucucacuccuaugccggcgaugcugccaaucauugcgggacaguggcuaacggaguccuccaaaccuucaugcggauggccuggggcgggagcuacauugcgcuggacucuggaugcggcaagugggauuguaucaugacguccuaccaguaucuuauuauccagaacacaaccugggaggaccauugccaguuuagccgccccucuccuaucggguaccugggacuccugucccaaagaacacgggauauuuauaucagccgcagacgccggggcaccuucaccuggacacucuccgacucugaaggcaaagauacgcccgggggauacugucugacccgguggaugcugauugaggccgagcucaagugcuuuggcaauacagcuguggccaaauguaacgaaaagcacgacgaggaguucugcgauaugcugcgccuuuuugacuucaauaaacaggcuauccagagacugaaggcccccgcgcagaugagcauucaacucaucaacaaggccgugaaugcucugaucaacgaucagcuuauuaugaaaaaucaucugcgggacaucaugugcauuccuuauugcaacuacuccaaguauugguaccucaaucacaccacaaccggaaaaacgagccugcccaaguguuggcuggucucuaacggcuccuaccucaaugaaacacacuucagcgacgauaucgagcagcaagccgacaacaugauuaccgagaugcugcagaaagaauauauggagcgccaggggaagaccccucuuggacugguugaucucuuuguguucucuaccagcuuuuaccugaucuccaucuuccugcaucuugugaaaauuccgacacacagacauaucgucggcaagucuugccccaagccucaccggcucaaucacaugggcauuuguagcugcgggcuguauaaacagcccggagugccuguucgcuggaagagaugaggacuagucccuguucccagagcccacuuuuuuuucuuuuuuugaaauaaaauagccugucuuucagaucuaaaaaaaaaaaaaaaaaaaaaaaaaaaaaaaaaaaaaaaaaaaaaaaaaaaaaaaaaaaaaaaaaaaaaaaaaaaaaaaaaaaaaaaaaaaaaaaaaaaa

SEQ ID NO: 15974 - RNA, 1743 nt, Artificial Sequence
  mRNA product Design a-2 (A100) comprising derived and/or modified sequence from LASV(Mad39;Clade IV)__ANH09722__GPCmut1 (opt5)
aggagaguccgcucagccagguugcagaagcggcuuagcguguguccuaaucuucucucugcguguagguaggccugugccgcaaacaagcuuaccaugggccagaucgugaccuucuuucaagaggucccccacguuauugaagaggugaugaacaucgugcugauugcccucagcauccuggcuguccuuaaggggcuguacaauguggccacaugcggacucauuggccugguuacguuccuucugcucugugggagauccugcaccacaacccuguauaaaggaguguacgaacugcaggcgcucgagcugaacauggaaacacuuaauaugaccaugccucugucuuguacaaagaacaauagccaucacuauauccgggucggcaacgagaccgggcucgagcugacgcuuaccaauacaucccugaucaaccauaaauuuugcaaucucucugacgcucacaagaaaaaccuguacgaucaugcccugaugagcauuaucuccaccuuccaccucucuauuccgaauuuuaaccaguaugaagccaugagcugugacuucaaugauggaaagaucuccgugcaguacaaccugagccacacauaugcuggcgacaccgccaaucauugcggcacgguugcuaacggggugcuucaaacauuuaugcgcauggccuggggaggcucuuacauugcgcuggauuccgggugcggaggcugggacuguaucaugaccagcuaccaguaucucauuauccagaacacaaccugggaggaucacugccaguucucucggcccuccccuaucggguaccugggacuucugagccaacgcaccagagacauuuauaucucucggcgccgccggggcacauuuacguggacccuguccgauagcgaaggcaaggacacacccgggggauacugucucaccagauggaugcugauugaggccgagcuuaaaugcuucggcaauacagcugucgccaaguguaacgaaaaacaugaugaggaauuuugcgacaugcugcgccucuucgauuuuaauaagcaggcuauccagcggcugaaagcccccgcgcagauguccauucaacuuaucaacaaggccgugaaugcucugaucaacgaccagcucauuaugaagaaucaccugagagacaucaugugcauuccuuauugcaacuacucuaaauauugguaccugaaucacaccgugacgggaaagacaagccuccccaaauguuggcuggucuccaacggcagcuaccuuaaugaaacccauuucucugaugacaucgagcagcaagccgauaacaugauuaccgagaugcugcagaaggaauauauggagcggcaggggaaaacaccucucggacugguugaccuguucguguuuuccaccagcuucuaccuuaucucuaucuuucuccaccuggugaagauuccgacacaucgccacgucgugggcaaacccugcccuaagccccauagacugaaucacaugggcaucuguagcugcggguucuauaagcagccuggaguucccgugcgguggaaacgcugaggacuagucccuguucccagagcccacuuuuuuuucuuuuuuugaaauaaaauagccugucuuucagaucuaaaaaaaaaaaaaaaaaaaaaaaaaaaaaaaaaaaaaaaaaaaaaaaaaaaaaaaaaaaaaaaaaaaaaaaaaaaaaaaaaaaaaaaaaaaaaaaaaaaa

SEQ ID NO: 15975 - RNA, 1743 nt, Artificial Sequence
  mRNA product Design a-2 (A100) comprising derived and/or modified sequence from LASV(Z0947-SLE-2011;Clade IV)__AIT17840__GPCmut1 (opt5)
aggagaguccgcucagccagguugcagaagcggcuuagcguguguccuaaucuucucucugcguguagguaggccugugccgcaaacaagcuuaccaugggccagaucgugaccuucuuucaagaggucccccacguuauugaagaggugaugaacaucgugcugauugcccucagcauccuggcuguccuuaaggggcuguacaauuucgccacaugcggacucgugggccugguuacguuucuucugcucugugggagauccugcaccauuucucuguauaaaggaguguacgaacugcagacacucgagcugaacauggaaacccuuaauaugacaaugccucugagcuguaccaagaacaauucccaucacuauaucauggucggcaacgagacagggcucgagcugacccuuacgaauaccucuaucauuaaccauaaauucugcaaucugagcgacgcgcacaagaaaaaccucuacgaucaugcucugauguccaucauuucuacauuucaccugagcaucccgaauuucaaccaguaugaagccauguccugugacuuuaauggaggcaagauuagcgugcaguacaaccucucucacuccuaugccggcgaugcugccaaucauugcgggaccguugcuaacggagugcugcaaacauucaugcggauggccuggggcgggagcuacaucgcgcuugacucuggaugcgauagaugggacuguauuaugaccuccuaccaguaucugaucauccagaacacgacaugggaggaucacugccaguuuagccggcccucuccuauuggcuaccucgggcugcuuucccaacgcaccagagacaucuauauuagccggcgccgccggggaacauucaccuggacccuguccgauucugaaggcaaggacacacccggcggguacugucugacgagauggaugcucaucgaggccgagcugaaaugcuuuggaaauaccgcugucgccaaguguaacgaaaaacaugaugaggaguucugcgacaugcuucggcuguuugauuucaauaagcaggcuauucagcgccucaaagcccccgcgcagaugagcauccaacugaucaacaaggccgugaaugcucuuauuaacgaccagcugaucaugaagaaucaccucagagacauuaugugcaucccuuauugcaacuacuccaaauauugguaccugaaucacacaaccacagggaagaccagccugcccaaauguuggcucgugucuaacggauccuaccugaaugaaacgcauuucagcgaugacauugagcagcaagccgauaacaugaucacagagaugcuucagaaggaauauauggagcggcagggcaaaaccccucuggggcucgucgaccuguuuguuuucucuaccagcuuuuaccugaucuccauuuuccuucaccucgugaagaucccgacacaucgccacauugugggaaaacccugcccuaagccccauagacugaaucacaugggcaucuguucuugcggccuguauaagcagccugggguccccgugaaauggaagcggugaggacuagucccuguucccagagcccacuuuuuuuucuuuuuuugaaauaaaauagccugucuuucagaucuaaaaaaaaaaaaaaaaaaaaaaaaaaaaaaaaaaaaaaaaaaaaaaaaaaaaaaaaaaaaaaaaaaaaaaaaaaaaaaaaaaaaaaaaaaaaaaaaaaaa

SEQ ID NO: 15976 - RNA, 1781 nt, Artificial Sequence
  mRNA product Design b-4 (hSL-A64-N5) comprising derived and/or modified sequence from LASV(Josiah;Clade IV)__NP_694870__GPCmut1 (opt1)
aggagagucccgcagucggcguccagcggcucugcuuguucgugugugugucguugcaggccuuauucaagcuuaccaugggccagaucgugaccuucuuccaggaggucccccacgugaucgaggaggugaugaacaucguccugaucgcccucagcgugcuggccgugcugaaggggcucuacaacuucgcgaccugcggccuggucgggcuggugacguuccuccugcugugcggccgcuccugcaccaccagccucuacaaggggguguacgagcugcagacccuggagcucaacauggagacgcugaacaugaccaugccgcuguccugcaccaagaacaacagccaccacuacaucauggucggcaacgagaccggccucgagcugacgcugaccaacaccuccaucaucaaccacaaguucugcaaccucagcgacgcccacaagaagaaccuguacgaccacgcccugauguccaucaucagcaccuuccaccucuccauccccaacuucaaccaguacgaggccaugagcugcgacuucaacgggggcaagaucuccgugcaguacaaccugagccacuccuacgccggggacgcggccaaccacugcggcacgguggccaacgggguccugcagaccuucaugcggauggccuggggcggcagcuacaucgcgcucgacuccgggugcggcaacugggacugcaucaugaccagcuaccaguaccugaucauccagaacaccacgugggaggaccacugccaguucucccggcccagccccaucggguaccugggccuccugucccagcgcacccgggacaucuacaucagccgccggcgccggggcaccuucaccuggacgcugagcgacuccgaggggaaggacaccccgggcggguacugccugacccgcuggaugcucaucgaggccgagcugaagugcuucggcaacaccgccguggccaagugcaacgagaagcacgacgaggaguucugcgacaugcugcggcuguucgacuucaacaagcaggccauccagcgccugaaggcgcccgcccagaugagcauccagcugaucaacaaggccgugaacgcccucaucaacgaccagcugaucaugaagaaccaccuccgggacaucaugugcauccccuacugcaacuacuccaaguacugguaccucaaccacacgaccaccggccgcaccagccugcccaagugcuggcuggucuccaacggcagcuaccucaacgagacgcacuucuccgacgacaucgagcagcaggccgacaacaugaucaccgagaugcugcagaaggaguacauggagcggcaggggaagacgccccugggccucguggaccuguucguguucagcaccuccuucuaccugaucagcaucuuccugcaccucgucaagaucccgacccaccgccacaucguggggaaguccugccccaagccccaccggcugaaccacaugggcaucugcagcugcgggcuguacaagcagcccggcgugccggucaaguggaagcgcugaggacuaguaauaaggaaacuguaugaaugucugugggcaggaagugaagagauccuucuguaaagguuuuuggaauuaugucugcugaauaauaaacuuuuuugaaauaauaaaucugguagaaaaaugagaucucaaaggcucuuuucagagccaccaaaaaaaaaaaaaaaaaaaaaaaaaaaaaaaaaaaaaaaaaaaaaaaaaaaaaaaaaaaaaaaaagaauu

SEQ ID NO: 15977 - RNA, 1778 nt, Artificial Sequence
  mRNA product Design b-4 (hSL-A64-N5) comprising derived and/or modified sequence from LASV(LP;Clade I)__AAF86701__GPCmut1 (opt1)
aggagagucccgcagucggcguccagcggcucugcuuguucgugugugugucguugcaggccuuauucaagcuuaccaugggccagaucaucaccuucuuccaggaggugccccacgucaucgaggaggugaugaacaucgugcugaucgcccucagccugcuggccauccucaaggggcuguacaacaucgcgaccugcggcaucaucgggcuggucgccuuccucuuccugugcggcaaguccugcagccugacgcucaagggcggguacgagcugcagacccuggagcucaacauggagacccugaacaugaccaugccgcuguccugcacgaagaacagcucccaccacuacauccgcgugggcaacgagaccgggcucgagcugacccugaccaacacgagcaucaucaaccacaaguucugcaaccucuccgacgcccacaagaagaaccuguacgaccacgcccugaugagcaucaucuccaccuuccaccucagcauccccaacuucaaccaguacgaggccauguccugcgacuucaacggcgggaagaucagcgugcaguacaaccugucccacagcuacgcgggcgacgccgccgagcacugcgggaccgucgccaacggcgugcugcagaccuucaugcggauggcguggggcgggcgcuacaucgcccucgacuccggcugcgggaacugggacugcaucaugacgagcuaccaguaccugaucauccagaacaccaccugggaggaccacugccaguucucccggcccagccccaucggcuaccugggccuccugucccagcgcacccgggacaucuacaucagccgccggcgccgggggacguucaccuggacccugagcgacuccgagggcaacgagacccccgggggcuacugccugacgcgcuggaugcucaucgaggccgagcugaagugcuucgggaacaccgccguggccaagugcaacgagaagcacgacgaggaguucugcgacaugcugcggcuguucgacuucaacaagcaggcgauccgccggcugaaggcccccgcccagaugagcauccagcugaucaacaaggccgucaacgcccucaucaacgaccagcugaucaugaagaaccaccuccgcgacaucaugugcauccccuacugcaacuacuccaaguacugguaccucaaccacaccagcuccggccggaccagccugcccaagugcuggcugaucuccaacgggagcuaccucaacgagacgcaguucuccgacgacaucgagcagcaggcggacaacaugaucaccgagaugcugcagaaggaguacaucgagcgccagggcaagaccccgcuggggcucguggacaucuucaucuucagcaccuccuucuaccugaucagcaucuuccugcaccugaucaagaucccgacgcaccggcacaucgugggcaagcccugccccaagccccaccgccucaaccacaugggggucugcuccugcggccuguacaagcacccgggcgugcccaccaaguggaagcggugaggacuaguaauaaggaaacuguaugaaugucugugggcaggaagugaagagauccuucuguaaagguuuuuggaauuaugucugcugaauaauaaacuuuuuugaaauaauaaaucugguagaaaaaugagaucucaaaggcucuuuucagagccaccaaaaaaaaaaaaaaaaaaaaaaaaaaaaaaaaaaaaaaaaaaaaaaaaaaaaaaaaaaaaaaaaagaauu

SEQ ID NO: 15978 - RNA, 1778 nt, Artificial Sequence
  mRNA product Design b-4 (hSL-A64-N5) comprising derived and/or modified sequence from LASV(803213;Clade II)__AAF86703__GPCmut1 (opt1)
aggagagucccgcagucggcguccagcggcucugcuuguucgugugugugucguugcaggccuuauucaagcuuaccaugggccagaucaucaccuucuuccaggaggugccccacgucaucgaggaggugaugaacaucgugcugaucgcccucagccugcuggccauccucaaggggaucuacaacgucgcgaccugcggccuguucgggcugaucuccuuccuccugcugugcggccgcagcugcuccgugacguacaaggggguguacgagcuccagacccuggagcugaacauggccaaccucaacaugaccaugccgcugagcugcaccaagaacaacucccaccacuacaucauggucggcaacgagacgggccuggagcucacccugaccaacaccagcaucaucaaccacaaguucugcaaccuguccgacgcccacaagaagaaccucuacgaccacgcccugaugagcaucaucuccacguuccaccugagcauccccaacuucaaccaguacgaggccauguccugcgacuucaacgggggcaagaucagcgugcaguacaaccucucccacagcuucgcgguggacgccgccaaccacugcgggaccaucgccaacggcguccugcagaccuucaugcggauggcguggggcggguccuacaucgcccuggacagcggcugcgggaacugggacugcaucaugaccuccuaccaguaccucaucauccagaacacgaccugggaggaccacugccaguucagccgccccucccccaucggcuaccuggggcugcucagccagcggacccgcgacaucuacaucagccggcgccgccggggcaccuucacguggacccucuccgacagcgagggcaacgaggcccccgggggcuacugccugacccgguggaugcugaucgaggccgagcucaagugcuucgggaacaccgccguggcgaagugcaacgagaagcacgacgaggaguucugcgacaugcugcgccuguucgacuucaacaagcaggccaucaagcggcucaagacgcccgcccagauguccauccagcugaucaacaaggccgugaacgcccugaucaacgaccagcucaucaugaagaaccaccuccgcgacaucaugugcauccccuacugcaacuacagccgguacugguaccugaaccacaccgucaccgggaagaccucccugccccgcugcuggcuggugagcaacggcuccuaccugaacgagacgcacuucagcgacgacaucgagcagcaggcggacaacaugaucaccgagaugcuccagaaggaguacauggaccggcagggcaagaccccgcuggggcugguggaccucuucgucuucuccaccagcuucuaccugaucuccaucuuccugcaccuggugaagaucccgacgcaccgccacaucgugggcaagcccugccccaagccccaccggcucaaccacauggggaucugcagcugcggccuguacaagcacccggggguccccgugaaguggaagcgcugaggacuaguaauaaggaaacuguaugaaugucugugggcaggaagugaagagauccuucuguaaagguuuuuggaauuaugucugcugaauaauaaacuuuuuugaaauaauaaaucugguagaaaaaugagaucucaaaggcucuuuucagagccaccaaaaaaaaaaaaaaaaaaaaaaaaaaaaaaaaaaaaaaaaaaaaaaaaaaaaaaaaaaaaaaaaagaauu

SEQ ID NO: 15979 - RNA, 1778 nt, Artificial Sequence
  mRNA product Design b-4 (hSL-A64-N5) comprising derived and/or modified sequence from LASV(GA391;Clade III)__CAA36645__GPCmut1 (opt1)
aggagagucccgcagucggcguccagcggcucugcuuguucgugugugugucguugcaggccuuauucaagcuuaccaugggccagaucgugaccuucuuccaggaggucccccacgugaucgaggaggugaugaacaucguccugaucgcccucagcauccuggccauccugaaggggcucuacaacguggcgaccugcggccugaucgggcuggugacguuccuccugcuguccggccgcagcugcucccucaucuacaaggggaccuacgagcugcagacccuggagcucaacauggagacccugaacaugacgaugccgcugagcugcaccaagaacaacucccaccacuacauccgggucggcaacgagaccggccucgagcugacccugacgaacaccagcauccucaaccacaaguucugcaaccuguccgacgcccacaagcgcaaccuguacgaccacagccucauguccaucaucagcaccuuccaccuguccauccccaacuucaaccaguacgaggccaugagcugcgacuucaacgggggcaagaucaccgugcaguacaaccugucccacagcuucgccguggacgccgcggggcacugcggcacgcucgccaacgggguccugcagaccuucaugcggauggccuggggcggcuccuacaucgcccuggacagcgggugcggcaacugggacugcaucaugaccuccuaccaguaccucaucauccagaacaccacgugggacgaccacugccaguucagccggcccucccccaucggguaccugggccugcucagccagcgcacccgggacaucuacaucagccgccggcgccggggcaccuucaccuggacgcucuccgacagcgaggggaacgagaccccgggcggguacugccugacccgcuggaugcugaucgaggcggagcucaagugcuucggcaacaccgccguggccaagugcaacgagaagcacgacgaggaguucugcgacaugcugcggcuguucgacuucaacaagcaggccauccgccggcucaagacgcccgcccagauguccauccagcugaucaacaaggcggugaacgcccugaucaacgaccagcucaucaugaagaaccaccuccgcgacaucaugugcauccccuacugcaacuacagccgguacugguaccugaaccacaccuccaccggcaagaccagccugccccgcugcuggcugaucuccaacggcagcuaccugaacgagacgaaguucuccgacgacaucgagcagcaggccgacaacaugaucaccgagaugcuccagaaggaguacaucgaccggcaggggaagacgccccugggccuggucgaccuguucguguucagcaccuccuucuaccucaucagcaucuuccugcaccuggugaagaucccgacccaccgccacaucgucgggaagcccugccccaagccccaccggcucaaccacaugggcaucugcuccugcgggcuguacaagcagccgggcgugcccgugcgcuggaagcggugaggacuaguaauaaggaaacuguaugaaugucugugggcaggaagugaagagauccuucuguaaagguuuuuggaauuaugucugcugaauaauaaacuuuuuugaaauaauaaaucugguagaaaaaugagaucucaaaggcucuuuucagagccaccaaaaaaaaaaaaaaaaaaaaaaaaaaaaaaaaaaaaaaaaaaaaaaaaaaaaaaaaaaaaaaaaagaauu

SEQ ID NO: 15980 - RNA, 1781 nt, Artificial Sequence
  mRNA product Design b-4 (hSL-A64-N5) comprising derived and/or modified sequence from LASV(AV;Clade V)__CCA30314__GPCmut1 (opt1)
aggagagucccgcagucggcguccagcggcucugcuuguucgugugugugucguugcaggccuuauucaagcuuaccaugggccagaucgugaccuucuuccaggaggucccccacgugaucgaggaggugaugaacaucguccugaucgcccucagcauccuggccgugcugaaggggcucuacaacaucgcgaccugcggccugaucgggcugaucacguuccuccugcugugcggccgcuccugcagcuccaaccucuacaaggggguguacgagcugcagagccuggaccucaacauggagacccugaacaugaccaugccgcuguccugcaccaagaacaacagccaccacuacauccgggucggcaacgacacgggccucgagcugacccugaccaacaccuccauccucaaccacaaguucugcaaccugagcgacgcccacaagaaggaccuguacgaccacgcccucauguccaucaucagcacguuccaccuguccauccccaacuucaaccaguacgaggccaugagcugcgacuucaacgggggcaagaucuccgugcaguacaaccugagccacuccuacgccaucgacgcggccaaccacugcgggaccguggccaacggcauccuccagaccuucaugcgcauggccuggggcgggagcuacaucgcgcuggacuccggcugcgggaacugggacugcaucaugaccagcuaccaguaccugaucauccagaacacgaccugggagaaccacugccaguucucccgccccagccccaucggcuaccucgggcugcugagccagcggacccgcgacaucuacaucucccggcgccgccggggcaccuucacguggacccugagcgacuccgagggcaacgccacccccgggggcuacugccucacccgguggaugcugaucgaggccgagcugaagugcuucgggaacacggccgucgccaagugcaacgagaagcacgacgaggaguucugcgacaugcuccgccuguucgacuucaacaagcaggcgaucagccggcugaagucccccgcccagaugagcauccagcucaucaacaaggccgugaacgcccugaucaacgaccagcugaucaugaagaaccaccuccgcgacaucaugugcauccccuacugcaacuacuccaaguacugguaccugaaccacaccaucaccgggaagaccagccugcccaagugcuggcucguguccaacggcagcuaccugaacgagacgcacuucuccgacgacaucgagcagcaggccgacaacaugaucaccgagaugcugcagaaggaguacauggagcggcagggcaagaccccgcucgggcuggucgaccuguucguguucagcaccuccuucuaccugaucagcaucuuccuccgccuggugaagaucccgacgcaccggcacaucgucggcaagcccugccccaagccccaccgccugaaccacauggggaucugcuccugcggccucuacaagcagccgggggugcccgugcgguggaagcgcugaggacuaguaauaaggaaacuguaugaaugucugugggcaggaagugaagagauccuucuguaaagguuuuuggaauuaugucugcugaauaauaaacuuuuuugaaauaauaaaucugguagaaaaaugagaucucaaaggcucuuuucagagccaccaaaaaaaaaaaaaaaaaaaaaaaaaaaaaaaaaaaaaaaaaaaaaaaaaaaaaaaaaaaaaaaaagaauu

SEQ ID NO: 15981 - RNA, 1778 nt, Artificial Sequence
  mRNA product Design b-4 (hSL-A64-N5) comprising derived and/or modified sequence from LASV(Togo/2016/7082;Clade VI)__AMR44577__GPCmut1 (opt1)
aggagagucccgcagucggcguccagcggcucugcuuguucgugugugugucguugcaggccuuauucaagcuuaccaugggccagaucaucaccuucuuccaggaggugccccacgucaucgaggaggugaugaacaucgugcugaucgcccucagccugcuggccauccucaagggggucuacaacguggcgaccugcggcaucaucgggcuggugacguuccuguuccucugcggccgcuccugcagccugaucuacaagggguccuacgagcugcagacccucgagcugaacauggagacccugaacaugaccaugccgcucagcugcacgaagaacuccagccaccacuacauccgggucggcaacgagaccggccuggagcugacccucaccaacacguccaucaucaaccacaaguucugcaaccugagcgacgcccacaagcgcaaccuguacgaccacgcccucauguccauccugagcaccuuccaccuguccauccccaacuucaaccaguacgaggccaugagcugcgacuucaacgggggcaagaucuccgugcaguacaaccucagccacgccuacgcgguggacgccgccgagcacugcgggaccgucgccaacggcgugcugcagaccuucaugcggauggcguggggcggguccuacaucgcccuggacagcggcugcgggaacugggacugcaucaugacguccuaccaguaccucaucauccagaacaccaccugggaggaccacugccaguucagccggcccucccccaucggcuaccuggggcugcucagccagcgcacccgggacaucuacaucagccgccggcgccggggcacguucaccuggacccucuccgacagcgagggcaacgagacccccgggggcuacugccugacgcgcuggaugcugaucgaggccgagcucaagugcuucgggaacaccgccguggccaagugcaacgagaagcacgacgaggaguucugcgacaugcugcggcuguucgacuucaacaagcaggcgauccagcgccucaagucccccgcccagaugagcauccagcugaucaacaaggccgucaacgcccugaucaacgaccagcucaucaugaagaaccaccuccgggacaugaugugcauccccuacugcaacuacuccaaguacugguaccugaaccacaccagcuccgggcgcaccagccugcccaagugcuggcugguguccaacggcagcuaccugaacgagacgcacuucuccgacgacaucgagcagcaggccgacaacaugaucaccgagaugcuccagaaggaguacaucgaccggcagggcaagaccccgcuggggcugguggaccucuucgucuucagcaccuccuucuaccugaucagcaucuuccugcaccugaucaagaucccgacgcaccgccacaucgugggcaagcccugccccaagccccaccggcucaaccacauggggaucugcuccugcggccuguacaagcagccgggggugcccacccgcuggaagcggugaggacuaguaauaaggaaacuguaugaaugucugugggcaggaagugaagagauccuucuguaaagguuuuuggaauuaugucugcugaauaauaaacuuuuuugaaauaauaaaucugguagaaaaaugagaucucaaaggcucuuuucagagccaccaaaaaaaaaaaaaaaaaaaaaaaaaaaaaaaaaaaaaaaaaaaaaaaaaaaaaaaaaaaaaaaaagaauu

SEQ ID NO: 15982 - RNA, 1778 nt, Artificial Sequence
  mRNA product Design b-4 (hSL-A64-N5) comprising derived and/or modified sequence from LASV(KAK-428;Clade n.d. (VII))__ANH09740__GPCmut1 (opt1)
aggagagucccgcagucggcguccagcggcucugcuuguucgugugugugucguugcaggccuuauucaagcuuaccaugggccagaucgugaccuucuuccaggaggucccccacgugaucgaggaggugaugaacaucguccugaucgcccucagccugcuggccauccucaaggggcuguacaacuucgcgaccugcggcgugaucgggcugaucacguuccuccugcugugcggccgcuccugcagcgccaccuacaaggggcaguacgagcuccagacccuggagcugaacauggagucccucaacaugaccaugccgcugagcugcacgaagaacaacucccaccacuacauccgggccggcaacaacaccggccuggagcucacccugaccaacacgagcaucaucucccacaaguucugcaaccugagcgacgcccacaagaagaaccucuacgaccacacccugauguccaucaucaccaccuuccaccugagcauccccaacuucaaccaguacgaggccauguccugcgacuucaacgggggcaagaucagcauccaguacaaccucucccacagcuacgcgggggacgccgcccagcacugcggcacgguggccaacgggguccugcagaccuucaugcgcauggcguggggcggcuccuaccuggcccucgacagcgggugccgcggcugggacugcaucaucuccagcuaccaguaccugaucauccagaacaccaccugggacgaccacugccaguucucccggcccagccccaucggguaccugggcuucgugagccagaagacgcgcgacaucuacaucucccggcgccgccggggcaccuucaccuggacccugagcgacuccgaggggcacgacaugccgggcggguacugccucacgcgguggaugcugaucgaggccgaccugaagugcuucggcaacaccgccguggccaagugcaacgagaagcacgacgaggaguucugcgacauguggcgccucuucgacuucaacaagcaggcgauccagcggcugaaggcccccgcccagaugaacauccagcugaucaacaaggccgucaacgcccucaucaacgaccagcugaugaugaagaaccaccuccgcgacaucaugugcauccccuacugcaacuacagcaaguucugguaccugaacaacaccaccacgggccggaccucccugccccgcugcuggcugaucagcaacggcuccuaccucaacgagacccacuucagcgacgacaucgagcagcaggcggacaacaugaucaccgagaugcugcagaaggaguacauggaccggcaggggaagacgccccugggccucguggaccuguucguguucuccaccagcuucuaccugaucaccaucuuccuccaccuggucaagaucccgacccaccgccacaucguggggaagcccugccccaagccccaccggcugaaccacaugggcaucugcuccugcgggcuguacaagcagccgggcgugcccguccgcuggaagcggugaggacuaguaauaaggaaacuguaugaaugucugugggcaggaagugaagagauccuucuguaaagguuuuuggaauuaugucugcugaauaauaaacuuuuuugaaauaauaaaucugguagaaaaaugagaucucaaaggcucuuuucagagccaccaaaaaaaaaaaaaaaaaaaaaaaaaaaaaaaaaaaaaaaaaaaaaaaaaaaaaaaaaaaaaaaaagaauu

SEQ ID NO: 15983 - RNA, 1778 nt, Artificial Sequence; identical to SEQ ID NO: 15977
  mRNA product Design b-4 (hSL-A64-N5) comprising derived and/or modified sequence from LASV(Pinneo-NIG-1969;Clade I)__AIT17836__GPCmut1 (opt1)

SEQ ID NO: 15984 - RNA, 1778 nt, Artificial Sequence
  mRNA product Design b-4 (hSL-A64-N5) comprising derived and/or modified sequence from LASV(ISTH0009-NIG-2011;Clade II)__AIT17404__GPCmut1 (opt1)
aggagagucccgcagucggcguccagcggcucugcuuguucgugugugugucguugcaggccuuauucaagcuuaccaugggccagaucaucaccuucuuccaggaggugccccacgucaucgaggaggugaugaacaucgugcugaucgcccucagccugcuggccauccucaaggggaucuacaacgucgcgaccugcggccuguucgggcugguguccuuccuccugcugugcggccgcagcugcuccacgaccuacaaggggguguacgagcuccagacccuggagcuggacauggccagccucaacaugaccaugccgcuguccugcacgaagaacaacagccaccacuacaucauggucggcaacgagaccggccuggagcucacccugaccaacacguccaucaucaaccacaaguucugcaaccugagcgacgcccacaagaagaaccucuacgaccacgcccugauguccaucaucagcaccuuccaccuguccauccccaacuucaaccaguacgaggccaugagcugcgacuucaacgggggcaagaucuccgugcaguacaaccucagccacgcguacgccguggacgccgccaaccacugcgggaccaucgcgaacggcguccugcagaccuucaugcggauggccuggggcggguccuacaucgcccuggacagcggcugcggguccugggacugcaucaugacgagcuaccaguaccucaucauccagaacaccaccugggaggaccacugccaguucucccgccccagccccaucggcuaccuggggcugcucagccagcggacccgcgacaucuacaucucccggcgccgccggggcacguucaccuggacccucagcgacuccgagggcaacgagacccccgggggcuacugccugacgcgguggaugcugaucgaggccgagcucaagugcuucgggaacaccgccguggcgaagugcaacgagaagcacgacgaggaguucugcgacaugcugcgccuguucgacuucaacaagcaggccauccggcgccucaagacccccgcccagaugagcauccagcugaucaacaaggccgugaacgcccugaucaacgaccagcucaucaugaagaaccaccuccgggacaucaugugcaucccguacugcaacuacuccaaguacugguaccugaaccacaccgucacggggaagaccagccugccccgcugcuggcugguguccaacggcagcuaccugaacgagacccacuucuccgacgacaucgagcagcaggcggacaacaugaucaccgagcuccugcagaaggaguacauggaccggcagggcaagacgccccuggggcucguggaccuguucgucuucagcaccuccuucuaccugaucagcaucuuccugcaccucaucaagaucccgacccaccgccacaucaccggcaagcccugccccaagccccaccggcugaaccacauggggaucugcuccugcggccuguacaagcacccgggggugcccgugaaguggaagcgcugaggacuaguaauaaggaaacuguaugaaugucugugggcaggaagugaagagauccuucuguaaagguuuuuggaauuaugucugcugaauaauaaacuuuuuugaaauaauaaaucugguagaaaaaugagaucucaaaggcucuuuucagagccaccaaaaaaaaaaaaaaaaaaaaaaaaaaaaaaaaaaaaaaaaaaaaaaaaaaaaaaaaaaaaaaaaagaauu

SEQ ID NO: 15985 - RNA, 1778 nt, Artificial Sequence
  mRNA product Design b-4 (hSL-A64-N5) comprising derived and/or modified sequence from LASV(ISTH2010-NIG-2012;Clade II)__AIT17482__GPCmut1 (opt1)
aggagagucccgcagucggcguccagcggcucugcuuguucgugugugugucguugcaggccuuauucaagcuuaccaugggccagaucaucaccuucuuccaggaggugccccacgucaucgaggaggugaugaacaucgugcugaucgcccucagccugcuggccauccucaaggggaucuacaacgucgcgaccugcggccuguucgggcugguguccuuccuccugcugugcggccgcagcugcuccacgaccuacaaggggguguacgagcuccagacccuggagcuggacauggccagccucaacaugaccaugccgcuguccugcacgaagaacaacagccaccacuacaucauggucggcaacgagaccggccuggagcucacccugaccaacacguccaucaucaaccacaaguucugcaaccugagcgacgcccacaagaagaaccucuacgaccacgcccugauguccaucaucagcaccuuccaccuguccauccccaacuucaaccaguacgaggccaugagcugcgacuucaacgggggcaagaucuccgugcaguacaaccucagccacgcguacgccguggacgccgccaaccacugcgggaccaucgcgaacggcguccugcagaccuucaugcggauggccuggggcggguccuacaucgcccuggacagcggcugcggguccugggacugcaucaugacgagcuaccaguaccucaucauccagaacaucaccugggaggaccacugccaguucucccgccccagccccaucggcuaccuggggcugcucagccagcggacccgcgacaucuacaucucccggcgccgccggggcaccuucacguggacccucagcgacuccgagggcaacgagacccccgggggcuacugccugacccgguggaugcugaucgaggccgagcucaagugcuucgggaacacggccguggcgaagugcaacgagaagcacgacgaggaguucugcgacaugcugcgccuguucgacuucaacaagcaggccauccggcgccucaagacccccgcccagaugagcauccagcugaucaacaaggccgugaacgcccugaucaacgaccagcucaucaugaagaaccaccuccgggacaucaugugcauccccuacugcaacuacuccaaguacugguaccugaaccacaccgucaccgggaagacgagccugccccgcugcuggcugguguccaacggcagcuaccugaacgagacccacuucuccgacgacaucgagcagcaggcggacaacaugaucaccgagcuccugcagaaggaguacaucgaccggcagggcaagaccccgcuggggcucguggaccuguucgucuucagcacguccuucuaccugaucagcaucuuccugcaccucgugaagaucccgacccaccgccacguggucggcaagcccugccccaagccccaccggcugaaccacauggggaucugcuccugcggccuguacaagcacccgggggugcccgugaaguggaagcgcugaggacuaguaauaaggaaacuguaugaaugucugugggcaggaagugaagagauccuucuguaaagguuuuuggaauuaugucugcugaauaauaaacuuuuuugaaauaauaaaucugguagaaaaaugagaucucaaaggcucuuuucagagccaccaaaaaaaaaaaaaaaaaaaaaaaaaaaaaaaaaaaaaaaaaaaaaaaaaaaaaaaaaaaaaaaaagaauu

SEQ ID NO: 15986 - RNA, 1778 nt, Artificial Sequence
  mRNA product Design b-4 (hSL-A64-N5) comprising derived and/or modified sequence from LASV(Lassa virus/H.sapiens-wt/NGA/2015/ISTH_0543;Clade II)__AVO03639__GPCmut1 (opt1)
aggagagucccgcagucggcguccagcggcucugcuuguucgugugugugucguugcaggccuuauucaagcuuaccaugggccagaucaucaccuucuuccaggaggugccccacgucaucgaggaggugaugaacaucgugcugaucgcccucagccugcuggccauccucaaggggaucuacaacgucgcgaccugcggccuguucgggcugguguccuuccuccugcugugcggccgcagcugcuccacgaccuacaaggggguguacgagcuccagacccuggagcuggacauggccaaccucaacaugaccaugccgcugagcugcacgaagaacaacucccaccacuacaucauggucggcaacgagaccggccuggagcucacccugaccaacacgagcaucaucaaccacaaguucugcaaccuguccgacgcccacaagaagaaccucuacgaccacgcccugaugagcaucaucuccaccuuccaccugagcauccccaacuucaaccaguacgaggccauguccugcgacuucaacgggggcaagaucagcgugcaguacaaccucucccacaccuacgcgguggacgccgccaaccacugcgggaccaucgccaacggcguccugcagacguucaugcggauggcguggggcgggagcuacaucgcccuggacuccggcugcgggagcugggacugcaucaugaccuccuaccaguaccucgugauccagaacaccaccugggaggaccacugccaguucagccgccccucccccaucggcuaccuggggcugcucagccagcggacgcgcgacaucuacaucagccggcgccgccggggcaccuucaccuggacccucuccgacagcgagggcaacgagacgcccgggggcuacugccugacccgguggaugcugaucgaggccgagcucaagugcuucgggaacaccgccguggccaagugcaacgagaagcacgacgaggaguucugcgacaugcugcgccuguucgacuucaacaagcaggcgauccggcgccucaagacccccgcccagauguccauccagcugaucaacaaggccgucaacgcccugaucaacgaccagcucaucaugaagaaccaccuccgggacaucaugugcauccccuacugcaacuacagcaaguacugguaccugaaccacacggugaccgggaagaccucccugccccgcugcuggcuggugagcaacggcuccuaccugaacgagacccacuucagcgacgacaucgagcagcaggccgacaacaugaucacggagcuccugcagaaggaguacaucgaccggcagggcaagaccccgcuggggcucgucgaccuguucguguucuccaccagcuucuaccugaucuccaucuuccugcaccucgugaagaucccgacccaccgccacaucacgggcaagcccugccccaagccccaccggcugaaccacauggggaucugcagcugcggccuguacaagcacccggggguccccgugaaguggaagcgcugaggacuaguaauaaggaaacuguaugaaugucugugggcaggaagugaagagauccuucuguaaagguuuuuggaauuaugucugcugaauaauaaacuuuuuugaaauaauaaaucugguagaaaaaugagaucucaaaggcucuuuucagagccaccaaaaaaaaaaaaaaaaaaaaaaaaaaaaaaaaaaaaaaaaaaaaaaaaaaaaaaaaaaaaaaaaagaauu

SEQ ID NO: 15987 - RNA, 1778 nt, Artificial Sequence
  mRNA product Design b-4 (hSL-A64-N5) comprising derived and/or modified sequence from LASV(Lassa virus/H.sapiens-wt/NGA/2016/ISTH_0009;Clade II)__AVO03571__GPCmut1 (opt1)
aggagagucccgcagucggcguccagcggcucugcuuguucgugugugugucguugcaggccuuauucaagcuuaccaugggccagaucaucaccuucuuccaggaggugccccacgucaucgaggaggugaugaacaucgugcugaucgcccucagccugcuggccauccucaaggggaucuacaacgucgcgaccugcggccugcuggggcucguguccuuccugcugcucugcggccgcagcugcuccacgaccuacaaggggguguacgagcugcagacccuggagcucgacauggccagccugaacaugaccaugccgcuguccugcacgaagaacaacagccaccacuacaucauggucggcaacgagaccggccucgagcugacccugaccaacacguccaucaucaaccacaaguucugcaaccucagcgacgcccacaagaagaaccuguacgaccacgcccugauguccaucaucagcaccuuccaccucuccauccccaacuucaaccaguacgaggccaugagcugcgacuucaacgggggccggaucuccgugcaguacaaccugagccacuccuacgcgguggacgccgccaaccacugcgggaccaucgccaacggcguccugcagaccuucaugcgcauggcguggggcgggagcuacaucgcccucgacuccggcugcgggagcugggacugcaucaugacguccuaccaguaccugaucauccagaacaccaccugggaggaccacugccaguucagccggcccagccccaucggcuaccuggggcuccugucccagcgcacccgggacaucuacaucagccgccggcgccggggcacguucaccuggacccuguccgacagcgagggcaacgagacccccgggggcuacugccugacgcgcuggaugcucaucgaggccgagcugaagugcuucgggaacaccgccguggccaagugcaacgagaagcacgacgaggaguucugcgacaugcugcggcuguucgacuucaacaagcaggcgauccgccggcugaagacccccgcccagauguccauccagcugaucaacaaggccgugaacgcccucaucaacgaccagcugaucaugaagaaccaccuccgcgacaucaugugcaucccguacugcaacuacagcaaguacugguaccucaaccacaccgucacggggaagaccucccugccccggugcuggcuggugagcaacggcuccuaccucaacgagacccacuucagcgacgacaucgagcagcaggccgacaacaugaucaccgagcugcugcagaaggaguacaucgaccgccagggcaagacgccccucgggcugguggaccuguucgucuucuccaccagcuucuaccugaucuccaucuuccuccaccuggugaagaucccgacccaccggcacaucaccggcaagcccugccccaagccccaccgccugaaccacauggggaucugcagcugcggccucuacaaccacccgggggugcccgucaaguggaagcggugaggacuaguaauaaggaaacuguaugaaugucugugggcaggaagugaagagauccuucuguaaagguuuuuggaauuaugucugcugaauaauaaacuuuuuugaaauaauaaaucugguagaaaaaugagaucucaaaggcucuuuucagagccaccaaaaaaaaaaaaaaaaaaaaaaaaaaaaaaaaaaaaaaaaaaaaaaaaaaaaaaaaaaaaaaaaagaauu

SEQ ID NO: 15988 - RNA, 1778 nt, Artificial Sequence
  mRNA product Design b-4 (hSL-A64-N5) comprising derived and/or modified sequence from LASV(Lassa virus/H.sapiens-wt/NGA/2016/ISTH_0017;Clade II)__AVO03567__GPCmut1 (opt1)
aggagagucccgcagucggcguccagcggcucugcuuguucgugugugugucguugcaggccuuauucaagcuuaccaugggccagaucaucaccuucuuccaggaggugccccacgucaucgaggaggugaugaacaucgugcugaucgcccucagccugcuggccauccucaaggggaucuacaacgucgcgaccugcggccuguucgggcugguguccuuccuccugcugugcggccgcagcugcuccacgaccuacaaggggguguacgagcuccagacccuggagcuggacauggccagccucaacaugaccaugccgcuguccugcacgaagaacaacagccaccacuacaucauggucggcaacgagaccggccuggagcucacccugaccaacacguccaucaucaaccacaaguucugcaaccugagcgacgcccacaagaagaaccucuacgaccacgcccugauguccaucaucagcaccuuccaccuguccauccccaacuucaaccaguacgaggccaugagcugcgacuucaacgggggcaagaucuccgugcaguacaaccucagccacaccuacgcgaucgacgccgccaaccacugcgggaccaucgccaacggcgugcugcagacguucaugcggauggcguggggcggguccuacaucgcccuggacagcggcugcggguccugggacugcaucaugaccagcuaccaguaccucaucauccagaacaccaccugggaggaccacugccaguucucccgccccagccccaucggcuaccuggggcugcucagccagcggacgcgcgacaucuacaucucccggcgccgccggggcaccuucaccuggacccucagcgacuccgagggcaacgagacgcccgggggcuacugccugacccgguggaugcugaucgaggccgagcucaagugcuucgggaacaccgccgucgccaagugcaacgagaagcacgacgaggaguucugcgacaugcugcgccuguucgacuucaacaagcaggcgauccggcgccucaagacccccgcccagaugagcauccagcugaucaacaaggccgugaacgcccugaucaacgaccagcucaucaugaagaaccaccuccgggacaucaugugcauccccuacugcaacuacuccaaguacugguaccugaaccacacggugaccgggaagaccagccugccccgcugcuggcuggucuccaacggcagcuaccugaacgagacccacuucuccgacgacaucgagcagcaggccgacaacaugaucacggagcuccugcagaaggaguacauggaccggcagggcaagaccccgcuggggcucguggaccuguucguguucagcaccuccuucuaccugaucagcaucuuccugcaccucguccgcaucccgacccaccggcacgugaucggcaagcccugccccaagccccaccgccugaaccacauggggaucugcuccugcggccuguacaagcacccgggggugcccgucaaguggaagcggugaggacuaguaauaaggaaacuguaugaaugucugugggcaggaagugaagagauccuucuguaaagguuuuuggaauuaugucugcugaauaauaaacuuuuuugaaauaauaaaucugguagaaaaaugagaucucaaaggcucuuuucagagccaccaaaaaaaaaaaaaaaaaaaaaaaaaaaaaaaaaaaaaaaaaaaaaaaaaaaaaaaaaaaaaaaaagaauu

SEQ ID NO: 15989 - RNA, 1778 nt, Artificial Sequence
  mRNA product Design b-4 (hSL-A64-N5) comprising derived and/or modified sequence from LASV(Lassa virus/H.sapiens-wt/NGA/2018/ISTH_0959;Clade II)__AVV65099__GPCmut1 (opt1)
aggagagucccgcagucggcguccagcggcucugcuuguucgugugugugucguugcaggccuuauucaagcuuaccaugggccagaucaucaccuucuuccaggaggugccccacgucaucgaggaggugaugaacaucgugcugaucgcccucagccugcuggccauccucaaggggaucuacaacgucgugaccugcggccuguucgggcugguguccuuccuccugcugugcggccgcagcugcuccacgaccuacaagggggucuacgagcuccagacccuggagcuggacauggcgagccucaacaugaccaugccgcuguccugcacgaagaacaacagccaccacuacaucauggugggcaacgagaccggccuggagcucacccugaccaacacguccaucaucaaccacaaguucugcaaccugagcgacgcccacaagaagaaccucuacgaccacgcccugauguccaucaucagcaccuuccaccuguccauccccaacuucaaccaguacgaggccaugagcugcgacuucaacgggggcaagaucuccgugcaguacaaccucagccacgccuacgcgaucgacgccgccaaccacugcgggaccaucgccaacggcguccugcagaccuucaugcggauggcguggggcggguccuacaucgcccuggacagcggcugcggguccugggacugcaucaugacgagcuaccaguaccucaucauccagaacaccaccugggaggaccacugccaguucucccgccccagccccaucggcuaccuggggcugcucagccagcggacccgcgacaucuacaucucccggcgccgccggggcacguucaccuggacccucagcgacuccgagggcaacgagacccccgggggcuacugccugacgcgguggaugcugaucgaggccgagcucaagugcuucgggaacaccgccguggccaagugcaacgagaagcacgacgaggaguucugcgacaugcugcgccuguucgacuucaacaagcaggcgauccggcgccucaagacccccgcccagaugagcauccagcugaucaacaaggccgugaacgcccugaucaacgaccagcucaucaugaagaaccaccuccgggacaucaugugcaucccguacugcaacuacuccaaguacugguaccugaaccacaccgucacggggaagaccagccugccccgcugcuggcugguguccaacggcagcuaccugaacgagacccacuucuccgacgacaucgagcagcaggccgacaacaugaucaccgagcuccugcagaaggaguacaucgaccggcagggcaagacgccccuggggcucguggaccuguucgucuucagcaccuccuucuaccugaucagcaucuuccugcaccucgugaagaucccgacccaccgccacgugaucggcaagcccugccccaagccccaccggcugaaccacauggggaucugcuccugcggccuguacaagcacccggggguccccgugaaguggaagcgcugaggacuaguaauaaggaaacuguaugaaugucugugggcaggaagugaagagauccuucuguaaagguuuuuggaauuaugucugcugaauaauaaacuuuuuugaaauaauaaaucugguagaaaaaugagaucucaaaggcucuuuucagagccaccaaaaaaaaaaaaaaaaaaaaaaaaaaaaaaaaaaaaaaaaaaaaaaaaaaaaaaaaaaaaaaaaagaauu

SEQ ID NO: 15990 - RNA, 1778 nt, Artificial Sequence
  mRNA product Design b-4 (hSL-A64-N5) comprising derived and/or modified sequence from LASV(LASV003-NIG-2008;Clade II)__AIT17580__GPCmut1 (opt1)
aggagagucccgcagucggcguccagcggcucugcuuguucgugugugugucguugcaggccuuauucaagcuuaccaugggccagaucaucaccuucuuccaggaggugccccacgucaucgaggaggugaugaacaucgugcugaucgcccucagccugcuggccauccucaaggggaucuacaacgucgcgaccugcggccuguucgggcugguguccuuccuccugcugugcggccgcagcugcuccacgaccuacaaggggguguacgagcuccagacccuggagcuggacauggccagccucaacaugaccaugccgcuguccugcacgaagaacaacagccaccacuacaucauggucggcaacgagaccggccuggagcucacccugaccaacacguccaucaucaaccacaaguucugcaaccugagcgacgcccacaagaagaaccucuacgaccacgcccugauguccaucaucagcaccuuccaccuguccauccccaacuucaaccaguacgaggccaugagcugcgacuucaacgggggcaagaucuccgugcaguacaaccucagccacaccuacgcgguggacgccgccaaccacugcgggaccaucgccaacggcguccugcagacguucaugcggauggcguggggcggguccuacaucgcccuggacagcggcugcggguccugggacugcaucaugaccagcuaccaguaccucaucauccagaacaccaccugggaggaccacugccaguucucccgccccagccccaucggcuaccuggggcugcucagccagcggacgcgcgacaucuacaucucccggcgccgccggggcaccuucaccuggacccucagcgacuccgagagcaacgagacgccgggcggguacugccugacccgguggaugcugaucgaggccgagcucaagugcuucggcaacaccgccguggccaagugcaacgagaagcacgacgaggaguucugcgacaugcugcgccuguucgacuucaacaagcaggcgauccggcgccucaaggcccccgcccagauguccauccagcugaucaacaaggccgugaacgcccugaucaacgaccagcucaucaugaagaaccaccuccgggacaucaugugcauccccuacugcaacuacagcaaguacugguaccugaaccacaccgucacgggccgcaccucccugccccggugcuggcuggugagcaacggguccuaccugaacgagacccacuucagcgacgacaucgagcagcaggcggacaacaugaucaccgagcuccugcagaaggaguacauggaccgccagggcaagacgccccugggccucguggaccuguucgucuucuccaccagcuucuaccugaucuccaucuuccugcaccucgugaagaucccgacccaccggcacgugaucgggaagcccugccccaagccccaccgccugaaccacaugggcaucugcagcugcgggcuguacaagcacccgggcguccccgugaaguggaagcggugaggacuaguaauaaggaaacuguaugaaugucugugggcaggaagugaagagauccuucuguaaagguuuuuggaauuaugucugcugaauaauaaacuuuuuugaaauaauaaaucugguagaaaaaugagaucucaaaggcucuuuucagagccaccaaaaaaaaaaaaaaaaaaaaaaaaaaaaaaaaaaaaaaaaaaaaaaaaaaaaaaaaaaaaaaaaagaauu

SEQ ID NO: 15991 - RNA, 1778 nt, Artificial Sequence
  mRNA product Design b-4 (hSL-A64-N5) comprising derived and/or modified sequence from LASV(LASV035-NIG-2009;Clade II)__AIT17588__GPCmut1 (opt1)
aggagagucccgcagucggcguccagcggcucugcuuguucgugugugugucguugcaggccuuauucaagcuuaccaugggccagaucaucaccuucuuccaggaggugccccacgucaucgaggaggugaugaacaucgugcugaucgcccucagccugcuggccauccucaaggggaucuacaacgucgcgaccugcggccuguucgggcugguguccuuccuccugcugugcggccgcagcugcuccacgaccuacaaggggguguacgagcuccagacccuggagcuggacauggccagccucaacaugaccaugccgcuguccugcacgaagaacaacagccaccacuacaucauggucggcaacgagaccggccuggagcucacccugaccaacacguccaucaucaaccacaaguucugcaaccugagcgacgcccacaagaagaaccucuacgaccacgcccugauguccaucaucagcaccuuccaccuguccauccccaacuucaaccaguacgaggccaugagcugcgacuucaacgggggcaagaucuccgugcaguacaaccucagccacgcguacgccguggacgccgccaaccacugcgggaccaucgcgaacggcguccugcagaccuucaugcggauggccuggggcggguccuacaucgcccuggacagcggcugcggguccugggacugcaucaugacgagcuaccaguaccucaucauccagaacaccaccugggaggaccacugccaguucucccgccccagccccaucggcuaccuggggcugcucagccagcggacccgcgacaucuacaucucccggcgccgccggggcacguucaccuggacccucagcgacuccgagggcaacgagacccccgggggcuacugccugacgcgguggaugcugaucgaggccgagcucaagugcuucgggaacaccgccguggcgaagugcaacgagaagcacgacgaggaguucugcgacaugcugcgccuguucgacuucaacaagcaggccauccggcgccucaaggcccccgcccagaugagcauccagcugaucaacaaggccgugaacgcgcugaucaacgaccagcucaucaugaagaaccaccuccgggacaucaugugcauccccuacugcaacuacuccaaguacugguaccugaaccacaccgucaccgggaagacgagccugccccgcugcuggcugguguccaacggcagcuaccugaacgagacccacuucuccgacgacaucgagcagcaggccgacaacaugaucaccgagcuccugcagaaggaguacaucgaccggcagggcaagaccccgcuggggcucguggaccuguucgucuucagcacguccuucuaccugaucagcaucuuccugcaccucgugaagaucccgacccaccgccacgugaucggcaagcccugccccaagccccaccggcugaaccacauggggaucugcuccugcggccuguacaagcacccggggguccccgugaaguggaagcgcugaggacuaguaauaaggaaacuguaugaaugucugugggcaggaagugaagagauccuucuguaaagguuuuuggaauuaugucugcugaauaauaaacuuuuuugaaauaauaaaucugguagaaaaaugagaucucaaaggcucuuuucagagccaccaaaaaaaaaaaaaaaaaaaaaaaaaaaaaaaaaaaaaaaaaaaaaaaaaaaaaaaaaaaaaaaaagaauu

SEQ ID NO: 15992 - RNA, 1778 nt, Artificial Sequence
  mRNA product Design b-4 (hSL-A64-N5) comprising derived and/or modified sequence from LASV(LASV1000-NIG-2009;Clade II)__AIT17782__GPCmut1 (opt1)
aggagagucccgcagucggcguccagcggcucugcuuguucgugugugugucguugcaggccuuauucaagcuuaccaugggccagaucaucaccuucuuccaggaggugccccacgucaucgaggaggugaugaacaucgugcugaucgcccucagccugcuggccauccucaaggggaucuacaacgucgcgaccugcggccuguucgggcugguguccuuccuccugcugugcggccgcagcugcuccacgaccuacaaggggguguacgagcuccagacccuggagcuggacauggccagccucaacaugaccaugccgcuguccugcacgaagaacaacagccaccacuacaucauggucggcaacgagaccggccuggagcucacccugaccaacacguccaucaucaaccacaaguucugcaaccugagcgacgcccacaagaagaaccucuacgaccacgcccugauguccaucaucagcaccuuccaccuguccauccccaacuucaaccaguacgaggccaugagcugcgacuucaacgggggcaagaucuccgugcaguacaaccucagccacaccuacgcgguggacgccgccaaccacugcgggaccaucgccaacggcguccugcagacguucaugcggauggcguggggcggguccuacaucgcccuggacagcggcugcggguccugggacugcaucaugaccagcuaccaguaccucaucauccagaacaccaccugggaggaccacugccaguucucccgccccagccccaucggcuaccuggggcugcucagccagcggacgcgcgacaucuacaucucccggcgccgccggggcaccuucaccuggacccucagcgacuccgagggcaacgagacgcccgggggcuacugccugacccgguggaugcugaucgaggccgagcucaagugcuucgggaacaccgccguggccaagugcaacgagaagcacgacgaggaguucugcgacaugcugcgccuguucgacuucaacaagcaggcgaucaagcggcucaagacccccgcccagaugagcauccagcugaucaacaaggccgugaacgcccugaucaacgaccagcucaucaugaagaaccaccuccgcgacaucaugugcauccccuacugcaacuacuccaaguacugguaccugaaccacacggucaccgggaagaccagccugccccggugcuggcugguguccaacggcagcuaccugaacgagacccacuucuccgacgacaucgagcagcaggccgacaacaugaucacggagcuccugcagaaggaguacaucgaccgccagggcaagaccccgcuggggcucguggaccuguucgucuucagcaccuccuucuaccugaucagcaucuuccugcaccucgugaagaucccgacccaccggcacguggucggcaagcccugccccaagccccaccgccugaaccacauggggaucugcuccugcggccuguacaagcacccgggggugcccgugaaguggaagcggugaggacuaguaauaaggaaacuguaugaaugucugugggcaggaagugaagagauccuucuguaaagguuuuuggaauuaugucugcugaauaauaaacuuuuuugaaauaauaaaucugguagaaaaaugagaucucaaaggcucuuuucagagccaccaaaaaaaaaaaaaaaaaaaaaaaaaaaaaaaaaaaaaaaaaaaaaaaaaaaaaaaaaaaaaaaaagaauu

SEQ ID NO: 15993 - RNA, 1778 nt, Artificial Sequence
  mRNA product Design b-4 (hSL-A64-N5) comprising derived and/or modified sequence from LASV(LASV221-NIG-2010;Clade II)__AIT17624__GPCmut1 (opt1)
aggagagucccgcagucggcguccagcggcucugcuuguucgugugugugucguugcaggccuuauucaagcuuaccaugggccagaucaucaccuucuuccaggaggugccccacgucaucgaggaggugaugaacaucgugcugaucgcccucagccugcuggccauccucaaggggaucuacaacgucgcgaccugcggccuguucgggcugguguccuuccuccugcugugcggccgcagcugcuccacgaccuacaaggggguguacgagcuccagacccuggagcuggacauggccagccucaacaugaccaugccgcuguccugcacgaagaacaacagccaccacuacaucauggucggcaacgagaccggccuggagcucacccugaccaacacguccaucaucaaccacaaguucugcaaccugagcgacgcccacaagaagaaccucuacgaccacgcccugauguccaucaucagcaccuuccaccuguccauccccaacuucaaccaguacgaggccaugagcugcgacuucaacgggggcaagaucuccgugcaguacaaccucagccacaccuacgcgaucgacgccgccaaccacugcgggaccaucgccaacggcgugcugcagacguucaugcggauggcguggggcggguccuacaucgcccuggacagcggcugcggguccugggacugcaucaugaccagcuaccaguaccucaucauccagaacaccaccugggaggaccacugccaguucucccgccccagccccaucggcuaccuggggcugcucagccagcggacgcgcgacaucuacaucucccggcgccgccggggcaccuucaccuggacccucagcgacuccgagggcaacgagacgcccgggggcuacugccugacccgguggaugcugaucgaggccgagcucaagugcuucgggaacaccgccgucgccaagugcaacgagaagcacgacgaggaguucugcgacaugcugcgccuguucgacuucaacaagcaggcgauccggcgccucaagacccccgcccagaugagcauccagcugaucaacaaggccgugaacgcccugaucaacgaccagcucaucaugaagaaccaccuccgggacaucaugugcauccccuacugcaacuacuccaaguacugguaccugaaccacacggugaccgggaagaccagccugccccgcugcuggcuggucuccaacggcagcuaccugaacgagacccacuucuccgacgacaucgagcagcaggccgacaacaugaucacggagaugcuccagaaggaguacauggaccggcagggcaagaccccgcuggggcugguggaccucuucguguucagcaccuccuucuaccugaucagcaucuuccugcaccuggucaagaucccgacccaccgccacgugaucggcaagcccugccccaagccccaccggcucaaccacauggggaucugcuccugcggccuguacaagcacccgggggugcccgucaaguggaagcgcugaggacuaguaauaaggaaacuguaugaaugucugugggcaggaagugaagagauccuucuguaaagguuuuuggaauuaugucugcugaauaauaaacuuuuuugaaauaauaaaucugguagaaaaaugagaucucaaaggcucuuuucagagccaccaaaaaaaaaaaaaaaaaaaaaaaaaaaaaaaaaaaaaaaaaaaaaaaaaaaaaaaaaaaaaaaaagaauu

SEQ ID NO: 15994 - RNA, 1778 nt, Artificial Sequence
  mRNA product Design b-4 (hSL-A64-N5) comprising derived and/or modified sequence from LASV(LASV237-NIG-2010;Clade II)__AIT17638__GPCmut1 (opt1)
aggagagucccgcagucggcguccagcggcucugcuuguucgugugugugucguugcaggccuuauucaagcuuaccaugggccagaucaucaccuucuuccaggaggugccccacgucaucgaggaggugaugaacaucgugcugaucgcccucagccugcuggccauccucaaggggaucuacaacgucgcgaccugcggccuguucgggcugguguccuuccuccugcugugcggccgcagcugcuccacgaccuacaaggggguguacgagcuccagacccuggagcuggacauggccagccucaacaugaccaugccgcuguccugcacgaagaacaacagccaccacuacaucauggucggcaacgagaccggccuggagcucacccugaccaacacguccaucaucaaccacaaguucugcaaccugagcgacgcccacaagaaggaccucuacgaccacgcccugauguccaucaucagcaccuuccaccuguccauccccaacuucaaccaguacgaggccaugagcugcgacuucaacgggggcaagaucuccgugcaguacaaccucagccacaccuacgcgguggacgccgccaaccacugcgggaccaucgccaacggcguccugcagacguucaugcggauggcguggggcggguccuacaucgcccuggacagcggcugcggguccugggacugcaucaugaccagcuaccaguaccucaucauccagaacaccaccugggaggaccacugccaguucucccgccccagccccaucggcuaccuggggcugcucagccagcggacgcgcgacaucuacaucucccggcgccgccggggcaccuucaccuggacccucagcgacuccgagggcaacgagacgcccgggggcuacugccugacccgguggaugcugaucgaggccgagcucaagugcuucgggaacaccgccguggccaagugcaacgagaagcacgacgaggaguucugcgacaugcugcgccuguucgacuucaacaagcaggcgauccggcgccucaagacccccgcccagaugagcauccagcugaucaacaaggccgugaacgcccugaucaacgaccagcucaucaugaagaaccaccuccgggacaucaugugcauccccuacugcaacuacuccaaguacugguaccugaaccacacggucaccgggaagaccagccugccccgcugcuggcugguguccaacggcagcuaccugaacgagacccacuucuccgacgacaucgagcagcaggccgacaacaugaucacggagcuccugcagaaggaguacauggaccggcagggcaagaccccgcuggggcucguggaccuguucgucuucagcaccuccuucuaccugaucagcaucuuccugcaccucaucaagaucccgacccaccgccacaucacgggcaagcccugccccaagccccaccggcugaaccacauggggaucugcuccugcggccuguacaagcacccgggggugcccgugaaguggaagcgcugaggacuaguaauaaggaaacuguaugaaugucugugggcaggaagugaagagauccuucuguaaagguuuuuggaauuaugucugcugaauaauaaacuuuuuugaaauaauaaaucugguagaaaaaugagaucucaaaggcucuuuucagagccaccaaaaaaaaaaaaaaaaaaaaaaaaaaaaaaaaaaaaaaaaaaaaaaaaaaaaaaaaaaaaaaaaagaauu

SEQ ID NO: 15995 - RNA, 1778 nt, Artificial Sequence
  mRNA product Design b-4 (hSL-A64-N5) comprising derived and/or modified sequence from LASV(LASV253-NIG-2011;Clade II)__AIT17670__GPCmut1 (opt1)
aggagagucccgcagucggcguccagcggcucugcuuguucgugugugugucguugcaggccuuauucaagcuuaccaugggccagaucaucaccuucuuccaggaggugccccacgucaucgaggaggugaugaacaucgugcugaucgcccucagccugcuggccauccucaaggggaucuacaacgucgcgaccugcggccuguucgggcugguguccuuccuccugcugugcggccgcagcugcuccacgaccuacaaggggguguacgagcuccagacccuggagcuggacauggccagccucaacaugaccaugccgcuguccugcacgaagaacaacagccaccacuacaucauggucggcaacgagaccggccuggagcucacccugaccaacacguccaucaucaaccacaaguucugcaaccugagcgacgcccacaagaagaaccucuacgaccacgcccugauguccaucaucagcaccuuccaccuguccauccccaacuucaaccaguacgaggccaugagcugcgacuucaacgggggcaagaucuccgugcaguacaaccucagccacaccuacgcgguggacgccgccaaccacugcgggaccaucgccaacggcguccugcagacguucaugcggauggcguggggcggguccuacaucgcccuggacagcggcugcggguccugggacugcaucaugaccagcuaccaguaccucaucauccagaacaccaccugggaggaccacugccaguucucccgccccagccccaucggcuaccuggggcugcucagccagcggacgcgcgacaucuacaucucccggcgccgccggggcaccuucaccuggacccucagcgacuccgagggcaacgagacgcccgggggcuacugccugacccgguggaugcugaucgaggccgagcucaagugcuucgggaacaccgccguggccaagugcaacgagaagcacgacgaggaguucugcgacaugcugcgccuguucgacuucaacaagcaggcgauccggcgccucaaggcccccgcccagaugagcauccagcugaucaacaaggccgugaacgcccugaucaacgaccagcucaucaugaagaaccaccuccgggacaucaugugcaucccguacugcaacuacuccaaguacugguaccugaaccacaccgucacggggcgcaccagccugccccggugcuggcugguguccaacggcagcuaccugaacgagacccacuucuccgacgacaucgagcagcaggcggacaacaugaucaccgagcuccugcagaaggaguacaucgaccgccagggcaagacgccccuggggcucguggaccuguucgucuucagcaccuccuucuaccugaucagcaucuuccugcaccucgugaagaucccgacccaccggcacaucaucggcaagcccugccccaagccccaccgccugaaccacauggggaucugcuccugcggccuguacaagcacccgggggugcccgucaaguggaagcggugaggacuaguaauaaggaaacuguaugaaugucugugggcaggaagugaagagauccuucuguaaagguuuuuggaauuaugucugcugaauaauaaacuuuuuugaaauaauaaaucugguagaaaaaugagaucucaaaggcucuuuucagagccaccaaaaaaaaaaaaaaaaaaaaaaaaaaaaaaaaaaaaaaaaaaaaaaaaaaaaaaaaaaaaaaaaagaauu

SEQ ID NO: 15996 - RNA, 1778 nt, Artificial Sequence
  mRNA product Design b-4 (hSL-A64-N5) comprising derived and/or modified sequence from LASV(LASV254-NIG-2011;Clade II)__AIT17674__GPCmut1 (opt1)
aggagagucccgcagucggcguccagcggcucugcuuguucgugugugugucguugcaggccuuauucaagcuuaccaugggccagaucaucaccuucuuccaggaggugccccacgucaucgaggaggugaugaacaucgugcugaucgcccucagccugcuggccauccucaaggggaucuacaacgucgcgaccugcggccuguucgggcugguguccuuccuccugcugugcggccgcagcugcuccacgaccuacaaggggguguacgagcuccagacccuggagcuggacaugaccaaccucaacaugacgaugccgcugagcugcaccaagaacaacucccaccacuacaucauggucggcaacgagaccggccuggagcucacccugacgaacaccagcaucaucaaccacaaguucugcaaccuguccgacgcccacaagaagaaccucuacaaccacgcccugaugagcaucaucuccaccuuccaccugagcauccccaacuucaaccaguacgaggccauguccugcgacuucaacgggggcaagaucagcgugcaguacaaccucucccacagcuacgccguggacgcggccaaccacugcgggaccaucgccaacggcguccugcagacguucaugcggauggccuggggcggguccuacaucgcgcuggacagcggcugcgggaacugggacugcaucaugaccuccuaccaguaccucaucauccagaacaccaccugggaggaccacugccaguucagccgccccucccccaucggcuaccuggggcugcucagccagcggacgcgcgacaucuacaucagccggcgccgccggggcaccuucaccuggacccucuccgacagcgagggcaacgagacgcccgggggcuacugccugacccgguggaugcugaucgaggccgagcucaagugcuucgggaacaccgccguggccaagugcaacgagaagcacgacgaggaguucugcgacaugcugcgccuguucgacuucaacaagcaggccauccggcgccucaagacccccgcgcaggccaacauccagcugaucaacaaggccgugaacgcccugaucaacgaccagcucaucaugaagaaccaccuccgggacaucaugugcauccccuacugcaacuacuccaaguacugguaccugaaccacacggucaccgggaagaccagccugccccgcugcuggcugguguccaacggcagcuaccugaacgagacccacuucuccgacgacaucgagcagcaggccgacaacaugaucacggagcuccugcagaaggaguacauggaccggcagggcaagaccccgcuggggcucguggaccuguucgucuucagcaccuccuucuaccugaucagcaucuuccugcaccucgugaagaucccgacccaccgccacgugaucggcaagcccugccccaagccccaccggcugaaccacauggggaucugcuccugcggccuguacaagcacccggggguccccgugaaguggaagcgcugaggacuaguaauaaggaaacuguaugaaugucugugggcaggaagugaagagauccuucuguaaagguuuuuggaauuaugucugcugaauaauaaacuuuuuugaaauaauaaaucugguagaaaaaugagaucucaaaggcucuuuucagagccaccaaaaaaaaaaaaaaaaaaaaaaaaaaaaaaaaaaaaaaaaaaaaaaaaaaaaaaaaaaaaaaaaagaauu

SEQ ID NO: 15997 - RNA, 1778 nt, Artificial Sequence
  mRNA product Design b-4 (hSL-A64-N5) comprising derived and/or modified sequence from LASV(Nig08-A19;Clade III)__ADU56618__GPCmut1 (opt1)
aggagagucccgcagucggcguccagcggcucugcuuguucgugugugugucguugcaggccuuauucaagcuuaccaugggccagaucgugaccuucuuccaggaggucccccacgugaucgaggaggugaugaacaucguccugaucgcccucagcauccuggccauccugaaggggcucuacaacaucgcgaccugcggccugaucgggcuggugacguuccuccugcuguccggccgcagcugcuccaugaccuacaaggggguguacgagcuccagacccuggagcugaacaugaacacccucaacaugacgaugccgcugagcugcaccaagaacaacucccaccacuacaucauggucggcaacgagaccggccuggagcucacccugacgaacaccagccugcuccaccacaaguucugcaaccuguccgacgcccacaagaagaaccuguacgaccacacccucaugagcaucaucuccaccuuccaccugagcauccccaacuucaaccaguacgaggccauguccugcgacuucaacgggggcaagaucacggugcaguacaaccugagccacuccuacgccaucgacgccgcgaaccacugcgggaccguggccaacggcguccuccagaccuucaugcggauggccuggggcgggagcuacaucgcccuggacuccggcugcgggaagugggacugcaucaugaccagcuaccaguaccugaucauccagaacacgaccugggaggaccacugccaguucucccggcccagccccaucggcuaccucgggcugcugucccagcgcacccgggacaucuacaucagccgccggcgccggggcaccuucacguggacccugagcgacuccgagggcaacgagacccccgggggcuacugccucacccgcuggaugcugaucgaggcggagcugaagugcuucgggaacacggccguggccaagugcaacgagaagcacgacgaggaguucugcgacaugcuccggcuguucgacuucaacaagcaggccauccgccggcugaaggcccccgcgcagaugagcauccagcucaucaacaaggccgugaacgcccugaucaacgaccagcugaucaugaagaaccaccuccgcgacaucaugugcauccccuacugcaacuacuccaaguacugguaccugaaccacaccagcaccgggcggaccucccugccccgcugcuggcucgucagcaacggcuccuaccugaacgagacgcacuucagcgacgacaucgagcagcaggccgacaacaugaucaccgagaugcugcagaaggaguaccucgaccggcagggcaagaccccgcuggggcugguggaccuguucguguucuccaccagcuucuaccucaucuccaucuuccugcaccuggucaagaucccgacgcaccgccacaucgugggcaagcccugccccaagccccaccggcucaaccacauggggaucugcagcugcggccuguacaagcagccgggggugcccguccgcuggaagcggugaggacuaguaauaaggaaacuguaugaaugucugugggcaggaagugaagagauccuucuguaaagguuuuuggaauuaugucugcugaauaauaaacuuuuuugaaauaauaaaucugguagaaaaaugagaucucaaaggcucuuuucagagccaccaaaaaaaaaaaaaaaaaaaaaaaaaaaaaaaaaaaaaaaaaaaaaaaaaaaaaaaaaaaaaaaaagaauu

SEQ ID NO: 15998 - RNA, 1781 nt, Artificial Sequence
  mRNA product Design b-4 (hSL-A64-N5) comprising derived and/or modified sequence from LASV(G1180-SLE-2010;Clade IV)__AIT17168__GPCmut1 (opt1)
aggagagucccgcagucggcguccagcggcucugcuuguucgugugugugucguugcaggccuuauucaagcuuaccaugggccagaucgugaccuucuuccaggaggucccccacgugaucgaggaggugaugaacaucguccugaucgcccucagcauccuggccgugcugaaggggcucuacaacuucgcgaccugcggccugguggggcugcucaccuuccugcugcucugcggccgcuccugcaccgccagccgguacaagggggucuacgagcugcagacccuggagcucaacauggagacccugaacaugacgaugccgcuguccugcaccaagaacaacagccaccacuacaucauggugggcaacgagaccggccucgagcugacccugacgaacaccuccaucaucaaccacaaguucugcaaccucagcgacgcccacaagaagaaccuguacgaccacgcccugauguccaucaucagcaccuuccaccucuccauccccaacuucaaccaguacgaggccaugagcugcgacuucaacgggggcaagaucuccgugcaguacaaccugagccacuccuacgcgggggacgccgccaaccacugcggcaccgucgccaacggggugcugcagacguucaugcgcauggcguggggcggcagcuacaucgcccucgacuccgggugcggcagcugggacugcaucaugaccuccuaccaguaccugaucauccagaacaccaccugggaggaccacugccaguucagccggcccucccccaucggguaccugggccuccugagccagcgcacgcgggacaucuacaucagccgccggcgccggggcaccuucaccuggacccuguccgacagcgaggggaaggacacgccgggcggguacugccugacccgcuggaugcucaucgaggccgagcugaagugcuucggcaacaccgccguggccaagugcaacgagaagcacgacgaggaguucugcgacaugcugcggcuguucgacuucaacaagcaggcgauccagcgccugaaggcccccgcccagauguccauccagcugaucaacaaggccgucaacgcccucaucaacgaccagcugaucaugaagaaccaccuccgggacaucaugugcauccccuacugcaacuacagcaaguacugguaccucaaccacaccacgaccggcaagaccucccugcccaagugcuggcuggugagcaacggcuccuaccucaacgagacccacuucagcgacgacaucgagcagcaggcggacaacaugaucacggagaugcugcagaaggaguacauggagcgccaggggaagacgccccugggccucguggaccuguucgucuucuccaccagcuucuaccugaucuccaucuuccugcaccucgugaagaucccgacccaccggcacaucgugggcaagagcugccccaagccccaccgccugaaccacauggggaucugcuccugcgggcuguacaagcagcccggcgucccggugaaguggaagcggugaggacuaguaauaaggaaacuguaugaaugucugugggcaggaagugaagagauccuucuguaaagguuuuuggaauuaugucugcugaauaauaaacuuuuuugaaauaauaaaucugguagaaaaaugagaucucaaaggcucuuuucagagccaccaaaaaaaaaaaaaaaaaaaaaaaaaaaaaaaaaaaaaaaaaaaaaaaaaaaaaaaaaaaaaaaaagaauu

SEQ ID NO: 15999 - RNA, 1781 nt, Artificial Sequence
  mRNA product Design b-4 (hSL-A64-N5) comprising derived and/or modified sequence from LASV(G1442-SLE-2011;Clade IV)__AIT17180__GPCmut1 (opt1)
aggagagucccgcagucggcguccagcggcucugcuuguucgugugugugucguugcaggccuuauucaagcuuaccaugggccagaucgugaccuucuuccaggaggucccccacgugaucgaggaggugaugaacaucguccugaucgcccucagcauccuggccgugcugaaggggcucuacaacguggcgaccugcggccugaucgggcuggucacguuccuccugcugugcggccgcuccugcaccaccacccucuacaaggggguguacgagcugcagacgcuggagcucaacauggagacccugaacaugaccaugccgcugagcugcaccaagaacaacucccaccacuacauccgggugggcaacgagacgggccucgagcugacccugaccaacaccagcaucaucaaccacaaguucugcaaccucuccgacgcccacaagaagaaccuguacgaccacgcccugaugagcaucaucuccacguuccaccucagcauccccaacuucaaccaguacgaggccauguccugcgacuucaacgggggcaagaucagcguccaguacaaccugucccacagcuacgccggggacgcggccaaccacugcggcaccguggccaacggggugcugcagaccuucaugcgcauggccuggggcggcuccuacaucgcgcucgacagcgggugcggcaacugggacugcaucaugaccuccuaccaguaccugaucauccagaacacgaccugggacgaccacugccaguucagccgccccucccccaucggguaccugggccuccugagccagcggacccgcgacgucuacaucucccggcgccgccggggcaccuucacguggacccugagcgacagcgaggggaaggacaccccgggcggguacugccugacccgguggaugcucaucgaggccgagcugaagugcuucggcaacacggccguggccaagugcaacgagaagcacgacgaggaguucugcgacaugcugcgccucuucgacuucaacaagcaggccauccagcggcugaaggcgcccgcccagauguccauccagcugaucaacaaggccgugaacgcccucaucaacgaccagcugaucaugaagaaccaccuccgcgacaucaugugcauccccuacugcaacuacagcaaguacugguaccugaacaacaccgccaccggcaagaccucccugcccaagugcuggcugaucagcaacggcuccuaccucaacgagacgcacuucagcgacgacaucgagcaggaggcggacaacaugaucaccgagaugcugcagaaggaguacauggagcggcaggggaagacgccccugggccucgucgaccuguucguguucuccaccagcuucuaccugaucuccaucuuccugcaccucgugaagaucccgacccaccgccacaucgucggcaagagcugccccaagccccaccggcugaaccacauggggaucugcuccugcgggcuguacaagcagcccggcgugccggugcgcuggaagcggugaggacuaguaauaaggaaacuguaugaaugucugugggcaggaagugaagagauccuucuguaaagguuuuuggaauuaugucugcugaauaauaaacuuuuuugaaauaauaaaucugguagaaaaaugagaucucaaaggcucuuuucagagccaccaaaaaaaaaaaaaaaaaaaaaaaaaaaaaaaaaaaaaaaaaaaaaaaaaaaaaaaaaaaaaaaaagaauu

SEQ ID NO: 16000 - RNA, 1781 nt, Artificial Sequence
  mRNA product Design b-4 (hSL-A64-N5) comprising derived and/or modified sequence from LASV(G3010-SLE-2013;Clade IV)__AIT17344__GPCmut1 (opt1)
aggagagucccgcagucggcguccagcggcucugcuuguucgugugugugucguugcaggccuuauucaagcuuaccaugggccagaucgugaccuucuuccaggaggucccccacgugaucgaggaggugaugaacaucguccugaucgcccucagcauccuggccgugcugaaggggcucuacaacuucgcgaccugcggccugguggggcuggucacguuccuccugcugugcggccgcuccugcaccaccagccucuacaaggggguguacgagcugcagacccuggagcucaacauggagacgcugaacaugaccaugccgcuguccugcaccaagaacaacagccaccacuacaucauggugggcaacgagaccggccucgagcugacgcugaccaacaccuccaucaucaaccacaaguucugcaaccucagcgacgcccacaagaagaaccuguacaaccacgcccugauguccaucaucagcaccuuccaccucuccauccccaacuucaaccaguacgaggccaugagcugcgacuucaacgggggcaagaucuccguccaguacaaccugagccacuccuacgccggggacgcggccagccacugcggcacgguggccaacggggugcugcagaccuucaugcggauggccuggggcggcuccuacaucgcgcucgacagcgggugcggcaagugggacugcaucaugaccuccuaccaguaccugaucauccagaacaccacgugggaggaccacugccaguucagccgccccucccccaucggguaccugggccuccugagccagcggacccgcgacaucuacaucagccggcgccgccggggcaccuucaccuggacgcuguccgacagcgaggggaaggacaccccgggcggguacugccugacccgguggaugcucaucgaggccgagcugaagugcuucggcaacaccgccgucgccaagugcaacgagaagcacgacgaggaguucugcgacaugcugcgccucuucgacuucaacaagcaggccauccagcggcugaagacgcccgcgcagauguccauccagcugaucaacaaggccgugaacgcccucaucaacgaccagcugaucaugaagaaccaccuccgcgacaucaugugcauccccuacugcaacuacagcaaguacugguaccugaaccacaccaccaccggcaagacgucccugcccaagugcuggcuggugagcaacggcuccuaccucaacgagacccacuucagcgacgacaucgagcagcaggccgacaacaugaucaccgagaugcugcagaaggaguacauggagcggcaggggaagacgccccugggccucgucgaccuguucguguucuccaccagcuucuaccugaucuccaucuuccugcaccucgugaagaucccgacccaccgccacaucgucggcaagagcugccccaagccccaccggcugaaccacauggggaucugcuccugcgggcuguacaagcagcccggcgugccggugcgcuggaagcggugaggacuaguaauaaggaaacuguaugaaugucugugggcaggaagugaagagauccuucuguaaagguuuuuggaauuaugucugcugaauaauaaacuuuuuugaaauaauaaaucugguagaaaaaugagaucucaaaggcucuuuucagagccaccaaaaaaaaaaaaaaaaaaaaaaaaaaaaaaaaaaaaaaaaaaaaaaaaaaaaaaaaaaaaaaaaagaauu

SEQ ID NO: 16001 - RNA, 1781 nt, Artificial Sequence
  mRNA product Design b-4 (hSL-A64-N5) comprising derived and/or modified sequence from LASV(G502-SLE-2009;Clade IV)__AIT17126__GPCmut1 (opt1)
aggagagucccgcagucggcguccagcggcucugcuuguucgugugugugucguugcaggccuuauucaagcuuaccaugggccagaucgugaccuucuuccaggaggucccccacgugaucgaggaggugaugaacaucguccugaucgcccucagcauccuggccgugcugaaggggcucuacaacuucgcgaccugcggccugguggggcugcucacguuccugcugcucugcggccgcuccugcaccaccgggcuguacaagggcgucuacgagcugcagacccucgagcugaacauggagacgcugaacaugaccaugccgcucagcugcaccaagaacaacucccaccacuacaucauggugggcaacgagaccgggcuggagcugacgcucaccaacaccagcaucaucaaccacaaguucugcaaccuguccgacgcccacaagaagaaccuguacgaccacgcccucaugagcaucaucuccaccuuccaccugagcauccccaacuucaaccaguacgaggccauguccugcgacuucaacggcgggaagaucagcgugcaguacaaccugucccacagcuacgccggcgacgcggccgaccacugcgggacggucgccaacggcgugcuccagaccuucaugcggauggccuggggcggguccuacaucgcgcuggacagcggcugcgggcggugggacugcaucaugaccuccuaccaguaccugaucauccagaacaccacgugggaggaccacugccaguucagccgccccucccccaucggcuaccucggccugcugagccagcggacccgcgacaucuacaucucccggcgccgccgggggaccuucaccuggacgcugagcgacagcgagggcaaggacacccccgggggcuacugccucacccgguggaugcugaucgaggccgagcugaagugcuucgggaacaccgccguggccaagugcaacgagaagcacgacgaggaguucugcgacaugcuccgccuguucgacuucaacaagcaggccauccagcggcugaaggcgcccgcccagauguccauccagcucaucaacaaggccgucaacgcccugaucaacgaccagcuggugaugaagaaccaccuccgcgacaucaugugcauccccuacugcaacuacagccgguacugguaccugaaccacacgaccaccggccgcaccucccugcccaagugcuggcucgugagcaacggguccuaccugaacgagacgcacuucagcgacgacaucgagcagcaggccgacaacaugaucaccgagaugcugcagaaggaguacauggagcggcagggcaagaccccgcucgggcuggucgaccuguucguguucuccaccagcuucuaccugaucuccaucuuccuccaccuggugaagaucccgacgcaccgccacaucgucggcaagagcugccccaagccccaccggcugaaccacauggggaucugcuccugcggccucuacaagcagcccggcgugccggugaaguggaagcgcugaggacuaguaauaaggaaacuguaugaaugucugugggcaggaagugaagagauccuucuguaaagguuuuuggaauuaugucugcugaauaauaaacuuuuuugaaauaauaaaucugguagaaaaaugagaucucaaaggcucuuuucagagccaccaaaaaaaaaaaaaaaaaaaaaaaaaaaaaaaaaaaaaaaaaaaaaaaaaaaaaaaaaaaaaaaaagaauu

SEQ ID NO: 16002 - RNA, 1781 nt, Artificial Sequence
  mRNA product Design b-4 (hSL-A64-N5) comprising derived and/or modified sequence from LASV(G733-SLE-2010;Clade IV)__AIT17154__GPCmut1 (opt1)
aggagagucccgcagucggcguccagcggcucugcuuguucgugugugugucguugcaggccuuauucaagcuuaccaugggccagaucgugaccuucuuccaggaggucccccacgugaucgaggaggugaugaacaucguccugaucgcccucagcauccuggccgugcugaaggggcucuacaacuucgcgaccugcggcaucguggggcuggucuccuuccugcuccugugcggccgcagcugcacgaccucccuguacaaggggguguacgagcuccagacccuggagcugaacauggagacccucaacaugacgaugccgcugagcugcaccaagaacaacucccaccacuacaucauggugggcaacgagaccggccuggagcucacccugacgaacaccagcaucaucaaccacaaguucugcaaccuguccgacgcccacaagaagaaccucuacgaccacgcccugaugagcaucaucuccaccuuccaccugagcauccccaacuucaaccaguacgaggccauguccugcgacuucaacgggggcaagaucagcguccaguacaaccucucccacagcuacgccggggacgcggccaaccacugcggcaccaucgccaacggggugcugcagacguucaugcggauggccuggggcggcuccuacaucgcgcuggacagcgggugcgaccggugggacugcaucaugaccuccuaccaguaccucaucauccagaacaccaccugggaggaccacugccaguucagccgccccucccccaucggcuaccuggggcugcucagccagcggacgcgcgacaucuacaucagccggcgccgccggggcaccuucaccuggacccucuccgacagcgagggcaaggacacgcccgggggcuacugccugacccgguggaugcugaucgaggccgagcucaagugcuucgggaacaccgccguggccaagugcaacgagaagcacgacgaggaguucugcgacaugcugcgccuguucgacuucaacaagcaggccauccagcggcucaaggcgcccgcccagauguccauccagcugaucaacaaggccgucaacgcccugaucaacgaccagcucaucaugaagaaccaccuccgcgacaucaugugcauccccuacugcaacuacagcaaguacugguaccugaaccacaccacgaccgggaagaccucccugcccaagugcuggcuggugagcaacggcuccuaccugaacgagacccacuucagcgacgacaucgagcagcaggccgacaacaugaucacggagaugcuccagaaggaguacauggagcggcagggcaagaccccgcuggggcugguggaccucuucgucuucuccaccagcuucuaccugaucuccaucuuccugcaccuggugaagaucccgacccaccgccacguggucggcaagagcugccccaagccccaccggcucaaccacauggggaucugcuccugcggccuguacgggcagcccggcgugccggugaaguggaagcgcugaggacuaguaauaaggaaacuguaugaaugucugugggcaggaagugaagagauccuucuguaaagguuuuuggaauuaugucugcugaauaauaaacuuuuuugaaauaauaaaucugguagaaaaaugagaucucaaaggcucuuuucagagccaccaaaaaaaaaaaaaaaaaaaaaaaaaaaaaaaaaaaaaaaaaaaaaaaaaaaaaaaaaaaaaaaaagaauu

SEQ ID NO: 16003 - RNA, 1781 nt, Artificial Sequence
  mRNA product Design b-4 (hSL-A64-N5) comprising derived and/or modified sequence from MOPV/LASV reassortant(IGS-1;Clade IV)__AFY05576__GPCmut1 (opt1)
aggagagucccgcagucggcguccagcggcucugcuuguucgugugugugucguugcaggccuuauucaagcuuaccaugggccagaucgugaccuucuuccaggaggucccccacgugaucgaggaggugaugaacaucguccugaucgcccucagcgugcuggccgugcugaaggggcucuacaacuucgcgaccugcggccuggucgggcuggugacguuccuccugcugugcggccgcuccugcaccaccagccucuacaaggggguguacgagcugcagacccuggagcucaacauggagacgcugaacaugaccaugccgcuguccugcaccaagaacaacagccaccacuacaucauggucggcaacgagaccggccucgagcugacgcugaccaacaccuccaucaucaaccacaaguucugcaaccucagcgacgcccacaagaagaaccuguacgaccacgcccugauguccaucaucagcaccuuccaccucuccauccccaacuucaaccaguacgaggccaugagcugcgacuucaacgggggcaagaucuccgugcaguacaaccugagccacuccuacgccggggacgcggccaaccacugcggcacgguggccaacgggguccugcagaccuucaugcggauggccuggggcggcagcuacaucgcgcucgacuccgggugcggcaacugggacugcaucaugaccagcuaccaguaccugaucauccagaacaccacgugggaggaccacugccaguucucccggcccagccccaucggguaccugggccuccugucccagcgcacccgggacaucuacaucagccgccggcgccggggcaccuucaccuggacgcugagcgacuccgagggggaggacaccccgggcggguacugccugacccgcuggaugcucaucgaggccgagcugaagugcuucggcaacaccgccguggccaagugcaacgagaagcacgacgaggaguucugcgacaugcugcggcuguucgacuucaacaagcaggccauccagcgccugaaggcgcccgcccagaugagcauccagcugaucaacaaggccgugaacgcccucaucaacgaccagcugaucaugaagaaccaccuccgggacaucaugugcauccccuacugcaacuacuccaaguacugguaccucaaccacacgaccaccggccgcaccagccugcccaagugcuggcuggucuccaacggcagcuaccucaacgagacgcacuucuccgacgacaucgagcagcaggccgacaacaugaucaccgagaugcugcagaaggaguacauggagcggcaggggaagacgccccugggccucguggaccuguucguguucagcaccuccuucuaccugaucagcaucuuccugcaccucgucaagaucccgacccaccgccacaucguggggaaguccugccccaagccccaccggcugaaccacaugggcaucugcagcugcgggcuguacaagcagcccggcgugccggucaaguggaagcgcugaggacuaguaauaaggaaacuguaugaaugucugugggcaggaagugaagagauccuucuguaaagguuuuuggaauuaugucugcugaauaauaaacuuuuuugaaauaauaaaucugguagaaaaaugagaucucaaaggcucuuuucagagccaccaaaaaaaaaaaaaaaaaaaaaaaaaaaaaaaaaaaaaaaaaaaaaaaaaaaaaaaaaaaaaaaaagaauu

SEQ ID NO: 16004 - RNA, 1781 nt, Artificial Sequence
  mRNA product Design b-4 (hSL-A64-N5) comprising derived and/or modified sequence from LASV(LM765-SLE-2012;Clade IV)__AIT17814__GPCmut1 (opt1)
aggagagucccgcagucggcguccagcggcucugcuuguucgugugugugucguugcaggccuuauucaagcuuaccaugggccagaucgugaccuucuuccaggaggucccccacgugaucgaggaggugaugaacaucguccugaucgcccucagcauccuggccgugcugaaggggcucuacaacuucgcgaccugcggccugguggggcuggucacguuccuccugcugugcggccgcuccugcaccaccagccucuacaaggggguguacgagcugcagacccuggagcucaacauggagacgcugaacaugaccaugccgcuguccugcaccaagaacaacagccaccacuacaucauggugggcaacgagaccggccucgagcugacgcugaccaacaccuccaucaucgaccacaaguucugcaaccucagcgacgcccaccggaagaaccuguacgaccacgcccugauguccaucaucagcaccuuccaccucuccauccccaacuucaaccaguacgaggccaugagcugcgacuucaacgggggcaagaucuccguccaguacaaccugagccacuccuacgccaaggacgcggccgaccacugcgggacgguggccaacggcgugcugcagaccuucaugcgcauggccuggggcgggagcuacaucgcgcucgacuccggcugcgggcgcugggacugcaucaugaccagcuaccaguaccugaucauccagaacaccacgugggaggaccacugccaguucucccggcccagccccaucggcuaccuggggcuccugucccagcgcacccgggacaucuacaucagccgccggcgccggggcaccuucaccuggacgcugagcgacuccgagggcaaggacacccccgggggcuacugccugacccgcuggaugcucaucgaggccgagcugaagugcuucgggaacaccgccgucgccaagugcaacgagaagcacgacgaggaguucugcgacaugcugcggcuguucgacuucaacaagcaggccauccagcgccugaaggcgcccgcccagaugagcauccagcugaucaacaaggccgugaacgcccucaucaacgaccagcugaucaugaagaaccaccuccgggacaucaugugcauccccuacugcaacuacuccaaguacugguaccucaaccacacgaccaccgggaagaccagccugcccaagugcuggcugguguccaacggcagcuaccucaacgagacgcacuucuccgacgacaucgagcagcaggccgacaacaugaucaccgagaugcugcagaaggaguacauggagcgccagggcaagaccccgcuggggcucgucgaccuguucguguucagcaccuccuucuaccugaucagcaucuuccugcaccucgugaagaucccgacgcaccggcacaucgucggcaagcccugccccaagccccaccgccugaaccacauggggaucugcuccugcggccuguacaagcagccgggggugcccgugaaguggaagcggugaggacuaguaauaaggaaacuguaugaaugucugugggcaggaagugaagagauccuucuguaaagguuuuuggaauuaugucugcugaauaauaaacuuuuuugaaauaauaaaucugguagaaaaaugagaucucaaaggcucuuuucagagccaccaaaaaaaaaaaaaaaaaaaaaaaaaaaaaaaaaaaaaaaaaaaaaaaaaaaaaaaaaaaaaaaaagaauu

SEQ ID NO: 16005 - RNA, 1781 nt, Artificial Sequence
  mRNA product Design b-4 (hSL-A64-N5) comprising derived and/or modified sequence from LASV(LM776-SLE-2012;Clade IV)__AIT17824__GPCmut1 (opt1)
aggagagucccgcagucggcguccagcggcucugcuuguucgugugugugucguugcaggccuuauucaagcuuaccaugggccagaucgugaccuucuuccaggaggucccccacgugaucgaggaggugaugaacaucguccugaucgcccucagcauccuggccgugcugaaggggcucuacaacuucgcgaccugcggccugguggggcuggucacguuccuccugcugugcggccgcuccugcaccaccagcguguacaaggggguguacgagcuccagacccuggagcugaacauggagacgcucaacaugaccaugccgcuguccugcaccaagaacaacagccaccacuacaucauggucggcaacgagaccggccuggagcucacgcugaccaacaccuccaucaucaaccacaaguucugcaaccugagcgacgcccacaagaagaaccucuacgaccacgcccugauguccaucaucagcaccuuccaccuguccauccccaacuucaaccaguacgaggccaugagcugcgacuucaacgggggcaagaucuccgugcaguacaaccucagccacuccuacgccggggacgcggccaaccacugcggcacgguggccaacgggguccugcagaccuucaugcggauggccuggggcggcagcuacaucgcgcuggacuccgggugcggcaagugggacugcaucaugaccagcuaccaguaccucaucauccagaacaccacgugggaggaccacugccaguucucccgccccagccccaucggguaccugggccugcucucccagcggacccgcgacaucuacaucagccggcgccgccggggcaccuucaccuggacgcucagcgacuccgaggggaaggacaccccgggcggguacugccugacccgguggaugcugaucgaggccgagcucaagugcuucggcaacaccgccguggccaagugcaacgagaagcacgacgaggaguucugcgacaugcugcgccuguucgacuucaacaagcaggccauccagcggcucaaggcgcccgcccagaugagcauccagcugaucaacaaggccgugaacgcccugaucaacgaccagcucaucaugaagaaccaccuccgcgacaucaugugcauccccuacugcaacuacuccaaguacugguaccugaaccacacgaccaccggcaagaccagccugcccaagugcuggcuggucuccaacggcagcuaccugaacgagacgcacuucuccgacgacaucgagcagcaggccgacaacaugaucaccgagaugcuccagaaggaguacauggagcggcaggggaagacgccccugggccugguggaccucuucguguucagcaccuccuucuaccugaucagcaucuuccugcaccuggucaagaucccgacccaccgccacaucguggggaaguccugccccaagccccaccggcucaaccacaugggcaucugcagcugcgggcuguacaagcagcccggcgugccgguccgcuggaagcggugaggacuaguaauaaggaaacuguaugaaugucugugggcaggaagugaagagauccuucuguaaagguuuuuggaauuaugucugcugaauaauaaacuuuuuugaaauaauaaaucugguagaaaaaugagaucucaaaggcucuuuucagagccaccaaaaaaaaaaaaaaaaaaaaaaaaaaaaaaaaaaaaaaaaaaaaaaaaaaaaaaaaaaaaaaaaagaauu

SEQ ID NO: 16006 - RNA, 1781 nt, Artificial Sequence
  mRNA product Design b-4 (hSL-A64-N5) comprising derived and/or modified sequence from LASV(Mad39;Clade IV)__ANH09722__GPCmut1 (opt1)
aggagagucccgcagucggcguccagcggcucugcuuguucgugugugugucguugcaggccuuauucaagcuuaccaugggccagaucgugaccuucuuccaggaggucccccacgugaucgaggaggugaugaacaucguccugaucgcccucagcauccuggccgugcugaaggggcucuacaacguggcgaccugcggccugaucgggcuggucacguuccuccugcugugcggccgcuccugcaccaccacccucuacaaggggguguacgagcugcaggcccuggagcucaacauggagacgcugaacaugaccaugccgcugagcugcaccaagaacaacucccaccacuacauccgggugggcaacgagaccggccucgagcugacgcugaccaacaccagccucaucaaccacaaguucugcaaccuguccgacgcccacaagaagaaccuguacgaccacgcccucaugagcaucaucuccaccuuccaccugagcauccccaacuucaaccaguacgaggccauguccugcgacuucaacgacgggaagaucagcguccaguacaaccugucccacacguacgcgggcgacaccgccaaccacugcgggaccguggccaacggcgugcuccagaccuucaugcgcauggccuggggcgggagcuacaucgcgcuggacuccggcugcgggggcugggacugcaucaugacgagcuaccaguaccugaucauccagaacaccaccugggaggaccacugccaguucucccggcccagccccaucggguaccucggccugcugucccagcggacccgcgacaucuacaucagccggcgccgccggggcacguucaccuggacccuguccgacagcgaggggaaggacaccccgggcggguacugccucacgcgguggaugcugaucgaggccgagcugaagugcuucggcaacaccgccgucgccaagugcaacgagaagcacgacgaggaguucugcgacaugcuccgccuguucgacuucaacaagcaggccauccagcggcugaaggcgcccgcccagaugagcauccagcucaucaacaaggccgugaacgcccugaucaacgaccagcugaucaugaagaaccaccuccgcgacaucaugugcauccccuacugcaacuacuccaaguacugguaccugaaccacaccgugaccggcaagacgagccugcccaagugcuggcucgucuccaacggcagcuaccugaacgagacccacuucuccgacgacaucgagcagcaggccgacaacaugaucaccgagaugcugcagaaggaguacauggagcggcaggggaagacgccccucggccugguggaccuguucguguucagcaccuccuucuaccugaucagcaucuuccuccaccuggucaagaucccgacccaccgccacgugguggggaagcccugccccaagccccaccggcugaaccacaugggcaucugcuccugcggguucuacaagcagccgggcguccccgugcgcuggaagcggugaggacuaguaauaaggaaacuguaugaaugucugugggcaggaagugaagagauccuucuguaaagguuuuuggaauuaugucugcugaauaauaaacuuuuuugaaauaauaaaucugguagaaaaaugagaucucaaaggcucuuuucagagccaccaaaaaaaaaaaaaaaaaaaaaaaaaaaaaaaaaaaaaaaaaaaaaaaaaaaaaaaaaaaaaaaaagaauu

SEQ ID NO: 16007 - RNA, 1781 nt, Artificial Sequence
  mRNA product Design b-4 (hSL-A64-N5) comprising derived and/or modified sequence from LASV(Z0947-SLE-2011;Clade IV)__AIT17840__GPCmut1 (opt1)
aggagagucccgcagucggcguccagcggcucugcuuguucgugugugugucguugcaggccuuauucaagcuuaccaugggccagaucgugaccuucuuccaggaggucccccacgugaucgaggaggugaugaacaucguccugaucgcccucagcauccuggccgugcugaaggggcucuacaacuucgcgaccugcggccugguggggcuggucacguuccuccugcugugcggccgcuccugcaccaucagccucuacaaggggguguacgagcugcagacccuggagcucaacauggagacccugaacaugacgaugccgcuguccugcaccaagaacaacagccaccacuacaucauggugggcaacgagaccggccucgagcugacccugacgaacaccuccaucaucaaccacaaguucugcaaccucagcgacgcccacaagaagaaccuguacgaccacgcccugauguccaucaucagcaccuuccaccucuccauccccaacuucaaccaguacgaggccaugagcugcgacuucaacgggggcaagaucuccguccaguacaaccugagccacuccuacgccggggacgcggccaaccacugcggcaccguggccaacggggugcugcagacguucaugcggauggccuggggcggcagcuacaucgcgcucgacuccgggugcgaccggugggacugcaucaugaccagcuaccaguaccugaucauccagaacaccaccugggaggaccacugccaguucucccgccccagccccaucggcuaccuggggcuccugucccagcggacgcgcgacaucuacaucagccggcgccgccggggcaccuucaccuggacccugagcgacuccgagggcaaggacacgcccgggggcuacugccugacccgguggaugcucaucgaggccgagcugaagugcuucgggaacaccgccgucgccaagugcaacgagaagcacgacgaggaguucugcgacaugcugcgccucuucgacuucaacaagcaggccauccagcggcugaaggcgcccgcccagaugagcauccagcugaucaacaaggccgugaacgcccucaucaacgaccagcugaucaugaagaaccaccuccgcgacaucaugugcauccccuacugcaacuacuccaaguacugguaccugaaccacaccacgaccgggaagaccagccugcccaagugcuggcugguguccaacggcagcuaccucaacgagacccacuucuccgacgacaucgagcagcaggccgacaacaugaucacggagaugcugcagaaggaguacauggagcggcagggcaagaccccgcuggggcucgucgaccuguucguguucagcaccuccuucuaccugaucagcaucuuccugcaccucgugaagaucccgacccaccgccacaucgucggcaagcccugccccaagccccaccggcugaaccacauggggaucugcuccugcggccuguacaagcagccgggggugcccgugaaguggaagcgcugaggacuaguaauaaggaaacuguaugaaugucugugggcaggaagugaagagauccuucuguaaagguuuuuggaauuaugucugcugaauaauaaacuuuuuugaaauaauaaaucugguagaaaaaugagaucucaaaggcucuuuucagagccaccaaaaaaaaaaaaaaaaaaaaaaaaaaaaaaaaaaaaaaaaaaaaaaaaaaaaaaaaaaaaaaaaagaauu

SEQ ID NO: 16008 - RNA, 1781 nt, Artificial Sequence
  mRNA product Design b-4 (hSL-A64-N5) comprising derived and/or modified sequence from LASV(Josiah;Clade IV)__NP_694870__GPCmut1 (opt1)
aggagagucccgcagucggcguccagcggcucugcuuguucgugugugugucguugcaggccuuauucaagcuuaccaugggccagaucgugaccuucuuccaggaggucccccacgugaucgaggaggugaugaacaucguccugaucgcccucagcgugcuggccgugcugaaggggcucuacaacuucgcgaccugcggccuggucgggcuggugacguuccuccugcugugcggccgcuccugcaccaccagccucuacaaggggguguacgagcugcagacccuggagcucaacauggagacgcugaacaugaccaugccgcuguccugcaccaagaacaacagccaccacuacaucauggucggcaacgagaccggccucgagcugacgcugaccaacaccuccaucaucaaccacaaguucugcaaccucagcgacgcccacaagaagaaccuguacgaccacgcccugauguccaucaucagcaccuuccaccucuccauccccaacuucaaccaguacgaggccaugagcugcgacuucaacgggggcaagaucuccgugcaguacaaccugagccacuccuacgccggggacgcggccaaccacugcggcacgguggccaacgggguccugcagaccuucaugcggauggccuggggcggcagcuacaucgcgcucgacuccgggugcggcaacugggacugcaucaugaccagcuaccaguaccugaucauccagaacaccacgugggaggaccacugccaguucucccgccccagccccaucggguaccugggccuccugucccagcggacccgcgacaucuacaucagccggcgccggcgcggcaccuucaccuggacgcugagcgacuccgaggggaaggacaccccgggcggguacugccucacccgguggaugcugaucgaggccgagcugaagugcuucggcaacaccgccguggccaagugcaacgagaagcacgacgaggaguucugcgacaugcuccgccuguucgacuucaacaagcaggccauccagcggcugaaggcgcccgcccagaugagcauccagcucaucaacaaggccgugaacgcccugaucaacgaccagcugaucaugaagaaccaccuccgcgacaucaugugcauccccuacugcaacuacuccaaguacugguaccugaaccacacgaccaccgggcggaccagccugcccaagugcuggcucgucuccaacggcagcuaccugaacgagacgcacuucuccgacgacaucgagcagcaggccgacaacaugaucaccgagaugcugcagaaggaguacauggagcgccagggcaagaccccgcucgggcugguggaccuguucguguucagcaccuccuucuaccucaucagcaucuuccugcaccuggucaagauccccacgcaccggcacaucgugggcaaguccugccccaagccccaccgccugaaccacauggggaucugcagcugcggccucuacaagcagccgggggugcccgucaaguggaagcggugaggacuaguaauaaggaaacuguaugaaugucugugggcaggaagugaagagauccuucuguaaagguuuuuggaauuaugucugcugaauaauaaacuuuuuugaaauaauaaaucugguagaaaaaugagaucucaaaggcucuuuucagagccaccaaaaaaaaaaaaaaaaaaaaaaaaaaaaaaaaaaaaaaaaaaaaaaaaaaaaaaaaaaaaaaaaagaauu

SEQ ID NO: 16009 - RNA, 1778 nt, Artificial Sequence
  mRNA product Design b-4 (hSL-A64-N5) comprising derived and/or modified sequence from LASV(LP;Clade I)__AAF86701__GPCmut1 (opt1)
aggagagucccgcagucggcguccagcggcucugcuuguucgugugugugucguugcaggccuuauucaagcuuaccaugggccagaucaucaccuucuuccaggaggugccccacgucaucgaggaggugaugaacaucgugcugaucgcccucagccugcuggccauccucaaggggcuguacaacaucgcgaccugcggcaucaucgggcuggucgccuuccucuuccugugcggcaaguccugcagccugacgcucaagggcggguacgagcugcagacccuggagcucaacauggagacccugaacaugaccaugccgcuguccugcacgaagaacagcucccaccacuacauccgcgugggcaacgagaccgggcucgagcugacccugaccaacacgagcaucaucaaccacaaguucugcaaccucuccgacgcccacaagaagaaccuguacgaccacgcccugaugagcaucaucuccaccuuccaccucagcauccccaacuucaaccaguacgaggccauguccugcgacuucaacggcgggaagaucagcgugcaguacaaccugucccacagcuacgcgggcgacgccgccgagcacugcgggaccgucgccaacggcgugcugcagaccuucaugcggauggcguggggcgggcgcuacaucgcccucgacuccggcugcgggaacugggacugcaucaugacgagcuaccaguaccugaucauccagaacaccaccugggaggaccacugccaguucucccggcccagccccaucggcuaccugggccuccugucccagcgcacccgggacaucuacaucagccgccggcgccgggggacguucaccuggacccugagcgacuccgagggcaacgagacccccgggggcuacugccucacgcgcuggaugcugaucgaggccgagcugaagugcuucgggaacaccgccguggccaagugcaacgagaagcacgacgaggaguucugcgacaugcuccggcuguucgacuucaacaagcaggcgauccgccggcugaaggccccggcccagaugagcauccagcucaucaacaaggccgucaacgcccugaucaacgaccagcugaucaugaagaaccaccuccgcgacaucaugugcauccccuacugcaacuacuccaaguacugguaccugaaccacaccagcuccggccggaccagccugcccaagugcuggcucaucuccaacggcagcuaccugaacgagacgcaguucuccgacgacaucgagcagcaggcggacaacaugaucaccgagaugcugcagaaggaguacaucgagcgccaggggaagaccccgcucggccugguggacaucuucaucuucagcaccuccuucuaccugaucagcaucuuccuccaccugaucaagauccccacgcaccggcacaucguggggaagcccugccccaagccgcaccgccugaaccacaugggcgucugcuccugcgggcuguacaagcaccccggcgugcccaccaaguggaagcggugaggacuaguaauaaggaaacuguaugaaugucugugggcaggaagugaagagauccuucuguaaagguuuuuggaauuaugucugcugaauaauaaacuuuuuugaaauaauaaaucugguagaaaaaugagaucucaaaggcucuuuucagagccaccaaaaaaaaaaaaaaaaaaaaaaaaaaaaaaaaaaaaaaaaaaaaaaaaaaaaaaaaaaaaaaaaagaauu

SEQ ID NO: 16010 - RNA, 1778 nt, Artificial Sequence
  mRNA product Design b-4 (hSL-A64-N5) comprising derived and/or modified sequence from LASV(803213;Clade II)__AAF86703__GPCmut1 (opt1)
aggagagucccgcagucggcguccagcggcucugcuuguucgugugugugucguugcaggccuuauucaagcuuaccaugggccagaucaucaccuucuuccaggaggugccccacgucaucgaggaggugaugaacaucgugcugaucgcccucagccugcuggccauccucaaggggaucuacaacgucgcgaccugcggccuguucgggcugaucuccuuccuccugcugugcggccgcagcugcuccgugacguacaaggggguguacgagcuccagacccuggagcugaacauggccaaccucaacaugaccaugccgcugagcugcaccaagaacaacucccaccacuacaucauggucggcaacgagacgggccuggagcucacccugaccaacaccagcaucaucaaccacaaguucugcaaccuguccgacgcccacaagaagaaccucuacgaccacgcccugaugagcaucaucuccacguuccaccugagcauccccaacuucaaccaguacgaggccauguccugcgacuucaacgggggcaagaucagcgugcaguacaaccucucccacagcuucgcgguggacgccgccaaccacugcgggaccaucgccaacggcguccugcagaccuucaugcggauggcguggggcggguccuacaucgcccuggacagcggcugcgggaacugggacugcaucaugaccuccuaccaguaccucaucauccagaacacgaccugggaggaccacugccaguucagccgccccucccccaucggcuaccuggggcugcucagccagcggacccgcgacaucuacaucagccggcgccggcgcggcaccuucacguggacccuguccgacagcgagggcaacgaggcccccgggggcuacugccugacccgguggaugcucaucgaggccgagcugaagugcuucgggaacaccgccguggcgaagugcaacgagaagcacgacgaggaguucugcgacaugcugcgccucuucgacuucaacaagcaggccaucaagcggcugaagacgccggcccagauguccauccagcugaucaacaaggccgugaacgcccucaucaacgaccagcugaucaugaagaaccaccuccgcgacaucaugugcauccccuacugcaacuacagccgguacugguaccugaaccacaccgucaccggcaagaccucccugccccgcugcuggcuggugagcaacggguccuaccucaacgagacgcacuucagcgacgacaucgagcagcaggcggacaacaugaucaccgagaugcugcagaaggaguacauggaccggcagggcaagaccccgcugggccucguggaccuguucgucuucuccaccagcuucuaccugaucuccaucuuccuccaccuggugaagauccccacgcaccgccacaucguggggaagcccugccccaagccgcaccggcugaaccacaugggcaucugcagcugcgggcuguacaagcaccccggcguccccgugaaguggaagcgcugaggacuaguaauaaggaaacuguaugaaugucugugggcaggaagugaagagauccuucuguaaagguuuuuggaauuaugucugcugaauaauaaacuuuuuugaaauaauaaaucugguagaaaaaugagaucucaaaggcucuuuucagagccaccaaaaaaaaaaaaaaaaaaaaaaaaaaaaaaaaaaaaaaaaaaaaaaaaaaaaaaaaaaaaaaaaagaauu

SEQ ID NO: 16011 - RNA, 1778 nt, Artificial Sequence
  mRNA product Design b-4 (hSL-A64-N5) comprising derived and/or modified sequence from LASV(GA391;Clade III)__CAA36645__GPCmut1 (opt1)
aggagagucccgcagucggcguccagcggcucugcuuguucgugugugugucguugcaggccuuauucaagcuuaccaugggccagaucgugaccuucuuccaggaggucccccacgugaucgaggaggugaugaacaucguccugaucgcccucagcauccuggccauccugaaggggcucuacaacguggcgaccugcggccugaucgggcuggugacguuccuccugcuguccggccgcagcugcucccucaucuacaaggggaccuacgagcugcagacccuggagcucaacauggagacccugaacaugacgaugccgcugagcugcaccaagaacaacucccaccacuacauccgggucggcaacgagaccggccucgagcugacccugacgaacaccagcauccucaaccacaaguucugcaaccuguccgacgcccacaagcgcaaccuguacgaccacagccucauguccaucaucagcaccuuccaccuguccauccccaacuucaaccaguacgaggccaugagcugcgacuucaacgggggcaagaucaccgugcaguacaaccugucccacagcuucgccguggacgccgcggggcacugcggcacgcucgccaacgggguccugcagaccuucaugcggauggccuggggcggcuccuacaucgcccuggacagcgggugcggcaacugggacugcaucaugaccuccuaccaguaccucaucauccagaacaccacgugggacgaccacugccaguucagccgccccucccccaucggguaccugggccugcucagccagcggacccgcgacaucuacaucagccggcgccggcgcggcaccuucaccuggacgcuguccgacagcgaggggaacgagaccccgggcggguacugccugacccgguggaugcucaucgaggcggagcugaagugcuucggcaacaccgccguggccaagugcaacgagaagcacgacgaggaguucugcgacaugcugcgccucuucgacuucaacaagcaggccauccggcgccugaagacgcccgcccagauguccauccagcugaucaacaaggcggugaacgcccucaucaacgaccagcugaucaugaagaaccaccuccgggacaucaugugcauccccuacugcaacuacagccgcuacugguaccugaaccacaccuccaccgggaagaccagccugccccggugcuggcugaucuccaacggcagcuaccucaacgagacgaaguucuccgacgacaucgagcagcaggccgacaacaugaucaccgagaugcugcagaaggaguacaucgaccgccagggcaagaccccgcuggggcucgucgaccuguucguguucagcaccuccuucuaccugaucagcaucuuccugcaccucgugaagauccccacgcaccggcacaucgucggcaagcccugccccaagccgcaccgccugaaccacauggggaucugcuccugcggccuguacaagcagcccggggugcccgugcgguggaagcgcugaggacuaguaauaaggaaacuguaugaaugucugugggcaggaagugaagagauccuucuguaaagguuuuuggaauuaugucugcugaauaauaaacuuuuuugaaauaauaaaucugguagaaaaaugagaucucaaaggcucuuuucagagccaccaaaaaaaaaaaaaaaaaaaaaaaaaaaaaaaaaaaaaaaaaaaaaaaaaaaaaaaaaaaaaaaaagaauu

SEQ ID NO: 16012 - RNA, 1781 nt, Artificial Sequence
  mRNA product Design b-4 (hSL-A64-N5) comprising derived and/or modified sequence from LASV(AV;Clade V)__CCA30314__GPCmut1 (opt1)
aggagagucccgcagucggcguccagcggcucugcuuguucgugugugugucguugcaggccuuauucaagcuuaccaugggccagaucgugaccuucuuccaggaggucccccacgugaucgaggaggugaugaacaucguccugaucgcccucagcauccuggccgugcugaaggggcucuacaacaucgcgaccugcggccugaucgggcugaucacguuccuccugcugugcggccgcuccugcagcuccaaccucuacaaggggguguacgagcugcagagccuggaccucaacauggagacccugaacaugaccaugccgcuguccugcaccaagaacaacagccaccacuacauccgggucggcaacgacacgggccucgagcugacccugaccaacaccuccauccucaaccacaaguucugcaaccugagcgacgcccacaagaaggaccuguacgaccacgcccucauguccaucaucagcacguuccaccuguccauccccaacuucaaccaguacgaggccaugagcugcgacuucaacgggggcaagaucuccgugcaguacaaccugagccacuccuacgccaucgacgcggccaaccacugcgggaccguggccaacggcauccuccagaccuucaugcgcauggccuggggcgggagcuacaucgcgcuggacuccggcugcgggaacugggacugcaucaugaccagcuaccaguaccugaucauccagaacacgaccugggagaaccacugccaguucucccggcccagccccaucggcuaccucgggcugcugagccagcgcacccgggacaucuacaucucccgccggcgccggggcaccuucacguggacccucagcgacuccgagggcaacgccacccccgggggcuacugccugacccgcuggaugcugaucgaggccgagcucaagugcuucgggaacacggccgucgccaagugcaacgagaagcacgacgaggaguucugcgacaugcugcggcuguucgacuucaacaagcaggcgaucagccgccucaaguccccggcccagaugagcauccagcugaucaacaaggccgugaacgcccugaucaacgaccagcucaucaugaagaaccaccuccgggacaucaugugcauccccuacugcaacuacuccaaguacugguaccugaaccacaccaucaccggcaagaccagccugcccaagugcuggcugguguccaacgggagcuaccugaacgagacgcacuucuccgacgacaucgagcagcaggccgacaacaugaucaccgagaugcuccagaaggaguacauggagcgccagggcaagaccccgcugggccuggucgaccucuucguguucagcaccuccuucuaccugaucagcaucuuccugcggcuggugaagauccccacgcaccgccacaucgucgggaagcccugccccaagccgcaccggcucaaccacaugggcaucugcuccugcgggcuguacaagcagcccggcgugcccgugcgcuggaagcggugaggacuaguaauaaggaaacuguaugaaugucugugggcaggaagugaagagauccuucuguaaagguuuuuggaauuaugucugcugaauaauaaacuuuuuugaaauaauaaaucugguagaaaaaugagaucucaaaggcucuuuucagagccaccaaaaaaaaaaaaaaaaaaaaaaaaaaaaaaaaaaaaaaaaaaaaaaaaaaaaaaaaaaaaaaaaagaauu

SEQ ID NO: 16013 - RNA, 1778 nt, Artificial Sequence
  mRNA product Design b-4 (hSL-A64-N5) comprising derived and/or modified sequence from LASV(Togo/2016/7082;Clade VI)__AMR44577__GPCmut1 (opt1)
aggagagucccgcagucggcguccagcggcucugcuuguucgugugugugucguugcaggccuuauucaagcuuaccaugggccagaucaucaccuucuuccaggaggugccccacgucaucgaggaggugaugaacaucgugcugaucgcccucagccugcuggccauccucaagggggucuacaacguggcgaccugcggcaucaucgggcuggugacguuccuguuccucugcggccgcuccugcagccugaucuacaagggguccuacgagcugcagacccucgagcugaacauggagacccugaacaugaccaugccgcucagcugcacgaagaacuccagccaccacuacauccgggucggcaacgagaccggccuggagcugacccucaccaacacguccaucaucaaccacaaguucugcaaccugagcgacgcccacaagcgcaaccuguacgaccacgcccucauguccauccugagcaccuuccaccuguccauccccaacuucaaccaguacgaggccaugagcugcgacuucaacgggggcaagaucuccgugcaguacaaccucagccacgccuacgcgguggacgccgccgagcacugcgggaccgucgccaacggcgugcugcagaccuucaugcggauggcguggggcggguccuacaucgcccuggacagcggcugcgggaacugggacugcaucaugacguccuaccaguaccucaucauccagaacaccaccugggaggaccacugccaguucagccgccccucccccaucggcuaccuggggcugcucagccagcggacccgcgacaucuacaucagccggcgccggcgcggcacguucaccuggacccuguccgacagcgagggcaacgagacccccgggggcuacugccugacgcgguggaugcucaucgaggccgagcugaagugcuucgggaacaccgccguggccaagugcaacgagaagcacgacgaggaguucugcgacaugcugcgccucuucgacuucaacaagcaggcgauccagcggcugaaguccccggcccagaugagcauccagcugaucaacaaggccgucaacgcccucaucaacgaccagcugaucaugaagaaccaccuccgcgacaugaugugcauccccuacugcaacuacuccaaguacugguaccugaaccacaccagcuccggccggaccagccugcccaagugcuggcugguguccaacgggagcuaccucaacgagacgcacuucuccgacgacaucgagcagcaggccgacaacaugaucaccgagaugcugcagaaggaguacaucgaccgccagggcaagaccccgcugggccucguggaccuguucgucuucagcaccuccuucuaccugaucagcaucuuccuccaccugaucaagauccccacgcaccggcacaucguggggaagcccugccccaagccgcaccgccugaaccacaugggcaucugcuccugcgggcuguacaagcagcccggcgugcccacccgguggaagcgcugaggacuaguaauaaggaaacuguaugaaugucugugggcaggaagugaagagauccuucuguaaagguuuuuggaauuaugucugcugaauaauaaacuuuuuugaaauaauaaaucugguagaaaaaugagaucucaaaggcucuuuucagagccaccaaaaaaaaaaaaaaaaaaaaaaaaaaaaaaaaaaaaaaaaaaaaaaaaaaaaaaaaaaaaaaaaagaauu

SEQ ID NO: 16014 - RNA, 1778 nt, Artificial Sequence
  mRNA product Design b-4 (hSL-A64-N5) comprising derived and/or modified sequence from LASV(KAK-428;Clade n.d. (VII))__ANH09740__GPCmut1 (opt1)
aggagagucccgcagucggcguccagcggcucugcuuguucgugugugugucguugcaggccuuauucaagcuuaccaugggccagaucgugaccuucuuccaggaggucccccacgugaucgaggaggugaugaacaucguccugaucgcccucagccugcuggccauccucaaggggcuguacaacuucgcgaccugcggcgugaucgggcugaucacguuccuccugcugugcggccgcuccugcagcgccaccuacaaggggcaguacgagcuccagacccuggagcugaacauggagucccucaacaugaccaugccgcugagcugcacgaagaacaacucccaccacuacauccgggccggcaacaacaccggccuggagcucacccugaccaacacgagcaucaucucccacaaguucugcaaccugagcgacgcccacaagaagaaccucuacgaccacacccugauguccaucaucaccaccuuccaccugagcauccccaacuucaaccaguacgaggccauguccugcgacuucaacgggggcaagaucagcauccaguacaaccucucccacagcuacgcgggggacgccgcccagcacugcggcacgguggccaacgggguccugcagaccuucaugcgcauggcguggggcggcuccuaccuggcccucgacagcgggugccggggcugggacugcaucaucuccagcuaccaguaccugaucauccagaacaccaccugggacgaccacugccaguucucccgccccagccccaucggguaccugggcuucgugagccagaagacgcgggacaucuacaucucccgccggcgccggggcaccuucaccuggacccucagcgacuccgaggggcacgacaugccgggcggguacugccugacgcgcuggaugcugaucgaggccgaccucaagugcuucggcaacaccgccguggccaagugcaacgagaagcacgacgaggaguucugcgacauguggcggcuguucgacuucaacaagcaggcgauccagcgccugaaggcccccgcccagaugaacauccagcucaucaacaaggccgucaacgcccugaucaacgaccagcugaugaugaagaaccaccuccgggacaucaugugcauccccuacugcaacuacagcaaguucugguaccugaacaacaccaccacggggcgcaccucccugccccggugcuggcucaucagcaacggcuccuaccugaacgagacccacuucagcgacgacaucgagcagcaggcggacaacaugaucaccgagaugcugcagaaggaguacauggaccgccagggcaagacgccgcucgggcugguggaccuguucguguucuccaccagcuucuaccucaucaccaucuuccugcaccuggucaagauccccacccaccggcacaucgugggcaagcccugccccaagccgcaccgccucaaccacauggggaucugcuccugcggccuguacaagcagcccggggugcccguccgguggaagcgcugaggacuaguaauaaggaaacuguaugaaugucugugggcaggaagugaagagauccuucuguaaagguuuuuggaauuaugucugcugaauaauaaacuuuuuugaaauaauaaaucugguagaaaaaugagaucucaaaggcucuuuucagagccaccaaaaaaaaaaaaaaaaaaaaaaaaaaaaaaaaaaaaaaaaaaaaaaaaaaaaaaaaaaaaaaaaagaauu

SEQ ID NO: 16015 - RNA, 1778 nt, Artificial Sequence; identical to SEQ ID NO: 16009
  mRNA product Design b-4 (hSL-A64-N5) comprising derived and/or modified sequence from LASV(Pinneo-NIG-1969;Clade I)__AIT17836__GPCmut1 (opt1)

SEQ ID NO: 16016 - RNA, 1778 nt, Artificial Sequence
  mRNA product Design b-4 (hSL-A64-N5) comprising derived and/or modified sequence from LASV(ISTH0009-NIG-2011;Clade II)__AIT17404__GPCmut1 (opt1)
aggagagucccgcagucggcguccagcggcucugcuuguucgugugugugucguugcaggccuuauucaagcuuaccaugggccagaucaucaccuucuuccaggaggugccccacgucaucgaggaggugaugaacaucgugcugaucgcccucagccugcuggccauccucaaggggaucuacaacgucgcgaccugcggccuguucgggcugguguccuuccuccugcugugcggccgcagcugcuccacgaccuacaaggggguguacgagcuccagacccuggagcuggacauggccagccucaacaugaccaugccgcuguccugcacgaagaacaacagccaccacuacaucauggucggcaacgagaccggccuggagcucacccugaccaacacguccaucaucaaccacaaguucugcaaccugagcgacgcccacaagaagaaccucuacgaccacgcccugauguccaucaucagcaccuuccaccuguccauccccaacuucaaccaguacgaggccaugagcugcgacuucaacgggggcaagaucuccgugcaguacaaccucagccacgcguacgccguggacgccgccaaccacugcgggaccaucgcgaacggcguccugcagaccuucaugcggauggccuggggcggguccuacaucgcccuggacagcggcugcggguccugggacugcaucaugacgagcuaccaguaccucaucauccagaacaccaccugggaggaccacugccaguucucccgccccagccccaucggcuaccuggggcugcucagccagcggacccgcgacaucuacaucucccggcgccggcgcggcacguucaccuggacccugagcgacuccgagggcaacgagacccccgggggcuacugccugacgcgguggaugcucaucgaggccgagcugaagugcuucgggaacaccgccguggcgaagugcaacgagaagcacgacgaggaguucugcgacaugcugcgccucuucgacuucaacaagcaggccauccggcgccugaagaccccggcccagaugagcauccagcugaucaacaaggccgugaacgcccucaucaacgaccagcugaucaugaagaaccaccuccgggacaucaugugcauccccuacugcaacuacuccaaguacugguaccugaaccacaccgucacgggcaagaccagccugccccgcugcuggcugguguccaacgggagcuaccucaacgagacccacuucuccgacgacaucgagcagcaggcggacaacaugaucaccgagcugcugcagaaggaguacauggaccggcagggcaagacgccgcucggccugguggaccuguucgucuucagcaccuccuucuaccucaucagcaucuuccugcaccugaucaagauccccacccaccgccacaucaccgggaagcccugccccaagccgcaccggcugaaccacaugggcaucugcuccugcgggcucuacaagcaccccggcgugcccgugaaguggaagcgcugaggacuaguaauaaggaaacuguaugaaugucugugggcaggaagugaagagauccuucuguaaagguuuuuggaauuaugucugcugaauaauaaacuuuuuugaaauaauaaaucugguagaaaaaugagaucucaaaggcucuuuucagagccaccaaaaaaaaaaaaaaaaaaaaaaaaaaaaaaaaaaaaaaaaaaaaaaaaaaaaaaaaaaaaaaaaagaauu

SEQ ID NO: 16017 - RNA, 1778 nt, Artificial Sequence
  mRNA product Design b-4 (hSL-A64-N5) comprising derived and/or modified sequence from LASV(ISTH2010-NIG-2012;Clade II)__AIT17482__GPCmut1 (opt1)
aggagagucccgcagucggcguccagcggcucugcuuguucgugugugugucguugcaggccuuauucaagcuuaccaugggccagaucaucaccuucuuccaggaggugccccacgucaucgaggaggugaugaacaucgugcugaucgcccucagccugcuggccauccucaaggggaucuacaacgucgcgaccugcggccuguucgggcugguguccuuccuccugcugugcggccgcagcugcuccacgaccuacaaggggguguacgagcuccagacccuggagcuggacauggccagccucaacaugaccaugccgcuguccugcacgaagaacaacagccaccacuacaucauggucggcaacgagaccggccuggagcucacccugaccaacacguccaucaucaaccacaaguucugcaaccugagcgacgcccacaagaagaaccucuacgaccacgcccugauguccaucaucagcaccuuccaccuguccauccccaacuucaaccaguacgaggccaugagcugcgacuucaacgggggcaagaucuccgugcaguacaaccucagccacgcguacgccguggacgccgccaaccacugcgggaccaucgcgaacggcguccugcagaccuucaugcggauggccuggggcggguccuacaucgcccuggacagcggcugcggguccugggacugcaucaugacgagcuaccaguaccucaucauccagaacaucaccugggaggaccacugccaguucucccgccccagccccaucggcuaccuggggcugcucagccagcggacccgcgacaucuacaucucccggcgccggcgcggcaccuucacguggacccugagcgacuccgagggcaacgagacccccgggggcuacugccugacccgguggaugcucaucgaggccgagcugaagugcuucgggaacacggccguggcgaagugcaacgagaagcacgacgaggaguucugcgacaugcugcgccucuucgacuucaacaagcaggccauccggcgccugaagaccccggcccagaugagcauccagcugaucaacaaggccgugaacgcccucaucaacgaccagcugaucaugaagaaccaccuccgggacaucaugugcauccccuacugcaacuacuccaaguacugguaccugaaccacaccgucaccggcaagacgagccugccccgcugcuggcugguguccaacgggagcuaccucaacgagacccacuucuccgacgacaucgagcagcaggcggacaacaugaucaccgagcugcugcagaaggaguacaucgaccggcagggcaagaccccgcucggccugguggaccuguucgucuucagcacguccuucuaccucaucagcaucuuccugcaccuggugaagauccccacccaccgccacguggucgggaagcccugccccaagccgcaccggcugaaccacaugggcaucugcuccugcgggcucuacaagcaccccggcgugcccgugaaguggaagcgcugaggacuaguaauaaggaaacuguaugaaugucugugggcaggaagugaagagauccuucuguaaagguuuuuggaauuaugucugcugaauaauaaacuuuuuugaaauaauaaaucugguagaaaaaugagaucucaaaggcucuuuucagagccaccaaaaaaaaaaaaaaaaaaaaaaaaaaaaaaaaaaaaaaaaaaaaaaaaaaaaaaaaaaaaaaaaagaauu

SEQ ID NO: 16018 - RNA, 1778 nt, Artificial Sequence
  mRNA product Design b-4 (hSL-A64-N5) comprising derived and/or modified sequence from LASV(Lassa virus/H.sapiens-wt/NGA/2015/ISTH_0543;Clade II)__AVO03639__GPCmut1 (opt1)
aggagagucccgcagucggcguccagcggcucugcuuguucgugugugugucguugcaggccuuauucaagcuuaccaugggccagaucaucaccuucuuccaggaggugccccacgucaucgaggaggugaugaacaucgugcugaucgcccucagccugcuggccauccucaaggggaucuacaacgucgcgaccugcggccuguucgggcugguguccuuccuccugcugugcggccgcagcugcuccacgaccuacaaggggguguacgagcuccagacccuggagcuggacauggccaaccucaacaugaccaugccgcugagcugcacgaagaacaacucccaccacuacaucauggucggcaacgagaccggccuggagcucacccugaccaacacgagcaucaucaaccacaaguucugcaaccuguccgacgcccacaagaagaaccucuacgaccacgcccugaugagcaucaucuccaccuuccaccugagcauccccaacuucaaccaguacgaggccauguccugcgacuucaacgggggcaagaucagcgugcaguacaaccucucccacaccuacgcgguggacgccgccaaccacugcgggaccaucgccaacggcguccugcagacguucaugcggauggcguggggcgggagcuacaucgcccuggacuccggcugcgggagcugggacugcaucaugaccuccuaccaguaccucgugauccagaacaccaccugggaggaccacugccaguucagccgccccucccccaucggcuaccuggggcugcucagccagcggacgcgcgacaucuacaucagccggcgccggcgcggcaccuucaccuggacccuguccgacagcgagggcaacgagacgcccgggggcuacugccugacccgguggaugcucaucgaggccgagcugaagugcuucgggaacaccgccguggccaagugcaacgagaagcacgacgaggaguucugcgacaugcugcgccucuucgacuucaacaagcaggcgauccggcgccugaagaccccggcccagauguccauccagcugaucaacaaggccgucaacgcccucaucaacgaccagcugaucaugaagaaccaccuccgggacaucaugugcauccccuacugcaacuacagcaaguacugguaccugaaccacacggugaccggcaagaccucccugccccgcugcuggcuggugagcaacggguccuaccucaacgagacccacuucagcgacgacaucgagcagcaggccgacaacaugaucacggagcugcugcagaaggaguacaucgaccggcagggcaagaccccgcucggccuggucgaccuguucguguucuccaccagcuucuaccucaucuccaucuuccugcaccuggugaagauccccacccaccgccacaucacggggaagcccugccccaagccgcaccggcugaaccacaugggcaucugcagcugcgggcucuacaagcaccccggcguccccgugaaguggaagcgcugaggacuaguaauaaggaaacuguaugaaugucugugggcaggaagugaagagauccuucuguaaagguuuuuggaauuaugucugcugaauaauaaacuuuuuugaaauaauaaaucugguagaaaaaugagaucucaaaggcucuuuucagagccaccaaaaaaaaaaaaaaaaaaaaaaaaaaaaaaaaaaaaaaaaaaaaaaaaaaaaaaaaaaaaaaaaagaauu

SEQ ID NO: 16019 - RNA, 1778 nt, Artificial Sequence
  mRNA product Design b-4 (hSL-A64-N5) comprising derived and/or modified sequence from LASV(Lassa virus/H.sapiens-wt/NGA/2016/ISTH_0009;Clade II)__AVO03571__GPCmut1 (opt1)
aggagagucccgcagucggcguccagcggcucugcuuguucgugugugugucguugcaggccuuauucaagcuuaccaugggccagaucaucaccuucuuccaggaggugccccacgucaucgaggaggugaugaacaucgugcugaucgcccucagccugcuggccauccucaaggggaucuacaacgucgcgaccugcggccugcuggggcucguguccuuccugcugcucugcggccgcagcugcuccacgaccuacaaggggguguacgagcugcagacccuggagcucgacauggccagccugaacaugaccaugccgcuguccugcacgaagaacaacagccaccacuacaucauggucggcaacgagaccggccucgagcugacccugaccaacacguccaucaucaaccacaaguucugcaaccucagcgacgcccacaagaagaaccuguacgaccacgcccugauguccaucaucagcaccuuccaccucuccauccccaacuucaaccaguacgaggccaugagcugcgacuucaacgggggccggaucuccgugcaguacaaccugagccacuccuacgcgguggacgccgccaaccacugcgggaccaucgccaacggcguccugcagaccuucaugcgcauggcguggggcgggagcuacaucgcccucgacuccggcugcgggagcugggacugcaucaugacguccuaccaguaccugaucauccagaacaccaccugggaggaccacugccaguucagccggcccagccccaucggcuaccuggggcuccugucccagcgcacccgggacaucuacaucagccgccggcgccggggcacguucaccuggacccuguccgacagcgagggcaacgagacccccgggggcuacugccucacgcgcuggaugcugaucgaggccgagcugaagugcuucgggaacaccgccguggccaagugcaacgagaagcacgacgaggaguucugcgacaugcuccggcuguucgacuucaacaagcaggcgauccgccggcugaagaccccggcccagauguccauccagcucaucaacaaggccgugaacgcccugaucaacgaccagcugaucaugaagaaccaccuccgcgacaucaugugcauccccuacugcaacuacagcaaguacugguaccugaaccacaccgucacgggcaagaccucccugccccggugcuggcucgugagcaacggguccuaccugaacgagacccacuucagcgacgacaucgagcagcaggccgacaacaugaucaccgagcugcuccagaaggaguacaucgaccgccagggcaagacgccgcugggccugguggaccucuucgucuucuccaccagcuucuaccugaucuccaucuuccugcaccuggugaagauccccacccaccggcacaucaccgggaagcccugccccaagccgcaccgccucaaccacaugggcaucugcagcugcgggcuguacaaccaccccggcgugcccgucaaguggaagcggugaggacuaguaauaaggaaacuguaugaaugucugugggcaggaagugaagagauccuucuguaaagguuuuuggaauuaugucugcugaauaauaaacuuuuuugaaauaauaaaucugguagaaaaaugagaucucaaaggcucuuuucagagccaccaaaaaaaaaaaaaaaaaaaaaaaaaaaaaaaaaaaaaaaaaaaaaaaaaaaaaaaaaaaaaaaaagaauu

SEQ ID NO: 16020 - RNA, 1778 nt, Artificial Sequence
  mRNA product Design b-4 (hSL-A64-N5) comprising derived and/or modified sequence from LASV(Lassa virus/H.sapiens-wt/NGA/2016/ISTH_0017;Clade II)__AVO03567__GPCmut1 (opt1)
aggagagucccgcagucggcguccagcggcucugcuuguucgugugugugucguugcaggccuuauucaagcuuaccaugggccagaucaucaccuucuuccaggaggugccccacgucaucgaggaggugaugaacaucgugcugaucgcccucagccugcuggccauccucaaggggaucuacaacgucgcgaccugcggccuguucgggcugguguccuuccuccugcugugcggccgcagcugcuccacgaccuacaaggggguguacgagcuccagacccuggagcuggacauggccagccucaacaugaccaugccgcuguccugcacgaagaacaacagccaccacuacaucauggucggcaacgagaccggccuggagcucacccugaccaacacguccaucaucaaccacaaguucugcaaccugagcgacgcccacaagaagaaccucuacgaccacgcccugauguccaucaucagcaccuuccaccuguccauccccaacuucaaccaguacgaggccaugagcugcgacuucaacgggggcaagaucuccgugcaguacaaccucagccacaccuacgcgaucgacgccgccaaccacugcgggaccaucgccaacggcgugcugcagacguucaugcggauggcguggggcggguccuacaucgcccuggacagcggcugcggguccugggacugcaucaugaccagcuaccaguaccucaucauccagaacaccaccugggaggaccacugccaguucucccgccccagccccaucggcuaccuggggcugcucagccagcggacgcgcgacaucuacaucucccggcgccggcgcggcaccuucaccuggacccugagcgacuccgagggcaacgagacgcccgggggcuacugccugacccgguggaugcucaucgaggccgagcugaagugcuucgggaacaccgccgucgccaagugcaacgagaagcacgacgaggaguucugcgacaugcugcgccucuucgacuucaacaagcaggcgauccggcgccugaagaccccggcccagaugagcauccagcugaucaacaaggccgugaacgcccucaucaacgaccagcugaucaugaagaaccaccuccgggacaucaugugcauccccuacugcaacuacuccaaguacugguaccugaaccacacggugaccggcaagaccagccugccccgcugcuggcuggucuccaacgggagcuaccucaacgagacccacuucuccgacgacaucgagcagcaggccgacaacaugaucacggagcugcugcagaaggaguacauggaccggcagggcaagaccccgcucggccugguggaccuguucguguucagcaccuccuucuaccucaucagcaucuuccugcaccugguccgcauccccacccaccggcacgugaucgggaagcccugccccaagccgcaccgccugaaccacaugggcaucugcuccugcgggcucuacaagcaccccggcgugcccgucaaguggaagcggugaggacuaguaauaaggaaacuguaugaaugucugugggcaggaagugaagagauccuucuguaaagguuuuuggaauuaugucugcugaauaauaaacuuuuuugaaauaauaaaucugguagaaaaaugagaucucaaaggcucuuuucagagccaccaaaaaaaaaaaaaaaaaaaaaaaaaaaaaaaaaaaaaaaaaaaaaaaaaaaaaaaaaaaaaaaaagaauu

SEQ ID NO: 16021 - RNA, 1778 nt, Artificial Sequence
  mRNA product Design b-4 (hSL-A64-N5) comprising derived and/or modified sequence from LASV(Lassa virus/H.sapiens-wt/NGA/2018/ISTH_0959;Clade II)__AVV65099__GPCmut1 (opt1)
aggagagucccgcagucggcguccagcggcucugcuuguucgugugugugucguugcaggccuuauucaagcuuaccaugggccagaucaucaccuucuuccaggaggugccccacgucaucgaggaggugaugaacaucgugcugaucgcccucagccugcuggccauccucaaggggaucuacaacgucgugaccugcggccuguucgggcugguguccuuccuccugcugugcggccgcagcugcuccacgaccuacaagggggucuacgagcuccagacccuggagcuggacauggcgagccucaacaugaccaugccgcuguccugcacgaagaacaacagccaccacuacaucauggugggcaacgagaccggccuggagcucacccugaccaacacguccaucaucaaccacaaguucugcaaccugagcgacgcccacaagaagaaccucuacgaccacgcccugauguccaucaucagcaccuuccaccuguccauccccaacuucaaccaguacgaggccaugagcugcgacuucaacgggggcaagaucuccgugcaguacaaccucagccacgccuacgcgaucgacgccgccaaccacugcgggaccaucgccaacggcguccugcagaccuucaugcggauggcguggggcggguccuacaucgcccuggacagcggcugcggguccugggacugcaucaugacgagcuaccaguaccucaucauccagaacaccaccugggaggaccacugccaguucucccgccccagccccaucggcuaccuggggcugcucagccagcggacccgcgacaucuacaucucccggcgccggcgcggcacguucaccuggacccugagcgacuccgagggcaacgagacccccgggggcuacugccugacgcgguggaugcucaucgaggccgagcugaagugcuucgggaacaccgccguggccaagugcaacgagaagcacgacgaggaguucugcgacaugcugcgccucuucgacuucaacaagcaggcgauccggcgccugaagaccccggcccagaugagcauccagcugaucaacaaggccgugaacgcccucaucaacgaccagcugaucaugaagaaccaccuccgggacaucaugugcauccccuacugcaacuacuccaaguacugguaccugaaccacaccgucacgggcaagaccagccugccccgcugcuggcugguguccaacgggagcuaccucaacgagacccacuucuccgacgacaucgagcagcaggccgacaacaugaucaccgagcugcugcagaaggaguacaucgaccggcagggcaagacgccgcucggccugguggaccuguucgucuucagcaccuccuucuaccucaucagcaucuuccugcaccuggugaagauccccacccaccgccacgugaucgggaagcccugccccaagccgcaccggcugaaccacaugggcaucugcuccugcgggcucuacaagcaccccggcguccccgugaaguggaagcgcugaggacuaguaauaaggaaacuguaugaaugucugugggcaggaagugaagagauccuucuguaaagguuuuuggaauuaugucugcugaauaauaaacuuuuuugaaauaauaaaucugguagaaaaaugagaucucaaaggcucuuuucagagccaccaaaaaaaaaaaaaaaaaaaaaaaaaaaaaaaaaaaaaaaaaaaaaaaaaaaaaaaaaaaaaaaaagaauu

SEQ ID NO: 16022 - RNA, 1778 nt, Artificial Sequence
  mRNA product Design b-4 (hSL-A64-N5) comprising derived and/or modified sequence from LASV(LASV003-NIG-2008;Clade II)__AIT17580__GPCmut1 (opt1)
aggagagucccgcagucggcguccagcggcucugcuuguucgugugugugucguugcaggccuuauucaagcuuaccaugggccagaucaucaccuucuuccaggaggugccccacgucaucgaggaggugaugaacaucgugcugaucgcccucagccugcuggccauccucaaggggaucuacaacgucgcgaccugcggccuguucgggcugguguccuuccuccugcugugcggccgcagcugcuccacgaccuacaaggggguguacgagcuccagacccuggagcuggacauggccagccucaacaugaccaugccgcuguccugcacgaagaacaacagccaccacuacaucauggucggcaacgagaccggccuggagcucacccugaccaacacguccaucaucaaccacaaguucugcaaccugagcgacgcccacaagaagaaccucuacgaccacgcccugauguccaucaucagcaccuuccaccuguccauccccaacuucaaccaguacgaggccaugagcugcgacuucaacgggggcaagaucuccgugcaguacaaccucagccacaccuacgcgguggacgccgccaaccacugcgggaccaucgccaacggcguccugcagacguucaugcggauggcguggggcggguccuacaucgcccuggacagcggcugcggguccugggacugcaucaugaccagcuaccaguaccucaucauccagaacaccaccugggaggaccacugccaguucucccgccccagccccaucggcuaccuggggcugcucagccagcggacgcgcgacaucuacaucucccggcgccggcgcggcaccuucaccuggacccugagcgacuccgagagcaacgagacgccgggcggguacugccugacccgguggaugcucaucgaggccgagcugaagugcuucggcaacaccgccguggccaagugcaacgagaagcacgacgaggaguucugcgacaugcugcgccucuucgacuucaacaagcaggcgauccggcgccugaaggcccccgcccagauguccauccagcugaucaacaaggccgugaacgcccucaucaacgaccagcugaucaugaagaaccaccuccgggacaucaugugcauccccuacugcaacuacagcaaguacugguaccugaaccacaccgucacggggcgcaccucccugccccggugcuggcuggugagcaacggcuccuaccucaacgagacccacuucagcgacgacaucgagcagcaggcggacaacaugaucaccgagcugcugcagaaggaguacauggaccgccaggggaagacgccgcucggccugguggaccuguucgucuucuccaccagcuucuaccucaucuccaucuuccugcaccuggugaagauccccacccaccggcacgugaucggcaagcccugccccaagccgcaccgccugaaccacauggggaucugcagcugcggccucuacaagcaccccgggguccccgugaaguggaagcggugaggacuaguaauaaggaaacuguaugaaugucugugggcaggaagugaagagauccuucuguaaagguuuuuggaauuaugucugcugaauaauaaacuuuuuugaaauaauaaaucugguagaaaaaugagaucucaaaggcucuuuucagagccaccaaaaaaaaaaaaaaaaaaaaaaaaaaaaaaaaaaaaaaaaaaaaaaaaaaaaaaaaaaaaaaaaagaauu

SEQ ID NO: 16023 - RNA, 1778 nt, Artificial Sequence
  mRNA product Design b-4 (hSL-A64-N5) comprising derived and/or modified sequence from LASV(LASV035-NIG-2009;Clade II)__AIT17588__GPCmut1 (opt1)
aggagagucccgcagucggcguccagcggcucugcuuguucgugugugugucguugcaggccuuauucaagcuuaccaugggccagaucaucaccuucuuccaggaggugccccacgucaucgaggaggugaugaacaucgugcugaucgcccucagccugcuggccauccucaaggggaucuacaacgucgcgaccugcggccuguucgggcugguguccuuccuccugcugugcggccgcagcugcuccacgaccuacaaggggguguacgagcuccagacccuggagcuggacauggccagccucaacaugaccaugccgcuguccugcacgaagaacaacagccaccacuacaucauggucggcaacgagaccggccuggagcucacccugaccaacacguccaucaucaaccacaaguucugcaaccugagcgacgcccacaagaagaaccucuacgaccacgcccugauguccaucaucagcaccuuccaccuguccauccccaacuucaaccaguacgaggccaugagcugcgacuucaacgggggcaagaucuccgugcaguacaaccucagccacgcguacgccguggacgccgccaaccacugcgggaccaucgcgaacggcguccugcagaccuucaugcggauggccuggggcggguccuacaucgcccuggacagcggcugcggguccugggacugcaucaugacgagcuaccaguaccucaucauccagaacaccaccugggaggaccacugccaguucucccgccccagccccaucggcuaccuggggcugcucagccagcggacccgcgacaucuacaucucccggcgccggcgcggcacguucaccuggacccugagcgacuccgagggcaacgagacccccgggggcuacugccugacgcgguggaugcucaucgaggccgagcugaagugcuucgggaacaccgccguggcgaagugcaacgagaagcacgacgaggaguucugcgacaugcugcgccucuucgacuucaacaagcaggccauccggcgccugaaggccccggcccagaugagcauccagcugaucaacaaggccgugaacgcgcucaucaacgaccagcugaucaugaagaaccaccuccgggacaucaugugcauccccuacugcaacuacuccaaguacugguaccugaaccacaccgucaccggcaagacgagccugccccgcugcuggcugguguccaacgggagcuaccucaacgagacccacuucuccgacgacaucgagcagcaggccgacaacaugaucaccgagcugcugcagaaggaguacaucgaccggcagggcaagaccccgcucggccugguggaccuguucgucuucagcacguccuucuaccucaucagcaucuuccugcaccuggugaagauccccacccaccgccacgugaucgggaagcccugccccaagccgcaccggcugaaccacaugggcaucugcuccugcgggcucuacaagcaccccggcguccccgugaaguggaagcgcugaggacuaguaauaaggaaacuguaugaaugucugugggcaggaagugaagagauccuucuguaaagguuuuuggaauuaugucugcugaauaauaaacuuuuuugaaauaauaaaucugguagaaaaaugagaucucaaaggcucuuuucagagccaccaaaaaaaaaaaaaaaaaaaaaaaaaaaaaaaaaaaaaaaaaaaaaaaaaaaaaaaaaaaaaaaaagaauu

SEQ ID NO: 16024 - RNA, 1778 nt, Artificial Sequence
  mRNA product Design b-4 (hSL-A64-N5) comprising derived and/or modified sequence from LASV(LASV1000-NIG-2009;Clade II)__AIT17782__GPCmut1 (opt1)
aggagagucccgcagucggcguccagcggcucugcuuguucgugugugugucguugcaggccuuauucaagcuuaccaugggccagaucaucaccuucuuccaggaggugccccacgucaucgaggaggugaugaacaucgugcugaucgcccucagccugcuggccauccucaaggggaucuacaacgucgcgaccugcggccuguucgggcugguguccuuccuccugcugugcggccgcagcugcuccacgaccuacaaggggguguacgagcuccagacccuggagcuggacauggccagccucaacaugaccaugccgcuguccugcacgaagaacaacagccaccacuacaucauggucggcaacgagaccggccuggagcucacccugaccaacacguccaucaucaaccacaaguucugcaaccugagcgacgcccacaagaagaaccucuacgaccacgcccugauguccaucaucagcaccuuccaccuguccauccccaacuucaaccaguacgaggccaugagcugcgacuucaacgggggcaagaucuccgugcaguacaaccucagccacaccuacgcgguggacgccgccaaccacugcgggaccaucgccaacggcguccugcagacguucaugcggauggcguggggcggguccuacaucgcccuggacagcggcugcggguccugggacugcaucaugaccagcuaccaguaccucaucauccagaacaccaccugggaggaccacugccaguucucccgccccagccccaucggcuaccuggggcugcucagccagcggacgcgcgacaucuacaucucccggcgccggcgcggcaccuucaccuggacccugagcgacuccgagggcaacgagacgcccgggggcuacugccugacccgguggaugcucaucgaggccgagcugaagugcuucgggaacaccgccguggccaagugcaacgagaagcacgacgaggaguucugcgacaugcugcgccucuucgacuucaacaagcaggcgaucaagcggcugaagaccccggcccagaugagcauccagcugaucaacaaggccgugaacgcccucaucaacgaccagcugaucaugaagaaccaccuccgcgacaucaugugcauccccuacugcaacuacuccaaguacugguaccugaaccacacggucaccggcaagaccagccugccccggugcuggcugguguccaacgggagcuaccucaacgagacccacuucuccgacgacaucgagcagcaggccgacaacaugaucacggagcugcugcagaaggaguacaucgaccgccagggcaagaccccgcucggccugguggaccuguucgucuucagcaccuccuucuaccucaucagcaucuuccugcaccuggugaagauccccacccaccggcacguggucgggaagcccugccccaagccgcaccgccugaaccacaugggcaucugcuccugcgggcucuacaagcaccccggcgugcccgugaaguggaagcggugaggacuaguaauaaggaaacuguaugaaugucugugggcaggaagugaagagauccuucuguaaagguuuuuggaauuaugucugcugaauaauaaacuuuuuugaaauaauaaaucugguagaaaaaugagaucucaaaggcucuuuucagagccaccaaaaaaaaaaaaaaaaaaaaaaaaaaaaaaaaaaaaaaaaaaaaaaaaaaaaaaaaaaaaaaaaagaauu

SEQ ID NO: 16025 - RNA, 1778 nt, Artificial Sequence
  mRNA product Design b-4 (hSL-A64-N5) comprising derived and/or modified sequence from LASV(LASV221-NIG-2010;Clade II)__AIT17624__GPCmut1 (opt1)
aggagagucccgcagucggcguccagcggcucugcuuguucgugugugugucguugcaggccuuauucaagcuuaccaugggccagaucaucaccuucuuccaggaggugccccacgucaucgaggaggugaugaacaucgugcugaucgcccucagccugcuggccauccucaaggggaucuacaacgucgcgaccugcggccuguucgggcugguguccuuccuccugcugugcggccgcagcugcuccacgaccuacaaggggguguacgagcuccagacccuggagcuggacauggccagccucaacaugaccaugccgcuguccugcacgaagaacaacagccaccacuacaucauggucggcaacgagaccggccuggagcucacccugaccaacacguccaucaucaaccacaaguucugcaaccugagcgacgcccacaagaagaaccucuacgaccacgcccugauguccaucaucagcaccuuccaccuguccauccccaacuucaaccaguacgaggccaugagcugcgacuucaacgggggcaagaucuccgugcaguacaaccucagccacaccuacgcgaucgacgccgccaaccacugcgggaccaucgccaacggcgugcugcagacguucaugcggauggcguggggcggguccuacaucgcccuggacagcggcugcggguccugggacugcaucaugaccagcuaccaguaccucaucauccagaacaccaccugggaggaccacugccaguucucccgccccagccccaucggcuaccuggggcugcucagccagcggacgcgcgacaucuacaucucccggcgccggcgcggcaccuucaccuggacccugagcgacuccgagggcaacgagacgcccgggggcuacugccugacccgguggaugcucaucgaggccgagcugaagugcuucgggaacaccgccgucgccaagugcaacgagaagcacgacgaggaguucugcgacaugcugcgccucuucgacuucaacaagcaggcgauccggcgccugaagaccccggcccagaugagcauccagcugaucaacaaggccgugaacgcccucaucaacgaccagcugaucaugaagaaccaccuccgggacaucaugugcauccccuacugcaacuacuccaaguacugguaccugaaccacacggugaccggcaagaccagccugccccgcugcuggcuggucuccaacgggagcuaccucaacgagacccacuucuccgacgacaucgagcagcaggccgacaacaugaucacggagaugcugcagaaggaguacauggaccggcagggcaagaccccgcugggccucguggaccuguucguguucagcaccuccuucuaccugaucagcaucuuccuccaccuggucaagauccccacccaccgccacgugaucgggaagcccugccccaagccgcaccggcugaaccacaugggcaucugcuccugcgggcuguacaagcaccccggcgugcccgucaaguggaagcgcugaggacuaguaauaaggaaacuguaugaaugucugugggcaggaagugaagagauccuucuguaaagguuuuuggaauuaugucugcugaauaauaaacuuuuuugaaauaauaaaucugguagaaaaaugagaucucaaaggcucuuuucagagccaccaaaaaaaaaaaaaaaaaaaaaaaaaaaaaaaaaaaaaaaaaaaaaaaaaaaaaaaaaaaaaaaaagaauu

SEQ ID NO: 16026 - RNA, 1778 nt, Artificial Sequence
  mRNA product Design b-4 (hSL-A64-N5) comprising derived and/or modified sequence from LASV(LASV237-NIG-2010;Clade II)__AIT17638__GPCmut1 (opt1)
aggagagucccgcagucggcguccagcggcucugcuuguucgugugugugucguugcaggccuuauucaagcuuaccaugggccagaucaucaccuucuuccaggaggugccccacgucaucgaggaggugaugaacaucgugcugaucgcccucagccugcuggccauccucaaggggaucuacaacgucgcgaccugcggccuguucgggcugguguccuuccuccugcugugcggccgcagcugcuccacgaccuacaaggggguguacgagcuccagacccuggagcuggacauggccagccucaacaugaccaugccgcuguccugcacgaagaacaacagccaccacuacaucauggucggcaacgagaccggccuggagcucacccugaccaacacguccaucaucaaccacaaguucugcaaccugagcgacgcccacaagaaggaccucuacgaccacgcccugauguccaucaucagcaccuuccaccuguccauccccaacuucaaccaguacgaggccaugagcugcgacuucaacgggggcaagaucuccgugcaguacaaccucagccacaccuacgcgguggacgccgccaaccacugcgggaccaucgccaacggcguccugcagacguucaugcggauggcguggggcggguccuacaucgcccuggacagcggcugcggguccugggacugcaucaugaccagcuaccaguaccucaucauccagaacaccaccugggaggaccacugccaguucucccgccccagccccaucggcuaccuggggcugcucagccagcggacgcgcgacaucuacaucucccggcgccggcgcggcaccuucaccuggacccugagcgacuccgagggcaacgagacgcccgggggcuacugccugacccgguggaugcucaucgaggccgagcugaagugcuucgggaacaccgccguggccaagugcaacgagaagcacgacgaggaguucugcgacaugcugcgccucuucgacuucaacaagcaggcgauccggcgccugaagaccccggcccagaugagcauccagcugaucaacaaggccgugaacgcccucaucaacgaccagcugaucaugaagaaccaccuccgggacaucaugugcauccccuacugcaacuacuccaaguacugguaccugaaccacacggucaccggcaagaccagccugccccgcugcuggcugguguccaacgggagcuaccucaacgagacccacuucuccgacgacaucgagcagcaggccgacaacaugaucacggagcugcugcagaaggaguacauggaccggcagggcaagaccccgcucggccugguggaccuguucgucuucagcaccuccuucuaccucaucagcaucuuccugcaccugaucaagauccccacccaccgccacaucacggggaagcccugccccaagccgcaccggcugaaccacaugggcaucugcuccugcgggcucuacaagcaccccggcgugcccgugaaguggaagcgcugaggacuaguaauaaggaaacuguaugaaugucugugggcaggaagugaagagauccuucuguaaagguuuuuggaauuaugucugcugaauaauaaacuuuuuugaaauaauaaaucugguagaaaaaugagaucucaaaggcucuuuucagagccaccaaaaaaaaaaaaaaaaaaaaaaaaaaaaaaaaaaaaaaaaaaaaaaaaaaaaaaaaaaaaaaaaagaauu

SEQ ID NO: 16027 - RNA, 1778 nt, Artificial Sequence
  mRNA product Design b-4 (hSL-A64-N5) comprising derived and/or modified sequence from LASV(LASV253-NIG-2011;Clade II)__AIT17670__GPCmut1 (opt1)
aggagagucccgcagucggcguccagcggcucugcuuguucgugugugugucguugcaggccuuauucaagcuuaccaugggccagaucaucaccuucuuccaggaggugccccacgucaucgaggaggugaugaacaucgugcugaucgcccucagccugcuggccauccucaaggggaucuacaacgucgcgaccugcggccuguucgggcugguguccuuccuccugcugugcggccgcagcugcuccacgaccuacaaggggguguacgagcuccagacccuggagcuggacauggccagccucaacaugaccaugccgcuguccugcacgaagaacaacagccaccacuacaucauggucggcaacgagaccggccuggagcucacccugaccaacacguccaucaucaaccacaaguucugcaaccugagcgacgcccacaagaagaaccucuacgaccacgcccugauguccaucaucagcaccuuccaccuguccauccccaacuucaaccaguacgaggccaugagcugcgacuucaacgggggcaagaucuccgugcaguacaaccucagccacaccuacgcgguggacgccgccaaccacugcgggaccaucgccaacggcguccugcagacguucaugcggauggcguggggcggguccuacaucgcccuggacagcggcugcggguccugggacugcaucaugaccagcuaccaguaccucaucauccagaacaccaccugggaggaccacugccaguucucccgccccagccccaucggcuaccuggggcugcucagccagcggacgcgcgacaucuacaucucccggcgccggcgcggcaccuucaccuggacccugagcgacuccgagggcaacgagacgcccgggggcuacugccugacccgguggaugcucaucgaggccgagcugaagugcuucgggaacaccgccguggccaagugcaacgagaagcacgacgaggaguucugcgacaugcugcgccucuucgacuucaacaagcaggcgauccggcgccugaaggccccggcccagaugagcauccagcugaucaacaaggccgugaacgcccucaucaacgaccagcugaucaugaagaaccaccuccgggacaucaugugcauccccuacugcaacuacuccaaguacugguaccugaaccacaccgucacgggccgcaccagccugccccggugcuggcugguguccaacgggagcuaccucaacgagacccacuucuccgacgacaucgagcagcaggcggacaacaugaucaccgagcugcugcagaaggaguacaucgaccgccagggcaagacgccgcucggccugguggaccuguucgucuucagcaccuccuucuaccucaucagcaucuuccugcaccuggugaagauccccacccaccggcacaucaucgggaagcccugccccaagccgcaccgccugaaccacaugggcaucugcuccugcgggcucuacaagcaccccggcgugcccgucaaguggaagcggugaggacuaguaauaaggaaacuguaugaaugucugugggcaggaagugaagagauccuucuguaaagguuuuuggaauuaugucugcugaauaauaaacuuuuuugaaauaauaaaucugguagaaaaaugagaucucaaaggcucuuuucagagccaccaaaaaaaaaaaaaaaaaaaaaaaaaaaaaaaaaaaaaaaaaaaaaaaaaaaaaaaaaaaaaaaaagaauu

SEQ ID NO: 16028 - RNA, 1778 nt, Artificial Sequence
  mRNA product Design b-4 (hSL-A64-N5) comprising derived and/or modified sequence from LASV(LASV254-NIG-2011;Clade II)__AIT17674__GPCmut1 (opt1)
aggagagucccgcagucggcguccagcggcucugcuuguucgugugugugucguugcaggccuuauucaagcuuaccaugggccagaucaucaccuucuuccaggaggugccccacgucaucgaggaggugaugaacaucgugcugaucgcccucagccugcuggccauccucaaggggaucuacaacgucgcgaccugcggccuguucgggcugguguccuuccuccugcugugcggccgcagcugcuccacgaccuacaaggggguguacgagcuccagacccuggagcuggacaugaccaaccucaacaugacgaugccgcugagcugcaccaagaacaacucccaccacuacaucauggucggcaacgagaccggccuggagcucacccugacgaacaccagcaucaucaaccacaaguucugcaaccuguccgacgcccacaagaagaaccucuacaaccacgcccugaugagcaucaucuccaccuuccaccugagcauccccaacuucaaccaguacgaggccauguccugcgacuucaacgggggcaagaucagcgugcaguacaaccucucccacagcuacgccguggacgcggccaaccacugcgggaccaucgccaacggcguccugcagacguucaugcggauggccuggggcggguccuacaucgcgcuggacagcggcugcgggaacugggacugcaucaugaccuccuaccaguaccucaucauccagaacaccaccugggaggaccacugccaguucagccgccccucccccaucggcuaccuggggcugcucagccagcggacgcgcgacaucuacaucagccggcgccggcgcggcaccuucaccuggacccuguccgacagcgagggcaacgagacgcccgggggcuacugccugacccgguggaugcucaucgaggccgagcugaagugcuucgggaacaccgccguggccaagugcaacgagaagcacgacgaggaguucugcgacaugcugcgccucuucgacuucaacaagcaggccauccggcgccugaagaccccggcgcaggccaacauccagcugaucaacaaggccgugaacgcccucaucaacgaccagcugaucaugaagaaccaccuccgggacaucaugugcauccccuacugcaacuacuccaaguacugguaccugaaccacacggucaccggcaagaccagccugccccgcugcuggcugguguccaacgggagcuaccucaacgagacccacuucuccgacgacaucgagcagcaggccgacaacaugaucacggagcugcugcagaaggaguacauggaccggcagggcaagaccccgcucggccugguggaccuguucgucuucagcaccuccuucuaccucaucagcaucuuccugcaccuggugaagauccccacccaccgccacgugaucgggaagcccugccccaagccgcaccggcugaaccacaugggcaucugcuccugcgggcucuacaagcaccccggcguccccgugaaguggaagcgcugaggacuaguaauaaggaaacuguaugaaugucugugggcaggaagugaagagauccuucuguaaagguuuuuggaauuaugucugcugaauaauaaacuuuuuugaaauaauaaaucugguagaaaaaugagaucucaaaggcucuuuucagagccaccaaaaaaaaaaaaaaaaaaaaaaaaaaaaaaaaaaaaaaaaaaaaaaaaaaaaaaaaaaaaaaaaagaauu

SEQ ID NO: 16029 - RNA, 1778 nt, Artificial Sequence
  mRNA product Design b-4 (hSL-A64-N5) comprising derived and/or modified sequence from LASV(Nig08-A19;Clade III)__ADU56618__GPCmut1 (opt1)
aggagagucccgcagucggcguccagcggcucugcuuguucgugugugugucguugcaggccuuauucaagcuuaccaugggccagaucgugaccuucuuccaggaggucccccacgugaucgaggaggugaugaacaucguccugaucgcccucagcauccuggccauccugaaggggcucuacaacaucgcgaccugcggccugaucgggcuggugacguuccuccugcuguccggccgcagcugcuccaugaccuacaaggggguguacgagcuccagacccuggagcugaacaugaacacccucaacaugacgaugccgcugagcugcaccaagaacaacucccaccacuacaucauggucggcaacgagaccggccuggagcucacccugacgaacaccagccugcuccaccacaaguucugcaaccuguccgacgcccacaagaagaaccuguacgaccacacccucaugagcaucaucuccaccuuccaccugagcauccccaacuucaaccaguacgaggccauguccugcgacuucaacgggggcaagaucacggugcaguacaaccugagccacuccuacgccaucgacgccgcgaaccacugcgggaccguggccaacggcguccuccagaccuucaugcggauggccuggggcgggagcuacaucgcccuggacuccggcugcgggaagugggacugcaucaugaccagcuaccaguaccugaucauccagaacacgaccugggaggaccacugccaguucucccgccccagccccaucggcuaccucgggcugcugucccagcggacccgcgacaucuacaucagccggcgccggcgcggcaccuucacguggacccucagcgacuccgagggcaacgagacccccgggggcuacugccugacccgguggaugcugaucgaggcggagcucaagugcuucgggaacacggccguggccaagugcaacgagaagcacgacgaggaguucugcgacaugcugcgccuguucgacuucaacaagcaggccauccggcgccucaaggccccggcgcagaugagcauccagcugaucaacaaggccgugaacgcccugaucaacgaccagcucaucaugaagaaccaccuccgggacaucaugugcauccccuacugcaacuacuccaaguacugguaccugaaccacaccagcaccggccgcaccucccugccccggugcuggcuggucagcaacggguccuaccugaacgagacgcacuucagcgacgacaucgagcagcaggccgacaacaugaucaccgagaugcuccagaaggaguaccuggaccgccagggcaagaccccgcugggccucguggaccuguucguguucuccaccagcuucuaccugaucuccaucuuccugcaccucgucaagauccccacgcaccggcacaucguggggaagcccugccccaagccgcaccgccugaaccacaugggcaucugcagcugcgggcuguacaagcagcccggcgugcccguccgguggaagcgcugaggacuaguaauaaggaaacuguaugaaugucugugggcaggaagugaagagauccuucuguaaagguuuuuggaauuaugucugcugaauaauaaacuuuuuugaaauaauaaaucugguagaaaaaugagaucucaaaggcucuuuucagagccaccaaaaaaaaaaaaaaaaaaaaaaaaaaaaaaaaaaaaaaaaaaaaaaaaaaaaaaaaaaaaaaaaagaauu

SEQ ID NO: 16030 - RNA, 1781 nt, Artificial Sequence
  mRNA product Design b-4 (hSL-A64-N5) comprising derived and/or modified sequence from LASV(G1180-SLE-2010;Clade IV)__AIT17168__GPCmut1 (opt1)
aggagagucccgcagucggcguccagcggcucugcuuguucgugugugugucguugcaggccuuauucaagcuuaccaugggccagaucgugaccuucuuccaggaggucccccacgugaucgaggaggugaugaacaucguccugaucgcccucagcauccuggccgugcugaaggggcucuacaacuucgcgaccugcggccugguggggcugcucacguuccugcugcucugcggccgcuccugcaccgccagccgguacaagggggucuacgagcugcagacccuggagcucaacauggagacccugaacaugacgaugccgcuguccugcaccaagaacaacagccaccacuacaucauggugggcaacgagaccggccucgagcugacccugacgaacaccuccaucaucaaccacaaguucugcaaccucagcgacgcccacaagaagaaccuguacgaccacgcccugauguccaucaucagcaccuuccaccucuccauccccaacuucaaccaguacgaggccaugagcugcgacuucaacgggggcaagaucuccgugcaguacaaccugagccacuccuacgcgggggacgccgccaaccacugcggcaccgucgccaacggggugcugcagacguucaugcgcauggcguggggcggcagcuacaucgcccucgacuccgggugcggcagcugggacugcaucaugaccuccuaccaguaccugaucauccagaacaccaccugggaggaccacugccaguucagccggcccucccccaucggguaccugggccuccugagccagcgcacgcgggacaucuacaucagccgccggcgccggggcaccuucaccuggacccuguccgacagcgaggggaaggacacgccgggcggguacugccucacccgcuggaugcugaucgaggccgagcugaagugcuucggcaacaccgccguggccaagugcaacgagaagcacgacgaggaguucugcgacaugcuccggcuguucgacuucaacaagcaggcgauccagcgccugaaggcccccgcccagauguccauccagcucaucaacaaggccgucaacgcccugaucaacgaccagcugaucaugaagaaccaccuccgggacaucaugugcauccccuacugcaacuacagcaaguacugguaccugaaccacaccacgaccgggaagaccucccugcccaagugcuggcucgugagcaacggcuccuaccugaacgagacccacuucagcgacgacaucgagcagcaggcggacaacaugaucacggagaugcugcagaaggaguacauggagcgccagggcaagaccccgcucgggcugguggaccuguucgucuucuccaccagcuucuaccucaucuccaucuuccugcaccuggugaagauccccacccaccggcacaucgugggcaagagcugccccaagccccaccgccugaaccacauggggaucugcuccugcggccucuacaagcagccggggguccccgugaaguggaagcggugaggacuaguaauaaggaaacuguaugaaugucugugggcaggaagugaagagauccuucuguaaagguuuuuggaauuaugucugcugaauaauaaacuuuuuugaaauaauaaaucugguagaaaaaugagaucucaaaggcucuuuucagagccaccaaaaaaaaaaaaaaaaaaaaaaaaaaaaaaaaaaaaaaaaaaaaaaaaaaaaaaaaaaaaaaaaagaauu

SEQ ID NO: 16031 - RNA, 1781 nt, Artificial Sequence
  mRNA product Design b-4 (hSL-A64-N5) comprising derived and/or modified sequence from LASV(G1442-SLE-2011;Clade IV)__AIT17180__GPCmut1 (opt1)
aggagagucccgcagucggcguccagcggcucugcuuguucgugugugugucguugcaggccuuauucaagcuuaccaugggccagaucgugaccuucuuccaggaggucccccacgugaucgaggaggugaugaacaucguccugaucgcccucagcauccuggccgugcugaaggggcucuacaacguggcgaccugcggccugaucgggcuggucacguuccuccugcugugcggccgcuccugcaccaccacccucuacaaggggguguacgagcugcagacgcuggagcucaacauggagacccugaacaugaccaugccgcugagcugcaccaagaacaacucccaccacuacauccgggugggcaacgagacgggccucgagcugacccugaccaacaccagcaucaucaaccacaaguucugcaaccucuccgacgcccacaagaagaaccuguacgaccacgcccugaugagcaucaucuccacguuccaccucagcauccccaacuucaaccaguacgaggccauguccugcgacuucaacgggggcaagaucagcguccaguacaaccugucccacagcuacgccggggacgcggccaaccacugcggcaccguggccaacggggugcugcagaccuucaugcgcauggccuggggcggcuccuacaucgcgcucgacagcgggugcggcaacugggacugcaucaugaccuccuaccaguaccugaucauccagaacacgaccugggacgaccacugccaguucagccggcccucccccaucggguaccugggccuccugagccagcgcacccgggacgucuacaucucccgccggcgccggggcaccuucacguggacccugagcgacagcgaggggaaggacaccccgggcggguacugccucacccgcuggaugcugaucgaggccgagcugaagugcuucggcaacacggccguggccaagugcaacgagaagcacgacgaggaguucugcgacaugcuccggcuguucgacuucaacaagcaggccauccagcgccugaaggcgcccgcccagauguccauccagcucaucaacaaggccgugaacgcccugaucaacgaccagcugaucaugaagaaccaccuccgggacaucaugugcauccccuacugcaacuacagcaaguacugguaccugaacaacaccgccaccgggaagaccucccugcccaagugcuggcucaucagcaacggcuccuaccugaacgagacgcacuucagcgacgacaucgagcaggaggcggacaacaugaucaccgagaugcugcagaaggaguacauggagcgccagggcaagaccccgcucgggcuggucgaccuguucguguucuccaccagcuucuaccucaucuccaucuuccugcaccuggugaagauccccacgcaccggcacaucgucggcaagagcugccccaagccccaccgccugaaccacauggggaucugcuccugcggccucuacaagcagccgggggugcccgugcgguggaagcgcugaggacuaguaauaaggaaacuguaugaaugucugugggcaggaagugaagagauccuucuguaaagguuuuuggaauuaugucugcugaauaauaaacuuuuuugaaauaauaaaucugguagaaaaaugagaucucaaaggcucuuuucagagccaccaaaaaaaaaaaaaaaaaaaaaaaaaaaaaaaaaaaaaaaaaaaaaaaaaaaaaaaaaaaaaaaaagaauu

SEQ ID NO: 16032 - RNA, 1781 nt, Artificial Sequence
  mRNA product Design b-4 (hSL-A64-N5) comprising derived and/or modified sequence from LASV(G3010-SLE-2013;Clade IV)__AIT17344__GPCmut1 (opt1)
aggagagucccgcagucggcguccagcggcucugcuuguucgugugugugucguugcaggccuuauucaagcuuaccaugggccagaucgugaccuucuuccaggaggucccccacgugaucgaggaggugaugaacaucguccugaucgcccucagcauccuggccgugcugaaggggcucuacaacuucgcgaccugcggccugguggggcuggucacguuccuccugcugugcggccgcuccugcaccaccagccucuacaaggggguguacgagcugcagacccuggagcucaacauggagacgcugaacaugaccaugccgcuguccugcaccaagaacaacagccaccacuacaucauggugggcaacgagaccggccucgagcugacgcugaccaacaccuccaucaucaaccacaaguucugcaaccucagcgacgcccacaagaagaaccuguacaaccacgcccugauguccaucaucagcaccuuccaccucuccauccccaacuucaaccaguacgaggccaugagcugcgacuucaacgggggcaagaucuccguccaguacaaccugagccacuccuacgccggggacgcggccagccacugcggcacgguggccaacggggugcugcagaccuucaugcggauggccuggggcggcuccuacaucgcgcucgacagcgggugcggcaagugggacugcaucaugaccuccuaccaguaccugaucauccagaacaccacgugggaggaccacugccaguucagccgccccucccccaucggguaccugggccuccugagccagcggacccgcgacaucuacaucagccggcgccggcgcggcaccuucaccuggacgcuguccgacagcgaggggaaggacaccccgggcggguacugccucacccgguggaugcugaucgaggccgagcugaagugcuucggcaacaccgccgucgccaagugcaacgagaagcacgacgaggaguucugcgacaugcuccgccuguucgacuucaacaagcaggccauccagcggcugaagacgcccgcgcagauguccauccagcucaucaacaaggccgugaacgcccugaucaacgaccagcugaucaugaagaaccaccuccgcgacaucaugugcauccccuacugcaacuacagcaaguacugguaccugaaccacaccaccaccgggaagacgucccugcccaagugcuggcucgugagcaacggcuccuaccugaacgagacccacuucagcgacgacaucgagcagcaggccgacaacaugaucaccgagaugcugcagaaggaguacauggagcggcagggcaagaccccgcucgggcuggucgaccuguucguguucuccacgagcuucuaccucaucuccaucuuccugcaccuggugaagauccccacccaccgccacaucgucggcaagagcugccccaagccccaccggcugaaccacauggggaucugcuccugcggccucuacaagcagccgggggugcccgugcgcuggaagcggugaggacuaguaauaaggaaacuguaugaaugucugugggcaggaagugaagagauccuucuguaaagguuuuuggaauuaugucugcugaauaauaaacuuuuuugaaauaauaaaucugguagaaaaaugagaucucaaaggcucuuuucagagccaccaaaaaaaaaaaaaaaaaaaaaaaaaaaaaaaaaaaaaaaaaaaaaaaaaaaaaaaaaaaaaaaaagaauu

SEQ ID NO: 16033 - RNA, 1781 nt, Artificial Sequence
  mRNA product Design b-4 (hSL-A64-N5) comprising derived and/or modified sequence from LASV(G502-SLE-2009;Clade IV)__AIT17126__GPCmut1 (opt1)
aggagagucccgcagucggcguccagcggcucugcuuguucgugugugugucguugcaggccuuauucaagcuuaccaugggccagaucgugaccuucuuccaggaggucccccacgugaucgaggaggugaugaacaucguccugaucgcccucagcauccuggccgugcugaaggggcucuacaacuucgcgaccugcggccugguggggcugcucacguuccugcugcucugcggccgcuccugcaccaccgggcuguacaagggcgucuacgagcugcagacccucgagcugaacauggagacgcugaacaugaccaugccgcucagcugcaccaagaacaacucccaccacuacaucauggugggcaacgagaccgggcuggagcugacgcucaccaacaccagcaucaucaaccacaaguucugcaaccuguccgacgcccacaagaagaaccuguacgaccacgcccucaugagcaucaucuccaccuuccaccugagcauccccaacuucaaccaguacgaggccauguccugcgacuucaacggcgggaagaucagcgugcaguacaaccugucccacagcuacgccggcgacgcggccgaccacugcgggacggucgccaacggcgugcuccagaccuucaugcggauggccuggggcggguccuacaucgcgcuggacagcggcugcgggcgcugggacugcaucaugaccuccuaccaguaccugaucauccagaacaccacgugggaggaccacugccaguucagccggcccucccccaucggcuaccucggccugcugagccagcgcacccgggacaucuacaucucccgccggcgccgggggaccuucaccuggacgcucagcgacagcgagggcaaggacacccccgggggcuacugccugacccgcuggaugcugaucgaggccgagcucaagugcuucgggaacaccgccguggccaagugcaacgagaagcacgacgaggaguucugcgacaugcugcggcuguucgacuucaacaagcaggccauccagcgccucaaggcgccggcccagauguccauccagcugaucaacaaggccgucaacgcccugaucaacgaccagcucgugaugaagaaccaccuccgggacaucaugugcauccccuacugcaacuacagccgcuacugguaccugaaccacacgaccaccggccggaccucccugcccaagugcuggcuggugagcaacggcuccuaccugaacgagacgcacuucagcgacgacaucgagcagcaggccgacaacaugaucaccgagaugcuccagaaggaguacauggagcgccaggggaagaccccgcugggccuggucgaccucuucguguucuccaccagcuucuaccugaucuccaucuuccugcaccuggugaagauccccacgcaccggcacaucgucggcaagagcugccccaagccccaccgccucaaccacauggggaucugcuccugcgggcuguacaagcagccgggcgugcccgugaaguggaagcggugaggacuaguaauaaggaaacuguaugaaugucugugggcaggaagugaagagauccuucuguaaagguuuuuggaauuaugucugcugaauaauaaacuuuuuugaaauaauaaaucugguagaaaaaugagaucucaaaggcucuuuucagagccaccaaaaaaaaaaaaaaaaaaaaaaaaaaaaaaaaaaaaaaaaaaaaaaaaaaaaaaaaaaaaaaaaagaauu

SEQ ID NO: 16034 - RNA, 1781 nt, Artificial Sequence
  mRNA product Design b-4 (hSL-A64-N5) comprising derived and/or modified sequence from LASV(G733-SLE-2010;Clade IV)__AIT17154__GPCmut1 (opt1)
aggagagucccgcagucggcguccagcggcucugcuuguucgugugugugucguugcaggccuuauucaagcuuaccaugggccagaucgugaccuucuuccaggaggucccccacgugaucgaggaggugaugaacaucguccugaucgcccucagcauccuggccgugcugaaggggcucuacaacuucgcgaccugcggcaucguggggcuggucuccuuccugcuccugugcggccgcagcugcacgaccucccuguacaaggggguguacgagcuccagacccuggagcugaacauggagacccucaacaugacgaugccgcugagcugcaccaagaacaacucccaccacuacaucauggugggcaacgagaccggccuggagcucacccugacgaacaccagcaucaucaaccacaaguucugcaaccuguccgacgcccacaagaagaaccucuacgaccacgcccugaugagcaucaucuccaccuuccaccugagcauccccaacuucaaccaguacgaggccauguccugcgacuucaacgggggcaagaucagcguccaguacaaccucucccacagcuacgccggggacgcggccaaccacugcggcaccaucgccaacggggugcugcagacguucaugcggauggccuggggcggcuccuacaucgcgcuggacagcgggugcgaccgcugggacugcaucaugaccuccuaccaguaccucaucauccagaacaccaccugggaggaccacugccaguucagccggcccucccccaucggcuaccuggggcugcucagccagcgcacgcgggacaucuacaucagccgccggcgccggggcaccuucaccuggacccuguccgacagcgagggcaaggacacgcccgggggcuacugccugacccgcuggaugcucaucgaggccgagcugaagugcuucgggaacaccgccguggccaagugcaacgagaagcacgacgaggaguucugcgacaugcugcggcuguucgacuucaacaagcaggccauccagcgccugaaggcgccggcccagauguccauccagcugaucaacaaggccgucaacgcccucaucaacgaccagcugaucaugaagaaccaccuccgggacaucaugugcauccccuacugcaacuacagcaaguacugguaccucaaccacaccacgaccggcaagaccucccugcccaagugcuggcuggugagcaacggguccuaccucaacgagacccacuucagcgacgacaucgagcagcaggccgacaacaugaucacggagaugcugcagaaggaguacauggagcgccagggcaagaccccgcugggccucguggaccuguucgucuucuccaccagcuucuaccugaucuccaucuuccuccaccuggugaagauccccacccaccggcacguggucggcaagagcugccccaagccccaccgccugaaccacauggggaucugcuccugcgggcuguacggccagccgggggugcccgugaaguggaagcggugaggacuaguaauaaggaaacuguaugaaugucugugggcaggaagugaagagauccuucuguaaagguuuuuggaauuaugucugcugaauaauaaacuuuuuugaaauaauaaaucugguagaaaaaugagaucucaaaggcucuuuucagagccaccaaaaaaaaaaaaaaaaaaaaaaaaaaaaaaaaaaaaaaaaaaaaaaaaaaaaaaaaaaaaaaaaagaauu

SEQ ID NO: 16035 - RNA, 1781 nt, Artificial Sequence
  mRNA product Design b-4 (hSL-A64-N5) comprising derived and/or modified sequence from MOPV/LASV reassortant(IGS-1;Clade IV)__AFY05576__GPCmut1 (opt1)
aggagagucccgcagucggcguccagcggcucugcuuguucgugugugugucguugcaggccuuauucaagcuuaccaugggccagaucgugaccuucuuccaggaggucccccacgugaucgaggaggugaugaacaucguccugaucgcccucagcgugcuggccgugcugaaggggcucuacaacuucgcgaccugcggccuggucgggcuggugacguuccuccugcugugcggccgcuccugcaccaccagccucuacaaggggguguacgagcugcagacccuggagcucaacauggagacgcugaacaugaccaugccgcuguccugcaccaagaacaacagccaccacuacaucauggucggcaacgagaccggccucgagcugacgcugaccaacaccuccaucaucaaccacaaguucugcaaccucagcgacgcccacaagaagaaccuguacgaccacgcccugauguccaucaucagcaccuuccaccucuccauccccaacuucaaccaguacgaggccaugagcugcgacuucaacgggggcaagaucuccgugcaguacaaccugagccacuccuacgccggggacgcggccaaccacugcggcacgguggccaacgggguccugcagaccuucaugcggauggccuggggcggcagcuacaucgcgcucgacuccgggugcggcaacugggacugcaucaugaccagcuaccaguaccugaucauccagaacaccacgugggaggaccacugccaguucucccgccccagccccaucggguaccugggccuccugucccagcggacccgcgacaucuacaucagccggcgccggcgcggcaccuucaccuggacgcugagcgacuccgagggggaggacaccccgggcggguacugccucacccgguggaugcugaucgaggccgagcugaagugcuucggcaacaccgccguggccaagugcaacgagaagcacgacgaggaguucugcgacaugcuccgccuguucgacuucaacaagcaggccauccagcggcugaaggcgcccgcccagaugagcauccagcucaucaacaaggccgugaacgcccugaucaacgaccagcugaucaugaagaaccaccuccgcgacaucaugugcauccccuacugcaacuacuccaaguacugguaccugaaccacacgaccaccgggcggaccagccugcccaagugcuggcucgucuccaacggcagcuaccugaacgagacgcacuucuccgacgacaucgagcagcaggccgacaacaugaucaccgagaugcugcagaaggaguacauggagcgccagggcaagaccccgcucgggcugguggaccuguucguguucagcaccuccuucuaccucaucagcaucuuccugcaccuggucaagauccccacgcaccggcacaucgugggcaaguccugccccaagccccaccgccugaaccacauggggaucugcagcugcggccucuacaagcagccgggggugcccgucaaguggaagcggugaggacuaguaauaaggaaacuguaugaaugucugugggcaggaagugaagagauccuucuguaaagguuuuuggaauuaugucugcugaauaauaaacuuuuuugaaauaauaaaucugguagaaaaaugagaucucaaaggcucuuuucagagccaccaaaaaaaaaaaaaaaaaaaaaaaaaaaaaaaaaaaaaaaaaaaaaaaaaaaaaaaaaaaaaaaaagaauu

SEQ ID NO: 16036 - RNA, 1781 nt, Artificial Sequence
  mRNA product Design b-4 (hSL-A64-N5) comprising derived and/or modified sequence from LASV(LM765-SLE-2012;Clade IV)__AIT17814__GPCmut1 (opt1)
aggagagucccgcagucggcguccagcggcucugcuuguucgugugugugucguugcaggccuuauucaagcuuaccaugggccagaucgugaccuucuuccaggaggucccccacgugaucgaggaggugaugaacaucguccugaucgcccucagcauccuggccgugcugaaggggcucuacaacuucgcgaccugcggccugguggggcuggucacguuccuccugcugugcggccgcuccugcaccaccagccucuacaaggggguguacgagcugcagacccuggagcucaacauggagacgcugaacaugaccaugccgcuguccugcaccaagaacaacagccaccacuacaucauggugggcaacgagaccggccucgagcugacgcugaccaacaccuccaucaucgaccacaaguucugcaaccucagcgacgcccaccggaagaaccuguacgaccacgcccugauguccaucaucagcaccuuccaccucuccauccccaacuucaaccaguacgaggccaugagcugcgacuucaacgggggcaagaucuccguccaguacaaccugagccacuccuacgccaaggacgcggccgaccacugcgggacgguggccaacggcgugcugcagaccuucaugcgcauggccuggggcgggagcuacaucgcgcucgacuccggcugcgggcggugggacugcaucaugaccagcuaccaguaccugaucauccagaacaccacgugggaggaccacugccaguucucccgccccagccccaucggcuaccuggggcuccugucccagcggacccgcgacaucuacaucagccggcgccggcgcggcaccuucaccuggacgcugagcgacuccgagggcaaggacacccccgggggcuacugccucacccgguggaugcugaucgaggccgagcugaagugcuucgggaacaccgccgucgccaagugcaacgagaagcacgacgaggaguucugcgacaugcuccgccuguucgacuucaacaagcaggccauccagcggcugaaggcgccggcccagaugagcauccagcucaucaacaaggccgugaacgcccugaucaacgaccagcugaucaugaagaaccaccuccgcgacaucaugugcauccccuacugcaacuacuccaaguacugguaccugaaccacacgaccaccggcaagaccagccugcccaagugcuggcucguguccaacgggagcuaccugaacgagacgcacuucuccgacgacaucgagcagcaggccgacaacaugaucaccgagaugcugcagaaggaguacauggagcggcagggcaagaccccgcucggccuggucgaccuguucguguucagcaccuccuucuaccucaucagcaucuuccugcaccuggugaagauccccacgcaccgccacaucgucgggaagcccugccccaagccgcaccggcugaaccacaugggcaucugcuccugcgggcucuacaagcagcccggcgugcccgugaaguggaagcgcugaggacuaguaauaaggaaacuguaugaaugucugugggcaggaagugaagagauccuucuguaaagguuuuuggaauuaugucugcugaauaauaaacuuuuuugaaauaauaaaucugguagaaaaaugagaucucaaaggcucuuuucagagccaccaaaaaaaaaaaaaaaaaaaaaaaaaaaaaaaaaaaaaaaaaaaaaaaaaaaaaaaaaaaaaaaaagaauu

SEQ ID NO: 16037 - RNA, 1781 nt, Artificial Sequence
  mRNA product Design b-4 (hSL-A64-N5) comprising derived and/or modified sequence from LASV(LM776-SLE-2012;Clade IV)__AIT17824__GPCmut1 (opt1)
aggagagucccgcagucggcguccagcggcucugcuuguucgugugugugucguugcaggccuuauucaagcuuaccaugggccagaucgugaccuucuuccaggaggucccccacgugaucgaggaggugaugaacaucguccugaucgcccucagcauccuggccgugcugaaggggcucuacaacuucgcgaccugcggccugguggggcuggucacguuccuccugcugugcggccgcuccugcaccaccagcguguacaaggggguguacgagcuccagacccuggagcugaacauggagacgcucaacaugaccaugccgcuguccugcaccaagaacaacagccaccacuacaucauggucggcaacgagaccggccuggagcucacgcugaccaacaccuccaucaucaaccacaaguucugcaaccugagcgacgcccacaagaagaaccucuacgaccacgcccugauguccaucaucagcaccuuccaccuguccauccccaacuucaaccaguacgaggccaugagcugcgacuucaacgggggcaagaucuccgugcaguacaaccucagccacuccuacgccggggacgcggccaaccacugcggcacgguggccaacgggguccugcagaccuucaugcggauggccuggggcggcagcuacaucgcgcuggacuccgggugcggcaagugggacugcaucaugaccagcuaccaguaccucaucauccagaacaccacgugggaggaccacugccaguucucccgccccagccccaucggguaccugggccugcucucccagcggacccgcgacaucuacaucagccggcgccggcgcggcaccuucaccuggacgcugagcgacuccgaggggaaggacaccccgggcggguacugccugacccgguggaugcucaucgaggccgagcugaagugcuucggcaacaccgccguggccaagugcaacgagaagcacgacgaggaguucugcgacaugcugcgccucuucgacuucaacaagcaggccauccagcggcugaaggcgcccgcccagaugagcauccagcugaucaacaaggccgugaacgcccucaucaacgaccagcugaucaugaagaaccaccuccgcgacaucaugugcauccccuacugcaacuacuccaaguacugguaccugaaccacacgaccaccgggaagaccagccugcccaagugcuggcuggucuccaacggcagcuaccucaacgagacgcacuucuccgacgacaucgagcagcaggccgacaacaugaucaccgagaugcugcagaaggaguacauggagcggcagggcaagaccccgcuggggcucguggaccuguucguguucagcaccuccuucuaccugaucagcaucuuccuccaccuggucaagauccccacgcaccgccacaucgugggcaaguccugccccaagccccaccggcugaaccacauggggaucugcagcugcggccuguacaagcagccgggggugcccguccgcuggaagcggugaggacuaguaauaaggaaacuguaugaaugucugugggcaggaagugaagagauccuucuguaaagguuuuuggaauuaugucugcugaauaauaaacuuuuuugaaauaauaaaucugguagaaaaaugagaucucaaaggcucuuuucagagccaccaaaaaaaaaaaaaaaaaaaaaaaaaaaaaaaaaaaaaaaaaaaaaaaaaaaaaaaaaaaaaaaaagaauu

SEQ ID NO: 16038 - RNA, 1781 nt, Artificial Sequence
  mRNA product Design b-4 (hSL-A64-N5) comprising derived and/or modified sequence from LASV(Mad39;Clade IV)__ANH09722__GPCmut1 (opt1)
aggagagucccgcagucggcguccagcggcucugcuuguucgugugugugucguugcaggccuuauucaagcuuaccaugggccagaucgugaccuucuuccaggaggucccccacgugaucgaggaggugaugaacaucguccugaucgcccucagcauccuggccgugcugaaggggcucuacaacguggcgaccugcggccugaucgggcuggucacguuccuccugcugugcggccgcuccugcaccaccacccucuacaaggggguguacgagcugcaggcccuggagcucaacauggagacgcugaacaugaccaugccgcugagcugcaccaagaacaacucccaccacuacauccgggugggcaacgagaccggccucgagcugacgcugaccaacaccagccucaucaaccacaaguucugcaaccuguccgacgcccacaagaagaaccuguacgaccacgcccucaugagcaucaucuccaccuuccaccugagcauccccaacuucaaccaguacgaggccauguccugcgacuucaacgacgggaagaucagcguccaguacaaccugucccacacguacgcgggcgacaccgccaaccacugcgggaccguggccaacggcgugcuccagaccuucaugcgcauggccuggggcgggagcuacaucgcgcuggacuccggcugcgggggcugggacugcaucaugacgagcuaccaguaccugaucauccagaacaccaccugggaggaccacugccaguucucccggcccagccccaucggguaccucggccugcugucccagcgcacccgggacaucuacaucagccgccggcgccggggcacguucaccuggacccucuccgacagcgaggggaaggacaccccgggcggguacugccugacgcgcuggaugcugaucgaggccgagcucaagugcuucggcaacaccgccgucgccaagugcaacgagaagcacgacgaggaguucugcgacaugcugcggcuguucgacuucaacaagcaggccauccagcgccucaaggcgcccgcccagaugagcauccagcugaucaacaaggccgugaacgcccugaucaacgaccagcucaucaugaagaaccaccuccgggacaucaugugcauccccuacugcaacuacuccaaguacugguaccugaaccacaccgugaccgggaagacgagccugcccaagugcuggcuggucuccaacggcagcuaccugaacgagacccacuucuccgacgacaucgagcagcaggccgacaacaugaucaccgagaugcuccagaaggaguacauggagcgccagggcaagaccccgcuggggcugguggaccucuucguguucagcacguccuucuaccugaucagcaucuuccugcaccuggucaagauccccacccaccggcacguggugggcaagcccugccccaagccgcaccgccucaaccacauggggaucugcuccugcggcuucuacaagcagcccgggguccccgugcgguggaagcgcugaggacuaguaauaaggaaacuguaugaaugucugugggcaggaagugaagagauccuucuguaaagguuuuuggaauuaugucugcugaauaauaaacuuuuuugaaauaauaaaucugguagaaaaaugagaucucaaaggcucuuuucagagccaccaaaaaaaaaaaaaaaaaaaaaaaaaaaaaaaaaaaaaaaaaaaaaaaaaaaaaaaaaaaaaaaaagaauu

SEQ ID NO: 16039 - RNA, 1781 nt, Artificial Sequence
  mRNA product Design b-4 (hSL-A64-N5) comprising derived and/or modified sequence from LASV(Z0947-SLE-2011;Clade IV)__AIT17840__GPCmut1 (opt1)
aggagagucccgcagucggcguccagcggcucugcuuguucgugugugugucguugcaggccuuauucaagcuuaccaugggccagaucgugaccuucuuccaggaggucccccacgugaucgaggaggugaugaacaucguccugaucgcccucagcauccuggccgugcugaaggggcucuacaacuucgcgaccugcggccugguggggcuggucacguuccuccugcugugcggccgcuccugcaccaucagccucuacaaggggguguacgagcugcagacccuggagcucaacauggagacccugaacaugacgaugccgcuguccugcaccaagaacaacagccaccacuacaucauggugggcaacgagaccggccucgagcugacccugacgaacaccuccaucaucaaccacaaguucugcaaccucagcgacgcccacaagaagaaccuguacgaccacgcccugauguccaucaucagcaccuuccaccucuccauccccaacuucaaccaguacgaggccaugagcugcgacuucaacgggggcaagaucuccguccaguacaaccugagccacuccuacgccggggacgcggccaaccacugcggcaccguggccaacggggugcugcagacguucaugcggauggccuggggcggcagcuacaucgcgcucgacuccgggugcgaccgcugggacugcaucaugaccagcuaccaguaccugaucauccagaacaccaccugggaggaccacugccaguucucccggcccagccccaucggcuaccuggggcuccugucccagcgcacgcgggacaucuacaucagccgccggcgccggggcaccuucaccuggacccugagcgacuccgagggcaaggacacgcccgggggcuacugccucacccgcuggaugcugaucgaggccgagcugaagugcuucgggaacaccgccgucgccaagugcaacgagaagcacgacgaggaguucugcgacaugcuccggcuguucgacuucaacaagcaggccauccagcgccugaaggcgccggcccagaugagcauccagcucaucaacaaggccgugaacgcccugaucaacgaccagcugaucaugaagaaccaccuccgggacaucaugugcauccccuacugcaacuacuccaaguacugguaccugaaccacaccacgaccggcaagaccagccugcccaagugcuggcucguguccaacgggagcuaccugaacgagacccacuucuccgacgacaucgagcagcaggccgacaacaugaucacggagaugcugcagaaggaguacauggagcgccagggcaagaccccgcucggccuggucgaccuguucguguucagcaccuccuucuaccucaucagcaucuuccugcaccuggugaagauccccacccaccggcacaucgucgggaagcccugccccaagccgcaccgccugaaccacaugggcaucugcuccugcgggcucuacaagcagcccggcgugcccgugaaguggaagcggugaggacuaguaauaaggaaacuguaugaaugucugugggcaggaagugaagagauccuucuguaaagguuuuuggaauuaugucugcugaauaauaaacuuuuuugaaauaauaaaucugguagaaaaaugagaucucaaaggcucuuuucagagccaccaaaaaaaaaaaaaaaaaaaaaaaaaaaaaaaaaaaaaaaaaaaaaaaaaaaaaaaaaaaaaaaaagaauu

SEQ ID NO: 16040 - RNA, 1781 nt, Artificial Sequence
  mRNA product Design b-4 (hSL-A64-N5) comprising derived and/or modified sequence from LASV(Josiah;Clade IV)__NP_694870__GPCmut1 (opt4)
aggagagucccgcagucggcguccagcggcucugcuuguucgugugugugucguugcaggccuuauucaagcuuaccaugggccagaucgugaccuucuuccaggaggugccccacgugaucgaggaggugaugaacaucgugcugaucgcccugagcgugcuggccgugcugaagggccuguacaacuucgccaccugcggccuggugggccuggugaccuuccugcugcugugcggcagaagcugcaccaccagccuguacaagggcguguacgagcugcagacccuggagcugaacauggagacccugaacaugaccaugccccugagcugcaccaagaacaacagccaccacuacaucauggugggcaacgagaccggccuggagcugacccugaccaacaccagcaucaucaaccacaaguucugcaaccugagcgacgcccacaagaagaaccuguacgaccacgcccugaugagcaucaucagcaccuuccaccugagcauccccaacuucaaccaguacgaggccaugagcugcgacuucaacggcggcaagaucagcgugcaguacaaccugagccacagcuacgccggcgacgccgccaaccacugcggcaccguggccaacggcgugcugcagaccuucaugagaauggccuggggcggcagcuacaucgcccuggacagcggcugcggcaacugggacugcaucaugaccagcuaccaguaccugaucauccagaacaccaccugggaggaccacugccaguucagcagacccagccccaucggcuaccugggccugcugagccagagaaccagagacaucuacaucagcagaagacgccggggcaccuucaccuggacccugagcgacagcgagggcaaggacacccccggcggcuacugccugaccagauggaugcugaucgaggccgagcugaagugcuucggcaacaccgccguggccaagugcaacgagaagcacgacgaggaguucugcgacaugcugagacuguucgacuucaacaagcaggccauccagagacugaaggcccccgcccagaugagcauccagcugaucaacaaggccgugaacgcccugaucaacgaccagcugaucaugaagaaccaccugagagacaucaugugcauccccuacugcaacuacagcaaguacugguaccugaaccacaccaccaccggcagaaccagccugcccaagugcuggcuggugagcaacggcagcuaccugaacgagacccacuucagcgacgacaucgagcagcaggccgacaacaugaucaccgagaugcugcagaaggaguacauggagagacagggcaagaccccccugggccugguggaccuguucguguucagcaccagcuucuaccugaucagcaucuuccugcaccuggugaagauccccacccacagacacaucgugggcaagagcugccccaagccccacagacugaaccacaugggcaucugcagcugcggccuguacaagcagcccggcgugcccgugaaguggaagagaugaggacuaguaauaaggaaacuguaugaaugucugugggcaggaagugaagagauccuucuguaaagguuuuuggaauuaugucugcugaauaauaaacuuuuuugaaauaauaaaucugguagaaaaaugagaucucaaaggcucuuuucagagccaccaaaaaaaaaaaaaaaaaaaaaaaaaaaaaaaaaaaaaaaaaaaaaaaaaaaaaaaaaaaaaaaaagaauu

SEQ ID NO: 16041 - RNA, 1778 nt, Artificial Sequence
  mRNA product Design b-4 (hSL-A64-N5) comprising derived and/or modified sequence from LASV(LP;Clade I)__AAF86701__GPCmut1 (opt4)
aggagagucccgcagucggcguccagcggcucugcuuguucgugugugugucguugcaggccuuauucaagcuuaccaugggccagaucaucaccuucuuccaggaggugccccacgugaucgaggaggugaugaacaucgugcugaucgcccugagccugcuggccauccugaagggccuguacaacaucgccaccugcggcaucaucggccugguggccuuccuguuccugugcggcaagagcugcagccugacccugaagggcggcuacgagcugcagacccuggagcugaacauggagacccugaacaugaccaugccccugagcugcaccaagaacagcagccaccacuacaucagagugggcaacgagaccggccuggagcugacccugaccaacaccagcaucaucaaccacaaguucugcaaccugagcgacgcccacaagaagaaccuguacgaccacgcccugaugagcaucaucagcaccuuccaccugagcauccccaacuucaaccaguacgaggccaugagcugcgacuucaacggcggcaagaucagcgugcaguacaaccugagccacagcuacgccggcgacgccgccgagcacugcggcaccguggccaacggcgugcugcagaccuucaugagaauggccuggggcggcagauacaucgcccuggacagcggcugcggcaacugggacugcaucaugaccagcuaccaguaccugaucauccagaacaccaccugggaggaccacugccaguucagcagacccagccccaucggcuaccugggccugcugagccagagaaccagagacaucuacaucagcagaagacgccggggcaccuucaccuggacccugagcgacagcgagggcaacgagacccccggcggcuacugccugaccagauggaugcugaucgaggccgagcugaagugcuucggcaacaccgccguggccaagugcaacgagaagcacgacgaggaguucugcgacaugcugagacuguucgacuucaacaagcaggccaucagaagacugaaggcccccgcccagaugagcauccagcugaucaacaaggccgugaacgcccugaucaacgaccagcugaucaugaagaaccaccugagagacaucaugugcauccccuacugcaacuacagcaaguacugguaccugaaccacaccagcagcggcagaaccagccugcccaagugcuggcugaucagcaacggcagcuaccugaacgagacccaguucagcgacgacaucgagcagcaggccgacaacaugaucaccgagaugcugcagaaggaguacaucgagagacagggcaagaccccccugggccugguggacaucuucaucuucagcaccagcuucuaccugaucagcaucuuccugcaccugaucaagauccccacccacagacacaucgugggcaagcccugccccaagccccacagacugaaccacaugggcgugugcagcugcggccuguacaagcaccccggcgugcccaccaaguggaagagaugaggacuaguaauaaggaaacuguaugaaugucugugggcaggaagugaagagauccuucuguaaagguuuuuggaauuaugucugcugaauaauaaacuuuuuugaaauaauaaaucugguagaaaaaugagaucucaaaggcucuuuucagagccaccaaaaaaaaaaaaaaaaaaaaaaaaaaaaaaaaaaaaaaaaaaaaaaaaaaaaaaaaaaaaaaaaagaauu

SEQ ID NO: 16042 - RNA, 1778 nt, Artificial Sequence
  mRNA product Design b-4 (hSL-A64-N5) comprising derived and/or modified sequence from LASV(803213;Clade II)__AAF86703__GPCmut1 (opt4)
aggagagucccgcagucggcguccagcggcucugcuuguucgugugugugucguugcaggccuuauucaagcuuaccaugggccagaucaucaccuucuuccaggaggugccccacgugaucgaggaggugaugaacaucgugcugaucgcccugagccugcuggccauccugaagggcaucuacaacguggccaccugcggccuguucggccugaucagcuuccugcugcugugcggcagaagcugcagcgugaccuacaagggcguguacgagcugcagacccuggagcugaacauggccaaccugaacaugaccaugccccugagcugcaccaagaacaacagccaccacuacaucauggugggcaacgagaccggccuggagcugacccugaccaacaccagcaucaucaaccacaaguucugcaaccugagcgacgcccacaagaagaaccuguacgaccacgcccugaugagcaucaucagcaccuuccaccugagcauccccaacuucaaccaguacgaggccaugagcugcgacuucaacggcggcaagaucagcgugcaguacaaccugagccacagcuucgccguggacgccgccaaccacugcggcaccaucgccaacggcgugcugcagaccuucaugagaauggccuggggcggcagcuacaucgcccuggacagcggcugcggcaacugggacugcaucaugaccagcuaccaguaccugaucauccagaacaccaccugggaggaccacugccaguucagcagacccagccccaucggcuaccugggccugcugagccagagaaccagagacaucuacaucagcagaagacgccggggcaccuucaccuggacccugagcgacagcgagggcaacgaggcccccggcggcuacugccugaccagauggaugcugaucgaggccgagcugaagugcuucggcaacaccgccguggccaagugcaacgagaagcacgacgaggaguucugcgacaugcugagacuguucgacuucaacaagcaggccaucaagagacugaagacccccgcccagaugagcauccagcugaucaacaaggccgugaacgcccugaucaacgaccagcugaucaugaagaaccaccugagagacaucaugugcauccccuacugcaacuacagcagauacugguaccugaaccacaccgugaccggcaagaccagccugcccagaugcuggcuggugagcaacggcagcuaccugaacgagacccacuucagcgacgacaucgagcagcaggccgacaacaugaucaccgagaugcugcagaaggaguacauggacagacagggcaagaccccccugggccugguggaccuguucguguucagcaccagcuucuaccugaucagcaucuuccugcaccuggugaagauccccacccacagacacaucgugggcaagcccugccccaagccccacagacugaaccacaugggcaucugcagcugcggccuguacaagcaccccggcgugcccgugaaguggaagagaugaggacuaguaauaaggaaacuguaugaaugucugugggcaggaagugaagagauccuucuguaaagguuuuuggaauuaugucugcugaauaauaaacuuuuuugaaauaauaaaucugguagaaaaaugagaucucaaaggcucuuuucagagccaccaaaaaaaaaaaaaaaaaaaaaaaaaaaaaaaaaaaaaaaaaaaaaaaaaaaaaaaaaaaaaaaaagaauu

SEQ ID NO: 16043 - RNA, 1778 nt, Artificial Sequence
  mRNA product Design b-4 (hSL-A64-N5) comprising derived and/or modified sequence from LASV(GA391;Clade III)__CAA36645__GPCmut1 (opt4)
aggagagucccgcagucggcguccagcggcucugcuuguucgugugugugucguugcaggccuuauucaagcuuaccaugggccagaucgugaccuucuuccaggaggugccccacgugaucgaggaggugaugaacaucgugcugaucgcccugagcauccuggccauccugaagggccuguacaacguggccaccugcggccugaucggccuggugaccuuccugcugcugagcggcagaagcugcagccugaucuacaagggcaccuacgagcugcagacccuggagcugaacauggagacccugaacaugaccaugccccugagcugcaccaagaacaacagccaccacuacaucagagugggcaacgagaccggccuggagcugacccugaccaacaccagcauccugaaccacaaguucugcaaccugagcgacgcccacaagagaaaccuguacgaccacagccugaugagcaucaucagcaccuuccaccugagcauccccaacuucaaccaguacgaggccaugagcugcgacuucaacggcggcaagaucaccgugcaguacaaccugagccacagcuucgccguggacgccgccggccacugcggcacccuggccaacggcgugcugcagaccuucaugagaauggccuggggcggcagcuacaucgcccuggacagcggcugcggcaacugggacugcaucaugaccagcuaccaguaccugaucauccagaacaccaccugggacgaccacugccaguucagcagacccagccccaucggcuaccugggccugcugagccagagaaccagagacaucuacaucagcagaagacgccggggcaccuucaccuggacccugagcgacagcgagggcaacgagacccccggcggcuacugccugaccagauggaugcugaucgaggccgagcugaagugcuucggcaacaccgccguggccaagugcaacgagaagcacgacgaggaguucugcgacaugcugagacuguucgacuucaacaagcaggccaucagaagacugaagacccccgcccagaugagcauccagcugaucaacaaggccgugaacgcccugaucaacgaccagcugaucaugaagaaccaccugagagacaucaugugcauccccuacugcaacuacagcagauacugguaccugaaccacaccagcaccggcaagaccagccugcccagaugcuggcugaucagcaacggcagcuaccugaacgagaccaaguucagcgacgacaucgagcagcaggccgacaacaugaucaccgagaugcugcagaaggaguacaucgacagacagggcaagaccccccugggccugguggaccuguucguguucagcaccagcuucuaccugaucagcaucuuccugcaccuggugaagauccccacccacagacacaucgugggcaagcccugccccaagccccacagacugaaccacaugggcaucugcagcugcggccuguacaagcagcccggcgugcccgugagauggaagagaugaggacuaguaauaaggaaacuguaugaaugucugugggcaggaagugaagagauccuucuguaaagguuuuuggaauuaugucugcugaauaauaaacuuuuuugaaauaauaaaucugguagaaaaaugagaucucaaaggcucuuuucagagccaccaaaaaaaaaaaaaaaaaaaaaaaaaaaaaaaaaaaaaaaaaaaaaaaaaaaaaaaaaaaaaaaaagaauu

SEQ ID NO: 16044 - RNA, 1781 nt, Artificial Sequence
  mRNA product Design b-4 (hSL-A64-N5) comprising derived and/or modified sequence from LASV(AV;Clade V)__CCA30314__GPCmut1 (opt4)
aggagagucccgcagucggcguccagcggcucugcuuguucgugugugugucguugcaggccuuauucaagcuuaccaugggccagaucgugaccuucuuccaggaggugccccacgugaucgaggaggugaugaacaucgugcugaucgcccugagcauccuggccgugcugaagggccuguacaacaucgccaccugcggccugaucggccugaucaccuuccugcugcugugcggcagaagcugcagcagcaaccuguacaagggcguguacgagcugcagagccuggaccugaacauggagacccugaacaugaccaugccccugagcugcaccaagaacaacagccaccacuacaucagagugggcaacgacaccggccuggagcugacccugaccaacaccagcauccugaaccacaaguucugcaaccugagcgacgcccacaagaaggaccuguacgaccacgcccugaugagcaucaucagcaccuuccaccugagcauccccaacuucaaccaguacgaggccaugagcugcgacuucaacggcggcaagaucagcgugcaguacaaccugagccacagcuacgccaucgacgccgccaaccacugcggcaccguggccaacggcauccugcagaccuucaugagaauggccuggggcggcagcuacaucgcccuggacagcggcugcggcaacugggacugcaucaugaccagcuaccaguaccugaucauccagaacaccaccugggagaaccacugccaguucagcagacccagccccaucggcuaccugggccugcugagccagagaaccagagacaucuacaucagcagaagacgccggggcaccuucaccuggacccugagcgacagcgagggcaacgccacccccggcggcuacugccugaccagauggaugcugaucgaggccgagcugaagugcuucggcaacaccgccguggccaagugcaacgagaagcacgacgaggaguucugcgacaugcugagacuguucgacuucaacaagcaggccaucagcagacugaagagccccgcccagaugagcauccagcugaucaacaaggccgugaacgcccugaucaacgaccagcugaucaugaagaaccaccugagagacaucaugugcauccccuacugcaacuacagcaaguacugguaccugaaccacaccaucaccggcaagaccagccugcccaagugcuggcuggugagcaacggcagcuaccugaacgagacccacuucagcgacgacaucgagcagcaggccgacaacaugaucaccgagaugcugcagaaggaguacauggagagacagggcaagaccccccugggccugguggaccuguucguguucagcaccagcuucuaccugaucagcaucuuccugagacuggugaagauccccacccacagacacaucgugggcaagcccugccccaagccccacagacugaaccacaugggcaucugcagcugcggccuguacaagcagcccggcgugcccgugagauggaagagaugaggacuaguaauaaggaaacuguaugaaugucugugggcaggaagugaagagauccuucuguaaagguuuuuggaauuaugucugcugaauaauaaacuuuuuugaaauaauaaaucugguagaaaaaugagaucucaaaggcucuuuucagagccaccaaaaaaaaaaaaaaaaaaaaaaaaaaaaaaaaaaaaaaaaaaaaaaaaaaaaaaaaaaaaaaaaagaauu

SEQ ID NO: 16045 - RNA, 1778 nt, Artificial Sequence
  mRNA product Design b-4 (hSL-A64-N5) comprising derived and/or modified sequence from LASV(Togo/2016/7082;Clade VI)__AMR44577__GPCmut1 (opt4)
aggagagucccgcagucggcguccagcggcucugcuuguucgugugugugucguugcaggccuuauucaagcuuaccaugggccagaucaucaccuucuuccaggaggugccccacgugaucgaggaggugaugaacaucgugcugaucgcccugagccugcuggccauccugaagggcguguacaacguggccaccugcggcaucaucggccuggugaccuuccuguuccugugcggcagaagcugcagccugaucuacaagggcagcuacgagcugcagacccuggagcugaacauggagacccugaacaugaccaugccccugagcugcaccaagaacagcagccaccacuacaucagagugggcaacgagaccggccuggagcugacccugaccaacaccagcaucaucaaccacaaguucugcaaccugagcgacgcccacaagagaaaccuguacgaccacgcccugaugagcauccugagcaccuuccaccugagcauccccaacuucaaccaguacgaggccaugagcugcgacuucaacggcggcaagaucagcgugcaguacaaccugagccacgccuacgccguggacgccgccgagcacugcggcaccguggccaacggcgugcugcagaccuucaugagaauggccuggggcggcagcuacaucgcccuggacagcggcugcggcaacugggacugcaucaugaccagcuaccaguaccugaucauccagaacaccaccugggaggaccacugccaguucagcagacccagccccaucggcuaccugggccugcugagccagagaaccagagacaucuacaucagcagaagacgccggggcaccuucaccuggacccugagcgacagcgagggcaacgagacccccggcggcuacugccugaccagauggaugcugaucgaggccgagcugaagugcuucggcaacaccgccguggccaagugcaacgagaagcacgacgaggaguucugcgacaugcugagacuguucgacuucaacaagcaggccauccagagacugaagagccccgcccagaugagcauccagcugaucaacaaggccgugaacgcccugaucaacgaccagcugaucaugaagaaccaccugagagacaugaugugcauccccuacugcaacuacagcaaguacugguaccugaaccacaccagcagcggcagaaccagccugcccaagugcuggcuggugagcaacggcagcuaccugaacgagacccacuucagcgacgacaucgagcagcaggccgacaacaugaucaccgagaugcugcagaaggaguacaucgacagacagggcaagaccccccugggccugguggaccuguucguguucagcaccagcuucuaccugaucagcaucuuccugcaccugaucaagauccccacccacagacacaucgugggcaagcccugccccaagccccacagacugaaccacaugggcaucugcagcugcggccuguacaagcagcccggcgugcccaccagauggaagagaugaggacuaguaauaaggaaacuguaugaaugucugugggcaggaagugaagagauccuucuguaaagguuuuuggaauuaugucugcugaauaauaaacuuuuuugaaauaauaaaucugguagaaaaaugagaucucaaaggcucuuuucagagccaccaaaaaaaaaaaaaaaaaaaaaaaaaaaaaaaaaaaaaaaaaaaaaaaaaaaaaaaaaaaaaaaaagaauu

SEQ ID NO: 16046 - RNA, 1778 nt, Artificial Sequence
  mRNA product Design b-4 (hSL-A64-N5) comprising derived and/or modified sequence from LASV(KAK-428;Clade n.d. (VII))__ANH09740__GPCmut1 (opt4)
aggagagucccgcagucggcguccagcggcucugcuuguucgugugugugucguugcaggccuuauucaagcuuaccaugggccagaucgugaccuucuuccaggaggugccccacgugaucgaggaggugaugaacaucgugcugaucgcccugagccugcuggccauccugaagggccuguacaacuucgccaccugcggcgugaucggccugaucaccuuccugcugcugugcggcagaagcugcagcgccaccuacaagggccaguacgagcugcagacccuggagcugaacauggagagccugaacaugaccaugccccugagcugcaccaagaacaacagccaccacuacaucagagccggcaacaacaccggccuggagcugacccugaccaacaccagcaucaucagccacaaguucugcaaccugagcgacgcccacaagaagaaccuguacgaccacacccugaugagcaucaucaccaccuuccaccugagcauccccaacuucaaccaguacgaggccaugagcugcgacuucaacggcggcaagaucagcauccaguacaaccugagccacagcuacgccggcgacgccgcccagcacugcggcaccguggccaacggcgugcugcagaccuucaugagaauggccuggggcggcagcuaccuggcccuggacagcggcugcagaggcugggacugcaucaucagcagcuaccaguaccugaucauccagaacaccaccugggacgaccacugccaguucagcagacccagccccaucggcuaccugggcuucgugagccagaagaccagagacaucuacaucagcagaagacgccggggcaccuucaccuggacccugagcgacagcgagggccacgacaugcccggcggcuacugccugaccagauggaugcugaucgaggccgaccugaagugcuucggcaacaccgccguggccaagugcaacgagaagcacgacgaggaguucugcgacauguggagacuguucgacuucaacaagcaggccauccagagacugaaggcccccgcccagaugaacauccagcugaucaacaaggccgugaacgcccugaucaacgaccagcugaugaugaagaaccaccugagagacaucaugugcauccccuacugcaacuacagcaaguucugguaccugaacaacaccaccaccggcagaaccagccugcccagaugcuggcugaucagcaacggcagcuaccugaacgagacccacuucagcgacgacaucgagcagcaggccgacaacaugaucaccgagaugcugcagaaggaguacauggacagacagggcaagaccccccugggccugguggaccuguucguguucagcaccagcuucuaccugaucaccaucuuccugcaccuggugaagauccccacccacagacacaucgugggcaagcccugccccaagccccacagacugaaccacaugggcaucugcagcugcggccuguacaagcagcccggcgugcccgugagauggaagagaugaggacuaguaauaaggaaacuguaugaaugucugugggcaggaagugaagagauccuucuguaaagguuuuuggaauuaugucugcugaauaauaaacuuuuuugaaauaauaaaucugguagaaaaaugagaucucaaaggcucuuuucagagccaccaaaaaaaaaaaaaaaaaaaaaaaaaaaaaaaaaaaaaaaaaaaaaaaaaaaaaaaaaaaaaaaaagaauu

SEQ ID NO: 16047 - RNA, 1778 nt, Artificial Sequence; identical to SEQ ID NO: 16041
  mRNA product Design b-4 (hSL-A64-N5) comprising derived and/or modified sequence from LASV(Pinneo-NIG-1969;Clade I)__AIT17836__GPCmut1 (opt4)

SEQ ID NO: 16048 - RNA, 1778 nt, Artificial Sequence
  mRNA product Design b-4 (hSL-A64-N5) comprising derived and/or modified sequence from LASV(ISTH0009-NIG-2011;Clade II)__AIT17404__GPCmut1 (opt4)
aggagagucccgcagucggcguccagcggcucugcuuguucgugugugugucguugcaggccuuauucaagcuuaccaugggccagaucaucaccuucuuccaggaggugccccacgugaucgaggaggugaugaacaucgugcugaucgcccugagccugcuggccauccugaagggcaucuacaacguggccaccugcggccuguucggccuggugagcuuccugcugcugugcggcagaagcugcagcaccaccuacaagggcguguacgagcugcagacccuggagcuggacauggccagccugaacaugaccaugccccugagcugcaccaagaacaacagccaccacuacaucauggugggcaacgagaccggccuggagcugacccugaccaacaccagcaucaucaaccacaaguucugcaaccugagcgacgcccacaagaagaaccuguacgaccacgcccugaugagcaucaucagcaccuuccaccugagcauccccaacuucaaccaguacgaggccaugagcugcgacuucaacggcggcaagaucagcgugcaguacaaccugagccacgccuacgccguggacgccgccaaccacugcggcaccaucgccaacggcgugcugcagaccuucaugagaauggccuggggcggcagcuacaucgcccuggacagcggcugcggcagcugggacugcaucaugaccagcuaccaguaccugaucauccagaacaccaccugggaggaccacugccaguucagcagacccagccccaucggcuaccugggccugcugagccagagaaccagagacaucuacaucagcagaagacgccggggcaccuucaccuggacccugagcgacagcgagggcaacgagacccccggcggcuacugccugaccagauggaugcugaucgaggccgagcugaagugcuucggcaacaccgccguggccaagugcaacgagaagcacgacgaggaguucugcgacaugcugagacuguucgacuucaacaagcaggccaucagaagacugaagacccccgcccagaugagcauccagcugaucaacaaggccgugaacgcccugaucaacgaccagcugaucaugaagaaccaccugagagacaucaugugcauccccuacugcaacuacagcaaguacugguaccugaaccacaccgugaccggcaagaccagccugcccagaugcuggcuggugagcaacggcagcuaccugaacgagacccacuucagcgacgacaucgagcagcaggccgacaacaugaucaccgagcugcugcagaaggaguacauggacagacagggcaagaccccccugggccugguggaccuguucguguucagcaccagcuucuaccugaucagcaucuuccugcaccugaucaagauccccacccacagacacaucaccggcaagcccugccccaagccccacagacugaaccacaugggcaucugcagcugcggccuguacaagcaccccggcgugcccgugaaguggaagagaugaggacuaguaauaaggaaacuguaugaaugucugugggcaggaagugaagagauccuucuguaaagguuuuuggaauuaugucugcugaauaauaaacuuuuuugaaauaauaaaucugguagaaaaaugagaucucaaaggcucuuuucagagccaccaaaaaaaaaaaaaaaaaaaaaaaaaaaaaaaaaaaaaaaaaaaaaaaaaaaaaaaaaaaaaaaaagaauu

SEQ ID NO: 16049 - RNA, 1778 nt, Artificial Sequence
  mRNA product Design b-4 (hSL-A64-N5) comprising derived and/or modified sequence from LASV(ISTH2010-NIG-2012;Clade II)__AIT17482__GPCmut1 (opt4)
aggagagucccgcagucggcguccagcggcucugcuuguucgugugugugucguugcaggccuuauucaagcuuaccaugggccagaucaucaccuucuuccaggaggugccccacgugaucgaggaggugaugaacaucgugcugaucgcccugagccugcuggccauccugaagggcaucuacaacguggccaccugcggccuguucggccuggugagcuuccugcugcugugcggcagaagcugcagcaccaccuacaagggcguguacgagcugcagacccuggagcuggacauggccagccugaacaugaccaugccccugagcugcaccaagaacaacagccaccacuacaucauggugggcaacgagaccggccuggagcugacccugaccaacaccagcaucaucaaccacaaguucugcaaccugagcgacgcccacaagaagaaccuguacgaccacgcccugaugagcaucaucagcaccuuccaccugagcauccccaacuucaaccaguacgaggccaugagcugcgacuucaacggcggcaagaucagcgugcaguacaaccugagccacgccuacgccguggacgccgccaaccacugcggcaccaucgccaacggcgugcugcagaccuucaugagaauggccuggggcggcagcuacaucgcccuggacagcggcugcggcagcugggacugcaucaugaccagcuaccaguaccugaucauccagaacaucaccugggaggaccacugccaguucagcagacccagccccaucggcuaccugggccugcugagccagagaaccagagacaucuacaucagcagaagacgccggggcaccuucaccuggacccugagcgacagcgagggcaacgagacccccggcggcuacugccugaccagauggaugcugaucgaggccgagcugaagugcuucggcaacaccgccguggccaagugcaacgagaagcacgacgaggaguucugcgacaugcugagacuguucgacuucaacaagcaggccaucagaagacugaagacccccgcccagaugagcauccagcugaucaacaaggccgugaacgcccugaucaacgaccagcugaucaugaagaaccaccugagagacaucaugugcauccccuacugcaacuacagcaaguacugguaccugaaccacaccgugaccggcaagaccagccugcccagaugcuggcuggugagcaacggcagcuaccugaacgagacccacuucagcgacgacaucgagcagcaggccgacaacaugaucaccgagcugcugcagaaggaguacaucgacagacagggcaagaccccccugggccugguggaccuguucguguucagcaccagcuucuaccugaucagcaucuuccugcaccuggugaagauccccacccacagacacguggugggcaagcccugccccaagccccacagacugaaccacaugggcaucugcagcugcggccuguacaagcaccccggcgugcccgugaaguggaagagaugaggacuaguaauaaggaaacuguaugaaugucugugggcaggaagugaagagauccuucuguaaagguuuuuggaauuaugucugcugaauaauaaacuuuuuugaaauaauaaaucugguagaaaaaugagaucucaaaggcucuuuucagagccaccaaaaaaaaaaaaaaaaaaaaaaaaaaaaaaaaaaaaaaaaaaaaaaaaaaaaaaaaaaaaaaaaagaauu

SEQ ID NO: 16050 - RNA, 1778 nt, Artificial Sequence
  mRNA product Design b-4 (hSL-A64-N5) comprising derived and/or modified sequence from LASV(Lassa virus/H.sapiens-wt/NGA/2015/ISTH_0543;Clade II)__AVO03639__GPCmut1 (opt4)
aggagagucccgcagucggcguccagcggcucugcuuguucgugugugugucguugcaggccuuauucaagcuuaccaugggccagaucaucaccuucuuccaggaggugccccacgugaucgaggaggugaugaacaucgugcugaucgcccugagccugcuggccauccugaagggcaucuacaacguggccaccugcggccuguucggccuggugagcuuccugcugcugugcggcagaagcugcagcaccaccuacaagggcguguacgagcugcagacccuggagcuggacauggccaaccugaacaugaccaugccccugagcugcaccaagaacaacagccaccacuacaucauggugggcaacgagaccggccuggagcugacccugaccaacaccagcaucaucaaccacaaguucugcaaccugagcgacgcccacaagaagaaccuguacgaccacgcccugaugagcaucaucagcaccuuccaccugagcauccccaacuucaaccaguacgaggccaugagcugcgacuucaacggcggcaagaucagcgugcaguacaaccugagccacaccuacgccguggacgccgccaaccacugcggcaccaucgccaacggcgugcugcagaccuucaugagaauggccuggggcggcagcuacaucgcccuggacagcggcugcggcagcugggacugcaucaugaccagcuaccaguaccuggugauccagaacaccaccugggaggaccacugccaguucagcagacccagccccaucggcuaccugggccugcugagccagagaaccagagacaucuacaucagcagaagacgccggggcaccuucaccuggacccugagcgacagcgagggcaacgagacccccggcggcuacugccugaccagauggaugcugaucgaggccgagcugaagugcuucggcaacaccgccguggccaagugcaacgagaagcacgacgaggaguucugcgacaugcugagacuguucgacuucaacaagcaggccaucagaagacugaagacccccgcccagaugagcauccagcugaucaacaaggccgugaacgcccugaucaacgaccagcugaucaugaagaaccaccugagagacaucaugugcauccccuacugcaacuacagcaaguacugguaccugaaccacaccgugaccggcaagaccagccugcccagaugcuggcuggugagcaacggcagcuaccugaacgagacccacuucagcgacgacaucgagcagcaggccgacaacaugaucaccgagcugcugcagaaggaguacaucgacagacagggcaagaccccccugggccugguggaccuguucguguucagcaccagcuucuaccugaucagcaucuuccugcaccuggugaagauccccacccacagacacaucaccggcaagcccugccccaagccccacagacugaaccacaugggcaucugcagcugcggccuguacaagcaccccggcgugcccgugaaguggaagagaugaggacuaguaauaaggaaacuguaugaaugucugugggcaggaagugaagagauccuucuguaaagguuuuuggaauuaugucugcugaauaauaaacuuuuuugaaauaauaaaucugguagaaaaaugagaucucaaaggcucuuuucagagccaccaaaaaaaaaaaaaaaaaaaaaaaaaaaaaaaaaaaaaaaaaaaaaaaaaaaaaaaaaaaaaaaaagaauu

SEQ ID NO: 16051 - RNA, 1778 nt, Artificial Sequence
  mRNA product Design b-4 (hSL-A64-N5) comprising derived and/or modified sequence from LASV(Lassa virus/H.sapiens-wt/NGA/2016/ISTH_0009;Clade II)__AVO03571__GPCmut1 (opt4)
aggagagucccgcagucggcguccagcggcucugcuuguucgugugugugucguugcaggccuuauucaagcuuaccaugggccagaucaucaccuucuuccaggaggugccccacgugaucgaggaggugaugaacaucgugcugaucgcccugagccugcuggccauccugaagggcaucuacaacguggccaccugcggccugcugggccuggugagcuuccugcugcugugcggcagaagcugcagcaccaccuacaagggcguguacgagcugcagacccuggagcuggacauggccagccugaacaugaccaugccccugagcugcaccaagaacaacagccaccacuacaucauggugggcaacgagaccggccuggagcugacccugaccaacaccagcaucaucaaccacaaguucugcaaccugagcgacgcccacaagaagaaccuguacgaccacgcccugaugagcaucaucagcaccuuccaccugagcauccccaacuucaaccaguacgaggccaugagcugcgacuucaacggcggcagaaucagcgugcaguacaaccugagccacagcuacgccguggacgccgccaaccacugcggcaccaucgccaacggcgugcugcagaccuucaugagaauggccuggggcggcagcuacaucgcccuggacagcggcugcggcagcugggacugcaucaugaccagcuaccaguaccugaucauccagaacaccaccugggaggaccacugccaguucagcagacccagccccaucggcuaccugggccugcugagccagagaaccagagacaucuacaucagcagaagacgccggggcaccuucaccuggacccugagcgacagcgagggcaacgagacccccggcggcuacugccugaccagauggaugcugaucgaggccgagcugaagugcuucggcaacaccgccguggccaagugcaacgagaagcacgacgaggaguucugcgacaugcugagacuguucgacuucaacaagcaggccaucagaagacugaagacccccgcccagaugagcauccagcugaucaacaaggccgugaacgcccugaucaacgaccagcugaucaugaagaaccaccugagagacaucaugugcauccccuacugcaacuacagcaaguacugguaccugaaccacaccgugaccggcaagaccagccugcccagaugcuggcuggugagcaacggcagcuaccugaacgagacccacuucagcgacgacaucgagcagcaggccgacaacaugaucaccgagcugcugcagaaggaguacaucgacagacagggcaagaccccccugggccugguggaccuguucguguucagcaccagcuucuaccugaucagcaucuuccugcaccuggugaagauccccacccacagacacaucaccggcaagcccugccccaagccccacagacugaaccacaugggcaucugcagcugcggccuguacaaccaccccggcgugcccgugaaguggaagagaugaggacuaguaauaaggaaacuguaugaaugucugugggcaggaagugaagagauccuucuguaaagguuuuuggaauuaugucugcugaauaauaaacuuuuuugaaauaauaaaucugguagaaaaaugagaucucaaaggcucuuuucagagccaccaaaaaaaaaaaaaaaaaaaaaaaaaaaaaaaaaaaaaaaaaaaaaaaaaaaaaaaaaaaaaaaaagaauu

SEQ ID NO: 16052 - RNA, 1778 nt, Artificial Sequence
  mRNA product Design b-4 (hSL-A64-N5) comprising derived and/or modified sequence from LASV(Lassa virus/H.sapiens-wt/NGA/2016/ISTH_0017;Clade II)__AVO03567__GPCmut1 (opt4)
aggagagucccgcagucggcguccagcggcucugcuuguucgugugugugucguugcaggccuuauucaagcuuaccaugggccagaucaucaccuucuuccaggaggugccccacgugaucgaggaggugaugaacaucgugcugaucgcccugagccugcuggccauccugaagggcaucuacaacguggccaccugcggccuguucggccuggugagcuuccugcugcugugcggcagaagcugcagcaccaccuacaagggcguguacgagcugcagacccuggagcuggacauggccagccugaacaugaccaugccccugagcugcaccaagaacaacagccaccacuacaucauggugggcaacgagaccggccuggagcugacccugaccaacaccagcaucaucaaccacaaguucugcaaccugagcgacgcccacaagaagaaccuguacgaccacgcccugaugagcaucaucagcaccuuccaccugagcauccccaacuucaaccaguacgaggccaugagcugcgacuucaacggcggcaagaucagcgugcaguacaaccugagccacaccuacgccaucgacgccgccaaccacugcggcaccaucgccaacggcgugcugcagaccuucaugagaauggccuggggcggcagcuacaucgcccuggacagcggcugcggcagcugggacugcaucaugaccagcuaccaguaccugaucauccagaacaccaccugggaggaccacugccaguucagcagacccagccccaucggcuaccugggccugcugagccagagaaccagagacaucuacaucagcagaagacgccggggcaccuucaccuggacccugagcgacagcgagggcaacgagacccccggcggcuacugccugaccagauggaugcugaucgaggccgagcugaagugcuucggcaacaccgccguggccaagugcaacgagaagcacgacgaggaguucugcgacaugcugagacuguucgacuucaacaagcaggccaucagaagacugaagacccccgcccagaugagcauccagcugaucaacaaggccgugaacgcccugaucaacgaccagcugaucaugaagaaccaccugagagacaucaugugcauccccuacugcaacuacagcaaguacugguaccugaaccacaccgugaccggcaagaccagccugcccagaugcuggcuggugagcaacggcagcuaccugaacgagacccacuucagcgacgacaucgagcagcaggccgacaacaugaucaccgagcugcugcagaaggaguacauggacagacagggcaagaccccccugggccugguggaccuguucguguucagcaccagcuucuaccugaucagcaucuuccugcaccuggugagaauccccacccacagacacgugaucggcaagcccugccccaagccccacagacugaaccacaugggcaucugcagcugcggccuguacaagcaccccggcgugcccgugaaguggaagagaugaggacuaguaauaaggaaacuguaugaaugucugugggcaggaagugaagagauccuucuguaaagguuuuuggaauuaugucugcugaauaauaaacuuuuuugaaauaauaaaucugguagaaaaaugagaucucaaaggcucuuuucagagccaccaaaaaaaaaaaaaaaaaaaaaaaaaaaaaaaaaaaaaaaaaaaaaaaaaaaaaaaaaaaaaaaaagaauu

SEQ ID NO: 16053 - RNA, 1778 nt, Artificial Sequence
  mRNA product Design b-4 (hSL-A64-N5) comprising derived and/or modified sequence from LASV(Lassa virus/H.sapiens-wt/NGA/2018/ISTH_0959;Clade II)__AVV65099__GPCmut1 (opt4)
aggagagucccgcagucggcguccagcggcucugcuuguucgugugugugucguugcaggccuuauucaagcuuaccaugggccagaucaucaccuucuuccaggaggugccccacgugaucgaggaggugaugaacaucgugcugaucgcccugagccugcuggccauccugaagggcaucuacaacguggugaccugcggccuguucggccuggugagcuuccugcugcugugcggcagaagcugcagcaccaccuacaagggcguguacgagcugcagacccuggagcuggacauggccagccugaacaugaccaugccccugagcugcaccaagaacaacagccaccacuacaucauggugggcaacgagaccggccuggagcugacccugaccaacaccagcaucaucaaccacaaguucugcaaccugagcgacgcccacaagaagaaccuguacgaccacgcccugaugagcaucaucagcaccuuccaccugagcauccccaacuucaaccaguacgaggccaugagcugcgacuucaacggcggcaagaucagcgugcaguacaaccugagccacgccuacgccaucgacgccgccaaccacugcggcaccaucgccaacggcgugcugcagaccuucaugagaauggccuggggcggcagcuacaucgcccuggacagcggcugcggcagcugggacugcaucaugaccagcuaccaguaccugaucauccagaacaccaccugggaggaccacugccaguucagcagacccagccccaucggcuaccugggccugcugagccagagaaccagagacaucuacaucagcagaagacgccggggcaccuucaccuggacccugagcgacagcgagggcaacgagacccccggcggcuacugccugaccagauggaugcugaucgaggccgagcugaagugcuucggcaacaccgccguggccaagugcaacgagaagcacgacgaggaguucugcgacaugcugagacuguucgacuucaacaagcaggccaucagaagacugaagacccccgcccagaugagcauccagcugaucaacaaggccgugaacgcccugaucaacgaccagcugaucaugaagaaccaccugagagacaucaugugcauccccuacugcaacuacagcaaguacugguaccugaaccacaccgugaccggcaagaccagccugcccagaugcuggcuggugagcaacggcagcuaccugaacgagacccacuucagcgacgacaucgagcagcaggccgacaacaugaucaccgagcugcugcagaaggaguacaucgacagacagggcaagaccccccugggccugguggaccuguucguguucagcaccagcuucuaccugaucagcaucuuccugcaccuggugaagauccccacccacagacacgugaucggcaagcccugccccaagccccacagacugaaccacaugggcaucugcagcugcggccuguacaagcaccccggcgugcccgugaaguggaagagaugaggacuaguaauaaggaaacuguaugaaugucugugggcaggaagugaagagauccuucuguaaagguuuuuggaauuaugucugcugaauaauaaacuuuuuugaaauaauaaaucugguagaaaaaugagaucucaaaggcucuuuucagagccaccaaaaaaaaaaaaaaaaaaaaaaaaaaaaaaaaaaaaaaaaaaaaaaaaaaaaaaaaaaaaaaaaagaauu

SEQ ID NO: 16054 - RNA, 1778 nt, Artificial Sequence
  mRNA product Design b-4 (hSL-A64-N5) comprising derived and/or modified sequence from LASV(LASV003-NIG-2008;Clade II)__AIT17580__GPCmut1 (opt4)
aggagagucccgcagucggcguccagcggcucugcuuguucgugugugugucguugcaggccuuauucaagcuuaccaugggccagaucaucaccuucuuccaggaggugccccacgugaucgaggaggugaugaacaucgugcugaucgcccugagccugcuggccauccugaagggcaucuacaacguggccaccugcggccuguucggccuggugagcuuccugcugcugugcggcagaagcugcagcaccaccuacaagggcguguacgagcugcagacccuggagcuggacauggccagccugaacaugaccaugccccugagcugcaccaagaacaacagccaccacuacaucauggugggcaacgagaccggccuggagcugacccugaccaacaccagcaucaucaaccacaaguucugcaaccugagcgacgcccacaagaagaaccuguacgaccacgcccugaugagcaucaucagcaccuuccaccugagcauccccaacuucaaccaguacgaggccaugagcugcgacuucaacggcggcaagaucagcgugcaguacaaccugagccacaccuacgccguggacgccgccaaccacugcggcaccaucgccaacggcgugcugcagaccuucaugagaauggccuggggcggcagcuacaucgcccuggacagcggcugcggcagcugggacugcaucaugaccagcuaccaguaccugaucauccagaacaccaccugggaggaccacugccaguucagcagacccagccccaucggcuaccugggccugcugagccagagaaccagagacaucuacaucagcagaagacgccggggcaccuucaccuggacccugagcgacagcgagagcaacgagacccccggcggcuacugccugaccagauggaugcugaucgaggccgagcugaagugcuucggcaacaccgccguggccaagugcaacgagaagcacgacgaggaguucugcgacaugcugagacuguucgacuucaacaagcaggccaucagaagacugaaggcccccgcccagaugagcauccagcugaucaacaaggccgugaacgcccugaucaacgaccagcugaucaugaagaaccaccugagagacaucaugugcauccccuacugcaacuacagcaaguacugguaccugaaccacaccgugaccggcagaaccagccugcccagaugcuggcuggugagcaacggcagcuaccugaacgagacccacuucagcgacgacaucgagcagcaggccgacaacaugaucaccgagcugcugcagaaggaguacauggacagacagggcaagaccccccugggccugguggaccuguucguguucagcaccagcuucuaccugaucagcaucuuccugcaccuggugaagauccccacccacagacacgugaucggcaagcccugccccaagccccacagacugaaccacaugggcaucugcagcugcggccuguacaagcaccccggcgugcccgugaaguggaagagaugaggacuaguaauaaggaaacuguaugaaugucugugggcaggaagugaagagauccuucuguaaagguuuuuggaauuaugucugcugaauaauaaacuuuuuugaaauaauaaaucugguagaaaaaugagaucucaaaggcucuuuucagagccaccaaaaaaaaaaaaaaaaaaaaaaaaaaaaaaaaaaaaaaaaaaaaaaaaaaaaaaaaaaaaaaaaagaauu

SEQ ID NO: 16055 - RNA, 1778 nt, Artificial Sequence
  mRNA product Design b-4 (hSL-A64-N5) comprising derived and/or modified sequence from LASV(LASV035-NIG-2009;Clade II)__AIT17588__GPCmut1 (opt4)
aggagagucccgcagucggcguccagcggcucugcuuguucgugugugugucguugcaggccuuauucaagcuuaccaugggccagaucaucaccuucuuccaggaggugccccacgugaucgaggaggugaugaacaucgugcugaucgcccugagccugcuggccauccugaagggcaucuacaacguggccaccugcggccuguucggccuggugagcuuccugcugcugugcggcagaagcugcagcaccaccuacaagggcguguacgagcugcagacccuggagcuggacauggccagccugaacaugaccaugccccugagcugcaccaagaacaacagccaccacuacaucauggugggcaacgagaccggccuggagcugacccugaccaacaccagcaucaucaaccacaaguucugcaaccugagcgacgcccacaagaagaaccuguacgaccacgcccugaugagcaucaucagcaccuuccaccugagcauccccaacuucaaccaguacgaggccaugagcugcgacuucaacggcggcaagaucagcgugcaguacaaccugagccacgccuacgccguggacgccgccaaccacugcggcaccaucgccaacggcgugcugcagaccuucaugagaauggccuggggcggcagcuacaucgcccuggacagcggcugcggcagcugggacugcaucaugaccagcuaccaguaccugaucauccagaacaccaccugggaggaccacugccaguucagcagacccagccccaucggcuaccugggccugcugagccagagaaccagagacaucuacaucagcagaagacgccggggcaccuucaccuggacccugagcgacagcgagggcaacgagacccccggcggcuacugccugaccagauggaugcugaucgaggccgagcugaagugcuucggcaacaccgccguggccaagugcaacgagaagcacgacgaggaguucugcgacaugcugagacuguucgacuucaacaagcaggccaucagaagacugaaggcccccgcccagaugagcauccagcugaucaacaaggccgugaacgcccugaucaacgaccagcugaucaugaagaaccaccugagagacaucaugugcauccccuacugcaacuacagcaaguacugguaccugaaccacaccgugaccggcaagaccagccugcccagaugcuggcuggugagcaacggcagcuaccugaacgagacccacuucagcgacgacaucgagcagcaggccgacaacaugaucaccgagcugcugcagaaggaguacaucgacagacagggcaagaccccccugggccugguggaccuguucguguucagcaccagcuucuaccugaucagcaucuuccugcaccuggugaagauccccacccacagacacgugaucggcaagcccugccccaagccccacagacugaaccacaugggcaucugcagcugcggccuguacaagcaccccggcgugcccgugaaguggaagagaugaggacuaguaauaaggaaacuguaugaaugucugugggcaggaagugaagagauccuucuguaaagguuuuuggaauuaugucugcugaauaauaaacuuuuuugaaauaauaaaucugguagaaaaaugagaucucaaaggcucuuuucagagccaccaaaaaaaaaaaaaaaaaaaaaaaaaaaaaaaaaaaaaaaaaaaaaaaaaaaaaaaaaaaaaaaaagaauu

SEQ ID NO: 16056 - RNA, 1778 nt, Artificial Sequence
  mRNA product Design b-4 (hSL-A64-N5) comprising derived and/or modified sequence from LASV(LASV1000-NIG-2009;Clade II)__AIT17782__GPCmut1 (opt4)
aggagagucccgcagucggcguccagcggcucugcuuguucgugugugugucguugcaggccuuauucaagcuuaccaugggccagaucaucaccuucuuccaggaggugccccacgugaucgaggaggugaugaacaucgugcugaucgcccugagccugcuggccauccugaagggcaucuacaacguggccaccugcggccuguucggccuggugagcuuccugcugcugugcggcagaagcugcagcaccaccuacaagggcguguacgagcugcagacccuggagcuggacauggccagccugaacaugaccaugccccugagcugcaccaagaacaacagccaccacuacaucauggugggcaacgagaccggccuggagcugacccugaccaacaccagcaucaucaaccacaaguucugcaaccugagcgacgcccacaagaagaaccuguacgaccacgcccugaugagcaucaucagcaccuuccaccugagcauccccaacuucaaccaguacgaggccaugagcugcgacuucaacggcggcaagaucagcgugcaguacaaccugagccacaccuacgccguggacgccgccaaccacugcggcaccaucgccaacggcgugcugcagaccuucaugagaauggccuggggcggcagcuacaucgcccuggacagcggcugcggcagcugggacugcaucaugaccagcuaccaguaccugaucauccagaacaccaccugggaggaccacugccaguucagcagacccagccccaucggcuaccugggccugcugagccagagaaccagagacaucuacaucagcagaagacgccggggcaccuucaccuggacccugagcgacagcgagggcaacgagacccccggcggcuacugccugaccagauggaugcugaucgaggccgagcugaagugcuucggcaacaccgccguggccaagugcaacgagaagcacgacgaggaguucugcgacaugcugagacuguucgacuucaacaagcaggccaucaagagacugaagacccccgcccagaugagcauccagcugaucaacaaggccgugaacgcccugaucaacgaccagcugaucaugaagaaccaccugagagacaucaugugcauccccuacugcaacuacagcaaguacugguaccugaaccacaccgugaccggcaagaccagccugcccagaugcuggcuggugagcaacggcagcuaccugaacgagacccacuucagcgacgacaucgagcagcaggccgacaacaugaucaccgagcugcugcagaaggaguacaucgacagacagggcaagaccccccugggccugguggaccuguucguguucagcaccagcuucuaccugaucagcaucuuccugcaccuggugaagauccccacccacagacacguggugggcaagcccugccccaagccccacagacugaaccacaugggcaucugcagcugcggccuguacaagcaccccggcgugcccgugaaguggaagagaugaggacuaguaauaaggaaacuguaugaaugucugugggcaggaagugaagagauccuucuguaaagguuuuuggaauuaugucugcugaauaauaaacuuuuuugaaauaauaaaucugguagaaaaaugagaucucaaaggcucuuuucagagccaccaaaaaaaaaaaaaaaaaaaaaaaaaaaaaaaaaaaaaaaaaaaaaaaaaaaaaaaaaaaaaaaaagaauu

SEQ ID NO: 16057 - RNA, 1778 nt, Artificial Sequence
  mRNA product Design b-4 (hSL-A64-N5) comprising derived and/or modified sequence from LASV(LASV221-NIG-2010;Clade II)__AIT17624__GPCmut1 (opt4)
aggagagucccgcagucggcguccagcggcucugcuuguucgugugugugucguugcaggccuuauucaagcuuaccaugggccagaucaucaccuucuuccaggaggugccccacgugaucgaggaggugaugaacaucgugcugaucgcccugagccugcuggccauccugaagggcaucuacaacguggccaccugcggccuguucggccuggugagcuuccugcugcugugcggcagaagcugcagcaccaccuacaagggcguguacgagcugcagacccuggagcuggacauggccagccugaacaugaccaugccccugagcugcaccaagaacaacagccaccacuacaucauggugggcaacgagaccggccuggagcugacccugaccaacaccagcaucaucaaccacaaguucugcaaccugagcgacgcccacaagaagaaccuguacgaccacgcccugaugagcaucaucagcaccuuccaccugagcauccccaacuucaaccaguacgaggccaugagcugcgacuucaacggcggcaagaucagcgugcaguacaaccugagccacaccuacgccaucgacgccgccaaccacugcggcaccaucgccaacggcgugcugcagaccuucaugagaauggccuggggcggcagcuacaucgcccuggacagcggcugcggcagcugggacugcaucaugaccagcuaccaguaccugaucauccagaacaccaccugggaggaccacugccaguucagcagacccagccccaucggcuaccugggccugcugagccagagaaccagagacaucuacaucagcagaagacgccggggcaccuucaccuggacccugagcgacagcgagggcaacgagacccccggcggcuacugccugaccagauggaugcugaucgaggccgagcugaagugcuucggcaacaccgccguggccaagugcaacgagaagcacgacgaggaguucugcgacaugcugagacuguucgacuucaacaagcaggccaucagaagacugaagacccccgcccagaugagcauccagcugaucaacaaggccgugaacgcccugaucaacgaccagcugaucaugaagaaccaccugagagacaucaugugcauccccuacugcaacuacagcaaguacugguaccugaaccacaccgugaccggcaagaccagccugcccagaugcuggcuggugagcaacggcagcuaccugaacgagacccacuucagcgacgacaucgagcagcaggccgacaacaugaucaccgagaugcugcagaaggaguacauggacagacagggcaagaccccccugggccugguggaccuguucguguucagcaccagcuucuaccugaucagcaucuuccugcaccuggugaagauccccacccacagacacgugaucggcaagcccugccccaagccccacagacugaaccacaugggcaucugcagcugcggccuguacaagcaccccggcgugcccgugaaguggaagagaugaggacuaguaauaaggaaacuguaugaaugucugugggcaggaagugaagagauccuucuguaaagguuuuuggaauuaugucugcugaauaauaaacuuuuuugaaauaauaaaucugguagaaaaaugagaucucaaaggcucuuuucagagccaccaaaaaaaaaaaaaaaaaaaaaaaaaaaaaaaaaaaaaaaaaaaaaaaaaaaaaaaaaaaaaaaaagaauu

SEQ ID NO: 16058 - RNA, 1778 nt, Artificial Sequence
  mRNA product Design b-4 (hSL-A64-N5) comprising derived and/or modified sequence from LASV(LASV237-NIG-2010;Clade II)__AIT17638__GPCmut1 (opt4)
aggagagucccgcagucggcguccagcggcucugcuuguucgugugugugucguugcaggccuuauucaagcuuaccaugggccagaucaucaccuucuuccaggaggugccccacgugaucgaggaggugaugaacaucgugcugaucgcccugagccugcuggccauccugaagggcaucuacaacguggccaccugcggccuguucggccuggugagcuuccugcugcugugcggcagaagcugcagcaccaccuacaagggcguguacgagcugcagacccuggagcuggacauggccagccugaacaugaccaugccccugagcugcaccaagaacaacagccaccacuacaucauggugggcaacgagaccggccuggagcugacccugaccaacaccagcaucaucaaccacaaguucugcaaccugagcgacgcccacaagaaggaccuguacgaccacgcccugaugagcaucaucagcaccuuccaccugagcauccccaacuucaaccaguacgaggccaugagcugcgacuucaacggcggcaagaucagcgugcaguacaaccugagccacaccuacgccguggacgccgccaaccacugcggcaccaucgccaacggcgugcugcagaccuucaugagaauggccuggggcggcagcuacaucgcccuggacagcggcugcggcagcugggacugcaucaugaccagcuaccaguaccugaucauccagaacaccaccugggaggaccacugccaguucagcagacccagccccaucggcuaccugggccugcugagccagagaaccagagacaucuacaucagcagaagacgccggggcaccuucaccuggacccugagcgacagcgagggcaacgagacccccggcggcuacugccugaccagauggaugcugaucgaggccgagcugaagugcuucggcaacaccgccguggccaagugcaacgagaagcacgacgaggaguucugcgacaugcugagacuguucgacuucaacaagcaggccaucagaagacugaagacccccgcccagaugagcauccagcugaucaacaaggccgugaacgcccugaucaacgaccagcugaucaugaagaaccaccugagagacaucaugugcauccccuacugcaacuacagcaaguacugguaccugaaccacaccgugaccggcaagaccagccugcccagaugcuggcuggugagcaacggcagcuaccugaacgagacccacuucagcgacgacaucgagcagcaggccgacaacaugaucaccgagcugcugcagaaggaguacauggacagacagggcaagaccccccugggccugguggaccuguucguguucagcaccagcuucuaccugaucagcaucuuccugcaccugaucaagauccccacccacagacacaucaccggcaagcccugccccaagccccacagacugaaccacaugggcaucugcagcugcggccuguacaagcaccccggcgugcccgugaaguggaagagaugaggacuaguaauaaggaaacuguaugaaugucugugggcaggaagugaagagauccuucuguaaagguuuuuggaauuaugucugcugaauaauaaacuuuuuugaaauaauaaaucugguagaaaaaugagaucucaaaggcucuuuucagagccaccaaaaaaaaaaaaaaaaaaaaaaaaaaaaaaaaaaaaaaaaaaaaaaaaaaaaaaaaaaaaaaaaagaauu

SEQ ID NO: 16059 - RNA, 1778 nt, Artificial Sequence
  mRNA product Design b-4 (hSL-A64-N5) comprising derived and/or modified sequence from LASV(LASV253-NIG-2011;Clade II)__AIT17670__GPCmut1 (opt4)
aggagagucccgcagucggcguccagcggcucugcuuguucgugugugugucguugcaggccuuauucaagcuuaccaugggccagaucaucaccuucuuccaggaggugccccacgugaucgaggaggugaugaacaucgugcugaucgcccugagccugcuggccauccugaagggcaucuacaacguggccaccugcggccuguucggccuggugagcuuccugcugcugugcggcagaagcugcagcaccaccuacaagggcguguacgagcugcagacccuggagcuggacauggccagccugaacaugaccaugccccugagcugcaccaagaacaacagccaccacuacaucauggugggcaacgagaccggccuggagcugacccugaccaacaccagcaucaucaaccacaaguucugcaaccugagcgacgcccacaagaagaaccuguacgaccacgcccugaugagcaucaucagcaccuuccaccugagcauccccaacuucaaccaguacgaggccaugagcugcgacuucaacggcggcaagaucagcgugcaguacaaccugagccacaccuacgccguggacgccgccaaccacugcggcaccaucgccaacggcgugcugcagaccuucaugagaauggccuggggcggcagcuacaucgcccuggacagcggcugcggcagcugggacugcaucaugaccagcuaccaguaccugaucauccagaacaccaccugggaggaccacugccaguucagcagacccagccccaucggcuaccugggccugcugagccagagaaccagagacaucuacaucagcagaagacgccggggcaccuucaccuggacccugagcgacagcgagggcaacgagacccccggcggcuacugccugaccagauggaugcugaucgaggccgagcugaagugcuucggcaacaccgccguggccaagugcaacgagaagcacgacgaggaguucugcgacaugcugagacuguucgacuucaacaagcaggccaucagaagacugaaggcccccgcccagaugagcauccagcugaucaacaaggccgugaacgcccugaucaacgaccagcugaucaugaagaaccaccugagagacaucaugugcauccccuacugcaacuacagcaaguacugguaccugaaccacaccgugaccggcagaaccagccugcccagaugcuggcuggugagcaacggcagcuaccugaacgagacccacuucagcgacgacaucgagcagcaggccgacaacaugaucaccgagcugcugcagaaggaguacaucgacagacagggcaagaccccccugggccugguggaccuguucguguucagcaccagcuucuaccugaucagcaucuuccugcaccuggugaagauccccacccacagacacaucaucggcaagcccugccccaagccccacagacugaaccacaugggcaucugcagcugcggccuguacaagcaccccggcgugcccgugaaguggaagagaugaggacuaguaauaaggaaacuguaugaaugucugugggcaggaagugaagagauccuucuguaaagguuuuuggaauuaugucugcugaauaauaaacuuuuuugaaauaauaaaucugguagaaaaaugagaucucaaaggcucuuuucagagccaccaaaaaaaaaaaaaaaaaaaaaaaaaaaaaaaaaaaaaaaaaaaaaaaaaaaaaaaaaaaaaaaaagaauu

SEQ ID NO: 16060 - RNA, 1778 nt, Artificial Sequence
  mRNA product Design b-4 (hSL-A64-N5) comprising derived and/or modified sequence from LASV(LASV254-NIG-2011;Clade II)__AIT17674__GPCmut1 (opt4)
aggagagucccgcagucggcguccagcggcucugcuuguucgugugugugucguugcaggccuuauucaagcuuaccaugggccagaucaucaccuucuuccaggaggugccccacgugaucgaggaggugaugaacaucgugcugaucgcccugagccugcuggccauccugaagggcaucuacaacguggccaccugcggccuguucggccuggugagcuuccugcugcugugcggcagaagcugcagcaccaccuacaagggcguguacgagcugcagacccuggagcuggacaugaccaaccugaacaugaccaugccccugagcugcaccaagaacaacagccaccacuacaucauggugggcaacgagaccggccuggagcugacccugaccaacaccagcaucaucaaccacaaguucugcaaccugagcgacgcccacaagaagaaccuguacaaccacgcccugaugagcaucaucagcaccuuccaccugagcauccccaacuucaaccaguacgaggccaugagcugcgacuucaacggcggcaagaucagcgugcaguacaaccugagccacagcuacgccguggacgccgccaaccacugcggcaccaucgccaacggcgugcugcagaccuucaugagaauggccuggggcggcagcuacaucgcccuggacagcggcugcggcaacugggacugcaucaugaccagcuaccaguaccugaucauccagaacaccaccugggaggaccacugccaguucagcagacccagccccaucggcuaccugggccugcugagccagagaaccagagacaucuacaucagcagaagacgccggggcaccuucaccuggacccugagcgacagcgagggcaacgagacccccggcggcuacugccugaccagauggaugcugaucgaggccgagcugaagugcuucggcaacaccgccguggccaagugcaacgagaagcacgacgaggaguucugcgacaugcugagacuguucgacuucaacaagcaggccaucagaagacugaagacccccgcccaggccaacauccagcugaucaacaaggccgugaacgcccugaucaacgaccagcugaucaugaagaaccaccugagagacaucaugugcauccccuacugcaacuacagcaaguacugguaccugaaccacaccgugaccggcaagaccagccugcccagaugcuggcuggugagcaacggcagcuaccugaacgagacccacuucagcgacgacaucgagcagcaggccgacaacaugaucaccgagcugcugcagaaggaguacauggacagacagggcaagaccccccugggccugguggaccuguucguguucagcaccagcuucuaccugaucagcaucuuccugcaccuggugaagauccccacccacagacacgugaucggcaagcccugccccaagccccacagacugaaccacaugggcaucugcagcugcggccuguacaagcaccccggcgugcccgugaaguggaagagaugaggacuaguaauaaggaaacuguaugaaugucugugggcaggaagugaagagauccuucuguaaagguuuuuggaauuaugucugcugaauaauaaacuuuuuugaaauaauaaaucugguagaaaaaugagaucucaaaggcucuuuucagagccaccaaaaaaaaaaaaaaaaaaaaaaaaaaaaaaaaaaaaaaaaaaaaaaaaaaaaaaaaaaaaaaaaagaauu

SEQ ID NO: 16061 - RNA, 1778 nt, Artificial Sequence
  mRNA product Design b-4 (hSL-A64-N5) comprising derived and/or modified sequence from LASV(Nig08-A19;Clade III)__ADU56618__GPCmut1 (opt4)
aggagagucccgcagucggcguccagcggcucugcuuguucgugugugugucguugcaggccuuauucaagcuuaccaugggccagaucgugaccuucuuccaggaggugccccacgugaucgaggaggugaugaacaucgugcugaucgcccugagcauccuggccauccugaagggccuguacaacaucgccaccugcggccugaucggccuggugaccuuccugcugcugagcggcagaagcugcagcaugaccuacaagggcguguacgagcugcagacccuggagcugaacaugaacacccugaacaugaccaugccccugagcugcaccaagaacaacagccaccacuacaucauggugggcaacgagaccggccuggagcugacccugaccaacaccagccugcugcaccacaaguucugcaaccugagcgacgcccacaagaagaaccuguacgaccacacccugaugagcaucaucagcaccuuccaccugagcauccccaacuucaaccaguacgaggccaugagcugcgacuucaacggcggcaagaucaccgugcaguacaaccugagccacagcuacgccaucgacgccgccaaccacugcggcaccguggccaacggcgugcugcagaccuucaugagaauggccuggggcggcagcuacaucgcccuggacagcggcugcggcaagugggacugcaucaugaccagcuaccaguaccugaucauccagaacaccaccugggaggaccacugccaguucagcagacccagccccaucggcuaccugggccugcugagccagagaaccagagacaucuacaucagcagaagacgccggggcaccuucaccuggacccugagcgacagcgagggcaacgagacccccggcggcuacugccugaccagauggaugcugaucgaggccgagcugaagugcuucggcaacaccgccguggccaagugcaacgagaagcacgacgaggaguucugcgacaugcugagacuguucgacuucaacaagcaggccaucagaagacugaaggcccccgcccagaugagcauccagcugaucaacaaggccgugaacgcccugaucaacgaccagcugaucaugaagaaccaccugagagacaucaugugcauccccuacugcaacuacagcaaguacugguaccugaaccacaccagcaccggcagaaccagccugcccagaugcuggcuggugagcaacggcagcuaccugaacgagacccacuucagcgacgacaucgagcagcaggccgacaacaugaucaccgagaugcugcagaaggaguaccuggacagacagggcaagaccccccugggccugguggaccuguucguguucagcaccagcuucuaccugaucagcaucuuccugcaccuggugaagauccccacccacagacacaucgugggcaagcccugccccaagccccacagacugaaccacaugggcaucugcagcugcggccuguacaagcagcccggcgugcccgugagauggaagagaugaggacuaguaauaaggaaacuguaugaaugucugugggcaggaagugaagagauccuucuguaaagguuuuuggaauuaugucugcugaauaauaaacuuuuuugaaauaauaaaucugguagaaaaaugagaucucaaaggcucuuuucagagccaccaaaaaaaaaaaaaaaaaaaaaaaaaaaaaaaaaaaaaaaaaaaaaaaaaaaaaaaaaaaaaaaaagaauu

SEQ ID NO: 16062 - RNA, 1781 nt, Artificial Sequence
  mRNA product Design b-4 (hSL-A64-N5) comprising derived and/or modified sequence from LASV(G1180-SLE-2010;Clade IV)__AIT17168__GPCmut1 (opt4)
aggagagucccgcagucggcguccagcggcucugcuuguucgugugugugucguugcaggccuuauucaagcuuaccaugggccagaucgugaccuucuuccaggaggugccccacgugaucgaggaggugaugaacaucgugcugaucgcccugagcauccuggccgugcugaagggccuguacaacuucgccaccugcggccuggugggccugcugaccuuccugcugcugugcggcagaagcugcaccgccagcagauacaagggcguguacgagcugcagacccuggagcugaacauggagacccugaacaugaccaugccccugagcugcaccaagaacaacagccaccacuacaucauggugggcaacgagaccggccuggagcugacccugaccaacaccagcaucaucaaccacaaguucugcaaccugagcgacgcccacaagaagaaccuguacgaccacgcccugaugagcaucaucagcaccuuccaccugagcauccccaacuucaaccaguacgaggccaugagcugcgacuucaacggcggcaagaucagcgugcaguacaaccugagccacagcuacgccggcgacgccgccaaccacugcggcaccguggccaacggcgugcugcagaccuucaugagaauggccuggggcggcagcuacaucgcccuggacagcggcugcggcagcugggacugcaucaugaccagcuaccaguaccugaucauccagaacaccaccugggaggaccacugccaguucagcagacccagccccaucggcuaccugggccugcugagccagagaaccagagacaucuacaucagcagaagacgccggggcaccuucaccuggacccugagcgacagcgagggcaaggacacccccggcggcuacugccugaccagauggaugcugaucgaggccgagcugaagugcuucggcaacaccgccguggccaagugcaacgagaagcacgacgaggaguucugcgacaugcugagacuguucgacuucaacaagcaggccauccagagacugaaggcccccgcccagaugagcauccagcugaucaacaaggccgugaacgcccugaucaacgaccagcugaucaugaagaaccaccugagagacaucaugugcauccccuacugcaacuacagcaaguacugguaccugaaccacaccaccaccggcaagaccagccugcccaagugcuggcuggugagcaacggcagcuaccugaacgagacccacuucagcgacgacaucgagcagcaggccgacaacaugaucaccgagaugcugcagaaggaguacauggagagacagggcaagaccccccugggccugguggaccuguucguguucagcaccagcuucuaccugaucagcaucuuccugcaccuggugaagauccccacccacagacacaucgugggcaagagcugccccaagccccacagacugaaccacaugggcaucugcagcugcggccuguacaagcagcccggcgugcccgugaaguggaagagaugaggacuaguaauaaggaaacuguaugaaugucugugggcaggaagugaagagauccuucuguaaagguuuuuggaauuaugucugcugaauaauaaacuuuuuugaaauaauaaaucugguagaaaaaugagaucucaaaggcucuuuucagagccaccaaaaaaaaaaaaaaaaaaaaaaaaaaaaaaaaaaaaaaaaaaaaaaaaaaaaaaaaaaaaaaaaagaauu

SEQ ID NO: 16063 - RNA, 1781 nt, Artificial Sequence
  mRNA product Design b-4 (hSL-A64-N5) comprising derived and/or modified sequence from LASV(G1442-SLE-2011;Clade IV)__AIT17180__GPCmut1 (opt4)
aggagagucccgcagucggcguccagcggcucugcuuguucgugugugugucguugcaggccuuauucaagcuuaccaugggccagaucgugaccuucuuccaggaggugccccacgugaucgaggaggugaugaacaucgugcugaucgcccugagcauccuggccgugcugaagggccuguacaacguggccaccugcggccugaucggccuggugaccuuccugcugcugugcggcagaagcugcaccaccacccuguacaagggcguguacgagcugcagacccuggagcugaacauggagacccugaacaugaccaugccccugagcugcaccaagaacaacagccaccacuacaucagagugggcaacgagaccggccuggagcugacccugaccaacaccagcaucaucaaccacaaguucugcaaccugagcgacgcccacaagaagaaccuguacgaccacgcccugaugagcaucaucagcaccuuccaccugagcauccccaacuucaaccaguacgaggccaugagcugcgacuucaacggcggcaagaucagcgugcaguacaaccugagccacagcuacgccggcgacgccgccaaccacugcggcaccguggccaacggcgugcugcagaccuucaugagaauggccuggggcggcagcuacaucgcccuggacagcggcugcggcaacugggacugcaucaugaccagcuaccaguaccugaucauccagaacaccaccugggacgaccacugccaguucagcagacccagccccaucggcuaccugggccugcugagccagagaaccagagacguguacaucagcagaagacgccggggcaccuucaccuggacccugagcgacagcgagggcaaggacacccccggcggcuacugccugaccagauggaugcugaucgaggccgagcugaagugcuucggcaacaccgccguggccaagugcaacgagaagcacgacgaggaguucugcgacaugcugagacuguucgacuucaacaagcaggccauccagagacugaaggcccccgcccagaugagcauccagcugaucaacaaggccgugaacgcccugaucaacgaccagcugaucaugaagaaccaccugagagacaucaugugcauccccuacugcaacuacagcaaguacugguaccugaacaacaccgccaccggcaagaccagccugcccaagugcuggcugaucagcaacggcagcuaccugaacgagacccacuucagcgacgacaucgagcaggaggccgacaacaugaucaccgagaugcugcagaaggaguacauggagagacagggcaagaccccccugggccugguggaccuguucguguucagcaccagcuucuaccugaucagcaucuuccugcaccuggugaagauccccacccacagacacaucgugggcaagagcugccccaagccccacagacugaaccacaugggcaucugcagcugcggccuguacaagcagcccggcgugcccgugagauggaagagaugaggacuaguaauaaggaaacuguaugaaugucugugggcaggaagugaagagauccuucuguaaagguuuuuggaauuaugucugcugaauaauaaacuuuuuugaaauaauaaaucugguagaaaaaugagaucucaaaggcucuuuucagagccaccaaaaaaaaaaaaaaaaaaaaaaaaaaaaaaaaaaaaaaaaaaaaaaaaaaaaaaaaaaaaaaaaagaauu

SEQ ID NO: 16064 - RNA, 1781 nt, Artificial Sequence
  mRNA product Design b-4 (hSL-A64-N5) comprising derived and/or modified sequence from LASV(G3010-SLE-2013;Clade IV)__AIT17344__GPCmut1 (opt4)
aggagagucccgcagucggcguccagcggcucugcuuguucgugugugugucguugcaggccuuauucaagcuuaccaugggccagaucgugaccuucuuccaggaggugccccacgugaucgaggaggugaugaacaucgugcugaucgcccugagcauccuggccgugcugaagggccuguacaacuucgccaccugcggccuggugggccuggugaccuuccugcugcugugcggcagaagcugcaccaccagccuguacaagggcguguacgagcugcagacccuggagcugaacauggagacccugaacaugaccaugccccugagcugcaccaagaacaacagccaccacuacaucauggugggcaacgagaccggccuggagcugacccugaccaacaccagcaucaucaaccacaaguucugcaaccugagcgacgcccacaagaagaaccuguacaaccacgcccugaugagcaucaucagcaccuuccaccugagcauccccaacuucaaccaguacgaggccaugagcugcgacuucaacggcggcaagaucagcgugcaguacaaccugagccacagcuacgccggcgacgccgccagccacugcggcaccguggccaacggcgugcugcagaccuucaugagaauggccuggggcggcagcuacaucgcccuggacagcggcugcggcaagugggacugcaucaugaccagcuaccaguaccugaucauccagaacaccaccugggaggaccacugccaguucagcagacccagccccaucggcuaccugggccugcugagccagagaaccagagacaucuacaucagcagaagacgccggggcaccuucaccuggacccugagcgacagcgagggcaaggacacccccggcggcuacugccugaccagauggaugcugaucgaggccgagcugaagugcuucggcaacaccgccguggccaagugcaacgagaagcacgacgaggaguucugcgacaugcugagacuguucgacuucaacaagcaggccauccagagacugaagacccccgcccagaugagcauccagcugaucaacaaggccgugaacgcccugaucaacgaccagcugaucaugaagaaccaccugagagacaucaugugcauccccuacugcaacuacagcaaguacugguaccugaaccacaccaccaccggcaagaccagccugcccaagugcuggcuggugagcaacggcagcuaccugaacgagacccacuucagcgacgacaucgagcagcaggccgacaacaugaucaccgagaugcugcagaaggaguacauggagagacagggcaagaccccccugggccugguggaccuguucguguucagcaccagcuucuaccugaucagcaucuuccugcaccuggugaagauccccacccacagacacaucgugggcaagagcugccccaagccccacagacugaaccacaugggcaucugcagcugcggccuguacaagcagcccggcgugcccgugagauggaagagaugaggacuaguaauaaggaaacuguaugaaugucugugggcaggaagugaagagauccuucuguaaagguuuuuggaauuaugucugcugaauaauaaacuuuuuugaaauaauaaaucugguagaaaaaugagaucucaaaggcucuuuucagagccaccaaaaaaaaaaaaaaaaaaaaaaaaaaaaaaaaaaaaaaaaaaaaaaaaaaaaaaaaaaaaaaaaagaauu

SEQ ID NO: 16065 - RNA, 1781 nt, Artificial Sequence
  mRNA product Design b-4 (hSL-A64-N5) comprising derived and/or modified sequence from LASV(G502-SLE-2009;Clade IV)__AIT17126__GPCmut1 (opt4)
aggagagucccgcagucggcguccagcggcucugcuuguucgugugugugucguugcaggccuuauucaagcuuaccaugggccagaucgugaccuucuuccaggaggugccccacgugaucgaggaggugaugaacaucgugcugaucgcccugagcauccuggccgugcugaagggccuguacaacuucgccaccugcggccuggugggccugcugaccuuccugcugcugugcggcagaagcugcaccaccggccuguacaagggcguguacgagcugcagacccuggagcugaacauggagacccugaacaugaccaugccccugagcugcaccaagaacaacagccaccacuacaucauggugggcaacgagaccggccuggagcugacccugaccaacaccagcaucaucaaccacaaguucugcaaccugagcgacgcccacaagaagaaccuguacgaccacgcccugaugagcaucaucagcaccuuccaccugagcauccccaacuucaaccaguacgaggccaugagcugcgacuucaacggcggcaagaucagcgugcaguacaaccugagccacagcuacgccggcgacgccgccgaccacugcggcaccguggccaacggcgugcugcagaccuucaugagaauggccuggggcggcagcuacaucgcccuggacagcggcugcggcagaugggacugcaucaugaccagcuaccaguaccugaucauccagaacaccaccugggaggaccacugccaguucagcagacccagccccaucggcuaccugggccugcugagccagagaaccagagacaucuacaucagcagaagacgccggggcaccuucaccuggacccugagcgacagcgagggcaaggacacccccggcggcuacugccugaccagauggaugcugaucgaggccgagcugaagugcuucggcaacaccgccguggccaagugcaacgagaagcacgacgaggaguucugcgacaugcugagacuguucgacuucaacaagcaggccauccagagacugaaggcccccgcccagaugagcauccagcugaucaacaaggccgugaacgcccugaucaacgaccagcuggugaugaagaaccaccugagagacaucaugugcauccccuacugcaacuacagcagauacugguaccugaaccacaccaccaccggcagaaccagccugcccaagugcuggcuggugagcaacggcagcuaccugaacgagacccacuucagcgacgacaucgagcagcaggccgacaacaugaucaccgagaugcugcagaaggaguacauggagagacagggcaagaccccccugggccugguggaccuguucguguucagcaccagcuucuaccugaucagcaucuuccugcaccuggugaagauccccacccacagacacaucgugggcaagagcugccccaagccccacagacugaaccacaugggcaucugcagcugcggccuguacaagcagcccggcgugcccgugaaguggaagagaugaggacuaguaauaaggaaacuguaugaaugucugugggcaggaagugaagagauccuucuguaaagguuuuuggaauuaugucugcugaauaauaaacuuuuuugaaauaauaaaucugguagaaaaaugagaucucaaaggcucuuuucagagccaccaaaaaaaaaaaaaaaaaaaaaaaaaaaaaaaaaaaaaaaaaaaaaaaaaaaaaaaaaaaaaaaaagaauu

SEQ ID NO: 16066 - RNA, 1781 nt, Artificial Sequence
  mRNA product Design b-4 (hSL-A64-N5) comprising derived and/or modified sequence from LASV(G733-SLE-2010;Clade IV)__AIT17154__GPCmut1 (opt4)
aggagagucccgcagucggcguccagcggcucugcuuguucgugugugugucguugcaggccuuauucaagcuuaccaugggccagaucgugaccuucuuccaggaggugccccacgugaucgaggaggugaugaacaucgugcugaucgcccugagcauccuggccgugcugaagggccuguacaacuucgccaccugcggcaucgugggccuggugagcuuccugcugcugugcggcagaagcugcaccaccagccuguacaagggcguguacgagcugcagacccuggagcugaacauggagacccugaacaugaccaugccccugagcugcaccaagaacaacagccaccacuacaucauggugggcaacgagaccggccuggagcugacccugaccaacaccagcaucaucaaccacaaguucugcaaccugagcgacgcccacaagaagaaccuguacgaccacgcccugaugagcaucaucagcaccuuccaccugagcauccccaacuucaaccaguacgaggccaugagcugcgacuucaacggcggcaagaucagcgugcaguacaaccugagccacagcuacgccggcgacgccgccaaccacugcggcaccaucgccaacggcgugcugcagaccuucaugagaauggccuggggcggcagcuacaucgcccuggacagcggcugcgacagaugggacugcaucaugaccagcuaccaguaccugaucauccagaacaccaccugggaggaccacugccaguucagcagacccagccccaucggcuaccugggccugcugagccagagaaccagagacaucuacaucagcagaagacgccggggcaccuucaccuggacccugagcgacagcgagggcaaggacacccccggcggcuacugccugaccagauggaugcugaucgaggccgagcugaagugcuucggcaacaccgccguggccaagugcaacgagaagcacgacgaggaguucugcgacaugcugagacuguucgacuucaacaagcaggccauccagagacugaaggcccccgcccagaugagcauccagcugaucaacaaggccgugaacgcccugaucaacgaccagcugaucaugaagaaccaccugagagacaucaugugcauccccuacugcaacuacagcaaguacugguaccugaaccacaccaccaccggcaagaccagccugcccaagugcuggcuggugagcaacggcagcuaccugaacgagacccacuucagcgacgacaucgagcagcaggccgacaacaugaucaccgagaugcugcagaaggaguacauggagagacagggcaagaccccccugggccugguggaccuguucguguucagcaccagcuucuaccugaucagcaucuuccugcaccuggugaagauccccacccacagacacguggugggcaagagcugccccaagccccacagacugaaccacaugggcaucugcagcugcggccuguacggccagcccggcgugcccgugaaguggaagagaugaggacuaguaauaaggaaacuguaugaaugucugugggcaggaagugaagagauccuucuguaaagguuuuuggaauuaugucugcugaauaauaaacuuuuuugaaauaauaaaucugguagaaaaaugagaucucaaaggcucuuuucagagccaccaaaaaaaaaaaaaaaaaaaaaaaaaaaaaaaaaaaaaaaaaaaaaaaaaaaaaaaaaaaaaaaaagaauu

SEQ ID NO: 16067 - RNA, 1781 nt, Artificial Sequence
  mRNA product Design b-4 (hSL-A64-N5) comprising derived and/or modified sequence from MOPV/LASV reassortant(IGS-1;Clade IV)__AFY05576__GPCmut1 (opt4)
aggagagucccgcagucggcguccagcggcucugcuuguucgugugugugucguugcaggccuuauucaagcuuaccaugggccagaucgugaccuucuuccaggaggugccccacgugaucgaggaggugaugaacaucgugcugaucgcccugagcgugcuggccgugcugaagggccuguacaacuucgccaccugcggccuggugggccuggugaccuuccugcugcugugcggcagaagcugcaccaccagccuguacaagggcguguacgagcugcagacccuggagcugaacauggagacccugaacaugaccaugccccugagcugcaccaagaacaacagccaccacuacaucauggugggcaacgagaccggccuggagcugacccugaccaacaccagcaucaucaaccacaaguucugcaaccugagcgacgcccacaagaagaaccuguacgaccacgcccugaugagcaucaucagcaccuuccaccugagcauccccaacuucaaccaguacgaggccaugagcugcgacuucaacggcggcaagaucagcgugcaguacaaccugagccacagcuacgccggcgacgccgccaaccacugcggcaccguggccaacggcgugcugcagaccuucaugagaauggccuggggcggcagcuacaucgcccuggacagcggcugcggcaacugggacugcaucaugaccagcuaccaguaccugaucauccagaacaccaccugggaggaccacugccaguucagcagacccagccccaucggcuaccugggccugcugagccagagaaccagagacaucuacaucagcagaagacgccggggcaccuucaccuggacccugagcgacagcgagggcgaggacacccccggcggcuacugccugaccagauggaugcugaucgaggccgagcugaagugcuucggcaacaccgccguggccaagugcaacgagaagcacgacgaggaguucugcgacaugcugagacuguucgacuucaacaagcaggccauccagagacugaaggcccccgcccagaugagcauccagcugaucaacaaggccgugaacgcccugaucaacgaccagcugaucaugaagaaccaccugagagacaucaugugcauccccuacugcaacuacagcaaguacugguaccugaaccacaccaccaccggcagaaccagccugcccaagugcuggcuggugagcaacggcagcuaccugaacgagacccacuucagcgacgacaucgagcagcaggccgacaacaugaucaccgagaugcugcagaaggaguacauggagagacagggcaagaccccccugggccugguggaccuguucguguucagcaccagcuucuaccugaucagcaucuuccugcaccuggugaagauccccacccacagacacaucgugggcaagagcugccccaagccccacagacugaaccacaugggcaucugcagcugcggccuguacaagcagcccggcgugcccgugaaguggaagagaugaggacuaguaauaaggaaacuguaugaaugucugugggcaggaagugaagagauccuucuguaaagguuuuuggaauuaugucugcugaauaauaaacuuuuuugaaauaauaaaucugguagaaaaaugagaucucaaaggcucuuuucagagccaccaaaaaaaaaaaaaaaaaaaaaaaaaaaaaaaaaaaaaaaaaaaaaaaaaaaaaaaaaaaaaaaaagaauu

SEQ ID NO: 16068 - RNA, 1781 nt, Artificial Sequence
  mRNA product Design b-4 (hSL-A64-N5) comprising derived and/or modified sequence from LASV(LM765-SLE-2012;Clade IV)__AIT17814__GPCmut1 (opt4)
aggagagucccgcagucggcguccagcggcucugcuuguucgugugugugucguugcaggccuuauucaagcuuaccaugggccagaucgugaccuucuuccaggaggugccccacgugaucgaggaggugaugaacaucgugcugaucgcccugagcauccuggccgugcugaagggccuguacaacuucgccaccugcggccuggugggccuggugaccuuccugcugcugugcggcagaagcugcaccaccagccuguacaagggcguguacgagcugcagacccuggagcugaacauggagacccugaacaugaccaugccccugagcugcaccaagaacaacagccaccacuacaucauggugggcaacgagaccggccuggagcugacccugaccaacaccagcaucaucgaccacaaguucugcaaccugagcgacgcccacagaaagaaccuguacgaccacgcccugaugagcaucaucagcaccuuccaccugagcauccccaacuucaaccaguacgaggccaugagcugcgacuucaacggcggcaagaucagcgugcaguacaaccugagccacagcuacgccaaggacgccgccgaccacugcggcaccguggccaacggcgugcugcagaccuucaugagaauggccuggggcggcagcuacaucgcccuggacagcggcugcggcagaugggacugcaucaugaccagcuaccaguaccugaucauccagaacaccaccugggaggaccacugccaguucagcagacccagccccaucggcuaccugggccugcugagccagagaaccagagacaucuacaucagcagaagacgccggggcaccuucaccuggacccugagcgacagcgagggcaaggacacccccggcggcuacugccugaccagauggaugcugaucgaggccgagcugaagugcuucggcaacaccgccguggccaagugcaacgagaagcacgacgaggaguucugcgacaugcugagacuguucgacuucaacaagcaggccauccagagacugaaggcccccgcccagaugagcauccagcugaucaacaaggccgugaacgcccugaucaacgaccagcugaucaugaagaaccaccugagagacaucaugugcauccccuacugcaacuacagcaaguacugguaccugaaccacaccaccaccggcaagaccagccugcccaagugcuggcuggugagcaacggcagcuaccugaacgagacccacuucagcgacgacaucgagcagcaggccgacaacaugaucaccgagaugcugcagaaggaguacauggagagacagggcaagaccccccugggccugguggaccuguucguguucagcaccagcuucuaccugaucagcaucuuccugcaccuggugaagauccccacccacagacacaucgugggcaagcccugccccaagccccacagacugaaccacaugggcaucugcagcugcggccuguacaagcagcccggcgugcccgugaaguggaagagaugaggacuaguaauaaggaaacuguaugaaugucugugggcaggaagugaagagauccuucuguaaagguuuuuggaauuaugucugcugaauaauaaacuuuuuugaaauaauaaaucugguagaaaaaugagaucucaaaggcucuuuucagagccaccaaaaaaaaaaaaaaaaaaaaaaaaaaaaaaaaaaaaaaaaaaaaaaaaaaaaaaaaaaaaaaaaagaauu

SEQ ID NO: 16069 - RNA, 1781 nt, Artificial Sequence
  mRNA product Design b-4 (hSL-A64-N5) comprising derived and/or modified sequence from LASV(LM776-SLE-2012;Clade IV)__AIT17824__GPCmut1 (opt4)
aggagagucccgcagucggcguccagcggcucugcuuguucgugugugugucguugcaggccuuauucaagcuuaccaugggccagaucgugaccuucuuccaggaggugccccacgugaucgaggaggugaugaacaucgugcugaucgcccugagcauccuggccgugcugaagggccuguacaacuucgccaccugcggccuggugggccuggugaccuuccugcugcugugcggcagaagcugcaccaccagcguguacaagggcguguacgagcugcagacccuggagcugaacauggagacccugaacaugaccaugccccugagcugcaccaagaacaacagccaccacuacaucauggugggcaacgagaccggccuggagcugacccugaccaacaccagcaucaucaaccacaaguucugcaaccugagcgacgcccacaagaagaaccuguacgaccacgcccugaugagcaucaucagcaccuuccaccugagcauccccaacuucaaccaguacgaggccaugagcugcgacuucaacggcggcaagaucagcgugcaguacaaccugagccacagcuacgccggcgacgccgccaaccacugcggcaccguggccaacggcgugcugcagaccuucaugagaauggccuggggcggcagcuacaucgcccuggacagcggcugcggcaagugggacugcaucaugaccagcuaccaguaccugaucauccagaacaccaccugggaggaccacugccaguucagcagacccagccccaucggcuaccugggccugcugagccagagaaccagagacaucuacaucagcagaagacgccggggcaccuucaccuggacccugagcgacagcgagggcaaggacacccccggcggcuacugccugaccagauggaugcugaucgaggccgagcugaagugcuucggcaacaccgccguggccaagugcaacgagaagcacgacgaggaguucugcgacaugcugagacuguucgacuucaacaagcaggccauccagagacugaaggcccccgcccagaugagcauccagcugaucaacaaggccgugaacgcccugaucaacgaccagcugaucaugaagaaccaccugagagacaucaugugcauccccuacugcaacuacagcaaguacugguaccugaaccacaccaccaccggcaagaccagccugcccaagugcuggcuggugagcaacggcagcuaccugaacgagacccacuucagcgacgacaucgagcagcaggccgacaacaugaucaccgagaugcugcagaaggaguacauggagagacagggcaagaccccccugggccugguggaccuguucguguucagcaccagcuucuaccugaucagcaucuuccugcaccuggugaagauccccacccacagacacaucgugggcaagagcugccccaagccccacagacugaaccacaugggcaucugcagcugcggccuguacaagcagcccggcgugcccgugagauggaagagaugaggacuaguaauaaggaaacuguaugaaugucugugggcaggaagugaagagauccuucuguaaagguuuuuggaauuaugucugcugaauaauaaacuuuuuugaaauaauaaaucugguagaaaaaugagaucucaaaggcucuuuucagagccaccaaaaaaaaaaaaaaaaaaaaaaaaaaaaaaaaaaaaaaaaaaaaaaaaaaaaaaaaaaaaaaaaagaauu

SEQ ID NO: 16070 - RNA, 1781 nt, Artificial Sequence
  mRNA product Design b-4 (hSL-A64-N5) comprising derived and/or modified sequence from LASV(Mad39;Clade IV)__ANH09722__GPCmut1 (opt4)
aggagagucccgcagucggcguccagcggcucugcuuguucgugugugugucguugcaggccuuauucaagcuuaccaugggccagaucgugaccuucuuccaggaggugccccacgugaucgaggaggugaugaacaucgugcugaucgcccugagcauccuggccgugcugaagggccuguacaacguggccaccugcggccugaucggccuggugaccuuccugcugcugugcggcagaagcugcaccaccacccuguacaagggcguguacgagcugcaggcccuggagcugaacauggagacccugaacaugaccaugccccugagcugcaccaagaacaacagccaccacuacaucagagugggcaacgagaccggccuggagcugacccugaccaacaccagccugaucaaccacaaguucugcaaccugagcgacgcccacaagaagaaccuguacgaccacgcccugaugagcaucaucagcaccuuccaccugagcauccccaacuucaaccaguacgaggccaugagcugcgacuucaacgacggcaagaucagcgugcaguacaaccugagccacaccuacgccggcgacaccgccaaccacugcggcaccguggccaacggcgugcugcagaccuucaugagaauggccuggggcggcagcuacaucgcccuggacagcggcugcggcggcugggacugcaucaugaccagcuaccaguaccugaucauccagaacaccaccugggaggaccacugccaguucagcagacccagccccaucggcuaccugggccugcugagccagagaaccagagacaucuacaucagcagaagacgccggggcaccuucaccuggacccugagcgacagcgagggcaaggacacccccggcggcuacugccugaccagauggaugcugaucgaggccgagcugaagugcuucggcaacaccgccguggccaagugcaacgagaagcacgacgaggaguucugcgacaugcugagacuguucgacuucaacaagcaggccauccagagacugaaggcccccgcccagaugagcauccagcugaucaacaaggccgugaacgcccugaucaacgaccagcugaucaugaagaaccaccugagagacaucaugugcauccccuacugcaacuacagcaaguacugguaccugaaccacaccgugaccggcaagaccagccugcccaagugcuggcuggugagcaacggcagcuaccugaacgagacccacuucagcgacgacaucgagcagcaggccgacaacaugaucaccgagaugcugcagaaggaguacauggagagacagggcaagaccccccugggccugguggaccuguucguguucagcaccagcuucuaccugaucagcaucuuccugcaccuggugaagauccccacccacagacacguggugggcaagcccugccccaagccccacagacugaaccacaugggcaucugcagcugcggcuucuacaagcagcccggcgugcccgugagauggaagagaugaggacuaguaauaaggaaacuguaugaaugucugugggcaggaagugaagagauccuucuguaaagguuuuuggaauuaugucugcugaauaauaaacuuuuuugaaauaauaaaucugguagaaaaaugagaucucaaaggcucuuuucagagccaccaaaaaaaaaaaaaaaaaaaaaaaaaaaaaaaaaaaaaaaaaaaaaaaaaaaaaaaaaaaaaaaaagaauu

SEQ ID NO: 16071 - RNA, 1781 nt, Artificial Sequence
  mRNA product Design b-4 (hSL-A64-N5) comprising derived and/or modified sequence from LASV(Z0947-SLE-2011;Clade IV)__AIT17840__GPCmut1 (opt4)
aggagagucccgcagucggcguccagcggcucugcuuguucgugugugugucguugcaggccuuauucaagcuuaccaugggccagaucgugaccuucuuccaggaggugccccacgugaucgaggaggugaugaacaucgugcugaucgcccugagcauccuggccgugcugaagggccuguacaacuucgccaccugcggccuggugggccuggugaccuuccugcugcugugcggcagaagcugcaccaucagccuguacaagggcguguacgagcugcagacccuggagcugaacauggagacccugaacaugaccaugccccugagcugcaccaagaacaacagccaccacuacaucauggugggcaacgagaccggccuggagcugacccugaccaacaccagcaucaucaaccacaaguucugcaaccugagcgacgcccacaagaagaaccuguacgaccacgcccugaugagcaucaucagcaccuuccaccugagcauccccaacuucaaccaguacgaggccaugagcugcgacuucaacggcggcaagaucagcgugcaguacaaccugagccacagcuacgccggcgacgccgccaaccacugcggcaccguggccaacggcgugcugcagaccuucaugagaauggccuggggcggcagcuacaucgcccuggacagcggcugcgacagaugggacugcaucaugaccagcuaccaguaccugaucauccagaacaccaccugggaggaccacugccaguucagcagacccagccccaucggcuaccugggccugcugagccagagaaccagagacaucuacaucagcagaagacgccggggcaccuucaccuggacccugagcgacagcgagggcaaggacacccccggcggcuacugccugaccagauggaugcugaucgaggccgagcugaagugcuucggcaacaccgccguggccaagugcaacgagaagcacgacgaggaguucugcgacaugcugagacuguucgacuucaacaagcaggccauccagagacugaaggcccccgcccagaugagcauccagcugaucaacaaggccgugaacgcccugaucaacgaccagcugaucaugaagaaccaccugagagacaucaugugcauccccuacugcaacuacagcaaguacugguaccugaaccacaccaccaccggcaagaccagccugcccaagugcuggcuggugagcaacggcagcuaccugaacgagacccacuucagcgacgacaucgagcagcaggccgacaacaugaucaccgagaugcugcagaaggaguacauggagagacagggcaagaccccccugggccugguggaccuguucguguucagcaccagcuucuaccugaucagcaucuuccugcaccuggugaagauccccacccacagacacaucgugggcaagcccugccccaagccccacagacugaaccacaugggcaucugcagcugcggccuguacaagcagcccggcgugcccgugaaguggaagagaugaggacuaguaauaaggaaacuguaugaaugucugugggcaggaagugaagagauccuucuguaaagguuuuuggaauuaugucugcugaauaauaaacuuuuuugaaauaauaaaucugguagaaaaaugagaucucaaaggcucuuuucagagccaccaaaaaaaaaaaaaaaaaaaaaaaaaaaaaaaaaaaaaaaaaaaaaaaaaaaaaaaaaaaaaaaaagaauu

SEQ ID NO: 16072 - RNA, 1781 nt, Artificial Sequence
  mRNA product Design b-4 (hSL-A64-N5) comprising derived and/or modified sequence from LASV(Josiah;Clade IV)__NP_694870__GPCmut1 (opt5)
aggagagucccgcagucggcguccagcggcucugcuuguucgugugugugucguugcaggccuuauucaagcuuaccaugggccagaucgugaccuucuuucaagaggucccccacguuauugaagaggugaugaacaucgugcugauugcccucagcguccuggcugugcuuaaggggcuguacaauuucgccacaugcggacucguuggccuggugacguuucuucugcucugugggagauccugcaccacaucucuguauaaaggagucuacgaacugcagacccucgagcugaacauggaaacacuuaauaugaccaugccucugagcuguacaaagaacaauucccaucacuauaucauggugggcaacgagaccgggcucgagcugacgcuuaccaauacaucuauuaucaaccauaaauucugcaaucugagcgacgcgcacaagaaaaaccucuacgaucaugcucugauguccaucauuucuaccuuucaccugagcaucccgaauuucaaccaguaugaagccauguccugugacuuuaauggaggcaagauuagcguucaguacaaccucucucacuccuaugccggcgaugcugccaaucauugcgggacaguggcuaacggaguccugcaaaccuucaugcggauggccuggggcgggagcuacaucgcgcuugacucuggaugcggcaacugggauuguauuaugacguccuaccaguaucugaucauucagaauacaaccugggaggaccacugccaguuuagcagacccucuccuaucggguaccucggacugcuuucccaacggacacgcgauaucuauauuagcagacggcgccggggcaccuucaccuggacacuguccgacucugaaggcaaggauacgcccgggggauacugucugacccgcuggaugcucaucgaggccgagcugaaaugcuuuggcaacacagcuguggccaaguguaaugaaaaacaugacgaggaguucugcgauaugcuuagacuguuugacuucaacaagcaggcuauucagcggcucaaagcccccgcgcagaugagcauccaacugauuaauaaggccgugaacgcucuuaucaaugaucagcugaucaugaagaaccaccuccgcgacauuaugugcaucccuuauugcaauuacuccaaauauugguaccugaaccacaccacaaccggaagaacgagccugcccaaguguuggcucgucucuaauggcuccuaccugaacgaaacacauuucagcgacgauauugagcagcaagccgacaauaugaucaccgagaugcuucagaaagaauauauggagcggcaggggaagaccccucugggacucguugaucuguuuguguucucuaccagcuuuuaccugauuuccaucuuccuucaccucgugaaaaucccgacacaucgccacauugucggcaagucuugccccaaaccucauagacugaaccacaugggcaucuguagcugcgggcuguauaagcagcccggagugccuguuaaguggaaacggugaggacuaguaauaaggaaacuguaugaaugucugugggcaggaagugaagagauccuucuguaaagguuuuuggaauuaugucugcugaauaauaaacuuuuuugaaauaauaaaucugguagaaaaaugagaucucaaaggcucuuuucagagccaccaaaaaaaaaaaaaaaaaaaaaaaaaaaaaaaaaaaaaaaaaaaaaaaaaaaaaaaaaaaaaaaaagaauu

SEQ ID NO: 16073 - RNA, 1778 nt, Artificial Sequence
  mRNA product Design b-4 (hSL-A64-N5) comprising derived and/or modified sequence from LASV(LP;Clade I)__AAF86701__GPCmut1 (opt5)
aggagagucccgcagucggcguccagcggcucugcuuguucgugugugugucguugcaggccuuauucaagcuuaccaugggccagaucauuaccuucuuucaagaggugccccacgucaucgaagagguuaugaacauugugcugaucgcccucagccugcuugcuauucugaaggggcucuacaauaucgccacaugcggaaucauuggccugguggcguuccuuuuucugugugggaaauccugcucucucacgcugaagggaggcuaugaacugcagacccucgagcugaacauggaaacacuuaauaugaccaugccucugagcuguaccaaaaacuccucucaucacuacaucagagucgggaaugagacaggacucgagcugacacuuaccaacacgagcauuaucaaucauaaguucugcaaccuguccgacgcucacaaaaagaaucucuaugaucaugcccugaugucuauuaucagcaccuuucaccuguccauuccgaacuucaaucaguacgaagccaugagcugugacuuuaacggcggcaagaucucugugcaguauaaucucucccacagcuacgcuggggaugccgcugagcauugcggaacaguugccaacggcgugcugcaaaccuucaugcggauggcguggggagggcgcuauaucgcccuugacucuggcugcgggaauugggauuguauuaugacauccuaccaguaccugaucauucagaacaccacgugggaagaccacugccaguuuagcagacccucuccuaucggauaucucggccugcuuucccaacggacacgcgauauuuacaucagcagacggcgccggggcaccuucacauggacccuguccgacucugaggggaacgagacccccggaggcuauugucugacacgcuggaugcucaucgaagcugagcugaagugcuuugggaauacggccgucgcuaaauguaacgaaaagcaugaugaggaguucugcgacaugcuuagacuguuugauuucaauaaacaggccauucggcgccucaaggcgcccgcccagaugagcauccagcugauuaacaaggcugugaaugcccuuaucaacgaccaacugauuaugaaaaaucaccucagagauaucaugugcaucccuuacugcaacuauuccaaguacugguaucugaaucacaccagcucuggccggacaucccugcccaaauguuggcucauuagcaacgggucuuaccugaaugagacccaguucagcgacgacaucgaacagcaagcugauaacaugauuacagagaugcuucagaaggaauacaucgagcgccagggaaaaaccccucugggccucguugacauuuuuaucuucuccacgucuuuuuaucugauuagcaucuuccugcaucuuaucaagauuccgacacacagacauaucgugggcaaacccugcccuaagccccaccggcucaaucauaugggggucuguuccugcggacuguacaagcacccuggcgugcccaccaaauggaagcgcugaggacuaguaauaaggaaacuguaugaaugucugugggcaggaagugaagagauccuucuguaaagguuuuuggaauuaugucugcugaauaauaaacuuuuuugaaauaauaaaucugguagaaaaaugagaucucaaaggcucuuuucagagccaccaaaaaaaaaaaaaaaaaaaaaaaaaaaaaaaaaaaaaaaaaaaaaaaaaaaaaaaaaaaaaaaaagaauu

SEQ ID NO: 16074 - RNA, 1778 nt, Artificial Sequence
  mRNA product Design b-4 (hSL-A64-N5) comprising derived and/or modified sequence from LASV(803213;Clade II)__AAF86703__GPCmut1 (opt5)
aggagagucccgcagucggcguccagcggcucugcuuguucgugugugugucguugcaggccuuauucaagcuuaccaugggccagaucauuaccuucuuucaagaggugccccacgucaucgaagagguuaugaacauugugcugaucgcccucagccugcuugcuauucugaaggggaucuacaauguggccacaugcggacucuucggccugaucuccuuucuucugcucugugggagaucuugcagcgucacguauaaaggaguguacgaacugcagacccuggagcucaacauggcgaaucugaacaugacaaugccucuuuccuguaccaagaauaacucucaucacuauauuaugguuggcaaugaaacagggcuggagcucacccugacaaacaccagcaucauuaaucauaaauucugcaaccuuuccgacgcucacaagaaaaaucuguacgaucaugcccucaugucuaucauuagcacguuucaccuguccaucccgaacuucaaucaguaugaggccaugagcugugacuuuaacggaggcaagauuucugugcaguacaaucugucccacagcuucgcugucgaugccgcuaaccauugcggcaccaucgccaacggggugcuccaaacauuuaugcggauggcguggggaggcucuuauaucgcccuggacuccgggugcggaaauugggauuguauuaugaccagcuaccaguaccuuaucauucagaacacaaccugggaagaccacugccaguucucucgccccuccccuaucggcuaucuggggcuccugagccaaagaacgcgggauauuuacaucucccgcagacgccggggaacauuuaccuggacacucucugacagcgagggcaaugaagcucccggcggguauugucugacccgguggaugcugaucgaggccgagcucaaaugcuucggaaacaccgcuguugccaaguguaaugaaaaacaugaugaggaauuuugcgacaugcugcgccuuuucgauuucaacaagcaggcgauuaaaagacugaagacacccgcccagauguccauccagcucauuaauaaggcugugaacgcccugaucaaugaccaacuuauuaugaaaaaccaucugcgggauaucaugugcaucccuuacugcaauuauagccgcuacugguaucucaaccacacggucaccgggaagacaucucugcccagauguuggcugguguccaauggaagcuaccucaacgaaacccacuuuucugacgacauugagcagcaggcugauaauaugaucacagagaugcugcaaaaagaauacauggaccggcagggcaagaccccucuugggcugguggaucucuucgucuuuagcacguccuucuaucugauuucuaucuuucugcaccuuguuaaaauuccgacacaucgccacaucgugggaaagcccugcccuaaaccccauagacucaaccacaugggcauuuguagcugcggccuguacaagcacccuggggugcccgucaaguggaaacggugaggacuaguaauaaggaaacuguaugaaugucugugggcaggaagugaagagauccuucuguaaagguuuuuggaauuaugucugcugaauaauaaacuuuuuugaaauaauaaaucugguagaaaaaugagaucucaaaggcucuuuucagagccaccaaaaaaaaaaaaaaaaaaaaaaaaaaaaaaaaaaaaaaaaaaaaaaaaaaaaaaaaaaaaaaaaagaauu

SEQ ID NO: 16075 - RNA, 1778 nt, Artificial Sequence
  mRNA product Design b-4 (hSL-A64-N5) comprising derived and/or modified sequence from LASV(GA391;Clade III)__CAA36645__GPCmut1 (opt5)
aggagagucccgcagucggcguccagcggcucugcuuguucgugugugugucguugcaggccuuauucaagcuuaccaugggccagaucgugaccuucuuucaagaggucccccacguuauugaagaggugaugaacaucgugcugauugcccucagcauccuggcuauucuuaaggggcuguacaaugucgccacaugcggacucaucggccuggugacguuccuucugcucuccgggagaucuuguagccugaucuauaaaggaaccuacgaacugcagacacucgagcugaacauggaaacccuuaauaugacaaugccucuguccugcaccaagaacaauucucaucacuauauucggguuggcaacgagacagggcucgagcugacccuuacgaauaccagcauccugaaccauaaauuuuguaaucucuccgacgcgcacaagcgcaaccuguacgaucauucucugaugagcauuaucuccacauuccaccucagcauuccgaauuuuaaccaguaugaagcuaugucuugcgacuucaauggaggcaaaaucaccgugcaguacaaccugucccacagcuuugccgucgaugccgcuggccauugugggacacuugccaauggagugcugcaaaccuucaugagaauggcuuggggcgggucuuauauugcccucgacuccggaugcggcaacugggauugcaucaugacgagcuaccaguaccugaucauucagaacacaaccugggacgaucacugucaguuuucucgccccuccccuaucggguaucuuggacugcucagccaaagaacacgggacauuuacaucucccgcagacgccggggcaccuucaccuggacacucucugauagcgagggcaaugaaacgcccgggggauauugccugacccgguggaugcuuauugaggcggagcugaaguguuuuggcaacacagccguugcuaagugcaaugaaaaacaugacgaggaguucugugauaugcuccgccuguuugacuucaacaagcaggccaucagacggcuuaaaacccccgcucagauguccauccagcugauuaauaaggccgugaacgcgcucaucaaugaucaacugauuaugaaaaaccaucugcgcgacaucaugugcauuccuuacugcaauuauagcagauacugguaucucaaccacacaucuaccggaaagacgucccugccccggugcuggcuuaucagcaauggcucuuaccugaacgaaacaaaguucagcgacgauaucgagcagcaggccgacaauaugauuaccgagaugcuccaaaaagaauacaucgaucgccaggggaagaccccucugggacuggucgaccuuuuuguguucuccacaucuuuuuaucucauuagcaucuuccugcaccuggugaaaauuccgacccacagacauaucgucggcaagcccuguccuaaaccccaccggcucaaccauaugggcauuugcuccugugggcuguacaagcagccuggaguucccgugagauggaaacgcugaggacuaguaauaaggaaacuguaugaaugucugugggcaggaagugaagagauccuucuguaaagguuuuuggaauuaugucugcugaauaauaaacuuuuuugaaauaauaaaucugguagaaaaaugagaucucaaaggcucuuuucagagccaccaaaaaaaaaaaaaaaaaaaaaaaaaaaaaaaaaaaaaaaaaaaaaaaaaaaaaaaaaaaaaaaaagaauu

SEQ ID NO: 16076 - RNA, 1781 nt, Artificial Sequence
  mRNA product Design b-4 (hSL-A64-N5) comprising derived and/or modified sequence from LASV(AV;Clade V)__CCA30314__GPCmut1 (opt5)
aggagagucccgcagucggcguccagcggcucugcuuguucgugugugugucguugcaggccuuauucaagcuuaccaugggccagaucgugaccuucuuucaagaggucccccacguuauugaagaggugaugaacaucgugcugauugcccucagcauccuggcuguccuuaaggggcuguacaauauugccacaugcggacucaucggccugaucacguuccuucugcucugugggagauccugcucuagcaaccuguauaaaggaguguacgaacugcagucccucgaccugaauauggagacccuuaacaugacaaugccucugucuuguaccaagaauaacagccaucacuauauucggguuggcaaugauacagggcucgaacugacccuuacaaacaccuccauccugaaucauaaauuuugcaaccucucugacgcgcacaagaaagaucuguacgaccaugcucugaugagcauuaucuccacguuccaccucagcauuccgaauuuuaaccaguaugaggccaugucuugugauuucaauggaggcaagaucuccgugcaguacaaccugagccacucuuaugccauugacgcugccaaucauugcggcaccgucgcuaacgggauccuucaaacauuuaugcgcauggccuggggaggcuccuacaucgcgcuggauagcgggugcggaaacugggacuguauuaugaccucuuaccaguaucucaucauucagaauacaaccugggagaaccacugccaguucucccggcccagcccuaucggcuaccuggggcuucugucccaacgcacgagagauauuuauaucucucggcgccgccggggaacauuuaccuggacacugagcgacuccgaaggcaaugccacccccggcggguacugucucaccagauggaugcugaucgaggcugaacuuaagugcuucggaaacacagccguggcuaaauguaaugagaagcaugaugaggaauuuugcgacaugcugcgccucuucgauuuuaacaaacaggccauuagccggcugaagucucccgcgcagauguccauccagcuuauuaauaaagccguuaacgcucugaucaaugaccaacucauuaugaagaaccaccugagagacaucaugugcaucccuuauugcaauuacagcaaguauugguaccugaaccacacgauuaccgggaaaacaucucuccccaaguguuggcuggugagcaauggauccuaccuuaacgaaacccauuucucugaugacaucgagcagcaggccgauaauaugauuacagaaaugcugcaaaaagaguauauggagcggcagggcaagaccccucucgggcuggucgaccuguucguguuuagcacguccuucuaccuuaucagcauuuuucuccgccuggugaaaaucccgacacacagacauauugucggaaagcccugcccuaaaccccaccggcugaaccauaugggcaucuguucuugcggccucuauaagcagccugggguucccgugcgcuggaagagaugaggacuaguaauaaggaaacuguaugaaugucugugggcaggaagugaagagauccuucuguaaagguuuuuggaauuaugucugcugaauaauaaacuuuuuugaaauaauaaaucugguagaaaaaugagaucucaaaggcucuuuucagagccaccaaaaaaaaaaaaaaaaaaaaaaaaaaaaaaaaaaaaaaaaaaaaaaaaaaaaaaaaaaaaaaaaagaauu

SEQ ID NO: 16077 - RNA, 1778 nt, Artificial Sequence
  mRNA product Design b-4 (hSL-A64-N5) comprising derived and/or modified sequence from LASV(Togo/2016/7082;Clade VI)__AMR44577__GPCmut1 (opt5)
aggagagucccgcagucggcguccagcggcucugcuuguucgugugugugucguugcaggccuuauucaagcuuaccaugggccagaucauuaccuucuuucaagaggugccccacgucaucgaagagguuaugaacauugugcugaucgcccucagccugcuugcuauucugaaggggguguacaaugucgccacaugcggaaucaucggccucgugacguuccuguuucuuugugggagauccugcucucugauuuauaaaggaagcuacgaacuccagacccuggagcugaacauggaaacacucaauaugaccaugccucuguccuguacaaagaacucuagccaucacuauauccggguuggcaaugagaccgggcuugagcugacacucaccaacacguccauuaucaaucauaaauucugcaaccugucugacgcgcacaagcgcaaucuuuacgaucaugcucugaugagcauucucuccaccuuucaccugagcaucccgaacuucaaucaguaugaagccaugucuugugacuuuaacggaggcaaaauuuccgugcaguacaaucugagccacgccuaugcugucgaugccgcugagcauugcggcacaguggccaacgggguucuccaaaccuucaugagaauggcguggggaggcucuuacaucgcccuggacuccgggugcggaaauugggauuguaucaugacaagcuaccaguaucuuauuauccagaacaccacgugggaagaccacugccaguuuucucgccccuccccuauuggcuaccuggggcuccugagccaaagaacacgggauaucuauauuucccgcagacgccggggaaccuucacauggacccucucugacagcgagggcaacgagacccccggcggguacugucugacacgguggaugcugaucgaagcugagcucaagugcuuuggaaauacggccguggcuaaguguaacgaaaaacaugaugaggaguucugcgacaugcugcgccuuuuugauuucaauaagcaggccauccagagacugaaaucccccgcgcagaugagcauucaacucaucaacaaggccgucaaugcucugauuaacgaccagcuuaucaugaaaaaucaucugcgggauaugaugugcauuccuuauugcaacuacucuaaguauugguaccucaaucacaccuccagcgggcgcacaucucugcccaaguguuggcuggugagcaacggauccuaccucaaugagacccacuucucugacgacaucgaacagcaagccgauaacaugaucacagagaugcugcagaaagaauauauugacagacagggcaagaccccucuugggcugguggaucucuuugucuucagcacguccuuuuaccugaucagcauuuuccugcaccuuaucaaaauuccgacacaucggcacaucguuggaaagcccugcccuaaaccccaucgccucaaucacaugggcauuuguucuugcggccuguauaagcagccuggggugcccaccagauggaaacggugaggacuaguaauaaggaaacuguaugaaugucugugggcaggaagugaagagauccuucuguaaagguuuuuggaauuaugucugcugaauaauaaacuuuuuugaaauaauaaaucugguagaaaaaugagaucucaaaggcucuuuucagagccaccaaaaaaaaaaaaaaaaaaaaaaaaaaaaaaaaaaaaaaaaaaaaaaaaaaaaaaaaaaaaaaaaagaauu

SEQ ID NO: 16078 - RNA, 1778 nt, Artificial Sequence
  mRNA product Design b-4 (hSL-A64-N5) comprising derived and/or modified sequence from LASV(KAK-428;Clade n.d. (VII))__ANH09740__GPCmut1 (opt5)
aggagagucccgcagucggcguccagcggcucugcuuguucgugugugugucguugcaggccuuauucaagcuuaccaugggccagaucgugaccuucuuucaagaggucccccacguuauugaagaggugaugaacaucgugcugauugcccucagccugcuugcuauccugaaggggcucuacaauuucgccacaugcggagucauuggccugaucacguuucuucugcucugugggagauccugcucugcgaccuauaaaggacaguacgaacugcagacacuggagcucaacauggaaagccugaauaugaccaugccucuuuccuguacaaagaacaauucucaucacuauauccgggcuggcaacaauaccgggcuggagcucacacugaccaacacgagcauuaucucccauaaauucugcaaucuuucugacgcccacaagaaaaaccuguacgaucauacccucaugagcauuaucacaaccuuucaccuguccauuccgaauuucaaccaguaugaggccaugagcugugacuuuaauggaggcaagaucucuauucaauacaaccugucccacagcuaugcuggcgaugccgcucagcauugcgggacaguggccaauggaguucuccagaccuucaugcgcauggcguggggcgggucuuaccuggcccuugacuccggaugccggggcugggauuguaucaucagcucuuaccaguaucugauuauccaaaacacgacaugggacgaucacugccaguuuucccgccccagcccuauuggguaccucggauucgugucccagaagaccagagacaucuauauuucucggcgccgccggggcacauuuaccuggacccugagcgauuccgaaggccaugacaugcccgggggauacugucucacaagauggaugcugaucgaggcugaucugaaaugcuucggcaacacggccgucgcuaaguguaaugaaaaacacgacgaggaguuuugcgauauguggcgccucuucgacuucaacaagcaggccauccaacggcugaaagcgcccgcccagaugaauauucagcuuaucaacaaggcugugaaugcccugauuaacgaccaacucaugaugaagaaucaccugagagauaucaugugcauuccuuauugcaacuacagcaaauuuugguaucuuaauaacaccacaaccggacggacaucucugccccgcuguuggcucaucuccaauggcagcuaccugaacgagacccauuucucugacgauaucgaacagcaggcugacaauaugauuacggagaugcugcagaaggaauacauggauagacaagggaaaacaccucucggacugguugaccuuuuuguguucagcaccuccuuuuaucugaucaccauuuuccuccaccuggucaagaucccgacacaucggcacauugugggcaaacccugcccuaagccccaucgccugaaccacaugggcaucuguucuugcgggcuuuacaaacagccuggagugcccgucagauggaagcggugaggacuaguaauaaggaaacuguaugaaugucugugggcaggaagugaagagauccuucuguaaagguuuuuggaauuaugucugcugaauaauaaacuuuuuugaaauaauaaaucugguagaaaaaugagaucucaaaggcucuuuucagagccaccaaaaaaaaaaaaaaaaaaaaaaaaaaaaaaaaaaaaaaaaaaaaaaaaaaaaaaaaaaaaaaaaagaauu

SEQ ID NO: 16079 - RNA, 1778 nt, Artificial Sequence; identical to SEQ ID NO: 16073
  mRNA product Design b-4 (hSL-A64-N5) comprising derived and/or modified sequence from LASV(Pinneo-NIG-1969;Clade I)__AIT17836__GPCmut1 (opt5)

SEQ ID NO: 16080 - RNA, 1778 nt, Artificial Sequence
  mRNA product Design b-4 (hSL-A64-N5) comprising derived and/or modified sequence from LASV(ISTH0009-NIG-2011;Clade II)__AIT17404__GPCmut1 (opt5)
aggagagucccgcagucggcguccagcggcucugcuuguucgugugugugucguugcaggccuuauucaagcuuaccaugggccagaucauuaccuucuuucaagaggugccccacgucaucgaagagguuaugaacauugugcugaucgcccucagccugcuugcuauucugaaggggaucuacaauguggccacaugcggacucuucggccuggucuccuuucuucugcucugugggagaucuugcagcacgaccuauaaaggaguguacgaacugcagacacuggagcucgacauggcgucccugaacaugaccaugccucuuucuuguacaaagaauaacagccaucacuauaucaugguuggcaaugaaaccgggcuggagcucacacugaccaacacguccauuaucaaucauaaauucugcaaccuuucugaugcucacaagaaaaaucuguacgaccaugcccucaugagcauuaucuccaccuuucaccugagcauuccgaacuucaaucaguaugaggccaugucuugugauuuuaacggaggcaagaucuccgugcaguacaaucugagccacgcuuaugccgucgacgcugccaaccauugcggcacaauugcgaauggggugcuccaaaccuucaugcggauggccuggggaggcucuuacaucgcucuggauuccgggugcggaagcugggacuguaucaugacaucuuaccaguaucuuauuauccagaacaccacgugggaagaucacugccaguuuucccgccccagcccuauuggcuaccuggggcuccugucccaaagaacacgggacaucuauauuucucgcagacgccggggaaccuucacauggacccucagcgauuccgagggcaacgaaacccccggcggguacugucugacacgguggaugcugaucgaggccgagcucaaaugcuuuggaaauacggcuguugccaaguguaacgaaaaacaugacgaggaguucugcgauaugcugcgccuuuuugacuucaauaagcaggcgaucagacggcugaaaacccccgcccagaugagcauucagcucaucaacaaggcugugaaugcccugauuaacgaucaacuuaucaugaagaaucaucugcgcgacauuaugugcaucccuuauugcaacuacucuaaauauugguaccucaaucacacagucaccgggaagacaucccugcccagauguuggcuggugagcaacggaucuuaccucaaugaaacccacuucagcgacgauaucgagcagcaggcugacaacaugauuacggagcugcuucaaaaagaauauauggaucggcagggcaagacaccucuggggcucguggaccuguuugucuucuccaccucuuuuuaccugaucagcauuuuccuucaccucaucaaaauuccgacccaucgccacaucacaggaaagcccugcccuaaaccccauagacugaaucacaugggcauuuguuccugcggccuguauaagcacccugggguucccgugaaguggaaacggugaggacuaguaauaaggaaacuguaugaaugucugugggcaggaagugaagagauccuucuguaaagguuuuuggaauuaugucugcugaauaauaaacuuuuuugaaauaauaaaucugguagaaaaaugagaucucaaaggcucuuuucagagccaccaaaaaaaaaaaaaaaaaaaaaaaaaaaaaaaaaaaaaaaaaaaaaaaaaaaaaaaaaaaaaaaaagaauu

SEQ ID NO: 16081 - RNA, 1778 nt, Artificial Sequence
  mRNA product Design b-4 (hSL-A64-N5) comprising derived and/or modified sequence from LASV(ISTH2010-NIG-2012;Clade II)__AIT17482__GPCmut1 (opt5)
aggagagucccgcagucggcguccagcggcucugcuuguucgugugugugucguugcaggccuuauucaagcuuaccaugggccagaucauuaccuucuuucaagaggugccccacgucaucgaagagguuaugaacauugugcugaucgcccucagccugcuugcuauucugaaggggaucuacaauguggccacaugcggacucuucggccuggucuccuuucuucugcucugugggagaucuugcagcacgaccuauaaaggaguguacgaacugcagacacuggagcucgacauggcgucccugaacaugaccaugccucuuucuuguacaaagaauaacagccaucacuauaucaugguuggcaaugaaaccgggcuggagcucacacugaccaacacguccauuaucaaucauaaauucugcaaccuuucugaugcucacaagaaaaaucuguacgaccaugcccucaugagcauuaucuccaccuuucaccugagcauuccgaacuucaaucaguaugaggccaugucuugugauuuuaacggaggcaagaucuccgugcaguacaaucugagccacgcuuaugccgucgacgcugccaaccauugcggcacaauugcgaauggggugcuccaaaccuucaugcggauggccuggggaggcucuuacaucgcucuggauuccgggugcggaagcugggacuguaucaugacaucuuaccaguaucuuauuauccagaacauuaccugggaagaucacugccaguuuucccgccccagcccuaucggcuaccuggggcuccugucccaaagaacgcgggacauuuauaucucucgcagacgccggggaacauucaccuggacacucagcgauuccgagggcaacgaaacccccggcggguacugucugacccgguggaugcugaucgaggccgagcucaaaugcuuuggaaauacagcuguugccaaguguaacgaaaaacaugacgaggaguucugcgauaugcugcgccuuuuugacuucaauaagcaggcgauuagacggcugaaaacgcccgcccagaugagcauccagcucauuaacaaggcugugaaugcccugaucaacgaucaacuuauuaugaagaaucaucugcgcgacaucaugugcaucccuuauugcaacuacucuaaauauugguaccucaaucacaccgucacagggaagaccucccugcccagauguuggcuggugagcaacggaucuuaccucaaugaaacacacuucagcgacgauauugagcagcaggcugacaacaugaucaccgagcugcuucaaaaagaauauauugaucggcagggcaagacgccucuggggcucguggaccuguuugucuucuccacaucuuuuuaccugaucagcauuuuccuucaccucguuaaaaucccgacccaucgccacguggugggaaagcccugcccuaaaccccauagacugaaucacaugggcauuuguuccugcggccuguauaagcacccugggguccccgugaaguggaaacggugaggacuaguaauaaggaaacuguaugaaugucugugggcaggaagugaagagauccuucuguaaagguuuuuggaauuaugucugcugaauaauaaacuuuuuugaaauaauaaaucugguagaaaaaugagaucucaaaggcucuuuucagagccaccaaaaaaaaaaaaaaaaaaaaaaaaaaaaaaaaaaaaaaaaaaaaaaaaaaaaaaaaaaaaaaaaagaauu

SEQ ID NO: 16082 - RNA, 1778 nt, Artificial Sequence
  mRNA product Design b-4 (hSL-A64-N5) comprising derived and/or modified sequence from LASV(Lassa virus/H.sapiens-wt/NGA/2015/ISTH_0543;Clade II)__AVO03639__GPCmut1 (opt5)
aggagagucccgcagucggcguccagcggcucugcuuguucgugugugugucguugcaggccuuauucaagcuuaccaugggccagaucauuaccuucuuucaagaggugccccacgucaucgaagagguuaugaacauugugcugaucgcccucagccugcuugcuauucugaaggggaucuacaauguggccacaugcggacucuucggccuggucuccuuucuucugcucugugggagaucuugcagcacgaccuauaaaggaguguacgaacugcagacacuggagcucgacauggcgaaccugaauaugaccaugccucuuuccuguacaaagaacaauucucaucacuauaucaugguuggcaacgaaaccgggcuggagcucacacugaccaauacgagcauuaucaaccauaaauucugcaaucuuuccgaugcucacaagaaaaaccuguacgaccaugcccucaugucuauuaucagcaccuuucaccuguccauuccgaauuucaaccaguaugaggccaugagcugugauuuuaauggaggcaagaucucugugcaguacaaccugucccacacauaugcugucgacgccgcuaaucauugcggcaccauugccaacggggugcuccaaacauucaugcggauggcguggggaggcagcuacaucgcccuggauucugggugcggauccugggacuguaucaugaccagcuaccaguaucuuguuauucagaacacgacaugggaagaucacugccaguuuucucgccccuccccuaucggcuaccuggggcuccugagccaaagaacccgggacauuuauaucucccgcagacgccggggaacauucaccuggacccucucugauagcgagggcaaugaaacacccggcggguacugucugacgcgguggaugcugauugaggcugagcucaaaugcuuuggaaacaccgccguggcuaaguguaaugaaaaacaugacgaggaguucugcgauaugcugcgccuuuuugacuucaacaagcaggccaucagacggcugaaaacacccgcgcagauguccauccagcucauuaauaaggccgucaacgcucugaucaaugaucaacuuauuaugaagaaccaucugcgcgacaucaugugcauuccuuauugcaauuacagcaaauauugguaccucaaccacaccgugacagggaagaccucucugcccagauguuggcugguguccaauggaagcuaccucaacgaaacgcacuucucugacgauaucgagcagcaggccgacaauaugaucacagagcugcuucaaaaagaauauauugaucggcagggcaagaccccucuggggcucgucgaccuguuuguuuucagcaccuccuuuuaccugaucucuauuuuccuucaccucgugaaaaucccgacacaucgccacauuaccggaaagcccugcccuaaaccccauagacugaaccacaugggcaucuguagcugcggccuguauaagcacccuggggugcccgucaaguggaaacggugaggacuaguaauaaggaaacuguaugaaugucugugggcaggaagugaagagauccuucuguaaagguuuuuggaauuaugucugcugaauaauaaacuuuuuugaaauaauaaaucugguagaaaaaugagaucucaaaggcucuuuucagagccaccaaaaaaaaaaaaaaaaaaaaaaaaaaaaaaaaaaaaaaaaaaaaaaaaaaaaaaaaaaaaaaaaagaauu

SEQ ID NO: 16083 - RNA, 1778 nt, Artificial Sequence
  mRNA product Design b-4 (hSL-A64-N5) comprising derived and/or modified sequence from LASV(Lassa virus/H.sapiens-wt/NGA/2016/ISTH_0009;Clade II)__AVO03571__GPCmut1 (opt5)
aggagagucccgcagucggcguccagcggcucugcuuguucgugugugugucguugcaggccuuauucaagcuuaccaugggccagaucauuaccuucuuucaagaggugccccacgucaucgaagagguuaugaacauugugcugaucgcccucagccugcuugcuauucugaaggggaucuacaauguggccacaugcggacuccugggccuugucuccuuccugcuccugugugggagaucuugcagcacgaccuauaaaggaguguacgaacugcagacacucgagcuggacauggcgucccuuaacaugaccaugccucugucuuguacaaagaauaacagccaucacuauaucaugguuggcaaugaaaccgggcucgagcugacacuuaccaacacguccauuaucaaucauaaauuuugcaaccugucugaugcucacaagaaaaaucucuacgaccaugcccugaugagcauuaucuccaccuuccaccugagcauuccgaacuuuaaucaguaugaggccaugucuugugauuucaacggaggccggaucuccgugcaguacaaucucagccacucuuaugcugucgacgccgcuaaccauugcggcacaauugccaauggggugcugcaaaccuuuaugcgcauggcguggggaggcuccuacaucgcccuugauagcgggugcggaucuugggacuguaucaugacauccuaccaguaucugauuauccagaacaccacgugggaagaucacugccaguucagcagacccuccccuauuggcuaccucgggcugcuuucucaacggacacgcgacaucuauauuagcagacggcgccggggaaccuuuacauggacccuguccgauagcgagggcaacgaaacccccggcggguacugucugacacgcuggaugcucaucgaggcugagcugaagugcuucggaaauacggccguugcuaaauguaacgaaaagcaugacgaggaauuuugcgauaugcuuagacuguucgacuuuaauaaacaggccauccggcgccucaagacccccgcgcagaugucuauucagcugaucaacaaagccgugaaugcucuuauuaacgaucaacugaucaugaagaaucaccucagagacauuaugugcaucccuuauugcaacuacuccaaguauugguaccugaaucacacagucaccgggaaaacaagccugccccgguguuggcucgugucuaacggaagcuaccugaaugaaacccauuucuccgacgauaucgagcagcaggccgacaacaugauuacggagcuucugcaaaaggaauauaucgaucgccagggcaaaacaccucucgggcugguggaccuguucgucuuuucuaccagcuucuaccuuauuuccaucuuucuccaccugguuaagauuccgacccauagacacaucacaggaaaacccugcccuaagccccaucggcugaaucacaugggcauuuguagcugcggccucuauaaccacccuggggugcccgugaaauggaagcgcugaggacuaguaauaaggaaacuguaugaaugucugugggcaggaagugaagagauccuucuguaaagguuuuuggaauuaugucugcugaauaauaaacuuuuuugaaauaauaaaucugguagaaaaaugagaucucaaaggcucuuuucagagccaccaaaaaaaaaaaaaaaaaaaaaaaaaaaaaaaaaaaaaaaaaaaaaaaaaaaaaaaaaaaaaaaaagaauu

SEQ ID NO: 16084 - RNA, 1778 nt, Artificial Sequence
  mRNA product Design b-4 (hSL-A64-N5) comprising derived and/or modified sequence from LASV(Lassa virus/H.sapiens-wt/NGA/2016/ISTH_0017;Clade II)__AVO03567__GPCmut1 (opt5)
aggagagucccgcagucggcguccagcggcucugcuuguucgugugugugucguugcaggccuuauucaagcuuaccaugggccagaucauuaccuucuuucaagaggugccccacgucaucgaagagguuaugaacauugugcugaucgcccucagccugcuugcuauucugaaggggaucuacaauguggccacaugcggacucuucggccuggucuccuuucuucugcucugugggagaucuugcagcacgaccuauaaaggaguguacgaacugcagacacuggagcucgacauggcgucccugaacaugaccaugccucuuucuuguacaaagaauaacagccaucacuauaucaugguuggcaaugaaaccgggcuggagcucacacugaccaacacguccauuaucaaucauaaauucugcaaccuuucugaugcucacaagaaaaaucuguacgaccaugcccucaugagcauuaucuccaccuuucaccugagcauuccgaacuucaaucaguaugaggccaugucuugugauuuuaacggaggcaagaucuccgugcaguacaaucugagccacacauaugcuauugacgccgcuaaccauugcggcaccaucgccaaugggguccuccaaacauucaugcggauggcguggggaggcucuuacaucgcccuggauuccgggugcggaagcugggacuguauuaugaccucuuaccaguaucuuaucauucagaacacgacaugggaagaucacugccaguuuucccgccccagcccuaucggcuaccuggggcuccugucccaaagaacccgggacauuuauaucucucgcagacgccggggaacauucaccuggacccucagcgauuccgagggcaacgaaacacccggcggguacugucugacgcgguggaugcugaucgaggcugagcucaaaugcuuuggaaauaccgccguggcuaaguguaacgaaaaacaugacgaggaguucugcgauaugcugcgccuuuuugacuucaauaagcaggccauuagacggcugaaaacacccgcgcagaugagcauccagcucauuaacaaggccguuaaugcucugaucaacgaucaacuuauuaugaagaaucaucugcgcgacaucaugugcaucccuuauugcaacuacucuaaauauugguaccucaaucacaccgugacagggaagaccucccugcccagauguuggcuggucagcaacggaucuuaccucaaugaaacgcacuucagcgacgauauugagcagcaggccgacaacaugaucacagagcugcuucaaaaagaauauauggaucggcagggcaagaccccucuggggcucguggaccuguuuguguucuccaccucuuuuuaccugauuagcaucuuccuucaccucguccgcauuccgacacauagacacguuaucggaaaacccugcccuaagccccaucggcugaaucacaugggcauuuguuccugcggccuguauaaacacccuggggugcccgugaaguggaagcgcugaggacuaguaauaaggaaacuguaugaaugucugugggcaggaagugaagagauccuucuguaaagguuuuuggaauuaugucugcugaauaauaaacuuuuuugaaauaauaaaucugguagaaaaaugagaucucaaaggcucuuuucagagccaccaaaaaaaaaaaaaaaaaaaaaaaaaaaaaaaaaaaaaaaaaaaaaaaaaaaaaaaaaaaaaaaaagaauu

SEQ ID NO: 16085 - RNA, 1778 nt, Artificial Sequence
  mRNA product Design b-4 (hSL-A64-N5) comprising derived and/or modified sequence from LASV(Lassa virus/H.sapiens-wt/NGA/2018/ISTH_0959;Clade II)__AVV65099__GPCmut1 (opt5)
aggagagucccgcagucggcguccagcggcucugcuuguucgugugugugucguugcaggccuuauucaagcuuaccaugggccagaucauuaccuucuuucaagaggugccccacgucaucgaagagguuaugaacauugugcugaucgcccucagccugcuugcuauucugaaggggaucuacaauguggucacaugcggacucuucggccugguguccuuucuucugcucugugggagaucuugcagcacgaccuauaaaggaguuuacgaacugcagacacuggagcucgacauggccucccugaacaugaccaugccucuuucuuguacaaagaauaacagccaucacuauaucauggugggcaaugaaaccgggcuggagcucacacugaccaacacguccauuaucaaucauaaauucugcaaccuuucugaugcgcacaagaaaaaucuguacgaccaugcucucaugagcauuaucuccaccuuucaccugagcauuccgaacuucaaucaguaugaggccaugucuugugauuuuaacggaggcaagaucuccguccaguacaaucugagccacgccuaugcuauugacgccgcuaaccauugcggcacaaucgccaauggggugcuccaaaccuucaugcggauggcguggggaggcucuuacaucgcccuggauuccgggugcggaagcugggacuguauuaugacaucuuaccaguaucuuaucauucagaacaccacgugggaagaucacugccaguuuucccgccccagcccuaucggcuaccuggggcuccugucccaaagaacacgggacauuuauaucucucgcagacgccggggaaccuucacauggacccucagcgauuccgagggcaacgaaacccccggcggguacugucugacacgguggaugcugaucgaggcugagcucaaaugcuuuggaaauacggccguugcuaaguguaacgaaaaacaugacgaggaguucugcgauaugcugcgccuuuuugacuucaauaagcaggccauuagacggcugaaaacccccgcgcagaugagcauccagcucauuaacaaggccgugaaugcucugaucaacgaucaacuuauuaugaagaaucaucugcgcgacaucaugugcaucccuuauugcaacuacucuaaauauugguaccucaaucacacagucaccgggaagacaucccugcccagauguuggcuggugagcaacggaucuuaccucaaugaaacccacuucagcgacgauauugagcagcaggccgacaacaugaucacggagcugcuucaaaaagaauauauugaucggcagggcaagacaccucuggggcucguggaccuguuugucuucuccaccucuuuuuaccugaucagcauuuuccuucaccucguuaaaaucccgacccaucgccacgugauuggaaagcccugcccuaaaccccauagacugaaucacaugggcaucuguuccugcggccuguauaagcacccuggggugcccgucaaguggaaacggugaggacuaguaauaaggaaacuguaugaaugucugugggcaggaagugaagagauccuucuguaaagguuuuuggaauuaugucugcugaauaauaaacuuuuuugaaauaauaaaucugguagaaaaaugagaucucaaaggcucuuuucagagccaccaaaaaaaaaaaaaaaaaaaaaaaaaaaaaaaaaaaaaaaaaaaaaaaaaaaaaaaaaaaaaaaaagaauu

SEQ ID NO: 16086 - RNA, 1778 nt, Artificial Sequence
  mRNA product Design b-4 (hSL-A64-N5) comprising derived and/or modified sequence from LASV(LASV003-NIG-2008;Clade II)__AIT17580__GPCmut1 (opt5)
aggagagucccgcagucggcguccagcggcucugcuuguucgugugugugucguugcaggccuuauucaagcuuaccaugggccagaucauuaccuucuuucaagaggugccccacgucaucgaagagguuaugaacauugugcugaucgcccucagccugcuugcuauucugaaggggaucuacaauguggccacaugcggacucuucggccuggucuccuuucuucugcucugugggagaucuugcagcacgaccuauaaaggaguguacgaacugcagacacuggagcucgacauggcgucccugaacaugaccaugccucuuucuuguacaaagaauaacagccaucacuauaucaugguuggcaaugaaaccgggcuggagcucacacugaccaacacguccauuaucaaucauaaauucugcaaccuuucugaugcucacaagaaaaaucuguacgaccaugcccucaugagcauuaucuccaccuuucaccugagcauuccgaacuucaaucaguaugaggccaugucuugugauuuuaacggaggcaagaucuccgugcaguacaaucugagccacacauaugcugucgacgccgcuaaccauugcggcaccauugccaauggggugcuccaaacauucaugcggauggcguggggaggcucuuacaucgcccuggauuccgggugcggaagcugggacuguaucaugaccucuuaccaguaucuuauuauccagaacacgacaugggaagaucacugccaguuuucccgccccagcccuauuggcuaccuggggcuccugucccaaagaacccgggacaucuauauuucucgcagacgccggggaacauucaccuggacccucagcgauuccgagagcaacgaaacacccggcggcuacugucugacgcgguggaugcugaucgaggcugagcucaaaugcuuugggaauaccgccguugcuaaguguaacgaaaaacaugacgaggaguucugcgauaugcugcgccuuuuugacuucaauaagcaggccaucagacggcugaaagcgcccgcccagaugucuauucagcucaucaacaaggcugugaaugcccugauuaacgaucaacuuaucaugaagaaucaucugcgcgacauuaugugcaucccuuauugcaacuacuccaaauauugguaccucaaucacacagucaccggcagaacaagccugccccgguguuggcuggugucuaacgggagcuaccucaaugaaacccacuucuccgacgauaucgagcagcaggcugacaacaugauuacggagcugcuucaaaaggaauauauggaucgccagggaaaaacaccucugggccucguggaccuguuugucuucucuaccagcuuuuaccugaucuccauuuuccuucaccucguuaagaucccgacccauagacacgugauugggaaacccugcccuaagccccaucggcugaaucacaugggaaucuguagcugcggccuguauaaacacccuggcgugcccgucaaguggaagcgcugaggacuaguaauaaggaaacuguaugaaugucugugggcaggaagugaagagauccuucuguaaagguuuuuggaauuaugucugcugaauaauaaacuuuuuugaaauaauaaaucugguagaaaaaugagaucucaaaggcucuuuucagagccaccaaaaaaaaaaaaaaaaaaaaaaaaaaaaaaaaaaaaaaaaaaaaaaaaaaaaaaaaaaaaaaaaagaauu

SEQ ID NO: 16087 - RNA, 1778 nt, Artificial Sequence
  mRNA product Design b-4 (hSL-A64-N5) comprising derived and/or modified sequence from LASV(LASV035-NIG-2009;Clade II)__AIT17588__GPCmut1 (opt5)
aggagagucccgcagucggcguccagcggcucugcuuguucgugugugugucguugcaggccuuauucaagcuuaccaugggccagaucauuaccuucuuucaagaggugccccacgucaucgaagagguuaugaacauugugcugaucgcccucagccugcuugcuauucugaaggggaucuacaauguggccacaugcggacucuucggccuggucuccuuucuucugcucugugggagaucuugcagcacgaccuauaaaggaguguacgaacugcagacacuggagcucgacauggcgucccugaacaugaccaugccucuuucuuguacaaagaauaacagccaucacuauaucaugguuggcaaugaaaccgggcuggagcucacacugaccaacacguccauuaucaaucauaaauucugcaaccuuucugaugcucacaagaaaaaucuguacgaccaugcccucaugagcauuaucuccaccuuucaccugagcauuccgaacuucaaucaguaugaggccaugucuugugauuuuaacggaggcaagaucuccgugcaguacaaucugagccacgcuuaugccgucgacgcugccaaccauugcggcacaauugcgaauggggugcuccaaaccuucaugcggauggccuggggaggcucuuacaucgcucuggauuccgggugcggaagcugggacuguaucaugacaucuuaccaguaucuuauuauccagaacaccacgugggaagaucacugccaguuuucccgccccagcccuauuggcuaccuggggcuccugucccaaagaacacgggacaucuauauuucucgcagacgccggggaaccuucacauggacccucagcgauuccgagggcaacgaaacccccggcggguacugucugacacgguggaugcugaucgaggccgagcucaaaugcuuuggaaauacggcuguugccaaguguaacgaaaaacaugacgaggaguucugcgauaugcugcgccuuuuugacuucaauaagcaggcgaucagacggcugaaagcccccgcucagaugagcauucagcucaucaacaaggccgugaaugcucugauuaacgaucaacuuaucaugaagaaucaucugcgcgacauuaugugcaucccuuauugcaacuacucuaaauauugguaccucaaucacaccgucacagggaagaccucccugcccagauguuggcuggugagcaacggaucuuaccucaaugaaacacacuucagcgacgauaucgagcagcaggccgacaacaugauuaccgagcugcuucaaaaagaauauaucgaucggcagggcaagacgccucuggggcucguggaccuguuugucuucuccacaucuuuuuaccugauuagcaucuuccuucaccucguuaaaauuccgacccaucgccacgugaucggaaagcccugcccuaaaccccauagacugaaucacaugggcauuuguuccugcggccuguauaagcacccuggggugcccgucaaguggaaacggugaggacuaguaauaaggaaacuguaugaaugucugugggcaggaagugaagagauccuucuguaaagguuuuuggaauuaugucugcugaauaauaaacuuuuuugaaauaauaaaucugguagaaaaaugagaucucaaaggcucuuuucagagccaccaaaaaaaaaaaaaaaaaaaaaaaaaaaaaaaaaaaaaaaaaaaaaaaaaaaaaaaaaaaaaaaaagaauu

SEQ ID NO: 16088 - RNA, 1778 nt, Artificial Sequence
  mRNA product Design b-4 (hSL-A64-N5) comprising derived and/or modified sequence from LASV(LASV1000-NIG-2009;Clade II)__AIT17782__GPCmut1 (opt5)
aggagagucccgcagucggcguccagcggcucugcuuguucgugugugugucguugcaggccuuauucaagcuuaccaugggccagaucauuaccuucuuucaagaggugccccacgucaucgaagagguuaugaacauugugcugaucgcccucagccugcuugcuauucugaaggggaucuacaauguggccacaugcggacucuucggccuggucuccuuucuucugcucugugggagaucuugcagcacgaccuauaaaggaguguacgaacugcagacacuggagcucgacauggcgucccugaacaugaccaugccucuuucuuguacaaagaauaacagccaucacuauaucaugguuggcaaugaaaccgggcuggagcucacacugaccaacacguccauuaucaaucauaaauucugcaaccuuucugaugcucacaagaaaaaucuguacgaccaugcccucaugagcauuaucuccaccuuucaccugagcauuccgaacuucaaucaguaugaggccaugucuugugauuuuaacggaggcaagaucuccgugcaguacaaucugagccacacauaugcugucgacgccgcuaaccauugcggcaccauugccaauggggugcuccaaacauucaugcggauggcguggggaggcucuuacaucgcccuggauuccgggugcggaagcugggacuguaucaugaccucuuaccaguaucuuauuauccagaacacgacaugggaagaucacugccaguuuucccgccccagcccuauuggcuaccuggggcuccugucccaaagaacccgggacaucuauauuucucgcagacgccggggaacauucaccuggacccucagcgauuccgagggcaacgaaacacccggcggguacugucugacgcgguggaugcugaucgaggcugagcucaaaugcuuuggaaauaccgccguugcuaaguguaacgaaaaacaugacgaggaguucugcgauaugcugcgccuuuuugacuucaauaagcaggccaucaaaagacugaagacacccgcgcagaugagcauucagcucaucaacaaggccgugaaugcucugauuaacgaucaacuuaucaugaaaaaucaucugcgggacauuaugugcaucccuuauugcaacuacucuaaguauugguaccucaaucacaccgucacagggaaaaccucccugccccgcuguuggcuggugagcaacggaucuuaccucaaugaaacgcacuucagcgacgauaucgagcagcaggccgacaacaugauuacagagcugcuucaaaaggaauauaucgauagacagggcaaaaccccucuggggcucguggaccuguuugucuucuccaccucuuuuuaccugauuagcaucuuccuucaccucguuaagauuccgacacaucggcacguggugggaaaacccugcccuaagccccaucgccugaaucacaugggcaucuguuccugcggccuguauaagcacccugggguccccgugaaauggaagagaugaggacuaguaauaaggaaacuguaugaaugucugugggcaggaagugaagagauccuucuguaaagguuuuuggaauuaugucugcugaauaauaaacuuuuuugaaauaauaaaucugguagaaaaaugagaucucaaaggcucuuuucagagccaccaaaaaaaaaaaaaaaaaaaaaaaaaaaaaaaaaaaaaaaaaaaaaaaaaaaaaaaaaaaaaaaaagaauu

SEQ ID NO: 16089 - RNA, 1778 nt, Artificial Sequence
  mRNA product Design b-4 (hSL-A64-N5) comprising derived and/or modified sequence from LASV(LASV221-NIG-2010;Clade II)__AIT17624__GPCmut1 (opt5)
aggagagucccgcagucggcguccagcggcucugcuuguucgugugugugucguugcaggccuuauucaagcuuaccaugggccagaucauuaccuucuuucaagaggugccccacgucaucgaagagguuaugaacauugugcugaucgcccucagccugcuugcuauucugaaggggaucuacaauguggccacaugcggacucuucggccuggucuccuuucuucugcucugugggagaucuugcagcacgaccuauaaaggaguguacgaacugcagacacuggagcucgacauggcgucccugaacaugaccaugccucuuucuuguacaaagaauaacagccaucacuauaucaugguuggcaaugaaaccgggcuggagcucacacugaccaacacguccauuaucaaucauaaauucugcaaccuuucugaugcucacaagaaaaaucuguacgaccaugcccucaugagcauuaucuccaccuuucaccugagcauuccgaacuucaaucaguaugaggccaugucuugugauuuuaacggaggcaagaucuccgugcaguacaaucugagccacacauaugcuauugacgccgcuaaccauugcggcaccaucgccaaugggguccuccaaacauucaugcggauggcguggggaggcucuuacaucgcccuggauuccgggugcggaagcugggacuguauuaugaccucuuaccaguaucuuaucauucagaacacgacaugggaagaucacugccaguuuucccgccccagcccuaucggcuaccuggggcuccugucccaaagaacccgggacauuuauaucucucgcagacgccggggaacauucaccuggacccucagcgauuccgagggcaacgaaacacccggcggguacugucugacgcgguggaugcugaucgaggcugagcucaaaugcuuuggaaauaccgccguggcuaaguguaacgaaaaacaugacgaggaguucugcgauaugcugcgccuuuuugacuucaauaagcaggccauuagacggcugaaaacacccgcgcagaugagcauccagcucauuaacaaggccguuaaugcucugaucaacgaucaacuuauuaugaagaaucaucugcgcgacaucaugugcaucccuuauugcaacuacucuaaauauugguaccucaaucacaccgugacagggaagaccucccugcccagauguuggcuggucagcaacggaucuuaccucaaugaaacgcacuucagcgacgauauugagcagcaggccgacaacaugaucacagagaugcugcaaaaagaauauauggaucggcagggcaagaccccucuugggcugguggaccucuuuguguucuccaccucuuuuuaccugauuagcaucuuccugcaccuugucaaaauuccgacacaucgccacguuaucggaaagcccugcccuaaaccccauagacucaaucacaugggcauuuguuccugcggccuguauaagcacccuggggugcccgugaaguggaaacggugaggacuaguaauaaggaaacuguaugaaugucugugggcaggaagugaagagauccuucuguaaagguuuuuggaauuaugucugcugaauaauaaacuuuuuugaaauaauaaaucugguagaaaaaugagaucucaaaggcucuuuucagagccaccaaaaaaaaaaaaaaaaaaaaaaaaaaaaaaaaaaaaaaaaaaaaaaaaaaaaaaaaaaaaaaaaagaauu

SEQ ID NO: 16090 - RNA, 1778 nt, Artificial Sequence
  mRNA product Design b-4 (hSL-A64-N5) comprising derived and/or modified sequence from LASV(LASV237-NIG-2010;Clade II)__AIT17638__GPCmut1 (opt5)
aggagagucccgcagucggcguccagcggcucugcuuguucgugugugugucguugcaggccuuauucaagcuuaccaugggccagaucauuaccuucuuucaagaggugccccacgucaucgaagagguuaugaacauugugcugaucgcccucagccugcuugcuauucugaaggggaucuacaauguggccacaugcggacucuucggccuggucuccuuucuucugcucugugggagaucuugcagcacgaccuauaaaggaguguacgaacugcagacacuggagcucgacauggcgucccugaacaugaccaugccucuuucuuguacaaagaauaacagccaucacuauaucaugguuggcaaugaaaccgggcuggagcucacacugaccaacacguccauuaucaaucauaaauucugcaaccuuucugaugcucacaagaaagaccuguacgaucaugcccucaugagcauuaucuccaccuuucaccugagcauuccgaauuucaaccaguaugaggccaugucuugugacuuuaauggaggcaagaucuccgugcaguacaaccugagccacacauaugcugucgaugccgcuaaucauugcggcaccauugccaacggggugcuccaaacauucaugcggauggcguggggaggcucuuacaucgcccuggacuccgggugcggaagcugggauuguaucaugaccucuuaccaguaucuuauuauccagaauacgacaugggaagaccacugccaguuuucccgccccagcccuauuggcuaccuggggcuccugucccaaagaacccgggauaucuauauuucucgcagacgccggggaacauucaccuggacccucagcgacuccgagggcaacgaaacacccggcggguacugucugacgcgguggaugcugaucgaggcugagcucaaaugcuuuggaaacaccgccguugcuaaguguaaugaaaaacaugaugaggaguucugcgacaugcugcgccuuuuugauuucaacaagcaggccaucagacggcugaaaacacccgcgcagaugagcauucagcucaucaauaaggccgugaacgcucugauuaaugaccaacuuaucaugaagaaccaucugcgcgacauuaugugcaucccuuauugcaauuacucuaaauauugguaccucaaccacaccgucacagggaagaccucccugcccagauguuggcuggugagcaauggaucuuaccucaacgaaacgcacuucagcgaugacaucgagcagcaggccgauaauaugauuacagagcugcuucaaaaagaauauauggaccggcagggcaagaccccucuggggcucguggaucuguuugucuucuccaccucuuuuuaccugaucagcauuuuccuucaccucaucaaaauuccgacacaucgccacaucaccggaaagcccugcccuaaaccccauagacugaaccacaugggcauuuguuccugcggccuguauaagcacccugggguucccgugaaguggaaacggugaggacuaguaauaaggaaacuguaugaaugucugugggcaggaagugaagagauccuucuguaaagguuuuuggaauuaugucugcugaauaauaaacuuuuuugaaauaauaaaucugguagaaaaaugagaucucaaaggcucuuuucagagccaccaaaaaaaaaaaaaaaaaaaaaaaaaaaaaaaaaaaaaaaaaaaaaaaaaaaaaaaaaaaaaaaaagaauu

SEQ ID NO: 16091 - RNA, 1778 nt, Artificial Sequence
  mRNA product Design b-4 (hSL-A64-N5) comprising derived and/or modified sequence from LASV(LASV253-NIG-2011;Clade II)__AIT17670__GPCmut1 (opt5)
aggagagucccgcagucggcguccagcggcucugcuuguucgugugugugucguugcaggccuuauucaagcuuaccaugggccagaucauuaccuucuuucaagaggugccccacgucaucgaagagguuaugaacauugugcugaucgcccucagccugcuugcuauucugaaggggaucuacaauguggccacaugcggacucuucggccuggucuccuuucuucugcucugugggagaucuugcagcacgaccuauaaaggaguguacgaacugcagacacuggagcucgacauggcgucccugaacaugaccaugccucuuucuuguacaaagaauaacagccaucacuauaucaugguuggcaaugaaaccgggcuggagcucacacugaccaacacguccauuaucaaucauaaauucugcaaccuuucugaugcucacaagaaaaaucuguacgaccaugcccucaugagcauuaucuccaccuuucaccugagcauuccgaacuucaaucaguaugaggccaugucuugugauuuuaacggaggcaagaucuccgugcaguacaaucugagccacacauaugcugucgacgccgcuaaccauugcggcaccauugccaauggggugcuccaaacauucaugcggauggcguggggaggcucuuacaucgcccuggauuccgggugcggaagcugggacuguaucaugaccucuuaccaguaucuuauuauccagaacacgacaugggaagaucacugccaguuuucccgccccagcccuauuggcuaccuggggcuccugucccaaagaacccgggacaucuauauuucucgcagacgccggggaacauucaccuggacccucagcgauuccgagggcaacgaaacacccggcggguacugucugacgcgguggaugcugaucgaggcugagcucaaaugcuuuggaaauaccgccguugcuaaguguaacgaaaaacaugacgaggaguucugcgauaugcugcgccuuuuugacuucaauaagcaggccaucagacggcugaaagcgcccgcccagaugagcauucagcucaucaacaaggcugugaaugcccugauuaacgaucaacuuaucaugaagaaucaucugcgcgacauuaugugcaucccuuauugcaacuacucuaaauauugguaccucaaucacacagucaccgggagaacaucccugccccgguguuggcuggugagcaacggaucuuaccucaaugaaacccacuucagcgacgauaucgagcagcaggcugacaacaugauuacggagcugcuucaaaaggaauauaucgaucgccagggcaaaacaccucuggggcucguggaccuguuugucuucuccaccucuuuuuaccugauuagcaucuuccuucaccucguuaagauuccgacccauagacacaucauuggaaaacccugcccuaagccccaucggcugaaucacaugggcaucuguuccugcggccuguauaaacacccuggggugcccgugaaguggaagcgcugaggacuaguaauaaggaaacuguaugaaugucugugggcaggaagugaagagauccuucuguaaagguuuuuggaauuaugucugcugaauaauaaacuuuuuugaaauaauaaaucugguagaaaaaugagaucucaaaggcucuuuucagagccaccaaaaaaaaaaaaaaaaaaaaaaaaaaaaaaaaaaaaaaaaaaaaaaaaaaaaaaaaaaaaaaaaagaauu

SEQ ID NO: 16092 - RNA, 1778 nt, Artificial Sequence
  mRNA product Design b-4 (hSL-A64-N5) comprising derived and/or modified sequence from LASV(LASV254-NIG-2011;Clade II)__AIT17674__GPCmut1 (opt5)
aggagagucccgcagucggcguccagcggcucugcuuguucgugugugugucguugcaggccuuauucaagcuuaccaugggccagaucauuaccuucuuucaagaggugccccacgucaucgaagagguuaugaacauugugcugaucgcccucagccugcuugcuauucugaaggggaucuacaauguggccacaugcggacucuucggccuggucuccuuucuucugcucugugggagaucuugcagcacgaccuauaaaggaguguacgaacugcagacacuggagcucgacaugaccaaccugaauaugacaaugccucuuuccuguaccaagaacaauucucaucacuauaucaugguuggcaacgaaacagggcuggagcucacccugacgaauaccagcauuaucaaccauaaauucugcaaucuuuccgaugcgcacaagaaaaaccuguacaaucaugcucucaugucuauuaucagcacauuucaccuguccauuccgaacuucaaucaguaugaggccaugagcugugacuuuaacggaggcaagaucucugugcaguacaaucugucccacagcuaugccgucgaugcugccaaccauugcggcaccauugcuaacggggugcuccaaacauucaugcggauggccuggggaggcucuuacaucgcgcuggacuccgggugcggaaauugggauuguaucaugaccagcuaccaguaucuuauuauccagaacacgacaugggaagaccacugccaguuuucucgccccuccccuauuggcuaccuggggcuccugagccaaagaacccgggauaucuauauuucccgcagacgccggggaacauucaccuggacccucucugacagcgagggcaaugaaacacccggcggguacugucugacgcgguggaugcugaucgaggccgagcucaaaugcuuuggaaacaccgcuguugccaaguguaaugaaaaacaugaugaggaguucugcgacaugcugcgccuuuuugauuucaacaagcaggcuaucagacggcugaaaacacccgcccaggcgaauauucagcucaucaacaaggccgugaaugcucugauuaacgaccaacuuaucaugaagaaucaucugcgcgauauuaugugcaucccuuauugcaacuacuccaaauauugguaccucaaucacaccgucacagggaagaccagccugcccagauguuggcuggugucuaacggauccuaccucaaugaaacgcacuucagcgacgacaucgagcagcaggccgauaacaugauuacagagcugcuucaaaaagaauauauggaccggcagggcaagaccccucuggggcucguggaucuguuugucuucucuaccagcuuuuaccugaucuccauuuuccuucaccucguuaaaaucccgacacaucgccacgugauuggaaagcccugcccuaaaccccauagacugaaccacaugggcaucuguucuugcggccuguauaagcacccuggggugcccgucaaguggaaacggugaggacuaguaauaaggaaacuguaugaaugucugugggcaggaagugaagagauccuucuguaaagguuuuuggaauuaugucugcugaauaauaaacuuuuuugaaauaauaaaucugguagaaaaaugagaucucaaaggcucuuuucagagccaccaaaaaaaaaaaaaaaaaaaaaaaaaaaaaaaaaaaaaaaaaaaaaaaaaaaaaaaaaaaaaaaaagaauu

SEQ ID NO: 16093 - RNA, 1778 nt, Artificial Sequence
  mRNA product Design b-4 (hSL-A64-N5) comprising derived and/or modified sequence from LASV(Nig08-A19;Clade III)__ADU56618__GPCmut1 (opt5)
aggagagucccgcagucggcguccagcggcucugcuuguucgugugugugucguugcaggccuuauucaagcuuaccaugggccagaucgugaccuucuuucaagaggucccccacguuauugaagaggugaugaacaucgugcugauugcccucagcauccuggcuauucuuaaggggcuguacaauaucgccacaugcggacucaucggccuggucacguuccuucugcucuccgggagaucuuguagcaugaccuauaaaggaguguacgaacugcagacacuggagcucaacaugaauacccugaacaugacaaugccucuuuccugcaccaagaauaacucucaucacuauauuaugguuggcaaugaaacagggcuggagcucacccugacgaacaccagccuucugcaucacaaauuuuguaaucucuccgacgcgcauaagaaaaaccuguacgaucacacacugaugucuaucauuagcaccuuccaccucuccaucccgaauuuuaaccaguaugaggcuaugagcugcgacuucaauggaggcaagauuacagugcaguacaaccugucucauuccuaugccaucgaugccgcuaaucacuguggcaccgucgccaacggggugcuucaaacguuuaugcggauggcuuggggaggcagcuacauugcccuggacucugggugcggaaagugggauugcaucaugacauccuaccaguaucucaucauucagaacaccacaugggaagaccauugucaguucagcagacccucuccuaucggcuaccuggggcuucugucccaacggacccgcgauauuuauaucagcagacggcgccggggaaccuuuacauggacgcuguccgacucugagggcaaugaaacccccggcggguacugccucacacgcuggaugcugauugaggcggagcuuaaauguuucggaaacaccgccguugcuaagugcaaugaaaaacacgaugaggaauuuugugacaugcugagacucuucgauuuuaacaagcaggccauccggcgccugaaagcucccgcccagaugagcauccagcuuauuaauaaggcggugaacgcccugaucaaugaccaacucauuaugaagaaccaccugagagauaucaugugcauuccuuauugcaauuacuccaaauauugguaccugaaccauacaagcaccgggcggacgucucucccccgcugcuggcuggucuccaauggaagcuaccuuaacgaaacacacuucucugacgacaucgagcagcaggcugauaauaugaucaccgagaugcugcaaaaggaauaucucgacagacagggcaaaaccccucuggggcugguggaucuuuucguguuuagcacauccuucuaccucauuucuaucuuucugcaucuggucaagauuccgacccaccggcauaucguuggaaaacccuguccuaagccccaccgccucaaccacaugggcauuugcagcuguggccuguauaaacagccuggggugcccgugagauggaagcggugaggacuaguaauaaggaaacuguaugaaugucugugggcaggaagugaagagauccuucuguaaagguuuuuggaauuaugucugcugaauaauaaacuuuuuugaaauaauaaaucugguagaaaaaugagaucucaaaggcucuuuucagagccaccaaaaaaaaaaaaaaaaaaaaaaaaaaaaaaaaaaaaaaaaaaaaaaaaaaaaaaaaaaaaaaaaagaauu

SEQ ID NO: 16094 - RNA, 1781 nt, Artificial Sequence
  mRNA product Design b-4 (hSL-A64-N5) comprising derived and/or modified sequence from LASV(G1180-SLE-2010;Clade IV)__AIT17168__GPCmut1 (opt5)
aggagagucccgcagucggcguccagcggcucugcuuguucgugugugugucguugcaggccuuauucaagcuuaccaugggccagaucgugaccuucuuucaagaggucccccacguuauugaagaggugaugaacaucgugcugauugcccucagcauccuggcuguccuuaaggggcuguacaauuucgccacaugcggacucgugggccugcuuacguuucugcuccugugugggagauccugcaccgcgucucgguauaaaggaguuuacgaacugcagacacucgagcugaacauggaaacccuuaauaugacaaugccucugagcuguaccaagaacaauucccaucacuauauuauggugggcaacgagacagggcucgagcugacccuuacgaauaccucuaucaucaaccauaaauucugcaaucugagcgacgcucacaagaaaaaccucuacgaucaugcccugauguccauuaucucuacauuucaccugagcauuccgaauuucaaccaguaugaagccauguccugugacuuuaauggaggcaagaucagcguccaguacaaccucucucacuccuaugcuggcgaugccgcuaaucauugcgggaccguggccaacggaguucugcaaacauucaugcgcauggcguggggcgggagcuacauugcccuugacucuggaugcggcuccugggauuguaucaugaccagcuaccaguaucugauuauccagaacacgacaugggaggaccauugccaguuuucuagacccuccccuaucggguaccucggacugcuuagccaacggacccgcgauauuuauaucuccagacggcgccggggcacauucaccuggacccugucugacagcgaaggcaaggauacacccgggggauacugucugacgcgcuggaugcucauugaggcugagcugaaaugcuuuggcaauaccgccguggcuaaguguaacgaaaaacacgacgaggaguucugcgauaugcuuagacuguuugacuucaauaagcaggccauccagcggcucaaagcgcccgcccagauguccauucaacugaucaacaaggcugucaaugcccuuaucaacgaucagcugauuaugaagaaucaccuccgcgacaucaugugcauuccuuauugcaacuacagcaaauauugguaccugaaucauacaaccacaggaaagaccucucugcccaaauguuggcucguguccaacggcagcuaccugaaugaaacgcacuucucugacgauaucgagcagcaagcugacaacaugauuacagagaugcuucagaaggaauauauggagagacaggggaaaaccccucugggacucguggaucuguuugucuucagcaccuccuuuuaccugaucucuaucuuccuucaucucguuaagauuccgacacaccggcauaucgugggcaaaagcugccccaagccucaccgccugaaucacaugggcauuuguuccugcgggcuguauaagcagcccggagugccugucaaauggaagagaugaggacuaguaauaaggaaacuguaugaaugucugugggcaggaagugaagagauccuucuguaaagguuuuuggaauuaugucugcugaauaauaaacuuuuuugaaauaauaaaucugguagaaaaaugagaucucaaaggcucuuuucagagccaccaaaaaaaaaaaaaaaaaaaaaaaaaaaaaaaaaaaaaaaaaaaaaaaaaaaaaaaaaaaaaaaaagaauu

SEQ ID NO: 16095 - RNA, 1781 nt, Artificial Sequence
  mRNA product Design b-4 (hSL-A64-N5) comprising derived and/or modified sequence from LASV(G1442-SLE-2011;Clade IV)__AIT17180__GPCmut1 (opt5)
aggagagucccgcagucggcguccagcggcucugcuuguucgugugugugucguugcaggccuuauucaagcuuaccaugggccagaucgugaccuucuuucaagaggucccccacguuauugaagaggugaugaacaucgugcugauugcccucagcauccuggcuguccuuaaggggcuguacaauguggccacaugcggacucauuggccugguuacguuccuucugcucugugggagauccugcaccacaacccuguauaaaggaguguacgaacugcagacacucgagcugaacauggaaacccuuaauaugacaaugccucugucuuguaccaagaacaauagccaucacuauauccgggucggcaacgagacggggcucgagcugacccuuacaaauaccuccaucauuaaccauaaauuuugcaaucugucugacgcgcacaagaaaaaccucuacgaucaugcucugaugagcaucauuuccacauuccaccugucuaucccgaauuuuaaccaguaugaagccaugagcugugacuucaauggaggcaagauuuccgugcaguacaaccucagccacucuuaugccggcgaugcugccaaucauugcgggaccguugcuaacggagugcugcaaacguuuaugcgcauggccuggggcggguccuacaucgcgcuugacagcggaugcggcaacugggauuguauuaugacaucuuaccaguaucugaucauccagaauaccacaugggacgaucacugccaguucucccggcccagcccuauuggguaccucggacugcuuucucaacgcaccagagacgucuauaucucccggcgccgccggggcaccuuuacauggacgcugagcgauuccgagggcaaggacacccccgggggauacugucugacaagauggaugcucauugaagccgagcugaaaugcuucggcaacaccgcuguggccaaguguaaugagaaacaugaugaagaguuuugcgacaugcuucggcuguucgauuuuaacaagcaggcuauccagcgccucaaagcccccgcgcagaugucuauucaacugaucaauaaggccgugaacgcucuuaucaaugaccagcugauuaugaagaaccaccucagagacaucaugugcauuccuuauugcaauuacagcaaauauugguaccugaacaauacagccaccggaaagacgucccugcccaaauguuggcucaucagcaacggcucuuaccugaaugagacacacuucuccgaugacauugaacaggaggcugauaacaugaucaccgagaugcuucaaaaggaauauauggagcggcaggggaaaaccccucugggacucgucgaccuguucguuuuuagcacaucuuucuaccugaucagcauuuuucuucaucucgugaagaucccgacccaccgccauauugugggcaaauccugccccaagccucacagacugaaucauaugggcaucuguucuugcgggcuguauaagcagcccggagucccugugcgguggaaacgcugaggacuaguaauaaggaaacuguaugaaugucugugggcaggaagugaagagauccuucuguaaagguuuuuggaauuaugucugcugaauaauaaacuuuuuugaaauaauaaaucugguagaaaaaugagaucucaaaggcucuuuucagagccaccaaaaaaaaaaaaaaaaaaaaaaaaaaaaaaaaaaaaaaaaaaaaaaaaaaaaaaaaaaaaaaaaagaauu

SEQ ID NO: 16096 - RNA, 1781 nt, Artificial Sequence
  mRNA product Design b-4 (hSL-A64-N5) comprising derived and/or modified sequence from LASV(G3010-SLE-2013;Clade IV)__AIT17344__GPCmut1 (opt5)
aggagagucccgcagucggcguccagcggcucugcuuguucgugugugugucguugcaggccuuauucaagcuuaccaugggccagaucgugaccuucuuucaagaggucccccacguuauugaagaggugaugaacaucgugcugauugcccucagcauccuggcuguccuuaaggggcuguacaauuucgccacaugcggacucgugggccugguuacguuucuucugcucugugggagauccugcaccacaucucuguauaaaggaguguacgaacugcagacccucgagcugaacauggaaacacuuaauaugaccaugccucugagcuguacaaagaacaauucccaucacuauauuauggucggcaacgagaccgggcucgagcugacgcuuaccaauacaucuaucaucaaccauaaauucugcaaucugagcgacgcgcacaagaaaaaccucuacaaucaugcucugauguccauuaucucuaccuuucaccugagcauuccgaacuucaaucaguaugaagccauguccugugauuuuaacggaggcaagaucagcgugcaguacaaucucucucacuccuaugccggcgacgcugccagccauugcgggacaguugcuaacggagugcugcaaaccuucaugcggauggccuggggcgggucuuacauugcgcuugauuccggaugcggcaagugggacuguaucaugacgagcuaucaguaccugauuauccagaacacaaccugggaggaucacugccaguuuucucgccccuccccuaucggguaucucggacugcuuagccaaagaacacgggacauuuacaucucccgcagacgccggggcaccuucaccuggacacugucugauagcgaaggcaaagacacgcccgggggauauugucugacccgguggaugcucauugaggccgagcugaagugcuuuggcaauacagcugucgccaaauguaacgaaaagcaugaugaggaguucugcgacaugcuucgccuguuugauuucaauaaacaggcuauccagagacucaagacccccgcccagauguccauucaacugaucaacaaggcggugaaugcccuuaucaacgaccagcugauuaugaaaaaucaccuccgggauaucaugugcauuccuuacugcaacuauagcaaguacugguaccugaaucacacaaccacgggaaaaacaucucugcccaaguguuggcucguguccaacggcagcuaucugaaugaaacccauuucucugacgacaucgagcagcaagcugauaacaugauuaccgagaugcuucagaaagaauacauggagcgccaggggaagacaccucugggacucgucgaccuguuuguuuucagcaccuccuuuuaucugaucucuaucuuccuucaccucgugaaaauuccgacacauagacacaucgugggcaagagcugccccaagccucaucggcugaaucacaugggcauuuguuccugcgggcuguacaaacagcccggagucccugugcgcuggaagagaugaggacuaguaauaaggaaacuguaugaaugucugugggcaggaagugaagagauccuucuguaaagguuuuuggaauuaugucugcugaauaauaaacuuuuuugaaauaauaaaucugguagaaaaaugagaucucaaaggcucuuuucagagccaccaaaaaaaaaaaaaaaaaaaaaaaaaaaaaaaaaaaaaaaaaaaaaaaaaaaaaaaaaaaaaaaaagaauu

SEQ ID NO: 16097 - RNA, 1781 nt, Artificial Sequence
  mRNA product Design b-4 (hSL-A64-N5) comprising derived and/or modified sequence from LASV(G502-SLE-2009;Clade IV)__AIT17126__GPCmut1 (opt5)
aggagagucccgcagucggcguccagcggcucugcuuguucgugugugugucguugcaggccuuauucaagcuuaccaugggccagaucgugaccuucuuucaagaggucccccacguuauugaagaggugaugaacaucgugcugauugcccucagcauccuggcuguccuuaaggggcuguacaauuucgccacaugcggacucgugggccugcuuacguuucugcuccugugugggagauccugcaccacaggacuguauaaaggcguuuacgaacuccagacccuggagcuuaacauggaaacacugaauaugaccaugccucucucuuguacaaagaacaauagccaucacuauauuaugguggggaacgagaccggacuggagcuuacgcugaccaauacauccaucaucaaccauaaauucugcaaucucucugacgcgcacaagaaaaaccuguacgaucaugcucugaugagcauuaucuccaccuuucaccucucuauuccgaauuucaaccaguaugaagccaugagcugugacuuuaauggcggcaagaucuccguccaguacaaccugagccacucuuaugccggggaugcugccgaccauugcggaacaguggcuaauggcguucuucaaaccuucaugcggauggccuggggaggguccuacauugcgcuggauagcggcugcgggagaugggacuguaucaugacgucuuaccaguaucucauuauccagaacacaaccugggaggaucacugccaguuuucccggcccagcccuaucggauaccugggccuucugucucaacgcacaagagacauuuauaucucccggcgccgccggggcaccuucaccuggacacugagcgauuccgaagggaaggacacgcccggaggcuacugucucaccagauggaugcugauugaggccgagcuuaaaugcuuugggaacacagcuguggccaaguguaaugaaaaacaugaugaggaguucugcgacaugcugcggcucuuugauuucaacaagcaggcuauccagcgccugaaagcccccgcgcagaugucuauucaacuuaucaauaaggccgucaacgcucugaucaaugaccagcucgugaugaagaaccaccugagagacauuaugugcaucccuuauugcaauuacagccgguauugguaccugaaccacaccacaaccggccgcacgucccuccccaaauguuggcuggugagcaaugggucuuaccuuaacgaaacacauuucuccgaugacauugagcagcaagccgauaauaugaucaccgagaugcugcagaaggaauauauggagagacagggaaaaaccccucucggccuggucgaccuguuuguuuucagcacaucuuuuuaccuuauuagcaucuuccuccaccuggugaagaucccgacccaucggcacauugugggcaaauccugccccaagccucaucgccugaaccacauggggaucuguucuugcggacucuauaaacagcccggcgucccugugaaguggaagagaugaggacuaguaauaaggaaacuguaugaaugucugugggcaggaagugaagagauccuucuguaaagguuuuuggaauuaugucugcugaauaauaaacuuuuuugaaauaauaaaucugguagaaaaaugagaucucaaaggcucuuuucagagccaccaaaaaaaaaaaaaaaaaaaaaaaaaaaaaaaaaaaaaaaaaaaaaaaaaaaaaaaaaaaaaaaaagaauu

SEQ ID NO: 16098 - RNA, 1781 nt, Artificial Sequence
  mRNA product Design b-4 (hSL-A64-N5) comprising derived and/or modified sequence from LASV(G733-SLE-2010;Clade IV)__AIT17154__GPCmut1 (opt5)
aggagagucccgcagucggcguccagcggcucugcuuguucgugugugugucguugcaggccuuauucaagcuuaccaugggccagaucgugaccuucuuucaagaggucccccacguuauugaagaggugaugaacaucgugcugauugcccucagcauccuggcuguccuuaaggggcuguacaauuucgccacaugcggaauugugggccucguuuccuuucugcuucugugugggagaucuugcacgaccagccucuauaaaggaguguacgaacugcagacacuggagcucaacauggaaacccugaauaugacaaugccucuuuccuguaccaagaacaauucucaucacuauaucauggucggcaacgagacagggcuggagcucacccugacgaauaccagcaucauuaaccauaaauucugcaaucuuuccgacgcgcacaagaaaaaccuguacgaucaugcucucaugucuaucauuagcacauuucaccuguccaucccgaauuucaaccaguaugaagccaugagcugugacuuuaauggaggcaagauuucugugcaguacaaccugucccacagcuaugccggcgaugcugccaaucauugcgggaccaucgcuaacggaguucuccaaacauucaugcggauggccuggggcgggucuuacauugcgcuggacuccggaugcgauagaugggacuguaucaugaccagcuaccaguaucuuaucauucagaacacgacaugggaggaucacugccaguuuucucggcccuccccuaucggcuaccuggggcuccugagccaacgcaccagagacauuuauaucucccggcgccgccggggaacauucaccuggacccucucugauagcgaaggcaaggacacacccggcggguacugucugacgagauggaugcugauugaggccgagcucaaaugcuuuggaaauaccgcuguggccaaguguaacgaaaaacaugaugaggaguucugcgacaugcugcggcuuuuugauuucaauaagcaggcuauccagcgccugaaagcccccgcgcagauguccauccaacucauuaacaaggccgucaaugcucugaucaacgaccagcuuauuaugaagaaucaccugagagacaucaugugcauuccuuauugcaacuacagcaaauauugguaccucaaucacacaaccacagggaagaccucucugcccaaauguuggcugguguccaacggaagcuaccucaaugaaacgcauuucucugaugacaucgagcagcaagccgauaacaugaucacagagaugcugcagaaggaauauauggagcggcagggcaaaaccccucuugggcugguggaccucuuugucuucagcaccuccuuuuaccugauuucuaucuuccugcaccuuguuaagauuccgacacaucgccacguggugggaaaaagcugccccaagccucauagacucaaucacaugggcaucuguuccugcggccuguaugggcagcccggagucccugugaaguggaaacggugaggacuaguaauaaggaaacuguaugaaugucugugggcaggaagugaagagauccuucuguaaagguuuuuggaauuaugucugcugaauaauaaacuuuuuugaaauaauaaaucugguagaaaaaugagaucucaaaggcucuuuucagagccaccaaaaaaaaaaaaaaaaaaaaaaaaaaaaaaaaaaaaaaaaaaaaaaaaaaaaaaaaaaaaaaaaagaauu

SEQ ID NO: 16099 - RNA, 1781 nt, Artificial Sequence
  mRNA product Design b-4 (hSL-A64-N5) comprising derived and/or modified sequence from MOPV/LASV reassortant(IGS-1;Clade IV)__AFY05576__GPCmut1 (opt5)
aggagagucccgcagucggcguccagcggcucugcuuguucgugugugugucguugcaggccuuauucaagcuuaccaugggccagaucgugaccuucuuucaagaggucccccacguuauugaagaggugaugaacaucgugcugauugcccucagcguccuggcugugcuuaaggggcuguacaauuucgccacaugcggacucguuggccuggugacguuucuucugcucugugggagauccugcaccacaucucuguauaaaggagucuacgaacugcagacccucgagcugaacauggaaacacuuaauaugaccaugccucugagcuguacaaagaacaauucccaucacuauaucauggugggcaacgagaccgggcucgagcugacgcuuaccaauacaucuauuaucaaccauaaauucugcaaucugagcgacgcgcacaagaaaaaccucuacgaucaugcucugauguccaucauuucuaccuuucaccugagcaucccgaauuucaaccaguaugaagccauguccugugacuuuaauggaggcaagauuagcguucaguacaaccucucucacuccuaugccggcgaugcugccaaucauugcgggacaguggcuaacggaguccugcaaaccuucaugcggauggccuggggcgggagcuacaucgcgcuugacucuggaugcggcaacugggauuguauuaugacguccuaccaguaucugaucauucagaauacaaccugggaggaccacugccaguuuagcagacccucuccuaucggguaccucggacugcuuucccaacggacacgcgauaucuauauuagcagacggcgccggggcaccuucaccuggacacuguccgacucugaaggcgaggauacgcccgggggauacugucugacccgcuggaugcucaucgaggccgaacugaagugcuuuggcaacacagcuguggccaaauguaaugagaagcaugacgaagaguucugcgauaugcuuagacuguuugacuucaacaaacaggcuauucagcggcucaaggcccccgcgcagaugagcauccaacugauuaauaaagccgugaacgcucuuaucaaugaucagcugaucaugaagaaccaccuccgcgacauuaugugcaucccuuauugcaauuacuccaaguauugguaccugaaccacaccacaaccggaagaacgagccugcccaaauguuggcucgucucuaauggcuccuaccugaacgagacacauuucagcgacgauauugagcagcaagccgacaauaugaucaccgaaaugcuucagaaggaguauauggaacggcaggggaaaaccccucugggacucguugaucuguuuguguucucuaccagcuuuuaccugauuuccaucuuccuucaccucgugaagaucccgacacaucgccacauugucggcaaaucuugccccaagccucauagacugaaccacaugggcaucuguagcugcgggcuguauaaacagcccggagugccuguuaaguggaagcggugaggacuaguaauaaggaaacuguaugaaugucugugggcaggaagugaagagauccuucuguaaagguuuuuggaauuaugucugcugaauaauaaacuuuuuugaaauaauaaaucugguagaaaaaugagaucucaaaggcucuuuucagagccaccaaaaaaaaaaaaaaaaaaaaaaaaaaaaaaaaaaaaaaaaaaaaaaaaaaaaaaaaaaaaaaaaagaauu

SEQ ID NO: 16100 - RNA, 1781 nt, Artificial Sequence
  mRNA product Design b-4 (hSL-A64-N5) comprising derived and/or modified sequence from LASV(LM765-SLE-2012;Clade IV)__AIT17814__GPCmut1 (opt5)
aggagagucccgcagucggcguccagcggcucugcuuguucgugugugugucguugcaggccuuauucaagcuuaccaugggccagaucgugaccuucuuucaagaggucccccacguuauugaagaggugaugaacaucgugcugauugcccucagcauccuggcuguccuuaaggggcuguacaauuucgccacaugcggacucgugggccugguuacguuucuucugcucugugggagauccugcaccacaucucuguauaaaggaguguacgaacugcagacccucgagcugaacauggaaacacuuaauaugaccaugccucugagcuguacaaagaacaauucccaucacuauauuauggucggcaacgagaccgggcucgagcugacgcuuaccaauacaucuaucaucgaccauaaauucugcaaccugagcgaugcgcaccggaagaaucucuacgaccaugcucugauguccauuaucucuaccuuucaccugagcauuccgaacuucaaucaguaugaagccauguccugugauuuuaacggaggcaaaaucagcgugcaguacaaucucucucacuccuaugccaaggacgcugccgaucauugcggcacaguugcuaacggggugcugcaaaccuucaugcgcauggccuggggaggcagcuacauugcgcuugacucugggugcggacggugggauuguaucaugacguccuaccaguaucugauuauccagaauacaaccugggaggaccacugccaguuuagccgccccucuccuaucggcuaccucgggcugcuuucccaaagaacacgggauauuuauaucagccgcagacgccggggaaccuucaccuggacacuguccgacucugaaggcaaggauacgcccggcggguacugucugacccgguggaugcucauugaggccgagcugaaaugcuuuggaaacacagcugucgccaaguguaacgaaaaacaugacgaggaguucugcgauaugcuucgccuguuugacuucaauaagcaggcuauccagagacucaaagcccccgcgcagaugagcauucaacugaucaacaaggccgugaaugcucuuaucaacgaccagcugauuaugaagaaucaccuccgggauaucaugugcauuccuuauugcaacuacuccaaauauugguaccugaaucacaccacaaccgggaagacgagccugcccaaauguuggcucgugucuaacggauccuaccugaaugaaacacauuucagcgacgauaucgagcagcaagccgacaacaugauuaccgagaugcuucagaaggaauauauggagcgccagggcaaaaccccucuggggcucgucgaucuguuuguuuucucuaccagcuuuuaccugaucuccaucuuccuucaccucgugaagauuccgacacauagacacaucgugggaaaacccugcccuaagccccaucggcugaaucacaugggcauuuguucuugcggccuguauaagcagccugggguccccgugaaauggaagcgcugaggacuaguaauaaggaaacuguaugaaugucugugggcaggaagugaagagauccuucuguaaagguuuuuggaauuaugucugcugaauaauaaacuuuuuugaaauaauaaaucugguagaaaaaugagaucucaaaggcucuuuucagagccaccaaaaaaaaaaaaaaaaaaaaaaaaaaaaaaaaaaaaaaaaaaaaaaaaaaaaaaaaaaaaaaaaagaauu

SEQ ID NO: 16101 - RNA, 1781 nt, Artificial Sequence
  mRNA product Design b-4 (hSL-A64-N5) comprising derived and/or modified sequence from LASV(LM776-SLE-2012;Clade IV)__AIT17824__GPCmut1 (opt5)
aggagagucccgcagucggcguccagcggcucugcuuguucgugugugugucguugcaggccuuauucaagcuuaccaugggccagaucgugaccuucuuucaagaggucccccacguuauugaagaggugaugaacaucgugcugauugcccucagcauccuggcuguccuuaaggggcuguacaauuucgccacaugcggacucgugggccugguuacguuucuucugcucugugggagauccugcaccacaucuguguauaaaggagucuacgaacugcagacccuggagcucaacauggaaacacugaauaugaccaugccucuuagcuguacaaagaacaauucccaucacuauauuauggugggcaacgagaccgggcuggagcucacgcugaccaauacaucuaucaucaaccauaaauucugcaaucuuagcgacgcgcacaagaaaaaccuguacgaucaugcucucauguccauuaucucuaccuuucaccugagcauuccgaauuucaaccaguaugaagccauguccugugacuuuaauggaggcaagaucagcguucaguacaaccugucucacuccuaugccggcgaugcugccaaucauugcgggacaguggcuaacggaguccuccaaaccuucaugcggauggccuggggcgggagcuacauugcgcuggacucuggaugcggcaagugggauuguaucaugacguccuaccaguaucuuauuauccagaacacaaccugggaggaccauugccaguuuagccgccccucuccuaucggguaccugggacuccugucccaaagaacacgggauauuuauaucagccgcagacgccggggcaccuucaccuggacacucuccgacucugaaggcaaagauacgcccgggggauacugucugacccgguggaugcugauugaggccgagcucaagugcuuuggcaauacagcuguggccaaauguaacgaaaagcacgacgaggaguucugcgauaugcugcgccuuuuugacuucaauaaacaggcuauccagagacugaaggcccccgcgcagaugagcauucaacucaucaacaaggccgugaaugcucugaucaacgaucagcuuauuaugaaaaaucaucugcgggacaucaugugcauuccuuauugcaacuacuccaaguauugguaccucaaucacaccacaaccggaaaaacgagccugcccaaguguuggcuggucucuaacggcuccuaccucaaugaaacacacuucagcgacgauaucgagcagcaagccgacaacaugauuaccgagaugcugcagaaagaauauauggagcgccaggggaagaccccucuuggacugguugaucucuuuguguucucuaccagcuuuuaccugaucuccaucuuccugcaucuugugaaaauuccgacacacagacauaucgucggcaagucuugccccaagccucaccggcucaaucacaugggcauuuguagcugcgggcuguauaaacagcccggagugccuguucgcuggaagagaugaggacuaguaauaaggaaacuguaugaaugucugugggcaggaagugaagagauccuucuguaaagguuuuuggaauuaugucugcugaauaauaaacuuuuuugaaauaauaaaucugguagaaaaaugagaucucaaaggcucuuuucagagccaccaaaaaaaaaaaaaaaaaaaaaaaaaaaaaaaaaaaaaaaaaaaaaaaaaaaaaaaaaaaaaaaaagaauu

SEQ ID NO: 16102 - RNA, 1781 nt, Artificial Sequence
  mRNA product Design b-4 (hSL-A64-N5) comprising derived and/or modified sequence from LASV(Mad39;Clade IV)__ANH09722__GPCmut1 (opt5)
aggagagucccgcagucggcguccagcggcucugcuuguucgugugugugucguugcaggccuuauucaagcuuaccaugggccagaucgugaccuucuuucaagaggucccccacguuauugaagaggugaugaacaucgugcugauugcccucagcauccuggcuguccuuaaggggcuguacaauguggccacaugcggacucauuggccugguuacguuccuucugcucugugggagauccugcaccacaacccuguauaaaggaguguacgaacugcaggcgcucgagcugaacauggaaacacuuaauaugaccaugccucugucuuguacaaagaacaauagccaucacuauauccgggucggcaacgagaccgggcucgagcugacgcuuaccaauacaucccugaucaaccauaaauuuugcaaucucucugacgcucacaagaaaaaccuguacgaucaugcccugaugagcauuaucuccaccuuccaccucucuauuccgaauuuuaaccaguaugaagccaugagcugugacuucaaugauggaaagaucuccgugcaguacaaccugagccacacauaugcuggcgacaccgccaaucauugcggcacgguugcuaacggggugcuucaaacauuuaugcgcauggccuggggaggcucuuacauugcgcuggauuccgggugcggaggcugggacuguaucaugaccagcuaccaguaucucauuauccagaacacaaccugggaggaucacugccaguucucucggcccuccccuaucggguaccugggacuucugagccaacgcaccagagacauuuauaucucucggcgccgccggggcacauuuacguggacccuguccgauagcgaaggcaaggacacacccgggggauacugucucaccagauggaugcugauugaggccgagcuuaaaugcuucggcaauacagcugucgccaaguguaacgaaaaacaugaugaggaauuuugcgacaugcugcgccucuucgauuuuaauaagcaggcuauccagcggcugaaagcccccgcgcagauguccauucaacuuaucaacaaggccgugaaugcucugaucaacgaccagcucauuaugaagaaucaccugagagacaucaugugcauuccuuauugcaacuacucuaaauauugguaccugaaucacaccgugacgggaaagacaagccuccccaaauguuggcuggucuccaacggcagcuaccuuaaugaaacccauuucucugaugacaucgagcagcaagccgauaacaugauuaccgagaugcugcagaaggaauauauggagcggcaggggaaaacaccucucggacugguugaccuguucguguuuuccaccagcuucuaccuuaucucuaucuuucuccaccuggugaagauuccgacacaucgccacgucgugggcaaacccugcccuaagccccauagacugaaucacaugggcaucuguagcugcggguucuauaagcagccuggaguucccgugcgguggaaacgcugaggacuaguaauaaggaaacuguaugaaugucugugggcaggaagugaagagauccuucuguaaagguuuuuggaauuaugucugcugaauaauaaacuuuuuugaaauaauaaaucugguagaaaaaugagaucucaaaggcucuuuucagagccaccaaaaaaaaaaaaaaaaaaaaaaaaaaaaaaaaaaaaaaaaaaaaaaaaaaaaaaaaaaaaaaaaagaauu

SEQ ID NO: 16103 - RNA, 1781 nt, Artificial Sequence
  mRNA product Design b-4 (hSL-A64-N5) comprising derived and/or modified sequence from LASV(Z0947-SLE-2011;Clade IV)__AIT17840__GPCmut1 (opt5)
aggagagucccgcagucggcguccagcggcucugcuuguucgugugugugucguugcaggccuuauucaagcuuaccaugggccagaucgugaccuucuuucaagaggucccccacguuauugaagaggugaugaacaucgugcugauugcccucagcauccuggcuguccuuaaggggcuguacaauuucgccacaugcggacucgugggccugguuacguuucuucugcucugugggagauccugcaccauuucucuguauaaaggaguguacgaacugcagacacucgagcugaacauggaaacccuuaauaugacaaugccucugagcuguaccaagaacaauucccaucacuauaucauggucggcaacgagacagggcucgagcugacccuuacgaauaccucuaucauuaaccauaaauucugcaaucugagcgacgcgcacaagaaaaaccucuacgaucaugcucugauguccaucauuucuacauuucaccugagcaucccgaauuucaaccaguaugaagccauguccugugacuuuaauggaggcaagauuagcgugcaguacaaccucucucacuccuaugccggcgaugcugccaaucauugcgggaccguugcuaacggagugcugcaaacauucaugcggauggccuggggcgggagcuacaucgcgcuugacucuggaugcgauagaugggacuguauuaugaccuccuaccaguaucugaucauccagaacacgacaugggaggaucacugccaguuuagccggcccucuccuauuggcuaccucgggcugcuuucccaacgcaccagagacaucuauauuagccggcgccgccggggaacauucaccuggacccuguccgauucugaaggcaaggacacacccggcggguacugucugacgagauggaugcucaucgaggccgagcugaaaugcuuuggaaauaccgcugucgccaaguguaacgaaaaacaugaugaggaguucugcgacaugcuucggcuguuugauuucaauaagcaggcuauucagcgccucaaagcccccgcgcagaugagcauccaacugaucaacaaggccgugaaugcucuuauuaacgaccagcugaucaugaagaaucaccucagagacauuaugugcaucccuuauugcaacuacuccaaauauugguaccugaaucacacaaccacagggaagaccagccugcccaaauguuggcucgugucuaacggauccuaccugaaugaaacgcauuucagcgaugacauugagcagcaagccgauaacaugaucacagagaugcuucagaaggaauauauggagcggcagggcaaaaccccucuggggcucgucgaccuguuuguuuucucuaccagcuuuuaccugaucuccauuuuccuucaccucgugaagaucccgacacaucgccacauugugggaaaacccugcccuaagccccauagacugaaucacaugggcaucuguucuugcggccuguauaagcagccugggguccccgugaaauggaagcggugaggacuaguaauaaggaaacuguaugaaugucugugggcaggaagugaagagauccuucuguaaagguuuuuggaauuaugucugcugaauaauaaacuuuuuugaaauaauaaaucugguagaaaaaugagaucucaaaggcucuuuucagagccaccaaaaaaaaaaaaaaaaaaaaaaaaaaaaaaaaaaaaaaaaaaaaaaaaaaaaaaaaaaaaaaaaagaauu

SEQ ID NO: 16104 - RNA, 1812 nt, Artificial Sequence
  mRNA product Design b-4 (hSL-A100) comprising derived and/or modified sequence from LASV(Josiah;Clade IV)__NP_694870__GPCmut1 (opt1)
aggagagucccgcagucggcguccagcggcucugcuuguucgugugugugucguugcaggccuuauucaagcuuaccaugggccagaucgugaccuucuuccaggaggucccccacgugaucgaggaggugaugaacaucguccugaucgcccucagcgugcuggccgugcugaaggggcucuacaacuucgcgaccugcggccuggucgggcuggugacguuccuccugcugugcggccgcuccugcaccaccagccucuacaaggggguguacgagcugcagacccuggagcucaacauggagacgcugaacaugaccaugccgcuguccugcaccaagaacaacagccaccacuacaucauggucggcaacgagaccggccucgagcugacgcugaccaacaccuccaucaucaaccacaaguucugcaaccucagcgacgcccacaagaagaaccuguacgaccacgcccugauguccaucaucagcaccuuccaccucuccauccccaacuucaaccaguacgaggccaugagcugcgacuucaacgggggcaagaucuccgugcaguacaaccugagccacuccuacgccggggacgcggccaaccacugcggcacgguggccaacgggguccugcagaccuucaugcggauggccuggggcggcagcuacaucgcgcucgacuccgggugcggcaacugggacugcaucaugaccagcuaccaguaccugaucauccagaacaccacgugggaggaccacugccaguucucccggcccagccccaucggguaccugggccuccugucccagcgcacccgggacaucuacaucagccgccggcgccggggcaccuucaccuggacgcugagcgacuccgaggggaaggacaccccgggcggguacugccugacccgcuggaugcucaucgaggccgagcugaagugcuucggcaacaccgccguggccaagugcaacgagaagcacgacgaggaguucugcgacaugcugcggcuguucgacuucaacaagcaggccauccagcgccugaaggcgcccgcccagaugagcauccagcugaucaacaaggccgugaacgcccucaucaacgaccagcugaucaugaagaaccaccuccgggacaucaugugcauccccuacugcaacuacuccaaguacugguaccucaaccacacgaccaccggccgcaccagccugcccaagugcuggcuggucuccaacggcagcuaccucaacgagacgcacuucuccgacgacaucgagcagcaggccgacaacaugaucaccgagaugcugcagaaggaguacauggagcggcaggggaagacgccccugggccucguggaccuguucguguucagcaccuccuucuaccugaucagcaucuuccugcaccucgucaagaucccgacccaccgccacaucguggggaaguccugccccaagccccaccggcugaaccacaugggcaucugcagcugcgggcuguacaagcagcccggcgugccggucaaguggaagcgcugaggacuaguaauaaggaaacuguaugaaugucugugggcaggaagugaagagauccuucuguaaagguuuuuggaauuaugucugcugaauaauaaacuuuuuugaaauaauaaaucugguagaaaaaugagaucucaaaggcucuuuucagagccaccaaaaaaaaaaaaaaaaaaaaaaaaaaaaaaaaaaaaaaaaaaaaaaaaaaaaaaaaaaaaaaaaaaaaaaaaaaaaaaaaaaaaaaaaaaaaaaaaaaaaa

SEQ ID NO: 16105 - RNA, 1809 nt, Artificial Sequence
  mRNA product Design b-4 (hSL-A100) comprising derived and/or modified sequence from LASV(LP;Clade I)__AAF86701__GPCmut1 (opt1)
aggagagucccgcagucggcguccagcggcucugcuuguucgugugugugucguugcaggccuuauucaagcuuaccaugggccagaucaucaccuucuuccaggaggugccccacgucaucgaggaggugaugaacaucgugcugaucgcccucagccugcuggccauccucaaggggcuguacaacaucgcgaccugcggcaucaucgggcuggucgccuuccucuuccugugcggcaaguccugcagccugacgcucaagggcggguacgagcugcagacccuggagcucaacauggagacccugaacaugaccaugccgcuguccugcacgaagaacagcucccaccacuacauccgcgugggcaacgagaccgggcucgagcugacccugaccaacacgagcaucaucaaccacaaguucugcaaccucuccgacgcccacaagaagaaccuguacgaccacgcccugaugagcaucaucuccaccuuccaccucagcauccccaacuucaaccaguacgaggccauguccugcgacuucaacggcgggaagaucagcgugcaguacaaccugucccacagcuacgcgggcgacgccgccgagcacugcgggaccgucgccaacggcgugcugcagaccuucaugcggauggcguggggcgggcgcuacaucgcccucgacuccggcugcgggaacugggacugcaucaugacgagcuaccaguaccugaucauccagaacaccaccugggaggaccacugccaguucucccggcccagccccaucggcuaccugggccuccugucccagcgcacccgggacaucuacaucagccgccggcgccgggggacguucaccuggacccugagcgacuccgagggcaacgagacccccgggggcuacugccugacgcgcuggaugcucaucgaggccgagcugaagugcuucgggaacaccgccguggccaagugcaacgagaagcacgacgaggaguucugcgacaugcugcggcuguucgacuucaacaagcaggcgauccgccggcugaaggcccccgcccagaugagcauccagcugaucaacaaggccgucaacgcccucaucaacgaccagcugaucaugaagaaccaccuccgcgacaucaugugcauccccuacugcaacuacuccaaguacugguaccucaaccacaccagcuccggccggaccagccugcccaagugcuggcugaucuccaacgggagcuaccucaacgagacgcaguucuccgacgacaucgagcagcaggcggacaacaugaucaccgagaugcugcagaaggaguacaucgagcgccagggcaagaccccgcuggggcucguggacaucuucaucuucagcaccuccuucuaccugaucagcaucuuccugcaccugaucaagaucccgacgcaccggcacaucgugggcaagcccugccccaagccccaccgccucaaccacaugggggucugcuccugcggccuguacaagcacccgggcgugcccaccaaguggaagcggugaggacuaguaauaaggaaacuguaugaaugucugugggcaggaagugaagagauccuucuguaaagguuuuuggaauuaugucugcugaauaauaaacuuuuuugaaauaauaaaucugguagaaaaaugagaucucaaaggcucuuuucagagccaccaaaaaaaaaaaaaaaaaaaaaaaaaaaaaaaaaaaaaaaaaaaaaaaaaaaaaaaaaaaaaaaaaaaaaaaaaaaaaaaaaaaaaaaaaaaaaaaaaaaaa

SEQ ID NO: 16106 - RNA, 1809 nt, Artificial Sequence
  mRNA product Design b-4 (hSL-A100) comprising derived and/or modified sequence from LASV(803213;Clade II)__AAF86703__GPCmut1 (opt1)
aggagagucccgcagucggcguccagcggcucugcuuguucgugugugugucguugcaggccuuauucaagcuuaccaugggccagaucaucaccuucuuccaggaggugccccacgucaucgaggaggugaugaacaucgugcugaucgcccucagccugcuggccauccucaaggggaucuacaacgucgcgaccugcggccuguucgggcugaucuccuuccuccugcugugcggccgcagcugcuccgugacguacaaggggguguacgagcuccagacccuggagcugaacauggccaaccucaacaugaccaugccgcugagcugcaccaagaacaacucccaccacuacaucauggucggcaacgagacgggccuggagcucacccugaccaacaccagcaucaucaaccacaaguucugcaaccuguccgacgcccacaagaagaaccucuacgaccacgcccugaugagcaucaucuccacguuccaccugagcauccccaacuucaaccaguacgaggccauguccugcgacuucaacgggggcaagaucagcgugcaguacaaccucucccacagcuucgcgguggacgccgccaaccacugcgggaccaucgccaacggcguccugcagaccuucaugcggauggcguggggcggguccuacaucgcccuggacagcggcugcgggaacugggacugcaucaugaccuccuaccaguaccucaucauccagaacacgaccugggaggaccacugccaguucagccgccccucccccaucggcuaccuggggcugcucagccagcggacccgcgacaucuacaucagccggcgccgccggggcaccuucacguggacccucuccgacagcgagggcaacgaggcccccgggggcuacugccugacccgguggaugcugaucgaggccgagcucaagugcuucgggaacaccgccguggcgaagugcaacgagaagcacgacgaggaguucugcgacaugcugcgccuguucgacuucaacaagcaggccaucaagcggcucaagacgcccgcccagauguccauccagcugaucaacaaggccgugaacgcccugaucaacgaccagcucaucaugaagaaccaccuccgcgacaucaugugcauccccuacugcaacuacagccgguacugguaccugaaccacaccgucaccgggaagaccucccugccccgcugcuggcuggugagcaacggcuccuaccugaacgagacgcacuucagcgacgacaucgagcagcaggcggacaacaugaucaccgagaugcuccagaaggaguacauggaccggcagggcaagaccccgcuggggcugguggaccucuucgucuucuccaccagcuucuaccugaucuccaucuuccugcaccuggugaagaucccgacgcaccgccacaucgugggcaagcccugccccaagccccaccggcucaaccacauggggaucugcagcugcggccuguacaagcacccggggguccccgugaaguggaagcgcugaggacuaguaauaaggaaacuguaugaaugucugugggcaggaagugaagagauccuucuguaaagguuuuuggaauuaugucugcugaauaauaaacuuuuuugaaauaauaaaucugguagaaaaaugagaucucaaaggcucuuuucagagccaccaaaaaaaaaaaaaaaaaaaaaaaaaaaaaaaaaaaaaaaaaaaaaaaaaaaaaaaaaaaaaaaaaaaaaaaaaaaaaaaaaaaaaaaaaaaaaaaaaaaaa

SEQ ID NO: 16107 - RNA, 1809 nt, Artificial Sequence
  mRNA product Design b-4 (hSL-A100) comprising derived and/or modified sequence from LASV(GA391;Clade III)__CAA36645__GPCmut1 (opt1)
aggagagucccgcagucggcguccagcggcucugcuuguucgugugugugucguugcaggccuuauucaagcuuaccaugggccagaucgugaccuucuuccaggaggucccccacgugaucgaggaggugaugaacaucguccugaucgcccucagcauccuggccauccugaaggggcucuacaacguggcgaccugcggccugaucgggcuggugacguuccuccugcuguccggccgcagcugcucccucaucuacaaggggaccuacgagcugcagacccuggagcucaacauggagacccugaacaugacgaugccgcugagcugcaccaagaacaacucccaccacuacauccgggucggcaacgagaccggccucgagcugacccugacgaacaccagcauccucaaccacaaguucugcaaccuguccgacgcccacaagcgcaaccuguacgaccacagccucauguccaucaucagcaccuuccaccuguccauccccaacuucaaccaguacgaggccaugagcugcgacuucaacgggggcaagaucaccgugcaguacaaccugucccacagcuucgccguggacgccgcggggcacugcggcacgcucgccaacgggguccugcagaccuucaugcggauggccuggggcggcuccuacaucgcccuggacagcgggugcggcaacugggacugcaucaugaccuccuaccaguaccucaucauccagaacaccacgugggacgaccacugccaguucagccggcccucccccaucggguaccugggccugcucagccagcgcacccgggacaucuacaucagccgccggcgccggggcaccuucaccuggacgcucuccgacagcgaggggaacgagaccccgggcggguacugccugacccgcuggaugcugaucgaggcggagcucaagugcuucggcaacaccgccguggccaagugcaacgagaagcacgacgaggaguucugcgacaugcugcggcuguucgacuucaacaagcaggccauccgccggcucaagacgcccgcccagauguccauccagcugaucaacaaggcggugaacgcccugaucaacgaccagcucaucaugaagaaccaccuccgcgacaucaugugcauccccuacugcaacuacagccgguacugguaccugaaccacaccuccaccggcaagaccagccugccccgcugcuggcugaucuccaacggcagcuaccugaacgagacgaaguucuccgacgacaucgagcagcaggccgacaacaugaucaccgagaugcuccagaaggaguacaucgaccggcaggggaagacgccccugggccuggucgaccuguucguguucagcaccuccuucuaccucaucagcaucuuccugcaccuggugaagaucccgacccaccgccacaucgucgggaagcccugccccaagccccaccggcucaaccacaugggcaucugcuccugcgggcuguacaagcagccgggcgugcccgugcgcuggaagcggugaggacuaguaauaaggaaacuguaugaaugucugugggcaggaagugaagagauccuucuguaaagguuuuuggaauuaugucugcugaauaauaaacuuuuuugaaauaauaaaucugguagaaaaaugagaucucaaaggcucuuuucagagccaccaaaaaaaaaaaaaaaaaaaaaaaaaaaaaaaaaaaaaaaaaaaaaaaaaaaaaaaaaaaaaaaaaaaaaaaaaaaaaaaaaaaaaaaaaaaaaaaaaaaaa

SEQ ID NO: 16108 - RNA, 1812 nt, Artificial Sequence
  mRNA product Design b-4 (hSL-A100) comprising derived and/or modified sequence from LASV(AV;Clade V)__CCA30314__GPCmut1 (opt1)
aggagagucccgcagucggcguccagcggcucugcuuguucgugugugugucguugcaggccuuauucaagcuuaccaugggccagaucgugaccuucuuccaggaggucccccacgugaucgaggaggugaugaacaucguccugaucgcccucagcauccuggccgugcugaaggggcucuacaacaucgcgaccugcggccugaucgggcugaucacguuccuccugcugugcggccgcuccugcagcuccaaccucuacaaggggguguacgagcugcagagccuggaccucaacauggagacccugaacaugaccaugccgcuguccugcaccaagaacaacagccaccacuacauccgggucggcaacgacacgggccucgagcugacccugaccaacaccuccauccucaaccacaaguucugcaaccugagcgacgcccacaagaaggaccuguacgaccacgcccucauguccaucaucagcacguuccaccuguccauccccaacuucaaccaguacgaggccaugagcugcgacuucaacgggggcaagaucuccgugcaguacaaccugagccacuccuacgccaucgacgcggccaaccacugcgggaccguggccaacggcauccuccagaccuucaugcgcauggccuggggcgggagcuacaucgcgcuggacuccggcugcgggaacugggacugcaucaugaccagcuaccaguaccugaucauccagaacacgaccugggagaaccacugccaguucucccgccccagccccaucggcuaccucgggcugcugagccagcggacccgcgacaucuacaucucccggcgccgccggggcaccuucacguggacccugagcgacuccgagggcaacgccacccccgggggcuacugccucacccgguggaugcugaucgaggccgagcugaagugcuucgggaacacggccgucgccaagugcaacgagaagcacgacgaggaguucugcgacaugcuccgccuguucgacuucaacaagcaggcgaucagccggcugaagucccccgcccagaugagcauccagcucaucaacaaggccgugaacgcccugaucaacgaccagcugaucaugaagaaccaccuccgcgacaucaugugcauccccuacugcaacuacuccaaguacugguaccugaaccacaccaucaccgggaagaccagccugcccaagugcuggcucguguccaacggcagcuaccugaacgagacgcacuucuccgacgacaucgagcagcaggccgacaacaugaucaccgagaugcugcagaaggaguacauggagcggcagggcaagaccccgcucgggcuggucgaccuguucguguucagcaccuccuucuaccugaucagcaucuuccuccgccuggugaagaucccgacgcaccggcacaucgucggcaagcccugccccaagccccaccgccugaaccacauggggaucugcuccugcggccucuacaagcagccgggggugcccgugcgguggaagcgcugaggacuaguaauaaggaaacuguaugaaugucugugggcaggaagugaagagauccuucuguaaagguuuuuggaauuaugucugcugaauaauaaacuuuuuugaaauaauaaaucugguagaaaaaugagaucucaaaggcucuuuucagagccaccaaaaaaaaaaaaaaaaaaaaaaaaaaaaaaaaaaaaaaaaaaaaaaaaaaaaaaaaaaaaaaaaaaaaaaaaaaaaaaaaaaaaaaaaaaaaaaaaaaaaa

SEQ ID NO: 16109 - RNA, 1809 nt, Artificial Sequence
  mRNA product Design b-4 (hSL-A100) comprising derived and/or modified sequence from LASV(Togo/2016/7082;Clade VI)__AMR44577__GPCmut1 (opt1)
aggagagucccgcagucggcguccagcggcucugcuuguucgugugugugucguugcaggccuuauucaagcuuaccaugggccagaucaucaccuucuuccaggaggugccccacgucaucgaggaggugaugaacaucgugcugaucgcccucagccugcuggccauccucaagggggucuacaacguggcgaccugcggcaucaucgggcuggugacguuccuguuccucugcggccgcuccugcagccugaucuacaagggguccuacgagcugcagacccucgagcugaacauggagacccugaacaugaccaugccgcucagcugcacgaagaacuccagccaccacuacauccgggucggcaacgagaccggccuggagcugacccucaccaacacguccaucaucaaccacaaguucugcaaccugagcgacgcccacaagcgcaaccuguacgaccacgcccucauguccauccugagcaccuuccaccuguccauccccaacuucaaccaguacgaggccaugagcugcgacuucaacgggggcaagaucuccgugcaguacaaccucagccacgccuacgcgguggacgccgccgagcacugcgggaccgucgccaacggcgugcugcagaccuucaugcggauggcguggggcggguccuacaucgcccuggacagcggcugcgggaacugggacugcaucaugacguccuaccaguaccucaucauccagaacaccaccugggaggaccacugccaguucagccggcccucccccaucggcuaccuggggcugcucagccagcgcacccgggacaucuacaucagccgccggcgccggggcacguucaccuggacccucuccgacagcgagggcaacgagacccccgggggcuacugccugacgcgcuggaugcugaucgaggccgagcucaagugcuucgggaacaccgccguggccaagugcaacgagaagcacgacgaggaguucugcgacaugcugcggcuguucgacuucaacaagcaggcgauccagcgccucaagucccccgcccagaugagcauccagcugaucaacaaggccgucaacgcccugaucaacgaccagcucaucaugaagaaccaccuccgggacaugaugugcauccccuacugcaacuacuccaaguacugguaccugaaccacaccagcuccgggcgcaccagccugcccaagugcuggcugguguccaacggcagcuaccugaacgagacgcacuucuccgacgacaucgagcagcaggccgacaacaugaucaccgagaugcuccagaaggaguacaucgaccggcagggcaagaccccgcuggggcugguggaccucuucgucuucagcaccuccuucuaccugaucagcaucuuccugcaccugaucaagaucccgacgcaccgccacaucgugggcaagcccugccccaagccccaccggcucaaccacauggggaucugcuccugcggccuguacaagcagccgggggugcccacccgcuggaagcggugaggacuaguaauaaggaaacuguaugaaugucugugggcaggaagugaagagauccuucuguaaagguuuuuggaauuaugucugcugaauaauaaacuuuuuugaaauaauaaaucugguagaaaaaugagaucucaaaggcucuuuucagagccaccaaaaaaaaaaaaaaaaaaaaaaaaaaaaaaaaaaaaaaaaaaaaaaaaaaaaaaaaaaaaaaaaaaaaaaaaaaaaaaaaaaaaaaaaaaaaaaaaaaaaa

SEQ ID NO: 16110 - RNA, 1809 nt, Artificial Sequence
  mRNA product Design b-4 (hSL-A100) comprising derived and/or modified sequence from LASV(KAK-428;Clade n.d. (VII))__ANH09740__GPCmut1 (opt1)
aggagagucccgcagucggcguccagcggcucugcuuguucgugugugugucguugcaggccuuauucaagcuuaccaugggccagaucgugaccuucuuccaggaggucccccacgugaucgaggaggugaugaacaucguccugaucgcccucagccugcuggccauccucaaggggcuguacaacuucgcgaccugcggcgugaucgggcugaucacguuccuccugcugugcggccgcuccugcagcgccaccuacaaggggcaguacgagcuccagacccuggagcugaacauggagucccucaacaugaccaugccgcugagcugcacgaagaacaacucccaccacuacauccgggccggcaacaacaccggccuggagcucacccugaccaacacgagcaucaucucccacaaguucugcaaccugagcgacgcccacaagaagaaccucuacgaccacacccugauguccaucaucaccaccuuccaccugagcauccccaacuucaaccaguacgaggccauguccugcgacuucaacgggggcaagaucagcauccaguacaaccucucccacagcuacgcgggggacgccgcccagcacugcggcacgguggccaacgggguccugcagaccuucaugcgcauggcguggggcggcuccuaccuggcccucgacagcgggugccgcggcugggacugcaucaucuccagcuaccaguaccugaucauccagaacaccaccugggacgaccacugccaguucucccggcccagccccaucggguaccugggcuucgugagccagaagacgcgcgacaucuacaucucccggcgccgccggggcaccuucaccuggacccugagcgacuccgaggggcacgacaugccgggcggguacugccucacgcgguggaugcugaucgaggccgaccugaagugcuucggcaacaccgccguggccaagugcaacgagaagcacgacgaggaguucugcgacauguggcgccucuucgacuucaacaagcaggcgauccagcggcugaaggcccccgcccagaugaacauccagcugaucaacaaggccgucaacgcccucaucaacgaccagcugaugaugaagaaccaccuccgcgacaucaugugcauccccuacugcaacuacagcaaguucugguaccugaacaacaccaccacgggccggaccucccugccccgcugcuggcugaucagcaacggcuccuaccucaacgagacccacuucagcgacgacaucgagcagcaggcggacaacaugaucaccgagaugcugcagaaggaguacauggaccggcaggggaagacgccccugggccucguggaccuguucguguucuccaccagcuucuaccugaucaccaucuuccuccaccuggucaagaucccgacccaccgccacaucguggggaagcccugccccaagccccaccggcugaaccacaugggcaucugcuccugcgggcuguacaagcagccgggcgugcccguccgcuggaagcggugaggacuaguaauaaggaaacuguaugaaugucugugggcaggaagugaagagauccuucuguaaagguuuuuggaauuaugucugcugaauaauaaacuuuuuugaaauaauaaaucugguagaaaaaugagaucucaaaggcucuuuucagagccaccaaaaaaaaaaaaaaaaaaaaaaaaaaaaaaaaaaaaaaaaaaaaaaaaaaaaaaaaaaaaaaaaaaaaaaaaaaaaaaaaaaaaaaaaaaaaaaaaaaaaa

SEQ ID NO: 16111 - RNA, 1809 nt, Artificial Sequence; identical to SEQ ID NO: 16105
  mRNA product Design b-4 (hSL-A100) comprising derived and/or modified sequence from LASV(Pinneo-NIG-1969;Clade I)__AIT17836__GPCmut1 (opt1)

SEQ ID NO: 16112 - RNA, 1809 nt, Artificial Sequence
  mRNA product Design b-4 (hSL-A100) comprising derived and/or modified sequence from LASV(ISTH0009-NIG-2011;Clade II)__AIT17404__GPCmut1 (opt1)
aggagagucccgcagucggcguccagcggcucugcuuguucgugugugugucguugcaggccuuauucaagcuuaccaugggccagaucaucaccuucuuccaggaggugccccacgucaucgaggaggugaugaacaucgugcugaucgcccucagccugcuggccauccucaaggggaucuacaacgucgcgaccugcggccuguucgggcugguguccuuccuccugcugugcggccgcagcugcuccacgaccuacaaggggguguacgagcuccagacccuggagcuggacauggccagccucaacaugaccaugccgcuguccugcacgaagaacaacagccaccacuacaucauggucggcaacgagaccggccuggagcucacccugaccaacacguccaucaucaaccacaaguucugcaaccugagcgacgcccacaagaagaaccucuacgaccacgcccugauguccaucaucagcaccuuccaccuguccauccccaacuucaaccaguacgaggccaugagcugcgacuucaacgggggcaagaucuccgugcaguacaaccucagccacgcguacgccguggacgccgccaaccacugcgggaccaucgcgaacggcguccugcagaccuucaugcggauggccuggggcggguccuacaucgcccuggacagcggcugcggguccugggacugcaucaugacgagcuaccaguaccucaucauccagaacaccaccugggaggaccacugccaguucucccgccccagccccaucggcuaccuggggcugcucagccagcggacccgcgacaucuacaucucccggcgccgccggggcacguucaccuggacccucagcgacuccgagggcaacgagacccccgggggcuacugccugacgcgguggaugcugaucgaggccgagcucaagugcuucgggaacaccgccguggcgaagugcaacgagaagcacgacgaggaguucugcgacaugcugcgccuguucgacuucaacaagcaggccauccggcgccucaagacccccgcccagaugagcauccagcugaucaacaaggccgugaacgcccugaucaacgaccagcucaucaugaagaaccaccuccgggacaucaugugcaucccguacugcaacuacuccaaguacugguaccugaaccacaccgucacggggaagaccagccugccccgcugcuggcugguguccaacggcagcuaccugaacgagacccacuucuccgacgacaucgagcagcaggcggacaacaugaucaccgagcuccugcagaaggaguacauggaccggcagggcaagacgccccuggggcucguggaccuguucgucuucagcaccuccuucuaccugaucagcaucuuccugcaccucaucaagaucccgacccaccgccacaucaccggcaagcccugccccaagccccaccggcugaaccacauggggaucugcuccugcggccuguacaagcacccgggggugcccgugaaguggaagcgcugaggacuaguaauaaggaaacuguaugaaugucugugggcaggaagugaagagauccuucuguaaagguuuuuggaauuaugucugcugaauaauaaacuuuuuugaaauaauaaaucugguagaaaaaugagaucucaaaggcucuuuucagagccaccaaaaaaaaaaaaaaaaaaaaaaaaaaaaaaaaaaaaaaaaaaaaaaaaaaaaaaaaaaaaaaaaaaaaaaaaaaaaaaaaaaaaaaaaaaaaaaaaaaaaa

SEQ ID NO: 16113 - RNA, 1809 nt, Artificial Sequence
  mRNA product Design b-4 (hSL-A100) comprising derived and/or modified sequence from LASV(ISTH2010-NIG-2012;Clade II)__AIT17482__GPCmut1 (opt1)
aggagagucccgcagucggcguccagcggcucugcuuguucgugugugugucguugcaggccuuauucaagcuuaccaugggccagaucaucaccuucuuccaggaggugccccacgucaucgaggaggugaugaacaucgugcugaucgcccucagccugcuggccauccucaaggggaucuacaacgucgcgaccugcggccuguucgggcugguguccuuccuccugcugugcggccgcagcugcuccacgaccuacaaggggguguacgagcuccagacccuggagcuggacauggccagccucaacaugaccaugccgcuguccugcacgaagaacaacagccaccacuacaucauggucggcaacgagaccggccuggagcucacccugaccaacacguccaucaucaaccacaaguucugcaaccugagcgacgcccacaagaagaaccucuacgaccacgcccugauguccaucaucagcaccuuccaccuguccauccccaacuucaaccaguacgaggccaugagcugcgacuucaacgggggcaagaucuccgugcaguacaaccucagccacgcguacgccguggacgccgccaaccacugcgggaccaucgcgaacggcguccugcagaccuucaugcggauggccuggggcggguccuacaucgcccuggacagcggcugcggguccugggacugcaucaugacgagcuaccaguaccucaucauccagaacaucaccugggaggaccacugccaguucucccgccccagccccaucggcuaccuggggcugcucagccagcggacccgcgacaucuacaucucccggcgccgccggggcaccuucacguggacccucagcgacuccgagggcaacgagacccccgggggcuacugccugacccgguggaugcugaucgaggccgagcucaagugcuucgggaacacggccguggcgaagugcaacgagaagcacgacgaggaguucugcgacaugcugcgccuguucgacuucaacaagcaggccauccggcgccucaagacccccgcccagaugagcauccagcugaucaacaaggccgugaacgcccugaucaacgaccagcucaucaugaagaaccaccuccgggacaucaugugcauccccuacugcaacuacuccaaguacugguaccugaaccacaccgucaccgggaagacgagccugccccgcugcuggcugguguccaacggcagcuaccugaacgagacccacuucuccgacgacaucgagcagcaggcggacaacaugaucaccgagcuccugcagaaggaguacaucgaccggcagggcaagaccccgcuggggcucguggaccuguucgucuucagcacguccuucuaccugaucagcaucuuccugcaccucgugaagaucccgacccaccgccacguggucggcaagcccugccccaagccccaccggcugaaccacauggggaucugcuccugcggccuguacaagcacccgggggugcccgugaaguggaagcgcugaggacuaguaauaaggaaacuguaugaaugucugugggcaggaagugaagagauccuucuguaaagguuuuuggaauuaugucugcugaauaauaaacuuuuuugaaauaauaaaucugguagaaaaaugagaucucaaaggcucuuuucagagccaccaaaaaaaaaaaaaaaaaaaaaaaaaaaaaaaaaaaaaaaaaaaaaaaaaaaaaaaaaaaaaaaaaaaaaaaaaaaaaaaaaaaaaaaaaaaaaaaaaaaaa

SEQ ID NO: 16114 - RNA, 1809 nt, Artificial Sequence
  mRNA product Design b-4 (hSL-A100) comprising derived and/or modified sequence from LASV(Lassa virus/H.sapiens-wt/NGA/2015/ISTH_0543;Clade II)__AVO03639__GPCmut1 (opt1)
aggagagucccgcagucggcguccagcggcucugcuuguucgugugugugucguugcaggccuuauucaagcuuaccaugggccagaucaucaccuucuuccaggaggugccccacgucaucgaggaggugaugaacaucgugcugaucgcccucagccugcuggccauccucaaggggaucuacaacgucgcgaccugcggccuguucgggcugguguccuuccuccugcugugcggccgcagcugcuccacgaccuacaaggggguguacgagcuccagacccuggagcuggacauggccaaccucaacaugaccaugccgcugagcugcacgaagaacaacucccaccacuacaucauggucggcaacgagaccggccuggagcucacccugaccaacacgagcaucaucaaccacaaguucugcaaccuguccgacgcccacaagaagaaccucuacgaccacgcccugaugagcaucaucuccaccuuccaccugagcauccccaacuucaaccaguacgaggccauguccugcgacuucaacgggggcaagaucagcgugcaguacaaccucucccacaccuacgcgguggacgccgccaaccacugcgggaccaucgccaacggcguccugcagacguucaugcggauggcguggggcgggagcuacaucgcccuggacuccggcugcgggagcugggacugcaucaugaccuccuaccaguaccucgugauccagaacaccaccugggaggaccacugccaguucagccgccccucccccaucggcuaccuggggcugcucagccagcggacgcgcgacaucuacaucagccggcgccgccggggcaccuucaccuggacccucuccgacagcgagggcaacgagacgcccgggggcuacugccugacccgguggaugcugaucgaggccgagcucaagugcuucgggaacaccgccguggccaagugcaacgagaagcacgacgaggaguucugcgacaugcugcgccuguucgacuucaacaagcaggcgauccggcgccucaagacccccgcccagauguccauccagcugaucaacaaggccgucaacgcccugaucaacgaccagcucaucaugaagaaccaccuccgggacaucaugugcauccccuacugcaacuacagcaaguacugguaccugaaccacacggugaccgggaagaccucccugccccgcugcuggcuggugagcaacggcuccuaccugaacgagacccacuucagcgacgacaucgagcagcaggccgacaacaugaucacggagcuccugcagaaggaguacaucgaccggcagggcaagaccccgcuggggcucgucgaccuguucguguucuccaccagcuucuaccugaucuccaucuuccugcaccucgugaagaucccgacccaccgccacaucacgggcaagcccugccccaagccccaccggcugaaccacauggggaucugcagcugcggccuguacaagcacccggggguccccgugaaguggaagcgcugaggacuaguaauaaggaaacuguaugaaugucugugggcaggaagugaagagauccuucuguaaagguuuuuggaauuaugucugcugaauaauaaacuuuuuugaaauaauaaaucugguagaaaaaugagaucucaaaggcucuuuucagagccaccaaaaaaaaaaaaaaaaaaaaaaaaaaaaaaaaaaaaaaaaaaaaaaaaaaaaaaaaaaaaaaaaaaaaaaaaaaaaaaaaaaaaaaaaaaaaaaaaaaaaa

SEQ ID NO: 16115 - RNA, 1809 nt, Artificial Sequence
  mRNA product Design b-4 (hSL-A100) comprising derived and/or modified sequence from LASV(Lassa virus/H.sapiens-wt/NGA/2016/ISTH_0009;Clade II)__AVO03571__GPCmut1 (opt1)
aggagagucccgcagucggcguccagcggcucugcuuguucgugugugugucguugcaggccuuauucaagcuuaccaugggccagaucaucaccuucuuccaggaggugccccacgucaucgaggaggugaugaacaucgugcugaucgcccucagccugcuggccauccucaaggggaucuacaacgucgcgaccugcggccugcuggggcucguguccuuccugcugcucugcggccgcagcugcuccacgaccuacaaggggguguacgagcugcagacccuggagcucgacauggccagccugaacaugaccaugccgcuguccugcacgaagaacaacagccaccacuacaucauggucggcaacgagaccggccucgagcugacccugaccaacacguccaucaucaaccacaaguucugcaaccucagcgacgcccacaagaagaaccuguacgaccacgcccugauguccaucaucagcaccuuccaccucuccauccccaacuucaaccaguacgaggccaugagcugcgacuucaacgggggccggaucuccgugcaguacaaccugagccacuccuacgcgguggacgccgccaaccacugcgggaccaucgccaacggcguccugcagaccuucaugcgcauggcguggggcgggagcuacaucgcccucgacuccggcugcgggagcugggacugcaucaugacguccuaccaguaccugaucauccagaacaccaccugggaggaccacugccaguucagccggcccagccccaucggcuaccuggggcuccugucccagcgcacccgggacaucuacaucagccgccggcgccggggcacguucaccuggacccuguccgacagcgagggcaacgagacccccgggggcuacugccugacgcgcuggaugcucaucgaggccgagcugaagugcuucgggaacaccgccguggccaagugcaacgagaagcacgacgaggaguucugcgacaugcugcggcuguucgacuucaacaagcaggcgauccgccggcugaagacccccgcccagauguccauccagcugaucaacaaggccgugaacgcccucaucaacgaccagcugaucaugaagaaccaccuccgcgacaucaugugcaucccguacugcaacuacagcaaguacugguaccucaaccacaccgucacggggaagaccucccugccccggugcuggcuggugagcaacggcuccuaccucaacgagacccacuucagcgacgacaucgagcagcaggccgacaacaugaucaccgagcugcugcagaaggaguacaucgaccgccagggcaagacgccccucgggcugguggaccuguucgucuucuccaccagcuucuaccugaucuccaucuuccuccaccuggugaagaucccgacccaccggcacaucaccggcaagcccugccccaagccccaccgccugaaccacauggggaucugcagcugcggccucuacaaccacccgggggugcccgucaaguggaagcggugaggacuaguaauaaggaaacuguaugaaugucugugggcaggaagugaagagauccuucuguaaagguuuuuggaauuaugucugcugaauaauaaacuuuuuugaaauaauaaaucugguagaaaaaugagaucucaaaggcucuuuucagagccaccaaaaaaaaaaaaaaaaaaaaaaaaaaaaaaaaaaaaaaaaaaaaaaaaaaaaaaaaaaaaaaaaaaaaaaaaaaaaaaaaaaaaaaaaaaaaaaaaaaaaa

SEQ ID NO: 16116 - RNA, 1809 nt, Artificial Sequence
  mRNA product Design b-4 (hSL-A100) comprising derived and/or modified sequence from LASV(Lassa virus/H.sapiens-wt/NGA/2016/ISTH_0017;Clade II)__AVO03567__GPCmut1 (opt1)
aggagagucccgcagucggcguccagcggcucugcuuguucgugugugugucguugcaggccuuauucaagcuuaccaugggccagaucaucaccuucuuccaggaggugccccacgucaucgaggaggugaugaacaucgugcugaucgcccucagccugcuggccauccucaaggggaucuacaacgucgcgaccugcggccuguucgggcugguguccuuccuccugcugugcggccgcagcugcuccacgaccuacaaggggguguacgagcuccagacccuggagcuggacauggccagccucaacaugaccaugccgcuguccugcacgaagaacaacagccaccacuacaucauggucggcaacgagaccggccuggagcucacccugaccaacacguccaucaucaaccacaaguucugcaaccugagcgacgcccacaagaagaaccucuacgaccacgcccugauguccaucaucagcaccuuccaccuguccauccccaacuucaaccaguacgaggccaugagcugcgacuucaacgggggcaagaucuccgugcaguacaaccucagccacaccuacgcgaucgacgccgccaaccacugcgggaccaucgccaacggcgugcugcagacguucaugcggauggcguggggcggguccuacaucgcccuggacagcggcugcggguccugggacugcaucaugaccagcuaccaguaccucaucauccagaacaccaccugggaggaccacugccaguucucccgccccagccccaucggcuaccuggggcugcucagccagcggacgcgcgacaucuacaucucccggcgccgccggggcaccuucaccuggacccucagcgacuccgagggcaacgagacgcccgggggcuacugccugacccgguggaugcugaucgaggccgagcucaagugcuucgggaacaccgccgucgccaagugcaacgagaagcacgacgaggaguucugcgacaugcugcgccuguucgacuucaacaagcaggcgauccggcgccucaagacccccgcccagaugagcauccagcugaucaacaaggccgugaacgcccugaucaacgaccagcucaucaugaagaaccaccuccgggacaucaugugcauccccuacugcaacuacuccaaguacugguaccugaaccacacggugaccgggaagaccagccugccccgcugcuggcuggucuccaacggcagcuaccugaacgagacccacuucuccgacgacaucgagcagcaggccgacaacaugaucacggagcuccugcagaaggaguacauggaccggcagggcaagaccccgcuggggcucguggaccuguucguguucagcaccuccuucuaccugaucagcaucuuccugcaccucguccgcaucccgacccaccggcacgugaucggcaagcccugccccaagccccaccgccugaaccacauggggaucugcuccugcggccuguacaagcacccgggggugcccgucaaguggaagcggugaggacuaguaauaaggaaacuguaugaaugucugugggcaggaagugaagagauccuucuguaaagguuuuuggaauuaugucugcugaauaauaaacuuuuuugaaauaauaaaucugguagaaaaaugagaucucaaaggcucuuuucagagccaccaaaaaaaaaaaaaaaaaaaaaaaaaaaaaaaaaaaaaaaaaaaaaaaaaaaaaaaaaaaaaaaaaaaaaaaaaaaaaaaaaaaaaaaaaaaaaaaaaaaaa

SEQ ID NO: 16117 - RNA, 1809 nt, Artificial Sequence
  mRNA product Design b-4 (hSL-A100) comprising derived and/or modified sequence from LASV(Lassa virus/H.sapiens-wt/NGA/2018/ISTH_0959;Clade II)__AVV65099__GPCmut1 (opt1)
aggagagucccgcagucggcguccagcggcucugcuuguucgugugugugucguugcaggccuuauucaagcuuaccaugggccagaucaucaccuucuuccaggaggugccccacgucaucgaggaggugaugaacaucgugcugaucgcccucagccugcuggccauccucaaggggaucuacaacgucgugaccugcggccuguucgggcugguguccuuccuccugcugugcggccgcagcugcuccacgaccuacaagggggucuacgagcuccagacccuggagcuggacauggcgagccucaacaugaccaugccgcuguccugcacgaagaacaacagccaccacuacaucauggugggcaacgagaccggccuggagcucacccugaccaacacguccaucaucaaccacaaguucugcaaccugagcgacgcccacaagaagaaccucuacgaccacgcccugauguccaucaucagcaccuuccaccuguccauccccaacuucaaccaguacgaggccaugagcugcgacuucaacgggggcaagaucuccgugcaguacaaccucagccacgccuacgcgaucgacgccgccaaccacugcgggaccaucgccaacggcguccugcagaccuucaugcggauggcguggggcggguccuacaucgcccuggacagcggcugcggguccugggacugcaucaugacgagcuaccaguaccucaucauccagaacaccaccugggaggaccacugccaguucucccgccccagccccaucggcuaccuggggcugcucagccagcggacccgcgacaucuacaucucccggcgccgccggggcacguucaccuggacccucagcgacuccgagggcaacgagacccccgggggcuacugccugacgcgguggaugcugaucgaggccgagcucaagugcuucgggaacaccgccguggccaagugcaacgagaagcacgacgaggaguucugcgacaugcugcgccuguucgacuucaacaagcaggcgauccggcgccucaagacccccgcccagaugagcauccagcugaucaacaaggccgugaacgcccugaucaacgaccagcucaucaugaagaaccaccuccgggacaucaugugcaucccguacugcaacuacuccaaguacugguaccugaaccacaccgucacggggaagaccagccugccccgcugcuggcugguguccaacggcagcuaccugaacgagacccacuucuccgacgacaucgagcagcaggccgacaacaugaucaccgagcuccugcagaaggaguacaucgaccggcagggcaagacgccccuggggcucguggaccuguucgucuucagcaccuccuucuaccugaucagcaucuuccugcaccucgugaagaucccgacccaccgccacgugaucggcaagcccugccccaagccccaccggcugaaccacauggggaucugcuccugcggccuguacaagcacccggggguccccgugaaguggaagcgcugaggacuaguaauaaggaaacuguaugaaugucugugggcaggaagugaagagauccuucuguaaagguuuuuggaauuaugucugcugaauaauaaacuuuuuugaaauaauaaaucugguagaaaaaugagaucucaaaggcucuuuucagagccaccaaaaaaaaaaaaaaaaaaaaaaaaaaaaaaaaaaaaaaaaaaaaaaaaaaaaaaaaaaaaaaaaaaaaaaaaaaaaaaaaaaaaaaaaaaaaaaaaaaaaa

SEQ ID NO: 16118 - RNA, 1809 nt, Artificial Sequence
  mRNA product Design b-4 (hSL-A100) comprising derived and/or modified sequence from LASV(LASV003-NIG-2008;Clade II)__AIT17580__GPCmut1 (opt1)
aggagagucccgcagucggcguccagcggcucugcuuguucgugugugugucguugcaggccuuauucaagcuuaccaugggccagaucaucaccuucuuccaggaggugccccacgucaucgaggaggugaugaacaucgugcugaucgcccucagccugcuggccauccucaaggggaucuacaacgucgcgaccugcggccuguucgggcugguguccuuccuccugcugugcggccgcagcugcuccacgaccuacaaggggguguacgagcuccagacccuggagcuggacauggccagccucaacaugaccaugccgcuguccugcacgaagaacaacagccaccacuacaucauggucggcaacgagaccggccuggagcucacccugaccaacacguccaucaucaaccacaaguucugcaaccugagcgacgcccacaagaagaaccucuacgaccacgcccugauguccaucaucagcaccuuccaccuguccauccccaacuucaaccaguacgaggccaugagcugcgacuucaacgggggcaagaucuccgugcaguacaaccucagccacaccuacgcgguggacgccgccaaccacugcgggaccaucgccaacggcguccugcagacguucaugcggauggcguggggcggguccuacaucgcccuggacagcggcugcggguccugggacugcaucaugaccagcuaccaguaccucaucauccagaacaccaccugggaggaccacugccaguucucccgccccagccccaucggcuaccuggggcugcucagccagcggacgcgcgacaucuacaucucccggcgccgccggggcaccuucaccuggacccucagcgacuccgagagcaacgagacgccgggcggguacugccugacccgguggaugcugaucgaggccgagcucaagugcuucggcaacaccgccguggccaagugcaacgagaagcacgacgaggaguucugcgacaugcugcgccuguucgacuucaacaagcaggcgauccggcgccucaaggcccccgcccagauguccauccagcugaucaacaaggccgugaacgcccugaucaacgaccagcucaucaugaagaaccaccuccgggacaucaugugcauccccuacugcaacuacagcaaguacugguaccugaaccacaccgucacgggccgcaccucccugccccggugcuggcuggugagcaacggguccuaccugaacgagacccacuucagcgacgacaucgagcagcaggcggacaacaugaucaccgagcuccugcagaaggaguacauggaccgccagggcaagacgccccugggccucguggaccuguucgucuucuccaccagcuucuaccugaucuccaucuuccugcaccucgugaagaucccgacccaccggcacgugaucgggaagcccugccccaagccccaccgccugaaccacaugggcaucugcagcugcgggcuguacaagcacccgggcguccccgugaaguggaagcggugaggacuaguaauaaggaaacuguaugaaugucugugggcaggaagugaagagauccuucuguaaagguuuuuggaauuaugucugcugaauaauaaacuuuuuugaaauaauaaaucugguagaaaaaugagaucucaaaggcucuuuucagagccaccaaaaaaaaaaaaaaaaaaaaaaaaaaaaaaaaaaaaaaaaaaaaaaaaaaaaaaaaaaaaaaaaaaaaaaaaaaaaaaaaaaaaaaaaaaaaaaaaaaaaa

SEQ ID NO: 16119 - RNA, 1809 nt, Artificial Sequence
  mRNA product Design b-4 (hSL-A100) comprising derived and/or modified sequence from LASV(LASV035-NIG-2009;Clade II)__AIT17588__GPCmut1 (opt1)
aggagagucccgcagucggcguccagcggcucugcuuguucgugugugugucguugcaggccuuauucaagcuuaccaugggccagaucaucaccuucuuccaggaggugccccacgucaucgaggaggugaugaacaucgugcugaucgcccucagccugcuggccauccucaaggggaucuacaacgucgcgaccugcggccuguucgggcugguguccuuccuccugcugugcggccgcagcugcuccacgaccuacaaggggguguacgagcuccagacccuggagcuggacauggccagccucaacaugaccaugccgcuguccugcacgaagaacaacagccaccacuacaucauggucggcaacgagaccggccuggagcucacccugaccaacacguccaucaucaaccacaaguucugcaaccugagcgacgcccacaagaagaaccucuacgaccacgcccugauguccaucaucagcaccuuccaccuguccauccccaacuucaaccaguacgaggccaugagcugcgacuucaacgggggcaagaucuccgugcaguacaaccucagccacgcguacgccguggacgccgccaaccacugcgggaccaucgcgaacggcguccugcagaccuucaugcggauggccuggggcggguccuacaucgcccuggacagcggcugcggguccugggacugcaucaugacgagcuaccaguaccucaucauccagaacaccaccugggaggaccacugccaguucucccgccccagccccaucggcuaccuggggcugcucagccagcggacccgcgacaucuacaucucccggcgccgccggggcacguucaccuggacccucagcgacuccgagggcaacgagacccccgggggcuacugccugacgcgguggaugcugaucgaggccgagcucaagugcuucgggaacaccgccguggcgaagugcaacgagaagcacgacgaggaguucugcgacaugcugcgccuguucgacuucaacaagcaggccauccggcgccucaaggcccccgcccagaugagcauccagcugaucaacaaggccgugaacgcgcugaucaacgaccagcucaucaugaagaaccaccuccgggacaucaugugcauccccuacugcaacuacuccaaguacugguaccugaaccacaccgucaccgggaagacgagccugccccgcugcuggcugguguccaacggcagcuaccugaacgagacccacuucuccgacgacaucgagcagcaggccgacaacaugaucaccgagcuccugcagaaggaguacaucgaccggcagggcaagaccccgcuggggcucguggaccuguucgucuucagcacguccuucuaccugaucagcaucuuccugcaccucgugaagaucccgacccaccgccacgugaucggcaagcccugccccaagccccaccggcugaaccacauggggaucugcuccugcggccuguacaagcacccggggguccccgugaaguggaagcgcugaggacuaguaauaaggaaacuguaugaaugucugugggcaggaagugaagagauccuucuguaaagguuuuuggaauuaugucugcugaauaauaaacuuuuuugaaauaauaaaucugguagaaaaaugagaucucaaaggcucuuuucagagccaccaaaaaaaaaaaaaaaaaaaaaaaaaaaaaaaaaaaaaaaaaaaaaaaaaaaaaaaaaaaaaaaaaaaaaaaaaaaaaaaaaaaaaaaaaaaaaaaaaaaaa

SEQ ID NO: 16120 - RNA, 1809 nt, Artificial Sequence
  mRNA product Design b-4 (hSL-A100) comprising derived and/or modified sequence from LASV(LASV1000-NIG-2009;Clade II)__AIT17782__GPCmut1 (opt1)
aggagagucccgcagucggcguccagcggcucugcuuguucgugugugugucguugcaggccuuauucaagcuuaccaugggccagaucaucaccuucuuccaggaggugccccacgucaucgaggaggugaugaacaucgugcugaucgcccucagccugcuggccauccucaaggggaucuacaacgucgcgaccugcggccuguucgggcugguguccuuccuccugcugugcggccgcagcugcuccacgaccuacaaggggguguacgagcuccagacccuggagcuggacauggccagccucaacaugaccaugccgcuguccugcacgaagaacaacagccaccacuacaucauggucggcaacgagaccggccuggagcucacccugaccaacacguccaucaucaaccacaaguucugcaaccugagcgacgcccacaagaagaaccucuacgaccacgcccugauguccaucaucagcaccuuccaccuguccauccccaacuucaaccaguacgaggccaugagcugcgacuucaacgggggcaagaucuccgugcaguacaaccucagccacaccuacgcgguggacgccgccaaccacugcgggaccaucgccaacggcguccugcagacguucaugcggauggcguggggcggguccuacaucgcccuggacagcggcugcggguccugggacugcaucaugaccagcuaccaguaccucaucauccagaacaccaccugggaggaccacugccaguucucccgccccagccccaucggcuaccuggggcugcucagccagcggacgcgcgacaucuacaucucccggcgccgccggggcaccuucaccuggacccucagcgacuccgagggcaacgagacgcccgggggcuacugccugacccgguggaugcugaucgaggccgagcucaagugcuucgggaacaccgccguggccaagugcaacgagaagcacgacgaggaguucugcgacaugcugcgccuguucgacuucaacaagcaggcgaucaagcggcucaagacccccgcccagaugagcauccagcugaucaacaaggccgugaacgcccugaucaacgaccagcucaucaugaagaaccaccuccgcgacaucaugugcauccccuacugcaacuacuccaaguacugguaccugaaccacacggucaccgggaagaccagccugccccggugcuggcugguguccaacggcagcuaccugaacgagacccacuucuccgacgacaucgagcagcaggccgacaacaugaucacggagcuccugcagaaggaguacaucgaccgccagggcaagaccccgcuggggcucguggaccuguucgucuucagcaccuccuucuaccugaucagcaucuuccugcaccucgugaagaucccgacccaccggcacguggucggcaagcccugccccaagccccaccgccugaaccacauggggaucugcuccugcggccuguacaagcacccgggggugcccgugaaguggaagcggugaggacuaguaauaaggaaacuguaugaaugucugugggcaggaagugaagagauccuucuguaaagguuuuuggaauuaugucugcugaauaauaaacuuuuuugaaauaauaaaucugguagaaaaaugagaucucaaaggcucuuuucagagccaccaaaaaaaaaaaaaaaaaaaaaaaaaaaaaaaaaaaaaaaaaaaaaaaaaaaaaaaaaaaaaaaaaaaaaaaaaaaaaaaaaaaaaaaaaaaaaaaaaaaaa

SEQ ID NO: 16121 - RNA, 1809 nt, Artificial Sequence
  mRNA product Design b-4 (hSL-A100) comprising derived and/or modified sequence from LASV(LASV221-NIG-2010;Clade II)__AIT17624__GPCmut1 (opt1)
aggagagucccgcagucggcguccagcggcucugcuuguucgugugugugucguugcaggccuuauucaagcuuaccaugggccagaucaucaccuucuuccaggaggugccccacgucaucgaggaggugaugaacaucgugcugaucgcccucagccugcuggccauccucaaggggaucuacaacgucgcgaccugcggccuguucgggcugguguccuuccuccugcugugcggccgcagcugcuccacgaccuacaaggggguguacgagcuccagacccuggagcuggacauggccagccucaacaugaccaugccgcuguccugcacgaagaacaacagccaccacuacaucauggucggcaacgagaccggccuggagcucacccugaccaacacguccaucaucaaccacaaguucugcaaccugagcgacgcccacaagaagaaccucuacgaccacgcccugauguccaucaucagcaccuuccaccuguccauccccaacuucaaccaguacgaggccaugagcugcgacuucaacgggggcaagaucuccgugcaguacaaccucagccacaccuacgcgaucgacgccgccaaccacugcgggaccaucgccaacggcgugcugcagacguucaugcggauggcguggggcggguccuacaucgcccuggacagcggcugcggguccugggacugcaucaugaccagcuaccaguaccucaucauccagaacaccaccugggaggaccacugccaguucucccgccccagccccaucggcuaccuggggcugcucagccagcggacgcgcgacaucuacaucucccggcgccgccggggcaccuucaccuggacccucagcgacuccgagggcaacgagacgcccgggggcuacugccugacccgguggaugcugaucgaggccgagcucaagugcuucgggaacaccgccgucgccaagugcaacgagaagcacgacgaggaguucugcgacaugcugcgccuguucgacuucaacaagcaggcgauccggcgccucaagacccccgcccagaugagcauccagcugaucaacaaggccgugaacgcccugaucaacgaccagcucaucaugaagaaccaccuccgggacaucaugugcauccccuacugcaacuacuccaaguacugguaccugaaccacacggugaccgggaagaccagccugccccgcugcuggcuggucuccaacggcagcuaccugaacgagacccacuucuccgacgacaucgagcagcaggccgacaacaugaucacggagaugcuccagaaggaguacauggaccggcagggcaagaccccgcuggggcugguggaccucuucguguucagcaccuccuucuaccugaucagcaucuuccugcaccuggucaagaucccgacccaccgccacgugaucggcaagcccugccccaagccccaccggcucaaccacauggggaucugcuccugcggccuguacaagcacccgggggugcccgucaaguggaagcgcugaggacuaguaauaaggaaacuguaugaaugucugugggcaggaagugaagagauccuucuguaaagguuuuuggaauuaugucugcugaauaauaaacuuuuuugaaauaauaaaucugguagaaaaaugagaucucaaaggcucuuuucagagccaccaaaaaaaaaaaaaaaaaaaaaaaaaaaaaaaaaaaaaaaaaaaaaaaaaaaaaaaaaaaaaaaaaaaaaaaaaaaaaaaaaaaaaaaaaaaaaaaaaaaaa

SEQ ID NO: 16122 - RNA, 1809 nt, Artificial Sequence
  mRNA product Design b-4 (hSL-A100) comprising derived and/or modified sequence from LASV(LASV237-NIG-2010;Clade II)__AIT17638__GPCmut1 (opt1)
aggagagucccgcagucggcguccagcggcucugcuuguucgugugugugucguugcaggccuuauucaagcuuaccaugggccagaucaucaccuucuuccaggaggugccccacgucaucgaggaggugaugaacaucgugcugaucgcccucagccugcuggccauccucaaggggaucuacaacgucgcgaccugcggccuguucgggcugguguccuuccuccugcugugcggccgcagcugcuccacgaccuacaaggggguguacgagcuccagacccuggagcuggacauggccagccucaacaugaccaugccgcuguccugcacgaagaacaacagccaccacuacaucauggucggcaacgagaccggccuggagcucacccugaccaacacguccaucaucaaccacaaguucugcaaccugagcgacgcccacaagaaggaccucuacgaccacgcccugauguccaucaucagcaccuuccaccuguccauccccaacuucaaccaguacgaggccaugagcugcgacuucaacgggggcaagaucuccgugcaguacaaccucagccacaccuacgcgguggacgccgccaaccacugcgggaccaucgccaacggcguccugcagacguucaugcggauggcguggggcggguccuacaucgcccuggacagcggcugcggguccugggacugcaucaugaccagcuaccaguaccucaucauccagaacaccaccugggaggaccacugccaguucucccgccccagccccaucggcuaccuggggcugcucagccagcggacgcgcgacaucuacaucucccggcgccgccggggcaccuucaccuggacccucagcgacuccgagggcaacgagacgcccgggggcuacugccugacccgguggaugcugaucgaggccgagcucaagugcuucgggaacaccgccguggccaagugcaacgagaagcacgacgaggaguucugcgacaugcugcgccuguucgacuucaacaagcaggcgauccggcgccucaagacccccgcccagaugagcauccagcugaucaacaaggccgugaacgcccugaucaacgaccagcucaucaugaagaaccaccuccgggacaucaugugcauccccuacugcaacuacuccaaguacugguaccugaaccacacggucaccgggaagaccagccugccccgcugcuggcugguguccaacggcagcuaccugaacgagacccacuucuccgacgacaucgagcagcaggccgacaacaugaucacggagcuccugcagaaggaguacauggaccggcagggcaagaccccgcuggggcucguggaccuguucgucuucagcaccuccuucuaccugaucagcaucuuccugcaccucaucaagaucccgacccaccgccacaucacgggcaagcccugccccaagccccaccggcugaaccacauggggaucugcuccugcggccuguacaagcacccgggggugcccgugaaguggaagcgcugaggacuaguaauaaggaaacuguaugaaugucugugggcaggaagugaagagauccuucuguaaagguuuuuggaauuaugucugcugaauaauaaacuuuuuugaaauaauaaaucugguagaaaaaugagaucucaaaggcucuuuucagagccaccaaaaaaaaaaaaaaaaaaaaaaaaaaaaaaaaaaaaaaaaaaaaaaaaaaaaaaaaaaaaaaaaaaaaaaaaaaaaaaaaaaaaaaaaaaaaaaaaaaaaa

SEQ ID NO: 16123 - RNA, 1809 nt, Artificial Sequence
  mRNA product Design b-4 (hSL-A100) comprising derived and/or modified sequence from LASV(LASV253-NIG-2011;Clade II)__AIT17670__GPCmut1 (opt1)
aggagagucccgcagucggcguccagcggcucugcuuguucgugugugugucguugcaggccuuauucaagcuuaccaugggccagaucaucaccuucuuccaggaggugccccacgucaucgaggaggugaugaacaucgugcugaucgcccucagccugcuggccauccucaaggggaucuacaacgucgcgaccugcggccuguucgggcugguguccuuccuccugcugugcggccgcagcugcuccacgaccuacaaggggguguacgagcuccagacccuggagcuggacauggccagccucaacaugaccaugccgcuguccugcacgaagaacaacagccaccacuacaucauggucggcaacgagaccggccuggagcucacccugaccaacacguccaucaucaaccacaaguucugcaaccugagcgacgcccacaagaagaaccucuacgaccacgcccugauguccaucaucagcaccuuccaccuguccauccccaacuucaaccaguacgaggccaugagcugcgacuucaacgggggcaagaucuccgugcaguacaaccucagccacaccuacgcgguggacgccgccaaccacugcgggaccaucgccaacggcguccugcagacguucaugcggauggcguggggcggguccuacaucgcccuggacagcggcugcggguccugggacugcaucaugaccagcuaccaguaccucaucauccagaacaccaccugggaggaccacugccaguucucccgccccagccccaucggcuaccuggggcugcucagccagcggacgcgcgacaucuacaucucccggcgccgccggggcaccuucaccuggacccucagcgacuccgagggcaacgagacgcccgggggcuacugccugacccgguggaugcugaucgaggccgagcucaagugcuucgggaacaccgccguggccaagugcaacgagaagcacgacgaggaguucugcgacaugcugcgccuguucgacuucaacaagcaggcgauccggcgccucaaggcccccgcccagaugagcauccagcugaucaacaaggccgugaacgcccugaucaacgaccagcucaucaugaagaaccaccuccgggacaucaugugcaucccguacugcaacuacuccaaguacugguaccugaaccacaccgucacggggcgcaccagccugccccggugcuggcugguguccaacggcagcuaccugaacgagacccacuucuccgacgacaucgagcagcaggcggacaacaugaucaccgagcuccugcagaaggaguacaucgaccgccagggcaagacgccccuggggcucguggaccuguucgucuucagcaccuccuucuaccugaucagcaucuuccugcaccucgugaagaucccgacccaccggcacaucaucggcaagcccugccccaagccccaccgccugaaccacauggggaucugcuccugcggccuguacaagcacccgggggugcccgucaaguggaagcggugaggacuaguaauaaggaaacuguaugaaugucugugggcaggaagugaagagauccuucuguaaagguuuuuggaauuaugucugcugaauaauaaacuuuuuugaaauaauaaaucugguagaaaaaugagaucucaaaggcucuuuucagagccaccaaaaaaaaaaaaaaaaaaaaaaaaaaaaaaaaaaaaaaaaaaaaaaaaaaaaaaaaaaaaaaaaaaaaaaaaaaaaaaaaaaaaaaaaaaaaaaaaaaaaa

SEQ ID NO: 16124 - RNA, 1809 nt, Artificial Sequence
  mRNA product Design b-4 (hSL-A100) comprising derived and/or modified sequence from LASV(LASV254-NIG-2011;Clade II)__AIT17674__GPCmut1 (opt1)
aggagagucccgcagucggcguccagcggcucugcuuguucgugugugugucguugcaggccuuauucaagcuuaccaugggccagaucaucaccuucuuccaggaggugccccacgucaucgaggaggugaugaacaucgugcugaucgcccucagccugcuggccauccucaaggggaucuacaacgucgcgaccugcggccuguucgggcugguguccuuccuccugcugugcggccgcagcugcuccacgaccuacaaggggguguacgagcuccagacccuggagcuggacaugaccaaccucaacaugacgaugccgcugagcugcaccaagaacaacucccaccacuacaucauggucggcaacgagaccggccuggagcucacccugacgaacaccagcaucaucaaccacaaguucugcaaccuguccgacgcccacaagaagaaccucuacaaccacgcccugaugagcaucaucuccaccuuccaccugagcauccccaacuucaaccaguacgaggccauguccugcgacuucaacgggggcaagaucagcgugcaguacaaccucucccacagcuacgccguggacgcggccaaccacugcgggaccaucgccaacggcguccugcagacguucaugcggauggccuggggcggguccuacaucgcgcuggacagcggcugcgggaacugggacugcaucaugaccuccuaccaguaccucaucauccagaacaccaccugggaggaccacugccaguucagccgccccucccccaucggcuaccuggggcugcucagccagcggacgcgcgacaucuacaucagccggcgccgccggggcaccuucaccuggacccucuccgacagcgagggcaacgagacgcccgggggcuacugccugacccgguggaugcugaucgaggccgagcucaagugcuucgggaacaccgccguggccaagugcaacgagaagcacgacgaggaguucugcgacaugcugcgccuguucgacuucaacaagcaggccauccggcgccucaagacccccgcgcaggccaacauccagcugaucaacaaggccgugaacgcccugaucaacgaccagcucaucaugaagaaccaccuccgggacaucaugugcauccccuacugcaacuacuccaaguacugguaccugaaccacacggucaccgggaagaccagccugccccgcugcuggcugguguccaacggcagcuaccugaacgagacccacuucuccgacgacaucgagcagcaggccgacaacaugaucacggagcuccugcagaaggaguacauggaccggcagggcaagaccccgcuggggcucguggaccuguucgucuucagcaccuccuucuaccugaucagcaucuuccugcaccucgugaagaucccgacccaccgccacgugaucggcaagcccugccccaagccccaccggcugaaccacauggggaucugcuccugcggccuguacaagcacccggggguccccgugaaguggaagcgcugaggacuaguaauaaggaaacuguaugaaugucugugggcaggaagugaagagauccuucuguaaagguuuuuggaauuaugucugcugaauaauaaacuuuuuugaaauaauaaaucugguagaaaaaugagaucucaaaggcucuuuucagagccaccaaaaaaaaaaaaaaaaaaaaaaaaaaaaaaaaaaaaaaaaaaaaaaaaaaaaaaaaaaaaaaaaaaaaaaaaaaaaaaaaaaaaaaaaaaaaaaaaaaaaa

SEQ ID NO: 16125 - RNA, 1809 nt, Artificial Sequence
  mRNA product Design b-4 (hSL-A100) comprising derived and/or modified sequence from LASV(Nig08-A19;Clade III)__ADU56618__GPCmut1 (opt1)
aggagagucccgcagucggcguccagcggcucugcuuguucgugugugugucguugcaggccuuauucaagcuuaccaugggccagaucgugaccuucuuccaggaggucccccacgugaucgaggaggugaugaacaucguccugaucgcccucagcauccuggccauccugaaggggcucuacaacaucgcgaccugcggccugaucgggcuggugacguuccuccugcuguccggccgcagcugcuccaugaccuacaaggggguguacgagcuccagacccuggagcugaacaugaacacccucaacaugacgaugccgcugagcugcaccaagaacaacucccaccacuacaucauggucggcaacgagaccggccuggagcucacccugacgaacaccagccugcuccaccacaaguucugcaaccuguccgacgcccacaagaagaaccuguacgaccacacccucaugagcaucaucuccaccuuccaccugagcauccccaacuucaaccaguacgaggccauguccugcgacuucaacgggggcaagaucacggugcaguacaaccugagccacuccuacgccaucgacgccgcgaaccacugcgggaccguggccaacggcguccuccagaccuucaugcggauggccuggggcgggagcuacaucgcccuggacuccggcugcgggaagugggacugcaucaugaccagcuaccaguaccugaucauccagaacacgaccugggaggaccacugccaguucucccggcccagccccaucggcuaccucgggcugcugucccagcgcacccgggacaucuacaucagccgccggcgccggggcaccuucacguggacccugagcgacuccgagggcaacgagacccccgggggcuacugccucacccgcuggaugcugaucgaggcggagcugaagugcuucgggaacacggccguggccaagugcaacgagaagcacgacgaggaguucugcgacaugcuccggcuguucgacuucaacaagcaggccauccgccggcugaaggcccccgcgcagaugagcauccagcucaucaacaaggccgugaacgcccugaucaacgaccagcugaucaugaagaaccaccuccgcgacaucaugugcauccccuacugcaacuacuccaaguacugguaccugaaccacaccagcaccgggcggaccucccugccccgcugcuggcucgucagcaacggcuccuaccugaacgagacgcacuucagcgacgacaucgagcagcaggccgacaacaugaucaccgagaugcugcagaaggaguaccucgaccggcagggcaagaccccgcuggggcugguggaccuguucguguucuccaccagcuucuaccucaucuccaucuuccugcaccuggucaagaucccgacgcaccgccacaucgugggcaagcccugccccaagccccaccggcucaaccacauggggaucugcagcugcggccuguacaagcagccgggggugcccguccgcuggaagcggugaggacuaguaauaaggaaacuguaugaaugucugugggcaggaagugaagagauccuucuguaaagguuuuuggaauuaugucugcugaauaauaaacuuuuuugaaauaauaaaucugguagaaaaaugagaucucaaaggcucuuuucagagccaccaaaaaaaaaaaaaaaaaaaaaaaaaaaaaaaaaaaaaaaaaaaaaaaaaaaaaaaaaaaaaaaaaaaaaaaaaaaaaaaaaaaaaaaaaaaaaaaaaaaaa

SEQ ID NO: 16126 - RNA, 1812 nt, Artificial Sequence
  mRNA product Design b-4 (hSL-A100) comprising derived and/or modified sequence from LASV(G1180-SLE-2010;Clade IV)__AIT17168__GPCmut1 (opt1)
aggagagucccgcagucggcguccagcggcucugcuuguucgugugugugucguugcaggccuuauucaagcuuaccaugggccagaucgugaccuucuuccaggaggucccccacgugaucgaggaggugaugaacaucguccugaucgcccucagcauccuggccgugcugaaggggcucuacaacuucgcgaccugcggccugguggggcugcucaccuuccugcugcucugcggccgcuccugcaccgccagccgguacaagggggucuacgagcugcagacccuggagcucaacauggagacccugaacaugacgaugccgcuguccugcaccaagaacaacagccaccacuacaucauggugggcaacgagaccggccucgagcugacccugacgaacaccuccaucaucaaccacaaguucugcaaccucagcgacgcccacaagaagaaccuguacgaccacgcccugauguccaucaucagcaccuuccaccucuccauccccaacuucaaccaguacgaggccaugagcugcgacuucaacgggggcaagaucuccgugcaguacaaccugagccacuccuacgcgggggacgccgccaaccacugcggcaccgucgccaacggggugcugcagacguucaugcgcauggcguggggcggcagcuacaucgcccucgacuccgggugcggcagcugggacugcaucaugaccuccuaccaguaccugaucauccagaacaccaccugggaggaccacugccaguucagccggcccucccccaucggguaccugggccuccugagccagcgcacgcgggacaucuacaucagccgccggcgccggggcaccuucaccuggacccuguccgacagcgaggggaaggacacgccgggcggguacugccugacccgcuggaugcucaucgaggccgagcugaagugcuucggcaacaccgccguggccaagugcaacgagaagcacgacgaggaguucugcgacaugcugcggcuguucgacuucaacaagcaggcgauccagcgccugaaggcccccgcccagauguccauccagcugaucaacaaggccgucaacgcccucaucaacgaccagcugaucaugaagaaccaccuccgggacaucaugugcauccccuacugcaacuacagcaaguacugguaccucaaccacaccacgaccggcaagaccucccugcccaagugcuggcuggugagcaacggcuccuaccucaacgagacccacuucagcgacgacaucgagcagcaggcggacaacaugaucacggagaugcugcagaaggaguacauggagcgccaggggaagacgccccugggccucguggaccuguucgucuucuccaccagcuucuaccugaucuccaucuuccugcaccucgugaagaucccgacccaccggcacaucgugggcaagagcugccccaagccccaccgccugaaccacauggggaucugcuccugcgggcuguacaagcagcccggcgucccggugaaguggaagcggugaggacuaguaauaaggaaacuguaugaaugucugugggcaggaagugaagagauccuucuguaaagguuuuuggaauuaugucugcugaauaauaaacuuuuuugaaauaauaaaucugguagaaaaaugagaucucaaaggcucuuuucagagccaccaaaaaaaaaaaaaaaaaaaaaaaaaaaaaaaaaaaaaaaaaaaaaaaaaaaaaaaaaaaaaaaaaaaaaaaaaaaaaaaaaaaaaaaaaaaaaaaaaaaaa

SEQ ID NO: 16127 - RNA, 1812 nt, Artificial Sequence
  mRNA product Design b-4 (hSL-A100) comprising derived and/or modified sequence from LASV(G1442-SLE-2011;Clade IV)__AIT17180__GPCmut1 (opt1)
aggagagucccgcagucggcguccagcggcucugcuuguucgugugugugucguugcaggccuuauucaagcuuaccaugggccagaucgugaccuucuuccaggaggucccccacgugaucgaggaggugaugaacaucguccugaucgcccucagcauccuggccgugcugaaggggcucuacaacguggcgaccugcggccugaucgggcuggucacguuccuccugcugugcggccgcuccugcaccaccacccucuacaaggggguguacgagcugcagacgcuggagcucaacauggagacccugaacaugaccaugccgcugagcugcaccaagaacaacucccaccacuacauccgggugggcaacgagacgggccucgagcugacccugaccaacaccagcaucaucaaccacaaguucugcaaccucuccgacgcccacaagaagaaccuguacgaccacgcccugaugagcaucaucuccacguuccaccucagcauccccaacuucaaccaguacgaggccauguccugcgacuucaacgggggcaagaucagcguccaguacaaccugucccacagcuacgccggggacgcggccaaccacugcggcaccguggccaacggggugcugcagaccuucaugcgcauggccuggggcggcuccuacaucgcgcucgacagcgggugcggcaacugggacugcaucaugaccuccuaccaguaccugaucauccagaacacgaccugggacgaccacugccaguucagccgccccucccccaucggguaccugggccuccugagccagcggacccgcgacgucuacaucucccggcgccgccggggcaccuucacguggacccugagcgacagcgaggggaaggacaccccgggcggguacugccugacccgguggaugcucaucgaggccgagcugaagugcuucggcaacacggccguggccaagugcaacgagaagcacgacgaggaguucugcgacaugcugcgccucuucgacuucaacaagcaggccauccagcggcugaaggcgcccgcccagauguccauccagcugaucaacaaggccgugaacgcccucaucaacgaccagcugaucaugaagaaccaccuccgcgacaucaugugcauccccuacugcaacuacagcaaguacugguaccugaacaacaccgccaccggcaagaccucccugcccaagugcuggcugaucagcaacggcuccuaccucaacgagacgcacuucagcgacgacaucgagcaggaggcggacaacaugaucaccgagaugcugcagaaggaguacauggagcggcaggggaagacgccccugggccucgucgaccuguucguguucuccaccagcuucuaccugaucuccaucuuccugcaccucgugaagaucccgacccaccgccacaucgucggcaagagcugccccaagccccaccggcugaaccacauggggaucugcuccugcgggcuguacaagcagcccggcgugccggugcgcuggaagcggugaggacuaguaauaaggaaacuguaugaaugucugugggcaggaagugaagagauccuucuguaaagguuuuuggaauuaugucugcugaauaauaaacuuuuuugaaauaauaaaucugguagaaaaaugagaucucaaaggcucuuuucagagccaccaaaaaaaaaaaaaaaaaaaaaaaaaaaaaaaaaaaaaaaaaaaaaaaaaaaaaaaaaaaaaaaaaaaaaaaaaaaaaaaaaaaaaaaaaaaaaaaaaaaaa

SEQ ID NO: 16128 - RNA, 1812 nt, Artificial Sequence
  mRNA product Design b-4 (hSL-A100) comprising derived and/or modified sequence from LASV(G3010-SLE-2013;Clade IV)__AIT17344__GPCmut1 (opt1)
aggagagucccgcagucggcguccagcggcucugcuuguucgugugugugucguugcaggccuuauucaagcuuaccaugggccagaucgugaccuucuuccaggaggucccccacgugaucgaggaggugaugaacaucguccugaucgcccucagcauccuggccgugcugaaggggcucuacaacuucgcgaccugcggccugguggggcuggucacguuccuccugcugugcggccgcuccugcaccaccagccucuacaaggggguguacgagcugcagacccuggagcucaacauggagacgcugaacaugaccaugccgcuguccugcaccaagaacaacagccaccacuacaucauggugggcaacgagaccggccucgagcugacgcugaccaacaccuccaucaucaaccacaaguucugcaaccucagcgacgcccacaagaagaaccuguacaaccacgcccugauguccaucaucagcaccuuccaccucuccauccccaacuucaaccaguacgaggccaugagcugcgacuucaacgggggcaagaucuccguccaguacaaccugagccacuccuacgccggggacgcggccagccacugcggcacgguggccaacggggugcugcagaccuucaugcggauggccuggggcggcuccuacaucgcgcucgacagcgggugcggcaagugggacugcaucaugaccuccuaccaguaccugaucauccagaacaccacgugggaggaccacugccaguucagccgccccucccccaucggguaccugggccuccugagccagcggacccgcgacaucuacaucagccggcgccgccggggcaccuucaccuggacgcuguccgacagcgaggggaaggacaccccgggcggguacugccugacccgguggaugcucaucgaggccgagcugaagugcuucggcaacaccgccgucgccaagugcaacgagaagcacgacgaggaguucugcgacaugcugcgccucuucgacuucaacaagcaggccauccagcggcugaagacgcccgcgcagauguccauccagcugaucaacaaggccgugaacgcccucaucaacgaccagcugaucaugaagaaccaccuccgcgacaucaugugcauccccuacugcaacuacagcaaguacugguaccugaaccacaccaccaccggcaagacgucccugcccaagugcuggcuggugagcaacggcuccuaccucaacgagacccacuucagcgacgacaucgagcagcaggccgacaacaugaucaccgagaugcugcagaaggaguacauggagcggcaggggaagacgccccugggccucgucgaccuguucguguucuccaccagcuucuaccugaucuccaucuuccugcaccucgugaagaucccgacccaccgccacaucgucggcaagagcugccccaagccccaccggcugaaccacauggggaucugcuccugcgggcuguacaagcagcccggcgugccggugcgcuggaagcggugaggacuaguaauaaggaaacuguaugaaugucugugggcaggaagugaagagauccuucuguaaagguuuuuggaauuaugucugcugaauaauaaacuuuuuugaaauaauaaaucugguagaaaaaugagaucucaaaggcucuuuucagagccaccaaaaaaaaaaaaaaaaaaaaaaaaaaaaaaaaaaaaaaaaaaaaaaaaaaaaaaaaaaaaaaaaaaaaaaaaaaaaaaaaaaaaaaaaaaaaaaaaaaaaa

SEQ ID NO: 16129 - RNA, 1812 nt, Artificial Sequence
  mRNA product Design b-4 (hSL-A100) comprising derived and/or modified sequence from LASV(G502-SLE-2009;Clade IV)__AIT17126__GPCmut1 (opt1)
aggagagucccgcagucggcguccagcggcucugcuuguucgugugugugucguugcaggccuuauucaagcuuaccaugggccagaucgugaccuucuuccaggaggucccccacgugaucgaggaggugaugaacaucguccugaucgcccucagcauccuggccgugcugaaggggcucuacaacuucgcgaccugcggccugguggggcugcucacguuccugcugcucugcggccgcuccugcaccaccgggcuguacaagggcgucuacgagcugcagacccucgagcugaacauggagacgcugaacaugaccaugccgcucagcugcaccaagaacaacucccaccacuacaucauggugggcaacgagaccgggcuggagcugacgcucaccaacaccagcaucaucaaccacaaguucugcaaccuguccgacgcccacaagaagaaccuguacgaccacgcccucaugagcaucaucuccaccuuccaccugagcauccccaacuucaaccaguacgaggccauguccugcgacuucaacggcgggaagaucagcgugcaguacaaccugucccacagcuacgccggcgacgcggccgaccacugcgggacggucgccaacggcgugcuccagaccuucaugcggauggccuggggcggguccuacaucgcgcuggacagcggcugcgggcggugggacugcaucaugaccuccuaccaguaccugaucauccagaacaccacgugggaggaccacugccaguucagccgccccucccccaucggcuaccucggccugcugagccagcggacccgcgacaucuacaucucccggcgccgccgggggaccuucaccuggacgcugagcgacagcgagggcaaggacacccccgggggcuacugccucacccgguggaugcugaucgaggccgagcugaagugcuucgggaacaccgccguggccaagugcaacgagaagcacgacgaggaguucugcgacaugcuccgccuguucgacuucaacaagcaggccauccagcggcugaaggcgcccgcccagauguccauccagcucaucaacaaggccgucaacgcccugaucaacgaccagcuggugaugaagaaccaccuccgcgacaucaugugcauccccuacugcaacuacagccgguacugguaccugaaccacacgaccaccggccgcaccucccugcccaagugcuggcucgugagcaacggguccuaccugaacgagacgcacuucagcgacgacaucgagcagcaggccgacaacaugaucaccgagaugcugcagaaggaguacauggagcggcagggcaagaccccgcucgggcuggucgaccuguucguguucuccaccagcuucuaccugaucuccaucuuccuccaccuggugaagaucccgacgcaccgccacaucgucggcaagagcugccccaagccccaccggcugaaccacauggggaucugcuccugcggccucuacaagcagcccggcgugccggugaaguggaagcgcugaggacuaguaauaaggaaacuguaugaaugucugugggcaggaagugaagagauccuucuguaaagguuuuuggaauuaugucugcugaauaauaaacuuuuuugaaauaauaaaucugguagaaaaaugagaucucaaaggcucuuuucagagccaccaaaaaaaaaaaaaaaaaaaaaaaaaaaaaaaaaaaaaaaaaaaaaaaaaaaaaaaaaaaaaaaaaaaaaaaaaaaaaaaaaaaaaaaaaaaaaaaaaaaaa

SEQ ID NO: 16130 - RNA, 1812 nt, Artificial Sequence
  mRNA product Design b-4 (hSL-A100) comprising derived and/or modified sequence from LASV(G733-SLE-2010;Clade IV)__AIT17154__GPCmut1 (opt1)
aggagagucccgcagucggcguccagcggcucugcuuguucgugugugugucguugcaggccuuauucaagcuuaccaugggccagaucgugaccuucuuccaggaggucccccacgugaucgaggaggugaugaacaucguccugaucgcccucagcauccuggccgugcugaaggggcucuacaacuucgcgaccugcggcaucguggggcuggucuccuuccugcuccugugcggccgcagcugcacgaccucccuguacaaggggguguacgagcuccagacccuggagcugaacauggagacccucaacaugacgaugccgcugagcugcaccaagaacaacucccaccacuacaucauggugggcaacgagaccggccuggagcucacccugacgaacaccagcaucaucaaccacaaguucugcaaccuguccgacgcccacaagaagaaccucuacgaccacgcccugaugagcaucaucuccaccuuccaccugagcauccccaacuucaaccaguacgaggccauguccugcgacuucaacgggggcaagaucagcguccaguacaaccucucccacagcuacgccggggacgcggccaaccacugcggcaccaucgccaacggggugcugcagacguucaugcggauggccuggggcggcuccuacaucgcgcuggacagcgggugcgaccggugggacugcaucaugaccuccuaccaguaccucaucauccagaacaccaccugggaggaccacugccaguucagccgccccucccccaucggcuaccuggggcugcucagccagcggacgcgcgacaucuacaucagccggcgccgccggggcaccuucaccuggacccucuccgacagcgagggcaaggacacgcccgggggcuacugccugacccgguggaugcugaucgaggccgagcucaagugcuucgggaacaccgccguggccaagugcaacgagaagcacgacgaggaguucugcgacaugcugcgccuguucgacuucaacaagcaggccauccagcggcucaaggcgcccgcccagauguccauccagcugaucaacaaggccgucaacgcccugaucaacgaccagcucaucaugaagaaccaccuccgcgacaucaugugcauccccuacugcaacuacagcaaguacugguaccugaaccacaccacgaccgggaagaccucccugcccaagugcuggcuggugagcaacggcuccuaccugaacgagacccacuucagcgacgacaucgagcagcaggccgacaacaugaucacggagaugcuccagaaggaguacauggagcggcagggcaagaccccgcuggggcugguggaccucuucgucuucuccaccagcuucuaccugaucuccaucuuccugcaccuggugaagaucccgacccaccgccacguggucggcaagagcugccccaagccccaccggcucaaccacauggggaucugcuccugcggccuguacgggcagcccggcgugccggugaaguggaagcgcugaggacuaguaauaaggaaacuguaugaaugucugugggcaggaagugaagagauccuucuguaaagguuuuuggaauuaugucugcugaauaauaaacuuuuuugaaauaauaaaucugguagaaaaaugagaucucaaaggcucuuuucagagccaccaaaaaaaaaaaaaaaaaaaaaaaaaaaaaaaaaaaaaaaaaaaaaaaaaaaaaaaaaaaaaaaaaaaaaaaaaaaaaaaaaaaaaaaaaaaaaaaaaaaaa

SEQ ID NO: 16131 - RNA, 1812 nt, Artificial Sequence
  mRNA product Design b-4 (hSL-A100) comprising derived and/or modified sequence from MOPV/LASV reassortant(IGS-1;Clade IV)__AFY05576__GPCmut1 (opt1)
aggagagucccgcagucggcguccagcggcucugcuuguucgugugugugucguugcaggccuuauucaagcuuaccaugggccagaucgugaccuucuuccaggaggucccccacgugaucgaggaggugaugaacaucguccugaucgcccucagcgugcuggccgugcugaaggggcucuacaacuucgcgaccugcggccuggucgggcuggugacguuccuccugcugugcggccgcuccugcaccaccagccucuacaaggggguguacgagcugcagacccuggagcucaacauggagacgcugaacaugaccaugccgcuguccugcaccaagaacaacagccaccacuacaucauggucggcaacgagaccggccucgagcugacgcugaccaacaccuccaucaucaaccacaaguucugcaaccucagcgacgcccacaagaagaaccuguacgaccacgcccugauguccaucaucagcaccuuccaccucuccauccccaacuucaaccaguacgaggccaugagcugcgacuucaacgggggcaagaucuccgugcaguacaaccugagccacuccuacgccggggacgcggccaaccacugcggcacgguggccaacgggguccugcagaccuucaugcggauggccuggggcggcagcuacaucgcgcucgacuccgggugcggcaacugggacugcaucaugaccagcuaccaguaccugaucauccagaacaccacgugggaggaccacugccaguucucccggcccagccccaucggguaccugggccuccugucccagcgcacccgggacaucuacaucagccgccggcgccggggcaccuucaccuggacgcugagcgacuccgagggggaggacaccccgggcggguacugccugacccgcuggaugcucaucgaggccgagcugaagugcuucggcaacaccgccguggccaagugcaacgagaagcacgacgaggaguucugcgacaugcugcggcuguucgacuucaacaagcaggccauccagcgccugaaggcgcccgcccagaugagcauccagcugaucaacaaggccgugaacgcccucaucaacgaccagcugaucaugaagaaccaccuccgggacaucaugugcauccccuacugcaacuacuccaaguacugguaccucaaccacacgaccaccggccgcaccagccugcccaagugcuggcuggucuccaacggcagcuaccucaacgagacgcacuucuccgacgacaucgagcagcaggccgacaacaugaucaccgagaugcugcagaaggaguacauggagcggcaggggaagacgccccugggccucguggaccuguucguguucagcaccuccuucuaccugaucagcaucuuccugcaccucgucaagaucccgacccaccgccacaucguggggaaguccugccccaagccccaccggcugaaccacaugggcaucugcagcugcgggcuguacaagcagcccggcgugccggucaaguggaagcgcugaggacuaguaauaaggaaacuguaugaaugucugugggcaggaagugaagagauccuucuguaaagguuuuuggaauuaugucugcugaauaauaaacuuuuuugaaauaauaaaucugguagaaaaaugagaucucaaaggcucuuuucagagccaccaaaaaaaaaaaaaaaaaaaaaaaaaaaaaaaaaaaaaaaaaaaaaaaaaaaaaaaaaaaaaaaaaaaaaaaaaaaaaaaaaaaaaaaaaaaaaaaaaaaaa

SEQ ID NO: 16132 - RNA, 1812 nt, Artificial Sequence
  mRNA product Design b-4 (hSL-A100) comprising derived and/or modified sequence from LASV(LM765-SLE-2012;Clade IV)__AIT17814__GPCmut1 (opt1)
aggagagucccgcagucggcguccagcggcucugcuuguucgugugugugucguugcaggccuuauucaagcuuaccaugggccagaucgugaccuucuuccaggaggucccccacgugaucgaggaggugaugaacaucguccugaucgcccucagcauccuggccgugcugaaggggcucuacaacuucgcgaccugcggccugguggggcuggucacguuccuccugcugugcggccgcuccugcaccaccagccucuacaaggggguguacgagcugcagacccuggagcucaacauggagacgcugaacaugaccaugccgcuguccugcaccaagaacaacagccaccacuacaucauggugggcaacgagaccggccucgagcugacgcugaccaacaccuccaucaucgaccacaaguucugcaaccucagcgacgcccaccggaagaaccuguacgaccacgcccugauguccaucaucagcaccuuccaccucuccauccccaacuucaaccaguacgaggccaugagcugcgacuucaacgggggcaagaucuccguccaguacaaccugagccacuccuacgccaaggacgcggccgaccacugcgggacgguggccaacggcgugcugcagaccuucaugcgcauggccuggggcgggagcuacaucgcgcucgacuccggcugcgggcgcugggacugcaucaugaccagcuaccaguaccugaucauccagaacaccacgugggaggaccacugccaguucucccggcccagccccaucggcuaccuggggcuccugucccagcgcacccgggacaucuacaucagccgccggcgccggggcaccuucaccuggacgcugagcgacuccgagggcaaggacacccccgggggcuacugccugacccgcuggaugcucaucgaggccgagcugaagugcuucgggaacaccgccgucgccaagugcaacgagaagcacgacgaggaguucugcgacaugcugcggcuguucgacuucaacaagcaggccauccagcgccugaaggcgcccgcccagaugagcauccagcugaucaacaaggccgugaacgcccucaucaacgaccagcugaucaugaagaaccaccuccgggacaucaugugcauccccuacugcaacuacuccaaguacugguaccucaaccacacgaccaccgggaagaccagccugcccaagugcuggcugguguccaacggcagcuaccucaacgagacgcacuucuccgacgacaucgagcagcaggccgacaacaugaucaccgagaugcugcagaaggaguacauggagcgccagggcaagaccccgcuggggcucgucgaccuguucguguucagcaccuccuucuaccugaucagcaucuuccugcaccucgugaagaucccgacgcaccggcacaucgucggcaagcccugccccaagccccaccgccugaaccacauggggaucugcuccugcggccuguacaagcagccgggggugcccgugaaguggaagcggugaggacuaguaauaaggaaacuguaugaaugucugugggcaggaagugaagagauccuucuguaaagguuuuuggaauuaugucugcugaauaauaaacuuuuuugaaauaauaaaucugguagaaaaaugagaucucaaaggcucuuuucagagccaccaaaaaaaaaaaaaaaaaaaaaaaaaaaaaaaaaaaaaaaaaaaaaaaaaaaaaaaaaaaaaaaaaaaaaaaaaaaaaaaaaaaaaaaaaaaaaaaaaaaaa

SEQ ID NO: 16133 - RNA, 1812 nt, Artificial Sequence
  mRNA product Design b-4 (hSL-A100) comprising derived and/or modified sequence from LASV(LM776-SLE-2012;Clade IV)__AIT17824__GPCmut1 (opt1)
aggagagucccgcagucggcguccagcggcucugcuuguucgugugugugucguugcaggccuuauucaagcuuaccaugggccagaucgugaccuucuuccaggaggucccccacgugaucgaggaggugaugaacaucguccugaucgcccucagcauccuggccgugcugaaggggcucuacaacuucgcgaccugcggccugguggggcuggucacguuccuccugcugugcggccgcuccugcaccaccagcguguacaaggggguguacgagcuccagacccuggagcugaacauggagacgcucaacaugaccaugccgcuguccugcaccaagaacaacagccaccacuacaucauggucggcaacgagaccggccuggagcucacgcugaccaacaccuccaucaucaaccacaaguucugcaaccugagcgacgcccacaagaagaaccucuacgaccacgcccugauguccaucaucagcaccuuccaccuguccauccccaacuucaaccaguacgaggccaugagcugcgacuucaacgggggcaagaucuccgugcaguacaaccucagccacuccuacgccggggacgcggccaaccacugcggcacgguggccaacgggguccugcagaccuucaugcggauggccuggggcggcagcuacaucgcgcuggacuccgggugcggcaagugggacugcaucaugaccagcuaccaguaccucaucauccagaacaccacgugggaggaccacugccaguucucccgccccagccccaucggguaccugggccugcucucccagcggacccgcgacaucuacaucagccggcgccgccggggcaccuucaccuggacgcucagcgacuccgaggggaaggacaccccgggcggguacugccugacccgguggaugcugaucgaggccgagcucaagugcuucggcaacaccgccguggccaagugcaacgagaagcacgacgaggaguucugcgacaugcugcgccuguucgacuucaacaagcaggccauccagcggcucaaggcgcccgcccagaugagcauccagcugaucaacaaggccgugaacgcccugaucaacgaccagcucaucaugaagaaccaccuccgcgacaucaugugcauccccuacugcaacuacuccaaguacugguaccugaaccacacgaccaccggcaagaccagccugcccaagugcuggcuggucuccaacggcagcuaccugaacgagacgcacuucuccgacgacaucgagcagcaggccgacaacaugaucaccgagaugcuccagaaggaguacauggagcggcaggggaagacgccccugggccugguggaccucuucguguucagcaccuccuucuaccugaucagcaucuuccugcaccuggucaagaucccgacccaccgccacaucguggggaaguccugccccaagccccaccggcucaaccacaugggcaucugcagcugcgggcuguacaagcagcccggcgugccgguccgcuggaagcggugaggacuaguaauaaggaaacuguaugaaugucugugggcaggaagugaagagauccuucuguaaagguuuuuggaauuaugucugcugaauaauaaacuuuuuugaaauaauaaaucugguagaaaaaugagaucucaaaggcucuuuucagagccaccaaaaaaaaaaaaaaaaaaaaaaaaaaaaaaaaaaaaaaaaaaaaaaaaaaaaaaaaaaaaaaaaaaaaaaaaaaaaaaaaaaaaaaaaaaaaaaaaaaaaa

SEQ ID NO: 16134 - RNA, 1812 nt, Artificial Sequence
  mRNA product Design b-4 (hSL-A100) comprising derived and/or modified sequence from LASV(Mad39;Clade IV)__ANH09722__GPCmut1 (opt1)
aggagagucccgcagucggcguccagcggcucugcuuguucgugugugugucguugcaggccuuauucaagcuuaccaugggccagaucgugaccuucuuccaggaggucccccacgugaucgaggaggugaugaacaucguccugaucgcccucagcauccuggccgugcugaaggggcucuacaacguggcgaccugcggccugaucgggcuggucacguuccuccugcugugcggccgcuccugcaccaccacccucuacaaggggguguacgagcugcaggcccuggagcucaacauggagacgcugaacaugaccaugccgcugagcugcaccaagaacaacucccaccacuacauccgggugggcaacgagaccggccucgagcugacgcugaccaacaccagccucaucaaccacaaguucugcaaccuguccgacgcccacaagaagaaccuguacgaccacgcccucaugagcaucaucuccaccuuccaccugagcauccccaacuucaaccaguacgaggccauguccugcgacuucaacgacgggaagaucagcguccaguacaaccugucccacacguacgcgggcgacaccgccaaccacugcgggaccguggccaacggcgugcuccagaccuucaugcgcauggccuggggcgggagcuacaucgcgcuggacuccggcugcgggggcugggacugcaucaugacgagcuaccaguaccugaucauccagaacaccaccugggaggaccacugccaguucucccggcccagccccaucggguaccucggccugcugucccagcggacccgcgacaucuacaucagccggcgccgccggggcacguucaccuggacccuguccgacagcgaggggaaggacaccccgggcggguacugccucacgcgguggaugcugaucgaggccgagcugaagugcuucggcaacaccgccgucgccaagugcaacgagaagcacgacgaggaguucugcgacaugcuccgccuguucgacuucaacaagcaggccauccagcggcugaaggcgcccgcccagaugagcauccagcucaucaacaaggccgugaacgcccugaucaacgaccagcugaucaugaagaaccaccuccgcgacaucaugugcauccccuacugcaacuacuccaaguacugguaccugaaccacaccgugaccggcaagacgagccugcccaagugcuggcucgucuccaacggcagcuaccugaacgagacccacuucuccgacgacaucgagcagcaggccgacaacaugaucaccgagaugcugcagaaggaguacauggagcggcaggggaagacgccccucggccugguggaccuguucguguucagcaccuccuucuaccugaucagcaucuuccuccaccuggucaagaucccgacccaccgccacgugguggggaagcccugccccaagccccaccggcugaaccacaugggcaucugcuccugcggguucuacaagcagccgggcguccccgugcgcuggaagcggugaggacuaguaauaaggaaacuguaugaaugucugugggcaggaagugaagagauccuucuguaaagguuuuuggaauuaugucugcugaauaauaaacuuuuuugaaauaauaaaucugguagaaaaaugagaucucaaaggcucuuuucagagccaccaaaaaaaaaaaaaaaaaaaaaaaaaaaaaaaaaaaaaaaaaaaaaaaaaaaaaaaaaaaaaaaaaaaaaaaaaaaaaaaaaaaaaaaaaaaaaaaaaaaaa

SEQ ID NO: 16135 - RNA, 1812 nt, Artificial Sequence
  mRNA product Design b-4 (hSL-A100) comprising derived and/or modified sequence from LASV(Z0947-SLE-2011;Clade IV)__AIT17840__GPCmut1 (opt1)
aggagagucccgcagucggcguccagcggcucugcuuguucgugugugugucguugcaggccuuauucaagcuuaccaugggccagaucgugaccuucuuccaggaggucccccacgugaucgaggaggugaugaacaucguccugaucgcccucagcauccuggccgugcugaaggggcucuacaacuucgcgaccugcggccugguggggcuggucacguuccuccugcugugcggccgcuccugcaccaucagccucuacaaggggguguacgagcugcagacccuggagcucaacauggagacccugaacaugacgaugccgcuguccugcaccaagaacaacagccaccacuacaucauggugggcaacgagaccggccucgagcugacccugacgaacaccuccaucaucaaccacaaguucugcaaccucagcgacgcccacaagaagaaccuguacgaccacgcccugauguccaucaucagcaccuuccaccucuccauccccaacuucaaccaguacgaggccaugagcugcgacuucaacgggggcaagaucuccguccaguacaaccugagccacuccuacgccggggacgcggccaaccacugcggcaccguggccaacggggugcugcagacguucaugcggauggccuggggcggcagcuacaucgcgcucgacuccgggugcgaccggugggacugcaucaugaccagcuaccaguaccugaucauccagaacaccaccugggaggaccacugccaguucucccgccccagccccaucggcuaccuggggcuccugucccagcggacgcgcgacaucuacaucagccggcgccgccggggcaccuucaccuggacccugagcgacuccgagggcaaggacacgcccgggggcuacugccugacccgguggaugcucaucgaggccgagcugaagugcuucgggaacaccgccgucgccaagugcaacgagaagcacgacgaggaguucugcgacaugcugcgccucuucgacuucaacaagcaggccauccagcggcugaaggcgcccgcccagaugagcauccagcugaucaacaaggccgugaacgcccucaucaacgaccagcugaucaugaagaaccaccuccgcgacaucaugugcauccccuacugcaacuacuccaaguacugguaccugaaccacaccacgaccgggaagaccagccugcccaagugcuggcugguguccaacggcagcuaccucaacgagacccacuucuccgacgacaucgagcagcaggccgacaacaugaucacggagaugcugcagaaggaguacauggagcggcagggcaagaccccgcuggggcucgucgaccuguucguguucagcaccuccuucuaccugaucagcaucuuccugcaccucgugaagaucccgacccaccgccacaucgucggcaagcccugccccaagccccaccggcugaaccacauggggaucugcuccugcggccuguacaagcagccgggggugcccgugaaguggaagcgcugaggacuaguaauaaggaaacuguaugaaugucugugggcaggaagugaagagauccuucuguaaagguuuuuggaauuaugucugcugaauaauaaacuuuuuugaaauaauaaaucugguagaaaaaugagaucucaaaggcucuuuucagagccaccaaaaaaaaaaaaaaaaaaaaaaaaaaaaaaaaaaaaaaaaaaaaaaaaaaaaaaaaaaaaaaaaaaaaaaaaaaaaaaaaaaaaaaaaaaaaaaaaaaaaa

SEQ ID NO: 16136 - RNA, 1812 nt, Artificial Sequence
  mRNA product Design b-4 (hSL-A100) comprising derived and/or modified sequence from LASV(Josiah;Clade IV)__NP_694870__GPCmut1 (opt1)
aggagagucccgcagucggcguccagcggcucugcuuguucgugugugugucguugcaggccuuauucaagcuuaccaugggccagaucgugaccuucuuccaggaggucccccacgugaucgaggaggugaugaacaucguccugaucgcccucagcgugcuggccgugcugaaggggcucuacaacuucgcgaccugcggccuggucgggcuggugacguuccuccugcugugcggccgcuccugcaccaccagccucuacaaggggguguacgagcugcagacccuggagcucaacauggagacgcugaacaugaccaugccgcuguccugcaccaagaacaacagccaccacuacaucauggucggcaacgagaccggccucgagcugacgcugaccaacaccuccaucaucaaccacaaguucugcaaccucagcgacgcccacaagaagaaccuguacgaccacgcccugauguccaucaucagcaccuuccaccucuccauccccaacuucaaccaguacgaggccaugagcugcgacuucaacgggggcaagaucuccgugcaguacaaccugagccacuccuacgccggggacgcggccaaccacugcggcacgguggccaacgggguccugcagaccuucaugcggauggccuggggcggcagcuacaucgcgcucgacuccgggugcggcaacugggacugcaucaugaccagcuaccaguaccugaucauccagaacaccacgugggaggaccacugccaguucucccgccccagccccaucggguaccugggccuccugucccagcggacccgcgacaucuacaucagccggcgccggcgcggcaccuucaccuggacgcugagcgacuccgaggggaaggacaccccgggcggguacugccucacccgguggaugcugaucgaggccgagcugaagugcuucggcaacaccgccguggccaagugcaacgagaagcacgacgaggaguucugcgacaugcuccgccuguucgacuucaacaagcaggccauccagcggcugaaggcgcccgcccagaugagcauccagcucaucaacaaggccgugaacgcccugaucaacgaccagcugaucaugaagaaccaccuccgcgacaucaugugcauccccuacugcaacuacuccaaguacugguaccugaaccacacgaccaccgggcggaccagccugcccaagugcuggcucgucuccaacggcagcuaccugaacgagacgcacuucuccgacgacaucgagcagcaggccgacaacaugaucaccgagaugcugcagaaggaguacauggagcgccagggcaagaccccgcucgggcugguggaccuguucguguucagcaccuccuucuaccucaucagcaucuuccugcaccuggucaagauccccacgcaccggcacaucgugggcaaguccugccccaagccccaccgccugaaccacauggggaucugcagcugcggccucuacaagcagccgggggugcccgucaaguggaagcggugaggacuaguaauaaggaaacuguaugaaugucugugggcaggaagugaagagauccuucuguaaagguuuuuggaauuaugucugcugaauaauaaacuuuuuugaaauaauaaaucugguagaaaaaugagaucucaaaggcucuuuucagagccaccaaaaaaaaaaaaaaaaaaaaaaaaaaaaaaaaaaaaaaaaaaaaaaaaaaaaaaaaaaaaaaaaaaaaaaaaaaaaaaaaaaaaaaaaaaaaaaaaaaaaa

SEQ ID NO: 16137 - RNA, 1809 nt, Artificial Sequence
  mRNA product Design b-4 (hSL-A100) comprising derived and/or modified sequence from LASV(LP;Clade I)__AAF86701__GPCmut1 (opt1)
aggagagucccgcagucggcguccagcggcucugcuuguucgugugugugucguugcaggccuuauucaagcuuaccaugggccagaucaucaccuucuuccaggaggugccccacgucaucgaggaggugaugaacaucgugcugaucgcccucagccugcuggccauccucaaggggcuguacaacaucgcgaccugcggcaucaucgggcuggucgccuuccucuuccugugcggcaaguccugcagccugacgcucaagggcggguacgagcugcagacccuggagcucaacauggagacccugaacaugaccaugccgcuguccugcacgaagaacagcucccaccacuacauccgcgugggcaacgagaccgggcucgagcugacccugaccaacacgagcaucaucaaccacaaguucugcaaccucuccgacgcccacaagaagaaccuguacgaccacgcccugaugagcaucaucuccaccuuccaccucagcauccccaacuucaaccaguacgaggccauguccugcgacuucaacggcgggaagaucagcgugcaguacaaccugucccacagcuacgcgggcgacgccgccgagcacugcgggaccgucgccaacggcgugcugcagaccuucaugcggauggcguggggcgggcgcuacaucgcccucgacuccggcugcgggaacugggacugcaucaugacgagcuaccaguaccugaucauccagaacaccaccugggaggaccacugccaguucucccggcccagccccaucggcuaccugggccuccugucccagcgcacccgggacaucuacaucagccgccggcgccgggggacguucaccuggacccugagcgacuccgagggcaacgagacccccgggggcuacugccucacgcgcuggaugcugaucgaggccgagcugaagugcuucgggaacaccgccguggccaagugcaacgagaagcacgacgaggaguucugcgacaugcuccggcuguucgacuucaacaagcaggcgauccgccggcugaaggccccggcccagaugagcauccagcucaucaacaaggccgucaacgcccugaucaacgaccagcugaucaugaagaaccaccuccgcgacaucaugugcauccccuacugcaacuacuccaaguacugguaccugaaccacaccagcuccggccggaccagccugcccaagugcuggcucaucuccaacggcagcuaccugaacgagacgcaguucuccgacgacaucgagcagcaggcggacaacaugaucaccgagaugcugcagaaggaguacaucgagcgccaggggaagaccccgcucggccugguggacaucuucaucuucagcaccuccuucuaccugaucagcaucuuccuccaccugaucaagauccccacgcaccggcacaucguggggaagcccugccccaagccgcaccgccugaaccacaugggcgucugcuccugcgggcuguacaagcaccccggcgugcccaccaaguggaagcggugaggacuaguaauaaggaaacuguaugaaugucugugggcaggaagugaagagauccuucuguaaagguuuuuggaauuaugucugcugaauaauaaacuuuuuugaaauaauaaaucugguagaaaaaugagaucucaaaggcucuuuucagagccaccaaaaaaaaaaaaaaaaaaaaaaaaaaaaaaaaaaaaaaaaaaaaaaaaaaaaaaaaaaaaaaaaaaaaaaaaaaaaaaaaaaaaaaaaaaaaaaaaaaaaa

SEQ ID NO: 16138 - RNA, 1809 nt, Artificial Sequence
  mRNA product Design b-4 (hSL-A100) comprising derived and/or modified sequence from LASV(803213;Clade II)__AAF86703__GPCmut1 (opt1)
aggagagucccgcagucggcguccagcggcucugcuuguucgugugugugucguugcaggccuuauucaagcuuaccaugggccagaucaucaccuucuuccaggaggugccccacgucaucgaggaggugaugaacaucgugcugaucgcccucagccugcuggccauccucaaggggaucuacaacgucgcgaccugcggccuguucgggcugaucuccuuccuccugcugugcggccgcagcugcuccgugacguacaaggggguguacgagcuccagacccuggagcugaacauggccaaccucaacaugaccaugccgcugagcugcaccaagaacaacucccaccacuacaucauggucggcaacgagacgggccuggagcucacccugaccaacaccagcaucaucaaccacaaguucugcaaccuguccgacgcccacaagaagaaccucuacgaccacgcccugaugagcaucaucuccacguuccaccugagcauccccaacuucaaccaguacgaggccauguccugcgacuucaacgggggcaagaucagcgugcaguacaaccucucccacagcuucgcgguggacgccgccaaccacugcgggaccaucgccaacggcguccugcagaccuucaugcggauggcguggggcggguccuacaucgcccuggacagcggcugcgggaacugggacugcaucaugaccuccuaccaguaccucaucauccagaacacgaccugggaggaccacugccaguucagccgccccucccccaucggcuaccuggggcugcucagccagcggacccgcgacaucuacaucagccggcgccggcgcggcaccuucacguggacccuguccgacagcgagggcaacgaggcccccgggggcuacugccugacccgguggaugcucaucgaggccgagcugaagugcuucgggaacaccgccguggcgaagugcaacgagaagcacgacgaggaguucugcgacaugcugcgccucuucgacuucaacaagcaggccaucaagcggcugaagacgccggcccagauguccauccagcugaucaacaaggccgugaacgcccucaucaacgaccagcugaucaugaagaaccaccuccgcgacaucaugugcauccccuacugcaacuacagccgguacugguaccugaaccacaccgucaccggcaagaccucccugccccgcugcuggcuggugagcaacggguccuaccucaacgagacgcacuucagcgacgacaucgagcagcaggcggacaacaugaucaccgagaugcugcagaaggaguacauggaccggcagggcaagaccccgcugggccucguggaccuguucgucuucuccaccagcuucuaccugaucuccaucuuccuccaccuggugaagauccccacgcaccgccacaucguggggaagcccugccccaagccgcaccggcugaaccacaugggcaucugcagcugcgggcuguacaagcaccccggcguccccgugaaguggaagcgcugaggacuaguaauaaggaaacuguaugaaugucugugggcaggaagugaagagauccuucuguaaagguuuuuggaauuaugucugcugaauaauaaacuuuuuugaaauaauaaaucugguagaaaaaugagaucucaaaggcucuuuucagagccaccaaaaaaaaaaaaaaaaaaaaaaaaaaaaaaaaaaaaaaaaaaaaaaaaaaaaaaaaaaaaaaaaaaaaaaaaaaaaaaaaaaaaaaaaaaaaaaaaaaaaa

SEQ ID NO: 16139 - RNA, 1809 nt, Artificial Sequence
  mRNA product Design b-4 (hSL-A100) comprising derived and/or modified sequence from LASV(GA391;Clade III)__CAA36645__GPCmut1 (opt1)
aggagagucccgcagucggcguccagcggcucugcuuguucgugugugugucguugcaggccuuauucaagcuuaccaugggccagaucgugaccuucuuccaggaggucccccacgugaucgaggaggugaugaacaucguccugaucgcccucagcauccuggccauccugaaggggcucuacaacguggcgaccugcggccugaucgggcuggugacguuccuccugcuguccggccgcagcugcucccucaucuacaaggggaccuacgagcugcagacccuggagcucaacauggagacccugaacaugacgaugccgcugagcugcaccaagaacaacucccaccacuacauccgggucggcaacgagaccggccucgagcugacccugacgaacaccagcauccucaaccacaaguucugcaaccuguccgacgcccacaagcgcaaccuguacgaccacagccucauguccaucaucagcaccuuccaccuguccauccccaacuucaaccaguacgaggccaugagcugcgacuucaacgggggcaagaucaccgugcaguacaaccugucccacagcuucgccguggacgccgcggggcacugcggcacgcucgccaacgggguccugcagaccuucaugcggauggccuggggcggcuccuacaucgcccuggacagcgggugcggcaacugggacugcaucaugaccuccuaccaguaccucaucauccagaacaccacgugggacgaccacugccaguucagccgccccucccccaucggguaccugggccugcucagccagcggacccgcgacaucuacaucagccggcgccggcgcggcaccuucaccuggacgcuguccgacagcgaggggaacgagaccccgggcggguacugccugacccgguggaugcucaucgaggcggagcugaagugcuucggcaacaccgccguggccaagugcaacgagaagcacgacgaggaguucugcgacaugcugcgccucuucgacuucaacaagcaggccauccggcgccugaagacgcccgcccagauguccauccagcugaucaacaaggcggugaacgcccucaucaacgaccagcugaucaugaagaaccaccuccgggacaucaugugcauccccuacugcaacuacagccgcuacugguaccugaaccacaccuccaccgggaagaccagccugccccggugcuggcugaucuccaacggcagcuaccucaacgagacgaaguucuccgacgacaucgagcagcaggccgacaacaugaucaccgagaugcugcagaaggaguacaucgaccgccagggcaagaccccgcuggggcucgucgaccuguucguguucagcaccuccuucuaccugaucagcaucuuccugcaccucgugaagauccccacgcaccggcacaucgucggcaagcccugccccaagccgcaccgccugaaccacauggggaucugcuccugcggccuguacaagcagcccggggugcccgugcgguggaagcgcugaggacuaguaauaaggaaacuguaugaaugucugugggcaggaagugaagagauccuucuguaaagguuuuuggaauuaugucugcugaauaauaaacuuuuuugaaauaauaaaucugguagaaaaaugagaucucaaaggcucuuuucagagccaccaaaaaaaaaaaaaaaaaaaaaaaaaaaaaaaaaaaaaaaaaaaaaaaaaaaaaaaaaaaaaaaaaaaaaaaaaaaaaaaaaaaaaaaaaaaaaaaaaaaaa

SEQ ID NO: 16140 - RNA, 1812 nt, Artificial Sequence
  mRNA product Design b-4 (hSL-A100) comprising derived and/or modified sequence from LASV(AV;Clade V)__CCA30314__GPCmut1 (opt1)
aggagagucccgcagucggcguccagcggcucugcuuguucgugugugugucguugcaggccuuauucaagcuuaccaugggccagaucgugaccuucuuccaggaggucccccacgugaucgaggaggugaugaacaucguccugaucgcccucagcauccuggccgugcugaaggggcucuacaacaucgcgaccugcggccugaucgggcugaucacguuccuccugcugugcggccgcuccugcagcuccaaccucuacaaggggguguacgagcugcagagccuggaccucaacauggagacccugaacaugaccaugccgcuguccugcaccaagaacaacagccaccacuacauccgggucggcaacgacacgggccucgagcugacccugaccaacaccuccauccucaaccacaaguucugcaaccugagcgacgcccacaagaaggaccuguacgaccacgcccucauguccaucaucagcacguuccaccuguccauccccaacuucaaccaguacgaggccaugagcugcgacuucaacgggggcaagaucuccgugcaguacaaccugagccacuccuacgccaucgacgcggccaaccacugcgggaccguggccaacggcauccuccagaccuucaugcgcauggccuggggcgggagcuacaucgcgcuggacuccggcugcgggaacugggacugcaucaugaccagcuaccaguaccugaucauccagaacacgaccugggagaaccacugccaguucucccggcccagccccaucggcuaccucgggcugcugagccagcgcacccgggacaucuacaucucccgccggcgccggggcaccuucacguggacccucagcgacuccgagggcaacgccacccccgggggcuacugccugacccgcuggaugcugaucgaggccgagcucaagugcuucgggaacacggccgucgccaagugcaacgagaagcacgacgaggaguucugcgacaugcugcggcuguucgacuucaacaagcaggcgaucagccgccucaaguccccggcccagaugagcauccagcugaucaacaaggccgugaacgcccugaucaacgaccagcucaucaugaagaaccaccuccgggacaucaugugcauccccuacugcaacuacuccaaguacugguaccugaaccacaccaucaccggcaagaccagccugcccaagugcuggcugguguccaacgggagcuaccugaacgagacgcacuucuccgacgacaucgagcagcaggccgacaacaugaucaccgagaugcuccagaaggaguacauggagcgccagggcaagaccccgcugggccuggucgaccucuucguguucagcaccuccuucuaccugaucagcaucuuccugcggcuggugaagauccccacgcaccgccacaucgucgggaagcccugccccaagccgcaccggcucaaccacaugggcaucugcuccugcgggcuguacaagcagcccggcgugcccgugcgcuggaagcggugaggacuaguaauaaggaaacuguaugaaugucugugggcaggaagugaagagauccuucuguaaagguuuuuggaauuaugucugcugaauaauaaacuuuuuugaaauaauaaaucugguagaaaaaugagaucucaaaggcucuuuucagagccaccaaaaaaaaaaaaaaaaaaaaaaaaaaaaaaaaaaaaaaaaaaaaaaaaaaaaaaaaaaaaaaaaaaaaaaaaaaaaaaaaaaaaaaaaaaaaaaaaaaaaa

SEQ ID NO: 16141 - RNA, 1809 nt, Artificial Sequence
  mRNA product Design b-4 (hSL-A100) comprising derived and/or modified sequence from LASV(Togo/2016/7082;Clade VI)__AMR44577__GPCmut1 (opt1)
aggagagucccgcagucggcguccagcggcucugcuuguucgugugugugucguugcaggccuuauucaagcuuaccaugggccagaucaucaccuucuuccaggaggugccccacgucaucgaggaggugaugaacaucgugcugaucgcccucagccugcuggccauccucaagggggucuacaacguggcgaccugcggcaucaucgggcuggugacguuccuguuccucugcggccgcuccugcagccugaucuacaagggguccuacgagcugcagacccucgagcugaacauggagacccugaacaugaccaugccgcucagcugcacgaagaacuccagccaccacuacauccgggucggcaacgagaccggccuggagcugacccucaccaacacguccaucaucaaccacaaguucugcaaccugagcgacgcccacaagcgcaaccuguacgaccacgcccucauguccauccugagcaccuuccaccuguccauccccaacuucaaccaguacgaggccaugagcugcgacuucaacgggggcaagaucuccgugcaguacaaccucagccacgccuacgcgguggacgccgccgagcacugcgggaccgucgccaacggcgugcugcagaccuucaugcggauggcguggggcggguccuacaucgcccuggacagcggcugcgggaacugggacugcaucaugacguccuaccaguaccucaucauccagaacaccaccugggaggaccacugccaguucagccgccccucccccaucggcuaccuggggcugcucagccagcggacccgcgacaucuacaucagccggcgccggcgcggcacguucaccuggacccuguccgacagcgagggcaacgagacccccgggggcuacugccugacgcgguggaugcucaucgaggccgagcugaagugcuucgggaacaccgccguggccaagugcaacgagaagcacgacgaggaguucugcgacaugcugcgccucuucgacuucaacaagcaggcgauccagcggcugaaguccccggcccagaugagcauccagcugaucaacaaggccgucaacgcccucaucaacgaccagcugaucaugaagaaccaccuccgcgacaugaugugcauccccuacugcaacuacuccaaguacugguaccugaaccacaccagcuccggccggaccagccugcccaagugcuggcugguguccaacgggagcuaccucaacgagacgcacuucuccgacgacaucgagcagcaggccgacaacaugaucaccgagaugcugcagaaggaguacaucgaccgccagggcaagaccccgcugggccucguggaccuguucgucuucagcaccuccuucuaccugaucagcaucuuccuccaccugaucaagauccccacgcaccggcacaucguggggaagcccugccccaagccgcaccgccugaaccacaugggcaucugcuccugcgggcuguacaagcagcccggcgugcccacccgguggaagcgcugaggacuaguaauaaggaaacuguaugaaugucugugggcaggaagugaagagauccuucuguaaagguuuuuggaauuaugucugcugaauaauaaacuuuuuugaaauaauaaaucugguagaaaaaugagaucucaaaggcucuuuucagagccaccaaaaaaaaaaaaaaaaaaaaaaaaaaaaaaaaaaaaaaaaaaaaaaaaaaaaaaaaaaaaaaaaaaaaaaaaaaaaaaaaaaaaaaaaaaaaaaaaaaaaa

SEQ ID NO: 16142 - RNA, 1809 nt, Artificial Sequence
  mRNA product Design b-4 (hSL-A100) comprising derived and/or modified sequence from LASV(KAK-428;Clade n.d. (VII))__ANH09740__GPCmut1 (opt1)
aggagagucccgcagucggcguccagcggcucugcuuguucgugugugugucguugcaggccuuauucaagcuuaccaugggccagaucgugaccuucuuccaggaggucccccacgugaucgaggaggugaugaacaucguccugaucgcccucagccugcuggccauccucaaggggcuguacaacuucgcgaccugcggcgugaucgggcugaucacguuccuccugcugugcggccgcuccugcagcgccaccuacaaggggcaguacgagcuccagacccuggagcugaacauggagucccucaacaugaccaugccgcugagcugcacgaagaacaacucccaccacuacauccgggccggcaacaacaccggccuggagcucacccugaccaacacgagcaucaucucccacaaguucugcaaccugagcgacgcccacaagaagaaccucuacgaccacacccugauguccaucaucaccaccuuccaccugagcauccccaacuucaaccaguacgaggccauguccugcgacuucaacgggggcaagaucagcauccaguacaaccucucccacagcuacgcgggggacgccgcccagcacugcggcacgguggccaacgggguccugcagaccuucaugcgcauggcguggggcggcuccuaccuggcccucgacagcgggugccggggcugggacugcaucaucuccagcuaccaguaccugaucauccagaacaccaccugggacgaccacugccaguucucccgccccagccccaucggguaccugggcuucgugagccagaagacgcgggacaucuacaucucccgccggcgccggggcaccuucaccuggacccucagcgacuccgaggggcacgacaugccgggcggguacugccugacgcgcuggaugcugaucgaggccgaccucaagugcuucggcaacaccgccguggccaagugcaacgagaagcacgacgaggaguucugcgacauguggcggcuguucgacuucaacaagcaggcgauccagcgccugaaggcccccgcccagaugaacauccagcucaucaacaaggccgucaacgcccugaucaacgaccagcugaugaugaagaaccaccuccgggacaucaugugcauccccuacugcaacuacagcaaguucugguaccugaacaacaccaccacggggcgcaccucccugccccggugcuggcucaucagcaacggcuccuaccugaacgagacccacuucagcgacgacaucgagcagcaggcggacaacaugaucaccgagaugcugcagaaggaguacauggaccgccagggcaagacgccgcucgggcugguggaccuguucguguucuccaccagcuucuaccucaucaccaucuuccugcaccuggucaagauccccacccaccggcacaucgugggcaagcccugccccaagccgcaccgccucaaccacauggggaucugcuccugcggccuguacaagcagcccggggugcccguccgguggaagcgcugaggacuaguaauaaggaaacuguaugaaugucugugggcaggaagugaagagauccuucuguaaagguuuuuggaauuaugucugcugaauaauaaacuuuuuugaaauaauaaaucugguagaaaaaugagaucucaaaggcucuuuucagagccaccaaaaaaaaaaaaaaaaaaaaaaaaaaaaaaaaaaaaaaaaaaaaaaaaaaaaaaaaaaaaaaaaaaaaaaaaaaaaaaaaaaaaaaaaaaaaaaaaaaaaa

SEQ ID NO: 16143 - RNA, 1809 nt, Artificial Sequence; identical to SEQ ID NO: 16137
  mRNA product Design b-4 (hSL-A100) comprising derived and/or modified sequence from LASV(Pinneo-NIG-1969;Clade I)__AIT17836__GPCmut1 (opt1)

SEQ ID NO: 16144 - RNA, 1809 nt, Artificial Sequence
  mRNA product Design b-4 (hSL-A100) comprising derived and/or modified sequence from LASV(ISTH0009-NIG-2011;Clade II)__AIT17404__GPCmut1 (opt1)
aggagagucccgcagucggcguccagcggcucugcuuguucgugugugugucguugcaggccuuauucaagcuuaccaugggccagaucaucaccuucuuccaggaggugccccacgucaucgaggaggugaugaacaucgugcugaucgcccucagccugcuggccauccucaaggggaucuacaacgucgcgaccugcggccuguucgggcugguguccuuccuccugcugugcggccgcagcugcuccacgaccuacaaggggguguacgagcuccagacccuggagcuggacauggccagccucaacaugaccaugccgcuguccugcacgaagaacaacagccaccacuacaucauggucggcaacgagaccggccuggagcucacccugaccaacacguccaucaucaaccacaaguucugcaaccugagcgacgcccacaagaagaaccucuacgaccacgcccugauguccaucaucagcaccuuccaccuguccauccccaacuucaaccaguacgaggccaugagcugcgacuucaacgggggcaagaucuccgugcaguacaaccucagccacgcguacgccguggacgccgccaaccacugcgggaccaucgcgaacggcguccugcagaccuucaugcggauggccuggggcggguccuacaucgcccuggacagcggcugcggguccugggacugcaucaugacgagcuaccaguaccucaucauccagaacaccaccugggaggaccacugccaguucucccgccccagccccaucggcuaccuggggcugcucagccagcggacccgcgacaucuacaucucccggcgccggcgcggcacguucaccuggacccugagcgacuccgagggcaacgagacccccgggggcuacugccugacgcgguggaugcucaucgaggccgagcugaagugcuucgggaacaccgccguggcgaagugcaacgagaagcacgacgaggaguucugcgacaugcugcgccucuucgacuucaacaagcaggccauccggcgccugaagaccccggcccagaugagcauccagcugaucaacaaggccgugaacgcccucaucaacgaccagcugaucaugaagaaccaccuccgggacaucaugugcauccccuacugcaacuacuccaaguacugguaccugaaccacaccgucacgggcaagaccagccugccccgcugcuggcugguguccaacgggagcuaccucaacgagacccacuucuccgacgacaucgagcagcaggcggacaacaugaucaccgagcugcugcagaaggaguacauggaccggcagggcaagacgccgcucggccugguggaccuguucgucuucagcaccuccuucuaccucaucagcaucuuccugcaccugaucaagauccccacccaccgccacaucaccgggaagcccugccccaagccgcaccggcugaaccacaugggcaucugcuccugcgggcucuacaagcaccccggcgugcccgugaaguggaagcgcugaggacuaguaauaaggaaacuguaugaaugucugugggcaggaagugaagagauccuucuguaaagguuuuuggaauuaugucugcugaauaauaaacuuuuuugaaauaauaaaucugguagaaaaaugagaucucaaaggcucuuuucagagccaccaaaaaaaaaaaaaaaaaaaaaaaaaaaaaaaaaaaaaaaaaaaaaaaaaaaaaaaaaaaaaaaaaaaaaaaaaaaaaaaaaaaaaaaaaaaaaaaaaaaaa

SEQ ID NO: 16145 - RNA, 1809 nt, Artificial Sequence
  mRNA product Design b-4 (hSL-A100) comprising derived and/or modified sequence from LASV(ISTH2010-NIG-2012;Clade II)__AIT17482__GPCmut1 (opt1)
aggagagucccgcagucggcguccagcggcucugcuuguucgugugugugucguugcaggccuuauucaagcuuaccaugggccagaucaucaccuucuuccaggaggugccccacgucaucgaggaggugaugaacaucgugcugaucgcccucagccugcuggccauccucaaggggaucuacaacgucgcgaccugcggccuguucgggcugguguccuuccuccugcugugcggccgcagcugcuccacgaccuacaaggggguguacgagcuccagacccuggagcuggacauggccagccucaacaugaccaugccgcuguccugcacgaagaacaacagccaccacuacaucauggucggcaacgagaccggccuggagcucacccugaccaacacguccaucaucaaccacaaguucugcaaccugagcgacgcccacaagaagaaccucuacgaccacgcccugauguccaucaucagcaccuuccaccuguccauccccaacuucaaccaguacgaggccaugagcugcgacuucaacgggggcaagaucuccgugcaguacaaccucagccacgcguacgccguggacgccgccaaccacugcgggaccaucgcgaacggcguccugcagaccuucaugcggauggccuggggcggguccuacaucgcccuggacagcggcugcggguccugggacugcaucaugacgagcuaccaguaccucaucauccagaacaucaccugggaggaccacugccaguucucccgccccagccccaucggcuaccuggggcugcucagccagcggacccgcgacaucuacaucucccggcgccggcgcggcaccuucacguggacccugagcgacuccgagggcaacgagacccccgggggcuacugccugacccgguggaugcucaucgaggccgagcugaagugcuucgggaacacggccguggcgaagugcaacgagaagcacgacgaggaguucugcgacaugcugcgccucuucgacuucaacaagcaggccauccggcgccugaagaccccggcccagaugagcauccagcugaucaacaaggccgugaacgcccucaucaacgaccagcugaucaugaagaaccaccuccgggacaucaugugcauccccuacugcaacuacuccaaguacugguaccugaaccacaccgucaccggcaagacgagccugccccgcugcuggcugguguccaacgggagcuaccucaacgagacccacuucuccgacgacaucgagcagcaggcggacaacaugaucaccgagcugcugcagaaggaguacaucgaccggcagggcaagaccccgcucggccugguggaccuguucgucuucagcacguccuucuaccucaucagcaucuuccugcaccuggugaagauccccacccaccgccacguggucgggaagcccugccccaagccgcaccggcugaaccacaugggcaucugcuccugcgggcucuacaagcaccccggcgugcccgugaaguggaagcgcugaggacuaguaauaaggaaacuguaugaaugucugugggcaggaagugaagagauccuucuguaaagguuuuuggaauuaugucugcugaauaauaaacuuuuuugaaauaauaaaucugguagaaaaaugagaucucaaaggcucuuuucagagccaccaaaaaaaaaaaaaaaaaaaaaaaaaaaaaaaaaaaaaaaaaaaaaaaaaaaaaaaaaaaaaaaaaaaaaaaaaaaaaaaaaaaaaaaaaaaaaaaaaaaaa

SEQ ID NO: 16146 - RNA, 1809 nt, Artificial Sequence
  mRNA product Design b-4 (hSL-A100) comprising derived and/or modified sequence from LASV(Lassa virus/H.sapiens-wt/NGA/2015/ISTH_0543;Clade II)__AVO03639__GPCmut1 (opt1)
aggagagucccgcagucggcguccagcggcucugcuuguucgugugugugucguugcaggccuuauucaagcuuaccaugggccagaucaucaccuucuuccaggaggugccccacgucaucgaggaggugaugaacaucgugcugaucgcccucagccugcuggccauccucaaggggaucuacaacgucgcgaccugcggccuguucgggcugguguccuuccuccugcugugcggccgcagcugcuccacgaccuacaaggggguguacgagcuccagacccuggagcuggacauggccaaccucaacaugaccaugccgcugagcugcacgaagaacaacucccaccacuacaucauggucggcaacgagaccggccuggagcucacccugaccaacacgagcaucaucaaccacaaguucugcaaccuguccgacgcccacaagaagaaccucuacgaccacgcccugaugagcaucaucuccaccuuccaccugagcauccccaacuucaaccaguacgaggccauguccugcgacuucaacgggggcaagaucagcgugcaguacaaccucucccacaccuacgcgguggacgccgccaaccacugcgggaccaucgccaacggcguccugcagacguucaugcggauggcguggggcgggagcuacaucgcccuggacuccggcugcgggagcugggacugcaucaugaccuccuaccaguaccucgugauccagaacaccaccugggaggaccacugccaguucagccgccccucccccaucggcuaccuggggcugcucagccagcggacgcgcgacaucuacaucagccggcgccggcgcggcaccuucaccuggacccuguccgacagcgagggcaacgagacgcccgggggcuacugccugacccgguggaugcucaucgaggccgagcugaagugcuucgggaacaccgccguggccaagugcaacgagaagcacgacgaggaguucugcgacaugcugcgccucuucgacuucaacaagcaggcgauccggcgccugaagaccccggcccagauguccauccagcugaucaacaaggccgucaacgcccucaucaacgaccagcugaucaugaagaaccaccuccgggacaucaugugcauccccuacugcaacuacagcaaguacugguaccugaaccacacggugaccggcaagaccucccugccccgcugcuggcuggugagcaacggguccuaccucaacgagacccacuucagcgacgacaucgagcagcaggccgacaacaugaucacggagcugcugcagaaggaguacaucgaccggcagggcaagaccccgcucggccuggucgaccuguucguguucuccaccagcuucuaccucaucuccaucuuccugcaccuggugaagauccccacccaccgccacaucacggggaagcccugccccaagccgcaccggcugaaccacaugggcaucugcagcugcgggcucuacaagcaccccggcguccccgugaaguggaagcgcugaggacuaguaauaaggaaacuguaugaaugucugugggcaggaagugaagagauccuucuguaaagguuuuuggaauuaugucugcugaauaauaaacuuuuuugaaauaauaaaucugguagaaaaaugagaucucaaaggcucuuuucagagccaccaaaaaaaaaaaaaaaaaaaaaaaaaaaaaaaaaaaaaaaaaaaaaaaaaaaaaaaaaaaaaaaaaaaaaaaaaaaaaaaaaaaaaaaaaaaaaaaaaaaaa

SEQ ID NO: 16147 - RNA, 1809 nt, Artificial Sequence
  mRNA product Design b-4 (hSL-A100) comprising derived and/or modified sequence from LASV(Lassa virus/H.sapiens-wt/NGA/2016/ISTH_0009;Clade II)__AVO03571__GPCmut1 (opt1)
aggagagucccgcagucggcguccagcggcucugcuuguucgugugugugucguugcaggccuuauucaagcuuaccaugggccagaucaucaccuucuuccaggaggugccccacgucaucgaggaggugaugaacaucgugcugaucgcccucagccugcuggccauccucaaggggaucuacaacgucgcgaccugcggccugcuggggcucguguccuuccugcugcucugcggccgcagcugcuccacgaccuacaaggggguguacgagcugcagacccuggagcucgacauggccagccugaacaugaccaugccgcuguccugcacgaagaacaacagccaccacuacaucauggucggcaacgagaccggccucgagcugacccugaccaacacguccaucaucaaccacaaguucugcaaccucagcgacgcccacaagaagaaccuguacgaccacgcccugauguccaucaucagcaccuuccaccucuccauccccaacuucaaccaguacgaggccaugagcugcgacuucaacgggggccggaucuccgugcaguacaaccugagccacuccuacgcgguggacgccgccaaccacugcgggaccaucgccaacggcguccugcagaccuucaugcgcauggcguggggcgggagcuacaucgcccucgacuccggcugcgggagcugggacugcaucaugacguccuaccaguaccugaucauccagaacaccaccugggaggaccacugccaguucagccggcccagccccaucggcuaccuggggcuccugucccagcgcacccgggacaucuacaucagccgccggcgccggggcacguucaccuggacccuguccgacagcgagggcaacgagacccccgggggcuacugccucacgcgcuggaugcugaucgaggccgagcugaagugcuucgggaacaccgccguggccaagugcaacgagaagcacgacgaggaguucugcgacaugcuccggcuguucgacuucaacaagcaggcgauccgccggcugaagaccccggcccagauguccauccagcucaucaacaaggccgugaacgcccugaucaacgaccagcugaucaugaagaaccaccuccgcgacaucaugugcauccccuacugcaacuacagcaaguacugguaccugaaccacaccgucacgggcaagaccucccugccccggugcuggcucgugagcaacggguccuaccugaacgagacccacuucagcgacgacaucgagcagcaggccgacaacaugaucaccgagcugcuccagaaggaguacaucgaccgccagggcaagacgccgcugggccugguggaccucuucgucuucuccaccagcuucuaccugaucuccaucuuccugcaccuggugaagauccccacccaccggcacaucaccgggaagcccugccccaagccgcaccgccucaaccacaugggcaucugcagcugcgggcuguacaaccaccccggcgugcccgucaaguggaagcggugaggacuaguaauaaggaaacuguaugaaugucugugggcaggaagugaagagauccuucuguaaagguuuuuggaauuaugucugcugaauaauaaacuuuuuugaaauaauaaaucugguagaaaaaugagaucucaaaggcucuuuucagagccaccaaaaaaaaaaaaaaaaaaaaaaaaaaaaaaaaaaaaaaaaaaaaaaaaaaaaaaaaaaaaaaaaaaaaaaaaaaaaaaaaaaaaaaaaaaaaaaaaaaaaa

SEQ ID NO: 16148 - RNA, 1809 nt, Artificial Sequence
  mRNA product Design b-4 (hSL-A100) comprising derived and/or modified sequence from LASV(Lassa virus/H.sapiens-wt/NGA/2016/ISTH_0017;Clade II)__AVO03567__GPCmut1 (opt1)
aggagagucccgcagucggcguccagcggcucugcuuguucgugugugugucguugcaggccuuauucaagcuuaccaugggccagaucaucaccuucuuccaggaggugccccacgucaucgaggaggugaugaacaucgugcugaucgcccucagccugcuggccauccucaaggggaucuacaacgucgcgaccugcggccuguucgggcugguguccuuccuccugcugugcggccgcagcugcuccacgaccuacaaggggguguacgagcuccagacccuggagcuggacauggccagccucaacaugaccaugccgcuguccugcacgaagaacaacagccaccacuacaucauggucggcaacgagaccggccuggagcucacccugaccaacacguccaucaucaaccacaaguucugcaaccugagcgacgcccacaagaagaaccucuacgaccacgcccugauguccaucaucagcaccuuccaccuguccauccccaacuucaaccaguacgaggccaugagcugcgacuucaacgggggcaagaucuccgugcaguacaaccucagccacaccuacgcgaucgacgccgccaaccacugcgggaccaucgccaacggcgugcugcagacguucaugcggauggcguggggcggguccuacaucgcccuggacagcggcugcggguccugggacugcaucaugaccagcuaccaguaccucaucauccagaacaccaccugggaggaccacugccaguucucccgccccagccccaucggcuaccuggggcugcucagccagcggacgcgcgacaucuacaucucccggcgccggcgcggcaccuucaccuggacccugagcgacuccgagggcaacgagacgcccgggggcuacugccugacccgguggaugcucaucgaggccgagcugaagugcuucgggaacaccgccgucgccaagugcaacgagaagcacgacgaggaguucugcgacaugcugcgccucuucgacuucaacaagcaggcgauccggcgccugaagaccccggcccagaugagcauccagcugaucaacaaggccgugaacgcccucaucaacgaccagcugaucaugaagaaccaccuccgggacaucaugugcauccccuacugcaacuacuccaaguacugguaccugaaccacacggugaccggcaagaccagccugccccgcugcuggcuggucuccaacgggagcuaccucaacgagacccacuucuccgacgacaucgagcagcaggccgacaacaugaucacggagcugcugcagaaggaguacauggaccggcagggcaagaccccgcucggccugguggaccuguucguguucagcaccuccuucuaccucaucagcaucuuccugcaccugguccgcauccccacccaccggcacgugaucgggaagcccugccccaagccgcaccgccugaaccacaugggcaucugcuccugcgggcucuacaagcaccccggcgugcccgucaaguggaagcggugaggacuaguaauaaggaaacuguaugaaugucugugggcaggaagugaagagauccuucuguaaagguuuuuggaauuaugucugcugaauaauaaacuuuuuugaaauaauaaaucugguagaaaaaugagaucucaaaggcucuuuucagagccaccaaaaaaaaaaaaaaaaaaaaaaaaaaaaaaaaaaaaaaaaaaaaaaaaaaaaaaaaaaaaaaaaaaaaaaaaaaaaaaaaaaaaaaaaaaaaaaaaaaaaa

SEQ ID NO: 16149 - RNA, 1809 nt, Artificial Sequence
  mRNA product Design b-4 (hSL-A100) comprising derived and/or modified sequence from LASV(Lassa virus/H.sapiens-wt/NGA/2018/ISTH_0959;Clade II)__AVV65099__GPCmut1 (opt1)
aggagagucccgcagucggcguccagcggcucugcuuguucgugugugugucguugcaggccuuauucaagcuuaccaugggccagaucaucaccuucuuccaggaggugccccacgucaucgaggaggugaugaacaucgugcugaucgcccucagccugcuggccauccucaaggggaucuacaacgucgugaccugcggccuguucgggcugguguccuuccuccugcugugcggccgcagcugcuccacgaccuacaagggggucuacgagcuccagacccuggagcuggacauggcgagccucaacaugaccaugccgcuguccugcacgaagaacaacagccaccacuacaucauggugggcaacgagaccggccuggagcucacccugaccaacacguccaucaucaaccacaaguucugcaaccugagcgacgcccacaagaagaaccucuacgaccacgcccugauguccaucaucagcaccuuccaccuguccauccccaacuucaaccaguacgaggccaugagcugcgacuucaacgggggcaagaucuccgugcaguacaaccucagccacgccuacgcgaucgacgccgccaaccacugcgggaccaucgccaacggcguccugcagaccuucaugcggauggcguggggcggguccuacaucgcccuggacagcggcugcggguccugggacugcaucaugacgagcuaccaguaccucaucauccagaacaccaccugggaggaccacugccaguucucccgccccagccccaucggcuaccuggggcugcucagccagcggacccgcgacaucuacaucucccggcgccggcgcggcacguucaccuggacccugagcgacuccgagggcaacgagacccccgggggcuacugccugacgcgguggaugcucaucgaggccgagcugaagugcuucgggaacaccgccguggccaagugcaacgagaagcacgacgaggaguucugcgacaugcugcgccucuucgacuucaacaagcaggcgauccggcgccugaagaccccggcccagaugagcauccagcugaucaacaaggccgugaacgcccucaucaacgaccagcugaucaugaagaaccaccuccgggacaucaugugcauccccuacugcaacuacuccaaguacugguaccugaaccacaccgucacgggcaagaccagccugccccgcugcuggcugguguccaacgggagcuaccucaacgagacccacuucuccgacgacaucgagcagcaggccgacaacaugaucaccgagcugcugcagaaggaguacaucgaccggcagggcaagacgccgcucggccugguggaccuguucgucuucagcaccuccuucuaccucaucagcaucuuccugcaccuggugaagauccccacccaccgccacgugaucgggaagcccugccccaagccgcaccggcugaaccacaugggcaucugcuccugcgggcucuacaagcaccccggcguccccgugaaguggaagcgcugaggacuaguaauaaggaaacuguaugaaugucugugggcaggaagugaagagauccuucuguaaagguuuuuggaauuaugucugcugaauaauaaacuuuuuugaaauaauaaaucugguagaaaaaugagaucucaaaggcucuuuucagagccaccaaaaaaaaaaaaaaaaaaaaaaaaaaaaaaaaaaaaaaaaaaaaaaaaaaaaaaaaaaaaaaaaaaaaaaaaaaaaaaaaaaaaaaaaaaaaaaaaaaaaa

SEQ ID NO: 16150 - RNA, 1809 nt, Artificial Sequence
  mRNA product Design b-4 (hSL-A100) comprising derived and/or modified sequence from LASV(LASV003-NIG-2008;Clade II)__AIT17580__GPCmut1 (opt1)
aggagagucccgcagucggcguccagcggcucugcuuguucgugugugugucguugcaggccuuauucaagcuuaccaugggccagaucaucaccuucuuccaggaggugccccacgucaucgaggaggugaugaacaucgugcugaucgcccucagccugcuggccauccucaaggggaucuacaacgucgcgaccugcggccuguucgggcugguguccuuccuccugcugugcggccgcagcugcuccacgaccuacaaggggguguacgagcuccagacccuggagcuggacauggccagccucaacaugaccaugccgcuguccugcacgaagaacaacagccaccacuacaucauggucggcaacgagaccggccuggagcucacccugaccaacacguccaucaucaaccacaaguucugcaaccugagcgacgcccacaagaagaaccucuacgaccacgcccugauguccaucaucagcaccuuccaccuguccauccccaacuucaaccaguacgaggccaugagcugcgacuucaacgggggcaagaucuccgugcaguacaaccucagccacaccuacgcgguggacgccgccaaccacugcgggaccaucgccaacggcguccugcagacguucaugcggauggcguggggcggguccuacaucgcccuggacagcggcugcggguccugggacugcaucaugaccagcuaccaguaccucaucauccagaacaccaccugggaggaccacugccaguucucccgccccagccccaucggcuaccuggggcugcucagccagcggacgcgcgacaucuacaucucccggcgccggcgcggcaccuucaccuggacccugagcgacuccgagagcaacgagacgccgggcggguacugccugacccgguggaugcucaucgaggccgagcugaagugcuucggcaacaccgccguggccaagugcaacgagaagcacgacgaggaguucugcgacaugcugcgccucuucgacuucaacaagcaggcgauccggcgccugaaggcccccgcccagauguccauccagcugaucaacaaggccgugaacgcccucaucaacgaccagcugaucaugaagaaccaccuccgggacaucaugugcauccccuacugcaacuacagcaaguacugguaccugaaccacaccgucacggggcgcaccucccugccccggugcuggcuggugagcaacggcuccuaccucaacgagacccacuucagcgacgacaucgagcagcaggcggacaacaugaucaccgagcugcugcagaaggaguacauggaccgccaggggaagacgccgcucggccugguggaccuguucgucuucuccaccagcuucuaccucaucuccaucuuccugcaccuggugaagauccccacccaccggcacgugaucggcaagcccugccccaagccgcaccgccugaaccacauggggaucugcagcugcggccucuacaagcaccccgggguccccgugaaguggaagcggugaggacuaguaauaaggaaacuguaugaaugucugugggcaggaagugaagagauccuucuguaaagguuuuuggaauuaugucugcugaauaauaaacuuuuuugaaauaauaaaucugguagaaaaaugagaucucaaaggcucuuuucagagccaccaaaaaaaaaaaaaaaaaaaaaaaaaaaaaaaaaaaaaaaaaaaaaaaaaaaaaaaaaaaaaaaaaaaaaaaaaaaaaaaaaaaaaaaaaaaaaaaaaaaaa

SEQ ID NO: 16151 - RNA, 1809 nt, Artificial Sequence
  mRNA product Design b-4 (hSL-A100) comprising derived and/or modified sequence from LASV(LASV035-NIG-2009;Clade II)__AIT17588__GPCmut1 (opt1)
aggagagucccgcagucggcguccagcggcucugcuuguucgugugugugucguugcaggccuuauucaagcuuaccaugggccagaucaucaccuucuuccaggaggugccccacgucaucgaggaggugaugaacaucgugcugaucgcccucagccugcuggccauccucaaggggaucuacaacgucgcgaccugcggccuguucgggcugguguccuuccuccugcugugcggccgcagcugcuccacgaccuacaaggggguguacgagcuccagacccuggagcuggacauggccagccucaacaugaccaugccgcuguccugcacgaagaacaacagccaccacuacaucauggucggcaacgagaccggccuggagcucacccugaccaacacguccaucaucaaccacaaguucugcaaccugagcgacgcccacaagaagaaccucuacgaccacgcccugauguccaucaucagcaccuuccaccuguccauccccaacuucaaccaguacgaggccaugagcugcgacuucaacgggggcaagaucuccgugcaguacaaccucagccacgcguacgccguggacgccgccaaccacugcgggaccaucgcgaacggcguccugcagaccuucaugcggauggccuggggcggguccuacaucgcccuggacagcggcugcggguccugggacugcaucaugacgagcuaccaguaccucaucauccagaacaccaccugggaggaccacugccaguucucccgccccagccccaucggcuaccuggggcugcucagccagcggacccgcgacaucuacaucucccggcgccggcgcggcacguucaccuggacccugagcgacuccgagggcaacgagacccccgggggcuacugccugacgcgguggaugcucaucgaggccgagcugaagugcuucgggaacaccgccguggcgaagugcaacgagaagcacgacgaggaguucugcgacaugcugcgccucuucgacuucaacaagcaggccauccggcgccugaaggccccggcccagaugagcauccagcugaucaacaaggccgugaacgcgcucaucaacgaccagcugaucaugaagaaccaccuccgggacaucaugugcauccccuacugcaacuacuccaaguacugguaccugaaccacaccgucaccggcaagacgagccugccccgcugcuggcugguguccaacgggagcuaccucaacgagacccacuucuccgacgacaucgagcagcaggccgacaacaugaucaccgagcugcugcagaaggaguacaucgaccggcagggcaagaccccgcucggccugguggaccuguucgucuucagcacguccuucuaccucaucagcaucuuccugcaccuggugaagauccccacccaccgccacgugaucgggaagcccugccccaagccgcaccggcugaaccacaugggcaucugcuccugcgggcucuacaagcaccccggcguccccgugaaguggaagcgcugaggacuaguaauaaggaaacuguaugaaugucugugggcaggaagugaagagauccuucuguaaagguuuuuggaauuaugucugcugaauaauaaacuuuuuugaaauaauaaaucugguagaaaaaugagaucucaaaggcucuuuucagagccaccaaaaaaaaaaaaaaaaaaaaaaaaaaaaaaaaaaaaaaaaaaaaaaaaaaaaaaaaaaaaaaaaaaaaaaaaaaaaaaaaaaaaaaaaaaaaaaaaaaaaa

SEQ ID NO: 16152 - RNA, 1809 nt, Artificial Sequence
  mRNA product Design b-4 (hSL-A100) comprising derived and/or modified sequence from LASV(LASV1000-NIG-2009;Clade II)__AIT17782__GPCmut1 (opt1)
aggagagucccgcagucggcguccagcggcucugcuuguucgugugugugucguugcaggccuuauucaagcuuaccaugggccagaucaucaccuucuuccaggaggugccccacgucaucgaggaggugaugaacaucgugcugaucgcccucagccugcuggccauccucaaggggaucuacaacgucgcgaccugcggccuguucgggcugguguccuuccuccugcugugcggccgcagcugcuccacgaccuacaaggggguguacgagcuccagacccuggagcuggacauggccagccucaacaugaccaugccgcuguccugcacgaagaacaacagccaccacuacaucauggucggcaacgagaccggccuggagcucacccugaccaacacguccaucaucaaccacaaguucugcaaccugagcgacgcccacaagaagaaccucuacgaccacgcccugauguccaucaucagcaccuuccaccuguccauccccaacuucaaccaguacgaggccaugagcugcgacuucaacgggggcaagaucuccgugcaguacaaccucagccacaccuacgcgguggacgccgccaaccacugcgggaccaucgccaacggcguccugcagacguucaugcggauggcguggggcggguccuacaucgcccuggacagcggcugcggguccugggacugcaucaugaccagcuaccaguaccucaucauccagaacaccaccugggaggaccacugccaguucucccgccccagccccaucggcuaccuggggcugcucagccagcggacgcgcgacaucuacaucucccggcgccggcgcggcaccuucaccuggacccugagcgacuccgagggcaacgagacgcccgggggcuacugccugacccgguggaugcucaucgaggccgagcugaagugcuucgggaacaccgccguggccaagugcaacgagaagcacgacgaggaguucugcgacaugcugcgccucuucgacuucaacaagcaggcgaucaagcggcugaagaccccggcccagaugagcauccagcugaucaacaaggccgugaacgcccucaucaacgaccagcugaucaugaagaaccaccuccgcgacaucaugugcauccccuacugcaacuacuccaaguacugguaccugaaccacacggucaccggcaagaccagccugccccggugcuggcugguguccaacgggagcuaccucaacgagacccacuucuccgacgacaucgagcagcaggccgacaacaugaucacggagcugcugcagaaggaguacaucgaccgccagggcaagaccccgcucggccugguggaccuguucgucuucagcaccuccuucuaccucaucagcaucuuccugcaccuggugaagauccccacccaccggcacguggucgggaagcccugccccaagccgcaccgccugaaccacaugggcaucugcuccugcgggcucuacaagcaccccggcgugcccgugaaguggaagcggugaggacuaguaauaaggaaacuguaugaaugucugugggcaggaagugaagagauccuucuguaaagguuuuuggaauuaugucugcugaauaauaaacuuuuuugaaauaauaaaucugguagaaaaaugagaucucaaaggcucuuuucagagccaccaaaaaaaaaaaaaaaaaaaaaaaaaaaaaaaaaaaaaaaaaaaaaaaaaaaaaaaaaaaaaaaaaaaaaaaaaaaaaaaaaaaaaaaaaaaaaaaaaaaaa

SEQ ID NO: 16153 - RNA, 1809 nt, Artificial Sequence
  mRNA product Design b-4 (hSL-A100) comprising derived and/or modified sequence from LASV(LASV221-NIG-2010;Clade II)__AIT17624__GPCmut1 (opt1)
aggagagucccgcagucggcguccagcggcucugcuuguucgugugugugucguugcaggccuuauucaagcuuaccaugggccagaucaucaccuucuuccaggaggugccccacgucaucgaggaggugaugaacaucgugcugaucgcccucagccugcuggccauccucaaggggaucuacaacgucgcgaccugcggccuguucgggcugguguccuuccuccugcugugcggccgcagcugcuccacgaccuacaaggggguguacgagcuccagacccuggagcuggacauggccagccucaacaugaccaugccgcuguccugcacgaagaacaacagccaccacuacaucauggucggcaacgagaccggccuggagcucacccugaccaacacguccaucaucaaccacaaguucugcaaccugagcgacgcccacaagaagaaccucuacgaccacgcccugauguccaucaucagcaccuuccaccuguccauccccaacuucaaccaguacgaggccaugagcugcgacuucaacgggggcaagaucuccgugcaguacaaccucagccacaccuacgcgaucgacgccgccaaccacugcgggaccaucgccaacggcgugcugcagacguucaugcggauggcguggggcggguccuacaucgcccuggacagcggcugcggguccugggacugcaucaugaccagcuaccaguaccucaucauccagaacaccaccugggaggaccacugccaguucucccgccccagccccaucggcuaccuggggcugcucagccagcggacgcgcgacaucuacaucucccggcgccggcgcggcaccuucaccuggacccugagcgacuccgagggcaacgagacgcccgggggcuacugccugacccgguggaugcucaucgaggccgagcugaagugcuucgggaacaccgccgucgccaagugcaacgagaagcacgacgaggaguucugcgacaugcugcgccucuucgacuucaacaagcaggcgauccggcgccugaagaccccggcccagaugagcauccagcugaucaacaaggccgugaacgcccucaucaacgaccagcugaucaugaagaaccaccuccgggacaucaugugcauccccuacugcaacuacuccaaguacugguaccugaaccacacggugaccggcaagaccagccugccccgcugcuggcuggucuccaacgggagcuaccucaacgagacccacuucuccgacgacaucgagcagcaggccgacaacaugaucacggagaugcugcagaaggaguacauggaccggcagggcaagaccccgcugggccucguggaccuguucguguucagcaccuccuucuaccugaucagcaucuuccuccaccuggucaagauccccacccaccgccacgugaucgggaagcccugccccaagccgcaccggcugaaccacaugggcaucugcuccugcgggcuguacaagcaccccggcgugcccgucaaguggaagcgcugaggacuaguaauaaggaaacuguaugaaugucugugggcaggaagugaagagauccuucuguaaagguuuuuggaauuaugucugcugaauaauaaacuuuuuugaaauaauaaaucugguagaaaaaugagaucucaaaggcucuuuucagagccaccaaaaaaaaaaaaaaaaaaaaaaaaaaaaaaaaaaaaaaaaaaaaaaaaaaaaaaaaaaaaaaaaaaaaaaaaaaaaaaaaaaaaaaaaaaaaaaaaaaaaa

SEQ ID NO: 16154 - RNA, 1809 nt, Artificial Sequence
  mRNA product Design b-4 (hSL-A100) comprising derived and/or modified sequence from LASV(LASV237-NIG-2010;Clade II)__AIT17638__GPCmut1 (opt1)
aggagagucccgcagucggcguccagcggcucugcuuguucgugugugugucguugcaggccuuauucaagcuuaccaugggccagaucaucaccuucuuccaggaggugccccacgucaucgaggaggugaugaacaucgugcugaucgcccucagccugcuggccauccucaaggggaucuacaacgucgcgaccugcggccuguucgggcugguguccuuccuccugcugugcggccgcagcugcuccacgaccuacaaggggguguacgagcuccagacccuggagcuggacauggccagccucaacaugaccaugccgcuguccugcacgaagaacaacagccaccacuacaucauggucggcaacgagaccggccuggagcucacccugaccaacacguccaucaucaaccacaaguucugcaaccugagcgacgcccacaagaaggaccucuacgaccacgcccugauguccaucaucagcaccuuccaccuguccauccccaacuucaaccaguacgaggccaugagcugcgacuucaacgggggcaagaucuccgugcaguacaaccucagccacaccuacgcgguggacgccgccaaccacugcgggaccaucgccaacggcguccugcagacguucaugcggauggcguggggcggguccuacaucgcccuggacagcggcugcggguccugggacugcaucaugaccagcuaccaguaccucaucauccagaacaccaccugggaggaccacugccaguucucccgccccagccccaucggcuaccuggggcugcucagccagcggacgcgcgacaucuacaucucccggcgccggcgcggcaccuucaccuggacccugagcgacuccgagggcaacgagacgcccgggggcuacugccugacccgguggaugcucaucgaggccgagcugaagugcuucgggaacaccgccguggccaagugcaacgagaagcacgacgaggaguucugcgacaugcugcgccucuucgacuucaacaagcaggcgauccggcgccugaagaccccggcccagaugagcauccagcugaucaacaaggccgugaacgcccucaucaacgaccagcugaucaugaagaaccaccuccgggacaucaugugcauccccuacugcaacuacuccaaguacugguaccugaaccacacggucaccggcaagaccagccugccccgcugcuggcugguguccaacgggagcuaccucaacgagacccacuucuccgacgacaucgagcagcaggccgacaacaugaucacggagcugcugcagaaggaguacauggaccggcagggcaagaccccgcucggccugguggaccuguucgucuucagcaccuccuucuaccucaucagcaucuuccugcaccugaucaagauccccacccaccgccacaucacggggaagcccugccccaagccgcaccggcugaaccacaugggcaucugcuccugcgggcucuacaagcaccccggcgugcccgugaaguggaagcgcugaggacuaguaauaaggaaacuguaugaaugucugugggcaggaagugaagagauccuucuguaaagguuuuuggaauuaugucugcugaauaauaaacuuuuuugaaauaauaaaucugguagaaaaaugagaucucaaaggcucuuuucagagccaccaaaaaaaaaaaaaaaaaaaaaaaaaaaaaaaaaaaaaaaaaaaaaaaaaaaaaaaaaaaaaaaaaaaaaaaaaaaaaaaaaaaaaaaaaaaaaaaaaaaaa

SEQ ID NO: 16155 - RNA, 1809 nt, Artificial Sequence
  mRNA product Design b-4 (hSL-A100) comprising derived and/or modified sequence from LASV(LASV253-NIG-2011;Clade II)__AIT17670__GPCmut1 (opt1)
aggagagucccgcagucggcguccagcggcucugcuuguucgugugugugucguugcaggccuuauucaagcuuaccaugggccagaucaucaccuucuuccaggaggugccccacgucaucgaggaggugaugaacaucgugcugaucgcccucagccugcuggccauccucaaggggaucuacaacgucgcgaccugcggccuguucgggcugguguccuuccuccugcugugcggccgcagcugcuccacgaccuacaaggggguguacgagcuccagacccuggagcuggacauggccagccucaacaugaccaugccgcuguccugcacgaagaacaacagccaccacuacaucauggucggcaacgagaccggccuggagcucacccugaccaacacguccaucaucaaccacaaguucugcaaccugagcgacgcccacaagaagaaccucuacgaccacgcccugauguccaucaucagcaccuuccaccuguccauccccaacuucaaccaguacgaggccaugagcugcgacuucaacgggggcaagaucuccgugcaguacaaccucagccacaccuacgcgguggacgccgccaaccacugcgggaccaucgccaacggcguccugcagacguucaugcggauggcguggggcggguccuacaucgcccuggacagcggcugcggguccugggacugcaucaugaccagcuaccaguaccucaucauccagaacaccaccugggaggaccacugccaguucucccgccccagccccaucggcuaccuggggcugcucagccagcggacgcgcgacaucuacaucucccggcgccggcgcggcaccuucaccuggacccugagcgacuccgagggcaacgagacgcccgggggcuacugccugacccgguggaugcucaucgaggccgagcugaagugcuucgggaacaccgccguggccaagugcaacgagaagcacgacgaggaguucugcgacaugcugcgccucuucgacuucaacaagcaggcgauccggcgccugaaggccccggcccagaugagcauccagcugaucaacaaggccgugaacgcccucaucaacgaccagcugaucaugaagaaccaccuccgggacaucaugugcauccccuacugcaacuacuccaaguacugguaccugaaccacaccgucacgggccgcaccagccugccccggugcuggcugguguccaacgggagcuaccucaacgagacccacuucuccgacgacaucgagcagcaggcggacaacaugaucaccgagcugcugcagaaggaguacaucgaccgccagggcaagacgccgcucggccugguggaccuguucgucuucagcaccuccuucuaccucaucagcaucuuccugcaccuggugaagauccccacccaccggcacaucaucgggaagcccugccccaagccgcaccgccugaaccacaugggcaucugcuccugcgggcucuacaagcaccccggcgugcccgucaaguggaagcggugaggacuaguaauaaggaaacuguaugaaugucugugggcaggaagugaagagauccuucuguaaagguuuuuggaauuaugucugcugaauaauaaacuuuuuugaaauaauaaaucugguagaaaaaugagaucucaaaggcucuuuucagagccaccaaaaaaaaaaaaaaaaaaaaaaaaaaaaaaaaaaaaaaaaaaaaaaaaaaaaaaaaaaaaaaaaaaaaaaaaaaaaaaaaaaaaaaaaaaaaaaaaaaaaa

SEQ ID NO: 16156 - RNA, 1809 nt, Artificial Sequence
  mRNA product Design b-4 (hSL-A100) comprising derived and/or modified sequence from LASV(LASV254-NIG-2011;Clade II)__AIT17674__GPCmut1 (opt1)
aggagagucccgcagucggcguccagcggcucugcuuguucgugugugugucguugcaggccuuauucaagcuuaccaugggccagaucaucaccuucuuccaggaggugccccacgucaucgaggaggugaugaacaucgugcugaucgcccucagccugcuggccauccucaaggggaucuacaacgucgcgaccugcggccuguucgggcugguguccuuccuccugcugugcggccgcagcugcuccacgaccuacaaggggguguacgagcuccagacccuggagcuggacaugaccaaccucaacaugacgaugccgcugagcugcaccaagaacaacucccaccacuacaucauggucggcaacgagaccggccuggagcucacccugacgaacaccagcaucaucaaccacaaguucugcaaccuguccgacgcccacaagaagaaccucuacaaccacgcccugaugagcaucaucuccaccuuccaccugagcauccccaacuucaaccaguacgaggccauguccugcgacuucaacgggggcaagaucagcgugcaguacaaccucucccacagcuacgccguggacgcggccaaccacugcgggaccaucgccaacggcguccugcagacguucaugcggauggccuggggcggguccuacaucgcgcuggacagcggcugcgggaacugggacugcaucaugaccuccuaccaguaccucaucauccagaacaccaccugggaggaccacugccaguucagccgccccucccccaucggcuaccuggggcugcucagccagcggacgcgcgacaucuacaucagccggcgccggcgcggcaccuucaccuggacccuguccgacagcgagggcaacgagacgcccgggggcuacugccugacccgguggaugcucaucgaggccgagcugaagugcuucgggaacaccgccguggccaagugcaacgagaagcacgacgaggaguucugcgacaugcugcgccucuucgacuucaacaagcaggccauccggcgccugaagaccccggcgcaggccaacauccagcugaucaacaaggccgugaacgcccucaucaacgaccagcugaucaugaagaaccaccuccgggacaucaugugcauccccuacugcaacuacuccaaguacugguaccugaaccacacggucaccggcaagaccagccugccccgcugcuggcugguguccaacgggagcuaccucaacgagacccacuucuccgacgacaucgagcagcaggccgacaacaugaucacggagcugcugcagaaggaguacauggaccggcagggcaagaccccgcucggccugguggaccuguucgucuucagcaccuccuucuaccucaucagcaucuuccugcaccuggugaagauccccacccaccgccacgugaucgggaagcccugccccaagccgcaccggcugaaccacaugggcaucugcuccugcgggcucuacaagcaccccggcguccccgugaaguggaagcgcugaggacuaguaauaaggaaacuguaugaaugucugugggcaggaagugaagagauccuucuguaaagguuuuuggaauuaugucugcugaauaauaaacuuuuuugaaauaauaaaucugguagaaaaaugagaucucaaaggcucuuuucagagccaccaaaaaaaaaaaaaaaaaaaaaaaaaaaaaaaaaaaaaaaaaaaaaaaaaaaaaaaaaaaaaaaaaaaaaaaaaaaaaaaaaaaaaaaaaaaaaaaaaaaaa

SEQ ID NO: 16157 - RNA, 1809 nt, Artificial Sequence
  mRNA product Design b-4 (hSL-A100) comprising derived and/or modified sequence from LASV(Nig08-A19;Clade III)__ADU56618__GPCmut1 (opt1)
aggagagucccgcagucggcguccagcggcucugcuuguucgugugugugucguugcaggccuuauucaagcuuaccaugggccagaucgugaccuucuuccaggaggucccccacgugaucgaggaggugaugaacaucguccugaucgcccucagcauccuggccauccugaaggggcucuacaacaucgcgaccugcggccugaucgggcuggugacguuccuccugcuguccggccgcagcugcuccaugaccuacaaggggguguacgagcuccagacccuggagcugaacaugaacacccucaacaugacgaugccgcugagcugcaccaagaacaacucccaccacuacaucauggucggcaacgagaccggccuggagcucacccugacgaacaccagccugcuccaccacaaguucugcaaccuguccgacgcccacaagaagaaccuguacgaccacacccucaugagcaucaucuccaccuuccaccugagcauccccaacuucaaccaguacgaggccauguccugcgacuucaacgggggcaagaucacggugcaguacaaccugagccacuccuacgccaucgacgccgcgaaccacugcgggaccguggccaacggcguccuccagaccuucaugcggauggccuggggcgggagcuacaucgcccuggacuccggcugcgggaagugggacugcaucaugaccagcuaccaguaccugaucauccagaacacgaccugggaggaccacugccaguucucccgccccagccccaucggcuaccucgggcugcugucccagcggacccgcgacaucuacaucagccggcgccggcgcggcaccuucacguggacccucagcgacuccgagggcaacgagacccccgggggcuacugccugacccgguggaugcugaucgaggcggagcucaagugcuucgggaacacggccguggccaagugcaacgagaagcacgacgaggaguucugcgacaugcugcgccuguucgacuucaacaagcaggccauccggcgccucaaggccccggcgcagaugagcauccagcugaucaacaaggccgugaacgcccugaucaacgaccagcucaucaugaagaaccaccuccgggacaucaugugcauccccuacugcaacuacuccaaguacugguaccugaaccacaccagcaccggccgcaccucccugccccggugcuggcuggucagcaacggguccuaccugaacgagacgcacuucagcgacgacaucgagcagcaggccgacaacaugaucaccgagaugcuccagaaggaguaccuggaccgccagggcaagaccccgcugggccucguggaccuguucguguucuccaccagcuucuaccugaucuccaucuuccugcaccucgucaagauccccacgcaccggcacaucguggggaagcccugccccaagccgcaccgccugaaccacaugggcaucugcagcugcgggcuguacaagcagcccggcgugcccguccgguggaagcgcugaggacuaguaauaaggaaacuguaugaaugucugugggcaggaagugaagagauccuucuguaaagguuuuuggaauuaugucugcugaauaauaaacuuuuuugaaauaauaaaucugguagaaaaaugagaucucaaaggcucuuuucagagccaccaaaaaaaaaaaaaaaaaaaaaaaaaaaaaaaaaaaaaaaaaaaaaaaaaaaaaaaaaaaaaaaaaaaaaaaaaaaaaaaaaaaaaaaaaaaaaaaaaaaaa

SEQ ID NO: 16158 - RNA, 1812 nt, Artificial Sequence
  mRNA product Design b-4 (hSL-A100) comprising derived and/or modified sequence from LASV(G1180-SLE-2010;Clade IV)__AIT17168__GPCmut1 (opt1)
aggagagucccgcagucggcguccagcggcucugcuuguucgugugugugucguugcaggccuuauucaagcuuaccaugggccagaucgugaccuucuuccaggaggucccccacgugaucgaggaggugaugaacaucguccugaucgcccucagcauccuggccgugcugaaggggcucuacaacuucgcgaccugcggccugguggggcugcucacguuccugcugcucugcggccgcuccugcaccgccagccgguacaagggggucuacgagcugcagacccuggagcucaacauggagacccugaacaugacgaugccgcuguccugcaccaagaacaacagccaccacuacaucauggugggcaacgagaccggccucgagcugacccugacgaacaccuccaucaucaaccacaaguucugcaaccucagcgacgcccacaagaagaaccuguacgaccacgcccugauguccaucaucagcaccuuccaccucuccauccccaacuucaaccaguacgaggccaugagcugcgacuucaacgggggcaagaucuccgugcaguacaaccugagccacuccuacgcgggggacgccgccaaccacugcggcaccgucgccaacggggugcugcagacguucaugcgcauggcguggggcggcagcuacaucgcccucgacuccgggugcggcagcugggacugcaucaugaccuccuaccaguaccugaucauccagaacaccaccugggaggaccacugccaguucagccggcccucccccaucggguaccugggccuccugagccagcgcacgcgggacaucuacaucagccgccggcgccggggcaccuucaccuggacccuguccgacagcgaggggaaggacacgccgggcggguacugccucacccgcuggaugcugaucgaggccgagcugaagugcuucggcaacaccgccguggccaagugcaacgagaagcacgacgaggaguucugcgacaugcuccggcuguucgacuucaacaagcaggcgauccagcgccugaaggcccccgcccagauguccauccagcucaucaacaaggccgucaacgcccugaucaacgaccagcugaucaugaagaaccaccuccgggacaucaugugcauccccuacugcaacuacagcaaguacugguaccugaaccacaccacgaccgggaagaccucccugcccaagugcuggcucgugagcaacggcuccuaccugaacgagacccacuucagcgacgacaucgagcagcaggcggacaacaugaucacggagaugcugcagaaggaguacauggagcgccagggcaagaccccgcucgggcugguggaccuguucgucuucuccaccagcuucuaccucaucuccaucuuccugcaccuggugaagauccccacccaccggcacaucgugggcaagagcugccccaagccccaccgccugaaccacauggggaucugcuccugcggccucuacaagcagccggggguccccgugaaguggaagcggugaggacuaguaauaaggaaacuguaugaaugucugugggcaggaagugaagagauccuucuguaaagguuuuuggaauuaugucugcugaauaauaaacuuuuuugaaauaauaaaucugguagaaaaaugagaucucaaaggcucuuuucagagccaccaaaaaaaaaaaaaaaaaaaaaaaaaaaaaaaaaaaaaaaaaaaaaaaaaaaaaaaaaaaaaaaaaaaaaaaaaaaaaaaaaaaaaaaaaaaaaaaaaaaaa

SEQ ID NO: 16159 - RNA, 1812 nt, Artificial Sequence
  mRNA product Design b-4 (hSL-A100) comprising derived and/or modified sequence from LASV(G1442-SLE-2011;Clade IV)__AIT17180__GPCmut1 (opt1)
aggagagucccgcagucggcguccagcggcucugcuuguucgugugugugucguugcaggccuuauucaagcuuaccaugggccagaucgugaccuucuuccaggaggucccccacgugaucgaggaggugaugaacaucguccugaucgcccucagcauccuggccgugcugaaggggcucuacaacguggcgaccugcggccugaucgggcuggucacguuccuccugcugugcggccgcuccugcaccaccacccucuacaaggggguguacgagcugcagacgcuggagcucaacauggagacccugaacaugaccaugccgcugagcugcaccaagaacaacucccaccacuacauccgggugggcaacgagacgggccucgagcugacccugaccaacaccagcaucaucaaccacaaguucugcaaccucuccgacgcccacaagaagaaccuguacgaccacgcccugaugagcaucaucuccacguuccaccucagcauccccaacuucaaccaguacgaggccauguccugcgacuucaacgggggcaagaucagcguccaguacaaccugucccacagcuacgccggggacgcggccaaccacugcggcaccguggccaacggggugcugcagaccuucaugcgcauggccuggggcggcuccuacaucgcgcucgacagcgggugcggcaacugggacugcaucaugaccuccuaccaguaccugaucauccagaacacgaccugggacgaccacugccaguucagccggcccucccccaucggguaccugggccuccugagccagcgcacccgggacgucuacaucucccgccggcgccggggcaccuucacguggacccugagcgacagcgaggggaaggacaccccgggcggguacugccucacccgcuggaugcugaucgaggccgagcugaagugcuucggcaacacggccguggccaagugcaacgagaagcacgacgaggaguucugcgacaugcuccggcuguucgacuucaacaagcaggccauccagcgccugaaggcgcccgcccagauguccauccagcucaucaacaaggccgugaacgcccugaucaacgaccagcugaucaugaagaaccaccuccgggacaucaugugcauccccuacugcaacuacagcaaguacugguaccugaacaacaccgccaccgggaagaccucccugcccaagugcuggcucaucagcaacggcuccuaccugaacgagacgcacuucagcgacgacaucgagcaggaggcggacaacaugaucaccgagaugcugcagaaggaguacauggagcgccagggcaagaccccgcucgggcuggucgaccuguucguguucuccaccagcuucuaccucaucuccaucuuccugcaccuggugaagauccccacgcaccggcacaucgucggcaagagcugccccaagccccaccgccugaaccacauggggaucugcuccugcggccucuacaagcagccgggggugcccgugcgguggaagcgcugaggacuaguaauaaggaaacuguaugaaugucugugggcaggaagugaagagauccuucuguaaagguuuuuggaauuaugucugcugaauaauaaacuuuuuugaaauaauaaaucugguagaaaaaugagaucucaaaggcucuuuucagagccaccaaaaaaaaaaaaaaaaaaaaaaaaaaaaaaaaaaaaaaaaaaaaaaaaaaaaaaaaaaaaaaaaaaaaaaaaaaaaaaaaaaaaaaaaaaaaaaaaaaaaa

SEQ ID NO: 16160 - RNA, 1812 nt, Artificial Sequence
  mRNA product Design b-4 (hSL-A100) comprising derived and/or modified sequence from LASV(G3010-SLE-2013;Clade IV)__AIT17344__GPCmut1 (opt1)
aggagagucccgcagucggcguccagcggcucugcuuguucgugugugugucguugcaggccuuauucaagcuuaccaugggccagaucgugaccuucuuccaggaggucccccacgugaucgaggaggugaugaacaucguccugaucgcccucagcauccuggccgugcugaaggggcucuacaacuucgcgaccugcggccugguggggcuggucacguuccuccugcugugcggccgcuccugcaccaccagccucuacaaggggguguacgagcugcagacccuggagcucaacauggagacgcugaacaugaccaugccgcuguccugcaccaagaacaacagccaccacuacaucauggugggcaacgagaccggccucgagcugacgcugaccaacaccuccaucaucaaccacaaguucugcaaccucagcgacgcccacaagaagaaccuguacaaccacgcccugauguccaucaucagcaccuuccaccucuccauccccaacuucaaccaguacgaggccaugagcugcgacuucaacgggggcaagaucuccguccaguacaaccugagccacuccuacgccggggacgcggccagccacugcggcacgguggccaacggggugcugcagaccuucaugcggauggccuggggcggcuccuacaucgcgcucgacagcgggugcggcaagugggacugcaucaugaccuccuaccaguaccugaucauccagaacaccacgugggaggaccacugccaguucagccgccccucccccaucggguaccugggccuccugagccagcggacccgcgacaucuacaucagccggcgccggcgcggcaccuucaccuggacgcuguccgacagcgaggggaaggacaccccgggcggguacugccucacccgguggaugcugaucgaggccgagcugaagugcuucggcaacaccgccgucgccaagugcaacgagaagcacgacgaggaguucugcgacaugcuccgccuguucgacuucaacaagcaggccauccagcggcugaagacgcccgcgcagauguccauccagcucaucaacaaggccgugaacgcccugaucaacgaccagcugaucaugaagaaccaccuccgcgacaucaugugcauccccuacugcaacuacagcaaguacugguaccugaaccacaccaccaccgggaagacgucccugcccaagugcuggcucgugagcaacggcuccuaccugaacgagacccacuucagcgacgacaucgagcagcaggccgacaacaugaucaccgagaugcugcagaaggaguacauggagcggcagggcaagaccccgcucgggcuggucgaccuguucguguucuccacgagcuucuaccucaucuccaucuuccugcaccuggugaagauccccacccaccgccacaucgucggcaagagcugccccaagccccaccggcugaaccacauggggaucugcuccugcggccucuacaagcagccgggggugcccgugcgcuggaagcggugaggacuaguaauaaggaaacuguaugaaugucugugggcaggaagugaagagauccuucuguaaagguuuuuggaauuaugucugcugaauaauaaacuuuuuugaaauaauaaaucugguagaaaaaugagaucucaaaggcucuuuucagagccaccaaaaaaaaaaaaaaaaaaaaaaaaaaaaaaaaaaaaaaaaaaaaaaaaaaaaaaaaaaaaaaaaaaaaaaaaaaaaaaaaaaaaaaaaaaaaaaaaaaaaa

SEQ ID NO: 16161 - RNA, 1812 nt, Artificial Sequence
  mRNA product Design b-4 (hSL-A100) comprising derived and/or modified sequence from LASV(G502-SLE-2009;Clade IV)__AIT17126__GPCmut1 (opt1)
aggagagucccgcagucggcguccagcggcucugcuuguucgugugugugucguugcaggccuuauucaagcuuaccaugggccagaucgugaccuucuuccaggaggucccccacgugaucgaggaggugaugaacaucguccugaucgcccucagcauccuggccgugcugaaggggcucuacaacuucgcgaccugcggccugguggggcugcucacguuccugcugcucugcggccgcuccugcaccaccgggcuguacaagggcgucuacgagcugcagacccucgagcugaacauggagacgcugaacaugaccaugccgcucagcugcaccaagaacaacucccaccacuacaucauggugggcaacgagaccgggcuggagcugacgcucaccaacaccagcaucaucaaccacaaguucugcaaccuguccgacgcccacaagaagaaccuguacgaccacgcccucaugagcaucaucuccaccuuccaccugagcauccccaacuucaaccaguacgaggccauguccugcgacuucaacggcgggaagaucagcgugcaguacaaccugucccacagcuacgccggcgacgcggccgaccacugcgggacggucgccaacggcgugcuccagaccuucaugcggauggccuggggcggguccuacaucgcgcuggacagcggcugcgggcgcugggacugcaucaugaccuccuaccaguaccugaucauccagaacaccacgugggaggaccacugccaguucagccggcccucccccaucggcuaccucggccugcugagccagcgcacccgggacaucuacaucucccgccggcgccgggggaccuucaccuggacgcucagcgacagcgagggcaaggacacccccgggggcuacugccugacccgcuggaugcugaucgaggccgagcucaagugcuucgggaacaccgccguggccaagugcaacgagaagcacgacgaggaguucugcgacaugcugcggcuguucgacuucaacaagcaggccauccagcgccucaaggcgccggcccagauguccauccagcugaucaacaaggccgucaacgcccugaucaacgaccagcucgugaugaagaaccaccuccgggacaucaugugcauccccuacugcaacuacagccgcuacugguaccugaaccacacgaccaccggccggaccucccugcccaagugcuggcuggugagcaacggcuccuaccugaacgagacgcacuucagcgacgacaucgagcagcaggccgacaacaugaucaccgagaugcuccagaaggaguacauggagcgccaggggaagaccccgcugggccuggucgaccucuucguguucuccaccagcuucuaccugaucuccaucuuccugcaccuggugaagauccccacgcaccggcacaucgucggcaagagcugccccaagccccaccgccucaaccacauggggaucugcuccugcgggcuguacaagcagccgggcgugcccgugaaguggaagcggugaggacuaguaauaaggaaacuguaugaaugucugugggcaggaagugaagagauccuucuguaaagguuuuuggaauuaugucugcugaauaauaaacuuuuuugaaauaauaaaucugguagaaaaaugagaucucaaaggcucuuuucagagccaccaaaaaaaaaaaaaaaaaaaaaaaaaaaaaaaaaaaaaaaaaaaaaaaaaaaaaaaaaaaaaaaaaaaaaaaaaaaaaaaaaaaaaaaaaaaaaaaaaaaaa

SEQ ID NO: 16162 - RNA, 1812 nt, Artificial Sequence
  mRNA product Design b-4 (hSL-A100) comprising derived and/or modified sequence from LASV(G733-SLE-2010;Clade IV)__AIT17154__GPCmut1 (opt1)
aggagagucccgcagucggcguccagcggcucugcuuguucgugugugugucguugcaggccuuauucaagcuuaccaugggccagaucgugaccuucuuccaggaggucccccacgugaucgaggaggugaugaacaucguccugaucgcccucagcauccuggccgugcugaaggggcucuacaacuucgcgaccugcggcaucguggggcuggucuccuuccugcuccugugcggccgcagcugcacgaccucccuguacaaggggguguacgagcuccagacccuggagcugaacauggagacccucaacaugacgaugccgcugagcugcaccaagaacaacucccaccacuacaucauggugggcaacgagaccggccuggagcucacccugacgaacaccagcaucaucaaccacaaguucugcaaccuguccgacgcccacaagaagaaccucuacgaccacgcccugaugagcaucaucuccaccuuccaccugagcauccccaacuucaaccaguacgaggccauguccugcgacuucaacgggggcaagaucagcguccaguacaaccucucccacagcuacgccggggacgcggccaaccacugcggcaccaucgccaacggggugcugcagacguucaugcggauggccuggggcggcuccuacaucgcgcuggacagcgggugcgaccgcugggacugcaucaugaccuccuaccaguaccucaucauccagaacaccaccugggaggaccacugccaguucagccggcccucccccaucggcuaccuggggcugcucagccagcgcacgcgggacaucuacaucagccgccggcgccggggcaccuucaccuggacccuguccgacagcgagggcaaggacacgcccgggggcuacugccugacccgcuggaugcucaucgaggccgagcugaagugcuucgggaacaccgccguggccaagugcaacgagaagcacgacgaggaguucugcgacaugcugcggcuguucgacuucaacaagcaggccauccagcgccugaaggcgccggcccagauguccauccagcugaucaacaaggccgucaacgcccucaucaacgaccagcugaucaugaagaaccaccuccgggacaucaugugcauccccuacugcaacuacagcaaguacugguaccucaaccacaccacgaccggcaagaccucccugcccaagugcuggcuggugagcaacggguccuaccucaacgagacccacuucagcgacgacaucgagcagcaggccgacaacaugaucacggagaugcugcagaaggaguacauggagcgccagggcaagaccccgcugggccucguggaccuguucgucuucuccaccagcuucuaccugaucuccaucuuccuccaccuggugaagauccccacccaccggcacguggucggcaagagcugccccaagccccaccgccugaaccacauggggaucugcuccugcgggcuguacggccagccgggggugcccgugaaguggaagcggugaggacuaguaauaaggaaacuguaugaaugucugugggcaggaagugaagagauccuucuguaaagguuuuuggaauuaugucugcugaauaauaaacuuuuuugaaauaauaaaucugguagaaaaaugagaucucaaaggcucuuuucagagccaccaaaaaaaaaaaaaaaaaaaaaaaaaaaaaaaaaaaaaaaaaaaaaaaaaaaaaaaaaaaaaaaaaaaaaaaaaaaaaaaaaaaaaaaaaaaaaaaaaaaaa

SEQ ID NO: 16163 - RNA, 1812 nt, Artificial Sequence
  mRNA product Design b-4 (hSL-A100) comprising derived and/or modified sequence from MOPV/LASV reassortant(IGS-1;Clade IV)__AFY05576__GPCmut1 (opt1)
aggagagucccgcagucggcguccagcggcucugcuuguucgugugugugucguugcaggccuuauucaagcuuaccaugggccagaucgugaccuucuuccaggaggucccccacgugaucgaggaggugaugaacaucguccugaucgcccucagcgugcuggccgugcugaaggggcucuacaacuucgcgaccugcggccuggucgggcuggugacguuccuccugcugugcggccgcuccugcaccaccagccucuacaaggggguguacgagcugcagacccuggagcucaacauggagacgcugaacaugaccaugccgcuguccugcaccaagaacaacagccaccacuacaucauggucggcaacgagaccggccucgagcugacgcugaccaacaccuccaucaucaaccacaaguucugcaaccucagcgacgcccacaagaagaaccuguacgaccacgcccugauguccaucaucagcaccuuccaccucuccauccccaacuucaaccaguacgaggccaugagcugcgacuucaacgggggcaagaucuccgugcaguacaaccugagccacuccuacgccggggacgcggccaaccacugcggcacgguggccaacgggguccugcagaccuucaugcggauggccuggggcggcagcuacaucgcgcucgacuccgggugcggcaacugggacugcaucaugaccagcuaccaguaccugaucauccagaacaccacgugggaggaccacugccaguucucccgccccagccccaucggguaccugggccuccugucccagcggacccgcgacaucuacaucagccggcgccggcgcggcaccuucaccuggacgcugagcgacuccgagggggaggacaccccgggcggguacugccucacccgguggaugcugaucgaggccgagcugaagugcuucggcaacaccgccguggccaagugcaacgagaagcacgacgaggaguucugcgacaugcuccgccuguucgacuucaacaagcaggccauccagcggcugaaggcgcccgcccagaugagcauccagcucaucaacaaggccgugaacgcccugaucaacgaccagcugaucaugaagaaccaccuccgcgacaucaugugcauccccuacugcaacuacuccaaguacugguaccugaaccacacgaccaccgggcggaccagccugcccaagugcuggcucgucuccaacggcagcuaccugaacgagacgcacuucuccgacgacaucgagcagcaggccgacaacaugaucaccgagaugcugcagaaggaguacauggagcgccagggcaagaccccgcucgggcugguggaccuguucguguucagcaccuccuucuaccucaucagcaucuuccugcaccuggucaagauccccacgcaccggcacaucgugggcaaguccugccccaagccccaccgccugaaccacauggggaucugcagcugcggccucuacaagcagccgggggugcccgucaaguggaagcggugaggacuaguaauaaggaaacuguaugaaugucugugggcaggaagugaagagauccuucuguaaagguuuuuggaauuaugucugcugaauaauaaacuuuuuugaaauaauaaaucugguagaaaaaugagaucucaaaggcucuuuucagagccaccaaaaaaaaaaaaaaaaaaaaaaaaaaaaaaaaaaaaaaaaaaaaaaaaaaaaaaaaaaaaaaaaaaaaaaaaaaaaaaaaaaaaaaaaaaaaaaaaaaaaa

SEQ ID NO: 16164 - RNA, 1812 nt, Artificial Sequence
  mRNA product Design b-4 (hSL-A100) comprising derived and/or modified sequence from LASV(LM765-SLE-2012;Clade IV)__AIT17814__GPCmut1 (opt1)
aggagagucccgcagucggcguccagcggcucugcuuguucgugugugugucguugcaggccuuauucaagcuuaccaugggccagaucgugaccuucuuccaggaggucccccacgugaucgaggaggugaugaacaucguccugaucgcccucagcauccuggccgugcugaaggggcucuacaacuucgcgaccugcggccugguggggcuggucacguuccuccugcugugcggccgcuccugcaccaccagccucuacaaggggguguacgagcugcagacccuggagcucaacauggagacgcugaacaugaccaugccgcuguccugcaccaagaacaacagccaccacuacaucauggugggcaacgagaccggccucgagcugacgcugaccaacaccuccaucaucgaccacaaguucugcaaccucagcgacgcccaccggaagaaccuguacgaccacgcccugauguccaucaucagcaccuuccaccucuccauccccaacuucaaccaguacgaggccaugagcugcgacuucaacgggggcaagaucuccguccaguacaaccugagccacuccuacgccaaggacgcggccgaccacugcgggacgguggccaacggcgugcugcagaccuucaugcgcauggccuggggcgggagcuacaucgcgcucgacuccggcugcgggcggugggacugcaucaugaccagcuaccaguaccugaucauccagaacaccacgugggaggaccacugccaguucucccgccccagccccaucggcuaccuggggcuccugucccagcggacccgcgacaucuacaucagccggcgccggcgcggcaccuucaccuggacgcugagcgacuccgagggcaaggacacccccgggggcuacugccucacccgguggaugcugaucgaggccgagcugaagugcuucgggaacaccgccgucgccaagugcaacgagaagcacgacgaggaguucugcgacaugcuccgccuguucgacuucaacaagcaggccauccagcggcugaaggcgccggcccagaugagcauccagcucaucaacaaggccgugaacgcccugaucaacgaccagcugaucaugaagaaccaccuccgcgacaucaugugcauccccuacugcaacuacuccaaguacugguaccugaaccacacgaccaccggcaagaccagccugcccaagugcuggcucguguccaacgggagcuaccugaacgagacgcacuucuccgacgacaucgagcagcaggccgacaacaugaucaccgagaugcugcagaaggaguacauggagcggcagggcaagaccccgcucggccuggucgaccuguucguguucagcaccuccuucuaccucaucagcaucuuccugcaccuggugaagauccccacgcaccgccacaucgucgggaagcccugccccaagccgcaccggcugaaccacaugggcaucugcuccugcgggcucuacaagcagcccggcgugcccgugaaguggaagcgcugaggacuaguaauaaggaaacuguaugaaugucugugggcaggaagugaagagauccuucuguaaagguuuuuggaauuaugucugcugaauaauaaacuuuuuugaaauaauaaaucugguagaaaaaugagaucucaaaggcucuuuucagagccaccaaaaaaaaaaaaaaaaaaaaaaaaaaaaaaaaaaaaaaaaaaaaaaaaaaaaaaaaaaaaaaaaaaaaaaaaaaaaaaaaaaaaaaaaaaaaaaaaaaaaa

SEQ ID NO: 16165 - RNA, 1812 nt, Artificial Sequence
  mRNA product Design b-4 (hSL-A100) comprising derived and/or modified sequence from LASV(LM776-SLE-2012;Clade IV)__AIT17824__GPCmut1 (opt1)
aggagagucccgcagucggcguccagcggcucugcuuguucgugugugugucguugcaggccuuauucaagcuuaccaugggccagaucgugaccuucuuccaggaggucccccacgugaucgaggaggugaugaacaucguccugaucgcccucagcauccuggccgugcugaaggggcucuacaacuucgcgaccugcggccugguggggcuggucacguuccuccugcugugcggccgcuccugcaccaccagcguguacaaggggguguacgagcuccagacccuggagcugaacauggagacgcucaacaugaccaugccgcuguccugcaccaagaacaacagccaccacuacaucauggucggcaacgagaccggccuggagcucacgcugaccaacaccuccaucaucaaccacaaguucugcaaccugagcgacgcccacaagaagaaccucuacgaccacgcccugauguccaucaucagcaccuuccaccuguccauccccaacuucaaccaguacgaggccaugagcugcgacuucaacgggggcaagaucuccgugcaguacaaccucagccacuccuacgccggggacgcggccaaccacugcggcacgguggccaacgggguccugcagaccuucaugcggauggccuggggcggcagcuacaucgcgcuggacuccgggugcggcaagugggacugcaucaugaccagcuaccaguaccucaucauccagaacaccacgugggaggaccacugccaguucucccgccccagccccaucggguaccugggccugcucucccagcggacccgcgacaucuacaucagccggcgccggcgcggcaccuucaccuggacgcugagcgacuccgaggggaaggacaccccgggcggguacugccugacccgguggaugcucaucgaggccgagcugaagugcuucggcaacaccgccguggccaagugcaacgagaagcacgacgaggaguucugcgacaugcugcgccucuucgacuucaacaagcaggccauccagcggcugaaggcgcccgcccagaugagcauccagcugaucaacaaggccgugaacgcccucaucaacgaccagcugaucaugaagaaccaccuccgcgacaucaugugcauccccuacugcaacuacuccaaguacugguaccugaaccacacgaccaccgggaagaccagccugcccaagugcuggcuggucuccaacggcagcuaccucaacgagacgcacuucuccgacgacaucgagcagcaggccgacaacaugaucaccgagaugcugcagaaggaguacauggagcggcagggcaagaccccgcuggggcucguggaccuguucguguucagcaccuccuucuaccugaucagcaucuuccuccaccuggucaagauccccacgcaccgccacaucgugggcaaguccugccccaagccccaccggcugaaccacauggggaucugcagcugcggccuguacaagcagccgggggugcccguccgcuggaagcggugaggacuaguaauaaggaaacuguaugaaugucugugggcaggaagugaagagauccuucuguaaagguuuuuggaauuaugucugcugaauaauaaacuuuuuugaaauaauaaaucugguagaaaaaugagaucucaaaggcucuuuucagagccaccaaaaaaaaaaaaaaaaaaaaaaaaaaaaaaaaaaaaaaaaaaaaaaaaaaaaaaaaaaaaaaaaaaaaaaaaaaaaaaaaaaaaaaaaaaaaaaaaaaaaa

SEQ ID NO: 16166 - RNA, 1812 nt, Artificial Sequence
  mRNA product Design b-4 (hSL-A100) comprising derived and/or modified sequence from LASV(Mad39;Clade IV)__ANH09722__GPCmut1 (opt1)
aggagagucccgcagucggcguccagcggcucugcuuguucgugugugugucguugcaggccuuauucaagcuuaccaugggccagaucgugaccuucuuccaggaggucccccacgugaucgaggaggugaugaacaucguccugaucgcccucagcauccuggccgugcugaaggggcucuacaacguggcgaccugcggccugaucgggcuggucacguuccuccugcugugcggccgcuccugcaccaccacccucuacaaggggguguacgagcugcaggcccuggagcucaacauggagacgcugaacaugaccaugccgcugagcugcaccaagaacaacucccaccacuacauccgggugggcaacgagaccggccucgagcugacgcugaccaacaccagccucaucaaccacaaguucugcaaccuguccgacgcccacaagaagaaccuguacgaccacgcccucaugagcaucaucuccaccuuccaccugagcauccccaacuucaaccaguacgaggccauguccugcgacuucaacgacgggaagaucagcguccaguacaaccugucccacacguacgcgggcgacaccgccaaccacugcgggaccguggccaacggcgugcuccagaccuucaugcgcauggccuggggcgggagcuacaucgcgcuggacuccggcugcgggggcugggacugcaucaugacgagcuaccaguaccugaucauccagaacaccaccugggaggaccacugccaguucucccggcccagccccaucggguaccucggccugcugucccagcgcacccgggacaucuacaucagccgccggcgccggggcacguucaccuggacccucuccgacagcgaggggaaggacaccccgggcggguacugccugacgcgcuggaugcugaucgaggccgagcucaagugcuucggcaacaccgccgucgccaagugcaacgagaagcacgacgaggaguucugcgacaugcugcggcuguucgacuucaacaagcaggccauccagcgccucaaggcgcccgcccagaugagcauccagcugaucaacaaggccgugaacgcccugaucaacgaccagcucaucaugaagaaccaccuccgggacaucaugugcauccccuacugcaacuacuccaaguacugguaccugaaccacaccgugaccgggaagacgagccugcccaagugcuggcuggucuccaacggcagcuaccugaacgagacccacuucuccgacgacaucgagcagcaggccgacaacaugaucaccgagaugcuccagaaggaguacauggagcgccagggcaagaccccgcuggggcugguggaccucuucguguucagcacguccuucuaccugaucagcaucuuccugcaccuggucaagauccccacccaccggcacguggugggcaagcccugccccaagccgcaccgccucaaccacauggggaucugcuccugcggcuucuacaagcagcccgggguccccgugcgguggaagcgcugaggacuaguaauaaggaaacuguaugaaugucugugggcaggaagugaagagauccuucuguaaagguuuuuggaauuaugucugcugaauaauaaacuuuuuugaaauaauaaaucugguagaaaaaugagaucucaaaggcucuuuucagagccaccaaaaaaaaaaaaaaaaaaaaaaaaaaaaaaaaaaaaaaaaaaaaaaaaaaaaaaaaaaaaaaaaaaaaaaaaaaaaaaaaaaaaaaaaaaaaaaaaaaaaa

SEQ ID NO: 16167 - RNA, 1812 nt, Artificial Sequence
  mRNA product Design b-4 (hSL-A100) comprising derived and/or modified sequence from LASV(Z0947-SLE-2011;Clade IV)__AIT17840__GPCmut1 (opt1)
aggagagucccgcagucggcguccagcggcucugcuuguucgugugugugucguugcaggccuuauucaagcuuaccaugggccagaucgugaccuucuuccaggaggucccccacgugaucgaggaggugaugaacaucguccugaucgcccucagcauccuggccgugcugaaggggcucuacaacuucgcgaccugcggccugguggggcuggucacguuccuccugcugugcggccgcuccugcaccaucagccucuacaaggggguguacgagcugcagacccuggagcucaacauggagacccugaacaugacgaugccgcuguccugcaccaagaacaacagccaccacuacaucauggugggcaacgagaccggccucgagcugacccugacgaacaccuccaucaucaaccacaaguucugcaaccucagcgacgcccacaagaagaaccuguacgaccacgcccugauguccaucaucagcaccuuccaccucuccauccccaacuucaaccaguacgaggccaugagcugcgacuucaacgggggcaagaucuccguccaguacaaccugagccacuccuacgccggggacgcggccaaccacugcggcaccguggccaacggggugcugcagacguucaugcggauggccuggggcggcagcuacaucgcgcucgacuccgggugcgaccgcugggacugcaucaugaccagcuaccaguaccugaucauccagaacaccaccugggaggaccacugccaguucucccggcccagccccaucggcuaccuggggcuccugucccagcgcacgcgggacaucuacaucagccgccggcgccggggcaccuucaccuggacccugagcgacuccgagggcaaggacacgcccgggggcuacugccucacccgcuggaugcugaucgaggccgagcugaagugcuucgggaacaccgccgucgccaagugcaacgagaagcacgacgaggaguucugcgacaugcuccggcuguucgacuucaacaagcaggccauccagcgccugaaggcgccggcccagaugagcauccagcucaucaacaaggccgugaacgcccugaucaacgaccagcugaucaugaagaaccaccuccgggacaucaugugcauccccuacugcaacuacuccaaguacugguaccugaaccacaccacgaccggcaagaccagccugcccaagugcuggcucguguccaacgggagcuaccugaacgagacccacuucuccgacgacaucgagcagcaggccgacaacaugaucacggagaugcugcagaaggaguacauggagcgccagggcaagaccccgcucggccuggucgaccuguucguguucagcaccuccuucuaccucaucagcaucuuccugcaccuggugaagauccccacccaccggcacaucgucgggaagcccugccccaagccgcaccgccugaaccacaugggcaucugcuccugcgggcucuacaagcagcccggcgugcccgugaaguggaagcggugaggacuaguaauaaggaaacuguaugaaugucugugggcaggaagugaagagauccuucuguaaagguuuuuggaauuaugucugcugaauaauaaacuuuuuugaaauaauaaaucugguagaaaaaugagaucucaaaggcucuuuucagagccaccaaaaaaaaaaaaaaaaaaaaaaaaaaaaaaaaaaaaaaaaaaaaaaaaaaaaaaaaaaaaaaaaaaaaaaaaaaaaaaaaaaaaaaaaaaaaaaaaaaaaa

SEQ ID NO: 16168 - RNA, 1812 nt, Artificial Sequence
  mRNA product Design b-4 (hSL-A100) comprising derived and/or modified sequence from LASV(Josiah;Clade IV)__NP_694870__GPCmut1 (opt4)
aggagagucccgcagucggcguccagcggcucugcuuguucgugugugugucguugcaggccuuauucaagcuuaccaugggccagaucgugaccuucuuccaggaggugccccacgugaucgaggaggugaugaacaucgugcugaucgcccugagcgugcuggccgugcugaagggccuguacaacuucgccaccugcggccuggugggccuggugaccuuccugcugcugugcggcagaagcugcaccaccagccuguacaagggcguguacgagcugcagacccuggagcugaacauggagacccugaacaugaccaugccccugagcugcaccaagaacaacagccaccacuacaucauggugggcaacgagaccggccuggagcugacccugaccaacaccagcaucaucaaccacaaguucugcaaccugagcgacgcccacaagaagaaccuguacgaccacgcccugaugagcaucaucagcaccuuccaccugagcauccccaacuucaaccaguacgaggccaugagcugcgacuucaacggcggcaagaucagcgugcaguacaaccugagccacagcuacgccggcgacgccgccaaccacugcggcaccguggccaacggcgugcugcagaccuucaugagaauggccuggggcggcagcuacaucgcccuggacagcggcugcggcaacugggacugcaucaugaccagcuaccaguaccugaucauccagaacaccaccugggaggaccacugccaguucagcagacccagccccaucggcuaccugggccugcugagccagagaaccagagacaucuacaucagcagaagacgccggggcaccuucaccuggacccugagcgacagcgagggcaaggacacccccggcggcuacugccugaccagauggaugcugaucgaggccgagcugaagugcuucggcaacaccgccguggccaagugcaacgagaagcacgacgaggaguucugcgacaugcugagacuguucgacuucaacaagcaggccauccagagacugaaggcccccgcccagaugagcauccagcugaucaacaaggccgugaacgcccugaucaacgaccagcugaucaugaagaaccaccugagagacaucaugugcauccccuacugcaacuacagcaaguacugguaccugaaccacaccaccaccggcagaaccagccugcccaagugcuggcuggugagcaacggcagcuaccugaacgagacccacuucagcgacgacaucgagcagcaggccgacaacaugaucaccgagaugcugcagaaggaguacauggagagacagggcaagaccccccugggccugguggaccuguucguguucagcaccagcuucuaccugaucagcaucuuccugcaccuggugaagauccccacccacagacacaucgugggcaagagcugccccaagccccacagacugaaccacaugggcaucugcagcugcggccuguacaagcagcccggcgugcccgugaaguggaagagaugaggacuaguaauaaggaaacuguaugaaugucugugggcaggaagugaagagauccuucuguaaagguuuuuggaauuaugucugcugaauaauaaacuuuuuugaaauaauaaaucugguagaaaaaugagaucucaaaggcucuuuucagagccaccaaaaaaaaaaaaaaaaaaaaaaaaaaaaaaaaaaaaaaaaaaaaaaaaaaaaaaaaaaaaaaaaaaaaaaaaaaaaaaaaaaaaaaaaaaaaaaaaaaaaa

SEQ ID NO: 16169 - RNA, 1809 nt, Artificial Sequence
  mRNA product Design b-4 (hSL-A100) comprising derived and/or modified sequence from LASV(LP;Clade I)__AAF86701__GPCmut1 (opt4)
aggagagucccgcagucggcguccagcggcucugcuuguucgugugugugucguugcaggccuuauucaagcuuaccaugggccagaucaucaccuucuuccaggaggugccccacgugaucgaggaggugaugaacaucgugcugaucgcccugagccugcuggccauccugaagggccuguacaacaucgccaccugcggcaucaucggccugguggccuuccuguuccugugcggcaagagcugcagccugacccugaagggcggcuacgagcugcagacccuggagcugaacauggagacccugaacaugaccaugccccugagcugcaccaagaacagcagccaccacuacaucagagugggcaacgagaccggccuggagcugacccugaccaacaccagcaucaucaaccacaaguucugcaaccugagcgacgcccacaagaagaaccuguacgaccacgcccugaugagcaucaucagcaccuuccaccugagcauccccaacuucaaccaguacgaggccaugagcugcgacuucaacggcggcaagaucagcgugcaguacaaccugagccacagcuacgccggcgacgccgccgagcacugcggcaccguggccaacggcgugcugcagaccuucaugagaauggccuggggcggcagauacaucgcccuggacagcggcugcggcaacugggacugcaucaugaccagcuaccaguaccugaucauccagaacaccaccugggaggaccacugccaguucagcagacccagccccaucggcuaccugggccugcugagccagagaaccagagacaucuacaucagcagaagacgccggggcaccuucaccuggacccugagcgacagcgagggcaacgagacccccggcggcuacugccugaccagauggaugcugaucgaggccgagcugaagugcuucggcaacaccgccguggccaagugcaacgagaagcacgacgaggaguucugcgacaugcugagacuguucgacuucaacaagcaggccaucagaagacugaaggcccccgcccagaugagcauccagcugaucaacaaggccgugaacgcccugaucaacgaccagcugaucaugaagaaccaccugagagacaucaugugcauccccuacugcaacuacagcaaguacugguaccugaaccacaccagcagcggcagaaccagccugcccaagugcuggcugaucagcaacggcagcuaccugaacgagacccaguucagcgacgacaucgagcagcaggccgacaacaugaucaccgagaugcugcagaaggaguacaucgagagacagggcaagaccccccugggccugguggacaucuucaucuucagcaccagcuucuaccugaucagcaucuuccugcaccugaucaagauccccacccacagacacaucgugggcaagcccugccccaagccccacagacugaaccacaugggcgugugcagcugcggccuguacaagcaccccggcgugcccaccaaguggaagagaugaggacuaguaauaaggaaacuguaugaaugucugugggcaggaagugaagagauccuucuguaaagguuuuuggaauuaugucugcugaauaauaaacuuuuuugaaauaauaaaucugguagaaaaaugagaucucaaaggcucuuuucagagccaccaaaaaaaaaaaaaaaaaaaaaaaaaaaaaaaaaaaaaaaaaaaaaaaaaaaaaaaaaaaaaaaaaaaaaaaaaaaaaaaaaaaaaaaaaaaaaaaaaaaaa

SEQ ID NO: 16170 - RNA, 1809 nt, Artificial Sequence
  mRNA product Design b-4 (hSL-A100) comprising derived and/or modified sequence from LASV(803213;Clade II)__AAF86703__GPCmut1 (opt4)
aggagagucccgcagucggcguccagcggcucugcuuguucgugugugugucguugcaggccuuauucaagcuuaccaugggccagaucaucaccuucuuccaggaggugccccacgugaucgaggaggugaugaacaucgugcugaucgcccugagccugcuggccauccugaagggcaucuacaacguggccaccugcggccuguucggccugaucagcuuccugcugcugugcggcagaagcugcagcgugaccuacaagggcguguacgagcugcagacccuggagcugaacauggccaaccugaacaugaccaugccccugagcugcaccaagaacaacagccaccacuacaucauggugggcaacgagaccggccuggagcugacccugaccaacaccagcaucaucaaccacaaguucugcaaccugagcgacgcccacaagaagaaccuguacgaccacgcccugaugagcaucaucagcaccuuccaccugagcauccccaacuucaaccaguacgaggccaugagcugcgacuucaacggcggcaagaucagcgugcaguacaaccugagccacagcuucgccguggacgccgccaaccacugcggcaccaucgccaacggcgugcugcagaccuucaugagaauggccuggggcggcagcuacaucgcccuggacagcggcugcggcaacugggacugcaucaugaccagcuaccaguaccugaucauccagaacaccaccugggaggaccacugccaguucagcagacccagccccaucggcuaccugggccugcugagccagagaaccagagacaucuacaucagcagaagacgccggggcaccuucaccuggacccugagcgacagcgagggcaacgaggcccccggcggcuacugccugaccagauggaugcugaucgaggccgagcugaagugcuucggcaacaccgccguggccaagugcaacgagaagcacgacgaggaguucugcgacaugcugagacuguucgacuucaacaagcaggccaucaagagacugaagacccccgcccagaugagcauccagcugaucaacaaggccgugaacgcccugaucaacgaccagcugaucaugaagaaccaccugagagacaucaugugcauccccuacugcaacuacagcagauacugguaccugaaccacaccgugaccggcaagaccagccugcccagaugcuggcuggugagcaacggcagcuaccugaacgagacccacuucagcgacgacaucgagcagcaggccgacaacaugaucaccgagaugcugcagaaggaguacauggacagacagggcaagaccccccugggccugguggaccuguucguguucagcaccagcuucuaccugaucagcaucuuccugcaccuggugaagauccccacccacagacacaucgugggcaagcccugccccaagccccacagacugaaccacaugggcaucugcagcugcggccuguacaagcaccccggcgugcccgugaaguggaagagaugaggacuaguaauaaggaaacuguaugaaugucugugggcaggaagugaagagauccuucuguaaagguuuuuggaauuaugucugcugaauaauaaacuuuuuugaaauaauaaaucugguagaaaaaugagaucucaaaggcucuuuucagagccaccaaaaaaaaaaaaaaaaaaaaaaaaaaaaaaaaaaaaaaaaaaaaaaaaaaaaaaaaaaaaaaaaaaaaaaaaaaaaaaaaaaaaaaaaaaaaaaaaaaaaa

SEQ ID NO: 16171 - RNA, 1809 nt, Artificial Sequence
  mRNA product Design b-4 (hSL-A100) comprising derived and/or modified sequence from LASV(GA391;Clade III)__CAA36645__GPCmut1 (opt4)
aggagagucccgcagucggcguccagcggcucugcuuguucgugugugugucguugcaggccuuauucaagcuuaccaugggccagaucgugaccuucuuccaggaggugccccacgugaucgaggaggugaugaacaucgugcugaucgcccugagcauccuggccauccugaagggccuguacaacguggccaccugcggccugaucggccuggugaccuuccugcugcugagcggcagaagcugcagccugaucuacaagggcaccuacgagcugcagacccuggagcugaacauggagacccugaacaugaccaugccccugagcugcaccaagaacaacagccaccacuacaucagagugggcaacgagaccggccuggagcugacccugaccaacaccagcauccugaaccacaaguucugcaaccugagcgacgcccacaagagaaaccuguacgaccacagccugaugagcaucaucagcaccuuccaccugagcauccccaacuucaaccaguacgaggccaugagcugcgacuucaacggcggcaagaucaccgugcaguacaaccugagccacagcuucgccguggacgccgccggccacugcggcacccuggccaacggcgugcugcagaccuucaugagaauggccuggggcggcagcuacaucgcccuggacagcggcugcggcaacugggacugcaucaugaccagcuaccaguaccugaucauccagaacaccaccugggacgaccacugccaguucagcagacccagccccaucggcuaccugggccugcugagccagagaaccagagacaucuacaucagcagaagacgccggggcaccuucaccuggacccugagcgacagcgagggcaacgagacccccggcggcuacugccugaccagauggaugcugaucgaggccgagcugaagugcuucggcaacaccgccguggccaagugcaacgagaagcacgacgaggaguucugcgacaugcugagacuguucgacuucaacaagcaggccaucagaagacugaagacccccgcccagaugagcauccagcugaucaacaaggccgugaacgcccugaucaacgaccagcugaucaugaagaaccaccugagagacaucaugugcauccccuacugcaacuacagcagauacugguaccugaaccacaccagcaccggcaagaccagccugcccagaugcuggcugaucagcaacggcagcuaccugaacgagaccaaguucagcgacgacaucgagcagcaggccgacaacaugaucaccgagaugcugcagaaggaguacaucgacagacagggcaagaccccccugggccugguggaccuguucguguucagcaccagcuucuaccugaucagcaucuuccugcaccuggugaagauccccacccacagacacaucgugggcaagcccugccccaagccccacagacugaaccacaugggcaucugcagcugcggccuguacaagcagcccggcgugcccgugagauggaagagaugaggacuaguaauaaggaaacuguaugaaugucugugggcaggaagugaagagauccuucuguaaagguuuuuggaauuaugucugcugaauaauaaacuuuuuugaaauaauaaaucugguagaaaaaugagaucucaaaggcucuuuucagagccaccaaaaaaaaaaaaaaaaaaaaaaaaaaaaaaaaaaaaaaaaaaaaaaaaaaaaaaaaaaaaaaaaaaaaaaaaaaaaaaaaaaaaaaaaaaaaaaaaaaaaa

SEQ ID NO: 16172 - RNA, 1812 nt, Artificial Sequence
  mRNA product Design b-4 (hSL-A100) comprising derived and/or modified sequence from LASV(AV;Clade V)__CCA30314__GPCmut1 (opt4)
aggagagucccgcagucggcguccagcggcucugcuuguucgugugugugucguugcaggccuuauucaagcuuaccaugggccagaucgugaccuucuuccaggaggugccccacgugaucgaggaggugaugaacaucgugcugaucgcccugagcauccuggccgugcugaagggccuguacaacaucgccaccugcggccugaucggccugaucaccuuccugcugcugugcggcagaagcugcagcagcaaccuguacaagggcguguacgagcugcagagccuggaccugaacauggagacccugaacaugaccaugccccugagcugcaccaagaacaacagccaccacuacaucagagugggcaacgacaccggccuggagcugacccugaccaacaccagcauccugaaccacaaguucugcaaccugagcgacgcccacaagaaggaccuguacgaccacgcccugaugagcaucaucagcaccuuccaccugagcauccccaacuucaaccaguacgaggccaugagcugcgacuucaacggcggcaagaucagcgugcaguacaaccugagccacagcuacgccaucgacgccgccaaccacugcggcaccguggccaacggcauccugcagaccuucaugagaauggccuggggcggcagcuacaucgcccuggacagcggcugcggcaacugggacugcaucaugaccagcuaccaguaccugaucauccagaacaccaccugggagaaccacugccaguucagcagacccagccccaucggcuaccugggccugcugagccagagaaccagagacaucuacaucagcagaagacgccggggcaccuucaccuggacccugagcgacagcgagggcaacgccacccccggcggcuacugccugaccagauggaugcugaucgaggccgagcugaagugcuucggcaacaccgccguggccaagugcaacgagaagcacgacgaggaguucugcgacaugcugagacuguucgacuucaacaagcaggccaucagcagacugaagagccccgcccagaugagcauccagcugaucaacaaggccgugaacgcccugaucaacgaccagcugaucaugaagaaccaccugagagacaucaugugcauccccuacugcaacuacagcaaguacugguaccugaaccacaccaucaccggcaagaccagccugcccaagugcuggcuggugagcaacggcagcuaccugaacgagacccacuucagcgacgacaucgagcagcaggccgacaacaugaucaccgagaugcugcagaaggaguacauggagagacagggcaagaccccccugggccugguggaccuguucguguucagcaccagcuucuaccugaucagcaucuuccugagacuggugaagauccccacccacagacacaucgugggcaagcccugccccaagccccacagacugaaccacaugggcaucugcagcugcggccuguacaagcagcccggcgugcccgugagauggaagagaugaggacuaguaauaaggaaacuguaugaaugucugugggcaggaagugaagagauccuucuguaaagguuuuuggaauuaugucugcugaauaauaaacuuuuuugaaauaauaaaucugguagaaaaaugagaucucaaaggcucuuuucagagccaccaaaaaaaaaaaaaaaaaaaaaaaaaaaaaaaaaaaaaaaaaaaaaaaaaaaaaaaaaaaaaaaaaaaaaaaaaaaaaaaaaaaaaaaaaaaaaaaaaaaaa

SEQ ID NO: 16173 - RNA, 1809 nt, Artificial Sequence
  mRNA product Design b-4 (hSL-A100) comprising derived and/or modified sequence from LASV(Togo/2016/7082;Clade VI)__AMR44577__GPCmut1 (opt4)
aggagagucccgcagucggcguccagcggcucugcuuguucgugugugugucguugcaggccuuauucaagcuuaccaugggccagaucaucaccuucuuccaggaggugccccacgugaucgaggaggugaugaacaucgugcugaucgcccugagccugcuggccauccugaagggcguguacaacguggccaccugcggcaucaucggccuggugaccuuccuguuccugugcggcagaagcugcagccugaucuacaagggcagcuacgagcugcagacccuggagcugaacauggagacccugaacaugaccaugccccugagcugcaccaagaacagcagccaccacuacaucagagugggcaacgagaccggccuggagcugacccugaccaacaccagcaucaucaaccacaaguucugcaaccugagcgacgcccacaagagaaaccuguacgaccacgcccugaugagcauccugagcaccuuccaccugagcauccccaacuucaaccaguacgaggccaugagcugcgacuucaacggcggcaagaucagcgugcaguacaaccugagccacgccuacgccguggacgccgccgagcacugcggcaccguggccaacggcgugcugcagaccuucaugagaauggccuggggcggcagcuacaucgcccuggacagcggcugcggcaacugggacugcaucaugaccagcuaccaguaccugaucauccagaacaccaccugggaggaccacugccaguucagcagacccagccccaucggcuaccugggccugcugagccagagaaccagagacaucuacaucagcagaagacgccggggcaccuucaccuggacccugagcgacagcgagggcaacgagacccccggcggcuacugccugaccagauggaugcugaucgaggccgagcugaagugcuucggcaacaccgccguggccaagugcaacgagaagcacgacgaggaguucugcgacaugcugagacuguucgacuucaacaagcaggccauccagagacugaagagccccgcccagaugagcauccagcugaucaacaaggccgugaacgcccugaucaacgaccagcugaucaugaagaaccaccugagagacaugaugugcauccccuacugcaacuacagcaaguacugguaccugaaccacaccagcagcggcagaaccagccugcccaagugcuggcuggugagcaacggcagcuaccugaacgagacccacuucagcgacgacaucgagcagcaggccgacaacaugaucaccgagaugcugcagaaggaguacaucgacagacagggcaagaccccccugggccugguggaccuguucguguucagcaccagcuucuaccugaucagcaucuuccugcaccugaucaagauccccacccacagacacaucgugggcaagcccugccccaagccccacagacugaaccacaugggcaucugcagcugcggccuguacaagcagcccggcgugcccaccagauggaagagaugaggacuaguaauaaggaaacuguaugaaugucugugggcaggaagugaagagauccuucuguaaagguuuuuggaauuaugucugcugaauaauaaacuuuuuugaaauaauaaaucugguagaaaaaugagaucucaaaggcucuuuucagagccaccaaaaaaaaaaaaaaaaaaaaaaaaaaaaaaaaaaaaaaaaaaaaaaaaaaaaaaaaaaaaaaaaaaaaaaaaaaaaaaaaaaaaaaaaaaaaaaaaaaaaa

SEQ ID NO: 16174 - RNA, 1809 nt, Artificial Sequence
  mRNA product Design b-4 (hSL-A100) comprising derived and/or modified sequence from LASV(KAK-428;Clade n.d. (VII))__ANH09740__GPCmut1 (opt4)
aggagagucccgcagucggcguccagcggcucugcuuguucgugugugugucguugcaggccuuauucaagcuuaccaugggccagaucgugaccuucuuccaggaggugccccacgugaucgaggaggugaugaacaucgugcugaucgcccugagccugcuggccauccugaagggccuguacaacuucgccaccugcggcgugaucggccugaucaccuuccugcugcugugcggcagaagcugcagcgccaccuacaagggccaguacgagcugcagacccuggagcugaacauggagagccugaacaugaccaugccccugagcugcaccaagaacaacagccaccacuacaucagagccggcaacaacaccggccuggagcugacccugaccaacaccagcaucaucagccacaaguucugcaaccugagcgacgcccacaagaagaaccuguacgaccacacccugaugagcaucaucaccaccuuccaccugagcauccccaacuucaaccaguacgaggccaugagcugcgacuucaacggcggcaagaucagcauccaguacaaccugagccacagcuacgccggcgacgccgcccagcacugcggcaccguggccaacggcgugcugcagaccuucaugagaauggccuggggcggcagcuaccuggcccuggacagcggcugcagaggcugggacugcaucaucagcagcuaccaguaccugaucauccagaacaccaccugggacgaccacugccaguucagcagacccagccccaucggcuaccugggcuucgugagccagaagaccagagacaucuacaucagcagaagacgccggggcaccuucaccuggacccugagcgacagcgagggccacgacaugcccggcggcuacugccugaccagauggaugcugaucgaggccgaccugaagugcuucggcaacaccgccguggccaagugcaacgagaagcacgacgaggaguucugcgacauguggagacuguucgacuucaacaagcaggccauccagagacugaaggcccccgcccagaugaacauccagcugaucaacaaggccgugaacgcccugaucaacgaccagcugaugaugaagaaccaccugagagacaucaugugcauccccuacugcaacuacagcaaguucugguaccugaacaacaccaccaccggcagaaccagccugcccagaugcuggcugaucagcaacggcagcuaccugaacgagacccacuucagcgacgacaucgagcagcaggccgacaacaugaucaccgagaugcugcagaaggaguacauggacagacagggcaagaccccccugggccugguggaccuguucguguucagcaccagcuucuaccugaucaccaucuuccugcaccuggugaagauccccacccacagacacaucgugggcaagcccugccccaagccccacagacugaaccacaugggcaucugcagcugcggccuguacaagcagcccggcgugcccgugagauggaagagaugaggacuaguaauaaggaaacuguaugaaugucugugggcaggaagugaagagauccuucuguaaagguuuuuggaauuaugucugcugaauaauaaacuuuuuugaaauaauaaaucugguagaaaaaugagaucucaaaggcucuuuucagagccaccaaaaaaaaaaaaaaaaaaaaaaaaaaaaaaaaaaaaaaaaaaaaaaaaaaaaaaaaaaaaaaaaaaaaaaaaaaaaaaaaaaaaaaaaaaaaaaaaaaaaa

SEQ ID NO: 16175 - RNA, 1809 nt, Artificial Sequence; identical to SEQ ID NO: 16169
  mRNA product Design b-4 (hSL-A100) comprising derived and/or modified sequence from LASV(Pinneo-NIG-1969;Clade I)__AIT17836__GPCmut1 (opt4)

SEQ ID NO: 16176 - RNA, 1809 nt, Artificial Sequence
  mRNA product Design b-4 (hSL-A100) comprising derived and/or modified sequence from LASV(ISTH0009-NIG-2011;Clade II)__AIT17404__GPCmut1 (opt4)
aggagagucccgcagucggcguccagcggcucugcuuguucgugugugugucguugcaggccuuauucaagcuuaccaugggccagaucaucaccuucuuccaggaggugccccacgugaucgaggaggugaugaacaucgugcugaucgcccugagccugcuggccauccugaagggcaucuacaacguggccaccugcggccuguucggccuggugagcuuccugcugcugugcggcagaagcugcagcaccaccuacaagggcguguacgagcugcagacccuggagcuggacauggccagccugaacaugaccaugccccugagcugcaccaagaacaacagccaccacuacaucauggugggcaacgagaccggccuggagcugacccugaccaacaccagcaucaucaaccacaaguucugcaaccugagcgacgcccacaagaagaaccuguacgaccacgcccugaugagcaucaucagcaccuuccaccugagcauccccaacuucaaccaguacgaggccaugagcugcgacuucaacggcggcaagaucagcgugcaguacaaccugagccacgccuacgccguggacgccgccaaccacugcggcaccaucgccaacggcgugcugcagaccuucaugagaauggccuggggcggcagcuacaucgcccuggacagcggcugcggcagcugggacugcaucaugaccagcuaccaguaccugaucauccagaacaccaccugggaggaccacugccaguucagcagacccagccccaucggcuaccugggccugcugagccagagaaccagagacaucuacaucagcagaagacgccggggcaccuucaccuggacccugagcgacagcgagggcaacgagacccccggcggcuacugccugaccagauggaugcugaucgaggccgagcugaagugcuucggcaacaccgccguggccaagugcaacgagaagcacgacgaggaguucugcgacaugcugagacuguucgacuucaacaagcaggccaucagaagacugaagacccccgcccagaugagcauccagcugaucaacaaggccgugaacgcccugaucaacgaccagcugaucaugaagaaccaccugagagacaucaugugcauccccuacugcaacuacagcaaguacugguaccugaaccacaccgugaccggcaagaccagccugcccagaugcuggcuggugagcaacggcagcuaccugaacgagacccacuucagcgacgacaucgagcagcaggccgacaacaugaucaccgagcugcugcagaaggaguacauggacagacagggcaagaccccccugggccugguggaccuguucguguucagcaccagcuucuaccugaucagcaucuuccugcaccugaucaagauccccacccacagacacaucaccggcaagcccugccccaagccccacagacugaaccacaugggcaucugcagcugcggccuguacaagcaccccggcgugcccgugaaguggaagagaugaggacuaguaauaaggaaacuguaugaaugucugugggcaggaagugaagagauccuucuguaaagguuuuuggaauuaugucugcugaauaauaaacuuuuuugaaauaauaaaucugguagaaaaaugagaucucaaaggcucuuuucagagccaccaaaaaaaaaaaaaaaaaaaaaaaaaaaaaaaaaaaaaaaaaaaaaaaaaaaaaaaaaaaaaaaaaaaaaaaaaaaaaaaaaaaaaaaaaaaaaaaaaaaaa

SEQ ID NO: 16177 - RNA, 1809 nt, Artificial Sequence
  mRNA product Design b-4 (hSL-A100) comprising derived and/or modified sequence from LASV(ISTH2010-NIG-2012;Clade II)__AIT17482__GPCmut1 (opt4)
aggagagucccgcagucggcguccagcggcucugcuuguucgugugugugucguugcaggccuuauucaagcuuaccaugggccagaucaucaccuucuuccaggaggugccccacgugaucgaggaggugaugaacaucgugcugaucgcccugagccugcuggccauccugaagggcaucuacaacguggccaccugcggccuguucggccuggugagcuuccugcugcugugcggcagaagcugcagcaccaccuacaagggcguguacgagcugcagacccuggagcuggacauggccagccugaacaugaccaugccccugagcugcaccaagaacaacagccaccacuacaucauggugggcaacgagaccggccuggagcugacccugaccaacaccagcaucaucaaccacaaguucugcaaccugagcgacgcccacaagaagaaccuguacgaccacgcccugaugagcaucaucagcaccuuccaccugagcauccccaacuucaaccaguacgaggccaugagcugcgacuucaacggcggcaagaucagcgugcaguacaaccugagccacgccuacgccguggacgccgccaaccacugcggcaccaucgccaacggcgugcugcagaccuucaugagaauggccuggggcggcagcuacaucgcccuggacagcggcugcggcagcugggacugcaucaugaccagcuaccaguaccugaucauccagaacaucaccugggaggaccacugccaguucagcagacccagccccaucggcuaccugggccugcugagccagagaaccagagacaucuacaucagcagaagacgccggggcaccuucaccuggacccugagcgacagcgagggcaacgagacccccggcggcuacugccugaccagauggaugcugaucgaggccgagcugaagugcuucggcaacaccgccguggccaagugcaacgagaagcacgacgaggaguucugcgacaugcugagacuguucgacuucaacaagcaggccaucagaagacugaagacccccgcccagaugagcauccagcugaucaacaaggccgugaacgcccugaucaacgaccagcugaucaugaagaaccaccugagagacaucaugugcauccccuacugcaacuacagcaaguacugguaccugaaccacaccgugaccggcaagaccagccugcccagaugcuggcuggugagcaacggcagcuaccugaacgagacccacuucagcgacgacaucgagcagcaggccgacaacaugaucaccgagcugcugcagaaggaguacaucgacagacagggcaagaccccccugggccugguggaccuguucguguucagcaccagcuucuaccugaucagcaucuuccugcaccuggugaagauccccacccacagacacguggugggcaagcccugccccaagccccacagacugaaccacaugggcaucugcagcugcggccuguacaagcaccccggcgugcccgugaaguggaagagaugaggacuaguaauaaggaaacuguaugaaugucugugggcaggaagugaagagauccuucuguaaagguuuuuggaauuaugucugcugaauaauaaacuuuuuugaaauaauaaaucugguagaaaaaugagaucucaaaggcucuuuucagagccaccaaaaaaaaaaaaaaaaaaaaaaaaaaaaaaaaaaaaaaaaaaaaaaaaaaaaaaaaaaaaaaaaaaaaaaaaaaaaaaaaaaaaaaaaaaaaaaaaaaaaa

SEQ ID NO: 16178 - RNA, 1809 nt, Artificial Sequence
  mRNA product Design b-4 (hSL-A100) comprising derived and/or modified sequence from LASV(Lassa virus/H.sapiens-wt/NGA/2015/ISTH_0543;Clade II)__AVO03639__GPCmut1 (opt4)
aggagagucccgcagucggcguccagcggcucugcuuguucgugugugugucguugcaggccuuauucaagcuuaccaugggccagaucaucaccuucuuccaggaggugccccacgugaucgaggaggugaugaacaucgugcugaucgcccugagccugcuggccauccugaagggcaucuacaacguggccaccugcggccuguucggccuggugagcuuccugcugcugugcggcagaagcugcagcaccaccuacaagggcguguacgagcugcagacccuggagcuggacauggccaaccugaacaugaccaugccccugagcugcaccaagaacaacagccaccacuacaucauggugggcaacgagaccggccuggagcugacccugaccaacaccagcaucaucaaccacaaguucugcaaccugagcgacgcccacaagaagaaccuguacgaccacgcccugaugagcaucaucagcaccuuccaccugagcauccccaacuucaaccaguacgaggccaugagcugcgacuucaacggcggcaagaucagcgugcaguacaaccugagccacaccuacgccguggacgccgccaaccacugcggcaccaucgccaacggcgugcugcagaccuucaugagaauggccuggggcggcagcuacaucgcccuggacagcggcugcggcagcugggacugcaucaugaccagcuaccaguaccuggugauccagaacaccaccugggaggaccacugccaguucagcagacccagccccaucggcuaccugggccugcugagccagagaaccagagacaucuacaucagcagaagacgccggggcaccuucaccuggacccugagcgacagcgagggcaacgagacccccggcggcuacugccugaccagauggaugcugaucgaggccgagcugaagugcuucggcaacaccgccguggccaagugcaacgagaagcacgacgaggaguucugcgacaugcugagacuguucgacuucaacaagcaggccaucagaagacugaagacccccgcccagaugagcauccagcugaucaacaaggccgugaacgcccugaucaacgaccagcugaucaugaagaaccaccugagagacaucaugugcauccccuacugcaacuacagcaaguacugguaccugaaccacaccgugaccggcaagaccagccugcccagaugcuggcuggugagcaacggcagcuaccugaacgagacccacuucagcgacgacaucgagcagcaggccgacaacaugaucaccgagcugcugcagaaggaguacaucgacagacagggcaagaccccccugggccugguggaccuguucguguucagcaccagcuucuaccugaucagcaucuuccugcaccuggugaagauccccacccacagacacaucaccggcaagcccugccccaagccccacagacugaaccacaugggcaucugcagcugcggccuguacaagcaccccggcgugcccgugaaguggaagagaugaggacuaguaauaaggaaacuguaugaaugucugugggcaggaagugaagagauccuucuguaaagguuuuuggaauuaugucugcugaauaauaaacuuuuuugaaauaauaaaucugguagaaaaaugagaucucaaaggcucuuuucagagccaccaaaaaaaaaaaaaaaaaaaaaaaaaaaaaaaaaaaaaaaaaaaaaaaaaaaaaaaaaaaaaaaaaaaaaaaaaaaaaaaaaaaaaaaaaaaaaaaaaaaaa

SEQ ID NO: 16179 - RNA, 1809 nt, Artificial Sequence
  mRNA product Design b-4 (hSL-A100) comprising derived and/or modified sequence from LASV(Lassa virus/H.sapiens-wt/NGA/2016/ISTH_0009;Clade II)__AVO03571__GPCmut1 (opt4)
aggagagucccgcagucggcguccagcggcucugcuuguucgugugugugucguugcaggccuuauucaagcuuaccaugggccagaucaucaccuucuuccaggaggugccccacgugaucgaggaggugaugaacaucgugcugaucgcccugagccugcuggccauccugaagggcaucuacaacguggccaccugcggccugcugggccuggugagcuuccugcugcugugcggcagaagcugcagcaccaccuacaagggcguguacgagcugcagacccuggagcuggacauggccagccugaacaugaccaugccccugagcugcaccaagaacaacagccaccacuacaucauggugggcaacgagaccggccuggagcugacccugaccaacaccagcaucaucaaccacaaguucugcaaccugagcgacgcccacaagaagaaccuguacgaccacgcccugaugagcaucaucagcaccuuccaccugagcauccccaacuucaaccaguacgaggccaugagcugcgacuucaacggcggcagaaucagcgugcaguacaaccugagccacagcuacgccguggacgccgccaaccacugcggcaccaucgccaacggcgugcugcagaccuucaugagaauggccuggggcggcagcuacaucgcccuggacagcggcugcggcagcugggacugcaucaugaccagcuaccaguaccugaucauccagaacaccaccugggaggaccacugccaguucagcagacccagccccaucggcuaccugggccugcugagccagagaaccagagacaucuacaucagcagaagacgccggggcaccuucaccuggacccugagcgacagcgagggcaacgagacccccggcggcuacugccugaccagauggaugcugaucgaggccgagcugaagugcuucggcaacaccgccguggccaagugcaacgagaagcacgacgaggaguucugcgacaugcugagacuguucgacuucaacaagcaggccaucagaagacugaagacccccgcccagaugagcauccagcugaucaacaaggccgugaacgcccugaucaacgaccagcugaucaugaagaaccaccugagagacaucaugugcauccccuacugcaacuacagcaaguacugguaccugaaccacaccgugaccggcaagaccagccugcccagaugcuggcuggugagcaacggcagcuaccugaacgagacccacuucagcgacgacaucgagcagcaggccgacaacaugaucaccgagcugcugcagaaggaguacaucgacagacagggcaagaccccccugggccugguggaccuguucguguucagcaccagcuucuaccugaucagcaucuuccugcaccuggugaagauccccacccacagacacaucaccggcaagcccugccccaagccccacagacugaaccacaugggcaucugcagcugcggccuguacaaccaccccggcgugcccgugaaguggaagagaugaggacuaguaauaaggaaacuguaugaaugucugugggcaggaagugaagagauccuucuguaaagguuuuuggaauuaugucugcugaauaauaaacuuuuuugaaauaauaaaucugguagaaaaaugagaucucaaaggcucuuuucagagccaccaaaaaaaaaaaaaaaaaaaaaaaaaaaaaaaaaaaaaaaaaaaaaaaaaaaaaaaaaaaaaaaaaaaaaaaaaaaaaaaaaaaaaaaaaaaaaaaaaaaaa

SEQ ID NO: 16180 - RNA, 1809 nt, Artificial Sequence
  mRNA product Design b-4 (hSL-A100) comprising derived and/or modified sequence from LASV(Lassa virus/H.sapiens-wt/NGA/2016/ISTH_0017;Clade II)__AVO03567__GPCmut1 (opt4)
aggagagucccgcagucggcguccagcggcucugcuuguucgugugugugucguugcaggccuuauucaagcuuaccaugggccagaucaucaccuucuuccaggaggugccccacgugaucgaggaggugaugaacaucgugcugaucgcccugagccugcuggccauccugaagggcaucuacaacguggccaccugcggccuguucggccuggugagcuuccugcugcugugcggcagaagcugcagcaccaccuacaagggcguguacgagcugcagacccuggagcuggacauggccagccugaacaugaccaugccccugagcugcaccaagaacaacagccaccacuacaucauggugggcaacgagaccggccuggagcugacccugaccaacaccagcaucaucaaccacaaguucugcaaccugagcgacgcccacaagaagaaccuguacgaccacgcccugaugagcaucaucagcaccuuccaccugagcauccccaacuucaaccaguacgaggccaugagcugcgacuucaacggcggcaagaucagcgugcaguacaaccugagccacaccuacgccaucgacgccgccaaccacugcggcaccaucgccaacggcgugcugcagaccuucaugagaauggccuggggcggcagcuacaucgcccuggacagcggcugcggcagcugggacugcaucaugaccagcuaccaguaccugaucauccagaacaccaccugggaggaccacugccaguucagcagacccagccccaucggcuaccugggccugcugagccagagaaccagagacaucuacaucagcagaagacgccggggcaccuucaccuggacccugagcgacagcgagggcaacgagacccccggcggcuacugccugaccagauggaugcugaucgaggccgagcugaagugcuucggcaacaccgccguggccaagugcaacgagaagcacgacgaggaguucugcgacaugcugagacuguucgacuucaacaagcaggccaucagaagacugaagacccccgcccagaugagcauccagcugaucaacaaggccgugaacgcccugaucaacgaccagcugaucaugaagaaccaccugagagacaucaugugcauccccuacugcaacuacagcaaguacugguaccugaaccacaccgugaccggcaagaccagccugcccagaugcuggcuggugagcaacggcagcuaccugaacgagacccacuucagcgacgacaucgagcagcaggccgacaacaugaucaccgagcugcugcagaaggaguacauggacagacagggcaagaccccccugggccugguggaccuguucguguucagcaccagcuucuaccugaucagcaucuuccugcaccuggugagaauccccacccacagacacgugaucggcaagcccugccccaagccccacagacugaaccacaugggcaucugcagcugcggccuguacaagcaccccggcgugcccgugaaguggaagagaugaggacuaguaauaaggaaacuguaugaaugucugugggcaggaagugaagagauccuucuguaaagguuuuuggaauuaugucugcugaauaauaaacuuuuuugaaauaauaaaucugguagaaaaaugagaucucaaaggcucuuuucagagccaccaaaaaaaaaaaaaaaaaaaaaaaaaaaaaaaaaaaaaaaaaaaaaaaaaaaaaaaaaaaaaaaaaaaaaaaaaaaaaaaaaaaaaaaaaaaaaaaaaaaaa

SEQ ID NO: 16181 - RNA, 1809 nt, Artificial Sequence
  mRNA product Design b-4 (hSL-A100) comprising derived and/or modified sequence from LASV(Lassa virus/H.sapiens-wt/NGA/2018/ISTH_0959;Clade II)__AVV65099__GPCmut1 (opt4)
aggagagucccgcagucggcguccagcggcucugcuuguucgugugugugucguugcaggccuuauucaagcuuaccaugggccagaucaucaccuucuuccaggaggugccccacgugaucgaggaggugaugaacaucgugcugaucgcccugagccugcuggccauccugaagggcaucuacaacguggugaccugcggccuguucggccuggugagcuuccugcugcugugcggcagaagcugcagcaccaccuacaagggcguguacgagcugcagacccuggagcuggacauggccagccugaacaugaccaugccccugagcugcaccaagaacaacagccaccacuacaucauggugggcaacgagaccggccuggagcugacccugaccaacaccagcaucaucaaccacaaguucugcaaccugagcgacgcccacaagaagaaccuguacgaccacgcccugaugagcaucaucagcaccuuccaccugagcauccccaacuucaaccaguacgaggccaugagcugcgacuucaacggcggcaagaucagcgugcaguacaaccugagccacgccuacgccaucgacgccgccaaccacugcggcaccaucgccaacggcgugcugcagaccuucaugagaauggccuggggcggcagcuacaucgcccuggacagcggcugcggcagcugggacugcaucaugaccagcuaccaguaccugaucauccagaacaccaccugggaggaccacugccaguucagcagacccagccccaucggcuaccugggccugcugagccagagaaccagagacaucuacaucagcagaagacgccggggcaccuucaccuggacccugagcgacagcgagggcaacgagacccccggcggcuacugccugaccagauggaugcugaucgaggccgagcugaagugcuucggcaacaccgccguggccaagugcaacgagaagcacgacgaggaguucugcgacaugcugagacuguucgacuucaacaagcaggccaucagaagacugaagacccccgcccagaugagcauccagcugaucaacaaggccgugaacgcccugaucaacgaccagcugaucaugaagaaccaccugagagacaucaugugcauccccuacugcaacuacagcaaguacugguaccugaaccacaccgugaccggcaagaccagccugcccagaugcuggcuggugagcaacggcagcuaccugaacgagacccacuucagcgacgacaucgagcagcaggccgacaacaugaucaccgagcugcugcagaaggaguacaucgacagacagggcaagaccccccugggccugguggaccuguucguguucagcaccagcuucuaccugaucagcaucuuccugcaccuggugaagauccccacccacagacacgugaucggcaagcccugccccaagccccacagacugaaccacaugggcaucugcagcugcggccuguacaagcaccccggcgugcccgugaaguggaagagaugaggacuaguaauaaggaaacuguaugaaugucugugggcaggaagugaagagauccuucuguaaagguuuuuggaauuaugucugcugaauaauaaacuuuuuugaaauaauaaaucugguagaaaaaugagaucucaaaggcucuuuucagagccaccaaaaaaaaaaaaaaaaaaaaaaaaaaaaaaaaaaaaaaaaaaaaaaaaaaaaaaaaaaaaaaaaaaaaaaaaaaaaaaaaaaaaaaaaaaaaaaaaaaaaa

SEQ ID NO: 16182 - RNA, 1809 nt, Artificial Sequence
  mRNA product Design b-4 (hSL-A100) comprising derived and/or modified sequence from LASV(LASV003-NIG-2008;Clade II)__AIT17580__GPCmut1 (opt4)
aggagagucccgcagucggcguccagcggcucugcuuguucgugugugugucguugcaggccuuauucaagcuuaccaugggccagaucaucaccuucuuccaggaggugccccacgugaucgaggaggugaugaacaucgugcugaucgcccugagccugcuggccauccugaagggcaucuacaacguggccaccugcggccuguucggccuggugagcuuccugcugcugugcggcagaagcugcagcaccaccuacaagggcguguacgagcugcagacccuggagcuggacauggccagccugaacaugaccaugccccugagcugcaccaagaacaacagccaccacuacaucauggugggcaacgagaccggccuggagcugacccugaccaacaccagcaucaucaaccacaaguucugcaaccugagcgacgcccacaagaagaaccuguacgaccacgcccugaugagcaucaucagcaccuuccaccugagcauccccaacuucaaccaguacgaggccaugagcugcgacuucaacggcggcaagaucagcgugcaguacaaccugagccacaccuacgccguggacgccgccaaccacugcggcaccaucgccaacggcgugcugcagaccuucaugagaauggccuggggcggcagcuacaucgcccuggacagcggcugcggcagcugggacugcaucaugaccagcuaccaguaccugaucauccagaacaccaccugggaggaccacugccaguucagcagacccagccccaucggcuaccugggccugcugagccagagaaccagagacaucuacaucagcagaagacgccggggcaccuucaccuggacccugagcgacagcgagagcaacgagacccccggcggcuacugccugaccagauggaugcugaucgaggccgagcugaagugcuucggcaacaccgccguggccaagugcaacgagaagcacgacgaggaguucugcgacaugcugagacuguucgacuucaacaagcaggccaucagaagacugaaggcccccgcccagaugagcauccagcugaucaacaaggccgugaacgcccugaucaacgaccagcugaucaugaagaaccaccugagagacaucaugugcauccccuacugcaacuacagcaaguacugguaccugaaccacaccgugaccggcagaaccagccugcccagaugcuggcuggugagcaacggcagcuaccugaacgagacccacuucagcgacgacaucgagcagcaggccgacaacaugaucaccgagcugcugcagaaggaguacauggacagacagggcaagaccccccugggccugguggaccuguucguguucagcaccagcuucuaccugaucagcaucuuccugcaccuggugaagauccccacccacagacacgugaucggcaagcccugccccaagccccacagacugaaccacaugggcaucugcagcugcggccuguacaagcaccccggcgugcccgugaaguggaagagaugaggacuaguaauaaggaaacuguaugaaugucugugggcaggaagugaagagauccuucuguaaagguuuuuggaauuaugucugcugaauaauaaacuuuuuugaaauaauaaaucugguagaaaaaugagaucucaaaggcucuuuucagagccaccaaaaaaaaaaaaaaaaaaaaaaaaaaaaaaaaaaaaaaaaaaaaaaaaaaaaaaaaaaaaaaaaaaaaaaaaaaaaaaaaaaaaaaaaaaaaaaaaaaaaa

SEQ ID NO: 16183 - RNA, 1809 nt, Artificial Sequence
  mRNA product Design b-4 (hSL-A100) comprising derived and/or modified sequence from LASV(LASV035-NIG-2009;Clade II)__AIT17588__GPCmut1 (opt4)
aggagagucccgcagucggcguccagcggcucugcuuguucgugugugugucguugcaggccuuauucaagcuuaccaugggccagaucaucaccuucuuccaggaggugccccacgugaucgaggaggugaugaacaucgugcugaucgcccugagccugcuggccauccugaagggcaucuacaacguggccaccugcggccuguucggccuggugagcuuccugcugcugugcggcagaagcugcagcaccaccuacaagggcguguacgagcugcagacccuggagcuggacauggccagccugaacaugaccaugccccugagcugcaccaagaacaacagccaccacuacaucauggugggcaacgagaccggccuggagcugacccugaccaacaccagcaucaucaaccacaaguucugcaaccugagcgacgcccacaagaagaaccuguacgaccacgcccugaugagcaucaucagcaccuuccaccugagcauccccaacuucaaccaguacgaggccaugagcugcgacuucaacggcggcaagaucagcgugcaguacaaccugagccacgccuacgccguggacgccgccaaccacugcggcaccaucgccaacggcgugcugcagaccuucaugagaauggccuggggcggcagcuacaucgcccuggacagcggcugcggcagcugggacugcaucaugaccagcuaccaguaccugaucauccagaacaccaccugggaggaccacugccaguucagcagacccagccccaucggcuaccugggccugcugagccagagaaccagagacaucuacaucagcagaagacgccggggcaccuucaccuggacccugagcgacagcgagggcaacgagacccccggcggcuacugccugaccagauggaugcugaucgaggccgagcugaagugcuucggcaacaccgccguggccaagugcaacgagaagcacgacgaggaguucugcgacaugcugagacuguucgacuucaacaagcaggccaucagaagacugaaggcccccgcccagaugagcauccagcugaucaacaaggccgugaacgcccugaucaacgaccagcugaucaugaagaaccaccugagagacaucaugugcauccccuacugcaacuacagcaaguacugguaccugaaccacaccgugaccggcaagaccagccugcccagaugcuggcuggugagcaacggcagcuaccugaacgagacccacuucagcgacgacaucgagcagcaggccgacaacaugaucaccgagcugcugcagaaggaguacaucgacagacagggcaagaccccccugggccugguggaccuguucguguucagcaccagcuucuaccugaucagcaucuuccugcaccuggugaagauccccacccacagacacgugaucggcaagcccugccccaagccccacagacugaaccacaugggcaucugcagcugcggccuguacaagcaccccggcgugcccgugaaguggaagagaugaggacuaguaauaaggaaacuguaugaaugucugugggcaggaagugaagagauccuucuguaaagguuuuuggaauuaugucugcugaauaauaaacuuuuuugaaauaauaaaucugguagaaaaaugagaucucaaaggcucuuuucagagccaccaaaaaaaaaaaaaaaaaaaaaaaaaaaaaaaaaaaaaaaaaaaaaaaaaaaaaaaaaaaaaaaaaaaaaaaaaaaaaaaaaaaaaaaaaaaaaaaaaaaaa

SEQ ID NO: 16184 - RNA, 1809 nt, Artificial Sequence
  mRNA product Design b-4 (hSL-A100) comprising derived and/or modified sequence from LASV(LASV1000-NIG-2009;Clade II)__AIT17782__GPCmut1 (opt4)
aggagagucccgcagucggcguccagcggcucugcuuguucgugugugugucguugcaggccuuauucaagcuuaccaugggccagaucaucaccuucuuccaggaggugccccacgugaucgaggaggugaugaacaucgugcugaucgcccugagccugcuggccauccugaagggcaucuacaacguggccaccugcggccuguucggccuggugagcuuccugcugcugugcggcagaagcugcagcaccaccuacaagggcguguacgagcugcagacccuggagcuggacauggccagccugaacaugaccaugccccugagcugcaccaagaacaacagccaccacuacaucauggugggcaacgagaccggccuggagcugacccugaccaacaccagcaucaucaaccacaaguucugcaaccugagcgacgcccacaagaagaaccuguacgaccacgcccugaugagcaucaucagcaccuuccaccugagcauccccaacuucaaccaguacgaggccaugagcugcgacuucaacggcggcaagaucagcgugcaguacaaccugagccacaccuacgccguggacgccgccaaccacugcggcaccaucgccaacggcgugcugcagaccuucaugagaauggccuggggcggcagcuacaucgcccuggacagcggcugcggcagcugggacugcaucaugaccagcuaccaguaccugaucauccagaacaccaccugggaggaccacugccaguucagcagacccagccccaucggcuaccugggccugcugagccagagaaccagagacaucuacaucagcagaagacgccggggcaccuucaccuggacccugagcgacagcgagggcaacgagacccccggcggcuacugccugaccagauggaugcugaucgaggccgagcugaagugcuucggcaacaccgccguggccaagugcaacgagaagcacgacgaggaguucugcgacaugcugagacuguucgacuucaacaagcaggccaucaagagacugaagacccccgcccagaugagcauccagcugaucaacaaggccgugaacgcccugaucaacgaccagcugaucaugaagaaccaccugagagacaucaugugcauccccuacugcaacuacagcaaguacugguaccugaaccacaccgugaccggcaagaccagccugcccagaugcuggcuggugagcaacggcagcuaccugaacgagacccacuucagcgacgacaucgagcagcaggccgacaacaugaucaccgagcugcugcagaaggaguacaucgacagacagggcaagaccccccugggccugguggaccuguucguguucagcaccagcuucuaccugaucagcaucuuccugcaccuggugaagauccccacccacagacacguggugggcaagcccugccccaagccccacagacugaaccacaugggcaucugcagcugcggccuguacaagcaccccggcgugcccgugaaguggaagagaugaggacuaguaauaaggaaacuguaugaaugucugugggcaggaagugaagagauccuucuguaaagguuuuuggaauuaugucugcugaauaauaaacuuuuuugaaauaauaaaucugguagaaaaaugagaucucaaaggcucuuuucagagccaccaaaaaaaaaaaaaaaaaaaaaaaaaaaaaaaaaaaaaaaaaaaaaaaaaaaaaaaaaaaaaaaaaaaaaaaaaaaaaaaaaaaaaaaaaaaaaaaaaaaaa

SEQ ID NO: 16185 - RNA, 1809 nt, Artificial Sequence
  mRNA product Design b-4 (hSL-A100) comprising derived and/or modified sequence from LASV(LASV221-NIG-2010;Clade II)__AIT17624__GPCmut1 (opt4)
aggagagucccgcagucggcguccagcggcucugcuuguucgugugugugucguugcaggccuuauucaagcuuaccaugggccagaucaucaccuucuuccaggaggugccccacgugaucgaggaggugaugaacaucgugcugaucgcccugagccugcuggccauccugaagggcaucuacaacguggccaccugcggccuguucggccuggugagcuuccugcugcugugcggcagaagcugcagcaccaccuacaagggcguguacgagcugcagacccuggagcuggacauggccagccugaacaugaccaugccccugagcugcaccaagaacaacagccaccacuacaucauggugggcaacgagaccggccuggagcugacccugaccaacaccagcaucaucaaccacaaguucugcaaccugagcgacgcccacaagaagaaccuguacgaccacgcccugaugagcaucaucagcaccuuccaccugagcauccccaacuucaaccaguacgaggccaugagcugcgacuucaacggcggcaagaucagcgugcaguacaaccugagccacaccuacgccaucgacgccgccaaccacugcggcaccaucgccaacggcgugcugcagaccuucaugagaauggccuggggcggcagcuacaucgcccuggacagcggcugcggcagcugggacugcaucaugaccagcuaccaguaccugaucauccagaacaccaccugggaggaccacugccaguucagcagacccagccccaucggcuaccugggccugcugagccagagaaccagagacaucuacaucagcagaagacgccggggcaccuucaccuggacccugagcgacagcgagggcaacgagacccccggcggcuacugccugaccagauggaugcugaucgaggccgagcugaagugcuucggcaacaccgccguggccaagugcaacgagaagcacgacgaggaguucugcgacaugcugagacuguucgacuucaacaagcaggccaucagaagacugaagacccccgcccagaugagcauccagcugaucaacaaggccgugaacgcccugaucaacgaccagcugaucaugaagaaccaccugagagacaucaugugcauccccuacugcaacuacagcaaguacugguaccugaaccacaccgugaccggcaagaccagccugcccagaugcuggcuggugagcaacggcagcuaccugaacgagacccacuucagcgacgacaucgagcagcaggccgacaacaugaucaccgagaugcugcagaaggaguacauggacagacagggcaagaccccccugggccugguggaccuguucguguucagcaccagcuucuaccugaucagcaucuuccugcaccuggugaagauccccacccacagacacgugaucggcaagcccugccccaagccccacagacugaaccacaugggcaucugcagcugcggccuguacaagcaccccggcgugcccgugaaguggaagagaugaggacuaguaauaaggaaacuguaugaaugucugugggcaggaagugaagagauccuucuguaaagguuuuuggaauuaugucugcugaauaauaaacuuuuuugaaauaauaaaucugguagaaaaaugagaucucaaaggcucuuuucagagccaccaaaaaaaaaaaaaaaaaaaaaaaaaaaaaaaaaaaaaaaaaaaaaaaaaaaaaaaaaaaaaaaaaaaaaaaaaaaaaaaaaaaaaaaaaaaaaaaaaaaaa

SEQ ID NO: 16186 - RNA, 1809 nt, Artificial Sequence
  mRNA product Design b-4 (hSL-A100) comprising derived and/or modified sequence from LASV(LASV237-NIG-2010;Clade II)__AIT17638__GPCmut1 (opt4)
aggagagucccgcagucggcguccagcggcucugcuuguucgugugugugucguugcaggccuuauucaagcuuaccaugggccagaucaucaccuucuuccaggaggugccccacgugaucgaggaggugaugaacaucgugcugaucgcccugagccugcuggccauccugaagggcaucuacaacguggccaccugcggccuguucggccuggugagcuuccugcugcugugcggcagaagcugcagcaccaccuacaagggcguguacgagcugcagacccuggagcuggacauggccagccugaacaugaccaugccccugagcugcaccaagaacaacagccaccacuacaucauggugggcaacgagaccggccuggagcugacccugaccaacaccagcaucaucaaccacaaguucugcaaccugagcgacgcccacaagaaggaccuguacgaccacgcccugaugagcaucaucagcaccuuccaccugagcauccccaacuucaaccaguacgaggccaugagcugcgacuucaacggcggcaagaucagcgugcaguacaaccugagccacaccuacgccguggacgccgccaaccacugcggcaccaucgccaacggcgugcugcagaccuucaugagaauggccuggggcggcagcuacaucgcccuggacagcggcugcggcagcugggacugcaucaugaccagcuaccaguaccugaucauccagaacaccaccugggaggaccacugccaguucagcagacccagccccaucggcuaccugggccugcugagccagagaaccagagacaucuacaucagcagaagacgccggggcaccuucaccuggacccugagcgacagcgagggcaacgagacccccggcggcuacugccugaccagauggaugcugaucgaggccgagcugaagugcuucggcaacaccgccguggccaagugcaacgagaagcacgacgaggaguucugcgacaugcugagacuguucgacuucaacaagcaggccaucagaagacugaagacccccgcccagaugagcauccagcugaucaacaaggccgugaacgcccugaucaacgaccagcugaucaugaagaaccaccugagagacaucaugugcauccccuacugcaacuacagcaaguacugguaccugaaccacaccgugaccggcaagaccagccugcccagaugcuggcuggugagcaacggcagcuaccugaacgagacccacuucagcgacgacaucgagcagcaggccgacaacaugaucaccgagcugcugcagaaggaguacauggacagacagggcaagaccccccugggccugguggaccuguucguguucagcaccagcuucuaccugaucagcaucuuccugcaccugaucaagauccccacccacagacacaucaccggcaagcccugccccaagccccacagacugaaccacaugggcaucugcagcugcggccuguacaagcaccccggcgugcccgugaaguggaagagaugaggacuaguaauaaggaaacuguaugaaugucugugggcaggaagugaagagauccuucuguaaagguuuuuggaauuaugucugcugaauaauaaacuuuuuugaaauaauaaaucugguagaaaaaugagaucucaaaggcucuuuucagagccaccaaaaaaaaaaaaaaaaaaaaaaaaaaaaaaaaaaaaaaaaaaaaaaaaaaaaaaaaaaaaaaaaaaaaaaaaaaaaaaaaaaaaaaaaaaaaaaaaaaaaa

SEQ ID NO: 16187 - RNA, 1809 nt, Artificial Sequence
  mRNA product Design b-4 (hSL-A100) comprising derived and/or modified sequence from LASV(LASV253-NIG-2011;Clade II)__AIT17670__GPCmut1 (opt4)
aggagagucccgcagucggcguccagcggcucugcuuguucgugugugugucguugcaggccuuauucaagcuuaccaugggccagaucaucaccuucuuccaggaggugccccacgugaucgaggaggugaugaacaucgugcugaucgcccugagccugcuggccauccugaagggcaucuacaacguggccaccugcggccuguucggccuggugagcuuccugcugcugugcggcagaagcugcagcaccaccuacaagggcguguacgagcugcagacccuggagcuggacauggccagccugaacaugaccaugccccugagcugcaccaagaacaacagccaccacuacaucauggugggcaacgagaccggccuggagcugacccugaccaacaccagcaucaucaaccacaaguucugcaaccugagcgacgcccacaagaagaaccuguacgaccacgcccugaugagcaucaucagcaccuuccaccugagcauccccaacuucaaccaguacgaggccaugagcugcgacuucaacggcggcaagaucagcgugcaguacaaccugagccacaccuacgccguggacgccgccaaccacugcggcaccaucgccaacggcgugcugcagaccuucaugagaauggccuggggcggcagcuacaucgcccuggacagcggcugcggcagcugggacugcaucaugaccagcuaccaguaccugaucauccagaacaccaccugggaggaccacugccaguucagcagacccagccccaucggcuaccugggccugcugagccagagaaccagagacaucuacaucagcagaagacgccggggcaccuucaccuggacccugagcgacagcgagggcaacgagacccccggcggcuacugccugaccagauggaugcugaucgaggccgagcugaagugcuucggcaacaccgccguggccaagugcaacgagaagcacgacgaggaguucugcgacaugcugagacuguucgacuucaacaagcaggccaucagaagacugaaggcccccgcccagaugagcauccagcugaucaacaaggccgugaacgcccugaucaacgaccagcugaucaugaagaaccaccugagagacaucaugugcauccccuacugcaacuacagcaaguacugguaccugaaccacaccgugaccggcagaaccagccugcccagaugcuggcuggugagcaacggcagcuaccugaacgagacccacuucagcgacgacaucgagcagcaggccgacaacaugaucaccgagcugcugcagaaggaguacaucgacagacagggcaagaccccccugggccugguggaccuguucguguucagcaccagcuucuaccugaucagcaucuuccugcaccuggugaagauccccacccacagacacaucaucggcaagcccugccccaagccccacagacugaaccacaugggcaucugcagcugcggccuguacaagcaccccggcgugcccgugaaguggaagagaugaggacuaguaauaaggaaacuguaugaaugucugugggcaggaagugaagagauccuucuguaaagguuuuuggaauuaugucugcugaauaauaaacuuuuuugaaauaauaaaucugguagaaaaaugagaucucaaaggcucuuuucagagccaccaaaaaaaaaaaaaaaaaaaaaaaaaaaaaaaaaaaaaaaaaaaaaaaaaaaaaaaaaaaaaaaaaaaaaaaaaaaaaaaaaaaaaaaaaaaaaaaaaaaaa

SEQ ID NO: 16188 - RNA, 1809 nt, Artificial Sequence
  mRNA product Design b-4 (hSL-A100) comprising derived and/or modified sequence from LASV(LASV254-NIG-2011;Clade II)__AIT17674__GPCmut1 (opt4)
aggagagucccgcagucggcguccagcggcucugcuuguucgugugugugucguugcaggccuuauucaagcuuaccaugggccagaucaucaccuucuuccaggaggugccccacgugaucgaggaggugaugaacaucgugcugaucgcccugagccugcuggccauccugaagggcaucuacaacguggccaccugcggccuguucggccuggugagcuuccugcugcugugcggcagaagcugcagcaccaccuacaagggcguguacgagcugcagacccuggagcuggacaugaccaaccugaacaugaccaugccccugagcugcaccaagaacaacagccaccacuacaucauggugggcaacgagaccggccuggagcugacccugaccaacaccagcaucaucaaccacaaguucugcaaccugagcgacgcccacaagaagaaccuguacaaccacgcccugaugagcaucaucagcaccuuccaccugagcauccccaacuucaaccaguacgaggccaugagcugcgacuucaacggcggcaagaucagcgugcaguacaaccugagccacagcuacgccguggacgccgccaaccacugcggcaccaucgccaacggcgugcugcagaccuucaugagaauggccuggggcggcagcuacaucgcccuggacagcggcugcggcaacugggacugcaucaugaccagcuaccaguaccugaucauccagaacaccaccugggaggaccacugccaguucagcagacccagccccaucggcuaccugggccugcugagccagagaaccagagacaucuacaucagcagaagacgccggggcaccuucaccuggacccugagcgacagcgagggcaacgagacccccggcggcuacugccugaccagauggaugcugaucgaggccgagcugaagugcuucggcaacaccgccguggccaagugcaacgagaagcacgacgaggaguucugcgacaugcugagacuguucgacuucaacaagcaggccaucagaagacugaagacccccgcccaggccaacauccagcugaucaacaaggccgugaacgcccugaucaacgaccagcugaucaugaagaaccaccugagagacaucaugugcauccccuacugcaacuacagcaaguacugguaccugaaccacaccgugaccggcaagaccagccugcccagaugcuggcuggugagcaacggcagcuaccugaacgagacccacuucagcgacgacaucgagcagcaggccgacaacaugaucaccgagcugcugcagaaggaguacauggacagacagggcaagaccccccugggccugguggaccuguucguguucagcaccagcuucuaccugaucagcaucuuccugcaccuggugaagauccccacccacagacacgugaucggcaagcccugccccaagccccacagacugaaccacaugggcaucugcagcugcggccuguacaagcaccccggcgugcccgugaaguggaagagaugaggacuaguaauaaggaaacuguaugaaugucugugggcaggaagugaagagauccuucuguaaagguuuuuggaauuaugucugcugaauaauaaacuuuuuugaaauaauaaaucugguagaaaaaugagaucucaaaggcucuuuucagagccaccaaaaaaaaaaaaaaaaaaaaaaaaaaaaaaaaaaaaaaaaaaaaaaaaaaaaaaaaaaaaaaaaaaaaaaaaaaaaaaaaaaaaaaaaaaaaaaaaaaaaa

SEQ ID NO: 16189 - RNA, 1809 nt, Artificial Sequence
  mRNA product Design b-4 (hSL-A100) comprising derived and/or modified sequence from LASV(Nig08-A19;Clade III)__ADU56618__GPCmut1 (opt4)
aggagagucccgcagucggcguccagcggcucugcuuguucgugugugugucguugcaggccuuauucaagcuuaccaugggccagaucgugaccuucuuccaggaggugccccacgugaucgaggaggugaugaacaucgugcugaucgcccugagcauccuggccauccugaagggccuguacaacaucgccaccugcggccugaucggccuggugaccuuccugcugcugagcggcagaagcugcagcaugaccuacaagggcguguacgagcugcagacccuggagcugaacaugaacacccugaacaugaccaugccccugagcugcaccaagaacaacagccaccacuacaucauggugggcaacgagaccggccuggagcugacccugaccaacaccagccugcugcaccacaaguucugcaaccugagcgacgcccacaagaagaaccuguacgaccacacccugaugagcaucaucagcaccuuccaccugagcauccccaacuucaaccaguacgaggccaugagcugcgacuucaacggcggcaagaucaccgugcaguacaaccugagccacagcuacgccaucgacgccgccaaccacugcggcaccguggccaacggcgugcugcagaccuucaugagaauggccuggggcggcagcuacaucgcccuggacagcggcugcggcaagugggacugcaucaugaccagcuaccaguaccugaucauccagaacaccaccugggaggaccacugccaguucagcagacccagccccaucggcuaccugggccugcugagccagagaaccagagacaucuacaucagcagaagacgccggggcaccuucaccuggacccugagcgacagcgagggcaacgagacccccggcggcuacugccugaccagauggaugcugaucgaggccgagcugaagugcuucggcaacaccgccguggccaagugcaacgagaagcacgacgaggaguucugcgacaugcugagacuguucgacuucaacaagcaggccaucagaagacugaaggcccccgcccagaugagcauccagcugaucaacaaggccgugaacgcccugaucaacgaccagcugaucaugaagaaccaccugagagacaucaugugcauccccuacugcaacuacagcaaguacugguaccugaaccacaccagcaccggcagaaccagccugcccagaugcuggcuggugagcaacggcagcuaccugaacgagacccacuucagcgacgacaucgagcagcaggccgacaacaugaucaccgagaugcugcagaaggaguaccuggacagacagggcaagaccccccugggccugguggaccuguucguguucagcaccagcuucuaccugaucagcaucuuccugcaccuggugaagauccccacccacagacacaucgugggcaagcccugccccaagccccacagacugaaccacaugggcaucugcagcugcggccuguacaagcagcccggcgugcccgugagauggaagagaugaggacuaguaauaaggaaacuguaugaaugucugugggcaggaagugaagagauccuucuguaaagguuuuuggaauuaugucugcugaauaauaaacuuuuuugaaauaauaaaucugguagaaaaaugagaucucaaaggcucuuuucagagccaccaaaaaaaaaaaaaaaaaaaaaaaaaaaaaaaaaaaaaaaaaaaaaaaaaaaaaaaaaaaaaaaaaaaaaaaaaaaaaaaaaaaaaaaaaaaaaaaaaaaaa

SEQ ID NO: 16190 - RNA, 1812 nt, Artificial Sequence
  mRNA product Design b-4 (hSL-A100) comprising derived and/or modified sequence from LASV(G1180-SLE-2010;Clade IV)__AIT17168__GPCmut1 (opt4)
aggagagucccgcagucggcguccagcggcucugcuuguucgugugugugucguugcaggccuuauucaagcuuaccaugggccagaucgugaccuucuuccaggaggugccccacgugaucgaggaggugaugaacaucgugcugaucgcccugagcauccuggccgugcugaagggccuguacaacuucgccaccugcggccuggugggccugcugaccuuccugcugcugugcggcagaagcugcaccgccagcagauacaagggcguguacgagcugcagacccuggagcugaacauggagacccugaacaugaccaugccccugagcugcaccaagaacaacagccaccacuacaucauggugggcaacgagaccggccuggagcugacccugaccaacaccagcaucaucaaccacaaguucugcaaccugagcgacgcccacaagaagaaccuguacgaccacgcccugaugagcaucaucagcaccuuccaccugagcauccccaacuucaaccaguacgaggccaugagcugcgacuucaacggcggcaagaucagcgugcaguacaaccugagccacagcuacgccggcgacgccgccaaccacugcggcaccguggccaacggcgugcugcagaccuucaugagaauggccuggggcggcagcuacaucgcccuggacagcggcugcggcagcugggacugcaucaugaccagcuaccaguaccugaucauccagaacaccaccugggaggaccacugccaguucagcagacccagccccaucggcuaccugggccugcugagccagagaaccagagacaucuacaucagcagaagacgccggggcaccuucaccuggacccugagcgacagcgagggcaaggacacccccggcggcuacugccugaccagauggaugcugaucgaggccgagcugaagugcuucggcaacaccgccguggccaagugcaacgagaagcacgacgaggaguucugcgacaugcugagacuguucgacuucaacaagcaggccauccagagacugaaggcccccgcccagaugagcauccagcugaucaacaaggccgugaacgcccugaucaacgaccagcugaucaugaagaaccaccugagagacaucaugugcauccccuacugcaacuacagcaaguacugguaccugaaccacaccaccaccggcaagaccagccugcccaagugcuggcuggugagcaacggcagcuaccugaacgagacccacuucagcgacgacaucgagcagcaggccgacaacaugaucaccgagaugcugcagaaggaguacauggagagacagggcaagaccccccugggccugguggaccuguucguguucagcaccagcuucuaccugaucagcaucuuccugcaccuggugaagauccccacccacagacacaucgugggcaagagcugccccaagccccacagacugaaccacaugggcaucugcagcugcggccuguacaagcagcccggcgugcccgugaaguggaagagaugaggacuaguaauaaggaaacuguaugaaugucugugggcaggaagugaagagauccuucuguaaagguuuuuggaauuaugucugcugaauaauaaacuuuuuugaaauaauaaaucugguagaaaaaugagaucucaaaggcucuuuucagagccaccaaaaaaaaaaaaaaaaaaaaaaaaaaaaaaaaaaaaaaaaaaaaaaaaaaaaaaaaaaaaaaaaaaaaaaaaaaaaaaaaaaaaaaaaaaaaaaaaaaaaa

SEQ ID NO: 16191 - RNA, 1812 nt, Artificial Sequence
  mRNA product Design b-4 (hSL-A100) comprising derived and/or modified sequence from LASV(G1442-SLE-2011;Clade IV)__AIT17180__GPCmut1 (opt4)
aggagagucccgcagucggcguccagcggcucugcuuguucgugugugugucguugcaggccuuauucaagcuuaccaugggccagaucgugaccuucuuccaggaggugccccacgugaucgaggaggugaugaacaucgugcugaucgcccugagcauccuggccgugcugaagggccuguacaacguggccaccugcggccugaucggccuggugaccuuccugcugcugugcggcagaagcugcaccaccacccuguacaagggcguguacgagcugcagacccuggagcugaacauggagacccugaacaugaccaugccccugagcugcaccaagaacaacagccaccacuacaucagagugggcaacgagaccggccuggagcugacccugaccaacaccagcaucaucaaccacaaguucugcaaccugagcgacgcccacaagaagaaccuguacgaccacgcccugaugagcaucaucagcaccuuccaccugagcauccccaacuucaaccaguacgaggccaugagcugcgacuucaacggcggcaagaucagcgugcaguacaaccugagccacagcuacgccggcgacgccgccaaccacugcggcaccguggccaacggcgugcugcagaccuucaugagaauggccuggggcggcagcuacaucgcccuggacagcggcugcggcaacugggacugcaucaugaccagcuaccaguaccugaucauccagaacaccaccugggacgaccacugccaguucagcagacccagccccaucggcuaccugggccugcugagccagagaaccagagacguguacaucagcagaagacgccggggcaccuucaccuggacccugagcgacagcgagggcaaggacacccccggcggcuacugccugaccagauggaugcugaucgaggccgagcugaagugcuucggcaacaccgccguggccaagugcaacgagaagcacgacgaggaguucugcgacaugcugagacuguucgacuucaacaagcaggccauccagagacugaaggcccccgcccagaugagcauccagcugaucaacaaggccgugaacgcccugaucaacgaccagcugaucaugaagaaccaccugagagacaucaugugcauccccuacugcaacuacagcaaguacugguaccugaacaacaccgccaccggcaagaccagccugcccaagugcuggcugaucagcaacggcagcuaccugaacgagacccacuucagcgacgacaucgagcaggaggccgacaacaugaucaccgagaugcugcagaaggaguacauggagagacagggcaagaccccccugggccugguggaccuguucguguucagcaccagcuucuaccugaucagcaucuuccugcaccuggugaagauccccacccacagacacaucgugggcaagagcugccccaagccccacagacugaaccacaugggcaucugcagcugcggccuguacaagcagcccggcgugcccgugagauggaagagaugaggacuaguaauaaggaaacuguaugaaugucugugggcaggaagugaagagauccuucuguaaagguuuuuggaauuaugucugcugaauaauaaacuuuuuugaaauaauaaaucugguagaaaaaugagaucucaaaggcucuuuucagagccaccaaaaaaaaaaaaaaaaaaaaaaaaaaaaaaaaaaaaaaaaaaaaaaaaaaaaaaaaaaaaaaaaaaaaaaaaaaaaaaaaaaaaaaaaaaaaaaaaaaaaa

SEQ ID NO: 16192 - RNA, 1812 nt, Artificial Sequence
  mRNA product Design b-4 (hSL-A100) comprising derived and/or modified sequence from LASV(G3010-SLE-2013;Clade IV)__AIT17344__GPCmut1 (opt4)
aggagagucccgcagucggcguccagcggcucugcuuguucgugugugugucguugcaggccuuauucaagcuuaccaugggccagaucgugaccuucuuccaggaggugccccacgugaucgaggaggugaugaacaucgugcugaucgcccugagcauccuggccgugcugaagggccuguacaacuucgccaccugcggccuggugggccuggugaccuuccugcugcugugcggcagaagcugcaccaccagccuguacaagggcguguacgagcugcagacccuggagcugaacauggagacccugaacaugaccaugccccugagcugcaccaagaacaacagccaccacuacaucauggugggcaacgagaccggccuggagcugacccugaccaacaccagcaucaucaaccacaaguucugcaaccugagcgacgcccacaagaagaaccuguacaaccacgcccugaugagcaucaucagcaccuuccaccugagcauccccaacuucaaccaguacgaggccaugagcugcgacuucaacggcggcaagaucagcgugcaguacaaccugagccacagcuacgccggcgacgccgccagccacugcggcaccguggccaacggcgugcugcagaccuucaugagaauggccuggggcggcagcuacaucgcccuggacagcggcugcggcaagugggacugcaucaugaccagcuaccaguaccugaucauccagaacaccaccugggaggaccacugccaguucagcagacccagccccaucggcuaccugggccugcugagccagagaaccagagacaucuacaucagcagaagacgccggggcaccuucaccuggacccugagcgacagcgagggcaaggacacccccggcggcuacugccugaccagauggaugcugaucgaggccgagcugaagugcuucggcaacaccgccguggccaagugcaacgagaagcacgacgaggaguucugcgacaugcugagacuguucgacuucaacaagcaggccauccagagacugaagacccccgcccagaugagcauccagcugaucaacaaggccgugaacgcccugaucaacgaccagcugaucaugaagaaccaccugagagacaucaugugcauccccuacugcaacuacagcaaguacugguaccugaaccacaccaccaccggcaagaccagccugcccaagugcuggcuggugagcaacggcagcuaccugaacgagacccacuucagcgacgacaucgagcagcaggccgacaacaugaucaccgagaugcugcagaaggaguacauggagagacagggcaagaccccccugggccugguggaccuguucguguucagcaccagcuucuaccugaucagcaucuuccugcaccuggugaagauccccacccacagacacaucgugggcaagagcugccccaagccccacagacugaaccacaugggcaucugcagcugcggccuguacaagcagcccggcgugcccgugagauggaagagaugaggacuaguaauaaggaaacuguaugaaugucugugggcaggaagugaagagauccuucuguaaagguuuuuggaauuaugucugcugaauaauaaacuuuuuugaaauaauaaaucugguagaaaaaugagaucucaaaggcucuuuucagagccaccaaaaaaaaaaaaaaaaaaaaaaaaaaaaaaaaaaaaaaaaaaaaaaaaaaaaaaaaaaaaaaaaaaaaaaaaaaaaaaaaaaaaaaaaaaaaaaaaaaaaa

SEQ ID NO: 16193 - RNA, 1812 nt, Artificial Sequence
  mRNA product Design b-4 (hSL-A100) comprising derived and/or modified sequence from LASV(G502-SLE-2009;Clade IV)__AIT17126__GPCmut1 (opt4)
aggagagucccgcagucggcguccagcggcucugcuuguucgugugugugucguugcaggccuuauucaagcuuaccaugggccagaucgugaccuucuuccaggaggugccccacgugaucgaggaggugaugaacaucgugcugaucgcccugagcauccuggccgugcugaagggccuguacaacuucgccaccugcggccuggugggccugcugaccuuccugcugcugugcggcagaagcugcaccaccggccuguacaagggcguguacgagcugcagacccuggagcugaacauggagacccugaacaugaccaugccccugagcugcaccaagaacaacagccaccacuacaucauggugggcaacgagaccggccuggagcugacccugaccaacaccagcaucaucaaccacaaguucugcaaccugagcgacgcccacaagaagaaccuguacgaccacgcccugaugagcaucaucagcaccuuccaccugagcauccccaacuucaaccaguacgaggccaugagcugcgacuucaacggcggcaagaucagcgugcaguacaaccugagccacagcuacgccggcgacgccgccgaccacugcggcaccguggccaacggcgugcugcagaccuucaugagaauggccuggggcggcagcuacaucgcccuggacagcggcugcggcagaugggacugcaucaugaccagcuaccaguaccugaucauccagaacaccaccugggaggaccacugccaguucagcagacccagccccaucggcuaccugggccugcugagccagagaaccagagacaucuacaucagcagaagacgccggggcaccuucaccuggacccugagcgacagcgagggcaaggacacccccggcggcuacugccugaccagauggaugcugaucgaggccgagcugaagugcuucggcaacaccgccguggccaagugcaacgagaagcacgacgaggaguucugcgacaugcugagacuguucgacuucaacaagcaggccauccagagacugaaggcccccgcccagaugagcauccagcugaucaacaaggccgugaacgcccugaucaacgaccagcuggugaugaagaaccaccugagagacaucaugugcauccccuacugcaacuacagcagauacugguaccugaaccacaccaccaccggcagaaccagccugcccaagugcuggcuggugagcaacggcagcuaccugaacgagacccacuucagcgacgacaucgagcagcaggccgacaacaugaucaccgagaugcugcagaaggaguacauggagagacagggcaagaccccccugggccugguggaccuguucguguucagcaccagcuucuaccugaucagcaucuuccugcaccuggugaagauccccacccacagacacaucgugggcaagagcugccccaagccccacagacugaaccacaugggcaucugcagcugcggccuguacaagcagcccggcgugcccgugaaguggaagagaugaggacuaguaauaaggaaacuguaugaaugucugugggcaggaagugaagagauccuucuguaaagguuuuuggaauuaugucugcugaauaauaaacuuuuuugaaauaauaaaucugguagaaaaaugagaucucaaaggcucuuuucagagccaccaaaaaaaaaaaaaaaaaaaaaaaaaaaaaaaaaaaaaaaaaaaaaaaaaaaaaaaaaaaaaaaaaaaaaaaaaaaaaaaaaaaaaaaaaaaaaaaaaaaaa

SEQ ID NO: 16194 - RNA, 1812 nt, Artificial Sequence
  mRNA product Design b-4 (hSL-A100) comprising derived and/or modified sequence from LASV(G733-SLE-2010;Clade IV)__AIT17154__GPCmut1 (opt4)
aggagagucccgcagucggcguccagcggcucugcuuguucgugugugugucguugcaggccuuauucaagcuuaccaugggccagaucgugaccuucuuccaggaggugccccacgugaucgaggaggugaugaacaucgugcugaucgcccugagcauccuggccgugcugaagggccuguacaacuucgccaccugcggcaucgugggccuggugagcuuccugcugcugugcggcagaagcugcaccaccagccuguacaagggcguguacgagcugcagacccuggagcugaacauggagacccugaacaugaccaugccccugagcugcaccaagaacaacagccaccacuacaucauggugggcaacgagaccggccuggagcugacccugaccaacaccagcaucaucaaccacaaguucugcaaccugagcgacgcccacaagaagaaccuguacgaccacgcccugaugagcaucaucagcaccuuccaccugagcauccccaacuucaaccaguacgaggccaugagcugcgacuucaacggcggcaagaucagcgugcaguacaaccugagccacagcuacgccggcgacgccgccaaccacugcggcaccaucgccaacggcgugcugcagaccuucaugagaauggccuggggcggcagcuacaucgcccuggacagcggcugcgacagaugggacugcaucaugaccagcuaccaguaccugaucauccagaacaccaccugggaggaccacugccaguucagcagacccagccccaucggcuaccugggccugcugagccagagaaccagagacaucuacaucagcagaagacgccggggcaccuucaccuggacccugagcgacagcgagggcaaggacacccccggcggcuacugccugaccagauggaugcugaucgaggccgagcugaagugcuucggcaacaccgccguggccaagugcaacgagaagcacgacgaggaguucugcgacaugcugagacuguucgacuucaacaagcaggccauccagagacugaaggcccccgcccagaugagcauccagcugaucaacaaggccgugaacgcccugaucaacgaccagcugaucaugaagaaccaccugagagacaucaugugcauccccuacugcaacuacagcaaguacugguaccugaaccacaccaccaccggcaagaccagccugcccaagugcuggcuggugagcaacggcagcuaccugaacgagacccacuucagcgacgacaucgagcagcaggccgacaacaugaucaccgagaugcugcagaaggaguacauggagagacagggcaagaccccccugggccugguggaccuguucguguucagcaccagcuucuaccugaucagcaucuuccugcaccuggugaagauccccacccacagacacguggugggcaagagcugccccaagccccacagacugaaccacaugggcaucugcagcugcggccuguacggccagcccggcgugcccgugaaguggaagagaugaggacuaguaauaaggaaacuguaugaaugucugugggcaggaagugaagagauccuucuguaaagguuuuuggaauuaugucugcugaauaauaaacuuuuuugaaauaauaaaucugguagaaaaaugagaucucaaaggcucuuuucagagccaccaaaaaaaaaaaaaaaaaaaaaaaaaaaaaaaaaaaaaaaaaaaaaaaaaaaaaaaaaaaaaaaaaaaaaaaaaaaaaaaaaaaaaaaaaaaaaaaaaaaaa

SEQ ID NO: 16195 - RNA, 1812 nt, Artificial Sequence
  mRNA product Design b-4 (hSL-A100) comprising derived and/or modified sequence from MOPV/LASV reassortant(IGS-1;Clade IV)__AFY05576__GPCmut1 (opt4)
aggagagucccgcagucggcguccagcggcucugcuuguucgugugugugucguugcaggccuuauucaagcuuaccaugggccagaucgugaccuucuuccaggaggugccccacgugaucgaggaggugaugaacaucgugcugaucgcccugagcgugcuggccgugcugaagggccuguacaacuucgccaccugcggccuggugggccuggugaccuuccugcugcugugcggcagaagcugcaccaccagccuguacaagggcguguacgagcugcagacccuggagcugaacauggagacccugaacaugaccaugccccugagcugcaccaagaacaacagccaccacuacaucauggugggcaacgagaccggccuggagcugacccugaccaacaccagcaucaucaaccacaaguucugcaaccugagcgacgcccacaagaagaaccuguacgaccacgcccugaugagcaucaucagcaccuuccaccugagcauccccaacuucaaccaguacgaggccaugagcugcgacuucaacggcggcaagaucagcgugcaguacaaccugagccacagcuacgccggcgacgccgccaaccacugcggcaccguggccaacggcgugcugcagaccuucaugagaauggccuggggcggcagcuacaucgcccuggacagcggcugcggcaacugggacugcaucaugaccagcuaccaguaccugaucauccagaacaccaccugggaggaccacugccaguucagcagacccagccccaucggcuaccugggccugcugagccagagaaccagagacaucuacaucagcagaagacgccggggcaccuucaccuggacccugagcgacagcgagggcgaggacacccccggcggcuacugccugaccagauggaugcugaucgaggccgagcugaagugcuucggcaacaccgccguggccaagugcaacgagaagcacgacgaggaguucugcgacaugcugagacuguucgacuucaacaagcaggccauccagagacugaaggcccccgcccagaugagcauccagcugaucaacaaggccgugaacgcccugaucaacgaccagcugaucaugaagaaccaccugagagacaucaugugcauccccuacugcaacuacagcaaguacugguaccugaaccacaccaccaccggcagaaccagccugcccaagugcuggcuggugagcaacggcagcuaccugaacgagacccacuucagcgacgacaucgagcagcaggccgacaacaugaucaccgagaugcugcagaaggaguacauggagagacagggcaagaccccccugggccugguggaccuguucguguucagcaccagcuucuaccugaucagcaucuuccugcaccuggugaagauccccacccacagacacaucgugggcaagagcugccccaagccccacagacugaaccacaugggcaucugcagcugcggccuguacaagcagcccggcgugcccgugaaguggaagagaugaggacuaguaauaaggaaacuguaugaaugucugugggcaggaagugaagagauccuucuguaaagguuuuuggaauuaugucugcugaauaauaaacuuuuuugaaauaauaaaucugguagaaaaaugagaucucaaaggcucuuuucagagccaccaaaaaaaaaaaaaaaaaaaaaaaaaaaaaaaaaaaaaaaaaaaaaaaaaaaaaaaaaaaaaaaaaaaaaaaaaaaaaaaaaaaaaaaaaaaaaaaaaaaaa

SEQ ID NO: 16196 - RNA, 1812 nt, Artificial Sequence
  mRNA product Design b-4 (hSL-A100) comprising derived and/or modified sequence from LASV(LM765-SLE-2012;Clade IV)__AIT17814__GPCmut1 (opt4)
aggagagucccgcagucggcguccagcggcucugcuuguucgugugugugucguugcaggccuuauucaagcuuaccaugggccagaucgugaccuucuuccaggaggugccccacgugaucgaggaggugaugaacaucgugcugaucgcccugagcauccuggccgugcugaagggccuguacaacuucgccaccugcggccuggugggccuggugaccuuccugcugcugugcggcagaagcugcaccaccagccuguacaagggcguguacgagcugcagacccuggagcugaacauggagacccugaacaugaccaugccccugagcugcaccaagaacaacagccaccacuacaucauggugggcaacgagaccggccuggagcugacccugaccaacaccagcaucaucgaccacaaguucugcaaccugagcgacgcccacagaaagaaccuguacgaccacgcccugaugagcaucaucagcaccuuccaccugagcauccccaacuucaaccaguacgaggccaugagcugcgacuucaacggcggcaagaucagcgugcaguacaaccugagccacagcuacgccaaggacgccgccgaccacugcggcaccguggccaacggcgugcugcagaccuucaugagaauggccuggggcggcagcuacaucgcccuggacagcggcugcggcagaugggacugcaucaugaccagcuaccaguaccugaucauccagaacaccaccugggaggaccacugccaguucagcagacccagccccaucggcuaccugggccugcugagccagagaaccagagacaucuacaucagcagaagacgccggggcaccuucaccuggacccugagcgacagcgagggcaaggacacccccggcggcuacugccugaccagauggaugcugaucgaggccgagcugaagugcuucggcaacaccgccguggccaagugcaacgagaagcacgacgaggaguucugcgacaugcugagacuguucgacuucaacaagcaggccauccagagacugaaggcccccgcccagaugagcauccagcugaucaacaaggccgugaacgcccugaucaacgaccagcugaucaugaagaaccaccugagagacaucaugugcauccccuacugcaacuacagcaaguacugguaccugaaccacaccaccaccggcaagaccagccugcccaagugcuggcuggugagcaacggcagcuaccugaacgagacccacuucagcgacgacaucgagcagcaggccgacaacaugaucaccgagaugcugcagaaggaguacauggagagacagggcaagaccccccugggccugguggaccuguucguguucagcaccagcuucuaccugaucagcaucuuccugcaccuggugaagauccccacccacagacacaucgugggcaagcccugccccaagccccacagacugaaccacaugggcaucugcagcugcggccuguacaagcagcccggcgugcccgugaaguggaagagaugaggacuaguaauaaggaaacuguaugaaugucugugggcaggaagugaagagauccuucuguaaagguuuuuggaauuaugucugcugaauaauaaacuuuuuugaaauaauaaaucugguagaaaaaugagaucucaaaggcucuuuucagagccaccaaaaaaaaaaaaaaaaaaaaaaaaaaaaaaaaaaaaaaaaaaaaaaaaaaaaaaaaaaaaaaaaaaaaaaaaaaaaaaaaaaaaaaaaaaaaaaaaaaaaa

SEQ ID NO: 16197 - RNA, 1812 nt, Artificial Sequence
  mRNA product Design b-4 (hSL-A100) comprising derived and/or modified sequence from LASV(LM776-SLE-2012;Clade IV)__AIT17824__GPCmut1 (opt4)
aggagagucccgcagucggcguccagcggcucugcuuguucgugugugugucguugcaggccuuauucaagcuuaccaugggccagaucgugaccuucuuccaggaggugccccacgugaucgaggaggugaugaacaucgugcugaucgcccugagcauccuggccgugcugaagggccuguacaacuucgccaccugcggccuggugggccuggugaccuuccugcugcugugcggcagaagcugcaccaccagcguguacaagggcguguacgagcugcagacccuggagcugaacauggagacccugaacaugaccaugccccugagcugcaccaagaacaacagccaccacuacaucauggugggcaacgagaccggccuggagcugacccugaccaacaccagcaucaucaaccacaaguucugcaaccugagcgacgcccacaagaagaaccuguacgaccacgcccugaugagcaucaucagcaccuuccaccugagcauccccaacuucaaccaguacgaggccaugagcugcgacuucaacggcggcaagaucagcgugcaguacaaccugagccacagcuacgccggcgacgccgccaaccacugcggcaccguggccaacggcgugcugcagaccuucaugagaauggccuggggcggcagcuacaucgcccuggacagcggcugcggcaagugggacugcaucaugaccagcuaccaguaccugaucauccagaacaccaccugggaggaccacugccaguucagcagacccagccccaucggcuaccugggccugcugagccagagaaccagagacaucuacaucagcagaagacgccggggcaccuucaccuggacccugagcgacagcgagggcaaggacacccccggcggcuacugccugaccagauggaugcugaucgaggccgagcugaagugcuucggcaacaccgccguggccaagugcaacgagaagcacgacgaggaguucugcgacaugcugagacuguucgacuucaacaagcaggccauccagagacugaaggcccccgcccagaugagcauccagcugaucaacaaggccgugaacgcccugaucaacgaccagcugaucaugaagaaccaccugagagacaucaugugcauccccuacugcaacuacagcaaguacugguaccugaaccacaccaccaccggcaagaccagccugcccaagugcuggcuggugagcaacggcagcuaccugaacgagacccacuucagcgacgacaucgagcagcaggccgacaacaugaucaccgagaugcugcagaaggaguacauggagagacagggcaagaccccccugggccugguggaccuguucguguucagcaccagcuucuaccugaucagcaucuuccugcaccuggugaagauccccacccacagacacaucgugggcaagagcugccccaagccccacagacugaaccacaugggcaucugcagcugcggccuguacaagcagcccggcgugcccgugagauggaagagaugaggacuaguaauaaggaaacuguaugaaugucugugggcaggaagugaagagauccuucuguaaagguuuuuggaauuaugucugcugaauaauaaacuuuuuugaaauaauaaaucugguagaaaaaugagaucucaaaggcucuuuucagagccaccaaaaaaaaaaaaaaaaaaaaaaaaaaaaaaaaaaaaaaaaaaaaaaaaaaaaaaaaaaaaaaaaaaaaaaaaaaaaaaaaaaaaaaaaaaaaaaaaaaaaa

SEQ ID NO: 16198 - RNA, 1812 nt, Artificial Sequence
  mRNA product Design b-4 (hSL-A100) comprising derived and/or modified sequence from LASV(Mad39;Clade IV)__ANH09722__GPCmut1 (opt4)
aggagagucccgcagucggcguccagcggcucugcuuguucgugugugugucguugcaggccuuauucaagcuuaccaugggccagaucgugaccuucuuccaggaggugccccacgugaucgaggaggugaugaacaucgugcugaucgcccugagcauccuggccgugcugaagggccuguacaacguggccaccugcggccugaucggccuggugaccuuccugcugcugugcggcagaagcugcaccaccacccuguacaagggcguguacgagcugcaggcccuggagcugaacauggagacccugaacaugaccaugccccugagcugcaccaagaacaacagccaccacuacaucagagugggcaacgagaccggccuggagcugacccugaccaacaccagccugaucaaccacaaguucugcaaccugagcgacgcccacaagaagaaccuguacgaccacgcccugaugagcaucaucagcaccuuccaccugagcauccccaacuucaaccaguacgaggccaugagcugcgacuucaacgacggcaagaucagcgugcaguacaaccugagccacaccuacgccggcgacaccgccaaccacugcggcaccguggccaacggcgugcugcagaccuucaugagaauggccuggggcggcagcuacaucgcccuggacagcggcugcggcggcugggacugcaucaugaccagcuaccaguaccugaucauccagaacaccaccugggaggaccacugccaguucagcagacccagccccaucggcuaccugggccugcugagccagagaaccagagacaucuacaucagcagaagacgccggggcaccuucaccuggacccugagcgacagcgagggcaaggacacccccggcggcuacugccugaccagauggaugcugaucgaggccgagcugaagugcuucggcaacaccgccguggccaagugcaacgagaagcacgacgaggaguucugcgacaugcugagacuguucgacuucaacaagcaggccauccagagacugaaggcccccgcccagaugagcauccagcugaucaacaaggccgugaacgcccugaucaacgaccagcugaucaugaagaaccaccugagagacaucaugugcauccccuacugcaacuacagcaaguacugguaccugaaccacaccgugaccggcaagaccagccugcccaagugcuggcuggugagcaacggcagcuaccugaacgagacccacuucagcgacgacaucgagcagcaggccgacaacaugaucaccgagaugcugcagaaggaguacauggagagacagggcaagaccccccugggccugguggaccuguucguguucagcaccagcuucuaccugaucagcaucuuccugcaccuggugaagauccccacccacagacacguggugggcaagcccugccccaagccccacagacugaaccacaugggcaucugcagcugcggcuucuacaagcagcccggcgugcccgugagauggaagagaugaggacuaguaauaaggaaacuguaugaaugucugugggcaggaagugaagagauccuucuguaaagguuuuuggaauuaugucugcugaauaauaaacuuuuuugaaauaauaaaucugguagaaaaaugagaucucaaaggcucuuuucagagccaccaaaaaaaaaaaaaaaaaaaaaaaaaaaaaaaaaaaaaaaaaaaaaaaaaaaaaaaaaaaaaaaaaaaaaaaaaaaaaaaaaaaaaaaaaaaaaaaaaaaaa

SEQ ID NO: 16199 - RNA, 1812 nt, Artificial Sequence
  mRNA product Design b-4 (hSL-A100) comprising derived and/or modified sequence from LASV(Z0947-SLE-2011;Clade IV)__AIT17840__GPCmut1 (opt4)
aggagagucccgcagucggcguccagcggcucugcuuguucgugugugugucguugcaggccuuauucaagcuuaccaugggccagaucgugaccuucuuccaggaggugccccacgugaucgaggaggugaugaacaucgugcugaucgcccugagcauccuggccgugcugaagggccuguacaacuucgccaccugcggccuggugggccuggugaccuuccugcugcugugcggcagaagcugcaccaucagccuguacaagggcguguacgagcugcagacccuggagcugaacauggagacccugaacaugaccaugccccugagcugcaccaagaacaacagccaccacuacaucauggugggcaacgagaccggccuggagcugacccugaccaacaccagcaucaucaaccacaaguucugcaaccugagcgacgcccacaagaagaaccuguacgaccacgcccugaugagcaucaucagcaccuuccaccugagcauccccaacuucaaccaguacgaggccaugagcugcgacuucaacggcggcaagaucagcgugcaguacaaccugagccacagcuacgccggcgacgccgccaaccacugcggcaccguggccaacggcgugcugcagaccuucaugagaauggccuggggcggcagcuacaucgcccuggacagcggcugcgacagaugggacugcaucaugaccagcuaccaguaccugaucauccagaacaccaccugggaggaccacugccaguucagcagacccagccccaucggcuaccugggccugcugagccagagaaccagagacaucuacaucagcagaagacgccggggcaccuucaccuggacccugagcgacagcgagggcaaggacacccccggcggcuacugccugaccagauggaugcugaucgaggccgagcugaagugcuucggcaacaccgccguggccaagugcaacgagaagcacgacgaggaguucugcgacaugcugagacuguucgacuucaacaagcaggccauccagagacugaaggcccccgcccagaugagcauccagcugaucaacaaggccgugaacgcccugaucaacgaccagcugaucaugaagaaccaccugagagacaucaugugcauccccuacugcaacuacagcaaguacugguaccugaaccacaccaccaccggcaagaccagccugcccaagugcuggcuggugagcaacggcagcuaccugaacgagacccacuucagcgacgacaucgagcagcaggccgacaacaugaucaccgagaugcugcagaaggaguacauggagagacagggcaagaccccccugggccugguggaccuguucguguucagcaccagcuucuaccugaucagcaucuuccugcaccuggugaagauccccacccacagacacaucgugggcaagcccugccccaagccccacagacugaaccacaugggcaucugcagcugcggccuguacaagcagcccggcgugcccgugaaguggaagagaugaggacuaguaauaaggaaacuguaugaaugucugugggcaggaagugaagagauccuucuguaaagguuuuuggaauuaugucugcugaauaauaaacuuuuuugaaauaauaaaucugguagaaaaaugagaucucaaaggcucuuuucagagccaccaaaaaaaaaaaaaaaaaaaaaaaaaaaaaaaaaaaaaaaaaaaaaaaaaaaaaaaaaaaaaaaaaaaaaaaaaaaaaaaaaaaaaaaaaaaaaaaaaaaaa

SEQ ID NO: 16200 - RNA, 1812 nt, Artificial Sequence
  mRNA product Design b-4 (hSL-A100) comprising derived and/or modified sequence from LASV(Josiah;Clade IV)__NP_694870__GPCmut1 (opt5)
aggagagucccgcagucggcguccagcggcucugcuuguucgugugugugucguugcaggccuuauucaagcuuaccaugggccagaucgugaccuucuuucaagaggucccccacguuauugaagaggugaugaacaucgugcugauugcccucagcguccuggcugugcuuaaggggcuguacaauuucgccacaugcggacucguuggccuggugacguuucuucugcucugugggagauccugcaccacaucucuguauaaaggagucuacgaacugcagacccucgagcugaacauggaaacacuuaauaugaccaugccucugagcuguacaaagaacaauucccaucacuauaucauggugggcaacgagaccgggcucgagcugacgcuuaccaauacaucuauuaucaaccauaaauucugcaaucugagcgacgcgcacaagaaaaaccucuacgaucaugcucugauguccaucauuucuaccuuucaccugagcaucccgaauuucaaccaguaugaagccauguccugugacuuuaauggaggcaagauuagcguucaguacaaccucucucacuccuaugccggcgaugcugccaaucauugcgggacaguggcuaacggaguccugcaaaccuucaugcggauggccuggggcgggagcuacaucgcgcuugacucuggaugcggcaacugggauuguauuaugacguccuaccaguaucugaucauucagaauacaaccugggaggaccacugccaguuuagcagacccucuccuaucggguaccucggacugcuuucccaacggacacgcgauaucuauauuagcagacggcgccggggcaccuucaccuggacacuguccgacucugaaggcaaggauacgcccgggggauacugucugacccgcuggaugcucaucgaggccgagcugaaaugcuuuggcaacacagcuguggccaaguguaaugaaaaacaugacgaggaguucugcgauaugcuuagacuguuugacuucaacaagcaggcuauucagcggcucaaagcccccgcgcagaugagcauccaacugauuaauaaggccgugaacgcucuuaucaaugaucagcugaucaugaagaaccaccuccgcgacauuaugugcaucccuuauugcaauuacuccaaauauugguaccugaaccacaccacaaccggaagaacgagccugcccaaguguuggcucgucucuaauggcuccuaccugaacgaaacacauuucagcgacgauauugagcagcaagccgacaauaugaucaccgagaugcuucagaaagaauauauggagcggcaggggaagaccccucugggacucguugaucuguuuguguucucuaccagcuuuuaccugauuuccaucuuccuucaccucgugaaaaucccgacacaucgccacauugucggcaagucuugccccaaaccucauagacugaaccacaugggcaucuguagcugcgggcuguauaagcagcccggagugccuguuaaguggaaacggugaggacuaguaauaaggaaacuguaugaaugucugugggcaggaagugaagagauccuucuguaaagguuuuuggaauuaugucugcugaauaauaaacuuuuuugaaauaauaaaucugguagaaaaaugagaucucaaaggcucuuuucagagccaccaaaaaaaaaaaaaaaaaaaaaaaaaaaaaaaaaaaaaaaaaaaaaaaaaaaaaaaaaaaaaaaaaaaaaaaaaaaaaaaaaaaaaaaaaaaaaaaaaaaaa

SEQ ID NO: 16201 - RNA, 1809 nt, Artificial Sequence
  mRNA product Design b-4 (hSL-A100) comprising derived and/or modified sequence from LASV(LP;Clade I)__AAF86701__GPCmut1 (opt5)
aggagagucccgcagucggcguccagcggcucugcuuguucgugugugugucguugcaggccuuauucaagcuuaccaugggccagaucauuaccuucuuucaagaggugccccacgucaucgaagagguuaugaacauugugcugaucgcccucagccugcuugcuauucugaaggggcucuacaauaucgccacaugcggaaucauuggccugguggcguuccuuuuucugugugggaaauccugcucucucacgcugaagggaggcuaugaacugcagacccucgagcugaacauggaaacacuuaauaugaccaugccucugagcuguaccaaaaacuccucucaucacuacaucagagucgggaaugagacaggacucgagcugacacuuaccaacacgagcauuaucaaucauaaguucugcaaccuguccgacgcucacaaaaagaaucucuaugaucaugcccugaugucuauuaucagcaccuuucaccuguccauuccgaacuucaaucaguacgaagccaugagcugugacuuuaacggcggcaagaucucugugcaguauaaucucucccacagcuacgcuggggaugccgcugagcauugcggaacaguugccaacggcgugcugcaaaccuucaugcggauggcguggggagggcgcuauaucgcccuugacucuggcugcgggaauugggauuguauuaugacauccuaccaguaccugaucauucagaacaccacgugggaagaccacugccaguuuagcagacccucuccuaucggauaucucggccugcuuucccaacggacacgcgauauuuacaucagcagacggcgccggggcaccuucacauggacccuguccgacucugaggggaacgagacccccggaggcuauugucugacacgcuggaugcucaucgaagcugagcugaagugcuuugggaauacggccgucgcuaaauguaacgaaaagcaugaugaggaguucugcgacaugcuuagacuguuugauuucaauaaacaggccauucggcgccucaaggcgcccgcccagaugagcauccagcugauuaacaaggcugugaaugcccuuaucaacgaccaacugauuaugaaaaaucaccucagagauaucaugugcaucccuuacugcaacuauuccaaguacugguaucugaaucacaccagcucuggccggacaucccugcccaaauguuggcucauuagcaacgggucuuaccugaaugagacccaguucagcgacgacaucgaacagcaagcugauaacaugauuacagagaugcuucagaaggaauacaucgagcgccagggaaaaaccccucugggccucguugacauuuuuaucuucuccacgucuuuuuaucugauuagcaucuuccugcaucuuaucaagauuccgacacacagacauaucgugggcaaacccugcccuaagccccaccggcucaaucauaugggggucuguuccugcggacuguacaagcacccuggcgugcccaccaaauggaagcgcugaggacuaguaauaaggaaacuguaugaaugucugugggcaggaagugaagagauccuucuguaaagguuuuuggaauuaugucugcugaauaauaaacuuuuuugaaauaauaaaucugguagaaaaaugagaucucaaaggcucuuuucagagccaccaaaaaaaaaaaaaaaaaaaaaaaaaaaaaaaaaaaaaaaaaaaaaaaaaaaaaaaaaaaaaaaaaaaaaaaaaaaaaaaaaaaaaaaaaaaaaaaaaaaaa

SEQ ID NO: 16202 - RNA, 1809 nt, Artificial Sequence
  mRNA product Design b-4 (hSL-A100) comprising derived and/or modified sequence from LASV(803213;Clade II)__AAF86703__GPCmut1 (opt5)
aggagagucccgcagucggcguccagcggcucugcuuguucgugugugugucguugcaggccuuauucaagcuuaccaugggccagaucauuaccuucuuucaagaggugccccacgucaucgaagagguuaugaacauugugcugaucgcccucagccugcuugcuauucugaaggggaucuacaauguggccacaugcggacucuucggccugaucuccuuucuucugcucugugggagaucuugcagcgucacguauaaaggaguguacgaacugcagacccuggagcucaacauggcgaaucugaacaugacaaugccucuuuccuguaccaagaauaacucucaucacuauauuaugguuggcaaugaaacagggcuggagcucacccugacaaacaccagcaucauuaaucauaaauucugcaaccuuuccgacgcucacaagaaaaaucuguacgaucaugcccucaugucuaucauuagcacguuucaccuguccaucccgaacuucaaucaguaugaggccaugagcugugacuuuaacggaggcaagauuucugugcaguacaaucugucccacagcuucgcugucgaugccgcuaaccauugcggcaccaucgccaacggggugcuccaaacauuuaugcggauggcguggggaggcucuuauaucgcccuggacuccgggugcggaaauugggauuguauuaugaccagcuaccaguaccuuaucauucagaacacaaccugggaagaccacugccaguucucucgccccuccccuaucggcuaucuggggcuccugagccaaagaacgcgggauauuuacaucucccgcagacgccggggaacauuuaccuggacacucucugacagcgagggcaaugaagcucccggcggguauugucugacccgguggaugcugaucgaggccgagcucaaaugcuucggaaacaccgcuguugccaaguguaaugaaaaacaugaugaggaauuuugcgacaugcugcgccuuuucgauuucaacaagcaggcgauuaaaagacugaagacacccgcccagauguccauccagcucauuaauaaggcugugaacgcccugaucaaugaccaacuuauuaugaaaaaccaucugcgggauaucaugugcaucccuuacugcaauuauagccgcuacugguaucucaaccacacggucaccgggaagacaucucugcccagauguuggcugguguccaauggaagcuaccucaacgaaacccacuuuucugacgacauugagcagcaggcugauaauaugaucacagagaugcugcaaaaagaauacauggaccggcagggcaagaccccucuugggcugguggaucucuucgucuuuagcacguccuucuaucugauuucuaucuuucugcaccuuguuaaaauuccgacacaucgccacaucgugggaaagcccugcccuaaaccccauagacucaaccacaugggcauuuguagcugcggccuguacaagcacccuggggugcccgucaaguggaaacggugaggacuaguaauaaggaaacuguaugaaugucugugggcaggaagugaagagauccuucuguaaagguuuuuggaauuaugucugcugaauaauaaacuuuuuugaaauaauaaaucugguagaaaaaugagaucucaaaggcucuuuucagagccaccaaaaaaaaaaaaaaaaaaaaaaaaaaaaaaaaaaaaaaaaaaaaaaaaaaaaaaaaaaaaaaaaaaaaaaaaaaaaaaaaaaaaaaaaaaaaaaaaaaaaa

SEQ ID NO: 16203 - RNA, 1809 nt, Artificial Sequence
  mRNA product Design b-4 (hSL-A100) comprising derived and/or modified sequence from LASV(GA391;Clade III)__CAA36645__GPCmut1 (opt5)
aggagagucccgcagucggcguccagcggcucugcuuguucgugugugugucguugcaggccuuauucaagcuuaccaugggccagaucgugaccuucuuucaagaggucccccacguuauugaagaggugaugaacaucgugcugauugcccucagcauccuggcuauucuuaaggggcuguacaaugucgccacaugcggacucaucggccuggugacguuccuucugcucuccgggagaucuuguagccugaucuauaaaggaaccuacgaacugcagacacucgagcugaacauggaaacccuuaauaugacaaugccucuguccugcaccaagaacaauucucaucacuauauucggguuggcaacgagacagggcucgagcugacccuuacgaauaccagcauccugaaccauaaauuuuguaaucucuccgacgcgcacaagcgcaaccuguacgaucauucucugaugagcauuaucuccacauuccaccucagcauuccgaauuuuaaccaguaugaagcuaugucuugcgacuucaauggaggcaaaaucaccgugcaguacaaccugucccacagcuuugccgucgaugccgcuggccauugugggacacuugccaauggagugcugcaaaccuucaugagaauggcuuggggcgggucuuauauugcccucgacuccggaugcggcaacugggauugcaucaugacgagcuaccaguaccugaucauucagaacacaaccugggacgaucacugucaguuuucucgccccuccccuaucggguaucuuggacugcucagccaaagaacacgggacauuuacaucucccgcagacgccggggcaccuucaccuggacacucucugauagcgagggcaaugaaacgcccgggggauauugccugacccgguggaugcuuauugaggcggagcugaaguguuuuggcaacacagccguugcuaagugcaaugaaaaacaugacgaggaguucugugauaugcuccgccuguuugacuucaacaagcaggccaucagacggcuuaaaacccccgcucagauguccauccagcugauuaauaaggccgugaacgcgcucaucaaugaucaacugauuaugaaaaaccaucugcgcgacaucaugugcauuccuuacugcaauuauagcagauacugguaucucaaccacacaucuaccggaaagacgucccugccccggugcuggcuuaucagcaauggcucuuaccugaacgaaacaaaguucagcgacgauaucgagcagcaggccgacaauaugauuaccgagaugcuccaaaaagaauacaucgaucgccaggggaagaccccucugggacuggucgaccuuuuuguguucuccacaucuuuuuaucucauuagcaucuuccugcaccuggugaaaauuccgacccacagacauaucgucggcaagcccuguccuaaaccccaccggcucaaccauaugggcauuugcuccugugggcuguacaagcagccuggaguucccgugagauggaaacgcugaggacuaguaauaaggaaacuguaugaaugucugugggcaggaagugaagagauccuucuguaaagguuuuuggaauuaugucugcugaauaauaaacuuuuuugaaauaauaaaucugguagaaaaaugagaucucaaaggcucuuuucagagccaccaaaaaaaaaaaaaaaaaaaaaaaaaaaaaaaaaaaaaaaaaaaaaaaaaaaaaaaaaaaaaaaaaaaaaaaaaaaaaaaaaaaaaaaaaaaaaaaaaaaaa

SEQ ID NO: 16204 - RNA, 1812 nt, Artificial Sequence
  mRNA product Design b-4 (hSL-A100) comprising derived and/or modified sequence from LASV(AV;Clade V)__CCA30314__GPCmut1 (opt5)
aggagagucccgcagucggcguccagcggcucugcuuguucgugugugugucguugcaggccuuauucaagcuuaccaugggccagaucgugaccuucuuucaagaggucccccacguuauugaagaggugaugaacaucgugcugauugcccucagcauccuggcuguccuuaaggggcuguacaauauugccacaugcggacucaucggccugaucacguuccuucugcucugugggagauccugcucuagcaaccuguauaaaggaguguacgaacugcagucccucgaccugaauauggagacccuuaacaugacaaugccucugucuuguaccaagaauaacagccaucacuauauucggguuggcaaugauacagggcucgaacugacccuuacaaacaccuccauccugaaucauaaauuuugcaaccucucugacgcgcacaagaaagaucuguacgaccaugcucugaugagcauuaucuccacguuccaccucagcauuccgaauuuuaaccaguaugaggccaugucuugugauuucaauggaggcaagaucuccgugcaguacaaccugagccacucuuaugccauugacgcugccaaucauugcggcaccgucgcuaacgggauccuucaaacauuuaugcgcauggccuggggaggcuccuacaucgcgcuggauagcgggugcggaaacugggacuguauuaugaccucuuaccaguaucucaucauucagaauacaaccugggagaaccacugccaguucucccggcccagcccuaucggcuaccuggggcuucugucccaacgcacgagagauauuuauaucucucggcgccgccggggaacauuuaccuggacacugagcgacuccgaaggcaaugccacccccggcggguacugucucaccagauggaugcugaucgaggcugaacuuaagugcuucggaaacacagccguggcuaaauguaaugagaagcaugaugaggaauuuugcgacaugcugcgccucuucgauuuuaacaaacaggccauuagccggcugaagucucccgcgcagauguccauccagcuuauuaauaaagccguuaacgcucugaucaaugaccaacucauuaugaagaaccaccugagagacaucaugugcaucccuuauugcaauuacagcaaguauugguaccugaaccacacgauuaccgggaaaacaucucuccccaaguguuggcuggugagcaauggauccuaccuuaacgaaacccauuucucugaugacaucgagcagcaggccgauaauaugauuacagaaaugcugcaaaaagaguauauggagcggcagggcaagaccccucucgggcuggucgaccuguucguguuuagcacguccuucuaccuuaucagcauuuuucuccgccuggugaaaaucccgacacacagacauauugucggaaagcccugcccuaaaccccaccggcugaaccauaugggcaucuguucuugcggccucuauaagcagccugggguucccgugcgcuggaagagaugaggacuaguaauaaggaaacuguaugaaugucugugggcaggaagugaagagauccuucuguaaagguuuuuggaauuaugucugcugaauaauaaacuuuuuugaaauaauaaaucugguagaaaaaugagaucucaaaggcucuuuucagagccaccaaaaaaaaaaaaaaaaaaaaaaaaaaaaaaaaaaaaaaaaaaaaaaaaaaaaaaaaaaaaaaaaaaaaaaaaaaaaaaaaaaaaaaaaaaaaaaaaaaaaa

SEQ ID NO: 16205 - RNA, 1809 nt, Artificial Sequence
  mRNA product Design b-4 (hSL-A100) comprising derived and/or modified sequence from LASV(Togo/2016/7082;Clade VI)__AMR44577__GPCmut1 (opt5)
aggagagucccgcagucggcguccagcggcucugcuuguucgugugugugucguugcaggccuuauucaagcuuaccaugggccagaucauuaccuucuuucaagaggugccccacgucaucgaagagguuaugaacauugugcugaucgcccucagccugcuugcuauucugaaggggguguacaaugucgccacaugcggaaucaucggccucgugacguuccuguuucuuugugggagauccugcucucugauuuauaaaggaagcuacgaacuccagacccuggagcugaacauggaaacacucaauaugaccaugccucuguccuguacaaagaacucuagccaucacuauauccggguuggcaaugagaccgggcuugagcugacacucaccaacacguccauuaucaaucauaaauucugcaaccugucugacgcgcacaagcgcaaucuuuacgaucaugcucugaugagcauucucuccaccuuucaccugagcaucccgaacuucaaucaguaugaagccaugucuugugacuuuaacggaggcaaaauuuccgugcaguacaaucugagccacgccuaugcugucgaugccgcugagcauugcggcacaguggccaacgggguucuccaaaccuucaugagaauggcguggggaggcucuuacaucgcccuggacuccgggugcggaaauugggauuguaucaugacaagcuaccaguaucuuauuauccagaacaccacgugggaagaccacugccaguuuucucgccccuccccuauuggcuaccuggggcuccugagccaaagaacacgggauaucuauauuucccgcagacgccggggaaccuucacauggacccucucugacagcgagggcaacgagacccccggcggguacugucugacacgguggaugcugaucgaagcugagcucaagugcuuuggaaauacggccguggcuaaguguaacgaaaaacaugaugaggaguucugcgacaugcugcgccuuuuugauuucaauaagcaggccauccagagacugaaaucccccgcgcagaugagcauucaacucaucaacaaggccgucaaugcucugauuaacgaccagcuuaucaugaaaaaucaucugcgggauaugaugugcauuccuuauugcaacuacucuaaguauugguaccucaaucacaccuccagcgggcgcacaucucugcccaaguguuggcuggugagcaacggauccuaccucaaugagacccacuucucugacgacaucgaacagcaagccgauaacaugaucacagagaugcugcagaaagaauauauugacagacagggcaagaccccucuugggcugguggaucucuuugucuucagcacguccuuuuaccugaucagcauuuuccugcaccuuaucaaaauuccgacacaucggcacaucguuggaaagcccugcccuaaaccccaucgccucaaucacaugggcauuuguucuugcggccuguauaagcagccuggggugcccaccagauggaaacggugaggacuaguaauaaggaaacuguaugaaugucugugggcaggaagugaagagauccuucuguaaagguuuuuggaauuaugucugcugaauaauaaacuuuuuugaaauaauaaaucugguagaaaaaugagaucucaaaggcucuuuucagagccaccaaaaaaaaaaaaaaaaaaaaaaaaaaaaaaaaaaaaaaaaaaaaaaaaaaaaaaaaaaaaaaaaaaaaaaaaaaaaaaaaaaaaaaaaaaaaaaaaaaaaa

SEQ ID NO: 16206 - RNA, 1809 nt, Artificial Sequence
  mRNA product Design b-4 (hSL-A100) comprising derived and/or modified sequence from LASV(KAK-428;Clade n.d. (VII))__ANH09740__GPCmut1 (opt5)
aggagagucccgcagucggcguccagcggcucugcuuguucgugugugugucguugcaggccuuauucaagcuuaccaugggccagaucgugaccuucuuucaagaggucccccacguuauugaagaggugaugaacaucgugcugauugcccucagccugcuugcuauccugaaggggcucuacaauuucgccacaugcggagucauuggccugaucacguuucuucugcucugugggagauccugcucugcgaccuauaaaggacaguacgaacugcagacacuggagcucaacauggaaagccugaauaugaccaugccucuuuccuguacaaagaacaauucucaucacuauauccgggcuggcaacaauaccgggcuggagcucacacugaccaacacgagcauuaucucccauaaauucugcaaucuuucugacgcccacaagaaaaaccuguacgaucauacccucaugagcauuaucacaaccuuucaccuguccauuccgaauuucaaccaguaugaggccaugagcugugacuuuaauggaggcaagaucucuauucaauacaaccugucccacagcuaugcuggcgaugccgcucagcauugcgggacaguggccaauggaguucuccagaccuucaugcgcauggcguggggcgggucuuaccuggcccuugacuccggaugccggggcugggauuguaucaucagcucuuaccaguaucugauuauccaaaacacgacaugggacgaucacugccaguuuucccgccccagcccuauuggguaccucggauucgugucccagaagaccagagacaucuauauuucucggcgccgccggggcacauuuaccuggacccugagcgauuccgaaggccaugacaugcccgggggauacugucucacaagauggaugcugaucgaggcugaucugaaaugcuucggcaacacggccgucgcuaaguguaaugaaaaacacgacgaggaguuuugcgauauguggcgccucuucgacuucaacaagcaggccauccaacggcugaaagcgcccgcccagaugaauauucagcuuaucaacaaggcugugaaugcccugauuaacgaccaacucaugaugaagaaucaccugagagauaucaugugcauuccuuauugcaacuacagcaaauuuugguaucuuaauaacaccacaaccggacggacaucucugccccgcuguuggcucaucuccaauggcagcuaccugaacgagacccauuucucugacgauaucgaacagcaggcugacaauaugauuacggagaugcugcagaaggaauacauggauagacaagggaaaacaccucucggacugguugaccuuuuuguguucagcaccuccuuuuaucugaucaccauuuuccuccaccuggucaagaucccgacacaucggcacauugugggcaaacccugcccuaagccccaucgccugaaccacaugggcaucuguucuugcgggcuuuacaaacagccuggagugcccgucagauggaagcggugaggacuaguaauaaggaaacuguaugaaugucugugggcaggaagugaagagauccuucuguaaagguuuuuggaauuaugucugcugaauaauaaacuuuuuugaaauaauaaaucugguagaaaaaugagaucucaaaggcucuuuucagagccaccaaaaaaaaaaaaaaaaaaaaaaaaaaaaaaaaaaaaaaaaaaaaaaaaaaaaaaaaaaaaaaaaaaaaaaaaaaaaaaaaaaaaaaaaaaaaaaaaaaaaa

SEQ ID NO: 16207 - RNA, 1809 nt, Artificial Sequence; identical to SEQ ID NO: 16201
  mRNA product Design b-4 (hSL-A100) comprising derived and/or modified sequence from LASV(Pinneo-NIG-1969;Clade I)__AIT17836__GPCmut1 (opt5)

SEQ ID NO: 16208 - RNA, 1809 nt, Artificial Sequence
  mRNA product Design b-4 (hSL-A100) comprising derived and/or modified sequence from LASV(ISTH0009-NIG-2011;Clade II)__AIT17404__GPCmut1 (opt5)
aggagagucccgcagucggcguccagcggcucugcuuguucgugugugugucguugcaggccuuauucaagcuuaccaugggccagaucauuaccuucuuucaagaggugccccacgucaucgaagagguuaugaacauugugcugaucgcccucagccugcuugcuauucugaaggggaucuacaauguggccacaugcggacucuucggccuggucuccuuucuucugcucugugggagaucuugcagcacgaccuauaaaggaguguacgaacugcagacacuggagcucgacauggcgucccugaacaugaccaugccucuuucuuguacaaagaauaacagccaucacuauaucaugguuggcaaugaaaccgggcuggagcucacacugaccaacacguccauuaucaaucauaaauucugcaaccuuucugaugcucacaagaaaaaucuguacgaccaugcccucaugagcauuaucuccaccuuucaccugagcauuccgaacuucaaucaguaugaggccaugucuugugauuuuaacggaggcaagaucuccgugcaguacaaucugagccacgcuuaugccgucgacgcugccaaccauugcggcacaauugcgaauggggugcuccaaaccuucaugcggauggccuggggaggcucuuacaucgcucuggauuccgggugcggaagcugggacuguaucaugacaucuuaccaguaucuuauuauccagaacaccacgugggaagaucacugccaguuuucccgccccagcccuauuggcuaccuggggcuccugucccaaagaacacgggacaucuauauuucucgcagacgccggggaaccuucacauggacccucagcgauuccgagggcaacgaaacccccggcggguacugucugacacgguggaugcugaucgaggccgagcucaaaugcuuuggaaauacggcuguugccaaguguaacgaaaaacaugacgaggaguucugcgauaugcugcgccuuuuugacuucaauaagcaggcgaucagacggcugaaaacccccgcccagaugagcauucagcucaucaacaaggcugugaaugcccugauuaacgaucaacuuaucaugaagaaucaucugcgcgacauuaugugcaucccuuauugcaacuacucuaaauauugguaccucaaucacacagucaccgggaagacaucccugcccagauguuggcuggugagcaacggaucuuaccucaaugaaacccacuucagcgacgauaucgagcagcaggcugacaacaugauuacggagcugcuucaaaaagaauauauggaucggcagggcaagacaccucuggggcucguggaccuguuugucuucuccaccucuuuuuaccugaucagcauuuuccuucaccucaucaaaauuccgacccaucgccacaucacaggaaagcccugcccuaaaccccauagacugaaucacaugggcauuuguuccugcggccuguauaagcacccugggguucccgugaaguggaaacggugaggacuaguaauaaggaaacuguaugaaugucugugggcaggaagugaagagauccuucuguaaagguuuuuggaauuaugucugcugaauaauaaacuuuuuugaaauaauaaaucugguagaaaaaugagaucucaaaggcucuuuucagagccaccaaaaaaaaaaaaaaaaaaaaaaaaaaaaaaaaaaaaaaaaaaaaaaaaaaaaaaaaaaaaaaaaaaaaaaaaaaaaaaaaaaaaaaaaaaaaaaaaaaaaa

SEQ ID NO: 16209 - RNA, 1809 nt, Artificial Sequence
  mRNA product Design b-4 (hSL-A100) comprising derived and/or modified sequence from LASV(ISTH2010-NIG-2012;Clade II)__AIT17482__GPCmut1 (opt5)
aggagagucccgcagucggcguccagcggcucugcuuguucgugugugugucguugcaggccuuauucaagcuuaccaugggccagaucauuaccuucuuucaagaggugccccacgucaucgaagagguuaugaacauugugcugaucgcccucagccugcuugcuauucugaaggggaucuacaauguggccacaugcggacucuucggccuggucuccuuucuucugcucugugggagaucuugcagcacgaccuauaaaggaguguacgaacugcagacacuggagcucgacauggcgucccugaacaugaccaugccucuuucuuguacaaagaauaacagccaucacuauaucaugguuggcaaugaaaccgggcuggagcucacacugaccaacacguccauuaucaaucauaaauucugcaaccuuucugaugcucacaagaaaaaucuguacgaccaugcccucaugagcauuaucuccaccuuucaccugagcauuccgaacuucaaucaguaugaggccaugucuugugauuuuaacggaggcaagaucuccgugcaguacaaucugagccacgcuuaugccgucgacgcugccaaccauugcggcacaauugcgaauggggugcuccaaaccuucaugcggauggccuggggaggcucuuacaucgcucuggauuccgggugcggaagcugggacuguaucaugacaucuuaccaguaucuuauuauccagaacauuaccugggaagaucacugccaguuuucccgccccagcccuaucggcuaccuggggcuccugucccaaagaacgcgggacauuuauaucucucgcagacgccggggaacauucaccuggacacucagcgauuccgagggcaacgaaacccccggcggguacugucugacccgguggaugcugaucgaggccgagcucaaaugcuuuggaaauacagcuguugccaaguguaacgaaaaacaugacgaggaguucugcgauaugcugcgccuuuuugacuucaauaagcaggcgauuagacggcugaaaacgcccgcccagaugagcauccagcucauuaacaaggcugugaaugcccugaucaacgaucaacuuauuaugaagaaucaucugcgcgacaucaugugcaucccuuauugcaacuacucuaaauauugguaccucaaucacaccgucacagggaagaccucccugcccagauguuggcuggugagcaacggaucuuaccucaaugaaacacacuucagcgacgauauugagcagcaggcugacaacaugaucaccgagcugcuucaaaaagaauauauugaucggcagggcaagacgccucuggggcucguggaccuguuugucuucuccacaucuuuuuaccugaucagcauuuuccuucaccucguuaaaaucccgacccaucgccacguggugggaaagcccugcccuaaaccccauagacugaaucacaugggcauuuguuccugcggccuguauaagcacccugggguccccgugaaguggaaacggugaggacuaguaauaaggaaacuguaugaaugucugugggcaggaagugaagagauccuucuguaaagguuuuuggaauuaugucugcugaauaauaaacuuuuuugaaauaauaaaucugguagaaaaaugagaucucaaaggcucuuuucagagccaccaaaaaaaaaaaaaaaaaaaaaaaaaaaaaaaaaaaaaaaaaaaaaaaaaaaaaaaaaaaaaaaaaaaaaaaaaaaaaaaaaaaaaaaaaaaaaaaaaaaaa

SEQ ID NO: 16210 - RNA, 1809 nt, Artificial Sequence
  mRNA product Design b-4 (hSL-A100) comprising derived and/or modified sequence from LASV(Lassa virus/H.sapiens-wt/NGA/2015/ISTH_0543;Clade II)__AVO03639__GPCmut1 (opt5)
aggagagucccgcagucggcguccagcggcucugcuuguucgugugugugucguugcaggccuuauucaagcuuaccaugggccagaucauuaccuucuuucaagaggugccccacgucaucgaagagguuaugaacauugugcugaucgcccucagccugcuugcuauucugaaggggaucuacaauguggccacaugcggacucuucggccuggucuccuuucuucugcucugugggagaucuugcagcacgaccuauaaaggaguguacgaacugcagacacuggagcucgacauggcgaaccugaauaugaccaugccucuuuccuguacaaagaacaauucucaucacuauaucaugguuggcaacgaaaccgggcuggagcucacacugaccaauacgagcauuaucaaccauaaauucugcaaucuuuccgaugcucacaagaaaaaccuguacgaccaugcccucaugucuauuaucagcaccuuucaccuguccauuccgaauuucaaccaguaugaggccaugagcugugauuuuaauggaggcaagaucucugugcaguacaaccugucccacacauaugcugucgacgccgcuaaucauugcggcaccauugccaacggggugcuccaaacauucaugcggauggcguggggaggcagcuacaucgcccuggauucugggugcggauccugggacuguaucaugaccagcuaccaguaucuuguuauucagaacacgacaugggaagaucacugccaguuuucucgccccuccccuaucggcuaccuggggcuccugagccaaagaacccgggacauuuauaucucccgcagacgccggggaacauucaccuggacccucucugauagcgagggcaaugaaacacccggcggguacugucugacgcgguggaugcugauugaggcugagcucaaaugcuuuggaaacaccgccguggcuaaguguaaugaaaaacaugacgaggaguucugcgauaugcugcgccuuuuugacuucaacaagcaggccaucagacggcugaaaacacccgcgcagauguccauccagcucauuaauaaggccgucaacgcucugaucaaugaucaacuuauuaugaagaaccaucugcgcgacaucaugugcauuccuuauugcaauuacagcaaauauugguaccucaaccacaccgugacagggaagaccucucugcccagauguuggcugguguccaauggaagcuaccucaacgaaacgcacuucucugacgauaucgagcagcaggccgacaauaugaucacagagcugcuucaaaaagaauauauugaucggcagggcaagaccccucuggggcucgucgaccuguuuguuuucagcaccuccuuuuaccugaucucuauuuuccuucaccucgugaaaaucccgacacaucgccacauuaccggaaagcccugcccuaaaccccauagacugaaccacaugggcaucuguagcugcggccuguauaagcacccuggggugcccgucaaguggaaacggugaggacuaguaauaaggaaacuguaugaaugucugugggcaggaagugaagagauccuucuguaaagguuuuuggaauuaugucugcugaauaauaaacuuuuuugaaauaauaaaucugguagaaaaaugagaucucaaaggcucuuuucagagccaccaaaaaaaaaaaaaaaaaaaaaaaaaaaaaaaaaaaaaaaaaaaaaaaaaaaaaaaaaaaaaaaaaaaaaaaaaaaaaaaaaaaaaaaaaaaaaaaaaaaaa

SEQ ID NO: 16211 - RNA, 1809 nt, Artificial Sequence
  mRNA product Design b-4 (hSL-A100) comprising derived and/or modified sequence from LASV(Lassa virus/H.sapiens-wt/NGA/2016/ISTH_0009;Clade II)__AVO03571__GPCmut1 (opt5)
aggagagucccgcagucggcguccagcggcucugcuuguucgugugugugucguugcaggccuuauucaagcuuaccaugggccagaucauuaccuucuuucaagaggugccccacgucaucgaagagguuaugaacauugugcugaucgcccucagccugcuugcuauucugaaggggaucuacaauguggccacaugcggacuccugggccuugucuccuuccugcuccugugugggagaucuugcagcacgaccuauaaaggaguguacgaacugcagacacucgagcuggacauggcgucccuuaacaugaccaugccucugucuuguacaaagaauaacagccaucacuauaucaugguuggcaaugaaaccgggcucgagcugacacuuaccaacacguccauuaucaaucauaaauuuugcaaccugucugaugcucacaagaaaaaucucuacgaccaugcccugaugagcauuaucuccaccuuccaccugagcauuccgaacuuuaaucaguaugaggccaugucuugugauuucaacggaggccggaucuccgugcaguacaaucucagccacucuuaugcugucgacgccgcuaaccauugcggcacaauugccaauggggugcugcaaaccuuuaugcgcauggcguggggaggcuccuacaucgcccuugauagcgggugcggaucuugggacuguaucaugacauccuaccaguaucugauuauccagaacaccacgugggaagaucacugccaguucagcagacccuccccuauuggcuaccucgggcugcuuucucaacggacacgcgacaucuauauuagcagacggcgccggggaaccuuuacauggacccuguccgauagcgagggcaacgaaacccccggcggguacugucugacacgcuggaugcucaucgaggcugagcugaagugcuucggaaauacggccguugcuaaauguaacgaaaagcaugacgaggaauuuugcgauaugcuuagacuguucgacuuuaauaaacaggccauccggcgccucaagacccccgcgcagaugucuauucagcugaucaacaaagccgugaaugcucuuauuaacgaucaacugaucaugaagaaucaccucagagacauuaugugcaucccuuauugcaacuacuccaaguauugguaccugaaucacacagucaccgggaaaacaagccugccccgguguuggcucgugucuaacggaagcuaccugaaugaaacccauuucuccgacgauaucgagcagcaggccgacaacaugauuacggagcuucugcaaaaggaauauaucgaucgccagggcaaaacaccucucgggcugguggaccuguucgucuuuucuaccagcuucuaccuuauuuccaucuuucuccaccugguuaagauuccgacccauagacacaucacaggaaaacccugcccuaagccccaucggcugaaucacaugggcauuuguagcugcggccucuauaaccacccuggggugcccgugaaauggaagcgcugaggacuaguaauaaggaaacuguaugaaugucugugggcaggaagugaagagauccuucuguaaagguuuuuggaauuaugucugcugaauaauaaacuuuuuugaaauaauaaaucugguagaaaaaugagaucucaaaggcucuuuucagagccaccaaaaaaaaaaaaaaaaaaaaaaaaaaaaaaaaaaaaaaaaaaaaaaaaaaaaaaaaaaaaaaaaaaaaaaaaaaaaaaaaaaaaaaaaaaaaaaaaaaaaa

SEQ ID NO: 16212 - RNA, 1809 nt, Artificial Sequence
  mRNA product Design b-4 (hSL-A100) comprising derived and/or modified sequence from LASV(Lassa virus/H.sapiens-wt/NGA/2016/ISTH_0017;Clade II)__AVO03567__GPCmut1 (opt5)
aggagagucccgcagucggcguccagcggcucugcuuguucgugugugugucguugcaggccuuauucaagcuuaccaugggccagaucauuaccuucuuucaagaggugccccacgucaucgaagagguuaugaacauugugcugaucgcccucagccugcuugcuauucugaaggggaucuacaauguggccacaugcggacucuucggccuggucuccuuucuucugcucugugggagaucuugcagcacgaccuauaaaggaguguacgaacugcagacacuggagcucgacauggcgucccugaacaugaccaugccucuuucuuguacaaagaauaacagccaucacuauaucaugguuggcaaugaaaccgggcuggagcucacacugaccaacacguccauuaucaaucauaaauucugcaaccuuucugaugcucacaagaaaaaucuguacgaccaugcccucaugagcauuaucuccaccuuucaccugagcauuccgaacuucaaucaguaugaggccaugucuugugauuuuaacggaggcaagaucuccgugcaguacaaucugagccacacauaugcuauugacgccgcuaaccauugcggcaccaucgccaaugggguccuccaaacauucaugcggauggcguggggaggcucuuacaucgcccuggauuccgggugcggaagcugggacuguauuaugaccucuuaccaguaucuuaucauucagaacacgacaugggaagaucacugccaguuuucccgccccagcccuaucggcuaccuggggcuccugucccaaagaacccgggacauuuauaucucucgcagacgccggggaacauucaccuggacccucagcgauuccgagggcaacgaaacacccggcggguacugucugacgcgguggaugcugaucgaggcugagcucaaaugcuuuggaaauaccgccguggcuaaguguaacgaaaaacaugacgaggaguucugcgauaugcugcgccuuuuugacuucaauaagcaggccauuagacggcugaaaacacccgcgcagaugagcauccagcucauuaacaaggccguuaaugcucugaucaacgaucaacuuauuaugaagaaucaucugcgcgacaucaugugcaucccuuauugcaacuacucuaaauauugguaccucaaucacaccgugacagggaagaccucccugcccagauguuggcuggucagcaacggaucuuaccucaaugaaacgcacuucagcgacgauauugagcagcaggccgacaacaugaucacagagcugcuucaaaaagaauauauggaucggcagggcaagaccccucuggggcucguggaccuguuuguguucuccaccucuuuuuaccugauuagcaucuuccuucaccucguccgcauuccgacacauagacacguuaucggaaaacccugcccuaagccccaucggcugaaucacaugggcauuuguuccugcggccuguauaaacacccuggggugcccgugaaguggaagcgcugaggacuaguaauaaggaaacuguaugaaugucugugggcaggaagugaagagauccuucuguaaagguuuuuggaauuaugucugcugaauaauaaacuuuuuugaaauaauaaaucugguagaaaaaugagaucucaaaggcucuuuucagagccaccaaaaaaaaaaaaaaaaaaaaaaaaaaaaaaaaaaaaaaaaaaaaaaaaaaaaaaaaaaaaaaaaaaaaaaaaaaaaaaaaaaaaaaaaaaaaaaaaaaaaa

SEQ ID NO: 16213 - RNA, 1809 nt, Artificial Sequence
  mRNA product Design b-4 (hSL-A100) comprising derived and/or modified sequence from LASV(Lassa virus/H.sapiens-wt/NGA/2018/ISTH_0959;Clade II)__AVV65099__GPCmut1 (opt5)
aggagagucccgcagucggcguccagcggcucugcuuguucgugugugugucguugcaggccuuauucaagcuuaccaugggccagaucauuaccuucuuucaagaggugccccacgucaucgaagagguuaugaacauugugcugaucgcccucagccugcuugcuauucugaaggggaucuacaauguggucacaugcggacucuucggccugguguccuuucuucugcucugugggagaucuugcagcacgaccuauaaaggaguuuacgaacugcagacacuggagcucgacauggccucccugaacaugaccaugccucuuucuuguacaaagaauaacagccaucacuauaucauggugggcaaugaaaccgggcuggagcucacacugaccaacacguccauuaucaaucauaaauucugcaaccuuucugaugcgcacaagaaaaaucuguacgaccaugcucucaugagcauuaucuccaccuuucaccugagcauuccgaacuucaaucaguaugaggccaugucuugugauuuuaacggaggcaagaucuccguccaguacaaucugagccacgccuaugcuauugacgccgcuaaccauugcggcacaaucgccaauggggugcuccaaaccuucaugcggauggcguggggaggcucuuacaucgcccuggauuccgggugcggaagcugggacuguauuaugacaucuuaccaguaucuuaucauucagaacaccacgugggaagaucacugccaguuuucccgccccagcccuaucggcuaccuggggcuccugucccaaagaacacgggacauuuauaucucucgcagacgccggggaaccuucacauggacccucagcgauuccgagggcaacgaaacccccggcggguacugucugacacgguggaugcugaucgaggcugagcucaaaugcuuuggaaauacggccguugcuaaguguaacgaaaaacaugacgaggaguucugcgauaugcugcgccuuuuugacuucaauaagcaggccauuagacggcugaaaacccccgcgcagaugagcauccagcucauuaacaaggccgugaaugcucugaucaacgaucaacuuauuaugaagaaucaucugcgcgacaucaugugcaucccuuauugcaacuacucuaaauauugguaccucaaucacacagucaccgggaagacaucccugcccagauguuggcuggugagcaacggaucuuaccucaaugaaacccacuucagcgacgauauugagcagcaggccgacaacaugaucacggagcugcuucaaaaagaauauauugaucggcagggcaagacaccucuggggcucguggaccuguuugucuucuccaccucuuuuuaccugaucagcauuuuccuucaccucguuaaaaucccgacccaucgccacgugauuggaaagcccugcccuaaaccccauagacugaaucacaugggcaucuguuccugcggccuguauaagcacccuggggugcccgucaaguggaaacggugaggacuaguaauaaggaaacuguaugaaugucugugggcaggaagugaagagauccuucuguaaagguuuuuggaauuaugucugcugaauaauaaacuuuuuugaaauaauaaaucugguagaaaaaugagaucucaaaggcucuuuucagagccaccaaaaaaaaaaaaaaaaaaaaaaaaaaaaaaaaaaaaaaaaaaaaaaaaaaaaaaaaaaaaaaaaaaaaaaaaaaaaaaaaaaaaaaaaaaaaaaaaaaaaa

SEQ ID NO: 16214 - RNA, 1809 nt, Artificial Sequence
  mRNA product Design b-4 (hSL-A100) comprising derived and/or modified sequence from LASV(LASV003-NIG-2008;Clade II)__AIT17580__GPCmut1 (opt5)
aggagagucccgcagucggcguccagcggcucugcuuguucgugugugugucguugcaggccuuauucaagcuuaccaugggccagaucauuaccuucuuucaagaggugccccacgucaucgaagagguuaugaacauugugcugaucgcccucagccugcuugcuauucugaaggggaucuacaauguggccacaugcggacucuucggccuggucuccuuucuucugcucugugggagaucuugcagcacgaccuauaaaggaguguacgaacugcagacacuggagcucgacauggcgucccugaacaugaccaugccucuuucuuguacaaagaauaacagccaucacuauaucaugguuggcaaugaaaccgggcuggagcucacacugaccaacacguccauuaucaaucauaaauucugcaaccuuucugaugcucacaagaaaaaucuguacgaccaugcccucaugagcauuaucuccaccuuucaccugagcauuccgaacuucaaucaguaugaggccaugucuugugauuuuaacggaggcaagaucuccgugcaguacaaucugagccacacauaugcugucgacgccgcuaaccauugcggcaccauugccaauggggugcuccaaacauucaugcggauggcguggggaggcucuuacaucgcccuggauuccgggugcggaagcugggacuguaucaugaccucuuaccaguaucuuauuauccagaacacgacaugggaagaucacugccaguuuucccgccccagcccuauuggcuaccuggggcuccugucccaaagaacccgggacaucuauauuucucgcagacgccggggaacauucaccuggacccucagcgauuccgagagcaacgaaacacccggcggcuacugucugacgcgguggaugcugaucgaggcugagcucaaaugcuuugggaauaccgccguugcuaaguguaacgaaaaacaugacgaggaguucugcgauaugcugcgccuuuuugacuucaauaagcaggccaucagacggcugaaagcgcccgcccagaugucuauucagcucaucaacaaggcugugaaugcccugauuaacgaucaacuuaucaugaagaaucaucugcgcgacauuaugugcaucccuuauugcaacuacuccaaauauugguaccucaaucacacagucaccggcagaacaagccugccccgguguuggcuggugucuaacgggagcuaccucaaugaaacccacuucuccgacgauaucgagcagcaggcugacaacaugauuacggagcugcuucaaaaggaauauauggaucgccagggaaaaacaccucugggccucguggaccuguuugucuucucuaccagcuuuuaccugaucuccauuuuccuucaccucguuaagaucccgacccauagacacgugauugggaaacccugcccuaagccccaucggcugaaucacaugggaaucuguagcugcggccuguauaaacacccuggcgugcccgucaaguggaagcgcugaggacuaguaauaaggaaacuguaugaaugucugugggcaggaagugaagagauccuucuguaaagguuuuuggaauuaugucugcugaauaauaaacuuuuuugaaauaauaaaucugguagaaaaaugagaucucaaaggcucuuuucagagccaccaaaaaaaaaaaaaaaaaaaaaaaaaaaaaaaaaaaaaaaaaaaaaaaaaaaaaaaaaaaaaaaaaaaaaaaaaaaaaaaaaaaaaaaaaaaaaaaaaaaaa

SEQ ID NO: 16215 - RNA, 1809 nt, Artificial Sequence
  mRNA product Design b-4 (hSL-A100) comprising derived and/or modified sequence from LASV(LASV035-NIG-2009;Clade II)__AIT17588__GPCmut1 (opt5)
aggagagucccgcagucggcguccagcggcucugcuuguucgugugugugucguugcaggccuuauucaagcuuaccaugggccagaucauuaccuucuuucaagaggugccccacgucaucgaagagguuaugaacauugugcugaucgcccucagccugcuugcuauucugaaggggaucuacaauguggccacaugcggacucuucggccuggucuccuuucuucugcucugugggagaucuugcagcacgaccuauaaaggaguguacgaacugcagacacuggagcucgacauggcgucccugaacaugaccaugccucuuucuuguacaaagaauaacagccaucacuauaucaugguuggcaaugaaaccgggcuggagcucacacugaccaacacguccauuaucaaucauaaauucugcaaccuuucugaugcucacaagaaaaaucuguacgaccaugcccucaugagcauuaucuccaccuuucaccugagcauuccgaacuucaaucaguaugaggccaugucuugugauuuuaacggaggcaagaucuccgugcaguacaaucugagccacgcuuaugccgucgacgcugccaaccauugcggcacaauugcgaauggggugcuccaaaccuucaugcggauggccuggggaggcucuuacaucgcucuggauuccgggugcggaagcugggacuguaucaugacaucuuaccaguaucuuauuauccagaacaccacgugggaagaucacugccaguuuucccgccccagcccuauuggcuaccuggggcuccugucccaaagaacacgggacaucuauauuucucgcagacgccggggaaccuucacauggacccucagcgauuccgagggcaacgaaacccccggcggguacugucugacacgguggaugcugaucgaggccgagcucaaaugcuuuggaaauacggcuguugccaaguguaacgaaaaacaugacgaggaguucugcgauaugcugcgccuuuuugacuucaauaagcaggcgaucagacggcugaaagcccccgcucagaugagcauucagcucaucaacaaggccgugaaugcucugauuaacgaucaacuuaucaugaagaaucaucugcgcgacauuaugugcaucccuuauugcaacuacucuaaauauugguaccucaaucacaccgucacagggaagaccucccugcccagauguuggcuggugagcaacggaucuuaccucaaugaaacacacuucagcgacgauaucgagcagcaggccgacaacaugauuaccgagcugcuucaaaaagaauauaucgaucggcagggcaagacgccucuggggcucguggaccuguuugucuucuccacaucuuuuuaccugauuagcaucuuccuucaccucguuaaaauuccgacccaucgccacgugaucggaaagcccugcccuaaaccccauagacugaaucacaugggcauuuguuccugcggccuguauaagcacccuggggugcccgucaaguggaaacggugaggacuaguaauaaggaaacuguaugaaugucugugggcaggaagugaagagauccuucuguaaagguuuuuggaauuaugucugcugaauaauaaacuuuuuugaaauaauaaaucugguagaaaaaugagaucucaaaggcucuuuucagagccaccaaaaaaaaaaaaaaaaaaaaaaaaaaaaaaaaaaaaaaaaaaaaaaaaaaaaaaaaaaaaaaaaaaaaaaaaaaaaaaaaaaaaaaaaaaaaaaaaaaaaa

SEQ ID NO: 16216 - RNA, 1809 nt, Artificial Sequence
  mRNA product Design b-4 (hSL-A100) comprising derived and/or modified sequence from LASV(LASV1000-NIG-2009;Clade II)__AIT17782__GPCmut1 (opt5)
aggagagucccgcagucggcguccagcggcucugcuuguucgugugugugucguugcaggccuuauucaagcuuaccaugggccagaucauuaccuucuuucaagaggugccccacgucaucgaagagguuaugaacauugugcugaucgcccucagccugcuugcuauucugaaggggaucuacaauguggccacaugcggacucuucggccuggucuccuuucuucugcucugugggagaucuugcagcacgaccuauaaaggaguguacgaacugcagacacuggagcucgacauggcgucccugaacaugaccaugccucuuucuuguacaaagaauaacagccaucacuauaucaugguuggcaaugaaaccgggcuggagcucacacugaccaacacguccauuaucaaucauaaauucugcaaccuuucugaugcucacaagaaaaaucuguacgaccaugcccucaugagcauuaucuccaccuuucaccugagcauuccgaacuucaaucaguaugaggccaugucuugugauuuuaacggaggcaagaucuccgugcaguacaaucugagccacacauaugcugucgacgccgcuaaccauugcggcaccauugccaauggggugcuccaaacauucaugcggauggcguggggaggcucuuacaucgcccuggauuccgggugcggaagcugggacuguaucaugaccucuuaccaguaucuuauuauccagaacacgacaugggaagaucacugccaguuuucccgccccagcccuauuggcuaccuggggcuccugucccaaagaacccgggacaucuauauuucucgcagacgccggggaacauucaccuggacccucagcgauuccgagggcaacgaaacacccggcggguacugucugacgcgguggaugcugaucgaggcugagcucaaaugcuuuggaaauaccgccguugcuaaguguaacgaaaaacaugacgaggaguucugcgauaugcugcgccuuuuugacuucaauaagcaggccaucaaaagacugaagacacccgcgcagaugagcauucagcucaucaacaaggccgugaaugcucugauuaacgaucaacuuaucaugaaaaaucaucugcgggacauuaugugcaucccuuauugcaacuacucuaaguauugguaccucaaucacaccgucacagggaaaaccucccugccccgcuguuggcuggugagcaacggaucuuaccucaaugaaacgcacuucagcgacgauaucgagcagcaggccgacaacaugauuacagagcugcuucaaaaggaauauaucgauagacagggcaaaaccccucuggggcucguggaccuguuugucuucuccaccucuuuuuaccugauuagcaucuuccuucaccucguuaagauuccgacacaucggcacguggugggaaaacccugcccuaagccccaucgccugaaucacaugggcaucuguuccugcggccuguauaagcacccugggguccccgugaaauggaagagaugaggacuaguaauaaggaaacuguaugaaugucugugggcaggaagugaagagauccuucuguaaagguuuuuggaauuaugucugcugaauaauaaacuuuuuugaaauaauaaaucugguagaaaaaugagaucucaaaggcucuuuucagagccaccaaaaaaaaaaaaaaaaaaaaaaaaaaaaaaaaaaaaaaaaaaaaaaaaaaaaaaaaaaaaaaaaaaaaaaaaaaaaaaaaaaaaaaaaaaaaaaaaaaaaa

SEQ ID NO: 16217 - RNA, 1809 nt, Artificial Sequence
  mRNA product Design b-4 (hSL-A100) comprising derived and/or modified sequence from LASV(LASV221-NIG-2010;Clade II)__AIT17624__GPCmut1 (opt5)
aggagagucccgcagucggcguccagcggcucugcuuguucgugugugugucguugcaggccuuauucaagcuuaccaugggccagaucauuaccuucuuucaagaggugccccacgucaucgaagagguuaugaacauugugcugaucgcccucagccugcuugcuauucugaaggggaucuacaauguggccacaugcggacucuucggccuggucuccuuucuucugcucugugggagaucuugcagcacgaccuauaaaggaguguacgaacugcagacacuggagcucgacauggcgucccugaacaugaccaugccucuuucuuguacaaagaauaacagccaucacuauaucaugguuggcaaugaaaccgggcuggagcucacacugaccaacacguccauuaucaaucauaaauucugcaaccuuucugaugcucacaagaaaaaucuguacgaccaugcccucaugagcauuaucuccaccuuucaccugagcauuccgaacuucaaucaguaugaggccaugucuugugauuuuaacggaggcaagaucuccgugcaguacaaucugagccacacauaugcuauugacgccgcuaaccauugcggcaccaucgccaaugggguccuccaaacauucaugcggauggcguggggaggcucuuacaucgcccuggauuccgggugcggaagcugggacuguauuaugaccucuuaccaguaucuuaucauucagaacacgacaugggaagaucacugccaguuuucccgccccagcccuaucggcuaccuggggcuccugucccaaagaacccgggacauuuauaucucucgcagacgccggggaacauucaccuggacccucagcgauuccgagggcaacgaaacacccggcggguacugucugacgcgguggaugcugaucgaggcugagcucaaaugcuuuggaaauaccgccguggcuaaguguaacgaaaaacaugacgaggaguucugcgauaugcugcgccuuuuugacuucaauaagcaggccauuagacggcugaaaacacccgcgcagaugagcauccagcucauuaacaaggccguuaaugcucugaucaacgaucaacuuauuaugaagaaucaucugcgcgacaucaugugcaucccuuauugcaacuacucuaaauauugguaccucaaucacaccgugacagggaagaccucccugcccagauguuggcuggucagcaacggaucuuaccucaaugaaacgcacuucagcgacgauauugagcagcaggccgacaacaugaucacagagaugcugcaaaaagaauauauggaucggcagggcaagaccccucuugggcugguggaccucuuuguguucuccaccucuuuuuaccugauuagcaucuuccugcaccuugucaaaauuccgacacaucgccacguuaucggaaagcccugcccuaaaccccauagacucaaucacaugggcauuuguuccugcggccuguauaagcacccuggggugcccgugaaguggaaacggugaggacuaguaauaaggaaacuguaugaaugucugugggcaggaagugaagagauccuucuguaaagguuuuuggaauuaugucugcugaauaauaaacuuuuuugaaauaauaaaucugguagaaaaaugagaucucaaaggcucuuuucagagccaccaaaaaaaaaaaaaaaaaaaaaaaaaaaaaaaaaaaaaaaaaaaaaaaaaaaaaaaaaaaaaaaaaaaaaaaaaaaaaaaaaaaaaaaaaaaaaaaaaaaaa

SEQ ID NO: 16218 - RNA, 1809 nt, Artificial Sequence
  mRNA product Design b-4 (hSL-A100) comprising derived and/or modified sequence from LASV(LASV237-NIG-2010;Clade II)__AIT17638__GPCmut1 (opt5)
aggagagucccgcagucggcguccagcggcucugcuuguucgugugugugucguugcaggccuuauucaagcuuaccaugggccagaucauuaccuucuuucaagaggugccccacgucaucgaagagguuaugaacauugugcugaucgcccucagccugcuugcuauucugaaggggaucuacaauguggccacaugcggacucuucggccuggucuccuuucuucugcucugugggagaucuugcagcacgaccuauaaaggaguguacgaacugcagacacuggagcucgacauggcgucccugaacaugaccaugccucuuucuuguacaaagaauaacagccaucacuauaucaugguuggcaaugaaaccgggcuggagcucacacugaccaacacguccauuaucaaucauaaauucugcaaccuuucugaugcucacaagaaagaccuguacgaucaugcccucaugagcauuaucuccaccuuucaccugagcauuccgaauuucaaccaguaugaggccaugucuugugacuuuaauggaggcaagaucuccgugcaguacaaccugagccacacauaugcugucgaugccgcuaaucauugcggcaccauugccaacggggugcuccaaacauucaugcggauggcguggggaggcucuuacaucgcccuggacuccgggugcggaagcugggauuguaucaugaccucuuaccaguaucuuauuauccagaauacgacaugggaagaccacugccaguuuucccgccccagcccuauuggcuaccuggggcuccugucccaaagaacccgggauaucuauauuucucgcagacgccggggaacauucaccuggacccucagcgacuccgagggcaacgaaacacccggcggguacugucugacgcgguggaugcugaucgaggcugagcucaaaugcuuuggaaacaccgccguugcuaaguguaaugaaaaacaugaugaggaguucugcgacaugcugcgccuuuuugauuucaacaagcaggccaucagacggcugaaaacacccgcgcagaugagcauucagcucaucaauaaggccgugaacgcucugauuaaugaccaacuuaucaugaagaaccaucugcgcgacauuaugugcaucccuuauugcaauuacucuaaauauugguaccucaaccacaccgucacagggaagaccucccugcccagauguuggcuggugagcaauggaucuuaccucaacgaaacgcacuucagcgaugacaucgagcagcaggccgauaauaugauuacagagcugcuucaaaaagaauauauggaccggcagggcaagaccccucuggggcucguggaucuguuugucuucuccaccucuuuuuaccugaucagcauuuuccuucaccucaucaaaauuccgacacaucgccacaucaccggaaagcccugcccuaaaccccauagacugaaccacaugggcauuuguuccugcggccuguauaagcacccugggguucccgugaaguggaaacggugaggacuaguaauaaggaaacuguaugaaugucugugggcaggaagugaagagauccuucuguaaagguuuuuggaauuaugucugcugaauaauaaacuuuuuugaaauaauaaaucugguagaaaaaugagaucucaaaggcucuuuucagagccaccaaaaaaaaaaaaaaaaaaaaaaaaaaaaaaaaaaaaaaaaaaaaaaaaaaaaaaaaaaaaaaaaaaaaaaaaaaaaaaaaaaaaaaaaaaaaaaaaaaaaa

SEQ ID NO: 16219 - RNA, 1809 nt, Artificial Sequence
  mRNA product Design b-4 (hSL-A100) comprising derived and/or modified sequence from LASV(LASV253-NIG-2011;Clade II)__AIT17670__GPCmut1 (opt5)
aggagagucccgcagucggcguccagcggcucugcuuguucgugugugugucguugcaggccuuauucaagcuuaccaugggccagaucauuaccuucuuucaagaggugccccacgucaucgaagagguuaugaacauugugcugaucgcccucagccugcuugcuauucugaaggggaucuacaauguggccacaugcggacucuucggccuggucuccuuucuucugcucugugggagaucuugcagcacgaccuauaaaggaguguacgaacugcagacacuggagcucgacauggcgucccugaacaugaccaugccucuuucuuguacaaagaauaacagccaucacuauaucaugguuggcaaugaaaccgggcuggagcucacacugaccaacacguccauuaucaaucauaaauucugcaaccuuucugaugcucacaagaaaaaucuguacgaccaugcccucaugagcauuaucuccaccuuucaccugagcauuccgaacuucaaucaguaugaggccaugucuugugauuuuaacggaggcaagaucuccgugcaguacaaucugagccacacauaugcugucgacgccgcuaaccauugcggcaccauugccaauggggugcuccaaacauucaugcggauggcguggggaggcucuuacaucgcccuggauuccgggugcggaagcugggacuguaucaugaccucuuaccaguaucuuauuauccagaacacgacaugggaagaucacugccaguuuucccgccccagcccuauuggcuaccuggggcuccugucccaaagaacccgggacaucuauauuucucgcagacgccggggaacauucaccuggacccucagcgauuccgagggcaacgaaacacccggcggguacugucugacgcgguggaugcugaucgaggcugagcucaaaugcuuuggaaauaccgccguugcuaaguguaacgaaaaacaugacgaggaguucugcgauaugcugcgccuuuuugacuucaauaagcaggccaucagacggcugaaagcgcccgcccagaugagcauucagcucaucaacaaggcugugaaugcccugauuaacgaucaacuuaucaugaagaaucaucugcgcgacauuaugugcaucccuuauugcaacuacucuaaauauugguaccucaaucacacagucaccgggagaacaucccugccccgguguuggcuggugagcaacggaucuuaccucaaugaaacccacuucagcgacgauaucgagcagcaggcugacaacaugauuacggagcugcuucaaaaggaauauaucgaucgccagggcaaaacaccucuggggcucguggaccuguuugucuucuccaccucuuuuuaccugauuagcaucuuccuucaccucguuaagauuccgacccauagacacaucauuggaaaacccugcccuaagccccaucggcugaaucacaugggcaucuguuccugcggccuguauaaacacccuggggugcccgugaaguggaagcgcugaggacuaguaauaaggaaacuguaugaaugucugugggcaggaagugaagagauccuucuguaaagguuuuuggaauuaugucugcugaauaauaaacuuuuuugaaauaauaaaucugguagaaaaaugagaucucaaaggcucuuuucagagccaccaaaaaaaaaaaaaaaaaaaaaaaaaaaaaaaaaaaaaaaaaaaaaaaaaaaaaaaaaaaaaaaaaaaaaaaaaaaaaaaaaaaaaaaaaaaaaaaaaaaaa

SEQ ID NO: 16220 - RNA, 1809 nt, Artificial Sequence
  mRNA product Design b-4 (hSL-A100) comprising derived and/or modified sequence from LASV(LASV254-NIG-2011;Clade II)__AIT17674__GPCmut1 (opt5)
aggagagucccgcagucggcguccagcggcucugcuuguucgugugugugucguugcaggccuuauucaagcuuaccaugggccagaucauuaccuucuuucaagaggugccccacgucaucgaagagguuaugaacauugugcugaucgcccucagccugcuugcuauucugaaggggaucuacaauguggccacaugcggacucuucggccuggucuccuuucuucugcucugugggagaucuugcagcacgaccuauaaaggaguguacgaacugcagacacuggagcucgacaugaccaaccugaauaugacaaugccucuuuccuguaccaagaacaauucucaucacuauaucaugguuggcaacgaaacagggcuggagcucacccugacgaauaccagcauuaucaaccauaaauucugcaaucuuuccgaugcgcacaagaaaaaccuguacaaucaugcucucaugucuauuaucagcacauuucaccuguccauuccgaacuucaaucaguaugaggccaugagcugugacuuuaacggaggcaagaucucugugcaguacaaucugucccacagcuaugccgucgaugcugccaaccauugcggcaccauugcuaacggggugcuccaaacauucaugcggauggccuggggaggcucuuacaucgcgcuggacuccgggugcggaaauugggauuguaucaugaccagcuaccaguaucuuauuauccagaacacgacaugggaagaccacugccaguuuucucgccccuccccuauuggcuaccuggggcuccugagccaaagaacccgggauaucuauauuucccgcagacgccggggaacauucaccuggacccucucugacagcgagggcaaugaaacacccggcggguacugucugacgcgguggaugcugaucgaggccgagcucaaaugcuuuggaaacaccgcuguugccaaguguaaugaaaaacaugaugaggaguucugcgacaugcugcgccuuuuugauuucaacaagcaggcuaucagacggcugaaaacacccgcccaggcgaauauucagcucaucaacaaggccgugaaugcucugauuaacgaccaacuuaucaugaagaaucaucugcgcgauauuaugugcaucccuuauugcaacuacuccaaauauugguaccucaaucacaccgucacagggaagaccagccugcccagauguuggcuggugucuaacggauccuaccucaaugaaacgcacuucagcgacgacaucgagcagcaggccgauaacaugauuacagagcugcuucaaaaagaauauauggaccggcagggcaagaccccucuggggcucguggaucuguuugucuucucuaccagcuuuuaccugaucuccauuuuccuucaccucguuaaaaucccgacacaucgccacgugauuggaaagcccugcccuaaaccccauagacugaaccacaugggcaucuguucuugcggccuguauaagcacccuggggugcccgucaaguggaaacggugaggacuaguaauaaggaaacuguaugaaugucugugggcaggaagugaagagauccuucuguaaagguuuuuggaauuaugucugcugaauaauaaacuuuuuugaaauaauaaaucugguagaaaaaugagaucucaaaggcucuuuucagagccaccaaaaaaaaaaaaaaaaaaaaaaaaaaaaaaaaaaaaaaaaaaaaaaaaaaaaaaaaaaaaaaaaaaaaaaaaaaaaaaaaaaaaaaaaaaaaaaaaaaaaa

SEQ ID NO: 16221 - RNA, 1809 nt, Artificial Sequence
  mRNA product Design b-4 (hSL-A100) comprising derived and/or modified sequence from LASV(Nig08-A19;Clade III)__ADU56618__GPCmut1 (opt5)
aggagagucccgcagucggcguccagcggcucugcuuguucgugugugugucguugcaggccuuauucaagcuuaccaugggccagaucgugaccuucuuucaagaggucccccacguuauugaagaggugaugaacaucgugcugauugcccucagcauccuggcuauucuuaaggggcuguacaauaucgccacaugcggacucaucggccuggucacguuccuucugcucuccgggagaucuuguagcaugaccuauaaaggaguguacgaacugcagacacuggagcucaacaugaauacccugaacaugacaaugccucuuuccugcaccaagaauaacucucaucacuauauuaugguuggcaaugaaacagggcuggagcucacccugacgaacaccagccuucugcaucacaaauuuuguaaucucuccgacgcgcauaagaaaaaccuguacgaucacacacugaugucuaucauuagcaccuuccaccucuccaucccgaauuuuaaccaguaugaggcuaugagcugcgacuucaauggaggcaagauuacagugcaguacaaccugucucauuccuaugccaucgaugccgcuaaucacuguggcaccgucgccaacggggugcuucaaacguuuaugcggauggcuuggggaggcagcuacauugcccuggacucugggugcggaaagugggauugcaucaugacauccuaccaguaucucaucauucagaacaccacaugggaagaccauugucaguucagcagacccucuccuaucggcuaccuggggcuucugucccaacggacccgcgauauuuauaucagcagacggcgccggggaaccuuuacauggacgcuguccgacucugagggcaaugaaacccccggcggguacugccucacacgcuggaugcugauugaggcggagcuuaaauguuucggaaacaccgccguugcuaagugcaaugaaaaacacgaugaggaauuuugugacaugcugagacucuucgauuuuaacaagcaggccauccggcgccugaaagcucccgcccagaugagcauccagcuuauuaauaaggcggugaacgcccugaucaaugaccaacucauuaugaagaaccaccugagagauaucaugugcauuccuuauugcaauuacuccaaauauugguaccugaaccauacaagcaccgggcggacgucucucccccgcugcuggcuggucuccaauggaagcuaccuuaacgaaacacacuucucugacgacaucgagcagcaggcugauaauaugaucaccgagaugcugcaaaaggaauaucucgacagacagggcaaaaccccucuggggcugguggaucuuuucguguuuagcacauccuucuaccucauuucuaucuuucugcaucuggucaagauuccgacccaccggcauaucguuggaaaacccuguccuaagccccaccgccucaaccacaugggcauuugcagcuguggccuguauaaacagccuggggugcccgugagauggaagcggugaggacuaguaauaaggaaacuguaugaaugucugugggcaggaagugaagagauccuucuguaaagguuuuuggaauuaugucugcugaauaauaaacuuuuuugaaauaauaaaucugguagaaaaaugagaucucaaaggcucuuuucagagccaccaaaaaaaaaaaaaaaaaaaaaaaaaaaaaaaaaaaaaaaaaaaaaaaaaaaaaaaaaaaaaaaaaaaaaaaaaaaaaaaaaaaaaaaaaaaaaaaaaaaaa

SEQ ID NO: 16222 - RNA, 1812 nt, Artificial Sequence
  mRNA product Design b-4 (hSL-A100) comprising derived and/or modified sequence from LASV(G1180-SLE-2010;Clade IV)__AIT17168__GPCmut1 (opt5)
aggagagucccgcagucggcguccagcggcucugcuuguucgugugugugucguugcaggccuuauucaagcuuaccaugggccagaucgugaccuucuuucaagaggucccccacguuauugaagaggugaugaacaucgugcugauugcccucagcauccuggcuguccuuaaggggcuguacaauuucgccacaugcggacucgugggccugcuuacguuucugcuccugugugggagauccugcaccgcgucucgguauaaaggaguuuacgaacugcagacacucgagcugaacauggaaacccuuaauaugacaaugccucugagcuguaccaagaacaauucccaucacuauauuauggugggcaacgagacagggcucgagcugacccuuacgaauaccucuaucaucaaccauaaauucugcaaucugagcgacgcucacaagaaaaaccucuacgaucaugcccugauguccauuaucucuacauuucaccugagcauuccgaauuucaaccaguaugaagccauguccugugacuuuaauggaggcaagaucagcguccaguacaaccucucucacuccuaugcuggcgaugccgcuaaucauugcgggaccguggccaacggaguucugcaaacauucaugcgcauggcguggggcgggagcuacauugcccuugacucuggaugcggcuccugggauuguaucaugaccagcuaccaguaucugauuauccagaacacgacaugggaggaccauugccaguuuucuagacccuccccuaucggguaccucggacugcuuagccaacggacccgcgauauuuauaucuccagacggcgccggggcacauucaccuggacccugucugacagcgaaggcaaggauacacccgggggauacugucugacgcgcuggaugcucauugaggcugagcugaaaugcuuuggcaauaccgccguggcuaaguguaacgaaaaacacgacgaggaguucugcgauaugcuuagacuguuugacuucaauaagcaggccauccagcggcucaaagcgcccgcccagauguccauucaacugaucaacaaggcugucaaugcccuuaucaacgaucagcugauuaugaagaaucaccuccgcgacaucaugugcauuccuuauugcaacuacagcaaauauugguaccugaaucauacaaccacaggaaagaccucucugcccaaauguuggcucguguccaacggcagcuaccugaaugaaacgcacuucucugacgauaucgagcagcaagcugacaacaugauuacagagaugcuucagaaggaauauauggagagacaggggaaaaccccucugggacucguggaucuguuugucuucagcaccuccuuuuaccugaucucuaucuuccuucaucucguuaagauuccgacacaccggcauaucgugggcaaaagcugccccaagccucaccgccugaaucacaugggcauuuguuccugcgggcuguauaagcagcccggagugccugucaaauggaagagaugaggacuaguaauaaggaaacuguaugaaugucugugggcaggaagugaagagauccuucuguaaagguuuuuggaauuaugucugcugaauaauaaacuuuuuugaaauaauaaaucugguagaaaaaugagaucucaaaggcucuuuucagagccaccaaaaaaaaaaaaaaaaaaaaaaaaaaaaaaaaaaaaaaaaaaaaaaaaaaaaaaaaaaaaaaaaaaaaaaaaaaaaaaaaaaaaaaaaaaaaaaaaaaaaa

SEQ ID NO: 16223 - RNA, 1812 nt, Artificial Sequence
  mRNA product Design b-4 (hSL-A100) comprising derived and/or modified sequence from LASV(G1442-SLE-2011;Clade IV)__AIT17180__GPCmut1 (opt5)
aggagagucccgcagucggcguccagcggcucugcuuguucgugugugugucguugcaggccuuauucaagcuuaccaugggccagaucgugaccuucuuucaagaggucccccacguuauugaagaggugaugaacaucgugcugauugcccucagcauccuggcuguccuuaaggggcuguacaauguggccacaugcggacucauuggccugguuacguuccuucugcucugugggagauccugcaccacaacccuguauaaaggaguguacgaacugcagacacucgagcugaacauggaaacccuuaauaugacaaugccucugucuuguaccaagaacaauagccaucacuauauccgggucggcaacgagacggggcucgagcugacccuuacaaauaccuccaucauuaaccauaaauuuugcaaucugucugacgcgcacaagaaaaaccucuacgaucaugcucugaugagcaucauuuccacauuccaccugucuaucccgaauuuuaaccaguaugaagccaugagcugugacuucaauggaggcaagauuuccgugcaguacaaccucagccacucuuaugccggcgaugcugccaaucauugcgggaccguugcuaacggagugcugcaaacguuuaugcgcauggccuggggcggguccuacaucgcgcuugacagcggaugcggcaacugggauuguauuaugacaucuuaccaguaucugaucauccagaauaccacaugggacgaucacugccaguucucccggcccagcccuauuggguaccucggacugcuuucucaacgcaccagagacgucuauaucucccggcgccgccggggcaccuuuacauggacgcugagcgauuccgagggcaaggacacccccgggggauacugucugacaagauggaugcucauugaagccgagcugaaaugcuucggcaacaccgcuguggccaaguguaaugagaaacaugaugaagaguuuugcgacaugcuucggcuguucgauuuuaacaagcaggcuauccagcgccucaaagcccccgcgcagaugucuauucaacugaucaauaaggccgugaacgcucuuaucaaugaccagcugauuaugaagaaccaccucagagacaucaugugcauuccuuauugcaauuacagcaaauauugguaccugaacaauacagccaccggaaagacgucccugcccaaauguuggcucaucagcaacggcucuuaccugaaugagacacacuucuccgaugacauugaacaggaggcugauaacaugaucaccgagaugcuucaaaaggaauauauggagcggcaggggaaaaccccucugggacucgucgaccuguucguuuuuagcacaucuuucuaccugaucagcauuuuucuucaucucgugaagaucccgacccaccgccauauugugggcaaauccugccccaagccucacagacugaaucauaugggcaucuguucuugcgggcuguauaagcagcccggagucccugugcgguggaaacgcugaggacuaguaauaaggaaacuguaugaaugucugugggcaggaagugaagagauccuucuguaaagguuuuuggaauuaugucugcugaauaauaaacuuuuuugaaauaauaaaucugguagaaaaaugagaucucaaaggcucuuuucagagccaccaaaaaaaaaaaaaaaaaaaaaaaaaaaaaaaaaaaaaaaaaaaaaaaaaaaaaaaaaaaaaaaaaaaaaaaaaaaaaaaaaaaaaaaaaaaaaaaaaaaaa

SEQ ID NO: 16224 - RNA, 1812 nt, Artificial Sequence
  mRNA product Design b-4 (hSL-A100) comprising derived and/or modified sequence from LASV(G3010-SLE-2013;Clade IV)__AIT17344__GPCmut1 (opt5)
aggagagucccgcagucggcguccagcggcucugcuuguucgugugugugucguugcaggccuuauucaagcuuaccaugggccagaucgugaccuucuuucaagaggucccccacguuauugaagaggugaugaacaucgugcugauugcccucagcauccuggcuguccuuaaggggcuguacaauuucgccacaugcggacucgugggccugguuacguuucuucugcucugugggagauccugcaccacaucucuguauaaaggaguguacgaacugcagacccucgagcugaacauggaaacacuuaauaugaccaugccucugagcuguacaaagaacaauucccaucacuauauuauggucggcaacgagaccgggcucgagcugacgcuuaccaauacaucuaucaucaaccauaaauucugcaaucugagcgacgcgcacaagaaaaaccucuacaaucaugcucugauguccauuaucucuaccuuucaccugagcauuccgaacuucaaucaguaugaagccauguccugugauuuuaacggaggcaagaucagcgugcaguacaaucucucucacuccuaugccggcgacgcugccagccauugcgggacaguugcuaacggagugcugcaaaccuucaugcggauggccuggggcgggucuuacauugcgcuugauuccggaugcggcaagugggacuguaucaugacgagcuaucaguaccugauuauccagaacacaaccugggaggaucacugccaguuuucucgccccuccccuaucggguaucucggacugcuuagccaaagaacacgggacauuuacaucucccgcagacgccggggcaccuucaccuggacacugucugauagcgaaggcaaagacacgcccgggggauauugucugacccgguggaugcucauugaggccgagcugaagugcuuuggcaauacagcugucgccaaauguaacgaaaagcaugaugaggaguucugcgacaugcuucgccuguuugauuucaauaaacaggcuauccagagacucaagacccccgcccagauguccauucaacugaucaacaaggcggugaaugcccuuaucaacgaccagcugauuaugaaaaaucaccuccgggauaucaugugcauuccuuacugcaacuauagcaaguacugguaccugaaucacacaaccacgggaaaaacaucucugcccaaguguuggcucguguccaacggcagcuaucugaaugaaacccauuucucugacgacaucgagcagcaagcugauaacaugauuaccgagaugcuucagaaagaauacauggagcgccaggggaagacaccucugggacucgucgaccuguuuguuuucagcaccuccuuuuaucugaucucuaucuuccuucaccucgugaaaauuccgacacauagacacaucgugggcaagagcugccccaagccucaucggcugaaucacaugggcauuuguuccugcgggcuguacaaacagcccggagucccugugcgcuggaagagaugaggacuaguaauaaggaaacuguaugaaugucugugggcaggaagugaagagauccuucuguaaagguuuuuggaauuaugucugcugaauaauaaacuuuuuugaaauaauaaaucugguagaaaaaugagaucucaaaggcucuuuucagagccaccaaaaaaaaaaaaaaaaaaaaaaaaaaaaaaaaaaaaaaaaaaaaaaaaaaaaaaaaaaaaaaaaaaaaaaaaaaaaaaaaaaaaaaaaaaaaaaaaaaaaa

SEQ ID NO: 16225 - RNA, 1812 nt, Artificial Sequence
  mRNA product Design b-4 (hSL-A100) comprising derived and/or modified sequence from LASV(G502-SLE-2009;Clade IV)__AIT17126__GPCmut1 (opt5)
aggagagucccgcagucggcguccagcggcucugcuuguucgugugugugucguugcaggccuuauucaagcuuaccaugggccagaucgugaccuucuuucaagaggucccccacguuauugaagaggugaugaacaucgugcugauugcccucagcauccuggcuguccuuaaggggcuguacaauuucgccacaugcggacucgugggccugcuuacguuucugcuccugugugggagauccugcaccacaggacuguauaaaggcguuuacgaacuccagacccuggagcuuaacauggaaacacugaauaugaccaugccucucucuuguacaaagaacaauagccaucacuauauuaugguggggaacgagaccggacuggagcuuacgcugaccaauacauccaucaucaaccauaaauucugcaaucucucugacgcgcacaagaaaaaccuguacgaucaugcucugaugagcauuaucuccaccuuucaccucucuauuccgaauuucaaccaguaugaagccaugagcugugacuuuaauggcggcaagaucuccguccaguacaaccugagccacucuuaugccggggaugcugccgaccauugcggaacaguggcuaauggcguucuucaaaccuucaugcggauggccuggggaggguccuacauugcgcuggauagcggcugcgggagaugggacuguaucaugacgucuuaccaguaucucauuauccagaacacaaccugggaggaucacugccaguuuucccggcccagcccuaucggauaccugggccuucugucucaacgcacaagagacauuuauaucucccggcgccgccggggcaccuucaccuggacacugagcgauuccgaagggaaggacacgcccggaggcuacugucucaccagauggaugcugauugaggccgagcuuaaaugcuuugggaacacagcuguggccaaguguaaugaaaaacaugaugaggaguucugcgacaugcugcggcucuuugauuucaacaagcaggcuauccagcgccugaaagcccccgcgcagaugucuauucaacuuaucaauaaggccgucaacgcucugaucaaugaccagcucgugaugaagaaccaccugagagacauuaugugcaucccuuauugcaauuacagccgguauugguaccugaaccacaccacaaccggccgcacgucccuccccaaauguuggcuggugagcaaugggucuuaccuuaacgaaacacauuucuccgaugacauugagcagcaagccgauaauaugaucaccgagaugcugcagaaggaauauauggagagacagggaaaaaccccucucggccuggucgaccuguuuguuuucagcacaucuuuuuaccuuauuagcaucuuccuccaccuggugaagaucccgacccaucggcacauugugggcaaauccugccccaagccucaucgccugaaccacauggggaucuguucuugcggacucuauaaacagcccggcgucccugugaaguggaagagaugaggacuaguaauaaggaaacuguaugaaugucugugggcaggaagugaagagauccuucuguaaagguuuuuggaauuaugucugcugaauaauaaacuuuuuugaaauaauaaaucugguagaaaaaugagaucucaaaggcucuuuucagagccaccaaaaaaaaaaaaaaaaaaaaaaaaaaaaaaaaaaaaaaaaaaaaaaaaaaaaaaaaaaaaaaaaaaaaaaaaaaaaaaaaaaaaaaaaaaaaaaaaaaaaa

SEQ ID NO: 16226 - RNA, 1812 nt, Artificial Sequence
  mRNA product Design b-4 (hSL-A100) comprising derived and/or modified sequence from LASV(G733-SLE-2010;Clade IV)__AIT17154__GPCmut1 (opt5)
aggagagucccgcagucggcguccagcggcucugcuuguucgugugugugucguugcaggccuuauucaagcuuaccaugggccagaucgugaccuucuuucaagaggucccccacguuauugaagaggugaugaacaucgugcugauugcccucagcauccuggcuguccuuaaggggcuguacaauuucgccacaugcggaauugugggccucguuuccuuucugcuucugugugggagaucuugcacgaccagccucuauaaaggaguguacgaacugcagacacuggagcucaacauggaaacccugaauaugacaaugccucuuuccuguaccaagaacaauucucaucacuauaucauggucggcaacgagacagggcuggagcucacccugacgaauaccagcaucauuaaccauaaauucugcaaucuuuccgacgcgcacaagaaaaaccuguacgaucaugcucucaugucuaucauuagcacauuucaccuguccaucccgaauuucaaccaguaugaagccaugagcugugacuuuaauggaggcaagauuucugugcaguacaaccugucccacagcuaugccggcgaugcugccaaucauugcgggaccaucgcuaacggaguucuccaaacauucaugcggauggccuggggcgggucuuacauugcgcuggacuccggaugcgauagaugggacuguaucaugaccagcuaccaguaucuuaucauucagaacacgacaugggaggaucacugccaguuuucucggcccuccccuaucggcuaccuggggcuccugagccaacgcaccagagacauuuauaucucccggcgccgccggggaacauucaccuggacccucucugauagcgaaggcaaggacacacccggcggguacugucugacgagauggaugcugauugaggccgagcucaaaugcuuuggaaauaccgcuguggccaaguguaacgaaaaacaugaugaggaguucugcgacaugcugcggcuuuuugauuucaauaagcaggcuauccagcgccugaaagcccccgcgcagauguccauccaacucauuaacaaggccgucaaugcucugaucaacgaccagcuuauuaugaagaaucaccugagagacaucaugugcauuccuuauugcaacuacagcaaauauugguaccucaaucacacaaccacagggaagaccucucugcccaaauguuggcugguguccaacggaagcuaccucaaugaaacgcauuucucugaugacaucgagcagcaagccgauaacaugaucacagagaugcugcagaaggaauauauggagcggcagggcaaaaccccucuugggcugguggaccucuuugucuucagcaccuccuuuuaccugauuucuaucuuccugcaccuuguuaagauuccgacacaucgccacguggugggaaaaagcugccccaagccucauagacucaaucacaugggcaucuguuccugcggccuguaugggcagcccggagucccugugaaguggaaacggugaggacuaguaauaaggaaacuguaugaaugucugugggcaggaagugaagagauccuucuguaaagguuuuuggaauuaugucugcugaauaauaaacuuuuuugaaauaauaaaucugguagaaaaaugagaucucaaaggcucuuuucagagccaccaaaaaaaaaaaaaaaaaaaaaaaaaaaaaaaaaaaaaaaaaaaaaaaaaaaaaaaaaaaaaaaaaaaaaaaaaaaaaaaaaaaaaaaaaaaaaaaaaaaaa

SEQ ID NO: 16227 - RNA, 1812 nt, Artificial Sequence
  mRNA product Design b-4 (hSL-A100) comprising derived and/or modified sequence from MOPV/LASV reassortant(IGS-1;Clade IV)__AFY05576__GPCmut1 (opt5)
aggagagucccgcagucggcguccagcggcucugcuuguucgugugugugucguugcaggccuuauucaagcuuaccaugggccagaucgugaccuucuuucaagaggucccccacguuauugaagaggugaugaacaucgugcugauugcccucagcguccuggcugugcuuaaggggcuguacaauuucgccacaugcggacucguuggccuggugacguuucuucugcucugugggagauccugcaccacaucucuguauaaaggagucuacgaacugcagacccucgagcugaacauggaaacacuuaauaugaccaugccucugagcuguacaaagaacaauucccaucacuauaucauggugggcaacgagaccgggcucgagcugacgcuuaccaauacaucuauuaucaaccauaaauucugcaaucugagcgacgcgcacaagaaaaaccucuacgaucaugcucugauguccaucauuucuaccuuucaccugagcaucccgaauuucaaccaguaugaagccauguccugugacuuuaauggaggcaagauuagcguucaguacaaccucucucacuccuaugccggcgaugcugccaaucauugcgggacaguggcuaacggaguccugcaaaccuucaugcggauggccuggggcgggagcuacaucgcgcuugacucuggaugcggcaacugggauuguauuaugacguccuaccaguaucugaucauucagaauacaaccugggaggaccacugccaguuuagcagacccucuccuaucggguaccucggacugcuuucccaacggacacgcgauaucuauauuagcagacggcgccggggcaccuucaccuggacacuguccgacucugaaggcgaggauacgcccgggggauacugucugacccgcuggaugcucaucgaggccgaacugaagugcuuuggcaacacagcuguggccaaauguaaugagaagcaugacgaagaguucugcgauaugcuuagacuguuugacuucaacaaacaggcuauucagcggcucaaggcccccgcgcagaugagcauccaacugauuaauaaagccgugaacgcucuuaucaaugaucagcugaucaugaagaaccaccuccgcgacauuaugugcaucccuuauugcaauuacuccaaguauugguaccugaaccacaccacaaccggaagaacgagccugcccaaauguuggcucgucucuaauggcuccuaccugaacgagacacauuucagcgacgauauugagcagcaagccgacaauaugaucaccgaaaugcuucagaaggaguauauggaacggcaggggaaaaccccucugggacucguugaucuguuuguguucucuaccagcuuuuaccugauuuccaucuuccuucaccucgugaagaucccgacacaucgccacauugucggcaaaucuugccccaagccucauagacugaaccacaugggcaucuguagcugcgggcuguauaaacagcccggagugccuguuaaguggaagcggugaggacuaguaauaaggaaacuguaugaaugucugugggcaggaagugaagagauccuucuguaaagguuuuuggaauuaugucugcugaauaauaaacuuuuuugaaauaauaaaucugguagaaaaaugagaucucaaaggcucuuuucagagccaccaaaaaaaaaaaaaaaaaaaaaaaaaaaaaaaaaaaaaaaaaaaaaaaaaaaaaaaaaaaaaaaaaaaaaaaaaaaaaaaaaaaaaaaaaaaaaaaaaaaaa

SEQ ID NO: 16228 - RNA, 1812 nt, Artificial Sequence
  mRNA product Design b-4 (hSL-A100) comprising derived and/or modified sequence from LASV(LM765-SLE-2012;Clade IV)__AIT17814__GPCmut1 (opt5)
aggagagucccgcagucggcguccagcggcucugcuuguucgugugugugucguugcaggccuuauucaagcuuaccaugggccagaucgugaccuucuuucaagaggucccccacguuauugaagaggugaugaacaucgugcugauugcccucagcauccuggcuguccuuaaggggcuguacaauuucgccacaugcggacucgugggccugguuacguuucuucugcucugugggagauccugcaccacaucucuguauaaaggaguguacgaacugcagacccucgagcugaacauggaaacacuuaauaugaccaugccucugagcuguacaaagaacaauucccaucacuauauuauggucggcaacgagaccgggcucgagcugacgcuuaccaauacaucuaucaucgaccauaaauucugcaaccugagcgaugcgcaccggaagaaucucuacgaccaugcucugauguccauuaucucuaccuuucaccugagcauuccgaacuucaaucaguaugaagccauguccugugauuuuaacggaggcaaaaucagcgugcaguacaaucucucucacuccuaugccaaggacgcugccgaucauugcggcacaguugcuaacggggugcugcaaaccuucaugcgcauggccuggggaggcagcuacauugcgcuugacucugggugcggacggugggauuguaucaugacguccuaccaguaucugauuauccagaauacaaccugggaggaccacugccaguuuagccgccccucuccuaucggcuaccucgggcugcuuucccaaagaacacgggauauuuauaucagccgcagacgccggggaaccuucaccuggacacuguccgacucugaaggcaaggauacgcccggcggguacugucugacccgguggaugcucauugaggccgagcugaaaugcuuuggaaacacagcugucgccaaguguaacgaaaaacaugacgaggaguucugcgauaugcuucgccuguuugacuucaauaagcaggcuauccagagacucaaagcccccgcgcagaugagcauucaacugaucaacaaggccgugaaugcucuuaucaacgaccagcugauuaugaagaaucaccuccgggauaucaugugcauuccuuauugcaacuacuccaaauauugguaccugaaucacaccacaaccgggaagacgagccugcccaaauguuggcucgugucuaacggauccuaccugaaugaaacacauuucagcgacgauaucgagcagcaagccgacaacaugauuaccgagaugcuucagaaggaauauauggagcgccagggcaaaaccccucuggggcucgucgaucuguuuguuuucucuaccagcuuuuaccugaucuccaucuuccuucaccucgugaagauuccgacacauagacacaucgugggaaaacccugcccuaagccccaucggcugaaucacaugggcauuuguucuugcggccuguauaagcagccugggguccccgugaaauggaagcgcugaggacuaguaauaaggaaacuguaugaaugucugugggcaggaagugaagagauccuucuguaaagguuuuuggaauuaugucugcugaauaauaaacuuuuuugaaauaauaaaucugguagaaaaaugagaucucaaaggcucuuuucagagccaccaaaaaaaaaaaaaaaaaaaaaaaaaaaaaaaaaaaaaaaaaaaaaaaaaaaaaaaaaaaaaaaaaaaaaaaaaaaaaaaaaaaaaaaaaaaaaaaaaaaaa

SEQ ID NO: 16229 - RNA, 1812 nt, Artificial Sequence
  mRNA product Design b-4 (hSL-A100) comprising derived and/or modified sequence from LASV(LM776-SLE-2012;Clade IV)__AIT17824__GPCmut1 (opt5)
aggagagucccgcagucggcguccagcggcucugcuuguucgugugugugucguugcaggccuuauucaagcuuaccaugggccagaucgugaccuucuuucaagaggucccccacguuauugaagaggugaugaacaucgugcugauugcccucagcauccuggcuguccuuaaggggcuguacaauuucgccacaugcggacucgugggccugguuacguuucuucugcucugugggagauccugcaccacaucuguguauaaaggagucuacgaacugcagacccuggagcucaacauggaaacacugaauaugaccaugccucuuagcuguacaaagaacaauucccaucacuauauuauggugggcaacgagaccgggcuggagcucacgcugaccaauacaucuaucaucaaccauaaauucugcaaucuuagcgacgcgcacaagaaaaaccuguacgaucaugcucucauguccauuaucucuaccuuucaccugagcauuccgaauuucaaccaguaugaagccauguccugugacuuuaauggaggcaagaucagcguucaguacaaccugucucacuccuaugccggcgaugcugccaaucauugcgggacaguggcuaacggaguccuccaaaccuucaugcggauggccuggggcgggagcuacauugcgcuggacucuggaugcggcaagugggauuguaucaugacguccuaccaguaucuuauuauccagaacacaaccugggaggaccauugccaguuuagccgccccucuccuaucggguaccugggacuccugucccaaagaacacgggauauuuauaucagccgcagacgccggggcaccuucaccuggacacucuccgacucugaaggcaaagauacgcccgggggauacugucugacccgguggaugcugauugaggccgagcucaagugcuuuggcaauacagcuguggccaaauguaacgaaaagcacgacgaggaguucugcgauaugcugcgccuuuuugacuucaauaaacaggcuauccagagacugaaggcccccgcgcagaugagcauucaacucaucaacaaggccgugaaugcucugaucaacgaucagcuuauuaugaaaaaucaucugcgggacaucaugugcauuccuuauugcaacuacuccaaguauugguaccucaaucacaccacaaccggaaaaacgagccugcccaaguguuggcuggucucuaacggcuccuaccucaaugaaacacacuucagcgacgauaucgagcagcaagccgacaacaugauuaccgagaugcugcagaaagaauauauggagcgccaggggaagaccccucuuggacugguugaucucuuuguguucucuaccagcuuuuaccugaucuccaucuuccugcaucuugugaaaauuccgacacacagacauaucgucggcaagucuugccccaagccucaccggcucaaucacaugggcauuuguagcugcgggcuguauaaacagcccggagugccuguucgcuggaagagaugaggacuaguaauaaggaaacuguaugaaugucugugggcaggaagugaagagauccuucuguaaagguuuuuggaauuaugucugcugaauaauaaacuuuuuugaaauaauaaaucugguagaaaaaugagaucucaaaggcucuuuucagagccaccaaaaaaaaaaaaaaaaaaaaaaaaaaaaaaaaaaaaaaaaaaaaaaaaaaaaaaaaaaaaaaaaaaaaaaaaaaaaaaaaaaaaaaaaaaaaaaaaaaaaa

SEQ ID NO: 16230 - RNA, 1812 nt, Artificial Sequence
  mRNA product Design b-4 (hSL-A100) comprising derived and/or modified sequence from LASV(Mad39;Clade IV)__ANH09722__GPCmut1 (opt5)
aggagagucccgcagucggcguccagcggcucugcuuguucgugugugugucguugcaggccuuauucaagcuuaccaugggccagaucgugaccuucuuucaagaggucccccacguuauugaagaggugaugaacaucgugcugauugcccucagcauccuggcuguccuuaaggggcuguacaauguggccacaugcggacucauuggccugguuacguuccuucugcucugugggagauccugcaccacaacccuguauaaaggaguguacgaacugcaggcgcucgagcugaacauggaaacacuuaauaugaccaugccucugucuuguacaaagaacaauagccaucacuauauccgggucggcaacgagaccgggcucgagcugacgcuuaccaauacaucccugaucaaccauaaauuuugcaaucucucugacgcucacaagaaaaaccuguacgaucaugcccugaugagcauuaucuccaccuuccaccucucuauuccgaauuuuaaccaguaugaagccaugagcugugacuucaaugauggaaagaucuccgugcaguacaaccugagccacacauaugcuggcgacaccgccaaucauugcggcacgguugcuaacggggugcuucaaacauuuaugcgcauggccuggggaggcucuuacauugcgcuggauuccgggugcggaggcugggacuguaucaugaccagcuaccaguaucucauuauccagaacacaaccugggaggaucacugccaguucucucggcccuccccuaucggguaccugggacuucugagccaacgcaccagagacauuuauaucucucggcgccgccggggcacauuuacguggacccuguccgauagcgaaggcaaggacacacccgggggauacugucucaccagauggaugcugauugaggccgagcuuaaaugcuucggcaauacagcugucgccaaguguaacgaaaaacaugaugaggaauuuugcgacaugcugcgccucuucgauuuuaauaagcaggcuauccagcggcugaaagcccccgcgcagauguccauucaacuuaucaacaaggccgugaaugcucugaucaacgaccagcucauuaugaagaaucaccugagagacaucaugugcauuccuuauugcaacuacucuaaauauugguaccugaaucacaccgugacgggaaagacaagccuccccaaauguuggcuggucuccaacggcagcuaccuuaaugaaacccauuucucugaugacaucgagcagcaagccgauaacaugauuaccgagaugcugcagaaggaauauauggagcggcaggggaaaacaccucucggacugguugaccuguucguguuuuccaccagcuucuaccuuaucucuaucuuucuccaccuggugaagauuccgacacaucgccacgucgugggcaaacccugcccuaagccccauagacugaaucacaugggcaucuguagcugcggguucuauaagcagccuggaguucccgugcgguggaaacgcugaggacuaguaauaaggaaacuguaugaaugucugugggcaggaagugaagagauccuucuguaaagguuuuuggaauuaugucugcugaauaauaaacuuuuuugaaauaauaaaucugguagaaaaaugagaucucaaaggcucuuuucagagccaccaaaaaaaaaaaaaaaaaaaaaaaaaaaaaaaaaaaaaaaaaaaaaaaaaaaaaaaaaaaaaaaaaaaaaaaaaaaaaaaaaaaaaaaaaaaaaaaaaaaaa

SEQ ID NO: 16231 - RNA, 1812 nt, Artificial Sequence
  mRNA product Design b-4 (hSL-A100) comprising derived and/or modified sequence from LASV(Z0947-SLE-2011;Clade IV)__AIT17840__GPCmut1 (opt5)
aggagagucccgcagucggcguccagcggcucugcuuguucgugugugugucguugcaggccuuauucaagcuuaccaugggccagaucgugaccuucuuucaagaggucccccacguuauugaagaggugaugaacaucgugcugauugcccucagcauccuggcuguccuuaaggggcuguacaauuucgccacaugcggacucgugggccugguuacguuucuucugcucugugggagauccugcaccauuucucuguauaaaggaguguacgaacugcagacacucgagcugaacauggaaacccuuaauaugacaaugccucugagcuguaccaagaacaauucccaucacuauaucauggucggcaacgagacagggcucgagcugacccuuacgaauaccucuaucauuaaccauaaauucugcaaucugagcgacgcgcacaagaaaaaccucuacgaucaugcucugauguccaucauuucuacauuucaccugagcaucccgaauuucaaccaguaugaagccauguccugugacuuuaauggaggcaagauuagcgugcaguacaaccucucucacuccuaugccggcgaugcugccaaucauugcgggaccguugcuaacggagugcugcaaacauucaugcggauggccuggggcgggagcuacaucgcgcuugacucuggaugcgauagaugggacuguauuaugaccuccuaccaguaucugaucauccagaacacgacaugggaggaucacugccaguuuagccggcccucuccuauuggcuaccucgggcugcuuucccaacgcaccagagacaucuauauuagccggcgccgccggggaacauucaccuggacccuguccgauucugaaggcaaggacacacccggcggguacugucugacgagauggaugcucaucgaggccgagcugaaaugcuuuggaaauaccgcugucgccaaguguaacgaaaaacaugaugaggaguucugcgacaugcuucggcuguuugauuucaauaagcaggcuauucagcgccucaaagcccccgcgcagaugagcauccaacugaucaacaaggccgugaaugcucuuauuaacgaccagcugaucaugaagaaucaccucagagacauuaugugcaucccuuauugcaacuacuccaaauauugguaccugaaucacacaaccacagggaagaccagccugcccaaauguuggcucgugucuaacggauccuaccugaaugaaacgcauuucagcgaugacauugagcagcaagccgauaacaugaucacagagaugcuucagaaggaauauauggagcggcagggcaaaaccccucuggggcucgucgaccuguuuguuuucucuaccagcuuuuaccugaucuccauuuuccuucaccucgugaagaucccgacacaucgccacauugugggaaaacccugcccuaagccccauagacugaaucacaugggcaucuguucuugcggccuguauaagcagccugggguccccgugaaauggaagcggugaggacuaguaauaaggaaacuguaugaaugucugugggcaggaagugaagagauccuucuguaaagguuuuuggaauuaugucugcugaauaauaaacuuuuuugaaauaauaaaucugguagaaaaaugagaucucaaaggcucuuuucagagccaccaaaaaaaaaaaaaaaaaaaaaaaaaaaaaaaaaaaaaaaaaaaaaaaaaaaaaaaaaaaaaaaaaaaaaaaaaaaaaaaaaaaaaaaaaaaaaaaaaaaaa

SEQ ID NO: 16232 - RNA, 1788 nt, Artificial Sequence
  mRNA product Design b-4 (A100) comprising derived and/or modified sequence from LASV(Josiah;Clade IV)__NP_694870__GPCmut1 (opt1)
aggagagucccgcagucggcguccagcggcucugcuuguucgugugugugucguugcaggccuuauucaagcuuaccaugggccagaucgugaccuucuuccaggaggucccccacgugaucgaggaggugaugaacaucguccugaucgcccucagcgugcuggccgugcugaaggggcucuacaacuucgcgaccugcggccuggucgggcuggugacguuccuccugcugugcggccgcuccugcaccaccagccucuacaaggggguguacgagcugcagacccuggagcucaacauggagacgcugaacaugaccaugccgcuguccugcaccaagaacaacagccaccacuacaucauggucggcaacgagaccggccucgagcugacgcugaccaacaccuccaucaucaaccacaaguucugcaaccucagcgacgcccacaagaagaaccuguacgaccacgcccugauguccaucaucagcaccuuccaccucuccauccccaacuucaaccaguacgaggccaugagcugcgacuucaacgggggcaagaucuccgugcaguacaaccugagccacuccuacgccggggacgcggccaaccacugcggcacgguggccaacgggguccugcagaccuucaugcggauggccuggggcggcagcuacaucgcgcucgacuccgggugcggcaacugggacugcaucaugaccagcuaccaguaccugaucauccagaacaccacgugggaggaccacugccaguucucccggcccagccccaucggguaccugggccuccugucccagcgcacccgggacaucuacaucagccgccggcgccggggcaccuucaccuggacgcugagcgacuccgaggggaaggacaccccgggcggguacugccugacccgcuggaugcucaucgaggccgagcugaagugcuucggcaacaccgccguggccaagugcaacgagaagcacgacgaggaguucugcgacaugcugcggcuguucgacuucaacaagcaggccauccagcgccugaaggcgcccgcccagaugagcauccagcugaucaacaaggccgugaacgcccucaucaacgaccagcugaucaugaagaaccaccuccgggacaucaugugcauccccuacugcaacuacuccaaguacugguaccucaaccacacgaccaccggccgcaccagccugcccaagugcuggcuggucuccaacggcagcuaccucaacgagacgcacuucuccgacgacaucgagcagcaggccgacaacaugaucaccgagaugcugcagaaggaguacauggagcggcaggggaagacgccccugggccucguggaccuguucguguucagcaccuccuucuaccugaucagcaucuuccugcaccucgucaagaucccgacccaccgccacaucguggggaaguccugccccaagccccaccggcugaaccacaugggcaucugcagcugcgggcuguacaagcagcccggcgugccggucaaguggaagcgcugaggacuaguaauaaggaaacuguaugaaugucugugggcaggaagugaagagauccuucuguaaagguuuuuggaauuaugucugcugaauaauaaacuuuuuugaaauaauaaaucugguagaaaaaugagaucuaaaaaaaaaaaaaaaaaaaaaaaaaaaaaaaaaaaaaaaaaaaaaaaaaaaaaaaaaaaaaaaaaaaaaaaaaaaaaaaaaaaaaaaaaaaaaaaaaaaa

SEQ ID NO: 16233 - RNA, 1785 nt, Artificial Sequence
  mRNA product Design b-4 (A100) comprising derived and/or modified sequence from LASV(LP;Clade I)__AAF86701__GPCmut1 (opt1)
aggagagucccgcagucggcguccagcggcucugcuuguucgugugugugucguugcaggccuuauucaagcuuaccaugggccagaucaucaccuucuuccaggaggugccccacgucaucgaggaggugaugaacaucgugcugaucgcccucagccugcuggccauccucaaggggcuguacaacaucgcgaccugcggcaucaucgggcuggucgccuuccucuuccugugcggcaaguccugcagccugacgcucaagggcggguacgagcugcagacccuggagcucaacauggagacccugaacaugaccaugccgcuguccugcacgaagaacagcucccaccacuacauccgcgugggcaacgagaccgggcucgagcugacccugaccaacacgagcaucaucaaccacaaguucugcaaccucuccgacgcccacaagaagaaccuguacgaccacgcccugaugagcaucaucuccaccuuccaccucagcauccccaacuucaaccaguacgaggccauguccugcgacuucaacggcgggaagaucagcgugcaguacaaccugucccacagcuacgcgggcgacgccgccgagcacugcgggaccgucgccaacggcgugcugcagaccuucaugcggauggcguggggcgggcgcuacaucgcccucgacuccggcugcgggaacugggacugcaucaugacgagcuaccaguaccugaucauccagaacaccaccugggaggaccacugccaguucucccggcccagccccaucggcuaccugggccuccugucccagcgcacccgggacaucuacaucagccgccggcgccgggggacguucaccuggacccugagcgacuccgagggcaacgagacccccgggggcuacugccugacgcgcuggaugcucaucgaggccgagcugaagugcuucgggaacaccgccguggccaagugcaacgagaagcacgacgaggaguucugcgacaugcugcggcuguucgacuucaacaagcaggcgauccgccggcugaaggcccccgcccagaugagcauccagcugaucaacaaggccgucaacgcccucaucaacgaccagcugaucaugaagaaccaccuccgcgacaucaugugcauccccuacugcaacuacuccaaguacugguaccucaaccacaccagcuccggccggaccagccugcccaagugcuggcugaucuccaacgggagcuaccucaacgagacgcaguucuccgacgacaucgagcagcaggcggacaacaugaucaccgagaugcugcagaaggaguacaucgagcgccagggcaagaccccgcuggggcucguggacaucuucaucuucagcaccuccuucuaccugaucagcaucuuccugcaccugaucaagaucccgacgcaccggcacaucgugggcaagcccugccccaagccccaccgccucaaccacaugggggucugcuccugcggccuguacaagcacccgggcgugcccaccaaguggaagcggugaggacuaguaauaaggaaacuguaugaaugucugugggcaggaagugaagagauccuucuguaaagguuuuuggaauuaugucugcugaauaauaaacuuuuuugaaauaauaaaucugguagaaaaaugagaucuaaaaaaaaaaaaaaaaaaaaaaaaaaaaaaaaaaaaaaaaaaaaaaaaaaaaaaaaaaaaaaaaaaaaaaaaaaaaaaaaaaaaaaaaaaaaaaaaaaaa

SEQ ID NO: 16234 - RNA, 1785 nt, Artificial Sequence
  mRNA product Design b-4 (A100) comprising derived and/or modified sequence from LASV(803213;Clade II)__AAF86703__GPCmut1 (opt1)
aggagagucccgcagucggcguccagcggcucugcuuguucgugugugugucguugcaggccuuauucaagcuuaccaugggccagaucaucaccuucuuccaggaggugccccacgucaucgaggaggugaugaacaucgugcugaucgcccucagccugcuggccauccucaaggggaucuacaacgucgcgaccugcggccuguucgggcugaucuccuuccuccugcugugcggccgcagcugcuccgugacguacaaggggguguacgagcuccagacccuggagcugaacauggccaaccucaacaugaccaugccgcugagcugcaccaagaacaacucccaccacuacaucauggucggcaacgagacgggccuggagcucacccugaccaacaccagcaucaucaaccacaaguucugcaaccuguccgacgcccacaagaagaaccucuacgaccacgcccugaugagcaucaucuccacguuccaccugagcauccccaacuucaaccaguacgaggccauguccugcgacuucaacgggggcaagaucagcgugcaguacaaccucucccacagcuucgcgguggacgccgccaaccacugcgggaccaucgccaacggcguccugcagaccuucaugcggauggcguggggcggguccuacaucgcccuggacagcggcugcgggaacugggacugcaucaugaccuccuaccaguaccucaucauccagaacacgaccugggaggaccacugccaguucagccgccccucccccaucggcuaccuggggcugcucagccagcggacccgcgacaucuacaucagccggcgccgccggggcaccuucacguggacccucuccgacagcgagggcaacgaggcccccgggggcuacugccugacccgguggaugcugaucgaggccgagcucaagugcuucgggaacaccgccguggcgaagugcaacgagaagcacgacgaggaguucugcgacaugcugcgccuguucgacuucaacaagcaggccaucaagcggcucaagacgcccgcccagauguccauccagcugaucaacaaggccgugaacgcccugaucaacgaccagcucaucaugaagaaccaccuccgcgacaucaugugcauccccuacugcaacuacagccgguacugguaccugaaccacaccgucaccgggaagaccucccugccccgcugcuggcuggugagcaacggcuccuaccugaacgagacgcacuucagcgacgacaucgagcagcaggcggacaacaugaucaccgagaugcuccagaaggaguacauggaccggcagggcaagaccccgcuggggcugguggaccucuucgucuucuccaccagcuucuaccugaucuccaucuuccugcaccuggugaagaucccgacgcaccgccacaucgugggcaagcccugccccaagccccaccggcucaaccacauggggaucugcagcugcggccuguacaagcacccggggguccccgugaaguggaagcgcugaggacuaguaauaaggaaacuguaugaaugucugugggcaggaagugaagagauccuucuguaaagguuuuuggaauuaugucugcugaauaauaaacuuuuuugaaauaauaaaucugguagaaaaaugagaucuaaaaaaaaaaaaaaaaaaaaaaaaaaaaaaaaaaaaaaaaaaaaaaaaaaaaaaaaaaaaaaaaaaaaaaaaaaaaaaaaaaaaaaaaaaaaaaaaaaaa

SEQ ID NO: 16235 - RNA, 1785 nt, Artificial Sequence
  mRNA product Design b-4 (A100) comprising derived and/or modified sequence from LASV(GA391;Clade III)__CAA36645__GPCmut1 (opt1)
aggagagucccgcagucggcguccagcggcucugcuuguucgugugugugucguugcaggccuuauucaagcuuaccaugggccagaucgugaccuucuuccaggaggucccccacgugaucgaggaggugaugaacaucguccugaucgcccucagcauccuggccauccugaaggggcucuacaacguggcgaccugcggccugaucgggcuggugacguuccuccugcuguccggccgcagcugcucccucaucuacaaggggaccuacgagcugcagacccuggagcucaacauggagacccugaacaugacgaugccgcugagcugcaccaagaacaacucccaccacuacauccgggucggcaacgagaccggccucgagcugacccugacgaacaccagcauccucaaccacaaguucugcaaccuguccgacgcccacaagcgcaaccuguacgaccacagccucauguccaucaucagcaccuuccaccuguccauccccaacuucaaccaguacgaggccaugagcugcgacuucaacgggggcaagaucaccgugcaguacaaccugucccacagcuucgccguggacgccgcggggcacugcggcacgcucgccaacgggguccugcagaccuucaugcggauggccuggggcggcuccuacaucgcccuggacagcgggugcggcaacugggacugcaucaugaccuccuaccaguaccucaucauccagaacaccacgugggacgaccacugccaguucagccggcccucccccaucggguaccugggccugcucagccagcgcacccgggacaucuacaucagccgccggcgccggggcaccuucaccuggacgcucuccgacagcgaggggaacgagaccccgggcggguacugccugacccgcuggaugcugaucgaggcggagcucaagugcuucggcaacaccgccguggccaagugcaacgagaagcacgacgaggaguucugcgacaugcugcggcuguucgacuucaacaagcaggccauccgccggcucaagacgcccgcccagauguccauccagcugaucaacaaggcggugaacgcccugaucaacgaccagcucaucaugaagaaccaccuccgcgacaucaugugcauccccuacugcaacuacagccgguacugguaccugaaccacaccuccaccggcaagaccagccugccccgcugcuggcugaucuccaacggcagcuaccugaacgagacgaaguucuccgacgacaucgagcagcaggccgacaacaugaucaccgagaugcuccagaaggaguacaucgaccggcaggggaagacgccccugggccuggucgaccuguucguguucagcaccuccuucuaccucaucagcaucuuccugcaccuggugaagaucccgacccaccgccacaucgucgggaagcccugccccaagccccaccggcucaaccacaugggcaucugcuccugcgggcuguacaagcagccgggcgugcccgugcgcuggaagcggugaggacuaguaauaaggaaacuguaugaaugucugugggcaggaagugaagagauccuucuguaaagguuuuuggaauuaugucugcugaauaauaaacuuuuuugaaauaauaaaucugguagaaaaaugagaucuaaaaaaaaaaaaaaaaaaaaaaaaaaaaaaaaaaaaaaaaaaaaaaaaaaaaaaaaaaaaaaaaaaaaaaaaaaaaaaaaaaaaaaaaaaaaaaaaaaaa

SEQ ID NO: 16236 - RNA, 1788 nt, Artificial Sequence
  mRNA product Design b-4 (A100) comprising derived and/or modified sequence from LASV(AV;Clade V)__CCA30314__GPCmut1 (opt1)
aggagagucccgcagucggcguccagcggcucugcuuguucgugugugugucguugcaggccuuauucaagcuuaccaugggccagaucgugaccuucuuccaggaggucccccacgugaucgaggaggugaugaacaucguccugaucgcccucagcauccuggccgugcugaaggggcucuacaacaucgcgaccugcggccugaucgggcugaucacguuccuccugcugugcggccgcuccugcagcuccaaccucuacaaggggguguacgagcugcagagccuggaccucaacauggagacccugaacaugaccaugccgcuguccugcaccaagaacaacagccaccacuacauccgggucggcaacgacacgggccucgagcugacccugaccaacaccuccauccucaaccacaaguucugcaaccugagcgacgcccacaagaaggaccuguacgaccacgcccucauguccaucaucagcacguuccaccuguccauccccaacuucaaccaguacgaggccaugagcugcgacuucaacgggggcaagaucuccgugcaguacaaccugagccacuccuacgccaucgacgcggccaaccacugcgggaccguggccaacggcauccuccagaccuucaugcgcauggccuggggcgggagcuacaucgcgcuggacuccggcugcgggaacugggacugcaucaugaccagcuaccaguaccugaucauccagaacacgaccugggagaaccacugccaguucucccgccccagccccaucggcuaccucgggcugcugagccagcggacccgcgacaucuacaucucccggcgccgccggggcaccuucacguggacccugagcgacuccgagggcaacgccacccccgggggcuacugccucacccgguggaugcugaucgaggccgagcugaagugcuucgggaacacggccgucgccaagugcaacgagaagcacgacgaggaguucugcgacaugcuccgccuguucgacuucaacaagcaggcgaucagccggcugaagucccccgcccagaugagcauccagcucaucaacaaggccgugaacgcccugaucaacgaccagcugaucaugaagaaccaccuccgcgacaucaugugcauccccuacugcaacuacuccaaguacugguaccugaaccacaccaucaccgggaagaccagccugcccaagugcuggcucguguccaacggcagcuaccugaacgagacgcacuucuccgacgacaucgagcagcaggccgacaacaugaucaccgagaugcugcagaaggaguacauggagcggcagggcaagaccccgcucgggcuggucgaccuguucguguucagcaccuccuucuaccugaucagcaucuuccuccgccuggugaagaucccgacgcaccggcacaucgucggcaagcccugccccaagccccaccgccugaaccacauggggaucugcuccugcggccucuacaagcagccgggggugcccgugcgguggaagcgcugaggacuaguaauaaggaaacuguaugaaugucugugggcaggaagugaagagauccuucuguaaagguuuuuggaauuaugucugcugaauaauaaacuuuuuugaaauaauaaaucugguagaaaaaugagaucuaaaaaaaaaaaaaaaaaaaaaaaaaaaaaaaaaaaaaaaaaaaaaaaaaaaaaaaaaaaaaaaaaaaaaaaaaaaaaaaaaaaaaaaaaaaaaaaaaaaa

SEQ ID NO: 16237 - RNA, 1785 nt, Artificial Sequence
  mRNA product Design b-4 (A100) comprising derived and/or modified sequence from LASV(Togo/2016/7082;Clade VI)__AMR44577__GPCmut1 (opt1)
aggagagucccgcagucggcguccagcggcucugcuuguucgugugugugucguugcaggccuuauucaagcuuaccaugggccagaucaucaccuucuuccaggaggugccccacgucaucgaggaggugaugaacaucgugcugaucgcccucagccugcuggccauccucaagggggucuacaacguggcgaccugcggcaucaucgggcuggugacguuccuguuccucugcggccgcuccugcagccugaucuacaagggguccuacgagcugcagacccucgagcugaacauggagacccugaacaugaccaugccgcucagcugcacgaagaacuccagccaccacuacauccgggucggcaacgagaccggccuggagcugacccucaccaacacguccaucaucaaccacaaguucugcaaccugagcgacgcccacaagcgcaaccuguacgaccacgcccucauguccauccugagcaccuuccaccuguccauccccaacuucaaccaguacgaggccaugagcugcgacuucaacgggggcaagaucuccgugcaguacaaccucagccacgccuacgcgguggacgccgccgagcacugcgggaccgucgccaacggcgugcugcagaccuucaugcggauggcguggggcggguccuacaucgcccuggacagcggcugcgggaacugggacugcaucaugacguccuaccaguaccucaucauccagaacaccaccugggaggaccacugccaguucagccggcccucccccaucggcuaccuggggcugcucagccagcgcacccgggacaucuacaucagccgccggcgccggggcacguucaccuggacccucuccgacagcgagggcaacgagacccccgggggcuacugccugacgcgcuggaugcugaucgaggccgagcucaagugcuucgggaacaccgccguggccaagugcaacgagaagcacgacgaggaguucugcgacaugcugcggcuguucgacuucaacaagcaggcgauccagcgccucaagucccccgcccagaugagcauccagcugaucaacaaggccgucaacgcccugaucaacgaccagcucaucaugaagaaccaccuccgggacaugaugugcauccccuacugcaacuacuccaaguacugguaccugaaccacaccagcuccgggcgcaccagccugcccaagugcuggcugguguccaacggcagcuaccugaacgagacgcacuucuccgacgacaucgagcagcaggccgacaacaugaucaccgagaugcuccagaaggaguacaucgaccggcagggcaagaccccgcuggggcugguggaccucuucgucuucagcaccuccuucuaccugaucagcaucuuccugcaccugaucaagaucccgacgcaccgccacaucgugggcaagcccugccccaagccccaccggcucaaccacauggggaucugcuccugcggccuguacaagcagccgggggugcccacccgcuggaagcggugaggacuaguaauaaggaaacuguaugaaugucugugggcaggaagugaagagauccuucuguaaagguuuuuggaauuaugucugcugaauaauaaacuuuuuugaaauaauaaaucugguagaaaaaugagaucuaaaaaaaaaaaaaaaaaaaaaaaaaaaaaaaaaaaaaaaaaaaaaaaaaaaaaaaaaaaaaaaaaaaaaaaaaaaaaaaaaaaaaaaaaaaaaaaaaaaa

SEQ ID NO: 16238 - RNA, 1785 nt, Artificial Sequence
  mRNA product Design b-4 (A100) comprising derived and/or modified sequence from LASV(KAK-428;Clade n.d. (VII))__ANH09740__GPCmut1 (opt1)
aggagagucccgcagucggcguccagcggcucugcuuguucgugugugugucguugcaggccuuauucaagcuuaccaugggccagaucgugaccuucuuccaggaggucccccacgugaucgaggaggugaugaacaucguccugaucgcccucagccugcuggccauccucaaggggcuguacaacuucgcgaccugcggcgugaucgggcugaucacguuccuccugcugugcggccgcuccugcagcgccaccuacaaggggcaguacgagcuccagacccuggagcugaacauggagucccucaacaugaccaugccgcugagcugcacgaagaacaacucccaccacuacauccgggccggcaacaacaccggccuggagcucacccugaccaacacgagcaucaucucccacaaguucugcaaccugagcgacgcccacaagaagaaccucuacgaccacacccugauguccaucaucaccaccuuccaccugagcauccccaacuucaaccaguacgaggccauguccugcgacuucaacgggggcaagaucagcauccaguacaaccucucccacagcuacgcgggggacgccgcccagcacugcggcacgguggccaacgggguccugcagaccuucaugcgcauggcguggggcggcuccuaccuggcccucgacagcgggugccgcggcugggacugcaucaucuccagcuaccaguaccugaucauccagaacaccaccugggacgaccacugccaguucucccggcccagccccaucggguaccugggcuucgugagccagaagacgcgcgacaucuacaucucccggcgccgccggggcaccuucaccuggacccugagcgacuccgaggggcacgacaugccgggcggguacugccucacgcgguggaugcugaucgaggccgaccugaagugcuucggcaacaccgccguggccaagugcaacgagaagcacgacgaggaguucugcgacauguggcgccucuucgacuucaacaagcaggcgauccagcggcugaaggcccccgcccagaugaacauccagcugaucaacaaggccgucaacgcccucaucaacgaccagcugaugaugaagaaccaccuccgcgacaucaugugcauccccuacugcaacuacagcaaguucugguaccugaacaacaccaccacgggccggaccucccugccccgcugcuggcugaucagcaacggcuccuaccucaacgagacccacuucagcgacgacaucgagcagcaggcggacaacaugaucaccgagaugcugcagaaggaguacauggaccggcaggggaagacgccccugggccucguggaccuguucguguucuccaccagcuucuaccugaucaccaucuuccuccaccuggucaagaucccgacccaccgccacaucguggggaagcccugccccaagccccaccggcugaaccacaugggcaucugcuccugcgggcuguacaagcagccgggcgugcccguccgcuggaagcggugaggacuaguaauaaggaaacuguaugaaugucugugggcaggaagugaagagauccuucuguaaagguuuuuggaauuaugucugcugaauaauaaacuuuuuugaaauaauaaaucugguagaaaaaugagaucuaaaaaaaaaaaaaaaaaaaaaaaaaaaaaaaaaaaaaaaaaaaaaaaaaaaaaaaaaaaaaaaaaaaaaaaaaaaaaaaaaaaaaaaaaaaaaaaaaaaa

SEQ ID NO: 16239 - RNA, 1785 nt, Artificial Sequence; identical to SEQ ID NO: 16233
  mRNA product Design b-4 (A100) comprising derived and/or modified sequence from LASV(Pinneo-NIG-1969;Clade I)__AIT17836__GPCmut1 (opt1)

SEQ ID NO: 16240 - RNA, 1785 nt, Artificial Sequence
  mRNA product Design b-4 (A100) comprising derived and/or modified sequence from LASV(ISTH0009-NIG-2011;Clade II)__AIT17404__GPCmut1 (opt1)
aggagagucccgcagucggcguccagcggcucugcuuguucgugugugugucguugcaggccuuauucaagcuuaccaugggccagaucaucaccuucuuccaggaggugccccacgucaucgaggaggugaugaacaucgugcugaucgcccucagccugcuggccauccucaaggggaucuacaacgucgcgaccugcggccuguucgggcugguguccuuccuccugcugugcggccgcagcugcuccacgaccuacaaggggguguacgagcuccagacccuggagcuggacauggccagccucaacaugaccaugccgcuguccugcacgaagaacaacagccaccacuacaucauggucggcaacgagaccggccuggagcucacccugaccaacacguccaucaucaaccacaaguucugcaaccugagcgacgcccacaagaagaaccucuacgaccacgcccugauguccaucaucagcaccuuccaccuguccauccccaacuucaaccaguacgaggccaugagcugcgacuucaacgggggcaagaucuccgugcaguacaaccucagccacgcguacgccguggacgccgccaaccacugcgggaccaucgcgaacggcguccugcagaccuucaugcggauggccuggggcggguccuacaucgcccuggacagcggcugcggguccugggacugcaucaugacgagcuaccaguaccucaucauccagaacaccaccugggaggaccacugccaguucucccgccccagccccaucggcuaccuggggcugcucagccagcggacccgcgacaucuacaucucccggcgccgccggggcacguucaccuggacccucagcgacuccgagggcaacgagacccccgggggcuacugccugacgcgguggaugcugaucgaggccgagcucaagugcuucgggaacaccgccguggcgaagugcaacgagaagcacgacgaggaguucugcgacaugcugcgccuguucgacuucaacaagcaggccauccggcgccucaagacccccgcccagaugagcauccagcugaucaacaaggccgugaacgcccugaucaacgaccagcucaucaugaagaaccaccuccgggacaucaugugcaucccguacugcaacuacuccaaguacugguaccugaaccacaccgucacggggaagaccagccugccccgcugcuggcugguguccaacggcagcuaccugaacgagacccacuucuccgacgacaucgagcagcaggcggacaacaugaucaccgagcuccugcagaaggaguacauggaccggcagggcaagacgccccuggggcucguggaccuguucgucuucagcaccuccuucuaccugaucagcaucuuccugcaccucaucaagaucccgacccaccgccacaucaccggcaagcccugccccaagccccaccggcugaaccacauggggaucugcuccugcggccuguacaagcacccgggggugcccgugaaguggaagcgcugaggacuaguaauaaggaaacuguaugaaugucugugggcaggaagugaagagauccuucuguaaagguuuuuggaauuaugucugcugaauaauaaacuuuuuugaaauaauaaaucugguagaaaaaugagaucuaaaaaaaaaaaaaaaaaaaaaaaaaaaaaaaaaaaaaaaaaaaaaaaaaaaaaaaaaaaaaaaaaaaaaaaaaaaaaaaaaaaaaaaaaaaaaaaaaaaa

SEQ ID NO: 16241 - RNA, 1785 nt, Artificial Sequence
  mRNA product Design b-4 (A100) comprising derived and/or modified sequence from LASV(ISTH2010-NIG-2012;Clade II)__AIT17482__GPCmut1 (opt1)
aggagagucccgcagucggcguccagcggcucugcuuguucgugugugugucguugcaggccuuauucaagcuuaccaugggccagaucaucaccuucuuccaggaggugccccacgucaucgaggaggugaugaacaucgugcugaucgcccucagccugcuggccauccucaaggggaucuacaacgucgcgaccugcggccuguucgggcugguguccuuccuccugcugugcggccgcagcugcuccacgaccuacaaggggguguacgagcuccagacccuggagcuggacauggccagccucaacaugaccaugccgcuguccugcacgaagaacaacagccaccacuacaucauggucggcaacgagaccggccuggagcucacccugaccaacacguccaucaucaaccacaaguucugcaaccugagcgacgcccacaagaagaaccucuacgaccacgcccugauguccaucaucagcaccuuccaccuguccauccccaacuucaaccaguacgaggccaugagcugcgacuucaacgggggcaagaucuccgugcaguacaaccucagccacgcguacgccguggacgccgccaaccacugcgggaccaucgcgaacggcguccugcagaccuucaugcggauggccuggggcggguccuacaucgcccuggacagcggcugcggguccugggacugcaucaugacgagcuaccaguaccucaucauccagaacaucaccugggaggaccacugccaguucucccgccccagccccaucggcuaccuggggcugcucagccagcggacccgcgacaucuacaucucccggcgccgccggggcaccuucacguggacccucagcgacuccgagggcaacgagacccccgggggcuacugccugacccgguggaugcugaucgaggccgagcucaagugcuucgggaacacggccguggcgaagugcaacgagaagcacgacgaggaguucugcgacaugcugcgccuguucgacuucaacaagcaggccauccggcgccucaagacccccgcccagaugagcauccagcugaucaacaaggccgugaacgcccugaucaacgaccagcucaucaugaagaaccaccuccgggacaucaugugcauccccuacugcaacuacuccaaguacugguaccugaaccacaccgucaccgggaagacgagccugccccgcugcuggcugguguccaacggcagcuaccugaacgagacccacuucuccgacgacaucgagcagcaggcggacaacaugaucaccgagcuccugcagaaggaguacaucgaccggcagggcaagaccccgcuggggcucguggaccuguucgucuucagcacguccuucuaccugaucagcaucuuccugcaccucgugaagaucccgacccaccgccacguggucggcaagcccugccccaagccccaccggcugaaccacauggggaucugcuccugcggccuguacaagcacccgggggugcccgugaaguggaagcgcugaggacuaguaauaaggaaacuguaugaaugucugugggcaggaagugaagagauccuucuguaaagguuuuuggaauuaugucugcugaauaauaaacuuuuuugaaauaauaaaucugguagaaaaaugagaucuaaaaaaaaaaaaaaaaaaaaaaaaaaaaaaaaaaaaaaaaaaaaaaaaaaaaaaaaaaaaaaaaaaaaaaaaaaaaaaaaaaaaaaaaaaaaaaaaaaaa

SEQ ID NO: 16242 - RNA, 1785 nt, Artificial Sequence
  mRNA product Design b-4 (A100) comprising derived and/or modified sequence from LASV(Lassa virus/H.sapiens-wt/NGA/2015/ISTH_0543;Clade II)__AVO03639__GPCmut1 (opt1)
aggagagucccgcagucggcguccagcggcucugcuuguucgugugugugucguugcaggccuuauucaagcuuaccaugggccagaucaucaccuucuuccaggaggugccccacgucaucgaggaggugaugaacaucgugcugaucgcccucagccugcuggccauccucaaggggaucuacaacgucgcgaccugcggccuguucgggcugguguccuuccuccugcugugcggccgcagcugcuccacgaccuacaaggggguguacgagcuccagacccuggagcuggacauggccaaccucaacaugaccaugccgcugagcugcacgaagaacaacucccaccacuacaucauggucggcaacgagaccggccuggagcucacccugaccaacacgagcaucaucaaccacaaguucugcaaccuguccgacgcccacaagaagaaccucuacgaccacgcccugaugagcaucaucuccaccuuccaccugagcauccccaacuucaaccaguacgaggccauguccugcgacuucaacgggggcaagaucagcgugcaguacaaccucucccacaccuacgcgguggacgccgccaaccacugcgggaccaucgccaacggcguccugcagacguucaugcggauggcguggggcgggagcuacaucgcccuggacuccggcugcgggagcugggacugcaucaugaccuccuaccaguaccucgugauccagaacaccaccugggaggaccacugccaguucagccgccccucccccaucggcuaccuggggcugcucagccagcggacgcgcgacaucuacaucagccggcgccgccggggcaccuucaccuggacccucuccgacagcgagggcaacgagacgcccgggggcuacugccugacccgguggaugcugaucgaggccgagcucaagugcuucgggaacaccgccguggccaagugcaacgagaagcacgacgaggaguucugcgacaugcugcgccuguucgacuucaacaagcaggcgauccggcgccucaagacccccgcccagauguccauccagcugaucaacaaggccgucaacgcccugaucaacgaccagcucaucaugaagaaccaccuccgggacaucaugugcauccccuacugcaacuacagcaaguacugguaccugaaccacacggugaccgggaagaccucccugccccgcugcuggcuggugagcaacggcuccuaccugaacgagacccacuucagcgacgacaucgagcagcaggccgacaacaugaucacggagcuccugcagaaggaguacaucgaccggcagggcaagaccccgcuggggcucgucgaccuguucguguucuccaccagcuucuaccugaucuccaucuuccugcaccucgugaagaucccgacccaccgccacaucacgggcaagcccugccccaagccccaccggcugaaccacauggggaucugcagcugcggccuguacaagcacccggggguccccgugaaguggaagcgcugaggacuaguaauaaggaaacuguaugaaugucugugggcaggaagugaagagauccuucuguaaagguuuuuggaauuaugucugcugaauaauaaacuuuuuugaaauaauaaaucugguagaaaaaugagaucuaaaaaaaaaaaaaaaaaaaaaaaaaaaaaaaaaaaaaaaaaaaaaaaaaaaaaaaaaaaaaaaaaaaaaaaaaaaaaaaaaaaaaaaaaaaaaaaaaaaa

SEQ ID NO: 16243 - RNA, 1785 nt, Artificial Sequence
  mRNA product Design b-4 (A100) comprising derived and/or modified sequence from LASV(Lassa virus/H.sapiens-wt/NGA/2016/ISTH_0009;Clade II)__AVO03571__GPCmut1 (opt1)
aggagagucccgcagucggcguccagcggcucugcuuguucgugugugugucguugcaggccuuauucaagcuuaccaugggccagaucaucaccuucuuccaggaggugccccacgucaucgaggaggugaugaacaucgugcugaucgcccucagccugcuggccauccucaaggggaucuacaacgucgcgaccugcggccugcuggggcucguguccuuccugcugcucugcggccgcagcugcuccacgaccuacaaggggguguacgagcugcagacccuggagcucgacauggccagccugaacaugaccaugccgcuguccugcacgaagaacaacagccaccacuacaucauggucggcaacgagaccggccucgagcugacccugaccaacacguccaucaucaaccacaaguucugcaaccucagcgacgcccacaagaagaaccuguacgaccacgcccugauguccaucaucagcaccuuccaccucuccauccccaacuucaaccaguacgaggccaugagcugcgacuucaacgggggccggaucuccgugcaguacaaccugagccacuccuacgcgguggacgccgccaaccacugcgggaccaucgccaacggcguccugcagaccuucaugcgcauggcguggggcgggagcuacaucgcccucgacuccggcugcgggagcugggacugcaucaugacguccuaccaguaccugaucauccagaacaccaccugggaggaccacugccaguucagccggcccagccccaucggcuaccuggggcuccugucccagcgcacccgggacaucuacaucagccgccggcgccggggcacguucaccuggacccuguccgacagcgagggcaacgagacccccgggggcuacugccugacgcgcuggaugcucaucgaggccgagcugaagugcuucgggaacaccgccguggccaagugcaacgagaagcacgacgaggaguucugcgacaugcugcggcuguucgacuucaacaagcaggcgauccgccggcugaagacccccgcccagauguccauccagcugaucaacaaggccgugaacgcccucaucaacgaccagcugaucaugaagaaccaccuccgcgacaucaugugcaucccguacugcaacuacagcaaguacugguaccucaaccacaccgucacggggaagaccucccugccccggugcuggcuggugagcaacggcuccuaccucaacgagacccacuucagcgacgacaucgagcagcaggccgacaacaugaucaccgagcugcugcagaaggaguacaucgaccgccagggcaagacgccccucgggcugguggaccuguucgucuucuccaccagcuucuaccugaucuccaucuuccuccaccuggugaagaucccgacccaccggcacaucaccggcaagcccugccccaagccccaccgccugaaccacauggggaucugcagcugcggccucuacaaccacccgggggugcccgucaaguggaagcggugaggacuaguaauaaggaaacuguaugaaugucugugggcaggaagugaagagauccuucuguaaagguuuuuggaauuaugucugcugaauaauaaacuuuuuugaaauaauaaaucugguagaaaaaugagaucuaaaaaaaaaaaaaaaaaaaaaaaaaaaaaaaaaaaaaaaaaaaaaaaaaaaaaaaaaaaaaaaaaaaaaaaaaaaaaaaaaaaaaaaaaaaaaaaaaaaa

SEQ ID NO: 16244 - RNA, 1785 nt, Artificial Sequence
  mRNA product Design b-4 (A100) comprising derived and/or modified sequence from LASV(Lassa virus/H.sapiens-wt/NGA/2016/ISTH_0017;Clade II)__AVO03567__GPCmut1 (opt1)
aggagagucccgcagucggcguccagcggcucugcuuguucgugugugugucguugcaggccuuauucaagcuuaccaugggccagaucaucaccuucuuccaggaggugccccacgucaucgaggaggugaugaacaucgugcugaucgcccucagccugcuggccauccucaaggggaucuacaacgucgcgaccugcggccuguucgggcugguguccuuccuccugcugugcggccgcagcugcuccacgaccuacaaggggguguacgagcuccagacccuggagcuggacauggccagccucaacaugaccaugccgcuguccugcacgaagaacaacagccaccacuacaucauggucggcaacgagaccggccuggagcucacccugaccaacacguccaucaucaaccacaaguucugcaaccugagcgacgcccacaagaagaaccucuacgaccacgcccugauguccaucaucagcaccuuccaccuguccauccccaacuucaaccaguacgaggccaugagcugcgacuucaacgggggcaagaucuccgugcaguacaaccucagccacaccuacgcgaucgacgccgccaaccacugcgggaccaucgccaacggcgugcugcagacguucaugcggauggcguggggcggguccuacaucgcccuggacagcggcugcggguccugggacugcaucaugaccagcuaccaguaccucaucauccagaacaccaccugggaggaccacugccaguucucccgccccagccccaucggcuaccuggggcugcucagccagcggacgcgcgacaucuacaucucccggcgccgccggggcaccuucaccuggacccucagcgacuccgagggcaacgagacgcccgggggcuacugccugacccgguggaugcugaucgaggccgagcucaagugcuucgggaacaccgccgucgccaagugcaacgagaagcacgacgaggaguucugcgacaugcugcgccuguucgacuucaacaagcaggcgauccggcgccucaagacccccgcccagaugagcauccagcugaucaacaaggccgugaacgcccugaucaacgaccagcucaucaugaagaaccaccuccgggacaucaugugcauccccuacugcaacuacuccaaguacugguaccugaaccacacggugaccgggaagaccagccugccccgcugcuggcuggucuccaacggcagcuaccugaacgagacccacuucuccgacgacaucgagcagcaggccgacaacaugaucacggagcuccugcagaaggaguacauggaccggcagggcaagaccccgcuggggcucguggaccuguucguguucagcaccuccuucuaccugaucagcaucuuccugcaccucguccgcaucccgacccaccggcacgugaucggcaagcccugccccaagccccaccgccugaaccacauggggaucugcuccugcggccuguacaagcacccgggggugcccgucaaguggaagcggugaggacuaguaauaaggaaacuguaugaaugucugugggcaggaagugaagagauccuucuguaaagguuuuuggaauuaugucugcugaauaauaaacuuuuuugaaauaauaaaucugguagaaaaaugagaucuaaaaaaaaaaaaaaaaaaaaaaaaaaaaaaaaaaaaaaaaaaaaaaaaaaaaaaaaaaaaaaaaaaaaaaaaaaaaaaaaaaaaaaaaaaaaaaaaaaaa

SEQ ID NO: 16245 - RNA, 1785 nt, Artificial Sequence
  mRNA product Design b-4 (A100) comprising derived and/or modified sequence from LASV(Lassa virus/H.sapiens-wt/NGA/2018/ISTH_0959;Clade II)__AVV65099__GPCmut1 (opt1)
aggagagucccgcagucggcguccagcggcucugcuuguucgugugugugucguugcaggccuuauucaagcuuaccaugggccagaucaucaccuucuuccaggaggugccccacgucaucgaggaggugaugaacaucgugcugaucgcccucagccugcuggccauccucaaggggaucuacaacgucgugaccugcggccuguucgggcugguguccuuccuccugcugugcggccgcagcugcuccacgaccuacaagggggucuacgagcuccagacccuggagcuggacauggcgagccucaacaugaccaugccgcuguccugcacgaagaacaacagccaccacuacaucauggugggcaacgagaccggccuggagcucacccugaccaacacguccaucaucaaccacaaguucugcaaccugagcgacgcccacaagaagaaccucuacgaccacgcccugauguccaucaucagcaccuuccaccuguccauccccaacuucaaccaguacgaggccaugagcugcgacuucaacgggggcaagaucuccgugcaguacaaccucagccacgccuacgcgaucgacgccgccaaccacugcgggaccaucgccaacggcguccugcagaccuucaugcggauggcguggggcggguccuacaucgcccuggacagcggcugcggguccugggacugcaucaugacgagcuaccaguaccucaucauccagaacaccaccugggaggaccacugccaguucucccgccccagccccaucggcuaccuggggcugcucagccagcggacccgcgacaucuacaucucccggcgccgccggggcacguucaccuggacccucagcgacuccgagggcaacgagacccccgggggcuacugccugacgcgguggaugcugaucgaggccgagcucaagugcuucgggaacaccgccguggccaagugcaacgagaagcacgacgaggaguucugcgacaugcugcgccuguucgacuucaacaagcaggcgauccggcgccucaagacccccgcccagaugagcauccagcugaucaacaaggccgugaacgcccugaucaacgaccagcucaucaugaagaaccaccuccgggacaucaugugcaucccguacugcaacuacuccaaguacugguaccugaaccacaccgucacggggaagaccagccugccccgcugcuggcugguguccaacggcagcuaccugaacgagacccacuucuccgacgacaucgagcagcaggccgacaacaugaucaccgagcuccugcagaaggaguacaucgaccggcagggcaagacgccccuggggcucguggaccuguucgucuucagcaccuccuucuaccugaucagcaucuuccugcaccucgugaagaucccgacccaccgccacgugaucggcaagcccugccccaagccccaccggcugaaccacauggggaucugcuccugcggccuguacaagcacccggggguccccgugaaguggaagcgcugaggacuaguaauaaggaaacuguaugaaugucugugggcaggaagugaagagauccuucuguaaagguuuuuggaauuaugucugcugaauaauaaacuuuuuugaaauaauaaaucugguagaaaaaugagaucuaaaaaaaaaaaaaaaaaaaaaaaaaaaaaaaaaaaaaaaaaaaaaaaaaaaaaaaaaaaaaaaaaaaaaaaaaaaaaaaaaaaaaaaaaaaaaaaaaaaa

SEQ ID NO: 16246 - RNA, 1785 nt, Artificial Sequence
  mRNA product Design b-4 (A100) comprising derived and/or modified sequence from LASV(LASV003-NIG-2008;Clade II)__AIT17580__GPCmut1 (opt1)
aggagagucccgcagucggcguccagcggcucugcuuguucgugugugugucguugcaggccuuauucaagcuuaccaugggccagaucaucaccuucuuccaggaggugccccacgucaucgaggaggugaugaacaucgugcugaucgcccucagccugcuggccauccucaaggggaucuacaacgucgcgaccugcggccuguucgggcugguguccuuccuccugcugugcggccgcagcugcuccacgaccuacaaggggguguacgagcuccagacccuggagcuggacauggccagccucaacaugaccaugccgcuguccugcacgaagaacaacagccaccacuacaucauggucggcaacgagaccggccuggagcucacccugaccaacacguccaucaucaaccacaaguucugcaaccugagcgacgcccacaagaagaaccucuacgaccacgcccugauguccaucaucagcaccuuccaccuguccauccccaacuucaaccaguacgaggccaugagcugcgacuucaacgggggcaagaucuccgugcaguacaaccucagccacaccuacgcgguggacgccgccaaccacugcgggaccaucgccaacggcguccugcagacguucaugcggauggcguggggcggguccuacaucgcccuggacagcggcugcggguccugggacugcaucaugaccagcuaccaguaccucaucauccagaacaccaccugggaggaccacugccaguucucccgccccagccccaucggcuaccuggggcugcucagccagcggacgcgcgacaucuacaucucccggcgccgccggggcaccuucaccuggacccucagcgacuccgagagcaacgagacgccgggcggguacugccugacccgguggaugcugaucgaggccgagcucaagugcuucggcaacaccgccguggccaagugcaacgagaagcacgacgaggaguucugcgacaugcugcgccuguucgacuucaacaagcaggcgauccggcgccucaaggcccccgcccagauguccauccagcugaucaacaaggccgugaacgcccugaucaacgaccagcucaucaugaagaaccaccuccgggacaucaugugcauccccuacugcaacuacagcaaguacugguaccugaaccacaccgucacgggccgcaccucccugccccggugcuggcuggugagcaacggguccuaccugaacgagacccacuucagcgacgacaucgagcagcaggcggacaacaugaucaccgagcuccugcagaaggaguacauggaccgccagggcaagacgccccugggccucguggaccuguucgucuucuccaccagcuucuaccugaucuccaucuuccugcaccucgugaagaucccgacccaccggcacgugaucgggaagcccugccccaagccccaccgccugaaccacaugggcaucugcagcugcgggcuguacaagcacccgggcguccccgugaaguggaagcggugaggacuaguaauaaggaaacuguaugaaugucugugggcaggaagugaagagauccuucuguaaagguuuuuggaauuaugucugcugaauaauaaacuuuuuugaaauaauaaaucugguagaaaaaugagaucuaaaaaaaaaaaaaaaaaaaaaaaaaaaaaaaaaaaaaaaaaaaaaaaaaaaaaaaaaaaaaaaaaaaaaaaaaaaaaaaaaaaaaaaaaaaaaaaaaaaa

SEQ ID NO: 16247 - RNA, 1785 nt, Artificial Sequence
  mRNA product Design b-4 (A100) comprising derived and/or modified sequence from LASV(LASV035-NIG-2009;Clade II)__AIT17588__GPCmut1 (opt1)
aggagagucccgcagucggcguccagcggcucugcuuguucgugugugugucguugcaggccuuauucaagcuuaccaugggccagaucaucaccuucuuccaggaggugccccacgucaucgaggaggugaugaacaucgugcugaucgcccucagccugcuggccauccucaaggggaucuacaacgucgcgaccugcggccuguucgggcugguguccuuccuccugcugugcggccgcagcugcuccacgaccuacaaggggguguacgagcuccagacccuggagcuggacauggccagccucaacaugaccaugccgcuguccugcacgaagaacaacagccaccacuacaucauggucggcaacgagaccggccuggagcucacccugaccaacacguccaucaucaaccacaaguucugcaaccugagcgacgcccacaagaagaaccucuacgaccacgcccugauguccaucaucagcaccuuccaccuguccauccccaacuucaaccaguacgaggccaugagcugcgacuucaacgggggcaagaucuccgugcaguacaaccucagccacgcguacgccguggacgccgccaaccacugcgggaccaucgcgaacggcguccugcagaccuucaugcggauggccuggggcggguccuacaucgcccuggacagcggcugcggguccugggacugcaucaugacgagcuaccaguaccucaucauccagaacaccaccugggaggaccacugccaguucucccgccccagccccaucggcuaccuggggcugcucagccagcggacccgcgacaucuacaucucccggcgccgccggggcacguucaccuggacccucagcgacuccgagggcaacgagacccccgggggcuacugccugacgcgguggaugcugaucgaggccgagcucaagugcuucgggaacaccgccguggcgaagugcaacgagaagcacgacgaggaguucugcgacaugcugcgccuguucgacuucaacaagcaggccauccggcgccucaaggcccccgcccagaugagcauccagcugaucaacaaggccgugaacgcgcugaucaacgaccagcucaucaugaagaaccaccuccgggacaucaugugcauccccuacugcaacuacuccaaguacugguaccugaaccacaccgucaccgggaagacgagccugccccgcugcuggcugguguccaacggcagcuaccugaacgagacccacuucuccgacgacaucgagcagcaggccgacaacaugaucaccgagcuccugcagaaggaguacaucgaccggcagggcaagaccccgcuggggcucguggaccuguucgucuucagcacguccuucuaccugaucagcaucuuccugcaccucgugaagaucccgacccaccgccacgugaucggcaagcccugccccaagccccaccggcugaaccacauggggaucugcuccugcggccuguacaagcacccggggguccccgugaaguggaagcgcugaggacuaguaauaaggaaacuguaugaaugucugugggcaggaagugaagagauccuucuguaaagguuuuuggaauuaugucugcugaauaauaaacuuuuuugaaauaauaaaucugguagaaaaaugagaucuaaaaaaaaaaaaaaaaaaaaaaaaaaaaaaaaaaaaaaaaaaaaaaaaaaaaaaaaaaaaaaaaaaaaaaaaaaaaaaaaaaaaaaaaaaaaaaaaaaaa

SEQ ID NO: 16248 - RNA, 1785 nt, Artificial Sequence
  mRNA product Design b-4 (A100) comprising derived and/or modified sequence from LASV(LASV1000-NIG-2009;Clade II)__AIT17782__GPCmut1 (opt1)
aggagagucccgcagucggcguccagcggcucugcuuguucgugugugugucguugcaggccuuauucaagcuuaccaugggccagaucaucaccuucuuccaggaggugccccacgucaucgaggaggugaugaacaucgugcugaucgcccucagccugcuggccauccucaaggggaucuacaacgucgcgaccugcggccuguucgggcugguguccuuccuccugcugugcggccgcagcugcuccacgaccuacaaggggguguacgagcuccagacccuggagcuggacauggccagccucaacaugaccaugccgcuguccugcacgaagaacaacagccaccacuacaucauggucggcaacgagaccggccuggagcucacccugaccaacacguccaucaucaaccacaaguucugcaaccugagcgacgcccacaagaagaaccucuacgaccacgcccugauguccaucaucagcaccuuccaccuguccauccccaacuucaaccaguacgaggccaugagcugcgacuucaacgggggcaagaucuccgugcaguacaaccucagccacaccuacgcgguggacgccgccaaccacugcgggaccaucgccaacggcguccugcagacguucaugcggauggcguggggcggguccuacaucgcccuggacagcggcugcggguccugggacugcaucaugaccagcuaccaguaccucaucauccagaacaccaccugggaggaccacugccaguucucccgccccagccccaucggcuaccuggggcugcucagccagcggacgcgcgacaucuacaucucccggcgccgccggggcaccuucaccuggacccucagcgacuccgagggcaacgagacgcccgggggcuacugccugacccgguggaugcugaucgaggccgagcucaagugcuucgggaacaccgccguggccaagugcaacgagaagcacgacgaggaguucugcgacaugcugcgccuguucgacuucaacaagcaggcgaucaagcggcucaagacccccgcccagaugagcauccagcugaucaacaaggccgugaacgcccugaucaacgaccagcucaucaugaagaaccaccuccgcgacaucaugugcauccccuacugcaacuacuccaaguacugguaccugaaccacacggucaccgggaagaccagccugccccggugcuggcugguguccaacggcagcuaccugaacgagacccacuucuccgacgacaucgagcagcaggccgacaacaugaucacggagcuccugcagaaggaguacaucgaccgccagggcaagaccccgcuggggcucguggaccuguucgucuucagcaccuccuucuaccugaucagcaucuuccugcaccucgugaagaucccgacccaccggcacguggucggcaagcccugccccaagccccaccgccugaaccacauggggaucugcuccugcggccuguacaagcacccgggggugcccgugaaguggaagcggugaggacuaguaauaaggaaacuguaugaaugucugugggcaggaagugaagagauccuucuguaaagguuuuuggaauuaugucugcugaauaauaaacuuuuuugaaauaauaaaucugguagaaaaaugagaucuaaaaaaaaaaaaaaaaaaaaaaaaaaaaaaaaaaaaaaaaaaaaaaaaaaaaaaaaaaaaaaaaaaaaaaaaaaaaaaaaaaaaaaaaaaaaaaaaaaaa

SEQ ID NO: 16249 - RNA, 1785 nt, Artificial Sequence
  mRNA product Design b-4 (A100) comprising derived and/or modified sequence from LASV(LASV221-NIG-2010;Clade II)__AIT17624__GPCmut1 (opt1)
aggagagucccgcagucggcguccagcggcucugcuuguucgugugugugucguugcaggccuuauucaagcuuaccaugggccagaucaucaccuucuuccaggaggugccccacgucaucgaggaggugaugaacaucgugcugaucgcccucagccugcuggccauccucaaggggaucuacaacgucgcgaccugcggccuguucgggcugguguccuuccuccugcugugcggccgcagcugcuccacgaccuacaaggggguguacgagcuccagacccuggagcuggacauggccagccucaacaugaccaugccgcuguccugcacgaagaacaacagccaccacuacaucauggucggcaacgagaccggccuggagcucacccugaccaacacguccaucaucaaccacaaguucugcaaccugagcgacgcccacaagaagaaccucuacgaccacgcccugauguccaucaucagcaccuuccaccuguccauccccaacuucaaccaguacgaggccaugagcugcgacuucaacgggggcaagaucuccgugcaguacaaccucagccacaccuacgcgaucgacgccgccaaccacugcgggaccaucgccaacggcgugcugcagacguucaugcggauggcguggggcggguccuacaucgcccuggacagcggcugcggguccugggacugcaucaugaccagcuaccaguaccucaucauccagaacaccaccugggaggaccacugccaguucucccgccccagccccaucggcuaccuggggcugcucagccagcggacgcgcgacaucuacaucucccggcgccgccggggcaccuucaccuggacccucagcgacuccgagggcaacgagacgcccgggggcuacugccugacccgguggaugcugaucgaggccgagcucaagugcuucgggaacaccgccgucgccaagugcaacgagaagcacgacgaggaguucugcgacaugcugcgccuguucgacuucaacaagcaggcgauccggcgccucaagacccccgcccagaugagcauccagcugaucaacaaggccgugaacgcccugaucaacgaccagcucaucaugaagaaccaccuccgggacaucaugugcauccccuacugcaacuacuccaaguacugguaccugaaccacacggugaccgggaagaccagccugccccgcugcuggcuggucuccaacggcagcuaccugaacgagacccacuucuccgacgacaucgagcagcaggccgacaacaugaucacggagaugcuccagaaggaguacauggaccggcagggcaagaccccgcuggggcugguggaccucuucguguucagcaccuccuucuaccugaucagcaucuuccugcaccuggucaagaucccgacccaccgccacgugaucggcaagcccugccccaagccccaccggcucaaccacauggggaucugcuccugcggccuguacaagcacccgggggugcccgucaaguggaagcgcugaggacuaguaauaaggaaacuguaugaaugucugugggcaggaagugaagagauccuucuguaaagguuuuuggaauuaugucugcugaauaauaaacuuuuuugaaauaauaaaucugguagaaaaaugagaucuaaaaaaaaaaaaaaaaaaaaaaaaaaaaaaaaaaaaaaaaaaaaaaaaaaaaaaaaaaaaaaaaaaaaaaaaaaaaaaaaaaaaaaaaaaaaaaaaaaaa

SEQ ID NO: 16250 - RNA, 1785 nt, Artificial Sequence
  mRNA product Design b-4 (A100) comprising derived and/or modified sequence from LASV(LASV237-NIG-2010;Clade II)__AIT17638__GPCmut1 (opt1)
aggagagucccgcagucggcguccagcggcucugcuuguucgugugugugucguugcaggccuuauucaagcuuaccaugggccagaucaucaccuucuuccaggaggugccccacgucaucgaggaggugaugaacaucgugcugaucgcccucagccugcuggccauccucaaggggaucuacaacgucgcgaccugcggccuguucgggcugguguccuuccuccugcugugcggccgcagcugcuccacgaccuacaaggggguguacgagcuccagacccuggagcuggacauggccagccucaacaugaccaugccgcuguccugcacgaagaacaacagccaccacuacaucauggucggcaacgagaccggccuggagcucacccugaccaacacguccaucaucaaccacaaguucugcaaccugagcgacgcccacaagaaggaccucuacgaccacgcccugauguccaucaucagcaccuuccaccuguccauccccaacuucaaccaguacgaggccaugagcugcgacuucaacgggggcaagaucuccgugcaguacaaccucagccacaccuacgcgguggacgccgccaaccacugcgggaccaucgccaacggcguccugcagacguucaugcggauggcguggggcggguccuacaucgcccuggacagcggcugcggguccugggacugcaucaugaccagcuaccaguaccucaucauccagaacaccaccugggaggaccacugccaguucucccgccccagccccaucggcuaccuggggcugcucagccagcggacgcgcgacaucuacaucucccggcgccgccggggcaccuucaccuggacccucagcgacuccgagggcaacgagacgcccgggggcuacugccugacccgguggaugcugaucgaggccgagcucaagugcuucgggaacaccgccguggccaagugcaacgagaagcacgacgaggaguucugcgacaugcugcgccuguucgacuucaacaagcaggcgauccggcgccucaagacccccgcccagaugagcauccagcugaucaacaaggccgugaacgcccugaucaacgaccagcucaucaugaagaaccaccuccgggacaucaugugcauccccuacugcaacuacuccaaguacugguaccugaaccacacggucaccgggaagaccagccugccccgcugcuggcugguguccaacggcagcuaccugaacgagacccacuucuccgacgacaucgagcagcaggccgacaacaugaucacggagcuccugcagaaggaguacauggaccggcagggcaagaccccgcuggggcucguggaccuguucgucuucagcaccuccuucuaccugaucagcaucuuccugcaccucaucaagaucccgacccaccgccacaucacgggcaagcccugccccaagccccaccggcugaaccacauggggaucugcuccugcggccuguacaagcacccgggggugcccgugaaguggaagcgcugaggacuaguaauaaggaaacuguaugaaugucugugggcaggaagugaagagauccuucuguaaagguuuuuggaauuaugucugcugaauaauaaacuuuuuugaaauaauaaaucugguagaaaaaugagaucuaaaaaaaaaaaaaaaaaaaaaaaaaaaaaaaaaaaaaaaaaaaaaaaaaaaaaaaaaaaaaaaaaaaaaaaaaaaaaaaaaaaaaaaaaaaaaaaaaaaa

SEQ ID NO: 16251 - RNA, 1785 nt, Artificial Sequence
  mRNA product Design b-4 (A100) comprising derived and/or modified sequence from LASV(LASV253-NIG-2011;Clade II)__AIT17670__GPCmut1 (opt1)
aggagagucccgcagucggcguccagcggcucugcuuguucgugugugugucguugcaggccuuauucaagcuuaccaugggccagaucaucaccuucuuccaggaggugccccacgucaucgaggaggugaugaacaucgugcugaucgcccucagccugcuggccauccucaaggggaucuacaacgucgcgaccugcggccuguucgggcugguguccuuccuccugcugugcggccgcagcugcuccacgaccuacaaggggguguacgagcuccagacccuggagcuggacauggccagccucaacaugaccaugccgcuguccugcacgaagaacaacagccaccacuacaucauggucggcaacgagaccggccuggagcucacccugaccaacacguccaucaucaaccacaaguucugcaaccugagcgacgcccacaagaagaaccucuacgaccacgcccugauguccaucaucagcaccuuccaccuguccauccccaacuucaaccaguacgaggccaugagcugcgacuucaacgggggcaagaucuccgugcaguacaaccucagccacaccuacgcgguggacgccgccaaccacugcgggaccaucgccaacggcguccugcagacguucaugcggauggcguggggcggguccuacaucgcccuggacagcggcugcggguccugggacugcaucaugaccagcuaccaguaccucaucauccagaacaccaccugggaggaccacugccaguucucccgccccagccccaucggcuaccuggggcugcucagccagcggacgcgcgacaucuacaucucccggcgccgccggggcaccuucaccuggacccucagcgacuccgagggcaacgagacgcccgggggcuacugccugacccgguggaugcugaucgaggccgagcucaagugcuucgggaacaccgccguggccaagugcaacgagaagcacgacgaggaguucugcgacaugcugcgccuguucgacuucaacaagcaggcgauccggcgccucaaggcccccgcccagaugagcauccagcugaucaacaaggccgugaacgcccugaucaacgaccagcucaucaugaagaaccaccuccgggacaucaugugcaucccguacugcaacuacuccaaguacugguaccugaaccacaccgucacggggcgcaccagccugccccggugcuggcugguguccaacggcagcuaccugaacgagacccacuucuccgacgacaucgagcagcaggcggacaacaugaucaccgagcuccugcagaaggaguacaucgaccgccagggcaagacgccccuggggcucguggaccuguucgucuucagcaccuccuucuaccugaucagcaucuuccugcaccucgugaagaucccgacccaccggcacaucaucggcaagcccugccccaagccccaccgccugaaccacauggggaucugcuccugcggccuguacaagcacccgggggugcccgucaaguggaagcggugaggacuaguaauaaggaaacuguaugaaugucugugggcaggaagugaagagauccuucuguaaagguuuuuggaauuaugucugcugaauaauaaacuuuuuugaaauaauaaaucugguagaaaaaugagaucuaaaaaaaaaaaaaaaaaaaaaaaaaaaaaaaaaaaaaaaaaaaaaaaaaaaaaaaaaaaaaaaaaaaaaaaaaaaaaaaaaaaaaaaaaaaaaaaaaaaa

SEQ ID NO: 16252 - RNA, 1785 nt, Artificial Sequence
  mRNA product Design b-4 (A100) comprising derived and/or modified sequence from LASV(LASV254-NIG-2011;Clade II)__AIT17674__GPCmut1 (opt1)
aggagagucccgcagucggcguccagcggcucugcuuguucgugugugugucguugcaggccuuauucaagcuuaccaugggccagaucaucaccuucuuccaggaggugccccacgucaucgaggaggugaugaacaucgugcugaucgcccucagccugcuggccauccucaaggggaucuacaacgucgcgaccugcggccuguucgggcugguguccuuccuccugcugugcggccgcagcugcuccacgaccuacaaggggguguacgagcuccagacccuggagcuggacaugaccaaccucaacaugacgaugccgcugagcugcaccaagaacaacucccaccacuacaucauggucggcaacgagaccggccuggagcucacccugacgaacaccagcaucaucaaccacaaguucugcaaccuguccgacgcccacaagaagaaccucuacaaccacgcccugaugagcaucaucuccaccuuccaccugagcauccccaacuucaaccaguacgaggccauguccugcgacuucaacgggggcaagaucagcgugcaguacaaccucucccacagcuacgccguggacgcggccaaccacugcgggaccaucgccaacggcguccugcagacguucaugcggauggccuggggcggguccuacaucgcgcuggacagcggcugcgggaacugggacugcaucaugaccuccuaccaguaccucaucauccagaacaccaccugggaggaccacugccaguucagccgccccucccccaucggcuaccuggggcugcucagccagcggacgcgcgacaucuacaucagccggcgccgccggggcaccuucaccuggacccucuccgacagcgagggcaacgagacgcccgggggcuacugccugacccgguggaugcugaucgaggccgagcucaagugcuucgggaacaccgccguggccaagugcaacgagaagcacgacgaggaguucugcgacaugcugcgccuguucgacuucaacaagcaggccauccggcgccucaagacccccgcgcaggccaacauccagcugaucaacaaggccgugaacgcccugaucaacgaccagcucaucaugaagaaccaccuccgggacaucaugugcauccccuacugcaacuacuccaaguacugguaccugaaccacacggucaccgggaagaccagccugccccgcugcuggcugguguccaacggcagcuaccugaacgagacccacuucuccgacgacaucgagcagcaggccgacaacaugaucacggagcuccugcagaaggaguacauggaccggcagggcaagaccccgcuggggcucguggaccuguucgucuucagcaccuccuucuaccugaucagcaucuuccugcaccucgugaagaucccgacccaccgccacgugaucggcaagcccugccccaagccccaccggcugaaccacauggggaucugcuccugcggccuguacaagcacccggggguccccgugaaguggaagcgcugaggacuaguaauaaggaaacuguaugaaugucugugggcaggaagugaagagauccuucuguaaagguuuuuggaauuaugucugcugaauaauaaacuuuuuugaaauaauaaaucugguagaaaaaugagaucuaaaaaaaaaaaaaaaaaaaaaaaaaaaaaaaaaaaaaaaaaaaaaaaaaaaaaaaaaaaaaaaaaaaaaaaaaaaaaaaaaaaaaaaaaaaaaaaaaaaa

SEQ ID NO: 16253 - RNA, 1785 nt, Artificial Sequence
  mRNA product Design b-4 (A100) comprising derived and/or modified sequence from LASV(Nig08-A19;Clade III)__ADU56618__GPCmut1 (opt1)
aggagagucccgcagucggcguccagcggcucugcuuguucgugugugugucguugcaggccuuauucaagcuuaccaugggccagaucgugaccuucuuccaggaggucccccacgugaucgaggaggugaugaacaucguccugaucgcccucagcauccuggccauccugaaggggcucuacaacaucgcgaccugcggccugaucgggcuggugacguuccuccugcuguccggccgcagcugcuccaugaccuacaaggggguguacgagcuccagacccuggagcugaacaugaacacccucaacaugacgaugccgcugagcugcaccaagaacaacucccaccacuacaucauggucggcaacgagaccggccuggagcucacccugacgaacaccagccugcuccaccacaaguucugcaaccuguccgacgcccacaagaagaaccuguacgaccacacccucaugagcaucaucuccaccuuccaccugagcauccccaacuucaaccaguacgaggccauguccugcgacuucaacgggggcaagaucacggugcaguacaaccugagccacuccuacgccaucgacgccgcgaaccacugcgggaccguggccaacggcguccuccagaccuucaugcggauggccuggggcgggagcuacaucgcccuggacuccggcugcgggaagugggacugcaucaugaccagcuaccaguaccugaucauccagaacacgaccugggaggaccacugccaguucucccggcccagccccaucggcuaccucgggcugcugucccagcgcacccgggacaucuacaucagccgccggcgccggggcaccuucacguggacccugagcgacuccgagggcaacgagacccccgggggcuacugccucacccgcuggaugcugaucgaggcggagcugaagugcuucgggaacacggccguggccaagugcaacgagaagcacgacgaggaguucugcgacaugcuccggcuguucgacuucaacaagcaggccauccgccggcugaaggcccccgcgcagaugagcauccagcucaucaacaaggccgugaacgcccugaucaacgaccagcugaucaugaagaaccaccuccgcgacaucaugugcauccccuacugcaacuacuccaaguacugguaccugaaccacaccagcaccgggcggaccucccugccccgcugcuggcucgucagcaacggcuccuaccugaacgagacgcacuucagcgacgacaucgagcagcaggccgacaacaugaucaccgagaugcugcagaaggaguaccucgaccggcagggcaagaccccgcuggggcugguggaccuguucguguucuccaccagcuucuaccucaucuccaucuuccugcaccuggucaagaucccgacgcaccgccacaucgugggcaagcccugccccaagccccaccggcucaaccacauggggaucugcagcugcggccuguacaagcagccgggggugcccguccgcuggaagcggugaggacuaguaauaaggaaacuguaugaaugucugugggcaggaagugaagagauccuucuguaaagguuuuuggaauuaugucugcugaauaauaaacuuuuuugaaauaauaaaucugguagaaaaaugagaucuaaaaaaaaaaaaaaaaaaaaaaaaaaaaaaaaaaaaaaaaaaaaaaaaaaaaaaaaaaaaaaaaaaaaaaaaaaaaaaaaaaaaaaaaaaaaaaaaaaaa

SEQ ID NO: 16254 - RNA, 1788 nt, Artificial Sequence
  mRNA product Design b-4 (A100) comprising derived and/or modified sequence from LASV(G1180-SLE-2010;Clade IV)__AIT17168__GPCmut1 (opt1)
aggagagucccgcagucggcguccagcggcucugcuuguucgugugugugucguugcaggccuuauucaagcuuaccaugggccagaucgugaccuucuuccaggaggucccccacgugaucgaggaggugaugaacaucguccugaucgcccucagcauccuggccgugcugaaggggcucuacaacuucgcgaccugcggccugguggggcugcucaccuuccugcugcucugcggccgcuccugcaccgccagccgguacaagggggucuacgagcugcagacccuggagcucaacauggagacccugaacaugacgaugccgcuguccugcaccaagaacaacagccaccacuacaucauggugggcaacgagaccggccucgagcugacccugacgaacaccuccaucaucaaccacaaguucugcaaccucagcgacgcccacaagaagaaccuguacgaccacgcccugauguccaucaucagcaccuuccaccucuccauccccaacuucaaccaguacgaggccaugagcugcgacuucaacgggggcaagaucuccgugcaguacaaccugagccacuccuacgcgggggacgccgccaaccacugcggcaccgucgccaacggggugcugcagacguucaugcgcauggcguggggcggcagcuacaucgcccucgacuccgggugcggcagcugggacugcaucaugaccuccuaccaguaccugaucauccagaacaccaccugggaggaccacugccaguucagccggcccucccccaucggguaccugggccuccugagccagcgcacgcgggacaucuacaucagccgccggcgccggggcaccuucaccuggacccuguccgacagcgaggggaaggacacgccgggcggguacugccugacccgcuggaugcucaucgaggccgagcugaagugcuucggcaacaccgccguggccaagugcaacgagaagcacgacgaggaguucugcgacaugcugcggcuguucgacuucaacaagcaggcgauccagcgccugaaggcccccgcccagauguccauccagcugaucaacaaggccgucaacgcccucaucaacgaccagcugaucaugaagaaccaccuccgggacaucaugugcauccccuacugcaacuacagcaaguacugguaccucaaccacaccacgaccggcaagaccucccugcccaagugcuggcuggugagcaacggcuccuaccucaacgagacccacuucagcgacgacaucgagcagcaggcggacaacaugaucacggagaugcugcagaaggaguacauggagcgccaggggaagacgccccugggccucguggaccuguucgucuucuccaccagcuucuaccugaucuccaucuuccugcaccucgugaagaucccgacccaccggcacaucgugggcaagagcugccccaagccccaccgccugaaccacauggggaucugcuccugcgggcuguacaagcagcccggcgucccggugaaguggaagcggugaggacuaguaauaaggaaacuguaugaaugucugugggcaggaagugaagagauccuucuguaaagguuuuuggaauuaugucugcugaauaauaaacuuuuuugaaauaauaaaucugguagaaaaaugagaucuaaaaaaaaaaaaaaaaaaaaaaaaaaaaaaaaaaaaaaaaaaaaaaaaaaaaaaaaaaaaaaaaaaaaaaaaaaaaaaaaaaaaaaaaaaaaaaaaaaaa

SEQ ID NO: 16255 - RNA, 1788 nt, Artificial Sequence
  mRNA product Design b-4 (A100) comprising derived and/or modified sequence from LASV(G1442-SLE-2011;Clade IV)__AIT17180__GPCmut1 (opt1)
aggagagucccgcagucggcguccagcggcucugcuuguucgugugugugucguugcaggccuuauucaagcuuaccaugggccagaucgugaccuucuuccaggaggucccccacgugaucgaggaggugaugaacaucguccugaucgcccucagcauccuggccgugcugaaggggcucuacaacguggcgaccugcggccugaucgggcuggucacguuccuccugcugugcggccgcuccugcaccaccacccucuacaaggggguguacgagcugcagacgcuggagcucaacauggagacccugaacaugaccaugccgcugagcugcaccaagaacaacucccaccacuacauccgggugggcaacgagacgggccucgagcugacccugaccaacaccagcaucaucaaccacaaguucugcaaccucuccgacgcccacaagaagaaccuguacgaccacgcccugaugagcaucaucuccacguuccaccucagcauccccaacuucaaccaguacgaggccauguccugcgacuucaacgggggcaagaucagcguccaguacaaccugucccacagcuacgccggggacgcggccaaccacugcggcaccguggccaacggggugcugcagaccuucaugcgcauggccuggggcggcuccuacaucgcgcucgacagcgggugcggcaacugggacugcaucaugaccuccuaccaguaccugaucauccagaacacgaccugggacgaccacugccaguucagccgccccucccccaucggguaccugggccuccugagccagcggacccgcgacgucuacaucucccggcgccgccggggcaccuucacguggacccugagcgacagcgaggggaaggacaccccgggcggguacugccugacccgguggaugcucaucgaggccgagcugaagugcuucggcaacacggccguggccaagugcaacgagaagcacgacgaggaguucugcgacaugcugcgccucuucgacuucaacaagcaggccauccagcggcugaaggcgcccgcccagauguccauccagcugaucaacaaggccgugaacgcccucaucaacgaccagcugaucaugaagaaccaccuccgcgacaucaugugcauccccuacugcaacuacagcaaguacugguaccugaacaacaccgccaccggcaagaccucccugcccaagugcuggcugaucagcaacggcuccuaccucaacgagacgcacuucagcgacgacaucgagcaggaggcggacaacaugaucaccgagaugcugcagaaggaguacauggagcggcaggggaagacgccccugggccucgucgaccuguucguguucuccaccagcuucuaccugaucuccaucuuccugcaccucgugaagaucccgacccaccgccacaucgucggcaagagcugccccaagccccaccggcugaaccacauggggaucugcuccugcgggcuguacaagcagcccggcgugccggugcgcuggaagcggugaggacuaguaauaaggaaacuguaugaaugucugugggcaggaagugaagagauccuucuguaaagguuuuuggaauuaugucugcugaauaauaaacuuuuuugaaauaauaaaucugguagaaaaaugagaucuaaaaaaaaaaaaaaaaaaaaaaaaaaaaaaaaaaaaaaaaaaaaaaaaaaaaaaaaaaaaaaaaaaaaaaaaaaaaaaaaaaaaaaaaaaaaaaaaaaaa

SEQ ID NO: 16256 - RNA, 1788 nt, Artificial Sequence
  mRNA product Design b-4 (A100) comprising derived and/or modified sequence from LASV(G3010-SLE-2013;Clade IV)__AIT17344__GPCmut1 (opt1)
aggagagucccgcagucggcguccagcggcucugcuuguucgugugugugucguugcaggccuuauucaagcuuaccaugggccagaucgugaccuucuuccaggaggucccccacgugaucgaggaggugaugaacaucguccugaucgcccucagcauccuggccgugcugaaggggcucuacaacuucgcgaccugcggccugguggggcuggucacguuccuccugcugugcggccgcuccugcaccaccagccucuacaaggggguguacgagcugcagacccuggagcucaacauggagacgcugaacaugaccaugccgcuguccugcaccaagaacaacagccaccacuacaucauggugggcaacgagaccggccucgagcugacgcugaccaacaccuccaucaucaaccacaaguucugcaaccucagcgacgcccacaagaagaaccuguacaaccacgcccugauguccaucaucagcaccuuccaccucuccauccccaacuucaaccaguacgaggccaugagcugcgacuucaacgggggcaagaucuccguccaguacaaccugagccacuccuacgccggggacgcggccagccacugcggcacgguggccaacggggugcugcagaccuucaugcggauggccuggggcggcuccuacaucgcgcucgacagcgggugcggcaagugggacugcaucaugaccuccuaccaguaccugaucauccagaacaccacgugggaggaccacugccaguucagccgccccucccccaucggguaccugggccuccugagccagcggacccgcgacaucuacaucagccggcgccgccggggcaccuucaccuggacgcuguccgacagcgaggggaaggacaccccgggcggguacugccugacccgguggaugcucaucgaggccgagcugaagugcuucggcaacaccgccgucgccaagugcaacgagaagcacgacgaggaguucugcgacaugcugcgccucuucgacuucaacaagcaggccauccagcggcugaagacgcccgcgcagauguccauccagcugaucaacaaggccgugaacgcccucaucaacgaccagcugaucaugaagaaccaccuccgcgacaucaugugcauccccuacugcaacuacagcaaguacugguaccugaaccacaccaccaccggcaagacgucccugcccaagugcuggcuggugagcaacggcuccuaccucaacgagacccacuucagcgacgacaucgagcagcaggccgacaacaugaucaccgagaugcugcagaaggaguacauggagcggcaggggaagacgccccugggccucgucgaccuguucguguucuccaccagcuucuaccugaucuccaucuuccugcaccucgugaagaucccgacccaccgccacaucgucggcaagagcugccccaagccccaccggcugaaccacauggggaucugcuccugcgggcuguacaagcagcccggcgugccggugcgcuggaagcggugaggacuaguaauaaggaaacuguaugaaugucugugggcaggaagugaagagauccuucuguaaagguuuuuggaauuaugucugcugaauaauaaacuuuuuugaaauaauaaaucugguagaaaaaugagaucuaaaaaaaaaaaaaaaaaaaaaaaaaaaaaaaaaaaaaaaaaaaaaaaaaaaaaaaaaaaaaaaaaaaaaaaaaaaaaaaaaaaaaaaaaaaaaaaaaaaa

SEQ ID NO: 16257 - RNA, 1788 nt, Artificial Sequence
  mRNA product Design b-4 (A100) comprising derived and/or modified sequence from LASV(G502-SLE-2009;Clade IV)__AIT17126__GPCmut1 (opt1)
aggagagucccgcagucggcguccagcggcucugcuuguucgugugugugucguugcaggccuuauucaagcuuaccaugggccagaucgugaccuucuuccaggaggucccccacgugaucgaggaggugaugaacaucguccugaucgcccucagcauccuggccgugcugaaggggcucuacaacuucgcgaccugcggccugguggggcugcucacguuccugcugcucugcggccgcuccugcaccaccgggcuguacaagggcgucuacgagcugcagacccucgagcugaacauggagacgcugaacaugaccaugccgcucagcugcaccaagaacaacucccaccacuacaucauggugggcaacgagaccgggcuggagcugacgcucaccaacaccagcaucaucaaccacaaguucugcaaccuguccgacgcccacaagaagaaccuguacgaccacgcccucaugagcaucaucuccaccuuccaccugagcauccccaacuucaaccaguacgaggccauguccugcgacuucaacggcgggaagaucagcgugcaguacaaccugucccacagcuacgccggcgacgcggccgaccacugcgggacggucgccaacggcgugcuccagaccuucaugcggauggccuggggcggguccuacaucgcgcuggacagcggcugcgggcggugggacugcaucaugaccuccuaccaguaccugaucauccagaacaccacgugggaggaccacugccaguucagccgccccucccccaucggcuaccucggccugcugagccagcggacccgcgacaucuacaucucccggcgccgccgggggaccuucaccuggacgcugagcgacagcgagggcaaggacacccccgggggcuacugccucacccgguggaugcugaucgaggccgagcugaagugcuucgggaacaccgccguggccaagugcaacgagaagcacgacgaggaguucugcgacaugcuccgccuguucgacuucaacaagcaggccauccagcggcugaaggcgcccgcccagauguccauccagcucaucaacaaggccgucaacgcccugaucaacgaccagcuggugaugaagaaccaccuccgcgacaucaugugcauccccuacugcaacuacagccgguacugguaccugaaccacacgaccaccggccgcaccucccugcccaagugcuggcucgugagcaacggguccuaccugaacgagacgcacuucagcgacgacaucgagcagcaggccgacaacaugaucaccgagaugcugcagaaggaguacauggagcggcagggcaagaccccgcucgggcuggucgaccuguucguguucuccaccagcuucuaccugaucuccaucuuccuccaccuggugaagaucccgacgcaccgccacaucgucggcaagagcugccccaagccccaccggcugaaccacauggggaucugcuccugcggccucuacaagcagcccggcgugccggugaaguggaagcgcugaggacuaguaauaaggaaacuguaugaaugucugugggcaggaagugaagagauccuucuguaaagguuuuuggaauuaugucugcugaauaauaaacuuuuuugaaauaauaaaucugguagaaaaaugagaucuaaaaaaaaaaaaaaaaaaaaaaaaaaaaaaaaaaaaaaaaaaaaaaaaaaaaaaaaaaaaaaaaaaaaaaaaaaaaaaaaaaaaaaaaaaaaaaaaaaaa

SEQ ID NO: 16258 - RNA, 1788 nt, Artificial Sequence
  mRNA product Design b-4 (A100) comprising derived and/or modified sequence from LASV(G733-SLE-2010;Clade IV)__AIT17154__GPCmut1 (opt1)
aggagagucccgcagucggcguccagcggcucugcuuguucgugugugugucguugcaggccuuauucaagcuuaccaugggccagaucgugaccuucuuccaggaggucccccacgugaucgaggaggugaugaacaucguccugaucgcccucagcauccuggccgugcugaaggggcucuacaacuucgcgaccugcggcaucguggggcuggucuccuuccugcuccugugcggccgcagcugcacgaccucccuguacaaggggguguacgagcuccagacccuggagcugaacauggagacccucaacaugacgaugccgcugagcugcaccaagaacaacucccaccacuacaucauggugggcaacgagaccggccuggagcucacccugacgaacaccagcaucaucaaccacaaguucugcaaccuguccgacgcccacaagaagaaccucuacgaccacgcccugaugagcaucaucuccaccuuccaccugagcauccccaacuucaaccaguacgaggccauguccugcgacuucaacgggggcaagaucagcguccaguacaaccucucccacagcuacgccggggacgcggccaaccacugcggcaccaucgccaacggggugcugcagacguucaugcggauggccuggggcggcuccuacaucgcgcuggacagcgggugcgaccggugggacugcaucaugaccuccuaccaguaccucaucauccagaacaccaccugggaggaccacugccaguucagccgccccucccccaucggcuaccuggggcugcucagccagcggacgcgcgacaucuacaucagccggcgccgccggggcaccuucaccuggacccucuccgacagcgagggcaaggacacgcccgggggcuacugccugacccgguggaugcugaucgaggccgagcucaagugcuucgggaacaccgccguggccaagugcaacgagaagcacgacgaggaguucugcgacaugcugcgccuguucgacuucaacaagcaggccauccagcggcucaaggcgcccgcccagauguccauccagcugaucaacaaggccgucaacgcccugaucaacgaccagcucaucaugaagaaccaccuccgcgacaucaugugcauccccuacugcaacuacagcaaguacugguaccugaaccacaccacgaccgggaagaccucccugcccaagugcuggcuggugagcaacggcuccuaccugaacgagacccacuucagcgacgacaucgagcagcaggccgacaacaugaucacggagaugcuccagaaggaguacauggagcggcagggcaagaccccgcuggggcugguggaccucuucgucuucuccaccagcuucuaccugaucuccaucuuccugcaccuggugaagaucccgacccaccgccacguggucggcaagagcugccccaagccccaccggcucaaccacauggggaucugcuccugcggccuguacgggcagcccggcgugccggugaaguggaagcgcugaggacuaguaauaaggaaacuguaugaaugucugugggcaggaagugaagagauccuucuguaaagguuuuuggaauuaugucugcugaauaauaaacuuuuuugaaauaauaaaucugguagaaaaaugagaucuaaaaaaaaaaaaaaaaaaaaaaaaaaaaaaaaaaaaaaaaaaaaaaaaaaaaaaaaaaaaaaaaaaaaaaaaaaaaaaaaaaaaaaaaaaaaaaaaaaaa

SEQ ID NO: 16259 - RNA, 1788 nt, Artificial Sequence
  mRNA product Design b-4 (A100) comprising derived and/or modified sequence from MOPV/LASV reassortant(IGS-1;Clade IV)__AFY05576__GPCmut1 (opt1)
aggagagucccgcagucggcguccagcggcucugcuuguucgugugugugucguugcaggccuuauucaagcuuaccaugggccagaucgugaccuucuuccaggaggucccccacgugaucgaggaggugaugaacaucguccugaucgcccucagcgugcuggccgugcugaaggggcucuacaacuucgcgaccugcggccuggucgggcuggugacguuccuccugcugugcggccgcuccugcaccaccagccucuacaaggggguguacgagcugcagacccuggagcucaacauggagacgcugaacaugaccaugccgcuguccugcaccaagaacaacagccaccacuacaucauggucggcaacgagaccggccucgagcugacgcugaccaacaccuccaucaucaaccacaaguucugcaaccucagcgacgcccacaagaagaaccuguacgaccacgcccugauguccaucaucagcaccuuccaccucuccauccccaacuucaaccaguacgaggccaugagcugcgacuucaacgggggcaagaucuccgugcaguacaaccugagccacuccuacgccggggacgcggccaaccacugcggcacgguggccaacgggguccugcagaccuucaugcggauggccuggggcggcagcuacaucgcgcucgacuccgggugcggcaacugggacugcaucaugaccagcuaccaguaccugaucauccagaacaccacgugggaggaccacugccaguucucccggcccagccccaucggguaccugggccuccugucccagcgcacccgggacaucuacaucagccgccggcgccggggcaccuucaccuggacgcugagcgacuccgagggggaggacaccccgggcggguacugccugacccgcuggaugcucaucgaggccgagcugaagugcuucggcaacaccgccguggccaagugcaacgagaagcacgacgaggaguucugcgacaugcugcggcuguucgacuucaacaagcaggccauccagcgccugaaggcgcccgcccagaugagcauccagcugaucaacaaggccgugaacgcccucaucaacgaccagcugaucaugaagaaccaccuccgggacaucaugugcauccccuacugcaacuacuccaaguacugguaccucaaccacacgaccaccggccgcaccagccugcccaagugcuggcuggucuccaacggcagcuaccucaacgagacgcacuucuccgacgacaucgagcagcaggccgacaacaugaucaccgagaugcugcagaaggaguacauggagcggcaggggaagacgccccugggccucguggaccuguucguguucagcaccuccuucuaccugaucagcaucuuccugcaccucgucaagaucccgacccaccgccacaucguggggaaguccugccccaagccccaccggcugaaccacaugggcaucugcagcugcgggcuguacaagcagcccggcgugccggucaaguggaagcgcugaggacuaguaauaaggaaacuguaugaaugucugugggcaggaagugaagagauccuucuguaaagguuuuuggaauuaugucugcugaauaauaaacuuuuuugaaauaauaaaucugguagaaaaaugagaucuaaaaaaaaaaaaaaaaaaaaaaaaaaaaaaaaaaaaaaaaaaaaaaaaaaaaaaaaaaaaaaaaaaaaaaaaaaaaaaaaaaaaaaaaaaaaaaaaaaaa

SEQ ID NO: 16260 - RNA, 1788 nt, Artificial Sequence
  mRNA product Design b-4 (A100) comprising derived and/or modified sequence from LASV(LM765-SLE-2012;Clade IV)__AIT17814__GPCmut1 (opt1)
aggagagucccgcagucggcguccagcggcucugcuuguucgugugugugucguugcaggccuuauucaagcuuaccaugggccagaucgugaccuucuuccaggaggucccccacgugaucgaggaggugaugaacaucguccugaucgcccucagcauccuggccgugcugaaggggcucuacaacuucgcgaccugcggccugguggggcuggucacguuccuccugcugugcggccgcuccugcaccaccagccucuacaaggggguguacgagcugcagacccuggagcucaacauggagacgcugaacaugaccaugccgcuguccugcaccaagaacaacagccaccacuacaucauggugggcaacgagaccggccucgagcugacgcugaccaacaccuccaucaucgaccacaaguucugcaaccucagcgacgcccaccggaagaaccuguacgaccacgcccugauguccaucaucagcaccuuccaccucuccauccccaacuucaaccaguacgaggccaugagcugcgacuucaacgggggcaagaucuccguccaguacaaccugagccacuccuacgccaaggacgcggccgaccacugcgggacgguggccaacggcgugcugcagaccuucaugcgcauggccuggggcgggagcuacaucgcgcucgacuccggcugcgggcgcugggacugcaucaugaccagcuaccaguaccugaucauccagaacaccacgugggaggaccacugccaguucucccggcccagccccaucggcuaccuggggcuccugucccagcgcacccgggacaucuacaucagccgccggcgccggggcaccuucaccuggacgcugagcgacuccgagggcaaggacacccccgggggcuacugccugacccgcuggaugcucaucgaggccgagcugaagugcuucgggaacaccgccgucgccaagugcaacgagaagcacgacgaggaguucugcgacaugcugcggcuguucgacuucaacaagcaggccauccagcgccugaaggcgcccgcccagaugagcauccagcugaucaacaaggccgugaacgcccucaucaacgaccagcugaucaugaagaaccaccuccgggacaucaugugcauccccuacugcaacuacuccaaguacugguaccucaaccacacgaccaccgggaagaccagccugcccaagugcuggcugguguccaacggcagcuaccucaacgagacgcacuucuccgacgacaucgagcagcaggccgacaacaugaucaccgagaugcugcagaaggaguacauggagcgccagggcaagaccccgcuggggcucgucgaccuguucguguucagcaccuccuucuaccugaucagcaucuuccugcaccucgugaagaucccgacgcaccggcacaucgucggcaagcccugccccaagccccaccgccugaaccacauggggaucugcuccugcggccuguacaagcagccgggggugcccgugaaguggaagcggugaggacuaguaauaaggaaacuguaugaaugucugugggcaggaagugaagagauccuucuguaaagguuuuuggaauuaugucugcugaauaauaaacuuuuuugaaauaauaaaucugguagaaaaaugagaucuaaaaaaaaaaaaaaaaaaaaaaaaaaaaaaaaaaaaaaaaaaaaaaaaaaaaaaaaaaaaaaaaaaaaaaaaaaaaaaaaaaaaaaaaaaaaaaaaaaaa

SEQ ID NO: 16261 - RNA, 1788 nt, Artificial Sequence
  mRNA product Design b-4 (A100) comprising derived and/or modified sequence from LASV(LM776-SLE-2012;Clade IV)__AIT17824__GPCmut1 (opt1)
aggagagucccgcagucggcguccagcggcucugcuuguucgugugugugucguugcaggccuuauucaagcuuaccaugggccagaucgugaccuucuuccaggaggucccccacgugaucgaggaggugaugaacaucguccugaucgcccucagcauccuggccgugcugaaggggcucuacaacuucgcgaccugcggccugguggggcuggucacguuccuccugcugugcggccgcuccugcaccaccagcguguacaaggggguguacgagcuccagacccuggagcugaacauggagacgcucaacaugaccaugccgcuguccugcaccaagaacaacagccaccacuacaucauggucggcaacgagaccggccuggagcucacgcugaccaacaccuccaucaucaaccacaaguucugcaaccugagcgacgcccacaagaagaaccucuacgaccacgcccugauguccaucaucagcaccuuccaccuguccauccccaacuucaaccaguacgaggccaugagcugcgacuucaacgggggcaagaucuccgugcaguacaaccucagccacuccuacgccggggacgcggccaaccacugcggcacgguggccaacgggguccugcagaccuucaugcggauggccuggggcggcagcuacaucgcgcuggacuccgggugcggcaagugggacugcaucaugaccagcuaccaguaccucaucauccagaacaccacgugggaggaccacugccaguucucccgccccagccccaucggguaccugggccugcucucccagcggacccgcgacaucuacaucagccggcgccgccggggcaccuucaccuggacgcucagcgacuccgaggggaaggacaccccgggcggguacugccugacccgguggaugcugaucgaggccgagcucaagugcuucggcaacaccgccguggccaagugcaacgagaagcacgacgaggaguucugcgacaugcugcgccuguucgacuucaacaagcaggccauccagcggcucaaggcgcccgcccagaugagcauccagcugaucaacaaggccgugaacgcccugaucaacgaccagcucaucaugaagaaccaccuccgcgacaucaugugcauccccuacugcaacuacuccaaguacugguaccugaaccacacgaccaccggcaagaccagccugcccaagugcuggcuggucuccaacggcagcuaccugaacgagacgcacuucuccgacgacaucgagcagcaggccgacaacaugaucaccgagaugcuccagaaggaguacauggagcggcaggggaagacgccccugggccugguggaccucuucguguucagcaccuccuucuaccugaucagcaucuuccugcaccuggucaagaucccgacccaccgccacaucguggggaaguccugccccaagccccaccggcucaaccacaugggcaucugcagcugcgggcuguacaagcagcccggcgugccgguccgcuggaagcggugaggacuaguaauaaggaaacuguaugaaugucugugggcaggaagugaagagauccuucuguaaagguuuuuggaauuaugucugcugaauaauaaacuuuuuugaaauaauaaaucugguagaaaaaugagaucuaaaaaaaaaaaaaaaaaaaaaaaaaaaaaaaaaaaaaaaaaaaaaaaaaaaaaaaaaaaaaaaaaaaaaaaaaaaaaaaaaaaaaaaaaaaaaaaaaaaa

SEQ ID NO: 16262 - RNA, 1788 nt, Artificial Sequence
  mRNA product Design b-4 (A100) comprising derived and/or modified sequence from LASV(Mad39;Clade IV)__ANH09722__GPCmut1 (opt1)
aggagagucccgcagucggcguccagcggcucugcuuguucgugugugugucguugcaggccuuauucaagcuuaccaugggccagaucgugaccuucuuccaggaggucccccacgugaucgaggaggugaugaacaucguccugaucgcccucagcauccuggccgugcugaaggggcucuacaacguggcgaccugcggccugaucgggcuggucacguuccuccugcugugcggccgcuccugcaccaccacccucuacaaggggguguacgagcugcaggcccuggagcucaacauggagacgcugaacaugaccaugccgcugagcugcaccaagaacaacucccaccacuacauccgggugggcaacgagaccggccucgagcugacgcugaccaacaccagccucaucaaccacaaguucugcaaccuguccgacgcccacaagaagaaccuguacgaccacgcccucaugagcaucaucuccaccuuccaccugagcauccccaacuucaaccaguacgaggccauguccugcgacuucaacgacgggaagaucagcguccaguacaaccugucccacacguacgcgggcgacaccgccaaccacugcgggaccguggccaacggcgugcuccagaccuucaugcgcauggccuggggcgggagcuacaucgcgcuggacuccggcugcgggggcugggacugcaucaugacgagcuaccaguaccugaucauccagaacaccaccugggaggaccacugccaguucucccggcccagccccaucggguaccucggccugcugucccagcggacccgcgacaucuacaucagccggcgccgccggggcacguucaccuggacccuguccgacagcgaggggaaggacaccccgggcggguacugccucacgcgguggaugcugaucgaggccgagcugaagugcuucggcaacaccgccgucgccaagugcaacgagaagcacgacgaggaguucugcgacaugcuccgccuguucgacuucaacaagcaggccauccagcggcugaaggcgcccgcccagaugagcauccagcucaucaacaaggccgugaacgcccugaucaacgaccagcugaucaugaagaaccaccuccgcgacaucaugugcauccccuacugcaacuacuccaaguacugguaccugaaccacaccgugaccggcaagacgagccugcccaagugcuggcucgucuccaacggcagcuaccugaacgagacccacuucuccgacgacaucgagcagcaggccgacaacaugaucaccgagaugcugcagaaggaguacauggagcggcaggggaagacgccccucggccugguggaccuguucguguucagcaccuccuucuaccugaucagcaucuuccuccaccuggucaagaucccgacccaccgccacgugguggggaagcccugccccaagccccaccggcugaaccacaugggcaucugcuccugcggguucuacaagcagccgggcguccccgugcgcuggaagcggugaggacuaguaauaaggaaacuguaugaaugucugugggcaggaagugaagagauccuucuguaaagguuuuuggaauuaugucugcugaauaauaaacuuuuuugaaauaauaaaucugguagaaaaaugagaucuaaaaaaaaaaaaaaaaaaaaaaaaaaaaaaaaaaaaaaaaaaaaaaaaaaaaaaaaaaaaaaaaaaaaaaaaaaaaaaaaaaaaaaaaaaaaaaaaaaaa

SEQ ID NO: 16263 - RNA, 1788 nt, Artificial Sequence
  mRNA product Design b-4 (A100) comprising derived and/or modified sequence from LASV(Z0947-SLE-2011;Clade IV)__AIT17840__GPCmut1 (opt1)
aggagagucccgcagucggcguccagcggcucugcuuguucgugugugugucguugcaggccuuauucaagcuuaccaugggccagaucgugaccuucuuccaggaggucccccacgugaucgaggaggugaugaacaucguccugaucgcccucagcauccuggccgugcugaaggggcucuacaacuucgcgaccugcggccugguggggcuggucacguuccuccugcugugcggccgcuccugcaccaucagccucuacaaggggguguacgagcugcagacccuggagcucaacauggagacccugaacaugacgaugccgcuguccugcaccaagaacaacagccaccacuacaucauggugggcaacgagaccggccucgagcugacccugacgaacaccuccaucaucaaccacaaguucugcaaccucagcgacgcccacaagaagaaccuguacgaccacgcccugauguccaucaucagcaccuuccaccucuccauccccaacuucaaccaguacgaggccaugagcugcgacuucaacgggggcaagaucuccguccaguacaaccugagccacuccuacgccggggacgcggccaaccacugcggcaccguggccaacggggugcugcagacguucaugcggauggccuggggcggcagcuacaucgcgcucgacuccgggugcgaccggugggacugcaucaugaccagcuaccaguaccugaucauccagaacaccaccugggaggaccacugccaguucucccgccccagccccaucggcuaccuggggcuccugucccagcggacgcgcgacaucuacaucagccggcgccgccggggcaccuucaccuggacccugagcgacuccgagggcaaggacacgcccgggggcuacugccugacccgguggaugcucaucgaggccgagcugaagugcuucgggaacaccgccgucgccaagugcaacgagaagcacgacgaggaguucugcgacaugcugcgccucuucgacuucaacaagcaggccauccagcggcugaaggcgcccgcccagaugagcauccagcugaucaacaaggccgugaacgcccucaucaacgaccagcugaucaugaagaaccaccuccgcgacaucaugugcauccccuacugcaacuacuccaaguacugguaccugaaccacaccacgaccgggaagaccagccugcccaagugcuggcugguguccaacggcagcuaccucaacgagacccacuucuccgacgacaucgagcagcaggccgacaacaugaucacggagaugcugcagaaggaguacauggagcggcagggcaagaccccgcuggggcucgucgaccuguucguguucagcaccuccuucuaccugaucagcaucuuccugcaccucgugaagaucccgacccaccgccacaucgucggcaagcccugccccaagccccaccggcugaaccacauggggaucugcuccugcggccuguacaagcagccgggggugcccgugaaguggaagcgcugaggacuaguaauaaggaaacuguaugaaugucugugggcaggaagugaagagauccuucuguaaagguuuuuggaauuaugucugcugaauaauaaacuuuuuugaaauaauaaaucugguagaaaaaugagaucuaaaaaaaaaaaaaaaaaaaaaaaaaaaaaaaaaaaaaaaaaaaaaaaaaaaaaaaaaaaaaaaaaaaaaaaaaaaaaaaaaaaaaaaaaaaaaaaaaaaa

SEQ ID NO: 16264 - RNA, 1788 nt, Artificial Sequence
  mRNA product Design b-4 (A100) comprising derived and/or modified sequence from LASV(Josiah;Clade IV)__NP_694870__GPCmut1 (opt1)
aggagagucccgcagucggcguccagcggcucugcuuguucgugugugugucguugcaggccuuauucaagcuuaccaugggccagaucgugaccuucuuccaggaggucccccacgugaucgaggaggugaugaacaucguccugaucgcccucagcgugcuggccgugcugaaggggcucuacaacuucgcgaccugcggccuggucgggcuggugacguuccuccugcugugcggccgcuccugcaccaccagccucuacaaggggguguacgagcugcagacccuggagcucaacauggagacgcugaacaugaccaugccgcuguccugcaccaagaacaacagccaccacuacaucauggucggcaacgagaccggccucgagcugacgcugaccaacaccuccaucaucaaccacaaguucugcaaccucagcgacgcccacaagaagaaccuguacgaccacgcccugauguccaucaucagcaccuuccaccucuccauccccaacuucaaccaguacgaggccaugagcugcgacuucaacgggggcaagaucuccgugcaguacaaccugagccacuccuacgccggggacgcggccaaccacugcggcacgguggccaacgggguccugcagaccuucaugcggauggccuggggcggcagcuacaucgcgcucgacuccgggugcggcaacugggacugcaucaugaccagcuaccaguaccugaucauccagaacaccacgugggaggaccacugccaguucucccgccccagccccaucggguaccugggccuccugucccagcggacccgcgacaucuacaucagccggcgccggcgcggcaccuucaccuggacgcugagcgacuccgaggggaaggacaccccgggcggguacugccucacccgguggaugcugaucgaggccgagcugaagugcuucggcaacaccgccguggccaagugcaacgagaagcacgacgaggaguucugcgacaugcuccgccuguucgacuucaacaagcaggccauccagcggcugaaggcgcccgcccagaugagcauccagcucaucaacaaggccgugaacgcccugaucaacgaccagcugaucaugaagaaccaccuccgcgacaucaugugcauccccuacugcaacuacuccaaguacugguaccugaaccacacgaccaccgggcggaccagccugcccaagugcuggcucgucuccaacggcagcuaccugaacgagacgcacuucuccgacgacaucgagcagcaggccgacaacaugaucaccgagaugcugcagaaggaguacauggagcgccagggcaagaccccgcucgggcugguggaccuguucguguucagcaccuccuucuaccucaucagcaucuuccugcaccuggucaagauccccacgcaccggcacaucgugggcaaguccugccccaagccccaccgccugaaccacauggggaucugcagcugcggccucuacaagcagccgggggugcccgucaaguggaagcggugaggacuaguaauaaggaaacuguaugaaugucugugggcaggaagugaagagauccuucuguaaagguuuuuggaauuaugucugcugaauaauaaacuuuuuugaaauaauaaaucugguagaaaaaugagaucuaaaaaaaaaaaaaaaaaaaaaaaaaaaaaaaaaaaaaaaaaaaaaaaaaaaaaaaaaaaaaaaaaaaaaaaaaaaaaaaaaaaaaaaaaaaaaaaaaaaa

SEQ ID NO: 16265 - RNA, 1785 nt, Artificial Sequence
  mRNA product Design b-4 (A100) comprising derived and/or modified sequence from LASV(LP;Clade I)__AAF86701__GPCmut1 (opt1)
aggagagucccgcagucggcguccagcggcucugcuuguucgugugugugucguugcaggccuuauucaagcuuaccaugggccagaucaucaccuucuuccaggaggugccccacgucaucgaggaggugaugaacaucgugcugaucgcccucagccugcuggccauccucaaggggcuguacaacaucgcgaccugcggcaucaucgggcuggucgccuuccucuuccugugcggcaaguccugcagccugacgcucaagggcggguacgagcugcagacccuggagcucaacauggagacccugaacaugaccaugccgcuguccugcacgaagaacagcucccaccacuacauccgcgugggcaacgagaccgggcucgagcugacccugaccaacacgagcaucaucaaccacaaguucugcaaccucuccgacgcccacaagaagaaccuguacgaccacgcccugaugagcaucaucuccaccuuccaccucagcauccccaacuucaaccaguacgaggccauguccugcgacuucaacggcgggaagaucagcgugcaguacaaccugucccacagcuacgcgggcgacgccgccgagcacugcgggaccgucgccaacggcgugcugcagaccuucaugcggauggcguggggcgggcgcuacaucgcccucgacuccggcugcgggaacugggacugcaucaugacgagcuaccaguaccugaucauccagaacaccaccugggaggaccacugccaguucucccggcccagccccaucggcuaccugggccuccugucccagcgcacccgggacaucuacaucagccgccggcgccgggggacguucaccuggacccugagcgacuccgagggcaacgagacccccgggggcuacugccucacgcgcuggaugcugaucgaggccgagcugaagugcuucgggaacaccgccguggccaagugcaacgagaagcacgacgaggaguucugcgacaugcuccggcuguucgacuucaacaagcaggcgauccgccggcugaaggccccggcccagaugagcauccagcucaucaacaaggccgucaacgcccugaucaacgaccagcugaucaugaagaaccaccuccgcgacaucaugugcauccccuacugcaacuacuccaaguacugguaccugaaccacaccagcuccggccggaccagccugcccaagugcuggcucaucuccaacggcagcuaccugaacgagacgcaguucuccgacgacaucgagcagcaggcggacaacaugaucaccgagaugcugcagaaggaguacaucgagcgccaggggaagaccccgcucggccugguggacaucuucaucuucagcaccuccuucuaccugaucagcaucuuccuccaccugaucaagauccccacgcaccggcacaucguggggaagcccugccccaagccgcaccgccugaaccacaugggcgucugcuccugcgggcuguacaagcaccccggcgugcccaccaaguggaagcggugaggacuaguaauaaggaaacuguaugaaugucugugggcaggaagugaagagauccuucuguaaagguuuuuggaauuaugucugcugaauaauaaacuuuuuugaaauaauaaaucugguagaaaaaugagaucuaaaaaaaaaaaaaaaaaaaaaaaaaaaaaaaaaaaaaaaaaaaaaaaaaaaaaaaaaaaaaaaaaaaaaaaaaaaaaaaaaaaaaaaaaaaaaaaaaaaa

SEQ ID NO: 16266 - RNA, 1785 nt, Artificial Sequence
  mRNA product Design b-4 (A100) comprising derived and/or modified sequence from LASV(803213;Clade II)__AAF86703__GPCmut1 (opt1)
aggagagucccgcagucggcguccagcggcucugcuuguucgugugugugucguugcaggccuuauucaagcuuaccaugggccagaucaucaccuucuuccaggaggugccccacgucaucgaggaggugaugaacaucgugcugaucgcccucagccugcuggccauccucaaggggaucuacaacgucgcgaccugcggccuguucgggcugaucuccuuccuccugcugugcggccgcagcugcuccgugacguacaaggggguguacgagcuccagacccuggagcugaacauggccaaccucaacaugaccaugccgcugagcugcaccaagaacaacucccaccacuacaucauggucggcaacgagacgggccuggagcucacccugaccaacaccagcaucaucaaccacaaguucugcaaccuguccgacgcccacaagaagaaccucuacgaccacgcccugaugagcaucaucuccacguuccaccugagcauccccaacuucaaccaguacgaggccauguccugcgacuucaacgggggcaagaucagcgugcaguacaaccucucccacagcuucgcgguggacgccgccaaccacugcgggaccaucgccaacggcguccugcagaccuucaugcggauggcguggggcggguccuacaucgcccuggacagcggcugcgggaacugggacugcaucaugaccuccuaccaguaccucaucauccagaacacgaccugggaggaccacugccaguucagccgccccucccccaucggcuaccuggggcugcucagccagcggacccgcgacaucuacaucagccggcgccggcgcggcaccuucacguggacccuguccgacagcgagggcaacgaggcccccgggggcuacugccugacccgguggaugcucaucgaggccgagcugaagugcuucgggaacaccgccguggcgaagugcaacgagaagcacgacgaggaguucugcgacaugcugcgccucuucgacuucaacaagcaggccaucaagcggcugaagacgccggcccagauguccauccagcugaucaacaaggccgugaacgcccucaucaacgaccagcugaucaugaagaaccaccuccgcgacaucaugugcauccccuacugcaacuacagccgguacugguaccugaaccacaccgucaccggcaagaccucccugccccgcugcuggcuggugagcaacggguccuaccucaacgagacgcacuucagcgacgacaucgagcagcaggcggacaacaugaucaccgagaugcugcagaaggaguacauggaccggcagggcaagaccccgcugggccucguggaccuguucgucuucuccaccagcuucuaccugaucuccaucuuccuccaccuggugaagauccccacgcaccgccacaucguggggaagcccugccccaagccgcaccggcugaaccacaugggcaucugcagcugcgggcuguacaagcaccccggcguccccgugaaguggaagcgcugaggacuaguaauaaggaaacuguaugaaugucugugggcaggaagugaagagauccuucuguaaagguuuuuggaauuaugucugcugaauaauaaacuuuuuugaaauaauaaaucugguagaaaaaugagaucuaaaaaaaaaaaaaaaaaaaaaaaaaaaaaaaaaaaaaaaaaaaaaaaaaaaaaaaaaaaaaaaaaaaaaaaaaaaaaaaaaaaaaaaaaaaaaaaaaaaa

SEQ ID NO: 16267 - RNA, 1785 nt, Artificial Sequence
  mRNA product Design b-4 (A100) comprising derived and/or modified sequence from LASV(GA391;Clade III)__CAA36645__GPCmut1 (opt1)
aggagagucccgcagucggcguccagcggcucugcuuguucgugugugugucguugcaggccuuauucaagcuuaccaugggccagaucgugaccuucuuccaggaggucccccacgugaucgaggaggugaugaacaucguccugaucgcccucagcauccuggccauccugaaggggcucuacaacguggcgaccugcggccugaucgggcuggugacguuccuccugcuguccggccgcagcugcucccucaucuacaaggggaccuacgagcugcagacccuggagcucaacauggagacccugaacaugacgaugccgcugagcugcaccaagaacaacucccaccacuacauccgggucggcaacgagaccggccucgagcugacccugacgaacaccagcauccucaaccacaaguucugcaaccuguccgacgcccacaagcgcaaccuguacgaccacagccucauguccaucaucagcaccuuccaccuguccauccccaacuucaaccaguacgaggccaugagcugcgacuucaacgggggcaagaucaccgugcaguacaaccugucccacagcuucgccguggacgccgcggggcacugcggcacgcucgccaacgggguccugcagaccuucaugcggauggccuggggcggcuccuacaucgcccuggacagcgggugcggcaacugggacugcaucaugaccuccuaccaguaccucaucauccagaacaccacgugggacgaccacugccaguucagccgccccucccccaucggguaccugggccugcucagccagcggacccgcgacaucuacaucagccggcgccggcgcggcaccuucaccuggacgcuguccgacagcgaggggaacgagaccccgggcggguacugccugacccgguggaugcucaucgaggcggagcugaagugcuucggcaacaccgccguggccaagugcaacgagaagcacgacgaggaguucugcgacaugcugcgccucuucgacuucaacaagcaggccauccggcgccugaagacgcccgcccagauguccauccagcugaucaacaaggcggugaacgcccucaucaacgaccagcugaucaugaagaaccaccuccgggacaucaugugcauccccuacugcaacuacagccgcuacugguaccugaaccacaccuccaccgggaagaccagccugccccggugcuggcugaucuccaacggcagcuaccucaacgagacgaaguucuccgacgacaucgagcagcaggccgacaacaugaucaccgagaugcugcagaaggaguacaucgaccgccagggcaagaccccgcuggggcucgucgaccuguucguguucagcaccuccuucuaccugaucagcaucuuccugcaccucgugaagauccccacgcaccggcacaucgucggcaagcccugccccaagccgcaccgccugaaccacauggggaucugcuccugcggccuguacaagcagcccggggugcccgugcgguggaagcgcugaggacuaguaauaaggaaacuguaugaaugucugugggcaggaagugaagagauccuucuguaaagguuuuuggaauuaugucugcugaauaauaaacuuuuuugaaauaauaaaucugguagaaaaaugagaucuaaaaaaaaaaaaaaaaaaaaaaaaaaaaaaaaaaaaaaaaaaaaaaaaaaaaaaaaaaaaaaaaaaaaaaaaaaaaaaaaaaaaaaaaaaaaaaaaaaaa

SEQ ID NO: 16268 - RNA, 1788 nt, Artificial Sequence
  mRNA product Design b-4 (A100) comprising derived and/or modified sequence from LASV(AV;Clade V)__CCA30314__GPCmut1 (opt1)
aggagagucccgcagucggcguccagcggcucugcuuguucgugugugugucguugcaggccuuauucaagcuuaccaugggccagaucgugaccuucuuccaggaggucccccacgugaucgaggaggugaugaacaucguccugaucgcccucagcauccuggccgugcugaaggggcucuacaacaucgcgaccugcggccugaucgggcugaucacguuccuccugcugugcggccgcuccugcagcuccaaccucuacaaggggguguacgagcugcagagccuggaccucaacauggagacccugaacaugaccaugccgcuguccugcaccaagaacaacagccaccacuacauccgggucggcaacgacacgggccucgagcugacccugaccaacaccuccauccucaaccacaaguucugcaaccugagcgacgcccacaagaaggaccuguacgaccacgcccucauguccaucaucagcacguuccaccuguccauccccaacuucaaccaguacgaggccaugagcugcgacuucaacgggggcaagaucuccgugcaguacaaccugagccacuccuacgccaucgacgcggccaaccacugcgggaccguggccaacggcauccuccagaccuucaugcgcauggccuggggcgggagcuacaucgcgcuggacuccggcugcgggaacugggacugcaucaugaccagcuaccaguaccugaucauccagaacacgaccugggagaaccacugccaguucucccggcccagccccaucggcuaccucgggcugcugagccagcgcacccgggacaucuacaucucccgccggcgccggggcaccuucacguggacccucagcgacuccgagggcaacgccacccccgggggcuacugccugacccgcuggaugcugaucgaggccgagcucaagugcuucgggaacacggccgucgccaagugcaacgagaagcacgacgaggaguucugcgacaugcugcggcuguucgacuucaacaagcaggcgaucagccgccucaaguccccggcccagaugagcauccagcugaucaacaaggccgugaacgcccugaucaacgaccagcucaucaugaagaaccaccuccgggacaucaugugcauccccuacugcaacuacuccaaguacugguaccugaaccacaccaucaccggcaagaccagccugcccaagugcuggcugguguccaacgggagcuaccugaacgagacgcacuucuccgacgacaucgagcagcaggccgacaacaugaucaccgagaugcuccagaaggaguacauggagcgccagggcaagaccccgcugggccuggucgaccucuucguguucagcaccuccuucuaccugaucagcaucuuccugcggcuggugaagauccccacgcaccgccacaucgucgggaagcccugccccaagccgcaccggcucaaccacaugggcaucugcuccugcgggcuguacaagcagcccggcgugcccgugcgcuggaagcggugaggacuaguaauaaggaaacuguaugaaugucugugggcaggaagugaagagauccuucuguaaagguuuuuggaauuaugucugcugaauaauaaacuuuuuugaaauaauaaaucugguagaaaaaugagaucuaaaaaaaaaaaaaaaaaaaaaaaaaaaaaaaaaaaaaaaaaaaaaaaaaaaaaaaaaaaaaaaaaaaaaaaaaaaaaaaaaaaaaaaaaaaaaaaaaaaa

SEQ ID NO: 16269 - RNA, 1785 nt, Artificial Sequence
  mRNA product Design b-4 (A100) comprising derived and/or modified sequence from LASV(Togo/2016/7082;Clade VI)__AMR44577__GPCmut1 (opt1)
aggagagucccgcagucggcguccagcggcucugcuuguucgugugugugucguugcaggccuuauucaagcuuaccaugggccagaucaucaccuucuuccaggaggugccccacgucaucgaggaggugaugaacaucgugcugaucgcccucagccugcuggccauccucaagggggucuacaacguggcgaccugcggcaucaucgggcuggugacguuccuguuccucugcggccgcuccugcagccugaucuacaagggguccuacgagcugcagacccucgagcugaacauggagacccugaacaugaccaugccgcucagcugcacgaagaacuccagccaccacuacauccgggucggcaacgagaccggccuggagcugacccucaccaacacguccaucaucaaccacaaguucugcaaccugagcgacgcccacaagcgcaaccuguacgaccacgcccucauguccauccugagcaccuuccaccuguccauccccaacuucaaccaguacgaggccaugagcugcgacuucaacgggggcaagaucuccgugcaguacaaccucagccacgccuacgcgguggacgccgccgagcacugcgggaccgucgccaacggcgugcugcagaccuucaugcggauggcguggggcggguccuacaucgcccuggacagcggcugcgggaacugggacugcaucaugacguccuaccaguaccucaucauccagaacaccaccugggaggaccacugccaguucagccgccccucccccaucggcuaccuggggcugcucagccagcggacccgcgacaucuacaucagccggcgccggcgcggcacguucaccuggacccuguccgacagcgagggcaacgagacccccgggggcuacugccugacgcgguggaugcucaucgaggccgagcugaagugcuucgggaacaccgccguggccaagugcaacgagaagcacgacgaggaguucugcgacaugcugcgccucuucgacuucaacaagcaggcgauccagcggcugaaguccccggcccagaugagcauccagcugaucaacaaggccgucaacgcccucaucaacgaccagcugaucaugaagaaccaccuccgcgacaugaugugcauccccuacugcaacuacuccaaguacugguaccugaaccacaccagcuccggccggaccagccugcccaagugcuggcugguguccaacgggagcuaccucaacgagacgcacuucuccgacgacaucgagcagcaggccgacaacaugaucaccgagaugcugcagaaggaguacaucgaccgccagggcaagaccccgcugggccucguggaccuguucgucuucagcaccuccuucuaccugaucagcaucuuccuccaccugaucaagauccccacgcaccggcacaucguggggaagcccugccccaagccgcaccgccugaaccacaugggcaucugcuccugcgggcuguacaagcagcccggcgugcccacccgguggaagcgcugaggacuaguaauaaggaaacuguaugaaugucugugggcaggaagugaagagauccuucuguaaagguuuuuggaauuaugucugcugaauaauaaacuuuuuugaaauaauaaaucugguagaaaaaugagaucuaaaaaaaaaaaaaaaaaaaaaaaaaaaaaaaaaaaaaaaaaaaaaaaaaaaaaaaaaaaaaaaaaaaaaaaaaaaaaaaaaaaaaaaaaaaaaaaaaaaa

SEQ ID NO: 16270 - RNA, 1785 nt, Artificial Sequence
  mRNA product Design b-4 (A100) comprising derived and/or modified sequence from LASV(KAK-428;Clade n.d. (VII))__ANH09740__GPCmut1 (opt1)
aggagagucccgcagucggcguccagcggcucugcuuguucgugugugugucguugcaggccuuauucaagcuuaccaugggccagaucgugaccuucuuccaggaggucccccacgugaucgaggaggugaugaacaucguccugaucgcccucagccugcuggccauccucaaggggcuguacaacuucgcgaccugcggcgugaucgggcugaucacguuccuccugcugugcggccgcuccugcagcgccaccuacaaggggcaguacgagcuccagacccuggagcugaacauggagucccucaacaugaccaugccgcugagcugcacgaagaacaacucccaccacuacauccgggccggcaacaacaccggccuggagcucacccugaccaacacgagcaucaucucccacaaguucugcaaccugagcgacgcccacaagaagaaccucuacgaccacacccugauguccaucaucaccaccuuccaccugagcauccccaacuucaaccaguacgaggccauguccugcgacuucaacgggggcaagaucagcauccaguacaaccucucccacagcuacgcgggggacgccgcccagcacugcggcacgguggccaacgggguccugcagaccuucaugcgcauggcguggggcggcuccuaccuggcccucgacagcgggugccggggcugggacugcaucaucuccagcuaccaguaccugaucauccagaacaccaccugggacgaccacugccaguucucccgccccagccccaucggguaccugggcuucgugagccagaagacgcgggacaucuacaucucccgccggcgccggggcaccuucaccuggacccucagcgacuccgaggggcacgacaugccgggcggguacugccugacgcgcuggaugcugaucgaggccgaccucaagugcuucggcaacaccgccguggccaagugcaacgagaagcacgacgaggaguucugcgacauguggcggcuguucgacuucaacaagcaggcgauccagcgccugaaggcccccgcccagaugaacauccagcucaucaacaaggccgucaacgcccugaucaacgaccagcugaugaugaagaaccaccuccgggacaucaugugcauccccuacugcaacuacagcaaguucugguaccugaacaacaccaccacggggcgcaccucccugccccggugcuggcucaucagcaacggcuccuaccugaacgagacccacuucagcgacgacaucgagcagcaggcggacaacaugaucaccgagaugcugcagaaggaguacauggaccgccagggcaagacgccgcucgggcugguggaccuguucguguucuccaccagcuucuaccucaucaccaucuuccugcaccuggucaagauccccacccaccggcacaucgugggcaagcccugccccaagccgcaccgccucaaccacauggggaucugcuccugcggccuguacaagcagcccggggugcccguccgguggaagcgcugaggacuaguaauaaggaaacuguaugaaugucugugggcaggaagugaagagauccuucuguaaagguuuuuggaauuaugucugcugaauaauaaacuuuuuugaaauaauaaaucugguagaaaaaugagaucuaaaaaaaaaaaaaaaaaaaaaaaaaaaaaaaaaaaaaaaaaaaaaaaaaaaaaaaaaaaaaaaaaaaaaaaaaaaaaaaaaaaaaaaaaaaaaaaaaaaa

SEQ ID NO: 16271 - RNA, 1785 nt, Artificial Sequence; identical to SEQ ID NO: 16265
  mRNA product Design b-4 (A100) comprising derived and/or modified sequence from LASV(Pinneo-NIG-1969;Clade I)__AIT17836__GPCmut1 (opt1)

SEQ ID NO: 16272 - RNA, 1785 nt, Artificial Sequence
  mRNA product Design b-4 (A100) comprising derived and/or modified sequence from LASV(ISTH0009-NIG-2011;Clade II)__AIT17404__GPCmut1 (opt1)
aggagagucccgcagucggcguccagcggcucugcuuguucgugugugugucguugcaggccuuauucaagcuuaccaugggccagaucaucaccuucuuccaggaggugccccacgucaucgaggaggugaugaacaucgugcugaucgcccucagccugcuggccauccucaaggggaucuacaacgucgcgaccugcggccuguucgggcugguguccuuccuccugcugugcggccgcagcugcuccacgaccuacaaggggguguacgagcuccagacccuggagcuggacauggccagccucaacaugaccaugccgcuguccugcacgaagaacaacagccaccacuacaucauggucggcaacgagaccggccuggagcucacccugaccaacacguccaucaucaaccacaaguucugcaaccugagcgacgcccacaagaagaaccucuacgaccacgcccugauguccaucaucagcaccuuccaccuguccauccccaacuucaaccaguacgaggccaugagcugcgacuucaacgggggcaagaucuccgugcaguacaaccucagccacgcguacgccguggacgccgccaaccacugcgggaccaucgcgaacggcguccugcagaccuucaugcggauggccuggggcggguccuacaucgcccuggacagcggcugcggguccugggacugcaucaugacgagcuaccaguaccucaucauccagaacaccaccugggaggaccacugccaguucucccgccccagccccaucggcuaccuggggcugcucagccagcggacccgcgacaucuacaucucccggcgccggcgcggcacguucaccuggacccugagcgacuccgagggcaacgagacccccgggggcuacugccugacgcgguggaugcucaucgaggccgagcugaagugcuucgggaacaccgccguggcgaagugcaacgagaagcacgacgaggaguucugcgacaugcugcgccucuucgacuucaacaagcaggccauccggcgccugaagaccccggcccagaugagcauccagcugaucaacaaggccgugaacgcccucaucaacgaccagcugaucaugaagaaccaccuccgggacaucaugugcauccccuacugcaacuacuccaaguacugguaccugaaccacaccgucacgggcaagaccagccugccccgcugcuggcugguguccaacgggagcuaccucaacgagacccacuucuccgacgacaucgagcagcaggcggacaacaugaucaccgagcugcugcagaaggaguacauggaccggcagggcaagacgccgcucggccugguggaccuguucgucuucagcaccuccuucuaccucaucagcaucuuccugcaccugaucaagauccccacccaccgccacaucaccgggaagcccugccccaagccgcaccggcugaaccacaugggcaucugcuccugcgggcucuacaagcaccccggcgugcccgugaaguggaagcgcugaggacuaguaauaaggaaacuguaugaaugucugugggcaggaagugaagagauccuucuguaaagguuuuuggaauuaugucugcugaauaauaaacuuuuuugaaauaauaaaucugguagaaaaaugagaucuaaaaaaaaaaaaaaaaaaaaaaaaaaaaaaaaaaaaaaaaaaaaaaaaaaaaaaaaaaaaaaaaaaaaaaaaaaaaaaaaaaaaaaaaaaaaaaaaaaaa

SEQ ID NO: 16273 - RNA, 1785 nt, Artificial Sequence
  mRNA product Design b-4 (A100) comprising derived and/or modified sequence from LASV(ISTH2010-NIG-2012;Clade II)__AIT17482__GPCmut1 (opt1)
aggagagucccgcagucggcguccagcggcucugcuuguucgugugugugucguugcaggccuuauucaagcuuaccaugggccagaucaucaccuucuuccaggaggugccccacgucaucgaggaggugaugaacaucgugcugaucgcccucagccugcuggccauccucaaggggaucuacaacgucgcgaccugcggccuguucgggcugguguccuuccuccugcugugcggccgcagcugcuccacgaccuacaaggggguguacgagcuccagacccuggagcuggacauggccagccucaacaugaccaugccgcuguccugcacgaagaacaacagccaccacuacaucauggucggcaacgagaccggccuggagcucacccugaccaacacguccaucaucaaccacaaguucugcaaccugagcgacgcccacaagaagaaccucuacgaccacgcccugauguccaucaucagcaccuuccaccuguccauccccaacuucaaccaguacgaggccaugagcugcgacuucaacgggggcaagaucuccgugcaguacaaccucagccacgcguacgccguggacgccgccaaccacugcgggaccaucgcgaacggcguccugcagaccuucaugcggauggccuggggcggguccuacaucgcccuggacagcggcugcggguccugggacugcaucaugacgagcuaccaguaccucaucauccagaacaucaccugggaggaccacugccaguucucccgccccagccccaucggcuaccuggggcugcucagccagcggacccgcgacaucuacaucucccggcgccggcgcggcaccuucacguggacccugagcgacuccgagggcaacgagacccccgggggcuacugccugacccgguggaugcucaucgaggccgagcugaagugcuucgggaacacggccguggcgaagugcaacgagaagcacgacgaggaguucugcgacaugcugcgccucuucgacuucaacaagcaggccauccggcgccugaagaccccggcccagaugagcauccagcugaucaacaaggccgugaacgcccucaucaacgaccagcugaucaugaagaaccaccuccgggacaucaugugcauccccuacugcaacuacuccaaguacugguaccugaaccacaccgucaccggcaagacgagccugccccgcugcuggcugguguccaacgggagcuaccucaacgagacccacuucuccgacgacaucgagcagcaggcggacaacaugaucaccgagcugcugcagaaggaguacaucgaccggcagggcaagaccccgcucggccugguggaccuguucgucuucagcacguccuucuaccucaucagcaucuuccugcaccuggugaagauccccacccaccgccacguggucgggaagcccugccccaagccgcaccggcugaaccacaugggcaucugcuccugcgggcucuacaagcaccccggcgugcccgugaaguggaagcgcugaggacuaguaauaaggaaacuguaugaaugucugugggcaggaagugaagagauccuucuguaaagguuuuuggaauuaugucugcugaauaauaaacuuuuuugaaauaauaaaucugguagaaaaaugagaucuaaaaaaaaaaaaaaaaaaaaaaaaaaaaaaaaaaaaaaaaaaaaaaaaaaaaaaaaaaaaaaaaaaaaaaaaaaaaaaaaaaaaaaaaaaaaaaaaaaaa

SEQ ID NO: 16274 - RNA, 1785 nt, Artificial Sequence
  mRNA product Design b-4 (A100) comprising derived and/or modified sequence from LASV(Lassa virus/H.sapiens-wt/NGA/2015/ISTH_0543;Clade II)__AVO03639__GPCmut1 (opt1)
aggagagucccgcagucggcguccagcggcucugcuuguucgugugugugucguugcaggccuuauucaagcuuaccaugggccagaucaucaccuucuuccaggaggugccccacgucaucgaggaggugaugaacaucgugcugaucgcccucagccugcuggccauccucaaggggaucuacaacgucgcgaccugcggccuguucgggcugguguccuuccuccugcugugcggccgcagcugcuccacgaccuacaaggggguguacgagcuccagacccuggagcuggacauggccaaccucaacaugaccaugccgcugagcugcacgaagaacaacucccaccacuacaucauggucggcaacgagaccggccuggagcucacccugaccaacacgagcaucaucaaccacaaguucugcaaccuguccgacgcccacaagaagaaccucuacgaccacgcccugaugagcaucaucuccaccuuccaccugagcauccccaacuucaaccaguacgaggccauguccugcgacuucaacgggggcaagaucagcgugcaguacaaccucucccacaccuacgcgguggacgccgccaaccacugcgggaccaucgccaacggcguccugcagacguucaugcggauggcguggggcgggagcuacaucgcccuggacuccggcugcgggagcugggacugcaucaugaccuccuaccaguaccucgugauccagaacaccaccugggaggaccacugccaguucagccgccccucccccaucggcuaccuggggcugcucagccagcggacgcgcgacaucuacaucagccggcgccggcgcggcaccuucaccuggacccuguccgacagcgagggcaacgagacgcccgggggcuacugccugacccgguggaugcucaucgaggccgagcugaagugcuucgggaacaccgccguggccaagugcaacgagaagcacgacgaggaguucugcgacaugcugcgccucuucgacuucaacaagcaggcgauccggcgccugaagaccccggcccagauguccauccagcugaucaacaaggccgucaacgcccucaucaacgaccagcugaucaugaagaaccaccuccgggacaucaugugcauccccuacugcaacuacagcaaguacugguaccugaaccacacggugaccggcaagaccucccugccccgcugcuggcuggugagcaacggguccuaccucaacgagacccacuucagcgacgacaucgagcagcaggccgacaacaugaucacggagcugcugcagaaggaguacaucgaccggcagggcaagaccccgcucggccuggucgaccuguucguguucuccaccagcuucuaccucaucuccaucuuccugcaccuggugaagauccccacccaccgccacaucacggggaagcccugccccaagccgcaccggcugaaccacaugggcaucugcagcugcgggcucuacaagcaccccggcguccccgugaaguggaagcgcugaggacuaguaauaaggaaacuguaugaaugucugugggcaggaagugaagagauccuucuguaaagguuuuuggaauuaugucugcugaauaauaaacuuuuuugaaauaauaaaucugguagaaaaaugagaucuaaaaaaaaaaaaaaaaaaaaaaaaaaaaaaaaaaaaaaaaaaaaaaaaaaaaaaaaaaaaaaaaaaaaaaaaaaaaaaaaaaaaaaaaaaaaaaaaaaaa

SEQ ID NO: 16275 - RNA, 1785 nt, Artificial Sequence
  mRNA product Design b-4 (A100) comprising derived and/or modified sequence from LASV(Lassa virus/H.sapiens-wt/NGA/2016/ISTH_0009;Clade II)__AVO03571__GPCmut1 (opt1)
aggagagucccgcagucggcguccagcggcucugcuuguucgugugugugucguugcaggccuuauucaagcuuaccaugggccagaucaucaccuucuuccaggaggugccccacgucaucgaggaggugaugaacaucgugcugaucgcccucagccugcuggccauccucaaggggaucuacaacgucgcgaccugcggccugcuggggcucguguccuuccugcugcucugcggccgcagcugcuccacgaccuacaaggggguguacgagcugcagacccuggagcucgacauggccagccugaacaugaccaugccgcuguccugcacgaagaacaacagccaccacuacaucauggucggcaacgagaccggccucgagcugacccugaccaacacguccaucaucaaccacaaguucugcaaccucagcgacgcccacaagaagaaccuguacgaccacgcccugauguccaucaucagcaccuuccaccucuccauccccaacuucaaccaguacgaggccaugagcugcgacuucaacgggggccggaucuccgugcaguacaaccugagccacuccuacgcgguggacgccgccaaccacugcgggaccaucgccaacggcguccugcagaccuucaugcgcauggcguggggcgggagcuacaucgcccucgacuccggcugcgggagcugggacugcaucaugacguccuaccaguaccugaucauccagaacaccaccugggaggaccacugccaguucagccggcccagccccaucggcuaccuggggcuccugucccagcgcacccgggacaucuacaucagccgccggcgccggggcacguucaccuggacccuguccgacagcgagggcaacgagacccccgggggcuacugccucacgcgcuggaugcugaucgaggccgagcugaagugcuucgggaacaccgccguggccaagugcaacgagaagcacgacgaggaguucugcgacaugcuccggcuguucgacuucaacaagcaggcgauccgccggcugaagaccccggcccagauguccauccagcucaucaacaaggccgugaacgcccugaucaacgaccagcugaucaugaagaaccaccuccgcgacaucaugugcauccccuacugcaacuacagcaaguacugguaccugaaccacaccgucacgggcaagaccucccugccccggugcuggcucgugagcaacggguccuaccugaacgagacccacuucagcgacgacaucgagcagcaggccgacaacaugaucaccgagcugcuccagaaggaguacaucgaccgccagggcaagacgccgcugggccugguggaccucuucgucuucuccaccagcuucuaccugaucuccaucuuccugcaccuggugaagauccccacccaccggcacaucaccgggaagcccugccccaagccgcaccgccucaaccacaugggcaucugcagcugcgggcuguacaaccaccccggcgugcccgucaaguggaagcggugaggacuaguaauaaggaaacuguaugaaugucugugggcaggaagugaagagauccuucuguaaagguuuuuggaauuaugucugcugaauaauaaacuuuuuugaaauaauaaaucugguagaaaaaugagaucuaaaaaaaaaaaaaaaaaaaaaaaaaaaaaaaaaaaaaaaaaaaaaaaaaaaaaaaaaaaaaaaaaaaaaaaaaaaaaaaaaaaaaaaaaaaaaaaaaaaa

SEQ ID NO: 16276 - RNA, 1785 nt, Artificial Sequence
  mRNA product Design b-4 (A100) comprising derived and/or modified sequence from LASV(Lassa virus/H.sapiens-wt/NGA/2016/ISTH_0017;Clade II)__AVO03567__GPCmut1 (opt1)
aggagagucccgcagucggcguccagcggcucugcuuguucgugugugugucguugcaggccuuauucaagcuuaccaugggccagaucaucaccuucuuccaggaggugccccacgucaucgaggaggugaugaacaucgugcugaucgcccucagccugcuggccauccucaaggggaucuacaacgucgcgaccugcggccuguucgggcugguguccuuccuccugcugugcggccgcagcugcuccacgaccuacaaggggguguacgagcuccagacccuggagcuggacauggccagccucaacaugaccaugccgcuguccugcacgaagaacaacagccaccacuacaucauggucggcaacgagaccggccuggagcucacccugaccaacacguccaucaucaaccacaaguucugcaaccugagcgacgcccacaagaagaaccucuacgaccacgcccugauguccaucaucagcaccuuccaccuguccauccccaacuucaaccaguacgaggccaugagcugcgacuucaacgggggcaagaucuccgugcaguacaaccucagccacaccuacgcgaucgacgccgccaaccacugcgggaccaucgccaacggcgugcugcagacguucaugcggauggcguggggcggguccuacaucgcccuggacagcggcugcggguccugggacugcaucaugaccagcuaccaguaccucaucauccagaacaccaccugggaggaccacugccaguucucccgccccagccccaucggcuaccuggggcugcucagccagcggacgcgcgacaucuacaucucccggcgccggcgcggcaccuucaccuggacccugagcgacuccgagggcaacgagacgcccgggggcuacugccugacccgguggaugcucaucgaggccgagcugaagugcuucgggaacaccgccgucgccaagugcaacgagaagcacgacgaggaguucugcgacaugcugcgccucuucgacuucaacaagcaggcgauccggcgccugaagaccccggcccagaugagcauccagcugaucaacaaggccgugaacgcccucaucaacgaccagcugaucaugaagaaccaccuccgggacaucaugugcauccccuacugcaacuacuccaaguacugguaccugaaccacacggugaccggcaagaccagccugccccgcugcuggcuggucuccaacgggagcuaccucaacgagacccacuucuccgacgacaucgagcagcaggccgacaacaugaucacggagcugcugcagaaggaguacauggaccggcagggcaagaccccgcucggccugguggaccuguucguguucagcaccuccuucuaccucaucagcaucuuccugcaccugguccgcauccccacccaccggcacgugaucgggaagcccugccccaagccgcaccgccugaaccacaugggcaucugcuccugcgggcucuacaagcaccccggcgugcccgucaaguggaagcggugaggacuaguaauaaggaaacuguaugaaugucugugggcaggaagugaagagauccuucuguaaagguuuuuggaauuaugucugcugaauaauaaacuuuuuugaaauaauaaaucugguagaaaaaugagaucuaaaaaaaaaaaaaaaaaaaaaaaaaaaaaaaaaaaaaaaaaaaaaaaaaaaaaaaaaaaaaaaaaaaaaaaaaaaaaaaaaaaaaaaaaaaaaaaaaaaa

SEQ ID NO: 16277 - RNA, 1785 nt, Artificial Sequence
  mRNA product Design b-4 (A100) comprising derived and/or modified sequence from LASV(Lassa virus/H.sapiens-wt/NGA/2018/ISTH_0959;Clade II)__AVV65099__GPCmut1 (opt1)
aggagagucccgcagucggcguccagcggcucugcuuguucgugugugugucguugcaggccuuauucaagcuuaccaugggccagaucaucaccuucuuccaggaggugccccacgucaucgaggaggugaugaacaucgugcugaucgcccucagccugcuggccauccucaaggggaucuacaacgucgugaccugcggccuguucgggcugguguccuuccuccugcugugcggccgcagcugcuccacgaccuacaagggggucuacgagcuccagacccuggagcuggacauggcgagccucaacaugaccaugccgcuguccugcacgaagaacaacagccaccacuacaucauggugggcaacgagaccggccuggagcucacccugaccaacacguccaucaucaaccacaaguucugcaaccugagcgacgcccacaagaagaaccucuacgaccacgcccugauguccaucaucagcaccuuccaccuguccauccccaacuucaaccaguacgaggccaugagcugcgacuucaacgggggcaagaucuccgugcaguacaaccucagccacgccuacgcgaucgacgccgccaaccacugcgggaccaucgccaacggcguccugcagaccuucaugcggauggcguggggcggguccuacaucgcccuggacagcggcugcggguccugggacugcaucaugacgagcuaccaguaccucaucauccagaacaccaccugggaggaccacugccaguucucccgccccagccccaucggcuaccuggggcugcucagccagcggacccgcgacaucuacaucucccggcgccggcgcggcacguucaccuggacccugagcgacuccgagggcaacgagacccccgggggcuacugccugacgcgguggaugcucaucgaggccgagcugaagugcuucgggaacaccgccguggccaagugcaacgagaagcacgacgaggaguucugcgacaugcugcgccucuucgacuucaacaagcaggcgauccggcgccugaagaccccggcccagaugagcauccagcugaucaacaaggccgugaacgcccucaucaacgaccagcugaucaugaagaaccaccuccgggacaucaugugcauccccuacugcaacuacuccaaguacugguaccugaaccacaccgucacgggcaagaccagccugccccgcugcuggcugguguccaacgggagcuaccucaacgagacccacuucuccgacgacaucgagcagcaggccgacaacaugaucaccgagcugcugcagaaggaguacaucgaccggcagggcaagacgccgcucggccugguggaccuguucgucuucagcaccuccuucuaccucaucagcaucuuccugcaccuggugaagauccccacccaccgccacgugaucgggaagcccugccccaagccgcaccggcugaaccacaugggcaucugcuccugcgggcucuacaagcaccccggcguccccgugaaguggaagcgcugaggacuaguaauaaggaaacuguaugaaugucugugggcaggaagugaagagauccuucuguaaagguuuuuggaauuaugucugcugaauaauaaacuuuuuugaaauaauaaaucugguagaaaaaugagaucuaaaaaaaaaaaaaaaaaaaaaaaaaaaaaaaaaaaaaaaaaaaaaaaaaaaaaaaaaaaaaaaaaaaaaaaaaaaaaaaaaaaaaaaaaaaaaaaaaaaa

SEQ ID NO: 16278 - RNA, 1785 nt, Artificial Sequence
  mRNA product Design b-4 (A100) comprising derived and/or modified sequence from LASV(LASV003-NIG-2008;Clade II)__AIT17580__GPCmut1 (opt1)
aggagagucccgcagucggcguccagcggcucugcuuguucgugugugugucguugcaggccuuauucaagcuuaccaugggccagaucaucaccuucuuccaggaggugccccacgucaucgaggaggugaugaacaucgugcugaucgcccucagccugcuggccauccucaaggggaucuacaacgucgcgaccugcggccuguucgggcugguguccuuccuccugcugugcggccgcagcugcuccacgaccuacaaggggguguacgagcuccagacccuggagcuggacauggccagccucaacaugaccaugccgcuguccugcacgaagaacaacagccaccacuacaucauggucggcaacgagaccggccuggagcucacccugaccaacacguccaucaucaaccacaaguucugcaaccugagcgacgcccacaagaagaaccucuacgaccacgcccugauguccaucaucagcaccuuccaccuguccauccccaacuucaaccaguacgaggccaugagcugcgacuucaacgggggcaagaucuccgugcaguacaaccucagccacaccuacgcgguggacgccgccaaccacugcgggaccaucgccaacggcguccugcagacguucaugcggauggcguggggcggguccuacaucgcccuggacagcggcugcggguccugggacugcaucaugaccagcuaccaguaccucaucauccagaacaccaccugggaggaccacugccaguucucccgccccagccccaucggcuaccuggggcugcucagccagcggacgcgcgacaucuacaucucccggcgccggcgcggcaccuucaccuggacccugagcgacuccgagagcaacgagacgccgggcggguacugccugacccgguggaugcucaucgaggccgagcugaagugcuucggcaacaccgccguggccaagugcaacgagaagcacgacgaggaguucugcgacaugcugcgccucuucgacuucaacaagcaggcgauccggcgccugaaggcccccgcccagauguccauccagcugaucaacaaggccgugaacgcccucaucaacgaccagcugaucaugaagaaccaccuccgggacaucaugugcauccccuacugcaacuacagcaaguacugguaccugaaccacaccgucacggggcgcaccucccugccccggugcuggcuggugagcaacggcuccuaccucaacgagacccacuucagcgacgacaucgagcagcaggcggacaacaugaucaccgagcugcugcagaaggaguacauggaccgccaggggaagacgccgcucggccugguggaccuguucgucuucuccaccagcuucuaccucaucuccaucuuccugcaccuggugaagauccccacccaccggcacgugaucggcaagcccugccccaagccgcaccgccugaaccacauggggaucugcagcugcggccucuacaagcaccccgggguccccgugaaguggaagcggugaggacuaguaauaaggaaacuguaugaaugucugugggcaggaagugaagagauccuucuguaaagguuuuuggaauuaugucugcugaauaauaaacuuuuuugaaauaauaaaucugguagaaaaaugagaucuaaaaaaaaaaaaaaaaaaaaaaaaaaaaaaaaaaaaaaaaaaaaaaaaaaaaaaaaaaaaaaaaaaaaaaaaaaaaaaaaaaaaaaaaaaaaaaaaaaaa

SEQ ID NO: 16279 - RNA, 1785 nt, Artificial Sequence
  mRNA product Design b-4 (A100) comprising derived and/or modified sequence from LASV(LASV035-NIG-2009;Clade II)__AIT17588__GPCmut1 (opt1)
aggagagucccgcagucggcguccagcggcucugcuuguucgugugugugucguugcaggccuuauucaagcuuaccaugggccagaucaucaccuucuuccaggaggugccccacgucaucgaggaggugaugaacaucgugcugaucgcccucagccugcuggccauccucaaggggaucuacaacgucgcgaccugcggccuguucgggcugguguccuuccuccugcugugcggccgcagcugcuccacgaccuacaaggggguguacgagcuccagacccuggagcuggacauggccagccucaacaugaccaugccgcuguccugcacgaagaacaacagccaccacuacaucauggucggcaacgagaccggccuggagcucacccugaccaacacguccaucaucaaccacaaguucugcaaccugagcgacgcccacaagaagaaccucuacgaccacgcccugauguccaucaucagcaccuuccaccuguccauccccaacuucaaccaguacgaggccaugagcugcgacuucaacgggggcaagaucuccgugcaguacaaccucagccacgcguacgccguggacgccgccaaccacugcgggaccaucgcgaacggcguccugcagaccuucaugcggauggccuggggcggguccuacaucgcccuggacagcggcugcggguccugggacugcaucaugacgagcuaccaguaccucaucauccagaacaccaccugggaggaccacugccaguucucccgccccagccccaucggcuaccuggggcugcucagccagcggacccgcgacaucuacaucucccggcgccggcgcggcacguucaccuggacccugagcgacuccgagggcaacgagacccccgggggcuacugccugacgcgguggaugcucaucgaggccgagcugaagugcuucgggaacaccgccguggcgaagugcaacgagaagcacgacgaggaguucugcgacaugcugcgccucuucgacuucaacaagcaggccauccggcgccugaaggccccggcccagaugagcauccagcugaucaacaaggccgugaacgcgcucaucaacgaccagcugaucaugaagaaccaccuccgggacaucaugugcauccccuacugcaacuacuccaaguacugguaccugaaccacaccgucaccggcaagacgagccugccccgcugcuggcugguguccaacgggagcuaccucaacgagacccacuucuccgacgacaucgagcagcaggccgacaacaugaucaccgagcugcugcagaaggaguacaucgaccggcagggcaagaccccgcucggccugguggaccuguucgucuucagcacguccuucuaccucaucagcaucuuccugcaccuggugaagauccccacccaccgccacgugaucgggaagcccugccccaagccgcaccggcugaaccacaugggcaucugcuccugcgggcucuacaagcaccccggcguccccgugaaguggaagcgcugaggacuaguaauaaggaaacuguaugaaugucugugggcaggaagugaagagauccuucuguaaagguuuuuggaauuaugucugcugaauaauaaacuuuuuugaaauaauaaaucugguagaaaaaugagaucuaaaaaaaaaaaaaaaaaaaaaaaaaaaaaaaaaaaaaaaaaaaaaaaaaaaaaaaaaaaaaaaaaaaaaaaaaaaaaaaaaaaaaaaaaaaaaaaaaaaa

SEQ ID NO: 16280 - RNA, 1785 nt, Artificial Sequence
  mRNA product Design b-4 (A100) comprising derived and/or modified sequence from LASV(LASV1000-NIG-2009;Clade II)__AIT17782__GPCmut1 (opt1)
aggagagucccgcagucggcguccagcggcucugcuuguucgugugugugucguugcaggccuuauucaagcuuaccaugggccagaucaucaccuucuuccaggaggugccccacgucaucgaggaggugaugaacaucgugcugaucgcccucagccugcuggccauccucaaggggaucuacaacgucgcgaccugcggccuguucgggcugguguccuuccuccugcugugcggccgcagcugcuccacgaccuacaaggggguguacgagcuccagacccuggagcuggacauggccagccucaacaugaccaugccgcuguccugcacgaagaacaacagccaccacuacaucauggucggcaacgagaccggccuggagcucacccugaccaacacguccaucaucaaccacaaguucugcaaccugagcgacgcccacaagaagaaccucuacgaccacgcccugauguccaucaucagcaccuuccaccuguccauccccaacuucaaccaguacgaggccaugagcugcgacuucaacgggggcaagaucuccgugcaguacaaccucagccacaccuacgcgguggacgccgccaaccacugcgggaccaucgccaacggcguccugcagacguucaugcggauggcguggggcggguccuacaucgcccuggacagcggcugcggguccugggacugcaucaugaccagcuaccaguaccucaucauccagaacaccaccugggaggaccacugccaguucucccgccccagccccaucggcuaccuggggcugcucagccagcggacgcgcgacaucuacaucucccggcgccggcgcggcaccuucaccuggacccugagcgacuccgagggcaacgagacgcccgggggcuacugccugacccgguggaugcucaucgaggccgagcugaagugcuucgggaacaccgccguggccaagugcaacgagaagcacgacgaggaguucugcgacaugcugcgccucuucgacuucaacaagcaggcgaucaagcggcugaagaccccggcccagaugagcauccagcugaucaacaaggccgugaacgcccucaucaacgaccagcugaucaugaagaaccaccuccgcgacaucaugugcauccccuacugcaacuacuccaaguacugguaccugaaccacacggucaccggcaagaccagccugccccggugcuggcugguguccaacgggagcuaccucaacgagacccacuucuccgacgacaucgagcagcaggccgacaacaugaucacggagcugcugcagaaggaguacaucgaccgccagggcaagaccccgcucggccugguggaccuguucgucuucagcaccuccuucuaccucaucagcaucuuccugcaccuggugaagauccccacccaccggcacguggucgggaagcccugccccaagccgcaccgccugaaccacaugggcaucugcuccugcgggcucuacaagcaccccggcgugcccgugaaguggaagcggugaggacuaguaauaaggaaacuguaugaaugucugugggcaggaagugaagagauccuucuguaaagguuuuuggaauuaugucugcugaauaauaaacuuuuuugaaauaauaaaucugguagaaaaaugagaucuaaaaaaaaaaaaaaaaaaaaaaaaaaaaaaaaaaaaaaaaaaaaaaaaaaaaaaaaaaaaaaaaaaaaaaaaaaaaaaaaaaaaaaaaaaaaaaaaaaaa

SEQ ID NO: 16281 - RNA, 1785 nt, Artificial Sequence
  mRNA product Design b-4 (A100) comprising derived and/or modified sequence from LASV(LASV221-NIG-2010;Clade II)__AIT17624__GPCmut1 (opt1)
aggagagucccgcagucggcguccagcggcucugcuuguucgugugugugucguugcaggccuuauucaagcuuaccaugggccagaucaucaccuucuuccaggaggugccccacgucaucgaggaggugaugaacaucgugcugaucgcccucagccugcuggccauccucaaggggaucuacaacgucgcgaccugcggccuguucgggcugguguccuuccuccugcugugcggccgcagcugcuccacgaccuacaaggggguguacgagcuccagacccuggagcuggacauggccagccucaacaugaccaugccgcuguccugcacgaagaacaacagccaccacuacaucauggucggcaacgagaccggccuggagcucacccugaccaacacguccaucaucaaccacaaguucugcaaccugagcgacgcccacaagaagaaccucuacgaccacgcccugauguccaucaucagcaccuuccaccuguccauccccaacuucaaccaguacgaggccaugagcugcgacuucaacgggggcaagaucuccgugcaguacaaccucagccacaccuacgcgaucgacgccgccaaccacugcgggaccaucgccaacggcgugcugcagacguucaugcggauggcguggggcggguccuacaucgcccuggacagcggcugcggguccugggacugcaucaugaccagcuaccaguaccucaucauccagaacaccaccugggaggaccacugccaguucucccgccccagccccaucggcuaccuggggcugcucagccagcggacgcgcgacaucuacaucucccggcgccggcgcggcaccuucaccuggacccugagcgacuccgagggcaacgagacgcccgggggcuacugccugacccgguggaugcucaucgaggccgagcugaagugcuucgggaacaccgccgucgccaagugcaacgagaagcacgacgaggaguucugcgacaugcugcgccucuucgacuucaacaagcaggcgauccggcgccugaagaccccggcccagaugagcauccagcugaucaacaaggccgugaacgcccucaucaacgaccagcugaucaugaagaaccaccuccgggacaucaugugcauccccuacugcaacuacuccaaguacugguaccugaaccacacggugaccggcaagaccagccugccccgcugcuggcuggucuccaacgggagcuaccucaacgagacccacuucuccgacgacaucgagcagcaggccgacaacaugaucacggagaugcugcagaaggaguacauggaccggcagggcaagaccccgcugggccucguggaccuguucguguucagcaccuccuucuaccugaucagcaucuuccuccaccuggucaagauccccacccaccgccacgugaucgggaagcccugccccaagccgcaccggcugaaccacaugggcaucugcuccugcgggcuguacaagcaccccggcgugcccgucaaguggaagcgcugaggacuaguaauaaggaaacuguaugaaugucugugggcaggaagugaagagauccuucuguaaagguuuuuggaauuaugucugcugaauaauaaacuuuuuugaaauaauaaaucugguagaaaaaugagaucuaaaaaaaaaaaaaaaaaaaaaaaaaaaaaaaaaaaaaaaaaaaaaaaaaaaaaaaaaaaaaaaaaaaaaaaaaaaaaaaaaaaaaaaaaaaaaaaaaaaa

SEQ ID NO: 16282 - RNA, 1785 nt, Artificial Sequence
  mRNA product Design b-4 (A100) comprising derived and/or modified sequence from LASV(LASV237-NIG-2010;Clade II)__AIT17638__GPCmut1 (opt1)
aggagagucccgcagucggcguccagcggcucugcuuguucgugugugugucguugcaggccuuauucaagcuuaccaugggccagaucaucaccuucuuccaggaggugccccacgucaucgaggaggugaugaacaucgugcugaucgcccucagccugcuggccauccucaaggggaucuacaacgucgcgaccugcggccuguucgggcugguguccuuccuccugcugugcggccgcagcugcuccacgaccuacaaggggguguacgagcuccagacccuggagcuggacauggccagccucaacaugaccaugccgcuguccugcacgaagaacaacagccaccacuacaucauggucggcaacgagaccggccuggagcucacccugaccaacacguccaucaucaaccacaaguucugcaaccugagcgacgcccacaagaaggaccucuacgaccacgcccugauguccaucaucagcaccuuccaccuguccauccccaacuucaaccaguacgaggccaugagcugcgacuucaacgggggcaagaucuccgugcaguacaaccucagccacaccuacgcgguggacgccgccaaccacugcgggaccaucgccaacggcguccugcagacguucaugcggauggcguggggcggguccuacaucgcccuggacagcggcugcggguccugggacugcaucaugaccagcuaccaguaccucaucauccagaacaccaccugggaggaccacugccaguucucccgccccagccccaucggcuaccuggggcugcucagccagcggacgcgcgacaucuacaucucccggcgccggcgcggcaccuucaccuggacccugagcgacuccgagggcaacgagacgcccgggggcuacugccugacccgguggaugcucaucgaggccgagcugaagugcuucgggaacaccgccguggccaagugcaacgagaagcacgacgaggaguucugcgacaugcugcgccucuucgacuucaacaagcaggcgauccggcgccugaagaccccggcccagaugagcauccagcugaucaacaaggccgugaacgcccucaucaacgaccagcugaucaugaagaaccaccuccgggacaucaugugcauccccuacugcaacuacuccaaguacugguaccugaaccacacggucaccggcaagaccagccugccccgcugcuggcugguguccaacgggagcuaccucaacgagacccacuucuccgacgacaucgagcagcaggccgacaacaugaucacggagcugcugcagaaggaguacauggaccggcagggcaagaccccgcucggccugguggaccuguucgucuucagcaccuccuucuaccucaucagcaucuuccugcaccugaucaagauccccacccaccgccacaucacggggaagcccugccccaagccgcaccggcugaaccacaugggcaucugcuccugcgggcucuacaagcaccccggcgugcccgugaaguggaagcgcugaggacuaguaauaaggaaacuguaugaaugucugugggcaggaagugaagagauccuucuguaaagguuuuuggaauuaugucugcugaauaauaaacuuuuuugaaauaauaaaucugguagaaaaaugagaucuaaaaaaaaaaaaaaaaaaaaaaaaaaaaaaaaaaaaaaaaaaaaaaaaaaaaaaaaaaaaaaaaaaaaaaaaaaaaaaaaaaaaaaaaaaaaaaaaaaaa

SEQ ID NO: 16283 - RNA, 1785 nt, Artificial Sequence
  mRNA product Design b-4 (A100) comprising derived and/or modified sequence from LASV(LASV253-NIG-2011;Clade II)__AIT17670__GPCmut1 (opt1)
aggagagucccgcagucggcguccagcggcucugcuuguucgugugugugucguugcaggccuuauucaagcuuaccaugggccagaucaucaccuucuuccaggaggugccccacgucaucgaggaggugaugaacaucgugcugaucgcccucagccugcuggccauccucaaggggaucuacaacgucgcgaccugcggccuguucgggcugguguccuuccuccugcugugcggccgcagcugcuccacgaccuacaaggggguguacgagcuccagacccuggagcuggacauggccagccucaacaugaccaugccgcuguccugcacgaagaacaacagccaccacuacaucauggucggcaacgagaccggccuggagcucacccugaccaacacguccaucaucaaccacaaguucugcaaccugagcgacgcccacaagaagaaccucuacgaccacgcccugauguccaucaucagcaccuuccaccuguccauccccaacuucaaccaguacgaggccaugagcugcgacuucaacgggggcaagaucuccgugcaguacaaccucagccacaccuacgcgguggacgccgccaaccacugcgggaccaucgccaacggcguccugcagacguucaugcggauggcguggggcggguccuacaucgcccuggacagcggcugcggguccugggacugcaucaugaccagcuaccaguaccucaucauccagaacaccaccugggaggaccacugccaguucucccgccccagccccaucggcuaccuggggcugcucagccagcggacgcgcgacaucuacaucucccggcgccggcgcggcaccuucaccuggacccugagcgacuccgagggcaacgagacgcccgggggcuacugccugacccgguggaugcucaucgaggccgagcugaagugcuucgggaacaccgccguggccaagugcaacgagaagcacgacgaggaguucugcgacaugcugcgccucuucgacuucaacaagcaggcgauccggcgccugaaggccccggcccagaugagcauccagcugaucaacaaggccgugaacgcccucaucaacgaccagcugaucaugaagaaccaccuccgggacaucaugugcauccccuacugcaacuacuccaaguacugguaccugaaccacaccgucacgggccgcaccagccugccccggugcuggcugguguccaacgggagcuaccucaacgagacccacuucuccgacgacaucgagcagcaggcggacaacaugaucaccgagcugcugcagaaggaguacaucgaccgccagggcaagacgccgcucggccugguggaccuguucgucuucagcaccuccuucuaccucaucagcaucuuccugcaccuggugaagauccccacccaccggcacaucaucgggaagcccugccccaagccgcaccgccugaaccacaugggcaucugcuccugcgggcucuacaagcaccccggcgugcccgucaaguggaagcggugaggacuaguaauaaggaaacuguaugaaugucugugggcaggaagugaagagauccuucuguaaagguuuuuggaauuaugucugcugaauaauaaacuuuuuugaaauaauaaaucugguagaaaaaugagaucuaaaaaaaaaaaaaaaaaaaaaaaaaaaaaaaaaaaaaaaaaaaaaaaaaaaaaaaaaaaaaaaaaaaaaaaaaaaaaaaaaaaaaaaaaaaaaaaaaaaa

SEQ ID NO: 16284 - RNA, 1785 nt, Artificial Sequence
  mRNA product Design b-4 (A100) comprising derived and/or modified sequence from LASV(LASV254-NIG-2011;Clade II)__AIT17674__GPCmut1 (opt1)
aggagagucccgcagucggcguccagcggcucugcuuguucgugugugugucguugcaggccuuauucaagcuuaccaugggccagaucaucaccuucuuccaggaggugccccacgucaucgaggaggugaugaacaucgugcugaucgcccucagccugcuggccauccucaaggggaucuacaacgucgcgaccugcggccuguucgggcugguguccuuccuccugcugugcggccgcagcugcuccacgaccuacaaggggguguacgagcuccagacccuggagcuggacaugaccaaccucaacaugacgaugccgcugagcugcaccaagaacaacucccaccacuacaucauggucggcaacgagaccggccuggagcucacccugacgaacaccagcaucaucaaccacaaguucugcaaccuguccgacgcccacaagaagaaccucuacaaccacgcccugaugagcaucaucuccaccuuccaccugagcauccccaacuucaaccaguacgaggccauguccugcgacuucaacgggggcaagaucagcgugcaguacaaccucucccacagcuacgccguggacgcggccaaccacugcgggaccaucgccaacggcguccugcagacguucaugcggauggccuggggcggguccuacaucgcgcuggacagcggcugcgggaacugggacugcaucaugaccuccuaccaguaccucaucauccagaacaccaccugggaggaccacugccaguucagccgccccucccccaucggcuaccuggggcugcucagccagcggacgcgcgacaucuacaucagccggcgccggcgcggcaccuucaccuggacccuguccgacagcgagggcaacgagacgcccgggggcuacugccugacccgguggaugcucaucgaggccgagcugaagugcuucgggaacaccgccguggccaagugcaacgagaagcacgacgaggaguucugcgacaugcugcgccucuucgacuucaacaagcaggccauccggcgccugaagaccccggcgcaggccaacauccagcugaucaacaaggccgugaacgcccucaucaacgaccagcugaucaugaagaaccaccuccgggacaucaugugcauccccuacugcaacuacuccaaguacugguaccugaaccacacggucaccggcaagaccagccugccccgcugcuggcugguguccaacgggagcuaccucaacgagacccacuucuccgacgacaucgagcagcaggccgacaacaugaucacggagcugcugcagaaggaguacauggaccggcagggcaagaccccgcucggccugguggaccuguucgucuucagcaccuccuucuaccucaucagcaucuuccugcaccuggugaagauccccacccaccgccacgugaucgggaagcccugccccaagccgcaccggcugaaccacaugggcaucugcuccugcgggcucuacaagcaccccggcguccccgugaaguggaagcgcugaggacuaguaauaaggaaacuguaugaaugucugugggcaggaagugaagagauccuucuguaaagguuuuuggaauuaugucugcugaauaauaaacuuuuuugaaauaauaaaucugguagaaaaaugagaucuaaaaaaaaaaaaaaaaaaaaaaaaaaaaaaaaaaaaaaaaaaaaaaaaaaaaaaaaaaaaaaaaaaaaaaaaaaaaaaaaaaaaaaaaaaaaaaaaaaaa

SEQ ID NO: 16285 - RNA, 1785 nt, Artificial Sequence
  mRNA product Design b-4 (A100) comprising derived and/or modified sequence from LASV(Nig08-A19;Clade III)__ADU56618__GPCmut1 (opt1)
aggagagucccgcagucggcguccagcggcucugcuuguucgugugugugucguugcaggccuuauucaagcuuaccaugggccagaucgugaccuucuuccaggaggucccccacgugaucgaggaggugaugaacaucguccugaucgcccucagcauccuggccauccugaaggggcucuacaacaucgcgaccugcggccugaucgggcuggugacguuccuccugcuguccggccgcagcugcuccaugaccuacaaggggguguacgagcuccagacccuggagcugaacaugaacacccucaacaugacgaugccgcugagcugcaccaagaacaacucccaccacuacaucauggucggcaacgagaccggccuggagcucacccugacgaacaccagccugcuccaccacaaguucugcaaccuguccgacgcccacaagaagaaccuguacgaccacacccucaugagcaucaucuccaccuuccaccugagcauccccaacuucaaccaguacgaggccauguccugcgacuucaacgggggcaagaucacggugcaguacaaccugagccacuccuacgccaucgacgccgcgaaccacugcgggaccguggccaacggcguccuccagaccuucaugcggauggccuggggcgggagcuacaucgcccuggacuccggcugcgggaagugggacugcaucaugaccagcuaccaguaccugaucauccagaacacgaccugggaggaccacugccaguucucccgccccagccccaucggcuaccucgggcugcugucccagcggacccgcgacaucuacaucagccggcgccggcgcggcaccuucacguggacccucagcgacuccgagggcaacgagacccccgggggcuacugccugacccgguggaugcugaucgaggcggagcucaagugcuucgggaacacggccguggccaagugcaacgagaagcacgacgaggaguucugcgacaugcugcgccuguucgacuucaacaagcaggccauccggcgccucaaggccccggcgcagaugagcauccagcugaucaacaaggccgugaacgcccugaucaacgaccagcucaucaugaagaaccaccuccgggacaucaugugcauccccuacugcaacuacuccaaguacugguaccugaaccacaccagcaccggccgcaccucccugccccggugcuggcuggucagcaacggguccuaccugaacgagacgcacuucagcgacgacaucgagcagcaggccgacaacaugaucaccgagaugcuccagaaggaguaccuggaccgccagggcaagaccccgcugggccucguggaccuguucguguucuccaccagcuucuaccugaucuccaucuuccugcaccucgucaagauccccacgcaccggcacaucguggggaagcccugccccaagccgcaccgccugaaccacaugggcaucugcagcugcgggcuguacaagcagcccggcgugcccguccgguggaagcgcugaggacuaguaauaaggaaacuguaugaaugucugugggcaggaagugaagagauccuucuguaaagguuuuuggaauuaugucugcugaauaauaaacuuuuuugaaauaauaaaucugguagaaaaaugagaucuaaaaaaaaaaaaaaaaaaaaaaaaaaaaaaaaaaaaaaaaaaaaaaaaaaaaaaaaaaaaaaaaaaaaaaaaaaaaaaaaaaaaaaaaaaaaaaaaaaaa

SEQ ID NO: 16286 - RNA, 1788 nt, Artificial Sequence
  mRNA product Design b-4 (A100) comprising derived and/or modified sequence from LASV(G1180-SLE-2010;Clade IV)__AIT17168__GPCmut1 (opt1)
aggagagucccgcagucggcguccagcggcucugcuuguucgugugugugucguugcaggccuuauucaagcuuaccaugggccagaucgugaccuucuuccaggaggucccccacgugaucgaggaggugaugaacaucguccugaucgcccucagcauccuggccgugcugaaggggcucuacaacuucgcgaccugcggccugguggggcugcucacguuccugcugcucugcggccgcuccugcaccgccagccgguacaagggggucuacgagcugcagacccuggagcucaacauggagacccugaacaugacgaugccgcuguccugcaccaagaacaacagccaccacuacaucauggugggcaacgagaccggccucgagcugacccugacgaacaccuccaucaucaaccacaaguucugcaaccucagcgacgcccacaagaagaaccuguacgaccacgcccugauguccaucaucagcaccuuccaccucuccauccccaacuucaaccaguacgaggccaugagcugcgacuucaacgggggcaagaucuccgugcaguacaaccugagccacuccuacgcgggggacgccgccaaccacugcggcaccgucgccaacggggugcugcagacguucaugcgcauggcguggggcggcagcuacaucgcccucgacuccgggugcggcagcugggacugcaucaugaccuccuaccaguaccugaucauccagaacaccaccugggaggaccacugccaguucagccggcccucccccaucggguaccugggccuccugagccagcgcacgcgggacaucuacaucagccgccggcgccggggcaccuucaccuggacccuguccgacagcgaggggaaggacacgccgggcggguacugccucacccgcuggaugcugaucgaggccgagcugaagugcuucggcaacaccgccguggccaagugcaacgagaagcacgacgaggaguucugcgacaugcuccggcuguucgacuucaacaagcaggcgauccagcgccugaaggcccccgcccagauguccauccagcucaucaacaaggccgucaacgcccugaucaacgaccagcugaucaugaagaaccaccuccgggacaucaugugcauccccuacugcaacuacagcaaguacugguaccugaaccacaccacgaccgggaagaccucccugcccaagugcuggcucgugagcaacggcuccuaccugaacgagacccacuucagcgacgacaucgagcagcaggcggacaacaugaucacggagaugcugcagaaggaguacauggagcgccagggcaagaccccgcucgggcugguggaccuguucgucuucuccaccagcuucuaccucaucuccaucuuccugcaccuggugaagauccccacccaccggcacaucgugggcaagagcugccccaagccccaccgccugaaccacauggggaucugcuccugcggccucuacaagcagccggggguccccgugaaguggaagcggugaggacuaguaauaaggaaacuguaugaaugucugugggcaggaagugaagagauccuucuguaaagguuuuuggaauuaugucugcugaauaauaaacuuuuuugaaauaauaaaucugguagaaaaaugagaucuaaaaaaaaaaaaaaaaaaaaaaaaaaaaaaaaaaaaaaaaaaaaaaaaaaaaaaaaaaaaaaaaaaaaaaaaaaaaaaaaaaaaaaaaaaaaaaaaaaaa

SEQ ID NO: 16287 - RNA, 1788 nt, Artificial Sequence
  mRNA product Design b-4 (A100) comprising derived and/or modified sequence from LASV(G1442-SLE-2011;Clade IV)__AIT17180__GPCmut1 (opt1)
aggagagucccgcagucggcguccagcggcucugcuuguucgugugugugucguugcaggccuuauucaagcuuaccaugggccagaucgugaccuucuuccaggaggucccccacgugaucgaggaggugaugaacaucguccugaucgcccucagcauccuggccgugcugaaggggcucuacaacguggcgaccugcggccugaucgggcuggucacguuccuccugcugugcggccgcuccugcaccaccacccucuacaaggggguguacgagcugcagacgcuggagcucaacauggagacccugaacaugaccaugccgcugagcugcaccaagaacaacucccaccacuacauccgggugggcaacgagacgggccucgagcugacccugaccaacaccagcaucaucaaccacaaguucugcaaccucuccgacgcccacaagaagaaccuguacgaccacgcccugaugagcaucaucuccacguuccaccucagcauccccaacuucaaccaguacgaggccauguccugcgacuucaacgggggcaagaucagcguccaguacaaccugucccacagcuacgccggggacgcggccaaccacugcggcaccguggccaacggggugcugcagaccuucaugcgcauggccuggggcggcuccuacaucgcgcucgacagcgggugcggcaacugggacugcaucaugaccuccuaccaguaccugaucauccagaacacgaccugggacgaccacugccaguucagccggcccucccccaucggguaccugggccuccugagccagcgcacccgggacgucuacaucucccgccggcgccggggcaccuucacguggacccugagcgacagcgaggggaaggacaccccgggcggguacugccucacccgcuggaugcugaucgaggccgagcugaagugcuucggcaacacggccguggccaagugcaacgagaagcacgacgaggaguucugcgacaugcuccggcuguucgacuucaacaagcaggccauccagcgccugaaggcgcccgcccagauguccauccagcucaucaacaaggccgugaacgcccugaucaacgaccagcugaucaugaagaaccaccuccgggacaucaugugcauccccuacugcaacuacagcaaguacugguaccugaacaacaccgccaccgggaagaccucccugcccaagugcuggcucaucagcaacggcuccuaccugaacgagacgcacuucagcgacgacaucgagcaggaggcggacaacaugaucaccgagaugcugcagaaggaguacauggagcgccagggcaagaccccgcucgggcuggucgaccuguucguguucuccaccagcuucuaccucaucuccaucuuccugcaccuggugaagauccccacgcaccggcacaucgucggcaagagcugccccaagccccaccgccugaaccacauggggaucugcuccugcggccucuacaagcagccgggggugcccgugcgguggaagcgcugaggacuaguaauaaggaaacuguaugaaugucugugggcaggaagugaagagauccuucuguaaagguuuuuggaauuaugucugcugaauaauaaacuuuuuugaaauaauaaaucugguagaaaaaugagaucuaaaaaaaaaaaaaaaaaaaaaaaaaaaaaaaaaaaaaaaaaaaaaaaaaaaaaaaaaaaaaaaaaaaaaaaaaaaaaaaaaaaaaaaaaaaaaaaaaaaa

SEQ ID NO: 16288 - RNA, 1788 nt, Artificial Sequence
  mRNA product Design b-4 (A100) comprising derived and/or modified sequence from LASV(G3010-SLE-2013;Clade IV)__AIT17344__GPCmut1 (opt1)
aggagagucccgcagucggcguccagcggcucugcuuguucgugugugugucguugcaggccuuauucaagcuuaccaugggccagaucgugaccuucuuccaggaggucccccacgugaucgaggaggugaugaacaucguccugaucgcccucagcauccuggccgugcugaaggggcucuacaacuucgcgaccugcggccugguggggcuggucacguuccuccugcugugcggccgcuccugcaccaccagccucuacaaggggguguacgagcugcagacccuggagcucaacauggagacgcugaacaugaccaugccgcuguccugcaccaagaacaacagccaccacuacaucauggugggcaacgagaccggccucgagcugacgcugaccaacaccuccaucaucaaccacaaguucugcaaccucagcgacgcccacaagaagaaccuguacaaccacgcccugauguccaucaucagcaccuuccaccucuccauccccaacuucaaccaguacgaggccaugagcugcgacuucaacgggggcaagaucuccguccaguacaaccugagccacuccuacgccggggacgcggccagccacugcggcacgguggccaacggggugcugcagaccuucaugcggauggccuggggcggcuccuacaucgcgcucgacagcgggugcggcaagugggacugcaucaugaccuccuaccaguaccugaucauccagaacaccacgugggaggaccacugccaguucagccgccccucccccaucggguaccugggccuccugagccagcggacccgcgacaucuacaucagccggcgccggcgcggcaccuucaccuggacgcuguccgacagcgaggggaaggacaccccgggcggguacugccucacccgguggaugcugaucgaggccgagcugaagugcuucggcaacaccgccgucgccaagugcaacgagaagcacgacgaggaguucugcgacaugcuccgccuguucgacuucaacaagcaggccauccagcggcugaagacgcccgcgcagauguccauccagcucaucaacaaggccgugaacgcccugaucaacgaccagcugaucaugaagaaccaccuccgcgacaucaugugcauccccuacugcaacuacagcaaguacugguaccugaaccacaccaccaccgggaagacgucccugcccaagugcuggcucgugagcaacggcuccuaccugaacgagacccacuucagcgacgacaucgagcagcaggccgacaacaugaucaccgagaugcugcagaaggaguacauggagcggcagggcaagaccccgcucgggcuggucgaccuguucguguucuccacgagcuucuaccucaucuccaucuuccugcaccuggugaagauccccacccaccgccacaucgucggcaagagcugccccaagccccaccggcugaaccacauggggaucugcuccugcggccucuacaagcagccgggggugcccgugcgcuggaagcggugaggacuaguaauaaggaaacuguaugaaugucugugggcaggaagugaagagauccuucuguaaagguuuuuggaauuaugucugcugaauaauaaacuuuuuugaaauaauaaaucugguagaaaaaugagaucuaaaaaaaaaaaaaaaaaaaaaaaaaaaaaaaaaaaaaaaaaaaaaaaaaaaaaaaaaaaaaaaaaaaaaaaaaaaaaaaaaaaaaaaaaaaaaaaaaaaa

SEQ ID NO: 16289 - RNA, 1788 nt, Artificial Sequence
  mRNA product Design b-4 (A100) comprising derived and/or modified sequence from LASV(G502-SLE-2009;Clade IV)__AIT17126__GPCmut1 (opt1)
aggagagucccgcagucggcguccagcggcucugcuuguucgugugugugucguugcaggccuuauucaagcuuaccaugggccagaucgugaccuucuuccaggaggucccccacgugaucgaggaggugaugaacaucguccugaucgcccucagcauccuggccgugcugaaggggcucuacaacuucgcgaccugcggccugguggggcugcucacguuccugcugcucugcggccgcuccugcaccaccgggcuguacaagggcgucuacgagcugcagacccucgagcugaacauggagacgcugaacaugaccaugccgcucagcugcaccaagaacaacucccaccacuacaucauggugggcaacgagaccgggcuggagcugacgcucaccaacaccagcaucaucaaccacaaguucugcaaccuguccgacgcccacaagaagaaccuguacgaccacgcccucaugagcaucaucuccaccuuccaccugagcauccccaacuucaaccaguacgaggccauguccugcgacuucaacggcgggaagaucagcgugcaguacaaccugucccacagcuacgccggcgacgcggccgaccacugcgggacggucgccaacggcgugcuccagaccuucaugcggauggccuggggcggguccuacaucgcgcuggacagcggcugcgggcgcugggacugcaucaugaccuccuaccaguaccugaucauccagaacaccacgugggaggaccacugccaguucagccggcccucccccaucggcuaccucggccugcugagccagcgcacccgggacaucuacaucucccgccggcgccgggggaccuucaccuggacgcucagcgacagcgagggcaaggacacccccgggggcuacugccugacccgcuggaugcugaucgaggccgagcucaagugcuucgggaacaccgccguggccaagugcaacgagaagcacgacgaggaguucugcgacaugcugcggcuguucgacuucaacaagcaggccauccagcgccucaaggcgccggcccagauguccauccagcugaucaacaaggccgucaacgcccugaucaacgaccagcucgugaugaagaaccaccuccgggacaucaugugcauccccuacugcaacuacagccgcuacugguaccugaaccacacgaccaccggccggaccucccugcccaagugcuggcuggugagcaacggcuccuaccugaacgagacgcacuucagcgacgacaucgagcagcaggccgacaacaugaucaccgagaugcuccagaaggaguacauggagcgccaggggaagaccccgcugggccuggucgaccucuucguguucuccaccagcuucuaccugaucuccaucuuccugcaccuggugaagauccccacgcaccggcacaucgucggcaagagcugccccaagccccaccgccucaaccacauggggaucugcuccugcgggcuguacaagcagccgggcgugcccgugaaguggaagcggugaggacuaguaauaaggaaacuguaugaaugucugugggcaggaagugaagagauccuucuguaaagguuuuuggaauuaugucugcugaauaauaaacuuuuuugaaauaauaaaucugguagaaaaaugagaucuaaaaaaaaaaaaaaaaaaaaaaaaaaaaaaaaaaaaaaaaaaaaaaaaaaaaaaaaaaaaaaaaaaaaaaaaaaaaaaaaaaaaaaaaaaaaaaaaaaaa

SEQ ID NO: 16290 - RNA, 1788 nt, Artificial Sequence
  mRNA product Design b-4 (A100) comprising derived and/or modified sequence from LASV(G733-SLE-2010;Clade IV)__AIT17154__GPCmut1 (opt1)
aggagagucccgcagucggcguccagcggcucugcuuguucgugugugugucguugcaggccuuauucaagcuuaccaugggccagaucgugaccuucuuccaggaggucccccacgugaucgaggaggugaugaacaucguccugaucgcccucagcauccuggccgugcugaaggggcucuacaacuucgcgaccugcggcaucguggggcuggucuccuuccugcuccugugcggccgcagcugcacgaccucccuguacaaggggguguacgagcuccagacccuggagcugaacauggagacccucaacaugacgaugccgcugagcugcaccaagaacaacucccaccacuacaucauggugggcaacgagaccggccuggagcucacccugacgaacaccagcaucaucaaccacaaguucugcaaccuguccgacgcccacaagaagaaccucuacgaccacgcccugaugagcaucaucuccaccuuccaccugagcauccccaacuucaaccaguacgaggccauguccugcgacuucaacgggggcaagaucagcguccaguacaaccucucccacagcuacgccggggacgcggccaaccacugcggcaccaucgccaacggggugcugcagacguucaugcggauggccuggggcggcuccuacaucgcgcuggacagcgggugcgaccgcugggacugcaucaugaccuccuaccaguaccucaucauccagaacaccaccugggaggaccacugccaguucagccggcccucccccaucggcuaccuggggcugcucagccagcgcacgcgggacaucuacaucagccgccggcgccggggcaccuucaccuggacccuguccgacagcgagggcaaggacacgcccgggggcuacugccugacccgcuggaugcucaucgaggccgagcugaagugcuucgggaacaccgccguggccaagugcaacgagaagcacgacgaggaguucugcgacaugcugcggcuguucgacuucaacaagcaggccauccagcgccugaaggcgccggcccagauguccauccagcugaucaacaaggccgucaacgcccucaucaacgaccagcugaucaugaagaaccaccuccgggacaucaugugcauccccuacugcaacuacagcaaguacugguaccucaaccacaccacgaccggcaagaccucccugcccaagugcuggcuggugagcaacggguccuaccucaacgagacccacuucagcgacgacaucgagcagcaggccgacaacaugaucacggagaugcugcagaaggaguacauggagcgccagggcaagaccccgcugggccucguggaccuguucgucuucuccaccagcuucuaccugaucuccaucuuccuccaccuggugaagauccccacccaccggcacguggucggcaagagcugccccaagccccaccgccugaaccacauggggaucugcuccugcgggcuguacggccagccgggggugcccgugaaguggaagcggugaggacuaguaauaaggaaacuguaugaaugucugugggcaggaagugaagagauccuucuguaaagguuuuuggaauuaugucugcugaauaauaaacuuuuuugaaauaauaaaucugguagaaaaaugagaucuaaaaaaaaaaaaaaaaaaaaaaaaaaaaaaaaaaaaaaaaaaaaaaaaaaaaaaaaaaaaaaaaaaaaaaaaaaaaaaaaaaaaaaaaaaaaaaaaaaaa

SEQ ID NO: 16291 - RNA, 1788 nt, Artificial Sequence
  mRNA product Design b-4 (A100) comprising derived and/or modified sequence from MOPV/LASV reassortant(IGS-1;Clade IV)__AFY05576__GPCmut1 (opt1)
aggagagucccgcagucggcguccagcggcucugcuuguucgugugugugucguugcaggccuuauucaagcuuaccaugggccagaucgugaccuucuuccaggaggucccccacgugaucgaggaggugaugaacaucguccugaucgcccucagcgugcuggccgugcugaaggggcucuacaacuucgcgaccugcggccuggucgggcuggugacguuccuccugcugugcggccgcuccugcaccaccagccucuacaaggggguguacgagcugcagacccuggagcucaacauggagacgcugaacaugaccaugccgcuguccugcaccaagaacaacagccaccacuacaucauggucggcaacgagaccggccucgagcugacgcugaccaacaccuccaucaucaaccacaaguucugcaaccucagcgacgcccacaagaagaaccuguacgaccacgcccugauguccaucaucagcaccuuccaccucuccauccccaacuucaaccaguacgaggccaugagcugcgacuucaacgggggcaagaucuccgugcaguacaaccugagccacuccuacgccggggacgcggccaaccacugcggcacgguggccaacgggguccugcagaccuucaugcggauggccuggggcggcagcuacaucgcgcucgacuccgggugcggcaacugggacugcaucaugaccagcuaccaguaccugaucauccagaacaccacgugggaggaccacugccaguucucccgccccagccccaucggguaccugggccuccugucccagcggacccgcgacaucuacaucagccggcgccggcgcggcaccuucaccuggacgcugagcgacuccgagggggaggacaccccgggcggguacugccucacccgguggaugcugaucgaggccgagcugaagugcuucggcaacaccgccguggccaagugcaacgagaagcacgacgaggaguucugcgacaugcuccgccuguucgacuucaacaagcaggccauccagcggcugaaggcgcccgcccagaugagcauccagcucaucaacaaggccgugaacgcccugaucaacgaccagcugaucaugaagaaccaccuccgcgacaucaugugcauccccuacugcaacuacuccaaguacugguaccugaaccacacgaccaccgggcggaccagccugcccaagugcuggcucgucuccaacggcagcuaccugaacgagacgcacuucuccgacgacaucgagcagcaggccgacaacaugaucaccgagaugcugcagaaggaguacauggagcgccagggcaagaccccgcucgggcugguggaccuguucguguucagcaccuccuucuaccucaucagcaucuuccugcaccuggucaagauccccacgcaccggcacaucgugggcaaguccugccccaagccccaccgccugaaccacauggggaucugcagcugcggccucuacaagcagccgggggugcccgucaaguggaagcggugaggacuaguaauaaggaaacuguaugaaugucugugggcaggaagugaagagauccuucuguaaagguuuuuggaauuaugucugcugaauaauaaacuuuuuugaaauaauaaaucugguagaaaaaugagaucuaaaaaaaaaaaaaaaaaaaaaaaaaaaaaaaaaaaaaaaaaaaaaaaaaaaaaaaaaaaaaaaaaaaaaaaaaaaaaaaaaaaaaaaaaaaaaaaaaaaa

SEQ ID NO: 16292 - RNA, 1788 nt, Artificial Sequence
  mRNA product Design b-4 (A100) comprising derived and/or modified sequence from LASV(LM765-SLE-2012;Clade IV)__AIT17814__GPCmut1 (opt1)
aggagagucccgcagucggcguccagcggcucugcuuguucgugugugugucguugcaggccuuauucaagcuuaccaugggccagaucgugaccuucuuccaggaggucccccacgugaucgaggaggugaugaacaucguccugaucgcccucagcauccuggccgugcugaaggggcucuacaacuucgcgaccugcggccugguggggcuggucacguuccuccugcugugcggccgcuccugcaccaccagccucuacaaggggguguacgagcugcagacccuggagcucaacauggagacgcugaacaugaccaugccgcuguccugcaccaagaacaacagccaccacuacaucauggugggcaacgagaccggccucgagcugacgcugaccaacaccuccaucaucgaccacaaguucugcaaccucagcgacgcccaccggaagaaccuguacgaccacgcccugauguccaucaucagcaccuuccaccucuccauccccaacuucaaccaguacgaggccaugagcugcgacuucaacgggggcaagaucuccguccaguacaaccugagccacuccuacgccaaggacgcggccgaccacugcgggacgguggccaacggcgugcugcagaccuucaugcgcauggccuggggcgggagcuacaucgcgcucgacuccggcugcgggcggugggacugcaucaugaccagcuaccaguaccugaucauccagaacaccacgugggaggaccacugccaguucucccgccccagccccaucggcuaccuggggcuccugucccagcggacccgcgacaucuacaucagccggcgccggcgcggcaccuucaccuggacgcugagcgacuccgagggcaaggacacccccgggggcuacugccucacccgguggaugcugaucgaggccgagcugaagugcuucgggaacaccgccgucgccaagugcaacgagaagcacgacgaggaguucugcgacaugcuccgccuguucgacuucaacaagcaggccauccagcggcugaaggcgccggcccagaugagcauccagcucaucaacaaggccgugaacgcccugaucaacgaccagcugaucaugaagaaccaccuccgcgacaucaugugcauccccuacugcaacuacuccaaguacugguaccugaaccacacgaccaccggcaagaccagccugcccaagugcuggcucguguccaacgggagcuaccugaacgagacgcacuucuccgacgacaucgagcagcaggccgacaacaugaucaccgagaugcugcagaaggaguacauggagcggcagggcaagaccccgcucggccuggucgaccuguucguguucagcaccuccuucuaccucaucagcaucuuccugcaccuggugaagauccccacgcaccgccacaucgucgggaagcccugccccaagccgcaccggcugaaccacaugggcaucugcuccugcgggcucuacaagcagcccggcgugcccgugaaguggaagcgcugaggacuaguaauaaggaaacuguaugaaugucugugggcaggaagugaagagauccuucuguaaagguuuuuggaauuaugucugcugaauaauaaacuuuuuugaaauaauaaaucugguagaaaaaugagaucuaaaaaaaaaaaaaaaaaaaaaaaaaaaaaaaaaaaaaaaaaaaaaaaaaaaaaaaaaaaaaaaaaaaaaaaaaaaaaaaaaaaaaaaaaaaaaaaaaaaa

SEQ ID NO: 16293 - RNA, 1788 nt, Artificial Sequence
  mRNA product Design b-4 (A100) comprising derived and/or modified sequence from LASV(LM776-SLE-2012;Clade IV)__AIT17824__GPCmut1 (opt1)
aggagagucccgcagucggcguccagcggcucugcuuguucgugugugugucguugcaggccuuauucaagcuuaccaugggccagaucgugaccuucuuccaggaggucccccacgugaucgaggaggugaugaacaucguccugaucgcccucagcauccuggccgugcugaaggggcucuacaacuucgcgaccugcggccugguggggcuggucacguuccuccugcugugcggccgcuccugcaccaccagcguguacaaggggguguacgagcuccagacccuggagcugaacauggagacgcucaacaugaccaugccgcuguccugcaccaagaacaacagccaccacuacaucauggucggcaacgagaccggccuggagcucacgcugaccaacaccuccaucaucaaccacaaguucugcaaccugagcgacgcccacaagaagaaccucuacgaccacgcccugauguccaucaucagcaccuuccaccuguccauccccaacuucaaccaguacgaggccaugagcugcgacuucaacgggggcaagaucuccgugcaguacaaccucagccacuccuacgccggggacgcggccaaccacugcggcacgguggccaacgggguccugcagaccuucaugcggauggccuggggcggcagcuacaucgcgcuggacuccgggugcggcaagugggacugcaucaugaccagcuaccaguaccucaucauccagaacaccacgugggaggaccacugccaguucucccgccccagccccaucggguaccugggccugcucucccagcggacccgcgacaucuacaucagccggcgccggcgcggcaccuucaccuggacgcugagcgacuccgaggggaaggacaccccgggcggguacugccugacccgguggaugcucaucgaggccgagcugaagugcuucggcaacaccgccguggccaagugcaacgagaagcacgacgaggaguucugcgacaugcugcgccucuucgacuucaacaagcaggccauccagcggcugaaggcgcccgcccagaugagcauccagcugaucaacaaggccgugaacgcccucaucaacgaccagcugaucaugaagaaccaccuccgcgacaucaugugcauccccuacugcaacuacuccaaguacugguaccugaaccacacgaccaccgggaagaccagccugcccaagugcuggcuggucuccaacggcagcuaccucaacgagacgcacuucuccgacgacaucgagcagcaggccgacaacaugaucaccgagaugcugcagaaggaguacauggagcggcagggcaagaccccgcuggggcucguggaccuguucguguucagcaccuccuucuaccugaucagcaucuuccuccaccuggucaagauccccacgcaccgccacaucgugggcaaguccugccccaagccccaccggcugaaccacauggggaucugcagcugcggccuguacaagcagccgggggugcccguccgcuggaagcggugaggacuaguaauaaggaaacuguaugaaugucugugggcaggaagugaagagauccuucuguaaagguuuuuggaauuaugucugcugaauaauaaacuuuuuugaaauaauaaaucugguagaaaaaugagaucuaaaaaaaaaaaaaaaaaaaaaaaaaaaaaaaaaaaaaaaaaaaaaaaaaaaaaaaaaaaaaaaaaaaaaaaaaaaaaaaaaaaaaaaaaaaaaaaaaaaa

SEQ ID NO: 16294 - RNA, 1788 nt, Artificial Sequence
  mRNA product Design b-4 (A100) comprising derived and/or modified sequence from LASV(Mad39;Clade IV)__ANH09722__GPCmut1 (opt1)
aggagagucccgcagucggcguccagcggcucugcuuguucgugugugugucguugcaggccuuauucaagcuuaccaugggccagaucgugaccuucuuccaggaggucccccacgugaucgaggaggugaugaacaucguccugaucgcccucagcauccuggccgugcugaaggggcucuacaacguggcgaccugcggccugaucgggcuggucacguuccuccugcugugcggccgcuccugcaccaccacccucuacaaggggguguacgagcugcaggcccuggagcucaacauggagacgcugaacaugaccaugccgcugagcugcaccaagaacaacucccaccacuacauccgggugggcaacgagaccggccucgagcugacgcugaccaacaccagccucaucaaccacaaguucugcaaccuguccgacgcccacaagaagaaccuguacgaccacgcccucaugagcaucaucuccaccuuccaccugagcauccccaacuucaaccaguacgaggccauguccugcgacuucaacgacgggaagaucagcguccaguacaaccugucccacacguacgcgggcgacaccgccaaccacugcgggaccguggccaacggcgugcuccagaccuucaugcgcauggccuggggcgggagcuacaucgcgcuggacuccggcugcgggggcugggacugcaucaugacgagcuaccaguaccugaucauccagaacaccaccugggaggaccacugccaguucucccggcccagccccaucggguaccucggccugcugucccagcgcacccgggacaucuacaucagccgccggcgccggggcacguucaccuggacccucuccgacagcgaggggaaggacaccccgggcggguacugccugacgcgcuggaugcugaucgaggccgagcucaagugcuucggcaacaccgccgucgccaagugcaacgagaagcacgacgaggaguucugcgacaugcugcggcuguucgacuucaacaagcaggccauccagcgccucaaggcgcccgcccagaugagcauccagcugaucaacaaggccgugaacgcccugaucaacgaccagcucaucaugaagaaccaccuccgggacaucaugugcauccccuacugcaacuacuccaaguacugguaccugaaccacaccgugaccgggaagacgagccugcccaagugcuggcuggucuccaacggcagcuaccugaacgagacccacuucuccgacgacaucgagcagcaggccgacaacaugaucaccgagaugcuccagaaggaguacauggagcgccagggcaagaccccgcuggggcugguggaccucuucguguucagcacguccuucuaccugaucagcaucuuccugcaccuggucaagauccccacccaccggcacguggugggcaagcccugccccaagccgcaccgccucaaccacauggggaucugcuccugcggcuucuacaagcagcccgggguccccgugcgguggaagcgcugaggacuaguaauaaggaaacuguaugaaugucugugggcaggaagugaagagauccuucuguaaagguuuuuggaauuaugucugcugaauaauaaacuuuuuugaaauaauaaaucugguagaaaaaugagaucuaaaaaaaaaaaaaaaaaaaaaaaaaaaaaaaaaaaaaaaaaaaaaaaaaaaaaaaaaaaaaaaaaaaaaaaaaaaaaaaaaaaaaaaaaaaaaaaaaaaa

SEQ ID NO: 16295 - RNA, 1788 nt, Artificial Sequence
  mRNA product Design b-4 (A100) comprising derived and/or modified sequence from LASV(Z0947-SLE-2011;Clade IV)__AIT17840__GPCmut1 (opt1)
aggagagucccgcagucggcguccagcggcucugcuuguucgugugugugucguugcaggccuuauucaagcuuaccaugggccagaucgugaccuucuuccaggaggucccccacgugaucgaggaggugaugaacaucguccugaucgcccucagcauccuggccgugcugaaggggcucuacaacuucgcgaccugcggccugguggggcuggucacguuccuccugcugugcggccgcuccugcaccaucagccucuacaaggggguguacgagcugcagacccuggagcucaacauggagacccugaacaugacgaugccgcuguccugcaccaagaacaacagccaccacuacaucauggugggcaacgagaccggccucgagcugacccugacgaacaccuccaucaucaaccacaaguucugcaaccucagcgacgcccacaagaagaaccuguacgaccacgcccugauguccaucaucagcaccuuccaccucuccauccccaacuucaaccaguacgaggccaugagcugcgacuucaacgggggcaagaucuccguccaguacaaccugagccacuccuacgccggggacgcggccaaccacugcggcaccguggccaacggggugcugcagacguucaugcggauggccuggggcggcagcuacaucgcgcucgacuccgggugcgaccgcugggacugcaucaugaccagcuaccaguaccugaucauccagaacaccaccugggaggaccacugccaguucucccggcccagccccaucggcuaccuggggcuccugucccagcgcacgcgggacaucuacaucagccgccggcgccggggcaccuucaccuggacccugagcgacuccgagggcaaggacacgcccgggggcuacugccucacccgcuggaugcugaucgaggccgagcugaagugcuucgggaacaccgccgucgccaagugcaacgagaagcacgacgaggaguucugcgacaugcuccggcuguucgacuucaacaagcaggccauccagcgccugaaggcgccggcccagaugagcauccagcucaucaacaaggccgugaacgcccugaucaacgaccagcugaucaugaagaaccaccuccgggacaucaugugcauccccuacugcaacuacuccaaguacugguaccugaaccacaccacgaccggcaagaccagccugcccaagugcuggcucguguccaacgggagcuaccugaacgagacccacuucuccgacgacaucgagcagcaggccgacaacaugaucacggagaugcugcagaaggaguacauggagcgccagggcaagaccccgcucggccuggucgaccuguucguguucagcaccuccuucuaccucaucagcaucuuccugcaccuggugaagauccccacccaccggcacaucgucgggaagcccugccccaagccgcaccgccugaaccacaugggcaucugcuccugcgggcucuacaagcagcccggcgugcccgugaaguggaagcggugaggacuaguaauaaggaaacuguaugaaugucugugggcaggaagugaagagauccuucuguaaagguuuuuggaauuaugucugcugaauaauaaacuuuuuugaaauaauaaaucugguagaaaaaugagaucuaaaaaaaaaaaaaaaaaaaaaaaaaaaaaaaaaaaaaaaaaaaaaaaaaaaaaaaaaaaaaaaaaaaaaaaaaaaaaaaaaaaaaaaaaaaaaaaaaaaa

SEQ ID NO: 16296 - RNA, 1788 nt, Artificial Sequence
  mRNA product Design b-4 (A100) comprising derived and/or modified sequence from LASV(Josiah;Clade IV)__NP_694870__GPCmut1 (opt4)
aggagagucccgcagucggcguccagcggcucugcuuguucgugugugugucguugcaggccuuauucaagcuuaccaugggccagaucgugaccuucuuccaggaggugccccacgugaucgaggaggugaugaacaucgugcugaucgcccugagcgugcuggccgugcugaagggccuguacaacuucgccaccugcggccuggugggccuggugaccuuccugcugcugugcggcagaagcugcaccaccagccuguacaagggcguguacgagcugcagacccuggagcugaacauggagacccugaacaugaccaugccccugagcugcaccaagaacaacagccaccacuacaucauggugggcaacgagaccggccuggagcugacccugaccaacaccagcaucaucaaccacaaguucugcaaccugagcgacgcccacaagaagaaccuguacgaccacgcccugaugagcaucaucagcaccuuccaccugagcauccccaacuucaaccaguacgaggccaugagcugcgacuucaacggcggcaagaucagcgugcaguacaaccugagccacagcuacgccggcgacgccgccaaccacugcggcaccguggccaacggcgugcugcagaccuucaugagaauggccuggggcggcagcuacaucgcccuggacagcggcugcggcaacugggacugcaucaugaccagcuaccaguaccugaucauccagaacaccaccugggaggaccacugccaguucagcagacccagccccaucggcuaccugggccugcugagccagagaaccagagacaucuacaucagcagaagacgccggggcaccuucaccuggacccugagcgacagcgagggcaaggacacccccggcggcuacugccugaccagauggaugcugaucgaggccgagcugaagugcuucggcaacaccgccguggccaagugcaacgagaagcacgacgaggaguucugcgacaugcugagacuguucgacuucaacaagcaggccauccagagacugaaggcccccgcccagaugagcauccagcugaucaacaaggccgugaacgcccugaucaacgaccagcugaucaugaagaaccaccugagagacaucaugugcauccccuacugcaacuacagcaaguacugguaccugaaccacaccaccaccggcagaaccagccugcccaagugcuggcuggugagcaacggcagcuaccugaacgagacccacuucagcgacgacaucgagcagcaggccgacaacaugaucaccgagaugcugcagaaggaguacauggagagacagggcaagaccccccugggccugguggaccuguucguguucagcaccagcuucuaccugaucagcaucuuccugcaccuggugaagauccccacccacagacacaucgugggcaagagcugccccaagccccacagacugaaccacaugggcaucugcagcugcggccuguacaagcagcccggcgugcccgugaaguggaagagaugaggacuaguaauaaggaaacuguaugaaugucugugggcaggaagugaagagauccuucuguaaagguuuuuggaauuaugucugcugaauaauaaacuuuuuugaaauaauaaaucugguagaaaaaugagaucuaaaaaaaaaaaaaaaaaaaaaaaaaaaaaaaaaaaaaaaaaaaaaaaaaaaaaaaaaaaaaaaaaaaaaaaaaaaaaaaaaaaaaaaaaaaaaaaaaaaa

SEQ ID NO: 16297 - RNA, 1785 nt, Artificial Sequence
  mRNA product Design b-4 (A100) comprising derived and/or modified sequence from LASV(LP;Clade I)__AAF86701__GPCmut1 (opt4)
aggagagucccgcagucggcguccagcggcucugcuuguucgugugugugucguugcaggccuuauucaagcuuaccaugggccagaucaucaccuucuuccaggaggugccccacgugaucgaggaggugaugaacaucgugcugaucgcccugagccugcuggccauccugaagggccuguacaacaucgccaccugcggcaucaucggccugguggccuuccuguuccugugcggcaagagcugcagccugacccugaagggcggcuacgagcugcagacccuggagcugaacauggagacccugaacaugaccaugccccugagcugcaccaagaacagcagccaccacuacaucagagugggcaacgagaccggccuggagcugacccugaccaacaccagcaucaucaaccacaaguucugcaaccugagcgacgcccacaagaagaaccuguacgaccacgcccugaugagcaucaucagcaccuuccaccugagcauccccaacuucaaccaguacgaggccaugagcugcgacuucaacggcggcaagaucagcgugcaguacaaccugagccacagcuacgccggcgacgccgccgagcacugcggcaccguggccaacggcgugcugcagaccuucaugagaauggccuggggcggcagauacaucgcccuggacagcggcugcggcaacugggacugcaucaugaccagcuaccaguaccugaucauccagaacaccaccugggaggaccacugccaguucagcagacccagccccaucggcuaccugggccugcugagccagagaaccagagacaucuacaucagcagaagacgccggggcaccuucaccuggacccugagcgacagcgagggcaacgagacccccggcggcuacugccugaccagauggaugcugaucgaggccgagcugaagugcuucggcaacaccgccguggccaagugcaacgagaagcacgacgaggaguucugcgacaugcugagacuguucgacuucaacaagcaggccaucagaagacugaaggcccccgcccagaugagcauccagcugaucaacaaggccgugaacgcccugaucaacgaccagcugaucaugaagaaccaccugagagacaucaugugcauccccuacugcaacuacagcaaguacugguaccugaaccacaccagcagcggcagaaccagccugcccaagugcuggcugaucagcaacggcagcuaccugaacgagacccaguucagcgacgacaucgagcagcaggccgacaacaugaucaccgagaugcugcagaaggaguacaucgagagacagggcaagaccccccugggccugguggacaucuucaucuucagcaccagcuucuaccugaucagcaucuuccugcaccugaucaagauccccacccacagacacaucgugggcaagcccugccccaagccccacagacugaaccacaugggcgugugcagcugcggccuguacaagcaccccggcgugcccaccaaguggaagagaugaggacuaguaauaaggaaacuguaugaaugucugugggcaggaagugaagagauccuucuguaaagguuuuuggaauuaugucugcugaauaauaaacuuuuuugaaauaauaaaucugguagaaaaaugagaucuaaaaaaaaaaaaaaaaaaaaaaaaaaaaaaaaaaaaaaaaaaaaaaaaaaaaaaaaaaaaaaaaaaaaaaaaaaaaaaaaaaaaaaaaaaaaaaaaaaaa

SEQ ID NO: 16298 - RNA, 1785 nt, Artificial Sequence
  mRNA product Design b-4 (A100) comprising derived and/or modified sequence from LASV(803213;Clade II)__AAF86703__GPCmut1 (opt4)
aggagagucccgcagucggcguccagcggcucugcuuguucgugugugugucguugcaggccuuauucaagcuuaccaugggccagaucaucaccuucuuccaggaggugccccacgugaucgaggaggugaugaacaucgugcugaucgcccugagccugcuggccauccugaagggcaucuacaacguggccaccugcggccuguucggccugaucagcuuccugcugcugugcggcagaagcugcagcgugaccuacaagggcguguacgagcugcagacccuggagcugaacauggccaaccugaacaugaccaugccccugagcugcaccaagaacaacagccaccacuacaucauggugggcaacgagaccggccuggagcugacccugaccaacaccagcaucaucaaccacaaguucugcaaccugagcgacgcccacaagaagaaccuguacgaccacgcccugaugagcaucaucagcaccuuccaccugagcauccccaacuucaaccaguacgaggccaugagcugcgacuucaacggcggcaagaucagcgugcaguacaaccugagccacagcuucgccguggacgccgccaaccacugcggcaccaucgccaacggcgugcugcagaccuucaugagaauggccuggggcggcagcuacaucgcccuggacagcggcugcggcaacugggacugcaucaugaccagcuaccaguaccugaucauccagaacaccaccugggaggaccacugccaguucagcagacccagccccaucggcuaccugggccugcugagccagagaaccagagacaucuacaucagcagaagacgccggggcaccuucaccuggacccugagcgacagcgagggcaacgaggcccccggcggcuacugccugaccagauggaugcugaucgaggccgagcugaagugcuucggcaacaccgccguggccaagugcaacgagaagcacgacgaggaguucugcgacaugcugagacuguucgacuucaacaagcaggccaucaagagacugaagacccccgcccagaugagcauccagcugaucaacaaggccgugaacgcccugaucaacgaccagcugaucaugaagaaccaccugagagacaucaugugcauccccuacugcaacuacagcagauacugguaccugaaccacaccgugaccggcaagaccagccugcccagaugcuggcuggugagcaacggcagcuaccugaacgagacccacuucagcgacgacaucgagcagcaggccgacaacaugaucaccgagaugcugcagaaggaguacauggacagacagggcaagaccccccugggccugguggaccuguucguguucagcaccagcuucuaccugaucagcaucuuccugcaccuggugaagauccccacccacagacacaucgugggcaagcccugccccaagccccacagacugaaccacaugggcaucugcagcugcggccuguacaagcaccccggcgugcccgugaaguggaagagaugaggacuaguaauaaggaaacuguaugaaugucugugggcaggaagugaagagauccuucuguaaagguuuuuggaauuaugucugcugaauaauaaacuuuuuugaaauaauaaaucugguagaaaaaugagaucuaaaaaaaaaaaaaaaaaaaaaaaaaaaaaaaaaaaaaaaaaaaaaaaaaaaaaaaaaaaaaaaaaaaaaaaaaaaaaaaaaaaaaaaaaaaaaaaaaaaa

SEQ ID NO: 16299 - RNA, 1785 nt, Artificial Sequence
  mRNA product Design b-4 (A100) comprising derived and/or modified sequence from LASV(GA391;Clade III)__CAA36645__GPCmut1 (opt4)
aggagagucccgcagucggcguccagcggcucugcuuguucgugugugugucguugcaggccuuauucaagcuuaccaugggccagaucgugaccuucuuccaggaggugccccacgugaucgaggaggugaugaacaucgugcugaucgcccugagcauccuggccauccugaagggccuguacaacguggccaccugcggccugaucggccuggugaccuuccugcugcugagcggcagaagcugcagccugaucuacaagggcaccuacgagcugcagacccuggagcugaacauggagacccugaacaugaccaugccccugagcugcaccaagaacaacagccaccacuacaucagagugggcaacgagaccggccuggagcugacccugaccaacaccagcauccugaaccacaaguucugcaaccugagcgacgcccacaagagaaaccuguacgaccacagccugaugagcaucaucagcaccuuccaccugagcauccccaacuucaaccaguacgaggccaugagcugcgacuucaacggcggcaagaucaccgugcaguacaaccugagccacagcuucgccguggacgccgccggccacugcggcacccuggccaacggcgugcugcagaccuucaugagaauggccuggggcggcagcuacaucgcccuggacagcggcugcggcaacugggacugcaucaugaccagcuaccaguaccugaucauccagaacaccaccugggacgaccacugccaguucagcagacccagccccaucggcuaccugggccugcugagccagagaaccagagacaucuacaucagcagaagacgccggggcaccuucaccuggacccugagcgacagcgagggcaacgagacccccggcggcuacugccugaccagauggaugcugaucgaggccgagcugaagugcuucggcaacaccgccguggccaagugcaacgagaagcacgacgaggaguucugcgacaugcugagacuguucgacuucaacaagcaggccaucagaagacugaagacccccgcccagaugagcauccagcugaucaacaaggccgugaacgcccugaucaacgaccagcugaucaugaagaaccaccugagagacaucaugugcauccccuacugcaacuacagcagauacugguaccugaaccacaccagcaccggcaagaccagccugcccagaugcuggcugaucagcaacggcagcuaccugaacgagaccaaguucagcgacgacaucgagcagcaggccgacaacaugaucaccgagaugcugcagaaggaguacaucgacagacagggcaagaccccccugggccugguggaccuguucguguucagcaccagcuucuaccugaucagcaucuuccugcaccuggugaagauccccacccacagacacaucgugggcaagcccugccccaagccccacagacugaaccacaugggcaucugcagcugcggccuguacaagcagcccggcgugcccgugagauggaagagaugaggacuaguaauaaggaaacuguaugaaugucugugggcaggaagugaagagauccuucuguaaagguuuuuggaauuaugucugcugaauaauaaacuuuuuugaaauaauaaaucugguagaaaaaugagaucuaaaaaaaaaaaaaaaaaaaaaaaaaaaaaaaaaaaaaaaaaaaaaaaaaaaaaaaaaaaaaaaaaaaaaaaaaaaaaaaaaaaaaaaaaaaaaaaaaaaa

SEQ ID NO: 16300 - RNA, 1788 nt, Artificial Sequence
  mRNA product Design b-4 (A100) comprising derived and/or modified sequence from LASV(AV;Clade V)__CCA30314__GPCmut1 (opt4)
aggagagucccgcagucggcguccagcggcucugcuuguucgugugugugucguugcaggccuuauucaagcuuaccaugggccagaucgugaccuucuuccaggaggugccccacgugaucgaggaggugaugaacaucgugcugaucgcccugagcauccuggccgugcugaagggccuguacaacaucgccaccugcggccugaucggccugaucaccuuccugcugcugugcggcagaagcugcagcagcaaccuguacaagggcguguacgagcugcagagccuggaccugaacauggagacccugaacaugaccaugccccugagcugcaccaagaacaacagccaccacuacaucagagugggcaacgacaccggccuggagcugacccugaccaacaccagcauccugaaccacaaguucugcaaccugagcgacgcccacaagaaggaccuguacgaccacgcccugaugagcaucaucagcaccuuccaccugagcauccccaacuucaaccaguacgaggccaugagcugcgacuucaacggcggcaagaucagcgugcaguacaaccugagccacagcuacgccaucgacgccgccaaccacugcggcaccguggccaacggcauccugcagaccuucaugagaauggccuggggcggcagcuacaucgcccuggacagcggcugcggcaacugggacugcaucaugaccagcuaccaguaccugaucauccagaacaccaccugggagaaccacugccaguucagcagacccagccccaucggcuaccugggccugcugagccagagaaccagagacaucuacaucagcagaagacgccggggcaccuucaccuggacccugagcgacagcgagggcaacgccacccccggcggcuacugccugaccagauggaugcugaucgaggccgagcugaagugcuucggcaacaccgccguggccaagugcaacgagaagcacgacgaggaguucugcgacaugcugagacuguucgacuucaacaagcaggccaucagcagacugaagagccccgcccagaugagcauccagcugaucaacaaggccgugaacgcccugaucaacgaccagcugaucaugaagaaccaccugagagacaucaugugcauccccuacugcaacuacagcaaguacugguaccugaaccacaccaucaccggcaagaccagccugcccaagugcuggcuggugagcaacggcagcuaccugaacgagacccacuucagcgacgacaucgagcagcaggccgacaacaugaucaccgagaugcugcagaaggaguacauggagagacagggcaagaccccccugggccugguggaccuguucguguucagcaccagcuucuaccugaucagcaucuuccugagacuggugaagauccccacccacagacacaucgugggcaagcccugccccaagccccacagacugaaccacaugggcaucugcagcugcggccuguacaagcagcccggcgugcccgugagauggaagagaugaggacuaguaauaaggaaacuguaugaaugucugugggcaggaagugaagagauccuucuguaaagguuuuuggaauuaugucugcugaauaauaaacuuuuuugaaauaauaaaucugguagaaaaaugagaucuaaaaaaaaaaaaaaaaaaaaaaaaaaaaaaaaaaaaaaaaaaaaaaaaaaaaaaaaaaaaaaaaaaaaaaaaaaaaaaaaaaaaaaaaaaaaaaaaaaaa

SEQ ID NO: 16301 - RNA, 1785 nt, Artificial Sequence
  mRNA product Design b-4 (A100) comprising derived and/or modified sequence from LASV(Togo/2016/7082;Clade VI)__AMR44577__GPCmut1 (opt4)
aggagagucccgcagucggcguccagcggcucugcuuguucgugugugugucguugcaggccuuauucaagcuuaccaugggccagaucaucaccuucuuccaggaggugccccacgugaucgaggaggugaugaacaucgugcugaucgcccugagccugcuggccauccugaagggcguguacaacguggccaccugcggcaucaucggccuggugaccuuccuguuccugugcggcagaagcugcagccugaucuacaagggcagcuacgagcugcagacccuggagcugaacauggagacccugaacaugaccaugccccugagcugcaccaagaacagcagccaccacuacaucagagugggcaacgagaccggccuggagcugacccugaccaacaccagcaucaucaaccacaaguucugcaaccugagcgacgcccacaagagaaaccuguacgaccacgcccugaugagcauccugagcaccuuccaccugagcauccccaacuucaaccaguacgaggccaugagcugcgacuucaacggcggcaagaucagcgugcaguacaaccugagccacgccuacgccguggacgccgccgagcacugcggcaccguggccaacggcgugcugcagaccuucaugagaauggccuggggcggcagcuacaucgcccuggacagcggcugcggcaacugggacugcaucaugaccagcuaccaguaccugaucauccagaacaccaccugggaggaccacugccaguucagcagacccagccccaucggcuaccugggccugcugagccagagaaccagagacaucuacaucagcagaagacgccggggcaccuucaccuggacccugagcgacagcgagggcaacgagacccccggcggcuacugccugaccagauggaugcugaucgaggccgagcugaagugcuucggcaacaccgccguggccaagugcaacgagaagcacgacgaggaguucugcgacaugcugagacuguucgacuucaacaagcaggccauccagagacugaagagccccgcccagaugagcauccagcugaucaacaaggccgugaacgcccugaucaacgaccagcugaucaugaagaaccaccugagagacaugaugugcauccccuacugcaacuacagcaaguacugguaccugaaccacaccagcagcggcagaaccagccugcccaagugcuggcuggugagcaacggcagcuaccugaacgagacccacuucagcgacgacaucgagcagcaggccgacaacaugaucaccgagaugcugcagaaggaguacaucgacagacagggcaagaccccccugggccugguggaccuguucguguucagcaccagcuucuaccugaucagcaucuuccugcaccugaucaagauccccacccacagacacaucgugggcaagcccugccccaagccccacagacugaaccacaugggcaucugcagcugcggccuguacaagcagcccggcgugcccaccagauggaagagaugaggacuaguaauaaggaaacuguaugaaugucugugggcaggaagugaagagauccuucuguaaagguuuuuggaauuaugucugcugaauaauaaacuuuuuugaaauaauaaaucugguagaaaaaugagaucuaaaaaaaaaaaaaaaaaaaaaaaaaaaaaaaaaaaaaaaaaaaaaaaaaaaaaaaaaaaaaaaaaaaaaaaaaaaaaaaaaaaaaaaaaaaaaaaaaaaa

SEQ ID NO: 16302 - RNA, 1785 nt, Artificial Sequence
  mRNA product Design b-4 (A100) comprising derived and/or modified sequence from LASV(KAK-428;Clade n.d. (VII))__ANH09740__GPCmut1 (opt4)
aggagagucccgcagucggcguccagcggcucugcuuguucgugugugugucguugcaggccuuauucaagcuuaccaugggccagaucgugaccuucuuccaggaggugccccacgugaucgaggaggugaugaacaucgugcugaucgcccugagccugcuggccauccugaagggccuguacaacuucgccaccugcggcgugaucggccugaucaccuuccugcugcugugcggcagaagcugcagcgccaccuacaagggccaguacgagcugcagacccuggagcugaacauggagagccugaacaugaccaugccccugagcugcaccaagaacaacagccaccacuacaucagagccggcaacaacaccggccuggagcugacccugaccaacaccagcaucaucagccacaaguucugcaaccugagcgacgcccacaagaagaaccuguacgaccacacccugaugagcaucaucaccaccuuccaccugagcauccccaacuucaaccaguacgaggccaugagcugcgacuucaacggcggcaagaucagcauccaguacaaccugagccacagcuacgccggcgacgccgcccagcacugcggcaccguggccaacggcgugcugcagaccuucaugagaauggccuggggcggcagcuaccuggcccuggacagcggcugcagaggcugggacugcaucaucagcagcuaccaguaccugaucauccagaacaccaccugggacgaccacugccaguucagcagacccagccccaucggcuaccugggcuucgugagccagaagaccagagacaucuacaucagcagaagacgccggggcaccuucaccuggacccugagcgacagcgagggccacgacaugcccggcggcuacugccugaccagauggaugcugaucgaggccgaccugaagugcuucggcaacaccgccguggccaagugcaacgagaagcacgacgaggaguucugcgacauguggagacuguucgacuucaacaagcaggccauccagagacugaaggcccccgcccagaugaacauccagcugaucaacaaggccgugaacgcccugaucaacgaccagcugaugaugaagaaccaccugagagacaucaugugcauccccuacugcaacuacagcaaguucugguaccugaacaacaccaccaccggcagaaccagccugcccagaugcuggcugaucagcaacggcagcuaccugaacgagacccacuucagcgacgacaucgagcagcaggccgacaacaugaucaccgagaugcugcagaaggaguacauggacagacagggcaagaccccccugggccugguggaccuguucguguucagcaccagcuucuaccugaucaccaucuuccugcaccuggugaagauccccacccacagacacaucgugggcaagcccugccccaagccccacagacugaaccacaugggcaucugcagcugcggccuguacaagcagcccggcgugcccgugagauggaagagaugaggacuaguaauaaggaaacuguaugaaugucugugggcaggaagugaagagauccuucuguaaagguuuuuggaauuaugucugcugaauaauaaacuuuuuugaaauaauaaaucugguagaaaaaugagaucuaaaaaaaaaaaaaaaaaaaaaaaaaaaaaaaaaaaaaaaaaaaaaaaaaaaaaaaaaaaaaaaaaaaaaaaaaaaaaaaaaaaaaaaaaaaaaaaaaaaa

SEQ ID NO: 16303 - RNA, 1785 nt, Artificial Sequence; identical to SEQ ID NO: 16297
  mRNA product Design b-4 (A100) comprising derived and/or modified sequence from LASV(Pinneo-NIG-1969;Clade I)__AIT17836__GPCmut1 (opt4)

SEQ ID NO: 16304 - RNA, 1785 nt, Artificial Sequence
  mRNA product Design b-4 (A100) comprising derived and/or modified sequence from LASV(ISTH0009-NIG-2011;Clade II)__AIT17404__GPCmut1 (opt4)
aggagagucccgcagucggcguccagcggcucugcuuguucgugugugugucguugcaggccuuauucaagcuuaccaugggccagaucaucaccuucuuccaggaggugccccacgugaucgaggaggugaugaacaucgugcugaucgcccugagccugcuggccauccugaagggcaucuacaacguggccaccugcggccuguucggccuggugagcuuccugcugcugugcggcagaagcugcagcaccaccuacaagggcguguacgagcugcagacccuggagcuggacauggccagccugaacaugaccaugccccugagcugcaccaagaacaacagccaccacuacaucauggugggcaacgagaccggccuggagcugacccugaccaacaccagcaucaucaaccacaaguucugcaaccugagcgacgcccacaagaagaaccuguacgaccacgcccugaugagcaucaucagcaccuuccaccugagcauccccaacuucaaccaguacgaggccaugagcugcgacuucaacggcggcaagaucagcgugcaguacaaccugagccacgccuacgccguggacgccgccaaccacugcggcaccaucgccaacggcgugcugcagaccuucaugagaauggccuggggcggcagcuacaucgcccuggacagcggcugcggcagcugggacugcaucaugaccagcuaccaguaccugaucauccagaacaccaccugggaggaccacugccaguucagcagacccagccccaucggcuaccugggccugcugagccagagaaccagagacaucuacaucagcagaagacgccggggcaccuucaccuggacccugagcgacagcgagggcaacgagacccccggcggcuacugccugaccagauggaugcugaucgaggccgagcugaagugcuucggcaacaccgccguggccaagugcaacgagaagcacgacgaggaguucugcgacaugcugagacuguucgacuucaacaagcaggccaucagaagacugaagacccccgcccagaugagcauccagcugaucaacaaggccgugaacgcccugaucaacgaccagcugaucaugaagaaccaccugagagacaucaugugcauccccuacugcaacuacagcaaguacugguaccugaaccacaccgugaccggcaagaccagccugcccagaugcuggcuggugagcaacggcagcuaccugaacgagacccacuucagcgacgacaucgagcagcaggccgacaacaugaucaccgagcugcugcagaaggaguacauggacagacagggcaagaccccccugggccugguggaccuguucguguucagcaccagcuucuaccugaucagcaucuuccugcaccugaucaagauccccacccacagacacaucaccggcaagcccugccccaagccccacagacugaaccacaugggcaucugcagcugcggccuguacaagcaccccggcgugcccgugaaguggaagagaugaggacuaguaauaaggaaacuguaugaaugucugugggcaggaagugaagagauccuucuguaaagguuuuuggaauuaugucugcugaauaauaaacuuuuuugaaauaauaaaucugguagaaaaaugagaucuaaaaaaaaaaaaaaaaaaaaaaaaaaaaaaaaaaaaaaaaaaaaaaaaaaaaaaaaaaaaaaaaaaaaaaaaaaaaaaaaaaaaaaaaaaaaaaaaaaaa

SEQ ID NO: 16305 - RNA, 1785 nt, Artificial Sequence
  mRNA product Design b-4 (A100) comprising derived and/or modified sequence from LASV(ISTH2010-NIG-2012;Clade II)__AIT17482__GPCmut1 (opt4)
aggagagucccgcagucggcguccagcggcucugcuuguucgugugugugucguugcaggccuuauucaagcuuaccaugggccagaucaucaccuucuuccaggaggugccccacgugaucgaggaggugaugaacaucgugcugaucgcccugagccugcuggccauccugaagggcaucuacaacguggccaccugcggccuguucggccuggugagcuuccugcugcugugcggcagaagcugcagcaccaccuacaagggcguguacgagcugcagacccuggagcuggacauggccagccugaacaugaccaugccccugagcugcaccaagaacaacagccaccacuacaucauggugggcaacgagaccggccuggagcugacccugaccaacaccagcaucaucaaccacaaguucugcaaccugagcgacgcccacaagaagaaccuguacgaccacgcccugaugagcaucaucagcaccuuccaccugagcauccccaacuucaaccaguacgaggccaugagcugcgacuucaacggcggcaagaucagcgugcaguacaaccugagccacgccuacgccguggacgccgccaaccacugcggcaccaucgccaacggcgugcugcagaccuucaugagaauggccuggggcggcagcuacaucgcccuggacagcggcugcggcagcugggacugcaucaugaccagcuaccaguaccugaucauccagaacaucaccugggaggaccacugccaguucagcagacccagccccaucggcuaccugggccugcugagccagagaaccagagacaucuacaucagcagaagacgccggggcaccuucaccuggacccugagcgacagcgagggcaacgagacccccggcggcuacugccugaccagauggaugcugaucgaggccgagcugaagugcuucggcaacaccgccguggccaagugcaacgagaagcacgacgaggaguucugcgacaugcugagacuguucgacuucaacaagcaggccaucagaagacugaagacccccgcccagaugagcauccagcugaucaacaaggccgugaacgcccugaucaacgaccagcugaucaugaagaaccaccugagagacaucaugugcauccccuacugcaacuacagcaaguacugguaccugaaccacaccgugaccggcaagaccagccugcccagaugcuggcuggugagcaacggcagcuaccugaacgagacccacuucagcgacgacaucgagcagcaggccgacaacaugaucaccgagcugcugcagaaggaguacaucgacagacagggcaagaccccccugggccugguggaccuguucguguucagcaccagcuucuaccugaucagcaucuuccugcaccuggugaagauccccacccacagacacguggugggcaagcccugccccaagccccacagacugaaccacaugggcaucugcagcugcggccuguacaagcaccccggcgugcccgugaaguggaagagaugaggacuaguaauaaggaaacuguaugaaugucugugggcaggaagugaagagauccuucuguaaagguuuuuggaauuaugucugcugaauaauaaacuuuuuugaaauaauaaaucugguagaaaaaugagaucuaaaaaaaaaaaaaaaaaaaaaaaaaaaaaaaaaaaaaaaaaaaaaaaaaaaaaaaaaaaaaaaaaaaaaaaaaaaaaaaaaaaaaaaaaaaaaaaaaaaa

SEQ ID NO: 16306 - RNA, 1785 nt, Artificial Sequence
  mRNA product Design b-4 (A100) comprising derived and/or modified sequence from LASV(Lassa virus/H.sapiens-wt/NGA/2015/ISTH_0543;Clade II)__AVO03639__GPCmut1 (opt4)
aggagagucccgcagucggcguccagcggcucugcuuguucgugugugugucguugcaggccuuauucaagcuuaccaugggccagaucaucaccuucuuccaggaggugccccacgugaucgaggaggugaugaacaucgugcugaucgcccugagccugcuggccauccugaagggcaucuacaacguggccaccugcggccuguucggccuggugagcuuccugcugcugugcggcagaagcugcagcaccaccuacaagggcguguacgagcugcagacccuggagcuggacauggccaaccugaacaugaccaugccccugagcugcaccaagaacaacagccaccacuacaucauggugggcaacgagaccggccuggagcugacccugaccaacaccagcaucaucaaccacaaguucugcaaccugagcgacgcccacaagaagaaccuguacgaccacgcccugaugagcaucaucagcaccuuccaccugagcauccccaacuucaaccaguacgaggccaugagcugcgacuucaacggcggcaagaucagcgugcaguacaaccugagccacaccuacgccguggacgccgccaaccacugcggcaccaucgccaacggcgugcugcagaccuucaugagaauggccuggggcggcagcuacaucgcccuggacagcggcugcggcagcugggacugcaucaugaccagcuaccaguaccuggugauccagaacaccaccugggaggaccacugccaguucagcagacccagccccaucggcuaccugggccugcugagccagagaaccagagacaucuacaucagcagaagacgccggggcaccuucaccuggacccugagcgacagcgagggcaacgagacccccggcggcuacugccugaccagauggaugcugaucgaggccgagcugaagugcuucggcaacaccgccguggccaagugcaacgagaagcacgacgaggaguucugcgacaugcugagacuguucgacuucaacaagcaggccaucagaagacugaagacccccgcccagaugagcauccagcugaucaacaaggccgugaacgcccugaucaacgaccagcugaucaugaagaaccaccugagagacaucaugugcauccccuacugcaacuacagcaaguacugguaccugaaccacaccgugaccggcaagaccagccugcccagaugcuggcuggugagcaacggcagcuaccugaacgagacccacuucagcgacgacaucgagcagcaggccgacaacaugaucaccgagcugcugcagaaggaguacaucgacagacagggcaagaccccccugggccugguggaccuguucguguucagcaccagcuucuaccugaucagcaucuuccugcaccuggugaagauccccacccacagacacaucaccggcaagcccugccccaagccccacagacugaaccacaugggcaucugcagcugcggccuguacaagcaccccggcgugcccgugaaguggaagagaugaggacuaguaauaaggaaacuguaugaaugucugugggcaggaagugaagagauccuucuguaaagguuuuuggaauuaugucugcugaauaauaaacuuuuuugaaauaauaaaucugguagaaaaaugagaucuaaaaaaaaaaaaaaaaaaaaaaaaaaaaaaaaaaaaaaaaaaaaaaaaaaaaaaaaaaaaaaaaaaaaaaaaaaaaaaaaaaaaaaaaaaaaaaaaaaaa

SEQ ID NO: 16307 - RNA, 1785 nt, Artificial Sequence
  mRNA product Design b-4 (A100) comprising derived and/or modified sequence from LASV(Lassa virus/H.sapiens-wt/NGA/2016/ISTH_0009;Clade II)__AVO03571__GPCmut1 (opt4)
aggagagucccgcagucggcguccagcggcucugcuuguucgugugugugucguugcaggccuuauucaagcuuaccaugggccagaucaucaccuucuuccaggaggugccccacgugaucgaggaggugaugaacaucgugcugaucgcccugagccugcuggccauccugaagggcaucuacaacguggccaccugcggccugcugggccuggugagcuuccugcugcugugcggcagaagcugcagcaccaccuacaagggcguguacgagcugcagacccuggagcuggacauggccagccugaacaugaccaugccccugagcugcaccaagaacaacagccaccacuacaucauggugggcaacgagaccggccuggagcugacccugaccaacaccagcaucaucaaccacaaguucugcaaccugagcgacgcccacaagaagaaccuguacgaccacgcccugaugagcaucaucagcaccuuccaccugagcauccccaacuucaaccaguacgaggccaugagcugcgacuucaacggcggcagaaucagcgugcaguacaaccugagccacagcuacgccguggacgccgccaaccacugcggcaccaucgccaacggcgugcugcagaccuucaugagaauggccuggggcggcagcuacaucgcccuggacagcggcugcggcagcugggacugcaucaugaccagcuaccaguaccugaucauccagaacaccaccugggaggaccacugccaguucagcagacccagccccaucggcuaccugggccugcugagccagagaaccagagacaucuacaucagcagaagacgccggggcaccuucaccuggacccugagcgacagcgagggcaacgagacccccggcggcuacugccugaccagauggaugcugaucgaggccgagcugaagugcuucggcaacaccgccguggccaagugcaacgagaagcacgacgaggaguucugcgacaugcugagacuguucgacuucaacaagcaggccaucagaagacugaagacccccgcccagaugagcauccagcugaucaacaaggccgugaacgcccugaucaacgaccagcugaucaugaagaaccaccugagagacaucaugugcauccccuacugcaacuacagcaaguacugguaccugaaccacaccgugaccggcaagaccagccugcccagaugcuggcuggugagcaacggcagcuaccugaacgagacccacuucagcgacgacaucgagcagcaggccgacaacaugaucaccgagcugcugcagaaggaguacaucgacagacagggcaagaccccccugggccugguggaccuguucguguucagcaccagcuucuaccugaucagcaucuuccugcaccuggugaagauccccacccacagacacaucaccggcaagcccugccccaagccccacagacugaaccacaugggcaucugcagcugcggccuguacaaccaccccggcgugcccgugaaguggaagagaugaggacuaguaauaaggaaacuguaugaaugucugugggcaggaagugaagagauccuucuguaaagguuuuuggaauuaugucugcugaauaauaaacuuuuuugaaauaauaaaucugguagaaaaaugagaucuaaaaaaaaaaaaaaaaaaaaaaaaaaaaaaaaaaaaaaaaaaaaaaaaaaaaaaaaaaaaaaaaaaaaaaaaaaaaaaaaaaaaaaaaaaaaaaaaaaaa

SEQ ID NO: 16308 - RNA, 1785 nt, Artificial Sequence
  mRNA product Design b-4 (A100) comprising derived and/or modified sequence from LASV(Lassa virus/H.sapiens-wt/NGA/2016/ISTH_0017;Clade II)__AVO03567__GPCmut1 (opt4)
aggagagucccgcagucggcguccagcggcucugcuuguucgugugugugucguugcaggccuuauucaagcuuaccaugggccagaucaucaccuucuuccaggaggugccccacgugaucgaggaggugaugaacaucgugcugaucgcccugagccugcuggccauccugaagggcaucuacaacguggccaccugcggccuguucggccuggugagcuuccugcugcugugcggcagaagcugcagcaccaccuacaagggcguguacgagcugcagacccuggagcuggacauggccagccugaacaugaccaugccccugagcugcaccaagaacaacagccaccacuacaucauggugggcaacgagaccggccuggagcugacccugaccaacaccagcaucaucaaccacaaguucugcaaccugagcgacgcccacaagaagaaccuguacgaccacgcccugaugagcaucaucagcaccuuccaccugagcauccccaacuucaaccaguacgaggccaugagcugcgacuucaacggcggcaagaucagcgugcaguacaaccugagccacaccuacgccaucgacgccgccaaccacugcggcaccaucgccaacggcgugcugcagaccuucaugagaauggccuggggcggcagcuacaucgcccuggacagcggcugcggcagcugggacugcaucaugaccagcuaccaguaccugaucauccagaacaccaccugggaggaccacugccaguucagcagacccagccccaucggcuaccugggccugcugagccagagaaccagagacaucuacaucagcagaagacgccggggcaccuucaccuggacccugagcgacagcgagggcaacgagacccccggcggcuacugccugaccagauggaugcugaucgaggccgagcugaagugcuucggcaacaccgccguggccaagugcaacgagaagcacgacgaggaguucugcgacaugcugagacuguucgacuucaacaagcaggccaucagaagacugaagacccccgcccagaugagcauccagcugaucaacaaggccgugaacgcccugaucaacgaccagcugaucaugaagaaccaccugagagacaucaugugcauccccuacugcaacuacagcaaguacugguaccugaaccacaccgugaccggcaagaccagccugcccagaugcuggcuggugagcaacggcagcuaccugaacgagacccacuucagcgacgacaucgagcagcaggccgacaacaugaucaccgagcugcugcagaaggaguacauggacagacagggcaagaccccccugggccugguggaccuguucguguucagcaccagcuucuaccugaucagcaucuuccugcaccuggugagaauccccacccacagacacgugaucggcaagcccugccccaagccccacagacugaaccacaugggcaucugcagcugcggccuguacaagcaccccggcgugcccgugaaguggaagagaugaggacuaguaauaaggaaacuguaugaaugucugugggcaggaagugaagagauccuucuguaaagguuuuuggaauuaugucugcugaauaauaaacuuuuuugaaauaauaaaucugguagaaaaaugagaucuaaaaaaaaaaaaaaaaaaaaaaaaaaaaaaaaaaaaaaaaaaaaaaaaaaaaaaaaaaaaaaaaaaaaaaaaaaaaaaaaaaaaaaaaaaaaaaaaaaaa

SEQ ID NO: 16309 - RNA, 1785 nt, Artificial Sequence
  mRNA product Design b-4 (A100) comprising derived and/or modified sequence from LASV(Lassa virus/H.sapiens-wt/NGA/2018/ISTH_0959;Clade II)__AVV65099__GPCmut1 (opt4)
aggagagucccgcagucggcguccagcggcucugcuuguucgugugugugucguugcaggccuuauucaagcuuaccaugggccagaucaucaccuucuuccaggaggugccccacgugaucgaggaggugaugaacaucgugcugaucgcccugagccugcuggccauccugaagggcaucuacaacguggugaccugcggccuguucggccuggugagcuuccugcugcugugcggcagaagcugcagcaccaccuacaagggcguguacgagcugcagacccuggagcuggacauggccagccugaacaugaccaugccccugagcugcaccaagaacaacagccaccacuacaucauggugggcaacgagaccggccuggagcugacccugaccaacaccagcaucaucaaccacaaguucugcaaccugagcgacgcccacaagaagaaccuguacgaccacgcccugaugagcaucaucagcaccuuccaccugagcauccccaacuucaaccaguacgaggccaugagcugcgacuucaacggcggcaagaucagcgugcaguacaaccugagccacgccuacgccaucgacgccgccaaccacugcggcaccaucgccaacggcgugcugcagaccuucaugagaauggccuggggcggcagcuacaucgcccuggacagcggcugcggcagcugggacugcaucaugaccagcuaccaguaccugaucauccagaacaccaccugggaggaccacugccaguucagcagacccagccccaucggcuaccugggccugcugagccagagaaccagagacaucuacaucagcagaagacgccggggcaccuucaccuggacccugagcgacagcgagggcaacgagacccccggcggcuacugccugaccagauggaugcugaucgaggccgagcugaagugcuucggcaacaccgccguggccaagugcaacgagaagcacgacgaggaguucugcgacaugcugagacuguucgacuucaacaagcaggccaucagaagacugaagacccccgcccagaugagcauccagcugaucaacaaggccgugaacgcccugaucaacgaccagcugaucaugaagaaccaccugagagacaucaugugcauccccuacugcaacuacagcaaguacugguaccugaaccacaccgugaccggcaagaccagccugcccagaugcuggcuggugagcaacggcagcuaccugaacgagacccacuucagcgacgacaucgagcagcaggccgacaacaugaucaccgagcugcugcagaaggaguacaucgacagacagggcaagaccccccugggccugguggaccuguucguguucagcaccagcuucuaccugaucagcaucuuccugcaccuggugaagauccccacccacagacacgugaucggcaagcccugccccaagccccacagacugaaccacaugggcaucugcagcugcggccuguacaagcaccccggcgugcccgugaaguggaagagaugaggacuaguaauaaggaaacuguaugaaugucugugggcaggaagugaagagauccuucuguaaagguuuuuggaauuaugucugcugaauaauaaacuuuuuugaaauaauaaaucugguagaaaaaugagaucuaaaaaaaaaaaaaaaaaaaaaaaaaaaaaaaaaaaaaaaaaaaaaaaaaaaaaaaaaaaaaaaaaaaaaaaaaaaaaaaaaaaaaaaaaaaaaaaaaaaa

SEQ ID NO: 16310 - RNA, 1785 nt, Artificial Sequence
  mRNA product Design b-4 (A100) comprising derived and/or modified sequence from LASV(LASV003-NIG-2008;Clade II)__AIT17580__GPCmut1 (opt4)
aggagagucccgcagucggcguccagcggcucugcuuguucgugugugugucguugcaggccuuauucaagcuuaccaugggccagaucaucaccuucuuccaggaggugccccacgugaucgaggaggugaugaacaucgugcugaucgcccugagccugcuggccauccugaagggcaucuacaacguggccaccugcggccuguucggccuggugagcuuccugcugcugugcggcagaagcugcagcaccaccuacaagggcguguacgagcugcagacccuggagcuggacauggccagccugaacaugaccaugccccugagcugcaccaagaacaacagccaccacuacaucauggugggcaacgagaccggccuggagcugacccugaccaacaccagcaucaucaaccacaaguucugcaaccugagcgacgcccacaagaagaaccuguacgaccacgcccugaugagcaucaucagcaccuuccaccugagcauccccaacuucaaccaguacgaggccaugagcugcgacuucaacggcggcaagaucagcgugcaguacaaccugagccacaccuacgccguggacgccgccaaccacugcggcaccaucgccaacggcgugcugcagaccuucaugagaauggccuggggcggcagcuacaucgcccuggacagcggcugcggcagcugggacugcaucaugaccagcuaccaguaccugaucauccagaacaccaccugggaggaccacugccaguucagcagacccagccccaucggcuaccugggccugcugagccagagaaccagagacaucuacaucagcagaagacgccggggcaccuucaccuggacccugagcgacagcgagagcaacgagacccccggcggcuacugccugaccagauggaugcugaucgaggccgagcugaagugcuucggcaacaccgccguggccaagugcaacgagaagcacgacgaggaguucugcgacaugcugagacuguucgacuucaacaagcaggccaucagaagacugaaggcccccgcccagaugagcauccagcugaucaacaaggccgugaacgcccugaucaacgaccagcugaucaugaagaaccaccugagagacaucaugugcauccccuacugcaacuacagcaaguacugguaccugaaccacaccgugaccggcagaaccagccugcccagaugcuggcuggugagcaacggcagcuaccugaacgagacccacuucagcgacgacaucgagcagcaggccgacaacaugaucaccgagcugcugcagaaggaguacauggacagacagggcaagaccccccugggccugguggaccuguucguguucagcaccagcuucuaccugaucagcaucuuccugcaccuggugaagauccccacccacagacacgugaucggcaagcccugccccaagccccacagacugaaccacaugggcaucugcagcugcggccuguacaagcaccccggcgugcccgugaaguggaagagaugaggacuaguaauaaggaaacuguaugaaugucugugggcaggaagugaagagauccuucuguaaagguuuuuggaauuaugucugcugaauaauaaacuuuuuugaaauaauaaaucugguagaaaaaugagaucuaaaaaaaaaaaaaaaaaaaaaaaaaaaaaaaaaaaaaaaaaaaaaaaaaaaaaaaaaaaaaaaaaaaaaaaaaaaaaaaaaaaaaaaaaaaaaaaaaaaa

SEQ ID NO: 16311 - RNA, 1785 nt, Artificial Sequence
  mRNA product Design b-4 (A100) comprising derived and/or modified sequence from LASV(LASV035-NIG-2009;Clade II)__AIT17588__GPCmut1 (opt4)
aggagagucccgcagucggcguccagcggcucugcuuguucgugugugugucguugcaggccuuauucaagcuuaccaugggccagaucaucaccuucuuccaggaggugccccacgugaucgaggaggugaugaacaucgugcugaucgcccugagccugcuggccauccugaagggcaucuacaacguggccaccugcggccuguucggccuggugagcuuccugcugcugugcggcagaagcugcagcaccaccuacaagggcguguacgagcugcagacccuggagcuggacauggccagccugaacaugaccaugccccugagcugcaccaagaacaacagccaccacuacaucauggugggcaacgagaccggccuggagcugacccugaccaacaccagcaucaucaaccacaaguucugcaaccugagcgacgcccacaagaagaaccuguacgaccacgcccugaugagcaucaucagcaccuuccaccugagcauccccaacuucaaccaguacgaggccaugagcugcgacuucaacggcggcaagaucagcgugcaguacaaccugagccacgccuacgccguggacgccgccaaccacugcggcaccaucgccaacggcgugcugcagaccuucaugagaauggccuggggcggcagcuacaucgcccuggacagcggcugcggcagcugggacugcaucaugaccagcuaccaguaccugaucauccagaacaccaccugggaggaccacugccaguucagcagacccagccccaucggcuaccugggccugcugagccagagaaccagagacaucuacaucagcagaagacgccggggcaccuucaccuggacccugagcgacagcgagggcaacgagacccccggcggcuacugccugaccagauggaugcugaucgaggccgagcugaagugcuucggcaacaccgccguggccaagugcaacgagaagcacgacgaggaguucugcgacaugcugagacuguucgacuucaacaagcaggccaucagaagacugaaggcccccgcccagaugagcauccagcugaucaacaaggccgugaacgcccugaucaacgaccagcugaucaugaagaaccaccugagagacaucaugugcauccccuacugcaacuacagcaaguacugguaccugaaccacaccgugaccggcaagaccagccugcccagaugcuggcuggugagcaacggcagcuaccugaacgagacccacuucagcgacgacaucgagcagcaggccgacaacaugaucaccgagcugcugcagaaggaguacaucgacagacagggcaagaccccccugggccugguggaccuguucguguucagcaccagcuucuaccugaucagcaucuuccugcaccuggugaagauccccacccacagacacgugaucggcaagcccugccccaagccccacagacugaaccacaugggcaucugcagcugcggccuguacaagcaccccggcgugcccgugaaguggaagagaugaggacuaguaauaaggaaacuguaugaaugucugugggcaggaagugaagagauccuucuguaaagguuuuuggaauuaugucugcugaauaauaaacuuuuuugaaauaauaaaucugguagaaaaaugagaucuaaaaaaaaaaaaaaaaaaaaaaaaaaaaaaaaaaaaaaaaaaaaaaaaaaaaaaaaaaaaaaaaaaaaaaaaaaaaaaaaaaaaaaaaaaaaaaaaaaaa

SEQ ID NO: 16312 - RNA, 1785 nt, Artificial Sequence
  mRNA product Design b-4 (A100) comprising derived and/or modified sequence from LASV(LASV1000-NIG-2009;Clade II)__AIT17782__GPCmut1 (opt4)
aggagagucccgcagucggcguccagcggcucugcuuguucgugugugugucguugcaggccuuauucaagcuuaccaugggccagaucaucaccuucuuccaggaggugccccacgugaucgaggaggugaugaacaucgugcugaucgcccugagccugcuggccauccugaagggcaucuacaacguggccaccugcggccuguucggccuggugagcuuccugcugcugugcggcagaagcugcagcaccaccuacaagggcguguacgagcugcagacccuggagcuggacauggccagccugaacaugaccaugccccugagcugcaccaagaacaacagccaccacuacaucauggugggcaacgagaccggccuggagcugacccugaccaacaccagcaucaucaaccacaaguucugcaaccugagcgacgcccacaagaagaaccuguacgaccacgcccugaugagcaucaucagcaccuuccaccugagcauccccaacuucaaccaguacgaggccaugagcugcgacuucaacggcggcaagaucagcgugcaguacaaccugagccacaccuacgccguggacgccgccaaccacugcggcaccaucgccaacggcgugcugcagaccuucaugagaauggccuggggcggcagcuacaucgcccuggacagcggcugcggcagcugggacugcaucaugaccagcuaccaguaccugaucauccagaacaccaccugggaggaccacugccaguucagcagacccagccccaucggcuaccugggccugcugagccagagaaccagagacaucuacaucagcagaagacgccggggcaccuucaccuggacccugagcgacagcgagggcaacgagacccccggcggcuacugccugaccagauggaugcugaucgaggccgagcugaagugcuucggcaacaccgccguggccaagugcaacgagaagcacgacgaggaguucugcgacaugcugagacuguucgacuucaacaagcaggccaucaagagacugaagacccccgcccagaugagcauccagcugaucaacaaggccgugaacgcccugaucaacgaccagcugaucaugaagaaccaccugagagacaucaugugcauccccuacugcaacuacagcaaguacugguaccugaaccacaccgugaccggcaagaccagccugcccagaugcuggcuggugagcaacggcagcuaccugaacgagacccacuucagcgacgacaucgagcagcaggccgacaacaugaucaccgagcugcugcagaaggaguacaucgacagacagggcaagaccccccugggccugguggaccuguucguguucagcaccagcuucuaccugaucagcaucuuccugcaccuggugaagauccccacccacagacacguggugggcaagcccugccccaagccccacagacugaaccacaugggcaucugcagcugcggccuguacaagcaccccggcgugcccgugaaguggaagagaugaggacuaguaauaaggaaacuguaugaaugucugugggcaggaagugaagagauccuucuguaaagguuuuuggaauuaugucugcugaauaauaaacuuuuuugaaauaauaaaucugguagaaaaaugagaucuaaaaaaaaaaaaaaaaaaaaaaaaaaaaaaaaaaaaaaaaaaaaaaaaaaaaaaaaaaaaaaaaaaaaaaaaaaaaaaaaaaaaaaaaaaaaaaaaaaaa

SEQ ID NO: 16313 - RNA, 1785 nt, Artificial Sequence
  mRNA product Design b-4 (A100) comprising derived and/or modified sequence from LASV(LASV221-NIG-2010;Clade II)__AIT17624__GPCmut1 (opt4)
aggagagucccgcagucggcguccagcggcucugcuuguucgugugugugucguugcaggccuuauucaagcuuaccaugggccagaucaucaccuucuuccaggaggugccccacgugaucgaggaggugaugaacaucgugcugaucgcccugagccugcuggccauccugaagggcaucuacaacguggccaccugcggccuguucggccuggugagcuuccugcugcugugcggcagaagcugcagcaccaccuacaagggcguguacgagcugcagacccuggagcuggacauggccagccugaacaugaccaugccccugagcugcaccaagaacaacagccaccacuacaucauggugggcaacgagaccggccuggagcugacccugaccaacaccagcaucaucaaccacaaguucugcaaccugagcgacgcccacaagaagaaccuguacgaccacgcccugaugagcaucaucagcaccuuccaccugagcauccccaacuucaaccaguacgaggccaugagcugcgacuucaacggcggcaagaucagcgugcaguacaaccugagccacaccuacgccaucgacgccgccaaccacugcggcaccaucgccaacggcgugcugcagaccuucaugagaauggccuggggcggcagcuacaucgcccuggacagcggcugcggcagcugggacugcaucaugaccagcuaccaguaccugaucauccagaacaccaccugggaggaccacugccaguucagcagacccagccccaucggcuaccugggccugcugagccagagaaccagagacaucuacaucagcagaagacgccggggcaccuucaccuggacccugagcgacagcgagggcaacgagacccccggcggcuacugccugaccagauggaugcugaucgaggccgagcugaagugcuucggcaacaccgccguggccaagugcaacgagaagcacgacgaggaguucugcgacaugcugagacuguucgacuucaacaagcaggccaucagaagacugaagacccccgcccagaugagcauccagcugaucaacaaggccgugaacgcccugaucaacgaccagcugaucaugaagaaccaccugagagacaucaugugcauccccuacugcaacuacagcaaguacugguaccugaaccacaccgugaccggcaagaccagccugcccagaugcuggcuggugagcaacggcagcuaccugaacgagacccacuucagcgacgacaucgagcagcaggccgacaacaugaucaccgagaugcugcagaaggaguacauggacagacagggcaagaccccccugggccugguggaccuguucguguucagcaccagcuucuaccugaucagcaucuuccugcaccuggugaagauccccacccacagacacgugaucggcaagcccugccccaagccccacagacugaaccacaugggcaucugcagcugcggccuguacaagcaccccggcgugcccgugaaguggaagagaugaggacuaguaauaaggaaacuguaugaaugucugugggcaggaagugaagagauccuucuguaaagguuuuuggaauuaugucugcugaauaauaaacuuuuuugaaauaauaaaucugguagaaaaaugagaucuaaaaaaaaaaaaaaaaaaaaaaaaaaaaaaaaaaaaaaaaaaaaaaaaaaaaaaaaaaaaaaaaaaaaaaaaaaaaaaaaaaaaaaaaaaaaaaaaaaaa

SEQ ID NO: 16314 - RNA, 1785 nt, Artificial Sequence
  mRNA product Design b-4 (A100) comprising derived and/or modified sequence from LASV(LASV237-NIG-2010;Clade II)__AIT17638__GPCmut1 (opt4)
aggagagucccgcagucggcguccagcggcucugcuuguucgugugugugucguugcaggccuuauucaagcuuaccaugggccagaucaucaccuucuuccaggaggugccccacgugaucgaggaggugaugaacaucgugcugaucgcccugagccugcuggccauccugaagggcaucuacaacguggccaccugcggccuguucggccuggugagcuuccugcugcugugcggcagaagcugcagcaccaccuacaagggcguguacgagcugcagacccuggagcuggacauggccagccugaacaugaccaugccccugagcugcaccaagaacaacagccaccacuacaucauggugggcaacgagaccggccuggagcugacccugaccaacaccagcaucaucaaccacaaguucugcaaccugagcgacgcccacaagaaggaccuguacgaccacgcccugaugagcaucaucagcaccuuccaccugagcauccccaacuucaaccaguacgaggccaugagcugcgacuucaacggcggcaagaucagcgugcaguacaaccugagccacaccuacgccguggacgccgccaaccacugcggcaccaucgccaacggcgugcugcagaccuucaugagaauggccuggggcggcagcuacaucgcccuggacagcggcugcggcagcugggacugcaucaugaccagcuaccaguaccugaucauccagaacaccaccugggaggaccacugccaguucagcagacccagccccaucggcuaccugggccugcugagccagagaaccagagacaucuacaucagcagaagacgccggggcaccuucaccuggacccugagcgacagcgagggcaacgagacccccggcggcuacugccugaccagauggaugcugaucgaggccgagcugaagugcuucggcaacaccgccguggccaagugcaacgagaagcacgacgaggaguucugcgacaugcugagacuguucgacuucaacaagcaggccaucagaagacugaagacccccgcccagaugagcauccagcugaucaacaaggccgugaacgcccugaucaacgaccagcugaucaugaagaaccaccugagagacaucaugugcauccccuacugcaacuacagcaaguacugguaccugaaccacaccgugaccggcaagaccagccugcccagaugcuggcuggugagcaacggcagcuaccugaacgagacccacuucagcgacgacaucgagcagcaggccgacaacaugaucaccgagcugcugcagaaggaguacauggacagacagggcaagaccccccugggccugguggaccuguucguguucagcaccagcuucuaccugaucagcaucuuccugcaccugaucaagauccccacccacagacacaucaccggcaagcccugccccaagccccacagacugaaccacaugggcaucugcagcugcggccuguacaagcaccccggcgugcccgugaaguggaagagaugaggacuaguaauaaggaaacuguaugaaugucugugggcaggaagugaagagauccuucuguaaagguuuuuggaauuaugucugcugaauaauaaacuuuuuugaaauaauaaaucugguagaaaaaugagaucuaaaaaaaaaaaaaaaaaaaaaaaaaaaaaaaaaaaaaaaaaaaaaaaaaaaaaaaaaaaaaaaaaaaaaaaaaaaaaaaaaaaaaaaaaaaaaaaaaaaa

SEQ ID NO: 16315 - RNA, 1785 nt, Artificial Sequence
  mRNA product Design b-4 (A100) comprising derived and/or modified sequence from LASV(LASV253-NIG-2011;Clade II)__AIT17670__GPCmut1 (opt4)
aggagagucccgcagucggcguccagcggcucugcuuguucgugugugugucguugcaggccuuauucaagcuuaccaugggccagaucaucaccuucuuccaggaggugccccacgugaucgaggaggugaugaacaucgugcugaucgcccugagccugcuggccauccugaagggcaucuacaacguggccaccugcggccuguucggccuggugagcuuccugcugcugugcggcagaagcugcagcaccaccuacaagggcguguacgagcugcagacccuggagcuggacauggccagccugaacaugaccaugccccugagcugcaccaagaacaacagccaccacuacaucauggugggcaacgagaccggccuggagcugacccugaccaacaccagcaucaucaaccacaaguucugcaaccugagcgacgcccacaagaagaaccuguacgaccacgcccugaugagcaucaucagcaccuuccaccugagcauccccaacuucaaccaguacgaggccaugagcugcgacuucaacggcggcaagaucagcgugcaguacaaccugagccacaccuacgccguggacgccgccaaccacugcggcaccaucgccaacggcgugcugcagaccuucaugagaauggccuggggcggcagcuacaucgcccuggacagcggcugcggcagcugggacugcaucaugaccagcuaccaguaccugaucauccagaacaccaccugggaggaccacugccaguucagcagacccagccccaucggcuaccugggccugcugagccagagaaccagagacaucuacaucagcagaagacgccggggcaccuucaccuggacccugagcgacagcgagggcaacgagacccccggcggcuacugccugaccagauggaugcugaucgaggccgagcugaagugcuucggcaacaccgccguggccaagugcaacgagaagcacgacgaggaguucugcgacaugcugagacuguucgacuucaacaagcaggccaucagaagacugaaggcccccgcccagaugagcauccagcugaucaacaaggccgugaacgcccugaucaacgaccagcugaucaugaagaaccaccugagagacaucaugugcauccccuacugcaacuacagcaaguacugguaccugaaccacaccgugaccggcagaaccagccugcccagaugcuggcuggugagcaacggcagcuaccugaacgagacccacuucagcgacgacaucgagcagcaggccgacaacaugaucaccgagcugcugcagaaggaguacaucgacagacagggcaagaccccccugggccugguggaccuguucguguucagcaccagcuucuaccugaucagcaucuuccugcaccuggugaagauccccacccacagacacaucaucggcaagcccugccccaagccccacagacugaaccacaugggcaucugcagcugcggccuguacaagcaccccggcgugcccgugaaguggaagagaugaggacuaguaauaaggaaacuguaugaaugucugugggcaggaagugaagagauccuucuguaaagguuuuuggaauuaugucugcugaauaauaaacuuuuuugaaauaauaaaucugguagaaaaaugagaucuaaaaaaaaaaaaaaaaaaaaaaaaaaaaaaaaaaaaaaaaaaaaaaaaaaaaaaaaaaaaaaaaaaaaaaaaaaaaaaaaaaaaaaaaaaaaaaaaaaaa

SEQ ID NO: 16316 - RNA, 1785 nt, Artificial Sequence
  mRNA product Design b-4 (A100) comprising derived and/or modified sequence from LASV(LASV254-NIG-2011;Clade II)__AIT17674__GPCmut1 (opt4)
aggagagucccgcagucggcguccagcggcucugcuuguucgugugugugucguugcaggccuuauucaagcuuaccaugggccagaucaucaccuucuuccaggaggugccccacgugaucgaggaggugaugaacaucgugcugaucgcccugagccugcuggccauccugaagggcaucuacaacguggccaccugcggccuguucggccuggugagcuuccugcugcugugcggcagaagcugcagcaccaccuacaagggcguguacgagcugcagacccuggagcuggacaugaccaaccugaacaugaccaugccccugagcugcaccaagaacaacagccaccacuacaucauggugggcaacgagaccggccuggagcugacccugaccaacaccagcaucaucaaccacaaguucugcaaccugagcgacgcccacaagaagaaccuguacaaccacgcccugaugagcaucaucagcaccuuccaccugagcauccccaacuucaaccaguacgaggccaugagcugcgacuucaacggcggcaagaucagcgugcaguacaaccugagccacagcuacgccguggacgccgccaaccacugcggcaccaucgccaacggcgugcugcagaccuucaugagaauggccuggggcggcagcuacaucgcccuggacagcggcugcggcaacugggacugcaucaugaccagcuaccaguaccugaucauccagaacaccaccugggaggaccacugccaguucagcagacccagccccaucggcuaccugggccugcugagccagagaaccagagacaucuacaucagcagaagacgccggggcaccuucaccuggacccugagcgacagcgagggcaacgagacccccggcggcuacugccugaccagauggaugcugaucgaggccgagcugaagugcuucggcaacaccgccguggccaagugcaacgagaagcacgacgaggaguucugcgacaugcugagacuguucgacuucaacaagcaggccaucagaagacugaagacccccgcccaggccaacauccagcugaucaacaaggccgugaacgcccugaucaacgaccagcugaucaugaagaaccaccugagagacaucaugugcauccccuacugcaacuacagcaaguacugguaccugaaccacaccgugaccggcaagaccagccugcccagaugcuggcuggugagcaacggcagcuaccugaacgagacccacuucagcgacgacaucgagcagcaggccgacaacaugaucaccgagcugcugcagaaggaguacauggacagacagggcaagaccccccugggccugguggaccuguucguguucagcaccagcuucuaccugaucagcaucuuccugcaccuggugaagauccccacccacagacacgugaucggcaagcccugccccaagccccacagacugaaccacaugggcaucugcagcugcggccuguacaagcaccccggcgugcccgugaaguggaagagaugaggacuaguaauaaggaaacuguaugaaugucugugggcaggaagugaagagauccuucuguaaagguuuuuggaauuaugucugcugaauaauaaacuuuuuugaaauaauaaaucugguagaaaaaugagaucuaaaaaaaaaaaaaaaaaaaaaaaaaaaaaaaaaaaaaaaaaaaaaaaaaaaaaaaaaaaaaaaaaaaaaaaaaaaaaaaaaaaaaaaaaaaaaaaaaaaa

SEQ ID NO: 16317 - RNA, 1785 nt, Artificial Sequence
  mRNA product Design b-4 (A100) comprising derived and/or modified sequence from LASV(Nig08-A19;Clade III)__ADU56618__GPCmut1 (opt4)
aggagagucccgcagucggcguccagcggcucugcuuguucgugugugugucguugcaggccuuauucaagcuuaccaugggccagaucgugaccuucuuccaggaggugccccacgugaucgaggaggugaugaacaucgugcugaucgcccugagcauccuggccauccugaagggccuguacaacaucgccaccugcggccugaucggccuggugaccuuccugcugcugagcggcagaagcugcagcaugaccuacaagggcguguacgagcugcagacccuggagcugaacaugaacacccugaacaugaccaugccccugagcugcaccaagaacaacagccaccacuacaucauggugggcaacgagaccggccuggagcugacccugaccaacaccagccugcugcaccacaaguucugcaaccugagcgacgcccacaagaagaaccuguacgaccacacccugaugagcaucaucagcaccuuccaccugagcauccccaacuucaaccaguacgaggccaugagcugcgacuucaacggcggcaagaucaccgugcaguacaaccugagccacagcuacgccaucgacgccgccaaccacugcggcaccguggccaacggcgugcugcagaccuucaugagaauggccuggggcggcagcuacaucgcccuggacagcggcugcggcaagugggacugcaucaugaccagcuaccaguaccugaucauccagaacaccaccugggaggaccacugccaguucagcagacccagccccaucggcuaccugggccugcugagccagagaaccagagacaucuacaucagcagaagacgccggggcaccuucaccuggacccugagcgacagcgagggcaacgagacccccggcggcuacugccugaccagauggaugcugaucgaggccgagcugaagugcuucggcaacaccgccguggccaagugcaacgagaagcacgacgaggaguucugcgacaugcugagacuguucgacuucaacaagcaggccaucagaagacugaaggcccccgcccagaugagcauccagcugaucaacaaggccgugaacgcccugaucaacgaccagcugaucaugaagaaccaccugagagacaucaugugcauccccuacugcaacuacagcaaguacugguaccugaaccacaccagcaccggcagaaccagccugcccagaugcuggcuggugagcaacggcagcuaccugaacgagacccacuucagcgacgacaucgagcagcaggccgacaacaugaucaccgagaugcugcagaaggaguaccuggacagacagggcaagaccccccugggccugguggaccuguucguguucagcaccagcuucuaccugaucagcaucuuccugcaccuggugaagauccccacccacagacacaucgugggcaagcccugccccaagccccacagacugaaccacaugggcaucugcagcugcggccuguacaagcagcccggcgugcccgugagauggaagagaugaggacuaguaauaaggaaacuguaugaaugucugugggcaggaagugaagagauccuucuguaaagguuuuuggaauuaugucugcugaauaauaaacuuuuuugaaauaauaaaucugguagaaaaaugagaucuaaaaaaaaaaaaaaaaaaaaaaaaaaaaaaaaaaaaaaaaaaaaaaaaaaaaaaaaaaaaaaaaaaaaaaaaaaaaaaaaaaaaaaaaaaaaaaaaaaaa

SEQ ID NO: 16318 - RNA, 1788 nt, Artificial Sequence
  mRNA product Design b-4 (A100) comprising derived and/or modified sequence from LASV(G1180-SLE-2010;Clade IV)__AIT17168__GPCmut1 (opt4)
aggagagucccgcagucggcguccagcggcucugcuuguucgugugugugucguugcaggccuuauucaagcuuaccaugggccagaucgugaccuucuuccaggaggugccccacgugaucgaggaggugaugaacaucgugcugaucgcccugagcauccuggccgugcugaagggccuguacaacuucgccaccugcggccuggugggccugcugaccuuccugcugcugugcggcagaagcugcaccgccagcagauacaagggcguguacgagcugcagacccuggagcugaacauggagacccugaacaugaccaugccccugagcugcaccaagaacaacagccaccacuacaucauggugggcaacgagaccggccuggagcugacccugaccaacaccagcaucaucaaccacaaguucugcaaccugagcgacgcccacaagaagaaccuguacgaccacgcccugaugagcaucaucagcaccuuccaccugagcauccccaacuucaaccaguacgaggccaugagcugcgacuucaacggcggcaagaucagcgugcaguacaaccugagccacagcuacgccggcgacgccgccaaccacugcggcaccguggccaacggcgugcugcagaccuucaugagaauggccuggggcggcagcuacaucgcccuggacagcggcugcggcagcugggacugcaucaugaccagcuaccaguaccugaucauccagaacaccaccugggaggaccacugccaguucagcagacccagccccaucggcuaccugggccugcugagccagagaaccagagacaucuacaucagcagaagacgccggggcaccuucaccuggacccugagcgacagcgagggcaaggacacccccggcggcuacugccugaccagauggaugcugaucgaggccgagcugaagugcuucggcaacaccgccguggccaagugcaacgagaagcacgacgaggaguucugcgacaugcugagacuguucgacuucaacaagcaggccauccagagacugaaggcccccgcccagaugagcauccagcugaucaacaaggccgugaacgcccugaucaacgaccagcugaucaugaagaaccaccugagagacaucaugugcauccccuacugcaacuacagcaaguacugguaccugaaccacaccaccaccggcaagaccagccugcccaagugcuggcuggugagcaacggcagcuaccugaacgagacccacuucagcgacgacaucgagcagcaggccgacaacaugaucaccgagaugcugcagaaggaguacauggagagacagggcaagaccccccugggccugguggaccuguucguguucagcaccagcuucuaccugaucagcaucuuccugcaccuggugaagauccccacccacagacacaucgugggcaagagcugccccaagccccacagacugaaccacaugggcaucugcagcugcggccuguacaagcagcccggcgugcccgugaaguggaagagaugaggacuaguaauaaggaaacuguaugaaugucugugggcaggaagugaagagauccuucuguaaagguuuuuggaauuaugucugcugaauaauaaacuuuuuugaaauaauaaaucugguagaaaaaugagaucuaaaaaaaaaaaaaaaaaaaaaaaaaaaaaaaaaaaaaaaaaaaaaaaaaaaaaaaaaaaaaaaaaaaaaaaaaaaaaaaaaaaaaaaaaaaaaaaaaaaa

SEQ ID NO: 16319 - RNA, 1788 nt, Artificial Sequence
  mRNA product Design b-4 (A100) comprising derived and/or modified sequence from LASV(G1442-SLE-2011;Clade IV)__AIT17180__GPCmut1 (opt4)
aggagagucccgcagucggcguccagcggcucugcuuguucgugugugugucguugcaggccuuauucaagcuuaccaugggccagaucgugaccuucuuccaggaggugccccacgugaucgaggaggugaugaacaucgugcugaucgcccugagcauccuggccgugcugaagggccuguacaacguggccaccugcggccugaucggccuggugaccuuccugcugcugugcggcagaagcugcaccaccacccuguacaagggcguguacgagcugcagacccuggagcugaacauggagacccugaacaugaccaugccccugagcugcaccaagaacaacagccaccacuacaucagagugggcaacgagaccggccuggagcugacccugaccaacaccagcaucaucaaccacaaguucugcaaccugagcgacgcccacaagaagaaccuguacgaccacgcccugaugagcaucaucagcaccuuccaccugagcauccccaacuucaaccaguacgaggccaugagcugcgacuucaacggcggcaagaucagcgugcaguacaaccugagccacagcuacgccggcgacgccgccaaccacugcggcaccguggccaacggcgugcugcagaccuucaugagaauggccuggggcggcagcuacaucgcccuggacagcggcugcggcaacugggacugcaucaugaccagcuaccaguaccugaucauccagaacaccaccugggacgaccacugccaguucagcagacccagccccaucggcuaccugggccugcugagccagagaaccagagacguguacaucagcagaagacgccggggcaccuucaccuggacccugagcgacagcgagggcaaggacacccccggcggcuacugccugaccagauggaugcugaucgaggccgagcugaagugcuucggcaacaccgccguggccaagugcaacgagaagcacgacgaggaguucugcgacaugcugagacuguucgacuucaacaagcaggccauccagagacugaaggcccccgcccagaugagcauccagcugaucaacaaggccgugaacgcccugaucaacgaccagcugaucaugaagaaccaccugagagacaucaugugcauccccuacugcaacuacagcaaguacugguaccugaacaacaccgccaccggcaagaccagccugcccaagugcuggcugaucagcaacggcagcuaccugaacgagacccacuucagcgacgacaucgagcaggaggccgacaacaugaucaccgagaugcugcagaaggaguacauggagagacagggcaagaccccccugggccugguggaccuguucguguucagcaccagcuucuaccugaucagcaucuuccugcaccuggugaagauccccacccacagacacaucgugggcaagagcugccccaagccccacagacugaaccacaugggcaucugcagcugcggccuguacaagcagcccggcgugcccgugagauggaagagaugaggacuaguaauaaggaaacuguaugaaugucugugggcaggaagugaagagauccuucuguaaagguuuuuggaauuaugucugcugaauaauaaacuuuuuugaaauaauaaaucugguagaaaaaugagaucuaaaaaaaaaaaaaaaaaaaaaaaaaaaaaaaaaaaaaaaaaaaaaaaaaaaaaaaaaaaaaaaaaaaaaaaaaaaaaaaaaaaaaaaaaaaaaaaaaaaa

SEQ ID NO: 16320 - RNA, 1788 nt, Artificial Sequence
  mRNA product Design b-4 (A100) comprising derived and/or modified sequence from LASV(G3010-SLE-2013;Clade IV)__AIT17344__GPCmut1 (opt4)
aggagagucccgcagucggcguccagcggcucugcuuguucgugugugugucguugcaggccuuauucaagcuuaccaugggccagaucgugaccuucuuccaggaggugccccacgugaucgaggaggugaugaacaucgugcugaucgcccugagcauccuggccgugcugaagggccuguacaacuucgccaccugcggccuggugggccuggugaccuuccugcugcugugcggcagaagcugcaccaccagccuguacaagggcguguacgagcugcagacccuggagcugaacauggagacccugaacaugaccaugccccugagcugcaccaagaacaacagccaccacuacaucauggugggcaacgagaccggccuggagcugacccugaccaacaccagcaucaucaaccacaaguucugcaaccugagcgacgcccacaagaagaaccuguacaaccacgcccugaugagcaucaucagcaccuuccaccugagcauccccaacuucaaccaguacgaggccaugagcugcgacuucaacggcggcaagaucagcgugcaguacaaccugagccacagcuacgccggcgacgccgccagccacugcggcaccguggccaacggcgugcugcagaccuucaugagaauggccuggggcggcagcuacaucgcccuggacagcggcugcggcaagugggacugcaucaugaccagcuaccaguaccugaucauccagaacaccaccugggaggaccacugccaguucagcagacccagccccaucggcuaccugggccugcugagccagagaaccagagacaucuacaucagcagaagacgccggggcaccuucaccuggacccugagcgacagcgagggcaaggacacccccggcggcuacugccugaccagauggaugcugaucgaggccgagcugaagugcuucggcaacaccgccguggccaagugcaacgagaagcacgacgaggaguucugcgacaugcugagacuguucgacuucaacaagcaggccauccagagacugaagacccccgcccagaugagcauccagcugaucaacaaggccgugaacgcccugaucaacgaccagcugaucaugaagaaccaccugagagacaucaugugcauccccuacugcaacuacagcaaguacugguaccugaaccacaccaccaccggcaagaccagccugcccaagugcuggcuggugagcaacggcagcuaccugaacgagacccacuucagcgacgacaucgagcagcaggccgacaacaugaucaccgagaugcugcagaaggaguacauggagagacagggcaagaccccccugggccugguggaccuguucguguucagcaccagcuucuaccugaucagcaucuuccugcaccuggugaagauccccacccacagacacaucgugggcaagagcugccccaagccccacagacugaaccacaugggcaucugcagcugcggccuguacaagcagcccggcgugcccgugagauggaagagaugaggacuaguaauaaggaaacuguaugaaugucugugggcaggaagugaagagauccuucuguaaagguuuuuggaauuaugucugcugaauaauaaacuuuuuugaaauaauaaaucugguagaaaaaugagaucuaaaaaaaaaaaaaaaaaaaaaaaaaaaaaaaaaaaaaaaaaaaaaaaaaaaaaaaaaaaaaaaaaaaaaaaaaaaaaaaaaaaaaaaaaaaaaaaaaaaa

SEQ ID NO: 16321 - RNA, 1788 nt, Artificial Sequence
  mRNA product Design b-4 (A100) comprising derived and/or modified sequence from LASV(G502-SLE-2009;Clade IV)__AIT17126__GPCmut1 (opt4)
aggagagucccgcagucggcguccagcggcucugcuuguucgugugugugucguugcaggccuuauucaagcuuaccaugggccagaucgugaccuucuuccaggaggugccccacgugaucgaggaggugaugaacaucgugcugaucgcccugagcauccuggccgugcugaagggccuguacaacuucgccaccugcggccuggugggccugcugaccuuccugcugcugugcggcagaagcugcaccaccggccuguacaagggcguguacgagcugcagacccuggagcugaacauggagacccugaacaugaccaugccccugagcugcaccaagaacaacagccaccacuacaucauggugggcaacgagaccggccuggagcugacccugaccaacaccagcaucaucaaccacaaguucugcaaccugagcgacgcccacaagaagaaccuguacgaccacgcccugaugagcaucaucagcaccuuccaccugagcauccccaacuucaaccaguacgaggccaugagcugcgacuucaacggcggcaagaucagcgugcaguacaaccugagccacagcuacgccggcgacgccgccgaccacugcggcaccguggccaacggcgugcugcagaccuucaugagaauggccuggggcggcagcuacaucgcccuggacagcggcugcggcagaugggacugcaucaugaccagcuaccaguaccugaucauccagaacaccaccugggaggaccacugccaguucagcagacccagccccaucggcuaccugggccugcugagccagagaaccagagacaucuacaucagcagaagacgccggggcaccuucaccuggacccugagcgacagcgagggcaaggacacccccggcggcuacugccugaccagauggaugcugaucgaggccgagcugaagugcuucggcaacaccgccguggccaagugcaacgagaagcacgacgaggaguucugcgacaugcugagacuguucgacuucaacaagcaggccauccagagacugaaggcccccgcccagaugagcauccagcugaucaacaaggccgugaacgcccugaucaacgaccagcuggugaugaagaaccaccugagagacaucaugugcauccccuacugcaacuacagcagauacugguaccugaaccacaccaccaccggcagaaccagccugcccaagugcuggcuggugagcaacggcagcuaccugaacgagacccacuucagcgacgacaucgagcagcaggccgacaacaugaucaccgagaugcugcagaaggaguacauggagagacagggcaagaccccccugggccugguggaccuguucguguucagcaccagcuucuaccugaucagcaucuuccugcaccuggugaagauccccacccacagacacaucgugggcaagagcugccccaagccccacagacugaaccacaugggcaucugcagcugcggccuguacaagcagcccggcgugcccgugaaguggaagagaugaggacuaguaauaaggaaacuguaugaaugucugugggcaggaagugaagagauccuucuguaaagguuuuuggaauuaugucugcugaauaauaaacuuuuuugaaauaauaaaucugguagaaaaaugagaucuaaaaaaaaaaaaaaaaaaaaaaaaaaaaaaaaaaaaaaaaaaaaaaaaaaaaaaaaaaaaaaaaaaaaaaaaaaaaaaaaaaaaaaaaaaaaaaaaaaaa

SEQ ID NO: 16322 - RNA, 1788 nt, Artificial Sequence
  mRNA product Design b-4 (A100) comprising derived and/or modified sequence from LASV(G733-SLE-2010;Clade IV)__AIT17154__GPCmut1 (opt4)
aggagagucccgcagucggcguccagcggcucugcuuguucgugugugugucguugcaggccuuauucaagcuuaccaugggccagaucgugaccuucuuccaggaggugccccacgugaucgaggaggugaugaacaucgugcugaucgcccugagcauccuggccgugcugaagggccuguacaacuucgccaccugcggcaucgugggccuggugagcuuccugcugcugugcggcagaagcugcaccaccagccuguacaagggcguguacgagcugcagacccuggagcugaacauggagacccugaacaugaccaugccccugagcugcaccaagaacaacagccaccacuacaucauggugggcaacgagaccggccuggagcugacccugaccaacaccagcaucaucaaccacaaguucugcaaccugagcgacgcccacaagaagaaccuguacgaccacgcccugaugagcaucaucagcaccuuccaccugagcauccccaacuucaaccaguacgaggccaugagcugcgacuucaacggcggcaagaucagcgugcaguacaaccugagccacagcuacgccggcgacgccgccaaccacugcggcaccaucgccaacggcgugcugcagaccuucaugagaauggccuggggcggcagcuacaucgcccuggacagcggcugcgacagaugggacugcaucaugaccagcuaccaguaccugaucauccagaacaccaccugggaggaccacugccaguucagcagacccagccccaucggcuaccugggccugcugagccagagaaccagagacaucuacaucagcagaagacgccggggcaccuucaccuggacccugagcgacagcgagggcaaggacacccccggcggcuacugccugaccagauggaugcugaucgaggccgagcugaagugcuucggcaacaccgccguggccaagugcaacgagaagcacgacgaggaguucugcgacaugcugagacuguucgacuucaacaagcaggccauccagagacugaaggcccccgcccagaugagcauccagcugaucaacaaggccgugaacgcccugaucaacgaccagcugaucaugaagaaccaccugagagacaucaugugcauccccuacugcaacuacagcaaguacugguaccugaaccacaccaccaccggcaagaccagccugcccaagugcuggcuggugagcaacggcagcuaccugaacgagacccacuucagcgacgacaucgagcagcaggccgacaacaugaucaccgagaugcugcagaaggaguacauggagagacagggcaagaccccccugggccugguggaccuguucguguucagcaccagcuucuaccugaucagcaucuuccugcaccuggugaagauccccacccacagacacguggugggcaagagcugccccaagccccacagacugaaccacaugggcaucugcagcugcggccuguacggccagcccggcgugcccgugaaguggaagagaugaggacuaguaauaaggaaacuguaugaaugucugugggcaggaagugaagagauccuucuguaaagguuuuuggaauuaugucugcugaauaauaaacuuuuuugaaauaauaaaucugguagaaaaaugagaucuaaaaaaaaaaaaaaaaaaaaaaaaaaaaaaaaaaaaaaaaaaaaaaaaaaaaaaaaaaaaaaaaaaaaaaaaaaaaaaaaaaaaaaaaaaaaaaaaaaaa

SEQ ID NO: 16323 - RNA, 1788 nt, Artificial Sequence
  mRNA product Design b-4 (A100) comprising derived and/or modified sequence from MOPV/LASV reassortant(IGS-1;Clade IV)__AFY05576__GPCmut1 (opt4)
aggagagucccgcagucggcguccagcggcucugcuuguucgugugugugucguugcaggccuuauucaagcuuaccaugggccagaucgugaccuucuuccaggaggugccccacgugaucgaggaggugaugaacaucgugcugaucgcccugagcgugcuggccgugcugaagggccuguacaacuucgccaccugcggccuggugggccuggugaccuuccugcugcugugcggcagaagcugcaccaccagccuguacaagggcguguacgagcugcagacccuggagcugaacauggagacccugaacaugaccaugccccugagcugcaccaagaacaacagccaccacuacaucauggugggcaacgagaccggccuggagcugacccugaccaacaccagcaucaucaaccacaaguucugcaaccugagcgacgcccacaagaagaaccuguacgaccacgcccugaugagcaucaucagcaccuuccaccugagcauccccaacuucaaccaguacgaggccaugagcugcgacuucaacggcggcaagaucagcgugcaguacaaccugagccacagcuacgccggcgacgccgccaaccacugcggcaccguggccaacggcgugcugcagaccuucaugagaauggccuggggcggcagcuacaucgcccuggacagcggcugcggcaacugggacugcaucaugaccagcuaccaguaccugaucauccagaacaccaccugggaggaccacugccaguucagcagacccagccccaucggcuaccugggccugcugagccagagaaccagagacaucuacaucagcagaagacgccggggcaccuucaccuggacccugagcgacagcgagggcgaggacacccccggcggcuacugccugaccagauggaugcugaucgaggccgagcugaagugcuucggcaacaccgccguggccaagugcaacgagaagcacgacgaggaguucugcgacaugcugagacuguucgacuucaacaagcaggccauccagagacugaaggcccccgcccagaugagcauccagcugaucaacaaggccgugaacgcccugaucaacgaccagcugaucaugaagaaccaccugagagacaucaugugcauccccuacugcaacuacagcaaguacugguaccugaaccacaccaccaccggcagaaccagccugcccaagugcuggcuggugagcaacggcagcuaccugaacgagacccacuucagcgacgacaucgagcagcaggccgacaacaugaucaccgagaugcugcagaaggaguacauggagagacagggcaagaccccccugggccugguggaccuguucguguucagcaccagcuucuaccugaucagcaucuuccugcaccuggugaagauccccacccacagacacaucgugggcaagagcugccccaagccccacagacugaaccacaugggcaucugcagcugcggccuguacaagcagcccggcgugcccgugaaguggaagagaugaggacuaguaauaaggaaacuguaugaaugucugugggcaggaagugaagagauccuucuguaaagguuuuuggaauuaugucugcugaauaauaaacuuuuuugaaauaauaaaucugguagaaaaaugagaucuaaaaaaaaaaaaaaaaaaaaaaaaaaaaaaaaaaaaaaaaaaaaaaaaaaaaaaaaaaaaaaaaaaaaaaaaaaaaaaaaaaaaaaaaaaaaaaaaaaaa

SEQ ID NO: 16324 - RNA, 1788 nt, Artificial Sequence
  mRNA product Design b-4 (A100) comprising derived and/or modified sequence from LASV(LM765-SLE-2012;Clade IV)__AIT17814__GPCmut1 (opt4)
aggagagucccgcagucggcguccagcggcucugcuuguucgugugugugucguugcaggccuuauucaagcuuaccaugggccagaucgugaccuucuuccaggaggugccccacgugaucgaggaggugaugaacaucgugcugaucgcccugagcauccuggccgugcugaagggccuguacaacuucgccaccugcggccuggugggccuggugaccuuccugcugcugugcggcagaagcugcaccaccagccuguacaagggcguguacgagcugcagacccuggagcugaacauggagacccugaacaugaccaugccccugagcugcaccaagaacaacagccaccacuacaucauggugggcaacgagaccggccuggagcugacccugaccaacaccagcaucaucgaccacaaguucugcaaccugagcgacgcccacagaaagaaccuguacgaccacgcccugaugagcaucaucagcaccuuccaccugagcauccccaacuucaaccaguacgaggccaugagcugcgacuucaacggcggcaagaucagcgugcaguacaaccugagccacagcuacgccaaggacgccgccgaccacugcggcaccguggccaacggcgugcugcagaccuucaugagaauggccuggggcggcagcuacaucgcccuggacagcggcugcggcagaugggacugcaucaugaccagcuaccaguaccugaucauccagaacaccaccugggaggaccacugccaguucagcagacccagccccaucggcuaccugggccugcugagccagagaaccagagacaucuacaucagcagaagacgccggggcaccuucaccuggacccugagcgacagcgagggcaaggacacccccggcggcuacugccugaccagauggaugcugaucgaggccgagcugaagugcuucggcaacaccgccguggccaagugcaacgagaagcacgacgaggaguucugcgacaugcugagacuguucgacuucaacaagcaggccauccagagacugaaggcccccgcccagaugagcauccagcugaucaacaaggccgugaacgcccugaucaacgaccagcugaucaugaagaaccaccugagagacaucaugugcauccccuacugcaacuacagcaaguacugguaccugaaccacaccaccaccggcaagaccagccugcccaagugcuggcuggugagcaacggcagcuaccugaacgagacccacuucagcgacgacaucgagcagcaggccgacaacaugaucaccgagaugcugcagaaggaguacauggagagacagggcaagaccccccugggccugguggaccuguucguguucagcaccagcuucuaccugaucagcaucuuccugcaccuggugaagauccccacccacagacacaucgugggcaagcccugccccaagccccacagacugaaccacaugggcaucugcagcugcggccuguacaagcagcccggcgugcccgugaaguggaagagaugaggacuaguaauaaggaaacuguaugaaugucugugggcaggaagugaagagauccuucuguaaagguuuuuggaauuaugucugcugaauaauaaacuuuuuugaaauaauaaaucugguagaaaaaugagaucuaaaaaaaaaaaaaaaaaaaaaaaaaaaaaaaaaaaaaaaaaaaaaaaaaaaaaaaaaaaaaaaaaaaaaaaaaaaaaaaaaaaaaaaaaaaaaaaaaaaa

SEQ ID NO: 16325 - RNA, 1788 nt, Artificial Sequence
  mRNA product Design b-4 (A100) comprising derived and/or modified sequence from LASV(LM776-SLE-2012;Clade IV)__AIT17824__GPCmut1 (opt4)
aggagagucccgcagucggcguccagcggcucugcuuguucgugugugugucguugcaggccuuauucaagcuuaccaugggccagaucgugaccuucuuccaggaggugccccacgugaucgaggaggugaugaacaucgugcugaucgcccugagcauccuggccgugcugaagggccuguacaacuucgccaccugcggccuggugggccuggugaccuuccugcugcugugcggcagaagcugcaccaccagcguguacaagggcguguacgagcugcagacccuggagcugaacauggagacccugaacaugaccaugccccugagcugcaccaagaacaacagccaccacuacaucauggugggcaacgagaccggccuggagcugacccugaccaacaccagcaucaucaaccacaaguucugcaaccugagcgacgcccacaagaagaaccuguacgaccacgcccugaugagcaucaucagcaccuuccaccugagcauccccaacuucaaccaguacgaggccaugagcugcgacuucaacggcggcaagaucagcgugcaguacaaccugagccacagcuacgccggcgacgccgccaaccacugcggcaccguggccaacggcgugcugcagaccuucaugagaauggccuggggcggcagcuacaucgcccuggacagcggcugcggcaagugggacugcaucaugaccagcuaccaguaccugaucauccagaacaccaccugggaggaccacugccaguucagcagacccagccccaucggcuaccugggccugcugagccagagaaccagagacaucuacaucagcagaagacgccggggcaccuucaccuggacccugagcgacagcgagggcaaggacacccccggcggcuacugccugaccagauggaugcugaucgaggccgagcugaagugcuucggcaacaccgccguggccaagugcaacgagaagcacgacgaggaguucugcgacaugcugagacuguucgacuucaacaagcaggccauccagagacugaaggcccccgcccagaugagcauccagcugaucaacaaggccgugaacgcccugaucaacgaccagcugaucaugaagaaccaccugagagacaucaugugcauccccuacugcaacuacagcaaguacugguaccugaaccacaccaccaccggcaagaccagccugcccaagugcuggcuggugagcaacggcagcuaccugaacgagacccacuucagcgacgacaucgagcagcaggccgacaacaugaucaccgagaugcugcagaaggaguacauggagagacagggcaagaccccccugggccugguggaccuguucguguucagcaccagcuucuaccugaucagcaucuuccugcaccuggugaagauccccacccacagacacaucgugggcaagagcugccccaagccccacagacugaaccacaugggcaucugcagcugcggccuguacaagcagcccggcgugcccgugagauggaagagaugaggacuaguaauaaggaaacuguaugaaugucugugggcaggaagugaagagauccuucuguaaagguuuuuggaauuaugucugcugaauaauaaacuuuuuugaaauaauaaaucugguagaaaaaugagaucuaaaaaaaaaaaaaaaaaaaaaaaaaaaaaaaaaaaaaaaaaaaaaaaaaaaaaaaaaaaaaaaaaaaaaaaaaaaaaaaaaaaaaaaaaaaaaaaaaaaa

SEQ ID NO: 16326 - RNA, 1788 nt, Artificial Sequence
  mRNA product Design b-4 (A100) comprising derived and/or modified sequence from LASV(Mad39;Clade IV)__ANH09722__GPCmut1 (opt4)
aggagagucccgcagucggcguccagcggcucugcuuguucgugugugugucguugcaggccuuauucaagcuuaccaugggccagaucgugaccuucuuccaggaggugccccacgugaucgaggaggugaugaacaucgugcugaucgcccugagcauccuggccgugcugaagggccuguacaacguggccaccugcggccugaucggccuggugaccuuccugcugcugugcggcagaagcugcaccaccacccuguacaagggcguguacgagcugcaggcccuggagcugaacauggagacccugaacaugaccaugccccugagcugcaccaagaacaacagccaccacuacaucagagugggcaacgagaccggccuggagcugacccugaccaacaccagccugaucaaccacaaguucugcaaccugagcgacgcccacaagaagaaccuguacgaccacgcccugaugagcaucaucagcaccuuccaccugagcauccccaacuucaaccaguacgaggccaugagcugcgacuucaacgacggcaagaucagcgugcaguacaaccugagccacaccuacgccggcgacaccgccaaccacugcggcaccguggccaacggcgugcugcagaccuucaugagaauggccuggggcggcagcuacaucgcccuggacagcggcugcggcggcugggacugcaucaugaccagcuaccaguaccugaucauccagaacaccaccugggaggaccacugccaguucagcagacccagccccaucggcuaccugggccugcugagccagagaaccagagacaucuacaucagcagaagacgccggggcaccuucaccuggacccugagcgacagcgagggcaaggacacccccggcggcuacugccugaccagauggaugcugaucgaggccgagcugaagugcuucggcaacaccgccguggccaagugcaacgagaagcacgacgaggaguucugcgacaugcugagacuguucgacuucaacaagcaggccauccagagacugaaggcccccgcccagaugagcauccagcugaucaacaaggccgugaacgcccugaucaacgaccagcugaucaugaagaaccaccugagagacaucaugugcauccccuacugcaacuacagcaaguacugguaccugaaccacaccgugaccggcaagaccagccugcccaagugcuggcuggugagcaacggcagcuaccugaacgagacccacuucagcgacgacaucgagcagcaggccgacaacaugaucaccgagaugcugcagaaggaguacauggagagacagggcaagaccccccugggccugguggaccuguucguguucagcaccagcuucuaccugaucagcaucuuccugcaccuggugaagauccccacccacagacacguggugggcaagcccugccccaagccccacagacugaaccacaugggcaucugcagcugcggcuucuacaagcagcccggcgugcccgugagauggaagagaugaggacuaguaauaaggaaacuguaugaaugucugugggcaggaagugaagagauccuucuguaaagguuuuuggaauuaugucugcugaauaauaaacuuuuuugaaauaauaaaucugguagaaaaaugagaucuaaaaaaaaaaaaaaaaaaaaaaaaaaaaaaaaaaaaaaaaaaaaaaaaaaaaaaaaaaaaaaaaaaaaaaaaaaaaaaaaaaaaaaaaaaaaaaaaaaaa

SEQ ID NO: 16327 - RNA, 1788 nt, Artificial Sequence
  mRNA product Design b-4 (A100) comprising derived and/or modified sequence from LASV(Z0947-SLE-2011;Clade IV)__AIT17840__GPCmut1 (opt4)
aggagagucccgcagucggcguccagcggcucugcuuguucgugugugugucguugcaggccuuauucaagcuuaccaugggccagaucgugaccuucuuccaggaggugccccacgugaucgaggaggugaugaacaucgugcugaucgcccugagcauccuggccgugcugaagggccuguacaacuucgccaccugcggccuggugggccuggugaccuuccugcugcugugcggcagaagcugcaccaucagccuguacaagggcguguacgagcugcagacccuggagcugaacauggagacccugaacaugaccaugccccugagcugcaccaagaacaacagccaccacuacaucauggugggcaacgagaccggccuggagcugacccugaccaacaccagcaucaucaaccacaaguucugcaaccugagcgacgcccacaagaagaaccuguacgaccacgcccugaugagcaucaucagcaccuuccaccugagcauccccaacuucaaccaguacgaggccaugagcugcgacuucaacggcggcaagaucagcgugcaguacaaccugagccacagcuacgccggcgacgccgccaaccacugcggcaccguggccaacggcgugcugcagaccuucaugagaauggccuggggcggcagcuacaucgcccuggacagcggcugcgacagaugggacugcaucaugaccagcuaccaguaccugaucauccagaacaccaccugggaggaccacugccaguucagcagacccagccccaucggcuaccugggccugcugagccagagaaccagagacaucuacaucagcagaagacgccggggcaccuucaccuggacccugagcgacagcgagggcaaggacacccccggcggcuacugccugaccagauggaugcugaucgaggccgagcugaagugcuucggcaacaccgccguggccaagugcaacgagaagcacgacgaggaguucugcgacaugcugagacuguucgacuucaacaagcaggccauccagagacugaaggcccccgcccagaugagcauccagcugaucaacaaggccgugaacgcccugaucaacgaccagcugaucaugaagaaccaccugagagacaucaugugcauccccuacugcaacuacagcaaguacugguaccugaaccacaccaccaccggcaagaccagccugcccaagugcuggcuggugagcaacggcagcuaccugaacgagacccacuucagcgacgacaucgagcagcaggccgacaacaugaucaccgagaugcugcagaaggaguacauggagagacagggcaagaccccccugggccugguggaccuguucguguucagcaccagcuucuaccugaucagcaucuuccugcaccuggugaagauccccacccacagacacaucgugggcaagcccugccccaagccccacagacugaaccacaugggcaucugcagcugcggccuguacaagcagcccggcgugcccgugaaguggaagagaugaggacuaguaauaaggaaacuguaugaaugucugugggcaggaagugaagagauccuucuguaaagguuuuuggaauuaugucugcugaauaauaaacuuuuuugaaauaauaaaucugguagaaaaaugagaucuaaaaaaaaaaaaaaaaaaaaaaaaaaaaaaaaaaaaaaaaaaaaaaaaaaaaaaaaaaaaaaaaaaaaaaaaaaaaaaaaaaaaaaaaaaaaaaaaaaaa

SEQ ID NO: 16328 - RNA, 1788 nt, Artificial Sequence
  mRNA product Design b-4 (A100) comprising derived and/or modified sequence from LASV(Josiah;Clade IV)__NP_694870__GPCmut1 (opt5)
aggagagucccgcagucggcguccagcggcucugcuuguucgugugugugucguugcaggccuuauucaagcuuaccaugggccagaucgugaccuucuuucaagaggucccccacguuauugaagaggugaugaacaucgugcugauugcccucagcguccuggcugugcuuaaggggcuguacaauuucgccacaugcggacucguuggccuggugacguuucuucugcucugugggagauccugcaccacaucucuguauaaaggagucuacgaacugcagacccucgagcugaacauggaaacacuuaauaugaccaugccucugagcuguacaaagaacaauucccaucacuauaucauggugggcaacgagaccgggcucgagcugacgcuuaccaauacaucuauuaucaaccauaaauucugcaaucugagcgacgcgcacaagaaaaaccucuacgaucaugcucugauguccaucauuucuaccuuucaccugagcaucccgaauuucaaccaguaugaagccauguccugugacuuuaauggaggcaagauuagcguucaguacaaccucucucacuccuaugccggcgaugcugccaaucauugcgggacaguggcuaacggaguccugcaaaccuucaugcggauggccuggggcgggagcuacaucgcgcuugacucuggaugcggcaacugggauuguauuaugacguccuaccaguaucugaucauucagaauacaaccugggaggaccacugccaguuuagcagacccucuccuaucggguaccucggacugcuuucccaacggacacgcgauaucuauauuagcagacggcgccggggcaccuucaccuggacacuguccgacucugaaggcaaggauacgcccgggggauacugucugacccgcuggaugcucaucgaggccgagcugaaaugcuuuggcaacacagcuguggccaaguguaaugaaaaacaugacgaggaguucugcgauaugcuuagacuguuugacuucaacaagcaggcuauucagcggcucaaagcccccgcgcagaugagcauccaacugauuaauaaggccgugaacgcucuuaucaaugaucagcugaucaugaagaaccaccuccgcgacauuaugugcaucccuuauugcaauuacuccaaauauugguaccugaaccacaccacaaccggaagaacgagccugcccaaguguuggcucgucucuaauggcuccuaccugaacgaaacacauuucagcgacgauauugagcagcaagccgacaauaugaucaccgagaugcuucagaaagaauauauggagcggcaggggaagaccccucugggacucguugaucuguuuguguucucuaccagcuuuuaccugauuuccaucuuccuucaccucgugaaaaucccgacacaucgccacauugucggcaagucuugccccaaaccucauagacugaaccacaugggcaucuguagcugcgggcuguauaagcagcccggagugccuguuaaguggaaacggugaggacuaguaauaaggaaacuguaugaaugucugugggcaggaagugaagagauccuucuguaaagguuuuuggaauuaugucugcugaauaauaaacuuuuuugaaauaauaaaucugguagaaaaaugagaucuaaaaaaaaaaaaaaaaaaaaaaaaaaaaaaaaaaaaaaaaaaaaaaaaaaaaaaaaaaaaaaaaaaaaaaaaaaaaaaaaaaaaaaaaaaaaaaaaaaaa

SEQ ID NO: 16329 - RNA, 1785 nt, Artificial Sequence
  mRNA product Design b-4 (A100) comprising derived and/or modified sequence from LASV(LP;Clade I)__AAF86701__GPCmut1 (opt5)
aggagagucccgcagucggcguccagcggcucugcuuguucgugugugugucguugcaggccuuauucaagcuuaccaugggccagaucauuaccuucuuucaagaggugccccacgucaucgaagagguuaugaacauugugcugaucgcccucagccugcuugcuauucugaaggggcucuacaauaucgccacaugcggaaucauuggccugguggcguuccuuuuucugugugggaaauccugcucucucacgcugaagggaggcuaugaacugcagacccucgagcugaacauggaaacacuuaauaugaccaugccucugagcuguaccaaaaacuccucucaucacuacaucagagucgggaaugagacaggacucgagcugacacuuaccaacacgagcauuaucaaucauaaguucugcaaccuguccgacgcucacaaaaagaaucucuaugaucaugcccugaugucuauuaucagcaccuuucaccuguccauuccgaacuucaaucaguacgaagccaugagcugugacuuuaacggcggcaagaucucugugcaguauaaucucucccacagcuacgcuggggaugccgcugagcauugcggaacaguugccaacggcgugcugcaaaccuucaugcggauggcguggggagggcgcuauaucgcccuugacucuggcugcgggaauugggauuguauuaugacauccuaccaguaccugaucauucagaacaccacgugggaagaccacugccaguuuagcagacccucuccuaucggauaucucggccugcuuucccaacggacacgcgauauuuacaucagcagacggcgccggggcaccuucacauggacccuguccgacucugaggggaacgagacccccggaggcuauugucugacacgcuggaugcucaucgaagcugagcugaagugcuuugggaauacggccgucgcuaaauguaacgaaaagcaugaugaggaguucugcgacaugcuuagacuguuugauuucaauaaacaggccauucggcgccucaaggcgcccgcccagaugagcauccagcugauuaacaaggcugugaaugcccuuaucaacgaccaacugauuaugaaaaaucaccucagagauaucaugugcaucccuuacugcaacuauuccaaguacugguaucugaaucacaccagcucuggccggacaucccugcccaaauguuggcucauuagcaacgggucuuaccugaaugagacccaguucagcgacgacaucgaacagcaagcugauaacaugauuacagagaugcuucagaaggaauacaucgagcgccagggaaaaaccccucugggccucguugacauuuuuaucuucuccacgucuuuuuaucugauuagcaucuuccugcaucuuaucaagauuccgacacacagacauaucgugggcaaacccugcccuaagccccaccggcucaaucauaugggggucuguuccugcggacuguacaagcacccuggcgugcccaccaaauggaagcgcugaggacuaguaauaaggaaacuguaugaaugucugugggcaggaagugaagagauccuucuguaaagguuuuuggaauuaugucugcugaauaauaaacuuuuuugaaauaauaaaucugguagaaaaaugagaucuaaaaaaaaaaaaaaaaaaaaaaaaaaaaaaaaaaaaaaaaaaaaaaaaaaaaaaaaaaaaaaaaaaaaaaaaaaaaaaaaaaaaaaaaaaaaaaaaaaaa

SEQ ID NO: 16330 - RNA, 1785 nt, Artificial Sequence
  mRNA product Design b-4 (A100) comprising derived and/or modified sequence from LASV(803213;Clade II)__AAF86703__GPCmut1 (opt5)
aggagagucccgcagucggcguccagcggcucugcuuguucgugugugugucguugcaggccuuauucaagcuuaccaugggccagaucauuaccuucuuucaagaggugccccacgucaucgaagagguuaugaacauugugcugaucgcccucagccugcuugcuauucugaaggggaucuacaauguggccacaugcggacucuucggccugaucuccuuucuucugcucugugggagaucuugcagcgucacguauaaaggaguguacgaacugcagacccuggagcucaacauggcgaaucugaacaugacaaugccucuuuccuguaccaagaauaacucucaucacuauauuaugguuggcaaugaaacagggcuggagcucacccugacaaacaccagcaucauuaaucauaaauucugcaaccuuuccgacgcucacaagaaaaaucuguacgaucaugcccucaugucuaucauuagcacguuucaccuguccaucccgaacuucaaucaguaugaggccaugagcugugacuuuaacggaggcaagauuucugugcaguacaaucugucccacagcuucgcugucgaugccgcuaaccauugcggcaccaucgccaacggggugcuccaaacauuuaugcggauggcguggggaggcucuuauaucgcccuggacuccgggugcggaaauugggauuguauuaugaccagcuaccaguaccuuaucauucagaacacaaccugggaagaccacugccaguucucucgccccuccccuaucggcuaucuggggcuccugagccaaagaacgcgggauauuuacaucucccgcagacgccggggaacauuuaccuggacacucucugacagcgagggcaaugaagcucccggcggguauugucugacccgguggaugcugaucgaggccgagcucaaaugcuucggaaacaccgcuguugccaaguguaaugaaaaacaugaugaggaauuuugcgacaugcugcgccuuuucgauuucaacaagcaggcgauuaaaagacugaagacacccgcccagauguccauccagcucauuaauaaggcugugaacgcccugaucaaugaccaacuuauuaugaaaaaccaucugcgggauaucaugugcaucccuuacugcaauuauagccgcuacugguaucucaaccacacggucaccgggaagacaucucugcccagauguuggcugguguccaauggaagcuaccucaacgaaacccacuuuucugacgacauugagcagcaggcugauaauaugaucacagagaugcugcaaaaagaauacauggaccggcagggcaagaccccucuugggcugguggaucucuucgucuuuagcacguccuucuaucugauuucuaucuuucugcaccuuguuaaaauuccgacacaucgccacaucgugggaaagcccugcccuaaaccccauagacucaaccacaugggcauuuguagcugcggccuguacaagcacccuggggugcccgucaaguggaaacggugaggacuaguaauaaggaaacuguaugaaugucugugggcaggaagugaagagauccuucuguaaagguuuuuggaauuaugucugcugaauaauaaacuuuuuugaaauaauaaaucugguagaaaaaugagaucuaaaaaaaaaaaaaaaaaaaaaaaaaaaaaaaaaaaaaaaaaaaaaaaaaaaaaaaaaaaaaaaaaaaaaaaaaaaaaaaaaaaaaaaaaaaaaaaaaaaa

SEQ ID NO: 16331 - RNA, 1785 nt, Artificial Sequence
  mRNA product Design b-4 (A100) comprising derived and/or modified sequence from LASV(GA391;Clade III)__CAA36645__GPCmut1 (opt5)
aggagagucccgcagucggcguccagcggcucugcuuguucgugugugugucguugcaggccuuauucaagcuuaccaugggccagaucgugaccuucuuucaagaggucccccacguuauugaagaggugaugaacaucgugcugauugcccucagcauccuggcuauucuuaaggggcuguacaaugucgccacaugcggacucaucggccuggugacguuccuucugcucuccgggagaucuuguagccugaucuauaaaggaaccuacgaacugcagacacucgagcugaacauggaaacccuuaauaugacaaugccucuguccugcaccaagaacaauucucaucacuauauucggguuggcaacgagacagggcucgagcugacccuuacgaauaccagcauccugaaccauaaauuuuguaaucucuccgacgcgcacaagcgcaaccuguacgaucauucucugaugagcauuaucuccacauuccaccucagcauuccgaauuuuaaccaguaugaagcuaugucuugcgacuucaauggaggcaaaaucaccgugcaguacaaccugucccacagcuuugccgucgaugccgcuggccauugugggacacuugccaauggagugcugcaaaccuucaugagaauggcuuggggcgggucuuauauugcccucgacuccggaugcggcaacugggauugcaucaugacgagcuaccaguaccugaucauucagaacacaaccugggacgaucacugucaguuuucucgccccuccccuaucggguaucuuggacugcucagccaaagaacacgggacauuuacaucucccgcagacgccggggcaccuucaccuggacacucucugauagcgagggcaaugaaacgcccgggggauauugccugacccgguggaugcuuauugaggcggagcugaaguguuuuggcaacacagccguugcuaagugcaaugaaaaacaugacgaggaguucugugauaugcuccgccuguuugacuucaacaagcaggccaucagacggcuuaaaacccccgcucagauguccauccagcugauuaauaaggccgugaacgcgcucaucaaugaucaacugauuaugaaaaaccaucugcgcgacaucaugugcauuccuuacugcaauuauagcagauacugguaucucaaccacacaucuaccggaaagacgucccugccccggugcuggcuuaucagcaauggcucuuaccugaacgaaacaaaguucagcgacgauaucgagcagcaggccgacaauaugauuaccgagaugcuccaaaaagaauacaucgaucgccaggggaagaccccucugggacuggucgaccuuuuuguguucuccacaucuuuuuaucucauuagcaucuuccugcaccuggugaaaauuccgacccacagacauaucgucggcaagcccuguccuaaaccccaccggcucaaccauaugggcauuugcuccugugggcuguacaagcagccuggaguucccgugagauggaaacgcugaggacuaguaauaaggaaacuguaugaaugucugugggcaggaagugaagagauccuucuguaaagguuuuuggaauuaugucugcugaauaauaaacuuuuuugaaauaauaaaucugguagaaaaaugagaucuaaaaaaaaaaaaaaaaaaaaaaaaaaaaaaaaaaaaaaaaaaaaaaaaaaaaaaaaaaaaaaaaaaaaaaaaaaaaaaaaaaaaaaaaaaaaaaaaaaaa

SEQ ID NO: 16332 - RNA, 1788 nt, Artificial Sequence
  mRNA product Design b-4 (A100) comprising derived and/or modified sequence from LASV(AV;Clade V)__CCA30314__GPCmut1 (opt5)
aggagagucccgcagucggcguccagcggcucugcuuguucgugugugugucguugcaggccuuauucaagcuuaccaugggccagaucgugaccuucuuucaagaggucccccacguuauugaagaggugaugaacaucgugcugauugcccucagcauccuggcuguccuuaaggggcuguacaauauugccacaugcggacucaucggccugaucacguuccuucugcucugugggagauccugcucuagcaaccuguauaaaggaguguacgaacugcagucccucgaccugaauauggagacccuuaacaugacaaugccucugucuuguaccaagaauaacagccaucacuauauucggguuggcaaugauacagggcucgaacugacccuuacaaacaccuccauccugaaucauaaauuuugcaaccucucugacgcgcacaagaaagaucuguacgaccaugcucugaugagcauuaucuccacguuccaccucagcauuccgaauuuuaaccaguaugaggccaugucuugugauuucaauggaggcaagaucuccgugcaguacaaccugagccacucuuaugccauugacgcugccaaucauugcggcaccgucgcuaacgggauccuucaaacauuuaugcgcauggccuggggaggcuccuacaucgcgcuggauagcgggugcggaaacugggacuguauuaugaccucuuaccaguaucucaucauucagaauacaaccugggagaaccacugccaguucucccggcccagcccuaucggcuaccuggggcuucugucccaacgcacgagagauauuuauaucucucggcgccgccggggaacauuuaccuggacacugagcgacuccgaaggcaaugccacccccggcggguacugucucaccagauggaugcugaucgaggcugaacuuaagugcuucggaaacacagccguggcuaaauguaaugagaagcaugaugaggaauuuugcgacaugcugcgccucuucgauuuuaacaaacaggccauuagccggcugaagucucccgcgcagauguccauccagcuuauuaauaaagccguuaacgcucugaucaaugaccaacucauuaugaagaaccaccugagagacaucaugugcaucccuuauugcaauuacagcaaguauugguaccugaaccacacgauuaccgggaaaacaucucuccccaaguguuggcuggugagcaauggauccuaccuuaacgaaacccauuucucugaugacaucgagcagcaggccgauaauaugauuacagaaaugcugcaaaaagaguauauggagcggcagggcaagaccccucucgggcuggucgaccuguucguguuuagcacguccuucuaccuuaucagcauuuuucuccgccuggugaaaaucccgacacacagacauauugucggaaagcccugcccuaaaccccaccggcugaaccauaugggcaucuguucuugcggccucuauaagcagccugggguucccgugcgcuggaagagaugaggacuaguaauaaggaaacuguaugaaugucugugggcaggaagugaagagauccuucuguaaagguuuuuggaauuaugucugcugaauaauaaacuuuuuugaaauaauaaaucugguagaaaaaugagaucuaaaaaaaaaaaaaaaaaaaaaaaaaaaaaaaaaaaaaaaaaaaaaaaaaaaaaaaaaaaaaaaaaaaaaaaaaaaaaaaaaaaaaaaaaaaaaaaaaaaa

SEQ ID NO: 16333 - RNA, 1785 nt, Artificial Sequence
  mRNA product Design b-4 (A100) comprising derived and/or modified sequence from LASV(Togo/2016/7082;Clade VI)__AMR44577__GPCmut1 (opt5)
aggagagucccgcagucggcguccagcggcucugcuuguucgugugugugucguugcaggccuuauucaagcuuaccaugggccagaucauuaccuucuuucaagaggugccccacgucaucgaagagguuaugaacauugugcugaucgcccucagccugcuugcuauucugaaggggguguacaaugucgccacaugcggaaucaucggccucgugacguuccuguuucuuugugggagauccugcucucugauuuauaaaggaagcuacgaacuccagacccuggagcugaacauggaaacacucaauaugaccaugccucuguccuguacaaagaacucuagccaucacuauauccggguuggcaaugagaccgggcuugagcugacacucaccaacacguccauuaucaaucauaaauucugcaaccugucugacgcgcacaagcgcaaucuuuacgaucaugcucugaugagcauucucuccaccuuucaccugagcaucccgaacuucaaucaguaugaagccaugucuugugacuuuaacggaggcaaaauuuccgugcaguacaaucugagccacgccuaugcugucgaugccgcugagcauugcggcacaguggccaacgggguucuccaaaccuucaugagaauggcguggggaggcucuuacaucgcccuggacuccgggugcggaaauugggauuguaucaugacaagcuaccaguaucuuauuauccagaacaccacgugggaagaccacugccaguuuucucgccccuccccuauuggcuaccuggggcuccugagccaaagaacacgggauaucuauauuucccgcagacgccggggaaccuucacauggacccucucugacagcgagggcaacgagacccccggcggguacugucugacacgguggaugcugaucgaagcugagcucaagugcuuuggaaauacggccguggcuaaguguaacgaaaaacaugaugaggaguucugcgacaugcugcgccuuuuugauuucaauaagcaggccauccagagacugaaaucccccgcgcagaugagcauucaacucaucaacaaggccgucaaugcucugauuaacgaccagcuuaucaugaaaaaucaucugcgggauaugaugugcauuccuuauugcaacuacucuaaguauugguaccucaaucacaccuccagcgggcgcacaucucugcccaaguguuggcuggugagcaacggauccuaccucaaugagacccacuucucugacgacaucgaacagcaagccgauaacaugaucacagagaugcugcagaaagaauauauugacagacagggcaagaccccucuugggcugguggaucucuuugucuucagcacguccuuuuaccugaucagcauuuuccugcaccuuaucaaaauuccgacacaucggcacaucguuggaaagcccugcccuaaaccccaucgccucaaucacaugggcauuuguucuugcggccuguauaagcagccuggggugcccaccagauggaaacggugaggacuaguaauaaggaaacuguaugaaugucugugggcaggaagugaagagauccuucuguaaagguuuuuggaauuaugucugcugaauaauaaacuuuuuugaaauaauaaaucugguagaaaaaugagaucuaaaaaaaaaaaaaaaaaaaaaaaaaaaaaaaaaaaaaaaaaaaaaaaaaaaaaaaaaaaaaaaaaaaaaaaaaaaaaaaaaaaaaaaaaaaaaaaaaaaa

SEQ ID NO: 16334 - RNA, 1785 nt, Artificial Sequence
  mRNA product Design b-4 (A100) comprising derived and/or modified sequence from LASV(KAK-428;Clade n.d. (VII))__ANH09740__GPCmut1 (opt5)
aggagagucccgcagucggcguccagcggcucugcuuguucgugugugugucguugcaggccuuauucaagcuuaccaugggccagaucgugaccuucuuucaagaggucccccacguuauugaagaggugaugaacaucgugcugauugcccucagccugcuugcuauccugaaggggcucuacaauuucgccacaugcggagucauuggccugaucacguuucuucugcucugugggagauccugcucugcgaccuauaaaggacaguacgaacugcagacacuggagcucaacauggaaagccugaauaugaccaugccucuuuccuguacaaagaacaauucucaucacuauauccgggcuggcaacaauaccgggcuggagcucacacugaccaacacgagcauuaucucccauaaauucugcaaucuuucugacgcccacaagaaaaaccuguacgaucauacccucaugagcauuaucacaaccuuucaccuguccauuccgaauuucaaccaguaugaggccaugagcugugacuuuaauggaggcaagaucucuauucaauacaaccugucccacagcuaugcuggcgaugccgcucagcauugcgggacaguggccaauggaguucuccagaccuucaugcgcauggcguggggcgggucuuaccuggcccuugacuccggaugccggggcugggauuguaucaucagcucuuaccaguaucugauuauccaaaacacgacaugggacgaucacugccaguuuucccgccccagcccuauuggguaccucggauucgugucccagaagaccagagacaucuauauuucucggcgccgccggggcacauuuaccuggacccugagcgauuccgaaggccaugacaugcccgggggauacugucucacaagauggaugcugaucgaggcugaucugaaaugcuucggcaacacggccgucgcuaaguguaaugaaaaacacgacgaggaguuuugcgauauguggcgccucuucgacuucaacaagcaggccauccaacggcugaaagcgcccgcccagaugaauauucagcuuaucaacaaggcugugaaugcccugauuaacgaccaacucaugaugaagaaucaccugagagauaucaugugcauuccuuauugcaacuacagcaaauuuugguaucuuaauaacaccacaaccggacggacaucucugccccgcuguuggcucaucuccaauggcagcuaccugaacgagacccauuucucugacgauaucgaacagcaggcugacaauaugauuacggagaugcugcagaaggaauacauggauagacaagggaaaacaccucucggacugguugaccuuuuuguguucagcaccuccuuuuaucugaucaccauuuuccuccaccuggucaagaucccgacacaucggcacauugugggcaaacccugcccuaagccccaucgccugaaccacaugggcaucuguucuugcgggcuuuacaaacagccuggagugcccgucagauggaagcggugaggacuaguaauaaggaaacuguaugaaugucugugggcaggaagugaagagauccuucuguaaagguuuuuggaauuaugucugcugaauaauaaacuuuuuugaaauaauaaaucugguagaaaaaugagaucuaaaaaaaaaaaaaaaaaaaaaaaaaaaaaaaaaaaaaaaaaaaaaaaaaaaaaaaaaaaaaaaaaaaaaaaaaaaaaaaaaaaaaaaaaaaaaaaaaaaa

SEQ ID NO: 16335 - RNA, 1785 nt, Artificial Sequence; identical to SEQ ID NO: 16329
  mRNA product Design b-4 (A100) comprising derived and/or modified sequence from LASV(Pinneo-NIG-1969;Clade I)__AIT17836__GPCmut1 (opt5)

SEQ ID NO: 16336 - RNA, 1785 nt, Artificial Sequence
  mRNA product Design b-4 (A100) comprising derived and/or modified sequence from LASV(ISTH0009-NIG-2011;Clade II)__AIT17404__GPCmut1 (opt5)
aggagagucccgcagucggcguccagcggcucugcuuguucgugugugugucguugcaggccuuauucaagcuuaccaugggccagaucauuaccuucuuucaagaggugccccacgucaucgaagagguuaugaacauugugcugaucgcccucagccugcuugcuauucugaaggggaucuacaauguggccacaugcggacucuucggccuggucuccuuucuucugcucugugggagaucuugcagcacgaccuauaaaggaguguacgaacugcagacacuggagcucgacauggcgucccugaacaugaccaugccucuuucuuguacaaagaauaacagccaucacuauaucaugguuggcaaugaaaccgggcuggagcucacacugaccaacacguccauuaucaaucauaaauucugcaaccuuucugaugcucacaagaaaaaucuguacgaccaugcccucaugagcauuaucuccaccuuucaccugagcauuccgaacuucaaucaguaugaggccaugucuugugauuuuaacggaggcaagaucuccgugcaguacaaucugagccacgcuuaugccgucgacgcugccaaccauugcggcacaauugcgaauggggugcuccaaaccuucaugcggauggccuggggaggcucuuacaucgcucuggauuccgggugcggaagcugggacuguaucaugacaucuuaccaguaucuuauuauccagaacaccacgugggaagaucacugccaguuuucccgccccagcccuauuggcuaccuggggcuccugucccaaagaacacgggacaucuauauuucucgcagacgccggggaaccuucacauggacccucagcgauuccgagggcaacgaaacccccggcggguacugucugacacgguggaugcugaucgaggccgagcucaaaugcuuuggaaauacggcuguugccaaguguaacgaaaaacaugacgaggaguucugcgauaugcugcgccuuuuugacuucaauaagcaggcgaucagacggcugaaaacccccgcccagaugagcauucagcucaucaacaaggcugugaaugcccugauuaacgaucaacuuaucaugaagaaucaucugcgcgacauuaugugcaucccuuauugcaacuacucuaaauauugguaccucaaucacacagucaccgggaagacaucccugcccagauguuggcuggugagcaacggaucuuaccucaaugaaacccacuucagcgacgauaucgagcagcaggcugacaacaugauuacggagcugcuucaaaaagaauauauggaucggcagggcaagacaccucuggggcucguggaccuguuugucuucuccaccucuuuuuaccugaucagcauuuuccuucaccucaucaaaauuccgacccaucgccacaucacaggaaagcccugcccuaaaccccauagacugaaucacaugggcauuuguuccugcggccuguauaagcacccugggguucccgugaaguggaaacggugaggacuaguaauaaggaaacuguaugaaugucugugggcaggaagugaagagauccuucuguaaagguuuuuggaauuaugucugcugaauaauaaacuuuuuugaaauaauaaaucugguagaaaaaugagaucuaaaaaaaaaaaaaaaaaaaaaaaaaaaaaaaaaaaaaaaaaaaaaaaaaaaaaaaaaaaaaaaaaaaaaaaaaaaaaaaaaaaaaaaaaaaaaaaaaaaa

SEQ ID NO: 16337 - RNA, 1785 nt, Artificial Sequence
  mRNA product Design b-4 (A100) comprising derived and/or modified sequence from LASV(ISTH2010-NIG-2012;Clade II)__AIT17482__GPCmut1 (opt5)
aggagagucccgcagucggcguccagcggcucugcuuguucgugugugugucguugcaggccuuauucaagcuuaccaugggccagaucauuaccuucuuucaagaggugccccacgucaucgaagagguuaugaacauugugcugaucgcccucagccugcuugcuauucugaaggggaucuacaauguggccacaugcggacucuucggccuggucuccuuucuucugcucugugggagaucuugcagcacgaccuauaaaggaguguacgaacugcagacacuggagcucgacauggcgucccugaacaugaccaugccucuuucuuguacaaagaauaacagccaucacuauaucaugguuggcaaugaaaccgggcuggagcucacacugaccaacacguccauuaucaaucauaaauucugcaaccuuucugaugcucacaagaaaaaucuguacgaccaugcccucaugagcauuaucuccaccuuucaccugagcauuccgaacuucaaucaguaugaggccaugucuugugauuuuaacggaggcaagaucuccgugcaguacaaucugagccacgcuuaugccgucgacgcugccaaccauugcggcacaauugcgaauggggugcuccaaaccuucaugcggauggccuggggaggcucuuacaucgcucuggauuccgggugcggaagcugggacuguaucaugacaucuuaccaguaucuuauuauccagaacauuaccugggaagaucacugccaguuuucccgccccagcccuaucggcuaccuggggcuccugucccaaagaacgcgggacauuuauaucucucgcagacgccggggaacauucaccuggacacucagcgauuccgagggcaacgaaacccccggcggguacugucugacccgguggaugcugaucgaggccgagcucaaaugcuuuggaaauacagcuguugccaaguguaacgaaaaacaugacgaggaguucugcgauaugcugcgccuuuuugacuucaauaagcaggcgauuagacggcugaaaacgcccgcccagaugagcauccagcucauuaacaaggcugugaaugcccugaucaacgaucaacuuauuaugaagaaucaucugcgcgacaucaugugcaucccuuauugcaacuacucuaaauauugguaccucaaucacaccgucacagggaagaccucccugcccagauguuggcuggugagcaacggaucuuaccucaaugaaacacacuucagcgacgauauugagcagcaggcugacaacaugaucaccgagcugcuucaaaaagaauauauugaucggcagggcaagacgccucuggggcucguggaccuguuugucuucuccacaucuuuuuaccugaucagcauuuuccuucaccucguuaaaaucccgacccaucgccacguggugggaaagcccugcccuaaaccccauagacugaaucacaugggcauuuguuccugcggccuguauaagcacccugggguccccgugaaguggaaacggugaggacuaguaauaaggaaacuguaugaaugucugugggcaggaagugaagagauccuucuguaaagguuuuuggaauuaugucugcugaauaauaaacuuuuuugaaauaauaaaucugguagaaaaaugagaucuaaaaaaaaaaaaaaaaaaaaaaaaaaaaaaaaaaaaaaaaaaaaaaaaaaaaaaaaaaaaaaaaaaaaaaaaaaaaaaaaaaaaaaaaaaaaaaaaaaaa

SEQ ID NO: 16338 - RNA, 1785 nt, Artificial Sequence
  mRNA product Design b-4 (A100) comprising derived and/or modified sequence from LASV(Lassa virus/H.sapiens-wt/NGA/2015/ISTH_0543;Clade II)__AVO03639__GPCmut1 (opt5)
aggagagucccgcagucggcguccagcggcucugcuuguucgugugugugucguugcaggccuuauucaagcuuaccaugggccagaucauuaccuucuuucaagaggugccccacgucaucgaagagguuaugaacauugugcugaucgcccucagccugcuugcuauucugaaggggaucuacaauguggccacaugcggacucuucggccuggucuccuuucuucugcucugugggagaucuugcagcacgaccuauaaaggaguguacgaacugcagacacuggagcucgacauggcgaaccugaauaugaccaugccucuuuccuguacaaagaacaauucucaucacuauaucaugguuggcaacgaaaccgggcuggagcucacacugaccaauacgagcauuaucaaccauaaauucugcaaucuuuccgaugcucacaagaaaaaccuguacgaccaugcccucaugucuauuaucagcaccuuucaccuguccauuccgaauuucaaccaguaugaggccaugagcugugauuuuaauggaggcaagaucucugugcaguacaaccugucccacacauaugcugucgacgccgcuaaucauugcggcaccauugccaacggggugcuccaaacauucaugcggauggcguggggaggcagcuacaucgcccuggauucugggugcggauccugggacuguaucaugaccagcuaccaguaucuuguuauucagaacacgacaugggaagaucacugccaguuuucucgccccuccccuaucggcuaccuggggcuccugagccaaagaacccgggacauuuauaucucccgcagacgccggggaacauucaccuggacccucucugauagcgagggcaaugaaacacccggcggguacugucugacgcgguggaugcugauugaggcugagcucaaaugcuuuggaaacaccgccguggcuaaguguaaugaaaaacaugacgaggaguucugcgauaugcugcgccuuuuugacuucaacaagcaggccaucagacggcugaaaacacccgcgcagauguccauccagcucauuaauaaggccgucaacgcucugaucaaugaucaacuuauuaugaagaaccaucugcgcgacaucaugugcauuccuuauugcaauuacagcaaauauugguaccucaaccacaccgugacagggaagaccucucugcccagauguuggcugguguccaauggaagcuaccucaacgaaacgcacuucucugacgauaucgagcagcaggccgacaauaugaucacagagcugcuucaaaaagaauauauugaucggcagggcaagaccccucuggggcucgucgaccuguuuguuuucagcaccuccuuuuaccugaucucuauuuuccuucaccucgugaaaaucccgacacaucgccacauuaccggaaagcccugcccuaaaccccauagacugaaccacaugggcaucuguagcugcggccuguauaagcacccuggggugcccgucaaguggaaacggugaggacuaguaauaaggaaacuguaugaaugucugugggcaggaagugaagagauccuucuguaaagguuuuuggaauuaugucugcugaauaauaaacuuuuuugaaauaauaaaucugguagaaaaaugagaucuaaaaaaaaaaaaaaaaaaaaaaaaaaaaaaaaaaaaaaaaaaaaaaaaaaaaaaaaaaaaaaaaaaaaaaaaaaaaaaaaaaaaaaaaaaaaaaaaaaaa

SEQ ID NO: 16339 - RNA, 1785 nt, Artificial Sequence
  mRNA product Design b-4 (A100) comprising derived and/or modified sequence from LASV(Lassa virus/H.sapiens-wt/NGA/2016/ISTH_0009;Clade II)__AVO03571__GPCmut1 (opt5)
aggagagucccgcagucggcguccagcggcucugcuuguucgugugugugucguugcaggccuuauucaagcuuaccaugggccagaucauuaccuucuuucaagaggugccccacgucaucgaagagguuaugaacauugugcugaucgcccucagccugcuugcuauucugaaggggaucuacaauguggccacaugcggacuccugggccuugucuccuuccugcuccugugugggagaucuugcagcacgaccuauaaaggaguguacgaacugcagacacucgagcuggacauggcgucccuuaacaugaccaugccucugucuuguacaaagaauaacagccaucacuauaucaugguuggcaaugaaaccgggcucgagcugacacuuaccaacacguccauuaucaaucauaaauuuugcaaccugucugaugcucacaagaaaaaucucuacgaccaugcccugaugagcauuaucuccaccuuccaccugagcauuccgaacuuuaaucaguaugaggccaugucuugugauuucaacggaggccggaucuccgugcaguacaaucucagccacucuuaugcugucgacgccgcuaaccauugcggcacaauugccaauggggugcugcaaaccuuuaugcgcauggcguggggaggcuccuacaucgcccuugauagcgggugcggaucuugggacuguaucaugacauccuaccaguaucugauuauccagaacaccacgugggaagaucacugccaguucagcagacccuccccuauuggcuaccucgggcugcuuucucaacggacacgcgacaucuauauuagcagacggcgccggggaaccuuuacauggacccuguccgauagcgagggcaacgaaacccccggcggguacugucugacacgcuggaugcucaucgaggcugagcugaagugcuucggaaauacggccguugcuaaauguaacgaaaagcaugacgaggaauuuugcgauaugcuuagacuguucgacuuuaauaaacaggccauccggcgccucaagacccccgcgcagaugucuauucagcugaucaacaaagccgugaaugcucuuauuaacgaucaacugaucaugaagaaucaccucagagacauuaugugcaucccuuauugcaacuacuccaaguauugguaccugaaucacacagucaccgggaaaacaagccugccccgguguuggcucgugucuaacggaagcuaccugaaugaaacccauuucuccgacgauaucgagcagcaggccgacaacaugauuacggagcuucugcaaaaggaauauaucgaucgccagggcaaaacaccucucgggcugguggaccuguucgucuuuucuaccagcuucuaccuuauuuccaucuuucuccaccugguuaagauuccgacccauagacacaucacaggaaaacccugcccuaagccccaucggcugaaucacaugggcauuuguagcugcggccucuauaaccacccuggggugcccgugaaauggaagcgcugaggacuaguaauaaggaaacuguaugaaugucugugggcaggaagugaagagauccuucuguaaagguuuuuggaauuaugucugcugaauaauaaacuuuuuugaaauaauaaaucugguagaaaaaugagaucuaaaaaaaaaaaaaaaaaaaaaaaaaaaaaaaaaaaaaaaaaaaaaaaaaaaaaaaaaaaaaaaaaaaaaaaaaaaaaaaaaaaaaaaaaaaaaaaaaaaa

SEQ ID NO: 16340 - RNA, 1785 nt, Artificial Sequence
  mRNA product Design b-4 (A100) comprising derived and/or modified sequence from LASV(Lassa virus/H.sapiens-wt/NGA/2016/ISTH_0017;Clade II)__AVO03567__GPCmut1 (opt5)
aggagagucccgcagucggcguccagcggcucugcuuguucgugugugugucguugcaggccuuauucaagcuuaccaugggccagaucauuaccuucuuucaagaggugccccacgucaucgaagagguuaugaacauugugcugaucgcccucagccugcuugcuauucugaaggggaucuacaauguggccacaugcggacucuucggccuggucuccuuucuucugcucugugggagaucuugcagcacgaccuauaaaggaguguacgaacugcagacacuggagcucgacauggcgucccugaacaugaccaugccucuuucuuguacaaagaauaacagccaucacuauaucaugguuggcaaugaaaccgggcuggagcucacacugaccaacacguccauuaucaaucauaaauucugcaaccuuucugaugcucacaagaaaaaucuguacgaccaugcccucaugagcauuaucuccaccuuucaccugagcauuccgaacuucaaucaguaugaggccaugucuugugauuuuaacggaggcaagaucuccgugcaguacaaucugagccacacauaugcuauugacgccgcuaaccauugcggcaccaucgccaaugggguccuccaaacauucaugcggauggcguggggaggcucuuacaucgcccuggauuccgggugcggaagcugggacuguauuaugaccucuuaccaguaucuuaucauucagaacacgacaugggaagaucacugccaguuuucccgccccagcccuaucggcuaccuggggcuccugucccaaagaacccgggacauuuauaucucucgcagacgccggggaacauucaccuggacccucagcgauuccgagggcaacgaaacacccggcggguacugucugacgcgguggaugcugaucgaggcugagcucaaaugcuuuggaaauaccgccguggcuaaguguaacgaaaaacaugacgaggaguucugcgauaugcugcgccuuuuugacuucaauaagcaggccauuagacggcugaaaacacccgcgcagaugagcauccagcucauuaacaaggccguuaaugcucugaucaacgaucaacuuauuaugaagaaucaucugcgcgacaucaugugcaucccuuauugcaacuacucuaaauauugguaccucaaucacaccgugacagggaagaccucccugcccagauguuggcuggucagcaacggaucuuaccucaaugaaacgcacuucagcgacgauauugagcagcaggccgacaacaugaucacagagcugcuucaaaaagaauauauggaucggcagggcaagaccccucuggggcucguggaccuguuuguguucuccaccucuuuuuaccugauuagcaucuuccuucaccucguccgcauuccgacacauagacacguuaucggaaaacccugcccuaagccccaucggcugaaucacaugggcauuuguuccugcggccuguauaaacacccuggggugcccgugaaguggaagcgcugaggacuaguaauaaggaaacuguaugaaugucugugggcaggaagugaagagauccuucuguaaagguuuuuggaauuaugucugcugaauaauaaacuuuuuugaaauaauaaaucugguagaaaaaugagaucuaaaaaaaaaaaaaaaaaaaaaaaaaaaaaaaaaaaaaaaaaaaaaaaaaaaaaaaaaaaaaaaaaaaaaaaaaaaaaaaaaaaaaaaaaaaaaaaaaaaa

SEQ ID NO: 16341 - RNA, 1785 nt, Artificial Sequence
  mRNA product Design b-4 (A100) comprising derived and/or modified sequence from LASV(Lassa virus/H.sapiens-wt/NGA/2018/ISTH_0959;Clade II)__AVV65099__GPCmut1 (opt5)
aggagagucccgcagucggcguccagcggcucugcuuguucgugugugugucguugcaggccuuauucaagcuuaccaugggccagaucauuaccuucuuucaagaggugccccacgucaucgaagagguuaugaacauugugcugaucgcccucagccugcuugcuauucugaaggggaucuacaauguggucacaugcggacucuucggccugguguccuuucuucugcucugugggagaucuugcagcacgaccuauaaaggaguuuacgaacugcagacacuggagcucgacauggccucccugaacaugaccaugccucuuucuuguacaaagaauaacagccaucacuauaucauggugggcaaugaaaccgggcuggagcucacacugaccaacacguccauuaucaaucauaaauucugcaaccuuucugaugcgcacaagaaaaaucuguacgaccaugcucucaugagcauuaucuccaccuuucaccugagcauuccgaacuucaaucaguaugaggccaugucuugugauuuuaacggaggcaagaucuccguccaguacaaucugagccacgccuaugcuauugacgccgcuaaccauugcggcacaaucgccaauggggugcuccaaaccuucaugcggauggcguggggaggcucuuacaucgcccuggauuccgggugcggaagcugggacuguauuaugacaucuuaccaguaucuuaucauucagaacaccacgugggaagaucacugccaguuuucccgccccagcccuaucggcuaccuggggcuccugucccaaagaacacgggacauuuauaucucucgcagacgccggggaaccuucacauggacccucagcgauuccgagggcaacgaaacccccggcggguacugucugacacgguggaugcugaucgaggcugagcucaaaugcuuuggaaauacggccguugcuaaguguaacgaaaaacaugacgaggaguucugcgauaugcugcgccuuuuugacuucaauaagcaggccauuagacggcugaaaacccccgcgcagaugagcauccagcucauuaacaaggccgugaaugcucugaucaacgaucaacuuauuaugaagaaucaucugcgcgacaucaugugcaucccuuauugcaacuacucuaaauauugguaccucaaucacacagucaccgggaagacaucccugcccagauguuggcuggugagcaacggaucuuaccucaaugaaacccacuucagcgacgauauugagcagcaggccgacaacaugaucacggagcugcuucaaaaagaauauauugaucggcagggcaagacaccucuggggcucguggaccuguuugucuucuccaccucuuuuuaccugaucagcauuuuccuucaccucguuaaaaucccgacccaucgccacgugauuggaaagcccugcccuaaaccccauagacugaaucacaugggcaucuguuccugcggccuguauaagcacccuggggugcccgucaaguggaaacggugaggacuaguaauaaggaaacuguaugaaugucugugggcaggaagugaagagauccuucuguaaagguuuuuggaauuaugucugcugaauaauaaacuuuuuugaaauaauaaaucugguagaaaaaugagaucuaaaaaaaaaaaaaaaaaaaaaaaaaaaaaaaaaaaaaaaaaaaaaaaaaaaaaaaaaaaaaaaaaaaaaaaaaaaaaaaaaaaaaaaaaaaaaaaaaaaa

SEQ ID NO: 16342 - RNA, 1785 nt, Artificial Sequence
  mRNA product Design b-4 (A100) comprising derived and/or modified sequence from LASV(LASV003-NIG-2008;Clade II)__AIT17580__GPCmut1 (opt5)
aggagagucccgcagucggcguccagcggcucugcuuguucgugugugugucguugcaggccuuauucaagcuuaccaugggccagaucauuaccuucuuucaagaggugccccacgucaucgaagagguuaugaacauugugcugaucgcccucagccugcuugcuauucugaaggggaucuacaauguggccacaugcggacucuucggccuggucuccuuucuucugcucugugggagaucuugcagcacgaccuauaaaggaguguacgaacugcagacacuggagcucgacauggcgucccugaacaugaccaugccucuuucuuguacaaagaauaacagccaucacuauaucaugguuggcaaugaaaccgggcuggagcucacacugaccaacacguccauuaucaaucauaaauucugcaaccuuucugaugcucacaagaaaaaucuguacgaccaugcccucaugagcauuaucuccaccuuucaccugagcauuccgaacuucaaucaguaugaggccaugucuugugauuuuaacggaggcaagaucuccgugcaguacaaucugagccacacauaugcugucgacgccgcuaaccauugcggcaccauugccaauggggugcuccaaacauucaugcggauggcguggggaggcucuuacaucgcccuggauuccgggugcggaagcugggacuguaucaugaccucuuaccaguaucuuauuauccagaacacgacaugggaagaucacugccaguuuucccgccccagcccuauuggcuaccuggggcuccugucccaaagaacccgggacaucuauauuucucgcagacgccggggaacauucaccuggacccucagcgauuccgagagcaacgaaacacccggcggcuacugucugacgcgguggaugcugaucgaggcugagcucaaaugcuuugggaauaccgccguugcuaaguguaacgaaaaacaugacgaggaguucugcgauaugcugcgccuuuuugacuucaauaagcaggccaucagacggcugaaagcgcccgcccagaugucuauucagcucaucaacaaggcugugaaugcccugauuaacgaucaacuuaucaugaagaaucaucugcgcgacauuaugugcaucccuuauugcaacuacuccaaauauugguaccucaaucacacagucaccggcagaacaagccugccccgguguuggcuggugucuaacgggagcuaccucaaugaaacccacuucuccgacgauaucgagcagcaggcugacaacaugauuacggagcugcuucaaaaggaauauauggaucgccagggaaaaacaccucugggccucguggaccuguuugucuucucuaccagcuuuuaccugaucuccauuuuccuucaccucguuaagaucccgacccauagacacgugauugggaaacccugcccuaagccccaucggcugaaucacaugggaaucuguagcugcggccuguauaaacacccuggcgugcccgucaaguggaagcgcugaggacuaguaauaaggaaacuguaugaaugucugugggcaggaagugaagagauccuucuguaaagguuuuuggaauuaugucugcugaauaauaaacuuuuuugaaauaauaaaucugguagaaaaaugagaucuaaaaaaaaaaaaaaaaaaaaaaaaaaaaaaaaaaaaaaaaaaaaaaaaaaaaaaaaaaaaaaaaaaaaaaaaaaaaaaaaaaaaaaaaaaaaaaaaaaaa

SEQ ID NO: 16343 - RNA, 1785 nt, Artificial Sequence
  mRNA product Design b-4 (A100) comprising derived and/or modified sequence from LASV(LASV035-NIG-2009;Clade II)__AIT17588__GPCmut1 (opt5)
aggagagucccgcagucggcguccagcggcucugcuuguucgugugugugucguugcaggccuuauucaagcuuaccaugggccagaucauuaccuucuuucaagaggugccccacgucaucgaagagguuaugaacauugugcugaucgcccucagccugcuugcuauucugaaggggaucuacaauguggccacaugcggacucuucggccuggucuccuuucuucugcucugugggagaucuugcagcacgaccuauaaaggaguguacgaacugcagacacuggagcucgacauggcgucccugaacaugaccaugccucuuucuuguacaaagaauaacagccaucacuauaucaugguuggcaaugaaaccgggcuggagcucacacugaccaacacguccauuaucaaucauaaauucugcaaccuuucugaugcucacaagaaaaaucuguacgaccaugcccucaugagcauuaucuccaccuuucaccugagcauuccgaacuucaaucaguaugaggccaugucuugugauuuuaacggaggcaagaucuccgugcaguacaaucugagccacgcuuaugccgucgacgcugccaaccauugcggcacaauugcgaauggggugcuccaaaccuucaugcggauggccuggggaggcucuuacaucgcucuggauuccgggugcggaagcugggacuguaucaugacaucuuaccaguaucuuauuauccagaacaccacgugggaagaucacugccaguuuucccgccccagcccuauuggcuaccuggggcuccugucccaaagaacacgggacaucuauauuucucgcagacgccggggaaccuucacauggacccucagcgauuccgagggcaacgaaacccccggcggguacugucugacacgguggaugcugaucgaggccgagcucaaaugcuuuggaaauacggcuguugccaaguguaacgaaaaacaugacgaggaguucugcgauaugcugcgccuuuuugacuucaauaagcaggcgaucagacggcugaaagcccccgcucagaugagcauucagcucaucaacaaggccgugaaugcucugauuaacgaucaacuuaucaugaagaaucaucugcgcgacauuaugugcaucccuuauugcaacuacucuaaauauugguaccucaaucacaccgucacagggaagaccucccugcccagauguuggcuggugagcaacggaucuuaccucaaugaaacacacuucagcgacgauaucgagcagcaggccgacaacaugauuaccgagcugcuucaaaaagaauauaucgaucggcagggcaagacgccucuggggcucguggaccuguuugucuucuccacaucuuuuuaccugauuagcaucuuccuucaccucguuaaaauuccgacccaucgccacgugaucggaaagcccugcccuaaaccccauagacugaaucacaugggcauuuguuccugcggccuguauaagcacccuggggugcccgucaaguggaaacggugaggacuaguaauaaggaaacuguaugaaugucugugggcaggaagugaagagauccuucuguaaagguuuuuggaauuaugucugcugaauaauaaacuuuuuugaaauaauaaaucugguagaaaaaugagaucuaaaaaaaaaaaaaaaaaaaaaaaaaaaaaaaaaaaaaaaaaaaaaaaaaaaaaaaaaaaaaaaaaaaaaaaaaaaaaaaaaaaaaaaaaaaaaaaaaaaa

SEQ ID NO: 16344 - RNA, 1785 nt, Artificial Sequence
  mRNA product Design b-4 (A100) comprising derived and/or modified sequence from LASV(LASV1000-NIG-2009;Clade II)__AIT17782__GPCmut1 (opt5)
aggagagucccgcagucggcguccagcggcucugcuuguucgugugugugucguugcaggccuuauucaagcuuaccaugggccagaucauuaccuucuuucaagaggugccccacgucaucgaagagguuaugaacauugugcugaucgcccucagccugcuugcuauucugaaggggaucuacaauguggccacaugcggacucuucggccuggucuccuuucuucugcucugugggagaucuugcagcacgaccuauaaaggaguguacgaacugcagacacuggagcucgacauggcgucccugaacaugaccaugccucuuucuuguacaaagaauaacagccaucacuauaucaugguuggcaaugaaaccgggcuggagcucacacugaccaacacguccauuaucaaucauaaauucugcaaccuuucugaugcucacaagaaaaaucuguacgaccaugcccucaugagcauuaucuccaccuuucaccugagcauuccgaacuucaaucaguaugaggccaugucuugugauuuuaacggaggcaagaucuccgugcaguacaaucugagccacacauaugcugucgacgccgcuaaccauugcggcaccauugccaauggggugcuccaaacauucaugcggauggcguggggaggcucuuacaucgcccuggauuccgggugcggaagcugggacuguaucaugaccucuuaccaguaucuuauuauccagaacacgacaugggaagaucacugccaguuuucccgccccagcccuauuggcuaccuggggcuccugucccaaagaacccgggacaucuauauuucucgcagacgccggggaacauucaccuggacccucagcgauuccgagggcaacgaaacacccggcggguacugucugacgcgguggaugcugaucgaggcugagcucaaaugcuuuggaaauaccgccguugcuaaguguaacgaaaaacaugacgaggaguucugcgauaugcugcgccuuuuugacuucaauaagcaggccaucaaaagacugaagacacccgcgcagaugagcauucagcucaucaacaaggccgugaaugcucugauuaacgaucaacuuaucaugaaaaaucaucugcgggacauuaugugcaucccuuauugcaacuacucuaaguauugguaccucaaucacaccgucacagggaaaaccucccugccccgcuguuggcuggugagcaacggaucuuaccucaaugaaacgcacuucagcgacgauaucgagcagcaggccgacaacaugauuacagagcugcuucaaaaggaauauaucgauagacagggcaaaaccccucuggggcucguggaccuguuugucuucuccaccucuuuuuaccugauuagcaucuuccuucaccucguuaagauuccgacacaucggcacguggugggaaaacccugcccuaagccccaucgccugaaucacaugggcaucuguuccugcggccuguauaagcacccugggguccccgugaaauggaagagaugaggacuaguaauaaggaaacuguaugaaugucugugggcaggaagugaagagauccuucuguaaagguuuuuggaauuaugucugcugaauaauaaacuuuuuugaaauaauaaaucugguagaaaaaugagaucuaaaaaaaaaaaaaaaaaaaaaaaaaaaaaaaaaaaaaaaaaaaaaaaaaaaaaaaaaaaaaaaaaaaaaaaaaaaaaaaaaaaaaaaaaaaaaaaaaaaa

SEQ ID NO: 16345 - RNA, 1785 nt, Artificial Sequence
  mRNA product Design b-4 (A100) comprising derived and/or modified sequence from LASV(LASV221-NIG-2010;Clade II)__AIT17624__GPCmut1 (opt5)
aggagagucccgcagucggcguccagcggcucugcuuguucgugugugugucguugcaggccuuauucaagcuuaccaugggccagaucauuaccuucuuucaagaggugccccacgucaucgaagagguuaugaacauugugcugaucgcccucagccugcuugcuauucugaaggggaucuacaauguggccacaugcggacucuucggccuggucuccuuucuucugcucugugggagaucuugcagcacgaccuauaaaggaguguacgaacugcagacacuggagcucgacauggcgucccugaacaugaccaugccucuuucuuguacaaagaauaacagccaucacuauaucaugguuggcaaugaaaccgggcuggagcucacacugaccaacacguccauuaucaaucauaaauucugcaaccuuucugaugcucacaagaaaaaucuguacgaccaugcccucaugagcauuaucuccaccuuucaccugagcauuccgaacuucaaucaguaugaggccaugucuugugauuuuaacggaggcaagaucuccgugcaguacaaucugagccacacauaugcuauugacgccgcuaaccauugcggcaccaucgccaaugggguccuccaaacauucaugcggauggcguggggaggcucuuacaucgcccuggauuccgggugcggaagcugggacuguauuaugaccucuuaccaguaucuuaucauucagaacacgacaugggaagaucacugccaguuuucccgccccagcccuaucggcuaccuggggcuccugucccaaagaacccgggacauuuauaucucucgcagacgccggggaacauucaccuggacccucagcgauuccgagggcaacgaaacacccggcggguacugucugacgcgguggaugcugaucgaggcugagcucaaaugcuuuggaaauaccgccguggcuaaguguaacgaaaaacaugacgaggaguucugcgauaugcugcgccuuuuugacuucaauaagcaggccauuagacggcugaaaacacccgcgcagaugagcauccagcucauuaacaaggccguuaaugcucugaucaacgaucaacuuauuaugaagaaucaucugcgcgacaucaugugcaucccuuauugcaacuacucuaaauauugguaccucaaucacaccgugacagggaagaccucccugcccagauguuggcuggucagcaacggaucuuaccucaaugaaacgcacuucagcgacgauauugagcagcaggccgacaacaugaucacagagaugcugcaaaaagaauauauggaucggcagggcaagaccccucuugggcugguggaccucuuuguguucuccaccucuuuuuaccugauuagcaucuuccugcaccuugucaaaauuccgacacaucgccacguuaucggaaagcccugcccuaaaccccauagacucaaucacaugggcauuuguuccugcggccuguauaagcacccuggggugcccgugaaguggaaacggugaggacuaguaauaaggaaacuguaugaaugucugugggcaggaagugaagagauccuucuguaaagguuuuuggaauuaugucugcugaauaauaaacuuuuuugaaauaauaaaucugguagaaaaaugagaucuaaaaaaaaaaaaaaaaaaaaaaaaaaaaaaaaaaaaaaaaaaaaaaaaaaaaaaaaaaaaaaaaaaaaaaaaaaaaaaaaaaaaaaaaaaaaaaaaaaaa

SEQ ID NO: 16346 - RNA, 1785 nt, Artificial Sequence
  mRNA product Design b-4 (A100) comprising derived and/or modified sequence from LASV(LASV237-NIG-2010;Clade II)__AIT17638__GPCmut1 (opt5)
aggagagucccgcagucggcguccagcggcucugcuuguucgugugugugucguugcaggccuuauucaagcuuaccaugggccagaucauuaccuucuuucaagaggugccccacgucaucgaagagguuaugaacauugugcugaucgcccucagccugcuugcuauucugaaggggaucuacaauguggccacaugcggacucuucggccuggucuccuuucuucugcucugugggagaucuugcagcacgaccuauaaaggaguguacgaacugcagacacuggagcucgacauggcgucccugaacaugaccaugccucuuucuuguacaaagaauaacagccaucacuauaucaugguuggcaaugaaaccgggcuggagcucacacugaccaacacguccauuaucaaucauaaauucugcaaccuuucugaugcucacaagaaagaccuguacgaucaugcccucaugagcauuaucuccaccuuucaccugagcauuccgaauuucaaccaguaugaggccaugucuugugacuuuaauggaggcaagaucuccgugcaguacaaccugagccacacauaugcugucgaugccgcuaaucauugcggcaccauugccaacggggugcuccaaacauucaugcggauggcguggggaggcucuuacaucgcccuggacuccgggugcggaagcugggauuguaucaugaccucuuaccaguaucuuauuauccagaauacgacaugggaagaccacugccaguuuucccgccccagcccuauuggcuaccuggggcuccugucccaaagaacccgggauaucuauauuucucgcagacgccggggaacauucaccuggacccucagcgacuccgagggcaacgaaacacccggcggguacugucugacgcgguggaugcugaucgaggcugagcucaaaugcuuuggaaacaccgccguugcuaaguguaaugaaaaacaugaugaggaguucugcgacaugcugcgccuuuuugauuucaacaagcaggccaucagacggcugaaaacacccgcgcagaugagcauucagcucaucaauaaggccgugaacgcucugauuaaugaccaacuuaucaugaagaaccaucugcgcgacauuaugugcaucccuuauugcaauuacucuaaauauugguaccucaaccacaccgucacagggaagaccucccugcccagauguuggcuggugagcaauggaucuuaccucaacgaaacgcacuucagcgaugacaucgagcagcaggccgauaauaugauuacagagcugcuucaaaaagaauauauggaccggcagggcaagaccccucuggggcucguggaucuguuugucuucuccaccucuuuuuaccugaucagcauuuuccuucaccucaucaaaauuccgacacaucgccacaucaccggaaagcccugcccuaaaccccauagacugaaccacaugggcauuuguuccugcggccuguauaagcacccugggguucccgugaaguggaaacggugaggacuaguaauaaggaaacuguaugaaugucugugggcaggaagugaagagauccuucuguaaagguuuuuggaauuaugucugcugaauaauaaacuuuuuugaaauaauaaaucugguagaaaaaugagaucuaaaaaaaaaaaaaaaaaaaaaaaaaaaaaaaaaaaaaaaaaaaaaaaaaaaaaaaaaaaaaaaaaaaaaaaaaaaaaaaaaaaaaaaaaaaaaaaaaaaa

SEQ ID NO: 16347 - RNA, 1785 nt, Artificial Sequence
  mRNA product Design b-4 (A100) comprising derived and/or modified sequence from LASV(LASV253-NIG-2011;Clade II)__AIT17670__GPCmut1 (opt5)
aggagagucccgcagucggcguccagcggcucugcuuguucgugugugugucguugcaggccuuauucaagcuuaccaugggccagaucauuaccuucuuucaagaggugccccacgucaucgaagagguuaugaacauugugcugaucgcccucagccugcuugcuauucugaaggggaucuacaauguggccacaugcggacucuucggccuggucuccuuucuucugcucugugggagaucuugcagcacgaccuauaaaggaguguacgaacugcagacacuggagcucgacauggcgucccugaacaugaccaugccucuuucuuguacaaagaauaacagccaucacuauaucaugguuggcaaugaaaccgggcuggagcucacacugaccaacacguccauuaucaaucauaaauucugcaaccuuucugaugcucacaagaaaaaucuguacgaccaugcccucaugagcauuaucuccaccuuucaccugagcauuccgaacuucaaucaguaugaggccaugucuugugauuuuaacggaggcaagaucuccgugcaguacaaucugagccacacauaugcugucgacgccgcuaaccauugcggcaccauugccaauggggugcuccaaacauucaugcggauggcguggggaggcucuuacaucgcccuggauuccgggugcggaagcugggacuguaucaugaccucuuaccaguaucuuauuauccagaacacgacaugggaagaucacugccaguuuucccgccccagcccuauuggcuaccuggggcuccugucccaaagaacccgggacaucuauauuucucgcagacgccggggaacauucaccuggacccucagcgauuccgagggcaacgaaacacccggcggguacugucugacgcgguggaugcugaucgaggcugagcucaaaugcuuuggaaauaccgccguugcuaaguguaacgaaaaacaugacgaggaguucugcgauaugcugcgccuuuuugacuucaauaagcaggccaucagacggcugaaagcgcccgcccagaugagcauucagcucaucaacaaggcugugaaugcccugauuaacgaucaacuuaucaugaagaaucaucugcgcgacauuaugugcaucccuuauugcaacuacucuaaauauugguaccucaaucacacagucaccgggagaacaucccugccccgguguuggcuggugagcaacggaucuuaccucaaugaaacccacuucagcgacgauaucgagcagcaggcugacaacaugauuacggagcugcuucaaaaggaauauaucgaucgccagggcaaaacaccucuggggcucguggaccuguuugucuucuccaccucuuuuuaccugauuagcaucuuccuucaccucguuaagauuccgacccauagacacaucauuggaaaacccugcccuaagccccaucggcugaaucacaugggcaucuguuccugcggccuguauaaacacccuggggugcccgugaaguggaagcgcugaggacuaguaauaaggaaacuguaugaaugucugugggcaggaagugaagagauccuucuguaaagguuuuuggaauuaugucugcugaauaauaaacuuuuuugaaauaauaaaucugguagaaaaaugagaucuaaaaaaaaaaaaaaaaaaaaaaaaaaaaaaaaaaaaaaaaaaaaaaaaaaaaaaaaaaaaaaaaaaaaaaaaaaaaaaaaaaaaaaaaaaaaaaaaaaaa

SEQ ID NO: 16348 - RNA, 1785 nt, Artificial Sequence
  mRNA product Design b-4 (A100) comprising derived and/or modified sequence from LASV(LASV254-NIG-2011;Clade II)__AIT17674__GPCmut1 (opt5)
aggagagucccgcagucggcguccagcggcucugcuuguucgugugugugucguugcaggccuuauucaagcuuaccaugggccagaucauuaccuucuuucaagaggugccccacgucaucgaagagguuaugaacauugugcugaucgcccucagccugcuugcuauucugaaggggaucuacaauguggccacaugcggacucuucggccuggucuccuuucuucugcucugugggagaucuugcagcacgaccuauaaaggaguguacgaacugcagacacuggagcucgacaugaccaaccugaauaugacaaugccucuuuccuguaccaagaacaauucucaucacuauaucaugguuggcaacgaaacagggcuggagcucacccugacgaauaccagcauuaucaaccauaaauucugcaaucuuuccgaugcgcacaagaaaaaccuguacaaucaugcucucaugucuauuaucagcacauuucaccuguccauuccgaacuucaaucaguaugaggccaugagcugugacuuuaacggaggcaagaucucugugcaguacaaucugucccacagcuaugccgucgaugcugccaaccauugcggcaccauugcuaacggggugcuccaaacauucaugcggauggccuggggaggcucuuacaucgcgcuggacuccgggugcggaaauugggauuguaucaugaccagcuaccaguaucuuauuauccagaacacgacaugggaagaccacugccaguuuucucgccccuccccuauuggcuaccuggggcuccugagccaaagaacccgggauaucuauauuucccgcagacgccggggaacauucaccuggacccucucugacagcgagggcaaugaaacacccggcggguacugucugacgcgguggaugcugaucgaggccgagcucaaaugcuuuggaaacaccgcuguugccaaguguaaugaaaaacaugaugaggaguucugcgacaugcugcgccuuuuugauuucaacaagcaggcuaucagacggcugaaaacacccgcccaggcgaauauucagcucaucaacaaggccgugaaugcucugauuaacgaccaacuuaucaugaagaaucaucugcgcgauauuaugugcaucccuuauugcaacuacuccaaauauugguaccucaaucacaccgucacagggaagaccagccugcccagauguuggcuggugucuaacggauccuaccucaaugaaacgcacuucagcgacgacaucgagcagcaggccgauaacaugauuacagagcugcuucaaaaagaauauauggaccggcagggcaagaccccucuggggcucguggaucuguuugucuucucuaccagcuuuuaccugaucuccauuuuccuucaccucguuaaaaucccgacacaucgccacgugauuggaaagcccugcccuaaaccccauagacugaaccacaugggcaucuguucuugcggccuguauaagcacccuggggugcccgucaaguggaaacggugaggacuaguaauaaggaaacuguaugaaugucugugggcaggaagugaagagauccuucuguaaagguuuuuggaauuaugucugcugaauaauaaacuuuuuugaaauaauaaaucugguagaaaaaugagaucuaaaaaaaaaaaaaaaaaaaaaaaaaaaaaaaaaaaaaaaaaaaaaaaaaaaaaaaaaaaaaaaaaaaaaaaaaaaaaaaaaaaaaaaaaaaaaaaaaaaa

SEQ ID NO: 16349 - RNA, 1785 nt, Artificial Sequence
  mRNA product Design b-4 (A100) comprising derived and/or modified sequence from LASV(Nig08-A19;Clade III)__ADU56618__GPCmut1 (opt5)
aggagagucccgcagucggcguccagcggcucugcuuguucgugugugugucguugcaggccuuauucaagcuuaccaugggccagaucgugaccuucuuucaagaggucccccacguuauugaagaggugaugaacaucgugcugauugcccucagcauccuggcuauucuuaaggggcuguacaauaucgccacaugcggacucaucggccuggucacguuccuucugcucuccgggagaucuuguagcaugaccuauaaaggaguguacgaacugcagacacuggagcucaacaugaauacccugaacaugacaaugccucuuuccugcaccaagaauaacucucaucacuauauuaugguuggcaaugaaacagggcuggagcucacccugacgaacaccagccuucugcaucacaaauuuuguaaucucuccgacgcgcauaagaaaaaccuguacgaucacacacugaugucuaucauuagcaccuuccaccucuccaucccgaauuuuaaccaguaugaggcuaugagcugcgacuucaauggaggcaagauuacagugcaguacaaccugucucauuccuaugccaucgaugccgcuaaucacuguggcaccgucgccaacggggugcuucaaacguuuaugcggauggcuuggggaggcagcuacauugcccuggacucugggugcggaaagugggauugcaucaugacauccuaccaguaucucaucauucagaacaccacaugggaagaccauugucaguucagcagacccucuccuaucggcuaccuggggcuucugucccaacggacccgcgauauuuauaucagcagacggcgccggggaaccuuuacauggacgcuguccgacucugagggcaaugaaacccccggcggguacugccucacacgcuggaugcugauugaggcggagcuuaaauguuucggaaacaccgccguugcuaagugcaaugaaaaacacgaugaggaauuuugugacaugcugagacucuucgauuuuaacaagcaggccauccggcgccugaaagcucccgcccagaugagcauccagcuuauuaauaaggcggugaacgcccugaucaaugaccaacucauuaugaagaaccaccugagagauaucaugugcauuccuuauugcaauuacuccaaauauugguaccugaaccauacaagcaccgggcggacgucucucccccgcugcuggcuggucuccaauggaagcuaccuuaacgaaacacacuucucugacgacaucgagcagcaggcugauaauaugaucaccgagaugcugcaaaaggaauaucucgacagacagggcaaaaccccucuggggcugguggaucuuuucguguuuagcacauccuucuaccucauuucuaucuuucugcaucuggucaagauuccgacccaccggcauaucguuggaaaacccuguccuaagccccaccgccucaaccacaugggcauuugcagcuguggccuguauaaacagccuggggugcccgugagauggaagcggugaggacuaguaauaaggaaacuguaugaaugucugugggcaggaagugaagagauccuucuguaaagguuuuuggaauuaugucugcugaauaauaaacuuuuuugaaauaauaaaucugguagaaaaaugagaucuaaaaaaaaaaaaaaaaaaaaaaaaaaaaaaaaaaaaaaaaaaaaaaaaaaaaaaaaaaaaaaaaaaaaaaaaaaaaaaaaaaaaaaaaaaaaaaaaaaaa

SEQ ID NO: 16350 - RNA, 1788 nt, Artificial Sequence
  mRNA product Design b-4 (A100) comprising derived and/or modified sequence from LASV(G1180-SLE-2010;Clade IV)__AIT17168__GPCmut1 (opt5)
aggagagucccgcagucggcguccagcggcucugcuuguucgugugugugucguugcaggccuuauucaagcuuaccaugggccagaucgugaccuucuuucaagaggucccccacguuauugaagaggugaugaacaucgugcugauugcccucagcauccuggcuguccuuaaggggcuguacaauuucgccacaugcggacucgugggccugcuuacguuucugcuccugugugggagauccugcaccgcgucucgguauaaaggaguuuacgaacugcagacacucgagcugaacauggaaacccuuaauaugacaaugccucugagcuguaccaagaacaauucccaucacuauauuauggugggcaacgagacagggcucgagcugacccuuacgaauaccucuaucaucaaccauaaauucugcaaucugagcgacgcucacaagaaaaaccucuacgaucaugcccugauguccauuaucucuacauuucaccugagcauuccgaauuucaaccaguaugaagccauguccugugacuuuaauggaggcaagaucagcguccaguacaaccucucucacuccuaugcuggcgaugccgcuaaucauugcgggaccguggccaacggaguucugcaaacauucaugcgcauggcguggggcgggagcuacauugcccuugacucuggaugcggcuccugggauuguaucaugaccagcuaccaguaucugauuauccagaacacgacaugggaggaccauugccaguuuucuagacccuccccuaucggguaccucggacugcuuagccaacggacccgcgauauuuauaucuccagacggcgccggggcacauucaccuggacccugucugacagcgaaggcaaggauacacccgggggauacugucugacgcgcuggaugcucauugaggcugagcugaaaugcuuuggcaauaccgccguggcuaaguguaacgaaaaacacgacgaggaguucugcgauaugcuuagacuguuugacuucaauaagcaggccauccagcggcucaaagcgcccgcccagauguccauucaacugaucaacaaggcugucaaugcccuuaucaacgaucagcugauuaugaagaaucaccuccgcgacaucaugugcauuccuuauugcaacuacagcaaauauugguaccugaaucauacaaccacaggaaagaccucucugcccaaauguuggcucguguccaacggcagcuaccugaaugaaacgcacuucucugacgauaucgagcagcaagcugacaacaugauuacagagaugcuucagaaggaauauauggagagacaggggaaaaccccucugggacucguggaucuguuugucuucagcaccuccuuuuaccugaucucuaucuuccuucaucucguuaagauuccgacacaccggcauaucgugggcaaaagcugccccaagccucaccgccugaaucacaugggcauuuguuccugcgggcuguauaagcagcccggagugccugucaaauggaagagaugaggacuaguaauaaggaaacuguaugaaugucugugggcaggaagugaagagauccuucuguaaagguuuuuggaauuaugucugcugaauaauaaacuuuuuugaaauaauaaaucugguagaaaaaugagaucuaaaaaaaaaaaaaaaaaaaaaaaaaaaaaaaaaaaaaaaaaaaaaaaaaaaaaaaaaaaaaaaaaaaaaaaaaaaaaaaaaaaaaaaaaaaaaaaaaaaa

SEQ ID NO: 16351 - RNA, 1788 nt, Artificial Sequence
  mRNA product Design b-4 (A100) comprising derived and/or modified sequence from LASV(G1442-SLE-2011;Clade IV)__AIT17180__GPCmut1 (opt5)
aggagagucccgcagucggcguccagcggcucugcuuguucgugugugugucguugcaggccuuauucaagcuuaccaugggccagaucgugaccuucuuucaagaggucccccacguuauugaagaggugaugaacaucgugcugauugcccucagcauccuggcuguccuuaaggggcuguacaauguggccacaugcggacucauuggccugguuacguuccuucugcucugugggagauccugcaccacaacccuguauaaaggaguguacgaacugcagacacucgagcugaacauggaaacccuuaauaugacaaugccucugucuuguaccaagaacaauagccaucacuauauccgggucggcaacgagacggggcucgagcugacccuuacaaauaccuccaucauuaaccauaaauuuugcaaucugucugacgcgcacaagaaaaaccucuacgaucaugcucugaugagcaucauuuccacauuccaccugucuaucccgaauuuuaaccaguaugaagccaugagcugugacuucaauggaggcaagauuuccgugcaguacaaccucagccacucuuaugccggcgaugcugccaaucauugcgggaccguugcuaacggagugcugcaaacguuuaugcgcauggccuggggcggguccuacaucgcgcuugacagcggaugcggcaacugggauuguauuaugacaucuuaccaguaucugaucauccagaauaccacaugggacgaucacugccaguucucccggcccagcccuauuggguaccucggacugcuuucucaacgcaccagagacgucuauaucucccggcgccgccggggcaccuuuacauggacgcugagcgauuccgagggcaaggacacccccgggggauacugucugacaagauggaugcucauugaagccgagcugaaaugcuucggcaacaccgcuguggccaaguguaaugagaaacaugaugaagaguuuugcgacaugcuucggcuguucgauuuuaacaagcaggcuauccagcgccucaaagcccccgcgcagaugucuauucaacugaucaauaaggccgugaacgcucuuaucaaugaccagcugauuaugaagaaccaccucagagacaucaugugcauuccuuauugcaauuacagcaaauauugguaccugaacaauacagccaccggaaagacgucccugcccaaauguuggcucaucagcaacggcucuuaccugaaugagacacacuucuccgaugacauugaacaggaggcugauaacaugaucaccgagaugcuucaaaaggaauauauggagcggcaggggaaaaccccucugggacucgucgaccuguucguuuuuagcacaucuuucuaccugaucagcauuuuucuucaucucgugaagaucccgacccaccgccauauugugggcaaauccugccccaagccucacagacugaaucauaugggcaucuguucuugcgggcuguauaagcagcccggagucccugugcgguggaaacgcugaggacuaguaauaaggaaacuguaugaaugucugugggcaggaagugaagagauccuucuguaaagguuuuuggaauuaugucugcugaauaauaaacuuuuuugaaauaauaaaucugguagaaaaaugagaucuaaaaaaaaaaaaaaaaaaaaaaaaaaaaaaaaaaaaaaaaaaaaaaaaaaaaaaaaaaaaaaaaaaaaaaaaaaaaaaaaaaaaaaaaaaaaaaaaaaaa

SEQ ID NO: 16352 - RNA, 1788 nt, Artificial Sequence
  mRNA product Design b-4 (A100) comprising derived and/or modified sequence from LASV(G3010-SLE-2013;Clade IV)__AIT17344__GPCmut1 (opt5)
aggagagucccgcagucggcguccagcggcucugcuuguucgugugugugucguugcaggccuuauucaagcuuaccaugggccagaucgugaccuucuuucaagaggucccccacguuauugaagaggugaugaacaucgugcugauugcccucagcauccuggcuguccuuaaggggcuguacaauuucgccacaugcggacucgugggccugguuacguuucuucugcucugugggagauccugcaccacaucucuguauaaaggaguguacgaacugcagacccucgagcugaacauggaaacacuuaauaugaccaugccucugagcuguacaaagaacaauucccaucacuauauuauggucggcaacgagaccgggcucgagcugacgcuuaccaauacaucuaucaucaaccauaaauucugcaaucugagcgacgcgcacaagaaaaaccucuacaaucaugcucugauguccauuaucucuaccuuucaccugagcauuccgaacuucaaucaguaugaagccauguccugugauuuuaacggaggcaagaucagcgugcaguacaaucucucucacuccuaugccggcgacgcugccagccauugcgggacaguugcuaacggagugcugcaaaccuucaugcggauggccuggggcgggucuuacauugcgcuugauuccggaugcggcaagugggacuguaucaugacgagcuaucaguaccugauuauccagaacacaaccugggaggaucacugccaguuuucucgccccuccccuaucggguaucucggacugcuuagccaaagaacacgggacauuuacaucucccgcagacgccggggcaccuucaccuggacacugucugauagcgaaggcaaagacacgcccgggggauauugucugacccgguggaugcucauugaggccgagcugaagugcuuuggcaauacagcugucgccaaauguaacgaaaagcaugaugaggaguucugcgacaugcuucgccuguuugauuucaauaaacaggcuauccagagacucaagacccccgcccagauguccauucaacugaucaacaaggcggugaaugcccuuaucaacgaccagcugauuaugaaaaaucaccuccgggauaucaugugcauuccuuacugcaacuauagcaaguacugguaccugaaucacacaaccacgggaaaaacaucucugcccaaguguuggcucguguccaacggcagcuaucugaaugaaacccauuucucugacgacaucgagcagcaagcugauaacaugauuaccgagaugcuucagaaagaauacauggagcgccaggggaagacaccucugggacucgucgaccuguuuguuuucagcaccuccuuuuaucugaucucuaucuuccuucaccucgugaaaauuccgacacauagacacaucgugggcaagagcugccccaagccucaucggcugaaucacaugggcauuuguuccugcgggcuguacaaacagcccggagucccugugcgcuggaagagaugaggacuaguaauaaggaaacuguaugaaugucugugggcaggaagugaagagauccuucuguaaagguuuuuggaauuaugucugcugaauaauaaacuuuuuugaaauaauaaaucugguagaaaaaugagaucuaaaaaaaaaaaaaaaaaaaaaaaaaaaaaaaaaaaaaaaaaaaaaaaaaaaaaaaaaaaaaaaaaaaaaaaaaaaaaaaaaaaaaaaaaaaaaaaaaaaa

SEQ ID NO: 16353 - RNA, 1788 nt, Artificial Sequence
  mRNA product Design b-4 (A100) comprising derived and/or modified sequence from LASV(G502-SLE-2009;Clade IV)__AIT17126__GPCmut1 (opt5)
aggagagucccgcagucggcguccagcggcucugcuuguucgugugugugucguugcaggccuuauucaagcuuaccaugggccagaucgugaccuucuuucaagaggucccccacguuauugaagaggugaugaacaucgugcugauugcccucagcauccuggcuguccuuaaggggcuguacaauuucgccacaugcggacucgugggccugcuuacguuucugcuccugugugggagauccugcaccacaggacuguauaaaggcguuuacgaacuccagacccuggagcuuaacauggaaacacugaauaugaccaugccucucucuuguacaaagaacaauagccaucacuauauuaugguggggaacgagaccggacuggagcuuacgcugaccaauacauccaucaucaaccauaaauucugcaaucucucugacgcgcacaagaaaaaccuguacgaucaugcucugaugagcauuaucuccaccuuucaccucucuauuccgaauuucaaccaguaugaagccaugagcugugacuuuaauggcggcaagaucuccguccaguacaaccugagccacucuuaugccggggaugcugccgaccauugcggaacaguggcuaauggcguucuucaaaccuucaugcggauggccuggggaggguccuacauugcgcuggauagcggcugcgggagaugggacuguaucaugacgucuuaccaguaucucauuauccagaacacaaccugggaggaucacugccaguuuucccggcccagcccuaucggauaccugggccuucugucucaacgcacaagagacauuuauaucucccggcgccgccggggcaccuucaccuggacacugagcgauuccgaagggaaggacacgcccggaggcuacugucucaccagauggaugcugauugaggccgagcuuaaaugcuuugggaacacagcuguggccaaguguaaugaaaaacaugaugaggaguucugcgacaugcugcggcucuuugauuucaacaagcaggcuauccagcgccugaaagcccccgcgcagaugucuauucaacuuaucaauaaggccgucaacgcucugaucaaugaccagcucgugaugaagaaccaccugagagacauuaugugcaucccuuauugcaauuacagccgguauugguaccugaaccacaccacaaccggccgcacgucccuccccaaauguuggcuggugagcaaugggucuuaccuuaacgaaacacauuucuccgaugacauugagcagcaagccgauaauaugaucaccgagaugcugcagaaggaauauauggagagacagggaaaaaccccucucggccuggucgaccuguuuguuuucagcacaucuuuuuaccuuauuagcaucuuccuccaccuggugaagaucccgacccaucggcacauugugggcaaauccugccccaagccucaucgccugaaccacauggggaucuguucuugcggacucuauaaacagcccggcgucccugugaaguggaagagaugaggacuaguaauaaggaaacuguaugaaugucugugggcaggaagugaagagauccuucuguaaagguuuuuggaauuaugucugcugaauaauaaacuuuuuugaaauaauaaaucugguagaaaaaugagaucuaaaaaaaaaaaaaaaaaaaaaaaaaaaaaaaaaaaaaaaaaaaaaaaaaaaaaaaaaaaaaaaaaaaaaaaaaaaaaaaaaaaaaaaaaaaaaaaaaaaa

SEQ ID NO: 16354 - RNA, 1788 nt, Artificial Sequence
  mRNA product Design b-4 (A100) comprising derived and/or modified sequence from LASV(G733-SLE-2010;Clade IV)__AIT17154__GPCmut1 (opt5)
aggagagucccgcagucggcguccagcggcucugcuuguucgugugugugucguugcaggccuuauucaagcuuaccaugggccagaucgugaccuucuuucaagaggucccccacguuauugaagaggugaugaacaucgugcugauugcccucagcauccuggcuguccuuaaggggcuguacaauuucgccacaugcggaauugugggccucguuuccuuucugcuucugugugggagaucuugcacgaccagccucuauaaaggaguguacgaacugcagacacuggagcucaacauggaaacccugaauaugacaaugccucuuuccuguaccaagaacaauucucaucacuauaucauggucggcaacgagacagggcuggagcucacccugacgaauaccagcaucauuaaccauaaauucugcaaucuuuccgacgcgcacaagaaaaaccuguacgaucaugcucucaugucuaucauuagcacauuucaccuguccaucccgaauuucaaccaguaugaagccaugagcugugacuuuaauggaggcaagauuucugugcaguacaaccugucccacagcuaugccggcgaugcugccaaucauugcgggaccaucgcuaacggaguucuccaaacauucaugcggauggccuggggcgggucuuacauugcgcuggacuccggaugcgauagaugggacuguaucaugaccagcuaccaguaucuuaucauucagaacacgacaugggaggaucacugccaguuuucucggcccuccccuaucggcuaccuggggcuccugagccaacgcaccagagacauuuauaucucccggcgccgccggggaacauucaccuggacccucucugauagcgaaggcaaggacacacccggcggguacugucugacgagauggaugcugauugaggccgagcucaaaugcuuuggaaauaccgcuguggccaaguguaacgaaaaacaugaugaggaguucugcgacaugcugcggcuuuuugauuucaauaagcaggcuauccagcgccugaaagcccccgcgcagauguccauccaacucauuaacaaggccgucaaugcucugaucaacgaccagcuuauuaugaagaaucaccugagagacaucaugugcauuccuuauugcaacuacagcaaauauugguaccucaaucacacaaccacagggaagaccucucugcccaaauguuggcugguguccaacggaagcuaccucaaugaaacgcauuucucugaugacaucgagcagcaagccgauaacaugaucacagagaugcugcagaaggaauauauggagcggcagggcaaaaccccucuugggcugguggaccucuuugucuucagcaccuccuuuuaccugauuucuaucuuccugcaccuuguuaagauuccgacacaucgccacguggugggaaaaagcugccccaagccucauagacucaaucacaugggcaucuguuccugcggccuguaugggcagcccggagucccugugaaguggaaacggugaggacuaguaauaaggaaacuguaugaaugucugugggcaggaagugaagagauccuucuguaaagguuuuuggaauuaugucugcugaauaauaaacuuuuuugaaauaauaaaucugguagaaaaaugagaucuaaaaaaaaaaaaaaaaaaaaaaaaaaaaaaaaaaaaaaaaaaaaaaaaaaaaaaaaaaaaaaaaaaaaaaaaaaaaaaaaaaaaaaaaaaaaaaaaaaaa

SEQ ID NO: 16355 - RNA, 1788 nt, Artificial Sequence
  mRNA product Design b-4 (A100) comprising derived and/or modified sequence from MOPV/LASV reassortant(IGS-1;Clade IV)__AFY05576__GPCmut1 (opt5)
aggagagucccgcagucggcguccagcggcucugcuuguucgugugugugucguugcaggccuuauucaagcuuaccaugggccagaucgugaccuucuuucaagaggucccccacguuauugaagaggugaugaacaucgugcugauugcccucagcguccuggcugugcuuaaggggcuguacaauuucgccacaugcggacucguuggccuggugacguuucuucugcucugugggagauccugcaccacaucucuguauaaaggagucuacgaacugcagacccucgagcugaacauggaaacacuuaauaugaccaugccucugagcuguacaaagaacaauucccaucacuauaucauggugggcaacgagaccgggcucgagcugacgcuuaccaauacaucuauuaucaaccauaaauucugcaaucugagcgacgcgcacaagaaaaaccucuacgaucaugcucugauguccaucauuucuaccuuucaccugagcaucccgaauuucaaccaguaugaagccauguccugugacuuuaauggaggcaagauuagcguucaguacaaccucucucacuccuaugccggcgaugcugccaaucauugcgggacaguggcuaacggaguccugcaaaccuucaugcggauggccuggggcgggagcuacaucgcgcuugacucuggaugcggcaacugggauuguauuaugacguccuaccaguaucugaucauucagaauacaaccugggaggaccacugccaguuuagcagacccucuccuaucggguaccucggacugcuuucccaacggacacgcgauaucuauauuagcagacggcgccggggcaccuucaccuggacacuguccgacucugaaggcgaggauacgcccgggggauacugucugacccgcuggaugcucaucgaggccgaacugaagugcuuuggcaacacagcuguggccaaauguaaugagaagcaugacgaagaguucugcgauaugcuuagacuguuugacuucaacaaacaggcuauucagcggcucaaggcccccgcgcagaugagcauccaacugauuaauaaagccgugaacgcucuuaucaaugaucagcugaucaugaagaaccaccuccgcgacauuaugugcaucccuuauugcaauuacuccaaguauugguaccugaaccacaccacaaccggaagaacgagccugcccaaauguuggcucgucucuaauggcuccuaccugaacgagacacauuucagcgacgauauugagcagcaagccgacaauaugaucaccgaaaugcuucagaaggaguauauggaacggcaggggaaaaccccucugggacucguugaucuguuuguguucucuaccagcuuuuaccugauuuccaucuuccuucaccucgugaagaucccgacacaucgccacauugucggcaaaucuugccccaagccucauagacugaaccacaugggcaucuguagcugcgggcuguauaaacagcccggagugccuguuaaguggaagcggugaggacuaguaauaaggaaacuguaugaaugucugugggcaggaagugaagagauccuucuguaaagguuuuuggaauuaugucugcugaauaauaaacuuuuuugaaauaauaaaucugguagaaaaaugagaucuaaaaaaaaaaaaaaaaaaaaaaaaaaaaaaaaaaaaaaaaaaaaaaaaaaaaaaaaaaaaaaaaaaaaaaaaaaaaaaaaaaaaaaaaaaaaaaaaaaaa

SEQ ID NO: 16356 - RNA, 1788 nt, Artificial Sequence
  mRNA product Design b-4 (A100) comprising derived and/or modified sequence from LASV(LM765-SLE-2012;Clade IV)__AIT17814__GPCmut1 (opt5)
aggagagucccgcagucggcguccagcggcucugcuuguucgugugugugucguugcaggccuuauucaagcuuaccaugggccagaucgugaccuucuuucaagaggucccccacguuauugaagaggugaugaacaucgugcugauugcccucagcauccuggcuguccuuaaggggcuguacaauuucgccacaugcggacucgugggccugguuacguuucuucugcucugugggagauccugcaccacaucucuguauaaaggaguguacgaacugcagacccucgagcugaacauggaaacacuuaauaugaccaugccucugagcuguacaaagaacaauucccaucacuauauuauggucggcaacgagaccgggcucgagcugacgcuuaccaauacaucuaucaucgaccauaaauucugcaaccugagcgaugcgcaccggaagaaucucuacgaccaugcucugauguccauuaucucuaccuuucaccugagcauuccgaacuucaaucaguaugaagccauguccugugauuuuaacggaggcaaaaucagcgugcaguacaaucucucucacuccuaugccaaggacgcugccgaucauugcggcacaguugcuaacggggugcugcaaaccuucaugcgcauggccuggggaggcagcuacauugcgcuugacucugggugcggacggugggauuguaucaugacguccuaccaguaucugauuauccagaauacaaccugggaggaccacugccaguuuagccgccccucuccuaucggcuaccucgggcugcuuucccaaagaacacgggauauuuauaucagccgcagacgccggggaaccuucaccuggacacuguccgacucugaaggcaaggauacgcccggcggguacugucugacccgguggaugcucauugaggccgagcugaaaugcuuuggaaacacagcugucgccaaguguaacgaaaaacaugacgaggaguucugcgauaugcuucgccuguuugacuucaauaagcaggcuauccagagacucaaagcccccgcgcagaugagcauucaacugaucaacaaggccgugaaugcucuuaucaacgaccagcugauuaugaagaaucaccuccgggauaucaugugcauuccuuauugcaacuacuccaaauauugguaccugaaucacaccacaaccgggaagacgagccugcccaaauguuggcucgugucuaacggauccuaccugaaugaaacacauuucagcgacgauaucgagcagcaagccgacaacaugauuaccgagaugcuucagaaggaauauauggagcgccagggcaaaaccccucuggggcucgucgaucuguuuguuuucucuaccagcuuuuaccugaucuccaucuuccuucaccucgugaagauuccgacacauagacacaucgugggaaaacccugcccuaagccccaucggcugaaucacaugggcauuuguucuugcggccuguauaagcagccugggguccccgugaaauggaagcgcugaggacuaguaauaaggaaacuguaugaaugucugugggcaggaagugaagagauccuucuguaaagguuuuuggaauuaugucugcugaauaauaaacuuuuuugaaauaauaaaucugguagaaaaaugagaucuaaaaaaaaaaaaaaaaaaaaaaaaaaaaaaaaaaaaaaaaaaaaaaaaaaaaaaaaaaaaaaaaaaaaaaaaaaaaaaaaaaaaaaaaaaaaaaaaaaaa

SEQ ID NO: 16357 - RNA, 1788 nt, Artificial Sequence
  mRNA product Design b-4 (A100) comprising derived and/or modified sequence from LASV(LM776-SLE-2012;Clade IV)__AIT17824__GPCmut1 (opt5)
aggagagucccgcagucggcguccagcggcucugcuuguucgugugugugucguugcaggccuuauucaagcuuaccaugggccagaucgugaccuucuuucaagaggucccccacguuauugaagaggugaugaacaucgugcugauugcccucagcauccuggcuguccuuaaggggcuguacaauuucgccacaugcggacucgugggccugguuacguuucuucugcucugugggagauccugcaccacaucuguguauaaaggagucuacgaacugcagacccuggagcucaacauggaaacacugaauaugaccaugccucuuagcuguacaaagaacaauucccaucacuauauuauggugggcaacgagaccgggcuggagcucacgcugaccaauacaucuaucaucaaccauaaauucugcaaucuuagcgacgcgcacaagaaaaaccuguacgaucaugcucucauguccauuaucucuaccuuucaccugagcauuccgaauuucaaccaguaugaagccauguccugugacuuuaauggaggcaagaucagcguucaguacaaccugucucacuccuaugccggcgaugcugccaaucauugcgggacaguggcuaacggaguccuccaaaccuucaugcggauggccuggggcgggagcuacauugcgcuggacucuggaugcggcaagugggauuguaucaugacguccuaccaguaucuuauuauccagaacacaaccugggaggaccauugccaguuuagccgccccucuccuaucggguaccugggacuccugucccaaagaacacgggauauuuauaucagccgcagacgccggggcaccuucaccuggacacucuccgacucugaaggcaaagauacgcccgggggauacugucugacccgguggaugcugauugaggccgagcucaagugcuuuggcaauacagcuguggccaaauguaacgaaaagcacgacgaggaguucugcgauaugcugcgccuuuuugacuucaauaaacaggcuauccagagacugaaggcccccgcgcagaugagcauucaacucaucaacaaggccgugaaugcucugaucaacgaucagcuuauuaugaaaaaucaucugcgggacaucaugugcauuccuuauugcaacuacuccaaguauugguaccucaaucacaccacaaccggaaaaacgagccugcccaaguguuggcuggucucuaacggcuccuaccucaaugaaacacacuucagcgacgauaucgagcagcaagccgacaacaugauuaccgagaugcugcagaaagaauauauggagcgccaggggaagaccccucuuggacugguugaucucuuuguguucucuaccagcuuuuaccugaucuccaucuuccugcaucuugugaaaauuccgacacacagacauaucgucggcaagucuugccccaagccucaccggcucaaucacaugggcauuuguagcugcgggcuguauaaacagcccggagugccuguucgcuggaagagaugaggacuaguaauaaggaaacuguaugaaugucugugggcaggaagugaagagauccuucuguaaagguuuuuggaauuaugucugcugaauaauaaacuuuuuugaaauaauaaaucugguagaaaaaugagaucuaaaaaaaaaaaaaaaaaaaaaaaaaaaaaaaaaaaaaaaaaaaaaaaaaaaaaaaaaaaaaaaaaaaaaaaaaaaaaaaaaaaaaaaaaaaaaaaaaaaa

SEQ ID NO: 16358 - RNA, 1788 nt, Artificial Sequence
  mRNA product Design b-4 (A100) comprising derived and/or modified sequence from LASV(Mad39;Clade IV)__ANH09722__GPCmut1 (opt5)
aggagagucccgcagucggcguccagcggcucugcuuguucgugugugugucguugcaggccuuauucaagcuuaccaugggccagaucgugaccuucuuucaagaggucccccacguuauugaagaggugaugaacaucgugcugauugcccucagcauccuggcuguccuuaaggggcuguacaauguggccacaugcggacucauuggccugguuacguuccuucugcucugugggagauccugcaccacaacccuguauaaaggaguguacgaacugcaggcgcucgagcugaacauggaaacacuuaauaugaccaugccucugucuuguacaaagaacaauagccaucacuauauccgggucggcaacgagaccgggcucgagcugacgcuuaccaauacaucccugaucaaccauaaauuuugcaaucucucugacgcucacaagaaaaaccuguacgaucaugcccugaugagcauuaucuccaccuuccaccucucuauuccgaauuuuaaccaguaugaagccaugagcugugacuucaaugauggaaagaucuccgugcaguacaaccugagccacacauaugcuggcgacaccgccaaucauugcggcacgguugcuaacggggugcuucaaacauuuaugcgcauggccuggggaggcucuuacauugcgcuggauuccgggugcggaggcugggacuguaucaugaccagcuaccaguaucucauuauccagaacacaaccugggaggaucacugccaguucucucggcccuccccuaucggguaccugggacuucugagccaacgcaccagagacauuuauaucucucggcgccgccggggcacauuuacguggacccuguccgauagcgaaggcaaggacacacccgggggauacugucucaccagauggaugcugauugaggccgagcuuaaaugcuucggcaauacagcugucgccaaguguaacgaaaaacaugaugaggaauuuugcgacaugcugcgccucuucgauuuuaauaagcaggcuauccagcggcugaaagcccccgcgcagauguccauucaacuuaucaacaaggccgugaaugcucugaucaacgaccagcucauuaugaagaaucaccugagagacaucaugugcauuccuuauugcaacuacucuaaauauugguaccugaaucacaccgugacgggaaagacaagccuccccaaauguuggcuggucuccaacggcagcuaccuuaaugaaacccauuucucugaugacaucgagcagcaagccgauaacaugauuaccgagaugcugcagaaggaauauauggagcggcaggggaaaacaccucucggacugguugaccuguucguguuuuccaccagcuucuaccuuaucucuaucuuucuccaccuggugaagauuccgacacaucgccacgucgugggcaaacccugcccuaagccccauagacugaaucacaugggcaucuguagcugcggguucuauaagcagccuggaguucccgugcgguggaaacgcugaggacuaguaauaaggaaacuguaugaaugucugugggcaggaagugaagagauccuucuguaaagguuuuuggaauuaugucugcugaauaauaaacuuuuuugaaauaauaaaucugguagaaaaaugagaucuaaaaaaaaaaaaaaaaaaaaaaaaaaaaaaaaaaaaaaaaaaaaaaaaaaaaaaaaaaaaaaaaaaaaaaaaaaaaaaaaaaaaaaaaaaaaaaaaaaaa

SEQ ID NO: 16359 - RNA, 1788 nt, Artificial Sequence
  mRNA product Design b-4 (A100) comprising derived and/or modified sequence from LASV(Z0947-SLE-2011;Clade IV)__AIT17840__GPCmut1 (opt5)
aggagagucccgcagucggcguccagcggcucugcuuguucgugugugugucguugcaggccuuauucaagcuuaccaugggccagaucgugaccuucuuucaagaggucccccacguuauugaagaggugaugaacaucgugcugauugcccucagcauccuggcuguccuuaaggggcuguacaauuucgccacaugcggacucgugggccugguuacguuucuucugcucugugggagauccugcaccauuucucuguauaaaggaguguacgaacugcagacacucgagcugaacauggaaacccuuaauaugacaaugccucugagcuguaccaagaacaauucccaucacuauaucauggucggcaacgagacagggcucgagcugacccuuacgaauaccucuaucauuaaccauaaauucugcaaucugagcgacgcgcacaagaaaaaccucuacgaucaugcucugauguccaucauuucuacauuucaccugagcaucccgaauuucaaccaguaugaagccauguccugugacuuuaauggaggcaagauuagcgugcaguacaaccucucucacuccuaugccggcgaugcugccaaucauugcgggaccguugcuaacggagugcugcaaacauucaugcggauggccuggggcgggagcuacaucgcgcuugacucuggaugcgauagaugggacuguauuaugaccuccuaccaguaucugaucauccagaacacgacaugggaggaucacugccaguuuagccggcccucuccuauuggcuaccucgggcugcuuucccaacgcaccagagacaucuauauuagccggcgccgccggggaacauucaccuggacccuguccgauucugaaggcaaggacacacccggcggguacugucugacgagauggaugcucaucgaggccgagcugaaaugcuuuggaaauaccgcugucgccaaguguaacgaaaaacaugaugaggaguucugcgacaugcuucggcuguuugauuucaauaagcaggcuauucagcgccucaaagcccccgcgcagaugagcauccaacugaucaacaaggccgugaaugcucuuauuaacgaccagcugaucaugaagaaucaccucagagacauuaugugcaucccuuauugcaacuacuccaaauauugguaccugaaucacacaaccacagggaagaccagccugcccaaauguuggcucgugucuaacggauccuaccugaaugaaacgcauuucagcgaugacauugagcagcaagccgauaacaugaucacagagaugcuucagaaggaauauauggagcggcagggcaaaaccccucuggggcucgucgaccuguuuguuuucucuaccagcuuuuaccugaucuccauuuuccuucaccucgugaagaucccgacacaucgccacauugugggaaaacccugcccuaagccccauagacugaaucacaugggcaucuguucuugcggccuguauaagcagccugggguccccgugaaauggaagcggugaggacuaguaauaaggaaacuguaugaaugucugugggcaggaagugaagagauccuucuguaaagguuuuuggaauuaugucugcugaauaauaaacuuuuuugaaauaauaaaucugguagaaaaaugagaucuaaaaaaaaaaaaaaaaaaaaaaaaaaaaaaaaaaaaaaaaaaaaaaaaaaaaaaaaaaaaaaaaaaaaaaaaaaaaaaaaaaaaaaaaaaaaaaaaaaaa

SEQ ID NO: 16360 - RNA, 1658 nt, Artificial Sequence
  mRNA product Design i-3 (hSL-A64-N5) comprising derived and/or modified sequence from LASV(Josiah;Clade IV)__NP_694870__GPCmut1 (opt1) R8472/R8474
aggagaaagcuuaccaugggccagaucgugaccuucuuccaggaggucccccacgugaucgaggaggugaugaacaucguccugaucgcccucagcgugcuggccgugcugaaggggcucuacaacuucgcgaccugcggccuggucgggcuggugacguuccuccugcugugcggccgcuccugcaccaccagccucuacaaggggguguacgagcugcagacccuggagcucaacauggagacgcugaacaugaccaugccgcuguccugcaccaagaacaacagccaccacuacaucauggucggcaacgagaccggccucgagcugacgcugaccaacaccuccaucaucaaccacaaguucugcaaccucagcgacgcccacaagaagaaccuguacgaccacgcccugauguccaucaucagcaccuuccaccucuccauccccaacuucaaccaguacgaggccaugagcugcgacuucaacgggggcaagaucuccgugcaguacaaccugagccacuccuacgccggggacgcggccaaccacugcggcacgguggccaacgggguccugcagaccuucaugcggauggccuggggcggcagcuacaucgcgcucgacuccgggugcggcaacugggacugcaucaugaccagcuaccaguaccugaucauccagaacaccacgugggaggaccacugccaguucucccggcccagccccaucggguaccugggccuccugucccagcgcacccgggacaucuacaucagccgccggcgccggggcaccuucaccuggacgcugagcgacuccgaggggaaggacaccccgggcggguacugccugacccgcuggaugcucaucgaggccgagcugaagugcuucggcaacaccgccguggccaagugcaacgagaagcacgacgaggaguucugcgacaugcugcggcuguucgacuucaacaagcaggccauccagcgccugaaggcgcccgcccagaugagcauccagcugaucaacaaggccgugaacgcccucaucaacgaccagcugaucaugaagaaccaccuccgggacaucaugugcauccccuacugcaacuacuccaaguacugguaccucaaccacacgaccaccggccgcaccagccugcccaagugcuggcuggucuccaacggcagcuaccucaacgagacgcacuucuccgacgacaucgagcagcaggccgacaacaugaucaccgagaugcugcagaaggaguacauggagcggcaggggaagacgccccugggccucguggaccuguucguguucagcaccuccuucuaccugaucagcaucuuccugcaccucgucaagaucccgacccaccgccacaucguggggaaguccugccccaagccccaccggcugaaccacaugggcaucugcagcugcgggcuguacaagcagcccggcgugccggucaaguggaagcgcugaggacuaguuauaagacugacuagcccgaugggccucccaacgggcccuccuccccuccuugcaccgagauuaaucaaaggcucuuuucagagccaccaaaaaaaaaaaaaaaaaaaaaaaaaaaaaaaaaaaaaaaaaaaaaaaaaaaaaaaaaaaaaaaaagaauu

SEQ ID NO: 16361 - RNA, 1655 nt, Artificial Sequence
  mRNA product Design i-3 (hSL-A64-N5) comprising derived and/or modified sequence from LASV(LP;Clade I)__AAF86701__GPCmut1 (opt1)
aggagaaagcuuaccaugggccagaucaucaccuucuuccaggaggugccccacgucaucgaggaggugaugaacaucgugcugaucgcccucagccugcuggccauccucaaggggcuguacaacaucgcgaccugcggcaucaucgggcuggucgccuuccucuuccugugcggcaaguccugcagccugacgcucaagggcggguacgagcugcagacccuggagcucaacauggagacccugaacaugaccaugccgcuguccugcacgaagaacagcucccaccacuacauccgcgugggcaacgagaccgggcucgagcugacccugaccaacacgagcaucaucaaccacaaguucugcaaccucuccgacgcccacaagaagaaccuguacgaccacgcccugaugagcaucaucuccaccuuccaccucagcauccccaacuucaaccaguacgaggccauguccugcgacuucaacggcgggaagaucagcgugcaguacaaccugucccacagcuacgcgggcgacgccgccgagcacugcgggaccgucgccaacggcgugcugcagaccuucaugcggauggcguggggcgggcgcuacaucgcccucgacuccggcugcgggaacugggacugcaucaugacgagcuaccaguaccugaucauccagaacaccaccugggaggaccacugccaguucucccggcccagccccaucggcuaccugggccuccugucccagcgcacccgggacaucuacaucagccgccggcgccgggggacguucaccuggacccugagcgacuccgagggcaacgagacccccgggggcuacugccugacgcgcuggaugcucaucgaggccgagcugaagugcuucgggaacaccgccguggccaagugcaacgagaagcacgacgaggaguucugcgacaugcugcggcuguucgacuucaacaagcaggcgauccgccggcugaaggcccccgcccagaugagcauccagcugaucaacaaggccgucaacgcccucaucaacgaccagcugaucaugaagaaccaccuccgcgacaucaugugcauccccuacugcaacuacuccaaguacugguaccucaaccacaccagcuccggccggaccagccugcccaagugcuggcugaucuccaacgggagcuaccucaacgagacgcaguucuccgacgacaucgagcagcaggcggacaacaugaucaccgagaugcugcagaaggaguacaucgagcgccagggcaagaccccgcuggggcucguggacaucuucaucuucagcaccuccuucuaccugaucagcaucuuccugcaccugaucaagaucccgacgcaccggcacaucgugggcaagcccugccccaagccccaccgccucaaccacaugggggucugcuccugcggccuguacaagcacccgggcgugcccaccaaguggaagcggugaggacuaguuauaagacugacuagcccgaugggccucccaacgggcccuccuccccuccuugcaccgagauuaaucaaaggcucuuuucagagccaccaaaaaaaaaaaaaaaaaaaaaaaaaaaaaaaaaaaaaaaaaaaaaaaaaaaaaaaaaaaaaaaaagaauu

SEQ ID NO: 16362 - RNA, 1655 nt, Artificial Sequence
  mRNA product Design i-3 (hSL-A64-N5) comprising derived and/or modified sequence from LASV(803213;Clade II)__AAF86703__GPCmut1 (opt1)
aggagaaagcuuaccaugggccagaucaucaccuucuuccaggaggugccccacgucaucgaggaggugaugaacaucgugcugaucgcccucagccugcuggccauccucaaggggaucuacaacgucgcgaccugcggccuguucgggcugaucuccuuccuccugcugugcggccgcagcugcuccgugacguacaaggggguguacgagcuccagacccuggagcugaacauggccaaccucaacaugaccaugccgcugagcugcaccaagaacaacucccaccacuacaucauggucggcaacgagacgggccuggagcucacccugaccaacaccagcaucaucaaccacaaguucugcaaccuguccgacgcccacaagaagaaccucuacgaccacgcccugaugagcaucaucuccacguuccaccugagcauccccaacuucaaccaguacgaggccauguccugcgacuucaacgggggcaagaucagcgugcaguacaaccucucccacagcuucgcgguggacgccgccaaccacugcgggaccaucgccaacggcguccugcagaccuucaugcggauggcguggggcggguccuacaucgcccuggacagcggcugcgggaacugggacugcaucaugaccuccuaccaguaccucaucauccagaacacgaccugggaggaccacugccaguucagccgccccucccccaucggcuaccuggggcugcucagccagcggacccgcgacaucuacaucagccggcgccgccggggcaccuucacguggacccucuccgacagcgagggcaacgaggcccccgggggcuacugccugacccgguggaugcugaucgaggccgagcucaagugcuucgggaacaccgccguggcgaagugcaacgagaagcacgacgaggaguucugcgacaugcugcgccuguucgacuucaacaagcaggccaucaagcggcucaagacgcccgcccagauguccauccagcugaucaacaaggccgugaacgcccugaucaacgaccagcucaucaugaagaaccaccuccgcgacaucaugugcauccccuacugcaacuacagccgguacugguaccugaaccacaccgucaccgggaagaccucccugccccgcugcuggcuggugagcaacggcuccuaccugaacgagacgcacuucagcgacgacaucgagcagcaggcggacaacaugaucaccgagaugcuccagaaggaguacauggaccggcagggcaagaccccgcuggggcugguggaccucuucgucuucuccaccagcuucuaccugaucuccaucuuccugcaccuggugaagaucccgacgcaccgccacaucgugggcaagcccugccccaagccccaccggcucaaccacauggggaucugcagcugcggccuguacaagcacccggggguccccgugaaguggaagcgcugaggacuaguuauaagacugacuagcccgaugggccucccaacgggcccuccuccccuccuugcaccgagauuaaucaaaggcucuuuucagagccaccaaaaaaaaaaaaaaaaaaaaaaaaaaaaaaaaaaaaaaaaaaaaaaaaaaaaaaaaaaaaaaaaagaauu

SEQ ID NO: 16363 - RNA, 1655 nt, Artificial Sequence
  mRNA product Design i-3 (hSL-A64-N5) comprising derived and/or modified sequence from LASV(GA391;Clade III)__CAA36645__GPCmut1 (opt1)
aggagaaagcuuaccaugggccagaucgugaccuucuuccaggaggucccccacgugaucgaggaggugaugaacaucguccugaucgcccucagcauccuggccauccugaaggggcucuacaacguggcgaccugcggccugaucgggcuggugacguuccuccugcuguccggccgcagcugcucccucaucuacaaggggaccuacgagcugcagacccuggagcucaacauggagacccugaacaugacgaugccgcugagcugcaccaagaacaacucccaccacuacauccgggucggcaacgagaccggccucgagcugacccugacgaacaccagcauccucaaccacaaguucugcaaccuguccgacgcccacaagcgcaaccuguacgaccacagccucauguccaucaucagcaccuuccaccuguccauccccaacuucaaccaguacgaggccaugagcugcgacuucaacgggggcaagaucaccgugcaguacaaccugucccacagcuucgccguggacgccgcggggcacugcggcacgcucgccaacgggguccugcagaccuucaugcggauggccuggggcggcuccuacaucgcccuggacagcgggugcggcaacugggacugcaucaugaccuccuaccaguaccucaucauccagaacaccacgugggacgaccacugccaguucagccggcccucccccaucggguaccugggccugcucagccagcgcacccgggacaucuacaucagccgccggcgccggggcaccuucaccuggacgcucuccgacagcgaggggaacgagaccccgggcggguacugccugacccgcuggaugcugaucgaggcggagcucaagugcuucggcaacaccgccguggccaagugcaacgagaagcacgacgaggaguucugcgacaugcugcggcuguucgacuucaacaagcaggccauccgccggcucaagacgcccgcccagauguccauccagcugaucaacaaggcggugaacgcccugaucaacgaccagcucaucaugaagaaccaccuccgcgacaucaugugcauccccuacugcaacuacagccgguacugguaccugaaccacaccuccaccggcaagaccagccugccccgcugcuggcugaucuccaacggcagcuaccugaacgagacgaaguucuccgacgacaucgagcagcaggccgacaacaugaucaccgagaugcuccagaaggaguacaucgaccggcaggggaagacgccccugggccuggucgaccuguucguguucagcaccuccuucuaccucaucagcaucuuccugcaccuggugaagaucccgacccaccgccacaucgucgggaagcccugccccaagccccaccggcucaaccacaugggcaucugcuccugcgggcuguacaagcagccgggcgugcccgugcgcuggaagcggugaggacuaguuauaagacugacuagcccgaugggccucccaacgggcccuccuccccuccuugcaccgagauuaaucaaaggcucuuuucagagccaccaaaaaaaaaaaaaaaaaaaaaaaaaaaaaaaaaaaaaaaaaaaaaaaaaaaaaaaaaaaaaaaaagaauu

SEQ ID NO: 16364 - RNA, 1658 nt, Artificial Sequence
  mRNA product Design i-3 (hSL-A64-N5) comprising derived and/or modified sequence from LASV(AV;Clade V)__CCA30314__GPCmut1 (opt1)
aggagaaagcuuaccaugggccagaucgugaccuucuuccaggaggucccccacgugaucgaggaggugaugaacaucguccugaucgcccucagcauccuggccgugcugaaggggcucuacaacaucgcgaccugcggccugaucgggcugaucacguuccuccugcugugcggccgcuccugcagcuccaaccucuacaaggggguguacgagcugcagagccuggaccucaacauggagacccugaacaugaccaugccgcuguccugcaccaagaacaacagccaccacuacauccgggucggcaacgacacgggccucgagcugacccugaccaacaccuccauccucaaccacaaguucugcaaccugagcgacgcccacaagaaggaccuguacgaccacgcccucauguccaucaucagcacguuccaccuguccauccccaacuucaaccaguacgaggccaugagcugcgacuucaacgggggcaagaucuccgugcaguacaaccugagccacuccuacgccaucgacgcggccaaccacugcgggaccguggccaacggcauccuccagaccuucaugcgcauggccuggggcgggagcuacaucgcgcuggacuccggcugcgggaacugggacugcaucaugaccagcuaccaguaccugaucauccagaacacgaccugggagaaccacugccaguucucccgccccagccccaucggcuaccucgggcugcugagccagcggacccgcgacaucuacaucucccggcgccgccggggcaccuucacguggacccugagcgacuccgagggcaacgccacccccgggggcuacugccucacccgguggaugcugaucgaggccgagcugaagugcuucgggaacacggccgucgccaagugcaacgagaagcacgacgaggaguucugcgacaugcuccgccuguucgacuucaacaagcaggcgaucagccggcugaagucccccgcccagaugagcauccagcucaucaacaaggccgugaacgcccugaucaacgaccagcugaucaugaagaaccaccuccgcgacaucaugugcauccccuacugcaacuacuccaaguacugguaccugaaccacaccaucaccgggaagaccagccugcccaagugcuggcucguguccaacggcagcuaccugaacgagacgcacuucuccgacgacaucgagcagcaggccgacaacaugaucaccgagaugcugcagaaggaguacauggagcggcagggcaagaccccgcucgggcuggucgaccuguucguguucagcaccuccuucuaccugaucagcaucuuccuccgccuggugaagaucccgacgcaccggcacaucgucggcaagcccugccccaagccccaccgccugaaccacauggggaucugcuccugcggccucuacaagcagccgggggugcccgugcgguggaagcgcugaggacuaguuauaagacugacuagcccgaugggccucccaacgggcccuccuccccuccuugcaccgagauuaaucaaaggcucuuuucagagccaccaaaaaaaaaaaaaaaaaaaaaaaaaaaaaaaaaaaaaaaaaaaaaaaaaaaaaaaaaaaaaaaaagaauu

SEQ ID NO: 16365 - RNA, 1655 nt, Artificial Sequence
  mRNA product Design i-3 (hSL-A64-N5) comprising derived and/or modified sequence from LASV(Togo/2016/7082;Clade VI)__AMR44577__GPCmut1 (opt1)
aggagaaagcuuaccaugggccagaucaucaccuucuuccaggaggugccccacgucaucgaggaggugaugaacaucgugcugaucgcccucagccugcuggccauccucaagggggucuacaacguggcgaccugcggcaucaucgggcuggugacguuccuguuccucugcggccgcuccugcagccugaucuacaagggguccuacgagcugcagacccucgagcugaacauggagacccugaacaugaccaugccgcucagcugcacgaagaacuccagccaccacuacauccgggucggcaacgagaccggccuggagcugacccucaccaacacguccaucaucaaccacaaguucugcaaccugagcgacgcccacaagcgcaaccuguacgaccacgcccucauguccauccugagcaccuuccaccuguccauccccaacuucaaccaguacgaggccaugagcugcgacuucaacgggggcaagaucuccgugcaguacaaccucagccacgccuacgcgguggacgccgccgagcacugcgggaccgucgccaacggcgugcugcagaccuucaugcggauggcguggggcggguccuacaucgcccuggacagcggcugcgggaacugggacugcaucaugacguccuaccaguaccucaucauccagaacaccaccugggaggaccacugccaguucagccggcccucccccaucggcuaccuggggcugcucagccagcgcacccgggacaucuacaucagccgccggcgccggggcacguucaccuggacccucuccgacagcgagggcaacgagacccccgggggcuacugccugacgcgcuggaugcugaucgaggccgagcucaagugcuucgggaacaccgccguggccaagugcaacgagaagcacgacgaggaguucugcgacaugcugcggcuguucgacuucaacaagcaggcgauccagcgccucaagucccccgcccagaugagcauccagcugaucaacaaggccgucaacgcccugaucaacgaccagcucaucaugaagaaccaccuccgggacaugaugugcauccccuacugcaacuacuccaaguacugguaccugaaccacaccagcuccgggcgcaccagccugcccaagugcuggcugguguccaacggcagcuaccugaacgagacgcacuucuccgacgacaucgagcagcaggccgacaacaugaucaccgagaugcuccagaaggaguacaucgaccggcagggcaagaccccgcuggggcugguggaccucuucgucuucagcaccuccuucuaccugaucagcaucuuccugcaccugaucaagaucccgacgcaccgccacaucgugggcaagcccugccccaagccccaccggcucaaccacauggggaucugcuccugcggccuguacaagcagccgggggugcccacccgcuggaagcggugaggacuaguuauaagacugacuagcccgaugggccucccaacgggcccuccuccccuccuugcaccgagauuaaucaaaggcucuuuucagagccaccaaaaaaaaaaaaaaaaaaaaaaaaaaaaaaaaaaaaaaaaaaaaaaaaaaaaaaaaaaaaaaaaagaauu

SEQ ID NO: 16366 - RNA, 1655 nt, Artificial Sequence
  mRNA product Design i-3 (hSL-A64-N5) comprising derived and/or modified sequence from LASV(KAK-428;Clade n.d. (VII))__ANH09740__GPCmut1 (opt1)
aggagaaagcuuaccaugggccagaucgugaccuucuuccaggaggucccccacgugaucgaggaggugaugaacaucguccugaucgcccucagccugcuggccauccucaaggggcuguacaacuucgcgaccugcggcgugaucgggcugaucacguuccuccugcugugcggccgcuccugcagcgccaccuacaaggggcaguacgagcuccagacccuggagcugaacauggagucccucaacaugaccaugccgcugagcugcacgaagaacaacucccaccacuacauccgggccggcaacaacaccggccuggagcucacccugaccaacacgagcaucaucucccacaaguucugcaaccugagcgacgcccacaagaagaaccucuacgaccacacccugauguccaucaucaccaccuuccaccugagcauccccaacuucaaccaguacgaggccauguccugcgacuucaacgggggcaagaucagcauccaguacaaccucucccacagcuacgcgggggacgccgcccagcacugcggcacgguggccaacgggguccugcagaccuucaugcgcauggcguggggcggcuccuaccuggcccucgacagcgggugccgcggcugggacugcaucaucuccagcuaccaguaccugaucauccagaacaccaccugggacgaccacugccaguucucccggcccagccccaucggguaccugggcuucgugagccagaagacgcgcgacaucuacaucucccggcgccgccggggcaccuucaccuggacccugagcgacuccgaggggcacgacaugccgggcggguacugccucacgcgguggaugcugaucgaggccgaccugaagugcuucggcaacaccgccguggccaagugcaacgagaagcacgacgaggaguucugcgacauguggcgccucuucgacuucaacaagcaggcgauccagcggcugaaggcccccgcccagaugaacauccagcugaucaacaaggccgucaacgcccucaucaacgaccagcugaugaugaagaaccaccuccgcgacaucaugugcauccccuacugcaacuacagcaaguucugguaccugaacaacaccaccacgggccggaccucccugccccgcugcuggcugaucagcaacggcuccuaccucaacgagacccacuucagcgacgacaucgagcagcaggcggacaacaugaucaccgagaugcugcagaaggaguacauggaccggcaggggaagacgccccugggccucguggaccuguucguguucuccaccagcuucuaccugaucaccaucuuccuccaccuggucaagaucccgacccaccgccacaucguggggaagcccugccccaagccccaccggcugaaccacaugggcaucugcuccugcgggcuguacaagcagccgggcgugcccguccgcuggaagcggugaggacuaguuauaagacugacuagcccgaugggccucccaacgggcccuccuccccuccuugcaccgagauuaaucaaaggcucuuuucagagccaccaaaaaaaaaaaaaaaaaaaaaaaaaaaaaaaaaaaaaaaaaaaaaaaaaaaaaaaaaaaaaaaaagaauu

SEQ ID NO: 16367 - RNA, 1655 nt, Artificial Sequence; identical to SEQ ID NO: 16361
  mRNA product Design i-3 (hSL-A64-N5) comprising derived and/or modified sequence from LASV(Pinneo-NIG-1969;Clade I)__AIT17836__GPCmut1 (opt1)

SEQ ID NO: 16368 - RNA, 1655 nt, Artificial Sequence
  mRNA product Design i-3 (hSL-A64-N5) comprising derived and/or modified sequence from LASV(ISTH0009-NIG-2011;Clade II)__AIT17404__GPCmut1 (opt1)
aggagaaagcuuaccaugggccagaucaucaccuucuuccaggaggugccccacgucaucgaggaggugaugaacaucgugcugaucgcccucagccugcuggccauccucaaggggaucuacaacgucgcgaccugcggccuguucgggcugguguccuuccuccugcugugcggccgcagcugcuccacgaccuacaaggggguguacgagcuccagacccuggagcuggacauggccagccucaacaugaccaugccgcuguccugcacgaagaacaacagccaccacuacaucauggucggcaacgagaccggccuggagcucacccugaccaacacguccaucaucaaccacaaguucugcaaccugagcgacgcccacaagaagaaccucuacgaccacgcccugauguccaucaucagcaccuuccaccuguccauccccaacuucaaccaguacgaggccaugagcugcgacuucaacgggggcaagaucuccgugcaguacaaccucagccacgcguacgccguggacgccgccaaccacugcgggaccaucgcgaacggcguccugcagaccuucaugcggauggccuggggcggguccuacaucgcccuggacagcggcugcggguccugggacugcaucaugacgagcuaccaguaccucaucauccagaacaccaccugggaggaccacugccaguucucccgccccagccccaucggcuaccuggggcugcucagccagcggacccgcgacaucuacaucucccggcgccgccggggcacguucaccuggacccucagcgacuccgagggcaacgagacccccgggggcuacugccugacgcgguggaugcugaucgaggccgagcucaagugcuucgggaacaccgccguggcgaagugcaacgagaagcacgacgaggaguucugcgacaugcugcgccuguucgacuucaacaagcaggccauccggcgccucaagacccccgcccagaugagcauccagcugaucaacaaggccgugaacgcccugaucaacgaccagcucaucaugaagaaccaccuccgggacaucaugugcaucccguacugcaacuacuccaaguacugguaccugaaccacaccgucacggggaagaccagccugccccgcugcuggcugguguccaacggcagcuaccugaacgagacccacuucuccgacgacaucgagcagcaggcggacaacaugaucaccgagcuccugcagaaggaguacauggaccggcagggcaagacgccccuggggcucguggaccuguucgucuucagcaccuccuucuaccugaucagcaucuuccugcaccucaucaagaucccgacccaccgccacaucaccggcaagcccugccccaagccccaccggcugaaccacauggggaucugcuccugcggccuguacaagcacccgggggugcccgugaaguggaagcgcugaggacuaguuauaagacugacuagcccgaugggccucccaacgggcccuccuccccuccuugcaccgagauuaaucaaaggcucuuuucagagccaccaaaaaaaaaaaaaaaaaaaaaaaaaaaaaaaaaaaaaaaaaaaaaaaaaaaaaaaaaaaaaaaaagaauu

SEQ ID NO: 16369 - RNA, 1655 nt, Artificial Sequence
  mRNA product Design i-3 (hSL-A64-N5) comprising derived and/or modified sequence from LASV(ISTH2010-NIG-2012;Clade II)__AIT17482__GPCmut1 (opt1)
aggagaaagcuuaccaugggccagaucaucaccuucuuccaggaggugccccacgucaucgaggaggugaugaacaucgugcugaucgcccucagccugcuggccauccucaaggggaucuacaacgucgcgaccugcggccuguucgggcugguguccuuccuccugcugugcggccgcagcugcuccacgaccuacaaggggguguacgagcuccagacccuggagcuggacauggccagccucaacaugaccaugccgcuguccugcacgaagaacaacagccaccacuacaucauggucggcaacgagaccggccuggagcucacccugaccaacacguccaucaucaaccacaaguucugcaaccugagcgacgcccacaagaagaaccucuacgaccacgcccugauguccaucaucagcaccuuccaccuguccauccccaacuucaaccaguacgaggccaugagcugcgacuucaacgggggcaagaucuccgugcaguacaaccucagccacgcguacgccguggacgccgccaaccacugcgggaccaucgcgaacggcguccugcagaccuucaugcggauggccuggggcggguccuacaucgcccuggacagcggcugcggguccugggacugcaucaugacgagcuaccaguaccucaucauccagaacaucaccugggaggaccacugccaguucucccgccccagccccaucggcuaccuggggcugcucagccagcggacccgcgacaucuacaucucccggcgccgccggggcaccuucacguggacccucagcgacuccgagggcaacgagacccccgggggcuacugccugacccgguggaugcugaucgaggccgagcucaagugcuucgggaacacggccguggcgaagugcaacgagaagcacgacgaggaguucugcgacaugcugcgccuguucgacuucaacaagcaggccauccggcgccucaagacccccgcccagaugagcauccagcugaucaacaaggccgugaacgcccugaucaacgaccagcucaucaugaagaaccaccuccgggacaucaugugcauccccuacugcaacuacuccaaguacugguaccugaaccacaccgucaccgggaagacgagccugccccgcugcuggcugguguccaacggcagcuaccugaacgagacccacuucuccgacgacaucgagcagcaggcggacaacaugaucaccgagcuccugcagaaggaguacaucgaccggcagggcaagaccccgcuggggcucguggaccuguucgucuucagcacguccuucuaccugaucagcaucuuccugcaccucgugaagaucccgacccaccgccacguggucggcaagcccugccccaagccccaccggcugaaccacauggggaucugcuccugcggccuguacaagcacccgggggugcccgugaaguggaagcgcugaggacuaguuauaagacugacuagcccgaugggccucccaacgggcccuccuccccuccuugcaccgagauuaaucaaaggcucuuuucagagccaccaaaaaaaaaaaaaaaaaaaaaaaaaaaaaaaaaaaaaaaaaaaaaaaaaaaaaaaaaaaaaaaaagaauu

SEQ ID NO: 16370 - RNA, 1655 nt, Artificial Sequence
  mRNA product Design i-3 (hSL-A64-N5) comprising derived and/or modified sequence from LASV(Lassa virus/H.sapiens-wt/NGA/2015/ISTH_0543;Clade II)__AVO03639__GPCmut1 (opt1)
aggagaaagcuuaccaugggccagaucaucaccuucuuccaggaggugccccacgucaucgaggaggugaugaacaucgugcugaucgcccucagccugcuggccauccucaaggggaucuacaacgucgcgaccugcggccuguucgggcugguguccuuccuccugcugugcggccgcagcugcuccacgaccuacaaggggguguacgagcuccagacccuggagcuggacauggccaaccucaacaugaccaugccgcugagcugcacgaagaacaacucccaccacuacaucauggucggcaacgagaccggccuggagcucacccugaccaacacgagcaucaucaaccacaaguucugcaaccuguccgacgcccacaagaagaaccucuacgaccacgcccugaugagcaucaucuccaccuuccaccugagcauccccaacuucaaccaguacgaggccauguccugcgacuucaacgggggcaagaucagcgugcaguacaaccucucccacaccuacgcgguggacgccgccaaccacugcgggaccaucgccaacggcguccugcagacguucaugcggauggcguggggcgggagcuacaucgcccuggacuccggcugcgggagcugggacugcaucaugaccuccuaccaguaccucgugauccagaacaccaccugggaggaccacugccaguucagccgccccucccccaucggcuaccuggggcugcucagccagcggacgcgcgacaucuacaucagccggcgccgccggggcaccuucaccuggacccucuccgacagcgagggcaacgagacgcccgggggcuacugccugacccgguggaugcugaucgaggccgagcucaagugcuucgggaacaccgccguggccaagugcaacgagaagcacgacgaggaguucugcgacaugcugcgccuguucgacuucaacaagcaggcgauccggcgccucaagacccccgcccagauguccauccagcugaucaacaaggccgucaacgcccugaucaacgaccagcucaucaugaagaaccaccuccgggacaucaugugcauccccuacugcaacuacagcaaguacugguaccugaaccacacggugaccgggaagaccucccugccccgcugcuggcuggugagcaacggcuccuaccugaacgagacccacuucagcgacgacaucgagcagcaggccgacaacaugaucacggagcuccugcagaaggaguacaucgaccggcagggcaagaccccgcuggggcucgucgaccuguucguguucuccaccagcuucuaccugaucuccaucuuccugcaccucgugaagaucccgacccaccgccacaucacgggcaagcccugccccaagccccaccggcugaaccacauggggaucugcagcugcggccuguacaagcacccggggguccccgugaaguggaagcgcugaggacuaguuauaagacugacuagcccgaugggccucccaacgggcccuccuccccuccuugcaccgagauuaaucaaaggcucuuuucagagccaccaaaaaaaaaaaaaaaaaaaaaaaaaaaaaaaaaaaaaaaaaaaaaaaaaaaaaaaaaaaaaaaaagaauu

SEQ ID NO: 16371 - RNA, 1655 nt, Artificial Sequence
  mRNA product Design i-3 (hSL-A64-N5) comprising derived and/or modified sequence from LASV(Lassa virus/H.sapiens-wt/NGA/2016/ISTH_0009;Clade II)__AVO03571__GPCmut1 (opt1)
aggagaaagcuuaccaugggccagaucaucaccuucuuccaggaggugccccacgucaucgaggaggugaugaacaucgugcugaucgcccucagccugcuggccauccucaaggggaucuacaacgucgcgaccugcggccugcuggggcucguguccuuccugcugcucugcggccgcagcugcuccacgaccuacaaggggguguacgagcugcagacccuggagcucgacauggccagccugaacaugaccaugccgcuguccugcacgaagaacaacagccaccacuacaucauggucggcaacgagaccggccucgagcugacccugaccaacacguccaucaucaaccacaaguucugcaaccucagcgacgcccacaagaagaaccuguacgaccacgcccugauguccaucaucagcaccuuccaccucuccauccccaacuucaaccaguacgaggccaugagcugcgacuucaacgggggccggaucuccgugcaguacaaccugagccacuccuacgcgguggacgccgccaaccacugcgggaccaucgccaacggcguccugcagaccuucaugcgcauggcguggggcgggagcuacaucgcccucgacuccggcugcgggagcugggacugcaucaugacguccuaccaguaccugaucauccagaacaccaccugggaggaccacugccaguucagccggcccagccccaucggcuaccuggggcuccugucccagcgcacccgggacaucuacaucagccgccggcgccggggcacguucaccuggacccuguccgacagcgagggcaacgagacccccgggggcuacugccugacgcgcuggaugcucaucgaggccgagcugaagugcuucgggaacaccgccguggccaagugcaacgagaagcacgacgaggaguucugcgacaugcugcggcuguucgacuucaacaagcaggcgauccgccggcugaagacccccgcccagauguccauccagcugaucaacaaggccgugaacgcccucaucaacgaccagcugaucaugaagaaccaccuccgcgacaucaugugcaucccguacugcaacuacagcaaguacugguaccucaaccacaccgucacggggaagaccucccugccccggugcuggcuggugagcaacggcuccuaccucaacgagacccacuucagcgacgacaucgagcagcaggccgacaacaugaucaccgagcugcugcagaaggaguacaucgaccgccagggcaagacgccccucgggcugguggaccuguucgucuucuccaccagcuucuaccugaucuccaucuuccuccaccuggugaagaucccgacccaccggcacaucaccggcaagcccugccccaagccccaccgccugaaccacauggggaucugcagcugcggccucuacaaccacccgggggugcccgucaaguggaagcggugaggacuaguuauaagacugacuagcccgaugggccucccaacgggcccuccuccccuccuugcaccgagauuaaucaaaggcucuuuucagagccaccaaaaaaaaaaaaaaaaaaaaaaaaaaaaaaaaaaaaaaaaaaaaaaaaaaaaaaaaaaaaaaaaagaauu

SEQ ID NO: 16372 - RNA, 1655 nt, Artificial Sequence
  mRNA product Design i-3 (hSL-A64-N5) comprising derived and/or modified sequence from LASV(Lassa virus/H.sapiens-wt/NGA/2016/ISTH_0017;Clade II)__AVO03567__GPCmut1 (opt1)
aggagaaagcuuaccaugggccagaucaucaccuucuuccaggaggugccccacgucaucgaggaggugaugaacaucgugcugaucgcccucagccugcuggccauccucaaggggaucuacaacgucgcgaccugcggccuguucgggcugguguccuuccuccugcugugcggccgcagcugcuccacgaccuacaaggggguguacgagcuccagacccuggagcuggacauggccagccucaacaugaccaugccgcuguccugcacgaagaacaacagccaccacuacaucauggucggcaacgagaccggccuggagcucacccugaccaacacguccaucaucaaccacaaguucugcaaccugagcgacgcccacaagaagaaccucuacgaccacgcccugauguccaucaucagcaccuuccaccuguccauccccaacuucaaccaguacgaggccaugagcugcgacuucaacgggggcaagaucuccgugcaguacaaccucagccacaccuacgcgaucgacgccgccaaccacugcgggaccaucgccaacggcgugcugcagacguucaugcggauggcguggggcggguccuacaucgcccuggacagcggcugcggguccugggacugcaucaugaccagcuaccaguaccucaucauccagaacaccaccugggaggaccacugccaguucucccgccccagccccaucggcuaccuggggcugcucagccagcggacgcgcgacaucuacaucucccggcgccgccggggcaccuucaccuggacccucagcgacuccgagggcaacgagacgcccgggggcuacugccugacccgguggaugcugaucgaggccgagcucaagugcuucgggaacaccgccgucgccaagugcaacgagaagcacgacgaggaguucugcgacaugcugcgccuguucgacuucaacaagcaggcgauccggcgccucaagacccccgcccagaugagcauccagcugaucaacaaggccgugaacgcccugaucaacgaccagcucaucaugaagaaccaccuccgggacaucaugugcauccccuacugcaacuacuccaaguacugguaccugaaccacacggugaccgggaagaccagccugccccgcugcuggcuggucuccaacggcagcuaccugaacgagacccacuucuccgacgacaucgagcagcaggccgacaacaugaucacggagcuccugcagaaggaguacauggaccggcagggcaagaccccgcuggggcucguggaccuguucguguucagcaccuccuucuaccugaucagcaucuuccugcaccucguccgcaucccgacccaccggcacgugaucggcaagcccugccccaagccccaccgccugaaccacauggggaucugcuccugcggccuguacaagcacccgggggugcccgucaaguggaagcggugaggacuaguuauaagacugacuagcccgaugggccucccaacgggcccuccuccccuccuugcaccgagauuaaucaaaggcucuuuucagagccaccaaaaaaaaaaaaaaaaaaaaaaaaaaaaaaaaaaaaaaaaaaaaaaaaaaaaaaaaaaaaaaaaagaauu

SEQ ID NO: 16373 - RNA, 1655 nt, Artificial Sequence
  mRNA product Design i-3 (hSL-A64-N5) comprising derived and/or modified sequence from LASV(Lassa virus/H.sapiens-wt/NGA/2018/ISTH_0959;Clade II)__AVV65099__GPCmut1 (opt1)
aggagaaagcuuaccaugggccagaucaucaccuucuuccaggaggugccccacgucaucgaggaggugaugaacaucgugcugaucgcccucagccugcuggccauccucaaggggaucuacaacgucgugaccugcggccuguucgggcugguguccuuccuccugcugugcggccgcagcugcuccacgaccuacaagggggucuacgagcuccagacccuggagcuggacauggcgagccucaacaugaccaugccgcuguccugcacgaagaacaacagccaccacuacaucauggugggcaacgagaccggccuggagcucacccugaccaacacguccaucaucaaccacaaguucugcaaccugagcgacgcccacaagaagaaccucuacgaccacgcccugauguccaucaucagcaccuuccaccuguccauccccaacuucaaccaguacgaggccaugagcugcgacuucaacgggggcaagaucuccgugcaguacaaccucagccacgccuacgcgaucgacgccgccaaccacugcgggaccaucgccaacggcguccugcagaccuucaugcggauggcguggggcggguccuacaucgcccuggacagcggcugcggguccugggacugcaucaugacgagcuaccaguaccucaucauccagaacaccaccugggaggaccacugccaguucucccgccccagccccaucggcuaccuggggcugcucagccagcggacccgcgacaucuacaucucccggcgccgccggggcacguucaccuggacccucagcgacuccgagggcaacgagacccccgggggcuacugccugacgcgguggaugcugaucgaggccgagcucaagugcuucgggaacaccgccguggccaagugcaacgagaagcacgacgaggaguucugcgacaugcugcgccuguucgacuucaacaagcaggcgauccggcgccucaagacccccgcccagaugagcauccagcugaucaacaaggccgugaacgcccugaucaacgaccagcucaucaugaagaaccaccuccgggacaucaugugcaucccguacugcaacuacuccaaguacugguaccugaaccacaccgucacggggaagaccagccugccccgcugcuggcugguguccaacggcagcuaccugaacgagacccacuucuccgacgacaucgagcagcaggccgacaacaugaucaccgagcuccugcagaaggaguacaucgaccggcagggcaagacgccccuggggcucguggaccuguucgucuucagcaccuccuucuaccugaucagcaucuuccugcaccucgugaagaucccgacccaccgccacgugaucggcaagcccugccccaagccccaccggcugaaccacauggggaucugcuccugcggccuguacaagcacccggggguccccgugaaguggaagcgcugaggacuaguuauaagacugacuagcccgaugggccucccaacgggcccuccuccccuccuugcaccgagauuaaucaaaggcucuuuucagagccaccaaaaaaaaaaaaaaaaaaaaaaaaaaaaaaaaaaaaaaaaaaaaaaaaaaaaaaaaaaaaaaaaagaauu

SEQ ID NO: 16374 - RNA, 1655 nt, Artificial Sequence
  mRNA product Design i-3 (hSL-A64-N5) comprising derived and/or modified sequence from LASV(LASV003-NIG-2008;Clade II)__AIT17580__GPCmut1 (opt1)
aggagaaagcuuaccaugggccagaucaucaccuucuuccaggaggugccccacgucaucgaggaggugaugaacaucgugcugaucgcccucagccugcuggccauccucaaggggaucuacaacgucgcgaccugcggccuguucgggcugguguccuuccuccugcugugcggccgcagcugcuccacgaccuacaaggggguguacgagcuccagacccuggagcuggacauggccagccucaacaugaccaugccgcuguccugcacgaagaacaacagccaccacuacaucauggucggcaacgagaccggccuggagcucacccugaccaacacguccaucaucaaccacaaguucugcaaccugagcgacgcccacaagaagaaccucuacgaccacgcccugauguccaucaucagcaccuuccaccuguccauccccaacuucaaccaguacgaggccaugagcugcgacuucaacgggggcaagaucuccgugcaguacaaccucagccacaccuacgcgguggacgccgccaaccacugcgggaccaucgccaacggcguccugcagacguucaugcggauggcguggggcggguccuacaucgcccuggacagcggcugcggguccugggacugcaucaugaccagcuaccaguaccucaucauccagaacaccaccugggaggaccacugccaguucucccgccccagccccaucggcuaccuggggcugcucagccagcggacgcgcgacaucuacaucucccggcgccgccggggcaccuucaccuggacccucagcgacuccgagagcaacgagacgccgggcggguacugccugacccgguggaugcugaucgaggccgagcucaagugcuucggcaacaccgccguggccaagugcaacgagaagcacgacgaggaguucugcgacaugcugcgccuguucgacuucaacaagcaggcgauccggcgccucaaggcccccgcccagauguccauccagcugaucaacaaggccgugaacgcccugaucaacgaccagcucaucaugaagaaccaccuccgggacaucaugugcauccccuacugcaacuacagcaaguacugguaccugaaccacaccgucacgggccgcaccucccugccccggugcuggcuggugagcaacggguccuaccugaacgagacccacuucagcgacgacaucgagcagcaggcggacaacaugaucaccgagcuccugcagaaggaguacauggaccgccagggcaagacgccccugggccucguggaccuguucgucuucuccaccagcuucuaccugaucuccaucuuccugcaccucgugaagaucccgacccaccggcacgugaucgggaagcccugccccaagccccaccgccugaaccacaugggcaucugcagcugcgggcuguacaagcacccgggcguccccgugaaguggaagcggugaggacuaguuauaagacugacuagcccgaugggccucccaacgggcccuccuccccuccuugcaccgagauuaaucaaaggcucuuuucagagccaccaaaaaaaaaaaaaaaaaaaaaaaaaaaaaaaaaaaaaaaaaaaaaaaaaaaaaaaaaaaaaaaaagaauu

SEQ ID NO: 16375 - RNA, 1655 nt, Artificial Sequence
  mRNA product Design i-3 (hSL-A64-N5) comprising derived and/or modified sequence from LASV(LASV035-NIG-2009;Clade II)__AIT17588__GPCmut1 (opt1)
aggagaaagcuuaccaugggccagaucaucaccuucuuccaggaggugccccacgucaucgaggaggugaugaacaucgugcugaucgcccucagccugcuggccauccucaaggggaucuacaacgucgcgaccugcggccuguucgggcugguguccuuccuccugcugugcggccgcagcugcuccacgaccuacaaggggguguacgagcuccagacccuggagcuggacauggccagccucaacaugaccaugccgcuguccugcacgaagaacaacagccaccacuacaucauggucggcaacgagaccggccuggagcucacccugaccaacacguccaucaucaaccacaaguucugcaaccugagcgacgcccacaagaagaaccucuacgaccacgcccugauguccaucaucagcaccuuccaccuguccauccccaacuucaaccaguacgaggccaugagcugcgacuucaacgggggcaagaucuccgugcaguacaaccucagccacgcguacgccguggacgccgccaaccacugcgggaccaucgcgaacggcguccugcagaccuucaugcggauggccuggggcggguccuacaucgcccuggacagcggcugcggguccugggacugcaucaugacgagcuaccaguaccucaucauccagaacaccaccugggaggaccacugccaguucucccgccccagccccaucggcuaccuggggcugcucagccagcggacccgcgacaucuacaucucccggcgccgccggggcacguucaccuggacccucagcgacuccgagggcaacgagacccccgggggcuacugccugacgcgguggaugcugaucgaggccgagcucaagugcuucgggaacaccgccguggcgaagugcaacgagaagcacgacgaggaguucugcgacaugcugcgccuguucgacuucaacaagcaggccauccggcgccucaaggcccccgcccagaugagcauccagcugaucaacaaggccgugaacgcgcugaucaacgaccagcucaucaugaagaaccaccuccgggacaucaugugcauccccuacugcaacuacuccaaguacugguaccugaaccacaccgucaccgggaagacgagccugccccgcugcuggcugguguccaacggcagcuaccugaacgagacccacuucuccgacgacaucgagcagcaggccgacaacaugaucaccgagcuccugcagaaggaguacaucgaccggcagggcaagaccccgcuggggcucguggaccuguucgucuucagcacguccuucuaccugaucagcaucuuccugcaccucgugaagaucccgacccaccgccacgugaucggcaagcccugccccaagccccaccggcugaaccacauggggaucugcuccugcggccuguacaagcacccggggguccccgugaaguggaagcgcugaggacuaguuauaagacugacuagcccgaugggccucccaacgggcccuccuccccuccuugcaccgagauuaaucaaaggcucuuuucagagccaccaaaaaaaaaaaaaaaaaaaaaaaaaaaaaaaaaaaaaaaaaaaaaaaaaaaaaaaaaaaaaaaaagaauu

SEQ ID NO: 16376 - RNA, 1655 nt, Artificial Sequence
  mRNA product Design i-3 (hSL-A64-N5) comprising derived and/or modified sequence from LASV(LASV1000-NIG-2009;Clade II)__AIT17782__GPCmut1 (opt1)
aggagaaagcuuaccaugggccagaucaucaccuucuuccaggaggugccccacgucaucgaggaggugaugaacaucgugcugaucgcccucagccugcuggccauccucaaggggaucuacaacgucgcgaccugcggccuguucgggcugguguccuuccuccugcugugcggccgcagcugcuccacgaccuacaaggggguguacgagcuccagacccuggagcuggacauggccagccucaacaugaccaugccgcuguccugcacgaagaacaacagccaccacuacaucauggucggcaacgagaccggccuggagcucacccugaccaacacguccaucaucaaccacaaguucugcaaccugagcgacgcccacaagaagaaccucuacgaccacgcccugauguccaucaucagcaccuuccaccuguccauccccaacuucaaccaguacgaggccaugagcugcgacuucaacgggggcaagaucuccgugcaguacaaccucagccacaccuacgcgguggacgccgccaaccacugcgggaccaucgccaacggcguccugcagacguucaugcggauggcguggggcggguccuacaucgcccuggacagcggcugcggguccugggacugcaucaugaccagcuaccaguaccucaucauccagaacaccaccugggaggaccacugccaguucucccgccccagccccaucggcuaccuggggcugcucagccagcggacgcgcgacaucuacaucucccggcgccgccggggcaccuucaccuggacccucagcgacuccgagggcaacgagacgcccgggggcuacugccugacccgguggaugcugaucgaggccgagcucaagugcuucgggaacaccgccguggccaagugcaacgagaagcacgacgaggaguucugcgacaugcugcgccuguucgacuucaacaagcaggcgaucaagcggcucaagacccccgcccagaugagcauccagcugaucaacaaggccgugaacgcccugaucaacgaccagcucaucaugaagaaccaccuccgcgacaucaugugcauccccuacugcaacuacuccaaguacugguaccugaaccacacggucaccgggaagaccagccugccccggugcuggcugguguccaacggcagcuaccugaacgagacccacuucuccgacgacaucgagcagcaggccgacaacaugaucacggagcuccugcagaaggaguacaucgaccgccagggcaagaccccgcuggggcucguggaccuguucgucuucagcaccuccuucuaccugaucagcaucuuccugcaccucgugaagaucccgacccaccggcacguggucggcaagcccugccccaagccccaccgccugaaccacauggggaucugcuccugcggccuguacaagcacccgggggugcccgugaaguggaagcggugaggacuaguuauaagacugacuagcccgaugggccucccaacgggcccuccuccccuccuugcaccgagauuaaucaaaggcucuuuucagagccaccaaaaaaaaaaaaaaaaaaaaaaaaaaaaaaaaaaaaaaaaaaaaaaaaaaaaaaaaaaaaaaaaagaauu

SEQ ID NO: 16377 - RNA, 1655 nt, Artificial Sequence
  mRNA product Design i-3 (hSL-A64-N5) comprising derived and/or modified sequence from LASV(LASV221-NIG-2010;Clade II)__AIT17624__GPCmut1 (opt1)
aggagaaagcuuaccaugggccagaucaucaccuucuuccaggaggugccccacgucaucgaggaggugaugaacaucgugcugaucgcccucagccugcuggccauccucaaggggaucuacaacgucgcgaccugcggccuguucgggcugguguccuuccuccugcugugcggccgcagcugcuccacgaccuacaaggggguguacgagcuccagacccuggagcuggacauggccagccucaacaugaccaugccgcuguccugcacgaagaacaacagccaccacuacaucauggucggcaacgagaccggccuggagcucacccugaccaacacguccaucaucaaccacaaguucugcaaccugagcgacgcccacaagaagaaccucuacgaccacgcccugauguccaucaucagcaccuuccaccuguccauccccaacuucaaccaguacgaggccaugagcugcgacuucaacgggggcaagaucuccgugcaguacaaccucagccacaccuacgcgaucgacgccgccaaccacugcgggaccaucgccaacggcgugcugcagacguucaugcggauggcguggggcggguccuacaucgcccuggacagcggcugcggguccugggacugcaucaugaccagcuaccaguaccucaucauccagaacaccaccugggaggaccacugccaguucucccgccccagccccaucggcuaccuggggcugcucagccagcggacgcgcgacaucuacaucucccggcgccgccggggcaccuucaccuggacccucagcgacuccgagggcaacgagacgcccgggggcuacugccugacccgguggaugcugaucgaggccgagcucaagugcuucgggaacaccgccgucgccaagugcaacgagaagcacgacgaggaguucugcgacaugcugcgccuguucgacuucaacaagcaggcgauccggcgccucaagacccccgcccagaugagcauccagcugaucaacaaggccgugaacgcccugaucaacgaccagcucaucaugaagaaccaccuccgggacaucaugugcauccccuacugcaacuacuccaaguacugguaccugaaccacacggugaccgggaagaccagccugccccgcugcuggcuggucuccaacggcagcuaccugaacgagacccacuucuccgacgacaucgagcagcaggccgacaacaugaucacggagaugcuccagaaggaguacauggaccggcagggcaagaccccgcuggggcugguggaccucuucguguucagcaccuccuucuaccugaucagcaucuuccugcaccuggucaagaucccgacccaccgccacgugaucggcaagcccugccccaagccccaccggcucaaccacauggggaucugcuccugcggccuguacaagcacccgggggugcccgucaaguggaagcgcugaggacuaguuauaagacugacuagcccgaugggccucccaacgggcccuccuccccuccuugcaccgagauuaaucaaaggcucuuuucagagccaccaaaaaaaaaaaaaaaaaaaaaaaaaaaaaaaaaaaaaaaaaaaaaaaaaaaaaaaaaaaaaaaaagaauu

SEQ ID NO: 16378 - RNA, 1655 nt, Artificial Sequence
  mRNA product Design i-3 (hSL-A64-N5) comprising derived and/or modified sequence from LASV(LASV237-NIG-2010;Clade II)__AIT17638__GPCmut1 (opt1)
aggagaaagcuuaccaugggccagaucaucaccuucuuccaggaggugccccacgucaucgaggaggugaugaacaucgugcugaucgcccucagccugcuggccauccucaaggggaucuacaacgucgcgaccugcggccuguucgggcugguguccuuccuccugcugugcggccgcagcugcuccacgaccuacaaggggguguacgagcuccagacccuggagcuggacauggccagccucaacaugaccaugccgcuguccugcacgaagaacaacagccaccacuacaucauggucggcaacgagaccggccuggagcucacccugaccaacacguccaucaucaaccacaaguucugcaaccugagcgacgcccacaagaaggaccucuacgaccacgcccugauguccaucaucagcaccuuccaccuguccauccccaacuucaaccaguacgaggccaugagcugcgacuucaacgggggcaagaucuccgugcaguacaaccucagccacaccuacgcgguggacgccgccaaccacugcgggaccaucgccaacggcguccugcagacguucaugcggauggcguggggcggguccuacaucgcccuggacagcggcugcggguccugggacugcaucaugaccagcuaccaguaccucaucauccagaacaccaccugggaggaccacugccaguucucccgccccagccccaucggcuaccuggggcugcucagccagcggacgcgcgacaucuacaucucccggcgccgccggggcaccuucaccuggacccucagcgacuccgagggcaacgagacgcccgggggcuacugccugacccgguggaugcugaucgaggccgagcucaagugcuucgggaacaccgccguggccaagugcaacgagaagcacgacgaggaguucugcgacaugcugcgccuguucgacuucaacaagcaggcgauccggcgccucaagacccccgcccagaugagcauccagcugaucaacaaggccgugaacgcccugaucaacgaccagcucaucaugaagaaccaccuccgggacaucaugugcauccccuacugcaacuacuccaaguacugguaccugaaccacacggucaccgggaagaccagccugccccgcugcuggcugguguccaacggcagcuaccugaacgagacccacuucuccgacgacaucgagcagcaggccgacaacaugaucacggagcuccugcagaaggaguacauggaccggcagggcaagaccccgcuggggcucguggaccuguucgucuucagcaccuccuucuaccugaucagcaucuuccugcaccucaucaagaucccgacccaccgccacaucacgggcaagcccugccccaagccccaccggcugaaccacauggggaucugcuccugcggccuguacaagcacccgggggugcccgugaaguggaagcgcugaggacuaguuauaagacugacuagcccgaugggccucccaacgggcccuccuccccuccuugcaccgagauuaaucaaaggcucuuuucagagccaccaaaaaaaaaaaaaaaaaaaaaaaaaaaaaaaaaaaaaaaaaaaaaaaaaaaaaaaaaaaaaaaaagaauu

SEQ ID NO: 16379 - RNA, 1655 nt, Artificial Sequence
  mRNA product Design i-3 (hSL-A64-N5) comprising derived and/or modified sequence from LASV(LASV253-NIG-2011;Clade II)__AIT17670__GPCmut1 (opt1)
aggagaaagcuuaccaugggccagaucaucaccuucuuccaggaggugccccacgucaucgaggaggugaugaacaucgugcugaucgcccucagccugcuggccauccucaaggggaucuacaacgucgcgaccugcggccuguucgggcugguguccuuccuccugcugugcggccgcagcugcuccacgaccuacaaggggguguacgagcuccagacccuggagcuggacauggccagccucaacaugaccaugccgcuguccugcacgaagaacaacagccaccacuacaucauggucggcaacgagaccggccuggagcucacccugaccaacacguccaucaucaaccacaaguucugcaaccugagcgacgcccacaagaagaaccucuacgaccacgcccugauguccaucaucagcaccuuccaccuguccauccccaacuucaaccaguacgaggccaugagcugcgacuucaacgggggcaagaucuccgugcaguacaaccucagccacaccuacgcgguggacgccgccaaccacugcgggaccaucgccaacggcguccugcagacguucaugcggauggcguggggcggguccuacaucgcccuggacagcggcugcggguccugggacugcaucaugaccagcuaccaguaccucaucauccagaacaccaccugggaggaccacugccaguucucccgccccagccccaucggcuaccuggggcugcucagccagcggacgcgcgacaucuacaucucccggcgccgccggggcaccuucaccuggacccucagcgacuccgagggcaacgagacgcccgggggcuacugccugacccgguggaugcugaucgaggccgagcucaagugcuucgggaacaccgccguggccaagugcaacgagaagcacgacgaggaguucugcgacaugcugcgccuguucgacuucaacaagcaggcgauccggcgccucaaggcccccgcccagaugagcauccagcugaucaacaaggccgugaacgcccugaucaacgaccagcucaucaugaagaaccaccuccgggacaucaugugcaucccguacugcaacuacuccaaguacugguaccugaaccacaccgucacggggcgcaccagccugccccggugcuggcugguguccaacggcagcuaccugaacgagacccacuucuccgacgacaucgagcagcaggcggacaacaugaucaccgagcuccugcagaaggaguacaucgaccgccagggcaagacgccccuggggcucguggaccuguucgucuucagcaccuccuucuaccugaucagcaucuuccugcaccucgugaagaucccgacccaccggcacaucaucggcaagcccugccccaagccccaccgccugaaccacauggggaucugcuccugcggccuguacaagcacccgggggugcccgucaaguggaagcggugaggacuaguuauaagacugacuagcccgaugggccucccaacgggcccuccuccccuccuugcaccgagauuaaucaaaggcucuuuucagagccaccaaaaaaaaaaaaaaaaaaaaaaaaaaaaaaaaaaaaaaaaaaaaaaaaaaaaaaaaaaaaaaaaagaauu

SEQ ID NO: 16380 - RNA, 1655 nt, Artificial Sequence
  mRNA product Design i-3 (hSL-A64-N5) comprising derived and/or modified sequence from LASV(LASV254-NIG-2011;Clade II)__AIT17674__GPCmut1 (opt1)
aggagaaagcuuaccaugggccagaucaucaccuucuuccaggaggugccccacgucaucgaggaggugaugaacaucgugcugaucgcccucagccugcuggccauccucaaggggaucuacaacgucgcgaccugcggccuguucgggcugguguccuuccuccugcugugcggccgcagcugcuccacgaccuacaaggggguguacgagcuccagacccuggagcuggacaugaccaaccucaacaugacgaugccgcugagcugcaccaagaacaacucccaccacuacaucauggucggcaacgagaccggccuggagcucacccugacgaacaccagcaucaucaaccacaaguucugcaaccuguccgacgcccacaagaagaaccucuacaaccacgcccugaugagcaucaucuccaccuuccaccugagcauccccaacuucaaccaguacgaggccauguccugcgacuucaacgggggcaagaucagcgugcaguacaaccucucccacagcuacgccguggacgcggccaaccacugcgggaccaucgccaacggcguccugcagacguucaugcggauggccuggggcggguccuacaucgcgcuggacagcggcugcgggaacugggacugcaucaugaccuccuaccaguaccucaucauccagaacaccaccugggaggaccacugccaguucagccgccccucccccaucggcuaccuggggcugcucagccagcggacgcgcgacaucuacaucagccggcgccgccggggcaccuucaccuggacccucuccgacagcgagggcaacgagacgcccgggggcuacugccugacccgguggaugcugaucgaggccgagcucaagugcuucgggaacaccgccguggccaagugcaacgagaagcacgacgaggaguucugcgacaugcugcgccuguucgacuucaacaagcaggccauccggcgccucaagacccccgcgcaggccaacauccagcugaucaacaaggccgugaacgcccugaucaacgaccagcucaucaugaagaaccaccuccgggacaucaugugcauccccuacugcaacuacuccaaguacugguaccugaaccacacggucaccgggaagaccagccugccccgcugcuggcugguguccaacggcagcuaccugaacgagacccacuucuccgacgacaucgagcagcaggccgacaacaugaucacggagcuccugcagaaggaguacauggaccggcagggcaagaccccgcuggggcucguggaccuguucgucuucagcaccuccuucuaccugaucagcaucuuccugcaccucgugaagaucccgacccaccgccacgugaucggcaagcccugccccaagccccaccggcugaaccacauggggaucugcuccugcggccuguacaagcacccggggguccccgugaaguggaagcgcugaggacuaguuauaagacugacuagcccgaugggccucccaacgggcccuccuccccuccuugcaccgagauuaaucaaaggcucuuuucagagccaccaaaaaaaaaaaaaaaaaaaaaaaaaaaaaaaaaaaaaaaaaaaaaaaaaaaaaaaaaaaaaaaaagaauu

SEQ ID NO: 16381 - RNA, 1655 nt, Artificial Sequence
  mRNA product Design i-3 (hSL-A64-N5) comprising derived and/or modified sequence from LASV(Nig08-A19;Clade III)__ADU56618__GPCmut1 (opt1)
aggagaaagcuuaccaugggccagaucgugaccuucuuccaggaggucccccacgugaucgaggaggugaugaacaucguccugaucgcccucagcauccuggccauccugaaggggcucuacaacaucgcgaccugcggccugaucgggcuggugacguuccuccugcuguccggccgcagcugcuccaugaccuacaaggggguguacgagcuccagacccuggagcugaacaugaacacccucaacaugacgaugccgcugagcugcaccaagaacaacucccaccacuacaucauggucggcaacgagaccggccuggagcucacccugacgaacaccagccugcuccaccacaaguucugcaaccuguccgacgcccacaagaagaaccuguacgaccacacccucaugagcaucaucuccaccuuccaccugagcauccccaacuucaaccaguacgaggccauguccugcgacuucaacgggggcaagaucacggugcaguacaaccugagccacuccuacgccaucgacgccgcgaaccacugcgggaccguggccaacggcguccuccagaccuucaugcggauggccuggggcgggagcuacaucgcccuggacuccggcugcgggaagugggacugcaucaugaccagcuaccaguaccugaucauccagaacacgaccugggaggaccacugccaguucucccggcccagccccaucggcuaccucgggcugcugucccagcgcacccgggacaucuacaucagccgccggcgccggggcaccuucacguggacccugagcgacuccgagggcaacgagacccccgggggcuacugccucacccgcuggaugcugaucgaggcggagcugaagugcuucgggaacacggccguggccaagugcaacgagaagcacgacgaggaguucugcgacaugcuccggcuguucgacuucaacaagcaggccauccgccggcugaaggcccccgcgcagaugagcauccagcucaucaacaaggccgugaacgcccugaucaacgaccagcugaucaugaagaaccaccuccgcgacaucaugugcauccccuacugcaacuacuccaaguacugguaccugaaccacaccagcaccgggcggaccucccugccccgcugcuggcucgucagcaacggcuccuaccugaacgagacgcacuucagcgacgacaucgagcagcaggccgacaacaugaucaccgagaugcugcagaaggaguaccucgaccggcagggcaagaccccgcuggggcugguggaccuguucguguucuccaccagcuucuaccucaucuccaucuuccugcaccuggucaagaucccgacgcaccgccacaucgugggcaagcccugccccaagccccaccggcucaaccacauggggaucugcagcugcggccuguacaagcagccgggggugcccguccgcuggaagcggugaggacuaguuauaagacugacuagcccgaugggccucccaacgggcccuccuccccuccuugcaccgagauuaaucaaaggcucuuuucagagccaccaaaaaaaaaaaaaaaaaaaaaaaaaaaaaaaaaaaaaaaaaaaaaaaaaaaaaaaaaaaaaaaaagaauu

SEQ ID NO: 16382 - RNA, 1658 nt, Artificial Sequence
  mRNA product Design i-3 (hSL-A64-N5) comprising derived and/or modified sequence from LASV(G1180-SLE-2010;Clade IV)__AIT17168__GPCmut1 (opt1)
aggagaaagcuuaccaugggccagaucgugaccuucuuccaggaggucccccacgugaucgaggaggugaugaacaucguccugaucgcccucagcauccuggccgugcugaaggggcucuacaacuucgcgaccugcggccugguggggcugcucaccuuccugcugcucugcggccgcuccugcaccgccagccgguacaagggggucuacgagcugcagacccuggagcucaacauggagacccugaacaugacgaugccgcuguccugcaccaagaacaacagccaccacuacaucauggugggcaacgagaccggccucgagcugacccugacgaacaccuccaucaucaaccacaaguucugcaaccucagcgacgcccacaagaagaaccuguacgaccacgcccugauguccaucaucagcaccuuccaccucuccauccccaacuucaaccaguacgaggccaugagcugcgacuucaacgggggcaagaucuccgugcaguacaaccugagccacuccuacgcgggggacgccgccaaccacugcggcaccgucgccaacggggugcugcagacguucaugcgcauggcguggggcggcagcuacaucgcccucgacuccgggugcggcagcugggacugcaucaugaccuccuaccaguaccugaucauccagaacaccaccugggaggaccacugccaguucagccggcccucccccaucggguaccugggccuccugagccagcgcacgcgggacaucuacaucagccgccggcgccggggcaccuucaccuggacccuguccgacagcgaggggaaggacacgccgggcggguacugccugacccgcuggaugcucaucgaggccgagcugaagugcuucggcaacaccgccguggccaagugcaacgagaagcacgacgaggaguucugcgacaugcugcggcuguucgacuucaacaagcaggcgauccagcgccugaaggcccccgcccagauguccauccagcugaucaacaaggccgucaacgcccucaucaacgaccagcugaucaugaagaaccaccuccgggacaucaugugcauccccuacugcaacuacagcaaguacugguaccucaaccacaccacgaccggcaagaccucccugcccaagugcuggcuggugagcaacggcuccuaccucaacgagacccacuucagcgacgacaucgagcagcaggcggacaacaugaucacggagaugcugcagaaggaguacauggagcgccaggggaagacgccccugggccucguggaccuguucgucuucuccaccagcuucuaccugaucuccaucuuccugcaccucgugaagaucccgacccaccggcacaucgugggcaagagcugccccaagccccaccgccugaaccacauggggaucugcuccugcgggcuguacaagcagcccggcgucccggugaaguggaagcggugaggacuaguuauaagacugacuagcccgaugggccucccaacgggcccuccuccccuccuugcaccgagauuaaucaaaggcucuuuucagagccaccaaaaaaaaaaaaaaaaaaaaaaaaaaaaaaaaaaaaaaaaaaaaaaaaaaaaaaaaaaaaaaaaagaauu

SEQ ID NO: 16383 - RNA, 1658 nt, Artificial Sequence
  mRNA product Design i-3 (hSL-A64-N5) comprising derived and/or modified sequence from LASV(G1442-SLE-2011;Clade IV)__AIT17180__GPCmut1 (opt1)
aggagaaagcuuaccaugggccagaucgugaccuucuuccaggaggucccccacgugaucgaggaggugaugaacaucguccugaucgcccucagcauccuggccgugcugaaggggcucuacaacguggcgaccugcggccugaucgggcuggucacguuccuccugcugugcggccgcuccugcaccaccacccucuacaaggggguguacgagcugcagacgcuggagcucaacauggagacccugaacaugaccaugccgcugagcugcaccaagaacaacucccaccacuacauccgggugggcaacgagacgggccucgagcugacccugaccaacaccagcaucaucaaccacaaguucugcaaccucuccgacgcccacaagaagaaccuguacgaccacgcccugaugagcaucaucuccacguuccaccucagcauccccaacuucaaccaguacgaggccauguccugcgacuucaacgggggcaagaucagcguccaguacaaccugucccacagcuacgccggggacgcggccaaccacugcggcaccguggccaacggggugcugcagaccuucaugcgcauggccuggggcggcuccuacaucgcgcucgacagcgggugcggcaacugggacugcaucaugaccuccuaccaguaccugaucauccagaacacgaccugggacgaccacugccaguucagccgccccucccccaucggguaccugggccuccugagccagcggacccgcgacgucuacaucucccggcgccgccggggcaccuucacguggacccugagcgacagcgaggggaaggacaccccgggcggguacugccugacccgguggaugcucaucgaggccgagcugaagugcuucggcaacacggccguggccaagugcaacgagaagcacgacgaggaguucugcgacaugcugcgccucuucgacuucaacaagcaggccauccagcggcugaaggcgcccgcccagauguccauccagcugaucaacaaggccgugaacgcccucaucaacgaccagcugaucaugaagaaccaccuccgcgacaucaugugcauccccuacugcaacuacagcaaguacugguaccugaacaacaccgccaccggcaagaccucccugcccaagugcuggcugaucagcaacggcuccuaccucaacgagacgcacuucagcgacgacaucgagcaggaggcggacaacaugaucaccgagaugcugcagaaggaguacauggagcggcaggggaagacgccccugggccucgucgaccuguucguguucuccaccagcuucuaccugaucuccaucuuccugcaccucgugaagaucccgacccaccgccacaucgucggcaagagcugccccaagccccaccggcugaaccacauggggaucugcuccugcgggcuguacaagcagcccggcgugccggugcgcuggaagcggugaggacuaguuauaagacugacuagcccgaugggccucccaacgggcccuccuccccuccuugcaccgagauuaaucaaaggcucuuuucagagccaccaaaaaaaaaaaaaaaaaaaaaaaaaaaaaaaaaaaaaaaaaaaaaaaaaaaaaaaaaaaaaaaaagaauu

SEQ ID NO: 16384 - RNA, 1658 nt, Artificial Sequence
  mRNA product Design i-3 (hSL-A64-N5) comprising derived and/or modified sequence from LASV(G3010-SLE-2013;Clade IV)__AIT17344__GPCmut1 (opt1)
aggagaaagcuuaccaugggccagaucgugaccuucuuccaggaggucccccacgugaucgaggaggugaugaacaucguccugaucgcccucagcauccuggccgugcugaaggggcucuacaacuucgcgaccugcggccugguggggcuggucacguuccuccugcugugcggccgcuccugcaccaccagccucuacaaggggguguacgagcugcagacccuggagcucaacauggagacgcugaacaugaccaugccgcuguccugcaccaagaacaacagccaccacuacaucauggugggcaacgagaccggccucgagcugacgcugaccaacaccuccaucaucaaccacaaguucugcaaccucagcgacgcccacaagaagaaccuguacaaccacgcccugauguccaucaucagcaccuuccaccucuccauccccaacuucaaccaguacgaggccaugagcugcgacuucaacgggggcaagaucuccguccaguacaaccugagccacuccuacgccggggacgcggccagccacugcggcacgguggccaacggggugcugcagaccuucaugcggauggccuggggcggcuccuacaucgcgcucgacagcgggugcggcaagugggacugcaucaugaccuccuaccaguaccugaucauccagaacaccacgugggaggaccacugccaguucagccgccccucccccaucggguaccugggccuccugagccagcggacccgcgacaucuacaucagccggcgccgccggggcaccuucaccuggacgcuguccgacagcgaggggaaggacaccccgggcggguacugccugacccgguggaugcucaucgaggccgagcugaagugcuucggcaacaccgccgucgccaagugcaacgagaagcacgacgaggaguucugcgacaugcugcgccucuucgacuucaacaagcaggccauccagcggcugaagacgcccgcgcagauguccauccagcugaucaacaaggccgugaacgcccucaucaacgaccagcugaucaugaagaaccaccuccgcgacaucaugugcauccccuacugcaacuacagcaaguacugguaccugaaccacaccaccaccggcaagacgucccugcccaagugcuggcuggugagcaacggcuccuaccucaacgagacccacuucagcgacgacaucgagcagcaggccgacaacaugaucaccgagaugcugcagaaggaguacauggagcggcaggggaagacgccccugggccucgucgaccuguucguguucuccaccagcuucuaccugaucuccaucuuccugcaccucgugaagaucccgacccaccgccacaucgucggcaagagcugccccaagccccaccggcugaaccacauggggaucugcuccugcgggcuguacaagcagcccggcgugccggugcgcuggaagcggugaggacuaguuauaagacugacuagcccgaugggccucccaacgggcccuccuccccuccuugcaccgagauuaaucaaaggcucuuuucagagccaccaaaaaaaaaaaaaaaaaaaaaaaaaaaaaaaaaaaaaaaaaaaaaaaaaaaaaaaaaaaaaaaaagaauu

SEQ ID NO: 16385 - RNA, 1658 nt, Artificial Sequence
  mRNA product Design i-3 (hSL-A64-N5) comprising derived and/or modified sequence from LASV(G502-SLE-2009;Clade IV)__AIT17126__GPCmut1 (opt1)
aggagaaagcuuaccaugggccagaucgugaccuucuuccaggaggucccccacgugaucgaggaggugaugaacaucguccugaucgcccucagcauccuggccgugcugaaggggcucuacaacuucgcgaccugcggccugguggggcugcucacguuccugcugcucugcggccgcuccugcaccaccgggcuguacaagggcgucuacgagcugcagacccucgagcugaacauggagacgcugaacaugaccaugccgcucagcugcaccaagaacaacucccaccacuacaucauggugggcaacgagaccgggcuggagcugacgcucaccaacaccagcaucaucaaccacaaguucugcaaccuguccgacgcccacaagaagaaccuguacgaccacgcccucaugagcaucaucuccaccuuccaccugagcauccccaacuucaaccaguacgaggccauguccugcgacuucaacggcgggaagaucagcgugcaguacaaccugucccacagcuacgccggcgacgcggccgaccacugcgggacggucgccaacggcgugcuccagaccuucaugcggauggccuggggcggguccuacaucgcgcuggacagcggcugcgggcggugggacugcaucaugaccuccuaccaguaccugaucauccagaacaccacgugggaggaccacugccaguucagccgccccucccccaucggcuaccucggccugcugagccagcggacccgcgacaucuacaucucccggcgccgccgggggaccuucaccuggacgcugagcgacagcgagggcaaggacacccccgggggcuacugccucacccgguggaugcugaucgaggccgagcugaagugcuucgggaacaccgccguggccaagugcaacgagaagcacgacgaggaguucugcgacaugcuccgccuguucgacuucaacaagcaggccauccagcggcugaaggcgcccgcccagauguccauccagcucaucaacaaggccgucaacgcccugaucaacgaccagcuggugaugaagaaccaccuccgcgacaucaugugcauccccuacugcaacuacagccgguacugguaccugaaccacacgaccaccggccgcaccucccugcccaagugcuggcucgugagcaacggguccuaccugaacgagacgcacuucagcgacgacaucgagcagcaggccgacaacaugaucaccgagaugcugcagaaggaguacauggagcggcagggcaagaccccgcucgggcuggucgaccuguucguguucuccaccagcuucuaccugaucuccaucuuccuccaccuggugaagaucccgacgcaccgccacaucgucggcaagagcugccccaagccccaccggcugaaccacauggggaucugcuccugcggccucuacaagcagcccggcgugccggugaaguggaagcgcugaggacuaguuauaagacugacuagcccgaugggccucccaacgggcccuccuccccuccuugcaccgagauuaaucaaaggcucuuuucagagccaccaaaaaaaaaaaaaaaaaaaaaaaaaaaaaaaaaaaaaaaaaaaaaaaaaaaaaaaaaaaaaaaaagaauu

SEQ ID NO: 16386 - RNA, 1658 nt, Artificial Sequence
  mRNA product Design i-3 (hSL-A64-N5) comprising derived and/or modified sequence from LASV(G733-SLE-2010;Clade IV)__AIT17154__GPCmut1 (opt1)
aggagaaagcuuaccaugggccagaucgugaccuucuuccaggaggucccccacgugaucgaggaggugaugaacaucguccugaucgcccucagcauccuggccgugcugaaggggcucuacaacuucgcgaccugcggcaucguggggcuggucuccuuccugcuccugugcggccgcagcugcacgaccucccuguacaaggggguguacgagcuccagacccuggagcugaacauggagacccucaacaugacgaugccgcugagcugcaccaagaacaacucccaccacuacaucauggugggcaacgagaccggccuggagcucacccugacgaacaccagcaucaucaaccacaaguucugcaaccuguccgacgcccacaagaagaaccucuacgaccacgcccugaugagcaucaucuccaccuuccaccugagcauccccaacuucaaccaguacgaggccauguccugcgacuucaacgggggcaagaucagcguccaguacaaccucucccacagcuacgccggggacgcggccaaccacugcggcaccaucgccaacggggugcugcagacguucaugcggauggccuggggcggcuccuacaucgcgcuggacagcgggugcgaccggugggacugcaucaugaccuccuaccaguaccucaucauccagaacaccaccugggaggaccacugccaguucagccgccccucccccaucggcuaccuggggcugcucagccagcggacgcgcgacaucuacaucagccggcgccgccggggcaccuucaccuggacccucuccgacagcgagggcaaggacacgcccgggggcuacugccugacccgguggaugcugaucgaggccgagcucaagugcuucgggaacaccgccguggccaagugcaacgagaagcacgacgaggaguucugcgacaugcugcgccuguucgacuucaacaagcaggccauccagcggcucaaggcgcccgcccagauguccauccagcugaucaacaaggccgucaacgcccugaucaacgaccagcucaucaugaagaaccaccuccgcgacaucaugugcauccccuacugcaacuacagcaaguacugguaccugaaccacaccacgaccgggaagaccucccugcccaagugcuggcuggugagcaacggcuccuaccugaacgagacccacuucagcgacgacaucgagcagcaggccgacaacaugaucacggagaugcuccagaaggaguacauggagcggcagggcaagaccccgcuggggcugguggaccucuucgucuucuccaccagcuucuaccugaucuccaucuuccugcaccuggugaagaucccgacccaccgccacguggucggcaagagcugccccaagccccaccggcucaaccacauggggaucugcuccugcggccuguacgggcagcccggcgugccggugaaguggaagcgcugaggacuaguuauaagacugacuagcccgaugggccucccaacgggcccuccuccccuccuugcaccgagauuaaucaaaggcucuuuucagagccaccaaaaaaaaaaaaaaaaaaaaaaaaaaaaaaaaaaaaaaaaaaaaaaaaaaaaaaaaaaaaaaaaagaauu

SEQ ID NO: 16387 - RNA, 1658 nt, Artificial Sequence
  mRNA product Design i-3 (hSL-A64-N5) comprising derived and/or modified sequence from MOPV/LASV reassortant(IGS-1;Clade IV)__AFY05576__GPCmut1 (opt1)
aggagaaagcuuaccaugggccagaucgugaccuucuuccaggaggucccccacgugaucgaggaggugaugaacaucguccugaucgcccucagcgugcuggccgugcugaaggggcucuacaacuucgcgaccugcggccuggucgggcuggugacguuccuccugcugugcggccgcuccugcaccaccagccucuacaaggggguguacgagcugcagacccuggagcucaacauggagacgcugaacaugaccaugccgcuguccugcaccaagaacaacagccaccacuacaucauggucggcaacgagaccggccucgagcugacgcugaccaacaccuccaucaucaaccacaaguucugcaaccucagcgacgcccacaagaagaaccuguacgaccacgcccugauguccaucaucagcaccuuccaccucuccauccccaacuucaaccaguacgaggccaugagcugcgacuucaacgggggcaagaucuccgugcaguacaaccugagccacuccuacgccggggacgcggccaaccacugcggcacgguggccaacgggguccugcagaccuucaugcggauggccuggggcggcagcuacaucgcgcucgacuccgggugcggcaacugggacugcaucaugaccagcuaccaguaccugaucauccagaacaccacgugggaggaccacugccaguucucccggcccagccccaucggguaccugggccuccugucccagcgcacccgggacaucuacaucagccgccggcgccggggcaccuucaccuggacgcugagcgacuccgagggggaggacaccccgggcggguacugccugacccgcuggaugcucaucgaggccgagcugaagugcuucggcaacaccgccguggccaagugcaacgagaagcacgacgaggaguucugcgacaugcugcggcuguucgacuucaacaagcaggccauccagcgccugaaggcgcccgcccagaugagcauccagcugaucaacaaggccgugaacgcccucaucaacgaccagcugaucaugaagaaccaccuccgggacaucaugugcauccccuacugcaacuacuccaaguacugguaccucaaccacacgaccaccggccgcaccagccugcccaagugcuggcuggucuccaacggcagcuaccucaacgagacgcacuucuccgacgacaucgagcagcaggccgacaacaugaucaccgagaugcugcagaaggaguacauggagcggcaggggaagacgccccugggccucguggaccuguucguguucagcaccuccuucuaccugaucagcaucuuccugcaccucgucaagaucccgacccaccgccacaucguggggaaguccugccccaagccccaccggcugaaccacaugggcaucugcagcugcgggcuguacaagcagcccggcgugccggucaaguggaagcgcugaggacuaguuauaagacugacuagcccgaugggccucccaacgggcccuccuccccuccuugcaccgagauuaaucaaaggcucuuuucagagccaccaaaaaaaaaaaaaaaaaaaaaaaaaaaaaaaaaaaaaaaaaaaaaaaaaaaaaaaaaaaaaaaaagaauu

SEQ ID NO: 16388 - RNA, 1658 nt, Artificial Sequence
  mRNA product Design i-3 (hSL-A64-N5) comprising derived and/or modified sequence from LASV(LM765-SLE-2012;Clade IV)__AIT17814__GPCmut1 (opt1)
aggagaaagcuuaccaugggccagaucgugaccuucuuccaggaggucccccacgugaucgaggaggugaugaacaucguccugaucgcccucagcauccuggccgugcugaaggggcucuacaacuucgcgaccugcggccugguggggcuggucacguuccuccugcugugcggccgcuccugcaccaccagccucuacaaggggguguacgagcugcagacccuggagcucaacauggagacgcugaacaugaccaugccgcuguccugcaccaagaacaacagccaccacuacaucauggugggcaacgagaccggccucgagcugacgcugaccaacaccuccaucaucgaccacaaguucugcaaccucagcgacgcccaccggaagaaccuguacgaccacgcccugauguccaucaucagcaccuuccaccucuccauccccaacuucaaccaguacgaggccaugagcugcgacuucaacgggggcaagaucuccguccaguacaaccugagccacuccuacgccaaggacgcggccgaccacugcgggacgguggccaacggcgugcugcagaccuucaugcgcauggccuggggcgggagcuacaucgcgcucgacuccggcugcgggcgcugggacugcaucaugaccagcuaccaguaccugaucauccagaacaccacgugggaggaccacugccaguucucccggcccagccccaucggcuaccuggggcuccugucccagcgcacccgggacaucuacaucagccgccggcgccggggcaccuucaccuggacgcugagcgacuccgagggcaaggacacccccgggggcuacugccugacccgcuggaugcucaucgaggccgagcugaagugcuucgggaacaccgccgucgccaagugcaacgagaagcacgacgaggaguucugcgacaugcugcggcuguucgacuucaacaagcaggccauccagcgccugaaggcgcccgcccagaugagcauccagcugaucaacaaggccgugaacgcccucaucaacgaccagcugaucaugaagaaccaccuccgggacaucaugugcauccccuacugcaacuacuccaaguacugguaccucaaccacacgaccaccgggaagaccagccugcccaagugcuggcugguguccaacggcagcuaccucaacgagacgcacuucuccgacgacaucgagcagcaggccgacaacaugaucaccgagaugcugcagaaggaguacauggagcgccagggcaagaccccgcuggggcucgucgaccuguucguguucagcaccuccuucuaccugaucagcaucuuccugcaccucgugaagaucccgacgcaccggcacaucgucggcaagcccugccccaagccccaccgccugaaccacauggggaucugcuccugcggccuguacaagcagccgggggugcccgugaaguggaagcggugaggacuaguuauaagacugacuagcccgaugggccucccaacgggcccuccuccccuccuugcaccgagauuaaucaaaggcucuuuucagagccaccaaaaaaaaaaaaaaaaaaaaaaaaaaaaaaaaaaaaaaaaaaaaaaaaaaaaaaaaaaaaaaaaagaauu

SEQ ID NO: 16389 - RNA, 1658 nt, Artificial Sequence
  mRNA product Design i-3 (hSL-A64-N5) comprising derived and/or modified sequence from LASV(LM776-SLE-2012;Clade IV)__AIT17824__GPCmut1 (opt1)
aggagaaagcuuaccaugggccagaucgugaccuucuuccaggaggucccccacgugaucgaggaggugaugaacaucguccugaucgcccucagcauccuggccgugcugaaggggcucuacaacuucgcgaccugcggccugguggggcuggucacguuccuccugcugugcggccgcuccugcaccaccagcguguacaaggggguguacgagcuccagacccuggagcugaacauggagacgcucaacaugaccaugccgcuguccugcaccaagaacaacagccaccacuacaucauggucggcaacgagaccggccuggagcucacgcugaccaacaccuccaucaucaaccacaaguucugcaaccugagcgacgcccacaagaagaaccucuacgaccacgcccugauguccaucaucagcaccuuccaccuguccauccccaacuucaaccaguacgaggccaugagcugcgacuucaacgggggcaagaucuccgugcaguacaaccucagccacuccuacgccggggacgcggccaaccacugcggcacgguggccaacgggguccugcagaccuucaugcggauggccuggggcggcagcuacaucgcgcuggacuccgggugcggcaagugggacugcaucaugaccagcuaccaguaccucaucauccagaacaccacgugggaggaccacugccaguucucccgccccagccccaucggguaccugggccugcucucccagcggacccgcgacaucuacaucagccggcgccgccggggcaccuucaccuggacgcucagcgacuccgaggggaaggacaccccgggcggguacugccugacccgguggaugcugaucgaggccgagcucaagugcuucggcaacaccgccguggccaagugcaacgagaagcacgacgaggaguucugcgacaugcugcgccuguucgacuucaacaagcaggccauccagcggcucaaggcgcccgcccagaugagcauccagcugaucaacaaggccgugaacgcccugaucaacgaccagcucaucaugaagaaccaccuccgcgacaucaugugcauccccuacugcaacuacuccaaguacugguaccugaaccacacgaccaccggcaagaccagccugcccaagugcuggcuggucuccaacggcagcuaccugaacgagacgcacuucuccgacgacaucgagcagcaggccgacaacaugaucaccgagaugcuccagaaggaguacauggagcggcaggggaagacgccccugggccugguggaccucuucguguucagcaccuccuucuaccugaucagcaucuuccugcaccuggucaagaucccgacccaccgccacaucguggggaaguccugccccaagccccaccggcucaaccacaugggcaucugcagcugcgggcuguacaagcagcccggcgugccgguccgcuggaagcggugaggacuaguuauaagacugacuagcccgaugggccucccaacgggcccuccuccccuccuugcaccgagauuaaucaaaggcucuuuucagagccaccaaaaaaaaaaaaaaaaaaaaaaaaaaaaaaaaaaaaaaaaaaaaaaaaaaaaaaaaaaaaaaaaagaauu

SEQ ID NO: 16390 - RNA, 1658 nt, Artificial Sequence
  mRNA product Design i-3 (hSL-A64-N5) comprising derived and/or modified sequence from LASV(Mad39;Clade IV)__ANH09722__GPCmut1 (opt1)
aggagaaagcuuaccaugggccagaucgugaccuucuuccaggaggucccccacgugaucgaggaggugaugaacaucguccugaucgcccucagcauccuggccgugcugaaggggcucuacaacguggcgaccugcggccugaucgggcuggucacguuccuccugcugugcggccgcuccugcaccaccacccucuacaaggggguguacgagcugcaggcccuggagcucaacauggagacgcugaacaugaccaugccgcugagcugcaccaagaacaacucccaccacuacauccgggugggcaacgagaccggccucgagcugacgcugaccaacaccagccucaucaaccacaaguucugcaaccuguccgacgcccacaagaagaaccuguacgaccacgcccucaugagcaucaucuccaccuuccaccugagcauccccaacuucaaccaguacgaggccauguccugcgacuucaacgacgggaagaucagcguccaguacaaccugucccacacguacgcgggcgacaccgccaaccacugcgggaccguggccaacggcgugcuccagaccuucaugcgcauggccuggggcgggagcuacaucgcgcuggacuccggcugcgggggcugggacugcaucaugacgagcuaccaguaccugaucauccagaacaccaccugggaggaccacugccaguucucccggcccagccccaucggguaccucggccugcugucccagcggacccgcgacaucuacaucagccggcgccgccggggcacguucaccuggacccuguccgacagcgaggggaaggacaccccgggcggguacugccucacgcgguggaugcugaucgaggccgagcugaagugcuucggcaacaccgccgucgccaagugcaacgagaagcacgacgaggaguucugcgacaugcuccgccuguucgacuucaacaagcaggccauccagcggcugaaggcgcccgcccagaugagcauccagcucaucaacaaggccgugaacgcccugaucaacgaccagcugaucaugaagaaccaccuccgcgacaucaugugcauccccuacugcaacuacuccaaguacugguaccugaaccacaccgugaccggcaagacgagccugcccaagugcuggcucgucuccaacggcagcuaccugaacgagacccacuucuccgacgacaucgagcagcaggccgacaacaugaucaccgagaugcugcagaaggaguacauggagcggcaggggaagacgccccucggccugguggaccuguucguguucagcaccuccuucuaccugaucagcaucuuccuccaccuggucaagaucccgacccaccgccacgugguggggaagcccugccccaagccccaccggcugaaccacaugggcaucugcuccugcggguucuacaagcagccgggcguccccgugcgcuggaagcggugaggacuaguuauaagacugacuagcccgaugggccucccaacgggcccuccuccccuccuugcaccgagauuaaucaaaggcucuuuucagagccaccaaaaaaaaaaaaaaaaaaaaaaaaaaaaaaaaaaaaaaaaaaaaaaaaaaaaaaaaaaaaaaaaagaauu

SEQ ID NO: 16391 - RNA, 1658 nt, Artificial Sequence
  mRNA product Design i-3 (hSL-A64-N5) comprising derived and/or modified sequence from LASV(Z0947-SLE-2011;Clade IV)__AIT17840__GPCmut1 (opt1)
aggagaaagcuuaccaugggccagaucgugaccuucuuccaggaggucccccacgugaucgaggaggugaugaacaucguccugaucgcccucagcauccuggccgugcugaaggggcucuacaacuucgcgaccugcggccugguggggcuggucacguuccuccugcugugcggccgcuccugcaccaucagccucuacaaggggguguacgagcugcagacccuggagcucaacauggagacccugaacaugacgaugccgcuguccugcaccaagaacaacagccaccacuacaucauggugggcaacgagaccggccucgagcugacccugacgaacaccuccaucaucaaccacaaguucugcaaccucagcgacgcccacaagaagaaccuguacgaccacgcccugauguccaucaucagcaccuuccaccucuccauccccaacuucaaccaguacgaggccaugagcugcgacuucaacgggggcaagaucuccguccaguacaaccugagccacuccuacgccggggacgcggccaaccacugcggcaccguggccaacggggugcugcagacguucaugcggauggccuggggcggcagcuacaucgcgcucgacuccgggugcgaccggugggacugcaucaugaccagcuaccaguaccugaucauccagaacaccaccugggaggaccacugccaguucucccgccccagccccaucggcuaccuggggcuccugucccagcggacgcgcgacaucuacaucagccggcgccgccggggcaccuucaccuggacccugagcgacuccgagggcaaggacacgcccgggggcuacugccugacccgguggaugcucaucgaggccgagcugaagugcuucgggaacaccgccgucgccaagugcaacgagaagcacgacgaggaguucugcgacaugcugcgccucuucgacuucaacaagcaggccauccagcggcugaaggcgcccgcccagaugagcauccagcugaucaacaaggccgugaacgcccucaucaacgaccagcugaucaugaagaaccaccuccgcgacaucaugugcauccccuacugcaacuacuccaaguacugguaccugaaccacaccacgaccgggaagaccagccugcccaagugcuggcugguguccaacggcagcuaccucaacgagacccacuucuccgacgacaucgagcagcaggccgacaacaugaucacggagaugcugcagaaggaguacauggagcggcagggcaagaccccgcuggggcucgucgaccuguucguguucagcaccuccuucuaccugaucagcaucuuccugcaccucgugaagaucccgacccaccgccacaucgucggcaagcccugccccaagccccaccggcugaaccacauggggaucugcuccugcggccuguacaagcagccgggggugcccgugaaguggaagcgcugaggacuaguuauaagacugacuagcccgaugggccucccaacgggcccuccuccccuccuugcaccgagauuaaucaaaggcucuuuucagagccaccaaaaaaaaaaaaaaaaaaaaaaaaaaaaaaaaaaaaaaaaaaaaaaaaaaaaaaaaaaaaaaaaagaauu

SEQ ID NO: 16392 - RNA, 1658 nt, Artificial Sequence
  mRNA product Design i-3 (hSL-A64-N5) comprising derived and/or modified sequence from LASV(Josiah;Clade IV)__NP_694870__GPCmut1 (opt1)
aggagaaagcuuaccaugggccagaucgugaccuucuuccaggaggucccccacgugaucgaggaggugaugaacaucguccugaucgcccucagcgugcuggccgugcugaaggggcucuacaacuucgcgaccugcggccuggucgggcuggugacguuccuccugcugugcggccgcuccugcaccaccagccucuacaaggggguguacgagcugcagacccuggagcucaacauggagacgcugaacaugaccaugccgcuguccugcaccaagaacaacagccaccacuacaucauggucggcaacgagaccggccucgagcugacgcugaccaacaccuccaucaucaaccacaaguucugcaaccucagcgacgcccacaagaagaaccuguacgaccacgcccugauguccaucaucagcaccuuccaccucuccauccccaacuucaaccaguacgaggccaugagcugcgacuucaacgggggcaagaucuccgugcaguacaaccugagccacuccuacgccggggacgcggccaaccacugcggcacgguggccaacgggguccugcagaccuucaugcggauggccuggggcggcagcuacaucgcgcucgacuccgggugcggcaacugggacugcaucaugaccagcuaccaguaccugaucauccagaacaccacgugggaggaccacugccaguucucccgccccagccccaucggguaccugggccuccugucccagcggacccgcgacaucuacaucagccggcgccggcgcggcaccuucaccuggacgcugagcgacuccgaggggaaggacaccccgggcggguacugccucacccgguggaugcugaucgaggccgagcugaagugcuucggcaacaccgccguggccaagugcaacgagaagcacgacgaggaguucugcgacaugcuccgccuguucgacuucaacaagcaggccauccagcggcugaaggcgcccgcccagaugagcauccagcucaucaacaaggccgugaacgcccugaucaacgaccagcugaucaugaagaaccaccuccgcgacaucaugugcauccccuacugcaacuacuccaaguacugguaccugaaccacacgaccaccgggcggaccagccugcccaagugcuggcucgucuccaacggcagcuaccugaacgagacgcacuucuccgacgacaucgagcagcaggccgacaacaugaucaccgagaugcugcagaaggaguacauggagcgccagggcaagaccccgcucgggcugguggaccuguucguguucagcaccuccuucuaccucaucagcaucuuccugcaccuggucaagauccccacgcaccggcacaucgugggcaaguccugccccaagccccaccgccugaaccacauggggaucugcagcugcggccucuacaagcagccgggggugcccgucaaguggaagcggugaggacuaguuauaagacugacuagcccgaugggccucccaacgggcccuccuccccuccuugcaccgagauuaaucaaaggcucuuuucagagccaccaaaaaaaaaaaaaaaaaaaaaaaaaaaaaaaaaaaaaaaaaaaaaaaaaaaaaaaaaaaaaaaaagaauu

SEQ ID NO: 16393 - RNA, 1655 nt, Artificial Sequence
  mRNA product Design i-3 (hSL-A64-N5) comprising derived and/or modified sequence from LASV(LP;Clade I)__AAF86701__GPCmut1 (opt1)
aggagaaagcuuaccaugggccagaucaucaccuucuuccaggaggugccccacgucaucgaggaggugaugaacaucgugcugaucgcccucagccugcuggccauccucaaggggcuguacaacaucgcgaccugcggcaucaucgggcuggucgccuuccucuuccugugcggcaaguccugcagccugacgcucaagggcggguacgagcugcagacccuggagcucaacauggagacccugaacaugaccaugccgcuguccugcacgaagaacagcucccaccacuacauccgcgugggcaacgagaccgggcucgagcugacccugaccaacacgagcaucaucaaccacaaguucugcaaccucuccgacgcccacaagaagaaccuguacgaccacgcccugaugagcaucaucuccaccuuccaccucagcauccccaacuucaaccaguacgaggccauguccugcgacuucaacggcgggaagaucagcgugcaguacaaccugucccacagcuacgcgggcgacgccgccgagcacugcgggaccgucgccaacggcgugcugcagaccuucaugcggauggcguggggcgggcgcuacaucgcccucgacuccggcugcgggaacugggacugcaucaugacgagcuaccaguaccugaucauccagaacaccaccugggaggaccacugccaguucucccggcccagccccaucggcuaccugggccuccugucccagcgcacccgggacaucuacaucagccgccggcgccgggggacguucaccuggacccugagcgacuccgagggcaacgagacccccgggggcuacugccucacgcgcuggaugcugaucgaggccgagcugaagugcuucgggaacaccgccguggccaagugcaacgagaagcacgacgaggaguucugcgacaugcuccggcuguucgacuucaacaagcaggcgauccgccggcugaaggccccggcccagaugagcauccagcucaucaacaaggccgucaacgcccugaucaacgaccagcugaucaugaagaaccaccuccgcgacaucaugugcauccccuacugcaacuacuccaaguacugguaccugaaccacaccagcuccggccggaccagccugcccaagugcuggcucaucuccaacggcagcuaccugaacgagacgcaguucuccgacgacaucgagcagcaggcggacaacaugaucaccgagaugcugcagaaggaguacaucgagcgccaggggaagaccccgcucggccugguggacaucuucaucuucagcaccuccuucuaccugaucagcaucuuccuccaccugaucaagauccccacgcaccggcacaucguggggaagcccugccccaagccgcaccgccugaaccacaugggcgucugcuccugcgggcuguacaagcaccccggcgugcccaccaaguggaagcggugaggacuaguuauaagacugacuagcccgaugggccucccaacgggcccuccuccccuccuugcaccgagauuaaucaaaggcucuuuucagagccaccaaaaaaaaaaaaaaaaaaaaaaaaaaaaaaaaaaaaaaaaaaaaaaaaaaaaaaaaaaaaaaaaagaauu

SEQ ID NO: 16394 - RNA, 1655 nt, Artificial Sequence
  mRNA product Design i-3 (hSL-A64-N5) comprising derived and/or modified sequence from LASV(803213;Clade II)__AAF86703__GPCmut1 (opt1)
aggagaaagcuuaccaugggccagaucaucaccuucuuccaggaggugccccacgucaucgaggaggugaugaacaucgugcugaucgcccucagccugcuggccauccucaaggggaucuacaacgucgcgaccugcggccuguucgggcugaucuccuuccuccugcugugcggccgcagcugcuccgugacguacaaggggguguacgagcuccagacccuggagcugaacauggccaaccucaacaugaccaugccgcugagcugcaccaagaacaacucccaccacuacaucauggucggcaacgagacgggccuggagcucacccugaccaacaccagcaucaucaaccacaaguucugcaaccuguccgacgcccacaagaagaaccucuacgaccacgcccugaugagcaucaucuccacguuccaccugagcauccccaacuucaaccaguacgaggccauguccugcgacuucaacgggggcaagaucagcgugcaguacaaccucucccacagcuucgcgguggacgccgccaaccacugcgggaccaucgccaacggcguccugcagaccuucaugcggauggcguggggcggguccuacaucgcccuggacagcggcugcgggaacugggacugcaucaugaccuccuaccaguaccucaucauccagaacacgaccugggaggaccacugccaguucagccgccccucccccaucggcuaccuggggcugcucagccagcggacccgcgacaucuacaucagccggcgccggcgcggcaccuucacguggacccuguccgacagcgagggcaacgaggcccccgggggcuacugccugacccgguggaugcucaucgaggccgagcugaagugcuucgggaacaccgccguggcgaagugcaacgagaagcacgacgaggaguucugcgacaugcugcgccucuucgacuucaacaagcaggccaucaagcggcugaagacgccggcccagauguccauccagcugaucaacaaggccgugaacgcccucaucaacgaccagcugaucaugaagaaccaccuccgcgacaucaugugcauccccuacugcaacuacagccgguacugguaccugaaccacaccgucaccggcaagaccucccugccccgcugcuggcuggugagcaacggguccuaccucaacgagacgcacuucagcgacgacaucgagcagcaggcggacaacaugaucaccgagaugcugcagaaggaguacauggaccggcagggcaagaccccgcugggccucguggaccuguucgucuucuccaccagcuucuaccugaucuccaucuuccuccaccuggugaagauccccacgcaccgccacaucguggggaagcccugccccaagccgcaccggcugaaccacaugggcaucugcagcugcgggcuguacaagcaccccggcguccccgugaaguggaagcgcugaggacuaguuauaagacugacuagcccgaugggccucccaacgggcccuccuccccuccuugcaccgagauuaaucaaaggcucuuuucagagccaccaaaaaaaaaaaaaaaaaaaaaaaaaaaaaaaaaaaaaaaaaaaaaaaaaaaaaaaaaaaaaaaaagaauu

SEQ ID NO: 16395 - RNA, 1655 nt, Artificial Sequence
  mRNA product Design i-3 (hSL-A64-N5) comprising derived and/or modified sequence from LASV(GA391;Clade III)__CAA36645__GPCmut1 (opt1)
aggagaaagcuuaccaugggccagaucgugaccuucuuccaggaggucccccacgugaucgaggaggugaugaacaucguccugaucgcccucagcauccuggccauccugaaggggcucuacaacguggcgaccugcggccugaucgggcuggugacguuccuccugcuguccggccgcagcugcucccucaucuacaaggggaccuacgagcugcagacccuggagcucaacauggagacccugaacaugacgaugccgcugagcugcaccaagaacaacucccaccacuacauccgggucggcaacgagaccggccucgagcugacccugacgaacaccagcauccucaaccacaaguucugcaaccuguccgacgcccacaagcgcaaccuguacgaccacagccucauguccaucaucagcaccuuccaccuguccauccccaacuucaaccaguacgaggccaugagcugcgacuucaacgggggcaagaucaccgugcaguacaaccugucccacagcuucgccguggacgccgcggggcacugcggcacgcucgccaacgggguccugcagaccuucaugcggauggccuggggcggcuccuacaucgcccuggacagcgggugcggcaacugggacugcaucaugaccuccuaccaguaccucaucauccagaacaccacgugggacgaccacugccaguucagccgccccucccccaucggguaccugggccugcucagccagcggacccgcgacaucuacaucagccggcgccggcgcggcaccuucaccuggacgcuguccgacagcgaggggaacgagaccccgggcggguacugccugacccgguggaugcucaucgaggcggagcugaagugcuucggcaacaccgccguggccaagugcaacgagaagcacgacgaggaguucugcgacaugcugcgccucuucgacuucaacaagcaggccauccggcgccugaagacgcccgcccagauguccauccagcugaucaacaaggcggugaacgcccucaucaacgaccagcugaucaugaagaaccaccuccgggacaucaugugcauccccuacugcaacuacagccgcuacugguaccugaaccacaccuccaccgggaagaccagccugccccggugcuggcugaucuccaacggcagcuaccucaacgagacgaaguucuccgacgacaucgagcagcaggccgacaacaugaucaccgagaugcugcagaaggaguacaucgaccgccagggcaagaccccgcuggggcucgucgaccuguucguguucagcaccuccuucuaccugaucagcaucuuccugcaccucgugaagauccccacgcaccggcacaucgucggcaagcccugccccaagccgcaccgccugaaccacauggggaucugcuccugcggccuguacaagcagcccggggugcccgugcgguggaagcgcugaggacuaguuauaagacugacuagcccgaugggccucccaacgggcccuccuccccuccuugcaccgagauuaaucaaaggcucuuuucagagccaccaaaaaaaaaaaaaaaaaaaaaaaaaaaaaaaaaaaaaaaaaaaaaaaaaaaaaaaaaaaaaaaaagaauu

SEQ ID NO: 16396 - RNA, 1658 nt, Artificial Sequence
  mRNA product Design i-3 (hSL-A64-N5) comprising derived and/or modified sequence from LASV(AV;Clade V)__CCA30314__GPCmut1 (opt1)
aggagaaagcuuaccaugggccagaucgugaccuucuuccaggaggucccccacgugaucgaggaggugaugaacaucguccugaucgcccucagcauccuggccgugcugaaggggcucuacaacaucgcgaccugcggccugaucgggcugaucacguuccuccugcugugcggccgcuccugcagcuccaaccucuacaaggggguguacgagcugcagagccuggaccucaacauggagacccugaacaugaccaugccgcuguccugcaccaagaacaacagccaccacuacauccgggucggcaacgacacgggccucgagcugacccugaccaacaccuccauccucaaccacaaguucugcaaccugagcgacgcccacaagaaggaccuguacgaccacgcccucauguccaucaucagcacguuccaccuguccauccccaacuucaaccaguacgaggccaugagcugcgacuucaacgggggcaagaucuccgugcaguacaaccugagccacuccuacgccaucgacgcggccaaccacugcgggaccguggccaacggcauccuccagaccuucaugcgcauggccuggggcgggagcuacaucgcgcuggacuccggcugcgggaacugggacugcaucaugaccagcuaccaguaccugaucauccagaacacgaccugggagaaccacugccaguucucccggcccagccccaucggcuaccucgggcugcugagccagcgcacccgggacaucuacaucucccgccggcgccggggcaccuucacguggacccucagcgacuccgagggcaacgccacccccgggggcuacugccugacccgcuggaugcugaucgaggccgagcucaagugcuucgggaacacggccgucgccaagugcaacgagaagcacgacgaggaguucugcgacaugcugcggcuguucgacuucaacaagcaggcgaucagccgccucaaguccccggcccagaugagcauccagcugaucaacaaggccgugaacgcccugaucaacgaccagcucaucaugaagaaccaccuccgggacaucaugugcauccccuacugcaacuacuccaaguacugguaccugaaccacaccaucaccggcaagaccagccugcccaagugcuggcugguguccaacgggagcuaccugaacgagacgcacuucuccgacgacaucgagcagcaggccgacaacaugaucaccgagaugcuccagaaggaguacauggagcgccagggcaagaccccgcugggccuggucgaccucuucguguucagcaccuccuucuaccugaucagcaucuuccugcggcuggugaagauccccacgcaccgccacaucgucgggaagcccugccccaagccgcaccggcucaaccacaugggcaucugcuccugcgggcuguacaagcagcccggcgugcccgugcgcuggaagcggugaggacuaguuauaagacugacuagcccgaugggccucccaacgggcccuccuccccuccuugcaccgagauuaaucaaaggcucuuuucagagccaccaaaaaaaaaaaaaaaaaaaaaaaaaaaaaaaaaaaaaaaaaaaaaaaaaaaaaaaaaaaaaaaaagaauu

SEQ ID NO: 16397 - RNA, 1655 nt, Artificial Sequence
  mRNA product Design i-3 (hSL-A64-N5) comprising derived and/or modified sequence from LASV(Togo/2016/7082;Clade VI)__AMR44577__GPCmut1 (opt1)
aggagaaagcuuaccaugggccagaucaucaccuucuuccaggaggugccccacgucaucgaggaggugaugaacaucgugcugaucgcccucagccugcuggccauccucaagggggucuacaacguggcgaccugcggcaucaucgggcuggugacguuccuguuccucugcggccgcuccugcagccugaucuacaagggguccuacgagcugcagacccucgagcugaacauggagacccugaacaugaccaugccgcucagcugcacgaagaacuccagccaccacuacauccgggucggcaacgagaccggccuggagcugacccucaccaacacguccaucaucaaccacaaguucugcaaccugagcgacgcccacaagcgcaaccuguacgaccacgcccucauguccauccugagcaccuuccaccuguccauccccaacuucaaccaguacgaggccaugagcugcgacuucaacgggggcaagaucuccgugcaguacaaccucagccacgccuacgcgguggacgccgccgagcacugcgggaccgucgccaacggcgugcugcagaccuucaugcggauggcguggggcggguccuacaucgcccuggacagcggcugcgggaacugggacugcaucaugacguccuaccaguaccucaucauccagaacaccaccugggaggaccacugccaguucagccgccccucccccaucggcuaccuggggcugcucagccagcggacccgcgacaucuacaucagccggcgccggcgcggcacguucaccuggacccuguccgacagcgagggcaacgagacccccgggggcuacugccugacgcgguggaugcucaucgaggccgagcugaagugcuucgggaacaccgccguggccaagugcaacgagaagcacgacgaggaguucugcgacaugcugcgccucuucgacuucaacaagcaggcgauccagcggcugaaguccccggcccagaugagcauccagcugaucaacaaggccgucaacgcccucaucaacgaccagcugaucaugaagaaccaccuccgcgacaugaugugcauccccuacugcaacuacuccaaguacugguaccugaaccacaccagcuccggccggaccagccugcccaagugcuggcugguguccaacgggagcuaccucaacgagacgcacuucuccgacgacaucgagcagcaggccgacaacaugaucaccgagaugcugcagaaggaguacaucgaccgccagggcaagaccccgcugggccucguggaccuguucgucuucagcaccuccuucuaccugaucagcaucuuccuccaccugaucaagauccccacgcaccggcacaucguggggaagcccugccccaagccgcaccgccugaaccacaugggcaucugcuccugcgggcuguacaagcagcccggcgugcccacccgguggaagcgcugaggacuaguuauaagacugacuagcccgaugggccucccaacgggcccuccuccccuccuugcaccgagauuaaucaaaggcucuuuucagagccaccaaaaaaaaaaaaaaaaaaaaaaaaaaaaaaaaaaaaaaaaaaaaaaaaaaaaaaaaaaaaaaaaagaauu

SEQ ID NO: 16398 - RNA, 1655 nt, Artificial Sequence
  mRNA product Design i-3 (hSL-A64-N5) comprising derived and/or modified sequence from LASV(KAK-428;Clade n.d. (VII))__ANH09740__GPCmut1 (opt1)
aggagaaagcuuaccaugggccagaucgugaccuucuuccaggaggucccccacgugaucgaggaggugaugaacaucguccugaucgcccucagccugcuggccauccucaaggggcuguacaacuucgcgaccugcggcgugaucgggcugaucacguuccuccugcugugcggccgcuccugcagcgccaccuacaaggggcaguacgagcuccagacccuggagcugaacauggagucccucaacaugaccaugccgcugagcugcacgaagaacaacucccaccacuacauccgggccggcaacaacaccggccuggagcucacccugaccaacacgagcaucaucucccacaaguucugcaaccugagcgacgcccacaagaagaaccucuacgaccacacccugauguccaucaucaccaccuuccaccugagcauccccaacuucaaccaguacgaggccauguccugcgacuucaacgggggcaagaucagcauccaguacaaccucucccacagcuacgcgggggacgccgcccagcacugcggcacgguggccaacgggguccugcagaccuucaugcgcauggcguggggcggcuccuaccuggcccucgacagcgggugccggggcugggacugcaucaucuccagcuaccaguaccugaucauccagaacaccaccugggacgaccacugccaguucucccgccccagccccaucggguaccugggcuucgugagccagaagacgcgggacaucuacaucucccgccggcgccggggcaccuucaccuggacccucagcgacuccgaggggcacgacaugccgggcggguacugccugacgcgcuggaugcugaucgaggccgaccucaagugcuucggcaacaccgccguggccaagugcaacgagaagcacgacgaggaguucugcgacauguggcggcuguucgacuucaacaagcaggcgauccagcgccugaaggcccccgcccagaugaacauccagcucaucaacaaggccgucaacgcccugaucaacgaccagcugaugaugaagaaccaccuccgggacaucaugugcauccccuacugcaacuacagcaaguucugguaccugaacaacaccaccacggggcgcaccucccugccccggugcuggcucaucagcaacggcuccuaccugaacgagacccacuucagcgacgacaucgagcagcaggcggacaacaugaucaccgagaugcugcagaaggaguacauggaccgccagggcaagacgccgcucgggcugguggaccuguucguguucuccaccagcuucuaccucaucaccaucuuccugcaccuggucaagauccccacccaccggcacaucgugggcaagcccugccccaagccgcaccgccucaaccacauggggaucugcuccugcggccuguacaagcagcccggggugcccguccgguggaagcgcugaggacuaguuauaagacugacuagcccgaugggccucccaacgggcccuccuccccuccuugcaccgagauuaaucaaaggcucuuuucagagccaccaaaaaaaaaaaaaaaaaaaaaaaaaaaaaaaaaaaaaaaaaaaaaaaaaaaaaaaaaaaaaaaaagaauu

SEQ ID NO: 16399 - RNA, 1655 nt, Artificial Sequence; identical to SEQ ID NO: 16393
  mRNA product Design i-3 (hSL-A64-N5) comprising derived and/or modified sequence from LASV(Pinneo-NIG-1969;Clade I)__AIT17836__GPCmut1 (opt1)

SEQ ID NO: 16400 - RNA, 1655 nt, Artificial Sequence
  mRNA product Design i-3 (hSL-A64-N5) comprising derived and/or modified sequence from LASV(ISTH0009-NIG-2011;Clade II)__AIT17404__GPCmut1 (opt1)
aggagaaagcuuaccaugggccagaucaucaccuucuuccaggaggugccccacgucaucgaggaggugaugaacaucgugcugaucgcccucagccugcuggccauccucaaggggaucuacaacgucgcgaccugcggccuguucgggcugguguccuuccuccugcugugcggccgcagcugcuccacgaccuacaaggggguguacgagcuccagacccuggagcuggacauggccagccucaacaugaccaugccgcuguccugcacgaagaacaacagccaccacuacaucauggucggcaacgagaccggccuggagcucacccugaccaacacguccaucaucaaccacaaguucugcaaccugagcgacgcccacaagaagaaccucuacgaccacgcccugauguccaucaucagcaccuuccaccuguccauccccaacuucaaccaguacgaggccaugagcugcgacuucaacgggggcaagaucuccgugcaguacaaccucagccacgcguacgccguggacgccgccaaccacugcgggaccaucgcgaacggcguccugcagaccuucaugcggauggccuggggcggguccuacaucgcccuggacagcggcugcggguccugggacugcaucaugacgagcuaccaguaccucaucauccagaacaccaccugggaggaccacugccaguucucccgccccagccccaucggcuaccuggggcugcucagccagcggacccgcgacaucuacaucucccggcgccggcgcggcacguucaccuggacccugagcgacuccgagggcaacgagacccccgggggcuacugccugacgcgguggaugcucaucgaggccgagcugaagugcuucgggaacaccgccguggcgaagugcaacgagaagcacgacgaggaguucugcgacaugcugcgccucuucgacuucaacaagcaggccauccggcgccugaagaccccggcccagaugagcauccagcugaucaacaaggccgugaacgcccucaucaacgaccagcugaucaugaagaaccaccuccgggacaucaugugcauccccuacugcaacuacuccaaguacugguaccugaaccacaccgucacgggcaagaccagccugccccgcugcuggcugguguccaacgggagcuaccucaacgagacccacuucuccgacgacaucgagcagcaggcggacaacaugaucaccgagcugcugcagaaggaguacauggaccggcagggcaagacgccgcucggccugguggaccuguucgucuucagcaccuccuucuaccucaucagcaucuuccugcaccugaucaagauccccacccaccgccacaucaccgggaagcccugccccaagccgcaccggcugaaccacaugggcaucugcuccugcgggcucuacaagcaccccggcgugcccgugaaguggaagcgcugaggacuaguuauaagacugacuagcccgaugggccucccaacgggcccuccuccccuccuugcaccgagauuaaucaaaggcucuuuucagagccaccaaaaaaaaaaaaaaaaaaaaaaaaaaaaaaaaaaaaaaaaaaaaaaaaaaaaaaaaaaaaaaaaagaauu

SEQ ID NO: 16401 - RNA, 1655 nt, Artificial Sequence
  mRNA product Design i-3 (hSL-A64-N5) comprising derived and/or modified sequence from LASV(ISTH2010-NIG-2012;Clade II)__AIT17482__GPCmut1 (opt1)
aggagaaagcuuaccaugggccagaucaucaccuucuuccaggaggugccccacgucaucgaggaggugaugaacaucgugcugaucgcccucagccugcuggccauccucaaggggaucuacaacgucgcgaccugcggccuguucgggcugguguccuuccuccugcugugcggccgcagcugcuccacgaccuacaaggggguguacgagcuccagacccuggagcuggacauggccagccucaacaugaccaugccgcuguccugcacgaagaacaacagccaccacuacaucauggucggcaacgagaccggccuggagcucacccugaccaacacguccaucaucaaccacaaguucugcaaccugagcgacgcccacaagaagaaccucuacgaccacgcccugauguccaucaucagcaccuuccaccuguccauccccaacuucaaccaguacgaggccaugagcugcgacuucaacgggggcaagaucuccgugcaguacaaccucagccacgcguacgccguggacgccgccaaccacugcgggaccaucgcgaacggcguccugcagaccuucaugcggauggccuggggcggguccuacaucgcccuggacagcggcugcggguccugggacugcaucaugacgagcuaccaguaccucaucauccagaacaucaccugggaggaccacugccaguucucccgccccagccccaucggcuaccuggggcugcucagccagcggacccgcgacaucuacaucucccggcgccggcgcggcaccuucacguggacccugagcgacuccgagggcaacgagacccccgggggcuacugccugacccgguggaugcucaucgaggccgagcugaagugcuucgggaacacggccguggcgaagugcaacgagaagcacgacgaggaguucugcgacaugcugcgccucuucgacuucaacaagcaggccauccggcgccugaagaccccggcccagaugagcauccagcugaucaacaaggccgugaacgcccucaucaacgaccagcugaucaugaagaaccaccuccgggacaucaugugcauccccuacugcaacuacuccaaguacugguaccugaaccacaccgucaccggcaagacgagccugccccgcugcuggcugguguccaacgggagcuaccucaacgagacccacuucuccgacgacaucgagcagcaggcggacaacaugaucaccgagcugcugcagaaggaguacaucgaccggcagggcaagaccccgcucggccugguggaccuguucgucuucagcacguccuucuaccucaucagcaucuuccugcaccuggugaagauccccacccaccgccacguggucgggaagcccugccccaagccgcaccggcugaaccacaugggcaucugcuccugcgggcucuacaagcaccccggcgugcccgugaaguggaagcgcugaggacuaguuauaagacugacuagcccgaugggccucccaacgggcccuccuccccuccuugcaccgagauuaaucaaaggcucuuuucagagccaccaaaaaaaaaaaaaaaaaaaaaaaaaaaaaaaaaaaaaaaaaaaaaaaaaaaaaaaaaaaaaaaaagaauu

SEQ ID NO: 16402 - RNA, 1655 nt, Artificial Sequence
  mRNA product Design i-3 (hSL-A64-N5) comprising derived and/or modified sequence from LASV(Lassa virus/H.sapiens-wt/NGA/2015/ISTH_0543;Clade II)__AVO03639__GPCmut1 (opt1)
aggagaaagcuuaccaugggccagaucaucaccuucuuccaggaggugccccacgucaucgaggaggugaugaacaucgugcugaucgcccucagccugcuggccauccucaaggggaucuacaacgucgcgaccugcggccuguucgggcugguguccuuccuccugcugugcggccgcagcugcuccacgaccuacaaggggguguacgagcuccagacccuggagcuggacauggccaaccucaacaugaccaugccgcugagcugcacgaagaacaacucccaccacuacaucauggucggcaacgagaccggccuggagcucacccugaccaacacgagcaucaucaaccacaaguucugcaaccuguccgacgcccacaagaagaaccucuacgaccacgcccugaugagcaucaucuccaccuuccaccugagcauccccaacuucaaccaguacgaggccauguccugcgacuucaacgggggcaagaucagcgugcaguacaaccucucccacaccuacgcgguggacgccgccaaccacugcgggaccaucgccaacggcguccugcagacguucaugcggauggcguggggcgggagcuacaucgcccuggacuccggcugcgggagcugggacugcaucaugaccuccuaccaguaccucgugauccagaacaccaccugggaggaccacugccaguucagccgccccucccccaucggcuaccuggggcugcucagccagcggacgcgcgacaucuacaucagccggcgccggcgcggcaccuucaccuggacccuguccgacagcgagggcaacgagacgcccgggggcuacugccugacccgguggaugcucaucgaggccgagcugaagugcuucgggaacaccgccguggccaagugcaacgagaagcacgacgaggaguucugcgacaugcugcgccucuucgacuucaacaagcaggcgauccggcgccugaagaccccggcccagauguccauccagcugaucaacaaggccgucaacgcccucaucaacgaccagcugaucaugaagaaccaccuccgggacaucaugugcauccccuacugcaacuacagcaaguacugguaccugaaccacacggugaccggcaagaccucccugccccgcugcuggcuggugagcaacggguccuaccucaacgagacccacuucagcgacgacaucgagcagcaggccgacaacaugaucacggagcugcugcagaaggaguacaucgaccggcagggcaagaccccgcucggccuggucgaccuguucguguucuccaccagcuucuaccucaucuccaucuuccugcaccuggugaagauccccacccaccgccacaucacggggaagcccugccccaagccgcaccggcugaaccacaugggcaucugcagcugcgggcucuacaagcaccccggcguccccgugaaguggaagcgcugaggacuaguuauaagacugacuagcccgaugggccucccaacgggcccuccuccccuccuugcaccgagauuaaucaaaggcucuuuucagagccaccaaaaaaaaaaaaaaaaaaaaaaaaaaaaaaaaaaaaaaaaaaaaaaaaaaaaaaaaaaaaaaaaagaauu

SEQ ID NO: 16403 - RNA, 1655 nt, Artificial Sequence
  mRNA product Design i-3 (hSL-A64-N5) comprising derived and/or modified sequence from LASV(Lassa virus/H.sapiens-wt/NGA/2016/ISTH_0009;Clade II)__AVO03571__GPCmut1 (opt1)
aggagaaagcuuaccaugggccagaucaucaccuucuuccaggaggugccccacgucaucgaggaggugaugaacaucgugcugaucgcccucagccugcuggccauccucaaggggaucuacaacgucgcgaccugcggccugcuggggcucguguccuuccugcugcucugcggccgcagcugcuccacgaccuacaaggggguguacgagcugcagacccuggagcucgacauggccagccugaacaugaccaugccgcuguccugcacgaagaacaacagccaccacuacaucauggucggcaacgagaccggccucgagcugacccugaccaacacguccaucaucaaccacaaguucugcaaccucagcgacgcccacaagaagaaccuguacgaccacgcccugauguccaucaucagcaccuuccaccucuccauccccaacuucaaccaguacgaggccaugagcugcgacuucaacgggggccggaucuccgugcaguacaaccugagccacuccuacgcgguggacgccgccaaccacugcgggaccaucgccaacggcguccugcagaccuucaugcgcauggcguggggcgggagcuacaucgcccucgacuccggcugcgggagcugggacugcaucaugacguccuaccaguaccugaucauccagaacaccaccugggaggaccacugccaguucagccggcccagccccaucggcuaccuggggcuccugucccagcgcacccgggacaucuacaucagccgccggcgccggggcacguucaccuggacccuguccgacagcgagggcaacgagacccccgggggcuacugccucacgcgcuggaugcugaucgaggccgagcugaagugcuucgggaacaccgccguggccaagugcaacgagaagcacgacgaggaguucugcgacaugcuccggcuguucgacuucaacaagcaggcgauccgccggcugaagaccccggcccagauguccauccagcucaucaacaaggccgugaacgcccugaucaacgaccagcugaucaugaagaaccaccuccgcgacaucaugugcauccccuacugcaacuacagcaaguacugguaccugaaccacaccgucacgggcaagaccucccugccccggugcuggcucgugagcaacggguccuaccugaacgagacccacuucagcgacgacaucgagcagcaggccgacaacaugaucaccgagcugcuccagaaggaguacaucgaccgccagggcaagacgccgcugggccugguggaccucuucgucuucuccaccagcuucuaccugaucuccaucuuccugcaccuggugaagauccccacccaccggcacaucaccgggaagcccugccccaagccgcaccgccucaaccacaugggcaucugcagcugcgggcuguacaaccaccccggcgugcccgucaaguggaagcggugaggacuaguuauaagacugacuagcccgaugggccucccaacgggcccuccuccccuccuugcaccgagauuaaucaaaggcucuuuucagagccaccaaaaaaaaaaaaaaaaaaaaaaaaaaaaaaaaaaaaaaaaaaaaaaaaaaaaaaaaaaaaaaaaagaauu

SEQ ID NO: 16404 - RNA, 1655 nt, Artificial Sequence
  mRNA product Design i-3 (hSL-A64-N5) comprising derived and/or modified sequence from LASV(Lassa virus/H.sapiens-wt/NGA/2016/ISTH_0017;Clade II)__AVO03567__GPCmut1 (opt1)
aggagaaagcuuaccaugggccagaucaucaccuucuuccaggaggugccccacgucaucgaggaggugaugaacaucgugcugaucgcccucagccugcuggccauccucaaggggaucuacaacgucgcgaccugcggccuguucgggcugguguccuuccuccugcugugcggccgcagcugcuccacgaccuacaaggggguguacgagcuccagacccuggagcuggacauggccagccucaacaugaccaugccgcuguccugcacgaagaacaacagccaccacuacaucauggucggcaacgagaccggccuggagcucacccugaccaacacguccaucaucaaccacaaguucugcaaccugagcgacgcccacaagaagaaccucuacgaccacgcccugauguccaucaucagcaccuuccaccuguccauccccaacuucaaccaguacgaggccaugagcugcgacuucaacgggggcaagaucuccgugcaguacaaccucagccacaccuacgcgaucgacgccgccaaccacugcgggaccaucgccaacggcgugcugcagacguucaugcggauggcguggggcggguccuacaucgcccuggacagcggcugcggguccugggacugcaucaugaccagcuaccaguaccucaucauccagaacaccaccugggaggaccacugccaguucucccgccccagccccaucggcuaccuggggcugcucagccagcggacgcgcgacaucuacaucucccggcgccggcgcggcaccuucaccuggacccugagcgacuccgagggcaacgagacgcccgggggcuacugccugacccgguggaugcucaucgaggccgagcugaagugcuucgggaacaccgccgucgccaagugcaacgagaagcacgacgaggaguucugcgacaugcugcgccucuucgacuucaacaagcaggcgauccggcgccugaagaccccggcccagaugagcauccagcugaucaacaaggccgugaacgcccucaucaacgaccagcugaucaugaagaaccaccuccgggacaucaugugcauccccuacugcaacuacuccaaguacugguaccugaaccacacggugaccggcaagaccagccugccccgcugcuggcuggucuccaacgggagcuaccucaacgagacccacuucuccgacgacaucgagcagcaggccgacaacaugaucacggagcugcugcagaaggaguacauggaccggcagggcaagaccccgcucggccugguggaccuguucguguucagcaccuccuucuaccucaucagcaucuuccugcaccugguccgcauccccacccaccggcacgugaucgggaagcccugccccaagccgcaccgccugaaccacaugggcaucugcuccugcgggcucuacaagcaccccggcgugcccgucaaguggaagcggugaggacuaguuauaagacugacuagcccgaugggccucccaacgggcccuccuccccuccuugcaccgagauuaaucaaaggcucuuuucagagccaccaaaaaaaaaaaaaaaaaaaaaaaaaaaaaaaaaaaaaaaaaaaaaaaaaaaaaaaaaaaaaaaaagaauu

SEQ ID NO: 16405 - RNA, 1655 nt, Artificial Sequence
  mRNA product Design i-3 (hSL-A64-N5) comprising derived and/or modified sequence from LASV(Lassa virus/H.sapiens-wt/NGA/2018/ISTH_0959;Clade II)__AVV65099__GPCmut1 (opt1)
aggagaaagcuuaccaugggccagaucaucaccuucuuccaggaggugccccacgucaucgaggaggugaugaacaucgugcugaucgcccucagccugcuggccauccucaaggggaucuacaacgucgugaccugcggccuguucgggcugguguccuuccuccugcugugcggccgcagcugcuccacgaccuacaagggggucuacgagcuccagacccuggagcuggacauggcgagccucaacaugaccaugccgcuguccugcacgaagaacaacagccaccacuacaucauggugggcaacgagaccggccuggagcucacccugaccaacacguccaucaucaaccacaaguucugcaaccugagcgacgcccacaagaagaaccucuacgaccacgcccugauguccaucaucagcaccuuccaccuguccauccccaacuucaaccaguacgaggccaugagcugcgacuucaacgggggcaagaucuccgugcaguacaaccucagccacgccuacgcgaucgacgccgccaaccacugcgggaccaucgccaacggcguccugcagaccuucaugcggauggcguggggcggguccuacaucgcccuggacagcggcugcggguccugggacugcaucaugacgagcuaccaguaccucaucauccagaacaccaccugggaggaccacugccaguucucccgccccagccccaucggcuaccuggggcugcucagccagcggacccgcgacaucuacaucucccggcgccggcgcggcacguucaccuggacccugagcgacuccgagggcaacgagacccccgggggcuacugccugacgcgguggaugcucaucgaggccgagcugaagugcuucgggaacaccgccguggccaagugcaacgagaagcacgacgaggaguucugcgacaugcugcgccucuucgacuucaacaagcaggcgauccggcgccugaagaccccggcccagaugagcauccagcugaucaacaaggccgugaacgcccucaucaacgaccagcugaucaugaagaaccaccuccgggacaucaugugcauccccuacugcaacuacuccaaguacugguaccugaaccacaccgucacgggcaagaccagccugccccgcugcuggcugguguccaacgggagcuaccucaacgagacccacuucuccgacgacaucgagcagcaggccgacaacaugaucaccgagcugcugcagaaggaguacaucgaccggcagggcaagacgccgcucggccugguggaccuguucgucuucagcaccuccuucuaccucaucagcaucuuccugcaccuggugaagauccccacccaccgccacgugaucgggaagcccugccccaagccgcaccggcugaaccacaugggcaucugcuccugcgggcucuacaagcaccccggcguccccgugaaguggaagcgcugaggacuaguuauaagacugacuagcccgaugggccucccaacgggcccuccuccccuccuugcaccgagauuaaucaaaggcucuuuucagagccaccaaaaaaaaaaaaaaaaaaaaaaaaaaaaaaaaaaaaaaaaaaaaaaaaaaaaaaaaaaaaaaaaagaauu

SEQ ID NO: 16406 - RNA, 1655 nt, Artificial Sequence
  mRNA product Design i-3 (hSL-A64-N5) comprising derived and/or modified sequence from LASV(LASV003-NIG-2008;Clade II)__AIT17580__GPCmut1 (opt1)
aggagaaagcuuaccaugggccagaucaucaccuucuuccaggaggugccccacgucaucgaggaggugaugaacaucgugcugaucgcccucagccugcuggccauccucaaggggaucuacaacgucgcgaccugcggccuguucgggcugguguccuuccuccugcugugcggccgcagcugcuccacgaccuacaaggggguguacgagcuccagacccuggagcuggacauggccagccucaacaugaccaugccgcuguccugcacgaagaacaacagccaccacuacaucauggucggcaacgagaccggccuggagcucacccugaccaacacguccaucaucaaccacaaguucugcaaccugagcgacgcccacaagaagaaccucuacgaccacgcccugauguccaucaucagcaccuuccaccuguccauccccaacuucaaccaguacgaggccaugagcugcgacuucaacgggggcaagaucuccgugcaguacaaccucagccacaccuacgcgguggacgccgccaaccacugcgggaccaucgccaacggcguccugcagacguucaugcggauggcguggggcggguccuacaucgcccuggacagcggcugcggguccugggacugcaucaugaccagcuaccaguaccucaucauccagaacaccaccugggaggaccacugccaguucucccgccccagccccaucggcuaccuggggcugcucagccagcggacgcgcgacaucuacaucucccggcgccggcgcggcaccuucaccuggacccugagcgacuccgagagcaacgagacgccgggcggguacugccugacccgguggaugcucaucgaggccgagcugaagugcuucggcaacaccgccguggccaagugcaacgagaagcacgacgaggaguucugcgacaugcugcgccucuucgacuucaacaagcaggcgauccggcgccugaaggcccccgcccagauguccauccagcugaucaacaaggccgugaacgcccucaucaacgaccagcugaucaugaagaaccaccuccgggacaucaugugcauccccuacugcaacuacagcaaguacugguaccugaaccacaccgucacggggcgcaccucccugccccggugcuggcuggugagcaacggcuccuaccucaacgagacccacuucagcgacgacaucgagcagcaggcggacaacaugaucaccgagcugcugcagaaggaguacauggaccgccaggggaagacgccgcucggccugguggaccuguucgucuucuccaccagcuucuaccucaucuccaucuuccugcaccuggugaagauccccacccaccggcacgugaucggcaagcccugccccaagccgcaccgccugaaccacauggggaucugcagcugcggccucuacaagcaccccgggguccccgugaaguggaagcggugaggacuaguuauaagacugacuagcccgaugggccucccaacgggcccuccuccccuccuugcaccgagauuaaucaaaggcucuuuucagagccaccaaaaaaaaaaaaaaaaaaaaaaaaaaaaaaaaaaaaaaaaaaaaaaaaaaaaaaaaaaaaaaaaagaauu

SEQ ID NO: 16407 - RNA, 1655 nt, Artificial Sequence
  mRNA product Design i-3 (hSL-A64-N5) comprising derived and/or modified sequence from LASV(LASV035-NIG-2009;Clade II)__AIT17588__GPCmut1 (opt1)
aggagaaagcuuaccaugggccagaucaucaccuucuuccaggaggugccccacgucaucgaggaggugaugaacaucgugcugaucgcccucagccugcuggccauccucaaggggaucuacaacgucgcgaccugcggccuguucgggcugguguccuuccuccugcugugcggccgcagcugcuccacgaccuacaaggggguguacgagcuccagacccuggagcuggacauggccagccucaacaugaccaugccgcuguccugcacgaagaacaacagccaccacuacaucauggucggcaacgagaccggccuggagcucacccugaccaacacguccaucaucaaccacaaguucugcaaccugagcgacgcccacaagaagaaccucuacgaccacgcccugauguccaucaucagcaccuuccaccuguccauccccaacuucaaccaguacgaggccaugagcugcgacuucaacgggggcaagaucuccgugcaguacaaccucagccacgcguacgccguggacgccgccaaccacugcgggaccaucgcgaacggcguccugcagaccuucaugcggauggccuggggcggguccuacaucgcccuggacagcggcugcggguccugggacugcaucaugacgagcuaccaguaccucaucauccagaacaccaccugggaggaccacugccaguucucccgccccagccccaucggcuaccuggggcugcucagccagcggacccgcgacaucuacaucucccggcgccggcgcggcacguucaccuggacccugagcgacuccgagggcaacgagacccccgggggcuacugccugacgcgguggaugcucaucgaggccgagcugaagugcuucgggaacaccgccguggcgaagugcaacgagaagcacgacgaggaguucugcgacaugcugcgccucuucgacuucaacaagcaggccauccggcgccugaaggccccggcccagaugagcauccagcugaucaacaaggccgugaacgcgcucaucaacgaccagcugaucaugaagaaccaccuccgggacaucaugugcauccccuacugcaacuacuccaaguacugguaccugaaccacaccgucaccggcaagacgagccugccccgcugcuggcugguguccaacgggagcuaccucaacgagacccacuucuccgacgacaucgagcagcaggccgacaacaugaucaccgagcugcugcagaaggaguacaucgaccggcagggcaagaccccgcucggccugguggaccuguucgucuucagcacguccuucuaccucaucagcaucuuccugcaccuggugaagauccccacccaccgccacgugaucgggaagcccugccccaagccgcaccggcugaaccacaugggcaucugcuccugcgggcucuacaagcaccccggcguccccgugaaguggaagcgcugaggacuaguuauaagacugacuagcccgaugggccucccaacgggcccuccuccccuccuugcaccgagauuaaucaaaggcucuuuucagagccaccaaaaaaaaaaaaaaaaaaaaaaaaaaaaaaaaaaaaaaaaaaaaaaaaaaaaaaaaaaaaaaaaagaauu

SEQ ID NO: 16408 - RNA, 1655 nt, Artificial Sequence
  mRNA product Design i-3 (hSL-A64-N5) comprising derived and/or modified sequence from LASV(LASV1000-NIG-2009;Clade II)__AIT17782__GPCmut1 (opt1)
aggagaaagcuuaccaugggccagaucaucaccuucuuccaggaggugccccacgucaucgaggaggugaugaacaucgugcugaucgcccucagccugcuggccauccucaaggggaucuacaacgucgcgaccugcggccuguucgggcugguguccuuccuccugcugugcggccgcagcugcuccacgaccuacaaggggguguacgagcuccagacccuggagcuggacauggccagccucaacaugaccaugccgcuguccugcacgaagaacaacagccaccacuacaucauggucggcaacgagaccggccuggagcucacccugaccaacacguccaucaucaaccacaaguucugcaaccugagcgacgcccacaagaagaaccucuacgaccacgcccugauguccaucaucagcaccuuccaccuguccauccccaacuucaaccaguacgaggccaugagcugcgacuucaacgggggcaagaucuccgugcaguacaaccucagccacaccuacgcgguggacgccgccaaccacugcgggaccaucgccaacggcguccugcagacguucaugcggauggcguggggcggguccuacaucgcccuggacagcggcugcggguccugggacugcaucaugaccagcuaccaguaccucaucauccagaacaccaccugggaggaccacugccaguucucccgccccagccccaucggcuaccuggggcugcucagccagcggacgcgcgacaucuacaucucccggcgccggcgcggcaccuucaccuggacccugagcgacuccgagggcaacgagacgcccgggggcuacugccugacccgguggaugcucaucgaggccgagcugaagugcuucgggaacaccgccguggccaagugcaacgagaagcacgacgaggaguucugcgacaugcugcgccucuucgacuucaacaagcaggcgaucaagcggcugaagaccccggcccagaugagcauccagcugaucaacaaggccgugaacgcccucaucaacgaccagcugaucaugaagaaccaccuccgcgacaucaugugcauccccuacugcaacuacuccaaguacugguaccugaaccacacggucaccggcaagaccagccugccccggugcuggcugguguccaacgggagcuaccucaacgagacccacuucuccgacgacaucgagcagcaggccgacaacaugaucacggagcugcugcagaaggaguacaucgaccgccagggcaagaccccgcucggccugguggaccuguucgucuucagcaccuccuucuaccucaucagcaucuuccugcaccuggugaagauccccacccaccggcacguggucgggaagcccugccccaagccgcaccgccugaaccacaugggcaucugcuccugcgggcucuacaagcaccccggcgugcccgugaaguggaagcggugaggacuaguuauaagacugacuagcccgaugggccucccaacgggcccuccuccccuccuugcaccgagauuaaucaaaggcucuuuucagagccaccaaaaaaaaaaaaaaaaaaaaaaaaaaaaaaaaaaaaaaaaaaaaaaaaaaaaaaaaaaaaaaaaagaauu

SEQ ID NO: 16409 - RNA, 1655 nt, Artificial Sequence
  mRNA product Design i-3 (hSL-A64-N5) comprising derived and/or modified sequence from LASV(LASV221-NIG-2010;Clade II)__AIT17624__GPCmut1 (opt1)
aggagaaagcuuaccaugggccagaucaucaccuucuuccaggaggugccccacgucaucgaggaggugaugaacaucgugcugaucgcccucagccugcuggccauccucaaggggaucuacaacgucgcgaccugcggccuguucgggcugguguccuuccuccugcugugcggccgcagcugcuccacgaccuacaaggggguguacgagcuccagacccuggagcuggacauggccagccucaacaugaccaugccgcuguccugcacgaagaacaacagccaccacuacaucauggucggcaacgagaccggccuggagcucacccugaccaacacguccaucaucaaccacaaguucugcaaccugagcgacgcccacaagaagaaccucuacgaccacgcccugauguccaucaucagcaccuuccaccuguccauccccaacuucaaccaguacgaggccaugagcugcgacuucaacgggggcaagaucuccgugcaguacaaccucagccacaccuacgcgaucgacgccgccaaccacugcgggaccaucgccaacggcgugcugcagacguucaugcggauggcguggggcggguccuacaucgcccuggacagcggcugcggguccugggacugcaucaugaccagcuaccaguaccucaucauccagaacaccaccugggaggaccacugccaguucucccgccccagccccaucggcuaccuggggcugcucagccagcggacgcgcgacaucuacaucucccggcgccggcgcggcaccuucaccuggacccugagcgacuccgagggcaacgagacgcccgggggcuacugccugacccgguggaugcucaucgaggccgagcugaagugcuucgggaacaccgccgucgccaagugcaacgagaagcacgacgaggaguucugcgacaugcugcgccucuucgacuucaacaagcaggcgauccggcgccugaagaccccggcccagaugagcauccagcugaucaacaaggccgugaacgcccucaucaacgaccagcugaucaugaagaaccaccuccgggacaucaugugcauccccuacugcaacuacuccaaguacugguaccugaaccacacggugaccggcaagaccagccugccccgcugcuggcuggucuccaacgggagcuaccucaacgagacccacuucuccgacgacaucgagcagcaggccgacaacaugaucacggagaugcugcagaaggaguacauggaccggcagggcaagaccccgcugggccucguggaccuguucguguucagcaccuccuucuaccugaucagcaucuuccuccaccuggucaagauccccacccaccgccacgugaucgggaagcccugccccaagccgcaccggcugaaccacaugggcaucugcuccugcgggcuguacaagcaccccggcgugcccgucaaguggaagcgcugaggacuaguuauaagacugacuagcccgaugggccucccaacgggcccuccuccccuccuugcaccgagauuaaucaaaggcucuuuucagagccaccaaaaaaaaaaaaaaaaaaaaaaaaaaaaaaaaaaaaaaaaaaaaaaaaaaaaaaaaaaaaaaaaagaauu

SEQ ID NO: 16410 - RNA, 1655 nt, Artificial Sequence
  mRNA product Design i-3 (hSL-A64-N5) comprising derived and/or modified sequence from LASV(LASV237-NIG-2010;Clade II)__AIT17638__GPCmut1 (opt1)
aggagaaagcuuaccaugggccagaucaucaccuucuuccaggaggugccccacgucaucgaggaggugaugaacaucgugcugaucgcccucagccugcuggccauccucaaggggaucuacaacgucgcgaccugcggccuguucgggcugguguccuuccuccugcugugcggccgcagcugcuccacgaccuacaaggggguguacgagcuccagacccuggagcuggacauggccagccucaacaugaccaugccgcuguccugcacgaagaacaacagccaccacuacaucauggucggcaacgagaccggccuggagcucacccugaccaacacguccaucaucaaccacaaguucugcaaccugagcgacgcccacaagaaggaccucuacgaccacgcccugauguccaucaucagcaccuuccaccuguccauccccaacuucaaccaguacgaggccaugagcugcgacuucaacgggggcaagaucuccgugcaguacaaccucagccacaccuacgcgguggacgccgccaaccacugcgggaccaucgccaacggcguccugcagacguucaugcggauggcguggggcggguccuacaucgcccuggacagcggcugcggguccugggacugcaucaugaccagcuaccaguaccucaucauccagaacaccaccugggaggaccacugccaguucucccgccccagccccaucggcuaccuggggcugcucagccagcggacgcgcgacaucuacaucucccggcgccggcgcggcaccuucaccuggacccugagcgacuccgagggcaacgagacgcccgggggcuacugccugacccgguggaugcucaucgaggccgagcugaagugcuucgggaacaccgccguggccaagugcaacgagaagcacgacgaggaguucugcgacaugcugcgccucuucgacuucaacaagcaggcgauccggcgccugaagaccccggcccagaugagcauccagcugaucaacaaggccgugaacgcccucaucaacgaccagcugaucaugaagaaccaccuccgggacaucaugugcauccccuacugcaacuacuccaaguacugguaccugaaccacacggucaccggcaagaccagccugccccgcugcuggcugguguccaacgggagcuaccucaacgagacccacuucuccgacgacaucgagcagcaggccgacaacaugaucacggagcugcugcagaaggaguacauggaccggcagggcaagaccccgcucggccugguggaccuguucgucuucagcaccuccuucuaccucaucagcaucuuccugcaccugaucaagauccccacccaccgccacaucacggggaagcccugccccaagccgcaccggcugaaccacaugggcaucugcuccugcgggcucuacaagcaccccggcgugcccgugaaguggaagcgcugaggacuaguuauaagacugacuagcccgaugggccucccaacgggcccuccuccccuccuugcaccgagauuaaucaaaggcucuuuucagagccaccaaaaaaaaaaaaaaaaaaaaaaaaaaaaaaaaaaaaaaaaaaaaaaaaaaaaaaaaaaaaaaaaagaauu

SEQ ID NO: 16411 - RNA, 1655 nt, Artificial Sequence
  mRNA product Design i-3 (hSL-A64-N5) comprising derived and/or modified sequence from LASV(LASV253-NIG-2011;Clade II)__AIT17670__GPCmut1 (opt1)
aggagaaagcuuaccaugggccagaucaucaccuucuuccaggaggugccccacgucaucgaggaggugaugaacaucgugcugaucgcccucagccugcuggccauccucaaggggaucuacaacgucgcgaccugcggccuguucgggcugguguccuuccuccugcugugcggccgcagcugcuccacgaccuacaaggggguguacgagcuccagacccuggagcuggacauggccagccucaacaugaccaugccgcuguccugcacgaagaacaacagccaccacuacaucauggucggcaacgagaccggccuggagcucacccugaccaacacguccaucaucaaccacaaguucugcaaccugagcgacgcccacaagaagaaccucuacgaccacgcccugauguccaucaucagcaccuuccaccuguccauccccaacuucaaccaguacgaggccaugagcugcgacuucaacgggggcaagaucuccgugcaguacaaccucagccacaccuacgcgguggacgccgccaaccacugcgggaccaucgccaacggcguccugcagacguucaugcggauggcguggggcggguccuacaucgcccuggacagcggcugcggguccugggacugcaucaugaccagcuaccaguaccucaucauccagaacaccaccugggaggaccacugccaguucucccgccccagccccaucggcuaccuggggcugcucagccagcggacgcgcgacaucuacaucucccggcgccggcgcggcaccuucaccuggacccugagcgacuccgagggcaacgagacgcccgggggcuacugccugacccgguggaugcucaucgaggccgagcugaagugcuucgggaacaccgccguggccaagugcaacgagaagcacgacgaggaguucugcgacaugcugcgccucuucgacuucaacaagcaggcgauccggcgccugaaggccccggcccagaugagcauccagcugaucaacaaggccgugaacgcccucaucaacgaccagcugaucaugaagaaccaccuccgggacaucaugugcauccccuacugcaacuacuccaaguacugguaccugaaccacaccgucacgggccgcaccagccugccccggugcuggcugguguccaacgggagcuaccucaacgagacccacuucuccgacgacaucgagcagcaggcggacaacaugaucaccgagcugcugcagaaggaguacaucgaccgccagggcaagacgccgcucggccugguggaccuguucgucuucagcaccuccuucuaccucaucagcaucuuccugcaccuggugaagauccccacccaccggcacaucaucgggaagcccugccccaagccgcaccgccugaaccacaugggcaucugcuccugcgggcucuacaagcaccccggcgugcccgucaaguggaagcggugaggacuaguuauaagacugacuagcccgaugggccucccaacgggcccuccuccccuccuugcaccgagauuaaucaaaggcucuuuucagagccaccaaaaaaaaaaaaaaaaaaaaaaaaaaaaaaaaaaaaaaaaaaaaaaaaaaaaaaaaaaaaaaaaagaauu

SEQ ID NO: 16412 - RNA, 1655 nt, Artificial Sequence
  mRNA product Design i-3 (hSL-A64-N5) comprising derived and/or modified sequence from LASV(LASV254-NIG-2011;Clade II)__AIT17674__GPCmut1 (opt1)
aggagaaagcuuaccaugggccagaucaucaccuucuuccaggaggugccccacgucaucgaggaggugaugaacaucgugcugaucgcccucagccugcuggccauccucaaggggaucuacaacgucgcgaccugcggccuguucgggcugguguccuuccuccugcugugcggccgcagcugcuccacgaccuacaaggggguguacgagcuccagacccuggagcuggacaugaccaaccucaacaugacgaugccgcugagcugcaccaagaacaacucccaccacuacaucauggucggcaacgagaccggccuggagcucacccugacgaacaccagcaucaucaaccacaaguucugcaaccuguccgacgcccacaagaagaaccucuacaaccacgcccugaugagcaucaucuccaccuuccaccugagcauccccaacuucaaccaguacgaggccauguccugcgacuucaacgggggcaagaucagcgugcaguacaaccucucccacagcuacgccguggacgcggccaaccacugcgggaccaucgccaacggcguccugcagacguucaugcggauggccuggggcggguccuacaucgcgcuggacagcggcugcgggaacugggacugcaucaugaccuccuaccaguaccucaucauccagaacaccaccugggaggaccacugccaguucagccgccccucccccaucggcuaccuggggcugcucagccagcggacgcgcgacaucuacaucagccggcgccggcgcggcaccuucaccuggacccuguccgacagcgagggcaacgagacgcccgggggcuacugccugacccgguggaugcucaucgaggccgagcugaagugcuucgggaacaccgccguggccaagugcaacgagaagcacgacgaggaguucugcgacaugcugcgccucuucgacuucaacaagcaggccauccggcgccugaagaccccggcgcaggccaacauccagcugaucaacaaggccgugaacgcccucaucaacgaccagcugaucaugaagaaccaccuccgggacaucaugugcauccccuacugcaacuacuccaaguacugguaccugaaccacacggucaccggcaagaccagccugccccgcugcuggcugguguccaacgggagcuaccucaacgagacccacuucuccgacgacaucgagcagcaggccgacaacaugaucacggagcugcugcagaaggaguacauggaccggcagggcaagaccccgcucggccugguggaccuguucgucuucagcaccuccuucuaccucaucagcaucuuccugcaccuggugaagauccccacccaccgccacgugaucgggaagcccugccccaagccgcaccggcugaaccacaugggcaucugcuccugcgggcucuacaagcaccccggcguccccgugaaguggaagcgcugaggacuaguuauaagacugacuagcccgaugggccucccaacgggcccuccuccccuccuugcaccgagauuaaucaaaggcucuuuucagagccaccaaaaaaaaaaaaaaaaaaaaaaaaaaaaaaaaaaaaaaaaaaaaaaaaaaaaaaaaaaaaaaaaagaauu

SEQ ID NO: 16413 - RNA, 1655 nt, Artificial Sequence
  mRNA product Design i-3 (hSL-A64-N5) comprising derived and/or modified sequence from LASV(Nig08-A19;Clade III)__ADU56618__GPCmut1 (opt1)
aggagaaagcuuaccaugggccagaucgugaccuucuuccaggaggucccccacgugaucgaggaggugaugaacaucguccugaucgcccucagcauccuggccauccugaaggggcucuacaacaucgcgaccugcggccugaucgggcuggugacguuccuccugcuguccggccgcagcugcuccaugaccuacaaggggguguacgagcuccagacccuggagcugaacaugaacacccucaacaugacgaugccgcugagcugcaccaagaacaacucccaccacuacaucauggucggcaacgagaccggccuggagcucacccugacgaacaccagccugcuccaccacaaguucugcaaccuguccgacgcccacaagaagaaccuguacgaccacacccucaugagcaucaucuccaccuuccaccugagcauccccaacuucaaccaguacgaggccauguccugcgacuucaacgggggcaagaucacggugcaguacaaccugagccacuccuacgccaucgacgccgcgaaccacugcgggaccguggccaacggcguccuccagaccuucaugcggauggccuggggcgggagcuacaucgcccuggacuccggcugcgggaagugggacugcaucaugaccagcuaccaguaccugaucauccagaacacgaccugggaggaccacugccaguucucccgccccagccccaucggcuaccucgggcugcugucccagcggacccgcgacaucuacaucagccggcgccggcgcggcaccuucacguggacccucagcgacuccgagggcaacgagacccccgggggcuacugccugacccgguggaugcugaucgaggcggagcucaagugcuucgggaacacggccguggccaagugcaacgagaagcacgacgaggaguucugcgacaugcugcgccuguucgacuucaacaagcaggccauccggcgccucaaggccccggcgcagaugagcauccagcugaucaacaaggccgugaacgcccugaucaacgaccagcucaucaugaagaaccaccuccgggacaucaugugcauccccuacugcaacuacuccaaguacugguaccugaaccacaccagcaccggccgcaccucccugccccggugcuggcuggucagcaacggguccuaccugaacgagacgcacuucagcgacgacaucgagcagcaggccgacaacaugaucaccgagaugcuccagaaggaguaccuggaccgccagggcaagaccccgcugggccucguggaccuguucguguucuccaccagcuucuaccugaucuccaucuuccugcaccucgucaagauccccacgcaccggcacaucguggggaagcccugccccaagccgcaccgccugaaccacaugggcaucugcagcugcgggcuguacaagcagcccggcgugcccguccgguggaagcgcugaggacuaguuauaagacugacuagcccgaugggccucccaacgggcccuccuccccuccuugcaccgagauuaaucaaaggcucuuuucagagccaccaaaaaaaaaaaaaaaaaaaaaaaaaaaaaaaaaaaaaaaaaaaaaaaaaaaaaaaaaaaaaaaaagaauu

SEQ ID NO: 16414 - RNA, 1658 nt, Artificial Sequence
  mRNA product Design i-3 (hSL-A64-N5) comprising derived and/or modified sequence from LASV(G1180-SLE-2010;Clade IV)__AIT17168__GPCmut1 (opt1)
aggagaaagcuuaccaugggccagaucgugaccuucuuccaggaggucccccacgugaucgaggaggugaugaacaucguccugaucgcccucagcauccuggccgugcugaaggggcucuacaacuucgcgaccugcggccugguggggcugcucacguuccugcugcucugcggccgcuccugcaccgccagccgguacaagggggucuacgagcugcagacccuggagcucaacauggagacccugaacaugacgaugccgcuguccugcaccaagaacaacagccaccacuacaucauggugggcaacgagaccggccucgagcugacccugacgaacaccuccaucaucaaccacaaguucugcaaccucagcgacgcccacaagaagaaccuguacgaccacgcccugauguccaucaucagcaccuuccaccucuccauccccaacuucaaccaguacgaggccaugagcugcgacuucaacgggggcaagaucuccgugcaguacaaccugagccacuccuacgcgggggacgccgccaaccacugcggcaccgucgccaacggggugcugcagacguucaugcgcauggcguggggcggcagcuacaucgcccucgacuccgggugcggcagcugggacugcaucaugaccuccuaccaguaccugaucauccagaacaccaccugggaggaccacugccaguucagccggcccucccccaucggguaccugggccuccugagccagcgcacgcgggacaucuacaucagccgccggcgccggggcaccuucaccuggacccuguccgacagcgaggggaaggacacgccgggcggguacugccucacccgcuggaugcugaucgaggccgagcugaagugcuucggcaacaccgccguggccaagugcaacgagaagcacgacgaggaguucugcgacaugcuccggcuguucgacuucaacaagcaggcgauccagcgccugaaggcccccgcccagauguccauccagcucaucaacaaggccgucaacgcccugaucaacgaccagcugaucaugaagaaccaccuccgggacaucaugugcauccccuacugcaacuacagcaaguacugguaccugaaccacaccacgaccgggaagaccucccugcccaagugcuggcucgugagcaacggcuccuaccugaacgagacccacuucagcgacgacaucgagcagcaggcggacaacaugaucacggagaugcugcagaaggaguacauggagcgccagggcaagaccccgcucgggcugguggaccuguucgucuucuccaccagcuucuaccucaucuccaucuuccugcaccuggugaagauccccacccaccggcacaucgugggcaagagcugccccaagccccaccgccugaaccacauggggaucugcuccugcggccucuacaagcagccggggguccccgugaaguggaagcggugaggacuaguuauaagacugacuagcccgaugggccucccaacgggcccuccuccccuccuugcaccgagauuaaucaaaggcucuuuucagagccaccaaaaaaaaaaaaaaaaaaaaaaaaaaaaaaaaaaaaaaaaaaaaaaaaaaaaaaaaaaaaaaaaagaauu

SEQ ID NO: 16415 - RNA, 1658 nt, Artificial Sequence
  mRNA product Design i-3 (hSL-A64-N5) comprising derived and/or modified sequence from LASV(G1442-SLE-2011;Clade IV)__AIT17180__GPCmut1 (opt1)
aggagaaagcuuaccaugggccagaucgugaccuucuuccaggaggucccccacgugaucgaggaggugaugaacaucguccugaucgcccucagcauccuggccgugcugaaggggcucuacaacguggcgaccugcggccugaucgggcuggucacguuccuccugcugugcggccgcuccugcaccaccacccucuacaaggggguguacgagcugcagacgcuggagcucaacauggagacccugaacaugaccaugccgcugagcugcaccaagaacaacucccaccacuacauccgggugggcaacgagacgggccucgagcugacccugaccaacaccagcaucaucaaccacaaguucugcaaccucuccgacgcccacaagaagaaccuguacgaccacgcccugaugagcaucaucuccacguuccaccucagcauccccaacuucaaccaguacgaggccauguccugcgacuucaacgggggcaagaucagcguccaguacaaccugucccacagcuacgccggggacgcggccaaccacugcggcaccguggccaacggggugcugcagaccuucaugcgcauggccuggggcggcuccuacaucgcgcucgacagcgggugcggcaacugggacugcaucaugaccuccuaccaguaccugaucauccagaacacgaccugggacgaccacugccaguucagccggcccucccccaucggguaccugggccuccugagccagcgcacccgggacgucuacaucucccgccggcgccggggcaccuucacguggacccugagcgacagcgaggggaaggacaccccgggcggguacugccucacccgcuggaugcugaucgaggccgagcugaagugcuucggcaacacggccguggccaagugcaacgagaagcacgacgaggaguucugcgacaugcuccggcuguucgacuucaacaagcaggccauccagcgccugaaggcgcccgcccagauguccauccagcucaucaacaaggccgugaacgcccugaucaacgaccagcugaucaugaagaaccaccuccgggacaucaugugcauccccuacugcaacuacagcaaguacugguaccugaacaacaccgccaccgggaagaccucccugcccaagugcuggcucaucagcaacggcuccuaccugaacgagacgcacuucagcgacgacaucgagcaggaggcggacaacaugaucaccgagaugcugcagaaggaguacauggagcgccagggcaagaccccgcucgggcuggucgaccuguucguguucuccaccagcuucuaccucaucuccaucuuccugcaccuggugaagauccccacgcaccggcacaucgucggcaagagcugccccaagccccaccgccugaaccacauggggaucugcuccugcggccucuacaagcagccgggggugcccgugcgguggaagcgcugaggacuaguuauaagacugacuagcccgaugggccucccaacgggcccuccuccccuccuugcaccgagauuaaucaaaggcucuuuucagagccaccaaaaaaaaaaaaaaaaaaaaaaaaaaaaaaaaaaaaaaaaaaaaaaaaaaaaaaaaaaaaaaaaagaauu

SEQ ID NO: 16416 - RNA, 1658 nt, Artificial Sequence
  mRNA product Design i-3 (hSL-A64-N5) comprising derived and/or modified sequence from LASV(G3010-SLE-2013;Clade IV)__AIT17344__GPCmut1 (opt1)
aggagaaagcuuaccaugggccagaucgugaccuucuuccaggaggucccccacgugaucgaggaggugaugaacaucguccugaucgcccucagcauccuggccgugcugaaggggcucuacaacuucgcgaccugcggccugguggggcuggucacguuccuccugcugugcggccgcuccugcaccaccagccucuacaaggggguguacgagcugcagacccuggagcucaacauggagacgcugaacaugaccaugccgcuguccugcaccaagaacaacagccaccacuacaucauggugggcaacgagaccggccucgagcugacgcugaccaacaccuccaucaucaaccacaaguucugcaaccucagcgacgcccacaagaagaaccuguacaaccacgcccugauguccaucaucagcaccuuccaccucuccauccccaacuucaaccaguacgaggccaugagcugcgacuucaacgggggcaagaucuccguccaguacaaccugagccacuccuacgccggggacgcggccagccacugcggcacgguggccaacggggugcugcagaccuucaugcggauggccuggggcggcuccuacaucgcgcucgacagcgggugcggcaagugggacugcaucaugaccuccuaccaguaccugaucauccagaacaccacgugggaggaccacugccaguucagccgccccucccccaucggguaccugggccuccugagccagcggacccgcgacaucuacaucagccggcgccggcgcggcaccuucaccuggacgcuguccgacagcgaggggaaggacaccccgggcggguacugccucacccgguggaugcugaucgaggccgagcugaagugcuucggcaacaccgccgucgccaagugcaacgagaagcacgacgaggaguucugcgacaugcuccgccuguucgacuucaacaagcaggccauccagcggcugaagacgcccgcgcagauguccauccagcucaucaacaaggccgugaacgcccugaucaacgaccagcugaucaugaagaaccaccuccgcgacaucaugugcauccccuacugcaacuacagcaaguacugguaccugaaccacaccaccaccgggaagacgucccugcccaagugcuggcucgugagcaacggcuccuaccugaacgagacccacuucagcgacgacaucgagcagcaggccgacaacaugaucaccgagaugcugcagaaggaguacauggagcggcagggcaagaccccgcucgggcuggucgaccuguucguguucuccacgagcuucuaccucaucuccaucuuccugcaccuggugaagauccccacccaccgccacaucgucggcaagagcugccccaagccccaccggcugaaccacauggggaucugcuccugcggccucuacaagcagccgggggugcccgugcgcuggaagcggugaggacuaguuauaagacugacuagcccgaugggccucccaacgggcccuccuccccuccuugcaccgagauuaaucaaaggcucuuuucagagccaccaaaaaaaaaaaaaaaaaaaaaaaaaaaaaaaaaaaaaaaaaaaaaaaaaaaaaaaaaaaaaaaaagaauu

SEQ ID NO: 16417 - RNA, 1658 nt, Artificial Sequence
  mRNA product Design i-3 (hSL-A64-N5) comprising derived and/or modified sequence from LASV(G502-SLE-2009;Clade IV)__AIT17126__GPCmut1 (opt1)
aggagaaagcuuaccaugggccagaucgugaccuucuuccaggaggucccccacgugaucgaggaggugaugaacaucguccugaucgcccucagcauccuggccgugcugaaggggcucuacaacuucgcgaccugcggccugguggggcugcucacguuccugcugcucugcggccgcuccugcaccaccgggcuguacaagggcgucuacgagcugcagacccucgagcugaacauggagacgcugaacaugaccaugccgcucagcugcaccaagaacaacucccaccacuacaucauggugggcaacgagaccgggcuggagcugacgcucaccaacaccagcaucaucaaccacaaguucugcaaccuguccgacgcccacaagaagaaccuguacgaccacgcccucaugagcaucaucuccaccuuccaccugagcauccccaacuucaaccaguacgaggccauguccugcgacuucaacggcgggaagaucagcgugcaguacaaccugucccacagcuacgccggcgacgcggccgaccacugcgggacggucgccaacggcgugcuccagaccuucaugcggauggccuggggcggguccuacaucgcgcuggacagcggcugcgggcgcugggacugcaucaugaccuccuaccaguaccugaucauccagaacaccacgugggaggaccacugccaguucagccggcccucccccaucggcuaccucggccugcugagccagcgcacccgggacaucuacaucucccgccggcgccgggggaccuucaccuggacgcucagcgacagcgagggcaaggacacccccgggggcuacugccugacccgcuggaugcugaucgaggccgagcucaagugcuucgggaacaccgccguggccaagugcaacgagaagcacgacgaggaguucugcgacaugcugcggcuguucgacuucaacaagcaggccauccagcgccucaaggcgccggcccagauguccauccagcugaucaacaaggccgucaacgcccugaucaacgaccagcucgugaugaagaaccaccuccgggacaucaugugcauccccuacugcaacuacagccgcuacugguaccugaaccacacgaccaccggccggaccucccugcccaagugcuggcuggugagcaacggcuccuaccugaacgagacgcacuucagcgacgacaucgagcagcaggccgacaacaugaucaccgagaugcuccagaaggaguacauggagcgccaggggaagaccccgcugggccuggucgaccucuucguguucuccaccagcuucuaccugaucuccaucuuccugcaccuggugaagauccccacgcaccggcacaucgucggcaagagcugccccaagccccaccgccucaaccacauggggaucugcuccugcgggcuguacaagcagccgggcgugcccgugaaguggaagcggugaggacuaguuauaagacugacuagcccgaugggccucccaacgggcccuccuccccuccuugcaccgagauuaaucaaaggcucuuuucagagccaccaaaaaaaaaaaaaaaaaaaaaaaaaaaaaaaaaaaaaaaaaaaaaaaaaaaaaaaaaaaaaaaaagaauu

SEQ ID NO: 16418 - RNA, 1658 nt, Artificial Sequence
  mRNA product Design i-3 (hSL-A64-N5) comprising derived and/or modified sequence from LASV(G733-SLE-2010;Clade IV)__AIT17154__GPCmut1 (opt1)
aggagaaagcuuaccaugggccagaucgugaccuucuuccaggaggucccccacgugaucgaggaggugaugaacaucguccugaucgcccucagcauccuggccgugcugaaggggcucuacaacuucgcgaccugcggcaucguggggcuggucuccuuccugcuccugugcggccgcagcugcacgaccucccuguacaaggggguguacgagcuccagacccuggagcugaacauggagacccucaacaugacgaugccgcugagcugcaccaagaacaacucccaccacuacaucauggugggcaacgagaccggccuggagcucacccugacgaacaccagcaucaucaaccacaaguucugcaaccuguccgacgcccacaagaagaaccucuacgaccacgcccugaugagcaucaucuccaccuuccaccugagcauccccaacuucaaccaguacgaggccauguccugcgacuucaacgggggcaagaucagcguccaguacaaccucucccacagcuacgccggggacgcggccaaccacugcggcaccaucgccaacggggugcugcagacguucaugcggauggccuggggcggcuccuacaucgcgcuggacagcgggugcgaccgcugggacugcaucaugaccuccuaccaguaccucaucauccagaacaccaccugggaggaccacugccaguucagccggcccucccccaucggcuaccuggggcugcucagccagcgcacgcgggacaucuacaucagccgccggcgccggggcaccuucaccuggacccuguccgacagcgagggcaaggacacgcccgggggcuacugccugacccgcuggaugcucaucgaggccgagcugaagugcuucgggaacaccgccguggccaagugcaacgagaagcacgacgaggaguucugcgacaugcugcggcuguucgacuucaacaagcaggccauccagcgccugaaggcgccggcccagauguccauccagcugaucaacaaggccgucaacgcccucaucaacgaccagcugaucaugaagaaccaccuccgggacaucaugugcauccccuacugcaacuacagcaaguacugguaccucaaccacaccacgaccggcaagaccucccugcccaagugcuggcuggugagcaacggguccuaccucaacgagacccacuucagcgacgacaucgagcagcaggccgacaacaugaucacggagaugcugcagaaggaguacauggagcgccagggcaagaccccgcugggccucguggaccuguucgucuucuccaccagcuucuaccugaucuccaucuuccuccaccuggugaagauccccacccaccggcacguggucggcaagagcugccccaagccccaccgccugaaccacauggggaucugcuccugcgggcuguacggccagccgggggugcccgugaaguggaagcggugaggacuaguuauaagacugacuagcccgaugggccucccaacgggcccuccuccccuccuugcaccgagauuaaucaaaggcucuuuucagagccaccaaaaaaaaaaaaaaaaaaaaaaaaaaaaaaaaaaaaaaaaaaaaaaaaaaaaaaaaaaaaaaaaagaauu

SEQ ID NO: 16419 - RNA, 1658 nt, Artificial Sequence
  mRNA product Design i-3 (hSL-A64-N5) comprising derived and/or modified sequence from MOPV/LASV reassortant(IGS-1;Clade IV)__AFY05576__GPCmut1 (opt1)
aggagaaagcuuaccaugggccagaucgugaccuucuuccaggaggucccccacgugaucgaggaggugaugaacaucguccugaucgcccucagcgugcuggccgugcugaaggggcucuacaacuucgcgaccugcggccuggucgggcuggugacguuccuccugcugugcggccgcuccugcaccaccagccucuacaaggggguguacgagcugcagacccuggagcucaacauggagacgcugaacaugaccaugccgcuguccugcaccaagaacaacagccaccacuacaucauggucggcaacgagaccggccucgagcugacgcugaccaacaccuccaucaucaaccacaaguucugcaaccucagcgacgcccacaagaagaaccuguacgaccacgcccugauguccaucaucagcaccuuccaccucuccauccccaacuucaaccaguacgaggccaugagcugcgacuucaacgggggcaagaucuccgugcaguacaaccugagccacuccuacgccggggacgcggccaaccacugcggcacgguggccaacgggguccugcagaccuucaugcggauggccuggggcggcagcuacaucgcgcucgacuccgggugcggcaacugggacugcaucaugaccagcuaccaguaccugaucauccagaacaccacgugggaggaccacugccaguucucccgccccagccccaucggguaccugggccuccugucccagcggacccgcgacaucuacaucagccggcgccggcgcggcaccuucaccuggacgcugagcgacuccgagggggaggacaccccgggcggguacugccucacccgguggaugcugaucgaggccgagcugaagugcuucggcaacaccgccguggccaagugcaacgagaagcacgacgaggaguucugcgacaugcuccgccuguucgacuucaacaagcaggccauccagcggcugaaggcgcccgcccagaugagcauccagcucaucaacaaggccgugaacgcccugaucaacgaccagcugaucaugaagaaccaccuccgcgacaucaugugcauccccuacugcaacuacuccaaguacugguaccugaaccacacgaccaccgggcggaccagccugcccaagugcuggcucgucuccaacggcagcuaccugaacgagacgcacuucuccgacgacaucgagcagcaggccgacaacaugaucaccgagaugcugcagaaggaguacauggagcgccagggcaagaccccgcucgggcugguggaccuguucguguucagcaccuccuucuaccucaucagcaucuuccugcaccuggucaagauccccacgcaccggcacaucgugggcaaguccugccccaagccccaccgccugaaccacauggggaucugcagcugcggccucuacaagcagccgggggugcccgucaaguggaagcggugaggacuaguuauaagacugacuagcccgaugggccucccaacgggcccuccuccccuccuugcaccgagauuaaucaaaggcucuuuucagagccaccaaaaaaaaaaaaaaaaaaaaaaaaaaaaaaaaaaaaaaaaaaaaaaaaaaaaaaaaaaaaaaaaagaauu

SEQ ID NO: 16420 - RNA, 1658 nt, Artificial Sequence
  mRNA product Design i-3 (hSL-A64-N5) comprising derived and/or modified sequence from LASV(LM765-SLE-2012;Clade IV)__AIT17814__GPCmut1 (opt1)
aggagaaagcuuaccaugggccagaucgugaccuucuuccaggaggucccccacgugaucgaggaggugaugaacaucguccugaucgcccucagcauccuggccgugcugaaggggcucuacaacuucgcgaccugcggccugguggggcuggucacguuccuccugcugugcggccgcuccugcaccaccagccucuacaaggggguguacgagcugcagacccuggagcucaacauggagacgcugaacaugaccaugccgcuguccugcaccaagaacaacagccaccacuacaucauggugggcaacgagaccggccucgagcugacgcugaccaacaccuccaucaucgaccacaaguucugcaaccucagcgacgcccaccggaagaaccuguacgaccacgcccugauguccaucaucagcaccuuccaccucuccauccccaacuucaaccaguacgaggccaugagcugcgacuucaacgggggcaagaucuccguccaguacaaccugagccacuccuacgccaaggacgcggccgaccacugcgggacgguggccaacggcgugcugcagaccuucaugcgcauggccuggggcgggagcuacaucgcgcucgacuccggcugcgggcggugggacugcaucaugaccagcuaccaguaccugaucauccagaacaccacgugggaggaccacugccaguucucccgccccagccccaucggcuaccuggggcuccugucccagcggacccgcgacaucuacaucagccggcgccggcgcggcaccuucaccuggacgcugagcgacuccgagggcaaggacacccccgggggcuacugccucacccgguggaugcugaucgaggccgagcugaagugcuucgggaacaccgccgucgccaagugcaacgagaagcacgacgaggaguucugcgacaugcuccgccuguucgacuucaacaagcaggccauccagcggcugaaggcgccggcccagaugagcauccagcucaucaacaaggccgugaacgcccugaucaacgaccagcugaucaugaagaaccaccuccgcgacaucaugugcauccccuacugcaacuacuccaaguacugguaccugaaccacacgaccaccggcaagaccagccugcccaagugcuggcucguguccaacgggagcuaccugaacgagacgcacuucuccgacgacaucgagcagcaggccgacaacaugaucaccgagaugcugcagaaggaguacauggagcggcagggcaagaccccgcucggccuggucgaccuguucguguucagcaccuccuucuaccucaucagcaucuuccugcaccuggugaagauccccacgcaccgccacaucgucgggaagcccugccccaagccgcaccggcugaaccacaugggcaucugcuccugcgggcucuacaagcagcccggcgugcccgugaaguggaagcgcugaggacuaguuauaagacugacuagcccgaugggccucccaacgggcccuccuccccuccuugcaccgagauuaaucaaaggcucuuuucagagccaccaaaaaaaaaaaaaaaaaaaaaaaaaaaaaaaaaaaaaaaaaaaaaaaaaaaaaaaaaaaaaaaaagaauu

SEQ ID NO: 16421 - RNA, 1658 nt, Artificial Sequence
  mRNA product Design i-3 (hSL-A64-N5) comprising derived and/or modified sequence from LASV(LM776-SLE-2012;Clade IV)__AIT17824__GPCmut1 (opt1)
aggagaaagcuuaccaugggccagaucgugaccuucuuccaggaggucccccacgugaucgaggaggugaugaacaucguccugaucgcccucagcauccuggccgugcugaaggggcucuacaacuucgcgaccugcggccugguggggcuggucacguuccuccugcugugcggccgcuccugcaccaccagcguguacaaggggguguacgagcuccagacccuggagcugaacauggagacgcucaacaugaccaugccgcuguccugcaccaagaacaacagccaccacuacaucauggucggcaacgagaccggccuggagcucacgcugaccaacaccuccaucaucaaccacaaguucugcaaccugagcgacgcccacaagaagaaccucuacgaccacgcccugauguccaucaucagcaccuuccaccuguccauccccaacuucaaccaguacgaggccaugagcugcgacuucaacgggggcaagaucuccgugcaguacaaccucagccacuccuacgccggggacgcggccaaccacugcggcacgguggccaacgggguccugcagaccuucaugcggauggccuggggcggcagcuacaucgcgcuggacuccgggugcggcaagugggacugcaucaugaccagcuaccaguaccucaucauccagaacaccacgugggaggaccacugccaguucucccgccccagccccaucggguaccugggccugcucucccagcggacccgcgacaucuacaucagccggcgccggcgcggcaccuucaccuggacgcugagcgacuccgaggggaaggacaccccgggcggguacugccugacccgguggaugcucaucgaggccgagcugaagugcuucggcaacaccgccguggccaagugcaacgagaagcacgacgaggaguucugcgacaugcugcgccucuucgacuucaacaagcaggccauccagcggcugaaggcgcccgcccagaugagcauccagcugaucaacaaggccgugaacgcccucaucaacgaccagcugaucaugaagaaccaccuccgcgacaucaugugcauccccuacugcaacuacuccaaguacugguaccugaaccacacgaccaccgggaagaccagccugcccaagugcuggcuggucuccaacggcagcuaccucaacgagacgcacuucuccgacgacaucgagcagcaggccgacaacaugaucaccgagaugcugcagaaggaguacauggagcggcagggcaagaccccgcuggggcucguggaccuguucguguucagcaccuccuucuaccugaucagcaucuuccuccaccuggucaagauccccacgcaccgccacaucgugggcaaguccugccccaagccccaccggcugaaccacauggggaucugcagcugcggccuguacaagcagccgggggugcccguccgcuggaagcggugaggacuaguuauaagacugacuagcccgaugggccucccaacgggcccuccuccccuccuugcaccgagauuaaucaaaggcucuuuucagagccaccaaaaaaaaaaaaaaaaaaaaaaaaaaaaaaaaaaaaaaaaaaaaaaaaaaaaaaaaaaaaaaaaagaauu

SEQ ID NO: 16422 - RNA, 1658 nt, Artificial Sequence
  mRNA product Design i-3 (hSL-A64-N5) comprising derived and/or modified sequence from LASV(Mad39;Clade IV)__ANH09722__GPCmut1 (opt1)
aggagaaagcuuaccaugggccagaucgugaccuucuuccaggaggucccccacgugaucgaggaggugaugaacaucguccugaucgcccucagcauccuggccgugcugaaggggcucuacaacguggcgaccugcggccugaucgggcuggucacguuccuccugcugugcggccgcuccugcaccaccacccucuacaaggggguguacgagcugcaggcccuggagcucaacauggagacgcugaacaugaccaugccgcugagcugcaccaagaacaacucccaccacuacauccgggugggcaacgagaccggccucgagcugacgcugaccaacaccagccucaucaaccacaaguucugcaaccuguccgacgcccacaagaagaaccuguacgaccacgcccucaugagcaucaucuccaccuuccaccugagcauccccaacuucaaccaguacgaggccauguccugcgacuucaacgacgggaagaucagcguccaguacaaccugucccacacguacgcgggcgacaccgccaaccacugcgggaccguggccaacggcgugcuccagaccuucaugcgcauggccuggggcgggagcuacaucgcgcuggacuccggcugcgggggcugggacugcaucaugacgagcuaccaguaccugaucauccagaacaccaccugggaggaccacugccaguucucccggcccagccccaucggguaccucggccugcugucccagcgcacccgggacaucuacaucagccgccggcgccggggcacguucaccuggacccucuccgacagcgaggggaaggacaccccgggcggguacugccugacgcgcuggaugcugaucgaggccgagcucaagugcuucggcaacaccgccgucgccaagugcaacgagaagcacgacgaggaguucugcgacaugcugcggcuguucgacuucaacaagcaggccauccagcgccucaaggcgcccgcccagaugagcauccagcugaucaacaaggccgugaacgcccugaucaacgaccagcucaucaugaagaaccaccuccgggacaucaugugcauccccuacugcaacuacuccaaguacugguaccugaaccacaccgugaccgggaagacgagccugcccaagugcuggcuggucuccaacggcagcuaccugaacgagacccacuucuccgacgacaucgagcagcaggccgacaacaugaucaccgagaugcuccagaaggaguacauggagcgccagggcaagaccccgcuggggcugguggaccucuucguguucagcacguccuucuaccugaucagcaucuuccugcaccuggucaagauccccacccaccggcacguggugggcaagcccugccccaagccgcaccgccucaaccacauggggaucugcuccugcggcuucuacaagcagcccgggguccccgugcgguggaagcgcugaggacuaguuauaagacugacuagcccgaugggccucccaacgggcccuccuccccuccuugcaccgagauuaaucaaaggcucuuuucagagccaccaaaaaaaaaaaaaaaaaaaaaaaaaaaaaaaaaaaaaaaaaaaaaaaaaaaaaaaaaaaaaaaaagaauu

SEQ ID NO: 16423 - RNA, 1658 nt, Artificial Sequence
  mRNA product Design i-3 (hSL-A64-N5) comprising derived and/or modified sequence from LASV(Z0947-SLE-2011;Clade IV)__AIT17840__GPCmut1 (opt1)
aggagaaagcuuaccaugggccagaucgugaccuucuuccaggaggucccccacgugaucgaggaggugaugaacaucguccugaucgcccucagcauccuggccgugcugaaggggcucuacaacuucgcgaccugcggccugguggggcuggucacguuccuccugcugugcggccgcuccugcaccaucagccucuacaaggggguguacgagcugcagacccuggagcucaacauggagacccugaacaugacgaugccgcuguccugcaccaagaacaacagccaccacuacaucauggugggcaacgagaccggccucgagcugacccugacgaacaccuccaucaucaaccacaaguucugcaaccucagcgacgcccacaagaagaaccuguacgaccacgcccugauguccaucaucagcaccuuccaccucuccauccccaacuucaaccaguacgaggccaugagcugcgacuucaacgggggcaagaucuccguccaguacaaccugagccacuccuacgccggggacgcggccaaccacugcggcaccguggccaacggggugcugcagacguucaugcggauggccuggggcggcagcuacaucgcgcucgacuccgggugcgaccgcugggacugcaucaugaccagcuaccaguaccugaucauccagaacaccaccugggaggaccacugccaguucucccggcccagccccaucggcuaccuggggcuccugucccagcgcacgcgggacaucuacaucagccgccggcgccggggcaccuucaccuggacccugagcgacuccgagggcaaggacacgcccgggggcuacugccucacccgcuggaugcugaucgaggccgagcugaagugcuucgggaacaccgccgucgccaagugcaacgagaagcacgacgaggaguucugcgacaugcuccggcuguucgacuucaacaagcaggccauccagcgccugaaggcgccggcccagaugagcauccagcucaucaacaaggccgugaacgcccugaucaacgaccagcugaucaugaagaaccaccuccgggacaucaugugcauccccuacugcaacuacuccaaguacugguaccugaaccacaccacgaccggcaagaccagccugcccaagugcuggcucguguccaacgggagcuaccugaacgagacccacuucuccgacgacaucgagcagcaggccgacaacaugaucacggagaugcugcagaaggaguacauggagcgccagggcaagaccccgcucggccuggucgaccuguucguguucagcaccuccuucuaccucaucagcaucuuccugcaccuggugaagauccccacccaccggcacaucgucgggaagcccugccccaagccgcaccgccugaaccacaugggcaucugcuccugcgggcucuacaagcagcccggcgugcccgugaaguggaagcggugaggacuaguuauaagacugacuagcccgaugggccucccaacgggcccuccuccccuccuugcaccgagauuaaucaaaggcucuuuucagagccaccaaaaaaaaaaaaaaaaaaaaaaaaaaaaaaaaaaaaaaaaaaaaaaaaaaaaaaaaaaaaaaaaagaauu

SEQ ID NO: 16424 - RNA, 1658 nt, Artificial Sequence
  mRNA product Design i-3 (hSL-A64-N5) comprising derived and/or modified sequence from LASV(Josiah;Clade IV)__NP_694870__GPCmut1 (opt4)
aggagaaagcuuaccaugggccagaucgugaccuucuuccaggaggugccccacgugaucgaggaggugaugaacaucgugcugaucgcccugagcgugcuggccgugcugaagggccuguacaacuucgccaccugcggccuggugggccuggugaccuuccugcugcugugcggcagaagcugcaccaccagccuguacaagggcguguacgagcugcagacccuggagcugaacauggagacccugaacaugaccaugccccugagcugcaccaagaacaacagccaccacuacaucauggugggcaacgagaccggccuggagcugacccugaccaacaccagcaucaucaaccacaaguucugcaaccugagcgacgcccacaagaagaaccuguacgaccacgcccugaugagcaucaucagcaccuuccaccugagcauccccaacuucaaccaguacgaggccaugagcugcgacuucaacggcggcaagaucagcgugcaguacaaccugagccacagcuacgccggcgacgccgccaaccacugcggcaccguggccaacggcgugcugcagaccuucaugagaauggccuggggcggcagcuacaucgcccuggacagcggcugcggcaacugggacugcaucaugaccagcuaccaguaccugaucauccagaacaccaccugggaggaccacugccaguucagcagacccagccccaucggcuaccugggccugcugagccagagaaccagagacaucuacaucagcagaagacgccggggcaccuucaccuggacccugagcgacagcgagggcaaggacacccccggcggcuacugccugaccagauggaugcugaucgaggccgagcugaagugcuucggcaacaccgccguggccaagugcaacgagaagcacgacgaggaguucugcgacaugcugagacuguucgacuucaacaagcaggccauccagagacugaaggcccccgcccagaugagcauccagcugaucaacaaggccgugaacgcccugaucaacgaccagcugaucaugaagaaccaccugagagacaucaugugcauccccuacugcaacuacagcaaguacugguaccugaaccacaccaccaccggcagaaccagccugcccaagugcuggcuggugagcaacggcagcuaccugaacgagacccacuucagcgacgacaucgagcagcaggccgacaacaugaucaccgagaugcugcagaaggaguacauggagagacagggcaagaccccccugggccugguggaccuguucguguucagcaccagcuucuaccugaucagcaucuuccugcaccuggugaagauccccacccacagacacaucgugggcaagagcugccccaagccccacagacugaaccacaugggcaucugcagcugcggccuguacaagcagcccggcgugcccgugaaguggaagagaugaggacuaguuauaagacugacuagcccgaugggccucccaacgggcccuccuccccuccuugcaccgagauuaaucaaaggcucuuuucagagccaccaaaaaaaaaaaaaaaaaaaaaaaaaaaaaaaaaaaaaaaaaaaaaaaaaaaaaaaaaaaaaaaaagaauu

SEQ ID NO: 16425 - RNA, 1655 nt, Artificial Sequence
  mRNA product Design i-3 (hSL-A64-N5) comprising derived and/or modified sequence from LASV(LP;Clade I)__AAF86701__GPCmut1 (opt4)
aggagaaagcuuaccaugggccagaucaucaccuucuuccaggaggugccccacgugaucgaggaggugaugaacaucgugcugaucgcccugagccugcuggccauccugaagggccuguacaacaucgccaccugcggcaucaucggccugguggccuuccuguuccugugcggcaagagcugcagccugacccugaagggcggcuacgagcugcagacccuggagcugaacauggagacccugaacaugaccaugccccugagcugcaccaagaacagcagccaccacuacaucagagugggcaacgagaccggccuggagcugacccugaccaacaccagcaucaucaaccacaaguucugcaaccugagcgacgcccacaagaagaaccuguacgaccacgcccugaugagcaucaucagcaccuuccaccugagcauccccaacuucaaccaguacgaggccaugagcugcgacuucaacggcggcaagaucagcgugcaguacaaccugagccacagcuacgccggcgacgccgccgagcacugcggcaccguggccaacggcgugcugcagaccuucaugagaauggccuggggcggcagauacaucgcccuggacagcggcugcggcaacugggacugcaucaugaccagcuaccaguaccugaucauccagaacaccaccugggaggaccacugccaguucagcagacccagccccaucggcuaccugggccugcugagccagagaaccagagacaucuacaucagcagaagacgccggggcaccuucaccuggacccugagcgacagcgagggcaacgagacccccggcggcuacugccugaccagauggaugcugaucgaggccgagcugaagugcuucggcaacaccgccguggccaagugcaacgagaagcacgacgaggaguucugcgacaugcugagacuguucgacuucaacaagcaggccaucagaagacugaaggcccccgcccagaugagcauccagcugaucaacaaggccgugaacgcccugaucaacgaccagcugaucaugaagaaccaccugagagacaucaugugcauccccuacugcaacuacagcaaguacugguaccugaaccacaccagcagcggcagaaccagccugcccaagugcuggcugaucagcaacggcagcuaccugaacgagacccaguucagcgacgacaucgagcagcaggccgacaacaugaucaccgagaugcugcagaaggaguacaucgagagacagggcaagaccccccugggccugguggacaucuucaucuucagcaccagcuucuaccugaucagcaucuuccugcaccugaucaagauccccacccacagacacaucgugggcaagcccugccccaagccccacagacugaaccacaugggcgugugcagcugcggccuguacaagcaccccggcgugcccaccaaguggaagagaugaggacuaguuauaagacugacuagcccgaugggccucccaacgggcccuccuccccuccuugcaccgagauuaaucaaaggcucuuuucagagccaccaaaaaaaaaaaaaaaaaaaaaaaaaaaaaaaaaaaaaaaaaaaaaaaaaaaaaaaaaaaaaaaaagaauu

SEQ ID NO: 16426 - RNA, 1655 nt, Artificial Sequence
  mRNA product Design i-3 (hSL-A64-N5) comprising derived and/or modified sequence from LASV(803213;Clade II)__AAF86703__GPCmut1 (opt4)
aggagaaagcuuaccaugggccagaucaucaccuucuuccaggaggugccccacgugaucgaggaggugaugaacaucgugcugaucgcccugagccugcuggccauccugaagggcaucuacaacguggccaccugcggccuguucggccugaucagcuuccugcugcugugcggcagaagcugcagcgugaccuacaagggcguguacgagcugcagacccuggagcugaacauggccaaccugaacaugaccaugccccugagcugcaccaagaacaacagccaccacuacaucauggugggcaacgagaccggccuggagcugacccugaccaacaccagcaucaucaaccacaaguucugcaaccugagcgacgcccacaagaagaaccuguacgaccacgcccugaugagcaucaucagcaccuuccaccugagcauccccaacuucaaccaguacgaggccaugagcugcgacuucaacggcggcaagaucagcgugcaguacaaccugagccacagcuucgccguggacgccgccaaccacugcggcaccaucgccaacggcgugcugcagaccuucaugagaauggccuggggcggcagcuacaucgcccuggacagcggcugcggcaacugggacugcaucaugaccagcuaccaguaccugaucauccagaacaccaccugggaggaccacugccaguucagcagacccagccccaucggcuaccugggccugcugagccagagaaccagagacaucuacaucagcagaagacgccggggcaccuucaccuggacccugagcgacagcgagggcaacgaggcccccggcggcuacugccugaccagauggaugcugaucgaggccgagcugaagugcuucggcaacaccgccguggccaagugcaacgagaagcacgacgaggaguucugcgacaugcugagacuguucgacuucaacaagcaggccaucaagagacugaagacccccgcccagaugagcauccagcugaucaacaaggccgugaacgcccugaucaacgaccagcugaucaugaagaaccaccugagagacaucaugugcauccccuacugcaacuacagcagauacugguaccugaaccacaccgugaccggcaagaccagccugcccagaugcuggcuggugagcaacggcagcuaccugaacgagacccacuucagcgacgacaucgagcagcaggccgacaacaugaucaccgagaugcugcagaaggaguacauggacagacagggcaagaccccccugggccugguggaccuguucguguucagcaccagcuucuaccugaucagcaucuuccugcaccuggugaagauccccacccacagacacaucgugggcaagcccugccccaagccccacagacugaaccacaugggcaucugcagcugcggccuguacaagcaccccggcgugcccgugaaguggaagagaugaggacuaguuauaagacugacuagcccgaugggccucccaacgggcccuccuccccuccuugcaccgagauuaaucaaaggcucuuuucagagccaccaaaaaaaaaaaaaaaaaaaaaaaaaaaaaaaaaaaaaaaaaaaaaaaaaaaaaaaaaaaaaaaaagaauu

SEQ ID NO: 16427 - RNA, 1655 nt, Artificial Sequence
  mRNA product Design i-3 (hSL-A64-N5) comprising derived and/or modified sequence from LASV(GA391;Clade III)__CAA36645__GPCmut1 (opt4)
aggagaaagcuuaccaugggccagaucgugaccuucuuccaggaggugccccacgugaucgaggaggugaugaacaucgugcugaucgcccugagcauccuggccauccugaagggccuguacaacguggccaccugcggccugaucggccuggugaccuuccugcugcugagcggcagaagcugcagccugaucuacaagggcaccuacgagcugcagacccuggagcugaacauggagacccugaacaugaccaugccccugagcugcaccaagaacaacagccaccacuacaucagagugggcaacgagaccggccuggagcugacccugaccaacaccagcauccugaaccacaaguucugcaaccugagcgacgcccacaagagaaaccuguacgaccacagccugaugagcaucaucagcaccuuccaccugagcauccccaacuucaaccaguacgaggccaugagcugcgacuucaacggcggcaagaucaccgugcaguacaaccugagccacagcuucgccguggacgccgccggccacugcggcacccuggccaacggcgugcugcagaccuucaugagaauggccuggggcggcagcuacaucgcccuggacagcggcugcggcaacugggacugcaucaugaccagcuaccaguaccugaucauccagaacaccaccugggacgaccacugccaguucagcagacccagccccaucggcuaccugggccugcugagccagagaaccagagacaucuacaucagcagaagacgccggggcaccuucaccuggacccugagcgacagcgagggcaacgagacccccggcggcuacugccugaccagauggaugcugaucgaggccgagcugaagugcuucggcaacaccgccguggccaagugcaacgagaagcacgacgaggaguucugcgacaugcugagacuguucgacuucaacaagcaggccaucagaagacugaagacccccgcccagaugagcauccagcugaucaacaaggccgugaacgcccugaucaacgaccagcugaucaugaagaaccaccugagagacaucaugugcauccccuacugcaacuacagcagauacugguaccugaaccacaccagcaccggcaagaccagccugcccagaugcuggcugaucagcaacggcagcuaccugaacgagaccaaguucagcgacgacaucgagcagcaggccgacaacaugaucaccgagaugcugcagaaggaguacaucgacagacagggcaagaccccccugggccugguggaccuguucguguucagcaccagcuucuaccugaucagcaucuuccugcaccuggugaagauccccacccacagacacaucgugggcaagcccugccccaagccccacagacugaaccacaugggcaucugcagcugcggccuguacaagcagcccggcgugcccgugagauggaagagaugaggacuaguuauaagacugacuagcccgaugggccucccaacgggcccuccuccccuccuugcaccgagauuaaucaaaggcucuuuucagagccaccaaaaaaaaaaaaaaaaaaaaaaaaaaaaaaaaaaaaaaaaaaaaaaaaaaaaaaaaaaaaaaaaagaauu

SEQ ID NO: 16428 - RNA, 1658 nt, Artificial Sequence
  mRNA product Design i-3 (hSL-A64-N5) comprising derived and/or modified sequence from LASV(AV;Clade V)__CCA30314__GPCmut1 (opt4)
aggagaaagcuuaccaugggccagaucgugaccuucuuccaggaggugccccacgugaucgaggaggugaugaacaucgugcugaucgcccugagcauccuggccgugcugaagggccuguacaacaucgccaccugcggccugaucggccugaucaccuuccugcugcugugcggcagaagcugcagcagcaaccuguacaagggcguguacgagcugcagagccuggaccugaacauggagacccugaacaugaccaugccccugagcugcaccaagaacaacagccaccacuacaucagagugggcaacgacaccggccuggagcugacccugaccaacaccagcauccugaaccacaaguucugcaaccugagcgacgcccacaagaaggaccuguacgaccacgcccugaugagcaucaucagcaccuuccaccugagcauccccaacuucaaccaguacgaggccaugagcugcgacuucaacggcggcaagaucagcgugcaguacaaccugagccacagcuacgccaucgacgccgccaaccacugcggcaccguggccaacggcauccugcagaccuucaugagaauggccuggggcggcagcuacaucgcccuggacagcggcugcggcaacugggacugcaucaugaccagcuaccaguaccugaucauccagaacaccaccugggagaaccacugccaguucagcagacccagccccaucggcuaccugggccugcugagccagagaaccagagacaucuacaucagcagaagacgccggggcaccuucaccuggacccugagcgacagcgagggcaacgccacccccggcggcuacugccugaccagauggaugcugaucgaggccgagcugaagugcuucggcaacaccgccguggccaagugcaacgagaagcacgacgaggaguucugcgacaugcugagacuguucgacuucaacaagcaggccaucagcagacugaagagccccgcccagaugagcauccagcugaucaacaaggccgugaacgcccugaucaacgaccagcugaucaugaagaaccaccugagagacaucaugugcauccccuacugcaacuacagcaaguacugguaccugaaccacaccaucaccggcaagaccagccugcccaagugcuggcuggugagcaacggcagcuaccugaacgagacccacuucagcgacgacaucgagcagcaggccgacaacaugaucaccgagaugcugcagaaggaguacauggagagacagggcaagaccccccugggccugguggaccuguucguguucagcaccagcuucuaccugaucagcaucuuccugagacuggugaagauccccacccacagacacaucgugggcaagcccugccccaagccccacagacugaaccacaugggcaucugcagcugcggccuguacaagcagcccggcgugcccgugagauggaagagaugaggacuaguuauaagacugacuagcccgaugggccucccaacgggcccuccuccccuccuugcaccgagauuaaucaaaggcucuuuucagagccaccaaaaaaaaaaaaaaaaaaaaaaaaaaaaaaaaaaaaaaaaaaaaaaaaaaaaaaaaaaaaaaaaagaauu

SEQ ID NO: 16429 - RNA, 1655 nt, Artificial Sequence
  mRNA product Design i-3 (hSL-A64-N5) comprising derived and/or modified sequence from LASV(Togo/2016/7082;Clade VI)__AMR44577__GPCmut1 (opt4)
aggagaaagcuuaccaugggccagaucaucaccuucuuccaggaggugccccacgugaucgaggaggugaugaacaucgugcugaucgcccugagccugcuggccauccugaagggcguguacaacguggccaccugcggcaucaucggccuggugaccuuccuguuccugugcggcagaagcugcagccugaucuacaagggcagcuacgagcugcagacccuggagcugaacauggagacccugaacaugaccaugccccugagcugcaccaagaacagcagccaccacuacaucagagugggcaacgagaccggccuggagcugacccugaccaacaccagcaucaucaaccacaaguucugcaaccugagcgacgcccacaagagaaaccuguacgaccacgcccugaugagcauccugagcaccuuccaccugagcauccccaacuucaaccaguacgaggccaugagcugcgacuucaacggcggcaagaucagcgugcaguacaaccugagccacgccuacgccguggacgccgccgagcacugcggcaccguggccaacggcgugcugcagaccuucaugagaauggccuggggcggcagcuacaucgcccuggacagcggcugcggcaacugggacugcaucaugaccagcuaccaguaccugaucauccagaacaccaccugggaggaccacugccaguucagcagacccagccccaucggcuaccugggccugcugagccagagaaccagagacaucuacaucagcagaagacgccggggcaccuucaccuggacccugagcgacagcgagggcaacgagacccccggcggcuacugccugaccagauggaugcugaucgaggccgagcugaagugcuucggcaacaccgccguggccaagugcaacgagaagcacgacgaggaguucugcgacaugcugagacuguucgacuucaacaagcaggccauccagagacugaagagccccgcccagaugagcauccagcugaucaacaaggccgugaacgcccugaucaacgaccagcugaucaugaagaaccaccugagagacaugaugugcauccccuacugcaacuacagcaaguacugguaccugaaccacaccagcagcggcagaaccagccugcccaagugcuggcuggugagcaacggcagcuaccugaacgagacccacuucagcgacgacaucgagcagcaggccgacaacaugaucaccgagaugcugcagaaggaguacaucgacagacagggcaagaccccccugggccugguggaccuguucguguucagcaccagcuucuaccugaucagcaucuuccugcaccugaucaagauccccacccacagacacaucgugggcaagcccugccccaagccccacagacugaaccacaugggcaucugcagcugcggccuguacaagcagcccggcgugcccaccagauggaagagaugaggacuaguuauaagacugacuagcccgaugggccucccaacgggcccuccuccccuccuugcaccgagauuaaucaaaggcucuuuucagagccaccaaaaaaaaaaaaaaaaaaaaaaaaaaaaaaaaaaaaaaaaaaaaaaaaaaaaaaaaaaaaaaaaagaauu

SEQ ID NO: 16430 - RNA, 1655 nt, Artificial Sequence
  mRNA product Design i-3 (hSL-A64-N5) comprising derived and/or modified sequence from LASV(KAK-428;Clade n.d. (VII))__ANH09740__GPCmut1 (opt4)
aggagaaagcuuaccaugggccagaucgugaccuucuuccaggaggugccccacgugaucgaggaggugaugaacaucgugcugaucgcccugagccugcuggccauccugaagggccuguacaacuucgccaccugcggcgugaucggccugaucaccuuccugcugcugugcggcagaagcugcagcgccaccuacaagggccaguacgagcugcagacccuggagcugaacauggagagccugaacaugaccaugccccugagcugcaccaagaacaacagccaccacuacaucagagccggcaacaacaccggccuggagcugacccugaccaacaccagcaucaucagccacaaguucugcaaccugagcgacgcccacaagaagaaccuguacgaccacacccugaugagcaucaucaccaccuuccaccugagcauccccaacuucaaccaguacgaggccaugagcugcgacuucaacggcggcaagaucagcauccaguacaaccugagccacagcuacgccggcgacgccgcccagcacugcggcaccguggccaacggcgugcugcagaccuucaugagaauggccuggggcggcagcuaccuggcccuggacagcggcugcagaggcugggacugcaucaucagcagcuaccaguaccugaucauccagaacaccaccugggacgaccacugccaguucagcagacccagccccaucggcuaccugggcuucgugagccagaagaccagagacaucuacaucagcagaagacgccggggcaccuucaccuggacccugagcgacagcgagggccacgacaugcccggcggcuacugccugaccagauggaugcugaucgaggccgaccugaagugcuucggcaacaccgccguggccaagugcaacgagaagcacgacgaggaguucugcgacauguggagacuguucgacuucaacaagcaggccauccagagacugaaggcccccgcccagaugaacauccagcugaucaacaaggccgugaacgcccugaucaacgaccagcugaugaugaagaaccaccugagagacaucaugugcauccccuacugcaacuacagcaaguucugguaccugaacaacaccaccaccggcagaaccagccugcccagaugcuggcugaucagcaacggcagcuaccugaacgagacccacuucagcgacgacaucgagcagcaggccgacaacaugaucaccgagaugcugcagaaggaguacauggacagacagggcaagaccccccugggccugguggaccuguucguguucagcaccagcuucuaccugaucaccaucuuccugcaccuggugaagauccccacccacagacacaucgugggcaagcccugccccaagccccacagacugaaccacaugggcaucugcagcugcggccuguacaagcagcccggcgugcccgugagauggaagagaugaggacuaguuauaagacugacuagcccgaugggccucccaacgggcccuccuccccuccuugcaccgagauuaaucaaaggcucuuuucagagccaccaaaaaaaaaaaaaaaaaaaaaaaaaaaaaaaaaaaaaaaaaaaaaaaaaaaaaaaaaaaaaaaaagaauu

SEQ ID NO: 16431 - RNA, 1655 nt, Artificial Sequence; identical to SEQ ID NO: 16425
  mRNA product Design i-3 (hSL-A64-N5) comprising derived and/or modified sequence from LASV(Pinneo-NIG-1969;Clade I)__AIT17836__GPCmut1 (opt4)

SEQ ID NO: 16432 - RNA, 1655 nt, Artificial Sequence
  mRNA product Design i-3 (hSL-A64-N5) comprising derived and/or modified sequence from LASV(ISTH0009-NIG-2011;Clade II)__AIT17404__GPCmut1 (opt4)
aggagaaagcuuaccaugggccagaucaucaccuucuuccaggaggugccccacgugaucgaggaggugaugaacaucgugcugaucgcccugagccugcuggccauccugaagggcaucuacaacguggccaccugcggccuguucggccuggugagcuuccugcugcugugcggcagaagcugcagcaccaccuacaagggcguguacgagcugcagacccuggagcuggacauggccagccugaacaugaccaugccccugagcugcaccaagaacaacagccaccacuacaucauggugggcaacgagaccggccuggagcugacccugaccaacaccagcaucaucaaccacaaguucugcaaccugagcgacgcccacaagaagaaccuguacgaccacgcccugaugagcaucaucagcaccuuccaccugagcauccccaacuucaaccaguacgaggccaugagcugcgacuucaacggcggcaagaucagcgugcaguacaaccugagccacgccuacgccguggacgccgccaaccacugcggcaccaucgccaacggcgugcugcagaccuucaugagaauggccuggggcggcagcuacaucgcccuggacagcggcugcggcagcugggacugcaucaugaccagcuaccaguaccugaucauccagaacaccaccugggaggaccacugccaguucagcagacccagccccaucggcuaccugggccugcugagccagagaaccagagacaucuacaucagcagaagacgccggggcaccuucaccuggacccugagcgacagcgagggcaacgagacccccggcggcuacugccugaccagauggaugcugaucgaggccgagcugaagugcuucggcaacaccgccguggccaagugcaacgagaagcacgacgaggaguucugcgacaugcugagacuguucgacuucaacaagcaggccaucagaagacugaagacccccgcccagaugagcauccagcugaucaacaaggccgugaacgcccugaucaacgaccagcugaucaugaagaaccaccugagagacaucaugugcauccccuacugcaacuacagcaaguacugguaccugaaccacaccgugaccggcaagaccagccugcccagaugcuggcuggugagcaacggcagcuaccugaacgagacccacuucagcgacgacaucgagcagcaggccgacaacaugaucaccgagcugcugcagaaggaguacauggacagacagggcaagaccccccugggccugguggaccuguucguguucagcaccagcuucuaccugaucagcaucuuccugcaccugaucaagauccccacccacagacacaucaccggcaagcccugccccaagccccacagacugaaccacaugggcaucugcagcugcggccuguacaagcaccccggcgugcccgugaaguggaagagaugaggacuaguuauaagacugacuagcccgaugggccucccaacgggcccuccuccccuccuugcaccgagauuaaucaaaggcucuuuucagagccaccaaaaaaaaaaaaaaaaaaaaaaaaaaaaaaaaaaaaaaaaaaaaaaaaaaaaaaaaaaaaaaaaagaauu

SEQ ID NO: 16433 - RNA, 1655 nt, Artificial Sequence
  mRNA product Design i-3 (hSL-A64-N5) comprising derived and/or modified sequence from LASV(ISTH2010-NIG-2012;Clade II)__AIT17482__GPCmut1 (opt4)
aggagaaagcuuaccaugggccagaucaucaccuucuuccaggaggugccccacgugaucgaggaggugaugaacaucgugcugaucgcccugagccugcuggccauccugaagggcaucuacaacguggccaccugcggccuguucggccuggugagcuuccugcugcugugcggcagaagcugcagcaccaccuacaagggcguguacgagcugcagacccuggagcuggacauggccagccugaacaugaccaugccccugagcugcaccaagaacaacagccaccacuacaucauggugggcaacgagaccggccuggagcugacccugaccaacaccagcaucaucaaccacaaguucugcaaccugagcgacgcccacaagaagaaccuguacgaccacgcccugaugagcaucaucagcaccuuccaccugagcauccccaacuucaaccaguacgaggccaugagcugcgacuucaacggcggcaagaucagcgugcaguacaaccugagccacgccuacgccguggacgccgccaaccacugcggcaccaucgccaacggcgugcugcagaccuucaugagaauggccuggggcggcagcuacaucgcccuggacagcggcugcggcagcugggacugcaucaugaccagcuaccaguaccugaucauccagaacaucaccugggaggaccacugccaguucagcagacccagccccaucggcuaccugggccugcugagccagagaaccagagacaucuacaucagcagaagacgccggggcaccuucaccuggacccugagcgacagcgagggcaacgagacccccggcggcuacugccugaccagauggaugcugaucgaggccgagcugaagugcuucggcaacaccgccguggccaagugcaacgagaagcacgacgaggaguucugcgacaugcugagacuguucgacuucaacaagcaggccaucagaagacugaagacccccgcccagaugagcauccagcugaucaacaaggccgugaacgcccugaucaacgaccagcugaucaugaagaaccaccugagagacaucaugugcauccccuacugcaacuacagcaaguacugguaccugaaccacaccgugaccggcaagaccagccugcccagaugcuggcuggugagcaacggcagcuaccugaacgagacccacuucagcgacgacaucgagcagcaggccgacaacaugaucaccgagcugcugcagaaggaguacaucgacagacagggcaagaccccccugggccugguggaccuguucguguucagcaccagcuucuaccugaucagcaucuuccugcaccuggugaagauccccacccacagacacguggugggcaagcccugccccaagccccacagacugaaccacaugggcaucugcagcugcggccuguacaagcaccccggcgugcccgugaaguggaagagaugaggacuaguuauaagacugacuagcccgaugggccucccaacgggcccuccuccccuccuugcaccgagauuaaucaaaggcucuuuucagagccaccaaaaaaaaaaaaaaaaaaaaaaaaaaaaaaaaaaaaaaaaaaaaaaaaaaaaaaaaaaaaaaaaagaauu

SEQ ID NO: 16434 - RNA, 1655 nt, Artificial Sequence
  mRNA product Design i-3 (hSL-A64-N5) comprising derived and/or modified sequence from LASV(Lassa virus/H.sapiens-wt/NGA/2015/ISTH_0543;Clade II)__AVO03639__GPCmut1 (opt4)
aggagaaagcuuaccaugggccagaucaucaccuucuuccaggaggugccccacgugaucgaggaggugaugaacaucgugcugaucgcccugagccugcuggccauccugaagggcaucuacaacguggccaccugcggccuguucggccuggugagcuuccugcugcugugcggcagaagcugcagcaccaccuacaagggcguguacgagcugcagacccuggagcuggacauggccaaccugaacaugaccaugccccugagcugcaccaagaacaacagccaccacuacaucauggugggcaacgagaccggccuggagcugacccugaccaacaccagcaucaucaaccacaaguucugcaaccugagcgacgcccacaagaagaaccuguacgaccacgcccugaugagcaucaucagcaccuuccaccugagcauccccaacuucaaccaguacgaggccaugagcugcgacuucaacggcggcaagaucagcgugcaguacaaccugagccacaccuacgccguggacgccgccaaccacugcggcaccaucgccaacggcgugcugcagaccuucaugagaauggccuggggcggcagcuacaucgcccuggacagcggcugcggcagcugggacugcaucaugaccagcuaccaguaccuggugauccagaacaccaccugggaggaccacugccaguucagcagacccagccccaucggcuaccugggccugcugagccagagaaccagagacaucuacaucagcagaagacgccggggcaccuucaccuggacccugagcgacagcgagggcaacgagacccccggcggcuacugccugaccagauggaugcugaucgaggccgagcugaagugcuucggcaacaccgccguggccaagugcaacgagaagcacgacgaggaguucugcgacaugcugagacuguucgacuucaacaagcaggccaucagaagacugaagacccccgcccagaugagcauccagcugaucaacaaggccgugaacgcccugaucaacgaccagcugaucaugaagaaccaccugagagacaucaugugcauccccuacugcaacuacagcaaguacugguaccugaaccacaccgugaccggcaagaccagccugcccagaugcuggcuggugagcaacggcagcuaccugaacgagacccacuucagcgacgacaucgagcagcaggccgacaacaugaucaccgagcugcugcagaaggaguacaucgacagacagggcaagaccccccugggccugguggaccuguucguguucagcaccagcuucuaccugaucagcaucuuccugcaccuggugaagauccccacccacagacacaucaccggcaagcccugccccaagccccacagacugaaccacaugggcaucugcagcugcggccuguacaagcaccccggcgugcccgugaaguggaagagaugaggacuaguuauaagacugacuagcccgaugggccucccaacgggcccuccuccccuccuugcaccgagauuaaucaaaggcucuuuucagagccaccaaaaaaaaaaaaaaaaaaaaaaaaaaaaaaaaaaaaaaaaaaaaaaaaaaaaaaaaaaaaaaaaagaauu

SEQ ID NO: 16435 - RNA, 1655 nt, Artificial Sequence
  mRNA product Design i-3 (hSL-A64-N5) comprising derived and/or modified sequence from LASV(Lassa virus/H.sapiens-wt/NGA/2016/ISTH_0009;Clade II)__AVO03571__GPCmut1 (opt4)
aggagaaagcuuaccaugggccagaucaucaccuucuuccaggaggugccccacgugaucgaggaggugaugaacaucgugcugaucgcccugagccugcuggccauccugaagggcaucuacaacguggccaccugcggccugcugggccuggugagcuuccugcugcugugcggcagaagcugcagcaccaccuacaagggcguguacgagcugcagacccuggagcuggacauggccagccugaacaugaccaugccccugagcugcaccaagaacaacagccaccacuacaucauggugggcaacgagaccggccuggagcugacccugaccaacaccagcaucaucaaccacaaguucugcaaccugagcgacgcccacaagaagaaccuguacgaccacgcccugaugagcaucaucagcaccuuccaccugagcauccccaacuucaaccaguacgaggccaugagcugcgacuucaacggcggcagaaucagcgugcaguacaaccugagccacagcuacgccguggacgccgccaaccacugcggcaccaucgccaacggcgugcugcagaccuucaugagaauggccuggggcggcagcuacaucgcccuggacagcggcugcggcagcugggacugcaucaugaccagcuaccaguaccugaucauccagaacaccaccugggaggaccacugccaguucagcagacccagccccaucggcuaccugggccugcugagccagagaaccagagacaucuacaucagcagaagacgccggggcaccuucaccuggacccugagcgacagcgagggcaacgagacccccggcggcuacugccugaccagauggaugcugaucgaggccgagcugaagugcuucggcaacaccgccguggccaagugcaacgagaagcacgacgaggaguucugcgacaugcugagacuguucgacuucaacaagcaggccaucagaagacugaagacccccgcccagaugagcauccagcugaucaacaaggccgugaacgcccugaucaacgaccagcugaucaugaagaaccaccugagagacaucaugugcauccccuacugcaacuacagcaaguacugguaccugaaccacaccgugaccggcaagaccagccugcccagaugcuggcuggugagcaacggcagcuaccugaacgagacccacuucagcgacgacaucgagcagcaggccgacaacaugaucaccgagcugcugcagaaggaguacaucgacagacagggcaagaccccccugggccugguggaccuguucguguucagcaccagcuucuaccugaucagcaucuuccugcaccuggugaagauccccacccacagacacaucaccggcaagcccugccccaagccccacagacugaaccacaugggcaucugcagcugcggccuguacaaccaccccggcgugcccgugaaguggaagagaugaggacuaguuauaagacugacuagcccgaugggccucccaacgggcccuccuccccuccuugcaccgagauuaaucaaaggcucuuuucagagccaccaaaaaaaaaaaaaaaaaaaaaaaaaaaaaaaaaaaaaaaaaaaaaaaaaaaaaaaaaaaaaaaaagaauu

SEQ ID NO: 16436 - RNA, 1655 nt, Artificial Sequence
  mRNA product Design i-3 (hSL-A64-N5) comprising derived and/or modified sequence from LASV(Lassa virus/H.sapiens-wt/NGA/2016/ISTH_0017;Clade II)__AVO03567__GPCmut1 (opt4)
aggagaaagcuuaccaugggccagaucaucaccuucuuccaggaggugccccacgugaucgaggaggugaugaacaucgugcugaucgcccugagccugcuggccauccugaagggcaucuacaacguggccaccugcggccuguucggccuggugagcuuccugcugcugugcggcagaagcugcagcaccaccuacaagggcguguacgagcugcagacccuggagcuggacauggccagccugaacaugaccaugccccugagcugcaccaagaacaacagccaccacuacaucauggugggcaacgagaccggccuggagcugacccugaccaacaccagcaucaucaaccacaaguucugcaaccugagcgacgcccacaagaagaaccuguacgaccacgcccugaugagcaucaucagcaccuuccaccugagcauccccaacuucaaccaguacgaggccaugagcugcgacuucaacggcggcaagaucagcgugcaguacaaccugagccacaccuacgccaucgacgccgccaaccacugcggcaccaucgccaacggcgugcugcagaccuucaugagaauggccuggggcggcagcuacaucgcccuggacagcggcugcggcagcugggacugcaucaugaccagcuaccaguaccugaucauccagaacaccaccugggaggaccacugccaguucagcagacccagccccaucggcuaccugggccugcugagccagagaaccagagacaucuacaucagcagaagacgccggggcaccuucaccuggacccugagcgacagcgagggcaacgagacccccggcggcuacugccugaccagauggaugcugaucgaggccgagcugaagugcuucggcaacaccgccguggccaagugcaacgagaagcacgacgaggaguucugcgacaugcugagacuguucgacuucaacaagcaggccaucagaagacugaagacccccgcccagaugagcauccagcugaucaacaaggccgugaacgcccugaucaacgaccagcugaucaugaagaaccaccugagagacaucaugugcauccccuacugcaacuacagcaaguacugguaccugaaccacaccgugaccggcaagaccagccugcccagaugcuggcuggugagcaacggcagcuaccugaacgagacccacuucagcgacgacaucgagcagcaggccgacaacaugaucaccgagcugcugcagaaggaguacauggacagacagggcaagaccccccugggccugguggaccuguucguguucagcaccagcuucuaccugaucagcaucuuccugcaccuggugagaauccccacccacagacacgugaucggcaagcccugccccaagccccacagacugaaccacaugggcaucugcagcugcggccuguacaagcaccccggcgugcccgugaaguggaagagaugaggacuaguuauaagacugacuagcccgaugggccucccaacgggcccuccuccccuccuugcaccgagauuaaucaaaggcucuuuucagagccaccaaaaaaaaaaaaaaaaaaaaaaaaaaaaaaaaaaaaaaaaaaaaaaaaaaaaaaaaaaaaaaaaagaauu

SEQ ID NO: 16437 - RNA, 1655 nt, Artificial Sequence
  mRNA product Design i-3 (hSL-A64-N5) comprising derived and/or modified sequence from LASV(Lassa virus/H.sapiens-wt/NGA/2018/ISTH_0959;Clade II)__AVV65099__GPCmut1 (opt4)
aggagaaagcuuaccaugggccagaucaucaccuucuuccaggaggugccccacgugaucgaggaggugaugaacaucgugcugaucgcccugagccugcuggccauccugaagggcaucuacaacguggugaccugcggccuguucggccuggugagcuuccugcugcugugcggcagaagcugcagcaccaccuacaagggcguguacgagcugcagacccuggagcuggacauggccagccugaacaugaccaugccccugagcugcaccaagaacaacagccaccacuacaucauggugggcaacgagaccggccuggagcugacccugaccaacaccagcaucaucaaccacaaguucugcaaccugagcgacgcccacaagaagaaccuguacgaccacgcccugaugagcaucaucagcaccuuccaccugagcauccccaacuucaaccaguacgaggccaugagcugcgacuucaacggcggcaagaucagcgugcaguacaaccugagccacgccuacgccaucgacgccgccaaccacugcggcaccaucgccaacggcgugcugcagaccuucaugagaauggccuggggcggcagcuacaucgcccuggacagcggcugcggcagcugggacugcaucaugaccagcuaccaguaccugaucauccagaacaccaccugggaggaccacugccaguucagcagacccagccccaucggcuaccugggccugcugagccagagaaccagagacaucuacaucagcagaagacgccggggcaccuucaccuggacccugagcgacagcgagggcaacgagacccccggcggcuacugccugaccagauggaugcugaucgaggccgagcugaagugcuucggcaacaccgccguggccaagugcaacgagaagcacgacgaggaguucugcgacaugcugagacuguucgacuucaacaagcaggccaucagaagacugaagacccccgcccagaugagcauccagcugaucaacaaggccgugaacgcccugaucaacgaccagcugaucaugaagaaccaccugagagacaucaugugcauccccuacugcaacuacagcaaguacugguaccugaaccacaccgugaccggcaagaccagccugcccagaugcuggcuggugagcaacggcagcuaccugaacgagacccacuucagcgacgacaucgagcagcaggccgacaacaugaucaccgagcugcugcagaaggaguacaucgacagacagggcaagaccccccugggccugguggaccuguucguguucagcaccagcuucuaccugaucagcaucuuccugcaccuggugaagauccccacccacagacacgugaucggcaagcccugccccaagccccacagacugaaccacaugggcaucugcagcugcggccuguacaagcaccccggcgugcccgugaaguggaagagaugaggacuaguuauaagacugacuagcccgaugggccucccaacgggcccuccuccccuccuugcaccgagauuaaucaaaggcucuuuucagagccaccaaaaaaaaaaaaaaaaaaaaaaaaaaaaaaaaaaaaaaaaaaaaaaaaaaaaaaaaaaaaaaaaagaauu

SEQ ID NO: 16438 - RNA, 1655 nt, Artificial Sequence
  mRNA product Design i-3 (hSL-A64-N5) comprising derived and/or modified sequence from LASV(LASV003-NIG-2008;Clade II)__AIT17580__GPCmut1 (opt4)
aggagaaagcuuaccaugggccagaucaucaccuucuuccaggaggugccccacgugaucgaggaggugaugaacaucgugcugaucgcccugagccugcuggccauccugaagggcaucuacaacguggccaccugcggccuguucggccuggugagcuuccugcugcugugcggcagaagcugcagcaccaccuacaagggcguguacgagcugcagacccuggagcuggacauggccagccugaacaugaccaugccccugagcugcaccaagaacaacagccaccacuacaucauggugggcaacgagaccggccuggagcugacccugaccaacaccagcaucaucaaccacaaguucugcaaccugagcgacgcccacaagaagaaccuguacgaccacgcccugaugagcaucaucagcaccuuccaccugagcauccccaacuucaaccaguacgaggccaugagcugcgacuucaacggcggcaagaucagcgugcaguacaaccugagccacaccuacgccguggacgccgccaaccacugcggcaccaucgccaacggcgugcugcagaccuucaugagaauggccuggggcggcagcuacaucgcccuggacagcggcugcggcagcugggacugcaucaugaccagcuaccaguaccugaucauccagaacaccaccugggaggaccacugccaguucagcagacccagccccaucggcuaccugggccugcugagccagagaaccagagacaucuacaucagcagaagacgccggggcaccuucaccuggacccugagcgacagcgagagcaacgagacccccggcggcuacugccugaccagauggaugcugaucgaggccgagcugaagugcuucggcaacaccgccguggccaagugcaacgagaagcacgacgaggaguucugcgacaugcugagacuguucgacuucaacaagcaggccaucagaagacugaaggcccccgcccagaugagcauccagcugaucaacaaggccgugaacgcccugaucaacgaccagcugaucaugaagaaccaccugagagacaucaugugcauccccuacugcaacuacagcaaguacugguaccugaaccacaccgugaccggcagaaccagccugcccagaugcuggcuggugagcaacggcagcuaccugaacgagacccacuucagcgacgacaucgagcagcaggccgacaacaugaucaccgagcugcugcagaaggaguacauggacagacagggcaagaccccccugggccugguggaccuguucguguucagcaccagcuucuaccugaucagcaucuuccugcaccuggugaagauccccacccacagacacgugaucggcaagcccugccccaagccccacagacugaaccacaugggcaucugcagcugcggccuguacaagcaccccggcgugcccgugaaguggaagagaugaggacuaguuauaagacugacuagcccgaugggccucccaacgggcccuccuccccuccuugcaccgagauuaaucaaaggcucuuuucagagccaccaaaaaaaaaaaaaaaaaaaaaaaaaaaaaaaaaaaaaaaaaaaaaaaaaaaaaaaaaaaaaaaaagaauu

SEQ ID NO: 16439 - RNA, 1655 nt, Artificial Sequence
  mRNA product Design i-3 (hSL-A64-N5) comprising derived and/or modified sequence from LASV(LASV035-NIG-2009;Clade II)__AIT17588__GPCmut1 (opt4)
aggagaaagcuuaccaugggccagaucaucaccuucuuccaggaggugccccacgugaucgaggaggugaugaacaucgugcugaucgcccugagccugcuggccauccugaagggcaucuacaacguggccaccugcggccuguucggccuggugagcuuccugcugcugugcggcagaagcugcagcaccaccuacaagggcguguacgagcugcagacccuggagcuggacauggccagccugaacaugaccaugccccugagcugcaccaagaacaacagccaccacuacaucauggugggcaacgagaccggccuggagcugacccugaccaacaccagcaucaucaaccacaaguucugcaaccugagcgacgcccacaagaagaaccuguacgaccacgcccugaugagcaucaucagcaccuuccaccugagcauccccaacuucaaccaguacgaggccaugagcugcgacuucaacggcggcaagaucagcgugcaguacaaccugagccacgccuacgccguggacgccgccaaccacugcggcaccaucgccaacggcgugcugcagaccuucaugagaauggccuggggcggcagcuacaucgcccuggacagcggcugcggcagcugggacugcaucaugaccagcuaccaguaccugaucauccagaacaccaccugggaggaccacugccaguucagcagacccagccccaucggcuaccugggccugcugagccagagaaccagagacaucuacaucagcagaagacgccggggcaccuucaccuggacccugagcgacagcgagggcaacgagacccccggcggcuacugccugaccagauggaugcugaucgaggccgagcugaagugcuucggcaacaccgccguggccaagugcaacgagaagcacgacgaggaguucugcgacaugcugagacuguucgacuucaacaagcaggccaucagaagacugaaggcccccgcccagaugagcauccagcugaucaacaaggccgugaacgcccugaucaacgaccagcugaucaugaagaaccaccugagagacaucaugugcauccccuacugcaacuacagcaaguacugguaccugaaccacaccgugaccggcaagaccagccugcccagaugcuggcuggugagcaacggcagcuaccugaacgagacccacuucagcgacgacaucgagcagcaggccgacaacaugaucaccgagcugcugcagaaggaguacaucgacagacagggcaagaccccccugggccugguggaccuguucguguucagcaccagcuucuaccugaucagcaucuuccugcaccuggugaagauccccacccacagacacgugaucggcaagcccugccccaagccccacagacugaaccacaugggcaucugcagcugcggccuguacaagcaccccggcgugcccgugaaguggaagagaugaggacuaguuauaagacugacuagcccgaugggccucccaacgggcccuccuccccuccuugcaccgagauuaaucaaaggcucuuuucagagccaccaaaaaaaaaaaaaaaaaaaaaaaaaaaaaaaaaaaaaaaaaaaaaaaaaaaaaaaaaaaaaaaaagaauu

SEQ ID NO: 16440 - RNA, 1655 nt, Artificial Sequence
  mRNA product Design i-3 (hSL-A64-N5) comprising derived and/or modified sequence from LASV(LASV1000-NIG-2009;Clade II)__AIT17782__GPCmut1 (opt4)
aggagaaagcuuaccaugggccagaucaucaccuucuuccaggaggugccccacgugaucgaggaggugaugaacaucgugcugaucgcccugagccugcuggccauccugaagggcaucuacaacguggccaccugcggccuguucggccuggugagcuuccugcugcugugcggcagaagcugcagcaccaccuacaagggcguguacgagcugcagacccuggagcuggacauggccagccugaacaugaccaugccccugagcugcaccaagaacaacagccaccacuacaucauggugggcaacgagaccggccuggagcugacccugaccaacaccagcaucaucaaccacaaguucugcaaccugagcgacgcccacaagaagaaccuguacgaccacgcccugaugagcaucaucagcaccuuccaccugagcauccccaacuucaaccaguacgaggccaugagcugcgacuucaacggcggcaagaucagcgugcaguacaaccugagccacaccuacgccguggacgccgccaaccacugcggcaccaucgccaacggcgugcugcagaccuucaugagaauggccuggggcggcagcuacaucgcccuggacagcggcugcggcagcugggacugcaucaugaccagcuaccaguaccugaucauccagaacaccaccugggaggaccacugccaguucagcagacccagccccaucggcuaccugggccugcugagccagagaaccagagacaucuacaucagcagaagacgccggggcaccuucaccuggacccugagcgacagcgagggcaacgagacccccggcggcuacugccugaccagauggaugcugaucgaggccgagcugaagugcuucggcaacaccgccguggccaagugcaacgagaagcacgacgaggaguucugcgacaugcugagacuguucgacuucaacaagcaggccaucaagagacugaagacccccgcccagaugagcauccagcugaucaacaaggccgugaacgcccugaucaacgaccagcugaucaugaagaaccaccugagagacaucaugugcauccccuacugcaacuacagcaaguacugguaccugaaccacaccgugaccggcaagaccagccugcccagaugcuggcuggugagcaacggcagcuaccugaacgagacccacuucagcgacgacaucgagcagcaggccgacaacaugaucaccgagcugcugcagaaggaguacaucgacagacagggcaagaccccccugggccugguggaccuguucguguucagcaccagcuucuaccugaucagcaucuuccugcaccuggugaagauccccacccacagacacguggugggcaagcccugccccaagccccacagacugaaccacaugggcaucugcagcugcggccuguacaagcaccccggcgugcccgugaaguggaagagaugaggacuaguuauaagacugacuagcccgaugggccucccaacgggcccuccuccccuccuugcaccgagauuaaucaaaggcucuuuucagagccaccaaaaaaaaaaaaaaaaaaaaaaaaaaaaaaaaaaaaaaaaaaaaaaaaaaaaaaaaaaaaaaaaagaauu

SEQ ID NO: 16441 - RNA, 1655 nt, Artificial Sequence
  mRNA product Design i-3 (hSL-A64-N5) comprising derived and/or modified sequence from LASV(LASV221-NIG-2010;Clade II)__AIT17624__GPCmut1 (opt4)
aggagaaagcuuaccaugggccagaucaucaccuucuuccaggaggugccccacgugaucgaggaggugaugaacaucgugcugaucgcccugagccugcuggccauccugaagggcaucuacaacguggccaccugcggccuguucggccuggugagcuuccugcugcugugcggcagaagcugcagcaccaccuacaagggcguguacgagcugcagacccuggagcuggacauggccagccugaacaugaccaugccccugagcugcaccaagaacaacagccaccacuacaucauggugggcaacgagaccggccuggagcugacccugaccaacaccagcaucaucaaccacaaguucugcaaccugagcgacgcccacaagaagaaccuguacgaccacgcccugaugagcaucaucagcaccuuccaccugagcauccccaacuucaaccaguacgaggccaugagcugcgacuucaacggcggcaagaucagcgugcaguacaaccugagccacaccuacgccaucgacgccgccaaccacugcggcaccaucgccaacggcgugcugcagaccuucaugagaauggccuggggcggcagcuacaucgcccuggacagcggcugcggcagcugggacugcaucaugaccagcuaccaguaccugaucauccagaacaccaccugggaggaccacugccaguucagcagacccagccccaucggcuaccugggccugcugagccagagaaccagagacaucuacaucagcagaagacgccggggcaccuucaccuggacccugagcgacagcgagggcaacgagacccccggcggcuacugccugaccagauggaugcugaucgaggccgagcugaagugcuucggcaacaccgccguggccaagugcaacgagaagcacgacgaggaguucugcgacaugcugagacuguucgacuucaacaagcaggccaucagaagacugaagacccccgcccagaugagcauccagcugaucaacaaggccgugaacgcccugaucaacgaccagcugaucaugaagaaccaccugagagacaucaugugcauccccuacugcaacuacagcaaguacugguaccugaaccacaccgugaccggcaagaccagccugcccagaugcuggcuggugagcaacggcagcuaccugaacgagacccacuucagcgacgacaucgagcagcaggccgacaacaugaucaccgagaugcugcagaaggaguacauggacagacagggcaagaccccccugggccugguggaccuguucguguucagcaccagcuucuaccugaucagcaucuuccugcaccuggugaagauccccacccacagacacgugaucggcaagcccugccccaagccccacagacugaaccacaugggcaucugcagcugcggccuguacaagcaccccggcgugcccgugaaguggaagagaugaggacuaguuauaagacugacuagcccgaugggccucccaacgggcccuccuccccuccuugcaccgagauuaaucaaaggcucuuuucagagccaccaaaaaaaaaaaaaaaaaaaaaaaaaaaaaaaaaaaaaaaaaaaaaaaaaaaaaaaaaaaaaaaaagaauu

SEQ ID NO: 16442 - RNA, 1655 nt, Artificial Sequence
  mRNA product Design i-3 (hSL-A64-N5) comprising derived and/or modified sequence from LASV(LASV237-NIG-2010;Clade II)__AIT17638__GPCmut1 (opt4)
aggagaaagcuuaccaugggccagaucaucaccuucuuccaggaggugccccacgugaucgaggaggugaugaacaucgugcugaucgcccugagccugcuggccauccugaagggcaucuacaacguggccaccugcggccuguucggccuggugagcuuccugcugcugugcggcagaagcugcagcaccaccuacaagggcguguacgagcugcagacccuggagcuggacauggccagccugaacaugaccaugccccugagcugcaccaagaacaacagccaccacuacaucauggugggcaacgagaccggccuggagcugacccugaccaacaccagcaucaucaaccacaaguucugcaaccugagcgacgcccacaagaaggaccuguacgaccacgcccugaugagcaucaucagcaccuuccaccugagcauccccaacuucaaccaguacgaggccaugagcugcgacuucaacggcggcaagaucagcgugcaguacaaccugagccacaccuacgccguggacgccgccaaccacugcggcaccaucgccaacggcgugcugcagaccuucaugagaauggccuggggcggcagcuacaucgcccuggacagcggcugcggcagcugggacugcaucaugaccagcuaccaguaccugaucauccagaacaccaccugggaggaccacugccaguucagcagacccagccccaucggcuaccugggccugcugagccagagaaccagagacaucuacaucagcagaagacgccggggcaccuucaccuggacccugagcgacagcgagggcaacgagacccccggcggcuacugccugaccagauggaugcugaucgaggccgagcugaagugcuucggcaacaccgccguggccaagugcaacgagaagcacgacgaggaguucugcgacaugcugagacuguucgacuucaacaagcaggccaucagaagacugaagacccccgcccagaugagcauccagcugaucaacaaggccgugaacgcccugaucaacgaccagcugaucaugaagaaccaccugagagacaucaugugcauccccuacugcaacuacagcaaguacugguaccugaaccacaccgugaccggcaagaccagccugcccagaugcuggcuggugagcaacggcagcuaccugaacgagacccacuucagcgacgacaucgagcagcaggccgacaacaugaucaccgagcugcugcagaaggaguacauggacagacagggcaagaccccccugggccugguggaccuguucguguucagcaccagcuucuaccugaucagcaucuuccugcaccugaucaagauccccacccacagacacaucaccggcaagcccugccccaagccccacagacugaaccacaugggcaucugcagcugcggccuguacaagcaccccggcgugcccgugaaguggaagagaugaggacuaguuauaagacugacuagcccgaugggccucccaacgggcccuccuccccuccuugcaccgagauuaaucaaaggcucuuuucagagccaccaaaaaaaaaaaaaaaaaaaaaaaaaaaaaaaaaaaaaaaaaaaaaaaaaaaaaaaaaaaaaaaaagaauu

SEQ ID NO: 16443 - RNA, 1655 nt, Artificial Sequence
  mRNA product Design i-3 (hSL-A64-N5) comprising derived and/or modified sequence from LASV(LASV253-NIG-2011;Clade II)__AIT17670__GPCmut1 (opt4)
aggagaaagcuuaccaugggccagaucaucaccuucuuccaggaggugccccacgugaucgaggaggugaugaacaucgugcugaucgcccugagccugcuggccauccugaagggcaucuacaacguggccaccugcggccuguucggccuggugagcuuccugcugcugugcggcagaagcugcagcaccaccuacaagggcguguacgagcugcagacccuggagcuggacauggccagccugaacaugaccaugccccugagcugcaccaagaacaacagccaccacuacaucauggugggcaacgagaccggccuggagcugacccugaccaacaccagcaucaucaaccacaaguucugcaaccugagcgacgcccacaagaagaaccuguacgaccacgcccugaugagcaucaucagcaccuuccaccugagcauccccaacuucaaccaguacgaggccaugagcugcgacuucaacggcggcaagaucagcgugcaguacaaccugagccacaccuacgccguggacgccgccaaccacugcggcaccaucgccaacggcgugcugcagaccuucaugagaauggccuggggcggcagcuacaucgcccuggacagcggcugcggcagcugggacugcaucaugaccagcuaccaguaccugaucauccagaacaccaccugggaggaccacugccaguucagcagacccagccccaucggcuaccugggccugcugagccagagaaccagagacaucuacaucagcagaagacgccggggcaccuucaccuggacccugagcgacagcgagggcaacgagacccccggcggcuacugccugaccagauggaugcugaucgaggccgagcugaagugcuucggcaacaccgccguggccaagugcaacgagaagcacgacgaggaguucugcgacaugcugagacuguucgacuucaacaagcaggccaucagaagacugaaggcccccgcccagaugagcauccagcugaucaacaaggccgugaacgcccugaucaacgaccagcugaucaugaagaaccaccugagagacaucaugugcauccccuacugcaacuacagcaaguacugguaccugaaccacaccgugaccggcagaaccagccugcccagaugcuggcuggugagcaacggcagcuaccugaacgagacccacuucagcgacgacaucgagcagcaggccgacaacaugaucaccgagcugcugcagaaggaguacaucgacagacagggcaagaccccccugggccugguggaccuguucguguucagcaccagcuucuaccugaucagcaucuuccugcaccuggugaagauccccacccacagacacaucaucggcaagcccugccccaagccccacagacugaaccacaugggcaucugcagcugcggccuguacaagcaccccggcgugcccgugaaguggaagagaugaggacuaguuauaagacugacuagcccgaugggccucccaacgggcccuccuccccuccuugcaccgagauuaaucaaaggcucuuuucagagccaccaaaaaaaaaaaaaaaaaaaaaaaaaaaaaaaaaaaaaaaaaaaaaaaaaaaaaaaaaaaaaaaaagaauu

SEQ ID NO: 16444 - RNA, 1655 nt, Artificial Sequence
  mRNA product Design i-3 (hSL-A64-N5) comprising derived and/or modified sequence from LASV(LASV254-NIG-2011;Clade II)__AIT17674__GPCmut1 (opt4)
aggagaaagcuuaccaugggccagaucaucaccuucuuccaggaggugccccacgugaucgaggaggugaugaacaucgugcugaucgcccugagccugcuggccauccugaagggcaucuacaacguggccaccugcggccuguucggccuggugagcuuccugcugcugugcggcagaagcugcagcaccaccuacaagggcguguacgagcugcagacccuggagcuggacaugaccaaccugaacaugaccaugccccugagcugcaccaagaacaacagccaccacuacaucauggugggcaacgagaccggccuggagcugacccugaccaacaccagcaucaucaaccacaaguucugcaaccugagcgacgcccacaagaagaaccuguacaaccacgcccugaugagcaucaucagcaccuuccaccugagcauccccaacuucaaccaguacgaggccaugagcugcgacuucaacggcggcaagaucagcgugcaguacaaccugagccacagcuacgccguggacgccgccaaccacugcggcaccaucgccaacggcgugcugcagaccuucaugagaauggccuggggcggcagcuacaucgcccuggacagcggcugcggcaacugggacugcaucaugaccagcuaccaguaccugaucauccagaacaccaccugggaggaccacugccaguucagcagacccagccccaucggcuaccugggccugcugagccagagaaccagagacaucuacaucagcagaagacgccggggcaccuucaccuggacccugagcgacagcgagggcaacgagacccccggcggcuacugccugaccagauggaugcugaucgaggccgagcugaagugcuucggcaacaccgccguggccaagugcaacgagaagcacgacgaggaguucugcgacaugcugagacuguucgacuucaacaagcaggccaucagaagacugaagacccccgcccaggccaacauccagcugaucaacaaggccgugaacgcccugaucaacgaccagcugaucaugaagaaccaccugagagacaucaugugcauccccuacugcaacuacagcaaguacugguaccugaaccacaccgugaccggcaagaccagccugcccagaugcuggcuggugagcaacggcagcuaccugaacgagacccacuucagcgacgacaucgagcagcaggccgacaacaugaucaccgagcugcugcagaaggaguacauggacagacagggcaagaccccccugggccugguggaccuguucguguucagcaccagcuucuaccugaucagcaucuuccugcaccuggugaagauccccacccacagacacgugaucggcaagcccugccccaagccccacagacugaaccacaugggcaucugcagcugcggccuguacaagcaccccggcgugcccgugaaguggaagagaugaggacuaguuauaagacugacuagcccgaugggccucccaacgggcccuccuccccuccuugcaccgagauuaaucaaaggcucuuuucagagccaccaaaaaaaaaaaaaaaaaaaaaaaaaaaaaaaaaaaaaaaaaaaaaaaaaaaaaaaaaaaaaaaaagaauu

SEQ ID NO: 16445 - RNA, 1655 nt, Artificial Sequence
  mRNA product Design i-3 (hSL-A64-N5) comprising derived and/or modified sequence from LASV(Nig08-A19;Clade III)__ADU56618__GPCmut1 (opt4)
aggagaaagcuuaccaugggccagaucgugaccuucuuccaggaggugccccacgugaucgaggaggugaugaacaucgugcugaucgcccugagcauccuggccauccugaagggccuguacaacaucgccaccugcggccugaucggccuggugaccuuccugcugcugagcggcagaagcugcagcaugaccuacaagggcguguacgagcugcagacccuggagcugaacaugaacacccugaacaugaccaugccccugagcugcaccaagaacaacagccaccacuacaucauggugggcaacgagaccggccuggagcugacccugaccaacaccagccugcugcaccacaaguucugcaaccugagcgacgcccacaagaagaaccuguacgaccacacccugaugagcaucaucagcaccuuccaccugagcauccccaacuucaaccaguacgaggccaugagcugcgacuucaacggcggcaagaucaccgugcaguacaaccugagccacagcuacgccaucgacgccgccaaccacugcggcaccguggccaacggcgugcugcagaccuucaugagaauggccuggggcggcagcuacaucgcccuggacagcggcugcggcaagugggacugcaucaugaccagcuaccaguaccugaucauccagaacaccaccugggaggaccacugccaguucagcagacccagccccaucggcuaccugggccugcugagccagagaaccagagacaucuacaucagcagaagacgccggggcaccuucaccuggacccugagcgacagcgagggcaacgagacccccggcggcuacugccugaccagauggaugcugaucgaggccgagcugaagugcuucggcaacaccgccguggccaagugcaacgagaagcacgacgaggaguucugcgacaugcugagacuguucgacuucaacaagcaggccaucagaagacugaaggcccccgcccagaugagcauccagcugaucaacaaggccgugaacgcccugaucaacgaccagcugaucaugaagaaccaccugagagacaucaugugcauccccuacugcaacuacagcaaguacugguaccugaaccacaccagcaccggcagaaccagccugcccagaugcuggcuggugagcaacggcagcuaccugaacgagacccacuucagcgacgacaucgagcagcaggccgacaacaugaucaccgagaugcugcagaaggaguaccuggacagacagggcaagaccccccugggccugguggaccuguucguguucagcaccagcuucuaccugaucagcaucuuccugcaccuggugaagauccccacccacagacacaucgugggcaagcccugccccaagccccacagacugaaccacaugggcaucugcagcugcggccuguacaagcagcccggcgugcccgugagauggaagagaugaggacuaguuauaagacugacuagcccgaugggccucccaacgggcccuccuccccuccuugcaccgagauuaaucaaaggcucuuuucagagccaccaaaaaaaaaaaaaaaaaaaaaaaaaaaaaaaaaaaaaaaaaaaaaaaaaaaaaaaaaaaaaaaaagaauu

SEQ ID NO: 16446 - RNA, 1658 nt, Artificial Sequence
  mRNA product Design i-3 (hSL-A64-N5) comprising derived and/or modified sequence from LASV(G1180-SLE-2010;Clade IV)__AIT17168__GPCmut1 (opt4)
aggagaaagcuuaccaugggccagaucgugaccuucuuccaggaggugccccacgugaucgaggaggugaugaacaucgugcugaucgcccugagcauccuggccgugcugaagggccuguacaacuucgccaccugcggccuggugggccugcugaccuuccugcugcugugcggcagaagcugcaccgccagcagauacaagggcguguacgagcugcagacccuggagcugaacauggagacccugaacaugaccaugccccugagcugcaccaagaacaacagccaccacuacaucauggugggcaacgagaccggccuggagcugacccugaccaacaccagcaucaucaaccacaaguucugcaaccugagcgacgcccacaagaagaaccuguacgaccacgcccugaugagcaucaucagcaccuuccaccugagcauccccaacuucaaccaguacgaggccaugagcugcgacuucaacggcggcaagaucagcgugcaguacaaccugagccacagcuacgccggcgacgccgccaaccacugcggcaccguggccaacggcgugcugcagaccuucaugagaauggccuggggcggcagcuacaucgcccuggacagcggcugcggcagcugggacugcaucaugaccagcuaccaguaccugaucauccagaacaccaccugggaggaccacugccaguucagcagacccagccccaucggcuaccugggccugcugagccagagaaccagagacaucuacaucagcagaagacgccggggcaccuucaccuggacccugagcgacagcgagggcaaggacacccccggcggcuacugccugaccagauggaugcugaucgaggccgagcugaagugcuucggcaacaccgccguggccaagugcaacgagaagcacgacgaggaguucugcgacaugcugagacuguucgacuucaacaagcaggccauccagagacugaaggcccccgcccagaugagcauccagcugaucaacaaggccgugaacgcccugaucaacgaccagcugaucaugaagaaccaccugagagacaucaugugcauccccuacugcaacuacagcaaguacugguaccugaaccacaccaccaccggcaagaccagccugcccaagugcuggcuggugagcaacggcagcuaccugaacgagacccacuucagcgacgacaucgagcagcaggccgacaacaugaucaccgagaugcugcagaaggaguacauggagagacagggcaagaccccccugggccugguggaccuguucguguucagcaccagcuucuaccugaucagcaucuuccugcaccuggugaagauccccacccacagacacaucgugggcaagagcugccccaagccccacagacugaaccacaugggcaucugcagcugcggccuguacaagcagcccggcgugcccgugaaguggaagagaugaggacuaguuauaagacugacuagcccgaugggccucccaacgggcccuccuccccuccuugcaccgagauuaaucaaaggcucuuuucagagccaccaaaaaaaaaaaaaaaaaaaaaaaaaaaaaaaaaaaaaaaaaaaaaaaaaaaaaaaaaaaaaaaaagaauu

SEQ ID NO: 16447 - RNA, 1658 nt, Artificial Sequence
  mRNA product Design i-3 (hSL-A64-N5) comprising derived and/or modified sequence from LASV(G1442-SLE-2011;Clade IV)__AIT17180__GPCmut1 (opt4)
aggagaaagcuuaccaugggccagaucgugaccuucuuccaggaggugccccacgugaucgaggaggugaugaacaucgugcugaucgcccugagcauccuggccgugcugaagggccuguacaacguggccaccugcggccugaucggccuggugaccuuccugcugcugugcggcagaagcugcaccaccacccuguacaagggcguguacgagcugcagacccuggagcugaacauggagacccugaacaugaccaugccccugagcugcaccaagaacaacagccaccacuacaucagagugggcaacgagaccggccuggagcugacccugaccaacaccagcaucaucaaccacaaguucugcaaccugagcgacgcccacaagaagaaccuguacgaccacgcccugaugagcaucaucagcaccuuccaccugagcauccccaacuucaaccaguacgaggccaugagcugcgacuucaacggcggcaagaucagcgugcaguacaaccugagccacagcuacgccggcgacgccgccaaccacugcggcaccguggccaacggcgugcugcagaccuucaugagaauggccuggggcggcagcuacaucgcccuggacagcggcugcggcaacugggacugcaucaugaccagcuaccaguaccugaucauccagaacaccaccugggacgaccacugccaguucagcagacccagccccaucggcuaccugggccugcugagccagagaaccagagacguguacaucagcagaagacgccggggcaccuucaccuggacccugagcgacagcgagggcaaggacacccccggcggcuacugccugaccagauggaugcugaucgaggccgagcugaagugcuucggcaacaccgccguggccaagugcaacgagaagcacgacgaggaguucugcgacaugcugagacuguucgacuucaacaagcaggccauccagagacugaaggcccccgcccagaugagcauccagcugaucaacaaggccgugaacgcccugaucaacgaccagcugaucaugaagaaccaccugagagacaucaugugcauccccuacugcaacuacagcaaguacugguaccugaacaacaccgccaccggcaagaccagccugcccaagugcuggcugaucagcaacggcagcuaccugaacgagacccacuucagcgacgacaucgagcaggaggccgacaacaugaucaccgagaugcugcagaaggaguacauggagagacagggcaagaccccccugggccugguggaccuguucguguucagcaccagcuucuaccugaucagcaucuuccugcaccuggugaagauccccacccacagacacaucgugggcaagagcugccccaagccccacagacugaaccacaugggcaucugcagcugcggccuguacaagcagcccggcgugcccgugagauggaagagaugaggacuaguuauaagacugacuagcccgaugggccucccaacgggcccuccuccccuccuugcaccgagauuaaucaaaggcucuuuucagagccaccaaaaaaaaaaaaaaaaaaaaaaaaaaaaaaaaaaaaaaaaaaaaaaaaaaaaaaaaaaaaaaaaagaauu

SEQ ID NO: 16448 - RNA, 1658 nt, Artificial Sequence
  mRNA product Design i-3 (hSL-A64-N5) comprising derived and/or modified sequence from LASV(G3010-SLE-2013;Clade IV)__AIT17344__GPCmut1 (opt4)
aggagaaagcuuaccaugggccagaucgugaccuucuuccaggaggugccccacgugaucgaggaggugaugaacaucgugcugaucgcccugagcauccuggccgugcugaagggccuguacaacuucgccaccugcggccuggugggccuggugaccuuccugcugcugugcggcagaagcugcaccaccagccuguacaagggcguguacgagcugcagacccuggagcugaacauggagacccugaacaugaccaugccccugagcugcaccaagaacaacagccaccacuacaucauggugggcaacgagaccggccuggagcugacccugaccaacaccagcaucaucaaccacaaguucugcaaccugagcgacgcccacaagaagaaccuguacaaccacgcccugaugagcaucaucagcaccuuccaccugagcauccccaacuucaaccaguacgaggccaugagcugcgacuucaacggcggcaagaucagcgugcaguacaaccugagccacagcuacgccggcgacgccgccagccacugcggcaccguggccaacggcgugcugcagaccuucaugagaauggccuggggcggcagcuacaucgcccuggacagcggcugcggcaagugggacugcaucaugaccagcuaccaguaccugaucauccagaacaccaccugggaggaccacugccaguucagcagacccagccccaucggcuaccugggccugcugagccagagaaccagagacaucuacaucagcagaagacgccggggcaccuucaccuggacccugagcgacagcgagggcaaggacacccccggcggcuacugccugaccagauggaugcugaucgaggccgagcugaagugcuucggcaacaccgccguggccaagugcaacgagaagcacgacgaggaguucugcgacaugcugagacuguucgacuucaacaagcaggccauccagagacugaagacccccgcccagaugagcauccagcugaucaacaaggccgugaacgcccugaucaacgaccagcugaucaugaagaaccaccugagagacaucaugugcauccccuacugcaacuacagcaaguacugguaccugaaccacaccaccaccggcaagaccagccugcccaagugcuggcuggugagcaacggcagcuaccugaacgagacccacuucagcgacgacaucgagcagcaggccgacaacaugaucaccgagaugcugcagaaggaguacauggagagacagggcaagaccccccugggccugguggaccuguucguguucagcaccagcuucuaccugaucagcaucuuccugcaccuggugaagauccccacccacagacacaucgugggcaagagcugccccaagccccacagacugaaccacaugggcaucugcagcugcggccuguacaagcagcccggcgugcccgugagauggaagagaugaggacuaguuauaagacugacuagcccgaugggccucccaacgggcccuccuccccuccuugcaccgagauuaaucaaaggcucuuuucagagccaccaaaaaaaaaaaaaaaaaaaaaaaaaaaaaaaaaaaaaaaaaaaaaaaaaaaaaaaaaaaaaaaaagaauu

SEQ ID NO: 16449 - RNA, 1658 nt, Artificial Sequence
  mRNA product Design i-3 (hSL-A64-N5) comprising derived and/or modified sequence from LASV(G502-SLE-2009;Clade IV)__AIT17126__GPCmut1 (opt4)
aggagaaagcuuaccaugggccagaucgugaccuucuuccaggaggugccccacgugaucgaggaggugaugaacaucgugcugaucgcccugagcauccuggccgugcugaagggccuguacaacuucgccaccugcggccuggugggccugcugaccuuccugcugcugugcggcagaagcugcaccaccggccuguacaagggcguguacgagcugcagacccuggagcugaacauggagacccugaacaugaccaugccccugagcugcaccaagaacaacagccaccacuacaucauggugggcaacgagaccggccuggagcugacccugaccaacaccagcaucaucaaccacaaguucugcaaccugagcgacgcccacaagaagaaccuguacgaccacgcccugaugagcaucaucagcaccuuccaccugagcauccccaacuucaaccaguacgaggccaugagcugcgacuucaacggcggcaagaucagcgugcaguacaaccugagccacagcuacgccggcgacgccgccgaccacugcggcaccguggccaacggcgugcugcagaccuucaugagaauggccuggggcggcagcuacaucgcccuggacagcggcugcggcagaugggacugcaucaugaccagcuaccaguaccugaucauccagaacaccaccugggaggaccacugccaguucagcagacccagccccaucggcuaccugggccugcugagccagagaaccagagacaucuacaucagcagaagacgccggggcaccuucaccuggacccugagcgacagcgagggcaaggacacccccggcggcuacugccugaccagauggaugcugaucgaggccgagcugaagugcuucggcaacaccgccguggccaagugcaacgagaagcacgacgaggaguucugcgacaugcugagacuguucgacuucaacaagcaggccauccagagacugaaggcccccgcccagaugagcauccagcugaucaacaaggccgugaacgcccugaucaacgaccagcuggugaugaagaaccaccugagagacaucaugugcauccccuacugcaacuacagcagauacugguaccugaaccacaccaccaccggcagaaccagccugcccaagugcuggcuggugagcaacggcagcuaccugaacgagacccacuucagcgacgacaucgagcagcaggccgacaacaugaucaccgagaugcugcagaaggaguacauggagagacagggcaagaccccccugggccugguggaccuguucguguucagcaccagcuucuaccugaucagcaucuuccugcaccuggugaagauccccacccacagacacaucgugggcaagagcugccccaagccccacagacugaaccacaugggcaucugcagcugcggccuguacaagcagcccggcgugcccgugaaguggaagagaugaggacuaguuauaagacugacuagcccgaugggccucccaacgggcccuccuccccuccuugcaccgagauuaaucaaaggcucuuuucagagccaccaaaaaaaaaaaaaaaaaaaaaaaaaaaaaaaaaaaaaaaaaaaaaaaaaaaaaaaaaaaaaaaaagaauu

SEQ ID NO: 16450 - RNA, 1658 nt, Artificial Sequence
  mRNA product Design i-3 (hSL-A64-N5) comprising derived and/or modified sequence from LASV(G733-SLE-2010;Clade IV)__AIT17154__GPCmut1 (opt4)
aggagaaagcuuaccaugggccagaucgugaccuucuuccaggaggugccccacgugaucgaggaggugaugaacaucgugcugaucgcccugagcauccuggccgugcugaagggccuguacaacuucgccaccugcggcaucgugggccuggugagcuuccugcugcugugcggcagaagcugcaccaccagccuguacaagggcguguacgagcugcagacccuggagcugaacauggagacccugaacaugaccaugccccugagcugcaccaagaacaacagccaccacuacaucauggugggcaacgagaccggccuggagcugacccugaccaacaccagcaucaucaaccacaaguucugcaaccugagcgacgcccacaagaagaaccuguacgaccacgcccugaugagcaucaucagcaccuuccaccugagcauccccaacuucaaccaguacgaggccaugagcugcgacuucaacggcggcaagaucagcgugcaguacaaccugagccacagcuacgccggcgacgccgccaaccacugcggcaccaucgccaacggcgugcugcagaccuucaugagaauggccuggggcggcagcuacaucgcccuggacagcggcugcgacagaugggacugcaucaugaccagcuaccaguaccugaucauccagaacaccaccugggaggaccacugccaguucagcagacccagccccaucggcuaccugggccugcugagccagagaaccagagacaucuacaucagcagaagacgccggggcaccuucaccuggacccugagcgacagcgagggcaaggacacccccggcggcuacugccugaccagauggaugcugaucgaggccgagcugaagugcuucggcaacaccgccguggccaagugcaacgagaagcacgacgaggaguucugcgacaugcugagacuguucgacuucaacaagcaggccauccagagacugaaggcccccgcccagaugagcauccagcugaucaacaaggccgugaacgcccugaucaacgaccagcugaucaugaagaaccaccugagagacaucaugugcauccccuacugcaacuacagcaaguacugguaccugaaccacaccaccaccggcaagaccagccugcccaagugcuggcuggugagcaacggcagcuaccugaacgagacccacuucagcgacgacaucgagcagcaggccgacaacaugaucaccgagaugcugcagaaggaguacauggagagacagggcaagaccccccugggccugguggaccuguucguguucagcaccagcuucuaccugaucagcaucuuccugcaccuggugaagauccccacccacagacacguggugggcaagagcugccccaagccccacagacugaaccacaugggcaucugcagcugcggccuguacggccagcccggcgugcccgugaaguggaagagaugaggacuaguuauaagacugacuagcccgaugggccucccaacgggcccuccuccccuccuugcaccgagauuaaucaaaggcucuuuucagagccaccaaaaaaaaaaaaaaaaaaaaaaaaaaaaaaaaaaaaaaaaaaaaaaaaaaaaaaaaaaaaaaaaagaauu

SEQ ID NO: 16451 - RNA, 1658 nt, Artificial Sequence
  mRNA product Design i-3 (hSL-A64-N5) comprising derived and/or modified sequence from MOPV/LASV reassortant(IGS-1;Clade IV)__AFY05576__GPCmut1 (opt4)
aggagaaagcuuaccaugggccagaucgugaccuucuuccaggaggugccccacgugaucgaggaggugaugaacaucgugcugaucgcccugagcgugcuggccgugcugaagggccuguacaacuucgccaccugcggccuggugggccuggugaccuuccugcugcugugcggcagaagcugcaccaccagccuguacaagggcguguacgagcugcagacccuggagcugaacauggagacccugaacaugaccaugccccugagcugcaccaagaacaacagccaccacuacaucauggugggcaacgagaccggccuggagcugacccugaccaacaccagcaucaucaaccacaaguucugcaaccugagcgacgcccacaagaagaaccuguacgaccacgcccugaugagcaucaucagcaccuuccaccugagcauccccaacuucaaccaguacgaggccaugagcugcgacuucaacggcggcaagaucagcgugcaguacaaccugagccacagcuacgccggcgacgccgccaaccacugcggcaccguggccaacggcgugcugcagaccuucaugagaauggccuggggcggcagcuacaucgcccuggacagcggcugcggcaacugggacugcaucaugaccagcuaccaguaccugaucauccagaacaccaccugggaggaccacugccaguucagcagacccagccccaucggcuaccugggccugcugagccagagaaccagagacaucuacaucagcagaagacgccggggcaccuucaccuggacccugagcgacagcgagggcgaggacacccccggcggcuacugccugaccagauggaugcugaucgaggccgagcugaagugcuucggcaacaccgccguggccaagugcaacgagaagcacgacgaggaguucugcgacaugcugagacuguucgacuucaacaagcaggccauccagagacugaaggcccccgcccagaugagcauccagcugaucaacaaggccgugaacgcccugaucaacgaccagcugaucaugaagaaccaccugagagacaucaugugcauccccuacugcaacuacagcaaguacugguaccugaaccacaccaccaccggcagaaccagccugcccaagugcuggcuggugagcaacggcagcuaccugaacgagacccacuucagcgacgacaucgagcagcaggccgacaacaugaucaccgagaugcugcagaaggaguacauggagagacagggcaagaccccccugggccugguggaccuguucguguucagcaccagcuucuaccugaucagcaucuuccugcaccuggugaagauccccacccacagacacaucgugggcaagagcugccccaagccccacagacugaaccacaugggcaucugcagcugcggccuguacaagcagcccggcgugcccgugaaguggaagagaugaggacuaguuauaagacugacuagcccgaugggccucccaacgggcccuccuccccuccuugcaccgagauuaaucaaaggcucuuuucagagccaccaaaaaaaaaaaaaaaaaaaaaaaaaaaaaaaaaaaaaaaaaaaaaaaaaaaaaaaaaaaaaaaaagaauu

SEQ ID NO: 16452 - RNA, 1658 nt, Artificial Sequence
  mRNA product Design i-3 (hSL-A64-N5) comprising derived and/or modified sequence from LASV(LM765-SLE-2012;Clade IV)__AIT17814__GPCmut1 (opt4)
aggagaaagcuuaccaugggccagaucgugaccuucuuccaggaggugccccacgugaucgaggaggugaugaacaucgugcugaucgcccugagcauccuggccgugcugaagggccuguacaacuucgccaccugcggccuggugggccuggugaccuuccugcugcugugcggcagaagcugcaccaccagccuguacaagggcguguacgagcugcagacccuggagcugaacauggagacccugaacaugaccaugccccugagcugcaccaagaacaacagccaccacuacaucauggugggcaacgagaccggccuggagcugacccugaccaacaccagcaucaucgaccacaaguucugcaaccugagcgacgcccacagaaagaaccuguacgaccacgcccugaugagcaucaucagcaccuuccaccugagcauccccaacuucaaccaguacgaggccaugagcugcgacuucaacggcggcaagaucagcgugcaguacaaccugagccacagcuacgccaaggacgccgccgaccacugcggcaccguggccaacggcgugcugcagaccuucaugagaauggccuggggcggcagcuacaucgcccuggacagcggcugcggcagaugggacugcaucaugaccagcuaccaguaccugaucauccagaacaccaccugggaggaccacugccaguucagcagacccagccccaucggcuaccugggccugcugagccagagaaccagagacaucuacaucagcagaagacgccggggcaccuucaccuggacccugagcgacagcgagggcaaggacacccccggcggcuacugccugaccagauggaugcugaucgaggccgagcugaagugcuucggcaacaccgccguggccaagugcaacgagaagcacgacgaggaguucugcgacaugcugagacuguucgacuucaacaagcaggccauccagagacugaaggcccccgcccagaugagcauccagcugaucaacaaggccgugaacgcccugaucaacgaccagcugaucaugaagaaccaccugagagacaucaugugcauccccuacugcaacuacagcaaguacugguaccugaaccacaccaccaccggcaagaccagccugcccaagugcuggcuggugagcaacggcagcuaccugaacgagacccacuucagcgacgacaucgagcagcaggccgacaacaugaucaccgagaugcugcagaaggaguacauggagagacagggcaagaccccccugggccugguggaccuguucguguucagcaccagcuucuaccugaucagcaucuuccugcaccuggugaagauccccacccacagacacaucgugggcaagcccugccccaagccccacagacugaaccacaugggcaucugcagcugcggccuguacaagcagcccggcgugcccgugaaguggaagagaugaggacuaguuauaagacugacuagcccgaugggccucccaacgggcccuccuccccuccuugcaccgagauuaaucaaaggcucuuuucagagccaccaaaaaaaaaaaaaaaaaaaaaaaaaaaaaaaaaaaaaaaaaaaaaaaaaaaaaaaaaaaaaaaaagaauu

SEQ ID NO: 16453 - RNA, 1658 nt, Artificial Sequence
  mRNA product Design i-3 (hSL-A64-N5) comprising derived and/or modified sequence from LASV(LM776-SLE-2012;Clade IV)__AIT17824__GPCmut1 (opt4)
aggagaaagcuuaccaugggccagaucgugaccuucuuccaggaggugccccacgugaucgaggaggugaugaacaucgugcugaucgcccugagcauccuggccgugcugaagggccuguacaacuucgccaccugcggccuggugggccuggugaccuuccugcugcugugcggcagaagcugcaccaccagcguguacaagggcguguacgagcugcagacccuggagcugaacauggagacccugaacaugaccaugccccugagcugcaccaagaacaacagccaccacuacaucauggugggcaacgagaccggccuggagcugacccugaccaacaccagcaucaucaaccacaaguucugcaaccugagcgacgcccacaagaagaaccuguacgaccacgcccugaugagcaucaucagcaccuuccaccugagcauccccaacuucaaccaguacgaggccaugagcugcgacuucaacggcggcaagaucagcgugcaguacaaccugagccacagcuacgccggcgacgccgccaaccacugcggcaccguggccaacggcgugcugcagaccuucaugagaauggccuggggcggcagcuacaucgcccuggacagcggcugcggcaagugggacugcaucaugaccagcuaccaguaccugaucauccagaacaccaccugggaggaccacugccaguucagcagacccagccccaucggcuaccugggccugcugagccagagaaccagagacaucuacaucagcagaagacgccggggcaccuucaccuggacccugagcgacagcgagggcaaggacacccccggcggcuacugccugaccagauggaugcugaucgaggccgagcugaagugcuucggcaacaccgccguggccaagugcaacgagaagcacgacgaggaguucugcgacaugcugagacuguucgacuucaacaagcaggccauccagagacugaaggcccccgcccagaugagcauccagcugaucaacaaggccgugaacgcccugaucaacgaccagcugaucaugaagaaccaccugagagacaucaugugcauccccuacugcaacuacagcaaguacugguaccugaaccacaccaccaccggcaagaccagccugcccaagugcuggcuggugagcaacggcagcuaccugaacgagacccacuucagcgacgacaucgagcagcaggccgacaacaugaucaccgagaugcugcagaaggaguacauggagagacagggcaagaccccccugggccugguggaccuguucguguucagcaccagcuucuaccugaucagcaucuuccugcaccuggugaagauccccacccacagacacaucgugggcaagagcugccccaagccccacagacugaaccacaugggcaucugcagcugcggccuguacaagcagcccggcgugcccgugagauggaagagaugaggacuaguuauaagacugacuagcccgaugggccucccaacgggcccuccuccccuccuugcaccgagauuaaucaaaggcucuuuucagagccaccaaaaaaaaaaaaaaaaaaaaaaaaaaaaaaaaaaaaaaaaaaaaaaaaaaaaaaaaaaaaaaaaagaauu

SEQ ID NO: 16454 - RNA, 1658 nt, Artificial Sequence
  mRNA product Design i-3 (hSL-A64-N5) comprising derived and/or modified sequence from LASV(Mad39;Clade IV)__ANH09722__GPCmut1 (opt4)
aggagaaagcuuaccaugggccagaucgugaccuucuuccaggaggugccccacgugaucgaggaggugaugaacaucgugcugaucgcccugagcauccuggccgugcugaagggccuguacaacguggccaccugcggccugaucggccuggugaccuuccugcugcugugcggcagaagcugcaccaccacccuguacaagggcguguacgagcugcaggcccuggagcugaacauggagacccugaacaugaccaugccccugagcugcaccaagaacaacagccaccacuacaucagagugggcaacgagaccggccuggagcugacccugaccaacaccagccugaucaaccacaaguucugcaaccugagcgacgcccacaagaagaaccuguacgaccacgcccugaugagcaucaucagcaccuuccaccugagcauccccaacuucaaccaguacgaggccaugagcugcgacuucaacgacggcaagaucagcgugcaguacaaccugagccacaccuacgccggcgacaccgccaaccacugcggcaccguggccaacggcgugcugcagaccuucaugagaauggccuggggcggcagcuacaucgcccuggacagcggcugcggcggcugggacugcaucaugaccagcuaccaguaccugaucauccagaacaccaccugggaggaccacugccaguucagcagacccagccccaucggcuaccugggccugcugagccagagaaccagagacaucuacaucagcagaagacgccggggcaccuucaccuggacccugagcgacagcgagggcaaggacacccccggcggcuacugccugaccagauggaugcugaucgaggccgagcugaagugcuucggcaacaccgccguggccaagugcaacgagaagcacgacgaggaguucugcgacaugcugagacuguucgacuucaacaagcaggccauccagagacugaaggcccccgcccagaugagcauccagcugaucaacaaggccgugaacgcccugaucaacgaccagcugaucaugaagaaccaccugagagacaucaugugcauccccuacugcaacuacagcaaguacugguaccugaaccacaccgugaccggcaagaccagccugcccaagugcuggcuggugagcaacggcagcuaccugaacgagacccacuucagcgacgacaucgagcagcaggccgacaacaugaucaccgagaugcugcagaaggaguacauggagagacagggcaagaccccccugggccugguggaccuguucguguucagcaccagcuucuaccugaucagcaucuuccugcaccuggugaagauccccacccacagacacguggugggcaagcccugccccaagccccacagacugaaccacaugggcaucugcagcugcggcuucuacaagcagcccggcgugcccgugagauggaagagaugaggacuaguuauaagacugacuagcccgaugggccucccaacgggcccuccuccccuccuugcaccgagauuaaucaaaggcucuuuucagagccaccaaaaaaaaaaaaaaaaaaaaaaaaaaaaaaaaaaaaaaaaaaaaaaaaaaaaaaaaaaaaaaaaagaauu

SEQ ID NO: 16455 - RNA, 1658 nt, Artificial Sequence
  mRNA product Design i-3 (hSL-A64-N5) comprising derived and/or modified sequence from LASV(Z0947-SLE-2011;Clade IV)__AIT17840__GPCmut1 (opt4)
aggagaaagcuuaccaugggccagaucgugaccuucuuccaggaggugccccacgugaucgaggaggugaugaacaucgugcugaucgcccugagcauccuggccgugcugaagggccuguacaacuucgccaccugcggccuggugggccuggugaccuuccugcugcugugcggcagaagcugcaccaucagccuguacaagggcguguacgagcugcagacccuggagcugaacauggagacccugaacaugaccaugccccugagcugcaccaagaacaacagccaccacuacaucauggugggcaacgagaccggccuggagcugacccugaccaacaccagcaucaucaaccacaaguucugcaaccugagcgacgcccacaagaagaaccuguacgaccacgcccugaugagcaucaucagcaccuuccaccugagcauccccaacuucaaccaguacgaggccaugagcugcgacuucaacggcggcaagaucagcgugcaguacaaccugagccacagcuacgccggcgacgccgccaaccacugcggcaccguggccaacggcgugcugcagaccuucaugagaauggccuggggcggcagcuacaucgcccuggacagcggcugcgacagaugggacugcaucaugaccagcuaccaguaccugaucauccagaacaccaccugggaggaccacugccaguucagcagacccagccccaucggcuaccugggccugcugagccagagaaccagagacaucuacaucagcagaagacgccggggcaccuucaccuggacccugagcgacagcgagggcaaggacacccccggcggcuacugccugaccagauggaugcugaucgaggccgagcugaagugcuucggcaacaccgccguggccaagugcaacgagaagcacgacgaggaguucugcgacaugcugagacuguucgacuucaacaagcaggccauccagagacugaaggcccccgcccagaugagcauccagcugaucaacaaggccgugaacgcccugaucaacgaccagcugaucaugaagaaccaccugagagacaucaugugcauccccuacugcaacuacagcaaguacugguaccugaaccacaccaccaccggcaagaccagccugcccaagugcuggcuggugagcaacggcagcuaccugaacgagacccacuucagcgacgacaucgagcagcaggccgacaacaugaucaccgagaugcugcagaaggaguacauggagagacagggcaagaccccccugggccugguggaccuguucguguucagcaccagcuucuaccugaucagcaucuuccugcaccuggugaagauccccacccacagacacaucgugggcaagcccugccccaagccccacagacugaaccacaugggcaucugcagcugcggccuguacaagcagcccggcgugcccgugaaguggaagagaugaggacuaguuauaagacugacuagcccgaugggccucccaacgggcccuccuccccuccuugcaccgagauuaaucaaaggcucuuuucagagccaccaaaaaaaaaaaaaaaaaaaaaaaaaaaaaaaaaaaaaaaaaaaaaaaaaaaaaaaaaaaaaaaaagaauu

SEQ ID NO: 16456 - RNA, 1658 nt, Artificial Sequence
  mRNA product Design i-3 (hSL-A64-N5) comprising derived and/or modified sequence from LASV(Josiah;Clade IV)__NP_694870__GPCmut1 (opt5)
aggagaaagcuuaccaugggccagaucgugaccuucuuucaagaggucccccacguuauugaagaggugaugaacaucgugcugauugcccucagcguccuggcugugcuuaaggggcuguacaauuucgccacaugcggacucguuggccuggugacguuucuucugcucugugggagauccugcaccacaucucuguauaaaggagucuacgaacugcagacccucgagcugaacauggaaacacuuaauaugaccaugccucugagcuguacaaagaacaauucccaucacuauaucauggugggcaacgagaccgggcucgagcugacgcuuaccaauacaucuauuaucaaccauaaauucugcaaucugagcgacgcgcacaagaaaaaccucuacgaucaugcucugauguccaucauuucuaccuuucaccugagcaucccgaauuucaaccaguaugaagccauguccugugacuuuaauggaggcaagauuagcguucaguacaaccucucucacuccuaugccggcgaugcugccaaucauugcgggacaguggcuaacggaguccugcaaaccuucaugcggauggccuggggcgggagcuacaucgcgcuugacucuggaugcggcaacugggauuguauuaugacguccuaccaguaucugaucauucagaauacaaccugggaggaccacugccaguuuagcagacccucuccuaucggguaccucggacugcuuucccaacggacacgcgauaucuauauuagcagacggcgccggggcaccuucaccuggacacuguccgacucugaaggcaaggauacgcccgggggauacugucugacccgcuggaugcucaucgaggccgagcugaaaugcuuuggcaacacagcuguggccaaguguaaugaaaaacaugacgaggaguucugcgauaugcuuagacuguuugacuucaacaagcaggcuauucagcggcucaaagcccccgcgcagaugagcauccaacugauuaauaaggccgugaacgcucuuaucaaugaucagcugaucaugaagaaccaccuccgcgacauuaugugcaucccuuauugcaauuacuccaaauauugguaccugaaccacaccacaaccggaagaacgagccugcccaaguguuggcucgucucuaauggcuccuaccugaacgaaacacauuucagcgacgauauugagcagcaagccgacaauaugaucaccgagaugcuucagaaagaauauauggagcggcaggggaagaccccucugggacucguugaucuguuuguguucucuaccagcuuuuaccugauuuccaucuuccuucaccucgugaaaaucccgacacaucgccacauugucggcaagucuugccccaaaccucauagacugaaccacaugggcaucuguagcugcgggcuguauaagcagcccggagugccuguuaaguggaaacggugaggacuaguuauaagacugacuagcccgaugggccucccaacgggcccuccuccccuccuugcaccgagauuaaucaaaggcucuuuucagagccaccaaaaaaaaaaaaaaaaaaaaaaaaaaaaaaaaaaaaaaaaaaaaaaaaaaaaaaaaaaaaaaaaagaauu

SEQ ID NO: 16457 - RNA, 1655 nt, Artificial Sequence
  mRNA product Design i-3 (hSL-A64-N5) comprising derived and/or modified sequence from LASV(LP;Clade I)__AAF86701__GPCmut1 (opt5)
aggagaaagcuuaccaugggccagaucauuaccuucuuucaagaggugccccacgucaucgaagagguuaugaacauugugcugaucgcccucagccugcuugcuauucugaaggggcucuacaauaucgccacaugcggaaucauuggccugguggcguuccuuuuucugugugggaaauccugcucucucacgcugaagggaggcuaugaacugcagacccucgagcugaacauggaaacacuuaauaugaccaugccucugagcuguaccaaaaacuccucucaucacuacaucagagucgggaaugagacaggacucgagcugacacuuaccaacacgagcauuaucaaucauaaguucugcaaccuguccgacgcucacaaaaagaaucucuaugaucaugcccugaugucuauuaucagcaccuuucaccuguccauuccgaacuucaaucaguacgaagccaugagcugugacuuuaacggcggcaagaucucugugcaguauaaucucucccacagcuacgcuggggaugccgcugagcauugcggaacaguugccaacggcgugcugcaaaccuucaugcggauggcguggggagggcgcuauaucgcccuugacucuggcugcgggaauugggauuguauuaugacauccuaccaguaccugaucauucagaacaccacgugggaagaccacugccaguuuagcagacccucuccuaucggauaucucggccugcuuucccaacggacacgcgauauuuacaucagcagacggcgccggggcaccuucacauggacccuguccgacucugaggggaacgagacccccggaggcuauugucugacacgcuggaugcucaucgaagcugagcugaagugcuuugggaauacggccgucgcuaaauguaacgaaaagcaugaugaggaguucugcgacaugcuuagacuguuugauuucaauaaacaggccauucggcgccucaaggcgcccgcccagaugagcauccagcugauuaacaaggcugugaaugcccuuaucaacgaccaacugauuaugaaaaaucaccucagagauaucaugugcaucccuuacugcaacuauuccaaguacugguaucugaaucacaccagcucuggccggacaucccugcccaaauguuggcucauuagcaacgggucuuaccugaaugagacccaguucagcgacgacaucgaacagcaagcugauaacaugauuacagagaugcuucagaaggaauacaucgagcgccagggaaaaaccccucugggccucguugacauuuuuaucuucuccacgucuuuuuaucugauuagcaucuuccugcaucuuaucaagauuccgacacacagacauaucgugggcaaacccugcccuaagccccaccggcucaaucauaugggggucuguuccugcggacuguacaagcacccuggcgugcccaccaaauggaagcgcugaggacuaguuauaagacugacuagcccgaugggccucccaacgggcccuccuccccuccuugcaccgagauuaaucaaaggcucuuuucagagccaccaaaaaaaaaaaaaaaaaaaaaaaaaaaaaaaaaaaaaaaaaaaaaaaaaaaaaaaaaaaaaaaaagaauu

SEQ ID NO: 16458 - RNA, 1655 nt, Artificial Sequence
  mRNA product Design i-3 (hSL-A64-N5) comprising derived and/or modified sequence from LASV(803213;Clade II)__AAF86703__GPCmut1 (opt5)
aggagaaagcuuaccaugggccagaucauuaccuucuuucaagaggugccccacgucaucgaagagguuaugaacauugugcugaucgcccucagccugcuugcuauucugaaggggaucuacaauguggccacaugcggacucuucggccugaucuccuuucuucugcucugugggagaucuugcagcgucacguauaaaggaguguacgaacugcagacccuggagcucaacauggcgaaucugaacaugacaaugccucuuuccuguaccaagaauaacucucaucacuauauuaugguuggcaaugaaacagggcuggagcucacccugacaaacaccagcaucauuaaucauaaauucugcaaccuuuccgacgcucacaagaaaaaucuguacgaucaugcccucaugucuaucauuagcacguuucaccuguccaucccgaacuucaaucaguaugaggccaugagcugugacuuuaacggaggcaagauuucugugcaguacaaucugucccacagcuucgcugucgaugccgcuaaccauugcggcaccaucgccaacggggugcuccaaacauuuaugcggauggcguggggaggcucuuauaucgcccuggacuccgggugcggaaauugggauuguauuaugaccagcuaccaguaccuuaucauucagaacacaaccugggaagaccacugccaguucucucgccccuccccuaucggcuaucuggggcuccugagccaaagaacgcgggauauuuacaucucccgcagacgccggggaacauuuaccuggacacucucugacagcgagggcaaugaagcucccggcggguauugucugacccgguggaugcugaucgaggccgagcucaaaugcuucggaaacaccgcuguugccaaguguaaugaaaaacaugaugaggaauuuugcgacaugcugcgccuuuucgauuucaacaagcaggcgauuaaaagacugaagacacccgcccagauguccauccagcucauuaauaaggcugugaacgcccugaucaaugaccaacuuauuaugaaaaaccaucugcgggauaucaugugcaucccuuacugcaauuauagccgcuacugguaucucaaccacacggucaccgggaagacaucucugcccagauguuggcugguguccaauggaagcuaccucaacgaaacccacuuuucugacgacauugagcagcaggcugauaauaugaucacagagaugcugcaaaaagaauacauggaccggcagggcaagaccccucuugggcugguggaucucuucgucuuuagcacguccuucuaucugauuucuaucuuucugcaccuuguuaaaauuccgacacaucgccacaucgugggaaagcccugcccuaaaccccauagacucaaccacaugggcauuuguagcugcggccuguacaagcacccuggggugcccgucaaguggaaacggugaggacuaguuauaagacugacuagcccgaugggccucccaacgggcccuccuccccuccuugcaccgagauuaaucaaaggcucuuuucagagccaccaaaaaaaaaaaaaaaaaaaaaaaaaaaaaaaaaaaaaaaaaaaaaaaaaaaaaaaaaaaaaaaaagaauu

SEQ ID NO: 16459 - RNA, 1655 nt, Artificial Sequence
  mRNA product Design i-3 (hSL-A64-N5) comprising derived and/or modified sequence from LASV(GA391;Clade III)__CAA36645__GPCmut1 (opt5)
aggagaaagcuuaccaugggccagaucgugaccuucuuucaagaggucccccacguuauugaagaggugaugaacaucgugcugauugcccucagcauccuggcuauucuuaaggggcuguacaaugucgccacaugcggacucaucggccuggugacguuccuucugcucuccgggagaucuuguagccugaucuauaaaggaaccuacgaacugcagacacucgagcugaacauggaaacccuuaauaugacaaugccucuguccugcaccaagaacaauucucaucacuauauucggguuggcaacgagacagggcucgagcugacccuuacgaauaccagcauccugaaccauaaauuuuguaaucucuccgacgcgcacaagcgcaaccuguacgaucauucucugaugagcauuaucuccacauuccaccucagcauuccgaauuuuaaccaguaugaagcuaugucuugcgacuucaauggaggcaaaaucaccgugcaguacaaccugucccacagcuuugccgucgaugccgcuggccauugugggacacuugccaauggagugcugcaaaccuucaugagaauggcuuggggcgggucuuauauugcccucgacuccggaugcggcaacugggauugcaucaugacgagcuaccaguaccugaucauucagaacacaaccugggacgaucacugucaguuuucucgccccuccccuaucggguaucuuggacugcucagccaaagaacacgggacauuuacaucucccgcagacgccggggcaccuucaccuggacacucucugauagcgagggcaaugaaacgcccgggggauauugccugacccgguggaugcuuauugaggcggagcugaaguguuuuggcaacacagccguugcuaagugcaaugaaaaacaugacgaggaguucugugauaugcuccgccuguuugacuucaacaagcaggccaucagacggcuuaaaacccccgcucagauguccauccagcugauuaauaaggccgugaacgcgcucaucaaugaucaacugauuaugaaaaaccaucugcgcgacaucaugugcauuccuuacugcaauuauagcagauacugguaucucaaccacacaucuaccggaaagacgucccugccccggugcuggcuuaucagcaauggcucuuaccugaacgaaacaaaguucagcgacgauaucgagcagcaggccgacaauaugauuaccgagaugcuccaaaaagaauacaucgaucgccaggggaagaccccucugggacuggucgaccuuuuuguguucuccacaucuuuuuaucucauuagcaucuuccugcaccuggugaaaauuccgacccacagacauaucgucggcaagcccuguccuaaaccccaccggcucaaccauaugggcauuugcuccugugggcuguacaagcagccuggaguucccgugagauggaaacgcugaggacuaguuauaagacugacuagcccgaugggccucccaacgggcccuccuccccuccuugcaccgagauuaaucaaaggcucuuuucagagccaccaaaaaaaaaaaaaaaaaaaaaaaaaaaaaaaaaaaaaaaaaaaaaaaaaaaaaaaaaaaaaaaaagaauu

SEQ ID NO: 16460 - RNA, 1658 nt, Artificial Sequence
  mRNA product Design i-3 (hSL-A64-N5) comprising derived and/or modified sequence from LASV(AV;Clade V)__CCA30314__GPCmut1 (opt5)
aggagaaagcuuaccaugggccagaucgugaccuucuuucaagaggucccccacguuauugaagaggugaugaacaucgugcugauugcccucagcauccuggcuguccuuaaggggcuguacaauauugccacaugcggacucaucggccugaucacguuccuucugcucugugggagauccugcucuagcaaccuguauaaaggaguguacgaacugcagucccucgaccugaauauggagacccuuaacaugacaaugccucugucuuguaccaagaauaacagccaucacuauauucggguuggcaaugauacagggcucgaacugacccuuacaaacaccuccauccugaaucauaaauuuugcaaccucucugacgcgcacaagaaagaucuguacgaccaugcucugaugagcauuaucuccacguuccaccucagcauuccgaauuuuaaccaguaugaggccaugucuugugauuucaauggaggcaagaucuccgugcaguacaaccugagccacucuuaugccauugacgcugccaaucauugcggcaccgucgcuaacgggauccuucaaacauuuaugcgcauggccuggggaggcuccuacaucgcgcuggauagcgggugcggaaacugggacuguauuaugaccucuuaccaguaucucaucauucagaauacaaccugggagaaccacugccaguucucccggcccagcccuaucggcuaccuggggcuucugucccaacgcacgagagauauuuauaucucucggcgccgccggggaacauuuaccuggacacugagcgacuccgaaggcaaugccacccccggcggguacugucucaccagauggaugcugaucgaggcugaacuuaagugcuucggaaacacagccguggcuaaauguaaugagaagcaugaugaggaauuuugcgacaugcugcgccucuucgauuuuaacaaacaggccauuagccggcugaagucucccgcgcagauguccauccagcuuauuaauaaagccguuaacgcucugaucaaugaccaacucauuaugaagaaccaccugagagacaucaugugcaucccuuauugcaauuacagcaaguauugguaccugaaccacacgauuaccgggaaaacaucucuccccaaguguuggcuggugagcaauggauccuaccuuaacgaaacccauuucucugaugacaucgagcagcaggccgauaauaugauuacagaaaugcugcaaaaagaguauauggagcggcagggcaagaccccucucgggcuggucgaccuguucguguuuagcacguccuucuaccuuaucagcauuuuucuccgccuggugaaaaucccgacacacagacauauugucggaaagcccugcccuaaaccccaccggcugaaccauaugggcaucuguucuugcggccucuauaagcagccugggguucccgugcgcuggaagagaugaggacuaguuauaagacugacuagcccgaugggccucccaacgggcccuccuccccuccuugcaccgagauuaaucaaaggcucuuuucagagccaccaaaaaaaaaaaaaaaaaaaaaaaaaaaaaaaaaaaaaaaaaaaaaaaaaaaaaaaaaaaaaaaaagaauu

SEQ ID NO: 16461 - RNA, 1655 nt, Artificial Sequence
  mRNA product Design i-3 (hSL-A64-N5) comprising derived and/or modified sequence from LASV(Togo/2016/7082;Clade VI)__AMR44577__GPCmut1 (opt5)
aggagaaagcuuaccaugggccagaucauuaccuucuuucaagaggugccccacgucaucgaagagguuaugaacauugugcugaucgcccucagccugcuugcuauucugaaggggguguacaaugucgccacaugcggaaucaucggccucgugacguuccuguuucuuugugggagauccugcucucugauuuauaaaggaagcuacgaacuccagacccuggagcugaacauggaaacacucaauaugaccaugccucuguccuguacaaagaacucuagccaucacuauauccggguuggcaaugagaccgggcuugagcugacacucaccaacacguccauuaucaaucauaaauucugcaaccugucugacgcgcacaagcgcaaucuuuacgaucaugcucugaugagcauucucuccaccuuucaccugagcaucccgaacuucaaucaguaugaagccaugucuugugacuuuaacggaggcaaaauuuccgugcaguacaaucugagccacgccuaugcugucgaugccgcugagcauugcggcacaguggccaacgggguucuccaaaccuucaugagaauggcguggggaggcucuuacaucgcccuggacuccgggugcggaaauugggauuguaucaugacaagcuaccaguaucuuauuauccagaacaccacgugggaagaccacugccaguuuucucgccccuccccuauuggcuaccuggggcuccugagccaaagaacacgggauaucuauauuucccgcagacgccggggaaccuucacauggacccucucugacagcgagggcaacgagacccccggcggguacugucugacacgguggaugcugaucgaagcugagcucaagugcuuuggaaauacggccguggcuaaguguaacgaaaaacaugaugaggaguucugcgacaugcugcgccuuuuugauuucaauaagcaggccauccagagacugaaaucccccgcgcagaugagcauucaacucaucaacaaggccgucaaugcucugauuaacgaccagcuuaucaugaaaaaucaucugcgggauaugaugugcauuccuuauugcaacuacucuaaguauugguaccucaaucacaccuccagcgggcgcacaucucugcccaaguguuggcuggugagcaacggauccuaccucaaugagacccacuucucugacgacaucgaacagcaagccgauaacaugaucacagagaugcugcagaaagaauauauugacagacagggcaagaccccucuugggcugguggaucucuuugucuucagcacguccuuuuaccugaucagcauuuuccugcaccuuaucaaaauuccgacacaucggcacaucguuggaaagcccugcccuaaaccccaucgccucaaucacaugggcauuuguucuugcggccuguauaagcagccuggggugcccaccagauggaaacggugaggacuaguuauaagacugacuagcccgaugggccucccaacgggcccuccuccccuccuugcaccgagauuaaucaaaggcucuuuucagagccaccaaaaaaaaaaaaaaaaaaaaaaaaaaaaaaaaaaaaaaaaaaaaaaaaaaaaaaaaaaaaaaaaagaauu

SEQ ID NO: 16462 - RNA, 1655 nt, Artificial Sequence
  mRNA product Design i-3 (hSL-A64-N5) comprising derived and/or modified sequence from LASV(KAK-428;Clade n.d. (VII))__ANH09740__GPCmut1 (opt5)
aggagaaagcuuaccaugggccagaucgugaccuucuuucaagaggucccccacguuauugaagaggugaugaacaucgugcugauugcccucagccugcuugcuauccugaaggggcucuacaauuucgccacaugcggagucauuggccugaucacguuucuucugcucugugggagauccugcucugcgaccuauaaaggacaguacgaacugcagacacuggagcucaacauggaaagccugaauaugaccaugccucuuuccuguacaaagaacaauucucaucacuauauccgggcuggcaacaauaccgggcuggagcucacacugaccaacacgagcauuaucucccauaaauucugcaaucuuucugacgcccacaagaaaaaccuguacgaucauacccucaugagcauuaucacaaccuuucaccuguccauuccgaauuucaaccaguaugaggccaugagcugugacuuuaauggaggcaagaucucuauucaauacaaccugucccacagcuaugcuggcgaugccgcucagcauugcgggacaguggccaauggaguucuccagaccuucaugcgcauggcguggggcgggucuuaccuggcccuugacuccggaugccggggcugggauuguaucaucagcucuuaccaguaucugauuauccaaaacacgacaugggacgaucacugccaguuuucccgccccagcccuauuggguaccucggauucgugucccagaagaccagagacaucuauauuucucggcgccgccggggcacauuuaccuggacccugagcgauuccgaaggccaugacaugcccgggggauacugucucacaagauggaugcugaucgaggcugaucugaaaugcuucggcaacacggccgucgcuaaguguaaugaaaaacacgacgaggaguuuugcgauauguggcgccucuucgacuucaacaagcaggccauccaacggcugaaagcgcccgcccagaugaauauucagcuuaucaacaaggcugugaaugcccugauuaacgaccaacucaugaugaagaaucaccugagagauaucaugugcauuccuuauugcaacuacagcaaauuuugguaucuuaauaacaccacaaccggacggacaucucugccccgcuguuggcucaucuccaauggcagcuaccugaacgagacccauuucucugacgauaucgaacagcaggcugacaauaugauuacggagaugcugcagaaggaauacauggauagacaagggaaaacaccucucggacugguugaccuuuuuguguucagcaccuccuuuuaucugaucaccauuuuccuccaccuggucaagaucccgacacaucggcacauugugggcaaacccugcccuaagccccaucgccugaaccacaugggcaucuguucuugcgggcuuuacaaacagccuggagugcccgucagauggaagcggugaggacuaguuauaagacugacuagcccgaugggccucccaacgggcccuccuccccuccuugcaccgagauuaaucaaaggcucuuuucagagccaccaaaaaaaaaaaaaaaaaaaaaaaaaaaaaaaaaaaaaaaaaaaaaaaaaaaaaaaaaaaaaaaaagaauu

SEQ ID NO: 16463 - RNA, 1655 nt, Artificial Sequence; identical to SEQ ID NO: 16457
  mRNA product Design i-3 (hSL-A64-N5) comprising derived and/or modified sequence from LASV(Pinneo-NIG-1969;Clade I)__AIT17836__GPCmut1 (opt5)

SEQ ID NO: 16464 - RNA, 1655 nt, Artificial Sequence
  mRNA product Design i-3 (hSL-A64-N5) comprising derived and/or modified sequence from LASV(ISTH0009-NIG-2011;Clade II)__AIT17404__GPCmut1 (opt5)
aggagaaagcuuaccaugggccagaucauuaccuucuuucaagaggugccccacgucaucgaagagguuaugaacauugugcugaucgcccucagccugcuugcuauucugaaggggaucuacaauguggccacaugcggacucuucggccuggucuccuuucuucugcucugugggagaucuugcagcacgaccuauaaaggaguguacgaacugcagacacuggagcucgacauggcgucccugaacaugaccaugccucuuucuuguacaaagaauaacagccaucacuauaucaugguuggcaaugaaaccgggcuggagcucacacugaccaacacguccauuaucaaucauaaauucugcaaccuuucugaugcucacaagaaaaaucuguacgaccaugcccucaugagcauuaucuccaccuuucaccugagcauuccgaacuucaaucaguaugaggccaugucuugugauuuuaacggaggcaagaucuccgugcaguacaaucugagccacgcuuaugccgucgacgcugccaaccauugcggcacaauugcgaauggggugcuccaaaccuucaugcggauggccuggggaggcucuuacaucgcucuggauuccgggugcggaagcugggacuguaucaugacaucuuaccaguaucuuauuauccagaacaccacgugggaagaucacugccaguuuucccgccccagcccuauuggcuaccuggggcuccugucccaaagaacacgggacaucuauauuucucgcagacgccggggaaccuucacauggacccucagcgauuccgagggcaacgaaacccccggcggguacugucugacacgguggaugcugaucgaggccgagcucaaaugcuuuggaaauacggcuguugccaaguguaacgaaaaacaugacgaggaguucugcgauaugcugcgccuuuuugacuucaauaagcaggcgaucagacggcugaaaacccccgcccagaugagcauucagcucaucaacaaggcugugaaugcccugauuaacgaucaacuuaucaugaagaaucaucugcgcgacauuaugugcaucccuuauugcaacuacucuaaauauugguaccucaaucacacagucaccgggaagacaucccugcccagauguuggcuggugagcaacggaucuuaccucaaugaaacccacuucagcgacgauaucgagcagcaggcugacaacaugauuacggagcugcuucaaaaagaauauauggaucggcagggcaagacaccucuggggcucguggaccuguuugucuucuccaccucuuuuuaccugaucagcauuuuccuucaccucaucaaaauuccgacccaucgccacaucacaggaaagcccugcccuaaaccccauagacugaaucacaugggcauuuguuccugcggccuguauaagcacccugggguucccgugaaguggaaacggugaggacuaguuauaagacugacuagcccgaugggccucccaacgggcccuccuccccuccuugcaccgagauuaaucaaaggcucuuuucagagccaccaaaaaaaaaaaaaaaaaaaaaaaaaaaaaaaaaaaaaaaaaaaaaaaaaaaaaaaaaaaaaaaaagaauu

SEQ ID NO: 16465 - RNA, 1655 nt, Artificial Sequence
  mRNA product Design i-3 (hSL-A64-N5) comprising derived and/or modified sequence from LASV(ISTH2010-NIG-2012;Clade II)__AIT17482__GPCmut1 (opt5)
aggagaaagcuuaccaugggccagaucauuaccuucuuucaagaggugccccacgucaucgaagagguuaugaacauugugcugaucgcccucagccugcuugcuauucugaaggggaucuacaauguggccacaugcggacucuucggccuggucuccuuucuucugcucugugggagaucuugcagcacgaccuauaaaggaguguacgaacugcagacacuggagcucgacauggcgucccugaacaugaccaugccucuuucuuguacaaagaauaacagccaucacuauaucaugguuggcaaugaaaccgggcuggagcucacacugaccaacacguccauuaucaaucauaaauucugcaaccuuucugaugcucacaagaaaaaucuguacgaccaugcccucaugagcauuaucuccaccuuucaccugagcauuccgaacuucaaucaguaugaggccaugucuugugauuuuaacggaggcaagaucuccgugcaguacaaucugagccacgcuuaugccgucgacgcugccaaccauugcggcacaauugcgaauggggugcuccaaaccuucaugcggauggccuggggaggcucuuacaucgcucuggauuccgggugcggaagcugggacuguaucaugacaucuuaccaguaucuuauuauccagaacauuaccugggaagaucacugccaguuuucccgccccagcccuaucggcuaccuggggcuccugucccaaagaacgcgggacauuuauaucucucgcagacgccggggaacauucaccuggacacucagcgauuccgagggcaacgaaacccccggcggguacugucugacccgguggaugcugaucgaggccgagcucaaaugcuuuggaaauacagcuguugccaaguguaacgaaaaacaugacgaggaguucugcgauaugcugcgccuuuuugacuucaauaagcaggcgauuagacggcugaaaacgcccgcccagaugagcauccagcucauuaacaaggcugugaaugcccugaucaacgaucaacuuauuaugaagaaucaucugcgcgacaucaugugcaucccuuauugcaacuacucuaaauauugguaccucaaucacaccgucacagggaagaccucccugcccagauguuggcuggugagcaacggaucuuaccucaaugaaacacacuucagcgacgauauugagcagcaggcugacaacaugaucaccgagcugcuucaaaaagaauauauugaucggcagggcaagacgccucuggggcucguggaccuguuugucuucuccacaucuuuuuaccugaucagcauuuuccuucaccucguuaaaaucccgacccaucgccacguggugggaaagcccugcccuaaaccccauagacugaaucacaugggcauuuguuccugcggccuguauaagcacccugggguccccgugaaguggaaacggugaggacuaguuauaagacugacuagcccgaugggccucccaacgggcccuccuccccuccuugcaccgagauuaaucaaaggcucuuuucagagccaccaaaaaaaaaaaaaaaaaaaaaaaaaaaaaaaaaaaaaaaaaaaaaaaaaaaaaaaaaaaaaaaaagaauu

SEQ ID NO: 16466 - RNA, 1655 nt, Artificial Sequence
  mRNA product Design i-3 (hSL-A64-N5) comprising derived and/or modified sequence from LASV(Lassa virus/H.sapiens-wt/NGA/2015/ISTH_0543;Clade II)__AVO03639__GPCmut1 (opt5)
aggagaaagcuuaccaugggccagaucauuaccuucuuucaagaggugccccacgucaucgaagagguuaugaacauugugcugaucgcccucagccugcuugcuauucugaaggggaucuacaauguggccacaugcggacucuucggccuggucuccuuucuucugcucugugggagaucuugcagcacgaccuauaaaggaguguacgaacugcagacacuggagcucgacauggcgaaccugaauaugaccaugccucuuuccuguacaaagaacaauucucaucacuauaucaugguuggcaacgaaaccgggcuggagcucacacugaccaauacgagcauuaucaaccauaaauucugcaaucuuuccgaugcucacaagaaaaaccuguacgaccaugcccucaugucuauuaucagcaccuuucaccuguccauuccgaauuucaaccaguaugaggccaugagcugugauuuuaauggaggcaagaucucugugcaguacaaccugucccacacauaugcugucgacgccgcuaaucauugcggcaccauugccaacggggugcuccaaacauucaugcggauggcguggggaggcagcuacaucgcccuggauucugggugcggauccugggacuguaucaugaccagcuaccaguaucuuguuauucagaacacgacaugggaagaucacugccaguuuucucgccccuccccuaucggcuaccuggggcuccugagccaaagaacccgggacauuuauaucucccgcagacgccggggaacauucaccuggacccucucugauagcgagggcaaugaaacacccggcggguacugucugacgcgguggaugcugauugaggcugagcucaaaugcuuuggaaacaccgccguggcuaaguguaaugaaaaacaugacgaggaguucugcgauaugcugcgccuuuuugacuucaacaagcaggccaucagacggcugaaaacacccgcgcagauguccauccagcucauuaauaaggccgucaacgcucugaucaaugaucaacuuauuaugaagaaccaucugcgcgacaucaugugcauuccuuauugcaauuacagcaaauauugguaccucaaccacaccgugacagggaagaccucucugcccagauguuggcugguguccaauggaagcuaccucaacgaaacgcacuucucugacgauaucgagcagcaggccgacaauaugaucacagagcugcuucaaaaagaauauauugaucggcagggcaagaccccucuggggcucgucgaccuguuuguuuucagcaccuccuuuuaccugaucucuauuuuccuucaccucgugaaaaucccgacacaucgccacauuaccggaaagcccugcccuaaaccccauagacugaaccacaugggcaucuguagcugcggccuguauaagcacccuggggugcccgucaaguggaaacggugaggacuaguuauaagacugacuagcccgaugggccucccaacgggcccuccuccccuccuugcaccgagauuaaucaaaggcucuuuucagagccaccaaaaaaaaaaaaaaaaaaaaaaaaaaaaaaaaaaaaaaaaaaaaaaaaaaaaaaaaaaaaaaaaagaauu

SEQ ID NO: 16467 - RNA, 1655 nt, Artificial Sequence
  mRNA product Design i-3 (hSL-A64-N5) comprising derived and/or modified sequence from LASV(Lassa virus/H.sapiens-wt/NGA/2016/ISTH_0009;Clade II)__AVO03571__GPCmut1 (opt5)
aggagaaagcuuaccaugggccagaucauuaccuucuuucaagaggugccccacgucaucgaagagguuaugaacauugugcugaucgcccucagccugcuugcuauucugaaggggaucuacaauguggccacaugcggacuccugggccuugucuccuuccugcuccugugugggagaucuugcagcacgaccuauaaaggaguguacgaacugcagacacucgagcuggacauggcgucccuuaacaugaccaugccucugucuuguacaaagaauaacagccaucacuauaucaugguuggcaaugaaaccgggcucgagcugacacuuaccaacacguccauuaucaaucauaaauuuugcaaccugucugaugcucacaagaaaaaucucuacgaccaugcccugaugagcauuaucuccaccuuccaccugagcauuccgaacuuuaaucaguaugaggccaugucuugugauuucaacggaggccggaucuccgugcaguacaaucucagccacucuuaugcugucgacgccgcuaaccauugcggcacaauugccaauggggugcugcaaaccuuuaugcgcauggcguggggaggcuccuacaucgcccuugauagcgggugcggaucuugggacuguaucaugacauccuaccaguaucugauuauccagaacaccacgugggaagaucacugccaguucagcagacccuccccuauuggcuaccucgggcugcuuucucaacggacacgcgacaucuauauuagcagacggcgccggggaaccuuuacauggacccuguccgauagcgagggcaacgaaacccccggcggguacugucugacacgcuggaugcucaucgaggcugagcugaagugcuucggaaauacggccguugcuaaauguaacgaaaagcaugacgaggaauuuugcgauaugcuuagacuguucgacuuuaauaaacaggccauccggcgccucaagacccccgcgcagaugucuauucagcugaucaacaaagccgugaaugcucuuauuaacgaucaacugaucaugaagaaucaccucagagacauuaugugcaucccuuauugcaacuacuccaaguauugguaccugaaucacacagucaccgggaaaacaagccugccccgguguuggcucgugucuaacggaagcuaccugaaugaaacccauuucuccgacgauaucgagcagcaggccgacaacaugauuacggagcuucugcaaaaggaauauaucgaucgccagggcaaaacaccucucgggcugguggaccuguucgucuuuucuaccagcuucuaccuuauuuccaucuuucuccaccugguuaagauuccgacccauagacacaucacaggaaaacccugcccuaagccccaucggcugaaucacaugggcauuuguagcugcggccucuauaaccacccuggggugcccgugaaauggaagcgcugaggacuaguuauaagacugacuagcccgaugggccucccaacgggcccuccuccccuccuugcaccgagauuaaucaaaggcucuuuucagagccaccaaaaaaaaaaaaaaaaaaaaaaaaaaaaaaaaaaaaaaaaaaaaaaaaaaaaaaaaaaaaaaaaagaauu

SEQ ID NO: 16468 - RNA, 1655 nt, Artificial Sequence
  mRNA product Design i-3 (hSL-A64-N5) comprising derived and/or modified sequence from LASV(Lassa virus/H.sapiens-wt/NGA/2016/ISTH_0017;Clade II)__AVO03567__GPCmut1 (opt5)
aggagaaagcuuaccaugggccagaucauuaccuucuuucaagaggugccccacgucaucgaagagguuaugaacauugugcugaucgcccucagccugcuugcuauucugaaggggaucuacaauguggccacaugcggacucuucggccuggucuccuuucuucugcucugugggagaucuugcagcacgaccuauaaaggaguguacgaacugcagacacuggagcucgacauggcgucccugaacaugaccaugccucuuucuuguacaaagaauaacagccaucacuauaucaugguuggcaaugaaaccgggcuggagcucacacugaccaacacguccauuaucaaucauaaauucugcaaccuuucugaugcucacaagaaaaaucuguacgaccaugcccucaugagcauuaucuccaccuuucaccugagcauuccgaacuucaaucaguaugaggccaugucuugugauuuuaacggaggcaagaucuccgugcaguacaaucugagccacacauaugcuauugacgccgcuaaccauugcggcaccaucgccaaugggguccuccaaacauucaugcggauggcguggggaggcucuuacaucgcccuggauuccgggugcggaagcugggacuguauuaugaccucuuaccaguaucuuaucauucagaacacgacaugggaagaucacugccaguuuucccgccccagcccuaucggcuaccuggggcuccugucccaaagaacccgggacauuuauaucucucgcagacgccggggaacauucaccuggacccucagcgauuccgagggcaacgaaacacccggcggguacugucugacgcgguggaugcugaucgaggcugagcucaaaugcuuuggaaauaccgccguggcuaaguguaacgaaaaacaugacgaggaguucugcgauaugcugcgccuuuuugacuucaauaagcaggccauuagacggcugaaaacacccgcgcagaugagcauccagcucauuaacaaggccguuaaugcucugaucaacgaucaacuuauuaugaagaaucaucugcgcgacaucaugugcaucccuuauugcaacuacucuaaauauugguaccucaaucacaccgugacagggaagaccucccugcccagauguuggcuggucagcaacggaucuuaccucaaugaaacgcacuucagcgacgauauugagcagcaggccgacaacaugaucacagagcugcuucaaaaagaauauauggaucggcagggcaagaccccucuggggcucguggaccuguuuguguucuccaccucuuuuuaccugauuagcaucuuccuucaccucguccgcauuccgacacauagacacguuaucggaaaacccugcccuaagccccaucggcugaaucacaugggcauuuguuccugcggccuguauaaacacccuggggugcccgugaaguggaagcgcugaggacuaguuauaagacugacuagcccgaugggccucccaacgggcccuccuccccuccuugcaccgagauuaaucaaaggcucuuuucagagccaccaaaaaaaaaaaaaaaaaaaaaaaaaaaaaaaaaaaaaaaaaaaaaaaaaaaaaaaaaaaaaaaaagaauu

SEQ ID NO: 16469 - RNA, 1655 nt, Artificial Sequence
  mRNA product Design i-3 (hSL-A64-N5) comprising derived and/or modified sequence from LASV(Lassa virus/H.sapiens-wt/NGA/2018/ISTH_0959;Clade II)__AVV65099__GPCmut1 (opt5)
aggagaaagcuuaccaugggccagaucauuaccuucuuucaagaggugccccacgucaucgaagagguuaugaacauugugcugaucgcccucagccugcuugcuauucugaaggggaucuacaauguggucacaugcggacucuucggccugguguccuuucuucugcucugugggagaucuugcagcacgaccuauaaaggaguuuacgaacugcagacacuggagcucgacauggccucccugaacaugaccaugccucuuucuuguacaaagaauaacagccaucacuauaucauggugggcaaugaaaccgggcuggagcucacacugaccaacacguccauuaucaaucauaaauucugcaaccuuucugaugcgcacaagaaaaaucuguacgaccaugcucucaugagcauuaucuccaccuuucaccugagcauuccgaacuucaaucaguaugaggccaugucuugugauuuuaacggaggcaagaucuccguccaguacaaucugagccacgccuaugcuauugacgccgcuaaccauugcggcacaaucgccaauggggugcuccaaaccuucaugcggauggcguggggaggcucuuacaucgcccuggauuccgggugcggaagcugggacuguauuaugacaucuuaccaguaucuuaucauucagaacaccacgugggaagaucacugccaguuuucccgccccagcccuaucggcuaccuggggcuccugucccaaagaacacgggacauuuauaucucucgcagacgccggggaaccuucacauggacccucagcgauuccgagggcaacgaaacccccggcggguacugucugacacgguggaugcugaucgaggcugagcucaaaugcuuuggaaauacggccguugcuaaguguaacgaaaaacaugacgaggaguucugcgauaugcugcgccuuuuugacuucaauaagcaggccauuagacggcugaaaacccccgcgcagaugagcauccagcucauuaacaaggccgugaaugcucugaucaacgaucaacuuauuaugaagaaucaucugcgcgacaucaugugcaucccuuauugcaacuacucuaaauauugguaccucaaucacacagucaccgggaagacaucccugcccagauguuggcuggugagcaacggaucuuaccucaaugaaacccacuucagcgacgauauugagcagcaggccgacaacaugaucacggagcugcuucaaaaagaauauauugaucggcagggcaagacaccucuggggcucguggaccuguuugucuucuccaccucuuuuuaccugaucagcauuuuccuucaccucguuaaaaucccgacccaucgccacgugauuggaaagcccugcccuaaaccccauagacugaaucacaugggcaucuguuccugcggccuguauaagcacccuggggugcccgucaaguggaaacggugaggacuaguuauaagacugacuagcccgaugggccucccaacgggcccuccuccccuccuugcaccgagauuaaucaaaggcucuuuucagagccaccaaaaaaaaaaaaaaaaaaaaaaaaaaaaaaaaaaaaaaaaaaaaaaaaaaaaaaaaaaaaaaaaagaauu

SEQ ID NO: 16470 - RNA, 1655 nt, Artificial Sequence
  mRNA product Design i-3 (hSL-A64-N5) comprising derived and/or modified sequence from LASV(LASV003-NIG-2008;Clade II)__AIT17580__GPCmut1 (opt5)
aggagaaagcuuaccaugggccagaucauuaccuucuuucaagaggugccccacgucaucgaagagguuaugaacauugugcugaucgcccucagccugcuugcuauucugaaggggaucuacaauguggccacaugcggacucuucggccuggucuccuuucuucugcucugugggagaucuugcagcacgaccuauaaaggaguguacgaacugcagacacuggagcucgacauggcgucccugaacaugaccaugccucuuucuuguacaaagaauaacagccaucacuauaucaugguuggcaaugaaaccgggcuggagcucacacugaccaacacguccauuaucaaucauaaauucugcaaccuuucugaugcucacaagaaaaaucuguacgaccaugcccucaugagcauuaucuccaccuuucaccugagcauuccgaacuucaaucaguaugaggccaugucuugugauuuuaacggaggcaagaucuccgugcaguacaaucugagccacacauaugcugucgacgccgcuaaccauugcggcaccauugccaauggggugcuccaaacauucaugcggauggcguggggaggcucuuacaucgcccuggauuccgggugcggaagcugggacuguaucaugaccucuuaccaguaucuuauuauccagaacacgacaugggaagaucacugccaguuuucccgccccagcccuauuggcuaccuggggcuccugucccaaagaacccgggacaucuauauuucucgcagacgccggggaacauucaccuggacccucagcgauuccgagagcaacgaaacacccggcggcuacugucugacgcgguggaugcugaucgaggcugagcucaaaugcuuugggaauaccgccguugcuaaguguaacgaaaaacaugacgaggaguucugcgauaugcugcgccuuuuugacuucaauaagcaggccaucagacggcugaaagcgcccgcccagaugucuauucagcucaucaacaaggcugugaaugcccugauuaacgaucaacuuaucaugaagaaucaucugcgcgacauuaugugcaucccuuauugcaacuacuccaaauauugguaccucaaucacacagucaccggcagaacaagccugccccgguguuggcuggugucuaacgggagcuaccucaaugaaacccacuucuccgacgauaucgagcagcaggcugacaacaugauuacggagcugcuucaaaaggaauauauggaucgccagggaaaaacaccucugggccucguggaccuguuugucuucucuaccagcuuuuaccugaucuccauuuuccuucaccucguuaagaucccgacccauagacacgugauugggaaacccugcccuaagccccaucggcugaaucacaugggaaucuguagcugcggccuguauaaacacccuggcgugcccgucaaguggaagcgcugaggacuaguuauaagacugacuagcccgaugggccucccaacgggcccuccuccccuccuugcaccgagauuaaucaaaggcucuuuucagagccaccaaaaaaaaaaaaaaaaaaaaaaaaaaaaaaaaaaaaaaaaaaaaaaaaaaaaaaaaaaaaaaaaagaauu

SEQ ID NO: 16471 - RNA, 1655 nt, Artificial Sequence
  mRNA product Design i-3 (hSL-A64-N5) comprising derived and/or modified sequence from LASV(LASV035-NIG-2009;Clade II)__AIT17588__GPCmut1 (opt5)
aggagaaagcuuaccaugggccagaucauuaccuucuuucaagaggugccccacgucaucgaagagguuaugaacauugugcugaucgcccucagccugcuugcuauucugaaggggaucuacaauguggccacaugcggacucuucggccuggucuccuuucuucugcucugugggagaucuugcagcacgaccuauaaaggaguguacgaacugcagacacuggagcucgacauggcgucccugaacaugaccaugccucuuucuuguacaaagaauaacagccaucacuauaucaugguuggcaaugaaaccgggcuggagcucacacugaccaacacguccauuaucaaucauaaauucugcaaccuuucugaugcucacaagaaaaaucuguacgaccaugcccucaugagcauuaucuccaccuuucaccugagcauuccgaacuucaaucaguaugaggccaugucuugugauuuuaacggaggcaagaucuccgugcaguacaaucugagccacgcuuaugccgucgacgcugccaaccauugcggcacaauugcgaauggggugcuccaaaccuucaugcggauggccuggggaggcucuuacaucgcucuggauuccgggugcggaagcugggacuguaucaugacaucuuaccaguaucuuauuauccagaacaccacgugggaagaucacugccaguuuucccgccccagcccuauuggcuaccuggggcuccugucccaaagaacacgggacaucuauauuucucgcagacgccggggaaccuucacauggacccucagcgauuccgagggcaacgaaacccccggcggguacugucugacacgguggaugcugaucgaggccgagcucaaaugcuuuggaaauacggcuguugccaaguguaacgaaaaacaugacgaggaguucugcgauaugcugcgccuuuuugacuucaauaagcaggcgaucagacggcugaaagcccccgcucagaugagcauucagcucaucaacaaggccgugaaugcucugauuaacgaucaacuuaucaugaagaaucaucugcgcgacauuaugugcaucccuuauugcaacuacucuaaauauugguaccucaaucacaccgucacagggaagaccucccugcccagauguuggcuggugagcaacggaucuuaccucaaugaaacacacuucagcgacgauaucgagcagcaggccgacaacaugauuaccgagcugcuucaaaaagaauauaucgaucggcagggcaagacgccucuggggcucguggaccuguuugucuucuccacaucuuuuuaccugauuagcaucuuccuucaccucguuaaaauuccgacccaucgccacgugaucggaaagcccugcccuaaaccccauagacugaaucacaugggcauuuguuccugcggccuguauaagcacccuggggugcccgucaaguggaaacggugaggacuaguuauaagacugacuagcccgaugggccucccaacgggcccuccuccccuccuugcaccgagauuaaucaaaggcucuuuucagagccaccaaaaaaaaaaaaaaaaaaaaaaaaaaaaaaaaaaaaaaaaaaaaaaaaaaaaaaaaaaaaaaaaagaauu

SEQ ID NO: 16472 - RNA, 1655 nt, Artificial Sequence
  mRNA product Design i-3 (hSL-A64-N5) comprising derived and/or modified sequence from LASV(LASV1000-NIG-2009;Clade II)__AIT17782__GPCmut1 (opt5)
aggagaaagcuuaccaugggccagaucauuaccuucuuucaagaggugccccacgucaucgaagagguuaugaacauugugcugaucgcccucagccugcuugcuauucugaaggggaucuacaauguggccacaugcggacucuucggccuggucuccuuucuucugcucugugggagaucuugcagcacgaccuauaaaggaguguacgaacugcagacacuggagcucgacauggcgucccugaacaugaccaugccucuuucuuguacaaagaauaacagccaucacuauaucaugguuggcaaugaaaccgggcuggagcucacacugaccaacacguccauuaucaaucauaaauucugcaaccuuucugaugcucacaagaaaaaucuguacgaccaugcccucaugagcauuaucuccaccuuucaccugagcauuccgaacuucaaucaguaugaggccaugucuugugauuuuaacggaggcaagaucuccgugcaguacaaucugagccacacauaugcugucgacgccgcuaaccauugcggcaccauugccaauggggugcuccaaacauucaugcggauggcguggggaggcucuuacaucgcccuggauuccgggugcggaagcugggacuguaucaugaccucuuaccaguaucuuauuauccagaacacgacaugggaagaucacugccaguuuucccgccccagcccuauuggcuaccuggggcuccugucccaaagaacccgggacaucuauauuucucgcagacgccggggaacauucaccuggacccucagcgauuccgagggcaacgaaacacccggcggguacugucugacgcgguggaugcugaucgaggcugagcucaaaugcuuuggaaauaccgccguugcuaaguguaacgaaaaacaugacgaggaguucugcgauaugcugcgccuuuuugacuucaauaagcaggccaucaaaagacugaagacacccgcgcagaugagcauucagcucaucaacaaggccgugaaugcucugauuaacgaucaacuuaucaugaaaaaucaucugcgggacauuaugugcaucccuuauugcaacuacucuaaguauugguaccucaaucacaccgucacagggaaaaccucccugccccgcuguuggcuggugagcaacggaucuuaccucaaugaaacgcacuucagcgacgauaucgagcagcaggccgacaacaugauuacagagcugcuucaaaaggaauauaucgauagacagggcaaaaccccucuggggcucguggaccuguuugucuucuccaccucuuuuuaccugauuagcaucuuccuucaccucguuaagauuccgacacaucggcacguggugggaaaacccugcccuaagccccaucgccugaaucacaugggcaucuguuccugcggccuguauaagcacccugggguccccgugaaauggaagagaugaggacuaguuauaagacugacuagcccgaugggccucccaacgggcccuccuccccuccuugcaccgagauuaaucaaaggcucuuuucagagccaccaaaaaaaaaaaaaaaaaaaaaaaaaaaaaaaaaaaaaaaaaaaaaaaaaaaaaaaaaaaaaaaaagaauu

SEQ ID NO: 16473 - RNA, 1655 nt, Artificial Sequence
  mRNA product Design i-3 (hSL-A64-N5) comprising derived and/or modified sequence from LASV(LASV221-NIG-2010;Clade II)__AIT17624__GPCmut1 (opt5)
aggagaaagcuuaccaugggccagaucauuaccuucuuucaagaggugccccacgucaucgaagagguuaugaacauugugcugaucgcccucagccugcuugcuauucugaaggggaucuacaauguggccacaugcggacucuucggccuggucuccuuucuucugcucugugggagaucuugcagcacgaccuauaaaggaguguacgaacugcagacacuggagcucgacauggcgucccugaacaugaccaugccucuuucuuguacaaagaauaacagccaucacuauaucaugguuggcaaugaaaccgggcuggagcucacacugaccaacacguccauuaucaaucauaaauucugcaaccuuucugaugcucacaagaaaaaucuguacgaccaugcccucaugagcauuaucuccaccuuucaccugagcauuccgaacuucaaucaguaugaggccaugucuugugauuuuaacggaggcaagaucuccgugcaguacaaucugagccacacauaugcuauugacgccgcuaaccauugcggcaccaucgccaaugggguccuccaaacauucaugcggauggcguggggaggcucuuacaucgcccuggauuccgggugcggaagcugggacuguauuaugaccucuuaccaguaucuuaucauucagaacacgacaugggaagaucacugccaguuuucccgccccagcccuaucggcuaccuggggcuccugucccaaagaacccgggacauuuauaucucucgcagacgccggggaacauucaccuggacccucagcgauuccgagggcaacgaaacacccggcggguacugucugacgcgguggaugcugaucgaggcugagcucaaaugcuuuggaaauaccgccguggcuaaguguaacgaaaaacaugacgaggaguucugcgauaugcugcgccuuuuugacuucaauaagcaggccauuagacggcugaaaacacccgcgcagaugagcauccagcucauuaacaaggccguuaaugcucugaucaacgaucaacuuauuaugaagaaucaucugcgcgacaucaugugcaucccuuauugcaacuacucuaaauauugguaccucaaucacaccgugacagggaagaccucccugcccagauguuggcuggucagcaacggaucuuaccucaaugaaacgcacuucagcgacgauauugagcagcaggccgacaacaugaucacagagaugcugcaaaaagaauauauggaucggcagggcaagaccccucuugggcugguggaccucuuuguguucuccaccucuuuuuaccugauuagcaucuuccugcaccuugucaaaauuccgacacaucgccacguuaucggaaagcccugcccuaaaccccauagacucaaucacaugggcauuuguuccugcggccuguauaagcacccuggggugcccgugaaguggaaacggugaggacuaguuauaagacugacuagcccgaugggccucccaacgggcccuccuccccuccuugcaccgagauuaaucaaaggcucuuuucagagccaccaaaaaaaaaaaaaaaaaaaaaaaaaaaaaaaaaaaaaaaaaaaaaaaaaaaaaaaaaaaaaaaaagaauu

SEQ ID NO: 16474 - RNA, 1655 nt, Artificial Sequence
  mRNA product Design i-3 (hSL-A64-N5) comprising derived and/or modified sequence from LASV(LASV237-NIG-2010;Clade II)__AIT17638__GPCmut1 (opt5)
aggagaaagcuuaccaugggccagaucauuaccuucuuucaagaggugccccacgucaucgaagagguuaugaacauugugcugaucgcccucagccugcuugcuauucugaaggggaucuacaauguggccacaugcggacucuucggccuggucuccuuucuucugcucugugggagaucuugcagcacgaccuauaaaggaguguacgaacugcagacacuggagcucgacauggcgucccugaacaugaccaugccucuuucuuguacaaagaauaacagccaucacuauaucaugguuggcaaugaaaccgggcuggagcucacacugaccaacacguccauuaucaaucauaaauucugcaaccuuucugaugcucacaagaaagaccuguacgaucaugcccucaugagcauuaucuccaccuuucaccugagcauuccgaauuucaaccaguaugaggccaugucuugugacuuuaauggaggcaagaucuccgugcaguacaaccugagccacacauaugcugucgaugccgcuaaucauugcggcaccauugccaacggggugcuccaaacauucaugcggauggcguggggaggcucuuacaucgcccuggacuccgggugcggaagcugggauuguaucaugaccucuuaccaguaucuuauuauccagaauacgacaugggaagaccacugccaguuuucccgccccagcccuauuggcuaccuggggcuccugucccaaagaacccgggauaucuauauuucucgcagacgccggggaacauucaccuggacccucagcgacuccgagggcaacgaaacacccggcggguacugucugacgcgguggaugcugaucgaggcugagcucaaaugcuuuggaaacaccgccguugcuaaguguaaugaaaaacaugaugaggaguucugcgacaugcugcgccuuuuugauuucaacaagcaggccaucagacggcugaaaacacccgcgcagaugagcauucagcucaucaauaaggccgugaacgcucugauuaaugaccaacuuaucaugaagaaccaucugcgcgacauuaugugcaucccuuauugcaauuacucuaaauauugguaccucaaccacaccgucacagggaagaccucccugcccagauguuggcuggugagcaauggaucuuaccucaacgaaacgcacuucagcgaugacaucgagcagcaggccgauaauaugauuacagagcugcuucaaaaagaauauauggaccggcagggcaagaccccucuggggcucguggaucuguuugucuucuccaccucuuuuuaccugaucagcauuuuccuucaccucaucaaaauuccgacacaucgccacaucaccggaaagcccugcccuaaaccccauagacugaaccacaugggcauuuguuccugcggccuguauaagcacccugggguucccgugaaguggaaacggugaggacuaguuauaagacugacuagcccgaugggccucccaacgggcccuccuccccuccuugcaccgagauuaaucaaaggcucuuuucagagccaccaaaaaaaaaaaaaaaaaaaaaaaaaaaaaaaaaaaaaaaaaaaaaaaaaaaaaaaaaaaaaaaaagaauu

SEQ ID NO: 16475 - RNA, 1655 nt, Artificial Sequence
  mRNA product Design i-3 (hSL-A64-N5) comprising derived and/or modified sequence from LASV(LASV253-NIG-2011;Clade II)__AIT17670__GPCmut1 (opt5)
aggagaaagcuuaccaugggccagaucauuaccuucuuucaagaggugccccacgucaucgaagagguuaugaacauugugcugaucgcccucagccugcuugcuauucugaaggggaucuacaauguggccacaugcggacucuucggccuggucuccuuucuucugcucugugggagaucuugcagcacgaccuauaaaggaguguacgaacugcagacacuggagcucgacauggcgucccugaacaugaccaugccucuuucuuguacaaagaauaacagccaucacuauaucaugguuggcaaugaaaccgggcuggagcucacacugaccaacacguccauuaucaaucauaaauucugcaaccuuucugaugcucacaagaaaaaucuguacgaccaugcccucaugagcauuaucuccaccuuucaccugagcauuccgaacuucaaucaguaugaggccaugucuugugauuuuaacggaggcaagaucuccgugcaguacaaucugagccacacauaugcugucgacgccgcuaaccauugcggcaccauugccaauggggugcuccaaacauucaugcggauggcguggggaggcucuuacaucgcccuggauuccgggugcggaagcugggacuguaucaugaccucuuaccaguaucuuauuauccagaacacgacaugggaagaucacugccaguuuucccgccccagcccuauuggcuaccuggggcuccugucccaaagaacccgggacaucuauauuucucgcagacgccggggaacauucaccuggacccucagcgauuccgagggcaacgaaacacccggcggguacugucugacgcgguggaugcugaucgaggcugagcucaaaugcuuuggaaauaccgccguugcuaaguguaacgaaaaacaugacgaggaguucugcgauaugcugcgccuuuuugacuucaauaagcaggccaucagacggcugaaagcgcccgcccagaugagcauucagcucaucaacaaggcugugaaugcccugauuaacgaucaacuuaucaugaagaaucaucugcgcgacauuaugugcaucccuuauugcaacuacucuaaauauugguaccucaaucacacagucaccgggagaacaucccugccccgguguuggcuggugagcaacggaucuuaccucaaugaaacccacuucagcgacgauaucgagcagcaggcugacaacaugauuacggagcugcuucaaaaggaauauaucgaucgccagggcaaaacaccucuggggcucguggaccuguuugucuucuccaccucuuuuuaccugauuagcaucuuccuucaccucguuaagauuccgacccauagacacaucauuggaaaacccugcccuaagccccaucggcugaaucacaugggcaucuguuccugcggccuguauaaacacccuggggugcccgugaaguggaagcgcugaggacuaguuauaagacugacuagcccgaugggccucccaacgggcccuccuccccuccuugcaccgagauuaaucaaaggcucuuuucagagccaccaaaaaaaaaaaaaaaaaaaaaaaaaaaaaaaaaaaaaaaaaaaaaaaaaaaaaaaaaaaaaaaaagaauu

SEQ ID NO: 16476 - RNA, 1655 nt, Artificial Sequence
  mRNA product Design i-3 (hSL-A64-N5) comprising derived and/or modified sequence from LASV(LASV254-NIG-2011;Clade II)__AIT17674__GPCmut1 (opt5)
aggagaaagcuuaccaugggccagaucauuaccuucuuucaagaggugccccacgucaucgaagagguuaugaacauugugcugaucgcccucagccugcuugcuauucugaaggggaucuacaauguggccacaugcggacucuucggccuggucuccuuucuucugcucugugggagaucuugcagcacgaccuauaaaggaguguacgaacugcagacacuggagcucgacaugaccaaccugaauaugacaaugccucuuuccuguaccaagaacaauucucaucacuauaucaugguuggcaacgaaacagggcuggagcucacccugacgaauaccagcauuaucaaccauaaauucugcaaucuuuccgaugcgcacaagaaaaaccuguacaaucaugcucucaugucuauuaucagcacauuucaccuguccauuccgaacuucaaucaguaugaggccaugagcugugacuuuaacggaggcaagaucucugugcaguacaaucugucccacagcuaugccgucgaugcugccaaccauugcggcaccauugcuaacggggugcuccaaacauucaugcggauggccuggggaggcucuuacaucgcgcuggacuccgggugcggaaauugggauuguaucaugaccagcuaccaguaucuuauuauccagaacacgacaugggaagaccacugccaguuuucucgccccuccccuauuggcuaccuggggcuccugagccaaagaacccgggauaucuauauuucccgcagacgccggggaacauucaccuggacccucucugacagcgagggcaaugaaacacccggcggguacugucugacgcgguggaugcugaucgaggccgagcucaaaugcuuuggaaacaccgcuguugccaaguguaaugaaaaacaugaugaggaguucugcgacaugcugcgccuuuuugauuucaacaagcaggcuaucagacggcugaaaacacccgcccaggcgaauauucagcucaucaacaaggccgugaaugcucugauuaacgaccaacuuaucaugaagaaucaucugcgcgauauuaugugcaucccuuauugcaacuacuccaaauauugguaccucaaucacaccgucacagggaagaccagccugcccagauguuggcuggugucuaacggauccuaccucaaugaaacgcacuucagcgacgacaucgagcagcaggccgauaacaugauuacagagcugcuucaaaaagaauauauggaccggcagggcaagaccccucuggggcucguggaucuguuugucuucucuaccagcuuuuaccugaucuccauuuuccuucaccucguuaaaaucccgacacaucgccacgugauuggaaagcccugcccuaaaccccauagacugaaccacaugggcaucuguucuugcggccuguauaagcacccuggggugcccgucaaguggaaacggugaggacuaguuauaagacugacuagcccgaugggccucccaacgggcccuccuccccuccuugcaccgagauuaaucaaaggcucuuuucagagccaccaaaaaaaaaaaaaaaaaaaaaaaaaaaaaaaaaaaaaaaaaaaaaaaaaaaaaaaaaaaaaaaaagaauu

SEQ ID NO: 16477 - RNA, 1655 nt, Artificial Sequence
  mRNA product Design i-3 (hSL-A64-N5) comprising derived and/or modified sequence from LASV(Nig08-A19;Clade III)__ADU56618__GPCmut1 (opt5)
aggagaaagcuuaccaugggccagaucgugaccuucuuucaagaggucccccacguuauugaagaggugaugaacaucgugcugauugcccucagcauccuggcuauucuuaaggggcuguacaauaucgccacaugcggacucaucggccuggucacguuccuucugcucuccgggagaucuuguagcaugaccuauaaaggaguguacgaacugcagacacuggagcucaacaugaauacccugaacaugacaaugccucuuuccugcaccaagaauaacucucaucacuauauuaugguuggcaaugaaacagggcuggagcucacccugacgaacaccagccuucugcaucacaaauuuuguaaucucuccgacgcgcauaagaaaaaccuguacgaucacacacugaugucuaucauuagcaccuuccaccucuccaucccgaauuuuaaccaguaugaggcuaugagcugcgacuucaauggaggcaagauuacagugcaguacaaccugucucauuccuaugccaucgaugccgcuaaucacuguggcaccgucgccaacggggugcuucaaacguuuaugcggauggcuuggggaggcagcuacauugcccuggacucugggugcggaaagugggauugcaucaugacauccuaccaguaucucaucauucagaacaccacaugggaagaccauugucaguucagcagacccucuccuaucggcuaccuggggcuucugucccaacggacccgcgauauuuauaucagcagacggcgccggggaaccuuuacauggacgcuguccgacucugagggcaaugaaacccccggcggguacugccucacacgcuggaugcugauugaggcggagcuuaaauguuucggaaacaccgccguugcuaagugcaaugaaaaacacgaugaggaauuuugugacaugcugagacucuucgauuuuaacaagcaggccauccggcgccugaaagcucccgcccagaugagcauccagcuuauuaauaaggcggugaacgcccugaucaaugaccaacucauuaugaagaaccaccugagagauaucaugugcauuccuuauugcaauuacuccaaauauugguaccugaaccauacaagcaccgggcggacgucucucccccgcugcuggcuggucuccaauggaagcuaccuuaacgaaacacacuucucugacgacaucgagcagcaggcugauaauaugaucaccgagaugcugcaaaaggaauaucucgacagacagggcaaaaccccucuggggcugguggaucuuuucguguuuagcacauccuucuaccucauuucuaucuuucugcaucuggucaagauuccgacccaccggcauaucguuggaaaacccuguccuaagccccaccgccucaaccacaugggcauuugcagcuguggccuguauaaacagccuggggugcccgugagauggaagcggugaggacuaguuauaagacugacuagcccgaugggccucccaacgggcccuccuccccuccuugcaccgagauuaaucaaaggcucuuuucagagccaccaaaaaaaaaaaaaaaaaaaaaaaaaaaaaaaaaaaaaaaaaaaaaaaaaaaaaaaaaaaaaaaaagaauu

SEQ ID NO: 16478 - RNA, 1658 nt, Artificial Sequence
  mRNA product Design i-3 (hSL-A64-N5) comprising derived and/or modified sequence from LASV(G1180-SLE-2010;Clade IV)__AIT17168__GPCmut1 (opt5)
aggagaaagcuuaccaugggccagaucgugaccuucuuucaagaggucccccacguuauugaagaggugaugaacaucgugcugauugcccucagcauccuggcuguccuuaaggggcuguacaauuucgccacaugcggacucgugggccugcuuacguuucugcuccugugugggagauccugcaccgcgucucgguauaaaggaguuuacgaacugcagacacucgagcugaacauggaaacccuuaauaugacaaugccucugagcuguaccaagaacaauucccaucacuauauuauggugggcaacgagacagggcucgagcugacccuuacgaauaccucuaucaucaaccauaaauucugcaaucugagcgacgcucacaagaaaaaccucuacgaucaugcccugauguccauuaucucuacauuucaccugagcauuccgaauuucaaccaguaugaagccauguccugugacuuuaauggaggcaagaucagcguccaguacaaccucucucacuccuaugcuggcgaugccgcuaaucauugcgggaccguggccaacggaguucugcaaacauucaugcgcauggcguggggcgggagcuacauugcccuugacucuggaugcggcuccugggauuguaucaugaccagcuaccaguaucugauuauccagaacacgacaugggaggaccauugccaguuuucuagacccuccccuaucggguaccucggacugcuuagccaacggacccgcgauauuuauaucuccagacggcgccggggcacauucaccuggacccugucugacagcgaaggcaaggauacacccgggggauacugucugacgcgcuggaugcucauugaggcugagcugaaaugcuuuggcaauaccgccguggcuaaguguaacgaaaaacacgacgaggaguucugcgauaugcuuagacuguuugacuucaauaagcaggccauccagcggcucaaagcgcccgcccagauguccauucaacugaucaacaaggcugucaaugcccuuaucaacgaucagcugauuaugaagaaucaccuccgcgacaucaugugcauuccuuauugcaacuacagcaaauauugguaccugaaucauacaaccacaggaaagaccucucugcccaaauguuggcucguguccaacggcagcuaccugaaugaaacgcacuucucugacgauaucgagcagcaagcugacaacaugauuacagagaugcuucagaaggaauauauggagagacaggggaaaaccccucugggacucguggaucuguuugucuucagcaccuccuuuuaccugaucucuaucuuccuucaucucguuaagauuccgacacaccggcauaucgugggcaaaagcugccccaagccucaccgccugaaucacaugggcauuuguuccugcgggcuguauaagcagcccggagugccugucaaauggaagagaugaggacuaguuauaagacugacuagcccgaugggccucccaacgggcccuccuccccuccuugcaccgagauuaaucaaaggcucuuuucagagccaccaaaaaaaaaaaaaaaaaaaaaaaaaaaaaaaaaaaaaaaaaaaaaaaaaaaaaaaaaaaaaaaaagaauu

SEQ ID NO: 16479 - RNA, 1658 nt, Artificial Sequence
  mRNA product Design i-3 (hSL-A64-N5) comprising derived and/or modified sequence from LASV(G1442-SLE-2011;Clade IV)__AIT17180__GPCmut1 (opt5)
aggagaaagcuuaccaugggccagaucgugaccuucuuucaagaggucccccacguuauugaagaggugaugaacaucgugcugauugcccucagcauccuggcuguccuuaaggggcuguacaauguggccacaugcggacucauuggccugguuacguuccuucugcucugugggagauccugcaccacaacccuguauaaaggaguguacgaacugcagacacucgagcugaacauggaaacccuuaauaugacaaugccucugucuuguaccaagaacaauagccaucacuauauccgggucggcaacgagacggggcucgagcugacccuuacaaauaccuccaucauuaaccauaaauuuugcaaucugucugacgcgcacaagaaaaaccucuacgaucaugcucugaugagcaucauuuccacauuccaccugucuaucccgaauuuuaaccaguaugaagccaugagcugugacuucaauggaggcaagauuuccgugcaguacaaccucagccacucuuaugccggcgaugcugccaaucauugcgggaccguugcuaacggagugcugcaaacguuuaugcgcauggccuggggcggguccuacaucgcgcuugacagcggaugcggcaacugggauuguauuaugacaucuuaccaguaucugaucauccagaauaccacaugggacgaucacugccaguucucccggcccagcccuauuggguaccucggacugcuuucucaacgcaccagagacgucuauaucucccggcgccgccggggcaccuuuacauggacgcugagcgauuccgagggcaaggacacccccgggggauacugucugacaagauggaugcucauugaagccgagcugaaaugcuucggcaacaccgcuguggccaaguguaaugagaaacaugaugaagaguuuugcgacaugcuucggcuguucgauuuuaacaagcaggcuauccagcgccucaaagcccccgcgcagaugucuauucaacugaucaauaaggccgugaacgcucuuaucaaugaccagcugauuaugaagaaccaccucagagacaucaugugcauuccuuauugcaauuacagcaaauauugguaccugaacaauacagccaccggaaagacgucccugcccaaauguuggcucaucagcaacggcucuuaccugaaugagacacacuucuccgaugacauugaacaggaggcugauaacaugaucaccgagaugcuucaaaaggaauauauggagcggcaggggaaaaccccucugggacucgucgaccuguucguuuuuagcacaucuuucuaccugaucagcauuuuucuucaucucgugaagaucccgacccaccgccauauugugggcaaauccugccccaagccucacagacugaaucauaugggcaucuguucuugcgggcuguauaagcagcccggagucccugugcgguggaaacgcugaggacuaguuauaagacugacuagcccgaugggccucccaacgggcccuccuccccuccuugcaccgagauuaaucaaaggcucuuuucagagccaccaaaaaaaaaaaaaaaaaaaaaaaaaaaaaaaaaaaaaaaaaaaaaaaaaaaaaaaaaaaaaaaaagaauu

SEQ ID NO: 16480 - RNA, 1658 nt, Artificial Sequence
  mRNA product Design i-3 (hSL-A64-N5) comprising derived and/or modified sequence from LASV(G3010-SLE-2013;Clade IV)__AIT17344__GPCmut1 (opt5)
aggagaaagcuuaccaugggccagaucgugaccuucuuucaagaggucccccacguuauugaagaggugaugaacaucgugcugauugcccucagcauccuggcuguccuuaaggggcuguacaauuucgccacaugcggacucgugggccugguuacguuucuucugcucugugggagauccugcaccacaucucuguauaaaggaguguacgaacugcagacccucgagcugaacauggaaacacuuaauaugaccaugccucugagcuguacaaagaacaauucccaucacuauauuauggucggcaacgagaccgggcucgagcugacgcuuaccaauacaucuaucaucaaccauaaauucugcaaucugagcgacgcgcacaagaaaaaccucuacaaucaugcucugauguccauuaucucuaccuuucaccugagcauuccgaacuucaaucaguaugaagccauguccugugauuuuaacggaggcaagaucagcgugcaguacaaucucucucacuccuaugccggcgacgcugccagccauugcgggacaguugcuaacggagugcugcaaaccuucaugcggauggccuggggcgggucuuacauugcgcuugauuccggaugcggcaagugggacuguaucaugacgagcuaucaguaccugauuauccagaacacaaccugggaggaucacugccaguuuucucgccccuccccuaucggguaucucggacugcuuagccaaagaacacgggacauuuacaucucccgcagacgccggggcaccuucaccuggacacugucugauagcgaaggcaaagacacgcccgggggauauugucugacccgguggaugcucauugaggccgagcugaagugcuuuggcaauacagcugucgccaaauguaacgaaaagcaugaugaggaguucugcgacaugcuucgccuguuugauuucaauaaacaggcuauccagagacucaagacccccgcccagauguccauucaacugaucaacaaggcggugaaugcccuuaucaacgaccagcugauuaugaaaaaucaccuccgggauaucaugugcauuccuuacugcaacuauagcaaguacugguaccugaaucacacaaccacgggaaaaacaucucugcccaaguguuggcucguguccaacggcagcuaucugaaugaaacccauuucucugacgacaucgagcagcaagcugauaacaugauuaccgagaugcuucagaaagaauacauggagcgccaggggaagacaccucugggacucgucgaccuguuuguuuucagcaccuccuuuuaucugaucucuaucuuccuucaccucgugaaaauuccgacacauagacacaucgugggcaagagcugccccaagccucaucggcugaaucacaugggcauuuguuccugcgggcuguacaaacagcccggagucccugugcgcuggaagagaugaggacuaguuauaagacugacuagcccgaugggccucccaacgggcccuccuccccuccuugcaccgagauuaaucaaaggcucuuuucagagccaccaaaaaaaaaaaaaaaaaaaaaaaaaaaaaaaaaaaaaaaaaaaaaaaaaaaaaaaaaaaaaaaaagaauu

SEQ ID NO: 16481 - RNA, 1658 nt, Artificial Sequence
  mRNA product Design i-3 (hSL-A64-N5) comprising derived and/or modified sequence from LASV(G502-SLE-2009;Clade IV)__AIT17126__GPCmut1 (opt5)
aggagaaagcuuaccaugggccagaucgugaccuucuuucaagaggucccccacguuauugaagaggugaugaacaucgugcugauugcccucagcauccuggcuguccuuaaggggcuguacaauuucgccacaugcggacucgugggccugcuuacguuucugcuccugugugggagauccugcaccacaggacuguauaaaggcguuuacgaacuccagacccuggagcuuaacauggaaacacugaauaugaccaugccucucucuuguacaaagaacaauagccaucacuauauuaugguggggaacgagaccggacuggagcuuacgcugaccaauacauccaucaucaaccauaaauucugcaaucucucugacgcgcacaagaaaaaccuguacgaucaugcucugaugagcauuaucuccaccuuucaccucucuauuccgaauuucaaccaguaugaagccaugagcugugacuuuaauggcggcaagaucuccguccaguacaaccugagccacucuuaugccggggaugcugccgaccauugcggaacaguggcuaauggcguucuucaaaccuucaugcggauggccuggggaggguccuacauugcgcuggauagcggcugcgggagaugggacuguaucaugacgucuuaccaguaucucauuauccagaacacaaccugggaggaucacugccaguuuucccggcccagcccuaucggauaccugggccuucugucucaacgcacaagagacauuuauaucucccggcgccgccggggcaccuucaccuggacacugagcgauuccgaagggaaggacacgcccggaggcuacugucucaccagauggaugcugauugaggccgagcuuaaaugcuuugggaacacagcuguggccaaguguaaugaaaaacaugaugaggaguucugcgacaugcugcggcucuuugauuucaacaagcaggcuauccagcgccugaaagcccccgcgcagaugucuauucaacuuaucaauaaggccgucaacgcucugaucaaugaccagcucgugaugaagaaccaccugagagacauuaugugcaucccuuauugcaauuacagccgguauugguaccugaaccacaccacaaccggccgcacgucccuccccaaauguuggcuggugagcaaugggucuuaccuuaacgaaacacauuucuccgaugacauugagcagcaagccgauaauaugaucaccgagaugcugcagaaggaauauauggagagacagggaaaaaccccucucggccuggucgaccuguuuguuuucagcacaucuuuuuaccuuauuagcaucuuccuccaccuggugaagaucccgacccaucggcacauugugggcaaauccugccccaagccucaucgccugaaccacauggggaucuguucuugcggacucuauaaacagcccggcgucccugugaaguggaagagaugaggacuaguuauaagacugacuagcccgaugggccucccaacgggcccuccuccccuccuugcaccgagauuaaucaaaggcucuuuucagagccaccaaaaaaaaaaaaaaaaaaaaaaaaaaaaaaaaaaaaaaaaaaaaaaaaaaaaaaaaaaaaaaaaagaauu

SEQ ID NO: 16482 - RNA, 1658 nt, Artificial Sequence
  mRNA product Design i-3 (hSL-A64-N5) comprising derived and/or modified sequence from LASV(G733-SLE-2010;Clade IV)__AIT17154__GPCmut1 (opt5)
aggagaaagcuuaccaugggccagaucgugaccuucuuucaagaggucccccacguuauugaagaggugaugaacaucgugcugauugcccucagcauccuggcuguccuuaaggggcuguacaauuucgccacaugcggaauugugggccucguuuccuuucugcuucugugugggagaucuugcacgaccagccucuauaaaggaguguacgaacugcagacacuggagcucaacauggaaacccugaauaugacaaugccucuuuccuguaccaagaacaauucucaucacuauaucauggucggcaacgagacagggcuggagcucacccugacgaauaccagcaucauuaaccauaaauucugcaaucuuuccgacgcgcacaagaaaaaccuguacgaucaugcucucaugucuaucauuagcacauuucaccuguccaucccgaauuucaaccaguaugaagccaugagcugugacuuuaauggaggcaagauuucugugcaguacaaccugucccacagcuaugccggcgaugcugccaaucauugcgggaccaucgcuaacggaguucuccaaacauucaugcggauggccuggggcgggucuuacauugcgcuggacuccggaugcgauagaugggacuguaucaugaccagcuaccaguaucuuaucauucagaacacgacaugggaggaucacugccaguuuucucggcccuccccuaucggcuaccuggggcuccugagccaacgcaccagagacauuuauaucucccggcgccgccggggaacauucaccuggacccucucugauagcgaaggcaaggacacacccggcggguacugucugacgagauggaugcugauugaggccgagcucaaaugcuuuggaaauaccgcuguggccaaguguaacgaaaaacaugaugaggaguucugcgacaugcugcggcuuuuugauuucaauaagcaggcuauccagcgccugaaagcccccgcgcagauguccauccaacucauuaacaaggccgucaaugcucugaucaacgaccagcuuauuaugaagaaucaccugagagacaucaugugcauuccuuauugcaacuacagcaaauauugguaccucaaucacacaaccacagggaagaccucucugcccaaauguuggcugguguccaacggaagcuaccucaaugaaacgcauuucucugaugacaucgagcagcaagccgauaacaugaucacagagaugcugcagaaggaauauauggagcggcagggcaaaaccccucuugggcugguggaccucuuugucuucagcaccuccuuuuaccugauuucuaucuuccugcaccuuguuaagauuccgacacaucgccacguggugggaaaaagcugccccaagccucauagacucaaucacaugggcaucuguuccugcggccuguaugggcagcccggagucccugugaaguggaaacggugaggacuaguuauaagacugacuagcccgaugggccucccaacgggcccuccuccccuccuugcaccgagauuaaucaaaggcucuuuucagagccaccaaaaaaaaaaaaaaaaaaaaaaaaaaaaaaaaaaaaaaaaaaaaaaaaaaaaaaaaaaaaaaaaagaauu

SEQ ID NO: 16483 - RNA, 1658 nt, Artificial Sequence
  mRNA product Design i-3 (hSL-A64-N5) comprising derived and/or modified sequence from MOPV/LASV reassortant(IGS-1;Clade IV)__AFY05576__GPCmut1 (opt5)
aggagaaagcuuaccaugggccagaucgugaccuucuuucaagaggucccccacguuauugaagaggugaugaacaucgugcugauugcccucagcguccuggcugugcuuaaggggcuguacaauuucgccacaugcggacucguuggccuggugacguuucuucugcucugugggagauccugcaccacaucucuguauaaaggagucuacgaacugcagacccucgagcugaacauggaaacacuuaauaugaccaugccucugagcuguacaaagaacaauucccaucacuauaucauggugggcaacgagaccgggcucgagcugacgcuuaccaauacaucuauuaucaaccauaaauucugcaaucugagcgacgcgcacaagaaaaaccucuacgaucaugcucugauguccaucauuucuaccuuucaccugagcaucccgaauuucaaccaguaugaagccauguccugugacuuuaauggaggcaagauuagcguucaguacaaccucucucacuccuaugccggcgaugcugccaaucauugcgggacaguggcuaacggaguccugcaaaccuucaugcggauggccuggggcgggagcuacaucgcgcuugacucuggaugcggcaacugggauuguauuaugacguccuaccaguaucugaucauucagaauacaaccugggaggaccacugccaguuuagcagacccucuccuaucggguaccucggacugcuuucccaacggacacgcgauaucuauauuagcagacggcgccggggcaccuucaccuggacacuguccgacucugaaggcgaggauacgcccgggggauacugucugacccgcuggaugcucaucgaggccgaacugaagugcuuuggcaacacagcuguggccaaauguaaugagaagcaugacgaagaguucugcgauaugcuuagacuguuugacuucaacaaacaggcuauucagcggcucaaggcccccgcgcagaugagcauccaacugauuaauaaagccgugaacgcucuuaucaaugaucagcugaucaugaagaaccaccuccgcgacauuaugugcaucccuuauugcaauuacuccaaguauugguaccugaaccacaccacaaccggaagaacgagccugcccaaauguuggcucgucucuaauggcuccuaccugaacgagacacauuucagcgacgauauugagcagcaagccgacaauaugaucaccgaaaugcuucagaaggaguauauggaacggcaggggaaaaccccucugggacucguugaucuguuuguguucucuaccagcuuuuaccugauuuccaucuuccuucaccucgugaagaucccgacacaucgccacauugucggcaaaucuugccccaagccucauagacugaaccacaugggcaucuguagcugcgggcuguauaaacagcccggagugccuguuaaguggaagcggugaggacuaguuauaagacugacuagcccgaugggccucccaacgggcccuccuccccuccuugcaccgagauuaaucaaaggcucuuuucagagccaccaaaaaaaaaaaaaaaaaaaaaaaaaaaaaaaaaaaaaaaaaaaaaaaaaaaaaaaaaaaaaaaaagaauu

SEQ ID NO: 16484 - RNA, 1658 nt, Artificial Sequence
  mRNA product Design i-3 (hSL-A64-N5) comprising derived and/or modified sequence from LASV(LM765-SLE-2012;Clade IV)__AIT17814__GPCmut1 (opt5)
aggagaaagcuuaccaugggccagaucgugaccuucuuucaagaggucccccacguuauugaagaggugaugaacaucgugcugauugcccucagcauccuggcuguccuuaaggggcuguacaauuucgccacaugcggacucgugggccugguuacguuucuucugcucugugggagauccugcaccacaucucuguauaaaggaguguacgaacugcagacccucgagcugaacauggaaacacuuaauaugaccaugccucugagcuguacaaagaacaauucccaucacuauauuauggucggcaacgagaccgggcucgagcugacgcuuaccaauacaucuaucaucgaccauaaauucugcaaccugagcgaugcgcaccggaagaaucucuacgaccaugcucugauguccauuaucucuaccuuucaccugagcauuccgaacuucaaucaguaugaagccauguccugugauuuuaacggaggcaaaaucagcgugcaguacaaucucucucacuccuaugccaaggacgcugccgaucauugcggcacaguugcuaacggggugcugcaaaccuucaugcgcauggccuggggaggcagcuacauugcgcuugacucugggugcggacggugggauuguaucaugacguccuaccaguaucugauuauccagaauacaaccugggaggaccacugccaguuuagccgccccucuccuaucggcuaccucgggcugcuuucccaaagaacacgggauauuuauaucagccgcagacgccggggaaccuucaccuggacacuguccgacucugaaggcaaggauacgcccggcggguacugucugacccgguggaugcucauugaggccgagcugaaaugcuuuggaaacacagcugucgccaaguguaacgaaaaacaugacgaggaguucugcgauaugcuucgccuguuugacuucaauaagcaggcuauccagagacucaaagcccccgcgcagaugagcauucaacugaucaacaaggccgugaaugcucuuaucaacgaccagcugauuaugaagaaucaccuccgggauaucaugugcauuccuuauugcaacuacuccaaauauugguaccugaaucacaccacaaccgggaagacgagccugcccaaauguuggcucgugucuaacggauccuaccugaaugaaacacauuucagcgacgauaucgagcagcaagccgacaacaugauuaccgagaugcuucagaaggaauauauggagcgccagggcaaaaccccucuggggcucgucgaucuguuuguuuucucuaccagcuuuuaccugaucuccaucuuccuucaccucgugaagauuccgacacauagacacaucgugggaaaacccugcccuaagccccaucggcugaaucacaugggcauuuguucuugcggccuguauaagcagccugggguccccgugaaauggaagcgcugaggacuaguuauaagacugacuagcccgaugggccucccaacgggcccuccuccccuccuugcaccgagauuaaucaaaggcucuuuucagagccaccaaaaaaaaaaaaaaaaaaaaaaaaaaaaaaaaaaaaaaaaaaaaaaaaaaaaaaaaaaaaaaaaagaauu

SEQ ID NO: 16485 - RNA, 1658 nt, Artificial Sequence
  mRNA product Design i-3 (hSL-A64-N5) comprising derived and/or modified sequence from LASV(LM776-SLE-2012;Clade IV)__AIT17824__GPCmut1 (opt5)
aggagaaagcuuaccaugggccagaucgugaccuucuuucaagaggucccccacguuauugaagaggugaugaacaucgugcugauugcccucagcauccuggcuguccuuaaggggcuguacaauuucgccacaugcggacucgugggccugguuacguuucuucugcucugugggagauccugcaccacaucuguguauaaaggagucuacgaacugcagacccuggagcucaacauggaaacacugaauaugaccaugccucuuagcuguacaaagaacaauucccaucacuauauuauggugggcaacgagaccgggcuggagcucacgcugaccaauacaucuaucaucaaccauaaauucugcaaucuuagcgacgcgcacaagaaaaaccuguacgaucaugcucucauguccauuaucucuaccuuucaccugagcauuccgaauuucaaccaguaugaagccauguccugugacuuuaauggaggcaagaucagcguucaguacaaccugucucacuccuaugccggcgaugcugccaaucauugcgggacaguggcuaacggaguccuccaaaccuucaugcggauggccuggggcgggagcuacauugcgcuggacucuggaugcggcaagugggauuguaucaugacguccuaccaguaucuuauuauccagaacacaaccugggaggaccauugccaguuuagccgccccucuccuaucggguaccugggacuccugucccaaagaacacgggauauuuauaucagccgcagacgccggggcaccuucaccuggacacucuccgacucugaaggcaaagauacgcccgggggauacugucugacccgguggaugcugauugaggccgagcucaagugcuuuggcaauacagcuguggccaaauguaacgaaaagcacgacgaggaguucugcgauaugcugcgccuuuuugacuucaauaaacaggcuauccagagacugaaggcccccgcgcagaugagcauucaacucaucaacaaggccgugaaugcucugaucaacgaucagcuuauuaugaaaaaucaucugcgggacaucaugugcauuccuuauugcaacuacuccaaguauugguaccucaaucacaccacaaccggaaaaacgagccugcccaaguguuggcuggucucuaacggcuccuaccucaaugaaacacacuucagcgacgauaucgagcagcaagccgacaacaugauuaccgagaugcugcagaaagaauauauggagcgccaggggaagaccccucuuggacugguugaucucuuuguguucucuaccagcuuuuaccugaucuccaucuuccugcaucuugugaaaauuccgacacacagacauaucgucggcaagucuugccccaagccucaccggcucaaucacaugggcauuuguagcugcgggcuguauaaacagcccggagugccuguucgcuggaagagaugaggacuaguuauaagacugacuagcccgaugggccucccaacgggcccuccuccccuccuugcaccgagauuaaucaaaggcucuuuucagagccaccaaaaaaaaaaaaaaaaaaaaaaaaaaaaaaaaaaaaaaaaaaaaaaaaaaaaaaaaaaaaaaaaagaauu

SEQ ID NO: 16486 - RNA, 1658 nt, Artificial Sequence
  mRNA product Design i-3 (hSL-A64-N5) comprising derived and/or modified sequence from LASV(Mad39;Clade IV)__ANH09722__GPCmut1 (opt5)
aggagaaagcuuaccaugggccagaucgugaccuucuuucaagaggucccccacguuauugaagaggugaugaacaucgugcugauugcccucagcauccuggcuguccuuaaggggcuguacaauguggccacaugcggacucauuggccugguuacguuccuucugcucugugggagauccugcaccacaacccuguauaaaggaguguacgaacugcaggcgcucgagcugaacauggaaacacuuaauaugaccaugccucugucuuguacaaagaacaauagccaucacuauauccgggucggcaacgagaccgggcucgagcugacgcuuaccaauacaucccugaucaaccauaaauuuugcaaucucucugacgcucacaagaaaaaccuguacgaucaugcccugaugagcauuaucuccaccuuccaccucucuauuccgaauuuuaaccaguaugaagccaugagcugugacuucaaugauggaaagaucuccgugcaguacaaccugagccacacauaugcuggcgacaccgccaaucauugcggcacgguugcuaacggggugcuucaaacauuuaugcgcauggccuggggaggcucuuacauugcgcuggauuccgggugcggaggcugggacuguaucaugaccagcuaccaguaucucauuauccagaacacaaccugggaggaucacugccaguucucucggcccuccccuaucggguaccugggacuucugagccaacgcaccagagacauuuauaucucucggcgccgccggggcacauuuacguggacccuguccgauagcgaaggcaaggacacacccgggggauacugucucaccagauggaugcugauugaggccgagcuuaaaugcuucggcaauacagcugucgccaaguguaacgaaaaacaugaugaggaauuuugcgacaugcugcgccucuucgauuuuaauaagcaggcuauccagcggcugaaagcccccgcgcagauguccauucaacuuaucaacaaggccgugaaugcucugaucaacgaccagcucauuaugaagaaucaccugagagacaucaugugcauuccuuauugcaacuacucuaaauauugguaccugaaucacaccgugacgggaaagacaagccuccccaaauguuggcuggucuccaacggcagcuaccuuaaugaaacccauuucucugaugacaucgagcagcaagccgauaacaugauuaccgagaugcugcagaaggaauauauggagcggcaggggaaaacaccucucggacugguugaccuguucguguuuuccaccagcuucuaccuuaucucuaucuuucuccaccuggugaagauuccgacacaucgccacgucgugggcaaacccugcccuaagccccauagacugaaucacaugggcaucuguagcugcggguucuauaagcagccuggaguucccgugcgguggaaacgcugaggacuaguuauaagacugacuagcccgaugggccucccaacgggcccuccuccccuccuugcaccgagauuaaucaaaggcucuuuucagagccaccaaaaaaaaaaaaaaaaaaaaaaaaaaaaaaaaaaaaaaaaaaaaaaaaaaaaaaaaaaaaaaaaagaauu

SEQ ID NO: 16487 - RNA, 1658 nt, Artificial Sequence
  mRNA product Design i-3 (hSL-A64-N5) comprising derived and/or modified sequence from LASV(Z0947-SLE-2011;Clade IV)__AIT17840__GPCmut1 (opt5)
aggagaaagcuuaccaugggccagaucgugaccuucuuucaagaggucccccacguuauugaagaggugaugaacaucgugcugauugcccucagcauccuggcuguccuuaaggggcuguacaauuucgccacaugcggacucgugggccugguuacguuucuucugcucugugggagauccugcaccauuucucuguauaaaggaguguacgaacugcagacacucgagcugaacauggaaacccuuaauaugacaaugccucugagcuguaccaagaacaauucccaucacuauaucauggucggcaacgagacagggcucgagcugacccuuacgaauaccucuaucauuaaccauaaauucugcaaucugagcgacgcgcacaagaaaaaccucuacgaucaugcucugauguccaucauuucuacauuucaccugagcaucccgaauuucaaccaguaugaagccauguccugugacuuuaauggaggcaagauuagcgugcaguacaaccucucucacuccuaugccggcgaugcugccaaucauugcgggaccguugcuaacggagugcugcaaacauucaugcggauggccuggggcgggagcuacaucgcgcuugacucuggaugcgauagaugggacuguauuaugaccuccuaccaguaucugaucauccagaacacgacaugggaggaucacugccaguuuagccggcccucuccuauuggcuaccucgggcugcuuucccaacgcaccagagacaucuauauuagccggcgccgccggggaacauucaccuggacccuguccgauucugaaggcaaggacacacccggcggguacugucugacgagauggaugcucaucgaggccgagcugaaaugcuuuggaaauaccgcugucgccaaguguaacgaaaaacaugaugaggaguucugcgacaugcuucggcuguuugauuucaauaagcaggcuauucagcgccucaaagcccccgcgcagaugagcauccaacugaucaacaaggccgugaaugcucuuauuaacgaccagcugaucaugaagaaucaccucagagacauuaugugcaucccuuauugcaacuacuccaaauauugguaccugaaucacacaaccacagggaagaccagccugcccaaauguuggcucgugucuaacggauccuaccugaaugaaacgcauuucagcgaugacauugagcagcaagccgauaacaugaucacagagaugcuucagaaggaauauauggagcggcagggcaaaaccccucuggggcucgucgaccuguuuguuuucucuaccagcuuuuaccugaucuccauuuuccuucaccucgugaagaucccgacacaucgccacauugugggaaaacccugcccuaagccccauagacugaaucacaugggcaucuguucuugcggccuguauaagcagccugggguccccgugaaauggaagcggugaggacuaguuauaagacugacuagcccgaugggccucccaacgggcccuccuccccuccuugcaccgagauuaaucaaaggcucuuuucagagccaccaaaaaaaaaaaaaaaaaaaaaaaaaaaaaaaaaaaaaaaaaaaaaaaaaaaaaaaaaaaaaaaaagaauu

SEQ ID NO: 16488 - RNA, 1689 nt, Artificial Sequence
  mRNA product Design i-3 (hSL-A100) comprising derived and/or modified sequence from LASV(Josiah;Clade IV)__NP_694870__GPCmut1 (opt1)
aggagaaagcuuaccaugggccagaucgugaccuucuuccaggaggucccccacgugaucgaggaggugaugaacaucguccugaucgcccucagcgugcuggccgugcugaaggggcucuacaacuucgcgaccugcggccuggucgggcuggugacguuccuccugcugugcggccgcuccugcaccaccagccucuacaaggggguguacgagcugcagacccuggagcucaacauggagacgcugaacaugaccaugccgcuguccugcaccaagaacaacagccaccacuacaucauggucggcaacgagaccggccucgagcugacgcugaccaacaccuccaucaucaaccacaaguucugcaaccucagcgacgcccacaagaagaaccuguacgaccacgcccugauguccaucaucagcaccuuccaccucuccauccccaacuucaaccaguacgaggccaugagcugcgacuucaacgggggcaagaucuccgugcaguacaaccugagccacuccuacgccggggacgcggccaaccacugcggcacgguggccaacgggguccugcagaccuucaugcggauggccuggggcggcagcuacaucgcgcucgacuccgggugcggcaacugggacugcaucaugaccagcuaccaguaccugaucauccagaacaccacgugggaggaccacugccaguucucccggcccagccccaucggguaccugggccuccugucccagcgcacccgggacaucuacaucagccgccggcgccggggcaccuucaccuggacgcugagcgacuccgaggggaaggacaccccgggcggguacugccugacccgcuggaugcucaucgaggccgagcugaagugcuucggcaacaccgccguggccaagugcaacgagaagcacgacgaggaguucugcgacaugcugcggcuguucgacuucaacaagcaggccauccagcgccugaaggcgcccgcccagaugagcauccagcugaucaacaaggccgugaacgcccucaucaacgaccagcugaucaugaagaaccaccuccgggacaucaugugcauccccuacugcaacuacuccaaguacugguaccucaaccacacgaccaccggccgcaccagccugcccaagugcuggcuggucuccaacggcagcuaccucaacgagacgcacuucuccgacgacaucgagcagcaggccgacaacaugaucaccgagaugcugcagaaggaguacauggagcggcaggggaagacgccccugggccucguggaccuguucguguucagcaccuccuucuaccugaucagcaucuuccugcaccucgucaagaucccgacccaccgccacaucguggggaaguccugccccaagccccaccggcugaaccacaugggcaucugcagcugcgggcuguacaagcagcccggcgugccggucaaguggaagcgcugaggacuaguuauaagacugacuagcccgaugggccucccaacgggcccuccuccccuccuugcaccgagauuaaucaaaggcucuuuucagagccaccaaaaaaaaaaaaaaaaaaaaaaaaaaaaaaaaaaaaaaaaaaaaaaaaaaaaaaaaaaaaaaaaaaaaaaaaaaaaaaaaaaaaaaaaaaaaaaaaaaaaa

SEQ ID NO: 16489 - RNA, 1686 nt, Artificial Sequence
  mRNA product Design i-3 (hSL-A100) comprising derived and/or modified sequence from LASV(LP;Clade I)__AAF86701__GPCmut1 (opt1)
aggagaaagcuuaccaugggccagaucaucaccuucuuccaggaggugccccacgucaucgaggaggugaugaacaucgugcugaucgcccucagccugcuggccauccucaaggggcuguacaacaucgcgaccugcggcaucaucgggcuggucgccuuccucuuccugugcggcaaguccugcagccugacgcucaagggcggguacgagcugcagacccuggagcucaacauggagacccugaacaugaccaugccgcuguccugcacgaagaacagcucccaccacuacauccgcgugggcaacgagaccgggcucgagcugacccugaccaacacgagcaucaucaaccacaaguucugcaaccucuccgacgcccacaagaagaaccuguacgaccacgcccugaugagcaucaucuccaccuuccaccucagcauccccaacuucaaccaguacgaggccauguccugcgacuucaacggcgggaagaucagcgugcaguacaaccugucccacagcuacgcgggcgacgccgccgagcacugcgggaccgucgccaacggcgugcugcagaccuucaugcggauggcguggggcgggcgcuacaucgcccucgacuccggcugcgggaacugggacugcaucaugacgagcuaccaguaccugaucauccagaacaccaccugggaggaccacugccaguucucccggcccagccccaucggcuaccugggccuccugucccagcgcacccgggacaucuacaucagccgccggcgccgggggacguucaccuggacccugagcgacuccgagggcaacgagacccccgggggcuacugccugacgcgcuggaugcucaucgaggccgagcugaagugcuucgggaacaccgccguggccaagugcaacgagaagcacgacgaggaguucugcgacaugcugcggcuguucgacuucaacaagcaggcgauccgccggcugaaggcccccgcccagaugagcauccagcugaucaacaaggccgucaacgcccucaucaacgaccagcugaucaugaagaaccaccuccgcgacaucaugugcauccccuacugcaacuacuccaaguacugguaccucaaccacaccagcuccggccggaccagccugcccaagugcuggcugaucuccaacgggagcuaccucaacgagacgcaguucuccgacgacaucgagcagcaggcggacaacaugaucaccgagaugcugcagaaggaguacaucgagcgccagggcaagaccccgcuggggcucguggacaucuucaucuucagcaccuccuucuaccugaucagcaucuuccugcaccugaucaagaucccgacgcaccggcacaucgugggcaagcccugccccaagccccaccgccucaaccacaugggggucugcuccugcggccuguacaagcacccgggcgugcccaccaaguggaagcggugaggacuaguuauaagacugacuagcccgaugggccucccaacgggcccuccuccccuccuugcaccgagauuaaucaaaggcucuuuucagagccaccaaaaaaaaaaaaaaaaaaaaaaaaaaaaaaaaaaaaaaaaaaaaaaaaaaaaaaaaaaaaaaaaaaaaaaaaaaaaaaaaaaaaaaaaaaaaaaaaaaaaa

SEQ ID NO: 16490 - RNA, 1686 nt, Artificial Sequence
  mRNA product Design i-3 (hSL-A100) comprising derived and/or modified sequence from LASV(803213;Clade II)__AAF86703__GPCmut1 (opt1)
aggagaaagcuuaccaugggccagaucaucaccuucuuccaggaggugccccacgucaucgaggaggugaugaacaucgugcugaucgcccucagccugcuggccauccucaaggggaucuacaacgucgcgaccugcggccuguucgggcugaucuccuuccuccugcugugcggccgcagcugcuccgugacguacaaggggguguacgagcuccagacccuggagcugaacauggccaaccucaacaugaccaugccgcugagcugcaccaagaacaacucccaccacuacaucauggucggcaacgagacgggccuggagcucacccugaccaacaccagcaucaucaaccacaaguucugcaaccuguccgacgcccacaagaagaaccucuacgaccacgcccugaugagcaucaucuccacguuccaccugagcauccccaacuucaaccaguacgaggccauguccugcgacuucaacgggggcaagaucagcgugcaguacaaccucucccacagcuucgcgguggacgccgccaaccacugcgggaccaucgccaacggcguccugcagaccuucaugcggauggcguggggcggguccuacaucgcccuggacagcggcugcgggaacugggacugcaucaugaccuccuaccaguaccucaucauccagaacacgaccugggaggaccacugccaguucagccgccccucccccaucggcuaccuggggcugcucagccagcggacccgcgacaucuacaucagccggcgccgccggggcaccuucacguggacccucuccgacagcgagggcaacgaggcccccgggggcuacugccugacccgguggaugcugaucgaggccgagcucaagugcuucgggaacaccgccguggcgaagugcaacgagaagcacgacgaggaguucugcgacaugcugcgccuguucgacuucaacaagcaggccaucaagcggcucaagacgcccgcccagauguccauccagcugaucaacaaggccgugaacgcccugaucaacgaccagcucaucaugaagaaccaccuccgcgacaucaugugcauccccuacugcaacuacagccgguacugguaccugaaccacaccgucaccgggaagaccucccugccccgcugcuggcuggugagcaacggcuccuaccugaacgagacgcacuucagcgacgacaucgagcagcaggcggacaacaugaucaccgagaugcuccagaaggaguacauggaccggcagggcaagaccccgcuggggcugguggaccucuucgucuucuccaccagcuucuaccugaucuccaucuuccugcaccuggugaagaucccgacgcaccgccacaucgugggcaagcccugccccaagccccaccggcucaaccacauggggaucugcagcugcggccuguacaagcacccggggguccccgugaaguggaagcgcugaggacuaguuauaagacugacuagcccgaugggccucccaacgggcccuccuccccuccuugcaccgagauuaaucaaaggcucuuuucagagccaccaaaaaaaaaaaaaaaaaaaaaaaaaaaaaaaaaaaaaaaaaaaaaaaaaaaaaaaaaaaaaaaaaaaaaaaaaaaaaaaaaaaaaaaaaaaaaaaaaaaaa

SEQ ID NO: 16491 - RNA, 1686 nt, Artificial Sequence
  mRNA product Design i-3 (hSL-A100) comprising derived and/or modified sequence from LASV(GA391;Clade III)__CAA36645__GPCmut1 (opt1)
aggagaaagcuuaccaugggccagaucgugaccuucuuccaggaggucccccacgugaucgaggaggugaugaacaucguccugaucgcccucagcauccuggccauccugaaggggcucuacaacguggcgaccugcggccugaucgggcuggugacguuccuccugcuguccggccgcagcugcucccucaucuacaaggggaccuacgagcugcagacccuggagcucaacauggagacccugaacaugacgaugccgcugagcugcaccaagaacaacucccaccacuacauccgggucggcaacgagaccggccucgagcugacccugacgaacaccagcauccucaaccacaaguucugcaaccuguccgacgcccacaagcgcaaccuguacgaccacagccucauguccaucaucagcaccuuccaccuguccauccccaacuucaaccaguacgaggccaugagcugcgacuucaacgggggcaagaucaccgugcaguacaaccugucccacagcuucgccguggacgccgcggggcacugcggcacgcucgccaacgggguccugcagaccuucaugcggauggccuggggcggcuccuacaucgcccuggacagcgggugcggcaacugggacugcaucaugaccuccuaccaguaccucaucauccagaacaccacgugggacgaccacugccaguucagccggcccucccccaucggguaccugggccugcucagccagcgcacccgggacaucuacaucagccgccggcgccggggcaccuucaccuggacgcucuccgacagcgaggggaacgagaccccgggcggguacugccugacccgcuggaugcugaucgaggcggagcucaagugcuucggcaacaccgccguggccaagugcaacgagaagcacgacgaggaguucugcgacaugcugcggcuguucgacuucaacaagcaggccauccgccggcucaagacgcccgcccagauguccauccagcugaucaacaaggcggugaacgcccugaucaacgaccagcucaucaugaagaaccaccuccgcgacaucaugugcauccccuacugcaacuacagccgguacugguaccugaaccacaccuccaccggcaagaccagccugccccgcugcuggcugaucuccaacggcagcuaccugaacgagacgaaguucuccgacgacaucgagcagcaggccgacaacaugaucaccgagaugcuccagaaggaguacaucgaccggcaggggaagacgccccugggccuggucgaccuguucguguucagcaccuccuucuaccucaucagcaucuuccugcaccuggugaagaucccgacccaccgccacaucgucgggaagcccugccccaagccccaccggcucaaccacaugggcaucugcuccugcgggcuguacaagcagccgggcgugcccgugcgcuggaagcggugaggacuaguuauaagacugacuagcccgaugggccucccaacgggcccuccuccccuccuugcaccgagauuaaucaaaggcucuuuucagagccaccaaaaaaaaaaaaaaaaaaaaaaaaaaaaaaaaaaaaaaaaaaaaaaaaaaaaaaaaaaaaaaaaaaaaaaaaaaaaaaaaaaaaaaaaaaaaaaaaaaaaa

SEQ ID NO: 16492 - RNA, 1689 nt, Artificial Sequence
  mRNA product Design i-3 (hSL-A100) comprising derived and/or modified sequence from LASV(AV;Clade V)__CCA30314__GPCmut1 (opt1)
aggagaaagcuuaccaugggccagaucgugaccuucuuccaggaggucccccacgugaucgaggaggugaugaacaucguccugaucgcccucagcauccuggccgugcugaaggggcucuacaacaucgcgaccugcggccugaucgggcugaucacguuccuccugcugugcggccgcuccugcagcuccaaccucuacaaggggguguacgagcugcagagccuggaccucaacauggagacccugaacaugaccaugccgcuguccugcaccaagaacaacagccaccacuacauccgggucggcaacgacacgggccucgagcugacccugaccaacaccuccauccucaaccacaaguucugcaaccugagcgacgcccacaagaaggaccuguacgaccacgcccucauguccaucaucagcacguuccaccuguccauccccaacuucaaccaguacgaggccaugagcugcgacuucaacgggggcaagaucuccgugcaguacaaccugagccacuccuacgccaucgacgcggccaaccacugcgggaccguggccaacggcauccuccagaccuucaugcgcauggccuggggcgggagcuacaucgcgcuggacuccggcugcgggaacugggacugcaucaugaccagcuaccaguaccugaucauccagaacacgaccugggagaaccacugccaguucucccgccccagccccaucggcuaccucgggcugcugagccagcggacccgcgacaucuacaucucccggcgccgccggggcaccuucacguggacccugagcgacuccgagggcaacgccacccccgggggcuacugccucacccgguggaugcugaucgaggccgagcugaagugcuucgggaacacggccgucgccaagugcaacgagaagcacgacgaggaguucugcgacaugcuccgccuguucgacuucaacaagcaggcgaucagccggcugaagucccccgcccagaugagcauccagcucaucaacaaggccgugaacgcccugaucaacgaccagcugaucaugaagaaccaccuccgcgacaucaugugcauccccuacugcaacuacuccaaguacugguaccugaaccacaccaucaccgggaagaccagccugcccaagugcuggcucguguccaacggcagcuaccugaacgagacgcacuucuccgacgacaucgagcagcaggccgacaacaugaucaccgagaugcugcagaaggaguacauggagcggcagggcaagaccccgcucgggcuggucgaccuguucguguucagcaccuccuucuaccugaucagcaucuuccuccgccuggugaagaucccgacgcaccggcacaucgucggcaagcccugccccaagccccaccgccugaaccacauggggaucugcuccugcggccucuacaagcagccgggggugcccgugcgguggaagcgcugaggacuaguuauaagacugacuagcccgaugggccucccaacgggcccuccuccccuccuugcaccgagauuaaucaaaggcucuuuucagagccaccaaaaaaaaaaaaaaaaaaaaaaaaaaaaaaaaaaaaaaaaaaaaaaaaaaaaaaaaaaaaaaaaaaaaaaaaaaaaaaaaaaaaaaaaaaaaaaaaaaaaa

SEQ ID NO: 16493 - RNA, 1686 nt, Artificial Sequence
  mRNA product Design i-3 (hSL-A100) comprising derived and/or modified sequence from LASV(Togo/2016/7082;Clade VI)__AMR44577__GPCmut1 (opt1)
aggagaaagcuuaccaugggccagaucaucaccuucuuccaggaggugccccacgucaucgaggaggugaugaacaucgugcugaucgcccucagccugcuggccauccucaagggggucuacaacguggcgaccugcggcaucaucgggcuggugacguuccuguuccucugcggccgcuccugcagccugaucuacaagggguccuacgagcugcagacccucgagcugaacauggagacccugaacaugaccaugccgcucagcugcacgaagaacuccagccaccacuacauccgggucggcaacgagaccggccuggagcugacccucaccaacacguccaucaucaaccacaaguucugcaaccugagcgacgcccacaagcgcaaccuguacgaccacgcccucauguccauccugagcaccuuccaccuguccauccccaacuucaaccaguacgaggccaugagcugcgacuucaacgggggcaagaucuccgugcaguacaaccucagccacgccuacgcgguggacgccgccgagcacugcgggaccgucgccaacggcgugcugcagaccuucaugcggauggcguggggcggguccuacaucgcccuggacagcggcugcgggaacugggacugcaucaugacguccuaccaguaccucaucauccagaacaccaccugggaggaccacugccaguucagccggcccucccccaucggcuaccuggggcugcucagccagcgcacccgggacaucuacaucagccgccggcgccggggcacguucaccuggacccucuccgacagcgagggcaacgagacccccgggggcuacugccugacgcgcuggaugcugaucgaggccgagcucaagugcuucgggaacaccgccguggccaagugcaacgagaagcacgacgaggaguucugcgacaugcugcggcuguucgacuucaacaagcaggcgauccagcgccucaagucccccgcccagaugagcauccagcugaucaacaaggccgucaacgcccugaucaacgaccagcucaucaugaagaaccaccuccgggacaugaugugcauccccuacugcaacuacuccaaguacugguaccugaaccacaccagcuccgggcgcaccagccugcccaagugcuggcugguguccaacggcagcuaccugaacgagacgcacuucuccgacgacaucgagcagcaggccgacaacaugaucaccgagaugcuccagaaggaguacaucgaccggcagggcaagaccccgcuggggcugguggaccucuucgucuucagcaccuccuucuaccugaucagcaucuuccugcaccugaucaagaucccgacgcaccgccacaucgugggcaagcccugccccaagccccaccggcucaaccacauggggaucugcuccugcggccuguacaagcagccgggggugcccacccgcuggaagcggugaggacuaguuauaagacugacuagcccgaugggccucccaacgggcccuccuccccuccuugcaccgagauuaaucaaaggcucuuuucagagccaccaaaaaaaaaaaaaaaaaaaaaaaaaaaaaaaaaaaaaaaaaaaaaaaaaaaaaaaaaaaaaaaaaaaaaaaaaaaaaaaaaaaaaaaaaaaaaaaaaaaaa

SEQ ID NO: 16494 - RNA, 1686 nt, Artificial Sequence
  mRNA product Design i-3 (hSL-A100) comprising derived and/or modified sequence from LASV(KAK-428;Clade n.d. (VII))__ANH09740__GPCmut1 (opt1)
aggagaaagcuuaccaugggccagaucgugaccuucuuccaggaggucccccacgugaucgaggaggugaugaacaucguccugaucgcccucagccugcuggccauccucaaggggcuguacaacuucgcgaccugcggcgugaucgggcugaucacguuccuccugcugugcggccgcuccugcagcgccaccuacaaggggcaguacgagcuccagacccuggagcugaacauggagucccucaacaugaccaugccgcugagcugcacgaagaacaacucccaccacuacauccgggccggcaacaacaccggccuggagcucacccugaccaacacgagcaucaucucccacaaguucugcaaccugagcgacgcccacaagaagaaccucuacgaccacacccugauguccaucaucaccaccuuccaccugagcauccccaacuucaaccaguacgaggccauguccugcgacuucaacgggggcaagaucagcauccaguacaaccucucccacagcuacgcgggggacgccgcccagcacugcggcacgguggccaacgggguccugcagaccuucaugcgcauggcguggggcggcuccuaccuggcccucgacagcgggugccgcggcugggacugcaucaucuccagcuaccaguaccugaucauccagaacaccaccugggacgaccacugccaguucucccggcccagccccaucggguaccugggcuucgugagccagaagacgcgcgacaucuacaucucccggcgccgccggggcaccuucaccuggacccugagcgacuccgaggggcacgacaugccgggcggguacugccucacgcgguggaugcugaucgaggccgaccugaagugcuucggcaacaccgccguggccaagugcaacgagaagcacgacgaggaguucugcgacauguggcgccucuucgacuucaacaagcaggcgauccagcggcugaaggcccccgcccagaugaacauccagcugaucaacaaggccgucaacgcccucaucaacgaccagcugaugaugaagaaccaccuccgcgacaucaugugcauccccuacugcaacuacagcaaguucugguaccugaacaacaccaccacgggccggaccucccugccccgcugcuggcugaucagcaacggcuccuaccucaacgagacccacuucagcgacgacaucgagcagcaggcggacaacaugaucaccgagaugcugcagaaggaguacauggaccggcaggggaagacgccccugggccucguggaccuguucguguucuccaccagcuucuaccugaucaccaucuuccuccaccuggucaagaucccgacccaccgccacaucguggggaagcccugccccaagccccaccggcugaaccacaugggcaucugcuccugcgggcuguacaagcagccgggcgugcccguccgcuggaagcggugaggacuaguuauaagacugacuagcccgaugggccucccaacgggcccuccuccccuccuugcaccgagauuaaucaaaggcucuuuucagagccaccaaaaaaaaaaaaaaaaaaaaaaaaaaaaaaaaaaaaaaaaaaaaaaaaaaaaaaaaaaaaaaaaaaaaaaaaaaaaaaaaaaaaaaaaaaaaaaaaaaaaa

SEQ ID NO: 16495 - RNA, 1686 nt, Artificial Sequence; identical to SEQ ID NO: 16489
  mRNA product Design i-3 (hSL-A100) comprising derived and/or modified sequence from LASV(Pinneo-NIG-1969;Clade I)__AIT17836__GPCmut1 (opt1)

SEQ ID NO: 16496 - RNA, 1686 nt, Artificial Sequence
  mRNA product Design i-3 (hSL-A100) comprising derived and/or modified sequence from LASV(ISTH0009-NIG-2011;Clade II)__AIT17404__GPCmut1 (opt1)
aggagaaagcuuaccaugggccagaucaucaccuucuuccaggaggugccccacgucaucgaggaggugaugaacaucgugcugaucgcccucagccugcuggccauccucaaggggaucuacaacgucgcgaccugcggccuguucgggcugguguccuuccuccugcugugcggccgcagcugcuccacgaccuacaaggggguguacgagcuccagacccuggagcuggacauggccagccucaacaugaccaugccgcuguccugcacgaagaacaacagccaccacuacaucauggucggcaacgagaccggccuggagcucacccugaccaacacguccaucaucaaccacaaguucugcaaccugagcgacgcccacaagaagaaccucuacgaccacgcccugauguccaucaucagcaccuuccaccuguccauccccaacuucaaccaguacgaggccaugagcugcgacuucaacgggggcaagaucuccgugcaguacaaccucagccacgcguacgccguggacgccgccaaccacugcgggaccaucgcgaacggcguccugcagaccuucaugcggauggccuggggcggguccuacaucgcccuggacagcggcugcggguccugggacugcaucaugacgagcuaccaguaccucaucauccagaacaccaccugggaggaccacugccaguucucccgccccagccccaucggcuaccuggggcugcucagccagcggacccgcgacaucuacaucucccggcgccgccggggcacguucaccuggacccucagcgacuccgagggcaacgagacccccgggggcuacugccugacgcgguggaugcugaucgaggccgagcucaagugcuucgggaacaccgccguggcgaagugcaacgagaagcacgacgaggaguucugcgacaugcugcgccuguucgacuucaacaagcaggccauccggcgccucaagacccccgcccagaugagcauccagcugaucaacaaggccgugaacgcccugaucaacgaccagcucaucaugaagaaccaccuccgggacaucaugugcaucccguacugcaacuacuccaaguacugguaccugaaccacaccgucacggggaagaccagccugccccgcugcuggcugguguccaacggcagcuaccugaacgagacccacuucuccgacgacaucgagcagcaggcggacaacaugaucaccgagcuccugcagaaggaguacauggaccggcagggcaagacgccccuggggcucguggaccuguucgucuucagcaccuccuucuaccugaucagcaucuuccugcaccucaucaagaucccgacccaccgccacaucaccggcaagcccugccccaagccccaccggcugaaccacauggggaucugcuccugcggccuguacaagcacccgggggugcccgugaaguggaagcgcugaggacuaguuauaagacugacuagcccgaugggccucccaacgggcccuccuccccuccuugcaccgagauuaaucaaaggcucuuuucagagccaccaaaaaaaaaaaaaaaaaaaaaaaaaaaaaaaaaaaaaaaaaaaaaaaaaaaaaaaaaaaaaaaaaaaaaaaaaaaaaaaaaaaaaaaaaaaaaaaaaaaaa

SEQ ID NO: 16497 - RNA, 1686 nt, Artificial Sequence
  mRNA product Design i-3 (hSL-A100) comprising derived and/or modified sequence from LASV(ISTH2010-NIG-2012;Clade II)__AIT17482__GPCmut1 (opt1)
aggagaaagcuuaccaugggccagaucaucaccuucuuccaggaggugccccacgucaucgaggaggugaugaacaucgugcugaucgcccucagccugcuggccauccucaaggggaucuacaacgucgcgaccugcggccuguucgggcugguguccuuccuccugcugugcggccgcagcugcuccacgaccuacaaggggguguacgagcuccagacccuggagcuggacauggccagccucaacaugaccaugccgcuguccugcacgaagaacaacagccaccacuacaucauggucggcaacgagaccggccuggagcucacccugaccaacacguccaucaucaaccacaaguucugcaaccugagcgacgcccacaagaagaaccucuacgaccacgcccugauguccaucaucagcaccuuccaccuguccauccccaacuucaaccaguacgaggccaugagcugcgacuucaacgggggcaagaucuccgugcaguacaaccucagccacgcguacgccguggacgccgccaaccacugcgggaccaucgcgaacggcguccugcagaccuucaugcggauggccuggggcggguccuacaucgcccuggacagcggcugcggguccugggacugcaucaugacgagcuaccaguaccucaucauccagaacaucaccugggaggaccacugccaguucucccgccccagccccaucggcuaccuggggcugcucagccagcggacccgcgacaucuacaucucccggcgccgccggggcaccuucacguggacccucagcgacuccgagggcaacgagacccccgggggcuacugccugacccgguggaugcugaucgaggccgagcucaagugcuucgggaacacggccguggcgaagugcaacgagaagcacgacgaggaguucugcgacaugcugcgccuguucgacuucaacaagcaggccauccggcgccucaagacccccgcccagaugagcauccagcugaucaacaaggccgugaacgcccugaucaacgaccagcucaucaugaagaaccaccuccgggacaucaugugcauccccuacugcaacuacuccaaguacugguaccugaaccacaccgucaccgggaagacgagccugccccgcugcuggcugguguccaacggcagcuaccugaacgagacccacuucuccgacgacaucgagcagcaggcggacaacaugaucaccgagcuccugcagaaggaguacaucgaccggcagggcaagaccccgcuggggcucguggaccuguucgucuucagcacguccuucuaccugaucagcaucuuccugcaccucgugaagaucccgacccaccgccacguggucggcaagcccugccccaagccccaccggcugaaccacauggggaucugcuccugcggccuguacaagcacccgggggugcccgugaaguggaagcgcugaggacuaguuauaagacugacuagcccgaugggccucccaacgggcccuccuccccuccuugcaccgagauuaaucaaaggcucuuuucagagccaccaaaaaaaaaaaaaaaaaaaaaaaaaaaaaaaaaaaaaaaaaaaaaaaaaaaaaaaaaaaaaaaaaaaaaaaaaaaaaaaaaaaaaaaaaaaaaaaaaaaaa

SEQ ID NO: 16498 - RNA, 1686 nt, Artificial Sequence
  mRNA product Design i-3 (hSL-A100) comprising derived and/or modified sequence from LASV(Lassa virus/H.sapiens-wt/NGA/2015/ISTH_0543;Clade II)__AVO03639__GPCmut1 (opt1)
aggagaaagcuuaccaugggccagaucaucaccuucuuccaggaggugccccacgucaucgaggaggugaugaacaucgugcugaucgcccucagccugcuggccauccucaaggggaucuacaacgucgcgaccugcggccuguucgggcugguguccuuccuccugcugugcggccgcagcugcuccacgaccuacaaggggguguacgagcuccagacccuggagcuggacauggccaaccucaacaugaccaugccgcugagcugcacgaagaacaacucccaccacuacaucauggucggcaacgagaccggccuggagcucacccugaccaacacgagcaucaucaaccacaaguucugcaaccuguccgacgcccacaagaagaaccucuacgaccacgcccugaugagcaucaucuccaccuuccaccugagcauccccaacuucaaccaguacgaggccauguccugcgacuucaacgggggcaagaucagcgugcaguacaaccucucccacaccuacgcgguggacgccgccaaccacugcgggaccaucgccaacggcguccugcagacguucaugcggauggcguggggcgggagcuacaucgcccuggacuccggcugcgggagcugggacugcaucaugaccuccuaccaguaccucgugauccagaacaccaccugggaggaccacugccaguucagccgccccucccccaucggcuaccuggggcugcucagccagcggacgcgcgacaucuacaucagccggcgccgccggggcaccuucaccuggacccucuccgacagcgagggcaacgagacgcccgggggcuacugccugacccgguggaugcugaucgaggccgagcucaagugcuucgggaacaccgccguggccaagugcaacgagaagcacgacgaggaguucugcgacaugcugcgccuguucgacuucaacaagcaggcgauccggcgccucaagacccccgcccagauguccauccagcugaucaacaaggccgucaacgcccugaucaacgaccagcucaucaugaagaaccaccuccgggacaucaugugcauccccuacugcaacuacagcaaguacugguaccugaaccacacggugaccgggaagaccucccugccccgcugcuggcuggugagcaacggcuccuaccugaacgagacccacuucagcgacgacaucgagcagcaggccgacaacaugaucacggagcuccugcagaaggaguacaucgaccggcagggcaagaccccgcuggggcucgucgaccuguucguguucuccaccagcuucuaccugaucuccaucuuccugcaccucgugaagaucccgacccaccgccacaucacgggcaagcccugccccaagccccaccggcugaaccacauggggaucugcagcugcggccuguacaagcacccggggguccccgugaaguggaagcgcugaggacuaguuauaagacugacuagcccgaugggccucccaacgggcccuccuccccuccuugcaccgagauuaaucaaaggcucuuuucagagccaccaaaaaaaaaaaaaaaaaaaaaaaaaaaaaaaaaaaaaaaaaaaaaaaaaaaaaaaaaaaaaaaaaaaaaaaaaaaaaaaaaaaaaaaaaaaaaaaaaaaaa

SEQ ID NO: 16499 - RNA, 1686 nt, Artificial Sequence
  mRNA product Design i-3 (hSL-A100) comprising derived and/or modified sequence from LASV(Lassa virus/H.sapiens-wt/NGA/2016/ISTH_0009;Clade II)__AVO03571__GPCmut1 (opt1)
aggagaaagcuuaccaugggccagaucaucaccuucuuccaggaggugccccacgucaucgaggaggugaugaacaucgugcugaucgcccucagccugcuggccauccucaaggggaucuacaacgucgcgaccugcggccugcuggggcucguguccuuccugcugcucugcggccgcagcugcuccacgaccuacaaggggguguacgagcugcagacccuggagcucgacauggccagccugaacaugaccaugccgcuguccugcacgaagaacaacagccaccacuacaucauggucggcaacgagaccggccucgagcugacccugaccaacacguccaucaucaaccacaaguucugcaaccucagcgacgcccacaagaagaaccuguacgaccacgcccugauguccaucaucagcaccuuccaccucuccauccccaacuucaaccaguacgaggccaugagcugcgacuucaacgggggccggaucuccgugcaguacaaccugagccacuccuacgcgguggacgccgccaaccacugcgggaccaucgccaacggcguccugcagaccuucaugcgcauggcguggggcgggagcuacaucgcccucgacuccggcugcgggagcugggacugcaucaugacguccuaccaguaccugaucauccagaacaccaccugggaggaccacugccaguucagccggcccagccccaucggcuaccuggggcuccugucccagcgcacccgggacaucuacaucagccgccggcgccggggcacguucaccuggacccuguccgacagcgagggcaacgagacccccgggggcuacugccugacgcgcuggaugcucaucgaggccgagcugaagugcuucgggaacaccgccguggccaagugcaacgagaagcacgacgaggaguucugcgacaugcugcggcuguucgacuucaacaagcaggcgauccgccggcugaagacccccgcccagauguccauccagcugaucaacaaggccgugaacgcccucaucaacgaccagcugaucaugaagaaccaccuccgcgacaucaugugcaucccguacugcaacuacagcaaguacugguaccucaaccacaccgucacggggaagaccucccugccccggugcuggcuggugagcaacggcuccuaccucaacgagacccacuucagcgacgacaucgagcagcaggccgacaacaugaucaccgagcugcugcagaaggaguacaucgaccgccagggcaagacgccccucgggcugguggaccuguucgucuucuccaccagcuucuaccugaucuccaucuuccuccaccuggugaagaucccgacccaccggcacaucaccggcaagcccugccccaagccccaccgccugaaccacauggggaucugcagcugcggccucuacaaccacccgggggugcccgucaaguggaagcggugaggacuaguuauaagacugacuagcccgaugggccucccaacgggcccuccuccccuccuugcaccgagauuaaucaaaggcucuuuucagagccaccaaaaaaaaaaaaaaaaaaaaaaaaaaaaaaaaaaaaaaaaaaaaaaaaaaaaaaaaaaaaaaaaaaaaaaaaaaaaaaaaaaaaaaaaaaaaaaaaaaaaa

SEQ ID NO: 16500 - RNA, 1686 nt, Artificial Sequence
  mRNA product Design i-3 (hSL-A100) comprising derived and/or modified sequence from LASV(Lassa virus/H.sapiens-wt/NGA/2016/ISTH_0017;Clade II)__AVO03567__GPCmut1 (opt1)
aggagaaagcuuaccaugggccagaucaucaccuucuuccaggaggugccccacgucaucgaggaggugaugaacaucgugcugaucgcccucagccugcuggccauccucaaggggaucuacaacgucgcgaccugcggccuguucgggcugguguccuuccuccugcugugcggccgcagcugcuccacgaccuacaaggggguguacgagcuccagacccuggagcuggacauggccagccucaacaugaccaugccgcuguccugcacgaagaacaacagccaccacuacaucauggucggcaacgagaccggccuggagcucacccugaccaacacguccaucaucaaccacaaguucugcaaccugagcgacgcccacaagaagaaccucuacgaccacgcccugauguccaucaucagcaccuuccaccuguccauccccaacuucaaccaguacgaggccaugagcugcgacuucaacgggggcaagaucuccgugcaguacaaccucagccacaccuacgcgaucgacgccgccaaccacugcgggaccaucgccaacggcgugcugcagacguucaugcggauggcguggggcggguccuacaucgcccuggacagcggcugcggguccugggacugcaucaugaccagcuaccaguaccucaucauccagaacaccaccugggaggaccacugccaguucucccgccccagccccaucggcuaccuggggcugcucagccagcggacgcgcgacaucuacaucucccggcgccgccggggcaccuucaccuggacccucagcgacuccgagggcaacgagacgcccgggggcuacugccugacccgguggaugcugaucgaggccgagcucaagugcuucgggaacaccgccgucgccaagugcaacgagaagcacgacgaggaguucugcgacaugcugcgccuguucgacuucaacaagcaggcgauccggcgccucaagacccccgcccagaugagcauccagcugaucaacaaggccgugaacgcccugaucaacgaccagcucaucaugaagaaccaccuccgggacaucaugugcauccccuacugcaacuacuccaaguacugguaccugaaccacacggugaccgggaagaccagccugccccgcugcuggcuggucuccaacggcagcuaccugaacgagacccacuucuccgacgacaucgagcagcaggccgacaacaugaucacggagcuccugcagaaggaguacauggaccggcagggcaagaccccgcuggggcucguggaccuguucguguucagcaccuccuucuaccugaucagcaucuuccugcaccucguccgcaucccgacccaccggcacgugaucggcaagcccugccccaagccccaccgccugaaccacauggggaucugcuccugcggccuguacaagcacccgggggugcccgucaaguggaagcggugaggacuaguuauaagacugacuagcccgaugggccucccaacgggcccuccuccccuccuugcaccgagauuaaucaaaggcucuuuucagagccaccaaaaaaaaaaaaaaaaaaaaaaaaaaaaaaaaaaaaaaaaaaaaaaaaaaaaaaaaaaaaaaaaaaaaaaaaaaaaaaaaaaaaaaaaaaaaaaaaaaaaa

SEQ ID NO: 16501 - RNA, 1686 nt, Artificial Sequence
  mRNA product Design i-3 (hSL-A100) comprising derived and/or modified sequence from LASV(Lassa virus/H.sapiens-wt/NGA/2018/ISTH_0959;Clade II)__AVV65099__GPCmut1 (opt1)
aggagaaagcuuaccaugggccagaucaucaccuucuuccaggaggugccccacgucaucgaggaggugaugaacaucgugcugaucgcccucagccugcuggccauccucaaggggaucuacaacgucgugaccugcggccuguucgggcugguguccuuccuccugcugugcggccgcagcugcuccacgaccuacaagggggucuacgagcuccagacccuggagcuggacauggcgagccucaacaugaccaugccgcuguccugcacgaagaacaacagccaccacuacaucauggugggcaacgagaccggccuggagcucacccugaccaacacguccaucaucaaccacaaguucugcaaccugagcgacgcccacaagaagaaccucuacgaccacgcccugauguccaucaucagcaccuuccaccuguccauccccaacuucaaccaguacgaggccaugagcugcgacuucaacgggggcaagaucuccgugcaguacaaccucagccacgccuacgcgaucgacgccgccaaccacugcgggaccaucgccaacggcguccugcagaccuucaugcggauggcguggggcggguccuacaucgcccuggacagcggcugcggguccugggacugcaucaugacgagcuaccaguaccucaucauccagaacaccaccugggaggaccacugccaguucucccgccccagccccaucggcuaccuggggcugcucagccagcggacccgcgacaucuacaucucccggcgccgccggggcacguucaccuggacccucagcgacuccgagggcaacgagacccccgggggcuacugccugacgcgguggaugcugaucgaggccgagcucaagugcuucgggaacaccgccguggccaagugcaacgagaagcacgacgaggaguucugcgacaugcugcgccuguucgacuucaacaagcaggcgauccggcgccucaagacccccgcccagaugagcauccagcugaucaacaaggccgugaacgcccugaucaacgaccagcucaucaugaagaaccaccuccgggacaucaugugcaucccguacugcaacuacuccaaguacugguaccugaaccacaccgucacggggaagaccagccugccccgcugcuggcugguguccaacggcagcuaccugaacgagacccacuucuccgacgacaucgagcagcaggccgacaacaugaucaccgagcuccugcagaaggaguacaucgaccggcagggcaagacgccccuggggcucguggaccuguucgucuucagcaccuccuucuaccugaucagcaucuuccugcaccucgugaagaucccgacccaccgccacgugaucggcaagcccugccccaagccccaccggcugaaccacauggggaucugcuccugcggccuguacaagcacccggggguccccgugaaguggaagcgcugaggacuaguuauaagacugacuagcccgaugggccucccaacgggcccuccuccccuccuugcaccgagauuaaucaaaggcucuuuucagagccaccaaaaaaaaaaaaaaaaaaaaaaaaaaaaaaaaaaaaaaaaaaaaaaaaaaaaaaaaaaaaaaaaaaaaaaaaaaaaaaaaaaaaaaaaaaaaaaaaaaaaa

SEQ ID NO: 16502 - RNA, 1686 nt, Artificial Sequence
  mRNA product Design i-3 (hSL-A100) comprising derived and/or modified sequence from LASV(LASV003-NIG-2008;Clade II)__AIT17580__GPCmut1 (opt1)
aggagaaagcuuaccaugggccagaucaucaccuucuuccaggaggugccccacgucaucgaggaggugaugaacaucgugcugaucgcccucagccugcuggccauccucaaggggaucuacaacgucgcgaccugcggccuguucgggcugguguccuuccuccugcugugcggccgcagcugcuccacgaccuacaaggggguguacgagcuccagacccuggagcuggacauggccagccucaacaugaccaugccgcuguccugcacgaagaacaacagccaccacuacaucauggucggcaacgagaccggccuggagcucacccugaccaacacguccaucaucaaccacaaguucugcaaccugagcgacgcccacaagaagaaccucuacgaccacgcccugauguccaucaucagcaccuuccaccuguccauccccaacuucaaccaguacgaggccaugagcugcgacuucaacgggggcaagaucuccgugcaguacaaccucagccacaccuacgcgguggacgccgccaaccacugcgggaccaucgccaacggcguccugcagacguucaugcggauggcguggggcggguccuacaucgcccuggacagcggcugcggguccugggacugcaucaugaccagcuaccaguaccucaucauccagaacaccaccugggaggaccacugccaguucucccgccccagccccaucggcuaccuggggcugcucagccagcggacgcgcgacaucuacaucucccggcgccgccggggcaccuucaccuggacccucagcgacuccgagagcaacgagacgccgggcggguacugccugacccgguggaugcugaucgaggccgagcucaagugcuucggcaacaccgccguggccaagugcaacgagaagcacgacgaggaguucugcgacaugcugcgccuguucgacuucaacaagcaggcgauccggcgccucaaggcccccgcccagauguccauccagcugaucaacaaggccgugaacgcccugaucaacgaccagcucaucaugaagaaccaccuccgggacaucaugugcauccccuacugcaacuacagcaaguacugguaccugaaccacaccgucacgggccgcaccucccugccccggugcuggcuggugagcaacggguccuaccugaacgagacccacuucagcgacgacaucgagcagcaggcggacaacaugaucaccgagcuccugcagaaggaguacauggaccgccagggcaagacgccccugggccucguggaccuguucgucuucuccaccagcuucuaccugaucuccaucuuccugcaccucgugaagaucccgacccaccggcacgugaucgggaagcccugccccaagccccaccgccugaaccacaugggcaucugcagcugcgggcuguacaagcacccgggcguccccgugaaguggaagcggugaggacuaguuauaagacugacuagcccgaugggccucccaacgggcccuccuccccuccuugcaccgagauuaaucaaaggcucuuuucagagccaccaaaaaaaaaaaaaaaaaaaaaaaaaaaaaaaaaaaaaaaaaaaaaaaaaaaaaaaaaaaaaaaaaaaaaaaaaaaaaaaaaaaaaaaaaaaaaaaaaaaaa

SEQ ID NO: 16503 - RNA, 1686 nt, Artificial Sequence
  mRNA product Design i-3 (hSL-A100) comprising derived and/or modified sequence from LASV(LASV035-NIG-2009;Clade II)__AIT17588__GPCmut1 (opt1)
aggagaaagcuuaccaugggccagaucaucaccuucuuccaggaggugccccacgucaucgaggaggugaugaacaucgugcugaucgcccucagccugcuggccauccucaaggggaucuacaacgucgcgaccugcggccuguucgggcugguguccuuccuccugcugugcggccgcagcugcuccacgaccuacaaggggguguacgagcuccagacccuggagcuggacauggccagccucaacaugaccaugccgcuguccugcacgaagaacaacagccaccacuacaucauggucggcaacgagaccggccuggagcucacccugaccaacacguccaucaucaaccacaaguucugcaaccugagcgacgcccacaagaagaaccucuacgaccacgcccugauguccaucaucagcaccuuccaccuguccauccccaacuucaaccaguacgaggccaugagcugcgacuucaacgggggcaagaucuccgugcaguacaaccucagccacgcguacgccguggacgccgccaaccacugcgggaccaucgcgaacggcguccugcagaccuucaugcggauggccuggggcggguccuacaucgcccuggacagcggcugcggguccugggacugcaucaugacgagcuaccaguaccucaucauccagaacaccaccugggaggaccacugccaguucucccgccccagccccaucggcuaccuggggcugcucagccagcggacccgcgacaucuacaucucccggcgccgccggggcacguucaccuggacccucagcgacuccgagggcaacgagacccccgggggcuacugccugacgcgguggaugcugaucgaggccgagcucaagugcuucgggaacaccgccguggcgaagugcaacgagaagcacgacgaggaguucugcgacaugcugcgccuguucgacuucaacaagcaggccauccggcgccucaaggcccccgcccagaugagcauccagcugaucaacaaggccgugaacgcgcugaucaacgaccagcucaucaugaagaaccaccuccgggacaucaugugcauccccuacugcaacuacuccaaguacugguaccugaaccacaccgucaccgggaagacgagccugccccgcugcuggcugguguccaacggcagcuaccugaacgagacccacuucuccgacgacaucgagcagcaggccgacaacaugaucaccgagcuccugcagaaggaguacaucgaccggcagggcaagaccccgcuggggcucguggaccuguucgucuucagcacguccuucuaccugaucagcaucuuccugcaccucgugaagaucccgacccaccgccacgugaucggcaagcccugccccaagccccaccggcugaaccacauggggaucugcuccugcggccuguacaagcacccggggguccccgugaaguggaagcgcugaggacuaguuauaagacugacuagcccgaugggccucccaacgggcccuccuccccuccuugcaccgagauuaaucaaaggcucuuuucagagccaccaaaaaaaaaaaaaaaaaaaaaaaaaaaaaaaaaaaaaaaaaaaaaaaaaaaaaaaaaaaaaaaaaaaaaaaaaaaaaaaaaaaaaaaaaaaaaaaaaaaaa

SEQ ID NO: 16504 - RNA, 1686 nt, Artificial Sequence
  mRNA product Design i-3 (hSL-A100) comprising derived and/or modified sequence from LASV(LASV1000-NIG-2009;Clade II)__AIT17782__GPCmut1 (opt1)
aggagaaagcuuaccaugggccagaucaucaccuucuuccaggaggugccccacgucaucgaggaggugaugaacaucgugcugaucgcccucagccugcuggccauccucaaggggaucuacaacgucgcgaccugcggccuguucgggcugguguccuuccuccugcugugcggccgcagcugcuccacgaccuacaaggggguguacgagcuccagacccuggagcuggacauggccagccucaacaugaccaugccgcuguccugcacgaagaacaacagccaccacuacaucauggucggcaacgagaccggccuggagcucacccugaccaacacguccaucaucaaccacaaguucugcaaccugagcgacgcccacaagaagaaccucuacgaccacgcccugauguccaucaucagcaccuuccaccuguccauccccaacuucaaccaguacgaggccaugagcugcgacuucaacgggggcaagaucuccgugcaguacaaccucagccacaccuacgcgguggacgccgccaaccacugcgggaccaucgccaacggcguccugcagacguucaugcggauggcguggggcggguccuacaucgcccuggacagcggcugcggguccugggacugcaucaugaccagcuaccaguaccucaucauccagaacaccaccugggaggaccacugccaguucucccgccccagccccaucggcuaccuggggcugcucagccagcggacgcgcgacaucuacaucucccggcgccgccggggcaccuucaccuggacccucagcgacuccgagggcaacgagacgcccgggggcuacugccugacccgguggaugcugaucgaggccgagcucaagugcuucgggaacaccgccguggccaagugcaacgagaagcacgacgaggaguucugcgacaugcugcgccuguucgacuucaacaagcaggcgaucaagcggcucaagacccccgcccagaugagcauccagcugaucaacaaggccgugaacgcccugaucaacgaccagcucaucaugaagaaccaccuccgcgacaucaugugcauccccuacugcaacuacuccaaguacugguaccugaaccacacggucaccgggaagaccagccugccccggugcuggcugguguccaacggcagcuaccugaacgagacccacuucuccgacgacaucgagcagcaggccgacaacaugaucacggagcuccugcagaaggaguacaucgaccgccagggcaagaccccgcuggggcucguggaccuguucgucuucagcaccuccuucuaccugaucagcaucuuccugcaccucgugaagaucccgacccaccggcacguggucggcaagcccugccccaagccccaccgccugaaccacauggggaucugcuccugcggccuguacaagcacccgggggugcccgugaaguggaagcggugaggacuaguuauaagacugacuagcccgaugggccucccaacgggcccuccuccccuccuugcaccgagauuaaucaaaggcucuuuucagagccaccaaaaaaaaaaaaaaaaaaaaaaaaaaaaaaaaaaaaaaaaaaaaaaaaaaaaaaaaaaaaaaaaaaaaaaaaaaaaaaaaaaaaaaaaaaaaaaaaaaaaa

SEQ ID NO: 16505 - RNA, 1686 nt, Artificial Sequence
  mRNA product Design i-3 (hSL-A100) comprising derived and/or modified sequence from LASV(LASV221-NIG-2010;Clade II)__AIT17624__GPCmut1 (opt1)
aggagaaagcuuaccaugggccagaucaucaccuucuuccaggaggugccccacgucaucgaggaggugaugaacaucgugcugaucgcccucagccugcuggccauccucaaggggaucuacaacgucgcgaccugcggccuguucgggcugguguccuuccuccugcugugcggccgcagcugcuccacgaccuacaaggggguguacgagcuccagacccuggagcuggacauggccagccucaacaugaccaugccgcuguccugcacgaagaacaacagccaccacuacaucauggucggcaacgagaccggccuggagcucacccugaccaacacguccaucaucaaccacaaguucugcaaccugagcgacgcccacaagaagaaccucuacgaccacgcccugauguccaucaucagcaccuuccaccuguccauccccaacuucaaccaguacgaggccaugagcugcgacuucaacgggggcaagaucuccgugcaguacaaccucagccacaccuacgcgaucgacgccgccaaccacugcgggaccaucgccaacggcgugcugcagacguucaugcggauggcguggggcggguccuacaucgcccuggacagcggcugcggguccugggacugcaucaugaccagcuaccaguaccucaucauccagaacaccaccugggaggaccacugccaguucucccgccccagccccaucggcuaccuggggcugcucagccagcggacgcgcgacaucuacaucucccggcgccgccggggcaccuucaccuggacccucagcgacuccgagggcaacgagacgcccgggggcuacugccugacccgguggaugcugaucgaggccgagcucaagugcuucgggaacaccgccgucgccaagugcaacgagaagcacgacgaggaguucugcgacaugcugcgccuguucgacuucaacaagcaggcgauccggcgccucaagacccccgcccagaugagcauccagcugaucaacaaggccgugaacgcccugaucaacgaccagcucaucaugaagaaccaccuccgggacaucaugugcauccccuacugcaacuacuccaaguacugguaccugaaccacacggugaccgggaagaccagccugccccgcugcuggcuggucuccaacggcagcuaccugaacgagacccacuucuccgacgacaucgagcagcaggccgacaacaugaucacggagaugcuccagaaggaguacauggaccggcagggcaagaccccgcuggggcugguggaccucuucguguucagcaccuccuucuaccugaucagcaucuuccugcaccuggucaagaucccgacccaccgccacgugaucggcaagcccugccccaagccccaccggcucaaccacauggggaucugcuccugcggccuguacaagcacccgggggugcccgucaaguggaagcgcugaggacuaguuauaagacugacuagcccgaugggccucccaacgggcccuccuccccuccuugcaccgagauuaaucaaaggcucuuuucagagccaccaaaaaaaaaaaaaaaaaaaaaaaaaaaaaaaaaaaaaaaaaaaaaaaaaaaaaaaaaaaaaaaaaaaaaaaaaaaaaaaaaaaaaaaaaaaaaaaaaaaaa

SEQ ID NO: 16506 - RNA, 1686 nt, Artificial Sequence
  mRNA product Design i-3 (hSL-A100) comprising derived and/or modified sequence from LASV(LASV237-NIG-2010;Clade II)__AIT17638__GPCmut1 (opt1)
aggagaaagcuuaccaugggccagaucaucaccuucuuccaggaggugccccacgucaucgaggaggugaugaacaucgugcugaucgcccucagccugcuggccauccucaaggggaucuacaacgucgcgaccugcggccuguucgggcugguguccuuccuccugcugugcggccgcagcugcuccacgaccuacaaggggguguacgagcuccagacccuggagcuggacauggccagccucaacaugaccaugccgcuguccugcacgaagaacaacagccaccacuacaucauggucggcaacgagaccggccuggagcucacccugaccaacacguccaucaucaaccacaaguucugcaaccugagcgacgcccacaagaaggaccucuacgaccacgcccugauguccaucaucagcaccuuccaccuguccauccccaacuucaaccaguacgaggccaugagcugcgacuucaacgggggcaagaucuccgugcaguacaaccucagccacaccuacgcgguggacgccgccaaccacugcgggaccaucgccaacggcguccugcagacguucaugcggauggcguggggcggguccuacaucgcccuggacagcggcugcggguccugggacugcaucaugaccagcuaccaguaccucaucauccagaacaccaccugggaggaccacugccaguucucccgccccagccccaucggcuaccuggggcugcucagccagcggacgcgcgacaucuacaucucccggcgccgccggggcaccuucaccuggacccucagcgacuccgagggcaacgagacgcccgggggcuacugccugacccgguggaugcugaucgaggccgagcucaagugcuucgggaacaccgccguggccaagugcaacgagaagcacgacgaggaguucugcgacaugcugcgccuguucgacuucaacaagcaggcgauccggcgccucaagacccccgcccagaugagcauccagcugaucaacaaggccgugaacgcccugaucaacgaccagcucaucaugaagaaccaccuccgggacaucaugugcauccccuacugcaacuacuccaaguacugguaccugaaccacacggucaccgggaagaccagccugccccgcugcuggcugguguccaacggcagcuaccugaacgagacccacuucuccgacgacaucgagcagcaggccgacaacaugaucacggagcuccugcagaaggaguacauggaccggcagggcaagaccccgcuggggcucguggaccuguucgucuucagcaccuccuucuaccugaucagcaucuuccugcaccucaucaagaucccgacccaccgccacaucacgggcaagcccugccccaagccccaccggcugaaccacauggggaucugcuccugcggccuguacaagcacccgggggugcccgugaaguggaagcgcugaggacuaguuauaagacugacuagcccgaugggccucccaacgggcccuccuccccuccuugcaccgagauuaaucaaaggcucuuuucagagccaccaaaaaaaaaaaaaaaaaaaaaaaaaaaaaaaaaaaaaaaaaaaaaaaaaaaaaaaaaaaaaaaaaaaaaaaaaaaaaaaaaaaaaaaaaaaaaaaaaaaaa

SEQ ID NO: 16507 - RNA, 1686 nt, Artificial Sequence
  mRNA product Design i-3 (hSL-A100) comprising derived and/or modified sequence from LASV(LASV253-NIG-2011;Clade II)__AIT17670__GPCmut1 (opt1)
aggagaaagcuuaccaugggccagaucaucaccuucuuccaggaggugccccacgucaucgaggaggugaugaacaucgugcugaucgcccucagccugcuggccauccucaaggggaucuacaacgucgcgaccugcggccuguucgggcugguguccuuccuccugcugugcggccgcagcugcuccacgaccuacaaggggguguacgagcuccagacccuggagcuggacauggccagccucaacaugaccaugccgcuguccugcacgaagaacaacagccaccacuacaucauggucggcaacgagaccggccuggagcucacccugaccaacacguccaucaucaaccacaaguucugcaaccugagcgacgcccacaagaagaaccucuacgaccacgcccugauguccaucaucagcaccuuccaccuguccauccccaacuucaaccaguacgaggccaugagcugcgacuucaacgggggcaagaucuccgugcaguacaaccucagccacaccuacgcgguggacgccgccaaccacugcgggaccaucgccaacggcguccugcagacguucaugcggauggcguggggcggguccuacaucgcccuggacagcggcugcggguccugggacugcaucaugaccagcuaccaguaccucaucauccagaacaccaccugggaggaccacugccaguucucccgccccagccccaucggcuaccuggggcugcucagccagcggacgcgcgacaucuacaucucccggcgccgccggggcaccuucaccuggacccucagcgacuccgagggcaacgagacgcccgggggcuacugccugacccgguggaugcugaucgaggccgagcucaagugcuucgggaacaccgccguggccaagugcaacgagaagcacgacgaggaguucugcgacaugcugcgccuguucgacuucaacaagcaggcgauccggcgccucaaggcccccgcccagaugagcauccagcugaucaacaaggccgugaacgcccugaucaacgaccagcucaucaugaagaaccaccuccgggacaucaugugcaucccguacugcaacuacuccaaguacugguaccugaaccacaccgucacggggcgcaccagccugccccggugcuggcugguguccaacggcagcuaccugaacgagacccacuucuccgacgacaucgagcagcaggcggacaacaugaucaccgagcuccugcagaaggaguacaucgaccgccagggcaagacgccccuggggcucguggaccuguucgucuucagcaccuccuucuaccugaucagcaucuuccugcaccucgugaagaucccgacccaccggcacaucaucggcaagcccugccccaagccccaccgccugaaccacauggggaucugcuccugcggccuguacaagcacccgggggugcccgucaaguggaagcggugaggacuaguuauaagacugacuagcccgaugggccucccaacgggcccuccuccccuccuugcaccgagauuaaucaaaggcucuuuucagagccaccaaaaaaaaaaaaaaaaaaaaaaaaaaaaaaaaaaaaaaaaaaaaaaaaaaaaaaaaaaaaaaaaaaaaaaaaaaaaaaaaaaaaaaaaaaaaaaaaaaaaa

SEQ ID NO: 16508 - RNA, 1686 nt, Artificial Sequence
  mRNA product Design i-3 (hSL-A100) comprising derived and/or modified sequence from LASV(LASV254-NIG-2011;Clade II)__AIT17674__GPCmut1 (opt1)
aggagaaagcuuaccaugggccagaucaucaccuucuuccaggaggugccccacgucaucgaggaggugaugaacaucgugcugaucgcccucagccugcuggccauccucaaggggaucuacaacgucgcgaccugcggccuguucgggcugguguccuuccuccugcugugcggccgcagcugcuccacgaccuacaaggggguguacgagcuccagacccuggagcuggacaugaccaaccucaacaugacgaugccgcugagcugcaccaagaacaacucccaccacuacaucauggucggcaacgagaccggccuggagcucacccugacgaacaccagcaucaucaaccacaaguucugcaaccuguccgacgcccacaagaagaaccucuacaaccacgcccugaugagcaucaucuccaccuuccaccugagcauccccaacuucaaccaguacgaggccauguccugcgacuucaacgggggcaagaucagcgugcaguacaaccucucccacagcuacgccguggacgcggccaaccacugcgggaccaucgccaacggcguccugcagacguucaugcggauggccuggggcggguccuacaucgcgcuggacagcggcugcgggaacugggacugcaucaugaccuccuaccaguaccucaucauccagaacaccaccugggaggaccacugccaguucagccgccccucccccaucggcuaccuggggcugcucagccagcggacgcgcgacaucuacaucagccggcgccgccggggcaccuucaccuggacccucuccgacagcgagggcaacgagacgcccgggggcuacugccugacccgguggaugcugaucgaggccgagcucaagugcuucgggaacaccgccguggccaagugcaacgagaagcacgacgaggaguucugcgacaugcugcgccuguucgacuucaacaagcaggccauccggcgccucaagacccccgcgcaggccaacauccagcugaucaacaaggccgugaacgcccugaucaacgaccagcucaucaugaagaaccaccuccgggacaucaugugcauccccuacugcaacuacuccaaguacugguaccugaaccacacggucaccgggaagaccagccugccccgcugcuggcugguguccaacggcagcuaccugaacgagacccacuucuccgacgacaucgagcagcaggccgacaacaugaucacggagcuccugcagaaggaguacauggaccggcagggcaagaccccgcuggggcucguggaccuguucgucuucagcaccuccuucuaccugaucagcaucuuccugcaccucgugaagaucccgacccaccgccacgugaucggcaagcccugccccaagccccaccggcugaaccacauggggaucugcuccugcggccuguacaagcacccggggguccccgugaaguggaagcgcugaggacuaguuauaagacugacuagcccgaugggccucccaacgggcccuccuccccuccuugcaccgagauuaaucaaaggcucuuuucagagccaccaaaaaaaaaaaaaaaaaaaaaaaaaaaaaaaaaaaaaaaaaaaaaaaaaaaaaaaaaaaaaaaaaaaaaaaaaaaaaaaaaaaaaaaaaaaaaaaaaaaaa

SEQ ID NO: 16509 - RNA, 1686 nt, Artificial Sequence
  mRNA product Design i-3 (hSL-A100) comprising derived and/or modified sequence from LASV(Nig08-A19;Clade III)__ADU56618__GPCmut1 (opt1)
aggagaaagcuuaccaugggccagaucgugaccuucuuccaggaggucccccacgugaucgaggaggugaugaacaucguccugaucgcccucagcauccuggccauccugaaggggcucuacaacaucgcgaccugcggccugaucgggcuggugacguuccuccugcuguccggccgcagcugcuccaugaccuacaaggggguguacgagcuccagacccuggagcugaacaugaacacccucaacaugacgaugccgcugagcugcaccaagaacaacucccaccacuacaucauggucggcaacgagaccggccuggagcucacccugacgaacaccagccugcuccaccacaaguucugcaaccuguccgacgcccacaagaagaaccuguacgaccacacccucaugagcaucaucuccaccuuccaccugagcauccccaacuucaaccaguacgaggccauguccugcgacuucaacgggggcaagaucacggugcaguacaaccugagccacuccuacgccaucgacgccgcgaaccacugcgggaccguggccaacggcguccuccagaccuucaugcggauggccuggggcgggagcuacaucgcccuggacuccggcugcgggaagugggacugcaucaugaccagcuaccaguaccugaucauccagaacacgaccugggaggaccacugccaguucucccggcccagccccaucggcuaccucgggcugcugucccagcgcacccgggacaucuacaucagccgccggcgccggggcaccuucacguggacccugagcgacuccgagggcaacgagacccccgggggcuacugccucacccgcuggaugcugaucgaggcggagcugaagugcuucgggaacacggccguggccaagugcaacgagaagcacgacgaggaguucugcgacaugcuccggcuguucgacuucaacaagcaggccauccgccggcugaaggcccccgcgcagaugagcauccagcucaucaacaaggccgugaacgcccugaucaacgaccagcugaucaugaagaaccaccuccgcgacaucaugugcauccccuacugcaacuacuccaaguacugguaccugaaccacaccagcaccgggcggaccucccugccccgcugcuggcucgucagcaacggcuccuaccugaacgagacgcacuucagcgacgacaucgagcagcaggccgacaacaugaucaccgagaugcugcagaaggaguaccucgaccggcagggcaagaccccgcuggggcugguggaccuguucguguucuccaccagcuucuaccucaucuccaucuuccugcaccuggucaagaucccgacgcaccgccacaucgugggcaagcccugccccaagccccaccggcucaaccacauggggaucugcagcugcggccuguacaagcagccgggggugcccguccgcuggaagcggugaggacuaguuauaagacugacuagcccgaugggccucccaacgggcccuccuccccuccuugcaccgagauuaaucaaaggcucuuuucagagccaccaaaaaaaaaaaaaaaaaaaaaaaaaaaaaaaaaaaaaaaaaaaaaaaaaaaaaaaaaaaaaaaaaaaaaaaaaaaaaaaaaaaaaaaaaaaaaaaaaaaaa

SEQ ID NO: 16510 - RNA, 1689 nt, Artificial Sequence
  mRNA product Design i-3 (hSL-A100) comprising derived and/or modified sequence from LASV(G1180-SLE-2010;Clade IV)__AIT17168__GPCmut1 (opt1)
aggagaaagcuuaccaugggccagaucgugaccuucuuccaggaggucccccacgugaucgaggaggugaugaacaucguccugaucgcccucagcauccuggccgugcugaaggggcucuacaacuucgcgaccugcggccugguggggcugcucaccuuccugcugcucugcggccgcuccugcaccgccagccgguacaagggggucuacgagcugcagacccuggagcucaacauggagacccugaacaugacgaugccgcuguccugcaccaagaacaacagccaccacuacaucauggugggcaacgagaccggccucgagcugacccugacgaacaccuccaucaucaaccacaaguucugcaaccucagcgacgcccacaagaagaaccuguacgaccacgcccugauguccaucaucagcaccuuccaccucuccauccccaacuucaaccaguacgaggccaugagcugcgacuucaacgggggcaagaucuccgugcaguacaaccugagccacuccuacgcgggggacgccgccaaccacugcggcaccgucgccaacggggugcugcagacguucaugcgcauggcguggggcggcagcuacaucgcccucgacuccgggugcggcagcugggacugcaucaugaccuccuaccaguaccugaucauccagaacaccaccugggaggaccacugccaguucagccggcccucccccaucggguaccugggccuccugagccagcgcacgcgggacaucuacaucagccgccggcgccggggcaccuucaccuggacccuguccgacagcgaggggaaggacacgccgggcggguacugccugacccgcuggaugcucaucgaggccgagcugaagugcuucggcaacaccgccguggccaagugcaacgagaagcacgacgaggaguucugcgacaugcugcggcuguucgacuucaacaagcaggcgauccagcgccugaaggcccccgcccagauguccauccagcugaucaacaaggccgucaacgcccucaucaacgaccagcugaucaugaagaaccaccuccgggacaucaugugcauccccuacugcaacuacagcaaguacugguaccucaaccacaccacgaccggcaagaccucccugcccaagugcuggcuggugagcaacggcuccuaccucaacgagacccacuucagcgacgacaucgagcagcaggcggacaacaugaucacggagaugcugcagaaggaguacauggagcgccaggggaagacgccccugggccucguggaccuguucgucuucuccaccagcuucuaccugaucuccaucuuccugcaccucgugaagaucccgacccaccggcacaucgugggcaagagcugccccaagccccaccgccugaaccacauggggaucugcuccugcgggcuguacaagcagcccggcgucccggugaaguggaagcggugaggacuaguuauaagacugacuagcccgaugggccucccaacgggcccuccuccccuccuugcaccgagauuaaucaaaggcucuuuucagagccaccaaaaaaaaaaaaaaaaaaaaaaaaaaaaaaaaaaaaaaaaaaaaaaaaaaaaaaaaaaaaaaaaaaaaaaaaaaaaaaaaaaaaaaaaaaaaaaaaaaaaa

SEQ ID NO: 16511 - RNA, 1689 nt, Artificial Sequence
  mRNA product Design i-3 (hSL-A100) comprising derived and/or modified sequence from LASV(G1442-SLE-2011;Clade IV)__AIT17180__GPCmut1 (opt1)
aggagaaagcuuaccaugggccagaucgugaccuucuuccaggaggucccccacgugaucgaggaggugaugaacaucguccugaucgcccucagcauccuggccgugcugaaggggcucuacaacguggcgaccugcggccugaucgggcuggucacguuccuccugcugugcggccgcuccugcaccaccacccucuacaaggggguguacgagcugcagacgcuggagcucaacauggagacccugaacaugaccaugccgcugagcugcaccaagaacaacucccaccacuacauccgggugggcaacgagacgggccucgagcugacccugaccaacaccagcaucaucaaccacaaguucugcaaccucuccgacgcccacaagaagaaccuguacgaccacgcccugaugagcaucaucuccacguuccaccucagcauccccaacuucaaccaguacgaggccauguccugcgacuucaacgggggcaagaucagcguccaguacaaccugucccacagcuacgccggggacgcggccaaccacugcggcaccguggccaacggggugcugcagaccuucaugcgcauggccuggggcggcuccuacaucgcgcucgacagcgggugcggcaacugggacugcaucaugaccuccuaccaguaccugaucauccagaacacgaccugggacgaccacugccaguucagccgccccucccccaucggguaccugggccuccugagccagcggacccgcgacgucuacaucucccggcgccgccggggcaccuucacguggacccugagcgacagcgaggggaaggacaccccgggcggguacugccugacccgguggaugcucaucgaggccgagcugaagugcuucggcaacacggccguggccaagugcaacgagaagcacgacgaggaguucugcgacaugcugcgccucuucgacuucaacaagcaggccauccagcggcugaaggcgcccgcccagauguccauccagcugaucaacaaggccgugaacgcccucaucaacgaccagcugaucaugaagaaccaccuccgcgacaucaugugcauccccuacugcaacuacagcaaguacugguaccugaacaacaccgccaccggcaagaccucccugcccaagugcuggcugaucagcaacggcuccuaccucaacgagacgcacuucagcgacgacaucgagcaggaggcggacaacaugaucaccgagaugcugcagaaggaguacauggagcggcaggggaagacgccccugggccucgucgaccuguucguguucuccaccagcuucuaccugaucuccaucuuccugcaccucgugaagaucccgacccaccgccacaucgucggcaagagcugccccaagccccaccggcugaaccacauggggaucugcuccugcgggcuguacaagcagcccggcgugccggugcgcuggaagcggugaggacuaguuauaagacugacuagcccgaugggccucccaacgggcccuccuccccuccuugcaccgagauuaaucaaaggcucuuuucagagccaccaaaaaaaaaaaaaaaaaaaaaaaaaaaaaaaaaaaaaaaaaaaaaaaaaaaaaaaaaaaaaaaaaaaaaaaaaaaaaaaaaaaaaaaaaaaaaaaaaaaaa

SEQ ID NO: 16512 - RNA, 1689 nt, Artificial Sequence
  mRNA product Design i-3 (hSL-A100) comprising derived and/or modified sequence from LASV(G3010-SLE-2013;Clade IV)__AIT17344__GPCmut1 (opt1)
aggagaaagcuuaccaugggccagaucgugaccuucuuccaggaggucccccacgugaucgaggaggugaugaacaucguccugaucgcccucagcauccuggccgugcugaaggggcucuacaacuucgcgaccugcggccugguggggcuggucacguuccuccugcugugcggccgcuccugcaccaccagccucuacaaggggguguacgagcugcagacccuggagcucaacauggagacgcugaacaugaccaugccgcuguccugcaccaagaacaacagccaccacuacaucauggugggcaacgagaccggccucgagcugacgcugaccaacaccuccaucaucaaccacaaguucugcaaccucagcgacgcccacaagaagaaccuguacaaccacgcccugauguccaucaucagcaccuuccaccucuccauccccaacuucaaccaguacgaggccaugagcugcgacuucaacgggggcaagaucuccguccaguacaaccugagccacuccuacgccggggacgcggccagccacugcggcacgguggccaacggggugcugcagaccuucaugcggauggccuggggcggcuccuacaucgcgcucgacagcgggugcggcaagugggacugcaucaugaccuccuaccaguaccugaucauccagaacaccacgugggaggaccacugccaguucagccgccccucccccaucggguaccugggccuccugagccagcggacccgcgacaucuacaucagccggcgccgccggggcaccuucaccuggacgcuguccgacagcgaggggaaggacaccccgggcggguacugccugacccgguggaugcucaucgaggccgagcugaagugcuucggcaacaccgccgucgccaagugcaacgagaagcacgacgaggaguucugcgacaugcugcgccucuucgacuucaacaagcaggccauccagcggcugaagacgcccgcgcagauguccauccagcugaucaacaaggccgugaacgcccucaucaacgaccagcugaucaugaagaaccaccuccgcgacaucaugugcauccccuacugcaacuacagcaaguacugguaccugaaccacaccaccaccggcaagacgucccugcccaagugcuggcuggugagcaacggcuccuaccucaacgagacccacuucagcgacgacaucgagcagcaggccgacaacaugaucaccgagaugcugcagaaggaguacauggagcggcaggggaagacgccccugggccucgucgaccuguucguguucuccaccagcuucuaccugaucuccaucuuccugcaccucgugaagaucccgacccaccgccacaucgucggcaagagcugccccaagccccaccggcugaaccacauggggaucugcuccugcgggcuguacaagcagcccggcgugccggugcgcuggaagcggugaggacuaguuauaagacugacuagcccgaugggccucccaacgggcccuccuccccuccuugcaccgagauuaaucaaaggcucuuuucagagccaccaaaaaaaaaaaaaaaaaaaaaaaaaaaaaaaaaaaaaaaaaaaaaaaaaaaaaaaaaaaaaaaaaaaaaaaaaaaaaaaaaaaaaaaaaaaaaaaaaaaaa

SEQ ID NO: 16513 - RNA, 1689 nt, Artificial Sequence
  mRNA product Design i-3 (hSL-A100) comprising derived and/or modified sequence from LASV(G502-SLE-2009;Clade IV)__AIT17126__GPCmut1 (opt1)
aggagaaagcuuaccaugggccagaucgugaccuucuuccaggaggucccccacgugaucgaggaggugaugaacaucguccugaucgcccucagcauccuggccgugcugaaggggcucuacaacuucgcgaccugcggccugguggggcugcucacguuccugcugcucugcggccgcuccugcaccaccgggcuguacaagggcgucuacgagcugcagacccucgagcugaacauggagacgcugaacaugaccaugccgcucagcugcaccaagaacaacucccaccacuacaucauggugggcaacgagaccgggcuggagcugacgcucaccaacaccagcaucaucaaccacaaguucugcaaccuguccgacgcccacaagaagaaccuguacgaccacgcccucaugagcaucaucuccaccuuccaccugagcauccccaacuucaaccaguacgaggccauguccugcgacuucaacggcgggaagaucagcgugcaguacaaccugucccacagcuacgccggcgacgcggccgaccacugcgggacggucgccaacggcgugcuccagaccuucaugcggauggccuggggcggguccuacaucgcgcuggacagcggcugcgggcggugggacugcaucaugaccuccuaccaguaccugaucauccagaacaccacgugggaggaccacugccaguucagccgccccucccccaucggcuaccucggccugcugagccagcggacccgcgacaucuacaucucccggcgccgccgggggaccuucaccuggacgcugagcgacagcgagggcaaggacacccccgggggcuacugccucacccgguggaugcugaucgaggccgagcugaagugcuucgggaacaccgccguggccaagugcaacgagaagcacgacgaggaguucugcgacaugcuccgccuguucgacuucaacaagcaggccauccagcggcugaaggcgcccgcccagauguccauccagcucaucaacaaggccgucaacgcccugaucaacgaccagcuggugaugaagaaccaccuccgcgacaucaugugcauccccuacugcaacuacagccgguacugguaccugaaccacacgaccaccggccgcaccucccugcccaagugcuggcucgugagcaacggguccuaccugaacgagacgcacuucagcgacgacaucgagcagcaggccgacaacaugaucaccgagaugcugcagaaggaguacauggagcggcagggcaagaccccgcucgggcuggucgaccuguucguguucuccaccagcuucuaccugaucuccaucuuccuccaccuggugaagaucccgacgcaccgccacaucgucggcaagagcugccccaagccccaccggcugaaccacauggggaucugcuccugcggccucuacaagcagcccggcgugccggugaaguggaagcgcugaggacuaguuauaagacugacuagcccgaugggccucccaacgggcccuccuccccuccuugcaccgagauuaaucaaaggcucuuuucagagccaccaaaaaaaaaaaaaaaaaaaaaaaaaaaaaaaaaaaaaaaaaaaaaaaaaaaaaaaaaaaaaaaaaaaaaaaaaaaaaaaaaaaaaaaaaaaaaaaaaaaaa

SEQ ID NO: 16514 - RNA, 1689 nt, Artificial Sequence
  mRNA product Design i-3 (hSL-A100) comprising derived and/or modified sequence from LASV(G733-SLE-2010;Clade IV)__AIT17154__GPCmut1 (opt1)
aggagaaagcuuaccaugggccagaucgugaccuucuuccaggaggucccccacgugaucgaggaggugaugaacaucguccugaucgcccucagcauccuggccgugcugaaggggcucuacaacuucgcgaccugcggcaucguggggcuggucuccuuccugcuccugugcggccgcagcugcacgaccucccuguacaaggggguguacgagcuccagacccuggagcugaacauggagacccucaacaugacgaugccgcugagcugcaccaagaacaacucccaccacuacaucauggugggcaacgagaccggccuggagcucacccugacgaacaccagcaucaucaaccacaaguucugcaaccuguccgacgcccacaagaagaaccucuacgaccacgcccugaugagcaucaucuccaccuuccaccugagcauccccaacuucaaccaguacgaggccauguccugcgacuucaacgggggcaagaucagcguccaguacaaccucucccacagcuacgccggggacgcggccaaccacugcggcaccaucgccaacggggugcugcagacguucaugcggauggccuggggcggcuccuacaucgcgcuggacagcgggugcgaccggugggacugcaucaugaccuccuaccaguaccucaucauccagaacaccaccugggaggaccacugccaguucagccgccccucccccaucggcuaccuggggcugcucagccagcggacgcgcgacaucuacaucagccggcgccgccggggcaccuucaccuggacccucuccgacagcgagggcaaggacacgcccgggggcuacugccugacccgguggaugcugaucgaggccgagcucaagugcuucgggaacaccgccguggccaagugcaacgagaagcacgacgaggaguucugcgacaugcugcgccuguucgacuucaacaagcaggccauccagcggcucaaggcgcccgcccagauguccauccagcugaucaacaaggccgucaacgcccugaucaacgaccagcucaucaugaagaaccaccuccgcgacaucaugugcauccccuacugcaacuacagcaaguacugguaccugaaccacaccacgaccgggaagaccucccugcccaagugcuggcuggugagcaacggcuccuaccugaacgagacccacuucagcgacgacaucgagcagcaggccgacaacaugaucacggagaugcuccagaaggaguacauggagcggcagggcaagaccccgcuggggcugguggaccucuucgucuucuccaccagcuucuaccugaucuccaucuuccugcaccuggugaagaucccgacccaccgccacguggucggcaagagcugccccaagccccaccggcucaaccacauggggaucugcuccugcggccuguacgggcagcccggcgugccggugaaguggaagcgcugaggacuaguuauaagacugacuagcccgaugggccucccaacgggcccuccuccccuccuugcaccgagauuaaucaaaggcucuuuucagagccaccaaaaaaaaaaaaaaaaaaaaaaaaaaaaaaaaaaaaaaaaaaaaaaaaaaaaaaaaaaaaaaaaaaaaaaaaaaaaaaaaaaaaaaaaaaaaaaaaaaaaa

SEQ ID NO: 16515 - RNA, 1689 nt, Artificial Sequence
  mRNA product Design i-3 (hSL-A100) comprising derived and/or modified sequence from MOPV/LASV reassortant(IGS-1;Clade IV)__AFY05576__GPCmut1 (opt1)
aggagaaagcuuaccaugggccagaucgugaccuucuuccaggaggucccccacgugaucgaggaggugaugaacaucguccugaucgcccucagcgugcuggccgugcugaaggggcucuacaacuucgcgaccugcggccuggucgggcuggugacguuccuccugcugugcggccgcuccugcaccaccagccucuacaaggggguguacgagcugcagacccuggagcucaacauggagacgcugaacaugaccaugccgcuguccugcaccaagaacaacagccaccacuacaucauggucggcaacgagaccggccucgagcugacgcugaccaacaccuccaucaucaaccacaaguucugcaaccucagcgacgcccacaagaagaaccuguacgaccacgcccugauguccaucaucagcaccuuccaccucuccauccccaacuucaaccaguacgaggccaugagcugcgacuucaacgggggcaagaucuccgugcaguacaaccugagccacuccuacgccggggacgcggccaaccacugcggcacgguggccaacgggguccugcagaccuucaugcggauggccuggggcggcagcuacaucgcgcucgacuccgggugcggcaacugggacugcaucaugaccagcuaccaguaccugaucauccagaacaccacgugggaggaccacugccaguucucccggcccagccccaucggguaccugggccuccugucccagcgcacccgggacaucuacaucagccgccggcgccggggcaccuucaccuggacgcugagcgacuccgagggggaggacaccccgggcggguacugccugacccgcuggaugcucaucgaggccgagcugaagugcuucggcaacaccgccguggccaagugcaacgagaagcacgacgaggaguucugcgacaugcugcggcuguucgacuucaacaagcaggccauccagcgccugaaggcgcccgcccagaugagcauccagcugaucaacaaggccgugaacgcccucaucaacgaccagcugaucaugaagaaccaccuccgggacaucaugugcauccccuacugcaacuacuccaaguacugguaccucaaccacacgaccaccggccgcaccagccugcccaagugcuggcuggucuccaacggcagcuaccucaacgagacgcacuucuccgacgacaucgagcagcaggccgacaacaugaucaccgagaugcugcagaaggaguacauggagcggcaggggaagacgccccugggccucguggaccuguucguguucagcaccuccuucuaccugaucagcaucuuccugcaccucgucaagaucccgacccaccgccacaucguggggaaguccugccccaagccccaccggcugaaccacaugggcaucugcagcugcgggcuguacaagcagcccggcgugccggucaaguggaagcgcugaggacuaguuauaagacugacuagcccgaugggccucccaacgggcccuccuccccuccuugcaccgagauuaaucaaaggcucuuuucagagccaccaaaaaaaaaaaaaaaaaaaaaaaaaaaaaaaaaaaaaaaaaaaaaaaaaaaaaaaaaaaaaaaaaaaaaaaaaaaaaaaaaaaaaaaaaaaaaaaaaaaaa

SEQ ID NO: 16516 - RNA, 1689 nt, Artificial Sequence
  mRNA product Design i-3 (hSL-A100) comprising derived and/or modified sequence from LASV(LM765-SLE-2012;Clade IV)__AIT17814__GPCmut1 (opt1)
aggagaaagcuuaccaugggccagaucgugaccuucuuccaggaggucccccacgugaucgaggaggugaugaacaucguccugaucgcccucagcauccuggccgugcugaaggggcucuacaacuucgcgaccugcggccugguggggcuggucacguuccuccugcugugcggccgcuccugcaccaccagccucuacaaggggguguacgagcugcagacccuggagcucaacauggagacgcugaacaugaccaugccgcuguccugcaccaagaacaacagccaccacuacaucauggugggcaacgagaccggccucgagcugacgcugaccaacaccuccaucaucgaccacaaguucugcaaccucagcgacgcccaccggaagaaccuguacgaccacgcccugauguccaucaucagcaccuuccaccucuccauccccaacuucaaccaguacgaggccaugagcugcgacuucaacgggggcaagaucuccguccaguacaaccugagccacuccuacgccaaggacgcggccgaccacugcgggacgguggccaacggcgugcugcagaccuucaugcgcauggccuggggcgggagcuacaucgcgcucgacuccggcugcgggcgcugggacugcaucaugaccagcuaccaguaccugaucauccagaacaccacgugggaggaccacugccaguucucccggcccagccccaucggcuaccuggggcuccugucccagcgcacccgggacaucuacaucagccgccggcgccggggcaccuucaccuggacgcugagcgacuccgagggcaaggacacccccgggggcuacugccugacccgcuggaugcucaucgaggccgagcugaagugcuucgggaacaccgccgucgccaagugcaacgagaagcacgacgaggaguucugcgacaugcugcggcuguucgacuucaacaagcaggccauccagcgccugaaggcgcccgcccagaugagcauccagcugaucaacaaggccgugaacgcccucaucaacgaccagcugaucaugaagaaccaccuccgggacaucaugugcauccccuacugcaacuacuccaaguacugguaccucaaccacacgaccaccgggaagaccagccugcccaagugcuggcugguguccaacggcagcuaccucaacgagacgcacuucuccgacgacaucgagcagcaggccgacaacaugaucaccgagaugcugcagaaggaguacauggagcgccagggcaagaccccgcuggggcucgucgaccuguucguguucagcaccuccuucuaccugaucagcaucuuccugcaccucgugaagaucccgacgcaccggcacaucgucggcaagcccugccccaagccccaccgccugaaccacauggggaucugcuccugcggccuguacaagcagccgggggugcccgugaaguggaagcggugaggacuaguuauaagacugacuagcccgaugggccucccaacgggcccuccuccccuccuugcaccgagauuaaucaaaggcucuuuucagagccaccaaaaaaaaaaaaaaaaaaaaaaaaaaaaaaaaaaaaaaaaaaaaaaaaaaaaaaaaaaaaaaaaaaaaaaaaaaaaaaaaaaaaaaaaaaaaaaaaaaaaa

SEQ ID NO: 16517 - RNA, 1689 nt, Artificial Sequence
  mRNA product Design i-3 (hSL-A100) comprising derived and/or modified sequence from LASV(LM776-SLE-2012;Clade IV)__AIT17824__GPCmut1 (opt1)
aggagaaagcuuaccaugggccagaucgugaccuucuuccaggaggucccccacgugaucgaggaggugaugaacaucguccugaucgcccucagcauccuggccgugcugaaggggcucuacaacuucgcgaccugcggccugguggggcuggucacguuccuccugcugugcggccgcuccugcaccaccagcguguacaaggggguguacgagcuccagacccuggagcugaacauggagacgcucaacaugaccaugccgcuguccugcaccaagaacaacagccaccacuacaucauggucggcaacgagaccggccuggagcucacgcugaccaacaccuccaucaucaaccacaaguucugcaaccugagcgacgcccacaagaagaaccucuacgaccacgcccugauguccaucaucagcaccuuccaccuguccauccccaacuucaaccaguacgaggccaugagcugcgacuucaacgggggcaagaucuccgugcaguacaaccucagccacuccuacgccggggacgcggccaaccacugcggcacgguggccaacgggguccugcagaccuucaugcggauggccuggggcggcagcuacaucgcgcuggacuccgggugcggcaagugggacugcaucaugaccagcuaccaguaccucaucauccagaacaccacgugggaggaccacugccaguucucccgccccagccccaucggguaccugggccugcucucccagcggacccgcgacaucuacaucagccggcgccgccggggcaccuucaccuggacgcucagcgacuccgaggggaaggacaccccgggcggguacugccugacccgguggaugcugaucgaggccgagcucaagugcuucggcaacaccgccguggccaagugcaacgagaagcacgacgaggaguucugcgacaugcugcgccuguucgacuucaacaagcaggccauccagcggcucaaggcgcccgcccagaugagcauccagcugaucaacaaggccgugaacgcccugaucaacgaccagcucaucaugaagaaccaccuccgcgacaucaugugcauccccuacugcaacuacuccaaguacugguaccugaaccacacgaccaccggcaagaccagccugcccaagugcuggcuggucuccaacggcagcuaccugaacgagacgcacuucuccgacgacaucgagcagcaggccgacaacaugaucaccgagaugcuccagaaggaguacauggagcggcaggggaagacgccccugggccugguggaccucuucguguucagcaccuccuucuaccugaucagcaucuuccugcaccuggucaagaucccgacccaccgccacaucguggggaaguccugccccaagccccaccggcucaaccacaugggcaucugcagcugcgggcuguacaagcagcccggcgugccgguccgcuggaagcggugaggacuaguuauaagacugacuagcccgaugggccucccaacgggcccuccuccccuccuugcaccgagauuaaucaaaggcucuuuucagagccaccaaaaaaaaaaaaaaaaaaaaaaaaaaaaaaaaaaaaaaaaaaaaaaaaaaaaaaaaaaaaaaaaaaaaaaaaaaaaaaaaaaaaaaaaaaaaaaaaaaaaa

SEQ ID NO: 16518 - RNA, 1689 nt, Artificial Sequence
  mRNA product Design i-3 (hSL-A100) comprising derived and/or modified sequence from LASV(Mad39;Clade IV)__ANH09722__GPCmut1 (opt1)
aggagaaagcuuaccaugggccagaucgugaccuucuuccaggaggucccccacgugaucgaggaggugaugaacaucguccugaucgcccucagcauccuggccgugcugaaggggcucuacaacguggcgaccugcggccugaucgggcuggucacguuccuccugcugugcggccgcuccugcaccaccacccucuacaaggggguguacgagcugcaggcccuggagcucaacauggagacgcugaacaugaccaugccgcugagcugcaccaagaacaacucccaccacuacauccgggugggcaacgagaccggccucgagcugacgcugaccaacaccagccucaucaaccacaaguucugcaaccuguccgacgcccacaagaagaaccuguacgaccacgcccucaugagcaucaucuccaccuuccaccugagcauccccaacuucaaccaguacgaggccauguccugcgacuucaacgacgggaagaucagcguccaguacaaccugucccacacguacgcgggcgacaccgccaaccacugcgggaccguggccaacggcgugcuccagaccuucaugcgcauggccuggggcgggagcuacaucgcgcuggacuccggcugcgggggcugggacugcaucaugacgagcuaccaguaccugaucauccagaacaccaccugggaggaccacugccaguucucccggcccagccccaucggguaccucggccugcugucccagcggacccgcgacaucuacaucagccggcgccgccggggcacguucaccuggacccuguccgacagcgaggggaaggacaccccgggcggguacugccucacgcgguggaugcugaucgaggccgagcugaagugcuucggcaacaccgccgucgccaagugcaacgagaagcacgacgaggaguucugcgacaugcuccgccuguucgacuucaacaagcaggccauccagcggcugaaggcgcccgcccagaugagcauccagcucaucaacaaggccgugaacgcccugaucaacgaccagcugaucaugaagaaccaccuccgcgacaucaugugcauccccuacugcaacuacuccaaguacugguaccugaaccacaccgugaccggcaagacgagccugcccaagugcuggcucgucuccaacggcagcuaccugaacgagacccacuucuccgacgacaucgagcagcaggccgacaacaugaucaccgagaugcugcagaaggaguacauggagcggcaggggaagacgccccucggccugguggaccuguucguguucagcaccuccuucuaccugaucagcaucuuccuccaccuggucaagaucccgacccaccgccacgugguggggaagcccugccccaagccccaccggcugaaccacaugggcaucugcuccugcggguucuacaagcagccgggcguccccgugcgcuggaagcggugaggacuaguuauaagacugacuagcccgaugggccucccaacgggcccuccuccccuccuugcaccgagauuaaucaaaggcucuuuucagagccaccaaaaaaaaaaaaaaaaaaaaaaaaaaaaaaaaaaaaaaaaaaaaaaaaaaaaaaaaaaaaaaaaaaaaaaaaaaaaaaaaaaaaaaaaaaaaaaaaaaaaa

SEQ ID NO: 16519 - RNA, 1689 nt, Artificial Sequence
  mRNA product Design i-3 (hSL-A100) comprising derived and/or modified sequence from LASV(Z0947-SLE-2011;Clade IV)__AIT17840__GPCmut1 (opt1)
aggagaaagcuuaccaugggccagaucgugaccuucuuccaggaggucccccacgugaucgaggaggugaugaacaucguccugaucgcccucagcauccuggccgugcugaaggggcucuacaacuucgcgaccugcggccugguggggcuggucacguuccuccugcugugcggccgcuccugcaccaucagccucuacaaggggguguacgagcugcagacccuggagcucaacauggagacccugaacaugacgaugccgcuguccugcaccaagaacaacagccaccacuacaucauggugggcaacgagaccggccucgagcugacccugacgaacaccuccaucaucaaccacaaguucugcaaccucagcgacgcccacaagaagaaccuguacgaccacgcccugauguccaucaucagcaccuuccaccucuccauccccaacuucaaccaguacgaggccaugagcugcgacuucaacgggggcaagaucuccguccaguacaaccugagccacuccuacgccggggacgcggccaaccacugcggcaccguggccaacggggugcugcagacguucaugcggauggccuggggcggcagcuacaucgcgcucgacuccgggugcgaccggugggacugcaucaugaccagcuaccaguaccugaucauccagaacaccaccugggaggaccacugccaguucucccgccccagccccaucggcuaccuggggcuccugucccagcggacgcgcgacaucuacaucagccggcgccgccggggcaccuucaccuggacccugagcgacuccgagggcaaggacacgcccgggggcuacugccugacccgguggaugcucaucgaggccgagcugaagugcuucgggaacaccgccgucgccaagugcaacgagaagcacgacgaggaguucugcgacaugcugcgccucuucgacuucaacaagcaggccauccagcggcugaaggcgcccgcccagaugagcauccagcugaucaacaaggccgugaacgcccucaucaacgaccagcugaucaugaagaaccaccuccgcgacaucaugugcauccccuacugcaacuacuccaaguacugguaccugaaccacaccacgaccgggaagaccagccugcccaagugcuggcugguguccaacggcagcuaccucaacgagacccacuucuccgacgacaucgagcagcaggccgacaacaugaucacggagaugcugcagaaggaguacauggagcggcagggcaagaccccgcuggggcucgucgaccuguucguguucagcaccuccuucuaccugaucagcaucuuccugcaccucgugaagaucccgacccaccgccacaucgucggcaagcccugccccaagccccaccggcugaaccacauggggaucugcuccugcggccuguacaagcagccgggggugcccgugaaguggaagcgcugaggacuaguuauaagacugacuagcccgaugggccucccaacgggcccuccuccccuccuugcaccgagauuaaucaaaggcucuuuucagagccaccaaaaaaaaaaaaaaaaaaaaaaaaaaaaaaaaaaaaaaaaaaaaaaaaaaaaaaaaaaaaaaaaaaaaaaaaaaaaaaaaaaaaaaaaaaaaaaaaaaaaa

SEQ ID NO: 16520 - RNA, 1689 nt, Artificial Sequence
  mRNA product Design i-3 (hSL-A100) comprising derived and/or modified sequence from LASV(Josiah;Clade IV)__NP_694870__GPCmut1 (opt1)
aggagaaagcuuaccaugggccagaucgugaccuucuuccaggaggucccccacgugaucgaggaggugaugaacaucguccugaucgcccucagcgugcuggccgugcugaaggggcucuacaacuucgcgaccugcggccuggucgggcuggugacguuccuccugcugugcggccgcuccugcaccaccagccucuacaaggggguguacgagcugcagacccuggagcucaacauggagacgcugaacaugaccaugccgcuguccugcaccaagaacaacagccaccacuacaucauggucggcaacgagaccggccucgagcugacgcugaccaacaccuccaucaucaaccacaaguucugcaaccucagcgacgcccacaagaagaaccuguacgaccacgcccugauguccaucaucagcaccuuccaccucuccauccccaacuucaaccaguacgaggccaugagcugcgacuucaacgggggcaagaucuccgugcaguacaaccugagccacuccuacgccggggacgcggccaaccacugcggcacgguggccaacgggguccugcagaccuucaugcggauggccuggggcggcagcuacaucgcgcucgacuccgggugcggcaacugggacugcaucaugaccagcuaccaguaccugaucauccagaacaccacgugggaggaccacugccaguucucccgccccagccccaucggguaccugggccuccugucccagcggacccgcgacaucuacaucagccggcgccggcgcggcaccuucaccuggacgcugagcgacuccgaggggaaggacaccccgggcggguacugccucacccgguggaugcugaucgaggccgagcugaagugcuucggcaacaccgccguggccaagugcaacgagaagcacgacgaggaguucugcgacaugcuccgccuguucgacuucaacaagcaggccauccagcggcugaaggcgcccgcccagaugagcauccagcucaucaacaaggccgugaacgcccugaucaacgaccagcugaucaugaagaaccaccuccgcgacaucaugugcauccccuacugcaacuacuccaaguacugguaccugaaccacacgaccaccgggcggaccagccugcccaagugcuggcucgucuccaacggcagcuaccugaacgagacgcacuucuccgacgacaucgagcagcaggccgacaacaugaucaccgagaugcugcagaaggaguacauggagcgccagggcaagaccccgcucgggcugguggaccuguucguguucagcaccuccuucuaccucaucagcaucuuccugcaccuggucaagauccccacgcaccggcacaucgugggcaaguccugccccaagccccaccgccugaaccacauggggaucugcagcugcggccucuacaagcagccgggggugcccgucaaguggaagcggugaggacuaguuauaagacugacuagcccgaugggccucccaacgggcccuccuccccuccuugcaccgagauuaaucaaaggcucuuuucagagccaccaaaaaaaaaaaaaaaaaaaaaaaaaaaaaaaaaaaaaaaaaaaaaaaaaaaaaaaaaaaaaaaaaaaaaaaaaaaaaaaaaaaaaaaaaaaaaaaaaaaaa

SEQ ID NO: 16521 - RNA, 1686 nt, Artificial Sequence
  mRNA product Design i-3 (hSL-A100) comprising derived and/or modified sequence from LASV(LP;Clade I)__AAF86701__GPCmut1 (opt1)
aggagaaagcuuaccaugggccagaucaucaccuucuuccaggaggugccccacgucaucgaggaggugaugaacaucgugcugaucgcccucagccugcuggccauccucaaggggcuguacaacaucgcgaccugcggcaucaucgggcuggucgccuuccucuuccugugcggcaaguccugcagccugacgcucaagggcggguacgagcugcagacccuggagcucaacauggagacccugaacaugaccaugccgcuguccugcacgaagaacagcucccaccacuacauccgcgugggcaacgagaccgggcucgagcugacccugaccaacacgagcaucaucaaccacaaguucugcaaccucuccgacgcccacaagaagaaccuguacgaccacgcccugaugagcaucaucuccaccuuccaccucagcauccccaacuucaaccaguacgaggccauguccugcgacuucaacggcgggaagaucagcgugcaguacaaccugucccacagcuacgcgggcgacgccgccgagcacugcgggaccgucgccaacggcgugcugcagaccuucaugcggauggcguggggcgggcgcuacaucgcccucgacuccggcugcgggaacugggacugcaucaugacgagcuaccaguaccugaucauccagaacaccaccugggaggaccacugccaguucucccggcccagccccaucggcuaccugggccuccugucccagcgcacccgggacaucuacaucagccgccggcgccgggggacguucaccuggacccugagcgacuccgagggcaacgagacccccgggggcuacugccucacgcgcuggaugcugaucgaggccgagcugaagugcuucgggaacaccgccguggccaagugcaacgagaagcacgacgaggaguucugcgacaugcuccggcuguucgacuucaacaagcaggcgauccgccggcugaaggccccggcccagaugagcauccagcucaucaacaaggccgucaacgcccugaucaacgaccagcugaucaugaagaaccaccuccgcgacaucaugugcauccccuacugcaacuacuccaaguacugguaccugaaccacaccagcuccggccggaccagccugcccaagugcuggcucaucuccaacggcagcuaccugaacgagacgcaguucuccgacgacaucgagcagcaggcggacaacaugaucaccgagaugcugcagaaggaguacaucgagcgccaggggaagaccccgcucggccugguggacaucuucaucuucagcaccuccuucuaccugaucagcaucuuccuccaccugaucaagauccccacgcaccggcacaucguggggaagcccugccccaagccgcaccgccugaaccacaugggcgucugcuccugcgggcuguacaagcaccccggcgugcccaccaaguggaagcggugaggacuaguuauaagacugacuagcccgaugggccucccaacgggcccuccuccccuccuugcaccgagauuaaucaaaggcucuuuucagagccaccaaaaaaaaaaaaaaaaaaaaaaaaaaaaaaaaaaaaaaaaaaaaaaaaaaaaaaaaaaaaaaaaaaaaaaaaaaaaaaaaaaaaaaaaaaaaaaaaaaaaa

SEQ ID NO: 16522 - RNA, 1686 nt, Artificial Sequence
  mRNA product Design i-3 (hSL-A100) comprising derived and/or modified sequence from LASV(803213;Clade II)__AAF86703__GPCmut1 (opt1)
aggagaaagcuuaccaugggccagaucaucaccuucuuccaggaggugccccacgucaucgaggaggugaugaacaucgugcugaucgcccucagccugcuggccauccucaaggggaucuacaacgucgcgaccugcggccuguucgggcugaucuccuuccuccugcugugcggccgcagcugcuccgugacguacaaggggguguacgagcuccagacccuggagcugaacauggccaaccucaacaugaccaugccgcugagcugcaccaagaacaacucccaccacuacaucauggucggcaacgagacgggccuggagcucacccugaccaacaccagcaucaucaaccacaaguucugcaaccuguccgacgcccacaagaagaaccucuacgaccacgcccugaugagcaucaucuccacguuccaccugagcauccccaacuucaaccaguacgaggccauguccugcgacuucaacgggggcaagaucagcgugcaguacaaccucucccacagcuucgcgguggacgccgccaaccacugcgggaccaucgccaacggcguccugcagaccuucaugcggauggcguggggcggguccuacaucgcccuggacagcggcugcgggaacugggacugcaucaugaccuccuaccaguaccucaucauccagaacacgaccugggaggaccacugccaguucagccgccccucccccaucggcuaccuggggcugcucagccagcggacccgcgacaucuacaucagccggcgccggcgcggcaccuucacguggacccuguccgacagcgagggcaacgaggcccccgggggcuacugccugacccgguggaugcucaucgaggccgagcugaagugcuucgggaacaccgccguggcgaagugcaacgagaagcacgacgaggaguucugcgacaugcugcgccucuucgacuucaacaagcaggccaucaagcggcugaagacgccggcccagauguccauccagcugaucaacaaggccgugaacgcccucaucaacgaccagcugaucaugaagaaccaccuccgcgacaucaugugcauccccuacugcaacuacagccgguacugguaccugaaccacaccgucaccggcaagaccucccugccccgcugcuggcuggugagcaacggguccuaccucaacgagacgcacuucagcgacgacaucgagcagcaggcggacaacaugaucaccgagaugcugcagaaggaguacauggaccggcagggcaagaccccgcugggccucguggaccuguucgucuucuccaccagcuucuaccugaucuccaucuuccuccaccuggugaagauccccacgcaccgccacaucguggggaagcccugccccaagccgcaccggcugaaccacaugggcaucugcagcugcgggcuguacaagcaccccggcguccccgugaaguggaagcgcugaggacuaguuauaagacugacuagcccgaugggccucccaacgggcccuccuccccuccuugcaccgagauuaaucaaaggcucuuuucagagccaccaaaaaaaaaaaaaaaaaaaaaaaaaaaaaaaaaaaaaaaaaaaaaaaaaaaaaaaaaaaaaaaaaaaaaaaaaaaaaaaaaaaaaaaaaaaaaaaaaaaaa

SEQ ID NO: 16523 - RNA, 1686 nt, Artificial Sequence
  mRNA product Design i-3 (hSL-A100) comprising derived and/or modified sequence from LASV(GA391;Clade III)__CAA36645__GPCmut1 (opt1)
aggagaaagcuuaccaugggccagaucgugaccuucuuccaggaggucccccacgugaucgaggaggugaugaacaucguccugaucgcccucagcauccuggccauccugaaggggcucuacaacguggcgaccugcggccugaucgggcuggugacguuccuccugcuguccggccgcagcugcucccucaucuacaaggggaccuacgagcugcagacccuggagcucaacauggagacccugaacaugacgaugccgcugagcugcaccaagaacaacucccaccacuacauccgggucggcaacgagaccggccucgagcugacccugacgaacaccagcauccucaaccacaaguucugcaaccuguccgacgcccacaagcgcaaccuguacgaccacagccucauguccaucaucagcaccuuccaccuguccauccccaacuucaaccaguacgaggccaugagcugcgacuucaacgggggcaagaucaccgugcaguacaaccugucccacagcuucgccguggacgccgcggggcacugcggcacgcucgccaacgggguccugcagaccuucaugcggauggccuggggcggcuccuacaucgcccuggacagcgggugcggcaacugggacugcaucaugaccuccuaccaguaccucaucauccagaacaccacgugggacgaccacugccaguucagccgccccucccccaucggguaccugggccugcucagccagcggacccgcgacaucuacaucagccggcgccggcgcggcaccuucaccuggacgcuguccgacagcgaggggaacgagaccccgggcggguacugccugacccgguggaugcucaucgaggcggagcugaagugcuucggcaacaccgccguggccaagugcaacgagaagcacgacgaggaguucugcgacaugcugcgccucuucgacuucaacaagcaggccauccggcgccugaagacgcccgcccagauguccauccagcugaucaacaaggcggugaacgcccucaucaacgaccagcugaucaugaagaaccaccuccgggacaucaugugcauccccuacugcaacuacagccgcuacugguaccugaaccacaccuccaccgggaagaccagccugccccggugcuggcugaucuccaacggcagcuaccucaacgagacgaaguucuccgacgacaucgagcagcaggccgacaacaugaucaccgagaugcugcagaaggaguacaucgaccgccagggcaagaccccgcuggggcucgucgaccuguucguguucagcaccuccuucuaccugaucagcaucuuccugcaccucgugaagauccccacgcaccggcacaucgucggcaagcccugccccaagccgcaccgccugaaccacauggggaucugcuccugcggccuguacaagcagcccggggugcccgugcgguggaagcgcugaggacuaguuauaagacugacuagcccgaugggccucccaacgggcccuccuccccuccuugcaccgagauuaaucaaaggcucuuuucagagccaccaaaaaaaaaaaaaaaaaaaaaaaaaaaaaaaaaaaaaaaaaaaaaaaaaaaaaaaaaaaaaaaaaaaaaaaaaaaaaaaaaaaaaaaaaaaaaaaaaaaaa

SEQ ID NO: 16524 - RNA, 1689 nt, Artificial Sequence
  mRNA product Design i-3 (hSL-A100) comprising derived and/or modified sequence from LASV(AV;Clade V)__CCA30314__GPCmut1 (opt1)
aggagaaagcuuaccaugggccagaucgugaccuucuuccaggaggucccccacgugaucgaggaggugaugaacaucguccugaucgcccucagcauccuggccgugcugaaggggcucuacaacaucgcgaccugcggccugaucgggcugaucacguuccuccugcugugcggccgcuccugcagcuccaaccucuacaaggggguguacgagcugcagagccuggaccucaacauggagacccugaacaugaccaugccgcuguccugcaccaagaacaacagccaccacuacauccgggucggcaacgacacgggccucgagcugacccugaccaacaccuccauccucaaccacaaguucugcaaccugagcgacgcccacaagaaggaccuguacgaccacgcccucauguccaucaucagcacguuccaccuguccauccccaacuucaaccaguacgaggccaugagcugcgacuucaacgggggcaagaucuccgugcaguacaaccugagccacuccuacgccaucgacgcggccaaccacugcgggaccguggccaacggcauccuccagaccuucaugcgcauggccuggggcgggagcuacaucgcgcuggacuccggcugcgggaacugggacugcaucaugaccagcuaccaguaccugaucauccagaacacgaccugggagaaccacugccaguucucccggcccagccccaucggcuaccucgggcugcugagccagcgcacccgggacaucuacaucucccgccggcgccggggcaccuucacguggacccucagcgacuccgagggcaacgccacccccgggggcuacugccugacccgcuggaugcugaucgaggccgagcucaagugcuucgggaacacggccgucgccaagugcaacgagaagcacgacgaggaguucugcgacaugcugcggcuguucgacuucaacaagcaggcgaucagccgccucaaguccccggcccagaugagcauccagcugaucaacaaggccgugaacgcccugaucaacgaccagcucaucaugaagaaccaccuccgggacaucaugugcauccccuacugcaacuacuccaaguacugguaccugaaccacaccaucaccggcaagaccagccugcccaagugcuggcugguguccaacgggagcuaccugaacgagacgcacuucuccgacgacaucgagcagcaggccgacaacaugaucaccgagaugcuccagaaggaguacauggagcgccagggcaagaccccgcugggccuggucgaccucuucguguucagcaccuccuucuaccugaucagcaucuuccugcggcuggugaagauccccacgcaccgccacaucgucgggaagcccugccccaagccgcaccggcucaaccacaugggcaucugcuccugcgggcuguacaagcagcccggcgugcccgugcgcuggaagcggugaggacuaguuauaagacugacuagcccgaugggccucccaacgggcccuccuccccuccuugcaccgagauuaaucaaaggcucuuuucagagccaccaaaaaaaaaaaaaaaaaaaaaaaaaaaaaaaaaaaaaaaaaaaaaaaaaaaaaaaaaaaaaaaaaaaaaaaaaaaaaaaaaaaaaaaaaaaaaaaaaaaaa

SEQ ID NO: 16525 - RNA, 1686 nt, Artificial Sequence
  mRNA product Design i-3 (hSL-A100) comprising derived and/or modified sequence from LASV(Togo/2016/7082;Clade VI)__AMR44577__GPCmut1 (opt1)
aggagaaagcuuaccaugggccagaucaucaccuucuuccaggaggugccccacgucaucgaggaggugaugaacaucgugcugaucgcccucagccugcuggccauccucaagggggucuacaacguggcgaccugcggcaucaucgggcuggugacguuccuguuccucugcggccgcuccugcagccugaucuacaagggguccuacgagcugcagacccucgagcugaacauggagacccugaacaugaccaugccgcucagcugcacgaagaacuccagccaccacuacauccgggucggcaacgagaccggccuggagcugacccucaccaacacguccaucaucaaccacaaguucugcaaccugagcgacgcccacaagcgcaaccuguacgaccacgcccucauguccauccugagcaccuuccaccuguccauccccaacuucaaccaguacgaggccaugagcugcgacuucaacgggggcaagaucuccgugcaguacaaccucagccacgccuacgcgguggacgccgccgagcacugcgggaccgucgccaacggcgugcugcagaccuucaugcggauggcguggggcggguccuacaucgcccuggacagcggcugcgggaacugggacugcaucaugacguccuaccaguaccucaucauccagaacaccaccugggaggaccacugccaguucagccgccccucccccaucggcuaccuggggcugcucagccagcggacccgcgacaucuacaucagccggcgccggcgcggcacguucaccuggacccuguccgacagcgagggcaacgagacccccgggggcuacugccugacgcgguggaugcucaucgaggccgagcugaagugcuucgggaacaccgccguggccaagugcaacgagaagcacgacgaggaguucugcgacaugcugcgccucuucgacuucaacaagcaggcgauccagcggcugaaguccccggcccagaugagcauccagcugaucaacaaggccgucaacgcccucaucaacgaccagcugaucaugaagaaccaccuccgcgacaugaugugcauccccuacugcaacuacuccaaguacugguaccugaaccacaccagcuccggccggaccagccugcccaagugcuggcugguguccaacgggagcuaccucaacgagacgcacuucuccgacgacaucgagcagcaggccgacaacaugaucaccgagaugcugcagaaggaguacaucgaccgccagggcaagaccccgcugggccucguggaccuguucgucuucagcaccuccuucuaccugaucagcaucuuccuccaccugaucaagauccccacgcaccggcacaucguggggaagcccugccccaagccgcaccgccugaaccacaugggcaucugcuccugcgggcuguacaagcagcccggcgugcccacccgguggaagcgcugaggacuaguuauaagacugacuagcccgaugggccucccaacgggcccuccuccccuccuugcaccgagauuaaucaaaggcucuuuucagagccaccaaaaaaaaaaaaaaaaaaaaaaaaaaaaaaaaaaaaaaaaaaaaaaaaaaaaaaaaaaaaaaaaaaaaaaaaaaaaaaaaaaaaaaaaaaaaaaaaaaaaa

SEQ ID NO: 16526 - RNA, 1686 nt, Artificial Sequence
  mRNA product Design i-3 (hSL-A100) comprising derived and/or modified sequence from LASV(KAK-428;Clade n.d. (VII))__ANH09740__GPCmut1 (opt1)
aggagaaagcuuaccaugggccagaucgugaccuucuuccaggaggucccccacgugaucgaggaggugaugaacaucguccugaucgcccucagccugcuggccauccucaaggggcuguacaacuucgcgaccugcggcgugaucgggcugaucacguuccuccugcugugcggccgcuccugcagcgccaccuacaaggggcaguacgagcuccagacccuggagcugaacauggagucccucaacaugaccaugccgcugagcugcacgaagaacaacucccaccacuacauccgggccggcaacaacaccggccuggagcucacccugaccaacacgagcaucaucucccacaaguucugcaaccugagcgacgcccacaagaagaaccucuacgaccacacccugauguccaucaucaccaccuuccaccugagcauccccaacuucaaccaguacgaggccauguccugcgacuucaacgggggcaagaucagcauccaguacaaccucucccacagcuacgcgggggacgccgcccagcacugcggcacgguggccaacgggguccugcagaccuucaugcgcauggcguggggcggcuccuaccuggcccucgacagcgggugccggggcugggacugcaucaucuccagcuaccaguaccugaucauccagaacaccaccugggacgaccacugccaguucucccgccccagccccaucggguaccugggcuucgugagccagaagacgcgggacaucuacaucucccgccggcgccggggcaccuucaccuggacccucagcgacuccgaggggcacgacaugccgggcggguacugccugacgcgcuggaugcugaucgaggccgaccucaagugcuucggcaacaccgccguggccaagugcaacgagaagcacgacgaggaguucugcgacauguggcggcuguucgacuucaacaagcaggcgauccagcgccugaaggcccccgcccagaugaacauccagcucaucaacaaggccgucaacgcccugaucaacgaccagcugaugaugaagaaccaccuccgggacaucaugugcauccccuacugcaacuacagcaaguucugguaccugaacaacaccaccacggggcgcaccucccugccccggugcuggcucaucagcaacggcuccuaccugaacgagacccacuucagcgacgacaucgagcagcaggcggacaacaugaucaccgagaugcugcagaaggaguacauggaccgccagggcaagacgccgcucgggcugguggaccuguucguguucuccaccagcuucuaccucaucaccaucuuccugcaccuggucaagauccccacccaccggcacaucgugggcaagcccugccccaagccgcaccgccucaaccacauggggaucugcuccugcggccuguacaagcagcccggggugcccguccgguggaagcgcugaggacuaguuauaagacugacuagcccgaugggccucccaacgggcccuccuccccuccuugcaccgagauuaaucaaaggcucuuuucagagccaccaaaaaaaaaaaaaaaaaaaaaaaaaaaaaaaaaaaaaaaaaaaaaaaaaaaaaaaaaaaaaaaaaaaaaaaaaaaaaaaaaaaaaaaaaaaaaaaaaaaaa

SEQ ID NO: 16527 - RNA, 1686 nt, Artificial Sequence; identical to SEQ ID NO: 16521
  mRNA product Design i-3 (hSL-A100) comprising derived and/or modified sequence from LASV(Pinneo-NIG-1969;Clade I)__AIT17836__GPCmut1 (opt1)

SEQ ID NO: 16528 - RNA, 1686 nt, Artificial Sequence
  mRNA product Design i-3 (hSL-A100) comprising derived and/or modified sequence from LASV(ISTH0009-NIG-2011;Clade II)__AIT17404__GPCmut1 (opt1)
aggagaaagcuuaccaugggccagaucaucaccuucuuccaggaggugccccacgucaucgaggaggugaugaacaucgugcugaucgcccucagccugcuggccauccucaaggggaucuacaacgucgcgaccugcggccuguucgggcugguguccuuccuccugcugugcggccgcagcugcuccacgaccuacaaggggguguacgagcuccagacccuggagcuggacauggccagccucaacaugaccaugccgcuguccugcacgaagaacaacagccaccacuacaucauggucggcaacgagaccggccuggagcucacccugaccaacacguccaucaucaaccacaaguucugcaaccugagcgacgcccacaagaagaaccucuacgaccacgcccugauguccaucaucagcaccuuccaccuguccauccccaacuucaaccaguacgaggccaugagcugcgacuucaacgggggcaagaucuccgugcaguacaaccucagccacgcguacgccguggacgccgccaaccacugcgggaccaucgcgaacggcguccugcagaccuucaugcggauggccuggggcggguccuacaucgcccuggacagcggcugcggguccugggacugcaucaugacgagcuaccaguaccucaucauccagaacaccaccugggaggaccacugccaguucucccgccccagccccaucggcuaccuggggcugcucagccagcggacccgcgacaucuacaucucccggcgccggcgcggcacguucaccuggacccugagcgacuccgagggcaacgagacccccgggggcuacugccugacgcgguggaugcucaucgaggccgagcugaagugcuucgggaacaccgccguggcgaagugcaacgagaagcacgacgaggaguucugcgacaugcugcgccucuucgacuucaacaagcaggccauccggcgccugaagaccccggcccagaugagcauccagcugaucaacaaggccgugaacgcccucaucaacgaccagcugaucaugaagaaccaccuccgggacaucaugugcauccccuacugcaacuacuccaaguacugguaccugaaccacaccgucacgggcaagaccagccugccccgcugcuggcugguguccaacgggagcuaccucaacgagacccacuucuccgacgacaucgagcagcaggcggacaacaugaucaccgagcugcugcagaaggaguacauggaccggcagggcaagacgccgcucggccugguggaccuguucgucuucagcaccuccuucuaccucaucagcaucuuccugcaccugaucaagauccccacccaccgccacaucaccgggaagcccugccccaagccgcaccggcugaaccacaugggcaucugcuccugcgggcucuacaagcaccccggcgugcccgugaaguggaagcgcugaggacuaguuauaagacugacuagcccgaugggccucccaacgggcccuccuccccuccuugcaccgagauuaaucaaaggcucuuuucagagccaccaaaaaaaaaaaaaaaaaaaaaaaaaaaaaaaaaaaaaaaaaaaaaaaaaaaaaaaaaaaaaaaaaaaaaaaaaaaaaaaaaaaaaaaaaaaaaaaaaaaaa

SEQ ID NO: 16529 - RNA, 1686 nt, Artificial Sequence
  mRNA product Design i-3 (hSL-A100) comprising derived and/or modified sequence from LASV(ISTH2010-NIG-2012;Clade II)__AIT17482__GPCmut1 (opt1)
aggagaaagcuuaccaugggccagaucaucaccuucuuccaggaggugccccacgucaucgaggaggugaugaacaucgugcugaucgcccucagccugcuggccauccucaaggggaucuacaacgucgcgaccugcggccuguucgggcugguguccuuccuccugcugugcggccgcagcugcuccacgaccuacaaggggguguacgagcuccagacccuggagcuggacauggccagccucaacaugaccaugccgcuguccugcacgaagaacaacagccaccacuacaucauggucggcaacgagaccggccuggagcucacccugaccaacacguccaucaucaaccacaaguucugcaaccugagcgacgcccacaagaagaaccucuacgaccacgcccugauguccaucaucagcaccuuccaccuguccauccccaacuucaaccaguacgaggccaugagcugcgacuucaacgggggcaagaucuccgugcaguacaaccucagccacgcguacgccguggacgccgccaaccacugcgggaccaucgcgaacggcguccugcagaccuucaugcggauggccuggggcggguccuacaucgcccuggacagcggcugcggguccugggacugcaucaugacgagcuaccaguaccucaucauccagaacaucaccugggaggaccacugccaguucucccgccccagccccaucggcuaccuggggcugcucagccagcggacccgcgacaucuacaucucccggcgccggcgcggcaccuucacguggacccugagcgacuccgagggcaacgagacccccgggggcuacugccugacccgguggaugcucaucgaggccgagcugaagugcuucgggaacacggccguggcgaagugcaacgagaagcacgacgaggaguucugcgacaugcugcgccucuucgacuucaacaagcaggccauccggcgccugaagaccccggcccagaugagcauccagcugaucaacaaggccgugaacgcccucaucaacgaccagcugaucaugaagaaccaccuccgggacaucaugugcauccccuacugcaacuacuccaaguacugguaccugaaccacaccgucaccggcaagacgagccugccccgcugcuggcugguguccaacgggagcuaccucaacgagacccacuucuccgacgacaucgagcagcaggcggacaacaugaucaccgagcugcugcagaaggaguacaucgaccggcagggcaagaccccgcucggccugguggaccuguucgucuucagcacguccuucuaccucaucagcaucuuccugcaccuggugaagauccccacccaccgccacguggucgggaagcccugccccaagccgcaccggcugaaccacaugggcaucugcuccugcgggcucuacaagcaccccggcgugcccgugaaguggaagcgcugaggacuaguuauaagacugacuagcccgaugggccucccaacgggcccuccuccccuccuugcaccgagauuaaucaaaggcucuuuucagagccaccaaaaaaaaaaaaaaaaaaaaaaaaaaaaaaaaaaaaaaaaaaaaaaaaaaaaaaaaaaaaaaaaaaaaaaaaaaaaaaaaaaaaaaaaaaaaaaaaaaaaa

SEQ ID NO: 16530 - RNA, 1686 nt, Artificial Sequence
  mRNA product Design i-3 (hSL-A100) comprising derived and/or modified sequence from LASV(Lassa virus/H.sapiens-wt/NGA/2015/ISTH_0543;Clade II)__AVO03639__GPCmut1 (opt1)
aggagaaagcuuaccaugggccagaucaucaccuucuuccaggaggugccccacgucaucgaggaggugaugaacaucgugcugaucgcccucagccugcuggccauccucaaggggaucuacaacgucgcgaccugcggccuguucgggcugguguccuuccuccugcugugcggccgcagcugcuccacgaccuacaaggggguguacgagcuccagacccuggagcuggacauggccaaccucaacaugaccaugccgcugagcugcacgaagaacaacucccaccacuacaucauggucggcaacgagaccggccuggagcucacccugaccaacacgagcaucaucaaccacaaguucugcaaccuguccgacgcccacaagaagaaccucuacgaccacgcccugaugagcaucaucuccaccuuccaccugagcauccccaacuucaaccaguacgaggccauguccugcgacuucaacgggggcaagaucagcgugcaguacaaccucucccacaccuacgcgguggacgccgccaaccacugcgggaccaucgccaacggcguccugcagacguucaugcggauggcguggggcgggagcuacaucgcccuggacuccggcugcgggagcugggacugcaucaugaccuccuaccaguaccucgugauccagaacaccaccugggaggaccacugccaguucagccgccccucccccaucggcuaccuggggcugcucagccagcggacgcgcgacaucuacaucagccggcgccggcgcggcaccuucaccuggacccuguccgacagcgagggcaacgagacgcccgggggcuacugccugacccgguggaugcucaucgaggccgagcugaagugcuucgggaacaccgccguggccaagugcaacgagaagcacgacgaggaguucugcgacaugcugcgccucuucgacuucaacaagcaggcgauccggcgccugaagaccccggcccagauguccauccagcugaucaacaaggccgucaacgcccucaucaacgaccagcugaucaugaagaaccaccuccgggacaucaugugcauccccuacugcaacuacagcaaguacugguaccugaaccacacggugaccggcaagaccucccugccccgcugcuggcuggugagcaacggguccuaccucaacgagacccacuucagcgacgacaucgagcagcaggccgacaacaugaucacggagcugcugcagaaggaguacaucgaccggcagggcaagaccccgcucggccuggucgaccuguucguguucuccaccagcuucuaccucaucuccaucuuccugcaccuggugaagauccccacccaccgccacaucacggggaagcccugccccaagccgcaccggcugaaccacaugggcaucugcagcugcgggcucuacaagcaccccggcguccccgugaaguggaagcgcugaggacuaguuauaagacugacuagcccgaugggccucccaacgggcccuccuccccuccuugcaccgagauuaaucaaaggcucuuuucagagccaccaaaaaaaaaaaaaaaaaaaaaaaaaaaaaaaaaaaaaaaaaaaaaaaaaaaaaaaaaaaaaaaaaaaaaaaaaaaaaaaaaaaaaaaaaaaaaaaaaaaaa

SEQ ID NO: 16531 - RNA, 1686 nt, Artificial Sequence
  mRNA product Design i-3 (hSL-A100) comprising derived and/or modified sequence from LASV(Lassa virus/H.sapiens-wt/NGA/2016/ISTH_0009;Clade II)__AVO03571__GPCmut1 (opt1)
aggagaaagcuuaccaugggccagaucaucaccuucuuccaggaggugccccacgucaucgaggaggugaugaacaucgugcugaucgcccucagccugcuggccauccucaaggggaucuacaacgucgcgaccugcggccugcuggggcucguguccuuccugcugcucugcggccgcagcugcuccacgaccuacaaggggguguacgagcugcagacccuggagcucgacauggccagccugaacaugaccaugccgcuguccugcacgaagaacaacagccaccacuacaucauggucggcaacgagaccggccucgagcugacccugaccaacacguccaucaucaaccacaaguucugcaaccucagcgacgcccacaagaagaaccuguacgaccacgcccugauguccaucaucagcaccuuccaccucuccauccccaacuucaaccaguacgaggccaugagcugcgacuucaacgggggccggaucuccgugcaguacaaccugagccacuccuacgcgguggacgccgccaaccacugcgggaccaucgccaacggcguccugcagaccuucaugcgcauggcguggggcgggagcuacaucgcccucgacuccggcugcgggagcugggacugcaucaugacguccuaccaguaccugaucauccagaacaccaccugggaggaccacugccaguucagccggcccagccccaucggcuaccuggggcuccugucccagcgcacccgggacaucuacaucagccgccggcgccggggcacguucaccuggacccuguccgacagcgagggcaacgagacccccgggggcuacugccucacgcgcuggaugcugaucgaggccgagcugaagugcuucgggaacaccgccguggccaagugcaacgagaagcacgacgaggaguucugcgacaugcuccggcuguucgacuucaacaagcaggcgauccgccggcugaagaccccggcccagauguccauccagcucaucaacaaggccgugaacgcccugaucaacgaccagcugaucaugaagaaccaccuccgcgacaucaugugcauccccuacugcaacuacagcaaguacugguaccugaaccacaccgucacgggcaagaccucccugccccggugcuggcucgugagcaacggguccuaccugaacgagacccacuucagcgacgacaucgagcagcaggccgacaacaugaucaccgagcugcuccagaaggaguacaucgaccgccagggcaagacgccgcugggccugguggaccucuucgucuucuccaccagcuucuaccugaucuccaucuuccugcaccuggugaagauccccacccaccggcacaucaccgggaagcccugccccaagccgcaccgccucaaccacaugggcaucugcagcugcgggcuguacaaccaccccggcgugcccgucaaguggaagcggugaggacuaguuauaagacugacuagcccgaugggccucccaacgggcccuccuccccuccuugcaccgagauuaaucaaaggcucuuuucagagccaccaaaaaaaaaaaaaaaaaaaaaaaaaaaaaaaaaaaaaaaaaaaaaaaaaaaaaaaaaaaaaaaaaaaaaaaaaaaaaaaaaaaaaaaaaaaaaaaaaaaaa

SEQ ID NO: 16532 - RNA, 1686 nt, Artificial Sequence
  mRNA product Design i-3 (hSL-A100) comprising derived and/or modified sequence from LASV(Lassa virus/H.sapiens-wt/NGA/2016/ISTH_0017;Clade II)__AVO03567__GPCmut1 (opt1)
aggagaaagcuuaccaugggccagaucaucaccuucuuccaggaggugccccacgucaucgaggaggugaugaacaucgugcugaucgcccucagccugcuggccauccucaaggggaucuacaacgucgcgaccugcggccuguucgggcugguguccuuccuccugcugugcggccgcagcugcuccacgaccuacaaggggguguacgagcuccagacccuggagcuggacauggccagccucaacaugaccaugccgcuguccugcacgaagaacaacagccaccacuacaucauggucggcaacgagaccggccuggagcucacccugaccaacacguccaucaucaaccacaaguucugcaaccugagcgacgcccacaagaagaaccucuacgaccacgcccugauguccaucaucagcaccuuccaccuguccauccccaacuucaaccaguacgaggccaugagcugcgacuucaacgggggcaagaucuccgugcaguacaaccucagccacaccuacgcgaucgacgccgccaaccacugcgggaccaucgccaacggcgugcugcagacguucaugcggauggcguggggcggguccuacaucgcccuggacagcggcugcggguccugggacugcaucaugaccagcuaccaguaccucaucauccagaacaccaccugggaggaccacugccaguucucccgccccagccccaucggcuaccuggggcugcucagccagcggacgcgcgacaucuacaucucccggcgccggcgcggcaccuucaccuggacccugagcgacuccgagggcaacgagacgcccgggggcuacugccugacccgguggaugcucaucgaggccgagcugaagugcuucgggaacaccgccgucgccaagugcaacgagaagcacgacgaggaguucugcgacaugcugcgccucuucgacuucaacaagcaggcgauccggcgccugaagaccccggcccagaugagcauccagcugaucaacaaggccgugaacgcccucaucaacgaccagcugaucaugaagaaccaccuccgggacaucaugugcauccccuacugcaacuacuccaaguacugguaccugaaccacacggugaccggcaagaccagccugccccgcugcuggcuggucuccaacgggagcuaccucaacgagacccacuucuccgacgacaucgagcagcaggccgacaacaugaucacggagcugcugcagaaggaguacauggaccggcagggcaagaccccgcucggccugguggaccuguucguguucagcaccuccuucuaccucaucagcaucuuccugcaccugguccgcauccccacccaccggcacgugaucgggaagcccugccccaagccgcaccgccugaaccacaugggcaucugcuccugcgggcucuacaagcaccccggcgugcccgucaaguggaagcggugaggacuaguuauaagacugacuagcccgaugggccucccaacgggcccuccuccccuccuugcaccgagauuaaucaaaggcucuuuucagagccaccaaaaaaaaaaaaaaaaaaaaaaaaaaaaaaaaaaaaaaaaaaaaaaaaaaaaaaaaaaaaaaaaaaaaaaaaaaaaaaaaaaaaaaaaaaaaaaaaaaaaa

SEQ ID NO: 16533 - RNA, 1686 nt, Artificial Sequence
  mRNA product Design i-3 (hSL-A100) comprising derived and/or modified sequence from LASV(Lassa virus/H.sapiens-wt/NGA/2018/ISTH_0959;Clade II)__AVV65099__GPCmut1 (opt1)
aggagaaagcuuaccaugggccagaucaucaccuucuuccaggaggugccccacgucaucgaggaggugaugaacaucgugcugaucgcccucagccugcuggccauccucaaggggaucuacaacgucgugaccugcggccuguucgggcugguguccuuccuccugcugugcggccgcagcugcuccacgaccuacaagggggucuacgagcuccagacccuggagcuggacauggcgagccucaacaugaccaugccgcuguccugcacgaagaacaacagccaccacuacaucauggugggcaacgagaccggccuggagcucacccugaccaacacguccaucaucaaccacaaguucugcaaccugagcgacgcccacaagaagaaccucuacgaccacgcccugauguccaucaucagcaccuuccaccuguccauccccaacuucaaccaguacgaggccaugagcugcgacuucaacgggggcaagaucuccgugcaguacaaccucagccacgccuacgcgaucgacgccgccaaccacugcgggaccaucgccaacggcguccugcagaccuucaugcggauggcguggggcggguccuacaucgcccuggacagcggcugcggguccugggacugcaucaugacgagcuaccaguaccucaucauccagaacaccaccugggaggaccacugccaguucucccgccccagccccaucggcuaccuggggcugcucagccagcggacccgcgacaucuacaucucccggcgccggcgcggcacguucaccuggacccugagcgacuccgagggcaacgagacccccgggggcuacugccugacgcgguggaugcucaucgaggccgagcugaagugcuucgggaacaccgccguggccaagugcaacgagaagcacgacgaggaguucugcgacaugcugcgccucuucgacuucaacaagcaggcgauccggcgccugaagaccccggcccagaugagcauccagcugaucaacaaggccgugaacgcccucaucaacgaccagcugaucaugaagaaccaccuccgggacaucaugugcauccccuacugcaacuacuccaaguacugguaccugaaccacaccgucacgggcaagaccagccugccccgcugcuggcugguguccaacgggagcuaccucaacgagacccacuucuccgacgacaucgagcagcaggccgacaacaugaucaccgagcugcugcagaaggaguacaucgaccggcagggcaagacgccgcucggccugguggaccuguucgucuucagcaccuccuucuaccucaucagcaucuuccugcaccuggugaagauccccacccaccgccacgugaucgggaagcccugccccaagccgcaccggcugaaccacaugggcaucugcuccugcgggcucuacaagcaccccggcguccccgugaaguggaagcgcugaggacuaguuauaagacugacuagcccgaugggccucccaacgggcccuccuccccuccuugcaccgagauuaaucaaaggcucuuuucagagccaccaaaaaaaaaaaaaaaaaaaaaaaaaaaaaaaaaaaaaaaaaaaaaaaaaaaaaaaaaaaaaaaaaaaaaaaaaaaaaaaaaaaaaaaaaaaaaaaaaaaaa

SEQ ID NO: 16534 - RNA, 1686 nt, Artificial Sequence
  mRNA product Design i-3 (hSL-A100) comprising derived and/or modified sequence from LASV(LASV003-NIG-2008;Clade II)__AIT17580__GPCmut1 (opt1)
aggagaaagcuuaccaugggccagaucaucaccuucuuccaggaggugccccacgucaucgaggaggugaugaacaucgugcugaucgcccucagccugcuggccauccucaaggggaucuacaacgucgcgaccugcggccuguucgggcugguguccuuccuccugcugugcggccgcagcugcuccacgaccuacaaggggguguacgagcuccagacccuggagcuggacauggccagccucaacaugaccaugccgcuguccugcacgaagaacaacagccaccacuacaucauggucggcaacgagaccggccuggagcucacccugaccaacacguccaucaucaaccacaaguucugcaaccugagcgacgcccacaagaagaaccucuacgaccacgcccugauguccaucaucagcaccuuccaccuguccauccccaacuucaaccaguacgaggccaugagcugcgacuucaacgggggcaagaucuccgugcaguacaaccucagccacaccuacgcgguggacgccgccaaccacugcgggaccaucgccaacggcguccugcagacguucaugcggauggcguggggcggguccuacaucgcccuggacagcggcugcggguccugggacugcaucaugaccagcuaccaguaccucaucauccagaacaccaccugggaggaccacugccaguucucccgccccagccccaucggcuaccuggggcugcucagccagcggacgcgcgacaucuacaucucccggcgccggcgcggcaccuucaccuggacccugagcgacuccgagagcaacgagacgccgggcggguacugccugacccgguggaugcucaucgaggccgagcugaagugcuucggcaacaccgccguggccaagugcaacgagaagcacgacgaggaguucugcgacaugcugcgccucuucgacuucaacaagcaggcgauccggcgccugaaggcccccgcccagauguccauccagcugaucaacaaggccgugaacgcccucaucaacgaccagcugaucaugaagaaccaccuccgggacaucaugugcauccccuacugcaacuacagcaaguacugguaccugaaccacaccgucacggggcgcaccucccugccccggugcuggcuggugagcaacggcuccuaccucaacgagacccacuucagcgacgacaucgagcagcaggcggacaacaugaucaccgagcugcugcagaaggaguacauggaccgccaggggaagacgccgcucggccugguggaccuguucgucuucuccaccagcuucuaccucaucuccaucuuccugcaccuggugaagauccccacccaccggcacgugaucggcaagcccugccccaagccgcaccgccugaaccacauggggaucugcagcugcggccucuacaagcaccccgggguccccgugaaguggaagcggugaggacuaguuauaagacugacuagcccgaugggccucccaacgggcccuccuccccuccuugcaccgagauuaaucaaaggcucuuuucagagccaccaaaaaaaaaaaaaaaaaaaaaaaaaaaaaaaaaaaaaaaaaaaaaaaaaaaaaaaaaaaaaaaaaaaaaaaaaaaaaaaaaaaaaaaaaaaaaaaaaaaaa

SEQ ID NO: 16535 - RNA, 1686 nt, Artificial Sequence
  mRNA product Design i-3 (hSL-A100) comprising derived and/or modified sequence from LASV(LASV035-NIG-2009;Clade II)__AIT17588__GPCmut1 (opt1)
aggagaaagcuuaccaugggccagaucaucaccuucuuccaggaggugccccacgucaucgaggaggugaugaacaucgugcugaucgcccucagccugcuggccauccucaaggggaucuacaacgucgcgaccugcggccuguucgggcugguguccuuccuccugcugugcggccgcagcugcuccacgaccuacaaggggguguacgagcuccagacccuggagcuggacauggccagccucaacaugaccaugccgcuguccugcacgaagaacaacagccaccacuacaucauggucggcaacgagaccggccuggagcucacccugaccaacacguccaucaucaaccacaaguucugcaaccugagcgacgcccacaagaagaaccucuacgaccacgcccugauguccaucaucagcaccuuccaccuguccauccccaacuucaaccaguacgaggccaugagcugcgacuucaacgggggcaagaucuccgugcaguacaaccucagccacgcguacgccguggacgccgccaaccacugcgggaccaucgcgaacggcguccugcagaccuucaugcggauggccuggggcggguccuacaucgcccuggacagcggcugcggguccugggacugcaucaugacgagcuaccaguaccucaucauccagaacaccaccugggaggaccacugccaguucucccgccccagccccaucggcuaccuggggcugcucagccagcggacccgcgacaucuacaucucccggcgccggcgcggcacguucaccuggacccugagcgacuccgagggcaacgagacccccgggggcuacugccugacgcgguggaugcucaucgaggccgagcugaagugcuucgggaacaccgccguggcgaagugcaacgagaagcacgacgaggaguucugcgacaugcugcgccucuucgacuucaacaagcaggccauccggcgccugaaggccccggcccagaugagcauccagcugaucaacaaggccgugaacgcgcucaucaacgaccagcugaucaugaagaaccaccuccgggacaucaugugcauccccuacugcaacuacuccaaguacugguaccugaaccacaccgucaccggcaagacgagccugccccgcugcuggcugguguccaacgggagcuaccucaacgagacccacuucuccgacgacaucgagcagcaggccgacaacaugaucaccgagcugcugcagaaggaguacaucgaccggcagggcaagaccccgcucggccugguggaccuguucgucuucagcacguccuucuaccucaucagcaucuuccugcaccuggugaagauccccacccaccgccacgugaucgggaagcccugccccaagccgcaccggcugaaccacaugggcaucugcuccugcgggcucuacaagcaccccggcguccccgugaaguggaagcgcugaggacuaguuauaagacugacuagcccgaugggccucccaacgggcccuccuccccuccuugcaccgagauuaaucaaaggcucuuuucagagccaccaaaaaaaaaaaaaaaaaaaaaaaaaaaaaaaaaaaaaaaaaaaaaaaaaaaaaaaaaaaaaaaaaaaaaaaaaaaaaaaaaaaaaaaaaaaaaaaaaaaaa

SEQ ID NO: 16536 - RNA, 1686 nt, Artificial Sequence
  mRNA product Design i-3 (hSL-A100) comprising derived and/or modified sequence from LASV(LASV1000-NIG-2009;Clade II)__AIT17782__GPCmut1 (opt1)
aggagaaagcuuaccaugggccagaucaucaccuucuuccaggaggugccccacgucaucgaggaggugaugaacaucgugcugaucgcccucagccugcuggccauccucaaggggaucuacaacgucgcgaccugcggccuguucgggcugguguccuuccuccugcugugcggccgcagcugcuccacgaccuacaaggggguguacgagcuccagacccuggagcuggacauggccagccucaacaugaccaugccgcuguccugcacgaagaacaacagccaccacuacaucauggucggcaacgagaccggccuggagcucacccugaccaacacguccaucaucaaccacaaguucugcaaccugagcgacgcccacaagaagaaccucuacgaccacgcccugauguccaucaucagcaccuuccaccuguccauccccaacuucaaccaguacgaggccaugagcugcgacuucaacgggggcaagaucuccgugcaguacaaccucagccacaccuacgcgguggacgccgccaaccacugcgggaccaucgccaacggcguccugcagacguucaugcggauggcguggggcggguccuacaucgcccuggacagcggcugcggguccugggacugcaucaugaccagcuaccaguaccucaucauccagaacaccaccugggaggaccacugccaguucucccgccccagccccaucggcuaccuggggcugcucagccagcggacgcgcgacaucuacaucucccggcgccggcgcggcaccuucaccuggacccugagcgacuccgagggcaacgagacgcccgggggcuacugccugacccgguggaugcucaucgaggccgagcugaagugcuucgggaacaccgccguggccaagugcaacgagaagcacgacgaggaguucugcgacaugcugcgccucuucgacuucaacaagcaggcgaucaagcggcugaagaccccggcccagaugagcauccagcugaucaacaaggccgugaacgcccucaucaacgaccagcugaucaugaagaaccaccuccgcgacaucaugugcauccccuacugcaacuacuccaaguacugguaccugaaccacacggucaccggcaagaccagccugccccggugcuggcugguguccaacgggagcuaccucaacgagacccacuucuccgacgacaucgagcagcaggccgacaacaugaucacggagcugcugcagaaggaguacaucgaccgccagggcaagaccccgcucggccugguggaccuguucgucuucagcaccuccuucuaccucaucagcaucuuccugcaccuggugaagauccccacccaccggcacguggucgggaagcccugccccaagccgcaccgccugaaccacaugggcaucugcuccugcgggcucuacaagcaccccggcgugcccgugaaguggaagcggugaggacuaguuauaagacugacuagcccgaugggccucccaacgggcccuccuccccuccuugcaccgagauuaaucaaaggcucuuuucagagccaccaaaaaaaaaaaaaaaaaaaaaaaaaaaaaaaaaaaaaaaaaaaaaaaaaaaaaaaaaaaaaaaaaaaaaaaaaaaaaaaaaaaaaaaaaaaaaaaaaaaaa

SEQ ID NO: 16537 - RNA, 1686 nt, Artificial Sequence
  mRNA product Design i-3 (hSL-A100) comprising derived and/or modified sequence from LASV(LASV221-NIG-2010;Clade II)__AIT17624__GPCmut1 (opt1)
aggagaaagcuuaccaugggccagaucaucaccuucuuccaggaggugccccacgucaucgaggaggugaugaacaucgugcugaucgcccucagccugcuggccauccucaaggggaucuacaacgucgcgaccugcggccuguucgggcugguguccuuccuccugcugugcggccgcagcugcuccacgaccuacaaggggguguacgagcuccagacccuggagcuggacauggccagccucaacaugaccaugccgcuguccugcacgaagaacaacagccaccacuacaucauggucggcaacgagaccggccuggagcucacccugaccaacacguccaucaucaaccacaaguucugcaaccugagcgacgcccacaagaagaaccucuacgaccacgcccugauguccaucaucagcaccuuccaccuguccauccccaacuucaaccaguacgaggccaugagcugcgacuucaacgggggcaagaucuccgugcaguacaaccucagccacaccuacgcgaucgacgccgccaaccacugcgggaccaucgccaacggcgugcugcagacguucaugcggauggcguggggcggguccuacaucgcccuggacagcggcugcggguccugggacugcaucaugaccagcuaccaguaccucaucauccagaacaccaccugggaggaccacugccaguucucccgccccagccccaucggcuaccuggggcugcucagccagcggacgcgcgacaucuacaucucccggcgccggcgcggcaccuucaccuggacccugagcgacuccgagggcaacgagacgcccgggggcuacugccugacccgguggaugcucaucgaggccgagcugaagugcuucgggaacaccgccgucgccaagugcaacgagaagcacgacgaggaguucugcgacaugcugcgccucuucgacuucaacaagcaggcgauccggcgccugaagaccccggcccagaugagcauccagcugaucaacaaggccgugaacgcccucaucaacgaccagcugaucaugaagaaccaccuccgggacaucaugugcauccccuacugcaacuacuccaaguacugguaccugaaccacacggugaccggcaagaccagccugccccgcugcuggcuggucuccaacgggagcuaccucaacgagacccacuucuccgacgacaucgagcagcaggccgacaacaugaucacggagaugcugcagaaggaguacauggaccggcagggcaagaccccgcugggccucguggaccuguucguguucagcaccuccuucuaccugaucagcaucuuccuccaccuggucaagauccccacccaccgccacgugaucgggaagcccugccccaagccgcaccggcugaaccacaugggcaucugcuccugcgggcuguacaagcaccccggcgugcccgucaaguggaagcgcugaggacuaguuauaagacugacuagcccgaugggccucccaacgggcccuccuccccuccuugcaccgagauuaaucaaaggcucuuuucagagccaccaaaaaaaaaaaaaaaaaaaaaaaaaaaaaaaaaaaaaaaaaaaaaaaaaaaaaaaaaaaaaaaaaaaaaaaaaaaaaaaaaaaaaaaaaaaaaaaaaaaaa

SEQ ID NO: 16538 - RNA, 1686 nt, Artificial Sequence
  mRNA product Design i-3 (hSL-A100) comprising derived and/or modified sequence from LASV(LASV237-NIG-2010;Clade II)__AIT17638__GPCmut1 (opt1)
aggagaaagcuuaccaugggccagaucaucaccuucuuccaggaggugccccacgucaucgaggaggugaugaacaucgugcugaucgcccucagccugcuggccauccucaaggggaucuacaacgucgcgaccugcggccuguucgggcugguguccuuccuccugcugugcggccgcagcugcuccacgaccuacaaggggguguacgagcuccagacccuggagcuggacauggccagccucaacaugaccaugccgcuguccugcacgaagaacaacagccaccacuacaucauggucggcaacgagaccggccuggagcucacccugaccaacacguccaucaucaaccacaaguucugcaaccugagcgacgcccacaagaaggaccucuacgaccacgcccugauguccaucaucagcaccuuccaccuguccauccccaacuucaaccaguacgaggccaugagcugcgacuucaacgggggcaagaucuccgugcaguacaaccucagccacaccuacgcgguggacgccgccaaccacugcgggaccaucgccaacggcguccugcagacguucaugcggauggcguggggcggguccuacaucgcccuggacagcggcugcggguccugggacugcaucaugaccagcuaccaguaccucaucauccagaacaccaccugggaggaccacugccaguucucccgccccagccccaucggcuaccuggggcugcucagccagcggacgcgcgacaucuacaucucccggcgccggcgcggcaccuucaccuggacccugagcgacuccgagggcaacgagacgcccgggggcuacugccugacccgguggaugcucaucgaggccgagcugaagugcuucgggaacaccgccguggccaagugcaacgagaagcacgacgaggaguucugcgacaugcugcgccucuucgacuucaacaagcaggcgauccggcgccugaagaccccggcccagaugagcauccagcugaucaacaaggccgugaacgcccucaucaacgaccagcugaucaugaagaaccaccuccgggacaucaugugcauccccuacugcaacuacuccaaguacugguaccugaaccacacggucaccggcaagaccagccugccccgcugcuggcugguguccaacgggagcuaccucaacgagacccacuucuccgacgacaucgagcagcaggccgacaacaugaucacggagcugcugcagaaggaguacauggaccggcagggcaagaccccgcucggccugguggaccuguucgucuucagcaccuccuucuaccucaucagcaucuuccugcaccugaucaagauccccacccaccgccacaucacggggaagcccugccccaagccgcaccggcugaaccacaugggcaucugcuccugcgggcucuacaagcaccccggcgugcccgugaaguggaagcgcugaggacuaguuauaagacugacuagcccgaugggccucccaacgggcccuccuccccuccuugcaccgagauuaaucaaaggcucuuuucagagccaccaaaaaaaaaaaaaaaaaaaaaaaaaaaaaaaaaaaaaaaaaaaaaaaaaaaaaaaaaaaaaaaaaaaaaaaaaaaaaaaaaaaaaaaaaaaaaaaaaaaaa

SEQ ID NO: 16539 - RNA, 1686 nt, Artificial Sequence
  mRNA product Design i-3 (hSL-A100) comprising derived and/or modified sequence from LASV(LASV253-NIG-2011;Clade II)__AIT17670__GPCmut1 (opt1)
aggagaaagcuuaccaugggccagaucaucaccuucuuccaggaggugccccacgucaucgaggaggugaugaacaucgugcugaucgcccucagccugcuggccauccucaaggggaucuacaacgucgcgaccugcggccuguucgggcugguguccuuccuccugcugugcggccgcagcugcuccacgaccuacaaggggguguacgagcuccagacccuggagcuggacauggccagccucaacaugaccaugccgcuguccugcacgaagaacaacagccaccacuacaucauggucggcaacgagaccggccuggagcucacccugaccaacacguccaucaucaaccacaaguucugcaaccugagcgacgcccacaagaagaaccucuacgaccacgcccugauguccaucaucagcaccuuccaccuguccauccccaacuucaaccaguacgaggccaugagcugcgacuucaacgggggcaagaucuccgugcaguacaaccucagccacaccuacgcgguggacgccgccaaccacugcgggaccaucgccaacggcguccugcagacguucaugcggauggcguggggcggguccuacaucgcccuggacagcggcugcggguccugggacugcaucaugaccagcuaccaguaccucaucauccagaacaccaccugggaggaccacugccaguucucccgccccagccccaucggcuaccuggggcugcucagccagcggacgcgcgacaucuacaucucccggcgccggcgcggcaccuucaccuggacccugagcgacuccgagggcaacgagacgcccgggggcuacugccugacccgguggaugcucaucgaggccgagcugaagugcuucgggaacaccgccguggccaagugcaacgagaagcacgacgaggaguucugcgacaugcugcgccucuucgacuucaacaagcaggcgauccggcgccugaaggccccggcccagaugagcauccagcugaucaacaaggccgugaacgcccucaucaacgaccagcugaucaugaagaaccaccuccgggacaucaugugcauccccuacugcaacuacuccaaguacugguaccugaaccacaccgucacgggccgcaccagccugccccggugcuggcugguguccaacgggagcuaccucaacgagacccacuucuccgacgacaucgagcagcaggcggacaacaugaucaccgagcugcugcagaaggaguacaucgaccgccagggcaagacgccgcucggccugguggaccuguucgucuucagcaccuccuucuaccucaucagcaucuuccugcaccuggugaagauccccacccaccggcacaucaucgggaagcccugccccaagccgcaccgccugaaccacaugggcaucugcuccugcgggcucuacaagcaccccggcgugcccgucaaguggaagcggugaggacuaguuauaagacugacuagcccgaugggccucccaacgggcccuccuccccuccuugcaccgagauuaaucaaaggcucuuuucagagccaccaaaaaaaaaaaaaaaaaaaaaaaaaaaaaaaaaaaaaaaaaaaaaaaaaaaaaaaaaaaaaaaaaaaaaaaaaaaaaaaaaaaaaaaaaaaaaaaaaaaaa

SEQ ID NO: 16540 - RNA, 1686 nt, Artificial Sequence
  mRNA product Design i-3 (hSL-A100) comprising derived and/or modified sequence from LASV(LASV254-NIG-2011;Clade II)__AIT17674__GPCmut1 (opt1)
aggagaaagcuuaccaugggccagaucaucaccuucuuccaggaggugccccacgucaucgaggaggugaugaacaucgugcugaucgcccucagccugcuggccauccucaaggggaucuacaacgucgcgaccugcggccuguucgggcugguguccuuccuccugcugugcggccgcagcugcuccacgaccuacaaggggguguacgagcuccagacccuggagcuggacaugaccaaccucaacaugacgaugccgcugagcugcaccaagaacaacucccaccacuacaucauggucggcaacgagaccggccuggagcucacccugacgaacaccagcaucaucaaccacaaguucugcaaccuguccgacgcccacaagaagaaccucuacaaccacgcccugaugagcaucaucuccaccuuccaccugagcauccccaacuucaaccaguacgaggccauguccugcgacuucaacgggggcaagaucagcgugcaguacaaccucucccacagcuacgccguggacgcggccaaccacugcgggaccaucgccaacggcguccugcagacguucaugcggauggccuggggcggguccuacaucgcgcuggacagcggcugcgggaacugggacugcaucaugaccuccuaccaguaccucaucauccagaacaccaccugggaggaccacugccaguucagccgccccucccccaucggcuaccuggggcugcucagccagcggacgcgcgacaucuacaucagccggcgccggcgcggcaccuucaccuggacccuguccgacagcgagggcaacgagacgcccgggggcuacugccugacccgguggaugcucaucgaggccgagcugaagugcuucgggaacaccgccguggccaagugcaacgagaagcacgacgaggaguucugcgacaugcugcgccucuucgacuucaacaagcaggccauccggcgccugaagaccccggcgcaggccaacauccagcugaucaacaaggccgugaacgcccucaucaacgaccagcugaucaugaagaaccaccuccgggacaucaugugcauccccuacugcaacuacuccaaguacugguaccugaaccacacggucaccggcaagaccagccugccccgcugcuggcugguguccaacgggagcuaccucaacgagacccacuucuccgacgacaucgagcagcaggccgacaacaugaucacggagcugcugcagaaggaguacauggaccggcagggcaagaccccgcucggccugguggaccuguucgucuucagcaccuccuucuaccucaucagcaucuuccugcaccuggugaagauccccacccaccgccacgugaucgggaagcccugccccaagccgcaccggcugaaccacaugggcaucugcuccugcgggcucuacaagcaccccggcguccccgugaaguggaagcgcugaggacuaguuauaagacugacuagcccgaugggccucccaacgggcccuccuccccuccuugcaccgagauuaaucaaaggcucuuuucagagccaccaaaaaaaaaaaaaaaaaaaaaaaaaaaaaaaaaaaaaaaaaaaaaaaaaaaaaaaaaaaaaaaaaaaaaaaaaaaaaaaaaaaaaaaaaaaaaaaaaaaaa

SEQ ID NO: 16541 - RNA, 1686 nt, Artificial Sequence
  mRNA product Design i-3 (hSL-A100) comprising derived and/or modified sequence from LASV(Nig08-A19;Clade III)__ADU56618__GPCmut1 (opt1)
aggagaaagcuuaccaugggccagaucgugaccuucuuccaggaggucccccacgugaucgaggaggugaugaacaucguccugaucgcccucagcauccuggccauccugaaggggcucuacaacaucgcgaccugcggccugaucgggcuggugacguuccuccugcuguccggccgcagcugcuccaugaccuacaaggggguguacgagcuccagacccuggagcugaacaugaacacccucaacaugacgaugccgcugagcugcaccaagaacaacucccaccacuacaucauggucggcaacgagaccggccuggagcucacccugacgaacaccagccugcuccaccacaaguucugcaaccuguccgacgcccacaagaagaaccuguacgaccacacccucaugagcaucaucuccaccuuccaccugagcauccccaacuucaaccaguacgaggccauguccugcgacuucaacgggggcaagaucacggugcaguacaaccugagccacuccuacgccaucgacgccgcgaaccacugcgggaccguggccaacggcguccuccagaccuucaugcggauggccuggggcgggagcuacaucgcccuggacuccggcugcgggaagugggacugcaucaugaccagcuaccaguaccugaucauccagaacacgaccugggaggaccacugccaguucucccgccccagccccaucggcuaccucgggcugcugucccagcggacccgcgacaucuacaucagccggcgccggcgcggcaccuucacguggacccucagcgacuccgagggcaacgagacccccgggggcuacugccugacccgguggaugcugaucgaggcggagcucaagugcuucgggaacacggccguggccaagugcaacgagaagcacgacgaggaguucugcgacaugcugcgccuguucgacuucaacaagcaggccauccggcgccucaaggccccggcgcagaugagcauccagcugaucaacaaggccgugaacgcccugaucaacgaccagcucaucaugaagaaccaccuccgggacaucaugugcauccccuacugcaacuacuccaaguacugguaccugaaccacaccagcaccggccgcaccucccugccccggugcuggcuggucagcaacggguccuaccugaacgagacgcacuucagcgacgacaucgagcagcaggccgacaacaugaucaccgagaugcuccagaaggaguaccuggaccgccagggcaagaccccgcugggccucguggaccuguucguguucuccaccagcuucuaccugaucuccaucuuccugcaccucgucaagauccccacgcaccggcacaucguggggaagcccugccccaagccgcaccgccugaaccacaugggcaucugcagcugcgggcuguacaagcagcccggcgugcccguccgguggaagcgcugaggacuaguuauaagacugacuagcccgaugggccucccaacgggcccuccuccccuccuugcaccgagauuaaucaaaggcucuuuucagagccaccaaaaaaaaaaaaaaaaaaaaaaaaaaaaaaaaaaaaaaaaaaaaaaaaaaaaaaaaaaaaaaaaaaaaaaaaaaaaaaaaaaaaaaaaaaaaaaaaaaaaa

SEQ ID NO: 16542 - RNA, 1689 nt, Artificial Sequence
  mRNA product Design i-3 (hSL-A100) comprising derived and/or modified sequence from LASV(G1180-SLE-2010;Clade IV)__AIT17168__GPCmut1 (opt1)
aggagaaagcuuaccaugggccagaucgugaccuucuuccaggaggucccccacgugaucgaggaggugaugaacaucguccugaucgcccucagcauccuggccgugcugaaggggcucuacaacuucgcgaccugcggccugguggggcugcucacguuccugcugcucugcggccgcuccugcaccgccagccgguacaagggggucuacgagcugcagacccuggagcucaacauggagacccugaacaugacgaugccgcuguccugcaccaagaacaacagccaccacuacaucauggugggcaacgagaccggccucgagcugacccugacgaacaccuccaucaucaaccacaaguucugcaaccucagcgacgcccacaagaagaaccuguacgaccacgcccugauguccaucaucagcaccuuccaccucuccauccccaacuucaaccaguacgaggccaugagcugcgacuucaacgggggcaagaucuccgugcaguacaaccugagccacuccuacgcgggggacgccgccaaccacugcggcaccgucgccaacggggugcugcagacguucaugcgcauggcguggggcggcagcuacaucgcccucgacuccgggugcggcagcugggacugcaucaugaccuccuaccaguaccugaucauccagaacaccaccugggaggaccacugccaguucagccggcccucccccaucggguaccugggccuccugagccagcgcacgcgggacaucuacaucagccgccggcgccggggcaccuucaccuggacccuguccgacagcgaggggaaggacacgccgggcggguacugccucacccgcuggaugcugaucgaggccgagcugaagugcuucggcaacaccgccguggccaagugcaacgagaagcacgacgaggaguucugcgacaugcuccggcuguucgacuucaacaagcaggcgauccagcgccugaaggcccccgcccagauguccauccagcucaucaacaaggccgucaacgcccugaucaacgaccagcugaucaugaagaaccaccuccgggacaucaugugcauccccuacugcaacuacagcaaguacugguaccugaaccacaccacgaccgggaagaccucccugcccaagugcuggcucgugagcaacggcuccuaccugaacgagacccacuucagcgacgacaucgagcagcaggcggacaacaugaucacggagaugcugcagaaggaguacauggagcgccagggcaagaccccgcucgggcugguggaccuguucgucuucuccaccagcuucuaccucaucuccaucuuccugcaccuggugaagauccccacccaccggcacaucgugggcaagagcugccccaagccccaccgccugaaccacauggggaucugcuccugcggccucuacaagcagccggggguccccgugaaguggaagcggugaggacuaguuauaagacugacuagcccgaugggccucccaacgggcccuccuccccuccuugcaccgagauuaaucaaaggcucuuuucagagccaccaaaaaaaaaaaaaaaaaaaaaaaaaaaaaaaaaaaaaaaaaaaaaaaaaaaaaaaaaaaaaaaaaaaaaaaaaaaaaaaaaaaaaaaaaaaaaaaaaaaaa

SEQ ID NO: 16543 - RNA, 1689 nt, Artificial Sequence
  mRNA product Design i-3 (hSL-A100) comprising derived and/or modified sequence from LASV(G1442-SLE-2011;Clade IV)__AIT17180__GPCmut1 (opt1)
aggagaaagcuuaccaugggccagaucgugaccuucuuccaggaggucccccacgugaucgaggaggugaugaacaucguccugaucgcccucagcauccuggccgugcugaaggggcucuacaacguggcgaccugcggccugaucgggcuggucacguuccuccugcugugcggccgcuccugcaccaccacccucuacaaggggguguacgagcugcagacgcuggagcucaacauggagacccugaacaugaccaugccgcugagcugcaccaagaacaacucccaccacuacauccgggugggcaacgagacgggccucgagcugacccugaccaacaccagcaucaucaaccacaaguucugcaaccucuccgacgcccacaagaagaaccuguacgaccacgcccugaugagcaucaucuccacguuccaccucagcauccccaacuucaaccaguacgaggccauguccugcgacuucaacgggggcaagaucagcguccaguacaaccugucccacagcuacgccggggacgcggccaaccacugcggcaccguggccaacggggugcugcagaccuucaugcgcauggccuggggcggcuccuacaucgcgcucgacagcgggugcggcaacugggacugcaucaugaccuccuaccaguaccugaucauccagaacacgaccugggacgaccacugccaguucagccggcccucccccaucggguaccugggccuccugagccagcgcacccgggacgucuacaucucccgccggcgccggggcaccuucacguggacccugagcgacagcgaggggaaggacaccccgggcggguacugccucacccgcuggaugcugaucgaggccgagcugaagugcuucggcaacacggccguggccaagugcaacgagaagcacgacgaggaguucugcgacaugcuccggcuguucgacuucaacaagcaggccauccagcgccugaaggcgcccgcccagauguccauccagcucaucaacaaggccgugaacgcccugaucaacgaccagcugaucaugaagaaccaccuccgggacaucaugugcauccccuacugcaacuacagcaaguacugguaccugaacaacaccgccaccgggaagaccucccugcccaagugcuggcucaucagcaacggcuccuaccugaacgagacgcacuucagcgacgacaucgagcaggaggcggacaacaugaucaccgagaugcugcagaaggaguacauggagcgccagggcaagaccccgcucgggcuggucgaccuguucguguucuccaccagcuucuaccucaucuccaucuuccugcaccuggugaagauccccacgcaccggcacaucgucggcaagagcugccccaagccccaccgccugaaccacauggggaucugcuccugcggccucuacaagcagccgggggugcccgugcgguggaagcgcugaggacuaguuauaagacugacuagcccgaugggccucccaacgggcccuccuccccuccuugcaccgagauuaaucaaaggcucuuuucagagccaccaaaaaaaaaaaaaaaaaaaaaaaaaaaaaaaaaaaaaaaaaaaaaaaaaaaaaaaaaaaaaaaaaaaaaaaaaaaaaaaaaaaaaaaaaaaaaaaaaaaaa

SEQ ID NO: 16544 - RNA, 1689 nt, Artificial Sequence
  mRNA product Design i-3 (hSL-A100) comprising derived and/or modified sequence from LASV(G3010-SLE-2013;Clade IV)__AIT17344__GPCmut1 (opt1)
aggagaaagcuuaccaugggccagaucgugaccuucuuccaggaggucccccacgugaucgaggaggugaugaacaucguccugaucgcccucagcauccuggccgugcugaaggggcucuacaacuucgcgaccugcggccugguggggcuggucacguuccuccugcugugcggccgcuccugcaccaccagccucuacaaggggguguacgagcugcagacccuggagcucaacauggagacgcugaacaugaccaugccgcuguccugcaccaagaacaacagccaccacuacaucauggugggcaacgagaccggccucgagcugacgcugaccaacaccuccaucaucaaccacaaguucugcaaccucagcgacgcccacaagaagaaccuguacaaccacgcccugauguccaucaucagcaccuuccaccucuccauccccaacuucaaccaguacgaggccaugagcugcgacuucaacgggggcaagaucuccguccaguacaaccugagccacuccuacgccggggacgcggccagccacugcggcacgguggccaacggggugcugcagaccuucaugcggauggccuggggcggcuccuacaucgcgcucgacagcgggugcggcaagugggacugcaucaugaccuccuaccaguaccugaucauccagaacaccacgugggaggaccacugccaguucagccgccccucccccaucggguaccugggccuccugagccagcggacccgcgacaucuacaucagccggcgccggcgcggcaccuucaccuggacgcuguccgacagcgaggggaaggacaccccgggcggguacugccucacccgguggaugcugaucgaggccgagcugaagugcuucggcaacaccgccgucgccaagugcaacgagaagcacgacgaggaguucugcgacaugcuccgccuguucgacuucaacaagcaggccauccagcggcugaagacgcccgcgcagauguccauccagcucaucaacaaggccgugaacgcccugaucaacgaccagcugaucaugaagaaccaccuccgcgacaucaugugcauccccuacugcaacuacagcaaguacugguaccugaaccacaccaccaccgggaagacgucccugcccaagugcuggcucgugagcaacggcuccuaccugaacgagacccacuucagcgacgacaucgagcagcaggccgacaacaugaucaccgagaugcugcagaaggaguacauggagcggcagggcaagaccccgcucgggcuggucgaccuguucguguucuccacgagcuucuaccucaucuccaucuuccugcaccuggugaagauccccacccaccgccacaucgucggcaagagcugccccaagccccaccggcugaaccacauggggaucugcuccugcggccucuacaagcagccgggggugcccgugcgcuggaagcggugaggacuaguuauaagacugacuagcccgaugggccucccaacgggcccuccuccccuccuugcaccgagauuaaucaaaggcucuuuucagagccaccaaaaaaaaaaaaaaaaaaaaaaaaaaaaaaaaaaaaaaaaaaaaaaaaaaaaaaaaaaaaaaaaaaaaaaaaaaaaaaaaaaaaaaaaaaaaaaaaaaaaa

SEQ ID NO: 16545 - RNA, 1689 nt, Artificial Sequence
  mRNA product Design i-3 (hSL-A100) comprising derived and/or modified sequence from LASV(G502-SLE-2009;Clade IV)__AIT17126__GPCmut1 (opt1)
aggagaaagcuuaccaugggccagaucgugaccuucuuccaggaggucccccacgugaucgaggaggugaugaacaucguccugaucgcccucagcauccuggccgugcugaaggggcucuacaacuucgcgaccugcggccugguggggcugcucacguuccugcugcucugcggccgcuccugcaccaccgggcuguacaagggcgucuacgagcugcagacccucgagcugaacauggagacgcugaacaugaccaugccgcucagcugcaccaagaacaacucccaccacuacaucauggugggcaacgagaccgggcuggagcugacgcucaccaacaccagcaucaucaaccacaaguucugcaaccuguccgacgcccacaagaagaaccuguacgaccacgcccucaugagcaucaucuccaccuuccaccugagcauccccaacuucaaccaguacgaggccauguccugcgacuucaacggcgggaagaucagcgugcaguacaaccugucccacagcuacgccggcgacgcggccgaccacugcgggacggucgccaacggcgugcuccagaccuucaugcggauggccuggggcggguccuacaucgcgcuggacagcggcugcgggcgcugggacugcaucaugaccuccuaccaguaccugaucauccagaacaccacgugggaggaccacugccaguucagccggcccucccccaucggcuaccucggccugcugagccagcgcacccgggacaucuacaucucccgccggcgccgggggaccuucaccuggacgcucagcgacagcgagggcaaggacacccccgggggcuacugccugacccgcuggaugcugaucgaggccgagcucaagugcuucgggaacaccgccguggccaagugcaacgagaagcacgacgaggaguucugcgacaugcugcggcuguucgacuucaacaagcaggccauccagcgccucaaggcgccggcccagauguccauccagcugaucaacaaggccgucaacgcccugaucaacgaccagcucgugaugaagaaccaccuccgggacaucaugugcauccccuacugcaacuacagccgcuacugguaccugaaccacacgaccaccggccggaccucccugcccaagugcuggcuggugagcaacggcuccuaccugaacgagacgcacuucagcgacgacaucgagcagcaggccgacaacaugaucaccgagaugcuccagaaggaguacauggagcgccaggggaagaccccgcugggccuggucgaccucuucguguucuccaccagcuucuaccugaucuccaucuuccugcaccuggugaagauccccacgcaccggcacaucgucggcaagagcugccccaagccccaccgccucaaccacauggggaucugcuccugcgggcuguacaagcagccgggcgugcccgugaaguggaagcggugaggacuaguuauaagacugacuagcccgaugggccucccaacgggcccuccuccccuccuugcaccgagauuaaucaaaggcucuuuucagagccaccaaaaaaaaaaaaaaaaaaaaaaaaaaaaaaaaaaaaaaaaaaaaaaaaaaaaaaaaaaaaaaaaaaaaaaaaaaaaaaaaaaaaaaaaaaaaaaaaaaaaa

SEQ ID NO: 16546 - RNA, 1689 nt, Artificial Sequence
  mRNA product Design i-3 (hSL-A100) comprising derived and/or modified sequence from LASV(G733-SLE-2010;Clade IV)__AIT17154__GPCmut1 (opt1)
aggagaaagcuuaccaugggccagaucgugaccuucuuccaggaggucccccacgugaucgaggaggugaugaacaucguccugaucgcccucagcauccuggccgugcugaaggggcucuacaacuucgcgaccugcggcaucguggggcuggucuccuuccugcuccugugcggccgcagcugcacgaccucccuguacaaggggguguacgagcuccagacccuggagcugaacauggagacccucaacaugacgaugccgcugagcugcaccaagaacaacucccaccacuacaucauggugggcaacgagaccggccuggagcucacccugacgaacaccagcaucaucaaccacaaguucugcaaccuguccgacgcccacaagaagaaccucuacgaccacgcccugaugagcaucaucuccaccuuccaccugagcauccccaacuucaaccaguacgaggccauguccugcgacuucaacgggggcaagaucagcguccaguacaaccucucccacagcuacgccggggacgcggccaaccacugcggcaccaucgccaacggggugcugcagacguucaugcggauggccuggggcggcuccuacaucgcgcuggacagcgggugcgaccgcugggacugcaucaugaccuccuaccaguaccucaucauccagaacaccaccugggaggaccacugccaguucagccggcccucccccaucggcuaccuggggcugcucagccagcgcacgcgggacaucuacaucagccgccggcgccggggcaccuucaccuggacccuguccgacagcgagggcaaggacacgcccgggggcuacugccugacccgcuggaugcucaucgaggccgagcugaagugcuucgggaacaccgccguggccaagugcaacgagaagcacgacgaggaguucugcgacaugcugcggcuguucgacuucaacaagcaggccauccagcgccugaaggcgccggcccagauguccauccagcugaucaacaaggccgucaacgcccucaucaacgaccagcugaucaugaagaaccaccuccgggacaucaugugcauccccuacugcaacuacagcaaguacugguaccucaaccacaccacgaccggcaagaccucccugcccaagugcuggcuggugagcaacggguccuaccucaacgagacccacuucagcgacgacaucgagcagcaggccgacaacaugaucacggagaugcugcagaaggaguacauggagcgccagggcaagaccccgcugggccucguggaccuguucgucuucuccaccagcuucuaccugaucuccaucuuccuccaccuggugaagauccccacccaccggcacguggucggcaagagcugccccaagccccaccgccugaaccacauggggaucugcuccugcgggcuguacggccagccgggggugcccgugaaguggaagcggugaggacuaguuauaagacugacuagcccgaugggccucccaacgggcccuccuccccuccuugcaccgagauuaaucaaaggcucuuuucagagccaccaaaaaaaaaaaaaaaaaaaaaaaaaaaaaaaaaaaaaaaaaaaaaaaaaaaaaaaaaaaaaaaaaaaaaaaaaaaaaaaaaaaaaaaaaaaaaaaaaaaaa

SEQ ID NO: 16547 - RNA, 1689 nt, Artificial Sequence
  mRNA product Design i-3 (hSL-A100) comprising derived and/or modified sequence from MOPV/LASV reassortant(IGS-1;Clade IV)__AFY05576__GPCmut1 (opt1)
aggagaaagcuuaccaugggccagaucgugaccuucuuccaggaggucccccacgugaucgaggaggugaugaacaucguccugaucgcccucagcgugcuggccgugcugaaggggcucuacaacuucgcgaccugcggccuggucgggcuggugacguuccuccugcugugcggccgcuccugcaccaccagccucuacaaggggguguacgagcugcagacccuggagcucaacauggagacgcugaacaugaccaugccgcuguccugcaccaagaacaacagccaccacuacaucauggucggcaacgagaccggccucgagcugacgcugaccaacaccuccaucaucaaccacaaguucugcaaccucagcgacgcccacaagaagaaccuguacgaccacgcccugauguccaucaucagcaccuuccaccucuccauccccaacuucaaccaguacgaggccaugagcugcgacuucaacgggggcaagaucuccgugcaguacaaccugagccacuccuacgccggggacgcggccaaccacugcggcacgguggccaacgggguccugcagaccuucaugcggauggccuggggcggcagcuacaucgcgcucgacuccgggugcggcaacugggacugcaucaugaccagcuaccaguaccugaucauccagaacaccacgugggaggaccacugccaguucucccgccccagccccaucggguaccugggccuccugucccagcggacccgcgacaucuacaucagccggcgccggcgcggcaccuucaccuggacgcugagcgacuccgagggggaggacaccccgggcggguacugccucacccgguggaugcugaucgaggccgagcugaagugcuucggcaacaccgccguggccaagugcaacgagaagcacgacgaggaguucugcgacaugcuccgccuguucgacuucaacaagcaggccauccagcggcugaaggcgcccgcccagaugagcauccagcucaucaacaaggccgugaacgcccugaucaacgaccagcugaucaugaagaaccaccuccgcgacaucaugugcauccccuacugcaacuacuccaaguacugguaccugaaccacacgaccaccgggcggaccagccugcccaagugcuggcucgucuccaacggcagcuaccugaacgagacgcacuucuccgacgacaucgagcagcaggccgacaacaugaucaccgagaugcugcagaaggaguacauggagcgccagggcaagaccccgcucgggcugguggaccuguucguguucagcaccuccuucuaccucaucagcaucuuccugcaccuggucaagauccccacgcaccggcacaucgugggcaaguccugccccaagccccaccgccugaaccacauggggaucugcagcugcggccucuacaagcagccgggggugcccgucaaguggaagcggugaggacuaguuauaagacugacuagcccgaugggccucccaacgggcccuccuccccuccuugcaccgagauuaaucaaaggcucuuuucagagccaccaaaaaaaaaaaaaaaaaaaaaaaaaaaaaaaaaaaaaaaaaaaaaaaaaaaaaaaaaaaaaaaaaaaaaaaaaaaaaaaaaaaaaaaaaaaaaaaaaaaaa

SEQ ID NO: 16548 - RNA, 1689 nt, Artificial Sequence
  mRNA product Design i-3 (hSL-A100) comprising derived and/or modified sequence from LASV(LM765-SLE-2012;Clade IV)__AIT17814__GPCmut1 (opt1)
aggagaaagcuuaccaugggccagaucgugaccuucuuccaggaggucccccacgugaucgaggaggugaugaacaucguccugaucgcccucagcauccuggccgugcugaaggggcucuacaacuucgcgaccugcggccugguggggcuggucacguuccuccugcugugcggccgcuccugcaccaccagccucuacaaggggguguacgagcugcagacccuggagcucaacauggagacgcugaacaugaccaugccgcuguccugcaccaagaacaacagccaccacuacaucauggugggcaacgagaccggccucgagcugacgcugaccaacaccuccaucaucgaccacaaguucugcaaccucagcgacgcccaccggaagaaccuguacgaccacgcccugauguccaucaucagcaccuuccaccucuccauccccaacuucaaccaguacgaggccaugagcugcgacuucaacgggggcaagaucuccguccaguacaaccugagccacuccuacgccaaggacgcggccgaccacugcgggacgguggccaacggcgugcugcagaccuucaugcgcauggccuggggcgggagcuacaucgcgcucgacuccggcugcgggcggugggacugcaucaugaccagcuaccaguaccugaucauccagaacaccacgugggaggaccacugccaguucucccgccccagccccaucggcuaccuggggcuccugucccagcggacccgcgacaucuacaucagccggcgccggcgcggcaccuucaccuggacgcugagcgacuccgagggcaaggacacccccgggggcuacugccucacccgguggaugcugaucgaggccgagcugaagugcuucgggaacaccgccgucgccaagugcaacgagaagcacgacgaggaguucugcgacaugcuccgccuguucgacuucaacaagcaggccauccagcggcugaaggcgccggcccagaugagcauccagcucaucaacaaggccgugaacgcccugaucaacgaccagcugaucaugaagaaccaccuccgcgacaucaugugcauccccuacugcaacuacuccaaguacugguaccugaaccacacgaccaccggcaagaccagccugcccaagugcuggcucguguccaacgggagcuaccugaacgagacgcacuucuccgacgacaucgagcagcaggccgacaacaugaucaccgagaugcugcagaaggaguacauggagcggcagggcaagaccccgcucggccuggucgaccuguucguguucagcaccuccuucuaccucaucagcaucuuccugcaccuggugaagauccccacgcaccgccacaucgucgggaagcccugccccaagccgcaccggcugaaccacaugggcaucugcuccugcgggcucuacaagcagcccggcgugcccgugaaguggaagcgcugaggacuaguuauaagacugacuagcccgaugggccucccaacgggcccuccuccccuccuugcaccgagauuaaucaaaggcucuuuucagagccaccaaaaaaaaaaaaaaaaaaaaaaaaaaaaaaaaaaaaaaaaaaaaaaaaaaaaaaaaaaaaaaaaaaaaaaaaaaaaaaaaaaaaaaaaaaaaaaaaaaaaa

SEQ ID NO: 16549 - RNA, 1689 nt, Artificial Sequence
  mRNA product Design i-3 (hSL-A100) comprising derived and/or modified sequence from LASV(LM776-SLE-2012;Clade IV)__AIT17824__GPCmut1 (opt1)
aggagaaagcuuaccaugggccagaucgugaccuucuuccaggaggucccccacgugaucgaggaggugaugaacaucguccugaucgcccucagcauccuggccgugcugaaggggcucuacaacuucgcgaccugcggccugguggggcuggucacguuccuccugcugugcggccgcuccugcaccaccagcguguacaaggggguguacgagcuccagacccuggagcugaacauggagacgcucaacaugaccaugccgcuguccugcaccaagaacaacagccaccacuacaucauggucggcaacgagaccggccuggagcucacgcugaccaacaccuccaucaucaaccacaaguucugcaaccugagcgacgcccacaagaagaaccucuacgaccacgcccugauguccaucaucagcaccuuccaccuguccauccccaacuucaaccaguacgaggccaugagcugcgacuucaacgggggcaagaucuccgugcaguacaaccucagccacuccuacgccggggacgcggccaaccacugcggcacgguggccaacgggguccugcagaccuucaugcggauggccuggggcggcagcuacaucgcgcuggacuccgggugcggcaagugggacugcaucaugaccagcuaccaguaccucaucauccagaacaccacgugggaggaccacugccaguucucccgccccagccccaucggguaccugggccugcucucccagcggacccgcgacaucuacaucagccggcgccggcgcggcaccuucaccuggacgcugagcgacuccgaggggaaggacaccccgggcggguacugccugacccgguggaugcucaucgaggccgagcugaagugcuucggcaacaccgccguggccaagugcaacgagaagcacgacgaggaguucugcgacaugcugcgccucuucgacuucaacaagcaggccauccagcggcugaaggcgcccgcccagaugagcauccagcugaucaacaaggccgugaacgcccucaucaacgaccagcugaucaugaagaaccaccuccgcgacaucaugugcauccccuacugcaacuacuccaaguacugguaccugaaccacacgaccaccgggaagaccagccugcccaagugcuggcuggucuccaacggcagcuaccucaacgagacgcacuucuccgacgacaucgagcagcaggccgacaacaugaucaccgagaugcugcagaaggaguacauggagcggcagggcaagaccccgcuggggcucguggaccuguucguguucagcaccuccuucuaccugaucagcaucuuccuccaccuggucaagauccccacgcaccgccacaucgugggcaaguccugccccaagccccaccggcugaaccacauggggaucugcagcugcggccuguacaagcagccgggggugcccguccgcuggaagcggugaggacuaguuauaagacugacuagcccgaugggccucccaacgggcccuccuccccuccuugcaccgagauuaaucaaaggcucuuuucagagccaccaaaaaaaaaaaaaaaaaaaaaaaaaaaaaaaaaaaaaaaaaaaaaaaaaaaaaaaaaaaaaaaaaaaaaaaaaaaaaaaaaaaaaaaaaaaaaaaaaaaaa

SEQ ID NO: 16550 - RNA, 1689 nt, Artificial Sequence
  mRNA product Design i-3 (hSL-A100) comprising derived and/or modified sequence from LASV(Mad39;Clade IV)__ANH09722__GPCmut1 (opt1)
aggagaaagcuuaccaugggccagaucgugaccuucuuccaggaggucccccacgugaucgaggaggugaugaacaucguccugaucgcccucagcauccuggccgugcugaaggggcucuacaacguggcgaccugcggccugaucgggcuggucacguuccuccugcugugcggccgcuccugcaccaccacccucuacaaggggguguacgagcugcaggcccuggagcucaacauggagacgcugaacaugaccaugccgcugagcugcaccaagaacaacucccaccacuacauccgggugggcaacgagaccggccucgagcugacgcugaccaacaccagccucaucaaccacaaguucugcaaccuguccgacgcccacaagaagaaccuguacgaccacgcccucaugagcaucaucuccaccuuccaccugagcauccccaacuucaaccaguacgaggccauguccugcgacuucaacgacgggaagaucagcguccaguacaaccugucccacacguacgcgggcgacaccgccaaccacugcgggaccguggccaacggcgugcuccagaccuucaugcgcauggccuggggcgggagcuacaucgcgcuggacuccggcugcgggggcugggacugcaucaugacgagcuaccaguaccugaucauccagaacaccaccugggaggaccacugccaguucucccggcccagccccaucggguaccucggccugcugucccagcgcacccgggacaucuacaucagccgccggcgccggggcacguucaccuggacccucuccgacagcgaggggaaggacaccccgggcggguacugccugacgcgcuggaugcugaucgaggccgagcucaagugcuucggcaacaccgccgucgccaagugcaacgagaagcacgacgaggaguucugcgacaugcugcggcuguucgacuucaacaagcaggccauccagcgccucaaggcgcccgcccagaugagcauccagcugaucaacaaggccgugaacgcccugaucaacgaccagcucaucaugaagaaccaccuccgggacaucaugugcauccccuacugcaacuacuccaaguacugguaccugaaccacaccgugaccgggaagacgagccugcccaagugcuggcuggucuccaacggcagcuaccugaacgagacccacuucuccgacgacaucgagcagcaggccgacaacaugaucaccgagaugcuccagaaggaguacauggagcgccagggcaagaccccgcuggggcugguggaccucuucguguucagcacguccuucuaccugaucagcaucuuccugcaccuggucaagauccccacccaccggcacguggugggcaagcccugccccaagccgcaccgccucaaccacauggggaucugcuccugcggcuucuacaagcagcccgggguccccgugcgguggaagcgcugaggacuaguuauaagacugacuagcccgaugggccucccaacgggcccuccuccccuccuugcaccgagauuaaucaaaggcucuuuucagagccaccaaaaaaaaaaaaaaaaaaaaaaaaaaaaaaaaaaaaaaaaaaaaaaaaaaaaaaaaaaaaaaaaaaaaaaaaaaaaaaaaaaaaaaaaaaaaaaaaaaaaa

SEQ ID NO: 16551 - RNA, 1689 nt, Artificial Sequence
  mRNA product Design i-3 (hSL-A100) comprising derived and/or modified sequence from LASV(Z0947-SLE-2011;Clade IV)__AIT17840__GPCmut1 (opt1)
aggagaaagcuuaccaugggccagaucgugaccuucuuccaggaggucccccacgugaucgaggaggugaugaacaucguccugaucgcccucagcauccuggccgugcugaaggggcucuacaacuucgcgaccugcggccugguggggcuggucacguuccuccugcugugcggccgcuccugcaccaucagccucuacaaggggguguacgagcugcagacccuggagcucaacauggagacccugaacaugacgaugccgcuguccugcaccaagaacaacagccaccacuacaucauggugggcaacgagaccggccucgagcugacccugacgaacaccuccaucaucaaccacaaguucugcaaccucagcgacgcccacaagaagaaccuguacgaccacgcccugauguccaucaucagcaccuuccaccucuccauccccaacuucaaccaguacgaggccaugagcugcgacuucaacgggggcaagaucuccguccaguacaaccugagccacuccuacgccggggacgcggccaaccacugcggcaccguggccaacggggugcugcagacguucaugcggauggccuggggcggcagcuacaucgcgcucgacuccgggugcgaccgcugggacugcaucaugaccagcuaccaguaccugaucauccagaacaccaccugggaggaccacugccaguucucccggcccagccccaucggcuaccuggggcuccugucccagcgcacgcgggacaucuacaucagccgccggcgccggggcaccuucaccuggacccugagcgacuccgagggcaaggacacgcccgggggcuacugccucacccgcuggaugcugaucgaggccgagcugaagugcuucgggaacaccgccgucgccaagugcaacgagaagcacgacgaggaguucugcgacaugcuccggcuguucgacuucaacaagcaggccauccagcgccugaaggcgccggcccagaugagcauccagcucaucaacaaggccgugaacgcccugaucaacgaccagcugaucaugaagaaccaccuccgggacaucaugugcauccccuacugcaacuacuccaaguacugguaccugaaccacaccacgaccggcaagaccagccugcccaagugcuggcucguguccaacgggagcuaccugaacgagacccacuucuccgacgacaucgagcagcaggccgacaacaugaucacggagaugcugcagaaggaguacauggagcgccagggcaagaccccgcucggccuggucgaccuguucguguucagcaccuccuucuaccucaucagcaucuuccugcaccuggugaagauccccacccaccggcacaucgucgggaagcccugccccaagccgcaccgccugaaccacaugggcaucugcuccugcgggcucuacaagcagcccggcgugcccgugaaguggaagcggugaggacuaguuauaagacugacuagcccgaugggccucccaacgggcccuccuccccuccuugcaccgagauuaaucaaaggcucuuuucagagccaccaaaaaaaaaaaaaaaaaaaaaaaaaaaaaaaaaaaaaaaaaaaaaaaaaaaaaaaaaaaaaaaaaaaaaaaaaaaaaaaaaaaaaaaaaaaaaaaaaaaaa

SEQ ID NO: 16552 - RNA, 1689 nt, Artificial Sequence
  mRNA product Design i-3 (hSL-A100) comprising derived and/or modified sequence from LASV(Josiah;Clade IV)__NP_694870__GPCmut1 (opt4)
aggagaaagcuuaccaugggccagaucgugaccuucuuccaggaggugccccacgugaucgaggaggugaugaacaucgugcugaucgcccugagcgugcuggccgugcugaagggccuguacaacuucgccaccugcggccuggugggccuggugaccuuccugcugcugugcggcagaagcugcaccaccagccuguacaagggcguguacgagcugcagacccuggagcugaacauggagacccugaacaugaccaugccccugagcugcaccaagaacaacagccaccacuacaucauggugggcaacgagaccggccuggagcugacccugaccaacaccagcaucaucaaccacaaguucugcaaccugagcgacgcccacaagaagaaccuguacgaccacgcccugaugagcaucaucagcaccuuccaccugagcauccccaacuucaaccaguacgaggccaugagcugcgacuucaacggcggcaagaucagcgugcaguacaaccugagccacagcuacgccggcgacgccgccaaccacugcggcaccguggccaacggcgugcugcagaccuucaugagaauggccuggggcggcagcuacaucgcccuggacagcggcugcggcaacugggacugcaucaugaccagcuaccaguaccugaucauccagaacaccaccugggaggaccacugccaguucagcagacccagccccaucggcuaccugggccugcugagccagagaaccagagacaucuacaucagcagaagacgccggggcaccuucaccuggacccugagcgacagcgagggcaaggacacccccggcggcuacugccugaccagauggaugcugaucgaggccgagcugaagugcuucggcaacaccgccguggccaagugcaacgagaagcacgacgaggaguucugcgacaugcugagacuguucgacuucaacaagcaggccauccagagacugaaggcccccgcccagaugagcauccagcugaucaacaaggccgugaacgcccugaucaacgaccagcugaucaugaagaaccaccugagagacaucaugugcauccccuacugcaacuacagcaaguacugguaccugaaccacaccaccaccggcagaaccagccugcccaagugcuggcuggugagcaacggcagcuaccugaacgagacccacuucagcgacgacaucgagcagcaggccgacaacaugaucaccgagaugcugcagaaggaguacauggagagacagggcaagaccccccugggccugguggaccuguucguguucagcaccagcuucuaccugaucagcaucuuccugcaccuggugaagauccccacccacagacacaucgugggcaagagcugccccaagccccacagacugaaccacaugggcaucugcagcugcggccuguacaagcagcccggcgugcccgugaaguggaagagaugaggacuaguuauaagacugacuagcccgaugggccucccaacgggcccuccuccccuccuugcaccgagauuaaucaaaggcucuuuucagagccaccaaaaaaaaaaaaaaaaaaaaaaaaaaaaaaaaaaaaaaaaaaaaaaaaaaaaaaaaaaaaaaaaaaaaaaaaaaaaaaaaaaaaaaaaaaaaaaaaaaaaa

SEQ ID NO: 16553 - RNA, 1686 nt, Artificial Sequence
  mRNA product Design i-3 (hSL-A100) comprising derived and/or modified sequence from LASV(LP;Clade I)__AAF86701__GPCmut1 (opt4)
aggagaaagcuuaccaugggccagaucaucaccuucuuccaggaggugccccacgugaucgaggaggugaugaacaucgugcugaucgcccugagccugcuggccauccugaagggccuguacaacaucgccaccugcggcaucaucggccugguggccuuccuguuccugugcggcaagagcugcagccugacccugaagggcggcuacgagcugcagacccuggagcugaacauggagacccugaacaugaccaugccccugagcugcaccaagaacagcagccaccacuacaucagagugggcaacgagaccggccuggagcugacccugaccaacaccagcaucaucaaccacaaguucugcaaccugagcgacgcccacaagaagaaccuguacgaccacgcccugaugagcaucaucagcaccuuccaccugagcauccccaacuucaaccaguacgaggccaugagcugcgacuucaacggcggcaagaucagcgugcaguacaaccugagccacagcuacgccggcgacgccgccgagcacugcggcaccguggccaacggcgugcugcagaccuucaugagaauggccuggggcggcagauacaucgcccuggacagcggcugcggcaacugggacugcaucaugaccagcuaccaguaccugaucauccagaacaccaccugggaggaccacugccaguucagcagacccagccccaucggcuaccugggccugcugagccagagaaccagagacaucuacaucagcagaagacgccggggcaccuucaccuggacccugagcgacagcgagggcaacgagacccccggcggcuacugccugaccagauggaugcugaucgaggccgagcugaagugcuucggcaacaccgccguggccaagugcaacgagaagcacgacgaggaguucugcgacaugcugagacuguucgacuucaacaagcaggccaucagaagacugaaggcccccgcccagaugagcauccagcugaucaacaaggccgugaacgcccugaucaacgaccagcugaucaugaagaaccaccugagagacaucaugugcauccccuacugcaacuacagcaaguacugguaccugaaccacaccagcagcggcagaaccagccugcccaagugcuggcugaucagcaacggcagcuaccugaacgagacccaguucagcgacgacaucgagcagcaggccgacaacaugaucaccgagaugcugcagaaggaguacaucgagagacagggcaagaccccccugggccugguggacaucuucaucuucagcaccagcuucuaccugaucagcaucuuccugcaccugaucaagauccccacccacagacacaucgugggcaagcccugccccaagccccacagacugaaccacaugggcgugugcagcugcggccuguacaagcaccccggcgugcccaccaaguggaagagaugaggacuaguuauaagacugacuagcccgaugggccucccaacgggcccuccuccccuccuugcaccgagauuaaucaaaggcucuuuucagagccaccaaaaaaaaaaaaaaaaaaaaaaaaaaaaaaaaaaaaaaaaaaaaaaaaaaaaaaaaaaaaaaaaaaaaaaaaaaaaaaaaaaaaaaaaaaaaaaaaaaaaa

SEQ ID NO: 16554 - RNA, 1686 nt, Artificial Sequence
  mRNA product Design i-3 (hSL-A100) comprising derived and/or modified sequence from LASV(803213;Clade II)__AAF86703__GPCmut1 (opt4)
aggagaaagcuuaccaugggccagaucaucaccuucuuccaggaggugccccacgugaucgaggaggugaugaacaucgugcugaucgcccugagccugcuggccauccugaagggcaucuacaacguggccaccugcggccuguucggccugaucagcuuccugcugcugugcggcagaagcugcagcgugaccuacaagggcguguacgagcugcagacccuggagcugaacauggccaaccugaacaugaccaugccccugagcugcaccaagaacaacagccaccacuacaucauggugggcaacgagaccggccuggagcugacccugaccaacaccagcaucaucaaccacaaguucugcaaccugagcgacgcccacaagaagaaccuguacgaccacgcccugaugagcaucaucagcaccuuccaccugagcauccccaacuucaaccaguacgaggccaugagcugcgacuucaacggcggcaagaucagcgugcaguacaaccugagccacagcuucgccguggacgccgccaaccacugcggcaccaucgccaacggcgugcugcagaccuucaugagaauggccuggggcggcagcuacaucgcccuggacagcggcugcggcaacugggacugcaucaugaccagcuaccaguaccugaucauccagaacaccaccugggaggaccacugccaguucagcagacccagccccaucggcuaccugggccugcugagccagagaaccagagacaucuacaucagcagaagacgccggggcaccuucaccuggacccugagcgacagcgagggcaacgaggcccccggcggcuacugccugaccagauggaugcugaucgaggccgagcugaagugcuucggcaacaccgccguggccaagugcaacgagaagcacgacgaggaguucugcgacaugcugagacuguucgacuucaacaagcaggccaucaagagacugaagacccccgcccagaugagcauccagcugaucaacaaggccgugaacgcccugaucaacgaccagcugaucaugaagaaccaccugagagacaucaugugcauccccuacugcaacuacagcagauacugguaccugaaccacaccgugaccggcaagaccagccugcccagaugcuggcuggugagcaacggcagcuaccugaacgagacccacuucagcgacgacaucgagcagcaggccgacaacaugaucaccgagaugcugcagaaggaguacauggacagacagggcaagaccccccugggccugguggaccuguucguguucagcaccagcuucuaccugaucagcaucuuccugcaccuggugaagauccccacccacagacacaucgugggcaagcccugccccaagccccacagacugaaccacaugggcaucugcagcugcggccuguacaagcaccccggcgugcccgugaaguggaagagaugaggacuaguuauaagacugacuagcccgaugggccucccaacgggcccuccuccccuccuugcaccgagauuaaucaaaggcucuuuucagagccaccaaaaaaaaaaaaaaaaaaaaaaaaaaaaaaaaaaaaaaaaaaaaaaaaaaaaaaaaaaaaaaaaaaaaaaaaaaaaaaaaaaaaaaaaaaaaaaaaaaaaa

SEQ ID NO: 16555 - RNA, 1686 nt, Artificial Sequence
  mRNA product Design i-3 (hSL-A100) comprising derived and/or modified sequence from LASV(GA391;Clade III)__CAA36645__GPCmut1 (opt4)
aggagaaagcuuaccaugggccagaucgugaccuucuuccaggaggugccccacgugaucgaggaggugaugaacaucgugcugaucgcccugagcauccuggccauccugaagggccuguacaacguggccaccugcggccugaucggccuggugaccuuccugcugcugagcggcagaagcugcagccugaucuacaagggcaccuacgagcugcagacccuggagcugaacauggagacccugaacaugaccaugccccugagcugcaccaagaacaacagccaccacuacaucagagugggcaacgagaccggccuggagcugacccugaccaacaccagcauccugaaccacaaguucugcaaccugagcgacgcccacaagagaaaccuguacgaccacagccugaugagcaucaucagcaccuuccaccugagcauccccaacuucaaccaguacgaggccaugagcugcgacuucaacggcggcaagaucaccgugcaguacaaccugagccacagcuucgccguggacgccgccggccacugcggcacccuggccaacggcgugcugcagaccuucaugagaauggccuggggcggcagcuacaucgcccuggacagcggcugcggcaacugggacugcaucaugaccagcuaccaguaccugaucauccagaacaccaccugggacgaccacugccaguucagcagacccagccccaucggcuaccugggccugcugagccagagaaccagagacaucuacaucagcagaagacgccggggcaccuucaccuggacccugagcgacagcgagggcaacgagacccccggcggcuacugccugaccagauggaugcugaucgaggccgagcugaagugcuucggcaacaccgccguggccaagugcaacgagaagcacgacgaggaguucugcgacaugcugagacuguucgacuucaacaagcaggccaucagaagacugaagacccccgcccagaugagcauccagcugaucaacaaggccgugaacgcccugaucaacgaccagcugaucaugaagaaccaccugagagacaucaugugcauccccuacugcaacuacagcagauacugguaccugaaccacaccagcaccggcaagaccagccugcccagaugcuggcugaucagcaacggcagcuaccugaacgagaccaaguucagcgacgacaucgagcagcaggccgacaacaugaucaccgagaugcugcagaaggaguacaucgacagacagggcaagaccccccugggccugguggaccuguucguguucagcaccagcuucuaccugaucagcaucuuccugcaccuggugaagauccccacccacagacacaucgugggcaagcccugccccaagccccacagacugaaccacaugggcaucugcagcugcggccuguacaagcagcccggcgugcccgugagauggaagagaugaggacuaguuauaagacugacuagcccgaugggccucccaacgggcccuccuccccuccuugcaccgagauuaaucaaaggcucuuuucagagccaccaaaaaaaaaaaaaaaaaaaaaaaaaaaaaaaaaaaaaaaaaaaaaaaaaaaaaaaaaaaaaaaaaaaaaaaaaaaaaaaaaaaaaaaaaaaaaaaaaaaaa

SEQ ID NO: 16556 - RNA, 1689 nt, Artificial Sequence
  mRNA product Design i-3 (hSL-A100) comprising derived and/or modified sequence from LASV(AV;Clade V)__CCA30314__GPCmut1 (opt4)
aggagaaagcuuaccaugggccagaucgugaccuucuuccaggaggugccccacgugaucgaggaggugaugaacaucgugcugaucgcccugagcauccuggccgugcugaagggccuguacaacaucgccaccugcggccugaucggccugaucaccuuccugcugcugugcggcagaagcugcagcagcaaccuguacaagggcguguacgagcugcagagccuggaccugaacauggagacccugaacaugaccaugccccugagcugcaccaagaacaacagccaccacuacaucagagugggcaacgacaccggccuggagcugacccugaccaacaccagcauccugaaccacaaguucugcaaccugagcgacgcccacaagaaggaccuguacgaccacgcccugaugagcaucaucagcaccuuccaccugagcauccccaacuucaaccaguacgaggccaugagcugcgacuucaacggcggcaagaucagcgugcaguacaaccugagccacagcuacgccaucgacgccgccaaccacugcggcaccguggccaacggcauccugcagaccuucaugagaauggccuggggcggcagcuacaucgcccuggacagcggcugcggcaacugggacugcaucaugaccagcuaccaguaccugaucauccagaacaccaccugggagaaccacugccaguucagcagacccagccccaucggcuaccugggccugcugagccagagaaccagagacaucuacaucagcagaagacgccggggcaccuucaccuggacccugagcgacagcgagggcaacgccacccccggcggcuacugccugaccagauggaugcugaucgaggccgagcugaagugcuucggcaacaccgccguggccaagugcaacgagaagcacgacgaggaguucugcgacaugcugagacuguucgacuucaacaagcaggccaucagcagacugaagagccccgcccagaugagcauccagcugaucaacaaggccgugaacgcccugaucaacgaccagcugaucaugaagaaccaccugagagacaucaugugcauccccuacugcaacuacagcaaguacugguaccugaaccacaccaucaccggcaagaccagccugcccaagugcuggcuggugagcaacggcagcuaccugaacgagacccacuucagcgacgacaucgagcagcaggccgacaacaugaucaccgagaugcugcagaaggaguacauggagagacagggcaagaccccccugggccugguggaccuguucguguucagcaccagcuucuaccugaucagcaucuuccugagacuggugaagauccccacccacagacacaucgugggcaagcccugccccaagccccacagacugaaccacaugggcaucugcagcugcggccuguacaagcagcccggcgugcccgugagauggaagagaugaggacuaguuauaagacugacuagcccgaugggccucccaacgggcccuccuccccuccuugcaccgagauuaaucaaaggcucuuuucagagccaccaaaaaaaaaaaaaaaaaaaaaaaaaaaaaaaaaaaaaaaaaaaaaaaaaaaaaaaaaaaaaaaaaaaaaaaaaaaaaaaaaaaaaaaaaaaaaaaaaaaaa

SEQ ID NO: 16557 - RNA, 1686 nt, Artificial Sequence
  mRNA product Design i-3 (hSL-A100) comprising derived and/or modified sequence from LASV(Togo/2016/7082;Clade VI)__AMR44577__GPCmut1 (opt4)
aggagaaagcuuaccaugggccagaucaucaccuucuuccaggaggugccccacgugaucgaggaggugaugaacaucgugcugaucgcccugagccugcuggccauccugaagggcguguacaacguggccaccugcggcaucaucggccuggugaccuuccuguuccugugcggcagaagcugcagccugaucuacaagggcagcuacgagcugcagacccuggagcugaacauggagacccugaacaugaccaugccccugagcugcaccaagaacagcagccaccacuacaucagagugggcaacgagaccggccuggagcugacccugaccaacaccagcaucaucaaccacaaguucugcaaccugagcgacgcccacaagagaaaccuguacgaccacgcccugaugagcauccugagcaccuuccaccugagcauccccaacuucaaccaguacgaggccaugagcugcgacuucaacggcggcaagaucagcgugcaguacaaccugagccacgccuacgccguggacgccgccgagcacugcggcaccguggccaacggcgugcugcagaccuucaugagaauggccuggggcggcagcuacaucgcccuggacagcggcugcggcaacugggacugcaucaugaccagcuaccaguaccugaucauccagaacaccaccugggaggaccacugccaguucagcagacccagccccaucggcuaccugggccugcugagccagagaaccagagacaucuacaucagcagaagacgccggggcaccuucaccuggacccugagcgacagcgagggcaacgagacccccggcggcuacugccugaccagauggaugcugaucgaggccgagcugaagugcuucggcaacaccgccguggccaagugcaacgagaagcacgacgaggaguucugcgacaugcugagacuguucgacuucaacaagcaggccauccagagacugaagagccccgcccagaugagcauccagcugaucaacaaggccgugaacgcccugaucaacgaccagcugaucaugaagaaccaccugagagacaugaugugcauccccuacugcaacuacagcaaguacugguaccugaaccacaccagcagcggcagaaccagccugcccaagugcuggcuggugagcaacggcagcuaccugaacgagacccacuucagcgacgacaucgagcagcaggccgacaacaugaucaccgagaugcugcagaaggaguacaucgacagacagggcaagaccccccugggccugguggaccuguucguguucagcaccagcuucuaccugaucagcaucuuccugcaccugaucaagauccccacccacagacacaucgugggcaagcccugccccaagccccacagacugaaccacaugggcaucugcagcugcggccuguacaagcagcccggcgugcccaccagauggaagagaugaggacuaguuauaagacugacuagcccgaugggccucccaacgggcccuccuccccuccuugcaccgagauuaaucaaaggcucuuuucagagccaccaaaaaaaaaaaaaaaaaaaaaaaaaaaaaaaaaaaaaaaaaaaaaaaaaaaaaaaaaaaaaaaaaaaaaaaaaaaaaaaaaaaaaaaaaaaaaaaaaaaaa

SEQ ID NO: 16558 - RNA, 1686 nt, Artificial Sequence
  mRNA product Design i-3 (hSL-A100) comprising derived and/or modified sequence from LASV(KAK-428;Clade n.d. (VII))__ANH09740__GPCmut1 (opt4)
aggagaaagcuuaccaugggccagaucgugaccuucuuccaggaggugccccacgugaucgaggaggugaugaacaucgugcugaucgcccugagccugcuggccauccugaagggccuguacaacuucgccaccugcggcgugaucggccugaucaccuuccugcugcugugcggcagaagcugcagcgccaccuacaagggccaguacgagcugcagacccuggagcugaacauggagagccugaacaugaccaugccccugagcugcaccaagaacaacagccaccacuacaucagagccggcaacaacaccggccuggagcugacccugaccaacaccagcaucaucagccacaaguucugcaaccugagcgacgcccacaagaagaaccuguacgaccacacccugaugagcaucaucaccaccuuccaccugagcauccccaacuucaaccaguacgaggccaugagcugcgacuucaacggcggcaagaucagcauccaguacaaccugagccacagcuacgccggcgacgccgcccagcacugcggcaccguggccaacggcgugcugcagaccuucaugagaauggccuggggcggcagcuaccuggcccuggacagcggcugcagaggcugggacugcaucaucagcagcuaccaguaccugaucauccagaacaccaccugggacgaccacugccaguucagcagacccagccccaucggcuaccugggcuucgugagccagaagaccagagacaucuacaucagcagaagacgccggggcaccuucaccuggacccugagcgacagcgagggccacgacaugcccggcggcuacugccugaccagauggaugcugaucgaggccgaccugaagugcuucggcaacaccgccguggccaagugcaacgagaagcacgacgaggaguucugcgacauguggagacuguucgacuucaacaagcaggccauccagagacugaaggcccccgcccagaugaacauccagcugaucaacaaggccgugaacgcccugaucaacgaccagcugaugaugaagaaccaccugagagacaucaugugcauccccuacugcaacuacagcaaguucugguaccugaacaacaccaccaccggcagaaccagccugcccagaugcuggcugaucagcaacggcagcuaccugaacgagacccacuucagcgacgacaucgagcagcaggccgacaacaugaucaccgagaugcugcagaaggaguacauggacagacagggcaagaccccccugggccugguggaccuguucguguucagcaccagcuucuaccugaucaccaucuuccugcaccuggugaagauccccacccacagacacaucgugggcaagcccugccccaagccccacagacugaaccacaugggcaucugcagcugcggccuguacaagcagcccggcgugcccgugagauggaagagaugaggacuaguuauaagacugacuagcccgaugggccucccaacgggcccuccuccccuccuugcaccgagauuaaucaaaggcucuuuucagagccaccaaaaaaaaaaaaaaaaaaaaaaaaaaaaaaaaaaaaaaaaaaaaaaaaaaaaaaaaaaaaaaaaaaaaaaaaaaaaaaaaaaaaaaaaaaaaaaaaaaaaa

SEQ ID NO: 16559 - RNA, 1686 nt, Artificial Sequence; identical to SEQ ID NO: 16553
  mRNA product Design i-3 (hSL-A100) comprising derived and/or modified sequence from LASV(Pinneo-NIG-1969;Clade I)__AIT17836__GPCmut1 (opt4)

SEQ ID NO: 16560 - RNA, 1686 nt, Artificial Sequence
  mRNA product Design i-3 (hSL-A100) comprising derived and/or modified sequence from LASV(ISTH0009-NIG-2011;Clade II)__AIT17404__GPCmut1 (opt4)
aggagaaagcuuaccaugggccagaucaucaccuucuuccaggaggugccccacgugaucgaggaggugaugaacaucgugcugaucgcccugagccugcuggccauccugaagggcaucuacaacguggccaccugcggccuguucggccuggugagcuuccugcugcugugcggcagaagcugcagcaccaccuacaagggcguguacgagcugcagacccuggagcuggacauggccagccugaacaugaccaugccccugagcugcaccaagaacaacagccaccacuacaucauggugggcaacgagaccggccuggagcugacccugaccaacaccagcaucaucaaccacaaguucugcaaccugagcgacgcccacaagaagaaccuguacgaccacgcccugaugagcaucaucagcaccuuccaccugagcauccccaacuucaaccaguacgaggccaugagcugcgacuucaacggcggcaagaucagcgugcaguacaaccugagccacgccuacgccguggacgccgccaaccacugcggcaccaucgccaacggcgugcugcagaccuucaugagaauggccuggggcggcagcuacaucgcccuggacagcggcugcggcagcugggacugcaucaugaccagcuaccaguaccugaucauccagaacaccaccugggaggaccacugccaguucagcagacccagccccaucggcuaccugggccugcugagccagagaaccagagacaucuacaucagcagaagacgccggggcaccuucaccuggacccugagcgacagcgagggcaacgagacccccggcggcuacugccugaccagauggaugcugaucgaggccgagcugaagugcuucggcaacaccgccguggccaagugcaacgagaagcacgacgaggaguucugcgacaugcugagacuguucgacuucaacaagcaggccaucagaagacugaagacccccgcccagaugagcauccagcugaucaacaaggccgugaacgcccugaucaacgaccagcugaucaugaagaaccaccugagagacaucaugugcauccccuacugcaacuacagcaaguacugguaccugaaccacaccgugaccggcaagaccagccugcccagaugcuggcuggugagcaacggcagcuaccugaacgagacccacuucagcgacgacaucgagcagcaggccgacaacaugaucaccgagcugcugcagaaggaguacauggacagacagggcaagaccccccugggccugguggaccuguucguguucagcaccagcuucuaccugaucagcaucuuccugcaccugaucaagauccccacccacagacacaucaccggcaagcccugccccaagccccacagacugaaccacaugggcaucugcagcugcggccuguacaagcaccccggcgugcccgugaaguggaagagaugaggacuaguuauaagacugacuagcccgaugggccucccaacgggcccuccuccccuccuugcaccgagauuaaucaaaggcucuuuucagagccaccaaaaaaaaaaaaaaaaaaaaaaaaaaaaaaaaaaaaaaaaaaaaaaaaaaaaaaaaaaaaaaaaaaaaaaaaaaaaaaaaaaaaaaaaaaaaaaaaaaaaa

SEQ ID NO: 16561 - RNA, 1686 nt, Artificial Sequence
  mRNA product Design i-3 (hSL-A100) comprising derived and/or modified sequence from LASV(ISTH2010-NIG-2012;Clade II)__AIT17482__GPCmut1 (opt4)
aggagaaagcuuaccaugggccagaucaucaccuucuuccaggaggugccccacgugaucgaggaggugaugaacaucgugcugaucgcccugagccugcuggccauccugaagggcaucuacaacguggccaccugcggccuguucggccuggugagcuuccugcugcugugcggcagaagcugcagcaccaccuacaagggcguguacgagcugcagacccuggagcuggacauggccagccugaacaugaccaugccccugagcugcaccaagaacaacagccaccacuacaucauggugggcaacgagaccggccuggagcugacccugaccaacaccagcaucaucaaccacaaguucugcaaccugagcgacgcccacaagaagaaccuguacgaccacgcccugaugagcaucaucagcaccuuccaccugagcauccccaacuucaaccaguacgaggccaugagcugcgacuucaacggcggcaagaucagcgugcaguacaaccugagccacgccuacgccguggacgccgccaaccacugcggcaccaucgccaacggcgugcugcagaccuucaugagaauggccuggggcggcagcuacaucgcccuggacagcggcugcggcagcugggacugcaucaugaccagcuaccaguaccugaucauccagaacaucaccugggaggaccacugccaguucagcagacccagccccaucggcuaccugggccugcugagccagagaaccagagacaucuacaucagcagaagacgccggggcaccuucaccuggacccugagcgacagcgagggcaacgagacccccggcggcuacugccugaccagauggaugcugaucgaggccgagcugaagugcuucggcaacaccgccguggccaagugcaacgagaagcacgacgaggaguucugcgacaugcugagacuguucgacuucaacaagcaggccaucagaagacugaagacccccgcccagaugagcauccagcugaucaacaaggccgugaacgcccugaucaacgaccagcugaucaugaagaaccaccugagagacaucaugugcauccccuacugcaacuacagcaaguacugguaccugaaccacaccgugaccggcaagaccagccugcccagaugcuggcuggugagcaacggcagcuaccugaacgagacccacuucagcgacgacaucgagcagcaggccgacaacaugaucaccgagcugcugcagaaggaguacaucgacagacagggcaagaccccccugggccugguggaccuguucguguucagcaccagcuucuaccugaucagcaucuuccugcaccuggugaagauccccacccacagacacguggugggcaagcccugccccaagccccacagacugaaccacaugggcaucugcagcugcggccuguacaagcaccccggcgugcccgugaaguggaagagaugaggacuaguuauaagacugacuagcccgaugggccucccaacgggcccuccuccccuccuugcaccgagauuaaucaaaggcucuuuucagagccaccaaaaaaaaaaaaaaaaaaaaaaaaaaaaaaaaaaaaaaaaaaaaaaaaaaaaaaaaaaaaaaaaaaaaaaaaaaaaaaaaaaaaaaaaaaaaaaaaaaaaa

SEQ ID NO: 16562 - RNA, 1686 nt, Artificial Sequence
  mRNA product Design i-3 (hSL-A100) comprising derived and/or modified sequence from LASV(Lassa virus/H.sapiens-wt/NGA/2015/ISTH_0543;Clade II)__AVO03639__GPCmut1 (opt4)
aggagaaagcuuaccaugggccagaucaucaccuucuuccaggaggugccccacgugaucgaggaggugaugaacaucgugcugaucgcccugagccugcuggccauccugaagggcaucuacaacguggccaccugcggccuguucggccuggugagcuuccugcugcugugcggcagaagcugcagcaccaccuacaagggcguguacgagcugcagacccuggagcuggacauggccaaccugaacaugaccaugccccugagcugcaccaagaacaacagccaccacuacaucauggugggcaacgagaccggccuggagcugacccugaccaacaccagcaucaucaaccacaaguucugcaaccugagcgacgcccacaagaagaaccuguacgaccacgcccugaugagcaucaucagcaccuuccaccugagcauccccaacuucaaccaguacgaggccaugagcugcgacuucaacggcggcaagaucagcgugcaguacaaccugagccacaccuacgccguggacgccgccaaccacugcggcaccaucgccaacggcgugcugcagaccuucaugagaauggccuggggcggcagcuacaucgcccuggacagcggcugcggcagcugggacugcaucaugaccagcuaccaguaccuggugauccagaacaccaccugggaggaccacugccaguucagcagacccagccccaucggcuaccugggccugcugagccagagaaccagagacaucuacaucagcagaagacgccggggcaccuucaccuggacccugagcgacagcgagggcaacgagacccccggcggcuacugccugaccagauggaugcugaucgaggccgagcugaagugcuucggcaacaccgccguggccaagugcaacgagaagcacgacgaggaguucugcgacaugcugagacuguucgacuucaacaagcaggccaucagaagacugaagacccccgcccagaugagcauccagcugaucaacaaggccgugaacgcccugaucaacgaccagcugaucaugaagaaccaccugagagacaucaugugcauccccuacugcaacuacagcaaguacugguaccugaaccacaccgugaccggcaagaccagccugcccagaugcuggcuggugagcaacggcagcuaccugaacgagacccacuucagcgacgacaucgagcagcaggccgacaacaugaucaccgagcugcugcagaaggaguacaucgacagacagggcaagaccccccugggccugguggaccuguucguguucagcaccagcuucuaccugaucagcaucuuccugcaccuggugaagauccccacccacagacacaucaccggcaagcccugccccaagccccacagacugaaccacaugggcaucugcagcugcggccuguacaagcaccccggcgugcccgugaaguggaagagaugaggacuaguuauaagacugacuagcccgaugggccucccaacgggcccuccuccccuccuugcaccgagauuaaucaaaggcucuuuucagagccaccaaaaaaaaaaaaaaaaaaaaaaaaaaaaaaaaaaaaaaaaaaaaaaaaaaaaaaaaaaaaaaaaaaaaaaaaaaaaaaaaaaaaaaaaaaaaaaaaaaaaa

SEQ ID NO: 16563 - RNA, 1686 nt, Artificial Sequence
  mRNA product Design i-3 (hSL-A100) comprising derived and/or modified sequence from LASV(Lassa virus/H.sapiens-wt/NGA/2016/ISTH_0009;Clade II)__AVO03571__GPCmut1 (opt4)
aggagaaagcuuaccaugggccagaucaucaccuucuuccaggaggugccccacgugaucgaggaggugaugaacaucgugcugaucgcccugagccugcuggccauccugaagggcaucuacaacguggccaccugcggccugcugggccuggugagcuuccugcugcugugcggcagaagcugcagcaccaccuacaagggcguguacgagcugcagacccuggagcuggacauggccagccugaacaugaccaugccccugagcugcaccaagaacaacagccaccacuacaucauggugggcaacgagaccggccuggagcugacccugaccaacaccagcaucaucaaccacaaguucugcaaccugagcgacgcccacaagaagaaccuguacgaccacgcccugaugagcaucaucagcaccuuccaccugagcauccccaacuucaaccaguacgaggccaugagcugcgacuucaacggcggcagaaucagcgugcaguacaaccugagccacagcuacgccguggacgccgccaaccacugcggcaccaucgccaacggcgugcugcagaccuucaugagaauggccuggggcggcagcuacaucgcccuggacagcggcugcggcagcugggacugcaucaugaccagcuaccaguaccugaucauccagaacaccaccugggaggaccacugccaguucagcagacccagccccaucggcuaccugggccugcugagccagagaaccagagacaucuacaucagcagaagacgccggggcaccuucaccuggacccugagcgacagcgagggcaacgagacccccggcggcuacugccugaccagauggaugcugaucgaggccgagcugaagugcuucggcaacaccgccguggccaagugcaacgagaagcacgacgaggaguucugcgacaugcugagacuguucgacuucaacaagcaggccaucagaagacugaagacccccgcccagaugagcauccagcugaucaacaaggccgugaacgcccugaucaacgaccagcugaucaugaagaaccaccugagagacaucaugugcauccccuacugcaacuacagcaaguacugguaccugaaccacaccgugaccggcaagaccagccugcccagaugcuggcuggugagcaacggcagcuaccugaacgagacccacuucagcgacgacaucgagcagcaggccgacaacaugaucaccgagcugcugcagaaggaguacaucgacagacagggcaagaccccccugggccugguggaccuguucguguucagcaccagcuucuaccugaucagcaucuuccugcaccuggugaagauccccacccacagacacaucaccggcaagcccugccccaagccccacagacugaaccacaugggcaucugcagcugcggccuguacaaccaccccggcgugcccgugaaguggaagagaugaggacuaguuauaagacugacuagcccgaugggccucccaacgggcccuccuccccuccuugcaccgagauuaaucaaaggcucuuuucagagccaccaaaaaaaaaaaaaaaaaaaaaaaaaaaaaaaaaaaaaaaaaaaaaaaaaaaaaaaaaaaaaaaaaaaaaaaaaaaaaaaaaaaaaaaaaaaaaaaaaaaaa

SEQ ID NO: 16564 - RNA, 1686 nt, Artificial Sequence
  mRNA product Design i-3 (hSL-A100) comprising derived and/or modified sequence from LASV(Lassa virus/H.sapiens-wt/NGA/2016/ISTH_0017;Clade II)__AVO03567__GPCmut1 (opt4)
aggagaaagcuuaccaugggccagaucaucaccuucuuccaggaggugccccacgugaucgaggaggugaugaacaucgugcugaucgcccugagccugcuggccauccugaagggcaucuacaacguggccaccugcggccuguucggccuggugagcuuccugcugcugugcggcagaagcugcagcaccaccuacaagggcguguacgagcugcagacccuggagcuggacauggccagccugaacaugaccaugccccugagcugcaccaagaacaacagccaccacuacaucauggugggcaacgagaccggccuggagcugacccugaccaacaccagcaucaucaaccacaaguucugcaaccugagcgacgcccacaagaagaaccuguacgaccacgcccugaugagcaucaucagcaccuuccaccugagcauccccaacuucaaccaguacgaggccaugagcugcgacuucaacggcggcaagaucagcgugcaguacaaccugagccacaccuacgccaucgacgccgccaaccacugcggcaccaucgccaacggcgugcugcagaccuucaugagaauggccuggggcggcagcuacaucgcccuggacagcggcugcggcagcugggacugcaucaugaccagcuaccaguaccugaucauccagaacaccaccugggaggaccacugccaguucagcagacccagccccaucggcuaccugggccugcugagccagagaaccagagacaucuacaucagcagaagacgccggggcaccuucaccuggacccugagcgacagcgagggcaacgagacccccggcggcuacugccugaccagauggaugcugaucgaggccgagcugaagugcuucggcaacaccgccguggccaagugcaacgagaagcacgacgaggaguucugcgacaugcugagacuguucgacuucaacaagcaggccaucagaagacugaagacccccgcccagaugagcauccagcugaucaacaaggccgugaacgcccugaucaacgaccagcugaucaugaagaaccaccugagagacaucaugugcauccccuacugcaacuacagcaaguacugguaccugaaccacaccgugaccggcaagaccagccugcccagaugcuggcuggugagcaacggcagcuaccugaacgagacccacuucagcgacgacaucgagcagcaggccgacaacaugaucaccgagcugcugcagaaggaguacauggacagacagggcaagaccccccugggccugguggaccuguucguguucagcaccagcuucuaccugaucagcaucuuccugcaccuggugagaauccccacccacagacacgugaucggcaagcccugccccaagccccacagacugaaccacaugggcaucugcagcugcggccuguacaagcaccccggcgugcccgugaaguggaagagaugaggacuaguuauaagacugacuagcccgaugggccucccaacgggcccuccuccccuccuugcaccgagauuaaucaaaggcucuuuucagagccaccaaaaaaaaaaaaaaaaaaaaaaaaaaaaaaaaaaaaaaaaaaaaaaaaaaaaaaaaaaaaaaaaaaaaaaaaaaaaaaaaaaaaaaaaaaaaaaaaaaaaa

SEQ ID NO: 16565 - RNA, 1686 nt, Artificial Sequence
  mRNA product Design i-3 (hSL-A100) comprising derived and/or modified sequence from LASV(Lassa virus/H.sapiens-wt/NGA/2018/ISTH_0959;Clade II)__AVV65099__GPCmut1 (opt4)
aggagaaagcuuaccaugggccagaucaucaccuucuuccaggaggugccccacgugaucgaggaggugaugaacaucgugcugaucgcccugagccugcuggccauccugaagggcaucuacaacguggugaccugcggccuguucggccuggugagcuuccugcugcugugcggcagaagcugcagcaccaccuacaagggcguguacgagcugcagacccuggagcuggacauggccagccugaacaugaccaugccccugagcugcaccaagaacaacagccaccacuacaucauggugggcaacgagaccggccuggagcugacccugaccaacaccagcaucaucaaccacaaguucugcaaccugagcgacgcccacaagaagaaccuguacgaccacgcccugaugagcaucaucagcaccuuccaccugagcauccccaacuucaaccaguacgaggccaugagcugcgacuucaacggcggcaagaucagcgugcaguacaaccugagccacgccuacgccaucgacgccgccaaccacugcggcaccaucgccaacggcgugcugcagaccuucaugagaauggccuggggcggcagcuacaucgcccuggacagcggcugcggcagcugggacugcaucaugaccagcuaccaguaccugaucauccagaacaccaccugggaggaccacugccaguucagcagacccagccccaucggcuaccugggccugcugagccagagaaccagagacaucuacaucagcagaagacgccggggcaccuucaccuggacccugagcgacagcgagggcaacgagacccccggcggcuacugccugaccagauggaugcugaucgaggccgagcugaagugcuucggcaacaccgccguggccaagugcaacgagaagcacgacgaggaguucugcgacaugcugagacuguucgacuucaacaagcaggccaucagaagacugaagacccccgcccagaugagcauccagcugaucaacaaggccgugaacgcccugaucaacgaccagcugaucaugaagaaccaccugagagacaucaugugcauccccuacugcaacuacagcaaguacugguaccugaaccacaccgugaccggcaagaccagccugcccagaugcuggcuggugagcaacggcagcuaccugaacgagacccacuucagcgacgacaucgagcagcaggccgacaacaugaucaccgagcugcugcagaaggaguacaucgacagacagggcaagaccccccugggccugguggaccuguucguguucagcaccagcuucuaccugaucagcaucuuccugcaccuggugaagauccccacccacagacacgugaucggcaagcccugccccaagccccacagacugaaccacaugggcaucugcagcugcggccuguacaagcaccccggcgugcccgugaaguggaagagaugaggacuaguuauaagacugacuagcccgaugggccucccaacgggcccuccuccccuccuugcaccgagauuaaucaaaggcucuuuucagagccaccaaaaaaaaaaaaaaaaaaaaaaaaaaaaaaaaaaaaaaaaaaaaaaaaaaaaaaaaaaaaaaaaaaaaaaaaaaaaaaaaaaaaaaaaaaaaaaaaaaaaa

SEQ ID NO: 16566 - RNA, 1686 nt, Artificial Sequence
  mRNA product Design i-3 (hSL-A100) comprising derived and/or modified sequence from LASV(LASV003-NIG-2008;Clade II)__AIT17580__GPCmut1 (opt4)
aggagaaagcuuaccaugggccagaucaucaccuucuuccaggaggugccccacgugaucgaggaggugaugaacaucgugcugaucgcccugagccugcuggccauccugaagggcaucuacaacguggccaccugcggccuguucggccuggugagcuuccugcugcugugcggcagaagcugcagcaccaccuacaagggcguguacgagcugcagacccuggagcuggacauggccagccugaacaugaccaugccccugagcugcaccaagaacaacagccaccacuacaucauggugggcaacgagaccggccuggagcugacccugaccaacaccagcaucaucaaccacaaguucugcaaccugagcgacgcccacaagaagaaccuguacgaccacgcccugaugagcaucaucagcaccuuccaccugagcauccccaacuucaaccaguacgaggccaugagcugcgacuucaacggcggcaagaucagcgugcaguacaaccugagccacaccuacgccguggacgccgccaaccacugcggcaccaucgccaacggcgugcugcagaccuucaugagaauggccuggggcggcagcuacaucgcccuggacagcggcugcggcagcugggacugcaucaugaccagcuaccaguaccugaucauccagaacaccaccugggaggaccacugccaguucagcagacccagccccaucggcuaccugggccugcugagccagagaaccagagacaucuacaucagcagaagacgccggggcaccuucaccuggacccugagcgacagcgagagcaacgagacccccggcggcuacugccugaccagauggaugcugaucgaggccgagcugaagugcuucggcaacaccgccguggccaagugcaacgagaagcacgacgaggaguucugcgacaugcugagacuguucgacuucaacaagcaggccaucagaagacugaaggcccccgcccagaugagcauccagcugaucaacaaggccgugaacgcccugaucaacgaccagcugaucaugaagaaccaccugagagacaucaugugcauccccuacugcaacuacagcaaguacugguaccugaaccacaccgugaccggcagaaccagccugcccagaugcuggcuggugagcaacggcagcuaccugaacgagacccacuucagcgacgacaucgagcagcaggccgacaacaugaucaccgagcugcugcagaaggaguacauggacagacagggcaagaccccccugggccugguggaccuguucguguucagcaccagcuucuaccugaucagcaucuuccugcaccuggugaagauccccacccacagacacgugaucggcaagcccugccccaagccccacagacugaaccacaugggcaucugcagcugcggccuguacaagcaccccggcgugcccgugaaguggaagagaugaggacuaguuauaagacugacuagcccgaugggccucccaacgggcccuccuccccuccuugcaccgagauuaaucaaaggcucuuuucagagccaccaaaaaaaaaaaaaaaaaaaaaaaaaaaaaaaaaaaaaaaaaaaaaaaaaaaaaaaaaaaaaaaaaaaaaaaaaaaaaaaaaaaaaaaaaaaaaaaaaaaaa

SEQ ID NO: 16567 - RNA, 1686 nt, Artificial Sequence
  mRNA product Design i-3 (hSL-A100) comprising derived and/or modified sequence from LASV(LASV035-NIG-2009;Clade II)__AIT17588__GPCmut1 (opt4)
aggagaaagcuuaccaugggccagaucaucaccuucuuccaggaggugccccacgugaucgaggaggugaugaacaucgugcugaucgcccugagccugcuggccauccugaagggcaucuacaacguggccaccugcggccuguucggccuggugagcuuccugcugcugugcggcagaagcugcagcaccaccuacaagggcguguacgagcugcagacccuggagcuggacauggccagccugaacaugaccaugccccugagcugcaccaagaacaacagccaccacuacaucauggugggcaacgagaccggccuggagcugacccugaccaacaccagcaucaucaaccacaaguucugcaaccugagcgacgcccacaagaagaaccuguacgaccacgcccugaugagcaucaucagcaccuuccaccugagcauccccaacuucaaccaguacgaggccaugagcugcgacuucaacggcggcaagaucagcgugcaguacaaccugagccacgccuacgccguggacgccgccaaccacugcggcaccaucgccaacggcgugcugcagaccuucaugagaauggccuggggcggcagcuacaucgcccuggacagcggcugcggcagcugggacugcaucaugaccagcuaccaguaccugaucauccagaacaccaccugggaggaccacugccaguucagcagacccagccccaucggcuaccugggccugcugagccagagaaccagagacaucuacaucagcagaagacgccggggcaccuucaccuggacccugagcgacagcgagggcaacgagacccccggcggcuacugccugaccagauggaugcugaucgaggccgagcugaagugcuucggcaacaccgccguggccaagugcaacgagaagcacgacgaggaguucugcgacaugcugagacuguucgacuucaacaagcaggccaucagaagacugaaggcccccgcccagaugagcauccagcugaucaacaaggccgugaacgcccugaucaacgaccagcugaucaugaagaaccaccugagagacaucaugugcauccccuacugcaacuacagcaaguacugguaccugaaccacaccgugaccggcaagaccagccugcccagaugcuggcuggugagcaacggcagcuaccugaacgagacccacuucagcgacgacaucgagcagcaggccgacaacaugaucaccgagcugcugcagaaggaguacaucgacagacagggcaagaccccccugggccugguggaccuguucguguucagcaccagcuucuaccugaucagcaucuuccugcaccuggugaagauccccacccacagacacgugaucggcaagcccugccccaagccccacagacugaaccacaugggcaucugcagcugcggccuguacaagcaccccggcgugcccgugaaguggaagagaugaggacuaguuauaagacugacuagcccgaugggccucccaacgggcccuccuccccuccuugcaccgagauuaaucaaaggcucuuuucagagccaccaaaaaaaaaaaaaaaaaaaaaaaaaaaaaaaaaaaaaaaaaaaaaaaaaaaaaaaaaaaaaaaaaaaaaaaaaaaaaaaaaaaaaaaaaaaaaaaaaaaaa

SEQ ID NO: 16568 - RNA, 1686 nt, Artificial Sequence
  mRNA product Design i-3 (hSL-A100) comprising derived and/or modified sequence from LASV(LASV1000-NIG-2009;Clade II)__AIT17782__GPCmut1 (opt4)
aggagaaagcuuaccaugggccagaucaucaccuucuuccaggaggugccccacgugaucgaggaggugaugaacaucgugcugaucgcccugagccugcuggccauccugaagggcaucuacaacguggccaccugcggccuguucggccuggugagcuuccugcugcugugcggcagaagcugcagcaccaccuacaagggcguguacgagcugcagacccuggagcuggacauggccagccugaacaugaccaugccccugagcugcaccaagaacaacagccaccacuacaucauggugggcaacgagaccggccuggagcugacccugaccaacaccagcaucaucaaccacaaguucugcaaccugagcgacgcccacaagaagaaccuguacgaccacgcccugaugagcaucaucagcaccuuccaccugagcauccccaacuucaaccaguacgaggccaugagcugcgacuucaacggcggcaagaucagcgugcaguacaaccugagccacaccuacgccguggacgccgccaaccacugcggcaccaucgccaacggcgugcugcagaccuucaugagaauggccuggggcggcagcuacaucgcccuggacagcggcugcggcagcugggacugcaucaugaccagcuaccaguaccugaucauccagaacaccaccugggaggaccacugccaguucagcagacccagccccaucggcuaccugggccugcugagccagagaaccagagacaucuacaucagcagaagacgccggggcaccuucaccuggacccugagcgacagcgagggcaacgagacccccggcggcuacugccugaccagauggaugcugaucgaggccgagcugaagugcuucggcaacaccgccguggccaagugcaacgagaagcacgacgaggaguucugcgacaugcugagacuguucgacuucaacaagcaggccaucaagagacugaagacccccgcccagaugagcauccagcugaucaacaaggccgugaacgcccugaucaacgaccagcugaucaugaagaaccaccugagagacaucaugugcauccccuacugcaacuacagcaaguacugguaccugaaccacaccgugaccggcaagaccagccugcccagaugcuggcuggugagcaacggcagcuaccugaacgagacccacuucagcgacgacaucgagcagcaggccgacaacaugaucaccgagcugcugcagaaggaguacaucgacagacagggcaagaccccccugggccugguggaccuguucguguucagcaccagcuucuaccugaucagcaucuuccugcaccuggugaagauccccacccacagacacguggugggcaagcccugccccaagccccacagacugaaccacaugggcaucugcagcugcggccuguacaagcaccccggcgugcccgugaaguggaagagaugaggacuaguuauaagacugacuagcccgaugggccucccaacgggcccuccuccccuccuugcaccgagauuaaucaaaggcucuuuucagagccaccaaaaaaaaaaaaaaaaaaaaaaaaaaaaaaaaaaaaaaaaaaaaaaaaaaaaaaaaaaaaaaaaaaaaaaaaaaaaaaaaaaaaaaaaaaaaaaaaaaaaa

SEQ ID NO: 16569 - RNA, 1686 nt, Artificial Sequence
  mRNA product Design i-3 (hSL-A100) comprising derived and/or modified sequence from LASV(LASV221-NIG-2010;Clade II)__AIT17624__GPCmut1 (opt4)
aggagaaagcuuaccaugggccagaucaucaccuucuuccaggaggugccccacgugaucgaggaggugaugaacaucgugcugaucgcccugagccugcuggccauccugaagggcaucuacaacguggccaccugcggccuguucggccuggugagcuuccugcugcugugcggcagaagcugcagcaccaccuacaagggcguguacgagcugcagacccuggagcuggacauggccagccugaacaugaccaugccccugagcugcaccaagaacaacagccaccacuacaucauggugggcaacgagaccggccuggagcugacccugaccaacaccagcaucaucaaccacaaguucugcaaccugagcgacgcccacaagaagaaccuguacgaccacgcccugaugagcaucaucagcaccuuccaccugagcauccccaacuucaaccaguacgaggccaugagcugcgacuucaacggcggcaagaucagcgugcaguacaaccugagccacaccuacgccaucgacgccgccaaccacugcggcaccaucgccaacggcgugcugcagaccuucaugagaauggccuggggcggcagcuacaucgcccuggacagcggcugcggcagcugggacugcaucaugaccagcuaccaguaccugaucauccagaacaccaccugggaggaccacugccaguucagcagacccagccccaucggcuaccugggccugcugagccagagaaccagagacaucuacaucagcagaagacgccggggcaccuucaccuggacccugagcgacagcgagggcaacgagacccccggcggcuacugccugaccagauggaugcugaucgaggccgagcugaagugcuucggcaacaccgccguggccaagugcaacgagaagcacgacgaggaguucugcgacaugcugagacuguucgacuucaacaagcaggccaucagaagacugaagacccccgcccagaugagcauccagcugaucaacaaggccgugaacgcccugaucaacgaccagcugaucaugaagaaccaccugagagacaucaugugcauccccuacugcaacuacagcaaguacugguaccugaaccacaccgugaccggcaagaccagccugcccagaugcuggcuggugagcaacggcagcuaccugaacgagacccacuucagcgacgacaucgagcagcaggccgacaacaugaucaccgagaugcugcagaaggaguacauggacagacagggcaagaccccccugggccugguggaccuguucguguucagcaccagcuucuaccugaucagcaucuuccugcaccuggugaagauccccacccacagacacgugaucggcaagcccugccccaagccccacagacugaaccacaugggcaucugcagcugcggccuguacaagcaccccggcgugcccgugaaguggaagagaugaggacuaguuauaagacugacuagcccgaugggccucccaacgggcccuccuccccuccuugcaccgagauuaaucaaaggcucuuuucagagccaccaaaaaaaaaaaaaaaaaaaaaaaaaaaaaaaaaaaaaaaaaaaaaaaaaaaaaaaaaaaaaaaaaaaaaaaaaaaaaaaaaaaaaaaaaaaaaaaaaaaaa

SEQ ID NO: 16570 - RNA, 1686 nt, Artificial Sequence
  mRNA product Design i-3 (hSL-A100) comprising derived and/or modified sequence from LASV(LASV237-NIG-2010;Clade II)__AIT17638__GPCmut1 (opt4)
aggagaaagcuuaccaugggccagaucaucaccuucuuccaggaggugccccacgugaucgaggaggugaugaacaucgugcugaucgcccugagccugcuggccauccugaagggcaucuacaacguggccaccugcggccuguucggccuggugagcuuccugcugcugugcggcagaagcugcagcaccaccuacaagggcguguacgagcugcagacccuggagcuggacauggccagccugaacaugaccaugccccugagcugcaccaagaacaacagccaccacuacaucauggugggcaacgagaccggccuggagcugacccugaccaacaccagcaucaucaaccacaaguucugcaaccugagcgacgcccacaagaaggaccuguacgaccacgcccugaugagcaucaucagcaccuuccaccugagcauccccaacuucaaccaguacgaggccaugagcugcgacuucaacggcggcaagaucagcgugcaguacaaccugagccacaccuacgccguggacgccgccaaccacugcggcaccaucgccaacggcgugcugcagaccuucaugagaauggccuggggcggcagcuacaucgcccuggacagcggcugcggcagcugggacugcaucaugaccagcuaccaguaccugaucauccagaacaccaccugggaggaccacugccaguucagcagacccagccccaucggcuaccugggccugcugagccagagaaccagagacaucuacaucagcagaagacgccggggcaccuucaccuggacccugagcgacagcgagggcaacgagacccccggcggcuacugccugaccagauggaugcugaucgaggccgagcugaagugcuucggcaacaccgccguggccaagugcaacgagaagcacgacgaggaguucugcgacaugcugagacuguucgacuucaacaagcaggccaucagaagacugaagacccccgcccagaugagcauccagcugaucaacaaggccgugaacgcccugaucaacgaccagcugaucaugaagaaccaccugagagacaucaugugcauccccuacugcaacuacagcaaguacugguaccugaaccacaccgugaccggcaagaccagccugcccagaugcuggcuggugagcaacggcagcuaccugaacgagacccacuucagcgacgacaucgagcagcaggccgacaacaugaucaccgagcugcugcagaaggaguacauggacagacagggcaagaccccccugggccugguggaccuguucguguucagcaccagcuucuaccugaucagcaucuuccugcaccugaucaagauccccacccacagacacaucaccggcaagcccugccccaagccccacagacugaaccacaugggcaucugcagcugcggccuguacaagcaccccggcgugcccgugaaguggaagagaugaggacuaguuauaagacugacuagcccgaugggccucccaacgggcccuccuccccuccuugcaccgagauuaaucaaaggcucuuuucagagccaccaaaaaaaaaaaaaaaaaaaaaaaaaaaaaaaaaaaaaaaaaaaaaaaaaaaaaaaaaaaaaaaaaaaaaaaaaaaaaaaaaaaaaaaaaaaaaaaaaaaaa

SEQ ID NO: 16571 - RNA, 1686 nt, Artificial Sequence
  mRNA product Design i-3 (hSL-A100) comprising derived and/or modified sequence from LASV(LASV253-NIG-2011;Clade II)__AIT17670__GPCmut1 (opt4)
aggagaaagcuuaccaugggccagaucaucaccuucuuccaggaggugccccacgugaucgaggaggugaugaacaucgugcugaucgcccugagccugcuggccauccugaagggcaucuacaacguggccaccugcggccuguucggccuggugagcuuccugcugcugugcggcagaagcugcagcaccaccuacaagggcguguacgagcugcagacccuggagcuggacauggccagccugaacaugaccaugccccugagcugcaccaagaacaacagccaccacuacaucauggugggcaacgagaccggccuggagcugacccugaccaacaccagcaucaucaaccacaaguucugcaaccugagcgacgcccacaagaagaaccuguacgaccacgcccugaugagcaucaucagcaccuuccaccugagcauccccaacuucaaccaguacgaggccaugagcugcgacuucaacggcggcaagaucagcgugcaguacaaccugagccacaccuacgccguggacgccgccaaccacugcggcaccaucgccaacggcgugcugcagaccuucaugagaauggccuggggcggcagcuacaucgcccuggacagcggcugcggcagcugggacugcaucaugaccagcuaccaguaccugaucauccagaacaccaccugggaggaccacugccaguucagcagacccagccccaucggcuaccugggccugcugagccagagaaccagagacaucuacaucagcagaagacgccggggcaccuucaccuggacccugagcgacagcgagggcaacgagacccccggcggcuacugccugaccagauggaugcugaucgaggccgagcugaagugcuucggcaacaccgccguggccaagugcaacgagaagcacgacgaggaguucugcgacaugcugagacuguucgacuucaacaagcaggccaucagaagacugaaggcccccgcccagaugagcauccagcugaucaacaaggccgugaacgcccugaucaacgaccagcugaucaugaagaaccaccugagagacaucaugugcauccccuacugcaacuacagcaaguacugguaccugaaccacaccgugaccggcagaaccagccugcccagaugcuggcuggugagcaacggcagcuaccugaacgagacccacuucagcgacgacaucgagcagcaggccgacaacaugaucaccgagcugcugcagaaggaguacaucgacagacagggcaagaccccccugggccugguggaccuguucguguucagcaccagcuucuaccugaucagcaucuuccugcaccuggugaagauccccacccacagacacaucaucggcaagcccugccccaagccccacagacugaaccacaugggcaucugcagcugcggccuguacaagcaccccggcgugcccgugaaguggaagagaugaggacuaguuauaagacugacuagcccgaugggccucccaacgggcccuccuccccuccuugcaccgagauuaaucaaaggcucuuuucagagccaccaaaaaaaaaaaaaaaaaaaaaaaaaaaaaaaaaaaaaaaaaaaaaaaaaaaaaaaaaaaaaaaaaaaaaaaaaaaaaaaaaaaaaaaaaaaaaaaaaaaaa

SEQ ID NO: 16572 - RNA, 1686 nt, Artificial Sequence
  mRNA product Design i-3 (hSL-A100) comprising derived and/or modified sequence from LASV(LASV254-NIG-2011;Clade II)__AIT17674__GPCmut1 (opt4)
aggagaaagcuuaccaugggccagaucaucaccuucuuccaggaggugccccacgugaucgaggaggugaugaacaucgugcugaucgcccugagccugcuggccauccugaagggcaucuacaacguggccaccugcggccuguucggccuggugagcuuccugcugcugugcggcagaagcugcagcaccaccuacaagggcguguacgagcugcagacccuggagcuggacaugaccaaccugaacaugaccaugccccugagcugcaccaagaacaacagccaccacuacaucauggugggcaacgagaccggccuggagcugacccugaccaacaccagcaucaucaaccacaaguucugcaaccugagcgacgcccacaagaagaaccuguacaaccacgcccugaugagcaucaucagcaccuuccaccugagcauccccaacuucaaccaguacgaggccaugagcugcgacuucaacggcggcaagaucagcgugcaguacaaccugagccacagcuacgccguggacgccgccaaccacugcggcaccaucgccaacggcgugcugcagaccuucaugagaauggccuggggcggcagcuacaucgcccuggacagcggcugcggcaacugggacugcaucaugaccagcuaccaguaccugaucauccagaacaccaccugggaggaccacugccaguucagcagacccagccccaucggcuaccugggccugcugagccagagaaccagagacaucuacaucagcagaagacgccggggcaccuucaccuggacccugagcgacagcgagggcaacgagacccccggcggcuacugccugaccagauggaugcugaucgaggccgagcugaagugcuucggcaacaccgccguggccaagugcaacgagaagcacgacgaggaguucugcgacaugcugagacuguucgacuucaacaagcaggccaucagaagacugaagacccccgcccaggccaacauccagcugaucaacaaggccgugaacgcccugaucaacgaccagcugaucaugaagaaccaccugagagacaucaugugcauccccuacugcaacuacagcaaguacugguaccugaaccacaccgugaccggcaagaccagccugcccagaugcuggcuggugagcaacggcagcuaccugaacgagacccacuucagcgacgacaucgagcagcaggccgacaacaugaucaccgagcugcugcagaaggaguacauggacagacagggcaagaccccccugggccugguggaccuguucguguucagcaccagcuucuaccugaucagcaucuuccugcaccuggugaagauccccacccacagacacgugaucggcaagcccugccccaagccccacagacugaaccacaugggcaucugcagcugcggccuguacaagcaccccggcgugcccgugaaguggaagagaugaggacuaguuauaagacugacuagcccgaugggccucccaacgggcccuccuccccuccuugcaccgagauuaaucaaaggcucuuuucagagccaccaaaaaaaaaaaaaaaaaaaaaaaaaaaaaaaaaaaaaaaaaaaaaaaaaaaaaaaaaaaaaaaaaaaaaaaaaaaaaaaaaaaaaaaaaaaaaaaaaaaaa

SEQ ID NO: 16573 - RNA, 1686 nt, Artificial Sequence
  mRNA product Design i-3 (hSL-A100) comprising derived and/or modified sequence from LASV(Nig08-A19;Clade III)__ADU56618__GPCmut1 (opt4)
aggagaaagcuuaccaugggccagaucgugaccuucuuccaggaggugccccacgugaucgaggaggugaugaacaucgugcugaucgcccugagcauccuggccauccugaagggccuguacaacaucgccaccugcggccugaucggccuggugaccuuccugcugcugagcggcagaagcugcagcaugaccuacaagggcguguacgagcugcagacccuggagcugaacaugaacacccugaacaugaccaugccccugagcugcaccaagaacaacagccaccacuacaucauggugggcaacgagaccggccuggagcugacccugaccaacaccagccugcugcaccacaaguucugcaaccugagcgacgcccacaagaagaaccuguacgaccacacccugaugagcaucaucagcaccuuccaccugagcauccccaacuucaaccaguacgaggccaugagcugcgacuucaacggcggcaagaucaccgugcaguacaaccugagccacagcuacgccaucgacgccgccaaccacugcggcaccguggccaacggcgugcugcagaccuucaugagaauggccuggggcggcagcuacaucgcccuggacagcggcugcggcaagugggacugcaucaugaccagcuaccaguaccugaucauccagaacaccaccugggaggaccacugccaguucagcagacccagccccaucggcuaccugggccugcugagccagagaaccagagacaucuacaucagcagaagacgccggggcaccuucaccuggacccugagcgacagcgagggcaacgagacccccggcggcuacugccugaccagauggaugcugaucgaggccgagcugaagugcuucggcaacaccgccguggccaagugcaacgagaagcacgacgaggaguucugcgacaugcugagacuguucgacuucaacaagcaggccaucagaagacugaaggcccccgcccagaugagcauccagcugaucaacaaggccgugaacgcccugaucaacgaccagcugaucaugaagaaccaccugagagacaucaugugcauccccuacugcaacuacagcaaguacugguaccugaaccacaccagcaccggcagaaccagccugcccagaugcuggcuggugagcaacggcagcuaccugaacgagacccacuucagcgacgacaucgagcagcaggccgacaacaugaucaccgagaugcugcagaaggaguaccuggacagacagggcaagaccccccugggccugguggaccuguucguguucagcaccagcuucuaccugaucagcaucuuccugcaccuggugaagauccccacccacagacacaucgugggcaagcccugccccaagccccacagacugaaccacaugggcaucugcagcugcggccuguacaagcagcccggcgugcccgugagauggaagagaugaggacuaguuauaagacugacuagcccgaugggccucccaacgggcccuccuccccuccuugcaccgagauuaaucaaaggcucuuuucagagccaccaaaaaaaaaaaaaaaaaaaaaaaaaaaaaaaaaaaaaaaaaaaaaaaaaaaaaaaaaaaaaaaaaaaaaaaaaaaaaaaaaaaaaaaaaaaaaaaaaaaaa

SEQ ID NO: 16574 - RNA, 1689 nt, Artificial Sequence
  mRNA product Design i-3 (hSL-A100) comprising derived and/or modified sequence from LASV(G1180-SLE-2010;Clade IV)__AIT17168__GPCmut1 (opt4)
aggagaaagcuuaccaugggccagaucgugaccuucuuccaggaggugccccacgugaucgaggaggugaugaacaucgugcugaucgcccugagcauccuggccgugcugaagggccuguacaacuucgccaccugcggccuggugggccugcugaccuuccugcugcugugcggcagaagcugcaccgccagcagauacaagggcguguacgagcugcagacccuggagcugaacauggagacccugaacaugaccaugccccugagcugcaccaagaacaacagccaccacuacaucauggugggcaacgagaccggccuggagcugacccugaccaacaccagcaucaucaaccacaaguucugcaaccugagcgacgcccacaagaagaaccuguacgaccacgcccugaugagcaucaucagcaccuuccaccugagcauccccaacuucaaccaguacgaggccaugagcugcgacuucaacggcggcaagaucagcgugcaguacaaccugagccacagcuacgccggcgacgccgccaaccacugcggcaccguggccaacggcgugcugcagaccuucaugagaauggccuggggcggcagcuacaucgcccuggacagcggcugcggcagcugggacugcaucaugaccagcuaccaguaccugaucauccagaacaccaccugggaggaccacugccaguucagcagacccagccccaucggcuaccugggccugcugagccagagaaccagagacaucuacaucagcagaagacgccggggcaccuucaccuggacccugagcgacagcgagggcaaggacacccccggcggcuacugccugaccagauggaugcugaucgaggccgagcugaagugcuucggcaacaccgccguggccaagugcaacgagaagcacgacgaggaguucugcgacaugcugagacuguucgacuucaacaagcaggccauccagagacugaaggcccccgcccagaugagcauccagcugaucaacaaggccgugaacgcccugaucaacgaccagcugaucaugaagaaccaccugagagacaucaugugcauccccuacugcaacuacagcaaguacugguaccugaaccacaccaccaccggcaagaccagccugcccaagugcuggcuggugagcaacggcagcuaccugaacgagacccacuucagcgacgacaucgagcagcaggccgacaacaugaucaccgagaugcugcagaaggaguacauggagagacagggcaagaccccccugggccugguggaccuguucguguucagcaccagcuucuaccugaucagcaucuuccugcaccuggugaagauccccacccacagacacaucgugggcaagagcugccccaagccccacagacugaaccacaugggcaucugcagcugcggccuguacaagcagcccggcgugcccgugaaguggaagagaugaggacuaguuauaagacugacuagcccgaugggccucccaacgggcccuccuccccuccuugcaccgagauuaaucaaaggcucuuuucagagccaccaaaaaaaaaaaaaaaaaaaaaaaaaaaaaaaaaaaaaaaaaaaaaaaaaaaaaaaaaaaaaaaaaaaaaaaaaaaaaaaaaaaaaaaaaaaaaaaaaaaaa

SEQ ID NO: 16575 - RNA, 1689 nt, Artificial Sequence
  mRNA product Design i-3 (hSL-A100) comprising derived and/or modified sequence from LASV(G1442-SLE-2011;Clade IV)__AIT17180__GPCmut1 (opt4)
aggagaaagcuuaccaugggccagaucgugaccuucuuccaggaggugccccacgugaucgaggaggugaugaacaucgugcugaucgcccugagcauccuggccgugcugaagggccuguacaacguggccaccugcggccugaucggccuggugaccuuccugcugcugugcggcagaagcugcaccaccacccuguacaagggcguguacgagcugcagacccuggagcugaacauggagacccugaacaugaccaugccccugagcugcaccaagaacaacagccaccacuacaucagagugggcaacgagaccggccuggagcugacccugaccaacaccagcaucaucaaccacaaguucugcaaccugagcgacgcccacaagaagaaccuguacgaccacgcccugaugagcaucaucagcaccuuccaccugagcauccccaacuucaaccaguacgaggccaugagcugcgacuucaacggcggcaagaucagcgugcaguacaaccugagccacagcuacgccggcgacgccgccaaccacugcggcaccguggccaacggcgugcugcagaccuucaugagaauggccuggggcggcagcuacaucgcccuggacagcggcugcggcaacugggacugcaucaugaccagcuaccaguaccugaucauccagaacaccaccugggacgaccacugccaguucagcagacccagccccaucggcuaccugggccugcugagccagagaaccagagacguguacaucagcagaagacgccggggcaccuucaccuggacccugagcgacagcgagggcaaggacacccccggcggcuacugccugaccagauggaugcugaucgaggccgagcugaagugcuucggcaacaccgccguggccaagugcaacgagaagcacgacgaggaguucugcgacaugcugagacuguucgacuucaacaagcaggccauccagagacugaaggcccccgcccagaugagcauccagcugaucaacaaggccgugaacgcccugaucaacgaccagcugaucaugaagaaccaccugagagacaucaugugcauccccuacugcaacuacagcaaguacugguaccugaacaacaccgccaccggcaagaccagccugcccaagugcuggcugaucagcaacggcagcuaccugaacgagacccacuucagcgacgacaucgagcaggaggccgacaacaugaucaccgagaugcugcagaaggaguacauggagagacagggcaagaccccccugggccugguggaccuguucguguucagcaccagcuucuaccugaucagcaucuuccugcaccuggugaagauccccacccacagacacaucgugggcaagagcugccccaagccccacagacugaaccacaugggcaucugcagcugcggccuguacaagcagcccggcgugcccgugagauggaagagaugaggacuaguuauaagacugacuagcccgaugggccucccaacgggcccuccuccccuccuugcaccgagauuaaucaaaggcucuuuucagagccaccaaaaaaaaaaaaaaaaaaaaaaaaaaaaaaaaaaaaaaaaaaaaaaaaaaaaaaaaaaaaaaaaaaaaaaaaaaaaaaaaaaaaaaaaaaaaaaaaaaaaa

SEQ ID NO: 16576 - RNA, 1689 nt, Artificial Sequence
  mRNA product Design i-3 (hSL-A100) comprising derived and/or modified sequence from LASV(G3010-SLE-2013;Clade IV)__AIT17344__GPCmut1 (opt4)
aggagaaagcuuaccaugggccagaucgugaccuucuuccaggaggugccccacgugaucgaggaggugaugaacaucgugcugaucgcccugagcauccuggccgugcugaagggccuguacaacuucgccaccugcggccuggugggccuggugaccuuccugcugcugugcggcagaagcugcaccaccagccuguacaagggcguguacgagcugcagacccuggagcugaacauggagacccugaacaugaccaugccccugagcugcaccaagaacaacagccaccacuacaucauggugggcaacgagaccggccuggagcugacccugaccaacaccagcaucaucaaccacaaguucugcaaccugagcgacgcccacaagaagaaccuguacaaccacgcccugaugagcaucaucagcaccuuccaccugagcauccccaacuucaaccaguacgaggccaugagcugcgacuucaacggcggcaagaucagcgugcaguacaaccugagccacagcuacgccggcgacgccgccagccacugcggcaccguggccaacggcgugcugcagaccuucaugagaauggccuggggcggcagcuacaucgcccuggacagcggcugcggcaagugggacugcaucaugaccagcuaccaguaccugaucauccagaacaccaccugggaggaccacugccaguucagcagacccagccccaucggcuaccugggccugcugagccagagaaccagagacaucuacaucagcagaagacgccggggcaccuucaccuggacccugagcgacagcgagggcaaggacacccccggcggcuacugccugaccagauggaugcugaucgaggccgagcugaagugcuucggcaacaccgccguggccaagugcaacgagaagcacgacgaggaguucugcgacaugcugagacuguucgacuucaacaagcaggccauccagagacugaagacccccgcccagaugagcauccagcugaucaacaaggccgugaacgcccugaucaacgaccagcugaucaugaagaaccaccugagagacaucaugugcauccccuacugcaacuacagcaaguacugguaccugaaccacaccaccaccggcaagaccagccugcccaagugcuggcuggugagcaacggcagcuaccugaacgagacccacuucagcgacgacaucgagcagcaggccgacaacaugaucaccgagaugcugcagaaggaguacauggagagacagggcaagaccccccugggccugguggaccuguucguguucagcaccagcuucuaccugaucagcaucuuccugcaccuggugaagauccccacccacagacacaucgugggcaagagcugccccaagccccacagacugaaccacaugggcaucugcagcugcggccuguacaagcagcccggcgugcccgugagauggaagagaugaggacuaguuauaagacugacuagcccgaugggccucccaacgggcccuccuccccuccuugcaccgagauuaaucaaaggcucuuuucagagccaccaaaaaaaaaaaaaaaaaaaaaaaaaaaaaaaaaaaaaaaaaaaaaaaaaaaaaaaaaaaaaaaaaaaaaaaaaaaaaaaaaaaaaaaaaaaaaaaaaaaaa

SEQ ID NO: 16577 - RNA, 1689 nt, Artificial Sequence
  mRNA product Design i-3 (hSL-A100) comprising derived and/or modified sequence from LASV(G502-SLE-2009;Clade IV)__AIT17126__GPCmut1 (opt4)
aggagaaagcuuaccaugggccagaucgugaccuucuuccaggaggugccccacgugaucgaggaggugaugaacaucgugcugaucgcccugagcauccuggccgugcugaagggccuguacaacuucgccaccugcggccuggugggccugcugaccuuccugcugcugugcggcagaagcugcaccaccggccuguacaagggcguguacgagcugcagacccuggagcugaacauggagacccugaacaugaccaugccccugagcugcaccaagaacaacagccaccacuacaucauggugggcaacgagaccggccuggagcugacccugaccaacaccagcaucaucaaccacaaguucugcaaccugagcgacgcccacaagaagaaccuguacgaccacgcccugaugagcaucaucagcaccuuccaccugagcauccccaacuucaaccaguacgaggccaugagcugcgacuucaacggcggcaagaucagcgugcaguacaaccugagccacagcuacgccggcgacgccgccgaccacugcggcaccguggccaacggcgugcugcagaccuucaugagaauggccuggggcggcagcuacaucgcccuggacagcggcugcggcagaugggacugcaucaugaccagcuaccaguaccugaucauccagaacaccaccugggaggaccacugccaguucagcagacccagccccaucggcuaccugggccugcugagccagagaaccagagacaucuacaucagcagaagacgccggggcaccuucaccuggacccugagcgacagcgagggcaaggacacccccggcggcuacugccugaccagauggaugcugaucgaggccgagcugaagugcuucggcaacaccgccguggccaagugcaacgagaagcacgacgaggaguucugcgacaugcugagacuguucgacuucaacaagcaggccauccagagacugaaggcccccgcccagaugagcauccagcugaucaacaaggccgugaacgcccugaucaacgaccagcuggugaugaagaaccaccugagagacaucaugugcauccccuacugcaacuacagcagauacugguaccugaaccacaccaccaccggcagaaccagccugcccaagugcuggcuggugagcaacggcagcuaccugaacgagacccacuucagcgacgacaucgagcagcaggccgacaacaugaucaccgagaugcugcagaaggaguacauggagagacagggcaagaccccccugggccugguggaccuguucguguucagcaccagcuucuaccugaucagcaucuuccugcaccuggugaagauccccacccacagacacaucgugggcaagagcugccccaagccccacagacugaaccacaugggcaucugcagcugcggccuguacaagcagcccggcgugcccgugaaguggaagagaugaggacuaguuauaagacugacuagcccgaugggccucccaacgggcccuccuccccuccuugcaccgagauuaaucaaaggcucuuuucagagccaccaaaaaaaaaaaaaaaaaaaaaaaaaaaaaaaaaaaaaaaaaaaaaaaaaaaaaaaaaaaaaaaaaaaaaaaaaaaaaaaaaaaaaaaaaaaaaaaaaaaaa

SEQ ID NO: 16578 - RNA, 1689 nt, Artificial Sequence
  mRNA product Design i-3 (hSL-A100) comprising derived and/or modified sequence from LASV(G733-SLE-2010;Clade IV)__AIT17154__GPCmut1 (opt4)
aggagaaagcuuaccaugggccagaucgugaccuucuuccaggaggugccccacgugaucgaggaggugaugaacaucgugcugaucgcccugagcauccuggccgugcugaagggccuguacaacuucgccaccugcggcaucgugggccuggugagcuuccugcugcugugcggcagaagcugcaccaccagccuguacaagggcguguacgagcugcagacccuggagcugaacauggagacccugaacaugaccaugccccugagcugcaccaagaacaacagccaccacuacaucauggugggcaacgagaccggccuggagcugacccugaccaacaccagcaucaucaaccacaaguucugcaaccugagcgacgcccacaagaagaaccuguacgaccacgcccugaugagcaucaucagcaccuuccaccugagcauccccaacuucaaccaguacgaggccaugagcugcgacuucaacggcggcaagaucagcgugcaguacaaccugagccacagcuacgccggcgacgccgccaaccacugcggcaccaucgccaacggcgugcugcagaccuucaugagaauggccuggggcggcagcuacaucgcccuggacagcggcugcgacagaugggacugcaucaugaccagcuaccaguaccugaucauccagaacaccaccugggaggaccacugccaguucagcagacccagccccaucggcuaccugggccugcugagccagagaaccagagacaucuacaucagcagaagacgccggggcaccuucaccuggacccugagcgacagcgagggcaaggacacccccggcggcuacugccugaccagauggaugcugaucgaggccgagcugaagugcuucggcaacaccgccguggccaagugcaacgagaagcacgacgaggaguucugcgacaugcugagacuguucgacuucaacaagcaggccauccagagacugaaggcccccgcccagaugagcauccagcugaucaacaaggccgugaacgcccugaucaacgaccagcugaucaugaagaaccaccugagagacaucaugugcauccccuacugcaacuacagcaaguacugguaccugaaccacaccaccaccggcaagaccagccugcccaagugcuggcuggugagcaacggcagcuaccugaacgagacccacuucagcgacgacaucgagcagcaggccgacaacaugaucaccgagaugcugcagaaggaguacauggagagacagggcaagaccccccugggccugguggaccuguucguguucagcaccagcuucuaccugaucagcaucuuccugcaccuggugaagauccccacccacagacacguggugggcaagagcugccccaagccccacagacugaaccacaugggcaucugcagcugcggccuguacggccagcccggcgugcccgugaaguggaagagaugaggacuaguuauaagacugacuagcccgaugggccucccaacgggcccuccuccccuccuugcaccgagauuaaucaaaggcucuuuucagagccaccaaaaaaaaaaaaaaaaaaaaaaaaaaaaaaaaaaaaaaaaaaaaaaaaaaaaaaaaaaaaaaaaaaaaaaaaaaaaaaaaaaaaaaaaaaaaaaaaaaaaa

SEQ ID NO: 16579 - RNA, 1689 nt, Artificial Sequence
  mRNA product Design i-3 (hSL-A100) comprising derived and/or modified sequence from MOPV/LASV reassortant(IGS-1;Clade IV)__AFY05576__GPCmut1 (opt4)
aggagaaagcuuaccaugggccagaucgugaccuucuuccaggaggugccccacgugaucgaggaggugaugaacaucgugcugaucgcccugagcgugcuggccgugcugaagggccuguacaacuucgccaccugcggccuggugggccuggugaccuuccugcugcugugcggcagaagcugcaccaccagccuguacaagggcguguacgagcugcagacccuggagcugaacauggagacccugaacaugaccaugccccugagcugcaccaagaacaacagccaccacuacaucauggugggcaacgagaccggccuggagcugacccugaccaacaccagcaucaucaaccacaaguucugcaaccugagcgacgcccacaagaagaaccuguacgaccacgcccugaugagcaucaucagcaccuuccaccugagcauccccaacuucaaccaguacgaggccaugagcugcgacuucaacggcggcaagaucagcgugcaguacaaccugagccacagcuacgccggcgacgccgccaaccacugcggcaccguggccaacggcgugcugcagaccuucaugagaauggccuggggcggcagcuacaucgcccuggacagcggcugcggcaacugggacugcaucaugaccagcuaccaguaccugaucauccagaacaccaccugggaggaccacugccaguucagcagacccagccccaucggcuaccugggccugcugagccagagaaccagagacaucuacaucagcagaagacgccggggcaccuucaccuggacccugagcgacagcgagggcgaggacacccccggcggcuacugccugaccagauggaugcugaucgaggccgagcugaagugcuucggcaacaccgccguggccaagugcaacgagaagcacgacgaggaguucugcgacaugcugagacuguucgacuucaacaagcaggccauccagagacugaaggcccccgcccagaugagcauccagcugaucaacaaggccgugaacgcccugaucaacgaccagcugaucaugaagaaccaccugagagacaucaugugcauccccuacugcaacuacagcaaguacugguaccugaaccacaccaccaccggcagaaccagccugcccaagugcuggcuggugagcaacggcagcuaccugaacgagacccacuucagcgacgacaucgagcagcaggccgacaacaugaucaccgagaugcugcagaaggaguacauggagagacagggcaagaccccccugggccugguggaccuguucguguucagcaccagcuucuaccugaucagcaucuuccugcaccuggugaagauccccacccacagacacaucgugggcaagagcugccccaagccccacagacugaaccacaugggcaucugcagcugcggccuguacaagcagcccggcgugcccgugaaguggaagagaugaggacuaguuauaagacugacuagcccgaugggccucccaacgggcccuccuccccuccuugcaccgagauuaaucaaaggcucuuuucagagccaccaaaaaaaaaaaaaaaaaaaaaaaaaaaaaaaaaaaaaaaaaaaaaaaaaaaaaaaaaaaaaaaaaaaaaaaaaaaaaaaaaaaaaaaaaaaaaaaaaaaaa

SEQ ID NO: 16580 - RNA, 1689 nt, Artificial Sequence
  mRNA product Design i-3 (hSL-A100) comprising derived and/or modified sequence from LASV(LM765-SLE-2012;Clade IV)__AIT17814__GPCmut1 (opt4)
aggagaaagcuuaccaugggccagaucgugaccuucuuccaggaggugccccacgugaucgaggaggugaugaacaucgugcugaucgcccugagcauccuggccgugcugaagggccuguacaacuucgccaccugcggccuggugggccuggugaccuuccugcugcugugcggcagaagcugcaccaccagccuguacaagggcguguacgagcugcagacccuggagcugaacauggagacccugaacaugaccaugccccugagcugcaccaagaacaacagccaccacuacaucauggugggcaacgagaccggccuggagcugacccugaccaacaccagcaucaucgaccacaaguucugcaaccugagcgacgcccacagaaagaaccuguacgaccacgcccugaugagcaucaucagcaccuuccaccugagcauccccaacuucaaccaguacgaggccaugagcugcgacuucaacggcggcaagaucagcgugcaguacaaccugagccacagcuacgccaaggacgccgccgaccacugcggcaccguggccaacggcgugcugcagaccuucaugagaauggccuggggcggcagcuacaucgcccuggacagcggcugcggcagaugggacugcaucaugaccagcuaccaguaccugaucauccagaacaccaccugggaggaccacugccaguucagcagacccagccccaucggcuaccugggccugcugagccagagaaccagagacaucuacaucagcagaagacgccggggcaccuucaccuggacccugagcgacagcgagggcaaggacacccccggcggcuacugccugaccagauggaugcugaucgaggccgagcugaagugcuucggcaacaccgccguggccaagugcaacgagaagcacgacgaggaguucugcgacaugcugagacuguucgacuucaacaagcaggccauccagagacugaaggcccccgcccagaugagcauccagcugaucaacaaggccgugaacgcccugaucaacgaccagcugaucaugaagaaccaccugagagacaucaugugcauccccuacugcaacuacagcaaguacugguaccugaaccacaccaccaccggcaagaccagccugcccaagugcuggcuggugagcaacggcagcuaccugaacgagacccacuucagcgacgacaucgagcagcaggccgacaacaugaucaccgagaugcugcagaaggaguacauggagagacagggcaagaccccccugggccugguggaccuguucguguucagcaccagcuucuaccugaucagcaucuuccugcaccuggugaagauccccacccacagacacaucgugggcaagcccugccccaagccccacagacugaaccacaugggcaucugcagcugcggccuguacaagcagcccggcgugcccgugaaguggaagagaugaggacuaguuauaagacugacuagcccgaugggccucccaacgggcccuccuccccuccuugcaccgagauuaaucaaaggcucuuuucagagccaccaaaaaaaaaaaaaaaaaaaaaaaaaaaaaaaaaaaaaaaaaaaaaaaaaaaaaaaaaaaaaaaaaaaaaaaaaaaaaaaaaaaaaaaaaaaaaaaaaaaaa

SEQ ID NO: 16581 - RNA, 1689 nt, Artificial Sequence
  mRNA product Design i-3 (hSL-A100) comprising derived and/or modified sequence from LASV(LM776-SLE-2012;Clade IV)__AIT17824__GPCmut1 (opt4)
aggagaaagcuuaccaugggccagaucgugaccuucuuccaggaggugccccacgugaucgaggaggugaugaacaucgugcugaucgcccugagcauccuggccgugcugaagggccuguacaacuucgccaccugcggccuggugggccuggugaccuuccugcugcugugcggcagaagcugcaccaccagcguguacaagggcguguacgagcugcagacccuggagcugaacauggagacccugaacaugaccaugccccugagcugcaccaagaacaacagccaccacuacaucauggugggcaacgagaccggccuggagcugacccugaccaacaccagcaucaucaaccacaaguucugcaaccugagcgacgcccacaagaagaaccuguacgaccacgcccugaugagcaucaucagcaccuuccaccugagcauccccaacuucaaccaguacgaggccaugagcugcgacuucaacggcggcaagaucagcgugcaguacaaccugagccacagcuacgccggcgacgccgccaaccacugcggcaccguggccaacggcgugcugcagaccuucaugagaauggccuggggcggcagcuacaucgcccuggacagcggcugcggcaagugggacugcaucaugaccagcuaccaguaccugaucauccagaacaccaccugggaggaccacugccaguucagcagacccagccccaucggcuaccugggccugcugagccagagaaccagagacaucuacaucagcagaagacgccggggcaccuucaccuggacccugagcgacagcgagggcaaggacacccccggcggcuacugccugaccagauggaugcugaucgaggccgagcugaagugcuucggcaacaccgccguggccaagugcaacgagaagcacgacgaggaguucugcgacaugcugagacuguucgacuucaacaagcaggccauccagagacugaaggcccccgcccagaugagcauccagcugaucaacaaggccgugaacgcccugaucaacgaccagcugaucaugaagaaccaccugagagacaucaugugcauccccuacugcaacuacagcaaguacugguaccugaaccacaccaccaccggcaagaccagccugcccaagugcuggcuggugagcaacggcagcuaccugaacgagacccacuucagcgacgacaucgagcagcaggccgacaacaugaucaccgagaugcugcagaaggaguacauggagagacagggcaagaccccccugggccugguggaccuguucguguucagcaccagcuucuaccugaucagcaucuuccugcaccuggugaagauccccacccacagacacaucgugggcaagagcugccccaagccccacagacugaaccacaugggcaucugcagcugcggccuguacaagcagcccggcgugcccgugagauggaagagaugaggacuaguuauaagacugacuagcccgaugggccucccaacgggcccuccuccccuccuugcaccgagauuaaucaaaggcucuuuucagagccaccaaaaaaaaaaaaaaaaaaaaaaaaaaaaaaaaaaaaaaaaaaaaaaaaaaaaaaaaaaaaaaaaaaaaaaaaaaaaaaaaaaaaaaaaaaaaaaaaaaaaa

SEQ ID NO: 16582 - RNA, 1689 nt, Artificial Sequence
  mRNA product Design i-3 (hSL-A100) comprising derived and/or modified sequence from LASV(Mad39;Clade IV)__ANH09722__GPCmut1 (opt4)
aggagaaagcuuaccaugggccagaucgugaccuucuuccaggaggugccccacgugaucgaggaggugaugaacaucgugcugaucgcccugagcauccuggccgugcugaagggccuguacaacguggccaccugcggccugaucggccuggugaccuuccugcugcugugcggcagaagcugcaccaccacccuguacaagggcguguacgagcugcaggcccuggagcugaacauggagacccugaacaugaccaugccccugagcugcaccaagaacaacagccaccacuacaucagagugggcaacgagaccggccuggagcugacccugaccaacaccagccugaucaaccacaaguucugcaaccugagcgacgcccacaagaagaaccuguacgaccacgcccugaugagcaucaucagcaccuuccaccugagcauccccaacuucaaccaguacgaggccaugagcugcgacuucaacgacggcaagaucagcgugcaguacaaccugagccacaccuacgccggcgacaccgccaaccacugcggcaccguggccaacggcgugcugcagaccuucaugagaauggccuggggcggcagcuacaucgcccuggacagcggcugcggcggcugggacugcaucaugaccagcuaccaguaccugaucauccagaacaccaccugggaggaccacugccaguucagcagacccagccccaucggcuaccugggccugcugagccagagaaccagagacaucuacaucagcagaagacgccggggcaccuucaccuggacccugagcgacagcgagggcaaggacacccccggcggcuacugccugaccagauggaugcugaucgaggccgagcugaagugcuucggcaacaccgccguggccaagugcaacgagaagcacgacgaggaguucugcgacaugcugagacuguucgacuucaacaagcaggccauccagagacugaaggcccccgcccagaugagcauccagcugaucaacaaggccgugaacgcccugaucaacgaccagcugaucaugaagaaccaccugagagacaucaugugcauccccuacugcaacuacagcaaguacugguaccugaaccacaccgugaccggcaagaccagccugcccaagugcuggcuggugagcaacggcagcuaccugaacgagacccacuucagcgacgacaucgagcagcaggccgacaacaugaucaccgagaugcugcagaaggaguacauggagagacagggcaagaccccccugggccugguggaccuguucguguucagcaccagcuucuaccugaucagcaucuuccugcaccuggugaagauccccacccacagacacguggugggcaagcccugccccaagccccacagacugaaccacaugggcaucugcagcugcggcuucuacaagcagcccggcgugcccgugagauggaagagaugaggacuaguuauaagacugacuagcccgaugggccucccaacgggcccuccuccccuccuugcaccgagauuaaucaaaggcucuuuucagagccaccaaaaaaaaaaaaaaaaaaaaaaaaaaaaaaaaaaaaaaaaaaaaaaaaaaaaaaaaaaaaaaaaaaaaaaaaaaaaaaaaaaaaaaaaaaaaaaaaaaaaa

SEQ ID NO: 16583 - RNA, 1689 nt, Artificial Sequence
  mRNA product Design i-3 (hSL-A100) comprising derived and/or modified sequence from LASV(Z0947-SLE-2011;Clade IV)__AIT17840__GPCmut1 (opt4)
aggagaaagcuuaccaugggccagaucgugaccuucuuccaggaggugccccacgugaucgaggaggugaugaacaucgugcugaucgcccugagcauccuggccgugcugaagggccuguacaacuucgccaccugcggccuggugggccuggugaccuuccugcugcugugcggcagaagcugcaccaucagccuguacaagggcguguacgagcugcagacccuggagcugaacauggagacccugaacaugaccaugccccugagcugcaccaagaacaacagccaccacuacaucauggugggcaacgagaccggccuggagcugacccugaccaacaccagcaucaucaaccacaaguucugcaaccugagcgacgcccacaagaagaaccuguacgaccacgcccugaugagcaucaucagcaccuuccaccugagcauccccaacuucaaccaguacgaggccaugagcugcgacuucaacggcggcaagaucagcgugcaguacaaccugagccacagcuacgccggcgacgccgccaaccacugcggcaccguggccaacggcgugcugcagaccuucaugagaauggccuggggcggcagcuacaucgcccuggacagcggcugcgacagaugggacugcaucaugaccagcuaccaguaccugaucauccagaacaccaccugggaggaccacugccaguucagcagacccagccccaucggcuaccugggccugcugagccagagaaccagagacaucuacaucagcagaagacgccggggcaccuucaccuggacccugagcgacagcgagggcaaggacacccccggcggcuacugccugaccagauggaugcugaucgaggccgagcugaagugcuucggcaacaccgccguggccaagugcaacgagaagcacgacgaggaguucugcgacaugcugagacuguucgacuucaacaagcaggccauccagagacugaaggcccccgcccagaugagcauccagcugaucaacaaggccgugaacgcccugaucaacgaccagcugaucaugaagaaccaccugagagacaucaugugcauccccuacugcaacuacagcaaguacugguaccugaaccacaccaccaccggcaagaccagccugcccaagugcuggcuggugagcaacggcagcuaccugaacgagacccacuucagcgacgacaucgagcagcaggccgacaacaugaucaccgagaugcugcagaaggaguacauggagagacagggcaagaccccccugggccugguggaccuguucguguucagcaccagcuucuaccugaucagcaucuuccugcaccuggugaagauccccacccacagacacaucgugggcaagcccugccccaagccccacagacugaaccacaugggcaucugcagcugcggccuguacaagcagcccggcgugcccgugaaguggaagagaugaggacuaguuauaagacugacuagcccgaugggccucccaacgggcccuccuccccuccuugcaccgagauuaaucaaaggcucuuuucagagccaccaaaaaaaaaaaaaaaaaaaaaaaaaaaaaaaaaaaaaaaaaaaaaaaaaaaaaaaaaaaaaaaaaaaaaaaaaaaaaaaaaaaaaaaaaaaaaaaaaaaaa

SEQ ID NO: 16584 - RNA, 1689 nt, Artificial Sequence
  mRNA product Design i-3 (hSL-A100) comprising derived and/or modified sequence from LASV(Josiah;Clade IV)__NP_694870__GPCmut1 (opt5)
aggagaaagcuuaccaugggccagaucgugaccuucuuucaagaggucccccacguuauugaagaggugaugaacaucgugcugauugcccucagcguccuggcugugcuuaaggggcuguacaauuucgccacaugcggacucguuggccuggugacguuucuucugcucugugggagauccugcaccacaucucuguauaaaggagucuacgaacugcagacccucgagcugaacauggaaacacuuaauaugaccaugccucugagcuguacaaagaacaauucccaucacuauaucauggugggcaacgagaccgggcucgagcugacgcuuaccaauacaucuauuaucaaccauaaauucugcaaucugagcgacgcgcacaagaaaaaccucuacgaucaugcucugauguccaucauuucuaccuuucaccugagcaucccgaauuucaaccaguaugaagccauguccugugacuuuaauggaggcaagauuagcguucaguacaaccucucucacuccuaugccggcgaugcugccaaucauugcgggacaguggcuaacggaguccugcaaaccuucaugcggauggccuggggcgggagcuacaucgcgcuugacucuggaugcggcaacugggauuguauuaugacguccuaccaguaucugaucauucagaauacaaccugggaggaccacugccaguuuagcagacccucuccuaucggguaccucggacugcuuucccaacggacacgcgauaucuauauuagcagacggcgccggggcaccuucaccuggacacuguccgacucugaaggcaaggauacgcccgggggauacugucugacccgcuggaugcucaucgaggccgagcugaaaugcuuuggcaacacagcuguggccaaguguaaugaaaaacaugacgaggaguucugcgauaugcuuagacuguuugacuucaacaagcaggcuauucagcggcucaaagcccccgcgcagaugagcauccaacugauuaauaaggccgugaacgcucuuaucaaugaucagcugaucaugaagaaccaccuccgcgacauuaugugcaucccuuauugcaauuacuccaaauauugguaccugaaccacaccacaaccggaagaacgagccugcccaaguguuggcucgucucuaauggcuccuaccugaacgaaacacauuucagcgacgauauugagcagcaagccgacaauaugaucaccgagaugcuucagaaagaauauauggagcggcaggggaagaccccucugggacucguugaucuguuuguguucucuaccagcuuuuaccugauuuccaucuuccuucaccucgugaaaaucccgacacaucgccacauugucggcaagucuugccccaaaccucauagacugaaccacaugggcaucuguagcugcgggcuguauaagcagcccggagugccuguuaaguggaaacggugaggacuaguuauaagacugacuagcccgaugggccucccaacgggcccuccuccccuccuugcaccgagauuaaucaaaggcucuuuucagagccaccaaaaaaaaaaaaaaaaaaaaaaaaaaaaaaaaaaaaaaaaaaaaaaaaaaaaaaaaaaaaaaaaaaaaaaaaaaaaaaaaaaaaaaaaaaaaaaaaaaaaa

SEQ ID NO: 16585 - RNA, 1686 nt, Artificial Sequence
  mRNA product Design i-3 (hSL-A100) comprising derived and/or modified sequence from LASV(LP;Clade I)__AAF86701__GPCmut1 (opt5)
aggagaaagcuuaccaugggccagaucauuaccuucuuucaagaggugccccacgucaucgaagagguuaugaacauugugcugaucgcccucagccugcuugcuauucugaaggggcucuacaauaucgccacaugcggaaucauuggccugguggcguuccuuuuucugugugggaaauccugcucucucacgcugaagggaggcuaugaacugcagacccucgagcugaacauggaaacacuuaauaugaccaugccucugagcuguaccaaaaacuccucucaucacuacaucagagucgggaaugagacaggacucgagcugacacuuaccaacacgagcauuaucaaucauaaguucugcaaccuguccgacgcucacaaaaagaaucucuaugaucaugcccugaugucuauuaucagcaccuuucaccuguccauuccgaacuucaaucaguacgaagccaugagcugugacuuuaacggcggcaagaucucugugcaguauaaucucucccacagcuacgcuggggaugccgcugagcauugcggaacaguugccaacggcgugcugcaaaccuucaugcggauggcguggggagggcgcuauaucgcccuugacucuggcugcgggaauugggauuguauuaugacauccuaccaguaccugaucauucagaacaccacgugggaagaccacugccaguuuagcagacccucuccuaucggauaucucggccugcuuucccaacggacacgcgauauuuacaucagcagacggcgccggggcaccuucacauggacccuguccgacucugaggggaacgagacccccggaggcuauugucugacacgcuggaugcucaucgaagcugagcugaagugcuuugggaauacggccgucgcuaaauguaacgaaaagcaugaugaggaguucugcgacaugcuuagacuguuugauuucaauaaacaggccauucggcgccucaaggcgcccgcccagaugagcauccagcugauuaacaaggcugugaaugcccuuaucaacgaccaacugauuaugaaaaaucaccucagagauaucaugugcaucccuuacugcaacuauuccaaguacugguaucugaaucacaccagcucuggccggacaucccugcccaaauguuggcucauuagcaacgggucuuaccugaaugagacccaguucagcgacgacaucgaacagcaagcugauaacaugauuacagagaugcuucagaaggaauacaucgagcgccagggaaaaaccccucugggccucguugacauuuuuaucuucuccacgucuuuuuaucugauuagcaucuuccugcaucuuaucaagauuccgacacacagacauaucgugggcaaacccugcccuaagccccaccggcucaaucauaugggggucuguuccugcggacuguacaagcacccuggcgugcccaccaaauggaagcgcugaggacuaguuauaagacugacuagcccgaugggccucccaacgggcccuccuccccuccuugcaccgagauuaaucaaaggcucuuuucagagccaccaaaaaaaaaaaaaaaaaaaaaaaaaaaaaaaaaaaaaaaaaaaaaaaaaaaaaaaaaaaaaaaaaaaaaaaaaaaaaaaaaaaaaaaaaaaaaaaaaaaaa

SEQ ID NO: 16586 - RNA, 1686 nt, Artificial Sequence
  mRNA product Design i-3 (hSL-A100) comprising derived and/or modified sequence from LASV(803213;Clade II)__AAF86703__GPCmut1 (opt5)
aggagaaagcuuaccaugggccagaucauuaccuucuuucaagaggugccccacgucaucgaagagguuaugaacauugugcugaucgcccucagccugcuugcuauucugaaggggaucuacaauguggccacaugcggacucuucggccugaucuccuuucuucugcucugugggagaucuugcagcgucacguauaaaggaguguacgaacugcagacccuggagcucaacauggcgaaucugaacaugacaaugccucuuuccuguaccaagaauaacucucaucacuauauuaugguuggcaaugaaacagggcuggagcucacccugacaaacaccagcaucauuaaucauaaauucugcaaccuuuccgacgcucacaagaaaaaucuguacgaucaugcccucaugucuaucauuagcacguuucaccuguccaucccgaacuucaaucaguaugaggccaugagcugugacuuuaacggaggcaagauuucugugcaguacaaucugucccacagcuucgcugucgaugccgcuaaccauugcggcaccaucgccaacggggugcuccaaacauuuaugcggauggcguggggaggcucuuauaucgcccuggacuccgggugcggaaauugggauuguauuaugaccagcuaccaguaccuuaucauucagaacacaaccugggaagaccacugccaguucucucgccccuccccuaucggcuaucuggggcuccugagccaaagaacgcgggauauuuacaucucccgcagacgccggggaacauuuaccuggacacucucugacagcgagggcaaugaagcucccggcggguauugucugacccgguggaugcugaucgaggccgagcucaaaugcuucggaaacaccgcuguugccaaguguaaugaaaaacaugaugaggaauuuugcgacaugcugcgccuuuucgauuucaacaagcaggcgauuaaaagacugaagacacccgcccagauguccauccagcucauuaauaaggcugugaacgcccugaucaaugaccaacuuauuaugaaaaaccaucugcgggauaucaugugcaucccuuacugcaauuauagccgcuacugguaucucaaccacacggucaccgggaagacaucucugcccagauguuggcugguguccaauggaagcuaccucaacgaaacccacuuuucugacgacauugagcagcaggcugauaauaugaucacagagaugcugcaaaaagaauacauggaccggcagggcaagaccccucuugggcugguggaucucuucgucuuuagcacguccuucuaucugauuucuaucuuucugcaccuuguuaaaauuccgacacaucgccacaucgugggaaagcccugcccuaaaccccauagacucaaccacaugggcauuuguagcugcggccuguacaagcacccuggggugcccgucaaguggaaacggugaggacuaguuauaagacugacuagcccgaugggccucccaacgggcccuccuccccuccuugcaccgagauuaaucaaaggcucuuuucagagccaccaaaaaaaaaaaaaaaaaaaaaaaaaaaaaaaaaaaaaaaaaaaaaaaaaaaaaaaaaaaaaaaaaaaaaaaaaaaaaaaaaaaaaaaaaaaaaaaaaaaaa

SEQ ID NO: 16587 - RNA, 1686 nt, Artificial Sequence
  mRNA product Design i-3 (hSL-A100) comprising derived and/or modified sequence from LASV(GA391;Clade III)__CAA36645__GPCmut1 (opt5)
aggagaaagcuuaccaugggccagaucgugaccuucuuucaagaggucccccacguuauugaagaggugaugaacaucgugcugauugcccucagcauccuggcuauucuuaaggggcuguacaaugucgccacaugcggacucaucggccuggugacguuccuucugcucuccgggagaucuuguagccugaucuauaaaggaaccuacgaacugcagacacucgagcugaacauggaaacccuuaauaugacaaugccucuguccugcaccaagaacaauucucaucacuauauucggguuggcaacgagacagggcucgagcugacccuuacgaauaccagcauccugaaccauaaauuuuguaaucucuccgacgcgcacaagcgcaaccuguacgaucauucucugaugagcauuaucuccacauuccaccucagcauuccgaauuuuaaccaguaugaagcuaugucuugcgacuucaauggaggcaaaaucaccgugcaguacaaccugucccacagcuuugccgucgaugccgcuggccauugugggacacuugccaauggagugcugcaaaccuucaugagaauggcuuggggcgggucuuauauugcccucgacuccggaugcggcaacugggauugcaucaugacgagcuaccaguaccugaucauucagaacacaaccugggacgaucacugucaguuuucucgccccuccccuaucggguaucuuggacugcucagccaaagaacacgggacauuuacaucucccgcagacgccggggcaccuucaccuggacacucucugauagcgagggcaaugaaacgcccgggggauauugccugacccgguggaugcuuauugaggcggagcugaaguguuuuggcaacacagccguugcuaagugcaaugaaaaacaugacgaggaguucugugauaugcuccgccuguuugacuucaacaagcaggccaucagacggcuuaaaacccccgcucagauguccauccagcugauuaauaaggccgugaacgcgcucaucaaugaucaacugauuaugaaaaaccaucugcgcgacaucaugugcauuccuuacugcaauuauagcagauacugguaucucaaccacacaucuaccggaaagacgucccugccccggugcuggcuuaucagcaauggcucuuaccugaacgaaacaaaguucagcgacgauaucgagcagcaggccgacaauaugauuaccgagaugcuccaaaaagaauacaucgaucgccaggggaagaccccucugggacuggucgaccuuuuuguguucuccacaucuuuuuaucucauuagcaucuuccugcaccuggugaaaauuccgacccacagacauaucgucggcaagcccuguccuaaaccccaccggcucaaccauaugggcauuugcuccugugggcuguacaagcagccuggaguucccgugagauggaaacgcugaggacuaguuauaagacugacuagcccgaugggccucccaacgggcccuccuccccuccuugcaccgagauuaaucaaaggcucuuuucagagccaccaaaaaaaaaaaaaaaaaaaaaaaaaaaaaaaaaaaaaaaaaaaaaaaaaaaaaaaaaaaaaaaaaaaaaaaaaaaaaaaaaaaaaaaaaaaaaaaaaaaaa

SEQ ID NO: 16588 - RNA, 1689 nt, Artificial Sequence
  mRNA product Design i-3 (hSL-A100) comprising derived and/or modified sequence from LASV(AV;Clade V)__CCA30314__GPCmut1 (opt5)
aggagaaagcuuaccaugggccagaucgugaccuucuuucaagaggucccccacguuauugaagaggugaugaacaucgugcugauugcccucagcauccuggcuguccuuaaggggcuguacaauauugccacaugcggacucaucggccugaucacguuccuucugcucugugggagauccugcucuagcaaccuguauaaaggaguguacgaacugcagucccucgaccugaauauggagacccuuaacaugacaaugccucugucuuguaccaagaauaacagccaucacuauauucggguuggcaaugauacagggcucgaacugacccuuacaaacaccuccauccugaaucauaaauuuugcaaccucucugacgcgcacaagaaagaucuguacgaccaugcucugaugagcauuaucuccacguuccaccucagcauuccgaauuuuaaccaguaugaggccaugucuugugauuucaauggaggcaagaucuccgugcaguacaaccugagccacucuuaugccauugacgcugccaaucauugcggcaccgucgcuaacgggauccuucaaacauuuaugcgcauggccuggggaggcuccuacaucgcgcuggauagcgggugcggaaacugggacuguauuaugaccucuuaccaguaucucaucauucagaauacaaccugggagaaccacugccaguucucccggcccagcccuaucggcuaccuggggcuucugucccaacgcacgagagauauuuauaucucucggcgccgccggggaacauuuaccuggacacugagcgacuccgaaggcaaugccacccccggcggguacugucucaccagauggaugcugaucgaggcugaacuuaagugcuucggaaacacagccguggcuaaauguaaugagaagcaugaugaggaauuuugcgacaugcugcgccucuucgauuuuaacaaacaggccauuagccggcugaagucucccgcgcagauguccauccagcuuauuaauaaagccguuaacgcucugaucaaugaccaacucauuaugaagaaccaccugagagacaucaugugcaucccuuauugcaauuacagcaaguauugguaccugaaccacacgauuaccgggaaaacaucucuccccaaguguuggcuggugagcaauggauccuaccuuaacgaaacccauuucucugaugacaucgagcagcaggccgauaauaugauuacagaaaugcugcaaaaagaguauauggagcggcagggcaagaccccucucgggcuggucgaccuguucguguuuagcacguccuucuaccuuaucagcauuuuucuccgccuggugaaaaucccgacacacagacauauugucggaaagcccugcccuaaaccccaccggcugaaccauaugggcaucuguucuugcggccucuauaagcagccugggguucccgugcgcuggaagagaugaggacuaguuauaagacugacuagcccgaugggccucccaacgggcccuccuccccuccuugcaccgagauuaaucaaaggcucuuuucagagccaccaaaaaaaaaaaaaaaaaaaaaaaaaaaaaaaaaaaaaaaaaaaaaaaaaaaaaaaaaaaaaaaaaaaaaaaaaaaaaaaaaaaaaaaaaaaaaaaaaaaaa

SEQ ID NO: 16589 - RNA, 1686 nt, Artificial Sequence
  mRNA product Design i-3 (hSL-A100) comprising derived and/or modified sequence from LASV(Togo/2016/7082;Clade VI)__AMR44577__GPCmut1 (opt5)
aggagaaagcuuaccaugggccagaucauuaccuucuuucaagaggugccccacgucaucgaagagguuaugaacauugugcugaucgcccucagccugcuugcuauucugaaggggguguacaaugucgccacaugcggaaucaucggccucgugacguuccuguuucuuugugggagauccugcucucugauuuauaaaggaagcuacgaacuccagacccuggagcugaacauggaaacacucaauaugaccaugccucuguccuguacaaagaacucuagccaucacuauauccggguuggcaaugagaccgggcuugagcugacacucaccaacacguccauuaucaaucauaaauucugcaaccugucugacgcgcacaagcgcaaucuuuacgaucaugcucugaugagcauucucuccaccuuucaccugagcaucccgaacuucaaucaguaugaagccaugucuugugacuuuaacggaggcaaaauuuccgugcaguacaaucugagccacgccuaugcugucgaugccgcugagcauugcggcacaguggccaacgggguucuccaaaccuucaugagaauggcguggggaggcucuuacaucgcccuggacuccgggugcggaaauugggauuguaucaugacaagcuaccaguaucuuauuauccagaacaccacgugggaagaccacugccaguuuucucgccccuccccuauuggcuaccuggggcuccugagccaaagaacacgggauaucuauauuucccgcagacgccggggaaccuucacauggacccucucugacagcgagggcaacgagacccccggcggguacugucugacacgguggaugcugaucgaagcugagcucaagugcuuuggaaauacggccguggcuaaguguaacgaaaaacaugaugaggaguucugcgacaugcugcgccuuuuugauuucaauaagcaggccauccagagacugaaaucccccgcgcagaugagcauucaacucaucaacaaggccgucaaugcucugauuaacgaccagcuuaucaugaaaaaucaucugcgggauaugaugugcauuccuuauugcaacuacucuaaguauugguaccucaaucacaccuccagcgggcgcacaucucugcccaaguguuggcuggugagcaacggauccuaccucaaugagacccacuucucugacgacaucgaacagcaagccgauaacaugaucacagagaugcugcagaaagaauauauugacagacagggcaagaccccucuugggcugguggaucucuuugucuucagcacguccuuuuaccugaucagcauuuuccugcaccuuaucaaaauuccgacacaucggcacaucguuggaaagcccugcccuaaaccccaucgccucaaucacaugggcauuuguucuugcggccuguauaagcagccuggggugcccaccagauggaaacggugaggacuaguuauaagacugacuagcccgaugggccucccaacgggcccuccuccccuccuugcaccgagauuaaucaaaggcucuuuucagagccaccaaaaaaaaaaaaaaaaaaaaaaaaaaaaaaaaaaaaaaaaaaaaaaaaaaaaaaaaaaaaaaaaaaaaaaaaaaaaaaaaaaaaaaaaaaaaaaaaaaaaa

SEQ ID NO: 16590 - RNA, 1686 nt, Artificial Sequence
  mRNA product Design i-3 (hSL-A100) comprising derived and/or modified sequence from LASV(KAK-428;Clade n.d. (VII))__ANH09740__GPCmut1 (opt5)
aggagaaagcuuaccaugggccagaucgugaccuucuuucaagaggucccccacguuauugaagaggugaugaacaucgugcugauugcccucagccugcuugcuauccugaaggggcucuacaauuucgccacaugcggagucauuggccugaucacguuucuucugcucugugggagauccugcucugcgaccuauaaaggacaguacgaacugcagacacuggagcucaacauggaaagccugaauaugaccaugccucuuuccuguacaaagaacaauucucaucacuauauccgggcuggcaacaauaccgggcuggagcucacacugaccaacacgagcauuaucucccauaaauucugcaaucuuucugacgcccacaagaaaaaccuguacgaucauacccucaugagcauuaucacaaccuuucaccuguccauuccgaauuucaaccaguaugaggccaugagcugugacuuuaauggaggcaagaucucuauucaauacaaccugucccacagcuaugcuggcgaugccgcucagcauugcgggacaguggccaauggaguucuccagaccuucaugcgcauggcguggggcgggucuuaccuggcccuugacuccggaugccggggcugggauuguaucaucagcucuuaccaguaucugauuauccaaaacacgacaugggacgaucacugccaguuuucccgccccagcccuauuggguaccucggauucgugucccagaagaccagagacaucuauauuucucggcgccgccggggcacauuuaccuggacccugagcgauuccgaaggccaugacaugcccgggggauacugucucacaagauggaugcugaucgaggcugaucugaaaugcuucggcaacacggccgucgcuaaguguaaugaaaaacacgacgaggaguuuugcgauauguggcgccucuucgacuucaacaagcaggccauccaacggcugaaagcgcccgcccagaugaauauucagcuuaucaacaaggcugugaaugcccugauuaacgaccaacucaugaugaagaaucaccugagagauaucaugugcauuccuuauugcaacuacagcaaauuuugguaucuuaauaacaccacaaccggacggacaucucugccccgcuguuggcucaucuccaauggcagcuaccugaacgagacccauuucucugacgauaucgaacagcaggcugacaauaugauuacggagaugcugcagaaggaauacauggauagacaagggaaaacaccucucggacugguugaccuuuuuguguucagcaccuccuuuuaucugaucaccauuuuccuccaccuggucaagaucccgacacaucggcacauugugggcaaacccugcccuaagccccaucgccugaaccacaugggcaucuguucuugcgggcuuuacaaacagccuggagugcccgucagauggaagcggugaggacuaguuauaagacugacuagcccgaugggccucccaacgggcccuccuccccuccuugcaccgagauuaaucaaaggcucuuuucagagccaccaaaaaaaaaaaaaaaaaaaaaaaaaaaaaaaaaaaaaaaaaaaaaaaaaaaaaaaaaaaaaaaaaaaaaaaaaaaaaaaaaaaaaaaaaaaaaaaaaaaaa

SEQ ID NO: 16591 - RNA, 1686 nt, Artificial Sequence; identical to SEQ ID NO: 16585
  mRNA product Design i-3 (hSL-A100) comprising derived and/or modified sequence from LASV(Pinneo-NIG-1969;Clade I)__AIT17836__GPCmut1 (opt5)

SEQ ID NO: 16592 - RNA, 1686 nt, Artificial Sequence
  mRNA product Design i-3 (hSL-A100) comprising derived and/or modified sequence from LASV(ISTH0009-NIG-2011;Clade II)__AIT17404__GPCmut1 (opt5)
aggagaaagcuuaccaugggccagaucauuaccuucuuucaagaggugccccacgucaucgaagagguuaugaacauugugcugaucgcccucagccugcuugcuauucugaaggggaucuacaauguggccacaugcggacucuucggccuggucuccuuucuucugcucugugggagaucuugcagcacgaccuauaaaggaguguacgaacugcagacacuggagcucgacauggcgucccugaacaugaccaugccucuuucuuguacaaagaauaacagccaucacuauaucaugguuggcaaugaaaccgggcuggagcucacacugaccaacacguccauuaucaaucauaaauucugcaaccuuucugaugcucacaagaaaaaucuguacgaccaugcccucaugagcauuaucuccaccuuucaccugagcauuccgaacuucaaucaguaugaggccaugucuugugauuuuaacggaggcaagaucuccgugcaguacaaucugagccacgcuuaugccgucgacgcugccaaccauugcggcacaauugcgaauggggugcuccaaaccuucaugcggauggccuggggaggcucuuacaucgcucuggauuccgggugcggaagcugggacuguaucaugacaucuuaccaguaucuuauuauccagaacaccacgugggaagaucacugccaguuuucccgccccagcccuauuggcuaccuggggcuccugucccaaagaacacgggacaucuauauuucucgcagacgccggggaaccuucacauggacccucagcgauuccgagggcaacgaaacccccggcggguacugucugacacgguggaugcugaucgaggccgagcucaaaugcuuuggaaauacggcuguugccaaguguaacgaaaaacaugacgaggaguucugcgauaugcugcgccuuuuugacuucaauaagcaggcgaucagacggcugaaaacccccgcccagaugagcauucagcucaucaacaaggcugugaaugcccugauuaacgaucaacuuaucaugaagaaucaucugcgcgacauuaugugcaucccuuauugcaacuacucuaaauauugguaccucaaucacacagucaccgggaagacaucccugcccagauguuggcuggugagcaacggaucuuaccucaaugaaacccacuucagcgacgauaucgagcagcaggcugacaacaugauuacggagcugcuucaaaaagaauauauggaucggcagggcaagacaccucuggggcucguggaccuguuugucuucuccaccucuuuuuaccugaucagcauuuuccuucaccucaucaaaauuccgacccaucgccacaucacaggaaagcccugcccuaaaccccauagacugaaucacaugggcauuuguuccugcggccuguauaagcacccugggguucccgugaaguggaaacggugaggacuaguuauaagacugacuagcccgaugggccucccaacgggcccuccuccccuccuugcaccgagauuaaucaaaggcucuuuucagagccaccaaaaaaaaaaaaaaaaaaaaaaaaaaaaaaaaaaaaaaaaaaaaaaaaaaaaaaaaaaaaaaaaaaaaaaaaaaaaaaaaaaaaaaaaaaaaaaaaaaaaa

SEQ ID NO: 16593 - RNA, 1686 nt, Artificial Sequence
  mRNA product Design i-3 (hSL-A100) comprising derived and/or modified sequence from LASV(ISTH2010-NIG-2012;Clade II)__AIT17482__GPCmut1 (opt5)
aggagaaagcuuaccaugggccagaucauuaccuucuuucaagaggugccccacgucaucgaagagguuaugaacauugugcugaucgcccucagccugcuugcuauucugaaggggaucuacaauguggccacaugcggacucuucggccuggucuccuuucuucugcucugugggagaucuugcagcacgaccuauaaaggaguguacgaacugcagacacuggagcucgacauggcgucccugaacaugaccaugccucuuucuuguacaaagaauaacagccaucacuauaucaugguuggcaaugaaaccgggcuggagcucacacugaccaacacguccauuaucaaucauaaauucugcaaccuuucugaugcucacaagaaaaaucuguacgaccaugcccucaugagcauuaucuccaccuuucaccugagcauuccgaacuucaaucaguaugaggccaugucuugugauuuuaacggaggcaagaucuccgugcaguacaaucugagccacgcuuaugccgucgacgcugccaaccauugcggcacaauugcgaauggggugcuccaaaccuucaugcggauggccuggggaggcucuuacaucgcucuggauuccgggugcggaagcugggacuguaucaugacaucuuaccaguaucuuauuauccagaacauuaccugggaagaucacugccaguuuucccgccccagcccuaucggcuaccuggggcuccugucccaaagaacgcgggacauuuauaucucucgcagacgccggggaacauucaccuggacacucagcgauuccgagggcaacgaaacccccggcggguacugucugacccgguggaugcugaucgaggccgagcucaaaugcuuuggaaauacagcuguugccaaguguaacgaaaaacaugacgaggaguucugcgauaugcugcgccuuuuugacuucaauaagcaggcgauuagacggcugaaaacgcccgcccagaugagcauccagcucauuaacaaggcugugaaugcccugaucaacgaucaacuuauuaugaagaaucaucugcgcgacaucaugugcaucccuuauugcaacuacucuaaauauugguaccucaaucacaccgucacagggaagaccucccugcccagauguuggcuggugagcaacggaucuuaccucaaugaaacacacuucagcgacgauauugagcagcaggcugacaacaugaucaccgagcugcuucaaaaagaauauauugaucggcagggcaagacgccucuggggcucguggaccuguuugucuucuccacaucuuuuuaccugaucagcauuuuccuucaccucguuaaaaucccgacccaucgccacguggugggaaagcccugcccuaaaccccauagacugaaucacaugggcauuuguuccugcggccuguauaagcacccugggguccccgugaaguggaaacggugaggacuaguuauaagacugacuagcccgaugggccucccaacgggcccuccuccccuccuugcaccgagauuaaucaaaggcucuuuucagagccaccaaaaaaaaaaaaaaaaaaaaaaaaaaaaaaaaaaaaaaaaaaaaaaaaaaaaaaaaaaaaaaaaaaaaaaaaaaaaaaaaaaaaaaaaaaaaaaaaaaaaa

SEQ ID NO: 16594 - RNA, 1686 nt, Artificial Sequence
  mRNA product Design i-3 (hSL-A100) comprising derived and/or modified sequence from LASV(Lassa virus/H.sapiens-wt/NGA/2015/ISTH_0543;Clade II)__AVO03639__GPCmut1 (opt5)
aggagaaagcuuaccaugggccagaucauuaccuucuuucaagaggugccccacgucaucgaagagguuaugaacauugugcugaucgcccucagccugcuugcuauucugaaggggaucuacaauguggccacaugcggacucuucggccuggucuccuuucuucugcucugugggagaucuugcagcacgaccuauaaaggaguguacgaacugcagacacuggagcucgacauggcgaaccugaauaugaccaugccucuuuccuguacaaagaacaauucucaucacuauaucaugguuggcaacgaaaccgggcuggagcucacacugaccaauacgagcauuaucaaccauaaauucugcaaucuuuccgaugcucacaagaaaaaccuguacgaccaugcccucaugucuauuaucagcaccuuucaccuguccauuccgaauuucaaccaguaugaggccaugagcugugauuuuaauggaggcaagaucucugugcaguacaaccugucccacacauaugcugucgacgccgcuaaucauugcggcaccauugccaacggggugcuccaaacauucaugcggauggcguggggaggcagcuacaucgcccuggauucugggugcggauccugggacuguaucaugaccagcuaccaguaucuuguuauucagaacacgacaugggaagaucacugccaguuuucucgccccuccccuaucggcuaccuggggcuccugagccaaagaacccgggacauuuauaucucccgcagacgccggggaacauucaccuggacccucucugauagcgagggcaaugaaacacccggcggguacugucugacgcgguggaugcugauugaggcugagcucaaaugcuuuggaaacaccgccguggcuaaguguaaugaaaaacaugacgaggaguucugcgauaugcugcgccuuuuugacuucaacaagcaggccaucagacggcugaaaacacccgcgcagauguccauccagcucauuaauaaggccgucaacgcucugaucaaugaucaacuuauuaugaagaaccaucugcgcgacaucaugugcauuccuuauugcaauuacagcaaauauugguaccucaaccacaccgugacagggaagaccucucugcccagauguuggcugguguccaauggaagcuaccucaacgaaacgcacuucucugacgauaucgagcagcaggccgacaauaugaucacagagcugcuucaaaaagaauauauugaucggcagggcaagaccccucuggggcucgucgaccuguuuguuuucagcaccuccuuuuaccugaucucuauuuuccuucaccucgugaaaaucccgacacaucgccacauuaccggaaagcccugcccuaaaccccauagacugaaccacaugggcaucuguagcugcggccuguauaagcacccuggggugcccgucaaguggaaacggugaggacuaguuauaagacugacuagcccgaugggccucccaacgggcccuccuccccuccuugcaccgagauuaaucaaaggcucuuuucagagccaccaaaaaaaaaaaaaaaaaaaaaaaaaaaaaaaaaaaaaaaaaaaaaaaaaaaaaaaaaaaaaaaaaaaaaaaaaaaaaaaaaaaaaaaaaaaaaaaaaaaaa

SEQ ID NO: 16595 - RNA, 1686 nt, Artificial Sequence
  mRNA product Design i-3 (hSL-A100) comprising derived and/or modified sequence from LASV(Lassa virus/H.sapiens-wt/NGA/2016/ISTH_0009;Clade II)__AVO03571__GPCmut1 (opt5)
aggagaaagcuuaccaugggccagaucauuaccuucuuucaagaggugccccacgucaucgaagagguuaugaacauugugcugaucgcccucagccugcuugcuauucugaaggggaucuacaauguggccacaugcggacuccugggccuugucuccuuccugcuccugugugggagaucuugcagcacgaccuauaaaggaguguacgaacugcagacacucgagcuggacauggcgucccuuaacaugaccaugccucugucuuguacaaagaauaacagccaucacuauaucaugguuggcaaugaaaccgggcucgagcugacacuuaccaacacguccauuaucaaucauaaauuuugcaaccugucugaugcucacaagaaaaaucucuacgaccaugcccugaugagcauuaucuccaccuuccaccugagcauuccgaacuuuaaucaguaugaggccaugucuugugauuucaacggaggccggaucuccgugcaguacaaucucagccacucuuaugcugucgacgccgcuaaccauugcggcacaauugccaauggggugcugcaaaccuuuaugcgcauggcguggggaggcuccuacaucgcccuugauagcgggugcggaucuugggacuguaucaugacauccuaccaguaucugauuauccagaacaccacgugggaagaucacugccaguucagcagacccuccccuauuggcuaccucgggcugcuuucucaacggacacgcgacaucuauauuagcagacggcgccggggaaccuuuacauggacccuguccgauagcgagggcaacgaaacccccggcggguacugucugacacgcuggaugcucaucgaggcugagcugaagugcuucggaaauacggccguugcuaaauguaacgaaaagcaugacgaggaauuuugcgauaugcuuagacuguucgacuuuaauaaacaggccauccggcgccucaagacccccgcgcagaugucuauucagcugaucaacaaagccgugaaugcucuuauuaacgaucaacugaucaugaagaaucaccucagagacauuaugugcaucccuuauugcaacuacuccaaguauugguaccugaaucacacagucaccgggaaaacaagccugccccgguguuggcucgugucuaacggaagcuaccugaaugaaacccauuucuccgacgauaucgagcagcaggccgacaacaugauuacggagcuucugcaaaaggaauauaucgaucgccagggcaaaacaccucucgggcugguggaccuguucgucuuuucuaccagcuucuaccuuauuuccaucuuucuccaccugguuaagauuccgacccauagacacaucacaggaaaacccugcccuaagccccaucggcugaaucacaugggcauuuguagcugcggccucuauaaccacccuggggugcccgugaaauggaagcgcugaggacuaguuauaagacugacuagcccgaugggccucccaacgggcccuccuccccuccuugcaccgagauuaaucaaaggcucuuuucagagccaccaaaaaaaaaaaaaaaaaaaaaaaaaaaaaaaaaaaaaaaaaaaaaaaaaaaaaaaaaaaaaaaaaaaaaaaaaaaaaaaaaaaaaaaaaaaaaaaaaaaaa

SEQ ID NO: 16596 - RNA, 1686 nt, Artificial Sequence
  mRNA product Design i-3 (hSL-A100) comprising derived and/or modified sequence from LASV(Lassa virus/H.sapiens-wt/NGA/2016/ISTH_0017;Clade II)__AVO03567__GPCmut1 (opt5)
aggagaaagcuuaccaugggccagaucauuaccuucuuucaagaggugccccacgucaucgaagagguuaugaacauugugcugaucgcccucagccugcuugcuauucugaaggggaucuacaauguggccacaugcggacucuucggccuggucuccuuucuucugcucugugggagaucuugcagcacgaccuauaaaggaguguacgaacugcagacacuggagcucgacauggcgucccugaacaugaccaugccucuuucuuguacaaagaauaacagccaucacuauaucaugguuggcaaugaaaccgggcuggagcucacacugaccaacacguccauuaucaaucauaaauucugcaaccuuucugaugcucacaagaaaaaucuguacgaccaugcccucaugagcauuaucuccaccuuucaccugagcauuccgaacuucaaucaguaugaggccaugucuugugauuuuaacggaggcaagaucuccgugcaguacaaucugagccacacauaugcuauugacgccgcuaaccauugcggcaccaucgccaaugggguccuccaaacauucaugcggauggcguggggaggcucuuacaucgcccuggauuccgggugcggaagcugggacuguauuaugaccucuuaccaguaucuuaucauucagaacacgacaugggaagaucacugccaguuuucccgccccagcccuaucggcuaccuggggcuccugucccaaagaacccgggacauuuauaucucucgcagacgccggggaacauucaccuggacccucagcgauuccgagggcaacgaaacacccggcggguacugucugacgcgguggaugcugaucgaggcugagcucaaaugcuuuggaaauaccgccguggcuaaguguaacgaaaaacaugacgaggaguucugcgauaugcugcgccuuuuugacuucaauaagcaggccauuagacggcugaaaacacccgcgcagaugagcauccagcucauuaacaaggccguuaaugcucugaucaacgaucaacuuauuaugaagaaucaucugcgcgacaucaugugcaucccuuauugcaacuacucuaaauauugguaccucaaucacaccgugacagggaagaccucccugcccagauguuggcuggucagcaacggaucuuaccucaaugaaacgcacuucagcgacgauauugagcagcaggccgacaacaugaucacagagcugcuucaaaaagaauauauggaucggcagggcaagaccccucuggggcucguggaccuguuuguguucuccaccucuuuuuaccugauuagcaucuuccuucaccucguccgcauuccgacacauagacacguuaucggaaaacccugcccuaagccccaucggcugaaucacaugggcauuuguuccugcggccuguauaaacacccuggggugcccgugaaguggaagcgcugaggacuaguuauaagacugacuagcccgaugggccucccaacgggcccuccuccccuccuugcaccgagauuaaucaaaggcucuuuucagagccaccaaaaaaaaaaaaaaaaaaaaaaaaaaaaaaaaaaaaaaaaaaaaaaaaaaaaaaaaaaaaaaaaaaaaaaaaaaaaaaaaaaaaaaaaaaaaaaaaaaaaa

SEQ ID NO: 16597 - RNA, 1686 nt, Artificial Sequence
  mRNA product Design i-3 (hSL-A100) comprising derived and/or modified sequence from LASV(Lassa virus/H.sapiens-wt/NGA/2018/ISTH_0959;Clade II)__AVV65099__GPCmut1 (opt5)
aggagaaagcuuaccaugggccagaucauuaccuucuuucaagaggugccccacgucaucgaagagguuaugaacauugugcugaucgcccucagccugcuugcuauucugaaggggaucuacaauguggucacaugcggacucuucggccugguguccuuucuucugcucugugggagaucuugcagcacgaccuauaaaggaguuuacgaacugcagacacuggagcucgacauggccucccugaacaugaccaugccucuuucuuguacaaagaauaacagccaucacuauaucauggugggcaaugaaaccgggcuggagcucacacugaccaacacguccauuaucaaucauaaauucugcaaccuuucugaugcgcacaagaaaaaucuguacgaccaugcucucaugagcauuaucuccaccuuucaccugagcauuccgaacuucaaucaguaugaggccaugucuugugauuuuaacggaggcaagaucuccguccaguacaaucugagccacgccuaugcuauugacgccgcuaaccauugcggcacaaucgccaauggggugcuccaaaccuucaugcggauggcguggggaggcucuuacaucgcccuggauuccgggugcggaagcugggacuguauuaugacaucuuaccaguaucuuaucauucagaacaccacgugggaagaucacugccaguuuucccgccccagcccuaucggcuaccuggggcuccugucccaaagaacacgggacauuuauaucucucgcagacgccggggaaccuucacauggacccucagcgauuccgagggcaacgaaacccccggcggguacugucugacacgguggaugcugaucgaggcugagcucaaaugcuuuggaaauacggccguugcuaaguguaacgaaaaacaugacgaggaguucugcgauaugcugcgccuuuuugacuucaauaagcaggccauuagacggcugaaaacccccgcgcagaugagcauccagcucauuaacaaggccgugaaugcucugaucaacgaucaacuuauuaugaagaaucaucugcgcgacaucaugugcaucccuuauugcaacuacucuaaauauugguaccucaaucacacagucaccgggaagacaucccugcccagauguuggcuggugagcaacggaucuuaccucaaugaaacccacuucagcgacgauauugagcagcaggccgacaacaugaucacggagcugcuucaaaaagaauauauugaucggcagggcaagacaccucuggggcucguggaccuguuugucuucuccaccucuuuuuaccugaucagcauuuuccuucaccucguuaaaaucccgacccaucgccacgugauuggaaagcccugcccuaaaccccauagacugaaucacaugggcaucuguuccugcggccuguauaagcacccuggggugcccgucaaguggaaacggugaggacuaguuauaagacugacuagcccgaugggccucccaacgggcccuccuccccuccuugcaccgagauuaaucaaaggcucuuuucagagccaccaaaaaaaaaaaaaaaaaaaaaaaaaaaaaaaaaaaaaaaaaaaaaaaaaaaaaaaaaaaaaaaaaaaaaaaaaaaaaaaaaaaaaaaaaaaaaaaaaaaaa

SEQ ID NO: 16598 - RNA, 1686 nt, Artificial Sequence
  mRNA product Design i-3 (hSL-A100) comprising derived and/or modified sequence from LASV(LASV003-NIG-2008;Clade II)__AIT17580__GPCmut1 (opt5)
aggagaaagcuuaccaugggccagaucauuaccuucuuucaagaggugccccacgucaucgaagagguuaugaacauugugcugaucgcccucagccugcuugcuauucugaaggggaucuacaauguggccacaugcggacucuucggccuggucuccuuucuucugcucugugggagaucuugcagcacgaccuauaaaggaguguacgaacugcagacacuggagcucgacauggcgucccugaacaugaccaugccucuuucuuguacaaagaauaacagccaucacuauaucaugguuggcaaugaaaccgggcuggagcucacacugaccaacacguccauuaucaaucauaaauucugcaaccuuucugaugcucacaagaaaaaucuguacgaccaugcccucaugagcauuaucuccaccuuucaccugagcauuccgaacuucaaucaguaugaggccaugucuugugauuuuaacggaggcaagaucuccgugcaguacaaucugagccacacauaugcugucgacgccgcuaaccauugcggcaccauugccaauggggugcuccaaacauucaugcggauggcguggggaggcucuuacaucgcccuggauuccgggugcggaagcugggacuguaucaugaccucuuaccaguaucuuauuauccagaacacgacaugggaagaucacugccaguuuucccgccccagcccuauuggcuaccuggggcuccugucccaaagaacccgggacaucuauauuucucgcagacgccggggaacauucaccuggacccucagcgauuccgagagcaacgaaacacccggcggcuacugucugacgcgguggaugcugaucgaggcugagcucaaaugcuuugggaauaccgccguugcuaaguguaacgaaaaacaugacgaggaguucugcgauaugcugcgccuuuuugacuucaauaagcaggccaucagacggcugaaagcgcccgcccagaugucuauucagcucaucaacaaggcugugaaugcccugauuaacgaucaacuuaucaugaagaaucaucugcgcgacauuaugugcaucccuuauugcaacuacuccaaauauugguaccucaaucacacagucaccggcagaacaagccugccccgguguuggcuggugucuaacgggagcuaccucaaugaaacccacuucuccgacgauaucgagcagcaggcugacaacaugauuacggagcugcuucaaaaggaauauauggaucgccagggaaaaacaccucugggccucguggaccuguuugucuucucuaccagcuuuuaccugaucuccauuuuccuucaccucguuaagaucccgacccauagacacgugauugggaaacccugcccuaagccccaucggcugaaucacaugggaaucuguagcugcggccuguauaaacacccuggcgugcccgucaaguggaagcgcugaggacuaguuauaagacugacuagcccgaugggccucccaacgggcccuccuccccuccuugcaccgagauuaaucaaaggcucuuuucagagccaccaaaaaaaaaaaaaaaaaaaaaaaaaaaaaaaaaaaaaaaaaaaaaaaaaaaaaaaaaaaaaaaaaaaaaaaaaaaaaaaaaaaaaaaaaaaaaaaaaaaaa

SEQ ID NO: 16599 - RNA, 1686 nt, Artificial Sequence
  mRNA product Design i-3 (hSL-A100) comprising derived and/or modified sequence from LASV(LASV035-NIG-2009;Clade II)__AIT17588__GPCmut1 (opt5)
aggagaaagcuuaccaugggccagaucauuaccuucuuucaagaggugccccacgucaucgaagagguuaugaacauugugcugaucgcccucagccugcuugcuauucugaaggggaucuacaauguggccacaugcggacucuucggccuggucuccuuucuucugcucugugggagaucuugcagcacgaccuauaaaggaguguacgaacugcagacacuggagcucgacauggcgucccugaacaugaccaugccucuuucuuguacaaagaauaacagccaucacuauaucaugguuggcaaugaaaccgggcuggagcucacacugaccaacacguccauuaucaaucauaaauucugcaaccuuucugaugcucacaagaaaaaucuguacgaccaugcccucaugagcauuaucuccaccuuucaccugagcauuccgaacuucaaucaguaugaggccaugucuugugauuuuaacggaggcaagaucuccgugcaguacaaucugagccacgcuuaugccgucgacgcugccaaccauugcggcacaauugcgaauggggugcuccaaaccuucaugcggauggccuggggaggcucuuacaucgcucuggauuccgggugcggaagcugggacuguaucaugacaucuuaccaguaucuuauuauccagaacaccacgugggaagaucacugccaguuuucccgccccagcccuauuggcuaccuggggcuccugucccaaagaacacgggacaucuauauuucucgcagacgccggggaaccuucacauggacccucagcgauuccgagggcaacgaaacccccggcggguacugucugacacgguggaugcugaucgaggccgagcucaaaugcuuuggaaauacggcuguugccaaguguaacgaaaaacaugacgaggaguucugcgauaugcugcgccuuuuugacuucaauaagcaggcgaucagacggcugaaagcccccgcucagaugagcauucagcucaucaacaaggccgugaaugcucugauuaacgaucaacuuaucaugaagaaucaucugcgcgacauuaugugcaucccuuauugcaacuacucuaaauauugguaccucaaucacaccgucacagggaagaccucccugcccagauguuggcuggugagcaacggaucuuaccucaaugaaacacacuucagcgacgauaucgagcagcaggccgacaacaugauuaccgagcugcuucaaaaagaauauaucgaucggcagggcaagacgccucuggggcucguggaccuguuugucuucuccacaucuuuuuaccugauuagcaucuuccuucaccucguuaaaauuccgacccaucgccacgugaucggaaagcccugcccuaaaccccauagacugaaucacaugggcauuuguuccugcggccuguauaagcacccuggggugcccgucaaguggaaacggugaggacuaguuauaagacugacuagcccgaugggccucccaacgggcccuccuccccuccuugcaccgagauuaaucaaaggcucuuuucagagccaccaaaaaaaaaaaaaaaaaaaaaaaaaaaaaaaaaaaaaaaaaaaaaaaaaaaaaaaaaaaaaaaaaaaaaaaaaaaaaaaaaaaaaaaaaaaaaaaaaaaaa

SEQ ID NO: 16600 - RNA, 1686 nt, Artificial Sequence
  mRNA product Design i-3 (hSL-A100) comprising derived and/or modified sequence from LASV(LASV1000-NIG-2009;Clade II)__AIT17782__GPCmut1 (opt5)
aggagaaagcuuaccaugggccagaucauuaccuucuuucaagaggugccccacgucaucgaagagguuaugaacauugugcugaucgcccucagccugcuugcuauucugaaggggaucuacaauguggccacaugcggacucuucggccuggucuccuuucuucugcucugugggagaucuugcagcacgaccuauaaaggaguguacgaacugcagacacuggagcucgacauggcgucccugaacaugaccaugccucuuucuuguacaaagaauaacagccaucacuauaucaugguuggcaaugaaaccgggcuggagcucacacugaccaacacguccauuaucaaucauaaauucugcaaccuuucugaugcucacaagaaaaaucuguacgaccaugcccucaugagcauuaucuccaccuuucaccugagcauuccgaacuucaaucaguaugaggccaugucuugugauuuuaacggaggcaagaucuccgugcaguacaaucugagccacacauaugcugucgacgccgcuaaccauugcggcaccauugccaauggggugcuccaaacauucaugcggauggcguggggaggcucuuacaucgcccuggauuccgggugcggaagcugggacuguaucaugaccucuuaccaguaucuuauuauccagaacacgacaugggaagaucacugccaguuuucccgccccagcccuauuggcuaccuggggcuccugucccaaagaacccgggacaucuauauuucucgcagacgccggggaacauucaccuggacccucagcgauuccgagggcaacgaaacacccggcggguacugucugacgcgguggaugcugaucgaggcugagcucaaaugcuuuggaaauaccgccguugcuaaguguaacgaaaaacaugacgaggaguucugcgauaugcugcgccuuuuugacuucaauaagcaggccaucaaaagacugaagacacccgcgcagaugagcauucagcucaucaacaaggccgugaaugcucugauuaacgaucaacuuaucaugaaaaaucaucugcgggacauuaugugcaucccuuauugcaacuacucuaaguauugguaccucaaucacaccgucacagggaaaaccucccugccccgcuguuggcuggugagcaacggaucuuaccucaaugaaacgcacuucagcgacgauaucgagcagcaggccgacaacaugauuacagagcugcuucaaaaggaauauaucgauagacagggcaaaaccccucuggggcucguggaccuguuugucuucuccaccucuuuuuaccugauuagcaucuuccuucaccucguuaagauuccgacacaucggcacguggugggaaaacccugcccuaagccccaucgccugaaucacaugggcaucuguuccugcggccuguauaagcacccugggguccccgugaaauggaagagaugaggacuaguuauaagacugacuagcccgaugggccucccaacgggcccuccuccccuccuugcaccgagauuaaucaaaggcucuuuucagagccaccaaaaaaaaaaaaaaaaaaaaaaaaaaaaaaaaaaaaaaaaaaaaaaaaaaaaaaaaaaaaaaaaaaaaaaaaaaaaaaaaaaaaaaaaaaaaaaaaaaaaa

SEQ ID NO: 16601 - RNA, 1686 nt, Artificial Sequence
  mRNA product Design i-3 (hSL-A100) comprising derived and/or modified sequence from LASV(LASV221-NIG-2010;Clade II)__AIT17624__GPCmut1 (opt5)
aggagaaagcuuaccaugggccagaucauuaccuucuuucaagaggugccccacgucaucgaagagguuaugaacauugugcugaucgcccucagccugcuugcuauucugaaggggaucuacaauguggccacaugcggacucuucggccuggucuccuuucuucugcucugugggagaucuugcagcacgaccuauaaaggaguguacgaacugcagacacuggagcucgacauggcgucccugaacaugaccaugccucuuucuuguacaaagaauaacagccaucacuauaucaugguuggcaaugaaaccgggcuggagcucacacugaccaacacguccauuaucaaucauaaauucugcaaccuuucugaugcucacaagaaaaaucuguacgaccaugcccucaugagcauuaucuccaccuuucaccugagcauuccgaacuucaaucaguaugaggccaugucuugugauuuuaacggaggcaagaucuccgugcaguacaaucugagccacacauaugcuauugacgccgcuaaccauugcggcaccaucgccaaugggguccuccaaacauucaugcggauggcguggggaggcucuuacaucgcccuggauuccgggugcggaagcugggacuguauuaugaccucuuaccaguaucuuaucauucagaacacgacaugggaagaucacugccaguuuucccgccccagcccuaucggcuaccuggggcuccugucccaaagaacccgggacauuuauaucucucgcagacgccggggaacauucaccuggacccucagcgauuccgagggcaacgaaacacccggcggguacugucugacgcgguggaugcugaucgaggcugagcucaaaugcuuuggaaauaccgccguggcuaaguguaacgaaaaacaugacgaggaguucugcgauaugcugcgccuuuuugacuucaauaagcaggccauuagacggcugaaaacacccgcgcagaugagcauccagcucauuaacaaggccguuaaugcucugaucaacgaucaacuuauuaugaagaaucaucugcgcgacaucaugugcaucccuuauugcaacuacucuaaauauugguaccucaaucacaccgugacagggaagaccucccugcccagauguuggcuggucagcaacggaucuuaccucaaugaaacgcacuucagcgacgauauugagcagcaggccgacaacaugaucacagagaugcugcaaaaagaauauauggaucggcagggcaagaccccucuugggcugguggaccucuuuguguucuccaccucuuuuuaccugauuagcaucuuccugcaccuugucaaaauuccgacacaucgccacguuaucggaaagcccugcccuaaaccccauagacucaaucacaugggcauuuguuccugcggccuguauaagcacccuggggugcccgugaaguggaaacggugaggacuaguuauaagacugacuagcccgaugggccucccaacgggcccuccuccccuccuugcaccgagauuaaucaaaggcucuuuucagagccaccaaaaaaaaaaaaaaaaaaaaaaaaaaaaaaaaaaaaaaaaaaaaaaaaaaaaaaaaaaaaaaaaaaaaaaaaaaaaaaaaaaaaaaaaaaaaaaaaaaaaa

SEQ ID NO: 16602 - RNA, 1686 nt, Artificial Sequence
  mRNA product Design i-3 (hSL-A100) comprising derived and/or modified sequence from LASV(LASV237-NIG-2010;Clade II)__AIT17638__GPCmut1 (opt5)
aggagaaagcuuaccaugggccagaucauuaccuucuuucaagaggugccccacgucaucgaagagguuaugaacauugugcugaucgcccucagccugcuugcuauucugaaggggaucuacaauguggccacaugcggacucuucggccuggucuccuuucuucugcucugugggagaucuugcagcacgaccuauaaaggaguguacgaacugcagacacuggagcucgacauggcgucccugaacaugaccaugccucuuucuuguacaaagaauaacagccaucacuauaucaugguuggcaaugaaaccgggcuggagcucacacugaccaacacguccauuaucaaucauaaauucugcaaccuuucugaugcucacaagaaagaccuguacgaucaugcccucaugagcauuaucuccaccuuucaccugagcauuccgaauuucaaccaguaugaggccaugucuugugacuuuaauggaggcaagaucuccgugcaguacaaccugagccacacauaugcugucgaugccgcuaaucauugcggcaccauugccaacggggugcuccaaacauucaugcggauggcguggggaggcucuuacaucgcccuggacuccgggugcggaagcugggauuguaucaugaccucuuaccaguaucuuauuauccagaauacgacaugggaagaccacugccaguuuucccgccccagcccuauuggcuaccuggggcuccugucccaaagaacccgggauaucuauauuucucgcagacgccggggaacauucaccuggacccucagcgacuccgagggcaacgaaacacccggcggguacugucugacgcgguggaugcugaucgaggcugagcucaaaugcuuuggaaacaccgccguugcuaaguguaaugaaaaacaugaugaggaguucugcgacaugcugcgccuuuuugauuucaacaagcaggccaucagacggcugaaaacacccgcgcagaugagcauucagcucaucaauaaggccgugaacgcucugauuaaugaccaacuuaucaugaagaaccaucugcgcgacauuaugugcaucccuuauugcaauuacucuaaauauugguaccucaaccacaccgucacagggaagaccucccugcccagauguuggcuggugagcaauggaucuuaccucaacgaaacgcacuucagcgaugacaucgagcagcaggccgauaauaugauuacagagcugcuucaaaaagaauauauggaccggcagggcaagaccccucuggggcucguggaucuguuugucuucuccaccucuuuuuaccugaucagcauuuuccuucaccucaucaaaauuccgacacaucgccacaucaccggaaagcccugcccuaaaccccauagacugaaccacaugggcauuuguuccugcggccuguauaagcacccugggguucccgugaaguggaaacggugaggacuaguuauaagacugacuagcccgaugggccucccaacgggcccuccuccccuccuugcaccgagauuaaucaaaggcucuuuucagagccaccaaaaaaaaaaaaaaaaaaaaaaaaaaaaaaaaaaaaaaaaaaaaaaaaaaaaaaaaaaaaaaaaaaaaaaaaaaaaaaaaaaaaaaaaaaaaaaaaaaaaa

SEQ ID NO: 16603 - RNA, 1686 nt, Artificial Sequence
  mRNA product Design i-3 (hSL-A100) comprising derived and/or modified sequence from LASV(LASV253-NIG-2011;Clade II)__AIT17670__GPCmut1 (opt5)
aggagaaagcuuaccaugggccagaucauuaccuucuuucaagaggugccccacgucaucgaagagguuaugaacauugugcugaucgcccucagccugcuugcuauucugaaggggaucuacaauguggccacaugcggacucuucggccuggucuccuuucuucugcucugugggagaucuugcagcacgaccuauaaaggaguguacgaacugcagacacuggagcucgacauggcgucccugaacaugaccaugccucuuucuuguacaaagaauaacagccaucacuauaucaugguuggcaaugaaaccgggcuggagcucacacugaccaacacguccauuaucaaucauaaauucugcaaccuuucugaugcucacaagaaaaaucuguacgaccaugcccucaugagcauuaucuccaccuuucaccugagcauuccgaacuucaaucaguaugaggccaugucuugugauuuuaacggaggcaagaucuccgugcaguacaaucugagccacacauaugcugucgacgccgcuaaccauugcggcaccauugccaauggggugcuccaaacauucaugcggauggcguggggaggcucuuacaucgcccuggauuccgggugcggaagcugggacuguaucaugaccucuuaccaguaucuuauuauccagaacacgacaugggaagaucacugccaguuuucccgccccagcccuauuggcuaccuggggcuccugucccaaagaacccgggacaucuauauuucucgcagacgccggggaacauucaccuggacccucagcgauuccgagggcaacgaaacacccggcggguacugucugacgcgguggaugcugaucgaggcugagcucaaaugcuuuggaaauaccgccguugcuaaguguaacgaaaaacaugacgaggaguucugcgauaugcugcgccuuuuugacuucaauaagcaggccaucagacggcugaaagcgcccgcccagaugagcauucagcucaucaacaaggcugugaaugcccugauuaacgaucaacuuaucaugaagaaucaucugcgcgacauuaugugcaucccuuauugcaacuacucuaaauauugguaccucaaucacacagucaccgggagaacaucccugccccgguguuggcuggugagcaacggaucuuaccucaaugaaacccacuucagcgacgauaucgagcagcaggcugacaacaugauuacggagcugcuucaaaaggaauauaucgaucgccagggcaaaacaccucuggggcucguggaccuguuugucuucuccaccucuuuuuaccugauuagcaucuuccuucaccucguuaagauuccgacccauagacacaucauuggaaaacccugcccuaagccccaucggcugaaucacaugggcaucuguuccugcggccuguauaaacacccuggggugcccgugaaguggaagcgcugaggacuaguuauaagacugacuagcccgaugggccucccaacgggcccuccuccccuccuugcaccgagauuaaucaaaggcucuuuucagagccaccaaaaaaaaaaaaaaaaaaaaaaaaaaaaaaaaaaaaaaaaaaaaaaaaaaaaaaaaaaaaaaaaaaaaaaaaaaaaaaaaaaaaaaaaaaaaaaaaaaaaa

SEQ ID NO: 16604 - RNA, 1686 nt, Artificial Sequence
  mRNA product Design i-3 (hSL-A100) comprising derived and/or modified sequence from LASV(LASV254-NIG-2011;Clade II)__AIT17674__GPCmut1 (opt5)
aggagaaagcuuaccaugggccagaucauuaccuucuuucaagaggugccccacgucaucgaagagguuaugaacauugugcugaucgcccucagccugcuugcuauucugaaggggaucuacaauguggccacaugcggacucuucggccuggucuccuuucuucugcucugugggagaucuugcagcacgaccuauaaaggaguguacgaacugcagacacuggagcucgacaugaccaaccugaauaugacaaugccucuuuccuguaccaagaacaauucucaucacuauaucaugguuggcaacgaaacagggcuggagcucacccugacgaauaccagcauuaucaaccauaaauucugcaaucuuuccgaugcgcacaagaaaaaccuguacaaucaugcucucaugucuauuaucagcacauuucaccuguccauuccgaacuucaaucaguaugaggccaugagcugugacuuuaacggaggcaagaucucugugcaguacaaucugucccacagcuaugccgucgaugcugccaaccauugcggcaccauugcuaacggggugcuccaaacauucaugcggauggccuggggaggcucuuacaucgcgcuggacuccgggugcggaaauugggauuguaucaugaccagcuaccaguaucuuauuauccagaacacgacaugggaagaccacugccaguuuucucgccccuccccuauuggcuaccuggggcuccugagccaaagaacccgggauaucuauauuucccgcagacgccggggaacauucaccuggacccucucugacagcgagggcaaugaaacacccggcggguacugucugacgcgguggaugcugaucgaggccgagcucaaaugcuuuggaaacaccgcuguugccaaguguaaugaaaaacaugaugaggaguucugcgacaugcugcgccuuuuugauuucaacaagcaggcuaucagacggcugaaaacacccgcccaggcgaauauucagcucaucaacaaggccgugaaugcucugauuaacgaccaacuuaucaugaagaaucaucugcgcgauauuaugugcaucccuuauugcaacuacuccaaauauugguaccucaaucacaccgucacagggaagaccagccugcccagauguuggcuggugucuaacggauccuaccucaaugaaacgcacuucagcgacgacaucgagcagcaggccgauaacaugauuacagagcugcuucaaaaagaauauauggaccggcagggcaagaccccucuggggcucguggaucuguuugucuucucuaccagcuuuuaccugaucuccauuuuccuucaccucguuaaaaucccgacacaucgccacgugauuggaaagcccugcccuaaaccccauagacugaaccacaugggcaucuguucuugcggccuguauaagcacccuggggugcccgucaaguggaaacggugaggacuaguuauaagacugacuagcccgaugggccucccaacgggcccuccuccccuccuugcaccgagauuaaucaaaggcucuuuucagagccaccaaaaaaaaaaaaaaaaaaaaaaaaaaaaaaaaaaaaaaaaaaaaaaaaaaaaaaaaaaaaaaaaaaaaaaaaaaaaaaaaaaaaaaaaaaaaaaaaaaaaa

SEQ ID NO: 16605 - RNA, 1686 nt, Artificial Sequence
  mRNA product Design i-3 (hSL-A100) comprising derived and/or modified sequence from LASV(Nig08-A19;Clade III)__ADU56618__GPCmut1 (opt5)
aggagaaagcuuaccaugggccagaucgugaccuucuuucaagaggucccccacguuauugaagaggugaugaacaucgugcugauugcccucagcauccuggcuauucuuaaggggcuguacaauaucgccacaugcggacucaucggccuggucacguuccuucugcucuccgggagaucuuguagcaugaccuauaaaggaguguacgaacugcagacacuggagcucaacaugaauacccugaacaugacaaugccucuuuccugcaccaagaauaacucucaucacuauauuaugguuggcaaugaaacagggcuggagcucacccugacgaacaccagccuucugcaucacaaauuuuguaaucucuccgacgcgcauaagaaaaaccuguacgaucacacacugaugucuaucauuagcaccuuccaccucuccaucccgaauuuuaaccaguaugaggcuaugagcugcgacuucaauggaggcaagauuacagugcaguacaaccugucucauuccuaugccaucgaugccgcuaaucacuguggcaccgucgccaacggggugcuucaaacguuuaugcggauggcuuggggaggcagcuacauugcccuggacucugggugcggaaagugggauugcaucaugacauccuaccaguaucucaucauucagaacaccacaugggaagaccauugucaguucagcagacccucuccuaucggcuaccuggggcuucugucccaacggacccgcgauauuuauaucagcagacggcgccggggaaccuuuacauggacgcuguccgacucugagggcaaugaaacccccggcggguacugccucacacgcuggaugcugauugaggcggagcuuaaauguuucggaaacaccgccguugcuaagugcaaugaaaaacacgaugaggaauuuugugacaugcugagacucuucgauuuuaacaagcaggccauccggcgccugaaagcucccgcccagaugagcauccagcuuauuaauaaggcggugaacgcccugaucaaugaccaacucauuaugaagaaccaccugagagauaucaugugcauuccuuauugcaauuacuccaaauauugguaccugaaccauacaagcaccgggcggacgucucucccccgcugcuggcuggucuccaauggaagcuaccuuaacgaaacacacuucucugacgacaucgagcagcaggcugauaauaugaucaccgagaugcugcaaaaggaauaucucgacagacagggcaaaaccccucuggggcugguggaucuuuucguguuuagcacauccuucuaccucauuucuaucuuucugcaucuggucaagauuccgacccaccggcauaucguuggaaaacccuguccuaagccccaccgccucaaccacaugggcauuugcagcuguggccuguauaaacagccuggggugcccgugagauggaagcggugaggacuaguuauaagacugacuagcccgaugggccucccaacgggcccuccuccccuccuugcaccgagauuaaucaaaggcucuuuucagagccaccaaaaaaaaaaaaaaaaaaaaaaaaaaaaaaaaaaaaaaaaaaaaaaaaaaaaaaaaaaaaaaaaaaaaaaaaaaaaaaaaaaaaaaaaaaaaaaaaaaaaa

SEQ ID NO: 16606 - RNA, 1689 nt, Artificial Sequence
  mRNA product Design i-3 (hSL-A100) comprising derived and/or modified sequence from LASV(G1180-SLE-2010;Clade IV)__AIT17168__GPCmut1 (opt5)
aggagaaagcuuaccaugggccagaucgugaccuucuuucaagaggucccccacguuauugaagaggugaugaacaucgugcugauugcccucagcauccuggcuguccuuaaggggcuguacaauuucgccacaugcggacucgugggccugcuuacguuucugcuccugugugggagauccugcaccgcgucucgguauaaaggaguuuacgaacugcagacacucgagcugaacauggaaacccuuaauaugacaaugccucugagcuguaccaagaacaauucccaucacuauauuauggugggcaacgagacagggcucgagcugacccuuacgaauaccucuaucaucaaccauaaauucugcaaucugagcgacgcucacaagaaaaaccucuacgaucaugcccugauguccauuaucucuacauuucaccugagcauuccgaauuucaaccaguaugaagccauguccugugacuuuaauggaggcaagaucagcguccaguacaaccucucucacuccuaugcuggcgaugccgcuaaucauugcgggaccguggccaacggaguucugcaaacauucaugcgcauggcguggggcgggagcuacauugcccuugacucuggaugcggcuccugggauuguaucaugaccagcuaccaguaucugauuauccagaacacgacaugggaggaccauugccaguuuucuagacccuccccuaucggguaccucggacugcuuagccaacggacccgcgauauuuauaucuccagacggcgccggggcacauucaccuggacccugucugacagcgaaggcaaggauacacccgggggauacugucugacgcgcuggaugcucauugaggcugagcugaaaugcuuuggcaauaccgccguggcuaaguguaacgaaaaacacgacgaggaguucugcgauaugcuuagacuguuugacuucaauaagcaggccauccagcggcucaaagcgcccgcccagauguccauucaacugaucaacaaggcugucaaugcccuuaucaacgaucagcugauuaugaagaaucaccuccgcgacaucaugugcauuccuuauugcaacuacagcaaauauugguaccugaaucauacaaccacaggaaagaccucucugcccaaauguuggcucguguccaacggcagcuaccugaaugaaacgcacuucucugacgauaucgagcagcaagcugacaacaugauuacagagaugcuucagaaggaauauauggagagacaggggaaaaccccucugggacucguggaucuguuugucuucagcaccuccuuuuaccugaucucuaucuuccuucaucucguuaagauuccgacacaccggcauaucgugggcaaaagcugccccaagccucaccgccugaaucacaugggcauuuguuccugcgggcuguauaagcagcccggagugccugucaaauggaagagaugaggacuaguuauaagacugacuagcccgaugggccucccaacgggcccuccuccccuccuugcaccgagauuaaucaaaggcucuuuucagagccaccaaaaaaaaaaaaaaaaaaaaaaaaaaaaaaaaaaaaaaaaaaaaaaaaaaaaaaaaaaaaaaaaaaaaaaaaaaaaaaaaaaaaaaaaaaaaaaaaaaaaa

SEQ ID NO: 16607 - RNA, 1689 nt, Artificial Sequence
  mRNA product Design i-3 (hSL-A100) comprising derived and/or modified sequence from LASV(G1442-SLE-2011;Clade IV)__AIT17180__GPCmut1 (opt5)
aggagaaagcuuaccaugggccagaucgugaccuucuuucaagaggucccccacguuauugaagaggugaugaacaucgugcugauugcccucagcauccuggcuguccuuaaggggcuguacaauguggccacaugcggacucauuggccugguuacguuccuucugcucugugggagauccugcaccacaacccuguauaaaggaguguacgaacugcagacacucgagcugaacauggaaacccuuaauaugacaaugccucugucuuguaccaagaacaauagccaucacuauauccgggucggcaacgagacggggcucgagcugacccuuacaaauaccuccaucauuaaccauaaauuuugcaaucugucugacgcgcacaagaaaaaccucuacgaucaugcucugaugagcaucauuuccacauuccaccugucuaucccgaauuuuaaccaguaugaagccaugagcugugacuucaauggaggcaagauuuccgugcaguacaaccucagccacucuuaugccggcgaugcugccaaucauugcgggaccguugcuaacggagugcugcaaacguuuaugcgcauggccuggggcggguccuacaucgcgcuugacagcggaugcggcaacugggauuguauuaugacaucuuaccaguaucugaucauccagaauaccacaugggacgaucacugccaguucucccggcccagcccuauuggguaccucggacugcuuucucaacgcaccagagacgucuauaucucccggcgccgccggggcaccuuuacauggacgcugagcgauuccgagggcaaggacacccccgggggauacugucugacaagauggaugcucauugaagccgagcugaaaugcuucggcaacaccgcuguggccaaguguaaugagaaacaugaugaagaguuuugcgacaugcuucggcuguucgauuuuaacaagcaggcuauccagcgccucaaagcccccgcgcagaugucuauucaacugaucaauaaggccgugaacgcucuuaucaaugaccagcugauuaugaagaaccaccucagagacaucaugugcauuccuuauugcaauuacagcaaauauugguaccugaacaauacagccaccggaaagacgucccugcccaaauguuggcucaucagcaacggcucuuaccugaaugagacacacuucuccgaugacauugaacaggaggcugauaacaugaucaccgagaugcuucaaaaggaauauauggagcggcaggggaaaaccccucugggacucgucgaccuguucguuuuuagcacaucuuucuaccugaucagcauuuuucuucaucucgugaagaucccgacccaccgccauauugugggcaaauccugccccaagccucacagacugaaucauaugggcaucuguucuugcgggcuguauaagcagcccggagucccugugcgguggaaacgcugaggacuaguuauaagacugacuagcccgaugggccucccaacgggcccuccuccccuccuugcaccgagauuaaucaaaggcucuuuucagagccaccaaaaaaaaaaaaaaaaaaaaaaaaaaaaaaaaaaaaaaaaaaaaaaaaaaaaaaaaaaaaaaaaaaaaaaaaaaaaaaaaaaaaaaaaaaaaaaaaaaaaa

SEQ ID NO: 16608 - RNA, 1689 nt, Artificial Sequence
  mRNA product Design i-3 (hSL-A100) comprising derived and/or modified sequence from LASV(G3010-SLE-2013;Clade IV)__AIT17344__GPCmut1 (opt5)
aggagaaagcuuaccaugggccagaucgugaccuucuuucaagaggucccccacguuauugaagaggugaugaacaucgugcugauugcccucagcauccuggcuguccuuaaggggcuguacaauuucgccacaugcggacucgugggccugguuacguuucuucugcucugugggagauccugcaccacaucucuguauaaaggaguguacgaacugcagacccucgagcugaacauggaaacacuuaauaugaccaugccucugagcuguacaaagaacaauucccaucacuauauuauggucggcaacgagaccgggcucgagcugacgcuuaccaauacaucuaucaucaaccauaaauucugcaaucugagcgacgcgcacaagaaaaaccucuacaaucaugcucugauguccauuaucucuaccuuucaccugagcauuccgaacuucaaucaguaugaagccauguccugugauuuuaacggaggcaagaucagcgugcaguacaaucucucucacuccuaugccggcgacgcugccagccauugcgggacaguugcuaacggagugcugcaaaccuucaugcggauggccuggggcgggucuuacauugcgcuugauuccggaugcggcaagugggacuguaucaugacgagcuaucaguaccugauuauccagaacacaaccugggaggaucacugccaguuuucucgccccuccccuaucggguaucucggacugcuuagccaaagaacacgggacauuuacaucucccgcagacgccggggcaccuucaccuggacacugucugauagcgaaggcaaagacacgcccgggggauauugucugacccgguggaugcucauugaggccgagcugaagugcuuuggcaauacagcugucgccaaauguaacgaaaagcaugaugaggaguucugcgacaugcuucgccuguuugauuucaauaaacaggcuauccagagacucaagacccccgcccagauguccauucaacugaucaacaaggcggugaaugcccuuaucaacgaccagcugauuaugaaaaaucaccuccgggauaucaugugcauuccuuacugcaacuauagcaaguacugguaccugaaucacacaaccacgggaaaaacaucucugcccaaguguuggcucguguccaacggcagcuaucugaaugaaacccauuucucugacgacaucgagcagcaagcugauaacaugauuaccgagaugcuucagaaagaauacauggagcgccaggggaagacaccucugggacucgucgaccuguuuguuuucagcaccuccuuuuaucugaucucuaucuuccuucaccucgugaaaauuccgacacauagacacaucgugggcaagagcugccccaagccucaucggcugaaucacaugggcauuuguuccugcgggcuguacaaacagcccggagucccugugcgcuggaagagaugaggacuaguuauaagacugacuagcccgaugggccucccaacgggcccuccuccccuccuugcaccgagauuaaucaaaggcucuuuucagagccaccaaaaaaaaaaaaaaaaaaaaaaaaaaaaaaaaaaaaaaaaaaaaaaaaaaaaaaaaaaaaaaaaaaaaaaaaaaaaaaaaaaaaaaaaaaaaaaaaaaaaa

SEQ ID NO: 16609 - RNA, 1689 nt, Artificial Sequence
  mRNA product Design i-3 (hSL-A100) comprising derived and/or modified sequence from LASV(G502-SLE-2009;Clade IV)__AIT17126__GPCmut1 (opt5)
aggagaaagcuuaccaugggccagaucgugaccuucuuucaagaggucccccacguuauugaagaggugaugaacaucgugcugauugcccucagcauccuggcuguccuuaaggggcuguacaauuucgccacaugcggacucgugggccugcuuacguuucugcuccugugugggagauccugcaccacaggacuguauaaaggcguuuacgaacuccagacccuggagcuuaacauggaaacacugaauaugaccaugccucucucuuguacaaagaacaauagccaucacuauauuaugguggggaacgagaccggacuggagcuuacgcugaccaauacauccaucaucaaccauaaauucugcaaucucucugacgcgcacaagaaaaaccuguacgaucaugcucugaugagcauuaucuccaccuuucaccucucuauuccgaauuucaaccaguaugaagccaugagcugugacuuuaauggcggcaagaucuccguccaguacaaccugagccacucuuaugccggggaugcugccgaccauugcggaacaguggcuaauggcguucuucaaaccuucaugcggauggccuggggaggguccuacauugcgcuggauagcggcugcgggagaugggacuguaucaugacgucuuaccaguaucucauuauccagaacacaaccugggaggaucacugccaguuuucccggcccagcccuaucggauaccugggccuucugucucaacgcacaagagacauuuauaucucccggcgccgccggggcaccuucaccuggacacugagcgauuccgaagggaaggacacgcccggaggcuacugucucaccagauggaugcugauugaggccgagcuuaaaugcuuugggaacacagcuguggccaaguguaaugaaaaacaugaugaggaguucugcgacaugcugcggcucuuugauuucaacaagcaggcuauccagcgccugaaagcccccgcgcagaugucuauucaacuuaucaauaaggccgucaacgcucugaucaaugaccagcucgugaugaagaaccaccugagagacauuaugugcaucccuuauugcaauuacagccgguauugguaccugaaccacaccacaaccggccgcacgucccuccccaaauguuggcuggugagcaaugggucuuaccuuaacgaaacacauuucuccgaugacauugagcagcaagccgauaauaugaucaccgagaugcugcagaaggaauauauggagagacagggaaaaaccccucucggccuggucgaccuguuuguuuucagcacaucuuuuuaccuuauuagcaucuuccuccaccuggugaagaucccgacccaucggcacauugugggcaaauccugccccaagccucaucgccugaaccacauggggaucuguucuugcggacucuauaaacagcccggcgucccugugaaguggaagagaugaggacuaguuauaagacugacuagcccgaugggccucccaacgggcccuccuccccuccuugcaccgagauuaaucaaaggcucuuuucagagccaccaaaaaaaaaaaaaaaaaaaaaaaaaaaaaaaaaaaaaaaaaaaaaaaaaaaaaaaaaaaaaaaaaaaaaaaaaaaaaaaaaaaaaaaaaaaaaaaaaaaaa

SEQ ID NO: 16610 - RNA, 1689 nt, Artificial Sequence
  mRNA product Design i-3 (hSL-A100) comprising derived and/or modified sequence from LASV(G733-SLE-2010;Clade IV)__AIT17154__GPCmut1 (opt5)
aggagaaagcuuaccaugggccagaucgugaccuucuuucaagaggucccccacguuauugaagaggugaugaacaucgugcugauugcccucagcauccuggcuguccuuaaggggcuguacaauuucgccacaugcggaauugugggccucguuuccuuucugcuucugugugggagaucuugcacgaccagccucuauaaaggaguguacgaacugcagacacuggagcucaacauggaaacccugaauaugacaaugccucuuuccuguaccaagaacaauucucaucacuauaucauggucggcaacgagacagggcuggagcucacccugacgaauaccagcaucauuaaccauaaauucugcaaucuuuccgacgcgcacaagaaaaaccuguacgaucaugcucucaugucuaucauuagcacauuucaccuguccaucccgaauuucaaccaguaugaagccaugagcugugacuuuaauggaggcaagauuucugugcaguacaaccugucccacagcuaugccggcgaugcugccaaucauugcgggaccaucgcuaacggaguucuccaaacauucaugcggauggccuggggcgggucuuacauugcgcuggacuccggaugcgauagaugggacuguaucaugaccagcuaccaguaucuuaucauucagaacacgacaugggaggaucacugccaguuuucucggcccuccccuaucggcuaccuggggcuccugagccaacgcaccagagacauuuauaucucccggcgccgccggggaacauucaccuggacccucucugauagcgaaggcaaggacacacccggcggguacugucugacgagauggaugcugauugaggccgagcucaaaugcuuuggaaauaccgcuguggccaaguguaacgaaaaacaugaugaggaguucugcgacaugcugcggcuuuuugauuucaauaagcaggcuauccagcgccugaaagcccccgcgcagauguccauccaacucauuaacaaggccgucaaugcucugaucaacgaccagcuuauuaugaagaaucaccugagagacaucaugugcauuccuuauugcaacuacagcaaauauugguaccucaaucacacaaccacagggaagaccucucugcccaaauguuggcugguguccaacggaagcuaccucaaugaaacgcauuucucugaugacaucgagcagcaagccgauaacaugaucacagagaugcugcagaaggaauauauggagcggcagggcaaaaccccucuugggcugguggaccucuuugucuucagcaccuccuuuuaccugauuucuaucuuccugcaccuuguuaagauuccgacacaucgccacguggugggaaaaagcugccccaagccucauagacucaaucacaugggcaucuguuccugcggccuguaugggcagcccggagucccugugaaguggaaacggugaggacuaguuauaagacugacuagcccgaugggccucccaacgggcccuccuccccuccuugcaccgagauuaaucaaaggcucuuuucagagccaccaaaaaaaaaaaaaaaaaaaaaaaaaaaaaaaaaaaaaaaaaaaaaaaaaaaaaaaaaaaaaaaaaaaaaaaaaaaaaaaaaaaaaaaaaaaaaaaaaaaaa

SEQ ID NO: 16611 - RNA, 1689 nt, Artificial Sequence
  mRNA product Design i-3 (hSL-A100) comprising derived and/or modified sequence from MOPV/LASV reassortant(IGS-1;Clade IV)__AFY05576__GPCmut1 (opt5)
aggagaaagcuuaccaugggccagaucgugaccuucuuucaagaggucccccacguuauugaagaggugaugaacaucgugcugauugcccucagcguccuggcugugcuuaaggggcuguacaauuucgccacaugcggacucguuggccuggugacguuucuucugcucugugggagauccugcaccacaucucuguauaaaggagucuacgaacugcagacccucgagcugaacauggaaacacuuaauaugaccaugccucugagcuguacaaagaacaauucccaucacuauaucauggugggcaacgagaccgggcucgagcugacgcuuaccaauacaucuauuaucaaccauaaauucugcaaucugagcgacgcgcacaagaaaaaccucuacgaucaugcucugauguccaucauuucuaccuuucaccugagcaucccgaauuucaaccaguaugaagccauguccugugacuuuaauggaggcaagauuagcguucaguacaaccucucucacuccuaugccggcgaugcugccaaucauugcgggacaguggcuaacggaguccugcaaaccuucaugcggauggccuggggcgggagcuacaucgcgcuugacucuggaugcggcaacugggauuguauuaugacguccuaccaguaucugaucauucagaauacaaccugggaggaccacugccaguuuagcagacccucuccuaucggguaccucggacugcuuucccaacggacacgcgauaucuauauuagcagacggcgccggggcaccuucaccuggacacuguccgacucugaaggcgaggauacgcccgggggauacugucugacccgcuggaugcucaucgaggccgaacugaagugcuuuggcaacacagcuguggccaaauguaaugagaagcaugacgaagaguucugcgauaugcuuagacuguuugacuucaacaaacaggcuauucagcggcucaaggcccccgcgcagaugagcauccaacugauuaauaaagccgugaacgcucuuaucaaugaucagcugaucaugaagaaccaccuccgcgacauuaugugcaucccuuauugcaauuacuccaaguauugguaccugaaccacaccacaaccggaagaacgagccugcccaaauguuggcucgucucuaauggcuccuaccugaacgagacacauuucagcgacgauauugagcagcaagccgacaauaugaucaccgaaaugcuucagaaggaguauauggaacggcaggggaaaaccccucugggacucguugaucuguuuguguucucuaccagcuuuuaccugauuuccaucuuccuucaccucgugaagaucccgacacaucgccacauugucggcaaaucuugccccaagccucauagacugaaccacaugggcaucuguagcugcgggcuguauaaacagcccggagugccuguuaaguggaagcggugaggacuaguuauaagacugacuagcccgaugggccucccaacgggcccuccuccccuccuugcaccgagauuaaucaaaggcucuuuucagagccaccaaaaaaaaaaaaaaaaaaaaaaaaaaaaaaaaaaaaaaaaaaaaaaaaaaaaaaaaaaaaaaaaaaaaaaaaaaaaaaaaaaaaaaaaaaaaaaaaaaaaa

SEQ ID NO: 16612 - RNA, 1689 nt, Artificial Sequence
  mRNA product Design i-3 (hSL-A100) comprising derived and/or modified sequence from LASV(LM765-SLE-2012;Clade IV)__AIT17814__GPCmut1 (opt5)
aggagaaagcuuaccaugggccagaucgugaccuucuuucaagaggucccccacguuauugaagaggugaugaacaucgugcugauugcccucagcauccuggcuguccuuaaggggcuguacaauuucgccacaugcggacucgugggccugguuacguuucuucugcucugugggagauccugcaccacaucucuguauaaaggaguguacgaacugcagacccucgagcugaacauggaaacacuuaauaugaccaugccucugagcuguacaaagaacaauucccaucacuauauuauggucggcaacgagaccgggcucgagcugacgcuuaccaauacaucuaucaucgaccauaaauucugcaaccugagcgaugcgcaccggaagaaucucuacgaccaugcucugauguccauuaucucuaccuuucaccugagcauuccgaacuucaaucaguaugaagccauguccugugauuuuaacggaggcaaaaucagcgugcaguacaaucucucucacuccuaugccaaggacgcugccgaucauugcggcacaguugcuaacggggugcugcaaaccuucaugcgcauggccuggggaggcagcuacauugcgcuugacucugggugcggacggugggauuguaucaugacguccuaccaguaucugauuauccagaauacaaccugggaggaccacugccaguuuagccgccccucuccuaucggcuaccucgggcugcuuucccaaagaacacgggauauuuauaucagccgcagacgccggggaaccuucaccuggacacuguccgacucugaaggcaaggauacgcccggcggguacugucugacccgguggaugcucauugaggccgagcugaaaugcuuuggaaacacagcugucgccaaguguaacgaaaaacaugacgaggaguucugcgauaugcuucgccuguuugacuucaauaagcaggcuauccagagacucaaagcccccgcgcagaugagcauucaacugaucaacaaggccgugaaugcucuuaucaacgaccagcugauuaugaagaaucaccuccgggauaucaugugcauuccuuauugcaacuacuccaaauauugguaccugaaucacaccacaaccgggaagacgagccugcccaaauguuggcucgugucuaacggauccuaccugaaugaaacacauuucagcgacgauaucgagcagcaagccgacaacaugauuaccgagaugcuucagaaggaauauauggagcgccagggcaaaaccccucuggggcucgucgaucuguuuguuuucucuaccagcuuuuaccugaucuccaucuuccuucaccucgugaagauuccgacacauagacacaucgugggaaaacccugcccuaagccccaucggcugaaucacaugggcauuuguucuugcggccuguauaagcagccugggguccccgugaaauggaagcgcugaggacuaguuauaagacugacuagcccgaugggccucccaacgggcccuccuccccuccuugcaccgagauuaaucaaaggcucuuuucagagccaccaaaaaaaaaaaaaaaaaaaaaaaaaaaaaaaaaaaaaaaaaaaaaaaaaaaaaaaaaaaaaaaaaaaaaaaaaaaaaaaaaaaaaaaaaaaaaaaaaaaaa

SEQ ID NO: 16613 - RNA, 1689 nt, Artificial Sequence
  mRNA product Design i-3 (hSL-A100) comprising derived and/or modified sequence from LASV(LM776-SLE-2012;Clade IV)__AIT17824__GPCmut1 (opt5)
aggagaaagcuuaccaugggccagaucgugaccuucuuucaagaggucccccacguuauugaagaggugaugaacaucgugcugauugcccucagcauccuggcuguccuuaaggggcuguacaauuucgccacaugcggacucgugggccugguuacguuucuucugcucugugggagauccugcaccacaucuguguauaaaggagucuacgaacugcagacccuggagcucaacauggaaacacugaauaugaccaugccucuuagcuguacaaagaacaauucccaucacuauauuauggugggcaacgagaccgggcuggagcucacgcugaccaauacaucuaucaucaaccauaaauucugcaaucuuagcgacgcgcacaagaaaaaccuguacgaucaugcucucauguccauuaucucuaccuuucaccugagcauuccgaauuucaaccaguaugaagccauguccugugacuuuaauggaggcaagaucagcguucaguacaaccugucucacuccuaugccggcgaugcugccaaucauugcgggacaguggcuaacggaguccuccaaaccuucaugcggauggccuggggcgggagcuacauugcgcuggacucuggaugcggcaagugggauuguaucaugacguccuaccaguaucuuauuauccagaacacaaccugggaggaccauugccaguuuagccgccccucuccuaucggguaccugggacuccugucccaaagaacacgggauauuuauaucagccgcagacgccggggcaccuucaccuggacacucuccgacucugaaggcaaagauacgcccgggggauacugucugacccgguggaugcugauugaggccgagcucaagugcuuuggcaauacagcuguggccaaauguaacgaaaagcacgacgaggaguucugcgauaugcugcgccuuuuugacuucaauaaacaggcuauccagagacugaaggcccccgcgcagaugagcauucaacucaucaacaaggccgugaaugcucugaucaacgaucagcuuauuaugaaaaaucaucugcgggacaucaugugcauuccuuauugcaacuacuccaaguauugguaccucaaucacaccacaaccggaaaaacgagccugcccaaguguuggcuggucucuaacggcuccuaccucaaugaaacacacuucagcgacgauaucgagcagcaagccgacaacaugauuaccgagaugcugcagaaagaauauauggagcgccaggggaagaccccucuuggacugguugaucucuuuguguucucuaccagcuuuuaccugaucuccaucuuccugcaucuugugaaaauuccgacacacagacauaucgucggcaagucuugccccaagccucaccggcucaaucacaugggcauuuguagcugcgggcuguauaaacagcccggagugccuguucgcuggaagagaugaggacuaguuauaagacugacuagcccgaugggccucccaacgggcccuccuccccuccuugcaccgagauuaaucaaaggcucuuuucagagccaccaaaaaaaaaaaaaaaaaaaaaaaaaaaaaaaaaaaaaaaaaaaaaaaaaaaaaaaaaaaaaaaaaaaaaaaaaaaaaaaaaaaaaaaaaaaaaaaaaaaaa

SEQ ID NO: 16614 - RNA, 1689 nt, Artificial Sequence
  mRNA product Design i-3 (hSL-A100) comprising derived and/or modified sequence from LASV(Mad39;Clade IV)__ANH09722__GPCmut1 (opt5)
aggagaaagcuuaccaugggccagaucgugaccuucuuucaagaggucccccacguuauugaagaggugaugaacaucgugcugauugcccucagcauccuggcuguccuuaaggggcuguacaauguggccacaugcggacucauuggccugguuacguuccuucugcucugugggagauccugcaccacaacccuguauaaaggaguguacgaacugcaggcgcucgagcugaacauggaaacacuuaauaugaccaugccucugucuuguacaaagaacaauagccaucacuauauccgggucggcaacgagaccgggcucgagcugacgcuuaccaauacaucccugaucaaccauaaauuuugcaaucucucugacgcucacaagaaaaaccuguacgaucaugcccugaugagcauuaucuccaccuuccaccucucuauuccgaauuuuaaccaguaugaagccaugagcugugacuucaaugauggaaagaucuccgugcaguacaaccugagccacacauaugcuggcgacaccgccaaucauugcggcacgguugcuaacggggugcuucaaacauuuaugcgcauggccuggggaggcucuuacauugcgcuggauuccgggugcggaggcugggacuguaucaugaccagcuaccaguaucucauuauccagaacacaaccugggaggaucacugccaguucucucggcccuccccuaucggguaccugggacuucugagccaacgcaccagagacauuuauaucucucggcgccgccggggcacauuuacguggacccuguccgauagcgaaggcaaggacacacccgggggauacugucucaccagauggaugcugauugaggccgagcuuaaaugcuucggcaauacagcugucgccaaguguaacgaaaaacaugaugaggaauuuugcgacaugcugcgccucuucgauuuuaauaagcaggcuauccagcggcugaaagcccccgcgcagauguccauucaacuuaucaacaaggccgugaaugcucugaucaacgaccagcucauuaugaagaaucaccugagagacaucaugugcauuccuuauugcaacuacucuaaauauugguaccugaaucacaccgugacgggaaagacaagccuccccaaauguuggcuggucuccaacggcagcuaccuuaaugaaacccauuucucugaugacaucgagcagcaagccgauaacaugauuaccgagaugcugcagaaggaauauauggagcggcaggggaaaacaccucucggacugguugaccuguucguguuuuccaccagcuucuaccuuaucucuaucuuucuccaccuggugaagauuccgacacaucgccacgucgugggcaaacccugcccuaagccccauagacugaaucacaugggcaucuguagcugcggguucuauaagcagccuggaguucccgugcgguggaaacgcugaggacuaguuauaagacugacuagcccgaugggccucccaacgggcccuccuccccuccuugcaccgagauuaaucaaaggcucuuuucagagccaccaaaaaaaaaaaaaaaaaaaaaaaaaaaaaaaaaaaaaaaaaaaaaaaaaaaaaaaaaaaaaaaaaaaaaaaaaaaaaaaaaaaaaaaaaaaaaaaaaaaaa

SEQ ID NO: 16615 - RNA, 1689 nt, Artificial Sequence
  mRNA product Design i-3 (hSL-A100) comprising derived and/or modified sequence from LASV(Z0947-SLE-2011;Clade IV)__AIT17840__GPCmut1 (opt5)
aggagaaagcuuaccaugggccagaucgugaccuucuuucaagaggucccccacguuauugaagaggugaugaacaucgugcugauugcccucagcauccuggcuguccuuaaggggcuguacaauuucgccacaugcggacucgugggccugguuacguuucuucugcucugugggagauccugcaccauuucucuguauaaaggaguguacgaacugcagacacucgagcugaacauggaaacccuuaauaugacaaugccucugagcuguaccaagaacaauucccaucacuauaucauggucggcaacgagacagggcucgagcugacccuuacgaauaccucuaucauuaaccauaaauucugcaaucugagcgacgcgcacaagaaaaaccucuacgaucaugcucugauguccaucauuucuacauuucaccugagcaucccgaauuucaaccaguaugaagccauguccugugacuuuaauggaggcaagauuagcgugcaguacaaccucucucacuccuaugccggcgaugcugccaaucauugcgggaccguugcuaacggagugcugcaaacauucaugcggauggccuggggcgggagcuacaucgcgcuugacucuggaugcgauagaugggacuguauuaugaccuccuaccaguaucugaucauccagaacacgacaugggaggaucacugccaguuuagccggcccucuccuauuggcuaccucgggcugcuuucccaacgcaccagagacaucuauauuagccggcgccgccggggaacauucaccuggacccuguccgauucugaaggcaaggacacacccggcggguacugucugacgagauggaugcucaucgaggccgagcugaaaugcuuuggaaauaccgcugucgccaaguguaacgaaaaacaugaugaggaguucugcgacaugcuucggcuguuugauuucaauaagcaggcuauucagcgccucaaagcccccgcgcagaugagcauccaacugaucaacaaggccgugaaugcucuuauuaacgaccagcugaucaugaagaaucaccucagagacauuaugugcaucccuuauugcaacuacuccaaauauugguaccugaaucacacaaccacagggaagaccagccugcccaaauguuggcucgugucuaacggauccuaccugaaugaaacgcauuucagcgaugacauugagcagcaagccgauaacaugaucacagagaugcuucagaaggaauauauggagcggcagggcaaaaccccucuggggcucgucgaccuguuuguuuucucuaccagcuuuuaccugaucuccauuuuccuucaccucgugaagaucccgacacaucgccacauugugggaaaacccugcccuaagccccauagacugaaucacaugggcaucuguucuugcggccuguauaagcagccugggguccccgugaaauggaagcggugaggacuaguuauaagacugacuagcccgaugggccucccaacgggcccuccuccccuccuugcaccgagauuaaucaaaggcucuuuucagagccaccaaaaaaaaaaaaaaaaaaaaaaaaaaaaaaaaaaaaaaaaaaaaaaaaaaaaaaaaaaaaaaaaaaaaaaaaaaaaaaaaaaaaaaaaaaaaaaaaaaaaa

SEQ ID NO: 16616 - RNA, 1665 nt, Artificial Sequence
  mRNA product Design i-3 (A100) comprising derived and/or modified sequence from LASV(Josiah;Clade IV)__NP_694870__GPCmut1 (opt1)
aggagaaagcuuaccaugggccagaucgugaccuucuuccaggaggucccccacgugaucgaggaggugaugaacaucguccugaucgcccucagcgugcuggccgugcugaaggggcucuacaacuucgcgaccugcggccuggucgggcuggugacguuccuccugcugugcggccgcuccugcaccaccagccucuacaaggggguguacgagcugcagacccuggagcucaacauggagacgcugaacaugaccaugccgcuguccugcaccaagaacaacagccaccacuacaucauggucggcaacgagaccggccucgagcugacgcugaccaacaccuccaucaucaaccacaaguucugcaaccucagcgacgcccacaagaagaaccuguacgaccacgcccugauguccaucaucagcaccuuccaccucuccauccccaacuucaaccaguacgaggccaugagcugcgacuucaacgggggcaagaucuccgugcaguacaaccugagccacuccuacgccggggacgcggccaaccacugcggcacgguggccaacgggguccugcagaccuucaugcggauggccuggggcggcagcuacaucgcgcucgacuccgggugcggcaacugggacugcaucaugaccagcuaccaguaccugaucauccagaacaccacgugggaggaccacugccaguucucccggcccagccccaucggguaccugggccuccugucccagcgcacccgggacaucuacaucagccgccggcgccggggcaccuucaccuggacgcugagcgacuccgaggggaaggacaccccgggcggguacugccugacccgcuggaugcucaucgaggccgagcugaagugcuucggcaacaccgccguggccaagugcaacgagaagcacgacgaggaguucugcgacaugcugcggcuguucgacuucaacaagcaggccauccagcgccugaaggcgcccgcccagaugagcauccagcugaucaacaaggccgugaacgcccucaucaacgaccagcugaucaugaagaaccaccuccgggacaucaugugcauccccuacugcaacuacuccaaguacugguaccucaaccacacgaccaccggccgcaccagccugcccaagugcuggcuggucuccaacggcagcuaccucaacgagacgcacuucuccgacgacaucgagcagcaggccgacaacaugaucaccgagaugcugcagaaggaguacauggagcggcaggggaagacgccccugggccucguggaccuguucguguucagcaccuccuucuaccugaucagcaucuuccugcaccucgucaagaucccgacccaccgccacaucguggggaaguccugccccaagccccaccggcugaaccacaugggcaucugcagcugcgggcuguacaagcagcccggcgugccggucaaguggaagcgcugaggacuaguuauaagacugacuagcccgaugggccucccaacgggcccuccuccccuccuugcaccgagauuaauaaaaaaaaaaaaaaaaaaaaaaaaaaaaaaaaaaaaaaaaaaaaaaaaaaaaaaaaaaaaaaaaaaaaaaaaaaaaaaaaaaaaaaaaaaaaaaaaaaaa

SEQ ID NO: 16617 - RNA, 1662 nt, Artificial Sequence
  mRNA product Design i-3 (A100) comprising derived and/or modified sequence from LASV(LP;Clade I)__AAF86701__GPCmut1 (opt1)
aggagaaagcuuaccaugggccagaucaucaccuucuuccaggaggugccccacgucaucgaggaggugaugaacaucgugcugaucgcccucagccugcuggccauccucaaggggcuguacaacaucgcgaccugcggcaucaucgggcuggucgccuuccucuuccugugcggcaaguccugcagccugacgcucaagggcggguacgagcugcagacccuggagcucaacauggagacccugaacaugaccaugccgcuguccugcacgaagaacagcucccaccacuacauccgcgugggcaacgagaccgggcucgagcugacccugaccaacacgagcaucaucaaccacaaguucugcaaccucuccgacgcccacaagaagaaccuguacgaccacgcccugaugagcaucaucuccaccuuccaccucagcauccccaacuucaaccaguacgaggccauguccugcgacuucaacggcgggaagaucagcgugcaguacaaccugucccacagcuacgcgggcgacgccgccgagcacugcgggaccgucgccaacggcgugcugcagaccuucaugcggauggcguggggcgggcgcuacaucgcccucgacuccggcugcgggaacugggacugcaucaugacgagcuaccaguaccugaucauccagaacaccaccugggaggaccacugccaguucucccggcccagccccaucggcuaccugggccuccugucccagcgcacccgggacaucuacaucagccgccggcgccgggggacguucaccuggacccugagcgacuccgagggcaacgagacccccgggggcuacugccugacgcgcuggaugcucaucgaggccgagcugaagugcuucgggaacaccgccguggccaagugcaacgagaagcacgacgaggaguucugcgacaugcugcggcuguucgacuucaacaagcaggcgauccgccggcugaaggcccccgcccagaugagcauccagcugaucaacaaggccgucaacgcccucaucaacgaccagcugaucaugaagaaccaccuccgcgacaucaugugcauccccuacugcaacuacuccaaguacugguaccucaaccacaccagcuccggccggaccagccugcccaagugcuggcugaucuccaacgggagcuaccucaacgagacgcaguucuccgacgacaucgagcagcaggcggacaacaugaucaccgagaugcugcagaaggaguacaucgagcgccagggcaagaccccgcuggggcucguggacaucuucaucuucagcaccuccuucuaccugaucagcaucuuccugcaccugaucaagaucccgacgcaccggcacaucgugggcaagcccugccccaagccccaccgccucaaccacaugggggucugcuccugcggccuguacaagcacccgggcgugcccaccaaguggaagcggugaggacuaguuauaagacugacuagcccgaugggccucccaacgggcccuccuccccuccuugcaccgagauuaauaaaaaaaaaaaaaaaaaaaaaaaaaaaaaaaaaaaaaaaaaaaaaaaaaaaaaaaaaaaaaaaaaaaaaaaaaaaaaaaaaaaaaaaaaaaaaaaaaaaa

SEQ ID NO: 16618 - RNA, 1662 nt, Artificial Sequence
  mRNA product Design i-3 (A100) comprising derived and/or modified sequence from LASV(803213;Clade II)__AAF86703__GPCmut1 (opt1)
aggagaaagcuuaccaugggccagaucaucaccuucuuccaggaggugccccacgucaucgaggaggugaugaacaucgugcugaucgcccucagccugcuggccauccucaaggggaucuacaacgucgcgaccugcggccuguucgggcugaucuccuuccuccugcugugcggccgcagcugcuccgugacguacaaggggguguacgagcuccagacccuggagcugaacauggccaaccucaacaugaccaugccgcugagcugcaccaagaacaacucccaccacuacaucauggucggcaacgagacgggccuggagcucacccugaccaacaccagcaucaucaaccacaaguucugcaaccuguccgacgcccacaagaagaaccucuacgaccacgcccugaugagcaucaucuccacguuccaccugagcauccccaacuucaaccaguacgaggccauguccugcgacuucaacgggggcaagaucagcgugcaguacaaccucucccacagcuucgcgguggacgccgccaaccacugcgggaccaucgccaacggcguccugcagaccuucaugcggauggcguggggcggguccuacaucgcccuggacagcggcugcgggaacugggacugcaucaugaccuccuaccaguaccucaucauccagaacacgaccugggaggaccacugccaguucagccgccccucccccaucggcuaccuggggcugcucagccagcggacccgcgacaucuacaucagccggcgccgccggggcaccuucacguggacccucuccgacagcgagggcaacgaggcccccgggggcuacugccugacccgguggaugcugaucgaggccgagcucaagugcuucgggaacaccgccguggcgaagugcaacgagaagcacgacgaggaguucugcgacaugcugcgccuguucgacuucaacaagcaggccaucaagcggcucaagacgcccgcccagauguccauccagcugaucaacaaggccgugaacgcccugaucaacgaccagcucaucaugaagaaccaccuccgcgacaucaugugcauccccuacugcaacuacagccgguacugguaccugaaccacaccgucaccgggaagaccucccugccccgcugcuggcuggugagcaacggcuccuaccugaacgagacgcacuucagcgacgacaucgagcagcaggcggacaacaugaucaccgagaugcuccagaaggaguacauggaccggcagggcaagaccccgcuggggcugguggaccucuucgucuucuccaccagcuucuaccugaucuccaucuuccugcaccuggugaagaucccgacgcaccgccacaucgugggcaagcccugccccaagccccaccggcucaaccacauggggaucugcagcugcggccuguacaagcacccggggguccccgugaaguggaagcgcugaggacuaguuauaagacugacuagcccgaugggccucccaacgggcccuccuccccuccuugcaccgagauuaauaaaaaaaaaaaaaaaaaaaaaaaaaaaaaaaaaaaaaaaaaaaaaaaaaaaaaaaaaaaaaaaaaaaaaaaaaaaaaaaaaaaaaaaaaaaaaaaaaaaa

SEQ ID NO: 16619 - RNA, 1662 nt, Artificial Sequence
  mRNA product Design i-3 (A100) comprising derived and/or modified sequence from LASV(GA391;Clade III)__CAA36645__GPCmut1 (opt1)
aggagaaagcuuaccaugggccagaucgugaccuucuuccaggaggucccccacgugaucgaggaggugaugaacaucguccugaucgcccucagcauccuggccauccugaaggggcucuacaacguggcgaccugcggccugaucgggcuggugacguuccuccugcuguccggccgcagcugcucccucaucuacaaggggaccuacgagcugcagacccuggagcucaacauggagacccugaacaugacgaugccgcugagcugcaccaagaacaacucccaccacuacauccgggucggcaacgagaccggccucgagcugacccugacgaacaccagcauccucaaccacaaguucugcaaccuguccgacgcccacaagcgcaaccuguacgaccacagccucauguccaucaucagcaccuuccaccuguccauccccaacuucaaccaguacgaggccaugagcugcgacuucaacgggggcaagaucaccgugcaguacaaccugucccacagcuucgccguggacgccgcggggcacugcggcacgcucgccaacgggguccugcagaccuucaugcggauggccuggggcggcuccuacaucgcccuggacagcgggugcggcaacugggacugcaucaugaccuccuaccaguaccucaucauccagaacaccacgugggacgaccacugccaguucagccggcccucccccaucggguaccugggccugcucagccagcgcacccgggacaucuacaucagccgccggcgccggggcaccuucaccuggacgcucuccgacagcgaggggaacgagaccccgggcggguacugccugacccgcuggaugcugaucgaggcggagcucaagugcuucggcaacaccgccguggccaagugcaacgagaagcacgacgaggaguucugcgacaugcugcggcuguucgacuucaacaagcaggccauccgccggcucaagacgcccgcccagauguccauccagcugaucaacaaggcggugaacgcccugaucaacgaccagcucaucaugaagaaccaccuccgcgacaucaugugcauccccuacugcaacuacagccgguacugguaccugaaccacaccuccaccggcaagaccagccugccccgcugcuggcugaucuccaacggcagcuaccugaacgagacgaaguucuccgacgacaucgagcagcaggccgacaacaugaucaccgagaugcuccagaaggaguacaucgaccggcaggggaagacgccccugggccuggucgaccuguucguguucagcaccuccuucuaccucaucagcaucuuccugcaccuggugaagaucccgacccaccgccacaucgucgggaagcccugccccaagccccaccggcucaaccacaugggcaucugcuccugcgggcuguacaagcagccgggcgugcccgugcgcuggaagcggugaggacuaguuauaagacugacuagcccgaugggccucccaacgggcccuccuccccuccuugcaccgagauuaauaaaaaaaaaaaaaaaaaaaaaaaaaaaaaaaaaaaaaaaaaaaaaaaaaaaaaaaaaaaaaaaaaaaaaaaaaaaaaaaaaaaaaaaaaaaaaaaaaaaa

SEQ ID NO: 16620 - RNA, 1665 nt, Artificial Sequence
  mRNA product Design i-3 (A100) comprising derived and/or modified sequence from LASV(AV;Clade V)__CCA30314__GPCmut1 (opt1)
aggagaaagcuuaccaugggccagaucgugaccuucuuccaggaggucccccacgugaucgaggaggugaugaacaucguccugaucgcccucagcauccuggccgugcugaaggggcucuacaacaucgcgaccugcggccugaucgggcugaucacguuccuccugcugugcggccgcuccugcagcuccaaccucuacaaggggguguacgagcugcagagccuggaccucaacauggagacccugaacaugaccaugccgcuguccugcaccaagaacaacagccaccacuacauccgggucggcaacgacacgggccucgagcugacccugaccaacaccuccauccucaaccacaaguucugcaaccugagcgacgcccacaagaaggaccuguacgaccacgcccucauguccaucaucagcacguuccaccuguccauccccaacuucaaccaguacgaggccaugagcugcgacuucaacgggggcaagaucuccgugcaguacaaccugagccacuccuacgccaucgacgcggccaaccacugcgggaccguggccaacggcauccuccagaccuucaugcgcauggccuggggcgggagcuacaucgcgcuggacuccggcugcgggaacugggacugcaucaugaccagcuaccaguaccugaucauccagaacacgaccugggagaaccacugccaguucucccgccccagccccaucggcuaccucgggcugcugagccagcggacccgcgacaucuacaucucccggcgccgccggggcaccuucacguggacccugagcgacuccgagggcaacgccacccccgggggcuacugccucacccgguggaugcugaucgaggccgagcugaagugcuucgggaacacggccgucgccaagugcaacgagaagcacgacgaggaguucugcgacaugcuccgccuguucgacuucaacaagcaggcgaucagccggcugaagucccccgcccagaugagcauccagcucaucaacaaggccgugaacgcccugaucaacgaccagcugaucaugaagaaccaccuccgcgacaucaugugcauccccuacugcaacuacuccaaguacugguaccugaaccacaccaucaccgggaagaccagccugcccaagugcuggcucguguccaacggcagcuaccugaacgagacgcacuucuccgacgacaucgagcagcaggccgacaacaugaucaccgagaugcugcagaaggaguacauggagcggcagggcaagaccccgcucgggcuggucgaccuguucguguucagcaccuccuucuaccugaucagcaucuuccuccgccuggugaagaucccgacgcaccggcacaucgucggcaagcccugccccaagccccaccgccugaaccacauggggaucugcuccugcggccucuacaagcagccgggggugcccgugcgguggaagcgcugaggacuaguuauaagacugacuagcccgaugggccucccaacgggcccuccuccccuccuugcaccgagauuaauaaaaaaaaaaaaaaaaaaaaaaaaaaaaaaaaaaaaaaaaaaaaaaaaaaaaaaaaaaaaaaaaaaaaaaaaaaaaaaaaaaaaaaaaaaaaaaaaaaaa

SEQ ID NO: 16621 - RNA, 1662 nt, Artificial Sequence
  mRNA product Design i-3 (A100) comprising derived and/or modified sequence from LASV(Togo/2016/7082;Clade VI)__AMR44577__GPCmut1 (opt1)
aggagaaagcuuaccaugggccagaucaucaccuucuuccaggaggugccccacgucaucgaggaggugaugaacaucgugcugaucgcccucagccugcuggccauccucaagggggucuacaacguggcgaccugcggcaucaucgggcuggugacguuccuguuccucugcggccgcuccugcagccugaucuacaagggguccuacgagcugcagacccucgagcugaacauggagacccugaacaugaccaugccgcucagcugcacgaagaacuccagccaccacuacauccgggucggcaacgagaccggccuggagcugacccucaccaacacguccaucaucaaccacaaguucugcaaccugagcgacgcccacaagcgcaaccuguacgaccacgcccucauguccauccugagcaccuuccaccuguccauccccaacuucaaccaguacgaggccaugagcugcgacuucaacgggggcaagaucuccgugcaguacaaccucagccacgccuacgcgguggacgccgccgagcacugcgggaccgucgccaacggcgugcugcagaccuucaugcggauggcguggggcggguccuacaucgcccuggacagcggcugcgggaacugggacugcaucaugacguccuaccaguaccucaucauccagaacaccaccugggaggaccacugccaguucagccggcccucccccaucggcuaccuggggcugcucagccagcgcacccgggacaucuacaucagccgccggcgccggggcacguucaccuggacccucuccgacagcgagggcaacgagacccccgggggcuacugccugacgcgcuggaugcugaucgaggccgagcucaagugcuucgggaacaccgccguggccaagugcaacgagaagcacgacgaggaguucugcgacaugcugcggcuguucgacuucaacaagcaggcgauccagcgccucaagucccccgcccagaugagcauccagcugaucaacaaggccgucaacgcccugaucaacgaccagcucaucaugaagaaccaccuccgggacaugaugugcauccccuacugcaacuacuccaaguacugguaccugaaccacaccagcuccgggcgcaccagccugcccaagugcuggcugguguccaacggcagcuaccugaacgagacgcacuucuccgacgacaucgagcagcaggccgacaacaugaucaccgagaugcuccagaaggaguacaucgaccggcagggcaagaccccgcuggggcugguggaccucuucgucuucagcaccuccuucuaccugaucagcaucuuccugcaccugaucaagaucccgacgcaccgccacaucgugggcaagcccugccccaagccccaccggcucaaccacauggggaucugcuccugcggccuguacaagcagccgggggugcccacccgcuggaagcggugaggacuaguuauaagacugacuagcccgaugggccucccaacgggcccuccuccccuccuugcaccgagauuaauaaaaaaaaaaaaaaaaaaaaaaaaaaaaaaaaaaaaaaaaaaaaaaaaaaaaaaaaaaaaaaaaaaaaaaaaaaaaaaaaaaaaaaaaaaaaaaaaaaaa

SEQ ID NO: 16622 - RNA, 1662 nt, Artificial Sequence
  mRNA product Design i-3 (A100) comprising derived and/or modified sequence from LASV(KAK-428;Clade n.d. (VII))__ANH09740__GPCmut1 (opt1)
aggagaaagcuuaccaugggccagaucgugaccuucuuccaggaggucccccacgugaucgaggaggugaugaacaucguccugaucgcccucagccugcuggccauccucaaggggcuguacaacuucgcgaccugcggcgugaucgggcugaucacguuccuccugcugugcggccgcuccugcagcgccaccuacaaggggcaguacgagcuccagacccuggagcugaacauggagucccucaacaugaccaugccgcugagcugcacgaagaacaacucccaccacuacauccgggccggcaacaacaccggccuggagcucacccugaccaacacgagcaucaucucccacaaguucugcaaccugagcgacgcccacaagaagaaccucuacgaccacacccugauguccaucaucaccaccuuccaccugagcauccccaacuucaaccaguacgaggccauguccugcgacuucaacgggggcaagaucagcauccaguacaaccucucccacagcuacgcgggggacgccgcccagcacugcggcacgguggccaacgggguccugcagaccuucaugcgcauggcguggggcggcuccuaccuggcccucgacagcgggugccgcggcugggacugcaucaucuccagcuaccaguaccugaucauccagaacaccaccugggacgaccacugccaguucucccggcccagccccaucggguaccugggcuucgugagccagaagacgcgcgacaucuacaucucccggcgccgccggggcaccuucaccuggacccugagcgacuccgaggggcacgacaugccgggcggguacugccucacgcgguggaugcugaucgaggccgaccugaagugcuucggcaacaccgccguggccaagugcaacgagaagcacgacgaggaguucugcgacauguggcgccucuucgacuucaacaagcaggcgauccagcggcugaaggcccccgcccagaugaacauccagcugaucaacaaggccgucaacgcccucaucaacgaccagcugaugaugaagaaccaccuccgcgacaucaugugcauccccuacugcaacuacagcaaguucugguaccugaacaacaccaccacgggccggaccucccugccccgcugcuggcugaucagcaacggcuccuaccucaacgagacccacuucagcgacgacaucgagcagcaggcggacaacaugaucaccgagaugcugcagaaggaguacauggaccggcaggggaagacgccccugggccucguggaccuguucguguucuccaccagcuucuaccugaucaccaucuuccuccaccuggucaagaucccgacccaccgccacaucguggggaagcccugccccaagccccaccggcugaaccacaugggcaucugcuccugcgggcuguacaagcagccgggcgugcccguccgcuggaagcggugaggacuaguuauaagacugacuagcccgaugggccucccaacgggcccuccuccccuccuugcaccgagauuaauaaaaaaaaaaaaaaaaaaaaaaaaaaaaaaaaaaaaaaaaaaaaaaaaaaaaaaaaaaaaaaaaaaaaaaaaaaaaaaaaaaaaaaaaaaaaaaaaaaaa

SEQ ID NO: 16623 - RNA, 1662 nt, Artificial Sequence; identical to SEQ ID NO: 16617
  mRNA product Design i-3 (A100) comprising derived and/or modified sequence from LASV(Pinneo-NIG-1969;Clade I)__AIT17836__GPCmut1 (opt1)

SEQ ID NO: 16624 - RNA, 1662 nt, Artificial Sequence
  mRNA product Design i-3 (A100) comprising derived and/or modified sequence from LASV(ISTH0009-NIG-2011;Clade II)__AIT17404__GPCmut1 (opt1)
aggagaaagcuuaccaugggccagaucaucaccuucuuccaggaggugccccacgucaucgaggaggugaugaacaucgugcugaucgcccucagccugcuggccauccucaaggggaucuacaacgucgcgaccugcggccuguucgggcugguguccuuccuccugcugugcggccgcagcugcuccacgaccuacaaggggguguacgagcuccagacccuggagcuggacauggccagccucaacaugaccaugccgcuguccugcacgaagaacaacagccaccacuacaucauggucggcaacgagaccggccuggagcucacccugaccaacacguccaucaucaaccacaaguucugcaaccugagcgacgcccacaagaagaaccucuacgaccacgcccugauguccaucaucagcaccuuccaccuguccauccccaacuucaaccaguacgaggccaugagcugcgacuucaacgggggcaagaucuccgugcaguacaaccucagccacgcguacgccguggacgccgccaaccacugcgggaccaucgcgaacggcguccugcagaccuucaugcggauggccuggggcggguccuacaucgcccuggacagcggcugcggguccugggacugcaucaugacgagcuaccaguaccucaucauccagaacaccaccugggaggaccacugccaguucucccgccccagccccaucggcuaccuggggcugcucagccagcggacccgcgacaucuacaucucccggcgccgccggggcacguucaccuggacccucagcgacuccgagggcaacgagacccccgggggcuacugccugacgcgguggaugcugaucgaggccgagcucaagugcuucgggaacaccgccguggcgaagugcaacgagaagcacgacgaggaguucugcgacaugcugcgccuguucgacuucaacaagcaggccauccggcgccucaagacccccgcccagaugagcauccagcugaucaacaaggccgugaacgcccugaucaacgaccagcucaucaugaagaaccaccuccgggacaucaugugcaucccguacugcaacuacuccaaguacugguaccugaaccacaccgucacggggaagaccagccugccccgcugcuggcugguguccaacggcagcuaccugaacgagacccacuucuccgacgacaucgagcagcaggcggacaacaugaucaccgagcuccugcagaaggaguacauggaccggcagggcaagacgccccuggggcucguggaccuguucgucuucagcaccuccuucuaccugaucagcaucuuccugcaccucaucaagaucccgacccaccgccacaucaccggcaagcccugccccaagccccaccggcugaaccacauggggaucugcuccugcggccuguacaagcacccgggggugcccgugaaguggaagcgcugaggacuaguuauaagacugacuagcccgaugggccucccaacgggcccuccuccccuccuugcaccgagauuaauaaaaaaaaaaaaaaaaaaaaaaaaaaaaaaaaaaaaaaaaaaaaaaaaaaaaaaaaaaaaaaaaaaaaaaaaaaaaaaaaaaaaaaaaaaaaaaaaaaaa

SEQ ID NO: 16625 - RNA, 1662 nt, Artificial Sequence
  mRNA product Design i-3 (A100) comprising derived and/or modified sequence from LASV(ISTH2010-NIG-2012;Clade II)__AIT17482__GPCmut1 (opt1)
aggagaaagcuuaccaugggccagaucaucaccuucuuccaggaggugccccacgucaucgaggaggugaugaacaucgugcugaucgcccucagccugcuggccauccucaaggggaucuacaacgucgcgaccugcggccuguucgggcugguguccuuccuccugcugugcggccgcagcugcuccacgaccuacaaggggguguacgagcuccagacccuggagcuggacauggccagccucaacaugaccaugccgcuguccugcacgaagaacaacagccaccacuacaucauggucggcaacgagaccggccuggagcucacccugaccaacacguccaucaucaaccacaaguucugcaaccugagcgacgcccacaagaagaaccucuacgaccacgcccugauguccaucaucagcaccuuccaccuguccauccccaacuucaaccaguacgaggccaugagcugcgacuucaacgggggcaagaucuccgugcaguacaaccucagccacgcguacgccguggacgccgccaaccacugcgggaccaucgcgaacggcguccugcagaccuucaugcggauggccuggggcggguccuacaucgcccuggacagcggcugcggguccugggacugcaucaugacgagcuaccaguaccucaucauccagaacaucaccugggaggaccacugccaguucucccgccccagccccaucggcuaccuggggcugcucagccagcggacccgcgacaucuacaucucccggcgccgccggggcaccuucacguggacccucagcgacuccgagggcaacgagacccccgggggcuacugccugacccgguggaugcugaucgaggccgagcucaagugcuucgggaacacggccguggcgaagugcaacgagaagcacgacgaggaguucugcgacaugcugcgccuguucgacuucaacaagcaggccauccggcgccucaagacccccgcccagaugagcauccagcugaucaacaaggccgugaacgcccugaucaacgaccagcucaucaugaagaaccaccuccgggacaucaugugcauccccuacugcaacuacuccaaguacugguaccugaaccacaccgucaccgggaagacgagccugccccgcugcuggcugguguccaacggcagcuaccugaacgagacccacuucuccgacgacaucgagcagcaggcggacaacaugaucaccgagcuccugcagaaggaguacaucgaccggcagggcaagaccccgcuggggcucguggaccuguucgucuucagcacguccuucuaccugaucagcaucuuccugcaccucgugaagaucccgacccaccgccacguggucggcaagcccugccccaagccccaccggcugaaccacauggggaucugcuccugcggccuguacaagcacccgggggugcccgugaaguggaagcgcugaggacuaguuauaagacugacuagcccgaugggccucccaacgggcccuccuccccuccuugcaccgagauuaauaaaaaaaaaaaaaaaaaaaaaaaaaaaaaaaaaaaaaaaaaaaaaaaaaaaaaaaaaaaaaaaaaaaaaaaaaaaaaaaaaaaaaaaaaaaaaaaaaaaa

SEQ ID NO: 16626 - RNA, 1662 nt, Artificial Sequence
  mRNA product Design i-3 (A100) comprising derived and/or modified sequence from LASV(Lassa virus/H.sapiens-wt/NGA/2015/ISTH_0543;Clade II)__AVO03639__GPCmut1 (opt1)
aggagaaagcuuaccaugggccagaucaucaccuucuuccaggaggugccccacgucaucgaggaggugaugaacaucgugcugaucgcccucagccugcuggccauccucaaggggaucuacaacgucgcgaccugcggccuguucgggcugguguccuuccuccugcugugcggccgcagcugcuccacgaccuacaaggggguguacgagcuccagacccuggagcuggacauggccaaccucaacaugaccaugccgcugagcugcacgaagaacaacucccaccacuacaucauggucggcaacgagaccggccuggagcucacccugaccaacacgagcaucaucaaccacaaguucugcaaccuguccgacgcccacaagaagaaccucuacgaccacgcccugaugagcaucaucuccaccuuccaccugagcauccccaacuucaaccaguacgaggccauguccugcgacuucaacgggggcaagaucagcgugcaguacaaccucucccacaccuacgcgguggacgccgccaaccacugcgggaccaucgccaacggcguccugcagacguucaugcggauggcguggggcgggagcuacaucgcccuggacuccggcugcgggagcugggacugcaucaugaccuccuaccaguaccucgugauccagaacaccaccugggaggaccacugccaguucagccgccccucccccaucggcuaccuggggcugcucagccagcggacgcgcgacaucuacaucagccggcgccgccggggcaccuucaccuggacccucuccgacagcgagggcaacgagacgcccgggggcuacugccugacccgguggaugcugaucgaggccgagcucaagugcuucgggaacaccgccguggccaagugcaacgagaagcacgacgaggaguucugcgacaugcugcgccuguucgacuucaacaagcaggcgauccggcgccucaagacccccgcccagauguccauccagcugaucaacaaggccgucaacgcccugaucaacgaccagcucaucaugaagaaccaccuccgggacaucaugugcauccccuacugcaacuacagcaaguacugguaccugaaccacacggugaccgggaagaccucccugccccgcugcuggcuggugagcaacggcuccuaccugaacgagacccacuucagcgacgacaucgagcagcaggccgacaacaugaucacggagcuccugcagaaggaguacaucgaccggcagggcaagaccccgcuggggcucgucgaccuguucguguucuccaccagcuucuaccugaucuccaucuuccugcaccucgugaagaucccgacccaccgccacaucacgggcaagcccugccccaagccccaccggcugaaccacauggggaucugcagcugcggccuguacaagcacccggggguccccgugaaguggaagcgcugaggacuaguuauaagacugacuagcccgaugggccucccaacgggcccuccuccccuccuugcaccgagauuaauaaaaaaaaaaaaaaaaaaaaaaaaaaaaaaaaaaaaaaaaaaaaaaaaaaaaaaaaaaaaaaaaaaaaaaaaaaaaaaaaaaaaaaaaaaaaaaaaaaaa

SEQ ID NO: 16627 - RNA, 1662 nt, Artificial Sequence
  mRNA product Design i-3 (A100) comprising derived and/or modified sequence from LASV(Lassa virus/H.sapiens-wt/NGA/2016/ISTH_0009;Clade II)__AVO03571__GPCmut1 (opt1)
aggagaaagcuuaccaugggccagaucaucaccuucuuccaggaggugccccacgucaucgaggaggugaugaacaucgugcugaucgcccucagccugcuggccauccucaaggggaucuacaacgucgcgaccugcggccugcuggggcucguguccuuccugcugcucugcggccgcagcugcuccacgaccuacaaggggguguacgagcugcagacccuggagcucgacauggccagccugaacaugaccaugccgcuguccugcacgaagaacaacagccaccacuacaucauggucggcaacgagaccggccucgagcugacccugaccaacacguccaucaucaaccacaaguucugcaaccucagcgacgcccacaagaagaaccuguacgaccacgcccugauguccaucaucagcaccuuccaccucuccauccccaacuucaaccaguacgaggccaugagcugcgacuucaacgggggccggaucuccgugcaguacaaccugagccacuccuacgcgguggacgccgccaaccacugcgggaccaucgccaacggcguccugcagaccuucaugcgcauggcguggggcgggagcuacaucgcccucgacuccggcugcgggagcugggacugcaucaugacguccuaccaguaccugaucauccagaacaccaccugggaggaccacugccaguucagccggcccagccccaucggcuaccuggggcuccugucccagcgcacccgggacaucuacaucagccgccggcgccggggcacguucaccuggacccuguccgacagcgagggcaacgagacccccgggggcuacugccugacgcgcuggaugcucaucgaggccgagcugaagugcuucgggaacaccgccguggccaagugcaacgagaagcacgacgaggaguucugcgacaugcugcggcuguucgacuucaacaagcaggcgauccgccggcugaagacccccgcccagauguccauccagcugaucaacaaggccgugaacgcccucaucaacgaccagcugaucaugaagaaccaccuccgcgacaucaugugcaucccguacugcaacuacagcaaguacugguaccucaaccacaccgucacggggaagaccucccugccccggugcuggcuggugagcaacggcuccuaccucaacgagacccacuucagcgacgacaucgagcagcaggccgacaacaugaucaccgagcugcugcagaaggaguacaucgaccgccagggcaagacgccccucgggcugguggaccuguucgucuucuccaccagcuucuaccugaucuccaucuuccuccaccuggugaagaucccgacccaccggcacaucaccggcaagcccugccccaagccccaccgccugaaccacauggggaucugcagcugcggccucuacaaccacccgggggugcccgucaaguggaagcggugaggacuaguuauaagacugacuagcccgaugggccucccaacgggcccuccuccccuccuugcaccgagauuaauaaaaaaaaaaaaaaaaaaaaaaaaaaaaaaaaaaaaaaaaaaaaaaaaaaaaaaaaaaaaaaaaaaaaaaaaaaaaaaaaaaaaaaaaaaaaaaaaaaaa

SEQ ID NO: 16628 - RNA, 1662 nt, Artificial Sequence
  mRNA product Design i-3 (A100) comprising derived and/or modified sequence from LASV(Lassa virus/H.sapiens-wt/NGA/2016/ISTH_0017;Clade II)__AVO03567__GPCmut1 (opt1)
aggagaaagcuuaccaugggccagaucaucaccuucuuccaggaggugccccacgucaucgaggaggugaugaacaucgugcugaucgcccucagccugcuggccauccucaaggggaucuacaacgucgcgaccugcggccuguucgggcugguguccuuccuccugcugugcggccgcagcugcuccacgaccuacaaggggguguacgagcuccagacccuggagcuggacauggccagccucaacaugaccaugccgcuguccugcacgaagaacaacagccaccacuacaucauggucggcaacgagaccggccuggagcucacccugaccaacacguccaucaucaaccacaaguucugcaaccugagcgacgcccacaagaagaaccucuacgaccacgcccugauguccaucaucagcaccuuccaccuguccauccccaacuucaaccaguacgaggccaugagcugcgacuucaacgggggcaagaucuccgugcaguacaaccucagccacaccuacgcgaucgacgccgccaaccacugcgggaccaucgccaacggcgugcugcagacguucaugcggauggcguggggcggguccuacaucgcccuggacagcggcugcggguccugggacugcaucaugaccagcuaccaguaccucaucauccagaacaccaccugggaggaccacugccaguucucccgccccagccccaucggcuaccuggggcugcucagccagcggacgcgcgacaucuacaucucccggcgccgccggggcaccuucaccuggacccucagcgacuccgagggcaacgagacgcccgggggcuacugccugacccgguggaugcugaucgaggccgagcucaagugcuucgggaacaccgccgucgccaagugcaacgagaagcacgacgaggaguucugcgacaugcugcgccuguucgacuucaacaagcaggcgauccggcgccucaagacccccgcccagaugagcauccagcugaucaacaaggccgugaacgcccugaucaacgaccagcucaucaugaagaaccaccuccgggacaucaugugcauccccuacugcaacuacuccaaguacugguaccugaaccacacggugaccgggaagaccagccugccccgcugcuggcuggucuccaacggcagcuaccugaacgagacccacuucuccgacgacaucgagcagcaggccgacaacaugaucacggagcuccugcagaaggaguacauggaccggcagggcaagaccccgcuggggcucguggaccuguucguguucagcaccuccuucuaccugaucagcaucuuccugcaccucguccgcaucccgacccaccggcacgugaucggcaagcccugccccaagccccaccgccugaaccacauggggaucugcuccugcggccuguacaagcacccgggggugcccgucaaguggaagcggugaggacuaguuauaagacugacuagcccgaugggccucccaacgggcccuccuccccuccuugcaccgagauuaauaaaaaaaaaaaaaaaaaaaaaaaaaaaaaaaaaaaaaaaaaaaaaaaaaaaaaaaaaaaaaaaaaaaaaaaaaaaaaaaaaaaaaaaaaaaaaaaaaaaa

SEQ ID NO: 16629 - RNA, 1662 nt, Artificial Sequence
  mRNA product Design i-3 (A100) comprising derived and/or modified sequence from LASV(Lassa virus/H.sapiens-wt/NGA/2018/ISTH_0959;Clade II)__AVV65099__GPCmut1 (opt1)
aggagaaagcuuaccaugggccagaucaucaccuucuuccaggaggugccccacgucaucgaggaggugaugaacaucgugcugaucgcccucagccugcuggccauccucaaggggaucuacaacgucgugaccugcggccuguucgggcugguguccuuccuccugcugugcggccgcagcugcuccacgaccuacaagggggucuacgagcuccagacccuggagcuggacauggcgagccucaacaugaccaugccgcuguccugcacgaagaacaacagccaccacuacaucauggugggcaacgagaccggccuggagcucacccugaccaacacguccaucaucaaccacaaguucugcaaccugagcgacgcccacaagaagaaccucuacgaccacgcccugauguccaucaucagcaccuuccaccuguccauccccaacuucaaccaguacgaggccaugagcugcgacuucaacgggggcaagaucuccgugcaguacaaccucagccacgccuacgcgaucgacgccgccaaccacugcgggaccaucgccaacggcguccugcagaccuucaugcggauggcguggggcggguccuacaucgcccuggacagcggcugcggguccugggacugcaucaugacgagcuaccaguaccucaucauccagaacaccaccugggaggaccacugccaguucucccgccccagccccaucggcuaccuggggcugcucagccagcggacccgcgacaucuacaucucccggcgccgccggggcacguucaccuggacccucagcgacuccgagggcaacgagacccccgggggcuacugccugacgcgguggaugcugaucgaggccgagcucaagugcuucgggaacaccgccguggccaagugcaacgagaagcacgacgaggaguucugcgacaugcugcgccuguucgacuucaacaagcaggcgauccggcgccucaagacccccgcccagaugagcauccagcugaucaacaaggccgugaacgcccugaucaacgaccagcucaucaugaagaaccaccuccgggacaucaugugcaucccguacugcaacuacuccaaguacugguaccugaaccacaccgucacggggaagaccagccugccccgcugcuggcugguguccaacggcagcuaccugaacgagacccacuucuccgacgacaucgagcagcaggccgacaacaugaucaccgagcuccugcagaaggaguacaucgaccggcagggcaagacgccccuggggcucguggaccuguucgucuucagcaccuccuucuaccugaucagcaucuuccugcaccucgugaagaucccgacccaccgccacgugaucggcaagcccugccccaagccccaccggcugaaccacauggggaucugcuccugcggccuguacaagcacccggggguccccgugaaguggaagcgcugaggacuaguuauaagacugacuagcccgaugggccucccaacgggcccuccuccccuccuugcaccgagauuaauaaaaaaaaaaaaaaaaaaaaaaaaaaaaaaaaaaaaaaaaaaaaaaaaaaaaaaaaaaaaaaaaaaaaaaaaaaaaaaaaaaaaaaaaaaaaaaaaaaaa

SEQ ID NO: 16630 - RNA, 1662 nt, Artificial Sequence
  mRNA product Design i-3 (A100) comprising derived and/or modified sequence from LASV(LASV003-NIG-2008;Clade II)__AIT17580__GPCmut1 (opt1)
aggagaaagcuuaccaugggccagaucaucaccuucuuccaggaggugccccacgucaucgaggaggugaugaacaucgugcugaucgcccucagccugcuggccauccucaaggggaucuacaacgucgcgaccugcggccuguucgggcugguguccuuccuccugcugugcggccgcagcugcuccacgaccuacaaggggguguacgagcuccagacccuggagcuggacauggccagccucaacaugaccaugccgcuguccugcacgaagaacaacagccaccacuacaucauggucggcaacgagaccggccuggagcucacccugaccaacacguccaucaucaaccacaaguucugcaaccugagcgacgcccacaagaagaaccucuacgaccacgcccugauguccaucaucagcaccuuccaccuguccauccccaacuucaaccaguacgaggccaugagcugcgacuucaacgggggcaagaucuccgugcaguacaaccucagccacaccuacgcgguggacgccgccaaccacugcgggaccaucgccaacggcguccugcagacguucaugcggauggcguggggcggguccuacaucgcccuggacagcggcugcggguccugggacugcaucaugaccagcuaccaguaccucaucauccagaacaccaccugggaggaccacugccaguucucccgccccagccccaucggcuaccuggggcugcucagccagcggacgcgcgacaucuacaucucccggcgccgccggggcaccuucaccuggacccucagcgacuccgagagcaacgagacgccgggcggguacugccugacccgguggaugcugaucgaggccgagcucaagugcuucggcaacaccgccguggccaagugcaacgagaagcacgacgaggaguucugcgacaugcugcgccuguucgacuucaacaagcaggcgauccggcgccucaaggcccccgcccagauguccauccagcugaucaacaaggccgugaacgcccugaucaacgaccagcucaucaugaagaaccaccuccgggacaucaugugcauccccuacugcaacuacagcaaguacugguaccugaaccacaccgucacgggccgcaccucccugccccggugcuggcuggugagcaacggguccuaccugaacgagacccacuucagcgacgacaucgagcagcaggcggacaacaugaucaccgagcuccugcagaaggaguacauggaccgccagggcaagacgccccugggccucguggaccuguucgucuucuccaccagcuucuaccugaucuccaucuuccugcaccucgugaagaucccgacccaccggcacgugaucgggaagcccugccccaagccccaccgccugaaccacaugggcaucugcagcugcgggcuguacaagcacccgggcguccccgugaaguggaagcggugaggacuaguuauaagacugacuagcccgaugggccucccaacgggcccuccuccccuccuugcaccgagauuaauaaaaaaaaaaaaaaaaaaaaaaaaaaaaaaaaaaaaaaaaaaaaaaaaaaaaaaaaaaaaaaaaaaaaaaaaaaaaaaaaaaaaaaaaaaaaaaaaaaaa

SEQ ID NO: 16631 - RNA, 1662 nt, Artificial Sequence
  mRNA product Design i-3 (A100) comprising derived and/or modified sequence from LASV(LASV035-NIG-2009;Clade II)__AIT17588__GPCmut1 (opt1)
aggagaaagcuuaccaugggccagaucaucaccuucuuccaggaggugccccacgucaucgaggaggugaugaacaucgugcugaucgcccucagccugcuggccauccucaaggggaucuacaacgucgcgaccugcggccuguucgggcugguguccuuccuccugcugugcggccgcagcugcuccacgaccuacaaggggguguacgagcuccagacccuggagcuggacauggccagccucaacaugaccaugccgcuguccugcacgaagaacaacagccaccacuacaucauggucggcaacgagaccggccuggagcucacccugaccaacacguccaucaucaaccacaaguucugcaaccugagcgacgcccacaagaagaaccucuacgaccacgcccugauguccaucaucagcaccuuccaccuguccauccccaacuucaaccaguacgaggccaugagcugcgacuucaacgggggcaagaucuccgugcaguacaaccucagccacgcguacgccguggacgccgccaaccacugcgggaccaucgcgaacggcguccugcagaccuucaugcggauggccuggggcggguccuacaucgcccuggacagcggcugcggguccugggacugcaucaugacgagcuaccaguaccucaucauccagaacaccaccugggaggaccacugccaguucucccgccccagccccaucggcuaccuggggcugcucagccagcggacccgcgacaucuacaucucccggcgccgccggggcacguucaccuggacccucagcgacuccgagggcaacgagacccccgggggcuacugccugacgcgguggaugcugaucgaggccgagcucaagugcuucgggaacaccgccguggcgaagugcaacgagaagcacgacgaggaguucugcgacaugcugcgccuguucgacuucaacaagcaggccauccggcgccucaaggcccccgcccagaugagcauccagcugaucaacaaggccgugaacgcgcugaucaacgaccagcucaucaugaagaaccaccuccgggacaucaugugcauccccuacugcaacuacuccaaguacugguaccugaaccacaccgucaccgggaagacgagccugccccgcugcuggcugguguccaacggcagcuaccugaacgagacccacuucuccgacgacaucgagcagcaggccgacaacaugaucaccgagcuccugcagaaggaguacaucgaccggcagggcaagaccccgcuggggcucguggaccuguucgucuucagcacguccuucuaccugaucagcaucuuccugcaccucgugaagaucccgacccaccgccacgugaucggcaagcccugccccaagccccaccggcugaaccacauggggaucugcuccugcggccuguacaagcacccggggguccccgugaaguggaagcgcugaggacuaguuauaagacugacuagcccgaugggccucccaacgggcccuccuccccuccuugcaccgagauuaauaaaaaaaaaaaaaaaaaaaaaaaaaaaaaaaaaaaaaaaaaaaaaaaaaaaaaaaaaaaaaaaaaaaaaaaaaaaaaaaaaaaaaaaaaaaaaaaaaaaa

SEQ ID NO: 16632 - RNA, 1662 nt, Artificial Sequence
  mRNA product Design i-3 (A100) comprising derived and/or modified sequence from LASV(LASV1000-NIG-2009;Clade II)__AIT17782__GPCmut1 (opt1)
aggagaaagcuuaccaugggccagaucaucaccuucuuccaggaggugccccacgucaucgaggaggugaugaacaucgugcugaucgcccucagccugcuggccauccucaaggggaucuacaacgucgcgaccugcggccuguucgggcugguguccuuccuccugcugugcggccgcagcugcuccacgaccuacaaggggguguacgagcuccagacccuggagcuggacauggccagccucaacaugaccaugccgcuguccugcacgaagaacaacagccaccacuacaucauggucggcaacgagaccggccuggagcucacccugaccaacacguccaucaucaaccacaaguucugcaaccugagcgacgcccacaagaagaaccucuacgaccacgcccugauguccaucaucagcaccuuccaccuguccauccccaacuucaaccaguacgaggccaugagcugcgacuucaacgggggcaagaucuccgugcaguacaaccucagccacaccuacgcgguggacgccgccaaccacugcgggaccaucgccaacggcguccugcagacguucaugcggauggcguggggcggguccuacaucgcccuggacagcggcugcggguccugggacugcaucaugaccagcuaccaguaccucaucauccagaacaccaccugggaggaccacugccaguucucccgccccagccccaucggcuaccuggggcugcucagccagcggacgcgcgacaucuacaucucccggcgccgccggggcaccuucaccuggacccucagcgacuccgagggcaacgagacgcccgggggcuacugccugacccgguggaugcugaucgaggccgagcucaagugcuucgggaacaccgccguggccaagugcaacgagaagcacgacgaggaguucugcgacaugcugcgccuguucgacuucaacaagcaggcgaucaagcggcucaagacccccgcccagaugagcauccagcugaucaacaaggccgugaacgcccugaucaacgaccagcucaucaugaagaaccaccuccgcgacaucaugugcauccccuacugcaacuacuccaaguacugguaccugaaccacacggucaccgggaagaccagccugccccggugcuggcugguguccaacggcagcuaccugaacgagacccacuucuccgacgacaucgagcagcaggccgacaacaugaucacggagcuccugcagaaggaguacaucgaccgccagggcaagaccccgcuggggcucguggaccuguucgucuucagcaccuccuucuaccugaucagcaucuuccugcaccucgugaagaucccgacccaccggcacguggucggcaagcccugccccaagccccaccgccugaaccacauggggaucugcuccugcggccuguacaagcacccgggggugcccgugaaguggaagcggugaggacuaguuauaagacugacuagcccgaugggccucccaacgggcccuccuccccuccuugcaccgagauuaauaaaaaaaaaaaaaaaaaaaaaaaaaaaaaaaaaaaaaaaaaaaaaaaaaaaaaaaaaaaaaaaaaaaaaaaaaaaaaaaaaaaaaaaaaaaaaaaaaaaa

SEQ ID NO: 16633 - RNA, 1662 nt, Artificial Sequence
  mRNA product Design i-3 (A100) comprising derived and/or modified sequence from LASV(LASV221-NIG-2010;Clade II)__AIT17624__GPCmut1 (opt1)
aggagaaagcuuaccaugggccagaucaucaccuucuuccaggaggugccccacgucaucgaggaggugaugaacaucgugcugaucgcccucagccugcuggccauccucaaggggaucuacaacgucgcgaccugcggccuguucgggcugguguccuuccuccugcugugcggccgcagcugcuccacgaccuacaaggggguguacgagcuccagacccuggagcuggacauggccagccucaacaugaccaugccgcuguccugcacgaagaacaacagccaccacuacaucauggucggcaacgagaccggccuggagcucacccugaccaacacguccaucaucaaccacaaguucugcaaccugagcgacgcccacaagaagaaccucuacgaccacgcccugauguccaucaucagcaccuuccaccuguccauccccaacuucaaccaguacgaggccaugagcugcgacuucaacgggggcaagaucuccgugcaguacaaccucagccacaccuacgcgaucgacgccgccaaccacugcgggaccaucgccaacggcgugcugcagacguucaugcggauggcguggggcggguccuacaucgcccuggacagcggcugcggguccugggacugcaucaugaccagcuaccaguaccucaucauccagaacaccaccugggaggaccacugccaguucucccgccccagccccaucggcuaccuggggcugcucagccagcggacgcgcgacaucuacaucucccggcgccgccggggcaccuucaccuggacccucagcgacuccgagggcaacgagacgcccgggggcuacugccugacccgguggaugcugaucgaggccgagcucaagugcuucgggaacaccgccgucgccaagugcaacgagaagcacgacgaggaguucugcgacaugcugcgccuguucgacuucaacaagcaggcgauccggcgccucaagacccccgcccagaugagcauccagcugaucaacaaggccgugaacgcccugaucaacgaccagcucaucaugaagaaccaccuccgggacaucaugugcauccccuacugcaacuacuccaaguacugguaccugaaccacacggugaccgggaagaccagccugccccgcugcuggcuggucuccaacggcagcuaccugaacgagacccacuucuccgacgacaucgagcagcaggccgacaacaugaucacggagaugcuccagaaggaguacauggaccggcagggcaagaccccgcuggggcugguggaccucuucguguucagcaccuccuucuaccugaucagcaucuuccugcaccuggucaagaucccgacccaccgccacgugaucggcaagcccugccccaagccccaccggcucaaccacauggggaucugcuccugcggccuguacaagcacccgggggugcccgucaaguggaagcgcugaggacuaguuauaagacugacuagcccgaugggccucccaacgggcccuccuccccuccuugcaccgagauuaauaaaaaaaaaaaaaaaaaaaaaaaaaaaaaaaaaaaaaaaaaaaaaaaaaaaaaaaaaaaaaaaaaaaaaaaaaaaaaaaaaaaaaaaaaaaaaaaaaaaa

SEQ ID NO: 16634 - RNA, 1662 nt, Artificial Sequence
  mRNA product Design i-3 (A100) comprising derived and/or modified sequence from LASV(LASV237-NIG-2010;Clade II)__AIT17638__GPCmut1 (opt1)
aggagaaagcuuaccaugggccagaucaucaccuucuuccaggaggugccccacgucaucgaggaggugaugaacaucgugcugaucgcccucagccugcuggccauccucaaggggaucuacaacgucgcgaccugcggccuguucgggcugguguccuuccuccugcugugcggccgcagcugcuccacgaccuacaaggggguguacgagcuccagacccuggagcuggacauggccagccucaacaugaccaugccgcuguccugcacgaagaacaacagccaccacuacaucauggucggcaacgagaccggccuggagcucacccugaccaacacguccaucaucaaccacaaguucugcaaccugagcgacgcccacaagaaggaccucuacgaccacgcccugauguccaucaucagcaccuuccaccuguccauccccaacuucaaccaguacgaggccaugagcugcgacuucaacgggggcaagaucuccgugcaguacaaccucagccacaccuacgcgguggacgccgccaaccacugcgggaccaucgccaacggcguccugcagacguucaugcggauggcguggggcggguccuacaucgcccuggacagcggcugcggguccugggacugcaucaugaccagcuaccaguaccucaucauccagaacaccaccugggaggaccacugccaguucucccgccccagccccaucggcuaccuggggcugcucagccagcggacgcgcgacaucuacaucucccggcgccgccggggcaccuucaccuggacccucagcgacuccgagggcaacgagacgcccgggggcuacugccugacccgguggaugcugaucgaggccgagcucaagugcuucgggaacaccgccguggccaagugcaacgagaagcacgacgaggaguucugcgacaugcugcgccuguucgacuucaacaagcaggcgauccggcgccucaagacccccgcccagaugagcauccagcugaucaacaaggccgugaacgcccugaucaacgaccagcucaucaugaagaaccaccuccgggacaucaugugcauccccuacugcaacuacuccaaguacugguaccugaaccacacggucaccgggaagaccagccugccccgcugcuggcugguguccaacggcagcuaccugaacgagacccacuucuccgacgacaucgagcagcaggccgacaacaugaucacggagcuccugcagaaggaguacauggaccggcagggcaagaccccgcuggggcucguggaccuguucgucuucagcaccuccuucuaccugaucagcaucuuccugcaccucaucaagaucccgacccaccgccacaucacgggcaagcccugccccaagccccaccggcugaaccacauggggaucugcuccugcggccuguacaagcacccgggggugcccgugaaguggaagcgcugaggacuaguuauaagacugacuagcccgaugggccucccaacgggcccuccuccccuccuugcaccgagauuaauaaaaaaaaaaaaaaaaaaaaaaaaaaaaaaaaaaaaaaaaaaaaaaaaaaaaaaaaaaaaaaaaaaaaaaaaaaaaaaaaaaaaaaaaaaaaaaaaaaaa

SEQ ID NO: 16635 - RNA, 1662 nt, Artificial Sequence
  mRNA product Design i-3 (A100) comprising derived and/or modified sequence from LASV(LASV253-NIG-2011;Clade II)__AIT17670__GPCmut1 (opt1)
aggagaaagcuuaccaugggccagaucaucaccuucuuccaggaggugccccacgucaucgaggaggugaugaacaucgugcugaucgcccucagccugcuggccauccucaaggggaucuacaacgucgcgaccugcggccuguucgggcugguguccuuccuccugcugugcggccgcagcugcuccacgaccuacaaggggguguacgagcuccagacccuggagcuggacauggccagccucaacaugaccaugccgcuguccugcacgaagaacaacagccaccacuacaucauggucggcaacgagaccggccuggagcucacccugaccaacacguccaucaucaaccacaaguucugcaaccugagcgacgcccacaagaagaaccucuacgaccacgcccugauguccaucaucagcaccuuccaccuguccauccccaacuucaaccaguacgaggccaugagcugcgacuucaacgggggcaagaucuccgugcaguacaaccucagccacaccuacgcgguggacgccgccaaccacugcgggaccaucgccaacggcguccugcagacguucaugcggauggcguggggcggguccuacaucgcccuggacagcggcugcggguccugggacugcaucaugaccagcuaccaguaccucaucauccagaacaccaccugggaggaccacugccaguucucccgccccagccccaucggcuaccuggggcugcucagccagcggacgcgcgacaucuacaucucccggcgccgccggggcaccuucaccuggacccucagcgacuccgagggcaacgagacgcccgggggcuacugccugacccgguggaugcugaucgaggccgagcucaagugcuucgggaacaccgccguggccaagugcaacgagaagcacgacgaggaguucugcgacaugcugcgccuguucgacuucaacaagcaggcgauccggcgccucaaggcccccgcccagaugagcauccagcugaucaacaaggccgugaacgcccugaucaacgaccagcucaucaugaagaaccaccuccgggacaucaugugcaucccguacugcaacuacuccaaguacugguaccugaaccacaccgucacggggcgcaccagccugccccggugcuggcugguguccaacggcagcuaccugaacgagacccacuucuccgacgacaucgagcagcaggcggacaacaugaucaccgagcuccugcagaaggaguacaucgaccgccagggcaagacgccccuggggcucguggaccuguucgucuucagcaccuccuucuaccugaucagcaucuuccugcaccucgugaagaucccgacccaccggcacaucaucggcaagcccugccccaagccccaccgccugaaccacauggggaucugcuccugcggccuguacaagcacccgggggugcccgucaaguggaagcggugaggacuaguuauaagacugacuagcccgaugggccucccaacgggcccuccuccccuccuugcaccgagauuaauaaaaaaaaaaaaaaaaaaaaaaaaaaaaaaaaaaaaaaaaaaaaaaaaaaaaaaaaaaaaaaaaaaaaaaaaaaaaaaaaaaaaaaaaaaaaaaaaaaaa

SEQ ID NO: 16636 - RNA, 1662 nt, Artificial Sequence
  mRNA product Design i-3 (A100) comprising derived and/or modified sequence from LASV(LASV254-NIG-2011;Clade II)__AIT17674__GPCmut1 (opt1)
aggagaaagcuuaccaugggccagaucaucaccuucuuccaggaggugccccacgucaucgaggaggugaugaacaucgugcugaucgcccucagccugcuggccauccucaaggggaucuacaacgucgcgaccugcggccuguucgggcugguguccuuccuccugcugugcggccgcagcugcuccacgaccuacaaggggguguacgagcuccagacccuggagcuggacaugaccaaccucaacaugacgaugccgcugagcugcaccaagaacaacucccaccacuacaucauggucggcaacgagaccggccuggagcucacccugacgaacaccagcaucaucaaccacaaguucugcaaccuguccgacgcccacaagaagaaccucuacaaccacgcccugaugagcaucaucuccaccuuccaccugagcauccccaacuucaaccaguacgaggccauguccugcgacuucaacgggggcaagaucagcgugcaguacaaccucucccacagcuacgccguggacgcggccaaccacugcgggaccaucgccaacggcguccugcagacguucaugcggauggccuggggcggguccuacaucgcgcuggacagcggcugcgggaacugggacugcaucaugaccuccuaccaguaccucaucauccagaacaccaccugggaggaccacugccaguucagccgccccucccccaucggcuaccuggggcugcucagccagcggacgcgcgacaucuacaucagccggcgccgccggggcaccuucaccuggacccucuccgacagcgagggcaacgagacgcccgggggcuacugccugacccgguggaugcugaucgaggccgagcucaagugcuucgggaacaccgccguggccaagugcaacgagaagcacgacgaggaguucugcgacaugcugcgccuguucgacuucaacaagcaggccauccggcgccucaagacccccgcgcaggccaacauccagcugaucaacaaggccgugaacgcccugaucaacgaccagcucaucaugaagaaccaccuccgggacaucaugugcauccccuacugcaacuacuccaaguacugguaccugaaccacacggucaccgggaagaccagccugccccgcugcuggcugguguccaacggcagcuaccugaacgagacccacuucuccgacgacaucgagcagcaggccgacaacaugaucacggagcuccugcagaaggaguacauggaccggcagggcaagaccccgcuggggcucguggaccuguucgucuucagcaccuccuucuaccugaucagcaucuuccugcaccucgugaagaucccgacccaccgccacgugaucggcaagcccugccccaagccccaccggcugaaccacauggggaucugcuccugcggccuguacaagcacccggggguccccgugaaguggaagcgcugaggacuaguuauaagacugacuagcccgaugggccucccaacgggcccuccuccccuccuugcaccgagauuaauaaaaaaaaaaaaaaaaaaaaaaaaaaaaaaaaaaaaaaaaaaaaaaaaaaaaaaaaaaaaaaaaaaaaaaaaaaaaaaaaaaaaaaaaaaaaaaaaaaaa

SEQ ID NO: 16637 - RNA, 1662 nt, Artificial Sequence
  mRNA product Design i-3 (A100) comprising derived and/or modified sequence from LASV(Nig08-A19;Clade III)__ADU56618__GPCmut1 (opt1)
aggagaaagcuuaccaugggccagaucgugaccuucuuccaggaggucccccacgugaucgaggaggugaugaacaucguccugaucgcccucagcauccuggccauccugaaggggcucuacaacaucgcgaccugcggccugaucgggcuggugacguuccuccugcuguccggccgcagcugcuccaugaccuacaaggggguguacgagcuccagacccuggagcugaacaugaacacccucaacaugacgaugccgcugagcugcaccaagaacaacucccaccacuacaucauggucggcaacgagaccggccuggagcucacccugacgaacaccagccugcuccaccacaaguucugcaaccuguccgacgcccacaagaagaaccuguacgaccacacccucaugagcaucaucuccaccuuccaccugagcauccccaacuucaaccaguacgaggccauguccugcgacuucaacgggggcaagaucacggugcaguacaaccugagccacuccuacgccaucgacgccgcgaaccacugcgggaccguggccaacggcguccuccagaccuucaugcggauggccuggggcgggagcuacaucgcccuggacuccggcugcgggaagugggacugcaucaugaccagcuaccaguaccugaucauccagaacacgaccugggaggaccacugccaguucucccggcccagccccaucggcuaccucgggcugcugucccagcgcacccgggacaucuacaucagccgccggcgccggggcaccuucacguggacccugagcgacuccgagggcaacgagacccccgggggcuacugccucacccgcuggaugcugaucgaggcggagcugaagugcuucgggaacacggccguggccaagugcaacgagaagcacgacgaggaguucugcgacaugcuccggcuguucgacuucaacaagcaggccauccgccggcugaaggcccccgcgcagaugagcauccagcucaucaacaaggccgugaacgcccugaucaacgaccagcugaucaugaagaaccaccuccgcgacaucaugugcauccccuacugcaacuacuccaaguacugguaccugaaccacaccagcaccgggcggaccucccugccccgcugcuggcucgucagcaacggcuccuaccugaacgagacgcacuucagcgacgacaucgagcagcaggccgacaacaugaucaccgagaugcugcagaaggaguaccucgaccggcagggcaagaccccgcuggggcugguggaccuguucguguucuccaccagcuucuaccucaucuccaucuuccugcaccuggucaagaucccgacgcaccgccacaucgugggcaagcccugccccaagccccaccggcucaaccacauggggaucugcagcugcggccuguacaagcagccgggggugcccguccgcuggaagcggugaggacuaguuauaagacugacuagcccgaugggccucccaacgggcccuccuccccuccuugcaccgagauuaauaaaaaaaaaaaaaaaaaaaaaaaaaaaaaaaaaaaaaaaaaaaaaaaaaaaaaaaaaaaaaaaaaaaaaaaaaaaaaaaaaaaaaaaaaaaaaaaaaaaa

SEQ ID NO: 16638 - RNA, 1665 nt, Artificial Sequence
  mRNA product Design i-3 (A100) comprising derived and/or modified sequence from LASV(G1180-SLE-2010;Clade IV)__AIT17168__GPCmut1 (opt1)
aggagaaagcuuaccaugggccagaucgugaccuucuuccaggaggucccccacgugaucgaggaggugaugaacaucguccugaucgcccucagcauccuggccgugcugaaggggcucuacaacuucgcgaccugcggccugguggggcugcucaccuuccugcugcucugcggccgcuccugcaccgccagccgguacaagggggucuacgagcugcagacccuggagcucaacauggagacccugaacaugacgaugccgcuguccugcaccaagaacaacagccaccacuacaucauggugggcaacgagaccggccucgagcugacccugacgaacaccuccaucaucaaccacaaguucugcaaccucagcgacgcccacaagaagaaccuguacgaccacgcccugauguccaucaucagcaccuuccaccucuccauccccaacuucaaccaguacgaggccaugagcugcgacuucaacgggggcaagaucuccgugcaguacaaccugagccacuccuacgcgggggacgccgccaaccacugcggcaccgucgccaacggggugcugcagacguucaugcgcauggcguggggcggcagcuacaucgcccucgacuccgggugcggcagcugggacugcaucaugaccuccuaccaguaccugaucauccagaacaccaccugggaggaccacugccaguucagccggcccucccccaucggguaccugggccuccugagccagcgcacgcgggacaucuacaucagccgccggcgccggggcaccuucaccuggacccuguccgacagcgaggggaaggacacgccgggcggguacugccugacccgcuggaugcucaucgaggccgagcugaagugcuucggcaacaccgccguggccaagugcaacgagaagcacgacgaggaguucugcgacaugcugcggcuguucgacuucaacaagcaggcgauccagcgccugaaggcccccgcccagauguccauccagcugaucaacaaggccgucaacgcccucaucaacgaccagcugaucaugaagaaccaccuccgggacaucaugugcauccccuacugcaacuacagcaaguacugguaccucaaccacaccacgaccggcaagaccucccugcccaagugcuggcuggugagcaacggcuccuaccucaacgagacccacuucagcgacgacaucgagcagcaggcggacaacaugaucacggagaugcugcagaaggaguacauggagcgccaggggaagacgccccugggccucguggaccuguucgucuucuccaccagcuucuaccugaucuccaucuuccugcaccucgugaagaucccgacccaccggcacaucgugggcaagagcugccccaagccccaccgccugaaccacauggggaucugcuccugcgggcuguacaagcagcccggcgucccggugaaguggaagcggugaggacuaguuauaagacugacuagcccgaugggccucccaacgggcccuccuccccuccuugcaccgagauuaauaaaaaaaaaaaaaaaaaaaaaaaaaaaaaaaaaaaaaaaaaaaaaaaaaaaaaaaaaaaaaaaaaaaaaaaaaaaaaaaaaaaaaaaaaaaaaaaaaaaa

SEQ ID NO: 16639 - RNA, 1665 nt, Artificial Sequence
  mRNA product Design i-3 (A100) comprising derived and/or modified sequence from LASV(G1442-SLE-2011;Clade IV)__AIT17180__GPCmut1 (opt1)
aggagaaagcuuaccaugggccagaucgugaccuucuuccaggaggucccccacgugaucgaggaggugaugaacaucguccugaucgcccucagcauccuggccgugcugaaggggcucuacaacguggcgaccugcggccugaucgggcuggucacguuccuccugcugugcggccgcuccugcaccaccacccucuacaaggggguguacgagcugcagacgcuggagcucaacauggagacccugaacaugaccaugccgcugagcugcaccaagaacaacucccaccacuacauccgggugggcaacgagacgggccucgagcugacccugaccaacaccagcaucaucaaccacaaguucugcaaccucuccgacgcccacaagaagaaccuguacgaccacgcccugaugagcaucaucuccacguuccaccucagcauccccaacuucaaccaguacgaggccauguccugcgacuucaacgggggcaagaucagcguccaguacaaccugucccacagcuacgccggggacgcggccaaccacugcggcaccguggccaacggggugcugcagaccuucaugcgcauggccuggggcggcuccuacaucgcgcucgacagcgggugcggcaacugggacugcaucaugaccuccuaccaguaccugaucauccagaacacgaccugggacgaccacugccaguucagccgccccucccccaucggguaccugggccuccugagccagcggacccgcgacgucuacaucucccggcgccgccggggcaccuucacguggacccugagcgacagcgaggggaaggacaccccgggcggguacugccugacccgguggaugcucaucgaggccgagcugaagugcuucggcaacacggccguggccaagugcaacgagaagcacgacgaggaguucugcgacaugcugcgccucuucgacuucaacaagcaggccauccagcggcugaaggcgcccgcccagauguccauccagcugaucaacaaggccgugaacgcccucaucaacgaccagcugaucaugaagaaccaccuccgcgacaucaugugcauccccuacugcaacuacagcaaguacugguaccugaacaacaccgccaccggcaagaccucccugcccaagugcuggcugaucagcaacggcuccuaccucaacgagacgcacuucagcgacgacaucgagcaggaggcggacaacaugaucaccgagaugcugcagaaggaguacauggagcggcaggggaagacgccccugggccucgucgaccuguucguguucuccaccagcuucuaccugaucuccaucuuccugcaccucgugaagaucccgacccaccgccacaucgucggcaagagcugccccaagccccaccggcugaaccacauggggaucugcuccugcgggcuguacaagcagcccggcgugccggugcgcuggaagcggugaggacuaguuauaagacugacuagcccgaugggccucccaacgggcccuccuccccuccuugcaccgagauuaauaaaaaaaaaaaaaaaaaaaaaaaaaaaaaaaaaaaaaaaaaaaaaaaaaaaaaaaaaaaaaaaaaaaaaaaaaaaaaaaaaaaaaaaaaaaaaaaaaaaa

SEQ ID NO: 16640 - RNA, 1665 nt, Artificial Sequence
  mRNA product Design i-3 (A100) comprising derived and/or modified sequence from LASV(G3010-SLE-2013;Clade IV)__AIT17344__GPCmut1 (opt1)
aggagaaagcuuaccaugggccagaucgugaccuucuuccaggaggucccccacgugaucgaggaggugaugaacaucguccugaucgcccucagcauccuggccgugcugaaggggcucuacaacuucgcgaccugcggccugguggggcuggucacguuccuccugcugugcggccgcuccugcaccaccagccucuacaaggggguguacgagcugcagacccuggagcucaacauggagacgcugaacaugaccaugccgcuguccugcaccaagaacaacagccaccacuacaucauggugggcaacgagaccggccucgagcugacgcugaccaacaccuccaucaucaaccacaaguucugcaaccucagcgacgcccacaagaagaaccuguacaaccacgcccugauguccaucaucagcaccuuccaccucuccauccccaacuucaaccaguacgaggccaugagcugcgacuucaacgggggcaagaucuccguccaguacaaccugagccacuccuacgccggggacgcggccagccacugcggcacgguggccaacggggugcugcagaccuucaugcggauggccuggggcggcuccuacaucgcgcucgacagcgggugcggcaagugggacugcaucaugaccuccuaccaguaccugaucauccagaacaccacgugggaggaccacugccaguucagccgccccucccccaucggguaccugggccuccugagccagcggacccgcgacaucuacaucagccggcgccgccggggcaccuucaccuggacgcuguccgacagcgaggggaaggacaccccgggcggguacugccugacccgguggaugcucaucgaggccgagcugaagugcuucggcaacaccgccgucgccaagugcaacgagaagcacgacgaggaguucugcgacaugcugcgccucuucgacuucaacaagcaggccauccagcggcugaagacgcccgcgcagauguccauccagcugaucaacaaggccgugaacgcccucaucaacgaccagcugaucaugaagaaccaccuccgcgacaucaugugcauccccuacugcaacuacagcaaguacugguaccugaaccacaccaccaccggcaagacgucccugcccaagugcuggcuggugagcaacggcuccuaccucaacgagacccacuucagcgacgacaucgagcagcaggccgacaacaugaucaccgagaugcugcagaaggaguacauggagcggcaggggaagacgccccugggccucgucgaccuguucguguucuccaccagcuucuaccugaucuccaucuuccugcaccucgugaagaucccgacccaccgccacaucgucggcaagagcugccccaagccccaccggcugaaccacauggggaucugcuccugcgggcuguacaagcagcccggcgugccggugcgcuggaagcggugaggacuaguuauaagacugacuagcccgaugggccucccaacgggcccuccuccccuccuugcaccgagauuaauaaaaaaaaaaaaaaaaaaaaaaaaaaaaaaaaaaaaaaaaaaaaaaaaaaaaaaaaaaaaaaaaaaaaaaaaaaaaaaaaaaaaaaaaaaaaaaaaaaaa

SEQ ID NO: 16641 - RNA, 1665 nt, Artificial Sequence
  mRNA product Design i-3 (A100) comprising derived and/or modified sequence from LASV(G502-SLE-2009;Clade IV)__AIT17126__GPCmut1 (opt1)
aggagaaagcuuaccaugggccagaucgugaccuucuuccaggaggucccccacgugaucgaggaggugaugaacaucguccugaucgcccucagcauccuggccgugcugaaggggcucuacaacuucgcgaccugcggccugguggggcugcucacguuccugcugcucugcggccgcuccugcaccaccgggcuguacaagggcgucuacgagcugcagacccucgagcugaacauggagacgcugaacaugaccaugccgcucagcugcaccaagaacaacucccaccacuacaucauggugggcaacgagaccgggcuggagcugacgcucaccaacaccagcaucaucaaccacaaguucugcaaccuguccgacgcccacaagaagaaccuguacgaccacgcccucaugagcaucaucuccaccuuccaccugagcauccccaacuucaaccaguacgaggccauguccugcgacuucaacggcgggaagaucagcgugcaguacaaccugucccacagcuacgccggcgacgcggccgaccacugcgggacggucgccaacggcgugcuccagaccuucaugcggauggccuggggcggguccuacaucgcgcuggacagcggcugcgggcggugggacugcaucaugaccuccuaccaguaccugaucauccagaacaccacgugggaggaccacugccaguucagccgccccucccccaucggcuaccucggccugcugagccagcggacccgcgacaucuacaucucccggcgccgccgggggaccuucaccuggacgcugagcgacagcgagggcaaggacacccccgggggcuacugccucacccgguggaugcugaucgaggccgagcugaagugcuucgggaacaccgccguggccaagugcaacgagaagcacgacgaggaguucugcgacaugcuccgccuguucgacuucaacaagcaggccauccagcggcugaaggcgcccgcccagauguccauccagcucaucaacaaggccgucaacgcccugaucaacgaccagcuggugaugaagaaccaccuccgcgacaucaugugcauccccuacugcaacuacagccgguacugguaccugaaccacacgaccaccggccgcaccucccugcccaagugcuggcucgugagcaacggguccuaccugaacgagacgcacuucagcgacgacaucgagcagcaggccgacaacaugaucaccgagaugcugcagaaggaguacauggagcggcagggcaagaccccgcucgggcuggucgaccuguucguguucuccaccagcuucuaccugaucuccaucuuccuccaccuggugaagaucccgacgcaccgccacaucgucggcaagagcugccccaagccccaccggcugaaccacauggggaucugcuccugcggccucuacaagcagcccggcgugccggugaaguggaagcgcugaggacuaguuauaagacugacuagcccgaugggccucccaacgggcccuccuccccuccuugcaccgagauuaauaaaaaaaaaaaaaaaaaaaaaaaaaaaaaaaaaaaaaaaaaaaaaaaaaaaaaaaaaaaaaaaaaaaaaaaaaaaaaaaaaaaaaaaaaaaaaaaaaaaa

SEQ ID NO: 16642 - RNA, 1665 nt, Artificial Sequence
  mRNA product Design i-3 (A100) comprising derived and/or modified sequence from LASV(G733-SLE-2010;Clade IV)__AIT17154__GPCmut1 (opt1)
aggagaaagcuuaccaugggccagaucgugaccuucuuccaggaggucccccacgugaucgaggaggugaugaacaucguccugaucgcccucagcauccuggccgugcugaaggggcucuacaacuucgcgaccugcggcaucguggggcuggucuccuuccugcuccugugcggccgcagcugcacgaccucccuguacaaggggguguacgagcuccagacccuggagcugaacauggagacccucaacaugacgaugccgcugagcugcaccaagaacaacucccaccacuacaucauggugggcaacgagaccggccuggagcucacccugacgaacaccagcaucaucaaccacaaguucugcaaccuguccgacgcccacaagaagaaccucuacgaccacgcccugaugagcaucaucuccaccuuccaccugagcauccccaacuucaaccaguacgaggccauguccugcgacuucaacgggggcaagaucagcguccaguacaaccucucccacagcuacgccggggacgcggccaaccacugcggcaccaucgccaacggggugcugcagacguucaugcggauggccuggggcggcuccuacaucgcgcuggacagcgggugcgaccggugggacugcaucaugaccuccuaccaguaccucaucauccagaacaccaccugggaggaccacugccaguucagccgccccucccccaucggcuaccuggggcugcucagccagcggacgcgcgacaucuacaucagccggcgccgccggggcaccuucaccuggacccucuccgacagcgagggcaaggacacgcccgggggcuacugccugacccgguggaugcugaucgaggccgagcucaagugcuucgggaacaccgccguggccaagugcaacgagaagcacgacgaggaguucugcgacaugcugcgccuguucgacuucaacaagcaggccauccagcggcucaaggcgcccgcccagauguccauccagcugaucaacaaggccgucaacgcccugaucaacgaccagcucaucaugaagaaccaccuccgcgacaucaugugcauccccuacugcaacuacagcaaguacugguaccugaaccacaccacgaccgggaagaccucccugcccaagugcuggcuggugagcaacggcuccuaccugaacgagacccacuucagcgacgacaucgagcagcaggccgacaacaugaucacggagaugcuccagaaggaguacauggagcggcagggcaagaccccgcuggggcugguggaccucuucgucuucuccaccagcuucuaccugaucuccaucuuccugcaccuggugaagaucccgacccaccgccacguggucggcaagagcugccccaagccccaccggcucaaccacauggggaucugcuccugcggccuguacgggcagcccggcgugccggugaaguggaagcgcugaggacuaguuauaagacugacuagcccgaugggccucccaacgggcccuccuccccuccuugcaccgagauuaauaaaaaaaaaaaaaaaaaaaaaaaaaaaaaaaaaaaaaaaaaaaaaaaaaaaaaaaaaaaaaaaaaaaaaaaaaaaaaaaaaaaaaaaaaaaaaaaaaaaa

SEQ ID NO: 16643 - RNA, 1665 nt, Artificial Sequence
  mRNA product Design i-3 (A100) comprising derived and/or modified sequence from MOPV/LASV reassortant(IGS-1;Clade IV)__AFY05576__GPCmut1 (opt1)
aggagaaagcuuaccaugggccagaucgugaccuucuuccaggaggucccccacgugaucgaggaggugaugaacaucguccugaucgcccucagcgugcuggccgugcugaaggggcucuacaacuucgcgaccugcggccuggucgggcuggugacguuccuccugcugugcggccgcuccugcaccaccagccucuacaaggggguguacgagcugcagacccuggagcucaacauggagacgcugaacaugaccaugccgcuguccugcaccaagaacaacagccaccacuacaucauggucggcaacgagaccggccucgagcugacgcugaccaacaccuccaucaucaaccacaaguucugcaaccucagcgacgcccacaagaagaaccuguacgaccacgcccugauguccaucaucagcaccuuccaccucuccauccccaacuucaaccaguacgaggccaugagcugcgacuucaacgggggcaagaucuccgugcaguacaaccugagccacuccuacgccggggacgcggccaaccacugcggcacgguggccaacgggguccugcagaccuucaugcggauggccuggggcggcagcuacaucgcgcucgacuccgggugcggcaacugggacugcaucaugaccagcuaccaguaccugaucauccagaacaccacgugggaggaccacugccaguucucccggcccagccccaucggguaccugggccuccugucccagcgcacccgggacaucuacaucagccgccggcgccggggcaccuucaccuggacgcugagcgacuccgagggggaggacaccccgggcggguacugccugacccgcuggaugcucaucgaggccgagcugaagugcuucggcaacaccgccguggccaagugcaacgagaagcacgacgaggaguucugcgacaugcugcggcuguucgacuucaacaagcaggccauccagcgccugaaggcgcccgcccagaugagcauccagcugaucaacaaggccgugaacgcccucaucaacgaccagcugaucaugaagaaccaccuccgggacaucaugugcauccccuacugcaacuacuccaaguacugguaccucaaccacacgaccaccggccgcaccagccugcccaagugcuggcuggucuccaacggcagcuaccucaacgagacgcacuucuccgacgacaucgagcagcaggccgacaacaugaucaccgagaugcugcagaaggaguacauggagcggcaggggaagacgccccugggccucguggaccuguucguguucagcaccuccuucuaccugaucagcaucuuccugcaccucgucaagaucccgacccaccgccacaucguggggaaguccugccccaagccccaccggcugaaccacaugggcaucugcagcugcgggcuguacaagcagcccggcgugccggucaaguggaagcgcugaggacuaguuauaagacugacuagcccgaugggccucccaacgggcccuccuccccuccuugcaccgagauuaauaaaaaaaaaaaaaaaaaaaaaaaaaaaaaaaaaaaaaaaaaaaaaaaaaaaaaaaaaaaaaaaaaaaaaaaaaaaaaaaaaaaaaaaaaaaaaaaaaaaa

SEQ ID NO: 16644 - RNA, 1665 nt, Artificial Sequence
  mRNA product Design i-3 (A100) comprising derived and/or modified sequence from LASV(LM765-SLE-2012;Clade IV)__AIT17814__GPCmut1 (opt1)
aggagaaagcuuaccaugggccagaucgugaccuucuuccaggaggucccccacgugaucgaggaggugaugaacaucguccugaucgcccucagcauccuggccgugcugaaggggcucuacaacuucgcgaccugcggccugguggggcuggucacguuccuccugcugugcggccgcuccugcaccaccagccucuacaaggggguguacgagcugcagacccuggagcucaacauggagacgcugaacaugaccaugccgcuguccugcaccaagaacaacagccaccacuacaucauggugggcaacgagaccggccucgagcugacgcugaccaacaccuccaucaucgaccacaaguucugcaaccucagcgacgcccaccggaagaaccuguacgaccacgcccugauguccaucaucagcaccuuccaccucuccauccccaacuucaaccaguacgaggccaugagcugcgacuucaacgggggcaagaucuccguccaguacaaccugagccacuccuacgccaaggacgcggccgaccacugcgggacgguggccaacggcgugcugcagaccuucaugcgcauggccuggggcgggagcuacaucgcgcucgacuccggcugcgggcgcugggacugcaucaugaccagcuaccaguaccugaucauccagaacaccacgugggaggaccacugccaguucucccggcccagccccaucggcuaccuggggcuccugucccagcgcacccgggacaucuacaucagccgccggcgccggggcaccuucaccuggacgcugagcgacuccgagggcaaggacacccccgggggcuacugccugacccgcuggaugcucaucgaggccgagcugaagugcuucgggaacaccgccgucgccaagugcaacgagaagcacgacgaggaguucugcgacaugcugcggcuguucgacuucaacaagcaggccauccagcgccugaaggcgcccgcccagaugagcauccagcugaucaacaaggccgugaacgcccucaucaacgaccagcugaucaugaagaaccaccuccgggacaucaugugcauccccuacugcaacuacuccaaguacugguaccucaaccacacgaccaccgggaagaccagccugcccaagugcuggcugguguccaacggcagcuaccucaacgagacgcacuucuccgacgacaucgagcagcaggccgacaacaugaucaccgagaugcugcagaaggaguacauggagcgccagggcaagaccccgcuggggcucgucgaccuguucguguucagcaccuccuucuaccugaucagcaucuuccugcaccucgugaagaucccgacgcaccggcacaucgucggcaagcccugccccaagccccaccgccugaaccacauggggaucugcuccugcggccuguacaagcagccgggggugcccgugaaguggaagcggugaggacuaguuauaagacugacuagcccgaugggccucccaacgggcccuccuccccuccuugcaccgagauuaauaaaaaaaaaaaaaaaaaaaaaaaaaaaaaaaaaaaaaaaaaaaaaaaaaaaaaaaaaaaaaaaaaaaaaaaaaaaaaaaaaaaaaaaaaaaaaaaaaaaa

SEQ ID NO: 16645 - RNA, 1665 nt, Artificial Sequence
  mRNA product Design i-3 (A100) comprising derived and/or modified sequence from LASV(LM776-SLE-2012;Clade IV)__AIT17824__GPCmut1 (opt1)
aggagaaagcuuaccaugggccagaucgugaccuucuuccaggaggucccccacgugaucgaggaggugaugaacaucguccugaucgcccucagcauccuggccgugcugaaggggcucuacaacuucgcgaccugcggccugguggggcuggucacguuccuccugcugugcggccgcuccugcaccaccagcguguacaaggggguguacgagcuccagacccuggagcugaacauggagacgcucaacaugaccaugccgcuguccugcaccaagaacaacagccaccacuacaucauggucggcaacgagaccggccuggagcucacgcugaccaacaccuccaucaucaaccacaaguucugcaaccugagcgacgcccacaagaagaaccucuacgaccacgcccugauguccaucaucagcaccuuccaccuguccauccccaacuucaaccaguacgaggccaugagcugcgacuucaacgggggcaagaucuccgugcaguacaaccucagccacuccuacgccggggacgcggccaaccacugcggcacgguggccaacgggguccugcagaccuucaugcggauggccuggggcggcagcuacaucgcgcuggacuccgggugcggcaagugggacugcaucaugaccagcuaccaguaccucaucauccagaacaccacgugggaggaccacugccaguucucccgccccagccccaucggguaccugggccugcucucccagcggacccgcgacaucuacaucagccggcgccgccggggcaccuucaccuggacgcucagcgacuccgaggggaaggacaccccgggcggguacugccugacccgguggaugcugaucgaggccgagcucaagugcuucggcaacaccgccguggccaagugcaacgagaagcacgacgaggaguucugcgacaugcugcgccuguucgacuucaacaagcaggccauccagcggcucaaggcgcccgcccagaugagcauccagcugaucaacaaggccgugaacgcccugaucaacgaccagcucaucaugaagaaccaccuccgcgacaucaugugcauccccuacugcaacuacuccaaguacugguaccugaaccacacgaccaccggcaagaccagccugcccaagugcuggcuggucuccaacggcagcuaccugaacgagacgcacuucuccgacgacaucgagcagcaggccgacaacaugaucaccgagaugcuccagaaggaguacauggagcggcaggggaagacgccccugggccugguggaccucuucguguucagcaccuccuucuaccugaucagcaucuuccugcaccuggucaagaucccgacccaccgccacaucguggggaaguccugccccaagccccaccggcucaaccacaugggcaucugcagcugcgggcuguacaagcagcccggcgugccgguccgcuggaagcggugaggacuaguuauaagacugacuagcccgaugggccucccaacgggcccuccuccccuccuugcaccgagauuaauaaaaaaaaaaaaaaaaaaaaaaaaaaaaaaaaaaaaaaaaaaaaaaaaaaaaaaaaaaaaaaaaaaaaaaaaaaaaaaaaaaaaaaaaaaaaaaaaaaaa

SEQ ID NO: 16646 - RNA, 1665 nt, Artificial Sequence
  mRNA product Design i-3 (A100) comprising derived and/or modified sequence from LASV(Mad39;Clade IV)__ANH09722__GPCmut1 (opt1)
aggagaaagcuuaccaugggccagaucgugaccuucuuccaggaggucccccacgugaucgaggaggugaugaacaucguccugaucgcccucagcauccuggccgugcugaaggggcucuacaacguggcgaccugcggccugaucgggcuggucacguuccuccugcugugcggccgcuccugcaccaccacccucuacaaggggguguacgagcugcaggcccuggagcucaacauggagacgcugaacaugaccaugccgcugagcugcaccaagaacaacucccaccacuacauccgggugggcaacgagaccggccucgagcugacgcugaccaacaccagccucaucaaccacaaguucugcaaccuguccgacgcccacaagaagaaccuguacgaccacgcccucaugagcaucaucuccaccuuccaccugagcauccccaacuucaaccaguacgaggccauguccugcgacuucaacgacgggaagaucagcguccaguacaaccugucccacacguacgcgggcgacaccgccaaccacugcgggaccguggccaacggcgugcuccagaccuucaugcgcauggccuggggcgggagcuacaucgcgcuggacuccggcugcgggggcugggacugcaucaugacgagcuaccaguaccugaucauccagaacaccaccugggaggaccacugccaguucucccggcccagccccaucggguaccucggccugcugucccagcggacccgcgacaucuacaucagccggcgccgccggggcacguucaccuggacccuguccgacagcgaggggaaggacaccccgggcggguacugccucacgcgguggaugcugaucgaggccgagcugaagugcuucggcaacaccgccgucgccaagugcaacgagaagcacgacgaggaguucugcgacaugcuccgccuguucgacuucaacaagcaggccauccagcggcugaaggcgcccgcccagaugagcauccagcucaucaacaaggccgugaacgcccugaucaacgaccagcugaucaugaagaaccaccuccgcgacaucaugugcauccccuacugcaacuacuccaaguacugguaccugaaccacaccgugaccggcaagacgagccugcccaagugcuggcucgucuccaacggcagcuaccugaacgagacccacuucuccgacgacaucgagcagcaggccgacaacaugaucaccgagaugcugcagaaggaguacauggagcggcaggggaagacgccccucggccugguggaccuguucguguucagcaccuccuucuaccugaucagcaucuuccuccaccuggucaagaucccgacccaccgccacgugguggggaagcccugccccaagccccaccggcugaaccacaugggcaucugcuccugcggguucuacaagcagccgggcguccccgugcgcuggaagcggugaggacuaguuauaagacugacuagcccgaugggccucccaacgggcccuccuccccuccuugcaccgagauuaauaaaaaaaaaaaaaaaaaaaaaaaaaaaaaaaaaaaaaaaaaaaaaaaaaaaaaaaaaaaaaaaaaaaaaaaaaaaaaaaaaaaaaaaaaaaaaaaaaaaa

SEQ ID NO: 16647 - RNA, 1665 nt, Artificial Sequence
  mRNA product Design i-3 (A100) comprising derived and/or modified sequence from LASV(Z0947-SLE-2011;Clade IV)__AIT17840__GPCmut1 (opt1)
aggagaaagcuuaccaugggccagaucgugaccuucuuccaggaggucccccacgugaucgaggaggugaugaacaucguccugaucgcccucagcauccuggccgugcugaaggggcucuacaacuucgcgaccugcggccugguggggcuggucacguuccuccugcugugcggccgcuccugcaccaucagccucuacaaggggguguacgagcugcagacccuggagcucaacauggagacccugaacaugacgaugccgcuguccugcaccaagaacaacagccaccacuacaucauggugggcaacgagaccggccucgagcugacccugacgaacaccuccaucaucaaccacaaguucugcaaccucagcgacgcccacaagaagaaccuguacgaccacgcccugauguccaucaucagcaccuuccaccucuccauccccaacuucaaccaguacgaggccaugagcugcgacuucaacgggggcaagaucuccguccaguacaaccugagccacuccuacgccggggacgcggccaaccacugcggcaccguggccaacggggugcugcagacguucaugcggauggccuggggcggcagcuacaucgcgcucgacuccgggugcgaccggugggacugcaucaugaccagcuaccaguaccugaucauccagaacaccaccugggaggaccacugccaguucucccgccccagccccaucggcuaccuggggcuccugucccagcggacgcgcgacaucuacaucagccggcgccgccggggcaccuucaccuggacccugagcgacuccgagggcaaggacacgcccgggggcuacugccugacccgguggaugcucaucgaggccgagcugaagugcuucgggaacaccgccgucgccaagugcaacgagaagcacgacgaggaguucugcgacaugcugcgccucuucgacuucaacaagcaggccauccagcggcugaaggcgcccgcccagaugagcauccagcugaucaacaaggccgugaacgcccucaucaacgaccagcugaucaugaagaaccaccuccgcgacaucaugugcauccccuacugcaacuacuccaaguacugguaccugaaccacaccacgaccgggaagaccagccugcccaagugcuggcugguguccaacggcagcuaccucaacgagacccacuucuccgacgacaucgagcagcaggccgacaacaugaucacggagaugcugcagaaggaguacauggagcggcagggcaagaccccgcuggggcucgucgaccuguucguguucagcaccuccuucuaccugaucagcaucuuccugcaccucgugaagaucccgacccaccgccacaucgucggcaagcccugccccaagccccaccggcugaaccacauggggaucugcuccugcggccuguacaagcagccgggggugcccgugaaguggaagcgcugaggacuaguuauaagacugacuagcccgaugggccucccaacgggcccuccuccccuccuugcaccgagauuaauaaaaaaaaaaaaaaaaaaaaaaaaaaaaaaaaaaaaaaaaaaaaaaaaaaaaaaaaaaaaaaaaaaaaaaaaaaaaaaaaaaaaaaaaaaaaaaaaaaaa

SEQ ID NO: 16648 - RNA, 1665 nt, Artificial Sequence
  mRNA product Design i-3 (A100) comprising derived and/or modified sequence from LASV(Josiah;Clade IV)__NP_694870__GPCmut1 (opt1)
aggagaaagcuuaccaugggccagaucgugaccuucuuccaggaggucccccacgugaucgaggaggugaugaacaucguccugaucgcccucagcgugcuggccgugcugaaggggcucuacaacuucgcgaccugcggccuggucgggcuggugacguuccuccugcugugcggccgcuccugcaccaccagccucuacaaggggguguacgagcugcagacccuggagcucaacauggagacgcugaacaugaccaugccgcuguccugcaccaagaacaacagccaccacuacaucauggucggcaacgagaccggccucgagcugacgcugaccaacaccuccaucaucaaccacaaguucugcaaccucagcgacgcccacaagaagaaccuguacgaccacgcccugauguccaucaucagcaccuuccaccucuccauccccaacuucaaccaguacgaggccaugagcugcgacuucaacgggggcaagaucuccgugcaguacaaccugagccacuccuacgccggggacgcggccaaccacugcggcacgguggccaacgggguccugcagaccuucaugcggauggccuggggcggcagcuacaucgcgcucgacuccgggugcggcaacugggacugcaucaugaccagcuaccaguaccugaucauccagaacaccacgugggaggaccacugccaguucucccgccccagccccaucggguaccugggccuccugucccagcggacccgcgacaucuacaucagccggcgccggcgcggcaccuucaccuggacgcugagcgacuccgaggggaaggacaccccgggcggguacugccucacccgguggaugcugaucgaggccgagcugaagugcuucggcaacaccgccguggccaagugcaacgagaagcacgacgaggaguucugcgacaugcuccgccuguucgacuucaacaagcaggccauccagcggcugaaggcgcccgcccagaugagcauccagcucaucaacaaggccgugaacgcccugaucaacgaccagcugaucaugaagaaccaccuccgcgacaucaugugcauccccuacugcaacuacuccaaguacugguaccugaaccacacgaccaccgggcggaccagccugcccaagugcuggcucgucuccaacggcagcuaccugaacgagacgcacuucuccgacgacaucgagcagcaggccgacaacaugaucaccgagaugcugcagaaggaguacauggagcgccagggcaagaccccgcucgggcugguggaccuguucguguucagcaccuccuucuaccucaucagcaucuuccugcaccuggucaagauccccacgcaccggcacaucgugggcaaguccugccccaagccccaccgccugaaccacauggggaucugcagcugcggccucuacaagcagccgggggugcccgucaaguggaagcggugaggacuaguuauaagacugacuagcccgaugggccucccaacgggcccuccuccccuccuugcaccgagauuaauaaaaaaaaaaaaaaaaaaaaaaaaaaaaaaaaaaaaaaaaaaaaaaaaaaaaaaaaaaaaaaaaaaaaaaaaaaaaaaaaaaaaaaaaaaaaaaaaaaaa

SEQ ID NO: 16649 - RNA, 1662 nt, Artificial Sequence
  mRNA product Design i-3 (A100) comprising derived and/or modified sequence from LASV(LP;Clade I)__AAF86701__GPCmut1 (opt1)
aggagaaagcuuaccaugggccagaucaucaccuucuuccaggaggugccccacgucaucgaggaggugaugaacaucgugcugaucgcccucagccugcuggccauccucaaggggcuguacaacaucgcgaccugcggcaucaucgggcuggucgccuuccucuuccugugcggcaaguccugcagccugacgcucaagggcggguacgagcugcagacccuggagcucaacauggagacccugaacaugaccaugccgcuguccugcacgaagaacagcucccaccacuacauccgcgugggcaacgagaccgggcucgagcugacccugaccaacacgagcaucaucaaccacaaguucugcaaccucuccgacgcccacaagaagaaccuguacgaccacgcccugaugagcaucaucuccaccuuccaccucagcauccccaacuucaaccaguacgaggccauguccugcgacuucaacggcgggaagaucagcgugcaguacaaccugucccacagcuacgcgggcgacgccgccgagcacugcgggaccgucgccaacggcgugcugcagaccuucaugcggauggcguggggcgggcgcuacaucgcccucgacuccggcugcgggaacugggacugcaucaugacgagcuaccaguaccugaucauccagaacaccaccugggaggaccacugccaguucucccggcccagccccaucggcuaccugggccuccugucccagcgcacccgggacaucuacaucagccgccggcgccgggggacguucaccuggacccugagcgacuccgagggcaacgagacccccgggggcuacugccucacgcgcuggaugcugaucgaggccgagcugaagugcuucgggaacaccgccguggccaagugcaacgagaagcacgacgaggaguucugcgacaugcuccggcuguucgacuucaacaagcaggcgauccgccggcugaaggccccggcccagaugagcauccagcucaucaacaaggccgucaacgcccugaucaacgaccagcugaucaugaagaaccaccuccgcgacaucaugugcauccccuacugcaacuacuccaaguacugguaccugaaccacaccagcuccggccggaccagccugcccaagugcuggcucaucuccaacggcagcuaccugaacgagacgcaguucuccgacgacaucgagcagcaggcggacaacaugaucaccgagaugcugcagaaggaguacaucgagcgccaggggaagaccccgcucggccugguggacaucuucaucuucagcaccuccuucuaccugaucagcaucuuccuccaccugaucaagauccccacgcaccggcacaucguggggaagcccugccccaagccgcaccgccugaaccacaugggcgucugcuccugcgggcuguacaagcaccccggcgugcccaccaaguggaagcggugaggacuaguuauaagacugacuagcccgaugggccucccaacgggcccuccuccccuccuugcaccgagauuaauaaaaaaaaaaaaaaaaaaaaaaaaaaaaaaaaaaaaaaaaaaaaaaaaaaaaaaaaaaaaaaaaaaaaaaaaaaaaaaaaaaaaaaaaaaaaaaaaaaaa

SEQ ID NO: 16650 - RNA, 1662 nt, Artificial Sequence
  mRNA product Design i-3 (A100) comprising derived and/or modified sequence from LASV(803213;Clade II)__AAF86703__GPCmut1 (opt1)
aggagaaagcuuaccaugggccagaucaucaccuucuuccaggaggugccccacgucaucgaggaggugaugaacaucgugcugaucgcccucagccugcuggccauccucaaggggaucuacaacgucgcgaccugcggccuguucgggcugaucuccuuccuccugcugugcggccgcagcugcuccgugacguacaaggggguguacgagcuccagacccuggagcugaacauggccaaccucaacaugaccaugccgcugagcugcaccaagaacaacucccaccacuacaucauggucggcaacgagacgggccuggagcucacccugaccaacaccagcaucaucaaccacaaguucugcaaccuguccgacgcccacaagaagaaccucuacgaccacgcccugaugagcaucaucuccacguuccaccugagcauccccaacuucaaccaguacgaggccauguccugcgacuucaacgggggcaagaucagcgugcaguacaaccucucccacagcuucgcgguggacgccgccaaccacugcgggaccaucgccaacggcguccugcagaccuucaugcggauggcguggggcggguccuacaucgcccuggacagcggcugcgggaacugggacugcaucaugaccuccuaccaguaccucaucauccagaacacgaccugggaggaccacugccaguucagccgccccucccccaucggcuaccuggggcugcucagccagcggacccgcgacaucuacaucagccggcgccggcgcggcaccuucacguggacccuguccgacagcgagggcaacgaggcccccgggggcuacugccugacccgguggaugcucaucgaggccgagcugaagugcuucgggaacaccgccguggcgaagugcaacgagaagcacgacgaggaguucugcgacaugcugcgccucuucgacuucaacaagcaggccaucaagcggcugaagacgccggcccagauguccauccagcugaucaacaaggccgugaacgcccucaucaacgaccagcugaucaugaagaaccaccuccgcgacaucaugugcauccccuacugcaacuacagccgguacugguaccugaaccacaccgucaccggcaagaccucccugccccgcugcuggcuggugagcaacggguccuaccucaacgagacgcacuucagcgacgacaucgagcagcaggcggacaacaugaucaccgagaugcugcagaaggaguacauggaccggcagggcaagaccccgcugggccucguggaccuguucgucuucuccaccagcuucuaccugaucuccaucuuccuccaccuggugaagauccccacgcaccgccacaucguggggaagcccugccccaagccgcaccggcugaaccacaugggcaucugcagcugcgggcuguacaagcaccccggcguccccgugaaguggaagcgcugaggacuaguuauaagacugacuagcccgaugggccucccaacgggcccuccuccccuccuugcaccgagauuaauaaaaaaaaaaaaaaaaaaaaaaaaaaaaaaaaaaaaaaaaaaaaaaaaaaaaaaaaaaaaaaaaaaaaaaaaaaaaaaaaaaaaaaaaaaaaaaaaaaaa

SEQ ID NO: 16651 - RNA, 1662 nt, Artificial Sequence
  mRNA product Design i-3 (A100) comprising derived and/or modified sequence from LASV(GA391;Clade III)__CAA36645__GPCmut1 (opt1)
aggagaaagcuuaccaugggccagaucgugaccuucuuccaggaggucccccacgugaucgaggaggugaugaacaucguccugaucgcccucagcauccuggccauccugaaggggcucuacaacguggcgaccugcggccugaucgggcuggugacguuccuccugcuguccggccgcagcugcucccucaucuacaaggggaccuacgagcugcagacccuggagcucaacauggagacccugaacaugacgaugccgcugagcugcaccaagaacaacucccaccacuacauccgggucggcaacgagaccggccucgagcugacccugacgaacaccagcauccucaaccacaaguucugcaaccuguccgacgcccacaagcgcaaccuguacgaccacagccucauguccaucaucagcaccuuccaccuguccauccccaacuucaaccaguacgaggccaugagcugcgacuucaacgggggcaagaucaccgugcaguacaaccugucccacagcuucgccguggacgccgcggggcacugcggcacgcucgccaacgggguccugcagaccuucaugcggauggccuggggcggcuccuacaucgcccuggacagcgggugcggcaacugggacugcaucaugaccuccuaccaguaccucaucauccagaacaccacgugggacgaccacugccaguucagccgccccucccccaucggguaccugggccugcucagccagcggacccgcgacaucuacaucagccggcgccggcgcggcaccuucaccuggacgcuguccgacagcgaggggaacgagaccccgggcggguacugccugacccgguggaugcucaucgaggcggagcugaagugcuucggcaacaccgccguggccaagugcaacgagaagcacgacgaggaguucugcgacaugcugcgccucuucgacuucaacaagcaggccauccggcgccugaagacgcccgcccagauguccauccagcugaucaacaaggcggugaacgcccucaucaacgaccagcugaucaugaagaaccaccuccgggacaucaugugcauccccuacugcaacuacagccgcuacugguaccugaaccacaccuccaccgggaagaccagccugccccggugcuggcugaucuccaacggcagcuaccucaacgagacgaaguucuccgacgacaucgagcagcaggccgacaacaugaucaccgagaugcugcagaaggaguacaucgaccgccagggcaagaccccgcuggggcucgucgaccuguucguguucagcaccuccuucuaccugaucagcaucuuccugcaccucgugaagauccccacgcaccggcacaucgucggcaagcccugccccaagccgcaccgccugaaccacauggggaucugcuccugcggccuguacaagcagcccggggugcccgugcgguggaagcgcugaggacuaguuauaagacugacuagcccgaugggccucccaacgggcccuccuccccuccuugcaccgagauuaauaaaaaaaaaaaaaaaaaaaaaaaaaaaaaaaaaaaaaaaaaaaaaaaaaaaaaaaaaaaaaaaaaaaaaaaaaaaaaaaaaaaaaaaaaaaaaaaaaaaa

SEQ ID NO: 16652 - RNA, 1665 nt, Artificial Sequence
  mRNA product Design i-3 (A100) comprising derived and/or modified sequence from LASV(AV;Clade V)__CCA30314__GPCmut1 (opt1)
aggagaaagcuuaccaugggccagaucgugaccuucuuccaggaggucccccacgugaucgaggaggugaugaacaucguccugaucgcccucagcauccuggccgugcugaaggggcucuacaacaucgcgaccugcggccugaucgggcugaucacguuccuccugcugugcggccgcuccugcagcuccaaccucuacaaggggguguacgagcugcagagccuggaccucaacauggagacccugaacaugaccaugccgcuguccugcaccaagaacaacagccaccacuacauccgggucggcaacgacacgggccucgagcugacccugaccaacaccuccauccucaaccacaaguucugcaaccugagcgacgcccacaagaaggaccuguacgaccacgcccucauguccaucaucagcacguuccaccuguccauccccaacuucaaccaguacgaggccaugagcugcgacuucaacgggggcaagaucuccgugcaguacaaccugagccacuccuacgccaucgacgcggccaaccacugcgggaccguggccaacggcauccuccagaccuucaugcgcauggccuggggcgggagcuacaucgcgcuggacuccggcugcgggaacugggacugcaucaugaccagcuaccaguaccugaucauccagaacacgaccugggagaaccacugccaguucucccggcccagccccaucggcuaccucgggcugcugagccagcgcacccgggacaucuacaucucccgccggcgccggggcaccuucacguggacccucagcgacuccgagggcaacgccacccccgggggcuacugccugacccgcuggaugcugaucgaggccgagcucaagugcuucgggaacacggccgucgccaagugcaacgagaagcacgacgaggaguucugcgacaugcugcggcuguucgacuucaacaagcaggcgaucagccgccucaaguccccggcccagaugagcauccagcugaucaacaaggccgugaacgcccugaucaacgaccagcucaucaugaagaaccaccuccgggacaucaugugcauccccuacugcaacuacuccaaguacugguaccugaaccacaccaucaccggcaagaccagccugcccaagugcuggcugguguccaacgggagcuaccugaacgagacgcacuucuccgacgacaucgagcagcaggccgacaacaugaucaccgagaugcuccagaaggaguacauggagcgccagggcaagaccccgcugggccuggucgaccucuucguguucagcaccuccuucuaccugaucagcaucuuccugcggcuggugaagauccccacgcaccgccacaucgucgggaagcccugccccaagccgcaccggcucaaccacaugggcaucugcuccugcgggcuguacaagcagcccggcgugcccgugcgcuggaagcggugaggacuaguuauaagacugacuagcccgaugggccucccaacgggcccuccuccccuccuugcaccgagauuaauaaaaaaaaaaaaaaaaaaaaaaaaaaaaaaaaaaaaaaaaaaaaaaaaaaaaaaaaaaaaaaaaaaaaaaaaaaaaaaaaaaaaaaaaaaaaaaaaaaaa

SEQ ID NO: 16653 - RNA, 1662 nt, Artificial Sequence
  mRNA product Design i-3 (A100) comprising derived and/or modified sequence from LASV(Togo/2016/7082;Clade VI)__AMR44577__GPCmut1 (opt1)
aggagaaagcuuaccaugggccagaucaucaccuucuuccaggaggugccccacgucaucgaggaggugaugaacaucgugcugaucgcccucagccugcuggccauccucaagggggucuacaacguggcgaccugcggcaucaucgggcuggugacguuccuguuccucugcggccgcuccugcagccugaucuacaagggguccuacgagcugcagacccucgagcugaacauggagacccugaacaugaccaugccgcucagcugcacgaagaacuccagccaccacuacauccgggucggcaacgagaccggccuggagcugacccucaccaacacguccaucaucaaccacaaguucugcaaccugagcgacgcccacaagcgcaaccuguacgaccacgcccucauguccauccugagcaccuuccaccuguccauccccaacuucaaccaguacgaggccaugagcugcgacuucaacgggggcaagaucuccgugcaguacaaccucagccacgccuacgcgguggacgccgccgagcacugcgggaccgucgccaacggcgugcugcagaccuucaugcggauggcguggggcggguccuacaucgcccuggacagcggcugcgggaacugggacugcaucaugacguccuaccaguaccucaucauccagaacaccaccugggaggaccacugccaguucagccgccccucccccaucggcuaccuggggcugcucagccagcggacccgcgacaucuacaucagccggcgccggcgcggcacguucaccuggacccuguccgacagcgagggcaacgagacccccgggggcuacugccugacgcgguggaugcucaucgaggccgagcugaagugcuucgggaacaccgccguggccaagugcaacgagaagcacgacgaggaguucugcgacaugcugcgccucuucgacuucaacaagcaggcgauccagcggcugaaguccccggcccagaugagcauccagcugaucaacaaggccgucaacgcccucaucaacgaccagcugaucaugaagaaccaccuccgcgacaugaugugcauccccuacugcaacuacuccaaguacugguaccugaaccacaccagcuccggccggaccagccugcccaagugcuggcugguguccaacgggagcuaccucaacgagacgcacuucuccgacgacaucgagcagcaggccgacaacaugaucaccgagaugcugcagaaggaguacaucgaccgccagggcaagaccccgcugggccucguggaccuguucgucuucagcaccuccuucuaccugaucagcaucuuccuccaccugaucaagauccccacgcaccggcacaucguggggaagcccugccccaagccgcaccgccugaaccacaugggcaucugcuccugcgggcuguacaagcagcccggcgugcccacccgguggaagcgcugaggacuaguuauaagacugacuagcccgaugggccucccaacgggcccuccuccccuccuugcaccgagauuaauaaaaaaaaaaaaaaaaaaaaaaaaaaaaaaaaaaaaaaaaaaaaaaaaaaaaaaaaaaaaaaaaaaaaaaaaaaaaaaaaaaaaaaaaaaaaaaaaaaaa

SEQ ID NO: 16654 - RNA, 1662 nt, Artificial Sequence
  mRNA product Design i-3 (A100) comprising derived and/or modified sequence from LASV(KAK-428;Clade n.d. (VII))__ANH09740__GPCmut1 (opt1)
aggagaaagcuuaccaugggccagaucgugaccuucuuccaggaggucccccacgugaucgaggaggugaugaacaucguccugaucgcccucagccugcuggccauccucaaggggcuguacaacuucgcgaccugcggcgugaucgggcugaucacguuccuccugcugugcggccgcuccugcagcgccaccuacaaggggcaguacgagcuccagacccuggagcugaacauggagucccucaacaugaccaugccgcugagcugcacgaagaacaacucccaccacuacauccgggccggcaacaacaccggccuggagcucacccugaccaacacgagcaucaucucccacaaguucugcaaccugagcgacgcccacaagaagaaccucuacgaccacacccugauguccaucaucaccaccuuccaccugagcauccccaacuucaaccaguacgaggccauguccugcgacuucaacgggggcaagaucagcauccaguacaaccucucccacagcuacgcgggggacgccgcccagcacugcggcacgguggccaacgggguccugcagaccuucaugcgcauggcguggggcggcuccuaccuggcccucgacagcgggugccggggcugggacugcaucaucuccagcuaccaguaccugaucauccagaacaccaccugggacgaccacugccaguucucccgccccagccccaucggguaccugggcuucgugagccagaagacgcgggacaucuacaucucccgccggcgccggggcaccuucaccuggacccucagcgacuccgaggggcacgacaugccgggcggguacugccugacgcgcuggaugcugaucgaggccgaccucaagugcuucggcaacaccgccguggccaagugcaacgagaagcacgacgaggaguucugcgacauguggcggcuguucgacuucaacaagcaggcgauccagcgccugaaggcccccgcccagaugaacauccagcucaucaacaaggccgucaacgcccugaucaacgaccagcugaugaugaagaaccaccuccgggacaucaugugcauccccuacugcaacuacagcaaguucugguaccugaacaacaccaccacggggcgcaccucccugccccggugcuggcucaucagcaacggcuccuaccugaacgagacccacuucagcgacgacaucgagcagcaggcggacaacaugaucaccgagaugcugcagaaggaguacauggaccgccagggcaagacgccgcucgggcugguggaccuguucguguucuccaccagcuucuaccucaucaccaucuuccugcaccuggucaagauccccacccaccggcacaucgugggcaagcccugccccaagccgcaccgccucaaccacauggggaucugcuccugcggccuguacaagcagcccggggugcccguccgguggaagcgcugaggacuaguuauaagacugacuagcccgaugggccucccaacgggcccuccuccccuccuugcaccgagauuaauaaaaaaaaaaaaaaaaaaaaaaaaaaaaaaaaaaaaaaaaaaaaaaaaaaaaaaaaaaaaaaaaaaaaaaaaaaaaaaaaaaaaaaaaaaaaaaaaaaaa

SEQ ID NO: 16655 - RNA, 1662 nt, Artificial Sequence; identical to SEQ ID NO: 16649
  mRNA product Design i-3 (A100) comprising derived and/or modified sequence from LASV(Pinneo-NIG-1969;Clade I)__AIT17836__GPCmut1 (opt1)

SEQ ID NO: 16656 - RNA, 1662 nt, Artificial Sequence
  mRNA product Design i-3 (A100) comprising derived and/or modified sequence from LASV(ISTH0009-NIG-2011;Clade II)__AIT17404__GPCmut1 (opt1)
aggagaaagcuuaccaugggccagaucaucaccuucuuccaggaggugccccacgucaucgaggaggugaugaacaucgugcugaucgcccucagccugcuggccauccucaaggggaucuacaacgucgcgaccugcggccuguucgggcugguguccuuccuccugcugugcggccgcagcugcuccacgaccuacaaggggguguacgagcuccagacccuggagcuggacauggccagccucaacaugaccaugccgcuguccugcacgaagaacaacagccaccacuacaucauggucggcaacgagaccggccuggagcucacccugaccaacacguccaucaucaaccacaaguucugcaaccugagcgacgcccacaagaagaaccucuacgaccacgcccugauguccaucaucagcaccuuccaccuguccauccccaacuucaaccaguacgaggccaugagcugcgacuucaacgggggcaagaucuccgugcaguacaaccucagccacgcguacgccguggacgccgccaaccacugcgggaccaucgcgaacggcguccugcagaccuucaugcggauggccuggggcggguccuacaucgcccuggacagcggcugcggguccugggacugcaucaugacgagcuaccaguaccucaucauccagaacaccaccugggaggaccacugccaguucucccgccccagccccaucggcuaccuggggcugcucagccagcggacccgcgacaucuacaucucccggcgccggcgcggcacguucaccuggacccugagcgacuccgagggcaacgagacccccgggggcuacugccugacgcgguggaugcucaucgaggccgagcugaagugcuucgggaacaccgccguggcgaagugcaacgagaagcacgacgaggaguucugcgacaugcugcgccucuucgacuucaacaagcaggccauccggcgccugaagaccccggcccagaugagcauccagcugaucaacaaggccgugaacgcccucaucaacgaccagcugaucaugaagaaccaccuccgggacaucaugugcauccccuacugcaacuacuccaaguacugguaccugaaccacaccgucacgggcaagaccagccugccccgcugcuggcugguguccaacgggagcuaccucaacgagacccacuucuccgacgacaucgagcagcaggcggacaacaugaucaccgagcugcugcagaaggaguacauggaccggcagggcaagacgccgcucggccugguggaccuguucgucuucagcaccuccuucuaccucaucagcaucuuccugcaccugaucaagauccccacccaccgccacaucaccgggaagcccugccccaagccgcaccggcugaaccacaugggcaucugcuccugcgggcucuacaagcaccccggcgugcccgugaaguggaagcgcugaggacuaguuauaagacugacuagcccgaugggccucccaacgggcccuccuccccuccuugcaccgagauuaauaaaaaaaaaaaaaaaaaaaaaaaaaaaaaaaaaaaaaaaaaaaaaaaaaaaaaaaaaaaaaaaaaaaaaaaaaaaaaaaaaaaaaaaaaaaaaaaaaaaa

SEQ ID NO: 16657 - RNA, 1662 nt, Artificial Sequence
  mRNA product Design i-3 (A100) comprising derived and/or modified sequence from LASV(ISTH2010-NIG-2012;Clade II)__AIT17482__GPCmut1 (opt1)
aggagaaagcuuaccaugggccagaucaucaccuucuuccaggaggugccccacgucaucgaggaggugaugaacaucgugcugaucgcccucagccugcuggccauccucaaggggaucuacaacgucgcgaccugcggccuguucgggcugguguccuuccuccugcugugcggccgcagcugcuccacgaccuacaaggggguguacgagcuccagacccuggagcuggacauggccagccucaacaugaccaugccgcuguccugcacgaagaacaacagccaccacuacaucauggucggcaacgagaccggccuggagcucacccugaccaacacguccaucaucaaccacaaguucugcaaccugagcgacgcccacaagaagaaccucuacgaccacgcccugauguccaucaucagcaccuuccaccuguccauccccaacuucaaccaguacgaggccaugagcugcgacuucaacgggggcaagaucuccgugcaguacaaccucagccacgcguacgccguggacgccgccaaccacugcgggaccaucgcgaacggcguccugcagaccuucaugcggauggccuggggcggguccuacaucgcccuggacagcggcugcggguccugggacugcaucaugacgagcuaccaguaccucaucauccagaacaucaccugggaggaccacugccaguucucccgccccagccccaucggcuaccuggggcugcucagccagcggacccgcgacaucuacaucucccggcgccggcgcggcaccuucacguggacccugagcgacuccgagggcaacgagacccccgggggcuacugccugacccgguggaugcucaucgaggccgagcugaagugcuucgggaacacggccguggcgaagugcaacgagaagcacgacgaggaguucugcgacaugcugcgccucuucgacuucaacaagcaggccauccggcgccugaagaccccggcccagaugagcauccagcugaucaacaaggccgugaacgcccucaucaacgaccagcugaucaugaagaaccaccuccgggacaucaugugcauccccuacugcaacuacuccaaguacugguaccugaaccacaccgucaccggcaagacgagccugccccgcugcuggcugguguccaacgggagcuaccucaacgagacccacuucuccgacgacaucgagcagcaggcggacaacaugaucaccgagcugcugcagaaggaguacaucgaccggcagggcaagaccccgcucggccugguggaccuguucgucuucagcacguccuucuaccucaucagcaucuuccugcaccuggugaagauccccacccaccgccacguggucgggaagcccugccccaagccgcaccggcugaaccacaugggcaucugcuccugcgggcucuacaagcaccccggcgugcccgugaaguggaagcgcugaggacuaguuauaagacugacuagcccgaugggccucccaacgggcccuccuccccuccuugcaccgagauuaauaaaaaaaaaaaaaaaaaaaaaaaaaaaaaaaaaaaaaaaaaaaaaaaaaaaaaaaaaaaaaaaaaaaaaaaaaaaaaaaaaaaaaaaaaaaaaaaaaaaa

SEQ ID NO: 16658 - RNA, 1662 nt, Artificial Sequence
  mRNA product Design i-3 (A100) comprising derived and/or modified sequence from LASV(Lassa virus/H.sapiens-wt/NGA/2015/ISTH_0543;Clade II)__AVO03639__GPCmut1 (opt1)
aggagaaagcuuaccaugggccagaucaucaccuucuuccaggaggugccccacgucaucgaggaggugaugaacaucgugcugaucgcccucagccugcuggccauccucaaggggaucuacaacgucgcgaccugcggccuguucgggcugguguccuuccuccugcugugcggccgcagcugcuccacgaccuacaaggggguguacgagcuccagacccuggagcuggacauggccaaccucaacaugaccaugccgcugagcugcacgaagaacaacucccaccacuacaucauggucggcaacgagaccggccuggagcucacccugaccaacacgagcaucaucaaccacaaguucugcaaccuguccgacgcccacaagaagaaccucuacgaccacgcccugaugagcaucaucuccaccuuccaccugagcauccccaacuucaaccaguacgaggccauguccugcgacuucaacgggggcaagaucagcgugcaguacaaccucucccacaccuacgcgguggacgccgccaaccacugcgggaccaucgccaacggcguccugcagacguucaugcggauggcguggggcgggagcuacaucgcccuggacuccggcugcgggagcugggacugcaucaugaccuccuaccaguaccucgugauccagaacaccaccugggaggaccacugccaguucagccgccccucccccaucggcuaccuggggcugcucagccagcggacgcgcgacaucuacaucagccggcgccggcgcggcaccuucaccuggacccuguccgacagcgagggcaacgagacgcccgggggcuacugccugacccgguggaugcucaucgaggccgagcugaagugcuucgggaacaccgccguggccaagugcaacgagaagcacgacgaggaguucugcgacaugcugcgccucuucgacuucaacaagcaggcgauccggcgccugaagaccccggcccagauguccauccagcugaucaacaaggccgucaacgcccucaucaacgaccagcugaucaugaagaaccaccuccgggacaucaugugcauccccuacugcaacuacagcaaguacugguaccugaaccacacggugaccggcaagaccucccugccccgcugcuggcuggugagcaacggguccuaccucaacgagacccacuucagcgacgacaucgagcagcaggccgacaacaugaucacggagcugcugcagaaggaguacaucgaccggcagggcaagaccccgcucggccuggucgaccuguucguguucuccaccagcuucuaccucaucuccaucuuccugcaccuggugaagauccccacccaccgccacaucacggggaagcccugccccaagccgcaccggcugaaccacaugggcaucugcagcugcgggcucuacaagcaccccggcguccccgugaaguggaagcgcugaggacuaguuauaagacugacuagcccgaugggccucccaacgggcccuccuccccuccuugcaccgagauuaauaaaaaaaaaaaaaaaaaaaaaaaaaaaaaaaaaaaaaaaaaaaaaaaaaaaaaaaaaaaaaaaaaaaaaaaaaaaaaaaaaaaaaaaaaaaaaaaaaaaa

SEQ ID NO: 16659 - RNA, 1662 nt, Artificial Sequence
  mRNA product Design i-3 (A100) comprising derived and/or modified sequence from LASV(Lassa virus/H.sapiens-wt/NGA/2016/ISTH_0009;Clade II)__AVO03571__GPCmut1 (opt1)
aggagaaagcuuaccaugggccagaucaucaccuucuuccaggaggugccccacgucaucgaggaggugaugaacaucgugcugaucgcccucagccugcuggccauccucaaggggaucuacaacgucgcgaccugcggccugcuggggcucguguccuuccugcugcucugcggccgcagcugcuccacgaccuacaaggggguguacgagcugcagacccuggagcucgacauggccagccugaacaugaccaugccgcuguccugcacgaagaacaacagccaccacuacaucauggucggcaacgagaccggccucgagcugacccugaccaacacguccaucaucaaccacaaguucugcaaccucagcgacgcccacaagaagaaccuguacgaccacgcccugauguccaucaucagcaccuuccaccucuccauccccaacuucaaccaguacgaggccaugagcugcgacuucaacgggggccggaucuccgugcaguacaaccugagccacuccuacgcgguggacgccgccaaccacugcgggaccaucgccaacggcguccugcagaccuucaugcgcauggcguggggcgggagcuacaucgcccucgacuccggcugcgggagcugggacugcaucaugacguccuaccaguaccugaucauccagaacaccaccugggaggaccacugccaguucagccggcccagccccaucggcuaccuggggcuccugucccagcgcacccgggacaucuacaucagccgccggcgccggggcacguucaccuggacccuguccgacagcgagggcaacgagacccccgggggcuacugccucacgcgcuggaugcugaucgaggccgagcugaagugcuucgggaacaccgccguggccaagugcaacgagaagcacgacgaggaguucugcgacaugcuccggcuguucgacuucaacaagcaggcgauccgccggcugaagaccccggcccagauguccauccagcucaucaacaaggccgugaacgcccugaucaacgaccagcugaucaugaagaaccaccuccgcgacaucaugugcauccccuacugcaacuacagcaaguacugguaccugaaccacaccgucacgggcaagaccucccugccccggugcuggcucgugagcaacggguccuaccugaacgagacccacuucagcgacgacaucgagcagcaggccgacaacaugaucaccgagcugcuccagaaggaguacaucgaccgccagggcaagacgccgcugggccugguggaccucuucgucuucuccaccagcuucuaccugaucuccaucuuccugcaccuggugaagauccccacccaccggcacaucaccgggaagcccugccccaagccgcaccgccucaaccacaugggcaucugcagcugcgggcuguacaaccaccccggcgugcccgucaaguggaagcggugaggacuaguuauaagacugacuagcccgaugggccucccaacgggcccuccuccccuccuugcaccgagauuaauaaaaaaaaaaaaaaaaaaaaaaaaaaaaaaaaaaaaaaaaaaaaaaaaaaaaaaaaaaaaaaaaaaaaaaaaaaaaaaaaaaaaaaaaaaaaaaaaaaaa

SEQ ID NO: 16660 - RNA, 1662 nt, Artificial Sequence
  mRNA product Design i-3 (A100) comprising derived and/or modified sequence from LASV(Lassa virus/H.sapiens-wt/NGA/2016/ISTH_0017;Clade II)__AVO03567__GPCmut1 (opt1)
aggagaaagcuuaccaugggccagaucaucaccuucuuccaggaggugccccacgucaucgaggaggugaugaacaucgugcugaucgcccucagccugcuggccauccucaaggggaucuacaacgucgcgaccugcggccuguucgggcugguguccuuccuccugcugugcggccgcagcugcuccacgaccuacaaggggguguacgagcuccagacccuggagcuggacauggccagccucaacaugaccaugccgcuguccugcacgaagaacaacagccaccacuacaucauggucggcaacgagaccggccuggagcucacccugaccaacacguccaucaucaaccacaaguucugcaaccugagcgacgcccacaagaagaaccucuacgaccacgcccugauguccaucaucagcaccuuccaccuguccauccccaacuucaaccaguacgaggccaugagcugcgacuucaacgggggcaagaucuccgugcaguacaaccucagccacaccuacgcgaucgacgccgccaaccacugcgggaccaucgccaacggcgugcugcagacguucaugcggauggcguggggcggguccuacaucgcccuggacagcggcugcggguccugggacugcaucaugaccagcuaccaguaccucaucauccagaacaccaccugggaggaccacugccaguucucccgccccagccccaucggcuaccuggggcugcucagccagcggacgcgcgacaucuacaucucccggcgccggcgcggcaccuucaccuggacccugagcgacuccgagggcaacgagacgcccgggggcuacugccugacccgguggaugcucaucgaggccgagcugaagugcuucgggaacaccgccgucgccaagugcaacgagaagcacgacgaggaguucugcgacaugcugcgccucuucgacuucaacaagcaggcgauccggcgccugaagaccccggcccagaugagcauccagcugaucaacaaggccgugaacgcccucaucaacgaccagcugaucaugaagaaccaccuccgggacaucaugugcauccccuacugcaacuacuccaaguacugguaccugaaccacacggugaccggcaagaccagccugccccgcugcuggcuggucuccaacgggagcuaccucaacgagacccacuucuccgacgacaucgagcagcaggccgacaacaugaucacggagcugcugcagaaggaguacauggaccggcagggcaagaccccgcucggccugguggaccuguucguguucagcaccuccuucuaccucaucagcaucuuccugcaccugguccgcauccccacccaccggcacgugaucgggaagcccugccccaagccgcaccgccugaaccacaugggcaucugcuccugcgggcucuacaagcaccccggcgugcccgucaaguggaagcggugaggacuaguuauaagacugacuagcccgaugggccucccaacgggcccuccuccccuccuugcaccgagauuaauaaaaaaaaaaaaaaaaaaaaaaaaaaaaaaaaaaaaaaaaaaaaaaaaaaaaaaaaaaaaaaaaaaaaaaaaaaaaaaaaaaaaaaaaaaaaaaaaaaaa

SEQ ID NO: 16661 - RNA, 1662 nt, Artificial Sequence
  mRNA product Design i-3 (A100) comprising derived and/or modified sequence from LASV(Lassa virus/H.sapiens-wt/NGA/2018/ISTH_0959;Clade II)__AVV65099__GPCmut1 (opt1)
aggagaaagcuuaccaugggccagaucaucaccuucuuccaggaggugccccacgucaucgaggaggugaugaacaucgugcugaucgcccucagccugcuggccauccucaaggggaucuacaacgucgugaccugcggccuguucgggcugguguccuuccuccugcugugcggccgcagcugcuccacgaccuacaagggggucuacgagcuccagacccuggagcuggacauggcgagccucaacaugaccaugccgcuguccugcacgaagaacaacagccaccacuacaucauggugggcaacgagaccggccuggagcucacccugaccaacacguccaucaucaaccacaaguucugcaaccugagcgacgcccacaagaagaaccucuacgaccacgcccugauguccaucaucagcaccuuccaccuguccauccccaacuucaaccaguacgaggccaugagcugcgacuucaacgggggcaagaucuccgugcaguacaaccucagccacgccuacgcgaucgacgccgccaaccacugcgggaccaucgccaacggcguccugcagaccuucaugcggauggcguggggcggguccuacaucgcccuggacagcggcugcggguccugggacugcaucaugacgagcuaccaguaccucaucauccagaacaccaccugggaggaccacugccaguucucccgccccagccccaucggcuaccuggggcugcucagccagcggacccgcgacaucuacaucucccggcgccggcgcggcacguucaccuggacccugagcgacuccgagggcaacgagacccccgggggcuacugccugacgcgguggaugcucaucgaggccgagcugaagugcuucgggaacaccgccguggccaagugcaacgagaagcacgacgaggaguucugcgacaugcugcgccucuucgacuucaacaagcaggcgauccggcgccugaagaccccggcccagaugagcauccagcugaucaacaaggccgugaacgcccucaucaacgaccagcugaucaugaagaaccaccuccgggacaucaugugcauccccuacugcaacuacuccaaguacugguaccugaaccacaccgucacgggcaagaccagccugccccgcugcuggcugguguccaacgggagcuaccucaacgagacccacuucuccgacgacaucgagcagcaggccgacaacaugaucaccgagcugcugcagaaggaguacaucgaccggcagggcaagacgccgcucggccugguggaccuguucgucuucagcaccuccuucuaccucaucagcaucuuccugcaccuggugaagauccccacccaccgccacgugaucgggaagcccugccccaagccgcaccggcugaaccacaugggcaucugcuccugcgggcucuacaagcaccccggcguccccgugaaguggaagcgcugaggacuaguuauaagacugacuagcccgaugggccucccaacgggcccuccuccccuccuugcaccgagauuaauaaaaaaaaaaaaaaaaaaaaaaaaaaaaaaaaaaaaaaaaaaaaaaaaaaaaaaaaaaaaaaaaaaaaaaaaaaaaaaaaaaaaaaaaaaaaaaaaaaaa

SEQ ID NO: 16662 - RNA, 1662 nt, Artificial Sequence
  mRNA product Design i-3 (A100) comprising derived and/or modified sequence from LASV(LASV003-NIG-2008;Clade II)__AIT17580__GPCmut1 (opt1)
aggagaaagcuuaccaugggccagaucaucaccuucuuccaggaggugccccacgucaucgaggaggugaugaacaucgugcugaucgcccucagccugcuggccauccucaaggggaucuacaacgucgcgaccugcggccuguucgggcugguguccuuccuccugcugugcggccgcagcugcuccacgaccuacaaggggguguacgagcuccagacccuggagcuggacauggccagccucaacaugaccaugccgcuguccugcacgaagaacaacagccaccacuacaucauggucggcaacgagaccggccuggagcucacccugaccaacacguccaucaucaaccacaaguucugcaaccugagcgacgcccacaagaagaaccucuacgaccacgcccugauguccaucaucagcaccuuccaccuguccauccccaacuucaaccaguacgaggccaugagcugcgacuucaacgggggcaagaucuccgugcaguacaaccucagccacaccuacgcgguggacgccgccaaccacugcgggaccaucgccaacggcguccugcagacguucaugcggauggcguggggcggguccuacaucgcccuggacagcggcugcggguccugggacugcaucaugaccagcuaccaguaccucaucauccagaacaccaccugggaggaccacugccaguucucccgccccagccccaucggcuaccuggggcugcucagccagcggacgcgcgacaucuacaucucccggcgccggcgcggcaccuucaccuggacccugagcgacuccgagagcaacgagacgccgggcggguacugccugacccgguggaugcucaucgaggccgagcugaagugcuucggcaacaccgccguggccaagugcaacgagaagcacgacgaggaguucugcgacaugcugcgccucuucgacuucaacaagcaggcgauccggcgccugaaggcccccgcccagauguccauccagcugaucaacaaggccgugaacgcccucaucaacgaccagcugaucaugaagaaccaccuccgggacaucaugugcauccccuacugcaacuacagcaaguacugguaccugaaccacaccgucacggggcgcaccucccugccccggugcuggcuggugagcaacggcuccuaccucaacgagacccacuucagcgacgacaucgagcagcaggcggacaacaugaucaccgagcugcugcagaaggaguacauggaccgccaggggaagacgccgcucggccugguggaccuguucgucuucuccaccagcuucuaccucaucuccaucuuccugcaccuggugaagauccccacccaccggcacgugaucggcaagcccugccccaagccgcaccgccugaaccacauggggaucugcagcugcggccucuacaagcaccccgggguccccgugaaguggaagcggugaggacuaguuauaagacugacuagcccgaugggccucccaacgggcccuccuccccuccuugcaccgagauuaauaaaaaaaaaaaaaaaaaaaaaaaaaaaaaaaaaaaaaaaaaaaaaaaaaaaaaaaaaaaaaaaaaaaaaaaaaaaaaaaaaaaaaaaaaaaaaaaaaaaa

SEQ ID NO: 16663 - RNA, 1662 nt, Artificial Sequence
  mRNA product Design i-3 (A100) comprising derived and/or modified sequence from LASV(LASV035-NIG-2009;Clade II)__AIT17588__GPCmut1 (opt1)
aggagaaagcuuaccaugggccagaucaucaccuucuuccaggaggugccccacgucaucgaggaggugaugaacaucgugcugaucgcccucagccugcuggccauccucaaggggaucuacaacgucgcgaccugcggccuguucgggcugguguccuuccuccugcugugcggccgcagcugcuccacgaccuacaaggggguguacgagcuccagacccuggagcuggacauggccagccucaacaugaccaugccgcuguccugcacgaagaacaacagccaccacuacaucauggucggcaacgagaccggccuggagcucacccugaccaacacguccaucaucaaccacaaguucugcaaccugagcgacgcccacaagaagaaccucuacgaccacgcccugauguccaucaucagcaccuuccaccuguccauccccaacuucaaccaguacgaggccaugagcugcgacuucaacgggggcaagaucuccgugcaguacaaccucagccacgcguacgccguggacgccgccaaccacugcgggaccaucgcgaacggcguccugcagaccuucaugcggauggccuggggcggguccuacaucgcccuggacagcggcugcggguccugggacugcaucaugacgagcuaccaguaccucaucauccagaacaccaccugggaggaccacugccaguucucccgccccagccccaucggcuaccuggggcugcucagccagcggacccgcgacaucuacaucucccggcgccggcgcggcacguucaccuggacccugagcgacuccgagggcaacgagacccccgggggcuacugccugacgcgguggaugcucaucgaggccgagcugaagugcuucgggaacaccgccguggcgaagugcaacgagaagcacgacgaggaguucugcgacaugcugcgccucuucgacuucaacaagcaggccauccggcgccugaaggccccggcccagaugagcauccagcugaucaacaaggccgugaacgcgcucaucaacgaccagcugaucaugaagaaccaccuccgggacaucaugugcauccccuacugcaacuacuccaaguacugguaccugaaccacaccgucaccggcaagacgagccugccccgcugcuggcugguguccaacgggagcuaccucaacgagacccacuucuccgacgacaucgagcagcaggccgacaacaugaucaccgagcugcugcagaaggaguacaucgaccggcagggcaagaccccgcucggccugguggaccuguucgucuucagcacguccuucuaccucaucagcaucuuccugcaccuggugaagauccccacccaccgccacgugaucgggaagcccugccccaagccgcaccggcugaaccacaugggcaucugcuccugcgggcucuacaagcaccccggcguccccgugaaguggaagcgcugaggacuaguuauaagacugacuagcccgaugggccucccaacgggcccuccuccccuccuugcaccgagauuaauaaaaaaaaaaaaaaaaaaaaaaaaaaaaaaaaaaaaaaaaaaaaaaaaaaaaaaaaaaaaaaaaaaaaaaaaaaaaaaaaaaaaaaaaaaaaaaaaaaaa

SEQ ID NO: 16664 - RNA, 1662 nt, Artificial Sequence
  mRNA product Design i-3 (A100) comprising derived and/or modified sequence from LASV(LASV1000-NIG-2009;Clade II)__AIT17782__GPCmut1 (opt1)
aggagaaagcuuaccaugggccagaucaucaccuucuuccaggaggugccccacgucaucgaggaggugaugaacaucgugcugaucgcccucagccugcuggccauccucaaggggaucuacaacgucgcgaccugcggccuguucgggcugguguccuuccuccugcugugcggccgcagcugcuccacgaccuacaaggggguguacgagcuccagacccuggagcuggacauggccagccucaacaugaccaugccgcuguccugcacgaagaacaacagccaccacuacaucauggucggcaacgagaccggccuggagcucacccugaccaacacguccaucaucaaccacaaguucugcaaccugagcgacgcccacaagaagaaccucuacgaccacgcccugauguccaucaucagcaccuuccaccuguccauccccaacuucaaccaguacgaggccaugagcugcgacuucaacgggggcaagaucuccgugcaguacaaccucagccacaccuacgcgguggacgccgccaaccacugcgggaccaucgccaacggcguccugcagacguucaugcggauggcguggggcggguccuacaucgcccuggacagcggcugcggguccugggacugcaucaugaccagcuaccaguaccucaucauccagaacaccaccugggaggaccacugccaguucucccgccccagccccaucggcuaccuggggcugcucagccagcggacgcgcgacaucuacaucucccggcgccggcgcggcaccuucaccuggacccugagcgacuccgagggcaacgagacgcccgggggcuacugccugacccgguggaugcucaucgaggccgagcugaagugcuucgggaacaccgccguggccaagugcaacgagaagcacgacgaggaguucugcgacaugcugcgccucuucgacuucaacaagcaggcgaucaagcggcugaagaccccggcccagaugagcauccagcugaucaacaaggccgugaacgcccucaucaacgaccagcugaucaugaagaaccaccuccgcgacaucaugugcauccccuacugcaacuacuccaaguacugguaccugaaccacacggucaccggcaagaccagccugccccggugcuggcugguguccaacgggagcuaccucaacgagacccacuucuccgacgacaucgagcagcaggccgacaacaugaucacggagcugcugcagaaggaguacaucgaccgccagggcaagaccccgcucggccugguggaccuguucgucuucagcaccuccuucuaccucaucagcaucuuccugcaccuggugaagauccccacccaccggcacguggucgggaagcccugccccaagccgcaccgccugaaccacaugggcaucugcuccugcgggcucuacaagcaccccggcgugcccgugaaguggaagcggugaggacuaguuauaagacugacuagcccgaugggccucccaacgggcccuccuccccuccuugcaccgagauuaauaaaaaaaaaaaaaaaaaaaaaaaaaaaaaaaaaaaaaaaaaaaaaaaaaaaaaaaaaaaaaaaaaaaaaaaaaaaaaaaaaaaaaaaaaaaaaaaaaaaa

SEQ ID NO: 16665 - RNA, 1662 nt, Artificial Sequence
  mRNA product Design i-3 (A100) comprising derived and/or modified sequence from LASV(LASV221-NIG-2010;Clade II)__AIT17624__GPCmut1 (opt1)
aggagaaagcuuaccaugggccagaucaucaccuucuuccaggaggugccccacgucaucgaggaggugaugaacaucgugcugaucgcccucagccugcuggccauccucaaggggaucuacaacgucgcgaccugcggccuguucgggcugguguccuuccuccugcugugcggccgcagcugcuccacgaccuacaaggggguguacgagcuccagacccuggagcuggacauggccagccucaacaugaccaugccgcuguccugcacgaagaacaacagccaccacuacaucauggucggcaacgagaccggccuggagcucacccugaccaacacguccaucaucaaccacaaguucugcaaccugagcgacgcccacaagaagaaccucuacgaccacgcccugauguccaucaucagcaccuuccaccuguccauccccaacuucaaccaguacgaggccaugagcugcgacuucaacgggggcaagaucuccgugcaguacaaccucagccacaccuacgcgaucgacgccgccaaccacugcgggaccaucgccaacggcgugcugcagacguucaugcggauggcguggggcggguccuacaucgcccuggacagcggcugcggguccugggacugcaucaugaccagcuaccaguaccucaucauccagaacaccaccugggaggaccacugccaguucucccgccccagccccaucggcuaccuggggcugcucagccagcggacgcgcgacaucuacaucucccggcgccggcgcggcaccuucaccuggacccugagcgacuccgagggcaacgagacgcccgggggcuacugccugacccgguggaugcucaucgaggccgagcugaagugcuucgggaacaccgccgucgccaagugcaacgagaagcacgacgaggaguucugcgacaugcugcgccucuucgacuucaacaagcaggcgauccggcgccugaagaccccggcccagaugagcauccagcugaucaacaaggccgugaacgcccucaucaacgaccagcugaucaugaagaaccaccuccgggacaucaugugcauccccuacugcaacuacuccaaguacugguaccugaaccacacggugaccggcaagaccagccugccccgcugcuggcuggucuccaacgggagcuaccucaacgagacccacuucuccgacgacaucgagcagcaggccgacaacaugaucacggagaugcugcagaaggaguacauggaccggcagggcaagaccccgcugggccucguggaccuguucguguucagcaccuccuucuaccugaucagcaucuuccuccaccuggucaagauccccacccaccgccacgugaucgggaagcccugccccaagccgcaccggcugaaccacaugggcaucugcuccugcgggcuguacaagcaccccggcgugcccgucaaguggaagcgcugaggacuaguuauaagacugacuagcccgaugggccucccaacgggcccuccuccccuccuugcaccgagauuaauaaaaaaaaaaaaaaaaaaaaaaaaaaaaaaaaaaaaaaaaaaaaaaaaaaaaaaaaaaaaaaaaaaaaaaaaaaaaaaaaaaaaaaaaaaaaaaaaaaaa

SEQ ID NO: 16666 - RNA, 1662 nt, Artificial Sequence
  mRNA product Design i-3 (A100) comprising derived and/or modified sequence from LASV(LASV237-NIG-2010;Clade II)__AIT17638__GPCmut1 (opt1)
aggagaaagcuuaccaugggccagaucaucaccuucuuccaggaggugccccacgucaucgaggaggugaugaacaucgugcugaucgcccucagccugcuggccauccucaaggggaucuacaacgucgcgaccugcggccuguucgggcugguguccuuccuccugcugugcggccgcagcugcuccacgaccuacaaggggguguacgagcuccagacccuggagcuggacauggccagccucaacaugaccaugccgcuguccugcacgaagaacaacagccaccacuacaucauggucggcaacgagaccggccuggagcucacccugaccaacacguccaucaucaaccacaaguucugcaaccugagcgacgcccacaagaaggaccucuacgaccacgcccugauguccaucaucagcaccuuccaccuguccauccccaacuucaaccaguacgaggccaugagcugcgacuucaacgggggcaagaucuccgugcaguacaaccucagccacaccuacgcgguggacgccgccaaccacugcgggaccaucgccaacggcguccugcagacguucaugcggauggcguggggcggguccuacaucgcccuggacagcggcugcggguccugggacugcaucaugaccagcuaccaguaccucaucauccagaacaccaccugggaggaccacugccaguucucccgccccagccccaucggcuaccuggggcugcucagccagcggacgcgcgacaucuacaucucccggcgccggcgcggcaccuucaccuggacccugagcgacuccgagggcaacgagacgcccgggggcuacugccugacccgguggaugcucaucgaggccgagcugaagugcuucgggaacaccgccguggccaagugcaacgagaagcacgacgaggaguucugcgacaugcugcgccucuucgacuucaacaagcaggcgauccggcgccugaagaccccggcccagaugagcauccagcugaucaacaaggccgugaacgcccucaucaacgaccagcugaucaugaagaaccaccuccgggacaucaugugcauccccuacugcaacuacuccaaguacugguaccugaaccacacggucaccggcaagaccagccugccccgcugcuggcugguguccaacgggagcuaccucaacgagacccacuucuccgacgacaucgagcagcaggccgacaacaugaucacggagcugcugcagaaggaguacauggaccggcagggcaagaccccgcucggccugguggaccuguucgucuucagcaccuccuucuaccucaucagcaucuuccugcaccugaucaagauccccacccaccgccacaucacggggaagcccugccccaagccgcaccggcugaaccacaugggcaucugcuccugcgggcucuacaagcaccccggcgugcccgugaaguggaagcgcugaggacuaguuauaagacugacuagcccgaugggccucccaacgggcccuccuccccuccuugcaccgagauuaauaaaaaaaaaaaaaaaaaaaaaaaaaaaaaaaaaaaaaaaaaaaaaaaaaaaaaaaaaaaaaaaaaaaaaaaaaaaaaaaaaaaaaaaaaaaaaaaaaaaa

SEQ ID NO: 16667 - RNA, 1662 nt, Artificial Sequence
  mRNA product Design i-3 (A100) comprising derived and/or modified sequence from LASV(LASV253-NIG-2011;Clade II)__AIT17670__GPCmut1 (opt1)
aggagaaagcuuaccaugggccagaucaucaccuucuuccaggaggugccccacgucaucgaggaggugaugaacaucgugcugaucgcccucagccugcuggccauccucaaggggaucuacaacgucgcgaccugcggccuguucgggcugguguccuuccuccugcugugcggccgcagcugcuccacgaccuacaaggggguguacgagcuccagacccuggagcuggacauggccagccucaacaugaccaugccgcuguccugcacgaagaacaacagccaccacuacaucauggucggcaacgagaccggccuggagcucacccugaccaacacguccaucaucaaccacaaguucugcaaccugagcgacgcccacaagaagaaccucuacgaccacgcccugauguccaucaucagcaccuuccaccuguccauccccaacuucaaccaguacgaggccaugagcugcgacuucaacgggggcaagaucuccgugcaguacaaccucagccacaccuacgcgguggacgccgccaaccacugcgggaccaucgccaacggcguccugcagacguucaugcggauggcguggggcggguccuacaucgcccuggacagcggcugcggguccugggacugcaucaugaccagcuaccaguaccucaucauccagaacaccaccugggaggaccacugccaguucucccgccccagccccaucggcuaccuggggcugcucagccagcggacgcgcgacaucuacaucucccggcgccggcgcggcaccuucaccuggacccugagcgacuccgagggcaacgagacgcccgggggcuacugccugacccgguggaugcucaucgaggccgagcugaagugcuucgggaacaccgccguggccaagugcaacgagaagcacgacgaggaguucugcgacaugcugcgccucuucgacuucaacaagcaggcgauccggcgccugaaggccccggcccagaugagcauccagcugaucaacaaggccgugaacgcccucaucaacgaccagcugaucaugaagaaccaccuccgggacaucaugugcauccccuacugcaacuacuccaaguacugguaccugaaccacaccgucacgggccgcaccagccugccccggugcuggcugguguccaacgggagcuaccucaacgagacccacuucuccgacgacaucgagcagcaggcggacaacaugaucaccgagcugcugcagaaggaguacaucgaccgccagggcaagacgccgcucggccugguggaccuguucgucuucagcaccuccuucuaccucaucagcaucuuccugcaccuggugaagauccccacccaccggcacaucaucgggaagcccugccccaagccgcaccgccugaaccacaugggcaucugcuccugcgggcucuacaagcaccccggcgugcccgucaaguggaagcggugaggacuaguuauaagacugacuagcccgaugggccucccaacgggcccuccuccccuccuugcaccgagauuaauaaaaaaaaaaaaaaaaaaaaaaaaaaaaaaaaaaaaaaaaaaaaaaaaaaaaaaaaaaaaaaaaaaaaaaaaaaaaaaaaaaaaaaaaaaaaaaaaaaaa

SEQ ID NO: 16668 - RNA, 1662 nt, Artificial Sequence
  mRNA product Design i-3 (A100) comprising derived and/or modified sequence from LASV(LASV254-NIG-2011;Clade II)__AIT17674__GPCmut1 (opt1)
aggagaaagcuuaccaugggccagaucaucaccuucuuccaggaggugccccacgucaucgaggaggugaugaacaucgugcugaucgcccucagccugcuggccauccucaaggggaucuacaacgucgcgaccugcggccuguucgggcugguguccuuccuccugcugugcggccgcagcugcuccacgaccuacaaggggguguacgagcuccagacccuggagcuggacaugaccaaccucaacaugacgaugccgcugagcugcaccaagaacaacucccaccacuacaucauggucggcaacgagaccggccuggagcucacccugacgaacaccagcaucaucaaccacaaguucugcaaccuguccgacgcccacaagaagaaccucuacaaccacgcccugaugagcaucaucuccaccuuccaccugagcauccccaacuucaaccaguacgaggccauguccugcgacuucaacgggggcaagaucagcgugcaguacaaccucucccacagcuacgccguggacgcggccaaccacugcgggaccaucgccaacggcguccugcagacguucaugcggauggccuggggcggguccuacaucgcgcuggacagcggcugcgggaacugggacugcaucaugaccuccuaccaguaccucaucauccagaacaccaccugggaggaccacugccaguucagccgccccucccccaucggcuaccuggggcugcucagccagcggacgcgcgacaucuacaucagccggcgccggcgcggcaccuucaccuggacccuguccgacagcgagggcaacgagacgcccgggggcuacugccugacccgguggaugcucaucgaggccgagcugaagugcuucgggaacaccgccguggccaagugcaacgagaagcacgacgaggaguucugcgacaugcugcgccucuucgacuucaacaagcaggccauccggcgccugaagaccccggcgcaggccaacauccagcugaucaacaaggccgugaacgcccucaucaacgaccagcugaucaugaagaaccaccuccgggacaucaugugcauccccuacugcaacuacuccaaguacugguaccugaaccacacggucaccggcaagaccagccugccccgcugcuggcugguguccaacgggagcuaccucaacgagacccacuucuccgacgacaucgagcagcaggccgacaacaugaucacggagcugcugcagaaggaguacauggaccggcagggcaagaccccgcucggccugguggaccuguucgucuucagcaccuccuucuaccucaucagcaucuuccugcaccuggugaagauccccacccaccgccacgugaucgggaagcccugccccaagccgcaccggcugaaccacaugggcaucugcuccugcgggcucuacaagcaccccggcguccccgugaaguggaagcgcugaggacuaguuauaagacugacuagcccgaugggccucccaacgggcccuccuccccuccuugcaccgagauuaauaaaaaaaaaaaaaaaaaaaaaaaaaaaaaaaaaaaaaaaaaaaaaaaaaaaaaaaaaaaaaaaaaaaaaaaaaaaaaaaaaaaaaaaaaaaaaaaaaaaa

SEQ ID NO: 16669 - RNA, 1662 nt, Artificial Sequence
  mRNA product Design i-3 (A100) comprising derived and/or modified sequence from LASV(Nig08-A19;Clade III)__ADU56618__GPCmut1 (opt1)
aggagaaagcuuaccaugggccagaucgugaccuucuuccaggaggucccccacgugaucgaggaggugaugaacaucguccugaucgcccucagcauccuggccauccugaaggggcucuacaacaucgcgaccugcggccugaucgggcuggugacguuccuccugcuguccggccgcagcugcuccaugaccuacaaggggguguacgagcuccagacccuggagcugaacaugaacacccucaacaugacgaugccgcugagcugcaccaagaacaacucccaccacuacaucauggucggcaacgagaccggccuggagcucacccugacgaacaccagccugcuccaccacaaguucugcaaccuguccgacgcccacaagaagaaccuguacgaccacacccucaugagcaucaucuccaccuuccaccugagcauccccaacuucaaccaguacgaggccauguccugcgacuucaacgggggcaagaucacggugcaguacaaccugagccacuccuacgccaucgacgccgcgaaccacugcgggaccguggccaacggcguccuccagaccuucaugcggauggccuggggcgggagcuacaucgcccuggacuccggcugcgggaagugggacugcaucaugaccagcuaccaguaccugaucauccagaacacgaccugggaggaccacugccaguucucccgccccagccccaucggcuaccucgggcugcugucccagcggacccgcgacaucuacaucagccggcgccggcgcggcaccuucacguggacccucagcgacuccgagggcaacgagacccccgggggcuacugccugacccgguggaugcugaucgaggcggagcucaagugcuucgggaacacggccguggccaagugcaacgagaagcacgacgaggaguucugcgacaugcugcgccuguucgacuucaacaagcaggccauccggcgccucaaggccccggcgcagaugagcauccagcugaucaacaaggccgugaacgcccugaucaacgaccagcucaucaugaagaaccaccuccgggacaucaugugcauccccuacugcaacuacuccaaguacugguaccugaaccacaccagcaccggccgcaccucccugccccggugcuggcuggucagcaacggguccuaccugaacgagacgcacuucagcgacgacaucgagcagcaggccgacaacaugaucaccgagaugcuccagaaggaguaccuggaccgccagggcaagaccccgcugggccucguggaccuguucguguucuccaccagcuucuaccugaucuccaucuuccugcaccucgucaagauccccacgcaccggcacaucguggggaagcccugccccaagccgcaccgccugaaccacaugggcaucugcagcugcgggcuguacaagcagcccggcgugcccguccgguggaagcgcugaggacuaguuauaagacugacuagcccgaugggccucccaacgggcccuccuccccuccuugcaccgagauuaauaaaaaaaaaaaaaaaaaaaaaaaaaaaaaaaaaaaaaaaaaaaaaaaaaaaaaaaaaaaaaaaaaaaaaaaaaaaaaaaaaaaaaaaaaaaaaaaaaaaa

SEQ ID NO: 16670 - RNA, 1665 nt, Artificial Sequence
  mRNA product Design i-3 (A100) comprising derived and/or modified sequence from LASV(G1180-SLE-2010;Clade IV)__AIT17168__GPCmut1 (opt1)
aggagaaagcuuaccaugggccagaucgugaccuucuuccaggaggucccccacgugaucgaggaggugaugaacaucguccugaucgcccucagcauccuggccgugcugaaggggcucuacaacuucgcgaccugcggccugguggggcugcucacguuccugcugcucugcggccgcuccugcaccgccagccgguacaagggggucuacgagcugcagacccuggagcucaacauggagacccugaacaugacgaugccgcuguccugcaccaagaacaacagccaccacuacaucauggugggcaacgagaccggccucgagcugacccugacgaacaccuccaucaucaaccacaaguucugcaaccucagcgacgcccacaagaagaaccuguacgaccacgcccugauguccaucaucagcaccuuccaccucuccauccccaacuucaaccaguacgaggccaugagcugcgacuucaacgggggcaagaucuccgugcaguacaaccugagccacuccuacgcgggggacgccgccaaccacugcggcaccgucgccaacggggugcugcagacguucaugcgcauggcguggggcggcagcuacaucgcccucgacuccgggugcggcagcugggacugcaucaugaccuccuaccaguaccugaucauccagaacaccaccugggaggaccacugccaguucagccggcccucccccaucggguaccugggccuccugagccagcgcacgcgggacaucuacaucagccgccggcgccggggcaccuucaccuggacccuguccgacagcgaggggaaggacacgccgggcggguacugccucacccgcuggaugcugaucgaggccgagcugaagugcuucggcaacaccgccguggccaagugcaacgagaagcacgacgaggaguucugcgacaugcuccggcuguucgacuucaacaagcaggcgauccagcgccugaaggcccccgcccagauguccauccagcucaucaacaaggccgucaacgcccugaucaacgaccagcugaucaugaagaaccaccuccgggacaucaugugcauccccuacugcaacuacagcaaguacugguaccugaaccacaccacgaccgggaagaccucccugcccaagugcuggcucgugagcaacggcuccuaccugaacgagacccacuucagcgacgacaucgagcagcaggcggacaacaugaucacggagaugcugcagaaggaguacauggagcgccagggcaagaccccgcucgggcugguggaccuguucgucuucuccaccagcuucuaccucaucuccaucuuccugcaccuggugaagauccccacccaccggcacaucgugggcaagagcugccccaagccccaccgccugaaccacauggggaucugcuccugcggccucuacaagcagccggggguccccgugaaguggaagcggugaggacuaguuauaagacugacuagcccgaugggccucccaacgggcccuccuccccuccuugcaccgagauuaauaaaaaaaaaaaaaaaaaaaaaaaaaaaaaaaaaaaaaaaaaaaaaaaaaaaaaaaaaaaaaaaaaaaaaaaaaaaaaaaaaaaaaaaaaaaaaaaaaaaa

SEQ ID NO: 16671 - RNA, 1665 nt, Artificial Sequence
  mRNA product Design i-3 (A100) comprising derived and/or modified sequence from LASV(G1442-SLE-2011;Clade IV)__AIT17180__GPCmut1 (opt1)
aggagaaagcuuaccaugggccagaucgugaccuucuuccaggaggucccccacgugaucgaggaggugaugaacaucguccugaucgcccucagcauccuggccgugcugaaggggcucuacaacguggcgaccugcggccugaucgggcuggucacguuccuccugcugugcggccgcuccugcaccaccacccucuacaaggggguguacgagcugcagacgcuggagcucaacauggagacccugaacaugaccaugccgcugagcugcaccaagaacaacucccaccacuacauccgggugggcaacgagacgggccucgagcugacccugaccaacaccagcaucaucaaccacaaguucugcaaccucuccgacgcccacaagaagaaccuguacgaccacgcccugaugagcaucaucuccacguuccaccucagcauccccaacuucaaccaguacgaggccauguccugcgacuucaacgggggcaagaucagcguccaguacaaccugucccacagcuacgccggggacgcggccaaccacugcggcaccguggccaacggggugcugcagaccuucaugcgcauggccuggggcggcuccuacaucgcgcucgacagcgggugcggcaacugggacugcaucaugaccuccuaccaguaccugaucauccagaacacgaccugggacgaccacugccaguucagccggcccucccccaucggguaccugggccuccugagccagcgcacccgggacgucuacaucucccgccggcgccggggcaccuucacguggacccugagcgacagcgaggggaaggacaccccgggcggguacugccucacccgcuggaugcugaucgaggccgagcugaagugcuucggcaacacggccguggccaagugcaacgagaagcacgacgaggaguucugcgacaugcuccggcuguucgacuucaacaagcaggccauccagcgccugaaggcgcccgcccagauguccauccagcucaucaacaaggccgugaacgcccugaucaacgaccagcugaucaugaagaaccaccuccgggacaucaugugcauccccuacugcaacuacagcaaguacugguaccugaacaacaccgccaccgggaagaccucccugcccaagugcuggcucaucagcaacggcuccuaccugaacgagacgcacuucagcgacgacaucgagcaggaggcggacaacaugaucaccgagaugcugcagaaggaguacauggagcgccagggcaagaccccgcucgggcuggucgaccuguucguguucuccaccagcuucuaccucaucuccaucuuccugcaccuggugaagauccccacgcaccggcacaucgucggcaagagcugccccaagccccaccgccugaaccacauggggaucugcuccugcggccucuacaagcagccgggggugcccgugcgguggaagcgcugaggacuaguuauaagacugacuagcccgaugggccucccaacgggcccuccuccccuccuugcaccgagauuaauaaaaaaaaaaaaaaaaaaaaaaaaaaaaaaaaaaaaaaaaaaaaaaaaaaaaaaaaaaaaaaaaaaaaaaaaaaaaaaaaaaaaaaaaaaaaaaaaaaaa

SEQ ID NO: 16672 - RNA, 1665 nt, Artificial Sequence
  mRNA product Design i-3 (A100) comprising derived and/or modified sequence from LASV(G3010-SLE-2013;Clade IV)__AIT17344__GPCmut1 (opt1)
aggagaaagcuuaccaugggccagaucgugaccuucuuccaggaggucccccacgugaucgaggaggugaugaacaucguccugaucgcccucagcauccuggccgugcugaaggggcucuacaacuucgcgaccugcggccugguggggcuggucacguuccuccugcugugcggccgcuccugcaccaccagccucuacaaggggguguacgagcugcagacccuggagcucaacauggagacgcugaacaugaccaugccgcuguccugcaccaagaacaacagccaccacuacaucauggugggcaacgagaccggccucgagcugacgcugaccaacaccuccaucaucaaccacaaguucugcaaccucagcgacgcccacaagaagaaccuguacaaccacgcccugauguccaucaucagcaccuuccaccucuccauccccaacuucaaccaguacgaggccaugagcugcgacuucaacgggggcaagaucuccguccaguacaaccugagccacuccuacgccggggacgcggccagccacugcggcacgguggccaacggggugcugcagaccuucaugcggauggccuggggcggcuccuacaucgcgcucgacagcgggugcggcaagugggacugcaucaugaccuccuaccaguaccugaucauccagaacaccacgugggaggaccacugccaguucagccgccccucccccaucggguaccugggccuccugagccagcggacccgcgacaucuacaucagccggcgccggcgcggcaccuucaccuggacgcuguccgacagcgaggggaaggacaccccgggcggguacugccucacccgguggaugcugaucgaggccgagcugaagugcuucggcaacaccgccgucgccaagugcaacgagaagcacgacgaggaguucugcgacaugcuccgccuguucgacuucaacaagcaggccauccagcggcugaagacgcccgcgcagauguccauccagcucaucaacaaggccgugaacgcccugaucaacgaccagcugaucaugaagaaccaccuccgcgacaucaugugcauccccuacugcaacuacagcaaguacugguaccugaaccacaccaccaccgggaagacgucccugcccaagugcuggcucgugagcaacggcuccuaccugaacgagacccacuucagcgacgacaucgagcagcaggccgacaacaugaucaccgagaugcugcagaaggaguacauggagcggcagggcaagaccccgcucgggcuggucgaccuguucguguucuccacgagcuucuaccucaucuccaucuuccugcaccuggugaagauccccacccaccgccacaucgucggcaagagcugccccaagccccaccggcugaaccacauggggaucugcuccugcggccucuacaagcagccgggggugcccgugcgcuggaagcggugaggacuaguuauaagacugacuagcccgaugggccucccaacgggcccuccuccccuccuugcaccgagauuaauaaaaaaaaaaaaaaaaaaaaaaaaaaaaaaaaaaaaaaaaaaaaaaaaaaaaaaaaaaaaaaaaaaaaaaaaaaaaaaaaaaaaaaaaaaaaaaaaaaaa

SEQ ID NO: 16673 - RNA, 1665 nt, Artificial Sequence
  mRNA product Design i-3 (A100) comprising derived and/or modified sequence from LASV(G502-SLE-2009;Clade IV)__AIT17126__GPCmut1 (opt1)
aggagaaagcuuaccaugggccagaucgugaccuucuuccaggaggucccccacgugaucgaggaggugaugaacaucguccugaucgcccucagcauccuggccgugcugaaggggcucuacaacuucgcgaccugcggccugguggggcugcucacguuccugcugcucugcggccgcuccugcaccaccgggcuguacaagggcgucuacgagcugcagacccucgagcugaacauggagacgcugaacaugaccaugccgcucagcugcaccaagaacaacucccaccacuacaucauggugggcaacgagaccgggcuggagcugacgcucaccaacaccagcaucaucaaccacaaguucugcaaccuguccgacgcccacaagaagaaccuguacgaccacgcccucaugagcaucaucuccaccuuccaccugagcauccccaacuucaaccaguacgaggccauguccugcgacuucaacggcgggaagaucagcgugcaguacaaccugucccacagcuacgccggcgacgcggccgaccacugcgggacggucgccaacggcgugcuccagaccuucaugcggauggccuggggcggguccuacaucgcgcuggacagcggcugcgggcgcugggacugcaucaugaccuccuaccaguaccugaucauccagaacaccacgugggaggaccacugccaguucagccggcccucccccaucggcuaccucggccugcugagccagcgcacccgggacaucuacaucucccgccggcgccgggggaccuucaccuggacgcucagcgacagcgagggcaaggacacccccgggggcuacugccugacccgcuggaugcugaucgaggccgagcucaagugcuucgggaacaccgccguggccaagugcaacgagaagcacgacgaggaguucugcgacaugcugcggcuguucgacuucaacaagcaggccauccagcgccucaaggcgccggcccagauguccauccagcugaucaacaaggccgucaacgcccugaucaacgaccagcucgugaugaagaaccaccuccgggacaucaugugcauccccuacugcaacuacagccgcuacugguaccugaaccacacgaccaccggccggaccucccugcccaagugcuggcuggugagcaacggcuccuaccugaacgagacgcacuucagcgacgacaucgagcagcaggccgacaacaugaucaccgagaugcuccagaaggaguacauggagcgccaggggaagaccccgcugggccuggucgaccucuucguguucuccaccagcuucuaccugaucuccaucuuccugcaccuggugaagauccccacgcaccggcacaucgucggcaagagcugccccaagccccaccgccucaaccacauggggaucugcuccugcgggcuguacaagcagccgggcgugcccgugaaguggaagcggugaggacuaguuauaagacugacuagcccgaugggccucccaacgggcccuccuccccuccuugcaccgagauuaauaaaaaaaaaaaaaaaaaaaaaaaaaaaaaaaaaaaaaaaaaaaaaaaaaaaaaaaaaaaaaaaaaaaaaaaaaaaaaaaaaaaaaaaaaaaaaaaaaaaa

SEQ ID NO: 16674 - RNA, 1665 nt, Artificial Sequence
  mRNA product Design i-3 (A100) comprising derived and/or modified sequence from LASV(G733-SLE-2010;Clade IV)__AIT17154__GPCmut1 (opt1)
aggagaaagcuuaccaugggccagaucgugaccuucuuccaggaggucccccacgugaucgaggaggugaugaacaucguccugaucgcccucagcauccuggccgugcugaaggggcucuacaacuucgcgaccugcggcaucguggggcuggucuccuuccugcuccugugcggccgcagcugcacgaccucccuguacaaggggguguacgagcuccagacccuggagcugaacauggagacccucaacaugacgaugccgcugagcugcaccaagaacaacucccaccacuacaucauggugggcaacgagaccggccuggagcucacccugacgaacaccagcaucaucaaccacaaguucugcaaccuguccgacgcccacaagaagaaccucuacgaccacgcccugaugagcaucaucuccaccuuccaccugagcauccccaacuucaaccaguacgaggccauguccugcgacuucaacgggggcaagaucagcguccaguacaaccucucccacagcuacgccggggacgcggccaaccacugcggcaccaucgccaacggggugcugcagacguucaugcggauggccuggggcggcuccuacaucgcgcuggacagcgggugcgaccgcugggacugcaucaugaccuccuaccaguaccucaucauccagaacaccaccugggaggaccacugccaguucagccggcccucccccaucggcuaccuggggcugcucagccagcgcacgcgggacaucuacaucagccgccggcgccggggcaccuucaccuggacccuguccgacagcgagggcaaggacacgcccgggggcuacugccugacccgcuggaugcucaucgaggccgagcugaagugcuucgggaacaccgccguggccaagugcaacgagaagcacgacgaggaguucugcgacaugcugcggcuguucgacuucaacaagcaggccauccagcgccugaaggcgccggcccagauguccauccagcugaucaacaaggccgucaacgcccucaucaacgaccagcugaucaugaagaaccaccuccgggacaucaugugcauccccuacugcaacuacagcaaguacugguaccucaaccacaccacgaccggcaagaccucccugcccaagugcuggcuggugagcaacggguccuaccucaacgagacccacuucagcgacgacaucgagcagcaggccgacaacaugaucacggagaugcugcagaaggaguacauggagcgccagggcaagaccccgcugggccucguggaccuguucgucuucuccaccagcuucuaccugaucuccaucuuccuccaccuggugaagauccccacccaccggcacguggucggcaagagcugccccaagccccaccgccugaaccacauggggaucugcuccugcgggcuguacggccagccgggggugcccgugaaguggaagcggugaggacuaguuauaagacugacuagcccgaugggccucccaacgggcccuccuccccuccuugcaccgagauuaauaaaaaaaaaaaaaaaaaaaaaaaaaaaaaaaaaaaaaaaaaaaaaaaaaaaaaaaaaaaaaaaaaaaaaaaaaaaaaaaaaaaaaaaaaaaaaaaaaaaa

SEQ ID NO: 16675 - RNA, 1665 nt, Artificial Sequence
  mRNA product Design i-3 (A100) comprising derived and/or modified sequence from MOPV/LASV reassortant(IGS-1;Clade IV)__AFY05576__GPCmut1 (opt1)
aggagaaagcuuaccaugggccagaucgugaccuucuuccaggaggucccccacgugaucgaggaggugaugaacaucguccugaucgcccucagcgugcuggccgugcugaaggggcucuacaacuucgcgaccugcggccuggucgggcuggugacguuccuccugcugugcggccgcuccugcaccaccagccucuacaaggggguguacgagcugcagacccuggagcucaacauggagacgcugaacaugaccaugccgcuguccugcaccaagaacaacagccaccacuacaucauggucggcaacgagaccggccucgagcugacgcugaccaacaccuccaucaucaaccacaaguucugcaaccucagcgacgcccacaagaagaaccuguacgaccacgcccugauguccaucaucagcaccuuccaccucuccauccccaacuucaaccaguacgaggccaugagcugcgacuucaacgggggcaagaucuccgugcaguacaaccugagccacuccuacgccggggacgcggccaaccacugcggcacgguggccaacgggguccugcagaccuucaugcggauggccuggggcggcagcuacaucgcgcucgacuccgggugcggcaacugggacugcaucaugaccagcuaccaguaccugaucauccagaacaccacgugggaggaccacugccaguucucccgccccagccccaucggguaccugggccuccugucccagcggacccgcgacaucuacaucagccggcgccggcgcggcaccuucaccuggacgcugagcgacuccgagggggaggacaccccgggcggguacugccucacccgguggaugcugaucgaggccgagcugaagugcuucggcaacaccgccguggccaagugcaacgagaagcacgacgaggaguucugcgacaugcuccgccuguucgacuucaacaagcaggccauccagcggcugaaggcgcccgcccagaugagcauccagcucaucaacaaggccgugaacgcccugaucaacgaccagcugaucaugaagaaccaccuccgcgacaucaugugcauccccuacugcaacuacuccaaguacugguaccugaaccacacgaccaccgggcggaccagccugcccaagugcuggcucgucuccaacggcagcuaccugaacgagacgcacuucuccgacgacaucgagcagcaggccgacaacaugaucaccgagaugcugcagaaggaguacauggagcgccagggcaagaccccgcucgggcugguggaccuguucguguucagcaccuccuucuaccucaucagcaucuuccugcaccuggucaagauccccacgcaccggcacaucgugggcaaguccugccccaagccccaccgccugaaccacauggggaucugcagcugcggccucuacaagcagccgggggugcccgucaaguggaagcggugaggacuaguuauaagacugacuagcccgaugggccucccaacgggcccuccuccccuccuugcaccgagauuaauaaaaaaaaaaaaaaaaaaaaaaaaaaaaaaaaaaaaaaaaaaaaaaaaaaaaaaaaaaaaaaaaaaaaaaaaaaaaaaaaaaaaaaaaaaaaaaaaaaaa

SEQ ID NO: 16676 - RNA, 1665 nt, Artificial Sequence
  mRNA product Design i-3 (A100) comprising derived and/or modified sequence from LASV(LM765-SLE-2012;Clade IV)__AIT17814__GPCmut1 (opt1)
aggagaaagcuuaccaugggccagaucgugaccuucuuccaggaggucccccacgugaucgaggaggugaugaacaucguccugaucgcccucagcauccuggccgugcugaaggggcucuacaacuucgcgaccugcggccugguggggcuggucacguuccuccugcugugcggccgcuccugcaccaccagccucuacaaggggguguacgagcugcagacccuggagcucaacauggagacgcugaacaugaccaugccgcuguccugcaccaagaacaacagccaccacuacaucauggugggcaacgagaccggccucgagcugacgcugaccaacaccuccaucaucgaccacaaguucugcaaccucagcgacgcccaccggaagaaccuguacgaccacgcccugauguccaucaucagcaccuuccaccucuccauccccaacuucaaccaguacgaggccaugagcugcgacuucaacgggggcaagaucuccguccaguacaaccugagccacuccuacgccaaggacgcggccgaccacugcgggacgguggccaacggcgugcugcagaccuucaugcgcauggccuggggcgggagcuacaucgcgcucgacuccggcugcgggcggugggacugcaucaugaccagcuaccaguaccugaucauccagaacaccacgugggaggaccacugccaguucucccgccccagccccaucggcuaccuggggcuccugucccagcggacccgcgacaucuacaucagccggcgccggcgcggcaccuucaccuggacgcugagcgacuccgagggcaaggacacccccgggggcuacugccucacccgguggaugcugaucgaggccgagcugaagugcuucgggaacaccgccgucgccaagugcaacgagaagcacgacgaggaguucugcgacaugcuccgccuguucgacuucaacaagcaggccauccagcggcugaaggcgccggcccagaugagcauccagcucaucaacaaggccgugaacgcccugaucaacgaccagcugaucaugaagaaccaccuccgcgacaucaugugcauccccuacugcaacuacuccaaguacugguaccugaaccacacgaccaccggcaagaccagccugcccaagugcuggcucguguccaacgggagcuaccugaacgagacgcacuucuccgacgacaucgagcagcaggccgacaacaugaucaccgagaugcugcagaaggaguacauggagcggcagggcaagaccccgcucggccuggucgaccuguucguguucagcaccuccuucuaccucaucagcaucuuccugcaccuggugaagauccccacgcaccgccacaucgucgggaagcccugccccaagccgcaccggcugaaccacaugggcaucugcuccugcgggcucuacaagcagcccggcgugcccgugaaguggaagcgcugaggacuaguuauaagacugacuagcccgaugggccucccaacgggcccuccuccccuccuugcaccgagauuaauaaaaaaaaaaaaaaaaaaaaaaaaaaaaaaaaaaaaaaaaaaaaaaaaaaaaaaaaaaaaaaaaaaaaaaaaaaaaaaaaaaaaaaaaaaaaaaaaaaaa

SEQ ID NO: 16677 - RNA, 1665 nt, Artificial Sequence
  mRNA product Design i-3 (A100) comprising derived and/or modified sequence from LASV(LM776-SLE-2012;Clade IV)__AIT17824__GPCmut1 (opt1)
aggagaaagcuuaccaugggccagaucgugaccuucuuccaggaggucccccacgugaucgaggaggugaugaacaucguccugaucgcccucagcauccuggccgugcugaaggggcucuacaacuucgcgaccugcggccugguggggcuggucacguuccuccugcugugcggccgcuccugcaccaccagcguguacaaggggguguacgagcuccagacccuggagcugaacauggagacgcucaacaugaccaugccgcuguccugcaccaagaacaacagccaccacuacaucauggucggcaacgagaccggccuggagcucacgcugaccaacaccuccaucaucaaccacaaguucugcaaccugagcgacgcccacaagaagaaccucuacgaccacgcccugauguccaucaucagcaccuuccaccuguccauccccaacuucaaccaguacgaggccaugagcugcgacuucaacgggggcaagaucuccgugcaguacaaccucagccacuccuacgccggggacgcggccaaccacugcggcacgguggccaacgggguccugcagaccuucaugcggauggccuggggcggcagcuacaucgcgcuggacuccgggugcggcaagugggacugcaucaugaccagcuaccaguaccucaucauccagaacaccacgugggaggaccacugccaguucucccgccccagccccaucggguaccugggccugcucucccagcggacccgcgacaucuacaucagccggcgccggcgcggcaccuucaccuggacgcugagcgacuccgaggggaaggacaccccgggcggguacugccugacccgguggaugcucaucgaggccgagcugaagugcuucggcaacaccgccguggccaagugcaacgagaagcacgacgaggaguucugcgacaugcugcgccucuucgacuucaacaagcaggccauccagcggcugaaggcgcccgcccagaugagcauccagcugaucaacaaggccgugaacgcccucaucaacgaccagcugaucaugaagaaccaccuccgcgacaucaugugcauccccuacugcaacuacuccaaguacugguaccugaaccacacgaccaccgggaagaccagccugcccaagugcuggcuggucuccaacggcagcuaccucaacgagacgcacuucuccgacgacaucgagcagcaggccgacaacaugaucaccgagaugcugcagaaggaguacauggagcggcagggcaagaccccgcuggggcucguggaccuguucguguucagcaccuccuucuaccugaucagcaucuuccuccaccuggucaagauccccacgcaccgccacaucgugggcaaguccugccccaagccccaccggcugaaccacauggggaucugcagcugcggccuguacaagcagccgggggugcccguccgcuggaagcggugaggacuaguuauaagacugacuagcccgaugggccucccaacgggcccuccuccccuccuugcaccgagauuaauaaaaaaaaaaaaaaaaaaaaaaaaaaaaaaaaaaaaaaaaaaaaaaaaaaaaaaaaaaaaaaaaaaaaaaaaaaaaaaaaaaaaaaaaaaaaaaaaaaaa

SEQ ID NO: 16678 - RNA, 1665 nt, Artificial Sequence
  mRNA product Design i-3 (A100) comprising derived and/or modified sequence from LASV(Mad39;Clade IV)__ANH09722__GPCmut1 (opt1)
aggagaaagcuuaccaugggccagaucgugaccuucuuccaggaggucccccacgugaucgaggaggugaugaacaucguccugaucgcccucagcauccuggccgugcugaaggggcucuacaacguggcgaccugcggccugaucgggcuggucacguuccuccugcugugcggccgcuccugcaccaccacccucuacaaggggguguacgagcugcaggcccuggagcucaacauggagacgcugaacaugaccaugccgcugagcugcaccaagaacaacucccaccacuacauccgggugggcaacgagaccggccucgagcugacgcugaccaacaccagccucaucaaccacaaguucugcaaccuguccgacgcccacaagaagaaccuguacgaccacgcccucaugagcaucaucuccaccuuccaccugagcauccccaacuucaaccaguacgaggccauguccugcgacuucaacgacgggaagaucagcguccaguacaaccugucccacacguacgcgggcgacaccgccaaccacugcgggaccguggccaacggcgugcuccagaccuucaugcgcauggccuggggcgggagcuacaucgcgcuggacuccggcugcgggggcugggacugcaucaugacgagcuaccaguaccugaucauccagaacaccaccugggaggaccacugccaguucucccggcccagccccaucggguaccucggccugcugucccagcgcacccgggacaucuacaucagccgccggcgccggggcacguucaccuggacccucuccgacagcgaggggaaggacaccccgggcggguacugccugacgcgcuggaugcugaucgaggccgagcucaagugcuucggcaacaccgccgucgccaagugcaacgagaagcacgacgaggaguucugcgacaugcugcggcuguucgacuucaacaagcaggccauccagcgccucaaggcgcccgcccagaugagcauccagcugaucaacaaggccgugaacgcccugaucaacgaccagcucaucaugaagaaccaccuccgggacaucaugugcauccccuacugcaacuacuccaaguacugguaccugaaccacaccgugaccgggaagacgagccugcccaagugcuggcuggucuccaacggcagcuaccugaacgagacccacuucuccgacgacaucgagcagcaggccgacaacaugaucaccgagaugcuccagaaggaguacauggagcgccagggcaagaccccgcuggggcugguggaccucuucguguucagcacguccuucuaccugaucagcaucuuccugcaccuggucaagauccccacccaccggcacguggugggcaagcccugccccaagccgcaccgccucaaccacauggggaucugcuccugcggcuucuacaagcagcccgggguccccgugcgguggaagcgcugaggacuaguuauaagacugacuagcccgaugggccucccaacgggcccuccuccccuccuugcaccgagauuaauaaaaaaaaaaaaaaaaaaaaaaaaaaaaaaaaaaaaaaaaaaaaaaaaaaaaaaaaaaaaaaaaaaaaaaaaaaaaaaaaaaaaaaaaaaaaaaaaaaaa

SEQ ID NO: 16679 - RNA, 1665 nt, Artificial Sequence
  mRNA product Design i-3 (A100) comprising derived and/or modified sequence from LASV(Z0947-SLE-2011;Clade IV)__AIT17840__GPCmut1 (opt1)
aggagaaagcuuaccaugggccagaucgugaccuucuuccaggaggucccccacgugaucgaggaggugaugaacaucguccugaucgcccucagcauccuggccgugcugaaggggcucuacaacuucgcgaccugcggccugguggggcuggucacguuccuccugcugugcggccgcuccugcaccaucagccucuacaaggggguguacgagcugcagacccuggagcucaacauggagacccugaacaugacgaugccgcuguccugcaccaagaacaacagccaccacuacaucauggugggcaacgagaccggccucgagcugacccugacgaacaccuccaucaucaaccacaaguucugcaaccucagcgacgcccacaagaagaaccuguacgaccacgcccugauguccaucaucagcaccuuccaccucuccauccccaacuucaaccaguacgaggccaugagcugcgacuucaacgggggcaagaucuccguccaguacaaccugagccacuccuacgccggggacgcggccaaccacugcggcaccguggccaacggggugcugcagacguucaugcggauggccuggggcggcagcuacaucgcgcucgacuccgggugcgaccgcugggacugcaucaugaccagcuaccaguaccugaucauccagaacaccaccugggaggaccacugccaguucucccggcccagccccaucggcuaccuggggcuccugucccagcgcacgcgggacaucuacaucagccgccggcgccggggcaccuucaccuggacccugagcgacuccgagggcaaggacacgcccgggggcuacugccucacccgcuggaugcugaucgaggccgagcugaagugcuucgggaacaccgccgucgccaagugcaacgagaagcacgacgaggaguucugcgacaugcuccggcuguucgacuucaacaagcaggccauccagcgccugaaggcgccggcccagaugagcauccagcucaucaacaaggccgugaacgcccugaucaacgaccagcugaucaugaagaaccaccuccgggacaucaugugcauccccuacugcaacuacuccaaguacugguaccugaaccacaccacgaccggcaagaccagccugcccaagugcuggcucguguccaacgggagcuaccugaacgagacccacuucuccgacgacaucgagcagcaggccgacaacaugaucacggagaugcugcagaaggaguacauggagcgccagggcaagaccccgcucggccuggucgaccuguucguguucagcaccuccuucuaccucaucagcaucuuccugcaccuggugaagauccccacccaccggcacaucgucgggaagcccugccccaagccgcaccgccugaaccacaugggcaucugcuccugcgggcucuacaagcagcccggcgugcccgugaaguggaagcggugaggacuaguuauaagacugacuagcccgaugggccucccaacgggcccuccuccccuccuugcaccgagauuaauaaaaaaaaaaaaaaaaaaaaaaaaaaaaaaaaaaaaaaaaaaaaaaaaaaaaaaaaaaaaaaaaaaaaaaaaaaaaaaaaaaaaaaaaaaaaaaaaaaaa

SEQ ID NO: 16680 - RNA, 1665 nt, Artificial Sequence
  mRNA product Design i-3 (A100) comprising derived and/or modified sequence from LASV(Josiah;Clade IV)__NP_694870__GPCmut1 (opt4)
aggagaaagcuuaccaugggccagaucgugaccuucuuccaggaggugccccacgugaucgaggaggugaugaacaucgugcugaucgcccugagcgugcuggccgugcugaagggccuguacaacuucgccaccugcggccuggugggccuggugaccuuccugcugcugugcggcagaagcugcaccaccagccuguacaagggcguguacgagcugcagacccuggagcugaacauggagacccugaacaugaccaugccccugagcugcaccaagaacaacagccaccacuacaucauggugggcaacgagaccggccuggagcugacccugaccaacaccagcaucaucaaccacaaguucugcaaccugagcgacgcccacaagaagaaccuguacgaccacgcccugaugagcaucaucagcaccuuccaccugagcauccccaacuucaaccaguacgaggccaugagcugcgacuucaacggcggcaagaucagcgugcaguacaaccugagccacagcuacgccggcgacgccgccaaccacugcggcaccguggccaacggcgugcugcagaccuucaugagaauggccuggggcggcagcuacaucgcccuggacagcggcugcggcaacugggacugcaucaugaccagcuaccaguaccugaucauccagaacaccaccugggaggaccacugccaguucagcagacccagccccaucggcuaccugggccugcugagccagagaaccagagacaucuacaucagcagaagacgccggggcaccuucaccuggacccugagcgacagcgagggcaaggacacccccggcggcuacugccugaccagauggaugcugaucgaggccgagcugaagugcuucggcaacaccgccguggccaagugcaacgagaagcacgacgaggaguucugcgacaugcugagacuguucgacuucaacaagcaggccauccagagacugaaggcccccgcccagaugagcauccagcugaucaacaaggccgugaacgcccugaucaacgaccagcugaucaugaagaaccaccugagagacaucaugugcauccccuacugcaacuacagcaaguacugguaccugaaccacaccaccaccggcagaaccagccugcccaagugcuggcuggugagcaacggcagcuaccugaacgagacccacuucagcgacgacaucgagcagcaggccgacaacaugaucaccgagaugcugcagaaggaguacauggagagacagggcaagaccccccugggccugguggaccuguucguguucagcaccagcuucuaccugaucagcaucuuccugcaccuggugaagauccccacccacagacacaucgugggcaagagcugccccaagccccacagacugaaccacaugggcaucugcagcugcggccuguacaagcagcccggcgugcccgugaaguggaagagaugaggacuaguuauaagacugacuagcccgaugggccucccaacgggcccuccuccccuccuugcaccgagauuaauaaaaaaaaaaaaaaaaaaaaaaaaaaaaaaaaaaaaaaaaaaaaaaaaaaaaaaaaaaaaaaaaaaaaaaaaaaaaaaaaaaaaaaaaaaaaaaaaaaaa

SEQ ID NO: 16681 - RNA, 1662 nt, Artificial Sequence
  mRNA product Design i-3 (A100) comprising derived and/or modified sequence from LASV(LP;Clade I)__AAF86701__GPCmut1 (opt4)
aggagaaagcuuaccaugggccagaucaucaccuucuuccaggaggugccccacgugaucgaggaggugaugaacaucgugcugaucgcccugagccugcuggccauccugaagggccuguacaacaucgccaccugcggcaucaucggccugguggccuuccuguuccugugcggcaagagcugcagccugacccugaagggcggcuacgagcugcagacccuggagcugaacauggagacccugaacaugaccaugccccugagcugcaccaagaacagcagccaccacuacaucagagugggcaacgagaccggccuggagcugacccugaccaacaccagcaucaucaaccacaaguucugcaaccugagcgacgcccacaagaagaaccuguacgaccacgcccugaugagcaucaucagcaccuuccaccugagcauccccaacuucaaccaguacgaggccaugagcugcgacuucaacggcggcaagaucagcgugcaguacaaccugagccacagcuacgccggcgacgccgccgagcacugcggcaccguggccaacggcgugcugcagaccuucaugagaauggccuggggcggcagauacaucgcccuggacagcggcugcggcaacugggacugcaucaugaccagcuaccaguaccugaucauccagaacaccaccugggaggaccacugccaguucagcagacccagccccaucggcuaccugggccugcugagccagagaaccagagacaucuacaucagcagaagacgccggggcaccuucaccuggacccugagcgacagcgagggcaacgagacccccggcggcuacugccugaccagauggaugcugaucgaggccgagcugaagugcuucggcaacaccgccguggccaagugcaacgagaagcacgacgaggaguucugcgacaugcugagacuguucgacuucaacaagcaggccaucagaagacugaaggcccccgcccagaugagcauccagcugaucaacaaggccgugaacgcccugaucaacgaccagcugaucaugaagaaccaccugagagacaucaugugcauccccuacugcaacuacagcaaguacugguaccugaaccacaccagcagcggcagaaccagccugcccaagugcuggcugaucagcaacggcagcuaccugaacgagacccaguucagcgacgacaucgagcagcaggccgacaacaugaucaccgagaugcugcagaaggaguacaucgagagacagggcaagaccccccugggccugguggacaucuucaucuucagcaccagcuucuaccugaucagcaucuuccugcaccugaucaagauccccacccacagacacaucgugggcaagcccugccccaagccccacagacugaaccacaugggcgugugcagcugcggccuguacaagcaccccggcgugcccaccaaguggaagagaugaggacuaguuauaagacugacuagcccgaugggccucccaacgggcccuccuccccuccuugcaccgagauuaauaaaaaaaaaaaaaaaaaaaaaaaaaaaaaaaaaaaaaaaaaaaaaaaaaaaaaaaaaaaaaaaaaaaaaaaaaaaaaaaaaaaaaaaaaaaaaaaaaaaa

SEQ ID NO: 16682 - RNA, 1662 nt, Artificial Sequence
  mRNA product Design i-3 (A100) comprising derived and/or modified sequence from LASV(803213;Clade II)__AAF86703__GPCmut1 (opt4)
aggagaaagcuuaccaugggccagaucaucaccuucuuccaggaggugccccacgugaucgaggaggugaugaacaucgugcugaucgcccugagccugcuggccauccugaagggcaucuacaacguggccaccugcggccuguucggccugaucagcuuccugcugcugugcggcagaagcugcagcgugaccuacaagggcguguacgagcugcagacccuggagcugaacauggccaaccugaacaugaccaugccccugagcugcaccaagaacaacagccaccacuacaucauggugggcaacgagaccggccuggagcugacccugaccaacaccagcaucaucaaccacaaguucugcaaccugagcgacgcccacaagaagaaccuguacgaccacgcccugaugagcaucaucagcaccuuccaccugagcauccccaacuucaaccaguacgaggccaugagcugcgacuucaacggcggcaagaucagcgugcaguacaaccugagccacagcuucgccguggacgccgccaaccacugcggcaccaucgccaacggcgugcugcagaccuucaugagaauggccuggggcggcagcuacaucgcccuggacagcggcugcggcaacugggacugcaucaugaccagcuaccaguaccugaucauccagaacaccaccugggaggaccacugccaguucagcagacccagccccaucggcuaccugggccugcugagccagagaaccagagacaucuacaucagcagaagacgccggggcaccuucaccuggacccugagcgacagcgagggcaacgaggcccccggcggcuacugccugaccagauggaugcugaucgaggccgagcugaagugcuucggcaacaccgccguggccaagugcaacgagaagcacgacgaggaguucugcgacaugcugagacuguucgacuucaacaagcaggccaucaagagacugaagacccccgcccagaugagcauccagcugaucaacaaggccgugaacgcccugaucaacgaccagcugaucaugaagaaccaccugagagacaucaugugcauccccuacugcaacuacagcagauacugguaccugaaccacaccgugaccggcaagaccagccugcccagaugcuggcuggugagcaacggcagcuaccugaacgagacccacuucagcgacgacaucgagcagcaggccgacaacaugaucaccgagaugcugcagaaggaguacauggacagacagggcaagaccccccugggccugguggaccuguucguguucagcaccagcuucuaccugaucagcaucuuccugcaccuggugaagauccccacccacagacacaucgugggcaagcccugccccaagccccacagacugaaccacaugggcaucugcagcugcggccuguacaagcaccccggcgugcccgugaaguggaagagaugaggacuaguuauaagacugacuagcccgaugggccucccaacgggcccuccuccccuccuugcaccgagauuaauaaaaaaaaaaaaaaaaaaaaaaaaaaaaaaaaaaaaaaaaaaaaaaaaaaaaaaaaaaaaaaaaaaaaaaaaaaaaaaaaaaaaaaaaaaaaaaaaaaaa

SEQ ID NO: 16683 - RNA, 1662 nt, Artificial Sequence
  mRNA product Design i-3 (A100) comprising derived and/or modified sequence from LASV(GA391;Clade III)__CAA36645__GPCmut1 (opt4)
aggagaaagcuuaccaugggccagaucgugaccuucuuccaggaggugccccacgugaucgaggaggugaugaacaucgugcugaucgcccugagcauccuggccauccugaagggccuguacaacguggccaccugcggccugaucggccuggugaccuuccugcugcugagcggcagaagcugcagccugaucuacaagggcaccuacgagcugcagacccuggagcugaacauggagacccugaacaugaccaugccccugagcugcaccaagaacaacagccaccacuacaucagagugggcaacgagaccggccuggagcugacccugaccaacaccagcauccugaaccacaaguucugcaaccugagcgacgcccacaagagaaaccuguacgaccacagccugaugagcaucaucagcaccuuccaccugagcauccccaacuucaaccaguacgaggccaugagcugcgacuucaacggcggcaagaucaccgugcaguacaaccugagccacagcuucgccguggacgccgccggccacugcggcacccuggccaacggcgugcugcagaccuucaugagaauggccuggggcggcagcuacaucgcccuggacagcggcugcggcaacugggacugcaucaugaccagcuaccaguaccugaucauccagaacaccaccugggacgaccacugccaguucagcagacccagccccaucggcuaccugggccugcugagccagagaaccagagacaucuacaucagcagaagacgccggggcaccuucaccuggacccugagcgacagcgagggcaacgagacccccggcggcuacugccugaccagauggaugcugaucgaggccgagcugaagugcuucggcaacaccgccguggccaagugcaacgagaagcacgacgaggaguucugcgacaugcugagacuguucgacuucaacaagcaggccaucagaagacugaagacccccgcccagaugagcauccagcugaucaacaaggccgugaacgcccugaucaacgaccagcugaucaugaagaaccaccugagagacaucaugugcauccccuacugcaacuacagcagauacugguaccugaaccacaccagcaccggcaagaccagccugcccagaugcuggcugaucagcaacggcagcuaccugaacgagaccaaguucagcgacgacaucgagcagcaggccgacaacaugaucaccgagaugcugcagaaggaguacaucgacagacagggcaagaccccccugggccugguggaccuguucguguucagcaccagcuucuaccugaucagcaucuuccugcaccuggugaagauccccacccacagacacaucgugggcaagcccugccccaagccccacagacugaaccacaugggcaucugcagcugcggccuguacaagcagcccggcgugcccgugagauggaagagaugaggacuaguuauaagacugacuagcccgaugggccucccaacgggcccuccuccccuccuugcaccgagauuaauaaaaaaaaaaaaaaaaaaaaaaaaaaaaaaaaaaaaaaaaaaaaaaaaaaaaaaaaaaaaaaaaaaaaaaaaaaaaaaaaaaaaaaaaaaaaaaaaaaaa

SEQ ID NO: 16684 - RNA, 1665 nt, Artificial Sequence
  mRNA product Design i-3 (A100) comprising derived and/or modified sequence from LASV(AV;Clade V)__CCA30314__GPCmut1 (opt4)
aggagaaagcuuaccaugggccagaucgugaccuucuuccaggaggugccccacgugaucgaggaggugaugaacaucgugcugaucgcccugagcauccuggccgugcugaagggccuguacaacaucgccaccugcggccugaucggccugaucaccuuccugcugcugugcggcagaagcugcagcagcaaccuguacaagggcguguacgagcugcagagccuggaccugaacauggagacccugaacaugaccaugccccugagcugcaccaagaacaacagccaccacuacaucagagugggcaacgacaccggccuggagcugacccugaccaacaccagcauccugaaccacaaguucugcaaccugagcgacgcccacaagaaggaccuguacgaccacgcccugaugagcaucaucagcaccuuccaccugagcauccccaacuucaaccaguacgaggccaugagcugcgacuucaacggcggcaagaucagcgugcaguacaaccugagccacagcuacgccaucgacgccgccaaccacugcggcaccguggccaacggcauccugcagaccuucaugagaauggccuggggcggcagcuacaucgcccuggacagcggcugcggcaacugggacugcaucaugaccagcuaccaguaccugaucauccagaacaccaccugggagaaccacugccaguucagcagacccagccccaucggcuaccugggccugcugagccagagaaccagagacaucuacaucagcagaagacgccggggcaccuucaccuggacccugagcgacagcgagggcaacgccacccccggcggcuacugccugaccagauggaugcugaucgaggccgagcugaagugcuucggcaacaccgccguggccaagugcaacgagaagcacgacgaggaguucugcgacaugcugagacuguucgacuucaacaagcaggccaucagcagacugaagagccccgcccagaugagcauccagcugaucaacaaggccgugaacgcccugaucaacgaccagcugaucaugaagaaccaccugagagacaucaugugcauccccuacugcaacuacagcaaguacugguaccugaaccacaccaucaccggcaagaccagccugcccaagugcuggcuggugagcaacggcagcuaccugaacgagacccacuucagcgacgacaucgagcagcaggccgacaacaugaucaccgagaugcugcagaaggaguacauggagagacagggcaagaccccccugggccugguggaccuguucguguucagcaccagcuucuaccugaucagcaucuuccugagacuggugaagauccccacccacagacacaucgugggcaagcccugccccaagccccacagacugaaccacaugggcaucugcagcugcggccuguacaagcagcccggcgugcccgugagauggaagagaugaggacuaguuauaagacugacuagcccgaugggccucccaacgggcccuccuccccuccuugcaccgagauuaauaaaaaaaaaaaaaaaaaaaaaaaaaaaaaaaaaaaaaaaaaaaaaaaaaaaaaaaaaaaaaaaaaaaaaaaaaaaaaaaaaaaaaaaaaaaaaaaaaaaa

SEQ ID NO: 16685 - RNA, 1662 nt, Artificial Sequence
  mRNA product Design i-3 (A100) comprising derived and/or modified sequence from LASV(Togo/2016/7082;Clade VI)__AMR44577__GPCmut1 (opt4)
aggagaaagcuuaccaugggccagaucaucaccuucuuccaggaggugccccacgugaucgaggaggugaugaacaucgugcugaucgcccugagccugcuggccauccugaagggcguguacaacguggccaccugcggcaucaucggccuggugaccuuccuguuccugugcggcagaagcugcagccugaucuacaagggcagcuacgagcugcagacccuggagcugaacauggagacccugaacaugaccaugccccugagcugcaccaagaacagcagccaccacuacaucagagugggcaacgagaccggccuggagcugacccugaccaacaccagcaucaucaaccacaaguucugcaaccugagcgacgcccacaagagaaaccuguacgaccacgcccugaugagcauccugagcaccuuccaccugagcauccccaacuucaaccaguacgaggccaugagcugcgacuucaacggcggcaagaucagcgugcaguacaaccugagccacgccuacgccguggacgccgccgagcacugcggcaccguggccaacggcgugcugcagaccuucaugagaauggccuggggcggcagcuacaucgcccuggacagcggcugcggcaacugggacugcaucaugaccagcuaccaguaccugaucauccagaacaccaccugggaggaccacugccaguucagcagacccagccccaucggcuaccugggccugcugagccagagaaccagagacaucuacaucagcagaagacgccggggcaccuucaccuggacccugagcgacagcgagggcaacgagacccccggcggcuacugccugaccagauggaugcugaucgaggccgagcugaagugcuucggcaacaccgccguggccaagugcaacgagaagcacgacgaggaguucugcgacaugcugagacuguucgacuucaacaagcaggccauccagagacugaagagccccgcccagaugagcauccagcugaucaacaaggccgugaacgcccugaucaacgaccagcugaucaugaagaaccaccugagagacaugaugugcauccccuacugcaacuacagcaaguacugguaccugaaccacaccagcagcggcagaaccagccugcccaagugcuggcuggugagcaacggcagcuaccugaacgagacccacuucagcgacgacaucgagcagcaggccgacaacaugaucaccgagaugcugcagaaggaguacaucgacagacagggcaagaccccccugggccugguggaccuguucguguucagcaccagcuucuaccugaucagcaucuuccugcaccugaucaagauccccacccacagacacaucgugggcaagcccugccccaagccccacagacugaaccacaugggcaucugcagcugcggccuguacaagcagcccggcgugcccaccagauggaagagaugaggacuaguuauaagacugacuagcccgaugggccucccaacgggcccuccuccccuccuugcaccgagauuaauaaaaaaaaaaaaaaaaaaaaaaaaaaaaaaaaaaaaaaaaaaaaaaaaaaaaaaaaaaaaaaaaaaaaaaaaaaaaaaaaaaaaaaaaaaaaaaaaaaaa

SEQ ID NO: 16686 - RNA, 1662 nt, Artificial Sequence
  mRNA product Design i-3 (A100) comprising derived and/or modified sequence from LASV(KAK-428;Clade n.d. (VII))__ANH09740__GPCmut1 (opt4)
aggagaaagcuuaccaugggccagaucgugaccuucuuccaggaggugccccacgugaucgaggaggugaugaacaucgugcugaucgcccugagccugcuggccauccugaagggccuguacaacuucgccaccugcggcgugaucggccugaucaccuuccugcugcugugcggcagaagcugcagcgccaccuacaagggccaguacgagcugcagacccuggagcugaacauggagagccugaacaugaccaugccccugagcugcaccaagaacaacagccaccacuacaucagagccggcaacaacaccggccuggagcugacccugaccaacaccagcaucaucagccacaaguucugcaaccugagcgacgcccacaagaagaaccuguacgaccacacccugaugagcaucaucaccaccuuccaccugagcauccccaacuucaaccaguacgaggccaugagcugcgacuucaacggcggcaagaucagcauccaguacaaccugagccacagcuacgccggcgacgccgcccagcacugcggcaccguggccaacggcgugcugcagaccuucaugagaauggccuggggcggcagcuaccuggcccuggacagcggcugcagaggcugggacugcaucaucagcagcuaccaguaccugaucauccagaacaccaccugggacgaccacugccaguucagcagacccagccccaucggcuaccugggcuucgugagccagaagaccagagacaucuacaucagcagaagacgccggggcaccuucaccuggacccugagcgacagcgagggccacgacaugcccggcggcuacugccugaccagauggaugcugaucgaggccgaccugaagugcuucggcaacaccgccguggccaagugcaacgagaagcacgacgaggaguucugcgacauguggagacuguucgacuucaacaagcaggccauccagagacugaaggcccccgcccagaugaacauccagcugaucaacaaggccgugaacgcccugaucaacgaccagcugaugaugaagaaccaccugagagacaucaugugcauccccuacugcaacuacagcaaguucugguaccugaacaacaccaccaccggcagaaccagccugcccagaugcuggcugaucagcaacggcagcuaccugaacgagacccacuucagcgacgacaucgagcagcaggccgacaacaugaucaccgagaugcugcagaaggaguacauggacagacagggcaagaccccccugggccugguggaccuguucguguucagcaccagcuucuaccugaucaccaucuuccugcaccuggugaagauccccacccacagacacaucgugggcaagcccugccccaagccccacagacugaaccacaugggcaucugcagcugcggccuguacaagcagcccggcgugcccgugagauggaagagaugaggacuaguuauaagacugacuagcccgaugggccucccaacgggcccuccuccccuccuugcaccgagauuaauaaaaaaaaaaaaaaaaaaaaaaaaaaaaaaaaaaaaaaaaaaaaaaaaaaaaaaaaaaaaaaaaaaaaaaaaaaaaaaaaaaaaaaaaaaaaaaaaaaaa

SEQ ID NO: 16687 - RNA, 1662 nt, Artificial Sequence; identical to SEQ ID NO: 16681
  mRNA product Design i-3 (A100) comprising derived and/or modified sequence from LASV(Pinneo-NIG-1969;Clade I)__AIT17836__GPCmut1 (opt4)

SEQ ID NO: 16688 - RNA, 1662 nt, Artificial Sequence
  mRNA product Design i-3 (A100) comprising derived and/or modified sequence from LASV(ISTH0009-NIG-2011;Clade II)__AIT17404__GPCmut1 (opt4)
aggagaaagcuuaccaugggccagaucaucaccuucuuccaggaggugccccacgugaucgaggaggugaugaacaucgugcugaucgcccugagccugcuggccauccugaagggcaucuacaacguggccaccugcggccuguucggccuggugagcuuccugcugcugugcggcagaagcugcagcaccaccuacaagggcguguacgagcugcagacccuggagcuggacauggccagccugaacaugaccaugccccugagcugcaccaagaacaacagccaccacuacaucauggugggcaacgagaccggccuggagcugacccugaccaacaccagcaucaucaaccacaaguucugcaaccugagcgacgcccacaagaagaaccuguacgaccacgcccugaugagcaucaucagcaccuuccaccugagcauccccaacuucaaccaguacgaggccaugagcugcgacuucaacggcggcaagaucagcgugcaguacaaccugagccacgccuacgccguggacgccgccaaccacugcggcaccaucgccaacggcgugcugcagaccuucaugagaauggccuggggcggcagcuacaucgcccuggacagcggcugcggcagcugggacugcaucaugaccagcuaccaguaccugaucauccagaacaccaccugggaggaccacugccaguucagcagacccagccccaucggcuaccugggccugcugagccagagaaccagagacaucuacaucagcagaagacgccggggcaccuucaccuggacccugagcgacagcgagggcaacgagacccccggcggcuacugccugaccagauggaugcugaucgaggccgagcugaagugcuucggcaacaccgccguggccaagugcaacgagaagcacgacgaggaguucugcgacaugcugagacuguucgacuucaacaagcaggccaucagaagacugaagacccccgcccagaugagcauccagcugaucaacaaggccgugaacgcccugaucaacgaccagcugaucaugaagaaccaccugagagacaucaugugcauccccuacugcaacuacagcaaguacugguaccugaaccacaccgugaccggcaagaccagccugcccagaugcuggcuggugagcaacggcagcuaccugaacgagacccacuucagcgacgacaucgagcagcaggccgacaacaugaucaccgagcugcugcagaaggaguacauggacagacagggcaagaccccccugggccugguggaccuguucguguucagcaccagcuucuaccugaucagcaucuuccugcaccugaucaagauccccacccacagacacaucaccggcaagcccugccccaagccccacagacugaaccacaugggcaucugcagcugcggccuguacaagcaccccggcgugcccgugaaguggaagagaugaggacuaguuauaagacugacuagcccgaugggccucccaacgggcccuccuccccuccuugcaccgagauuaauaaaaaaaaaaaaaaaaaaaaaaaaaaaaaaaaaaaaaaaaaaaaaaaaaaaaaaaaaaaaaaaaaaaaaaaaaaaaaaaaaaaaaaaaaaaaaaaaaaaa

SEQ ID NO: 16689 - RNA, 1662 nt, Artificial Sequence
  mRNA product Design i-3 (A100) comprising derived and/or modified sequence from LASV(ISTH2010-NIG-2012;Clade II)__AIT17482__GPCmut1 (opt4)
aggagaaagcuuaccaugggccagaucaucaccuucuuccaggaggugccccacgugaucgaggaggugaugaacaucgugcugaucgcccugagccugcuggccauccugaagggcaucuacaacguggccaccugcggccuguucggccuggugagcuuccugcugcugugcggcagaagcugcagcaccaccuacaagggcguguacgagcugcagacccuggagcuggacauggccagccugaacaugaccaugccccugagcugcaccaagaacaacagccaccacuacaucauggugggcaacgagaccggccuggagcugacccugaccaacaccagcaucaucaaccacaaguucugcaaccugagcgacgcccacaagaagaaccuguacgaccacgcccugaugagcaucaucagcaccuuccaccugagcauccccaacuucaaccaguacgaggccaugagcugcgacuucaacggcggcaagaucagcgugcaguacaaccugagccacgccuacgccguggacgccgccaaccacugcggcaccaucgccaacggcgugcugcagaccuucaugagaauggccuggggcggcagcuacaucgcccuggacagcggcugcggcagcugggacugcaucaugaccagcuaccaguaccugaucauccagaacaucaccugggaggaccacugccaguucagcagacccagccccaucggcuaccugggccugcugagccagagaaccagagacaucuacaucagcagaagacgccggggcaccuucaccuggacccugagcgacagcgagggcaacgagacccccggcggcuacugccugaccagauggaugcugaucgaggccgagcugaagugcuucggcaacaccgccguggccaagugcaacgagaagcacgacgaggaguucugcgacaugcugagacuguucgacuucaacaagcaggccaucagaagacugaagacccccgcccagaugagcauccagcugaucaacaaggccgugaacgcccugaucaacgaccagcugaucaugaagaaccaccugagagacaucaugugcauccccuacugcaacuacagcaaguacugguaccugaaccacaccgugaccggcaagaccagccugcccagaugcuggcuggugagcaacggcagcuaccugaacgagacccacuucagcgacgacaucgagcagcaggccgacaacaugaucaccgagcugcugcagaaggaguacaucgacagacagggcaagaccccccugggccugguggaccuguucguguucagcaccagcuucuaccugaucagcaucuuccugcaccuggugaagauccccacccacagacacguggugggcaagcccugccccaagccccacagacugaaccacaugggcaucugcagcugcggccuguacaagcaccccggcgugcccgugaaguggaagagaugaggacuaguuauaagacugacuagcccgaugggccucccaacgggcccuccuccccuccuugcaccgagauuaauaaaaaaaaaaaaaaaaaaaaaaaaaaaaaaaaaaaaaaaaaaaaaaaaaaaaaaaaaaaaaaaaaaaaaaaaaaaaaaaaaaaaaaaaaaaaaaaaaaaa

SEQ ID NO: 16690 - RNA, 1662 nt, Artificial Sequence
  mRNA product Design i-3 (A100) comprising derived and/or modified sequence from LASV(Lassa virus/H.sapiens-wt/NGA/2015/ISTH_0543;Clade II)__AVO03639__GPCmut1 (opt4)
aggagaaagcuuaccaugggccagaucaucaccuucuuccaggaggugccccacgugaucgaggaggugaugaacaucgugcugaucgcccugagccugcuggccauccugaagggcaucuacaacguggccaccugcggccuguucggccuggugagcuuccugcugcugugcggcagaagcugcagcaccaccuacaagggcguguacgagcugcagacccuggagcuggacauggccaaccugaacaugaccaugccccugagcugcaccaagaacaacagccaccacuacaucauggugggcaacgagaccggccuggagcugacccugaccaacaccagcaucaucaaccacaaguucugcaaccugagcgacgcccacaagaagaaccuguacgaccacgcccugaugagcaucaucagcaccuuccaccugagcauccccaacuucaaccaguacgaggccaugagcugcgacuucaacggcggcaagaucagcgugcaguacaaccugagccacaccuacgccguggacgccgccaaccacugcggcaccaucgccaacggcgugcugcagaccuucaugagaauggccuggggcggcagcuacaucgcccuggacagcggcugcggcagcugggacugcaucaugaccagcuaccaguaccuggugauccagaacaccaccugggaggaccacugccaguucagcagacccagccccaucggcuaccugggccugcugagccagagaaccagagacaucuacaucagcagaagacgccggggcaccuucaccuggacccugagcgacagcgagggcaacgagacccccggcggcuacugccugaccagauggaugcugaucgaggccgagcugaagugcuucggcaacaccgccguggccaagugcaacgagaagcacgacgaggaguucugcgacaugcugagacuguucgacuucaacaagcaggccaucagaagacugaagacccccgcccagaugagcauccagcugaucaacaaggccgugaacgcccugaucaacgaccagcugaucaugaagaaccaccugagagacaucaugugcauccccuacugcaacuacagcaaguacugguaccugaaccacaccgugaccggcaagaccagccugcccagaugcuggcuggugagcaacggcagcuaccugaacgagacccacuucagcgacgacaucgagcagcaggccgacaacaugaucaccgagcugcugcagaaggaguacaucgacagacagggcaagaccccccugggccugguggaccuguucguguucagcaccagcuucuaccugaucagcaucuuccugcaccuggugaagauccccacccacagacacaucaccggcaagcccugccccaagccccacagacugaaccacaugggcaucugcagcugcggccuguacaagcaccccggcgugcccgugaaguggaagagaugaggacuaguuauaagacugacuagcccgaugggccucccaacgggcccuccuccccuccuugcaccgagauuaauaaaaaaaaaaaaaaaaaaaaaaaaaaaaaaaaaaaaaaaaaaaaaaaaaaaaaaaaaaaaaaaaaaaaaaaaaaaaaaaaaaaaaaaaaaaaaaaaaaaa

SEQ ID NO: 16691 - RNA, 1662 nt, Artificial Sequence
  mRNA product Design i-3 (A100) comprising derived and/or modified sequence from LASV(Lassa virus/H.sapiens-wt/NGA/2016/ISTH_0009;Clade II)__AVO03571__GPCmut1 (opt4)
aggagaaagcuuaccaugggccagaucaucaccuucuuccaggaggugccccacgugaucgaggaggugaugaacaucgugcugaucgcccugagccugcuggccauccugaagggcaucuacaacguggccaccugcggccugcugggccuggugagcuuccugcugcugugcggcagaagcugcagcaccaccuacaagggcguguacgagcugcagacccuggagcuggacauggccagccugaacaugaccaugccccugagcugcaccaagaacaacagccaccacuacaucauggugggcaacgagaccggccuggagcugacccugaccaacaccagcaucaucaaccacaaguucugcaaccugagcgacgcccacaagaagaaccuguacgaccacgcccugaugagcaucaucagcaccuuccaccugagcauccccaacuucaaccaguacgaggccaugagcugcgacuucaacggcggcagaaucagcgugcaguacaaccugagccacagcuacgccguggacgccgccaaccacugcggcaccaucgccaacggcgugcugcagaccuucaugagaauggccuggggcggcagcuacaucgcccuggacagcggcugcggcagcugggacugcaucaugaccagcuaccaguaccugaucauccagaacaccaccugggaggaccacugccaguucagcagacccagccccaucggcuaccugggccugcugagccagagaaccagagacaucuacaucagcagaagacgccggggcaccuucaccuggacccugagcgacagcgagggcaacgagacccccggcggcuacugccugaccagauggaugcugaucgaggccgagcugaagugcuucggcaacaccgccguggccaagugcaacgagaagcacgacgaggaguucugcgacaugcugagacuguucgacuucaacaagcaggccaucagaagacugaagacccccgcccagaugagcauccagcugaucaacaaggccgugaacgcccugaucaacgaccagcugaucaugaagaaccaccugagagacaucaugugcauccccuacugcaacuacagcaaguacugguaccugaaccacaccgugaccggcaagaccagccugcccagaugcuggcuggugagcaacggcagcuaccugaacgagacccacuucagcgacgacaucgagcagcaggccgacaacaugaucaccgagcugcugcagaaggaguacaucgacagacagggcaagaccccccugggccugguggaccuguucguguucagcaccagcuucuaccugaucagcaucuuccugcaccuggugaagauccccacccacagacacaucaccggcaagcccugccccaagccccacagacugaaccacaugggcaucugcagcugcggccuguacaaccaccccggcgugcccgugaaguggaagagaugaggacuaguuauaagacugacuagcccgaugggccucccaacgggcccuccuccccuccuugcaccgagauuaauaaaaaaaaaaaaaaaaaaaaaaaaaaaaaaaaaaaaaaaaaaaaaaaaaaaaaaaaaaaaaaaaaaaaaaaaaaaaaaaaaaaaaaaaaaaaaaaaaaaa

SEQ ID NO: 16692 - RNA, 1662 nt, Artificial Sequence
  mRNA product Design i-3 (A100) comprising derived and/or modified sequence from LASV(Lassa virus/H.sapiens-wt/NGA/2016/ISTH_0017;Clade II)__AVO03567__GPCmut1 (opt4)
aggagaaagcuuaccaugggccagaucaucaccuucuuccaggaggugccccacgugaucgaggaggugaugaacaucgugcugaucgcccugagccugcuggccauccugaagggcaucuacaacguggccaccugcggccuguucggccuggugagcuuccugcugcugugcggcagaagcugcagcaccaccuacaagggcguguacgagcugcagacccuggagcuggacauggccagccugaacaugaccaugccccugagcugcaccaagaacaacagccaccacuacaucauggugggcaacgagaccggccuggagcugacccugaccaacaccagcaucaucaaccacaaguucugcaaccugagcgacgcccacaagaagaaccuguacgaccacgcccugaugagcaucaucagcaccuuccaccugagcauccccaacuucaaccaguacgaggccaugagcugcgacuucaacggcggcaagaucagcgugcaguacaaccugagccacaccuacgccaucgacgccgccaaccacugcggcaccaucgccaacggcgugcugcagaccuucaugagaauggccuggggcggcagcuacaucgcccuggacagcggcugcggcagcugggacugcaucaugaccagcuaccaguaccugaucauccagaacaccaccugggaggaccacugccaguucagcagacccagccccaucggcuaccugggccugcugagccagagaaccagagacaucuacaucagcagaagacgccggggcaccuucaccuggacccugagcgacagcgagggcaacgagacccccggcggcuacugccugaccagauggaugcugaucgaggccgagcugaagugcuucggcaacaccgccguggccaagugcaacgagaagcacgacgaggaguucugcgacaugcugagacuguucgacuucaacaagcaggccaucagaagacugaagacccccgcccagaugagcauccagcugaucaacaaggccgugaacgcccugaucaacgaccagcugaucaugaagaaccaccugagagacaucaugugcauccccuacugcaacuacagcaaguacugguaccugaaccacaccgugaccggcaagaccagccugcccagaugcuggcuggugagcaacggcagcuaccugaacgagacccacuucagcgacgacaucgagcagcaggccgacaacaugaucaccgagcugcugcagaaggaguacauggacagacagggcaagaccccccugggccugguggaccuguucguguucagcaccagcuucuaccugaucagcaucuuccugcaccuggugagaauccccacccacagacacgugaucggcaagcccugccccaagccccacagacugaaccacaugggcaucugcagcugcggccuguacaagcaccccggcgugcccgugaaguggaagagaugaggacuaguuauaagacugacuagcccgaugggccucccaacgggcccuccuccccuccuugcaccgagauuaauaaaaaaaaaaaaaaaaaaaaaaaaaaaaaaaaaaaaaaaaaaaaaaaaaaaaaaaaaaaaaaaaaaaaaaaaaaaaaaaaaaaaaaaaaaaaaaaaaaaa

SEQ ID NO: 16693 - RNA, 1662 nt, Artificial Sequence
  mRNA product Design i-3 (A100) comprising derived and/or modified sequence from LASV(Lassa virus/H.sapiens-wt/NGA/2018/ISTH_0959;Clade II)__AVV65099__GPCmut1 (opt4)
aggagaaagcuuaccaugggccagaucaucaccuucuuccaggaggugccccacgugaucgaggaggugaugaacaucgugcugaucgcccugagccugcuggccauccugaagggcaucuacaacguggugaccugcggccuguucggccuggugagcuuccugcugcugugcggcagaagcugcagcaccaccuacaagggcguguacgagcugcagacccuggagcuggacauggccagccugaacaugaccaugccccugagcugcaccaagaacaacagccaccacuacaucauggugggcaacgagaccggccuggagcugacccugaccaacaccagcaucaucaaccacaaguucugcaaccugagcgacgcccacaagaagaaccuguacgaccacgcccugaugagcaucaucagcaccuuccaccugagcauccccaacuucaaccaguacgaggccaugagcugcgacuucaacggcggcaagaucagcgugcaguacaaccugagccacgccuacgccaucgacgccgccaaccacugcggcaccaucgccaacggcgugcugcagaccuucaugagaauggccuggggcggcagcuacaucgcccuggacagcggcugcggcagcugggacugcaucaugaccagcuaccaguaccugaucauccagaacaccaccugggaggaccacugccaguucagcagacccagccccaucggcuaccugggccugcugagccagagaaccagagacaucuacaucagcagaagacgccggggcaccuucaccuggacccugagcgacagcgagggcaacgagacccccggcggcuacugccugaccagauggaugcugaucgaggccgagcugaagugcuucggcaacaccgccguggccaagugcaacgagaagcacgacgaggaguucugcgacaugcugagacuguucgacuucaacaagcaggccaucagaagacugaagacccccgcccagaugagcauccagcugaucaacaaggccgugaacgcccugaucaacgaccagcugaucaugaagaaccaccugagagacaucaugugcauccccuacugcaacuacagcaaguacugguaccugaaccacaccgugaccggcaagaccagccugcccagaugcuggcuggugagcaacggcagcuaccugaacgagacccacuucagcgacgacaucgagcagcaggccgacaacaugaucaccgagcugcugcagaaggaguacaucgacagacagggcaagaccccccugggccugguggaccuguucguguucagcaccagcuucuaccugaucagcaucuuccugcaccuggugaagauccccacccacagacacgugaucggcaagcccugccccaagccccacagacugaaccacaugggcaucugcagcugcggccuguacaagcaccccggcgugcccgugaaguggaagagaugaggacuaguuauaagacugacuagcccgaugggccucccaacgggcccuccuccccuccuugcaccgagauuaauaaaaaaaaaaaaaaaaaaaaaaaaaaaaaaaaaaaaaaaaaaaaaaaaaaaaaaaaaaaaaaaaaaaaaaaaaaaaaaaaaaaaaaaaaaaaaaaaaaaa

SEQ ID NO: 16694 - RNA, 1662 nt, Artificial Sequence
  mRNA product Design i-3 (A100) comprising derived and/or modified sequence from LASV(LASV003-NIG-2008;Clade II)__AIT17580__GPCmut1 (opt4)
aggagaaagcuuaccaugggccagaucaucaccuucuuccaggaggugccccacgugaucgaggaggugaugaacaucgugcugaucgcccugagccugcuggccauccugaagggcaucuacaacguggccaccugcggccuguucggccuggugagcuuccugcugcugugcggcagaagcugcagcaccaccuacaagggcguguacgagcugcagacccuggagcuggacauggccagccugaacaugaccaugccccugagcugcaccaagaacaacagccaccacuacaucauggugggcaacgagaccggccuggagcugacccugaccaacaccagcaucaucaaccacaaguucugcaaccugagcgacgcccacaagaagaaccuguacgaccacgcccugaugagcaucaucagcaccuuccaccugagcauccccaacuucaaccaguacgaggccaugagcugcgacuucaacggcggcaagaucagcgugcaguacaaccugagccacaccuacgccguggacgccgccaaccacugcggcaccaucgccaacggcgugcugcagaccuucaugagaauggccuggggcggcagcuacaucgcccuggacagcggcugcggcagcugggacugcaucaugaccagcuaccaguaccugaucauccagaacaccaccugggaggaccacugccaguucagcagacccagccccaucggcuaccugggccugcugagccagagaaccagagacaucuacaucagcagaagacgccggggcaccuucaccuggacccugagcgacagcgagagcaacgagacccccggcggcuacugccugaccagauggaugcugaucgaggccgagcugaagugcuucggcaacaccgccguggccaagugcaacgagaagcacgacgaggaguucugcgacaugcugagacuguucgacuucaacaagcaggccaucagaagacugaaggcccccgcccagaugagcauccagcugaucaacaaggccgugaacgcccugaucaacgaccagcugaucaugaagaaccaccugagagacaucaugugcauccccuacugcaacuacagcaaguacugguaccugaaccacaccgugaccggcagaaccagccugcccagaugcuggcuggugagcaacggcagcuaccugaacgagacccacuucagcgacgacaucgagcagcaggccgacaacaugaucaccgagcugcugcagaaggaguacauggacagacagggcaagaccccccugggccugguggaccuguucguguucagcaccagcuucuaccugaucagcaucuuccugcaccuggugaagauccccacccacagacacgugaucggcaagcccugccccaagccccacagacugaaccacaugggcaucugcagcugcggccuguacaagcaccccggcgugcccgugaaguggaagagaugaggacuaguuauaagacugacuagcccgaugggccucccaacgggcccuccuccccuccuugcaccgagauuaauaaaaaaaaaaaaaaaaaaaaaaaaaaaaaaaaaaaaaaaaaaaaaaaaaaaaaaaaaaaaaaaaaaaaaaaaaaaaaaaaaaaaaaaaaaaaaaaaaaaa

SEQ ID NO: 16695 - RNA, 1662 nt, Artificial Sequence
  mRNA product Design i-3 (A100) comprising derived and/or modified sequence from LASV(LASV035-NIG-2009;Clade II)__AIT17588__GPCmut1 (opt4)
aggagaaagcuuaccaugggccagaucaucaccuucuuccaggaggugccccacgugaucgaggaggugaugaacaucgugcugaucgcccugagccugcuggccauccugaagggcaucuacaacguggccaccugcggccuguucggccuggugagcuuccugcugcugugcggcagaagcugcagcaccaccuacaagggcguguacgagcugcagacccuggagcuggacauggccagccugaacaugaccaugccccugagcugcaccaagaacaacagccaccacuacaucauggugggcaacgagaccggccuggagcugacccugaccaacaccagcaucaucaaccacaaguucugcaaccugagcgacgcccacaagaagaaccuguacgaccacgcccugaugagcaucaucagcaccuuccaccugagcauccccaacuucaaccaguacgaggccaugagcugcgacuucaacggcggcaagaucagcgugcaguacaaccugagccacgccuacgccguggacgccgccaaccacugcggcaccaucgccaacggcgugcugcagaccuucaugagaauggccuggggcggcagcuacaucgcccuggacagcggcugcggcagcugggacugcaucaugaccagcuaccaguaccugaucauccagaacaccaccugggaggaccacugccaguucagcagacccagccccaucggcuaccugggccugcugagccagagaaccagagacaucuacaucagcagaagacgccggggcaccuucaccuggacccugagcgacagcgagggcaacgagacccccggcggcuacugccugaccagauggaugcugaucgaggccgagcugaagugcuucggcaacaccgccguggccaagugcaacgagaagcacgacgaggaguucugcgacaugcugagacuguucgacuucaacaagcaggccaucagaagacugaaggcccccgcccagaugagcauccagcugaucaacaaggccgugaacgcccugaucaacgaccagcugaucaugaagaaccaccugagagacaucaugugcauccccuacugcaacuacagcaaguacugguaccugaaccacaccgugaccggcaagaccagccugcccagaugcuggcuggugagcaacggcagcuaccugaacgagacccacuucagcgacgacaucgagcagcaggccgacaacaugaucaccgagcugcugcagaaggaguacaucgacagacagggcaagaccccccugggccugguggaccuguucguguucagcaccagcuucuaccugaucagcaucuuccugcaccuggugaagauccccacccacagacacgugaucggcaagcccugccccaagccccacagacugaaccacaugggcaucugcagcugcggccuguacaagcaccccggcgugcccgugaaguggaagagaugaggacuaguuauaagacugacuagcccgaugggccucccaacgggcccuccuccccuccuugcaccgagauuaauaaaaaaaaaaaaaaaaaaaaaaaaaaaaaaaaaaaaaaaaaaaaaaaaaaaaaaaaaaaaaaaaaaaaaaaaaaaaaaaaaaaaaaaaaaaaaaaaaaaa

SEQ ID NO: 16696 - RNA, 1662 nt, Artificial Sequence
  mRNA product Design i-3 (A100) comprising derived and/or modified sequence from LASV(LASV1000-NIG-2009;Clade II)__AIT17782__GPCmut1 (opt4)
aggagaaagcuuaccaugggccagaucaucaccuucuuccaggaggugccccacgugaucgaggaggugaugaacaucgugcugaucgcccugagccugcuggccauccugaagggcaucuacaacguggccaccugcggccuguucggccuggugagcuuccugcugcugugcggcagaagcugcagcaccaccuacaagggcguguacgagcugcagacccuggagcuggacauggccagccugaacaugaccaugccccugagcugcaccaagaacaacagccaccacuacaucauggugggcaacgagaccggccuggagcugacccugaccaacaccagcaucaucaaccacaaguucugcaaccugagcgacgcccacaagaagaaccuguacgaccacgcccugaugagcaucaucagcaccuuccaccugagcauccccaacuucaaccaguacgaggccaugagcugcgacuucaacggcggcaagaucagcgugcaguacaaccugagccacaccuacgccguggacgccgccaaccacugcggcaccaucgccaacggcgugcugcagaccuucaugagaauggccuggggcggcagcuacaucgcccuggacagcggcugcggcagcugggacugcaucaugaccagcuaccaguaccugaucauccagaacaccaccugggaggaccacugccaguucagcagacccagccccaucggcuaccugggccugcugagccagagaaccagagacaucuacaucagcagaagacgccggggcaccuucaccuggacccugagcgacagcgagggcaacgagacccccggcggcuacugccugaccagauggaugcugaucgaggccgagcugaagugcuucggcaacaccgccguggccaagugcaacgagaagcacgacgaggaguucugcgacaugcugagacuguucgacuucaacaagcaggccaucaagagacugaagacccccgcccagaugagcauccagcugaucaacaaggccgugaacgcccugaucaacgaccagcugaucaugaagaaccaccugagagacaucaugugcauccccuacugcaacuacagcaaguacugguaccugaaccacaccgugaccggcaagaccagccugcccagaugcuggcuggugagcaacggcagcuaccugaacgagacccacuucagcgacgacaucgagcagcaggccgacaacaugaucaccgagcugcugcagaaggaguacaucgacagacagggcaagaccccccugggccugguggaccuguucguguucagcaccagcuucuaccugaucagcaucuuccugcaccuggugaagauccccacccacagacacguggugggcaagcccugccccaagccccacagacugaaccacaugggcaucugcagcugcggccuguacaagcaccccggcgugcccgugaaguggaagagaugaggacuaguuauaagacugacuagcccgaugggccucccaacgggcccuccuccccuccuugcaccgagauuaauaaaaaaaaaaaaaaaaaaaaaaaaaaaaaaaaaaaaaaaaaaaaaaaaaaaaaaaaaaaaaaaaaaaaaaaaaaaaaaaaaaaaaaaaaaaaaaaaaaaa

SEQ ID NO: 16697 - RNA, 1662 nt, Artificial Sequence
  mRNA product Design i-3 (A100) comprising derived and/or modified sequence from LASV(LASV221-NIG-2010;Clade II)__AIT17624__GPCmut1 (opt4)
aggagaaagcuuaccaugggccagaucaucaccuucuuccaggaggugccccacgugaucgaggaggugaugaacaucgugcugaucgcccugagccugcuggccauccugaagggcaucuacaacguggccaccugcggccuguucggccuggugagcuuccugcugcugugcggcagaagcugcagcaccaccuacaagggcguguacgagcugcagacccuggagcuggacauggccagccugaacaugaccaugccccugagcugcaccaagaacaacagccaccacuacaucauggugggcaacgagaccggccuggagcugacccugaccaacaccagcaucaucaaccacaaguucugcaaccugagcgacgcccacaagaagaaccuguacgaccacgcccugaugagcaucaucagcaccuuccaccugagcauccccaacuucaaccaguacgaggccaugagcugcgacuucaacggcggcaagaucagcgugcaguacaaccugagccacaccuacgccaucgacgccgccaaccacugcggcaccaucgccaacggcgugcugcagaccuucaugagaauggccuggggcggcagcuacaucgcccuggacagcggcugcggcagcugggacugcaucaugaccagcuaccaguaccugaucauccagaacaccaccugggaggaccacugccaguucagcagacccagccccaucggcuaccugggccugcugagccagagaaccagagacaucuacaucagcagaagacgccggggcaccuucaccuggacccugagcgacagcgagggcaacgagacccccggcggcuacugccugaccagauggaugcugaucgaggccgagcugaagugcuucggcaacaccgccguggccaagugcaacgagaagcacgacgaggaguucugcgacaugcugagacuguucgacuucaacaagcaggccaucagaagacugaagacccccgcccagaugagcauccagcugaucaacaaggccgugaacgcccugaucaacgaccagcugaucaugaagaaccaccugagagacaucaugugcauccccuacugcaacuacagcaaguacugguaccugaaccacaccgugaccggcaagaccagccugcccagaugcuggcuggugagcaacggcagcuaccugaacgagacccacuucagcgacgacaucgagcagcaggccgacaacaugaucaccgagaugcugcagaaggaguacauggacagacagggcaagaccccccugggccugguggaccuguucguguucagcaccagcuucuaccugaucagcaucuuccugcaccuggugaagauccccacccacagacacgugaucggcaagcccugccccaagccccacagacugaaccacaugggcaucugcagcugcggccuguacaagcaccccggcgugcccgugaaguggaagagaugaggacuaguuauaagacugacuagcccgaugggccucccaacgggcccuccuccccuccuugcaccgagauuaauaaaaaaaaaaaaaaaaaaaaaaaaaaaaaaaaaaaaaaaaaaaaaaaaaaaaaaaaaaaaaaaaaaaaaaaaaaaaaaaaaaaaaaaaaaaaaaaaaaaa

SEQ ID NO: 16698 - RNA, 1662 nt, Artificial Sequence
  mRNA product Design i-3 (A100) comprising derived and/or modified sequence from LASV(LASV237-NIG-2010;Clade II)__AIT17638__GPCmut1 (opt4)
aggagaaagcuuaccaugggccagaucaucaccuucuuccaggaggugccccacgugaucgaggaggugaugaacaucgugcugaucgcccugagccugcuggccauccugaagggcaucuacaacguggccaccugcggccuguucggccuggugagcuuccugcugcugugcggcagaagcugcagcaccaccuacaagggcguguacgagcugcagacccuggagcuggacauggccagccugaacaugaccaugccccugagcugcaccaagaacaacagccaccacuacaucauggugggcaacgagaccggccuggagcugacccugaccaacaccagcaucaucaaccacaaguucugcaaccugagcgacgcccacaagaaggaccuguacgaccacgcccugaugagcaucaucagcaccuuccaccugagcauccccaacuucaaccaguacgaggccaugagcugcgacuucaacggcggcaagaucagcgugcaguacaaccugagccacaccuacgccguggacgccgccaaccacugcggcaccaucgccaacggcgugcugcagaccuucaugagaauggccuggggcggcagcuacaucgcccuggacagcggcugcggcagcugggacugcaucaugaccagcuaccaguaccugaucauccagaacaccaccugggaggaccacugccaguucagcagacccagccccaucggcuaccugggccugcugagccagagaaccagagacaucuacaucagcagaagacgccggggcaccuucaccuggacccugagcgacagcgagggcaacgagacccccggcggcuacugccugaccagauggaugcugaucgaggccgagcugaagugcuucggcaacaccgccguggccaagugcaacgagaagcacgacgaggaguucugcgacaugcugagacuguucgacuucaacaagcaggccaucagaagacugaagacccccgcccagaugagcauccagcugaucaacaaggccgugaacgcccugaucaacgaccagcugaucaugaagaaccaccugagagacaucaugugcauccccuacugcaacuacagcaaguacugguaccugaaccacaccgugaccggcaagaccagccugcccagaugcuggcuggugagcaacggcagcuaccugaacgagacccacuucagcgacgacaucgagcagcaggccgacaacaugaucaccgagcugcugcagaaggaguacauggacagacagggcaagaccccccugggccugguggaccuguucguguucagcaccagcuucuaccugaucagcaucuuccugcaccugaucaagauccccacccacagacacaucaccggcaagcccugccccaagccccacagacugaaccacaugggcaucugcagcugcggccuguacaagcaccccggcgugcccgugaaguggaagagaugaggacuaguuauaagacugacuagcccgaugggccucccaacgggcccuccuccccuccuugcaccgagauuaauaaaaaaaaaaaaaaaaaaaaaaaaaaaaaaaaaaaaaaaaaaaaaaaaaaaaaaaaaaaaaaaaaaaaaaaaaaaaaaaaaaaaaaaaaaaaaaaaaaaa

SEQ ID NO: 16699 - RNA, 1662 nt, Artificial Sequence
  mRNA product Design i-3 (A100) comprising derived and/or modified sequence from LASV(LASV253-NIG-2011;Clade II)__AIT17670__GPCmut1 (opt4)
aggagaaagcuuaccaugggccagaucaucaccuucuuccaggaggugccccacgugaucgaggaggugaugaacaucgugcugaucgcccugagccugcuggccauccugaagggcaucuacaacguggccaccugcggccuguucggccuggugagcuuccugcugcugugcggcagaagcugcagcaccaccuacaagggcguguacgagcugcagacccuggagcuggacauggccagccugaacaugaccaugccccugagcugcaccaagaacaacagccaccacuacaucauggugggcaacgagaccggccuggagcugacccugaccaacaccagcaucaucaaccacaaguucugcaaccugagcgacgcccacaagaagaaccuguacgaccacgcccugaugagcaucaucagcaccuuccaccugagcauccccaacuucaaccaguacgaggccaugagcugcgacuucaacggcggcaagaucagcgugcaguacaaccugagccacaccuacgccguggacgccgccaaccacugcggcaccaucgccaacggcgugcugcagaccuucaugagaauggccuggggcggcagcuacaucgcccuggacagcggcugcggcagcugggacugcaucaugaccagcuaccaguaccugaucauccagaacaccaccugggaggaccacugccaguucagcagacccagccccaucggcuaccugggccugcugagccagagaaccagagacaucuacaucagcagaagacgccggggcaccuucaccuggacccugagcgacagcgagggcaacgagacccccggcggcuacugccugaccagauggaugcugaucgaggccgagcugaagugcuucggcaacaccgccguggccaagugcaacgagaagcacgacgaggaguucugcgacaugcugagacuguucgacuucaacaagcaggccaucagaagacugaaggcccccgcccagaugagcauccagcugaucaacaaggccgugaacgcccugaucaacgaccagcugaucaugaagaaccaccugagagacaucaugugcauccccuacugcaacuacagcaaguacugguaccugaaccacaccgugaccggcagaaccagccugcccagaugcuggcuggugagcaacggcagcuaccugaacgagacccacuucagcgacgacaucgagcagcaggccgacaacaugaucaccgagcugcugcagaaggaguacaucgacagacagggcaagaccccccugggccugguggaccuguucguguucagcaccagcuucuaccugaucagcaucuuccugcaccuggugaagauccccacccacagacacaucaucggcaagcccugccccaagccccacagacugaaccacaugggcaucugcagcugcggccuguacaagcaccccggcgugcccgugaaguggaagagaugaggacuaguuauaagacugacuagcccgaugggccucccaacgggcccuccuccccuccuugcaccgagauuaauaaaaaaaaaaaaaaaaaaaaaaaaaaaaaaaaaaaaaaaaaaaaaaaaaaaaaaaaaaaaaaaaaaaaaaaaaaaaaaaaaaaaaaaaaaaaaaaaaaaa

SEQ ID NO: 16700 - RNA, 1662 nt, Artificial Sequence
  mRNA product Design i-3 (A100) comprising derived and/or modified sequence from LASV(LASV254-NIG-2011;Clade II)__AIT17674__GPCmut1 (opt4)
aggagaaagcuuaccaugggccagaucaucaccuucuuccaggaggugccccacgugaucgaggaggugaugaacaucgugcugaucgcccugagccugcuggccauccugaagggcaucuacaacguggccaccugcggccuguucggccuggugagcuuccugcugcugugcggcagaagcugcagcaccaccuacaagggcguguacgagcugcagacccuggagcuggacaugaccaaccugaacaugaccaugccccugagcugcaccaagaacaacagccaccacuacaucauggugggcaacgagaccggccuggagcugacccugaccaacaccagcaucaucaaccacaaguucugcaaccugagcgacgcccacaagaagaaccuguacaaccacgcccugaugagcaucaucagcaccuuccaccugagcauccccaacuucaaccaguacgaggccaugagcugcgacuucaacggcggcaagaucagcgugcaguacaaccugagccacagcuacgccguggacgccgccaaccacugcggcaccaucgccaacggcgugcugcagaccuucaugagaauggccuggggcggcagcuacaucgcccuggacagcggcugcggcaacugggacugcaucaugaccagcuaccaguaccugaucauccagaacaccaccugggaggaccacugccaguucagcagacccagccccaucggcuaccugggccugcugagccagagaaccagagacaucuacaucagcagaagacgccggggcaccuucaccuggacccugagcgacagcgagggcaacgagacccccggcggcuacugccugaccagauggaugcugaucgaggccgagcugaagugcuucggcaacaccgccguggccaagugcaacgagaagcacgacgaggaguucugcgacaugcugagacuguucgacuucaacaagcaggccaucagaagacugaagacccccgcccaggccaacauccagcugaucaacaaggccgugaacgcccugaucaacgaccagcugaucaugaagaaccaccugagagacaucaugugcauccccuacugcaacuacagcaaguacugguaccugaaccacaccgugaccggcaagaccagccugcccagaugcuggcuggugagcaacggcagcuaccugaacgagacccacuucagcgacgacaucgagcagcaggccgacaacaugaucaccgagcugcugcagaaggaguacauggacagacagggcaagaccccccugggccugguggaccuguucguguucagcaccagcuucuaccugaucagcaucuuccugcaccuggugaagauccccacccacagacacgugaucggcaagcccugccccaagccccacagacugaaccacaugggcaucugcagcugcggccuguacaagcaccccggcgugcccgugaaguggaagagaugaggacuaguuauaagacugacuagcccgaugggccucccaacgggcccuccuccccuccuugcaccgagauuaauaaaaaaaaaaaaaaaaaaaaaaaaaaaaaaaaaaaaaaaaaaaaaaaaaaaaaaaaaaaaaaaaaaaaaaaaaaaaaaaaaaaaaaaaaaaaaaaaaaaa

SEQ ID NO: 16701 - RNA, 1662 nt, Artificial Sequence
  mRNA product Design i-3 (A100) comprising derived and/or modified sequence from LASV(Nig08-A19;Clade III)__ADU56618__GPCmut1 (opt4)
aggagaaagcuuaccaugggccagaucgugaccuucuuccaggaggugccccacgugaucgaggaggugaugaacaucgugcugaucgcccugagcauccuggccauccugaagggccuguacaacaucgccaccugcggccugaucggccuggugaccuuccugcugcugagcggcagaagcugcagcaugaccuacaagggcguguacgagcugcagacccuggagcugaacaugaacacccugaacaugaccaugccccugagcugcaccaagaacaacagccaccacuacaucauggugggcaacgagaccggccuggagcugacccugaccaacaccagccugcugcaccacaaguucugcaaccugagcgacgcccacaagaagaaccuguacgaccacacccugaugagcaucaucagcaccuuccaccugagcauccccaacuucaaccaguacgaggccaugagcugcgacuucaacggcggcaagaucaccgugcaguacaaccugagccacagcuacgccaucgacgccgccaaccacugcggcaccguggccaacggcgugcugcagaccuucaugagaauggccuggggcggcagcuacaucgcccuggacagcggcugcggcaagugggacugcaucaugaccagcuaccaguaccugaucauccagaacaccaccugggaggaccacugccaguucagcagacccagccccaucggcuaccugggccugcugagccagagaaccagagacaucuacaucagcagaagacgccggggcaccuucaccuggacccugagcgacagcgagggcaacgagacccccggcggcuacugccugaccagauggaugcugaucgaggccgagcugaagugcuucggcaacaccgccguggccaagugcaacgagaagcacgacgaggaguucugcgacaugcugagacuguucgacuucaacaagcaggccaucagaagacugaaggcccccgcccagaugagcauccagcugaucaacaaggccgugaacgcccugaucaacgaccagcugaucaugaagaaccaccugagagacaucaugugcauccccuacugcaacuacagcaaguacugguaccugaaccacaccagcaccggcagaaccagccugcccagaugcuggcuggugagcaacggcagcuaccugaacgagacccacuucagcgacgacaucgagcagcaggccgacaacaugaucaccgagaugcugcagaaggaguaccuggacagacagggcaagaccccccugggccugguggaccuguucguguucagcaccagcuucuaccugaucagcaucuuccugcaccuggugaagauccccacccacagacacaucgugggcaagcccugccccaagccccacagacugaaccacaugggcaucugcagcugcggccuguacaagcagcccggcgugcccgugagauggaagagaugaggacuaguuauaagacugacuagcccgaugggccucccaacgggcccuccuccccuccuugcaccgagauuaauaaaaaaaaaaaaaaaaaaaaaaaaaaaaaaaaaaaaaaaaaaaaaaaaaaaaaaaaaaaaaaaaaaaaaaaaaaaaaaaaaaaaaaaaaaaaaaaaaaaa

SEQ ID NO: 16702 - RNA, 1665 nt, Artificial Sequence
  mRNA product Design i-3 (A100) comprising derived and/or modified sequence from LASV(G1180-SLE-2010;Clade IV)__AIT17168__GPCmut1 (opt4)
aggagaaagcuuaccaugggccagaucgugaccuucuuccaggaggugccccacgugaucgaggaggugaugaacaucgugcugaucgcccugagcauccuggccgugcugaagggccuguacaacuucgccaccugcggccuggugggccugcugaccuuccugcugcugugcggcagaagcugcaccgccagcagauacaagggcguguacgagcugcagacccuggagcugaacauggagacccugaacaugaccaugccccugagcugcaccaagaacaacagccaccacuacaucauggugggcaacgagaccggccuggagcugacccugaccaacaccagcaucaucaaccacaaguucugcaaccugagcgacgcccacaagaagaaccuguacgaccacgcccugaugagcaucaucagcaccuuccaccugagcauccccaacuucaaccaguacgaggccaugagcugcgacuucaacggcggcaagaucagcgugcaguacaaccugagccacagcuacgccggcgacgccgccaaccacugcggcaccguggccaacggcgugcugcagaccuucaugagaauggccuggggcggcagcuacaucgcccuggacagcggcugcggcagcugggacugcaucaugaccagcuaccaguaccugaucauccagaacaccaccugggaggaccacugccaguucagcagacccagccccaucggcuaccugggccugcugagccagagaaccagagacaucuacaucagcagaagacgccggggcaccuucaccuggacccugagcgacagcgagggcaaggacacccccggcggcuacugccugaccagauggaugcugaucgaggccgagcugaagugcuucggcaacaccgccguggccaagugcaacgagaagcacgacgaggaguucugcgacaugcugagacuguucgacuucaacaagcaggccauccagagacugaaggcccccgcccagaugagcauccagcugaucaacaaggccgugaacgcccugaucaacgaccagcugaucaugaagaaccaccugagagacaucaugugcauccccuacugcaacuacagcaaguacugguaccugaaccacaccaccaccggcaagaccagccugcccaagugcuggcuggugagcaacggcagcuaccugaacgagacccacuucagcgacgacaucgagcagcaggccgacaacaugaucaccgagaugcugcagaaggaguacauggagagacagggcaagaccccccugggccugguggaccuguucguguucagcaccagcuucuaccugaucagcaucuuccugcaccuggugaagauccccacccacagacacaucgugggcaagagcugccccaagccccacagacugaaccacaugggcaucugcagcugcggccuguacaagcagcccggcgugcccgugaaguggaagagaugaggacuaguuauaagacugacuagcccgaugggccucccaacgggcccuccuccccuccuugcaccgagauuaauaaaaaaaaaaaaaaaaaaaaaaaaaaaaaaaaaaaaaaaaaaaaaaaaaaaaaaaaaaaaaaaaaaaaaaaaaaaaaaaaaaaaaaaaaaaaaaaaaaaa

SEQ ID NO: 16703 - RNA, 1665 nt, Artificial Sequence
  mRNA product Design i-3 (A100) comprising derived and/or modified sequence from LASV(G1442-SLE-2011;Clade IV)__AIT17180__GPCmut1 (opt4)
aggagaaagcuuaccaugggccagaucgugaccuucuuccaggaggugccccacgugaucgaggaggugaugaacaucgugcugaucgcccugagcauccuggccgugcugaagggccuguacaacguggccaccugcggccugaucggccuggugaccuuccugcugcugugcggcagaagcugcaccaccacccuguacaagggcguguacgagcugcagacccuggagcugaacauggagacccugaacaugaccaugccccugagcugcaccaagaacaacagccaccacuacaucagagugggcaacgagaccggccuggagcugacccugaccaacaccagcaucaucaaccacaaguucugcaaccugagcgacgcccacaagaagaaccuguacgaccacgcccugaugagcaucaucagcaccuuccaccugagcauccccaacuucaaccaguacgaggccaugagcugcgacuucaacggcggcaagaucagcgugcaguacaaccugagccacagcuacgccggcgacgccgccaaccacugcggcaccguggccaacggcgugcugcagaccuucaugagaauggccuggggcggcagcuacaucgcccuggacagcggcugcggcaacugggacugcaucaugaccagcuaccaguaccugaucauccagaacaccaccugggacgaccacugccaguucagcagacccagccccaucggcuaccugggccugcugagccagagaaccagagacguguacaucagcagaagacgccggggcaccuucaccuggacccugagcgacagcgagggcaaggacacccccggcggcuacugccugaccagauggaugcugaucgaggccgagcugaagugcuucggcaacaccgccguggccaagugcaacgagaagcacgacgaggaguucugcgacaugcugagacuguucgacuucaacaagcaggccauccagagacugaaggcccccgcccagaugagcauccagcugaucaacaaggccgugaacgcccugaucaacgaccagcugaucaugaagaaccaccugagagacaucaugugcauccccuacugcaacuacagcaaguacugguaccugaacaacaccgccaccggcaagaccagccugcccaagugcuggcugaucagcaacggcagcuaccugaacgagacccacuucagcgacgacaucgagcaggaggccgacaacaugaucaccgagaugcugcagaaggaguacauggagagacagggcaagaccccccugggccugguggaccuguucguguucagcaccagcuucuaccugaucagcaucuuccugcaccuggugaagauccccacccacagacacaucgugggcaagagcugccccaagccccacagacugaaccacaugggcaucugcagcugcggccuguacaagcagcccggcgugcccgugagauggaagagaugaggacuaguuauaagacugacuagcccgaugggccucccaacgggcccuccuccccuccuugcaccgagauuaauaaaaaaaaaaaaaaaaaaaaaaaaaaaaaaaaaaaaaaaaaaaaaaaaaaaaaaaaaaaaaaaaaaaaaaaaaaaaaaaaaaaaaaaaaaaaaaaaaaaa

SEQ ID NO: 16704 - RNA, 1665 nt, Artificial Sequence
  mRNA product Design i-3 (A100) comprising derived and/or modified sequence from LASV(G3010-SLE-2013;Clade IV)__AIT17344__GPCmut1 (opt4)
aggagaaagcuuaccaugggccagaucgugaccuucuuccaggaggugccccacgugaucgaggaggugaugaacaucgugcugaucgcccugagcauccuggccgugcugaagggccuguacaacuucgccaccugcggccuggugggccuggugaccuuccugcugcugugcggcagaagcugcaccaccagccuguacaagggcguguacgagcugcagacccuggagcugaacauggagacccugaacaugaccaugccccugagcugcaccaagaacaacagccaccacuacaucauggugggcaacgagaccggccuggagcugacccugaccaacaccagcaucaucaaccacaaguucugcaaccugagcgacgcccacaagaagaaccuguacaaccacgcccugaugagcaucaucagcaccuuccaccugagcauccccaacuucaaccaguacgaggccaugagcugcgacuucaacggcggcaagaucagcgugcaguacaaccugagccacagcuacgccggcgacgccgccagccacugcggcaccguggccaacggcgugcugcagaccuucaugagaauggccuggggcggcagcuacaucgcccuggacagcggcugcggcaagugggacugcaucaugaccagcuaccaguaccugaucauccagaacaccaccugggaggaccacugccaguucagcagacccagccccaucggcuaccugggccugcugagccagagaaccagagacaucuacaucagcagaagacgccggggcaccuucaccuggacccugagcgacagcgagggcaaggacacccccggcggcuacugccugaccagauggaugcugaucgaggccgagcugaagugcuucggcaacaccgccguggccaagugcaacgagaagcacgacgaggaguucugcgacaugcugagacuguucgacuucaacaagcaggccauccagagacugaagacccccgcccagaugagcauccagcugaucaacaaggccgugaacgcccugaucaacgaccagcugaucaugaagaaccaccugagagacaucaugugcauccccuacugcaacuacagcaaguacugguaccugaaccacaccaccaccggcaagaccagccugcccaagugcuggcuggugagcaacggcagcuaccugaacgagacccacuucagcgacgacaucgagcagcaggccgacaacaugaucaccgagaugcugcagaaggaguacauggagagacagggcaagaccccccugggccugguggaccuguucguguucagcaccagcuucuaccugaucagcaucuuccugcaccuggugaagauccccacccacagacacaucgugggcaagagcugccccaagccccacagacugaaccacaugggcaucugcagcugcggccuguacaagcagcccggcgugcccgugagauggaagagaugaggacuaguuauaagacugacuagcccgaugggccucccaacgggcccuccuccccuccuugcaccgagauuaauaaaaaaaaaaaaaaaaaaaaaaaaaaaaaaaaaaaaaaaaaaaaaaaaaaaaaaaaaaaaaaaaaaaaaaaaaaaaaaaaaaaaaaaaaaaaaaaaaaaa

SEQ ID NO: 16705 - RNA, 1665 nt, Artificial Sequence
  mRNA product Design i-3 (A100) comprising derived and/or modified sequence from LASV(G502-SLE-2009;Clade IV)__AIT17126__GPCmut1 (opt4)
aggagaaagcuuaccaugggccagaucgugaccuucuuccaggaggugccccacgugaucgaggaggugaugaacaucgugcugaucgcccugagcauccuggccgugcugaagggccuguacaacuucgccaccugcggccuggugggccugcugaccuuccugcugcugugcggcagaagcugcaccaccggccuguacaagggcguguacgagcugcagacccuggagcugaacauggagacccugaacaugaccaugccccugagcugcaccaagaacaacagccaccacuacaucauggugggcaacgagaccggccuggagcugacccugaccaacaccagcaucaucaaccacaaguucugcaaccugagcgacgcccacaagaagaaccuguacgaccacgcccugaugagcaucaucagcaccuuccaccugagcauccccaacuucaaccaguacgaggccaugagcugcgacuucaacggcggcaagaucagcgugcaguacaaccugagccacagcuacgccggcgacgccgccgaccacugcggcaccguggccaacggcgugcugcagaccuucaugagaauggccuggggcggcagcuacaucgcccuggacagcggcugcggcagaugggacugcaucaugaccagcuaccaguaccugaucauccagaacaccaccugggaggaccacugccaguucagcagacccagccccaucggcuaccugggccugcugagccagagaaccagagacaucuacaucagcagaagacgccggggcaccuucaccuggacccugagcgacagcgagggcaaggacacccccggcggcuacugccugaccagauggaugcugaucgaggccgagcugaagugcuucggcaacaccgccguggccaagugcaacgagaagcacgacgaggaguucugcgacaugcugagacuguucgacuucaacaagcaggccauccagagacugaaggcccccgcccagaugagcauccagcugaucaacaaggccgugaacgcccugaucaacgaccagcuggugaugaagaaccaccugagagacaucaugugcauccccuacugcaacuacagcagauacugguaccugaaccacaccaccaccggcagaaccagccugcccaagugcuggcuggugagcaacggcagcuaccugaacgagacccacuucagcgacgacaucgagcagcaggccgacaacaugaucaccgagaugcugcagaaggaguacauggagagacagggcaagaccccccugggccugguggaccuguucguguucagcaccagcuucuaccugaucagcaucuuccugcaccuggugaagauccccacccacagacacaucgugggcaagagcugccccaagccccacagacugaaccacaugggcaucugcagcugcggccuguacaagcagcccggcgugcccgugaaguggaagagaugaggacuaguuauaagacugacuagcccgaugggccucccaacgggcccuccuccccuccuugcaccgagauuaauaaaaaaaaaaaaaaaaaaaaaaaaaaaaaaaaaaaaaaaaaaaaaaaaaaaaaaaaaaaaaaaaaaaaaaaaaaaaaaaaaaaaaaaaaaaaaaaaaaaa

SEQ ID NO: 16706 - RNA, 1665 nt, Artificial Sequence
  mRNA product Design i-3 (A100) comprising derived and/or modified sequence from LASV(G733-SLE-2010;Clade IV)__AIT17154__GPCmut1 (opt4)
aggagaaagcuuaccaugggccagaucgugaccuucuuccaggaggugccccacgugaucgaggaggugaugaacaucgugcugaucgcccugagcauccuggccgugcugaagggccuguacaacuucgccaccugcggcaucgugggccuggugagcuuccugcugcugugcggcagaagcugcaccaccagccuguacaagggcguguacgagcugcagacccuggagcugaacauggagacccugaacaugaccaugccccugagcugcaccaagaacaacagccaccacuacaucauggugggcaacgagaccggccuggagcugacccugaccaacaccagcaucaucaaccacaaguucugcaaccugagcgacgcccacaagaagaaccuguacgaccacgcccugaugagcaucaucagcaccuuccaccugagcauccccaacuucaaccaguacgaggccaugagcugcgacuucaacggcggcaagaucagcgugcaguacaaccugagccacagcuacgccggcgacgccgccaaccacugcggcaccaucgccaacggcgugcugcagaccuucaugagaauggccuggggcggcagcuacaucgcccuggacagcggcugcgacagaugggacugcaucaugaccagcuaccaguaccugaucauccagaacaccaccugggaggaccacugccaguucagcagacccagccccaucggcuaccugggccugcugagccagagaaccagagacaucuacaucagcagaagacgccggggcaccuucaccuggacccugagcgacagcgagggcaaggacacccccggcggcuacugccugaccagauggaugcugaucgaggccgagcugaagugcuucggcaacaccgccguggccaagugcaacgagaagcacgacgaggaguucugcgacaugcugagacuguucgacuucaacaagcaggccauccagagacugaaggcccccgcccagaugagcauccagcugaucaacaaggccgugaacgcccugaucaacgaccagcugaucaugaagaaccaccugagagacaucaugugcauccccuacugcaacuacagcaaguacugguaccugaaccacaccaccaccggcaagaccagccugcccaagugcuggcuggugagcaacggcagcuaccugaacgagacccacuucagcgacgacaucgagcagcaggccgacaacaugaucaccgagaugcugcagaaggaguacauggagagacagggcaagaccccccugggccugguggaccuguucguguucagcaccagcuucuaccugaucagcaucuuccugcaccuggugaagauccccacccacagacacguggugggcaagagcugccccaagccccacagacugaaccacaugggcaucugcagcugcggccuguacggccagcccggcgugcccgugaaguggaagagaugaggacuaguuauaagacugacuagcccgaugggccucccaacgggcccuccuccccuccuugcaccgagauuaauaaaaaaaaaaaaaaaaaaaaaaaaaaaaaaaaaaaaaaaaaaaaaaaaaaaaaaaaaaaaaaaaaaaaaaaaaaaaaaaaaaaaaaaaaaaaaaaaaaaa

SEQ ID NO: 16707 - RNA, 1665 nt, Artificial Sequence
  mRNA product Design i-3 (A100) comprising derived and/or modified sequence from MOPV/LASV reassortant(IGS-1;Clade IV)__AFY05576__GPCmut1 (opt4)
aggagaaagcuuaccaugggccagaucgugaccuucuuccaggaggugccccacgugaucgaggaggugaugaacaucgugcugaucgcccugagcgugcuggccgugcugaagggccuguacaacuucgccaccugcggccuggugggccuggugaccuuccugcugcugugcggcagaagcugcaccaccagccuguacaagggcguguacgagcugcagacccuggagcugaacauggagacccugaacaugaccaugccccugagcugcaccaagaacaacagccaccacuacaucauggugggcaacgagaccggccuggagcugacccugaccaacaccagcaucaucaaccacaaguucugcaaccugagcgacgcccacaagaagaaccuguacgaccacgcccugaugagcaucaucagcaccuuccaccugagcauccccaacuucaaccaguacgaggccaugagcugcgacuucaacggcggcaagaucagcgugcaguacaaccugagccacagcuacgccggcgacgccgccaaccacugcggcaccguggccaacggcgugcugcagaccuucaugagaauggccuggggcggcagcuacaucgcccuggacagcggcugcggcaacugggacugcaucaugaccagcuaccaguaccugaucauccagaacaccaccugggaggaccacugccaguucagcagacccagccccaucggcuaccugggccugcugagccagagaaccagagacaucuacaucagcagaagacgccggggcaccuucaccuggacccugagcgacagcgagggcgaggacacccccggcggcuacugccugaccagauggaugcugaucgaggccgagcugaagugcuucggcaacaccgccguggccaagugcaacgagaagcacgacgaggaguucugcgacaugcugagacuguucgacuucaacaagcaggccauccagagacugaaggcccccgcccagaugagcauccagcugaucaacaaggccgugaacgcccugaucaacgaccagcugaucaugaagaaccaccugagagacaucaugugcauccccuacugcaacuacagcaaguacugguaccugaaccacaccaccaccggcagaaccagccugcccaagugcuggcuggugagcaacggcagcuaccugaacgagacccacuucagcgacgacaucgagcagcaggccgacaacaugaucaccgagaugcugcagaaggaguacauggagagacagggcaagaccccccugggccugguggaccuguucguguucagcaccagcuucuaccugaucagcaucuuccugcaccuggugaagauccccacccacagacacaucgugggcaagagcugccccaagccccacagacugaaccacaugggcaucugcagcugcggccuguacaagcagcccggcgugcccgugaaguggaagagaugaggacuaguuauaagacugacuagcccgaugggccucccaacgggcccuccuccccuccuugcaccgagauuaauaaaaaaaaaaaaaaaaaaaaaaaaaaaaaaaaaaaaaaaaaaaaaaaaaaaaaaaaaaaaaaaaaaaaaaaaaaaaaaaaaaaaaaaaaaaaaaaaaaaa

SEQ ID NO: 16708 - RNA, 1665 nt, Artificial Sequence
  mRNA product Design i-3 (A100) comprising derived and/or modified sequence from LASV(LM765-SLE-2012;Clade IV)__AIT17814__GPCmut1 (opt4)
aggagaaagcuuaccaugggccagaucgugaccuucuuccaggaggugccccacgugaucgaggaggugaugaacaucgugcugaucgcccugagcauccuggccgugcugaagggccuguacaacuucgccaccugcggccuggugggccuggugaccuuccugcugcugugcggcagaagcugcaccaccagccuguacaagggcguguacgagcugcagacccuggagcugaacauggagacccugaacaugaccaugccccugagcugcaccaagaacaacagccaccacuacaucauggugggcaacgagaccggccuggagcugacccugaccaacaccagcaucaucgaccacaaguucugcaaccugagcgacgcccacagaaagaaccuguacgaccacgcccugaugagcaucaucagcaccuuccaccugagcauccccaacuucaaccaguacgaggccaugagcugcgacuucaacggcggcaagaucagcgugcaguacaaccugagccacagcuacgccaaggacgccgccgaccacugcggcaccguggccaacggcgugcugcagaccuucaugagaauggccuggggcggcagcuacaucgcccuggacagcggcugcggcagaugggacugcaucaugaccagcuaccaguaccugaucauccagaacaccaccugggaggaccacugccaguucagcagacccagccccaucggcuaccugggccugcugagccagagaaccagagacaucuacaucagcagaagacgccggggcaccuucaccuggacccugagcgacagcgagggcaaggacacccccggcggcuacugccugaccagauggaugcugaucgaggccgagcugaagugcuucggcaacaccgccguggccaagugcaacgagaagcacgacgaggaguucugcgacaugcugagacuguucgacuucaacaagcaggccauccagagacugaaggcccccgcccagaugagcauccagcugaucaacaaggccgugaacgcccugaucaacgaccagcugaucaugaagaaccaccugagagacaucaugugcauccccuacugcaacuacagcaaguacugguaccugaaccacaccaccaccggcaagaccagccugcccaagugcuggcuggugagcaacggcagcuaccugaacgagacccacuucagcgacgacaucgagcagcaggccgacaacaugaucaccgagaugcugcagaaggaguacauggagagacagggcaagaccccccugggccugguggaccuguucguguucagcaccagcuucuaccugaucagcaucuuccugcaccuggugaagauccccacccacagacacaucgugggcaagcccugccccaagccccacagacugaaccacaugggcaucugcagcugcggccuguacaagcagcccggcgugcccgugaaguggaagagaugaggacuaguuauaagacugacuagcccgaugggccucccaacgggcccuccuccccuccuugcaccgagauuaauaaaaaaaaaaaaaaaaaaaaaaaaaaaaaaaaaaaaaaaaaaaaaaaaaaaaaaaaaaaaaaaaaaaaaaaaaaaaaaaaaaaaaaaaaaaaaaaaaaaa

SEQ ID NO: 16709 - RNA, 1665 nt, Artificial Sequence
  mRNA product Design i-3 (A100) comprising derived and/or modified sequence from LASV(LM776-SLE-2012;Clade IV)__AIT17824__GPCmut1 (opt4)
aggagaaagcuuaccaugggccagaucgugaccuucuuccaggaggugccccacgugaucgaggaggugaugaacaucgugcugaucgcccugagcauccuggccgugcugaagggccuguacaacuucgccaccugcggccuggugggccuggugaccuuccugcugcugugcggcagaagcugcaccaccagcguguacaagggcguguacgagcugcagacccuggagcugaacauggagacccugaacaugaccaugccccugagcugcaccaagaacaacagccaccacuacaucauggugggcaacgagaccggccuggagcugacccugaccaacaccagcaucaucaaccacaaguucugcaaccugagcgacgcccacaagaagaaccuguacgaccacgcccugaugagcaucaucagcaccuuccaccugagcauccccaacuucaaccaguacgaggccaugagcugcgacuucaacggcggcaagaucagcgugcaguacaaccugagccacagcuacgccggcgacgccgccaaccacugcggcaccguggccaacggcgugcugcagaccuucaugagaauggccuggggcggcagcuacaucgcccuggacagcggcugcggcaagugggacugcaucaugaccagcuaccaguaccugaucauccagaacaccaccugggaggaccacugccaguucagcagacccagccccaucggcuaccugggccugcugagccagagaaccagagacaucuacaucagcagaagacgccggggcaccuucaccuggacccugagcgacagcgagggcaaggacacccccggcggcuacugccugaccagauggaugcugaucgaggccgagcugaagugcuucggcaacaccgccguggccaagugcaacgagaagcacgacgaggaguucugcgacaugcugagacuguucgacuucaacaagcaggccauccagagacugaaggcccccgcccagaugagcauccagcugaucaacaaggccgugaacgcccugaucaacgaccagcugaucaugaagaaccaccugagagacaucaugugcauccccuacugcaacuacagcaaguacugguaccugaaccacaccaccaccggcaagaccagccugcccaagugcuggcuggugagcaacggcagcuaccugaacgagacccacuucagcgacgacaucgagcagcaggccgacaacaugaucaccgagaugcugcagaaggaguacauggagagacagggcaagaccccccugggccugguggaccuguucguguucagcaccagcuucuaccugaucagcaucuuccugcaccuggugaagauccccacccacagacacaucgugggcaagagcugccccaagccccacagacugaaccacaugggcaucugcagcugcggccuguacaagcagcccggcgugcccgugagauggaagagaugaggacuaguuauaagacugacuagcccgaugggccucccaacgggcccuccuccccuccuugcaccgagauuaauaaaaaaaaaaaaaaaaaaaaaaaaaaaaaaaaaaaaaaaaaaaaaaaaaaaaaaaaaaaaaaaaaaaaaaaaaaaaaaaaaaaaaaaaaaaaaaaaaaaa

SEQ ID NO: 16710 - RNA, 1665 nt, Artificial Sequence
  mRNA product Design i-3 (A100) comprising derived and/or modified sequence from LASV(Mad39;Clade IV)__ANH09722__GPCmut1 (opt4)
aggagaaagcuuaccaugggccagaucgugaccuucuuccaggaggugccccacgugaucgaggaggugaugaacaucgugcugaucgcccugagcauccuggccgugcugaagggccuguacaacguggccaccugcggccugaucggccuggugaccuuccugcugcugugcggcagaagcugcaccaccacccuguacaagggcguguacgagcugcaggcccuggagcugaacauggagacccugaacaugaccaugccccugagcugcaccaagaacaacagccaccacuacaucagagugggcaacgagaccggccuggagcugacccugaccaacaccagccugaucaaccacaaguucugcaaccugagcgacgcccacaagaagaaccuguacgaccacgcccugaugagcaucaucagcaccuuccaccugagcauccccaacuucaaccaguacgaggccaugagcugcgacuucaacgacggcaagaucagcgugcaguacaaccugagccacaccuacgccggcgacaccgccaaccacugcggcaccguggccaacggcgugcugcagaccuucaugagaauggccuggggcggcagcuacaucgcccuggacagcggcugcggcggcugggacugcaucaugaccagcuaccaguaccugaucauccagaacaccaccugggaggaccacugccaguucagcagacccagccccaucggcuaccugggccugcugagccagagaaccagagacaucuacaucagcagaagacgccggggcaccuucaccuggacccugagcgacagcgagggcaaggacacccccggcggcuacugccugaccagauggaugcugaucgaggccgagcugaagugcuucggcaacaccgccguggccaagugcaacgagaagcacgacgaggaguucugcgacaugcugagacuguucgacuucaacaagcaggccauccagagacugaaggcccccgcccagaugagcauccagcugaucaacaaggccgugaacgcccugaucaacgaccagcugaucaugaagaaccaccugagagacaucaugugcauccccuacugcaacuacagcaaguacugguaccugaaccacaccgugaccggcaagaccagccugcccaagugcuggcuggugagcaacggcagcuaccugaacgagacccacuucagcgacgacaucgagcagcaggccgacaacaugaucaccgagaugcugcagaaggaguacauggagagacagggcaagaccccccugggccugguggaccuguucguguucagcaccagcuucuaccugaucagcaucuuccugcaccuggugaagauccccacccacagacacguggugggcaagcccugccccaagccccacagacugaaccacaugggcaucugcagcugcggcuucuacaagcagcccggcgugcccgugagauggaagagaugaggacuaguuauaagacugacuagcccgaugggccucccaacgggcccuccuccccuccuugcaccgagauuaauaaaaaaaaaaaaaaaaaaaaaaaaaaaaaaaaaaaaaaaaaaaaaaaaaaaaaaaaaaaaaaaaaaaaaaaaaaaaaaaaaaaaaaaaaaaaaaaaaaaa

SEQ ID NO: 16711 - RNA, 1665 nt, Artificial Sequence
  mRNA product Design i-3 (A100) comprising derived and/or modified sequence from LASV(Z0947-SLE-2011;Clade IV)__AIT17840__GPCmut1 (opt4)
aggagaaagcuuaccaugggccagaucgugaccuucuuccaggaggugccccacgugaucgaggaggugaugaacaucgugcugaucgcccugagcauccuggccgugcugaagggccuguacaacuucgccaccugcggccuggugggccuggugaccuuccugcugcugugcggcagaagcugcaccaucagccuguacaagggcguguacgagcugcagacccuggagcugaacauggagacccugaacaugaccaugccccugagcugcaccaagaacaacagccaccacuacaucauggugggcaacgagaccggccuggagcugacccugaccaacaccagcaucaucaaccacaaguucugcaaccugagcgacgcccacaagaagaaccuguacgaccacgcccugaugagcaucaucagcaccuuccaccugagcauccccaacuucaaccaguacgaggccaugagcugcgacuucaacggcggcaagaucagcgugcaguacaaccugagccacagcuacgccggcgacgccgccaaccacugcggcaccguggccaacggcgugcugcagaccuucaugagaauggccuggggcggcagcuacaucgcccuggacagcggcugcgacagaugggacugcaucaugaccagcuaccaguaccugaucauccagaacaccaccugggaggaccacugccaguucagcagacccagccccaucggcuaccugggccugcugagccagagaaccagagacaucuacaucagcagaagacgccggggcaccuucaccuggacccugagcgacagcgagggcaaggacacccccggcggcuacugccugaccagauggaugcugaucgaggccgagcugaagugcuucggcaacaccgccguggccaagugcaacgagaagcacgacgaggaguucugcgacaugcugagacuguucgacuucaacaagcaggccauccagagacugaaggcccccgcccagaugagcauccagcugaucaacaaggccgugaacgcccugaucaacgaccagcugaucaugaagaaccaccugagagacaucaugugcauccccuacugcaacuacagcaaguacugguaccugaaccacaccaccaccggcaagaccagccugcccaagugcuggcuggugagcaacggcagcuaccugaacgagacccacuucagcgacgacaucgagcagcaggccgacaacaugaucaccgagaugcugcagaaggaguacauggagagacagggcaagaccccccugggccugguggaccuguucguguucagcaccagcuucuaccugaucagcaucuuccugcaccuggugaagauccccacccacagacacaucgugggcaagcccugccccaagccccacagacugaaccacaugggcaucugcagcugcggccuguacaagcagcccggcgugcccgugaaguggaagagaugaggacuaguuauaagacugacuagcccgaugggccucccaacgggcccuccuccccuccuugcaccgagauuaauaaaaaaaaaaaaaaaaaaaaaaaaaaaaaaaaaaaaaaaaaaaaaaaaaaaaaaaaaaaaaaaaaaaaaaaaaaaaaaaaaaaaaaaaaaaaaaaaaaaa

SEQ ID NO: 16712 - RNA, 1665 nt, Artificial Sequence
  mRNA product Design i-3 (A100) comprising derived and/or modified sequence from LASV(Josiah;Clade IV)__NP_694870__GPCmut1 (opt5)
aggagaaagcuuaccaugggccagaucgugaccuucuuucaagaggucccccacguuauugaagaggugaugaacaucgugcugauugcccucagcguccuggcugugcuuaaggggcuguacaauuucgccacaugcggacucguuggccuggugacguuucuucugcucugugggagauccugcaccacaucucuguauaaaggagucuacgaacugcagacccucgagcugaacauggaaacacuuaauaugaccaugccucugagcuguacaaagaacaauucccaucacuauaucauggugggcaacgagaccgggcucgagcugacgcuuaccaauacaucuauuaucaaccauaaauucugcaaucugagcgacgcgcacaagaaaaaccucuacgaucaugcucugauguccaucauuucuaccuuucaccugagcaucccgaauuucaaccaguaugaagccauguccugugacuuuaauggaggcaagauuagcguucaguacaaccucucucacuccuaugccggcgaugcugccaaucauugcgggacaguggcuaacggaguccugcaaaccuucaugcggauggccuggggcgggagcuacaucgcgcuugacucuggaugcggcaacugggauuguauuaugacguccuaccaguaucugaucauucagaauacaaccugggaggaccacugccaguuuagcagacccucuccuaucggguaccucggacugcuuucccaacggacacgcgauaucuauauuagcagacggcgccggggcaccuucaccuggacacuguccgacucugaaggcaaggauacgcccgggggauacugucugacccgcuggaugcucaucgaggccgagcugaaaugcuuuggcaacacagcuguggccaaguguaaugaaaaacaugacgaggaguucugcgauaugcuuagacuguuugacuucaacaagcaggcuauucagcggcucaaagcccccgcgcagaugagcauccaacugauuaauaaggccgugaacgcucuuaucaaugaucagcugaucaugaagaaccaccuccgcgacauuaugugcaucccuuauugcaauuacuccaaauauugguaccugaaccacaccacaaccggaagaacgagccugcccaaguguuggcucgucucuaauggcuccuaccugaacgaaacacauuucagcgacgauauugagcagcaagccgacaauaugaucaccgagaugcuucagaaagaauauauggagcggcaggggaagaccccucugggacucguugaucuguuuguguucucuaccagcuuuuaccugauuuccaucuuccuucaccucgugaaaaucccgacacaucgccacauugucggcaagucuugccccaaaccucauagacugaaccacaugggcaucuguagcugcgggcuguauaagcagcccggagugccuguuaaguggaaacggugaggacuaguuauaagacugacuagcccgaugggccucccaacgggcccuccuccccuccuugcaccgagauuaauaaaaaaaaaaaaaaaaaaaaaaaaaaaaaaaaaaaaaaaaaaaaaaaaaaaaaaaaaaaaaaaaaaaaaaaaaaaaaaaaaaaaaaaaaaaaaaaaaaaa

SEQ ID NO: 16713 - RNA, 1662 nt, Artificial Sequence
  mRNA product Design i-3 (A100) comprising derived and/or modified sequence from LASV(LP;Clade I)__AAF86701__GPCmut1 (opt5)
aggagaaagcuuaccaugggccagaucauuaccuucuuucaagaggugccccacgucaucgaagagguuaugaacauugugcugaucgcccucagccugcuugcuauucugaaggggcucuacaauaucgccacaugcggaaucauuggccugguggcguuccuuuuucugugugggaaauccugcucucucacgcugaagggaggcuaugaacugcagacccucgagcugaacauggaaacacuuaauaugaccaugccucugagcuguaccaaaaacuccucucaucacuacaucagagucgggaaugagacaggacucgagcugacacuuaccaacacgagcauuaucaaucauaaguucugcaaccuguccgacgcucacaaaaagaaucucuaugaucaugcccugaugucuauuaucagcaccuuucaccuguccauuccgaacuucaaucaguacgaagccaugagcugugacuuuaacggcggcaagaucucugugcaguauaaucucucccacagcuacgcuggggaugccgcugagcauugcggaacaguugccaacggcgugcugcaaaccuucaugcggauggcguggggagggcgcuauaucgcccuugacucuggcugcgggaauugggauuguauuaugacauccuaccaguaccugaucauucagaacaccacgugggaagaccacugccaguuuagcagacccucuccuaucggauaucucggccugcuuucccaacggacacgcgauauuuacaucagcagacggcgccggggcaccuucacauggacccuguccgacucugaggggaacgagacccccggaggcuauugucugacacgcuggaugcucaucgaagcugagcugaagugcuuugggaauacggccgucgcuaaauguaacgaaaagcaugaugaggaguucugcgacaugcuuagacuguuugauuucaauaaacaggccauucggcgccucaaggcgcccgcccagaugagcauccagcugauuaacaaggcugugaaugcccuuaucaacgaccaacugauuaugaaaaaucaccucagagauaucaugugcaucccuuacugcaacuauuccaaguacugguaucugaaucacaccagcucuggccggacaucccugcccaaauguuggcucauuagcaacgggucuuaccugaaugagacccaguucagcgacgacaucgaacagcaagcugauaacaugauuacagagaugcuucagaaggaauacaucgagcgccagggaaaaaccccucugggccucguugacauuuuuaucuucuccacgucuuuuuaucugauuagcaucuuccugcaucuuaucaagauuccgacacacagacauaucgugggcaaacccugcccuaagccccaccggcucaaucauaugggggucuguuccugcggacuguacaagcacccuggcgugcccaccaaauggaagcgcugaggacuaguuauaagacugacuagcccgaugggccucccaacgggcccuccuccccuccuugcaccgagauuaauaaaaaaaaaaaaaaaaaaaaaaaaaaaaaaaaaaaaaaaaaaaaaaaaaaaaaaaaaaaaaaaaaaaaaaaaaaaaaaaaaaaaaaaaaaaaaaaaaaaa

SEQ ID NO: 16714 - RNA, 1662 nt, Artificial Sequence
  mRNA product Design i-3 (A100) comprising derived and/or modified sequence from LASV(803213;Clade II)__AAF86703__GPCmut1 (opt5)
aggagaaagcuuaccaugggccagaucauuaccuucuuucaagaggugccccacgucaucgaagagguuaugaacauugugcugaucgcccucagccugcuugcuauucugaaggggaucuacaauguggccacaugcggacucuucggccugaucuccuuucuucugcucugugggagaucuugcagcgucacguauaaaggaguguacgaacugcagacccuggagcucaacauggcgaaucugaacaugacaaugccucuuuccuguaccaagaauaacucucaucacuauauuaugguuggcaaugaaacagggcuggagcucacccugacaaacaccagcaucauuaaucauaaauucugcaaccuuuccgacgcucacaagaaaaaucuguacgaucaugcccucaugucuaucauuagcacguuucaccuguccaucccgaacuucaaucaguaugaggccaugagcugugacuuuaacggaggcaagauuucugugcaguacaaucugucccacagcuucgcugucgaugccgcuaaccauugcggcaccaucgccaacggggugcuccaaacauuuaugcggauggcguggggaggcucuuauaucgcccuggacuccgggugcggaaauugggauuguauuaugaccagcuaccaguaccuuaucauucagaacacaaccugggaagaccacugccaguucucucgccccuccccuaucggcuaucuggggcuccugagccaaagaacgcgggauauuuacaucucccgcagacgccggggaacauuuaccuggacacucucugacagcgagggcaaugaagcucccggcggguauugucugacccgguggaugcugaucgaggccgagcucaaaugcuucggaaacaccgcuguugccaaguguaaugaaaaacaugaugaggaauuuugcgacaugcugcgccuuuucgauuucaacaagcaggcgauuaaaagacugaagacacccgcccagauguccauccagcucauuaauaaggcugugaacgcccugaucaaugaccaacuuauuaugaaaaaccaucugcgggauaucaugugcaucccuuacugcaauuauagccgcuacugguaucucaaccacacggucaccgggaagacaucucugcccagauguuggcugguguccaauggaagcuaccucaacgaaacccacuuuucugacgacauugagcagcaggcugauaauaugaucacagagaugcugcaaaaagaauacauggaccggcagggcaagaccccucuugggcugguggaucucuucgucuuuagcacguccuucuaucugauuucuaucuuucugcaccuuguuaaaauuccgacacaucgccacaucgugggaaagcccugcccuaaaccccauagacucaaccacaugggcauuuguagcugcggccuguacaagcacccuggggugcccgucaaguggaaacggugaggacuaguuauaagacugacuagcccgaugggccucccaacgggcccuccuccccuccuugcaccgagauuaauaaaaaaaaaaaaaaaaaaaaaaaaaaaaaaaaaaaaaaaaaaaaaaaaaaaaaaaaaaaaaaaaaaaaaaaaaaaaaaaaaaaaaaaaaaaaaaaaaaaa

SEQ ID NO: 16715 - RNA, 1662 nt, Artificial Sequence
  mRNA product Design i-3 (A100) comprising derived and/or modified sequence from LASV(GA391;Clade III)__CAA36645__GPCmut1 (opt5)
aggagaaagcuuaccaugggccagaucgugaccuucuuucaagaggucccccacguuauugaagaggugaugaacaucgugcugauugcccucagcauccuggcuauucuuaaggggcuguacaaugucgccacaugcggacucaucggccuggugacguuccuucugcucuccgggagaucuuguagccugaucuauaaaggaaccuacgaacugcagacacucgagcugaacauggaaacccuuaauaugacaaugccucuguccugcaccaagaacaauucucaucacuauauucggguuggcaacgagacagggcucgagcugacccuuacgaauaccagcauccugaaccauaaauuuuguaaucucuccgacgcgcacaagcgcaaccuguacgaucauucucugaugagcauuaucuccacauuccaccucagcauuccgaauuuuaaccaguaugaagcuaugucuugcgacuucaauggaggcaaaaucaccgugcaguacaaccugucccacagcuuugccgucgaugccgcuggccauugugggacacuugccaauggagugcugcaaaccuucaugagaauggcuuggggcgggucuuauauugcccucgacuccggaugcggcaacugggauugcaucaugacgagcuaccaguaccugaucauucagaacacaaccugggacgaucacugucaguuuucucgccccuccccuaucggguaucuuggacugcucagccaaagaacacgggacauuuacaucucccgcagacgccggggcaccuucaccuggacacucucugauagcgagggcaaugaaacgcccgggggauauugccugacccgguggaugcuuauugaggcggagcugaaguguuuuggcaacacagccguugcuaagugcaaugaaaaacaugacgaggaguucugugauaugcuccgccuguuugacuucaacaagcaggccaucagacggcuuaaaacccccgcucagauguccauccagcugauuaauaaggccgugaacgcgcucaucaaugaucaacugauuaugaaaaaccaucugcgcgacaucaugugcauuccuuacugcaauuauagcagauacugguaucucaaccacacaucuaccggaaagacgucccugccccggugcuggcuuaucagcaauggcucuuaccugaacgaaacaaaguucagcgacgauaucgagcagcaggccgacaauaugauuaccgagaugcuccaaaaagaauacaucgaucgccaggggaagaccccucugggacuggucgaccuuuuuguguucuccacaucuuuuuaucucauuagcaucuuccugcaccuggugaaaauuccgacccacagacauaucgucggcaagcccuguccuaaaccccaccggcucaaccauaugggcauuugcuccugugggcuguacaagcagccuggaguucccgugagauggaaacgcugaggacuaguuauaagacugacuagcccgaugggccucccaacgggcccuccuccccuccuugcaccgagauuaauaaaaaaaaaaaaaaaaaaaaaaaaaaaaaaaaaaaaaaaaaaaaaaaaaaaaaaaaaaaaaaaaaaaaaaaaaaaaaaaaaaaaaaaaaaaaaaaaaaaa

SEQ ID NO: 16716 - RNA, 1665 nt, Artificial Sequence
  mRNA product Design i-3 (A100) comprising derived and/or modified sequence from LASV(AV;Clade V)__CCA30314__GPCmut1 (opt5)
aggagaaagcuuaccaugggccagaucgugaccuucuuucaagaggucccccacguuauugaagaggugaugaacaucgugcugauugcccucagcauccuggcuguccuuaaggggcuguacaauauugccacaugcggacucaucggccugaucacguuccuucugcucugugggagauccugcucuagcaaccuguauaaaggaguguacgaacugcagucccucgaccugaauauggagacccuuaacaugacaaugccucugucuuguaccaagaauaacagccaucacuauauucggguuggcaaugauacagggcucgaacugacccuuacaaacaccuccauccugaaucauaaauuuugcaaccucucugacgcgcacaagaaagaucuguacgaccaugcucugaugagcauuaucuccacguuccaccucagcauuccgaauuuuaaccaguaugaggccaugucuugugauuucaauggaggcaagaucuccgugcaguacaaccugagccacucuuaugccauugacgcugccaaucauugcggcaccgucgcuaacgggauccuucaaacauuuaugcgcauggccuggggaggcuccuacaucgcgcuggauagcgggugcggaaacugggacuguauuaugaccucuuaccaguaucucaucauucagaauacaaccugggagaaccacugccaguucucccggcccagcccuaucggcuaccuggggcuucugucccaacgcacgagagauauuuauaucucucggcgccgccggggaacauuuaccuggacacugagcgacuccgaaggcaaugccacccccggcggguacugucucaccagauggaugcugaucgaggcugaacuuaagugcuucggaaacacagccguggcuaaauguaaugagaagcaugaugaggaauuuugcgacaugcugcgccucuucgauuuuaacaaacaggccauuagccggcugaagucucccgcgcagauguccauccagcuuauuaauaaagccguuaacgcucugaucaaugaccaacucauuaugaagaaccaccugagagacaucaugugcaucccuuauugcaauuacagcaaguauugguaccugaaccacacgauuaccgggaaaacaucucuccccaaguguuggcuggugagcaauggauccuaccuuaacgaaacccauuucucugaugacaucgagcagcaggccgauaauaugauuacagaaaugcugcaaaaagaguauauggagcggcagggcaagaccccucucgggcuggucgaccuguucguguuuagcacguccuucuaccuuaucagcauuuuucuccgccuggugaaaaucccgacacacagacauauugucggaaagcccugcccuaaaccccaccggcugaaccauaugggcaucuguucuugcggccucuauaagcagccugggguucccgugcgcuggaagagaugaggacuaguuauaagacugacuagcccgaugggccucccaacgggcccuccuccccuccuugcaccgagauuaauaaaaaaaaaaaaaaaaaaaaaaaaaaaaaaaaaaaaaaaaaaaaaaaaaaaaaaaaaaaaaaaaaaaaaaaaaaaaaaaaaaaaaaaaaaaaaaaaaaaa

SEQ ID NO: 16717 - RNA, 1662 nt, Artificial Sequence
  mRNA product Design i-3 (A100) comprising derived and/or modified sequence from LASV(Togo/2016/7082;Clade VI)__AMR44577__GPCmut1 (opt5)
aggagaaagcuuaccaugggccagaucauuaccuucuuucaagaggugccccacgucaucgaagagguuaugaacauugugcugaucgcccucagccugcuugcuauucugaaggggguguacaaugucgccacaugcggaaucaucggccucgugacguuccuguuucuuugugggagauccugcucucugauuuauaaaggaagcuacgaacuccagacccuggagcugaacauggaaacacucaauaugaccaugccucuguccuguacaaagaacucuagccaucacuauauccggguuggcaaugagaccgggcuugagcugacacucaccaacacguccauuaucaaucauaaauucugcaaccugucugacgcgcacaagcgcaaucuuuacgaucaugcucugaugagcauucucuccaccuuucaccugagcaucccgaacuucaaucaguaugaagccaugucuugugacuuuaacggaggcaaaauuuccgugcaguacaaucugagccacgccuaugcugucgaugccgcugagcauugcggcacaguggccaacgggguucuccaaaccuucaugagaauggcguggggaggcucuuacaucgcccuggacuccgggugcggaaauugggauuguaucaugacaagcuaccaguaucuuauuauccagaacaccacgugggaagaccacugccaguuuucucgccccuccccuauuggcuaccuggggcuccugagccaaagaacacgggauaucuauauuucccgcagacgccggggaaccuucacauggacccucucugacagcgagggcaacgagacccccggcggguacugucugacacgguggaugcugaucgaagcugagcucaagugcuuuggaaauacggccguggcuaaguguaacgaaaaacaugaugaggaguucugcgacaugcugcgccuuuuugauuucaauaagcaggccauccagagacugaaaucccccgcgcagaugagcauucaacucaucaacaaggccgucaaugcucugauuaacgaccagcuuaucaugaaaaaucaucugcgggauaugaugugcauuccuuauugcaacuacucuaaguauugguaccucaaucacaccuccagcgggcgcacaucucugcccaaguguuggcuggugagcaacggauccuaccucaaugagacccacuucucugacgacaucgaacagcaagccgauaacaugaucacagagaugcugcagaaagaauauauugacagacagggcaagaccccucuugggcugguggaucucuuugucuucagcacguccuuuuaccugaucagcauuuuccugcaccuuaucaaaauuccgacacaucggcacaucguuggaaagcccugcccuaaaccccaucgccucaaucacaugggcauuuguucuugcggccuguauaagcagccuggggugcccaccagauggaaacggugaggacuaguuauaagacugacuagcccgaugggccucccaacgggcccuccuccccuccuugcaccgagauuaauaaaaaaaaaaaaaaaaaaaaaaaaaaaaaaaaaaaaaaaaaaaaaaaaaaaaaaaaaaaaaaaaaaaaaaaaaaaaaaaaaaaaaaaaaaaaaaaaaaaa

SEQ ID NO: 16718 - RNA, 1662 nt, Artificial Sequence
  mRNA product Design i-3 (A100) comprising derived and/or modified sequence from LASV(KAK-428;Clade n.d. (VII))__ANH09740__GPCmut1 (opt5)
aggagaaagcuuaccaugggccagaucgugaccuucuuucaagaggucccccacguuauugaagaggugaugaacaucgugcugauugcccucagccugcuugcuauccugaaggggcucuacaauuucgccacaugcggagucauuggccugaucacguuucuucugcucugugggagauccugcucugcgaccuauaaaggacaguacgaacugcagacacuggagcucaacauggaaagccugaauaugaccaugccucuuuccuguacaaagaacaauucucaucacuauauccgggcuggcaacaauaccgggcuggagcucacacugaccaacacgagcauuaucucccauaaauucugcaaucuuucugacgcccacaagaaaaaccuguacgaucauacccucaugagcauuaucacaaccuuucaccuguccauuccgaauuucaaccaguaugaggccaugagcugugacuuuaauggaggcaagaucucuauucaauacaaccugucccacagcuaugcuggcgaugccgcucagcauugcgggacaguggccaauggaguucuccagaccuucaugcgcauggcguggggcgggucuuaccuggcccuugacuccggaugccggggcugggauuguaucaucagcucuuaccaguaucugauuauccaaaacacgacaugggacgaucacugccaguuuucccgccccagcccuauuggguaccucggauucgugucccagaagaccagagacaucuauauuucucggcgccgccggggcacauuuaccuggacccugagcgauuccgaaggccaugacaugcccgggggauacugucucacaagauggaugcugaucgaggcugaucugaaaugcuucggcaacacggccgucgcuaaguguaaugaaaaacacgacgaggaguuuugcgauauguggcgccucuucgacuucaacaagcaggccauccaacggcugaaagcgcccgcccagaugaauauucagcuuaucaacaaggcugugaaugcccugauuaacgaccaacucaugaugaagaaucaccugagagauaucaugugcauuccuuauugcaacuacagcaaauuuugguaucuuaauaacaccacaaccggacggacaucucugccccgcuguuggcucaucuccaauggcagcuaccugaacgagacccauuucucugacgauaucgaacagcaggcugacaauaugauuacggagaugcugcagaaggaauacauggauagacaagggaaaacaccucucggacugguugaccuuuuuguguucagcaccuccuuuuaucugaucaccauuuuccuccaccuggucaagaucccgacacaucggcacauugugggcaaacccugcccuaagccccaucgccugaaccacaugggcaucuguucuugcgggcuuuacaaacagccuggagugcccgucagauggaagcggugaggacuaguuauaagacugacuagcccgaugggccucccaacgggcccuccuccccuccuugcaccgagauuaauaaaaaaaaaaaaaaaaaaaaaaaaaaaaaaaaaaaaaaaaaaaaaaaaaaaaaaaaaaaaaaaaaaaaaaaaaaaaaaaaaaaaaaaaaaaaaaaaaaaa

SEQ ID NO: 16719 - RNA, 1662 nt, Artificial Sequence; identical to SEQ ID NO: 16713
  mRNA product Design i-3 (A100) comprising derived and/or modified sequence from LASV(Pinneo-NIG-1969;Clade I)__AIT17836__GPCmut1 (opt5)

SEQ ID NO: 16720 - RNA, 1662 nt, Artificial Sequence
  mRNA product Design i-3 (A100) comprising derived and/or modified sequence from LASV(ISTH0009-NIG-2011;Clade II)__AIT17404__GPCmut1 (opt5)
aggagaaagcuuaccaugggccagaucauuaccuucuuucaagaggugccccacgucaucgaagagguuaugaacauugugcugaucgcccucagccugcuugcuauucugaaggggaucuacaauguggccacaugcggacucuucggccuggucuccuuucuucugcucugugggagaucuugcagcacgaccuauaaaggaguguacgaacugcagacacuggagcucgacauggcgucccugaacaugaccaugccucuuucuuguacaaagaauaacagccaucacuauaucaugguuggcaaugaaaccgggcuggagcucacacugaccaacacguccauuaucaaucauaaauucugcaaccuuucugaugcucacaagaaaaaucuguacgaccaugcccucaugagcauuaucuccaccuuucaccugagcauuccgaacuucaaucaguaugaggccaugucuugugauuuuaacggaggcaagaucuccgugcaguacaaucugagccacgcuuaugccgucgacgcugccaaccauugcggcacaauugcgaauggggugcuccaaaccuucaugcggauggccuggggaggcucuuacaucgcucuggauuccgggugcggaagcugggacuguaucaugacaucuuaccaguaucuuauuauccagaacaccacgugggaagaucacugccaguuuucccgccccagcccuauuggcuaccuggggcuccugucccaaagaacacgggacaucuauauuucucgcagacgccggggaaccuucacauggacccucagcgauuccgagggcaacgaaacccccggcggguacugucugacacgguggaugcugaucgaggccgagcucaaaugcuuuggaaauacggcuguugccaaguguaacgaaaaacaugacgaggaguucugcgauaugcugcgccuuuuugacuucaauaagcaggcgaucagacggcugaaaacccccgcccagaugagcauucagcucaucaacaaggcugugaaugcccugauuaacgaucaacuuaucaugaagaaucaucugcgcgacauuaugugcaucccuuauugcaacuacucuaaauauugguaccucaaucacacagucaccgggaagacaucccugcccagauguuggcuggugagcaacggaucuuaccucaaugaaacccacuucagcgacgauaucgagcagcaggcugacaacaugauuacggagcugcuucaaaaagaauauauggaucggcagggcaagacaccucuggggcucguggaccuguuugucuucuccaccucuuuuuaccugaucagcauuuuccuucaccucaucaaaauuccgacccaucgccacaucacaggaaagcccugcccuaaaccccauagacugaaucacaugggcauuuguuccugcggccuguauaagcacccugggguucccgugaaguggaaacggugaggacuaguuauaagacugacuagcccgaugggccucccaacgggcccuccuccccuccuugcaccgagauuaauaaaaaaaaaaaaaaaaaaaaaaaaaaaaaaaaaaaaaaaaaaaaaaaaaaaaaaaaaaaaaaaaaaaaaaaaaaaaaaaaaaaaaaaaaaaaaaaaaaaa

SEQ ID NO: 16721 - RNA, 1662 nt, Artificial Sequence
  mRNA product Design i-3 (A100) comprising derived and/or modified sequence from LASV(ISTH2010-NIG-2012;Clade II)__AIT17482__GPCmut1 (opt5)
aggagaaagcuuaccaugggccagaucauuaccuucuuucaagaggugccccacgucaucgaagagguuaugaacauugugcugaucgcccucagccugcuugcuauucugaaggggaucuacaauguggccacaugcggacucuucggccuggucuccuuucuucugcucugugggagaucuugcagcacgaccuauaaaggaguguacgaacugcagacacuggagcucgacauggcgucccugaacaugaccaugccucuuucuuguacaaagaauaacagccaucacuauaucaugguuggcaaugaaaccgggcuggagcucacacugaccaacacguccauuaucaaucauaaauucugcaaccuuucugaugcucacaagaaaaaucuguacgaccaugcccucaugagcauuaucuccaccuuucaccugagcauuccgaacuucaaucaguaugaggccaugucuugugauuuuaacggaggcaagaucuccgugcaguacaaucugagccacgcuuaugccgucgacgcugccaaccauugcggcacaauugcgaauggggugcuccaaaccuucaugcggauggccuggggaggcucuuacaucgcucuggauuccgggugcggaagcugggacuguaucaugacaucuuaccaguaucuuauuauccagaacauuaccugggaagaucacugccaguuuucccgccccagcccuaucggcuaccuggggcuccugucccaaagaacgcgggacauuuauaucucucgcagacgccggggaacauucaccuggacacucagcgauuccgagggcaacgaaacccccggcggguacugucugacccgguggaugcugaucgaggccgagcucaaaugcuuuggaaauacagcuguugccaaguguaacgaaaaacaugacgaggaguucugcgauaugcugcgccuuuuugacuucaauaagcaggcgauuagacggcugaaaacgcccgcccagaugagcauccagcucauuaacaaggcugugaaugcccugaucaacgaucaacuuauuaugaagaaucaucugcgcgacaucaugugcaucccuuauugcaacuacucuaaauauugguaccucaaucacaccgucacagggaagaccucccugcccagauguuggcuggugagcaacggaucuuaccucaaugaaacacacuucagcgacgauauugagcagcaggcugacaacaugaucaccgagcugcuucaaaaagaauauauugaucggcagggcaagacgccucuggggcucguggaccuguuugucuucuccacaucuuuuuaccugaucagcauuuuccuucaccucguuaaaaucccgacccaucgccacguggugggaaagcccugcccuaaaccccauagacugaaucacaugggcauuuguuccugcggccuguauaagcacccugggguccccgugaaguggaaacggugaggacuaguuauaagacugacuagcccgaugggccucccaacgggcccuccuccccuccuugcaccgagauuaauaaaaaaaaaaaaaaaaaaaaaaaaaaaaaaaaaaaaaaaaaaaaaaaaaaaaaaaaaaaaaaaaaaaaaaaaaaaaaaaaaaaaaaaaaaaaaaaaaaaa

SEQ ID NO: 16722 - RNA, 1662 nt, Artificial Sequence
  mRNA product Design i-3 (A100) comprising derived and/or modified sequence from LASV(Lassa virus/H.sapiens-wt/NGA/2015/ISTH_0543;Clade II)__AVO03639__GPCmut1 (opt5)
aggagaaagcuuaccaugggccagaucauuaccuucuuucaagaggugccccacgucaucgaagagguuaugaacauugugcugaucgcccucagccugcuugcuauucugaaggggaucuacaauguggccacaugcggacucuucggccuggucuccuuucuucugcucugugggagaucuugcagcacgaccuauaaaggaguguacgaacugcagacacuggagcucgacauggcgaaccugaauaugaccaugccucuuuccuguacaaagaacaauucucaucacuauaucaugguuggcaacgaaaccgggcuggagcucacacugaccaauacgagcauuaucaaccauaaauucugcaaucuuuccgaugcucacaagaaaaaccuguacgaccaugcccucaugucuauuaucagcaccuuucaccuguccauuccgaauuucaaccaguaugaggccaugagcugugauuuuaauggaggcaagaucucugugcaguacaaccugucccacacauaugcugucgacgccgcuaaucauugcggcaccauugccaacggggugcuccaaacauucaugcggauggcguggggaggcagcuacaucgcccuggauucugggugcggauccugggacuguaucaugaccagcuaccaguaucuuguuauucagaacacgacaugggaagaucacugccaguuuucucgccccuccccuaucggcuaccuggggcuccugagccaaagaacccgggacauuuauaucucccgcagacgccggggaacauucaccuggacccucucugauagcgagggcaaugaaacacccggcggguacugucugacgcgguggaugcugauugaggcugagcucaaaugcuuuggaaacaccgccguggcuaaguguaaugaaaaacaugacgaggaguucugcgauaugcugcgccuuuuugacuucaacaagcaggccaucagacggcugaaaacacccgcgcagauguccauccagcucauuaauaaggccgucaacgcucugaucaaugaucaacuuauuaugaagaaccaucugcgcgacaucaugugcauuccuuauugcaauuacagcaaauauugguaccucaaccacaccgugacagggaagaccucucugcccagauguuggcugguguccaauggaagcuaccucaacgaaacgcacuucucugacgauaucgagcagcaggccgacaauaugaucacagagcugcuucaaaaagaauauauugaucggcagggcaagaccccucuggggcucgucgaccuguuuguuuucagcaccuccuuuuaccugaucucuauuuuccuucaccucgugaaaaucccgacacaucgccacauuaccggaaagcccugcccuaaaccccauagacugaaccacaugggcaucuguagcugcggccuguauaagcacccuggggugcccgucaaguggaaacggugaggacuaguuauaagacugacuagcccgaugggccucccaacgggcccuccuccccuccuugcaccgagauuaauaaaaaaaaaaaaaaaaaaaaaaaaaaaaaaaaaaaaaaaaaaaaaaaaaaaaaaaaaaaaaaaaaaaaaaaaaaaaaaaaaaaaaaaaaaaaaaaaaaaa

SEQ ID NO: 16723 - RNA, 1662 nt, Artificial Sequence
  mRNA product Design i-3 (A100) comprising derived and/or modified sequence from LASV(Lassa virus/H.sapiens-wt/NGA/2016/ISTH_0009;Clade II)__AVO03571__GPCmut1 (opt5)
aggagaaagcuuaccaugggccagaucauuaccuucuuucaagaggugccccacgucaucgaagagguuaugaacauugugcugaucgcccucagccugcuugcuauucugaaggggaucuacaauguggccacaugcggacuccugggccuugucuccuuccugcuccugugugggagaucuugcagcacgaccuauaaaggaguguacgaacugcagacacucgagcuggacauggcgucccuuaacaugaccaugccucugucuuguacaaagaauaacagccaucacuauaucaugguuggcaaugaaaccgggcucgagcugacacuuaccaacacguccauuaucaaucauaaauuuugcaaccugucugaugcucacaagaaaaaucucuacgaccaugcccugaugagcauuaucuccaccuuccaccugagcauuccgaacuuuaaucaguaugaggccaugucuugugauuucaacggaggccggaucuccgugcaguacaaucucagccacucuuaugcugucgacgccgcuaaccauugcggcacaauugccaauggggugcugcaaaccuuuaugcgcauggcguggggaggcuccuacaucgcccuugauagcgggugcggaucuugggacuguaucaugacauccuaccaguaucugauuauccagaacaccacgugggaagaucacugccaguucagcagacccuccccuauuggcuaccucgggcugcuuucucaacggacacgcgacaucuauauuagcagacggcgccggggaaccuuuacauggacccuguccgauagcgagggcaacgaaacccccggcggguacugucugacacgcuggaugcucaucgaggcugagcugaagugcuucggaaauacggccguugcuaaauguaacgaaaagcaugacgaggaauuuugcgauaugcuuagacuguucgacuuuaauaaacaggccauccggcgccucaagacccccgcgcagaugucuauucagcugaucaacaaagccgugaaugcucuuauuaacgaucaacugaucaugaagaaucaccucagagacauuaugugcaucccuuauugcaacuacuccaaguauugguaccugaaucacacagucaccgggaaaacaagccugccccgguguuggcucgugucuaacggaagcuaccugaaugaaacccauuucuccgacgauaucgagcagcaggccgacaacaugauuacggagcuucugcaaaaggaauauaucgaucgccagggcaaaacaccucucgggcugguggaccuguucgucuuuucuaccagcuucuaccuuauuuccaucuuucuccaccugguuaagauuccgacccauagacacaucacaggaaaacccugcccuaagccccaucggcugaaucacaugggcauuuguagcugcggccucuauaaccacccuggggugcccgugaaauggaagcgcugaggacuaguuauaagacugacuagcccgaugggccucccaacgggcccuccuccccuccuugcaccgagauuaauaaaaaaaaaaaaaaaaaaaaaaaaaaaaaaaaaaaaaaaaaaaaaaaaaaaaaaaaaaaaaaaaaaaaaaaaaaaaaaaaaaaaaaaaaaaaaaaaaaaa

SEQ ID NO: 16724 - RNA, 1662 nt, Artificial Sequence
  mRNA product Design i-3 (A100) comprising derived and/or modified sequence from LASV(Lassa virus/H.sapiens-wt/NGA/2016/ISTH_0017;Clade II)__AVO03567__GPCmut1 (opt5)
aggagaaagcuuaccaugggccagaucauuaccuucuuucaagaggugccccacgucaucgaagagguuaugaacauugugcugaucgcccucagccugcuugcuauucugaaggggaucuacaauguggccacaugcggacucuucggccuggucuccuuucuucugcucugugggagaucuugcagcacgaccuauaaaggaguguacgaacugcagacacuggagcucgacauggcgucccugaacaugaccaugccucuuucuuguacaaagaauaacagccaucacuauaucaugguuggcaaugaaaccgggcuggagcucacacugaccaacacguccauuaucaaucauaaauucugcaaccuuucugaugcucacaagaaaaaucuguacgaccaugcccucaugagcauuaucuccaccuuucaccugagcauuccgaacuucaaucaguaugaggccaugucuugugauuuuaacggaggcaagaucuccgugcaguacaaucugagccacacauaugcuauugacgccgcuaaccauugcggcaccaucgccaaugggguccuccaaacauucaugcggauggcguggggaggcucuuacaucgcccuggauuccgggugcggaagcugggacuguauuaugaccucuuaccaguaucuuaucauucagaacacgacaugggaagaucacugccaguuuucccgccccagcccuaucggcuaccuggggcuccugucccaaagaacccgggacauuuauaucucucgcagacgccggggaacauucaccuggacccucagcgauuccgagggcaacgaaacacccggcggguacugucugacgcgguggaugcugaucgaggcugagcucaaaugcuuuggaaauaccgccguggcuaaguguaacgaaaaacaugacgaggaguucugcgauaugcugcgccuuuuugacuucaauaagcaggccauuagacggcugaaaacacccgcgcagaugagcauccagcucauuaacaaggccguuaaugcucugaucaacgaucaacuuauuaugaagaaucaucugcgcgacaucaugugcaucccuuauugcaacuacucuaaauauugguaccucaaucacaccgugacagggaagaccucccugcccagauguuggcuggucagcaacggaucuuaccucaaugaaacgcacuucagcgacgauauugagcagcaggccgacaacaugaucacagagcugcuucaaaaagaauauauggaucggcagggcaagaccccucuggggcucguggaccuguuuguguucuccaccucuuuuuaccugauuagcaucuuccuucaccucguccgcauuccgacacauagacacguuaucggaaaacccugcccuaagccccaucggcugaaucacaugggcauuuguuccugcggccuguauaaacacccuggggugcccgugaaguggaagcgcugaggacuaguuauaagacugacuagcccgaugggccucccaacgggcccuccuccccuccuugcaccgagauuaauaaaaaaaaaaaaaaaaaaaaaaaaaaaaaaaaaaaaaaaaaaaaaaaaaaaaaaaaaaaaaaaaaaaaaaaaaaaaaaaaaaaaaaaaaaaaaaaaaaaa

SEQ ID NO: 16725 - RNA, 1662 nt, Artificial Sequence
  mRNA product Design i-3 (A100) comprising derived and/or modified sequence from LASV(Lassa virus/H.sapiens-wt/NGA/2018/ISTH_0959;Clade II)__AVV65099__GPCmut1 (opt5)
aggagaaagcuuaccaugggccagaucauuaccuucuuucaagaggugccccacgucaucgaagagguuaugaacauugugcugaucgcccucagccugcuugcuauucugaaggggaucuacaauguggucacaugcggacucuucggccugguguccuuucuucugcucugugggagaucuugcagcacgaccuauaaaggaguuuacgaacugcagacacuggagcucgacauggccucccugaacaugaccaugccucuuucuuguacaaagaauaacagccaucacuauaucauggugggcaaugaaaccgggcuggagcucacacugaccaacacguccauuaucaaucauaaauucugcaaccuuucugaugcgcacaagaaaaaucuguacgaccaugcucucaugagcauuaucuccaccuuucaccugagcauuccgaacuucaaucaguaugaggccaugucuugugauuuuaacggaggcaagaucuccguccaguacaaucugagccacgccuaugcuauugacgccgcuaaccauugcggcacaaucgccaauggggugcuccaaaccuucaugcggauggcguggggaggcucuuacaucgcccuggauuccgggugcggaagcugggacuguauuaugacaucuuaccaguaucuuaucauucagaacaccacgugggaagaucacugccaguuuucccgccccagcccuaucggcuaccuggggcuccugucccaaagaacacgggacauuuauaucucucgcagacgccggggaaccuucacauggacccucagcgauuccgagggcaacgaaacccccggcggguacugucugacacgguggaugcugaucgaggcugagcucaaaugcuuuggaaauacggccguugcuaaguguaacgaaaaacaugacgaggaguucugcgauaugcugcgccuuuuugacuucaauaagcaggccauuagacggcugaaaacccccgcgcagaugagcauccagcucauuaacaaggccgugaaugcucugaucaacgaucaacuuauuaugaagaaucaucugcgcgacaucaugugcaucccuuauugcaacuacucuaaauauugguaccucaaucacacagucaccgggaagacaucccugcccagauguuggcuggugagcaacggaucuuaccucaaugaaacccacuucagcgacgauauugagcagcaggccgacaacaugaucacggagcugcuucaaaaagaauauauugaucggcagggcaagacaccucuggggcucguggaccuguuugucuucuccaccucuuuuuaccugaucagcauuuuccuucaccucguuaaaaucccgacccaucgccacgugauuggaaagcccugcccuaaaccccauagacugaaucacaugggcaucuguuccugcggccuguauaagcacccuggggugcccgucaaguggaaacggugaggacuaguuauaagacugacuagcccgaugggccucccaacgggcccuccuccccuccuugcaccgagauuaauaaaaaaaaaaaaaaaaaaaaaaaaaaaaaaaaaaaaaaaaaaaaaaaaaaaaaaaaaaaaaaaaaaaaaaaaaaaaaaaaaaaaaaaaaaaaaaaaaaaa

SEQ ID NO: 16726 - RNA, 1662 nt, Artificial Sequence
  mRNA product Design i-3 (A100) comprising derived and/or modified sequence from LASV(LASV003-NIG-2008;Clade II)__AIT17580__GPCmut1 (opt5)
aggagaaagcuuaccaugggccagaucauuaccuucuuucaagaggugccccacgucaucgaagagguuaugaacauugugcugaucgcccucagccugcuugcuauucugaaggggaucuacaauguggccacaugcggacucuucggccuggucuccuuucuucugcucugugggagaucuugcagcacgaccuauaaaggaguguacgaacugcagacacuggagcucgacauggcgucccugaacaugaccaugccucuuucuuguacaaagaauaacagccaucacuauaucaugguuggcaaugaaaccgggcuggagcucacacugaccaacacguccauuaucaaucauaaauucugcaaccuuucugaugcucacaagaaaaaucuguacgaccaugcccucaugagcauuaucuccaccuuucaccugagcauuccgaacuucaaucaguaugaggccaugucuugugauuuuaacggaggcaagaucuccgugcaguacaaucugagccacacauaugcugucgacgccgcuaaccauugcggcaccauugccaauggggugcuccaaacauucaugcggauggcguggggaggcucuuacaucgcccuggauuccgggugcggaagcugggacuguaucaugaccucuuaccaguaucuuauuauccagaacacgacaugggaagaucacugccaguuuucccgccccagcccuauuggcuaccuggggcuccugucccaaagaacccgggacaucuauauuucucgcagacgccggggaacauucaccuggacccucagcgauuccgagagcaacgaaacacccggcggcuacugucugacgcgguggaugcugaucgaggcugagcucaaaugcuuugggaauaccgccguugcuaaguguaacgaaaaacaugacgaggaguucugcgauaugcugcgccuuuuugacuucaauaagcaggccaucagacggcugaaagcgcccgcccagaugucuauucagcucaucaacaaggcugugaaugcccugauuaacgaucaacuuaucaugaagaaucaucugcgcgacauuaugugcaucccuuauugcaacuacuccaaauauugguaccucaaucacacagucaccggcagaacaagccugccccgguguuggcuggugucuaacgggagcuaccucaaugaaacccacuucuccgacgauaucgagcagcaggcugacaacaugauuacggagcugcuucaaaaggaauauauggaucgccagggaaaaacaccucugggccucguggaccuguuugucuucucuaccagcuuuuaccugaucuccauuuuccuucaccucguuaagaucccgacccauagacacgugauugggaaacccugcccuaagccccaucggcugaaucacaugggaaucuguagcugcggccuguauaaacacccuggcgugcccgucaaguggaagcgcugaggacuaguuauaagacugacuagcccgaugggccucccaacgggcccuccuccccuccuugcaccgagauuaauaaaaaaaaaaaaaaaaaaaaaaaaaaaaaaaaaaaaaaaaaaaaaaaaaaaaaaaaaaaaaaaaaaaaaaaaaaaaaaaaaaaaaaaaaaaaaaaaaaaa

SEQ ID NO: 16727 - RNA, 1662 nt, Artificial Sequence
  mRNA product Design i-3 (A100) comprising derived and/or modified sequence from LASV(LASV035-NIG-2009;Clade II)__AIT17588__GPCmut1 (opt5)
aggagaaagcuuaccaugggccagaucauuaccuucuuucaagaggugccccacgucaucgaagagguuaugaacauugugcugaucgcccucagccugcuugcuauucugaaggggaucuacaauguggccacaugcggacucuucggccuggucuccuuucuucugcucugugggagaucuugcagcacgaccuauaaaggaguguacgaacugcagacacuggagcucgacauggcgucccugaacaugaccaugccucuuucuuguacaaagaauaacagccaucacuauaucaugguuggcaaugaaaccgggcuggagcucacacugaccaacacguccauuaucaaucauaaauucugcaaccuuucugaugcucacaagaaaaaucuguacgaccaugcccucaugagcauuaucuccaccuuucaccugagcauuccgaacuucaaucaguaugaggccaugucuugugauuuuaacggaggcaagaucuccgugcaguacaaucugagccacgcuuaugccgucgacgcugccaaccauugcggcacaauugcgaauggggugcuccaaaccuucaugcggauggccuggggaggcucuuacaucgcucuggauuccgggugcggaagcugggacuguaucaugacaucuuaccaguaucuuauuauccagaacaccacgugggaagaucacugccaguuuucccgccccagcccuauuggcuaccuggggcuccugucccaaagaacacgggacaucuauauuucucgcagacgccggggaaccuucacauggacccucagcgauuccgagggcaacgaaacccccggcggguacugucugacacgguggaugcugaucgaggccgagcucaaaugcuuuggaaauacggcuguugccaaguguaacgaaaaacaugacgaggaguucugcgauaugcugcgccuuuuugacuucaauaagcaggcgaucagacggcugaaagcccccgcucagaugagcauucagcucaucaacaaggccgugaaugcucugauuaacgaucaacuuaucaugaagaaucaucugcgcgacauuaugugcaucccuuauugcaacuacucuaaauauugguaccucaaucacaccgucacagggaagaccucccugcccagauguuggcuggugagcaacggaucuuaccucaaugaaacacacuucagcgacgauaucgagcagcaggccgacaacaugauuaccgagcugcuucaaaaagaauauaucgaucggcagggcaagacgccucuggggcucguggaccuguuugucuucuccacaucuuuuuaccugauuagcaucuuccuucaccucguuaaaauuccgacccaucgccacgugaucggaaagcccugcccuaaaccccauagacugaaucacaugggcauuuguuccugcggccuguauaagcacccuggggugcccgucaaguggaaacggugaggacuaguuauaagacugacuagcccgaugggccucccaacgggcccuccuccccuccuugcaccgagauuaauaaaaaaaaaaaaaaaaaaaaaaaaaaaaaaaaaaaaaaaaaaaaaaaaaaaaaaaaaaaaaaaaaaaaaaaaaaaaaaaaaaaaaaaaaaaaaaaaaaaa

SEQ ID NO: 16728 - RNA, 1662 nt, Artificial Sequence
  mRNA product Design i-3 (A100) comprising derived and/or modified sequence from LASV(LASV1000-NIG-2009;Clade II)__AIT17782__GPCmut1 (opt5)
aggagaaagcuuaccaugggccagaucauuaccuucuuucaagaggugccccacgucaucgaagagguuaugaacauugugcugaucgcccucagccugcuugcuauucugaaggggaucuacaauguggccacaugcggacucuucggccuggucuccuuucuucugcucugugggagaucuugcagcacgaccuauaaaggaguguacgaacugcagacacuggagcucgacauggcgucccugaacaugaccaugccucuuucuuguacaaagaauaacagccaucacuauaucaugguuggcaaugaaaccgggcuggagcucacacugaccaacacguccauuaucaaucauaaauucugcaaccuuucugaugcucacaagaaaaaucuguacgaccaugcccucaugagcauuaucuccaccuuucaccugagcauuccgaacuucaaucaguaugaggccaugucuugugauuuuaacggaggcaagaucuccgugcaguacaaucugagccacacauaugcugucgacgccgcuaaccauugcggcaccauugccaauggggugcuccaaacauucaugcggauggcguggggaggcucuuacaucgcccuggauuccgggugcggaagcugggacuguaucaugaccucuuaccaguaucuuauuauccagaacacgacaugggaagaucacugccaguuuucccgccccagcccuauuggcuaccuggggcuccugucccaaagaacccgggacaucuauauuucucgcagacgccggggaacauucaccuggacccucagcgauuccgagggcaacgaaacacccggcggguacugucugacgcgguggaugcugaucgaggcugagcucaaaugcuuuggaaauaccgccguugcuaaguguaacgaaaaacaugacgaggaguucugcgauaugcugcgccuuuuugacuucaauaagcaggccaucaaaagacugaagacacccgcgcagaugagcauucagcucaucaacaaggccgugaaugcucugauuaacgaucaacuuaucaugaaaaaucaucugcgggacauuaugugcaucccuuauugcaacuacucuaaguauugguaccucaaucacaccgucacagggaaaaccucccugccccgcuguuggcuggugagcaacggaucuuaccucaaugaaacgcacuucagcgacgauaucgagcagcaggccgacaacaugauuacagagcugcuucaaaaggaauauaucgauagacagggcaaaaccccucuggggcucguggaccuguuugucuucuccaccucuuuuuaccugauuagcaucuuccuucaccucguuaagauuccgacacaucggcacguggugggaaaacccugcccuaagccccaucgccugaaucacaugggcaucuguuccugcggccuguauaagcacccugggguccccgugaaauggaagagaugaggacuaguuauaagacugacuagcccgaugggccucccaacgggcccuccuccccuccuugcaccgagauuaauaaaaaaaaaaaaaaaaaaaaaaaaaaaaaaaaaaaaaaaaaaaaaaaaaaaaaaaaaaaaaaaaaaaaaaaaaaaaaaaaaaaaaaaaaaaaaaaaaaaa

SEQ ID NO: 16729 - RNA, 1662 nt, Artificial Sequence
  mRNA product Design i-3 (A100) comprising derived and/or modified sequence from LASV(LASV221-NIG-2010;Clade II)__AIT17624__GPCmut1 (opt5)
aggagaaagcuuaccaugggccagaucauuaccuucuuucaagaggugccccacgucaucgaagagguuaugaacauugugcugaucgcccucagccugcuugcuauucugaaggggaucuacaauguggccacaugcggacucuucggccuggucuccuuucuucugcucugugggagaucuugcagcacgaccuauaaaggaguguacgaacugcagacacuggagcucgacauggcgucccugaacaugaccaugccucuuucuuguacaaagaauaacagccaucacuauaucaugguuggcaaugaaaccgggcuggagcucacacugaccaacacguccauuaucaaucauaaauucugcaaccuuucugaugcucacaagaaaaaucuguacgaccaugcccucaugagcauuaucuccaccuuucaccugagcauuccgaacuucaaucaguaugaggccaugucuugugauuuuaacggaggcaagaucuccgugcaguacaaucugagccacacauaugcuauugacgccgcuaaccauugcggcaccaucgccaaugggguccuccaaacauucaugcggauggcguggggaggcucuuacaucgcccuggauuccgggugcggaagcugggacuguauuaugaccucuuaccaguaucuuaucauucagaacacgacaugggaagaucacugccaguuuucccgccccagcccuaucggcuaccuggggcuccugucccaaagaacccgggacauuuauaucucucgcagacgccggggaacauucaccuggacccucagcgauuccgagggcaacgaaacacccggcggguacugucugacgcgguggaugcugaucgaggcugagcucaaaugcuuuggaaauaccgccguggcuaaguguaacgaaaaacaugacgaggaguucugcgauaugcugcgccuuuuugacuucaauaagcaggccauuagacggcugaaaacacccgcgcagaugagcauccagcucauuaacaaggccguuaaugcucugaucaacgaucaacuuauuaugaagaaucaucugcgcgacaucaugugcaucccuuauugcaacuacucuaaauauugguaccucaaucacaccgugacagggaagaccucccugcccagauguuggcuggucagcaacggaucuuaccucaaugaaacgcacuucagcgacgauauugagcagcaggccgacaacaugaucacagagaugcugcaaaaagaauauauggaucggcagggcaagaccccucuugggcugguggaccucuuuguguucuccaccucuuuuuaccugauuagcaucuuccugcaccuugucaaaauuccgacacaucgccacguuaucggaaagcccugcccuaaaccccauagacucaaucacaugggcauuuguuccugcggccuguauaagcacccuggggugcccgugaaguggaaacggugaggacuaguuauaagacugacuagcccgaugggccucccaacgggcccuccuccccuccuugcaccgagauuaauaaaaaaaaaaaaaaaaaaaaaaaaaaaaaaaaaaaaaaaaaaaaaaaaaaaaaaaaaaaaaaaaaaaaaaaaaaaaaaaaaaaaaaaaaaaaaaaaaaaa

SEQ ID NO: 16730 - RNA, 1662 nt, Artificial Sequence
  mRNA product Design i-3 (A100) comprising derived and/or modified sequence from LASV(LASV237-NIG-2010;Clade II)__AIT17638__GPCmut1 (opt5)
aggagaaagcuuaccaugggccagaucauuaccuucuuucaagaggugccccacgucaucgaagagguuaugaacauugugcugaucgcccucagccugcuugcuauucugaaggggaucuacaauguggccacaugcggacucuucggccuggucuccuuucuucugcucugugggagaucuugcagcacgaccuauaaaggaguguacgaacugcagacacuggagcucgacauggcgucccugaacaugaccaugccucuuucuuguacaaagaauaacagccaucacuauaucaugguuggcaaugaaaccgggcuggagcucacacugaccaacacguccauuaucaaucauaaauucugcaaccuuucugaugcucacaagaaagaccuguacgaucaugcccucaugagcauuaucuccaccuuucaccugagcauuccgaauuucaaccaguaugaggccaugucuugugacuuuaauggaggcaagaucuccgugcaguacaaccugagccacacauaugcugucgaugccgcuaaucauugcggcaccauugccaacggggugcuccaaacauucaugcggauggcguggggaggcucuuacaucgcccuggacuccgggugcggaagcugggauuguaucaugaccucuuaccaguaucuuauuauccagaauacgacaugggaagaccacugccaguuuucccgccccagcccuauuggcuaccuggggcuccugucccaaagaacccgggauaucuauauuucucgcagacgccggggaacauucaccuggacccucagcgacuccgagggcaacgaaacacccggcggguacugucugacgcgguggaugcugaucgaggcugagcucaaaugcuuuggaaacaccgccguugcuaaguguaaugaaaaacaugaugaggaguucugcgacaugcugcgccuuuuugauuucaacaagcaggccaucagacggcugaaaacacccgcgcagaugagcauucagcucaucaauaaggccgugaacgcucugauuaaugaccaacuuaucaugaagaaccaucugcgcgacauuaugugcaucccuuauugcaauuacucuaaauauugguaccucaaccacaccgucacagggaagaccucccugcccagauguuggcuggugagcaauggaucuuaccucaacgaaacgcacuucagcgaugacaucgagcagcaggccgauaauaugauuacagagcugcuucaaaaagaauauauggaccggcagggcaagaccccucuggggcucguggaucuguuugucuucuccaccucuuuuuaccugaucagcauuuuccuucaccucaucaaaauuccgacacaucgccacaucaccggaaagcccugcccuaaaccccauagacugaaccacaugggcauuuguuccugcggccuguauaagcacccugggguucccgugaaguggaaacggugaggacuaguuauaagacugacuagcccgaugggccucccaacgggcccuccuccccuccuugcaccgagauuaauaaaaaaaaaaaaaaaaaaaaaaaaaaaaaaaaaaaaaaaaaaaaaaaaaaaaaaaaaaaaaaaaaaaaaaaaaaaaaaaaaaaaaaaaaaaaaaaaaaaa

SEQ ID NO: 16731 - RNA, 1662 nt, Artificial Sequence
  mRNA product Design i-3 (A100) comprising derived and/or modified sequence from LASV(LASV253-NIG-2011;Clade II)__AIT17670__GPCmut1 (opt5)
aggagaaagcuuaccaugggccagaucauuaccuucuuucaagaggugccccacgucaucgaagagguuaugaacauugugcugaucgcccucagccugcuugcuauucugaaggggaucuacaauguggccacaugcggacucuucggccuggucuccuuucuucugcucugugggagaucuugcagcacgaccuauaaaggaguguacgaacugcagacacuggagcucgacauggcgucccugaacaugaccaugccucuuucuuguacaaagaauaacagccaucacuauaucaugguuggcaaugaaaccgggcuggagcucacacugaccaacacguccauuaucaaucauaaauucugcaaccuuucugaugcucacaagaaaaaucuguacgaccaugcccucaugagcauuaucuccaccuuucaccugagcauuccgaacuucaaucaguaugaggccaugucuugugauuuuaacggaggcaagaucuccgugcaguacaaucugagccacacauaugcugucgacgccgcuaaccauugcggcaccauugccaauggggugcuccaaacauucaugcggauggcguggggaggcucuuacaucgcccuggauuccgggugcggaagcugggacuguaucaugaccucuuaccaguaucuuauuauccagaacacgacaugggaagaucacugccaguuuucccgccccagcccuauuggcuaccuggggcuccugucccaaagaacccgggacaucuauauuucucgcagacgccggggaacauucaccuggacccucagcgauuccgagggcaacgaaacacccggcggguacugucugacgcgguggaugcugaucgaggcugagcucaaaugcuuuggaaauaccgccguugcuaaguguaacgaaaaacaugacgaggaguucugcgauaugcugcgccuuuuugacuucaauaagcaggccaucagacggcugaaagcgcccgcccagaugagcauucagcucaucaacaaggcugugaaugcccugauuaacgaucaacuuaucaugaagaaucaucugcgcgacauuaugugcaucccuuauugcaacuacucuaaauauugguaccucaaucacacagucaccgggagaacaucccugccccgguguuggcuggugagcaacggaucuuaccucaaugaaacccacuucagcgacgauaucgagcagcaggcugacaacaugauuacggagcugcuucaaaaggaauauaucgaucgccagggcaaaacaccucuggggcucguggaccuguuugucuucuccaccucuuuuuaccugauuagcaucuuccuucaccucguuaagauuccgacccauagacacaucauuggaaaacccugcccuaagccccaucggcugaaucacaugggcaucuguuccugcggccuguauaaacacccuggggugcccgugaaguggaagcgcugaggacuaguuauaagacugacuagcccgaugggccucccaacgggcccuccuccccuccuugcaccgagauuaauaaaaaaaaaaaaaaaaaaaaaaaaaaaaaaaaaaaaaaaaaaaaaaaaaaaaaaaaaaaaaaaaaaaaaaaaaaaaaaaaaaaaaaaaaaaaaaaaaaaa

SEQ ID NO: 16732 - RNA, 1662 nt, Artificial Sequence
  mRNA product Design i-3 (A100) comprising derived and/or modified sequence from LASV(LASV254-NIG-2011;Clade II)__AIT17674__GPCmut1 (opt5)
aggagaaagcuuaccaugggccagaucauuaccuucuuucaagaggugccccacgucaucgaagagguuaugaacauugugcugaucgcccucagccugcuugcuauucugaaggggaucuacaauguggccacaugcggacucuucggccuggucuccuuucuucugcucugugggagaucuugcagcacgaccuauaaaggaguguacgaacugcagacacuggagcucgacaugaccaaccugaauaugacaaugccucuuuccuguaccaagaacaauucucaucacuauaucaugguuggcaacgaaacagggcuggagcucacccugacgaauaccagcauuaucaaccauaaauucugcaaucuuuccgaugcgcacaagaaaaaccuguacaaucaugcucucaugucuauuaucagcacauuucaccuguccauuccgaacuucaaucaguaugaggccaugagcugugacuuuaacggaggcaagaucucugugcaguacaaucugucccacagcuaugccgucgaugcugccaaccauugcggcaccauugcuaacggggugcuccaaacauucaugcggauggccuggggaggcucuuacaucgcgcuggacuccgggugcggaaauugggauuguaucaugaccagcuaccaguaucuuauuauccagaacacgacaugggaagaccacugccaguuuucucgccccuccccuauuggcuaccuggggcuccugagccaaagaacccgggauaucuauauuucccgcagacgccggggaacauucaccuggacccucucugacagcgagggcaaugaaacacccggcggguacugucugacgcgguggaugcugaucgaggccgagcucaaaugcuuuggaaacaccgcuguugccaaguguaaugaaaaacaugaugaggaguucugcgacaugcugcgccuuuuugauuucaacaagcaggcuaucagacggcugaaaacacccgcccaggcgaauauucagcucaucaacaaggccgugaaugcucugauuaacgaccaacuuaucaugaagaaucaucugcgcgauauuaugugcaucccuuauugcaacuacuccaaauauugguaccucaaucacaccgucacagggaagaccagccugcccagauguuggcuggugucuaacggauccuaccucaaugaaacgcacuucagcgacgacaucgagcagcaggccgauaacaugauuacagagcugcuucaaaaagaauauauggaccggcagggcaagaccccucuggggcucguggaucuguuugucuucucuaccagcuuuuaccugaucuccauuuuccuucaccucguuaaaaucccgacacaucgccacgugauuggaaagcccugcccuaaaccccauagacugaaccacaugggcaucuguucuugcggccuguauaagcacccuggggugcccgucaaguggaaacggugaggacuaguuauaagacugacuagcccgaugggccucccaacgggcccuccuccccuccuugcaccgagauuaauaaaaaaaaaaaaaaaaaaaaaaaaaaaaaaaaaaaaaaaaaaaaaaaaaaaaaaaaaaaaaaaaaaaaaaaaaaaaaaaaaaaaaaaaaaaaaaaaaaaa

SEQ ID NO: 16733 - RNA, 1662 nt, Artificial Sequence
  mRNA product Design i-3 (A100) comprising derived and/or modified sequence from LASV(Nig08-A19;Clade III)__ADU56618__GPCmut1 (opt5)
aggagaaagcuuaccaugggccagaucgugaccuucuuucaagaggucccccacguuauugaagaggugaugaacaucgugcugauugcccucagcauccuggcuauucuuaaggggcuguacaauaucgccacaugcggacucaucggccuggucacguuccuucugcucuccgggagaucuuguagcaugaccuauaaaggaguguacgaacugcagacacuggagcucaacaugaauacccugaacaugacaaugccucuuuccugcaccaagaauaacucucaucacuauauuaugguuggcaaugaaacagggcuggagcucacccugacgaacaccagccuucugcaucacaaauuuuguaaucucuccgacgcgcauaagaaaaaccuguacgaucacacacugaugucuaucauuagcaccuuccaccucuccaucccgaauuuuaaccaguaugaggcuaugagcugcgacuucaauggaggcaagauuacagugcaguacaaccugucucauuccuaugccaucgaugccgcuaaucacuguggcaccgucgccaacggggugcuucaaacguuuaugcggauggcuuggggaggcagcuacauugcccuggacucugggugcggaaagugggauugcaucaugacauccuaccaguaucucaucauucagaacaccacaugggaagaccauugucaguucagcagacccucuccuaucggcuaccuggggcuucugucccaacggacccgcgauauuuauaucagcagacggcgccggggaaccuuuacauggacgcuguccgacucugagggcaaugaaacccccggcggguacugccucacacgcuggaugcugauugaggcggagcuuaaauguuucggaaacaccgccguugcuaagugcaaugaaaaacacgaugaggaauuuugugacaugcugagacucuucgauuuuaacaagcaggccauccggcgccugaaagcucccgcccagaugagcauccagcuuauuaauaaggcggugaacgcccugaucaaugaccaacucauuaugaagaaccaccugagagauaucaugugcauuccuuauugcaauuacuccaaauauugguaccugaaccauacaagcaccgggcggacgucucucccccgcugcuggcuggucuccaauggaagcuaccuuaacgaaacacacuucucugacgacaucgagcagcaggcugauaauaugaucaccgagaugcugcaaaaggaauaucucgacagacagggcaaaaccccucuggggcugguggaucuuuucguguuuagcacauccuucuaccucauuucuaucuuucugcaucuggucaagauuccgacccaccggcauaucguuggaaaacccuguccuaagccccaccgccucaaccacaugggcauuugcagcuguggccuguauaaacagccuggggugcccgugagauggaagcggugaggacuaguuauaagacugacuagcccgaugggccucccaacgggcccuccuccccuccuugcaccgagauuaauaaaaaaaaaaaaaaaaaaaaaaaaaaaaaaaaaaaaaaaaaaaaaaaaaaaaaaaaaaaaaaaaaaaaaaaaaaaaaaaaaaaaaaaaaaaaaaaaaaaa

SEQ ID NO: 16734 - RNA, 1665 nt, Artificial Sequence
  mRNA product Design i-3 (A100) comprising derived and/or modified sequence from LASV(G1180-SLE-2010;Clade IV)__AIT17168__GPCmut1 (opt5)
aggagaaagcuuaccaugggccagaucgugaccuucuuucaagaggucccccacguuauugaagaggugaugaacaucgugcugauugcccucagcauccuggcuguccuuaaggggcuguacaauuucgccacaugcggacucgugggccugcuuacguuucugcuccugugugggagauccugcaccgcgucucgguauaaaggaguuuacgaacugcagacacucgagcugaacauggaaacccuuaauaugacaaugccucugagcuguaccaagaacaauucccaucacuauauuauggugggcaacgagacagggcucgagcugacccuuacgaauaccucuaucaucaaccauaaauucugcaaucugagcgacgcucacaagaaaaaccucuacgaucaugcccugauguccauuaucucuacauuucaccugagcauuccgaauuucaaccaguaugaagccauguccugugacuuuaauggaggcaagaucagcguccaguacaaccucucucacuccuaugcuggcgaugccgcuaaucauugcgggaccguggccaacggaguucugcaaacauucaugcgcauggcguggggcgggagcuacauugcccuugacucuggaugcggcuccugggauuguaucaugaccagcuaccaguaucugauuauccagaacacgacaugggaggaccauugccaguuuucuagacccuccccuaucggguaccucggacugcuuagccaacggacccgcgauauuuauaucuccagacggcgccggggcacauucaccuggacccugucugacagcgaaggcaaggauacacccgggggauacugucugacgcgcuggaugcucauugaggcugagcugaaaugcuuuggcaauaccgccguggcuaaguguaacgaaaaacacgacgaggaguucugcgauaugcuuagacuguuugacuucaauaagcaggccauccagcggcucaaagcgcccgcccagauguccauucaacugaucaacaaggcugucaaugcccuuaucaacgaucagcugauuaugaagaaucaccuccgcgacaucaugugcauuccuuauugcaacuacagcaaauauugguaccugaaucauacaaccacaggaaagaccucucugcccaaauguuggcucguguccaacggcagcuaccugaaugaaacgcacuucucugacgauaucgagcagcaagcugacaacaugauuacagagaugcuucagaaggaauauauggagagacaggggaaaaccccucugggacucguggaucuguuugucuucagcaccuccuuuuaccugaucucuaucuuccuucaucucguuaagauuccgacacaccggcauaucgugggcaaaagcugccccaagccucaccgccugaaucacaugggcauuuguuccugcgggcuguauaagcagcccggagugccugucaaauggaagagaugaggacuaguuauaagacugacuagcccgaugggccucccaacgggcccuccuccccuccuugcaccgagauuaauaaaaaaaaaaaaaaaaaaaaaaaaaaaaaaaaaaaaaaaaaaaaaaaaaaaaaaaaaaaaaaaaaaaaaaaaaaaaaaaaaaaaaaaaaaaaaaaaaaaa

SEQ ID NO: 16735 - RNA, 1665 nt, Artificial Sequence
  mRNA product Design i-3 (A100) comprising derived and/or modified sequence from LASV(G1442-SLE-2011;Clade IV)__AIT17180__GPCmut1 (opt5)
aggagaaagcuuaccaugggccagaucgugaccuucuuucaagaggucccccacguuauugaagaggugaugaacaucgugcugauugcccucagcauccuggcuguccuuaaggggcuguacaauguggccacaugcggacucauuggccugguuacguuccuucugcucugugggagauccugcaccacaacccuguauaaaggaguguacgaacugcagacacucgagcugaacauggaaacccuuaauaugacaaugccucugucuuguaccaagaacaauagccaucacuauauccgggucggcaacgagacggggcucgagcugacccuuacaaauaccuccaucauuaaccauaaauuuugcaaucugucugacgcgcacaagaaaaaccucuacgaucaugcucugaugagcaucauuuccacauuccaccugucuaucccgaauuuuaaccaguaugaagccaugagcugugacuucaauggaggcaagauuuccgugcaguacaaccucagccacucuuaugccggcgaugcugccaaucauugcgggaccguugcuaacggagugcugcaaacguuuaugcgcauggccuggggcggguccuacaucgcgcuugacagcggaugcggcaacugggauuguauuaugacaucuuaccaguaucugaucauccagaauaccacaugggacgaucacugccaguucucccggcccagcccuauuggguaccucggacugcuuucucaacgcaccagagacgucuauaucucccggcgccgccggggcaccuuuacauggacgcugagcgauuccgagggcaaggacacccccgggggauacugucugacaagauggaugcucauugaagccgagcugaaaugcuucggcaacaccgcuguggccaaguguaaugagaaacaugaugaagaguuuugcgacaugcuucggcuguucgauuuuaacaagcaggcuauccagcgccucaaagcccccgcgcagaugucuauucaacugaucaauaaggccgugaacgcucuuaucaaugaccagcugauuaugaagaaccaccucagagacaucaugugcauuccuuauugcaauuacagcaaauauugguaccugaacaauacagccaccggaaagacgucccugcccaaauguuggcucaucagcaacggcucuuaccugaaugagacacacuucuccgaugacauugaacaggaggcugauaacaugaucaccgagaugcuucaaaaggaauauauggagcggcaggggaaaaccccucugggacucgucgaccuguucguuuuuagcacaucuuucuaccugaucagcauuuuucuucaucucgugaagaucccgacccaccgccauauugugggcaaauccugccccaagccucacagacugaaucauaugggcaucuguucuugcgggcuguauaagcagcccggagucccugugcgguggaaacgcugaggacuaguuauaagacugacuagcccgaugggccucccaacgggcccuccuccccuccuugcaccgagauuaauaaaaaaaaaaaaaaaaaaaaaaaaaaaaaaaaaaaaaaaaaaaaaaaaaaaaaaaaaaaaaaaaaaaaaaaaaaaaaaaaaaaaaaaaaaaaaaaaaaaa

SEQ ID NO: 16736 - RNA, 1665 nt, Artificial Sequence
  mRNA product Design i-3 (A100) comprising derived and/or modified sequence from LASV(G3010-SLE-2013;Clade IV)__AIT17344__GPCmut1 (opt5)
aggagaaagcuuaccaugggccagaucgugaccuucuuucaagaggucccccacguuauugaagaggugaugaacaucgugcugauugcccucagcauccuggcuguccuuaaggggcuguacaauuucgccacaugcggacucgugggccugguuacguuucuucugcucugugggagauccugcaccacaucucuguauaaaggaguguacgaacugcagacccucgagcugaacauggaaacacuuaauaugaccaugccucugagcuguacaaagaacaauucccaucacuauauuauggucggcaacgagaccgggcucgagcugacgcuuaccaauacaucuaucaucaaccauaaauucugcaaucugagcgacgcgcacaagaaaaaccucuacaaucaugcucugauguccauuaucucuaccuuucaccugagcauuccgaacuucaaucaguaugaagccauguccugugauuuuaacggaggcaagaucagcgugcaguacaaucucucucacuccuaugccggcgacgcugccagccauugcgggacaguugcuaacggagugcugcaaaccuucaugcggauggccuggggcgggucuuacauugcgcuugauuccggaugcggcaagugggacuguaucaugacgagcuaucaguaccugauuauccagaacacaaccugggaggaucacugccaguuuucucgccccuccccuaucggguaucucggacugcuuagccaaagaacacgggacauuuacaucucccgcagacgccggggcaccuucaccuggacacugucugauagcgaaggcaaagacacgcccgggggauauugucugacccgguggaugcucauugaggccgagcugaagugcuuuggcaauacagcugucgccaaauguaacgaaaagcaugaugaggaguucugcgacaugcuucgccuguuugauuucaauaaacaggcuauccagagacucaagacccccgcccagauguccauucaacugaucaacaaggcggugaaugcccuuaucaacgaccagcugauuaugaaaaaucaccuccgggauaucaugugcauuccuuacugcaacuauagcaaguacugguaccugaaucacacaaccacgggaaaaacaucucugcccaaguguuggcucguguccaacggcagcuaucugaaugaaacccauuucucugacgacaucgagcagcaagcugauaacaugauuaccgagaugcuucagaaagaauacauggagcgccaggggaagacaccucugggacucgucgaccuguuuguuuucagcaccuccuuuuaucugaucucuaucuuccuucaccucgugaaaauuccgacacauagacacaucgugggcaagagcugccccaagccucaucggcugaaucacaugggcauuuguuccugcgggcuguacaaacagcccggagucccugugcgcuggaagagaugaggacuaguuauaagacugacuagcccgaugggccucccaacgggcccuccuccccuccuugcaccgagauuaauaaaaaaaaaaaaaaaaaaaaaaaaaaaaaaaaaaaaaaaaaaaaaaaaaaaaaaaaaaaaaaaaaaaaaaaaaaaaaaaaaaaaaaaaaaaaaaaaaaaa

SEQ ID NO: 16737 - RNA, 1665 nt, Artificial Sequence
  mRNA product Design i-3 (A100) comprising derived and/or modified sequence from LASV(G502-SLE-2009;Clade IV)__AIT17126__GPCmut1 (opt5)
aggagaaagcuuaccaugggccagaucgugaccuucuuucaagaggucccccacguuauugaagaggugaugaacaucgugcugauugcccucagcauccuggcuguccuuaaggggcuguacaauuucgccacaugcggacucgugggccugcuuacguuucugcuccugugugggagauccugcaccacaggacuguauaaaggcguuuacgaacuccagacccuggagcuuaacauggaaacacugaauaugaccaugccucucucuuguacaaagaacaauagccaucacuauauuaugguggggaacgagaccggacuggagcuuacgcugaccaauacauccaucaucaaccauaaauucugcaaucucucugacgcgcacaagaaaaaccuguacgaucaugcucugaugagcauuaucuccaccuuucaccucucuauuccgaauuucaaccaguaugaagccaugagcugugacuuuaauggcggcaagaucuccguccaguacaaccugagccacucuuaugccggggaugcugccgaccauugcggaacaguggcuaauggcguucuucaaaccuucaugcggauggccuggggaggguccuacauugcgcuggauagcggcugcgggagaugggacuguaucaugacgucuuaccaguaucucauuauccagaacacaaccugggaggaucacugccaguuuucccggcccagcccuaucggauaccugggccuucugucucaacgcacaagagacauuuauaucucccggcgccgccggggcaccuucaccuggacacugagcgauuccgaagggaaggacacgcccggaggcuacugucucaccagauggaugcugauugaggccgagcuuaaaugcuuugggaacacagcuguggccaaguguaaugaaaaacaugaugaggaguucugcgacaugcugcggcucuuugauuucaacaagcaggcuauccagcgccugaaagcccccgcgcagaugucuauucaacuuaucaauaaggccgucaacgcucugaucaaugaccagcucgugaugaagaaccaccugagagacauuaugugcaucccuuauugcaauuacagccgguauugguaccugaaccacaccacaaccggccgcacgucccuccccaaauguuggcuggugagcaaugggucuuaccuuaacgaaacacauuucuccgaugacauugagcagcaagccgauaauaugaucaccgagaugcugcagaaggaauauauggagagacagggaaaaaccccucucggccuggucgaccuguuuguuuucagcacaucuuuuuaccuuauuagcaucuuccuccaccuggugaagaucccgacccaucggcacauugugggcaaauccugccccaagccucaucgccugaaccacauggggaucuguucuugcggacucuauaaacagcccggcgucccugugaaguggaagagaugaggacuaguuauaagacugacuagcccgaugggccucccaacgggcccuccuccccuccuugcaccgagauuaauaaaaaaaaaaaaaaaaaaaaaaaaaaaaaaaaaaaaaaaaaaaaaaaaaaaaaaaaaaaaaaaaaaaaaaaaaaaaaaaaaaaaaaaaaaaaaaaaaaaa

SEQ ID NO: 16738 - RNA, 1665 nt, Artificial Sequence
  mRNA product Design i-3 (A100) comprising derived and/or modified sequence from LASV(G733-SLE-2010;Clade IV)__AIT17154__GPCmut1 (opt5)
aggagaaagcuuaccaugggccagaucgugaccuucuuucaagaggucccccacguuauugaagaggugaugaacaucgugcugauugcccucagcauccuggcuguccuuaaggggcuguacaauuucgccacaugcggaauugugggccucguuuccuuucugcuucugugugggagaucuugcacgaccagccucuauaaaggaguguacgaacugcagacacuggagcucaacauggaaacccugaauaugacaaugccucuuuccuguaccaagaacaauucucaucacuauaucauggucggcaacgagacagggcuggagcucacccugacgaauaccagcaucauuaaccauaaauucugcaaucuuuccgacgcgcacaagaaaaaccuguacgaucaugcucucaugucuaucauuagcacauuucaccuguccaucccgaauuucaaccaguaugaagccaugagcugugacuuuaauggaggcaagauuucugugcaguacaaccugucccacagcuaugccggcgaugcugccaaucauugcgggaccaucgcuaacggaguucuccaaacauucaugcggauggccuggggcgggucuuacauugcgcuggacuccggaugcgauagaugggacuguaucaugaccagcuaccaguaucuuaucauucagaacacgacaugggaggaucacugccaguuuucucggcccuccccuaucggcuaccuggggcuccugagccaacgcaccagagacauuuauaucucccggcgccgccggggaacauucaccuggacccucucugauagcgaaggcaaggacacacccggcggguacugucugacgagauggaugcugauugaggccgagcucaaaugcuuuggaaauaccgcuguggccaaguguaacgaaaaacaugaugaggaguucugcgacaugcugcggcuuuuugauuucaauaagcaggcuauccagcgccugaaagcccccgcgcagauguccauccaacucauuaacaaggccgucaaugcucugaucaacgaccagcuuauuaugaagaaucaccugagagacaucaugugcauuccuuauugcaacuacagcaaauauugguaccucaaucacacaaccacagggaagaccucucugcccaaauguuggcugguguccaacggaagcuaccucaaugaaacgcauuucucugaugacaucgagcagcaagccgauaacaugaucacagagaugcugcagaaggaauauauggagcggcagggcaaaaccccucuugggcugguggaccucuuugucuucagcaccuccuuuuaccugauuucuaucuuccugcaccuuguuaagauuccgacacaucgccacguggugggaaaaagcugccccaagccucauagacucaaucacaugggcaucuguuccugcggccuguaugggcagcccggagucccugugaaguggaaacggugaggacuaguuauaagacugacuagcccgaugggccucccaacgggcccuccuccccuccuugcaccgagauuaauaaaaaaaaaaaaaaaaaaaaaaaaaaaaaaaaaaaaaaaaaaaaaaaaaaaaaaaaaaaaaaaaaaaaaaaaaaaaaaaaaaaaaaaaaaaaaaaaaaaa

SEQ ID NO: 16739 - RNA, 1665 nt, Artificial Sequence
  mRNA product Design i-3 (A100) comprising derived and/or modified sequence from MOPV/LASV reassortant(IGS-1;Clade IV)__AFY05576__GPCmut1 (opt5)
aggagaaagcuuaccaugggccagaucgugaccuucuuucaagaggucccccacguuauugaagaggugaugaacaucgugcugauugcccucagcguccuggcugugcuuaaggggcuguacaauuucgccacaugcggacucguuggccuggugacguuucuucugcucugugggagauccugcaccacaucucuguauaaaggagucuacgaacugcagacccucgagcugaacauggaaacacuuaauaugaccaugccucugagcuguacaaagaacaauucccaucacuauaucauggugggcaacgagaccgggcucgagcugacgcuuaccaauacaucuauuaucaaccauaaauucugcaaucugagcgacgcgcacaagaaaaaccucuacgaucaugcucugauguccaucauuucuaccuuucaccugagcaucccgaauuucaaccaguaugaagccauguccugugacuuuaauggaggcaagauuagcguucaguacaaccucucucacuccuaugccggcgaugcugccaaucauugcgggacaguggcuaacggaguccugcaaaccuucaugcggauggccuggggcgggagcuacaucgcgcuugacucuggaugcggcaacugggauuguauuaugacguccuaccaguaucugaucauucagaauacaaccugggaggaccacugccaguuuagcagacccucuccuaucggguaccucggacugcuuucccaacggacacgcgauaucuauauuagcagacggcgccggggcaccuucaccuggacacuguccgacucugaaggcgaggauacgcccgggggauacugucugacccgcuggaugcucaucgaggccgaacugaagugcuuuggcaacacagcuguggccaaauguaaugagaagcaugacgaagaguucugcgauaugcuuagacuguuugacuucaacaaacaggcuauucagcggcucaaggcccccgcgcagaugagcauccaacugauuaauaaagccgugaacgcucuuaucaaugaucagcugaucaugaagaaccaccuccgcgacauuaugugcaucccuuauugcaauuacuccaaguauugguaccugaaccacaccacaaccggaagaacgagccugcccaaauguuggcucgucucuaauggcuccuaccugaacgagacacauuucagcgacgauauugagcagcaagccgacaauaugaucaccgaaaugcuucagaaggaguauauggaacggcaggggaaaaccccucugggacucguugaucuguuuguguucucuaccagcuuuuaccugauuuccaucuuccuucaccucgugaagaucccgacacaucgccacauugucggcaaaucuugccccaagccucauagacugaaccacaugggcaucuguagcugcgggcuguauaaacagcccggagugccuguuaaguggaagcggugaggacuaguuauaagacugacuagcccgaugggccucccaacgggcccuccuccccuccuugcaccgagauuaauaaaaaaaaaaaaaaaaaaaaaaaaaaaaaaaaaaaaaaaaaaaaaaaaaaaaaaaaaaaaaaaaaaaaaaaaaaaaaaaaaaaaaaaaaaaaaaaaaaaa

SEQ ID NO: 16740 - RNA, 1665 nt, Artificial Sequence
  mRNA product Design i-3 (A100) comprising derived and/or modified sequence from LASV(LM765-SLE-2012;Clade IV)__AIT17814__GPCmut1 (opt5)
aggagaaagcuuaccaugggccagaucgugaccuucuuucaagaggucccccacguuauugaagaggugaugaacaucgugcugauugcccucagcauccuggcuguccuuaaggggcuguacaauuucgccacaugcggacucgugggccugguuacguuucuucugcucugugggagauccugcaccacaucucuguauaaaggaguguacgaacugcagacccucgagcugaacauggaaacacuuaauaugaccaugccucugagcuguacaaagaacaauucccaucacuauauuauggucggcaacgagaccgggcucgagcugacgcuuaccaauacaucuaucaucgaccauaaauucugcaaccugagcgaugcgcaccggaagaaucucuacgaccaugcucugauguccauuaucucuaccuuucaccugagcauuccgaacuucaaucaguaugaagccauguccugugauuuuaacggaggcaaaaucagcgugcaguacaaucucucucacuccuaugccaaggacgcugccgaucauugcggcacaguugcuaacggggugcugcaaaccuucaugcgcauggccuggggaggcagcuacauugcgcuugacucugggugcggacggugggauuguaucaugacguccuaccaguaucugauuauccagaauacaaccugggaggaccacugccaguuuagccgccccucuccuaucggcuaccucgggcugcuuucccaaagaacacgggauauuuauaucagccgcagacgccggggaaccuucaccuggacacuguccgacucugaaggcaaggauacgcccggcggguacugucugacccgguggaugcucauugaggccgagcugaaaugcuuuggaaacacagcugucgccaaguguaacgaaaaacaugacgaggaguucugcgauaugcuucgccuguuugacuucaauaagcaggcuauccagagacucaaagcccccgcgcagaugagcauucaacugaucaacaaggccgugaaugcucuuaucaacgaccagcugauuaugaagaaucaccuccgggauaucaugugcauuccuuauugcaacuacuccaaauauugguaccugaaucacaccacaaccgggaagacgagccugcccaaauguuggcucgugucuaacggauccuaccugaaugaaacacauuucagcgacgauaucgagcagcaagccgacaacaugauuaccgagaugcuucagaaggaauauauggagcgccagggcaaaaccccucuggggcucgucgaucuguuuguuuucucuaccagcuuuuaccugaucuccaucuuccuucaccucgugaagauuccgacacauagacacaucgugggaaaacccugcccuaagccccaucggcugaaucacaugggcauuuguucuugcggccuguauaagcagccugggguccccgugaaauggaagcgcugaggacuaguuauaagacugacuagcccgaugggccucccaacgggcccuccuccccuccuugcaccgagauuaauaaaaaaaaaaaaaaaaaaaaaaaaaaaaaaaaaaaaaaaaaaaaaaaaaaaaaaaaaaaaaaaaaaaaaaaaaaaaaaaaaaaaaaaaaaaaaaaaaaaa

SEQ ID NO: 16741 - RNA, 1665 nt, Artificial Sequence
  mRNA product Design i-3 (A100) comprising derived and/or modified sequence from LASV(LM776-SLE-2012;Clade IV)__AIT17824__GPCmut1 (opt5)
aggagaaagcuuaccaugggccagaucgugaccuucuuucaagaggucccccacguuauugaagaggugaugaacaucgugcugauugcccucagcauccuggcuguccuuaaggggcuguacaauuucgccacaugcggacucgugggccugguuacguuucuucugcucugugggagauccugcaccacaucuguguauaaaggagucuacgaacugcagacccuggagcucaacauggaaacacugaauaugaccaugccucuuagcuguacaaagaacaauucccaucacuauauuauggugggcaacgagaccgggcuggagcucacgcugaccaauacaucuaucaucaaccauaaauucugcaaucuuagcgacgcgcacaagaaaaaccuguacgaucaugcucucauguccauuaucucuaccuuucaccugagcauuccgaauuucaaccaguaugaagccauguccugugacuuuaauggaggcaagaucagcguucaguacaaccugucucacuccuaugccggcgaugcugccaaucauugcgggacaguggcuaacggaguccuccaaaccuucaugcggauggccuggggcgggagcuacauugcgcuggacucuggaugcggcaagugggauuguaucaugacguccuaccaguaucuuauuauccagaacacaaccugggaggaccauugccaguuuagccgccccucuccuaucggguaccugggacuccugucccaaagaacacgggauauuuauaucagccgcagacgccggggcaccuucaccuggacacucuccgacucugaaggcaaagauacgcccgggggauacugucugacccgguggaugcugauugaggccgagcucaagugcuuuggcaauacagcuguggccaaauguaacgaaaagcacgacgaggaguucugcgauaugcugcgccuuuuugacuucaauaaacaggcuauccagagacugaaggcccccgcgcagaugagcauucaacucaucaacaaggccgugaaugcucugaucaacgaucagcuuauuaugaaaaaucaucugcgggacaucaugugcauuccuuauugcaacuacuccaaguauugguaccucaaucacaccacaaccggaaaaacgagccugcccaaguguuggcuggucucuaacggcuccuaccucaaugaaacacacuucagcgacgauaucgagcagcaagccgacaacaugauuaccgagaugcugcagaaagaauauauggagcgccaggggaagaccccucuuggacugguugaucucuuuguguucucuaccagcuuuuaccugaucuccaucuuccugcaucuugugaaaauuccgacacacagacauaucgucggcaagucuugccccaagccucaccggcucaaucacaugggcauuuguagcugcgggcuguauaaacagcccggagugccuguucgcuggaagagaugaggacuaguuauaagacugacuagcccgaugggccucccaacgggcccuccuccccuccuugcaccgagauuaauaaaaaaaaaaaaaaaaaaaaaaaaaaaaaaaaaaaaaaaaaaaaaaaaaaaaaaaaaaaaaaaaaaaaaaaaaaaaaaaaaaaaaaaaaaaaaaaaaaaa

SEQ ID NO: 16742 - RNA, 1665 nt, Artificial Sequence
  mRNA product Design i-3 (A100) comprising derived and/or modified sequence from LASV(Mad39;Clade IV)__ANH09722__GPCmut1 (opt5)
aggagaaagcuuaccaugggccagaucgugaccuucuuucaagaggucccccacguuauugaagaggugaugaacaucgugcugauugcccucagcauccuggcuguccuuaaggggcuguacaauguggccacaugcggacucauuggccugguuacguuccuucugcucugugggagauccugcaccacaacccuguauaaaggaguguacgaacugcaggcgcucgagcugaacauggaaacacuuaauaugaccaugccucugucuuguacaaagaacaauagccaucacuauauccgggucggcaacgagaccgggcucgagcugacgcuuaccaauacaucccugaucaaccauaaauuuugcaaucucucugacgcucacaagaaaaaccuguacgaucaugcccugaugagcauuaucuccaccuuccaccucucuauuccgaauuuuaaccaguaugaagccaugagcugugacuucaaugauggaaagaucuccgugcaguacaaccugagccacacauaugcuggcgacaccgccaaucauugcggcacgguugcuaacggggugcuucaaacauuuaugcgcauggccuggggaggcucuuacauugcgcuggauuccgggugcggaggcugggacuguaucaugaccagcuaccaguaucucauuauccagaacacaaccugggaggaucacugccaguucucucggcccuccccuaucggguaccugggacuucugagccaacgcaccagagacauuuauaucucucggcgccgccggggcacauuuacguggacccuguccgauagcgaaggcaaggacacacccgggggauacugucucaccagauggaugcugauugaggccgagcuuaaaugcuucggcaauacagcugucgccaaguguaacgaaaaacaugaugaggaauuuugcgacaugcugcgccucuucgauuuuaauaagcaggcuauccagcggcugaaagcccccgcgcagauguccauucaacuuaucaacaaggccgugaaugcucugaucaacgaccagcucauuaugaagaaucaccugagagacaucaugugcauuccuuauugcaacuacucuaaauauugguaccugaaucacaccgugacgggaaagacaagccuccccaaauguuggcuggucuccaacggcagcuaccuuaaugaaacccauuucucugaugacaucgagcagcaagccgauaacaugauuaccgagaugcugcagaaggaauauauggagcggcaggggaaaacaccucucggacugguugaccuguucguguuuuccaccagcuucuaccuuaucucuaucuuucuccaccuggugaagauuccgacacaucgccacgucgugggcaaacccugcccuaagccccauagacugaaucacaugggcaucuguagcugcggguucuauaagcagccuggaguucccgugcgguggaaacgcugaggacuaguuauaagacugacuagcccgaugggccucccaacgggcccuccuccccuccuugcaccgagauuaauaaaaaaaaaaaaaaaaaaaaaaaaaaaaaaaaaaaaaaaaaaaaaaaaaaaaaaaaaaaaaaaaaaaaaaaaaaaaaaaaaaaaaaaaaaaaaaaaaaaa

SEQ ID NO: 16743 - RNA, 1665 nt, Artificial Sequence
  mRNA product Design i-3 (A100) comprising derived and/or modified sequence from LASV(Z0947-SLE-2011;Clade IV)__AIT17840__GPCmut1 (opt5)
aggagaaagcuuaccaugggccagaucgugaccuucuuucaagaggucccccacguuauugaagaggugaugaacaucgugcugauugcccucagcauccuggcuguccuuaaggggcuguacaauuucgccacaugcggacucgugggccugguuacguuucuucugcucugugggagauccugcaccauuucucuguauaaaggaguguacgaacugcagacacucgagcugaacauggaaacccuuaauaugacaaugccucugagcuguaccaagaacaauucccaucacuauaucauggucggcaacgagacagggcucgagcugacccuuacgaauaccucuaucauuaaccauaaauucugcaaucugagcgacgcgcacaagaaaaaccucuacgaucaugcucugauguccaucauuucuacauuucaccugagcaucccgaauuucaaccaguaugaagccauguccugugacuuuaauggaggcaagauuagcgugcaguacaaccucucucacuccuaugccggcgaugcugccaaucauugcgggaccguugcuaacggagugcugcaaacauucaugcggauggccuggggcgggagcuacaucgcgcuugacucuggaugcgauagaugggacuguauuaugaccuccuaccaguaucugaucauccagaacacgacaugggaggaucacugccaguuuagccggcccucuccuauuggcuaccucgggcugcuuucccaacgcaccagagacaucuauauuagccggcgccgccggggaacauucaccuggacccuguccgauucugaaggcaaggacacacccggcggguacugucugacgagauggaugcucaucgaggccgagcugaaaugcuuuggaaauaccgcugucgccaaguguaacgaaaaacaugaugaggaguucugcgacaugcuucggcuguuugauuucaauaagcaggcuauucagcgccucaaagcccccgcgcagaugagcauccaacugaucaacaaggccgugaaugcucuuauuaacgaccagcugaucaugaagaaucaccucagagacauuaugugcaucccuuauugcaacuacuccaaauauugguaccugaaucacacaaccacagggaagaccagccugcccaaauguuggcucgugucuaacggauccuaccugaaugaaacgcauuucagcgaugacauugagcagcaagccgauaacaugaucacagagaugcuucagaaggaauauauggagcggcagggcaaaaccccucuggggcucgucgaccuguuuguuuucucuaccagcuuuuaccugaucuccauuuuccuucaccucgugaagaucccgacacaucgccacauugugggaaaacccugcccuaagccccauagacugaaucacaugggcaucuguucuugcggccuguauaagcagccugggguccccgugaaauggaagcggugaggacuaguuauaagacugacuagcccgaugggccucccaacgggcccuccuccccuccuugcaccgagauuaauaaaaaaaaaaaaaaaaaaaaaaaaaaaaaaaaaaaaaaaaaaaaaaaaaaaaaaaaaaaaaaaaaaaaaaaaaaaaaaaaaaaaaaaaaaaaaaaaaaaa

SEQ ID NO: 16744 - RNA, 1951 nt, Artificial Sequence
  mRNA product Design a-1 (hSL-A64-N5) comprising derived and/or modified sequence from LASV(Josiah;Clade IV)__NP_694869__NP (opt1)
aggagagucccgcagucggcguccagcggcucugcuuguucgugugugugucguugcaggccuuauucaagcuuaccaugagcgccuccaaggagaucaagagcuuccuguggacccagucccuccgccgggagcugagcggcuacugcuccaacaucaagcuccagguggucaaggacgcccaggcgcugcugcacgggcuggacuucagcgagguguccaacgugcagcgccucaugcggaaggagcgccgggacgacaacgaccugaagcgccugcgggaccucaaccaggccgucaacaaccugguggagcucaagagcacccagcagaaguccauccugcgcgugggcacccugaccagcgacgaccugcucauccuggccgccgaccuggagaagcucaaguccaaggucauccggaccgagcgcccccugagcgccgggguguacaugggcaaccuguccagccagcagcucgaccagcggcgcgcgcugcugaacaugaucgggauguccggcggcaaccagggggcccgggccggccgcgacggggugguccgggugugggacgugaagaacgccgagcuccugaacaaccaguucggcaccaugccgagccugacgcucgcgugccugaccaagcaggggcaggucgaccugaacgacgccgugcaggcccucaccgaccugggccugaucuacaccgccaaguaccccaacacguccgaccucgaccgccugacccagagccaccccauccugaacaugaucgacaccaagaaguccagccucaacaucagcggcuacaacuucucccugggggccgcggugaaggccggcgccugcaugcuggacgggggcaacaugcucgagaccaucaaggucagcccccagacgauggacggcauccugaaguccauccugaaggugaagaaggcccucgggauguucaucagcgacaccccgggcgagcggaaccccuacgagaacauccuguacaagaucugccuguccggggacggcuggcccuacaucgccagccgcaccuccaucaccgggcgggcgugggagaacacgguggucgaccucgagagcgacggcaagccccagaaggccgacuccaacaacagcuccaagagccugcaguccgccggcuucaccgccgggcugaccuacagccagcucaugacccugaaggacgccaugcugcagcuggacccgaacgcgaagacguggauggacaucgagggccgccccgaggaccccguggagaucgcccucuaccagcccuccagcgggugcuacauccacuucuuccgggagccgaccgaccugaagcaguucaagcaggacgccaaguacucccacggcaucgacgugaccgaccuguucgccacccagcccgggcucacgagcgccgucaucgacgcgcugccccgcaacauggugaucacgugccagggcuccgacgacauccgcaagcugcucgagagccagggccggaaggacaucaagcugaucgacaucgcccugagcaagaccgacucccgcaaguacgagaacgccgugugggaccaguacaaggaccucugccacaugcacaccggggucguggucgagaagaagaagcggggcgggaaggaggagaucaccccgcacugcgcccugauggacugcaucauguucgacgcggccgugagcggcgggcugaacaccuccgugcuccgcgccguccugccccgggacaugguguuccgcaccagcacgccccgggugguccugugaggacuagucccuguucccagagcccacuuuuuuuucuuuuuuugaaauaaaauagccugucuuucagaucucaaaggcucuuuucagagccaccaaaaaaaaaaaaaaaaaaaaaaaaaaaaaaaaaaaaaaaaaaaaaaaaaaaaaaaaaaaaaaaaagaauu

SEQ ID NO: 16745 - RNA, 1951 nt, Artificial Sequence
  mRNA product Design a-1 (hSL-A64-N5) comprising derived and/or modified sequence from LASV(LP;Clade I)__AAF86702__NP (opt1)
aggagagucccgcagucggcguccagcggcucugcuuguucgugugugugucguugcaggccuuauucaagcuuaccaugagcaacuccaaggagaucaagagcuuccuguggacccagucccuccgccgggagcugagcggcuacugcuccaacaucaagcuccagguggucaaggacgcccaggcccugcugcacgggcuggacuucagcgagguguccaacgugcagcgccucaugcggaagcagaagcgcgacgacgcggaccugaagcggcugcgcgaccucaaccaggccgucaacaaccugguggagcucaagagcacccagcagaagaacgugcugcgggucggcacgcuguccagcgacgaccugaucacccucgccgccgaccuggagaagcugaaguccaaggugauccgcaccgagcggccccucagcuccgggguguacaugggcaaccugagcucccagcagcuggaccagcgccgggcccuccugagcaugaucgggauguccggcggcccgcaggggaaccgcaccggcggggacggcgucgugcgggugugggacgucaagaacgcggagcugcucaacaaccaguucgggacgaugcccagccugacccuggccugccucaccaagcagggccagguggaccugaacgacgccgugcaggcccugaccgaccucggccugaucuacacggcgaaguaccccaacuccagcgaccuggacaugcucacccagagccaccccauccuggggauggucgacaccaagaaguccagccugaacaucuccggcuacaacuucagccucggggccgccgugaaggccggcgccugcaugcuggacggcgggaacaugcuggagaccaucaagguguccccgcagacgauggacggcauccucaagagcauccugaaggucaagcgcucccuggggauguucaucagcgacacccccggcgagcggaaccccuacgagaacauccucuacaagaucugccuguccggggagggcuggcccuacaucgcgagccgcaccuccaucaccggccgggccugggagaacacgcugguggaccucgagagcgacaacaagccgcccaagcugaacuccgccgggagcaacaagucccugcaggccgccggccucaacgcggggcugaccuacagccagcugaugacccugaaggacugcaugcuccagcuggaccccuccagcaagaccuggaucgacaucgagggccgccccgaggacccgguggagaucgcccuguuccagcccuccagcgggugcuacauccacuucuuccgggagcccacggaccucaagcaguucaagcaggacgccaaguacagccacggcaucgacgucaccgaccuguucuccacccagcccggccugaccagcgccgugaucgaggcccucccgcgcaacauggugcugacgugccagggguccgacgacaucaagaagcugcucgagagccagggccggcgcgacaucaagcugaucgacaucucccugagcaaggcggacucccgcaaguucgagaacgccgucugggaccaguacaaggaccucugccacaugcacaccgggguggucguggagaagaagaagcggggcgggaaggaggagaucacgccccacugcgcccugcuggacugcaucauguucgacgccgccaccaccggcagccucaacaucaccacccugcgcgcggugcugccccgggacauggucuuccgcaccuccacgcccaagguggugcucugaggacuagucccuguucccagagcccacuuuuuuuucuuuuuuugaaauaaaauagccugucuuucagaucucaaaggcucuuuucagagccaccaaaaaaaaaaaaaaaaaaaaaaaaaaaaaaaaaaaaaaaaaaaaaaaaaaaaaaaaaaaaaaaaagaauu

SEQ ID NO: 16746 - RNA, 1951 nt, Artificial Sequence
  mRNA product Design a-1 (hSL-A64-N5) comprising derived and/or modified sequence from LASV(803213;Clade II)__AAF86704__NP (opt1)
aggagagucccgcagucggcguccagcggcucugcuuguucgugugugugucguugcaggccuuauucaagcuuaccaugagcgccuccaaggaggugaaguccuuccuguggacccagagccuccgccgggagcugagcggcuacugcuccaacaucaagcugcaggucgugaaggacgcccaggcgcuccugcacgggcuggacuucagcgaggugaacaacguccagcgccucaugcggaagcagaagcgcgacgacggcgaccugaagcggcugcgcgaccucaaccaggccgugaacaaccugguggagcugaaguccacccagcagaaguccauccuccgggucgggacgcugaccagcgacgaccugcucacccuggccgccgaccuggagaagcucaagagcaaggugauccgcaccgagcggccccuguccagcggcguguacauggggaaccuguccacgcagcagcucgagcagcgccgggcccugcugaacaugaucggcauggucggcggggcgcagggcacccagccggggcgcgacggcguggugcgggucugggacgugaagaaccccgaccuccugaacaaccaguucgggaccaugcccagccugacccucgccugccugacgaagcagggccagguggaccugaacgacgccguccucgcccugaccgaccugggccucaucuacaccgcgaaguaccccaacuccagcgaccuggaccgccugucccagagccacccgauccucaacaugguggacaccaagaaguccagccugaacaucagcggguacaacuucucccugggcgccgccgugaaggccggggccugcaugcucgacggcggcaacaugcuggagacgaucaaggucacgccccagaccauggacgggauccucaagagcauccugaaggugaagcggucccugggcauguucgugagcgacacccccggggagcgcaaccccuacgagaacauccuguacaagaucugccucuccggcgacggguggccguacaucgcgagccggaccuccaucgucggccgcgccugggagaacaccaccguggaccuggagagcgacggcaagccccagaagguggggaccgccggcuccaacaagagccugcaguccgccggguuccccacgggccucaccuacagccagcugaugacccugaaggacuccaugaugcagcuggaccccagcgccaagaccuggaucgacaucgaggggcggccggaggaccccgucgagaucgcgcucuaccagcccauguccggcugcuacauccacuucuuccgcgagcccacggaccugaagcaguucaagcaggacgccaaguacagccacggcaucgacguggccgaccuguucccggcccagcccgggcucaccuccgccgucaucgaggcgcugccccggaacauggugcugaccugccagggcagcgacgacaucaagaagcuccuggacucccaggggcgccgcgacaucaagcugaucgacaucagccucagcaagguggacucccggaaguucgagaacgccgucugggaccagugcaaggaccugugccacaugcacaccggcgugguggucgagaagaagaagcgcgggggcaaggaggagaucacgccccacugcgcccugauggacugcaucauguucgacgccgccgugagcggcgggcucaacaucccggugcugcgggcgguccugccccgcgacaugguguuccggaccuccagccccaaggugguccucugaggacuagucccuguucccagagcccacuuuuuuuucuuuuuuugaaauaaaauagccugucuuucagaucucaaaggcucuuuucagagccaccaaaaaaaaaaaaaaaaaaaaaaaaaaaaaaaaaaaaaaaaaaaaaaaaaaaaaaaaaaaaaaaaagaauu

SEQ ID NO: 16747 - RNA, 1954 nt, Artificial Sequence
  mRNA product Design a-1 (hSL-A64-N5) comprising derived and/or modified sequence from LASV(GA391;Clade III)__CAA36646__NP (opt1)
aggagagucccgcagucggcguccagcggcucugcuuguucgugugugugucguugcaggccuuauucaagcuuaccaugagcgccuccaaggaggugcgcagcuuccuguggacccagucccuccggcgcgagcugagcggcuacugcuccaacaucaagcugcaggucgugaaggacgcccaggcgcuccugcacgggcuggacuucagcgagguguccaacguccagcggcucaugcgcaagcagaagcgggacgacggcgaccugaagcgccugcgggaccucaaccaggccgugaacaaccugguggagcucaagagcacccagcagaaguccguccugcgcguggggacccugagcuccgacgaccugcucauccuggccgccgaccuggagaagcucaagagcaaggugacccggaccgagcgcccccuguccagcggcgucuacauggggaaccuguccagccagcagcucgaccagcggcgcgcccugcugaacaugaucggcaugaccggcguguccgggggcgggaagggcgcgagcgacgggaucgugcgggucugggacgugaagaacgccgagcuccugaacaaccaguucggcacgaugccgucccugacccucgccugccugaccaagcagggccagguggaccugaacgacgccguccaggcgcucaccgaccuggggcugaucuacacggccaaguaccccaacagcagcgaccucgaccgccugucccagagccaccccauccugaacaugaucgacaccaagaaguccagccucaacaucuccggcuacaacuucagccugggggccgccgugaaggccggcgcgugcaugcuggacggcgggaacaugcucgagaccaucaaggugagcccccagaccauggacggcauccucaaguccauccugaaggucaagaagucccuggggauguucgugagcgacacgccgggcgagcggaaccccuacgagaacauccuguacaagaucugccuguccggggacggcuggcccuacaucgccagccgcaccuccaucgugggccgggccugggagaacaccgucguggaccucgagcaggacaacaagccccagaagaucgggaacggcgggagcaacaagucccugcagagcgccggcuucgccgcggggcugaccuacucccagcucaugacgcugaaggacuucaagugcuucaaccugaucccgaacgccaagaccuggauggacaucgagggccgccccgaggaccccguggagaucgcccuguaccagcccagcuccggcugcuacguccacuucuuccgggagccgaccgaccucaagcaguucaagcaggacgccaaguacagccacgggaucgacgugaccgaccuguucgccgcgcagcccggccugacgagcgccgucaucgaggcccucccccgcaacauggugaucacgugccagggguccgaggacauccggaagcugcuggagagccagggccgccgcgacaucaagcucaucgacaucacccuguccaaggccgacagccggaaguucgagaacgccgugugggaccaguucaaggaccugugccacaugcacaccggggucgugguggagaagaagaagcgcggcggcaaggaggagaucacgccccacugcgcgcucauggacugcaucauguucgacgccgccgucuccgggggccuggacgccaaggugcugcgggugguccucccgcgcgacaugguguuccggaccagcacccccaaggugguccugugaggacuagucccuguucccagagcccacuuuuuuuucuuuuuuugaaauaaaauagccugucuuucagaucucaaaggcucuuuucagagccaccaaaaaaaaaaaaaaaaaaaaaaaaaaaaaaaaaaaaaaaaaaaaaaaaaaaaaaaaaaaaaaaaagaauu

SEQ ID NO: 16748 - RNA, 1951 nt, Artificial Sequence
  mRNA product Design a-1 (hSL-A64-N5) comprising derived and/or modified sequence from LASV(AV;Clade V)__CCA30315__NP (opt1)
aggagagucccgcagucggcguccagcggcucugcuuguucgugugugugucguugcaggccuuauucaagcuuaccaugagcgccuccaaggaggugaaguccuuccuguggacccagagccuccgccgggagcugagcggcuacugcuccaacaucaagcugcaggucgugaaggacgcccaggcgcuccugcacgggcuggacuucagcgagguguccaacguccagcgccucaugcggaagcagcgccgggacgacagcgaccugaagcgccugcgggaccucaaccaggccgugaacaaccugguggagcugaaguccacccagcagaaguccguccuccgcgugggcacgcugagcagcgacgaccugcucacccuggccgccgaccuggagaagcucaaguccaaggugacccggaccgagcgcccccugagcuccggggucuacaugggcaaccugagcucccagcagcucgaccagcggcgcgcccugcugaaccucaucgggaugacgaacggcagccagggcucccaggcggggcgggacggcguggugcgcgucugggacgugaagaacgccgagcugcugaacaaccaguucgggaccaugccgagccucacccuggccugccugaccaagcagggccagguggaccucaacgacgucgugcaggcccugacggaccuggggcucaucuacaccgcgaaguaccccaacaccagcgaccuggaccggcugacccagucccaccccauccucaacaugaucgacacgaagaaguccagccugaacaucagcggcuacaacuucucccugggcgccgccgugaaggccggggccugcaugcucgacggcgggaacaugcuggagaccaucaaggucagcccccaguccauggacggcauccucaagagcauccugaaggugaagcgcgcgcugggcauguucguguccgacaccccgggggagcggaaccccuacgagaacauccuguacaagaucugccucagcggcgacggguggcccuacaucgccucccgcaccagcaucgucggccgggccugggagaacacggugguggaccuggagaccgacgggaagccccagaagaucggcuccggcaacagcaacaagucccugcagagcgccggguucuccgccggccucaccuacagccagcugaugacccugaaggacgcgaugcugcagcucgacccgaacgccaagacguggauggacaucgaggggcgccccgaggaccccgucgagguggcccuguaccagcccaucuccggcugcuacauccacuucuuccgggagccgaccgaccugaagcaguucaagcaggacgccaaguacagccacgggaucgacaucgccgaccucuucgcggcccagcccggccugaccagcgccgucaucgaggcccugccccgcaacauggugaucacgugccagggcuccgaggacaucaagaagcuccuggagagccaggggcgcaaggacaucaagcugaucgacaucgcccucuccaagaucgacagccggaaguucgagaacgcggugugggaccaguacaaggaccugugccacaugcacaccggcgucgugguggagaagaagaagcgcgggggcaaggaggagaucaccccgcacugcgcccugauggacugcaucauguucgacgccgccgucuccgggggccucaacacccuggugcugcgggcggugcucccccgcgacauggucuuccggaccagcacgccccgcguggugcugugaggacuagucccuguucccagagcccacuuuuuuuucuuuuuuugaaauaaaauagccugucuuucagaucucaaaggcucuuuucagagccaccaaaaaaaaaaaaaaaaaaaaaaaaaaaaaaaaaaaaaaaaaaaaaaaaaaaaaaaaaaaaaaaaagaauu

SEQ ID NO: 16749 - RNA, 1951 nt, Artificial Sequence
  mRNA product Design a-1 (hSL-A64-N5) comprising derived and/or modified sequence from LASV(Togo/2016/7082;Clade VI)__AMR44578__NP (opt1)
aggagagucccgcagucggcguccagcggcucugcuuguucgugugugugucguugcaggccuuauucaagcuuaccaugagcaacuccaaggaggugaaguccuuccuguggacccagagccuccgccgggagcugagcggcuacugcuccaacaucaagcugcaggucgugaaggacgcccaggcccuccugcacgggcuggacuucagcgagguguccaacguccagcgccucaugcggaagcagaagcgcgacgacggcgaccugaagcggcugcgcgaccucaaccaggcggugaacaaccugguggagcucaagagcguccagcagaaguccauccugcggguggggacccugaccagcgacgaccugcucacccuggccgccgaccuggagaagcucaaguccaaggugacccgcaccgagcggccccugagcuccggcgucuacauggggaaccugagcucccagcagcucgaccagcgccgggcccugcugagcaugaucggcauguccggcgggaaccagaacagccagccgaagggcgacgggguggugcgcgucugggacgugaagaacgccgaccuccugaacaaccaguucggcacgaugcccucccugacccucgcgugccugaccaagcagggccagguggaccugaacgacgccguccaggcccucaccgaccuggggcugaucuacacggccaaguaccccaacagcagcgaccucgaccggcugucccagagccaccccauccugaacaugaucgacaccaagaaguccagccucaacaucuccggcuacaacuucagccugggggcggccaucaagaccggcgccugcaugcuggacgggggcaacaugcucgagaccaucaaggugacgccgcagaccauggacggcauccugaaguccauccugaaggugaagcgcagccucgggauguucaucuccgacacccccggcgagcggaaccccuacgagaacauccuguacaagaucugccugagcggggacggcuggcccuacaucgccucccgcaccgccaucaucgggcgggcgugggagaacacggucguggaccucgagagcgacuccaagccgcagaagaucggcagcaacggcuccaacaagagccugcaguccgccggguucgcccccggccugaccuacagccagcucaugacccugaaggacuccaugcugcagcuggaccccaacgccaagaccuggaucgacaucgaggggcgccccgaggacccgguggaggucgcccucuuccagcccaucagcggcugcuacauccacuucuuccgggagcccacggaccugaagcaguucaagcaggacgcgaaguacagccacgggaucgacgugaccgaccuguucgccgcccagcccggccucaccuccgccgugaucgaggcccugccgcgcaacaugguccugaccugccagggcagcgacgacaucaagaagcuccuggacucccaggggcggcgcgacaucaagcugaucgacgugagccucaacaagaucgacucccgcaaguucgagaacgcggucugggaccaguacaaggaccugugccacaugcacacgggcgugguggucgagaagaagaagaagggcgggaaggaggagaucacgccccacugcgcccugcucgacugcaucauguucgacgccgccgugagcgggggccugaacgccaccgugcugcgggcgguccucccccgcgacaugguguuccggaccuccagccccaaggugguccugugaggacuagucccuguucccagagcccacuuuuuuuucuuuuuuugaaauaaaauagccugucuuucagaucucaaaggcucuuuucagagccaccaaaaaaaaaaaaaaaaaaaaaaaaaaaaaaaaaaaaaaaaaaaaaaaaaaaaaaaaaaaaaaaaagaauu

SEQ ID NO: 16750 - RNA, 1951 nt, Artificial Sequence
  mRNA product Design a-1 (hSL-A64-N5) comprising derived and/or modified sequence from LASV(KAK-428;Clade n.d. (VII))__ANH09741__NP (opt1)
aggagagucccgcagucggcguccagcggcucugcuuguucgugugugugucguugcaggccuuauucaagcuuaccaugagcaacuccaaggaggugaaguccuuccuguggacccagagccuccgccgggagcugagcggcuacugcaccaacaucaagcugcaggucgugaaggacgcccaggcccuccugcacgggcuggacuucuccgaggugagcaacguccagcgccucaugcggaagcagaagcgcgacgacaacgaccugaagcggcugcgcgaccucaaccaggcggugaacaaccugguggagcugaaguccguccagcagaaguccgugcucaaggugggcacgcugaacagcgacgaccugcucacccuggccgccgaccuggagaagcucaagagcaaggucgugcggaccgagcgcccccuguccagcgggguguacaugggcaaccuguccagccagcagcucgaccagcggcgcgcccugcugaacaugaucgggauggccggcggcucccaggggaaccagccgagccgggacggcgucgugcgcgugugggacgucaagaacgcggaccuccugaacaaccaguucgggaccaugcccucccugacgcucgccugccugaccaagcagggccagguggaccugaacgacgugguccucgcccugaccgaccuggggcucaucuacaccgccaaguaccccaacagcuccgaccuggaccggcugagccagaaccaccccgugcucaacaugaucgacgugaacaagagcucccugaacaucagcggcuacaacuucucccugggcgcggccgucaaggccggggccugcaugcucgacggcgggaacaugcuggagacgaucaagaucagcccgcagaccguggacggcauccugaaguccauccucaaggugaagcgcgcccugggcauguucgucagcgacacccccggggagcggaaccccuacgagaacauccuguacaaggugugccucuccggcaacggguggcccuacaucgcgagccgcaccuccaucgucggccgggccugggagaacacggugguggaccuggagagcaacaagaaccagccgaaggucgggaacaacggcuccaacaagaugcugcagagcuccggcuucgccaccgggcucaccuacagccagcugaugacccugcgcgacuccaugcugcagcucgaccccacggccaagaccuggaucgacaucgagggccggcccgaggaccccguggagcuggcccuguuccagccgagcuccgggugcuacauccacuucuuccgcgagcccaccgaccucaagcaguucaagcaggacgcgaaguacagccacggcaucgacgugaacgaccuguucuccgcccagcccgggcugaccagcgccguccucgaggcccugccccggaacauggugcugacgugccagggcagcgacgacauccgcaagcuccuggacucccaggaccgcaaggacaucaagcugaucgacaucagccucuccaaggccgacgcgcggaaguucgagaacgacgugugggaccaguucaaggaccugugccacaugcacaccggcaucgucguggagaagaagaagaagggcgggaagcaggagaugaccccgcacugcgcccugcucgacugcaucauguucgacgccgccgugagcgggggccugaacguccccacccugcgcgccgugcuccccacggacaugguguuccggaccaucaccaccaaggucgugcugugaggacuagucccuguucccagagcccacuuuuuuuucuuuuuuugaaauaaaauagccugucuuucagaucucaaaggcucuuuucagagccaccaaaaaaaaaaaaaaaaaaaaaaaaaaaaaaaaaaaaaaaaaaaaaaaaaaaaaaaaaaaaaaaaagaauu

SEQ ID NO: 16751 - RNA, 1951 nt, Artificial Sequence; identical to SEQ ID NO: 16745
  mRNA product Design a-1 (hSL-A64-N5) comprising derived and/or modified sequence from LASV(Pinneo-NIG-1969;Clade I)__AIT17837__NP (opt1)

SEQ ID NO: 16752 - RNA, 1951 nt, Artificial Sequence
  mRNA product Design a-1 (hSL-A64-N5) comprising derived and/or modified sequence from LASV(ISTH0009-NIG-2011;Clade II)__AIT17405__NP (opt1)
aggagagucccgcagucggcguccagcggcucugcuuguucgugugugugucguugcaggccuuauucaagcuuaccaugagcguguccaaggaggucaagagcuuccuguggacccagucccuccgccgggagcugagcggcuacugcuccaacaucaagcuccagguggugaaggacgcccaggcccugcugcacgggcuggacuucagcgaggucuccaacgugcagcgccucaugcggaagcagaagcgcgacgacagcgaccugaagcggcugcgcgaccucaaccaggcggugaacaaccuggucgagcugaaguccacccagcagaaguccauccuccgggugggcacccugaccagcgacgaccugcucacccuggccgccgaccuggagaagcucaagagcaaggugauccgcaccgagcggccccuguccagcggggucuacaugggcaaccuguccacgcagcagcucgagcagcgccgggcccugcugaacaugaucgggauggugggcggcgcccaggggacccagccgggccgcgacggggugguccgggugugggacgugaagaaccccgaccuccugaacaaccaguucggcaccaugcccagccugacccucgcgugccugacgaagcaggggcaggucgaccugaacgacgccgugcucgcccugaccgaccugggccucaucuacaccgccaaguaccccaacuccagcgaccuggaccgccugucccagagccacccgauccucaacaugguggacaucaagaaguccagccugaacaucagcggcuacaacuucucccugggggcggccgucaaggccggcgccugcaugcucgacgggggcaacaugcuggagaccaucaaggugacgccccagaccauggacggcauccucaagagcauccugaaggugaagcggucccuggggauguucgucagcgacacccccggcgagcgcaaccccuacgagaacauccuguacaagaucugccucuccggggacggcuggccguacaucgccagccggaccuccaucguggggcgcgcgugggagaacacgaccguggaccuggagagcgacggcaagccccagaaggucggcuccgccgggagcaacaagucccugcagagcgccggcuuccccaccgggcucaccuacucccagcugaugacgcugaaggacagcaugaugcagcuggaccccuccgccaagaccuggaucgacaucgagggccggccggaggaccccguggagaucgcccucuaccagcccaugagcgggugcuacauccacuucuuccgcgagcccaccgaccugaagcaguucaagcaggacgcgaaguacucccacggcaucgacgucgccgaccuguucccggcccagcccggccucaccagcgccgugaucgaggcccugccccggaacauggugcugacgugccaggggagcgacgacaucaagcgccuccuggacucccagggccgccgggacaucaagcugaucgacaucgcgcucagcaaggccgacucccgccgguucgagaacgccgucugggaccagugcaaggaccugugccacaugcacaccggggugguggucgagaagaagaagcgcggcgggaaggaggagaucacgccccacugcgcccugauggacugcaucauguacgacgccgcggugagcggcggccucaacaucccggugcugcgggccguccugccccgcgacaugguguuccggaccuccagccccaaggugguccucugaggacuagucccuguucccagagcccacuuuuuuuucuuuuuuugaaauaaaauagccugucuuucagaucucaaaggcucuuuucagagccaccaaaaaaaaaaaaaaaaaaaaaaaaaaaaaaaaaaaaaaaaaaaaaaaaaaaaaaaaaaaaaaaaagaauu

SEQ ID NO: 16753 - RNA, 1951 nt, Artificial Sequence
  mRNA product Design a-1 (hSL-A64-N5) comprising derived and/or modified sequence from LASV(ISTH2010-NIG-2012;Clade II)__AIT17483__NP (opt1)
aggagagucccgcagucggcguccagcggcucugcuuguucgugugugugucguugcaggccuuauucaagcuuaccaugagcgccuccaaggaggugaaguccuuccuguggacccagagccuccgccgggagcugagcggcuacugcuccaacaucaagcugcaggucgugaaggacgcccaggcgcuccugcacgggcuggacuucagcgagguguccaacguccagcgccucaugcggaagcagaagcgcgacgacagcgaccugaagcggcugcgcgaccucaaccaggccgugaacaaccugguggagcugaaguccacccagcagaaguccauccuccgggucggcacgcugaccagcgacgaccugcucacccuggccgccgaccuggagaagcucaagagcaaggugauccgcaccgagcggccccuguccagcgggguguacaugggcaaccuguccacgcagcagcucgagcagcgccgggcccugcugaaccucaucgggauggucggcggcgcgcaggggacccagccgggccgcgacgggguggugcgggucugggacgugaagaaccccgaccugcugaacaaccaguucggcaccaugcccagccucacccuggccugccugacgaagcagggccagguggaccucaacgacgccguccuggcccugaccgaccucgggcugaucuacaccgcgaaguaccccaacuccagcgaccuggaccgccucucccagagccacccgauccugaacaugguggacaccaagaaguccagccugaacaucagcggcuucaacuucucccucggggccgccgugaaggccggcgccugcaugcuggacgggggcaacaugcuggagacgaucaaggucacgccccagaccauggacggcauccucaagagcauccugaaggugaagaagucccuggggauguucgugagcgacacccccggcgagcggaaccccuacgagaacauccucuacaagaucugccuguccggggacggcuggccguacaucgcgagccgcaccuccaucgucgggcgggccugggagaacaccaccguggaccuggagagcgacggcaagccccacaaggugggcaccgccggguccaacaagagccuccaguccgccggcuuccccacggggcugaccuacagccagcugaugacccugaaggacuccaugaugcagcucgaccccagcgccaagaccuggaucgacaucgagggccgcccggaggaccccgucgagaucgcgcuguaccagcccauguccgggugcuacauccacuucuuccgggagcccacggaccugaagcaguucaagcaggacgccaaguacagccacggcaucgacguggccgaccucuucccggcccagcccggccugaccuccgccgucaucgaggcgcugccccgcaacauggugcugaccugccaggggagcgacgacaucaagcggcuccuggacagccagggccgccgcgacaucaagcucaucgacaucgcccuguccaaggccgacagccggcgcuucgagaacgccgugugggaccagugcaaggaccugugccacaugcacaccggggucgugguggagaagaagaagcggggcgggaaggaggagaucacgccccacugcgcccucauggacugcaucauguacgacgcggccgucuccggcggccugaacaucccggugcugcgcgccgugcucccccgggacauggucuuccgcaccagcucccccaagguggugcugugaggacuagucccuguucccagagcccacuuuuuuuucuuuuuuugaaauaaaauagccugucuuucagaucucaaaggcucuuuucagagccaccaaaaaaaaaaaaaaaaaaaaaaaaaaaaaaaaaaaaaaaaaaaaaaaaaaaaaaaaaaaaaaaaagaauu

SEQ ID NO: 16754 - RNA, 1951 nt, Artificial Sequence
  mRNA product Design a-1 (hSL-A64-N5) comprising derived and/or modified sequence from LASV(Lassa virus/H.sapiens-wt/NGA/2015/ISTH_0543;Clade II)__AVO03640__NP (opt1)
aggagagucccgcagucggcguccagcggcucugcuuguucgugugugugucguugcaggccuuauucaagcuuaccaugagcgccuccaaggaggugaaguccuuccuguggacccagagccuccgccgggagcugagcggcuacugcuccaacaucaagcugcaggucgugaaggacgcccaggcgcuccugcacgggcuggacuucagcgagguguccaacguccagcgccucaugcggaagcagaagcgcgacgacagcgaccugaagcggcugcgcgaccucaaccaggccgugaacaaccugguggagcugaaguccacccagcagaaguccauccuccgggucggcacgcugaccagcgacgaccugcucacccuggccgccgaccuggagaagcucaagagcaaggugauccgcaccgagcggccccuguccagcgggguguacaugggcaaccuguccacgcagcagcucgagcagcgccgggcccugcugaacaugaucgggauggucggcggcgcgcaggggacccagccgggccgcgacgggguggugcgggucugggacgugaagaaccccgaccuccugaacaaccaguucggcaccaugcccagccugacccucgccugccugacgaagcagggccagguggaccugaacgacgccguccucgcccugaccgaccuggggcucaucuacaccgcgaaguaccccaacuccagcgaccuggaccgccugucccagagccacccgauccucaacaugguggacaccaagaaguccagccugaacaucagcggcuacaacuucucccugggggccgccgugaaggccggcgccugcaugcucgacgggggcaacaugcuggagacgaucaaggucacgccccagaccauggacggcauccucaagagcauccugaaggugaagaagucccuggggauguucgugagcgacacccccggcgagcggaaccccuacgagaacauccuguacaagaucugccucuccggggacggcuggccguacaucgcgagccgcaccuccaucgucgggcgggccugggagaacaccaccguggaccuggagagcgacggcaagccccagaaggugggcuccgccgggagcaacaagucccugcagagcgccggcuuccccaccgggcucacguacucccagcugaugacccugaaggacagcaugaugcagcuggaccccuccgccaagaccuggaucgacaucgagggccgcccggaggaccccgucgagaucgcgcucuaccagcccaugagcgggugcuacauccacuucuuccgggagcccaccgaccugaagcaguucaagcaggacgccaaguacucccacggcaucgacguggccgaccuguucccggcccagcccggccucacgagcgccgucaucgaggcgcugccccgcaacauggugcugaccugccaggggagcgacgacaucaagcggcuccuggacucccagggccgcaaggacaucaagcugaucgacaucgcccucagcaaggccgacucccgccgguucgagaacgccgugugggaccagugcaaggaccugugccacaugcacaccggggucgugguggagaagaagaagcgcggcgggaaggaggagaucacgccccacugcgcccugauggacugcaucauguacgacgcggccgucagcggcggccucaacaucccggugcugcgggccgugcugccccgcgacauggucuuccggaccuccagccccaagguggugcucugaggacuagucccuguucccagagcccacuuuuuuuucuuuuuuugaaauaaaauagccugucuuucagaucucaaaggcucuuuucagagccaccaaaaaaaaaaaaaaaaaaaaaaaaaaaaaaaaaaaaaaaaaaaaaaaaaaaaaaaaaaaaaaaaagaauu

SEQ ID NO: 16755 - RNA, 1951 nt, Artificial Sequence
  mRNA product Design a-1 (hSL-A64-N5) comprising derived and/or modified sequence from LASV(Lassa virus/H.sapiens-wt/NGA/2016/ISTH_0009;Clade II)__AVO03572__NP (opt1)
aggagagucccgcagucggcguccagcggcucugcuuguucgugugugugucguugcaggccuuauucaagcuuaccaugagcgccuccaaggaggugaaguccuuccuguggacccagagccuccgccgggagcugagcggcuacugcuccaacaucaagcugcaggucgugaaggacgcccaggcgcuccugcacgggcuggacuucagcgagguguccaacguccagcgccucaugcggaagcagaagcgcgacgacagcgaccugaagcggcugcgcgaccucaaccaggccgugaacaaccugguggagcugaaguccacccagcagaaguccauccuccgggucggcacgcugaccagcgacgaccugcucacccuggccgccgaccuggagaagcucaagagcaaggugauccgcaccgagcggccccuguccagcgggguguacaugggcaaccuguccacgcagcagcucgagcagcgccgggcccugcugaacaugaucgggauggucggcggcgcgcaggggacccagccgggccgcgacgggguggugcgggucugggacgugaagaaccccgaccuccugaacaaccaguucggcaccaugcccagccugacccucgccugccugacgaagcagggccagguggaccugaacgacgccguccucgcccugaccgaccuggggcucaucuacaccgcgaaguaccccaacuccagcgaccuggaccgccugucccagagccacccgauccucaacaugguggacaccaagaaguccagccugaacaucagcggcuacaacuucucccugggggccgccgugaaggccggcgccugcaugcucgacgggggcaacaugcuggagacgaucaaggucacgccccagaccauggacggcauccucaagagcauccugaaggugaagaagucccuggggauguucgugagcgacacccccggcgagcggaaccccuacgagaacauccuguacaagaucugccucuccggggacggcuggccguacaucgcgagccgcaccuccaucgucgggcgggccugggagaacaccaccguggaccuggagagcgacggcaagccccagaaggugggcuccgccgggagcaacaagucccugcagagcgccggcuuccccaccgggcucacguacucccagcugaugacccugaaggacagcaugaugcagcuggaccccuccgccaagaccuggaucgacaucgagggccgcccggaggaccccgucgagaucgcgcucuaccagcccaugagcgggugcuacauccacuucuuccgggagcccaccgaccugaagcaguucaagcaggacgccaaguacucccacggcaucgacguggccgaccuguucccggcccagcccggccucacgagcgccgucaucgaggcgcugccccgcaacauggugcugaccugccaggggagcgacgacaucaagcggcuccuggacucccagggccgccgcgacaucaagcugaucgacaucgcccucagcaaggccgacucccggcgcuucgagaacgccgugugggaccagugcaaggaccugugccacaugcacaccggggucgugguggagaagaagaagcggggcgggaaggaggagaucacgccccacugcgcccugauggacugcaucauguacgacgcggccgucagcggcggccucaacaucccggugcugcgcgccgugcugccccgggacauggucuuccgcaccuccagccccaagguggugcucugaggacuagucccuguucccagagcccacuuuuuuuucuuuuuuugaaauaaaauagccugucuuucagaucucaaaggcucuuuucagagccaccaaaaaaaaaaaaaaaaaaaaaaaaaaaaaaaaaaaaaaaaaaaaaaaaaaaaaaaaaaaaaaaaagaauu

SEQ ID NO: 16756 - RNA, 1951 nt, Artificial Sequence
  mRNA product Design a-1 (hSL-A64-N5) comprising derived and/or modified sequence from LASV(Lassa virus/H.sapiens-wt/NGA/2016/ISTH_0017;Clade II)__AVO03568__NP (opt1)
aggagagucccgcagucggcguccagcggcucugcuuguucgugugugugucguugcaggccuuauucaagcuuaccaugagcgccuccaaggaggugaaguccuuccuguggacccagagccuccgccgggagcugagcggcuacugcuccagcaucaagcugcaggucgugaaggacgcccaggcgcuccugcacgggcuggacuucuccgaggugagcaacguccagcgccucaugcggaagcagaagcgcgacgacuccgaccugaagcggcugcgcgaccucaaccaggccgugaacaaccugguggagcucaagagcacccagcagaaguccauccugcgggucggcacgcugaccagcgacgaccugcucacccuggccgccgaccuggagaagcucaaguccaaggugauccgcaccgagcggccccugagcuccgggguguacaugggcaaccugagcacgcagcagcucgagcagcgccgggcccugcugaacaugaucgggauggcgggcggcgcccaggggacccagccgggccgcgacggggucgugcgggugugggacgucaagaaccccgaccuccugaacaaccaguucggcaccaugcccucccugacccucgccugccugacgaagcagggccagguggaccugaacgacgccgugcucgcgcugaccgaccuggggcucaucuacaccgccaaguaccccaacagcuccgaccuggaccgccugagccagagccacccgauccucaacauggucgacaccaagaaguccagccugaacaucuccggcuacaacuucagccugggggccgccgugaaggccggcgcgugcaugcucgacgggggcaacaugcuggagacgaucaaggugacgccccagaccauggacggcauccugaaguccauccucaaggucaagcggagccuggggauguucguguccgacgcccccggcgagcgcaaccccuacgagaacauccuguacaagaucugccucagcggggacggcuggccguacaucgccucccggaccagcaucguggggcgcgccugggagaacaccaccgucgaccuggaguccgacggcaagccccagaaggugggcgccaccgggagcaacaagucccugcagagcgcgggcuuccccaccgggcucacguacucccagcugaugacccugaaggacagcaugaugcagcuggaccccuccgccaagaccuggaucgacaucgagggccggccggaggaccccguggaggucgcccucuaccagcccgugagcgggugcuacauccacuucuuccgcgagcccaccgaccugaagcaguucaagcaggacgccaaguacucccacggcaucgacgucgccgaccuguucccggcgcagcccggccucacgagcgccgugaucgaggcccugccccggaacauggugcugaccugccaggggagcgacgacaucaagaagcuccuggacucccagggccgcaaggacaucaagcugaucgacaucgcccucagcaaggccgacucccgccgguucgagaacgcggucugggaccagugcaaggaccugugccacaugcacaccggggugguggucgagaagaagaagcgcggcgggaaggaggagaucacgccccacugcgcccugauggacugcaucauguacgacgccgccgugagcggcggccucaacaucccggugcugcgggcgguccugccccgcgacaugguguuccggaccuccagccccaaggugguccucugaggacuagucccuguucccagagcccacuuuuuuuucuuuuuuugaaauaaaauagccugucuuucagaucucaaaggcucuuuucagagccaccaaaaaaaaaaaaaaaaaaaaaaaaaaaaaaaaaaaaaaaaaaaaaaaaaaaaaaaaaaaaaaaaagaauu

SEQ ID NO: 16757 - RNA, 1951 nt, Artificial Sequence
  mRNA product Design a-1 (hSL-A64-N5) comprising derived and/or modified sequence from LASV(Lassa virus/H.sapiens-wt/NGA/2018/ISTH_0959;Clade II)__AVV65100__NP (opt1)
aggagagucccgcagucggcguccagcggcucugcuuguucgugugugugucguugcaggccuuauucaagcuuaccaugagcgccuccaaggaggugaaguccuuccuguggacccagagccuccgccgggagcugagcggcuacugcuccaacaucaagcugcaggucgugaaggacgcccaggcgcuccugcacgggcuggacuucagcgagguguccaacguccagcgccucaugcggaagcagaagcgcgacgacagcgaccugaagcggcugcgcgaccucaaccaggccgugaacaaccugguggagcugaaguccacccagcagaaguccauccuccgggucggcacccugaccagcgacgaccugcucacccuggccgccgaccuggagaagcucaagagcaaggugauccgcaccgagcggccccuguccagcgggguguacaugggcaaccuguccacgcagcagcucgagcagcgccgggcccugcugaaccucaucgggauggucggcggcgcgcaggggacccagccgggccgcgacgggguggugcgggucugggacgugaagaaccccgaccugcugaacaaccaguucggcaccaugcccagccucacccuggccugccugacgaagcagggccagguggaccucaacgacgucgugcuggcccugaccgaccucgggcugaucuacaccgccaaguaccccaacuccagcgaccuggaccgccucucccagagccacccgauccugaacaugguggacaccaagaaguccagccugaacaucagcggcuucaacuucucccucggggcggccgucaaggccggcgccugcaugcuggacgggggcaacaugcuggagacgaucaaggugacgccccagaccauggacggcauccucaagagcauccugaaggugaagaagucccuggggauguucgucagcgacacccccggcgagcggaaccccuacgagaacauccucuacaagaucugccuguccggggacggcuggccguacaucgccagccgcaccuccaucguggggcgggcgugggagaacaccaccguggaccuggagagcgacggcaagccccacaaggucggcaccgccggguccaacaagagccuccaguccgccggcuuccccacggggcugaccuacagccagcugaugacccugaaggacuccaugaugcagcucgaccccagcgccaagaccuggaucgacaucgagggccgcccggaggaccccguggagaucgcccuguaccagcccauguccgggugcuacauccacuucuuccgggagcccacggaccugaagcaguucaagcaggacgcgaaguacagccacggcaucgacgucgccgaccucuucccggcccagcccggccugaccuccgccgugaucgaggcccugccccgcaacauggugcugaccugccaggggagcgacgacaucaagcggcuccuggacagccagggccgcaaggacaucaagcucaucgacaucgcgcuguccaagaccgacagccgccgguucgagaacgccgucugggaccagugcaaggaccugugccacaugcacacgggggugguggucgagaagaagaagcgcggcgggaaggaggagaucacgccccacugcgcccucauggacugcaucauguacgacgccgccguguccggcggccugaacaucccggugcugcgggcgguccucccccgcgacaugguguuccggaccagcucccccaaggugguccugugaggacuagucccuguucccagagcccacuuuuuuuucuuuuuuugaaauaaaauagccugucuuucagaucucaaaggcucuuuucagagccaccaaaaaaaaaaaaaaaaaaaaaaaaaaaaaaaaaaaaaaaaaaaaaaaaaaaaaaaaaaaaaaaaagaauu

SEQ ID NO: 16758 - RNA, 1951 nt, Artificial Sequence
  mRNA product Design a-1 (hSL-A64-N5) comprising derived and/or modified sequence from LASV(LASV003-NIG-2008;Clade II)__AIT17581__NP (opt1)
aggagagucccgcagucggcguccagcggcucugcuuguucgugugugugucguugcaggccuuauucaagcuuaccaugagcgccuccaaggaggugaaguccuuccuguggacccagagccuccgccgggagcugagcggcuacugcuccagcaucaagcugcaggucgugaaggacgcccaggcgcuccugcacgggcuggacuucuccgaggugagcaacguccagcgccucaugcggaagcagaagcgcgacgacuccgaccugaagcggcugcgcgaccucaaccaggccgugaacaaccugguggagcucaagagcacccagcagaaguccguccugcgggugggcacccugaccagcgacgaccugcucacccuggccgccgaccuggagaagcucaaguccaaggugauccgcaccgagcggccccugagcuccggggucuacaugggcaaccugagcgcccagcagcucgagcagcgccggacgcugcugaacaugaucgggauggugggcggcgcgcaggggacccagccgggccgcgacggggugguccgggugugggacgugaagaaccccgaccuccugaacaaccaguucggcaccaugcccucccugacccucgccugccugacgaagcaggggcaggucgaccugaacgacguggugcucgcccugaccgaccugggccucaucuacaccgccaaguaccccaacagcuccgaccuggaccgccugagccagagccacccgauccucuccauggucgacaccaagaaguccagccugaacaucagcggcuacaacuucucccugggggcggccgugaaggccggcgccugcaugcucgacgggggcaacaugcuggagacgaucaaggugacgccccagaccauggacggcauccucaagagcauccugaaggucaagaagucccuggggauguucgugagcgacacccccggcgagcggaaccccuacgagaacauccuguacaagaucugccucuccggggacggcuggccguacaucgccagccgcaccuccaucguggggcgggcgugggagaacaccaccgucgaccuggagagcgacggcaagccccagaaggugggcaccgccggguccaacaagagccugcaguccgccggcuuccccacggggcucaccuacagccagcugaugacccugaaggacuccaugaugcagcuggaccccagcgccaagaccuggaucgacaucgagggccgcccggaggaccccgucgagaucgcccucuaccagcccauguccgggugcuacauccacuucuuccgggagcccacggaccugaagcaguucaagcaggacgcgaaguacagccacggcaucgacgugaccgaccuguucccggcccagcccggccucaccagcgccgugaucgaggcccugccccgcaacaugguccugaccugccagggguccgacgacaucaagcggcuccuggacagccagggccgccgcgacaucaagcugaucgacaucgcccucuccaaggcggacagccggcgcuucgagaacgccgugugggaccagugcaaggaccugugccacaugcacacggggguggucguggagaagaagaagcggggcgggaaggaggagaucacgccccacugcgcccugauggacugcaucauguacgacgccgccguguccggcggccucaacaucccgguccugcgcgcggugcugccccgggacaugguguuccgcaccagcucccccaaggucgugcucugaggacuagucccuguucccagagcccacuuuuuuuucuuuuuuugaaauaaaauagccugucuuucagaucucaaaggcucuuuucagagccaccaaaaaaaaaaaaaaaaaaaaaaaaaaaaaaaaaaaaaaaaaaaaaaaaaaaaaaaaaaaaaaaaagaauu

SEQ ID NO: 16759 - RNA, 1951 nt, Artificial Sequence
  mRNA product Design a-1 (hSL-A64-N5) comprising derived and/or modified sequence from LASV(LASV035-NIG-2009;Clade II)__AIT17589__NP (opt1)
aggagagucccgcagucggcguccagcggcucugcuuguucgugugugugucguugcaggccuuauucaagcuuaccaugagcgccuccaaggaggugaaguccuuccuguggacccagagccuccgccgggagcugagcggcuacugcuccagcaucaagcugcaggucgugaaggacgcccaggcgcuccugcacgggcuggacuucuccgaggugagcaacguccagcgccucaugcggaagcagaagcgcgacgacuccgaccugaagcggcugcgcgaccucaaccaggccgugaacaaccugguggagcucaagagcacccagcagaaguccauccugcgggucggcacgcugaccagcgacgaccugcucacccuggccgccgaccuggagaagcucaaguccaaggugauccgcaccgagcggccccugagcuccgggguguacaugggcaaccugagcgcccagcagcucgagcagcgccgggcgcugcugaacaugaucgggauggucggcggcgcccaggggacgcagccgggccgcgacgggguggugcgggucugggacgugaagaaccccgaccuccugaacaaccaguucggcaccaugcccucccugacccucgccugccugaccaagcagggccagguggaccugaacgacgccguccucgcgcugacggaccuggggcucaucuacaccgccaaguaccccaacagcuccgaccuggaccgccugagccagagccacccgauccucaacaugguggacaccaagaaguccagccugaacaucuccggcuacaacuucagccugggggccgccgugaaggccggcgcgugcaugcucgacgggggcaacaugcuggagaccaucaaggucacgccccagaccauggacggcauccugaaguccauccucaaggugaagcggagccuggggauguucguguccgacacccccggcgagcgcaaccccuacgagaacauccuguacaagaucugccucagcggggacggcuggccguacaucgccucccggaccagcaucgucgggcgcgccugggagaacacgaccguggaccuggaguccgacggcaagccccagaaggugggcaccaccgggagcaacaagucccugcagagcgccggcuuccccacggggcucaccuacucccagcugaugacccugaaggacagcaugaugcagcuggaccccuccgccaagaccuggaucgacaucgagggccggccggaggaccccgucgagaucgcgcucuaccagcccaugagcgggugcuacauccacuucuuccgcgagcccacggaccugaagcaguucaagcaggacgccaaguacucccacggcaucgacguggccgaccuguucccggcccagcccggccucaccagcgccgucaucgaggcgcugccccggaacauggugcugaccugccaggggagcgacgacaucaagaagcuccuggacucccagggccgccgcgacaucaagcugaucgacaucgcccucagcaaggccgacucccggaaguucgagaacgccgugugggaccagugcaaggaccugugccacaugcacaccggggucgugguggagaagaagaagcgcggcgggaaggaggagaucacgccccacugcgcccugauggacugcaucauguacgacgcggccgucagcggcggccucaacaucccggugcugcgggccgugcugccccgcgacauggucuuccggaccuccagccccaagguggugcucugaggacuagucccuguucccagagcccacuuuuuuuucuuuuuuugaaauaaaauagccugucuuucagaucucaaaggcucuuuucagagccaccaaaaaaaaaaaaaaaaaaaaaaaaaaaaaaaaaaaaaaaaaaaaaaaaaaaaaaaaaaaaaaaaagaauu

SEQ ID NO: 16760 - RNA, 1951 nt, Artificial Sequence
  mRNA product Design a-1 (hSL-A64-N5) comprising derived and/or modified sequence from LASV(LASV1000-NIG-2009;Clade II)__AIT17783__NP (opt1)
aggagagucccgcagucggcguccagcggcucugcuuguucgugugugugucguugcaggccuuauucaagcuuaccaugagcgccuccaaggaggugaaguccuuccuguggacccagagccuccgccgggagcugagcggcuacugcuccaacaucaagcugcaggucgugaaggacgcccaggcgcuccugcacgggcuggacuucagcgagguguccaacguccagcgccucaugcggaagcagaagcgcgacgacagcgaccugaagcggcugcgcgaccucaaccaggccgugaacaaccugguggagcugaaguccacccagcagaaguccauccuccgggucggcacgcugaccagcgacgaccugcucacccuggccgccgaccuggagaagcucaagagcaaggugauccgcaccgagcggccccuguccagcgggguguacaugggcaaccuguccacgcagcagcucgagcagcgccgggcccugcugaacaugaucgggauggucggcggcgcgcaggggacccagccgggccgcgacgggguggugcgggucugggacgugaagaaccccgaccuccugaacaaccaguucggcaccaugcccagccugacccucgccugccugacgaagcagggccagguggaccugaacgacgucgugcucgcccugaccgaccuggggcucaucuacaccgccaaguaccccaacuccagcgaccuggaccgccugucccagagccacccgauccucaacaugguggacaccaagaaguccagccugaacaucagcggcuacaacuucucccugggggcggccgucaaggccggcgccugcaugcucgacgggggcaacaugcuggagacgaucaaggugacgccccagaccauggacggcauccucaagagcauccugaaggugaagaagucccuggggauguucgucagcgacacccccggcgagcggaaccccuacgagaacauccuguacaagaucugccucuccggggacggcuggccguacaucgccagccgcaccuccaucguggggcgggcgugggagaacaccaccguggaccuggagagcgacggcaagccccagaaggucggcaccgccggguccaacaagagccugcaguccgccggcuuccccacggggcucaccuacagccagcugaugacccugaaggacuccaugaugcagcuggaccccagcgccaagaccuggaucgacaucgagggccgcccggaggaccccguggagaucgcccucuaccagcccgucuccgggugcuacauccacuucuuccgggagcccacggaccugaagcaguucaagcaggacgcgaaguacagccacggcaucgacguggccgaccuguucccggcccagcccggccucaccuccgccgugaucgaggcccugccccgcaacaugguccugaccugccaggggagcgacgacaucaagcggcuccuggacagccagggccgccgcgacaucaagcugaucgacaucgcgcucuccaaggccgacagccggcgcuucgagaacgccgugugggaccagugcaaggaccugugccacaugcacaccgggguggucguggagaagaagaagcggggcgggaaggaggagaucacgccccacugcgcccugauggacugcaucauguacgacgccgcgguguccggcggccucaacaucccgguccugcgcgccgugcugccccgggacaugguguuccgcaccagcucccccaaggucgugcucugaggacuagucccuguucccagagcccacuuuuuuuucuuuuuuugaaauaaaauagccugucuuucagaucucaaaggcucuuuucagagccaccaaaaaaaaaaaaaaaaaaaaaaaaaaaaaaaaaaaaaaaaaaaaaaaaaaaaaaaaaaaaaaaaagaauu

SEQ ID NO: 16761 - RNA, 1951 nt, Artificial Sequence
  mRNA product Design a-1 (hSL-A64-N5) comprising derived and/or modified sequence from LASV(LASV221-NIG-2010;Clade II)__AIT17625__NP (opt1)
aggagagucccgcagucggcguccagcggcucugcuuguucgugugugugucguugcaggccuuauucaagcuuaccaugagcgccuccaaggaggugaaguccuuccuguggacccagagccuccgccgggagcugagcggcuacugcuccagcaucaagcugcaggucgugaaggacgcccaggcgcuccugcacgggcuggacuucuccgaggugagcaacguccagcgccucaugcggaagcagcgccgggacgacuccgaccugaagcgccugcgggaccucaaccaggccgugaacaaccugguggagcucaagagcacccagcagaaguccauccugcgcgucggcacgcugaccagcgacgaccugcucacccuggccgccgaccuggagaagcucaaguccaaggugauccggaccgagcgcccccugagcuccgggguguacaugggcaaccugagcacgcagcagcucgagcagcggcgcgcccugcugaacaugaucgggauggucggcggcgcgcaggggacccagccgggccgggacgggguggugcgcgucugggacgugaagaaccccgaccuccugaacaaccaguucggcaccaugcccucccugacccucgccugccugacgaagcagggccagguggaccugaacgacgccguccucgcccugaccgaccuggggcucaucuacaccgcgaaguaccccaacagcuccgaccuggaccggcugagccagagccacccgauccucaacaugguggacaccaagaaguccagccugaacaucuccggcuacaacuucagccugggggccgccgugaaggccggcgccugcaugcucgacgggggcaacaugcuggagacgaucaaggucacgccccagaccguggacggcauccugaaguccauccucaaggugaagcgcagccuggggauguucgucuccgacacccccggcgagcggaaccccuacgagaacauccuguacaagaucugccucagcggggacggcuggccguacaucgcgucccgcaccagcaucguggggcgggccugggagaacaccaccguggaccuggaguccgacggcaagccccagaaggucggcaccgccgggagcaacaagucccugcagagcgccggcuuccccacggggcucaccuacucccagcugaugacccugaaggacagcaugaugcagcuggaccccuccgccaagaccuggaucgacaucgagggccgcccggaggaccccguggagaucgcgcucuaccagcccaugagcgggugcuacauccacuucuuccgggagcccacggaccugaagcaguucaagcaggacgccaaguacucccacggcaucgacgucgccgaccuguucccggcccagcccggccucaccagcgccgugaucgaggcgcugccccgcaacauggugcugaccugccaggggagcgacgacaucaagcgccuccuggacucccagggccggcgcgacaucaagcugaucgacaucgcccucagcaaggccgacucccggaaguucgagaacgccgucugggaccagugcaaggaccugugccacaugcacaccggggugguggucgagaagaagaagcgcggcgggaaggaggagaucacgccccacugcgcccugauggacugcaucauguacgacgcggccgugagcggcggccucaacaucccggugcugcgggccguccugccccgcgacaugguguuccggaccuccagccccaaggugguccucugaggacuagucccuguucccagagcccacuuuuuuuucuuuuuuugaaauaaaauagccugucuuucagaucucaaaggcucuuuucagagccaccaaaaaaaaaaaaaaaaaaaaaaaaaaaaaaaaaaaaaaaaaaaaaaaaaaaaaaaaaaaaaaaaagaauu

SEQ ID NO: 16762 - RNA, 1951 nt, Artificial Sequence
  mRNA product Design a-1 (hSL-A64-N5) comprising derived and/or modified sequence from LASV(LASV237-NIG-2010;Clade II)__AIT17639__NP (opt1)
aggagagucccgcagucggcguccagcggcucugcuuguucgugugugugucguugcaggccuuauucaagcuuaccaugagcgccuccaaggaggugaaguccuuccuguggacccagagccuccgccgggagcugagcggcuacugcuccaacaucaagcugcaggucgugaaggacgcccaggcgcuccugcacgggcuggacuucagcgagguguccaacguccagcgccucaugcggaagcagaagcgcgacgacagcgaccugaagcggcugcgcgaccucaaccaggccgugaacaaccugguggagcugaaguccacccagcagaaguccauccuccgggucggcacccugaccagcgacgaccugcucacccuggccgccgaccuggagaagcucaagagcaaggugauccgcaccgagcggccccuguccagcgggguguacaugggcaaccuguccacgcagcagcucgagcagcgccgggcccugcugaacaugaucgggauggucggcggcgcgcaggggacccagccgggccgcgacgggguggugcgggucugggacgugaagaaccccgaccuccugaacaaccaguucggcaccaugcccagccugacccucgccugccugacgaagcagggccagguggaccugaacgacgccguccucgcccugaccgaccuggggcucaucuacaccgcgaaguaccccaacuccagcgaccuggaccgccugucccagagccacccgauccucaacaugguggacaucaagaaguccagccugaacaucagcggcuacaacuucucccugggggccgccgugaaggccggcgccugcaugcucgacgggggcaacaugcuggagaccaucaaggucacgccccagaccauggacggcauccucaagagcauccugaaggugaagcggucccuggggauguucgugagcgacacccccggcgagcgcaaccccuacgagaacauccuguacaagaucugccucuccggggacggcuggccguacaucgcgagccggaccuccaucgucgggcgcgccugggagaacacgaccguggaccuggagagcgacggcaagccccagaaggugggcuccgccgggagcaacaagucccugcagagcgccggcuuccccaccgggcucaccuacucccagcugaugacgcugaaggacagcaugaugcagcuggaccccuccgccaagaccuggaucgacaucgagggccggccggaggaccccgucgagaucgcgcucuaccagcccaugagcgggugcuacauccacuucuuccgcgagcccaccgaccugaagcaguucaagcaggacgccaaguacucccacggcaucgacguggccgaccuguucccggcccagcccggccucaccagcgccgucaucgaggcgcugccccggaacauggugcugacgugccaggggagcgacgacaucaagcgccuccuggacucccagggccgccgggacaucaagcugaucgacaucgcccucagcaaggccgacucccgccgguucgagaacgccgugugggaccagugcaaggaccugugccacaugcacaccggggucgugguggagaagaagaagcgcggcgggaaggaggagaucacgccccacugcgcccugauggacugcaucauguacgacgcggccgucagcggcggccucaacaucccggugcugcgggccgugcugccccgcgacauggucuuccggaccuccagccccaagguggugcucugaggacuagucccuguucccagagcccacuuuuuuuucuuuuuuugaaauaaaauagccugucuuucagaucucaaaggcucuuuucagagccaccaaaaaaaaaaaaaaaaaaaaaaaaaaaaaaaaaaaaaaaaaaaaaaaaaaaaaaaaaaaaaaaaagaauu

SEQ ID NO: 16763 - RNA, 1951 nt, Artificial Sequence
  mRNA product Design a-1 (hSL-A64-N5) comprising derived and/or modified sequence from LASV(LASV253-NIG-2011;Clade II)__AIT17671__NP (opt1)
aggagagucccgcagucggcguccagcggcucugcuuguucgugugugugucguugcaggccuuauucaagcuuaccaugagcgccuccaaggaggugaaguccuuccuguggacccagagccuccgccgggagcugagcggcuacugcuccagcaucaagcugcaggucgugaaggacgcccaggcgcuccugcacgggcuggacuucuccgaggugagcaacguccagcgccucaugcggaagcagaagcgcgacgacuccgaccugaagcggcugcgcgaccucaaccaggccgugaacaaccugguggagcucaagagcacccagcagaaguccguccugcgggugggcacccugaccagcgacgaccugcucacccuggccgccgaccuggagaagcucaaguccaaggugauccgcaccgagcggccccugagcuccggggucuacaugggcaaccugagcacgcagcagcucgagcagcgccgggcccugcugaacaugaucgggauggugggcggcgcgcaggggacccagccgggccgcgacggggugguccgggugugggacgugaagaaccccgaccuccugaacaaccaguucggcaccaugcccucccugacccucgccugccugacgaagcaggggcaggucgaccugaacgacguggugcucgcccugaccgaccugggccucaucuacaccgccaaguaccccaacagcuccgaccuggaccgccugagccagagccacccgauccucaacauggucgacaccaagaaguccagccugaacaucuccggcuacaacuucagccugggggcggccgugaaggccggcgccugcaugcucgacgggggcaacaugcuggagacgaucaaggugacgccccagaccauggacggcauccugaaguccauccucaaggucaagaagucccuggggauguucgugagcgacacccccggcgagcggaaccccuacgagaacauccuguacaagaucugccucagcggggacggcuggccguacaucgccucccgcaccagcaucguggggcgggcgugggagaacaccaccgucgaccuggaguccgacggcaagccccagaaggugggcaccgccgggagcaacaagucccugcagagcgccggcuuccccacggggcucaccuacucccagcugaugacccugaaggacagcaugaugcagcuggaccccuccgccaagaccuggaucgacaucgagggccgcccggaggaccccgucgagaucgcccucuaccagcccaugagcgggugcuacauccacuucuuccgggagcccacggaccugaagcaguucaagcaggacgcgaaguacucccacggcaucgacgugaccgaccuguucccggcccagcccggccucaccagcgccgugaucgaggcccugccccgcaacaugguccugaccugccaggggagcgacgacaucaagcggcuccuggacucccagggccgccgcgacaucaagcugaucgacaucgcccucagcaaggcggacucccggcgcuucgagaacgccgugugggaccagugcaaggaccugugccacaugcacacggggguggucguggagaagaagaagcggggcgggaaggaggagaucacgccccacugcgcccugauggacugcaucauguacgacgccgccgugagcggcggccucaacaucccgguccugcgcgcggugcugccccgggacaugguguuccgcaccuccagccccaaggucgugcucugaggacuagucccuguucccagagcccacuuuuuuuucuuuuuuugaaauaaaauagccugucuuucagaucucaaaggcucuuuucagagccaccaaaaaaaaaaaaaaaaaaaaaaaaaaaaaaaaaaaaaaaaaaaaaaaaaaaaaaaaaaaaaaaaagaauu

SEQ ID NO: 16764 - RNA, 1951 nt, Artificial Sequence
  mRNA product Design a-1 (hSL-A64-N5) comprising derived and/or modified sequence from LASV(LASV254-NIG-2011;Clade II)__AIT17675__NP (opt1)
aggagagucccgcagucggcguccagcggcucugcuuguucgugugugugucguugcaggccuuauucaagcuuaccaugagcgccuccaaggaggugaaguccuuccuguggacccagagccuccgccgggagcugagcggcuacugcuccagcaucaagcugcaggucgugaaggacgcccaggcgcuccugcacgggcuggacuucuccgaggugagcaacguccagcgccucaugcggaagcagaagcgcgacgacuccgaccugaagcggcugcgcgaccucaaccaggccgugaacaaccugguggagcucaagagcacccagcagaaguccguccugcgggugggcacgcugaccagcgacgaccugcucacccuggccgccgaccuggagaagcucaaguccaaggugauccgcaccgagcggccccugagcuccggggucuacaugggcaaccugagcacgcagcagcucgagcagcgccgggcccugcugaacaugaucgggauggugggcggcgcgcaggggacccagccgggccgcgacggggugguccgggugugggacgugaagaaccccgaccuccugaacaaccaguucggcaccaugcccucccugacccucgccugccugacgaagcaggggcaggucgaccugaacgacgccgugcucgcccugaccgaccugggccucaucuacaccgcgaaguaccccaacagcuccgaccuggaccgccugagccagagccacccgauccucaacaugguggacaccaagaaguccagccugaacaucuccggcuacaacuucagccugggggccgccgucaaggccggcgccugcaugcucgacgggggcaacaugcuggagacgaucaaggugacgccccagaccauggacggcauccugaaguccauccucaaggugaagaagucccuggggauguucgucagcgacacccccggcgagcggaaccccuacgagaacauccuguacaagaucugccucagcggggacggcuggccguacaucgcgucccgcaccagcaucguggggcgggccugggagaacaccaucguggaccuggaguccgacggcaagccccagaaggucggcaccgccgggagcaacaagucccugcagagcgccggcuuccccaccgggcucacguacucccagcugaugacccugaaggacagcaugaugcagcuggaccccuccgccaagaccuggaucgacaucgagggccgcccggaggaccccguggagaucgcgcucuaccagcccaugagcgggugcuacauccacuucuuccgggagcccaccgaccugaagcaguucaagcaggacgccaaguacucccacggcaucgacgucgccgaccuguucccggcccagcccggccucacgagcgccgugaucgaggcgcugccccgcaacauggugcugaccugccaggggagcgacgacaucaagcggcuccuggacucccagggccgccgcgacaucaagcugaucgacaucgcccucagcaaggccgacucccggcgcuucgagaacgccgucugggaccagugcaaggaccugugccacaugcacaccggggugguggucgagaagaagaagcggggcgggaaggaggagaucacgccccacugcgcccugauggacugcaucauguacgacgcggccgugagcggcggccucaacaucccggugcugcgcgccguccugccccgggacaugguguuccgcaccuccagccccaaggugguccucugaggacuagucccuguucccagagcccacuuuuuuuucuuuuuuugaaauaaaauagccugucuuucagaucucaaaggcucuuuucagagccaccaaaaaaaaaaaaaaaaaaaaaaaaaaaaaaaaaaaaaaaaaaaaaaaaaaaaaaaaaaaaaaaaagaauu

SEQ ID NO: 16765 - RNA, 1951 nt, Artificial Sequence
  mRNA product Design a-1 (hSL-A64-N5) comprising derived and/or modified sequence from LASV(Nig08-04;Clade II)__ADU56611__NP (opt1)
aggagagucccgcagucggcguccagcggcucugcuuguucgugugugugucguugcaggccuuauucaagcuuaccaugagcgccuccaaggaggugaaguccuuccuguggacccagagccuccgccgggagcugagcggcuacugcuccaacaucaagcugcaggucgugaaggacgcccaggcgcuccugcacgggcuggacuucagcgagguguccaacguccagcgccucaugcggaagcagaagcgcgacgacggcgaccugaagcggcugcgcgaccucaaccaggccgugaacaaccugguggagcucaagagcacccagcagaaguccguccugcggguggggacccugaccagcgacgaccugcucacccuggccgccgaccuggagaagcucaaguccaaggugauccgcaccgagcggccccugagcuccggcgucuacauggggaaccugagcacgcagcagcucgagcagcgcaaggcccugcuguccaugaucggcauggugggcggggcgcagggcacccagccggggcgggacggcgugguccgcgugugggacgugaagaaccccgaccuccugaacaaccaguucgggaccaugcccagccugacccucgccugccugacgaagcagggccaggucgaccugaacgacgccgugcucgcccugaccgaccugggccucaucuacaccgcgaaguaccccaacuccagcgaccuggaccggcugucccagagccacccgauccucaacaugguggacaccaagaaguccagccugaacaucagcggguacaacuucucccugggcgccgccgucaaggccggggccugcaugcucgacggcggcaacaugcuggagacgaucaaggugacgccccagaccauggacgggauccucaagagcauccugaaggugaagcgcucccugggcauguucgucagcgacacccccggggagcggaaccccuacgagaacauccuguacaagaucugccucuccggcgacggguggccguacaucgcgagccgcaccuccaucgugggccgggccugggagaacaccaccguggaccuggagagcgacggcaagccccagaaggucgggaccgccggcuccaacaagagccugcaguccgccggguuccccacgggccucaccuacagccagcugaugacccugaaggacuccaugaugcagcuggaccccagcgccaagaccuggaucgacaucgaggggcgcccggaggaccccguggagaucgcgcucuaccagcccauguccggcugcuacauccacuucuuccgggagcccacggaccugaagcaguucaagcaggacgccaaguacagccacggcaucgacgucaccgaccuguucuccgcccagccggggcucaccagcgccgugaucgaggcccugccccgcaacauggugcugaccugccagggcagcgacgacaucaagaagcuccuggacucccaggggcggcgcgacaucaagcugaucgacaucagccucaacaaggcggacucccgccgguucgagaacgccgucugggaccagugcaaggaccugugccacaugcacacgggcgugguggucgagaagaagaagcgcgggggcaaggaggagaucacgccccacugcgcccugauggacugcaucauguucgacgccgccgugagcggcgggcucaacauccccauccugcgggcggugcugccgcgcgacauggucuuccggaccuccagccccaagguggugcucugaggacuagucccuguucccagagcccacuuuuuuuucuuuuuuugaaauaaaauagccugucuuucagaucucaaaggcucuuuucagagccaccaaaaaaaaaaaaaaaaaaaaaaaaaaaaaaaaaaaaaaaaaaaaaaaaaaaaaaaaaaaaaaaaagaauu

SEQ ID NO: 16766 - RNA, 1954 nt, Artificial Sequence
  mRNA product Design a-1 (hSL-A64-N5) comprising derived and/or modified sequence from LASV(GA391;Clade III)__AAA46284__NP (opt1)
aggagagucccgcagucggcguccagcggcucugcuuguucgugugugugucguugcaggccuuauucaagcuuaccaugagcgccuccaaggaggugcgcagcugccuguggacccagucccuccggcgcgagcugagcggcuacugcuccaacaucaagcugcaggucgugaaggacgcccaggcgcuccugcacgggcuggacuucagcgagguguccaacguccagcggcucaugcgcaagcagaagcgggacgacggcgaccugaagcgccugcgggaccucaaccaggccgugaacaaccugguggagcugaaguccacccagcagaaguccguccuccgcguggggacgcugagcuccgacgaccugcucauccuggccgccgaccuggagaagcucaagagcaaggugacccggaccgagcgcccccuguccagcggcgucuacauggggaaccuguccagccagcagcucgaccagcggcgcgcccugcugaacaugaucggcaugaccggcguguccgggggcgggaagggcgcgagcaacgggaucgugcgggucugggacgugaagaacgccgagcuccugaacaaccaguucggcacgaugccgucccugacccucgccugccugaccaagcagggccagguggaccugaacgacgccguccaggcgcucaccgaccuggggcugaucuacacggccaaguaccccaacagcagcgaccucgaccgccugucccagagccaccccauccugaacaugaucgacaccaagaaguccagccucaacaucuccggcuacaacuucagccugggggccgccgugaaggccggcgcgugcaugcuggacggcgggaacaugcucgagaccaucaaggugagcccccagaccauggacggcauccucaagagcauccugaaggucaagaagucccuggggauguucgugagcgacacgccgggcgagcggaaccccuacgagaacauccuguacaagaucugccuguccggggacggcuggagcuacaucgccucccgcaccagcaucgugggccgggccugggagaacaccgucguggaccucgagcaggacaacaagccccagaagaucgggaacggcggguccaacaagagccugcaguccgccggcuucgccgcggggcugaucuacagccagcucaugacccugaaggacuucaagugcuucaaccugauccccaacgccaagacguggauggacaucgagggccgcccggaggaccccguggagaucgcccuguaccagcccuccagcggcugcuacguccacuucuuccgggagcccaccgaccucaagcaguucaagcaggacgccaaguacagccacgggcgcgacgugaccgaccuguucgccgcgcagccgggccugaccuccgccgucaucgaggcccucccccggaacauggugaucacgugccaggggagcgaggacauccgcaagcugcuggagucccagggccgccgggacaucaagcucaucgacaucacccugagcaaggccgacucccgcaaguucgagaacgccgugugggaccaguucaaggaccugugccacaugcacaccggggucgugguggagaagaagaagcggggcggcaaggaggagaucacgccccacugcgcgcucauggacugcaucauguucgacgccgccgucagcgggggccuggacgccaaggugcugcgcgugguccucccccgggacaugguguuccgcaccuccaccccgaaggugguccugugaggacuagucccuguucccagagcccacuuuuuuuucuuuuuuugaaauaaaauagccugucuuucagaucucaaaggcucuuuucagagccaccaaaaaaaaaaaaaaaaaaaaaaaaaaaaaaaaaaaaaaaaaaaaaaaaaaaaaaaaaaaaaaaaagaauu

SEQ ID NO: 16767 - RNA, 1951 nt, Artificial Sequence
  mRNA product Design a-1 (hSL-A64-N5) comprising derived and/or modified sequence from LASV(Nig08-A19;Clade III)__ADU56619__NP (opt1)
aggagagucccgcagucggcguccagcggcucugcuuguucgugugugugucguugcaggccuuauucaagcuuaccaugagcgccuccaaggaggugaaguccuuccuguggacccagucccuccgccgggagcugagcggcuacugcuccaacaucaagcugcaggucgugaaggacgcccaggcgcuccugcacgggcuggacuucagcgagguguccaacguccagcgccucaugcggaagcagaagcgcgacgacggcgaccugaagcggcugcgcgaccucaaccaggccgugaacaaccugguggagcucaagagcacccagcagaaguccguccugcggguggggacccugagcuccgacgaccugcucgugcuggccgccgaccuggagaagcucaagagcaaggucgugcgcaccgagcggccccuguccagcggcaucuacauggggaaccuguccagccagcagcucgaccagcgcaaggcccugcugaacaugaucggcaugaccggcgggaacggcgggcggaacaccacguccgacggcaucgugcgcgucugggacgugaagaacgcggagcuccugaacaaccaguucgggaccaugccgagccugacccucgccugccugaccaagcagggccagguggaccugaacgacgccguccaggcccucacggaccugggccugaucuacaccgcgaaguaccccaacuccagcgaccucgaccggcuggcccagagccaccccauccugaacaugaucgacaccaagaaguccagccucaacaucuccggguacaacuucagccugggcgccgccgugaaggccggggcgugcaugcuggacggcggcaacaugcucgagaccaucaaggugagcccccagacgauggacgggauccucaagagcauccugaaggucaagcgcucccugggcauguucaucagcgacaccccgggggagcggaaccccuacgagaacauccuguacaagaucugccuguccggcgacggguggcccuacaucgccagccgcaccuccaucgugggccgggccugggagaacaccguggucgaccucgagagcgacaacaagccccagaagacgggcaacgggggcuccaacaagagccugcaguccgccggguucgccgcgggccugaccuacagccagcucaugacccugaaggacuccaugcugcagcuggacccgaacgccaagaccuggauggacaucgaggggcgccccgaggaccccguggagaucgcccucuaccagcccagcuccggcugcuacauccacuucuuccgggagccgacggaccugaagcaguucaagcaggacgccaaguacagccacggcaucgacgugaccgaccuguucgccgcgcagcccgggcucaccagcgccgucaucgaggcccugccccgcaacauggugaucacgugccagggcuccgaggacauccggaagcugcucgagagccaggggcgccgcgacaucaagcugaucgacaucucccugagcaaggucgacucccggaaguucgagaacgccgugugggaccaguucaaggaccucugccacaugcacaccggcaucguggucgagaagaagaagcgcgggggcaaggaggagaucacgccccacugcgcccugauggacugcaucauguucgacgcggccgugagcggcgggguggacgccaagguccugcgggccgugcucccgcgcgacaugguguuccggaccuccacccccaaggucgugcugugaggacuagucccuguucccagagcccacuuuuuuuucuuuuuuugaaauaaaauagccugucuuucagaucucaaaggcucuuuucagagccaccaaaaaaaaaaaaaaaaaaaaaaaaaaaaaaaaaaaaaaaaaaaaaaaaaaaaaaaaaaaaaaaaagaauu

SEQ ID NO: 16768 - RNA, 1951 nt, Artificial Sequence
  mRNA product Design a-1 (hSL-A64-N5) comprising derived and/or modified sequence from LASV(G1180-SLE-2010;Clade IV)__AIT17169__NP (opt1)
aggagagucccgcagucggcguccagcggcucugcuuguucgugugugugucguugcaggccuuauucaagcuuaccaugagcgccuccaaggagaucaagagcuuccuguggacccagucccuccgccgggagcugagcggcuacugcuccaacaucaagcuccagguggucaaggacgcccaggcgcugcugcacgggcuggacuucagcgagguguccaacgugcagcgccucaugcggaaggagcgccgggacgacaacgaccugaagcgccugcgggaccucaaccaggccgucaacaaccugguggagcucaagagcacccagcagaaguccauccugcgcgugggcacccugaccagcgacgaccugcucauccuggccgccgaccuggagaagcucaaguccaaggucauccggaccgagcgcccccugagcgccgggguguacaugggcaaccuguccagccagcagcucgaccagcggcgcgcgcugcuguccaugaucgggaugagcuccggcaaccagcgggcccaggccggccgcgacggggugguccgggugugggacgugaagaacgucgagcuccugaacaaccaguucggcaccaugccgagccugacgcucgccugccugaccaagcagggccagguggaccugaacgacgcggugcaggcccucaccgaccuggggcugaucuacaccgccaaguaccccaacacguccgaccucgaccgccugacccagagccaccccauccugaacaugaucgacaccaagaaguccagccucaacaucagcggguacaacuucucccugggcgccgccgucaaggcgggcgccugcaugcuggacgggggcaacaugcucgagaccaucaaggugagcccccagacgauggacgggauccugaaguccauccugaaggugaagaaggcccucggcauguucaucagcgacaccccgggcgagcggaaccccuacgagaacauccuguacaagaucugccuguccggggacggcuggcccuacaucgccagccgcaccuccaucaccgggcgggccugggagaacacggucguggaccucgagagcgacggcaagccccagaaggcgggguccaacaacagcaacaagucccugcagagcgugggcuucaccgccggccugaccuacucccagcucaugacccugaaggacgccaugcugcagcuggacccgaacgccaagacguggauggacaucgaggggcgccccgaggaccccgucgagaucgcccucuaccagcccagcuccggcugcuacauccacuucuuccgggagccgaccgaccugaagcaguucaagcaggacgcgaaguacagccacgggaucgacgugaccgaccuguucgccgcccagcccggccucaccuccgccgugaucgacgcccugccccgcaacauggucaucacgugccaggggagcgacgacauccgcaagcugcucgagagccagggccggaaggacaucaagcugaucgacaucgcgcuguccaagaccgacagccgcaaguacgagaacgccgugugggaccaguacaaggaccucugccacaugcacaccggcgucgugguggagaagaagaagcgcgggggcaaggaggagaucacgccccacugcgcccugauggacugcaucauguucgacgccgcggucuccgggggccugaacaccagcgugcuccgggccgugcugccgcgggacauggucuuccgcaccuccacgccccggguggugcugugaggacuagucccuguucccagagcccacuuuuuuuucuuuuuuugaaauaaaauagccugucuuucagaucucaaaggcucuuuucagagccaccaaaaaaaaaaaaaaaaaaaaaaaaaaaaaaaaaaaaaaaaaaaaaaaaaaaaaaaaaaaaaaaaagaauu

SEQ ID NO: 16769 - RNA, 1951 nt, Artificial Sequence
  mRNA product Design a-1 (hSL-A64-N5) comprising derived and/or modified sequence from LASV(G1442-SLE-2011;Clade IV)__AIT17181__NP (opt1)
aggagagucccgcagucggcguccagcggcucugcuuguucgugugugugucguugcaggccuuauucaagcuuaccaugagcgccuccaaggaggugaaguccuuccuguggacccagagccuccgccgggagcugagcggcuacugcuccaacaucaagcugcaggucgugaaggacgcccaggcgcuccugcacgggcuggacuucagcgagguguccaacguccagcgccucaugcggaagcagcgccgggacgacaacgaccugaagcgccugcgggaccucaaccaggccgugaacaaccugguggagcucaagagcacccagcagaaguccguccugcgcgugggcacccugaccagcgacgaccugcucgugcuggccgccgaccuggagaagcucaaguccaaggucauccggaccgagcgcccccugagcgccgggguguacaugggcaaccuguccagccagcagcucgaccagcggcgcgcgcugcugaacaugaucgggauguccggcggcauccaggggacccggacgggccgcgacggggugguccgggugugggacgugaagaacgccgaccuccugaacaaccaguucggcaccaugccgagccugacccucgccugccugaccaagcaggggcaggucgaccugaacgacguggugcaggcccucacggaccugggccugaucuacaccgcgaaguaccccaacgccuccgaccucgaccgccugacccagagccaccccauccugaacaugaucgacaccaagaaguccagccucaacaucagcggcuacaacuucucccugggggccgccgucaaggccggcgcgugcaugcuggacgggggcaacaugcucgagacgaucaaggugagcccccagaccauggacggcauccugaaguccauccugaaggugaagaagacccucgggauguucaucagcgacaccccgggcgagcggaaccccuacgagaacauccuguacaagaucugccuguccggggacggcuggcccuacaucgccagccgcacguccaucaccgggcgggccugggagaacaccgucguggaccucgagagcgacggcaagccccagaaggccggcuccaacaacagcaacaagucccugcagagcgccggguucgcggccggccugaccuacucccagcucaugacgcugaaggacgccaugcugcagcuggacccgaacgccaagaccuggauggacaucgaggggcgccccgaggaccccguggagaucgcccucuaccagcccagcuccggcugcuacauccacuucuuccgggagccgaccgaccugaagcaguucaagcaggacgcgaaguacagccacgggaucgacgucaccgaccuguucgccgcccagcccggccucacguccgccgugaucgaggcccugccccgcaacauggucaucacgugccagggcagcgacgacaucaagaagcugcucgagucccaggggcgcaaggacaucaagcugaucgacaucgcgcugagcaagaccgacagccggaaguacgagaacgccgugugggaccaguacaaggaccucugccacaugcacaccggcguggucguggagaagaagaagcgcgggggcaaggaggagaucaccccgcacugcgcccugauggacugcaucauguucgacgccgcgguguccgggggccugaacacccucguccugcgggccgugcugccccgcgacaugguguuccggaccagcacgccccgcgucgugcucugaggacuagucccuguucccagagcccacuuuuuuuucuuuuuuugaaauaaaauagccugucuuucagaucucaaaggcucuuuucagagccaccaaaaaaaaaaaaaaaaaaaaaaaaaaaaaaaaaaaaaaaaaaaaaaaaaaaaaaaaaaaaaaaaagaauu

SEQ ID NO: 16770 - RNA, 1951 nt, Artificial Sequence
  mRNA product Design a-1 (hSL-A64-N5) comprising derived and/or modified sequence from LASV(G3010-SLE-2013;Clade IV)__AIT17345__NP (opt1)
aggagagucccgcagucggcguccagcggcucugcuuguucgugugugugucguugcaggccuuauucaagcuuaccaugagcgccuccaaggagaucaagagcuuccuguggacccagucccuccgccgggagcugagcggcuacugcuccaacaucaagcuccagguggucaaggacgcccaggcgcugcugcacgggcuggacuucagcgagguguccaacgugcagcgccucaugcggaaggagcgccgggacgacaacgaccugaagcgccugcgggaccucaaccaggccgucaacaaccugguggagcucaagagcacccagcagaaguccauccugcgcgugggcacccugaccagcgacgaccugcucauccuggccgccgaccuggagaagcucaaguccaaggucacccggaccgagcgcccccugagcgccgggguguacaugggcaaccuguccagccagcagcucgaccagcggcgcgcgcugcuguccaugaucgggaugagcuccggcgugcagggcgcccgggccgggcgcgacggcgucgugcgggugugggacgucaagaacgccgagcuccugaacaaccaguucgggacgaugccgagccugacccucgcgugccugaccaagcagggccagguggaccugaacgacgugguccaggcccucaccgaccuggggcugaucuacacggccaaguaccccaacaccuccgaccucgaccgccugacccagagccaccccauccugaacaugaucgacaccaagaaguccagccucaacaucagcggcuacaacuucucccugggcgccgccgugaaggcgggggccugcaugcuggacggcgggaacaugcucgagacgaucaaggugagcccccagaccauggacggcauccugaaguccauccugaaggucaagaaggcccucggcauguucaucagcgagaccccgggggagcggaaccccuacgagaacauccuguacaagaucugccuguccggcgacggguggcccuacaucgccagccgcaccuccaucacgggccgggccugggagaacaccgugguggaccucgagagcgacgggaagccccagaaggcgggcuccaacaacagcaacaagucccugcagagcgccggcuucaccgccgggcugaccuacucccagcucaugacgcugaaggacgccaugcugcagcuggacccgaacgccaagaccuggauggacaucgagggccgccccgaggaccccgucgagguggcgcucuaccagcccagcuccgggugcuacauccacuucuuccgggagccgaccgaccugaagcaguucaagcaggacgccaaguacagccacggcaucgacgugaccgaccuguucgccgcccagcccgggcucacguccgccgucaucgacgcgcugccccgcaacauggugaucacgugccagggcagcgacgacaucaagaagcugcucgagagccagggccgcaaggacaucaagcugaucgacaucgcccuguccaagaccgacagccggaaguacgagaacgccgucugggaccaguacaaggaccucugccacaugcacaccggggugguggucgagaagaagaagcgcggcgggaaggaggagaucaccccgcacugcgcccugauggacugcaucauguucgacgcggccguguccggcgggcugaacaccagcgugcuccgggccguccugccccgcgacaugguguuccggaccuccacgccccgcgugguccugugaggacuagucccuguucccagagcccacuuuuuuuucuuuuuuugaaauaaaauagccugucuuucagaucucaaaggcucuuuucagagccaccaaaaaaaaaaaaaaaaaaaaaaaaaaaaaaaaaaaaaaaaaaaaaaaaaaaaaaaaaaaaaaaaagaauu

SEQ ID NO: 16771 - RNA, 1951 nt, Artificial Sequence
  mRNA product Design a-1 (hSL-A64-N5) comprising derived and/or modified sequence from LASV(G502-SLE-2009;Clade IV)__AIT17127__NP (opt1)
aggagagucccgcagucggcguccagcggcucugcuuguucgugugugugucguugcaggccuuauucaagcuuaccaugagcgccuccaaggagaucaagagcuuccuguggacccagucccuccgccgggagcugagcggcuacugcuccaacaucaagcuccagguggucaaggacgcccaggcgcugcugcacgggcuggacuucagcgagguguccaacgugcagcgccucaugcggaaggagcgccgggacgacaacgaccugaagcgccugcgggaccucaaccaggccgucaacaaccugguggagcucaagagcacccagcagaaguccauccugcgcgugggcacccugaccagcgacgaccugcucauccuggccgccgaccuggagaagcucaaguccaaggucauccggaccgagcgcccccugagcgccgggguguacaugggcaaccuguccagccagcagcucgaccagcggcgcgcgcugcuguccaugaucgggaugagcggcggcaaccagggggugcgggccggcaaggacggggucgugcgcgugugggacgucaagaacgccgagcuccugaacaaccaguucggcaccaugccgucccugacgcucgccugccugaccaagcagggccagguggaccugaacgacgcggugcaggcccucaccgaccuggggcugaucuacaccgccaaguaccccaacacgagcgaccucgaccggcugacccagucccaccccauccugaacaugaucgacaccaagaaguccagccucaacaucuccggcuacaacuucagccugggggccgccgucaaggcgggcgccugcaugcuggacgggggcaacaugcucgagaccaucaaggugagcccccagacgauggacggcauccucaagagcauccugaaggugaagaaggcccuggggauguucaucuccgacaccccgggcgagcgcaaccccuacgagaacauccuguacaagaucugccugagcggggacggcuggcccuacaucgccucccggaccagcaucaccgggcgcgccugggagaacacggucguggaccucgaguccgacggcaagccccagaaggcgggcagcaacaacuccaacaagagccugcaguccgccggguucaccgccggccugaccuacagccagcucaugacccugaaggacgccaugcugcagcuggacccgaacacgaagaccuggauggacaucgaggggcggcccgaggaccccguggagaucgcccucuaccagcccuccagcggcugcuacauccacuucuuccgcgagccgaccgaccugaagcaguucaagcaggacgcgaaguacucccacgggaucgacgucaccgaccuguucgccgcccagcccggccucacgagcgccgugaucgacgcccugccccggaacauggugaucacgugccagggcuccgacgacauccgcaagcugcucgagagccaggggcgcaaggacaucaagcugaucgacaucgcgcugaacaagaccgacagccggaaguacgagaacgccgucugggaccaguacaaggaccucugccacaugcacaccggcguggucguggagaagaagaagcgcgggggcaaggaggagaucaccccgcacugcgcccugauggacugcaucauguucgacgccgcgguguccgggggccugaacaccagcguccuccgggccgugcugccccgcgacaugguguuccggaccuccacgccccgcgucgugcugugaggacuagucccuguucccagagcccacuuuuuuuucuuuuuuugaaauaaaauagccugucuuucagaucucaaaggcucuuuucagagccaccaaaaaaaaaaaaaaaaaaaaaaaaaaaaaaaaaaaaaaaaaaaaaaaaaaaaaaaaaaaaaaaaagaauu

SEQ ID NO: 16772 - RNA, 1951 nt, Artificial Sequence
  mRNA product Design a-1 (hSL-A64-N5) comprising derived and/or modified sequence from LASV(G733-SLE-2010;Clade IV)__AIT17155__NP (opt1)
aggagagucccgcagucggcguccagcggcucugcuuguucgugugugugucguugcaggccuuauucaagcuuaccaugagcgccuccaaggagaucaagagcuuccuguggacccagucccuccgccgggagcugagcggcuacugcuccaacaucaagcuccagguggucaaggacgcccaggcgcugcugcacgggcuggacuucagcgagguguccaacgugcagcgccucaugcggaaggagcgccgggacgacaacgaccugaagcgccugcgggaccucaaccaggccgucaacaaccugguggagcucaagagcacccagcagaaguccgugcugcgcgucggcacccugaccagcgacgagcugcucgugcuggccgccgaccuggagaagcucaaguccaaggugauccggaccgagcgcccccugagcgccggggucuacaugggcaaccuguccagccagcagcucgaccagcggcgcgcgcugcuguccaugaucgggaugagcggcggcaaccagggggcccggaccggccgcgacgggguggugcgggucugggacgugaagaacgccgagcuccugaacaaccaguucggcaccaugccgucccugacccucgccugccugaccaagcagggccagguggaccugaacgacgcgguccaggcccucaccgaccuggggcugaucuacacggccaaguaccccaacaccagcgaccucgaccgccugacccagucccaccccauccugaacaugaucgacaccaagaaguccagccucaacaucuccggcuacaacuucagccugggggccgccgugaaggcgggcgccugcaugcuggacgggggcaacaugcucgagacgaucaaggugagcccccagaccauggacggcauccucaagagcauccugaaggucaagaaggcccuggggauguucaucuccgacaccccgggcgagcggaaccccuacgagaacauccuguacaagaucugccugagcggggacggcuggcccuacaucgccucccgcaccagcaucacggggcgggccugggagaacaccgugguggaccucgaguccgacggcaagccccagaaggcgggcagcaacaacuccaacaagagccugcaguccgccggguucaccgccggccugaccuacagccagcucaugacgcugaaggacgccaugcugcagcuggacccgaacgccaagaccuggauggacaucgaggggcgccccgaggaccccgucgagaucgcgcucuaccagcccuccagcggcugcuacauccacuucuuccgggagccgaccgaccugaagcaguucaagcaggacgccaaguacucccacgggaucgacgugaccgaccuguucgccgcccagcccggccucacgagcgccgugaucgacgcgcugccccgcaacauggucaucacgugccagggcuccgacgacauccgcaagcugcucgagagccaggggcggaaggacaucaagcugaucgacaucgcccugagcaagaucgacucccgcaaguacgagaacgccgugugggaccaguacaaggaccucugccacaugcacaccggcgucgugguggagaagaagaagcgcgggggcaaggaggagaucacgccccacugcgcccugauggacugcaucauguucgacgcggccgucagcgggggccugaacucccucgugcugcgggccgugcugccgcgggacauggucuuccgcaccagcacgccccggguggugcucugaggacuagucccuguucccagagcccacuuuuuuuucuuuuuuugaaauaaaauagccugucuuucagaucucaaaggcucuuuucagagccaccaaaaaaaaaaaaaaaaaaaaaaaaaaaaaaaaaaaaaaaaaaaaaaaaaaaaaaaaaaaaaaaaagaauu

SEQ ID NO: 16773 - RNA, 1951 nt, Artificial Sequence
  mRNA product Design a-1 (hSL-A64-N5) comprising derived and/or modified sequence from MOPV/LASV reassortant(IGS-1;Clade IV)__AFY05578__NP (opt1)
aggagagucccgcagucggcguccagcggcucugcuuguucgugugugugucguugcaggccuuauucaagcuuaccaugagcgccuccaaggagaucaagagcuuccuguggacccagucccuccgccgggagcugagcggcuacugcuccaacaucaagcuccagguggucaaggacgcccaggcgcugcugcacgggcuggacuucagcgagguguccaacgugcagcgccucaugcggaaggagcgccgggacgacaacgaccugaagcgccugcgggaccucaaccaggccgucaacaaccugguggagcucaagagcacccagcagaaguccauccugcgcgugggcacccugaccagcgacgaccugcucauccuggccgccgaccuggagaagcuccgguccaaggucauccgcaccgagcggccccugagcgccgggguguacaugggcaaccuguccagccagcagcucgaccagcgccgggcgcugcugaacaugaucgggauguccggcggcaaccagggggcccgcgccggccgggacggggugguccgcgugugggacgugaagaacgccgagcuccugagcaaccaguucggcaccaugccgucccugacgcucgcgugccugaccaagcaggggcaggucgaccugaacgacgccgugcaggcccucaccgaccugggccugaucuacaccgccaaguaccccaacacgagcgaccucgaccggcugacccagucccaccccauccugaacaugaucgacaccaagaaguccagccucaacaucuccggcuacaacuucagccugggggccgcggugaaggccggcgccugcaugcuggacgggggcaacaugcucgagaccaucaaggucagcccccagacgauggacggcauccucaagagcauccugaaggugaagaaggcccuggggauguucaucuccgacaccccgggcgagcgcaaccccuacgagaacauccuguacaagaucugccugagcggggacggcuggcccuacaucgccucccggaccagcaucaccgggcgcgcgugggagaacacgguggucgaccucgaguccgacggcaagccccagaaggccgacagcaacaacuccagcaagucccugcagagcgccggcuucaccgccgggcugaccuacucccagcucaugacccugaaggacgccaugcugcagcuggacccgaacgcgaagacguggauggacaucgagggccggcccgaggaccccguggagaucgcccucuaccagcccagcuccgggugcuacauccacuucuuccgcgagccgaccgaccugaagcaguucaagcaggacgccaaguacagccacggcaucgacgugaccgaccuguucgccacccagcccgggcucacguccgccgucaucgacgcgcugccccgcaacauggugaucacgugccagggcagcgacgacauccggaagcugcucgagagccagggccgcaaggacaucaagcugaucgacaucgaccuguccaagaccgacagccggaaguacgagaacgccgugugggaccaguacaaggaccucugccacaugcacaccggggucguggucgagaagaagaagcgcggcgggaaggaggagaucaccccgcacugcgcccugauggacugcaucauguucgacgccgcgguguccggcgggcugaacaccagcgugcuccgggccguccugccccgcgacaugguguuccggaccuccacgccccgcgugguccugugaggacuagucccuguucccagagcccacuuuuuuuucuuuuuuugaaauaaaauagccugucuuucagaucucaaaggcucuuuucagagccaccaaaaaaaaaaaaaaaaaaaaaaaaaaaaaaaaaaaaaaaaaaaaaaaaaaaaaaaaaaaaaaaaagaauu

SEQ ID NO: 16774 - RNA, 1951 nt, Artificial Sequence
  mRNA product Design a-1 (hSL-A64-N5) comprising derived and/or modified sequence from LASV(LM765-SLE-2012;Clade IV)__AIT17815__NP (opt1)
aggagagucccgcagucggcguccagcggcucugcuuguucgugugugugucguugcaggccuuauucaagcuuaccaugagcgccuccaaggagaucaagagcuuccuguggacccagucccuccgccgggagcugagcggcuacugcuccaacaucaagcuccagguggucaaggacgcccaggcgcugcugcacgggcuggacuucagcgagguguccaacgugcagcgccucaugcggaaggagcgccgggacgacaacgaccugaagcgccugcgggaccucaaccaggccgucaacaaccugguggagcucaagagcacccagcagaaguccauccugcgcgugggcacccugaccagcgacgaccugcucauccuggccgccgaccuggagaagcucaaguccaaggucacccggaccgagcgcccccugagcgccgggguguacaugggcaaccuguccagccagcagcucgaccagcggcgcgcgcugcuggacaugaucgggauguccggcagcaaccagggcgcccgggccgggcgcgacggcgugguccgggugugggacgugaagaacgccgagcuccugaacaaccaguucgggacgaugccgucccugacccucgcgugccugaccaagcagggccaggucgaccugaacgacgccgugcaggcccucaccgaccuggggcugaucuacacggccaaguaccccaacaccagcgaccucgaccgccugacccagucccaccccauccugaacaugaucgacaccaagaaguccagccucaacaucuccggcuacaacuucagccugggcgccgcggugaaggccggggccugcaugcuggacggcgggaacaugcucgagacgaucaaggucagcccccagaccauggacggcauccucaagagcauccugaaggugaagaaggcccugggcauguucaucuccgacgccccgggggagcggaaccccuacgagaacauccuguacaagaucugccugagcggcgacggguggcccuacaucgcgucccgcaccagcaucaccggccgggccugggagaacacgguggucgaccucgaguccgacgggaagccccagaaggccggcagcaacggcuccaacaagagccugcaguccgccggguucaccgccggccugaccuacagccagcucaugacccugaaggacgcgaugcugcagcuggacccgaacgccaagacguggauggacaucgaggggcgccccgaggaccccguggagaucgcccucuaccagcccuccagcggcugcuacauccacuucuuccgggagccgaccgaccugaagcaguucaagcaggacgccaaguacucccacgggaucgacgugaccgaccuguucgccgcgcagcccggccucaccagcgccgucaucgacgcccugccccgcaacauggugaucacgugccagggcuccgacgacauccgcaagcuguucgagagccaggggcggaaggacaucaagcucaucgacaucgcccugagcaagaccgacucccgcaaguacgagaacgcggugugggaccaguacaaggaccugugccacaugcacaccggcaucgucguggagaagaagaagcgcgggggcaaggaggagaucacgccccacugcgcccucauggacugcaucauguucgacgccgccgucagcgggggccugaacaccuccgugcugcgggccgugcucccgcgggacauggucuuccgcaccagcacgccccggguggugcugugaggacuagucccuguucccagagcccacuuuuuuuucuuuuuuugaaauaaaauagccugucuuucagaucucaaaggcucuuuucagagccaccaaaaaaaaaaaaaaaaaaaaaaaaaaaaaaaaaaaaaaaaaaaaaaaaaaaaaaaaaaaaaaaaagaauu

SEQ ID NO: 16775 - RNA, 1951 nt, Artificial Sequence
  mRNA product Design a-1 (hSL-A64-N5) comprising derived and/or modified sequence from LASV(LM776-SLE-2012;Clade IV)__AIT17825__NP (opt1)
aggagagucccgcagucggcguccagcggcucugcuuguucgugugugugucguugcaggccuuauucaagcuuaccaugagcgccuccaaggagaucaagagcuuccuguggacccagucccuccgccgggagcugagcuccuacugcagcaacaucaagcuccagguggucaaggacgcccaggcgcugcugcacggccuggacuucuccgaggugagcaacgugcagcgccucaugcggaaggagcgccgggacgacaacgaccugaagcgccugcgggaccucaaccaggccgucaacaaccugguggagcugaaguccacccagcagaaguccauccuccgcguggggacccugaccuccgacgaccugcucauccuggccgccgaccuggagaagcucaagagcaaggucacccggaccgagcgcccccuguccgccggcguguacauggggaaccugagcucccagcagcucgaccagcggcgcgcgcugcugagcaugaucggcauguccgggagcaaccagggcgcccgggccggccgcgacggggugguccgggugugggacgugaagaacgccgagcuccugaacaaccaguucggcacgaugccgucccugacccucgcgugccugaccaagcaggggcaggucgaccugaacgacgccgugcaggcccucaccgaccugggccugaucuacacggccaaguaccccaacaccagcgaccucgaccgccugacccagagccaccccauccugaacaugaucgacaccaagaaguccagccucaacaucuccggguacaacuucagccugggcgccgcggugaaggccggcgccugcaugcuggacgggggcaacaugcucgagacgaucaaggucagcccccagaccauggacgggauccucaagagcauccugaaggugaagaaggcccugggcauguucaucuccgacaccccgggcgagcggaaccccuacgagaacauccuguacaagaucugccugagcggggacggcuggcccuacaucgccucccgcaccagcaucacggggcgggcgugggagaacaccguggucgaccucgaguccgacggcaagccccagaaggccgggagcaacaacuccaacaagagccugcaguccgccggcuucaccgccggccugaccuacagccagcucaugacgcugaaggacgccaugcugcagcuggacccgaacgcgaagaccuggauggacaucgaggggcgccccgaggaccccguggagguggcccucuaccagcccuccagcggcugcuacauccacuucuuccgggagccgaccgaccugaagcaguucaagcaggacgccaaguacucccacgggaucgacgucaccgaccuguucgccgcccagcccggccucacgagcgcggugaucgacgcccugccccgcaacauggugaucacgugccaggggagcgacgacauccgcaagcugcucgagucccagggccggaaggacaucaagcugaucgacaucgcccugagcaagaccgacucccgcaaguacgagaacgccgucugggaccaguacaaggaccucugccacaugcacaccggcguggucguggagaagaagaagcgcgggggcaaggaggagaucaccccgcacugcgcgcugauggacugcaucauguucgacgccgccgugagcgggggccugaacaccuccguccuccgggccgugcugccccgggacaugguguuccgcaccagcacgccccgggucgugcugugaggacuagucccuguucccagagcccacuuuuuuuucuuuuuuugaaauaaaauagccugucuuucagaucucaaaggcucuuuucagagccaccaaaaaaaaaaaaaaaaaaaaaaaaaaaaaaaaaaaaaaaaaaaaaaaaaaaaaaaaaaaaaaaaagaauu

SEQ ID NO: 16776 - RNA, 1951 nt, Artificial Sequence
  mRNA product Design a-1 (hSL-A64-N5) comprising derived and/or modified sequence from LASV(Mad39;Clade IV)__ANH09723__NP (opt1)
aggagagucccgcagucggcguccagcggcucugcuuguucgugugugugucguugcaggccuuauucaagcuuaccaugagcgccuccaaggagaucaagagcuuccuguggacccagucccuccgccgggagcugagcggcuacugcuccaacaucaagcuccagguggucaaggacgcccaggcgcugcugcacgggcuggacuucagcgagguguccaacgugcagcgccucaugcggaagcagcgccgggacgacaacgaccugaagcgccugcgggaccucaaccaggccgucaacaaccugguggagcugaaguccacccagcagaaguccgugcuccgcgucggcacgcugaccagcgacgaccugcucacccuggccgccgaccuggagaagcucaaguccaaggugacccggacggagcgcccccugaccgccgggguguacaugggcaaccugagcucccagcagcucgaccagcggcgcgcgcugcugaacaugaucgggaugagcggcggcaaccagggggcccggaccggccgcgacggggucgugcgggugugggacgucaagaacgccgagcuccugaacaaccaguucggcaccaugccgucccugacgcucgccugccugaccaagcagggccagguggaccugaacgacgugguccaggcgcucaccgaccuggggcugaucuacaccgccaaguaccccaacacgagcgaccucgaccgccugacccagucccaccccauccugaacaugaucgacaccaacaagagcucccucaacaucagcggcuacaacuucagccugggggccgccgugaaggccggcgcgugcaugcuggacgggggcaacaugcucgagaccaucaaggugagcccccagacgauggacggcauccucaagagcauccugaaggucaagaagucccuggggauguucaucagcgacaccccgggcgagcggaaccccuacgagaacauccuguacaagaucugccuguccggggacggcuggcccuacaucgccagccgcaccuccaucaccgggcgggccugggagaacacggugguggaccucgagagcggcggcaagccccagaaggccggguccaacaacagcaacaagucccugcagagcgccggcuucgcggccgggcugaccuacucccagcucaugacccugaaggacgccaugcugcagcuggacccgaacgccaagaccuggauggacaucgagggccgccccgaggaccccgucgagaucgcccucuaccagcccaucagcgggugcuacauccacuucuuccgggagccgacggaccugaagcaguucaagcaggacgcgaaguacucccacggcaucgacgugaccgaccuguucgccgcccagcccggccucaccagcgccgugaucgaggcccugccccgcaacauggucaucacgugccagggguccgacgacauccgcaagcuguucgagagccagggccggaaggacaucaagcucaucgacaucgcgcuguccaagaccgacagccgcaaguacgagaacgccgugugggaccaguacaaggaccugugccacaugcacaccggggucgugguggagaagaagaagaagggcgggaaggaggagaucacgccccacugcgcccucauggacugcaucauguucgacgccgcggucagcggcggccugaacacccuggugcuccgggccgugcugccgcgcgacauggucuuccggaccuccacccccaagguggugcugugaggacuagucccuguucccagagcccacuuuuuuuucuuuuuuugaaauaaaauagccugucuuucagaucucaaaggcucuuuucagagccaccaaaaaaaaaaaaaaaaaaaaaaaaaaaaaaaaaaaaaaaaaaaaaaaaaaaaaaaaaaaaaaaaagaauu

SEQ ID NO: 16777 - RNA, 1951 nt, Artificial Sequence
  mRNA product Design a-1 (hSL-A64-N5) comprising derived and/or modified sequence from LASV(Z0947-SLE-2011;Clade IV)__AIT17841__NP (opt1)
aggagagucccgcagucggcguccagcggcucugcuuguucgugugugugucguugcaggccuuauucaagcuuaccaugagcgccuccaaggagaucaagagcuuccuguggacccagucccuccgccgggagcugagcggcuacugcuccaacaucaagcuccagguggucaaggacgcccaggcgcugcugcacgggcuggacuucagcgagguguccaacgugcagcgccucaugcggaaggagcgccgggacgacaacgaccugaagcgccugcgggaccucaaccaggccgucaacaaccugguggagcucaagagcacccagcagaaguccauccugcgcgugggcacccugaccagcgacgaccugcucauccuggccgccgaccuggagaagcucaaguccaaggucacccggaccgagcgcccccugagcgccgggguguacaugggcaaccuguccagccagcagcucgaccagcggcgcgcgcugcugaacaugaucgggauguccggcagcaaccagggcgcccggacggggcgcgacggcgugguccgggugugggacgugaagaacgccgagcuccugaacaaccaguucgggaccaugccgucccugacccucgccugccugaccaagcagggccaggucgaccugaacgacgcggugcaggcccucacggaccuggggcugaucuacaccgccaaguaccccaacaccagcgaccucgaccgccugacccagucccaccccauccugaacaugaucgacacgaagaaguccagccucaacaucuccggcuacaacuucagccugggcgccgccgugaaggcgggggccugcaugcuggacggcgggaacaugcucgagaccaucaaggucagcccccagaccauggacggcauccucaagagcauccugaaggugaagaaggcccugggcauguucaucuccgacgccccgggggagcggaaccccuacgagaacauccuguacaagaucugccugagcggcgacggguggcccuacaucgccucccgcaccagcaucacgggccgggcgugggagaacaccguggucgaccucgaguccgacgggaagccccagaaggccggcagcaacggcuccaacaagagccugcaguccgccggguucaccgccggccugaccuacagccagcucaugacgcugaaggacgccaugcugcagcuggacccgaacgcgaagaccuggauggacaucgaggggcgccccgaggaccccguggagaucgcccucuaccagcccuccagcggcugcuacauccacuucuuccgggagccgaccgaccugaagcaguucaagcaggacgccaaguacucccacgggaucgacgugaccgaccuguucgccgcccagcccggccucacgagcgcggucaucgacgcccugccccgcaacauggugaucacgugccagggcuccgacgacauccgcaagcuguucgagagccaggggcggaaggacaucaagcucaucgacaucgcccugagcaagaccgacucccgcaaguacgagaacgccgugugggaccaguacaaggaccugugccacaugcacaccggcaucgucguggagaagaagaagcgcgggggcaaggaggagaucaccccgcacugcgcgcucauggacugcaucauguucgacgccgccgucagcgggggccugaacaccuccgugcugcgggccgugcucccccgggacauggucuuccgcaccagcacgccccggguggugcugugaggacuagucccuguucccagagcccacuuuuuuuucuuuuuuugaaauaaaauagccugucuuucagaucucaaaggcucuuuucagagccaccaaaaaaaaaaaaaaaaaaaaaaaaaaaaaaaaaaaaaaaaaaaaaaaaaaaaaaaaaaaaaaaaagaauu

SEQ ID NO: 16778 - RNA, 1951 nt, Artificial Sequence
  mRNA product Design a-1 (hSL-A64-N5) comprising derived and/or modified sequence from LASV(Josiah;Clade IV)__NP_694869__NP (opt4)
aggagagucccgcagucggcguccagcggcucugcuuguucgugugugugucguugcaggccuuauucaagcuuaccaugagcgccagcaaggagaucaagagcuuccuguggacccagagccugagaagagagcugagcggcuacugcagcaacaucaagcugcagguggugaaggacgcccaggcccugcugcacggccuggacuucagcgaggugagcaacgugcagagacugaugagaaaggagagaagagacgacaacgaccugaagagacugagagaccugaaccaggccgugaacaaccugguggagcugaagagcacccagcagaagagcauccugagagugggcacccugaccagcgacgaccugcugauccuggccgccgaccuggagaagcugaagagcaaggugaucagaaccgagagaccccugagcgccggcguguacaugggcaaccugagcagccagcagcuggaccagagaagagcccugcugaacaugaucggcaugagcggcggcaaccagggcgccagagccggcagagacggcguggugagagugugggacgugaagaacgccgagcugcugaacaaccaguucggcaccaugcccagccugacccuggccugccugaccaagcagggccagguggaccugaacgacgccgugcaggcccugaccgaccugggccugaucuacaccgccaaguaccccaacaccagcgaccuggacagacugacccagagccaccccauccugaacaugaucgacaccaagaagagcagccugaacaucagcggcuacaacuucagccugggcgccgccgugaaggccggcgccugcaugcuggacggcggcaacaugcuggagaccaucaaggugagcccccagaccauggacggcauccugaagagcauccugaaggugaagaaggcccugggcauguucaucagcgacacccccggcgagagaaaccccuacgagaacauccuguacaagaucugccugagcggcgacggcuggcccuacaucgccagcagaaccagcaucaccggcagagccugggagaacaccgugguggaccuggagagcgacggcaagccccagaaggccgacagcaacaacagcagcaagagccugcagagcgccggcuucaccgccggccugaccuacagccagcugaugacccugaaggacgccaugcugcagcuggaccccaacgccaagaccuggauggacaucgagggcagacccgaggaccccguggagaucgcccuguaccagcccagcagcggcugcuacauccacuucuucagagagcccaccgaccugaagcaguucaagcaggacgccaaguacagccacggcaucgacgugaccgaccuguucgccacccagcccggccugaccagcgccgugaucgacgcccugcccagaaacauggugaucaccugccagggcagcgacgacaucagaaagcugcuggagagccagggcagaaaggacaucaagcugaucgacaucgcccugagcaagaccgacagcagaaaguacgagaacgccgugugggaccaguacaaggaccugugccacaugcacaccggcguggugguggagaagaagaagagaggcggcaaggaggagaucaccccccacugcgcccugauggacugcaucauguucgacgccgccgugagcggcggccugaacaccagcgugcugagagccgugcugcccagagacaugguguucagaaccagcacccccagaguggugcugugaggacuagucccuguucccagagcccacuuuuuuuucuuuuuuugaaauaaaauagccugucuuucagaucucaaaggcucuuuucagagccaccaaaaaaaaaaaaaaaaaaaaaaaaaaaaaaaaaaaaaaaaaaaaaaaaaaaaaaaaaaaaaaaaagaauu

SEQ ID NO: 16779 - RNA, 1951 nt, Artificial Sequence
  mRNA product Design a-1 (hSL-A64-N5) comprising derived and/or modified sequence from LASV(LP;Clade I)__AAF86702__NP (opt4)
aggagagucccgcagucggcguccagcggcucugcuuguucgugugugugucguugcaggccuuauucaagcuuaccaugagcaacagcaaggagaucaagagcuuccuguggacccagagccugagaagagagcugagcggcuacugcagcaacaucaagcugcagguggugaaggacgcccaggcccugcugcacggccuggacuucagcgaggugagcaacgugcagagacugaugagaaagcagaagagagacgacgccgaccugaagagacugagagaccugaaccaggccgugaacaaccugguggagcugaagagcacccagcagaagaacgugcugagagugggcacccugagcagcgacgaccugaucacccuggccgccgaccuggagaagcugaagagcaaggugaucagaaccgagagaccccugagcagcggcguguacaugggcaaccugagcagccagcagcuggaccagagaagagcccugcugagcaugaucggcaugagcggcggcccccagggcaacagaaccggcggcgacggcguggugagagugugggacgugaagaacgccgagcugcugaacaaccaguucggcaccaugcccagccugacccuggccugccugaccaagcagggccagguggaccugaacgacgccgugcaggcccugaccgaccugggccugaucuacaccgccaaguaccccaacagcagcgaccuggacaugcugacccagagccaccccauccugggcaugguggacaccaagaagagcagccugaacaucagcggcuacaacuucagccugggcgccgccgugaaggccggcgccugcaugcuggacggcggcaacaugcuggagaccaucaaggugagcccccagaccauggacggcauccugaagagcauccugaaggugaagagaagccugggcauguucaucagcgacacccccggcgagagaaaccccuacgagaacauccuguacaagaucugccugagcggcgagggcuggcccuacaucgccagcagaaccagcaucaccggcagagccugggagaacacccugguggaccuggagagcgacaacaagccccccaagcugaacagcgccggcagcaacaagagccugcaggccgccggccugaacgccggccugaccuacagccagcugaugacccugaaggacugcaugcugcagcuggaccccagcagcaagaccuggaucgacaucgagggcagacccgaggaccccguggagaucgcccuguuccagcccagcagcggcugcuacauccacuucuucagagagcccaccgaccugaagcaguucaagcaggacgccaaguacagccacggcaucgacgugaccgaccuguucagcacccagcccggccugaccagcgccgugaucgaggcccugcccagaaacauggugcugaccugccagggcagcgacgacaucaagaagcugcuggagagccagggcagaagagacaucaagcugaucgacaucagccugagcaaggccgacagcagaaaguucgagaacgccgugugggaccaguacaaggaccugugccacaugcacaccggcguggugguggagaagaagaagagaggcggcaaggaggagaucaccccccacugcgcccugcuggacugcaucauguucgacgccgccaccaccggcagccugaacaucaccacccugagagccgugcugcccagagacaugguguucagaaccagcacccccaagguggugcugugaggacuagucccuguucccagagcccacuuuuuuuucuuuuuuugaaauaaaauagccugucuuucagaucucaaaggcucuuuucagagccaccaaaaaaaaaaaaaaaaaaaaaaaaaaaaaaaaaaaaaaaaaaaaaaaaaaaaaaaaaaaaaaaaagaauu

SEQ ID NO: 16780 - RNA, 1951 nt, Artificial Sequence
  mRNA product Design a-1 (hSL-A64-N5) comprising derived and/or modified sequence from LASV(803213;Clade II)__AAF86704__NP (opt4)
aggagagucccgcagucggcguccagcggcucugcuuguucgugugugugucguugcaggccuuauucaagcuuaccaugagcgccagcaaggaggugaagagcuuccuguggacccagagccugagaagagagcugagcggcuacugcagcaacaucaagcugcagguggugaaggacgcccaggcccugcugcacggccuggacuucagcgaggugaacaacgugcagagacugaugagaaagcagaagagagacgacggcgaccugaagagacugagagaccugaaccaggccgugaacaaccugguggagcugaagagcacccagcagaagagcauccugagagugggcacccugaccagcgacgaccugcugacccuggccgccgaccuggagaagcugaagagcaaggugaucagaaccgagagaccccugagcagcggcguguacaugggcaaccugagcacccagcagcuggagcagagaagagcccugcugaacaugaucggcauggugggcggcgcccagggcacccagcccggcagagacggcguggugagagugugggacgugaagaaccccgaccugcugaacaaccaguucggcaccaugcccagccugacccuggccugccugaccaagcagggccagguggaccugaacgacgccgugcuggcccugaccgaccugggccugaucuacaccgccaaguaccccaacagcagcgaccuggacagacugagccagagccaccccauccugaacaugguggacaccaagaagagcagccugaacaucagcggcuacaacuucagccugggcgccgccgugaaggccggcgccugcaugcuggacggcggcaacaugcuggagaccaucaaggugaccccccagaccauggacggcauccugaagagcauccugaaggugaagagaagccugggcauguucgugagcgacacccccggcgagagaaaccccuacgagaacauccuguacaagaucugccugagcggcgacggcuggcccuacaucgccagcagaaccagcaucgugggcagagccugggagaacaccaccguggaccuggagagcgacggcaagccccagaaggugggcaccgccggcagcaacaagagccugcagagcgccggcuuccccaccggccugaccuacagccagcugaugacccugaaggacagcaugaugcagcuggaccccagcgccaagaccuggaucgacaucgagggcagacccgaggaccccguggagaucgcccuguaccagcccaugagcggcugcuacauccacuucuucagagagcccaccgaccugaagcaguucaagcaggacgccaaguacagccacggcaucgacguggccgaccuguuccccgcccagcccggccugaccagcgccgugaucgaggcccugcccagaaacauggugcugaccugccagggcagcgacgacaucaagaagcugcuggacagccagggcagaagagacaucaagcugaucgacaucagccugagcaagguggacagcagaaaguucgagaacgccgugugggaccagugcaaggaccugugccacaugcacaccggcguggugguggagaagaagaagagaggcggcaaggaggagaucaccccccacugcgcccugauggacugcaucauguucgacgccgccgugagcggcggccugaacauccccgugcugagagccgugcugcccagagacaugguguucagaaccagcagccccaagguggugcugugaggacuagucccuguucccagagcccacuuuuuuuucuuuuuuugaaauaaaauagccugucuuucagaucucaaaggcucuuuucagagccaccaaaaaaaaaaaaaaaaaaaaaaaaaaaaaaaaaaaaaaaaaaaaaaaaaaaaaaaaaaaaaaaaagaauu

SEQ ID NO: 16781 - RNA, 1954 nt, Artificial Sequence
  mRNA product Design a-1 (hSL-A64-N5) comprising derived and/or modified sequence from LASV(GA391;Clade III)__CAA36646__NP (opt4)
aggagagucccgcagucggcguccagcggcucugcuuguucgugugugugucguugcaggccuuauucaagcuuaccaugagcgccagcaaggaggugagaagcuuccuguggacccagagccugagaagagagcugagcggcuacugcagcaacaucaagcugcagguggugaaggacgcccaggcccugcugcacggccuggacuucagcgaggugagcaacgugcagagacugaugagaaagcagaagagagacgacggcgaccugaagagacugagagaccugaaccaggccgugaacaaccugguggagcugaagagcacccagcagaagagcgugcugagagugggcacccugagcagcgacgaccugcugauccuggccgccgaccuggagaagcugaagagcaaggugaccagaaccgagagaccccugagcagcggcguguacaugggcaaccugagcagccagcagcuggaccagagaagagcccugcugaacaugaucggcaugaccggcgugagcggcggcggcaagggcgccagcgacggcaucgugagagugugggacgugaagaacgccgagcugcugaacaaccaguucggcaccaugcccagccugacccuggccugccugaccaagcagggccagguggaccugaacgacgccgugcaggcccugaccgaccugggccugaucuacaccgccaaguaccccaacagcagcgaccuggacagacugagccagagccaccccauccugaacaugaucgacaccaagaagagcagccugaacaucagcggcuacaacuucagccugggcgccgccgugaaggccggcgccugcaugcuggacggcggcaacaugcuggagaccaucaaggugagcccccagaccauggacggcauccugaagagcauccugaaggugaagaagagccugggcauguucgugagcgacacccccggcgagagaaaccccuacgagaacauccuguacaagaucugccugagcggcgacggcuggcccuacaucgccagcagaaccagcaucgugggcagagccugggagaacaccgugguggaccuggagcaggacaacaagccccagaagaucggcaacggcggcagcaacaagagccugcagagcgccggcuucgccgccggccugaccuacagccagcugaugacccugaaggacuucaagugcuucaaccugauccccaacgccaagaccuggauggacaucgagggcagacccgaggaccccguggagaucgcccuguaccagcccagcagcggcugcuacgugcacuucuucagagagcccaccgaccugaagcaguucaagcaggacgccaaguacagccacggcaucgacgugaccgaccuguucgccgcccagcccggccugaccagcgccgugaucgaggcccugcccagaaacauggugaucaccugccagggcagcgaggacaucagaaagcugcuggagagccagggcagaagagacaucaagcugaucgacaucacccugagcaaggccgacagcagaaaguucgagaacgccgugugggaccaguucaaggaccugugccacaugcacaccggcguggugguggagaagaagaagagaggcggcaaggaggagaucaccccccacugcgcccugauggacugcaucauguucgacgccgccgugagcggcggccuggacgccaaggugcugagaguggugcugcccagagacaugguguucagaaccagcacccccaagguggugcugugaggacuagucccuguucccagagcccacuuuuuuuucuuuuuuugaaauaaaauagccugucuuucagaucucaaaggcucuuuucagagccaccaaaaaaaaaaaaaaaaaaaaaaaaaaaaaaaaaaaaaaaaaaaaaaaaaaaaaaaaaaaaaaaaagaauu

SEQ ID NO: 16782 - RNA, 1951 nt, Artificial Sequence
  mRNA product Design a-1 (hSL-A64-N5) comprising derived and/or modified sequence from LASV(AV;Clade V)__CCA30315__NP (opt4)
aggagagucccgcagucggcguccagcggcucugcuuguucgugugugugucguugcaggccuuauucaagcuuaccaugagcgccagcaaggaggugaagagcuuccuguggacccagagccugagaagagagcugagcggcuacugcagcaacaucaagcugcagguggugaaggacgcccaggcccugcugcacggccuggacuucagcgaggugagcaacgugcagagacugaugagaaagcagagaagagacgacagcgaccugaagagacugagagaccugaaccaggccgugaacaaccugguggagcugaagagcacccagcagaagagcgugcugagagugggcacccugagcagcgacgaccugcugacccuggccgccgaccuggagaagcugaagagcaaggugaccagaaccgagagaccccugagcagcggcguguacaugggcaaccugagcagccagcagcuggaccagagaagagcccugcugaaccugaucggcaugaccaacggcagccagggcagccaggccggcagagacggcguggugagagugugggacgugaagaacgccgagcugcugaacaaccaguucggcaccaugcccagccugacccuggccugccugaccaagcagggccagguggaccugaacgacguggugcaggcccugaccgaccugggccugaucuacaccgccaaguaccccaacaccagcgaccuggacagacugacccagagccaccccauccugaacaugaucgacaccaagaagagcagccugaacaucagcggcuacaacuucagccugggcgccgccgugaaggccggcgccugcaugcuggacggcggcaacaugcuggagaccaucaaggugagcccccagagcauggacggcauccugaagagcauccugaaggugaagagagcccugggcauguucgugagcgacacccccggcgagagaaaccccuacgagaacauccuguacaagaucugccugagcggcgacggcuggcccuacaucgccagcagaaccagcaucgugggcagagccugggagaacaccgugguggaccuggagaccgacggcaagccccagaagaucggcagcggcaacagcaacaagagccugcagagcgccggcuucagcgccggccugaccuacagccagcugaugacccugaaggacgccaugcugcagcuggaccccaacgccaagaccuggauggacaucgagggcagacccgaggaccccguggagguggcccuguaccagcccaucagcggcugcuacauccacuucuucagagagcccaccgaccugaagcaguucaagcaggacgccaaguacagccacggcaucgacaucgccgaccuguucgccgcccagcccggccugaccagcgccgugaucgaggcccugcccagaaacauggugaucaccugccagggcagcgaggacaucaagaagcugcuggagagccagggcagaaaggacaucaagcugaucgacaucgcccugagcaagaucgacagcagaaaguucgagaacgccgugugggaccaguacaaggaccugugccacaugcacaccggcguggugguggagaagaagaagagaggcggcaaggaggagaucaccccccacugcgcccugauggacugcaucauguucgacgccgccgugagcggcggccugaacacccuggugcugagagccgugcugcccagagacaugguguucagaaccagcacccccagaguggugcugugaggacuagucccuguucccagagcccacuuuuuuuucuuuuuuugaaauaaaauagccugucuuucagaucucaaaggcucuuuucagagccaccaaaaaaaaaaaaaaaaaaaaaaaaaaaaaaaaaaaaaaaaaaaaaaaaaaaaaaaaaaaaaaaaagaauu

SEQ ID NO: 16783 - RNA, 1951 nt, Artificial Sequence
  mRNA product Design a-1 (hSL-A64-N5) comprising derived and/or modified sequence from LASV(Togo/2016/7082;Clade VI)__AMR44578__NP (opt4)
aggagagucccgcagucggcguccagcggcucugcuuguucgugugugugucguugcaggccuuauucaagcuuaccaugagcaacagcaaggaggugaagagcuuccuguggacccagagccugagaagagagcugagcggcuacugcagcaacaucaagcugcagguggugaaggacgcccaggcccugcugcacggccuggacuucagcgaggugagcaacgugcagagacugaugagaaagcagaagagagacgacggcgaccugaagagacugagagaccugaaccaggccgugaacaaccugguggagcugaagagcgugcagcagaagagcauccugagagugggcacccugaccagcgacgaccugcugacccuggccgccgaccuggagaagcugaagagcaaggugaccagaaccgagagaccccugagcagcggcguguacaugggcaaccugagcagccagcagcuggaccagagaagagcccugcugagcaugaucggcaugagcggcggcaaccagaacagccagcccaagggcgacggcguggugagagugugggacgugaagaacgccgaccugcugaacaaccaguucggcaccaugcccagccugacccuggccugccugaccaagcagggccagguggaccugaacgacgccgugcaggcccugaccgaccugggccugaucuacaccgccaaguaccccaacagcagcgaccuggacagacugagccagagccaccccauccugaacaugaucgacaccaagaagagcagccugaacaucagcggcuacaacuucagccugggcgccgccaucaagaccggcgccugcaugcuggacggcggcaacaugcuggagaccaucaaggugaccccccagaccauggacggcauccugaagagcauccugaaggugaagagaagccugggcauguucaucagcgacacccccggcgagagaaaccccuacgagaacauccuguacaagaucugccugagcggcgacggcuggcccuacaucgccagcagaaccgccaucaucggcagagccugggagaacaccgugguggaccuggagagcgacagcaagccccagaagaucggcagcaacggcagcaacaagagccugcagagcgccggcuucgcccccggccugaccuacagccagcugaugacccugaaggacagcaugcugcagcuggaccccaacgccaagaccuggaucgacaucgagggcagacccgaggaccccguggagguggcccuguuccagcccaucagcggcugcuacauccacuucuucagagagcccaccgaccugaagcaguucaagcaggacgccaaguacagccacggcaucgacgugaccgaccuguucgccgcccagcccggccugaccagcgccgugaucgaggcccugcccagaaacauggugcugaccugccagggcagcgacgacaucaagaagcugcuggacagccagggcagaagagacaucaagcugaucgacgugagccugaacaagaucgacagcagaaaguucgagaacgccgugugggaccaguacaaggaccugugccacaugcacaccggcguggugguggagaagaagaagaagggcggcaaggaggagaucaccccccacugcgcccugcuggacugcaucauguucgacgccgccgugagcggcggccugaacgccaccgugcugagagccgugcugcccagagacaugguguucagaaccagcagccccaagguggugcugugaggacuagucccuguucccagagcccacuuuuuuuucuuuuuuugaaauaaaauagccugucuuucagaucucaaaggcucuuuucagagccaccaaaaaaaaaaaaaaaaaaaaaaaaaaaaaaaaaaaaaaaaaaaaaaaaaaaaaaaaaaaaaaaaagaauu

SEQ ID NO: 16784 - RNA, 1951 nt, Artificial Sequence
  mRNA product Design a-1 (hSL-A64-N5) comprising derived and/or modified sequence from LASV(KAK-428;Clade n.d. (VII))__ANH09741__NP (opt4)
aggagagucccgcagucggcguccagcggcucugcuuguucgugugugugucguugcaggccuuauucaagcuuaccaugagcaacagcaaggaggugaagagcuuccuguggacccagagccugagaagagagcugagcggcuacugcaccaacaucaagcugcagguggugaaggacgcccaggcccugcugcacggccuggacuucagcgaggugagcaacgugcagagacugaugagaaagcagaagagagacgacaacgaccugaagagacugagagaccugaaccaggccgugaacaaccugguggagcugaagagcgugcagcagaagagcgugcugaaggugggcacccugaacagcgacgaccugcugacccuggccgccgaccuggagaagcugaagagcaagguggugagaaccgagagaccccugagcagcggcguguacaugggcaaccugagcagccagcagcuggaccagagaagagcccugcugaacaugaucggcauggccggcggcagccagggcaaccagcccagcagagacggcguggugagagugugggacgugaagaacgccgaccugcugaacaaccaguucggcaccaugcccagccugacccuggccugccugaccaagcagggccagguggaccugaacgacguggugcuggcccugaccgaccugggccugaucuacaccgccaaguaccccaacagcagcgaccuggacagacugagccagaaccaccccgugcugaacaugaucgacgugaacaagagcagccugaacaucagcggcuacaacuucagccugggcgccgccgugaaggccggcgccugcaugcuggacggcggcaacaugcuggagaccaucaagaucagcccccagaccguggacggcauccugaagagcauccugaaggugaagagagcccugggcauguucgugagcgacacccccggcgagagaaaccccuacgagaacauccuguacaaggugugccugagcggcaacggcuggcccuacaucgccagcagaaccagcaucgugggcagagccugggagaacaccgugguggaccuggagagcaacaagaaccagcccaaggugggcaacaacggcagcaacaagaugcugcagagcagcggcuucgccaccggccugaccuacagccagcugaugacccugagagacagcaugcugcagcuggaccccaccgccaagaccuggaucgacaucgagggcagacccgaggaccccguggagcuggcccuguuccagcccagcagcggcugcuacauccacuucuucagagagcccaccgaccugaagcaguucaagcaggacgccaaguacagccacggcaucgacgugaacgaccuguucagcgcccagcccggccugaccagcgccgugcuggaggcccugcccagaaacauggugcugaccugccagggcagcgacgacaucagaaagcugcuggacagccaggacagaaaggacaucaagcugaucgacaucagccugagcaaggccgacgccagaaaguucgagaacgacgugugggaccaguucaaggaccugugccacaugcacaccggcaucgugguggagaagaagaagaagggcggcaagcaggagaugaccccccacugcgcccugcuggacugcaucauguucgacgccgccgugagcggcggccugaacgugcccacccugagagccgugcugcccaccgacaugguguucagaaccaucaccaccaagguggugcugugaggacuagucccuguucccagagcccacuuuuuuuucuuuuuuugaaauaaaauagccugucuuucagaucucaaaggcucuuuucagagccaccaaaaaaaaaaaaaaaaaaaaaaaaaaaaaaaaaaaaaaaaaaaaaaaaaaaaaaaaaaaaaaaaagaauu

SEQ ID NO: 16785 - RNA, 1951 nt, Artificial Sequence; identical to SEQ ID NO: 16779
  mRNA product Design a-1 (hSL-A64-N5) comprising derived and/or modified sequence from LASV(Pinneo-NIG-1969;Clade I)__AIT17837__NP (opt4)

SEQ ID NO: 16786 - RNA, 1951 nt, Artificial Sequence
  mRNA product Design a-1 (hSL-A64-N5) comprising derived and/or modified sequence from LASV(ISTH0009-NIG-2011;Clade II)__AIT17405__NP (opt4)
aggagagucccgcagucggcguccagcggcucugcuuguucgugugugugucguugcaggccuuauucaagcuuaccaugagcgugagcaaggaggugaagagcuuccuguggacccagagccugagaagagagcugagcggcuacugcagcaacaucaagcugcagguggugaaggacgcccaggcccugcugcacggccuggacuucagcgaggugagcaacgugcagagacugaugagaaagcagaagagagacgacagcgaccugaagagacugagagaccugaaccaggccgugaacaaccugguggagcugaagagcacccagcagaagagcauccugagagugggcacccugaccagcgacgaccugcugacccuggccgccgaccuggagaagcugaagagcaaggugaucagaaccgagagaccccugagcagcggcguguacaugggcaaccugagcacccagcagcuggagcagagaagagcccugcugaacaugaucggcauggugggcggcgcccagggcacccagcccggcagagacggcguggugagagugugggacgugaagaaccccgaccugcugaacaaccaguucggcaccaugcccagccugacccuggccugccugaccaagcagggccagguggaccugaacgacgccgugcuggcccugaccgaccugggccugaucuacaccgccaaguaccccaacagcagcgaccuggacagacugagccagagccaccccauccugaacaugguggacaucaagaagagcagccugaacaucagcggcuacaacuucagccugggcgccgccgugaaggccggcgccugcaugcuggacggcggcaacaugcuggagaccaucaaggugaccccccagaccauggacggcauccugaagagcauccugaaggugaagagaagccugggcauguucgugagcgacacccccggcgagagaaaccccuacgagaacauccuguacaagaucugccugagcggcgacggcuggcccuacaucgccagcagaaccagcaucgugggcagagccugggagaacaccaccguggaccuggagagcgacggcaagccccagaaggugggcagcgccggcagcaacaagagccugcagagcgccggcuuccccaccggccugaccuacagccagcugaugacccugaaggacagcaugaugcagcuggaccccagcgccaagaccuggaucgacaucgagggcagacccgaggaccccguggagaucgcccuguaccagcccaugagcggcugcuacauccacuucuucagagagcccaccgaccugaagcaguucaagcaggacgccaaguacagccacggcaucgacguggccgaccuguuccccgcccagcccggccugaccagcgccgugaucgaggcccugcccagaaacauggugcugaccugccagggcagcgacgacaucaagagacugcuggacagccagggcagaagagacaucaagcugaucgacaucgcccugagcaaggccgacagcagaagauucgagaacgccgugugggaccagugcaaggaccugugccacaugcacaccggcguggugguggagaagaagaagagaggcggcaaggaggagaucaccccccacugcgcccugauggacugcaucauguacgacgccgccgugagcggcggccugaacauccccgugcugagagccgugcugcccagagacaugguguucagaaccagcagccccaagguggugcugugaggacuagucccuguucccagagcccacuuuuuuuucuuuuuuugaaauaaaauagccugucuuucagaucucaaaggcucuuuucagagccaccaaaaaaaaaaaaaaaaaaaaaaaaaaaaaaaaaaaaaaaaaaaaaaaaaaaaaaaaaaaaaaaaagaauu

SEQ ID NO: 16787 - RNA, 1951 nt, Artificial Sequence
  mRNA product Design a-1 (hSL-A64-N5) comprising derived and/or modified sequence from LASV(ISTH2010-NIG-2012;Clade II)__AIT17483__NP (opt4)
aggagagucccgcagucggcguccagcggcucugcuuguucgugugugugucguugcaggccuuauucaagcuuaccaugagcgccagcaaggaggugaagagcuuccuguggacccagagccugagaagagagcugagcggcuacugcagcaacaucaagcugcagguggugaaggacgcccaggcccugcugcacggccuggacuucagcgaggugagcaacgugcagagacugaugagaaagcagaagagagacgacagcgaccugaagagacugagagaccugaaccaggccgugaacaaccugguggagcugaagagcacccagcagaagagcauccugagagugggcacccugaccagcgacgaccugcugacccuggccgccgaccuggagaagcugaagagcaaggugaucagaaccgagagaccccugagcagcggcguguacaugggcaaccugagcacccagcagcuggagcagagaagagcccugcugaaccugaucggcauggugggcggcgcccagggcacccagcccggcagagacggcguggugagagugugggacgugaagaaccccgaccugcugaacaaccaguucggcaccaugcccagccugacccuggccugccugaccaagcagggccagguggaccugaacgacgccgugcuggcccugaccgaccugggccugaucuacaccgccaaguaccccaacagcagcgaccuggacagacugagccagagccaccccauccugaacaugguggacaccaagaagagcagccugaacaucagcggcuucaacuucagccugggcgccgccgugaaggccggcgccugcaugcuggacggcggcaacaugcuggagaccaucaaggugaccccccagaccauggacggcauccugaagagcauccugaaggugaagaagagccugggcauguucgugagcgacacccccggcgagagaaaccccuacgagaacauccuguacaagaucugccugagcggcgacggcuggcccuacaucgccagcagaaccagcaucgugggcagagccugggagaacaccaccguggaccuggagagcgacggcaagccccacaaggugggcaccgccggcagcaacaagagccugcagagcgccggcuuccccaccggccugaccuacagccagcugaugacccugaaggacagcaugaugcagcuggaccccagcgccaagaccuggaucgacaucgagggcagacccgaggaccccguggagaucgcccuguaccagcccaugagcggcugcuacauccacuucuucagagagcccaccgaccugaagcaguucaagcaggacgccaaguacagccacggcaucgacguggccgaccuguuccccgcccagcccggccugaccagcgccgugaucgaggcccugcccagaaacauggugcugaccugccagggcagcgacgacaucaagagacugcuggacagccagggcagaagagacaucaagcugaucgacaucgcccugagcaaggccgacagcagaagauucgagaacgccgugugggaccagugcaaggaccugugccacaugcacaccggcguggugguggagaagaagaagagaggcggcaaggaggagaucaccccccacugcgcccugauggacugcaucauguacgacgccgccgugagcggcggccugaacauccccgugcugagagccgugcugcccagagacaugguguucagaaccagcagccccaagguggugcugugaggacuagucccuguucccagagcccacuuuuuuuucuuuuuuugaaauaaaauagccugucuuucagaucucaaaggcucuuuucagagccaccaaaaaaaaaaaaaaaaaaaaaaaaaaaaaaaaaaaaaaaaaaaaaaaaaaaaaaaaaaaaaaaaagaauu

SEQ ID NO: 16788 - RNA, 1951 nt, Artificial Sequence
  mRNA product Design a-1 (hSL-A64-N5) comprising derived and/or modified sequence from LASV(Lassa virus/H.sapiens-wt/NGA/2015/ISTH_0543;Clade II)__AVO03640__NP (opt4)
aggagagucccgcagucggcguccagcggcucugcuuguucgugugugugucguugcaggccuuauucaagcuuaccaugagcgccagcaaggaggugaagagcuuccuguggacccagagccugagaagagagcugagcggcuacugcagcaacaucaagcugcagguggugaaggacgcccaggcccugcugcacggccuggacuucagcgaggugagcaacgugcagagacugaugagaaagcagaagagagacgacagcgaccugaagagacugagagaccugaaccaggccgugaacaaccugguggagcugaagagcacccagcagaagagcauccugagagugggcacccugaccagcgacgaccugcugacccuggccgccgaccuggagaagcugaagagcaaggugaucagaaccgagagaccccugagcagcggcguguacaugggcaaccugagcacccagcagcuggagcagagaagagcccugcugaacaugaucggcauggugggcggcgcccagggcacccagcccggcagagacggcguggugagagugugggacgugaagaaccccgaccugcugaacaaccaguucggcaccaugcccagccugacccuggccugccugaccaagcagggccagguggaccugaacgacgccgugcuggcccugaccgaccugggccugaucuacaccgccaaguaccccaacagcagcgaccuggacagacugagccagagccaccccauccugaacaugguggacaccaagaagagcagccugaacaucagcggcuacaacuucagccugggcgccgccgugaaggccggcgccugcaugcuggacggcggcaacaugcuggagaccaucaaggugaccccccagaccauggacggcauccugaagagcauccugaaggugaagaagagccugggcauguucgugagcgacacccccggcgagagaaaccccuacgagaacauccuguacaagaucugccugagcggcgacggcuggcccuacaucgccagcagaaccagcaucgugggcagagccugggagaacaccaccguggaccuggagagcgacggcaagccccagaaggugggcagcgccggcagcaacaagagccugcagagcgccggcuuccccaccggccugaccuacagccagcugaugacccugaaggacagcaugaugcagcuggaccccagcgccaagaccuggaucgacaucgagggcagacccgaggaccccguggagaucgcccuguaccagcccaugagcggcugcuacauccacuucuucagagagcccaccgaccugaagcaguucaagcaggacgccaaguacagccacggcaucgacguggccgaccuguuccccgcccagcccggccugaccagcgccgugaucgaggcccugcccagaaacauggugcugaccugccagggcagcgacgacaucaagagacugcuggacagccagggcagaaaggacaucaagcugaucgacaucgcccugagcaaggccgacagcagaagauucgagaacgccgugugggaccagugcaaggaccugugccacaugcacaccggcguggugguggagaagaagaagagaggcggcaaggaggagaucaccccccacugcgcccugauggacugcaucauguacgacgccgccgugagcggcggccugaacauccccgugcugagagccgugcugcccagagacaugguguucagaaccagcagccccaagguggugcugugaggacuagucccuguucccagagcccacuuuuuuuucuuuuuuugaaauaaaauagccugucuuucagaucucaaaggcucuuuucagagccaccaaaaaaaaaaaaaaaaaaaaaaaaaaaaaaaaaaaaaaaaaaaaaaaaaaaaaaaaaaaaaaaaagaauu

SEQ ID NO: 16789 - RNA, 1951 nt, Artificial Sequence
  mRNA product Design a-1 (hSL-A64-N5) comprising derived and/or modified sequence from LASV(Lassa virus/H.sapiens-wt/NGA/2016/ISTH_0009;Clade II)__AVO03572__NP (opt4)
aggagagucccgcagucggcguccagcggcucugcuuguucgugugugugucguugcaggccuuauucaagcuuaccaugagcgccagcaaggaggugaagagcuuccuguggacccagagccugagaagagagcugagcggcuacugcagcaacaucaagcugcagguggugaaggacgcccaggcccugcugcacggccuggacuucagcgaggugagcaacgugcagagacugaugagaaagcagaagagagacgacagcgaccugaagagacugagagaccugaaccaggccgugaacaaccugguggagcugaagagcacccagcagaagagcauccugagagugggcacccugaccagcgacgaccugcugacccuggccgccgaccuggagaagcugaagagcaaggugaucagaaccgagagaccccugagcagcggcguguacaugggcaaccugagcacccagcagcuggagcagagaagagcccugcugaacaugaucggcauggugggcggcgcccagggcacccagcccggcagagacggcguggugagagugugggacgugaagaaccccgaccugcugaacaaccaguucggcaccaugcccagccugacccuggccugccugaccaagcagggccagguggaccugaacgacgccgugcuggcccugaccgaccugggccugaucuacaccgccaaguaccccaacagcagcgaccuggacagacugagccagagccaccccauccugaacaugguggacaccaagaagagcagccugaacaucagcggcuacaacuucagccugggcgccgccgugaaggccggcgccugcaugcuggacggcggcaacaugcuggagaccaucaaggugaccccccagaccauggacggcauccugaagagcauccugaaggugaagaagagccugggcauguucgugagcgacacccccggcgagagaaaccccuacgagaacauccuguacaagaucugccugagcggcgacggcuggcccuacaucgccagcagaaccagcaucgugggcagagccugggagaacaccaccguggaccuggagagcgacggcaagccccagaaggugggcagcgccggcagcaacaagagccugcagagcgccggcuuccccaccggccugaccuacagccagcugaugacccugaaggacagcaugaugcagcuggaccccagcgccaagaccuggaucgacaucgagggcagacccgaggaccccguggagaucgcccuguaccagcccaugagcggcugcuacauccacuucuucagagagcccaccgaccugaagcaguucaagcaggacgccaaguacagccacggcaucgacguggccgaccuguuccccgcccagcccggccugaccagcgccgugaucgaggcccugcccagaaacauggugcugaccugccagggcagcgacgacaucaagagacugcuggacagccagggcagaagagacaucaagcugaucgacaucgcccugagcaaggccgacagcagaagauucgagaacgccgugugggaccagugcaaggaccugugccacaugcacaccggcguggugguggagaagaagaagagaggcggcaaggaggagaucaccccccacugcgcccugauggacugcaucauguacgacgccgccgugagcggcggccugaacauccccgugcugagagccgugcugcccagagacaugguguucagaaccagcagccccaagguggugcugugaggacuagucccuguucccagagcccacuuuuuuuucuuuuuuugaaauaaaauagccugucuuucagaucucaaaggcucuuuucagagccaccaaaaaaaaaaaaaaaaaaaaaaaaaaaaaaaaaaaaaaaaaaaaaaaaaaaaaaaaaaaaaaaaagaauu

SEQ ID NO: 16790 - RNA, 1951 nt, Artificial Sequence
  mRNA product Design a-1 (hSL-A64-N5) comprising derived and/or modified sequence from LASV(Lassa virus/H.sapiens-wt/NGA/2016/ISTH_0017;Clade II)__AVO03568__NP (opt4)
aggagagucccgcagucggcguccagcggcucugcuuguucgugugugugucguugcaggccuuauucaagcuuaccaugagcgccagcaaggaggugaagagcuuccuguggacccagagccugagaagagagcugagcggcuacugcagcagcaucaagcugcagguggugaaggacgcccaggcccugcugcacggccuggacuucagcgaggugagcaacgugcagagacugaugagaaagcagaagagagacgacagcgaccugaagagacugagagaccugaaccaggccgugaacaaccugguggagcugaagagcacccagcagaagagcauccugagagugggcacccugaccagcgacgaccugcugacccuggccgccgaccuggagaagcugaagagcaaggugaucagaaccgagagaccccugagcagcggcguguacaugggcaaccugagcacccagcagcuggagcagagaagagcccugcugaacaugaucggcauggccggcggcgcccagggcacccagcccggcagagacggcguggugagagugugggacgugaagaaccccgaccugcugaacaaccaguucggcaccaugcccagccugacccuggccugccugaccaagcagggccagguggaccugaacgacgccgugcuggcccugaccgaccugggccugaucuacaccgccaaguaccccaacagcagcgaccuggacagacugagccagagccaccccauccugaacaugguggacaccaagaagagcagccugaacaucagcggcuacaacuucagccugggcgccgccgugaaggccggcgccugcaugcuggacggcggcaacaugcuggagaccaucaaggugaccccccagaccauggacggcauccugaagagcauccugaaggugaagagaagccugggcauguucgugagcgacgcccccggcgagagaaaccccuacgagaacauccuguacaagaucugccugagcggcgacggcuggcccuacaucgccagcagaaccagcaucgugggcagagccugggagaacaccaccguggaccuggagagcgacggcaagccccagaaggugggcgccaccggcagcaacaagagccugcagagcgccggcuuccccaccggccugaccuacagccagcugaugacccugaaggacagcaugaugcagcuggaccccagcgccaagaccuggaucgacaucgagggcagacccgaggaccccguggagguggcccuguaccagcccgugagcggcugcuacauccacuucuucagagagcccaccgaccugaagcaguucaagcaggacgccaaguacagccacggcaucgacguggccgaccuguuccccgcccagcccggccugaccagcgccgugaucgaggcccugcccagaaacauggugcugaccugccagggcagcgacgacaucaagaagcugcuggacagccagggcagaaaggacaucaagcugaucgacaucgcccugagcaaggccgacagcagaagauucgagaacgccgugugggaccagugcaaggaccugugccacaugcacaccggcguggugguggagaagaagaagagaggcggcaaggaggagaucaccccccacugcgcccugauggacugcaucauguacgacgccgccgugagcggcggccugaacauccccgugcugagagccgugcugcccagagacaugguguucagaaccagcagccccaagguggugcugugaggacuagucccuguucccagagcccacuuuuuuuucuuuuuuugaaauaaaauagccugucuuucagaucucaaaggcucuuuucagagccaccaaaaaaaaaaaaaaaaaaaaaaaaaaaaaaaaaaaaaaaaaaaaaaaaaaaaaaaaaaaaaaaaagaauu

SEQ ID NO: 16791 - RNA, 1951 nt, Artificial Sequence
  mRNA product Design a-1 (hSL-A64-N5) comprising derived and/or modified sequence from LASV(Lassa virus/H.sapiens-wt/NGA/2018/ISTH_0959;Clade II)__AVV65100__NP (opt4)
aggagagucccgcagucggcguccagcggcucugcuuguucgugugugugucguugcaggccuuauucaagcuuaccaugagcgccagcaaggaggugaagagcuuccuguggacccagagccugagaagagagcugagcggcuacugcagcaacaucaagcugcagguggugaaggacgcccaggcccugcugcacggccuggacuucagcgaggugagcaacgugcagagacugaugagaaagcagaagagagacgacagcgaccugaagagacugagagaccugaaccaggccgugaacaaccugguggagcugaagagcacccagcagaagagcauccugagagugggcacccugaccagcgacgaccugcugacccuggccgccgaccuggagaagcugaagagcaaggugaucagaaccgagagaccccugagcagcggcguguacaugggcaaccugagcacccagcagcuggagcagagaagagcccugcugaaccugaucggcauggugggcggcgcccagggcacccagcccggcagagacggcguggugagagugugggacgugaagaaccccgaccugcugaacaaccaguucggcaccaugcccagccugacccuggccugccugaccaagcagggccagguggaccugaacgacguggugcuggcccugaccgaccugggccugaucuacaccgccaaguaccccaacagcagcgaccuggacagacugagccagagccaccccauccugaacaugguggacaccaagaagagcagccugaacaucagcggcuucaacuucagccugggcgccgccgugaaggccggcgccugcaugcuggacggcggcaacaugcuggagaccaucaaggugaccccccagaccauggacggcauccugaagagcauccugaaggugaagaagagccugggcauguucgugagcgacacccccggcgagagaaaccccuacgagaacauccuguacaagaucugccugagcggcgacggcuggcccuacaucgccagcagaaccagcaucgugggcagagccugggagaacaccaccguggaccuggagagcgacggcaagccccacaaggugggcaccgccggcagcaacaagagccugcagagcgccggcuuccccaccggccugaccuacagccagcugaugacccugaaggacagcaugaugcagcuggaccccagcgccaagaccuggaucgacaucgagggcagacccgaggaccccguggagaucgcccuguaccagcccaugagcggcugcuacauccacuucuucagagagcccaccgaccugaagcaguucaagcaggacgccaaguacagccacggcaucgacguggccgaccuguuccccgcccagcccggccugaccagcgccgugaucgaggcccugcccagaaacauggugcugaccugccagggcagcgacgacaucaagagacugcuggacagccagggcagaaaggacaucaagcugaucgacaucgcccugagcaagaccgacagcagaagauucgagaacgccgugugggaccagugcaaggaccugugccacaugcacaccggcguggugguggagaagaagaagagaggcggcaaggaggagaucaccccccacugcgcccugauggacugcaucauguacgacgccgccgugagcggcggccugaacauccccgugcugagagccgugcugcccagagacaugguguucagaaccagcagccccaagguggugcugugaggacuagucccuguucccagagcccacuuuuuuuucuuuuuuugaaauaaaauagccugucuuucagaucucaaaggcucuuuucagagccaccaaaaaaaaaaaaaaaaaaaaaaaaaaaaaaaaaaaaaaaaaaaaaaaaaaaaaaaaaaaaaaaaagaauu

SEQ ID NO: 16792 - RNA, 1951 nt, Artificial Sequence
  mRNA product Design a-1 (hSL-A64-N5) comprising derived and/or modified sequence from LASV(LASV003-NIG-2008;Clade II)__AIT17581__NP (opt4)
aggagagucccgcagucggcguccagcggcucugcuuguucgugugugugucguugcaggccuuauucaagcuuaccaugagcgccagcaaggaggugaagagcuuccuguggacccagagccugagaagagagcugagcggcuacugcagcagcaucaagcugcagguggugaaggacgcccaggcccugcugcacggccuggacuucagcgaggugagcaacgugcagagacugaugagaaagcagaagagagacgacagcgaccugaagagacugagagaccugaaccaggccgugaacaaccugguggagcugaagagcacccagcagaagagcgugcugagagugggcacccugaccagcgacgaccugcugacccuggccgccgaccuggagaagcugaagagcaaggugaucagaaccgagagaccccugagcagcggcguguacaugggcaaccugagcgcccagcagcuggagcagagaagaacccugcugaacaugaucggcauggugggcggcgcccagggcacccagcccggcagagacggcguggugagagugugggacgugaagaaccccgaccugcugaacaaccaguucggcaccaugcccagccugacccuggccugccugaccaagcagggccagguggaccugaacgacguggugcuggcccugaccgaccugggccugaucuacaccgccaaguaccccaacagcagcgaccuggacagacugagccagagccaccccauccugagcaugguggacaccaagaagagcagccugaacaucagcggcuacaacuucagccugggcgccgccgugaaggccggcgccugcaugcuggacggcggcaacaugcuggagaccaucaaggugaccccccagaccauggacggcauccugaagagcauccugaaggugaagaagagccugggcauguucgugagcgacacccccggcgagagaaaccccuacgagaacauccuguacaagaucugccugagcggcgacggcuggcccuacaucgccagcagaaccagcaucgugggcagagccugggagaacaccaccguggaccuggagagcgacggcaagccccagaaggugggcaccgccggcagcaacaagagccugcagagcgccggcuuccccaccggccugaccuacagccagcugaugacccugaaggacagcaugaugcagcuggaccccagcgccaagaccuggaucgacaucgagggcagacccgaggaccccguggagaucgcccuguaccagcccaugagcggcugcuacauccacuucuucagagagcccaccgaccugaagcaguucaagcaggacgccaaguacagccacggcaucgacgugaccgaccuguuccccgcccagcccggccugaccagcgccgugaucgaggcccugcccagaaacauggugcugaccugccagggcagcgacgacaucaagagacugcuggacagccagggcagaagagacaucaagcugaucgacaucgcccugagcaaggccgacagcagaagauucgagaacgccgugugggaccagugcaaggaccugugccacaugcacaccggcguggugguggagaagaagaagagaggcggcaaggaggagaucaccccccacugcgcccugauggacugcaucauguacgacgccgccgugagcggcggccugaacauccccgugcugagagccgugcugcccagagacaugguguucagaaccagcagccccaagguggugcugugaggacuagucccuguucccagagcccacuuuuuuuucuuuuuuugaaauaaaauagccugucuuucagaucucaaaggcucuuuucagagccaccaaaaaaaaaaaaaaaaaaaaaaaaaaaaaaaaaaaaaaaaaaaaaaaaaaaaaaaaaaaaaaaaagaauu

SEQ ID NO: 16793 - RNA, 1951 nt, Artificial Sequence
  mRNA product Design a-1 (hSL-A64-N5) comprising derived and/or modified sequence from LASV(LASV035-NIG-2009;Clade II)__AIT17589__NP (opt4)
aggagagucccgcagucggcguccagcggcucugcuuguucgugugugugucguugcaggccuuauucaagcuuaccaugagcgccagcaaggaggugaagagcuuccuguggacccagagccugagaagagagcugagcggcuacugcagcagcaucaagcugcagguggugaaggacgcccaggcccugcugcacggccuggacuucagcgaggugagcaacgugcagagacugaugagaaagcagaagagagacgacagcgaccugaagagacugagagaccugaaccaggccgugaacaaccugguggagcugaagagcacccagcagaagagcauccugagagugggcacccugaccagcgacgaccugcugacccuggccgccgaccuggagaagcugaagagcaaggugaucagaaccgagagaccccugagcagcggcguguacaugggcaaccugagcgcccagcagcuggagcagagaagagcccugcugaacaugaucggcauggugggcggcgcccagggcacccagcccggcagagacggcguggugagagugugggacgugaagaaccccgaccugcugaacaaccaguucggcaccaugcccagccugacccuggccugccugaccaagcagggccagguggaccugaacgacgccgugcuggcccugaccgaccugggccugaucuacaccgccaaguaccccaacagcagcgaccuggacagacugagccagagccaccccauccugaacaugguggacaccaagaagagcagccugaacaucagcggcuacaacuucagccugggcgccgccgugaaggccggcgccugcaugcuggacggcggcaacaugcuggagaccaucaaggugaccccccagaccauggacggcauccugaagagcauccugaaggugaagagaagccugggcauguucgugagcgacacccccggcgagagaaaccccuacgagaacauccuguacaagaucugccugagcggcgacggcuggcccuacaucgccagcagaaccagcaucgugggcagagccugggagaacaccaccguggaccuggagagcgacggcaagccccagaaggugggcaccaccggcagcaacaagagccugcagagcgccggcuuccccaccggccugaccuacagccagcugaugacccugaaggacagcaugaugcagcuggaccccagcgccaagaccuggaucgacaucgagggcagacccgaggaccccguggagaucgcccuguaccagcccaugagcggcugcuacauccacuucuucagagagcccaccgaccugaagcaguucaagcaggacgccaaguacagccacggcaucgacguggccgaccuguuccccgcccagcccggccugaccagcgccgugaucgaggcccugcccagaaacauggugcugaccugccagggcagcgacgacaucaagaagcugcuggacagccagggcagaagagacaucaagcugaucgacaucgcccugagcaaggccgacagcagaaaguucgagaacgccgugugggaccagugcaaggaccugugccacaugcacaccggcguggugguggagaagaagaagagaggcggcaaggaggagaucaccccccacugcgcccugauggacugcaucauguacgacgccgccgugagcggcggccugaacauccccgugcugagagccgugcugcccagagacaugguguucagaaccagcagccccaagguggugcugugaggacuagucccuguucccagagcccacuuuuuuuucuuuuuuugaaauaaaauagccugucuuucagaucucaaaggcucuuuucagagccaccaaaaaaaaaaaaaaaaaaaaaaaaaaaaaaaaaaaaaaaaaaaaaaaaaaaaaaaaaaaaaaaaagaauu

SEQ ID NO: 16794 - RNA, 1951 nt, Artificial Sequence
  mRNA product Design a-1 (hSL-A64-N5) comprising derived and/or modified sequence from LASV(LASV1000-NIG-2009;Clade II)__AIT17783__NP (opt4)
aggagagucccgcagucggcguccagcggcucugcuuguucgugugugugucguugcaggccuuauucaagcuuaccaugagcgccagcaaggaggugaagagcuuccuguggacccagagccugagaagagagcugagcggcuacugcagcaacaucaagcugcagguggugaaggacgcccaggcccugcugcacggccuggacuucagcgaggugagcaacgugcagagacugaugagaaagcagaagagagacgacagcgaccugaagagacugagagaccugaaccaggccgugaacaaccugguggagcugaagagcacccagcagaagagcauccugagagugggcacccugaccagcgacgaccugcugacccuggccgccgaccuggagaagcugaagagcaaggugaucagaaccgagagaccccugagcagcggcguguacaugggcaaccugagcacccagcagcuggagcagagaagagcccugcugaacaugaucggcauggugggcggcgcccagggcacccagcccggcagagacggcguggugagagugugggacgugaagaaccccgaccugcugaacaaccaguucggcaccaugcccagccugacccuggccugccugaccaagcagggccagguggaccugaacgacguggugcuggcccugaccgaccugggccugaucuacaccgccaaguaccccaacagcagcgaccuggacagacugagccagagccaccccauccugaacaugguggacaccaagaagagcagccugaacaucagcggcuacaacuucagccugggcgccgccgugaaggccggcgccugcaugcuggacggcggcaacaugcuggagaccaucaaggugaccccccagaccauggacggcauccugaagagcauccugaaggugaagaagagccugggcauguucgugagcgacacccccggcgagagaaaccccuacgagaacauccuguacaagaucugccugagcggcgacggcuggcccuacaucgccagcagaaccagcaucgugggcagagccugggagaacaccaccguggaccuggagagcgacggcaagccccagaaggugggcaccgccggcagcaacaagagccugcagagcgccggcuuccccaccggccugaccuacagccagcugaugacccugaaggacagcaugaugcagcuggaccccagcgccaagaccuggaucgacaucgagggcagacccgaggaccccguggagaucgcccuguaccagcccgugagcggcugcuacauccacuucuucagagagcccaccgaccugaagcaguucaagcaggacgccaaguacagccacggcaucgacguggccgaccuguuccccgcccagcccggccugaccagcgccgugaucgaggcccugcccagaaacauggugcugaccugccagggcagcgacgacaucaagagacugcuggacagccagggcagaagagacaucaagcugaucgacaucgcccugagcaaggccgacagcagaagauucgagaacgccgugugggaccagugcaaggaccugugccacaugcacaccggcguggugguggagaagaagaagagaggcggcaaggaggagaucaccccccacugcgcccugauggacugcaucauguacgacgccgccgugagcggcggccugaacauccccgugcugagagccgugcugcccagagacaugguguucagaaccagcagccccaagguggugcugugaggacuagucccuguucccagagcccacuuuuuuuucuuuuuuugaaauaaaauagccugucuuucagaucucaaaggcucuuuucagagccaccaaaaaaaaaaaaaaaaaaaaaaaaaaaaaaaaaaaaaaaaaaaaaaaaaaaaaaaaaaaaaaaaagaauu

SEQ ID NO: 16795 - RNA, 1951 nt, Artificial Sequence
  mRNA product Design a-1 (hSL-A64-N5) comprising derived and/or modified sequence from LASV(LASV221-NIG-2010;Clade II)__AIT17625__NP (opt4)
aggagagucccgcagucggcguccagcggcucugcuuguucgugugugugucguugcaggccuuauucaagcuuaccaugagcgccagcaaggaggugaagagcuuccuguggacccagagccugagaagagagcugagcggcuacugcagcagcaucaagcugcagguggugaaggacgcccaggcccugcugcacggccuggacuucagcgaggugagcaacgugcagagacugaugagaaagcagagaagagacgacagcgaccugaagagacugagagaccugaaccaggccgugaacaaccugguggagcugaagagcacccagcagaagagcauccugagagugggcacccugaccagcgacgaccugcugacccuggccgccgaccuggagaagcugaagagcaaggugaucagaaccgagagaccccugagcagcggcguguacaugggcaaccugagcacccagcagcuggagcagagaagagcccugcugaacaugaucggcauggugggcggcgcccagggcacccagcccggcagagacggcguggugagagugugggacgugaagaaccccgaccugcugaacaaccaguucggcaccaugcccagccugacccuggccugccugaccaagcagggccagguggaccugaacgacgccgugcuggcccugaccgaccugggccugaucuacaccgccaaguaccccaacagcagcgaccuggacagacugagccagagccaccccauccugaacaugguggacaccaagaagagcagccugaacaucagcggcuacaacuucagccugggcgccgccgugaaggccggcgccugcaugcuggacggcggcaacaugcuggagaccaucaaggugaccccccagaccguggacggcauccugaagagcauccugaaggugaagagaagccugggcauguucgugagcgacacccccggcgagagaaaccccuacgagaacauccuguacaagaucugccugagcggcgacggcuggcccuacaucgccagcagaaccagcaucgugggcagagccugggagaacaccaccguggaccuggagagcgacggcaagccccagaaggugggcaccgccggcagcaacaagagccugcagagcgccggcuuccccaccggccugaccuacagccagcugaugacccugaaggacagcaugaugcagcuggaccccagcgccaagaccuggaucgacaucgagggcagacccgaggaccccguggagaucgcccuguaccagcccaugagcggcugcuacauccacuucuucagagagcccaccgaccugaagcaguucaagcaggacgccaaguacagccacggcaucgacguggccgaccuguuccccgcccagcccggccugaccagcgccgugaucgaggcccugcccagaaacauggugcugaccugccagggcagcgacgacaucaagagacugcuggacagccagggcagaagagacaucaagcugaucgacaucgcccugagcaaggccgacagcagaaaguucgagaacgccgugugggaccagugcaaggaccugugccacaugcacaccggcguggugguggagaagaagaagagaggcggcaaggaggagaucaccccccacugcgcccugauggacugcaucauguacgacgccgccgugagcggcggccugaacauccccgugcugagagccgugcugcccagagacaugguguucagaaccagcagccccaagguggugcugugaggacuagucccuguucccagagcccacuuuuuuuucuuuuuuugaaauaaaauagccugucuuucagaucucaaaggcucuuuucagagccaccaaaaaaaaaaaaaaaaaaaaaaaaaaaaaaaaaaaaaaaaaaaaaaaaaaaaaaaaaaaaaaaaagaauu

SEQ ID NO: 16796 - RNA, 1951 nt, Artificial Sequence
  mRNA product Design a-1 (hSL-A64-N5) comprising derived and/or modified sequence from LASV(LASV237-NIG-2010;Clade II)__AIT17639__NP (opt4)
aggagagucccgcagucggcguccagcggcucugcuuguucgugugugugucguugcaggccuuauucaagcuuaccaugagcgccagcaaggaggugaagagcuuccuguggacccagagccugagaagagagcugagcggcuacugcagcaacaucaagcugcagguggugaaggacgcccaggcccugcugcacggccuggacuucagcgaggugagcaacgugcagagacugaugagaaagcagaagagagacgacagcgaccugaagagacugagagaccugaaccaggccgugaacaaccugguggagcugaagagcacccagcagaagagcauccugagagugggcacccugaccagcgacgaccugcugacccuggccgccgaccuggagaagcugaagagcaaggugaucagaaccgagagaccccugagcagcggcguguacaugggcaaccugagcacccagcagcuggagcagagaagagcccugcugaacaugaucggcauggugggcggcgcccagggcacccagcccggcagagacggcguggugagagugugggacgugaagaaccccgaccugcugaacaaccaguucggcaccaugcccagccugacccuggccugccugaccaagcagggccagguggaccugaacgacgccgugcuggcccugaccgaccugggccugaucuacaccgccaaguaccccaacagcagcgaccuggacagacugagccagagccaccccauccugaacaugguggacaucaagaagagcagccugaacaucagcggcuacaacuucagccugggcgccgccgugaaggccggcgccugcaugcuggacggcggcaacaugcuggagaccaucaaggugaccccccagaccauggacggcauccugaagagcauccugaaggugaagagaagccugggcauguucgugagcgacacccccggcgagagaaaccccuacgagaacauccuguacaagaucugccugagcggcgacggcuggcccuacaucgccagcagaaccagcaucgugggcagagccugggagaacaccaccguggaccuggagagcgacggcaagccccagaaggugggcagcgccggcagcaacaagagccugcagagcgccggcuuccccaccggccugaccuacagccagcugaugacccugaaggacagcaugaugcagcuggaccccagcgccaagaccuggaucgacaucgagggcagacccgaggaccccguggagaucgcccuguaccagcccaugagcggcugcuacauccacuucuucagagagcccaccgaccugaagcaguucaagcaggacgccaaguacagccacggcaucgacguggccgaccuguuccccgcccagcccggccugaccagcgccgugaucgaggcccugcccagaaacauggugcugaccugccagggcagcgacgacaucaagagacugcuggacagccagggcagaagagacaucaagcugaucgacaucgcccugagcaaggccgacagcagaagauucgagaacgccgugugggaccagugcaaggaccugugccacaugcacaccggcguggugguggagaagaagaagagaggcggcaaggaggagaucaccccccacugcgcccugauggacugcaucauguacgacgccgccgugagcggcggccugaacauccccgugcugagagccgugcugcccagagacaugguguucagaaccagcagccccaagguggugcugugaggacuagucccuguucccagagcccacuuuuuuuucuuuuuuugaaauaaaauagccugucuuucagaucucaaaggcucuuuucagagccaccaaaaaaaaaaaaaaaaaaaaaaaaaaaaaaaaaaaaaaaaaaaaaaaaaaaaaaaaaaaaaaaaagaauu

SEQ ID NO: 16797 - RNA, 1951 nt, Artificial Sequence
  mRNA product Design a-1 (hSL-A64-N5) comprising derived and/or modified sequence from LASV(LASV253-NIG-2011;Clade II)__AIT17671__NP (opt4)
aggagagucccgcagucggcguccagcggcucugcuuguucgugugugugucguugcaggccuuauucaagcuuaccaugagcgccagcaaggaggugaagagcuuccuguggacccagagccugagaagagagcugagcggcuacugcagcagcaucaagcugcagguggugaaggacgcccaggcccugcugcacggccuggacuucagcgaggugagcaacgugcagagacugaugagaaagcagaagagagacgacagcgaccugaagagacugagagaccugaaccaggccgugaacaaccugguggagcugaagagcacccagcagaagagcgugcugagagugggcacccugaccagcgacgaccugcugacccuggccgccgaccuggagaagcugaagagcaaggugaucagaaccgagagaccccugagcagcggcguguacaugggcaaccugagcacccagcagcuggagcagagaagagcccugcugaacaugaucggcauggugggcggcgcccagggcacccagcccggcagagacggcguggugagagugugggacgugaagaaccccgaccugcugaacaaccaguucggcaccaugcccagccugacccuggccugccugaccaagcagggccagguggaccugaacgacguggugcuggcccugaccgaccugggccugaucuacaccgccaaguaccccaacagcagcgaccuggacagacugagccagagccaccccauccugaacaugguggacaccaagaagagcagccugaacaucagcggcuacaacuucagccugggcgccgccgugaaggccggcgccugcaugcuggacggcggcaacaugcuggagaccaucaaggugaccccccagaccauggacggcauccugaagagcauccugaaggugaagaagagccugggcauguucgugagcgacacccccggcgagagaaaccccuacgagaacauccuguacaagaucugccugagcggcgacggcuggcccuacaucgccagcagaaccagcaucgugggcagagccugggagaacaccaccguggaccuggagagcgacggcaagccccagaaggugggcaccgccggcagcaacaagagccugcagagcgccggcuuccccaccggccugaccuacagccagcugaugacccugaaggacagcaugaugcagcuggaccccagcgccaagaccuggaucgacaucgagggcagacccgaggaccccguggagaucgcccuguaccagcccaugagcggcugcuacauccacuucuucagagagcccaccgaccugaagcaguucaagcaggacgccaaguacagccacggcaucgacgugaccgaccuguuccccgcccagcccggccugaccagcgccgugaucgaggcccugcccagaaacauggugcugaccugccagggcagcgacgacaucaagagacugcuggacagccagggcagaagagacaucaagcugaucgacaucgcccugagcaaggccgacagcagaagauucgagaacgccgugugggaccagugcaaggaccugugccacaugcacaccggcguggugguggagaagaagaagagaggcggcaaggaggagaucaccccccacugcgcccugauggacugcaucauguacgacgccgccgugagcggcggccugaacauccccgugcugagagccgugcugcccagagacaugguguucagaaccagcagccccaagguggugcugugaggacuagucccuguucccagagcccacuuuuuuuucuuuuuuugaaauaaaauagccugucuuucagaucucaaaggcucuuuucagagccaccaaaaaaaaaaaaaaaaaaaaaaaaaaaaaaaaaaaaaaaaaaaaaaaaaaaaaaaaaaaaaaaaagaauu

SEQ ID NO: 16798 - RNA, 1951 nt, Artificial Sequence
  mRNA product Design a-1 (hSL-A64-N5) comprising derived and/or modified sequence from LASV(LASV254-NIG-2011;Clade II)__AIT17675__NP (opt4)
aggagagucccgcagucggcguccagcggcucugcuuguucgugugugugucguugcaggccuuauucaagcuuaccaugagcgccagcaaggaggugaagagcuuccuguggacccagagccugagaagagagcugagcggcuacugcagcagcaucaagcugcagguggugaaggacgcccaggcccugcugcacggccuggacuucagcgaggugagcaacgugcagagacugaugagaaagcagaagagagacgacagcgaccugaagagacugagagaccugaaccaggccgugaacaaccugguggagcugaagagcacccagcagaagagcgugcugagagugggcacccugaccagcgacgaccugcugacccuggccgccgaccuggagaagcugaagagcaaggugaucagaaccgagagaccccugagcagcggcguguacaugggcaaccugagcacccagcagcuggagcagagaagagcccugcugaacaugaucggcauggugggcggcgcccagggcacccagcccggcagagacggcguggugagagugugggacgugaagaaccccgaccugcugaacaaccaguucggcaccaugcccagccugacccuggccugccugaccaagcagggccagguggaccugaacgacgccgugcuggcccugaccgaccugggccugaucuacaccgccaaguaccccaacagcagcgaccuggacagacugagccagagccaccccauccugaacaugguggacaccaagaagagcagccugaacaucagcggcuacaacuucagccugggcgccgccgugaaggccggcgccugcaugcuggacggcggcaacaugcuggagaccaucaaggugaccccccagaccauggacggcauccugaagagcauccugaaggugaagaagagccugggcauguucgugagcgacacccccggcgagagaaaccccuacgagaacauccuguacaagaucugccugagcggcgacggcuggcccuacaucgccagcagaaccagcaucgugggcagagccugggagaacaccaucguggaccuggagagcgacggcaagccccagaaggugggcaccgccggcagcaacaagagccugcagagcgccggcuuccccaccggccugaccuacagccagcugaugacccugaaggacagcaugaugcagcuggaccccagcgccaagaccuggaucgacaucgagggcagacccgaggaccccguggagaucgcccuguaccagcccaugagcggcugcuacauccacuucuucagagagcccaccgaccugaagcaguucaagcaggacgccaaguacagccacggcaucgacguggccgaccuguuccccgcccagcccggccugaccagcgccgugaucgaggcccugcccagaaacauggugcugaccugccagggcagcgacgacaucaagagacugcuggacagccagggcagaagagacaucaagcugaucgacaucgcccugagcaaggccgacagcagaagauucgagaacgccgugugggaccagugcaaggaccugugccacaugcacaccggcguggugguggagaagaagaagagaggcggcaaggaggagaucaccccccacugcgcccugauggacugcaucauguacgacgccgccgugagcggcggccugaacauccccgugcugagagccgugcugcccagagacaugguguucagaaccagcagccccaagguggugcugugaggacuagucccuguucccagagcccacuuuuuuuucuuuuuuugaaauaaaauagccugucuuucagaucucaaaggcucuuuucagagccaccaaaaaaaaaaaaaaaaaaaaaaaaaaaaaaaaaaaaaaaaaaaaaaaaaaaaaaaaaaaaaaaaagaauu

SEQ ID NO: 16799 - RNA, 1951 nt, Artificial Sequence
  mRNA product Design a-1 (hSL-A64-N5) comprising derived and/or modified sequence from LASV(Nig08-04;Clade II)__ADU56611__NP (opt4)
aggagagucccgcagucggcguccagcggcucugcuuguucgugugugugucguugcaggccuuauucaagcuuaccaugagcgccagcaaggaggugaagagcuuccuguggacccagagccugagaagagagcugagcggcuacugcagcaacaucaagcugcagguggugaaggacgcccaggcccugcugcacggccuggacuucagcgaggugagcaacgugcagagacugaugagaaagcagaagagagacgacggcgaccugaagagacugagagaccugaaccaggccgugaacaaccugguggagcugaagagcacccagcagaagagcgugcugagagugggcacccugaccagcgacgaccugcugacccuggccgccgaccuggagaagcugaagagcaaggugaucagaaccgagagaccccugagcagcggcguguacaugggcaaccugagcacccagcagcuggagcagagaaaggcccugcugagcaugaucggcauggugggcggcgcccagggcacccagcccggcagagacggcguggugagagugugggacgugaagaaccccgaccugcugaacaaccaguucggcaccaugcccagccugacccuggccugccugaccaagcagggccagguggaccugaacgacgccgugcuggcccugaccgaccugggccugaucuacaccgccaaguaccccaacagcagcgaccuggacagacugagccagagccaccccauccugaacaugguggacaccaagaagagcagccugaacaucagcggcuacaacuucagccugggcgccgccgugaaggccggcgccugcaugcuggacggcggcaacaugcuggagaccaucaaggugaccccccagaccauggacggcauccugaagagcauccugaaggugaagagaagccugggcauguucgugagcgacacccccggcgagagaaaccccuacgagaacauccuguacaagaucugccugagcggcgacggcuggcccuacaucgccagcagaaccagcaucgugggcagagccugggagaacaccaccguggaccuggagagcgacggcaagccccagaaggugggcaccgccggcagcaacaagagccugcagagcgccggcuuccccaccggccugaccuacagccagcugaugacccugaaggacagcaugaugcagcuggaccccagcgccaagaccuggaucgacaucgagggcagacccgaggaccccguggagaucgcccuguaccagcccaugagcggcugcuacauccacuucuucagagagcccaccgaccugaagcaguucaagcaggacgccaaguacagccacggcaucgacgugaccgaccuguucagcgcccagcccggccugaccagcgccgugaucgaggcccugcccagaaacauggugcugaccugccagggcagcgacgacaucaagaagcugcuggacagccagggcagaagagacaucaagcugaucgacaucagccugaacaaggccgacagcagaagauucgagaacgccgugugggaccagugcaaggaccugugccacaugcacaccggcguggugguggagaagaagaagagaggcggcaaggaggagaucaccccccacugcgcccugauggacugcaucauguucgacgccgccgugagcggcggccugaacauccccauccugagagccgugcugcccagagacaugguguucagaaccagcagccccaagguggugcugugaggacuagucccuguucccagagcccacuuuuuuuucuuuuuuugaaauaaaauagccugucuuucagaucucaaaggcucuuuucagagccaccaaaaaaaaaaaaaaaaaaaaaaaaaaaaaaaaaaaaaaaaaaaaaaaaaaaaaaaaaaaaaaaaagaauu

SEQ ID NO: 16800 - RNA, 1954 nt, Artificial Sequence
  mRNA product Design a-1 (hSL-A64-N5) comprising derived and/or modified sequence from LASV(GA391;Clade III)__AAA46284__NP (opt4)
aggagagucccgcagucggcguccagcggcucugcuuguucgugugugugucguugcaggccuuauucaagcuuaccaugagcgccagcaaggaggugagaagcugccuguggacccagagccugagaagagagcugagcggcuacugcagcaacaucaagcugcagguggugaaggacgcccaggcccugcugcacggccuggacuucagcgaggugagcaacgugcagagacugaugagaaagcagaagagagacgacggcgaccugaagagacugagagaccugaaccaggccgugaacaaccugguggagcugaagagcacccagcagaagagcgugcugagagugggcacccugagcagcgacgaccugcugauccuggccgccgaccuggagaagcugaagagcaaggugaccagaaccgagagaccccugagcagcggcguguacaugggcaaccugagcagccagcagcuggaccagagaagagcccugcugaacaugaucggcaugaccggcgugagcggcggcggcaagggcgccagcaacggcaucgugagagugugggacgugaagaacgccgagcugcugaacaaccaguucggcaccaugcccagccugacccuggccugccugaccaagcagggccagguggaccugaacgacgccgugcaggcccugaccgaccugggccugaucuacaccgccaaguaccccaacagcagcgaccuggacagacugagccagagccaccccauccugaacaugaucgacaccaagaagagcagccugaacaucagcggcuacaacuucagccugggcgccgccgugaaggccggcgccugcaugcuggacggcggcaacaugcuggagaccaucaaggugagcccccagaccauggacggcauccugaagagcauccugaaggugaagaagagccugggcauguucgugagcgacacccccggcgagagaaaccccuacgagaacauccuguacaagaucugccugagcggcgacggcuggagcuacaucgccagcagaaccagcaucgugggcagagccugggagaacaccgugguggaccuggagcaggacaacaagccccagaagaucggcaacggcggcagcaacaagagccugcagagcgccggcuucgccgccggccugaucuacagccagcugaugacccugaaggacuucaagugcuucaaccugauccccaacgccaagaccuggauggacaucgagggcagacccgaggaccccguggagaucgcccuguaccagcccagcagcggcugcuacgugcacuucuucagagagcccaccgaccugaagcaguucaagcaggacgccaaguacagccacggcagagacgugaccgaccuguucgccgcccagcccggccugaccagcgccgugaucgaggcccugcccagaaacauggugaucaccugccagggcagcgaggacaucagaaagcugcuggagagccagggcagaagagacaucaagcugaucgacaucacccugagcaaggccgacagcagaaaguucgagaacgccgugugggaccaguucaaggaccugugccacaugcacaccggcguggugguggagaagaagaagagaggcggcaaggaggagaucaccccccacugcgcccugauggacugcaucauguucgacgccgccgugagcggcggccuggacgccaaggugcugagaguggugcugcccagagacaugguguucagaaccagcacccccaagguggugcugugaggacuagucccuguucccagagcccacuuuuuuuucuuuuuuugaaauaaaauagccugucuuucagaucucaaaggcucuuuucagagccaccaaaaaaaaaaaaaaaaaaaaaaaaaaaaaaaaaaaaaaaaaaaaaaaaaaaaaaaaaaaaaaaaagaauu

SEQ ID NO: 16801 - RNA, 1951 nt, Artificial Sequence
  mRNA product Design a-1 (hSL-A64-N5) comprising derived and/or modified sequence from LASV(Nig08-A19;Clade III)__ADU56619__NP (opt4)
aggagagucccgcagucggcguccagcggcucugcuuguucgugugugugucguugcaggccuuauucaagcuuaccaugagcgccagcaaggaggugaagagcuuccuguggacccagagccugagaagagagcugagcggcuacugcagcaacaucaagcugcagguggugaaggacgcccaggcccugcugcacggccuggacuucagcgaggugagcaacgugcagagacugaugagaaagcagaagagagacgacggcgaccugaagagacugagagaccugaaccaggccgugaacaaccugguggagcugaagagcacccagcagaagagcgugcugagagugggcacccugagcagcgacgaccugcuggugcuggccgccgaccuggagaagcugaagagcaagguggugagaaccgagagaccccugagcagcggcaucuacaugggcaaccugagcagccagcagcuggaccagagaaaggcccugcugaacaugaucggcaugaccggcggcaacggcggcagaaacaccaccagcgacggcaucgugagagugugggacgugaagaacgccgagcugcugaacaaccaguucggcaccaugcccagccugacccuggccugccugaccaagcagggccagguggaccugaacgacgccgugcaggcccugaccgaccugggccugaucuacaccgccaaguaccccaacagcagcgaccuggacagacuggcccagagccaccccauccugaacaugaucgacaccaagaagagcagccugaacaucagcggcuacaacuucagccugggcgccgccgugaaggccggcgccugcaugcuggacggcggcaacaugcuggagaccaucaaggugagcccccagaccauggacggcauccugaagagcauccugaaggugaagagaagccugggcauguucaucagcgacacccccggcgagagaaaccccuacgagaacauccuguacaagaucugccugagcggcgacggcuggcccuacaucgccagcagaaccagcaucgugggcagagccugggagaacaccgugguggaccuggagagcgacaacaagccccagaagaccggcaacggcggcagcaacaagagccugcagagcgccggcuucgccgccggccugaccuacagccagcugaugacccugaaggacagcaugcugcagcuggaccccaacgccaagaccuggauggacaucgagggcagacccgaggaccccguggagaucgcccuguaccagcccagcagcggcugcuacauccacuucuucagagagcccaccgaccugaagcaguucaagcaggacgccaaguacagccacggcaucgacgugaccgaccuguucgccgcccagcccggccugaccagcgccgugaucgaggcccugcccagaaacauggugaucaccugccagggcagcgaggacaucagaaagcugcuggagagccagggcagaagagacaucaagcugaucgacaucagccugagcaagguggacagcagaaaguucgagaacgccgugugggaccaguucaaggaccugugccacaugcacaccggcaucgugguggagaagaagaagagaggcggcaaggaggagaucaccccccacugcgcccugauggacugcaucauguucgacgccgccgugagcggcggcguggacgccaaggugcugagagccgugcugcccagagacaugguguucagaaccagcacccccaagguggugcugugaggacuagucccuguucccagagcccacuuuuuuuucuuuuuuugaaauaaaauagccugucuuucagaucucaaaggcucuuuucagagccaccaaaaaaaaaaaaaaaaaaaaaaaaaaaaaaaaaaaaaaaaaaaaaaaaaaaaaaaaaaaaaaaaagaauu

SEQ ID NO: 16802 - RNA, 1951 nt, Artificial Sequence
  mRNA product Design a-1 (hSL-A64-N5) comprising derived and/or modified sequence from LASV(G1180-SLE-2010;Clade IV)__AIT17169__NP (opt4)
aggagagucccgcagucggcguccagcggcucugcuuguucgugugugugucguugcaggccuuauucaagcuuaccaugagcgccagcaaggagaucaagagcuuccuguggacccagagccugagaagagagcugagcggcuacugcagcaacaucaagcugcagguggugaaggacgcccaggcccugcugcacggccuggacuucagcgaggugagcaacgugcagagacugaugagaaaggagagaagagacgacaacgaccugaagagacugagagaccugaaccaggccgugaacaaccugguggagcugaagagcacccagcagaagagcauccugagagugggcacccugaccagcgacgaccugcugauccuggccgccgaccuggagaagcugaagagcaaggugaucagaaccgagagaccccugagcgccggcguguacaugggcaaccugagcagccagcagcuggaccagagaagagcccugcugagcaugaucggcaugagcagcggcaaccagagagcccaggccggcagagacggcguggugagagugugggacgugaagaacguggagcugcugaacaaccaguucggcaccaugcccagccugacccuggccugccugaccaagcagggccagguggaccugaacgacgccgugcaggcccugaccgaccugggccugaucuacaccgccaaguaccccaacaccagcgaccuggacagacugacccagagccaccccauccugaacaugaucgacaccaagaagagcagccugaacaucagcggcuacaacuucagccugggcgccgccgugaaggccggcgccugcaugcuggacggcggcaacaugcuggagaccaucaaggugagcccccagaccauggacggcauccugaagagcauccugaaggugaagaaggcccugggcauguucaucagcgacacccccggcgagagaaaccccuacgagaacauccuguacaagaucugccugagcggcgacggcuggcccuacaucgccagcagaaccagcaucaccggcagagccugggagaacaccgugguggaccuggagagcgacggcaagccccagaaggccggcagcaacaacagcaacaagagccugcagagcgugggcuucaccgccggccugaccuacagccagcugaugacccugaaggacgccaugcugcagcuggaccccaacgccaagaccuggauggacaucgagggcagacccgaggaccccguggagaucgcccuguaccagcccagcagcggcugcuacauccacuucuucagagagcccaccgaccugaagcaguucaagcaggacgccaaguacagccacggcaucgacgugaccgaccuguucgccgcccagcccggccugaccagcgccgugaucgacgcccugcccagaaacauggugaucaccugccagggcagcgacgacaucagaaagcugcuggagagccagggcagaaaggacaucaagcugaucgacaucgcccugagcaagaccgacagcagaaaguacgagaacgccgugugggaccaguacaaggaccugugccacaugcacaccggcguggugguggagaagaagaagagaggcggcaaggaggagaucaccccccacugcgcccugauggacugcaucauguucgacgccgccgugagcggcggccugaacaccagcgugcugagagccgugcugcccagagacaugguguucagaaccagcacccccagaguggugcugugaggacuagucccuguucccagagcccacuuuuuuuucuuuuuuugaaauaaaauagccugucuuucagaucucaaaggcucuuuucagagccaccaaaaaaaaaaaaaaaaaaaaaaaaaaaaaaaaaaaaaaaaaaaaaaaaaaaaaaaaaaaaaaaaagaauu

SEQ ID NO: 16803 - RNA, 1951 nt, Artificial Sequence
  mRNA product Design a-1 (hSL-A64-N5) comprising derived and/or modified sequence from LASV(G1442-SLE-2011;Clade IV)__AIT17181__NP (opt4)
aggagagucccgcagucggcguccagcggcucugcuuguucgugugugugucguugcaggccuuauucaagcuuaccaugagcgccagcaaggaggugaagagcuuccuguggacccagagccugagaagagagcugagcggcuacugcagcaacaucaagcugcagguggugaaggacgcccaggcccugcugcacggccuggacuucagcgaggugagcaacgugcagagacugaugagaaagcagagaagagacgacaacgaccugaagagacugagagaccugaaccaggccgugaacaaccugguggagcugaagagcacccagcagaagagcgugcugagagugggcacccugaccagcgacgaccugcuggugcuggccgccgaccuggagaagcugaagagcaaggugaucagaaccgagagaccccugagcgccggcguguacaugggcaaccugagcagccagcagcuggaccagagaagagcccugcugaacaugaucggcaugagcggcggcauccagggcaccagaaccggcagagacggcguggugagagugugggacgugaagaacgccgaccugcugaacaaccaguucggcaccaugcccagccugacccuggccugccugaccaagcagggccagguggaccugaacgacguggugcaggcccugaccgaccugggccugaucuacaccgccaaguaccccaacgccagcgaccuggacagacugacccagagccaccccauccugaacaugaucgacaccaagaagagcagccugaacaucagcggcuacaacuucagccugggcgccgccgugaaggccggcgccugcaugcuggacggcggcaacaugcuggagaccaucaaggugagcccccagaccauggacggcauccugaagagcauccugaaggugaagaagacccugggcauguucaucagcgacacccccggcgagagaaaccccuacgagaacauccuguacaagaucugccugagcggcgacggcuggcccuacaucgccagcagaaccagcaucaccggcagagccugggagaacaccgugguggaccuggagagcgacggcaagccccagaaggccggcagcaacaacagcaacaagagccugcagagcgccggcuucgccgccggccugaccuacagccagcugaugacccugaaggacgccaugcugcagcuggaccccaacgccaagaccuggauggacaucgagggcagacccgaggaccccguggagaucgcccuguaccagcccagcagcggcugcuacauccacuucuucagagagcccaccgaccugaagcaguucaagcaggacgccaaguacagccacggcaucgacgugaccgaccuguucgccgcccagcccggccugaccagcgccgugaucgaggcccugcccagaaacauggugaucaccugccagggcagcgacgacaucaagaagcugcuggagagccagggcagaaaggacaucaagcugaucgacaucgcccugagcaagaccgacagcagaaaguacgagaacgccgugugggaccaguacaaggaccugugccacaugcacaccggcguggugguggagaagaagaagagaggcggcaaggaggagaucaccccccacugcgcccugauggacugcaucauguucgacgccgccgugagcggcggccugaacacccuggugcugagagccgugcugcccagagacaugguguucagaaccagcacccccagaguggugcugugaggacuagucccuguucccagagcccacuuuuuuuucuuuuuuugaaauaaaauagccugucuuucagaucucaaaggcucuuuucagagccaccaaaaaaaaaaaaaaaaaaaaaaaaaaaaaaaaaaaaaaaaaaaaaaaaaaaaaaaaaaaaaaaaagaauu

SEQ ID NO: 16804 - RNA, 1951 nt, Artificial Sequence
  mRNA product Design a-1 (hSL-A64-N5) comprising derived and/or modified sequence from LASV(G3010-SLE-2013;Clade IV)__AIT17345__NP (opt4)
aggagagucccgcagucggcguccagcggcucugcuuguucgugugugugucguugcaggccuuauucaagcuuaccaugagcgccagcaaggagaucaagagcuuccuguggacccagagccugagaagagagcugagcggcuacugcagcaacaucaagcugcagguggugaaggacgcccaggcccugcugcacggccuggacuucagcgaggugagcaacgugcagagacugaugagaaaggagagaagagacgacaacgaccugaagagacugagagaccugaaccaggccgugaacaaccugguggagcugaagagcacccagcagaagagcauccugagagugggcacccugaccagcgacgaccugcugauccuggccgccgaccuggagaagcugaagagcaaggugaccagaaccgagagaccccugagcgccggcguguacaugggcaaccugagcagccagcagcuggaccagagaagagcccugcugagcaugaucggcaugagcagcggcgugcagggcgccagagccggcagagacggcguggugagagugugggacgugaagaacgccgagcugcugaacaaccaguucggcaccaugcccagccugacccuggccugccugaccaagcagggccagguggaccugaacgacguggugcaggcccugaccgaccugggccugaucuacaccgccaaguaccccaacaccagcgaccuggacagacugacccagagccaccccauccugaacaugaucgacaccaagaagagcagccugaacaucagcggcuacaacuucagccugggcgccgccgugaaggccggcgccugcaugcuggacggcggcaacaugcuggagaccaucaaggugagcccccagaccauggacggcauccugaagagcauccugaaggugaagaaggcccugggcauguucaucagcgagacccccggcgagagaaaccccuacgagaacauccuguacaagaucugccugagcggcgacggcuggcccuacaucgccagcagaaccagcaucaccggcagagccugggagaacaccgugguggaccuggagagcgacggcaagccccagaaggccggcagcaacaacagcaacaagagccugcagagcgccggcuucaccgccggccugaccuacagccagcugaugacccugaaggacgccaugcugcagcuggaccccaacgccaagaccuggauggacaucgagggcagacccgaggaccccguggagguggcccuguaccagcccagcagcggcugcuacauccacuucuucagagagcccaccgaccugaagcaguucaagcaggacgccaaguacagccacggcaucgacgugaccgaccuguucgccgcccagcccggccugaccagcgccgugaucgacgcccugcccagaaacauggugaucaccugccagggcagcgacgacaucaagaagcugcuggagagccagggcagaaaggacaucaagcugaucgacaucgcccugagcaagaccgacagcagaaaguacgagaacgccgugugggaccaguacaaggaccugugccacaugcacaccggcguggugguggagaagaagaagagaggcggcaaggaggagaucaccccccacugcgcccugauggacugcaucauguucgacgccgccgugagcggcggccugaacaccagcgugcugagagccgugcugcccagagacaugguguucagaaccagcacccccagaguggugcugugaggacuagucccuguucccagagcccacuuuuuuuucuuuuuuugaaauaaaauagccugucuuucagaucucaaaggcucuuuucagagccaccaaaaaaaaaaaaaaaaaaaaaaaaaaaaaaaaaaaaaaaaaaaaaaaaaaaaaaaaaaaaaaaaagaauu

SEQ ID NO: 16805 - RNA, 1951 nt, Artificial Sequence
  mRNA product Design a-1 (hSL-A64-N5) comprising derived and/or modified sequence from LASV(G502-SLE-2009;Clade IV)__AIT17127__NP (opt4)
aggagagucccgcagucggcguccagcggcucugcuuguucgugugugugucguugcaggccuuauucaagcuuaccaugagcgccagcaaggagaucaagagcuuccuguggacccagagccugagaagagagcugagcggcuacugcagcaacaucaagcugcagguggugaaggacgcccaggcccugcugcacggccuggacuucagcgaggugagcaacgugcagagacugaugagaaaggagagaagagacgacaacgaccugaagagacugagagaccugaaccaggccgugaacaaccugguggagcugaagagcacccagcagaagagcauccugagagugggcacccugaccagcgacgaccugcugauccuggccgccgaccuggagaagcugaagagcaaggugaucagaaccgagagaccccugagcgccggcguguacaugggcaaccugagcagccagcagcuggaccagagaagagcccugcugagcaugaucggcaugagcggcggcaaccagggcgugagagccggcaaggacggcguggugagagugugggacgugaagaacgccgagcugcugaacaaccaguucggcaccaugcccagccugacccuggccugccugaccaagcagggccagguggaccugaacgacgccgugcaggcccugaccgaccugggccugaucuacaccgccaaguaccccaacaccagcgaccuggacagacugacccagagccaccccauccugaacaugaucgacaccaagaagagcagccugaacaucagcggcuacaacuucagccugggcgccgccgugaaggccggcgccugcaugcuggacggcggcaacaugcuggagaccaucaaggugagcccccagaccauggacggcauccugaagagcauccugaaggugaagaaggcccugggcauguucaucagcgacacccccggcgagagaaaccccuacgagaacauccuguacaagaucugccugagcggcgacggcuggcccuacaucgccagcagaaccagcaucaccggcagagccugggagaacaccgugguggaccuggagagcgacggcaagccccagaaggccggcagcaacaacagcaacaagagccugcagagcgccggcuucaccgccggccugaccuacagccagcugaugacccugaaggacgccaugcugcagcuggaccccaacaccaagaccuggauggacaucgagggcagacccgaggaccccguggagaucgcccuguaccagcccagcagcggcugcuacauccacuucuucagagagcccaccgaccugaagcaguucaagcaggacgccaaguacagccacggcaucgacgugaccgaccuguucgccgcccagcccggccugaccagcgccgugaucgacgcccugcccagaaacauggugaucaccugccagggcagcgacgacaucagaaagcugcuggagagccagggcagaaaggacaucaagcugaucgacaucgcccugaacaagaccgacagcagaaaguacgagaacgccgugugggaccaguacaaggaccugugccacaugcacaccggcguggugguggagaagaagaagagaggcggcaaggaggagaucaccccccacugcgcccugauggacugcaucauguucgacgccgccgugagcggcggccugaacaccagcgugcugagagccgugcugcccagagacaugguguucagaaccagcacccccagaguggugcugugaggacuagucccuguucccagagcccacuuuuuuuucuuuuuuugaaauaaaauagccugucuuucagaucucaaaggcucuuuucagagccaccaaaaaaaaaaaaaaaaaaaaaaaaaaaaaaaaaaaaaaaaaaaaaaaaaaaaaaaaaaaaaaaaagaauu

SEQ ID NO: 16806 - RNA, 1951 nt, Artificial Sequence
  mRNA product Design a-1 (hSL-A64-N5) comprising derived and/or modified sequence from LASV(G733-SLE-2010;Clade IV)__AIT17155__NP (opt4)
aggagagucccgcagucggcguccagcggcucugcuuguucgugugugugucguugcaggccuuauucaagcuuaccaugagcgccagcaaggagaucaagagcuuccuguggacccagagccugagaagagagcugagcggcuacugcagcaacaucaagcugcagguggugaaggacgcccaggcccugcugcacggccuggacuucagcgaggugagcaacgugcagagacugaugagaaaggagagaagagacgacaacgaccugaagagacugagagaccugaaccaggccgugaacaaccugguggagcugaagagcacccagcagaagagcgugcugagagugggcacccugaccagcgacgagcugcuggugcuggccgccgaccuggagaagcugaagagcaaggugaucagaaccgagagaccccugagcgccggcguguacaugggcaaccugagcagccagcagcuggaccagagaagagcccugcugagcaugaucggcaugagcggcggcaaccagggcgccagaaccggcagagacggcguggugagagugugggacgugaagaacgccgagcugcugaacaaccaguucggcaccaugcccagccugacccuggccugccugaccaagcagggccagguggaccugaacgacgccgugcaggcccugaccgaccugggccugaucuacaccgccaaguaccccaacaccagcgaccuggacagacugacccagagccaccccauccugaacaugaucgacaccaagaagagcagccugaacaucagcggcuacaacuucagccugggcgccgccgugaaggccggcgccugcaugcuggacggcggcaacaugcuggagaccaucaaggugagcccccagaccauggacggcauccugaagagcauccugaaggugaagaaggcccugggcauguucaucagcgacacccccggcgagagaaaccccuacgagaacauccuguacaagaucugccugagcggcgacggcuggcccuacaucgccagcagaaccagcaucaccggcagagccugggagaacaccgugguggaccuggagagcgacggcaagccccagaaggccggcagcaacaacagcaacaagagccugcagagcgccggcuucaccgccggccugaccuacagccagcugaugacccugaaggacgccaugcugcagcuggaccccaacgccaagaccuggauggacaucgagggcagacccgaggaccccguggagaucgcccuguaccagcccagcagcggcugcuacauccacuucuucagagagcccaccgaccugaagcaguucaagcaggacgccaaguacagccacggcaucgacgugaccgaccuguucgccgcccagcccggccugaccagcgccgugaucgacgcccugcccagaaacauggugaucaccugccagggcagcgacgacaucagaaagcugcuggagagccagggcagaaaggacaucaagcugaucgacaucgcccugagcaagaucgacagcagaaaguacgagaacgccgugugggaccaguacaaggaccugugccacaugcacaccggcguggugguggagaagaagaagagaggcggcaaggaggagaucaccccccacugcgcccugauggacugcaucauguucgacgccgccgugagcggcggccugaacagccuggugcugagagccgugcugcccagagacaugguguucagaaccagcacccccagaguggugcugugaggacuagucccuguucccagagcccacuuuuuuuucuuuuuuugaaauaaaauagccugucuuucagaucucaaaggcucuuuucagagccaccaaaaaaaaaaaaaaaaaaaaaaaaaaaaaaaaaaaaaaaaaaaaaaaaaaaaaaaaaaaaaaaaagaauu

SEQ ID NO: 16807 - RNA, 1951 nt, Artificial Sequence
  mRNA product Design a-1 (hSL-A64-N5) comprising derived and/or modified sequence from MOPV/LASV reassortant(IGS-1;Clade IV)__AFY05578__NP (opt4)
aggagagucccgcagucggcguccagcggcucugcuuguucgugugugugucguugcaggccuuauucaagcuuaccaugagcgccagcaaggagaucaagagcuuccuguggacccagagccugagaagagagcugagcggcuacugcagcaacaucaagcugcagguggugaaggacgcccaggcccugcugcacggccuggacuucagcgaggugagcaacgugcagagacugaugagaaaggagagaagagacgacaacgaccugaagagacugagagaccugaaccaggccgugaacaaccugguggagcugaagagcacccagcagaagagcauccugagagugggcacccugaccagcgacgaccugcugauccuggccgccgaccuggagaagcugagaagcaaggugaucagaaccgagagaccccugagcgccggcguguacaugggcaaccugagcagccagcagcuggaccagagaagagcccugcugaacaugaucggcaugagcggcggcaaccagggcgccagagccggcagagacggcguggugagagugugggacgugaagaacgccgagcugcugagcaaccaguucggcaccaugcccagccugacccuggccugccugaccaagcagggccagguggaccugaacgacgccgugcaggcccugaccgaccugggccugaucuacaccgccaaguaccccaacaccagcgaccuggacagacugacccagagccaccccauccugaacaugaucgacaccaagaagagcagccugaacaucagcggcuacaacuucagccugggcgccgccgugaaggccggcgccugcaugcuggacggcggcaacaugcuggagaccaucaaggugagcccccagaccauggacggcauccugaagagcauccugaaggugaagaaggcccugggcauguucaucagcgacacccccggcgagagaaaccccuacgagaacauccuguacaagaucugccugagcggcgacggcuggcccuacaucgccagcagaaccagcaucaccggcagagccugggagaacaccgugguggaccuggagagcgacggcaagccccagaaggccgacagcaacaacagcagcaagagccugcagagcgccggcuucaccgccggccugaccuacagccagcugaugacccugaaggacgccaugcugcagcuggaccccaacgccaagaccuggauggacaucgagggcagacccgaggaccccguggagaucgcccuguaccagcccagcagcggcugcuacauccacuucuucagagagcccaccgaccugaagcaguucaagcaggacgccaaguacagccacggcaucgacgugaccgaccuguucgccacccagcccggccugaccagcgccgugaucgacgcccugcccagaaacauggugaucaccugccagggcagcgacgacaucagaaagcugcuggagagccagggcagaaaggacaucaagcugaucgacaucgaccugagcaagaccgacagcagaaaguacgagaacgccgugugggaccaguacaaggaccugugccacaugcacaccggcguggugguggagaagaagaagagaggcggcaaggaggagaucaccccccacugcgcccugauggacugcaucauguucgacgccgccgugagcggcggccugaacaccagcgugcugagagccgugcugcccagagacaugguguucagaaccagcacccccagaguggugcugugaggacuagucccuguucccagagcccacuuuuuuuucuuuuuuugaaauaaaauagccugucuuucagaucucaaaggcucuuuucagagccaccaaaaaaaaaaaaaaaaaaaaaaaaaaaaaaaaaaaaaaaaaaaaaaaaaaaaaaaaaaaaaaaaagaauu

SEQ ID NO: 16808 - RNA, 1951 nt, Artificial Sequence
  mRNA product Design a-1 (hSL-A64-N5) comprising derived and/or modified sequence from LASV(LM765-SLE-2012;Clade IV)__AIT17815__NP (opt4)
aggagagucccgcagucggcguccagcggcucugcuuguucgugugugugucguugcaggccuuauucaagcuuaccaugagcgccagcaaggagaucaagagcuuccuguggacccagagccugagaagagagcugagcggcuacugcagcaacaucaagcugcagguggugaaggacgcccaggcccugcugcacggccuggacuucagcgaggugagcaacgugcagagacugaugagaaaggagagaagagacgacaacgaccugaagagacugagagaccugaaccaggccgugaacaaccugguggagcugaagagcacccagcagaagagcauccugagagugggcacccugaccagcgacgaccugcugauccuggccgccgaccuggagaagcugaagagcaaggugaccagaaccgagagaccccugagcgccggcguguacaugggcaaccugagcagccagcagcuggaccagagaagagcccugcuggacaugaucggcaugagcggcagcaaccagggcgccagagccggcagagacggcguggugagagugugggacgugaagaacgccgagcugcugaacaaccaguucggcaccaugcccagccugacccuggccugccugaccaagcagggccagguggaccugaacgacgccgugcaggcccugaccgaccugggccugaucuacaccgccaaguaccccaacaccagcgaccuggacagacugacccagagccaccccauccugaacaugaucgacaccaagaagagcagccugaacaucagcggcuacaacuucagccugggcgccgccgugaaggccggcgccugcaugcuggacggcggcaacaugcuggagaccaucaaggugagcccccagaccauggacggcauccugaagagcauccugaaggugaagaaggcccugggcauguucaucagcgacgcccccggcgagagaaaccccuacgagaacauccuguacaagaucugccugagcggcgacggcuggcccuacaucgccagcagaaccagcaucaccggcagagccugggagaacaccgugguggaccuggagagcgacggcaagccccagaaggccggcagcaacggcagcaacaagagccugcagagcgccggcuucaccgccggccugaccuacagccagcugaugacccugaaggacgccaugcugcagcuggaccccaacgccaagaccuggauggacaucgagggcagacccgaggaccccguggagaucgcccuguaccagcccagcagcggcugcuacauccacuucuucagagagcccaccgaccugaagcaguucaagcaggacgccaaguacagccacggcaucgacgugaccgaccuguucgccgcccagcccggccugaccagcgccgugaucgacgcccugcccagaaacauggugaucaccugccagggcagcgacgacaucagaaagcuguucgagagccagggcagaaaggacaucaagcugaucgacaucgcccugagcaagaccgacagcagaaaguacgagaacgccgugugggaccaguacaaggaccugugccacaugcacaccggcaucgugguggagaagaagaagagaggcggcaaggaggagaucaccccccacugcgcccugauggacugcaucauguucgacgccgccgugagcggcggccugaacaccagcgugcugagagccgugcugcccagagacaugguguucagaaccagcacccccagaguggugcugugaggacuagucccuguucccagagcccacuuuuuuuucuuuuuuugaaauaaaauagccugucuuucagaucucaaaggcucuuuucagagccaccaaaaaaaaaaaaaaaaaaaaaaaaaaaaaaaaaaaaaaaaaaaaaaaaaaaaaaaaaaaaaaaaagaauu

SEQ ID NO: 16809 - RNA, 1951 nt, Artificial Sequence
  mRNA product Design a-1 (hSL-A64-N5) comprising derived and/or modified sequence from LASV(LM776-SLE-2012;Clade IV)__AIT17825__NP (opt4)
aggagagucccgcagucggcguccagcggcucugcuuguucgugugugugucguugcaggccuuauucaagcuuaccaugagcgccagcaaggagaucaagagcuuccuguggacccagagccugagaagagagcugagcagcuacugcagcaacaucaagcugcagguggugaaggacgcccaggcccugcugcacggccuggacuucagcgaggugagcaacgugcagagacugaugagaaaggagagaagagacgacaacgaccugaagagacugagagaccugaaccaggccgugaacaaccugguggagcugaagagcacccagcagaagagcauccugagagugggcacccugaccagcgacgaccugcugauccuggccgccgaccuggagaagcugaagagcaaggugaccagaaccgagagaccccugagcgccggcguguacaugggcaaccugagcagccagcagcuggaccagagaagagcccugcugagcaugaucggcaugagcggcagcaaccagggcgccagagccggcagagacggcguggugagagugugggacgugaagaacgccgagcugcugaacaaccaguucggcaccaugcccagccugacccuggccugccugaccaagcagggccagguggaccugaacgacgccgugcaggcccugaccgaccugggccugaucuacaccgccaaguaccccaacaccagcgaccuggacagacugacccagagccaccccauccugaacaugaucgacaccaagaagagcagccugaacaucagcggcuacaacuucagccugggcgccgccgugaaggccggcgccugcaugcuggacggcggcaacaugcuggagaccaucaaggugagcccccagaccauggacggcauccugaagagcauccugaaggugaagaaggcccugggcauguucaucagcgacacccccggcgagagaaaccccuacgagaacauccuguacaagaucugccugagcggcgacggcuggcccuacaucgccagcagaaccagcaucaccggcagagccugggagaacaccgugguggaccuggagagcgacggcaagccccagaaggccggcagcaacaacagcaacaagagccugcagagcgccggcuucaccgccggccugaccuacagccagcugaugacccugaaggacgccaugcugcagcuggaccccaacgccaagaccuggauggacaucgagggcagacccgaggaccccguggagguggcccuguaccagcccagcagcggcugcuacauccacuucuucagagagcccaccgaccugaagcaguucaagcaggacgccaaguacagccacggcaucgacgugaccgaccuguucgccgcccagcccggccugaccagcgccgugaucgacgcccugcccagaaacauggugaucaccugccagggcagcgacgacaucagaaagcugcuggagagccagggcagaaaggacaucaagcugaucgacaucgcccugagcaagaccgacagcagaaaguacgagaacgccgugugggaccaguacaaggaccugugccacaugcacaccggcguggugguggagaagaagaagagaggcggcaaggaggagaucaccccccacugcgcccugauggacugcaucauguucgacgccgccgugagcggcggccugaacaccagcgugcugagagccgugcugcccagagacaugguguucagaaccagcacccccagaguggugcugugaggacuagucccuguucccagagcccacuuuuuuuucuuuuuuugaaauaaaauagccugucuuucagaucucaaaggcucuuuucagagccaccaaaaaaaaaaaaaaaaaaaaaaaaaaaaaaaaaaaaaaaaaaaaaaaaaaaaaaaaaaaaaaaaagaauu

SEQ ID NO: 16810 - RNA, 1951 nt, Artificial Sequence
  mRNA product Design a-1 (hSL-A64-N5) comprising derived and/or modified sequence from LASV(Mad39;Clade IV)__ANH09723__NP (opt4)
aggagagucccgcagucggcguccagcggcucugcuuguucgugugugugucguugcaggccuuauucaagcuuaccaugagcgccagcaaggagaucaagagcuuccuguggacccagagccugagaagagagcugagcggcuacugcagcaacaucaagcugcagguggugaaggacgcccaggcccugcugcacggccuggacuucagcgaggugagcaacgugcagagacugaugagaaagcagagaagagacgacaacgaccugaagagacugagagaccugaaccaggccgugaacaaccugguggagcugaagagcacccagcagaagagcgugcugagagugggcacccugaccagcgacgaccugcugacccuggccgccgaccuggagaagcugaagagcaaggugaccagaaccgagagaccccugaccgccggcguguacaugggcaaccugagcagccagcagcuggaccagagaagagcccugcugaacaugaucggcaugagcggcggcaaccagggcgccagaaccggcagagacggcguggugagagugugggacgugaagaacgccgagcugcugaacaaccaguucggcaccaugcccagccugacccuggccugccugaccaagcagggccagguggaccugaacgacguggugcaggcccugaccgaccugggccugaucuacaccgccaaguaccccaacaccagcgaccuggacagacugacccagagccaccccauccugaacaugaucgacaccaacaagagcagccugaacaucagcggcuacaacuucagccugggcgccgccgugaaggccggcgccugcaugcuggacggcggcaacaugcuggagaccaucaaggugagcccccagaccauggacggcauccugaagagcauccugaaggugaagaagagccugggcauguucaucagcgacacccccggcgagagaaaccccuacgagaacauccuguacaagaucugccugagcggcgacggcuggcccuacaucgccagcagaaccagcaucaccggcagagccugggagaacaccgugguggaccuggagagcggcggcaagccccagaaggccggcagcaacaacagcaacaagagccugcagagcgccggcuucgccgccggccugaccuacagccagcugaugacccugaaggacgccaugcugcagcuggaccccaacgccaagaccuggauggacaucgagggcagacccgaggaccccguggagaucgcccuguaccagcccaucagcggcugcuacauccacuucuucagagagcccaccgaccugaagcaguucaagcaggacgccaaguacagccacggcaucgacgugaccgaccuguucgccgcccagcccggccugaccagcgccgugaucgaggcccugcccagaaacauggugaucaccugccagggcagcgacgacaucagaaagcuguucgagagccagggcagaaaggacaucaagcugaucgacaucgcccugagcaagaccgacagcagaaaguacgagaacgccgugugggaccaguacaaggaccugugccacaugcacaccggcguggugguggagaagaagaagaagggcggcaaggaggagaucaccccccacugcgcccugauggacugcaucauguucgacgccgccgugagcggcggccugaacacccuggugcugagagccgugcugcccagagacaugguguucagaaccagcacccccaagguggugcugugaggacuagucccuguucccagagcccacuuuuuuuucuuuuuuugaaauaaaauagccugucuuucagaucucaaaggcucuuuucagagccaccaaaaaaaaaaaaaaaaaaaaaaaaaaaaaaaaaaaaaaaaaaaaaaaaaaaaaaaaaaaaaaaaagaauu

SEQ ID NO: 16811 - RNA, 1951 nt, Artificial Sequence
  mRNA product Design a-1 (hSL-A64-N5) comprising derived and/or modified sequence from LASV(Z0947-SLE-2011;Clade IV)__AIT17841__NP (opt4)
aggagagucccgcagucggcguccagcggcucugcuuguucgugugugugucguugcaggccuuauucaagcuuaccaugagcgccagcaaggagaucaagagcuuccuguggacccagagccugagaagagagcugagcggcuacugcagcaacaucaagcugcagguggugaaggacgcccaggcccugcugcacggccuggacuucagcgaggugagcaacgugcagagacugaugagaaaggagagaagagacgacaacgaccugaagagacugagagaccugaaccaggccgugaacaaccugguggagcugaagagcacccagcagaagagcauccugagagugggcacccugaccagcgacgaccugcugauccuggccgccgaccuggagaagcugaagagcaaggugaccagaaccgagagaccccugagcgccggcguguacaugggcaaccugagcagccagcagcuggaccagagaagagcccugcugaacaugaucggcaugagcggcagcaaccagggcgccagaaccggcagagacggcguggugagagugugggacgugaagaacgccgagcugcugaacaaccaguucggcaccaugcccagccugacccuggccugccugaccaagcagggccagguggaccugaacgacgccgugcaggcccugaccgaccugggccugaucuacaccgccaaguaccccaacaccagcgaccuggacagacugacccagagccaccccauccugaacaugaucgacaccaagaagagcagccugaacaucagcggcuacaacuucagccugggcgccgccgugaaggccggcgccugcaugcuggacggcggcaacaugcuggagaccaucaaggugagcccccagaccauggacggcauccugaagagcauccugaaggugaagaaggcccugggcauguucaucagcgacgcccccggcgagagaaaccccuacgagaacauccuguacaagaucugccugagcggcgacggcuggcccuacaucgccagcagaaccagcaucaccggcagagccugggagaacaccgugguggaccuggagagcgacggcaagccccagaaggccggcagcaacggcagcaacaagagccugcagagcgccggcuucaccgccggccugaccuacagccagcugaugacccugaaggacgccaugcugcagcuggaccccaacgccaagaccuggauggacaucgagggcagacccgaggaccccguggagaucgcccuguaccagcccagcagcggcugcuacauccacuucuucagagagcccaccgaccugaagcaguucaagcaggacgccaaguacagccacggcaucgacgugaccgaccuguucgccgcccagcccggccugaccagcgccgugaucgacgcccugcccagaaacauggugaucaccugccagggcagcgacgacaucagaaagcuguucgagagccagggcagaaaggacaucaagcugaucgacaucgcccugagcaagaccgacagcagaaaguacgagaacgccgugugggaccaguacaaggaccugugccacaugcacaccggcaucgugguggagaagaagaagagaggcggcaaggaggagaucaccccccacugcgcccugauggacugcaucauguucgacgccgccgugagcggcggccugaacaccagcgugcugagagccgugcugcccagagacaugguguucagaaccagcacccccagaguggugcugugaggacuagucccuguucccagagcccacuuuuuuuucuuuuuuugaaauaaaauagccugucuuucagaucucaaaggcucuuuucagagccaccaaaaaaaaaaaaaaaaaaaaaaaaaaaaaaaaaaaaaaaaaaaaaaaaaaaaaaaaaaaaaaaaagaauu

SEQ ID NO: 16812 - RNA, 1951 nt, Artificial Sequence
  mRNA product Design a-1 (hSL-A64-N5) comprising derived and/or modified sequence from LASV(Josiah;Clade IV)__NP_694869__NP (opt5)
aggagagucccgcagucggcguccagcggcucugcuuguucgugugugugucguugcaggccuuauucaagcuuaccaugagcgccuccaaggagaucaaaucuuuccuguggacccagagccucagacgggaacuguccggcuacugcucuaacauuaagcugcaaguggucaaagacgcucaggcccugcuccacgggcuggauuuuagcgagguuuccaaugugcagcgccuuaugagaaaggaacggcgcgacgauaacgaccugaaaagacuccgggaucugaaucaggcggugaacaaucuggucgagcucaagucuacacaacaaaagagcauccugcgcgugggaacgcuuaccuccgacgaucugcucauucuggcugccgaccuugaaaaacuuaagagcaaaguuaucagaacagagcggccccucucugccggcguguauauggggaaccuguccagccagcagcuggaucagcgcagagcucuccugaauaugauuggaaugucuggcgggaaccagggagcccgggcuggccgcgacggcgucgugagaguuugggaugugaagaaugccgagcuucugaacaaucaguucgggaccaugccuucccucacacuggcgugucuuaccaaacagggacaagucgaccugaacgaugccgugcaggcucucacagaccugggccugaucuacaccgccaaguauccgaauacgagcgaccucgaucggcugacccagucucaucccauccuuaacaugauugacacaaagaaauccagccugaauaucuccggguacaacuuuucucucggagcugccgugaaggcgggcgccugcaugcuggaugggggaaacaugcuugaaaccauuaaagucagcccucaaacaauggacggcauccugaaguccauucucaaaguuaagaaagcucugggcauguucaucagcgauacccccggggagcgcaauccuuaugaaaacauucuguacaagaucugucucucuggagacggcuggcccuauaucgccuccagaacgagcauuacagggcgggcuugggagaauaccgugguggaucuggagucugacggaaagccucagaaagccgauagcaacaauuccucuaagagccuucaguccgccggcuuuacagcugggcugaccuacagccagcucaugacccugaaagacgcgaugcugcaacuugauccgaacgccaagacauggauggacaucgaaggaagacccgaggacccugucgaaauugcucucuaccagcccucuuccggcugcuauauccacuucuuucgcgagccuacggaucugaaacaguucaagcaggacgccaaguacagccauggcauugaugugaccgaccuguuugccacacaacccgggcucaccucugcuguuaucgaugcccugccgcggaauauggugaucacaugucagggauccgacgauauuagaaaacuucuggaaagccagggccgcaaggacaucaaacucauugauaucgcgcuguccaagaccgacucucggaaauaugagaacgcugucugggaucaguacaaggaccugugccacaugcauacgggggugguuguggagaagaaaaagagaggaggcaaagaagagauuacaccucacugugcccuuauggauugcaucauguucgacgccgcugucagcgggggccucaauaccuccgugcugcgcgccguccugccccgggacaugguguuuagaaccucuacaccucgcguugugcucugaggacuagucccuguucccagagcccacuuuuuuuucuuuuuuugaaauaaaauagccugucuuucagaucucaaaggcucuuuucagagccaccaaaaaaaaaaaaaaaaaaaaaaaaaaaaaaaaaaaaaaaaaaaaaaaaaaaaaaaaaaaaaaaaagaauu

SEQ ID NO: 16813 - RNA, 1951 nt, Artificial Sequence
  mRNA product Design a-1 (hSL-A64-N5) comprising derived and/or modified sequence from LASV(LP;Clade I)__AAF86702__NP (opt5)
aggagagucccgcagucggcguccagcggcucugcuuguucgugugugugucguugcaggccuuauucaagcuuaccaugagcaacuccaaggagaucaaaucuuuccuguggacccagagccucagacgggaacuguccggcuacugcucuaauauuaagcuccaaguggucaaagacgcccaggcucugcuccacgggcuggauuuuagcgagguuuccaacgugcagcgccuuaugagaaagcagaaacgggacgaugccgaccugaagcgccucagagaucugaaucaagcggugaacaaucuggucgaacucaagucuacacagcagaaaaacgugcugcggguuggaacgcuuagcuccgacgaucugaucacccucgcugccgaccuggagaaacuuaaaagcaaggugauucgcacagaaagaccccugucuuccggcgucuauauggggaaucucagcucucagcaacuggaucagcggcgcgcccugcucuccaugaucggaaugagcggcgggccucagggaaacagaaccggcggcgacggggugguucgggugugggaugucaaaaaugcugagcugcuuaacaaucaguucggaacaaugccgucucugacccucgccugucugacaaagcaaggccagguggaccuuaacgaugcugugcaggcccugaccgaccucgggcugauuuacacggcgaaguaucccaauuccagcgaccuggauaugcucacccaaucccauccuauccugggaauggucgacacaaagaagucuagccuuaacaucuccggcuacaauuuuagccugggggccgcuguuaaagccggagcuugcaugcucgauggcggcaacaugcuggagaccauuaaggugucuccccagacaauggacgggauccuuaaauccauucugaaggugaaacgcagccucggaauguucaucucugauaccccuggcgaaagaaaccccuaugagaauauucuguacaagaucugucugagcggggaaggauggccuuauauugccucccggacgucuaucacaggccgcgcgugggagaacacccucgucgaccuggagagcgauaauaagccgcccaaacuuaacuccgccgggagcaauaagucucugcaggcugccggacucaacgcuggccugacauacucccagcugaugacccuuaaagacugcaugcuccaacuggauccuagcucuaagaccuggaucgacauugaaggcagacccgaggauccuguggaaaucgcccuguuucagcccuccagcggguguuacauucacuucuuucgggagccgacagaccucaaacaguucaagcaggacgccaaguauucccauggaaucgauguuacggaccuguuuucuacccaaccuggccuuacaagcgcugugauugaagcgcugcccagaaauaugguccuuaccugccagggguccgaugacaucaaaaagcugcuggagucucagggacgccgggauaucaaacuuauugacaucagccucuccaaggccgauagcagaaaauucgagaacgcugugugggaccaguacaaggaucugugucacaugcauacaggcguuguggucgaaaagaaaaagcgcgggggcaaagaggaaauuaccccucacugcgcccugcucgacuguaucauguuugaugccgcuacgacaggaucucugaauauuaccacccuucgggccgugcugcccagagacauggucuuccgcacauccacccccaaggugguucucugaggacuagucccuguucccagagcccacuuuuuuuucuuuuuuugaaauaaaauagccugucuuucagaucucaaaggcucuuuucagagccaccaaaaaaaaaaaaaaaaaaaaaaaaaaaaaaaaaaaaaaaaaaaaaaaaaaaaaaaaaaaaaaaaagaauu

SEQ ID NO: 16814 - RNA, 1951 nt, Artificial Sequence
  mRNA product Design a-1 (hSL-A64-N5) comprising derived and/or modified sequence from LASV(803213;Clade II)__AAF86704__NP (opt5)
aggagagucccgcagucggcguccagcggcucugcuuguucgugugugugucguugcaggccuuauucaagcuuaccaugagcgccuccaaggaggugaaaucuuuccuguggacccagagccucagacgggaacuguccggcuacugcucuaacaucaaacuucaagucguuaaggacgcucaggcccugcuccacgggcuggauuuuagcgaggugaauaacgugcagcgccuuaugagaaagcagaaacgggacgauggagaccugaagcgccucagagaucugaaucaagcggucaacaaucugguggaacucaaguccacacagcagaaaucuauucugcggguuggcacgcuuaccagcgacgaucugcucacacuggcugccgaccuugagaagcugaaauccaaggugauccgcaccgaaagaccccucagcucuggggucuauaugggaaaccuguccacacagcaacuggagcagcggcgcgcccuccugaauaugauuggcauggugggaggagcucagggcacccagccuggcagagaugggguugugcgggucugggacgugaaaaacccggaucuucugaauaaccaauucggaacaaugcccagccucacccuggccugucuuacgaagcagggccagguggaccugaaugaugcuguccucgcccugaccgaccuggggcucaucuacacagcgaaguauccuaacucuuccgaccuggaucgccuuagccaaucucaucccauucugaauaugguugacaccaaaaaguccagccucaacaucuccggauacaauuuuucucugggcgccgcugugaaagccggggcuugcaugcuugauggaggcaacaugcuggagacaaucaaggugaccccucagacgauggacggcauucucaaaagcauccugaaggucaaaagaucccuggggauguucgugagcgauacacccggagaacggaacccuuaugagaauauucucuacaagaucugucugucuggcgacggguggccguauauugccucccgcaccagcaucguugggagagcgugggaaaacacaaccguggaucuugagucugacggcaagccccagaaagucgggaccgccggaagcaauaagucccugcagucugcuggcuuuccuacaggccucacguacagccaacugaugacccugaaagauuccaugaugcagcuugaccccagcgccaagacauggauugauaucgaggggcggccugaagaccccguggagaucgcucucuaccagccgaugucuggaugcuauauucacuucuuuagagaaccuaccgaccugaaacaguucaagcaagaugccaaguacucccauggcaucgacguugccgaucuguuucccgcucagccugggcucacaagcgcggugauugaggcccugccccgcaacaugguccuuaccugucagggaucugacgauaucaaaaagcugcucgacucccagggccggagagauauuaaacugaucgacaucagccuguccaagguggauucucgcaaauucgaaaaugcugucugggaccaaugcaaggaucuuugucacaugcauacgggggugguuguggagaagaaaaagcggggcggaaaagaggaaauuacaccccacugcgcccucauggacuguaucauguuugaugccgcugucagcggcgggcugaacauuccugugcugagagccguucucccgcgcgacaugguguuccggaccuccucucccaaggucgugcugugaggacuagucccuguucccagagcccacuuuuuuuucuuuuuuugaaauaaaauagccugucuuucagaucucaaaggcucuuuucagagccaccaaaaaaaaaaaaaaaaaaaaaaaaaaaaaaaaaaaaaaaaaaaaaaaaaaaaaaaaaaaaaaaaagaauu

SEQ ID NO: 16815 - RNA, 1954 nt, Artificial Sequence
  mRNA product Design a-1 (hSL-A64-N5) comprising derived and/or modified sequence from LASV(GA391;Clade III)__CAA36646__NP (opt5)
aggagagucccgcagucggcguccagcggcucugcuuguucgugugugugucguugcaggccuuauucaagcuuaccaugagcgccuccaaggaggugagaucuuuccuguggacccagagccuccggcgcgaacuguccggcuacugcucuaacaucaaacuucaagucguuaaggacgcucaggcccugcuccacgggcuggauuuuagcgagguguccaaugugcagagacuuaugcggaaacagaagcgcgacgauggagaccugaaaagacuccgggaucugaaccaagcggucaauaaccugguggaacucaagucuacacagcagaaaagcguucugcgcgugggcacgcuuuccagcgacgaucugcucauucuggcugccgaccuugagaaacugaagucuaaagucaccagaacagaacggccccucuccagcgggguguauaugggaaaucugucuucccagcaacuggaucagcgcagagcccuccugaacaugaucggcaugaccgggguuagcggaggcggcaagggggcuucugacggaauugugcgggucugggaugugaaaaaugccgagcuucugaacaaucaguucggcacaaugccuucccucacccuggcuugucuuacaaagcaggggcaaguggaccugaacgaugccguccaggcgcucaccgaccugggacugaucuacacggccaaguauccgaauagcuccgaccucgaucgccugucucagagccaucccauucuuaacaugaucgacaccaaaaaguccagccugaauaucucuggcuacaacuuuucccucggggcugccguuaaagcuggagccugcaugcuggauggcggcaauaugcuugagacaauuaaggugagcccucaaaccauggacgggauccugaaaucuauucucaaggugaaaaagagccugggaauguucgucuccgauacacccggcgaaagaaacccuuaugagaacauccuguacaagauuugucucucuggggacggauggcccuauaucgcgagccggaccuccauugugggccgcgccugggaaaauacgguuguggaucuggagcaggacaacaaaccucagaagaucgggaauggaggcagcaacaaaucucuucaguccgcuggcuuugccgcugggcugacauacagccaacucaugacccugaaggauuucaaaugcuuuaaucugaucccgaacgccaagacauggauggacauugagggaagacccgaagauccugucgagaucgcccuuuaccagcccucuuccggcuguuaugugcacuucuuucgggaaccuaccgaccucaagcaguucaaacaggacgcuaaguacagccaugggauugauguuaccgaccuguuugcggcccaacccggacugacauccgcugugaucgaggcccucccgagaaauauggucauuacgugccagggcucugaagauauccgcaaacugcuugagagccaggggcggagagacaucaagcugauugauaucacccucuccaaagccgacucucgcaaguucgagaacgcugugugggaucaguuuaaggaccugugucacaugcauacaggcgucgugguugaaaagaagaaacggggaggcaaggaggaaauuaccccucacugcgcccugauggauuguaucauguucgacgcggcugugagcgggggacuugaugccaaaguccucagagugguucugccccgcgacaugguguuccggacauccaccccuaaggucgugcugugaggacuagucccuguucccagagcccacuuuuuuuucuuuuuuugaaauaaaauagccugucuuucagaucucaaaggcucuuuucagagccaccaaaaaaaaaaaaaaaaaaaaaaaaaaaaaaaaaaaaaaaaaaaaaaaaaaaaaaaaaaaaaaaaagaauu

SEQ ID NO: 16816 - RNA, 1951 nt, Artificial Sequence
  mRNA product Design a-1 (hSL-A64-N5) comprising derived and/or modified sequence from LASV(AV;Clade V)__CCA30315__NP (opt5)
aggagagucccgcagucggcguccagcggcucugcuuguucgugugugugucguugcaggccuuauucaagcuuaccaugagcgccuccaaggaggugaaaucuuuccuguggacccagagccucagacgggaacuguccggcuacugcucuaacaucaaacuucaagucguuaaggacgcucaggcccugcuccacgggcuggauuuuagcgagguguccaaugugcagcgccuuaugagaaagcagcggcgcgacgauucugaccugaaaagacuccgggaucugaaccaagcggucaauaaccugguggaacucaagagcacacagcagaaguccguucugcgcgugggaacgcuuagcucugacgaucugcucacccuggcugccgaccuugagaaacugaaguccaaagucacaagaaccgaacggccccucagcucuggcguguauauggggaaucuguccagccagcaacuggaucagcgcagagcccuccugaaccuuauuggaaugacaaauggcucucaggggucccaggcuggacgggacggcguugugcgcgucugggaugugaagaacgccgagcugcucaauaaccaauucggcaccaugccuagccugacacuugcuugucugaccaaacagggacagguggaccucaaugaugucguucaagcccugacggaccuggggcucaucuacaccgcgaaguauccgaacacauccgaccuggauagacuuacccagucucaucccauucugaauaugaucgacacaaagaaaagcucccucaacauuagcggcuacaauuuuucucugggggccgcugugaaggccggagcuugcaugcuugauggcgggaacaugcuggagaccaucaaaguguccccucagagcauggacggaauccucaagucuauucugaaagucaagcgggcccugggcauguucgugagcgauacgcccggcgaacgcaacccuuaugagaauauccucuacaaaauuugucuguccggggacggauggcccuauaucgcgucuagaacaagcauuguuggccgggccugggaaaacaccguggucgaucuugagacagacgggaagccucagaagaucggauccggcaauagcaacaaaucucugcaauccgcuggguuuagcgccggacucaccuacucucagcugaugacccugaaggaugcuaugcuucagcucgacccgaaugccaaaacauggauggauauugagggcagacccgaagacccuguggagguugcccuguaccagcccaucuccggcugcuauauccacuucuuucgcgaaccuacggaccugaagcaauucaaacaggaugcuaaguacagccaugggauugacaucgcggaucucuuugccgcucagcccggacugaccuccgccgugauugaggcccuuccgcggaacauggucaucacaugucagggcucugaagacauuaagaaacugcucgagagccaagggagaaaggauaucaaacugaucgacauugcucuguccaagaucgauucucgcaaauucgagaaugccgugugggaccaguauaaggaucuuugccacaugcauaccggagucgugguugaaaagaaaaagcggggcgggaaagaggaaauuacaccucacugugcgcucauggacugcaucauguuugaugcugccgugagcggcggacugaacacccugguccucagagccgugcugccccgcgacaugguuuuccggacguccacaccuagagugguccuuugaggacuagucccuguucccagagcccacuuuuuuuucuuuuuuugaaauaaaauagccugucuuucagaucucaaaggcucuuuucagagccaccaaaaaaaaaaaaaaaaaaaaaaaaaaaaaaaaaaaaaaaaaaaaaaaaaaaaaaaaaaaaaaaaagaauu

SEQ ID NO: 16817 - RNA, 1951 nt, Artificial Sequence
  mRNA product Design a-1 (hSL-A64-N5) comprising derived and/or modified sequence from LASV(Togo/2016/7082;Clade VI)__AMR44578__NP (opt5)
aggagagucccgcagucggcguccagcggcucugcuuguucgugugugugucguugcaggccuuauucaagcuuaccaugagcaacuccaaggaggugaaaucuuuccuguggacccagagccucagacgggaacuguccggcuacugcucuaauaucaaacuucaagucguuaaagacgcccaggcucugcuccacgggcuggauuuuagcgagguguccaacgugcagcgccuuaugagaaagcagaaacgggacgauggagaccugaagcgccucagagaucugaaucaagccgucaacaaucugguggaacucaagucuguucagcagaaaagcauucugcgggugggcacacuuacguccgacgaucugcucacccuggcggcugaccuugagaagcugaaaagcaaggucacacgcaccgaaagaccccucucuuccgggguguauaugggaaaccugagcucucagcaacuggaucagcggcgcgcccuccuguccaugaucggcaugagcgggggaaaucagaacucucagccuaaaggcgacggcguugugagagucugggaugugaagaaugccgaccuucugaacaaucaauucgggacaaugccgucccucacccuggcuugucuuacaaagcagggacagguggaucugaacgacgccguccaagcucucaccgaccugggccugauuuacacggccaaauaucccaauagcuccgaucucgaccggcugucucagagccauccuauccuuaacaugauugauaccaagaaauccagccugaauaucucuggguacaacuuuucccucggagcggccaucaagacaggcgcuugcaugcuggacgggggaaacaugcuugagaccauuaaaguuacaccccagaccauggauggcauccucaagagcauucugaaagugaagcgcucucugggcauguucaucagcgacacgccuggggagagaaaucccuaugaaaacauucuguacaagaucugucucuccggagauggcuggccuuauauugccucucggacagcuaucaucgggcgcgccugggagaauaccguggucgaccuggaaagcgauuccaaaccgcagaagauuggaagcaacggcucuaauaaaucccuucaaagcgcgggguuugcccccggacugacauacucucagcucaugacccugaaggacuccaugcugcagcuugauccuaacgcuaaaaccuggaucgacauugagggcagacccgaggacccuguggaaguugcccucuuccagcccaucagcggcugcuacauucacuuuuuccgggagccgacagaucugaagcaauuuaagcaggacgcuaaauauucccaugggaucgaugugacggaccuguucgccgcccagccuggacucaccucugcugucaucgaagcgcugcccagaaauauggugcuuacaugucagggcagcgaugacauuaagaaacugcucgauucccaagggcgccgggacaucaagcugauugauguuucucugaacaaaaucgacagcagaaaguuugagaaugccgugugggaucaguacaaggaccuuugccacaugcauaccggagucguggucgaaaagaagaaaaagggcgggaaagaggagauuacaccucacugugcucuccuggauugcaucauguucgacgccgccguguccggcggacugaacgcuaccguucuccgcgccgugcugccccgggacauggucuuuagaacgagcucucccaaggugguucuuugaggacuagucccuguucccagagcccacuuuuuuuucuuuuuuugaaauaaaauagccugucuuucagaucucaaaggcucuuuucagagccaccaaaaaaaaaaaaaaaaaaaaaaaaaaaaaaaaaaaaaaaaaaaaaaaaaaaaaaaaaaaaaaaaagaauu

SEQ ID NO: 16818 - RNA, 1951 nt, Artificial Sequence
  mRNA product Design a-1 (hSL-A64-N5) comprising derived and/or modified sequence from LASV(KAK-428;Clade n.d. (VII))__ANH09741__NP (opt5)
aggagagucccgcagucggcguccagcggcucugcuuguucgugugugugucguugcaggccuuauucaagcuuaccaugagcaacuccaaggaggugaaaucuuuccuguggacccagagccucagacgggaacuguccggcuacugcacaaauaucaaacuucaagucguuaaggacgcccaggcucugcuccacgggcuggauuuuucugaggugagcaacgugcagcgccuuaugagaaagcagaaacgggacgauaaugaccugaagcgccucagagaucugaaccaagccgucaauaaccugguggaacucaaguccguucagcagaaaucugugcugaaggucggaacgcuuaauagcgacgaucugcucacccuggcggcugaccuugagaaacugaaguccaaagugguucggacagaacgcccccucagcucuggcguguauauggggaaccuguccagccagcaacuggaucagagacgggcccuccugaauaugauuggaauggccggcgggucucagggaaaccagccuucccgcgacggcgucgugagagugugggaugucaagaaugcugaccuucugaacaaucaauucggcaccaugccgagccucacacuggccugucuuaccaagcaggggcagguugaucugaacgacguggugcucgcucugacagaccugggacucaucuacaccgccaaauaucccaauucuuccgaucuggaccggcuuagccaaaaccauccuguccugaacaugauugaugugaauaaguccucucucaacaucagcggcuacaauuuuucccugggggcggccguuaaagcuggagccugcaugcuugacggcgggaacaugcuggagacgauuaagaucagcccccagaccguggauggaauccucaaaucuauucugaaggucaaacgcgcucugggcauguucguguccgacacaccuggcgagagaaaucccuaugaaaacauccucuacaagguuugucugagcgggaauggauggccuuauauugccucucggaccagcaucgugggccgcgcgugggagaacacagucguggaucuugaauccaauaagaaccagccgaaagucgggaauaacggaucuaauaagaugcugcagagcuccggcuuugccaccgggcucacguacagccaacugaugacacugagagacucuaugcuucagcucgaucccaccgcuaaaacauggauugacaucgagggacggccugaggaucccguggaacuggcccuguuccagccuuccagcggcugcuacauucacuuuuucagagagcccaccgaccucaagcaguuuaaacaagacgcuaaguauucucauggcaucgauguuaacgaccuguucuccgcccagccggggcuuaccagcgccgugcuggaagcucucccucgcaauaugguccugacaugucagggauccgaugacauccggaagcugcuugauucucaggacagaaaagauauuaagcucaucgacauuagccuguccaaagcggaugcccgcaaguuugagaacgacgugugggaucaauucaaagaccugugccacaugcauacgggcaucguuguggaaaagaagaaaaagggagggaaacaggagaugacaccccacugugcucuccuggauugcauuauguuugacgccgccgucucuggcgggcuuaacgugccuacccugcgggcugugcuccccaccgacaugguuuucagaacaaucaccacgaaggucgugcugugaggacuagucccuguucccagagcccacuuuuuuuucuuuuuuugaaauaaaauagccugucuuucagaucucaaaggcucuuuucagagccaccaaaaaaaaaaaaaaaaaaaaaaaaaaaaaaaaaaaaaaaaaaaaaaaaaaaaaaaaaaaaaaaaagaauu

SEQ ID NO: 16819 - RNA, 1951 nt, Artificial Sequence; identical to SEQ ID NO: 16813
  mRNA product Design a-1 (hSL-A64-N5) comprising derived and/or modified sequence from LASV(Pinneo-NIG-1969;Clade I)__AIT17837__NP (opt5)

SEQ ID NO: 16820 - RNA, 1951 nt, Artificial Sequence
  mRNA product Design a-1 (hSL-A64-N5) comprising derived and/or modified sequence from LASV(ISTH0009-NIG-2011;Clade II)__AIT17405__NP (opt5)
aggagagucccgcagucggcguccagcggcucugcuuguucgugugugugucguugcaggccuuauucaagcuuaccaugagcguguccaaggaggucaaaucuuuccuguggacccagagccucagacgggaacuguccggcuacugcucuaacaucaaacuucaaguugugaaggacgcccaggcucugcuccacgggcuggauuuuagcgagguguccaauguccagcgccuuaugagaaagcagaaacgggacgauucugaccugaagcgccucagagaucugaaccaagccgugaauaaccugguugaacucaagagcacacagcagaaauccauucugcgggugggaacgcuuaccagcgacgaucugcucacacuggcggcugaccuugagaagcugaaaucuaaggucauccgcaccgaaagaccccucuccagcggcguguauauggggaaucugucuacacagcaacuggagcagcggcgcgcccuccugaacaugauuggaaugguuggcggggcccagggaacccagccuggcagagauggcgugguccgggugugggacgugaaaaauccggaucuucugaacaaucaauucgggacaaugcccucccucacccuggcuugucuuacgaagcagggacaggucgaccugaacgaugccguucucgcucugaccgaccugggccucaucuacacagccaaguauccuaauagcucugaccuggaucgccuuucccaaagccaucccauucugaacaugguggacaucaaaaaguccucucucaauaucagcggguacaacuuuucccugggagcggccgugaaagcuggcgccugcaugcuugaugggggaaauaugcuggagaccauuaaggucacaccucagaccauggacggcauccucaaaagcauucugaaggugaaaagaucucugggcauguucguuuccgauacgcccggggaacggaacccuuaugagaacauccucuacaagauuugucugagcggagacggcuggccguauaucgcuucucgcacaagcauuguggggagagccugggaaaauaccacagucgaucuugaguccgacggaaagccccagaaagugggcucugcggggagcaacaagucccugcagagcgccggauuuccuaccggccucaccuacucucaacugaugacacugaaagauuccaugaugcagcuugaccccagcgcuaagacguggaucgauaucgagggccggccugaagaccccguugagauugcccucuaccagccgaugucugggugcuauauccacuucuuuagagaaccuaccgaccugaaacaguucaagcaagaugcuaaguacucccauggaauugacguggccgaucuguuucccgcccagccuggccucacaagcgcugucaucgaggcgcugccccgcaauauggugcuuaccugucagggguccgacgauauuaaacggcugcucgacucucagggaagacgcgauaucaagcugaucgacauugcccugagcaaagcugauucccggagauucgaaaacgccgucugggaccaaugcaaggaucuuugucacaugcauacaggcgugguuguggagaaaaagaagcgcgggggcaaagaggaaaucacgccccacugcgcccucauggacuguauuauguaugaugcugccgucucuggaggccugaauaucccugugcugcgggcgguucucccgagagacaugguguuucgcaccagcucccccaaggucgugcugugaggacuagucccuguucccagagcccacuuuuuuuucuuuuuuugaaauaaaauagccugucuuucagaucucaaaggcucuuuucagagccaccaaaaaaaaaaaaaaaaaaaaaaaaaaaaaaaaaaaaaaaaaaaaaaaaaaaaaaaaaaaaaaaaagaauu

SEQ ID NO: 16821 - RNA, 1951 nt, Artificial Sequence
  mRNA product Design a-1 (hSL-A64-N5) comprising derived and/or modified sequence from LASV(ISTH2010-NIG-2012;Clade II)__AIT17483__NP (opt5)
aggagagucccgcagucggcguccagcggcucugcuuguucgugugugugucguugcaggccuuauucaagcuuaccaugagcgccuccaaggaggugaaaucuuuccuguggacccagagccucagacgggaacuguccggcuacugcucuaacaucaaacuucaagucguuaaggacgcucaggcccugcuccacgggcuggauuuuagcgagguguccaaugugcagcgccuuaugagaaagcagaaacgggacgauucugaccugaagcgccucagagaucugaaccaagcggucaauaaccugguggaacucaagagcacacagcagaaauccauucugcggguuggaacgcuuaccagcgacgaucugcucacacuggcugccgaccuugagaagcugaaaucuaaggugauccgcaccgaaagaccccucuccagcggcgucuauauggggaaucugucuacacagcaacuggagcagcggcgcgcccuccugaaccuuauuggaauggugggcggggcucagggaacccagccuggcagagauggcguugugcgggucugggacgugaaaaauccggaucugcucaacaaucaauucgggacaaugcccucccugacccuugccugucugacgaagcagggacagguggaccucaacgaugcuguccuggcccugaccgaccucggccugaucuacacagcgaaguauccuaauagcucugaccuugaucgccugucccaaagccaucccauucucaacaugguugacaccaaaaaguccucucugaauaucagcggguuuaacuucucccuuggagccgcugugaaagccggcgcuugcaugcuggaugggggaaauaugcucgagacaaucaaggugaccccucagacgauggacggcauucugaaaagcauccugaaggucaaaaagucucucggcauguuuguguccgauacacccggggaaagaaacccuuacgagaacauucuguauaagaucugucuuagcggagacggcuggccguacauugccucucggaccagcaucguugggcgcgcgugggaaaauacaaccguggaucuggaguccgacggaaaaccccacaaggucggcaccgccgggucuaacaaaagccuccaguccgcuggauucccuacaggccugacguauagccagcugaugacccuuaaggauucuaugaugcaacucgaccccuccgccaaaacauggauugauaucgagggcagaccugaagaccccguggagaucgcucuguaccagccgaugagcgggugcuacauucacuuuuuccgggaaccuaccgaccugaagcaguuuaagcaggaugccaaauauucucauggaaucgacguugccgaucucuuccccgcucaaccuggccugacauccgcggugauugaggcccuucccagaaauaugguccugaccugucaggggagcgacgauaucaagcgccuccuggacucccagggacggagagauauuaaacugaucgacaucgcucuuucuaaggccgauagccgccgguuugaaaacgccgugugggaccagugcaaagaucucugucauaugcacacgggcgucgugguugagaagaagaaaagagggggcaaggaggaaauuacaccccacugcgcucugauggacuguaucauguacgaugccgcgguguccggaggccugaauauuccuguccuccgcgcugugcugccgcgggacaugguuuucagaaccucuagccccaaagugguccuuugaggacuagucccuguucccagagcccacuuuuuuuucuuuuuuugaaauaaaauagccugucuuucagaucucaaaggcucuuuucagagccaccaaaaaaaaaaaaaaaaaaaaaaaaaaaaaaaaaaaaaaaaaaaaaaaaaaaaaaaaaaaaaaaaagaauu

SEQ ID NO: 16822 - RNA, 1951 nt, Artificial Sequence
  mRNA product Design a-1 (hSL-A64-N5) comprising derived and/or modified sequence from LASV(Lassa virus/H.sapiens-wt/NGA/2015/ISTH_0543;Clade II)__AVO03640__NP (opt5)
aggagagucccgcagucggcguccagcggcucugcuuguucgugugugugucguugcaggccuuauucaagcuuaccaugagcgccuccaaggaggugaaaucuuuccuguggacccagagccucagacgggaacuguccggcuacugcucuaacaucaaacuucaagucguuaaggacgcucaggcccugcuccacgggcuggauuuuagcgagguguccaaugugcagcgccuuaugagaaagcagaaacgggacgauucugaccugaagcgccucagagaucugaaccaagcggucaauaaccugguggaacucaagagcacacagcagaaauccauucugcggguuggaacgcuuaccagcgacgaucugcucacacuggcugccgaccuugagaagcugaaaucuaaggugauccgcaccgaaagaccccucuccagcggcgucuauauggggaaucugucuacacagcaacuggagcagcggcgcgcccuccugaacaugauuggaauggugggcggggcucagggaacccagccuggcagagauggcguugugcgggucugggacgugaaaaauccggaucuucugaacaaucaauucgggacaaugcccucccucacccuggccugucuuacgaagcagggacagguggaccugaacgaugcuguccucgcccugaccgaccugggccucaucuacacagcgaaguauccuaauagcucugaccuggaucgccuuucccaaagccaucccauucugaacaugguugacaccaaaaaguccucucucaauaucagcggguacaacuuuucccugggagccgcugugaaagccggcgcuugcaugcuugaugggggaaauaugcuggagacaaucaaggugaccccucagacgauggacggcauucucaaaagcauccugaaggucaaaaagucucugggcauguucguguccgauacacccggggaaagaaacccuuaugagaacauucucuacaagaucugucugagcggagacggcuggccguauauugccucucggaccagcaucguugggcgcgcgugggaaaauacaaccguggaucuugaguccgacggaaaaccccagaaggucggcucugccgggagcaacaaaucccugcagagcgcuggauuuccuaccggccucacauacucucaacugaugacgcugaaggauuccaugaugcagcuugaccccagcgccaaaaccuggauugauaucgagggcagaccugaagaccccguggagaucgcucucuaccagccgaugucugggugcuauauucacuucuuucgggaaccuacagaccugaagcaguucaagcaagaugccaaauacucccauggaaucgacguugccgaucuguuucccgcucagccuggccucaccagcgcggugauugaggcccugcccagaaauaugguccuuacaugucagggguccgacgauaucaagcgccugcucgacucucagggacggaaagauauuaagcugaucgacaucgcucugagcaaagccgauuccagacgcuucgaaaacgccgugugggaccaaugcaaggaucuuugucacaugcauaccggcgucgugguugagaagaaaaagagagggggcaaagaggaaauuacgccccacugcgcucucauggacuguaucauguaugaugccgcggugucuggaggccugaauauuccuguccugcgggcugugcucccgcgcgacaugguuuuucggacaagcucccccaaggugguccugugaggacuagucccuguucccagagcccacuuuuuuuucuuuuuuugaaauaaaauagccugucuuucagaucucaaaggcucuuuucagagccaccaaaaaaaaaaaaaaaaaaaaaaaaaaaaaaaaaaaaaaaaaaaaaaaaaaaaaaaaaaaaaaaaagaauu

SEQ ID NO: 16823 - RNA, 1951 nt, Artificial Sequence
  mRNA product Design a-1 (hSL-A64-N5) comprising derived and/or modified sequence from LASV(Lassa virus/H.sapiens-wt/NGA/2016/ISTH_0009;Clade II)__AVO03572__NP (opt5)
aggagagucccgcagucggcguccagcggcucugcuuguucgugugugugucguugcaggccuuauucaagcuuaccaugagcgccuccaaggaggugaaaucuuuccuguggacccagagccucagacgggaacuguccggcuacugcucuaacaucaaacuucaagucguuaaggacgcucaggcccugcuccacgggcuggauuuuagcgagguguccaaugugcagcgccuuaugagaaagcagaaacgggacgauucugaccugaagcgccucagagaucugaaccaagcggucaauaaccugguggaacucaagagcacacagcagaaauccauucugcggguuggaacgcuuaccagcgacgaucugcucacacuggcugccgaccuugagaagcugaaaucuaaggugauccgcaccgaaagaccccucuccagcggcgucuauauggggaaucugucuacacagcaacuggagcagcggcgcgcccuccugaacaugauuggaauggugggcggggcucagggaacccagccuggcagagauggcguugugcgggucugggacgugaaaaauccggaucuucugaacaaucaauucgggacaaugcccucccucacccuggccugucuuacgaagcagggacagguggaccugaacgaugcuguccucgcccugaccgaccugggccucaucuacacagcgaaguauccuaauagcucugaccuggaucgccuuucccaaagccaucccauucugaacaugguugacaccaaaaaguccucucucaauaucagcggguacaacuuuucccugggagccgcugugaaagccggcgcuugcaugcuugaugggggaaauaugcuggagacaaucaaggugaccccucagacgauggacggcauucucaaaagcauccugaaggucaaaaagucucugggcauguucguguccgauacacccggggaaagaaacccuuaugagaacauucucuacaagaucugucugagcggagacggcuggccguauauugccucucggaccagcaucguugggcgcgcgugggaaaauacaaccguggaucuugaguccgacggaaaaccccagaaggucggcucugccgggagcaacaaaucccugcagagcgcuggauuuccuaccggccucacauacucucaacugaugacgcugaaggauuccaugaugcagcuugaccccagcgccaaaaccuggauugauaucgagggcagaccugaagaccccguggagaucgcucucuaccagccgaugucugggugcuauauucacuucuuucgggaaccuacagaccugaagcaguucaagcaagaugccaaauacucccauggaaucgacguugccgaucuguuucccgcucagccuggccucaccagcgcggugauugaggcccugcccagaaauaugguccuuacaugucagggguccgacgauaucaagcgccugcucgacucucagggacggagagauauuaaacugaucgacaucgcucugagcaaggccgauucccgccgguucgaaaacgccgugugggaccaaugcaaagaucuuugucacaugcauaccggcgucgugguugagaagaagaaaagagggggcaaggaggaaauuacgccccacugcgcucucauggacuguaucauguaugaugccgcggugucuggaggccugaauauuccuguccugcgcgcugugcucccgcgggacaugguuuuuagaacaagcucccccaaagugguccugugaggacuagucccuguucccagagcccacuuuuuuuucuuuuuuugaaauaaaauagccugucuuucagaucucaaaggcucuuuucagagccaccaaaaaaaaaaaaaaaaaaaaaaaaaaaaaaaaaaaaaaaaaaaaaaaaaaaaaaaaaaaaaaaaagaauu

SEQ ID NO: 16824 - RNA, 1951 nt, Artificial Sequence
  mRNA product Design a-1 (hSL-A64-N5) comprising derived and/or modified sequence from LASV(Lassa virus/H.sapiens-wt/NGA/2016/ISTH_0017;Clade II)__AVO03568__NP (opt5)
aggagagucccgcagucggcguccagcggcucugcuuguucgugugugugucguugcaggccuuauucaagcuuaccaugagcgccuccaaggaggugaaaucuuuccuguggacccagagccucagacgggaacuguccggcuacugcucuagcaucaaacuucaagucguuaaggacgcucaggcccugcuccacgggcuggauuuuuccgaggugucuaacgugcagcgccuuaugagaaagcagaaacgggacgauagcgaccugaagcgccucagagaucugaaucaagcggucaacaaucugguggaacucaaguccacacagcagaaaagcauucugcggguuggaacgcuuaccucugacgaucugcucacacuggcugccgaccuugagaagcugaaauccaaggugauccgcaccgaaagaccccucagcucuggcgucuauauggggaaccuguccacacagcaacuggagcagcggcgcgcccuccugaauaugauuggaauggcuggcggggcccagggaacccagccuggcagagauggcgugguucgggugugggacgucaaaaacccggaucuucugaauaaccaauucgggacaaugcccagccucacccuggcuugucuuacgaagcagggacagguggaccugaaugaugccgugcucgcgcugaccgaccugggccucaucuacacagccaaguauccuaacucuuccgaccuggaucgccuuagccaaucccaucccauucugaauauggucgacaccaaaaagucuagccucaacaucuccggguacaauuuuagccugggagcugccguuaaagcuggcgccugcaugcuugaugggggaaacaugcuggagacaaucaaggugaccccucagacgauggacggcauucucaaaucuauccugaaggugaaaagaucccugggcauguucgucagcgaugcgcccggggaacggaauccuuaugagaacauucucuacaagaucugucugucuggagacggcuggccguauauugccagccgcacauccaucguggggagagcuugggaaaacaccacaguugaucuugagucugacggaaagccccagaaagugggcgccaccgggagcaauaagucccugcagagcgcuggauuuccuaccggccucacauacucucaacugaugacgcugaaagauuccaugaugcagcuugaccccagcgccaagaccuggauugauaucgagggccggccugaagaccccgucgagguggcccucuaccagccgguuucugggugcuauauccacuucuuuagagaaccuacagaccugaaacaguucaagcaagaugcuaaguacucccauggaauugacguggcggaucuguuucccgcccagccuggccucaccagcgcugucaucgaggcccugccccgcaacauggugcuuacaugucagggguccgacgauauuaaaaagcugcucgacucucagggacggaaagauaucaagcugauugacaucgcccugagcaaagcugauuccagacgcuucgaaaaugccgucugggaccaaugcaaggaucuuugucacaugcauaccggcgugguuguggagaagaaaaagagagggggcaaagaggaaaucacgccccacugcgcgcucauggacuguauuauguaugaugcugccgucucuggaggccugaacaucccugugcugcgggccguucucccgcgcgacaugguguuucggacaagcucccccaaggucgugcugugaggacuagucccuguucccagagcccacuuuuuuuucuuuuuuugaaauaaaauagccugucuuucagaucucaaaggcucuuuucagagccaccaaaaaaaaaaaaaaaaaaaaaaaaaaaaaaaaaaaaaaaaaaaaaaaaaaaaaaaaaaaaaaaaagaauu

SEQ ID NO: 16825 - RNA, 1951 nt, Artificial Sequence
  mRNA product Design a-1 (hSL-A64-N5) comprising derived and/or modified sequence from LASV(Lassa virus/H.sapiens-wt/NGA/2018/ISTH_0959;Clade II)__AVV65100__NP (opt5)
aggagagucccgcagucggcguccagcggcucugcuuguucgugugugugucguugcaggccuuauucaagcuuaccaugagcgccuccaaggaggugaaaucuuuccuguggacccagagccucagacgggaacuguccggcuacugcucuaacaucaaacuucaagucguuaaggacgcucaggcccugcuccacgggcuggauuuuagcgagguguccaaugugcagcgccuuaugagaaagcagaaacgggacgauucugaccugaagcgccucagagaucugaaccaagcggucaauaaccugguggaacucaagagcacccagcagaaauccauucugcggguuggaacgcuuaccagcgacgaucugcucacacuggcugccgaccuugagaagcugaaaucuaaggugauccgcaccgaaagaccccucuccagcggcgucuauauggggaaucugucuacacagcaacuggagcagcggcgcgcccuccugaaccuuauuggaauggugggcggggcucagggaacccagccuggcagagauggcguugugcgggucugggacgugaaaaauccggaucugcucaacaaucaauucgggacaaugcccucccugacccuugccugucugacgaagcagggacagguggaccucaacgaugucguucuggcucugaccgaccucggccugaucuacacagccaaguauccuaauagcucugaccuugaucgccugucccaaagccaucccauucucaacaugguggacaccaaaaaguccucucugaauaucagcggguuuaacuucucccuuggagcggccgugaaagcuggcgccugcaugcuggaugggggaaauaugcucgagacaaucaaggucaccccucagacgauggacggcauucugaaaagcauccugaaggugaaaaagucucucggcauguuuguuuccgauacacccggggaaagaaacccuuacgagaacauucuguauaagaucugucuuagcggagacggcuggccguacauugcuucucggaccagcaucguggggcgcgccugggaaaauacaaccgucgaucuggaguccgacggaaaaccccacaaggugggcaccgcggggucuaacaaaagccuccaguccgccggauucccuacaggccugacguauagccagcugaugacccuuaaggauucuaugaugcaacucgaccccuccgcuaaaacauggauugauaucgagggcagaccugaagaccccguugagaucgcccuguaccagccgaugagcgggugcuacauucacuuuuuccgggaaccuaccgaccugaagcaguuuaagcaggaugcuaaauauucucauggaaucgacguggccgaucucuuccccgcccaaccuggccugacauccgcugucauugaggcgcuucccagaaauauggugcugaccugucaggggagcgacgauaucaagcgccuccuggacucccagggacggaaagauauuaagcugaucgacaucgcccuuucuaaaacggauagcagacgcuuugaaaacgcugucugggaccagugcaaggaucucugucauaugcacacaggcgugguuguggagaagaaaaagagagggggcaaagaggaaauuacaccccacugcgcccugauggacuguaucauguacgaugccgcugucuccggaggccugaauauuccugugcuccgggccguucugccgcgcgacaugguguuccggaccucuagccccaaggucgugcuuugaggacuagucccuguucccagagcccacuuuuuuuucuuuuuuugaaauaaaauagccugucuuucagaucucaaaggcucuuuucagagccaccaaaaaaaaaaaaaaaaaaaaaaaaaaaaaaaaaaaaaaaaaaaaaaaaaaaaaaaaaaaaaaaaagaauu

SEQ ID NO: 16826 - RNA, 1951 nt, Artificial Sequence
  mRNA product Design a-1 (hSL-A64-N5) comprising derived and/or modified sequence from LASV(LASV003-NIG-2008;Clade II)__AIT17581__NP (opt5)
aggagagucccgcagucggcguccagcggcucugcuuguucgugugugugucguugcaggccuuauucaagcuuaccaugagcgccuccaaggaggugaaaucuuuccuguggacccagagccucagacgggaacuguccggcuacugcucuagcaucaaacuucaagucguuaaggacgcucaggcccugcuccacgggcuggauuuuuccgaggugucuaacgugcagcgccuuaugagaaagcagaaacgggacgauagcgaccugaagcgccucagagaucugaaucaagcggucaacaaucugguggaacucaaguccacccagcagaaaagcguucugcgggugggaacgcuuaccucugacgaucugcucacacuggcugccgaccuugagaagcugaaauccaaggucauucgcaccgaaagaccccucagcucuggcguguauauggggaaccuguccgcccagcaacuggagcagcggcgcacacuccugaauaugaucggaaugguuggcggggcucagggaacccagccuggcagagauggcgugguccgggugugggacgugaaaaacccggaucuucugaauaaccaauucgggacaaugcccagccucacccuggccugucuuacgaagcagggacaggucgaccugaaugauguugugcucgcucugaccgaccugggccucauuuacacagccaaguauccuaacucuuccgaccuggaucgccuuagccaaucccaucccauccugucuaugguggacaccaaaaagagcucccucaauauuagcggguacaacuuuucucugggagcggccgucaaagcuggcgccugcaugcuugaugggggaaauaugcuggagacaaucaaggugaccccucagacgauggacggcauccucaaauccauucugaagguuaaaaagagccugggcauguucgugucugauacacccggggaaagaaacccuuaugagaauauccucuacaagauuugucugagcggagacggcuggccguauaucgcuucccggaccucuauugucgggcgcgccugggaaaacacaaccguggaucuugagagcgacggaaaaccccagaagguuggcaccgcgggguccaacaaaagccugcagucugccggauuuccuacaggccucacguacucccaacugaugacccugaaggauagcaugaugcagcuugaccccucugcuaaaacauggaucgauauugagggcagaccugaagaccccguggagaucgcccucuaccagccgauguccgggugcuauauccacuucuuucgggaaccuaccgaccugaagcaguucaagcaagaugcuaaauacagccauggaauugacgucacagaucuguuucccgcccagccuggccucaccuccgccgugaucgaggcucugcccagaaauaugguccuuacgugucaggggucugacgauauuaagcgccugcucgacagccagggacggagagauaucaaacugauugacaucgcgcuguccaaggccgauucucgccgguucgaaaacgcugugugggaccaaugcaaagaucuuugucacaugcauacaggcguuguggucgagaagaagaaaagagggggcaaggaggaaaucacaccccacugcgcccucauggacuguauuauguaugaugccgcugugagcggaggccugaauaucccuguucugcgcgccgugcucccgcgggacauggucuuuagaaccuccagccccaaaguggugcugugaggacuagucccuguucccagagcccacuuuuuuuucuuuuuuugaaauaaaauagccugucuuucagaucucaaaggcucuuuucagagccaccaaaaaaaaaaaaaaaaaaaaaaaaaaaaaaaaaaaaaaaaaaaaaaaaaaaaaaaaaaaaaaaaagaauu

SEQ ID NO: 16827 - RNA, 1951 nt, Artificial Sequence
  mRNA product Design a-1 (hSL-A64-N5) comprising derived and/or modified sequence from LASV(LASV035-NIG-2009;Clade II)__AIT17589__NP (opt5)
aggagagucccgcagucggcguccagcggcucugcuuguucgugugugugucguugcaggccuuauucaagcuuaccaugagcgccuccaaggaggugaaaucuuuccuguggacccagagccucagacgggaacuguccggcuacugcucuagcaucaaacuucaagucguuaaagacgcucaggcccugcuccacgggcuggauuuuuccgaggugucuaacgugcagcgccuuaugagaaagcagaaacgggacgauagcgaccugaagcgccucagagaucugaaucaagcggucaacaaucugguggaacucaaguccacacagcagaaaagcauucugcggguuggaacgcuuaccucugacgaucugcucacacuggcugccgaccuugagaagcugaaauccaaggugauccgcaccgaaagaccccucagcucuggcgucuauauggggaaccuguccgcccagcaacuggagcagcggcgcgcucuccugaauaugauuggaauggugggcggggcccagggaacacagccuggcagagauggcguugugcgggucugggacgugaaaaacccggaucuucugaauaaccaauucgggaccaugcccagccucacacuggcuugucuuaccaagcagggacagguggaccugaaugaugccguccucgcgcugacggaccugggccucaucuacaccgccaaguauccuaacucuuccgaccuggaucgccuuagccaaucccaucccauucugaauaugguugacacaaagaagucuagccucaacaucuccggguacaauuuuagccugggagcugccgugaaagcuggcgccugcaugcuugaugggggaaacaugcuggagaccaucaaggugacaccucagaccauggacggcauucucaaaucuauccugaaggucaaaagaucccugggcauguucgugagcgauacgcccggggaacggaauccuuaugagaacauucucuacaagaucugucugucuggagacggcuggccguauauugcgagccgcacauccaucguugggagagccugggaaaacaccacaguggaucuugagucugacggaaagccccagaaagucggcaccaccgggagcaauaagucccugcagagcgcuggauuuccuacaggccucacguacucucaacugaugacccugaaagauuccaugaugcagcuugaccccagcgccaagacauggauugauaucgagggccggccugaagaccccguggagaucgcucucuaccagccgaugucugggugcuauauucacuucuuuagagaaccuaccgaccugaaacaguucaagcaagaugccaaguacucccauggaaucgacguugccgaucuguuucccgcucagccuggccucacaagcgcggugauugaggcccugccccgcaacaugguccuuaccugucagggguccgacgauaucaaaaagcugcucgacucucagggacggagagauauuaaacugaucgacaucgcucugagcaaggccgauucccgcaaauucgaaaaugccgugugggaccaaugcaaggaucuuugucacaugcauacgggcgucgugguugagaagaaaaagagagggggcaaagaggaaauuacaccccacugcgcucucauggacuguaucauguaugaugccgcggugucuggaggccugaacauuccuguccugcgggcugugcucccgcgcgacaugguuuuucggaccagcucccccaaggugguccugugaggacuagucccuguucccagagcccacuuuuuuuucuuuuuuugaaauaaaauagccugucuuucagaucucaaaggcucuuuucagagccaccaaaaaaaaaaaaaaaaaaaaaaaaaaaaaaaaaaaaaaaaaaaaaaaaaaaaaaaaaaaaaaaaagaauu

SEQ ID NO: 16828 - RNA, 1951 nt, Artificial Sequence
  mRNA product Design a-1 (hSL-A64-N5) comprising derived and/or modified sequence from LASV(LASV1000-NIG-2009;Clade II)__AIT17783__NP (opt5)
aggagagucccgcagucggcguccagcggcucugcuuguucgugugugugucguugcaggccuuauucaagcuuaccaugagcgccuccaaggaggugaaaucuuuccuguggacccagagccucagacgggaacuguccggcuacugcucuaacaucaaacuucaagucguuaaggacgcucaggcccugcuccacgggcuggauuuuagcgagguguccaaugugcagcgccuuaugagaaagcagaaacgggacgauucugaccugaagcgccucagagaucugaaccaagcggucaauaaccugguggaacucaagagcacacagcagaaauccauucugcggguuggaacgcuuaccagcgacgaucugcucacacuggcugccgaccuugagaagcugaaaucuaaggugauccgcaccgaaagaccccucuccagcggcgucuauauggggaaucugucuacacagcaacuggagcagcggcgcgcccuccugaacaugauuggaauggugggcggggcucagggaacccagccuggcagagauggcguugugcgggucugggacgugaaaaauccggaucuucugaacaaucaauucgggacaaugcccucccucacccuggccugucuuacgaagcagggacagguggaccugaacgaugucguucucgcucugaccgaccugggccucaucuacacagccaaguauccuaauagcucugaccuggaucgccuuucccaaagccaucccauucugaacaugguggacaccaaaaaguccucucucaauaucagcggguacaacuuuucccugggagcggccgugaaagcuggcgccugcaugcuugaugggggaaauaugcuggagacaaucaaggucaccccucagacgauggacggcauucucaaaagcauccugaaggugaaaaagucucugggcauguucguuuccgauacacccggggaaagaaacccuuaugagaacauucucuacaagaucugucugagcggagacggcuggccguauauugcuucucggaccagcaucguggggcgcgccugggaaaauacaaccgucgaucuugaguccgacggaaaaccccagaaggugggcaccgcggggucuaacaaaagccugcaguccgccggauuuccuacaggccucacguacagccaacugaugacccugaaggauucuaugaugcagcuugaccccuccgcuaaaacauggauugauaucgagggcagaccugaagaccccguugagaucgcccucuaccagccggugagcgggugcuauauucacuucuuucgggaaccuaccgaccugaagcaguucaagcaagaugcuaaauacucucauggaaucgacgucgccgaucuguuucccgcccagccuggccucacauccgcugugauugaggcgcugcccagaaauaugguccuuaccugucaggggagcgacgauaucaagcgccugcucgacucccagggacggagagauauuaaacugaucgacaucgcccugucuaaggcugauagccgccgguucgaaaacgccgugugggaccaaugcaaagaucuuugucacaugcauacgggcguuguggucgagaagaagaaaagagggggcaaggaggaaauuacaccccacugcgcccucauggacuguaucauguaugaugcugccguguccggaggccugaauauuccuguucugcgcgcggugcucccgcgggacauggucuuuagaaccucuagccccaaaguggugcugugaggacuagucccuguucccagagcccacuuuuuuuucuuuuuuugaaauaaaauagccugucuuucagaucucaaaggcucuuuucagagccaccaaaaaaaaaaaaaaaaaaaaaaaaaaaaaaaaaaaaaaaaaaaaaaaaaaaaaaaaaaaaaaaaagaauu

SEQ ID NO: 16829 - RNA, 1951 nt, Artificial Sequence
  mRNA product Design a-1 (hSL-A64-N5) comprising derived and/or modified sequence from LASV(LASV221-NIG-2010;Clade II)__AIT17625__NP (opt5)
aggagagucccgcagucggcguccagcggcucugcuuguucgugugugugucguugcaggccuuauucaagcuuaccaugagcgccuccaaggaggugaaaucuuuccuguggacccagagccucagacgggaacuguccggcuacugcucuagcaucaaacuucaagucguuaaggacgcucaggcccugcuccacgggcuggauuuuuccgaggugucuaacgugcagcgccuuaugagaaagcagcggcgcgacgauagcgaccugaaaagacuccgggaucugaaucaagcggucaacaaucugguggaacucaaguccacacagcaaaagagcauucugcgcguuggaacgcuuaccucugacgaucugcucacacuggcugccgaccuugagaaacugaaguccaaagugaucagaaccgaacggccccucagcucuggcgucuauauggggaaccuguccacacagcagcuggagcagcgcagagcccuccugaauaugauuggaauggugggcggggcucagggaacccagccuggccgggauggcguugugcgcgucugggacgugaagaacccggaucuucugaauaaccaauucgggacaaugcccagccucacccuggccugucuuacgaaacagggacagguggaccugaaugaugcuguccucgcccugaccgaccugggccucaucuacacagcgaaguauccuaacucuuccgaccuggauagacuuagccaaucccaucccauucugaauaugguugacaccaagaaaucuagccucaacaucuccggguacaauuuuagccugggagccgcugugaaggccggcgcuugcaugcuugaugggggaaacaugcuggagacaaucaaagugaccccucagacggucgacggcauucucaagucuauccugaaagugaagcggucccugggcauguucguuagcgauacacccggggaacgcaauccuuaugagaacauucucuacaaaaucugucugucuggagacggcuggccguauauugccagcagaaccuccaucguggggcgggcgugggaaaacacaaccgucgaucuugagucugacggaaagccccagaaggugggcaccgccgggagcaauaaaucccugcagagcgcuggauuuccuacaggccucacguacucucaacugaugacccugaaggauuccaugaugcagcuugaccccagcgccaaaacauggauugauaucgagggcagaccugaagaccccguugagaucgcucucuaccagccgaugucugggugcuauauucacuucuuucgcgaaccuaccgaccugaagcaguucaaacaagaugccaaguacucccauggaaucgacguggccgaucuguuucccgcucagccuggccucacaagcgcggucauugaggcccugccccggaacauggugcuuaccugucagggguccgacgauaucaagagacugcucgacucucagggacgccgggauauuaaacugaucgacaucgcucugagcaaggccgauuccagaaaauucgaaaaugccgucugggaccaaugcaaggaucuuugucacaugcauacgggcgugguuguggagaaaaagaagcgcgggggcaaagaggaaauuacaccccacugcgcucucauggacuguaucauguaugaugccgcggucucuggaggccugaacauuccugugcugcgggcuguucucccgagagacaugguguuucgcaccagcucccccaaggucgugcugugaggacuagucccuguucccagagcccacuuuuuuuucuuuuuuugaaauaaaauagccugucuuucagaucucaaaggcucuuuucagagccaccaaaaaaaaaaaaaaaaaaaaaaaaaaaaaaaaaaaaaaaaaaaaaaaaaaaaaaaaaaaaaaaaagaauu

SEQ ID NO: 16830 - RNA, 1951 nt, Artificial Sequence
  mRNA product Design a-1 (hSL-A64-N5) comprising derived and/or modified sequence from LASV(LASV237-NIG-2010;Clade II)__AIT17639__NP (opt5)
aggagagucccgcagucggcguccagcggcucugcuuguucgugugugugucguugcaggccuuauucaagcuuaccaugagcgccuccaaggaggugaaaucuuuccuguggacccagagccucagacgggaacuguccggcuacugcucuaacaucaaacuucaagucguuaaggacgcucaggcccugcuccacgggcuggauuuuagcgagguguccaaugugcagcgccuuaugagaaagcagaaacgggacgauucugaccugaagcgccucagagaucugaaccaagcggucaauaaccugguggaacucaagagcacacagcagaaauccauucugcggguuggaacgcuuaccagcgacgaucugcucacacuggcugccgaccuugagaagcugaaaucuaaggugauccgcaccgaaagaccccucuccagcggcgucuauauggggaaucugucuacacagcaacuggagcagcggcgcgcccuccugaacaugauuggaauggugggcggggcucagggaacccagccuggcagagauggcguugugcgggucugggacgugaaaaauccggaucuucugaacaaucaauucgggacaaugcccucccucacccuggccugucuuacgaagcagggacagguggaccugaacgaugcuguccucgcccugaccgaccugggccucaucuacacagcgaaguauccuaauagcucugaccuggaucgccuuucccaaagccaucccauucugaacaugguugacaucaaaaaguccucucucaauaucagcggguacaacuuuucccugggagccgcugugaaagccggcgcuugcaugcuugaugggggaaauaugcuggagaccauuaaggugacaccucagaccauggacggcauccucaaaagcauucugaaggucaaaagaucucugggcauguucguguccgauacgcccggggaacggaacccuuaugagaacauccucuacaagauuugucugagcggagacggcuggccguauaucgccucucgcacaagcauuguugggagagcgugggaaaauaccacaguggaucuugaguccgacggaaagccccagaaagucggcucugccgggagcaacaagucccugcagagcgcuggauuuccuaccggccucaccuacucucaacugaugacacugaaagauuccaugaugcagcuugaccccagcgccaagacguggaucgauaucgagggccggccugaagaccccguggagauugcucucuaccagccgaugucugggugcuauauccacuucuuuagagaaccuaccgaccugaaacaguucaagcaagaugccaaguacucccauggaauugacguugccgaucuguuucccgcucagccuggccucacaagcgcggugaucgaggcccugccccgcaauaugguccuuaccugucagggguccgacgauauuaaacggcugcucgacucucagggaagacgcgauaucaagcugaucgacauugcucugagcaaagccgauucccggagauucgaaaacgccgugugggaccaaugcaaggaucuuugucacaugcauacaggcgucgugguugagaaaaagaagcgcgggggcaaagaggaaaucacgccccacugcgcucucauggacuguauuauguaugaugccgcggugucuggaggccugaauaucccuguccugcgggcugugcucccgagagacaugguuuuucgcaccagcucccccaaggugguccugugaggacuagucccuguucccagagcccacuuuuuuuucuuuuuuugaaauaaaauagccugucuuucagaucucaaaggcucuuuucagagccaccaaaaaaaaaaaaaaaaaaaaaaaaaaaaaaaaaaaaaaaaaaaaaaaaaaaaaaaaaaaaaaaaagaauu

SEQ ID NO: 16831 - RNA, 1951 nt, Artificial Sequence
  mRNA product Design a-1 (hSL-A64-N5) comprising derived and/or modified sequence from LASV(LASV253-NIG-2011;Clade II)__AIT17671__NP (opt5)
aggagagucccgcagucggcguccagcggcucugcuuguucgugugugugucguugcaggccuuauucaagcuuaccaugagcgccuccaaggaggugaaaucuuuccuguggacccagagccucagacgggaacuguccggcuacugcucuagcaucaaacuucaagucguuaaggacgcucaggcccugcuccacgggcuggauuuuuccgaggugucuaacgugcagcgccuuaugagaaagcagaaacgggacgauagcgaccugaagcgccucagagaucugaaucaagcggucaacaaucugguggaacucaaguccacccagcagaaaagcguucugcgggugggaacgcuuaccucugacgaucugcucacacuggcugccgaccuugagaagcugaaauccaaggucauucgcaccgaaagaccccucagcucuggcguguauauggggaaccuguccacacagcaacuggagcagcggcgcgcccuccugaauaugaucggaaugguuggcggggcucagggaacccagccuggcagagauggcgugguccgggugugggacgugaaaaacccggaucuucugaauaaccaauucgggacaaugcccagccucacccuggccugucuuacgaagcagggacaggucgaccugaaugauguugugcucgcucugaccgaccugggccucauuuacacagccaaguauccuaacucuuccgaccuggaucgccuuagccaaucccaucccauccugaauaugguggacaccaaaaagucuagccucaacauuuccggguacaauuuuagccugggagcggccgucaaagcuggcgccugcaugcuugaugggggaaacaugcuggagacaaucaaggugaccccucagacgauggacggcauccucaaaucuauucugaagguuaaaaagucccugggcauguucgugagcgauacacccggggaaagaaauccuuaugagaacauccucuacaagauuugucugucuggagacggcuggccguauaucgcuagccggaccuccauugucgggcgcgccugggaaaacacaaccguggaucuugagucugacggaaaaccccagaagguuggcaccgcggggagcaauaaaucccugcagagcgccggauuuccuacaggccucacguacucucaacugaugacccugaaggauuccaugaugcagcuugaccccagcgcuaaaacauggaucgauauugagggcagaccugaagaccccguggagaucgcccucuaccagccgaugucugggugcuauauccacuucuuucgggaaccuaccgaccugaagcaguucaagcaagaugcuaaauacucccauggaauugacgucacagaucuguuucccgcccagccuggccucaccagcgccgugaucgaggcucugcccagaaacaugguccuuacgugucagggguccgacgauauuaagcgccugcucgacucucagggacggagagauaucaaacugauugacaucgcgcugagcaaggccgauucccgccgguucgaaaaugcugugugggaccaaugcaaagaucuuugucacaugcauacaggcguuguggucgagaagaagaaaagagggggcaaggaggaaaucacaccccacugcgcccucauggacuguauuauguaugaugccgcugugucuggaggccugaacaucccuguucugcgcgccgugcucccgcgggacauggucuuuagaaccagcucccccaaaguggugcugugaggacuagucccuguucccagagcccacuuuuuuuucuuuuuuugaaauaaaauagccugucuuucagaucucaaaggcucuuuucagagccaccaaaaaaaaaaaaaaaaaaaaaaaaaaaaaaaaaaaaaaaaaaaaaaaaaaaaaaaaaaaaaaaaagaauu

SEQ ID NO: 16832 - RNA, 1951 nt, Artificial Sequence
  mRNA product Design a-1 (hSL-A64-N5) comprising derived and/or modified sequence from LASV(LASV254-NIG-2011;Clade II)__AIT17675__NP (opt5)
aggagagucccgcagucggcguccagcggcucugcuuguucgugugugugucguugcaggccuuauucaagcuuaccaugagcgccuccaaggaggugaaaucuuuccuguggacccagagccucagacgggaacuguccggcuacugcucuagcaucaaacuucaagucguuaaggacgcucaggcccugcuccacgggcuggauuuuuccgaggugucuaacgugcagcgccuuaugagaaagcagaaacgggacgauagcgaccugaagcgccucagagaucugaaucaagcggucaacaaucugguggaacucaaguccacacagcagaaaagcguucugcgggugggaacgcuuaccucugacgaucugcucacacuggcugccgaccuugagaagcugaaauccaaggucauucgcaccgaaagaccccucagcucuggcguguauauggggaaccuguccacacagcaacuggagcagcggcgcgcccuccugaauaugaucggaaugguuggcggggcucagggaacccagccuggcagagauggcgugguccgggugugggacgugaaaaacccggaucuucugaauaaccaauucgggacaaugcccagccucacccuggccugucuuacgaagcagggacaggucgaccugaaugaugcuguucucgcccugaccgaccugggccucauuuacacagcgaaguauccuaacucuuccgaccuggaucgccuuagccaaucccaucccauccugaauaugguggacaccaaaaagucuagccucaacauuuccggguacaauuuuagccugggagccgcugugaaagccggcgcuugcaugcuugaugggggaaacaugcuggagacaaucaaggucaccccucagacgauggacggcauccucaaaucuauucugaaggugaaaaagucccugggcauguucguuagcgauacacccggggaaagaaauccuuaugagaacauccucuacaagauuugucugucuggagacggcuggccguauaucgccagccggaccuccauuguggggcgcgcgugggaaaacacaaucgucgaucuugagucugacggaaaaccccagaaggugggcaccgccgggagcaauaaaucccugcagagcgcuggauuuccuaccggccucacauacucucaacugaugacgcugaaggauuccaugaugcagcuugaccccagcgccaaaaccuggauugauaucgagggcagaccugaagaccccguugagaucgcucucuaccagccgaugucugggugcuauauucacuucuuucgggaaccuacagaccugaagcaguucaagcaagaugccaaauacucccauggaaucgacguggccgaucuguuucccgcucagccuggccucaccagcgcggucauugaggcccugcccagaaacauggugcuuacaugucagggguccgacgauaucaagcgccugcucgacucucagggacggagagauauuaaacugaucgacaucgcucugagcaaggccgauucccgccgguucgaaaaugccgucugggaccaaugcaaagaucuuugucacaugcauaccggcgugguuguggagaagaagaaaagagggggcaaggaggaaauuacgccccacugcgcucucauggacuguaucauguaugaugccgcggucucuggaggccugaacauuccugugcugcgcgcuguucucccgcgggacaugguguuuagaacaagcucccccaaagucgugcugugaggacuagucccuguucccagagcccacuuuuuuuucuuuuuuugaaauaaaauagccugucuuucagaucucaaaggcucuuuucagagccaccaaaaaaaaaaaaaaaaaaaaaaaaaaaaaaaaaaaaaaaaaaaaaaaaaaaaaaaaaaaaaaaaagaauu

SEQ ID NO: 16833 - RNA, 1951 nt, Artificial Sequence
  mRNA product Design a-1 (hSL-A64-N5) comprising derived and/or modified sequence from LASV(Nig08-04;Clade II)__ADU56611__NP (opt5)
aggagagucccgcagucggcguccagcggcucugcuuguucgugugugugucguugcaggccuuauucaagcuuaccaugagcgccuccaaggaggugaaaucuuuccuguggacccagagccucagacgggaacuguccggcuacugcucuaacaucaaacuucaagucguuaaggacgcucaggcccugcuccacgggcuggauuuuagcgagguguccaaugugcagcgccuuaugagaaagcagaaacgggacgauggagaccugaagcgccucagagaucugaaccaagcggucaauaaccugguggaacucaagucuacccagcagaaaagcguucugcgggugggcacgcuuaccuccgacgaucugcucacacuggcugccgaccuugagaagcugaaaagcaaggucauucgcaccgaaagaccccucucuuccgggguguauaugggaaaucugagcacacagcaacuggagcagcggaaagcccuccugucuaugaucggcaugguugggggagcucagggcacccagccuggccgcgaugggguggucagagugugggacgugaagaacccggaucuucugaauaaccaauucggaacaaugcccucccucacccuggccugucuuacgaagcagggccaggucgaccugaaugaugcuguucucgcccugaccgaccuggggcucauuuacacagcgaaauauccuaacagcucugaccuggaucggcuuucccaaagccaucccauccugaauaugguggacaccaagaaauccucucucaacauuagcggauacaauuuuucccugggcgccgcugugaaggccggggcuugcaugcuugauggaggcaacaugcuggagacaaucaaagucaccccucagacgauggacggcauccucaagagcauucugaaagugaagcgcucucuggggauguucguuuccgauacacccggagaaagaaauccuuaugagaacauccucuacaagauuugucugagcggcgacggguggccguauaucgccucucggaccagcauugugggacgcgcgugggaaaacacaaccgucgaucuugaguccgacggcaaaccccagaagguggggaccgccggaucuaauaaaagccugcaguccgcuggcuuuccuacaggccucacguacagccaacugaugacccugaaggauucuaugaugcagcuugaccccuccgccaaaacauggaucgauauugaggggagaccugaagaccccguugagaucgcucucuaccagccgaugagcggaugcuauauccacuucuuucgggaaccuaccgaccugaagcaguucaagcaagaugccaaauacucucauggcauugacgugacagaucuguuuuccgcccagcccgggcucaccagcgcugucaucgaggcgcugccuagaaacauggugcuuacgugucagggauccgacgauauuaagaaacugcucgacucucagggccgccgggauaucaagcugauugacaucagccugaauaaagccgauuccagacgcuucgaaaacgcugucugggaccaaugcaaggaucuuugucacaugcauacaggggugguuguggagaagaaaaagcggggcggaaaagaggaaaucacaccccacugcgcccucauggacuguauuauguuugaugccgcugucucuggcgggcugaauauccccauucugagagccgugcucccucgcgacaugguuuuccggaccagcuccccgaaggugguccugugaggacuagucccuguucccagagcccacuuuuuuuucuuuuuuugaaauaaaauagccugucuuucagaucucaaaggcucuuuucagagccaccaaaaaaaaaaaaaaaaaaaaaaaaaaaaaaaaaaaaaaaaaaaaaaaaaaaaaaaaaaaaaaaaagaauu

SEQ ID NO: 16834 - RNA, 1954 nt, Artificial Sequence
  mRNA product Design a-1 (hSL-A64-N5) comprising derived and/or modified sequence from LASV(GA391;Clade III)__AAA46284__NP (opt5)
aggagagucccgcagucggcguccagcggcucugcuuguucgugugugugucguugcaggccuuauucaagcuuaccaugagcgccuccaaggaggugagaucuugccuguggacccagagccuccggcgcgaacuguccggcuacuguucuaacaucaaacuucaagucguuaaggacgcucaggcccugcuccacgggcuggauuucagcgagguguccaaugugcagagacuuaugcggaaacagaagcgcgacgauggagaccugaaaagacuccgggaucugaaccaagcggucaauaaccugguggaacucaagucuacacagcagaaaagcguucugcgcgugggcacgcuuuccagcgacgaucugcucauucuggcugccgaccuugagaaacugaagucuaaagucaccagaacagaacggccccucuccagcgggguguauaugggaaaucugucuucccagcaacuggaucagcgcagagcccuccugaacaugaucggcaugaccgggguuagcggaggcggcaagggggcuucuaauggaauugugcgggucugggacgugaaaaacgccgagcuucugaauaaccaguuuggcacaaugccuucccucacccuggcuugccuuacaaagcaggggcaaguggaucugaaugacgccguccaggcgcucaccgaucugggacugaucuacacggccaaguauccgaacagcuccgaccucgaccgccugucucagagccaucccauucuuaauaugaucgauaccaaaaaguccagccugaacaucucuggcuacaauuucucccucggggcugccguuaaagcuggagccuguaugcuggacggcggcaacaugcuugagacaauuaaggugagcccucaaaccauggaugggauccugaaaucuauucucaaggugaaaaagagccugggaauguuugucuccgacacacccggcgaaagaaacccuuaugagaauauccuguacaagauuugccucucuggggauggauggagcuauaucgcgucccggaccagcauugugggccgcgccugggaaaacacgguuguggaccuggagcaggauaauaaaccccagaagaucgggaacggaggcucuaauaaaucccuucagagcgcuggcuucgccgcugggcugaucuacucucaacucaugacacugaaggacuuuaaauguuucaaccugauuccuaaugccaagaccuggauggauaucgagggaagaccggaagaccccgucgagauugcccuuuaccagccuuccagcggcugcuaugugcacuuuuuccgggaacccacagaucucaagcaguuuaaacaggacgcuaaguacucccaugggagagacguuaccgaucuguucgcggcccaaccuggacugaccucugcugugaucgaggcccucccccgcaacauggucauuacaugucagggcagcgaagacauccggaaacugcuugagucccaggggagacgcgauaucaagcugauugacaucacgcucucuaaagccgauagccggaaguuugagaaugcugugugggaccaguucaaggaucugugccacaugcauaccggcgucgugguugaaaagaagaaaagaggaggcaaggaggaaauuacaccgcacugugcccugauggacugcaucauguuugaugcggcuguguccgggggacuugacgccaaaguccuccgcgugguucugccucgggauaugguguucagaaccagcacacccaaggucgugcugugaggacuagucccuguucccagagcccacuuuuuuuucuuuuuuugaaauaaaauagccugucuuucagaucucaaaggcucuuuucagagccaccaaaaaaaaaaaaaaaaaaaaaaaaaaaaaaaaaaaaaaaaaaaaaaaaaaaaaaaaaaaaaaaaagaauu

SEQ ID NO: 16835 - RNA, 1951 nt, Artificial Sequence
  mRNA product Design a-1 (hSL-A64-N5) comprising derived and/or modified sequence from LASV(Nig08-A19;Clade III)__ADU56619__NP (opt5)
aggagagucccgcagucggcguccagcggcucugcuuguucgugugugugucguugcaggccuuauucaagcuuaccaugagcgccuccaaggaggugaaaucuuuccuguggacccagagccucagacgggaacuguccggcuacugcucuaacaucaaacuucaagucguuaaggacgcucaggcccugcuccacgggcuggauuuuagcgagguguccaaugugcagcgccuuaugagaaagcagaaacgggacgauggagaccugaagcgccucagagaucugaaccaagcggucaauaaccugguggaacucaagucuacacagcagaaaagcguucugcgggugggcacgcuuuccagcgacgaucugcucguccuggcugccgaccuugagaagcugaaaucuaaggugguucgcaccgaaagaccccucuccagcgggauuuauaugggaaaucugucuucccagcaacuggaucagcggaaagcccuccugaacaugaucggcaugacagggggaaauggcggccgcaacaccacaagcgacgggauugugagagucugggaugugaagaaugcugagcuucugaacaaucaguucggaaccaugccuucucucacacuggccugucuuaccaagcagggccaaguggaccugaacgaugcuguccaggcccucacggaccuggggcugaucuacaccgcgaaauaucccaauuccagcgaccucgaucggcuggcccagucccauccgauucuuaacaugaucgacacaaagaaaucuagccugaauaucuccggauacaacuuuagccucggcgcugccguuaaggcuggggccugcaugcuggauggaggcaacaugcuugagaccauuaaagugucuccucaaacaauggacggcauccugaaguccauucucaaagugaagcgcagccuggggauguucaucucugauacccccggagaaagaaauccuuaugagaacauucuguacaagaucugucucagcggcgacggguggcccuauauugcgucccggacgucuaucgucggacgcgccugggaaaauacagugguugaucuggagagcgacaacaaaccucagaagaccggcaaugggggauccaacaaaagccuucagucugcuggcuuugccgcuggccugacauacucccagcucaugacccugaaggauagcaugcugcaacuugacccgaaugccaaaaccuggauggauaucgaggggagacccgaagacccuguggagauugcccucuaccagcccucuuccggaugcuauauccacuucuuucgggaaccuacagaccugaagcaguucaagcaggaugcuaaauacagccauggcauugacgucacggaucuguuugcggcccaacccgggcucaccuccgcugugaucgaggcccugccgagaaacaugguuauuacaugucagggaucugaagacauccgcaaacuucuggagagccagggccggagagauaucaagcucauugacaucucccugucuaagguggauagccgcaaauucgagaaugccgucugggaccaguuuaaggaucugugccacaugcauaccgggauuguggucgaaaagaaaaagcggggcggaaaagaggaaaucacaccucacugugcucuuauggacugcauuauguucgaugccgcgguguccggcgggguugacgcuaaggugcucagagccguccugccccgcgauaugguguuucggaccagcacgccuaaaguugugcugugaggacuagucccuguucccagagcccacuuuuuuuucuuuuuuugaaauaaaauagccugucuuucagaucucaaaggcucuuuucagagccaccaaaaaaaaaaaaaaaaaaaaaaaaaaaaaaaaaaaaaaaaaaaaaaaaaaaaaaaaaaaaaaaaagaauu

SEQ ID NO: 16836 - RNA, 1951 nt, Artificial Sequence
  mRNA product Design a-1 (hSL-A64-N5) comprising derived and/or modified sequence from LASV(G1180-SLE-2010;Clade IV)__AIT17169__NP (opt5)
aggagagucccgcagucggcguccagcggcucugcuuguucgugugugugucguugcaggccuuauucaagcuuaccaugagcgccuccaaggagaucaaaucuuuccuguggacccagagccucagacgggaacuguccggcuacugcucuaacauuaagcugcaaguggucaaagacgcucaggcccugcuccacgggcuggauuuuagcgagguuuccaaugugcagcgccuuaugagaaaggaacggcgcgacgauaacgaccugaaaagacuccgggaucugaaucaggcggugaacaaucuggucgagcucaagucuacacaacaaaagagcauccugcgcgugggaacgcuuaccuccgacgaucugcucauucuggcugccgaccuugaaaaacuuaagagcaaaguuaucagaacagagcggccccucucugccggcguguauauggggaaccuguccagccagcagcuggaucagcgcagagcucuccugucuaugauuggaauguccagcggcaaucagcgggcccaggcugggcgcgacggagucgugagaguuugggaugugaagaacgucgagcuucugaauaaccaguucggcaccaugccuucucucacacuggccugucuuaccaaacaaggccagguggaccugaaugaugcggugcaggcccucacagaccuggggcugaucuacaccgcuaaguauccgaacacguccgaccucgaucggcugacccaaagccaucccauccuuaauaugauugacacaaagaaauccucucugaacaucagcggauacaauuuuucccucggcgccgcugucaaggccggggcgugcaugcuggauggaggcaacaugcuugaaaccauuaaaguuagcccucagacaauggacgggauccugaagucuauucucaaagugaagaaagcccugggaauguucaucuccgauacccccggcgagcgcaacccuuaugaaaauauucuguacaagaucugucucagcggcgacggguggcccuauaucgcuucuagaacgagcauuacaggacgggccugggagaacaccguggucgaucuggaguccgacggcaagccucagaaagcugggucuaauaacagcaauaagucccuucagagcgugggauuuacagccggccugaccuacucucaacucaugacccugaaagaugccaugcugcagcuugacccgaacgcuaagacauggauggauaucgaagggagacccgaggacccuguugaaauugcgcucuaccagcccuccagcggaugcuauauccacuucuuucgcgagccuacggaccugaaacaguucaagcaagaugccaaguacucucauggcauugacgugaccgaucuguuugcugcccagcccggccucacauccgccgucaucgacgcucugccgcggaauauggugaucaccugucaggggagcgaugacauuagaaaacuucuggaaucccagggacgcaaggauaucaaacucauugacaucgcccugucuaagacagauagccggaaauaugagaacgcgguuugggaccaauacaaggaucugugccacaugcauaccggcguggucguggagaagaaaaagagagggggaaaagaagagauuacgccucacugugcucuuauggacugcaucauguucgaugccgccgucuccggcgggcucaauacaucugugcugcgcgcuguucugccccgggacaugguguuuagaaccagcaccccucgcgucgugcucugaggacuagucccuguucccagagcccacuuuuuuuucuuuuuuugaaauaaaauagccugucuuucagaucucaaaggcucuuuucagagccaccaaaaaaaaaaaaaaaaaaaaaaaaaaaaaaaaaaaaaaaaaaaaaaaaaaaaaaaaaaaaaaaaagaauu

SEQ ID NO: 16837 - RNA, 1951 nt, Artificial Sequence
  mRNA product Design a-1 (hSL-A64-N5) comprising derived and/or modified sequence from LASV(G1442-SLE-2011;Clade IV)__AIT17181__NP (opt5)
aggagagucccgcagucggcguccagcggcucugcuuguucgugugugugucguugcaggccuuauucaagcuuaccaugagcgccuccaaggaggugaaaucuuuccuguggacccagagccucagacgggaacuguccggcuacugcucuaacaucaaacuucaagucguuaaggacgcucaggcccugcuccacgggcuggauuuuagcgagguguccaaugugcagcgccuuaugagaaagcagcggcgcgacgauaacgaccugaaaagacuccgggaucugaaucaagcggucaacaaucugguggaacucaagucuacacagcaaaagagcguucugcgcgugggaacgcuuaccuccgacgaucugcucguccuggcugccgaccuugagaaacuuaagagcaaagugauuagaacagaacggccccucucugccggcguuuauauggggaaccuguccagccagcagcuggaucagcgcagagcucuccugaauaugaucggaaugucuggcgggauucagggaacccggacaggccgcgacggcguggucagagugugggaugugaagaacgccgaccuucugaauaaccaguucgggaccaugccuucccucacacuggcuugucuuaccaaacaaggacaggucgaucugaaugacguugugcaggcccucacggaccugggccugaucuacaccgcgaaguauccgaacgccagcgaucucgaccggcugacacaaucucaucccauucuuaauaugaucgauaccaagaaauccagccugaacaucuccggguacaauuuuucucucggagcugccgugaaggcuggcgccugcaugcuggacgggggaaacaugcuugagacaauuaaagucagcccucagaccauggauggcauccugaaguccauucucaaagugaagaaaacgcugggcauguucaucagcgacacacccggggagcgcaacccuuaugaaaauauucuguacaagaucugucucucuggagauggcuggcccuauauugcguccagaaccagcaucacagggcgggccugggagaacaccguuguggaccuggaaucugauggaaagccucagaaagcuggcagcaauaacuccaauaagucucuucagagcgccggguuugcugccggacugaccuacucccaacucaugacacugaaagacgccaugcugcagcuugauccgaacgcuaagacguggauggacaucgagggcagacccgaggacccugucgaaauugcgcucuaccagcccagcucuggcugcuauauccacuucuuucgcgagccuaccgaucugaaacaguucaagcaagacgccaaguacucccaugggauugaugugacagaccuguuugcugcccagcccggacucaccagcgccguuaucgaagcucugccgcggaauauggugauuacaugucagggcucugaugacaucaaaaagcugcuggagucccaggggagaaaagauaucaagcucauugacaucgcccugagcaaaaccgauucccgcaaguaugaaaacgcggucugggaccaauacaaggaucugugccacaugcauacgggaguggucguggagaaaaagaaacggggcgggaaggaggaaauuacaccucacugugcucuuauggacugcaucauguucgaugccgccguuucuggcggacucaauacccuggugcugagagcuguccucccccgcgacaugguguuucggaccagcacaccuagaguugugcugugaggacuagucccuguucccagagcccacuuuuuuuucuuuuuuugaaauaaaauagccugucuuucagaucucaaaggcucuuuucagagccaccaaaaaaaaaaaaaaaaaaaaaaaaaaaaaaaaaaaaaaaaaaaaaaaaaaaaaaaaaaaaaaaaagaauu

SEQ ID NO: 16838 - RNA, 1951 nt, Artificial Sequence
  mRNA product Design a-1 (hSL-A64-N5) comprising derived and/or modified sequence from LASV(G3010-SLE-2013;Clade IV)__AIT17345__NP (opt5)
aggagagucccgcagucggcguccagcggcucugcuuguucgugugugugucguugcaggccuuauucaagcuuaccaugagcgccuccaaggagaucaaaucuuuccuguggacccagagccucagacgggaacuguccggcuacugcucuaacauuaaacuucaaguggucaaagacgcucaggcccugcuccacgggcuggauuuuagcgagguuuccaaugugcagcgccuuaugagaaaggaacggcgcgacgauaacgaccugaaaagacuccgggaucugaaucaggcggugaacaaucuggucgagcucaagucuacacaacaaaagagcauccugcgcgugggaacgcuuaccuccgacgaucugcucauucuggcugccgaccuugaaaaacuuaagagcaaaguuacaagaaccgagcggccccucucugccggcguguauauggggaaccuguccagccagcagcuggaucagcgcagagcucuccugucuaugaucggaauguccagcggcguccagggggcccgggcuggacgcgacggcgugguuagagugugggaugucaagaaugccgagcuucugaacaaucaguucggcacaaugccuucucucacccuggcgugucuuacaaaacaggggcaaguggaccugaacgaugugguccaggcccucaccgaccugggacugauuuacacggcuaaguauccgaauaccuccgaccucgaucggcugacacagagccaucccauccuuaacaugaucgacaccaagaaauccucucugaauauuagcggcuacaacuuuucccucggggccgcuguuaaggccggagcgugcaugcuggauggcgggaauaugcuugaaacaaucaaagugagcccucaaaccauggacggcauucugaagucuauccucaaagugaagaaagcccugggaauguucauuuccgagacgcccggcgaacgcaacccuuaugagaacauccuguacaagauuugucucagcggggauggauggcccuauaucgcuucuagaacaagcaucaccggccgggccugggagaauacagucguggaccuggaauccgaugggaagccucagaaagcuggaucuaacaauagcaacaagucccuucagagcgccggcuuuaccgccgggcugaccuacucucagcucaugacacugaaagacgcuaugcugcaacuugauccgaaugcgaagacguggauggacauugagggaagacccgaagauccuguugagguggcccucuaccagcccuccagcggcugcuauauccacuucuuucgcgaaccuaccgaccugaaacaguucaagcaggacgcuaaguacucucauggcauugaugucacagaccuguuugccgcccaacccgggcucaccuccgcugugaucgaugcccugccgcggaacaugguuauuacaugucagggaagcgacgauaucaaaaagcugcuggagucccagggcagaaaagacaucaagcucauugauaucgcgcugucuaaaaccgacagccgcaaguaugagaaugcugugugggaucaguacaaggaccugugccacaugcauacgggggucguggucgaaaagaagaaacggggaggcaaggaggaaauuacaccucacugugcccuuauggauugcaucauguucgacgccgcuguguccgggggccucaacaccucuguucugagagccgugcugccccgcgauauggucuuucggaccagcacaccuagagugguucucugaggacuagucccuguucccagagcccacuuuuuuuucuuuuuuugaaauaaaauagccugucuuucagaucucaaaggcucuuuucagagccaccaaaaaaaaaaaaaaaaaaaaaaaaaaaaaaaaaaaaaaaaaaaaaaaaaaaaaaaaaaaaaaaaagaauu

SEQ ID NO: 16839 - RNA, 1951 nt, Artificial Sequence
  mRNA product Design a-1 (hSL-A64-N5) comprising derived and/or modified sequence from LASV(G502-SLE-2009;Clade IV)__AIT17127__NP (opt5)
aggagagucccgcagucggcguccagcggcucugcuuguucgugugugugucguugcaggccuuauucaagcuuaccaugagcgccuccaaggagaucaaaucuuuccuguggacccagagccucagacgggaacuguccggcuacugcucuaacauuaagcugcaaguggucaaagacgcucaggcccugcuccacgggcuggauuuuagcgagguuuccaaugugcagcgccuuaugagaaaggaacggcgcgacgauaacgaccugaaaagacuccgggaucugaaucaggcggugaacaaucuggucgagcucaagucuacacaacaaaagagcauccugcgcgugggaacgcuuaccuccgacgaucugcucauucuggcugccgaccuugaaaaacuuaagagcaaaguuaucagaacagagcggccccucucugccggcguguauauggggaaccuguccagccagcagcuggaucagcgcagagcucuccugucuaugauuggaauguccggcgggaaucagggaguccgggccggcaaggacggcgugguucgcgugugggaugucaaaaacgcugagcuucugaauaaccaguucgggaccaugccuagccucacacuggccugucuuaccaagcagggacaaguggaccugaaugaugcggugcaggcccucacagaccugggccugaucuacaccgcuaaguauccgaacacgucugaccucgauagacugacccagucccaucccauccuuaauaugauugacaccaaaaagagcucccugaacaucucuggguacaauuuuagccucggagccgcugucaaagccggcgcgugcaugcuggaugggggaaacaugcuugaaacaauuaagguuuccccucaaacaauggacggcauccugaaaagcauucucaaggugaaaaaggcccugggcauguucaucucugauacccccggggagcggaacccuuaugaaaauauucuguacaagaucugucucuccggagacggcuggcccuauaucgcuagccgcacgucuauuacagggagagccugggagaacaccguggucgaucuggagagcgacggaaaaccucagaaggcuggcuccaauaacucuaauaaaagccuucaguccgccggguuuacagccggacugaccuacagccagcucaugacccugaaggaugcuaugcugcaacuugacccgaacacaaaaacguggauggauaucgaaggccggcccgaggacccuguggaaauugcgcucuaccagcccucuuccggcugcuauauccacuucuuuagagagccuaccgaccugaagcaguucaagcaggaugccaaauacagccaugggauugacguuacagaucuguuugcugcccaacccggacucaccucugccgugaucgacgcucugccgcgcaauauggucaucacaugucagggcuccgaugacauucggaaacuucuggaaagccaggggagaaaggauaucaagcucauugacaucgcccugaacaaaaccgauucccgcaaguaugagaaugcggugugggaccaguacaaggaucugugccacaugcauacgggaguuguggucgagaaaaagaaacggggcgggaaggaagagauuacaccucacugugcucuuauggacugcaucauguucgaugccgccgugucuggcggacucaacaccagcguccugagagcugugcugccccgcgacaugguuuuucggaccuccacaccuagagugguccucugaggacuagucccuguucccagagcccacuuuuuuuucuuuuuuugaaauaaaauagccugucuuucagaucucaaaggcucuuuucagagccaccaaaaaaaaaaaaaaaaaaaaaaaaaaaaaaaaaaaaaaaaaaaaaaaaaaaaaaaaaaaaaaaaagaauu

SEQ ID NO: 16840 - RNA, 1951 nt, Artificial Sequence
  mRNA product Design a-1 (hSL-A64-N5) comprising derived and/or modified sequence from LASV(G733-SLE-2010;Clade IV)__AIT17155__NP (opt5)
aggagagucccgcagucggcguccagcggcucugcuuguucgugugugugucguugcaggccuuauucaagcuuaccaugagcgccuccaaggagaucaaaucuuuccuguggacccagagccucagacgggaacuguccggcuacugcucuaacauuaagcugcaaguggucaaagacgcucaggcccugcuccacgggcuggauuuuagcgagguuuccaaugugcagcgccuuaugagaaaggaacggcgcgacgauaacgaccugaaaagacuccgggaucugaaucaggcggugaacaaucuggucgagcucaagucuacacaacaaaagagcgugcugcgcguuggaacgcuuaccuccgacgaacugcucgugcuggcugccgaucuugagaaacuuaagagcaaagucaucagaacagagcggccccucucugccggcguguauauggggaaccuguccagccagcagcuggaccagcgcagagcucuccugucuaugauuggaauguccggcgggaaucagggagcccggaccggccgcgauggcguugugagagucugggacgugaagaacgcugaacuucugaauaaccaguucgggacaaugccuagccucacccuggccugucuuacaaaacagggacaaguggaucugaaugacgcgguccaggcccucaccgaucugggccugaucuacacggcuaaguauccgaacaccucugaccucgaccggcugacacagucccaucccauucuuaauaugaucgauaccaagaaaagcucccugaacaucucuggguacaauuuuagccucggagccgcuguuaaggccggcgcgugcaugcuggacgggggaaacaugcuugagacaauuaaaguguccccucaaaccauggauggcauccucaagagcauucugaaagugaagaaagcccugggcauguucaucucugacacgcccggggaacgcaacccuuaugagaauauucuguacaagaucugucucuccggagauggcuggcccuauauugcuagcagaacaucuaucaccgggcgggccugggagaacacagucguggaccuggaaagcgauggaaagccucagaaagcuggcuccaauaacucuaauaagagccuucaguccgccggguuuaccgccggacugaccuacagccagcucaugacacugaaagacgcuaugcugcaacuugauccgaacgcgaagacguggauggacaucgagggcagacccgaagauccuguugagauugcccucuaccagcccucuuccggcugcuauauccacuucuuucgcgaaccuaccgaccugaaacaguucaagcaggacgcuaaguacagccaugggauugaugugacagaccuguuugccgcccaacccggacucaccucugcugucaucgaugcccugccgcggaauauggugauuacaugucagggcuccgacgauaucagaaaacuucuggagagccaggggcgcaaggacaucaaacucauugauaucgcgcuguccaagauugacucucggaaauaugagaacgcuguuugggaucaguacaaggaccugugccacaugcauaccggaguggucguggaaaagaaaaagagaggcgggaaagaggaaaucacgccucacugugcccuuauggauugcauuauguucgacgccgcugucagcggcggacucaauucccuggugcugcgcgccguucucccccgggauaugguguuuagaacaucuaccccucgcgucgugcugugaggacuagucccuguucccagagcccacuuuuuuuucuuuuuuugaaauaaaauagccugucuuucagaucucaaaggcucuuuucagagccaccaaaaaaaaaaaaaaaaaaaaaaaaaaaaaaaaaaaaaaaaaaaaaaaaaaaaaaaaaaaaaaaaagaauu

SEQ ID NO: 16841 - RNA, 1951 nt, Artificial Sequence
  mRNA product Design a-1 (hSL-A64-N5) comprising derived and/or modified sequence from MOPV/LASV reassortant(IGS-1;Clade IV)__AFY05578__NP (opt5)
aggagagucccgcagucggcguccagcggcucugcuuguucgugugugugucguugcaggccuuauucaagcuuaccaugagcgccuccaaggagaucaaaucuuuccuguggacccagagccucagacgggaacuguccggcuacugcucuaacauuaaacuucaaguggucaaggacgcucaggcccugcuccacgggcuggauuuuagcgagguuuccaaugugcagcgccuuaugagaaaggaacggcgcgacgauaacgaccugaaaagacuccgggaucugaaucaggcggugaacaaucuggucgagcucaagucuacacaacaaaagagcauccugcgcgugggaacgcuuaccuccgacgaucugcucauucuggcugccgaccuugaaaaacugagaagcaagguuauccggacagagcgcccccucucugccggcguguauauggggaaccuguccagccagcagcuggaucagagacgggcucuccugaauaugauuggaaugucuggcgggaaccagggagcccgcgcuggcagagacggcgucgugcggguuugggaugugaaaaaugccgagcuucuguccaaccaguucgggaccaugccuagccucacacuggcgugucuuaccaagcagggacaagucgaccugaaugaugccgugcaggcucucacagaccugggccugaucuacaccgccaaauauccgaacacgucugaccucgaucgccugacccagucccaucccauccuuaauaugauugacacaaagaaaagcucccugaacaucucuggguacaauuuuagccucggagcugccgugaaggcgggcgccugcaugcuggaugggggaaacaugcuugaaaccauuaaggucuccccucaaacaauggacggcauccugaaaagcauucucaagguuaaaaaggcucugggcauguucaucucugauacccccggggagagaaacccuuaugaaaauauucuguacaaaaucugucucuccggagacggcuggcccuauaucgccagccggacgucuauuacagggagagcuugggagaacaccgugguggaucuggagagcgacggaaagccucagaaggccgauuccaauaacucuagcaaaucccuucagagcgccggcuuuacagcugggcugaccuacucucagcucaugacccugaaggacgcgaugcugcaacuugauccgaaugccaaaacauggauggacaucgaaggacgccccgaggacccugucgaaauugcucucuaccagcccuccagcggcugcuauauccacuucuuucgggagccuacggaucugaagcaguucaaacaggacgccaaguacucucauggcauugaugugaccgaccuguuugccacacaacccgggcucaccuccgcuguuaucgaugcccugccgagaaacauggugaucacaugucagggaagcgacgauauucgcaaacuucuggaaucccagggccggaaggacaucaagcucauugauaucgaccugucuaaaaccgauagcagaaaguaugagaaugcggucugggaccaguacaaagaucugugccacaugcauacgggggugguuguggagaagaagaaacgcggaggcaaggaagagauuacaccucacugugcucuuauggacugcaucauguucgacgccgccgucuccgggggccucaacaccucugugcugcgggcuguccugcccagagauaugguguuucgcaccagcacaccucggguugugcucugaggacuagucccuguucccagagcccacuuuuuuuucuuuuuuugaaauaaaauagccugucuuucagaucucaaaggcucuuuucagagccaccaaaaaaaaaaaaaaaaaaaaaaaaaaaaaaaaaaaaaaaaaaaaaaaaaaaaaaaaaaaaaaaaagaauu

SEQ ID NO: 16842 - RNA, 1951 nt, Artificial Sequence
  mRNA product Design a-1 (hSL-A64-N5) comprising derived and/or modified sequence from LASV(LM765-SLE-2012;Clade IV)__AIT17815__NP (opt5)
aggagagucccgcagucggcguccagcggcucugcuuguucgugugugugucguugcaggccuuauucaagcuuaccaugagcgccuccaaggagaucaaaucuuuccuguggacccagagccucagacgggaacuguccggcuacugcucuaacauuaagcugcaaguggucaaagacgcucaggcccugcuccacgggcuggauuuuagcgagguuuccaaugugcagcgccuuaugagaaaggaacggcgcgacgauaacgaccugaaaagacuccgggaucugaaucaggcggugaacaaucuggucgagcucaagucuacacaacaaaagagcauccugcgcgugggaacgcuuaccuccgacgaucugcucauucuggcugccgaccuugaaaaacuuaagagcaaaguuacaagaaccgagcggccccucucugccggcguguauauggggaaccuguccagccagcagcuggaucagcgcagagcucuccuggacaugaucggaaugucuggcuccaaucagggggcccgggcuggacgcgauggcgucgugagaguuugggacgugaagaacgccgagcuucugaauaaccaguucggcacaaugccuagccucacccuggcgugucuuacaaaacaggggcaagucgaucugaaugacgccgugcaggcucucaccgaccugggacugauuuacacggccaaguauccgaacaccucugaucucgaccggcugacacagucccaucccauccuuaauaugaucgauaccaagaaaagcucccugaacauuucuggcuacaauuuuagccucggggcugccgugaaggcgggagccugcaugcuggacggcgggaacaugcuugaaacaaucaaagucuccccucaaaccauggauggcauucucaagagcauccugaaaguuaagaaagcucugggaauguucauuucugacgcccccggcgagcgcaacccuuaugaaaauauccuguacaagauuugucucuccggggauggauggcccuauaucgcuagcagaacgucuaucacaggccgggccugggagaacaccgugguggaccuggagagcgaugggaagccucagaaagccggauccaauggcucuaacaagagccuucaguccgcuggguuuacagcgggacugaccuacagccagcucaugacccugaaagacgccaugcugcaacuugauccgaaugcuaagacauggauggacauugaaggcagacccgaggacccugucgaaaucgcccucuaccagcccucuuccggcugcuauauucacuucuuucgcgagccuacggaucugaaacaguucaagcaggacgccaaguacagccaugggaucgaugugaccgaccuguuugcugcccaacccggacucacaucugcgguuauugaugcucugccgcggaacauggugaucaccugucagggcuccgacgauaucagaaaacuuuucgaaagccaggggcgcaaggacauuaaacugaucgauauugcccucuccaagacagacucucggaaauaugagaaugccgucugggaucaguacaaggaccugugccacaugcauaccggaaucgugguugagaagaaaaagagaggcgggaaagaagagauuacgccucacugugcucugauggauugcaucauguuugacgccgcugugagcggcggacuuaacacauccguccuccgcgccgugcugccccgggacauggucuucagaaccucuaccccucgcgugguucugugaggacuagucccuguucccagagcccacuuuuuuuucuuuuuuugaaauaaaauagccugucuuucagaucucaaaggcucuuuucagagccaccaaaaaaaaaaaaaaaaaaaaaaaaaaaaaaaaaaaaaaaaaaaaaaaaaaaaaaaaaaaaaaaaagaauu

SEQ ID NO: 16843 - RNA, 1951 nt, Artificial Sequence
  mRNA product Design a-1 (hSL-A64-N5) comprising derived and/or modified sequence from LASV(LM776-SLE-2012;Clade IV)__AIT17825__NP (opt5)
aggagagucccgcagucggcguccagcggcucugcuuguucgugugugugucguugcaggccuuauucaagcuuaccaugagcgccuccaaggagaucaaaucuuuccuguggacccagagccucagacgggaacuguccucuuacugcagcaacauuaaacuucaaguggucaaggacgcucaggcccugcuccacggccuggauuuuuccgagguuucuaaugugcagcgccuuaugagaaaggaacggcgcgacgauaacgaccugaaaagacuccgggaucugaaucaggcggugaacaaucuggucgagcucaagagcacacaacagaaguccauccugcgcguggggacgcuuaccagcgacgaucugcucauucuggcugccgaccuugaaaaacugaagucuaaaguuacaagaaccgagcggccccucuccgccggaguguauaugggcaaccugagcucucagcagcuggaucaacgcagagcucuccuguccaugaucgggaugagcggaucuaaucagggcgcccgggcugggcgcgacggagucgugagaguuugggaugugaagaacgccgagcuucugaauaaccaguucggcacaaugccuucccucacccuggcgugucuuacaaaacagggccaagucgaccugaaugaugccgugcaggcucucaccgaccuggggcugauuuacacggccaaguauccgaacaccagcgaccucgaucggcugacacagucccaucccauccuuaauaugaucgacaccaagaaaucuagccugaacauuuccggauacaauuuuagccucggcgcugccgugaaggcgggggccugcaugcuggauggaggcaacaugcuugaaacaaucaaagucucuccucaaaccauggacgggauucugaaguccauccucaaaguuaagaaagcucugggaauguucauuagcgauacgcccggcgagcgcaacccuuaugaaaauauccuguacaagauuugucucucuggcgacggguggcccuauaucgccagcagaacauccaucaccggacgggcuugggagaacacagugguggaucuggagucugacggcaagccucagaaagccgggagcaauaacuccaauaagagccuucagucugccggauuuaccgcuggccugaccuacucccagcucaugacacugaaagaugcgaugcugcaacuugacccgaacgccaagacguggauggauauugaagggagacccgaggacccugucgaaguggcucucuaccagcccagcucuggaugcuauauccacuucuuucgcgagccuaccgaccugaaacaguucaagcaggaugccaaguacucccauggcauugacguuacagaucuguuugccgcucaacccggccucaccagcgccgugaucgacgcgcugccgcggaauauggucauuacaugucagggguccgaugacaucagaaaacuucuggaaucucagggacgcaaggauaucaaacucauugacaucgcucugagcaagaccgauucccggaaauaugagaacgccgugugggaccaguacaaggaucugugccacaugcauacgggcguuguggucgagaagaaaaagagagggggaaaagaagagauuacaccucacugugcccuuauggacugcaucauguucgaugcugccgugucuggcgggcucaauaccagcguccugcgcgcugugcugccccgggacaugguuuuuagaaccuccacaccucgcgugguccucugaggacuagucccuguucccagagcccacuuuuuuuucuuuuuuugaaauaaaauagccugucuuucagaucucaaaggcucuuuucagagccaccaaaaaaaaaaaaaaaaaaaaaaaaaaaaaaaaaaaaaaaaaaaaaaaaaaaaaaaaaaaaaaaaagaauu

SEQ ID NO: 16844 - RNA, 1951 nt, Artificial Sequence
  mRNA product Design a-1 (hSL-A64-N5) comprising derived and/or modified sequence from LASV(Mad39;Clade IV)__ANH09723__NP (opt5)
aggagagucccgcagucggcguccagcggcucugcuuguucgugugugugucguugcaggccuuauucaagcuuaccaugagcgccuccaaggagaucaaaucuuuccuguggacccagagccucagacgggaacuguccggcuacugcucuaacauuaagcugcaaguggucaaagacgcucaggcccugcuccacgggcuggauuuuagcgagguuuccaaugugcagcgccuuaugagaaagcagcggcgcgacgauaacgaccugaaaagacuccgggaucugaaucaagcggugaacaaucuggucgaacucaagucuacacagcaaaagagcgugcugcgcguuggaacgcuuaccuccgacgaucugcucacacuggcugccgaccuugagaaacuuaagagcaaagugaccagaacagaacggccccucaccgccggcgucuauauggggaaccugucuucccagcagcuggaucagcgcagagcucuccugaauaugaucggaaugagcggcgggaaccagggagcccggacaggccgcgacggcgugguuagagugugggaugucaagaaugcugagcuucugaacaaucaguucgggaccaugccuucucucacgcuggccugucuuaccaaacaaggacagguggaccugaacgaugugguccaggcgcucacagaccugggccugauuuacaccgccaaguauccgaauacauccgaccucgaucggcugacccaaagccaucccauccuuaacaugauugacacgaauaagucuucccugaacaucagcggguacaacuuuucccucggagcugccguuaaagcuggcgccugcaugcuggaugggggaaauaugcuugagacaaucaaggugucuccucagaccauggacggcauucugaaaagcauccucaaggugaaaaagucccugggcauguucauuagcgauacacccggggaacgcaacccuuaugagaauauccuguacaaaauuugucucucuggagacggcuggcccuauaucgcguccagaaccagcauuaccgggcgggccugggaaaacacagucguggaucuggagucuggaggcaagccucagaaggcugggagcaauaacuccaauaaaucucuucagagcgccggauuugcugccggccugacguacucccaacucaugacccugaaggacgccaugcugcagcuugauccgaacgcuaaaacauggauggacaucgagggcagacccgaagauccuguugagaucgcgcucuaccagcccauuagcgggugcuauauccacuucuuucgcgaaccuaccgaccugaagcaguucaaacaagacgccaaguacucucauggaauugaugugacagaccuguuugcugcccagcccggccucaccuccgccgucaucgaggcucugccgcggaauauggugauuacgugucaggggagcgaugacaucagaaaacuuuucgaaucucagggacgcaaggauaucaagcugauugacaucgcccucuccaaaacagauagccggaaguaugagaacgcgguuugggaccaauacaaagaucugugccacaugcauaccggcguggucguggagaagaagaaaaagggcgggaaagaagagauuaccccucacugugcucugauggacugcaucauguuugaugccgccgucuccggaggccuuaauacacucgugcugagagcuguucugccccgcgacaugguguuccggaccucuacaccuaaggucgugcucugaggacuagucccuguucccagagcccacuuuuuuuucuuuuuuugaaauaaaauagccugucuuucagaucucaaaggcucuuuucagagccaccaaaaaaaaaaaaaaaaaaaaaaaaaaaaaaaaaaaaaaaaaaaaaaaaaaaaaaaaaaaaaaaaagaauu

SEQ ID NO: 16845 - RNA, 1951 nt, Artificial Sequence
  mRNA product Design a-1 (hSL-A64-N5) comprising derived and/or modified sequence from LASV(Z0947-SLE-2011;Clade IV)__AIT17841__NP (opt5)
aggagagucccgcagucggcguccagcggcucugcuuguucgugugugugucguugcaggccuuauucaagcuuaccaugagcgccuccaaggagaucaaaucuuuccuguggacccagagccucagacgggaacuguccggcuacugcucuaacauuaagcugcaaguggucaaagacgcucaggcccugcuccacgggcuggauuuuagcgagguuuccaaugugcagcgccuuaugagaaaggaacggcgcgacgauaacgaccugaaaagacuccgggaucugaaucaggcggugaacaaucuggucgagcucaagucuacacaacaaaagagcauccugcgcgugggaacgcuuaccuccgacgaucugcucauucuggcugccgaccuugaaaaacuuaagagcaaaguuacaagaaccgagcggccccucucugccggcguguauauggggaaccuguccagccagcagcuggaucagcgcagagcucuccugaauaugaucggaaugucuggcuccaaccagggggcccggacaggacgcgacggcgucgugagaguuugggaugugaagaaugcugagcuucugaacaaucaguucggcaccaugccuagccucacacuggccugucuuaccaaacaggggcaagucgaccugaacgaugcggugcaggcccucacggaccugggacugauuuacaccgcuaaguauccgaauacaucugaccucgaucggcugacccagucccaucccauccuuaacaugaucgacacaaagaaaagcucccugaauauuucuggcuacaacuuuagccucggggccgcugugaaggccggagcgugcaugcuggauggcgggaacaugcuugaaaccaucaaagucuccccucaaacgauggacggcauucucaagagcauccugaaaguuaagaaagcccugggaauguucauuucugaugcucccggcgagcgcaauccuuaugaaaacauccuguacaagauuugucucuccggggacggauggcccuauaucgccagcagaacaucuaucaccggccgggcuugggagaauacagugguggaucuggagagcgacgggaagccucagaaagccggauccaacggcucuaauaagagccuucaguccgccggguuuaccgcuggacugaccuacagccagcucaugacacugaaagaugcgaugcugcaacuugacccgaacgccaagacguggauggauauugaaggcagacccgaggacccugucgaaaucgcucucuaccagcccucuuccggcugcuauauucacuucuuucgcgagccuaccgaccugaaacaguucaagcaggaugccaaguacagccaugggaucgacgugacagaucuguuugccgcucaacccggacucaccucugccguuauugacgcgcugccgcggaauauggugaucacaugucagggcuccgaugacaucagaaaacuuuucgaaagccaggggcgcaaggauauuaaacugaucgacauugcucucuccaagaccgauucucggaaauaugagaacgccgucugggaccaguacaaggaucugugccacaugcauacgggaaucgugguugagaagaaaaagagaggcgggaaagaagagauuacaccucacugugcccugauggacugcaucauguuugaugcugccgugagcggcggacuuaauaccuccguccuccgcgcugugcugccccgggacauggucuucagaaccucuacaccucgcgugguucugugaggacuagucccuguucccagagcccacuuuuuuuucuuuuuuugaaauaaaauagccugucuuucagaucucaaaggcucuuuucagagccaccaaaaaaaaaaaaaaaaaaaaaaaaaaaaaaaaaaaaaaaaaaaaaaaaaaaaaaaaaaaaaaaaagaauu

SEQ ID NO: 16846 - RNA, 1982 nt, Artificial Sequence
  mRNA product Design a-1 (hSL-A100) comprising derived and/or modified sequence from LASV(Josiah;Clade IV)__NP_694869__NP (opt1)
aggagagucccgcagucggcguccagcggcucugcuuguucgugugugugucguugcaggccuuauucaagcuuaccaugagcgccuccaaggagaucaagagcuuccuguggacccagucccuccgccgggagcugagcggcuacugcuccaacaucaagcuccagguggucaaggacgcccaggcgcugcugcacgggcuggacuucagcgagguguccaacgugcagcgccucaugcggaaggagcgccgggacgacaacgaccugaagcgccugcgggaccucaaccaggccgucaacaaccugguggagcucaagagcacccagcagaaguccauccugcgcgugggcacccugaccagcgacgaccugcucauccuggccgccgaccuggagaagcucaaguccaaggucauccggaccgagcgcccccugagcgccgggguguacaugggcaaccuguccagccagcagcucgaccagcggcgcgcgcugcugaacaugaucgggauguccggcggcaaccagggggcccgggccggccgcgacggggugguccgggugugggacgugaagaacgccgagcuccugaacaaccaguucggcaccaugccgagccugacgcucgcgugccugaccaagcaggggcaggucgaccugaacgacgccgugcaggcccucaccgaccugggccugaucuacaccgccaaguaccccaacacguccgaccucgaccgccugacccagagccaccccauccugaacaugaucgacaccaagaaguccagccucaacaucagcggcuacaacuucucccugggggccgcggugaaggccggcgccugcaugcuggacgggggcaacaugcucgagaccaucaaggucagcccccagacgauggacggcauccugaaguccauccugaaggugaagaaggcccucgggauguucaucagcgacaccccgggcgagcggaaccccuacgagaacauccuguacaagaucugccuguccggggacggcuggcccuacaucgccagccgcaccuccaucaccgggcgggcgugggagaacacgguggucgaccucgagagcgacggcaagccccagaaggccgacuccaacaacagcuccaagagccugcaguccgccggcuucaccgccgggcugaccuacagccagcucaugacccugaaggacgccaugcugcagcuggacccgaacgcgaagacguggauggacaucgagggccgccccgaggaccccguggagaucgcccucuaccagcccuccagcgggugcuacauccacuucuuccgggagccgaccgaccugaagcaguucaagcaggacgccaaguacucccacggcaucgacgugaccgaccuguucgccacccagcccgggcucacgagcgccgucaucgacgcgcugccccgcaacauggugaucacgugccagggcuccgacgacauccgcaagcugcucgagagccagggccggaaggacaucaagcugaucgacaucgcccugagcaagaccgacucccgcaaguacgagaacgccgugugggaccaguacaaggaccucugccacaugcacaccggggucguggucgagaagaagaagcggggcgggaaggaggagaucaccccgcacugcgcccugauggacugcaucauguucgacgcggccgugagcggcgggcugaacaccuccgugcuccgcgccguccugccccgggacaugguguuccgcaccagcacgccccgggugguccugugaggacuagucccuguucccagagcccacuuuuuuuucuuuuuuugaaauaaaauagccugucuuucagaucucaaaggcucuuuucagagccaccaaaaaaaaaaaaaaaaaaaaaaaaaaaaaaaaaaaaaaaaaaaaaaaaaaaaaaaaaaaaaaaaaaaaaaaaaaaaaaaaaaaaaaaaaaaaaaaaaaaaa

SEQ ID NO: 16847 - RNA, 1982 nt, Artificial Sequence
  mRNA product Design a-1 (hSL-A100) comprising derived and/or modified sequence from LASV(LP;Clade I)__AAF86702__NP (opt1)
aggagagucccgcagucggcguccagcggcucugcuuguucgugugugugucguugcaggccuuauucaagcuuaccaugagcaacuccaaggagaucaagagcuuccuguggacccagucccuccgccgggagcugagcggcuacugcuccaacaucaagcuccagguggucaaggacgcccaggcccugcugcacgggcuggacuucagcgagguguccaacgugcagcgccucaugcggaagcagaagcgcgacgacgcggaccugaagcggcugcgcgaccucaaccaggccgucaacaaccugguggagcucaagagcacccagcagaagaacgugcugcgggucggcacgcuguccagcgacgaccugaucacccucgccgccgaccuggagaagcugaaguccaaggugauccgcaccgagcggccccucagcuccgggguguacaugggcaaccugagcucccagcagcuggaccagcgccgggcccuccugagcaugaucgggauguccggcggcccgcaggggaaccgcaccggcggggacggcgucgugcgggugugggacgucaagaacgcggagcugcucaacaaccaguucgggacgaugcccagccugacccuggccugccucaccaagcagggccagguggaccugaacgacgccgugcaggcccugaccgaccucggccugaucuacacggcgaaguaccccaacuccagcgaccuggacaugcucacccagagccaccccauccuggggauggucgacaccaagaaguccagccugaacaucuccggcuacaacuucagccucggggccgccgugaaggccggcgccugcaugcuggacggcgggaacaugcuggagaccaucaagguguccccgcagacgauggacggcauccucaagagcauccugaaggucaagcgcucccuggggauguucaucagcgacacccccggcgagcggaaccccuacgagaacauccucuacaagaucugccuguccggggagggcuggcccuacaucgcgagccgcaccuccaucaccggccgggccugggagaacacgcugguggaccucgagagcgacaacaagccgcccaagcugaacuccgccgggagcaacaagucccugcaggccgccggccucaacgcggggcugaccuacagccagcugaugacccugaaggacugcaugcuccagcuggaccccuccagcaagaccuggaucgacaucgagggccgccccgaggacccgguggagaucgcccuguuccagcccuccagcgggugcuacauccacuucuuccgggagcccacggaccucaagcaguucaagcaggacgccaaguacagccacggcaucgacgucaccgaccuguucuccacccagcccggccugaccagcgccgugaucgaggcccucccgcgcaacauggugcugacgugccagggguccgacgacaucaagaagcugcucgagagccagggccggcgcgacaucaagcugaucgacaucucccugagcaaggcggacucccgcaaguucgagaacgccgucugggaccaguacaaggaccucugccacaugcacaccgggguggucguggagaagaagaagcggggcgggaaggaggagaucacgccccacugcgcccugcuggacugcaucauguucgacgccgccaccaccggcagccucaacaucaccacccugcgcgcggugcugccccgggacauggucuuccgcaccuccacgcccaagguggugcucugaggacuagucccuguucccagagcccacuuuuuuuucuuuuuuugaaauaaaauagccugucuuucagaucucaaaggcucuuuucagagccaccaaaaaaaaaaaaaaaaaaaaaaaaaaaaaaaaaaaaaaaaaaaaaaaaaaaaaaaaaaaaaaaaaaaaaaaaaaaaaaaaaaaaaaaaaaaaaaaaaaaaa

SEQ ID NO: 16848 - RNA, 1982 nt, Artificial Sequence
  mRNA product Design a-1 (hSL-A100) comprising derived and/or modified sequence from LASV(803213;Clade II)__AAF86704__NP (opt1)
aggagagucccgcagucggcguccagcggcucugcuuguucgugugugugucguugcaggccuuauucaagcuuaccaugagcgccuccaaggaggugaaguccuuccuguggacccagagccuccgccgggagcugagcggcuacugcuccaacaucaagcugcaggucgugaaggacgcccaggcgcuccugcacgggcuggacuucagcgaggugaacaacguccagcgccucaugcggaagcagaagcgcgacgacggcgaccugaagcggcugcgcgaccucaaccaggccgugaacaaccugguggagcugaaguccacccagcagaaguccauccuccgggucgggacgcugaccagcgacgaccugcucacccuggccgccgaccuggagaagcucaagagcaaggugauccgcaccgagcggccccuguccagcggcguguacauggggaaccuguccacgcagcagcucgagcagcgccgggcccugcugaacaugaucggcauggucggcggggcgcagggcacccagccggggcgcgacggcguggugcgggucugggacgugaagaaccccgaccuccugaacaaccaguucgggaccaugcccagccugacccucgccugccugacgaagcagggccagguggaccugaacgacgccguccucgcccugaccgaccugggccucaucuacaccgcgaaguaccccaacuccagcgaccuggaccgccugucccagagccacccgauccucaacaugguggacaccaagaaguccagccugaacaucagcggguacaacuucucccugggcgccgccgugaaggccggggccugcaugcucgacggcggcaacaugcuggagacgaucaaggucacgccccagaccauggacgggauccucaagagcauccugaaggugaagcggucccugggcauguucgugagcgacacccccggggagcgcaaccccuacgagaacauccuguacaagaucugccucuccggcgacggguggccguacaucgcgagccggaccuccaucgucggccgcgccugggagaacaccaccguggaccuggagagcgacggcaagccccagaagguggggaccgccggcuccaacaagagccugcaguccgccggguuccccacgggccucaccuacagccagcugaugacccugaaggacuccaugaugcagcuggaccccagcgccaagaccuggaucgacaucgaggggcggccggaggaccccgucgagaucgcgcucuaccagcccauguccggcugcuacauccacuucuuccgcgagcccacggaccugaagcaguucaagcaggacgccaaguacagccacggcaucgacguggccgaccuguucccggcccagcccgggcucaccuccgccgucaucgaggcgcugccccggaacauggugcugaccugccagggcagcgacgacaucaagaagcuccuggacucccaggggcgccgcgacaucaagcugaucgacaucagccucagcaagguggacucccggaaguucgagaacgccgucugggaccagugcaaggaccugugccacaugcacaccggcgugguggucgagaagaagaagcgcgggggcaaggaggagaucacgccccacugcgcccugauggacugcaucauguucgacgccgccgugagcggcgggcucaacaucccggugcugcgggcgguccugccccgcgacaugguguuccggaccuccagccccaaggugguccucugaggacuagucccuguucccagagcccacuuuuuuuucuuuuuuugaaauaaaauagccugucuuucagaucucaaaggcucuuuucagagccaccaaaaaaaaaaaaaaaaaaaaaaaaaaaaaaaaaaaaaaaaaaaaaaaaaaaaaaaaaaaaaaaaaaaaaaaaaaaaaaaaaaaaaaaaaaaaaaaaaaaaa

SEQ ID NO: 16849 - RNA, 1985 nt, Artificial Sequence
  mRNA product Design a-1 (hSL-A100) comprising derived and/or modified sequence from LASV(GA391;Clade III)__CAA36646__NP (opt1)
aggagagucccgcagucggcguccagcggcucugcuuguucgugugugugucguugcaggccuuauucaagcuuaccaugagcgccuccaaggaggugcgcagcuuccuguggacccagucccuccggcgcgagcugagcggcuacugcuccaacaucaagcugcaggucgugaaggacgcccaggcgcuccugcacgggcuggacuucagcgagguguccaacguccagcggcucaugcgcaagcagaagcgggacgacggcgaccugaagcgccugcgggaccucaaccaggccgugaacaaccugguggagcucaagagcacccagcagaaguccguccugcgcguggggacccugagcuccgacgaccugcucauccuggccgccgaccuggagaagcucaagagcaaggugacccggaccgagcgcccccuguccagcggcgucuacauggggaaccuguccagccagcagcucgaccagcggcgcgcccugcugaacaugaucggcaugaccggcguguccgggggcgggaagggcgcgagcgacgggaucgugcgggucugggacgugaagaacgccgagcuccugaacaaccaguucggcacgaugccgucccugacccucgccugccugaccaagcagggccagguggaccugaacgacgccguccaggcgcucaccgaccuggggcugaucuacacggccaaguaccccaacagcagcgaccucgaccgccugucccagagccaccccauccugaacaugaucgacaccaagaaguccagccucaacaucuccggcuacaacuucagccugggggccgccgugaaggccggcgcgugcaugcuggacggcgggaacaugcucgagaccaucaaggugagcccccagaccauggacggcauccucaaguccauccugaaggucaagaagucccuggggauguucgugagcgacacgccgggcgagcggaaccccuacgagaacauccuguacaagaucugccuguccggggacggcuggcccuacaucgccagccgcaccuccaucgugggccgggccugggagaacaccgucguggaccucgagcaggacaacaagccccagaagaucgggaacggcgggagcaacaagucccugcagagcgccggcuucgccgcggggcugaccuacucccagcucaugacgcugaaggacuucaagugcuucaaccugaucccgaacgccaagaccuggauggacaucgagggccgccccgaggaccccguggagaucgcccuguaccagcccagcuccggcugcuacguccacuucuuccgggagccgaccgaccucaagcaguucaagcaggacgccaaguacagccacgggaucgacgugaccgaccuguucgccgcgcagcccggccugacgagcgccgucaucgaggcccucccccgcaacauggugaucacgugccagggguccgaggacauccggaagcugcuggagagccagggccgccgcgacaucaagcucaucgacaucacccuguccaaggccgacagccggaaguucgagaacgccgugugggaccaguucaaggaccugugccacaugcacaccggggucgugguggagaagaagaagcgcggcggcaaggaggagaucacgccccacugcgcgcucauggacugcaucauguucgacgccgccgucuccgggggccuggacgccaaggugcugcgggugguccucccgcgcgacaugguguuccggaccagcacccccaaggugguccugugaggacuagucccuguucccagagcccacuuuuuuuucuuuuuuugaaauaaaauagccugucuuucagaucucaaaggcucuuuucagagccaccaaaaaaaaaaaaaaaaaaaaaaaaaaaaaaaaaaaaaaaaaaaaaaaaaaaaaaaaaaaaaaaaaaaaaaaaaaaaaaaaaaaaaaaaaaaaaaaaaaaaa

SEQ ID NO: 16850 - RNA, 1982 nt, Artificial Sequence
  mRNA product Design a-1 (hSL-A100) comprising derived and/or modified sequence from LASV(AV;Clade V)__CCA30315__NP (opt1)
aggagagucccgcagucggcguccagcggcucugcuuguucgugugugugucguugcaggccuuauucaagcuuaccaugagcgccuccaaggaggugaaguccuuccuguggacccagagccuccgccgggagcugagcggcuacugcuccaacaucaagcugcaggucgugaaggacgcccaggcgcuccugcacgggcuggacuucagcgagguguccaacguccagcgccucaugcggaagcagcgccgggacgacagcgaccugaagcgccugcgggaccucaaccaggccgugaacaaccugguggagcugaaguccacccagcagaaguccguccuccgcgugggcacgcugagcagcgacgaccugcucacccuggccgccgaccuggagaagcucaaguccaaggugacccggaccgagcgcccccugagcuccggggucuacaugggcaaccugagcucccagcagcucgaccagcggcgcgcccugcugaaccucaucgggaugacgaacggcagccagggcucccaggcggggcgggacggcguggugcgcgucugggacgugaagaacgccgagcugcugaacaaccaguucgggaccaugccgagccucacccuggccugccugaccaagcagggccagguggaccucaacgacgucgugcaggcccugacggaccuggggcucaucuacaccgcgaaguaccccaacaccagcgaccuggaccggcugacccagucccaccccauccucaacaugaucgacacgaagaaguccagccugaacaucagcggcuacaacuucucccugggcgccgccgugaaggccggggccugcaugcucgacggcgggaacaugcuggagaccaucaaggucagcccccaguccauggacggcauccucaagagcauccugaaggugaagcgcgcgcugggcauguucguguccgacaccccgggggagcggaaccccuacgagaacauccuguacaagaucugccucagcggcgacggguggcccuacaucgccucccgcaccagcaucgucggccgggccugggagaacacggugguggaccuggagaccgacgggaagccccagaagaucggcuccggcaacagcaacaagucccugcagagcgccggguucuccgccggccucaccuacagccagcugaugacccugaaggacgcgaugcugcagcucgacccgaacgccaagacguggauggacaucgaggggcgccccgaggaccccgucgagguggcccuguaccagcccaucuccggcugcuacauccacuucuuccgggagccgaccgaccugaagcaguucaagcaggacgccaaguacagccacgggaucgacaucgccgaccucuucgcggcccagcccggccugaccagcgccgucaucgaggcccugccccgcaacauggugaucacgugccagggcuccgaggacaucaagaagcuccuggagagccaggggcgcaaggacaucaagcugaucgacaucgcccucuccaagaucgacagccggaaguucgagaacgcggugugggaccaguacaaggaccugugccacaugcacaccggcgucgugguggagaagaagaagcgcgggggcaaggaggagaucaccccgcacugcgcccugauggacugcaucauguucgacgccgccgucuccgggggccucaacacccuggugcugcgggcggugcucccccgcgacauggucuuccggaccagcacgccccgcguggugcugugaggacuagucccuguucccagagcccacuuuuuuuucuuuuuuugaaauaaaauagccugucuuucagaucucaaaggcucuuuucagagccaccaaaaaaaaaaaaaaaaaaaaaaaaaaaaaaaaaaaaaaaaaaaaaaaaaaaaaaaaaaaaaaaaaaaaaaaaaaaaaaaaaaaaaaaaaaaaaaaaaaaaa

SEQ ID NO: 16851 - RNA, 1982 nt, Artificial Sequence
  mRNA product Design a-1 (hSL-A100) comprising derived and/or modified sequence from LASV(Togo/2016/7082;Clade VI)__AMR44578__NP (opt1)
aggagagucccgcagucggcguccagcggcucugcuuguucgugugugugucguugcaggccuuauucaagcuuaccaugagcaacuccaaggaggugaaguccuuccuguggacccagagccuccgccgggagcugagcggcuacugcuccaacaucaagcugcaggucgugaaggacgcccaggcccuccugcacgggcuggacuucagcgagguguccaacguccagcgccucaugcggaagcagaagcgcgacgacggcgaccugaagcggcugcgcgaccucaaccaggcggugaacaaccugguggagcucaagagcguccagcagaaguccauccugcggguggggacccugaccagcgacgaccugcucacccuggccgccgaccuggagaagcucaaguccaaggugacccgcaccgagcggccccugagcuccggcgucuacauggggaaccugagcucccagcagcucgaccagcgccgggcccugcugagcaugaucggcauguccggcgggaaccagaacagccagccgaagggcgacgggguggugcgcgucugggacgugaagaacgccgaccuccugaacaaccaguucggcacgaugcccucccugacccucgcgugccugaccaagcagggccagguggaccugaacgacgccguccaggcccucaccgaccuggggcugaucuacacggccaaguaccccaacagcagcgaccucgaccggcugucccagagccaccccauccugaacaugaucgacaccaagaaguccagccucaacaucuccggcuacaacuucagccugggggcggccaucaagaccggcgccugcaugcuggacgggggcaacaugcucgagaccaucaaggugacgccgcagaccauggacggcauccugaaguccauccugaaggugaagcgcagccucgggauguucaucuccgacacccccggcgagcggaaccccuacgagaacauccuguacaagaucugccugagcggggacggcuggcccuacaucgccucccgcaccgccaucaucgggcgggcgugggagaacacggucguggaccucgagagcgacuccaagccgcagaagaucggcagcaacggcuccaacaagagccugcaguccgccggguucgcccccggccugaccuacagccagcucaugacccugaaggacuccaugcugcagcuggaccccaacgccaagaccuggaucgacaucgaggggcgccccgaggacccgguggaggucgcccucuuccagcccaucagcggcugcuacauccacuucuuccgggagcccacggaccugaagcaguucaagcaggacgcgaaguacagccacgggaucgacgugaccgaccuguucgccgcccagcccggccucaccuccgccgugaucgaggcccugccgcgcaacaugguccugaccugccagggcagcgacgacaucaagaagcuccuggacucccaggggcggcgcgacaucaagcugaucgacgugagccucaacaagaucgacucccgcaaguucgagaacgcggucugggaccaguacaaggaccugugccacaugcacacgggcgugguggucgagaagaagaagaagggcgggaaggaggagaucacgccccacugcgcccugcucgacugcaucauguucgacgccgccgugagcgggggccugaacgccaccgugcugcgggcgguccucccccgcgacaugguguuccggaccuccagccccaaggugguccugugaggacuagucccuguucccagagcccacuuuuuuuucuuuuuuugaaauaaaauagccugucuuucagaucucaaaggcucuuuucagagccaccaaaaaaaaaaaaaaaaaaaaaaaaaaaaaaaaaaaaaaaaaaaaaaaaaaaaaaaaaaaaaaaaaaaaaaaaaaaaaaaaaaaaaaaaaaaaaaaaaaaaa

SEQ ID NO: 16852 - RNA, 1982 nt, Artificial Sequence
  mRNA product Design a-1 (hSL-A100) comprising derived and/or modified sequence from LASV(KAK-428;Clade n.d. (VII))__ANH09741__NP (opt1)
aggagagucccgcagucggcguccagcggcucugcuuguucgugugugugucguugcaggccuuauucaagcuuaccaugagcaacuccaaggaggugaaguccuuccuguggacccagagccuccgccgggagcugagcggcuacugcaccaacaucaagcugcaggucgugaaggacgcccaggcccuccugcacgggcuggacuucuccgaggugagcaacguccagcgccucaugcggaagcagaagcgcgacgacaacgaccugaagcggcugcgcgaccucaaccaggcggugaacaaccugguggagcugaaguccguccagcagaaguccgugcucaaggugggcacgcugaacagcgacgaccugcucacccuggccgccgaccuggagaagcucaagagcaaggucgugcggaccgagcgcccccuguccagcgggguguacaugggcaaccuguccagccagcagcucgaccagcggcgcgcccugcugaacaugaucgggauggccggcggcucccaggggaaccagccgagccgggacggcgucgugcgcgugugggacgucaagaacgcggaccuccugaacaaccaguucgggaccaugcccucccugacgcucgccugccugaccaagcagggccagguggaccugaacgacgugguccucgcccugaccgaccuggggcucaucuacaccgccaaguaccccaacagcuccgaccuggaccggcugagccagaaccaccccgugcucaacaugaucgacgugaacaagagcucccugaacaucagcggcuacaacuucucccugggcgcggccgucaaggccggggccugcaugcucgacggcgggaacaugcuggagacgaucaagaucagcccgcagaccguggacggcauccugaaguccauccucaaggugaagcgcgcccugggcauguucgucagcgacacccccggggagcggaaccccuacgagaacauccuguacaaggugugccucuccggcaacggguggcccuacaucgcgagccgcaccuccaucgucggccgggccugggagaacacggugguggaccuggagagcaacaagaaccagccgaaggucgggaacaacggcuccaacaagaugcugcagagcuccggcuucgccaccgggcucaccuacagccagcugaugacccugcgcgacuccaugcugcagcucgaccccacggccaagaccuggaucgacaucgagggccggcccgaggaccccguggagcuggcccuguuccagccgagcuccgggugcuacauccacuucuuccgcgagcccaccgaccucaagcaguucaagcaggacgcgaaguacagccacggcaucgacgugaacgaccuguucuccgcccagcccgggcugaccagcgccguccucgaggcccugccccggaacauggugcugacgugccagggcagcgacgacauccgcaagcuccuggacucccaggaccgcaaggacaucaagcugaucgacaucagccucuccaaggccgacgcgcggaaguucgagaacgacgugugggaccaguucaaggaccugugccacaugcacaccggcaucgucguggagaagaagaagaagggcgggaagcaggagaugaccccgcacugcgcccugcucgacugcaucauguucgacgccgccgugagcgggggccugaacguccccacccugcgcgccgugcuccccacggacaugguguuccggaccaucaccaccaaggucgugcugugaggacuagucccuguucccagagcccacuuuuuuuucuuuuuuugaaauaaaauagccugucuuucagaucucaaaggcucuuuucagagccaccaaaaaaaaaaaaaaaaaaaaaaaaaaaaaaaaaaaaaaaaaaaaaaaaaaaaaaaaaaaaaaaaaaaaaaaaaaaaaaaaaaaaaaaaaaaaaaaaaaaaa

SEQ ID NO: 16853 - RNA, 1982 nt, Artificial Sequence; identical to SEQ ID NO: 16847
  mRNA product Design a-1 (hSL-A100) comprising derived and/or modified sequence from LASV(Pinneo-NIG-1969;Clade I)__AIT17837__NP (opt1)

SEQ ID NO: 16854 - RNA, 1982 nt, Artificial Sequence
  mRNA product Design a-1 (hSL-A100) comprising derived and/or modified sequence from LASV(ISTH0009-NIG-2011;Clade II)__AIT17405__NP (opt1)
aggagagucccgcagucggcguccagcggcucugcuuguucgugugugugucguugcaggccuuauucaagcuuaccaugagcguguccaaggaggucaagagcuuccuguggacccagucccuccgccgggagcugagcggcuacugcuccaacaucaagcuccagguggugaaggacgcccaggcccugcugcacgggcuggacuucagcgaggucuccaacgugcagcgccucaugcggaagcagaagcgcgacgacagcgaccugaagcggcugcgcgaccucaaccaggcggugaacaaccuggucgagcugaaguccacccagcagaaguccauccuccgggugggcacccugaccagcgacgaccugcucacccuggccgccgaccuggagaagcucaagagcaaggugauccgcaccgagcggccccuguccagcggggucuacaugggcaaccuguccacgcagcagcucgagcagcgccgggcccugcugaacaugaucgggauggugggcggcgcccaggggacccagccgggccgcgacggggugguccgggugugggacgugaagaaccccgaccuccugaacaaccaguucggcaccaugcccagccugacccucgcgugccugacgaagcaggggcaggucgaccugaacgacgccgugcucgcccugaccgaccugggccucaucuacaccgccaaguaccccaacuccagcgaccuggaccgccugucccagagccacccgauccucaacaugguggacaucaagaaguccagccugaacaucagcggcuacaacuucucccugggggcggccgucaaggccggcgccugcaugcucgacgggggcaacaugcuggagaccaucaaggugacgccccagaccauggacggcauccucaagagcauccugaaggugaagcggucccuggggauguucgucagcgacacccccggcgagcgcaaccccuacgagaacauccuguacaagaucugccucuccggggacggcuggccguacaucgccagccggaccuccaucguggggcgcgcgugggagaacacgaccguggaccuggagagcgacggcaagccccagaaggucggcuccgccgggagcaacaagucccugcagagcgccggcuuccccaccgggcucaccuacucccagcugaugacgcugaaggacagcaugaugcagcuggaccccuccgccaagaccuggaucgacaucgagggccggccggaggaccccguggagaucgcccucuaccagcccaugagcgggugcuacauccacuucuuccgcgagcccaccgaccugaagcaguucaagcaggacgcgaaguacucccacggcaucgacgucgccgaccuguucccggcccagcccggccucaccagcgccgugaucgaggcccugccccggaacauggugcugacgugccaggggagcgacgacaucaagcgccuccuggacucccagggccgccgggacaucaagcugaucgacaucgcgcucagcaaggccgacucccgccgguucgagaacgccgucugggaccagugcaaggaccugugccacaugcacaccggggugguggucgagaagaagaagcgcggcgggaaggaggagaucacgccccacugcgcccugauggacugcaucauguacgacgccgcggugagcggcggccucaacaucccggugcugcgggccguccugccccgcgacaugguguuccggaccuccagccccaaggugguccucugaggacuagucccuguucccagagcccacuuuuuuuucuuuuuuugaaauaaaauagccugucuuucagaucucaaaggcucuuuucagagccaccaaaaaaaaaaaaaaaaaaaaaaaaaaaaaaaaaaaaaaaaaaaaaaaaaaaaaaaaaaaaaaaaaaaaaaaaaaaaaaaaaaaaaaaaaaaaaaaaaaaaa

SEQ ID NO: 16855 - RNA, 1982 nt, Artificial Sequence
  mRNA product Design a-1 (hSL-A100) comprising derived and/or modified sequence from LASV(ISTH2010-NIG-2012;Clade II)__AIT17483__NP (opt1)
aggagagucccgcagucggcguccagcggcucugcuuguucgugugugugucguugcaggccuuauucaagcuuaccaugagcgccuccaaggaggugaaguccuuccuguggacccagagccuccgccgggagcugagcggcuacugcuccaacaucaagcugcaggucgugaaggacgcccaggcgcuccugcacgggcuggacuucagcgagguguccaacguccagcgccucaugcggaagcagaagcgcgacgacagcgaccugaagcggcugcgcgaccucaaccaggccgugaacaaccugguggagcugaaguccacccagcagaaguccauccuccgggucggcacgcugaccagcgacgaccugcucacccuggccgccgaccuggagaagcucaagagcaaggugauccgcaccgagcggccccuguccagcgggguguacaugggcaaccuguccacgcagcagcucgagcagcgccgggcccugcugaaccucaucgggauggucggcggcgcgcaggggacccagccgggccgcgacgggguggugcgggucugggacgugaagaaccccgaccugcugaacaaccaguucggcaccaugcccagccucacccuggccugccugacgaagcagggccagguggaccucaacgacgccguccuggcccugaccgaccucgggcugaucuacaccgcgaaguaccccaacuccagcgaccuggaccgccucucccagagccacccgauccugaacaugguggacaccaagaaguccagccugaacaucagcggcuucaacuucucccucggggccgccgugaaggccggcgccugcaugcuggacgggggcaacaugcuggagacgaucaaggucacgccccagaccauggacggcauccucaagagcauccugaaggugaagaagucccuggggauguucgugagcgacacccccggcgagcggaaccccuacgagaacauccucuacaagaucugccuguccggggacggcuggccguacaucgcgagccgcaccuccaucgucgggcgggccugggagaacaccaccguggaccuggagagcgacggcaagccccacaaggugggcaccgccggguccaacaagagccuccaguccgccggcuuccccacggggcugaccuacagccagcugaugacccugaaggacuccaugaugcagcucgaccccagcgccaagaccuggaucgacaucgagggccgcccggaggaccccgucgagaucgcgcuguaccagcccauguccgggugcuacauccacuucuuccgggagcccacggaccugaagcaguucaagcaggacgccaaguacagccacggcaucgacguggccgaccucuucccggcccagcccggccugaccuccgccgucaucgaggcgcugccccgcaacauggugcugaccugccaggggagcgacgacaucaagcggcuccuggacagccagggccgccgcgacaucaagcucaucgacaucgcccuguccaaggccgacagccggcgcuucgagaacgccgugugggaccagugcaaggaccugugccacaugcacaccggggucgugguggagaagaagaagcggggcgggaaggaggagaucacgccccacugcgcccucauggacugcaucauguacgacgcggccgucuccggcggccugaacaucccggugcugcgcgccgugcucccccgggacauggucuuccgcaccagcucccccaagguggugcugugaggacuagucccuguucccagagcccacuuuuuuuucuuuuuuugaaauaaaauagccugucuuucagaucucaaaggcucuuuucagagccaccaaaaaaaaaaaaaaaaaaaaaaaaaaaaaaaaaaaaaaaaaaaaaaaaaaaaaaaaaaaaaaaaaaaaaaaaaaaaaaaaaaaaaaaaaaaaaaaaaaaaa

SEQ ID NO: 16856 - RNA, 1982 nt, Artificial Sequence
  mRNA product Design a-1 (hSL-A100) comprising derived and/or modified sequence from LASV(Lassa virus/H.sapiens-wt/NGA/2015/ISTH_0543;Clade II)__AVO03640__NP (opt1)
aggagagucccgcagucggcguccagcggcucugcuuguucgugugugugucguugcaggccuuauucaagcuuaccaugagcgccuccaaggaggugaaguccuuccuguggacccagagccuccgccgggagcugagcggcuacugcuccaacaucaagcugcaggucgugaaggacgcccaggcgcuccugcacgggcuggacuucagcgagguguccaacguccagcgccucaugcggaagcagaagcgcgacgacagcgaccugaagcggcugcgcgaccucaaccaggccgugaacaaccugguggagcugaaguccacccagcagaaguccauccuccgggucggcacgcugaccagcgacgaccugcucacccuggccgccgaccuggagaagcucaagagcaaggugauccgcaccgagcggccccuguccagcgggguguacaugggcaaccuguccacgcagcagcucgagcagcgccgggcccugcugaacaugaucgggauggucggcggcgcgcaggggacccagccgggccgcgacgggguggugcgggucugggacgugaagaaccccgaccuccugaacaaccaguucggcaccaugcccagccugacccucgccugccugacgaagcagggccagguggaccugaacgacgccguccucgcccugaccgaccuggggcucaucuacaccgcgaaguaccccaacuccagcgaccuggaccgccugucccagagccacccgauccucaacaugguggacaccaagaaguccagccugaacaucagcggcuacaacuucucccugggggccgccgugaaggccggcgccugcaugcucgacgggggcaacaugcuggagacgaucaaggucacgccccagaccauggacggcauccucaagagcauccugaaggugaagaagucccuggggauguucgugagcgacacccccggcgagcggaaccccuacgagaacauccuguacaagaucugccucuccggggacggcuggccguacaucgcgagccgcaccuccaucgucgggcgggccugggagaacaccaccguggaccuggagagcgacggcaagccccagaaggugggcuccgccgggagcaacaagucccugcagagcgccggcuuccccaccgggcucacguacucccagcugaugacccugaaggacagcaugaugcagcuggaccccuccgccaagaccuggaucgacaucgagggccgcccggaggaccccgucgagaucgcgcucuaccagcccaugagcgggugcuacauccacuucuuccgggagcccaccgaccugaagcaguucaagcaggacgccaaguacucccacggcaucgacguggccgaccuguucccggcccagcccggccucacgagcgccgucaucgaggcgcugccccgcaacauggugcugaccugccaggggagcgacgacaucaagcggcuccuggacucccagggccgcaaggacaucaagcugaucgacaucgcccucagcaaggccgacucccgccgguucgagaacgccgugugggaccagugcaaggaccugugccacaugcacaccggggucgugguggagaagaagaagcgcggcgggaaggaggagaucacgccccacugcgcccugauggacugcaucauguacgacgcggccgucagcggcggccucaacaucccggugcugcgggccgugcugccccgcgacauggucuuccggaccuccagccccaagguggugcucugaggacuagucccuguucccagagcccacuuuuuuuucuuuuuuugaaauaaaauagccugucuuucagaucucaaaggcucuuuucagagccaccaaaaaaaaaaaaaaaaaaaaaaaaaaaaaaaaaaaaaaaaaaaaaaaaaaaaaaaaaaaaaaaaaaaaaaaaaaaaaaaaaaaaaaaaaaaaaaaaaaaaa

SEQ ID NO: 16857 - RNA, 1982 nt, Artificial Sequence
  mRNA product Design a-1 (hSL-A100) comprising derived and/or modified sequence from LASV(Lassa virus/H.sapiens-wt/NGA/2016/ISTH_0009;Clade II)__AVO03572__NP (opt1)
aggagagucccgcagucggcguccagcggcucugcuuguucgugugugugucguugcaggccuuauucaagcuuaccaugagcgccuccaaggaggugaaguccuuccuguggacccagagccuccgccgggagcugagcggcuacugcuccaacaucaagcugcaggucgugaaggacgcccaggcgcuccugcacgggcuggacuucagcgagguguccaacguccagcgccucaugcggaagcagaagcgcgacgacagcgaccugaagcggcugcgcgaccucaaccaggccgugaacaaccugguggagcugaaguccacccagcagaaguccauccuccgggucggcacgcugaccagcgacgaccugcucacccuggccgccgaccuggagaagcucaagagcaaggugauccgcaccgagcggccccuguccagcgggguguacaugggcaaccuguccacgcagcagcucgagcagcgccgggcccugcugaacaugaucgggauggucggcggcgcgcaggggacccagccgggccgcgacgggguggugcgggucugggacgugaagaaccccgaccuccugaacaaccaguucggcaccaugcccagccugacccucgccugccugacgaagcagggccagguggaccugaacgacgccguccucgcccugaccgaccuggggcucaucuacaccgcgaaguaccccaacuccagcgaccuggaccgccugucccagagccacccgauccucaacaugguggacaccaagaaguccagccugaacaucagcggcuacaacuucucccugggggccgccgugaaggccggcgccugcaugcucgacgggggcaacaugcuggagacgaucaaggucacgccccagaccauggacggcauccucaagagcauccugaaggugaagaagucccuggggauguucgugagcgacacccccggcgagcggaaccccuacgagaacauccuguacaagaucugccucuccggggacggcuggccguacaucgcgagccgcaccuccaucgucgggcgggccugggagaacaccaccguggaccuggagagcgacggcaagccccagaaggugggcuccgccgggagcaacaagucccugcagagcgccggcuuccccaccgggcucacguacucccagcugaugacccugaaggacagcaugaugcagcuggaccccuccgccaagaccuggaucgacaucgagggccgcccggaggaccccgucgagaucgcgcucuaccagcccaugagcgggugcuacauccacuucuuccgggagcccaccgaccugaagcaguucaagcaggacgccaaguacucccacggcaucgacguggccgaccuguucccggcccagcccggccucacgagcgccgucaucgaggcgcugccccgcaacauggugcugaccugccaggggagcgacgacaucaagcggcuccuggacucccagggccgccgcgacaucaagcugaucgacaucgcccucagcaaggccgacucccggcgcuucgagaacgccgugugggaccagugcaaggaccugugccacaugcacaccggggucgugguggagaagaagaagcggggcgggaaggaggagaucacgccccacugcgcccugauggacugcaucauguacgacgcggccgucagcggcggccucaacaucccggugcugcgcgccgugcugccccgggacauggucuuccgcaccuccagccccaagguggugcucugaggacuagucccuguucccagagcccacuuuuuuuucuuuuuuugaaauaaaauagccugucuuucagaucucaaaggcucuuuucagagccaccaaaaaaaaaaaaaaaaaaaaaaaaaaaaaaaaaaaaaaaaaaaaaaaaaaaaaaaaaaaaaaaaaaaaaaaaaaaaaaaaaaaaaaaaaaaaaaaaaaaaa

SEQ ID NO: 16858 - RNA, 1982 nt, Artificial Sequence
  mRNA product Design a-1 (hSL-A100) comprising derived and/or modified sequence from LASV(Lassa virus/H.sapiens-wt/NGA/2016/ISTH_0017;Clade II)__AVO03568__NP (opt1)
aggagagucccgcagucggcguccagcggcucugcuuguucgugugugugucguugcaggccuuauucaagcuuaccaugagcgccuccaaggaggugaaguccuuccuguggacccagagccuccgccgggagcugagcggcuacugcuccagcaucaagcugcaggucgugaaggacgcccaggcgcuccugcacgggcuggacuucuccgaggugagcaacguccagcgccucaugcggaagcagaagcgcgacgacuccgaccugaagcggcugcgcgaccucaaccaggccgugaacaaccugguggagcucaagagcacccagcagaaguccauccugcgggucggcacgcugaccagcgacgaccugcucacccuggccgccgaccuggagaagcucaaguccaaggugauccgcaccgagcggccccugagcuccgggguguacaugggcaaccugagcacgcagcagcucgagcagcgccgggcccugcugaacaugaucgggauggcgggcggcgcccaggggacccagccgggccgcgacggggucgugcgggugugggacgucaagaaccccgaccuccugaacaaccaguucggcaccaugcccucccugacccucgccugccugacgaagcagggccagguggaccugaacgacgccgugcucgcgcugaccgaccuggggcucaucuacaccgccaaguaccccaacagcuccgaccuggaccgccugagccagagccacccgauccucaacauggucgacaccaagaaguccagccugaacaucuccggcuacaacuucagccugggggccgccgugaaggccggcgcgugcaugcucgacgggggcaacaugcuggagacgaucaaggugacgccccagaccauggacggcauccugaaguccauccucaaggucaagcggagccuggggauguucguguccgacgcccccggcgagcgcaaccccuacgagaacauccuguacaagaucugccucagcggggacggcuggccguacaucgccucccggaccagcaucguggggcgcgccugggagaacaccaccgucgaccuggaguccgacggcaagccccagaaggugggcgccaccgggagcaacaagucccugcagagcgcgggcuuccccaccgggcucacguacucccagcugaugacccugaaggacagcaugaugcagcuggaccccuccgccaagaccuggaucgacaucgagggccggccggaggaccccguggaggucgcccucuaccagcccgugagcgggugcuacauccacuucuuccgcgagcccaccgaccugaagcaguucaagcaggacgccaaguacucccacggcaucgacgucgccgaccuguucccggcgcagcccggccucacgagcgccgugaucgaggcccugccccggaacauggugcugaccugccaggggagcgacgacaucaagaagcuccuggacucccagggccgcaaggacaucaagcugaucgacaucgcccucagcaaggccgacucccgccgguucgagaacgcggucugggaccagugcaaggaccugugccacaugcacaccggggugguggucgagaagaagaagcgcggcgggaaggaggagaucacgccccacugcgcccugauggacugcaucauguacgacgccgccgugagcggcggccucaacaucccggugcugcgggcgguccugccccgcgacaugguguuccggaccuccagccccaaggugguccucugaggacuagucccuguucccagagcccacuuuuuuuucuuuuuuugaaauaaaauagccugucuuucagaucucaaaggcucuuuucagagccaccaaaaaaaaaaaaaaaaaaaaaaaaaaaaaaaaaaaaaaaaaaaaaaaaaaaaaaaaaaaaaaaaaaaaaaaaaaaaaaaaaaaaaaaaaaaaaaaaaaaaa

SEQ ID NO: 16859 - RNA, 1982 nt, Artificial Sequence
  mRNA product Design a-1 (hSL-A100) comprising derived and/or modified sequence from LASV(Lassa virus/H.sapiens-wt/NGA/2018/ISTH_0959;Clade II)__AVV65100__NP (opt1)
aggagagucccgcagucggcguccagcggcucugcuuguucgugugugugucguugcaggccuuauucaagcuuaccaugagcgccuccaaggaggugaaguccuuccuguggacccagagccuccgccgggagcugagcggcuacugcuccaacaucaagcugcaggucgugaaggacgcccaggcgcuccugcacgggcuggacuucagcgagguguccaacguccagcgccucaugcggaagcagaagcgcgacgacagcgaccugaagcggcugcgcgaccucaaccaggccgugaacaaccugguggagcugaaguccacccagcagaaguccauccuccgggucggcacccugaccagcgacgaccugcucacccuggccgccgaccuggagaagcucaagagcaaggugauccgcaccgagcggccccuguccagcgggguguacaugggcaaccuguccacgcagcagcucgagcagcgccgggcccugcugaaccucaucgggauggucggcggcgcgcaggggacccagccgggccgcgacgggguggugcgggucugggacgugaagaaccccgaccugcugaacaaccaguucggcaccaugcccagccucacccuggccugccugacgaagcagggccagguggaccucaacgacgucgugcuggcccugaccgaccucgggcugaucuacaccgccaaguaccccaacuccagcgaccuggaccgccucucccagagccacccgauccugaacaugguggacaccaagaaguccagccugaacaucagcggcuucaacuucucccucggggcggccgucaaggccggcgccugcaugcuggacgggggcaacaugcuggagacgaucaaggugacgccccagaccauggacggcauccucaagagcauccugaaggugaagaagucccuggggauguucgucagcgacacccccggcgagcggaaccccuacgagaacauccucuacaagaucugccuguccggggacggcuggccguacaucgccagccgcaccuccaucguggggcgggcgugggagaacaccaccguggaccuggagagcgacggcaagccccacaaggucggcaccgccggguccaacaagagccuccaguccgccggcuuccccacggggcugaccuacagccagcugaugacccugaaggacuccaugaugcagcucgaccccagcgccaagaccuggaucgacaucgagggccgcccggaggaccccguggagaucgcccuguaccagcccauguccgggugcuacauccacuucuuccgggagcccacggaccugaagcaguucaagcaggacgcgaaguacagccacggcaucgacgucgccgaccucuucccggcccagcccggccugaccuccgccgugaucgaggcccugccccgcaacauggugcugaccugccaggggagcgacgacaucaagcggcuccuggacagccagggccgcaaggacaucaagcucaucgacaucgcgcuguccaagaccgacagccgccgguucgagaacgccgucugggaccagugcaaggaccugugccacaugcacacgggggugguggucgagaagaagaagcgcggcgggaaggaggagaucacgccccacugcgcccucauggacugcaucauguacgacgccgccguguccggcggccugaacaucccggugcugcgggcgguccucccccgcgacaugguguuccggaccagcucccccaaggugguccugugaggacuagucccuguucccagagcccacuuuuuuuucuuuuuuugaaauaaaauagccugucuuucagaucucaaaggcucuuuucagagccaccaaaaaaaaaaaaaaaaaaaaaaaaaaaaaaaaaaaaaaaaaaaaaaaaaaaaaaaaaaaaaaaaaaaaaaaaaaaaaaaaaaaaaaaaaaaaaaaaaaaaa

SEQ ID NO: 16860 - RNA, 1982 nt, Artificial Sequence
  mRNA product Design a-1 (hSL-A100) comprising derived and/or modified sequence from LASV(LASV003-NIG-2008;Clade II)__AIT17581__NP (opt1)
aggagagucccgcagucggcguccagcggcucugcuuguucgugugugugucguugcaggccuuauucaagcuuaccaugagcgccuccaaggaggugaaguccuuccuguggacccagagccuccgccgggagcugagcggcuacugcuccagcaucaagcugcaggucgugaaggacgcccaggcgcuccugcacgggcuggacuucuccgaggugagcaacguccagcgccucaugcggaagcagaagcgcgacgacuccgaccugaagcggcugcgcgaccucaaccaggccgugaacaaccugguggagcucaagagcacccagcagaaguccguccugcgggugggcacccugaccagcgacgaccugcucacccuggccgccgaccuggagaagcucaaguccaaggugauccgcaccgagcggccccugagcuccggggucuacaugggcaaccugagcgcccagcagcucgagcagcgccggacgcugcugaacaugaucgggauggugggcggcgcgcaggggacccagccgggccgcgacggggugguccgggugugggacgugaagaaccccgaccuccugaacaaccaguucggcaccaugcccucccugacccucgccugccugacgaagcaggggcaggucgaccugaacgacguggugcucgcccugaccgaccugggccucaucuacaccgccaaguaccccaacagcuccgaccuggaccgccugagccagagccacccgauccucuccauggucgacaccaagaaguccagccugaacaucagcggcuacaacuucucccugggggcggccgugaaggccggcgccugcaugcucgacgggggcaacaugcuggagacgaucaaggugacgccccagaccauggacggcauccucaagagcauccugaaggucaagaagucccuggggauguucgugagcgacacccccggcgagcggaaccccuacgagaacauccuguacaagaucugccucuccggggacggcuggccguacaucgccagccgcaccuccaucguggggcgggcgugggagaacaccaccgucgaccuggagagcgacggcaagccccagaaggugggcaccgccggguccaacaagagccugcaguccgccggcuuccccacggggcucaccuacagccagcugaugacccugaaggacuccaugaugcagcuggaccccagcgccaagaccuggaucgacaucgagggccgcccggaggaccccgucgagaucgcccucuaccagcccauguccgggugcuacauccacuucuuccgggagcccacggaccugaagcaguucaagcaggacgcgaaguacagccacggcaucgacgugaccgaccuguucccggcccagcccggccucaccagcgccgugaucgaggcccugccccgcaacaugguccugaccugccagggguccgacgacaucaagcggcuccuggacagccagggccgccgcgacaucaagcugaucgacaucgcccucuccaaggcggacagccggcgcuucgagaacgccgugugggaccagugcaaggaccugugccacaugcacacggggguggucguggagaagaagaagcggggcgggaaggaggagaucacgccccacugcgcccugauggacugcaucauguacgacgccgccguguccggcggccucaacaucccgguccugcgcgcggugcugccccgggacaugguguuccgcaccagcucccccaaggucgugcucugaggacuagucccuguucccagagcccacuuuuuuuucuuuuuuugaaauaaaauagccugucuuucagaucucaaaggcucuuuucagagccaccaaaaaaaaaaaaaaaaaaaaaaaaaaaaaaaaaaaaaaaaaaaaaaaaaaaaaaaaaaaaaaaaaaaaaaaaaaaaaaaaaaaaaaaaaaaaaaaaaaaaa

SEQ ID NO: 16861 - RNA, 1982 nt, Artificial Sequence
  mRNA product Design a-1 (hSL-A100) comprising derived and/or modified sequence from LASV(LASV035-NIG-2009;Clade II)__AIT17589__NP (opt1)
aggagagucccgcagucggcguccagcggcucugcuuguucgugugugugucguugcaggccuuauucaagcuuaccaugagcgccuccaaggaggugaaguccuuccuguggacccagagccuccgccgggagcugagcggcuacugcuccagcaucaagcugcaggucgugaaggacgcccaggcgcuccugcacgggcuggacuucuccgaggugagcaacguccagcgccucaugcggaagcagaagcgcgacgacuccgaccugaagcggcugcgcgaccucaaccaggccgugaacaaccugguggagcucaagagcacccagcagaaguccauccugcgggucggcacgcugaccagcgacgaccugcucacccuggccgccgaccuggagaagcucaaguccaaggugauccgcaccgagcggccccugagcuccgggguguacaugggcaaccugagcgcccagcagcucgagcagcgccgggcgcugcugaacaugaucgggauggucggcggcgcccaggggacgcagccgggccgcgacgggguggugcgggucugggacgugaagaaccccgaccuccugaacaaccaguucggcaccaugcccucccugacccucgccugccugaccaagcagggccagguggaccugaacgacgccguccucgcgcugacggaccuggggcucaucuacaccgccaaguaccccaacagcuccgaccuggaccgccugagccagagccacccgauccucaacaugguggacaccaagaaguccagccugaacaucuccggcuacaacuucagccugggggccgccgugaaggccggcgcgugcaugcucgacgggggcaacaugcuggagaccaucaaggucacgccccagaccauggacggcauccugaaguccauccucaaggugaagcggagccuggggauguucguguccgacacccccggcgagcgcaaccccuacgagaacauccuguacaagaucugccucagcggggacggcuggccguacaucgccucccggaccagcaucgucgggcgcgccugggagaacacgaccguggaccuggaguccgacggcaagccccagaaggugggcaccaccgggagcaacaagucccugcagagcgccggcuuccccacggggcucaccuacucccagcugaugacccugaaggacagcaugaugcagcuggaccccuccgccaagaccuggaucgacaucgagggccggccggaggaccccgucgagaucgcgcucuaccagcccaugagcgggugcuacauccacuucuuccgcgagcccacggaccugaagcaguucaagcaggacgccaaguacucccacggcaucgacguggccgaccuguucccggcccagcccggccucaccagcgccgucaucgaggcgcugccccggaacauggugcugaccugccaggggagcgacgacaucaagaagcuccuggacucccagggccgccgcgacaucaagcugaucgacaucgcccucagcaaggccgacucccggaaguucgagaacgccgugugggaccagugcaaggaccugugccacaugcacaccggggucgugguggagaagaagaagcgcggcgggaaggaggagaucacgccccacugcgcccugauggacugcaucauguacgacgcggccgucagcggcggccucaacaucccggugcugcgggccgugcugccccgcgacauggucuuccggaccuccagccccaagguggugcucugaggacuagucccuguucccagagcccacuuuuuuuucuuuuuuugaaauaaaauagccugucuuucagaucucaaaggcucuuuucagagccaccaaaaaaaaaaaaaaaaaaaaaaaaaaaaaaaaaaaaaaaaaaaaaaaaaaaaaaaaaaaaaaaaaaaaaaaaaaaaaaaaaaaaaaaaaaaaaaaaaaaaa

SEQ ID NO: 16862 - RNA, 1982 nt, Artificial Sequence
  mRNA product Design a-1 (hSL-A100) comprising derived and/or modified sequence from LASV(LASV1000-NIG-2009;Clade II)__AIT17783__NP (opt1)
aggagagucccgcagucggcguccagcggcucugcuuguucgugugugugucguugcaggccuuauucaagcuuaccaugagcgccuccaaggaggugaaguccuuccuguggacccagagccuccgccgggagcugagcggcuacugcuccaacaucaagcugcaggucgugaaggacgcccaggcgcuccugcacgggcuggacuucagcgagguguccaacguccagcgccucaugcggaagcagaagcgcgacgacagcgaccugaagcggcugcgcgaccucaaccaggccgugaacaaccugguggagcugaaguccacccagcagaaguccauccuccgggucggcacgcugaccagcgacgaccugcucacccuggccgccgaccuggagaagcucaagagcaaggugauccgcaccgagcggccccuguccagcgggguguacaugggcaaccuguccacgcagcagcucgagcagcgccgggcccugcugaacaugaucgggauggucggcggcgcgcaggggacccagccgggccgcgacgggguggugcgggucugggacgugaagaaccccgaccuccugaacaaccaguucggcaccaugcccagccugacccucgccugccugacgaagcagggccagguggaccugaacgacgucgugcucgcccugaccgaccuggggcucaucuacaccgccaaguaccccaacuccagcgaccuggaccgccugucccagagccacccgauccucaacaugguggacaccaagaaguccagccugaacaucagcggcuacaacuucucccugggggcggccgucaaggccggcgccugcaugcucgacgggggcaacaugcuggagacgaucaaggugacgccccagaccauggacggcauccucaagagcauccugaaggugaagaagucccuggggauguucgucagcgacacccccggcgagcggaaccccuacgagaacauccuguacaagaucugccucuccggggacggcuggccguacaucgccagccgcaccuccaucguggggcgggcgugggagaacaccaccguggaccuggagagcgacggcaagccccagaaggucggcaccgccggguccaacaagagccugcaguccgccggcuuccccacggggcucaccuacagccagcugaugacccugaaggacuccaugaugcagcuggaccccagcgccaagaccuggaucgacaucgagggccgcccggaggaccccguggagaucgcccucuaccagcccgucuccgggugcuacauccacuucuuccgggagcccacggaccugaagcaguucaagcaggacgcgaaguacagccacggcaucgacguggccgaccuguucccggcccagcccggccucaccuccgccgugaucgaggcccugccccgcaacaugguccugaccugccaggggagcgacgacaucaagcggcuccuggacagccagggccgccgcgacaucaagcugaucgacaucgcgcucuccaaggccgacagccggcgcuucgagaacgccgugugggaccagugcaaggaccugugccacaugcacaccgggguggucguggagaagaagaagcggggcgggaaggaggagaucacgccccacugcgcccugauggacugcaucauguacgacgccgcgguguccggcggccucaacaucccgguccugcgcgccgugcugccccgggacaugguguuccgcaccagcucccccaaggucgugcucugaggacuagucccuguucccagagcccacuuuuuuuucuuuuuuugaaauaaaauagccugucuuucagaucucaaaggcucuuuucagagccaccaaaaaaaaaaaaaaaaaaaaaaaaaaaaaaaaaaaaaaaaaaaaaaaaaaaaaaaaaaaaaaaaaaaaaaaaaaaaaaaaaaaaaaaaaaaaaaaaaaaaa

SEQ ID NO: 16863 - RNA, 1982 nt, Artificial Sequence
  mRNA product Design a-1 (hSL-A100) comprising derived and/or modified sequence from LASV(LASV221-NIG-2010;Clade II)__AIT17625__NP (opt1)
aggagagucccgcagucggcguccagcggcucugcuuguucgugugugugucguugcaggccuuauucaagcuuaccaugagcgccuccaaggaggugaaguccuuccuguggacccagagccuccgccgggagcugagcggcuacugcuccagcaucaagcugcaggucgugaaggacgcccaggcgcuccugcacgggcuggacuucuccgaggugagcaacguccagcgccucaugcggaagcagcgccgggacgacuccgaccugaagcgccugcgggaccucaaccaggccgugaacaaccugguggagcucaagagcacccagcagaaguccauccugcgcgucggcacgcugaccagcgacgaccugcucacccuggccgccgaccuggagaagcucaaguccaaggugauccggaccgagcgcccccugagcuccgggguguacaugggcaaccugagcacgcagcagcucgagcagcggcgcgcccugcugaacaugaucgggauggucggcggcgcgcaggggacccagccgggccgggacgggguggugcgcgucugggacgugaagaaccccgaccuccugaacaaccaguucggcaccaugcccucccugacccucgccugccugacgaagcagggccagguggaccugaacgacgccguccucgcccugaccgaccuggggcucaucuacaccgcgaaguaccccaacagcuccgaccuggaccggcugagccagagccacccgauccucaacaugguggacaccaagaaguccagccugaacaucuccggcuacaacuucagccugggggccgccgugaaggccggcgccugcaugcucgacgggggcaacaugcuggagacgaucaaggucacgccccagaccguggacggcauccugaaguccauccucaaggugaagcgcagccuggggauguucgucuccgacacccccggcgagcggaaccccuacgagaacauccuguacaagaucugccucagcggggacggcuggccguacaucgcgucccgcaccagcaucguggggcgggccugggagaacaccaccguggaccuggaguccgacggcaagccccagaaggucggcaccgccgggagcaacaagucccugcagagcgccggcuuccccacggggcucaccuacucccagcugaugacccugaaggacagcaugaugcagcuggaccccuccgccaagaccuggaucgacaucgagggccgcccggaggaccccguggagaucgcgcucuaccagcccaugagcgggugcuacauccacuucuuccgggagcccacggaccugaagcaguucaagcaggacgccaaguacucccacggcaucgacgucgccgaccuguucccggcccagcccggccucaccagcgccgugaucgaggcgcugccccgcaacauggugcugaccugccaggggagcgacgacaucaagcgccuccuggacucccagggccggcgcgacaucaagcugaucgacaucgcccucagcaaggccgacucccggaaguucgagaacgccgucugggaccagugcaaggaccugugccacaugcacaccggggugguggucgagaagaagaagcgcggcgggaaggaggagaucacgccccacugcgcccugauggacugcaucauguacgacgcggccgugagcggcggccucaacaucccggugcugcgggccguccugccccgcgacaugguguuccggaccuccagccccaaggugguccucugaggacuagucccuguucccagagcccacuuuuuuuucuuuuuuugaaauaaaauagccugucuuucagaucucaaaggcucuuuucagagccaccaaaaaaaaaaaaaaaaaaaaaaaaaaaaaaaaaaaaaaaaaaaaaaaaaaaaaaaaaaaaaaaaaaaaaaaaaaaaaaaaaaaaaaaaaaaaaaaaaaaaa

SEQ ID NO: 16864 - RNA, 1982 nt, Artificial Sequence
  mRNA product Design a-1 (hSL-A100) comprising derived and/or modified sequence from LASV(LASV237-NIG-2010;Clade II)__AIT17639__NP (opt1)
aggagagucccgcagucggcguccagcggcucugcuuguucgugugugugucguugcaggccuuauucaagcuuaccaugagcgccuccaaggaggugaaguccuuccuguggacccagagccuccgccgggagcugagcggcuacugcuccaacaucaagcugcaggucgugaaggacgcccaggcgcuccugcacgggcuggacuucagcgagguguccaacguccagcgccucaugcggaagcagaagcgcgacgacagcgaccugaagcggcugcgcgaccucaaccaggccgugaacaaccugguggagcugaaguccacccagcagaaguccauccuccgggucggcacccugaccagcgacgaccugcucacccuggccgccgaccuggagaagcucaagagcaaggugauccgcaccgagcggccccuguccagcgggguguacaugggcaaccuguccacgcagcagcucgagcagcgccgggcccugcugaacaugaucgggauggucggcggcgcgcaggggacccagccgggccgcgacgggguggugcgggucugggacgugaagaaccccgaccuccugaacaaccaguucggcaccaugcccagccugacccucgccugccugacgaagcagggccagguggaccugaacgacgccguccucgcccugaccgaccuggggcucaucuacaccgcgaaguaccccaacuccagcgaccuggaccgccugucccagagccacccgauccucaacaugguggacaucaagaaguccagccugaacaucagcggcuacaacuucucccugggggccgccgugaaggccggcgccugcaugcucgacgggggcaacaugcuggagaccaucaaggucacgccccagaccauggacggcauccucaagagcauccugaaggugaagcggucccuggggauguucgugagcgacacccccggcgagcgcaaccccuacgagaacauccuguacaagaucugccucuccggggacggcuggccguacaucgcgagccggaccuccaucgucgggcgcgccugggagaacacgaccguggaccuggagagcgacggcaagccccagaaggugggcuccgccgggagcaacaagucccugcagagcgccggcuuccccaccgggcucaccuacucccagcugaugacgcugaaggacagcaugaugcagcuggaccccuccgccaagaccuggaucgacaucgagggccggccggaggaccccgucgagaucgcgcucuaccagcccaugagcgggugcuacauccacuucuuccgcgagcccaccgaccugaagcaguucaagcaggacgccaaguacucccacggcaucgacguggccgaccuguucccggcccagcccggccucaccagcgccgucaucgaggcgcugccccggaacauggugcugacgugccaggggagcgacgacaucaagcgccuccuggacucccagggccgccgggacaucaagcugaucgacaucgcccucagcaaggccgacucccgccgguucgagaacgccgugugggaccagugcaaggaccugugccacaugcacaccggggucgugguggagaagaagaagcgcggcgggaaggaggagaucacgccccacugcgcccugauggacugcaucauguacgacgcggccgucagcggcggccucaacaucccggugcugcgggccgugcugccccgcgacauggucuuccggaccuccagccccaagguggugcucugaggacuagucccuguucccagagcccacuuuuuuuucuuuuuuugaaauaaaauagccugucuuucagaucucaaaggcucuuuucagagccaccaaaaaaaaaaaaaaaaaaaaaaaaaaaaaaaaaaaaaaaaaaaaaaaaaaaaaaaaaaaaaaaaaaaaaaaaaaaaaaaaaaaaaaaaaaaaaaaaaaaaa

SEQ ID NO: 16865 - RNA, 1982 nt, Artificial Sequence
  mRNA product Design a-1 (hSL-A100) comprising derived and/or modified sequence from LASV(LASV253-NIG-2011;Clade II)__AIT17671__NP (opt1)
aggagagucccgcagucggcguccagcggcucugcuuguucgugugugugucguugcaggccuuauucaagcuuaccaugagcgccuccaaggaggugaaguccuuccuguggacccagagccuccgccgggagcugagcggcuacugcuccagcaucaagcugcaggucgugaaggacgcccaggcgcuccugcacgggcuggacuucuccgaggugagcaacguccagcgccucaugcggaagcagaagcgcgacgacuccgaccugaagcggcugcgcgaccucaaccaggccgugaacaaccugguggagcucaagagcacccagcagaaguccguccugcgggugggcacccugaccagcgacgaccugcucacccuggccgccgaccuggagaagcucaaguccaaggugauccgcaccgagcggccccugagcuccggggucuacaugggcaaccugagcacgcagcagcucgagcagcgccgggcccugcugaacaugaucgggauggugggcggcgcgcaggggacccagccgggccgcgacggggugguccgggugugggacgugaagaaccccgaccuccugaacaaccaguucggcaccaugcccucccugacccucgccugccugacgaagcaggggcaggucgaccugaacgacguggugcucgcccugaccgaccugggccucaucuacaccgccaaguaccccaacagcuccgaccuggaccgccugagccagagccacccgauccucaacauggucgacaccaagaaguccagccugaacaucuccggcuacaacuucagccugggggcggccgugaaggccggcgccugcaugcucgacgggggcaacaugcuggagacgaucaaggugacgccccagaccauggacggcauccugaaguccauccucaaggucaagaagucccuggggauguucgugagcgacacccccggcgagcggaaccccuacgagaacauccuguacaagaucugccucagcggggacggcuggccguacaucgccucccgcaccagcaucguggggcgggcgugggagaacaccaccgucgaccuggaguccgacggcaagccccagaaggugggcaccgccgggagcaacaagucccugcagagcgccggcuuccccacggggcucaccuacucccagcugaugacccugaaggacagcaugaugcagcuggaccccuccgccaagaccuggaucgacaucgagggccgcccggaggaccccgucgagaucgcccucuaccagcccaugagcgggugcuacauccacuucuuccgggagcccacggaccugaagcaguucaagcaggacgcgaaguacucccacggcaucgacgugaccgaccuguucccggcccagcccggccucaccagcgccgugaucgaggcccugccccgcaacaugguccugaccugccaggggagcgacgacaucaagcggcuccuggacucccagggccgccgcgacaucaagcugaucgacaucgcccucagcaaggcggacucccggcgcuucgagaacgccgugugggaccagugcaaggaccugugccacaugcacacggggguggucguggagaagaagaagcggggcgggaaggaggagaucacgccccacugcgcccugauggacugcaucauguacgacgccgccgugagcggcggccucaacaucccgguccugcgcgcggugcugccccgggacaugguguuccgcaccuccagccccaaggucgugcucugaggacuagucccuguucccagagcccacuuuuuuuucuuuuuuugaaauaaaauagccugucuuucagaucucaaaggcucuuuucagagccaccaaaaaaaaaaaaaaaaaaaaaaaaaaaaaaaaaaaaaaaaaaaaaaaaaaaaaaaaaaaaaaaaaaaaaaaaaaaaaaaaaaaaaaaaaaaaaaaaaaaaa

SEQ ID NO: 16866 - RNA, 1982 nt, Artificial Sequence
  mRNA product Design a-1 (hSL-A100) comprising derived and/or modified sequence from LASV(LASV254-NIG-2011;Clade II)__AIT17675__NP (opt1)
aggagagucccgcagucggcguccagcggcucugcuuguucgugugugugucguugcaggccuuauucaagcuuaccaugagcgccuccaaggaggugaaguccuuccuguggacccagagccuccgccgggagcugagcggcuacugcuccagcaucaagcugcaggucgugaaggacgcccaggcgcuccugcacgggcuggacuucuccgaggugagcaacguccagcgccucaugcggaagcagaagcgcgacgacuccgaccugaagcggcugcgcgaccucaaccaggccgugaacaaccugguggagcucaagagcacccagcagaaguccguccugcgggugggcacgcugaccagcgacgaccugcucacccuggccgccgaccuggagaagcucaaguccaaggugauccgcaccgagcggccccugagcuccggggucuacaugggcaaccugagcacgcagcagcucgagcagcgccgggcccugcugaacaugaucgggauggugggcggcgcgcaggggacccagccgggccgcgacggggugguccgggugugggacgugaagaaccccgaccuccugaacaaccaguucggcaccaugcccucccugacccucgccugccugacgaagcaggggcaggucgaccugaacgacgccgugcucgcccugaccgaccugggccucaucuacaccgcgaaguaccccaacagcuccgaccuggaccgccugagccagagccacccgauccucaacaugguggacaccaagaaguccagccugaacaucuccggcuacaacuucagccugggggccgccgucaaggccggcgccugcaugcucgacgggggcaacaugcuggagacgaucaaggugacgccccagaccauggacggcauccugaaguccauccucaaggugaagaagucccuggggauguucgucagcgacacccccggcgagcggaaccccuacgagaacauccuguacaagaucugccucagcggggacggcuggccguacaucgcgucccgcaccagcaucguggggcgggccugggagaacaccaucguggaccuggaguccgacggcaagccccagaaggucggcaccgccgggagcaacaagucccugcagagcgccggcuuccccaccgggcucacguacucccagcugaugacccugaaggacagcaugaugcagcuggaccccuccgccaagaccuggaucgacaucgagggccgcccggaggaccccguggagaucgcgcucuaccagcccaugagcgggugcuacauccacuucuuccgggagcccaccgaccugaagcaguucaagcaggacgccaaguacucccacggcaucgacgucgccgaccuguucccggcccagcccggccucacgagcgccgugaucgaggcgcugccccgcaacauggugcugaccugccaggggagcgacgacaucaagcggcuccuggacucccagggccgccgcgacaucaagcugaucgacaucgcccucagcaaggccgacucccggcgcuucgagaacgccgucugggaccagugcaaggaccugugccacaugcacaccggggugguggucgagaagaagaagcggggcgggaaggaggagaucacgccccacugcgcccugauggacugcaucauguacgacgcggccgugagcggcggccucaacaucccggugcugcgcgccguccugccccgggacaugguguuccgcaccuccagccccaaggugguccucugaggacuagucccuguucccagagcccacuuuuuuuucuuuuuuugaaauaaaauagccugucuuucagaucucaaaggcucuuuucagagccaccaaaaaaaaaaaaaaaaaaaaaaaaaaaaaaaaaaaaaaaaaaaaaaaaaaaaaaaaaaaaaaaaaaaaaaaaaaaaaaaaaaaaaaaaaaaaaaaaaaaaa

SEQ ID NO: 16867 - RNA, 1982 nt, Artificial Sequence
  mRNA product Design a-1 (hSL-A100) comprising derived and/or modified sequence from LASV(Nig08-04;Clade II)__ADU56611__NP (opt1)
aggagagucccgcagucggcguccagcggcucugcuuguucgugugugugucguugcaggccuuauucaagcuuaccaugagcgccuccaaggaggugaaguccuuccuguggacccagagccuccgccgggagcugagcggcuacugcuccaacaucaagcugcaggucgugaaggacgcccaggcgcuccugcacgggcuggacuucagcgagguguccaacguccagcgccucaugcggaagcagaagcgcgacgacggcgaccugaagcggcugcgcgaccucaaccaggccgugaacaaccugguggagcucaagagcacccagcagaaguccguccugcggguggggacccugaccagcgacgaccugcucacccuggccgccgaccuggagaagcucaaguccaaggugauccgcaccgagcggccccugagcuccggcgucuacauggggaaccugagcacgcagcagcucgagcagcgcaaggcccugcuguccaugaucggcauggugggcggggcgcagggcacccagccggggcgggacggcgugguccgcgugugggacgugaagaaccccgaccuccugaacaaccaguucgggaccaugcccagccugacccucgccugccugacgaagcagggccaggucgaccugaacgacgccgugcucgcccugaccgaccugggccucaucuacaccgcgaaguaccccaacuccagcgaccuggaccggcugucccagagccacccgauccucaacaugguggacaccaagaaguccagccugaacaucagcggguacaacuucucccugggcgccgccgucaaggccggggccugcaugcucgacggcggcaacaugcuggagacgaucaaggugacgccccagaccauggacgggauccucaagagcauccugaaggugaagcgcucccugggcauguucgucagcgacacccccggggagcggaaccccuacgagaacauccuguacaagaucugccucuccggcgacggguggccguacaucgcgagccgcaccuccaucgugggccgggccugggagaacaccaccguggaccuggagagcgacggcaagccccagaaggucgggaccgccggcuccaacaagagccugcaguccgccggguuccccacgggccucaccuacagccagcugaugacccugaaggacuccaugaugcagcuggaccccagcgccaagaccuggaucgacaucgaggggcgcccggaggaccccguggagaucgcgcucuaccagcccauguccggcugcuacauccacuucuuccgggagcccacggaccugaagcaguucaagcaggacgccaaguacagccacggcaucgacgucaccgaccuguucuccgcccagccggggcucaccagcgccgugaucgaggcccugccccgcaacauggugcugaccugccagggcagcgacgacaucaagaagcuccuggacucccaggggcggcgcgacaucaagcugaucgacaucagccucaacaaggcggacucccgccgguucgagaacgccgucugggaccagugcaaggaccugugccacaugcacacgggcgugguggucgagaagaagaagcgcgggggcaaggaggagaucacgccccacugcgcccugauggacugcaucauguucgacgccgccgugagcggcgggcucaacauccccauccugcgggcggugcugccgcgcgacauggucuuccggaccuccagccccaagguggugcucugaggacuagucccuguucccagagcccacuuuuuuuucuuuuuuugaaauaaaauagccugucuuucagaucucaaaggcucuuuucagagccaccaaaaaaaaaaaaaaaaaaaaaaaaaaaaaaaaaaaaaaaaaaaaaaaaaaaaaaaaaaaaaaaaaaaaaaaaaaaaaaaaaaaaaaaaaaaaaaaaaaaaa

SEQ ID NO: 16868 - RNA, 1985 nt, Artificial Sequence
  mRNA product Design a-1 (hSL-A100) comprising derived and/or modified sequence from LASV(GA391;Clade III)__AAA46284__NP (opt1)
aggagagucccgcagucggcguccagcggcucugcuuguucgugugugugucguugcaggccuuauucaagcuuaccaugagcgccuccaaggaggugcgcagcugccuguggacccagucccuccggcgcgagcugagcggcuacugcuccaacaucaagcugcaggucgugaaggacgcccaggcgcuccugcacgggcuggacuucagcgagguguccaacguccagcggcucaugcgcaagcagaagcgggacgacggcgaccugaagcgccugcgggaccucaaccaggccgugaacaaccugguggagcugaaguccacccagcagaaguccguccuccgcguggggacgcugagcuccgacgaccugcucauccuggccgccgaccuggagaagcucaagagcaaggugacccggaccgagcgcccccuguccagcggcgucuacauggggaaccuguccagccagcagcucgaccagcggcgcgcccugcugaacaugaucggcaugaccggcguguccgggggcgggaagggcgcgagcaacgggaucgugcgggucugggacgugaagaacgccgagcuccugaacaaccaguucggcacgaugccgucccugacccucgccugccugaccaagcagggccagguggaccugaacgacgccguccaggcgcucaccgaccuggggcugaucuacacggccaaguaccccaacagcagcgaccucgaccgccugucccagagccaccccauccugaacaugaucgacaccaagaaguccagccucaacaucuccggcuacaacuucagccugggggccgccgugaaggccggcgcgugcaugcuggacggcgggaacaugcucgagaccaucaaggugagcccccagaccauggacggcauccucaagagcauccugaaggucaagaagucccuggggauguucgugagcgacacgccgggcgagcggaaccccuacgagaacauccuguacaagaucugccuguccggggacggcuggagcuacaucgccucccgcaccagcaucgugggccgggccugggagaacaccgucguggaccucgagcaggacaacaagccccagaagaucgggaacggcggguccaacaagagccugcaguccgccggcuucgccgcggggcugaucuacagccagcucaugacccugaaggacuucaagugcuucaaccugauccccaacgccaagacguggauggacaucgagggccgcccggaggaccccguggagaucgcccuguaccagcccuccagcggcugcuacguccacuucuuccgggagcccaccgaccucaagcaguucaagcaggacgccaaguacagccacgggcgcgacgugaccgaccuguucgccgcgcagccgggccugaccuccgccgucaucgaggcccucccccggaacauggugaucacgugccaggggagcgaggacauccgcaagcugcuggagucccagggccgccgggacaucaagcucaucgacaucacccugagcaaggccgacucccgcaaguucgagaacgccgugugggaccaguucaaggaccugugccacaugcacaccggggucgugguggagaagaagaagcggggcggcaaggaggagaucacgccccacugcgcgcucauggacugcaucauguucgacgccgccgucagcgggggccuggacgccaaggugcugcgcgugguccucccccgggacaugguguuccgcaccuccaccccgaaggugguccugugaggacuagucccuguucccagagcccacuuuuuuuucuuuuuuugaaauaaaauagccugucuuucagaucucaaaggcucuuuucagagccaccaaaaaaaaaaaaaaaaaaaaaaaaaaaaaaaaaaaaaaaaaaaaaaaaaaaaaaaaaaaaaaaaaaaaaaaaaaaaaaaaaaaaaaaaaaaaaaaaaaaaa

SEQ ID NO: 16869 - RNA, 1982 nt, Artificial Sequence
  mRNA product Design a-1 (hSL-A100) comprising derived and/or modified sequence from LASV(Nig08-A19;Clade III)__ADU56619__NP (opt1)
aggagagucccgcagucggcguccagcggcucugcuuguucgugugugugucguugcaggccuuauucaagcuuaccaugagcgccuccaaggaggugaaguccuuccuguggacccagucccuccgccgggagcugagcggcuacugcuccaacaucaagcugcaggucgugaaggacgcccaggcgcuccugcacgggcuggacuucagcgagguguccaacguccagcgccucaugcggaagcagaagcgcgacgacggcgaccugaagcggcugcgcgaccucaaccaggccgugaacaaccugguggagcucaagagcacccagcagaaguccguccugcggguggggacccugagcuccgacgaccugcucgugcuggccgccgaccuggagaagcucaagagcaaggucgugcgcaccgagcggccccuguccagcggcaucuacauggggaaccuguccagccagcagcucgaccagcgcaaggcccugcugaacaugaucggcaugaccggcgggaacggcgggcggaacaccacguccgacggcaucgugcgcgucugggacgugaagaacgcggagcuccugaacaaccaguucgggaccaugccgagccugacccucgccugccugaccaagcagggccagguggaccugaacgacgccguccaggcccucacggaccugggccugaucuacaccgcgaaguaccccaacuccagcgaccucgaccggcuggcccagagccaccccauccugaacaugaucgacaccaagaaguccagccucaacaucuccggguacaacuucagccugggcgccgccgugaaggccggggcgugcaugcuggacggcggcaacaugcucgagaccaucaaggugagcccccagacgauggacgggauccucaagagcauccugaaggucaagcgcucccugggcauguucaucagcgacaccccgggggagcggaaccccuacgagaacauccuguacaagaucugccuguccggcgacggguggcccuacaucgccagccgcaccuccaucgugggccgggccugggagaacaccguggucgaccucgagagcgacaacaagccccagaagacgggcaacgggggcuccaacaagagccugcaguccgccggguucgccgcgggccugaccuacagccagcucaugacccugaaggacuccaugcugcagcuggacccgaacgccaagaccuggauggacaucgaggggcgccccgaggaccccguggagaucgcccucuaccagcccagcuccggcugcuacauccacuucuuccgggagccgacggaccugaagcaguucaagcaggacgccaaguacagccacggcaucgacgugaccgaccuguucgccgcgcagcccgggcucaccagcgccgucaucgaggcccugccccgcaacauggugaucacgugccagggcuccgaggacauccggaagcugcucgagagccaggggcgccgcgacaucaagcugaucgacaucucccugagcaaggucgacucccggaaguucgagaacgccgugugggaccaguucaaggaccucugccacaugcacaccggcaucguggucgagaagaagaagcgcgggggcaaggaggagaucacgccccacugcgcccugauggacugcaucauguucgacgcggccgugagcggcgggguggacgccaagguccugcgggccgugcucccgcgcgacaugguguuccggaccuccacccccaaggucgugcugugaggacuagucccuguucccagagcccacuuuuuuuucuuuuuuugaaauaaaauagccugucuuucagaucucaaaggcucuuuucagagccaccaaaaaaaaaaaaaaaaaaaaaaaaaaaaaaaaaaaaaaaaaaaaaaaaaaaaaaaaaaaaaaaaaaaaaaaaaaaaaaaaaaaaaaaaaaaaaaaaaaaaa

SEQ ID NO: 16870 - RNA, 1982 nt, Artificial Sequence
  mRNA product Design a-1 (hSL-A100) comprising derived and/or modified sequence from LASV(G1180-SLE-2010;Clade IV)__AIT17169__NP (opt1)
aggagagucccgcagucggcguccagcggcucugcuuguucgugugugugucguugcaggccuuauucaagcuuaccaugagcgccuccaaggagaucaagagcuuccuguggacccagucccuccgccgggagcugagcggcuacugcuccaacaucaagcuccagguggucaaggacgcccaggcgcugcugcacgggcuggacuucagcgagguguccaacgugcagcgccucaugcggaaggagcgccgggacgacaacgaccugaagcgccugcgggaccucaaccaggccgucaacaaccugguggagcucaagagcacccagcagaaguccauccugcgcgugggcacccugaccagcgacgaccugcucauccuggccgccgaccuggagaagcucaaguccaaggucauccggaccgagcgcccccugagcgccgggguguacaugggcaaccuguccagccagcagcucgaccagcggcgcgcgcugcuguccaugaucgggaugagcuccggcaaccagcgggcccaggccggccgcgacggggugguccgggugugggacgugaagaacgucgagcuccugaacaaccaguucggcaccaugccgagccugacgcucgccugccugaccaagcagggccagguggaccugaacgacgcggugcaggcccucaccgaccuggggcugaucuacaccgccaaguaccccaacacguccgaccucgaccgccugacccagagccaccccauccugaacaugaucgacaccaagaaguccagccucaacaucagcggguacaacuucucccugggcgccgccgucaaggcgggcgccugcaugcuggacgggggcaacaugcucgagaccaucaaggugagcccccagacgauggacgggauccugaaguccauccugaaggugaagaaggcccucggcauguucaucagcgacaccccgggcgagcggaaccccuacgagaacauccuguacaagaucugccuguccggggacggcuggcccuacaucgccagccgcaccuccaucaccgggcgggccugggagaacacggucguggaccucgagagcgacggcaagccccagaaggcgggguccaacaacagcaacaagucccugcagagcgugggcuucaccgccggccugaccuacucccagcucaugacccugaaggacgccaugcugcagcuggacccgaacgccaagacguggauggacaucgaggggcgccccgaggaccccgucgagaucgcccucuaccagcccagcuccggcugcuacauccacuucuuccgggagccgaccgaccugaagcaguucaagcaggacgcgaaguacagccacgggaucgacgugaccgaccuguucgccgcccagcccggccucaccuccgccgugaucgacgcccugccccgcaacauggucaucacgugccaggggagcgacgacauccgcaagcugcucgagagccagggccggaaggacaucaagcugaucgacaucgcgcuguccaagaccgacagccgcaaguacgagaacgccgugugggaccaguacaaggaccucugccacaugcacaccggcgucgugguggagaagaagaagcgcgggggcaaggaggagaucacgccccacugcgcccugauggacugcaucauguucgacgccgcggucuccgggggccugaacaccagcgugcuccgggccgugcugccgcgggacauggucuuccgcaccuccacgccccggguggugcugugaggacuagucccuguucccagagcccacuuuuuuuucuuuuuuugaaauaaaauagccugucuuucagaucucaaaggcucuuuucagagccaccaaaaaaaaaaaaaaaaaaaaaaaaaaaaaaaaaaaaaaaaaaaaaaaaaaaaaaaaaaaaaaaaaaaaaaaaaaaaaaaaaaaaaaaaaaaaaaaaaaaaa

SEQ ID NO: 16871 - RNA, 1982 nt, Artificial Sequence
  mRNA product Design a-1 (hSL-A100) comprising derived and/or modified sequence from LASV(G1442-SLE-2011;Clade IV)__AIT17181__NP (opt1)
aggagagucccgcagucggcguccagcggcucugcuuguucgugugugugucguugcaggccuuauucaagcuuaccaugagcgccuccaaggaggugaaguccuuccuguggacccagagccuccgccgggagcugagcggcuacugcuccaacaucaagcugcaggucgugaaggacgcccaggcgcuccugcacgggcuggacuucagcgagguguccaacguccagcgccucaugcggaagcagcgccgggacgacaacgaccugaagcgccugcgggaccucaaccaggccgugaacaaccugguggagcucaagagcacccagcagaaguccguccugcgcgugggcacccugaccagcgacgaccugcucgugcuggccgccgaccuggagaagcucaaguccaaggucauccggaccgagcgcccccugagcgccgggguguacaugggcaaccuguccagccagcagcucgaccagcggcgcgcgcugcugaacaugaucgggauguccggcggcauccaggggacccggacgggccgcgacggggugguccgggugugggacgugaagaacgccgaccuccugaacaaccaguucggcaccaugccgagccugacccucgccugccugaccaagcaggggcaggucgaccugaacgacguggugcaggcccucacggaccugggccugaucuacaccgcgaaguaccccaacgccuccgaccucgaccgccugacccagagccaccccauccugaacaugaucgacaccaagaaguccagccucaacaucagcggcuacaacuucucccugggggccgccgucaaggccggcgcgugcaugcuggacgggggcaacaugcucgagacgaucaaggugagcccccagaccauggacggcauccugaaguccauccugaaggugaagaagacccucgggauguucaucagcgacaccccgggcgagcggaaccccuacgagaacauccuguacaagaucugccuguccggggacggcuggcccuacaucgccagccgcacguccaucaccgggcgggccugggagaacaccgucguggaccucgagagcgacggcaagccccagaaggccggcuccaacaacagcaacaagucccugcagagcgccggguucgcggccggccugaccuacucccagcucaugacgcugaaggacgccaugcugcagcuggacccgaacgccaagaccuggauggacaucgaggggcgccccgaggaccccguggagaucgcccucuaccagcccagcuccggcugcuacauccacuucuuccgggagccgaccgaccugaagcaguucaagcaggacgcgaaguacagccacgggaucgacgucaccgaccuguucgccgcccagcccggccucacguccgccgugaucgaggcccugccccgcaacauggucaucacgugccagggcagcgacgacaucaagaagcugcucgagucccaggggcgcaaggacaucaagcugaucgacaucgcgcugagcaagaccgacagccggaaguacgagaacgccgugugggaccaguacaaggaccucugccacaugcacaccggcguggucguggagaagaagaagcgcgggggcaaggaggagaucaccccgcacugcgcccugauggacugcaucauguucgacgccgcgguguccgggggccugaacacccucguccugcgggccgugcugccccgcgacaugguguuccggaccagcacgccccgcgucgugcucugaggacuagucccuguucccagagcccacuuuuuuuucuuuuuuugaaauaaaauagccugucuuucagaucucaaaggcucuuuucagagccaccaaaaaaaaaaaaaaaaaaaaaaaaaaaaaaaaaaaaaaaaaaaaaaaaaaaaaaaaaaaaaaaaaaaaaaaaaaaaaaaaaaaaaaaaaaaaaaaaaaaaa

SEQ ID NO: 16872 - RNA, 1982 nt, Artificial Sequence
  mRNA product Design a-1 (hSL-A100) comprising derived and/or modified sequence from LASV(G3010-SLE-2013;Clade IV)__AIT17345__NP (opt1)
aggagagucccgcagucggcguccagcggcucugcuuguucgugugugugucguugcaggccuuauucaagcuuaccaugagcgccuccaaggagaucaagagcuuccuguggacccagucccuccgccgggagcugagcggcuacugcuccaacaucaagcuccagguggucaaggacgcccaggcgcugcugcacgggcuggacuucagcgagguguccaacgugcagcgccucaugcggaaggagcgccgggacgacaacgaccugaagcgccugcgggaccucaaccaggccgucaacaaccugguggagcucaagagcacccagcagaaguccauccugcgcgugggcacccugaccagcgacgaccugcucauccuggccgccgaccuggagaagcucaaguccaaggucacccggaccgagcgcccccugagcgccgggguguacaugggcaaccuguccagccagcagcucgaccagcggcgcgcgcugcuguccaugaucgggaugagcuccggcgugcagggcgcccgggccgggcgcgacggcgucgugcgggugugggacgucaagaacgccgagcuccugaacaaccaguucgggacgaugccgagccugacccucgcgugccugaccaagcagggccagguggaccugaacgacgugguccaggcccucaccgaccuggggcugaucuacacggccaaguaccccaacaccuccgaccucgaccgccugacccagagccaccccauccugaacaugaucgacaccaagaaguccagccucaacaucagcggcuacaacuucucccugggcgccgccgugaaggcgggggccugcaugcuggacggcgggaacaugcucgagacgaucaaggugagcccccagaccauggacggcauccugaaguccauccugaaggucaagaaggcccucggcauguucaucagcgagaccccgggggagcggaaccccuacgagaacauccuguacaagaucugccuguccggcgacggguggcccuacaucgccagccgcaccuccaucacgggccgggccugggagaacaccgugguggaccucgagagcgacgggaagccccagaaggcgggcuccaacaacagcaacaagucccugcagagcgccggcuucaccgccgggcugaccuacucccagcucaugacgcugaaggacgccaugcugcagcuggacccgaacgccaagaccuggauggacaucgagggccgccccgaggaccccgucgagguggcgcucuaccagcccagcuccgggugcuacauccacuucuuccgggagccgaccgaccugaagcaguucaagcaggacgccaaguacagccacggcaucgacgugaccgaccuguucgccgcccagcccgggcucacguccgccgucaucgacgcgcugccccgcaacauggugaucacgugccagggcagcgacgacaucaagaagcugcucgagagccagggccgcaaggacaucaagcugaucgacaucgcccuguccaagaccgacagccggaaguacgagaacgccgucugggaccaguacaaggaccucugccacaugcacaccggggugguggucgagaagaagaagcgcggcgggaaggaggagaucaccccgcacugcgcccugauggacugcaucauguucgacgcggccguguccggcgggcugaacaccagcgugcuccgggccguccugccccgcgacaugguguuccggaccuccacgccccgcgugguccugugaggacuagucccuguucccagagcccacuuuuuuuucuuuuuuugaaauaaaauagccugucuuucagaucucaaaggcucuuuucagagccaccaaaaaaaaaaaaaaaaaaaaaaaaaaaaaaaaaaaaaaaaaaaaaaaaaaaaaaaaaaaaaaaaaaaaaaaaaaaaaaaaaaaaaaaaaaaaaaaaaaaaa

SEQ ID NO: 16873 - RNA, 1982 nt, Artificial Sequence
  mRNA product Design a-1 (hSL-A100) comprising derived and/or modified sequence from LASV(G502-SLE-2009;Clade IV)__AIT17127__NP (opt1)
aggagagucccgcagucggcguccagcggcucugcuuguucgugugugugucguugcaggccuuauucaagcuuaccaugagcgccuccaaggagaucaagagcuuccuguggacccagucccuccgccgggagcugagcggcuacugcuccaacaucaagcuccagguggucaaggacgcccaggcgcugcugcacgggcuggacuucagcgagguguccaacgugcagcgccucaugcggaaggagcgccgggacgacaacgaccugaagcgccugcgggaccucaaccaggccgucaacaaccugguggagcucaagagcacccagcagaaguccauccugcgcgugggcacccugaccagcgacgaccugcucauccuggccgccgaccuggagaagcucaaguccaaggucauccggaccgagcgcccccugagcgccgggguguacaugggcaaccuguccagccagcagcucgaccagcggcgcgcgcugcuguccaugaucgggaugagcggcggcaaccagggggugcgggccggcaaggacggggucgugcgcgugugggacgucaagaacgccgagcuccugaacaaccaguucggcaccaugccgucccugacgcucgccugccugaccaagcagggccagguggaccugaacgacgcggugcaggcccucaccgaccuggggcugaucuacaccgccaaguaccccaacacgagcgaccucgaccggcugacccagucccaccccauccugaacaugaucgacaccaagaaguccagccucaacaucuccggcuacaacuucagccugggggccgccgucaaggcgggcgccugcaugcuggacgggggcaacaugcucgagaccaucaaggugagcccccagacgauggacggcauccucaagagcauccugaaggugaagaaggcccuggggauguucaucuccgacaccccgggcgagcgcaaccccuacgagaacauccuguacaagaucugccugagcggggacggcuggcccuacaucgccucccggaccagcaucaccgggcgcgccugggagaacacggucguggaccucgaguccgacggcaagccccagaaggcgggcagcaacaacuccaacaagagccugcaguccgccggguucaccgccggccugaccuacagccagcucaugacccugaaggacgccaugcugcagcuggacccgaacacgaagaccuggauggacaucgaggggcggcccgaggaccccguggagaucgcccucuaccagcccuccagcggcugcuacauccacuucuuccgcgagccgaccgaccugaagcaguucaagcaggacgcgaaguacucccacgggaucgacgucaccgaccuguucgccgcccagcccggccucacgagcgccgugaucgacgcccugccccggaacauggugaucacgugccagggcuccgacgacauccgcaagcugcucgagagccaggggcgcaaggacaucaagcugaucgacaucgcgcugaacaagaccgacagccggaaguacgagaacgccgucugggaccaguacaaggaccucugccacaugcacaccggcguggucguggagaagaagaagcgcgggggcaaggaggagaucaccccgcacugcgcccugauggacugcaucauguucgacgccgcgguguccgggggccugaacaccagcguccuccgggccgugcugccccgcgacaugguguuccggaccuccacgccccgcgucgugcugugaggacuagucccuguucccagagcccacuuuuuuuucuuuuuuugaaauaaaauagccugucuuucagaucucaaaggcucuuuucagagccaccaaaaaaaaaaaaaaaaaaaaaaaaaaaaaaaaaaaaaaaaaaaaaaaaaaaaaaaaaaaaaaaaaaaaaaaaaaaaaaaaaaaaaaaaaaaaaaaaaaaaa

SEQ ID NO: 16874 - RNA, 1982 nt, Artificial Sequence
  mRNA product Design a-1 (hSL-A100) comprising derived and/or modified sequence from LASV(G733-SLE-2010;Clade IV)__AIT17155__NP (opt1)
aggagagucccgcagucggcguccagcggcucugcuuguucgugugugugucguugcaggccuuauucaagcuuaccaugagcgccuccaaggagaucaagagcuuccuguggacccagucccuccgccgggagcugagcggcuacugcuccaacaucaagcuccagguggucaaggacgcccaggcgcugcugcacgggcuggacuucagcgagguguccaacgugcagcgccucaugcggaaggagcgccgggacgacaacgaccugaagcgccugcgggaccucaaccaggccgucaacaaccugguggagcucaagagcacccagcagaaguccgugcugcgcgucggcacccugaccagcgacgagcugcucgugcuggccgccgaccuggagaagcucaaguccaaggugauccggaccgagcgcccccugagcgccggggucuacaugggcaaccuguccagccagcagcucgaccagcggcgcgcgcugcuguccaugaucgggaugagcggcggcaaccagggggcccggaccggccgcgacgggguggugcgggucugggacgugaagaacgccgagcuccugaacaaccaguucggcaccaugccgucccugacccucgccugccugaccaagcagggccagguggaccugaacgacgcgguccaggcccucaccgaccuggggcugaucuacacggccaaguaccccaacaccagcgaccucgaccgccugacccagucccaccccauccugaacaugaucgacaccaagaaguccagccucaacaucuccggcuacaacuucagccugggggccgccgugaaggcgggcgccugcaugcuggacgggggcaacaugcucgagacgaucaaggugagcccccagaccauggacggcauccucaagagcauccugaaggucaagaaggcccuggggauguucaucuccgacaccccgggcgagcggaaccccuacgagaacauccuguacaagaucugccugagcggggacggcuggcccuacaucgccucccgcaccagcaucacggggcgggccugggagaacaccgugguggaccucgaguccgacggcaagccccagaaggcgggcagcaacaacuccaacaagagccugcaguccgccggguucaccgccggccugaccuacagccagcucaugacgcugaaggacgccaugcugcagcuggacccgaacgccaagaccuggauggacaucgaggggcgccccgaggaccccgucgagaucgcgcucuaccagcccuccagcggcugcuacauccacuucuuccgggagccgaccgaccugaagcaguucaagcaggacgccaaguacucccacgggaucgacgugaccgaccuguucgccgcccagcccggccucacgagcgccgugaucgacgcgcugccccgcaacauggucaucacgugccagggcuccgacgacauccgcaagcugcucgagagccaggggcggaaggacaucaagcugaucgacaucgcccugagcaagaucgacucccgcaaguacgagaacgccgugugggaccaguacaaggaccucugccacaugcacaccggcgucgugguggagaagaagaagcgcgggggcaaggaggagaucacgccccacugcgcccugauggacugcaucauguucgacgcggccgucagcgggggccugaacucccucgugcugcgggccgugcugccgcgggacauggucuuccgcaccagcacgccccggguggugcucugaggacuagucccuguucccagagcccacuuuuuuuucuuuuuuugaaauaaaauagccugucuuucagaucucaaaggcucuuuucagagccaccaaaaaaaaaaaaaaaaaaaaaaaaaaaaaaaaaaaaaaaaaaaaaaaaaaaaaaaaaaaaaaaaaaaaaaaaaaaaaaaaaaaaaaaaaaaaaaaaaaaaa

SEQ ID NO: 16875 - RNA, 1982 nt, Artificial Sequence
  mRNA product Design a-1 (hSL-A100) comprising derived and/or modified sequence from MOPV/LASV reassortant(IGS-1;Clade IV)__AFY05578__NP (opt1)
aggagagucccgcagucggcguccagcggcucugcuuguucgugugugugucguugcaggccuuauucaagcuuaccaugagcgccuccaaggagaucaagagcuuccuguggacccagucccuccgccgggagcugagcggcuacugcuccaacaucaagcuccagguggucaaggacgcccaggcgcugcugcacgggcuggacuucagcgagguguccaacgugcagcgccucaugcggaaggagcgccgggacgacaacgaccugaagcgccugcgggaccucaaccaggccgucaacaaccugguggagcucaagagcacccagcagaaguccauccugcgcgugggcacccugaccagcgacgaccugcucauccuggccgccgaccuggagaagcuccgguccaaggucauccgcaccgagcggccccugagcgccgggguguacaugggcaaccuguccagccagcagcucgaccagcgccgggcgcugcugaacaugaucgggauguccggcggcaaccagggggcccgcgccggccgggacggggugguccgcgugugggacgugaagaacgccgagcuccugagcaaccaguucggcaccaugccgucccugacgcucgcgugccugaccaagcaggggcaggucgaccugaacgacgccgugcaggcccucaccgaccugggccugaucuacaccgccaaguaccccaacacgagcgaccucgaccggcugacccagucccaccccauccugaacaugaucgacaccaagaaguccagccucaacaucuccggcuacaacuucagccugggggccgcggugaaggccggcgccugcaugcuggacgggggcaacaugcucgagaccaucaaggucagcccccagacgauggacggcauccucaagagcauccugaaggugaagaaggcccuggggauguucaucuccgacaccccgggcgagcgcaaccccuacgagaacauccuguacaagaucugccugagcggggacggcuggcccuacaucgccucccggaccagcaucaccgggcgcgcgugggagaacacgguggucgaccucgaguccgacggcaagccccagaaggccgacagcaacaacuccagcaagucccugcagagcgccggcuucaccgccgggcugaccuacucccagcucaugacccugaaggacgccaugcugcagcuggacccgaacgcgaagacguggauggacaucgagggccggcccgaggaccccguggagaucgcccucuaccagcccagcuccgggugcuacauccacuucuuccgcgagccgaccgaccugaagcaguucaagcaggacgccaaguacagccacggcaucgacgugaccgaccuguucgccacccagcccgggcucacguccgccgucaucgacgcgcugccccgcaacauggugaucacgugccagggcagcgacgacauccggaagcugcucgagagccagggccgcaaggacaucaagcugaucgacaucgaccuguccaagaccgacagccggaaguacgagaacgccgugugggaccaguacaaggaccucugccacaugcacaccggggucguggucgagaagaagaagcgcggcgggaaggaggagaucaccccgcacugcgcccugauggacugcaucauguucgacgccgcgguguccggcgggcugaacaccagcgugcuccgggccguccugccccgcgacaugguguuccggaccuccacgccccgcgugguccugugaggacuagucccuguucccagagcccacuuuuuuuucuuuuuuugaaauaaaauagccugucuuucagaucucaaaggcucuuuucagagccaccaaaaaaaaaaaaaaaaaaaaaaaaaaaaaaaaaaaaaaaaaaaaaaaaaaaaaaaaaaaaaaaaaaaaaaaaaaaaaaaaaaaaaaaaaaaaaaaaaaaaa

SEQ ID NO: 16876 - RNA, 1982 nt, Artificial Sequence
  mRNA product Design a-1 (hSL-A100) comprising derived and/or modified sequence from LASV(LM765-SLE-2012;Clade IV)__AIT17815__NP (opt1)
aggagagucccgcagucggcguccagcggcucugcuuguucgugugugugucguugcaggccuuauucaagcuuaccaugagcgccuccaaggagaucaagagcuuccuguggacccagucccuccgccgggagcugagcggcuacugcuccaacaucaagcuccagguggucaaggacgcccaggcgcugcugcacgggcuggacuucagcgagguguccaacgugcagcgccucaugcggaaggagcgccgggacgacaacgaccugaagcgccugcgggaccucaaccaggccgucaacaaccugguggagcucaagagcacccagcagaaguccauccugcgcgugggcacccugaccagcgacgaccugcucauccuggccgccgaccuggagaagcucaaguccaaggucacccggaccgagcgcccccugagcgccgggguguacaugggcaaccuguccagccagcagcucgaccagcggcgcgcgcugcuggacaugaucgggauguccggcagcaaccagggcgcccgggccgggcgcgacggcgugguccgggugugggacgugaagaacgccgagcuccugaacaaccaguucgggacgaugccgucccugacccucgcgugccugaccaagcagggccaggucgaccugaacgacgccgugcaggcccucaccgaccuggggcugaucuacacggccaaguaccccaacaccagcgaccucgaccgccugacccagucccaccccauccugaacaugaucgacaccaagaaguccagccucaacaucuccggcuacaacuucagccugggcgccgcggugaaggccggggccugcaugcuggacggcgggaacaugcucgagacgaucaaggucagcccccagaccauggacggcauccucaagagcauccugaaggugaagaaggcccugggcauguucaucuccgacgccccgggggagcggaaccccuacgagaacauccuguacaagaucugccugagcggcgacggguggcccuacaucgcgucccgcaccagcaucaccggccgggccugggagaacacgguggucgaccucgaguccgacgggaagccccagaaggccggcagcaacggcuccaacaagagccugcaguccgccggguucaccgccggccugaccuacagccagcucaugacccugaaggacgcgaugcugcagcuggacccgaacgccaagacguggauggacaucgaggggcgccccgaggaccccguggagaucgcccucuaccagcccuccagcggcugcuacauccacuucuuccgggagccgaccgaccugaagcaguucaagcaggacgccaaguacucccacgggaucgacgugaccgaccuguucgccgcgcagcccggccucaccagcgccgucaucgacgcccugccccgcaacauggugaucacgugccagggcuccgacgacauccgcaagcuguucgagagccaggggcggaaggacaucaagcucaucgacaucgcccugagcaagaccgacucccgcaaguacgagaacgcggugugggaccaguacaaggaccugugccacaugcacaccggcaucgucguggagaagaagaagcgcgggggcaaggaggagaucacgccccacugcgcccucauggacugcaucauguucgacgccgccgucagcgggggccugaacaccuccgugcugcgggccgugcucccgcgggacauggucuuccgcaccagcacgccccggguggugcugugaggacuagucccuguucccagagcccacuuuuuuuucuuuuuuugaaauaaaauagccugucuuucagaucucaaaggcucuuuucagagccaccaaaaaaaaaaaaaaaaaaaaaaaaaaaaaaaaaaaaaaaaaaaaaaaaaaaaaaaaaaaaaaaaaaaaaaaaaaaaaaaaaaaaaaaaaaaaaaaaaaaaa

SEQ ID NO: 16877 - RNA, 1982 nt, Artificial Sequence
  mRNA product Design a-1 (hSL-A100) comprising derived and/or modified sequence from LASV(LM776-SLE-2012;Clade IV)__AIT17825__NP (opt1)
aggagagucccgcagucggcguccagcggcucugcuuguucgugugugugucguugcaggccuuauucaagcuuaccaugagcgccuccaaggagaucaagagcuuccuguggacccagucccuccgccgggagcugagcuccuacugcagcaacaucaagcuccagguggucaaggacgcccaggcgcugcugcacggccuggacuucuccgaggugagcaacgugcagcgccucaugcggaaggagcgccgggacgacaacgaccugaagcgccugcgggaccucaaccaggccgucaacaaccugguggagcugaaguccacccagcagaaguccauccuccgcguggggacccugaccuccgacgaccugcucauccuggccgccgaccuggagaagcucaagagcaaggucacccggaccgagcgcccccuguccgccggcguguacauggggaaccugagcucccagcagcucgaccagcggcgcgcgcugcugagcaugaucggcauguccgggagcaaccagggcgcccgggccggccgcgacggggugguccgggugugggacgugaagaacgccgagcuccugaacaaccaguucggcacgaugccgucccugacccucgcgugccugaccaagcaggggcaggucgaccugaacgacgccgugcaggcccucaccgaccugggccugaucuacacggccaaguaccccaacaccagcgaccucgaccgccugacccagagccaccccauccugaacaugaucgacaccaagaaguccagccucaacaucuccggguacaacuucagccugggcgccgcggugaaggccggcgccugcaugcuggacgggggcaacaugcucgagacgaucaaggucagcccccagaccauggacgggauccucaagagcauccugaaggugaagaaggcccugggcauguucaucuccgacaccccgggcgagcggaaccccuacgagaacauccuguacaagaucugccugagcggggacggcuggcccuacaucgccucccgcaccagcaucacggggcgggcgugggagaacaccguggucgaccucgaguccgacggcaagccccagaaggccgggagcaacaacuccaacaagagccugcaguccgccggcuucaccgccggccugaccuacagccagcucaugacgcugaaggacgccaugcugcagcuggacccgaacgcgaagaccuggauggacaucgaggggcgccccgaggaccccguggagguggcccucuaccagcccuccagcggcugcuacauccacuucuuccgggagccgaccgaccugaagcaguucaagcaggacgccaaguacucccacgggaucgacgucaccgaccuguucgccgcccagcccggccucacgagcgcggugaucgacgcccugccccgcaacauggugaucacgugccaggggagcgacgacauccgcaagcugcucgagucccagggccggaaggacaucaagcugaucgacaucgcccugagcaagaccgacucccgcaaguacgagaacgccgucugggaccaguacaaggaccucugccacaugcacaccggcguggucguggagaagaagaagcgcgggggcaaggaggagaucaccccgcacugcgcgcugauggacugcaucauguucgacgccgccgugagcgggggccugaacaccuccguccuccgggccgugcugccccgggacaugguguuccgcaccagcacgccccgggucgugcugugaggacuagucccuguucccagagcccacuuuuuuuucuuuuuuugaaauaaaauagccugucuuucagaucucaaaggcucuuuucagagccaccaaaaaaaaaaaaaaaaaaaaaaaaaaaaaaaaaaaaaaaaaaaaaaaaaaaaaaaaaaaaaaaaaaaaaaaaaaaaaaaaaaaaaaaaaaaaaaaaaaaaa

SEQ ID NO: 16878 - RNA, 1982 nt, Artificial Sequence
  mRNA product Design a-1 (hSL-A100) comprising derived and/or modified sequence from LASV(Mad39;Clade IV)__ANH09723__NP (opt1)
aggagagucccgcagucggcguccagcggcucugcuuguucgugugugugucguugcaggccuuauucaagcuuaccaugagcgccuccaaggagaucaagagcuuccuguggacccagucccuccgccgggagcugagcggcuacugcuccaacaucaagcuccagguggucaaggacgcccaggcgcugcugcacgggcuggacuucagcgagguguccaacgugcagcgccucaugcggaagcagcgccgggacgacaacgaccugaagcgccugcgggaccucaaccaggccgucaacaaccugguggagcugaaguccacccagcagaaguccgugcuccgcgucggcacgcugaccagcgacgaccugcucacccuggccgccgaccuggagaagcucaaguccaaggugacccggacggagcgcccccugaccgccgggguguacaugggcaaccugagcucccagcagcucgaccagcggcgcgcgcugcugaacaugaucgggaugagcggcggcaaccagggggcccggaccggccgcgacggggucgugcgggugugggacgucaagaacgccgagcuccugaacaaccaguucggcaccaugccgucccugacgcucgccugccugaccaagcagggccagguggaccugaacgacgugguccaggcgcucaccgaccuggggcugaucuacaccgccaaguaccccaacacgagcgaccucgaccgccugacccagucccaccccauccugaacaugaucgacaccaacaagagcucccucaacaucagcggcuacaacuucagccugggggccgccgugaaggccggcgcgugcaugcuggacgggggcaacaugcucgagaccaucaaggugagcccccagacgauggacggcauccucaagagcauccugaaggucaagaagucccuggggauguucaucagcgacaccccgggcgagcggaaccccuacgagaacauccuguacaagaucugccuguccggggacggcuggcccuacaucgccagccgcaccuccaucaccgggcgggccugggagaacacggugguggaccucgagagcggcggcaagccccagaaggccggguccaacaacagcaacaagucccugcagagcgccggcuucgcggccgggcugaccuacucccagcucaugacccugaaggacgccaugcugcagcuggacccgaacgccaagaccuggauggacaucgagggccgccccgaggaccccgucgagaucgcccucuaccagcccaucagcgggugcuacauccacuucuuccgggagccgacggaccugaagcaguucaagcaggacgcgaaguacucccacggcaucgacgugaccgaccuguucgccgcccagcccggccucaccagcgccgugaucgaggcccugccccgcaacauggucaucacgugccagggguccgacgacauccgcaagcuguucgagagccagggccggaaggacaucaagcucaucgacaucgcgcuguccaagaccgacagccgcaaguacgagaacgccgugugggaccaguacaaggaccugugccacaugcacaccggggucgugguggagaagaagaagaagggcgggaaggaggagaucacgccccacugcgcccucauggacugcaucauguucgacgccgcggucagcggcggccugaacacccuggugcuccgggccgugcugccgcgcgacauggucuuccggaccuccacccccaagguggugcugugaggacuagucccuguucccagagcccacuuuuuuuucuuuuuuugaaauaaaauagccugucuuucagaucucaaaggcucuuuucagagccaccaaaaaaaaaaaaaaaaaaaaaaaaaaaaaaaaaaaaaaaaaaaaaaaaaaaaaaaaaaaaaaaaaaaaaaaaaaaaaaaaaaaaaaaaaaaaaaaaaaaaa

SEQ ID NO: 16879 - RNA, 1982 nt, Artificial Sequence
  mRNA product Design a-1 (hSL-A100) comprising derived and/or modified sequence from LASV(Z0947-SLE-2011;Clade IV)__AIT17841__NP (opt1)
aggagagucccgcagucggcguccagcggcucugcuuguucgugugugugucguugcaggccuuauucaagcuuaccaugagcgccuccaaggagaucaagagcuuccuguggacccagucccuccgccgggagcugagcggcuacugcuccaacaucaagcuccagguggucaaggacgcccaggcgcugcugcacgggcuggacuucagcgagguguccaacgugcagcgccucaugcggaaggagcgccgggacgacaacgaccugaagcgccugcgggaccucaaccaggccgucaacaaccugguggagcucaagagcacccagcagaaguccauccugcgcgugggcacccugaccagcgacgaccugcucauccuggccgccgaccuggagaagcucaaguccaaggucacccggaccgagcgcccccugagcgccgggguguacaugggcaaccuguccagccagcagcucgaccagcggcgcgcgcugcugaacaugaucgggauguccggcagcaaccagggcgcccggacggggcgcgacggcgugguccgggugugggacgugaagaacgccgagcuccugaacaaccaguucgggaccaugccgucccugacccucgccugccugaccaagcagggccaggucgaccugaacgacgcggugcaggcccucacggaccuggggcugaucuacaccgccaaguaccccaacaccagcgaccucgaccgccugacccagucccaccccauccugaacaugaucgacacgaagaaguccagccucaacaucuccggcuacaacuucagccugggcgccgccgugaaggcgggggccugcaugcuggacggcgggaacaugcucgagaccaucaaggucagcccccagaccauggacggcauccucaagagcauccugaaggugaagaaggcccugggcauguucaucuccgacgccccgggggagcggaaccccuacgagaacauccuguacaagaucugccugagcggcgacggguggcccuacaucgccucccgcaccagcaucacgggccgggcgugggagaacaccguggucgaccucgaguccgacgggaagccccagaaggccggcagcaacggcuccaacaagagccugcaguccgccggguucaccgccggccugaccuacagccagcucaugacgcugaaggacgccaugcugcagcuggacccgaacgcgaagaccuggauggacaucgaggggcgccccgaggaccccguggagaucgcccucuaccagcccuccagcggcugcuacauccacuucuuccgggagccgaccgaccugaagcaguucaagcaggacgccaaguacucccacgggaucgacgugaccgaccuguucgccgcccagcccggccucacgagcgcggucaucgacgcccugccccgcaacauggugaucacgugccagggcuccgacgacauccgcaagcuguucgagagccaggggcggaaggacaucaagcucaucgacaucgcccugagcaagaccgacucccgcaaguacgagaacgccgugugggaccaguacaaggaccugugccacaugcacaccggcaucgucguggagaagaagaagcgcgggggcaaggaggagaucaccccgcacugcgcgcucauggacugcaucauguucgacgccgccgucagcgggggccugaacaccuccgugcugcgggccgugcucccccgggacauggucuuccgcaccagcacgccccggguggugcugugaggacuagucccuguucccagagcccacuuuuuuuucuuuuuuugaaauaaaauagccugucuuucagaucucaaaggcucuuuucagagccaccaaaaaaaaaaaaaaaaaaaaaaaaaaaaaaaaaaaaaaaaaaaaaaaaaaaaaaaaaaaaaaaaaaaaaaaaaaaaaaaaaaaaaaaaaaaaaaaaaaaaa

SEQ ID NO: 16880 - RNA, 1982 nt, Artificial Sequence
  mRNA product Design a-1 (hSL-A100) comprising derived and/or modified sequence from LASV(Josiah;Clade IV)__NP_694869__NP (opt4)
aggagagucccgcagucggcguccagcggcucugcuuguucgugugugugucguugcaggccuuauucaagcuuaccaugagcgccagcaaggagaucaagagcuuccuguggacccagagccugagaagagagcugagcggcuacugcagcaacaucaagcugcagguggugaaggacgcccaggcccugcugcacggccuggacuucagcgaggugagcaacgugcagagacugaugagaaaggagagaagagacgacaacgaccugaagagacugagagaccugaaccaggccgugaacaaccugguggagcugaagagcacccagcagaagagcauccugagagugggcacccugaccagcgacgaccugcugauccuggccgccgaccuggagaagcugaagagcaaggugaucagaaccgagagaccccugagcgccggcguguacaugggcaaccugagcagccagcagcuggaccagagaagagcccugcugaacaugaucggcaugagcggcggcaaccagggcgccagagccggcagagacggcguggugagagugugggacgugaagaacgccgagcugcugaacaaccaguucggcaccaugcccagccugacccuggccugccugaccaagcagggccagguggaccugaacgacgccgugcaggcccugaccgaccugggccugaucuacaccgccaaguaccccaacaccagcgaccuggacagacugacccagagccaccccauccugaacaugaucgacaccaagaagagcagccugaacaucagcggcuacaacuucagccugggcgccgccgugaaggccggcgccugcaugcuggacggcggcaacaugcuggagaccaucaaggugagcccccagaccauggacggcauccugaagagcauccugaaggugaagaaggcccugggcauguucaucagcgacacccccggcgagagaaaccccuacgagaacauccuguacaagaucugccugagcggcgacggcuggcccuacaucgccagcagaaccagcaucaccggcagagccugggagaacaccgugguggaccuggagagcgacggcaagccccagaaggccgacagcaacaacagcagcaagagccugcagagcgccggcuucaccgccggccugaccuacagccagcugaugacccugaaggacgccaugcugcagcuggaccccaacgccaagaccuggauggacaucgagggcagacccgaggaccccguggagaucgcccuguaccagcccagcagcggcugcuacauccacuucuucagagagcccaccgaccugaagcaguucaagcaggacgccaaguacagccacggcaucgacgugaccgaccuguucgccacccagcccggccugaccagcgccgugaucgacgcccugcccagaaacauggugaucaccugccagggcagcgacgacaucagaaagcugcuggagagccagggcagaaaggacaucaagcugaucgacaucgcccugagcaagaccgacagcagaaaguacgagaacgccgugugggaccaguacaaggaccugugccacaugcacaccggcguggugguggagaagaagaagagaggcggcaaggaggagaucaccccccacugcgcccugauggacugcaucauguucgacgccgccgugagcggcggccugaacaccagcgugcugagagccgugcugcccagagacaugguguucagaaccagcacccccagaguggugcugugaggacuagucccuguucccagagcccacuuuuuuuucuuuuuuugaaauaaaauagccugucuuucagaucucaaaggcucuuuucagagccaccaaaaaaaaaaaaaaaaaaaaaaaaaaaaaaaaaaaaaaaaaaaaaaaaaaaaaaaaaaaaaaaaaaaaaaaaaaaaaaaaaaaaaaaaaaaaaaaaaaaaa

SEQ ID NO: 16881 - RNA, 1982 nt, Artificial Sequence
  mRNA product Design a-1 (hSL-A100) comprising derived and/or modified sequence from LASV(LP;Clade I)__AAF86702__NP (opt4)
aggagagucccgcagucggcguccagcggcucugcuuguucgugugugugucguugcaggccuuauucaagcuuaccaugagcaacagcaaggagaucaagagcuuccuguggacccagagccugagaagagagcugagcggcuacugcagcaacaucaagcugcagguggugaaggacgcccaggcccugcugcacggccuggacuucagcgaggugagcaacgugcagagacugaugagaaagcagaagagagacgacgccgaccugaagagacugagagaccugaaccaggccgugaacaaccugguggagcugaagagcacccagcagaagaacgugcugagagugggcacccugagcagcgacgaccugaucacccuggccgccgaccuggagaagcugaagagcaaggugaucagaaccgagagaccccugagcagcggcguguacaugggcaaccugagcagccagcagcuggaccagagaagagcccugcugagcaugaucggcaugagcggcggcccccagggcaacagaaccggcggcgacggcguggugagagugugggacgugaagaacgccgagcugcugaacaaccaguucggcaccaugcccagccugacccuggccugccugaccaagcagggccagguggaccugaacgacgccgugcaggcccugaccgaccugggccugaucuacaccgccaaguaccccaacagcagcgaccuggacaugcugacccagagccaccccauccugggcaugguggacaccaagaagagcagccugaacaucagcggcuacaacuucagccugggcgccgccgugaaggccggcgccugcaugcuggacggcggcaacaugcuggagaccaucaaggugagcccccagaccauggacggcauccugaagagcauccugaaggugaagagaagccugggcauguucaucagcgacacccccggcgagagaaaccccuacgagaacauccuguacaagaucugccugagcggcgagggcuggcccuacaucgccagcagaaccagcaucaccggcagagccugggagaacacccugguggaccuggagagcgacaacaagccccccaagcugaacagcgccggcagcaacaagagccugcaggccgccggccugaacgccggccugaccuacagccagcugaugacccugaaggacugcaugcugcagcuggaccccagcagcaagaccuggaucgacaucgagggcagacccgaggaccccguggagaucgcccuguuccagcccagcagcggcugcuacauccacuucuucagagagcccaccgaccugaagcaguucaagcaggacgccaaguacagccacggcaucgacgugaccgaccuguucagcacccagcccggccugaccagcgccgugaucgaggcccugcccagaaacauggugcugaccugccagggcagcgacgacaucaagaagcugcuggagagccagggcagaagagacaucaagcugaucgacaucagccugagcaaggccgacagcagaaaguucgagaacgccgugugggaccaguacaaggaccugugccacaugcacaccggcguggugguggagaagaagaagagaggcggcaaggaggagaucaccccccacugcgcccugcuggacugcaucauguucgacgccgccaccaccggcagccugaacaucaccacccugagagccgugcugcccagagacaugguguucagaaccagcacccccaagguggugcugugaggacuagucccuguucccagagcccacuuuuuuuucuuuuuuugaaauaaaauagccugucuuucagaucucaaaggcucuuuucagagccaccaaaaaaaaaaaaaaaaaaaaaaaaaaaaaaaaaaaaaaaaaaaaaaaaaaaaaaaaaaaaaaaaaaaaaaaaaaaaaaaaaaaaaaaaaaaaaaaaaaaaa

SEQ ID NO: 16882 - RNA, 1982 nt, Artificial Sequence
  mRNA product Design a-1 (hSL-A100) comprising derived and/or modified sequence from LASV(803213;Clade II)__AAF86704__NP (opt4)
aggagagucccgcagucggcguccagcggcucugcuuguucgugugugugucguugcaggccuuauucaagcuuaccaugagcgccagcaaggaggugaagagcuuccuguggacccagagccugagaagagagcugagcggcuacugcagcaacaucaagcugcagguggugaaggacgcccaggcccugcugcacggccuggacuucagcgaggugaacaacgugcagagacugaugagaaagcagaagagagacgacggcgaccugaagagacugagagaccugaaccaggccgugaacaaccugguggagcugaagagcacccagcagaagagcauccugagagugggcacccugaccagcgacgaccugcugacccuggccgccgaccuggagaagcugaagagcaaggugaucagaaccgagagaccccugagcagcggcguguacaugggcaaccugagcacccagcagcuggagcagagaagagcccugcugaacaugaucggcauggugggcggcgcccagggcacccagcccggcagagacggcguggugagagugugggacgugaagaaccccgaccugcugaacaaccaguucggcaccaugcccagccugacccuggccugccugaccaagcagggccagguggaccugaacgacgccgugcuggcccugaccgaccugggccugaucuacaccgccaaguaccccaacagcagcgaccuggacagacugagccagagccaccccauccugaacaugguggacaccaagaagagcagccugaacaucagcggcuacaacuucagccugggcgccgccgugaaggccggcgccugcaugcuggacggcggcaacaugcuggagaccaucaaggugaccccccagaccauggacggcauccugaagagcauccugaaggugaagagaagccugggcauguucgugagcgacacccccggcgagagaaaccccuacgagaacauccuguacaagaucugccugagcggcgacggcuggcccuacaucgccagcagaaccagcaucgugggcagagccugggagaacaccaccguggaccuggagagcgacggcaagccccagaaggugggcaccgccggcagcaacaagagccugcagagcgccggcuuccccaccggccugaccuacagccagcugaugacccugaaggacagcaugaugcagcuggaccccagcgccaagaccuggaucgacaucgagggcagacccgaggaccccguggagaucgcccuguaccagcccaugagcggcugcuacauccacuucuucagagagcccaccgaccugaagcaguucaagcaggacgccaaguacagccacggcaucgacguggccgaccuguuccccgcccagcccggccugaccagcgccgugaucgaggcccugcccagaaacauggugcugaccugccagggcagcgacgacaucaagaagcugcuggacagccagggcagaagagacaucaagcugaucgacaucagccugagcaagguggacagcagaaaguucgagaacgccgugugggaccagugcaaggaccugugccacaugcacaccggcguggugguggagaagaagaagagaggcggcaaggaggagaucaccccccacugcgcccugauggacugcaucauguucgacgccgccgugagcggcggccugaacauccccgugcugagagccgugcugcccagagacaugguguucagaaccagcagccccaagguggugcugugaggacuagucccuguucccagagcccacuuuuuuuucuuuuuuugaaauaaaauagccugucuuucagaucucaaaggcucuuuucagagccaccaaaaaaaaaaaaaaaaaaaaaaaaaaaaaaaaaaaaaaaaaaaaaaaaaaaaaaaaaaaaaaaaaaaaaaaaaaaaaaaaaaaaaaaaaaaaaaaaaaaaa

SEQ ID NO: 16883 - RNA, 1985 nt, Artificial Sequence
  mRNA product Design a-1 (hSL-A100) comprising derived and/or modified sequence from LASV(GA391;Clade III)__CAA36646__NP (opt4)
aggagagucccgcagucggcguccagcggcucugcuuguucgugugugugucguugcaggccuuauucaagcuuaccaugagcgccagcaaggaggugagaagcuuccuguggacccagagccugagaagagagcugagcggcuacugcagcaacaucaagcugcagguggugaaggacgcccaggcccugcugcacggccuggacuucagcgaggugagcaacgugcagagacugaugagaaagcagaagagagacgacggcgaccugaagagacugagagaccugaaccaggccgugaacaaccugguggagcugaagagcacccagcagaagagcgugcugagagugggcacccugagcagcgacgaccugcugauccuggccgccgaccuggagaagcugaagagcaaggugaccagaaccgagagaccccugagcagcggcguguacaugggcaaccugagcagccagcagcuggaccagagaagagcccugcugaacaugaucggcaugaccggcgugagcggcggcggcaagggcgccagcgacggcaucgugagagugugggacgugaagaacgccgagcugcugaacaaccaguucggcaccaugcccagccugacccuggccugccugaccaagcagggccagguggaccugaacgacgccgugcaggcccugaccgaccugggccugaucuacaccgccaaguaccccaacagcagcgaccuggacagacugagccagagccaccccauccugaacaugaucgacaccaagaagagcagccugaacaucagcggcuacaacuucagccugggcgccgccgugaaggccggcgccugcaugcuggacggcggcaacaugcuggagaccaucaaggugagcccccagaccauggacggcauccugaagagcauccugaaggugaagaagagccugggcauguucgugagcgacacccccggcgagagaaaccccuacgagaacauccuguacaagaucugccugagcggcgacggcuggcccuacaucgccagcagaaccagcaucgugggcagagccugggagaacaccgugguggaccuggagcaggacaacaagccccagaagaucggcaacggcggcagcaacaagagccugcagagcgccggcuucgccgccggccugaccuacagccagcugaugacccugaaggacuucaagugcuucaaccugauccccaacgccaagaccuggauggacaucgagggcagacccgaggaccccguggagaucgcccuguaccagcccagcagcggcugcuacgugcacuucuucagagagcccaccgaccugaagcaguucaagcaggacgccaaguacagccacggcaucgacgugaccgaccuguucgccgcccagcccggccugaccagcgccgugaucgaggcccugcccagaaacauggugaucaccugccagggcagcgaggacaucagaaagcugcuggagagccagggcagaagagacaucaagcugaucgacaucacccugagcaaggccgacagcagaaaguucgagaacgccgugugggaccaguucaaggaccugugccacaugcacaccggcguggugguggagaagaagaagagaggcggcaaggaggagaucaccccccacugcgcccugauggacugcaucauguucgacgccgccgugagcggcggccuggacgccaaggugcugagaguggugcugcccagagacaugguguucagaaccagcacccccaagguggugcugugaggacuagucccuguucccagagcccacuuuuuuuucuuuuuuugaaauaaaauagccugucuuucagaucucaaaggcucuuuucagagccaccaaaaaaaaaaaaaaaaaaaaaaaaaaaaaaaaaaaaaaaaaaaaaaaaaaaaaaaaaaaaaaaaaaaaaaaaaaaaaaaaaaaaaaaaaaaaaaaaaaaaa

SEQ ID NO: 16884 - RNA, 1982 nt, Artificial Sequence
  mRNA product Design a-1 (hSL-A100) comprising derived and/or modified sequence from LASV(AV;Clade V)__CCA30315__NP (opt4)
aggagagucccgcagucggcguccagcggcucugcuuguucgugugugugucguugcaggccuuauucaagcuuaccaugagcgccagcaaggaggugaagagcuuccuguggacccagagccugagaagagagcugagcggcuacugcagcaacaucaagcugcagguggugaaggacgcccaggcccugcugcacggccuggacuucagcgaggugagcaacgugcagagacugaugagaaagcagagaagagacgacagcgaccugaagagacugagagaccugaaccaggccgugaacaaccugguggagcugaagagcacccagcagaagagcgugcugagagugggcacccugagcagcgacgaccugcugacccuggccgccgaccuggagaagcugaagagcaaggugaccagaaccgagagaccccugagcagcggcguguacaugggcaaccugagcagccagcagcuggaccagagaagagcccugcugaaccugaucggcaugaccaacggcagccagggcagccaggccggcagagacggcguggugagagugugggacgugaagaacgccgagcugcugaacaaccaguucggcaccaugcccagccugacccuggccugccugaccaagcagggccagguggaccugaacgacguggugcaggcccugaccgaccugggccugaucuacaccgccaaguaccccaacaccagcgaccuggacagacugacccagagccaccccauccugaacaugaucgacaccaagaagagcagccugaacaucagcggcuacaacuucagccugggcgccgccgugaaggccggcgccugcaugcuggacggcggcaacaugcuggagaccaucaaggugagcccccagagcauggacggcauccugaagagcauccugaaggugaagagagcccugggcauguucgugagcgacacccccggcgagagaaaccccuacgagaacauccuguacaagaucugccugagcggcgacggcuggcccuacaucgccagcagaaccagcaucgugggcagagccugggagaacaccgugguggaccuggagaccgacggcaagccccagaagaucggcagcggcaacagcaacaagagccugcagagcgccggcuucagcgccggccugaccuacagccagcugaugacccugaaggacgccaugcugcagcuggaccccaacgccaagaccuggauggacaucgagggcagacccgaggaccccguggagguggcccuguaccagcccaucagcggcugcuacauccacuucuucagagagcccaccgaccugaagcaguucaagcaggacgccaaguacagccacggcaucgacaucgccgaccuguucgccgcccagcccggccugaccagcgccgugaucgaggcccugcccagaaacauggugaucaccugccagggcagcgaggacaucaagaagcugcuggagagccagggcagaaaggacaucaagcugaucgacaucgcccugagcaagaucgacagcagaaaguucgagaacgccgugugggaccaguacaaggaccugugccacaugcacaccggcguggugguggagaagaagaagagaggcggcaaggaggagaucaccccccacugcgcccugauggacugcaucauguucgacgccgccgugagcggcggccugaacacccuggugcugagagccgugcugcccagagacaugguguucagaaccagcacccccagaguggugcugugaggacuagucccuguucccagagcccacuuuuuuuucuuuuuuugaaauaaaauagccugucuuucagaucucaaaggcucuuuucagagccaccaaaaaaaaaaaaaaaaaaaaaaaaaaaaaaaaaaaaaaaaaaaaaaaaaaaaaaaaaaaaaaaaaaaaaaaaaaaaaaaaaaaaaaaaaaaaaaaaaaaaa

SEQ ID NO: 16885 - RNA, 1982 nt, Artificial Sequence
  mRNA product Design a-1 (hSL-A100) comprising derived and/or modified sequence from LASV(Togo/2016/7082;Clade VI)__AMR44578__NP (opt4)
aggagagucccgcagucggcguccagcggcucugcuuguucgugugugugucguugcaggccuuauucaagcuuaccaugagcaacagcaaggaggugaagagcuuccuguggacccagagccugagaagagagcugagcggcuacugcagcaacaucaagcugcagguggugaaggacgcccaggcccugcugcacggccuggacuucagcgaggugagcaacgugcagagacugaugagaaagcagaagagagacgacggcgaccugaagagacugagagaccugaaccaggccgugaacaaccugguggagcugaagagcgugcagcagaagagcauccugagagugggcacccugaccagcgacgaccugcugacccuggccgccgaccuggagaagcugaagagcaaggugaccagaaccgagagaccccugagcagcggcguguacaugggcaaccugagcagccagcagcuggaccagagaagagcccugcugagcaugaucggcaugagcggcggcaaccagaacagccagcccaagggcgacggcguggugagagugugggacgugaagaacgccgaccugcugaacaaccaguucggcaccaugcccagccugacccuggccugccugaccaagcagggccagguggaccugaacgacgccgugcaggcccugaccgaccugggccugaucuacaccgccaaguaccccaacagcagcgaccuggacagacugagccagagccaccccauccugaacaugaucgacaccaagaagagcagccugaacaucagcggcuacaacuucagccugggcgccgccaucaagaccggcgccugcaugcuggacggcggcaacaugcuggagaccaucaaggugaccccccagaccauggacggcauccugaagagcauccugaaggugaagagaagccugggcauguucaucagcgacacccccggcgagagaaaccccuacgagaacauccuguacaagaucugccugagcggcgacggcuggcccuacaucgccagcagaaccgccaucaucggcagagccugggagaacaccgugguggaccuggagagcgacagcaagccccagaagaucggcagcaacggcagcaacaagagccugcagagcgccggcuucgcccccggccugaccuacagccagcugaugacccugaaggacagcaugcugcagcuggaccccaacgccaagaccuggaucgacaucgagggcagacccgaggaccccguggagguggcccuguuccagcccaucagcggcugcuacauccacuucuucagagagcccaccgaccugaagcaguucaagcaggacgccaaguacagccacggcaucgacgugaccgaccuguucgccgcccagcccggccugaccagcgccgugaucgaggcccugcccagaaacauggugcugaccugccagggcagcgacgacaucaagaagcugcuggacagccagggcagaagagacaucaagcugaucgacgugagccugaacaagaucgacagcagaaaguucgagaacgccgugugggaccaguacaaggaccugugccacaugcacaccggcguggugguggagaagaagaagaagggcggcaaggaggagaucaccccccacugcgcccugcuggacugcaucauguucgacgccgccgugagcggcggccugaacgccaccgugcugagagccgugcugcccagagacaugguguucagaaccagcagccccaagguggugcugugaggacuagucccuguucccagagcccacuuuuuuuucuuuuuuugaaauaaaauagccugucuuucagaucucaaaggcucuuuucagagccaccaaaaaaaaaaaaaaaaaaaaaaaaaaaaaaaaaaaaaaaaaaaaaaaaaaaaaaaaaaaaaaaaaaaaaaaaaaaaaaaaaaaaaaaaaaaaaaaaaaaaa

SEQ ID NO: 16886 - RNA, 1982 nt, Artificial Sequence
  mRNA product Design a-1 (hSL-A100) comprising derived and/or modified sequence from LASV(KAK-428;Clade n.d. (VII))__ANH09741__NP (opt4)
aggagagucccgcagucggcguccagcggcucugcuuguucgugugugugucguugcaggccuuauucaagcuuaccaugagcaacagcaaggaggugaagagcuuccuguggacccagagccugagaagagagcugagcggcuacugcaccaacaucaagcugcagguggugaaggacgcccaggcccugcugcacggccuggacuucagcgaggugagcaacgugcagagacugaugagaaagcagaagagagacgacaacgaccugaagagacugagagaccugaaccaggccgugaacaaccugguggagcugaagagcgugcagcagaagagcgugcugaaggugggcacccugaacagcgacgaccugcugacccuggccgccgaccuggagaagcugaagagcaagguggugagaaccgagagaccccugagcagcggcguguacaugggcaaccugagcagccagcagcuggaccagagaagagcccugcugaacaugaucggcauggccggcggcagccagggcaaccagcccagcagagacggcguggugagagugugggacgugaagaacgccgaccugcugaacaaccaguucggcaccaugcccagccugacccuggccugccugaccaagcagggccagguggaccugaacgacguggugcuggcccugaccgaccugggccugaucuacaccgccaaguaccccaacagcagcgaccuggacagacugagccagaaccaccccgugcugaacaugaucgacgugaacaagagcagccugaacaucagcggcuacaacuucagccugggcgccgccgugaaggccggcgccugcaugcuggacggcggcaacaugcuggagaccaucaagaucagcccccagaccguggacggcauccugaagagcauccugaaggugaagagagcccugggcauguucgugagcgacacccccggcgagagaaaccccuacgagaacauccuguacaaggugugccugagcggcaacggcuggcccuacaucgccagcagaaccagcaucgugggcagagccugggagaacaccgugguggaccuggagagcaacaagaaccagcccaaggugggcaacaacggcagcaacaagaugcugcagagcagcggcuucgccaccggccugaccuacagccagcugaugacccugagagacagcaugcugcagcuggaccccaccgccaagaccuggaucgacaucgagggcagacccgaggaccccguggagcuggcccuguuccagcccagcagcggcugcuacauccacuucuucagagagcccaccgaccugaagcaguucaagcaggacgccaaguacagccacggcaucgacgugaacgaccuguucagcgcccagcccggccugaccagcgccgugcuggaggcccugcccagaaacauggugcugaccugccagggcagcgacgacaucagaaagcugcuggacagccaggacagaaaggacaucaagcugaucgacaucagccugagcaaggccgacgccagaaaguucgagaacgacgugugggaccaguucaaggaccugugccacaugcacaccggcaucgugguggagaagaagaagaagggcggcaagcaggagaugaccccccacugcgcccugcuggacugcaucauguucgacgccgccgugagcggcggccugaacgugcccacccugagagccgugcugcccaccgacaugguguucagaaccaucaccaccaagguggugcugugaggacuagucccuguucccagagcccacuuuuuuuucuuuuuuugaaauaaaauagccugucuuucagaucucaaaggcucuuuucagagccaccaaaaaaaaaaaaaaaaaaaaaaaaaaaaaaaaaaaaaaaaaaaaaaaaaaaaaaaaaaaaaaaaaaaaaaaaaaaaaaaaaaaaaaaaaaaaaaaaaaaaa

SEQ ID NO: 16887 - RNA, 1982 nt, Artificial Sequence; identical to SEQ ID NO: 16881
  mRNA product Design a-1 (hSL-A100) comprising derived and/or modified sequence from LASV(Pinneo-NIG-1969;Clade I)__AIT17837__NP (opt4)

SEQ ID NO: 16888 - RNA, 1982 nt, Artificial Sequence
  mRNA product Design a-1 (hSL-A100) comprising derived and/or modified sequence from LASV(ISTH0009-NIG-2011;Clade II)__AIT17405__NP (opt4)
aggagagucccgcagucggcguccagcggcucugcuuguucgugugugugucguugcaggccuuauucaagcuuaccaugagcgugagcaaggaggugaagagcuuccuguggacccagagccugagaagagagcugagcggcuacugcagcaacaucaagcugcagguggugaaggacgcccaggcccugcugcacggccuggacuucagcgaggugagcaacgugcagagacugaugagaaagcagaagagagacgacagcgaccugaagagacugagagaccugaaccaggccgugaacaaccugguggagcugaagagcacccagcagaagagcauccugagagugggcacccugaccagcgacgaccugcugacccuggccgccgaccuggagaagcugaagagcaaggugaucagaaccgagagaccccugagcagcggcguguacaugggcaaccugagcacccagcagcuggagcagagaagagcccugcugaacaugaucggcauggugggcggcgcccagggcacccagcccggcagagacggcguggugagagugugggacgugaagaaccccgaccugcugaacaaccaguucggcaccaugcccagccugacccuggccugccugaccaagcagggccagguggaccugaacgacgccgugcuggcccugaccgaccugggccugaucuacaccgccaaguaccccaacagcagcgaccuggacagacugagccagagccaccccauccugaacaugguggacaucaagaagagcagccugaacaucagcggcuacaacuucagccugggcgccgccgugaaggccggcgccugcaugcuggacggcggcaacaugcuggagaccaucaaggugaccccccagaccauggacggcauccugaagagcauccugaaggugaagagaagccugggcauguucgugagcgacacccccggcgagagaaaccccuacgagaacauccuguacaagaucugccugagcggcgacggcuggcccuacaucgccagcagaaccagcaucgugggcagagccugggagaacaccaccguggaccuggagagcgacggcaagccccagaaggugggcagcgccggcagcaacaagagccugcagagcgccggcuuccccaccggccugaccuacagccagcugaugacccugaaggacagcaugaugcagcuggaccccagcgccaagaccuggaucgacaucgagggcagacccgaggaccccguggagaucgcccuguaccagcccaugagcggcugcuacauccacuucuucagagagcccaccgaccugaagcaguucaagcaggacgccaaguacagccacggcaucgacguggccgaccuguuccccgcccagcccggccugaccagcgccgugaucgaggcccugcccagaaacauggugcugaccugccagggcagcgacgacaucaagagacugcuggacagccagggcagaagagacaucaagcugaucgacaucgcccugagcaaggccgacagcagaagauucgagaacgccgugugggaccagugcaaggaccugugccacaugcacaccggcguggugguggagaagaagaagagaggcggcaaggaggagaucaccccccacugcgcccugauggacugcaucauguacgacgccgccgugagcggcggccugaacauccccgugcugagagccgugcugcccagagacaugguguucagaaccagcagccccaagguggugcugugaggacuagucccuguucccagagcccacuuuuuuuucuuuuuuugaaauaaaauagccugucuuucagaucucaaaggcucuuuucagagccaccaaaaaaaaaaaaaaaaaaaaaaaaaaaaaaaaaaaaaaaaaaaaaaaaaaaaaaaaaaaaaaaaaaaaaaaaaaaaaaaaaaaaaaaaaaaaaaaaaaaaa

SEQ ID NO: 16889 - RNA, 1982 nt, Artificial Sequence
  mRNA product Design a-1 (hSL-A100) comprising derived and/or modified sequence from LASV(ISTH2010-NIG-2012;Clade II)__AIT17483__NP (opt4)
aggagagucccgcagucggcguccagcggcucugcuuguucgugugugugucguugcaggccuuauucaagcuuaccaugagcgccagcaaggaggugaagagcuuccuguggacccagagccugagaagagagcugagcggcuacugcagcaacaucaagcugcagguggugaaggacgcccaggcccugcugcacggccuggacuucagcgaggugagcaacgugcagagacugaugagaaagcagaagagagacgacagcgaccugaagagacugagagaccugaaccaggccgugaacaaccugguggagcugaagagcacccagcagaagagcauccugagagugggcacccugaccagcgacgaccugcugacccuggccgccgaccuggagaagcugaagagcaaggugaucagaaccgagagaccccugagcagcggcguguacaugggcaaccugagcacccagcagcuggagcagagaagagcccugcugaaccugaucggcauggugggcggcgcccagggcacccagcccggcagagacggcguggugagagugugggacgugaagaaccccgaccugcugaacaaccaguucggcaccaugcccagccugacccuggccugccugaccaagcagggccagguggaccugaacgacgccgugcuggcccugaccgaccugggccugaucuacaccgccaaguaccccaacagcagcgaccuggacagacugagccagagccaccccauccugaacaugguggacaccaagaagagcagccugaacaucagcggcuucaacuucagccugggcgccgccgugaaggccggcgccugcaugcuggacggcggcaacaugcuggagaccaucaaggugaccccccagaccauggacggcauccugaagagcauccugaaggugaagaagagccugggcauguucgugagcgacacccccggcgagagaaaccccuacgagaacauccuguacaagaucugccugagcggcgacggcuggcccuacaucgccagcagaaccagcaucgugggcagagccugggagaacaccaccguggaccuggagagcgacggcaagccccacaaggugggcaccgccggcagcaacaagagccugcagagcgccggcuuccccaccggccugaccuacagccagcugaugacccugaaggacagcaugaugcagcuggaccccagcgccaagaccuggaucgacaucgagggcagacccgaggaccccguggagaucgcccuguaccagcccaugagcggcugcuacauccacuucuucagagagcccaccgaccugaagcaguucaagcaggacgccaaguacagccacggcaucgacguggccgaccuguuccccgcccagcccggccugaccagcgccgugaucgaggcccugcccagaaacauggugcugaccugccagggcagcgacgacaucaagagacugcuggacagccagggcagaagagacaucaagcugaucgacaucgcccugagcaaggccgacagcagaagauucgagaacgccgugugggaccagugcaaggaccugugccacaugcacaccggcguggugguggagaagaagaagagaggcggcaaggaggagaucaccccccacugcgcccugauggacugcaucauguacgacgccgccgugagcggcggccugaacauccccgugcugagagccgugcugcccagagacaugguguucagaaccagcagccccaagguggugcugugaggacuagucccuguucccagagcccacuuuuuuuucuuuuuuugaaauaaaauagccugucuuucagaucucaaaggcucuuuucagagccaccaaaaaaaaaaaaaaaaaaaaaaaaaaaaaaaaaaaaaaaaaaaaaaaaaaaaaaaaaaaaaaaaaaaaaaaaaaaaaaaaaaaaaaaaaaaaaaaaaaaaa

SEQ ID NO: 16890 - RNA, 1982 nt, Artificial Sequence
  mRNA product Design a-1 (hSL-A100) comprising derived and/or modified sequence from LASV(Lassa virus/H.sapiens-wt/NGA/2015/ISTH_0543;Clade II)__AVO03640__NP (opt4)
aggagagucccgcagucggcguccagcggcucugcuuguucgugugugugucguugcaggccuuauucaagcuuaccaugagcgccagcaaggaggugaagagcuuccuguggacccagagccugagaagagagcugagcggcuacugcagcaacaucaagcugcagguggugaaggacgcccaggcccugcugcacggccuggacuucagcgaggugagcaacgugcagagacugaugagaaagcagaagagagacgacagcgaccugaagagacugagagaccugaaccaggccgugaacaaccugguggagcugaagagcacccagcagaagagcauccugagagugggcacccugaccagcgacgaccugcugacccuggccgccgaccuggagaagcugaagagcaaggugaucagaaccgagagaccccugagcagcggcguguacaugggcaaccugagcacccagcagcuggagcagagaagagcccugcugaacaugaucggcauggugggcggcgcccagggcacccagcccggcagagacggcguggugagagugugggacgugaagaaccccgaccugcugaacaaccaguucggcaccaugcccagccugacccuggccugccugaccaagcagggccagguggaccugaacgacgccgugcuggcccugaccgaccugggccugaucuacaccgccaaguaccccaacagcagcgaccuggacagacugagccagagccaccccauccugaacaugguggacaccaagaagagcagccugaacaucagcggcuacaacuucagccugggcgccgccgugaaggccggcgccugcaugcuggacggcggcaacaugcuggagaccaucaaggugaccccccagaccauggacggcauccugaagagcauccugaaggugaagaagagccugggcauguucgugagcgacacccccggcgagagaaaccccuacgagaacauccuguacaagaucugccugagcggcgacggcuggcccuacaucgccagcagaaccagcaucgugggcagagccugggagaacaccaccguggaccuggagagcgacggcaagccccagaaggugggcagcgccggcagcaacaagagccugcagagcgccggcuuccccaccggccugaccuacagccagcugaugacccugaaggacagcaugaugcagcuggaccccagcgccaagaccuggaucgacaucgagggcagacccgaggaccccguggagaucgcccuguaccagcccaugagcggcugcuacauccacuucuucagagagcccaccgaccugaagcaguucaagcaggacgccaaguacagccacggcaucgacguggccgaccuguuccccgcccagcccggccugaccagcgccgugaucgaggcccugcccagaaacauggugcugaccugccagggcagcgacgacaucaagagacugcuggacagccagggcagaaaggacaucaagcugaucgacaucgcccugagcaaggccgacagcagaagauucgagaacgccgugugggaccagugcaaggaccugugccacaugcacaccggcguggugguggagaagaagaagagaggcggcaaggaggagaucaccccccacugcgcccugauggacugcaucauguacgacgccgccgugagcggcggccugaacauccccgugcugagagccgugcugcccagagacaugguguucagaaccagcagccccaagguggugcugugaggacuagucccuguucccagagcccacuuuuuuuucuuuuuuugaaauaaaauagccugucuuucagaucucaaaggcucuuuucagagccaccaaaaaaaaaaaaaaaaaaaaaaaaaaaaaaaaaaaaaaaaaaaaaaaaaaaaaaaaaaaaaaaaaaaaaaaaaaaaaaaaaaaaaaaaaaaaaaaaaaaaa

SEQ ID NO: 16891 - RNA, 1982 nt, Artificial Sequence
  mRNA product Design a-1 (hSL-A100) comprising derived and/or modified sequence from LASV(Lassa virus/H.sapiens-wt/NGA/2016/ISTH_0009;Clade II)__AVO03572__NP (opt4)
aggagagucccgcagucggcguccagcggcucugcuuguucgugugugugucguugcaggccuuauucaagcuuaccaugagcgccagcaaggaggugaagagcuuccuguggacccagagccugagaagagagcugagcggcuacugcagcaacaucaagcugcagguggugaaggacgcccaggcccugcugcacggccuggacuucagcgaggugagcaacgugcagagacugaugagaaagcagaagagagacgacagcgaccugaagagacugagagaccugaaccaggccgugaacaaccugguggagcugaagagcacccagcagaagagcauccugagagugggcacccugaccagcgacgaccugcugacccuggccgccgaccuggagaagcugaagagcaaggugaucagaaccgagagaccccugagcagcggcguguacaugggcaaccugagcacccagcagcuggagcagagaagagcccugcugaacaugaucggcauggugggcggcgcccagggcacccagcccggcagagacggcguggugagagugugggacgugaagaaccccgaccugcugaacaaccaguucggcaccaugcccagccugacccuggccugccugaccaagcagggccagguggaccugaacgacgccgugcuggcccugaccgaccugggccugaucuacaccgccaaguaccccaacagcagcgaccuggacagacugagccagagccaccccauccugaacaugguggacaccaagaagagcagccugaacaucagcggcuacaacuucagccugggcgccgccgugaaggccggcgccugcaugcuggacggcggcaacaugcuggagaccaucaaggugaccccccagaccauggacggcauccugaagagcauccugaaggugaagaagagccugggcauguucgugagcgacacccccggcgagagaaaccccuacgagaacauccuguacaagaucugccugagcggcgacggcuggcccuacaucgccagcagaaccagcaucgugggcagagccugggagaacaccaccguggaccuggagagcgacggcaagccccagaaggugggcagcgccggcagcaacaagagccugcagagcgccggcuuccccaccggccugaccuacagccagcugaugacccugaaggacagcaugaugcagcuggaccccagcgccaagaccuggaucgacaucgagggcagacccgaggaccccguggagaucgcccuguaccagcccaugagcggcugcuacauccacuucuucagagagcccaccgaccugaagcaguucaagcaggacgccaaguacagccacggcaucgacguggccgaccuguuccccgcccagcccggccugaccagcgccgugaucgaggcccugcccagaaacauggugcugaccugccagggcagcgacgacaucaagagacugcuggacagccagggcagaagagacaucaagcugaucgacaucgcccugagcaaggccgacagcagaagauucgagaacgccgugugggaccagugcaaggaccugugccacaugcacaccggcguggugguggagaagaagaagagaggcggcaaggaggagaucaccccccacugcgcccugauggacugcaucauguacgacgccgccgugagcggcggccugaacauccccgugcugagagccgugcugcccagagacaugguguucagaaccagcagccccaagguggugcugugaggacuagucccuguucccagagcccacuuuuuuuucuuuuuuugaaauaaaauagccugucuuucagaucucaaaggcucuuuucagagccaccaaaaaaaaaaaaaaaaaaaaaaaaaaaaaaaaaaaaaaaaaaaaaaaaaaaaaaaaaaaaaaaaaaaaaaaaaaaaaaaaaaaaaaaaaaaaaaaaaaaaa

SEQ ID NO: 16892 - RNA, 1982 nt, Artificial Sequence
  mRNA product Design a-1 (hSL-A100) comprising derived and/or modified sequence from LASV(Lassa virus/H.sapiens-wt/NGA/2016/ISTH_0017;Clade II)__AVO03568__NP (opt4)
aggagagucccgcagucggcguccagcggcucugcuuguucgugugugugucguugcaggccuuauucaagcuuaccaugagcgccagcaaggaggugaagagcuuccuguggacccagagccugagaagagagcugagcggcuacugcagcagcaucaagcugcagguggugaaggacgcccaggcccugcugcacggccuggacuucagcgaggugagcaacgugcagagacugaugagaaagcagaagagagacgacagcgaccugaagagacugagagaccugaaccaggccgugaacaaccugguggagcugaagagcacccagcagaagagcauccugagagugggcacccugaccagcgacgaccugcugacccuggccgccgaccuggagaagcugaagagcaaggugaucagaaccgagagaccccugagcagcggcguguacaugggcaaccugagcacccagcagcuggagcagagaagagcccugcugaacaugaucggcauggccggcggcgcccagggcacccagcccggcagagacggcguggugagagugugggacgugaagaaccccgaccugcugaacaaccaguucggcaccaugcccagccugacccuggccugccugaccaagcagggccagguggaccugaacgacgccgugcuggcccugaccgaccugggccugaucuacaccgccaaguaccccaacagcagcgaccuggacagacugagccagagccaccccauccugaacaugguggacaccaagaagagcagccugaacaucagcggcuacaacuucagccugggcgccgccgugaaggccggcgccugcaugcuggacggcggcaacaugcuggagaccaucaaggugaccccccagaccauggacggcauccugaagagcauccugaaggugaagagaagccugggcauguucgugagcgacgcccccggcgagagaaaccccuacgagaacauccuguacaagaucugccugagcggcgacggcuggcccuacaucgccagcagaaccagcaucgugggcagagccugggagaacaccaccguggaccuggagagcgacggcaagccccagaaggugggcgccaccggcagcaacaagagccugcagagcgccggcuuccccaccggccugaccuacagccagcugaugacccugaaggacagcaugaugcagcuggaccccagcgccaagaccuggaucgacaucgagggcagacccgaggaccccguggagguggcccuguaccagcccgugagcggcugcuacauccacuucuucagagagcccaccgaccugaagcaguucaagcaggacgccaaguacagccacggcaucgacguggccgaccuguuccccgcccagcccggccugaccagcgccgugaucgaggcccugcccagaaacauggugcugaccugccagggcagcgacgacaucaagaagcugcuggacagccagggcagaaaggacaucaagcugaucgacaucgcccugagcaaggccgacagcagaagauucgagaacgccgugugggaccagugcaaggaccugugccacaugcacaccggcguggugguggagaagaagaagagaggcggcaaggaggagaucaccccccacugcgcccugauggacugcaucauguacgacgccgccgugagcggcggccugaacauccccgugcugagagccgugcugcccagagacaugguguucagaaccagcagccccaagguggugcugugaggacuagucccuguucccagagcccacuuuuuuuucuuuuuuugaaauaaaauagccugucuuucagaucucaaaggcucuuuucagagccaccaaaaaaaaaaaaaaaaaaaaaaaaaaaaaaaaaaaaaaaaaaaaaaaaaaaaaaaaaaaaaaaaaaaaaaaaaaaaaaaaaaaaaaaaaaaaaaaaaaaaa

SEQ ID NO: 16893 - RNA, 1982 nt, Artificial Sequence
  mRNA product Design a-1 (hSL-A100) comprising derived and/or modified sequence from LASV(Lassa virus/H.sapiens-wt/NGA/2018/ISTH_0959;Clade II)__AVV65100__NP (opt4)
aggagagucccgcagucggcguccagcggcucugcuuguucgugugugugucguugcaggccuuauucaagcuuaccaugagcgccagcaaggaggugaagagcuuccuguggacccagagccugagaagagagcugagcggcuacugcagcaacaucaagcugcagguggugaaggacgcccaggcccugcugcacggccuggacuucagcgaggugagcaacgugcagagacugaugagaaagcagaagagagacgacagcgaccugaagagacugagagaccugaaccaggccgugaacaaccugguggagcugaagagcacccagcagaagagcauccugagagugggcacccugaccagcgacgaccugcugacccuggccgccgaccuggagaagcugaagagcaaggugaucagaaccgagagaccccugagcagcggcguguacaugggcaaccugagcacccagcagcuggagcagagaagagcccugcugaaccugaucggcauggugggcggcgcccagggcacccagcccggcagagacggcguggugagagugugggacgugaagaaccccgaccugcugaacaaccaguucggcaccaugcccagccugacccuggccugccugaccaagcagggccagguggaccugaacgacguggugcuggcccugaccgaccugggccugaucuacaccgccaaguaccccaacagcagcgaccuggacagacugagccagagccaccccauccugaacaugguggacaccaagaagagcagccugaacaucagcggcuucaacuucagccugggcgccgccgugaaggccggcgccugcaugcuggacggcggcaacaugcuggagaccaucaaggugaccccccagaccauggacggcauccugaagagcauccugaaggugaagaagagccugggcauguucgugagcgacacccccggcgagagaaaccccuacgagaacauccuguacaagaucugccugagcggcgacggcuggcccuacaucgccagcagaaccagcaucgugggcagagccugggagaacaccaccguggaccuggagagcgacggcaagccccacaaggugggcaccgccggcagcaacaagagccugcagagcgccggcuuccccaccggccugaccuacagccagcugaugacccugaaggacagcaugaugcagcuggaccccagcgccaagaccuggaucgacaucgagggcagacccgaggaccccguggagaucgcccuguaccagcccaugagcggcugcuacauccacuucuucagagagcccaccgaccugaagcaguucaagcaggacgccaaguacagccacggcaucgacguggccgaccuguuccccgcccagcccggccugaccagcgccgugaucgaggcccugcccagaaacauggugcugaccugccagggcagcgacgacaucaagagacugcuggacagccagggcagaaaggacaucaagcugaucgacaucgcccugagcaagaccgacagcagaagauucgagaacgccgugugggaccagugcaaggaccugugccacaugcacaccggcguggugguggagaagaagaagagaggcggcaaggaggagaucaccccccacugcgcccugauggacugcaucauguacgacgccgccgugagcggcggccugaacauccccgugcugagagccgugcugcccagagacaugguguucagaaccagcagccccaagguggugcugugaggacuagucccuguucccagagcccacuuuuuuuucuuuuuuugaaauaaaauagccugucuuucagaucucaaaggcucuuuucagagccaccaaaaaaaaaaaaaaaaaaaaaaaaaaaaaaaaaaaaaaaaaaaaaaaaaaaaaaaaaaaaaaaaaaaaaaaaaaaaaaaaaaaaaaaaaaaaaaaaaaaaa

SEQ ID NO: 16894 - RNA, 1982 nt, Artificial Sequence
  mRNA product Design a-1 (hSL-A100) comprising derived and/or modified sequence from LASV(LASV003-NIG-2008;Clade II)__AIT17581__NP (opt4)
aggagagucccgcagucggcguccagcggcucugcuuguucgugugugugucguugcaggccuuauucaagcuuaccaugagcgccagcaaggaggugaagagcuuccuguggacccagagccugagaagagagcugagcggcuacugcagcagcaucaagcugcagguggugaaggacgcccaggcccugcugcacggccuggacuucagcgaggugagcaacgugcagagacugaugagaaagcagaagagagacgacagcgaccugaagagacugagagaccugaaccaggccgugaacaaccugguggagcugaagagcacccagcagaagagcgugcugagagugggcacccugaccagcgacgaccugcugacccuggccgccgaccuggagaagcugaagagcaaggugaucagaaccgagagaccccugagcagcggcguguacaugggcaaccugagcgcccagcagcuggagcagagaagaacccugcugaacaugaucggcauggugggcggcgcccagggcacccagcccggcagagacggcguggugagagugugggacgugaagaaccccgaccugcugaacaaccaguucggcaccaugcccagccugacccuggccugccugaccaagcagggccagguggaccugaacgacguggugcuggcccugaccgaccugggccugaucuacaccgccaaguaccccaacagcagcgaccuggacagacugagccagagccaccccauccugagcaugguggacaccaagaagagcagccugaacaucagcggcuacaacuucagccugggcgccgccgugaaggccggcgccugcaugcuggacggcggcaacaugcuggagaccaucaaggugaccccccagaccauggacggcauccugaagagcauccugaaggugaagaagagccugggcauguucgugagcgacacccccggcgagagaaaccccuacgagaacauccuguacaagaucugccugagcggcgacggcuggcccuacaucgccagcagaaccagcaucgugggcagagccugggagaacaccaccguggaccuggagagcgacggcaagccccagaaggugggcaccgccggcagcaacaagagccugcagagcgccggcuuccccaccggccugaccuacagccagcugaugacccugaaggacagcaugaugcagcuggaccccagcgccaagaccuggaucgacaucgagggcagacccgaggaccccguggagaucgcccuguaccagcccaugagcggcugcuacauccacuucuucagagagcccaccgaccugaagcaguucaagcaggacgccaaguacagccacggcaucgacgugaccgaccuguuccccgcccagcccggccugaccagcgccgugaucgaggcccugcccagaaacauggugcugaccugccagggcagcgacgacaucaagagacugcuggacagccagggcagaagagacaucaagcugaucgacaucgcccugagcaaggccgacagcagaagauucgagaacgccgugugggaccagugcaaggaccugugccacaugcacaccggcguggugguggagaagaagaagagaggcggcaaggaggagaucaccccccacugcgcccugauggacugcaucauguacgacgccgccgugagcggcggccugaacauccccgugcugagagccgugcugcccagagacaugguguucagaaccagcagccccaagguggugcugugaggacuagucccuguucccagagcccacuuuuuuuucuuuuuuugaaauaaaauagccugucuuucagaucucaaaggcucuuuucagagccaccaaaaaaaaaaaaaaaaaaaaaaaaaaaaaaaaaaaaaaaaaaaaaaaaaaaaaaaaaaaaaaaaaaaaaaaaaaaaaaaaaaaaaaaaaaaaaaaaaaaaa

SEQ ID NO: 16895 - RNA, 1982 nt, Artificial Sequence
  mRNA product Design a-1 (hSL-A100) comprising derived and/or modified sequence from LASV(LASV035-NIG-2009;Clade II)__AIT17589__NP (opt4)
aggagagucccgcagucggcguccagcggcucugcuuguucgugugugugucguugcaggccuuauucaagcuuaccaugagcgccagcaaggaggugaagagcuuccuguggacccagagccugagaagagagcugagcggcuacugcagcagcaucaagcugcagguggugaaggacgcccaggcccugcugcacggccuggacuucagcgaggugagcaacgugcagagacugaugagaaagcagaagagagacgacagcgaccugaagagacugagagaccugaaccaggccgugaacaaccugguggagcugaagagcacccagcagaagagcauccugagagugggcacccugaccagcgacgaccugcugacccuggccgccgaccuggagaagcugaagagcaaggugaucagaaccgagagaccccugagcagcggcguguacaugggcaaccugagcgcccagcagcuggagcagagaagagcccugcugaacaugaucggcauggugggcggcgcccagggcacccagcccggcagagacggcguggugagagugugggacgugaagaaccccgaccugcugaacaaccaguucggcaccaugcccagccugacccuggccugccugaccaagcagggccagguggaccugaacgacgccgugcuggcccugaccgaccugggccugaucuacaccgccaaguaccccaacagcagcgaccuggacagacugagccagagccaccccauccugaacaugguggacaccaagaagagcagccugaacaucagcggcuacaacuucagccugggcgccgccgugaaggccggcgccugcaugcuggacggcggcaacaugcuggagaccaucaaggugaccccccagaccauggacggcauccugaagagcauccugaaggugaagagaagccugggcauguucgugagcgacacccccggcgagagaaaccccuacgagaacauccuguacaagaucugccugagcggcgacggcuggcccuacaucgccagcagaaccagcaucgugggcagagccugggagaacaccaccguggaccuggagagcgacggcaagccccagaaggugggcaccaccggcagcaacaagagccugcagagcgccggcuuccccaccggccugaccuacagccagcugaugacccugaaggacagcaugaugcagcuggaccccagcgccaagaccuggaucgacaucgagggcagacccgaggaccccguggagaucgcccuguaccagcccaugagcggcugcuacauccacuucuucagagagcccaccgaccugaagcaguucaagcaggacgccaaguacagccacggcaucgacguggccgaccuguuccccgcccagcccggccugaccagcgccgugaucgaggcccugcccagaaacauggugcugaccugccagggcagcgacgacaucaagaagcugcuggacagccagggcagaagagacaucaagcugaucgacaucgcccugagcaaggccgacagcagaaaguucgagaacgccgugugggaccagugcaaggaccugugccacaugcacaccggcguggugguggagaagaagaagagaggcggcaaggaggagaucaccccccacugcgcccugauggacugcaucauguacgacgccgccgugagcggcggccugaacauccccgugcugagagccgugcugcccagagacaugguguucagaaccagcagccccaagguggugcugugaggacuagucccuguucccagagcccacuuuuuuuucuuuuuuugaaauaaaauagccugucuuucagaucucaaaggcucuuuucagagccaccaaaaaaaaaaaaaaaaaaaaaaaaaaaaaaaaaaaaaaaaaaaaaaaaaaaaaaaaaaaaaaaaaaaaaaaaaaaaaaaaaaaaaaaaaaaaaaaaaaaaa

SEQ ID NO: 16896 - RNA, 1982 nt, Artificial Sequence
  mRNA product Design a-1 (hSL-A100) comprising derived and/or modified sequence from LASV(LASV1000-NIG-2009;Clade II)__AIT17783__NP (opt4)
aggagagucccgcagucggcguccagcggcucugcuuguucgugugugugucguugcaggccuuauucaagcuuaccaugagcgccagcaaggaggugaagagcuuccuguggacccagagccugagaagagagcugagcggcuacugcagcaacaucaagcugcagguggugaaggacgcccaggcccugcugcacggccuggacuucagcgaggugagcaacgugcagagacugaugagaaagcagaagagagacgacagcgaccugaagagacugagagaccugaaccaggccgugaacaaccugguggagcugaagagcacccagcagaagagcauccugagagugggcacccugaccagcgacgaccugcugacccuggccgccgaccuggagaagcugaagagcaaggugaucagaaccgagagaccccugagcagcggcguguacaugggcaaccugagcacccagcagcuggagcagagaagagcccugcugaacaugaucggcauggugggcggcgcccagggcacccagcccggcagagacggcguggugagagugugggacgugaagaaccccgaccugcugaacaaccaguucggcaccaugcccagccugacccuggccugccugaccaagcagggccagguggaccugaacgacguggugcuggcccugaccgaccugggccugaucuacaccgccaaguaccccaacagcagcgaccuggacagacugagccagagccaccccauccugaacaugguggacaccaagaagagcagccugaacaucagcggcuacaacuucagccugggcgccgccgugaaggccggcgccugcaugcuggacggcggcaacaugcuggagaccaucaaggugaccccccagaccauggacggcauccugaagagcauccugaaggugaagaagagccugggcauguucgugagcgacacccccggcgagagaaaccccuacgagaacauccuguacaagaucugccugagcggcgacggcuggcccuacaucgccagcagaaccagcaucgugggcagagccugggagaacaccaccguggaccuggagagcgacggcaagccccagaaggugggcaccgccggcagcaacaagagccugcagagcgccggcuuccccaccggccugaccuacagccagcugaugacccugaaggacagcaugaugcagcuggaccccagcgccaagaccuggaucgacaucgagggcagacccgaggaccccguggagaucgcccuguaccagcccgugagcggcugcuacauccacuucuucagagagcccaccgaccugaagcaguucaagcaggacgccaaguacagccacggcaucgacguggccgaccuguuccccgcccagcccggccugaccagcgccgugaucgaggcccugcccagaaacauggugcugaccugccagggcagcgacgacaucaagagacugcuggacagccagggcagaagagacaucaagcugaucgacaucgcccugagcaaggccgacagcagaagauucgagaacgccgugugggaccagugcaaggaccugugccacaugcacaccggcguggugguggagaagaagaagagaggcggcaaggaggagaucaccccccacugcgcccugauggacugcaucauguacgacgccgccgugagcggcggccugaacauccccgugcugagagccgugcugcccagagacaugguguucagaaccagcagccccaagguggugcugugaggacuagucccuguucccagagcccacuuuuuuuucuuuuuuugaaauaaaauagccugucuuucagaucucaaaggcucuuuucagagccaccaaaaaaaaaaaaaaaaaaaaaaaaaaaaaaaaaaaaaaaaaaaaaaaaaaaaaaaaaaaaaaaaaaaaaaaaaaaaaaaaaaaaaaaaaaaaaaaaaaaaa

SEQ ID NO: 16897 - RNA, 1982 nt, Artificial Sequence
  mRNA product Design a-1 (hSL-A100) comprising derived and/or modified sequence from LASV(LASV221-NIG-2010;Clade II)__AIT17625__NP (opt4)
aggagagucccgcagucggcguccagcggcucugcuuguucgugugugugucguugcaggccuuauucaagcuuaccaugagcgccagcaaggaggugaagagcuuccuguggacccagagccugagaagagagcugagcggcuacugcagcagcaucaagcugcagguggugaaggacgcccaggcccugcugcacggccuggacuucagcgaggugagcaacgugcagagacugaugagaaagcagagaagagacgacagcgaccugaagagacugagagaccugaaccaggccgugaacaaccugguggagcugaagagcacccagcagaagagcauccugagagugggcacccugaccagcgacgaccugcugacccuggccgccgaccuggagaagcugaagagcaaggugaucagaaccgagagaccccugagcagcggcguguacaugggcaaccugagcacccagcagcuggagcagagaagagcccugcugaacaugaucggcauggugggcggcgcccagggcacccagcccggcagagacggcguggugagagugugggacgugaagaaccccgaccugcugaacaaccaguucggcaccaugcccagccugacccuggccugccugaccaagcagggccagguggaccugaacgacgccgugcuggcccugaccgaccugggccugaucuacaccgccaaguaccccaacagcagcgaccuggacagacugagccagagccaccccauccugaacaugguggacaccaagaagagcagccugaacaucagcggcuacaacuucagccugggcgccgccgugaaggccggcgccugcaugcuggacggcggcaacaugcuggagaccaucaaggugaccccccagaccguggacggcauccugaagagcauccugaaggugaagagaagccugggcauguucgugagcgacacccccggcgagagaaaccccuacgagaacauccuguacaagaucugccugagcggcgacggcuggcccuacaucgccagcagaaccagcaucgugggcagagccugggagaacaccaccguggaccuggagagcgacggcaagccccagaaggugggcaccgccggcagcaacaagagccugcagagcgccggcuuccccaccggccugaccuacagccagcugaugacccugaaggacagcaugaugcagcuggaccccagcgccaagaccuggaucgacaucgagggcagacccgaggaccccguggagaucgcccuguaccagcccaugagcggcugcuacauccacuucuucagagagcccaccgaccugaagcaguucaagcaggacgccaaguacagccacggcaucgacguggccgaccuguuccccgcccagcccggccugaccagcgccgugaucgaggcccugcccagaaacauggugcugaccugccagggcagcgacgacaucaagagacugcuggacagccagggcagaagagacaucaagcugaucgacaucgcccugagcaaggccgacagcagaaaguucgagaacgccgugugggaccagugcaaggaccugugccacaugcacaccggcguggugguggagaagaagaagagaggcggcaaggaggagaucaccccccacugcgcccugauggacugcaucauguacgacgccgccgugagcggcggccugaacauccccgugcugagagccgugcugcccagagacaugguguucagaaccagcagccccaagguggugcugugaggacuagucccuguucccagagcccacuuuuuuuucuuuuuuugaaauaaaauagccugucuuucagaucucaaaggcucuuuucagagccaccaaaaaaaaaaaaaaaaaaaaaaaaaaaaaaaaaaaaaaaaaaaaaaaaaaaaaaaaaaaaaaaaaaaaaaaaaaaaaaaaaaaaaaaaaaaaaaaaaaaaa

SEQ ID NO: 16898 - RNA, 1982 nt, Artificial Sequence
  mRNA product Design a-1 (hSL-A100) comprising derived and/or modified sequence from LASV(LASV237-NIG-2010;Clade II)__AIT17639__NP (opt4)
aggagagucccgcagucggcguccagcggcucugcuuguucgugugugugucguugcaggccuuauucaagcuuaccaugagcgccagcaaggaggugaagagcuuccuguggacccagagccugagaagagagcugagcggcuacugcagcaacaucaagcugcagguggugaaggacgcccaggcccugcugcacggccuggacuucagcgaggugagcaacgugcagagacugaugagaaagcagaagagagacgacagcgaccugaagagacugagagaccugaaccaggccgugaacaaccugguggagcugaagagcacccagcagaagagcauccugagagugggcacccugaccagcgacgaccugcugacccuggccgccgaccuggagaagcugaagagcaaggugaucagaaccgagagaccccugagcagcggcguguacaugggcaaccugagcacccagcagcuggagcagagaagagcccugcugaacaugaucggcauggugggcggcgcccagggcacccagcccggcagagacggcguggugagagugugggacgugaagaaccccgaccugcugaacaaccaguucggcaccaugcccagccugacccuggccugccugaccaagcagggccagguggaccugaacgacgccgugcuggcccugaccgaccugggccugaucuacaccgccaaguaccccaacagcagcgaccuggacagacugagccagagccaccccauccugaacaugguggacaucaagaagagcagccugaacaucagcggcuacaacuucagccugggcgccgccgugaaggccggcgccugcaugcuggacggcggcaacaugcuggagaccaucaaggugaccccccagaccauggacggcauccugaagagcauccugaaggugaagagaagccugggcauguucgugagcgacacccccggcgagagaaaccccuacgagaacauccuguacaagaucugccugagcggcgacggcuggcccuacaucgccagcagaaccagcaucgugggcagagccugggagaacaccaccguggaccuggagagcgacggcaagccccagaaggugggcagcgccggcagcaacaagagccugcagagcgccggcuuccccaccggccugaccuacagccagcugaugacccugaaggacagcaugaugcagcuggaccccagcgccaagaccuggaucgacaucgagggcagacccgaggaccccguggagaucgcccuguaccagcccaugagcggcugcuacauccacuucuucagagagcccaccgaccugaagcaguucaagcaggacgccaaguacagccacggcaucgacguggccgaccuguuccccgcccagcccggccugaccagcgccgugaucgaggcccugcccagaaacauggugcugaccugccagggcagcgacgacaucaagagacugcuggacagccagggcagaagagacaucaagcugaucgacaucgcccugagcaaggccgacagcagaagauucgagaacgccgugugggaccagugcaaggaccugugccacaugcacaccggcguggugguggagaagaagaagagaggcggcaaggaggagaucaccccccacugcgcccugauggacugcaucauguacgacgccgccgugagcggcggccugaacauccccgugcugagagccgugcugcccagagacaugguguucagaaccagcagccccaagguggugcugugaggacuagucccuguucccagagcccacuuuuuuuucuuuuuuugaaauaaaauagccugucuuucagaucucaaaggcucuuuucagagccaccaaaaaaaaaaaaaaaaaaaaaaaaaaaaaaaaaaaaaaaaaaaaaaaaaaaaaaaaaaaaaaaaaaaaaaaaaaaaaaaaaaaaaaaaaaaaaaaaaaaaa

SEQ ID NO: 16899 - RNA, 1982 nt, Artificial Sequence
  mRNA product Design a-1 (hSL-A100) comprising derived and/or modified sequence from LASV(LASV253-NIG-2011;Clade II)__AIT17671__NP (opt4)
aggagagucccgcagucggcguccagcggcucugcuuguucgugugugugucguugcaggccuuauucaagcuuaccaugagcgccagcaaggaggugaagagcuuccuguggacccagagccugagaagagagcugagcggcuacugcagcagcaucaagcugcagguggugaaggacgcccaggcccugcugcacggccuggacuucagcgaggugagcaacgugcagagacugaugagaaagcagaagagagacgacagcgaccugaagagacugagagaccugaaccaggccgugaacaaccugguggagcugaagagcacccagcagaagagcgugcugagagugggcacccugaccagcgacgaccugcugacccuggccgccgaccuggagaagcugaagagcaaggugaucagaaccgagagaccccugagcagcggcguguacaugggcaaccugagcacccagcagcuggagcagagaagagcccugcugaacaugaucggcauggugggcggcgcccagggcacccagcccggcagagacggcguggugagagugugggacgugaagaaccccgaccugcugaacaaccaguucggcaccaugcccagccugacccuggccugccugaccaagcagggccagguggaccugaacgacguggugcuggcccugaccgaccugggccugaucuacaccgccaaguaccccaacagcagcgaccuggacagacugagccagagccaccccauccugaacaugguggacaccaagaagagcagccugaacaucagcggcuacaacuucagccugggcgccgccgugaaggccggcgccugcaugcuggacggcggcaacaugcuggagaccaucaaggugaccccccagaccauggacggcauccugaagagcauccugaaggugaagaagagccugggcauguucgugagcgacacccccggcgagagaaaccccuacgagaacauccuguacaagaucugccugagcggcgacggcuggcccuacaucgccagcagaaccagcaucgugggcagagccugggagaacaccaccguggaccuggagagcgacggcaagccccagaaggugggcaccgccggcagcaacaagagccugcagagcgccggcuuccccaccggccugaccuacagccagcugaugacccugaaggacagcaugaugcagcuggaccccagcgccaagaccuggaucgacaucgagggcagacccgaggaccccguggagaucgcccuguaccagcccaugagcggcugcuacauccacuucuucagagagcccaccgaccugaagcaguucaagcaggacgccaaguacagccacggcaucgacgugaccgaccuguuccccgcccagcccggccugaccagcgccgugaucgaggcccugcccagaaacauggugcugaccugccagggcagcgacgacaucaagagacugcuggacagccagggcagaagagacaucaagcugaucgacaucgcccugagcaaggccgacagcagaagauucgagaacgccgugugggaccagugcaaggaccugugccacaugcacaccggcguggugguggagaagaagaagagaggcggcaaggaggagaucaccccccacugcgcccugauggacugcaucauguacgacgccgccgugagcggcggccugaacauccccgugcugagagccgugcugcccagagacaugguguucagaaccagcagccccaagguggugcugugaggacuagucccuguucccagagcccacuuuuuuuucuuuuuuugaaauaaaauagccugucuuucagaucucaaaggcucuuuucagagccaccaaaaaaaaaaaaaaaaaaaaaaaaaaaaaaaaaaaaaaaaaaaaaaaaaaaaaaaaaaaaaaaaaaaaaaaaaaaaaaaaaaaaaaaaaaaaaaaaaaaaa

SEQ ID NO: 16900 - RNA, 1982 nt, Artificial Sequence
  mRNA product Design a-1 (hSL-A100) comprising derived and/or modified sequence from LASV(LASV254-NIG-2011;Clade II)__AIT17675__NP (opt4)
aggagagucccgcagucggcguccagcggcucugcuuguucgugugugugucguugcaggccuuauucaagcuuaccaugagcgccagcaaggaggugaagagcuuccuguggacccagagccugagaagagagcugagcggcuacugcagcagcaucaagcugcagguggugaaggacgcccaggcccugcugcacggccuggacuucagcgaggugagcaacgugcagagacugaugagaaagcagaagagagacgacagcgaccugaagagacugagagaccugaaccaggccgugaacaaccugguggagcugaagagcacccagcagaagagcgugcugagagugggcacccugaccagcgacgaccugcugacccuggccgccgaccuggagaagcugaagagcaaggugaucagaaccgagagaccccugagcagcggcguguacaugggcaaccugagcacccagcagcuggagcagagaagagcccugcugaacaugaucggcauggugggcggcgcccagggcacccagcccggcagagacggcguggugagagugugggacgugaagaaccccgaccugcugaacaaccaguucggcaccaugcccagccugacccuggccugccugaccaagcagggccagguggaccugaacgacgccgugcuggcccugaccgaccugggccugaucuacaccgccaaguaccccaacagcagcgaccuggacagacugagccagagccaccccauccugaacaugguggacaccaagaagagcagccugaacaucagcggcuacaacuucagccugggcgccgccgugaaggccggcgccugcaugcuggacggcggcaacaugcuggagaccaucaaggugaccccccagaccauggacggcauccugaagagcauccugaaggugaagaagagccugggcauguucgugagcgacacccccggcgagagaaaccccuacgagaacauccuguacaagaucugccugagcggcgacggcuggcccuacaucgccagcagaaccagcaucgugggcagagccugggagaacaccaucguggaccuggagagcgacggcaagccccagaaggugggcaccgccggcagcaacaagagccugcagagcgccggcuuccccaccggccugaccuacagccagcugaugacccugaaggacagcaugaugcagcuggaccccagcgccaagaccuggaucgacaucgagggcagacccgaggaccccguggagaucgcccuguaccagcccaugagcggcugcuacauccacuucuucagagagcccaccgaccugaagcaguucaagcaggacgccaaguacagccacggcaucgacguggccgaccuguuccccgcccagcccggccugaccagcgccgugaucgaggcccugcccagaaacauggugcugaccugccagggcagcgacgacaucaagagacugcuggacagccagggcagaagagacaucaagcugaucgacaucgcccugagcaaggccgacagcagaagauucgagaacgccgugugggaccagugcaaggaccugugccacaugcacaccggcguggugguggagaagaagaagagaggcggcaaggaggagaucaccccccacugcgcccugauggacugcaucauguacgacgccgccgugagcggcggccugaacauccccgugcugagagccgugcugcccagagacaugguguucagaaccagcagccccaagguggugcugugaggacuagucccuguucccagagcccacuuuuuuuucuuuuuuugaaauaaaauagccugucuuucagaucucaaaggcucuuuucagagccaccaaaaaaaaaaaaaaaaaaaaaaaaaaaaaaaaaaaaaaaaaaaaaaaaaaaaaaaaaaaaaaaaaaaaaaaaaaaaaaaaaaaaaaaaaaaaaaaaaaaaa

SEQ ID NO: 16901 - RNA, 1982 nt, Artificial Sequence
  mRNA product Design a-1 (hSL-A100) comprising derived and/or modified sequence from LASV(Nig08-04;Clade II)__ADU56611__NP (opt4)
aggagagucccgcagucggcguccagcggcucugcuuguucgugugugugucguugcaggccuuauucaagcuuaccaugagcgccagcaaggaggugaagagcuuccuguggacccagagccugagaagagagcugagcggcuacugcagcaacaucaagcugcagguggugaaggacgcccaggcccugcugcacggccuggacuucagcgaggugagcaacgugcagagacugaugagaaagcagaagagagacgacggcgaccugaagagacugagagaccugaaccaggccgugaacaaccugguggagcugaagagcacccagcagaagagcgugcugagagugggcacccugaccagcgacgaccugcugacccuggccgccgaccuggagaagcugaagagcaaggugaucagaaccgagagaccccugagcagcggcguguacaugggcaaccugagcacccagcagcuggagcagagaaaggcccugcugagcaugaucggcauggugggcggcgcccagggcacccagcccggcagagacggcguggugagagugugggacgugaagaaccccgaccugcugaacaaccaguucggcaccaugcccagccugacccuggccugccugaccaagcagggccagguggaccugaacgacgccgugcuggcccugaccgaccugggccugaucuacaccgccaaguaccccaacagcagcgaccuggacagacugagccagagccaccccauccugaacaugguggacaccaagaagagcagccugaacaucagcggcuacaacuucagccugggcgccgccgugaaggccggcgccugcaugcuggacggcggcaacaugcuggagaccaucaaggugaccccccagaccauggacggcauccugaagagcauccugaaggugaagagaagccugggcauguucgugagcgacacccccggcgagagaaaccccuacgagaacauccuguacaagaucugccugagcggcgacggcuggcccuacaucgccagcagaaccagcaucgugggcagagccugggagaacaccaccguggaccuggagagcgacggcaagccccagaaggugggcaccgccggcagcaacaagagccugcagagcgccggcuuccccaccggccugaccuacagccagcugaugacccugaaggacagcaugaugcagcuggaccccagcgccaagaccuggaucgacaucgagggcagacccgaggaccccguggagaucgcccuguaccagcccaugagcggcugcuacauccacuucuucagagagcccaccgaccugaagcaguucaagcaggacgccaaguacagccacggcaucgacgugaccgaccuguucagcgcccagcccggccugaccagcgccgugaucgaggcccugcccagaaacauggugcugaccugccagggcagcgacgacaucaagaagcugcuggacagccagggcagaagagacaucaagcugaucgacaucagccugaacaaggccgacagcagaagauucgagaacgccgugugggaccagugcaaggaccugugccacaugcacaccggcguggugguggagaagaagaagagaggcggcaaggaggagaucaccccccacugcgcccugauggacugcaucauguucgacgccgccgugagcggcggccugaacauccccauccugagagccgugcugcccagagacaugguguucagaaccagcagccccaagguggugcugugaggacuagucccuguucccagagcccacuuuuuuuucuuuuuuugaaauaaaauagccugucuuucagaucucaaaggcucuuuucagagccaccaaaaaaaaaaaaaaaaaaaaaaaaaaaaaaaaaaaaaaaaaaaaaaaaaaaaaaaaaaaaaaaaaaaaaaaaaaaaaaaaaaaaaaaaaaaaaaaaaaaaa

SEQ ID NO: 16902 - RNA, 1985 nt, Artificial Sequence
  mRNA product Design a-1 (hSL-A100) comprising derived and/or modified sequence from LASV(GA391;Clade III)__AAA46284__NP (opt4)
aggagagucccgcagucggcguccagcggcucugcuuguucgugugugugucguugcaggccuuauucaagcuuaccaugagcgccagcaaggaggugagaagcugccuguggacccagagccugagaagagagcugagcggcuacugcagcaacaucaagcugcagguggugaaggacgcccaggcccugcugcacggccuggacuucagcgaggugagcaacgugcagagacugaugagaaagcagaagagagacgacggcgaccugaagagacugagagaccugaaccaggccgugaacaaccugguggagcugaagagcacccagcagaagagcgugcugagagugggcacccugagcagcgacgaccugcugauccuggccgccgaccuggagaagcugaagagcaaggugaccagaaccgagagaccccugagcagcggcguguacaugggcaaccugagcagccagcagcuggaccagagaagagcccugcugaacaugaucggcaugaccggcgugagcggcggcggcaagggcgccagcaacggcaucgugagagugugggacgugaagaacgccgagcugcugaacaaccaguucggcaccaugcccagccugacccuggccugccugaccaagcagggccagguggaccugaacgacgccgugcaggcccugaccgaccugggccugaucuacaccgccaaguaccccaacagcagcgaccuggacagacugagccagagccaccccauccugaacaugaucgacaccaagaagagcagccugaacaucagcggcuacaacuucagccugggcgccgccgugaaggccggcgccugcaugcuggacggcggcaacaugcuggagaccaucaaggugagcccccagaccauggacggcauccugaagagcauccugaaggugaagaagagccugggcauguucgugagcgacacccccggcgagagaaaccccuacgagaacauccuguacaagaucugccugagcggcgacggcuggagcuacaucgccagcagaaccagcaucgugggcagagccugggagaacaccgugguggaccuggagcaggacaacaagccccagaagaucggcaacggcggcagcaacaagagccugcagagcgccggcuucgccgccggccugaucuacagccagcugaugacccugaaggacuucaagugcuucaaccugauccccaacgccaagaccuggauggacaucgagggcagacccgaggaccccguggagaucgcccuguaccagcccagcagcggcugcuacgugcacuucuucagagagcccaccgaccugaagcaguucaagcaggacgccaaguacagccacggcagagacgugaccgaccuguucgccgcccagcccggccugaccagcgccgugaucgaggcccugcccagaaacauggugaucaccugccagggcagcgaggacaucagaaagcugcuggagagccagggcagaagagacaucaagcugaucgacaucacccugagcaaggccgacagcagaaaguucgagaacgccgugugggaccaguucaaggaccugugccacaugcacaccggcguggugguggagaagaagaagagaggcggcaaggaggagaucaccccccacugcgcccugauggacugcaucauguucgacgccgccgugagcggcggccuggacgccaaggugcugagaguggugcugcccagagacaugguguucagaaccagcacccccaagguggugcugugaggacuagucccuguucccagagcccacuuuuuuuucuuuuuuugaaauaaaauagccugucuuucagaucucaaaggcucuuuucagagccaccaaaaaaaaaaaaaaaaaaaaaaaaaaaaaaaaaaaaaaaaaaaaaaaaaaaaaaaaaaaaaaaaaaaaaaaaaaaaaaaaaaaaaaaaaaaaaaaaaaaaa

SEQ ID NO: 16903 - RNA, 1982 nt, Artificial Sequence
  mRNA product Design a-1 (hSL-A100) comprising derived and/or modified sequence from LASV(Nig08-A19;Clade III)__ADU56619__NP (opt4)
aggagagucccgcagucggcguccagcggcucugcuuguucgugugugugucguugcaggccuuauucaagcuuaccaugagcgccagcaaggaggugaagagcuuccuguggacccagagccugagaagagagcugagcggcuacugcagcaacaucaagcugcagguggugaaggacgcccaggcccugcugcacggccuggacuucagcgaggugagcaacgugcagagacugaugagaaagcagaagagagacgacggcgaccugaagagacugagagaccugaaccaggccgugaacaaccugguggagcugaagagcacccagcagaagagcgugcugagagugggcacccugagcagcgacgaccugcuggugcuggccgccgaccuggagaagcugaagagcaagguggugagaaccgagagaccccugagcagcggcaucuacaugggcaaccugagcagccagcagcuggaccagagaaaggcccugcugaacaugaucggcaugaccggcggcaacggcggcagaaacaccaccagcgacggcaucgugagagugugggacgugaagaacgccgagcugcugaacaaccaguucggcaccaugcccagccugacccuggccugccugaccaagcagggccagguggaccugaacgacgccgugcaggcccugaccgaccugggccugaucuacaccgccaaguaccccaacagcagcgaccuggacagacuggcccagagccaccccauccugaacaugaucgacaccaagaagagcagccugaacaucagcggcuacaacuucagccugggcgccgccgugaaggccggcgccugcaugcuggacggcggcaacaugcuggagaccaucaaggugagcccccagaccauggacggcauccugaagagcauccugaaggugaagagaagccugggcauguucaucagcgacacccccggcgagagaaaccccuacgagaacauccuguacaagaucugccugagcggcgacggcuggcccuacaucgccagcagaaccagcaucgugggcagagccugggagaacaccgugguggaccuggagagcgacaacaagccccagaagaccggcaacggcggcagcaacaagagccugcagagcgccggcuucgccgccggccugaccuacagccagcugaugacccugaaggacagcaugcugcagcuggaccccaacgccaagaccuggauggacaucgagggcagacccgaggaccccguggagaucgcccuguaccagcccagcagcggcugcuacauccacuucuucagagagcccaccgaccugaagcaguucaagcaggacgccaaguacagccacggcaucgacgugaccgaccuguucgccgcccagcccggccugaccagcgccgugaucgaggcccugcccagaaacauggugaucaccugccagggcagcgaggacaucagaaagcugcuggagagccagggcagaagagacaucaagcugaucgacaucagccugagcaagguggacagcagaaaguucgagaacgccgugugggaccaguucaaggaccugugccacaugcacaccggcaucgugguggagaagaagaagagaggcggcaaggaggagaucaccccccacugcgcccugauggacugcaucauguucgacgccgccgugagcggcggcguggacgccaaggugcugagagccgugcugcccagagacaugguguucagaaccagcacccccaagguggugcugugaggacuagucccuguucccagagcccacuuuuuuuucuuuuuuugaaauaaaauagccugucuuucagaucucaaaggcucuuuucagagccaccaaaaaaaaaaaaaaaaaaaaaaaaaaaaaaaaaaaaaaaaaaaaaaaaaaaaaaaaaaaaaaaaaaaaaaaaaaaaaaaaaaaaaaaaaaaaaaaaaaaaa

SEQ ID NO: 16904 - RNA, 1982 nt, Artificial Sequence
  mRNA product Design a-1 (hSL-A100) comprising derived and/or modified sequence from LASV(G1180-SLE-2010;Clade IV)__AIT17169__NP (opt4)
aggagagucccgcagucggcguccagcggcucugcuuguucgugugugugucguugcaggccuuauucaagcuuaccaugagcgccagcaaggagaucaagagcuuccuguggacccagagccugagaagagagcugagcggcuacugcagcaacaucaagcugcagguggugaaggacgcccaggcccugcugcacggccuggacuucagcgaggugagcaacgugcagagacugaugagaaaggagagaagagacgacaacgaccugaagagacugagagaccugaaccaggccgugaacaaccugguggagcugaagagcacccagcagaagagcauccugagagugggcacccugaccagcgacgaccugcugauccuggccgccgaccuggagaagcugaagagcaaggugaucagaaccgagagaccccugagcgccggcguguacaugggcaaccugagcagccagcagcuggaccagagaagagcccugcugagcaugaucggcaugagcagcggcaaccagagagcccaggccggcagagacggcguggugagagugugggacgugaagaacguggagcugcugaacaaccaguucggcaccaugcccagccugacccuggccugccugaccaagcagggccagguggaccugaacgacgccgugcaggcccugaccgaccugggccugaucuacaccgccaaguaccccaacaccagcgaccuggacagacugacccagagccaccccauccugaacaugaucgacaccaagaagagcagccugaacaucagcggcuacaacuucagccugggcgccgccgugaaggccggcgccugcaugcuggacggcggcaacaugcuggagaccaucaaggugagcccccagaccauggacggcauccugaagagcauccugaaggugaagaaggcccugggcauguucaucagcgacacccccggcgagagaaaccccuacgagaacauccuguacaagaucugccugagcggcgacggcuggcccuacaucgccagcagaaccagcaucaccggcagagccugggagaacaccgugguggaccuggagagcgacggcaagccccagaaggccggcagcaacaacagcaacaagagccugcagagcgugggcuucaccgccggccugaccuacagccagcugaugacccugaaggacgccaugcugcagcuggaccccaacgccaagaccuggauggacaucgagggcagacccgaggaccccguggagaucgcccuguaccagcccagcagcggcugcuacauccacuucuucagagagcccaccgaccugaagcaguucaagcaggacgccaaguacagccacggcaucgacgugaccgaccuguucgccgcccagcccggccugaccagcgccgugaucgacgcccugcccagaaacauggugaucaccugccagggcagcgacgacaucagaaagcugcuggagagccagggcagaaaggacaucaagcugaucgacaucgcccugagcaagaccgacagcagaaaguacgagaacgccgugugggaccaguacaaggaccugugccacaugcacaccggcguggugguggagaagaagaagagaggcggcaaggaggagaucaccccccacugcgcccugauggacugcaucauguucgacgccgccgugagcggcggccugaacaccagcgugcugagagccgugcugcccagagacaugguguucagaaccagcacccccagaguggugcugugaggacuagucccuguucccagagcccacuuuuuuuucuuuuuuugaaauaaaauagccugucuuucagaucucaaaggcucuuuucagagccaccaaaaaaaaaaaaaaaaaaaaaaaaaaaaaaaaaaaaaaaaaaaaaaaaaaaaaaaaaaaaaaaaaaaaaaaaaaaaaaaaaaaaaaaaaaaaaaaaaaaaa

SEQ ID NO: 16905 - RNA, 1982 nt, Artificial Sequence
  mRNA product Design a-1 (hSL-A100) comprising derived and/or modified sequence from LASV(G1442-SLE-2011;Clade IV)__AIT17181__NP (opt4)
aggagagucccgcagucggcguccagcggcucugcuuguucgugugugugucguugcaggccuuauucaagcuuaccaugagcgccagcaaggaggugaagagcuuccuguggacccagagccugagaagagagcugagcggcuacugcagcaacaucaagcugcagguggugaaggacgcccaggcccugcugcacggccuggacuucagcgaggugagcaacgugcagagacugaugagaaagcagagaagagacgacaacgaccugaagagacugagagaccugaaccaggccgugaacaaccugguggagcugaagagcacccagcagaagagcgugcugagagugggcacccugaccagcgacgaccugcuggugcuggccgccgaccuggagaagcugaagagcaaggugaucagaaccgagagaccccugagcgccggcguguacaugggcaaccugagcagccagcagcuggaccagagaagagcccugcugaacaugaucggcaugagcggcggcauccagggcaccagaaccggcagagacggcguggugagagugugggacgugaagaacgccgaccugcugaacaaccaguucggcaccaugcccagccugacccuggccugccugaccaagcagggccagguggaccugaacgacguggugcaggcccugaccgaccugggccugaucuacaccgccaaguaccccaacgccagcgaccuggacagacugacccagagccaccccauccugaacaugaucgacaccaagaagagcagccugaacaucagcggcuacaacuucagccugggcgccgccgugaaggccggcgccugcaugcuggacggcggcaacaugcuggagaccaucaaggugagcccccagaccauggacggcauccugaagagcauccugaaggugaagaagacccugggcauguucaucagcgacacccccggcgagagaaaccccuacgagaacauccuguacaagaucugccugagcggcgacggcuggcccuacaucgccagcagaaccagcaucaccggcagagccugggagaacaccgugguggaccuggagagcgacggcaagccccagaaggccggcagcaacaacagcaacaagagccugcagagcgccggcuucgccgccggccugaccuacagccagcugaugacccugaaggacgccaugcugcagcuggaccccaacgccaagaccuggauggacaucgagggcagacccgaggaccccguggagaucgcccuguaccagcccagcagcggcugcuacauccacuucuucagagagcccaccgaccugaagcaguucaagcaggacgccaaguacagccacggcaucgacgugaccgaccuguucgccgcccagcccggccugaccagcgccgugaucgaggcccugcccagaaacauggugaucaccugccagggcagcgacgacaucaagaagcugcuggagagccagggcagaaaggacaucaagcugaucgacaucgcccugagcaagaccgacagcagaaaguacgagaacgccgugugggaccaguacaaggaccugugccacaugcacaccggcguggugguggagaagaagaagagaggcggcaaggaggagaucaccccccacugcgcccugauggacugcaucauguucgacgccgccgugagcggcggccugaacacccuggugcugagagccgugcugcccagagacaugguguucagaaccagcacccccagaguggugcugugaggacuagucccuguucccagagcccacuuuuuuuucuuuuuuugaaauaaaauagccugucuuucagaucucaaaggcucuuuucagagccaccaaaaaaaaaaaaaaaaaaaaaaaaaaaaaaaaaaaaaaaaaaaaaaaaaaaaaaaaaaaaaaaaaaaaaaaaaaaaaaaaaaaaaaaaaaaaaaaaaaaaa

SEQ ID NO: 16906 - RNA, 1982 nt, Artificial Sequence
  mRNA product Design a-1 (hSL-A100) comprising derived and/or modified sequence from LASV(G3010-SLE-2013;Clade IV)__AIT17345__NP (opt4)
aggagagucccgcagucggcguccagcggcucugcuuguucgugugugugucguugcaggccuuauucaagcuuaccaugagcgccagcaaggagaucaagagcuuccuguggacccagagccugagaagagagcugagcggcuacugcagcaacaucaagcugcagguggugaaggacgcccaggcccugcugcacggccuggacuucagcgaggugagcaacgugcagagacugaugagaaaggagagaagagacgacaacgaccugaagagacugagagaccugaaccaggccgugaacaaccugguggagcugaagagcacccagcagaagagcauccugagagugggcacccugaccagcgacgaccugcugauccuggccgccgaccuggagaagcugaagagcaaggugaccagaaccgagagaccccugagcgccggcguguacaugggcaaccugagcagccagcagcuggaccagagaagagcccugcugagcaugaucggcaugagcagcggcgugcagggcgccagagccggcagagacggcguggugagagugugggacgugaagaacgccgagcugcugaacaaccaguucggcaccaugcccagccugacccuggccugccugaccaagcagggccagguggaccugaacgacguggugcaggcccugaccgaccugggccugaucuacaccgccaaguaccccaacaccagcgaccuggacagacugacccagagccaccccauccugaacaugaucgacaccaagaagagcagccugaacaucagcggcuacaacuucagccugggcgccgccgugaaggccggcgccugcaugcuggacggcggcaacaugcuggagaccaucaaggugagcccccagaccauggacggcauccugaagagcauccugaaggugaagaaggcccugggcauguucaucagcgagacccccggcgagagaaaccccuacgagaacauccuguacaagaucugccugagcggcgacggcuggcccuacaucgccagcagaaccagcaucaccggcagagccugggagaacaccgugguggaccuggagagcgacggcaagccccagaaggccggcagcaacaacagcaacaagagccugcagagcgccggcuucaccgccggccugaccuacagccagcugaugacccugaaggacgccaugcugcagcuggaccccaacgccaagaccuggauggacaucgagggcagacccgaggaccccguggagguggcccuguaccagcccagcagcggcugcuacauccacuucuucagagagcccaccgaccugaagcaguucaagcaggacgccaaguacagccacggcaucgacgugaccgaccuguucgccgcccagcccggccugaccagcgccgugaucgacgcccugcccagaaacauggugaucaccugccagggcagcgacgacaucaagaagcugcuggagagccagggcagaaaggacaucaagcugaucgacaucgcccugagcaagaccgacagcagaaaguacgagaacgccgugugggaccaguacaaggaccugugccacaugcacaccggcguggugguggagaagaagaagagaggcggcaaggaggagaucaccccccacugcgcccugauggacugcaucauguucgacgccgccgugagcggcggccugaacaccagcgugcugagagccgugcugcccagagacaugguguucagaaccagcacccccagaguggugcugugaggacuagucccuguucccagagcccacuuuuuuuucuuuuuuugaaauaaaauagccugucuuucagaucucaaaggcucuuuucagagccaccaaaaaaaaaaaaaaaaaaaaaaaaaaaaaaaaaaaaaaaaaaaaaaaaaaaaaaaaaaaaaaaaaaaaaaaaaaaaaaaaaaaaaaaaaaaaaaaaaaaaa

SEQ ID NO: 16907 - RNA, 1982 nt, Artificial Sequence
  mRNA product Design a-1 (hSL-A100) comprising derived and/or modified sequence from LASV(G502-SLE-2009;Clade IV)__AIT17127__NP (opt4)
aggagagucccgcagucggcguccagcggcucugcuuguucgugugugugucguugcaggccuuauucaagcuuaccaugagcgccagcaaggagaucaagagcuuccuguggacccagagccugagaagagagcugagcggcuacugcagcaacaucaagcugcagguggugaaggacgcccaggcccugcugcacggccuggacuucagcgaggugagcaacgugcagagacugaugagaaaggagagaagagacgacaacgaccugaagagacugagagaccugaaccaggccgugaacaaccugguggagcugaagagcacccagcagaagagcauccugagagugggcacccugaccagcgacgaccugcugauccuggccgccgaccuggagaagcugaagagcaaggugaucagaaccgagagaccccugagcgccggcguguacaugggcaaccugagcagccagcagcuggaccagagaagagcccugcugagcaugaucggcaugagcggcggcaaccagggcgugagagccggcaaggacggcguggugagagugugggacgugaagaacgccgagcugcugaacaaccaguucggcaccaugcccagccugacccuggccugccugaccaagcagggccagguggaccugaacgacgccgugcaggcccugaccgaccugggccugaucuacaccgccaaguaccccaacaccagcgaccuggacagacugacccagagccaccccauccugaacaugaucgacaccaagaagagcagccugaacaucagcggcuacaacuucagccugggcgccgccgugaaggccggcgccugcaugcuggacggcggcaacaugcuggagaccaucaaggugagcccccagaccauggacggcauccugaagagcauccugaaggugaagaaggcccugggcauguucaucagcgacacccccggcgagagaaaccccuacgagaacauccuguacaagaucugccugagcggcgacggcuggcccuacaucgccagcagaaccagcaucaccggcagagccugggagaacaccgugguggaccuggagagcgacggcaagccccagaaggccggcagcaacaacagcaacaagagccugcagagcgccggcuucaccgccggccugaccuacagccagcugaugacccugaaggacgccaugcugcagcuggaccccaacaccaagaccuggauggacaucgagggcagacccgaggaccccguggagaucgcccuguaccagcccagcagcggcugcuacauccacuucuucagagagcccaccgaccugaagcaguucaagcaggacgccaaguacagccacggcaucgacgugaccgaccuguucgccgcccagcccggccugaccagcgccgugaucgacgcccugcccagaaacauggugaucaccugccagggcagcgacgacaucagaaagcugcuggagagccagggcagaaaggacaucaagcugaucgacaucgcccugaacaagaccgacagcagaaaguacgagaacgccgugugggaccaguacaaggaccugugccacaugcacaccggcguggugguggagaagaagaagagaggcggcaaggaggagaucaccccccacugcgcccugauggacugcaucauguucgacgccgccgugagcggcggccugaacaccagcgugcugagagccgugcugcccagagacaugguguucagaaccagcacccccagaguggugcugugaggacuagucccuguucccagagcccacuuuuuuuucuuuuuuugaaauaaaauagccugucuuucagaucucaaaggcucuuuucagagccaccaaaaaaaaaaaaaaaaaaaaaaaaaaaaaaaaaaaaaaaaaaaaaaaaaaaaaaaaaaaaaaaaaaaaaaaaaaaaaaaaaaaaaaaaaaaaaaaaaaaaa

SEQ ID NO: 16908 - RNA, 1982 nt, Artificial Sequence
  mRNA product Design a-1 (hSL-A100) comprising derived and/or modified sequence from LASV(G733-SLE-2010;Clade IV)__AIT17155__NP (opt4)
aggagagucccgcagucggcguccagcggcucugcuuguucgugugugugucguugcaggccuuauucaagcuuaccaugagcgccagcaaggagaucaagagcuuccuguggacccagagccugagaagagagcugagcggcuacugcagcaacaucaagcugcagguggugaaggacgcccaggcccugcugcacggccuggacuucagcgaggugagcaacgugcagagacugaugagaaaggagagaagagacgacaacgaccugaagagacugagagaccugaaccaggccgugaacaaccugguggagcugaagagcacccagcagaagagcgugcugagagugggcacccugaccagcgacgagcugcuggugcuggccgccgaccuggagaagcugaagagcaaggugaucagaaccgagagaccccugagcgccggcguguacaugggcaaccugagcagccagcagcuggaccagagaagagcccugcugagcaugaucggcaugagcggcggcaaccagggcgccagaaccggcagagacggcguggugagagugugggacgugaagaacgccgagcugcugaacaaccaguucggcaccaugcccagccugacccuggccugccugaccaagcagggccagguggaccugaacgacgccgugcaggcccugaccgaccugggccugaucuacaccgccaaguaccccaacaccagcgaccuggacagacugacccagagccaccccauccugaacaugaucgacaccaagaagagcagccugaacaucagcggcuacaacuucagccugggcgccgccgugaaggccggcgccugcaugcuggacggcggcaacaugcuggagaccaucaaggugagcccccagaccauggacggcauccugaagagcauccugaaggugaagaaggcccugggcauguucaucagcgacacccccggcgagagaaaccccuacgagaacauccuguacaagaucugccugagcggcgacggcuggcccuacaucgccagcagaaccagcaucaccggcagagccugggagaacaccgugguggaccuggagagcgacggcaagccccagaaggccggcagcaacaacagcaacaagagccugcagagcgccggcuucaccgccggccugaccuacagccagcugaugacccugaaggacgccaugcugcagcuggaccccaacgccaagaccuggauggacaucgagggcagacccgaggaccccguggagaucgcccuguaccagcccagcagcggcugcuacauccacuucuucagagagcccaccgaccugaagcaguucaagcaggacgccaaguacagccacggcaucgacgugaccgaccuguucgccgcccagcccggccugaccagcgccgugaucgacgcccugcccagaaacauggugaucaccugccagggcagcgacgacaucagaaagcugcuggagagccagggcagaaaggacaucaagcugaucgacaucgcccugagcaagaucgacagcagaaaguacgagaacgccgugugggaccaguacaaggaccugugccacaugcacaccggcguggugguggagaagaagaagagaggcggcaaggaggagaucaccccccacugcgcccugauggacugcaucauguucgacgccgccgugagcggcggccugaacagccuggugcugagagccgugcugcccagagacaugguguucagaaccagcacccccagaguggugcugugaggacuagucccuguucccagagcccacuuuuuuuucuuuuuuugaaauaaaauagccugucuuucagaucucaaaggcucuuuucagagccaccaaaaaaaaaaaaaaaaaaaaaaaaaaaaaaaaaaaaaaaaaaaaaaaaaaaaaaaaaaaaaaaaaaaaaaaaaaaaaaaaaaaaaaaaaaaaaaaaaaaaa

SEQ ID NO: 16909 - RNA, 1982 nt, Artificial Sequence
  mRNA product Design a-1 (hSL-A100) comprising derived and/or modified sequence from MOPV/LASV reassortant(IGS-1;Clade IV)__AFY05578__NP (opt4)
aggagagucccgcagucggcguccagcggcucugcuuguucgugugugugucguugcaggccuuauucaagcuuaccaugagcgccagcaaggagaucaagagcuuccuguggacccagagccugagaagagagcugagcggcuacugcagcaacaucaagcugcagguggugaaggacgcccaggcccugcugcacggccuggacuucagcgaggugagcaacgugcagagacugaugagaaaggagagaagagacgacaacgaccugaagagacugagagaccugaaccaggccgugaacaaccugguggagcugaagagcacccagcagaagagcauccugagagugggcacccugaccagcgacgaccugcugauccuggccgccgaccuggagaagcugagaagcaaggugaucagaaccgagagaccccugagcgccggcguguacaugggcaaccugagcagccagcagcuggaccagagaagagcccugcugaacaugaucggcaugagcggcggcaaccagggcgccagagccggcagagacggcguggugagagugugggacgugaagaacgccgagcugcugagcaaccaguucggcaccaugcccagccugacccuggccugccugaccaagcagggccagguggaccugaacgacgccgugcaggcccugaccgaccugggccugaucuacaccgccaaguaccccaacaccagcgaccuggacagacugacccagagccaccccauccugaacaugaucgacaccaagaagagcagccugaacaucagcggcuacaacuucagccugggcgccgccgugaaggccggcgccugcaugcuggacggcggcaacaugcuggagaccaucaaggugagcccccagaccauggacggcauccugaagagcauccugaaggugaagaaggcccugggcauguucaucagcgacacccccggcgagagaaaccccuacgagaacauccuguacaagaucugccugagcggcgacggcuggcccuacaucgccagcagaaccagcaucaccggcagagccugggagaacaccgugguggaccuggagagcgacggcaagccccagaaggccgacagcaacaacagcagcaagagccugcagagcgccggcuucaccgccggccugaccuacagccagcugaugacccugaaggacgccaugcugcagcuggaccccaacgccaagaccuggauggacaucgagggcagacccgaggaccccguggagaucgcccuguaccagcccagcagcggcugcuacauccacuucuucagagagcccaccgaccugaagcaguucaagcaggacgccaaguacagccacggcaucgacgugaccgaccuguucgccacccagcccggccugaccagcgccgugaucgacgcccugcccagaaacauggugaucaccugccagggcagcgacgacaucagaaagcugcuggagagccagggcagaaaggacaucaagcugaucgacaucgaccugagcaagaccgacagcagaaaguacgagaacgccgugugggaccaguacaaggaccugugccacaugcacaccggcguggugguggagaagaagaagagaggcggcaaggaggagaucaccccccacugcgcccugauggacugcaucauguucgacgccgccgugagcggcggccugaacaccagcgugcugagagccgugcugcccagagacaugguguucagaaccagcacccccagaguggugcugugaggacuagucccuguucccagagcccacuuuuuuuucuuuuuuugaaauaaaauagccugucuuucagaucucaaaggcucuuuucagagccaccaaaaaaaaaaaaaaaaaaaaaaaaaaaaaaaaaaaaaaaaaaaaaaaaaaaaaaaaaaaaaaaaaaaaaaaaaaaaaaaaaaaaaaaaaaaaaaaaaaaaa

SEQ ID NO: 16910 - RNA, 1982 nt, Artificial Sequence
  mRNA product Design a-1 (hSL-A100) comprising derived and/or modified sequence from LASV(LM765-SLE-2012;Clade IV)__AIT17815__NP (opt4)
aggagagucccgcagucggcguccagcggcucugcuuguucgugugugugucguugcaggccuuauucaagcuuaccaugagcgccagcaaggagaucaagagcuuccuguggacccagagccugagaagagagcugagcggcuacugcagcaacaucaagcugcagguggugaaggacgcccaggcccugcugcacggccuggacuucagcgaggugagcaacgugcagagacugaugagaaaggagagaagagacgacaacgaccugaagagacugagagaccugaaccaggccgugaacaaccugguggagcugaagagcacccagcagaagagcauccugagagugggcacccugaccagcgacgaccugcugauccuggccgccgaccuggagaagcugaagagcaaggugaccagaaccgagagaccccugagcgccggcguguacaugggcaaccugagcagccagcagcuggaccagagaagagcccugcuggacaugaucggcaugagcggcagcaaccagggcgccagagccggcagagacggcguggugagagugugggacgugaagaacgccgagcugcugaacaaccaguucggcaccaugcccagccugacccuggccugccugaccaagcagggccagguggaccugaacgacgccgugcaggcccugaccgaccugggccugaucuacaccgccaaguaccccaacaccagcgaccuggacagacugacccagagccaccccauccugaacaugaucgacaccaagaagagcagccugaacaucagcggcuacaacuucagccugggcgccgccgugaaggccggcgccugcaugcuggacggcggcaacaugcuggagaccaucaaggugagcccccagaccauggacggcauccugaagagcauccugaaggugaagaaggcccugggcauguucaucagcgacgcccccggcgagagaaaccccuacgagaacauccuguacaagaucugccugagcggcgacggcuggcccuacaucgccagcagaaccagcaucaccggcagagccugggagaacaccgugguggaccuggagagcgacggcaagccccagaaggccggcagcaacggcagcaacaagagccugcagagcgccggcuucaccgccggccugaccuacagccagcugaugacccugaaggacgccaugcugcagcuggaccccaacgccaagaccuggauggacaucgagggcagacccgaggaccccguggagaucgcccuguaccagcccagcagcggcugcuacauccacuucuucagagagcccaccgaccugaagcaguucaagcaggacgccaaguacagccacggcaucgacgugaccgaccuguucgccgcccagcccggccugaccagcgccgugaucgacgcccugcccagaaacauggugaucaccugccagggcagcgacgacaucagaaagcuguucgagagccagggcagaaaggacaucaagcugaucgacaucgcccugagcaagaccgacagcagaaaguacgagaacgccgugugggaccaguacaaggaccugugccacaugcacaccggcaucgugguggagaagaagaagagaggcggcaaggaggagaucaccccccacugcgcccugauggacugcaucauguucgacgccgccgugagcggcggccugaacaccagcgugcugagagccgugcugcccagagacaugguguucagaaccagcacccccagaguggugcugugaggacuagucccuguucccagagcccacuuuuuuuucuuuuuuugaaauaaaauagccugucuuucagaucucaaaggcucuuuucagagccaccaaaaaaaaaaaaaaaaaaaaaaaaaaaaaaaaaaaaaaaaaaaaaaaaaaaaaaaaaaaaaaaaaaaaaaaaaaaaaaaaaaaaaaaaaaaaaaaaaaaaa

SEQ ID NO: 16911 - RNA, 1982 nt, Artificial Sequence
  mRNA product Design a-1 (hSL-A100) comprising derived and/or modified sequence from LASV(LM776-SLE-2012;Clade IV)__AIT17825__NP (opt4)
aggagagucccgcagucggcguccagcggcucugcuuguucgugugugugucguugcaggccuuauucaagcuuaccaugagcgccagcaaggagaucaagagcuuccuguggacccagagccugagaagagagcugagcagcuacugcagcaacaucaagcugcagguggugaaggacgcccaggcccugcugcacggccuggacuucagcgaggugagcaacgugcagagacugaugagaaaggagagaagagacgacaacgaccugaagagacugagagaccugaaccaggccgugaacaaccugguggagcugaagagcacccagcagaagagcauccugagagugggcacccugaccagcgacgaccugcugauccuggccgccgaccuggagaagcugaagagcaaggugaccagaaccgagagaccccugagcgccggcguguacaugggcaaccugagcagccagcagcuggaccagagaagagcccugcugagcaugaucggcaugagcggcagcaaccagggcgccagagccggcagagacggcguggugagagugugggacgugaagaacgccgagcugcugaacaaccaguucggcaccaugcccagccugacccuggccugccugaccaagcagggccagguggaccugaacgacgccgugcaggcccugaccgaccugggccugaucuacaccgccaaguaccccaacaccagcgaccuggacagacugacccagagccaccccauccugaacaugaucgacaccaagaagagcagccugaacaucagcggcuacaacuucagccugggcgccgccgugaaggccggcgccugcaugcuggacggcggcaacaugcuggagaccaucaaggugagcccccagaccauggacggcauccugaagagcauccugaaggugaagaaggcccugggcauguucaucagcgacacccccggcgagagaaaccccuacgagaacauccuguacaagaucugccugagcggcgacggcuggcccuacaucgccagcagaaccagcaucaccggcagagccugggagaacaccgugguggaccuggagagcgacggcaagccccagaaggccggcagcaacaacagcaacaagagccugcagagcgccggcuucaccgccggccugaccuacagccagcugaugacccugaaggacgccaugcugcagcuggaccccaacgccaagaccuggauggacaucgagggcagacccgaggaccccguggagguggcccuguaccagcccagcagcggcugcuacauccacuucuucagagagcccaccgaccugaagcaguucaagcaggacgccaaguacagccacggcaucgacgugaccgaccuguucgccgcccagcccggccugaccagcgccgugaucgacgcccugcccagaaacauggugaucaccugccagggcagcgacgacaucagaaagcugcuggagagccagggcagaaaggacaucaagcugaucgacaucgcccugagcaagaccgacagcagaaaguacgagaacgccgugugggaccaguacaaggaccugugccacaugcacaccggcguggugguggagaagaagaagagaggcggcaaggaggagaucaccccccacugcgcccugauggacugcaucauguucgacgccgccgugagcggcggccugaacaccagcgugcugagagccgugcugcccagagacaugguguucagaaccagcacccccagaguggugcugugaggacuagucccuguucccagagcccacuuuuuuuucuuuuuuugaaauaaaauagccugucuuucagaucucaaaggcucuuuucagagccaccaaaaaaaaaaaaaaaaaaaaaaaaaaaaaaaaaaaaaaaaaaaaaaaaaaaaaaaaaaaaaaaaaaaaaaaaaaaaaaaaaaaaaaaaaaaaaaaaaaaaa

SEQ ID NO: 16912 - RNA, 1982 nt, Artificial Sequence
  mRNA product Design a-1 (hSL-A100) comprising derived and/or modified sequence from LASV(Mad39;Clade IV)__ANH09723__NP (opt4)
aggagagucccgcagucggcguccagcggcucugcuuguucgugugugugucguugcaggccuuauucaagcuuaccaugagcgccagcaaggagaucaagagcuuccuguggacccagagccugagaagagagcugagcggcuacugcagcaacaucaagcugcagguggugaaggacgcccaggcccugcugcacggccuggacuucagcgaggugagcaacgugcagagacugaugagaaagcagagaagagacgacaacgaccugaagagacugagagaccugaaccaggccgugaacaaccugguggagcugaagagcacccagcagaagagcgugcugagagugggcacccugaccagcgacgaccugcugacccuggccgccgaccuggagaagcugaagagcaaggugaccagaaccgagagaccccugaccgccggcguguacaugggcaaccugagcagccagcagcuggaccagagaagagcccugcugaacaugaucggcaugagcggcggcaaccagggcgccagaaccggcagagacggcguggugagagugugggacgugaagaacgccgagcugcugaacaaccaguucggcaccaugcccagccugacccuggccugccugaccaagcagggccagguggaccugaacgacguggugcaggcccugaccgaccugggccugaucuacaccgccaaguaccccaacaccagcgaccuggacagacugacccagagccaccccauccugaacaugaucgacaccaacaagagcagccugaacaucagcggcuacaacuucagccugggcgccgccgugaaggccggcgccugcaugcuggacggcggcaacaugcuggagaccaucaaggugagcccccagaccauggacggcauccugaagagcauccugaaggugaagaagagccugggcauguucaucagcgacacccccggcgagagaaaccccuacgagaacauccuguacaagaucugccugagcggcgacggcuggcccuacaucgccagcagaaccagcaucaccggcagagccugggagaacaccgugguggaccuggagagcggcggcaagccccagaaggccggcagcaacaacagcaacaagagccugcagagcgccggcuucgccgccggccugaccuacagccagcugaugacccugaaggacgccaugcugcagcuggaccccaacgccaagaccuggauggacaucgagggcagacccgaggaccccguggagaucgcccuguaccagcccaucagcggcugcuacauccacuucuucagagagcccaccgaccugaagcaguucaagcaggacgccaaguacagccacggcaucgacgugaccgaccuguucgccgcccagcccggccugaccagcgccgugaucgaggcccugcccagaaacauggugaucaccugccagggcagcgacgacaucagaaagcuguucgagagccagggcagaaaggacaucaagcugaucgacaucgcccugagcaagaccgacagcagaaaguacgagaacgccgugugggaccaguacaaggaccugugccacaugcacaccggcguggugguggagaagaagaagaagggcggcaaggaggagaucaccccccacugcgcccugauggacugcaucauguucgacgccgccgugagcggcggccugaacacccuggugcugagagccgugcugcccagagacaugguguucagaaccagcacccccaagguggugcugugaggacuagucccuguucccagagcccacuuuuuuuucuuuuuuugaaauaaaauagccugucuuucagaucucaaaggcucuuuucagagccaccaaaaaaaaaaaaaaaaaaaaaaaaaaaaaaaaaaaaaaaaaaaaaaaaaaaaaaaaaaaaaaaaaaaaaaaaaaaaaaaaaaaaaaaaaaaaaaaaaaaaa

SEQ ID NO: 16913 - RNA, 1982 nt, Artificial Sequence
  mRNA product Design a-1 (hSL-A100) comprising derived and/or modified sequence from LASV(Z0947-SLE-2011;Clade IV)__AIT17841__NP (opt4)
aggagagucccgcagucggcguccagcggcucugcuuguucgugugugugucguugcaggccuuauucaagcuuaccaugagcgccagcaaggagaucaagagcuuccuguggacccagagccugagaagagagcugagcggcuacugcagcaacaucaagcugcagguggugaaggacgcccaggcccugcugcacggccuggacuucagcgaggugagcaacgugcagagacugaugagaaaggagagaagagacgacaacgaccugaagagacugagagaccugaaccaggccgugaacaaccugguggagcugaagagcacccagcagaagagcauccugagagugggcacccugaccagcgacgaccugcugauccuggccgccgaccuggagaagcugaagagcaaggugaccagaaccgagagaccccugagcgccggcguguacaugggcaaccugagcagccagcagcuggaccagagaagagcccugcugaacaugaucggcaugagcggcagcaaccagggcgccagaaccggcagagacggcguggugagagugugggacgugaagaacgccgagcugcugaacaaccaguucggcaccaugcccagccugacccuggccugccugaccaagcagggccagguggaccugaacgacgccgugcaggcccugaccgaccugggccugaucuacaccgccaaguaccccaacaccagcgaccuggacagacugacccagagccaccccauccugaacaugaucgacaccaagaagagcagccugaacaucagcggcuacaacuucagccugggcgccgccgugaaggccggcgccugcaugcuggacggcggcaacaugcuggagaccaucaaggugagcccccagaccauggacggcauccugaagagcauccugaaggugaagaaggcccugggcauguucaucagcgacgcccccggcgagagaaaccccuacgagaacauccuguacaagaucugccugagcggcgacggcuggcccuacaucgccagcagaaccagcaucaccggcagagccugggagaacaccgugguggaccuggagagcgacggcaagccccagaaggccggcagcaacggcagcaacaagagccugcagagcgccggcuucaccgccggccugaccuacagccagcugaugacccugaaggacgccaugcugcagcuggaccccaacgccaagaccuggauggacaucgagggcagacccgaggaccccguggagaucgcccuguaccagcccagcagcggcugcuacauccacuucuucagagagcccaccgaccugaagcaguucaagcaggacgccaaguacagccacggcaucgacgugaccgaccuguucgccgcccagcccggccugaccagcgccgugaucgacgcccugcccagaaacauggugaucaccugccagggcagcgacgacaucagaaagcuguucgagagccagggcagaaaggacaucaagcugaucgacaucgcccugagcaagaccgacagcagaaaguacgagaacgccgugugggaccaguacaaggaccugugccacaugcacaccggcaucgugguggagaagaagaagagaggcggcaaggaggagaucaccccccacugcgcccugauggacugcaucauguucgacgccgccgugagcggcggccugaacaccagcgugcugagagccgugcugcccagagacaugguguucagaaccagcacccccagaguggugcugugaggacuagucccuguucccagagcccacuuuuuuuucuuuuuuugaaauaaaauagccugucuuucagaucucaaaggcucuuuucagagccaccaaaaaaaaaaaaaaaaaaaaaaaaaaaaaaaaaaaaaaaaaaaaaaaaaaaaaaaaaaaaaaaaaaaaaaaaaaaaaaaaaaaaaaaaaaaaaaaaaaaaa

SEQ ID NO: 16914 - RNA, 1982 nt, Artificial Sequence
  mRNA product Design a-1 (hSL-A100) comprising derived and/or modified sequence from LASV(Josiah;Clade IV)__NP_694869__NP (opt5)
aggagagucccgcagucggcguccagcggcucugcuuguucgugugugugucguugcaggccuuauucaagcuuaccaugagcgccuccaaggagaucaaaucuuuccuguggacccagagccucagacgggaacuguccggcuacugcucuaacauuaagcugcaaguggucaaagacgcucaggcccugcuccacgggcuggauuuuagcgagguuuccaaugugcagcgccuuaugagaaaggaacggcgcgacgauaacgaccugaaaagacuccgggaucugaaucaggcggugaacaaucuggucgagcucaagucuacacaacaaaagagcauccugcgcgugggaacgcuuaccuccgacgaucugcucauucuggcugccgaccuugaaaaacuuaagagcaaaguuaucagaacagagcggccccucucugccggcguguauauggggaaccuguccagccagcagcuggaucagcgcagagcucuccugaauaugauuggaaugucuggcgggaaccagggagcccgggcuggccgcgacggcgucgugagaguuugggaugugaagaaugccgagcuucugaacaaucaguucgggaccaugccuucccucacacuggcgugucuuaccaaacagggacaagucgaccugaacgaugccgugcaggcucucacagaccugggccugaucuacaccgccaaguauccgaauacgagcgaccucgaucggcugacccagucucaucccauccuuaacaugauugacacaaagaaauccagccugaauaucuccggguacaacuuuucucucggagcugccgugaaggcgggcgccugcaugcuggaugggggaaacaugcuugaaaccauuaaagucagcccucaaacaauggacggcauccugaaguccauucucaaaguuaagaaagcucugggcauguucaucagcgauacccccggggagcgcaauccuuaugaaaacauucuguacaagaucugucucucuggagacggcuggcccuauaucgccuccagaacgagcauuacagggcgggcuugggagaauaccgugguggaucuggagucugacggaaagccucagaaagccgauagcaacaauuccucuaagagccuucaguccgccggcuuuacagcugggcugaccuacagccagcucaugacccugaaagacgcgaugcugcaacuugauccgaacgccaagacauggauggacaucgaaggaagacccgaggacccugucgaaauugcucucuaccagcccucuuccggcugcuauauccacuucuuucgcgagccuacggaucugaaacaguucaagcaggacgccaaguacagccauggcauugaugugaccgaccuguuugccacacaacccgggcucaccucugcuguuaucgaugcccugccgcggaauauggugaucacaugucagggauccgacgauauuagaaaacuucuggaaagccagggccgcaaggacaucaaacucauugauaucgcgcuguccaagaccgacucucggaaauaugagaacgcugucugggaucaguacaaggaccugugccacaugcauacgggggugguuguggagaagaaaaagagaggaggcaaagaagagauuacaccucacugugcccuuauggauugcaucauguucgacgccgcugucagcgggggccucaauaccuccgugcugcgcgccguccugccccgggacaugguguuuagaaccucuacaccucgcguugugcucugaggacuagucccuguucccagagcccacuuuuuuuucuuuuuuugaaauaaaauagccugucuuucagaucucaaaggcucuuuucagagccaccaaaaaaaaaaaaaaaaaaaaaaaaaaaaaaaaaaaaaaaaaaaaaaaaaaaaaaaaaaaaaaaaaaaaaaaaaaaaaaaaaaaaaaaaaaaaaaaaaaaaa

SEQ ID NO: 16915 - RNA, 1982 nt, Artificial Sequence
  mRNA product Design a-1 (hSL-A100) comprising derived and/or modified sequence from LASV(LP;Clade I)__AAF86702__NP (opt5)
aggagagucccgcagucggcguccagcggcucugcuuguucgugugugugucguugcaggccuuauucaagcuuaccaugagcaacuccaaggagaucaaaucuuuccuguggacccagagccucagacgggaacuguccggcuacugcucuaauauuaagcuccaaguggucaaagacgcccaggcucugcuccacgggcuggauuuuagcgagguuuccaacgugcagcgccuuaugagaaagcagaaacgggacgaugccgaccugaagcgccucagagaucugaaucaagcggugaacaaucuggucgaacucaagucuacacagcagaaaaacgugcugcggguuggaacgcuuagcuccgacgaucugaucacccucgcugccgaccuggagaaacuuaaaagcaaggugauucgcacagaaagaccccugucuuccggcgucuauauggggaaucucagcucucagcaacuggaucagcggcgcgcccugcucuccaugaucggaaugagcggcgggccucagggaaacagaaccggcggcgacggggugguucgggugugggaugucaaaaaugcugagcugcuuaacaaucaguucggaacaaugccgucucugacccucgccugucugacaaagcaaggccagguggaccuuaacgaugcugugcaggcccugaccgaccucgggcugauuuacacggcgaaguaucccaauuccagcgaccuggauaugcucacccaaucccauccuauccugggaauggucgacacaaagaagucuagccuuaacaucuccggcuacaauuuuagccugggggccgcuguuaaagccggagcuugcaugcucgauggcggcaacaugcuggagaccauuaaggugucuccccagacaauggacgggauccuuaaauccauucugaaggugaaacgcagccucggaauguucaucucugauaccccuggcgaaagaaaccccuaugagaauauucuguacaagaucugucugagcggggaaggauggccuuauauugccucccggacgucuaucacaggccgcgcgugggagaacacccucgucgaccuggagagcgauaauaagccgcccaaacuuaacuccgccgggagcaauaagucucugcaggcugccggacucaacgcuggccugacauacucccagcugaugacccuuaaagacugcaugcuccaacuggauccuagcucuaagaccuggaucgacauugaaggcagacccgaggauccuguggaaaucgcccuguuucagcccuccagcggguguuacauucacuucuuucgggagccgacagaccucaaacaguucaagcaggacgccaaguauucccauggaaucgauguuacggaccuguuuucuacccaaccuggccuuacaagcgcugugauugaagcgcugcccagaaauaugguccuuaccugccagggguccgaugacaucaaaaagcugcuggagucucagggacgccgggauaucaaacuuauugacaucagccucuccaaggccgauagcagaaaauucgagaacgcugugugggaccaguacaaggaucugugucacaugcauacaggcguuguggucgaaaagaaaaagcgcgggggcaaagaggaaauuaccccucacugcgcccugcucgacuguaucauguuugaugccgcuacgacaggaucucugaauauuaccacccuucgggccgugcugcccagagacauggucuuccgcacauccacccccaaggugguucucugaggacuagucccuguucccagagcccacuuuuuuuucuuuuuuugaaauaaaauagccugucuuucagaucucaaaggcucuuuucagagccaccaaaaaaaaaaaaaaaaaaaaaaaaaaaaaaaaaaaaaaaaaaaaaaaaaaaaaaaaaaaaaaaaaaaaaaaaaaaaaaaaaaaaaaaaaaaaaaaaaaaaa

SEQ ID NO: 16916 - RNA, 1982 nt, Artificial Sequence
  mRNA product Design a-1 (hSL-A100) comprising derived and/or modified sequence from LASV(803213;Clade II)__AAF86704__NP (opt5)
aggagagucccgcagucggcguccagcggcucugcuuguucgugugugugucguugcaggccuuauucaagcuuaccaugagcgccuccaaggaggugaaaucuuuccuguggacccagagccucagacgggaacuguccggcuacugcucuaacaucaaacuucaagucguuaaggacgcucaggcccugcuccacgggcuggauuuuagcgaggugaauaacgugcagcgccuuaugagaaagcagaaacgggacgauggagaccugaagcgccucagagaucugaaucaagcggucaacaaucugguggaacucaaguccacacagcagaaaucuauucugcggguuggcacgcuuaccagcgacgaucugcucacacuggcugccgaccuugagaagcugaaauccaaggugauccgcaccgaaagaccccucagcucuggggucuauaugggaaaccuguccacacagcaacuggagcagcggcgcgcccuccugaauaugauuggcauggugggaggagcucagggcacccagccuggcagagaugggguugugcgggucugggacgugaaaaacccggaucuucugaauaaccaauucggaacaaugcccagccucacccuggccugucuuacgaagcagggccagguggaccugaaugaugcuguccucgcccugaccgaccuggggcucaucuacacagcgaaguauccuaacucuuccgaccuggaucgccuuagccaaucucaucccauucugaauaugguugacaccaaaaaguccagccucaacaucuccggauacaauuuuucucugggcgccgcugugaaagccggggcuugcaugcuugauggaggcaacaugcuggagacaaucaaggugaccccucagacgauggacggcauucucaaaagcauccugaaggucaaaagaucccuggggauguucgugagcgauacacccggagaacggaacccuuaugagaauauucucuacaagaucugucugucuggcgacggguggccguauauugccucccgcaccagcaucguugggagagcgugggaaaacacaaccguggaucuugagucugacggcaagccccagaaagucgggaccgccggaagcaauaagucccugcagucugcuggcuuuccuacaggccucacguacagccaacugaugacccugaaagauuccaugaugcagcuugaccccagcgccaagacauggauugauaucgaggggcggccugaagaccccguggagaucgcucucuaccagccgaugucuggaugcuauauucacuucuuuagagaaccuaccgaccugaaacaguucaagcaagaugccaaguacucccauggcaucgacguugccgaucuguuucccgcucagccugggcucacaagcgcggugauugaggcccugccccgcaacaugguccuuaccugucagggaucugacgauaucaaaaagcugcucgacucccagggccggagagauauuaaacugaucgacaucagccuguccaagguggauucucgcaaauucgaaaaugcugucugggaccaaugcaaggaucuuugucacaugcauacgggggugguuguggagaagaaaaagcggggcggaaaagaggaaauuacaccccacugcgcccucauggacuguaucauguuugaugccgcugucagcggcgggcugaacauuccugugcugagagccguucucccgcgcgacaugguguuccggaccuccucucccaaggucgugcugugaggacuagucccuguucccagagcccacuuuuuuuucuuuuuuugaaauaaaauagccugucuuucagaucucaaaggcucuuuucagagccaccaaaaaaaaaaaaaaaaaaaaaaaaaaaaaaaaaaaaaaaaaaaaaaaaaaaaaaaaaaaaaaaaaaaaaaaaaaaaaaaaaaaaaaaaaaaaaaaaaaaaa

SEQ ID NO: 16917 - RNA, 1985 nt, Artificial Sequence
  mRNA product Design a-1 (hSL-A100) comprising derived and/or modified sequence from LASV(GA391;Clade III)__CAA36646__NP (opt5)
aggagagucccgcagucggcguccagcggcucugcuuguucgugugugugucguugcaggccuuauucaagcuuaccaugagcgccuccaaggaggugagaucuuuccuguggacccagagccuccggcgcgaacuguccggcuacugcucuaacaucaaacuucaagucguuaaggacgcucaggcccugcuccacgggcuggauuuuagcgagguguccaaugugcagagacuuaugcggaaacagaagcgcgacgauggagaccugaaaagacuccgggaucugaaccaagcggucaauaaccugguggaacucaagucuacacagcagaaaagcguucugcgcgugggcacgcuuuccagcgacgaucugcucauucuggcugccgaccuugagaaacugaagucuaaagucaccagaacagaacggccccucuccagcgggguguauaugggaaaucugucuucccagcaacuggaucagcgcagagcccuccugaacaugaucggcaugaccgggguuagcggaggcggcaagggggcuucugacggaauugugcgggucugggaugugaaaaaugccgagcuucugaacaaucaguucggcacaaugccuucccucacccuggcuugucuuacaaagcaggggcaaguggaccugaacgaugccguccaggcgcucaccgaccugggacugaucuacacggccaaguauccgaauagcuccgaccucgaucgccugucucagagccaucccauucuuaacaugaucgacaccaaaaaguccagccugaauaucucuggcuacaacuuuucccucggggcugccguuaaagcuggagccugcaugcuggauggcggcaauaugcuugagacaauuaaggugagcccucaaaccauggacgggauccugaaaucuauucucaaggugaaaaagagccugggaauguucgucuccgauacacccggcgaaagaaacccuuaugagaacauccuguacaagauuugucucucuggggacggauggcccuauaucgcgagccggaccuccauugugggccgcgccugggaaaauacgguuguggaucuggagcaggacaacaaaccucagaagaucgggaauggaggcagcaacaaaucucuucaguccgcuggcuuugccgcugggcugacauacagccaacucaugacccugaaggauuucaaaugcuuuaaucugaucccgaacgccaagacauggauggacauugagggaagacccgaagauccugucgagaucgcccuuuaccagcccucuuccggcuguuaugugcacuucuuucgggaaccuaccgaccucaagcaguucaaacaggacgcuaaguacagccaugggauugauguuaccgaccuguuugcggcccaacccggacugacauccgcugugaucgaggcccucccgagaaauauggucauuacgugccagggcucugaagauauccgcaaacugcuugagagccaggggcggagagacaucaagcugauugauaucacccucuccaaagccgacucucgcaaguucgagaacgcugugugggaucaguuuaaggaccugugucacaugcauacaggcgucgugguugaaaagaagaaacggggaggcaaggaggaaauuaccccucacugcgcccugauggauuguaucauguucgacgcggcugugagcgggggacuugaugccaaaguccucagagugguucugccccgcgacaugguguuccggacauccaccccuaaggucgugcugugaggacuagucccuguucccagagcccacuuuuuuuucuuuuuuugaaauaaaauagccugucuuucagaucucaaaggcucuuuucagagccaccaaaaaaaaaaaaaaaaaaaaaaaaaaaaaaaaaaaaaaaaaaaaaaaaaaaaaaaaaaaaaaaaaaaaaaaaaaaaaaaaaaaaaaaaaaaaaaaaaaaaa

SEQ ID NO: 16918 - RNA, 1982 nt, Artificial Sequence
  mRNA product Design a-1 (hSL-A100) comprising derived and/or modified sequence from LASV(AV;Clade V)__CCA30315__NP (opt5)
aggagagucccgcagucggcguccagcggcucugcuuguucgugugugugucguugcaggccuuauucaagcuuaccaugagcgccuccaaggaggugaaaucuuuccuguggacccagagccucagacgggaacuguccggcuacugcucuaacaucaaacuucaagucguuaaggacgcucaggcccugcuccacgggcuggauuuuagcgagguguccaaugugcagcgccuuaugagaaagcagcggcgcgacgauucugaccugaaaagacuccgggaucugaaccaagcggucaauaaccugguggaacucaagagcacacagcagaaguccguucugcgcgugggaacgcuuagcucugacgaucugcucacccuggcugccgaccuugagaaacugaaguccaaagucacaagaaccgaacggccccucagcucuggcguguauauggggaaucuguccagccagcaacuggaucagcgcagagcccuccugaaccuuauuggaaugacaaauggcucucaggggucccaggcuggacgggacggcguugugcgcgucugggaugugaagaacgccgagcugcucaauaaccaauucggcaccaugccuagccugacacuugcuugucugaccaaacagggacagguggaccucaaugaugucguucaagcccugacggaccuggggcucaucuacaccgcgaaguauccgaacacauccgaccuggauagacuuacccagucucaucccauucugaauaugaucgacacaaagaaaagcucccucaacauuagcggcuacaauuuuucucugggggccgcugugaaggccggagcuugcaugcuugauggcgggaacaugcuggagaccaucaaaguguccccucagagcauggacggaauccucaagucuauucugaaagucaagcgggcccugggcauguucgugagcgauacgcccggcgaacgcaacccuuaugagaauauccucuacaaaauuugucuguccggggacggauggcccuauaucgcgucuagaacaagcauuguuggccgggccugggaaaacaccguggucgaucuugagacagacgggaagccucagaagaucggauccggcaauagcaacaaaucucugcaauccgcuggguuuagcgccggacucaccuacucucagcugaugacccugaaggaugcuaugcuucagcucgacccgaaugccaaaacauggauggauauugagggcagacccgaagacccuguggagguugcccuguaccagcccaucuccggcugcuauauccacuucuuucgcgaaccuacggaccugaagcaauucaaacaggaugcuaaguacagccaugggauugacaucgcggaucucuuugccgcucagcccggacugaccuccgccgugauugaggcccuuccgcggaacauggucaucacaugucagggcucugaagacauuaagaaacugcucgagagccaagggagaaaggauaucaaacugaucgacauugcucuguccaagaucgauucucgcaaauucgagaaugccgugugggaccaguauaaggaucuuugccacaugcauaccggagucgugguugaaaagaaaaagcggggcgggaaagaggaaauuacaccucacugugcgcucauggacugcaucauguuugaugcugccgugagcggcggacugaacacccugguccucagagccgugcugccccgcgacaugguuuuccggacguccacaccuagagugguccuuugaggacuagucccuguucccagagcccacuuuuuuuucuuuuuuugaaauaaaauagccugucuuucagaucucaaaggcucuuuucagagccaccaaaaaaaaaaaaaaaaaaaaaaaaaaaaaaaaaaaaaaaaaaaaaaaaaaaaaaaaaaaaaaaaaaaaaaaaaaaaaaaaaaaaaaaaaaaaaaaaaaaaa

SEQ ID NO: 16919 - RNA, 1982 nt, Artificial Sequence
  mRNA product Design a-1 (hSL-A100) comprising derived and/or modified sequence from LASV(Togo/2016/7082;Clade VI)__AMR44578__NP (opt5)
aggagagucccgcagucggcguccagcggcucugcuuguucgugugugugucguugcaggccuuauucaagcuuaccaugagcaacuccaaggaggugaaaucuuuccuguggacccagagccucagacgggaacuguccggcuacugcucuaauaucaaacuucaagucguuaaagacgcccaggcucugcuccacgggcuggauuuuagcgagguguccaacgugcagcgccuuaugagaaagcagaaacgggacgauggagaccugaagcgccucagagaucugaaucaagccgucaacaaucugguggaacucaagucuguucagcagaaaagcauucugcgggugggcacacuuacguccgacgaucugcucacccuggcggcugaccuugagaagcugaaaagcaaggucacacgcaccgaaagaccccucucuuccgggguguauaugggaaaccugagcucucagcaacuggaucagcggcgcgcccuccuguccaugaucggcaugagcgggggaaaucagaacucucagccuaaaggcgacggcguugugagagucugggaugugaagaaugccgaccuucugaacaaucaauucgggacaaugccgucccucacccuggcuugucuuacaaagcagggacagguggaucugaacgacgccguccaagcucucaccgaccugggccugauuuacacggccaaauaucccaauagcuccgaucucgaccggcugucucagagccauccuauccuuaacaugauugauaccaagaaauccagccugaauaucucuggguacaacuuuucccucggagcggccaucaagacaggcgcuugcaugcuggacgggggaaacaugcuugagaccauuaaaguuacaccccagaccauggauggcauccucaagagcauucugaaagugaagcgcucucugggcauguucaucagcgacacgccuggggagagaaaucccuaugaaaacauucuguacaagaucugucucuccggagauggcuggccuuauauugccucucggacagcuaucaucgggcgcgccugggagaauaccguggucgaccuggaaagcgauuccaaaccgcagaagauuggaagcaacggcucuaauaaaucccuucaaagcgcgggguuugcccccggacugacauacucucagcucaugacccugaaggacuccaugcugcagcuugauccuaacgcuaaaaccuggaucgacauugagggcagacccgaggacccuguggaaguugcccucuuccagcccaucagcggcugcuacauucacuuuuuccgggagccgacagaucugaagcaauuuaagcaggacgcuaaauauucccaugggaucgaugugacggaccuguucgccgcccagccuggacucaccucugcugucaucgaagcgcugcccagaaauauggugcuuacaugucagggcagcgaugacauuaagaaacugcucgauucccaagggcgccgggacaucaagcugauugauguuucucugaacaaaaucgacagcagaaaguuugagaaugccgugugggaucaguacaaggaccuuugccacaugcauaccggagucguggucgaaaagaagaaaaagggcgggaaagaggagauuacaccucacugugcucuccuggauugcaucauguucgacgccgccguguccggcggacugaacgcuaccguucuccgcgccgugcugccccgggacauggucuuuagaacgagcucucccaaggugguucuuugaggacuagucccuguucccagagcccacuuuuuuuucuuuuuuugaaauaaaauagccugucuuucagaucucaaaggcucuuuucagagccaccaaaaaaaaaaaaaaaaaaaaaaaaaaaaaaaaaaaaaaaaaaaaaaaaaaaaaaaaaaaaaaaaaaaaaaaaaaaaaaaaaaaaaaaaaaaaaaaaaaaaa

SEQ ID NO: 16920 - RNA, 1982 nt, Artificial Sequence
  mRNA product Design a-1 (hSL-A100) comprising derived and/or modified sequence from LASV(KAK-428;Clade n.d. (VII))__ANH09741__NP (opt5)
aggagagucccgcagucggcguccagcggcucugcuuguucgugugugugucguugcaggccuuauucaagcuuaccaugagcaacuccaaggaggugaaaucuuuccuguggacccagagccucagacgggaacuguccggcuacugcacaaauaucaaacuucaagucguuaaggacgcccaggcucugcuccacgggcuggauuuuucugaggugagcaacgugcagcgccuuaugagaaagcagaaacgggacgauaaugaccugaagcgccucagagaucugaaccaagccgucaauaaccugguggaacucaaguccguucagcagaaaucugugcugaaggucggaacgcuuaauagcgacgaucugcucacccuggcggcugaccuugagaaacugaaguccaaagugguucggacagaacgcccccucagcucuggcguguauauggggaaccuguccagccagcaacuggaucagagacgggcccuccugaauaugauuggaauggccggcgggucucagggaaaccagccuucccgcgacggcgucgugagagugugggaugucaagaaugcugaccuucugaacaaucaauucggcaccaugccgagccucacacuggccugucuuaccaagcaggggcagguugaucugaacgacguggugcucgcucugacagaccugggacucaucuacaccgccaaauaucccaauucuuccgaucuggaccggcuuagccaaaaccauccuguccugaacaugauugaugugaauaaguccucucucaacaucagcggcuacaauuuuucccugggggcggccguuaaagcuggagccugcaugcuugacggcgggaacaugcuggagacgauuaagaucagcccccagaccguggauggaauccucaaaucuauucugaaggucaaacgcgcucugggcauguucguguccgacacaccuggcgagagaaaucccuaugaaaacauccucuacaagguuugucugagcgggaauggauggccuuauauugccucucggaccagcaucgugggccgcgcgugggagaacacagucguggaucuugaauccaauaagaaccagccgaaagucgggaauaacggaucuaauaagaugcugcagagcuccggcuuugccaccgggcucacguacagccaacugaugacacugagagacucuaugcuucagcucgaucccaccgcuaaaacauggauugacaucgagggacggccugaggaucccguggaacuggcccuguuccagccuuccagcggcugcuacauucacuuuuucagagagcccaccgaccucaagcaguuuaaacaagacgcuaaguauucucauggcaucgauguuaacgaccuguucuccgcccagccggggcuuaccagcgccgugcuggaagcucucccucgcaauaugguccugacaugucagggauccgaugacauccggaagcugcuugauucucaggacagaaaagauauuaagcucaucgacauuagccuguccaaagcggaugcccgcaaguuugagaacgacgugugggaucaauucaaagaccugugccacaugcauacgggcaucguuguggaaaagaagaaaaagggagggaaacaggagaugacaccccacugugcucuccuggauugcauuauguuugacgccgccgucucuggcgggcuuaacgugccuacccugcgggcugugcuccccaccgacaugguuuucagaacaaucaccacgaaggucgugcugugaggacuagucccuguucccagagcccacuuuuuuuucuuuuuuugaaauaaaauagccugucuuucagaucucaaaggcucuuuucagagccaccaaaaaaaaaaaaaaaaaaaaaaaaaaaaaaaaaaaaaaaaaaaaaaaaaaaaaaaaaaaaaaaaaaaaaaaaaaaaaaaaaaaaaaaaaaaaaaaaaaaaa

SEQ ID NO: 16921 - RNA, 1982 nt, Artificial Sequence; identical to SEQ ID NO: 16915
  mRNA product Design a-1 (hSL-A100) comprising derived and/or modified sequence from LASV(Pinneo-NIG-1969;Clade I)__AIT17837__NP (opt5)
